United States Patent Application Publication US 2005/0244851 A1 - sequence listing, part 143

SEQ ID NO: 5583395 - DNA, 25 bp, Homo sapien
aggactagagacatgagctcctcct

SEQ ID NO: 5583396 - DNA, 25 bp, Homo sapien
tgtattaaaaggtgttgggacagga

SEQ ID NO: 5583397 - DNA, 25 bp, Homo sapien
gtctgggctataagagtcctgagag

SEQ ID NO: 5583398 - DNA, 25 bp, Homo sapien
tttaataacatgggcaaagaggatg

SEQ ID NO: 5583399 - DNA, 25 bp, Homo sapien
cttgctagcaagactgagatgtaaa

SEQ ID NO: 5583400 - DNA, 25 bp, Homo sapien
gcagagtaagaagtgatgaaaatta

SEQ ID NO: 5583401 - DNA, 25 bp, Homo sapien
tactaagtacacacaaagaggttct

SEQ ID NO: 5583402 - DNA, 25 bp, Homo sapien
acagaggagtgttgtatacataggt

SEQ ID NO: 5583403 - DNA, 25 bp, Homo sapien
tcatggcctcatctctggggacagg

SEQ ID NO: 5583404 - DNA, 25 bp, Homo sapien
tactctggggtttgaacaagctcat

SEQ ID NO: 5583405 - DNA, 25 bp, Homo sapien
caagctcatatgagcacatgggctc

SEQ ID NO: 5583406 - DNA, 25 bp, Homo sapien
accttctgggccagcgctgatgtgt

SEQ ID NO: 5583407 - DNA, 25 bp, Homo sapien
atgttggtttgctgcgatgcatgtt

SEQ ID NO: 5583408 - DNA, 25 bp, Homo sapien
tttgctacacaggtatgcatgtgcc

SEQ ID NO: 5583409 - DNA, 25 bp, Homo sapien
attctaaccagggatggtagaggaa

SEQ ID NO: 5583410 - DNA, 25 bp, Homo sapien
gggctcaaaaaacaaagcgttgcta

SEQ ID NO: 5583411 - DNA, 25 bp, Homo sapien
ccctcatctgcagcgtggataggtg

SEQ ID NO: 5583412 - DNA, 25 bp, Homo sapien
ctctgaaagagaccagtgccgtttg

SEQ ID NO: 5583413 - DNA, 25 bp, Homo sapien
tctaaagtactgtcatgtcatggcc

SEQ ID NO: 5583414 - DNA, 25 bp, Homo sapien
atgtctttacactggaaaatgccac

SEQ ID NO: 5583415 - DNA, 25 bp, Homo sapien
caccagtttgtgagaactataactc

SEQ ID NO: 5583416 - DNA, 25 bp, Homo sapien
gcttgcaaaggcccatgcacaaaac

SEQ ID NO: 5583417 - DNA, 25 bp, Homo sapien
taaacagtggatttcagacagtaac

SEQ ID NO: 5583418 - DNA, 25 bp, Homo sapien
gagatcgtagccagcaaacaatgtc

SEQ ID NO: 5583419 - DNA, 25 bp, Homo sapien
tttaacagcaaacacttgtgaacta

SEQ ID NO: 5583420 - DNA, 25 bp, Homo sapien
ttctggcacaataaatgcacctggg

SEQ ID NO: 5583421 - DNA, 25 bp, Homo sapien
aatgccacacagcttaatggattca

SEQ ID NO: 5583422 - DNA, 25 bp, Homo sapien
gcacaaaactagcctgccaaggggc

SEQ ID NO: 5583423 - DNA, 25 bp, Homo sapien
acgtttatatagcttgcaaaggccc

SEQ ID NO: 5583424 - DNA, 25 bp, Homo sapien
aataatgttttgaatggccccagtc

SEQ ID NO: 5583425 - DNA, 25 bp, Homo sapien
gtcagcctgatagtaggaagaaggc

SEQ ID NO: 5583426 - DNA, 25 bp, Homo sapien
gtgctctgtgagctgctaagtttct

SEQ ID NO: 5583427 - DNA, 25 bp, Homo sapien
cattaggtcagcctgatagtaggaa

SEQ ID NO: 5583428 - DNA, 25 bp, Homo sapien
acttacgctctaggtctggagtccc

SEQ ID NO: 5583429 - DNA, 25 bp, Homo sapien
gattaagacaaatcacctgctttgc

SEQ ID NO: 5583430 - DNA, 25 bp, Homo sapien
caaaaccagatggaattgccagaga

SEQ ID NO: 5583431 - DNA, 25 bp, Homo sapien
tggagtcccaccctgtagaccctaa

SEQ ID NO: 5583432 - DNA, 25 bp, Homo sapien
cgagcagcccaaccccattaggtca

SEQ ID NO: 5583433 - DNA, 25 bp, Homo sapien
tcttgaggcccccatagcctctatc

SEQ ID NO: 5583434 - DNA, 25 bp, Homo sapien
acacagggccacaacatccatactt

SEQ ID NO: 5583435 - DNA, 25 bp, Homo sapien
ctgtagaccctaagtggctgggtgg

SEQ ID NO: 5583436 - DNA, 25 bp, Homo sapien
caaagcaacctaggcatgatgtgcc

SEQ ID NO: 5583437 - DNA, 25 bp, Homo sapien
taaggagaagaagatagtttgattt

SEQ ID NO: 5583438 - DNA, 25 bp, Homo sapien
caggtggatgatctgtggccatcca

SEQ ID NO: 5583439 - DNA, 25 bp, Homo sapien
gctatttgaacggctaaggagaaga

SEQ ID NO: 5583440 - DNA, 25 bp, Homo sapien
agggttaactgtttggcaggtggat

SEQ ID NO: 5583441 - DNA, 25 bp, Homo sapien
taagactgctttaggaggaagtgat

SEQ ID NO: 5583442 - DNA, 25 bp, Homo sapien
gggaagaaacgtctctgtagctggt

SEQ ID NO: 5583443 - DNA, 25 bp, Homo sapien
aactcagatgttctagaaggaagca

SEQ ID NO: 5583444 - DNA, 25 bp, Homo sapien
acacctgttgaaggccagtgatgtc

SEQ ID NO: 5583445 - DNA, 25 bp, Homo sapien
aaacgaaaagaggcctgtgtatttc

SEQ ID NO: 5583446 - DNA, 25 bp, Homo sapien
ctgagatcacagactatgactatgc

SEQ ID NO: 5583447 - DNA, 25 bp, Homo sapien
ctggtattcaaggaaagcccgcctt

SEQ ID NO: 5583448 - DNA, 25 bp, Homo sapien
tttctgagtgctgaaggaaaatagt

SEQ ID NO: 5583449 - DNA, 25 bp, Homo sapien
tggcaaagactcaaattcaaaacac

SEQ ID NO: 5583450 - DNA, 25 bp, Homo sapien
agcccgccttatgaatggcaaagac

SEQ ID NO: 5583451 - DNA, 25 bp, Homo sapien
aacacagactaatgagagttttcaa

SEQ ID NO: 5583452 - DNA, 25 bp, Homo sapien
accaaggacaggaaataatcgtgga

SEQ ID NO: 5583453 - DNA, 25 bp, Homo sapien
gtgtgtgggtatgcacaatttgtgt

SEQ ID NO: 5583454 - DNA, 25 bp, Homo sapien
atatctgtggtatatgtgtgtgggt

SEQ ID NO: 5583455 - DNA, 25 bp, Homo sapien
ctgaaggaagagataatttaaagaa

SEQ ID NO: 5583456 - DNA, 25 bp, Homo sapien
acattgaagatgtgtaaggtctaac

SEQ ID NO: 5583457 - DNA, 25 bp, Homo sapien
ggaaactcagagttatctggtattc

SEQ ID NO: 5583458 - DNA, 25 bp, Homo sapien
tgcaagtgactaaatcctgggcgga

SEQ ID NO: 5583459 - DNA, 25 bp, Homo sapien
aatagtcaaagaaacgaacatattc

SEQ ID NO: 5583460 - DNA, 25 bp, Homo sapien
caagaacgaatctttgcaaaggcat

SEQ ID NO: 5583461 - DNA, 25 bp, Homo sapien
cggaggtgattaacgcacccagcaa

SEQ ID NO: 5583462 - DNA, 25 bp, Homo sapien
acgcacccagcaacatatttcattt

SEQ ID NO: 5583463 - DNA, 25 bp, Homo sapien
gccatcctagactataaagaggtcc

SEQ ID NO: 5583464 - DNA, 25 bp, Homo sapien
tagatacttggcagcattttatgtc

SEQ ID NO: 5583465 - DNA, 25 bp, Homo sapien
actataaagaggtcctgcaagtgac

SEQ ID NO: 5583466 - DNA, 25 bp, Homo sapien
ccctccagacagtacttgacatgac

SEQ ID NO: 5583467 - DNA, 25 bp, Homo sapien
ataaaacaagagacagttaaatgcc

SEQ ID NO: 5583468 - DNA, 25 bp, Homo sapien
gcttcaggcacacataaaattgctt

SEQ ID NO: 5583469 - DNA, 25 bp, Homo sapien
gaagaaaatcgagtagagaactaga

SEQ ID NO: 5583470 - DNA, 25 bp, Homo sapien
gagtaaataagatgaaggtcaattc

SEQ ID NO: 5583471 - DNA, 25 bp, Homo sapien
agaattacagaaacctaagaaatac

SEQ ID NO: 5583472 - DNA, 25 bp, Homo sapien
attcagaaattcagcactatcaggc

SEQ ID NO: 5583473 - DNA, 25 bp, Homo sapien
agcatctagtacagttcctgacaca

SEQ ID NO: 5583474 - DNA, 25 bp, Homo sapien
tagagaactagaattacagaaacct

SEQ ID NO: 5583475 - DNA, 25 bp, Homo sapien
ttctaagaagggttctggctcagaa

SEQ ID NO: 5583476 - DNA, 25 bp, Homo sapien
cggaaatgaattatacatggatacc

SEQ ID NO: 5583477 - DNA, 25 bp, Homo sapien
aagctgttagcttggtctgttgcgc

SEQ ID NO: 5583478 - DNA, 25 bp, Homo sapien
ttggtctgttgcgcttactgctata

SEQ ID NO: 5583479 - DNA, 25 bp, Homo sapien
cacacaagaaaatgcacggaaatga

SEQ ID NO: 5583480 - DNA, 25 bp, Homo sapien
aacttgcttgaaagggcaatgtttc

SEQ ID NO: 5583481 - DNA, 25 bp, Homo sapien
tacagctgcctgtgctttgaaggta

SEQ ID NO: 5583482 - DNA, 25 bp, Homo sapien
ggtatttaatgttgagggatattgt

SEQ ID NO: 5583483 - DNA, 25 bp, Homo sapien
aaccaaataagcatgttaaggaaac

SEQ ID NO: 5583484 - DNA, 25 bp, Homo sapien
tgtgctttgaaggtaaaaacccaga

SEQ ID NO: 5583485 - DNA, 25 bp, Homo sapien
cacatgcccagtggtactgatggct

SEQ ID NO: 5583486 - DNA, 25 bp, Homo sapien
ctggtatagcatatgaaagggagct

SEQ ID NO: 5583487 - DNA, 25 bp, Homo sapien
tgaaagggagctatatctgccccca

SEQ ID NO: 5583488 - DNA, 25 bp, Homo sapien
ctctgacactccaagttgtgaagac

SEQ ID NO: 5583489 - DNA, 25 bp, Homo sapien
actgatggctaaaaagatggtattt

SEQ ID NO: 5583490 - DNA, 25 bp, Homo sapien
taaaaacgaccaagaatagtcactc

SEQ ID NO: 5583491 - DNA, 25 bp, Homo sapien
gcctactgttaacccctgaagccat

SEQ ID NO: 5583492 - DNA, 25 bp, Homo sapien
ctgggctgtttaactggcaagctgc

SEQ ID NO: 5583493 - DNA, 25 bp, Homo sapien
caagatgaggttacacaatgccacc

SEQ ID NO: 5583494 - DNA, 25 bp, Homo sapien
ttaaaacaagaatcacaagtgcttc

SEQ ID NO: 5583495 - DNA, 25 bp, Homo sapien
cagaggcaaacaattctaggcctac

SEQ ID NO: 5583496 - DNA, 25 bp, Homo sapien
ttcccgaatgtgcaagatgaggtta

SEQ ID NO: 5583497 - DNA, 25 bp, Homo sapien
ggctgggacattagtaacctttgta

SEQ ID NO: 5583498 - DNA, 25 bp, Homo sapien
gcacaggcttgcaagcccaccaggt

SEQ ID NO: 5583499 - DNA, 25 bp, Homo sapien
acaagtgcttctagctccaggagtc

SEQ ID NO: 5583500 - DNA, 25 bp, Homo sapien
gtcaggcgccatgaatttcagaggc

SEQ ID NO: 5583501 - DNA, 25 bp, Homo sapien
tctcctaagcatccgtttcccgaat

SEQ ID NO: 5583502 - DNA, 25 bp, Homo sapien
cgccgtaagggcagaccgtcgagac

SEQ ID NO: 5583503 - DNA, 25 bp, Homo sapien
gtctcgacggtctgcccttacggcg

SEQ ID NO: 5583504 - DNA, 25 bp, Homo sapien
gcaaagatttcatgccaggctgcaa

SEQ ID NO: 5583505 - DNA, 25 bp, Homo sapien
ttagcaacttgcagagtccccacca

SEQ ID NO: 5583506 - DNA, 25 bp, Homo sapien
ggagcccaggacatggctctcgtct

SEQ ID NO: 5583507 - DNA, 25 bp, Homo sapien
gttctgttagtacggaggaaagaga

SEQ ID NO: 5583508 - DNA, 25 bp, Homo sapien
gcccgctattggaactgggcagagg

SEQ ID NO: 5583509 - DNA, 25 bp, Homo sapien
ctcgtctgcccgctattggaactgg

SEQ ID NO: 5583510 - DNA, 25 bp, Homo sapien
gggcaggagtgatccccactaaaag

SEQ ID NO: 5583511 - DNA, 25 bp, Homo sapien
ctgggttagcaacttgcagagtccc

SEQ ID NO: 5583512 - DNA, 25 bp, Homo sapien
tttcatgccaggctgcaatggggaa

SEQ ID NO: 5583513 - DNA, 25 bp, Homo sapien
gcccaggacatggctctcgtctgcc

SEQ ID NO: 5583514 - DNA, 25 bp, Homo sapien
acgctgggttagcaacttgcagagt

SEQ ID NO: 5583515 - DNA, 25 bp, Homo sapien
aaggcccagggtccttcctgtgttc

SEQ ID NO: 5583516 - DNA, 25 bp, Homo sapien
acaggagcttccctgcaagtctctc

SEQ ID NO: 5583517 - DNA, 25 bp, Homo sapien
atgtggcagctgagtccccttcaca

SEQ ID NO: 5583518 - DNA, 25 bp, Homo sapien
ctttcctcacgctctcaggacagct

SEQ ID NO: 5583519 - DNA, 25 bp, Homo sapien
cagagaggggtgcatttattttctc

SEQ ID NO: 5583520 - DNA, 25 bp, Homo sapien
aagctgaatttaagtagtctggggc

SEQ ID NO: 5583521 - DNA, 25 bp, Homo sapien
aatttaagtagtctggggctggtat

SEQ ID NO: 5583522 - DNA, 25 bp, Homo sapien
cccagggtccttcccgcgttctgcg

SEQ ID NO: 5583523 - DNA, 25 bp, Homo sapien
gctgagtccccttcacaggagcttc

SEQ ID NO: 5583524 - DNA, 25 bp, Homo sapien
tccactgtccttagggtgtgaccct

SEQ ID NO: 5583525 - DNA, 25 bp, Homo sapien
tgtcccagcaccagccatcacatcc

SEQ ID NO: 5583526 - DNA, 25 bp, Homo sapien
acggagacactaccgagaaccagat

SEQ ID NO: 5583527 - DNA, 25 bp, Homo sapien
gtcccacctgacagccgtctgcctg

SEQ ID NO: 5583528 - DNA, 25 bp, Homo sapien
tacggctcggccatctacacctacc

SEQ ID NO: 5583529 - DNA, 25 bp, Homo sapien
cggggcaagttcgtatcgctcttct

SEQ ID NO: 5583530 - DNA, 25 bp, Homo sapien
cgagctgtctgttgcatgcggttca

SEQ ID NO: 5583531 - DNA, 25 bp, Homo sapien
gggcacgtgtgggtcccacctgaca

SEQ ID NO: 5583532 - DNA, 25 bp, Homo sapien
accctcaggaataagaaagtgaagg

SEQ ID NO: 5583533 - DNA, 25 bp, Homo sapien
cacttcatctgtgagctgccggcgt

SEQ ID NO: 5583534 - DNA, 25 bp, Homo sapien
cgtggtcatcctgctgctgccgttt

SEQ ID NO: 5583535 - DNA, 25 bp, Homo sapien
atcctggcctcctacggtgccgtgg

SEQ ID NO: 5583536 - DNA, 25 bp, Homo sapien
ctacaccgtggtcacacctgctctc

SEQ ID NO: 5583537 - DNA, 25 bp, Homo sapien
aaatgactcaggaggttttataagt

SEQ ID NO: 5583538 - DNA, 25 bp, Homo sapien
acttataaaacctcctgagtcattt

SEQ ID NO: 5583539 - DNA, 25 bp, Homo sapien
gttccagaggcactaagtgaacaga

SEQ ID NO: 5583540 - DNA, 25 bp, Homo sapien
acccaggtaatcagcataatgccca

SEQ ID NO: 5583541 - DNA, 25 bp, Homo sapien
gcataatgcccaatagtcaggtttt

SEQ ID NO: 5583542 - DNA, 25 bp, Homo sapien
ggtgaagaagactagcaacctatcc

SEQ ID NO: 5583543 - DNA, 25 bp, Homo sapien
ttggaggatcataggcaagttttca

SEQ ID NO: 5583544 - DNA, 25 bp, Homo sapien
ttgtgcaatctgacgaacacttagt

SEQ ID NO: 5583545 - DNA, 25 bp, Homo sapien
aataccgtttaaatggtggtgaaga

SEQ ID NO: 5583546 - DNA, 25 bp, Homo sapien
tactagttcagaaggtagagttgga

SEQ ID NO: 5583547 - DNA, 25 bp, Homo sapien
attataagatgttccagaggcacta

SEQ ID NO: 5583548 - DNA, 25 bp, Homo sapien
aggcaagttttcagagaaaccgctt

SEQ ID NO: 5583549 - DNA, 25 bp, Homo sapien
atgttacatgagcaaattgtgtgtc

SEQ ID NO: 5583550 - DNA, 25 bp, Homo sapien
agcaggaaagatagacacatataaa

SEQ ID NO: 5583551 - DNA, 25 bp, Homo sapien
aaatacgacagtaactagaagatta

SEQ ID NO: 5583552 - DNA, 25 bp, Homo sapien
tttccaggctgtataagttagatta

SEQ ID NO: 5583553 - DNA, 25 bp, Homo sapien
agttagattatcaggagccacatac

SEQ ID NO: 5583554 - DNA, 25 bp, Homo sapien
agtatctgaggtccatcactgaact

SEQ ID NO: 5583555 - DNA, 25 bp, Homo sapien
tgcttcctcatagttagaggcagtg

SEQ ID NO: 5583556 - DNA, 25 bp, Homo sapien
tgcagactgtggatccagacatcct

SEQ ID NO: 5583557 - DNA, 25 bp, Homo sapien
ataaaatgttttggacttggtttgc

SEQ ID NO: 5583558 - DNA, 25 bp, Homo sapien
ctcaataatatgaacagcaggaaag

SEQ ID NO: 5583559 - DNA, 25 bp, Homo sapien
tcaggagccacatacttgaactctt

SEQ ID NO: 5583560 - DNA, 25 bp, Homo sapien
ccagacatcctaagttgaaatccta

SEQ ID NO: 5583561 - DNA, 25 bp, Homo sapien
tatctagtattaattcgtcacccat

SEQ ID NO: 5583562 - DNA, 25 bp, Homo sapien
gtcttcttagtcatatatgcccgtc

SEQ ID NO: 5583563 - DNA, 25 bp, Homo sapien
ttgtaacacacaagttgtaaatgat

SEQ ID NO: 5583564 - DNA, 25 bp, Homo sapien
tagtcatatatgcccgtctacattt

SEQ ID NO: 5583565 - DNA, 25 bp, Homo sapien
cgtcacccatttgatacatggtaat

SEQ ID NO: 5583566 - DNA, 25 bp, Homo sapien
ttcaagaactctatccaatatatac

SEQ ID NO: 5583567 - DNA, 25 bp, Homo sapien
tgatgtggacatgaagtaaatattc

SEQ ID NO: 5583568 - DNA, 25 bp, Homo sapien
tatgcttaaaaatgtcttcttagtc

SEQ ID NO: 5583569 - DNA, 25 bp, Homo sapien
tgtctttaagactttgaataatgtt

SEQ ID NO: 5583570 - DNA, 25 bp, Homo sapien
cacacaagttgtaaatgattatgta

SEQ ID NO: 5583571 - DNA, 25 bp, Homo sapien
tggtaatttttttcatgatgtggac

SEQ ID NO: 5583572 - DNA, 25 bp, Homo sapien
tgtgaagcgtacttactttgcagat

SEQ ID NO: 5583573 - DNA, 25 bp, Homo sapien
ctctaaagcattaagatggattatt

SEQ ID NO: 5583574 - DNA, 25 bp, Homo sapien
acctccattacaaagtcatgaatcc

SEQ ID NO: 5583575 - DNA, 25 bp, Homo sapien
atggagtctacaacaatgctcattc

SEQ ID NO: 5583576 - DNA, 25 bp, Homo sapien
atgaccataaaaccaataaagctac

SEQ ID NO: 5583577 - DNA, 25 bp, Homo sapien
aaagccaggagtaattaaacaactc

SEQ ID NO: 5583578 - DNA, 25 bp, Homo sapien
aacctcaggatttacagtgtcacaa

SEQ ID NO: 5583579 - DNA, 25 bp, Homo sapien
taataatagacacaagaaataactt

SEQ ID NO: 5583580 - DNA, 25 bp, Homo sapien
ttccaggatctggaaataatgattt

SEQ ID NO: 5583581 - DNA, 25 bp, Homo sapien
tgcagattccttatgtgaagcgtac

SEQ ID NO: 5583582 - DNA, 25 bp, Homo sapien
tttaaatgataatggagtctacaac

SEQ ID NO: 5583583 - DNA, 25 bp, Homo sapien
tctgactcctctcagcgtgcaacag

SEQ ID NO: 5583584 - DNA, 25 bp, Homo sapien
tggcacagtgccctttctgggatcc

SEQ ID NO: 5583585 - DNA, 25 bp, Homo sapien
ccagtaactgatctgaagggagagg

SEQ ID NO: 5583586 - DNA, 25 bp, Homo sapien
ctgggatccctacaaagtcaaattc

SEQ ID NO: 5583587 - DNA, 25 bp, Homo sapien
ggacttggctctggtgatgtaacat

SEQ ID NO: 5583588 - DNA, 25 bp, Homo sapien
gtctgattcacaccaggggaagtgg

SEQ ID NO: 5583589 - DNA, 25 bp, Homo sapien
ggggaagtggcacagtgccctttct

SEQ ID NO: 5583590 - DNA, 25 bp, Homo sapien
taataccctacaaagaccatggatc

SEQ ID NO: 5583591 - DNA, 25 bp, Homo sapien
ccttagatcctgagaagtggagtgc

SEQ ID NO: 5583592 - DNA, 25 bp, Homo sapien
agacgtggggaactttcatgaaaaa

SEQ ID NO: 5583593 - DNA, 25 bp, Homo sapien
tttgccacttcaggtgctgtggctc

SEQ ID NO: 5583594 - DNA, 25 bp, Homo sapien
gtaggcactccttggcatttcattc

SEQ ID NO: 5583595 - DNA, 25 bp, Homo sapien
ctcacgtcttgccagtcttgtcacc

SEQ ID NO: 5583596 - DNA, 25 bp, Homo sapien
atgaaccattcatgccctcacgtct

SEQ ID NO: 5583597 - DNA, 25 bp, Homo sapien
ggcagctcccctgcctcgcccgagt

SEQ ID NO: 5583598 - DNA, 25 bp, Homo sapien
gcagcagctgcctgaatgaaccatt

SEQ ID NO: 5583599 - DNA, 25 bp, Homo sapien
gtatttttagtcatgccaacccctc

SEQ ID NO: 5583600 - DNA, 25 bp, Homo sapien
ccaagagggagtgccccttcaaatt

SEQ ID NO: 5583601 - DNA, 25 bp, Homo sapien
cttcaaattatgtaccgaaggcagc

SEQ ID NO: 5583602 - DNA, 25 bp, Homo sapien
ttgtgtccactgtctactccattcc

SEQ ID NO: 5583603 - DNA, 25 bp, Homo sapien
tgctcagggcgtaagtccttcttgt

SEQ ID NO: 5583604 - DNA, 25 bp, Homo sapien
gtgggtaatggagttatcaacaggc

SEQ ID NO: 5583605 - DNA, 25 bp, Homo sapien
gcaaatactataaaatacgctctgt

SEQ ID NO: 5583606 - DNA, 25 bp, Homo sapien
tcgcttgcctccaagtccaaggctc

SEQ ID NO: 5583607 - DNA, 25 bp, Homo sapien
gaataattagaagggcccatcaggc

SEQ ID NO: 5583608 - DNA, 25 bp, Homo sapien
tttttaagtaccagaggcactgctg

SEQ ID NO: 5583609 - DNA, 25 bp, Homo sapien
caggtcatcactcagatcgcttgcc

SEQ ID NO: 5583610 - DNA, 25 bp, Homo sapien
tagaagggcccatcaggcatttttt

SEQ ID NO: 5583611 - DNA, 25 bp, Homo sapien
tggaacaggatgaaaactgatacac

SEQ ID NO: 5583612 - DNA, 25 bp, Homo sapien
ttttcacacgatcagcagggaacac

SEQ ID NO: 5583613 - DNA, 25 bp, Homo sapien
tcaaactgattcccctaaagacttc

SEQ ID NO: 5583614 - DNA, 25 bp, Homo sapien
aaatacgctctgtacaggaaagaaa

SEQ ID NO: 5583615 - DNA, 25 bp, Homo sapien
taaatctgaataattagaagggccc

SEQ ID NO: 5583616 - DNA, 25 bp, Homo sapien
cagaggacctgtcacagtgtccggc

SEQ ID NO: 5583617 - DNA, 25 bp, Homo sapien
actgagaacttgggtcctgacttgg

SEQ ID NO: 5583618 - DNA, 25 bp, Homo sapien
ctaaaacacccttccggcgggagca

SEQ ID NO: 5583619 - DNA, 25 bp, Homo sapien
caggaagtgctgcctcttgccgaga

SEQ ID NO: 5583620 - DNA, 25 bp, Homo sapien
ctccatccaggatacacaggctcca

SEQ ID NO: 5583621 - DNA, 25 bp, Homo sapien
agtgtccggccctgcctccatccag

SEQ ID NO: 5583622 - DNA, 25 bp, Homo sapien
agccttaaacggagctgccaaggtg

SEQ ID NO: 5583623 - DNA, 25 bp, Homo sapien
ccaagcagtccctggagccttaaac

SEQ ID NO: 5583624 - DNA, 25 bp, Homo sapien
ggctccacctcagagtgaccgtcac

SEQ ID NO: 5583625 - DNA, 25 bp, Homo sapien
ggggaactctcggctacagcatctt

SEQ ID NO: 5583626 - DNA, 25 bp, Homo sapien
ggtgggccatggactttcctgttca

SEQ ID NO: 5583627 - DNA, 25 bp, Homo sapien
aactggggacatcttgacctgaccc

SEQ ID NO: 5583628 - DNA, 25 bp, Homo sapien
agcccaaccaccccggcagtctgag

SEQ ID NO: 5583629 - DNA, 25 bp, Homo sapien
gggcatgtgttgtcagagaaactct

SEQ ID NO: 5583630 - DNA, 25 bp, Homo sapien
ctaggctacccacaaaggattctgc

SEQ ID NO: 5583631 - DNA, 25 bp, Homo sapien
aatggtggctcttgctatccgtccc

SEQ ID NO: 5583632 - DNA, 25 bp, Homo sapien
tccactgactgttaaggcaagaggg

SEQ ID NO: 5583633 - DNA, 25 bp, Homo sapien
aaactcttgctggaagggtcaggtt

SEQ ID NO: 5583634 - DNA, 25 bp, Homo sapien
ccagaggcctgaaccaggatcttca

SEQ ID NO: 5583635 - DNA, 25 bp, Homo sapien
aggatcttcaaggatcgccctgccc

SEQ ID NO: 5583636 - DNA, 25 bp, Homo sapien
gggaaaacatatgaggtcagaagtc

SEQ ID NO: 5583637 - DNA, 25 bp, Homo sapien
agccaacattggtgcaaagagctgc

SEQ ID NO: 5583638 - DNA, 25 bp, Homo sapien
catgcgtcagttagccatggggatg

SEQ ID NO: 5583639 - DNA, 25 bp, Homo sapien
gtcatgggactccccaaaagcgagg

SEQ ID NO: 5583640 - DNA, 25 bp, Homo sapien
gtctccctgctctgcaaggggctgt

SEQ ID NO: 5583641 - DNA, 25 bp, Homo sapien
gtgccattaggtgatagagtgaact

SEQ ID NO: 5583642 - DNA, 25 bp, Homo sapien
ttttgagttggcacagtcagagatg

SEQ ID NO: 5583643 - DNA, 25 bp, Homo sapien
gaaggaaagttggagatctcccagc

SEQ ID NO: 5583644 - DNA, 25 bp, Homo sapien
gagccttgagagcctcacccagatt

SEQ ID NO: 5583645 - DNA, 25 bp, Homo sapien
tcaggcaaagcaatgccctgccctg

SEQ ID NO: 5583646 - DNA, 25 bp, Homo sapien
gggggcacagaccctatgcccactc

SEQ ID NO: 5583647 - DNA, 25 bp, Homo sapien
gggccctgcagttccacactcactc

SEQ ID NO: 5583648 - DNA, 25 bp, Homo sapien
aatataagagcgcaaccatagtcat

SEQ ID NO: 5583649 - DNA, 25 bp, Homo sapien
ctagggcccacaagaatcataatgc

SEQ ID NO: 5583650 - DNA, 25 bp, Homo sapien
agaagaatggtcaaggctaaaataa

SEQ ID NO: 5583651 - DNA, 25 bp, Homo sapien
gggaagcgctagtgtcgatttccat

SEQ ID NO: 5583652 - DNA, 25 bp, Homo sapien
tgcagctctgaatacagggtcaaac

SEQ ID NO: 5583653 - DNA, 25 bp, Homo sapien
aatgtaacttgaactggaaactgaa

SEQ ID NO: 5583654 - DNA, 25 bp, Homo sapien
taagtctaatattggggaagcgcta

SEQ ID NO: 5583655 - DNA, 25 bp, Homo sapien
agagtctgagcttactgatcctgtt

SEQ ID NO: 5583656 - DNA, 25 bp, Homo sapien
aaactgtaactgaagcaatgtaact

SEQ ID NO: 5583657 - DNA, 25 bp, Homo sapien
aagatggcaaaactatctagggccc

SEQ ID NO: 5583658 - DNA, 25 bp, Homo sapien
aaggctaaaataatggagatggaga

SEQ ID NO: 5583659 - DNA, 25 bp, Homo sapien
gcacagtacctaaggcccacagttt

SEQ ID NO: 5583660 - DNA, 25 bp, Homo sapien
tccatcccagccagccctagagttg

SEQ ID NO: 5583661 - DNA, 25 bp, Homo sapien
cagtgtttggcattacccccctttg

SEQ ID NO: 5583662 - DNA, 25 bp, Homo sapien
gcctcatgttagaggtgcctgcttc

SEQ ID NO: 5583663 - DNA, 25 bp, Homo sapien
gctcgccacttgcagtccttccaac

SEQ ID NO: 5583664 - DNA, 25 bp, Homo sapien
cctagagttgagcttagtgtggatc

SEQ ID NO: 5583665 - DNA, 25 bp, Homo sapien
atgagtaacgggctctgttcctagc

SEQ ID NO: 5583666 - DNA, 25 bp, Homo sapien
gcttgcaacttgggatggtgatatg

SEQ ID NO: 5583667 - DNA, 25 bp, Homo sapien
agaaccaaagtcttccgcttgcaac

SEQ ID NO: 5583668 - DNA, 25 bp, Homo sapien
ttatcaagtgctctcctgctcgcca

SEQ ID NO: 5583669 - DNA, 25 bp, Homo sapien
cctagcctcccttcatgccacagtc

SEQ ID NO: 5583670 - DNA, 25 bp, Homo sapien
atcctgttagcatgagtaacgggct

SEQ ID NO: 5583671 - DNA, 25 bp, Homo sapien
atcgacaatgaatgccgttgatacc

SEQ ID NO: 5583672 - DNA, 25 bp, Homo sapien
ctgtcataaggccagcttgaaagac

SEQ ID NO: 5583673 - DNA, 25 bp, Homo sapien
caagaaagtaccaggaaggttatta

SEQ ID NO: 5583674 - DNA, 25 bp, Homo sapien
ttgatgtggctaaaaatcctcctgc

SEQ ID NO: 5583675 - DNA, 25 bp, Homo sapien
ggatgctccggctttgaagcgctac

SEQ ID NO: 5583676 - DNA, 25 bp, Homo sapien
agtccgccaaaatgtccgcagaaac

SEQ ID NO: 5583677 - DNA, 25 bp, Homo sapien
gaaactgatcactgagctaggccga

SEQ ID NO: 5583678 - DNA, 25 bp, Homo sapien
acaggaacctatgttgaggtggtcc

SEQ ID NO: 5583679 - DNA, 25 bp, Homo sapien
gtggtcccaccgaaatacacggcta

SEQ ID NO: 5583680 - DNA, 25 bp, Homo sapien
ctaggccgacacaagtccgccaaaa

SEQ ID NO: 5583681 - DNA, 25 bp, Homo sapien
cgcagaaacgttaagaaaagctgtc

SEQ ID NO: 5583682 - DNA, 25 bp, Homo sapien
atgtagtggactggtatggcactac

SEQ ID NO: 5583683 - DNA, 25 bp, Homo sapien
acctctacctctcctgctggggctc

SEQ ID NO: 5583684 - DNA, 25 bp, Homo sapien
ggggccctccgctgcctcatccagg

SEQ ID NO: 5583685 - DNA, 25 bp, Homo sapien
acacttgaaacagttgcaaggcggg

SEQ ID NO: 5583686 - DNA, 25 bp, Homo sapien
tgcccaatgacctggattgccacac

SEQ ID NO: 5583687 - DNA, 25 bp, Homo sapien
tgtcgttgtacctcagccgcctcct

SEQ ID NO: 5583688 - DNA, 25 bp, Homo sapien
ggggctcttagggaatgcctgttgc

SEQ ID NO: 5583689 - DNA, 25 bp, Homo sapien
tcactgcccgcagcgaatgtgttag

SEQ ID NO: 5583690 - DNA, 25 bp, Homo sapien
ccaggattagcggatatcactgccc

SEQ ID NO: 5583691 - DNA, 25 bp, Homo sapien
aatgtgttaggagttgtagatgtag

SEQ ID NO: 5583692 - DNA, 25 bp, Homo sapien
gctggcccagtgtcctgagttgccg

SEQ ID NO: 5583693 - DNA, 25 bp, Homo sapien
aagcatatgtagacagaaaaactga

SEQ ID NO: 5583694 - DNA, 25 bp, Homo sapien
ttcggctaagaatcacactatcatc

SEQ ID NO: 5583695 - DNA, 25 bp, Homo sapien
ctgaacatactttaagagcacacgc

SEQ ID NO: 5583696 - DNA, 25 bp, Homo sapien
gctcttaatggaaaaactaggtgcc

SEQ ID NO: 5583697 - DNA, 25 bp, Homo sapien
tgttaaccttgacagcagaagctac

SEQ ID NO: 5583698 - DNA, 25 bp, Homo sapien
catgtatagagaatgtgaaatgata

SEQ ID NO: 5583699 - DNA, 25 bp, Homo sapien
aaaaagggaaaatagcaatgctctt

SEQ ID NO: 5583700 - DNA, 25 bp, Homo sapien
caaaaggaaattagaacttagcttc

SEQ ID NO: 5583701 - DNA, 25 bp, Homo sapien
ctgatgtctgtggtaacatactggt

SEQ ID NO: 5583702 - DNA, 25 bp, Homo sapien
tgactgggttaaatatgcaaagcag

SEQ ID NO: 5583703 - DNA, 25 bp, Homo sapien
taggtgccagatgtgtttaacagcc

SEQ ID NO: 5583704 - DNA, 25 bp, Homo sapien
gattatggggattacaattcgagat

SEQ ID NO: 5583705 - DNA, 25 bp, Homo sapien
acacagacaaaccataccagccatt

SEQ ID NO: 5583706 - DNA, 25 bp, Homo sapien
aattcgagatgaaatttgggtgagg

SEQ ID NO: 5583707 - DNA, 25 bp, Homo sapien
agttaaaggggcagagccctttata

SEQ ID NO: 5583708 - DNA, 25 bp, Homo sapien
ggggaagcaaagcaccttcttcaca

SEQ ID NO: 5583709 - DNA, 25 bp, Homo sapien
atcgtaggggaaaccacccccatga

SEQ ID NO: 5583710 - DNA, 25 bp, Homo sapien
tcccaccaggtctctccctagacac

SEQ ID NO: 5583711 - DNA, 25 bp, Homo sapien
cttcacaaggcttcaggagaaagag

SEQ ID NO: 5583712 - DNA, 25 bp, Homo sapien
ccctagacacatggggattatgggg

SEQ ID NO: 5583713 - DNA, 25 bp, Homo sapien
cactatcaggagaacatcgtagggg

SEQ ID NO: 5583714 - DNA, 25 bp, Homo sapien
tctaataacccactgcccccatttc

SEQ ID NO: 5583715 - DNA, 25 bp, Homo sapien
acagaaactaccacagcaagaagcg

SEQ ID NO: 5583716 - DNA, 25 bp, Homo sapien
taaggtcgccagctagtaaagatta

SEQ ID NO: 5583717 - DNA, 25 bp, Homo sapien
ctcctgcccagtcagcacttgctac

SEQ ID NO: 5583718 - DNA, 25 bp, Homo sapien
aaaaggagtccctcattgggtccac

SEQ ID NO: 5583719 - DNA, 25 bp, Homo sapien
tgctactgcacagggataagaatcc

SEQ ID NO: 5583720 - DNA, 25 bp, Homo sapien
attggccaatgatatgcaaagtagc

SEQ ID NO: 5583721 - DNA, 25 bp, Homo sapien
tgcaaagtagcaaaaacaatgcctc

SEQ ID NO: 5583722 - DNA, 25 bp, Homo sapien
agcaactagtataaataaggtcgcc

SEQ ID NO: 5583723 - DNA, 25 bp, Homo sapien
tgttagacgtaatgcagtaggtacc

SEQ ID NO: 5583724 - DNA, 25 bp, Homo sapien
ccaaagtaagtcaaaactggctact

SEQ ID NO: 5583725 - DNA, 25 bp, Homo sapien
cacccagctatccggataagggaga

SEQ ID NO: 5583726 - DNA, 25 bp, Homo sapien
atttctgagaaataaccctgggtcc

SEQ ID NO: 5583727 - DNA, 25 bp, Homo sapien
ctacattcagaatggaggagtccag

SEQ ID NO: 5583728 - DNA, 25 bp, Homo sapien
gaaggtagttatacatgagggaagg

SEQ ID NO: 5583729 - DNA, 25 bp, Homo sapien
gaggagtccagagtataagtcaaat

SEQ ID NO: 5583730 - DNA, 25 bp, Homo sapien
gtcatagcccagacctgctgagctg

SEQ ID NO: 5583731 - DNA, 25 bp, Homo sapien
tagacccttatgccagaccccactc

SEQ ID NO: 5583732 - DNA, 25 bp, Homo sapien
aaggtctcaattactaggggcttcc

SEQ ID NO: 5583733 - DNA, 25 bp, Homo sapien
tccaaagagcggtaagaattcctta

SEQ ID NO: 5583734 - DNA, 25 bp, Homo sapien
ctttcagataaccaagagcagagtt

SEQ ID NO: 5583735 - DNA, 25 bp, Homo sapien
aaaggatgggcagcatttctgattt

SEQ ID NO: 5583736 - DNA, 25 bp, Homo sapien
tgcgaggcttaagtgtccctgatca

SEQ ID NO: 5583737 - DNA, 25 bp, Homo sapien
ttatagtagacaaacaagtagacaa

SEQ ID NO: 5583738 - DNA, 25 bp, Homo sapien
agggctgctcagactagtattatcc

SEQ ID NO: 5583739 - DNA, 25 bp, Homo sapien
aacaagtagacaaacacatgctcta

SEQ ID NO: 5583740 - DNA, 25 bp, Homo sapien
tcaccattgtaaagaggccacagta

SEQ ID NO: 5583741 - DNA, 25 bp, Homo sapien
aagagtactcgaccatctgatgatc

SEQ ID NO: 5583742 - DNA, 25 bp, Homo sapien
aacagatactaagaaatgactacac

SEQ ID NO: 5583743 - DNA, 25 bp, Homo sapien
ggtacatctagtattagggctgctc

SEQ ID NO: 5583744 - DNA, 25 bp, Homo sapien
tgactacactgaacaatgacttggc

SEQ ID NO: 5583745 - DNA, 25 bp, Homo sapien
tgaaaacaggcacaagtcaagctgt

SEQ ID NO: 5583746 - DNA, 25 bp, Homo sapien
ctagtattatccaataggggaaaaa

SEQ ID NO: 5583747 - DNA, 25 bp, Homo sapien
aacagcaaagagacattccaagagt

SEQ ID NO: 5583748 - DNA, 25 bp, Homo sapien
tgaaggtcacgacgatgagtttgga

SEQ ID NO: 5583749 - DNA, 25 bp, Homo sapien
agcacagcaaactctaggggcaaaa

SEQ ID NO: 5583750 - DNA, 25 bp, Homo sapien
ggtcgtctaagatggtaactgctac

SEQ ID NO: 5583751 - DNA, 25 bp, Homo sapien
ctaggggcaaaataaattgtggctg

SEQ ID NO: 5583752 - DNA, 25 bp, Homo sapien
agagtctcaggccacacaagaaatt

SEQ ID NO: 5583753 - DNA, 25 bp, Homo sapien
aagcaagacttacgctgaagacagc

SEQ ID NO: 5583754 - DNA, 25 bp, Homo sapien
atgggaaaaagaagtgttataagca

SEQ ID NO: 5583755 - DNA, 25 bp, Homo sapien
gagacagactgtgatactggagtcc

SEQ ID NO: 5583756 - DNA, 25 bp, Homo sapien
aagcccttagtttagagagagagtc

SEQ ID NO: 5583757 - DNA, 25 bp, Homo sapien
aagtgctgagttaatgatgtggtct

SEQ ID NO: 5583758 - DNA, 25 bp, Homo sapien
caggaacggcaaattcaaggattct

SEQ ID NO: 5583759 - DNA, 25 bp, Homo sapien
gggtctcctttatcaaaagtctatc

SEQ ID NO: 5583760 - DNA, 25 bp, Homo sapien
gatagacttttgataaaggagaccc

SEQ ID NO: 5583761 - DNA, 25 bp, Homo sapien
ctcagtaaccctggcaagttgttat

SEQ ID NO: 5583762 - DNA, 25 bp, Homo sapien
agggatcctatctcagccaagtagc

SEQ ID NO: 5583763 - DNA, 25 bp, Homo sapien
agctgtgtcggtacacatggcaagc

SEQ ID NO: 5583764 - DNA, 25 bp, Homo sapien
tgcagccttgaaccctcagactcca

SEQ ID NO: 5583765 - DNA, 25 bp, Homo sapien
tttgccaaactccccagagtctccc

SEQ ID NO: 5583766 - DNA, 25 bp, Homo sapien
gtaactaacatgtgctagaatagcc

SEQ ID NO: 5583767 - DNA, 25 bp, Homo sapien
tttaaactgtggaaagcagctgtgt

SEQ ID NO: 5583768 - DNA, 25 bp, Homo sapien
gagtctccctggggcaccaaactct

SEQ ID NO: 5583769 - DNA, 25 bp, Homo sapien
ccgtagctggcttaatagtaaactt

SEQ ID NO: 5583770 - DNA, 25 bp, Homo sapien
cctcagactccagggatcctatctc

SEQ ID NO: 5583771 - DNA, 25 bp, Homo sapien
aattgcccacttaccgtagctggct

SEQ ID NO: 5583772 - DNA, 25 bp, Homo sapien
gtccatgtaaaggatcccagtttgc

SEQ ID NO: 5583773 - DNA, 25 bp, Homo sapien
gcaaactgggatcctttacatggac

SEQ ID NO: 5583774 - DNA, 25 bp, Homo sapien
attaattcagaaggacccaaaactc

SEQ ID NO: 5583775 - DNA, 25 bp, Homo sapien
ccacaacgcccaagcatgctccttt

SEQ ID NO: 5583776 - DNA, 25 bp, Homo sapien
tgtaaaggcaagccggtgttcgaaa

SEQ ID NO: 5583777 - DNA, 25 bp, Homo sapien
aaggagaagtcatgatcactgctgt

SEQ ID NO: 5583778 - DNA, 25 bp, Homo sapien
ttgccagttacgctggtggtggaga

SEQ ID NO: 5583779 - DNA, 25 bp, Homo sapien
ggtccacatggcacttgaaacaggc

SEQ ID NO: 5583780 - DNA, 25 bp, Homo sapien
tggcttcgagagaatcacagttcac

SEQ ID NO: 5583781 - DNA, 25 bp, Homo sapien
acagttcactgtaaaggcaagccgg

SEQ ID NO: 5583782 - DNA, 25 bp, Homo sapien
gagtcccaagcttcccagctgcacc

SEQ ID NO: 5583783 - DNA, 25 bp, Homo sapien
gtgttcgaaaaggaccattaattca

SEQ ID NO: 5583784 - DNA, 25 bp, Homo sapien
acttcttagcgcgctcggcataggc

SEQ ID NO: 5583785 - DNA, 25 bp, Homo sapien
ttcctttaaggttgcagagtctcag

SEQ ID NO: 5583786 - DNA, 25 bp, Homo sapien
gaagtagttctagcacctccacaaa

SEQ ID NO: 5583787 - DNA, 25 bp, Homo sapien
agagagtattgtacagaatatgcac

SEQ ID NO: 5583788 - DNA, 25 bp, Homo sapien
tctagacacaagacagaagtagttc

SEQ ID NO: 5583789 - DNA, 25 bp, Homo sapien
aggtcaaaacgaagtacatttgtgc

SEQ ID NO: 5583790 - DNA, 25 bp, Homo sapien
acctgccactgggctaagagagtat

SEQ ID NO: 5583791 - DNA, 25 bp, Homo sapien
ttttggaaatgctgacggtagacag

SEQ ID NO: 5583792 - DNA, 25 bp, Homo sapien
gaaaggaagtacacagtagacattg

SEQ ID NO: 5583793 - DNA, 25 bp, Homo sapien
cacataatgcccatgcaaaggtttc

SEQ ID NO: 5583794 - DNA, 25 bp, Homo sapien
acagaattagaacatccaggcactc

SEQ ID NO: 5583795 - DNA, 25 bp, Homo sapien
ttccacaaccgctcaaagtctagtc

SEQ ID NO: 5583796 - DNA, 25 bp, Homo sapien
gtctacttactcaaagatttacgga

SEQ ID NO: 5583797 - DNA, 25 bp, Homo sapien
tccgtaaatctttgagtaagtagac

SEQ ID NO: 5583798 - DNA, 25 bp, Homo sapien
ggcgccgggctttaacccagcatcc

SEQ ID NO: 5583799 - DNA, 25 bp, Homo sapien
tgagtgccccacactatattagcac

SEQ ID NO: 5583800 - DNA, 25 bp, Homo sapien
tgaataattactaagtgccagaagt

SEQ ID NO: 5583801 - DNA, 25 bp, Homo sapien
atgatatagtaaaccaaatagcctt

SEQ ID NO: 5583802 - DNA, 25 bp, Homo sapien
attagcactaatgatatagtaaacc

SEQ ID NO: 5583803 - DNA, 25 bp, Homo sapien
gaaaacagcatctccggatagggaa

SEQ ID NO: 5583804 - DNA, 25 bp, Homo sapien
atagccttgttcccatcatagtgtc

SEQ ID NO: 5583805 - DNA, 25 bp, Homo sapien
ttcccatcatagtgtcaggactccc

SEQ ID NO: 5583806 - DNA, 25 bp, Homo sapien
cctccttccaccaactcccattccc

SEQ ID NO: 5583807 - DNA, 25 bp, Homo sapien
gtcaggactccctgaaaacagcatc

SEQ ID NO: 5583808 - DNA, 25 bp, Homo sapien
actaagtgccagaagtagcacagga

SEQ ID NO: 5583809 - DNA, 25 bp, Homo sapien
ttacttcaagatagggaaaagcaga

SEQ ID NO: 5583810 - DNA, 25 bp, Homo sapien
aagaagcaggaaatatctcagttga

SEQ ID NO: 5583811 - DNA, 25 bp, Homo sapien
ctacaacacaagcactgaatgaaac

SEQ ID NO: 5583812 - DNA, 25 bp, Homo sapien
tagggaaaagcagaagtttaatgat

SEQ ID NO: 5583813 - DNA, 25 bp, Homo sapien
aaatactgaggactaagaaatcttg

SEQ ID NO: 5583814 - DNA, 25 bp, Homo sapien
gaaaagcatgctcacggcagatgct

SEQ ID NO: 5583815 - DNA, 25 bp, Homo sapien
acatggtctattgatgagggcagtt

SEQ ID NO: 5583816 - DNA, 25 bp, Homo sapien
ccacagaaaaggacacaaaacctat

SEQ ID NO: 5583817 - DNA, 25 bp, Homo sapien
gaacaaggaacaagactacaacaca

SEQ ID NO: 5583818 - DNA, 25 bp, Homo sapien
actaggataagtagaaatcaaggga

SEQ ID NO: 5583819 - DNA, 25 bp, Homo sapien
ccatattcagcaggaacaaggaaca

SEQ ID NO: 5583820 - DNA, 25 bp, Homo sapien
ttgttcccaggaaggaaacatacta

SEQ ID NO: 5583821 - DNA, 25 bp, Homo sapien
tttggagaaaccaggacgtcttctc

SEQ ID NO: 5583822 - DNA, 25 bp, Homo sapien
acaaaaacatgtgctcggtatcttt

SEQ ID NO: 5583823 - DNA, 25 bp, Homo sapien
gggcgctctggcattgttgacacca

SEQ ID NO: 5583824 - DNA, 25 bp, Homo sapien
ggtgcaccgcgctagcatcttgttc

SEQ ID NO: 5583825 - DNA, 25 bp, Homo sapien
tgagtatctcaacgggtcaagctgt

SEQ ID NO: 5583826 - DNA, 25 bp, Homo sapien
ataaaattcgagaaagagtggagaa

SEQ ID NO: 5583827 - DNA, 25 bp, Homo sapien
ttcaaaagtagaatatgatgagagc

SEQ ID NO: 5583828 - DNA, 25 bp, Homo sapien
agaagataacatccaaggagtgctc

SEQ ID NO: 5583829 - DNA, 25 bp, Homo sapien
caccagatacctcccggtgcaccgc

SEQ ID NO: 5583830 - DNA, 25 bp, Homo sapien
tggagggttgtccttgagtatctca

SEQ ID NO: 5583831 - DNA, 25 bp, Homo sapien
atttcgtggcgggacatttgtaagt

SEQ ID NO: 5583832 - DNA, 25 bp, Homo sapien
acttacaaatgtcccgccacgaaat

SEQ ID NO: 5583833 - DNA, 25 bp, Homo sapien
aagaacatacacaaaggacagacaa

SEQ ID NO: 5583834 - DNA, 25 bp, Homo sapien
aggacagacaactggaagaacaata

SEQ ID NO: 5583835 - DNA, 25 bp, Homo sapien
agaaaaaggattctagtatgtcttt

SEQ ID NO: 5583836 - DNA, 25 bp, Homo sapien
tatccagtgctcactctcagccttc

SEQ ID NO: 5583837 - DNA, 25 bp, Homo sapien
tgaaggaacactttcagaaaaagga

SEQ ID NO: 5583838 - DNA, 25 bp, Homo sapien
tcaacatataaataagaacatacac

SEQ ID NO: 5583839 - DNA, 25 bp, Homo sapien
ttactgaacgattatgcagttgcaa

SEQ ID NO: 5583840 - DNA, 25 bp, Homo sapien
actggaagaacaataacaccatatc

SEQ ID NO: 5583841 - DNA, 25 bp, Homo sapien
ttgatagcaaaaatattgatggctt

SEQ ID NO: 5583842 - DNA, 25 bp, Homo sapien
agttgcaaatatcagaggtattatt

SEQ ID NO: 5583843 - DNA, 25 bp, Homo sapien
tgatggctttactgtcaaacaacat

SEQ ID NO: 5583844 - DNA, 25 bp, Homo sapien
agtcctgcttgtcagttcagggaga

SEQ ID NO: 5583845 - DNA, 25 bp, Homo sapien
cctgcttgtcagttcagggagatgg

SEQ ID NO: 5583846 - DNA, 25 bp, Homo sapien
cttggaaaatatccaccaactctgc

SEQ ID NO: 5583847 - DNA, 25 bp, Homo sapien
ccccttggaaaatatccaccaactc

SEQ ID NO: 5583848 - DNA, 25 bp, Homo sapien
ggggccagttgcggcatttacagtg

SEQ ID NO: 5583849 - DNA, 25 bp, Homo sapien
gccagttgcggcatttacagtgggc

SEQ ID NO: 5583850 - DNA, 25 bp, Homo sapien
gcgacttcgttcttcattcagcgtt

SEQ ID NO: 5583851 - DNA, 25 bp, Homo sapien
cgagggtttccacgcgacttcgttc

SEQ ID NO: 5583852 - DNA, 25 bp, Homo sapien
gcatttacagtgggctcctccggca

SEQ ID NO: 5583853 - DNA, 25 bp, Homo sapien
cctggcgtggtctgtttaaagttaa

SEQ ID NO: 5583854 - DNA, 25 bp, Homo sapien
gcggcatttacagtgggctcctccg

SEQ ID NO: 5583855 - DNA, 25 bp, Homo sapien
tgggtggaggactctctgtccactt

SEQ ID NO: 5583856 - DNA, 25 bp, Homo sapien
tttgtgtgataagacatgcgaattc

SEQ ID NO: 5583857 - DNA, 25 bp, Homo sapien
tataagatatggaagaatcagttat

SEQ ID NO: 5583858 - DNA, 25 bp, Homo sapien
tggtacttaaggtctgatctcagca

SEQ ID NO: 5583859 - DNA, 25 bp, Homo sapien
aatctgaaacagcctttgcaccgca

SEQ ID NO: 5583860 - DNA, 25 bp, Homo sapien
caaaagctctggcaactgtggacaa

SEQ ID NO: 5583861 - DNA, 25 bp, Homo sapien
ggacaaaaagggcttcttcgagcta

SEQ ID NO: 5583862 - DNA, 25 bp, Homo sapien
cgcaagagtcttccccaaacattcc

SEQ ID NO: 5583863 - DNA, 25 bp, Homo sapien
gatgtccacatgaacttgagggact

SEQ ID NO: 5583864 - DNA, 25 bp, Homo sapien
tagtaggacctaggcagatgtccac

SEQ ID NO: 5583865 - DNA, 25 bp, Homo sapien
atgcgaattctaggatagtaggacc

SEQ ID NO: 5583866 - DNA, 25 bp, Homo sapien
aggcaacaaagaccccgtgactaca

SEQ ID NO: 5583867 - DNA, 25 bp, Homo sapien
cagcactctggccttggcggtgtgt

SEQ ID NO: 5583868 - DNA, 25 bp, Homo sapien
ggctagcgagacctctggccatcaa

SEQ ID NO: 5583869 - DNA, 25 bp, Homo sapien
cggctagaagagttcagccctcgtc

SEQ ID NO: 5583870 - DNA, 25 bp, Homo sapien
atgcagtcctttcgggagcaaagca

SEQ ID NO: 5583871 - DNA, 25 bp, Homo sapien
agcagttaccacggaaaccagcaaa

SEQ ID NO: 5583872 - DNA, 25 bp, Homo sapien
gtgggccagtttcaagcacagcact

SEQ ID NO: 5583873 - DNA, 25 bp, Homo sapien
ccaaggagatgcgtgtctaatgttt

SEQ ID NO: 5583874 - DNA, 25 bp, Homo sapien
agctttggcaatcagtatgggagtg

SEQ ID NO: 5583875 - DNA, 25 bp, Homo sapien
gcaaagctacccacaggaggtacac

SEQ ID NO: 5583876 - DNA, 25 bp, Homo sapien
agccctcgtcaggcccagatgttcc

SEQ ID NO: 5583877 - DNA, 25 bp, Homo sapien
gccccctacccctaggaggctctgc

SEQ ID NO: 5583878 - DNA, 25 bp, Homo sapien
tctgaggctcaaaagacaactattc

SEQ ID NO: 5583879 - DNA, 25 bp, Homo sapien
gatgtgatctgcctcctacgggaat

SEQ ID NO: 5583880 - DNA, 25 bp, Homo sapien
aaccagagccaagtctatcagcctt

SEQ ID NO: 5583881 - DNA, 25 bp, Homo sapien
tgggaaaacttcatagacaacacag

SEQ ID NO: 5583882 - DNA, 25 bp, Homo sapien
atagggtctcacagagagtaagtga

SEQ ID NO: 5583883 - DNA, 25 bp, Homo sapien
agagtaagtgataaaaccagagcca

SEQ ID NO: 5583884 - DNA, 25 bp, Homo sapien
atgatgctttgcagtaggtgacgga

SEQ ID NO: 5583885 - DNA, 25 bp, Homo sapien
ctaaacagataagaattgggtatac

SEQ ID NO: 5583886 - DNA, 25 bp, Homo sapien
caacacagtttgatggaaaaagtaa

SEQ ID NO: 5583887 - DNA, 25 bp, Homo sapien
aatgagaactaaactaacccagaaa

SEQ ID NO: 5583888 - DNA, 25 bp, Homo sapien
aaccaaccatcacatccaccaaatc

SEQ ID NO: 5583889 - DNA, 25 bp, Homo sapien
actttcatgtgcagttgtcaatact

SEQ ID NO: 5583890 - DNA, 25 bp, Homo sapien
tgtgctatagcccaaccaaactgac

SEQ ID NO: 5583891 - DNA, 25 bp, Homo sapien
tcacagccacacctagattactgtt

SEQ ID NO: 5583892 - DNA, 25 bp, Homo sapien
ttggtatctgtagagatcctgaaac

SEQ ID NO: 5583893 - DNA, 25 bp, Homo sapien
gcaggagtcgatggctatagtcttg

SEQ ID NO: 5583894 - DNA, 25 bp, Homo sapien
tcacacaattgttggggttggcaaa

SEQ ID NO: 5583895 - DNA, 25 bp, Homo sapien
gtagagatcctgaaacaaatccccc

SEQ ID NO: 5583896 - DNA, 25 bp, Homo sapien
tcttggtgcatttagcctgtttccc

SEQ ID NO: 5583897 - DNA, 25 bp, Homo sapien
tttcaactaatcaggtgcagctcac

SEQ ID NO: 5583898 - DNA, 25 bp, Homo sapien
taaataactgtgtgctatagcccaa

SEQ ID NO: 5583899 - DNA, 25 bp, Homo sapien
tggtgtgttgttgctgagtcctcca

SEQ ID NO: 5583900 - DNA, 25 bp, Homo sapien
gaccccatctataagagctgtgccc

SEQ ID NO: 5583901 - DNA, 25 bp, Homo sapien
ggcaggaactgtctttgttttgcac

SEQ ID NO: 5583902 - DNA, 25 bp, Homo sapien
tataagagctgtgccctcacgactt

SEQ ID NO: 5583903 - DNA, 25 bp, Homo sapien
ggtgattaatgctgtccccctggac

SEQ ID NO: 5583904 - DNA, 25 bp, Homo sapien
caagcccttttagaaggaccgtgac

SEQ ID NO: 5583905 - DNA, 25 bp, Homo sapien
aatcacatcctaaagttcccacctc

SEQ ID NO: 5583906 - DNA, 25 bp, Homo sapien
gagggaacgaagactgtgtcctcat

SEQ ID NO: 5583907 - DNA, 25 bp, Homo sapien
gataaggaaagaacatggtgattaa

SEQ ID NO: 5583908 - DNA, 25 bp, Homo sapien
tgtttgatagtgccatgaacctctc

SEQ ID NO: 5583909 - DNA, 25 bp, Homo sapien
gaagactgtgtcctcatgtggcgga

SEQ ID NO: 5583910 - DNA, 25 bp, Homo sapien
ggacaggtctcgagtcactgctaca

SEQ ID NO: 5583911 - DNA, 25 bp, Homo sapien
tgctctcggaaaagcggatcctaaa

SEQ ID NO: 5583912 - DNA, 25 bp, Homo sapien
ggccgcagctcatcgtgagccaacc

SEQ ID NO: 5583913 - DNA, 25 bp, Homo sapien
agcggatcctaaataaagcgggagg

SEQ ID NO: 5583914 - DNA, 25 bp, Homo sapien
gaggtcctggagtctgtcgtgactc

SEQ ID NO: 5583915 - DNA, 25 bp, Homo sapien
gccaagtctcgtgcactagggctac

SEQ ID NO: 5583916 - DNA, 25 bp, Homo sapien
aatcggaaagcgtttcaaggagaaa

SEQ ID NO: 5583917 - DNA, 25 bp, Homo sapien
ttttacacaagatgagcacgcgtgc

SEQ ID NO: 5583918 - DNA, 25 bp, Homo sapien
tctcatgcaaactcagagccgagct

SEQ ID NO: 5583919 - DNA, 25 bp, Homo sapien
gcgtttgggcgagcttttcagccac

SEQ ID NO: 5583920 - DNA, 25 bp, Homo sapien
gagccgagctaatgacatgagcaac

SEQ ID NO: 5583921 - DNA, 25 bp, Homo sapien
actgcaactgccccttccaaggttc

SEQ ID NO: 5583922 - DNA, 25 bp, Homo sapien
aaaactaaacaccaggcaccaaaga

SEQ ID NO: 5583923 - DNA, 25 bp, Homo sapien
agtaacccatggaaatggaacaact

SEQ ID NO: 5583924 - DNA, 25 bp, Homo sapien
atattaaaactaaacaccaggcacc

SEQ ID NO: 5583925 - DNA, 25 bp, Homo sapien
tgtgcaccaccaaactgggatgatt

SEQ ID NO: 5583926 - DNA, 25 bp, Homo sapien
tttactcagtaacccatggaaatgg

SEQ ID NO: 5583927 - DNA, 25 bp, Homo sapien
tggcgaactggtgagtctttactca

SEQ ID NO: 5583928 - DNA, 25 bp, Homo sapien
cactcttatgtctgttatggcgaac

SEQ ID NO: 5583929 - DNA, 25 bp, Homo sapien
aattggggattaaacagattatgta

SEQ ID NO: 5583930 - DNA, 25 bp, Homo sapien
atatataattggggattaaacagat

SEQ ID NO: 5583931 - DNA, 25 bp, Homo sapien
atgtctgttatggcgaactggtgag

SEQ ID NO: 5583932 - DNA, 25 bp, Homo sapien
atgtggtaaaacaagagtgcctttt

SEQ ID NO: 5583933 - DNA, 25 bp, Homo sapien
gaaactgtacagatgtttgcctccc

SEQ ID NO: 5583934 - DNA, 25 bp, Homo sapien
tcagcagctatcaacttgccaattc

SEQ ID NO: 5583935 - DNA, 25 bp, Homo sapien
tccagttgtcctcaaaaagagttga

SEQ ID NO: 5583936 - DNA, 25 bp, Homo sapien
ctggcttccagggcataagatgttt

SEQ ID NO: 5583937 - DNA, 25 bp, Homo sapien
accacaattttgaaccaccgatttc

SEQ ID NO: 5583938 - DNA, 25 bp, Homo sapien
ccagggcataagatgtttagaaact

SEQ ID NO: 5583939 - DNA, 25 bp, Homo sapien
agagtgccttttctgttggatatcc

SEQ ID NO: 5583940 - DNA, 25 bp, Homo sapien
atgatctctatcaggctggaaaatc

SEQ ID NO: 5583941 - DNA, 25 bp, Homo sapien
tgtatctgtgagcatgatctctatc

SEQ ID NO: 5583942 - DNA, 25 bp, Homo sapien
gaggaggcaatcaagttatgtggta

SEQ ID NO: 5583943 - DNA, 25 bp, Homo sapien
tgctgcatgcaggtgagtttttaac

SEQ ID NO: 5583944 - DNA, 25 bp, Homo sapien
tggtcgttgtcagcaacacggatgc

SEQ ID NO: 5583945 - DNA, 25 bp, Homo sapien
aagggatgggttatatctgcatgga

SEQ ID NO: 5583946 - DNA, 25 bp, Homo sapien
ctcctgggaagttgctaatgaaatc

SEQ ID NO: 5583947 - DNA, 25 bp, Homo sapien
tgtccacaagagattttagcctgtc

SEQ ID NO: 5583948 - DNA, 25 bp, Homo sapien
agaaatatgtagagtggtccaccta

SEQ ID NO: 5583949 - DNA, 25 bp, Homo sapien
ctctgacacaggattgtgaagagga

SEQ ID NO: 5583950 - DNA, 25 bp, Homo sapien
gcatggaaaatgggacaagtatttt

SEQ ID NO: 5583951 - DNA, 25 bp, Homo sapien
ggctggtcacacccatgagagaaat

SEQ ID NO: 5583952 - DNA, 25 bp, Homo sapien
atgagaactgtttacacagagagcc

SEQ ID NO: 5583953 - DNA, 25 bp, Homo sapien
atgctcaaccctggtgggtgccttt

SEQ ID NO: 5583954 - DNA, 25 bp, Homo sapien
ttgttatcttggcaaaaaataccta

SEQ ID NO: 5583955 - DNA, 25 bp, Homo sapien
aggggaagatacaaaaatatagaac

SEQ ID NO: 5583956 - DNA, 25 bp, Homo sapien
gaggaacatgtctttgtggagagga

SEQ ID NO: 5583957 - DNA, 25 bp, Homo sapien
atgctttgttcaggaaaggggaaga

SEQ ID NO: 5583958 - DNA, 25 bp, Homo sapien
ggctcattgtacacaagagaggcca

SEQ ID NO: 5583959 - DNA, 25 bp, Homo sapien
gagaggccagccattaagaattgtt

SEQ ID NO: 5583960 - DNA, 25 bp, Homo sapien
tgtctacccacaccagagggaggaa

SEQ ID NO: 5583961 - DNA, 25 bp, Homo sapien
ttaccaccaattaaggtgctgataa

SEQ ID NO: 5583962 - DNA, 25 bp, Homo sapien
ttggacttgtccaaaacagataagg

SEQ ID NO: 5583963 - DNA, 25 bp, Homo sapien
tgtggagaggatttctttgagactc

SEQ ID NO: 5583964 - DNA, 25 bp, Homo sapien
atagaacaaaaaagaatattggctc

SEQ ID NO: 5583965 - DNA, 25 bp, Homo sapien
actttaaagacctgttctcgtggaa

SEQ ID NO: 5583966 - DNA, 25 bp, Homo sapien
ttccacgagaacaggtctttaaagt

SEQ ID NO: 5583967 - DNA, 25 bp, Homo sapien
ctcctgcacttcgacacaggcagcg

SEQ ID NO: 5583968 - DNA, 25 bp, Homo sapien
ctgcacttcgacacaggcagcggaa

SEQ ID NO: 5583969 - DNA, 25 bp, Homo sapien
ggaaaatagctcctgctggggctac

SEQ ID NO: 5583970 - DNA, 25 bp, Homo sapien
tgaattgtgggaccttcagagcttt

SEQ ID NO: 5583971 - DNA, 25 bp, Homo sapien
acataccatgaattgtgggaccttc

SEQ ID NO: 5583972 - DNA, 25 bp, Homo sapien
tgggcagtttccctcctccgagccc

SEQ ID NO: 5583973 - DNA, 25 bp, Homo sapien
ataccccctacccctgcagctgtgc

SEQ ID NO: 5583974 - DNA, 25 bp, Homo sapien
atagctcctgctggggctacaagat

SEQ ID NO: 5583975 - DNA, 25 bp, Homo sapien
cacttttcggaaaatagctcctgct

SEQ ID NO: 5583976 - DNA, 25 bp, Homo sapien
cctccgagcccctgtacataccatg

SEQ ID NO: 5583977 - DNA, 25 bp, Homo sapien
aggcctgctcctcttatctataccc

SEQ ID NO: 5583978 - DNA, 25 bp, Homo sapien
ttgcttaaggttaggacttggatcc

SEQ ID NO: 5583979 - DNA, 25 bp, Homo sapien
gagggacatgtcagcatgacaccca

SEQ ID NO: 5583980 - DNA, 25 bp, Homo sapien
atcacaaaaactaggtgcagggaga

SEQ ID NO: 5583981 - DNA, 25 bp, Homo sapien
acatggcttgtccaaggccaggcag

SEQ ID NO: 5583982 - DNA, 25 bp, Homo sapien
atttaagatgaggacaccaagaatt

SEQ ID NO: 5583983 - DNA, 25 bp, Homo sapien
agaaaactaaagcccagagaaccta

SEQ ID NO: 5583984 - DNA, 25 bp, Homo sapien
aagaaaagtggcttagtctcaccct

SEQ ID NO: 5583985 - DNA, 25 bp, Homo sapien
tgatgcctagcgtttgtacagtcct

SEQ ID NO: 5583986 - DNA, 25 bp, Homo sapien
gcccagagaacctacatggcttgtc

SEQ ID NO: 5583987 - DNA, 25 bp, Homo sapien
agcctagcacaggcttgctggctgt

SEQ ID NO: 5583988 - DNA, 25 bp, Homo sapien
aataacctgtgcagcaggtactatt

SEQ ID NO: 5583989 - DNA, 25 bp, Homo sapien
aatctagatgtaggctcagttagtc

SEQ ID NO: 5583990 - DNA, 25 bp, Homo sapien
agtgatgtctaatgctttggaaaat

SEQ ID NO: 5583991 - DNA, 25 bp, Homo sapien
gatcaggaacatctttatgggggtt

SEQ ID NO: 5583992 - DNA, 25 bp, Homo sapien
gagatgtaatctaggtaaaagacac

SEQ ID NO: 5583993 - DNA, 25 bp, Homo sapien
aactccaaatgagagatgtaatcta

SEQ ID NO: 5583994 - DNA, 25 bp, Homo sapien
tattagaaacagatgtacacgaagt

SEQ ID NO: 5583995 - DNA, 25 bp, Homo sapien
atgtacacgaagtcacctcagataa

SEQ ID NO: 5583996 - DNA, 25 bp, Homo sapien
atgttaggaacaatgatatgcactt

SEQ ID NO: 5583997 - DNA, 25 bp, Homo sapien
taattattaggattcaagatggtat

SEQ ID NO: 5583998 - DNA, 25 bp, Homo sapien
atgagttttaaagatcaggaacatc

SEQ ID NO: 5583999 - DNA, 25 bp, Homo sapien
ataggagagtacagtcattcttcat

SEQ ID NO: 5584000 - DNA, 25 bp, Homo sapien
acattaaaaaggacaatttgtatag

SEQ ID NO: 5584001 - DNA, 25 bp, Homo sapien
tgaaatgaattgcagaagagtgtgg

SEQ ID NO: 5584002 - DNA, 25 bp, Homo sapien
acagagcaccatacaagatgaggtt

SEQ ID NO: 5584003 - DNA, 25 bp, Homo sapien
tataatagttggtggtttgctgagg

SEQ ID NO: 5584004 - DNA, 25 bp, Homo sapien
aaaaagacatataatagttggtggt

SEQ ID NO: 5584005 - DNA, 25 bp, Homo sapien
tttcagcaggttgtaaagaggaaga

SEQ ID NO: 5584006 - DNA, 25 bp, Homo sapien
actgccaactagggatagcagaaga

SEQ ID NO: 5584007 - DNA, 25 bp, Homo sapien
gaagactgccaactagggatagcag

SEQ ID NO: 5584008 - DNA, 25 bp, Homo sapien
agtcttgacaactatgaaatgaatt

SEQ ID NO: 5584009 - DNA, 25 bp, Homo sapien
ttttcagtgaatctaacataaatgc

SEQ ID NO: 5584010 - DNA, 25 bp, Homo sapien
tgagcagaccctagcagccaatttt

SEQ ID NO: 5584011 - DNA, 25 bp, Homo sapien
gcgacaccgtcattgaaaaattggg

SEQ ID NO: 5584012 - DNA, 25 bp, Homo sapien
tccaggaaacgctccagtccgagca

SEQ ID NO: 5584013 - DNA, 25 bp, Homo sapien
aaattcaacatcaggaaggtgctgg

SEQ ID NO: 5584014 - DNA, 25 bp, Homo sapien
tactcgggctttacatgggaatgca

SEQ ID NO: 5584015 - DNA, 25 bp, Homo sapien
ataactctaataaaaggctcgctcc

SEQ ID NO: 5584016 - DNA, 25 bp, Homo sapien
caatcagttcaaggttgcttcaaac

SEQ ID NO: 5584017 - DNA, 25 bp, Homo sapien
gttgttttggagattgataccttac

SEQ ID NO: 5584018 - DNA, 25 bp, Homo sapien
agcccctccgagaccatgaggaaat

SEQ ID NO: 5584019 - DNA, 25 bp, Homo sapien
tcctccgtttccgcggtcgaagctg

SEQ ID NO: 5584020 - DNA, 25 bp, Homo sapien
cccagctgcctccttaccctcacac

SEQ ID NO: 5584021 - DNA, 25 bp, Homo sapien
cctttgcacatgcagcaatcagttc

SEQ ID NO: 5584022 - DNA, 25 bp, Homo sapien
tcgacccaatagtaactcaactgcc

SEQ ID NO: 5584023 - DNA, 25 bp, Homo sapien
actaatatacaaacaggaaaggtca

SEQ ID NO: 5584024 - DNA, 25 bp, Homo sapien
tccaaaggatcaagtcgacccaata

SEQ ID NO: 5584025 - DNA, 25 bp, Homo sapien
agcaagaattcttcggagtcctcaa

SEQ ID NO: 5584026 - DNA, 25 bp, Homo sapien
gatatggtaagcattaatacaatcc

SEQ ID NO: 5584027 - DNA, 25 bp, Homo sapien
taagaaagaacatagttaagagaga

SEQ ID NO: 5584028 - DNA, 25 bp, Homo sapien
caactgcctgccaaaacacacctca

SEQ ID NO: 5584029 - DNA, 25 bp, Homo sapien
aaaacaaacaagattccaaaggatc

SEQ ID NO: 5584030 - DNA, 25 bp, Homo sapien
atacaatccacataagcaagaattc

SEQ ID NO: 5584031 - DNA, 25 bp, Homo sapien
tttttagagtttcagggggtcatga

SEQ ID NO: 5584032 - DNA, 25 bp, Homo sapien
gtttcagggggtcatgagactgaaa

SEQ ID NO: 5584033 - DNA, 25 bp, Homo sapien
cacgcttaagcttggccaagatttt

SEQ ID NO: 5584034 - DNA, 25 bp, Homo sapien
cttggaactgggaaaccacactgaa

SEQ ID NO: 5584035 - DNA, 25 bp, Homo sapien
ttatgtctagtacgtatgttttccc

SEQ ID NO: 5584036 - DNA, 25 bp, Homo sapien
tctgggtttgttcagagctctgctc

SEQ ID NO: 5584037 - DNA, 25 bp, Homo sapien
agctgtgttcattgagaatctgctc

SEQ ID NO: 5584038 - DNA, 25 bp, Homo sapien
gaacctgcttggaattttgccactt

SEQ ID NO: 5584039 - DNA, 25 bp, Homo sapien
ccatgtttgccaagagaacccacaa

SEQ ID NO: 5584040 - DNA, 25 bp, Homo sapien
aagaattcctcacctgatgaaccac

SEQ ID NO: 5584041 - DNA, 25 bp, Homo sapien
agaaaatggcaaagtcaatgttttc

SEQ ID NO: 5584042 - DNA, 25 bp, Homo sapien
tgctcaccagaaataagatcacaat

SEQ ID NO: 5584043 - DNA, 25 bp, Homo sapien
ttctagcagcaaaacagctgtgttc

SEQ ID NO: 5584044 - DNA, 25 bp, Homo sapien
cttgaaaagctaacagacctacccc

SEQ ID NO: 5584045 - DNA, 25 bp, Homo sapien
gctggtgacaacttggacctaaaaa

SEQ ID NO: 5584046 - DNA, 25 bp, Homo sapien
taaaatgaacgaaacttgcaacacc

SEQ ID NO: 5584047 - DNA, 25 bp, Homo sapien
acacgtgatctgcttacgggggaaa

SEQ ID NO: 5584048 - DNA, 25 bp, Homo sapien
atgggaggatgctatgctcgttatg

SEQ ID NO: 5584049 - DNA, 25 bp, Homo sapien
ctgtcaggagactgagcagttctca

SEQ ID NO: 5584050 - DNA, 25 bp, Homo sapien
acctacatgaagaccagcgtgatat

SEQ ID NO: 5584051 - DNA, 25 bp, Homo sapien
cttgaagaggatggcattcatgtgt

SEQ ID NO: 5584052 - DNA, 25 bp, Homo sapien
gtatctgatgatccaggggacatcc

SEQ ID NO: 5584053 - DNA, 25 bp, Homo sapien
tacccctagggaaaatgtgcctgca

SEQ ID NO: 5584054 - DNA, 25 bp, Homo sapien
atccaagctatgacaagcaagagcc

SEQ ID NO: 5584055 - DNA, 25 bp, Homo sapien
ctttataggggtgtgtcgtacagac

SEQ ID NO: 5584056 - DNA, 25 bp, Homo sapien
gtctgtacgacacacccctataaag

SEQ ID NO: 5584057 - DNA, 25 bp, Homo sapien
tctggagtaagatgactcttggttt

SEQ ID NO: 5584058 - DNA, 25 bp, Homo sapien
tttgtgttgccttggaccggctctt

SEQ ID NO: 5584059 - DNA, 25 bp, Homo sapien
aacccccgagctgctctcctgtctc

SEQ ID NO: 5584060 - DNA, 25 bp, Homo sapien
agtgcttgcatgtgccccaagggtt

SEQ ID NO: 5584061 - DNA, 25 bp, Homo sapien
ggagaactaacaaaaagcaaagcgc

SEQ ID NO: 5584062 - DNA, 25 bp, Homo sapien
tgtcgtttcggcaggtctgtgttct

SEQ ID NO: 5584063 - DNA, 25 bp, Homo sapien
gcaaagcgccatcctgtgtcgtttc

SEQ ID NO: 5584064 - DNA, 25 bp, Homo sapien
gaagaattaacagaagaacgaagaa

SEQ ID NO: 5584065 - DNA, 25 bp, Homo sapien
ttgggaatatgcatgtccaacttcc

SEQ ID NO: 5584066 - DNA, 25 bp, Homo sapien
ccacaggggagtacttgtctaaccc

SEQ ID NO: 5584067 - DNA, 25 bp, Homo sapien
gcagaaactccacaggggagtactt

SEQ ID NO: 5584068 - DNA, 25 bp, Homo sapien
gtcgacatcggtgcccggtcgtcgg

SEQ ID NO: 5584069 - DNA, 25 bp, Homo sapien
ccgacgaccgggcaccgatgtcgac

SEQ ID NO: 5584070 - DNA, 25 bp, Homo sapien
cgtaggtctggaacatgagccttat

SEQ ID NO: 5584071 - DNA, 25 bp, Homo sapien
tctgccaaatatctgtgtatgttcc

SEQ ID NO: 5584072 - DNA, 25 bp, Homo sapien
tacgtaacatagactacaagctatc

SEQ ID NO: 5584073 - DNA, 25 bp, Homo sapien
ttcccctccttactcgacttctgcc

SEQ ID NO: 5584074 - DNA, 25 bp, Homo sapien
agtatctgtgatgtcttcagtgaca

SEQ ID NO: 5584075 - DNA, 25 bp, Homo sapien
gtacacaaagccaaaagataaatat

SEQ ID NO: 5584076 - DNA, 25 bp, Homo sapien
aaagagcagtgaaaatgactgaaac

SEQ ID NO: 5584077 - DNA, 25 bp, Homo sapien
aagctatcgtaggtctggaacatga

SEQ ID NO: 5584078 - DNA, 25 bp, Homo sapien
aaatgactgaaactcacggactctt

SEQ ID NO: 5584079 - DNA, 25 bp, Homo sapien
gtgatataaagaaatacgtaacata

SEQ ID NO: 5584080 - DNA, 25 bp, Homo sapien
tccaggactataaagctttcagggc

SEQ ID NO: 5584081 - DNA, 25 bp, Homo sapien
ctcaacattgtgggtttagggatcc

SEQ ID NO: 5584082 - DNA, 25 bp, Homo sapien
gagcaagtggagtcatcacatgtgt

SEQ ID NO: 5584083 - DNA, 25 bp, Homo sapien
gaggactcgagctaggctgctctaa

SEQ ID NO: 5584084 - DNA, 25 bp, Homo sapien
tgtagggtttgtttaagcagttcaa

SEQ ID NO: 5584085 - DNA, 25 bp, Homo sapien
ttcacttctaagaggactggggttg

SEQ ID NO: 5584086 - DNA, 25 bp, Homo sapien
gaccacaaaaatacagacccaacac

SEQ ID NO: 5584087 - DNA, 25 bp, Homo sapien
tgcctgcaggcactgaccacaaaaa

SEQ ID NO: 5584088 - DNA, 25 bp, Homo sapien
ttagggatccagtgcaatcagttca

SEQ ID NO: 5584089 - DNA, 25 bp, Homo sapien
attaagtggtagttacaagtggtgg

SEQ ID NO: 5584090 - DNA, 25 bp, Homo sapien
gagtgccaatttatctgtagggttt

SEQ ID NO: 5584091 - DNA, 25 bp, Homo sapien
acaacaaaagcaattaacacaagat

SEQ ID NO: 5584092 - DNA, 25 bp, Homo sapien
tgtagttaatgctgtgaactgatcc

SEQ ID NO: 5584093 - DNA, 25 bp, Homo sapien
atatagagaagatgatcagttcact

SEQ ID NO: 5584094 - DNA, 25 bp, Homo sapien
agccagctcttgtgaaatgaatata

SEQ ID NO: 5584095 - DNA, 25 bp, Homo sapien
ttgtgaaatgaatatagagaagatg

SEQ ID NO: 5584096 - DNA, 25 bp, Homo sapien
gctgtgaactgatccaaagtggttt

SEQ ID NO: 5584097 - DNA, 25 bp, Homo sapien
atggatatgagaaacctgactctag

SEQ ID NO: 5584098 - DNA, 25 bp, Homo sapien
caaagtttcagattcggtcacattc

SEQ ID NO: 5584099 - DNA, 25 bp, Homo sapien
ctggctaaagcaaattcccaaagtt

SEQ ID NO: 5584100 - DNA, 25 bp, Homo sapien
ctcatccaacttggggcacaggtgg

SEQ ID NO: 5584101 - DNA, 25 bp, Homo sapien
acaggtggcagaatagtcttccata

SEQ ID NO: 5584102 - DNA, 25 bp, Homo sapien
caaagcgatttgccattcttaggcc

SEQ ID NO: 5584103 - DNA, 25 bp, Homo sapien
taatatcagagttaacaggtaacat

SEQ ID NO: 5584104 - DNA, 25 bp, Homo sapien
ctttctcaaccgaacgtccggtgaa

SEQ ID NO: 5584105 - DNA, 25 bp, Homo sapien
tcaaccgaacgtccggtgaacagga

SEQ ID NO: 5584106 - DNA, 25 bp, Homo sapien
tcctctagcaggttcccaagttatt

SEQ ID NO: 5584107 - DNA, 25 bp, Homo sapien
caacacttgtttttaagggcaggaa

SEQ ID NO: 5584108 - DNA, 25 bp, Homo sapien
aaccattgaaattaatatcagagtt

SEQ ID NO: 5584109 - DNA, 25 bp, Homo sapien
taagtaatgtgatttcaagtcatac

SEQ ID NO: 5584110 - DNA, 25 bp, Homo sapien
ttgaataaacttactggcagattaa

SEQ ID NO: 5584111 - DNA, 25 bp, Homo sapien
cataaagcaatcattctgtaaaata

SEQ ID NO: 5584112 - DNA, 25 bp, Homo sapien
gctccagaactttcctcagtgcctt

SEQ ID NO: 5584113 - DNA, 25 bp, Homo sapien
tggcagattaaaatccagtttataa

SEQ ID NO: 5584114 - DNA, 25 bp, Homo sapien
ctctggagagtatcaaaagccctaa

SEQ ID NO: 5584115 - DNA, 25 bp, Homo sapien
agtgaaaattcgtccaaaacccagc

SEQ ID NO: 5584116 - DNA, 25 bp, Homo sapien
agcaatttcccttgggagtggggtg

SEQ ID NO: 5584117 - DNA, 25 bp, Homo sapien
ctaggtagctttggatgtaggaaaa

SEQ ID NO: 5584118 - DNA, 25 bp, Homo sapien
taaaaggtgcacacaaagtgaaaat

SEQ ID NO: 5584119 - DNA, 25 bp, Homo sapien
tcaaggaattgatgactatgccaca

SEQ ID NO: 5584120 - DNA, 25 bp, Homo sapien
cacagcatttatccacaacggcatc

SEQ ID NO: 5584121 - DNA, 25 bp, Homo sapien
tccagtgagtagtgtgacttggtat

SEQ ID NO: 5584122 - DNA, 25 bp, Homo sapien
aagccctaagccatgcatacccttt

SEQ ID NO: 5584123 - DNA, 25 bp, Homo sapien
catacaaaagagatactaggtagct

SEQ ID NO: 5584124 - DNA, 25 bp, Homo sapien
aagacaaacatgaaatagcggaatc

SEQ ID NO: 5584125 - DNA, 25 bp, Homo sapien
ttagagcagcaacataaaactttat

SEQ ID NO: 5584126 - DNA, 25 bp, Homo sapien
gaagggatttgtggaaaaccatatg

SEQ ID NO: 5584127 - DNA, 25 bp, Homo sapien
caatctaaagggtaacaaaataaca

SEQ ID NO: 5584128 - DNA, 25 bp, Homo sapien
aatctaatgactaagaaggtaaaac

SEQ ID NO: 5584129 - DNA, 25 bp, Homo sapien
gcaccaactcttaagtaggatgtcc

SEQ ID NO: 5584130 - DNA, 25 bp, Homo sapien
ttgggggagtctctgacaatctaaa

SEQ ID NO: 5584131 - DNA, 25 bp, Homo sapien
ctttgttgattaaattgggggagtc

SEQ ID NO: 5584132 - DNA, 25 bp, Homo sapien
tatatctggaccaaaaaactgcaac

SEQ ID NO: 5584133 - DNA, 25 bp, Homo sapien
taacggaaattgatgagtccacacc

SEQ ID NO: 5584134 - DNA, 25 bp, Homo sapien
cacaaaggccatggaaacttgagaa

SEQ ID NO: 5584135 - DNA, 25 bp, Homo sapien
ccaagcaaggacaagtcagctcctt

SEQ ID NO: 5584136 - DNA, 25 bp, Homo sapien
tgagaacacttggacacagagtggg

SEQ ID NO: 5584137 - DNA, 25 bp, Homo sapien
ggagggatagcattaggatatatac

SEQ ID NO: 5584138 - DNA, 25 bp, Homo sapien
atgtaaatgacgagttaatgggtgc

SEQ ID NO: 5584139 - DNA, 25 bp, Homo sapien
atggatgaagctggacaccatcttt

SEQ ID NO: 5584140 - DNA, 25 bp, Homo sapien
caaggacaaaaaaccaaacaccgca

SEQ ID NO: 5584141 - DNA, 25 bp, Homo sapien
gaacatcacacaccgggacctgtca

SEQ ID NO: 5584142 - DNA, 25 bp, Homo sapien
gactggattaagaaaatgtggcaca

SEQ ID NO: 5584143 - DNA, 25 bp, Homo sapien
aatgggtgcagcacaccaacatggt

SEQ ID NO: 5584144 - DNA, 25 bp, Homo sapien
tgcagccataaaaaaggatgagttc

SEQ ID NO: 5584145 - DNA, 25 bp, Homo sapien
tcataggtgggaattgaacaatgag

SEQ ID NO: 5584146 - DNA, 25 bp, Homo sapien
aagcttggtaatacagtcatagatt

SEQ ID NO: 5584147 - DNA, 25 bp, Homo sapien
gcactgacatggcctaagcgaatgt

SEQ ID NO: 5584148 - DNA, 25 bp, Homo sapien
aactatgtaccaattatgcaatcac

SEQ ID NO: 5584149 - DNA, 25 bp, Homo sapien
cagcaggaactagacagctacagaa

SEQ ID NO: 5584150 - DNA, 25 bp, Homo sapien
atggcctaagcgaatgtcctgtcaa

SEQ ID NO: 5584151 - DNA, 25 bp, Homo sapien
agcacgtgtcatagatccacttccc

SEQ ID NO: 5584152 - DNA, 25 bp, Homo sapien
aataatcacgactaatacatgtaaa

SEQ ID NO: 5584153 - DNA, 25 bp, Homo sapien
gggcacaggttgaacagttcaccta

SEQ ID NO: 5584154 - DNA, 25 bp, Homo sapien
tgaacagttcacctacagcactgac

SEQ ID NO: 5584155 - DNA, 25 bp, Homo sapien
actagacagctacagaaaccaacag

SEQ ID NO: 5584156 - DNA, 25 bp, Homo sapien
gcgaatgtcctgtcaatctgagagc

SEQ ID NO: 5584157 - DNA, 25 bp, Homo sapien
cgggtaaatgcacaagcacgtgtca

SEQ ID NO: 5584158 - DNA, 25 bp, Homo sapien
gatcacacaacagacaccagcttca

SEQ ID NO: 5584159 - DNA, 25 bp, Homo sapien
gcattaaaaagagctggaatttgaa

SEQ ID NO: 5584160 - DNA, 25 bp, Homo sapien
accctacaacctggacacagtcctc

SEQ ID NO: 5584161 - DNA, 25 bp, Homo sapien
ataatgagacaatgttaagccctac

SEQ ID NO: 5584162 - DNA, 25 bp, Homo sapien
aactgacttgctgcatcagagataa

SEQ ID NO: 5584163 - DNA, 25 bp, Homo sapien
agccctactctgcatgttaacagcc

SEQ ID NO: 5584164 - DNA, 25 bp, Homo sapien
gaatttgaacctagacctgattcca

SEQ ID NO: 5584165 - DNA, 25 bp, Homo sapien
gaaaaggcagtctgtgtaaagtttc

SEQ ID NO: 5584166 - DNA, 25 bp, Homo sapien
cttttgatacagaaggtgaaaaaaa

SEQ ID NO: 5584167 - DNA, 25 bp, Homo sapien
ctgattccacctagtcaactgactt

SEQ ID NO: 5584168 - DNA, 25 bp, Homo sapien
ttaacatggacctgacatttacatt

SEQ ID NO: 5584169 - DNA, 25 bp, Homo sapien
gtagaagtcagaaacctaggttcaa

SEQ ID NO: 5584170 - DNA, 25 bp, Homo sapien
ctatgggcccctcaaaaaggctgac

SEQ ID NO: 5584171 - DNA, 25 bp, Homo sapien
tgagcccacctactatgggcccctc

SEQ ID NO: 5584172 - DNA, 25 bp, Homo sapien
agatgaacaaggagcacaatctcat

SEQ ID NO: 5584173 - DNA, 25 bp, Homo sapien
aaaaaggctgacagtaccactaact

SEQ ID NO: 5584174 - DNA, 25 bp, Homo sapien
cttcttgataggtggagtacaggaa

SEQ ID NO: 5584175 - DNA, 25 bp, Homo sapien
accttaccagcacagcagatgacag

SEQ ID NO: 5584176 - DNA, 25 bp, Homo sapien
tgggtacccactattactagccacc

SEQ ID NO: 5584177 - DNA, 25 bp, Homo sapien
ttcagcatgttaattgggtacccac

SEQ ID NO: 5584178 - DNA, 25 bp, Homo sapien
tgtgtttctaggctgaaaaggccct

SEQ ID NO: 5584179 - DNA, 25 bp, Homo sapien
aggaagaaaacgtcacagacataga

SEQ ID NO: 5584180 - DNA, 25 bp, Homo sapien
gctggcaccactgacatgctgtttc

SEQ ID NO: 5584181 - DNA, 25 bp, Homo sapien
ccctcatctcgtgacttcagctgtc

SEQ ID NO: 5584182 - DNA, 25 bp, Homo sapien
ccctgggggacatacatccctcatc

SEQ ID NO: 5584183 - DNA, 25 bp, Homo sapien
gtatagcactgacctagaaacctcc

SEQ ID NO: 5584184 - DNA, 25 bp, Homo sapien
tggctctatgttccaacagggctgg

SEQ ID NO: 5584185 - DNA, 25 bp, Homo sapien
actcccaccaagaaaatcctcacct

SEQ ID NO: 5584186 - DNA, 25 bp, Homo sapien
ttggaagcaaaatatgttaaataac

SEQ ID NO: 5584187 - DNA, 25 bp, Homo sapien
gcatcctccctgggggacatacatc

SEQ ID NO: 5584188 - DNA, 25 bp, Homo sapien
taaataacagcataaactcccacca

SEQ ID NO: 5584189 - DNA, 25 bp, Homo sapien
gcattgtcaatctgccaaatggctc

SEQ ID NO: 5584190 - DNA, 25 bp, Homo sapien
cagcacccaggctcccaactctcct

SEQ ID NO: 5584191 - DNA, 25 bp, Homo sapien
cgctactcggtctcgactgtagact

SEQ ID NO: 5584192 - DNA, 25 bp, Homo sapien
agtctacagtcgagaccgagtagcg

SEQ ID NO: 5584193 - DNA, 25 bp, Homo sapien
tgcttgtaagcacagcaaatgggcc

SEQ ID NO: 5584194 - DNA, 25 bp, Homo sapien
ctgccactgaccagccatgtgacct

SEQ ID NO: 5584195 - DNA, 25 bp, Homo sapien
atgagacagtacacaactgcctggc

SEQ ID NO: 5584196 - DNA, 25 bp, Homo sapien
cacctcatgtgagctccagccaagc

SEQ ID NO: 5584197 - DNA, 25 bp, Homo sapien
atgatgtggagtttcttggcctgtc

SEQ ID NO: 5584198 - DNA, 25 bp, Homo sapien
gcactgtgggtgctatccagctttc

SEQ ID NO: 5584199 - DNA, 25 bp, Homo sapien
taagtgctagataaatggcagctct

SEQ ID NO: 5584200 - DNA, 25 bp, Homo sapien
tccatcaccgagagtctgcagaaga

SEQ ID NO: 5584201 - DNA, 25 bp, Homo sapien
cctgcataggaagtccagcagtttg

SEQ ID NO: 5584202 - DNA, 25 bp, Homo sapien
caggcatcaggaggctgttatgatg

SEQ ID NO: 5584203 - DNA, 25 bp, Homo sapien
taggactatgaggcttaaatgagac

SEQ ID NO: 5584204 - DNA, 25 bp, Homo sapien
atgaggttacctgctttatttggat

SEQ ID NO: 5584205 - DNA, 25 bp, Homo sapien
aaatccagtataattcaaatccaac

SEQ ID NO: 5584206 - DNA, 25 bp, Homo sapien
atcagaaaattcaacgtgctccacc

SEQ ID NO: 5584207 - DNA, 25 bp, Homo sapien
gtaagactacacagataaaatccag

SEQ ID NO: 5584208 - DNA, 25 bp, Homo sapien
cttcagacagcattaaaataaagac

SEQ ID NO: 5584209 - DNA, 25 bp, Homo sapien
taaaaatttacagtgattgagaaaa

SEQ ID NO: 5584210 - DNA, 25 bp, Homo sapien
aggggatcccaggaaaataacacta

SEQ ID NO: 5584211 - DNA, 25 bp, Homo sapien
cataggggatcccaggaaaataaca

SEQ ID NO: 5584212 - DNA, 25 bp, Homo sapien
caaatccaacaatgaaaaatttccc

SEQ ID NO: 5584213 - DNA, 25 bp, Homo sapien
ggataccaagttcccttcagacagc

SEQ ID NO: 5584214 - DNA, 25 bp, Homo sapien
aatgggataggaatagtaatactgt

SEQ ID NO: 5584215 - DNA, 25 bp, Homo sapien
aatagtccagggttctccgtgtagc

SEQ ID NO: 5584216 - DNA, 25 bp, Homo sapien
tctgcataagtgaacatatagcctt

SEQ ID NO: 5584217 - DNA, 25 bp, Homo sapien
tgtaggagtctaatgttggtaaaaa

SEQ ID NO: 5584218 - DNA, 25 bp, Homo sapien
ggcttccctgacaaggcagatcttc

SEQ ID NO: 5584219 - DNA, 25 bp, Homo sapien
ttcgcgactcggcatccataaggaa

SEQ ID NO: 5584220 - DNA, 25 bp, Homo sapien
ccaagtgagccttcgcttgcacaac

SEQ ID NO: 5584221 - DNA, 25 bp, Homo sapien
atttgggttgtcagcctacactagt

SEQ ID NO: 5584222 - DNA, 25 bp, Homo sapien
gccttgctgcttgatcgaatagtcc

SEQ ID NO: 5584223 - DNA, 25 bp, Homo sapien
cgtgtagcagctcctgacaaccacc

SEQ ID NO: 5584224 - DNA, 25 bp, Homo sapien
cataaggaactcaaatgctgcccag

SEQ ID NO: 5584225 - DNA, 25 bp, Homo sapien
ggtagcaagacagtctctggacgac

SEQ ID NO: 5584226 - DNA, 25 bp, Homo sapien
aaatgcatgctccagtagtttttaa

SEQ ID NO: 5584227 - DNA, 25 bp, Homo sapien
agttgattaacatatgcatgacctc

SEQ ID NO: 5584228 - DNA, 25 bp, Homo sapien
cctacctcaacagaaggagaggcag

SEQ ID NO: 5584229 - DNA, 25 bp, Homo sapien
gacagacaacttgtctctcagtgtc

SEQ ID NO: 5584230 - DNA, 25 bp, Homo sapien
ctcaaattacagaggtgagtggtcc

SEQ ID NO: 5584231 - DNA, 25 bp, Homo sapien
atttatggcgtacaacatactgttc

SEQ ID NO: 5584232 - DNA, 25 bp, Homo sapien
ttgtgaaaacacttaaaatctctct

SEQ ID NO: 5584233 - DNA, 25 bp, Homo sapien
atgtatagtgaaatggctaaatcaa

SEQ ID NO: 5584234 - DNA, 25 bp, Homo sapien
ttcaagtacacattgttgtttgttt

SEQ ID NO: 5584235 - DNA, 25 bp, Homo sapien
agccgatacagctgctttgtcaaac

SEQ ID NO: 5584236 - DNA, 25 bp, Homo sapien
gagtggtccacagccgatacagctg

SEQ ID NO: 5584237 - DNA, 25 bp, Homo sapien
ctcctctctgaaaagggtaaaccag

SEQ ID NO: 5584238 - DNA, 25 bp, Homo sapien
tatttggaacaacgtatctggcacc

SEQ ID NO: 5584239 - DNA, 25 bp, Homo sapien
ctacagccagttccaagatccatta

SEQ ID NO: 5584240 - DNA, 25 bp, Homo sapien
tatggctacctccgtgactcacctc

SEQ ID NO: 5584241 - DNA, 25 bp, Homo sapien
gaggcaatctctaagaatctggatc

SEQ ID NO: 5584242 - DNA, 25 bp, Homo sapien
ggcagattccacagaccagagggaa

SEQ ID NO: 5584243 - DNA, 25 bp, Homo sapien
taacagatggcttctggcagattcc

SEQ ID NO: 5584244 - DNA, 25 bp, Homo sapien
tcgagcaggatggtgtcttatataa

SEQ ID NO: 5584245 - DNA, 25 bp, Homo sapien
tcaaagacgtgaattaaaggacaaa

SEQ ID NO: 5584246 - DNA, 25 bp, Homo sapien
atctggcacccaaggatagagaata

SEQ ID NO: 5584247 - DNA, 25 bp, Homo sapien
gtcttcctcagctgaagcaggaggc

SEQ ID NO: 5584248 - DNA, 25 bp, Homo sapien
tccgccacggcctcatgcttggtgt

SEQ ID NO: 5584249 - DNA, 25 bp, Homo sapien
ctcactccaccgccttgggagagcc

SEQ ID NO: 5584250 - DNA, 25 bp, Homo sapien
tgttgaaagctgtgtgccccaaatc

SEQ ID NO: 5584251 - DNA, 25 bp, Homo sapien
tctgacactgagccccatcgttcgc

SEQ ID NO: 5584252 - DNA, 25 bp, Homo sapien
ggcctgacttctgtccagtgtttgc

SEQ ID NO: 5584253 - DNA, 25 bp, Homo sapien
acaggggttacaaggaccttgctcc

SEQ ID NO: 5584254 - DNA, 25 bp, Homo sapien
caggctcacatagcccactgccatc

SEQ ID NO: 5584255 - DNA, 25 bp, Homo sapien
ccttgcctcctgctggctttgcctc

SEQ ID NO: 5584256 - DNA, 25 bp, Homo sapien
tctgtcactcaaggtagaatcatcc

SEQ ID NO: 5584257 - DNA, 25 bp, Homo sapien
gatcaacaactcgcagcacagtctc

SEQ ID NO: 5584258 - DNA, 25 bp, Homo sapien
gccatttggatgtatacgggcaggt

SEQ ID NO: 5584259 - DNA, 25 bp, Homo sapien
ttgtgtgataagtacttcaatgtcc

SEQ ID NO: 5584260 - DNA, 25 bp, Homo sapien
agctccctcctttcgggccccagac

SEQ ID NO: 5584261 - DNA, 25 bp, Homo sapien
gggaacaacagcttcgtggtagata

SEQ ID NO: 5584262 - DNA, 25 bp, Homo sapien
ttgatgaacgaatggcttgtttgct

SEQ ID NO: 5584263 - DNA, 25 bp, Homo sapien
gacagagggaaagctccctcctttc

SEQ ID NO: 5584264 - DNA, 25 bp, Homo sapien
gcctggaccacacctagtttttctc

SEQ ID NO: 5584265 - DNA, 25 bp, Homo sapien
cacatggtaggcgcttaaaaagtat

SEQ ID NO: 5584266 - DNA, 25 bp, Homo sapien
aacacagcaataaccacatcccatc

SEQ ID NO: 5584267 - DNA, 25 bp, Homo sapien
cacttcttccacgagcacctgagcc

SEQ ID NO: 5584268 - DNA, 25 bp, Homo sapien
ttcgtggtagatatcgctatcgtac

SEQ ID NO: 5584269 - DNA, 25 bp, Homo sapien
tctcagacccagaaaccgttgattc

SEQ ID NO: 5584270 - DNA, 25 bp, Homo sapien
tcccaatacaaagagagaagataat

SEQ ID NO: 5584271 - DNA, 25 bp, Homo sapien
ggttctgcagtaaagggcatgcaaa

SEQ ID NO: 5584272 - DNA, 25 bp, Homo sapien
ccagctgctgtggtcatagccttgg

SEQ ID NO: 5584273 - DNA, 25 bp, Homo sapien
gttcaaatgatgatgtgccccaccc

SEQ ID NO: 5584274 - DNA, 25 bp, Homo sapien
gatgtatgaaatggagaacaaaatc

SEQ ID NO: 5584275 - DNA, 25 bp, Homo sapien
tgagagtctacttcactgcagggct

SEQ ID NO: 5584276 - DNA, 25 bp, Homo sapien
gaaatgatgtggaaaaacagcaatc

SEQ ID NO: 5584277 - DNA, 25 bp, Homo sapien
atgcaaaactagagaacggctctga

SEQ ID NO: 5584278 - DNA, 25 bp, Homo sapien
ccagaattgctttaggagagtctct

SEQ ID NO: 5584279 - DNA, 25 bp, Homo sapien
tgcccacagtcaggtgtacaagttc

SEQ ID NO: 5584280 - DNA, 25 bp, Homo sapien
cgtctgaggcattgcatggatttac

SEQ ID NO: 5584281 - DNA, 25 bp, Homo sapien
attgctttacggttaaagaagatta

SEQ ID NO: 5584282 - DNA, 25 bp, Homo sapien
agatctcccactatgatgatgtttg

SEQ ID NO: 5584283 - DNA, 25 bp, Homo sapien
ttgaaagatgggtcttttggcaggg

SEQ ID NO: 5584284 - DNA, 25 bp, Homo sapien
agtaagcttgttggtaaattttcta

SEQ ID NO: 5584285 - DNA, 25 bp, Homo sapien
tttgttggcttgctttaagactctc

SEQ ID NO: 5584286 - DNA, 25 bp, Homo sapien
tccatgtgtgcagttgaaaagaatc

SEQ ID NO: 5584287 - DNA, 25 bp, Homo sapien
ttagaaaggtgtatttagatctccc

SEQ ID NO: 5584288 - DNA, 25 bp, Homo sapien
agtatagggtttttctggttatctc

SEQ ID NO: 5584289 - DNA, 25 bp, Homo sapien
tcataatgtatctagcagtatattc

SEQ ID NO: 5584290 - DNA, 25 bp, Homo sapien
atatatggtcattaagtaagcttgt

SEQ ID NO: 5584291 - DNA, 25 bp, Homo sapien
tggcagtattgaaagatgggtcttt

SEQ ID NO: 5584292 - DNA, 25 bp, Homo sapien
taaggctatttgctaaaacagatgt

SEQ ID NO: 5584293 - DNA, 25 bp, Homo sapien
ttacaggacagcactgcctacaagc

SEQ ID NO: 5584294 - DNA, 25 bp, Homo sapien
ttcaatctatttacaggacagcact

SEQ ID NO: 5584295 - DNA, 25 bp, Homo sapien
caatgctgtgttagcaacatcccat

SEQ ID NO: 5584296 - DNA, 25 bp, Homo sapien
tctagacagtagtacttgtgcaatt

SEQ ID NO: 5584297 - DNA, 25 bp, Homo sapien
aaccaaaatccatctgaaaacaaac

SEQ ID NO: 5584298 - DNA, 25 bp, Homo sapien
ctgcctacaagccaacaatgctgtg

SEQ ID NO: 5584299 - DNA, 25 bp, Homo sapien
gtcaaaacaatgtgtgaggacgaag

SEQ ID NO: 5584300 - DNA, 25 bp, Homo sapien
agctttagctcacagaaccaaaatc

SEQ ID NO: 5584301 - DNA, 25 bp, Homo sapien
ctaaactataggcccatttctaaga

SEQ ID NO: 5584302 - DNA, 25 bp, Homo sapien
cagatgtatacttgtgaagggaaaa

SEQ ID NO: 5584303 - DNA, 25 bp, Homo sapien
ctaggaaaaaaagaatatactgttc

SEQ ID NO: 5584304 - DNA, 25 bp, Homo sapien
cctgggttcaagtgacccacccacc

SEQ ID NO: 5584305 - DNA, 25 bp, Homo sapien
caagtctttaaaaatgatagcccct

SEQ ID NO: 5584306 - DNA, 25 bp, Homo sapien
gcattaatgcgaaagaactgtacac

SEQ ID NO: 5584307 - DNA, 25 bp, Homo sapien
aggttgatgtcaaactcctgggttc

SEQ ID NO: 5584308 - DNA, 25 bp, Homo sapien
gacgtgcaatagaatatactgttcc

SEQ ID NO: 5584309 - DNA, 25 bp, Homo sapien
agtaagaggtcttttgggaattgta

SEQ ID NO: 5584310 - DNA, 25 bp, Homo sapien
ttgggaattgtagacgtgcaataga

SEQ ID NO: 5584311 - DNA, 25 bp, Homo sapien
tctcatctgaaggctctaggaaaaa

SEQ ID NO: 5584312 - DNA, 25 bp, Homo sapien
ggtcatgggtgcattaatgcgaaag

SEQ ID NO: 5584313 - DNA, 25 bp, Homo sapien
ttaccacaatagagaaaatcaagtc

SEQ ID NO: 5584314 - DNA, 25 bp, Homo sapien
actactggtagttttgtctgcaatg

SEQ ID NO: 5584315 - DNA, 25 bp, Homo sapien
tgtgatttaggctctgactgaaata

SEQ ID NO: 5584316 - DNA, 25 bp, Homo sapien
aaaattcagacaatcaaaatgtgat

SEQ ID NO: 5584317 - DNA, 25 bp, Homo sapien
gcccagccgccactagcatgatttt

SEQ ID NO: 5584318 - DNA, 25 bp, Homo sapien
tattaaacaatatggactactggta

SEQ ID NO: 5584319 - DNA, 25 bp, Homo sapien
caaaatgtgatttaggctctgactg

SEQ ID NO: 5584320 - DNA, 25 bp, Homo sapien
ctgcatcctctgtcgccagggttca

SEQ ID NO: 5584321 - DNA, 25 bp, Homo sapien
tcactgcatcctctgtcgccagggt

SEQ ID NO: 5584322 - DNA, 25 bp, Homo sapien
aattgtaaattatttggccaagatc

SEQ ID NO: 5584323 - DNA, 25 bp, Homo sapien
taaacaatatggactactggtagtt

SEQ ID NO: 5584324 - DNA, 25 bp, Homo sapien
aatagtatcaaaaattcagacaatc

SEQ ID NO: 5584325 - DNA, 25 bp, Homo sapien
actgatgctcaaaaccggtgaacct

SEQ ID NO: 5584326 - DNA, 25 bp, Homo sapien
ggaaaacaccagacagggcatatca

SEQ ID NO: 5584327 - DNA, 25 bp, Homo sapien
gaaatccagaaggtgtcacagtgca

SEQ ID NO: 5584328 - DNA, 25 bp, Homo sapien
atgactaagcctgttctgaaaagaa

SEQ ID NO: 5584329 - DNA, 25 bp, Homo sapien
cggtgaacctgaatcctcaagagtt

SEQ ID NO: 5584330 - DNA, 25 bp, Homo sapien
acagggcatatcacgcaaaaagcac

SEQ ID NO: 5584331 - DNA, 25 bp, Homo sapien
ttagagtcaagataaataaaccaac

SEQ ID NO: 5584332 - DNA, 25 bp, Homo sapien
agaacgtgagcaaaactgaagtcta

SEQ ID NO: 5584333 - DNA, 25 bp, Homo sapien
gcaaaaagcacaaccatctgggatg

SEQ ID NO: 5584334 - DNA, 25 bp, Homo sapien
caggaaacctacgtctaggaacagc

SEQ ID NO: 5584335 - DNA, 25 bp, Homo sapien
aacaaaagaactgctcaggaaacct

SEQ ID NO: 5584336 - DNA, 25 bp, Homo sapien
gcagccgtgaggacctttcttgggc

SEQ ID NO: 5584337 - DNA, 25 bp, Homo sapien
cagtgcctactgtattgaacggtac

SEQ ID NO: 5584338 - DNA, 25 bp, Homo sapien
acatgtggctagtgccagtgcctac

SEQ ID NO: 5584339 - DNA, 25 bp, Homo sapien
tcactctagaaactggatggcaagt

SEQ ID NO: 5584340 - DNA, 25 bp, Homo sapien
ggcaagtgctacccagcacagcagc

SEQ ID NO: 5584341 - DNA, 25 bp, Homo sapien
gaacggtacagacagagcatttcat

SEQ ID NO: 5584342 - DNA, 25 bp, Homo sapien
tcaactgacagccctggtgatagtc

SEQ ID NO: 5584343 - DNA, 25 bp, Homo sapien
cctggtgatagtcaaggacaggtga

SEQ ID NO: 5584344 - DNA, 25 bp, Homo sapien
caagtgcttagctggcacatgtggc

SEQ ID NO: 5584345 - DNA, 25 bp, Homo sapien
gttagcaggacacatcacctatggc

SEQ ID NO: 5584346 - DNA, 25 bp, Homo sapien
tcaaggacaggtgactatgtttata

SEQ ID NO: 5584347 - DNA, 25 bp, Homo sapien
agtggcaatagctcatttggcagtg

SEQ ID NO: 5584348 - DNA, 25 bp, Homo sapien
attggctactcctatggacctctcc

SEQ ID NO: 5584349 - DNA, 25 bp, Homo sapien
ttagagagaggcaattgtccaaata

SEQ ID NO: 5584350 - DNA, 25 bp, Homo sapien
gcatatcaagtgagtggcaatagct

SEQ ID NO: 5584351 - DNA, 25 bp, Homo sapien
gtgccaggcaccgtacttcagactg

SEQ ID NO: 5584352 - DNA, 25 bp, Homo sapien
aggaaaggaattaatgtgccaggca

SEQ ID NO: 5584353 - DNA, 25 bp, Homo sapien
aatgtataagacaagattccttccc

SEQ ID NO: 5584354 - DNA, 25 bp, Homo sapien
tgattaaagggctgtcaaaaagttc

SEQ ID NO: 5584355 - DNA, 25 bp, Homo sapien
gttctgcacagaattgaaatgtaat

SEQ ID NO: 5584356 - DNA, 25 bp, Homo sapien
gcttctagagcacttagagagaggc

SEQ ID NO: 5584357 - DNA, 25 bp, Homo sapien
ttggatacatggtgattaaagggct

SEQ ID NO: 5584358 - DNA, 25 bp, Homo sapien
ggccggcggccgtccgggcagtggt

SEQ ID NO: 5584359 - DNA, 25 bp, Homo sapien
accactgcccggacggccgccggcc

SEQ ID NO: 5584360 - DNA, 25 bp, Homo sapien
ggctggcggctagcgggccggccgg

SEQ ID NO: 5584361 - DNA, 25 bp, Homo sapien
ccggccggcccgctagccgccagcc

SEQ ID NO: 5584362 - DNA, 25 bp, Homo sapien
cgcggctggcggctagcgggccggc

SEQ ID NO: 5584363 - DNA, 25 bp, Homo sapien
gccggcccgctagccgccagccgcg

SEQ ID NO: 5584364 - DNA, 25 bp, Homo sapien
atccggttcggagtcacttcccgag

SEQ ID NO: 5584365 - DNA, 25 bp, Homo sapien
ctcgggaagtgactccgaaccggat

SEQ ID NO: 5584366 - DNA, 25 bp, Homo sapien
ctacattgcagccaaaccacttatc

SEQ ID NO: 5584367 - DNA, 25 bp, Homo sapien
caatggccaataaattacttcactc

SEQ ID NO: 5584368 - DNA, 25 bp, Homo sapien
aggaagagaagtgccacacaaataa

SEQ ID NO: 5584369 - DNA, 25 bp, Homo sapien
aagacaatgcagacataaaacactt

SEQ ID NO: 5584370 - DNA, 25 bp, Homo sapien
caggatatcatgcagacagcttgca

SEQ ID NO: 5584371 - DNA, 25 bp, Homo sapien
ttgtagttacaaaatcagatagata

SEQ ID NO: 5584372 - DNA, 25 bp, Homo sapien
aaaggcatctaacccacttgcaaca

SEQ ID NO: 5584373 - DNA, 25 bp, Homo sapien
gcagacagcttgcataaatactcga

SEQ ID NO: 5584374 - DNA, 25 bp, Homo sapien
ttccaacaatatcaaacagctaaat

SEQ ID NO: 5584375 - DNA, 25 bp, Homo sapien
attaatagaatagtgtcaggatatc

SEQ ID NO: 5584376 - DNA, 25 bp, Homo sapien
aatactcgaggaataatagcatacc

SEQ ID NO: 5584377 - DNA, 25 bp, Homo sapien
aaatttggtgaatccaggaccactt

SEQ ID NO: 5584378 - DNA, 25 bp, Homo sapien
ggcagaggcagagctctataaaatt

SEQ ID NO: 5584379 - DNA, 25 bp, Homo sapien
gtcagacatatagatgatggaagac

SEQ ID NO: 5584380 - DNA, 25 bp, Homo sapien
caccaactgggtgttagtgatgctg

SEQ ID NO: 5584381 - DNA, 25 bp, Homo sapien
tacaagaagaatcaggctagccttt

SEQ ID NO: 5584382 - DNA, 25 bp, Homo sapien
aggcctacccaataaaggcagaggc

SEQ ID NO: 5584383 - DNA, 25 bp, Homo sapien
cagagaactctcgatacaaagtgtt

SEQ ID NO: 5584384 - DNA, 25 bp, Homo sapien
cttagtaggttgagaattgaagctc

SEQ ID NO: 5584385 - DNA, 25 bp, Homo sapien
tccttcgggggcagattattctgta

SEQ ID NO: 5584386 - DNA, 25 bp, Homo sapien
tcttgcccctgtagacacctatccc

SEQ ID NO: 5584387 - DNA, 25 bp, Homo sapien
acatcatcaaaaatcaggcctaccc

SEQ ID NO: 5584388 - DNA, 25 bp, Homo sapien
ttctacagtcaaaatactaatgctc

SEQ ID NO: 5584389 - DNA, 25 bp, Homo sapien
caggagatatggaaagtaccttctt

SEQ ID NO: 5584390 - DNA, 25 bp, Homo sapien
ttgatcaactcaggaaataattctt

SEQ ID NO: 5584391 - DNA, 25 bp, Homo sapien
acaaaaataataaaaagacatgctc

SEQ ID NO: 5584392 - DNA, 25 bp, Homo sapien
ctttttgttgagaaaaagggcagga

SEQ ID NO: 5584393 - DNA, 25 bp, Homo sapien
ggcaggatctagcgaagtaatgtgg

SEQ ID NO: 5584394 - DNA, 25 bp, Homo sapien
tcaggaataaagtagaattgtacat

SEQ ID NO: 5584395 - DNA, 25 bp, Homo sapien
agggtatcactgagcatgcccagtt

SEQ ID NO: 5584396 - DNA, 25 bp, Homo sapien
ccaactcaggagatatggaaagtac

SEQ ID NO: 5584397 - DNA, 25 bp, Homo sapien
gtaatgtggttgctcagggtatcac

SEQ ID NO: 5584398 - DNA, 25 bp, Homo sapien
tggtaaaaccaggacttcaggaata

SEQ ID NO: 5584399 - DNA, 25 bp, Homo sapien
ctggctgagcctattttaaatggga

SEQ ID NO: 5584400 - DNA, 25 bp, Homo sapien
atacactaagtatcattccagatga

SEQ ID NO: 5584401 - DNA, 25 bp, Homo sapien
ggcacaacccccaatctgtacccca

SEQ ID NO: 5584402 - DNA, 25 bp, Homo sapien
gtgtggtttgctgtggctaaagata

SEQ ID NO: 5584403 - DNA, 25 bp, Homo sapien
aacagtatggcacaacccccaatct

SEQ ID NO: 5584404 - DNA, 25 bp, Homo sapien
aatcaatgaatactacaaaacatat

SEQ ID NO: 5584405 - DNA, 25 bp, Homo sapien
ttattatagataggttaagtgtggt

SEQ ID NO: 5584406 - DNA, 25 bp, Homo sapien
ttctagataccaagaggtataatat

SEQ ID NO: 5584407 - DNA, 25 bp, Homo sapien
gacattgaactggctgagcctattt

SEQ ID NO: 5584408 - DNA, 25 bp, Homo sapien
ggtttgctgtggctaaagatatatt

SEQ ID NO: 5584409 - DNA, 25 bp, Homo sapien
ttatagataggttaagtgtggtttg

SEQ ID NO: 5584410 - DNA, 25 bp, Homo sapien
agaggatgggctcaagcttacatct

SEQ ID NO: 5584411 - DNA, 25 bp, Homo sapien
aacagtggtaaacaaagaatttgcc

SEQ ID NO: 5584412 - DNA, 25 bp, Homo sapien
aaataatacagcctcgtaccatccc

SEQ ID NO: 5584413 - DNA, 25 bp, Homo sapien
aggaaatggctaaattacaggtacc

SEQ ID NO: 5584414 - DNA, 25 bp, Homo sapien
aagaatttgcctccagtaggaactg

SEQ ID NO: 5584415 - DNA, 25 bp, Homo sapien
acatgctaagctatgggaccatttc

SEQ ID NO: 5584416 - DNA, 25 bp, Homo sapien
tgaaatacagagaacagtggtaaac

SEQ ID NO: 5584417 - DNA, 25 bp, Homo sapien
agtaggaactggaaaactaacagtc

SEQ ID NO: 5584418 - DNA, 25 bp, Homo sapien
atactgatatatagagaaggctttt

SEQ ID NO: 5584419 - DNA, 25 bp, Homo sapien
gatggatggaaagtatgccttctgg

SEQ ID NO: 5584420 - DNA, 25 bp, Homo sapien
acatagaagcctcttaagcagaagt

SEQ ID NO: 5584421 - DNA, 25 bp, Homo sapien
ggggacgtgcctcgcacccgggggc

SEQ ID NO: 5584422 - DNA, 25 bp, Homo sapien
gcccccgggtgcgaggcacgtcccc

SEQ ID NO: 5584423 - DNA, 25 bp, Homo sapien
cacgttaaaagcactcaaattcccc

SEQ ID NO: 5584424 - DNA, 25 bp, Homo sapien
tacattagcttacagtgaaactcat

SEQ ID NO: 5584425 - DNA, 25 bp, Homo sapien
atacaacaaagcttgactatctctc

SEQ ID NO: 5584426 - DNA, 25 bp, Homo sapien
aataggaaatagttaatgtgtcttt

SEQ ID NO: 5584427 - DNA, 25 bp, Homo sapien
tgtccatgaaggatgaaataggaaa

SEQ ID NO: 5584428 - DNA, 25 bp, Homo sapien
ctgaagtgagaacagtgcattacac

SEQ ID NO: 5584429 - DNA, 25 bp, Homo sapien
tatgtgtggaaaagtaactcaaacc

SEQ ID NO: 5584430 - DNA, 25 bp, Homo sapien
ttggaaacaaagacagcaccactat

SEQ ID NO: 5584431 - DNA, 25 bp, Homo sapien
tttatgattcggaaatttggctgaa

SEQ ID NO: 5584432 - DNA, 25 bp, Homo sapien
agaaatgccacagtatatcctatta

SEQ ID NO: 5584433 - DNA, 25 bp, Homo sapien
ggctgaacagggccatatcaacttc

SEQ ID NO: 5584434 - DNA, 25 bp, Homo sapien
ctgcagtccaagtatacccccacaa

SEQ ID NO: 5584435 - DNA, 25 bp, Homo sapien
aacccctgcagtccaagtatacccc

SEQ ID NO: 5584436 - DNA, 25 bp, Homo sapien
acacattgacaataacccctgcagt

SEQ ID NO: 5584437 - DNA, 25 bp, Homo sapien
ataacacaattttaggtgcaatttc

SEQ ID NO: 5584438 - DNA, 25 bp, Homo sapien
aaccaaagtaactgtgactaaatac

SEQ ID NO: 5584439 - DNA, 25 bp, Homo sapien
aaaattggtatatcacattagatga

SEQ ID NO: 5584440 - DNA, 25 bp, Homo sapien
aataggttgtcaaatatacagttat

SEQ ID NO: 5584441 - DNA, 25 bp, Homo sapien
ataaatcttccagtacagttcccat

SEQ ID NO: 5584442 - DNA, 25 bp, Homo sapien
acccccacaatagtacaaattacaa

SEQ ID NO: 5584443 - DNA, 25 bp, Homo sapien
agtacaataaatttagcattgctgc

SEQ ID NO: 5584444 - DNA, 25 bp, Homo sapien
tttaggtgcaatttcacatgctttc

SEQ ID NO: 5584445 - DNA, 25 bp, Homo sapien
ctaggaaagttcagagatctcagaa

SEQ ID NO: 5584446 - DNA, 25 bp, Homo sapien
agccatagtcaagtgcctaggagga

SEQ ID NO: 5584447 - DNA, 25 bp, Homo sapien
acaaaggcctaggcgctagctttct

SEQ ID NO: 5584448 - DNA, 25 bp, Homo sapien
gacaagcttgaaggacgacccttaa

SEQ ID NO: 5584449 - DNA, 25 bp, Homo sapien
gatctcagaagaacttggtgcacag

SEQ ID NO: 5584450 - DNA, 25 bp, Homo sapien
ctgcatctgatgtggagccatagtc

SEQ ID NO: 5584451 - DNA, 25 bp, Homo sapien
atcaagtggcctaaacacagagatt

SEQ ID NO: 5584452 - DNA, 25 bp, Homo sapien
taagaaatcagaagccctaccagtc

SEQ ID NO: 5584453 - DNA, 25 bp, Homo sapien
gaggaagcaccccagcttggttact

SEQ ID NO: 5584454 - DNA, 25 bp, Homo sapien
tggtgcacagccaaagcgctgacaa

SEQ ID NO: 5584455 - DNA, 25 bp, Homo sapien
taataaagagcttctaggaaagttc

SEQ ID NO: 5584456 - DNA, 25 bp, Homo sapien
aagattgatatgagtcttataagaa

SEQ ID NO: 5584457 - DNA, 25 bp, Homo sapien
ttcttataagactcatatcaatctt

SEQ ID NO: 5584458 - DNA, 25 bp, Homo sapien
tctaccacccgtgaggggataaagg

SEQ ID NO: 5584459 - DNA, 25 bp, Homo sapien
cctttatcccctcacgggtggtaga

SEQ ID NO: 5584460 - DNA, 25 bp, Homo sapien
aaaatattccagtagggccggatat

SEQ ID NO: 5584461 - DNA, 25 bp, Homo sapien
aattagttggctgtgttggtgtatg

SEQ ID NO: 5584462 - DNA, 25 bp, Homo sapien
aaatgcaatgttggatctagatttc

SEQ ID NO: 5584463 - DNA, 25 bp, Homo sapien
acaagtgcaatgatgtaacacctga

SEQ ID NO: 5584464 - DNA, 25 bp, Homo sapien
acacatctggggatactctcagtca

SEQ ID NO: 5584465 - DNA, 25 bp, Homo sapien
gcaggagaatctctcaaggccagga

SEQ ID NO: 5584466 - DNA, 25 bp, Homo sapien
ctgtgttggtgtatgcatgtagtcc

SEQ ID NO: 5584467 - DNA, 25 bp, Homo sapien
gagtaaaggagacacatcaaccaaa

SEQ ID NO: 5584468 - DNA, 25 bp, Homo sapien
aattttttgagtgtgacaatgatgc

SEQ ID NO: 5584469 - DNA, 25 bp, Homo sapien
tagggccggatattgtaatcccagc

SEQ ID NO: 5584470 - DNA, 25 bp, Homo sapien
aataaatgaaccaggatcaaatcca

SEQ ID NO: 5584471 - DNA, 25 bp, Homo sapien
tatcatcacggtatggcgttgctac

SEQ ID NO: 5584472 - DNA, 25 bp, Homo sapien
atagatttaggcttcaaaaacactc

SEQ ID NO: 5584473 - DNA, 25 bp, Homo sapien
gtcctttaaatgtgggtgaaactga

SEQ ID NO: 5584474 - DNA, 25 bp, Homo sapien
aaaagacagtcaattggagtttgga

SEQ ID NO: 5584475 - DNA, 25 bp, Homo sapien
ggagtttggaagcattgattgttac

SEQ ID NO: 5584476 - DNA, 25 bp, Homo sapien
gtgggtgaaactgatccttgattta

SEQ ID NO: 5584477 - DNA, 25 bp, Homo sapien
tggttagcataacaactaggtaaat

SEQ ID NO: 5584478 - DNA, 25 bp, Homo sapien
agacagaaatgagtcaagtagtcct

SEQ ID NO: 5584479 - DNA, 25 bp, Homo sapien
ggcgttgctactaccaaagtccatt

SEQ ID NO: 5584480 - DNA, 25 bp, Homo sapien
gtaaaaagctgaattggttagcata

SEQ ID NO: 5584481 - DNA, 25 bp, Homo sapien
gtgaccatttatagcaacagtgacc

SEQ ID NO: 5584482 - DNA, 25 bp, Homo sapien
agtcagctcagttaagaggaaggga

SEQ ID NO: 5584483 - DNA, 25 bp, Homo sapien
actacaccccaaaggttgtgcttta

SEQ ID NO: 5584484 - DNA, 25 bp, Homo sapien
ggggtcacaagcacgtctctctccc

SEQ ID NO: 5584485 - DNA, 25 bp, Homo sapien
tgacacaagaatgtggcacaggtca

SEQ ID NO: 5584486 - DNA, 25 bp, Homo sapien
ctctcatatgttgaagaaaacgcag

SEQ ID NO: 5584487 - DNA, 25 bp, Homo sapien
acacagggaaaaatgtctcttaact

SEQ ID NO: 5584488 - DNA, 25 bp, Homo sapien
ttcagcaatttggtagacttagaca

SEQ ID NO: 5584489 - DNA, 25 bp, Homo sapien
atgaaatcccaggaaacggaagaaa

SEQ ID NO: 5584490 - DNA, 25 bp, Homo sapien
gctggtgctcccagaaaggttcagg

SEQ ID NO: 5584491 - DNA, 25 bp, Homo sapien
cctgaatgagccaatcacccaagtg

SEQ ID NO: 5584492 - DNA, 25 bp, Homo sapien
gaatagggcagctcctctaaatgct

SEQ ID NO: 5584493 - DNA, 25 bp, Homo sapien
gaaggagccaaatgggactcctctc

SEQ ID NO: 5584494 - DNA, 25 bp, Homo sapien
tcctccctggagtgtgcagttggaa

SEQ ID NO: 5584495 - DNA, 25 bp, Homo sapien
ctattcttagagagcagagacagtc

SEQ ID NO: 5584496 - DNA, 25 bp, Homo sapien
atgccatctgtgagggaaacctatt

SEQ ID NO: 5584497 - DNA, 25 bp, Homo sapien
agtaagtagaggttaaaccattcta

SEQ ID NO: 5584498 - DNA, 25 bp, Homo sapien
acttactgtgcaacaagagccctct

SEQ ID NO: 5584499 - DNA, 25 bp, Homo sapien
aaggtttcaccttcagctgggggca

SEQ ID NO: 5584500 - DNA, 25 bp, Homo sapien
gctctagcagcatccagagagatgc

SEQ ID NO: 5584501 - DNA, 25 bp, Homo sapien
aactagcatttaggaagcatagcac

SEQ ID NO: 5584502 - DNA, 25 bp, Homo sapien
gaattaacaggattgtagcaggtgt

SEQ ID NO: 5584503 - DNA, 25 bp, Homo sapien
gaagcaccagatgctctagcagcat

SEQ ID NO: 5584504 - DNA, 25 bp, Homo sapien
gcctggtcaacatgcagtgctgaac

SEQ ID NO: 5584505 - DNA, 25 bp, Homo sapien
ttttggatccaaacgagcatctata

SEQ ID NO: 5584506 - DNA, 25 bp, Homo sapien
ttgttatttgaggctagaaccggtg

SEQ ID NO: 5584507 - DNA, 25 bp, Homo sapien
tgaggcagagcacccaatttccctc

SEQ ID NO: 5584508 - DNA, 25 bp, Homo sapien
attataggatatccgcctggtcaac

SEQ ID NO: 5584509 - DNA, 25 bp, Homo sapien
tcaaacaccgtgactgcaggggtgt

SEQ ID NO: 5584510 - DNA, 25 bp, Homo sapien
cctctaggagcaaaacaaagaggga

SEQ ID NO: 5584511 - DNA, 25 bp, Homo sapien
gcatcagctgccattcaaacaccgt

SEQ ID NO: 5584512 - DNA, 25 bp, Homo sapien
gtgcaccctgcagagtctgaaatct

SEQ ID NO: 5584513 - DNA, 25 bp, Homo sapien
atgcaccgatactctgggtgggcca

SEQ ID NO: 5584514 - DNA, 25 bp, Homo sapien
ttagaatgcaggtagcagcatttta

SEQ ID NO: 5584515 - DNA, 25 bp, Homo sapien
tccagaaacagttctagccttctct

SEQ ID NO: 5584516 - DNA, 25 bp, Homo sapien
aactagaccagtaatcctcaacatg

SEQ ID NO: 5584517 - DNA, 25 bp, Homo sapien
ctaggccatctaaagtgcatccagc

SEQ ID NO: 5584518 - DNA, 25 bp, Homo sapien
aaagtgcatccagcagctcacctgc

SEQ ID NO: 5584519 - DNA, 25 bp, Homo sapien
gacggcctggcatactaggccatct

SEQ ID NO: 5584520 - DNA, 25 bp, Homo sapien
acaaaccataagcatcactgccatt

SEQ ID NO: 5584521 - DNA, 25 bp, Homo sapien
tatccctgttgacacatcagtcttt

SEQ ID NO: 5584522 - DNA, 25 bp, Homo sapien
ttgtcagatggatatgaacatacat

SEQ ID NO: 5584523 - DNA, 25 bp, Homo sapien
aggaggtagaaagagttaataactc

SEQ ID NO: 5584524 - DNA, 25 bp, Homo sapien
aagcatcactgccattctgagctga

SEQ ID NO: 5584525 - DNA, 25 bp, Homo sapien
tgctaagtgctaacagatagtgctc

SEQ ID NO: 5584526 - DNA, 25 bp, Homo sapien
ggttgctggttgatgtttctggttc

SEQ ID NO: 5584527 - DNA, 25 bp, Homo sapien
ggcgcctctaagagttacagggttc

SEQ ID NO: 5584528 - DNA, 25 bp, Homo sapien
ggaagctccatcactggggagtgcc

SEQ ID NO: 5584529 - DNA, 25 bp, Homo sapien
ttggtgctaaccagagaaccttgct

SEQ ID NO: 5584530 - DNA, 25 bp, Homo sapien
cttctgtggtcacccttgggcggag

SEQ ID NO: 5584531 - DNA, 25 bp, Homo sapien
gggacacttgtgcaccgaatggtag

SEQ ID NO: 5584532 - DNA, 25 bp, Homo sapien
ctgaagctccacaacacgaactgtt

SEQ ID NO: 5584533 - DNA, 25 bp, Homo sapien
gagcgcgttgctcaaaggcgcctct

SEQ ID NO: 5584534 - DNA, 25 bp, Homo sapien
gggcgagacctcaggatcttgttca

SEQ ID NO: 5584535 - DNA, 25 bp, Homo sapien
tggggagtgcctagctttacatgca

SEQ ID NO: 5584536 - DNA, 25 bp, Homo sapien
cttcaccgaagttcagggacacttg

SEQ ID NO: 5584537 - DNA, 25 bp, Homo sapien
aatgctaaatagtcaatgagggata

SEQ ID NO: 5584538 - DNA, 25 bp, Homo sapien
acctccaagacatcctggcaacacc

SEQ ID NO: 5584539 - DNA, 25 bp, Homo sapien
ttaacctatggagactcagtgcctc

SEQ ID NO: 5584540 - DNA, 25 bp, Homo sapien
tatggagactcagtgcctctgtgtg

SEQ ID NO: 5584541 - DNA, 25 bp, Homo sapien
acctgggcaagtcattttacctcta

SEQ ID NO: 5584542 - DNA, 25 bp, Homo sapien
cacctgataaagtggctcctgctct

SEQ ID NO: 5584543 - DNA, 25 bp, Homo sapien
ggcaaaggccagttttggtggcatt

SEQ ID NO: 5584544 - DNA, 25 bp, Homo sapien
gttgaaagaattagacaccagtgtt

SEQ ID NO: 5584545 - DNA, 25 bp, Homo sapien
ggcaacaccaccgcttgggactagc

SEQ ID NO: 5584546 - DNA, 25 bp, Homo sapien
ctatcttgaagcctctatggacaaa

SEQ ID NO: 5584547 - DNA, 25 bp, Homo sapien
aaagcttgcagaaatgtcaggaaaa

SEQ ID NO: 5584548 - DNA, 25 bp, Homo sapien
tccagatcaaacattaggcccaatt

SEQ ID NO: 5584549 - DNA, 25 bp, Homo sapien
aggcttcatggataaacaacagaac

SEQ ID NO: 5584550 - DNA, 25 bp, Homo sapien
actactaatagcagtgtgtcaaacc

SEQ ID NO: 5584551 - DNA, 25 bp, Homo sapien
ccagggaatcgtggaattatgagtc

SEQ ID NO: 5584552 - DNA, 25 bp, Homo sapien
taaattgtggaaatacggttctgat

SEQ ID NO: 5584553 - DNA, 25 bp, Homo sapien
acggttctgatttgtggttcgagtc

SEQ ID NO: 5584554 - DNA, 25 bp, Homo sapien
gttcgagtcagttcaaggcaaattc

SEQ ID NO: 5584555 - DNA, 25 bp, Homo sapien
cagggtcttgggaagatttttgttc

SEQ ID NO: 5584556 - DNA, 25 bp, Homo sapien
aagaatgttttgagacccactgggc

SEQ ID NO: 5584557 - DNA, 25 bp, Homo sapien
ggaagatctctttgccagggtcttg

SEQ ID NO: 5584558 - DNA, 25 bp, Homo sapien
caaattcctggtgactgctaagtac

SEQ ID NO: 5584559 - DNA, 25 bp, Homo sapien
tattccaagagttgtatacagcttt

SEQ ID NO: 5584560 - DNA, 25 bp, Homo sapien
gatagtagcaagacagaaaatgcaa

SEQ ID NO: 5584561 - DNA, 25 bp, Homo sapien
tatacgcagatagtagcaagacaga

SEQ ID NO: 5584562 - DNA, 25 bp, Homo sapien
tacctacagaggtgagctaatggat

SEQ ID NO: 5584563 - DNA, 25 bp, Homo sapien
aatattaaagttgcacgttggattt

SEQ ID NO: 5584564 - DNA, 25 bp, Homo sapien
ggactgcagagaccctagttttgtc

SEQ ID NO: 5584565 - DNA, 25 bp, Homo sapien
atgagaaattacaaccctacaaggt

SEQ ID NO: 5584566 - DNA, 25 bp, Homo sapien
ttttggtctcttaggtctgtgatac

SEQ ID NO: 5584567 - DNA, 25 bp, Homo sapien
taggtctgtgatacaaaggcataaa

SEQ ID NO: 5584568 - DNA, 25 bp, Homo sapien
tatagttaatacttagtggaaagaa

SEQ ID NO: 5584569 - DNA, 25 bp, Homo sapien
agaaaagctgttacatatacgcaga

SEQ ID NO: 5584570 - DNA, 25 bp, Homo sapien
ctccacttctgtgaggggctttgat

SEQ ID NO: 5584571 - DNA, 25 bp, Homo sapien
aaccgctactcttgggcaccgtcct

SEQ ID NO: 5584572 - DNA, 25 bp, Homo sapien
aaccacaaccagaagacattgcctt

SEQ ID NO: 5584573 - DNA, 25 bp, Homo sapien
cccagcagagactcttgctcccatc

SEQ ID NO: 5584574 - DNA, 25 bp, Homo sapien
gtttaattggcgtgacatggacgac

SEQ ID NO: 5584575 - DNA, 25 bp, Homo sapien
aatttctcccccaagtggcaggctc

SEQ ID NO: 5584576 - DNA, 25 bp, Homo sapien
acaagtccaggaagcgtgtttaatt

SEQ ID NO: 5584577 - DNA, 25 bp, Homo sapien
cccatccaagggatggggaaattga

SEQ ID NO: 5584578 - DNA, 25 bp, Homo sapien
ggcatgctacacggcccctgtccac

SEQ ID NO: 5584579 - DNA, 25 bp, Homo sapien
tttgggtctcaccaggcccctgcaa

SEQ ID NO: 5584580 - DNA, 25 bp, Homo sapien
gaggggctttgatgatgacactcac

SEQ ID NO: 5584581 - DNA, 25 bp, Homo sapien
tctgtgtcgagtggtttctctcctc

SEQ ID NO: 5584582 - DNA, 25 bp, Homo sapien
gcgcccccacggctgttgggggctc

SEQ ID NO: 5584583 - DNA, 25 bp, Homo sapien
ccggctttatgaccgagccccccat

SEQ ID NO: 5584584 - DNA, 25 bp, Homo sapien
cgagccccccatgacgctcagatcc

SEQ ID NO: 5584585 - DNA, 25 bp, Homo sapien
ctggggtgaatattgtctgtgtcga

SEQ ID NO: 5584586 - DNA, 25 bp, Homo sapien
tgggggaacccgcaatatgttgttc

SEQ ID NO: 5584587 - DNA, 25 bp, Homo sapien
cctgaaccttgggctccatcgctgg

SEQ ID NO: 5584588 - DNA, 25 bp, Homo sapien
tttgctggctcctgaaccttgggct

SEQ ID NO: 5584589 - DNA, 25 bp, Homo sapien
ttctcagctctggggtgaatattgt

SEQ ID NO: 5584590 - DNA, 25 bp, Homo sapien
ttgttccaaagagcgctcgccccta

SEQ ID NO: 5584591 - DNA, 25 bp, Homo sapien
cttctgtattgcagccccagtgccc

SEQ ID NO: 5584592 - DNA, 25 bp, Homo sapien
aagagtgcttgttagacagcaagtt

SEQ ID NO: 5584593 - DNA, 25 bp, Homo sapien
acctgcctttgaagggacagatccc

SEQ ID NO: 5584594 - DNA, 25 bp, Homo sapien
taaggtcatggttggttttaatcac

SEQ ID NO: 5584595 - DNA, 25 bp, Homo sapien
ctgaaataacagtgattgagtcaat

SEQ ID NO: 5584596 - DNA, 25 bp, Homo sapien
gccaggattttggtgcctatgggtt

SEQ ID NO: 5584597 - DNA, 25 bp, Homo sapien
accacgattatgtttgccaggattt

SEQ ID NO: 5584598 - DNA, 25 bp, Homo sapien
aatacgaattaaagggcaactcacc

SEQ ID NO: 5584599 - DNA, 25 bp, Homo sapien
atgtaaacagccaggattttggtgc

SEQ ID NO: 5584600 - DNA, 25 bp, Homo sapien
taaaagctgaacactaaaacatctt

SEQ ID NO: 5584601 - DNA, 25 bp, Homo sapien
tactgaagttagacgagtttgggta

SEQ ID NO: 5584602 - DNA, 25 bp, Homo sapien
tgagtcaatgaagtggcaatacgaa

SEQ ID NO: 5584603 - DNA, 25 bp, Homo sapien
caaggtaaaaataatcggcatttca

SEQ ID NO: 5584604 - DNA, 25 bp, Homo sapien
agatagatataaaaagactgaagaa

SEQ ID NO: 5584605 - DNA, 25 bp, Homo sapien
atggacagtaaagttagaggtcatc

SEQ ID NO: 5584606 - DNA, 25 bp, Homo sapien
ccaaggcattttgaacacataaacc

SEQ ID NO: 5584607 - DNA, 25 bp, Homo sapien
ttggatacaaatactgctggcataa

SEQ ID NO: 5584608 - DNA, 25 bp, Homo sapien
tgcactgttattaagaagagatgga

SEQ ID NO: 5584609 - DNA, 25 bp, Homo sapien
atggggttattatgtgaacctggat

SEQ ID NO: 5584610 - DNA, 25 bp, Homo sapien
aaagaatgacaaactccatatggac

SEQ ID NO: 5584611 - DNA, 25 bp, Homo sapien
tttggattcaaatggggttattatg

SEQ ID NO: 5584612 - DNA, 25 bp, Homo sapien
tattaagaagagatggaaagttctc

SEQ ID NO: 5584613 - DNA, 25 bp, Homo sapien
agaggtcatccaatttaccaaggca

SEQ ID NO: 5584614 - DNA, 25 bp, Homo sapien
ctggggacctagtctgagtaaagta

SEQ ID NO: 5584615 - DNA, 25 bp, Homo sapien
agctagctcctgcattccacccagc

SEQ ID NO: 5584616 - DNA, 25 bp, Homo sapien
ctagtctgagtaaagtagttagggc

SEQ ID NO: 5584617 - DNA, 25 bp, Homo sapien
atagatgatcttagtggaatgcttc

SEQ ID NO: 5584618 - DNA, 25 bp, Homo sapien
tcacatctgccgagaagtgaaaggc

SEQ ID NO: 5584619 - DNA, 25 bp, Homo sapien
ggtggagctaccaatcggtcacatc

SEQ ID NO: 5584620 - DNA, 25 bp, Homo sapien
tgaggcccgagtaataaaggcattt

SEQ ID NO: 5584621 - DNA, 25 bp, Homo sapien
tcttagtggaatgcttcaggcagag

SEQ ID NO: 5584622 - DNA, 25 bp, Homo sapien
gagggctcttcaggtgtctcggagc

SEQ ID NO: 5584623 - DNA, 25 bp, Homo sapien
ttggtcaccagtagcctgtccatga

SEQ ID NO: 5584624 - DNA, 25 bp, Homo sapien
gcctgtgctgaatgaacgaacgagg

SEQ ID NO: 5584625 - DNA, 25 bp, Homo sapien
gattggatgtatgttgcacgaagta

SEQ ID NO: 5584626 - DNA, 25 bp, Homo sapien
gcagatgcagcttcgtgccacatcc

SEQ ID NO: 5584627 - DNA, 25 bp, Homo sapien
atgagcatcacaatagtttggaagc

SEQ ID NO: 5584628 - DNA, 25 bp, Homo sapien
attttggcagtagtgtggctgctgg

SEQ ID NO: 5584629 - DNA, 25 bp, Homo sapien
ttccttgggaagtcaagcatgagca

SEQ ID NO: 5584630 - DNA, 25 bp, Homo sapien
ggcagtgttaggtttggaattgtgc

SEQ ID NO: 5584631 - DNA, 25 bp, Homo sapien
ggggtagcgtcaataggatatgact

SEQ ID NO: 5584632 - DNA, 25 bp, Homo sapien
tgcagtaactgaatgaaggcagtgc

SEQ ID NO: 5584633 - DNA, 25 bp, Homo sapien
atctgcacccagcaagtgagtttcc

SEQ ID NO: 5584634 - DNA, 25 bp, Homo sapien
gcacgaagtagggcattaagaaaaa

SEQ ID NO: 5584635 - DNA, 25 bp, Homo sapien
aggcccagagatatttaggggtagc

SEQ ID NO: 5584636 - DNA, 25 bp, Homo sapien
actgttactagggttctgatgatca

SEQ ID NO: 5584637 - DNA, 25 bp, Homo sapien
attcagggataagaatggctgagat

SEQ ID NO: 5584638 - DNA, 25 bp, Homo sapien
attagagaagcagtgtatatcaaat

SEQ ID NO: 5584639 - DNA, 25 bp, Homo sapien
agaggcagaagcctggtcagttatt

SEQ ID NO: 5584640 - DNA, 25 bp, Homo sapien
ttattctgatgactggcctaggagg

SEQ ID NO: 5584641 - DNA, 25 bp, Homo sapien
tggcctaggaggtaacccacttatg

SEQ ID NO: 5584642 - DNA, 25 bp, Homo sapien
aggcatcctaatagtggcaaaagtt

SEQ ID NO: 5584643 - DNA, 25 bp, Homo sapien
atagaaaactgtaggttactgttac

SEQ ID NO: 5584644 - DNA, 25 bp, Homo sapien
gcatgcagaagtgacaagattgttg

SEQ ID NO: 5584645 - DNA, 25 bp, Homo sapien
agaggctcaggcatgtctatagcta

SEQ ID NO: 5584646 - DNA, 25 bp, Homo sapien
ctagcctgggcatatagaggctcag

SEQ ID NO: 5584647 - DNA, 25 bp, Homo sapien
tgtgtctggccccggtcactatctt

SEQ ID NO: 5584648 - DNA, 25 bp, Homo sapien
ggagccagtaggacatgacattcct

SEQ ID NO: 5584649 - DNA, 25 bp, Homo sapien
tcctgatgatgtcggcccctctcca

SEQ ID NO: 5584650 - DNA, 25 bp, Homo sapien
aaacagactagaaggaccaaagtat

SEQ ID NO: 5584651 - DNA, 25 bp, Homo sapien
tctcagcaatgccggtacaaaagga

SEQ ID NO: 5584652 - DNA, 25 bp, Homo sapien
caccagcagctctcagcaatgccgg

SEQ ID NO: 5584653 - DNA, 25 bp, Homo sapien
ccaaggctcattgacaagctctctc

SEQ ID NO: 5584654 - DNA, 25 bp, Homo sapien
gttccattctaggagccagtaggac

SEQ ID NO: 5584655 - DNA, 25 bp, Homo sapien
taatgaagaggcagatttaacaaac

SEQ ID NO: 5584656 - DNA, 25 bp, Homo sapien
gaccccctgggttgttgtgccctca

SEQ ID NO: 5584657 - DNA, 25 bp, Homo sapien
tcctgcacttcagaccccctgggtt

SEQ ID NO: 5584658 - DNA, 25 bp, Homo sapien
gagcaatataacatcacaaacgtac

SEQ ID NO: 5584659 - DNA, 25 bp, Homo sapien
actcttgggtggagtaaatgcaatg

SEQ ID NO: 5584660 - DNA, 25 bp, Homo sapien
tttagaaattatgtgaaaatccact

SEQ ID NO: 5584661 - DNA, 25 bp, Homo sapien
taaagtatgccatgagcaatataac

SEQ ID NO: 5584662 - DNA, 25 bp, Homo sapien
tgaaaagtcagtatataaataagaa

SEQ ID NO: 5584663 - DNA, 25 bp, Homo sapien
acaaacgtactgtgacaaaccatta

SEQ ID NO: 5584664 - DNA, 25 bp, Homo sapien
tttgttcgaacacataaagtatgcc

SEQ ID NO: 5584665 - DNA, 25 bp, Homo sapien
gatcactgaagtcagacatgatatt

SEQ ID NO: 5584666 - DNA, 25 bp, Homo sapien
aaaatccactcttgggtggagtaaa

SEQ ID NO: 5584667 - DNA, 25 bp, Homo sapien
tgacaaaccattaataaagaaggat

SEQ ID NO: 5584668 - DNA, 25 bp, Homo sapien
ataaagaaggattactaagccaggt

SEQ ID NO: 5584669 - DNA, 25 bp, Homo sapien
gtgtggcacacatagaaataaaaag

SEQ ID NO: 5584670 - DNA, 25 bp, Homo sapien
tgttgcttaagggagcaattgctct

SEQ ID NO: 5584671 - DNA, 25 bp, Homo sapien
ttgcagtcagttatacagatcagga

SEQ ID NO: 5584672 - DNA, 25 bp, Homo sapien
accctgatactaacggctgctgctc

SEQ ID NO: 5584673 - DNA, 25 bp, Homo sapien
cctcggactgtccaagaatgggaaa

SEQ ID NO: 5584674 - DNA, 25 bp, Homo sapien
gtccaagaatgggaaaccctgatac

SEQ ID NO: 5584675 - DNA, 25 bp, Homo sapien
tctaacaggtcacagcctcggactg

SEQ ID NO: 5584676 - DNA, 25 bp, Homo sapien
caggaaaagtagtgacaatttatag

SEQ ID NO: 5584677 - DNA, 25 bp, Homo sapien
tgggtgttaacaatgaaaagacaat

SEQ ID NO: 5584678 - DNA, 25 bp, Homo sapien
aacccagggtaaatatgaatctgtt

SEQ ID NO: 5584679 - DNA, 25 bp, Homo sapien
gatagatgctattttgggtgttaac

SEQ ID NO: 5584680 - DNA, 25 bp, Homo sapien
aggctgtcccaggacaaggatctct

SEQ ID NO: 5584681 - DNA, 25 bp, Homo sapien
gctaagatggccacaggacatttaa

SEQ ID NO: 5584682 - DNA, 25 bp, Homo sapien
aaccactggttgtcacggagacagg

SEQ ID NO: 5584683 - DNA, 25 bp, Homo sapien
aatgggtatgtgatatgtgtgctat

SEQ ID NO: 5584684 - DNA, 25 bp, Homo sapien
ccaaagactttcggctaagatggcc

SEQ ID NO: 5584685 - DNA, 25 bp, Homo sapien
gtaagggctagtatgaaggtactac

SEQ ID NO: 5584686 - DNA, 25 bp, Homo sapien
gaacaagcaaggaaatcccataatg

SEQ ID NO: 5584687 - DNA, 25 bp, Homo sapien
atctagcccaccaggaaggaaatat

SEQ ID NO: 5584688 - DNA, 25 bp, Homo sapien
tgtgctaatgtcctaagtgaagttc

SEQ ID NO: 5584689 - DNA, 25 bp, Homo sapien
gatctctagagaaaagacaacctac

SEQ ID NO: 5584690 - DNA, 25 bp, Homo sapien
gggaaaaatgcatgacagagtcttt

SEQ ID NO: 5584691 - DNA, 25 bp, Homo sapien
agtaacaataactgtagatttctat

SEQ ID NO: 5584692 - DNA, 25 bp, Homo sapien
atagaaatctacagttattgttact

SEQ ID NO: 5584693 - DNA, 25 bp, Homo sapien
accagggagtgtataaaaatagaat

SEQ ID NO: 5584694 - DNA, 25 bp, Homo sapien
ccacagggtggttaatctactatat

SEQ ID NO: 5584695 - DNA, 25 bp, Homo sapien
tgacagtatagccgtgaatggaaaa

SEQ ID NO: 5584696 - DNA, 25 bp, Homo sapien
ttaggcttatcagcagagggcacta

SEQ ID NO: 5584697 - DNA, 25 bp, Homo sapien
aatagccccaaaacaatgaaaggaa

SEQ ID NO: 5584698 - DNA, 25 bp, Homo sapien
ggagggtaacactgtgccagttatc

SEQ ID NO: 5584699 - DNA, 25 bp, Homo sapien
agagacactgcaggcatagcagaga

SEQ ID NO: 5584700 - DNA, 25 bp, Homo sapien
tatagagcatgaatggatattgaca

SEQ ID NO: 5584701 - DNA, 25 bp, Homo sapien
ttatggtgtcacctatggagttcca

SEQ ID NO: 5584702 - DNA, 25 bp, Homo sapien
ccacctcaccccagtagatggcttc

SEQ ID NO: 5584703 - DNA, 25 bp, Homo sapien
gcagtagctgcccttcctagatctc

SEQ ID NO: 5584704 - DNA, 25 bp, Homo sapien
tacttaataagaatgcggtctaaat

SEQ ID NO: 5584705 - DNA, 25 bp, Homo sapien
actagaagactagaatgactgactg

SEQ ID NO: 5584706 - DNA, 25 bp, Homo sapien
cagacttgcagtgaaatcctatgtt

SEQ ID NO: 5584707 - DNA, 25 bp, Homo sapien
cagatcagtttaaggactagaagac

SEQ ID NO: 5584708 - DNA, 25 bp, Homo sapien
tatgttccaagtcatcagatcagtt

SEQ ID NO: 5584709 - DNA, 25 bp, Homo sapien
aatgcggtctaaattttcaggtgcc

SEQ ID NO: 5584710 - DNA, 25 bp, Homo sapien
aggtgatccagctgtgcgaaaacag

SEQ ID NO: 5584711 - DNA, 25 bp, Homo sapien
ctggttctctgaccaggaagaacag

SEQ ID NO: 5584712 - DNA, 25 bp, Homo sapien
ttccagactaaaaagccagacttgc

SEQ ID NO: 5584713 - DNA, 25 bp, Homo sapien
gaagactagaatgactgactggttc

SEQ ID NO: 5584714 - DNA, 25 bp, Homo sapien
tccagctgtgcgaaaacagacctca

SEQ ID NO: 5584715 - DNA, 25 bp, Homo sapien
ttccagaaacaaatggcttgcgcac

SEQ ID NO: 5584716 - DNA, 25 bp, Homo sapien
agacagtcccatgtgccacccacta

SEQ ID NO: 5584717 - DNA, 25 bp, Homo sapien
actaatagttgaagcacattgattc

SEQ ID NO: 5584718 - DNA, 25 bp, Homo sapien
attgcttgtgagactgtttccagaa

SEQ ID NO: 5584719 - DNA, 25 bp, Homo sapien
aactcccaccaatcagcctagcttc

SEQ ID NO: 5584720 - DNA, 25 bp, Homo sapien
gtaatggagttcaggccgtttcctc

SEQ ID NO: 5584721 - DNA, 25 bp, Homo sapien
aaaaagtcacctggtaatggagttc

SEQ ID NO: 5584722 - DNA, 25 bp, Homo sapien
ttatccaaggctaatgagtcctcat

SEQ ID NO: 5584723 - DNA, 25 bp, Homo sapien
actggttaattcaaggcaagagttt

SEQ ID NO: 5584724 - DNA, 25 bp, Homo sapien
caaatggcttgcgcactgcagatgg

SEQ ID NO: 5584725 - DNA, 25 bp, Homo sapien
gatggcacaccacagacagtcccat

SEQ ID NO: 5584726 - DNA, 25 bp, Homo sapien
tggtgcagccctcggctctgatgca

SEQ ID NO: 5584727 - DNA, 25 bp, Homo sapien
gccctcggctctgatgcaaaagcag

SEQ ID NO: 5584728 - DNA, 25 bp, Homo sapien
cggagcactgacaatggtctgcata

SEQ ID NO: 5584729 - DNA, 25 bp, Homo sapien
ttctctttggaagccccgacacgag

SEQ ID NO: 5584730 - DNA, 25 bp, Homo sapien
tctgttgcgccctagatccgctgcc

SEQ ID NO: 5584731 - DNA, 25 bp, Homo sapien
actgacaatggtctgcataggggag

SEQ ID NO: 5584732 - DNA, 25 bp, Homo sapien
cgctgtgactactcgcaacgggaga

SEQ ID NO: 5584733 - DNA, 25 bp, Homo sapien
gagaagcttctgttgcgccctagat

SEQ ID NO: 5584734 - DNA, 25 bp, Homo sapien
ccgcgcgccctccgtctattttttc

SEQ ID NO: 5584735 - DNA, 25 bp, Homo sapien
ggtggaagttacacctggtgcagcc

SEQ ID NO: 5584736 - DNA, 25 bp, Homo sapien
gggacagcgctgtgactactcgcaa

SEQ ID NO: 5584737 - DNA, 25 bp, Homo sapien
actgttaagaactgatgtactacat

SEQ ID NO: 5584738 - DNA, 25 bp, Homo sapien
ttctgtcagagtattagcttcctag

SEQ ID NO: 5584739 - DNA, 25 bp, Homo sapien
ttattagaaaagtaatgcgcattca

SEQ ID NO: 5584740 - DNA, 25 bp, Homo sapien
aaaatgattcatagaaggcagtcaa

SEQ ID NO: 5584741 - DNA, 25 bp, Homo sapien
ttagcagggttggcaactactggaa

SEQ ID NO: 5584742 - DNA, 25 bp, Homo sapien
ttctggatgctagatgtgcaaaacc

SEQ ID NO: 5584743 - DNA, 25 bp, Homo sapien
atgaactgggtaccttaaaacagca

SEQ ID NO: 5584744 - DNA, 25 bp, Homo sapien
tctgtgtactgtaggaacttcccaa

SEQ ID NO: 5584745 - DNA, 25 bp, Homo sapien
agaagcaggcaagaattactataaa

SEQ ID NO: 5584746 - DNA, 25 bp, Homo sapien
gcaaaaccatgttagcagggttggc

SEQ ID NO: 5584747 - DNA, 25 bp, Homo sapien
ttggcaactactggaactctgaggg

SEQ ID NO: 5584748 - DNA, 25 bp, Homo sapien
ctgagaaggtatcaagtgttcctac

SEQ ID NO: 5584749 - DNA, 25 bp, Homo sapien
aataataatccatggtaaaagtcac

SEQ ID NO: 5584750 - DNA, 25 bp, Homo sapien
tctatatgctaatcaaacagggtca

SEQ ID NO: 5584751 - DNA, 25 bp, Homo sapien
cccaacaatttgccaaagagcatgt

SEQ ID NO: 5584752 - DNA, 25 bp, Homo sapien
acatgcacataactactgagaaggt

SEQ ID NO: 5584753 - DNA, 25 bp, Homo sapien
aacagggtcatgtatttgggaaaat

SEQ ID NO: 5584754 - DNA, 25 bp, Homo sapien
aagctgggcactgcatcctctccct

SEQ ID NO: 5584755 - DNA, 25 bp, Homo sapien
gcttgggaaactacagaaacatgca

SEQ ID NO: 5584756 - DNA, 25 bp, Homo sapien
tgatatgcactaggctgaacagctg

SEQ ID NO: 5584757 - DNA, 25 bp, Homo sapien
ctccctgggtcaaaactctatatgc

SEQ ID NO: 5584758 - DNA, 25 bp, Homo sapien
agcaaactaggctctattcagcatt

SEQ ID NO: 5584759 - DNA, 25 bp, Homo sapien
ccaggttatagcaagggctttctgc

SEQ ID NO: 5584760 - DNA, 25 bp, Homo sapien
tgcagaagctgctgtgacacttaac

SEQ ID NO: 5584761 - DNA, 25 bp, Homo sapien
agatgcagtgagtgcccttcctgtc

SEQ ID NO: 5584762 - DNA, 25 bp, Homo sapien
aacgtcacatcactgcagaagctgc

SEQ ID NO: 5584763 - DNA, 25 bp, Homo sapien
tgcatgtctgcactaagccaggtta

SEQ ID NO: 5584764 - DNA, 25 bp, Homo sapien
gttgaagctcaaactgaagtctcac

SEQ ID NO: 5584765 - DNA, 25 bp, Homo sapien
tgttagataaccccactgtaccaat

SEQ ID NO: 5584766 - DNA, 25 bp, Homo sapien
tgaatgagtatgcaacatcagtttc

SEQ ID NO: 5584767 - DNA, 25 bp, Homo sapien
accactgctgtttagactgatcatc

SEQ ID NO: 5584768 - DNA, 25 bp, Homo sapien
ccagccaaactggttgtgctatctc

SEQ ID NO: 5584769 - DNA, 25 bp, Homo sapien
gtcattataagtgaagttgaagctc

SEQ ID NO: 5584770 - DNA, 25 bp, Homo sapien
ccccgagcccacactgtactgggag

SEQ ID NO: 5584771 - DNA, 25 bp, Homo sapien
cccggtcttcctcacggggcctcga

SEQ ID NO: 5584772 - DNA, 25 bp, Homo sapien
gctcggctgccggattccggcgtct

SEQ ID NO: 5584773 - DNA, 25 bp, Homo sapien
ggcgtctacgtgtgccacgcccgca

SEQ ID NO: 5584774 - DNA, 25 bp, Homo sapien
gagcccacactgtactgggagaagg

SEQ ID NO: 5584775 - DNA, 25 bp, Homo sapien
ccggtcttcctcacggggcctcgat

SEQ ID NO: 5584776 - DNA, 25 bp, Homo sapien
ggcctccccgagcccacactgtact

SEQ ID NO: 5584777 - DNA, 25 bp, Homo sapien
ggggcctccccgagcccacactgta

SEQ ID NO: 5584778 - DNA, 25 bp, Homo sapien
gcccacactgtactgggagaaggac

SEQ ID NO: 5584779 - DNA, 25 bp, Homo sapien
tgccggattccggcgtctacgtgtg

SEQ ID NO: 5584780 - DNA, 25 bp, Homo sapien
ttccggcgtctacgtgtgccacgcc

SEQ ID NO: 5584781 - DNA, 25 bp, Homo sapien
accatgggaaatagtataatggaat

SEQ ID NO: 5584782 - DNA, 25 bp, Homo sapien
tgtttgaaggtactttattaagatc

SEQ ID NO: 5584783 - DNA, 25 bp, Homo sapien
aagaacatagttttgtaagtctgag

SEQ ID NO: 5584784 - DNA, 25 bp, Homo sapien
agtataatggaatagatcacaatag

SEQ ID NO: 5584785 - DNA, 25 bp, Homo sapien
ccatattggtcagtaaaataagggt

SEQ ID NO: 5584786 - DNA, 25 bp, Homo sapien
tagaatatccaagtgcaaaaacaat

SEQ ID NO: 5584787 - DNA, 25 bp, Homo sapien
gaaggtcagccttaaagataccaag

SEQ ID NO: 5584788 - DNA, 25 bp, Homo sapien
aatcattacacaataccaggaaggt

SEQ ID NO: 5584789 - DNA, 25 bp, Homo sapien
ttcaagtaagtacacacactgtttg

SEQ ID NO: 5584790 - DNA, 25 bp, Homo sapien
taagtctgagaaggttatgtttgtc

SEQ ID NO: 5584791 - DNA, 25 bp, Homo sapien
gacatggcaagttcaattacatcac

SEQ ID NO: 5584792 - DNA, 25 bp, Homo sapien
gacataggaatgactgaaggtcttg

SEQ ID NO: 5584793 - DNA, 25 bp, Homo sapien
agttagatcagggttctaagtttta

SEQ ID NO: 5584794 - DNA, 25 bp, Homo sapien
tgtgggaatggctctacttcgtaac

SEQ ID NO: 5584795 - DNA, 25 bp, Homo sapien
aacgcaccagttgaaatcagatact

SEQ ID NO: 5584796 - DNA, 25 bp, Homo sapien
caagaaacatgggcactgcacattt

SEQ ID NO: 5584797 - DNA, 25 bp, Homo sapien
ttaaaataaagatagcaacatagac

SEQ ID NO: 5584798 - DNA, 25 bp, Homo sapien
aaagatagcaacatagacataggaa

SEQ ID NO: 5584799 - DNA, 25 bp, Homo sapien
tattcaatgccatccctccaaaggg

SEQ ID NO: 5584800 - DNA, 25 bp, Homo sapien
acttcgtaacgcaccagttgaaatc

SEQ ID NO: 5584801 - DNA, 25 bp, Homo sapien
cttcacttgagaagggagttagatc

SEQ ID NO: 5584802 - DNA, 25 bp, Homo sapien
cttccaatgaaaacgtaaatgattc

SEQ ID NO: 5584803 - DNA, 25 bp, Homo sapien
ttatcctgccatccacagaccttgg

SEQ ID NO: 5584804 - DNA, 25 bp, Homo sapien
gaaaggcctgcttcaaggttggccc

SEQ ID NO: 5584805 - DNA, 25 bp, Homo sapien
gaatccagactcaatagacaatgtg

SEQ ID NO: 5584806 - DNA, 25 bp, Homo sapien
ccttgggtggtgtctaagaacatag

SEQ ID NO: 5584807 - DNA, 25 bp, Homo sapien
gacaatgtgaagagtgtaaacaaaa

SEQ ID NO: 5584808 - DNA, 25 bp, Homo sapien
ctcaactgcgatccttggaaaggcc

SEQ ID NO: 5584809 - DNA, 25 bp, Homo sapien
acagaccttggtagaaactgggcat

SEQ ID NO: 5584810 - DNA, 25 bp, Homo sapien
agagcaggcctcaactgcgatcctt

SEQ ID NO: 5584811 - DNA, 25 bp, Homo sapien
agtagaatgtcaaatctgccacctc

SEQ ID NO: 5584812 - DNA, 25 bp, Homo sapien
gcacactgtgcagaaaaacagtaac

SEQ ID NO: 5584813 - DNA, 25 bp, Homo sapien
caagatgagtttaaagtagaatgtc

SEQ ID NO: 5584814 - DNA, 25 bp, Homo sapien
caaccgtgcttattcgccccgcttc

SEQ ID NO: 5584815 - DNA, 25 bp, Homo sapien
gacaccaagcacttaaggcaggaat

SEQ ID NO: 5584816 - DNA, 25 bp, Homo sapien
tcaaaaagttgatacggtgctctca

SEQ ID NO: 5584817 - DNA, 25 bp, Homo sapien
ataagcttgcaggtgactacgcatc

SEQ ID NO: 5584818 - DNA, 25 bp, Homo sapien
agtcgcagagtatcgaatgtggctt

SEQ ID NO: 5584819 - DNA, 25 bp, Homo sapien
gaatatgatgggttgaaatactatc

SEQ ID NO: 5584820 - DNA, 25 bp, Homo sapien
tcaaatcaattagaagggtcccatt

SEQ ID NO: 5584821 - DNA, 25 bp, Homo sapien
caaagacaacaatatgctagcatgc

SEQ ID NO: 5584822 - DNA, 25 bp, Homo sapien
ggcaggaatgaggaattaagacctc

SEQ ID NO: 5584823 - DNA, 25 bp, Homo sapien
ctacgcatcatggccaaccgcaaag

SEQ ID NO: 5584824 - DNA, 25 bp, Homo sapien
cagcaggattattaaccagagtcgc

SEQ ID NO: 5584825 - DNA, 25 bp, Homo sapien
ccttatttacagaggaaaggaggct

SEQ ID NO: 5584826 - DNA, 25 bp, Homo sapien
aggaacatcaggatgccaaaaagtc

SEQ ID NO: 5584827 - DNA, 25 bp, Homo sapien
gtgttcaatgaagtaatagatgcct

SEQ ID NO: 5584828 - DNA, 25 bp, Homo sapien
atagtttattggccatggagaaaat

SEQ ID NO: 5584829 - DNA, 25 bp, Homo sapien
gaaaggaggctagctgcttatgtgt

SEQ ID NO: 5584830 - DNA, 25 bp, Homo sapien
gagactcagaagatgccttattatt

SEQ ID NO: 5584831 - DNA, 25 bp, Homo sapien
cagccaaacgtgagctgatgctgac

SEQ ID NO: 5584832 - DNA, 25 bp, Homo sapien
tgaaacagaagcagtgtgatatgcc

SEQ ID NO: 5584833 - DNA, 25 bp, Homo sapien
gcaaatcaagaataccaagactcac

SEQ ID NO: 5584834 - DNA, 25 bp, Homo sapien
tcctcagtcttgatggaactccagg

SEQ ID NO: 5584835 - DNA, 25 bp, Homo sapien
cctgtcatacagccaaacgtgagct

SEQ ID NO: 5584836 - DNA, 25 bp, Homo sapien
tcagagcagggactatgtcagttat

SEQ ID NO: 5584837 - DNA, 25 bp, Homo sapien
aaagtaggtaatcatcaaaagatac

SEQ ID NO: 5584838 - DNA, 25 bp, Homo sapien
tatacccctgaaataccacggatgc

SEQ ID NO: 5584839 - DNA, 25 bp, Homo sapien
ctggtacaaaaagtcaatgaatagt

SEQ ID NO: 5584840 - DNA, 25 bp, Homo sapien
gttactgtaccctgcatatgactgg

SEQ ID NO: 5584841 - DNA, 25 bp, Homo sapien
ccctgcatatgactggtacaaaaag

SEQ ID NO: 5584842 - DNA, 25 bp, Homo sapien
ctaagacacattaaagtaggtaatc

SEQ ID NO: 5584843 - DNA, 25 bp, Homo sapien
aataatcatgctatgttttggtgct

SEQ ID NO: 5584844 - DNA, 25 bp, Homo sapien
ggatgcaatatctaagggtaaaaag

SEQ ID NO: 5584845 - DNA, 25 bp, Homo sapien
cctgaaataccacggatgcaatatc

SEQ ID NO: 5584846 - DNA, 25 bp, Homo sapien
caaaagataccacttagtaatattt

SEQ ID NO: 5584847 - DNA, 25 bp, Homo sapien
aacagaattttcatggggagattca

SEQ ID NO: 5584848 - DNA, 25 bp, Homo sapien
ggggagattcagaactataagccac

SEQ ID NO: 5584849 - DNA, 25 bp, Homo sapien
ctataagccacagaatgtacagtaa

SEQ ID NO: 5584850 - DNA, 25 bp, Homo sapien
cagcaagaactgtcatgtatgtttg

SEQ ID NO: 5584851 - DNA, 25 bp, Homo sapien
aatacttatggcttactatggagca

SEQ ID NO: 5584852 - DNA, 25 bp, Homo sapien
ggagcatctgttacacagcaagaac

SEQ ID NO: 5584853 - DNA, 25 bp, Homo sapien
taggggtctatcatgagtaccaggc

SEQ ID NO: 5584854 - DNA, 25 bp, Homo sapien
taactttagcaggaatacttatggc

SEQ ID NO: 5584855 - DNA, 25 bp, Homo sapien
atcctcacgacttataaagcttccc

SEQ ID NO: 5584856 - DNA, 25 bp, Homo sapien
ctctgaactgaagttacaagctaac

SEQ ID NO: 5584857 - DNA, 25 bp, Homo sapien
aagatacaaaataattaggggtcta

SEQ ID NO: 5584858 - DNA, 25 bp, Homo sapien
atgcagaacataatgacggtatcac

SEQ ID NO: 5584859 - DNA, 25 bp, Homo sapien
tgaccatgaaaagatcatattcact

SEQ ID NO: 5584860 - DNA, 25 bp, Homo sapien
acttttatctaggcaatgaccatga

SEQ ID NO: 5584861 - DNA, 25 bp, Homo sapien
tgaggcaaatgcagaacataatgac

SEQ ID NO: 5584862 - DNA, 25 bp, Homo sapien
gatctgccaaaatgaggcaaatgca

SEQ ID NO: 5584863 - DNA, 25 bp, Homo sapien
aagcagcagggaacatagttccttt

SEQ ID NO: 5584864 - DNA, 25 bp, Homo sapien
tcaatgctacccaaatcaaacccac

SEQ ID NO: 5584865 - DNA, 25 bp, Homo sapien
ctcagggtcctaagttataattcga

SEQ ID NO: 5584866 - DNA, 25 bp, Homo sapien
atctaagattgaaaaggctctactt

SEQ ID NO: 5584867 - DNA, 25 bp, Homo sapien
cagagaaatagattataaattcagt

SEQ ID NO: 5584868 - DNA, 25 bp, Homo sapien
ctttaatggcatactgtagatctgc

SEQ ID NO: 5584869 - DNA, 25 bp, Homo sapien
agtaagggaactattcatcctctcg

SEQ ID NO: 5584870 - DNA, 25 bp, Homo sapien
cgagaggatgaatagttcccttact

SEQ ID NO: 5584871 - DNA, 25 bp, Homo sapien
agttgtggaaaccaatgtgtcagac

SEQ ID NO: 5584872 - DNA, 25 bp, Homo sapien
tttcaaatcaccgggaaagagatgg

SEQ ID NO: 5584873 - DNA, 25 bp, Homo sapien
ggaaagagatggttctgactgcttt

SEQ ID NO: 5584874 - DNA, 25 bp, Homo sapien
ttctaggaccaaatggaggttcact

SEQ ID NO: 5584875 - DNA, 25 bp, Homo sapien
ggggaccactgagcacatgcatccc

SEQ ID NO: 5584876 - DNA, 25 bp, Homo sapien
tgcatccctgtgtagaataagctcc

SEQ ID NO: 5584877 - DNA, 25 bp, Homo sapien
gctgtcaaggacttcacctgcagat

SEQ ID NO: 5584878 - DNA, 25 bp, Homo sapien
tgaggcaggctggtttaactcccta

SEQ ID NO: 5584879 - DNA, 25 bp, Homo sapien
tactaactggctgcaatggatttcc

SEQ ID NO: 5584880 - DNA, 25 bp, Homo sapien
aataagctccatcaaccgaggcagc

SEQ ID NO: 5584881 - DNA, 25 bp, Homo sapien
gcattgtctgaggaagaacaaagcg

SEQ ID NO: 5584882 - DNA, 25 bp, Homo sapien
ttctgcttcacagggaaggtaaggg

SEQ ID NO: 5584883 - DNA, 25 bp, Homo sapien
tgaaaaatcgatggtggttagaaaa

SEQ ID NO: 5584884 - DNA, 25 bp, Homo sapien
tgtaggtcttaccaagaaaaccaca

SEQ ID NO: 5584885 - DNA, 25 bp, Homo sapien
ggaactatcttgagcacactatgac

SEQ ID NO: 5584886 - DNA, 25 bp, Homo sapien
ttgagcacactatgacaggacttcc

SEQ ID NO: 5584887 - DNA, 25 bp, Homo sapien
tccaccttgggtatatgtaggtctt

SEQ ID NO: 5584888 - DNA, 25 bp, Homo sapien
caggacaacctattttggaagaatg

SEQ ID NO: 5584889 - DNA, 25 bp, Homo sapien
ctagagaagctttcagataggtatc

SEQ ID NO: 5584890 - DNA, 25 bp, Homo sapien
agaattgtaaactgctagagaagct

SEQ ID NO: 5584891 - DNA, 25 bp, Homo sapien
gataatctaggaaataactaatgat

SEQ ID NO: 5584892 - DNA, 25 bp, Homo sapien
tcactttctacaacaggacaaccta

SEQ ID NO: 5584893 - DNA, 25 bp, Homo sapien
tggaggcctgcacacagttcctaca

SEQ ID NO: 5584894 - DNA, 25 bp, Homo sapien
gcaagagctgaggatagtacttcct

SEQ ID NO: 5584895 - DNA, 25 bp, Homo sapien
gtgaattagggcagctgtcccaacc

SEQ ID NO: 5584896 - DNA, 25 bp, Homo sapien
tgagccaatgcatccagtctgtttt

SEQ ID NO: 5584897 - DNA, 25 bp, Homo sapien
tccaaatgaaggatgtgaattaggg

SEQ ID NO: 5584898 - DNA, 25 bp, Homo sapien
cctgactgatagaagcatcttgtgc

SEQ ID NO: 5584899 - DNA, 25 bp, Homo sapien
tgggtgactgtgatacaagactcag

SEQ ID NO: 5584900 - DNA, 25 bp, Homo sapien
gttcctacacaacaggctcctgacc

SEQ ID NO: 5584901 - DNA, 25 bp, Homo sapien
tcccaaccctgaccactccgatttc

SEQ ID NO: 5584902 - DNA, 25 bp, Homo sapien
cctgacctgctagcaagagctgagg

SEQ ID NO: 5584903 - DNA, 25 bp, Homo sapien
aagactcagatttgggttttgtgcc

SEQ ID NO: 5584904 - DNA, 25 bp, Homo sapien
caaaacacttggaaaaggcaaatac

SEQ ID NO: 5584905 - DNA, 25 bp, Homo sapien
agggtctggcctatcctgtgccttc

SEQ ID NO: 5584906 - DNA, 25 bp, Homo sapien
cctctgctgagttaccaggagtggc

SEQ ID NO: 5584907 - DNA, 25 bp, Homo sapien
gtcttccacagacgaacagggactt

SEQ ID NO: 5584908 - DNA, 25 bp, Homo sapien
cacataggaagtgattaacaaatct

SEQ ID NO: 5584909 - DNA, 25 bp, Homo sapien
gtcagtggacactctgtgaccagca

SEQ ID NO: 5584910 - DNA, 25 bp, Homo sapien
ctggacaagcgtatcagtgacactt

SEQ ID NO: 5584911 - DNA, 25 bp, Homo sapien
ggccaaagtccacaagaaaatctgg

SEQ ID NO: 5584912 - DNA, 25 bp, Homo sapien
aggagtggcaggatatattttgatg

SEQ ID NO: 5584913 - DNA, 25 bp, Homo sapien
aacagggacttatcttgctcattgc

SEQ ID NO: 5584914 - DNA, 25 bp, Homo sapien
agagctgaaataagcctgagagatc

SEQ ID NO: 5584915 - DNA, 25 bp, Homo sapien
ataattcaccatagtttagcaaaac

SEQ ID NO: 5584916 - DNA, 25 bp, Homo sapien
ccactgtatcacatgagactcttcc

SEQ ID NO: 5584917 - DNA, 25 bp, Homo sapien
ctaatgagttccgttaaatttatgc

SEQ ID NO: 5584918 - DNA, 25 bp, Homo sapien
aagtagctctagactaaatcgtggt

SEQ ID NO: 5584919 - DNA, 25 bp, Homo sapien
gctctagactaaatcgtggtgaatc

SEQ ID NO: 5584920 - DNA, 25 bp, Homo sapien
ttgtctcaccatacagtaatgaaac

SEQ ID NO: 5584921 - DNA, 25 bp, Homo sapien
ttcggtatgaaatctccactgtatc

SEQ ID NO: 5584922 - DNA, 25 bp, Homo sapien
tcagaatagaaaagtagctctagac

SEQ ID NO: 5584923 - DNA, 25 bp, Homo sapien
ccatacagtaatgaaacaacctgag

SEQ ID NO: 5584924 - DNA, 25 bp, Homo sapien
taaatcgtggtgaatcagttgtctc

SEQ ID NO: 5584925 - DNA, 25 bp, Homo sapien
ttttattcggtatgaaatctccact

SEQ ID NO: 5584926 - DNA, 25 bp, Homo sapien
aacaagtcagtatttatagaagaac

SEQ ID NO: 5584927 - DNA, 25 bp, Homo sapien
gttcttctataaatactgacttgtt

SEQ ID NO: 5584928 - DNA, 25 bp, Homo sapien
gagatgcacatagagcaaggaatga

SEQ ID NO: 5584929 - DNA, 25 bp, Homo sapien
actatgagagttacgagtcaggaat

SEQ ID NO: 5584930 - DNA, 25 bp, Homo sapien
cttcccctaggattgagaccctctc

SEQ ID NO: 5584931 - DNA, 25 bp, Homo sapien
gtcccaagccctaacatacccagta

SEQ ID NO: 5584932 - DNA, 25 bp, Homo sapien
tttatggaaggttcatgacatcaac

SEQ ID NO: 5584933 - DNA, 25 bp, Homo sapien
ttctaacaaagactggaacaaggac

SEQ ID NO: 5584934 - DNA, 25 bp, Homo sapien
attgagaccctctcatgggaaggtc

SEQ ID NO: 5584935 - DNA, 25 bp, Homo sapien
aacaccacacccagcattggcactc

SEQ ID NO: 5584936 - DNA, 25 bp, Homo sapien
actggaacaaggactatgagagtta

SEQ ID NO: 5584937 - DNA, 25 bp, Homo sapien
cacacaggtgttagaaacaagttac

SEQ ID NO: 5584938 - DNA, 25 bp, Homo sapien
ggcgaacattagtgaaaggataccc

SEQ ID NO: 5584939 - DNA, 25 bp, Homo sapien
gattagaaggagataaaactctcct

SEQ ID NO: 5584940 - DNA, 25 bp, Homo sapien
gaatatagcaaagtacagttgactc

SEQ ID NO: 5584941 - DNA, 25 bp, Homo sapien
caaatgacaagattgtgtacacaga

SEQ ID NO: 5584942 - DNA, 25 bp, Homo sapien
tataagatacaggattagaaggaga

SEQ ID NO: 5584943 - DNA, 25 bp, Homo sapien
attgtgtacacagaaaatccaagtt

SEQ ID NO: 5584944 - DNA, 25 bp, Homo sapien
aattgtgaaagaggtcccagtcaat

SEQ ID NO: 5584945 - DNA, 25 bp, Homo sapien
cttgaatacaggcttgaattgtgca

SEQ ID NO: 5584946 - DNA, 25 bp, Homo sapien
tgtactattagaattaatggatgaa

SEQ ID NO: 5584947 - DNA, 25 bp, Homo sapien
gaggtcccagtcaatgcaaacacat

SEQ ID NO: 5584948 - DNA, 25 bp, Homo sapien
agttgactcttgaatacaggcttga

SEQ ID NO: 5584949 - DNA, 25 bp, Homo sapien
tttaatagtgaagtactcagattgg

SEQ ID NO: 5584950 - DNA, 25 bp, Homo sapien
tgaggcgagtcacgcattttggcta

SEQ ID NO: 5584951 - DNA, 25 bp, Homo sapien
gtcccgaaggttctcaggccttgtc

SEQ ID NO: 5584952 - DNA, 25 bp, Homo sapien
ggaatgatggagaatgtaaacactt

SEQ ID NO: 5584953 - DNA, 25 bp, Homo sapien
gttcttcaacacagtgagcggcagc

SEQ ID NO: 5584954 - DNA, 25 bp, Homo sapien
ggccttgtctccgtggagggcattt

SEQ ID NO: 5584955 - DNA, 25 bp, Homo sapien
atacagagacacaattacagcaagc

SEQ ID NO: 5584956 - DNA, 25 bp, Homo sapien
gcgagaacagatgcgtctgtagcag

SEQ ID NO: 5584957 - DNA, 25 bp, Homo sapien
ttacagcaagcatctagtgtgaggc

SEQ ID NO: 5584958 - DNA, 25 bp, Homo sapien
acggtgaagtctcacctgacggcac

SEQ ID NO: 5584959 - DNA, 25 bp, Homo sapien
ttggctagaattactcagggcgttg

SEQ ID NO: 5584960 - DNA, 25 bp, Homo sapien
ttcctcgtcctccgcagagccgtgt

SEQ ID NO: 5584961 - DNA, 25 bp, Homo sapien
tctgcactttgcaagagcaggagca

SEQ ID NO: 5584962 - DNA, 25 bp, Homo sapien
cagaatgcttttccggagcacctcc

SEQ ID NO: 5584963 - DNA, 25 bp, Homo sapien
ttcctccacgcctcagcccccttcc

SEQ ID NO: 5584964 - DNA, 25 bp, Homo sapien
ttaaggtctggaacctgactcagcc

SEQ ID NO: 5584965 - DNA, 25 bp, Homo sapien
ttaaagtccaacaagatcagcccac

SEQ ID NO: 5584966 - DNA, 25 bp, Homo sapien
agtttaaggtgtgtgaaaaaggata

SEQ ID NO: 5584967 - DNA, 25 bp, Homo sapien
gacttgaggtcctgaaagcgtttcc

SEQ ID NO: 5584968 - DNA, 25 bp, Homo sapien
ccctagtgtctgaatgtaaaagctc

SEQ ID NO: 5584969 - DNA, 25 bp, Homo sapien
ccaggcctcactgtgctgtcggtta

SEQ ID NO: 5584970 - DNA, 25 bp, Homo sapien
ggcccaagccagccctagtgtctga

SEQ ID NO: 5584971 - DNA, 25 bp, Homo sapien
cgtttattgatcctagcggccccgc

SEQ ID NO: 5584972 - DNA, 25 bp, Homo sapien
ctaggtcatgttcctggactccaga

SEQ ID NO: 5584973 - DNA, 25 bp, Homo sapien
aggggcatcacaggttggattccct

SEQ ID NO: 5584974 - DNA, 25 bp, Homo sapien
aaggacaaactgggcatgctagttt

SEQ ID NO: 5584975 - DNA, 25 bp, Homo sapien
gggaaggtggaatgacctatgattt

SEQ ID NO: 5584976 - DNA, 25 bp, Homo sapien
ggtatagtttttctcaaggggcatc

SEQ ID NO: 5584977 - DNA, 25 bp, Homo sapien
ccacaggggacacacattctaatcc

SEQ ID NO: 5584978 - DNA, 25 bp, Homo sapien
tactgggtgtatgctgataggtatg

SEQ ID NO: 5584979 - DNA, 25 bp, Homo sapien
tattgaagaaacacaggtggtgtaa

SEQ ID NO: 5584980 - DNA, 25 bp, Homo sapien
gccttgcgggataccagtcattact

SEQ ID NO: 5584981 - DNA, 25 bp, Homo sapien
ggtggtgtaaatcctggcatatgtc

SEQ ID NO: 5584982 - DNA, 25 bp, Homo sapien
tgcctagtgaacaagttgctttgac

SEQ ID NO: 5584983 - DNA, 25 bp, Homo sapien
acggcggcgtgcgttctcgggttgg

SEQ ID NO: 5584984 - DNA, 25 bp, Homo sapien
ccaacccgagaacgcacgccgccgt

SEQ ID NO: 5584985 - DNA, 25 bp, Homo sapien
aaagcagatctgcagaaatctgatg

SEQ ID NO: 5584986 - DNA, 25 bp, Homo sapien
tagttttgatggaagttgttaatat

SEQ ID NO: 5584987 - DNA, 25 bp, Homo sapien
tagaggtcaacagtagatataatat

SEQ ID NO: 5584988 - DNA, 25 bp, Homo sapien
tatgactctgaatacagcacctgat

SEQ ID NO: 5584989 - DNA, 25 bp, Homo sapien
attacagtgtgagaccaccctggag

SEQ ID NO: 5584990 - DNA, 25 bp, Homo sapien
ctagacttagcaaggcatctgaatc

SEQ ID NO: 5584991 - DNA, 25 bp, Homo sapien
caaatggcagattcacaagcatcaa

SEQ ID NO: 5584992 - DNA, 25 bp, Homo sapien
cctggagcagtactcagctctgagt

SEQ ID NO: 5584993 - DNA, 25 bp, Homo sapien
tataagattgcacaccaccctggag

SEQ ID NO: 5584994 - DNA, 25 bp, Homo sapien
ggaaggaatggtgatttaagaacac

SEQ ID NO: 5584995 - DNA, 25 bp, Homo sapien
ctctcaagaggtgggtttcttagac

SEQ ID NO: 5584996 - DNA, 25 bp, Homo sapien
gacgaggagccctgctgtatatgta

SEQ ID NO: 5584997 - DNA, 25 bp, Homo sapien
agaaagtaaaagagctgattagttt

SEQ ID NO: 5584998 - DNA, 25 bp, Homo sapien
ggatcaaaaggtctggagttgaatt

SEQ ID NO: 5584999 - DNA, 25 bp, Homo sapien
ggagaacaagctagtagatgaagat

SEQ ID NO: 5585000 - DNA, 25 bp, Homo sapien
gggatgagctactggaatgtctctc

SEQ ID NO: 5585001 - DNA, 25 bp, Homo sapien
ggagaagagaaagaatgttcaaatc

SEQ ID NO: 5585002 - DNA, 25 bp, Homo sapien
ccaaaagaagagagtggctcttaag

SEQ ID NO: 5585003 - DNA, 25 bp, Homo sapien
tggctcaggcccacatacagcaact

SEQ ID NO: 5585004 - DNA, 25 bp, Homo sapien
cagcaacttagcgaagctgccggtg

SEQ ID NO: 5585005 - DNA, 25 bp, Homo sapien
gctgccggtgaagatgatcactttt

SEQ ID NO: 5585006 - DNA, 25 bp, Homo sapien
tactaagagtagtggatcaaaaggt

SEQ ID NO: 5585007 - DNA, 25 bp, Homo sapien
cgtcaccggagctcgccgtccgacc

SEQ ID NO: 5585008 - DNA, 25 bp, Homo sapien
ggtcggacggcgagctccggtgacg

SEQ ID NO: 5585009 - DNA, 25 bp, Homo sapien
attgcaagtgggacagatatatgtg

SEQ ID NO: 5585010 - DNA, 25 bp, Homo sapien
catcacctctactcagaaacaaagc

SEQ ID NO: 5585011 - DNA, 25 bp, Homo sapien
gcctgggcaatacggcaagattctg

SEQ ID NO: 5585012 - DNA, 25 bp, Homo sapien
aatatatggattggccaggtacgga

SEQ ID NO: 5585013 - DNA, 25 bp, Homo sapien
taccttcaagaatgttatcagctat

SEQ ID NO: 5585014 - DNA, 25 bp, Homo sapien
tatcagggagcaaatgtctaccttc

SEQ ID NO: 5585015 - DNA, 25 bp, Homo sapien
caggtacggaggctcatgtttgtaa

SEQ ID NO: 5585016 - DNA, 25 bp, Homo sapien
cacccaccttgatccctgaagtgct

SEQ ID NO: 5585017 - DNA, 25 bp, Homo sapien
tatatgtggagaaaactaaatacaa

SEQ ID NO: 5585018 - DNA, 25 bp, Homo sapien
acattaacagtcaaagtgagatatt

SEQ ID NO: 5585019 - DNA, 25 bp, Homo sapien
actatccattgcaagtgggacagat

SEQ ID NO: 5585020 - DNA, 25 bp, Homo sapien
acagggaacagacaagtgcattctg

SEQ ID NO: 5585021 - DNA, 25 bp, Homo sapien
caaattccctagaaaggagtggttc

SEQ ID NO: 5585022 - DNA, 25 bp, Homo sapien
aggaaggaaatgcccaaaaactaca

SEQ ID NO: 5585023 - DNA, 25 bp, Homo sapien
actacacagtgagttgcaaagagct

SEQ ID NO: 5585024 - DNA, 25 bp, Homo sapien
ccaggaaatgagtcagccctaacca

SEQ ID NO: 5585025 - DNA, 25 bp, Homo sapien
gactccctcagacaagtggcagatc

SEQ ID NO: 5585026 - DNA, 25 bp, Homo sapien
aaaatccagggattgacgcttcact

SEQ ID NO: 5585027 - DNA, 25 bp, Homo sapien
agtggcagatctatgaggtaaccat

SEQ ID NO: 5585028 - DNA, 25 bp, Homo sapien
agagctaggatacttggcagattta

SEQ ID NO: 5585029 - DNA, 25 bp, Homo sapien
acgcttcactggtaatccgggccct

SEQ ID NO: 5585030 - DNA, 25 bp, Homo sapien
tccgggccctggaaatctgggccca

SEQ ID NO: 5585031 - DNA, 25 bp, Homo sapien
ggctccctcaatgtggttcggtttg

SEQ ID NO: 5585032 - DNA, 25 bp, Homo sapien
gattcctgaatatggacagatcttc

SEQ ID NO: 5585033 - DNA, 25 bp, Homo sapien
tggcaggtacacgagccatactcgt

SEQ ID NO: 5585034 - DNA, 25 bp, Homo sapien
ttgatgatcaccagggctccctcaa

SEQ ID NO: 5585035 - DNA, 25 bp, Homo sapien
ttaagatagactgtcctgaaggttg

SEQ ID NO: 5585036 - DNA, 25 bp, Homo sapien
aatgtcaagtctctgggagagatcc

SEQ ID NO: 5585037 - DNA, 25 bp, Homo sapien
cacctcgcattccctcgcgggctgc

SEQ ID NO: 5585038 - DNA, 25 bp, Homo sapien
ccactgggacaatcacacctcgcat

SEQ ID NO: 5585039 - DNA, 25 bp, Homo sapien
ccggctgcccaggcgtatttggtag

SEQ ID NO: 5585040 - DNA, 25 bp, Homo sapien
ggcgtatttggtagcgcatgggttg

SEQ ID NO: 5585041 - DNA, 25 bp, Homo sapien
atcaacgtagtattcctgggcagac

SEQ ID NO: 5585042 - DNA, 25 bp, Homo sapien
ctctactgctggttttgcccgactc

SEQ ID NO: 5585043 - DNA, 25 bp, Homo sapien
tgcccgactctataaccaccgcctg

SEQ ID NO: 5585044 - DNA, 25 bp, Homo sapien
ttaagcagattggcttggctggtca

SEQ ID NO: 5585045 - DNA, 25 bp, Homo sapien
accaccgcctgtcccgtgtgagtga

SEQ ID NO: 5585046 - DNA, 25 bp, Homo sapien
gagatgtggctcaaacttggagaaa

SEQ ID NO: 5585047 - DNA, 25 bp, Homo sapien
aaagaaataagatgggctgtagtct

SEQ ID NO: 5585048 - DNA, 25 bp, Homo sapien
aaaaggaaagataggttctctgtac

SEQ ID NO: 5585049 - DNA, 25 bp, Homo sapien
ggtggaagactagcatttggatgtt

SEQ ID NO: 5585050 - DNA, 25 bp, Homo sapien
cgtgtgagtgaaggcacatccttat

SEQ ID NO: 5585051 - DNA, 25 bp, Homo sapien
tcagactcagactcttagtggctac

SEQ ID NO: 5585052 - DNA, 25 bp, Homo sapien
ggcttggctggtcatactctactgc

SEQ ID NO: 5585053 - DNA, 25 bp, Homo sapien
tcctctggggcgcccgccgtggtcc

SEQ ID NO: 5585054 - DNA, 25 bp, Homo sapien
ggaccacggcgggcgccccagagga

SEQ ID NO: 5585055 - DNA, 25 bp, Homo sapien
gtgaggcctgaataaagcctctgtc

SEQ ID NO: 5585056 - DNA, 25 bp, Homo sapien
tcccagataggcaccacgaaaggtg

SEQ ID NO: 5585057 - DNA, 25 bp, Homo sapien
tcttagagtaagagcttcaggatgc

SEQ ID NO: 5585058 - DNA, 25 bp, Homo sapien
agccacagatccatagttcaggttg

SEQ ID NO: 5585059 - DNA, 25 bp, Homo sapien
gaatcaaagaactagagactgagtc

SEQ ID NO: 5585060 - DNA, 25 bp, Homo sapien
ctcatgtaatgaagtaagcctttcc

SEQ ID NO: 5585061 - DNA, 25 bp, Homo sapien
aacctgaaggtaagtagccatttcc

SEQ ID NO: 5585062 - DNA, 25 bp, Homo sapien
tgagaaacctcaaacaatggaataa

SEQ ID NO: 5585063 - DNA, 25 bp, Homo sapien
taaggatgcaaaatagccacagatc

SEQ ID NO: 5585064 - DNA, 25 bp, Homo sapien
ttggaacgtgtaattattgtgcagt

SEQ ID NO: 5585065 - DNA, 25 bp, Homo sapien
cacgaaaggtgcttaaggatgcaaa

SEQ ID NO: 5585066 - DNA, 25 bp, Homo sapien
tcagacctgctattgaaacaaatgc

SEQ ID NO: 5585067 - DNA, 25 bp, Homo sapien
agaagactccgaagtgctagaatat

SEQ ID NO: 5585068 - DNA, 25 bp, Homo sapien
gaatattttcagagggcaaagcctt

SEQ ID NO: 5585069 - DNA, 25 bp, Homo sapien
actcaaaccagtgctaaaacaattt

SEQ ID NO: 5585070 - DNA, 25 bp, Homo sapien
atagctctaagcatgtgatattttc

SEQ ID NO: 5585071 - DNA, 25 bp, Homo sapien
agttgactgcctagactgataagtt

SEQ ID NO: 5585072 - DNA, 25 bp, Homo sapien
cacacaagtaaatgtcaacagtctc

SEQ ID NO: 5585073 - DNA, 25 bp, Homo sapien
cttactggaagcaaactaaacaaaa

SEQ ID NO: 5585074 - DNA, 25 bp, Homo sapien
ttctcctagaagactccgaagtgct

SEQ ID NO: 5585075 - DNA, 25 bp, Homo sapien
cacagctgtgctaggctctttgctc

SEQ ID NO: 5585076 - DNA, 25 bp, Homo sapien
tcatcaagaagaataagtgggttac

SEQ ID NO: 5585077 - DNA, 25 bp, Homo sapien
aagttcctaagcatagtatgggggc

SEQ ID NO: 5585078 - DNA, 25 bp, Homo sapien
agcttgtcagttgtctacctttcat

SEQ ID NO: 5585079 - DNA, 25 bp, Homo sapien
cttgttaggctttccctaggtgatt

SEQ ID NO: 5585080 - DNA, 25 bp, Homo sapien
ttcatggccatgatattctgctcca

SEQ ID NO: 5585081 - DNA, 25 bp, Homo sapien
agaatcagtttgactagctctaagt

SEQ ID NO: 5585082 - DNA, 25 bp, Homo sapien
taagcatagtatgggggcatatcta

SEQ ID NO: 5585083 - DNA, 25 bp, Homo sapien
cctattgagagttttaaaacaggat

SEQ ID NO: 5585084 - DNA, 25 bp, Homo sapien
tctaaggtatgtccgtataagttcc

SEQ ID NO: 5585085 - DNA, 25 bp, Homo sapien
atgtgtaccattttaagtagtggct

SEQ ID NO: 5585086 - DNA, 25 bp, Homo sapien
tcaaaaaagaacataagactctagc

SEQ ID NO: 5585087 - DNA, 25 bp, Homo sapien
tatgggggcatatctaatgtgtacc

SEQ ID NO: 5585088 - DNA, 25 bp, Homo sapien
tagaaagggcaagtcatccttctca

SEQ ID NO: 5585089 - DNA, 25 bp, Homo sapien
gagaactgttatacaaaggggcaag

SEQ ID NO: 5585090 - DNA, 25 bp, Homo sapien
aataggaagatatacatgagaactg

SEQ ID NO: 5585091 - DNA, 25 bp, Homo sapien
tactgtcgcaagtgtcagctgccat

SEQ ID NO: 5585092 - DNA, 25 bp, Homo sapien
tgtaaactggtagcacacagattgt

SEQ ID NO: 5585093 - DNA, 25 bp, Homo sapien
aggggcaagtgttattacagagaca

SEQ ID NO: 5585094 - DNA, 25 bp, Homo sapien
actgcacactagggatacagtaatg

SEQ ID NO: 5585095 - DNA, 25 bp, Homo sapien
gtactgagctggatttgcaaggcat

SEQ ID NO: 5585096 - DNA, 25 bp, Homo sapien
ggaggaagaagcatagctaattgta

SEQ ID NO: 5585097 - DNA, 25 bp, Homo sapien
tatggattatctagcagtactgagc

SEQ ID NO: 5585098 - DNA, 25 bp, Homo sapien
cacaggagctcatggtctaatagga

SEQ ID NO: 5585099 - DNA, 25 bp, Homo sapien
gtagtttgagtgcaaaacaggaata

SEQ ID NO: 5585100 - DNA, 25 bp, Homo sapien
gcaaagaatgatgccctcagacctc

SEQ ID NO: 5585101 - DNA, 25 bp, Homo sapien
tgggtacatgcaccaactgagtagg

SEQ ID NO: 5585102 - DNA, 25 bp, Homo sapien
accaactgagtaggaataaaaggaa

SEQ ID NO: 5585103 - DNA, 25 bp, Homo sapien
ctctcctaccaaccaacactccacc

SEQ ID NO: 5585104 - DNA, 25 bp, Homo sapien
cctaggaggcagactcaaaataatt

SEQ ID NO: 5585105 - DNA, 25 bp, Homo sapien
caggaataatccccagaaaaggtga

SEQ ID NO: 5585106 - DNA, 25 bp, Homo sapien
aaaggaaacatcttgagagacttca

SEQ ID NO: 5585107 - DNA, 25 bp, Homo sapien
tctgtgcagatgaatgagtaccatt

SEQ ID NO: 5585108 - DNA, 25 bp, Homo sapien
acttcaggcaaagagacttcagttt

SEQ ID NO: 5585109 - DNA, 25 bp, Homo sapien
gttgtgtgacatagcgtgcacagta

SEQ ID NO: 5585110 - DNA, 25 bp, Homo sapien
ttatcagaaattcccagatggtata

SEQ ID NO: 5585111 - DNA, 25 bp, Homo sapien
gttgacaacagttccaaaatggtaa

SEQ ID NO: 5585112 - DNA, 25 bp, Homo sapien
ttagactgtgtgaacagatttcaat

SEQ ID NO: 5585113 - DNA, 25 bp, Homo sapien
tcaaaactacgatacatcaaaagaa

SEQ ID NO: 5585114 - DNA, 25 bp, Homo sapien
tctacaaaggccccactatgcctgg

SEQ ID NO: 5585115 - DNA, 25 bp, Homo sapien
acatggcgaaaccctctctctacaa

SEQ ID NO: 5585116 - DNA, 25 bp, Homo sapien
ataatatactaggaagcattctgat

SEQ ID NO: 5585117 - DNA, 25 bp, Homo sapien
tgggtgtggtcccagctacttggaa

SEQ ID NO: 5585118 - DNA, 25 bp, Homo sapien
actatgcctggccaagtaatttctt

SEQ ID NO: 5585119 - DNA, 25 bp, Homo sapien
ttgcagggttgcttgttccattata

SEQ ID NO: 5585120 - DNA, 25 bp, Homo sapien
aaaatgactgggtgtggtcccagct

SEQ ID NO: 5585121 - DNA, 25 bp, Homo sapien
agcaggacactcgctaaacacagtc

SEQ ID NO: 5585122 - DNA, 25 bp, Homo sapien
agatgtgtacatgaaaagcaggaca

SEQ ID NO: 5585123 - DNA, 25 bp, Homo sapien
tccactaacggccctgtggggttca

SEQ ID NO: 5585124 - DNA, 25 bp, Homo sapien
acacagtcggtgtcctcagctgctg

SEQ ID NO: 5585125 - DNA, 25 bp, Homo sapien
gctgcaagcaagacagtcaccatct

SEQ ID NO: 5585126 - DNA, 25 bp, Homo sapien
tgtcccagccagcgttgttagtcct

SEQ ID NO: 5585127 - DNA, 25 bp, Homo sapien
cctggggaatcaggagttcattgca

SEQ ID NO: 5585128 - DNA, 25 bp, Homo sapien
ccatgagaaacacactgggccattt

SEQ ID NO: 5585129 - DNA, 25 bp, Homo sapien
tcattgcattctgtggggaagtgga

SEQ ID NO: 5585130 - DNA, 25 bp, Homo sapien
atatcctgtaggtgacctggggaat

SEQ ID NO: 5585131 - DNA, 25 bp, Homo sapien
gagccaaggccacgtctgcatcgtg

SEQ ID NO: 5585132 - DNA, 25 bp, Homo sapien
attggaggaagtaaacaaaatttca

SEQ ID NO: 5585133 - DNA, 25 bp, Homo sapien
gtgaagagctaatctcgagcaaggc

SEQ ID NO: 5585134 - DNA, 25 bp, Homo sapien
acttgcagcgtgacctacggtaact

SEQ ID NO: 5585135 - DNA, 25 bp, Homo sapien
ctctgttactgaggtaggcaaagga

SEQ ID NO: 5585136 - DNA, 25 bp, Homo sapien
agaaattaagtaagagaaagcaagc

SEQ ID NO: 5585137 - DNA, 25 bp, Homo sapien
aaaggacctcgaaagaccccatcta

SEQ ID NO: 5585138 - DNA, 25 bp, Homo sapien
gagcaaggctcagacccagcctctg

SEQ ID NO: 5585139 - DNA, 25 bp, Homo sapien
cctggatcggtgacacaagtattcc

SEQ ID NO: 5585140 - DNA, 25 bp, Homo sapien
atcactggaaaagactatgcctcac

SEQ ID NO: 5585141 - DNA, 25 bp, Homo sapien
gtaagagaaagcaagcctactccaa

SEQ ID NO: 5585142 - DNA, 25 bp, Homo sapien
ctccaatcaggtagaaaggagatgt

SEQ ID NO: 5585143 - DNA, 25 bp, Homo sapien
ttacttgcgtccactatgcccgtcg

SEQ ID NO: 5585144 - DNA, 25 bp, Homo sapien
cgacgggcatagtggacgcaagtaa

SEQ ID NO: 5585145 - DNA, 25 bp, Homo sapien
gaggtgagacaagtgtaagaatttt

SEQ ID NO: 5585146 - DNA, 25 bp, Homo sapien
gggaggatagctactcagtgccaaa

SEQ ID NO: 5585147 - DNA, 25 bp, Homo sapien
ctctgctttgaggtgagacaagtgt

SEQ ID NO: 5585148 - DNA, 25 bp, Homo sapien
agtgccaaaaacctaaaacactggc

SEQ ID NO: 5585149 - DNA, 25 bp, Homo sapien
tttaacagatttatgcaaagagatc

SEQ ID NO: 5585150 - DNA, 25 bp, Homo sapien
agagatcaacaagaacagtttgctc

SEQ ID NO: 5585151 - DNA, 25 bp, Homo sapien
gactgtaaacattgctccttgcctc

SEQ ID NO: 5585152 - DNA, 25 bp, Homo sapien
tcaagaatccttagaaggaagtctt

SEQ ID NO: 5585153 - DNA, 25 bp, Homo sapien
agaacagtttgctcatagtgctttg

SEQ ID NO: 5585154 - DNA, 25 bp, Homo sapien
tctactaaaaataccctcgtgccga

SEQ ID NO: 5585155 - DNA, 25 bp, Homo sapien
taagaattttatggctaagtacacc

SEQ ID NO: 5585156 - DNA, 25 bp, Homo sapien
ccgtttctcgttggctggcaatggg

SEQ ID NO: 5585157 - DNA, 25 bp, Homo sapien
gcagtcatttcgtcaggcaacttcc

SEQ ID NO: 5585158 - DNA, 25 bp, Homo sapien
gggccgagccgtttctcgttggctg

SEQ ID NO: 5585159 - DNA, 25 bp, Homo sapien
tgttgcattctgaaggacgtttctc

SEQ ID NO: 5585160 - DNA, 25 bp, Homo sapien
aaagcacattttcaggccgggttca

SEQ ID NO: 5585161 - DNA, 25 bp, Homo sapien
ggggggctcacaattgcctgttgca

SEQ ID NO: 5585162 - DNA, 25 bp, Homo sapien
cgtcaggcaacttccgccgttgacc

SEQ ID NO: 5585163 - DNA, 25 bp, Homo sapien
gggagcaggtcgtccctcccacagg

SEQ ID NO: 5585164 - DNA, 25 bp, Homo sapien
ccccgagcttctaacggggagcagg

SEQ ID NO: 5585165 - DNA, 25 bp, Homo sapien
cggaaggaaggttttgttatgatca

SEQ ID NO: 5585166 - DNA, 25 bp, Homo sapien
ttgttgtcctcaggctggaatcggg

SEQ ID NO: 5585167 - DNA, 25 bp, Homo sapien
aatttgtgtgacagctttgagactg

SEQ ID NO: 5585168 - DNA, 25 bp, Homo sapien
tataaacataactgtccgtggctac

SEQ ID NO: 5585169 - DNA, 25 bp, Homo sapien
ttggtggcatttaaccttcaaacac

SEQ ID NO: 5585170 - DNA, 25 bp, Homo sapien
ataactgtccgtggctacttcttcc

SEQ ID NO: 5585171 - DNA, 25 bp, Homo sapien
gtggtcagaataacctatgttaatc

SEQ ID NO: 5585172 - DNA, 25 bp, Homo sapien
gaaagagtgccacctactgattata

SEQ ID NO: 5585173 - DNA, 25 bp, Homo sapien
tagctgactcagcacttttggtggc

SEQ ID NO: 5585174 - DNA, 25 bp, Homo sapien
agggacttagttttatagctgactc

SEQ ID NO: 5585175 - DNA, 25 bp, Homo sapien
aacacatcatgtgaaaatggggggc

SEQ ID NO: 5585176 - DNA, 25 bp, Homo sapien
ttcaaagtgtcaaaattagtctaat

SEQ ID NO: 5585177 - DNA, 25 bp, Homo sapien
gagactgtcagattctaaggagatt

SEQ ID NO: 5585178 - DNA, 25 bp, Homo sapien
agaaagtcgcgcttggttagtctta

SEQ ID NO: 5585179 - DNA, 25 bp, Homo sapien
tgcctacccgcaacgtagtgggcta

SEQ ID NO: 5585180 - DNA, 25 bp, Homo sapien
atgggtcagtccggtttccttccgc

SEQ ID NO: 5585181 - DNA, 25 bp, Homo sapien
tttttagaaaggctcacgcaaggct

SEQ ID NO: 5585182 - DNA, 25 bp, Homo sapien
aggttaacaggcaaacaaggccttg

SEQ ID NO: 5585183 - DNA, 25 bp, Homo sapien
cagagcaacggatgggctttttcta

SEQ ID NO: 5585184 - DNA, 25 bp, Homo sapien
gggggtcaaatagaaggctatatga

SEQ ID NO: 5585185 - DNA, 25 bp, Homo sapien
ctccttgagctgagaatgggagaca

SEQ ID NO: 5585186 - DNA, 25 bp, Homo sapien
ggttagtcttacagagcaacggatg

SEQ ID NO: 5585187 - DNA, 25 bp, Homo sapien
aggccttgagcaaagagaaacattt

SEQ ID NO: 5585188 - DNA, 25 bp, Homo sapien
aaggctagagaaggactttcacaaa

SEQ ID NO: 5585189 - DNA, 25 bp, Homo sapien
ttgtttgaacagacactcataacgt

SEQ ID NO: 5585190 - DNA, 25 bp, Homo sapien
acgttatgagtgtctgttcaaacaa

SEQ ID NO: 5585191 - DNA, 25 bp, Homo sapien
gtagaatatggtgtcatagtaaact

SEQ ID NO: 5585192 - DNA, 25 bp, Homo sapien
ggcggaagcttacacctgcacgtgg

SEQ ID NO: 5585193 - DNA, 25 bp, Homo sapien
tctctgacagctttcacaatctaga

SEQ ID NO: 5585194 - DNA, 25 bp, Homo sapien
tccctgactccattctctgacagct

SEQ ID NO: 5585195 - DNA, 25 bp, Homo sapien
cttggcagattcagacaagaagtgc

SEQ ID NO: 5585196 - DNA, 25 bp, Homo sapien
caatgtagaatatggtgtcatagta

SEQ ID NO: 5585197 - DNA, 25 bp, Homo sapien
catagtaaactataggtgtattcag

SEQ ID NO: 5585198 - DNA, 25 bp, Homo sapien
tttagctgaaagatgcagtttcttc

SEQ ID NO: 5585199 - DNA, 25 bp, Homo sapien
atatcaggcaattattagtgagaac

SEQ ID NO: 5585200 - DNA, 25 bp, Homo sapien
aaaaccgctaaactctaccctgatc

SEQ ID NO: 5585201 - DNA, 25 bp, Homo sapien
tctaccctgatcagtgaaaagaatt

SEQ ID NO: 5585202 - DNA, 25 bp, Homo sapien
ggcctggcctaaacagacccctcaa

SEQ ID NO: 5585203 - DNA, 25 bp, Homo sapien
ctgtacatgcaaatggaaaagtccc

SEQ ID NO: 5585204 - DNA, 25 bp, Homo sapien
aagtgggagaatgccattttcccca

SEQ ID NO: 5585205 - DNA, 25 bp, Homo sapien
taggtcacttgtgttggcctggcct

SEQ ID NO: 5585206 - DNA, 25 bp, Homo sapien
actttggagggaaattgtttctcta

SEQ ID NO: 5585207 - DNA, 25 bp, Homo sapien
tctgagctaagtacacaccagcaaa

SEQ ID NO: 5585208 - DNA, 25 bp, Homo sapien
tcccattagaaatagttgacccaac

SEQ ID NO: 5585209 - DNA, 25 bp, Homo sapien
ccaatctgacaggtggaaaaagtgt

SEQ ID NO: 5585210 - DNA, 25 bp, Homo sapien
ctctgcccagcagtttccagtgact

SEQ ID NO: 5585211 - DNA, 25 bp, Homo sapien
tctctaggtaaggaataacagcata

SEQ ID NO: 5585212 - DNA, 25 bp, Homo sapien
aaattgttagatgcaggattctctc

SEQ ID NO: 5585213 - DNA, 25 bp, Homo sapien
ataacatactacaggtcacatgtac

SEQ ID NO: 5585214 - DNA, 25 bp, Homo sapien
aaatcggctgaggtccaattctaac

SEQ ID NO: 5585215 - DNA, 25 bp, Homo sapien
tgtaaaaatgtgggtatatacatac

SEQ ID NO: 5585216 - DNA, 25 bp, Homo sapien
acaatggaatcttaaaatgtgtgtg

SEQ ID NO: 5585217 - DNA, 25 bp, Homo sapien
aatgtgtgtgattcgaaccatttac

SEQ ID NO: 5585218 - DNA, 25 bp, Homo sapien
tgtcttaagcactcaaaagaaagaa

SEQ ID NO: 5585219 - DNA, 25 bp, Homo sapien
tgaggtccaattctaacggagaatc

SEQ ID NO: 5585220 - DNA, 25 bp, Homo sapien
aagaaactgtcttctgaatagttcc

SEQ ID NO: 5585221 - DNA, 25 bp, Homo sapien
tactgagtagtaccaaaagggctgg

SEQ ID NO: 5585222 - DNA, 25 bp, Homo sapien
ttttggctcaaatcggctgaggtcc

SEQ ID NO: 5585223 - DNA, 25 bp, Homo sapien
tgttgtcaacaatactgagtagtac

SEQ ID NO: 5585224 - DNA, 25 bp, Homo sapien
gctcacactgacaccaacaaacacc

SEQ ID NO: 5585225 - DNA, 25 bp, Homo sapien
acaaatggtaagtagaagctctgca

SEQ ID NO: 5585226 - DNA, 25 bp, Homo sapien
gggaggaaatcattttgcgacaata

SEQ ID NO: 5585227 - DNA, 25 bp, Homo sapien
tggaacaaggcggtttcaccatttc

SEQ ID NO: 5585228 - DNA, 25 bp, Homo sapien
cacctgtcaatccctatgtccctcc

SEQ ID NO: 5585229 - DNA, 25 bp, Homo sapien
gaaccagccaccacacacccatgtc

SEQ ID NO: 5585230 - DNA, 25 bp, Homo sapien
tactcagaattggtgagacctctcc

SEQ ID NO: 5585231 - DNA, 25 bp, Homo sapien
gctgctctattgacggtagtatttc

SEQ ID NO: 5585232 - DNA, 25 bp, Homo sapien
tgaaatctggaacaaggcggtttca

SEQ ID NO: 5585233 - DNA, 25 bp, Homo sapien
cagcttacgtggtttgctcacactg

SEQ ID NO: 5585234 - DNA, 25 bp, Homo sapien
tgcaaaagtcaaaactgagtgggag

SEQ ID NO: 5585235 - DNA, 25 bp, Homo sapien
agtcagtgtagttacattaatgaat

SEQ ID NO: 5585236 - DNA, 25 bp, Homo sapien
attcattaatgtaactacactgact

SEQ ID NO: 5585237 - DNA, 25 bp, Homo sapien
aggaggtccctgtaggattctggac

SEQ ID NO: 5585238 - DNA, 25 bp, Homo sapien
cagaattcgacgcgcgtcgccgtag

SEQ ID NO: 5585239 - DNA, 25 bp, Homo sapien
cggtacggggactatcccagaattc

SEQ ID NO: 5585240 - DNA, 25 bp, Homo sapien
aggattctggactgaagacgttctt

SEQ ID NO: 5585241 - DNA, 25 bp, Homo sapien
gggactatcccagaattcgacgcgc

SEQ ID NO: 5585242 - DNA, 25 bp, Homo sapien
acgttcttgtcaggtttggggcgtg

SEQ ID NO: 5585243 - DNA, 25 bp, Homo sapien
ggaggctgctctgaagcaccgttga

SEQ ID NO: 5585244 - DNA, 25 bp, Homo sapien
cccctcttgacacgacgaacctggc

SEQ ID NO: 5585245 - DNA, 25 bp, Homo sapien
ttcctgtcagttggggaagcgttaa

SEQ ID NO: 5585246 - DNA, 25 bp, Homo sapien
gcctcccgcccctcttgacacgacg

SEQ ID NO: 5585247 - DNA, 25 bp, Homo sapien
gtggagtccttgcagcccaaagcat

SEQ ID NO: 5585248 - DNA, 25 bp, Homo sapien
gctaaagtcaccacacagagatacc

SEQ ID NO: 5585249 - DNA, 25 bp, Homo sapien
aacactttgcgtgtcagtgattgac

SEQ ID NO: 5585250 - DNA, 25 bp, Homo sapien
atacaaaatcaaacaatcacttatt

SEQ ID NO: 5585251 - DNA, 25 bp, Homo sapien
atcaaaagtagcaaataattcatta

SEQ ID NO: 5585252 - DNA, 25 bp, Homo sapien
gcacaaaactgtaaagtctatccac

SEQ ID NO: 5585253 - DNA, 25 bp, Homo sapien
ttgcgtgtcagtgattgacagctgt

SEQ ID NO: 5585254 - DNA, 25 bp, Homo sapien
tcactgaactgattgacaggccgca

SEQ ID NO: 5585255 - DNA, 25 bp, Homo sapien
ttaatttctataaaagcaatcatac

SEQ ID NO: 5585256 - DNA, 25 bp, Homo sapien
tagggaatcccataacactttgcgt

SEQ ID NO: 5585257 - DNA, 25 bp, Homo sapien
cgcacagcacaaaactgtaaagtct

SEQ ID NO: 5585258 - DNA, 25 bp, Homo sapien
ggaggctaaagtcaccacacagaga

SEQ ID NO: 5585259 - DNA, 25 bp, Homo sapien
cctgggctaaagcacttctgccaca

SEQ ID NO: 5585260 - DNA, 25 bp, Homo sapien
acttctgccacagccttacaagtag

SEQ ID NO: 5585261 - DNA, 25 bp, Homo sapien
ttccacctttgcctccccaaatgct

SEQ ID NO: 5585262 - DNA, 25 bp, Homo sapien
agggtctctacaaaagaccaggctg

SEQ ID NO: 5585263 - DNA, 25 bp, Homo sapien
caagaaacaagctcaatagatataa

SEQ ID NO: 5585264 - DNA, 25 bp, Homo sapien
gcctcgagggatacttccacctttg

SEQ ID NO: 5585265 - DNA, 25 bp, Homo sapien
tatgctcctgaaatttctgagaaat

SEQ ID NO: 5585266 - DNA, 25 bp, Homo sapien
atgacttcacaataggaatcccatc

SEQ ID NO: 5585267 - DNA, 25 bp, Homo sapien
agaaaagtttacaagaaacaagctc

SEQ ID NO: 5585268 - DNA, 25 bp, Homo sapien
tcattttgttactcaggctgcagtg

SEQ ID NO: 5585269 - DNA, 25 bp, Homo sapien
gatactcaaagtccataaatatgtc

SEQ ID NO: 5585270 - DNA, 25 bp, Homo sapien
gatcagtgcaggaaataatattacc

SEQ ID NO: 5585271 - DNA, 25 bp, Homo sapien
tatagaattagtagggatcagtgca

SEQ ID NO: 5585272 - DNA, 25 bp, Homo sapien
agggaatgagcaataagatacaaat

SEQ ID NO: 5585273 - DNA, 25 bp, Homo sapien
taatatctctgggtagggaaactat

SEQ ID NO: 5585274 - DNA, 25 bp, Homo sapien
gatttaaggatctcaaggtacttta

SEQ ID NO: 5585275 - DNA, 25 bp, Homo sapien
acagtgagctcggttttagtaagcc

SEQ ID NO: 5585276 - DNA, 25 bp, Homo sapien
aagatacaaatgaacggttgacacc

SEQ ID NO: 5585277 - DNA, 25 bp, Homo sapien
aaagattagcaataagttggatcat

SEQ ID NO: 5585278 - DNA, 25 bp, Homo sapien
tctctacagtacacagacacagact

SEQ ID NO: 5585279 - DNA, 25 bp, Homo sapien
tttagcattgagttgcctttggatc

SEQ ID NO: 5585280 - DNA, 25 bp, Homo sapien
cataaagattaggaataagcatatc

SEQ ID NO: 5585281 - DNA, 25 bp, Homo sapien
ctgcaaacggaaaatggtatctcgg

SEQ ID NO: 5585282 - DNA, 25 bp, Homo sapien
atctcgggttcggcttgccttgggt

SEQ ID NO: 5585283 - DNA, 25 bp, Homo sapien
agaatccagtgttggacagacaagg

SEQ ID NO: 5585284 - DNA, 25 bp, Homo sapien
gtaccgcggcctcttggtcaaacgc

SEQ ID NO: 5585285 - DNA, 25 bp, Homo sapien
agcaaacaccttagctgccgcctgt

SEQ ID NO: 5585286 - DNA, 25 bp, Homo sapien
gggtgtccaaccctagacaaggctc

SEQ ID NO: 5585287 - DNA, 25 bp, Homo sapien
taaagagacaaagattaggctgttt

SEQ ID NO: 5585288 - DNA, 25 bp, Homo sapien
cgcctgtttctaaggggttgaggtc

SEQ ID NO: 5585289 - DNA, 25 bp, Homo sapien
gtcaaacgcggcttctggaacgtga

SEQ ID NO: 5585290 - DNA, 25 bp, Homo sapien
ggggttgaggtcgcctattagaatc

SEQ ID NO: 5585291 - DNA, 25 bp, Homo sapien
gtgggcacacaagcttgctacgttt

SEQ ID NO: 5585292 - DNA, 25 bp, Homo sapien
acagtgcctagaatgggaatgaatg

SEQ ID NO: 5585293 - DNA, 25 bp, Homo sapien
tgcgtgtgcagtctatcagtggata

SEQ ID NO: 5585294 - DNA, 25 bp, Homo sapien
acttcctgcaaggttctgcccgggg

SEQ ID NO: 5585295 - DNA, 25 bp, Homo sapien
gtttaagcgtgccactgcgtgtgca

SEQ ID NO: 5585296 - DNA, 25 bp, Homo sapien
tcccctaagggcgcctcctccttca

SEQ ID NO: 5585297 - DNA, 25 bp, Homo sapien
ccccgaggctctcaagatgcagagc

SEQ ID NO: 5585298 - DNA, 25 bp, Homo sapien
ccctcctcggcaagtctccaacggc

SEQ ID NO: 5585299 - DNA, 25 bp, Homo sapien
acaagagcacgtgtgacggtttaag

SEQ ID NO: 5585300 - DNA, 25 bp, Homo sapien
ggaggtcctccctgacgcctcagct

SEQ ID NO: 5585301 - DNA, 25 bp, Homo sapien
gagctcaggacggtcccgtccccta

SEQ ID NO: 5585302 - DNA, 25 bp, Homo sapien
gtctccaacggctccccactgcagg

SEQ ID NO: 5585303 - DNA, 25 bp, Homo sapien
aggtaccagacatctctgcaacacc

SEQ ID NO: 5585304 - DNA, 25 bp, Homo sapien
ctaagtcctcagtagatacaaatta

SEQ ID NO: 5585305 - DNA, 25 bp, Homo sapien
cccaaaggaactgcccaagtctaca

SEQ ID NO: 5585306 - DNA, 25 bp, Homo sapien
cctctcaagacatatctggaacctt

SEQ ID NO: 5585307 - DNA, 25 bp, Homo sapien
tgcagctgcaacaacccctctcaag

SEQ ID NO: 5585308 - DNA, 25 bp, Homo sapien
aaatagaacaaactgcacatgcatc

SEQ ID NO: 5585309 - DNA, 25 bp, Homo sapien
ttttaaactaggtaccagacatctc

SEQ ID NO: 5585310 - DNA, 25 bp, Homo sapien
aaagtaatttccaagcacaatcttc

SEQ ID NO: 5585311 - DNA, 25 bp, Homo sapien
cagcccaaatacatgtaaagtaatt

SEQ ID NO: 5585312 - DNA, 25 bp, Homo sapien
cttgatattttagcatgtgtgtgtc

SEQ ID NO: 5585313 - DNA, 25 bp, Homo sapien
tcgtacaaattgacatacagcccaa

SEQ ID NO: 5585314 - DNA, 25 bp, Homo sapien
atcaagcttcaaagtgtgaaatcat

SEQ ID NO: 5585315 - DNA, 25 bp, Homo sapien
tgacataatagtaccaacaagaaca

SEQ ID NO: 5585316 - DNA, 25 bp, Homo sapien
cacatgtgagataactaacttgaca

SEQ ID NO: 5585317 - DNA, 25 bp, Homo sapien
ttcagtcaacattggatcaaaaaac

SEQ ID NO: 5585318 - DNA, 25 bp, Homo sapien
ccaacaagaacagtgagttaatttt

SEQ ID NO: 5585319 - DNA, 25 bp, Homo sapien
tctaaacatagcagaaaattctcca

SEQ ID NO: 5585320 - DNA, 25 bp, Homo sapien
agtgaaaagagcagaatacaaaata

SEQ ID NO: 5585321 - DNA, 25 bp, Homo sapien
gtgaaatcataacatagtttggttc

SEQ ID NO: 5585322 - DNA, 25 bp, Homo sapien
aatgagtaaaatgtactaggtcata

SEQ ID NO: 5585323 - DNA, 25 bp, Homo sapien
aaaagcataccaagaaatgagtaaa

SEQ ID NO: 5585324 - DNA, 25 bp, Homo sapien
atacagaatatgaacagattttatg

SEQ ID NO: 5585325 - DNA, 25 bp, Homo sapien
aggagttcaggtgaaagatgataat

SEQ ID NO: 5585326 - DNA, 25 bp, Homo sapien
aagcaactgagagttcagccatggc

SEQ ID NO: 5585327 - DNA, 25 bp, Homo sapien
atgtctcggagacagctgatggaat

SEQ ID NO: 5585328 - DNA, 25 bp, Homo sapien
cctgcggctgccgtcagtgattgta

SEQ ID NO: 5585329 - DNA, 25 bp, Homo sapien
acagcagacattagtgcaggagttc

SEQ ID NO: 5585330 - DNA, 25 bp, Homo sapien
cagccatggcagatctgttaagcac

SEQ ID NO: 5585331 - DNA, 25 bp, Homo sapien
gaagaggtaacaggttgcaagttat

SEQ ID NO: 5585332 - DNA, 25 bp, Homo sapien
atttgctgataactggaatgggagt

SEQ ID NO: 5585333 - DNA, 25 bp, Homo sapien
aatgggagtgacaatgacaaataaa

SEQ ID NO: 5585334 - DNA, 25 bp, Homo sapien
aaaggaacctagaataagccccaga

SEQ ID NO: 5585335 - DNA, 25 bp, Homo sapien
gggaggtagacagatttaagatgtc

SEQ ID NO: 5585336 - DNA, 25 bp, Homo sapien
caggcccagctgactcaacgtccaa

SEQ ID NO: 5585337 - DNA, 25 bp, Homo sapien
ggtggccgtaactcaggccagctca

SEQ ID NO: 5585338 - DNA, 25 bp, Homo sapien
ggccagctcagaggctcatgacctt

SEQ ID NO: 5585339 - DNA, 25 bp, Homo sapien
tgccaagcaacccagatgtccgtta

SEQ ID NO: 5585340 - DNA, 25 bp, Homo sapien
ggcaggacaaactcaggattgcacg

SEQ ID NO: 5585341 - DNA, 25 bp, Homo sapien
ggattgcacgtgaccgttgccaagc

SEQ ID NO: 5585342 - DNA, 25 bp, Homo sapien
tcactggttacagagaataggaatc

SEQ ID NO: 5585343 - DNA, 25 bp, Homo sapien
taaccttcactatggcgcccaggtg

SEQ ID NO: 5585344 - DNA, 25 bp, Homo sapien
ttgcccaggcacagacttatcccat

SEQ ID NO: 5585345 - DNA, 25 bp, Homo sapien
ccgttatctaggtttgcccaggcac

SEQ ID NO: 5585346 - DNA, 25 bp, Homo sapien
tccactgcttagataaaacaatact

SEQ ID NO: 5585347 - DNA, 25 bp, Homo sapien
gccaatattgagggccttgagggga

SEQ ID NO: 5585348 - DNA, 25 bp, Homo sapien
tgaaagtgccgaaatttggtgtctc

SEQ ID NO: 5585349 - DNA, 25 bp, Homo sapien
tgggccatcacttgagggtgaccta

SEQ ID NO: 5585350 - DNA, 25 bp, Homo sapien
gtcaatgcaaagggcttggacttgg

SEQ ID NO: 5585351 - DNA, 25 bp, Homo sapien
gggagcaaactgaatgtgcccaaga

SEQ ID NO: 5585352 - DNA, 25 bp, Homo sapien
caagcccctcagctggaagtcagtg

SEQ ID NO: 5585353 - DNA, 25 bp, Homo sapien
ggcggcaagccaggcttgactatcc

SEQ ID NO: 5585354 - DNA, 25 bp, Homo sapien
gtgtggaagttcaggcccctgacat

SEQ ID NO: 5585355 - DNA, 25 bp, Homo sapien
agagtggtgatcatggcaaaattaa

SEQ ID NO: 5585356 - DNA, 25 bp, Homo sapien
tggaagtcagtgtgccctctgccaa

SEQ ID NO: 5585357 - DNA, 25 bp, Homo sapien
ggggtagcatcactggccccagtgt

SEQ ID NO: 5585358 - DNA, 25 bp, Homo sapien
gcagcttcgcggtgcctgttctgca

SEQ ID NO: 5585359 - DNA, 25 bp, Homo sapien
gactctcgaaatcgtggtggtctcc

SEQ ID NO: 5585360 - DNA, 25 bp, Homo sapien
ccggactctcgaaatcgtggtggtc

SEQ ID NO: 5585361 - DNA, 25 bp, Homo sapien
tgcaggaaaatcctaaccggtgccc

SEQ ID NO: 5585362 - DNA, 25 bp, Homo sapien
tgcccggactctcgaaatcgtggtg

SEQ ID NO: 5585363 - DNA, 25 bp, Homo sapien
gcggtgcctgttctgcaggaaaatc

SEQ ID NO: 5585364 - DNA, 25 bp, Homo sapien
aatcctaaccggtgcccggactctc

SEQ ID NO: 5585365 - DNA, 25 bp, Homo sapien
ctaaccggtgcccggactctcgaaa

SEQ ID NO: 5585366 - DNA, 25 bp, Homo sapien
tggtggtctccccagagtcgggaga

SEQ ID NO: 5585367 - DNA, 25 bp, Homo sapien
gtctccccagagtcgggagacggac

SEQ ID NO: 5585368 - DNA, 25 bp, Homo sapien
tcgaaatcgtggtggtctccccaga

SEQ ID NO: 5585369 - DNA, 25 bp, Homo sapien
ggtcagaccagagcattcgaatctc

SEQ ID NO: 5585370 - DNA, 25 bp, Homo sapien
gaaacagaggtgaaagtcttccaaa

SEQ ID NO: 5585371 - DNA, 25 bp, Homo sapien
atttactaccggagttgggctatgg

SEQ ID NO: 5585372 - DNA, 25 bp, Homo sapien
catcagcctcaaagacaagaaacag

SEQ ID NO: 5585373 - DNA, 25 bp, Homo sapien
cacctgaggtctctgcattccttcc

SEQ ID NO: 5585374 - DNA, 25 bp, Homo sapien
agtcaaaatgtgacagtatacacac

SEQ ID NO: 5585375 - DNA, 25 bp, Homo sapien
ctcaaagacaagaaacagaggtgaa

SEQ ID NO: 5585376 - DNA, 25 bp, Homo sapien
ttggagaacaatataaacttttagc

SEQ ID NO: 5585377 - DNA, 25 bp, Homo sapien
acttagaaacacattcatcagcctc

SEQ ID NO: 5585378 - DNA, 25 bp, Homo sapien
agttgggctatggaaagtgtttcta

SEQ ID NO: 5585379 - DNA, 25 bp, Homo sapien
cggttctgtgaaatatggtagcttt

SEQ ID NO: 5585380 - DNA, 25 bp, Homo sapien
tactcctcagcaagggaggaggtca

SEQ ID NO: 5585381 - DNA, 25 bp, Homo sapien
ctgacactcaaaactctccacaatc

SEQ ID NO: 5585382 - DNA, 25 bp, Homo sapien
gatgaatcccaaaaacctgacactc

SEQ ID NO: 5585383 - DNA, 25 bp, Homo sapien
cctacctagaatgcccttgctgctc

SEQ ID NO: 5585384 - DNA, 25 bp, Homo sapien
tctatgtcaaaagtgatctgctatc

SEQ ID NO: 5585385 - DNA, 25 bp, Homo sapien
gagagcagatggataaattgtgtgt

SEQ ID NO: 5585386 - DNA, 25 bp, Homo sapien
ctttgatcagaagcattaaagttct

SEQ ID NO: 5585387 - DNA, 25 bp, Homo sapien
caacgtggatgaatcccaaaaacct

SEQ ID NO: 5585388 - DNA, 25 bp, Homo sapien
ttcccgctaatcacaccatggtcta

SEQ ID NO: 5585389 - DNA, 25 bp, Homo sapien
gaggaggtcatacacaacaacgtgg

SEQ ID NO: 5585390 - DNA, 25 bp, Homo sapien
cctctaacctggaaatgacccttgt

SEQ ID NO: 5585391 - DNA, 25 bp, Homo sapien
gacaatcactgatttattgggtcac

SEQ ID NO: 5585392 - DNA, 25 bp, Homo sapien
cgcttggaccctttgtctgactgtt

SEQ ID NO: 5585393 - DNA, 25 bp, Homo sapien
tcaccatgaggagattctaaaaacc

SEQ ID NO: 5585394 - DNA, 25 bp, Homo sapien
tctcctcccgcttggaccctttgtc

SEQ ID NO: 5585395 - DNA, 25 bp, Homo sapien
attgggtcactagtctgtgctaagt

SEQ ID NO: 5585396 - DNA, 25 bp, Homo sapien
aatcacagaaaccatgcagtggaca

SEQ ID NO: 5585397 - DNA, 25 bp, Homo sapien
caggcaggttcaatcacagaaacca

SEQ ID NO: 5585398 - DNA, 25 bp, Homo sapien
ttaagttgcaggtgaaccctccatt

SEQ ID NO: 5585399 - DNA, 25 bp, Homo sapien
gagagaaaaagttcaccatgaggag

SEQ ID NO: 5585400 - DNA, 25 bp, Homo sapien
ctgagatgacaggtatgagaatttt

SEQ ID NO: 5585401 - DNA, 25 bp, Homo sapien
gttgcaggtgaaccctccattaccc

SEQ ID NO: 5585402 - DNA, 25 bp, Homo sapien
aaaaagtaaacaggtctcaggtgtc

SEQ ID NO: 5585403 - DNA, 25 bp, Homo sapien
ttagatacagtaccttcaaaagaag

SEQ ID NO: 5585404 - DNA, 25 bp, Homo sapien
tgggacacttattgaactgaggatt

SEQ ID NO: 5585405 - DNA, 25 bp, Homo sapien
agtgaagtggctgagaattaaatga

SEQ ID NO: 5585406 - DNA, 25 bp, Homo sapien
caggtgtctttttcatgggtaggtc

SEQ ID NO: 5585407 - DNA, 25 bp, Homo sapien
ttcaaaagaaggcctaatgtggaca

SEQ ID NO: 5585408 - DNA, 25 bp, Homo sapien
taatgtggacaagctaacatgggtg

SEQ ID NO: 5585409 - DNA, 25 bp, Homo sapien
ccttgtagtatcagtgaagtggctg

SEQ ID NO: 5585410 - DNA, 25 bp, Homo sapien
acagaggaaattctccttgggacac

SEQ ID NO: 5585411 - DNA, 25 bp, Homo sapien
aacatgggtgtgctaaacctacgca

SEQ ID NO: 5585412 - DNA, 25 bp, Homo sapien
tcatgggtaggtcaccttatcaatc

SEQ ID NO: 5585413 - DNA, 25 bp, Homo sapien
ttacctcaagagcatcaagatcaaa

SEQ ID NO: 5585414 - DNA, 25 bp, Homo sapien
tttctaagttggtatgagccagctt

SEQ ID NO: 5585415 - DNA, 25 bp, Homo sapien
ctgcagcaggaatttaagagacttt

SEQ ID NO: 5585416 - DNA, 25 bp, Homo sapien
acacaggtaccaggacgtaaattac

SEQ ID NO: 5585417 - DNA, 25 bp, Homo sapien
tgctatcacgaagagtggagttgag

SEQ ID NO: 5585418 - DNA, 25 bp, Homo sapien
agacaaggtgcacagtagcacacca

SEQ ID NO: 5585419 - DNA, 25 bp, Homo sapien
tggtgtttgagaatatagataagct

SEQ ID NO: 5585420 - DNA, 25 bp, Homo sapien
taataaccagctgtcaaaatgaaaa

SEQ ID NO: 5585421 - DNA, 25 bp, Homo sapien
atatagtaattccaccacacaggta

SEQ ID NO: 5585422 - DNA, 25 bp, Homo sapien
attaagtgaaaagcacgaaaatcct

SEQ ID NO: 5585423 - DNA, 25 bp, Homo sapien
atgagccagcttagcataccactac

SEQ ID NO: 5585424 - DNA, 25 bp, Homo sapien
ggcgcctaccagcacacccagctaa

SEQ ID NO: 5585425 - DNA, 25 bp, Homo sapien
ttgcttctgcttggcctcatggggc

SEQ ID NO: 5585426 - DNA, 25 bp, Homo sapien
ctaaacagcttaatggacttcctac

SEQ ID NO: 5585427 - DNA, 25 bp, Homo sapien
actaaaactggagtttggctgggta

SEQ ID NO: 5585428 - DNA, 25 bp, Homo sapien
gtagctgtgattacaggcgcctacc

SEQ ID NO: 5585429 - DNA, 25 bp, Homo sapien
gaaacagtgtttcgccatgttggcc

SEQ ID NO: 5585430 - DNA, 25 bp, Homo sapien
tggcctcatggggcctcagagaaag

SEQ ID NO: 5585431 - DNA, 25 bp, Homo sapien
gaggatgggtctttcctgggttcat

SEQ ID NO: 5585432 - DNA, 25 bp, Homo sapien
gtatagtttgattttcaggactctg

SEQ ID NO: 5585433 - DNA, 25 bp, Homo sapien
tggcgagatctcagcccactgcaac

SEQ ID NO: 5585434 - DNA, 25 bp, Homo sapien
gctcacaactgatcccagcactttg

SEQ ID NO: 5585435 - DNA, 25 bp, Homo sapien
tttatttctttacaactactctcac

SEQ ID NO: 5585436 - DNA, 25 bp, Homo sapien
gtgagagtagttgtaaagaaataaa

SEQ ID NO: 5585437 - DNA, 25 bp, Homo sapien
agccgcctgctcactgttcaccatg

SEQ ID NO: 5585438 - DNA, 25 bp, Homo sapien
tcccgaaggagctcaccatcaagga

SEQ ID NO: 5585439 - DNA, 25 bp, Homo sapien
agactggaggcccctcgctctagat

SEQ ID NO: 5585440 - DNA, 25 bp, Homo sapien
ttagaaaatgaacccagatgagcag

SEQ ID NO: 5585441 - DNA, 25 bp, Homo sapien
cccagatgagcagccttcacttcag

SEQ ID NO: 5585442 - DNA, 25 bp, Homo sapien
gtctcctatgtggcagcttctgggg

SEQ ID NO: 5585443 - DNA, 25 bp, Homo sapien
ctcgctctagataggtcccagggag

SEQ ID NO: 5585444 - DNA, 25 bp, Homo sapien
gcctcttatgaaccagggtggagac

SEQ ID NO: 5585445 - DNA, 25 bp, Homo sapien
ttcttcccccaggatgggctgactg

SEQ ID NO: 5585446 - DNA, 25 bp, Homo sapien
atgggctgactgtgactctgcatta

SEQ ID NO: 5585447 - DNA, 25 bp, Homo sapien
agatcctgggacaccagtctcatcc

SEQ ID NO: 5585448 - DNA, 25 bp, Homo sapien
tattgaaatggctgtacatgtaagc

SEQ ID NO: 5585449 - DNA, 25 bp, Homo sapien
gaaacagtggctcaaggcatatcta

SEQ ID NO: 5585450 - DNA, 25 bp, Homo sapien
atggctgtacatgtaagcaggtaac

SEQ ID NO: 5585451 - DNA, 25 bp, Homo sapien
ttctcagtggatctataacaatatt

SEQ ID NO: 5585452 - DNA, 25 bp, Homo sapien
taaggcacttgggcacaaaagattt

SEQ ID NO: 5585453 - DNA, 25 bp, Homo sapien
ctactaagaaggcagattattgtgt

SEQ ID NO: 5585454 - DNA, 25 bp, Homo sapien
tactggaatgcttatcagaaaagtt

SEQ ID NO: 5585455 - DNA, 25 bp, Homo sapien
agcaggtaactacacagcagacgtg

SEQ ID NO: 5585456 - DNA, 25 bp, Homo sapien
acagcaaatgctggaaataagcaat

SEQ ID NO: 5585457 - DNA, 25 bp, Homo sapien
tattgtgtaattaagccatagctat

SEQ ID NO: 5585458 - DNA, 25 bp, Homo sapien
cacagcagacgtggcaatatgtgtg

SEQ ID NO: 5585459 - DNA, 25 bp, Homo sapien
tcagagggttgctggtaaattgatc

SEQ ID NO: 5585460 - DNA, 25 bp, Homo sapien
tagaaagccctaccatcaaccctca

SEQ ID NO: 5585461 - DNA, 25 bp, Homo sapien
atccacctgagtgaattaaaccagc

SEQ ID NO: 5585462 - DNA, 25 bp, Homo sapien
aagtgtaactgaaaagatatccttg

SEQ ID NO: 5585463 - DNA, 25 bp, Homo sapien
gtccaagagcataactcactgccct

SEQ ID NO: 5585464 - DNA, 25 bp, Homo sapien
tggcaacacagtatctcaaatcaga

SEQ ID NO: 5585465 - DNA, 25 bp, Homo sapien
aaatcagatataaggttgctacaat

SEQ ID NO: 5585466 - DNA, 25 bp, Homo sapien
gtgtagtctctccagccaattccaa

SEQ ID NO: 5585467 - DNA, 25 bp, Homo sapien
tagctttcaccaagtccaagagcat

SEQ ID NO: 5585468 - DNA, 25 bp, Homo sapien
taaacataacatggacatttggcaa

SEQ ID NO: 5585469 - DNA, 25 bp, Homo sapien
tccaatgtatgtgcaatcatccacc

SEQ ID NO: 5585470 - DNA, 25 bp, Homo sapien
tgaatgagacaagattagttgaagg

SEQ ID NO: 5585471 - DNA, 25 bp, Homo sapien
ctcttggccatatgttcaggtctca

SEQ ID NO: 5585472 - DNA, 25 bp, Homo sapien
ctccaataggaattgagtgattctc

SEQ ID NO: 5585473 - DNA, 25 bp, Homo sapien
gatatcaaaaggtgagtgaatgaga

SEQ ID NO: 5585474 - DNA, 25 bp, Homo sapien
atggcagtggccagcattgtccatt

SEQ ID NO: 5585475 - DNA, 25 bp, Homo sapien
cagatagctgaatgaaaatgggtat

SEQ ID NO: 5585476 - DNA, 25 bp, Homo sapien
ctactcccaatgctctcacagacag

SEQ ID NO: 5585477 - DNA, 25 bp, Homo sapien
tagttgaaggaagtacttgatattt

SEQ ID NO: 5585478 - DNA, 25 bp, Homo sapien
tacacagaacaagagtaataaagtt

SEQ ID NO: 5585479 - DNA, 25 bp, Homo sapien
agttctcaagtaaggattgcactcc

SEQ ID NO: 5585480 - DNA, 25 bp, Homo sapien
tggtcttcagtgttgtaaacgcaat

SEQ ID NO: 5585481 - DNA, 25 bp, Homo sapien
tcctgacgcccctccgcaaagagta

SEQ ID NO: 5585482 - DNA, 25 bp, Homo sapien
tactctttgcggaggggcgtcagga

SEQ ID NO: 5585483 - DNA, 25 bp, Homo sapien
tgcctggggtaccattcccaatatg

SEQ ID NO: 5585484 - DNA, 25 bp, Homo sapien
ggcattatggcctgattaaaatccc

SEQ ID NO: 5585485 - DNA, 25 bp, Homo sapien
tctggcttccaaaactggtcctctc

SEQ ID NO: 5585486 - DNA, 25 bp, Homo sapien
taaatgtacacaggacaaggtctaa

SEQ ID NO: 5585487 - DNA, 25 bp, Homo sapien
cctctctggtagaactgatcactct

SEQ ID NO: 5585488 - DNA, 25 bp, Homo sapien
agtaaagaaatttggcattatggcc

SEQ ID NO: 5585489 - DNA, 25 bp, Homo sapien
cttacctagttccctgtccacctct

SEQ ID NO: 5585490 - DNA, 25 bp, Homo sapien
agccacactgcagttactcaaaagc

SEQ ID NO: 5585491 - DNA, 25 bp, Homo sapien
atttgccccaaatctgctatgactt

SEQ ID NO: 5585492 - DNA, 25 bp, Homo sapien
agtttgactttgacatatttgcccc

SEQ ID NO: 5585493 - DNA, 25 bp, Homo sapien
atgcttaaagattcttgggggcagg

SEQ ID NO: 5585494 - DNA, 25 bp, Homo sapien
ggcacgcaggctctgagtctgttta

SEQ ID NO: 5585495 - DNA, 25 bp, Homo sapien
cccaactgagtagtgacagaccttc

SEQ ID NO: 5585496 - DNA, 25 bp, Homo sapien
cagggagcactgaccctccccagtc

SEQ ID NO: 5585497 - DNA, 25 bp, Homo sapien
tgaacgcgattcttggttggtgagg

SEQ ID NO: 5585498 - DNA, 25 bp, Homo sapien
actcatttgagttgcgaggcagtgg

SEQ ID NO: 5585499 - DNA, 25 bp, Homo sapien
agcagcaggaccacctggcatctgt

SEQ ID NO: 5585500 - DNA, 25 bp, Homo sapien
gctttgactcacagggagatgttaa

SEQ ID NO: 5585501 - DNA, 25 bp, Homo sapien
tggatgaatgagtcggctctcaggt

SEQ ID NO: 5585502 - DNA, 25 bp, Homo sapien
aagcgccctgtttacacgagaagcc

SEQ ID NO: 5585503 - DNA, 25 bp, Homo sapien
gaggcagtggacttgaacttctcag

SEQ ID NO: 5585504 - DNA, 25 bp, Homo sapien
ttggcaggattagagtcacagctga

SEQ ID NO: 5585505 - DNA, 25 bp, Homo sapien
gaatacgcaatgtcactccttcacc

SEQ ID NO: 5585506 - DNA, 25 bp, Homo sapien
tcagtgaaaagttgttagtccctgt

SEQ ID NO: 5585507 - DNA, 25 bp, Homo sapien
agaaactccctaacagacagaaaat

SEQ ID NO: 5585508 - DNA, 25 bp, Homo sapien
ccccaattactgccctgagcccaat

SEQ ID NO: 5585509 - DNA, 25 bp, Homo sapien
gatgaaagagcaaacagaataaact

SEQ ID NO: 5585510 - DNA, 25 bp, Homo sapien
agaataaactgcctcgagtaaatgt

SEQ ID NO: 5585511 - DNA, 25 bp, Homo sapien
tgcacaaactacagttgacagtgtt

SEQ ID NO: 5585512 - DNA, 25 bp, Homo sapien
actcttaagaataaatgccagcccc

SEQ ID NO: 5585513 - DNA, 25 bp, Homo sapien
atgctgtgaaatgaagtacaatgaa

SEQ ID NO: 5585514 - DNA, 25 bp, Homo sapien
gacaaaagttttagagcacaagaaa

SEQ ID NO: 5585515 - DNA, 25 bp, Homo sapien
agccaggaactaacagcaacagcaa

SEQ ID NO: 5585516 - DNA, 25 bp, Homo sapien
ttttcgtatgaagggctaaaacttg

SEQ ID NO: 5585517 - DNA, 25 bp, Homo sapien
caagttttagcccttcatacgaaaa

SEQ ID NO: 5585518 - DNA, 25 bp, Homo sapien
cactttgtaatggttggcagaagac

SEQ ID NO: 5585519 - DNA, 25 bp, Homo sapien
tggagctggcctttgtgcttaggga

SEQ ID NO: 5585520 - DNA, 25 bp, Homo sapien
agtcacgcccgcattgccgaagatg

SEQ ID NO: 5585521 - DNA, 25 bp, Homo sapien
ctctgcacagcatctctggagctgg

SEQ ID NO: 5585522 - DNA, 25 bp, Homo sapien
cctccaaaagtggtgattctctggt

SEQ ID NO: 5585523 - DNA, 25 bp, Homo sapien
tgctgcacttttcagggggccctga

SEQ ID NO: 5585524 - DNA, 25 bp, Homo sapien
gaaggcacgaactattccccagctc

SEQ ID NO: 5585525 - DNA, 25 bp, Homo sapien
ggttggcagaagacaatggtctttc

SEQ ID NO: 5585526 - DNA, 25 bp, Homo sapien
gcaaacacaaacaccgacatcccgc

SEQ ID NO: 5585527 - DNA, 25 bp, Homo sapien
agttttccagactgagcatgcacgc

SEQ ID NO: 5585528 - DNA, 25 bp, Homo sapien
tctctggtctctgctgaatgctctc

SEQ ID NO: 5585529 - DNA, 25 bp, Homo sapien
cagaaatgaatagccacagtttttt

SEQ ID NO: 5585530 - DNA, 25 bp, Homo sapien
aagcaaaagtatttccagtctccta

SEQ ID NO: 5585531 - DNA, 25 bp, Homo sapien
tctatatttagagctgtatgtccat

SEQ ID NO: 5585532 - DNA, 25 bp, Homo sapien
aaacagcgattcttctgcagtgaat

SEQ ID NO: 5585533 - DNA, 25 bp, Homo sapien
cacagttttttggaatgaacgttgt

SEQ ID NO: 5585534 - DNA, 25 bp, Homo sapien
ctatcgatacagaaagcaaaagtat

SEQ ID NO: 5585535 - DNA, 25 bp, Homo sapien
ggaatgaacgttgtgaaatccctcc

SEQ ID NO: 5585536 - DNA, 25 bp, Homo sapien
tactgaactgtcacggcagacctct

SEQ ID NO: 5585537 - DNA, 25 bp, Homo sapien
accagcaactgagtgttggcaggtg

SEQ ID NO: 5585538 - DNA, 25 bp, Homo sapien
gttttcagttggtggttttatcaga

SEQ ID NO: 5585539 - DNA, 25 bp, Homo sapien
atttctcaagatcaaaacgaaacct

SEQ ID NO: 5585540 - DNA, 25 bp, Homo sapien
ttcacatatgccagaagtttactct

SEQ ID NO: 5585541 - DNA, 25 bp, Homo sapien
tgtgcatgacagcaatcataggaac

SEQ ID NO: 5585542 - DNA, 25 bp, Homo sapien
ttgtgcactaaatgtacagccaaaa

SEQ ID NO: 5585543 - DNA, 25 bp, Homo sapien
gatgataccgacttctgctccagct

SEQ ID NO: 5585544 - DNA, 25 bp, Homo sapien
tcataggaacaatctagcaacaggc

SEQ ID NO: 5585545 - DNA, 25 bp, Homo sapien
atttggcattcaaaaaagggatatt

SEQ ID NO: 5585546 - DNA, 25 bp, Homo sapien
gttttcacacttggccatttggcat

SEQ ID NO: 5585547 - DNA, 25 bp, Homo sapien
actctatgatgatgataccgacttc

SEQ ID NO: 5585548 - DNA, 25 bp, Homo sapien
taaacacagacacatataaagacgt

SEQ ID NO: 5585549 - DNA, 25 bp, Homo sapien
aacaatctagcaacaggcagcactg

SEQ ID NO: 5585550 - DNA, 25 bp, Homo sapien
catataaagacgttagaggaagaaa

SEQ ID NO: 5585551 - DNA, 25 bp, Homo sapien
gcacccggcctgagttaatacatct

SEQ ID NO: 5585552 - DNA, 25 bp, Homo sapien
agaactcaagtcaagagagagtcgg

SEQ ID NO: 5585553 - DNA, 25 bp, Homo sapien
actgtgcagaccgaatcagaaggaa

SEQ ID NO: 5585554 - DNA, 25 bp, Homo sapien
gtcagcaggataaagaagtcattct

SEQ ID NO: 5585555 - DNA, 25 bp, Homo sapien
gtcactcggggcatccgagcatgag

SEQ ID NO: 5585556 - DNA, 25 bp, Homo sapien
gctccagccctaggccccactgtgc

SEQ ID NO: 5585557 - DNA, 25 bp, Homo sapien
ttccaatgtttccggagaggtgcga

SEQ ID NO: 5585558 - DNA, 25 bp, Homo sapien
agtcggcaagagactctcagcattc

SEQ ID NO: 5585559 - DNA, 25 bp, Homo sapien
ccacgcacccacgaagaactcaagt

SEQ ID NO: 5585560 - DNA, 25 bp, Homo sapien
attctctcccgaaagcacgtgtgtc

SEQ ID NO: 5585561 - DNA, 25 bp, Homo sapien
gcgtagaggagagatttccaatgtt

SEQ ID NO: 5585562 - DNA, 25 bp, Homo sapien
atatcttgatcttagaaacataaaa

SEQ ID NO: 5585563 - DNA, 25 bp, Homo sapien
ttttatgtttctaagatcaagatat

SEQ ID NO: 5585564 - DNA, 25 bp, Homo sapien
gggagatcaacttcgagcgccaaaa

SEQ ID NO: 5585565 - DNA, 25 bp, Homo sapien
ggttggtgtatgataaagaagagaa

SEQ ID NO: 5585566 - DNA, 25 bp, Homo sapien
accataccacgctgagtgcaattgc

SEQ ID NO: 5585567 - DNA, 25 bp, Homo sapien
aacacagtaagaatctacgggagga

SEQ ID NO: 5585568 - DNA, 25 bp, Homo sapien
agttaaataaagggcttgagtacat

SEQ ID NO: 5585569 - DNA, 25 bp, Homo sapien
gggccctggcttcacgctggggccc

SEQ ID NO: 5585570 - DNA, 25 bp, Homo sapien
tatcttgaaggtttcggaagcctct

SEQ ID NO: 5585571 - DNA, 25 bp, Homo sapien
aggctcgcatttgcttcccgggccc

SEQ ID NO: 5585572 - DNA, 25 bp, Homo sapien
cactagatagcaaggaaaagtggta

SEQ ID NO: 5585573 - DNA, 25 bp, Homo sapien
ctaggaaccctaccgtatctacaac

SEQ ID NO: 5585574 - DNA, 25 bp, Homo sapien
taataacaatggtatgtacagaatc

SEQ ID NO: 5585575 - DNA, 25 bp, Homo sapien
gaggcaataaagagttcagaaatat

SEQ ID NO: 5585576 - DNA, 25 bp, Homo sapien
gtgtcatgataaataacttcaccac

SEQ ID NO: 5585577 - DNA, 25 bp, Homo sapien
aaaggcatactttgtgaaccatggt

SEQ ID NO: 5585578 - DNA, 25 bp, Homo sapien
aattcaggttttgtgtccccattta

SEQ ID NO: 5585579 - DNA, 25 bp, Homo sapien
tacagaaggtttacaatacgtagtc

SEQ ID NO: 5585580 - DNA, 25 bp, Homo sapien
atacgtagtcttaatagtaacatgt

SEQ ID NO: 5585581 - DNA, 25 bp, Homo sapien
tgtgaaccatggtgaatttccccag

SEQ ID NO: 5585582 - DNA, 25 bp, Homo sapien
aaggtaacattaaaactgctgaggt

SEQ ID NO: 5585583 - DNA, 25 bp, Homo sapien
tatgtgaaaattacagaaggtttac

SEQ ID NO: 5585584 - DNA, 25 bp, Homo sapien
tatgtagaaatcacaattcaggttt

SEQ ID NO: 5585585 - DNA, 25 bp, Homo sapien
tgctgaggtgccagataagtatttt

SEQ ID NO: 5585586 - DNA, 25 bp, Homo sapien
gtagtaagagaaatttaacacatac

SEQ ID NO: 5585587 - DNA, 25 bp, Homo sapien
aaatacagtatgactacacagcatt

SEQ ID NO: 5585588 - DNA, 25 bp, Homo sapien
ctggccctcagtatcctgtggattc

SEQ ID NO: 5585589 - DNA, 25 bp, Homo sapien
ctttgtatgtgatttgggttgtgaa

SEQ ID NO: 5585590 - DNA, 25 bp, Homo sapien
gggttgtgaatacagctggccctca

SEQ ID NO: 5585591 - DNA, 25 bp, Homo sapien
ctaaatgtccagaatgtcccaggct

SEQ ID NO: 5585592 - DNA, 25 bp, Homo sapien
ggatatccacggaagtcccacaacc

SEQ ID NO: 5585593 - DNA, 25 bp, Homo sapien
aatgagacactatctgcacagagct

SEQ ID NO: 5585594 - DNA, 25 bp, Homo sapien
taggcctattgtgtatgaacttgtc

SEQ ID NO: 5585595 - DNA, 25 bp, Homo sapien
cccaggctttgtgctagaaaggctg

SEQ ID NO: 5585596 - DNA, 25 bp, Homo sapien
aaggctgcaatgataaacaagagag

SEQ ID NO: 5585597 - DNA, 25 bp, Homo sapien
ttaaggatattaactagttgctgta

SEQ ID NO: 5585598 - DNA, 25 bp, Homo sapien
ttcgcgccccgcctgttcatcctca

SEQ ID NO: 5585599 - DNA, 25 bp, Homo sapien
cagagtttgtgtaccctgcccgagc

SEQ ID NO: 5585600 - DNA, 25 bp, Homo sapien
tctttcaaagatcctggaagtttta

SEQ ID NO: 5585601 - DNA, 25 bp, Homo sapien
tgcacttgaaaaggctttctccacc

SEQ ID NO: 5585602 - DNA, 25 bp, Homo sapien
ttgatgcacatgatatcttcagctt

SEQ ID NO: 5585603 - DNA, 25 bp, Homo sapien
agcagctcctctggggattttgcag

SEQ ID NO: 5585604 - DNA, 25 bp, Homo sapien
agataaatcctacctgtgtttccac

SEQ ID NO: 5585605 - DNA, 25 bp, Homo sapien
ggggattttgcagccacagagtttg

SEQ ID NO: 5585606 - DNA, 25 bp, Homo sapien
gcagctatgctgagcagtagaaggc

SEQ ID NO: 5585607 - DNA, 25 bp, Homo sapien
cccctctgtggtcagttccatgccc

SEQ ID NO: 5585608 - DNA, 25 bp, Homo sapien
taggctattttaaaagtgtactgaa

SEQ ID NO: 5585609 - DNA, 25 bp, Homo sapien
cttcagcacggtagacatccaagag

SEQ ID NO: 5585610 - DNA, 25 bp, Homo sapien
aatgggaactgcaggtgctttgata

SEQ ID NO: 5585611 - DNA, 25 bp, Homo sapien
ttgataaaggtattgagaagttgac

SEQ ID NO: 5585612 - DNA, 25 bp, Homo sapien
ctgtgccccagttaacaaagtagtc

SEQ ID NO: 5585613 - DNA, 25 bp, Homo sapien
tcactcccaggctagatcagtgcgc

SEQ ID NO: 5585614 - DNA, 25 bp, Homo sapien
gctgaccttcagcacggtagacatc

SEQ ID NO: 5585615 - DNA, 25 bp, Homo sapien
ggtattgagaagttgacctagtttc

SEQ ID NO: 5585616 - DNA, 25 bp, Homo sapien
cttgcaatgaaatgggaactgcagg

SEQ ID NO: 5585617 - DNA, 25 bp, Homo sapien
acagcaatgaggttacagaacttcc

SEQ ID NO: 5585618 - DNA, 25 bp, Homo sapien
gcaggaaataaatcagattggcacc

SEQ ID NO: 5585619 - DNA, 25 bp, Homo sapien
tccgtgctcggaacgtgtaaagagg

SEQ ID NO: 5585620 - DNA, 25 bp, Homo sapien
cctctttacacgttccgagcacgga

SEQ ID NO: 5585621 - DNA, 25 bp, Homo sapien
ttctcttggtgaacgacagatctgg

SEQ ID NO: 5585622 - DNA, 25 bp, Homo sapien
catgccagacacacaacataatgtt

SEQ ID NO: 5585623 - DNA, 25 bp, Homo sapien
ttggtggatcttttcagagctcctc

SEQ ID NO: 5585624 - DNA, 25 bp, Homo sapien
agggcaacccactgacgcttgtcaa

SEQ ID NO: 5585625 - DNA, 25 bp, Homo sapien
ccgcggcctgtaactgaatggctgg

SEQ ID NO: 5585626 - DNA, 25 bp, Homo sapien
atctggcttcacattggactggctt

SEQ ID NO: 5585627 - DNA, 25 bp, Homo sapien
tctggtcttgtaaagaggacgttcc

SEQ ID NO: 5585628 - DNA, 25 bp, Homo sapien
tgtgtggtgttggctgttttcttca

SEQ ID NO: 5585629 - DNA, 25 bp, Homo sapien
ttcaagctgtgaatgggccacagcg

SEQ ID NO: 5585630 - DNA, 25 bp, Homo sapien
acatttgcgataagggcaacccact

SEQ ID NO: 5585631 - DNA, 25 bp, Homo sapien
cataaagctgatgtgtgtgtggtgt

SEQ ID NO: 5585632 - DNA, 25 bp, Homo sapien
tcagaggtagtctacacaggccttc

SEQ ID NO: 5585633 - DNA, 25 bp, Homo sapien
gaagagatagcaagtatgcgaccat

SEQ ID NO: 5585634 - DNA, 25 bp, Homo sapien
gaaaagtcaactcagaaggagagac

SEQ ID NO: 5585635 - DNA, 25 bp, Homo sapien
acagcagataccatcacaaccatta

SEQ ID NO: 5585636 - DNA, 25 bp, Homo sapien
tatgcgaccatgtgacttaatacac

SEQ ID NO: 5585637 - DNA, 25 bp, Homo sapien
aattgagacattatccccctgtgcc

SEQ ID NO: 5585638 - DNA, 25 bp, Homo sapien
ttccagaaagctacctaaggctatc

SEQ ID NO: 5585639 - DNA, 25 bp, Homo sapien
cattaacagtaatcagtgctgcctg

SEQ ID NO: 5585640 - DNA, 25 bp, Homo sapien
ctagcagactataatgcagttagct

SEQ ID NO: 5585641 - DNA, 25 bp, Homo sapien
ctaggtgttgggaagcaattctttt

SEQ ID NO: 5585642 - DNA, 25 bp, Homo sapien
aaggtcatgatgtaacaattgagac

SEQ ID NO: 5585643 - DNA, 25 bp, Homo sapien
ctgatgattgtcaaggcgatttaaa

SEQ ID NO: 5585644 - DNA, 25 bp, Homo sapien
aagttcgaggagcactgtttcaagc

SEQ ID NO: 5585645 - DNA, 25 bp, Homo sapien
taataagcagaatgtgtgattgttc

SEQ ID NO: 5585646 - DNA, 25 bp, Homo sapien
tggaagcaaaatttgaacatttagc

SEQ ID NO: 5585647 - DNA, 25 bp, Homo sapien
tttgtcagtagtcacgaaggtaagt

SEQ ID NO: 5585648 - DNA, 25 bp, Homo sapien
ataaaaacgagacctttactctggc

SEQ ID NO: 5585649 - DNA, 25 bp, Homo sapien
ttactctggcaataggaattcacat

SEQ ID NO: 5585650 - DNA, 25 bp, Homo sapien
agtcacgaaggtaagtactactttg

SEQ ID NO: 5585651 - DNA, 25 bp, Homo sapien
taccgaaatacatgacatcgcctgc

SEQ ID NO: 5585652 - DNA, 25 bp, Homo sapien
ataaaatctcaaagctgttagaaac

SEQ ID NO: 5585653 - DNA, 25 bp, Homo sapien
tcagagagagcctgttgagataaaa

SEQ ID NO: 5585654 - DNA, 25 bp, Homo sapien
gtggatgcacaggtaagacctaaac

SEQ ID NO: 5585655 - DNA, 25 bp, Homo sapien
tggaactggtagtgtgacccagctt

SEQ ID NO: 5585656 - DNA, 25 bp, Homo sapien
gcactggtggccaccacttctgagc

SEQ ID NO: 5585657 - DNA, 25 bp, Homo sapien
aagaatccgtgaatacgcgattatt

SEQ ID NO: 5585658 - DNA, 25 bp, Homo sapien
agttacaatttaggaaagaatctcc

SEQ ID NO: 5585659 - DNA, 25 bp, Homo sapien
gacccagcttagcactggtggccac

SEQ ID NO: 5585660 - DNA, 25 bp, Homo sapien
ttttgtaagtagccagtaattatac

SEQ ID NO: 5585661 - DNA, 25 bp, Homo sapien
cccccaaactggaactggtagtgtg

SEQ ID NO: 5585662 - DNA, 25 bp, Homo sapien
aaacacagataattaaagatgcaat

SEQ ID NO: 5585663 - DNA, 25 bp, Homo sapien
aaggaaattgtaagaatccgtgaat

SEQ ID NO: 5585664 - DNA, 25 bp, Homo sapien
tactgtgcagaataatccttttagc

SEQ ID NO: 5585665 - DNA, 25 bp, Homo sapien
caagcagtaaggctgaaaacacagc

SEQ ID NO: 5585666 - DNA, 25 bp, Homo sapien
aggcaagagtccacatatgggaacg

SEQ ID NO: 5585667 - DNA, 25 bp, Homo sapien
gctaagcttacaaagaaaatggttc

SEQ ID NO: 5585668 - DNA, 25 bp, Homo sapien
tacaaagcaccctgagtgtctgccc

SEQ ID NO: 5585669 - DNA, 25 bp, Homo sapien
cctagactaccaccagagacaattc

SEQ ID NO: 5585670 - DNA, 25 bp, Homo sapien
ggttaattgacctagagcccagttc

SEQ ID NO: 5585671 - DNA, 25 bp, Homo sapien
atctggcccccattacactgtctca

SEQ ID NO: 5585672 - DNA, 25 bp, Homo sapien
aacacagccccgaacaaaaatacaa

SEQ ID NO: 5585673 - DNA, 25 bp, Homo sapien
gcccaaggaatctggacgatttcac

SEQ ID NO: 5585674 - DNA, 25 bp, Homo sapien
caaaatttcatctggagctggctag

SEQ ID NO: 5585675 - DNA, 25 bp, Homo sapien
ctctatgagcattggattgggaaga

SEQ ID NO: 5585676 - DNA, 25 bp, Homo sapien
tttcccctcaggaaagatgggtgca

SEQ ID NO: 5585677 - DNA, 25 bp, Homo sapien
gcttggcatagtagaagaaacaaac

SEQ ID NO: 5585678 - DNA, 25 bp, Homo sapien
agtagatgttacgaaggatggtttt

SEQ ID NO: 5585679 - DNA, 25 bp, Homo sapien
gaattaaaagagagccaccagcttg

SEQ ID NO: 5585680 - DNA, 25 bp, Homo sapien
gcagagccgccggttacctttgagc

SEQ ID NO: 5585681 - DNA, 25 bp, Homo sapien
gagcatcgaaataccgcaagttatc

SEQ ID NO: 5585682 - DNA, 25 bp, Homo sapien
catggggagtgagctctcttcccca

SEQ ID NO: 5585683 - DNA, 25 bp, Homo sapien
cctgcgttaaccctttgggcgccgc

SEQ ID NO: 5585684 - DNA, 25 bp, Homo sapien
aatctcttgaaggttggagcagagc

SEQ ID NO: 5585685 - DNA, 25 bp, Homo sapien
cccggattttaagcgcggatcctgc

SEQ ID NO: 5585686 - DNA, 25 bp, Homo sapien
agggttgagatgttacaagagaatt

SEQ ID NO: 5585687 - DNA, 25 bp, Homo sapien
tgctagagtagttaagaaatgtgta

SEQ ID NO: 5585688 - DNA, 25 bp, Homo sapien
agcatgagctgagaacttcaagcaa

SEQ ID NO: 5585689 - DNA, 25 bp, Homo sapien
cactcaacagaaagcagcatgagct

SEQ ID NO: 5585690 - DNA, 25 bp, Homo sapien
aggtagcatgagaagcactcaacag

SEQ ID NO: 5585691 - DNA, 25 bp, Homo sapien
aacaagtaccactgaggtagcatga

SEQ ID NO: 5585692 - DNA, 25 bp, Homo sapien
aggccttagagcataggtaggatct

SEQ ID NO: 5585693 - DNA, 25 bp, Homo sapien
gggaagatggcctatgaaccaggcc

SEQ ID NO: 5585694 - DNA, 25 bp, Homo sapien
tcaagcaaaaagtggtcaatgattc

SEQ ID NO: 5585695 - DNA, 25 bp, Homo sapien
ctgttaaataggcagagacgagtat

SEQ ID NO: 5585696 - DNA, 25 bp, Homo sapien
gcacagcattgcagaagctacagtg

SEQ ID NO: 5585697 - DNA, 25 bp, Homo sapien
ggggatctttggggtgccattattc

SEQ ID NO: 5585698 - DNA, 25 bp, Homo sapien
atactgaacaaaggccacccaccat

SEQ ID NO: 5585699 - DNA, 25 bp, Homo sapien
accacaagacccaaaaatgatagct

SEQ ID NO: 5585700 - DNA, 25 bp, Homo sapien
acacagctgaatgacaggaagattt

SEQ ID NO: 5585701 - DNA, 25 bp, Homo sapien
ctgaaaagagacaatcgctaaccac

SEQ ID NO: 5585702 - DNA, 25 bp, Homo sapien
taccaaaatcagagacgcaagtttc

SEQ ID NO: 5585703 - DNA, 25 bp, Homo sapien
aggtgtttaacagcgagattggttc

SEQ ID NO: 5585704 - DNA, 25 bp, Homo sapien
cagttgccaggttacagtgcacagg

SEQ ID NO: 5585705 - DNA, 25 bp, Homo sapien
tatatacaagacattagacaggaaa

SEQ ID NO: 5585706 - DNA, 25 bp, Homo sapien
aactgaacacaggaagaaaaattaa

SEQ ID NO: 5585707 - DNA, 25 bp, Homo sapien
tttgttttgcaggctaaagatggac

SEQ ID NO: 5585708 - DNA, 25 bp, Homo sapien
agtgcacaggaaatcaatactgaac

SEQ ID NO: 5585709 - DNA, 25 bp, Homo sapien
cctcaagcctcacagaggcgggaga

SEQ ID NO: 5585710 - DNA, 25 bp, Homo sapien
gaaggggcagcgtctcttccctctg

SEQ ID NO: 5585711 - DNA, 25 bp, Homo sapien
aaagacagctgagatgtcaaactct

SEQ ID NO: 5585712 - DNA, 25 bp, Homo sapien
ggttgttacccaggcatagacttgc

SEQ ID NO: 5585713 - DNA, 25 bp, Homo sapien
gtgcccgtggtaacagcgtttcaca

SEQ ID NO: 5585714 - DNA, 25 bp, Homo sapien
cagcgtttcacaggaagcaccgtgg

SEQ ID NO: 5585715 - DNA, 25 bp, Homo sapien
cgccctgagtgcagatgccatatgt

SEQ ID NO: 5585716 - DNA, 25 bp, Homo sapien
cctttcatggtctccagtgcggtgc

SEQ ID NO: 5585717 - DNA, 25 bp, Homo sapien
ctgccagagagtctgtgctgttctc

SEQ ID NO: 5585718 - DNA, 25 bp, Homo sapien
ttgctagaggaaaggtgttaattcc

SEQ ID NO: 5585719 - DNA, 25 bp, Homo sapien
gaccaggctggcccagatacatact

SEQ ID NO: 5585720 - DNA, 25 bp, Homo sapien
agaagagtcttaaagagagtgtgtt

SEQ ID NO: 5585721 - DNA, 25 bp, Homo sapien
atgagccactgccgagacttgattt

SEQ ID NO: 5585722 - DNA, 25 bp, Homo sapien
ttatgctgaggcaatgtattgtgtt

SEQ ID NO: 5585723 - DNA, 25 bp, Homo sapien
gagtttctgggaaatgtaggagaac

SEQ ID NO: 5585724 - DNA, 25 bp, Homo sapien
aaaggcaagatattcactgagtttc

SEQ ID NO: 5585725 - DNA, 25 bp, Homo sapien
gtaaggatccatttaaagaagagtc

SEQ ID NO: 5585726 - DNA, 25 bp, Homo sapien
tttagatagacatagagctagtttc

SEQ ID NO: 5585727 - DNA, 25 bp, Homo sapien
tagtgttggtccagttagaaatcca

SEQ ID NO: 5585728 - DNA, 25 bp, Homo sapien
cctcaatagaagcaagcaggagtga

SEQ ID NO: 5585729 - DNA, 25 bp, Homo sapien
aggagaacctcaatagaagcaagca

SEQ ID NO: 5585730 - DNA, 25 bp, Homo sapien
aagagagtgtgtttatgagtctgtg

SEQ ID NO: 5585731 - DNA, 25 bp, Homo sapien
aagtgagttttaggcctaggtcttc

SEQ ID NO: 5585732 - DNA, 25 bp, Homo sapien
ggggattatggaagccaataacaat

SEQ ID NO: 5585733 - DNA, 25 bp, Homo sapien
tcctaaagtaggaaagaataatgtg

SEQ ID NO: 5585734 - DNA, 25 bp, Homo sapien
tatgtgtgcataagaaatgtcactg

SEQ ID NO: 5585735 - DNA, 25 bp, Homo sapien
atttgcccgccaataaggaatcctt

SEQ ID NO: 5585736 - DNA, 25 bp, Homo sapien
catccagctggattatggagctaat

SEQ ID NO: 5585737 - DNA, 25 bp, Homo sapien
aaacagcccgcaagtttagctccta

SEQ ID NO: 5585738 - DNA, 25 bp, Homo sapien
taggcctaggtcttccagaacagtt

SEQ ID NO: 5585739 - DNA, 25 bp, Homo sapien
gatcattagccaaactgtaaccagt

SEQ ID NO: 5585740 - DNA, 25 bp, Homo sapien
atcagactggcagactgggtctaat

SEQ ID NO: 5585741 - DNA, 25 bp, Homo sapien
gggtctaatccgaggtcagatgaca

SEQ ID NO: 5585742 - DNA, 25 bp, Homo sapien
gatagaacataacggagaactctcc

SEQ ID NO: 5585743 - DNA, 25 bp, Homo sapien
ataggatttatactcttacaggatt

SEQ ID NO: 5585744 - DNA, 25 bp, Homo sapien
ttgaaattccacaccacaagtctca

SEQ ID NO: 5585745 - DNA, 25 bp, Homo sapien
tatgcacttgtactgctacgtatgt

SEQ ID NO: 5585746 - DNA, 25 bp, Homo sapien
ctcttacaggatttatatgcacttg

SEQ ID NO: 5585747 - DNA, 25 bp, Homo sapien
ctgactctcagatagaacataacgg

SEQ ID NO: 5585748 - DNA, 25 bp, Homo sapien
acgagatgaagaaagagttctgatt

SEQ ID NO: 5585749 - DNA, 25 bp, Homo sapien
ctcagatagaacataacggagaact

SEQ ID NO: 5585750 - DNA, 25 bp, Homo sapien
ggaaatgaggcctatttgttgcaac

SEQ ID NO: 5585751 - DNA, 25 bp, Homo sapien
atgaagaaagagttctgattgactt

SEQ ID NO: 5585752 - DNA, 25 bp, Homo sapien
caacttaggaaatgaggcctatttg

SEQ ID NO: 5585753 - DNA, 25 bp, Homo sapien
caaaccggcagcataaaaaaaactg

SEQ ID NO: 5585754 - DNA, 25 bp, Homo sapien
ataaaactgcttagaaatgagattt

SEQ ID NO: 5585755 - DNA, 25 bp, Homo sapien
aatgcaattcaaatcatgacatggt

SEQ ID NO: 5585756 - DNA, 25 bp, Homo sapien
aatcatgacatggtaatacttttga

SEQ ID NO: 5585757 - DNA, 25 bp, Homo sapien
taaaaaagatccaaaccggcagcat

SEQ ID NO: 5585758 - DNA, 25 bp, Homo sapien
tccacaaacatcaagacaaactgaa

SEQ ID NO: 5585759 - DNA, 25 bp, Homo sapien
aatcaacgataatctggtactaagg

SEQ ID NO: 5585760 - DNA, 25 bp, Homo sapien
atacttttgaaaaggggactgatta

SEQ ID NO: 5585761 - DNA, 25 bp, Homo sapien
gcagattagcatatggattttaccc

SEQ ID NO: 5585762 - DNA, 25 bp, Homo sapien
gtgctatgattatagtgtcagccac

SEQ ID NO: 5585763 - DNA, 25 bp, Homo sapien
ctgtatttgggagtttactatgatc

SEQ ID NO: 5585764 - DNA, 25 bp, Homo sapien
attcttctgctaccctgtctccaac

SEQ ID NO: 5585765 - DNA, 25 bp, Homo sapien
cctaagaaggatttagcaatcggtt

SEQ ID NO: 5585766 - DNA, 25 bp, Homo sapien
ctggggcctgggccttttaatctaa

SEQ ID NO: 5585767 - DNA, 25 bp, Homo sapien
ctgctaccctgtctccaacagagaa

SEQ ID NO: 5585768 - DNA, 25 bp, Homo sapien
tccccatattccaagagggagaaca

SEQ ID NO: 5585769 - DNA, 25 bp, Homo sapien
gggggccatggaagctaatacatgg

SEQ ID NO: 5585770 - DNA, 25 bp, Homo sapien
ccttttaatctaaggactggggaga

SEQ ID NO: 5585771 - DNA, 25 bp, Homo sapien
gcatggccacattccaagaaatgga

SEQ ID NO: 5585772 - DNA, 25 bp, Homo sapien
agaaggatttagcaatcggttctcc

SEQ ID NO: 5585773 - DNA, 25 bp, Homo sapien
cccatattccaagagggagaacaag

SEQ ID NO: 5585774 - DNA, 25 bp, Homo sapien
ccctgtctccaacagagaaaggggg

SEQ ID NO: 5585775 - DNA, 25 bp, Homo sapien
gatatcataatgtggttcaaggtcc

SEQ ID NO: 5585776 - DNA, 25 bp, Homo sapien
tcactgagcttgtaagcaaggaaat

SEQ ID NO: 5585777 - DNA, 25 bp, Homo sapien
gtgaagcagcaacaatgtcaaagaa

SEQ ID NO: 5585778 - DNA, 25 bp, Homo sapien
ccaattaccaaaactgtgaagcagc

SEQ ID NO: 5585779 - DNA, 25 bp, Homo sapien
ctcctaggagatgaaatatattgtt

SEQ ID NO: 5585780 - DNA, 25 bp, Homo sapien
tgtttcaggacaggtaaaaatgtta

SEQ ID NO: 5585781 - DNA, 25 bp, Homo sapien
agcaaggaaatagtctatggatgcc

SEQ ID NO: 5585782 - DNA, 25 bp, Homo sapien
tccaataagatatgaataagcaata

SEQ ID NO: 5585783 - DNA, 25 bp, Homo sapien
ttaagcaacttagtaaccatgactc

SEQ ID NO: 5585784 - DNA, 25 bp, Homo sapien
taagcacaacttaaggggattatat

SEQ ID NO: 5585785 - DNA, 25 bp, Homo sapien
tgactctgggtcatctgatatcata

SEQ ID NO: 5585786 - DNA, 25 bp, Homo sapien
aatgaaatctactccaaaaattgtc

SEQ ID NO: 5585787 - DNA, 25 bp, Homo sapien
taaaaatgtagaagataccagactt

SEQ ID NO: 5585788 - DNA, 25 bp, Homo sapien
ttgactcaagaccacggtccctgcc

SEQ ID NO: 5585789 - DNA, 25 bp, Homo sapien
gaattgaactatttaagataagctt

SEQ ID NO: 5585790 - DNA, 25 bp, Homo sapien
cggcacccagcccaatgtattcttt

SEQ ID NO: 5585791 - DNA, 25 bp, Homo sapien
gtagaagataccagacttccagact

SEQ ID NO: 5585792 - DNA, 25 bp, Homo sapien
ctgccaggctgacatcttgcccctt

SEQ ID NO: 5585793 - DNA, 25 bp, Homo sapien
attgtctctatgagggatgacataa

SEQ ID NO: 5585794 - DNA, 25 bp, Homo sapien
gtccctgccaggctgacatcttgcc

SEQ ID NO: 5585795 - DNA, 25 bp, Homo sapien
ataaagggaatcagcttagcactga

SEQ ID NO: 5585796 - DNA, 25 bp, Homo sapien
agcttagcactgaattgaactattt

SEQ ID NO: 5585797 - DNA, 25 bp, Homo sapien
agaggtgttaatgatgccatgggtt

SEQ ID NO: 5585798 - DNA, 25 bp, Homo sapien
acgtgatgctgagtgaaccacacag

SEQ ID NO: 5585799 - DNA, 25 bp, Homo sapien
gtttggagaaggcagctctcattct

SEQ ID NO: 5585800 - DNA, 25 bp, Homo sapien
acagcttagtgggcctttgtgtatc

SEQ ID NO: 5585801 - DNA, 25 bp, Homo sapien
ctcagtgcctggtaagagtgtatgg

SEQ ID NO: 5585802 - DNA, 25 bp, Homo sapien
ctgcctaagaaccaccctaagctcc

SEQ ID NO: 5585803 - DNA, 25 bp, Homo sapien
atttagggaataagttttggatcac

SEQ ID NO: 5585804 - DNA, 25 bp, Homo sapien
gaggacaagctagtgtggcttcata

SEQ ID NO: 5585805 - DNA, 25 bp, Homo sapien
ctaatggcatggtcaaatcccttac

SEQ ID NO: 5585806 - DNA, 25 bp, Homo sapien
tcaacgatgaattgaggaggttgga

SEQ ID NO: 5585807 - DNA, 25 bp, Homo sapien
ttcactggatgttgtacactggacc

SEQ ID NO: 5585808 - DNA, 25 bp, Homo sapien
ggaactgtagttcttggctaggacc

SEQ ID NO: 5585809 - DNA, 25 bp, Homo sapien
atctcagtcatcgcgtcaccaagcc

SEQ ID NO: 5585810 - DNA, 25 bp, Homo sapien
gcgcgcattgccacatgggaactgt

SEQ ID NO: 5585811 - DNA, 25 bp, Homo sapien
ttggttgagacgtctccacagccca

SEQ ID NO: 5585812 - DNA, 25 bp, Homo sapien
aggtgcaggttctggcatccatcat

SEQ ID NO: 5585813 - DNA, 25 bp, Homo sapien
cggggcctctgtcggctccactttg

SEQ ID NO: 5585814 - DNA, 25 bp, Homo sapien
tatcttcgctcaggcgcccccacgt

SEQ ID NO: 5585815 - DNA, 25 bp, Homo sapien
gcatcgtccttctgaccggggactc

SEQ ID NO: 5585816 - DNA, 25 bp, Homo sapien
ccggggactccagcatctcagtcat

SEQ ID NO: 5585817 - DNA, 25 bp, Homo sapien
tctcggcttgcgcaggcgctctttg

SEQ ID NO: 5585818 - DNA, 25 bp, Homo sapien
gctctttggtgtttacagcggccgc

SEQ ID NO: 5585819 - DNA, 25 bp, Homo sapien
gcctccagggttcaagcaatcctcc

SEQ ID NO: 5585820 - DNA, 25 bp, Homo sapien
ttgaggcaatgtaataatgttattt

SEQ ID NO: 5585821 - DNA, 25 bp, Homo sapien
accgaggaccaatttttgaggcaat

SEQ ID NO: 5585822 - DNA, 25 bp, Homo sapien
gcacttaccgaggaccaatttttga

SEQ ID NO: 5585823 - DNA, 25 bp, Homo sapien
aaaaggtggtcagaatttcacattc

SEQ ID NO: 5585824 - DNA, 25 bp, Homo sapien
aaatactcaaagccaaaaggtggtc

SEQ ID NO: 5585825 - DNA, 25 bp, Homo sapien
atgagctagttcttatacaaccatc

SEQ ID NO: 5585826 - DNA, 25 bp, Homo sapien
gtaatggcacgaactcagctcactt

SEQ ID NO: 5585827 - DNA, 25 bp, Homo sapien
acttcaatctccgcctccagggttc

SEQ ID NO: 5585828 - DNA, 25 bp, Homo sapien
tcaaagccaaaaggtggtcagaatt

SEQ ID NO: 5585829 - DNA, 25 bp, Homo sapien
tagtttgatgttaagtaatatacac

SEQ ID NO: 5585830 - DNA, 25 bp, Homo sapien
aaactgacagtagaaaaatcacccc

SEQ ID NO: 5585831 - DNA, 25 bp, Homo sapien
cattgcccacgctagtttcgaactc

SEQ ID NO: 5585832 - DNA, 25 bp, Homo sapien
tcgctacattgcccacgctagtttc

SEQ ID NO: 5585833 - DNA, 25 bp, Homo sapien
ttgaggaagctaccagtattaaaaa

SEQ ID NO: 5585834 - DNA, 25 bp, Homo sapien
acaaaataagtaacatgaaactttc

SEQ ID NO: 5585835 - DNA, 25 bp, Homo sapien
cacccagcctaaagttaatttctat

SEQ ID NO: 5585836 - DNA, 25 bp, Homo sapien
cacacaaatgcaaatagacaagttt

SEQ ID NO: 5585837 - DNA, 25 bp, Homo sapien
tccaaccttgaggaagctaccagta

SEQ ID NO: 5585838 - DNA, 25 bp, Homo sapien
actagaagtaataacacacaaatgc

SEQ ID NO: 5585839 - DNA, 25 bp, Homo sapien
tccttggaaatactcttaactagaa

SEQ ID NO: 5585840 - DNA, 25 bp, Homo sapien
taatatgaccacagaaaaatagtta

SEQ ID NO: 5585841 - DNA, 25 bp, Homo sapien
aacaatctgtttgagttgcaaagcc

SEQ ID NO: 5585842 - DNA, 25 bp, Homo sapien
caaagccctttgaatgagtagcact

SEQ ID NO: 5585843 - DNA, 25 bp, Homo sapien
aaaaatgaatatgagactgttctac

SEQ ID NO: 5585844 - DNA, 25 bp, Homo sapien
gctttgcctggactggacatctctt

SEQ ID NO: 5585845 - DNA, 25 bp, Homo sapien
agtatacaagatcatgtgtagaaac

SEQ ID NO: 5585846 - DNA, 25 bp, Homo sapien
cactaaggctagttaaagctgtagt

SEQ ID NO: 5585847 - DNA, 25 bp, Homo sapien
ctttgaatgaccctaaaaagggaga

SEQ ID NO: 5585848 - DNA, 25 bp, Homo sapien
tgagtagcactgatctgcaaaatgc

SEQ ID NO: 5585849 - DNA, 25 bp, Homo sapien
gttaaagctgtagtatacccatttc

SEQ ID NO: 5585850 - DNA, 25 bp, Homo sapien
ggttaacaatgctagaatctgacag

SEQ ID NO: 5585851 - DNA, 25 bp, Homo sapien
ggaacttcagtgaaggctttgcctg

SEQ ID NO: 5585852 - DNA, 25 bp, Homo sapien
gacagctgaccgggtcttcctcgca

SEQ ID NO: 5585853 - DNA, 25 bp, Homo sapien
tattccgaccccacttaagagacaa

SEQ ID NO: 5585854 - DNA, 25 bp, Homo sapien
ccacttcccctaagaggaccgatgg

SEQ ID NO: 5585855 - DNA, 25 bp, Homo sapien
aatccccggcactgacggttacgta

SEQ ID NO: 5585856 - DNA, 25 bp, Homo sapien
cggggtgtgtataatggttgaatag

SEQ ID NO: 5585857 - DNA, 25 bp, Homo sapien
gcccctcacaggcttccgagacact

SEQ ID NO: 5585858 - DNA, 25 bp, Homo sapien
agtgcggcgtttagggaatccgcac

SEQ ID NO: 5585859 - DNA, 25 bp, Homo sapien
cgagacactcactggccctgggttg

SEQ ID NO: 5585860 - DNA, 25 bp, Homo sapien
ctcacccctagtcttccgcggccgg

SEQ ID NO: 5585861 - DNA, 25 bp, Homo sapien
ttgaatagaatgaccccctccaggg

SEQ ID NO: 5585862 - DNA, 25 bp, Homo sapien
gggttgtcaggaacttcctagccac

SEQ ID NO: 5585863 - DNA, 25 bp, Homo sapien
tcacctaagactggaattggaatgt

SEQ ID NO: 5585864 - DNA, 25 bp, Homo sapien
atggggtatgagatgatagcattta

SEQ ID NO: 5585865 - DNA, 25 bp, Homo sapien
aggcaatcctcctacgtcagccctc

SEQ ID NO: 5585866 - DNA, 25 bp, Homo sapien
tatattgaggttaagaggcaagatg

SEQ ID NO: 5585867 - DNA, 25 bp, Homo sapien
ccaggtacctggaaccacaggtata

SEQ ID NO: 5585868 - DNA, 25 bp, Homo sapien
aaagcactagttcagttcttcaggt

SEQ ID NO: 5585869 - DNA, 25 bp, Homo sapien
cacatgcagccaattgctatgtttt

SEQ ID NO: 5585870 - DNA, 25 bp, Homo sapien
attggaactcacctaagactggaat

SEQ ID NO: 5585871 - DNA, 25 bp, Homo sapien
ctacgtcagccctccaggtacctgg

SEQ ID NO: 5585872 - DNA, 25 bp, Homo sapien
ctgtagctttggcctgctgggctca

SEQ ID NO: 5585873 - DNA, 25 bp, Homo sapien
tcaggtaatttcattggaactcacc

SEQ ID NO: 5585874 - DNA, 25 bp, Homo sapien
ttaaagcaagaataagtacagactt

SEQ ID NO: 5585875 - DNA, 25 bp, Homo sapien
ccactgttgagcaaatataggtatt

SEQ ID NO: 5585876 - DNA, 25 bp, Homo sapien
caaattatagtgtacaaaagtccat

SEQ ID NO: 5585877 - DNA, 25 bp, Homo sapien
aaatataggtattaagatgcatccc

SEQ ID NO: 5585878 - DNA, 25 bp, Homo sapien
atgagtgcaataagctttcaaatac

SEQ ID NO: 5585879 - DNA, 25 bp, Homo sapien
aatgaggacaagttttaattgtgtg

SEQ ID NO: 5585880 - DNA, 25 bp, Homo sapien
tatagccaaaaatggaacgttatac

SEQ ID NO: 5585881 - DNA, 25 bp, Homo sapien
taaattggaaagaaatgcacatact

SEQ ID NO: 5585882 - DNA, 25 bp, Homo sapien
atgtgatagtcatactgattacacc

SEQ ID NO: 5585883 - DNA, 25 bp, Homo sapien
tagtagaatacttgatttgacatat

SEQ ID NO: 5585884 - DNA, 25 bp, Homo sapien
taagtacagacttttgaagccacaa

SEQ ID NO: 5585885 - DNA, 25 bp, Homo sapien
tggtccatggagaaaaacacgatgg

SEQ ID NO: 5585886 - DNA, 25 bp, Homo sapien
caaaaccccacaagtagcaccgatt

SEQ ID NO: 5585887 - DNA, 25 bp, Homo sapien
tgtgtagacaccagtttctgcaacc

SEQ ID NO: 5585888 - DNA, 25 bp, Homo sapien
tacaatccggaaaactcagcaattc

SEQ ID NO: 5585889 - DNA, 25 bp, Homo sapien
gcacagttctctcggcagagacggc

SEQ ID NO: 5585890 - DNA, 25 bp, Homo sapien
aaggagcaccagcgcttcctgattc

SEQ ID NO: 5585891 - DNA, 25 bp, Homo sapien
gaggcagccggctttacttcgttta

SEQ ID NO: 5585892 - DNA, 25 bp, Homo sapien
cgatgggtgcatcacaaataggtgt

SEQ ID NO: 5585893 - DNA, 25 bp, Homo sapien
atttacaacaggatgtggcccagaa

SEQ ID NO: 5585894 - DNA, 25 bp, Homo sapien
tccagcaggaagcttaataggtggt

SEQ ID NO: 5585895 - DNA, 25 bp, Homo sapien
catgccacgcaaagtttcagggaaa

SEQ ID NO: 5585896 - DNA, 25 bp, Homo sapien
gaggtcattgttaggcagaagctga

SEQ ID NO: 5585897 - DNA, 25 bp, Homo sapien
gtagcagtgaaaatgagctgagtct

SEQ ID NO: 5585898 - DNA, 25 bp, Homo sapien
tattgacttaaaaagagcaccaagg

SEQ ID NO: 5585899 - DNA, 25 bp, Homo sapien
acttaaggatgttttggtcctggag

SEQ ID NO: 5585900 - DNA, 25 bp, Homo sapien
aggacactcagaggtacaagttggg

SEQ ID NO: 5585901 - DNA, 25 bp, Homo sapien
gcctaaagaggctgttgaaaggatg

SEQ ID NO: 5585902 - DNA, 25 bp, Homo sapien
tgagctgagtctaaagaggtcattg

SEQ ID NO: 5585903 - DNA, 25 bp, Homo sapien
gaagctgagatcctagaggacactc

SEQ ID NO: 5585904 - DNA, 25 bp, Homo sapien
agctgggcctgagaagcccaaatta

SEQ ID NO: 5585905 - DNA, 25 bp, Homo sapien
gatcctagaggacactcagaggtac

SEQ ID NO: 5585906 - DNA, 25 bp, Homo sapien
tggcttgaagatgtagcagtgaaaa

SEQ ID NO: 5585907 - DNA, 25 bp, Homo sapien
ggctgaataagagtggcatctgatg

SEQ ID NO: 5585908 - DNA, 25 bp, Homo sapien
tccacccactttaactgactgtctg

SEQ ID NO: 5585909 - DNA, 25 bp, Homo sapien
tgccagctactttatgtaaatcgtc

SEQ ID NO: 5585910 - DNA, 25 bp, Homo sapien
tgagtacctatcatctgccagctac

SEQ ID NO: 5585911 - DNA, 25 bp, Homo sapien
ctgtaaaattacccaacgaactcac

SEQ ID NO: 5585912 - DNA, 25 bp, Homo sapien
gttagttaatagaaataacagcaaa

SEQ ID NO: 5585913 - DNA, 25 bp, Homo sapien
aaagaaggggactatttagtaatga

SEQ ID NO: 5585914 - DNA, 25 bp, Homo sapien
tttctcacctggacctacagttgtg

SEQ ID NO: 5585915 - DNA, 25 bp, Homo sapien
cttaaggaagccaacataatgtact

SEQ ID NO: 5585916 - DNA, 25 bp, Homo sapien
gactgtctgaggtgtcccagatttc

SEQ ID NO: 5585917 - DNA, 25 bp, Homo sapien
tgattatctcaaaccttaaggaagc

SEQ ID NO: 5585918 - DNA, 25 bp, Homo sapien
gatgctgatagctcacaaagagaac

SEQ ID NO: 5585919 - DNA, 25 bp, Homo sapien
ggtaggggcctgatccctcatcagg

SEQ ID NO: 5585920 - DNA, 25 bp, Homo sapien
catcaggatatggactgtgagatac

SEQ ID NO: 5585921 - DNA, 25 bp, Homo sapien
caaatccctgcgactcattaggcat

SEQ ID NO: 5585922 - DNA, 25 bp, Homo sapien
ttacggagtctcaacaaatccctgc

SEQ ID NO: 5585923 - DNA, 25 bp, Homo sapien
cccttaagcaagggactcagaccca

SEQ ID NO: 5585924 - DNA, 25 bp, Homo sapien
taaaagcccactaccattacttgcc

SEQ ID NO: 5585925 - DNA, 25 bp, Homo sapien
tatggactgtgagatactcagggag

SEQ ID NO: 5585926 - DNA, 25 bp, Homo sapien
tctgcaagctgaaaactaggacttc

SEQ ID NO: 5585927 - DNA, 25 bp, Homo sapien
cattaggcatttcagacataatctc

SEQ ID NO: 5585928 - DNA, 25 bp, Homo sapien
aaagagaacttgagattacggagtc

SEQ ID NO: 5585929 - DNA, 25 bp, Homo sapien
gtgcattaggtacatgctccctagc

SEQ ID NO: 5585930 - DNA, 25 bp, Homo sapien
aaggtacctgagttattaggtgcct

SEQ ID NO: 5585931 - DNA, 25 bp, Homo sapien
tcattagtgactgttaaggtacctg

SEQ ID NO: 5585932 - DNA, 25 bp, Homo sapien
tagtgactgttaaggtacctgagtt

SEQ ID NO: 5585933 - DNA, 25 bp, Homo sapien
ccttggagagacactcattagtgac

SEQ ID NO: 5585934 - DNA, 25 bp, Homo sapien
tagactatgcccagtgatatgtgca

SEQ ID NO: 5585935 - DNA, 25 bp, Homo sapien
ctagctgcgttgacactgactgaag

SEQ ID NO: 5585936 - DNA, 25 bp, Homo sapien
cctgagttattaggtgcctgtagac

SEQ ID NO: 5585937 - DNA, 25 bp, Homo sapien
gctccctagctgcgttgacactgac

SEQ ID NO: 5585938 - DNA, 25 bp, Homo sapien
aggtgcctgtagactatgcccagtg

SEQ ID NO: 5585939 - DNA, 25 bp, Homo sapien
tattaggtgcctgtagactatgccc

SEQ ID NO: 5585940 - DNA, 25 bp, Homo sapien
gcaggtagctgttccacggtctcat

SEQ ID NO: 5585941 - DNA, 25 bp, Homo sapien
gttgcttgtccatgccactgctgcc

SEQ ID NO: 5585942 - DNA, 25 bp, Homo sapien
tgtgcctgccccatctgaagtgaca

SEQ ID NO: 5585943 - DNA, 25 bp, Homo sapien
ttaaccaaaagcaggtagctgttcc

SEQ ID NO: 5585944 - DNA, 25 bp, Homo sapien
ttgagatccagggactgtgctaatt

SEQ ID NO: 5585945 - DNA, 25 bp, Homo sapien
tctgaagtgacaccctcctccaccc

SEQ ID NO: 5585946 - DNA, 25 bp, Homo sapien
cctgctcactgtagggtgtgctgtg

SEQ ID NO: 5585947 - DNA, 25 bp, Homo sapien
agtaagtctcgaattagcagttgct

SEQ ID NO: 5585948 - DNA, 25 bp, Homo sapien
ttccgtggcactcttgatcaatcaa

SEQ ID NO: 5585949 - DNA, 25 bp, Homo sapien
attaggaaaaacaagctgagttcat

SEQ ID NO: 5585950 - DNA, 25 bp, Homo sapien
gctgtgaagccaatagtaagtctcg

SEQ ID NO: 5585951 - DNA, 25 bp, Homo sapien
attagtgtaagaagtctattaaata

SEQ ID NO: 5585952 - DNA, 25 bp, Homo sapien
tatttaatagacttcttacactaat

SEQ ID NO: 5585953 - DNA, 25 bp, Homo sapien
aattagtgtaagaagtctattaaat

SEQ ID NO: 5585954 - DNA, 25 bp, Homo sapien
atttaatagacttcttacactaatt

SEQ ID NO: 5585955 - DNA, 25 bp, Homo sapien
gcaggaagctagatggatccatctc

SEQ ID NO: 5585956 - DNA, 25 bp, Homo sapien
ccgttcccttcgcaccagagctctc

SEQ ID NO: 5585957 - DNA, 25 bp, Homo sapien
gatcccccagaagcaaagcctgaga

SEQ ID NO: 5585958 - DNA, 25 bp, Homo sapien
agaagagctcttgtgaaagtgattt

SEQ ID NO: 5585959 - DNA, 25 bp, Homo sapien
gatccatctcaagggggatccccca

SEQ ID NO: 5585960 - DNA, 25 bp, Homo sapien
tttcagaggtgattaaggtaaatga

SEQ ID NO: 5585961 - DNA, 25 bp, Homo sapien
tgagacaaggtctttcagaggtgat

SEQ ID NO: 5585962 - DNA, 25 bp, Homo sapien
tgtgaaagtgatttactgggggaat

SEQ ID NO: 5585963 - DNA, 25 bp, Homo sapien
gaggccacccgttcccttcgcacca

SEQ ID NO: 5585964 - DNA, 25 bp, Homo sapien
ccctaaccctcagtgccccagaatg

SEQ ID NO: 5585965 - DNA, 25 bp, Homo sapien
tcaaattcccatgttaaagccctaa

SEQ ID NO: 5585966 - DNA, 25 bp, Homo sapien
gggaatgaaaggaagactccaatga

SEQ ID NO: 5585967 - DNA, 25 bp, Homo sapien
tgccagctcgccagcctgttctgtc

SEQ ID NO: 5585968 - DNA, 25 bp, Homo sapien
agcagccaacaccctgtcccaccct

SEQ ID NO: 5585969 - DNA, 25 bp, Homo sapien
tgtcagatcaccagcagttataggc

SEQ ID NO: 5585970 - DNA, 25 bp, Homo sapien
aataggtctacctgtgagcaactga

SEQ ID NO: 5585971 - DNA, 25 bp, Homo sapien
caagtttgatggttacgatggattt

SEQ ID NO: 5585972 - DNA, 25 bp, Homo sapien
caggcaggaatctctcatcagggtt

SEQ ID NO: 5585973 - DNA, 25 bp, Homo sapien
tggagtagcaccaaggttgtgtact

SEQ ID NO: 5585974 - DNA, 25 bp, Homo sapien
ggcaactctttgccaggcaggaatc

SEQ ID NO: 5585975 - DNA, 25 bp, Homo sapien
taggcttaagcccctgtcaccatgc

SEQ ID NO: 5585976 - DNA, 25 bp, Homo sapien
agaagggtatgattcaggtctcgat

SEQ ID NO: 5585977 - DNA, 25 bp, Homo sapien
gtcgcactcccaggccgccctaaga

SEQ ID NO: 5585978 - DNA, 25 bp, Homo sapien
cggtgcgaaaacagaagtcgcagta

SEQ ID NO: 5585979 - DNA, 25 bp, Homo sapien
ctgggaatggcaaacgtttctcgtt

SEQ ID NO: 5585980 - DNA, 25 bp, Homo sapien
aggacctctccggaggatttgcagc

SEQ ID NO: 5585981 - DNA, 25 bp, Homo sapien
ttgaaactcactgggaatggcaaac

SEQ ID NO: 5585982 - DNA, 25 bp, Homo sapien
cagaagtcgcagtaggtactgtggt

SEQ ID NO: 5585983 - DNA, 25 bp, Homo sapien
ccggaggatttgcagccttgaaact

SEQ ID NO: 5585984 - DNA, 25 bp, Homo sapien
gggctgccctcgcgtcagcccggga

SEQ ID NO: 5585985 - DNA, 25 bp, Homo sapien
ccgaatcaaacggtaaaacattcca

SEQ ID NO: 5585986 - DNA, 25 bp, Homo sapien
ccggagagaccatctaggacctctc

SEQ ID NO: 5585987 - DNA, 25 bp, Homo sapien
cccaggccgccctaagaccctggtg

SEQ ID NO: 5585988 - DNA, 25 bp, Homo sapien
gaagtagatacactggaccaaaatg

SEQ ID NO: 5585989 - DNA, 25 bp, Homo sapien
cattttggtccagtgtatctacttc

SEQ ID NO: 5585990 - DNA, 25 bp, Homo sapien
ccttcgccacctgctggacgcgagg

SEQ ID NO: 5585991 - DNA, 25 bp, Homo sapien
tttggtcacgtttaagatgttctac

SEQ ID NO: 5585992 - DNA, 25 bp, Homo sapien
gctatgcctgggtctcattctatcc

SEQ ID NO: 5585993 - DNA, 25 bp, Homo sapien
atgccatgggtgtcctgatttttta

SEQ ID NO: 5585994 - DNA, 25 bp, Homo sapien
ataaacctcacctcccttcgccacc

SEQ ID NO: 5585995 - DNA, 25 bp, Homo sapien
ggggctactacgatgccatgggtgt

SEQ ID NO: 5585996 - DNA, 25 bp, Homo sapien
tgcttccctacccttagggctgccc

SEQ ID NO: 5585997 - DNA, 25 bp, Homo sapien
caaagcttcaaactccagctatgcc

SEQ ID NO: 5585998 - DNA, 25 bp, Homo sapien
tactacgatgccatgggtgtcctga

SEQ ID NO: 5585999 - DNA, 25 bp, Homo sapien
cccagaaattgacaatgcttcccta

SEQ ID NO: 5586000 - DNA, 25 bp, Homo sapien
atgcccggccacaggtttcaaagtt

SEQ ID NO: 5586001 - DNA, 25 bp, Homo sapien
tgctggtctccccgcggtttctgta

SEQ ID NO: 5586002 - DNA, 25 bp, Homo sapien
cgccgagccttcttgagcgccgacg

SEQ ID NO: 5586003 - DNA, 25 bp, Homo sapien
catggaggatgctcactgcacttgg

SEQ ID NO: 5586004 - DNA, 25 bp, Homo sapien
ctggcggcaccatccgccgccgacg

SEQ ID NO: 5586005 - DNA, 25 bp, Homo sapien
cccgcggtttctgtacctggcgcac

SEQ ID NO: 5586006 - DNA, 25 bp, Homo sapien
cgccatttgccaggccatgtgctcc

SEQ ID NO: 5586007 - DNA, 25 bp, Homo sapien
ctgcccgcttcggtgcacgccattt

SEQ ID NO: 5586008 - DNA, 25 bp, Homo sapien
gcgctgcgccgagccttcttgagcg

SEQ ID NO: 5586009 - DNA, 25 bp, Homo sapien
ttctgtacctggcgcactgcggtga

SEQ ID NO: 5586010 - DNA, 25 bp, Homo sapien
tcggtgcacgccatttgccaggcca

SEQ ID NO: 5586011 - DNA, 25 bp, Homo sapien
tggctttcgttacctggtctgcccc

SEQ ID NO: 5586012 - DNA, 25 bp, Homo sapien
ggaattgttaggtcacagggtatgt

SEQ ID NO: 5586013 - DNA, 25 bp, Homo sapien
atttaatgggtgatacacaattgtc

SEQ ID NO: 5586014 - DNA, 25 bp, Homo sapien
acattgtggatacactggacaaagg

SEQ ID NO: 5586015 - DNA, 25 bp, Homo sapien
tgactgaaacctcaaaaagtgaaaa

SEQ ID NO: 5586016 - DNA, 25 bp, Homo sapien
taaaagttggaattgttaggtcaca

SEQ ID NO: 5586017 - DNA, 25 bp, Homo sapien
gtggttgaccttggatgactgaaac

SEQ ID NO: 5586018 - DNA, 25 bp, Homo sapien
tgacatcattgtacaggctatcttg

SEQ ID NO: 5586019 - DNA, 25 bp, Homo sapien
aagcaaaggtgcaattgacatcatt

SEQ ID NO: 5586020 - DNA, 25 bp, Homo sapien
gggtctactgtacaagcaaaggtgc

SEQ ID NO: 5586021 - DNA, 25 bp, Homo sapien
tattagttggatctgagatggtttc

SEQ ID NO: 5586022 - DNA, 25 bp, Homo sapien
taaaatgggtatataatgagtgtat

SEQ ID NO: 5586023 - DNA, 25 bp, Homo sapien
ttcatagcaatttggaaaaggaatg

SEQ ID NO: 5586024 - DNA, 25 bp, Homo sapien
tactcttgaaaatgagacacaaatt

SEQ ID NO: 5586025 - DNA, 25 bp, Homo sapien
ttctttaagatgtttccacaggtac

SEQ ID NO: 5586026 - DNA, 25 bp, Homo sapien
cttgaaaatgagacacaaattagcc

SEQ ID NO: 5586027 - DNA, 25 bp, Homo sapien
catctgtaatcctttaatcccattc

SEQ ID NO: 5586028 - DNA, 25 bp, Homo sapien
tttaagatgtttccacaggtacaac

SEQ ID NO: 5586029 - DNA, 25 bp, Homo sapien
aatcccattcatagcaatttggaaa

SEQ ID NO: 5586030 - DNA, 25 bp, Homo sapien
cgtgcaggacgtgcaaaatatgtac

SEQ ID NO: 5586031 - DNA, 25 bp, Homo sapien
tgaaaatgagacacaaattagccag

SEQ ID NO: 5586032 - DNA, 25 bp, Homo sapien
acaggtacaacagcagaactacatt

SEQ ID NO: 5586033 - DNA, 25 bp, Homo sapien
gcaggacgtgcaaaatatgtacttc

SEQ ID NO: 5586034 - DNA, 25 bp, Homo sapien
cctatctgcactgaaatcacctctc

SEQ ID NO: 5586035 - DNA, 25 bp, Homo sapien
gtatgtcaactctggtggggttctt

SEQ ID NO: 5586036 - DNA, 25 bp, Homo sapien
cccttagtctatcccacaccagctg

SEQ ID NO: 5586037 - DNA, 25 bp, Homo sapien
aaccacaccaaaggatgaccagagt

SEQ ID NO: 5586038 - DNA, 25 bp, Homo sapien
acacagccccagacattgagagctt

SEQ ID NO: 5586039 - DNA, 25 bp, Homo sapien
gcagttattattcaggaaagaaatc

SEQ ID NO: 5586040 - DNA, 25 bp, Homo sapien
actacaagaatcaaccaagtatccc

SEQ ID NO: 5586041 - DNA, 25 bp, Homo sapien
gtaagtcccctgaagacagggaaca

SEQ ID NO: 5586042 - DNA, 25 bp, Homo sapien
ccaagtatcccccacaaaccacacc

SEQ ID NO: 5586043 - DNA, 25 bp, Homo sapien
acgagaatcacgtgtgtatgtcaac

SEQ ID NO: 5586044 - DNA, 25 bp, Homo sapien
aaaggatgaccagagtgtatctctt

SEQ ID NO: 5586045 - DNA, 25 bp, Homo sapien
agtgccccccaaccaagtcatcttg

SEQ ID NO: 5586046 - DNA, 25 bp, Homo sapien
atggtagctaatatttgtggtatgc

SEQ ID NO: 5586047 - DNA, 25 bp, Homo sapien
aacaaaaagatcaactagtagagct

SEQ ID NO: 5586048 - DNA, 25 bp, Homo sapien
tggatgtgttgataaaagatttctc

SEQ ID NO: 5586049 - DNA, 25 bp, Homo sapien
attatggcatacagtgccccccaac

SEQ ID NO: 5586050 - DNA, 25 bp, Homo sapien
ggatgagatttaaatgacagctttc

SEQ ID NO: 5586051 - DNA, 25 bp, Homo sapien
cttatagcaataatggatgagattt

SEQ ID NO: 5586052 - DNA, 25 bp, Homo sapien
tgtggtatgctacgttcaaggcacc

SEQ ID NO: 5586053 - DNA, 25 bp, Homo sapien
ataacactagtgaaaatggtagcta

SEQ ID NO: 5586054 - DNA, 25 bp, Homo sapien
ttcaatatggctaaagggcttccta

SEQ ID NO: 5586055 - DNA, 25 bp, Homo sapien
caaggtagaggttaagtatcatgat

SEQ ID NO: 5586056 - DNA, 25 bp, Homo sapien
atggtttggttgtatggcagtctct

SEQ ID NO: 5586057 - DNA, 25 bp, Homo sapien
tgtgccaggcatcttcttaacaagc

SEQ ID NO: 5586058 - DNA, 25 bp, Homo sapien
gctgtcaatcagcctggtcaggtta

SEQ ID NO: 5586059 - DNA, 25 bp, Homo sapien
ggtaaatacagaactagaatccaat

SEQ ID NO: 5586060 - DNA, 25 bp, Homo sapien
aatctaactactgctgtgccaggca

SEQ ID NO: 5586061 - DNA, 25 bp, Homo sapien
tcatattgttcaagtgagggggtgg

SEQ ID NO: 5586062 - DNA, 25 bp, Homo sapien
tgacccagacaggccagtttccaaa

SEQ ID NO: 5586063 - DNA, 25 bp, Homo sapien
tagtcattagacattccaaggtttc

SEQ ID NO: 5586064 - DNA, 25 bp, Homo sapien
gggtggtgccaatagtcccatattt

SEQ ID NO: 5586065 - DNA, 25 bp, Homo sapien
tccaaagaagttcatgtgtccccat

SEQ ID NO: 5586066 - DNA, 25 bp, Homo sapien
caaaatacagcttggaggtaaatac

SEQ ID NO: 5586067 - DNA, 25 bp, Homo sapien
tcacatttctagacagcacggatta

SEQ ID NO: 5586068 - DNA, 25 bp, Homo sapien
tacgaatacagtaaaatatcttcac

SEQ ID NO: 5586069 - DNA, 25 bp, Homo sapien
tatcacatatgttacgaatacagta

SEQ ID NO: 5586070 - DNA, 25 bp, Homo sapien
agtggacatgggttactaaacagac

SEQ ID NO: 5586071 - DNA, 25 bp, Homo sapien
taaagatgcagtatccttctatttc

SEQ ID NO: 5586072 - DNA, 25 bp, Homo sapien
atatagtattataagccggtttcct

SEQ ID NO: 5586073 - DNA, 25 bp, Homo sapien
tcctaataaggtaagtaactcacat

SEQ ID NO: 5586074 - DNA, 25 bp, Homo sapien
aactataaaatgcaggcagagtcat

SEQ ID NO: 5586075 - DNA, 25 bp, Homo sapien
aaagtatcagtggacatgggttact

SEQ ID NO: 5586076 - DNA, 25 bp, Homo sapien
tgcaggcagagtcatatatagtatt

SEQ ID NO: 5586077 - DNA, 25 bp, Homo sapien
tgctgatatttgttagcccactggc

SEQ ID NO: 5586078 - DNA, 25 bp, Homo sapien
ctaaccatgctatctgcgcagacgc

SEQ ID NO: 5586079 - DNA, 25 bp, Homo sapien
atcgtcactgtttaggaaggtcttc

SEQ ID NO: 5586080 - DNA, 25 bp, Homo sapien
gctatctgcgcagacgcttccgagg

SEQ ID NO: 5586081 - DNA, 25 bp, Homo sapien
ccgagggcagaaatagtcccatgta

SEQ ID NO: 5586082 - DNA, 25 bp, Homo sapien
cactgaaatccccatggttcctgcc

SEQ ID NO: 5586083 - DNA, 25 bp, Homo sapien
gttcctgccacttgctaaccatgct

SEQ ID NO: 5586084 - DNA, 25 bp, Homo sapien
aggcctgtgtgtccctggaacatgt

SEQ ID NO: 5586085 - DNA, 25 bp, Homo sapien
agaggggcagcaactcgctgcccat

SEQ ID NO: 5586086 - DNA, 25 bp, Homo sapien
ctcagccaagggtgtatttgtaaac

SEQ ID NO: 5586087 - DNA, 25 bp, Homo sapien
cccgcctgaggtgatatcgtcactg

SEQ ID NO: 5586088 - DNA, 25 bp, Homo sapien
gaacatgtaatgatagggaacagga

SEQ ID NO: 5586089 - DNA, 25 bp, Homo sapien
aacttgcaaggtaatcctgagtagc

SEQ ID NO: 5586090 - DNA, 25 bp, Homo sapien
agtgcaaacggggaatttctcaagt

SEQ ID NO: 5586091 - DNA, 25 bp, Homo sapien
acacacataggaaagctacacagct

SEQ ID NO: 5586092 - DNA, 25 bp, Homo sapien
cttccagagtctagtaacccttccc

SEQ ID NO: 5586093 - DNA, 25 bp, Homo sapien
cagattagtaggtattatggcaaac

SEQ ID NO: 5586094 - DNA, 25 bp, Homo sapien
agcactattgtcactgagtcacccc

SEQ ID NO: 5586095 - DNA, 25 bp, Homo sapien
ttggcttccaagcgtagtgcaaacg

SEQ ID NO: 5586096 - DNA, 25 bp, Homo sapien
ggggaaagcaaattgccatggatac

SEQ ID NO: 5586097 - DNA, 25 bp, Homo sapien
ggagccaccaacagagtaacattct

SEQ ID NO: 5586098 - DNA, 25 bp, Homo sapien
tgatctcagttcagtgaggggaaag

SEQ ID NO: 5586099 - DNA, 25 bp, Homo sapien
ctgagatgcctgagagcttgccagg

SEQ ID NO: 5586100 - DNA, 25 bp, Homo sapien
agtaggggaattttaggtcacttgc

SEQ ID NO: 5586101 - DNA, 25 bp, Homo sapien
ggtcacttgcagcctgtaactgaat

SEQ ID NO: 5586102 - DNA, 25 bp, Homo sapien
tgatgctatactgactgatggctgc

SEQ ID NO: 5586103 - DNA, 25 bp, Homo sapien
actgatggctgctgagctagagtag

SEQ ID NO: 5586104 - DNA, 25 bp, Homo sapien
gcagtgacctgtggctgatgctata

SEQ ID NO: 5586105 - DNA, 25 bp, Homo sapien
agtacatgaaaatgggtggtcagta

SEQ ID NO: 5586106 - DNA, 25 bp, Homo sapien
gggttgaaaaggaactgtatgcaga

SEQ ID NO: 5586107 - DNA, 25 bp, Homo sapien
atgaatgcttatagggaaccatatg

SEQ ID NO: 5586108 - DNA, 25 bp, Homo sapien
aaagtgatgattacagatctggcat

SEQ ID NO: 5586109 - DNA, 25 bp, Homo sapien
aagcaggtcttgtaagggttgaaaa

SEQ ID NO: 5586110 - DNA, 25 bp, Homo sapien
aactgtatgcagagcagtgacctgt

SEQ ID NO: 5586111 - DNA, 25 bp, Homo sapien
ggggctcccaccatgctctgcgata

SEQ ID NO: 5586112 - DNA, 25 bp, Homo sapien
tgctctgcgataccgcaggtgaggg

SEQ ID NO: 5586113 - DNA, 25 bp, Homo sapien
cgcggctcccagcatgctctgcgag

SEQ ID NO: 5586114 - DNA, 25 bp, Homo sapien
tcagcagtttctcggccccctggag

SEQ ID NO: 5586115 - DNA, 25 bp, Homo sapien
gggccggactctcagcagtttctcg

SEQ ID NO: 5586116 - DNA, 25 bp, Homo sapien
ggcctcgaatgtaaggatcggcctg

SEQ ID NO: 5586117 - DNA, 25 bp, Homo sapien
actctcagcagtttctcggccccct

SEQ ID NO: 5586118 - DNA, 25 bp, Homo sapien
cgcgctcccaccgaggtcctgcgcg

SEQ ID NO: 5586119 - DNA, 25 bp, Homo sapien
cggactctcagcagtttctcggccc

SEQ ID NO: 5586120 - DNA, 25 bp, Homo sapien
ctcccaccatgctctgcgataccgc

SEQ ID NO: 5586121 - DNA, 25 bp, Homo sapien
gccggcctcgaatgtaaggatcggc

SEQ ID NO: 5586122 - DNA, 25 bp, Homo sapien
atgaagtcaccagagctaaataata

SEQ ID NO: 5586123 - DNA, 25 bp, Homo sapien
tgtttgtcaaagttgcggcactgct

SEQ ID NO: 5586124 - DNA, 25 bp, Homo sapien
aatatagtctcatgctagaggcaga

SEQ ID NO: 5586125 - DNA, 25 bp, Homo sapien
gttgcggcactgcttctgatagttc

SEQ ID NO: 5586126 - DNA, 25 bp, Homo sapien
caggctcccggatgataacaaattg

SEQ ID NO: 5586127 - DNA, 25 bp, Homo sapien
ataatgggctataaccgcttccttt

SEQ ID NO: 5586128 - DNA, 25 bp, Homo sapien
atgctagaggcagattattatataa

SEQ ID NO: 5586129 - DNA, 25 bp, Homo sapien
gtcactggctgcttatgaagtcacc

SEQ ID NO: 5586130 - DNA, 25 bp, Homo sapien
tgcatcatgggcattagattacacc

SEQ ID NO: 5586131 - DNA, 25 bp, Homo sapien
aataaacctgagtatgcgtctgtcc

SEQ ID NO: 5586132 - DNA, 25 bp, Homo sapien
cagaagctcagcaggtaaaataaac

SEQ ID NO: 5586133 - DNA, 25 bp, Homo sapien
gaaagtgttggcttttaatggactc

SEQ ID NO: 5586134 - DNA, 25 bp, Homo sapien
taccacaatatagtgtcaaaccgtc

SEQ ID NO: 5586135 - DNA, 25 bp, Homo sapien
acaagggcagttgtgttacatacac

SEQ ID NO: 5586136 - DNA, 25 bp, Homo sapien
atgtaccttgtactaaataggattt

SEQ ID NO: 5586137 - DNA, 25 bp, Homo sapien
gaagttacaagggcagttgtgttac

SEQ ID NO: 5586138 - DNA, 25 bp, Homo sapien
gtgtcaaaccgtcaatgcaaaaatc

SEQ ID NO: 5586139 - DNA, 25 bp, Homo sapien
acaatatccagtactcccacgtcaa

SEQ ID NO: 5586140 - DNA, 25 bp, Homo sapien
cataacatagaaatagaaatgaaat

SEQ ID NO: 5586141 - DNA, 25 bp, Homo sapien
tccttgccctgatgatatctgtctc

SEQ ID NO: 5586142 - DNA, 25 bp, Homo sapien
cacatatagtgtagtggggaaagtg

SEQ ID NO: 5586143 - DNA, 25 bp, Homo sapien
attccagggaagatgtttcctgttc

SEQ ID NO: 5586144 - DNA, 25 bp, Homo sapien
ttccttgtcattcaagtacccgtct

SEQ ID NO: 5586145 - DNA, 25 bp, Homo sapien
agacgggtacttgaatgacaaggaa

SEQ ID NO: 5586146 - DNA, 25 bp, Homo sapien
gacatttagtggaaagcagtcaggg

SEQ ID NO: 5586147 - DNA, 25 bp, Homo sapien
gcatgagggatgcataagcatgttc

SEQ ID NO: 5586148 - DNA, 25 bp, Homo sapien
ttgaattgcagaacaaagaatcaca

SEQ ID NO: 5586149 - DNA, 25 bp, Homo sapien
aaagctcagtaattcaggatgttgt

SEQ ID NO: 5586150 - DNA, 25 bp, Homo sapien
caaatcaaaggacaaccataggtta

SEQ ID NO: 5586151 - DNA, 25 bp, Homo sapien
atgaagttcaaaacagaataggtgg

SEQ ID NO: 5586152 - DNA, 25 bp, Homo sapien
tgaaccaaggagactgtttggctcc

SEQ ID NO: 5586153 - DNA, 25 bp, Homo sapien
gagaagctctagtcaaaaaacagta

SEQ ID NO: 5586154 - DNA, 25 bp, Homo sapien
tatgacagaatctgaagtgagaagc

SEQ ID NO: 5586155 - DNA, 25 bp, Homo sapien
attggattggggtcaccactgacat

SEQ ID NO: 5586156 - DNA, 25 bp, Homo sapien
aaagcagtcagggatataagatatt

SEQ ID NO: 5586157 - DNA, 25 bp, Homo sapien
acacgagcttattgccaagtgcagc

SEQ ID NO: 5586158 - DNA, 25 bp, Homo sapien
tccaaagttgattgtgacgggaaga

SEQ ID NO: 5586159 - DNA, 25 bp, Homo sapien
ggctctgacagacgacacgagctta

SEQ ID NO: 5586160 - DNA, 25 bp, Homo sapien
taaaagaccccctatgaagggctga

SEQ ID NO: 5586161 - DNA, 25 bp, Homo sapien
cgtcctcaggaatacgtggaaaata

SEQ ID NO: 5586162 - DNA, 25 bp, Homo sapien
cggtccagtccgtcctcaggaatac

SEQ ID NO: 5586163 - DNA, 25 bp, Homo sapien
ttatcaggtcacagagttgagagag

SEQ ID NO: 5586164 - DNA, 25 bp, Homo sapien
atatataaaacacagagtcaggaaa

SEQ ID NO: 5586165 - DNA, 25 bp, Homo sapien
ggctgaaaaaacatagacggtccag

SEQ ID NO: 5586166 - DNA, 25 bp, Homo sapien
cgaccccctacaaaagccctctgcc

SEQ ID NO: 5586167 - DNA, 25 bp, Homo sapien
aggcgggtagaaatatgaaatccgt

SEQ ID NO: 5586168 - DNA, 25 bp, Homo sapien
aaaatgctcacgacccagttgtttc

SEQ ID NO: 5586169 - DNA, 25 bp, Homo sapien
ctcctcaaggacttggaggctaaac

SEQ ID NO: 5586170 - DNA, 25 bp, Homo sapien
tcctgcataacactgacttcacttc

SEQ ID NO: 5586171 - DNA, 25 bp, Homo sapien
taaaattaagttgacaatcactgtc

SEQ ID NO: 5586172 - DNA, 25 bp, Homo sapien
ctgaaaggttatgtattaaactgtt

SEQ ID NO: 5586173 - DNA, 25 bp, Homo sapien
gaatgctaccaagtcttagtcatac

SEQ ID NO: 5586174 - DNA, 25 bp, Homo sapien
caattcctaaaactgtaaactcctc

SEQ ID NO: 5586175 - DNA, 25 bp, Homo sapien
ttgagaaatgtgcatctgctaatcc

SEQ ID NO: 5586176 - DNA, 25 bp, Homo sapien
cttggaggctaaacatgaagaatat

SEQ ID NO: 5586177 - DNA, 25 bp, Homo sapien
ttgtcaaagtgtttctggtatattc

SEQ ID NO: 5586178 - DNA, 25 bp, Homo sapien
acccccactaaaatgctcacgaccc

SEQ ID NO: 5586179 - DNA, 25 bp, Homo sapien
gagaggcgactgaaccccagtgacg

SEQ ID NO: 5586180 - DNA, 25 bp, Homo sapien
cgtcactggggttcagtcgcctctc

SEQ ID NO: 5586181 - DNA, 25 bp, Homo sapien
gtcgagtcatctgcctggcaagcct

SEQ ID NO: 5586182 - DNA, 25 bp, Homo sapien
gtagtcacagctactagggtggctg

SEQ ID NO: 5586183 - DNA, 25 bp, Homo sapien
tactatacttaattggaggtccagg

SEQ ID NO: 5586184 - DNA, 25 bp, Homo sapien
gctggtcactgagatggcactcaat

SEQ ID NO: 5586185 - DNA, 25 bp, Homo sapien
tataaaacaaatcagacacttctaa

SEQ ID NO: 5586186 - DNA, 25 bp, Homo sapien
cttaattggaggtccaggttttgcc

SEQ ID NO: 5586187 - DNA, 25 bp, Homo sapien
cctaagattcagagaaatactatac

SEQ ID NO: 5586188 - DNA, 25 bp, Homo sapien
ctaaatgtcgagtcatctgcctggc

SEQ ID NO: 5586189 - DNA, 25 bp, Homo sapien
gaggtgtcaggattgtttgaaccca

SEQ ID NO: 5586190 - DNA, 25 bp, Homo sapien
cttagtgactattgaattgtgactt

SEQ ID NO: 5586191 - DNA, 25 bp, Homo sapien
tggtagttgttaaatacttagtgac

SEQ ID NO: 5586192 - DNA, 25 bp, Homo sapien
caggttattgaagacaatggtgttc

SEQ ID NO: 5586193 - DNA, 25 bp, Homo sapien
agagaagatggacagtttcagtgca

SEQ ID NO: 5586194 - DNA, 25 bp, Homo sapien
tttcagtgcattacaggtcctgctc

SEQ ID NO: 5586195 - DNA, 25 bp, Homo sapien
gccttctgcctcagaacggcgtgac

SEQ ID NO: 5586196 - DNA, 25 bp, Homo sapien
cctgctcaggttccaatgatgtccc

SEQ ID NO: 5586197 - DNA, 25 bp, Homo sapien
gcagatggaacacaacaggttattc

SEQ ID NO: 5586198 - DNA, 25 bp, Homo sapien
ttgataatggcagaacatccaccac

SEQ ID NO: 5586199 - DNA, 25 bp, Homo sapien
cccctattgtaagtgcagatggaac

SEQ ID NO: 5586200 - DNA, 25 bp, Homo sapien
acaagttaacccaggagaagcattt

SEQ ID NO: 5586201 - DNA, 25 bp, Homo sapien
ctcggagaattggagcgttattcag

SEQ ID NO: 5586202 - DNA, 25 bp, Homo sapien
aacgatcaggaaccctaagaagagg

SEQ ID NO: 5586203 - DNA, 25 bp, Homo sapien
gttaaaaccaatcttgcagtgcatt

SEQ ID NO: 5586204 - DNA, 25 bp, Homo sapien
agagaaaaacaacgctaaatgattt

SEQ ID NO: 5586205 - DNA, 25 bp, Homo sapien
gatgcatacacagctgaaatacaca

SEQ ID NO: 5586206 - DNA, 25 bp, Homo sapien
cacagcaaaaaggagggctgtgatg

SEQ ID NO: 5586207 - DNA, 25 bp, Homo sapien
ttcatctgtggacactgtatgcttt

SEQ ID NO: 5586208 - DNA, 25 bp, Homo sapien
gcatggaaacgtacattgtggcata

SEQ ID NO: 5586209 - DNA, 25 bp, Homo sapien
gcacctgaaaataaatgtcctttcc

SEQ ID NO: 5586210 - DNA, 25 bp, Homo sapien
gagaaaactgtagccacagcacagc

SEQ ID NO: 5586211 - DNA, 25 bp, Homo sapien
aagacaaacaaaactaagacaatta

SEQ ID NO: 5586212 - DNA, 25 bp, Homo sapien
tgtggcataagtatactgtagaaaa

SEQ ID NO: 5586213 - DNA, 25 bp, Homo sapien
aaaactgagcttttgcacctgaaaa

SEQ ID NO: 5586214 - DNA, 25 bp, Homo sapien
cagtacgatacttgcagagatttcc

SEQ ID NO: 5586215 - DNA, 25 bp, Homo sapien
tctaccatgagagactaaacacagt

SEQ ID NO: 5586216 - DNA, 25 bp, Homo sapien
acctcctaacaaagagttgaccaag

SEQ ID NO: 5586217 - DNA, 25 bp, Homo sapien
tgagagactaaacacagtacgatac

SEQ ID NO: 5586218 - DNA, 25 bp, Homo sapien
ataagtgacataattttagcaaacc

SEQ ID NO: 5586219 - DNA, 25 bp, Homo sapien
tgtgcctcagctgacatgctttgaa

SEQ ID NO: 5586220 - DNA, 25 bp, Homo sapien
tagaaaatcaactggttaggattac

SEQ ID NO: 5586221 - DNA, 25 bp, Homo sapien
gaagaaaatagttcatacgtctctc

SEQ ID NO: 5586222 - DNA, 25 bp, Homo sapien
cttaaagtacagacaacctcctaac

SEQ ID NO: 5586223 - DNA, 25 bp, Homo sapien
ttcctcatgtgatactcctccccag

SEQ ID NO: 5586224 - DNA, 25 bp, Homo sapien
aagagttgaccaagttaacacctga

SEQ ID NO: 5586225 - DNA, 25 bp, Homo sapien
agacaagtactgttggctgacaaga

SEQ ID NO: 5586226 - DNA, 25 bp, Homo sapien
ttgtacacaccttcctacacacata

SEQ ID NO: 5586227 - DNA, 25 bp, Homo sapien
ctctcttaatcactactagacagcc

SEQ ID NO: 5586228 - DNA, 25 bp, Homo sapien
caagaaatatggcattcctcaccta

SEQ ID NO: 5586229 - DNA, 25 bp, Homo sapien
tctcagacaagtactgttggctgac

SEQ ID NO: 5586230 - DNA, 25 bp, Homo sapien
attcctcacctaatacagtaaacaa

SEQ ID NO: 5586231 - DNA, 25 bp, Homo sapien
tctgtctcagacaagtactgttggc

SEQ ID NO: 5586232 - DNA, 25 bp, Homo sapien
actgttggctgacaagaaatatggc

SEQ ID NO: 5586233 - DNA, 25 bp, Homo sapien
gggaagcaagtgcacagaaatttta

SEQ ID NO: 5586234 - DNA, 25 bp, Homo sapien
aataaaatcaatatggtcagggaag

SEQ ID NO: 5586235 - DNA, 25 bp, Homo sapien
caagtactgttggctgacaagaaat

SEQ ID NO: 5586236 - DNA, 25 bp, Homo sapien
catctgttgtgtgtcagcctgtgcc

SEQ ID NO: 5586237 - DNA, 25 bp, Homo sapien
aaccggctgctactctgggagttgt

SEQ ID NO: 5586238 - DNA, 25 bp, Homo sapien
tgtgtcgtagttgaggttttgagga

SEQ ID NO: 5586239 - DNA, 25 bp, Homo sapien
gaggtggatacacgtgcatgcattt

SEQ ID NO: 5586240 - DNA, 25 bp, Homo sapien
tcagggaaattgatatatgagagaa

SEQ ID NO: 5586241 - DNA, 25 bp, Homo sapien
aggagtatttgcttctggccaaggc

SEQ ID NO: 5586242 - DNA, 25 bp, Homo sapien
ttcacaagcagactgtgcctgaagc

SEQ ID NO: 5586243 - DNA, 25 bp, Homo sapien
tcttgatcccgccacccgaatgcag

SEQ ID NO: 5586244 - DNA, 25 bp, Homo sapien
ctggtgttgagattcctgagcagcc

SEQ ID NO: 5586245 - DNA, 25 bp, Homo sapien
cctgtgaagtctcctccagaggctg

SEQ ID NO: 5586246 - DNA, 25 bp, Homo sapien
tccttgtcaggtatacggacaccac

SEQ ID NO: 5586247 - DNA, 25 bp, Homo sapien
aagagcagttgtactgaactgcagc

SEQ ID NO: 5586248 - DNA, 25 bp, Homo sapien
aagcaatcttcccaagggtgcaaat

SEQ ID NO: 5586249 - DNA, 25 bp, Homo sapien
atagttacagaaggttacaaggagt

SEQ ID NO: 5586250 - DNA, 25 bp, Homo sapien
tagaggaactggaaatttgttcttc

SEQ ID NO: 5586251 - DNA, 25 bp, Homo sapien
cttcccaagggtgcaaataaattat

SEQ ID NO: 5586252 - DNA, 25 bp, Homo sapien
aacaaaattgacagaaagaaaggaa

SEQ ID NO: 5586253 - DNA, 25 bp, Homo sapien
acccccggcctccagatgacctgga

SEQ ID NO: 5586254 - DNA, 25 bp, Homo sapien
ccggcctccagatgacctggacatc

SEQ ID NO: 5586255 - DNA, 25 bp, Homo sapien
aaagcgtcatccaatagttacagaa

SEQ ID NO: 5586256 - DNA, 25 bp, Homo sapien
tggacatcctaaaaggaggagtcaa

SEQ ID NO: 5586257 - DNA, 25 bp, Homo sapien
aacaacaacaaaattgacagaaaga

SEQ ID NO: 5586258 - DNA, 25 bp, Homo sapien
ttccttggaatcacaagccatactg

SEQ ID NO: 5586259 - DNA, 25 bp, Homo sapien
aagccatactgtggtatgaagagga

SEQ ID NO: 5586260 - DNA, 25 bp, Homo sapien
gcacactgacccacacacttatctc

SEQ ID NO: 5586261 - DNA, 25 bp, Homo sapien
gtatttgagagatatttttgaagcc

SEQ ID NO: 5586262 - DNA, 25 bp, Homo sapien
ttcctgagttcaggtggtctgccca

SEQ ID NO: 5586263 - DNA, 25 bp, Homo sapien
aggaactgctggatcaaaacacatg

SEQ ID NO: 5586264 - DNA, 25 bp, Homo sapien
ctcacacactgacctcctcataagc

SEQ ID NO: 5586265 - DNA, 25 bp, Homo sapien
ctcataagcatgtatgggcacacat

SEQ ID NO: 5586266 - DNA, 25 bp, Homo sapien
ccacaggtttaccaggaaggaactg

SEQ ID NO: 5586267 - DNA, 25 bp, Homo sapien
actacgcctggccataatctctttc

SEQ ID NO: 5586268 - DNA, 25 bp, Homo sapien
gggcacacatgcacactgacccaca

SEQ ID NO: 5586269 - DNA, 25 bp, Homo sapien
tagtcacacgtttcagatcatagat

SEQ ID NO: 5586270 - DNA, 25 bp, Homo sapien
ctgaccagctgattaaaaaatactt

SEQ ID NO: 5586271 - DNA, 25 bp, Homo sapien
ctgaccaaattaggaactttagtgt

SEQ ID NO: 5586272 - DNA, 25 bp, Homo sapien
ttagtgttagttacatgtgaagttc

SEQ ID NO: 5586273 - DNA, 25 bp, Homo sapien
gttgctttaggacagttggtattca

SEQ ID NO: 5586274 - DNA, 25 bp, Homo sapien
acataacaggaattaaaaactagga

SEQ ID NO: 5586275 - DNA, 25 bp, Homo sapien
ttttgatgaccaaactgcagaggag

SEQ ID NO: 5586276 - DNA, 25 bp, Homo sapien
attacagaaagaaatttaaggtaga

SEQ ID NO: 5586277 - DNA, 25 bp, Homo sapien
ttaaggtagaaactactgaccagct

SEQ ID NO: 5586278 - DNA, 25 bp, Homo sapien
caggggacatatggccatatctgca

SEQ ID NO: 5586279 - DNA, 25 bp, Homo sapien
ggtgatatgtgagctactggcatcc

SEQ ID NO: 5586280 - DNA, 25 bp, Homo sapien
ttatatttcaggaaaggaaggccca

SEQ ID NO: 5586281 - DNA, 25 bp, Homo sapien
atcaagatgtaaaaaatagtcctgt

SEQ ID NO: 5586282 - DNA, 25 bp, Homo sapien
ctgaagtaatagacgcccagagaag

SEQ ID NO: 5586283 - DNA, 25 bp, Homo sapien
tgaacaccttacaagaaccagggac

SEQ ID NO: 5586284 - DNA, 25 bp, Homo sapien
tagcagaccgtgtatatgaacgtcc

SEQ ID NO: 5586285 - DNA, 25 bp, Homo sapien
ctcagggagtttaggtcttggagaa

SEQ ID NO: 5586286 - DNA, 25 bp, Homo sapien
gtccaacacattaaagcaagtgctc

SEQ ID NO: 5586287 - DNA, 25 bp, Homo sapien
gaaccagggactattgccccaatat

SEQ ID NO: 5586288 - DNA, 25 bp, Homo sapien
cagagattaattggccccagaattc

SEQ ID NO: 5586289 - DNA, 25 bp, Homo sapien
agagaagggatcgacttacccatca

SEQ ID NO: 5586290 - DNA, 25 bp, Homo sapien
gcctagcgttttgtgcctgaacacc

SEQ ID NO: 5586291 - DNA, 25 bp, Homo sapien
atcttggacatcccagtcacagcca

SEQ ID NO: 5586292 - DNA, 25 bp, Homo sapien
catgagtgaagccatcttggacatc

SEQ ID NO: 5586293 - DNA, 25 bp, Homo sapien
aacaaaggaacagtaaatggagtaa

SEQ ID NO: 5586294 - DNA, 25 bp, Homo sapien
gcatgatgaacccagcaatccccac

SEQ ID NO: 5586295 - DNA, 25 bp, Homo sapien
ggcaccagacacatgagtgaagcca

SEQ ID NO: 5586296 - DNA, 25 bp, Homo sapien
aatccccaccatggagcaaaggatc

SEQ ID NO: 5586297 - DNA, 25 bp, Homo sapien
tggagtaacttggctagaatatggc

SEQ ID NO: 5586298 - DNA, 25 bp, Homo sapien
ggagcaaaggatccatccagtcaac

SEQ ID NO: 5586299 - DNA, 25 bp, Homo sapien
tacaaggcatgttctgctctggcac

SEQ ID NO: 5586300 - DNA, 25 bp, Homo sapien
gttctgctctggcacgaagacaacc

SEQ ID NO: 5586301 - DNA, 25 bp, Homo sapien
gaatatggcagtaactacaaggcat

SEQ ID NO: 5586302 - DNA, 25 bp, Homo sapien
ccacagtcggcgctcgagcatcggg

SEQ ID NO: 5586303 - DNA, 25 bp, Homo sapien
cccgatgctcgagcgccgactgtgg

SEQ ID NO: 5586304 - DNA, 25 bp, Homo sapien
ggcgtcgcgcccacagtcggcgctc

SEQ ID NO: 5586305 - DNA, 25 bp, Homo sapien
gagcgccgactgtgggcgcgacgcc

SEQ ID NO: 5586306 - DNA, 25 bp, Homo sapien
tcagttaatcatgtgaaaataaatg

SEQ ID NO: 5586307 - DNA, 25 bp, Homo sapien
ttaaacaaatgtggacaaaggacca

SEQ ID NO: 5586308 - DNA, 25 bp, Homo sapien
catactggatagacaacctagattt

SEQ ID NO: 5586309 - DNA, 25 bp, Homo sapien
ctcatgacaaaggcacaatccaaaa

SEQ ID NO: 5586310 - DNA, 25 bp, Homo sapien
ggacaaaggaccaatctgaagtatt

SEQ ID NO: 5586311 - DNA, 25 bp, Homo sapien
ttaagcattcacatactggatagac

SEQ ID NO: 5586312 - DNA, 25 bp, Homo sapien
gttttgtgtacctggtgacttactc

SEQ ID NO: 5586313 - DNA, 25 bp, Homo sapien
gatacatgtgaatttagccaaggat

SEQ ID NO: 5586314 - DNA, 25 bp, Homo sapien
tgaatatggatcaacttgaatatat

SEQ ID NO: 5586315 - DNA, 25 bp, Homo sapien
ccttatagaattcagtaactcagct

SEQ ID NO: 5586316 - DNA, 25 bp, Homo sapien
gacaaaggcacaatccaaaagtata

SEQ ID NO: 5586317 - DNA, 25 bp, Homo sapien
agatggagaggtatttggaatataa

SEQ ID NO: 5586318 - DNA, 25 bp, Homo sapien
caggacgctggccatgcttaccatt

SEQ ID NO: 5586319 - DNA, 25 bp, Homo sapien
gggacgggattgaaatatttgaaca

SEQ ID NO: 5586320 - DNA, 25 bp, Homo sapien
atataaaagagaacggatagaaaat

SEQ ID NO: 5586321 - DNA, 25 bp, Homo sapien
atagacacagtgatggatcctacca

SEQ ID NO: 5586322 - DNA, 25 bp, Homo sapien
ttctctgcatgaagcctgcggacag

SEQ ID NO: 5586323 - DNA, 25 bp, Homo sapien
gatgctggagcctcatgtgagtagc

SEQ ID NO: 5586324 - DNA, 25 bp, Homo sapien
accagaaacaccagcacctgcatcc

SEQ ID NO: 5586325 - DNA, 25 bp, Homo sapien
aagagaaagcaaggacacttcattc

SEQ ID NO: 5586326 - DNA, 25 bp, Homo sapien
gagaaggtggacccagttctcacag

SEQ ID NO: 5586327 - DNA, 25 bp, Homo sapien
gatcctaccaggaactggtgggacg

SEQ ID NO: 5586328 - DNA, 25 bp, Homo sapien
aggaactgttagtatcataaacggt

SEQ ID NO: 5586329 - DNA, 25 bp, Homo sapien
gtaatatagcaaatgacctatttcc

SEQ ID NO: 5586330 - DNA, 25 bp, Homo sapien
tttctggctgctcaaattcacattg

SEQ ID NO: 5586331 - DNA, 25 bp, Homo sapien
aagaccataaaatttggggattgct

SEQ ID NO: 5586332 - DNA, 25 bp, Homo sapien
aaacaatcctgagaaattaccctta

SEQ ID NO: 5586333 - DNA, 25 bp, Homo sapien
taaaagctgcaacacaggaactgct

SEQ ID NO: 5586334 - DNA, 25 bp, Homo sapien
atttggggattgcttgtaatatagc

SEQ ID NO: 5586335 - DNA, 25 bp, Homo sapien
ttgacaaggtttcatacaagttgat

SEQ ID NO: 5586336 - DNA, 25 bp, Homo sapien
tgtggagtacattttgacaaggttt

SEQ ID NO: 5586337 - DNA, 25 bp, Homo sapien
attacccttaggacacagaagtaaa

SEQ ID NO: 5586338 - DNA, 25 bp, Homo sapien
atacaagttgattccagggaaagag

SEQ ID NO: 5586339 - DNA, 25 bp, Homo sapien
tgtacctgaaatgcagcgaggctaa

SEQ ID NO: 5586340 - DNA, 25 bp, Homo sapien
tagtggagatgatcaagctgccaca

SEQ ID NO: 5586341 - DNA, 25 bp, Homo sapien
gagaaaacgctgacgtaaaggtaga

SEQ ID NO: 5586342 - DNA, 25 bp, Homo sapien
gttccgaaacagaagtcagtgcaga

SEQ ID NO: 5586343 - DNA, 25 bp, Homo sapien
gtgcagaacctgcgtccatccgtta

SEQ ID NO: 5586344 - DNA, 25 bp, Homo sapien
cgaggctaatcgcgctttgtggctc

SEQ ID NO: 5586345 - DNA, 25 bp, Homo sapien
gtcgagaaataaagcatagtgtagt

SEQ ID NO: 5586346 - DNA, 25 bp, Homo sapien
ggacgggtcagtagcgtcttaaagc

SEQ ID NO: 5586347 - DNA, 25 bp, Homo sapien
cctggccaggtcatacttcgaagtt

SEQ ID NO: 5586348 - DNA, 25 bp, Homo sapien
ttaaatgacaaaatgagagatggag

SEQ ID NO: 5586349 - DNA, 25 bp, Homo sapien
gtcttaaagcactaggtggagtcgg

SEQ ID NO: 5586350 - DNA, 25 bp, Homo sapien
tttagatggaaatttgctcacagtc

SEQ ID NO: 5586351 - DNA, 25 bp, Homo sapien
gatgaaaaatcagtagacccagaaa

SEQ ID NO: 5586352 - DNA, 25 bp, Homo sapien
cactgtaaaaggaactctgagctac

SEQ ID NO: 5586353 - DNA, 25 bp, Homo sapien
gggagagatgattgtgtccagtctg

SEQ ID NO: 5586354 - DNA, 25 bp, Homo sapien
taccaaagtttgattcctgtgtgct

SEQ ID NO: 5586355 - DNA, 25 bp, Homo sapien
taacagtgcttgacatagaggaagg

SEQ ID NO: 5586356 - DNA, 25 bp, Homo sapien
cttagaatcagaaatttgtgggttt

SEQ ID NO: 5586357 - DNA, 25 bp, Homo sapien
attgtgcctcagaaatgatttacca

SEQ ID NO: 5586358 - DNA, 25 bp, Homo sapien
attgtgtccagtctgctcaggatcc

SEQ ID NO: 5586359 - DNA, 25 bp, Homo sapien
tcaacaataggtatcgcttgcattc

SEQ ID NO: 5586360 - DNA, 25 bp, Homo sapien
ttggtaggcaattgagaatacattc

SEQ ID NO: 5586361 - DNA, 25 bp, Homo sapien
atccaagattagatgtgattactat

SEQ ID NO: 5586362 - DNA, 25 bp, Homo sapien
aaaagatcctgtgtcagaaggggaa

SEQ ID NO: 5586363 - DNA, 25 bp, Homo sapien
tgctggggctgtaactagaactcag

SEQ ID NO: 5586364 - DNA, 25 bp, Homo sapien
tctggggttgtgttacatgacaaga

SEQ ID NO: 5586365 - DNA, 25 bp, Homo sapien
gggctgtaactagaactcaggcctc

SEQ ID NO: 5586366 - DNA, 25 bp, Homo sapien
ttctcacgttgcctccatcagcttc

SEQ ID NO: 5586367 - DNA, 25 bp, Homo sapien
cttacaaaccacttacaataccagc

SEQ ID NO: 5586368 - DNA, 25 bp, Homo sapien
cggatgtccatgtgcttctcacgtt

SEQ ID NO: 5586369 - DNA, 25 bp, Homo sapien
cgggttgcttaggtttttactgctc

SEQ ID NO: 5586370 - DNA, 25 bp, Homo sapien
gggagccgcacagctcttgttgggt

SEQ ID NO: 5586371 - DNA, 25 bp, Homo sapien
cagtccacacaactggtactgctgg

SEQ ID NO: 5586372 - DNA, 25 bp, Homo sapien
caagcccccattattaccacagttc

SEQ ID NO: 5586373 - DNA, 25 bp, Homo sapien
tcagacacttagcagcaaggcagag

SEQ ID NO: 5586374 - DNA, 25 bp, Homo sapien
gaaactcgatagcatgtctcaagtc

SEQ ID NO: 5586375 - DNA, 25 bp, Homo sapien
aaattgagcaagagtatgtagtagc

SEQ ID NO: 5586376 - DNA, 25 bp, Homo sapien
aactcctattggcaggatgtcatcc

SEQ ID NO: 5586377 - DNA, 25 bp, Homo sapien
gccagggcccctcacttacaacaat

SEQ ID NO: 5586378 - DNA, 25 bp, Homo sapien
ggaaagtgacagaaaactcctattg

SEQ ID NO: 5586379 - DNA, 25 bp, Homo sapien
accacattttacacaaggaagagat

SEQ ID NO: 5586380 - DNA, 25 bp, Homo sapien
tactggcgaaattgagcaagagtat

SEQ ID NO: 5586381 - DNA, 25 bp, Homo sapien
ctgtaaggtaatcatcgacaaccac

SEQ ID NO: 5586382 - DNA, 25 bp, Homo sapien
ttgatatgaacacattgacgcaatt

SEQ ID NO: 5586383 - DNA, 25 bp, Homo sapien
caggaagccaaaagtcaacgatatt

SEQ ID NO: 5586384 - DNA, 25 bp, Homo sapien
tggcaatcacaacataggtacctac

SEQ ID NO: 5586385 - DNA, 25 bp, Homo sapien
gctgaatacagatgattgagggtta

SEQ ID NO: 5586386 - DNA, 25 bp, Homo sapien
atcacaccaaacagagatcagggaa

SEQ ID NO: 5586387 - DNA, 25 bp, Homo sapien
acaaatgacaaggcaaatgagacat

SEQ ID NO: 5586388 - DNA, 25 bp, Homo sapien
accagaatgggatgaagctatcatc

SEQ ID NO: 5586389 - DNA, 25 bp, Homo sapien
agtgtacatgtagccctgcggtttt

SEQ ID NO: 5586390 - DNA, 25 bp, Homo sapien
aggacagcttctattacagggcatc

SEQ ID NO: 5586391 - DNA, 25 bp, Homo sapien
tgtttaggcataagagcagatttgc

SEQ ID NO: 5586392 - DNA, 25 bp, Homo sapien
cctgctaaccagaaagagatgtata

SEQ ID NO: 5586393 - DNA, 25 bp, Homo sapien
agttcctgctagagtagtaaacccc

SEQ ID NO: 5586394 - DNA, 25 bp, Homo sapien
tgaataatacagaagtagcccttgc

SEQ ID NO: 5586395 - DNA, 25 bp, Homo sapien
ctgggtaatggtgacagcccaatac

SEQ ID NO: 5586396 - DNA, 25 bp, Homo sapien
gcagactgtctgttatggtggtttg

SEQ ID NO: 5586397 - DNA, 25 bp, Homo sapien
tggagttgccgtgattcagcatccc

SEQ ID NO: 5586398 - DNA, 25 bp, Homo sapien
tcagacaaggtcagttcagctcaat

SEQ ID NO: 5586399 - DNA, 25 bp, Homo sapien
tactaggttctaagtgacgtggcat

SEQ ID NO: 5586400 - DNA, 25 bp, Homo sapien
gattgtatccaatgtgagggtaaaa

SEQ ID NO: 5586401 - DNA, 25 bp, Homo sapien
aaatcccagatgtcttggagttgcc

SEQ ID NO: 5586402 - DNA, 25 bp, Homo sapien
atatgtaaagccagtaggaatgtac

SEQ ID NO: 5586403 - DNA, 25 bp, Homo sapien
gacgtggcatgaagatgaataatac

SEQ ID NO: 5586404 - DNA, 25 bp, Homo sapien
gtccggtgacataatggcctgatca

SEQ ID NO: 5586405 - DNA, 25 bp, Homo sapien
taagaggttttgagtcagttccagt

SEQ ID NO: 5586406 - DNA, 25 bp, Homo sapien
aatataaagtaggtcccataatcac

SEQ ID NO: 5586407 - DNA, 25 bp, Homo sapien
agtataaaaataaggccaaagtgct

SEQ ID NO: 5586408 - DNA, 25 bp, Homo sapien
tctaaagtaccttgtcactgacccc

SEQ ID NO: 5586409 - DNA, 25 bp, Homo sapien
gccaaagtgctcctgtaaaattatc

SEQ ID NO: 5586410 - DNA, 25 bp, Homo sapien
tctactaggtgaaagaaactgagtc

SEQ ID NO: 5586411 - DNA, 25 bp, Homo sapien
tcattaaaagtatagagaagagatc

SEQ ID NO: 5586412 - DNA, 25 bp, Homo sapien
cttatgggaaaaactggacaaaata

SEQ ID NO: 5586413 - DNA, 25 bp, Homo sapien
ttggaagttgctgaaactgagataa

SEQ ID NO: 5586414 - DNA, 25 bp, Homo sapien
taggaattacttgtggcagcagaat

SEQ ID NO: 5586415 - DNA, 25 bp, Homo sapien
ggacaaaatacagaatagccaaaac

SEQ ID NO: 5586416 - DNA, 25 bp, Homo sapien
tagaacagctcaagagatgtcagtt

SEQ ID NO: 5586417 - DNA, 25 bp, Homo sapien
tacctagaaggaacatctgacacac

SEQ ID NO: 5586418 - DNA, 25 bp, Homo sapien
ttgacttggacagttacatagttgt

SEQ ID NO: 5586419 - DNA, 25 bp, Homo sapien
ccaatttggagatttaataaagaac

SEQ ID NO: 5586420 - DNA, 25 bp, Homo sapien
acaatccagatttgatggaagacac

SEQ ID NO: 5586421 - DNA, 25 bp, Homo sapien
gatgtcagttctaaatctacagctc

SEQ ID NO: 5586422 - DNA, 25 bp, Homo sapien
aaaaactgcgtatctccaaagtaaa

SEQ ID NO: 5586423 - DNA, 25 bp, Homo sapien
tctacagctctaaggacataatttc

SEQ ID NO: 5586424 - DNA, 25 bp, Homo sapien
agctagacatataataaaaactgcg

SEQ ID NO: 5586425 - DNA, 25 bp, Homo sapien
ttcagaaggtataaagaattctacc

SEQ ID NO: 5586426 - DNA, 25 bp, Homo sapien
ttgatggaagacacaaatctgcaga

SEQ ID NO: 5586427 - DNA, 25 bp, Homo sapien
tcggccttcacgccgctccttgccc

SEQ ID NO: 5586428 - DNA, 25 bp, Homo sapien
gggtagcgccagtgccaaataaccc

SEQ ID NO: 5586429 - DNA, 25 bp, Homo sapien
tctcggccttcacgccgctccttgc

SEQ ID NO: 5586430 - DNA, 25 bp, Homo sapien
cgccagtgccaaataacccgttcgc

SEQ ID NO: 5586431 - DNA, 25 bp, Homo sapien
cttgtttgagcagcgtttctttctt

SEQ ID NO: 5586432 - DNA, 25 bp, Homo sapien
cagtgccaaataacccgttcgcctt

SEQ ID NO: 5586433 - DNA, 25 bp, Homo sapien
cttttcccggtgtctcggccttcac

SEQ ID NO: 5586434 - DNA, 25 bp, Homo sapien
acgactagcccgttacacgcgggcc

SEQ ID NO: 5586435 - DNA, 25 bp, Homo sapien
gcgggacgactagcccgttacacgc

SEQ ID NO: 5586436 - DNA, 25 bp, Homo sapien
gactagcccgttacacgcgggccgc

SEQ ID NO: 5586437 - DNA, 25 bp, Homo sapien
tgcttgtttgagcagcgtttctttc

SEQ ID NO: 5586438 - DNA, 25 bp, Homo sapien
taccccattggtgttaactgcattt

SEQ ID NO: 5586439 - DNA, 25 bp, Homo sapien
agagggcaagtacaaacaatctgtt

SEQ ID NO: 5586440 - DNA, 25 bp, Homo sapien
gctataaagcacctactgggggaaa

SEQ ID NO: 5586441 - DNA, 25 bp, Homo sapien
taggggctgaaaacataagtcttta

SEQ ID NO: 5586442 - DNA, 25 bp, Homo sapien
aactcctgagaagtactgttcagac

SEQ ID NO: 5586443 - DNA, 25 bp, Homo sapien
caccaccagttctcatgaccacatc

SEQ ID NO: 5586444 - DNA, 25 bp, Homo sapien
gcaaaacactgccactaaaagctat

SEQ ID NO: 5586445 - DNA, 25 bp, Homo sapien
acatcagaaggcatttaccccattg

SEQ ID NO: 5586446 - DNA, 25 bp, Homo sapien
ctctgtaggtctcatgcccaccacc

SEQ ID NO: 5586447 - DNA, 25 bp, Homo sapien
gggaaaagcacaatgttagataacc

SEQ ID NO: 5586448 - DNA, 25 bp, Homo sapien
aaaatagccatagtttgcgcaaccc

SEQ ID NO: 5586449 - DNA, 25 bp, Homo sapien
gaggttgaactatcaatcaaagaat

SEQ ID NO: 5586450 - DNA, 25 bp, Homo sapien
attctttgattgatagttcaacctc

SEQ ID NO: 5586451 - DNA, 25 bp, Homo sapien
aaggaggttgaactatcaatcaaag

SEQ ID NO: 5586452 - DNA, 25 bp, Homo sapien
ctttgattgatagttcaacctcctt

SEQ ID NO: 5586453 - DNA, 25 bp, Homo sapien
tggatgcatagaacaagaaagaaca

SEQ ID NO: 5586454 - DNA, 25 bp, Homo sapien
ggcagccaacagacaagctctctct

SEQ ID NO: 5586455 - DNA, 25 bp, Homo sapien
tccgagctgtcactgggctcctgac

SEQ ID NO: 5586456 - DNA, 25 bp, Homo sapien
ctccaggctctgaccacaaggccag

SEQ ID NO: 5586457 - DNA, 25 bp, Homo sapien
cctgcccctgaactccaccctgcca

SEQ ID NO: 5586458 - DNA, 25 bp, Homo sapien
aaggacactgcagtcccattgccct

SEQ ID NO: 5586459 - DNA, 25 bp, Homo sapien
ggtttgaaggaggctccacagacaa

SEQ ID NO: 5586460 - DNA, 25 bp, Homo sapien
ctcagagaacattgatagaagatcc

SEQ ID NO: 5586461 - DNA, 25 bp, Homo sapien
ggtcacctacctgctggctccaggc

SEQ ID NO: 5586462 - DNA, 25 bp, Homo sapien
agatcctagaagaaccacaacccgt

SEQ ID NO: 5586463 - DNA, 25 bp, Homo sapien
ccagcttcatggctcctggggacct

SEQ ID NO: 5586464 - DNA, 25 bp, Homo sapien
cagggctaggggtggtcggagaaac

SEQ ID NO: 5586465 - DNA, 25 bp, Homo sapien
gtttctccgaccacccctagccctg

SEQ ID NO: 5586466 - DNA, 25 bp, Homo sapien
cgagaagctggccctatacctggcc

SEQ ID NO: 5586467 - DNA, 25 bp, Homo sapien
ggtgatcgtctccaggtcggatccc

SEQ ID NO: 5586468 - DNA, 25 bp, Homo sapien
agctggccctatacctggccgaggt

SEQ ID NO: 5586469 - DNA, 25 bp, Homo sapien
atcggaacttccgactgagcgagca

SEQ ID NO: 5586470 - DNA, 25 bp, Homo sapien
aagtaccccattccacatcatttca

SEQ ID NO: 5586471 - DNA, 25 bp, Homo sapien
gctcctcggcctggctcctggagga

SEQ ID NO: 5586472 - DNA, 25 bp, Homo sapien
ttccacatcatttcacacggcaact

SEQ ID NO: 5586473 - DNA, 25 bp, Homo sapien
gatcggaacttccgactgagcgagc

SEQ ID NO: 5586474 - DNA, 25 bp, Homo sapien
gggcccgatcggaacttccgactga

SEQ ID NO: 5586475 - DNA, 25 bp, Homo sapien
atcgtctccaggtcggatcccagag

SEQ ID NO: 5586476 - DNA, 25 bp, Homo sapien
gtctccaggtcggatcccagagacg

SEQ ID NO: 5586477 - DNA, 25 bp, Homo sapien
gtgctttccagatgcaaggaaagta

SEQ ID NO: 5586478 - DNA, 25 bp, Homo sapien
cagacacttagacgtctccagttcc

SEQ ID NO: 5586479 - DNA, 25 bp, Homo sapien
tggggttgatggatttatgtaagat

SEQ ID NO: 5586480 - DNA, 25 bp, Homo sapien
acccatgtccaaggccacgtagagg

SEQ ID NO: 5586481 - DNA, 25 bp, Homo sapien
gcttctgtgtggaagcgtgaacctc

SEQ ID NO: 5586482 - DNA, 25 bp, Homo sapien
aaggagcatcttgggtaattaagca

SEQ ID NO: 5586483 - DNA, 25 bp, Homo sapien
gcctgcggacagatggcttcctttt

SEQ ID NO: 5586484 - DNA, 25 bp, Homo sapien
tggaagcgtgaacctcagacactta

SEQ ID NO: 5586485 - DNA, 25 bp, Homo sapien
taagcacctacccatgtccaaggcc

SEQ ID NO: 5586486 - DNA, 25 bp, Homo sapien
ccacgtagaggctttatagaattaa

SEQ ID NO: 5586487 - DNA, 25 bp, Homo sapien
tgctgtttggggacatactgtttgt

SEQ ID NO: 5586488 - DNA, 25 bp, Homo sapien
acgcacctggacttgcgtgtccctc

SEQ ID NO: 5586489 - DNA, 25 bp, Homo sapien
tgggccccagccattgcctacccct

SEQ ID NO: 5586490 - DNA, 25 bp, Homo sapien
gcctacccctccccagagtgtgctc

SEQ ID NO: 5586491 - DNA, 25 bp, Homo sapien
tgggtctgcacgttggaccctgggt

SEQ ID NO: 5586492 - DNA, 25 bp, Homo sapien
cccagagtgtgctcgttgctgtgtt

SEQ ID NO: 5586493 - DNA, 25 bp, Homo sapien
ttagagcccaccttctgagcagcag

SEQ ID NO: 5586494 - DNA, 25 bp, Homo sapien
cctgggttccccattagagcccacc

SEQ ID NO: 5586495 - DNA, 25 bp, Homo sapien
ctgaatctgccctaactccacacgc

SEQ ID NO: 5586496 - DNA, 25 bp, Homo sapien
cttttcaagccccgtgggtctgcac

SEQ ID NO: 5586497 - DNA, 25 bp, Homo sapien
agctggccagccgcatcgccagtct

SEQ ID NO: 5586498 - DNA, 25 bp, Homo sapien
cctcattattctcaggggcgcagat

SEQ ID NO: 5586499 - DNA, 25 bp, Homo sapien
tgtttcgatagctaggcctacacta

SEQ ID NO: 5586500 - DNA, 25 bp, Homo sapien
gaatataaacgtggagctcagactg

SEQ ID NO: 5586501 - DNA, 25 bp, Homo sapien
cccaaggggctcacccttagctctc

SEQ ID NO: 5586502 - DNA, 25 bp, Homo sapien
gcactcactgggtaagaaattaggg

SEQ ID NO: 5586503 - DNA, 25 bp, Homo sapien
cgggcacccactcagcactcactgg

SEQ ID NO: 5586504 - DNA, 25 bp, Homo sapien
aggaaaactgggctttaaggattgc

SEQ ID NO: 5586505 - DNA, 25 bp, Homo sapien
tttaaggattgctcactggaggcct

SEQ ID NO: 5586506 - DNA, 25 bp, Homo sapien
ccagctagagcaatatatgacacct

SEQ ID NO: 5586507 - DNA, 25 bp, Homo sapien
tctgtcccaagccagctagagcaat

SEQ ID NO: 5586508 - DNA, 25 bp, Homo sapien
gccatacagcaatgcttgcgggcac

SEQ ID NO: 5586509 - DNA, 25 bp, Homo sapien
atcctaaggccaagaaaagcatatg

SEQ ID NO: 5586510 - DNA, 25 bp, Homo sapien
tatgccactgtagtgcttgtgctcc

SEQ ID NO: 5586511 - DNA, 25 bp, Homo sapien
tcttgcagctgtatgaatatgccac

SEQ ID NO: 5586512 - DNA, 25 bp, Homo sapien
ttgtaactcgcgctctgattggcct

SEQ ID NO: 5586513 - DNA, 25 bp, Homo sapien
taattgccaggccatattcagcatc

SEQ ID NO: 5586514 - DNA, 25 bp, Homo sapien
ttgtcagcagcgtcataaaaatctt

SEQ ID NO: 5586515 - DNA, 25 bp, Homo sapien
ccctaggaatagaatcattggtctc

SEQ ID NO: 5586516 - DNA, 25 bp, Homo sapien
atagttacagcagttgcagggattc

SEQ ID NO: 5586517 - DNA, 25 bp, Homo sapien
acgcagtagttgattgatgagtttc

SEQ ID NO: 5586518 - DNA, 25 bp, Homo sapien
agcagttgcagggattcgtttgttt

SEQ ID NO: 5586519 - DNA, 25 bp, Homo sapien
ccccactccaccgcgcttgtaactc

SEQ ID NO: 5586520 - DNA, 25 bp, Homo sapien
tgaaggtggagaaatgttcttgtgt

SEQ ID NO: 5586521 - DNA, 25 bp, Homo sapien
aaccctcaaccttggaagagctgtc

SEQ ID NO: 5586522 - DNA, 25 bp, Homo sapien
cactggagaacttccctgtgctgag

SEQ ID NO: 5586523 - DNA, 25 bp, Homo sapien
aatataaaaacacggccatttgctc

SEQ ID NO: 5586524 - DNA, 25 bp, Homo sapien
ggggggaccatgttttgaatgcatt

SEQ ID NO: 5586525 - DNA, 25 bp, Homo sapien
gccccacgtgccatgggacctaaac

SEQ ID NO: 5586526 - DNA, 25 bp, Homo sapien
agcccttcccggatatgagaggggc

SEQ ID NO: 5586527 - DNA, 25 bp, Homo sapien
tgaggctgtggagttccaaccctca

SEQ ID NO: 5586528 - DNA, 25 bp, Homo sapien
ttcctagactagctatggctgggcc

SEQ ID NO: 5586529 - DNA, 25 bp, Homo sapien
gctgagccgccactcctgccaatgc

SEQ ID NO: 5586530 - DNA, 25 bp, Homo sapien
cactgcacctctactgggcacggag

SEQ ID NO: 5586531 - DNA, 25 bp, Homo sapien
gccatcagctctacgggagcactgc

SEQ ID NO: 5586532 - DNA, 25 bp, Homo sapien
acccatgattgacaggtgcaggtgt

SEQ ID NO: 5586533 - DNA, 25 bp, Homo sapien
gtggaaagagagactaaaatcttta

SEQ ID NO: 5586534 - DNA, 25 bp, Homo sapien
aatccagaggccaactttgtaaaac

SEQ ID NO: 5586535 - DNA, 25 bp, Homo sapien
taaggactgtcctcagactactgga

SEQ ID NO: 5586536 - DNA, 25 bp, Homo sapien
ggagtcatttagtcacaagcttgcc

SEQ ID NO: 5586537 - DNA, 25 bp, Homo sapien
gggtggaagccactagtagtcttaa

SEQ ID NO: 5586538 - DNA, 25 bp, Homo sapien
gtcaatcccacagcacccagcaacc

SEQ ID NO: 5586539 - DNA, 25 bp, Homo sapien
aagtccagttgagaaagatagtgat

SEQ ID NO: 5586540 - DNA, 25 bp, Homo sapien
ggggtgcctttgtggtgaattagct

SEQ ID NO: 5586541 - DNA, 25 bp, Homo sapien
gcaggtgtatgaaagtccagctcct

SEQ ID NO: 5586542 - DNA, 25 bp, Homo sapien
aacacaagtgcctggactctacacc

SEQ ID NO: 5586543 - DNA, 25 bp, Homo sapien
aactccctatttgaaatctggccac

SEQ ID NO: 5586544 - DNA, 25 bp, Homo sapien
aaataactgcagcatattagactac

SEQ ID NO: 5586545 - DNA, 25 bp, Homo sapien
ggattgtgaaagtaccacttaactc

SEQ ID NO: 5586546 - DNA, 25 bp, Homo sapien
atgctgagttagtacaaagaattat

SEQ ID NO: 5586547 - DNA, 25 bp, Homo sapien
ccatacagggtattaacacattaat

SEQ ID NO: 5586548 - DNA, 25 bp, Homo sapien
taaattggttgttacatgctgagtt

SEQ ID NO: 5586549 - DNA, 25 bp, Homo sapien
tattttggaaaccactaaatgtcaa

SEQ ID NO: 5586550 - DNA, 25 bp, Homo sapien
ttctaaggcataatgtatgttcaac

SEQ ID NO: 5586551 - DNA, 25 bp, Homo sapien
tatagaatagagatctgtcaaataa

SEQ ID NO: 5586552 - DNA, 25 bp, Homo sapien
gtcaagcattatccatacagggtat

SEQ ID NO: 5586553 - DNA, 25 bp, Homo sapien
gaaatctggccacaaactcattgcc

SEQ ID NO: 5586554 - DNA, 25 bp, Homo sapien
ggtgccggcccagttccgccccgcg

SEQ ID NO: 5586555 - DNA, 25 bp, Homo sapien
cgcggggcggaactgggccggcacc

SEQ ID NO: 5586556 - DNA, 25 bp, Homo sapien
tttacataacacactgacctacatt

SEQ ID NO: 5586557 - DNA, 25 bp, Homo sapien
taaaaaaattgactgaaggccctca

SEQ ID NO: 5586558 - DNA, 25 bp, Homo sapien
tatccgtacacactagaaagaaaga

SEQ ID NO: 5586559 - DNA, 25 bp, Homo sapien
tatcaagaactgatgaaaagtttac

SEQ ID NO: 5586560 - DNA, 25 bp, Homo sapien
gactgaaggccctcagagaatatgg

SEQ ID NO: 5586561 - DNA, 25 bp, Homo sapien
tttaatcaaggaggaaaagaatgaa

SEQ ID NO: 5586562 - DNA, 25 bp, Homo sapien
tacaaagtatactggaggcaaagaa

SEQ ID NO: 5586563 - DNA, 25 bp, Homo sapien
atccaagttggttctgcatatgctt

SEQ ID NO: 5586564 - DNA, 25 bp, Homo sapien
gagaaagcatcacatgttcaggtag

SEQ ID NO: 5586565 - DNA, 25 bp, Homo sapien
gaataaaagagaaagcatcacatgt

SEQ ID NO: 5586566 - DNA, 25 bp, Homo sapien
tgcattcacatctaaagagaggaaa

SEQ ID NO: 5586567 - DNA, 25 bp, Homo sapien
gaagtgagtggaactagatatcgaa

SEQ ID NO: 5586568 - DNA, 25 bp, Homo sapien
ttgttttgcagctacagcgcagggt

SEQ ID NO: 5586569 - DNA, 25 bp, Homo sapien
gaggacgaatggctaattcagacca

SEQ ID NO: 5586570 - DNA, 25 bp, Homo sapien
ttaaagttgcaggaatatccgccga

SEQ ID NO: 5586571 - DNA, 25 bp, Homo sapien
actctgcttcggtgagaagtgagtg

SEQ ID NO: 5586572 - DNA, 25 bp, Homo sapien
atgcaaacaccccagctagggagga

SEQ ID NO: 5586573 - DNA, 25 bp, Homo sapien
gggagccacaacaatgccatgatgt

SEQ ID NO: 5586574 - DNA, 25 bp, Homo sapien
ccatgatgttttggagacaggaagc

SEQ ID NO: 5586575 - DNA, 25 bp, Homo sapien
gactgtatttgaaagagcagtgctc

SEQ ID NO: 5586576 - DNA, 25 bp, Homo sapien
aaggaattcttaggagcttgggcca

SEQ ID NO: 5586577 - DNA, 25 bp, Homo sapien
ccatacttgaagactagagaggctg

SEQ ID NO: 5586578 - DNA, 25 bp, Homo sapien
caaaacacccgaaatgcatctagcc

SEQ ID NO: 5586579 - DNA, 25 bp, Homo sapien
ccgaaatgcatctagccacacagga

SEQ ID NO: 5586580 - DNA, 25 bp, Homo sapien
ttttctggaatgatacttgctctga

SEQ ID NO: 5586581 - DNA, 25 bp, Homo sapien
gaactactttgcaggatcagatata

SEQ ID NO: 5586582 - DNA, 25 bp, Homo sapien
ttcttccaaaatggacatgtccaaa

SEQ ID NO: 5586583 - DNA, 25 bp, Homo sapien
gaaaatgcttttatgtcagaagata

SEQ ID NO: 5586584 - DNA, 25 bp, Homo sapien
cagaagatacttaagctgaagattc

SEQ ID NO: 5586585 - DNA, 25 bp, Homo sapien
cagatataatactgtggagagtaat

SEQ ID NO: 5586586 - DNA, 25 bp, Homo sapien
actgtggagagtaatatcagcactt

SEQ ID NO: 5586587 - DNA, 25 bp, Homo sapien
tgcgtgagtcaaaatgtttaagagt

SEQ ID NO: 5586588 - DNA, 25 bp, Homo sapien
aagagtattctctggtatctgaact

SEQ ID NO: 5586589 - DNA, 25 bp, Homo sapien
cgcccgctttcccgcagtccggagc

SEQ ID NO: 5586590 - DNA, 25 bp, Homo sapien
cgccccatccccctcccggagtcga

SEQ ID NO: 5586591 - DNA, 25 bp, Homo sapien
gagccgacagctcgtcttctcttct

SEQ ID NO: 5586592 - DNA, 25 bp, Homo sapien
cggagccgacagctcgtcttctctt

SEQ ID NO: 5586593 - DNA, 25 bp, Homo sapien
atttcctctcgacatgcatccctcc

SEQ ID NO: 5586594 - DNA, 25 bp, Homo sapien
cctctcgacatgcatccctccggat

SEQ ID NO: 5586595 - DNA, 25 bp, Homo sapien
ctccggatagactgaacatccctcc

SEQ ID NO: 5586596 - DNA, 25 bp, Homo sapien
ctgaacatccctccgttcacccccc

SEQ ID NO: 5586597 - DNA, 25 bp, Homo sapien
cctcccgatcgccggctccggcgcg

SEQ ID NO: 5586598 - DNA, 25 bp, Homo sapien
gacatgcatccctccggatagactg

SEQ ID NO: 5586599 - DNA, 25 bp, Homo sapien
catccctccggatagactgaacatc

SEQ ID NO: 5586600 - DNA, 25 bp, Homo sapien
agttgggggaatttgccaccttaca

SEQ ID NO: 5586601 - DNA, 25 bp, Homo sapien
aaagagtctttaaatgggggctgat

SEQ ID NO: 5586602 - DNA, 25 bp, Homo sapien
aggggcatgatacaaaccagtctaa

SEQ ID NO: 5586603 - DNA, 25 bp, Homo sapien
gcttggtgccgcaaagagtctttaa

SEQ ID NO: 5586604 - DNA, 25 bp, Homo sapien
aaatgtgtgtgagattgtcagaatc

SEQ ID NO: 5586605 - DNA, 25 bp, Homo sapien
gctatttccttggcgagttggggga

SEQ ID NO: 5586606 - DNA, 25 bp, Homo sapien
ccaaatttggagtaaagatgggaga

SEQ ID NO: 5586607 - DNA, 25 bp, Homo sapien
aagactgtttataaaggagagagct

SEQ ID NO: 5586608 - DNA, 25 bp, Homo sapien
atctctggtacatcaaggggcatga

SEQ ID NO: 5586609 - DNA, 25 bp, Homo sapien
agtgggggttgtttgtcaaactgat

SEQ ID NO: 5586610 - DNA, 25 bp, Homo sapien
ggagagagctggcgacttattttta

SEQ ID NO: 5586611 - DNA, 25 bp, Homo sapien
atattcagtgaaaccaagcctccat

SEQ ID NO: 5586612 - DNA, 25 bp, Homo sapien
ctattgagaatgatgaggattttgc

SEQ ID NO: 5586613 - DNA, 25 bp, Homo sapien
ttgtccctgtgtttaggatgggaag

SEQ ID NO: 5586614 - DNA, 25 bp, Homo sapien
gaggattttgctggaacaaagatga

SEQ ID NO: 5586615 - DNA, 25 bp, Homo sapien
aataatgcaaggtttctaacagtcc

SEQ ID NO: 5586616 - DNA, 25 bp, Homo sapien
ctttgacccagtttgttgacagatc

SEQ ID NO: 5586617 - DNA, 25 bp, Homo sapien
ggctgatgcaattggcaactcaccc

SEQ ID NO: 5586618 - DNA, 25 bp, Homo sapien
aaataattagtgagcaggaattggt

SEQ ID NO: 5586619 - DNA, 25 bp, Homo sapien
ctcctcaggctaagctgccagggtc

SEQ ID NO: 5586620 - DNA, 25 bp, Homo sapien
gatgcgtgatgtgatactagcaccc

SEQ ID NO: 5586621 - DNA, 25 bp, Homo sapien
taaagtggatttgaaatttagcctc

SEQ ID NO: 5586622 - DNA, 25 bp, Homo sapien
ctatgtgtcagtctgtagtgcctac

SEQ ID NO: 5586623 - DNA, 25 bp, Homo sapien
gcagagaatttggctggacaatccc

SEQ ID NO: 5586624 - DNA, 25 bp, Homo sapien
ggtgtctgcagagaatttggctgga

SEQ ID NO: 5586625 - DNA, 25 bp, Homo sapien
aacatgacatttggaaaagagagtc

SEQ ID NO: 5586626 - DNA, 25 bp, Homo sapien
atgatgaacaagataaacatgacat

SEQ ID NO: 5586627 - DNA, 25 bp, Homo sapien
tatacagacactaatagcacctact

SEQ ID NO: 5586628 - DNA, 25 bp, Homo sapien
tagcttcaacctcaagagtcccatt

SEQ ID NO: 5586629 - DNA, 25 bp, Homo sapien
gagaggccagaattgggcttccaaa

SEQ ID NO: 5586630 - DNA, 25 bp, Homo sapien
ctctcagcccaccccaaagagaggc

SEQ ID NO: 5586631 - DNA, 25 bp, Homo sapien
tcacctccctgaagaggacgggtga

SEQ ID NO: 5586632 - DNA, 25 bp, Homo sapien
tggaaaagagagtctggttcccact

SEQ ID NO: 5586633 - DNA, 25 bp, Homo sapien
aggcaagagacaatcaatggtttcc

SEQ ID NO: 5586634 - DNA, 25 bp, Homo sapien
ggcatacccccaacctccgaggcaa

SEQ ID NO: 5586635 - DNA, 25 bp, Homo sapien
tggttttcaagaggccaagtaggac

SEQ ID NO: 5586636 - DNA, 25 bp, Homo sapien
gtgttgtgccaggccccagatcttc

SEQ ID NO: 5586637 - DNA, 25 bp, Homo sapien
aggaatggcacgcaatgattgcact

SEQ ID NO: 5586638 - DNA, 25 bp, Homo sapien
ttggcacaatgatggaatggttttc

SEQ ID NO: 5586639 - DNA, 25 bp, Homo sapien
gggtggatcccaaagtgttgtgcca

SEQ ID NO: 5586640 - DNA, 25 bp, Homo sapien
atgatcactgcaaagcctggagtag

SEQ ID NO: 5586641 - DNA, 25 bp, Homo sapien
caatacattgagtgcaggaatggca

SEQ ID NO: 5586642 - DNA, 25 bp, Homo sapien
taggaccagctgtgggtttatccca

SEQ ID NO: 5586643 - DNA, 25 bp, Homo sapien
tagaccctagacttgggccctcaac

SEQ ID NO: 5586644 - DNA, 25 bp, Homo sapien
aagatcagaccatgaaaagggattc

SEQ ID NO: 5586645 - DNA, 25 bp, Homo sapien
ctaatcacctggaactggcatttgt

SEQ ID NO: 5586646 - DNA, 25 bp, Homo sapien
ttcaagtgaatgaaaagtgctcatt

SEQ ID NO: 5586647 - DNA, 25 bp, Homo sapien
ttttatagaaacgacgccaggcaga

SEQ ID NO: 5586648 - DNA, 25 bp, Homo sapien
acagaataaggaatactgcatcgta

SEQ ID NO: 5586649 - DNA, 25 bp, Homo sapien
caagcaggcttctcagagtccacac

SEQ ID NO: 5586650 - DNA, 25 bp, Homo sapien
tggatgcagaagcgtgaatcttttt

SEQ ID NO: 5586651 - DNA, 25 bp, Homo sapien
tgaaccataatgaaaacggcctttc

SEQ ID NO: 5586652 - DNA, 25 bp, Homo sapien
ttatggtgaagtcattagaaatctc

SEQ ID NO: 5586653 - DNA, 25 bp, Homo sapien
ttaagacaagttatcaagcaggctt

SEQ ID NO: 5586654 - DNA, 25 bp, Homo sapien
aaaatgtggtttatgttgctgttac

SEQ ID NO: 5586655 - DNA, 25 bp, Homo sapien
aggaaatgcccacaaactgaatgcc

SEQ ID NO: 5586656 - DNA, 25 bp, Homo sapien
cacaccaagggcacagccttcaata

SEQ ID NO: 5586657 - DNA, 25 bp, Homo sapien
gctgggattgggaagaacccagtaa

SEQ ID NO: 5586658 - DNA, 25 bp, Homo sapien
ccttctgaggcttgtggctttccat

SEQ ID NO: 5586659 - DNA, 25 bp, Homo sapien
acacaacagtggcaacaggctttta

SEQ ID NO: 5586660 - DNA, 25 bp, Homo sapien
gacaggctgcacatcatcctacgaa

SEQ ID NO: 5586661 - DNA, 25 bp, Homo sapien
caaagcccagccagagctacctaat

SEQ ID NO: 5586662 - DNA, 25 bp, Homo sapien
taagcaagcactcgtcaattccccc

SEQ ID NO: 5586663 - DNA, 25 bp, Homo sapien
tgaagaatggaaatcatgacacaac

SEQ ID NO: 5586664 - DNA, 25 bp, Homo sapien
ctggcttctataaggaggtattggt

SEQ ID NO: 5586665 - DNA, 25 bp, Homo sapien
gcaggatccgaaatgacaggaaatg

SEQ ID NO: 5586666 - DNA, 25 bp, Homo sapien
agtgtcctgctaaacctggagccgg

SEQ ID NO: 5586667 - DNA, 25 bp, Homo sapien
gaagggctcacccagcctccgaaag

SEQ ID NO: 5586668 - DNA, 25 bp, Homo sapien
agataaaatccaggacttcatggac

SEQ ID NO: 5586669 - DNA, 25 bp, Homo sapien
cagagtcatttgctcatcccacgag

SEQ ID NO: 5586670 - DNA, 25 bp, Homo sapien
agcctccgaaaggcagccattccct

SEQ ID NO: 5586671 - DNA, 25 bp, Homo sapien
ctcaaaacaaaagcgcgcatcctac

SEQ ID NO: 5586672 - DNA, 25 bp, Homo sapien
cgcatgggaccgtttcagagtcatt

SEQ ID NO: 5586673 - DNA, 25 bp, Homo sapien
tcatggacatttcccgcatgggacc

SEQ ID NO: 5586674 - DNA, 25 bp, Homo sapien
gcatcttccagtggcagatggggag

SEQ ID NO: 5586675 - DNA, 25 bp, Homo sapien
ggaagatgcctgaccctcaaaacaa

SEQ ID NO: 5586676 - DNA, 25 bp, Homo sapien
ccctgcctgggctttttagataaaa

SEQ ID NO: 5586677 - DNA, 25 bp, Homo sapien
cattctctaacgcaagggttccttc

SEQ ID NO: 5586678 - DNA, 25 bp, Homo sapien
tccgcaagcataggaagctctgttt

SEQ ID NO: 5586679 - DNA, 25 bp, Homo sapien
ctccggcacctcacggagcctggga

SEQ ID NO: 5586680 - DNA, 25 bp, Homo sapien
gttcagtgctgactccggcacctca

SEQ ID NO: 5586681 - DNA, 25 bp, Homo sapien
ttcagaataggactaaagcagtgga

SEQ ID NO: 5586682 - DNA, 25 bp, Homo sapien
cttcctagaaaatacgcagcaattc

SEQ ID NO: 5586683 - DNA, 25 bp, Homo sapien
tgcaaatagtagacaagagattctc

SEQ ID NO: 5586684 - DNA, 25 bp, Homo sapien
gacacaccttgtttggtgggaacac

SEQ ID NO: 5586685 - DNA, 25 bp, Homo sapien
ccctacaaaagcactgcagggcatc

SEQ ID NO: 5586686 - DNA, 25 bp, Homo sapien
aggactaaagcagtggacttcttcc

SEQ ID NO: 5586687 - DNA, 25 bp, Homo sapien
cccagcctcacctgaagaccgaagg

SEQ ID NO: 5586688 - DNA, 25 bp, Homo sapien
tgagtcagtcatagggtttgtcctg

SEQ ID NO: 5586689 - DNA, 25 bp, Homo sapien
ctgtttcttttccagggacctgacc

SEQ ID NO: 5586690 - DNA, 25 bp, Homo sapien
attagggtctctgaaacttgagggt

SEQ ID NO: 5586691 - DNA, 25 bp, Homo sapien
cattccctaggacattagggtctct

SEQ ID NO: 5586692 - DNA, 25 bp, Homo sapien
ctgtactgtgactggactctccctc

SEQ ID NO: 5586693 - DNA, 25 bp, Homo sapien
ctaggacattagggtctctgaaact

SEQ ID NO: 5586694 - DNA, 25 bp, Homo sapien
gtgggacttggcatgaaatgaccaa

SEQ ID NO: 5586695 - DNA, 25 bp, Homo sapien
ttttccagggacctgaccagagctg

SEQ ID NO: 5586696 - DNA, 25 bp, Homo sapien
tggactctccctcaacatcccccac

SEQ ID NO: 5586697 - DNA, 25 bp, Homo sapien
aatgaccaatgatgacgagaagtga

SEQ ID NO: 5586698 - DNA, 25 bp, Homo sapien
gagaagtgaccaggaaattccattc

SEQ ID NO: 5586699 - DNA, 25 bp, Homo sapien
ttcatggcataatatagggtcaagc

SEQ ID NO: 5586700 - DNA, 25 bp, Homo sapien
aaaacaattctatttggagagcaaa

SEQ ID NO: 5586701 - DNA, 25 bp, Homo sapien
ctatgcatgaaacaagctgtcactg

SEQ ID NO: 5586702 - DNA, 25 bp, Homo sapien
agtatcacaatacataaaatggttt

SEQ ID NO: 5586703 - DNA, 25 bp, Homo sapien
atatgacaatagtgttgaaagccgt

SEQ ID NO: 5586704 - DNA, 25 bp, Homo sapien
tagtgttgaaagccgtgaaactcat

SEQ ID NO: 5586705 - DNA, 25 bp, Homo sapien
aatatagggtcaagcaagattttgt

SEQ ID NO: 5586706 - DNA, 25 bp, Homo sapien
ctccaaatggcaaagataactatat

SEQ ID NO: 5586707 - DNA, 25 bp, Homo sapien
taggtcagtttaaagaacatctcta

SEQ ID NO: 5586708 - DNA, 25 bp, Homo sapien
atggcaaagataactatatgacaat

SEQ ID NO: 5586709 - DNA, 25 bp, Homo sapien
atgactatgcatgaaacaagctgtc

SEQ ID NO: 5586710 - DNA, 25 bp, Homo sapien
aaattcttccttcgctgcagacaac

SEQ ID NO: 5586711 - DNA, 25 bp, Homo sapien
tactccataatgaaaagtacagata

SEQ ID NO: 5586712 - DNA, 25 bp, Homo sapien
gtcatgccccccactatacgcctct

SEQ ID NO: 5586713 - DNA, 25 bp, Homo sapien
ctaatagctttgatgagtcagtttc

SEQ ID NO: 5586714 - DNA, 25 bp, Homo sapien
tctctatcttctgggatcaagtgat

SEQ ID NO: 5586715 - DNA, 25 bp, Homo sapien
gacaacatcaaagtaactaatcccc

SEQ ID NO: 5586716 - DNA, 25 bp, Homo sapien
atacgcctctaacaacggatatgtg

SEQ ID NO: 5586717 - DNA, 25 bp, Homo sapien
tcccatgtggctggtactactggtg

SEQ ID NO: 5586718 - DNA, 25 bp, Homo sapien
tagagctaaatgtctgagtggtcct

SEQ ID NO: 5586719 - DNA, 25 bp, Homo sapien
aacggatatgtgaaagtcttagagc

SEQ ID NO: 5586720 - DNA, 25 bp, Homo sapien
acttaagcagaagctgagtcatgcc

SEQ ID NO: 5586721 - DNA, 25 bp, Homo sapien
tcctcctgggcagccctagcagtgg

SEQ ID NO: 5586722 - DNA, 25 bp, Homo sapien
accctgtcaagctcctggggcagag

SEQ ID NO: 5586723 - DNA, 25 bp, Homo sapien
gcctccctcctcctgggcagcccta

SEQ ID NO: 5586724 - DNA, 25 bp, Homo sapien
ccttacaaaagagcaaggacagaga

SEQ ID NO: 5586725 - DNA, 25 bp, Homo sapien
caacgggtttattcttacacacggc

SEQ ID NO: 5586726 - DNA, 25 bp, Homo sapien
ccgccccttacaaaagagcaaggac

SEQ ID NO: 5586727 - DNA, 25 bp, Homo sapien
gcaccatacagagcagcacaggtca

SEQ ID NO: 5586728 - DNA, 25 bp, Homo sapien
gacttcccggcctccctcctgcctc

SEQ ID NO: 5586729 - DNA, 25 bp, Homo sapien
aggccctgcaccctgtcaagctcct

SEQ ID NO: 5586730 - DNA, 25 bp, Homo sapien
gctgcccacctggacttcccggcct

SEQ ID NO: 5586731 - DNA, 25 bp, Homo sapien
ttacacacggcaccatacagagcag

SEQ ID NO: 5586732 - DNA, 25 bp, Homo sapien
aacaataacaaacattggacttctg

SEQ ID NO: 5586733 - DNA, 25 bp, Homo sapien
cagaagtccaatgtttgttattgtt

SEQ ID NO: 5586734 - DNA, 25 bp, Homo sapien
aaacaataacaaacattggacttct

SEQ ID NO: 5586735 - DNA, 25 bp, Homo sapien
agaagtccaatgtttgttattgttt

SEQ ID NO: 5586736 - DNA, 25 bp, Homo sapien
gcagtggcctccagtaccgatggca

SEQ ID NO: 5586737 - DNA, 25 bp, Homo sapien
tggaagtaagcagccttgcccaaac

SEQ ID NO: 5586738 - DNA, 25 bp, Homo sapien
cctcagcgcacaaaggctgccattg

SEQ ID NO: 5586739 - DNA, 25 bp, Homo sapien
ggcctccagtaccgatggcagcatc

SEQ ID NO: 5586740 - DNA, 25 bp, Homo sapien
cattgctcacctgcagcagaagatc

SEQ ID NO: 5586741 - DNA, 25 bp, Homo sapien
tccagtaccgatggcagcatccaca

SEQ ID NO: 5586742 - DNA, 25 bp, Homo sapien
gcccaaacatccagtgcagtggcct

SEQ ID NO: 5586743 - DNA, 25 bp, Homo sapien
gttggaagtaagcagccttgcccaa

SEQ ID NO: 5586744 - DNA, 25 bp, Homo sapien
ctgccattgctcacctgcagcagaa

SEQ ID NO: 5586745 - DNA, 25 bp, Homo sapien
acaccagaccctcagcgcacaaagg

SEQ ID NO: 5586746 - DNA, 25 bp, Homo sapien
ttgcccaaacatccagtgcagtggc

SEQ ID NO: 5586747 - DNA, 25 bp, Homo sapien
gctcaagttatcacccctctgggct

SEQ ID NO: 5586748 - DNA, 25 bp, Homo sapien
gaggctggagatagtctcaatgctc

SEQ ID NO: 5586749 - DNA, 25 bp, Homo sapien
cctggatgtgttggatatgtgcagg

SEQ ID NO: 5586750 - DNA, 25 bp, Homo sapien
gctcgaaatgccgtaaccgaagctc

SEQ ID NO: 5586751 - DNA, 25 bp, Homo sapien
ttggccaactaagctgagtggctaa

SEQ ID NO: 5586752 - DNA, 25 bp, Homo sapien
tcgcaaggggtttccctggcttcca

SEQ ID NO: 5586753 - DNA, 25 bp, Homo sapien
agggccaggaagaaattcgaattgg

SEQ ID NO: 5586754 - DNA, 25 bp, Homo sapien
cggggcttgtctgcatgtgctttgc

SEQ ID NO: 5586755 - DNA, 25 bp, Homo sapien
aatagggctttgtgtggtcacagct

SEQ ID NO: 5586756 - DNA, 25 bp, Homo sapien
gcccggagcttcttggaacatgttt

SEQ ID NO: 5586757 - DNA, 25 bp, Homo sapien
gagtggctaagttctcctgctgccc

SEQ ID NO: 5586758 - DNA, 25 bp, Homo sapien
ggaagccctgagctgaacttacagt

SEQ ID NO: 5586759 - DNA, 25 bp, Homo sapien
agtgaggtggtgtgaatttatacag

SEQ ID NO: 5586760 - DNA, 25 bp, Homo sapien
atctatgtgtgagatgctgagtgat

SEQ ID NO: 5586761 - DNA, 25 bp, Homo sapien
tcaaaggaccctggaacatcttatg

SEQ ID NO: 5586762 - DNA, 25 bp, Homo sapien
agcacattaagaaggacacccacag

SEQ ID NO: 5586763 - DNA, 25 bp, Homo sapien
agccggatgaggaaagctcatttaa

SEQ ID NO: 5586764 - DNA, 25 bp, Homo sapien
tcgctaaacatggctgctaggaagc

SEQ ID NO: 5586765 - DNA, 25 bp, Homo sapien
ccggccaacagcgcttgcttaggga

SEQ ID NO: 5586766 - DNA, 25 bp, Homo sapien
acacccacaggtggagcacttagtc

SEQ ID NO: 5586767 - DNA, 25 bp, Homo sapien
ttagtcactcccaccggccaacagc

SEQ ID NO: 5586768 - DNA, 25 bp, Homo sapien
gagccacaggaagtacttttgggag

SEQ ID NO: 5586769 - DNA, 25 bp, Homo sapien
agataaggcagtaaggcacttatga

SEQ ID NO: 5586770 - DNA, 25 bp, Homo sapien
gtaaggcacttatgaatagagtcta

SEQ ID NO: 5586771 - DNA, 25 bp, Homo sapien
ctgctgaatgtgaggtagtatttga

SEQ ID NO: 5586772 - DNA, 25 bp, Homo sapien
cctctgagagaaatgtatgctgcca

SEQ ID NO: 5586773 - DNA, 25 bp, Homo sapien
tttgcagcatactcggagaggaaga

SEQ ID NO: 5586774 - DNA, 25 bp, Homo sapien
gtatgctgccatacagataggcttc

SEQ ID NO: 5586775 - DNA, 25 bp, Homo sapien
agtcatctgctgaatgtgaggtagt

SEQ ID NO: 5586776 - DNA, 25 bp, Homo sapien
agtgagctgatgagatacataaaaa

SEQ ID NO: 5586777 - DNA, 25 bp, Homo sapien
attatatgatcaaagatgtgttcac

SEQ ID NO: 5586778 - DNA, 25 bp, Homo sapien
atagagtctaggaaagctatgtggg

SEQ ID NO: 5586779 - DNA, 25 bp, Homo sapien
ctggggtttgcagcatactcggaga

SEQ ID NO: 5586780 - DNA, 25 bp, Homo sapien
aaatatgatttgagtgaaacaggca

SEQ ID NO: 5586781 - DNA, 25 bp, Homo sapien
tttggggaaaagtaaatgcatcctc

SEQ ID NO: 5586782 - DNA, 25 bp, Homo sapien
tgagtcgacaaagatgagaacatct

SEQ ID NO: 5586783 - DNA, 25 bp, Homo sapien
gttaatcagttagaagccaagtggc

SEQ ID NO: 5586784 - DNA, 25 bp, Homo sapien
ttaggctgtaccaacaaacatcaaa

SEQ ID NO: 5586785 - DNA, 25 bp, Homo sapien
atatgaagcaaaaacagtgagtcga

SEQ ID NO: 5586786 - DNA, 25 bp, Homo sapien
aaatattgacaggcagcagattatc

SEQ ID NO: 5586787 - DNA, 25 bp, Homo sapien
ttagagcacaagtacacagacaaat

SEQ ID NO: 5586788 - DNA, 25 bp, Homo sapien
agccaagtggccagaaaaaatatat

SEQ ID NO: 5586789 - DNA, 25 bp, Homo sapien
gagtgaaacaggcacacgtgcgttt

SEQ ID NO: 5586790 - DNA, 25 bp, Homo sapien
catcagaggcaaacattatacacac

SEQ ID NO: 5586791 - DNA, 25 bp, Homo sapien
ggtaggactaggacactttataatc

SEQ ID NO: 5586792 - DNA, 25 bp, Homo sapien
cttaatgattttgctggtaggacta

SEQ ID NO: 5586793 - DNA, 25 bp, Homo sapien
aatgtacagtgtaactgacagactg

SEQ ID NO: 5586794 - DNA, 25 bp, Homo sapien
agacagcatcaacatccagcgctgg

SEQ ID NO: 5586795 - DNA, 25 bp, Homo sapien
ctgcaatgtaactgacagatggtta

SEQ ID NO: 5586796 - DNA, 25 bp, Homo sapien
ggggaaggaatttggctatatctat

SEQ ID NO: 5586797 - DNA, 25 bp, Homo sapien
agccaaatggccaatagaccaaaac

SEQ ID NO: 5586798 - DNA, 25 bp, Homo sapien
atccttaatggacaaagatgttaat

SEQ ID NO: 5586799 - DNA, 25 bp, Homo sapien
attgcacaaagtagtcagaaaaata

SEQ ID NO: 5586800 - DNA, 25 bp, Homo sapien
caaattgatacgaaaaggaaaaatc

SEQ ID NO: 5586801 - DNA, 25 bp, Homo sapien
taaagaaaactggacaaaggatatg

SEQ ID NO: 5586802 - DNA, 25 bp, Homo sapien
aggcatcggtcagtccctctccaga

SEQ ID NO: 5586803 - DNA, 25 bp, Homo sapien
taattctctctacccaaaggcatcg

SEQ ID NO: 5586804 - DNA, 25 bp, Homo sapien
cagttagttctgacaccaacaagtg

SEQ ID NO: 5586805 - DNA, 25 bp, Homo sapien
gcagtctggggacatgtccttgaag

SEQ ID NO: 5586806 - DNA, 25 bp, Homo sapien
ccaacaagtggtgataagaggttga

SEQ ID NO: 5586807 - DNA, 25 bp, Homo sapien
tctccagaccagaagcagttagttc

SEQ ID NO: 5586808 - DNA, 25 bp, Homo sapien
acacagccccaaagatactggcagg

SEQ ID NO: 5586809 - DNA, 25 bp, Homo sapien
tctctacccaaaggcatcggtcagt

SEQ ID NO: 5586810 - DNA, 25 bp, Homo sapien
tacagaaacctcagaaaatataaag

SEQ ID NO: 5586811 - DNA, 25 bp, Homo sapien
gaaaagtgaaatatgcttattacag

SEQ ID NO: 5586812 - DNA, 25 bp, Homo sapien
acatgtccttgaaggacacagcccc

SEQ ID NO: 5586813 - DNA, 25 bp, Homo sapien
ctggacaccttacccttactgcccc

SEQ ID NO: 5586814 - DNA, 25 bp, Homo sapien
ccttctacagtctccccgtcacccc

SEQ ID NO: 5586815 - DNA, 25 bp, Homo sapien
agtcttacctgagcaccaacctgtg

SEQ ID NO: 5586816 - DNA, 25 bp, Homo sapien
ccttaatgagacggacactattttc

SEQ ID NO: 5586817 - DNA, 25 bp, Homo sapien
ctcctatggtcaaggagaaacctgg

SEQ ID NO: 5586818 - DNA, 25 bp, Homo sapien
ttagggggctgtatactagtttctc

SEQ ID NO: 5586819 - DNA, 25 bp, Homo sapien
tcctcctatgccaggggactatttg

SEQ ID NO: 5586820 - DNA, 25 bp, Homo sapien
agaaacctgggagctaacctctact

SEQ ID NO: 5586821 - DNA, 25 bp, Homo sapien
tcccaccagccatcgagtcctatta

SEQ ID NO: 5586822 - DNA, 25 bp, Homo sapien
cccccatcttgactggcagaatgtc

SEQ ID NO: 5586823 - DNA, 25 bp, Homo sapien
ctggcagaatgtcccaacacactcc

SEQ ID NO: 5586824 - DNA, 25 bp, Homo sapien
agaattaggagccttatgcgctgcc

SEQ ID NO: 5586825 - DNA, 25 bp, Homo sapien
ggcctgcagtctcagtggatgttcc

SEQ ID NO: 5586826 - DNA, 25 bp, Homo sapien
gcaagaagtgaggtcattagttttg

SEQ ID NO: 5586827 - DNA, 25 bp, Homo sapien
tacaaccttgggaagattctgacct

SEQ ID NO: 5586828 - DNA, 25 bp, Homo sapien
tgcggtgccttgcagattaggtgag

SEQ ID NO: 5586829 - DNA, 25 bp, Homo sapien
ttaatactgcagcaaaggtgtggga

SEQ ID NO: 5586830 - DNA, 25 bp, Homo sapien
cagaaaggcgacctaagaattgccg

SEQ ID NO: 5586831 - DNA, 25 bp, Homo sapien
atcctgggcagaaatctcccccgtt

SEQ ID NO: 5586832 - DNA, 25 bp, Homo sapien
ctggcgcgcgaattgttgcttttgc

SEQ ID NO: 5586833 - DNA, 25 bp, Homo sapien
tctccgaccagagtctccagagagc

SEQ ID NO: 5586834 - DNA, 25 bp, Homo sapien
tagtgaaagcacaagaaaacaatta

SEQ ID NO: 5586835 - DNA, 25 bp, Homo sapien
ttcacctcagtacccacatggacac

SEQ ID NO: 5586836 - DNA, 25 bp, Homo sapien
agggcaactccctgcactgatggtt

SEQ ID NO: 5586837 - DNA, 25 bp, Homo sapien
tgtgcaaacacgttcccaggacatc

SEQ ID NO: 5586838 - DNA, 25 bp, Homo sapien
tgaaagatacttggacagatgattt

SEQ ID NO: 5586839 - DNA, 25 bp, Homo sapien
acatggacacttgtgcaaacacgtt

SEQ ID NO: 5586840 - DNA, 25 bp, Homo sapien
ttccactagctcaaccaaacttcac

SEQ ID NO: 5586841 - DNA, 25 bp, Homo sapien
ctaatgtgatgatgaatgtagagtg

SEQ ID NO: 5586842 - DNA, 25 bp, Homo sapien
caggacatctctaaaggggaaaata

SEQ ID NO: 5586843 - DNA, 25 bp, Homo sapien
gtgggaattgtgggaattacaattc

SEQ ID NO: 5586844 - DNA, 25 bp, Homo sapien
atgtagagtgatatgacagtccgtt

SEQ ID NO: 5586845 - DNA, 25 bp, Homo sapien
aacaatcagaagtatcaagtgactc

SEQ ID NO: 5586846 - DNA, 25 bp, Homo sapien
gaccagttagctggccacagatgcc

SEQ ID NO: 5586847 - DNA, 25 bp, Homo sapien
aggtgggccatcttcctagagtaga

SEQ ID NO: 5586848 - DNA, 25 bp, Homo sapien
tggaggggtagctttccatcaccct

SEQ ID NO: 5586849 - DNA, 25 bp, Homo sapien
tggaaccatcatccaggtgggccat

SEQ ID NO: 5586850 - DNA, 25 bp, Homo sapien
taccctgagcatttagccaagtgtc

SEQ ID NO: 5586851 - DNA, 25 bp, Homo sapien
aaaaggctctttgtgatcagttccc

SEQ ID NO: 5586852 - DNA, 25 bp, Homo sapien
gaagaagctagcaaagagtgctctt

SEQ ID NO: 5586853 - DNA, 25 bp, Homo sapien
cacagatgcctgatctctagggttt

SEQ ID NO: 5586854 - DNA, 25 bp, Homo sapien
gtgatcagttccccaaggtaccaga

SEQ ID NO: 5586855 - DNA, 25 bp, Homo sapien
aggagcatggtgccagcatttgtat

SEQ ID NO: 5586856 - DNA, 25 bp, Homo sapien
tttcaggcatcaagatcccagatct

SEQ ID NO: 5586857 - DNA, 25 bp, Homo sapien
ttcatggaagaaatttgagttattt

SEQ ID NO: 5586858 - DNA, 25 bp, Homo sapien
acatgtattctagagctgggccatt

SEQ ID NO: 5586859 - DNA, 25 bp, Homo sapien
ttcagtgcagagtaagtcttaggta

SEQ ID NO: 5586860 - DNA, 25 bp, Homo sapien
acttctagtgacaaagcaaactttc

SEQ ID NO: 5586861 - DNA, 25 bp, Homo sapien
aactgaggtgttactgatcttacta

SEQ ID NO: 5586862 - DNA, 25 bp, Homo sapien
tggaataaaaggccaattaactgtc

SEQ ID NO: 5586863 - DNA, 25 bp, Homo sapien
aaagtttccaggcttgaagtagcat

SEQ ID NO: 5586864 - DNA, 25 bp, Homo sapien
aaggcccattcttggaataaaaggc

SEQ ID NO: 5586865 - DNA, 25 bp, Homo sapien
gactgggatgtgacactaactcagc

SEQ ID NO: 5586866 - DNA, 25 bp, Homo sapien
tttaagatactgccactaaggccca

SEQ ID NO: 5586867 - DNA, 25 bp, Homo sapien
ttaggtatatactgcgcttcccact

SEQ ID NO: 5586868 - DNA, 25 bp, Homo sapien
ggaaataaaaatgtgtgaagagact

SEQ ID NO: 5586869 - DNA, 25 bp, Homo sapien
attcattgaaatcaggatggagtcc

SEQ ID NO: 5586870 - DNA, 25 bp, Homo sapien
ggagaggaatagaaggccctctcta

SEQ ID NO: 5586871 - DNA, 25 bp, Homo sapien
actagttgtatgtgattgcaatcaa

SEQ ID NO: 5586872 - DNA, 25 bp, Homo sapien
ttcaatggactggagatcctgtaga

SEQ ID NO: 5586873 - DNA, 25 bp, Homo sapien
ttatataagtttaggtggagaggaa

SEQ ID NO: 5586874 - DNA, 25 bp, Homo sapien
ctctatagctaggaggacttggtga

SEQ ID NO: 5586875 - DNA, 25 bp, Homo sapien
caggccttctatggagctgtatcat

SEQ ID NO: 5586876 - DNA, 25 bp, Homo sapien
aggatggagtcctcaacatcaaata

SEQ ID NO: 5586877 - DNA, 25 bp, Homo sapien
aggaaaacagtagcttatataagtt

SEQ ID NO: 5586878 - DNA, 25 bp, Homo sapien
gtgtgaagagactcaaaaattaatg

SEQ ID NO: 5586879 - DNA, 25 bp, Homo sapien
ggaaggctcttacttgggcagaaat

SEQ ID NO: 5586880 - DNA, 25 bp, Homo sapien
tctcaaattaccaggacaatcagat

SEQ ID NO: 5586881 - DNA, 25 bp, Homo sapien
attaccaggacaatcagatgtgatc

SEQ ID NO: 5586882 - DNA, 25 bp, Homo sapien
aaaagcagttacaagtgacaccatc

SEQ ID NO: 5586883 - DNA, 25 bp, Homo sapien
cttacttgggcagaaatgtattact

SEQ ID NO: 5586884 - DNA, 25 bp, Homo sapien
ccataccaaggggctaccctatttc

SEQ ID NO: 5586885 - DNA, 25 bp, Homo sapien
aatcagatgtgatccaggcaatgga

SEQ ID NO: 5586886 - DNA, 25 bp, Homo sapien
caatttatacagcacaaaagcagtt

SEQ ID NO: 5586887 - DNA, 25 bp, Homo sapien
agatcgcacccagaccaactctctt

SEQ ID NO: 5586888 - DNA, 25 bp, Homo sapien
gctactatccataccaaggggctac

SEQ ID NO: 5586889 - DNA, 25 bp, Homo sapien
attccatgtcatcaagctactatcc

SEQ ID NO: 5586890 - DNA, 25 bp, Homo sapien
gaccccgggaccgttctcagaagtg

SEQ ID NO: 5586891 - DNA, 25 bp, Homo sapien
cacttctgagaacggtcccggggtc

SEQ ID NO: 5586892 - DNA, 25 bp, Homo sapien
gtaaaagtgcatttcattagaattg

SEQ ID NO: 5586893 - DNA, 25 bp, Homo sapien
caattctaatgaaatgcacttttac

SEQ ID NO: 5586894 - DNA, 25 bp, Homo sapien
catgcctgcctttgaagagaggaaa

SEQ ID NO: 5586895 - DNA, 25 bp, Homo sapien
aactgaggttcaatgacagatatcc

SEQ ID NO: 5586896 - DNA, 25 bp, Homo sapien
ggggagtggactgtgttttccctgc

SEQ ID NO: 5586897 - DNA, 25 bp, Homo sapien
aggacagggttttctgagcagtccc

SEQ ID NO: 5586898 - DNA, 25 bp, Homo sapien
ctaaaggtcaaactacatcagatta

SEQ ID NO: 5586899 - DNA, 25 bp, Homo sapien
tccctgactaaagtgaagttaccac

SEQ ID NO: 5586900 - DNA, 25 bp, Homo sapien
taagaacaaataaagaagctatggc

SEQ ID NO: 5586901 - DNA, 25 bp, Homo sapien
cagaagtcaccatcacatcctcaat

SEQ ID NO: 5586902 - DNA, 25 bp, Homo sapien
atcacttagatatggtagctactat

SEQ ID NO: 5586903 - DNA, 25 bp, Homo sapien
agttaccacaaaataaaacaggcca

SEQ ID NO: 5586904 - DNA, 25 bp, Homo sapien
aataaagaagctatggcacaattcc

SEQ ID NO: 5586905 - DNA, 25 bp, Homo sapien
aggcagggaagtttgaaaccaaaca

SEQ ID NO: 5586906 - DNA, 25 bp, Homo sapien
gatagaaagactgtctaaaaccagc

SEQ ID NO: 5586907 - DNA, 25 bp, Homo sapien
gatttatgttcggaaatatgggcta

SEQ ID NO: 5586908 - DNA, 25 bp, Homo sapien
tgtacatgagcaaagattataagat

SEQ ID NO: 5586909 - DNA, 25 bp, Homo sapien
tcacctgaaaaacggagtccaaatc

SEQ ID NO: 5586910 - DNA, 25 bp, Homo sapien
gaaaccaaacatgggatataggtaa

SEQ ID NO: 5586911 - DNA, 25 bp, Homo sapien
ggggcaggcaaataatgaaaccctc

SEQ ID NO: 5586912 - DNA, 25 bp, Homo sapien
atattcctaggttacaagcccagtt

SEQ ID NO: 5586913 - DNA, 25 bp, Homo sapien
tagggagacatttgattataaaacc

SEQ ID NO: 5586914 - DNA, 25 bp, Homo sapien
tcctatgaaaatgaaacagttatcc

SEQ ID NO: 5586915 - DNA, 25 bp, Homo sapien
ccagctgtgttgctctaaggcaggg

SEQ ID NO: 5586916 - DNA, 25 bp, Homo sapien
ccagtatgtgggaaacagtattcat

SEQ ID NO: 5586917 - DNA, 25 bp, Homo sapien
tcacctagttggaacctatgatctt

SEQ ID NO: 5586918 - DNA, 25 bp, Homo sapien
aatgaactcagaacaagaatgcctg

SEQ ID NO: 5586919 - DNA, 25 bp, Homo sapien
ggtcttgttcagtgctgtatcccca

SEQ ID NO: 5586920 - DNA, 25 bp, Homo sapien
cagtgcttagaacatgcctgaacac

SEQ ID NO: 5586921 - DNA, 25 bp, Homo sapien
aagaatgcctgattttccaatgtcc

SEQ ID NO: 5586922 - DNA, 25 bp, Homo sapien
aggagttgctatctgttgcatgcat

SEQ ID NO: 5586923 - DNA, 25 bp, Homo sapien
gcctgaacacaggagttgctatctg

SEQ ID NO: 5586924 - DNA, 25 bp, Homo sapien
tttgccaatccagtatgtgggaaac

SEQ ID NO: 5586925 - DNA, 25 bp, Homo sapien
ttccaatgtccataccaggttttac

SEQ ID NO: 5586926 - DNA, 25 bp, Homo sapien
ctatgatctttaaaggtgggggtct

SEQ ID NO: 5586927 - DNA, 25 bp, Homo sapien
ttctacaacagcacaaaacatcccc

SEQ ID NO: 5586928 - DNA, 25 bp, Homo sapien
tttctgagggactggagtctctgaa

SEQ ID NO: 5586929 - DNA, 25 bp, Homo sapien
tagaaagaggaagtactcaagtatt

SEQ ID NO: 5586930 - DNA, 25 bp, Homo sapien
ggccaggtatagtttagaaagagga

SEQ ID NO: 5586931 - DNA, 25 bp, Homo sapien
tatgcaaatgagaactgaggtgaaa

SEQ ID NO: 5586932 - DNA, 25 bp, Homo sapien
gctggtgcaagagggtctttatata

SEQ ID NO: 5586933 - DNA, 25 bp, Homo sapien
atagaagaaacatcaagcaaagttc

SEQ ID NO: 5586934 - DNA, 25 bp, Homo sapien
actcaagtattagagggccaaggaa

SEQ ID NO: 5586935 - DNA, 25 bp, Homo sapien
gagaaaagtgagcagtatacatatg

SEQ ID NO: 5586936 - DNA, 25 bp, Homo sapien
ttgggcaagttccctgacctcaggc

SEQ ID NO: 5586937 - DNA, 25 bp, Homo sapien
tgaaagaggtgcaacaatgtttagc

SEQ ID NO: 5586938 - DNA, 25 bp, Homo sapien
agtctgcaagtctaatgtgaaatac

SEQ ID NO: 5586939 - DNA, 25 bp, Homo sapien
cccctatgacaagtggaggggaaga

SEQ ID NO: 5586940 - DNA, 25 bp, Homo sapien
gtctagtctttgaggcagtgagtgt

SEQ ID NO: 5586941 - DNA, 25 bp, Homo sapien
ccgcagatagaacacagctcacctg

SEQ ID NO: 5586942 - DNA, 25 bp, Homo sapien
tcttccaagtggcagtgtatgaggt

SEQ ID NO: 5586943 - DNA, 25 bp, Homo sapien
tggcagtgtatgaggtctgatcatc

SEQ ID NO: 5586944 - DNA, 25 bp, Homo sapien
ttcacctagaagagtctatgcacac

SEQ ID NO: 5586945 - DNA, 25 bp, Homo sapien
ctccagaaacgatcaacagagagaa

SEQ ID NO: 5586946 - DNA, 25 bp, Homo sapien
ataagtagctggcatatcctccctc

SEQ ID NO: 5586947 - DNA, 25 bp, Homo sapien
tagtgacctcactatggctgccttt

SEQ ID NO: 5586948 - DNA, 25 bp, Homo sapien
aactgaaccccatgaccacacctca

SEQ ID NO: 5586949 - DNA, 25 bp, Homo sapien
gattttggtaattgtgctatggcta

SEQ ID NO: 5586950 - DNA, 25 bp, Homo sapien
cttccttacagtagaatgatgacta

SEQ ID NO: 5586951 - DNA, 25 bp, Homo sapien
gtgctatggctatgcaggaaaacac

SEQ ID NO: 5586952 - DNA, 25 bp, Homo sapien
gctatgcaggaaaacacccttgttc

SEQ ID NO: 5586953 - DNA, 25 bp, Homo sapien
agaatgatgactaattaatacagaa

SEQ ID NO: 5586954 - DNA, 25 bp, Homo sapien
gtaaggaatattcaaatggctcaga

SEQ ID NO: 5586955 - DNA, 25 bp, Homo sapien
aagttgatgataaagggaaacctct

SEQ ID NO: 5586956 - DNA, 25 bp, Homo sapien
gggtaaagaggcaccacatctagta

SEQ ID NO: 5586957 - DNA, 25 bp, Homo sapien
taatagagttagaacaatcacaatt

SEQ ID NO: 5586958 - DNA, 25 bp, Homo sapien
aaaagtacttactcgaagttgatga

SEQ ID NO: 5586959 - DNA, 25 bp, Homo sapien
aagaggcaccacatctagtaaggaa

SEQ ID NO: 5586960 - DNA, 25 bp, Homo sapien
ttgatgaggaacagaattgtcaaca

SEQ ID NO: 5586961 - DNA, 25 bp, Homo sapien
actggagaaactggacatcttaccc

SEQ ID NO: 5586962 - DNA, 25 bp, Homo sapien
ataacgatacactggagaaactgga

SEQ ID NO: 5586963 - DNA, 25 bp, Homo sapien
tcaaaggatgctaaacctaggaggg

SEQ ID NO: 5586964 - DNA, 25 bp, Homo sapien
aggaaaaacaataacgatacactgg

SEQ ID NO: 5586965 - DNA, 25 bp, Homo sapien
tcagacaagaatcgtcaaaggatgc

SEQ ID NO: 5586966 - DNA, 25 bp, Homo sapien
ggacatcttacccaagtgatcaaaa

SEQ ID NO: 5586967 - DNA, 25 bp, Homo sapien
tagatttgatgaggaacagaattgt

SEQ ID NO: 5586968 - DNA, 25 bp, Homo sapien
aattacccactaattgcaaaaggaa

SEQ ID NO: 5586969 - DNA, 25 bp, Homo sapien
aagaatcgtcaaaggatgctaaacc

SEQ ID NO: 5586970 - DNA, 25 bp, Homo sapien
aaaatttattcagacaagaatcgtc

SEQ ID NO: 5586971 - DNA, 25 bp, Homo sapien
caaagacgagccacttaggtgcttg

SEQ ID NO: 5586972 - DNA, 25 bp, Homo sapien
acttactctgcaaaacggaagggag

SEQ ID NO: 5586973 - DNA, 25 bp, Homo sapien
aatagtgatgtctgagccatagtgt

SEQ ID NO: 5586974 - DNA, 25 bp, Homo sapien
taggtgcttgcttagagacttctac

SEQ ID NO: 5586975 - DNA, 25 bp, Homo sapien
agtaaagatggaatagaattggtcc

SEQ ID NO: 5586976 - DNA, 25 bp, Homo sapien
aaagccagagtgttcttgggctgcc

SEQ ID NO: 5586977 - DNA, 25 bp, Homo sapien
gaatttgaaaagtttgacagctggc

SEQ ID NO: 5586978 - DNA, 25 bp, Homo sapien
gaacagcaactggtgatctggcaaa

SEQ ID NO: 5586979 - DNA, 25 bp, Homo sapien
aagggagactttttagaacagcaac

SEQ ID NO: 5586980 - DNA, 25 bp, Homo sapien
aagaaatgagatggacttggtgtat

SEQ ID NO: 5586981 - DNA, 25 bp, Homo sapien
aacagaaaaagatggaatggaatta

SEQ ID NO: 5586982 - DNA, 25 bp, Homo sapien
agccactgcgctggctaggtcaaca

SEQ ID NO: 5586983 - DNA, 25 bp, Homo sapien
tcctcaaggcacccatacttcagtg

SEQ ID NO: 5586984 - DNA, 25 bp, Homo sapien
tctatcaaggacatatcaaaactac

SEQ ID NO: 5586985 - DNA, 25 bp, Homo sapien
gcttgcaactcaactgtgtaactgc

SEQ ID NO: 5586986 - DNA, 25 bp, Homo sapien
tgcgctggctaggtcaacatttaat

SEQ ID NO: 5586987 - DNA, 25 bp, Homo sapien
cagagggctttatgcatgcttccag

SEQ ID NO: 5586988 - DNA, 25 bp, Homo sapien
ctgtgcaattctaaagggcatgccc

SEQ ID NO: 5586989 - DNA, 25 bp, Homo sapien
ctaaagggcatgccctggaacacag

SEQ ID NO: 5586990 - DNA, 25 bp, Homo sapien
ctaaataccgtaatctgctaagttc

SEQ ID NO: 5586991 - DNA, 25 bp, Homo sapien
actactagaagtttgctgccaccac

SEQ ID NO: 5586992 - DNA, 25 bp, Homo sapien
tgcacagcagagggctttatgcatg

SEQ ID NO: 5586993 - DNA, 25 bp, Homo sapien
tgaggacactgctaacagaaactcc

SEQ ID NO: 5586994 - DNA, 25 bp, Homo sapien
tgcttctacactggagacacctgga

SEQ ID NO: 5586995 - DNA, 25 bp, Homo sapien
gaaaaaagtctaagtgtggctaggc

SEQ ID NO: 5586996 - DNA, 25 bp, Homo sapien
ttgaggaagaatgattgggttataa

SEQ ID NO: 5586997 - DNA, 25 bp, Homo sapien
taggcaaagaggtttccagaatcct

SEQ ID NO: 5586998 - DNA, 25 bp, Homo sapien
gactagaatagtgcagcaaacgcta

SEQ ID NO: 5586999 - DNA, 25 bp, Homo sapien
taacttgagctgggctaaaagacac

SEQ ID NO: 5587000 - DNA, 25 bp, Homo sapien
ttaagggagacaacctatgtatgtt

SEQ ID NO: 5587001 - DNA, 25 bp, Homo sapien
ttgcaggtgattaggataaaaaaaa

SEQ ID NO: 5587002 - DNA, 25 bp, Homo sapien
actgagttgtttaaatgggaatcct

SEQ ID NO: 5587003 - DNA, 25 bp, Homo sapien
tgggtccatggaacacttactgatt

SEQ ID NO: 5587004 - DNA, 25 bp, Homo sapien
acggctacaaaaacaagtgagtgag

SEQ ID NO: 5587005 - DNA, 25 bp, Homo sapien
gcggcacctgtctccggagtctcca

SEQ ID NO: 5587006 - DNA, 25 bp, Homo sapien
acttttagccggcagcccagaccag

SEQ ID NO: 5587007 - DNA, 25 bp, Homo sapien
aagagaaactacgccacctcccctg

SEQ ID NO: 5587008 - DNA, 25 bp, Homo sapien
gctctacaaatctacgtgcgcatca

SEQ ID NO: 5587009 - DNA, 25 bp, Homo sapien
ttttcacctcgcgtcgcgcccggga

SEQ ID NO: 5587010 - DNA, 25 bp, Homo sapien
agaagagttgggataatttgccatc

SEQ ID NO: 5587011 - DNA, 25 bp, Homo sapien
gccacctcccctgcagccgagtgca

SEQ ID NO: 5587012 - DNA, 25 bp, Homo sapien
gagaggcctctctggtgtcacatga

SEQ ID NO: 5587013 - DNA, 25 bp, Homo sapien
cgtgcgttcagccctggggcatttt

SEQ ID NO: 5587014 - DNA, 25 bp, Homo sapien
tgaaacaacattgtggagaggaaag

SEQ ID NO: 5587015 - DNA, 25 bp, Homo sapien
tcattagcatattagggaaggggaa

SEQ ID NO: 5587016 - DNA, 25 bp, Homo sapien
gctcaaggccttgcagcatctgata

SEQ ID NO: 5587017 - DNA, 25 bp, Homo sapien
gccttgatacagtagatgggactta

SEQ ID NO: 5587018 - DNA, 25 bp, Homo sapien
tgtctccacccaggaaaaggaaagc

SEQ ID NO: 5587019 - DNA, 25 bp, Homo sapien
gccacccgaatatgccccagctgtc

SEQ ID NO: 5587020 - DNA, 25 bp, Homo sapien
agggatgcaagcccaaaaagcaaaa

SEQ ID NO: 5587021 - DNA, 25 bp, Homo sapien
aaagcaggagcttatggtcacatgc

SEQ ID NO: 5587022 - DNA, 25 bp, Homo sapien
gagcatggagccacactctggcctt

SEQ ID NO: 5587023 - DNA, 25 bp, Homo sapien
aaaggaaagccaggtacacttctca

SEQ ID NO: 5587024 - DNA, 25 bp, Homo sapien
acagtaagactagcctaacagggga

SEQ ID NO: 5587025 - DNA, 25 bp, Homo sapien
gatgggacttaacacactctgatgc

SEQ ID NO: 5587026 - DNA, 25 bp, Homo sapien
tggggacccctacagaaagtcacta

SEQ ID NO: 5587027 - DNA, 25 bp, Homo sapien
gggctcgctatgggatttggtccat

SEQ ID NO: 5587028 - DNA, 25 bp, Homo sapien
tactcattttgttgggctgcgtccc

SEQ ID NO: 5587029 - DNA, 25 bp, Homo sapien
ttttgaaagctcaggtcgagcacag

SEQ ID NO: 5587030 - DNA, 25 bp, Homo sapien
tacagcacggttggagaaatttaaa

SEQ ID NO: 5587031 - DNA, 25 bp, Homo sapien
ccatacacctatggggacccctaca

SEQ ID NO: 5587032 - DNA, 25 bp, Homo sapien
aatttggcagttagaaatggttggg

SEQ ID NO: 5587033 - DNA, 25 bp, Homo sapien
tatctatagagacccccatacacct

SEQ ID NO: 5587034 - DNA, 25 bp, Homo sapien
cataattgtacaggaaacaaaaccc

SEQ ID NO: 5587035 - DNA, 25 bp, Homo sapien
gttgggcaagatgaaaaacttatcc

SEQ ID NO: 5587036 - DNA, 25 bp, Homo sapien
cacacatttgtacagcacggttgga

SEQ ID NO: 5587037 - DNA, 25 bp, Homo sapien
ttggcagaatctaggcaggagttta

SEQ ID NO: 5587038 - DNA, 25 bp, Homo sapien
gcatcactgtcaccaggggtgggag

SEQ ID NO: 5587039 - DNA, 25 bp, Homo sapien
caagaacagagtccccatgccctca

SEQ ID NO: 5587040 - DNA, 25 bp, Homo sapien
cccacccgtctgtgaaaaaggggca

SEQ ID NO: 5587041 - DNA, 25 bp, Homo sapien
gagggccagtgatttcagtacgctc

SEQ ID NO: 5587042 - DNA, 25 bp, Homo sapien
ctctgatgcagtcccacacgggcaa

SEQ ID NO: 5587043 - DNA, 25 bp, Homo sapien
tgccctcagagccctagcagagaga

SEQ ID NO: 5587044 - DNA, 25 bp, Homo sapien
caccccaaatcctagctgccggctt

SEQ ID NO: 5587045 - DNA, 25 bp, Homo sapien
gggaaggatctgcaagttaatcatc

SEQ ID NO: 5587046 - DNA, 25 bp, Homo sapien
ggtgggagaatctaacagcttaact

SEQ ID NO: 5587047 - DNA, 25 bp, Homo sapien
ttgactgcaaggctcacccagcaaa

SEQ ID NO: 5587048 - DNA, 25 bp, Homo sapien
ggaccaagaaaacctacgcaggatc

SEQ ID NO: 5587049 - DNA, 25 bp, Homo sapien
aacctacgcaggatccacgtggaaa

SEQ ID NO: 5587050 - DNA, 25 bp, Homo sapien
ggtgtctacggatggaccaagaaaa

SEQ ID NO: 5587051 - DNA, 25 bp, Homo sapien
ccgactgagtgttcagtgaagaggg

SEQ ID NO: 5587052 - DNA, 25 bp, Homo sapien
cagcacaagtgtagtatgcctgggc

SEQ ID NO: 5587053 - DNA, 25 bp, Homo sapien
gtggaaacaaagctgcttagctctg

SEQ ID NO: 5587054 - DNA, 25 bp, Homo sapien
cccgagaagatcctctgcaggagtg

SEQ ID NO: 5587055 - DNA, 25 bp, Homo sapien
tatcagtgcttctcggcggagctgt

SEQ ID NO: 5587056 - DNA, 25 bp, Homo sapien
gggcatcccgagaagatcctctgca

SEQ ID NO: 5587057 - DNA, 25 bp, Homo sapien
gactggcccctgaacagcacaagtg

SEQ ID NO: 5587058 - DNA, 25 bp, Homo sapien
gcttagctctgcatatcagtgcttc

SEQ ID NO: 5587059 - DNA, 25 bp, Homo sapien
atccttgtctcctcgcgctgccggt

SEQ ID NO: 5587060 - DNA, 25 bp, Homo sapien
attttctgttaactggccaccatcc

SEQ ID NO: 5587061 - DNA, 25 bp, Homo sapien
tggtgaatacacaggtgttcaattt

SEQ ID NO: 5587062 - DNA, 25 bp, Homo sapien
tctgggcctcaagccgtcttccctc

SEQ ID NO: 5587063 - DNA, 25 bp, Homo sapien
cagtcgtgagtaactgcacctggcc

SEQ ID NO: 5587064 - DNA, 25 bp, Homo sapien
ttgtattggctatcaggtgagtagg

SEQ ID NO: 5587065 - DNA, 25 bp, Homo sapien
tcagtgtcatgtgttgatgagggac

SEQ ID NO: 5587066 - DNA, 25 bp, Homo sapien
gttgatgagggacataaacacattt

SEQ ID NO: 5587067 - DNA, 25 bp, Homo sapien
atgtgttgaatcagtgtcatgtgtt

SEQ ID NO: 5587068 - DNA, 25 bp, Homo sapien
ataaacagttgcatgggaattagta

SEQ ID NO: 5587069 - DNA, 25 bp, Homo sapien
attgcttaagctgtgtggtgaatac

SEQ ID NO: 5587070 - DNA, 25 bp, Homo sapien
ttatgtctatttctacgtaaaaaca

SEQ ID NO: 5587071 - DNA, 25 bp, Homo sapien
tgtttttacgtagaaatagacataa

SEQ ID NO: 5587072 - DNA, 25 bp, Homo sapien
cctgagactaggaagaaacaactag

SEQ ID NO: 5587073 - DNA, 25 bp, Homo sapien
ctcaggtaggtggcattatgtccaa

SEQ ID NO: 5587074 - DNA, 25 bp, Homo sapien
gagggtctttgaggctagatccata

SEQ ID NO: 5587075 - DNA, 25 bp, Homo sapien
aggctaccagggctcagattaagaa

SEQ ID NO: 5587076 - DNA, 25 bp, Homo sapien
tcacatagctattagatggcggcac

SEQ ID NO: 5587077 - DNA, 25 bp, Homo sapien
acagcccatatccaaggacgcctac

SEQ ID NO: 5587078 - DNA, 25 bp, Homo sapien
gtgtgtccttgttaagagaagagtc

SEQ ID NO: 5587079 - DNA, 25 bp, Homo sapien
ggctgcttcatctgtgacgagggtc

SEQ ID NO: 5587080 - DNA, 25 bp, Homo sapien
gaagagtcaatctggatacgggttt

SEQ ID NO: 5587081 - DNA, 25 bp, Homo sapien
gtcctaaggcctcgactggtcacga

SEQ ID NO: 5587082 - DNA, 25 bp, Homo sapien
ggcggcacctggattcaaactgttc

SEQ ID NO: 5587083 - DNA, 25 bp, Homo sapien
taccatccactgcagaaggctatag

SEQ ID NO: 5587084 - DNA, 25 bp, Homo sapien
tgacccaacaagcctcatgaggttg

SEQ ID NO: 5587085 - DNA, 25 bp, Homo sapien
ggcatctggcacaagctctgaccca

SEQ ID NO: 5587086 - DNA, 25 bp, Homo sapien
attagtccagtgaaaagacgaagcg

SEQ ID NO: 5587087 - DNA, 25 bp, Homo sapien
atacacccagacatatatggaaagc

SEQ ID NO: 5587088 - DNA, 25 bp, Homo sapien
tgggcatgctgtgaaaccattccac

SEQ ID NO: 5587089 - DNA, 25 bp, Homo sapien
agcattaaggtagatggcaccactt

SEQ ID NO: 5587090 - DNA, 25 bp, Homo sapien
ttcagcaatgaagacttgagtcaat

SEQ ID NO: 5587091 - DNA, 25 bp, Homo sapien
aacaactataagactggaaggcaga

SEQ ID NO: 5587092 - DNA, 25 bp, Homo sapien
tatggaaagctattagaaaccctgc

SEQ ID NO: 5587093 - DNA, 25 bp, Homo sapien
ctgcagaaggctatagcgtaacaac

SEQ ID NO: 5587094 - DNA, 25 bp, Homo sapien
aaggagaaagtgcacgttgaccttt

SEQ ID NO: 5587095 - DNA, 25 bp, Homo sapien
gctcatgcccgttcacacacacacc

SEQ ID NO: 5587096 - DNA, 25 bp, Homo sapien
ctcgtacatacacacccgctcgctc

SEQ ID NO: 5587097 - DNA, 25 bp, Homo sapien
gacccctgagcatgtgaccccatgg

SEQ ID NO: 5587098 - DNA, 25 bp, Homo sapien
gcgctggcgtgcactcacgcactcg

SEQ ID NO: 5587099 - DNA, 25 bp, Homo sapien
cacgttgacctttgacccgagggtg

SEQ ID NO: 5587100 - DNA, 25 bp, Homo sapien
tgttcggtacagcagtcttagtaaa

SEQ ID NO: 5587101 - DNA, 25 bp, Homo sapien
gatgataaatatgcttgttcggtac

SEQ ID NO: 5587102 - DNA, 25 bp, Homo sapien
aaatgtctgtcaggcgacaaggaga

SEQ ID NO: 5587103 - DNA, 25 bp, Homo sapien
cactcctcatacatgggccacgcgc

SEQ ID NO: 5587104 - DNA, 25 bp, Homo sapien
cccgctcgctcacgctcacctctgc

SEQ ID NO: 5587105 - DNA, 25 bp, Homo sapien
cggagaagtcccctgagcatctctg

SEQ ID NO: 5587106 - DNA, 25 bp, Homo sapien
gatgaacctaaagcaatatgtggcc

SEQ ID NO: 5587107 - DNA, 25 bp, Homo sapien
ttttctatcagtgaggccaaagagc

SEQ ID NO: 5587108 - DNA, 25 bp, Homo sapien
ggaaatgaatccaatgtcctcaccc

SEQ ID NO: 5587109 - DNA, 25 bp, Homo sapien
ttgggaaaccttcaagtacattctc

SEQ ID NO: 5587110 - DNA, 25 bp, Homo sapien
atgaaccctcaaagtaagcttagct

SEQ ID NO: 5587111 - DNA, 25 bp, Homo sapien
caggagttatgtccacactgagacc

SEQ ID NO: 5587112 - DNA, 25 bp, Homo sapien
actgagaccaatggagatgaaccta

SEQ ID NO: 5587113 - DNA, 25 bp, Homo sapien
tggttaacagggtctgtctgctcgc

SEQ ID NO: 5587114 - DNA, 25 bp, Homo sapien
atgtggccaaacaccttagcctctt

SEQ ID NO: 5587115 - DNA, 25 bp, Homo sapien
gagaaactgcccagtgactcagatc

SEQ ID NO: 5587116 - DNA, 25 bp, Homo sapien
tggcattttcggagcacaagtggtt

SEQ ID NO: 5587117 - DNA, 25 bp, Homo sapien
gctcgcctagcctcacaacactccc

SEQ ID NO: 5587118 - DNA, 25 bp, Homo sapien
actcttctggcaatctgggggaagg

SEQ ID NO: 5587119 - DNA, 25 bp, Homo sapien
acacaggggccaactctctccctac

SEQ ID NO: 5587120 - DNA, 25 bp, Homo sapien
gccaggcaacaaaggacttatcaga

SEQ ID NO: 5587121 - DNA, 25 bp, Homo sapien
ggacagcccatccatgttggcaggc

SEQ ID NO: 5587122 - DNA, 25 bp, Homo sapien
cacagcaaagtggtgtctacagtcc

SEQ ID NO: 5587123 - DNA, 25 bp, Homo sapien
gtgagacagtacttgcttgggttac

SEQ ID NO: 5587124 - DNA, 25 bp, Homo sapien
ggaagggcagagactatgccttgta

SEQ ID NO: 5587125 - DNA, 25 bp, Homo sapien
tacagtcctgcagaaaggcctcaga

SEQ ID NO: 5587126 - DNA, 25 bp, Homo sapien
aaaaggcaagagagattctccttac

SEQ ID NO: 5587127 - DNA, 25 bp, Homo sapien
acccacccagtatgtcgagttgttc

SEQ ID NO: 5587128 - DNA, 25 bp, Homo sapien
aacgacaaagacactcctagcactc

SEQ ID NO: 5587129 - DNA, 25 bp, Homo sapien
caagtgggctgacaagttttaaccc

SEQ ID NO: 5587130 - DNA, 25 bp, Homo sapien
cgagtgtttttggagagctctgtgc

SEQ ID NO: 5587131 - DNA, 25 bp, Homo sapien
tatctaggggccccaccaaaatcac

SEQ ID NO: 5587132 - DNA, 25 bp, Homo sapien
ccagaagcacatcaaattaggagtt

SEQ ID NO: 5587133 - DNA, 25 bp, Homo sapien
tccatcaagtctctgggcatgctac

SEQ ID NO: 5587134 - DNA, 25 bp, Homo sapien
accaactatgaggctatctaggggc

SEQ ID NO: 5587135 - DNA, 25 bp, Homo sapien
gttcaatctctggccctgcaacccc

SEQ ID NO: 5587136 - DNA, 25 bp, Homo sapien
cctcacagtagaacaaactcaggtg

SEQ ID NO: 5587137 - DNA, 25 bp, Homo sapien
tgcaaccccaaggttggcaagtggg

SEQ ID NO: 5587138 - DNA, 25 bp, Homo sapien
ttccctagtcgccaagaatcttggg

SEQ ID NO: 5587139 - DNA, 25 bp, Homo sapien
agaatcttgggttccacaccaccac

SEQ ID NO: 5587140 - DNA, 25 bp, Homo sapien
ggtcagcaaacctatatgtgtagtt

SEQ ID NO: 5587141 - DNA, 25 bp, Homo sapien
ataagatttgattacagtgagttta

SEQ ID NO: 5587142 - DNA, 25 bp, Homo sapien
tatctagtatcttgtggtatgattt

SEQ ID NO: 5587143 - DNA, 25 bp, Homo sapien
ttaagatgcttacaacaaaataatg

SEQ ID NO: 5587144 - DNA, 25 bp, Homo sapien
atattggtaaacattagtgatacaa

SEQ ID NO: 5587145 - DNA, 25 bp, Homo sapien
cttagccaatacatggagcaaattt

SEQ ID NO: 5587146 - DNA, 25 bp, Homo sapien
cttaaagttgttgccctttgagcag

SEQ ID NO: 5587147 - DNA, 25 bp, Homo sapien
cgggatgtattcaaggtcagcaaac

SEQ ID NO: 5587148 - DNA, 25 bp, Homo sapien
aaatgaacacccagaataaaatgaa

SEQ ID NO: 5587149 - DNA, 25 bp, Homo sapien
tcaaagcagacacgctgctgcacac

SEQ ID NO: 5587150 - DNA, 25 bp, Homo sapien
actgtgttcaagaccctggggttgg

SEQ ID NO: 5587151 - DNA, 25 bp, Homo sapien
atgagcccctaaccacaggagtctc

SEQ ID NO: 5587152 - DNA, 25 bp, Homo sapien
aaaacagtgaaggcaaccatctcac

SEQ ID NO: 5587153 - DNA, 25 bp, Homo sapien
actgctggagttgagaccaccagag

SEQ ID NO: 5587154 - DNA, 25 bp, Homo sapien
tgggattcgaacgtgtgctactgta

SEQ ID NO: 5587155 - DNA, 25 bp, Homo sapien
ctgccttgcagcagccatggccatg

SEQ ID NO: 5587156 - DNA, 25 bp, Homo sapien
atttgatcaatgagaccagagagga

SEQ ID NO: 5587157 - DNA, 25 bp, Homo sapien
gttttgcagtagggaaaacagtgaa

SEQ ID NO: 5587158 - DNA, 25 bp, Homo sapien
gaggggacaatagaatgttagttcc

SEQ ID NO: 5587159 - DNA, 25 bp, Homo sapien
cacaagtagtagaactgggattcga

SEQ ID NO: 5587160 - DNA, 25 bp, Homo sapien
gctgcgtttgcttttatcgatttgc

SEQ ID NO: 5587161 - DNA, 25 bp, Homo sapien
atggccataacgcccacgctggaag

SEQ ID NO: 5587162 - DNA, 25 bp, Homo sapien
acatgctcatgatggccataacgcc

SEQ ID NO: 5587163 - DNA, 25 bp, Homo sapien
ccacctccgtagctgccccaccagc

SEQ ID NO: 5587164 - DNA, 25 bp, Homo sapien
caccatgcagctgccctgcgcatgg

SEQ ID NO: 5587165 - DNA, 25 bp, Homo sapien
tgacatgctcatgatggccataacg

SEQ ID NO: 5587166 - DNA, 25 bp, Homo sapien
atgatggccataacgcccacgctgg

SEQ ID NO: 5587167 - DNA, 25 bp, Homo sapien
aggcataggcacccatgacccttct

SEQ ID NO: 5587168 - DNA, 25 bp, Homo sapien
ctcatgatggccataacgcccacgc

SEQ ID NO: 5587169 - DNA, 25 bp, Homo sapien
gggcatctgtccaacgcctcccccg

SEQ ID NO: 5587170 - DNA, 25 bp, Homo sapien
agagggcatctgtccaacgcctccc

SEQ ID NO: 5587171 - DNA, 25 bp, Homo sapien
cagcacagaaatggcacattgtcaa

SEQ ID NO: 5587172 - DNA, 25 bp, Homo sapien
ttgccaggagcattctgtgttttcc

SEQ ID NO: 5587173 - DNA, 25 bp, Homo sapien
gcacaggacaaagaccttagaaacc

SEQ ID NO: 5587174 - DNA, 25 bp, Homo sapien
acaaaagaacaccttgagaggcatc

SEQ ID NO: 5587175 - DNA, 25 bp, Homo sapien
ttacctagaatccgtgccgctctgc

SEQ ID NO: 5587176 - DNA, 25 bp, Homo sapien
ggcacattgtcaaattgcacaggac

SEQ ID NO: 5587177 - DNA, 25 bp, Homo sapien
attctagaaaggcaaacctaggaat

SEQ ID NO: 5587178 - DNA, 25 bp, Homo sapien
cccataacaaacggatagggagagg

SEQ ID NO: 5587179 - DNA, 25 bp, Homo sapien
agaggcatctgtgtaagaagcagct

SEQ ID NO: 5587180 - DNA, 25 bp, Homo sapien
ataggagttgtgagtatgtcctctc

SEQ ID NO: 5587181 - DNA, 25 bp, Homo sapien
ctaggaatttagaattgccaggagc

SEQ ID NO: 5587182 - DNA, 25 bp, Homo sapien
tatgtgtgtgaattgcccaaaatct

SEQ ID NO: 5587183 - DNA, 25 bp, Homo sapien
cattggcaagccttggcaatctatc

SEQ ID NO: 5587184 - DNA, 25 bp, Homo sapien
gttatgcttgactacacagaaatat

SEQ ID NO: 5587185 - DNA, 25 bp, Homo sapien
aatttcctgcaaatgcttggattca

SEQ ID NO: 5587186 - DNA, 25 bp, Homo sapien
atttaaacatacaggctaattagca

SEQ ID NO: 5587187 - DNA, 25 bp, Homo sapien
gtatgtatgcatcaactagaatttc

SEQ ID NO: 5587188 - DNA, 25 bp, Homo sapien
tttaacacgaagcaagcctattctt

SEQ ID NO: 5587189 - DNA, 25 bp, Homo sapien
cagaaatatcaaagtatgtgtgtga

SEQ ID NO: 5587190 - DNA, 25 bp, Homo sapien
tacacagtaaatagctatgttatgc

SEQ ID NO: 5587191 - DNA, 25 bp, Homo sapien
cataagccagttgattagtaagttt

SEQ ID NO: 5587192 - DNA, 25 bp, Homo sapien
aacatagaaatcactttggtaaatt

SEQ ID NO: 5587193 - DNA, 25 bp, Homo sapien
aaaacaagatactcccgttgacatc

SEQ ID NO: 5587194 - DNA, 25 bp, Homo sapien
agaaaacgaacaaacaccgagttga

SEQ ID NO: 5587195 - DNA, 25 bp, Homo sapien
gcacaggcagctgttgaacgctgat

SEQ ID NO: 5587196 - DNA, 25 bp, Homo sapien
ggcaatgagcatctgaaataatgac

SEQ ID NO: 5587197 - DNA, 25 bp, Homo sapien
tcaaaatgcagtcatctggacgggg

SEQ ID NO: 5587198 - DNA, 25 bp, Homo sapien
aaccctgaggtgacacagggtagga

SEQ ID NO: 5587199 - DNA, 25 bp, Homo sapien
gaacgctgatgctacacaaacggtt

SEQ ID NO: 5587200 - DNA, 25 bp, Homo sapien
caaaaaatgccaccagactgactcc

SEQ ID NO: 5587201 - DNA, 25 bp, Homo sapien
tgccaggggccagatcataaccctg

SEQ ID NO: 5587202 - DNA, 25 bp, Homo sapien
aactcaaacgcagcggctcacggtt

SEQ ID NO: 5587203 - DNA, 25 bp, Homo sapien
gtgaagcctgacttgcaatacagtt

SEQ ID NO: 5587204 - DNA, 25 bp, Homo sapien
ccagagaactctgcggagatatgga

SEQ ID NO: 5587205 - DNA, 25 bp, Homo sapien
ttggcctagtgcacagagaacattt

SEQ ID NO: 5587206 - DNA, 25 bp, Homo sapien
gcatctctgaatgagaaaggctggg

SEQ ID NO: 5587207 - DNA, 25 bp, Homo sapien
taatgtagacaatcagagcaaacac

SEQ ID NO: 5587208 - DNA, 25 bp, Homo sapien
gaatcacaccagaaaccagtatacc

SEQ ID NO: 5587209 - DNA, 25 bp, Homo sapien
atgatccagtgaaatgacataagac

SEQ ID NO: 5587210 - DNA, 25 bp, Homo sapien
catcagatcctaacccaacacccag

SEQ ID NO: 5587211 - DNA, 25 bp, Homo sapien
ttctgaaagccaggacagttacatg

SEQ ID NO: 5587212 - DNA, 25 bp, Homo sapien
gagaaaggctgggcatctaatataa

SEQ ID NO: 5587213 - DNA, 25 bp, Homo sapien
aagactgatatgagctaatgtagac

SEQ ID NO: 5587214 - DNA, 25 bp, Homo sapien
aaggaataaatgtagctaaagaatc

SEQ ID NO: 5587215 - DNA, 25 bp, Homo sapien
ctctgcctcaactccaatcggcctc

SEQ ID NO: 5587216 - DNA, 25 bp, Homo sapien
caaatgcacaaaggtaatcacatct

SEQ ID NO: 5587217 - DNA, 25 bp, Homo sapien
atacctgctcctaaaacccgtctac

SEQ ID NO: 5587218 - DNA, 25 bp, Homo sapien
aatcggcctctatcattgcaaacag

SEQ ID NO: 5587219 - DNA, 25 bp, Homo sapien
tcttttccaatatagctgggatcac

SEQ ID NO: 5587220 - DNA, 25 bp, Homo sapien
tatctggatttctgtgtgcaccttt

SEQ ID NO: 5587221 - DNA, 25 bp, Homo sapien
cttgctcaaagaaggatacctgctc

SEQ ID NO: 5587222 - DNA, 25 bp, Homo sapien
gattcctgggcaataccaatcctgc

SEQ ID NO: 5587223 - DNA, 25 bp, Homo sapien
cgtctaccagcgggtctggctactg

SEQ ID NO: 5587224 - DNA, 25 bp, Homo sapien
attgttttcgtttgcagatgcctcc

SEQ ID NO: 5587225 - DNA, 25 bp, Homo sapien
aacgctttggatgtcccactctgcc

SEQ ID NO: 5587226 - DNA, 25 bp, Homo sapien
gagggtagcatttttttgtcgatcc

SEQ ID NO: 5587227 - DNA, 25 bp, Homo sapien
tgtctgcagtaccaaatcccatccc

SEQ ID NO: 5587228 - DNA, 25 bp, Homo sapien
tttgcttgtctccatgaaatgtgtc

SEQ ID NO: 5587229 - DNA, 25 bp, Homo sapien
ccagctcaactgtggaaatcaaaat

SEQ ID NO: 5587230 - DNA, 25 bp, Homo sapien
tgaaggcacagtttgtttccagctc

SEQ ID NO: 5587231 - DNA, 25 bp, Homo sapien
aaaatctgtctgcagtaccaaatcc

SEQ ID NO: 5587232 - DNA, 25 bp, Homo sapien
cattttttgaaggcacagtttgttt

SEQ ID NO: 5587233 - DNA, 25 bp, Homo sapien
caaatcccatcccacagtcagccca

SEQ ID NO: 5587234 - DNA, 25 bp, Homo sapien
ttagtagcacacttaacatataacc

SEQ ID NO: 5587235 - DNA, 25 bp, Homo sapien
gaaatgtgtctagtctagagggtag

SEQ ID NO: 5587236 - DNA, 25 bp, Homo sapien
atgtgtctagtctagagggtagcat

SEQ ID NO: 5587237 - DNA, 25 bp, Homo sapien
aaaatgaggttcacagctagtcaat

SEQ ID NO: 5587238 - DNA, 25 bp, Homo sapien
ctggcaactgaggtcacaccacaaa

SEQ ID NO: 5587239 - DNA, 25 bp, Homo sapien
tgaccttgggcaggttacctcttct

SEQ ID NO: 5587240 - DNA, 25 bp, Homo sapien
ggtttgcctgagacttgggaattct

SEQ ID NO: 5587241 - DNA, 25 bp, Homo sapien
gtaatgttggaacgctagcacctac

SEQ ID NO: 5587242 - DNA, 25 bp, Homo sapien
acaaagcagttgaggtcacacatgc

SEQ ID NO: 5587243 - DNA, 25 bp, Homo sapien
tcctgcacaagttccctggcaactg

SEQ ID NO: 5587244 - DNA, 25 bp, Homo sapien
acatgtactgtgagcacaggtgggt

SEQ ID NO: 5587245 - DNA, 25 bp, Homo sapien
atgcacctgaagtcagactgacaat

SEQ ID NO: 5587246 - DNA, 25 bp, Homo sapien
gtgaacacccttggagatggtttgc

SEQ ID NO: 5587247 - DNA, 25 bp, Homo sapien
ttttcctctcatggggaggctcagc

SEQ ID NO: 5587248 - DNA, 25 bp, Homo sapien
ggggccacagttgcctactgccact

SEQ ID NO: 5587249 - DNA, 25 bp, Homo sapien
ctgtgtagagcatttggtaactatc

SEQ ID NO: 5587250 - DNA, 25 bp, Homo sapien
ctcacctgcaaaacaagggatctga

SEQ ID NO: 5587251 - DNA, 25 bp, Homo sapien
agggatctgagccacatgatgtatc

SEQ ID NO: 5587252 - DNA, 25 bp, Homo sapien
agactgggggttaaatgttctctgt

SEQ ID NO: 5587253 - DNA, 25 bp, Homo sapien
caccggcacttgttaagactggggg

SEQ ID NO: 5587254 - DNA, 25 bp, Homo sapien
actcgtaaaataaaggacatgggtc

SEQ ID NO: 5587255 - DNA, 25 bp, Homo sapien
aatgactgagtgctcccagccaagt

SEQ ID NO: 5587256 - DNA, 25 bp, Homo sapien
gcagcacccatgtaaagttcaggac

SEQ ID NO: 5587257 - DNA, 25 bp, Homo sapien
ctgctgaaaatattgaatggagggg

SEQ ID NO: 5587258 - DNA, 25 bp, Homo sapien
accaggcagcatgtgctagtgaaag

SEQ ID NO: 5587259 - DNA, 25 bp, Homo sapien
gaggttgagaatacagcgaactatg

SEQ ID NO: 5587260 - DNA, 25 bp, Homo sapien
cctgttgatagcattcagaactttc

SEQ ID NO: 5587261 - DNA, 25 bp, Homo sapien
cagagtaaagtttgggtctctctct

SEQ ID NO: 5587262 - DNA, 25 bp, Homo sapien
accctagcctgggtaagagactgag

SEQ ID NO: 5587263 - DNA, 25 bp, Homo sapien
tccatcacaggctggtgtcgaccag

SEQ ID NO: 5587264 - DNA, 25 bp, Homo sapien
gggtaagagactgagaccttcatct

SEQ ID NO: 5587265 - DNA, 25 bp, Homo sapien
ttccgatgccctagaatccattccc

SEQ ID NO: 5587266 - DNA, 25 bp, Homo sapien
tgggtctctctctcaggtaggcatt

SEQ ID NO: 5587267 - DNA, 25 bp, Homo sapien
tggatgggcatagcctacctcccag

SEQ ID NO: 5587268 - DNA, 25 bp, Homo sapien
tagaatccattcccagtggtctggc

SEQ ID NO: 5587269 - DNA, 25 bp, Homo sapien
gatttatttggatgggcatagccta

SEQ ID NO: 5587270 - DNA, 25 bp, Homo sapien
ctgccataggagctattggccgcca

SEQ ID NO: 5587271 - DNA, 25 bp, Homo sapien
ggagctattggccgccagcactgtc

SEQ ID NO: 5587272 - DNA, 25 bp, Homo sapien
gccttaaagtactgggcacgagtgt

SEQ ID NO: 5587273 - DNA, 25 bp, Homo sapien
acataatcaccacagcagcacgggg

SEQ ID NO: 5587274 - DNA, 25 bp, Homo sapien
ccctgctgccaccaacataatcacc

SEQ ID NO: 5587275 - DNA, 25 bp, Homo sapien
acagccacatcctgccataggagct

SEQ ID NO: 5587276 - DNA, 25 bp, Homo sapien
tctgactaaaaggcaaatgagggtc

SEQ ID NO: 5587277 - DNA, 25 bp, Homo sapien
acccacatcactgccgccccatacc

SEQ ID NO: 5587278 - DNA, 25 bp, Homo sapien
tctgtgcagagattaattctgacta

SEQ ID NO: 5587279 - DNA, 25 bp, Homo sapien
cccgggtaagtgtccctttctgtgc

SEQ ID NO: 5587280 - DNA, 25 bp, Homo sapien
gggacaaatgattcaggacccccac

SEQ ID NO: 5587281 - DNA, 25 bp, Homo sapien
acaaagaggctttaggagttattac

SEQ ID NO: 5587282 - DNA, 25 bp, Homo sapien
tgggaaaaatggtttgagtgatcaa

SEQ ID NO: 5587283 - DNA, 25 bp, Homo sapien
atcagaaactcgtcatcttagccct

SEQ ID NO: 5587284 - DNA, 25 bp, Homo sapien
tgatcaaagatcagtgtattggctt

SEQ ID NO: 5587285 - DNA, 25 bp, Homo sapien
atgaggtagaattgggaaattacaa

SEQ ID NO: 5587286 - DNA, 25 bp, Homo sapien
attttcaaaggatcccagtctctac

SEQ ID NO: 5587287 - DNA, 25 bp, Homo sapien
gtaagtggtggtacacatgttggat

SEQ ID NO: 5587288 - DNA, 25 bp, Homo sapien
aagcccatccatttgacaggtaaac

SEQ ID NO: 5587289 - DNA, 25 bp, Homo sapien
acaggtaaactgatctctacaagcc

SEQ ID NO: 5587290 - DNA, 25 bp, Homo sapien
ctgcccttgggaaaaatggtttgag

SEQ ID NO: 5587291 - DNA, 25 bp, Homo sapien
ctggaaacccctgtttagtccctgc

SEQ ID NO: 5587292 - DNA, 25 bp, Homo sapien
agccactgggctgtctccgtgcatt

SEQ ID NO: 5587293 - DNA, 25 bp, Homo sapien
tgataaattcccggccgggtgcagt

SEQ ID NO: 5587294 - DNA, 25 bp, Homo sapien
ataataaaagcagagtgcctgtagg

SEQ ID NO: 5587295 - DNA, 25 bp, Homo sapien
cagacctaggctgaccagaatagtc

SEQ ID NO: 5587296 - DNA, 25 bp, Homo sapien
tggctggaatgcagcttgcagtgtg

SEQ ID NO: 5587297 - DNA, 25 bp, Homo sapien
cagaataggagatgaatgaaaatag

SEQ ID NO: 5587298 - DNA, 25 bp, Homo sapien
aagtggatggccctatctcaggcca

SEQ ID NO: 5587299 - DNA, 25 bp, Homo sapien
atcaaggctacagaccagaatagga

SEQ ID NO: 5587300 - DNA, 25 bp, Homo sapien
aatagatttagaaaagggcgttgtg

SEQ ID NO: 5587301 - DNA, 25 bp, Homo sapien
accaatctgacaagccactgggctg

SEQ ID NO: 5587302 - DNA, 25 bp, Homo sapien
ttcaatggttggaatcaaggctaca

SEQ ID NO: 5587303 - DNA, 25 bp, Homo sapien
acgttgtcttggataaaggaggatt

SEQ ID NO: 5587304 - DNA, 25 bp, Homo sapien
gatcaggttcagctcttgccttgcc

SEQ ID NO: 5587305 - DNA, 25 bp, Homo sapien
caagcatcgctgagcacttgggtgt

SEQ ID NO: 5587306 - DNA, 25 bp, Homo sapien
agtcctgctattggctgatggggcc

SEQ ID NO: 5587307 - DNA, 25 bp, Homo sapien
agagtgagcagtctcctcccaagca

SEQ ID NO: 5587308 - DNA, 25 bp, Homo sapien
gtcggccttgccaaacacgttgtct

SEQ ID NO: 5587309 - DNA, 25 bp, Homo sapien
tctagaagagtagatctaaggtact

SEQ ID NO: 5587310 - DNA, 25 bp, Homo sapien
ttcaaatcctgggggcattatgatc

SEQ ID NO: 5587311 - DNA, 25 bp, Homo sapien
tgcacactaatgggaggtgtgaagg

SEQ ID NO: 5587312 - DNA, 25 bp, Homo sapien
tggggatgttaactgcaaaacaggg

SEQ ID NO: 5587313 - DNA, 25 bp, Homo sapien
gaggccaagccagtcggccttgcca

SEQ ID NO: 5587314 - DNA, 25 bp, Homo sapien
tccctgcatgtccaaaataagaaat

SEQ ID NO: 5587315 - DNA, 25 bp, Homo sapien
aagtccaaactggaaatctatacag

SEQ ID NO: 5587316 - DNA, 25 bp, Homo sapien
ataaaaagacccagtcatccgcccc

SEQ ID NO: 5587317 - DNA, 25 bp, Homo sapien
gaatctcaattgatccctgcatgtc

SEQ ID NO: 5587318 - DNA, 25 bp, Homo sapien
caaaagaatgaaatcaacttatttc

SEQ ID NO: 5587319 - DNA, 25 bp, Homo sapien
caccaaaatccaagagagaaaggaa

SEQ ID NO: 5587320 - DNA, 25 bp, Homo sapien
tatacagctcacaaaaaagccctcc

SEQ ID NO: 5587321 - DNA, 25 bp, Homo sapien
accccaatgagaaacaagataaatc

SEQ ID NO: 5587322 - DNA, 25 bp, Homo sapien
gttcaaacaccaaaatccaagagag

SEQ ID NO: 5587323 - DNA, 25 bp, Homo sapien
aagagaaagaatctttgactattta

SEQ ID NO: 5587324 - DNA, 25 bp, Homo sapien
acccgaccccaatgagaaacaagat

SEQ ID NO: 5587325 - DNA, 25 bp, Homo sapien
taggacccccatagatactcaaatc

SEQ ID NO: 5587326 - DNA, 25 bp, Homo sapien
caaatcccaggatgctcaagtacct

SEQ ID NO: 5587327 - DNA, 25 bp, Homo sapien
tacagattaatctaggggaacatct

SEQ ID NO: 5587328 - DNA, 25 bp, Homo sapien
ataatacttaaaagtgtgaatacta

SEQ ID NO: 5587329 - DNA, 25 bp, Homo sapien
ccctcggtacctgagggagattggt

SEQ ID NO: 5587330 - DNA, 25 bp, Homo sapien
atgtgttagcattctggttggaaat

SEQ ID NO: 5587331 - DNA, 25 bp, Homo sapien
tcgttcaagaacaaggtatagtata

SEQ ID NO: 5587332 - DNA, 25 bp, Homo sapien
aaggtatagtatagtccctcggtac

SEQ ID NO: 5587333 - DNA, 25 bp, Homo sapien
caggtctcactcgttgcccagctag

SEQ ID NO: 5587334 - DNA, 25 bp, Homo sapien
ctcgttgcccagctaggtacaatag

SEQ ID NO: 5587335 - DNA, 25 bp, Homo sapien
atgtcaaatcatctcgttcaagaac

SEQ ID NO: 5587336 - DNA, 25 bp, Homo sapien
taggggctgatgtagaatttgagct

SEQ ID NO: 5587337 - DNA, 25 bp, Homo sapien
gaatttgagctgagtgcagacacag

SEQ ID NO: 5587338 - DNA, 25 bp, Homo sapien
gatatggcaaaccaggctgtaatgc

SEQ ID NO: 5587339 - DNA, 25 bp, Homo sapien
ggagattcagagaaaccctgccaga

SEQ ID NO: 5587340 - DNA, 25 bp, Homo sapien
ctataatgtaggccagtgggcaaag

SEQ ID NO: 5587341 - DNA, 25 bp, Homo sapien
gggagttctacgacctgcgctacct

SEQ ID NO: 5587342 - DNA, 25 bp, Homo sapien
aaaatcaaagtggacgactgtggaa

SEQ ID NO: 5587343 - DNA, 25 bp, Homo sapien
ctcctcctacggcaccttcgcgggg

SEQ ID NO: 5587344 - DNA, 25 bp, Homo sapien
gcagggtccgcatacagcacttcta

SEQ ID NO: 5587345 - DNA, 25 bp, Homo sapien
ccagagatgaagaaggagtttttga

SEQ ID NO: 5587346 - DNA, 25 bp, Homo sapien
ggctgtaatgcagagacctgtgact

SEQ ID NO: 5587347 - DNA, 25 bp, Homo sapien
ctaaatacgtaatgaaacaagaaaa

SEQ ID NO: 5587348 - DNA, 25 bp, Homo sapien
accaaagcaccaagtacatggagtt

SEQ ID NO: 5587349 - DNA, 25 bp, Homo sapien
gagagcagcaggcattatggcttaa

SEQ ID NO: 5587350 - DNA, 25 bp, Homo sapien
cagggtacttagggtatccatcagt

SEQ ID NO: 5587351 - DNA, 25 bp, Homo sapien
ggggtacacgtggcattttgttgca

SEQ ID NO: 5587352 - DNA, 25 bp, Homo sapien
agcagatgaagccaagagttaggct

SEQ ID NO: 5587353 - DNA, 25 bp, Homo sapien
aagtacatggagttgtctagagagc

SEQ ID NO: 5587354 - DNA, 25 bp, Homo sapien
aagagttaggctgagtgtagatttg

SEQ ID NO: 5587355 - DNA, 25 bp, Homo sapien
ggaaagatgtattgaaggtagaaca

SEQ ID NO: 5587356 - DNA, 25 bp, Homo sapien
gtgtagatttggctaacatgtatgc

SEQ ID NO: 5587357 - DNA, 25 bp, Homo sapien
ttatggcttaagcacagttggggcc

SEQ ID NO: 5587358 - DNA, 25 bp, Homo sapien
aaaacaacagggcttcttctcaggg

SEQ ID NO: 5587359 - DNA, 25 bp, Homo sapien
tgtacataactgaaaaaaagcagag

SEQ ID NO: 5587360 - DNA, 25 bp, Homo sapien
tccctgatgcaattactagaaaagt

SEQ ID NO: 5587361 - DNA, 25 bp, Homo sapien
cattaatgtatgctgaagtcttgta

SEQ ID NO: 5587362 - DNA, 25 bp, Homo sapien
aaaaagcagagaatctaaacgagtc

SEQ ID NO: 5587363 - DNA, 25 bp, Homo sapien
tatggaaattaaagcattggcaaat

SEQ ID NO: 5587364 - DNA, 25 bp, Homo sapien
agagtatgtgatgtgtttaaaattt

SEQ ID NO: 5587365 - DNA, 25 bp, Homo sapien
agactcttaagaaaaacaacagggc

SEQ ID NO: 5587366 - DNA, 25 bp, Homo sapien
agcagagaatctaaacgagtcactc

SEQ ID NO: 5587367 - DNA, 25 bp, Homo sapien
ctcactattctctggggggtgaggg

SEQ ID NO: 5587368 - DNA, 25 bp, Homo sapien
caattgctacccaaaatcaaaaccc

SEQ ID NO: 5587369 - DNA, 25 bp, Homo sapien
tagaaaggtaagttacatccacaac

SEQ ID NO: 5587370 - DNA, 25 bp, Homo sapien
gagtgggcttgactgaaatagttca

SEQ ID NO: 5587371 - DNA, 25 bp, Homo sapien
acatccacaacaggaaaggatataa

SEQ ID NO: 5587372 - DNA, 25 bp, Homo sapien
agaaaacaaaggtactcttaataca

SEQ ID NO: 5587373 - DNA, 25 bp, Homo sapien
attccgtgagtcaaccccggtaaca

SEQ ID NO: 5587374 - DNA, 25 bp, Homo sapien
tgaggcaaccactgaaggaacttta

SEQ ID NO: 5587375 - DNA, 25 bp, Homo sapien
ggtatgtcaatctctgaagaacact

SEQ ID NO: 5587376 - DNA, 25 bp, Homo sapien
gagtattaaaagtaacagatcaaga

SEQ ID NO: 5587377 - DNA, 25 bp, Homo sapien
gtaatatacaatccagtgctgccaa

SEQ ID NO: 5587378 - DNA, 25 bp, Homo sapien
atcttgtaggaaaacgcaagtgagg

SEQ ID NO: 5587379 - DNA, 25 bp, Homo sapien
aatactaaatagaagtcgttaactc

SEQ ID NO: 5587380 - DNA, 25 bp, Homo sapien
ttgtgacatatcatttggctgtact

SEQ ID NO: 5587381 - DNA, 25 bp, Homo sapien
ggaattaaaagcttatgaaagacta

SEQ ID NO: 5587382 - DNA, 25 bp, Homo sapien
gtgaggctagtggaattaaaagctt

SEQ ID NO: 5587383 - DNA, 25 bp, Homo sapien
ttaggaaaaaacttgtgacatatca

SEQ ID NO: 5587384 - DNA, 25 bp, Homo sapien
atgaaagactaaatggttggatatt

SEQ ID NO: 5587385 - DNA, 25 bp, Homo sapien
gaaaacatcaacaatctcagaaagt

SEQ ID NO: 5587386 - DNA, 25 bp, Homo sapien
aatttcaggttagaacaagaaaaca

SEQ ID NO: 5587387 - DNA, 25 bp, Homo sapien
tcctgttaacatcaaacaaagaaaa

SEQ ID NO: 5587388 - DNA, 25 bp, Homo sapien
acaatctcagaaagtgaggctagtg

SEQ ID NO: 5587389 - DNA, 25 bp, Homo sapien
aagaaaatttcaggttagaacaaga

SEQ ID NO: 5587390 - DNA, 25 bp, Homo sapien
cacacctagcttaaagaaggttaaa

SEQ ID NO: 5587391 - DNA, 25 bp, Homo sapien
agttagatttgatgggggaaaattg

SEQ ID NO: 5587392 - DNA, 25 bp, Homo sapien
tgggaaagaatggaatgattgttga

SEQ ID NO: 5587393 - DNA, 25 bp, Homo sapien
gcacatgggtgtgcaccactcatac

SEQ ID NO: 5587394 - DNA, 25 bp, Homo sapien
cctgcgccagaaactactagtgctc

SEQ ID NO: 5587395 - DNA, 25 bp, Homo sapien
cagagagtacactcccaacccagcc

SEQ ID NO: 5587396 - DNA, 25 bp, Homo sapien
aaggttatttcagtggtaaggtgtg

SEQ ID NO: 5587397 - DNA, 25 bp, Homo sapien
gtagaggataaagcattcacaaggt

SEQ ID NO: 5587398 - DNA, 25 bp, Homo sapien
gttgagccataaagcacatgggtgt

SEQ ID NO: 5587399 - DNA, 25 bp, Homo sapien
ggacagacactactacgacccctac

SEQ ID NO: 5587400 - DNA, 25 bp, Homo sapien
gacccctacaagatgcacagccatt

SEQ ID NO: 5587401 - DNA, 25 bp, Homo sapien
taaggtgtgagagaattaagatctt

SEQ ID NO: 5587402 - DNA, 25 bp, Homo sapien
aactcagcttagtaatgaagccacc

SEQ ID NO: 5587403 - DNA, 25 bp, Homo sapien
ttactactgtgaaggactgtgcagc

SEQ ID NO: 5587404 - DNA, 25 bp, Homo sapien
atgaagccaccattatgtcctcagt

SEQ ID NO: 5587405 - DNA, 25 bp, Homo sapien
cgcaaggcttaagcaggtaaagcag

SEQ ID NO: 5587406 - DNA, 25 bp, Homo sapien
aagccagtagagaagtacatcttct

SEQ ID NO: 5587407 - DNA, 25 bp, Homo sapien
gcttttcgaactccgcgacccgagc

SEQ ID NO: 5587408 - DNA, 25 bp, Homo sapien
gtcacaattgatagaggaaaagcca

SEQ ID NO: 5587409 - DNA, 25 bp, Homo sapien
aagcaggtaaagcagtcactgtgaa

SEQ ID NO: 5587410 - DNA, 25 bp, Homo sapien
atgagcattaatttggagcagtatc

SEQ ID NO: 5587411 - DNA, 25 bp, Homo sapien
ttgtgtgtgtgtctcatcgtgccac

SEQ ID NO: 5587412 - DNA, 25 bp, Homo sapien
tcagtgaagtaaatgtggatataaa

SEQ ID NO: 5587413 - DNA, 25 bp, Homo sapien
tagagggacatctagagtagaaaga

SEQ ID NO: 5587414 - DNA, 25 bp, Homo sapien
tctttctactctagatgtccctcta

SEQ ID NO: 5587415 - DNA, 25 bp, Homo sapien
tgctcaacttgggtgcgtttatgac

SEQ ID NO: 5587416 - DNA, 25 bp, Homo sapien
cctattgtaatttggggtggcgtca

SEQ ID NO: 5587417 - DNA, 25 bp, Homo sapien
acacagagccaagaatgattccgtt

SEQ ID NO: 5587418 - DNA, 25 bp, Homo sapien
tttctcacacacgggccaacacagt

SEQ ID NO: 5587419 - DNA, 25 bp, Homo sapien
ctcaggtgttagcttcagttgttcc

SEQ ID NO: 5587420 - DNA, 25 bp, Homo sapien
tctcccagtctggacgtggctattt

SEQ ID NO: 5587421 - DNA, 25 bp, Homo sapien
caccgcgtacaaatggtaacctgtc

SEQ ID NO: 5587422 - DNA, 25 bp, Homo sapien
ataaaaagagatctacaagacccta

SEQ ID NO: 5587423 - DNA, 25 bp, Homo sapien
cggagtcagaaagaccccgtttaga

SEQ ID NO: 5587424 - DNA, 25 bp, Homo sapien
cccgtttagagactcgtaggcgaac

SEQ ID NO: 5587425 - DNA, 25 bp, Homo sapien
gtcaagatctgttagtttcggagtc

SEQ ID NO: 5587426 - DNA, 25 bp, Homo sapien
tttgcaatataagccagtggttgtt

SEQ ID NO: 5587427 - DNA, 25 bp, Homo sapien
caggcagtcataagcgaatcatcac

SEQ ID NO: 5587428 - DNA, 25 bp, Homo sapien
ttctactggttaatcaaggtgttga

SEQ ID NO: 5587429 - DNA, 25 bp, Homo sapien
tggttagttgatattagggattagt

SEQ ID NO: 5587430 - DNA, 25 bp, Homo sapien
cgcacccggcctagacttcttataa

SEQ ID NO: 5587431 - DNA, 25 bp, Homo sapien
gtggctaaagactctctaacaaacc

SEQ ID NO: 5587432 - DNA, 25 bp, Homo sapien
tcatacaacaagaggtacagcattt

SEQ ID NO: 5587433 - DNA, 25 bp, Homo sapien
aaggtgttgattagttaaaagccat

SEQ ID NO: 5587434 - DNA, 25 bp, Homo sapien
caattttgtcccggtgaggtacagg

SEQ ID NO: 5587435 - DNA, 25 bp, Homo sapien
aagaggtacagcatttcattggtta

SEQ ID NO: 5587436 - DNA, 25 bp, Homo sapien
ttctgtttgtggctaaagactctct

SEQ ID NO: 5587437 - DNA, 25 bp, Homo sapien
ctcaaactaaagatcaccaggtgct

SEQ ID NO: 5587438 - DNA, 25 bp, Homo sapien
taatccaatcccactgagctatatc

SEQ ID NO: 5587439 - DNA, 25 bp, Homo sapien
atttagatgagattgggaaagatat

SEQ ID NO: 5587440 - DNA, 25 bp, Homo sapien
ggaaagatattgcccagaagagttc

SEQ ID NO: 5587441 - DNA, 25 bp, Homo sapien
ggctagatactgccctaaggccttg

SEQ ID NO: 5587442 - DNA, 25 bp, Homo sapien
ctcaaaagtaccatatagacatctc

SEQ ID NO: 5587443 - DNA, 25 bp, Homo sapien
atagagctcaggagaatctggaata

SEQ ID NO: 5587444 - DNA, 25 bp, Homo sapien
cagaagagttcctccaaaatgccct

SEQ ID NO: 5587445 - DNA, 25 bp, Homo sapien
ctggaataatactgggctagatact

SEQ ID NO: 5587446 - DNA, 25 bp, Homo sapien
ggtaaaacatacaatcaaaagtgaa

SEQ ID NO: 5587447 - DNA, 25 bp, Homo sapien
aggtgcttagtttcagagctgggtt

SEQ ID NO: 5587448 - DNA, 25 bp, Homo sapien
ttaccaattcaaacttgctctgcag

SEQ ID NO: 5587449 - DNA, 25 bp, Homo sapien
tctggatcacaaaattcacatgatt

SEQ ID NO: 5587450 - DNA, 25 bp, Homo sapien
atcccatgtaggagtctaaactttc

SEQ ID NO: 5587451 - DNA, 25 bp, Homo sapien
caaccaaggaatatacccatgaagt

SEQ ID NO: 5587452 - DNA, 25 bp, Homo sapien
ggcgggtagcagtgtttcctctcca

SEQ ID NO: 5587453 - DNA, 25 bp, Homo sapien
aaatgtccaatcccatgtaggagtc

SEQ ID NO: 5587454 - DNA, 25 bp, Homo sapien
aaaatctagggcatgttctgtgact

SEQ ID NO: 5587455 - DNA, 25 bp, Homo sapien
tgactttctggatcacaaaattcac

SEQ ID NO: 5587456 - DNA, 25 bp, Homo sapien
ctaaattcaaccaaggaatataccc

SEQ ID NO: 5587457 - DNA, 25 bp, Homo sapien
ctagggcatgttctgtgactttctg

SEQ ID NO: 5587458 - DNA, 25 bp, Homo sapien
aagcttcctcttgattcctccccca

SEQ ID NO: 5587459 - DNA, 25 bp, Homo sapien
cctagtagagtctagaggcgtaagg

SEQ ID NO: 5587460 - DNA, 25 bp, Homo sapien
ttatgtgaatagtgctgttgtgagc

SEQ ID NO: 5587461 - DNA, 25 bp, Homo sapien
aggctttatgtgaatagtgctgttg

SEQ ID NO: 5587462 - DNA, 25 bp, Homo sapien
cttccctccccaactagcttgcagg

SEQ ID NO: 5587463 - DNA, 25 bp, Homo sapien
ttgcagggatttctgatcacctagt

SEQ ID NO: 5587464 - DNA, 25 bp, Homo sapien
atagtgctgttgtgagccaagtact

SEQ ID NO: 5587465 - DNA, 25 bp, Homo sapien
atcacctagtagagtctagaggcgt

SEQ ID NO: 5587466 - DNA, 25 bp, Homo sapien
acttcgaggtccccttctactgcag

SEQ ID NO: 5587467 - DNA, 25 bp, Homo sapien
ccccaactagcttgcagggatttct

SEQ ID NO: 5587468 - DNA, 25 bp, Homo sapien
gttgtgagccaagtacttgagtact

SEQ ID NO: 5587469 - DNA, 25 bp, Homo sapien
acttgagtacttcgaggtccccttc

SEQ ID NO: 5587470 - DNA, 25 bp, Homo sapien
aggagaaactcaagtgccccatctg

SEQ ID NO: 5587471 - DNA, 25 bp, Homo sapien
gcgcaagcacagttaagccacctgc

SEQ ID NO: 5587472 - DNA, 25 bp, Homo sapien
cctggtgtaccatatgaggtcgcac

SEQ ID NO: 5587473 - DNA, 25 bp, Homo sapien
cgaaaccctgcacaaagacacatac

SEQ ID NO: 5587474 - DNA, 25 bp, Homo sapien
gctgtgtctgcccgcgcagaactgg

SEQ ID NO: 5587475 - DNA, 25 bp, Homo sapien
tctgcaatgagtccttcagggagcg

SEQ ID NO: 5587476 - DNA, 25 bp, Homo sapien
aacacgcgagaacatccaccgcttc

SEQ ID NO: 5587477 - DNA, 25 bp, Homo sapien
ccgcatgacctccgacctggtgtac

SEQ ID NO: 5587478 - DNA, 25 bp, Homo sapien
agacacatacattcaccgccccccc

SEQ ID NO: 5587479 - DNA, 25 bp, Homo sapien
gtgcgccaagtgcaatgcctccttc

SEQ ID NO: 5587480 - DNA, 25 bp, Homo sapien
aggtcgcaccacaaaaaggagtatg

SEQ ID NO: 5587481 - DNA, 25 bp, Homo sapien
acccaatcgtagcccccactgtgtc

SEQ ID NO: 5587482 - DNA, 25 bp, Homo sapien
aagtcaccttaggatgaaagcgcct

SEQ ID NO: 5587483 - DNA, 25 bp, Homo sapien
tccccatcacctccctggcccgtgc

SEQ ID NO: 5587484 - DNA, 25 bp, Homo sapien
agctaatgacaccccgcagcgtgtg

SEQ ID NO: 5587485 - DNA, 25 bp, Homo sapien
ggacgtttgcaagcctggatcctgg

SEQ ID NO: 5587486 - DNA, 25 bp, Homo sapien
tagttgcatccttggaaaccggcgg

SEQ ID NO: 5587487 - DNA, 25 bp, Homo sapien
tcacctccctggcccgtgcaggtgg

SEQ ID NO: 5587488 - DNA, 25 bp, Homo sapien
gtgggccacagtcacgacccaatcg

SEQ ID NO: 5587489 - DNA, 25 bp, Homo sapien
ggccgccgcgtttaggcggcactgc

SEQ ID NO: 5587490 - DNA, 25 bp, Homo sapien
aaaaacggaagtcaccttaggatga

SEQ ID NO: 5587491 - DNA, 25 bp, Homo sapien
gtttggcatgtctctcgctgtcccc

SEQ ID NO: 5587492 - DNA, 25 bp, Homo sapien
taatccataaccacagagtctgaaa

SEQ ID NO: 5587493 - DNA, 25 bp, Homo sapien
tgattaagttctggaagggcaggaa

SEQ ID NO: 5587494 - DNA, 25 bp, Homo sapien
tctccactgcattactggccagatt

SEQ ID NO: 5587495 - DNA, 25 bp, Homo sapien
ccctccaacgtcatgcagcctggga

SEQ ID NO: 5587496 - DNA, 25 bp, Homo sapien
agagctaaaagagattgaccaatac

SEQ ID NO: 5587497 - DNA, 25 bp, Homo sapien
actgcttctggcccctaaagggatg

SEQ ID NO: 5587498 - DNA, 25 bp, Homo sapien
gagggcccacttccaggtctataga

SEQ ID NO: 5587499 - DNA, 25 bp, Homo sapien
accagggaagtatccttactccttg

SEQ ID NO: 5587500 - DNA, 25 bp, Homo sapien
catttgatgataaagaaactaaggt

SEQ ID NO: 5587501 - DNA, 25 bp, Homo sapien
gggaattgggtgcttagaaatttgc

SEQ ID NO: 5587502 - DNA, 25 bp, Homo sapien
acagagtctgaaatcttagagctaa

SEQ ID NO: 5587503 - DNA, 25 bp, Homo sapien
gcgcgaggggctccggtcggcgggt

SEQ ID NO: 5587504 - DNA, 25 bp, Homo sapien
acccgccgaccggagcccctcgcgc

SEQ ID NO: 5587505 - DNA, 25 bp, Homo sapien
atcagacctgccacttagcacagtc

SEQ ID NO: 5587506 - DNA, 25 bp, Homo sapien
gtgtgcttgacggttgacctgccaa

SEQ ID NO: 5587507 - DNA, 25 bp, Homo sapien
gttctgcagagcatctggcatgtgg

SEQ ID NO: 5587508 - DNA, 25 bp, Homo sapien
gttggtatgaaggcatccttacccc

SEQ ID NO: 5587509 - DNA, 25 bp, Homo sapien
ccctagatagtgctgggatacacac

SEQ ID NO: 5587510 - DNA, 25 bp, Homo sapien
agcacagtcatgacgaggttggtat

SEQ ID NO: 5587511 - DNA, 25 bp, Homo sapien
ccatggaggagcaacccctctgttg

SEQ ID NO: 5587512 - DNA, 25 bp, Homo sapien
agcatctggcatgtggcacactcct

SEQ ID NO: 5587513 - DNA, 25 bp, Homo sapien
tgacatacagctgtgcgtgtgtgtg

SEQ ID NO: 5587514 - DNA, 25 bp, Homo sapien
gcttgaacaagagctatgtaaagtt

SEQ ID NO: 5587515 - DNA, 25 bp, Homo sapien
tccaaccaggactcacagataattc

SEQ ID NO: 5587516 - DNA, 25 bp, Homo sapien
ggtgcatcaatgcagaggacccttg

SEQ ID NO: 5587517 - DNA, 25 bp, Homo sapien
aatcagcgagaccgcatttcagggt

SEQ ID NO: 5587518 - DNA, 25 bp, Homo sapien
cacccaaggcaggcctgttttgttc

SEQ ID NO: 5587519 - DNA, 25 bp, Homo sapien
cagaccctcctaaagggaccagacc

SEQ ID NO: 5587520 - DNA, 25 bp, Homo sapien
tagttacagatactgagggtgctca

SEQ ID NO: 5587521 - DNA, 25 bp, Homo sapien
tagtctccccagagggtagcaactc

SEQ ID NO: 5587522 - DNA, 25 bp, Homo sapien
gggtagcaactcaatcagcgagacc

SEQ ID NO: 5587523 - DNA, 25 bp, Homo sapien
aggacccttgaccacgtagggcatc

SEQ ID NO: 5587524 - DNA, 25 bp, Homo sapien
tgcctggaagaaacacgattacttt

SEQ ID NO: 5587525 - DNA, 25 bp, Homo sapien
tagaatagtgcagactctagacggc

SEQ ID NO: 5587526 - DNA, 25 bp, Homo sapien
acgtagggcatcccctcacccaagg

SEQ ID NO: 5587527 - DNA, 25 bp, Homo sapien
tggggcgatctgatgattagaacat

SEQ ID NO: 5587528 - DNA, 25 bp, Homo sapien
ctttccaggttcgccagcgtggtgt

SEQ ID NO: 5587529 - DNA, 25 bp, Homo sapien
ttgctctaaggcaggtaggtaattg

SEQ ID NO: 5587530 - DNA, 25 bp, Homo sapien
aggtaattggcctggaaacttggga

SEQ ID NO: 5587531 - DNA, 25 bp, Homo sapien
taaaaaccgcctcccgctgagcgtc

SEQ ID NO: 5587532 - DNA, 25 bp, Homo sapien
ccagagagaagtgcgtaattgctct

SEQ ID NO: 5587533 - DNA, 25 bp, Homo sapien
tgagcgtcccggaacaaatactgtc

SEQ ID NO: 5587534 - DNA, 25 bp, Homo sapien
actgtctgaactgagccgtaagcaa

SEQ ID NO: 5587535 - DNA, 25 bp, Homo sapien
ggcgagtgggactatttgatccttt

SEQ ID NO: 5587536 - DNA, 25 bp, Homo sapien
ctgagccgtaagcaagaaacggtca

SEQ ID NO: 5587537 - DNA, 25 bp, Homo sapien
catttcagggactaccagagagaag

SEQ ID NO: 5587538 - DNA, 25 bp, Homo sapien
ttcacagtacactgaagagttaaga

SEQ ID NO: 5587539 - DNA, 25 bp, Homo sapien
agctgtgtcgtcttgggcaaattgc

SEQ ID NO: 5587540 - DNA, 25 bp, Homo sapien
tgttgcagtaaggttcacagtacac

SEQ ID NO: 5587541 - DNA, 25 bp, Homo sapien
tgcttgctgtctctggcctcctttc

SEQ ID NO: 5587542 - DNA, 25 bp, Homo sapien
aaattgcttgctgtctctggcctcc

SEQ ID NO: 5587543 - DNA, 25 bp, Homo sapien
caaatcctaacagaagcttccatgc

SEQ ID NO: 5587544 - DNA, 25 bp, Homo sapien
ctccaagcacaactaattagctacc

SEQ ID NO: 5587545 - DNA, 25 bp, Homo sapien
gcaggctgtagttggccaaatccta

SEQ ID NO: 5587546 - DNA, 25 bp, Homo sapien
ttataaaatcagtcggccagctgga

SEQ ID NO: 5587547 - DNA, 25 bp, Homo sapien
gagactcctcatgcttctccaagca

SEQ ID NO: 5587548 - DNA, 25 bp, Homo sapien
tagctaccatgctgagattctcatc

SEQ ID NO: 5587549 - DNA, 25 bp, Homo sapien
ttcagggaatttttatgagcctttc

SEQ ID NO: 5587550 - DNA, 25 bp, Homo sapien
agtgtgcctgtttgtgcatgccgat

SEQ ID NO: 5587551 - DNA, 25 bp, Homo sapien
tcagtgcctccatgagaagaaaact

SEQ ID NO: 5587552 - DNA, 25 bp, Homo sapien
caaagccttccctgacaccatgact

SEQ ID NO: 5587553 - DNA, 25 bp, Homo sapien
tgtttcataatagaaccacagaatc

SEQ ID NO: 5587554 - DNA, 25 bp, Homo sapien
caccaagccctgcaccaatgaactt

SEQ ID NO: 5587555 - DNA, 25 bp, Homo sapien
actaacttcgtctccatttgcgctg

SEQ ID NO: 5587556 - DNA, 25 bp, Homo sapien
gaaccacagaatctgacagaacttc

SEQ ID NO: 5587557 - DNA, 25 bp, Homo sapien
cttaggagcaataggatgtaaaaat

SEQ ID NO: 5587558 - DNA, 25 bp, Homo sapien
aatctcagtgactggcagggctttt

SEQ ID NO: 5587559 - DNA, 25 bp, Homo sapien
gccgattcacacatgcagatccagc

SEQ ID NO: 5587560 - DNA, 25 bp, Homo sapien
ctctgaccaaagcccttggggaagt

SEQ ID NO: 5587561 - DNA, 25 bp, Homo sapien
agtgggctcatcccaaaggtgaccc

SEQ ID NO: 5587562 - DNA, 25 bp, Homo sapien
taaacacatgtagatggaggaaaag

SEQ ID NO: 5587563 - DNA, 25 bp, Homo sapien
acctgtgcagtggattcaggtggtg

SEQ ID NO: 5587564 - DNA, 25 bp, Homo sapien
tttttttgaggaagagatgcatcag

SEQ ID NO: 5587565 - DNA, 25 bp, Homo sapien
gttgttaggggtgccatatgtcttt

SEQ ID NO: 5587566 - DNA, 25 bp, Homo sapien
ccctttagttggacgtagaagcagc

SEQ ID NO: 5587567 - DNA, 25 bp, Homo sapien
taaataaatggtgaagagcaataac

SEQ ID NO: 5587568 - DNA, 25 bp, Homo sapien
cccctgaagcagataaacacatgta

SEQ ID NO: 5587569 - DNA, 25 bp, Homo sapien
ggtctattttaggcatggcaggttg

SEQ ID NO: 5587570 - DNA, 25 bp, Homo sapien
aggtggtgggccatatccatcccat

SEQ ID NO: 5587571 - DNA, 25 bp, Homo sapien
gaagttatataaccaacaagccaat

SEQ ID NO: 5587572 - DNA, 25 bp, Homo sapien
tttcacaaatattcagctgccaaaa

SEQ ID NO: 5587573 - DNA, 25 bp, Homo sapien
acacatgcacgctatcgaacaattc

SEQ ID NO: 5587574 - DNA, 25 bp, Homo sapien
taatacactgacatgagatttttca

SEQ ID NO: 5587575 - DNA, 25 bp, Homo sapien
accaacaagccaatatgaaagattt

SEQ ID NO: 5587576 - DNA, 25 bp, Homo sapien
tagggatcttggatgtcccattcac

SEQ ID NO: 5587577 - DNA, 25 bp, Homo sapien
ttcaaggaaatgtaattactacgta

SEQ ID NO: 5587578 - DNA, 25 bp, Homo sapien
gctgccaaaatttcatgagtctcac

SEQ ID NO: 5587579 - DNA, 25 bp, Homo sapien
aatgaaatggctagggatttctatt

SEQ ID NO: 5587580 - DNA, 25 bp, Homo sapien
tgctatcagcctatggcagtgagcc

SEQ ID NO: 5587581 - DNA, 25 bp, Homo sapien
tggcagtgagccatccatcatttca

SEQ ID NO: 5587582 - DNA, 25 bp, Homo sapien
gcagcaatcgaggctcagtgaaatc

SEQ ID NO: 5587583 - DNA, 25 bp, Homo sapien
aaaatcccagaacaaaatgccatga

SEQ ID NO: 5587584 - DNA, 25 bp, Homo sapien
aggcacatgaaaacccgtcaggtgg

SEQ ID NO: 5587585 - DNA, 25 bp, Homo sapien
gagccccaagctgtccctgtgcctc

SEQ ID NO: 5587586 - DNA, 25 bp, Homo sapien
aaaggatgtatctctaggcaactgc

SEQ ID NO: 5587587 - DNA, 25 bp, Homo sapien
tcactgcctccaacagcaaggacag

SEQ ID NO: 5587588 - DNA, 25 bp, Homo sapien
ctctaccaggcagcttcctaagcac

SEQ ID NO: 5587589 - DNA, 25 bp, Homo sapien
tcctaagcactgcagggaaatttct

SEQ ID NO: 5587590 - DNA, 25 bp, Homo sapien
actgctcaccacaaggctgaaagag

SEQ ID NO: 5587591 - DNA, 25 bp, Homo sapien
tcgcctcaaacttagaaacctgctc

SEQ ID NO: 5587592 - DNA, 25 bp, Homo sapien
gaggacgaggacaattcactgctca

SEQ ID NO: 5587593 - DNA, 25 bp, Homo sapien
ctaacgccggctttcggccttcgcc

SEQ ID NO: 5587594 - DNA, 25 bp, Homo sapien
cctcccccgggcagttatctccttg

SEQ ID NO: 5587595 - DNA, 25 bp, Homo sapien
gaaactgctccatccgagtccgccg

SEQ ID NO: 5587596 - DNA, 25 bp, Homo sapien
cccgctctggcctctcctaagccgc

SEQ ID NO: 5587597 - DNA, 25 bp, Homo sapien
gacttctgttctgcctctgcgcccc

SEQ ID NO: 5587598 - DNA, 25 bp, Homo sapien
atctccttgccgcgaccttgaggtc

SEQ ID NO: 5587599 - DNA, 25 bp, Homo sapien
actacttcaggtcactaaaggcgcc

SEQ ID NO: 5587600 - DNA, 25 bp, Homo sapien
gcgcccgccttctgtgcgacccttc

SEQ ID NO: 5587601 - DNA, 25 bp, Homo sapien
cactaaaggcgcctcccaccagttt

SEQ ID NO: 5587602 - DNA, 25 bp, Homo sapien
cccggccccttcctagactcactac

SEQ ID NO: 5587603 - DNA, 25 bp, Homo sapien
ccttgaggtcttcggtaagaactgg

SEQ ID NO: 5587604 - DNA, 25 bp, Homo sapien
ctggtcatcttagacttcaacacct

SEQ ID NO: 5587605 - DNA, 25 bp, Homo sapien
aggtgttgaagtctaagatgaccag

SEQ ID NO: 5587606 - DNA, 25 bp, Homo sapien
gccagtgaatgctttgtctgtgtca

SEQ ID NO: 5587607 - DNA, 25 bp, Homo sapien
gcgggaactagttggatgcatttga

SEQ ID NO: 5587608 - DNA, 25 bp, Homo sapien
gctcccagtgccagacttccaagtc

SEQ ID NO: 5587609 - DNA, 25 bp, Homo sapien
agcaagcatctgagtcccagaggcg

SEQ ID NO: 5587610 - DNA, 25 bp, Homo sapien
ttccaagtctagttctcagagccac

SEQ ID NO: 5587611 - DNA, 25 bp, Homo sapien
cccattgcgattgcatgagggaaag

SEQ ID NO: 5587612 - DNA, 25 bp, Homo sapien
gtctgtgtcagcactgaccgccccc

SEQ ID NO: 5587613 - DNA, 25 bp, Homo sapien
aggggctagtctgtctgaaagagct

SEQ ID NO: 5587614 - DNA, 25 bp, Homo sapien
cctcgtaaatcttgggtaggcgtgg

SEQ ID NO: 5587615 - DNA, 25 bp, Homo sapien
tgccacgtcgtgctttgcgcccaaa

SEQ ID NO: 5587616 - DNA, 25 bp, Homo sapien
aggacggcctcgtaaatcttgggta

SEQ ID NO: 5587617 - DNA, 25 bp, Homo sapien
ggatggggctgtctccttcccagca

SEQ ID NO: 5587618 - DNA, 25 bp, Homo sapien
ttttcaggaatgagaacactgcgag

SEQ ID NO: 5587619 - DNA, 25 bp, Homo sapien
ctttcctcagtgtggggcttcaaaa

SEQ ID NO: 5587620 - DNA, 25 bp, Homo sapien
gcaggacggtctcgaactcacgtct

SEQ ID NO: 5587621 - DNA, 25 bp, Homo sapien
gaacactgcgaggctcacagactta

SEQ ID NO: 5587622 - DNA, 25 bp, Homo sapien
gtgcccgcggtttctgcgggtgtct

SEQ ID NO: 5587623 - DNA, 25 bp, Homo sapien
gttctcactgcagtccggagatggg

SEQ ID NO: 5587624 - DNA, 25 bp, Homo sapien
gctagtccagcgcgctctgctcgcg

SEQ ID NO: 5587625 - DNA, 25 bp, Homo sapien
tcttggcagctggtgctaaagaaaa

SEQ ID NO: 5587626 - DNA, 25 bp, Homo sapien
tggagattaaagctgcacttgctct

SEQ ID NO: 5587627 - DNA, 25 bp, Homo sapien
aaagtggcaaaaagtcatgttcata

SEQ ID NO: 5587628 - DNA, 25 bp, Homo sapien
tacttgtgggttgtgcaagacagga

SEQ ID NO: 5587629 - DNA, 25 bp, Homo sapien
gagccccagaaactacccatgccta

SEQ ID NO: 5587630 - DNA, 25 bp, Homo sapien
ttgaggacctattgtgtgggggtcc

SEQ ID NO: 5587631 - DNA, 25 bp, Homo sapien
gcacatcagcagcatggagattatg

SEQ ID NO: 5587632 - DNA, 25 bp, Homo sapien
gctaagccctcagccatgggtccac

SEQ ID NO: 5587633 - DNA, 25 bp, Homo sapien
aggcacaaagcagctaagccctcag

SEQ ID NO: 5587634 - DNA, 25 bp, Homo sapien
gacagggccacttcgtgtccccata

SEQ ID NO: 5587635 - DNA, 25 bp, Homo sapien
gcagcatgagaacgattaacacaca

SEQ ID NO: 5587636 - DNA, 25 bp, Homo sapien
gaagtcatgtgtcttgtcagagccc

SEQ ID NO: 5587637 - DNA, 25 bp, Homo sapien
gtccccggaatgcctcacatgaagt

SEQ ID NO: 5587638 - DNA, 25 bp, Homo sapien
ggttcaggtgagaatcctggctctg

SEQ ID NO: 5587639 - DNA, 25 bp, Homo sapien
tgttcgctctcaatagtgcattttt

SEQ ID NO: 5587640 - DNA, 25 bp, Homo sapien
taatatgctcaccaactgtcttttc

SEQ ID NO: 5587641 - DNA, 25 bp, Homo sapien
attttgcctggtattctgtcttctt

SEQ ID NO: 5587642 - DNA, 25 bp, Homo sapien
tctggaattctgataataagcatat

SEQ ID NO: 5587643 - DNA, 25 bp, Homo sapien
ccctgtactgtttgaaagttcttcc

SEQ ID NO: 5587644 - DNA, 25 bp, Homo sapien
ttcacaggatgacatctaatctatc

SEQ ID NO: 5587645 - DNA, 25 bp, Homo sapien
ctaaagcctgaaatgagaaggttat

SEQ ID NO: 5587646 - DNA, 25 bp, Homo sapien
tgactataaaattatggcatccagt

SEQ ID NO: 5587647 - DNA, 25 bp, Homo sapien
gaaagcaacctttaacaactgtgaa

SEQ ID NO: 5587648 - DNA, 25 bp, Homo sapien
ggcatccagtctgttgttcgctctc

SEQ ID NO: 5587649 - DNA, 25 bp, Homo sapien
agtgaataactgaaaatagaccctg

SEQ ID NO: 5587650 - DNA, 25 bp, Homo sapien
agtagtgtactgacaagtgccaagc

SEQ ID NO: 5587651 - DNA, 25 bp, Homo sapien
cagtctcctaaaggttccaaagatc

SEQ ID NO: 5587652 - DNA, 25 bp, Homo sapien
tcactcagcacaacatggctgcacc

SEQ ID NO: 5587653 - DNA, 25 bp, Homo sapien
tccctatgccccgggagaagtatga

SEQ ID NO: 5587654 - DNA, 25 bp, Homo sapien
ttcatgtaaatgtgacagcagcagc

SEQ ID NO: 5587655 - DNA, 25 bp, Homo sapien
gtaagctggtctacaatgatggact

SEQ ID NO: 5587656 - DNA, 25 bp, Homo sapien
tataaaaatggtacgaagttctctg

SEQ ID NO: 5587657 - DNA, 25 bp, Homo sapien
agtgccaagctgttctaattaggtt

SEQ ID NO: 5587658 - DNA, 25 bp, Homo sapien
acatggctgcaccaacaactacccc

SEQ ID NO: 5587659 - DNA, 25 bp, Homo sapien
gggtcccagccacctgtttcacatt

SEQ ID NO: 5587660 - DNA, 25 bp, Homo sapien
ctgaaagaaacatgacatgtcacta

SEQ ID NO: 5587661 - DNA, 25 bp, Homo sapien
tctttcactttacggtcaggaaccc

SEQ ID NO: 5587662 - DNA, 25 bp, Homo sapien
gggttcctgaccgtaaagtgaaaga

SEQ ID NO: 5587663 - DNA, 25 bp, Homo sapien
tagctgaatactaaagaagagttga

SEQ ID NO: 5587664 - DNA, 25 bp, Homo sapien
ccagtgggacacatcatttatttaa

SEQ ID NO: 5587665 - DNA, 25 bp, Homo sapien
agaaggaacagcaaggcttatagaa

SEQ ID NO: 5587666 - DNA, 25 bp, Homo sapien
tagggagaaaagataatctcttacc

SEQ ID NO: 5587667 - DNA, 25 bp, Homo sapien
aatctgaaagcctcatagctgaata

SEQ ID NO: 5587668 - DNA, 25 bp, Homo sapien
ctgaaacaagtaggtttctagggag

SEQ ID NO: 5587669 - DNA, 25 bp, Homo sapien
tgaggagaagcagagtatttcatca

SEQ ID NO: 5587670 - DNA, 25 bp, Homo sapien
aaggactgactgcataggtgttaac

SEQ ID NO: 5587671 - DNA, 25 bp, Homo sapien
ccctcctcacagtctgtaggacatt

SEQ ID NO: 5587672 - DNA, 25 bp, Homo sapien
gaatgagaatgctttccagtgggac

SEQ ID NO: 5587673 - DNA, 25 bp, Homo sapien
taaagaagagttgagctttgaggag

SEQ ID NO: 5587674 - DNA, 25 bp, Homo sapien
acaggctagaagtccacagatttcc

SEQ ID NO: 5587675 - DNA, 25 bp, Homo sapien
tgccctatgagctaggtcaggacac

SEQ ID NO: 5587676 - DNA, 25 bp, Homo sapien
ttgttttgagcttagggcaagacct

SEQ ID NO: 5587677 - DNA, 25 bp, Homo sapien
ttaaaacacaggctagaagtccaca

SEQ ID NO: 5587678 - DNA, 25 bp, Homo sapien
caaggaaacatggctggtttaaaac

SEQ ID NO: 5587679 - DNA, 25 bp, Homo sapien
caggcatctggattgcccatcctat

SEQ ID NO: 5587680 - DNA, 25 bp, Homo sapien
ttcctaatggcaagaatgaaaaggc

SEQ ID NO: 5587681 - DNA, 25 bp, Homo sapien
agccagagagtatgaatgggttata

SEQ ID NO: 5587682 - DNA, 25 bp, Homo sapien
ctttttgagccaaagaggacatttg

SEQ ID NO: 5587683 - DNA, 25 bp, Homo sapien
acatttggatgcaggagactatgaa

SEQ ID NO: 5587684 - DNA, 25 bp, Homo sapien
atgggttataaaggaagactagtta

SEQ ID NO: 5587685 - DNA, 25 bp, Homo sapien
cattacttgttcacggctatactgc

SEQ ID NO: 5587686 - DNA, 25 bp, Homo sapien
attgattcacgtggaaacaaggcag

SEQ ID NO: 5587687 - DNA, 25 bp, Homo sapien
aatggtctcattcagggacatgtcc

SEQ ID NO: 5587688 - DNA, 25 bp, Homo sapien
taccttaatgccaaaaggacactgc

SEQ ID NO: 5587689 - DNA, 25 bp, Homo sapien
ggcagagagaatattaactcccccc

SEQ ID NO: 5587690 - DNA, 25 bp, Homo sapien
aaaaggacactgccttgaaaaatcc

SEQ ID NO: 5587691 - DNA, 25 bp, Homo sapien
ccacaaagagatgtctggtgaactt

SEQ ID NO: 5587692 - DNA, 25 bp, Homo sapien
ataagctctgtgaaatctggtccca

SEQ ID NO: 5587693 - DNA, 25 bp, Homo sapien
agctatgtatatggtcaactattcc

SEQ ID NO: 5587694 - DNA, 25 bp, Homo sapien
agtcctagaaatgcaaacccttaaa

SEQ ID NO: 5587695 - DNA, 25 bp, Homo sapien
tactgcatagtaaataagaagaaat

SEQ ID NO: 5587696 - DNA, 25 bp, Homo sapien
aatttagtaaagttgtgggatacaa

SEQ ID NO: 5587697 - DNA, 25 bp, Homo sapien
tgggggaaggtagtcttcatttgca

SEQ ID NO: 5587698 - DNA, 25 bp, Homo sapien
agagtgtctgaagcttaaagtgagt

SEQ ID NO: 5587699 - DNA, 25 bp, Homo sapien
atgtgccagacaccatgcaaactgc

SEQ ID NO: 5587700 - DNA, 25 bp, Homo sapien
aaaaagtaaaggcatctagattgaa

SEQ ID NO: 5587701 - DNA, 25 bp, Homo sapien
cttcagcctgacaaaagccatctag

SEQ ID NO: 5587702 - DNA, 25 bp, Homo sapien
tggtgaaagactaaaagcttttctc

SEQ ID NO: 5587703 - DNA, 25 bp, Homo sapien
aatagcaagaaactaagagtgtctg

SEQ ID NO: 5587704 - DNA, 25 bp, Homo sapien
tactggaggttctagccagggtaat

SEQ ID NO: 5587705 - DNA, 25 bp, Homo sapien
ttgcaatcaggaaaacgaacgtaaa

SEQ ID NO: 5587706 - DNA, 25 bp, Homo sapien
tgaagcttaaagtgagtggtgatta

SEQ ID NO: 5587707 - DNA, 25 bp, Homo sapien
aggcaaaggaattacaagtgaacac

SEQ ID NO: 5587708 - DNA, 25 bp, Homo sapien
tgagtgagaacatgaagtattcgac

SEQ ID NO: 5587709 - DNA, 25 bp, Homo sapien
aatataaggcgtacaagtgcagttt

SEQ ID NO: 5587710 - DNA, 25 bp, Homo sapien
aagtggtgaagtccaggcttttcct

SEQ ID NO: 5587711 - DNA, 25 bp, Homo sapien
gcctctgggaaatactgctgtttgc

SEQ ID NO: 5587712 - DNA, 25 bp, Homo sapien
acaccagaaaagtgtacactgtacc

SEQ ID NO: 5587713 - DNA, 25 bp, Homo sapien
ggttgctgcaaagacatggtttcat

SEQ ID NO: 5587714 - DNA, 25 bp, Homo sapien
aagtgaacacactagtcatggccca

SEQ ID NO: 5587715 - DNA, 25 bp, Homo sapien
tacacggatatattgcgaagtggtg

SEQ ID NO: 5587716 - DNA, 25 bp, Homo sapien
catggcccatcagaatgatagatgc

SEQ ID NO: 5587717 - DNA, 25 bp, Homo sapien
aaaagtggtgagaaattaatatgat

SEQ ID NO: 5587718 - DNA, 25 bp, Homo sapien
ggtcaggtgtagtaattgtaacaat

SEQ ID NO: 5587719 - DNA, 25 bp, Homo sapien
attgttacaattactacacctgacc

SEQ ID NO: 5587720 - DNA, 25 bp, Homo sapien
ttttccgccggctccatgcatttcc

SEQ ID NO: 5587721 - DNA, 25 bp, Homo sapien
tgcatttccctgaggcaggatcttt

SEQ ID NO: 5587722 - DNA, 25 bp, Homo sapien
cgttcctcccggtcttcggggatgc

SEQ ID NO: 5587723 - DNA, 25 bp, Homo sapien
attagaataatacaaggagagaaca

SEQ ID NO: 5587724 - DNA, 25 bp, Homo sapien
gggcttttccgccggctccatgcat

SEQ ID NO: 5587725 - DNA, 25 bp, Homo sapien
tccatgcatttccctgaggcaggat

SEQ ID NO: 5587726 - DNA, 25 bp, Homo sapien
cccacccactgggttggctcaagag

SEQ ID NO: 5587727 - DNA, 25 bp, Homo sapien
tccgccggctccatgcatttccctg

SEQ ID NO: 5587728 - DNA, 25 bp, Homo sapien
ccctgaggcaggatctttttggggg

SEQ ID NO: 5587729 - DNA, 25 bp, Homo sapien
acttcccacccactgggttggctca

SEQ ID NO: 5587730 - DNA, 25 bp, Homo sapien
accgtaattagaataatacaaggag

SEQ ID NO: 5587731 - DNA, 25 bp, Homo sapien
gagggggacacagccccatcttcag

SEQ ID NO: 5587732 - DNA, 25 bp, Homo sapien
agaggccattgccttcagggagctc

SEQ ID NO: 5587733 - DNA, 25 bp, Homo sapien
tgggaatctgtctgatgcagaagac

SEQ ID NO: 5587734 - DNA, 25 bp, Homo sapien
gacacagccctgactcagggagccc

SEQ ID NO: 5587735 - DNA, 25 bp, Homo sapien
gacagccctgccctcagggagctcc

SEQ ID NO: 5587736 - DNA, 25 bp, Homo sapien
ttcaggggattcccagtctgaggca

SEQ ID NO: 5587737 - DNA, 25 bp, Homo sapien
agccctgtcctcatgggaatctgtc

SEQ ID NO: 5587738 - DNA, 25 bp, Homo sapien
aaatgtcccatttgaggggagaggc

SEQ ID NO: 5587739 - DNA, 25 bp, Homo sapien
tgagggagaagcagccctttcttca

SEQ ID NO: 5587740 - DNA, 25 bp, Homo sapien
tgcagaagacacaaagaacctagtc

SEQ ID NO: 5587741 - DNA, 25 bp, Homo sapien
gggagatgcagcctcatcctcaggc

SEQ ID NO: 5587742 - DNA, 25 bp, Homo sapien
ccaaaatagttcagccaatagagta

SEQ ID NO: 5587743 - DNA, 25 bp, Homo sapien
caagtaaaactgggatgaaattaaa

SEQ ID NO: 5587744 - DNA, 25 bp, Homo sapien
tagacaagttcagtatggacaaaga

SEQ ID NO: 5587745 - DNA, 25 bp, Homo sapien
cctttgagttcagatgtcttgagtt

SEQ ID NO: 5587746 - DNA, 25 bp, Homo sapien
acaaagaaaagcattataatcagat

SEQ ID NO: 5587747 - DNA, 25 bp, Homo sapien
tgtcctacgaaagctacagtgattc

SEQ ID NO: 5587748 - DNA, 25 bp, Homo sapien
tagtgacaaggagaattcaagattg

SEQ ID NO: 5587749 - DNA, 25 bp, Homo sapien
ttctcaaagataaactagacaagtt

SEQ ID NO: 5587750 - DNA, 25 bp, Homo sapien
taatcagatgtcctacgaaagctac

SEQ ID NO: 5587751 - DNA, 25 bp, Homo sapien
gtcttgagtttttgaggacagtaaa

SEQ ID NO: 5587752 - DNA, 25 bp, Homo sapien
caggaatatctaatacaaagcttac

SEQ ID NO: 5587753 - DNA, 25 bp, Homo sapien
atcactaaggatactgaagacttga

SEQ ID NO: 5587754 - DNA, 25 bp, Homo sapien
aaaaccagccacttattatgtcata

SEQ ID NO: 5587755 - DNA, 25 bp, Homo sapien
actgtagaactcttttcaagcatcc

SEQ ID NO: 5587756 - DNA, 25 bp, Homo sapien
tatgtcataaagcaactgttaacac

SEQ ID NO: 5587757 - DNA, 25 bp, Homo sapien
atgaacataaataactgtagaactc

SEQ ID NO: 5587758 - DNA, 25 bp, Homo sapien
attgaaagaatcacacaaacacatc

SEQ ID NO: 5587759 - DNA, 25 bp, Homo sapien
taatcaagagatatataccaaaaac

SEQ ID NO: 5587760 - DNA, 25 bp, Homo sapien
aaaaaaatcatcactaaggatactg

SEQ ID NO: 5587761 - DNA, 25 bp, Homo sapien
tactgaagacttgaaaattaatgaa

SEQ ID NO: 5587762 - DNA, 25 bp, Homo sapien
attaatgaacatgactaaaatgatt

SEQ ID NO: 5587763 - DNA, 25 bp, Homo sapien
tatagagaatatatcatctgatcac

SEQ ID NO: 5587764 - DNA, 25 bp, Homo sapien
ctccggccatctggccgcgcggagg

SEQ ID NO: 5587765 - DNA, 25 bp, Homo sapien
cctccgcgcggccagatggccggag

SEQ ID NO: 5587766 - DNA, 25 bp, Homo sapien
attggagtatcaatacaattccctc

SEQ ID NO: 5587767 - DNA, 25 bp, Homo sapien
gtgaaatttaggtattggagtatca

SEQ ID NO: 5587768 - DNA, 25 bp, Homo sapien
attctgactcagctataagtaatat

SEQ ID NO: 5587769 - DNA, 25 bp, Homo sapien
taaactttgcaaatcccagaatggt

SEQ ID NO: 5587770 - DNA, 25 bp, Homo sapien
tgtgagacacacaagactatcaatg

SEQ ID NO: 5587771 - DNA, 25 bp, Homo sapien
agaaattctcagataaaagcaaata

SEQ ID NO: 5587772 - DNA, 25 bp, Homo sapien
cccaatgcactgacaaaaagagggg

SEQ ID NO: 5587773 - DNA, 25 bp, Homo sapien
aactttgcaaatcccagaatggttt

SEQ ID NO: 5587774 - DNA, 25 bp, Homo sapien
tccataaatctgtaaagtctatccc

SEQ ID NO: 5587775 - DNA, 25 bp, Homo sapien
aaagaagttcccaaatcccagtatg

SEQ ID NO: 5587776 - DNA, 25 bp, Homo sapien
gctttcctaagtggtattgtgaaat

SEQ ID NO: 5587777 - DNA, 25 bp, Homo sapien
gtaatgtaactgtaacgtgaacacc

SEQ ID NO: 5587778 - DNA, 25 bp, Homo sapien
aatatgttatagggtcaaaagtatc

SEQ ID NO: 5587779 - DNA, 25 bp, Homo sapien
tgcccctggctctgtaaaaattctt

SEQ ID NO: 5587780 - DNA, 25 bp, Homo sapien
agcttgctggtgggacatttttaca

SEQ ID NO: 5587781 - DNA, 25 bp, Homo sapien
aggtcggatgattactgcccctggc

SEQ ID NO: 5587782 - DNA, 25 bp, Homo sapien
tggcagaaagaattcaatagggata

SEQ ID NO: 5587783 - DNA, 25 bp, Homo sapien
tatgagggatctaaggctatttttc

SEQ ID NO: 5587784 - DNA, 25 bp, Homo sapien
aacgtgaacaccactaatggccaga

SEQ ID NO: 5587785 - DNA, 25 bp, Homo sapien
ctcaggcatcatgagactccctctc

SEQ ID NO: 5587786 - DNA, 25 bp, Homo sapien
ttaagtctagtgatctggcagaaag

SEQ ID NO: 5587787 - DNA, 25 bp, Homo sapien
taatggccagaaattatctcaggca

SEQ ID NO: 5587788 - DNA, 25 bp, Homo sapien
tgtgggtagttttgtcatttggagg

SEQ ID NO: 5587789 - DNA, 25 bp, Homo sapien
gctctgaatcccgccgctttggggg

SEQ ID NO: 5587790 - DNA, 25 bp, Homo sapien
tctgaatcccgccgctttgggggtg

SEQ ID NO: 5587791 - DNA, 25 bp, Homo sapien
ggccccgcttgcacccaaggtgtcg

SEQ ID NO: 5587792 - DNA, 25 bp, Homo sapien
cccgcttgcacccaaggtgtcgccg

SEQ ID NO: 5587793 - DNA, 25 bp, Homo sapien
gttctcgcagctctgaatcccgccg

SEQ ID NO: 5587794 - DNA, 25 bp, Homo sapien
tccagtgttctcgcagctctgaatc

SEQ ID NO: 5587795 - DNA, 25 bp, Homo sapien
ggggagcttccagtgttctcgcagc

SEQ ID NO: 5587796 - DNA, 25 bp, Homo sapien
tcgcagctctgaatcccgccgcttt

SEQ ID NO: 5587797 - DNA, 25 bp, Homo sapien
gtgttctcgcagctctgaatcccgc

SEQ ID NO: 5587798 - DNA, 25 bp, Homo sapien
tgggatgtgggtagttttgtcattt

SEQ ID NO: 5587799 - DNA, 25 bp, Homo sapien
agaaaaaataagggtttggagatca

SEQ ID NO: 5587800 - DNA, 25 bp, Homo sapien
cctaatgaaatggtggtgtgttttg

SEQ ID NO: 5587801 - DNA, 25 bp, Homo sapien
caactactatcaggaggaaagatgg

SEQ ID NO: 5587802 - DNA, 25 bp, Homo sapien
aagatgggaaattttgacctgtttg

SEQ ID NO: 5587803 - DNA, 25 bp, Homo sapien
tatatagtgggttaagaaaaagcaa

SEQ ID NO: 5587804 - DNA, 25 bp, Homo sapien
gtttgttatacaccagagcagaaaa

SEQ ID NO: 5587805 - DNA, 25 bp, Homo sapien
ttggttgcatcgtccatgagtggaa

SEQ ID NO: 5587806 - DNA, 25 bp, Homo sapien
ctcagagattgcatctgttggttgc

SEQ ID NO: 5587807 - DNA, 25 bp, Homo sapien
tggtttcctgagtccagctaggtca

SEQ ID NO: 5587808 - DNA, 25 bp, Homo sapien
ataataagaggtcccaattttcatc

SEQ ID NO: 5587809 - DNA, 25 bp, Homo sapien
attaagtatgcaaggtaggattcaa

SEQ ID NO: 5587810 - DNA, 25 bp, Homo sapien
tcagcccacgcctacctccaacttc

SEQ ID NO: 5587811 - DNA, 25 bp, Homo sapien
gccactgtaaggggcttgcagaata

SEQ ID NO: 5587812 - DNA, 25 bp, Homo sapien
ccaaaatcccctatagcgagtcgtt

SEQ ID NO: 5587813 - DNA, 25 bp, Homo sapien
acaatggcacatttacaagaggtac

SEQ ID NO: 5587814 - DNA, 25 bp, Homo sapien
gttcagcgtgtaaaaacgtgcggag

SEQ ID NO: 5587815 - DNA, 25 bp, Homo sapien
tcacttggaccgagaatatattgta

SEQ ID NO: 5587816 - DNA, 25 bp, Homo sapien
ctagatgttgggtttaatgcttcac

SEQ ID NO: 5587817 - DNA, 25 bp, Homo sapien
tgcagtaagaacccatgaagttgtc

SEQ ID NO: 5587818 - DNA, 25 bp, Homo sapien
ttaaggaccgagaatatattgcaat

SEQ ID NO: 5587819 - DNA, 25 bp, Homo sapien
cgtgcggagcaatcctcctgtgccg

SEQ ID NO: 5587820 - DNA, 25 bp, Homo sapien
acttattgagctttcagggccactg

SEQ ID NO: 5587821 - DNA, 25 bp, Homo sapien
ccaacccacttgagacaggtgtgtt

SEQ ID NO: 5587822 - DNA, 25 bp, Homo sapien
caaccactctgcagctagaaggctc

SEQ ID NO: 5587823 - DNA, 25 bp, Homo sapien
tgtggccatgtggaaacaaccactc

SEQ ID NO: 5587824 - DNA, 25 bp, Homo sapien
gggcttgcagtggaacacccactct

SEQ ID NO: 5587825 - DNA, 25 bp, Homo sapien
ctcagctcacgactgtgacagcgac

SEQ ID NO: 5587826 - DNA, 25 bp, Homo sapien
tcacactgtgcaccacccaggctct

SEQ ID NO: 5587827 - DNA, 25 bp, Homo sapien
gaaggctcttacggctctggtggag

SEQ ID NO: 5587828 - DNA, 25 bp, Homo sapien
gacccaggacccccaatcagaattg

SEQ ID NO: 5587829 - DNA, 25 bp, Homo sapien
tgacagcgacttctcggcaagagtg

SEQ ID NO: 5587830 - DNA, 25 bp, Homo sapien
ccctccccgcccacacgtgtacttc

SEQ ID NO: 5587831 - DNA, 25 bp, Homo sapien
tgcacagcacacacccggtcttcca

SEQ ID NO: 5587832 - DNA, 25 bp, Homo sapien
aataagaaaattacatgcagttgca

SEQ ID NO: 5587833 - DNA, 25 bp, Homo sapien
taggaagcaaagggtcatttcaaaa

SEQ ID NO: 5587834 - DNA, 25 bp, Homo sapien
tttgaggacaaaaataggtgatatg

SEQ ID NO: 5587835 - DNA, 25 bp, Homo sapien
agaggagggatgattcatatttaat

SEQ ID NO: 5587836 - DNA, 25 bp, Homo sapien
ctgcattaatagtgtctgaagacct

SEQ ID NO: 5587837 - DNA, 25 bp, Homo sapien
aagctcagtttcagtaaccagtatc

SEQ ID NO: 5587838 - DNA, 25 bp, Homo sapien
tcaggacctagaggctacaatctgc

SEQ ID NO: 5587839 - DNA, 25 bp, Homo sapien
aactacaaaacggaccagaagaatc

SEQ ID NO: 5587840 - DNA, 25 bp, Homo sapien
ggtgatatgttgaaatgcgggaaac

SEQ ID NO: 5587841 - DNA, 25 bp, Homo sapien
cagaagaatcattatcataggaagc

SEQ ID NO: 5587842 - DNA, 25 bp, Homo sapien
aagaaataacagcagttttagagga

SEQ ID NO: 5587843 - DNA, 25 bp, Homo sapien
gcctataggataaagtataagcccc

SEQ ID NO: 5587844 - DNA, 25 bp, Homo sapien
aaaacctgaactactgctggcaata

SEQ ID NO: 5587845 - DNA, 25 bp, Homo sapien
cttcatgcccctagattaatccctc

SEQ ID NO: 5587846 - DNA, 25 bp, Homo sapien
agttgggatattccagcccaaagac

SEQ ID NO: 5587847 - DNA, 25 bp, Homo sapien
ggcaatagtctataaactgggctca

SEQ ID NO: 5587848 - DNA, 25 bp, Homo sapien
aagccccattcagggagcatttacc

SEQ ID NO: 5587849 - DNA, 25 bp, Homo sapien
tatgacctgcaattccaagagtatc

SEQ ID NO: 5587850 - DNA, 25 bp, Homo sapien
gccacctaatagactgttccccagt

SEQ ID NO: 5587851 - DNA, 25 bp, Homo sapien
gcccaaagactgccacctaatagac

SEQ ID NO: 5587852 - DNA, 25 bp, Homo sapien
aaataaaaccagaaatcagttggga

SEQ ID NO: 5587853 - DNA, 25 bp, Homo sapien
tctgctatgcagactcctctaaatc

SEQ ID NO: 5587854 - DNA, 25 bp, Homo sapien
tttaagacacaattctctagcaatc

SEQ ID NO: 5587855 - DNA, 25 bp, Homo sapien
acatactgtgtgtgtactaaataca

SEQ ID NO: 5587856 - DNA, 25 bp, Homo sapien
tttagctacatgtgagtatatactc

SEQ ID NO: 5587857 - DNA, 25 bp, Homo sapien
cccaatgtatggaaaatatattctg

SEQ ID NO: 5587858 - DNA, 25 bp, Homo sapien
taaggcatataaaaccagtgcacag

SEQ ID NO: 5587859 - DNA, 25 bp, Homo sapien
tgcagtcctgagtctatttagctac

SEQ ID NO: 5587860 - DNA, 25 bp, Homo sapien
tgggttcatgaactgtttaagacac

SEQ ID NO: 5587861 - DNA, 25 bp, Homo sapien
acaaagtgcatacctacccaatgta

SEQ ID NO: 5587862 - DNA, 25 bp, Homo sapien
cctacacaaggaatgtgcagtcctg

SEQ ID NO: 5587863 - DNA, 25 bp, Homo sapien
tataaaaccagtgcacagaaaatgc

SEQ ID NO: 5587864 - DNA, 25 bp, Homo sapien
ttgggaatggtaatctccatctgct

SEQ ID NO: 5587865 - DNA, 25 bp, Homo sapien
taggtttactgggtcacagttttca

SEQ ID NO: 5587866 - DNA, 25 bp, Homo sapien
cctgttctacactggcctgtcaaga

SEQ ID NO: 5587867 - DNA, 25 bp, Homo sapien
tcaagcacggttacaaggcattttc

SEQ ID NO: 5587868 - DNA, 25 bp, Homo sapien
aattttaatgaaagctgctcatgaa

SEQ ID NO: 5587869 - DNA, 25 bp, Homo sapien
taaggctctttcctagcaaccaaac

SEQ ID NO: 5587870 - DNA, 25 bp, Homo sapien
gaggaaataactggctaagtaacta

SEQ ID NO: 5587871 - DNA, 25 bp, Homo sapien
gtgcacaccactacgcttggctcct

SEQ ID NO: 5587872 - DNA, 25 bp, Homo sapien
ggctcctgtctatggcggaggttgc

SEQ ID NO: 5587873 - DNA, 25 bp, Homo sapien
actactctacatcaagcacggttac

SEQ ID NO: 5587874 - DNA, 25 bp, Homo sapien
gatgccccacctgttctacactggc

SEQ ID NO: 5587875 - DNA, 25 bp, Homo sapien
actacgcttggctcctgtctatggc

SEQ ID NO: 5587876 - DNA, 25 bp, Homo sapien
attcatataaaacaggccaaacatc

SEQ ID NO: 5587877 - DNA, 25 bp, Homo sapien
atgttaacacgagtataaaagtaat

SEQ ID NO: 5587878 - DNA, 25 bp, Homo sapien
aaggcacagatgaaaatgttaacac

SEQ ID NO: 5587879 - DNA, 25 bp, Homo sapien
aaaagaggcaagcttgaaaatgtga

SEQ ID NO: 5587880 - DNA, 25 bp, Homo sapien
gctagctcataggcaccagaaattc

SEQ ID NO: 5587881 - DNA, 25 bp, Homo sapien
aatcagaaacatagagtgttgggaa

SEQ ID NO: 5587882 - DNA, 25 bp, Homo sapien
taaattaccaaaaggcacagatgaa

SEQ ID NO: 5587883 - DNA, 25 bp, Homo sapien
ggtaggtgatagctagctcataggc

SEQ ID NO: 5587884 - DNA, 25 bp, Homo sapien
agagtgttgggaatactgaaatttc

SEQ ID NO: 5587885 - DNA, 25 bp, Homo sapien
cctttcaggtaggtgatagctagct

SEQ ID NO: 5587886 - DNA, 25 bp, Homo sapien
gtgaggatagaaaggtatcacagtg

SEQ ID NO: 5587887 - DNA, 25 bp, Homo sapien
tttaataactggggatttggatgga

SEQ ID NO: 5587888 - DNA, 25 bp, Homo sapien
agaagtcacagaggatctaggaata

SEQ ID NO: 5587889 - DNA, 25 bp, Homo sapien
gttcagctcagcagtcaccggttgt

SEQ ID NO: 5587890 - DNA, 25 bp, Homo sapien
agagatagaaaagccactggcattt

SEQ ID NO: 5587891 - DNA, 25 bp, Homo sapien
accggttgtggtacctcggatgtgt

SEQ ID NO: 5587892 - DNA, 25 bp, Homo sapien
gagagaacagtgtgagccttagttt

SEQ ID NO: 5587893 - DNA, 25 bp, Homo sapien
gcagacccagtagctcagagataga

SEQ ID NO: 5587894 - DNA, 25 bp, Homo sapien
gccaggcctcctgtaccaggggtta

SEQ ID NO: 5587895 - DNA, 25 bp, Homo sapien
gttcactgggaaggttagtgtgtga

SEQ ID NO: 5587896 - DNA, 25 bp, Homo sapien
gtgtgtgacatggtcagagaagtca

SEQ ID NO: 5587897 - DNA, 25 bp, Homo sapien
cctgctcagagcagaaggttcactg

SEQ ID NO: 5587898 - DNA, 25 bp, Homo sapien
aagtgcacttggctcagccagtttc

SEQ ID NO: 5587899 - DNA, 25 bp, Homo sapien
agtttctggcagacgacagaagcag

SEQ ID NO: 5587900 - DNA, 25 bp, Homo sapien
actggaggattccctggcctttgtg

SEQ ID NO: 5587901 - DNA, 25 bp, Homo sapien
catcgtcttgcaagcttccacctcc

SEQ ID NO: 5587902 - DNA, 25 bp, Homo sapien
tcatggagccttgtataggcctccc

SEQ ID NO: 5587903 - DNA, 25 bp, Homo sapien
gccggagttccctcgctccagggct

SEQ ID NO: 5587904 - DNA, 25 bp, Homo sapien
gagggatgccctgttactttctatc

SEQ ID NO: 5587905 - DNA, 25 bp, Homo sapien
ccatcggactgattacaagactatc

SEQ ID NO: 5587906 - DNA, 25 bp, Homo sapien
attgttttactcaggagggatgccc

SEQ ID NO: 5587907 - DNA, 25 bp, Homo sapien
atggcgtctgcaagtgcacttggct

SEQ ID NO: 5587908 - DNA, 25 bp, Homo sapien
gttccctcgctccagggctccaggg

SEQ ID NO: 5587909 - DNA, 25 bp, Homo sapien
tgcacagcatcacgccaggctggca

SEQ ID NO: 5587910 - DNA, 25 bp, Homo sapien
atattatgcaggacacagaaaaggc

SEQ ID NO: 5587911 - DNA, 25 bp, Homo sapien
ggggaagcaaaaactatgttggcac

SEQ ID NO: 5587912 - DNA, 25 bp, Homo sapien
tacaaagcaggaaatgatgtgaatt

SEQ ID NO: 5587913 - DNA, 25 bp, Homo sapien
acacagaaaaggccagtatgttcta

SEQ ID NO: 5587914 - DNA, 25 bp, Homo sapien
gagggttaaacatctacaaagcagg

SEQ ID NO: 5587915 - DNA, 25 bp, Homo sapien
ctaaaaaaggcctgaatactacatt

SEQ ID NO: 5587916 - DNA, 25 bp, Homo sapien
gttctacagccatgtgcaggaaatg

SEQ ID NO: 5587917 - DNA, 25 bp, Homo sapien
acttgactgcttagtctggggaagc

SEQ ID NO: 5587918 - DNA, 25 bp, Homo sapien
tcaggcaagcagtccatctaaccct

SEQ ID NO: 5587919 - DNA, 25 bp, Homo sapien
ctttcagacagactcaggcaagcag

SEQ ID NO: 5587920 - DNA, 25 bp, Homo sapien
ggtaccctaggccctcctgcatcgc

SEQ ID NO: 5587921 - DNA, 25 bp, Homo sapien
tgcatcgcatgcccagttcacgtct

SEQ ID NO: 5587922 - DNA, 25 bp, Homo sapien
gagatgccactcacctaccatgcgg

SEQ ID NO: 5587923 - DNA, 25 bp, Homo sapien
gatgatactttggaagtcagcaagt

SEQ ID NO: 5587924 - DNA, 25 bp, Homo sapien
tgcattcgaaagcaaccggacacat

SEQ ID NO: 5587925 - DNA, 25 bp, Homo sapien
ggctttgcataccttgggagatgcc

SEQ ID NO: 5587926 - DNA, 25 bp, Homo sapien
ttccctgaagaaagtgccaagggtc

SEQ ID NO: 5587927 - DNA, 25 bp, Homo sapien
ctcctgatcagtgctccagagctcc

SEQ ID NO: 5587928 - DNA, 25 bp, Homo sapien
catgcggatggctccatctggagtc

SEQ ID NO: 5587929 - DNA, 25 bp, Homo sapien
ccggacacatgcgacactcctgatc

SEQ ID NO: 5587930 - DNA, 25 bp, Homo sapien
gagtgagccactagtacttgtcgcc

SEQ ID NO: 5587931 - DNA, 25 bp, Homo sapien
gatctcctttaagagcagagacctc

SEQ ID NO: 5587932 - DNA, 25 bp, Homo sapien
cagtgtaatggcattgaaaggtggg

SEQ ID NO: 5587933 - DNA, 25 bp, Homo sapien
gccgttatctcaggtgtgggttagt

SEQ ID NO: 5587934 - DNA, 25 bp, Homo sapien
agagaataaattggctttgaagtac

SEQ ID NO: 5587935 - DNA, 25 bp, Homo sapien
aatggcattgaaaggtgggtccttt

SEQ ID NO: 5587936 - DNA, 25 bp, Homo sapien
acaaagacaagaataatgaagctaa

SEQ ID NO: 5587937 - DNA, 25 bp, Homo sapien
gaaattaaattgccagtgtaatggc

SEQ ID NO: 5587938 - DNA, 25 bp, Homo sapien
attaaagtagctctggaaggagagt

SEQ ID NO: 5587939 - DNA, 25 bp, Homo sapien
gaaggagagtttaggtaatccacac

SEQ ID NO: 5587940 - DNA, 25 bp, Homo sapien
aattttagagtgctttggttgaata

SEQ ID NO: 5587941 - DNA, 25 bp, Homo sapien
gtgggttagttatgtcagaagtggg

SEQ ID NO: 5587942 - DNA, 25 bp, Homo sapien
agaacaggattgctgacctaaggtc

SEQ ID NO: 5587943 - DNA, 25 bp, Homo sapien
gtcagcaacacgaactcttgaaagc

SEQ ID NO: 5587944 - DNA, 25 bp, Homo sapien
cctaaggtctgggaacctgctaagg

SEQ ID NO: 5587945 - DNA, 25 bp, Homo sapien
taaaaactggagtcagcaacacgaa

SEQ ID NO: 5587946 - DNA, 25 bp, Homo sapien
gacagcagagtttcccgattgggtt

SEQ ID NO: 5587947 - DNA, 25 bp, Homo sapien
catttttctgaaaaggggagcacat

SEQ ID NO: 5587948 - DNA, 25 bp, Homo sapien
caaaatgctgctcgtgatgtatgcc

SEQ ID NO: 5587949 - DNA, 25 bp, Homo sapien
ggctgtgggcttatgcactgagtat

SEQ ID NO: 5587950 - DNA, 25 bp, Homo sapien
tgcagaagatgagaataataatttt

SEQ ID NO: 5587951 - DNA, 25 bp, Homo sapien
ggaaattttaatggatcagtaggtc

SEQ ID NO: 5587952 - DNA, 25 bp, Homo sapien
gctattcagctaaaaacatgcctcg

SEQ ID NO: 5587953 - DNA, 25 bp, Homo sapien
cccaatctactacactcagagggaa

SEQ ID NO: 5587954 - DNA, 25 bp, Homo sapien
tagaataaatcataagggtacaagg

SEQ ID NO: 5587955 - DNA, 25 bp, Homo sapien
ctcctgtgtaaaatggtggaagctg

SEQ ID NO: 5587956 - DNA, 25 bp, Homo sapien
tccctggcttggatgacagccgtat

SEQ ID NO: 5587957 - DNA, 25 bp, Homo sapien
tctagaaggttctgagtccccaatc

SEQ ID NO: 5587958 - DNA, 25 bp, Homo sapien
attcttggccccatgacttggcttc

SEQ ID NO: 5587959 - DNA, 25 bp, Homo sapien
gtggaagctgtaacacctctatggt

SEQ ID NO: 5587960 - DNA, 25 bp, Homo sapien
cataagggtacaaggaaatttaata

SEQ ID NO: 5587961 - DNA, 25 bp, Homo sapien
tggcacccgggcactattcttggcc

SEQ ID NO: 5587962 - DNA, 25 bp, Homo sapien
atagatgtgcacttgaccatatttc

SEQ ID NO: 5587963 - DNA, 25 bp, Homo sapien
acctgaaggattaatgttagccaac

SEQ ID NO: 5587964 - DNA, 25 bp, Homo sapien
gcagatttgagaactgagtcacaaa

SEQ ID NO: 5587965 - DNA, 25 bp, Homo sapien
cttgggtctccaatcgcctagagga

SEQ ID NO: 5587966 - DNA, 25 bp, Homo sapien
atgtctcttttgggtgtggccgaaa

SEQ ID NO: 5587967 - DNA, 25 bp, Homo sapien
aagtttaaatctagagaggcataag

SEQ ID NO: 5587968 - DNA, 25 bp, Homo sapien
aagcccaggttccagaagtgtctgt

SEQ ID NO: 5587969 - DNA, 25 bp, Homo sapien
attgagaaggctgcacaacctccaa

SEQ ID NO: 5587970 - DNA, 25 bp, Homo sapien
ctgagtcacaaaaaagaactgagtg

SEQ ID NO: 5587971 - DNA, 25 bp, Homo sapien
agacccctgctaaagaatggaaccc

SEQ ID NO: 5587972 - DNA, 25 bp, Homo sapien
gaatggggagacccctgctaaagaa

SEQ ID NO: 5587973 - DNA, 25 bp, Homo sapien
caatcgcctagaggatgaggattga

SEQ ID NO: 5587974 - DNA, 25 bp, Homo sapien
ctggcccatgttactgattgcaatc

SEQ ID NO: 5587975 - DNA, 25 bp, Homo sapien
tctccataaaacttaattgaagagg

SEQ ID NO: 5587976 - DNA, 25 bp, Homo sapien
cctcttcaattaagttttatggaga

SEQ ID NO: 5587977 - DNA, 25 bp, Homo sapien
taactcggctttgcacctgagctcc

SEQ ID NO: 5587978 - DNA, 25 bp, Homo sapien
acagcaaatgagcccacccccataa

SEQ ID NO: 5587979 - DNA, 25 bp, Homo sapien
aacccattaggatataggaagtact

SEQ ID NO: 5587980 - DNA, 25 bp, Homo sapien
gaggctttgccatgaccagggaata

SEQ ID NO: 5587981 - DNA, 25 bp, Homo sapien
gaggctgtgcttcctactgggcatc

SEQ ID NO: 5587982 - DNA, 25 bp, Homo sapien
tctatggactatggaaaaagaatgg

SEQ ID NO: 5587983 - DNA, 25 bp, Homo sapien
ccaatctgtgggctaaccaagtgaa

SEQ ID NO: 5587984 - DNA, 25 bp, Homo sapien
ccagggaatatcaagtaactcggct

SEQ ID NO: 5587985 - DNA, 25 bp, Homo sapien
tctatagccaaagtccagggaatga

SEQ ID NO: 5587986 - DNA, 25 bp, Homo sapien
accaagtgaatatacagagcggcaa

SEQ ID NO: 5587987 - DNA, 25 bp, Homo sapien
agcagggtcacctagcagcctttgt

SEQ ID NO: 5587988 - DNA, 25 bp, Homo sapien
gcgtggtggtgttctgtcacatgct

SEQ ID NO: 5587989 - DNA, 25 bp, Homo sapien
taattctatgttgcagagagtgcct

SEQ ID NO: 5587990 - DNA, 25 bp, Homo sapien
cagagagtgcctgcctggacattta

SEQ ID NO: 5587991 - DNA, 25 bp, Homo sapien
aacggatggttctgagtcaaaacac

SEQ ID NO: 5587992 - DNA, 25 bp, Homo sapien
ttcagtgggactatcaatttgcaaa

SEQ ID NO: 5587993 - DNA, 25 bp, Homo sapien
aagaacaagtctagacactggttcc

SEQ ID NO: 5587994 - DNA, 25 bp, Homo sapien
tcacagctgagcataagctaagatt

SEQ ID NO: 5587995 - DNA, 25 bp, Homo sapien
acacacacgagcactctactctgtc

SEQ ID NO: 5587996 - DNA, 25 bp, Homo sapien
tgcaaagcatgagtagtagcttttc

SEQ ID NO: 5587997 - DNA, 25 bp, Homo sapien
ctgctcacgaaaacctcagagtgtt

SEQ ID NO: 5587998 - DNA, 25 bp, Homo sapien
taaaacctattgctgcagggagggt

SEQ ID NO: 5587999 - DNA, 25 bp, Homo sapien
cagaacatacacaagaagggctgga

SEQ ID NO: 5588000 - DNA, 25 bp, Homo sapien
aacaagaatgctgctaccatcctat

SEQ ID NO: 5588001 - DNA, 25 bp, Homo sapien
tcctctaaaagtagagcaaagggat

SEQ ID NO: 5588002 - DNA, 25 bp, Homo sapien
acaatcacagaggagagatataaag

SEQ ID NO: 5588003 - DNA, 25 bp, Homo sapien
aatgaagtcaatagaaaaggctagt

SEQ ID NO: 5588004 - DNA, 25 bp, Homo sapien
ttagttcaccttggccaacctctac

SEQ ID NO: 5588005 - DNA, 25 bp, Homo sapien
agttgaaaaaacggtatacaatcac

SEQ ID NO: 5588006 - DNA, 25 bp, Homo sapien
caaagttcgaggagctatatcatca

SEQ ID NO: 5588007 - DNA, 25 bp, Homo sapien
aaaggctagttttgcagtcagaatc

SEQ ID NO: 5588008 - DNA, 25 bp, Homo sapien
gcaaagggatatcagaacatacaca

SEQ ID NO: 5588009 - DNA, 25 bp, Homo sapien
taacaactcaaagaaattgcaggat

SEQ ID NO: 5588010 - DNA, 25 bp, Homo sapien
ttttaattgaaccatggaggcagaa

SEQ ID NO: 5588011 - DNA, 25 bp, Homo sapien
cagaggcaggaatctcagttttgag

SEQ ID NO: 5588012 - DNA, 25 bp, Homo sapien
ttgcatgaatggagttaagatggct

SEQ ID NO: 5588013 - DNA, 25 bp, Homo sapien
ggcagaagttggctaccaccactct

SEQ ID NO: 5588014 - DNA, 25 bp, Homo sapien
aagatggctcgtaatgtaatgaagt

SEQ ID NO: 5588015 - DNA, 25 bp, Homo sapien
ctattaactaggggacttgctttta

SEQ ID NO: 5588016 - DNA, 25 bp, Homo sapien
gcatctgaagaaacttgcaagccta

SEQ ID NO: 5588017 - DNA, 25 bp, Homo sapien
gatctgccacaagcaacatgttgcc

SEQ ID NO: 5588018 - DNA, 25 bp, Homo sapien
tgcaagcctagagaccccttacttc

SEQ ID NO: 5588019 - DNA, 25 bp, Homo sapien
gcctcaaatctgagagattggggtc

SEQ ID NO: 5588020 - DNA, 25 bp, Homo sapien
aaagtatacagagaattcctacgtc

SEQ ID NO: 5588021 - DNA, 25 bp, Homo sapien
cacagcccttcctccgtgcgccctg

SEQ ID NO: 5588022 - DNA, 25 bp, Homo sapien
caatagccacttcacacatggagag

SEQ ID NO: 5588023 - DNA, 25 bp, Homo sapien
gcacccagcacctcacagcccttcc

SEQ ID NO: 5588024 - DNA, 25 bp, Homo sapien
agccacttcacacatggagagatgc

SEQ ID NO: 5588025 - DNA, 25 bp, Homo sapien
cagttccctgcacccagcacctcac

SEQ ID NO: 5588026 - DNA, 25 bp, Homo sapien
gcggagaagcagtcagttccctgca

SEQ ID NO: 5588027 - DNA, 25 bp, Homo sapien
gacaatactgagaaagatataactc

SEQ ID NO: 5588028 - DNA, 25 bp, Homo sapien
acttcacacatggagagatgcaaga

SEQ ID NO: 5588029 - DNA, 25 bp, Homo sapien
aactcaagctaccaatagccacttc

SEQ ID NO: 5588030 - DNA, 25 bp, Homo sapien
gagaaagatataactcaagctacca

SEQ ID NO: 5588031 - DNA, 25 bp, Homo sapien
aaaatgtgataaagacaatactgag

SEQ ID NO: 5588032 - DNA, 25 bp, Homo sapien
aatgcaagcaagtgatgaaatggaa

SEQ ID NO: 5588033 - DNA, 25 bp, Homo sapien
aagctagccaaccaagttctatgcc

SEQ ID NO: 5588034 - DNA, 25 bp, Homo sapien
acagctctaagcttctgaaaccgct

SEQ ID NO: 5588035 - DNA, 25 bp, Homo sapien
tgaaatggaatactaaggaaggtgt

SEQ ID NO: 5588036 - DNA, 25 bp, Homo sapien
tcgcagctgtgtacactgagcctga

SEQ ID NO: 5588037 - DNA, 25 bp, Homo sapien
tgccaacctcctaagtctcacacac

SEQ ID NO: 5588038 - DNA, 25 bp, Homo sapien
aagaagccaaagcaaatatatagta

SEQ ID NO: 5588039 - DNA, 25 bp, Homo sapien
aaccgcaagctaagacgaaatgact

SEQ ID NO: 5588040 - DNA, 25 bp, Homo sapien
tgaaaccgcttgctcttctcgcagc

SEQ ID NO: 5588041 - DNA, 25 bp, Homo sapien
aaggaaggtgttgatacctgtagct

SEQ ID NO: 5588042 - DNA, 25 bp, Homo sapien
aaggctccaaagtaatgagaactgc

SEQ ID NO: 5588043 - DNA, 25 bp, Homo sapien
gcagcatgcctcatagtgatggtgc

SEQ ID NO: 5588044 - DNA, 25 bp, Homo sapien
gctgagtaccagcaacatggaagac

SEQ ID NO: 5588045 - DNA, 25 bp, Homo sapien
tggagctaacaaacacatgagtgcc

SEQ ID NO: 5588046 - DNA, 25 bp, Homo sapien
tgcaaacccgaagcactgaaagtga

SEQ ID NO: 5588047 - DNA, 25 bp, Homo sapien
agccatacccgaagatcacaagccc

SEQ ID NO: 5588048 - DNA, 25 bp, Homo sapien
ttctggcacctagaagctgcaaacc

SEQ ID NO: 5588049 - DNA, 25 bp, Homo sapien
gcccctccggatgtcagtggagcta

SEQ ID NO: 5588050 - DNA, 25 bp, Homo sapien
accaatcccagtgctagggagtcgc

SEQ ID NO: 5588051 - DNA, 25 bp, Homo sapien
ttctggaagcttgaattctggcacc

SEQ ID NO: 5588052 - DNA, 25 bp, Homo sapien
ctgaaagtgaatgcaaagacaggaa

SEQ ID NO: 5588053 - DNA, 25 bp, Homo sapien
tcagcatgtaggaagaaactggatt

SEQ ID NO: 5588054 - DNA, 25 bp, Homo sapien
atttacgaagcccctatgggtgtcg

SEQ ID NO: 5588055 - DNA, 25 bp, Homo sapien
aatatttacgaagcccctatgggtg

SEQ ID NO: 5588056 - DNA, 25 bp, Homo sapien
tccaatcctagttctgacactgacc

SEQ ID NO: 5588057 - DNA, 25 bp, Homo sapien
ggagttcaacactagtgtgggctac

SEQ ID NO: 5588058 - DNA, 25 bp, Homo sapien
aagggtgttctctcccattaaatgc

SEQ ID NO: 5588059 - DNA, 25 bp, Homo sapien
aatttggtgctgtgtacctatagtc

SEQ ID NO: 5588060 - DNA, 25 bp, Homo sapien
tctgacactgaccaatgaaataaac

SEQ ID NO: 5588061 - DNA, 25 bp, Homo sapien
caacactagtgtgggctacaaagca

SEQ ID NO: 5588062 - DNA, 25 bp, Homo sapien
atcttgtggcaagagattaacaatc

SEQ ID NO: 5588063 - DNA, 25 bp, Homo sapien
tgtaatcccatcaaggcaggaggat

SEQ ID NO: 5588064 - DNA, 25 bp, Homo sapien
tacagaaaatttggtgctgtgtacc

SEQ ID NO: 5588065 - DNA, 25 bp, Homo sapien
aggtcgattatctaaggtctcatgc

SEQ ID NO: 5588066 - DNA, 25 bp, Homo sapien
ctatgacatcctagaaacttgattc

SEQ ID NO: 5588067 - DNA, 25 bp, Homo sapien
tttaagactacttttggctgtcacc

SEQ ID NO: 5588068 - DNA, 25 bp, Homo sapien
cattttagcagcagcaaagggttaa

SEQ ID NO: 5588069 - DNA, 25 bp, Homo sapien
aagtagcgttttataggaatgcatg

SEQ ID NO: 5588070 - DNA, 25 bp, Homo sapien
attgtatcaattgccaaaagcatat

SEQ ID NO: 5588071 - DNA, 25 bp, Homo sapien
ttataggaatgcatgaagatttttg

SEQ ID NO: 5588072 - DNA, 25 bp, Homo sapien
gccaaaagcatataacaatttgctc

SEQ ID NO: 5588073 - DNA, 25 bp, Homo sapien
ctccaaaagtagaccttaaagtagc

SEQ ID NO: 5588074 - DNA, 25 bp, Homo sapien
actaaagcctgaatatgtgcacatt

SEQ ID NO: 5588075 - DNA, 25 bp, Homo sapien
tttcagtgctacatagtatacctat

SEQ ID NO: 5588076 - DNA, 25 bp, Homo sapien
gtcaaggcgctactcgtgtcccgtg

SEQ ID NO: 5588077 - DNA, 25 bp, Homo sapien
cacgggacacgagtagcgccttgac

SEQ ID NO: 5588078 - DNA, 25 bp, Homo sapien
actgggcagagaacatcaatatgta

SEQ ID NO: 5588079 - DNA, 25 bp, Homo sapien
accgcacccggcttgccaaatcatt

SEQ ID NO: 5588080 - DNA, 25 bp, Homo sapien
agcactctcaccatagcttccctgc

SEQ ID NO: 5588081 - DNA, 25 bp, Homo sapien
agcttccctgctcaatggcctatgg

SEQ ID NO: 5588082 - DNA, 25 bp, Homo sapien
tttgacatcaatctaccacacaccc

SEQ ID NO: 5588083 - DNA, 25 bp, Homo sapien
caccctgtgttctcactgggcagag

SEQ ID NO: 5588084 - DNA, 25 bp, Homo sapien
ccaaatcatttctatcagcactctc

SEQ ID NO: 5588085 - DNA, 25 bp, Homo sapien
cctgctcaatggcctatggtatttc

SEQ ID NO: 5588086 - DNA, 25 bp, Homo sapien
ggtatttcccatggtctgacacaga

SEQ ID NO: 5588087 - DNA, 25 bp, Homo sapien
tcaatatgtataagagaacccatac

SEQ ID NO: 5588088 - DNA, 25 bp, Homo sapien
tctgcctgataagactgatccaacc

SEQ ID NO: 5588089 - DNA, 25 bp, Homo sapien
aatgacaatacctgatcagaaggga

SEQ ID NO: 5588090 - DNA, 25 bp, Homo sapien
aagggatgaaagtacctggtactaa

SEQ ID NO: 5588091 - DNA, 25 bp, Homo sapien
attaaactggactggtaccacacag

SEQ ID NO: 5588092 - DNA, 25 bp, Homo sapien
agcttagggcgtccatgacccttct

SEQ ID NO: 5588093 - DNA, 25 bp, Homo sapien
ggacactcagggtcacacagaccct

SEQ ID NO: 5588094 - DNA, 25 bp, Homo sapien
gagctggtttctggaaccaaggccc

SEQ ID NO: 5588095 - DNA, 25 bp, Homo sapien
gatatgaaagcactggcaggctcta

SEQ ID NO: 5588096 - DNA, 25 bp, Homo sapien
gcattttaagcaacacccatcattt

SEQ ID NO: 5588097 - DNA, 25 bp, Homo sapien
ttaactgctatgaagatggacactc

SEQ ID NO: 5588098 - DNA, 25 bp, Homo sapien
aaacaagatgctcagcttagggcgt

SEQ ID NO: 5588099 - DNA, 25 bp, Homo sapien
gtacctggtactaaacaagatgctc

SEQ ID NO: 5588100 - DNA, 25 bp, Homo sapien
tttcatggttgtttgatggcagctg

SEQ ID NO: 5588101 - DNA, 25 bp, Homo sapien
tggggtaaggtcctaatctctttga

SEQ ID NO: 5588102 - DNA, 25 bp, Homo sapien
aaactaaggtactgctaaagaagaa

SEQ ID NO: 5588103 - DNA, 25 bp, Homo sapien
aacaatgccatatcagggacccagg

SEQ ID NO: 5588104 - DNA, 25 bp, Homo sapien
ccactatcagatcaaactaaggtac

SEQ ID NO: 5588105 - DNA, 25 bp, Homo sapien
gtagctaccacaatagagagacaga

SEQ ID NO: 5588106 - DNA, 25 bp, Homo sapien
aatatcacatatggttagtagctac

SEQ ID NO: 5588107 - DNA, 25 bp, Homo sapien
actgcaaaaagttctgcctcgtact

SEQ ID NO: 5588108 - DNA, 25 bp, Homo sapien
atggcagctgcacctttaggcatgc

SEQ ID NO: 5588109 - DNA, 25 bp, Homo sapien
gaaagaggcaatgactgttaccaca

SEQ ID NO: 5588110 - DNA, 25 bp, Homo sapien
tggggagtttggcaattgctcatct

SEQ ID NO: 5588111 - DNA, 25 bp, Homo sapien
aagagttgagcaacacaggcatctt

SEQ ID NO: 5588112 - DNA, 25 bp, Homo sapien
gaagcgatgtatggtttgacccagt

SEQ ID NO: 5588113 - DNA, 25 bp, Homo sapien
gggtctttatccacagagcagagga

SEQ ID NO: 5588114 - DNA, 25 bp, Homo sapien
ttgacccagtggaggactttgttaa

SEQ ID NO: 5588115 - DNA, 25 bp, Homo sapien
aagggcattctcaaaacgtttccgc

SEQ ID NO: 5588116 - DNA, 25 bp, Homo sapien
cacaggcatctttatctggggtctt

SEQ ID NO: 5588117 - DNA, 25 bp, Homo sapien
catcactacagagacgaagcgatgt

SEQ ID NO: 5588118 - DNA, 25 bp, Homo sapien
gaggacaggaagtcatcactacaga

SEQ ID NO: 5588119 - DNA, 25 bp, Homo sapien
ctccagtatacctcagagatcctaa

SEQ ID NO: 5588120 - DNA, 25 bp, Homo sapien
aacgtttccgcacaagcagaccatc

SEQ ID NO: 5588121 - DNA, 25 bp, Homo sapien
agagtatttacaagagttgagcaac

SEQ ID NO: 5588122 - DNA, 25 bp, Homo sapien
agagaataattctgcagtatgtcac

SEQ ID NO: 5588123 - DNA, 25 bp, Homo sapien
taccaatccgatccttatagagaat

SEQ ID NO: 5588124 - DNA, 25 bp, Homo sapien
acagaaggacaatcaggcactttga

SEQ ID NO: 5588125 - DNA, 25 bp, Homo sapien
caggcactttgatttggaccttctc

SEQ ID NO: 5588126 - DNA, 25 bp, Homo sapien
atgcatcactggctaaatggctctc

SEQ ID NO: 5588127 - DNA, 25 bp, Homo sapien
agtatgtcacacagcagagacagca

SEQ ID NO: 5588128 - DNA, 25 bp, Homo sapien
acatgtagttaagtctgggcaggtt

SEQ ID NO: 5588129 - DNA, 25 bp, Homo sapien
agttacatgtagttaagtctgggca

SEQ ID NO: 5588130 - DNA, 25 bp, Homo sapien
ccatagctgaattttcaaggacaga

SEQ ID NO: 5588131 - DNA, 25 bp, Homo sapien
tgtgccaggcccatagctgaatttt

SEQ ID NO: 5588132 - DNA, 25 bp, Homo sapien
agtctgggcaggtttgaacagttaa

SEQ ID NO: 5588133 - DNA, 25 bp, Homo sapien
cattaaccgccagaccaagtccggc

SEQ ID NO: 5588134 - DNA, 25 bp, Homo sapien
ccgctgcactatgcggcctggcagg

SEQ ID NO: 5588135 - DNA, 25 bp, Homo sapien
agtctaacccgtgcatggtggacaa

SEQ ID NO: 5588136 - DNA, 25 bp, Homo sapien
ggacatcaaggacttacaaagggca

SEQ ID NO: 5588137 - DNA, 25 bp, Homo sapien
gaccccaacggcaccagccctttgc

SEQ ID NO: 5588138 - DNA, 25 bp, Homo sapien
cactatgatgtgtctgagatgctgc

SEQ ID NO: 5588139 - DNA, 25 bp, Homo sapien
gctcggccgtgaacatcccgtctga

SEQ ID NO: 5588140 - DNA, 25 bp, Homo sapien
tgcacctcgcagctaaaaacggcca

SEQ ID NO: 5588141 - DNA, 25 bp, Homo sapien
gcggcccagcatggtcactatgatg

SEQ ID NO: 5588142 - DNA, 25 bp, Homo sapien
caagccggcatcgacattaaccgcc

SEQ ID NO: 5588143 - DNA, 25 bp, Homo sapien
cctcagcagcaatatgtgtgcggcg

SEQ ID NO: 5588144 - DNA, 25 bp, Homo sapien
cgggaggtatacaacaggcgagaac

SEQ ID NO: 5588145 - DNA, 25 bp, Homo sapien
gttctcgcctgttgtatacctcccg

SEQ ID NO: 5588146 - DNA, 25 bp, Homo sapien
gatacatagacaggtctggtgacct

SEQ ID NO: 5588147 - DNA, 25 bp, Homo sapien
ccaaggtacgatatatgaagggctg

SEQ ID NO: 5588148 - DNA, 25 bp, Homo sapien
aatccaggaagggcctgacatctta

SEQ ID NO: 5588149 - DNA, 25 bp, Homo sapien
acacggaaaactgaagactcgttgc

SEQ ID NO: 5588150 - DNA, 25 bp, Homo sapien
actccaaaccttccgggtggctgac

SEQ ID NO: 5588151 - DNA, 25 bp, Homo sapien
ggtggcatcaacagtggctgtactt

SEQ ID NO: 5588152 - DNA, 25 bp, Homo sapien
ccactgaggacaacatagctctgcc

SEQ ID NO: 5588153 - DNA, 25 bp, Homo sapien
tacaaggacaagctcaagaggctta

SEQ ID NO: 5588154 - DNA, 25 bp, Homo sapien
gggcagaatataagcagtgactgga

SEQ ID NO: 5588155 - DNA, 25 bp, Homo sapien
aggaaggagatatccagaacgttct

SEQ ID NO: 5588156 - DNA, 25 bp, Homo sapien
acatcagaacgtccttggtggcatc

SEQ ID NO: 5588157 - DNA, 25 bp, Homo sapien
agaacaagaaccactccacaagatt

SEQ ID NO: 5588158 - DNA, 25 bp, Homo sapien
atatacagatggaggaatcctggat

SEQ ID NO: 5588159 - DNA, 25 bp, Homo sapien
gattgctgtgtttgaagaacaagaa

SEQ ID NO: 5588160 - DNA, 25 bp, Homo sapien
gatgatgtcttggcagatgttgttg

SEQ ID NO: 5588161 - DNA, 25 bp, Homo sapien
gaagataaagacaagctgattgctg

SEQ ID NO: 5588162 - DNA, 25 bp, Homo sapien
cttagaatatacagatggaggaatc

SEQ ID NO: 5588163 - DNA, 25 bp, Homo sapien
accactccacaagattgagagcccc

SEQ ID NO: 5588164 - DNA, 25 bp, Homo sapien
gtcctggttactgggtgaagattca

SEQ ID NO: 5588165 - DNA, 25 bp, Homo sapien
tcacttagaatatacagatggagga

SEQ ID NO: 5588166 - DNA, 25 bp, Homo sapien
tccagatgatgtcttggcagatgtt

SEQ ID NO: 5588167 - DNA, 25 bp, Homo sapien
aagctgattgctgtgtttgaagaac

SEQ ID NO: 5588168 - DNA, 25 bp, Homo sapien
ttcgttctcttgaaggtgggcccgg

SEQ ID NO: 5588169 - DNA, 25 bp, Homo sapien
ccgggcccaccttcaagagaacgaa

SEQ ID NO: 5588170 - DNA, 25 bp, Homo sapien
actgagcgtgagacactttactgct

SEQ ID NO: 5588171 - DNA, 25 bp, Homo sapien
atagaaactgcaggttcaaatccca

SEQ ID NO: 5588172 - DNA, 25 bp, Homo sapien
gctgcagagtccaaaggatatacac

SEQ ID NO: 5588173 - DNA, 25 bp, Homo sapien
agcagggtcaactgagagtattacg

SEQ ID NO: 5588174 - DNA, 25 bp, Homo sapien
tatacacggaggcttcaagatgtca

SEQ ID NO: 5588175 - DNA, 25 bp, Homo sapien
tagttgataaggtgttggacttcac

SEQ ID NO: 5588176 - DNA, 25 bp, Homo sapien
tataacaaagaaacagaactatcac

SEQ ID NO: 5588177 - DNA, 25 bp, Homo sapien
atttaagagggccttccagactgtc

SEQ ID NO: 5588178 - DNA, 25 bp, Homo sapien
gagggaaagcctagttgataaggtg

SEQ ID NO: 5588179 - DNA, 25 bp, Homo sapien
ctgctagaaaaactgagcgtgagac

SEQ ID NO: 5588180 - DNA, 25 bp, Homo sapien
gtttatgaggagacataaaagggga

SEQ ID NO: 5588181 - DNA, 25 bp, Homo sapien
cactagaacaaaaagcccttgcccc

SEQ ID NO: 5588182 - DNA, 25 bp, Homo sapien
tggaatgtcccagaagtttacctta

SEQ ID NO: 5588183 - DNA, 25 bp, Homo sapien
aaggagcccatgctattagaccact

SEQ ID NO: 5588184 - DNA, 25 bp, Homo sapien
cttaggattggatgatggttagtaa

SEQ ID NO: 5588185 - DNA, 25 bp, Homo sapien
ctcacagggaacgttcctggctggg

SEQ ID NO: 5588186 - DNA, 25 bp, Homo sapien
tcagaggtctatctcaaggagccca

SEQ ID NO: 5588187 - DNA, 25 bp, Homo sapien
atgtaccccagattcgggggctcac

SEQ ID NO: 5588188 - DNA, 25 bp, Homo sapien
ttactggttgagaagcactagtttc

SEQ ID NO: 5588189 - DNA, 25 bp, Homo sapien
tgcttagagtttcatggaatgtccc

SEQ ID NO: 5588190 - DNA, 25 bp, Homo sapien
agaaaaaagaaactccacttgctgc

SEQ ID NO: 5588191 - DNA, 25 bp, Homo sapien
aaaaccctgaggcataaagggatga

SEQ ID NO: 5588192 - DNA, 25 bp, Homo sapien
tcctagggcatgacatagactggac

SEQ ID NO: 5588193 - DNA, 25 bp, Homo sapien
tctgctcaatactcaaagggggctg

SEQ ID NO: 5588194 - DNA, 25 bp, Homo sapien
tttacttgtgaatctctaagcccac

SEQ ID NO: 5588195 - DNA, 25 bp, Homo sapien
ttcaggaaagactgagtttggaaca

SEQ ID NO: 5588196 - DNA, 25 bp, Homo sapien
agggagaacgctgtttcagaagata

SEQ ID NO: 5588197 - DNA, 25 bp, Homo sapien
actgaagtggagactacaacaactt

SEQ ID NO: 5588198 - DNA, 25 bp, Homo sapien
agactgagtttggaacaccagggct

SEQ ID NO: 5588199 - DNA, 25 bp, Homo sapien
tataagagtgatacaactgggaagg

SEQ ID NO: 5588200 - DNA, 25 bp, Homo sapien
gaacagtttgtctcctagggcatga

SEQ ID NO: 5588201 - DNA, 25 bp, Homo sapien
gggcatgacatagactggacagtct

SEQ ID NO: 5588202 - DNA, 25 bp, Homo sapien
gctgggaggaacagtttgtctccta

SEQ ID NO: 5588203 - DNA, 25 bp, Homo sapien
taggcaaacctggcaagcttgatga

SEQ ID NO: 5588204 - DNA, 25 bp, Homo sapien
caaagtcaaataaaataggcaaacc

SEQ ID NO: 5588205 - DNA, 25 bp, Homo sapien
tggcaagcttgatgaaaagacaaag

SEQ ID NO: 5588206 - DNA, 25 bp, Homo sapien
tagaaagttgagagcaaatgtcagt

SEQ ID NO: 5588207 - DNA, 25 bp, Homo sapien
tgcaattaaatgagaaatcaacatc

SEQ ID NO: 5588208 - DNA, 25 bp, Homo sapien
agcaaatgtcagtaaaacggaaaac

SEQ ID NO: 5588209 - DNA, 25 bp, Homo sapien
cataatggaaattagaagatagcta

SEQ ID NO: 5588210 - DNA, 25 bp, Homo sapien
ggagtcactaaaacctactgctggc

SEQ ID NO: 5588211 - DNA, 25 bp, Homo sapien
tactgctggctgttacaaagtcaaa

SEQ ID NO: 5588212 - DNA, 25 bp, Homo sapien
atgggatgtaataaagtggttgatg

SEQ ID NO: 5588213 - DNA, 25 bp, Homo sapien
ccaatttaagaagttagagaaagta

SEQ ID NO: 5588214 - DNA, 25 bp, Homo sapien
ggcgggagcgctgcgggtgcgaccg

SEQ ID NO: 5588215 - DNA, 25 bp, Homo sapien
cggtcgcacccgcagcgctcccgcc

SEQ ID NO: 5588216 - DNA, 25 bp, Homo sapien
cagtatatgggttagacaggaaaac

SEQ ID NO: 5588217 - DNA, 25 bp, Homo sapien
gggcaataaagcatcatggaaggtt

SEQ ID NO: 5588218 - DNA, 25 bp, Homo sapien
ttttttcgaatgatggctgcacaac

SEQ ID NO: 5588219 - DNA, 25 bp, Homo sapien
agtgggtgactgtatggtatgtaca

SEQ ID NO: 5588220 - DNA, 25 bp, Homo sapien
gtccccattcatcaggggcataacc

SEQ ID NO: 5588221 - DNA, 25 bp, Homo sapien
ataatcttaagggcaataaagcatc

SEQ ID NO: 5588222 - DNA, 25 bp, Homo sapien
gggaattatgcagtatatgggttag

SEQ ID NO: 5588223 - DNA, 25 bp, Homo sapien
ctaggaagaacgagattctatgtat

SEQ ID NO: 5588224 - DNA, 25 bp, Homo sapien
accacacatctgagctttagtcccc

SEQ ID NO: 5588225 - DNA, 25 bp, Homo sapien
gacaggaaaacattctaggaagaac

SEQ ID NO: 5588226 - DNA, 25 bp, Homo sapien
gggcataacctgtggagaaaaatca

SEQ ID NO: 5588227 - DNA, 25 bp, Homo sapien
cgggaggaatttaatctagagttta

SEQ ID NO: 5588228 - DNA, 25 bp, Homo sapien
cgggaggaatttaatctagagtcta

SEQ ID NO: 5588229 - DNA, 25 bp, Homo sapien
aaaccacctgtgcaaaaatgataac

SEQ ID NO: 5588230 - DNA, 25 bp, Homo sapien
gcgggaggaatttaatctagagtct

SEQ ID NO: 5588231 - DNA, 25 bp, Homo sapien
ggctgattccaccgagtcccgggca

SEQ ID NO: 5588232 - DNA, 25 bp, Homo sapien
atctagagtctaacttgcgtggctg

SEQ ID NO: 5588233 - DNA, 25 bp, Homo sapien
ggtggctgattccaccgagtcccgg

SEQ ID NO: 5588234 - DNA, 25 bp, Homo sapien
ctgattccaccgagtcccgggcatg

SEQ ID NO: 5588235 - DNA, 25 bp, Homo sapien
catcaagctgctgaaaccacctgtg

SEQ ID NO: 5588236 - DNA, 25 bp, Homo sapien
caagctgctgaaaccacctgtgcaa

SEQ ID NO: 5588237 - DNA, 25 bp, Homo sapien
tttaatctagagtctaacttgcgtg

SEQ ID NO: 5588238 - DNA, 25 bp, Homo sapien
aattggggttcatacctgggcaatc

SEQ ID NO: 5588239 - DNA, 25 bp, Homo sapien
tatatcaaggtgaaaactgagattt

SEQ ID NO: 5588240 - DNA, 25 bp, Homo sapien
ggtgaaaactgagatttgaagaggt

SEQ ID NO: 5588241 - DNA, 25 bp, Homo sapien
accaaatacactcagcgatagaatt

SEQ ID NO: 5588242 - DNA, 25 bp, Homo sapien
caaagaaacagaatcccatctatat

SEQ ID NO: 5588243 - DNA, 25 bp, Homo sapien
agggagtatgaggcttacatatgag

SEQ ID NO: 5588244 - DNA, 25 bp, Homo sapien
ttgaagaggtaatcttgctcacatt

SEQ ID NO: 5588245 - DNA, 25 bp, Homo sapien
tagtgcttagctgcctatcaggtat

SEQ ID NO: 5588246 - DNA, 25 bp, Homo sapien
ttactaccatagggagtatgaggct

SEQ ID NO: 5588247 - DNA, 25 bp, Homo sapien
taccacctttactctgcccagcaac

SEQ ID NO: 5588248 - DNA, 25 bp, Homo sapien
tcagcgatagaatttaagtagaaac

SEQ ID NO: 5588249 - DNA, 25 bp, Homo sapien
gcagattcagttcaccatgagaaaa

SEQ ID NO: 5588250 - DNA, 25 bp, Homo sapien
gcagtcattgtagtagtggtagatc

SEQ ID NO: 5588251 - DNA, 25 bp, Homo sapien
gaaggctcctttaagatagaagaat

SEQ ID NO: 5588252 - DNA, 25 bp, Homo sapien
cagaatggggaaagttccactgaag

SEQ ID NO: 5588253 - DNA, 25 bp, Homo sapien
gcataagagtataaaatcagatcgc

SEQ ID NO: 5588254 - DNA, 25 bp, Homo sapien
ggggaaagttccactgaagcagatt

SEQ ID NO: 5588255 - DNA, 25 bp, Homo sapien
aaacattagcagccctgtagcagtc

SEQ ID NO: 5588256 - DNA, 25 bp, Homo sapien
cctgtatgtgtacccactgaatcaa

SEQ ID NO: 5588257 - DNA, 25 bp, Homo sapien
ttgatgtatacaatagcctagctgc

SEQ ID NO: 5588258 - DNA, 25 bp, Homo sapien
aagtacttagacaatattcagaaac

SEQ ID NO: 5588259 - DNA, 25 bp, Homo sapien
gtggtagatccactgcataagagta

SEQ ID NO: 5588260 - DNA, 25 bp, Homo sapien
gagtaatagaagtttcgcagcccct

SEQ ID NO: 5588261 - DNA, 25 bp, Homo sapien
gagtaccaagcacagaagtcctctc

SEQ ID NO: 5588262 - DNA, 25 bp, Homo sapien
ttgaacttgaatcccaggctgcacc

SEQ ID NO: 5588263 - DNA, 25 bp, Homo sapien
aagtcccgtggaaaacctcaagcta

SEQ ID NO: 5588264 - DNA, 25 bp, Homo sapien
ggactacagaaccacagggtcactt

SEQ ID NO: 5588265 - DNA, 25 bp, Homo sapien
gtgacctgtcacatcgccaagggct

SEQ ID NO: 5588266 - DNA, 25 bp, Homo sapien
ctcaagctaggaactgatataaccc

SEQ ID NO: 5588267 - DNA, 25 bp, Homo sapien
gagagagagctagagttctcttctc

SEQ ID NO: 5588268 - DNA, 25 bp, Homo sapien
ctcacctcccctgcagggcgtgcta

SEQ ID NO: 5588269 - DNA, 25 bp, Homo sapien
aaggaacaggtgcagtgtaatttgc

SEQ ID NO: 5588270 - DNA, 25 bp, Homo sapien
agggcgtgctatgccacagcccact

SEQ ID NO: 5588271 - DNA, 25 bp, Homo sapien
aactgctgattcctttggggcactg

SEQ ID NO: 5588272 - DNA, 25 bp, Homo sapien
gttagggcatgaacagaatgatttt

SEQ ID NO: 5588273 - DNA, 25 bp, Homo sapien
tcgctttaatcctgaggcaggtgtt

SEQ ID NO: 5588274 - DNA, 25 bp, Homo sapien
ttggggcactgtcctgattagtgtc

SEQ ID NO: 5588275 - DNA, 25 bp, Homo sapien
ttctgaaaacaggttatgatccatt

SEQ ID NO: 5588276 - DNA, 25 bp, Homo sapien
ccagggccacctcatgggtggcagg

SEQ ID NO: 5588277 - DNA, 25 bp, Homo sapien
aagtcatgttgctctgacaggggct

SEQ ID NO: 5588278 - DNA, 25 bp, Homo sapien
ttgtgtctccggatgaggacaccca

SEQ ID NO: 5588279 - DNA, 25 bp, Homo sapien
acatggatggtccgccactgcttca

SEQ ID NO: 5588280 - DNA, 25 bp, Homo sapien
ctgagacggtctgaaatacagctcc

SEQ ID NO: 5588281 - DNA, 25 bp, Homo sapien
tcataaattgacatggatggtccgc

SEQ ID NO: 5588282 - DNA, 25 bp, Homo sapien
acaaggacatagtaagttcacttat

SEQ ID NO: 5588283 - DNA, 25 bp, Homo sapien
ataagtgaacttactatgtccttgt

SEQ ID NO: 5588284 - DNA, 25 bp, Homo sapien
tttggagatatgatgctatggcatt

SEQ ID NO: 5588285 - DNA, 25 bp, Homo sapien
atgcattactagatgctgggggaaa

SEQ ID NO: 5588286 - DNA, 25 bp, Homo sapien
ggttaagcagcatcttagagaacag

SEQ ID NO: 5588287 - DNA, 25 bp, Homo sapien
tgctgggggaaaattatacattgaa

SEQ ID NO: 5588288 - DNA, 25 bp, Homo sapien
taccctgtgatgtacaaatgcaaat

SEQ ID NO: 5588289 - DNA, 25 bp, Homo sapien
aacagaacactcttcctcagaatgg

SEQ ID NO: 5588290 - DNA, 25 bp, Homo sapien
ttatttggtaatcagaagaacatac

SEQ ID NO: 5588291 - DNA, 25 bp, Homo sapien
ataacattggttaagcagcatctta

SEQ ID NO: 5588292 - DNA, 25 bp, Homo sapien
cttgtatttggagatatgatgctat

SEQ ID NO: 5588293 - DNA, 25 bp, Homo sapien
ggtaatcagaagaacatacaagtac

SEQ ID NO: 5588294 - DNA, 25 bp, Homo sapien
acattgaaggactgtcaggctcatc

SEQ ID NO: 5588295 - DNA, 25 bp, Homo sapien
attcccttggggttagtaagtggca

SEQ ID NO: 5588296 - DNA, 25 bp, Homo sapien
ggaagtctcagtaatatattggctg

SEQ ID NO: 5588297 - DNA, 25 bp, Homo sapien
gtgccctcctgggaccctctaccac

SEQ ID NO: 5588298 - DNA, 25 bp, Homo sapien
atattggctgattcccttggggtta

SEQ ID NO: 5588299 - DNA, 25 bp, Homo sapien
cttctgtaagtgggtttcctctgtc

SEQ ID NO: 5588300 - DNA, 25 bp, Homo sapien
tgttagaagttaaagcacagagggc

SEQ ID NO: 5588301 - DNA, 25 bp, Homo sapien
cggagcctgatgcttagaacgtgga

SEQ ID NO: 5588302 - DNA, 25 bp, Homo sapien
tcctctgtcatcagcacggagcctg

SEQ ID NO: 5588303 - DNA, 25 bp, Homo sapien
tagaacgtggaaatgttagaagtta

SEQ ID NO: 5588304 - DNA, 25 bp, Homo sapien
cacaccatcctgtttgggccacttc

SEQ ID NO: 5588305 - DNA, 25 bp, Homo sapien
taggtgacagttcagtgccctcctg

SEQ ID NO: 5588306 - DNA, 25 bp, Homo sapien
ctgcaaccctggttgggtacccctg

SEQ ID NO: 5588307 - DNA, 25 bp, Homo sapien
acccaaatgactcccaggggtggct

SEQ ID NO: 5588308 - DNA, 25 bp, Homo sapien
ttgtcatgatccctggcacctggtc

SEQ ID NO: 5588309 - DNA, 25 bp, Homo sapien
gattcctgtggctgcaaccctggtt

SEQ ID NO: 5588310 - DNA, 25 bp, Homo sapien
tcccaaatggtcacaggagtgggga

SEQ ID NO: 5588311 - DNA, 25 bp, Homo sapien
attattactaaaggcaaagaaagaa

SEQ ID NO: 5588312 - DNA, 25 bp, Homo sapien
cagggcagagtggatctttaatgcc

SEQ ID NO: 5588313 - DNA, 25 bp, Homo sapien
tcagattaagagcaagtgtgaagag

SEQ ID NO: 5588314 - DNA, 25 bp, Homo sapien
tgtgaagagacattagagtacagac

SEQ ID NO: 5588315 - DNA, 25 bp, Homo sapien
gcttcaatgaggacacgtggtttca

SEQ ID NO: 5588316 - DNA, 25 bp, Homo sapien
gggacaaggacacccaaatgactcc

SEQ ID NO: 5588317 - DNA, 25 bp, Homo sapien
gcaaacctcttgagaacagggtgta

SEQ ID NO: 5588318 - DNA, 25 bp, Homo sapien
agggcaagtcccacctattcaggcc

SEQ ID NO: 5588319 - DNA, 25 bp, Homo sapien
catgcttcccaagggaaccctggtg

SEQ ID NO: 5588320 - DNA, 25 bp, Homo sapien
ccagtgaggcaattatgcaccccct

SEQ ID NO: 5588321 - DNA, 25 bp, Homo sapien
tcaggcccagctccagtgccatcca

SEQ ID NO: 5588322 - DNA, 25 bp, Homo sapien
acctccagaaggtcacgacactgtg

SEQ ID NO: 5588323 - DNA, 25 bp, Homo sapien
gttcactacgagacctccagaaggt

SEQ ID NO: 5588324 - DNA, 25 bp, Homo sapien
tcctaatgttattgggggatgggac

SEQ ID NO: 5588325 - DNA, 25 bp, Homo sapien
aggtcacgacactgtggcctcagtt

SEQ ID NO: 5588326 - DNA, 25 bp, Homo sapien
tggcactgccctcaaaagacaactc

SEQ ID NO: 5588327 - DNA, 25 bp, Homo sapien
tgtctcttagctgaaacctgaattg

SEQ ID NO: 5588328 - DNA, 25 bp, Homo sapien
gctgctgcaggagataatccacttt

SEQ ID NO: 5588329 - DNA, 25 bp, Homo sapien
atctcccgaggtctaagtaaacaaa

SEQ ID NO: 5588330 - DNA, 25 bp, Homo sapien
aggggcaagttgttgcgttactaga

SEQ ID NO: 5588331 - DNA, 25 bp, Homo sapien
acaccagcccttagaactcacactc

SEQ ID NO: 5588332 - DNA, 25 bp, Homo sapien
cttcctgaaactgtcatgggctatc

SEQ ID NO: 5588333 - DNA, 25 bp, Homo sapien
tccatgtatttaaagaggtcgatta

SEQ ID NO: 5588334 - DNA, 25 bp, Homo sapien
catgggctatctaaaccacaccagc

SEQ ID NO: 5588335 - DNA, 25 bp, Homo sapien
agaaacaatcagaagccagaactca

SEQ ID NO: 5588336 - DNA, 25 bp, Homo sapien
cagagtactttcccaaggagttgac

SEQ ID NO: 5588337 - DNA, 25 bp, Homo sapien
gttcagaggtggccccttttgcttg

SEQ ID NO: 5588338 - DNA, 25 bp, Homo sapien
ttcaactgccaactggatttgctgc

SEQ ID NO: 5588339 - DNA, 25 bp, Homo sapien
gtgaaataagtaggccactggatag

SEQ ID NO: 5588340 - DNA, 25 bp, Homo sapien
gaatcctaagaaataagcagtccct

SEQ ID NO: 5588341 - DNA, 25 bp, Homo sapien
ttatagaggtttgtgttatggcaga

SEQ ID NO: 5588342 - DNA, 25 bp, Homo sapien
atagcccacagtttatgaggaatcc

SEQ ID NO: 5588343 - DNA, 25 bp, Homo sapien
actggatagactggaattctgagat

SEQ ID NO: 5588344 - DNA, 25 bp, Homo sapien
cccagccacaggtacgtctctttaa

SEQ ID NO: 5588345 - DNA, 25 bp, Homo sapien
ttaatggttagcaacgtcttctgac

SEQ ID NO: 5588346 - DNA, 25 bp, Homo sapien
ggagtgccgtgctgcaatcataact

SEQ ID NO: 5588347 - DNA, 25 bp, Homo sapien
tctctgcaacagaattcactaattt

SEQ ID NO: 5588348 - DNA, 25 bp, Homo sapien
cattctgactctaaagcagttcctc

SEQ ID NO: 5588349 - DNA, 25 bp, Homo sapien
tggaactgtgtgaaataagtaggcc

SEQ ID NO: 5588350 - DNA, 25 bp, Homo sapien
gaaatgggataatctaagggataga

SEQ ID NO: 5588351 - DNA, 25 bp, Homo sapien
agtgatgctccagggctaaataaga

SEQ ID NO: 5588352 - DNA, 25 bp, Homo sapien
tcaaaccagtaggacactgtcactg

SEQ ID NO: 5588353 - DNA, 25 bp, Homo sapien
tcgtttcacgagtaggagaagaaaa

SEQ ID NO: 5588354 - DNA, 25 bp, Homo sapien
tcctgtggaatacttgacaagggat

SEQ ID NO: 5588355 - DNA, 25 bp, Homo sapien
taatgtaatatgcaactgaggcgtt

SEQ ID NO: 5588356 - DNA, 25 bp, Homo sapien
taagctccattgaggcaaggcacta

SEQ ID NO: 5588357 - DNA, 25 bp, Homo sapien
agggatagagtttaatccacaggtc

SEQ ID NO: 5588358 - DNA, 25 bp, Homo sapien
ggtcagtagaccaaagcccaaagac

SEQ ID NO: 5588359 - DNA, 25 bp, Homo sapien
gtcactggtgatgagaatgttgtta

SEQ ID NO: 5588360 - DNA, 25 bp, Homo sapien
aatgtatcaaggaagaagcctatca

SEQ ID NO: 5588361 - DNA, 25 bp, Homo sapien
tgccacataacaccagtaagaaatc

SEQ ID NO: 5588362 - DNA, 25 bp, Homo sapien
taaaggaaagtggaatacatatgat

SEQ ID NO: 5588363 - DNA, 25 bp, Homo sapien
tattgtcatatcacagggctatcct

SEQ ID NO: 5588364 - DNA, 25 bp, Homo sapien
ggtgaggaatatgcagaatctgcca

SEQ ID NO: 5588365 - DNA, 25 bp, Homo sapien
gccagtacaatgtaaccccgtctct

SEQ ID NO: 5588366 - DNA, 25 bp, Homo sapien
gacaaagagtaaagagcaaaaaatg

SEQ ID NO: 5588367 - DNA, 25 bp, Homo sapien
atggagtcaacattgtatcatgcca

SEQ ID NO: 5588368 - DNA, 25 bp, Homo sapien
attaataaagactcatgggccggtc

SEQ ID NO: 5588369 - DNA, 25 bp, Homo sapien
tcagaaataacgacaaagagtaaag

SEQ ID NO: 5588370 - DNA, 25 bp, Homo sapien
cttgatcaggagactaaatgctttc

SEQ ID NO: 5588371 - DNA, 25 bp, Homo sapien
gagcaaaaaatgggaatgattcaca

SEQ ID NO: 5588372 - DNA, 25 bp, Homo sapien
gtggaaatccaaagaagtatgactg

SEQ ID NO: 5588373 - DNA, 25 bp, Homo sapien
gggctttcaaagagggtctgttgtg

SEQ ID NO: 5588374 - DNA, 25 bp, Homo sapien
ctaacgcaatccccggtgctgagca

SEQ ID NO: 5588375 - DNA, 25 bp, Homo sapien
gccccactagagcaaaagtttggtg

SEQ ID NO: 5588376 - DNA, 25 bp, Homo sapien
ccaaagaaaaggtaagtgctgtgga

SEQ ID NO: 5588377 - DNA, 25 bp, Homo sapien
tactgaaagtggcaactgactgtac

SEQ ID NO: 5588378 - DNA, 25 bp, Homo sapien
gcacagtatctggcaaacggtcggt

SEQ ID NO: 5588379 - DNA, 25 bp, Homo sapien
tggagaagataaggcatgaacctaa

SEQ ID NO: 5588380 - DNA, 25 bp, Homo sapien
ggacagcttcgtggaaaagataatg

SEQ ID NO: 5588381 - DNA, 25 bp, Homo sapien
aagataatgatgaagctgggctttc

SEQ ID NO: 5588382 - DNA, 25 bp, Homo sapien
tcagaacaaagtacctaacgcaatc

SEQ ID NO: 5588383 - DNA, 25 bp, Homo sapien
gcctatggtctggttccaagagtct

SEQ ID NO: 5588384 - DNA, 25 bp, Homo sapien
agactcttggaaccagaccataggc

SEQ ID NO: 5588385 - DNA, 25 bp, Homo sapien
tataaatatgggtattagttaatat

SEQ ID NO: 5588386 - DNA, 25 bp, Homo sapien
aatacaaatgttcctagtcactgtg

SEQ ID NO: 5588387 - DNA, 25 bp, Homo sapien
gaaaagacagttacttgagctcttg

SEQ ID NO: 5588388 - DNA, 25 bp, Homo sapien
ttccctactgatactgtacatatgt

SEQ ID NO: 5588389 - DNA, 25 bp, Homo sapien
aaaacaggacagatggcctaattaa

SEQ ID NO: 5588390 - DNA, 25 bp, Homo sapien
agtgcagagaagaaacaataaatac

SEQ ID NO: 5588391 - DNA, 25 bp, Homo sapien
actggaaaaactattgtattaactg

SEQ ID NO: 5588392 - DNA, 25 bp, Homo sapien
tggcctaattaaatgacaaaagaaa

SEQ ID NO: 5588393 - DNA, 25 bp, Homo sapien
ttgtatttatcagatgatgaaaagt

SEQ ID NO: 5588394 - DNA, 25 bp, Homo sapien
aactgatttcaagtatagaagccat

SEQ ID NO: 5588395 - DNA, 25 bp, Homo sapien
tgttcctagtcactgtgtaaatcac

SEQ ID NO: 5588396 - DNA, 25 bp, Homo sapien
actatatcggtccagtgtatgcccc

SEQ ID NO: 5588397 - DNA, 25 bp, Homo sapien
gtgaagtaggtgcctacagatatcc

SEQ ID NO: 5588398 - DNA, 25 bp, Homo sapien
ggttgcagtctttcagcatggaccc

SEQ ID NO: 5588399 - DNA, 25 bp, Homo sapien
gtgtatgcccccagataagcgctgt

SEQ ID NO: 5588400 - DNA, 25 bp, Homo sapien
agcaaccacttgggcctaggtgaag

SEQ ID NO: 5588401 - DNA, 25 bp, Homo sapien
tttgattgtgaaactatatcggtcc

SEQ ID NO: 5588402 - DNA, 25 bp, Homo sapien
tagttaagcctgaacacccattccc

SEQ ID NO: 5588403 - DNA, 25 bp, Homo sapien
gtgcacattttgttgggaaatattt

SEQ ID NO: 5588404 - DNA, 25 bp, Homo sapien
ttcagcatggaccctgtgaagtagg

SEQ ID NO: 5588405 - DNA, 25 bp, Homo sapien
taagcgctgtgtattggttgcagtc

SEQ ID NO: 5588406 - DNA, 25 bp, Homo sapien
gggcacagcaaccacttgggcctag

SEQ ID NO: 5588407 - DNA, 25 bp, Homo sapien
gaaagccctctgggggcactttgtg

SEQ ID NO: 5588408 - DNA, 25 bp, Homo sapien
agccctcacagtaagtagcaaagtc

SEQ ID NO: 5588409 - DNA, 25 bp, Homo sapien
tagaagccgtaacaagacaggcaca

SEQ ID NO: 5588410 - DNA, 25 bp, Homo sapien
ggaaactgacgcaaaagatagatgc

SEQ ID NO: 5588411 - DNA, 25 bp, Homo sapien
cagtagacagtgagcacatttaatt

SEQ ID NO: 5588412 - DNA, 25 bp, Homo sapien
agatagatgccatttgctcaagccc

SEQ ID NO: 5588413 - DNA, 25 bp, Homo sapien
ttgcagtggctacattacccctacc

SEQ ID NO: 5588414 - DNA, 25 bp, Homo sapien
agggaagagaaatatacaggctcaa

SEQ ID NO: 5588415 - DNA, 25 bp, Homo sapien
aatcaagagattcctagaagccgta

SEQ ID NO: 5588416 - DNA, 25 bp, Homo sapien
atccgctggcctcggacaatgtttt

SEQ ID NO: 5588417 - DNA, 25 bp, Homo sapien
attggtagcaaataccagcagggaa

SEQ ID NO: 5588418 - DNA, 25 bp, Homo sapien
agcccgaatcatcaagaaagtgcac

SEQ ID NO: 5588419 - DNA, 25 bp, Homo sapien
ctcacagattaaagcccaggactag

SEQ ID NO: 5588420 - DNA, 25 bp, Homo sapien
cacatggcaatgatggacaaaatat

SEQ ID NO: 5588421 - DNA, 25 bp, Homo sapien
tcgtgatggtacagtgagttcatgt

SEQ ID NO: 5588422 - DNA, 25 bp, Homo sapien
ggtaaactcaaaaaggcatggccaa

SEQ ID NO: 5588423 - DNA, 25 bp, Homo sapien
aaggaagcgtggattgcattaatca

SEQ ID NO: 5588424 - DNA, 25 bp, Homo sapien
gactagaatggagctacccacaaac

SEQ ID NO: 5588425 - DNA, 25 bp, Homo sapien
aatcagggaagagtaaaatccacat

SEQ ID NO: 5588426 - DNA, 25 bp, Homo sapien
aagatggaagacaaaagccatactc

SEQ ID NO: 5588427 - DNA, 25 bp, Homo sapien
accatggtaaccagaagctaagctc

SEQ ID NO: 5588428 - DNA, 25 bp, Homo sapien
acagacagtcataaagataagcccg

SEQ ID NO: 5588429 - DNA, 25 bp, Homo sapien
ggaggctctaaggacagatatcaaa

SEQ ID NO: 5588430 - DNA, 25 bp, Homo sapien
ctctagtcttcacagatacggaggc

SEQ ID NO: 5588431 - DNA, 25 bp, Homo sapien
gtggtacatgcggcccatcgttact

SEQ ID NO: 5588432 - DNA, 25 bp, Homo sapien
tagatgacaggaatttttctgcacc

SEQ ID NO: 5588433 - DNA, 25 bp, Homo sapien
tacattagactgggcacctatgggg

SEQ ID NO: 5588434 - DNA, 25 bp, Homo sapien
tatcatctcatgggactgtggtaca

SEQ ID NO: 5588435 - DNA, 25 bp, Homo sapien
aactggcatggattaatggtgataa

SEQ ID NO: 5588436 - DNA, 25 bp, Homo sapien
gatggctacgatgtcactagatgac

SEQ ID NO: 5588437 - DNA, 25 bp, Homo sapien
agggtcaccacaaatgagagtcgtg

SEQ ID NO: 5588438 - DNA, 25 bp, Homo sapien
tgaaatgtgatgaagtgcatgactc

SEQ ID NO: 5588439 - DNA, 25 bp, Homo sapien
gtaggtttgtgtacaccagggtcac

SEQ ID NO: 5588440 - DNA, 25 bp, Homo sapien
ttgaggtatcgctacagcagaattc

SEQ ID NO: 5588441 - DNA, 25 bp, Homo sapien
attaccttgcaaccaggggagtatg

SEQ ID NO: 5588442 - DNA, 25 bp, Homo sapien
aggggagtatgaaactagaaattac

SEQ ID NO: 5588443 - DNA, 25 bp, Homo sapien
ataaggctcaagaaaggtcaaagta

SEQ ID NO: 5588444 - DNA, 25 bp, Homo sapien
aaatcaagacaacacatggcccctg

SEQ ID NO: 5588445 - DNA, 25 bp, Homo sapien
acagtcaaacatgatagcctgagta

SEQ ID NO: 5588446 - DNA, 25 bp, Homo sapien
aatactgtggtcggcactgaatatt

SEQ ID NO: 5588447 - DNA, 25 bp, Homo sapien
atttcaagaagattgggggttaatc

SEQ ID NO: 5588448 - DNA, 25 bp, Homo sapien
tccggaaatcctgtcatgcatatgt

SEQ ID NO: 5588449 - DNA, 25 bp, Homo sapien
aaattacagcacatgagggacacta

SEQ ID NO: 5588450 - DNA, 25 bp, Homo sapien
gcctgagtaaacaagacgccgttta

SEQ ID NO: 5588451 - DNA, 25 bp, Homo sapien
gactctcctgcggtccgtcggttac

SEQ ID NO: 5588452 - DNA, 25 bp, Homo sapien
gtaaccgacggaccgcaggagagtc

SEQ ID NO: 5588453 - DNA, 25 bp, Homo sapien
atatccagagattaaggagaccctc

SEQ ID NO: 5588454 - DNA, 25 bp, Homo sapien
acaaaatacagtgagcgataaagac

SEQ ID NO: 5588455 - DNA, 25 bp, Homo sapien
cttgtgagattagagtaccatgttt

SEQ ID NO: 5588456 - DNA, 25 bp, Homo sapien
gagcgataaagacagactagaacta

SEQ ID NO: 5588457 - DNA, 25 bp, Homo sapien
atacaagtttcaaggagaactgcac

SEQ ID NO: 5588458 - DNA, 25 bp, Homo sapien
aaggagaactgcacagcactcaaac

SEQ ID NO: 5588459 - DNA, 25 bp, Homo sapien
gattaaggagaccctctgtgtatcc

SEQ ID NO: 5588460 - DNA, 25 bp, Homo sapien
agacccaaacactagagatatgatc

SEQ ID NO: 5588461 - DNA, 25 bp, Homo sapien
atgacataaatgatggaacacaatc

SEQ ID NO: 5588462 - DNA, 25 bp, Homo sapien
actagaccttgctaacaactgacat

SEQ ID NO: 5588463 - DNA, 25 bp, Homo sapien
aaaaggtaatgttgtatttctggat

SEQ ID NO: 5588464 - DNA, 25 bp, Homo sapien
cgaggtgtatcgaggaataattaac

SEQ ID NO: 5588465 - DNA, 25 bp, Homo sapien
agttacccaaagactgagaagggaa

SEQ ID NO: 5588466 - DNA, 25 bp, Homo sapien
agaatacagtagaggcatcatgctc

SEQ ID NO: 5588467 - DNA, 25 bp, Homo sapien
aatgagctctggaatagaatacagt

SEQ ID NO: 5588468 - DNA, 25 bp, Homo sapien
catgctcaaagagagtagcagatgt

SEQ ID NO: 5588469 - DNA, 25 bp, Homo sapien
aacagtttcgagaatatctgactcc

SEQ ID NO: 5588470 - DNA, 25 bp, Homo sapien
aaaaaactgacaaaacaatgagctc

SEQ ID NO: 5588471 - DNA, 25 bp, Homo sapien
tttttctggtacaggagccggttga

SEQ ID NO: 5588472 - DNA, 25 bp, Homo sapien
ggagccggttgagtgtcatatatta

SEQ ID NO: 5588473 - DNA, 25 bp, Homo sapien
taaaatacacgcggtgataggtgac

SEQ ID NO: 5588474 - DNA, 25 bp, Homo sapien
atacacaagtgatggcgaggtgtat

SEQ ID NO: 5588475 - DNA, 25 bp, Homo sapien
ttgttatgtgtcgtcaaagggagtc

SEQ ID NO: 5588476 - DNA, 25 bp, Homo sapien
tatctctgctctcgtgtctggtgcc

SEQ ID NO: 5588477 - DNA, 25 bp, Homo sapien
aaaacatagtttctagggcacattc

SEQ ID NO: 5588478 - DNA, 25 bp, Homo sapien
tgtctggtgcctttatgtctctgtt

SEQ ID NO: 5588479 - DNA, 25 bp, Homo sapien
aatttgtaaggtgaaaagatgtgga

SEQ ID NO: 5588480 - DNA, 25 bp, Homo sapien
caagatatctggtgcagtgcagtgt

SEQ ID NO: 5588481 - DNA, 25 bp, Homo sapien
agtgcagtgtgctaaatatcagaac

SEQ ID NO: 5588482 - DNA, 25 bp, Homo sapien
aaagggagtctgaactaaagaatgt

SEQ ID NO: 5588483 - DNA, 25 bp, Homo sapien
gaactgactaaaagaaggaactgga

SEQ ID NO: 5588484 - DNA, 25 bp, Homo sapien
aaatccaagagaaactacggcctta

SEQ ID NO: 5588485 - DNA, 25 bp, Homo sapien
cagcagcacagtcttcaataccacc

SEQ ID NO: 5588486 - DNA, 25 bp, Homo sapien
gcatataaaatgttaagcacgtcta

SEQ ID NO: 5588487 - DNA, 25 bp, Homo sapien
gggaatggttgaagcattgctgctg

SEQ ID NO: 5588488 - DNA, 25 bp, Homo sapien
ttgttgaatacagagatactttaaa

SEQ ID NO: 5588489 - DNA, 25 bp, Homo sapien
ccaaaggcactcaataatgtgatct

SEQ ID NO: 5588490 - DNA, 25 bp, Homo sapien
atgtaagatagtttaagtaggtttc

SEQ ID NO: 5588491 - DNA, 25 bp, Homo sapien
ttaatttgacagagtagtgcaggca

SEQ ID NO: 5588492 - DNA, 25 bp, Homo sapien
attgctgctgggatctattaaggct

SEQ ID NO: 5588493 - DNA, 25 bp, Homo sapien
tgggatctattaaggctctgagctc

SEQ ID NO: 5588494 - DNA, 25 bp, Homo sapien
tggcctttgctgtattggataactc

SEQ ID NO: 5588495 - DNA, 25 bp, Homo sapien
agtgcaggcaataatgaaatggtat

SEQ ID NO: 5588496 - DNA, 25 bp, Homo sapien
gcatctagcaaggaacatggagttg

SEQ ID NO: 5588497 - DNA, 25 bp, Homo sapien
aacagctagcaccaggccacttttg

SEQ ID NO: 5588498 - DNA, 25 bp, Homo sapien
taggttactctaggaaatgacaaag

SEQ ID NO: 5588499 - DNA, 25 bp, Homo sapien
ggggaaatgcttggaaatctctctc

SEQ ID NO: 5588500 - DNA, 25 bp, Homo sapien
aaatcatcatacagattgtgtgtgt

SEQ ID NO: 5588501 - DNA, 25 bp, Homo sapien
aaacacacatatggcacaataaatc

SEQ ID NO: 5588502 - DNA, 25 bp, Homo sapien
attttggcctaaaagtcacagcctt

SEQ ID NO: 5588503 - DNA, 25 bp, Homo sapien
caaaacaagacgctatctcccctcc

SEQ ID NO: 5588504 - DNA, 25 bp, Homo sapien
tttgatctgtgatgtctacaactcc

SEQ ID NO: 5588505 - DNA, 25 bp, Homo sapien
aggatatacccaaacagctagcacc

SEQ ID NO: 5588506 - DNA, 25 bp, Homo sapien
cttttcaaggatatacccaaacagc

SEQ ID NO: 5588507 - DNA, 25 bp, Homo sapien
ctgttcatggggaaatgcttggaaa

SEQ ID NO: 5588508 - DNA, 25 bp, Homo sapien
tacagggaatggagaacttttcttg

SEQ ID NO: 5588509 - DNA, 25 bp, Homo sapien
tagagcaggacttgagatgttatga

SEQ ID NO: 5588510 - DNA, 25 bp, Homo sapien
aagtagaatctgatatgagaaaaaa

SEQ ID NO: 5588511 - DNA, 25 bp, Homo sapien
aaaaagagaatgcaactatgaatag

SEQ ID NO: 5588512 - DNA, 25 bp, Homo sapien
ctatgaatagagagatcgaatgtgt

SEQ ID NO: 5588513 - DNA, 25 bp, Homo sapien
acatttgttcctgggtaaagcagct

SEQ ID NO: 5588514 - DNA, 25 bp, Homo sapien
gatgcaaggttgtcgcagttcctgt

SEQ ID NO: 5588515 - DNA, 25 bp, Homo sapien
cgaatgtgtctgatgcaaggttgtc

SEQ ID NO: 5588516 - DNA, 25 bp, Homo sapien
aagtggtctacttgagaacacagtt

SEQ ID NO: 5588517 - DNA, 25 bp, Homo sapien
ggtcattctatgtagagcaggactt

SEQ ID NO: 5588518 - DNA, 25 bp, Homo sapien
aaagcagctgttcataaggtaattc

SEQ ID NO: 5588519 - DNA, 25 bp, Homo sapien
ctgttacaagcagtctcacgagggt

SEQ ID NO: 5588520 - DNA, 25 bp, Homo sapien
gttctgaccttgggtgggttactga

SEQ ID NO: 5588521 - DNA, 25 bp, Homo sapien
aggtaaagtagtgcccaaactgacc

SEQ ID NO: 5588522 - DNA, 25 bp, Homo sapien
gggaatggagaatcatagctgttca

SEQ ID NO: 5588523 - DNA, 25 bp, Homo sapien
catgtaagaagtgcagcttgaagtg

SEQ ID NO: 5588524 - DNA, 25 bp, Homo sapien
aagggcttggattgattcgagttca

SEQ ID NO: 5588525 - DNA, 25 bp, Homo sapien
tttattgggtattgtggagcctgga

SEQ ID NO: 5588526 - DNA, 25 bp, Homo sapien
ctgagccttggagtcggtttcctta

SEQ ID NO: 5588527 - DNA, 25 bp, Homo sapien
ttgctgtcgttgctcctgggaagtt

SEQ ID NO: 5588528 - DNA, 25 bp, Homo sapien
acagccttgcttccaggtggcccct

SEQ ID NO: 5588529 - DNA, 25 bp, Homo sapien
tcacaggccctgccactccgtggtt

SEQ ID NO: 5588530 - DNA, 25 bp, Homo sapien
ctcccccagcctccgaaaagcttta

SEQ ID NO: 5588531 - DNA, 25 bp, Homo sapien
gcaaccacaacgcggtatctggagc

SEQ ID NO: 5588532 - DNA, 25 bp, Homo sapien
tcgacagtattggcagagattcttg

SEQ ID NO: 5588533 - DNA, 25 bp, Homo sapien
ggcagaatggcactcgacagtattg

SEQ ID NO: 5588534 - DNA, 25 bp, Homo sapien
cgttcctcccgatgctcccgcctct

SEQ ID NO: 5588535 - DNA, 25 bp, Homo sapien
gcaaagagaaaccagccagttctgc

SEQ ID NO: 5588536 - DNA, 25 bp, Homo sapien
ttgtcttcaaaaggcagaatggcac

SEQ ID NO: 5588537 - DNA, 25 bp, Homo sapien
agccagttctgccaccacgctgcac

SEQ ID NO: 5588538 - DNA, 25 bp, Homo sapien
ttgggggtgtgattgcctctaaaag

SEQ ID NO: 5588539 - DNA, 25 bp, Homo sapien
acgctgcaccctgctgtgctcgcgg

SEQ ID NO: 5588540 - DNA, 25 bp, Homo sapien
actggtcatccagcaaagaaagtcg

SEQ ID NO: 5588541 - DNA, 25 bp, Homo sapien
acttatgctaaggttacagactgga

SEQ ID NO: 5588542 - DNA, 25 bp, Homo sapien
ctacagacttcatgcaatctcaatt

SEQ ID NO: 5588543 - DNA, 25 bp, Homo sapien
ctatacagaaaactacaggtatttc

SEQ ID NO: 5588544 - DNA, 25 bp, Homo sapien
tcaattataataccgacaggctttt

SEQ ID NO: 5588545 - DNA, 25 bp, Homo sapien
tctcattctgtcaacctggctggac

SEQ ID NO: 5588546 - DNA, 25 bp, Homo sapien
taaaggagacaaatagaacttatgc

SEQ ID NO: 5588547 - DNA, 25 bp, Homo sapien
agctagagtagtgaggccaattttt

SEQ ID NO: 5588548 - DNA, 25 bp, Homo sapien
tgcaaataagctagagtagtgaggc

SEQ ID NO: 5588549 - DNA, 25 bp, Homo sapien
gaaaatgcaaataagctagagtagt

SEQ ID NO: 5588550 - DNA, 25 bp, Homo sapien
agtcactgctgttaagtgtcaattc

SEQ ID NO: 5588551 - DNA, 25 bp, Homo sapien
gctaaggttacagactggaagtcac

SEQ ID NO: 5588552 - DNA, 25 bp, Homo sapien
tcaaacagtggtacaatatggttac

SEQ ID NO: 5588553 - DNA, 25 bp, Homo sapien
ctttctgcttaattgatcacgatca

SEQ ID NO: 5588554 - DNA, 25 bp, Homo sapien
gaaactaggacatatgccatgacag

SEQ ID NO: 5588555 - DNA, 25 bp, Homo sapien
aaatatgaaataccataaagcgttc

SEQ ID NO: 5588556 - DNA, 25 bp, Homo sapien
agctaatatagacaggttacctgac

SEQ ID NO: 5588557 - DNA, 25 bp, Homo sapien
ctatgtaataagcaaaagataattt

SEQ ID NO: 5588558 - DNA, 25 bp, Homo sapien
tatcgctcagggttgtatgtatttg

SEQ ID NO: 5588559 - DNA, 25 bp, Homo sapien
atgacagcatacttctagcactcta

SEQ ID NO: 5588560 - DNA, 25 bp, Homo sapien
aaataaaatcactgactttggtcca

SEQ ID NO: 5588561 - DNA, 25 bp, Homo sapien
tacttcaatatcgctcagggttgta

SEQ ID NO: 5588562 - DNA, 25 bp, Homo sapien
gatgagaaactaggacatatgccat

SEQ ID NO: 5588563 - DNA, 25 bp, Homo sapien
ggcatgtgagctttatagtacttac

SEQ ID NO: 5588564 - DNA, 25 bp, Homo sapien
ccattgtgaccatctttcaggtggc

SEQ ID NO: 5588565 - DNA, 25 bp, Homo sapien
ctccatttgcacagaagtaacaggc

SEQ ID NO: 5588566 - DNA, 25 bp, Homo sapien
ttagcccttgaaatgaccctgaggc

SEQ ID NO: 5588567 - DNA, 25 bp, Homo sapien
atgaccctgaggcatgactggtatt

SEQ ID NO: 5588568 - DNA, 25 bp, Homo sapien
atctctactgcaggcaaggaaacca

SEQ ID NO: 5588569 - DNA, 25 bp, Homo sapien
aaaataaacgcatgaatgactactt

SEQ ID NO: 5588570 - DNA, 25 bp, Homo sapien
gaaccaccattccagctcaagtctc

SEQ ID NO: 5588571 - DNA, 25 bp, Homo sapien
gggtgctgtgagtacagctgctgtg

SEQ ID NO: 5588572 - DNA, 25 bp, Homo sapien
caagtccagtgttcctagaaacctc

SEQ ID NO: 5588573 - DNA, 25 bp, Homo sapien
cagaagtaacaggcatgtgagcttt

SEQ ID NO: 5588574 - DNA, 25 bp, Homo sapien
tctgaccttggtgggctctttaggg

SEQ ID NO: 5588575 - DNA, 25 bp, Homo sapien
ataccaagtcagtgtgatcgagtgt

SEQ ID NO: 5588576 - DNA, 25 bp, Homo sapien
gcctaagccatgactccccttggga

SEQ ID NO: 5588577 - DNA, 25 bp, Homo sapien
ctacccattccaggggacctggtgg

SEQ ID NO: 5588578 - DNA, 25 bp, Homo sapien
gggttgggttgctttgctcatcgcc

SEQ ID NO: 5588579 - DNA, 25 bp, Homo sapien
gctgagggtgatgataccaagtcag

SEQ ID NO: 5588580 - DNA, 25 bp, Homo sapien
ctagaagtccatctggcagaggtgc

SEQ ID NO: 5588581 - DNA, 25 bp, Homo sapien
ctgagcttctcagtaagggccgact

SEQ ID NO: 5588582 - DNA, 25 bp, Homo sapien
gggaggatgtccctagaagtccatc

SEQ ID NO: 5588583 - DNA, 25 bp, Homo sapien
cttgatttaggatatctctggcatc

SEQ ID NO: 5588584 - DNA, 25 bp, Homo sapien
ggctgagattctgaccttggtgggc

SEQ ID NO: 5588585 - DNA, 25 bp, Homo sapien
gggggacaatgcttactaggaaagc

SEQ ID NO: 5588586 - DNA, 25 bp, Homo sapien
ggctgtgtgatgtctggcaacttac

SEQ ID NO: 5588587 - DNA, 25 bp, Homo sapien
ctgggagaactaagcactcacctct

SEQ ID NO: 5588588 - DNA, 25 bp, Homo sapien
aagacaccaggacactggctgtgtg

SEQ ID NO: 5588589 - DNA, 25 bp, Homo sapien
ttcatgtggaaaatcctccctcccc

SEQ ID NO: 5588590 - DNA, 25 bp, Homo sapien
aagcacacatcaaggatggaggaaa

SEQ ID NO: 5588591 - DNA, 25 bp, Homo sapien
gtctgatgcttagagctgaggatgg

SEQ ID NO: 5588592 - DNA, 25 bp, Homo sapien
cagcaggatggcacctacaagctga

SEQ ID NO: 5588593 - DNA, 25 bp, Homo sapien
atggaggaaatccttcaggagaaac

SEQ ID NO: 5588594 - DNA, 25 bp, Homo sapien
ctcgagtccccgaggtcagaaaaaa

SEQ ID NO: 5588595 - DNA, 25 bp, Homo sapien
agaaacgagatgcatgtctgatgct

SEQ ID NO: 5588596 - DNA, 25 bp, Homo sapien
aatgatttgcttaggataaactctt

SEQ ID NO: 5588597 - DNA, 25 bp, Homo sapien
atggcaatctgcattttggggggtg

SEQ ID NO: 5588598 - DNA, 25 bp, Homo sapien
cctaacactgtacactttgaccaac

SEQ ID NO: 5588599 - DNA, 25 bp, Homo sapien
tgtagttaccatgttgtgcagtgtt

SEQ ID NO: 5588600 - DNA, 25 bp, Homo sapien
ggattttgcatactgtcaagactgc

SEQ ID NO: 5588601 - DNA, 25 bp, Homo sapien
tgaccaatagtacaacagagtgtcc

SEQ ID NO: 5588602 - DNA, 25 bp, Homo sapien
tggaattgcttgatcaaaagtgtcc

SEQ ID NO: 5588603 - DNA, 25 bp, Homo sapien
ttctataggtgcaaattgagcttac

SEQ ID NO: 5588604 - DNA, 25 bp, Homo sapien
tcatatgcaagaggttcctgtatac

SEQ ID NO: 5588605 - DNA, 25 bp, Homo sapien
ctgtatactaaggatgttaacccat

SEQ ID NO: 5588606 - DNA, 25 bp, Homo sapien
attggaatctgtggctgcttctgat

SEQ ID NO: 5588607 - DNA, 25 bp, Homo sapien
tatttataaggcacttgaagagcgc

SEQ ID NO: 5588608 - DNA, 25 bp, Homo sapien
tggtgaactcaggcaagcaacctag

SEQ ID NO: 5588609 - DNA, 25 bp, Homo sapien
tatcactaagtcaggtcgagagaaa

SEQ ID NO: 5588610 - DNA, 25 bp, Homo sapien
atgaacaggctagtggttatgagaa

SEQ ID NO: 5588611 - DNA, 25 bp, Homo sapien
agcgcctggtctataggatgggcta

SEQ ID NO: 5588612 - DNA, 25 bp, Homo sapien
attattggtatgaaaaggtatggcc

SEQ ID NO: 5588613 - DNA, 25 bp, Homo sapien
cagttgcaagcttatagtgaggacg

SEQ ID NO: 5588614 - DNA, 25 bp, Homo sapien
tgggctagcgaaatgttgatctctt

SEQ ID NO: 5588615 - DNA, 25 bp, Homo sapien
cagtgcttagccacatggaatgtac

SEQ ID NO: 5588616 - DNA, 25 bp, Homo sapien
tggagacagtaatagcacagttgca

SEQ ID NO: 5588617 - DNA, 25 bp, Homo sapien
tatagtgaggacgcagttaatattt

SEQ ID NO: 5588618 - DNA, 25 bp, Homo sapien
aaatggacaaatgaaacagtaatta

SEQ ID NO: 5588619 - DNA, 25 bp, Homo sapien
ctccaaatgacaaagaagtaaattc

SEQ ID NO: 5588620 - DNA, 25 bp, Homo sapien
gatgatagatgctggaagatcagtt

SEQ ID NO: 5588621 - DNA, 25 bp, Homo sapien
ttcatcaggagataatggcagtatc

SEQ ID NO: 5588622 - DNA, 25 bp, Homo sapien
ttggagacaggattcttcaaaagag

SEQ ID NO: 5588623 - DNA, 25 bp, Homo sapien
ctgcagaaatcgtatgatggggtaa

SEQ ID NO: 5588624 - DNA, 25 bp, Homo sapien
tgctcctgtaagatctgcagaaatc

SEQ ID NO: 5588625 - DNA, 25 bp, Homo sapien
acatgattatacacagacaaatgga

SEQ ID NO: 5588626 - DNA, 25 bp, Homo sapien
gacaggtgctgtgctactcatcaac

SEQ ID NO: 5588627 - DNA, 25 bp, Homo sapien
cacactcacaatatgacaggtgctg

SEQ ID NO: 5588628 - DNA, 25 bp, Homo sapien
cacaaaccatagaaaatagaagatc

SEQ ID NO: 5588629 - DNA, 25 bp, Homo sapien
ctcctcacatgacagggacagaggc

SEQ ID NO: 5588630 - DNA, 25 bp, Homo sapien
gcggtgtgccacgatgtcacctgga

SEQ ID NO: 5588631 - DNA, 25 bp, Homo sapien
gtgccctgaatcatgcaaaggaacc

SEQ ID NO: 5588632 - DNA, 25 bp, Homo sapien
ttgtcccctgtgtccccctgaagca

SEQ ID NO: 5588633 - DNA, 25 bp, Homo sapien
tcttagcttcgtgagagcccagaac

SEQ ID NO: 5588634 - DNA, 25 bp, Homo sapien
gctgattccgcagaggcaaaagttc

SEQ ID NO: 5588635 - DNA, 25 bp, Homo sapien
aggccccagctcacacgtccactgc

SEQ ID NO: 5588636 - DNA, 25 bp, Homo sapien
gagcccagaacacataccgcctgca

SEQ ID NO: 5588637 - DNA, 25 bp, Homo sapien
ggaaaacagactcacccaagctccc

SEQ ID NO: 5588638 - DNA, 25 bp, Homo sapien
aggcaaaagttcagaaaaaccaagc

SEQ ID NO: 5588639 - DNA, 25 bp, Homo sapien
gtgcaggcgagcaaattttgtggac

SEQ ID NO: 5588640 - DNA, 25 bp, Homo sapien
tagggccagctaaatgtgtatgtta

SEQ ID NO: 5588641 - DNA, 25 bp, Homo sapien
acgataagcagttaatatgatatat

SEQ ID NO: 5588642 - DNA, 25 bp, Homo sapien
agtggagaatttaacaggtaaagaa

SEQ ID NO: 5588643 - DNA, 25 bp, Homo sapien
tagctcaggttttgaagatagttgc

SEQ ID NO: 5588644 - DNA, 25 bp, Homo sapien
atgatatatccatagggccagctaa

SEQ ID NO: 5588645 - DNA, 25 bp, Homo sapien
tatggttaattgtgatcttgtgctc

SEQ ID NO: 5588646 - DNA, 25 bp, Homo sapien
gccgagagatggaactcccaaaatt

SEQ ID NO: 5588647 - DNA, 25 bp, Homo sapien
ttgtgatcttgtgctcgtcgacgcg

SEQ ID NO: 5588648 - DNA, 25 bp, Homo sapien
ggggcagaatacaactatagctcag

SEQ ID NO: 5588649 - DNA, 25 bp, Homo sapien
tatacagcccctaacgataagcagt

SEQ ID NO: 5588650 - DNA, 25 bp, Homo sapien
gacgaagctcctccatacagagaca

SEQ ID NO: 5588651 - DNA, 25 bp, Homo sapien
ccagaggtacataaagcccaggata

SEQ ID NO: 5588652 - DNA, 25 bp, Homo sapien
atatgacacatctgcctagggtacc

SEQ ID NO: 5588653 - DNA, 25 bp, Homo sapien
gactgtgtactcattgggccatgtt

SEQ ID NO: 5588654 - DNA, 25 bp, Homo sapien
ttaaaatgaagttcaagagtccctc

SEQ ID NO: 5588655 - DNA, 25 bp, Homo sapien
atacaacgggaaatttgacagttta

SEQ ID NO: 5588656 - DNA, 25 bp, Homo sapien
attaattaggatgcaaaaaattgca

SEQ ID NO: 5588657 - DNA, 25 bp, Homo sapien
caagagtccctcaaaccagaggtac

SEQ ID NO: 5588658 - DNA, 25 bp, Homo sapien
ctgcctagggtaccaaagatttggg

SEQ ID NO: 5588659 - DNA, 25 bp, Homo sapien
acttatggtatatgagaagccagat

SEQ ID NO: 5588660 - DNA, 25 bp, Homo sapien
agggacatgaagacttgactgtgta

SEQ ID NO: 5588661 - DNA, 25 bp, Homo sapien
atatacaaagaacaaggagtgctga

SEQ ID NO: 5588662 - DNA, 25 bp, Homo sapien
aagcaccacacaatactgaagaaat

SEQ ID NO: 5588663 - DNA, 25 bp, Homo sapien
agaagggagaaaccaataatcacaa

SEQ ID NO: 5588664 - DNA, 25 bp, Homo sapien
tccacagtataattggagaggggct

SEQ ID NO: 5588665 - DNA, 25 bp, Homo sapien
tgcagtgtctgatgaaaaagcctta

SEQ ID NO: 5588666 - DNA, 25 bp, Homo sapien
tcacaacatgttatacggctcattc

SEQ ID NO: 5588667 - DNA, 25 bp, Homo sapien
tgctcccaaggagataagcaccaca

SEQ ID NO: 5588668 - DNA, 25 bp, Homo sapien
gagaggggcttagtctaccattttc

SEQ ID NO: 5588669 - DNA, 25 bp, Homo sapien
ttagaagaactgacactccaggtcc

SEQ ID NO: 5588670 - DNA, 25 bp, Homo sapien
ccgatcagcttgggattacaaggtc

SEQ ID NO: 5588671 - DNA, 25 bp, Homo sapien
tataacttgtccatggtcagctcca

SEQ ID NO: 5588672 - DNA, 25 bp, Homo sapien
tgcatcctcagtactcttggcccat

SEQ ID NO: 5588673 - DNA, 25 bp, Homo sapien
ccaggaagttagcctggggattaac

SEQ ID NO: 5588674 - DNA, 25 bp, Homo sapien
gtaattgtcacagaaccaggcatca

SEQ ID NO: 5588675 - DNA, 25 bp, Homo sapien
tccaacatatgcttttagtccagtc

SEQ ID NO: 5588676 - DNA, 25 bp, Homo sapien
accagtctcagatcatatatttgcc

SEQ ID NO: 5588677 - DNA, 25 bp, Homo sapien
ctcctggccttatgagagcccaccg

SEQ ID NO: 5588678 - DNA, 25 bp, Homo sapien
accgcaccccagctgatactctgcc

SEQ ID NO: 5588679 - DNA, 25 bp, Homo sapien
taggtgccaatactgtaaattaatc

SEQ ID NO: 5588680 - DNA, 25 bp, Homo sapien
agaagagctgatcccaaccccagat

SEQ ID NO: 5588681 - DNA, 25 bp, Homo sapien
ttagcctggggattaacaggtgtct

SEQ ID NO: 5588682 - DNA, 25 bp, Homo sapien
ggcatcagaagagctgatcccaacc

SEQ ID NO: 5588683 - DNA, 25 bp, Homo sapien
tggggattaacaggtgtcttgccac

SEQ ID NO: 5588684 - DNA, 25 bp, Homo sapien
ctgccttcacgagcagaggcacaag

SEQ ID NO: 5588685 - DNA, 25 bp, Homo sapien
tatcctgcccaaggagcatgaagtc

SEQ ID NO: 5588686 - DNA, 25 bp, Homo sapien
gagcatgaagtcagaccagcaaact

SEQ ID NO: 5588687 - DNA, 25 bp, Homo sapien
ggccatgggctgcactcagtaaaag

SEQ ID NO: 5588688 - DNA, 25 bp, Homo sapien
cccttgtaaaggcatagccagggga

SEQ ID NO: 5588689 - DNA, 25 bp, Homo sapien
tgcatgctctgggaccgagcactga

SEQ ID NO: 5588690 - DNA, 25 bp, Homo sapien
agcagaggcacaagcttctgtgtgt

SEQ ID NO: 5588691 - DNA, 25 bp, Homo sapien
tccagagtgagtctaggaaactcga

SEQ ID NO: 5588692 - DNA, 25 bp, Homo sapien
aggaaactcgagaggacatctctgt

SEQ ID NO: 5588693 - DNA, 25 bp, Homo sapien
gtggacacttccggcaccctggccg

SEQ ID NO: 5588694 - DNA, 25 bp, Homo sapien
agggaatctaagacctgtggacact

SEQ ID NO: 5588695 - DNA, 25 bp, Homo sapien
tttgtgtgaaacttttgcctctgcc

SEQ ID NO: 5588696 - DNA, 25 bp, Homo sapien
acgctcaagctgtgtcattgttctt

SEQ ID NO: 5588697 - DNA, 25 bp, Homo sapien
acataggcaaggattattgtgctct

SEQ ID NO: 5588698 - DNA, 25 bp, Homo sapien
gaggagtcagagccaattttaaaca

SEQ ID NO: 5588699 - DNA, 25 bp, Homo sapien
atatcacaatgacacgaaggaggaa

SEQ ID NO: 5588700 - DNA, 25 bp, Homo sapien
ggcaggaaagcttgcagtctttttc

SEQ ID NO: 5588701 - DNA, 25 bp, Homo sapien
atcccaaattggcaggaaagcttgc

SEQ ID NO: 5588702 - DNA, 25 bp, Homo sapien
ccctcggataggatgaaactcagaa

SEQ ID NO: 5588703 - DNA, 25 bp, Homo sapien
ctattaaacgttaggttgcagaaac

SEQ ID NO: 5588704 - DNA, 25 bp, Homo sapien
ataggatgaaactcagaagtgagga

SEQ ID NO: 5588705 - DNA, 25 bp, Homo sapien
cctgtgacgtacataggcaaggatt

SEQ ID NO: 5588706 - DNA, 25 bp, Homo sapien
tggcccctcaatccctacaaagtgt

SEQ ID NO: 5588707 - DNA, 25 bp, Homo sapien
agaatctgctggatgtatggctgtg

SEQ ID NO: 5588708 - DNA, 25 bp, Homo sapien
cttaaaaagactgaggcagttctgc

SEQ ID NO: 5588709 - DNA, 25 bp, Homo sapien
taatgtactccaatggtctgtccat

SEQ ID NO: 5588710 - DNA, 25 bp, Homo sapien
atgaacacacgagataaagttctta

SEQ ID NO: 5588711 - DNA, 25 bp, Homo sapien
ccaagttgccaaaaaatggtatatt

SEQ ID NO: 5588712 - DNA, 25 bp, Homo sapien
aactgttagaatgaccccaactgtt

SEQ ID NO: 5588713 - DNA, 25 bp, Homo sapien
ggaaaatgtacacagacaaattaag

SEQ ID NO: 5588714 - DNA, 25 bp, Homo sapien
ccactccaagagatatttggcccct

SEQ ID NO: 5588715 - DNA, 25 bp, Homo sapien
ctggatgtatggctgtgattcttag

SEQ ID NO: 5588716 - DNA, 25 bp, Homo sapien
tataaaaagaactcaatagcaggat

SEQ ID NO: 5588717 - DNA, 25 bp, Homo sapien
atcaaggaattacatgggttttgtg

SEQ ID NO: 5588718 - DNA, 25 bp, Homo sapien
attggcttcaagacattgggaaatc

SEQ ID NO: 5588719 - DNA, 25 bp, Homo sapien
gaaaattcatcaatgtaggtgtcat

SEQ ID NO: 5588720 - DNA, 25 bp, Homo sapien
actcctcccgtgccctagggaagag

SEQ ID NO: 5588721 - DNA, 25 bp, Homo sapien
tggcctagccggattttaacagtgc

SEQ ID NO: 5588722 - DNA, 25 bp, Homo sapien
gttagcaacagtttatctgccctgc

SEQ ID NO: 5588723 - DNA, 25 bp, Homo sapien
catggtcctcaagccaagaggtcct

SEQ ID NO: 5588724 - DNA, 25 bp, Homo sapien
tgacaaagtccagtcccaggctcag

SEQ ID NO: 5588725 - DNA, 25 bp, Homo sapien
acattgggaaatcttggcctagccg

SEQ ID NO: 5588726 - DNA, 25 bp, Homo sapien
gagaggttactgacaaagtccagtc

SEQ ID NO: 5588727 - DNA, 25 bp, Homo sapien
gtattcacaatcatggtcctcaagc

SEQ ID NO: 5588728 - DNA, 25 bp, Homo sapien
tttggtccggtgtctagcaaacaag

SEQ ID NO: 5588729 - DNA, 25 bp, Homo sapien
tgtctagcaaacaagtcactgatcc

SEQ ID NO: 5588730 - DNA, 25 bp, Homo sapien
cagcccaggccgcataactgttggt

SEQ ID NO: 5588731 - DNA, 25 bp, Homo sapien
gtatctgtaaccccgcagcggggac

SEQ ID NO: 5588732 - DNA, 25 bp, Homo sapien
gtccggtgtctagcaaacaagtcac

SEQ ID NO: 5588733 - DNA, 25 bp, Homo sapien
cccaggccgcataactgttggtatc

SEQ ID NO: 5588734 - DNA, 25 bp, Homo sapien
cctctcagcccaggccgcataactg

SEQ ID NO: 5588735 - DNA, 25 bp, Homo sapien
ttacgcctcattttggtccggtgtc

SEQ ID NO: 5588736 - DNA, 25 bp, Homo sapien
ctttgcaaagcgtttcttacgcctc

SEQ ID NO: 5588737 - DNA, 25 bp, Homo sapien
ctgttggtatctgtaaccccgcagc

SEQ ID NO: 5588738 - DNA, 25 bp, Homo sapien
cactgatcctctcagcccaggccgc

SEQ ID NO: 5588739 - DNA, 25 bp, Homo sapien
tatgtcatatatgaagttagagaaa

SEQ ID NO: 5588740 - DNA, 25 bp, Homo sapien
aaaggagagccatgacacattcttt

SEQ ID NO: 5588741 - DNA, 25 bp, Homo sapien
aggtgatgcatacacaatcgaacac

SEQ ID NO: 5588742 - DNA, 25 bp, Homo sapien
ctcagtacctctcatgtcacatagc

SEQ ID NO: 5588743 - DNA, 25 bp, Homo sapien
acgttatcatgatcaagagcagaaa

SEQ ID NO: 5588744 - DNA, 25 bp, Homo sapien
tcgaacacttccaaaatgacttagc

SEQ ID NO: 5588745 - DNA, 25 bp, Homo sapien
tccacaccctttagaacgttatcat

SEQ ID NO: 5588746 - DNA, 25 bp, Homo sapien
aaaaaaagttatgtatgtgtaatat

SEQ ID NO: 5588747 - DNA, 25 bp, Homo sapien
tgcccaaatacaaggtgatgcatac

SEQ ID NO: 5588748 - DNA, 25 bp, Homo sapien
gtcacatagcacacaccagttctgt

SEQ ID NO: 5588749 - DNA, 25 bp, Homo sapien
tataaaggaactataacactgttac

SEQ ID NO: 5588750 - DNA, 25 bp, Homo sapien
tagtaaatgtgagatgctgtgatta

SEQ ID NO: 5588751 - DNA, 25 bp, Homo sapien
gaattataaagaaagggcttcagga

SEQ ID NO: 5588752 - DNA, 25 bp, Homo sapien
caagcagggcaatgacccagttcta

SEQ ID NO: 5588753 - DNA, 25 bp, Homo sapien
gactcaagcaggcaaccatcaaagc

SEQ ID NO: 5588754 - DNA, 25 bp, Homo sapien
cagctggagcaccttaccgagctca

SEQ ID NO: 5588755 - DNA, 25 bp, Homo sapien
tacagtccatgtaggaagtgctatg

SEQ ID NO: 5588756 - DNA, 25 bp, Homo sapien
acaaaactagatggtcaagaagcat

SEQ ID NO: 5588757 - DNA, 25 bp, Homo sapien
agcatctaggattattgggacacgt

SEQ ID NO: 5588758 - DNA, 25 bp, Homo sapien
actcgtcacatggcaagcagagtcg

SEQ ID NO: 5588759 - DNA, 25 bp, Homo sapien
agttggagcagtaaagaaatgttac

SEQ ID NO: 5588760 - DNA, 25 bp, Homo sapien
cccagttctaagacagactcgtcac

SEQ ID NO: 5588761 - DNA, 25 bp, Homo sapien
ttggagcaatactgtgccatccccc

SEQ ID NO: 5588762 - DNA, 25 bp, Homo sapien
gttgtgaagacaatcgcctggtaac

SEQ ID NO: 5588763 - DNA, 25 bp, Homo sapien
tcaaacaacagaaaagcaagcttgc

SEQ ID NO: 5588764 - DNA, 25 bp, Homo sapien
ttcacaacgccaaccaaaagcttac

SEQ ID NO: 5588765 - DNA, 25 bp, Homo sapien
aggggtgctttctccgcatgcctga

SEQ ID NO: 5588766 - DNA, 25 bp, Homo sapien
agcaagcttgctttagggagctggc

SEQ ID NO: 5588767 - DNA, 25 bp, Homo sapien
tggcagggttgcctcactgtctctg

SEQ ID NO: 5588768 - DNA, 25 bp, Homo sapien
gaggctcacagacacagagctggtt

SEQ ID NO: 5588769 - DNA, 25 bp, Homo sapien
aaggacagcccttagcactggatgt

SEQ ID NO: 5588770 - DNA, 25 bp, Homo sapien
tcttggaagatgtgtctacctcagc

SEQ ID NO: 5588771 - DNA, 25 bp, Homo sapien
ttctgtcacccgcgttgctgctgct

SEQ ID NO: 5588772 - DNA, 25 bp, Homo sapien
cggcatggagagacaagttattata

SEQ ID NO: 5588773 - DNA, 25 bp, Homo sapien
gcgcatccctccccattagccacct

SEQ ID NO: 5588774 - DNA, 25 bp, Homo sapien
atgctatattgaagggccaggtaaa

SEQ ID NO: 5588775 - DNA, 25 bp, Homo sapien
tgcatgcttccaagagatagttgtg

SEQ ID NO: 5588776 - DNA, 25 bp, Homo sapien
tgtcataggtagatatgcaaaatgc

SEQ ID NO: 5588777 - DNA, 25 bp, Homo sapien
gaggtgcttgttgacactgtgattt

SEQ ID NO: 5588778 - DNA, 25 bp, Homo sapien
tcacaaaactccccagggcgcatcc

SEQ ID NO: 5588779 - DNA, 25 bp, Homo sapien
tcactgtacagcaacaaatggttaa

SEQ ID NO: 5588780 - DNA, 25 bp, Homo sapien
tccatgagtcaaactgcatgcttcc

SEQ ID NO: 5588781 - DNA, 25 bp, Homo sapien
tatacaatagcatgcagtaggtctc

SEQ ID NO: 5588782 - DNA, 25 bp, Homo sapien
agatagttgtgttcgctcctgtgac

SEQ ID NO: 5588783 - DNA, 25 bp, Homo sapien
ttcttgtgtgtgtaagctggattcc

SEQ ID NO: 5588784 - DNA, 25 bp, Homo sapien
ttatccttccagagaatagtaatgt

SEQ ID NO: 5588785 - DNA, 25 bp, Homo sapien
ctctcaccccagatatccaccattc

SEQ ID NO: 5588786 - DNA, 25 bp, Homo sapien
gctggattcctaggggtggaattac

SEQ ID NO: 5588787 - DNA, 25 bp, Homo sapien
agaacagtgaaaaggatacctctca

SEQ ID NO: 5588788 - DNA, 25 bp, Homo sapien
cactgtgcagtgactaaccttgtac

SEQ ID NO: 5588789 - DNA, 25 bp, Homo sapien
catatcttggcgatgtttccacacc

SEQ ID NO: 5588790 - DNA, 25 bp, Homo sapien
tatggttgggctataaaggaataaa

SEQ ID NO: 5588791 - DNA, 25 bp, Homo sapien
taattggtggcaactgattttaacc

SEQ ID NO: 5588792 - DNA, 25 bp, Homo sapien
cacatagataatagcataccacata

SEQ ID NO: 5588793 - DNA, 25 bp, Homo sapien
ccagatcaataatcacttgggttct

SEQ ID NO: 5588794 - DNA, 25 bp, Homo sapien
ctacaaaattatgcttgccaggacg

SEQ ID NO: 5588795 - DNA, 25 bp, Homo sapien
ctgtagcccagtatgaaaattcccc

SEQ ID NO: 5588796 - DNA, 25 bp, Homo sapien
tccacttggactacacgctccttcc

SEQ ID NO: 5588797 - DNA, 25 bp, Homo sapien
tgctaagcaatgagttacagaaaca

SEQ ID NO: 5588798 - DNA, 25 bp, Homo sapien
gagaagctattgcaaaaacacaatt

SEQ ID NO: 5588799 - DNA, 25 bp, Homo sapien
gatgggcgagttttaccagctgtct

SEQ ID NO: 5588800 - DNA, 25 bp, Homo sapien
ccctacggtaccattgctaagcaat

SEQ ID NO: 5588801 - DNA, 25 bp, Homo sapien
gaaaccaatgctatcagagtactcc

SEQ ID NO: 5588802 - DNA, 25 bp, Homo sapien
cacaattatccagaaggcaagaagg

SEQ ID NO: 5588803 - DNA, 25 bp, Homo sapien
aaatgcataagtattctgtagccca

SEQ ID NO: 5588804 - DNA, 25 bp, Homo sapien
cagtgcagagatgagcaaacatata

SEQ ID NO: 5588805 - DNA, 25 bp, Homo sapien
atcccaatgacagtagtatgaatat

SEQ ID NO: 5588806 - DNA, 25 bp, Homo sapien
gttgcatgctgacacaaaacctcac

SEQ ID NO: 5588807 - DNA, 25 bp, Homo sapien
tctgataccagaaagattccctcta

SEQ ID NO: 5588808 - DNA, 25 bp, Homo sapien
gatgacactgttgtgacactgttgc

SEQ ID NO: 5588809 - DNA, 25 bp, Homo sapien
acatccacaacacagaaccaaacgt

SEQ ID NO: 5588810 - DNA, 25 bp, Homo sapien
tgggatttcaaatggagagaaagca

SEQ ID NO: 5588811 - DNA, 25 bp, Homo sapien
ggagagaaagcaatttaccacaaca

SEQ ID NO: 5588812 - DNA, 25 bp, Homo sapien
ctttctatgtatgtggggcaaaata

SEQ ID NO: 5588813 - DNA, 25 bp, Homo sapien
ctcttcaactcaatgggatttcaaa

SEQ ID NO: 5588814 - DNA, 25 bp, Homo sapien
ttgtgacactgttgcatgctgacac

SEQ ID NO: 5588815 - DNA, 25 bp, Homo sapien
ccttgggacgtatactcactatgcg

SEQ ID NO: 5588816 - DNA, 25 bp, Homo sapien
tgtgccctcctggatgcagtctgtc

SEQ ID NO: 5588817 - DNA, 25 bp, Homo sapien
ttccctggagcactcctgggagaac

SEQ ID NO: 5588818 - DNA, 25 bp, Homo sapien
gcgtggaactctgcaaagactcctc

SEQ ID NO: 5588819 - DNA, 25 bp, Homo sapien
ggagtgacaggtcactgtgccctcc

SEQ ID NO: 5588820 - DNA, 25 bp, Homo sapien
gttcagccttcaagtgccgggaagc

SEQ ID NO: 5588821 - DNA, 25 bp, Homo sapien
ggcataacgcaactgctgggccaat

SEQ ID NO: 5588822 - DNA, 25 bp, Homo sapien
gctggcaatcctagacagagcaggt

SEQ ID NO: 5588823 - DNA, 25 bp, Homo sapien
ggatgcaggctttgtgccgccttcc

SEQ ID NO: 5588824 - DNA, 25 bp, Homo sapien
ggagaacgaacgcagatgaattttt

SEQ ID NO: 5588825 - DNA, 25 bp, Homo sapien
catttgaaagctggaacgagcatct

SEQ ID NO: 5588826 - DNA, 25 bp, Homo sapien
tcacttggaaccacagctggcaatc

SEQ ID NO: 5588827 - DNA, 25 bp, Homo sapien
cttttgtcaaccctcttgtcactaa

SEQ ID NO: 5588828 - DNA, 25 bp, Homo sapien
ttagtgacaagagggttgacaaaag

SEQ ID NO: 5588829 - DNA, 25 bp, Homo sapien
cattcgaacattgagagttgagatc

SEQ ID NO: 5588830 - DNA, 25 bp, Homo sapien
aaaatgcagcattctttaagttcct

SEQ ID NO: 5588831 - DNA, 25 bp, Homo sapien
tctgtgacctaagcctcatagaaaa

SEQ ID NO: 5588832 - DNA, 25 bp, Homo sapien
gcagatggaataactaaagcaaatt

SEQ ID NO: 5588833 - DNA, 25 bp, Homo sapien
ggctgatagcagagtgaaataaatc

SEQ ID NO: 5588834 - DNA, 25 bp, Homo sapien
cagaaatctttgcaatgaaatggca

SEQ ID NO: 5588835 - DNA, 25 bp, Homo sapien
ggatgataaccagaggtttacttac

SEQ ID NO: 5588836 - DNA, 25 bp, Homo sapien
gcagaagtataaataacatggacac

SEQ ID NO: 5588837 - DNA, 25 bp, Homo sapien
tctaactcaaagtgaaaacaaaatg

SEQ ID NO: 5588838 - DNA, 25 bp, Homo sapien
gagagttgagatcaaactggatgat

SEQ ID NO: 5588839 - DNA, 25 bp, Homo sapien
ctaaagaggttctgtgacctaagcc

SEQ ID NO: 5588840 - DNA, 25 bp, Homo sapien
atatacggaattggttctcaaatta

SEQ ID NO: 5588841 - DNA, 25 bp, Homo sapien
taatttgagaaccaattccgtatat

SEQ ID NO: 5588842 - DNA, 25 bp, Homo sapien
taagtccacctgtaagacgtgctcc

SEQ ID NO: 5588843 - DNA, 25 bp, Homo sapien
ggtcatgcagttgaactttggggaa

SEQ ID NO: 5588844 - DNA, 25 bp, Homo sapien
gtggaaaataacaacgactcaggaa

SEQ ID NO: 5588845 - DNA, 25 bp, Homo sapien
aattcttgatggaggtatgatggca

SEQ ID NO: 5588846 - DNA, 25 bp, Homo sapien
gtgagttcctataagagagccccag

SEQ ID NO: 5588847 - DNA, 25 bp, Homo sapien
gtacagtggaaagaccttcagtgga

SEQ ID NO: 5588848 - DNA, 25 bp, Homo sapien
agtgatgatgcctgaaatgctgtac

SEQ ID NO: 5588849 - DNA, 25 bp, Homo sapien
aattaggtatgcaatataagggcct

SEQ ID NO: 5588850 - DNA, 25 bp, Homo sapien
ttccaactaccacatgctgagcatc

SEQ ID NO: 5588851 - DNA, 25 bp, Homo sapien
cccagctcgccattggggaaaagag

SEQ ID NO: 5588852 - DNA, 25 bp, Homo sapien
gaagtccaggagctgaagaattata

SEQ ID NO: 5588853 - DNA, 25 bp, Homo sapien
attttaagtctttgggaagccagtg

SEQ ID NO: 5588854 - DNA, 25 bp, Homo sapien
gcagggccctgttcatgtaaagcaa

SEQ ID NO: 5588855 - DNA, 25 bp, Homo sapien
gtttcaggcactgtgtaaagaactg

SEQ ID NO: 5588856 - DNA, 25 bp, Homo sapien
agggtgacctgctttccatggaaaa

SEQ ID NO: 5588857 - DNA, 25 bp, Homo sapien
acaatggtaaacaagaaagcaagat

SEQ ID NO: 5588858 - DNA, 25 bp, Homo sapien
agttacgaagtcatgtgatctgggt

SEQ ID NO: 5588859 - DNA, 25 bp, Homo sapien
atacaaaataacaagggtgacctgc

SEQ ID NO: 5588860 - DNA, 25 bp, Homo sapien
ttttgtatcaggaaccgaaagatgg

SEQ ID NO: 5588861 - DNA, 25 bp, Homo sapien
caagaaagcaagattccctgccctc

SEQ ID NO: 5588862 - DNA, 25 bp, Homo sapien
gaagccagtgaagaggtttaagtta

SEQ ID NO: 5588863 - DNA, 25 bp, Homo sapien
aagtttaaagagttgtcatcgatac

SEQ ID NO: 5588864 - DNA, 25 bp, Homo sapien
atgtttgtaaacacagcagtagtca

SEQ ID NO: 5588865 - DNA, 25 bp, Homo sapien
agcggaaactgttagatgcaagagt

SEQ ID NO: 5588866 - DNA, 25 bp, Homo sapien
atgagaacacgcctccaaatcaaac

SEQ ID NO: 5588867 - DNA, 25 bp, Homo sapien
tggtgcaaaatagcggaaactgtta

SEQ ID NO: 5588868 - DNA, 25 bp, Homo sapien
tgcgggctccatagttccgaaggct

SEQ ID NO: 5588869 - DNA, 25 bp, Homo sapien
ctccatagttccgaaggctgggaag

SEQ ID NO: 5588870 - DNA, 25 bp, Homo sapien
gtaaacacagcagtagtcagaaaga

SEQ ID NO: 5588871 - DNA, 25 bp, Homo sapien
acagcagtagtcagaaagaacactt

SEQ ID NO: 5588872 - DNA, 25 bp, Homo sapien
aactgttagatgcaagagtagggat

SEQ ID NO: 5588873 - DNA, 25 bp, Homo sapien
gcaaggttttgaatgagaacacgcc

SEQ ID NO: 5588874 - DNA, 25 bp, Homo sapien
tacaaaggcagatttgatctttcta

SEQ ID NO: 5588875 - DNA, 25 bp, Homo sapien
ccacagtagtgaattcccaggctag

SEQ ID NO: 5588876 - DNA, 25 bp, Homo sapien
ataacatgggcaaaagaaatcaatt

SEQ ID NO: 5588877 - DNA, 25 bp, Homo sapien
caaggatgggctcataacaactgaa

SEQ ID NO: 5588878 - DNA, 25 bp, Homo sapien
agattagtatttatagcacctcccc

SEQ ID NO: 5588879 - DNA, 25 bp, Homo sapien
cccaggctagagttgatatagtttg

SEQ ID NO: 5588880 - DNA, 25 bp, Homo sapien
tcaagggcttctcaaggacaaaaga

SEQ ID NO: 5588881 - DNA, 25 bp, Homo sapien
cgtttaaactcaggaaaacttgcac

SEQ ID NO: 5588882 - DNA, 25 bp, Homo sapien
ttcaactgaaacaggtcaagggctt

SEQ ID NO: 5588883 - DNA, 25 bp, Homo sapien
atcctcgactccacagtagtgaatt

SEQ ID NO: 5588884 - DNA, 25 bp, Homo sapien
aggacaaaagaagccactcacagtt

SEQ ID NO: 5588885 - DNA, 25 bp, Homo sapien
gcacctccccaacaaggatgggctc

SEQ ID NO: 5588886 - DNA, 25 bp, Homo sapien
caaggaataattgctagtgaggaga

SEQ ID NO: 5588887 - DNA, 25 bp, Homo sapien
tctcctcactagcaattattccttg

SEQ ID NO: 5588888 - DNA, 25 bp, Homo sapien
aatggactgggaagttgttctaact

SEQ ID NO: 5588889 - DNA, 25 bp, Homo sapien
acgtaacttgaacaaggatggccac

SEQ ID NO: 5588890 - DNA, 25 bp, Homo sapien
ccccagttaggagccccatgcttag

SEQ ID NO: 5588891 - DNA, 25 bp, Homo sapien
cacacagtcaggatacaatatgcat

SEQ ID NO: 5588892 - DNA, 25 bp, Homo sapien
cttctcaaagaactccaatggactg

SEQ ID NO: 5588893 - DNA, 25 bp, Homo sapien
ccccatgcttagtgaatgtgggggc

SEQ ID NO: 5588894 - DNA, 25 bp, Homo sapien
cagtgaatgcaaccctacctgcgac

SEQ ID NO: 5588895 - DNA, 25 bp, Homo sapien
ttcctacactctatggacctggacc

SEQ ID NO: 5588896 - DNA, 25 bp, Homo sapien
ggacccagagctacttccctgaggc

SEQ ID NO: 5588897 - DNA, 25 bp, Homo sapien
acttactggcgcagtaatgggaggt

SEQ ID NO: 5588898 - DNA, 25 bp, Homo sapien
taagaaacagaaacttactggcgca

SEQ ID NO: 5588899 - DNA, 25 bp, Homo sapien
taactttcattcaattaaacgaact

SEQ ID NO: 5588900 - DNA, 25 bp, Homo sapien
agttcgtttaattgaatgaaagtta

SEQ ID NO: 5588901 - DNA, 25 bp, Homo sapien
agccagggtagtcttcataccatgc

SEQ ID NO: 5588902 - DNA, 25 bp, Homo sapien
agaattatgtggctaacaaatatac

SEQ ID NO: 5588903 - DNA, 25 bp, Homo sapien
tacaaatgagagtctaggtcctata

SEQ ID NO: 5588904 - DNA, 25 bp, Homo sapien
gcagcaatataaactcaggtcagac

SEQ ID NO: 5588905 - DNA, 25 bp, Homo sapien
ttttacacagcggtagcagcaatat

SEQ ID NO: 5588906 - DNA, 25 bp, Homo sapien
agggttagaacgtttacaaatgaga

SEQ ID NO: 5588907 - DNA, 25 bp, Homo sapien
gtcgatagatatgcataccgtggtc

SEQ ID NO: 5588908 - DNA, 25 bp, Homo sapien
caaactcaaagtgcattgtgaatcc

SEQ ID NO: 5588909 - DNA, 25 bp, Homo sapien
tcccgtggtatctgccaacttctgc

SEQ ID NO: 5588910 - DNA, 25 bp, Homo sapien
attatgaaatggctatgagtacagt

SEQ ID NO: 5588911 - DNA, 25 bp, Homo sapien
tatgagtacagtatactgcacgtac

SEQ ID NO: 5588912 - DNA, 25 bp, Homo sapien
agaaggtatgcataaatgagctccc

SEQ ID NO: 5588913 - DNA, 25 bp, Homo sapien
caaagacatcattgcccacaaagtt

SEQ ID NO: 5588914 - DNA, 25 bp, Homo sapien
ccaccagattggctaattggagaag

SEQ ID NO: 5588915 - DNA, 25 bp, Homo sapien
ggaaaactttggcattagttagtgc

SEQ ID NO: 5588916 - DNA, 25 bp, Homo sapien
gttagtgcaactgacaatatacata

SEQ ID NO: 5588917 - DNA, 25 bp, Homo sapien
tagacaagttgacagcagtatattc

SEQ ID NO: 5588918 - DNA, 25 bp, Homo sapien
agaatcagacaaaaggatatgtaac

SEQ ID NO: 5588919 - DNA, 25 bp, Homo sapien
catgaaaatgaacatactgtccacc

SEQ ID NO: 5588920 - DNA, 25 bp, Homo sapien
tagttcccaaacaggcaagattatt

SEQ ID NO: 5588921 - DNA, 25 bp, Homo sapien
ttgctggtaaaaaccactatggaaa

SEQ ID NO: 5588922 - DNA, 25 bp, Homo sapien
aagtataaagcaaagcaaagacatc

SEQ ID NO: 5588923 - DNA, 25 bp, Homo sapien
gttgtataaattgctggggttggat

SEQ ID NO: 5588924 - DNA, 25 bp, Homo sapien
agcgactcgatgacacatggcaaaa

SEQ ID NO: 5588925 - DNA, 25 bp, Homo sapien
ttatttatccagtgaaggaagaaaa

SEQ ID NO: 5588926 - DNA, 25 bp, Homo sapien
ttgtgatccagaactcccattatac

SEQ ID NO: 5588927 - DNA, 25 bp, Homo sapien
aaagaatcccaccatggtgacagcc

SEQ ID NO: 5588928 - DNA, 25 bp, Homo sapien
atggcaaaaatggaatctcagatgt

SEQ ID NO: 5588929 - DNA, 25 bp, Homo sapien
tgagagcccagacatattgtgatcc

SEQ ID NO: 5588930 - DNA, 25 bp, Homo sapien
tccccaagatcacacaggtagtaga

SEQ ID NO: 5588931 - DNA, 25 bp, Homo sapien
tatttgaggatggcttacttttgtt

SEQ ID NO: 5588932 - DNA, 25 bp, Homo sapien
atcacaaacatctgttggggagcga

SEQ ID NO: 5588933 - DNA, 25 bp, Homo sapien
atgtttgggtaatgagagcccagac

SEQ ID NO: 5588934 - DNA, 25 bp, Homo sapien
ctgaagcagctaaatgcagtcctgt

SEQ ID NO: 5588935 - DNA, 25 bp, Homo sapien
caatgggccactgttctaggtccta

SEQ ID NO: 5588936 - DNA, 25 bp, Homo sapien
aacagaaaataagccaacagaacac

SEQ ID NO: 5588937 - DNA, 25 bp, Homo sapien
ggttccagtctaagagcaatgggcc

SEQ ID NO: 5588938 - DNA, 25 bp, Homo sapien
ttcgatttgaacagaaggaacattt

SEQ ID NO: 5588939 - DNA, 25 bp, Homo sapien
gcataccaaatgctaggtcagattt

SEQ ID NO: 5588940 - DNA, 25 bp, Homo sapien
tattgagttggatgaaacagaaaat

SEQ ID NO: 5588941 - DNA, 25 bp, Homo sapien
tcaaaatcatgaaaagcagagccta

SEQ ID NO: 5588942 - DNA, 25 bp, Homo sapien
tgaaaagcagagcctagcataccaa

SEQ ID NO: 5588943 - DNA, 25 bp, Homo sapien
gccatagagatgaggtatttcgatt

SEQ ID NO: 5588944 - DNA, 25 bp, Homo sapien
tggggctaggtctacaacatctgct

SEQ ID NO: 5588945 - DNA, 25 bp, Homo sapien
aaagactgtattaggttacatttta

SEQ ID NO: 5588946 - DNA, 25 bp, Homo sapien
taaaatgtaacctaatacagtcttt

SEQ ID NO: 5588947 - DNA, 25 bp, Homo sapien
ggcccagaaactgaagtgcctccat

SEQ ID NO: 5588948 - DNA, 25 bp, Homo sapien
attgtatcgagtgtctggcctcctt

SEQ ID NO: 5588949 - DNA, 25 bp, Homo sapien
gtgcctccatcgtagggttcctggc

SEQ ID NO: 5588950 - DNA, 25 bp, Homo sapien
tcctggcatcctgattagtcacacc

SEQ ID NO: 5588951 - DNA, 25 bp, Homo sapien
tgtttgggtctgaatcctgtgttct

SEQ ID NO: 5588952 - DNA, 25 bp, Homo sapien
agcgttttctaggctccagacactg

SEQ ID NO: 5588953 - DNA, 25 bp, Homo sapien
ggcagaatcagaatgtggacacaaa

SEQ ID NO: 5588954 - DNA, 25 bp, Homo sapien
ggaacgaatatctcaggctacggtt

SEQ ID NO: 5588955 - DNA, 25 bp, Homo sapien
caagaatgtttcagcaaggcccaga

SEQ ID NO: 5588956 - DNA, 25 bp, Homo sapien
taatcagaatttagtgagcgttttc

SEQ ID NO: 5588957 - DNA, 25 bp, Homo sapien
taagcattaagaaccgaagttcaga

SEQ ID NO: 5588958 - DNA, 25 bp, Homo sapien
ttgacccaaatacacgtatcaacac

SEQ ID NO: 5588959 - DNA, 25 bp, Homo sapien
aatgcttgtcctgtacagaatggtg

SEQ ID NO: 5588960 - DNA, 25 bp, Homo sapien
cgttctgttgaagtgtagtgagagc

SEQ ID NO: 5588961 - DNA, 25 bp, Homo sapien
cctgtacagaatggtgaagaaaagc

SEQ ID NO: 5588962 - DNA, 25 bp, Homo sapien
cagaattcaaatacgaacttgcccc

SEQ ID NO: 5588963 - DNA, 25 bp, Homo sapien
agtgtagtgagagctgactatgtga

SEQ ID NO: 5588964 - DNA, 25 bp, Homo sapien
acacgtatcaacacgagaagaggca

SEQ ID NO: 5588965 - DNA, 25 bp, Homo sapien
gtgagagctgactatgtgaactgaa

SEQ ID NO: 5588966 - DNA, 25 bp, Homo sapien
ttaaaactattgctagcttcccctg

SEQ ID NO: 5588967 - DNA, 25 bp, Homo sapien
cttgccccgttctgttgaagtgtag

SEQ ID NO: 5588968 - DNA, 25 bp, Homo sapien
cgagaagaggcacaataacatctaa

SEQ ID NO: 5588969 - DNA, 25 bp, Homo sapien
agcctctagtgaggttatggtggtg

SEQ ID NO: 5588970 - DNA, 25 bp, Homo sapien
tacagttagcagttagcaagtaaac

SEQ ID NO: 5588971 - DNA, 25 bp, Homo sapien
atcagtgtgaagtcaaaaaagcagg

SEQ ID NO: 5588972 - DNA, 25 bp, Homo sapien
caggtgatgaaacagcatgtgtcat

SEQ ID NO: 5588973 - DNA, 25 bp, Homo sapien
tcatgcatagtgaaactggtaaggg

SEQ ID NO: 5588974 - DNA, 25 bp, Homo sapien
tagcaagtaaacatgtggaacaaac

SEQ ID NO: 5588975 - DNA, 25 bp, Homo sapien
acatagctatggtacacagaatact

SEQ ID NO: 5588976 - DNA, 25 bp, Homo sapien
ataagatcttaagcctagtgccccc

SEQ ID NO: 5588977 - DNA, 25 bp, Homo sapien
agtgttgtgtaaaaagacatgtaac

SEQ ID NO: 5588978 - DNA, 25 bp, Homo sapien
atcgataccagcaaaaaaaagagga

SEQ ID NO: 5588979 - DNA, 25 bp, Homo sapien
agcaaaaagcctagagttcataatc

SEQ ID NO: 5588980 - DNA, 25 bp, Homo sapien
gatcgaaattggattcggaaccgta

SEQ ID NO: 5588981 - DNA, 25 bp, Homo sapien
tacggttccgaatccaatttcgatc

SEQ ID NO: 5588982 - DNA, 25 bp, Homo sapien
actgagtgtgcctttggtaatcctg

SEQ ID NO: 5588983 - DNA, 25 bp, Homo sapien
tcaaggtgttcaatctatgtcagtt

SEQ ID NO: 5588984 - DNA, 25 bp, Homo sapien
aagtatgaatatgtggcatgatgac

SEQ ID NO: 5588985 - DNA, 25 bp, Homo sapien
taaggtatattatggttgtaggtta

SEQ ID NO: 5588986 - DNA, 25 bp, Homo sapien
gttaacaattgcattggcaagattc

SEQ ID NO: 5588987 - DNA, 25 bp, Homo sapien
ctggatcaggtggtatgcattctta

SEQ ID NO: 5588988 - DNA, 25 bp, Homo sapien
atgtgcaaaaatatacttaaggtat

SEQ ID NO: 5588989 - DNA, 25 bp, Homo sapien
ttccaacccaaggaaagtatgaata

SEQ ID NO: 5588990 - DNA, 25 bp, Homo sapien
tggcatgatgacacaacacctttcc

SEQ ID NO: 5588991 - DNA, 25 bp, Homo sapien
gtgtttactgactactgagtgtgcc

SEQ ID NO: 5588992 - DNA, 25 bp, Homo sapien
ggtaatcctgtttaaagccatggta

SEQ ID NO: 5588993 - DNA, 25 bp, Homo sapien
taggtctcagtttagccatcagttc

SEQ ID NO: 5588994 - DNA, 25 bp, Homo sapien
tctaccatgtagcacaatgcttggc

SEQ ID NO: 5588995 - DNA, 25 bp, Homo sapien
gcttggcacatagtttgttggagat

SEQ ID NO: 5588996 - DNA, 25 bp, Homo sapien
catgtgctgaatggtatgatactat

SEQ ID NO: 5588997 - DNA, 25 bp, Homo sapien
aagaattgatactgttttgaggatt

SEQ ID NO: 5588998 - DNA, 25 bp, Homo sapien
aaataagagacaatgttagactaaa

SEQ ID NO: 5588999 - DNA, 25 bp, Homo sapien
aaattctaagactgagacaggtatt

SEQ ID NO: 5589000 - DNA, 25 bp, Homo sapien
tgttggagatgaactaaataagaga

SEQ ID NO: 5589001 - DNA, 25 bp, Homo sapien
gctgtaggtactaatactagcctcc

SEQ ID NO: 5589002 - DNA, 25 bp, Homo sapien
tttaaccttcagacgtagtgatttc

SEQ ID NO: 5589003 - DNA, 25 bp, Homo sapien
gtcatggtgttctgtcgtatttact

SEQ ID NO: 5589004 - DNA, 25 bp, Homo sapien
aaaaattccagcaaagtgagccaac

SEQ ID NO: 5589005 - DNA, 25 bp, Homo sapien
tttgtcccctccctgccatcatacc

SEQ ID NO: 5589006 - DNA, 25 bp, Homo sapien
ccaaagctgacttctggaaatctta

SEQ ID NO: 5589007 - DNA, 25 bp, Homo sapien
actgaaacccatggtatgtgataac

SEQ ID NO: 5589008 - DNA, 25 bp, Homo sapien
tgtcatataaaaggggtatttctgc

SEQ ID NO: 5589009 - DNA, 25 bp, Homo sapien
cccaataaagcaagatgagacagaa

SEQ ID NO: 5589010 - DNA, 25 bp, Homo sapien
gagaagattctaaaatggagagggg

SEQ ID NO: 5589011 - DNA, 25 bp, Homo sapien
tgaagtgagcacattttacggagtt

SEQ ID NO: 5589012 - DNA, 25 bp, Homo sapien
cagccaggaagcggttattttgcaa

SEQ ID NO: 5589013 - DNA, 25 bp, Homo sapien
ccatctggactttggtaggagtgtc

SEQ ID NO: 5589014 - DNA, 25 bp, Homo sapien
ctttggtaggagtgtcacgttttcc

SEQ ID NO: 5589015 - DNA, 25 bp, Homo sapien
cttacaggtccccacataccgaacc

SEQ ID NO: 5589016 - DNA, 25 bp, Homo sapien
gcatccgtttacatctccagatccc

SEQ ID NO: 5589017 - DNA, 25 bp, Homo sapien
aagagttggccctctcggtcagggc

SEQ ID NO: 5589018 - DNA, 25 bp, Homo sapien
ctcccagacatggcttgtgtttgct

SEQ ID NO: 5589019 - DNA, 25 bp, Homo sapien
tccagatcccacatatggaggctca

SEQ ID NO: 5589020 - DNA, 25 bp, Homo sapien
ccccaaatgctcccctctcccttac

SEQ ID NO: 5589021 - DNA, 25 bp, Homo sapien
gttggccctctcggtcagggcagga

SEQ ID NO: 5589022 - DNA, 25 bp, Homo sapien
tgtcagaggagtgctccccaaatgc

SEQ ID NO: 5589023 - DNA, 25 bp, Homo sapien
agatcccacatatggaggctcagct

SEQ ID NO: 5589024 - DNA, 25 bp, Homo sapien
ttggacttttccatgcatccgttta

SEQ ID NO: 5589025 - DNA, 25 bp, Homo sapien
gtccccacataccgaaccaaccagc

SEQ ID NO: 5589026 - DNA, 25 bp, Homo sapien
ggtgatttctctgggctcctggctg

SEQ ID NO: 5589027 - DNA, 25 bp, Homo sapien
gggagtgttctcagtggtacaaatc

SEQ ID NO: 5589028 - DNA, 25 bp, Homo sapien
gtttccattacagaggctcatggcc

SEQ ID NO: 5589029 - DNA, 25 bp, Homo sapien
ctcctggctggaagattcaggacag

SEQ ID NO: 5589030 - DNA, 25 bp, Homo sapien
tgggttaccccagctcaattccctg

SEQ ID NO: 5589031 - DNA, 25 bp, Homo sapien
ctctcctggagtagtttagttgctt

SEQ ID NO: 5589032 - DNA, 25 bp, Homo sapien
ggccccacgggtgatttctctgggc

SEQ ID NO: 5589033 - DNA, 25 bp, Homo sapien
tggaagattcaggacagctagtttc

SEQ ID NO: 5589034 - DNA, 25 bp, Homo sapien
atggcccaggtacacgactatgtgg

SEQ ID NO: 5589035 - DNA, 25 bp, Homo sapien
aaagtgacagcatagctgttcaaac

SEQ ID NO: 5589036 - DNA, 25 bp, Homo sapien
ggatccacccttaaggagcttgaga

SEQ ID NO: 5589037 - DNA, 25 bp, Homo sapien
gggtcctggaagagctctcattctt

SEQ ID NO: 5589038 - DNA, 25 bp, Homo sapien
ctaggcaggtgatatgctccacatt

SEQ ID NO: 5589039 - DNA, 25 bp, Homo sapien
attacagatgtcctaggcaggtgat

SEQ ID NO: 5589040 - DNA, 25 bp, Homo sapien
ttgagcagttcaagagggtaatgct

SEQ ID NO: 5589041 - DNA, 25 bp, Homo sapien
gcagctgaggaaattttaggtccag

SEQ ID NO: 5589042 - DNA, 25 bp, Homo sapien
ctgtgttcctcccaccaagggccaa

SEQ ID NO: 5589043 - DNA, 25 bp, Homo sapien
aggagctcacagagcagcttgagca

SEQ ID NO: 5589044 - DNA, 25 bp, Homo sapien
tgttaggtgaatgacccaaggtcac

SEQ ID NO: 5589045 - DNA, 25 bp, Homo sapien
tttggtgatgacacataagagtgac

SEQ ID NO: 5589046 - DNA, 25 bp, Homo sapien
acggcactgagatgaccctctgtct

SEQ ID NO: 5589047 - DNA, 25 bp, Homo sapien
ttttaggtccagagatgttaggtga

SEQ ID NO: 5589048 - DNA, 25 bp, Homo sapien
aggctggagccatcatgaaaacttt

SEQ ID NO: 5589049 - DNA, 25 bp, Homo sapien
atcggaatgccctttagatgaatcc

SEQ ID NO: 5589050 - DNA, 25 bp, Homo sapien
agaccagcgttgggaaattaggctg

SEQ ID NO: 5589051 - DNA, 25 bp, Homo sapien
tcctagccggaaaatgccggcggag

SEQ ID NO: 5589052 - DNA, 25 bp, Homo sapien
gtgctgttactgtgtccttgtcgtc

SEQ ID NO: 5589053 - DNA, 25 bp, Homo sapien
gcgccccagacatcgcaggaattcc

SEQ ID NO: 5589054 - DNA, 25 bp, Homo sapien
tgcacgctcgcctgtgcctgcccat

SEQ ID NO: 5589055 - DNA, 25 bp, Homo sapien
tagatgaatccccttgtgctgttac

SEQ ID NO: 5589056 - DNA, 25 bp, Homo sapien
tttcaggcagtgcacgctcgcctgt

SEQ ID NO: 5589057 - DNA, 25 bp, Homo sapien
agcctgcctgctccatcggaatgcc

SEQ ID NO: 5589058 - DNA, 25 bp, Homo sapien
catcgcaggaattccggacgctgcg

SEQ ID NO: 5589059 - DNA, 25 bp, Homo sapien
tgctcaagagagaaggtaaatgaga

SEQ ID NO: 5589060 - DNA, 25 bp, Homo sapien
tctctctctgagatgcaagatcaat

SEQ ID NO: 5589061 - DNA, 25 bp, Homo sapien
tactcccaaagagaagagactcaga

SEQ ID NO: 5589062 - DNA, 25 bp, Homo sapien
gagatgcaagatcaattactgacgt

SEQ ID NO: 5589063 - DNA, 25 bp, Homo sapien
ttgatggatactcccaaagagaaga

SEQ ID NO: 5589064 - DNA, 25 bp, Homo sapien
atggtaaataaaaatgcaggagtcc

SEQ ID NO: 5589065 - DNA, 25 bp, Homo sapien
agtaaaaacgctgccaagtttgtgc

SEQ ID NO: 5589066 - DNA, 25 bp, Homo sapien
actgacgttgctcaagagagaaggt

SEQ ID NO: 5589067 - DNA, 25 bp, Homo sapien
atccttacagtaaggggtttcagga

SEQ ID NO: 5589068 - DNA, 25 bp, Homo sapien
tcgtcagtctgggaatggtaaataa

SEQ ID NO: 5589069 - DNA, 25 bp, Homo sapien
aatgcaggagtccaaaatgcttctc

SEQ ID NO: 5589070 - DNA, 25 bp, Homo sapien
gcagaggcacacacaacctaaaacc

SEQ ID NO: 5589071 - DNA, 25 bp, Homo sapien
cttgagaagtttaggaaaatcccat

SEQ ID NO: 5589072 - DNA, 25 bp, Homo sapien
gccagctagggattaaaaatgtgca

SEQ ID NO: 5589073 - DNA, 25 bp, Homo sapien
aggtcagtatctgggtcaggctgat

SEQ ID NO: 5589074 - DNA, 25 bp, Homo sapien
ggggctcctccagaactcaagtcct

SEQ ID NO: 5589075 - DNA, 25 bp, Homo sapien
tagttattcgtgttgatggagacag

SEQ ID NO: 5589076 - DNA, 25 bp, Homo sapien
atctagccaggtgtcgtaagtcatt

SEQ ID NO: 5589077 - DNA, 25 bp, Homo sapien
atttgtttttagtggggtgatctgg

SEQ ID NO: 5589078 - DNA, 25 bp, Homo sapien
gttgtaggcctcttaggtcagtatc

SEQ ID NO: 5589079 - DNA, 25 bp, Homo sapien
tcttaggaaatgcaaatgagggaga

SEQ ID NO: 5589080 - DNA, 25 bp, Homo sapien
cctgttagggtttggtcaccagagg

SEQ ID NO: 5589081 - DNA, 25 bp, Homo sapien
gatggagtctcatgatatttcccag

SEQ ID NO: 5589082 - DNA, 25 bp, Homo sapien
aggtgcaatcatagcacaccacagc

SEQ ID NO: 5589083 - DNA, 25 bp, Homo sapien
atagcacaccacagccttgcactcc

SEQ ID NO: 5589084 - DNA, 25 bp, Homo sapien
acaatactttgtgggaaaacttcat

SEQ ID NO: 5589085 - DNA, 25 bp, Homo sapien
tcctgtgctactttccccttgctgc

SEQ ID NO: 5589086 - DNA, 25 bp, Homo sapien
ttattattcgtggtgcttaaggccc

SEQ ID NO: 5589087 - DNA, 25 bp, Homo sapien
atgccatccatcttcctggccctcc

SEQ ID NO: 5589088 - DNA, 25 bp, Homo sapien
tttactgctctagggcatgatccac

SEQ ID NO: 5589089 - DNA, 25 bp, Homo sapien
tcataagataaaatccacatgcttt

SEQ ID NO: 5589090 - DNA, 25 bp, Homo sapien
ctagggcatgatccacatgacaaac

SEQ ID NO: 5589091 - DNA, 25 bp, Homo sapien
tgacaaactatgattaatgccatcc

SEQ ID NO: 5589092 - DNA, 25 bp, Homo sapien
ggcctcccagtgtaacccagagtcg

SEQ ID NO: 5589093 - DNA, 25 bp, Homo sapien
cgactctgggttacactgggaggcc

SEQ ID NO: 5589094 - DNA, 25 bp, Homo sapien
agatttggtgtaaaggcctgtacat

SEQ ID NO: 5589095 - DNA, 25 bp, Homo sapien
gttctgagcatcggcgtgcatgaag

SEQ ID NO: 5589096 - DNA, 25 bp, Homo sapien
cagtcacagtccagccataggaccc

SEQ ID NO: 5589097 - DNA, 25 bp, Homo sapien
ggcctgtacataggctggaagtccc

SEQ ID NO: 5589098 - DNA, 25 bp, Homo sapien
ccgggcaacagcatcccatgtgcct

SEQ ID NO: 5589099 - DNA, 25 bp, Homo sapien
tctgatagaagctggtaagccctag

SEQ ID NO: 5589100 - DNA, 25 bp, Homo sapien
gtgatgcccctgaacgggcctagct

SEQ ID NO: 5589101 - DNA, 25 bp, Homo sapien
cgggcctagctcctgcacagtcaca

SEQ ID NO: 5589102 - DNA, 25 bp, Homo sapien
ggaagtcccacagcccacatccagc

SEQ ID NO: 5589103 - DNA, 25 bp, Homo sapien
tccagcacttgcaaaggactggcag

SEQ ID NO: 5589104 - DNA, 25 bp, Homo sapien
tcagggtcctcatctgagaactgaa

SEQ ID NO: 5589105 - DNA, 25 bp, Homo sapien
tcctacacgtaactggggttttgca

SEQ ID NO: 5589106 - DNA, 25 bp, Homo sapien
atggacaagaattaatggttctccc

SEQ ID NO: 5589107 - DNA, 25 bp, Homo sapien
ttctaaatcaagccttatggacaag

SEQ ID NO: 5589108 - DNA, 25 bp, Homo sapien
aatctggtcacctttctatgggaaa

SEQ ID NO: 5589109 - DNA, 25 bp, Homo sapien
aaatcggtgtgtcacttgggcaagt

SEQ ID NO: 5589110 - DNA, 25 bp, Homo sapien
aatatatcccaaatcggtgtgtcac

SEQ ID NO: 5589111 - DNA, 25 bp, Homo sapien
caagtatttacaagtggctcaattt

SEQ ID NO: 5589112 - DNA, 25 bp, Homo sapien
tgactgactgactgtgattctgatg

SEQ ID NO: 5589113 - DNA, 25 bp, Homo sapien
actggggttttgcaacagatgttac

SEQ ID NO: 5589114 - DNA, 25 bp, Homo sapien
ttcatgcataaagtcatctggcctc

SEQ ID NO: 5589115 - DNA, 25 bp, Homo sapien
taaagtgccaaccttgactgactga

SEQ ID NO: 5589116 - DNA, 25 bp, Homo sapien
gatgaagcttagcttgctggcccgc

SEQ ID NO: 5589117 - DNA, 25 bp, Homo sapien
tgaaatctggaagactctgggacag

SEQ ID NO: 5589118 - DNA, 25 bp, Homo sapien
aacgatactgatctgtggcccaggg

SEQ ID NO: 5589119 - DNA, 25 bp, Homo sapien
gctctatgccatacatgaggaagaa

SEQ ID NO: 5589120 - DNA, 25 bp, Homo sapien
ctctgggacagtttgtgatagacaa

SEQ ID NO: 5589121 - DNA, 25 bp, Homo sapien
aattccatggctaaaagggagaatc

SEQ ID NO: 5589122 - DNA, 25 bp, Homo sapien
agaaaacaaagtccgtgccttcctg

SEQ ID NO: 5589123 - DNA, 25 bp, Homo sapien
tacatccctcgcgtgggcagttcac

SEQ ID NO: 5589124 - DNA, 25 bp, Homo sapien
atcggcaggtgctggattctcataa

SEQ ID NO: 5589125 - DNA, 25 bp, Homo sapien
aacaggccacagaacgatactgatc

SEQ ID NO: 5589126 - DNA, 25 bp, Homo sapien
ctgtaaaaacagatgaagcttagct

SEQ ID NO: 5589127 - DNA, 25 bp, Homo sapien
gggctgcaggctatccataacatac

SEQ ID NO: 5589128 - DNA, 25 bp, Homo sapien
tgtaagtcaagtatagttcggaatt

SEQ ID NO: 5589129 - DNA, 25 bp, Homo sapien
gcacccgtgcaaggtaagtactact

SEQ ID NO: 5589130 - DNA, 25 bp, Homo sapien
gccaggcactttacacgggttgtgt

SEQ ID NO: 5589131 - DNA, 25 bp, Homo sapien
cgggttgtgtcgtctcatggaattc

SEQ ID NO: 5589132 - DNA, 25 bp, Homo sapien
gtgcaccctggtaaatgtggtcctc

SEQ ID NO: 5589133 - DNA, 25 bp, Homo sapien
atgctgtctcgtggcacacaccaat

SEQ ID NO: 5589134 - DNA, 25 bp, Homo sapien
ggcccagagaggttcgactactctc

SEQ ID NO: 5589135 - DNA, 25 bp, Homo sapien
ctctagtacatgggcaagcagagat

SEQ ID NO: 5589136 - DNA, 25 bp, Homo sapien
ccatgaccttgactggaacccaggg

SEQ ID NO: 5589137 - DNA, 25 bp, Homo sapien
catggaattctctcagcacccgtgc

SEQ ID NO: 5589138 - DNA, 25 bp, Homo sapien
agggacccagaggctaattatcatc

SEQ ID NO: 5589139 - DNA, 25 bp, Homo sapien
atgtgttgacagaatgcttaagagt

SEQ ID NO: 5589140 - DNA, 25 bp, Homo sapien
tctagaatacagacggaagaactga

SEQ ID NO: 5589141 - DNA, 25 bp, Homo sapien
acaaaggcacgatcttgaggccatt

SEQ ID NO: 5589142 - DNA, 25 bp, Homo sapien
gtcgcatcggagcgtacccatgttt

SEQ ID NO: 5589143 - DNA, 25 bp, Homo sapien
actcccagcgccagctttgtctccc

SEQ ID NO: 5589144 - DNA, 25 bp, Homo sapien
cacagttaagtgcagcagagaatgg

SEQ ID NO: 5589145 - DNA, 25 bp, Homo sapien
ggtgacgaatggttcgctccgcatt

SEQ ID NO: 5589146 - DNA, 25 bp, Homo sapien
aacgcgaaccctgccaggctgaatt

SEQ ID NO: 5589147 - DNA, 25 bp, Homo sapien
aaacaaggccgtcttttctgtgaac

SEQ ID NO: 5589148 - DNA, 25 bp, Homo sapien
tgaggccatttcgcgggcccttttc

SEQ ID NO: 5589149 - DNA, 25 bp, Homo sapien
gtgtgtgccacactctagaatggtg

SEQ ID NO: 5589150 - DNA, 25 bp, Homo sapien
tctagaatggtggcaatctagaacc

SEQ ID NO: 5589151 - DNA, 25 bp, Homo sapien
tgtagcatagaaaagcaggccataa

SEQ ID NO: 5589152 - DNA, 25 bp, Homo sapien
tatatagaccagaattgagtagttc

SEQ ID NO: 5589153 - DNA, 25 bp, Homo sapien
tgatgggtagttcctcaaaacaacc

SEQ ID NO: 5589154 - DNA, 25 bp, Homo sapien
aagcaggccataatacagcggcttt

SEQ ID NO: 5589155 - DNA, 25 bp, Homo sapien
gagcacaactgccacaactggcttt

SEQ ID NO: 5589156 - DNA, 25 bp, Homo sapien
agtagttctgaaaatctgtagcata

SEQ ID NO: 5589157 - DNA, 25 bp, Homo sapien
atctagaacctgaactgcattttgt

SEQ ID NO: 5589158 - DNA, 25 bp, Homo sapien
agagtaaggctataaatgatgggta

SEQ ID NO: 5589159 - DNA, 25 bp, Homo sapien
ccaacatccaaatgaatcacgccct

SEQ ID NO: 5589160 - DNA, 25 bp, Homo sapien
gggtctcacgggtgccttctcatgc

SEQ ID NO: 5589161 - DNA, 25 bp, Homo sapien
tcgtcagccataaggctgcccagga

SEQ ID NO: 5589162 - DNA, 25 bp, Homo sapien
accacttgctgaaatagaatgcctc

SEQ ID NO: 5589163 - DNA, 25 bp, Homo sapien
gctcagtaaggtagctcgtcagcca

SEQ ID NO: 5589164 - DNA, 25 bp, Homo sapien
atggggtggatactgacctacattc

SEQ ID NO: 5589165 - DNA, 25 bp, Homo sapien
tcaaagcatttattggccaggtttc

SEQ ID NO: 5589166 - DNA, 25 bp, Homo sapien
gtagaggcaggaatatgctcagtaa

SEQ ID NO: 5589167 - DNA, 25 bp, Homo sapien
aaccctggatctgttctggtgaact

SEQ ID NO: 5589168 - DNA, 25 bp, Homo sapien
caggtttctaaagtgtgatagcatc

SEQ ID NO: 5589169 - DNA, 25 bp, Homo sapien
ggaatttagaatcgaggtgacaccg

SEQ ID NO: 5589170 - DNA, 25 bp, Homo sapien
ttactggagccatatctaatgactt

SEQ ID NO: 5589171 - DNA, 25 bp, Homo sapien
gggctgcccctgcataaggtgataa

SEQ ID NO: 5589172 - DNA, 25 bp, Homo sapien
cctggacttgtgacatggcaatatc

SEQ ID NO: 5589173 - DNA, 25 bp, Homo sapien
ctgcttgatatatggaaggccaggc

SEQ ID NO: 5589174 - DNA, 25 bp, Homo sapien
cctatcaactttatggcaggtggca

SEQ ID NO: 5589175 - DNA, 25 bp, Homo sapien
gaagtggtttagacatcagggctat

SEQ ID NO: 5589176 - DNA, 25 bp, Homo sapien
agggggaaaataggaatatattatc

SEQ ID NO: 5589177 - DNA, 25 bp, Homo sapien
tgcagaatgggattatggtagtcta

SEQ ID NO: 5589178 - DNA, 25 bp, Homo sapien
gcataaagacactctggaaggacac

SEQ ID NO: 5589179 - DNA, 25 bp, Homo sapien
ataaaaaagatagctgaagtggttt

SEQ ID NO: 5589180 - DNA, 25 bp, Homo sapien
tcccctaagcacaacggtgagacca

SEQ ID NO: 5589181 - DNA, 25 bp, Homo sapien
ataaggtgataaaactctgcttgat

SEQ ID NO: 5589182 - DNA, 25 bp, Homo sapien
gggattgcaggtgtgcaccatcaca

SEQ ID NO: 5589183 - DNA, 25 bp, Homo sapien
ttattcatcaggacatattgagatc

SEQ ID NO: 5589184 - DNA, 25 bp, Homo sapien
acctgcctcagtctcccatagtgct

SEQ ID NO: 5589185 - DNA, 25 bp, Homo sapien
tatatctcaagaatttccaatgttc

SEQ ID NO: 5589186 - DNA, 25 bp, Homo sapien
tcctgagtacctgggattgcaggtg

SEQ ID NO: 5589187 - DNA, 25 bp, Homo sapien
ctcccgcataagcctcctgagtacc

SEQ ID NO: 5589188 - DNA, 25 bp, Homo sapien
atggaaagattttgatgtattttat

SEQ ID NO: 5589189 - DNA, 25 bp, Homo sapien
tcatcaggacatattgagatcatac

SEQ ID NO: 5589190 - DNA, 25 bp, Homo sapien
aagcgattctcccgcataagcctcc

SEQ ID NO: 5589191 - DNA, 25 bp, Homo sapien
caccatcacacacagcttaattttt

SEQ ID NO: 5589192 - DNA, 25 bp, Homo sapien
aagtatacaaataaaatggaaagat

SEQ ID NO: 5589193 - DNA, 25 bp, Homo sapien
caaagtctaggagggattgttttgc

SEQ ID NO: 5589194 - DNA, 25 bp, Homo sapien
gtgaggcgcttttgcctcccccgac

SEQ ID NO: 5589195 - DNA, 25 bp, Homo sapien
tctcagcagcgacttcggccttcat

SEQ ID NO: 5589196 - DNA, 25 bp, Homo sapien
tggaggacgttccaagtccttggtc

SEQ ID NO: 5589197 - DNA, 25 bp, Homo sapien
accccacagtgcctacccctccaga

SEQ ID NO: 5589198 - DNA, 25 bp, Homo sapien
tgcctacccctccagacgggggctg

SEQ ID NO: 5589199 - DNA, 25 bp, Homo sapien
ctacaacagtatcccccacgatcat

SEQ ID NO: 5589200 - DNA, 25 bp, Homo sapien
aggcccccacattcttcgcttgctg

SEQ ID NO: 5589201 - DNA, 25 bp, Homo sapien
tgtaacagagtgacggttgtctttc

SEQ ID NO: 5589202 - DNA, 25 bp, Homo sapien
ttcgcttgctgactgaccacaaagt

SEQ ID NO: 5589203 - DNA, 25 bp, Homo sapien
atctacaaaccgagaagcaacaagg

SEQ ID NO: 5589204 - DNA, 25 bp, Homo sapien
ggcctcctgccacacgaagccctgt

SEQ ID NO: 5589205 - DNA, 25 bp, Homo sapien
ctgttccggcttgacaggctccggg

SEQ ID NO: 5589206 - DNA, 25 bp, Homo sapien
gctgggccttcttgtggcgttccac

SEQ ID NO: 5589207 - DNA, 25 bp, Homo sapien
ggatgtgcgtcaccaggttgtactt

SEQ ID NO: 5589208 - DNA, 25 bp, Homo sapien
gacttctcgcacatgcggcactgcc

SEQ ID NO: 5589209 - DNA, 25 bp, Homo sapien
cgccgtgtcagcctcgaactcactg

SEQ ID NO: 5589210 - DNA, 25 bp, Homo sapien
ccgcctccaccagataggagtcgtc

SEQ ID NO: 5589211 - DNA, 25 bp, Homo sapien
gcctcgaactcactggcctcctgcc

SEQ ID NO: 5589212 - DNA, 25 bp, Homo sapien
ttccacggtcgaacccgccgtgtca

SEQ ID NO: 5589213 - DNA, 25 bp, Homo sapien
ctggcggtcgcccgcctccaccaga

SEQ ID NO: 5589214 - DNA, 25 bp, Homo sapien
gataggagtcgtcaatctgcacgtt

SEQ ID NO: 5589215 - DNA, 25 bp, Homo sapien
gcagttatacaggatgaaaagcaac

SEQ ID NO: 5589216 - DNA, 25 bp, Homo sapien
ttaacatatctgggtaggcatttcc

SEQ ID NO: 5589217 - DNA, 25 bp, Homo sapien
tttggtgatgacttaagatctactc

SEQ ID NO: 5589218 - DNA, 25 bp, Homo sapien
ggtcaccatggtgtacatgagctct

SEQ ID NO: 5589219 - DNA, 25 bp, Homo sapien
caggtcatgatgtgtacagcagtgg

SEQ ID NO: 5589220 - DNA, 25 bp, Homo sapien
tctagaacataatatgagccggcac

SEQ ID NO: 5589221 - DNA, 25 bp, Homo sapien
gctttgcctggctcagtacagctga

SEQ ID NO: 5589222 - DNA, 25 bp, Homo sapien
gctgagccttcccacagtgtatgct

SEQ ID NO: 5589223 - DNA, 25 bp, Homo sapien
aacatatttcttaggccaacggccc

SEQ ID NO: 5589224 - DNA, 25 bp, Homo sapien
tgagccggcacaaagttgcagttat

SEQ ID NO: 5589225 - DNA, 25 bp, Homo sapien
ggtaatcggatgctttgcctggctc

SEQ ID NO: 5589226 - DNA, 25 bp, Homo sapien
gcatctccaactgagatacccagtt

SEQ ID NO: 5589227 - DNA, 25 bp, Homo sapien
taagagtacaaaaatcataatcacc

SEQ ID NO: 5589228 - DNA, 25 bp, Homo sapien
acttattaaaagacagatcatcact

SEQ ID NO: 5589229 - DNA, 25 bp, Homo sapien
agtcccagaccccccaacatcctca

SEQ ID NO: 5589230 - DNA, 25 bp, Homo sapien
ccaagactgccgactagaagcagct

SEQ ID NO: 5589231 - DNA, 25 bp, Homo sapien
gcagagattttgtagtttagagaac

SEQ ID NO: 5589232 - DNA, 25 bp, Homo sapien
gataagcagagattttgtagtttag

SEQ ID NO: 5589233 - DNA, 25 bp, Homo sapien
tacatacatggaagttgctttactc

SEQ ID NO: 5589234 - DNA, 25 bp, Homo sapien
taatcaccaacctcttgggaatccc

SEQ ID NO: 5589235 - DNA, 25 bp, Homo sapien
gccgactagaagcagctctggtctg

SEQ ID NO: 5589236 - DNA, 25 bp, Homo sapien
actagatggtcggcatgacccacag

SEQ ID NO: 5589237 - DNA, 25 bp, Homo sapien
acactaagcatcagtctaaatattc

SEQ ID NO: 5589238 - DNA, 25 bp, Homo sapien
gggaagtcttgactgactgtgacca

SEQ ID NO: 5589239 - DNA, 25 bp, Homo sapien
tactggttagcacatgtccactgat

SEQ ID NO: 5589240 - DNA, 25 bp, Homo sapien
ttgtttttggtgtggtatgttattc

SEQ ID NO: 5589241 - DNA, 25 bp, Homo sapien
tgctggttaacctgtacaacattcc

SEQ ID NO: 5589242 - DNA, 25 bp, Homo sapien
tttaggcctcctgctgttcttactg

SEQ ID NO: 5589243 - DNA, 25 bp, Homo sapien
tctcttcctgctaggcccctcagaa

SEQ ID NO: 5589244 - DNA, 25 bp, Homo sapien
ttgactgactgtgaccattagtttc

SEQ ID NO: 5589245 - DNA, 25 bp, Homo sapien
atgtccactgatgcacgccccaata

SEQ ID NO: 5589246 - DNA, 25 bp, Homo sapien
atgtctttgtgttgctggttaacct

SEQ ID NO: 5589247 - DNA, 25 bp, Homo sapien
cacgccccaataagagcattacttc

SEQ ID NO: 5589248 - DNA, 25 bp, Homo sapien
tttcgtcattagagatagagagcac

SEQ ID NO: 5589249 - DNA, 25 bp, Homo sapien
aatccgataataaggaccggagcag

SEQ ID NO: 5589250 - DNA, 25 bp, Homo sapien
gctagcagattcaagaataaacctt

SEQ ID NO: 5589251 - DNA, 25 bp, Homo sapien
tgtgtggtgcagaacttgataaatt

SEQ ID NO: 5589252 - DNA, 25 bp, Homo sapien
gatagagagcacgatgtttagattc

SEQ ID NO: 5589253 - DNA, 25 bp, Homo sapien
accaccacaagcaacagcaccaatt

SEQ ID NO: 5589254 - DNA, 25 bp, Homo sapien
gtctgtgacacttataaaaaccaac

SEQ ID NO: 5589255 - DNA, 25 bp, Homo sapien
tcaaaggaagtatgttaaaaggctc

SEQ ID NO: 5589256 - DNA, 25 bp, Homo sapien
acacatgaaaaaaaatccgataata

SEQ ID NO: 5589257 - DNA, 25 bp, Homo sapien
ttcataagagcttgctggagaagaa

SEQ ID NO: 5589258 - DNA, 25 bp, Homo sapien
caactttacaccatgctagcagatt

SEQ ID NO: 5589259 - DNA, 25 bp, Homo sapien
gtggtggcaaacacctgatgcctca

SEQ ID NO: 5589260 - DNA, 25 bp, Homo sapien
ctgctgagaaagaagcttctaggtt

SEQ ID NO: 5589261 - DNA, 25 bp, Homo sapien
gaggaaacagccaagctgagattcg

SEQ ID NO: 5589262 - DNA, 25 bp, Homo sapien
cctgatgcctcaaagaaccaagaga

SEQ ID NO: 5589263 - DNA, 25 bp, Homo sapien
agtccagtggtggcaaacacctgat

SEQ ID NO: 5589264 - DNA, 25 bp, Homo sapien
cattctagttcagggatacaaacaa

SEQ ID NO: 5589265 - DNA, 25 bp, Homo sapien
gtcctgggagtgatctctccaagga

SEQ ID NO: 5589266 - DNA, 25 bp, Homo sapien
agaaagaagcttctaggttggggaa

SEQ ID NO: 5589267 - DNA, 25 bp, Homo sapien
tgcctcaaagaaccaagagaagaga

SEQ ID NO: 5589268 - DNA, 25 bp, Homo sapien
gcaggggtgctcttaagaattcaga

SEQ ID NO: 5589269 - DNA, 25 bp, Homo sapien
aacagccaagctgagattcgaaggg

SEQ ID NO: 5589270 - DNA, 25 bp, Homo sapien
catatgttgaattgacaagagtatt

SEQ ID NO: 5589271 - DNA, 25 bp, Homo sapien
caatccacggatcctgctaatcatc

SEQ ID NO: 5589272 - DNA, 25 bp, Homo sapien
gacagtctgagcacagtggcttaag

SEQ ID NO: 5589273 - DNA, 25 bp, Homo sapien
taagacctggatcaaagttagcttc

SEQ ID NO: 5589274 - DNA, 25 bp, Homo sapien
tgagctatgttgtcagtagttacca

SEQ ID NO: 5589275 - DNA, 25 bp, Homo sapien
gtgtaataacgagaaaacagaggat

SEQ ID NO: 5589276 - DNA, 25 bp, Homo sapien
atccagcatgttttagcacgtcctt

SEQ ID NO: 5589277 - DNA, 25 bp, Homo sapien
ttgaaaggtcacatattaaggatag

SEQ ID NO: 5589278 - DNA, 25 bp, Homo sapien
attaaggatagaagtttgtgtaata

SEQ ID NO: 5589279 - DNA, 25 bp, Homo sapien
aagaagaaacaagacgtaattgtgc

SEQ ID NO: 5589280 - DNA, 25 bp, Homo sapien
atgattaggttgaagctataaacta

SEQ ID NO: 5589281 - DNA, 25 bp, Homo sapien
acaagtgataaaaaccagaattttc

SEQ ID NO: 5589282 - DNA, 25 bp, Homo sapien
tggtgaatatcaactccaggatggc

SEQ ID NO: 5589283 - DNA, 25 bp, Homo sapien
acaaaggtcccatgtgttgacttct

SEQ ID NO: 5589284 - DNA, 25 bp, Homo sapien
tttctcatggtttggttccacgcca

SEQ ID NO: 5589285 - DNA, 25 bp, Homo sapien
cacagggggtccccaatatgggttg

SEQ ID NO: 5589286 - DNA, 25 bp, Homo sapien
agtatttaagcctagcaatagggtc

SEQ ID NO: 5589287 - DNA, 25 bp, Homo sapien
gaggaaagaaaatggttcatgtgac

SEQ ID NO: 5589288 - DNA, 25 bp, Homo sapien
agagaagcccttagaaatgggacaa

SEQ ID NO: 5589289 - DNA, 25 bp, Homo sapien
ccagctgctactagtcacagggggt

SEQ ID NO: 5589290 - DNA, 25 bp, Homo sapien
ggttcatgtgacacaaaggtcccat

SEQ ID NO: 5589291 - DNA, 25 bp, Homo sapien
agcaatagggtcagtccagttagta

SEQ ID NO: 5589292 - DNA, 25 bp, Homo sapien
tatgactcagcttgtataaagagaa

SEQ ID NO: 5589293 - DNA, 25 bp, Homo sapien
atttgcaaagtgatcaccaaagtct

SEQ ID NO: 5589294 - DNA, 25 bp, Homo sapien
gccttgctagcttgtttgaaagtat

SEQ ID NO: 5589295 - DNA, 25 bp, Homo sapien
acaaatatttgcaaagtgatcacca

SEQ ID NO: 5589296 - DNA, 25 bp, Homo sapien
ataaaataactcataagggcaacag

SEQ ID NO: 5589297 - DNA, 25 bp, Homo sapien
caatgggttttatcagtacagactt

SEQ ID NO: 5589298 - DNA, 25 bp, Homo sapien
tttaaaagacaggttctcaaactca

SEQ ID NO: 5589299 - DNA, 25 bp, Homo sapien
taaacagaactaaccaaatatataa

SEQ ID NO: 5589300 - DNA, 25 bp, Homo sapien
aaacacaaatccagaatataaaatc

SEQ ID NO: 5589301 - DNA, 25 bp, Homo sapien
ctcaaactcaaggattaacaaatat

SEQ ID NO: 5589302 - DNA, 25 bp, Homo sapien
tttgtacacaatgggttttatcagt

SEQ ID NO: 5589303 - DNA, 25 bp, Homo sapien
ttagaagtaaacatgtgacaagcat

SEQ ID NO: 5589304 - DNA, 25 bp, Homo sapien
tagcatatcatcaagaaacgaccat

SEQ ID NO: 5589305 - DNA, 25 bp, Homo sapien
aaacgaccataaagaatgggcaacc

SEQ ID NO: 5589306 - DNA, 25 bp, Homo sapien
catgacagtttagaccctatgtggt

SEQ ID NO: 5589307 - DNA, 25 bp, Homo sapien
caaaaaatgtgaatggaaatgaggt

SEQ ID NO: 5589308 - DNA, 25 bp, Homo sapien
agggtgaaatctattgggctgcatt

SEQ ID NO: 5589309 - DNA, 25 bp, Homo sapien
tcccagatggtcagttaaggcattc

SEQ ID NO: 5589310 - DNA, 25 bp, Homo sapien
gggaggcatgattaatccactcctt

SEQ ID NO: 5589311 - DNA, 25 bp, Homo sapien
ggctgcattcccagatggtcagtta

SEQ ID NO: 5589312 - DNA, 25 bp, Homo sapien
ctccatcttaaacaggagccgggca

SEQ ID NO: 5589313 - DNA, 25 bp, Homo sapien
aggatttgttagaggcatgtgaacc

SEQ ID NO: 5589314 - DNA, 25 bp, Homo sapien
cattgcacagtacctgaaaatggta

SEQ ID NO: 5589315 - DNA, 25 bp, Homo sapien
aagccacgcacaaatagaacaaaag

SEQ ID NO: 5589316 - DNA, 25 bp, Homo sapien
ctgtggggactacacaaacagagaa

SEQ ID NO: 5589317 - DNA, 25 bp, Homo sapien
ggaaaaatccatcaagccacgcaca

SEQ ID NO: 5589318 - DNA, 25 bp, Homo sapien
ctgtatgacccaaccaaaacgaaac

SEQ ID NO: 5589319 - DNA, 25 bp, Homo sapien
ttgatttaagagatagttccatgtt

SEQ ID NO: 5589320 - DNA, 25 bp, Homo sapien
ccacccaccttcagaatggctttcc

SEQ ID NO: 5589321 - DNA, 25 bp, Homo sapien
agaacaaaagtagcagagtcaaact

SEQ ID NO: 5589322 - DNA, 25 bp, Homo sapien
ctttactataggaaacagctgtggg

SEQ ID NO: 5589323 - DNA, 25 bp, Homo sapien
tcattgtgacgagtgtatagatggg

SEQ ID NO: 5589324 - DNA, 25 bp, Homo sapien
aactcaggaaaagcatctatatgat

SEQ ID NO: 5589325 - DNA, 25 bp, Homo sapien
ctgaaaatgtgtaacacaggcacat

SEQ ID NO: 5589326 - DNA, 25 bp, Homo sapien
ttacaaagaatgattgcaatgagac

SEQ ID NO: 5589327 - DNA, 25 bp, Homo sapien
gggcacaaagaaacatttgtggcct

SEQ ID NO: 5589328 - DNA, 25 bp, Homo sapien
tcgtttaataccaaaacagctcctc

SEQ ID NO: 5589329 - DNA, 25 bp, Homo sapien
gacctggaaatacccttgtgcatgc

SEQ ID NO: 5589330 - DNA, 25 bp, Homo sapien
acaaatgtggataaactgtatctgc

SEQ ID NO: 5589331 - DNA, 25 bp, Homo sapien
gattgcaatgagacttggaactttt

SEQ ID NO: 5589332 - DNA, 25 bp, Homo sapien
ttttatcataagcaacactgttcac

SEQ ID NO: 5589333 - DNA, 25 bp, Homo sapien
acaatgataaatgacctggaaatac

SEQ ID NO: 5589334 - DNA, 25 bp, Homo sapien
cttgtgcatgcaggggcacaaagaa

SEQ ID NO: 5589335 - DNA, 25 bp, Homo sapien
tcatgttcatgtacacacagcatta

SEQ ID NO: 5589336 - DNA, 25 bp, Homo sapien
tgtccgacaagggacacggccgtcg

SEQ ID NO: 5589337 - DNA, 25 bp, Homo sapien
cgacggccgtgtcccttgtcggaca

SEQ ID NO: 5589338 - DNA, 25 bp, Homo sapien
tgatccagaagtttgcctagacagc

SEQ ID NO: 5589339 - DNA, 25 bp, Homo sapien
cacagttaaggtcttgaaagttaag

SEQ ID NO: 5589340 - DNA, 25 bp, Homo sapien
agttaagaatttgaataagagaaac

SEQ ID NO: 5589341 - DNA, 25 bp, Homo sapien
tattgcctattggaggtgctgacac

SEQ ID NO: 5589342 - DNA, 25 bp, Homo sapien
tggaggtgctgacacataagcatct

SEQ ID NO: 5589343 - DNA, 25 bp, Homo sapien
agcatctaaagatcaggaagactag

SEQ ID NO: 5589344 - DNA, 25 bp, Homo sapien
atcctcaaaggtgatctaaacgttt

SEQ ID NO: 5589345 - DNA, 25 bp, Homo sapien
tttgtactgggcatggtaacttttc

SEQ ID NO: 5589346 - DNA, 25 bp, Homo sapien
aaaattctagctgaggtttgaactt

SEQ ID NO: 5589347 - DNA, 25 bp, Homo sapien
ggaagactagtctggacaggattct

SEQ ID NO: 5589348 - DNA, 25 bp, Homo sapien
ccatgagccatatttgcatcgtagt

SEQ ID NO: 5589349 - DNA, 25 bp, Homo sapien
tgtgttacggttaaagtctggcagg

SEQ ID NO: 5589350 - DNA, 25 bp, Homo sapien
acagcatgttgtacaccttagatgt

SEQ ID NO: 5589351 - DNA, 25 bp, Homo sapien
cggttaaagtctggcaggttaagta

SEQ ID NO: 5589352 - DNA, 25 bp, Homo sapien
agaatggtgctatttggcaatacat

SEQ ID NO: 5589353 - DNA, 25 bp, Homo sapien
aggagaaatgttggatgagaactta

SEQ ID NO: 5589354 - DNA, 25 bp, Homo sapien
tccagaaggatacagaagaaactgg

SEQ ID NO: 5589355 - DNA, 25 bp, Homo sapien
aagaaactggcaatggtgattgcct

SEQ ID NO: 5589356 - DNA, 25 bp, Homo sapien
agaagagagaatatagaatgctgtc

SEQ ID NO: 5589357 - DNA, 25 bp, Homo sapien
tttaagagcccccatggcaagagag

SEQ ID NO: 5589358 - DNA, 25 bp, Homo sapien
aagtattaaagattagggtaccata

SEQ ID NO: 5589359 - DNA, 25 bp, Homo sapien
ttattcacagaaataggtaagatat

SEQ ID NO: 5589360 - DNA, 25 bp, Homo sapien
cagctctgcccgaaactctgggcct

SEQ ID NO: 5589361 - DNA, 25 bp, Homo sapien
aagccctgcataaaagacagccatc

SEQ ID NO: 5589362 - DNA, 25 bp, Homo sapien
ctctgggcctattagctcagtgaag

SEQ ID NO: 5589363 - DNA, 25 bp, Homo sapien
caatcccccaccaagcctgttcact

SEQ ID NO: 5589364 - DNA, 25 bp, Homo sapien
acatacttggttgccccagtgtaac

SEQ ID NO: 5589365 - DNA, 25 bp, Homo sapien
gtgtatctgtacagtggagttacat

SEQ ID NO: 5589366 - DNA, 25 bp, Homo sapien
gaaaaagagtgagacatcagtgata

SEQ ID NO: 5589367 - DNA, 25 bp, Homo sapien
gggcatcagtcaggtcttcgcagtt

SEQ ID NO: 5589368 - DNA, 25 bp, Homo sapien
ataagtagggaattctgcctgccat

SEQ ID NO: 5589369 - DNA, 25 bp, Homo sapien
ctgtgaatgccaagctgaagtttag

SEQ ID NO: 5589370 - DNA, 25 bp, Homo sapien
ctggcttcccaaatgggcatcagtc

SEQ ID NO: 5589371 - DNA, 25 bp, Homo sapien
caggagtcaactgaagagagatttt

SEQ ID NO: 5589372 - DNA, 25 bp, Homo sapien
catatgcaaaaagactgattccagt

SEQ ID NO: 5589373 - DNA, 25 bp, Homo sapien
cttaagcaaccgagtttgagaccag

SEQ ID NO: 5589374 - DNA, 25 bp, Homo sapien
aacagagtttctttggtgggtgatt

SEQ ID NO: 5589375 - DNA, 25 bp, Homo sapien
gtgggtgattaaaatgttctggagt

SEQ ID NO: 5589376 - DNA, 25 bp, Homo sapien
tttatcatgagagagttccaggagt

SEQ ID NO: 5589377 - DNA, 25 bp, Homo sapien
gtgttagccaccaccccgacattat

SEQ ID NO: 5589378 - DNA, 25 bp, Homo sapien
aatatagtaactcaggcctgggcac

SEQ ID NO: 5589379 - DNA, 25 bp, Homo sapien
cagcgcactgctaaaggaaacagag

SEQ ID NO: 5589380 - DNA, 25 bp, Homo sapien
ctggagttagatagtagtgatggtt

SEQ ID NO: 5589381 - DNA, 25 bp, Homo sapien
ctgagcatggcagcgcactgctaaa

SEQ ID NO: 5589382 - DNA, 25 bp, Homo sapien
caacagcttcccgtgaaaaagacct

SEQ ID NO: 5589383 - DNA, 25 bp, Homo sapien
tatggatgacataagcaacttggcc

SEQ ID NO: 5589384 - DNA, 25 bp, Homo sapien
ggacagaaccaatggatgaaaccac

SEQ ID NO: 5589385 - DNA, 25 bp, Homo sapien
ttatacagtaatgagacggaaagaa

SEQ ID NO: 5589386 - DNA, 25 bp, Homo sapien
cccgtgaaaaagacctaatgtagtc

SEQ ID NO: 5589387 - DNA, 25 bp, Homo sapien
ctaccagtgtgaattactacctgac

SEQ ID NO: 5589388 - DNA, 25 bp, Homo sapien
ataaaaataagtacagtagcctctt

SEQ ID NO: 5589389 - DNA, 25 bp, Homo sapien
agacggaaagaaaacaacagcttcc

SEQ ID NO: 5589390 - DNA, 25 bp, Homo sapien
ttgtgattgaagaaagaattatcct

SEQ ID NO: 5589391 - DNA, 25 bp, Homo sapien
caatacataaagggtaaggaaactc

SEQ ID NO: 5589392 - DNA, 25 bp, Homo sapien
tgacataagcaacttggccaggaca

SEQ ID NO: 5589393 - DNA, 25 bp, Homo sapien
caatattgttttcagtggagggggt

SEQ ID NO: 5589394 - DNA, 25 bp, Homo sapien
gctcagtatagtgttgaaaaggcag

SEQ ID NO: 5589395 - DNA, 25 bp, Homo sapien
tgaaaaggcagacaaatcccattaa

SEQ ID NO: 5589396 - DNA, 25 bp, Homo sapien
acagagaaataaagagtgtacaata

SEQ ID NO: 5589397 - DNA, 25 bp, Homo sapien
tatgtgcacacaagagttagcaaag

SEQ ID NO: 5589398 - DNA, 25 bp, Homo sapien
acaagccaaagatacagagaaataa

SEQ ID NO: 5589399 - DNA, 25 bp, Homo sapien
aagagtgtacaataagagcacagtc

SEQ ID NO: 5589400 - DNA, 25 bp, Homo sapien
taaaactaggagctattgaaacttc

SEQ ID NO: 5589401 - DNA, 25 bp, Homo sapien
aggcggcaccattccctcgctactc

SEQ ID NO: 5589402 - DNA, 25 bp, Homo sapien
ataagagcacagtcacttcccagcc

SEQ ID NO: 5589403 - DNA, 25 bp, Homo sapien
cttcccagccccgattgtcccagag

SEQ ID NO: 5589404 - DNA, 25 bp, Homo sapien
gctagagcaatggattatcggatcg

SEQ ID NO: 5589405 - DNA, 25 bp, Homo sapien
gattatcggatcggaaatatgtatt

SEQ ID NO: 5589406 - DNA, 25 bp, Homo sapien
ccagaaggggattaatttcctgtgc

SEQ ID NO: 5589407 - DNA, 25 bp, Homo sapien
tatctgcaatacttggtaaaggcaa

SEQ ID NO: 5589408 - DNA, 25 bp, Homo sapien
atatttaaaaccaatgccaggggga

SEQ ID NO: 5589409 - DNA, 25 bp, Homo sapien
ctaggtaaatggaaacataagacgg

SEQ ID NO: 5589410 - DNA, 25 bp, Homo sapien
cataagacggcgatacagattttac

SEQ ID NO: 5589411 - DNA, 25 bp, Homo sapien
gcaaacacaagtaaatccaacattt

SEQ ID NO: 5589412 - DNA, 25 bp, Homo sapien
caaccaccattcgaagtgggtcatt

SEQ ID NO: 5589413 - DNA, 25 bp, Homo sapien
ctgtgctcaaaggtaaagtatttct

SEQ ID NO: 5589414 - DNA, 25 bp, Homo sapien
taagttcctagcatactgagaggct

SEQ ID NO: 5589415 - DNA, 25 bp, Homo sapien
agccagtcctgaagaagcaccatta

SEQ ID NO: 5589416 - DNA, 25 bp, Homo sapien
gggagtctgggacagaccatctaac

SEQ ID NO: 5589417 - DNA, 25 bp, Homo sapien
ctcagaactaacaacaggggagtct

SEQ ID NO: 5589418 - DNA, 25 bp, Homo sapien
acgaacacccagcaagcagtctctt

SEQ ID NO: 5589419 - DNA, 25 bp, Homo sapien
catttgtttccagccagcagaaggg

SEQ ID NO: 5589420 - DNA, 25 bp, Homo sapien
gggctgaacacggcaggtttctatg

SEQ ID NO: 5589421 - DNA, 25 bp, Homo sapien
aatggttcttctaggacttgagttc

SEQ ID NO: 5589422 - DNA, 25 bp, Homo sapien
tgagatgggtctcttcaaatggttc

SEQ ID NO: 5589423 - DNA, 25 bp, Homo sapien
gtccagaaaaggagcgaatttttgc

SEQ ID NO: 5589424 - DNA, 25 bp, Homo sapien
tccaagacgtgaggcttcgttgtca

SEQ ID NO: 5589425 - DNA, 25 bp, Homo sapien
tgagttcctcagcagtgtggtttct

SEQ ID NO: 5589426 - DNA, 25 bp, Homo sapien
atcataaaacggccgactctggact

SEQ ID NO: 5589427 - DNA, 25 bp, Homo sapien
accgttaagcaatgagcagaaaaac

SEQ ID NO: 5589428 - DNA, 25 bp, Homo sapien
aatctagctatcttggggccaaagg

SEQ ID NO: 5589429 - DNA, 25 bp, Homo sapien
cagaaaaacaggctggttcattttg

SEQ ID NO: 5589430 - DNA, 25 bp, Homo sapien
tccttcataggatggcaccaaaatt

SEQ ID NO: 5589431 - DNA, 25 bp, Homo sapien
atgcacagctgtggagtcacctgat

SEQ ID NO: 5589432 - DNA, 25 bp, Homo sapien
ttttgggagtgtaaactcatccttc

SEQ ID NO: 5589433 - DNA, 25 bp, Homo sapien
ccaaaggggaatacctaggtcatta

SEQ ID NO: 5589434 - DNA, 25 bp, Homo sapien
gatcaaagcaggtggctaatctagc

SEQ ID NO: 5589435 - DNA, 25 bp, Homo sapien
gacagccaagcagcagttataccgt

SEQ ID NO: 5589436 - DNA, 25 bp, Homo sapien
ctcactgagccataatgcatgaaac

SEQ ID NO: 5589437 - DNA, 25 bp, Homo sapien
ttggtgtaccagaataggatcctct

SEQ ID NO: 5589438 - DNA, 25 bp, Homo sapien
gagaagtgcttcctagccaggaata

SEQ ID NO: 5589439 - DNA, 25 bp, Homo sapien
ataggatcctctgcacggtgacctc

SEQ ID NO: 5589440 - DNA, 25 bp, Homo sapien
gtaccagtcacctttgtgtccccca

SEQ ID NO: 5589441 - DNA, 25 bp, Homo sapien
cacggtgacctcctaaaagagcagg

SEQ ID NO: 5589442 - DNA, 25 bp, Homo sapien
gtgtcccccaaagcacagtacttta

SEQ ID NO: 5589443 - DNA, 25 bp, Homo sapien
atacataggaaattgaattgaattt

SEQ ID NO: 5589444 - DNA, 25 bp, Homo sapien
cctcctaaaagagcaggtaccagtc

SEQ ID NO: 5589445 - DNA, 25 bp, Homo sapien
aaaagagcaggtaccagtcaccttt

SEQ ID NO: 5589446 - DNA, 25 bp, Homo sapien
tcctagccaggaatacaggatttag

SEQ ID NO: 5589447 - DNA, 25 bp, Homo sapien
gctttataactattggtgtaccaga

SEQ ID NO: 5589448 - DNA, 25 bp, Homo sapien
ctaggtaacaggtaacccagaagtc

SEQ ID NO: 5589449 - DNA, 25 bp, Homo sapien
acctggggtgatactgccattcttc

SEQ ID NO: 5589450 - DNA, 25 bp, Homo sapien
tcaccttgaagctaggtaacaggta

SEQ ID NO: 5589451 - DNA, 25 bp, Homo sapien
tgaatgccaaatcaagagtaaaatt

SEQ ID NO: 5589452 - DNA, 25 bp, Homo sapien
gccacaaacagccctgcagagaaca

SEQ ID NO: 5589453 - DNA, 25 bp, Homo sapien
tataccagcttgttaaatgaatgcc

SEQ ID NO: 5589454 - DNA, 25 bp, Homo sapien
cagaagtccggccaagcataaaatt

SEQ ID NO: 5589455 - DNA, 25 bp, Homo sapien
ggtgttaagagagctcaaccacagc

SEQ ID NO: 5589456 - DNA, 25 bp, Homo sapien
ctatacatcctgagtgatttgcctt

SEQ ID NO: 5589457 - DNA, 25 bp, Homo sapien
accttccagggattcatgtaatttg

SEQ ID NO: 5589458 - DNA, 25 bp, Homo sapien
ttccatagtgttttagccatgctgc

SEQ ID NO: 5589459 - DNA, 25 bp, Homo sapien
aacaaggccacagacatttacttac

SEQ ID NO: 5589460 - DNA, 25 bp, Homo sapien
tgggaatcgccataaaaaagcaaca

SEQ ID NO: 5589461 - DNA, 25 bp, Homo sapien
cttattgggtaaaagagccactgac

SEQ ID NO: 5589462 - DNA, 25 bp, Homo sapien
aaagagccactgaccacacaattgc

SEQ ID NO: 5589463 - DNA, 25 bp, Homo sapien
acaaagagaccacagcaagacttta

SEQ ID NO: 5589464 - DNA, 25 bp, Homo sapien
ttaacagatctggcccttgcaatcc

SEQ ID NO: 5589465 - DNA, 25 bp, Homo sapien
taaaaaagcaacaggcctgctgcca

SEQ ID NO: 5589466 - DNA, 25 bp, Homo sapien
gaaacacttctgccacaaagagacc

SEQ ID NO: 5589467 - DNA, 25 bp, Homo sapien
aggcctgctgccatgcatgaaacac

SEQ ID NO: 5589468 - DNA, 25 bp, Homo sapien
taaaccatcaagcatgtgactgtga

SEQ ID NO: 5589469 - DNA, 25 bp, Homo sapien
ctttaccatagagagaacaaggcca

SEQ ID NO: 5589470 - DNA, 25 bp, Homo sapien
attttggtagtgctgcaagtcccct

SEQ ID NO: 5589471 - DNA, 25 bp, Homo sapien
gagttggcctcgacccctgcccttg

SEQ ID NO: 5589472 - DNA, 25 bp, Homo sapien
agaggcttagagttggcctcgaccc

SEQ ID NO: 5589473 - DNA, 25 bp, Homo sapien
acaggttttattttggtagtgctgc

SEQ ID NO: 5589474 - DNA, 25 bp, Homo sapien
ctgcccttgcccctggaaaggcaga

SEQ ID NO: 5589475 - DNA, 25 bp, Homo sapien
aggcttagagttggcctcgacccct

SEQ ID NO: 5589476 - DNA, 25 bp, Homo sapien
gctgcaagtccccttgtgtgctggg

SEQ ID NO: 5589477 - DNA, 25 bp, Homo sapien
gcccttgcccctggaaaggcagaaa

SEQ ID NO: 5589478 - DNA, 25 bp, Homo sapien
ttggtagtgctgcaagtccccttgt

SEQ ID NO: 5589479 - DNA, 25 bp, Homo sapien
tttattttggtagtgctgcaagtcc

SEQ ID NO: 5589480 - DNA, 25 bp, Homo sapien
ggaagaggcttagagttggcctcga

SEQ ID NO: 5589481 - DNA, 25 bp, Homo sapien
atgaaccacgattaaagaggaaaat

SEQ ID NO: 5589482 - DNA, 25 bp, Homo sapien
attttcctctttaatcgtggttcat

SEQ ID NO: 5589483 - DNA, 25 bp, Homo sapien
atttggctttagctgacgcccaatc

SEQ ID NO: 5589484 - DNA, 25 bp, Homo sapien
taggccatgtgtgggatttgtgaaa

SEQ ID NO: 5589485 - DNA, 25 bp, Homo sapien
tatcaattcctccagaaaatcaaac

SEQ ID NO: 5589486 - DNA, 25 bp, Homo sapien
gagaaggcaaagctttgccaactgc

SEQ ID NO: 5589487 - DNA, 25 bp, Homo sapien
gaagtagaaggtagattctgagact

SEQ ID NO: 5589488 - DNA, 25 bp, Homo sapien
acatgactgttattggtgccccgac

SEQ ID NO: 5589489 - DNA, 25 bp, Homo sapien
ttagctgacgcccaatctttctatc

SEQ ID NO: 5589490 - DNA, 25 bp, Homo sapien
ataaccacagatactgctataatgt

SEQ ID NO: 5589491 - DNA, 25 bp, Homo sapien
gttattggtgccccgacaaagacag

SEQ ID NO: 5589492 - DNA, 25 bp, Homo sapien
ggtagattctgagactaggactgaa

SEQ ID NO: 5589493 - DNA, 25 bp, Homo sapien
gtgtgaagtagaaggtagattctga

SEQ ID NO: 5589494 - DNA, 25 bp, Homo sapien
tctttcagaaggcatgtctaataaa

SEQ ID NO: 5589495 - DNA, 25 bp, Homo sapien
caatcacagttaagtaaataatctc

SEQ ID NO: 5589496 - DNA, 25 bp, Homo sapien
aaaaagaaatcattaggtactgtat

SEQ ID NO: 5589497 - DNA, 25 bp, Homo sapien
attagcaaggtcaattccgaaacag

SEQ ID NO: 5589498 - DNA, 25 bp, Homo sapien
ctcattcagtgaggctatttaagcc

SEQ ID NO: 5589499 - DNA, 25 bp, Homo sapien
tcctagagccagaccttcaaaattt

SEQ ID NO: 5589500 - DNA, 25 bp, Homo sapien
tgaattggaagaaacgctctgaaca

SEQ ID NO: 5589501 - DNA, 25 bp, Homo sapien
ccagtgattacgttttgaattggaa

SEQ ID NO: 5589502 - DNA, 25 bp, Homo sapien
gataattcagaggcagctgaccaaa

SEQ ID NO: 5589503 - DNA, 25 bp, Homo sapien
tagagatctgtttcagtgctcctga

SEQ ID NO: 5589504 - DNA, 25 bp, Homo sapien
tcaattccgaaacagaaagggcaat

SEQ ID NO: 5589505 - DNA, 25 bp, Homo sapien
tttgagagcccgcaccggatacttc

SEQ ID NO: 5589506 - DNA, 25 bp, Homo sapien
gaagtatccggtgcgggctctcaaa

SEQ ID NO: 5589507 - DNA, 25 bp, Homo sapien
gtggccaagtaaattcgtgtgggaa

SEQ ID NO: 5589508 - DNA, 25 bp, Homo sapien
actatctacgtggccaagtaaattc

SEQ ID NO: 5589509 - DNA, 25 bp, Homo sapien
aaggcaaagggaacttgaaattaga

SEQ ID NO: 5589510 - DNA, 25 bp, Homo sapien
gcttgatctataaggtcccggaggg

SEQ ID NO: 5589511 - DNA, 25 bp, Homo sapien
tgagaattttcaacccagccaccat

SEQ ID NO: 5589512 - DNA, 25 bp, Homo sapien
agaaaaccccagaaacagtcaccat

SEQ ID NO: 5589513 - DNA, 25 bp, Homo sapien
aaattcgtgtgggaaatactgatgt

SEQ ID NO: 5589514 - DNA, 25 bp, Homo sapien
gggcagtgctaagtattttcatttc

SEQ ID NO: 5589515 - DNA, 25 bp, Homo sapien
ttccactgggcacttaacactctgg

SEQ ID NO: 5589516 - DNA, 25 bp, Homo sapien
cattgtacctggcctaacattactc

SEQ ID NO: 5589517 - DNA, 25 bp, Homo sapien
tctaccaccttggcatcgcaaagtg

SEQ ID NO: 5589518 - DNA, 25 bp, Homo sapien
cagatccagaactcggcctgcatct

SEQ ID NO: 5589519 - DNA, 25 bp, Homo sapien
tcttggcctcctgggtctccggcaa

SEQ ID NO: 5589520 - DNA, 25 bp, Homo sapien
aaatacagcacacgacagcactgag

SEQ ID NO: 5589521 - DNA, 25 bp, Homo sapien
cagccagatccagaactcggcctgc

SEQ ID NO: 5589522 - DNA, 25 bp, Homo sapien
tcagcagcctgctacaggccctgga

SEQ ID NO: 5589523 - DNA, 25 bp, Homo sapien
tccagaactcggcctgcatcttggc

SEQ ID NO: 5589524 - DNA, 25 bp, Homo sapien
agcagccagatccagaactcggcct

SEQ ID NO: 5589525 - DNA, 25 bp, Homo sapien
gcctcctgggtctccggcaagttca

SEQ ID NO: 5589526 - DNA, 25 bp, Homo sapien
aagttcagcagcctgctacaggccc

SEQ ID NO: 5589527 - DNA, 25 bp, Homo sapien
agcctgctacaggccctggaaatac

SEQ ID NO: 5589528 - DNA, 25 bp, Homo sapien
tgctacaggccctggaaatacagca

SEQ ID NO: 5589529 - DNA, 25 bp, Homo sapien
aaaatcagtcacatagtgtcagtgt

SEQ ID NO: 5589530 - DNA, 25 bp, Homo sapien
tcaaaggtaatagatccagtttaaa

SEQ ID NO: 5589531 - DNA, 25 bp, Homo sapien
tctcacgggtttaaagatgtgattt

SEQ ID NO: 5589532 - DNA, 25 bp, Homo sapien
tattgatagaatgtaatgggccttt

SEQ ID NO: 5589533 - DNA, 25 bp, Homo sapien
atgggcctttgggatcttaagtact

SEQ ID NO: 5589534 - DNA, 25 bp, Homo sapien
gtggccatactttgaattgtgattc

SEQ ID NO: 5589535 - DNA, 25 bp, Homo sapien
acaggttgcccccagtggccatact

SEQ ID NO: 5589536 - DNA, 25 bp, Homo sapien
aagtgtaaaactggaaagcaaagaa

SEQ ID NO: 5589537 - DNA, 25 bp, Homo sapien
tcagatgctgaacttaagcagtgaa

SEQ ID NO: 5589538 - DNA, 25 bp, Homo sapien
agtgtcagtgttaagaaaaggttgt

SEQ ID NO: 5589539 - DNA, 25 bp, Homo sapien
ttggtttcctgaagatgtcagaatt

SEQ ID NO: 5589540 - DNA, 25 bp, Homo sapien
ccgaccaaagtctttaagaaagcaa

SEQ ID NO: 5589541 - DNA, 25 bp, Homo sapien
agcacgctcgacactaacacatcac

SEQ ID NO: 5589542 - DNA, 25 bp, Homo sapien
caacaacacaaatacccgaccaaag

SEQ ID NO: 5589543 - DNA, 25 bp, Homo sapien
cgtgggaatcagtacaggttttcac

SEQ ID NO: 5589544 - DNA, 25 bp, Homo sapien
ggaagtaaatgagaaacagacaaat

SEQ ID NO: 5589545 - DNA, 25 bp, Homo sapien
aaaaagaatcaaatacccacaccca

SEQ ID NO: 5589546 - DNA, 25 bp, Homo sapien
tccaatagacaggacagccaaaaac

SEQ ID NO: 5589547 - DNA, 25 bp, Homo sapien
cgcctgtttcagaaatgggagattc

SEQ ID NO: 5589548 - DNA, 25 bp, Homo sapien
taaagccacgctataagaggaagta

SEQ ID NO: 5589549 - DNA, 25 bp, Homo sapien
aatgggagattctacagcacgctcg

SEQ ID NO: 5589550 - DNA, 25 bp, Homo sapien
cccacacccagacacaatactcaac

SEQ ID NO: 5589551 - DNA, 25 bp, Homo sapien
aaagcacaaggaagcacaattttca

SEQ ID NO: 5589552 - DNA, 25 bp, Homo sapien
ctgccttcaaagtgctgagcttaca

SEQ ID NO: 5589553 - DNA, 25 bp, Homo sapien
aaacagttggcttagattacagggt

SEQ ID NO: 5589554 - DNA, 25 bp, Homo sapien
tataaaggcaaatgagcaaatgaac

SEQ ID NO: 5589555 - DNA, 25 bp, Homo sapien
tgtctcacatcagaatatggaaaga

SEQ ID NO: 5589556 - DNA, 25 bp, Homo sapien
aacttgttccaatgcacatgtggca

SEQ ID NO: 5589557 - DNA, 25 bp, Homo sapien
atctcgtgaagtagaaagaggttat

SEQ ID NO: 5589558 - DNA, 25 bp, Homo sapien
aaagcacatttctaggaacagggcc

SEQ ID NO: 5589559 - DNA, 25 bp, Homo sapien
tggggagggaatcttaacacttcca

SEQ ID NO: 5589560 - DNA, 25 bp, Homo sapien
ctgagcttacaggcatgagattttc

SEQ ID NO: 5589561 - DNA, 25 bp, Homo sapien
ggcttagattacagggttgaaggga

SEQ ID NO: 5589562 - DNA, 25 bp, Homo sapien
gtgcccagctagatgtcccaagcca

SEQ ID NO: 5589563 - DNA, 25 bp, Homo sapien
cggggagtcctatccaggctctcct

SEQ ID NO: 5589564 - DNA, 25 bp, Homo sapien
tcttcagataccagggatgctgcct

SEQ ID NO: 5589565 - DNA, 25 bp, Homo sapien
ataccgtaacacatccgcgagggaa

SEQ ID NO: 5589566 - DNA, 25 bp, Homo sapien
cagaaaacagaaatggagtcaattt

SEQ ID NO: 5589567 - DNA, 25 bp, Homo sapien
cagactggagggtcattcacctttg

SEQ ID NO: 5589568 - DNA, 25 bp, Homo sapien
tcgacacgatcaatcaagggatacc

SEQ ID NO: 5589569 - DNA, 25 bp, Homo sapien
ttagtataagaggaccatgagtttt

SEQ ID NO: 5589570 - DNA, 25 bp, Homo sapien
ccaggagatccaaaatataccagca

SEQ ID NO: 5589571 - DNA, 25 bp, Homo sapien
tggaaattatggaaatgagctagct

SEQ ID NO: 5589572 - DNA, 25 bp, Homo sapien
ctctttccaggggaagcacaagaag

SEQ ID NO: 5589573 - DNA, 25 bp, Homo sapien
cccacgcaagctacctggtgtacct

SEQ ID NO: 5589574 - DNA, 25 bp, Homo sapien
cacctcctcccgagttaattctctc

SEQ ID NO: 5589575 - DNA, 25 bp, Homo sapien
tattgaacagtaagattcaagattt

SEQ ID NO: 5589576 - DNA, 25 bp, Homo sapien
cctggtgtaccttcaagttcaggcc

SEQ ID NO: 5589577 - DNA, 25 bp, Homo sapien
tcccctcaatacaggtagaggagca

SEQ ID NO: 5589578 - DNA, 25 bp, Homo sapien
ggggaccagttagccacaacaaaga

SEQ ID NO: 5589579 - DNA, 25 bp, Homo sapien
gttcctgcccgctcttggagatgaa

SEQ ID NO: 5589580 - DNA, 25 bp, Homo sapien
agggaacttcttagggatgtatctt

SEQ ID NO: 5589581 - DNA, 25 bp, Homo sapien
gccacaacaaagaatggggttcagg

SEQ ID NO: 5589582 - DNA, 25 bp, Homo sapien
tgcttctcttgatgtaaacccaggg

SEQ ID NO: 5589583 - DNA, 25 bp, Homo sapien
gctgctgttcctgcccgctcttgga

SEQ ID NO: 5589584 - DNA, 25 bp, Homo sapien
tttgtaatatcattgtgggctggcc

SEQ ID NO: 5589585 - DNA, 25 bp, Homo sapien
agtatgcagtctgggacatgtgttt

SEQ ID NO: 5589586 - DNA, 25 bp, Homo sapien
tcctatagcctaaatgttcttgaat

SEQ ID NO: 5589587 - DNA, 25 bp, Homo sapien
tcattttttatgggtagggtcacat

SEQ ID NO: 5589588 - DNA, 25 bp, Homo sapien
atgggtagggtcacatacatatata

SEQ ID NO: 5589589 - DNA, 25 bp, Homo sapien
agacacctcatgacgaccccagtat

SEQ ID NO: 5589590 - DNA, 25 bp, Homo sapien
gcacattcaaggaaaagtacacaga

SEQ ID NO: 5589591 - DNA, 25 bp, Homo sapien
ctcatgacgaccccagtatgcagtc

SEQ ID NO: 5589592 - DNA, 25 bp, Homo sapien
ttttatgggtagggtcacatacata

SEQ ID NO: 5589593 - DNA, 25 bp, Homo sapien
gacaattctgtctaagtatcatttt

SEQ ID NO: 5589594 - DNA, 25 bp, Homo sapien
ataggtttgtaatatcattgtgggc

SEQ ID NO: 5589595 - DNA, 25 bp, Homo sapien
gaatataccaataaggctaaacatc

SEQ ID NO: 5589596 - DNA, 25 bp, Homo sapien
tttgcttggctgctgtaaacctttg

SEQ ID NO: 5589597 - DNA, 25 bp, Homo sapien
tcatcttcaagactgcagccatacc

SEQ ID NO: 5589598 - DNA, 25 bp, Homo sapien
tttctgtcaaggtgtttggtgtttc

SEQ ID NO: 5589599 - DNA, 25 bp, Homo sapien
gtttggtgtttctgcagagggatga

SEQ ID NO: 5589600 - DNA, 25 bp, Homo sapien
tgacccacagaagtcctactctacc

SEQ ID NO: 5589601 - DNA, 25 bp, Homo sapien
tctggcgaagtatttgcttggctgc

SEQ ID NO: 5589602 - DNA, 25 bp, Homo sapien
gaggctagggtaagctaaaatgcca

SEQ ID NO: 5589603 - DNA, 25 bp, Homo sapien
ctctctggaatcaggcaccagcatg

SEQ ID NO: 5589604 - DNA, 25 bp, Homo sapien
tccagagttttgataagctaaattc

SEQ ID NO: 5589605 - DNA, 25 bp, Homo sapien
aaggacaaaacagaacacagaatcc

SEQ ID NO: 5589606 - DNA, 25 bp, Homo sapien
tgacagggagaatatccaacaaatc

SEQ ID NO: 5589607 - DNA, 25 bp, Homo sapien
ttgttgaaggacaccagcaaaaatc

SEQ ID NO: 5589608 - DNA, 25 bp, Homo sapien
actgaattcagctggtagtcgaggg

SEQ ID NO: 5589609 - DNA, 25 bp, Homo sapien
aatgagtctaaagccatggaaacac

SEQ ID NO: 5589610 - DNA, 25 bp, Homo sapien
aatagcatagaccacaaggaaagaa

SEQ ID NO: 5589611 - DNA, 25 bp, Homo sapien
aaagcatttgcatagagaaactaac

SEQ ID NO: 5589612 - DNA, 25 bp, Homo sapien
caaggaaagaaactaagacaagtca

SEQ ID NO: 5589613 - DNA, 25 bp, Homo sapien
acaaatcgcaagtaaaatagcatag

SEQ ID NO: 5589614 - DNA, 25 bp, Homo sapien
gacaagtcaaaaatacaccaagtaa

SEQ ID NO: 5589615 - DNA, 25 bp, Homo sapien
ttatttaactggcaaggtgaggaaa

SEQ ID NO: 5589616 - DNA, 25 bp, Homo sapien
gctggtagtcgagggcttttaatta

SEQ ID NO: 5589617 - DNA, 25 bp, Homo sapien
ctgtcagggttggtccccactttgc

SEQ ID NO: 5589618 - DNA, 25 bp, Homo sapien
agctgatgggatagatttcagccac

SEQ ID NO: 5589619 - DNA, 25 bp, Homo sapien
gtgtgtggttgcaatgcaccctgca

SEQ ID NO: 5589620 - DNA, 25 bp, Homo sapien
cagtctgaacgactatgggtgtgtg

SEQ ID NO: 5589621 - DNA, 25 bp, Homo sapien
agtctttatctacaagtctgggggt

SEQ ID NO: 5589622 - DNA, 25 bp, Homo sapien
ggggtatttttgtgatcagagatat

SEQ ID NO: 5589623 - DNA, 25 bp, Homo sapien
tcccaaagatgtgtatgttaggtta

SEQ ID NO: 5589624 - DNA, 25 bp, Homo sapien
caatggaatagcaacctgtcagggt

SEQ ID NO: 5589625 - DNA, 25 bp, Homo sapien
tggggttactgttctgtgtagagtc

SEQ ID NO: 5589626 - DNA, 25 bp, Homo sapien
gtgatcagagatatgctttaggaac

SEQ ID NO: 5589627 - DNA, 25 bp, Homo sapien
cacaaccctgaattggaataactgc

SEQ ID NO: 5589628 - DNA, 25 bp, Homo sapien
atcattggagattgtgccacccagg

SEQ ID NO: 5589629 - DNA, 25 bp, Homo sapien
cacgtcacctatcggaaggacacac

SEQ ID NO: 5589630 - DNA, 25 bp, Homo sapien
cagtgggtggttcaatgacatgaaa

SEQ ID NO: 5589631 - DNA, 25 bp, Homo sapien
gtctggaccaatggaacccacgtca

SEQ ID NO: 5589632 - DNA, 25 bp, Homo sapien
cacgcagaaccatcaatcagtagcc

SEQ ID NO: 5589633 - DNA, 25 bp, Homo sapien
cacaacagatgggaatgacaccatg

SEQ ID NO: 5589634 - DNA, 25 bp, Homo sapien
cacacactataaggtattgggggac

SEQ ID NO: 5589635 - DNA, 25 bp, Homo sapien
tccaacgccattgcccacgcagaac

SEQ ID NO: 5589636 - DNA, 25 bp, Homo sapien
tgttgccatgttgagcacagtgggt

SEQ ID NO: 5589637 - DNA, 25 bp, Homo sapien
gccagcagaaacccaccctatgaca

SEQ ID NO: 5589638 - DNA, 25 bp, Homo sapien
acccagggtcacgactacaccaatt

SEQ ID NO: 5589639 - DNA, 25 bp, Homo sapien
ggagggtatctttgggccagcaata

SEQ ID NO: 5589640 - DNA, 25 bp, Homo sapien
acagatcatttgacttgcgtgcttc

SEQ ID NO: 5589641 - DNA, 25 bp, Homo sapien
tggaaatgatggctatgttatacac

SEQ ID NO: 5589642 - DNA, 25 bp, Homo sapien
tacaaaaaccctatagagaaagcag

SEQ ID NO: 5589643 - DNA, 25 bp, Homo sapien
ttgatggggctagccacacatatgt

SEQ ID NO: 5589644 - DNA, 25 bp, Homo sapien
atgctgtcttttgggtctgagtttc

SEQ ID NO: 5589645 - DNA, 25 bp, Homo sapien
taatggaaatagagtatctacatcc

SEQ ID NO: 5589646 - DNA, 25 bp, Homo sapien
gaaagcagggtaaagtctgaaataa

SEQ ID NO: 5589647 - DNA, 25 bp, Homo sapien
ttacaatacttggtctgcaatgctg

SEQ ID NO: 5589648 - DNA, 25 bp, Homo sapien
gggccagcaataacaatcattgttc

SEQ ID NO: 5589649 - DNA, 25 bp, Homo sapien
atgtggatgaaattagcttcaatac

SEQ ID NO: 5589650 - DNA, 25 bp, Homo sapien
cagcccccagatgcctcactccacg

SEQ ID NO: 5589651 - DNA, 25 bp, Homo sapien
gcctgacgtgagagccatgtcatca

SEQ ID NO: 5589652 - DNA, 25 bp, Homo sapien
accctctgataagaaggaagtgagg

SEQ ID NO: 5589653 - DNA, 25 bp, Homo sapien
tctaaatagataccagtgcagggac

SEQ ID NO: 5589654 - DNA, 25 bp, Homo sapien
ggagaagacaatgctaacaggttgt

SEQ ID NO: 5589655 - DNA, 25 bp, Homo sapien
caatgtaggcacatttcgctggggg

SEQ ID NO: 5589656 - DNA, 25 bp, Homo sapien
tcacatatctagaaggtaagggtac

SEQ ID NO: 5589657 - DNA, 25 bp, Homo sapien
ctccacgagtgaaatccctgcacgg

SEQ ID NO: 5589658 - DNA, 25 bp, Homo sapien
ggaaagctcctcactgcacagcccc

SEQ ID NO: 5589659 - DNA, 25 bp, Homo sapien
ggtgcagcagtctgcctgacgtgag

SEQ ID NO: 5589660 - DNA, 25 bp, Homo sapien
gctgggggctccatgtacatttcta

SEQ ID NO: 5589661 - DNA, 25 bp, Homo sapien
gaagcaagttctgtgtcacggaggc

SEQ ID NO: 5589662 - DNA, 25 bp, Homo sapien
aggccccagaggtttcctcgccagt

SEQ ID NO: 5589663 - DNA, 25 bp, Homo sapien
ctaggactaaacaatgcgcgtctgc

SEQ ID NO: 5589664 - DNA, 25 bp, Homo sapien
tctaggtaaggcccaccctcccaga

SEQ ID NO: 5589665 - DNA, 25 bp, Homo sapien
ccagtggttgtgcaactttggggga

SEQ ID NO: 5589666 - DNA, 25 bp, Homo sapien
aaggtttcacaaaagaagcaacacc

SEQ ID NO: 5589667 - DNA, 25 bp, Homo sapien
gagacggacttaaacctgcaccagc

SEQ ID NO: 5589668 - DNA, 25 bp, Homo sapien
gagagacccaagactcatggaagag

SEQ ID NO: 5589669 - DNA, 25 bp, Homo sapien
gagaggttcactagagcggttctaa

SEQ ID NO: 5589670 - DNA, 25 bp, Homo sapien
gacggcagcctctccggaccaatca

SEQ ID NO: 5589671 - DNA, 25 bp, Homo sapien
caccagctccagagccctgcggaaa

SEQ ID NO: 5589672 - DNA, 25 bp, Homo sapien
gaggagtctgttcagatggagcttc

SEQ ID NO: 5589673 - DNA, 25 bp, Homo sapien
aaagtctagaagccagtgctgtggt

SEQ ID NO: 5589674 - DNA, 25 bp, Homo sapien
acacactgtgggtctcatgaaggtt

SEQ ID NO: 5589675 - DNA, 25 bp, Homo sapien
tgctgtggtggcccatcacacactg

SEQ ID NO: 5589676 - DNA, 25 bp, Homo sapien
ccaaaggaacacacctgctagattc

SEQ ID NO: 5589677 - DNA, 25 bp, Homo sapien
agtagatggcataaagtataacctt

SEQ ID NO: 5589678 - DNA, 25 bp, Homo sapien
ctgggtgacgaggtaatttgttcac

SEQ ID NO: 5589679 - DNA, 25 bp, Homo sapien
tagtcttagactggaaggaacttcc

SEQ ID NO: 5589680 - DNA, 25 bp, Homo sapien
actgacagaagcaaactgactcatc

SEQ ID NO: 5589681 - DNA, 25 bp, Homo sapien
tgtgacacagcaactgacagaagca

SEQ ID NO: 5589682 - DNA, 25 bp, Homo sapien
gaaaaacacagtaaacgaagcgcta

SEQ ID NO: 5589683 - DNA, 25 bp, Homo sapien
ctgcaggtcctgcgttgccttctgt

SEQ ID NO: 5589684 - DNA, 25 bp, Homo sapien
gttagccttagtctgcaggtcctgc

SEQ ID NO: 5589685 - DNA, 25 bp, Homo sapien
gattacctgcctacactgcctgctc

SEQ ID NO: 5589686 - DNA, 25 bp, Homo sapien
tgggctgagcacggaattcagctca

SEQ ID NO: 5589687 - DNA, 25 bp, Homo sapien
gagaaaaaaagatggattatttcca

SEQ ID NO: 5589688 - DNA, 25 bp, Homo sapien
ttctgttttgtcaggcaatcagcct

SEQ ID NO: 5589689 - DNA, 25 bp, Homo sapien
ggctggaaagacaggttttctctca

SEQ ID NO: 5589690 - DNA, 25 bp, Homo sapien
tccacattcttcagaccatagggtc

SEQ ID NO: 5589691 - DNA, 25 bp, Homo sapien
tctcttgtatgtgcagctctgggct

SEQ ID NO: 5589692 - DNA, 25 bp, Homo sapien
ccagactccctggcacccagggggc

SEQ ID NO: 5589693 - DNA, 25 bp, Homo sapien
tcttcaggatttccccccagactcc

SEQ ID NO: 5589694 - DNA, 25 bp, Homo sapien
tgaacgacggtgtgtgggcagctcc

SEQ ID NO: 5589695 - DNA, 25 bp, Homo sapien
ggagctgcccacacaccgtcgttca

SEQ ID NO: 5589696 - DNA, 25 bp, Homo sapien
ctggtaacatactgtagatagctcc

SEQ ID NO: 5589697 - DNA, 25 bp, Homo sapien
ataatgagactaagatgacgtttta

SEQ ID NO: 5589698 - DNA, 25 bp, Homo sapien
gaaaagcaagtagaagctattattc

SEQ ID NO: 5589699 - DNA, 25 bp, Homo sapien
gaaggtcataatgagactaagatga

SEQ ID NO: 5589700 - DNA, 25 bp, Homo sapien
tgaactctgtagggaaaagcaagta

SEQ ID NO: 5589701 - DNA, 25 bp, Homo sapien
tactcgctggtaacatactgtagat

SEQ ID NO: 5589702 - DNA, 25 bp, Homo sapien
ccagcaaaagtgagtacaactgtcc

SEQ ID NO: 5589703 - DNA, 25 bp, Homo sapien
gcatgtcagttacacatactggccc

SEQ ID NO: 5589704 - DNA, 25 bp, Homo sapien
atactggccctaaatgttcagcata

SEQ ID NO: 5589705 - DNA, 25 bp, Homo sapien
ctgtagatagctccaggactgagac

SEQ ID NO: 5589706 - DNA, 25 bp, Homo sapien
actcctgaactctgtagggaaaagc

SEQ ID NO: 5589707 - DNA, 25 bp, Homo sapien
cagaagaacagaatgatgctgctgg

SEQ ID NO: 5589708 - DNA, 25 bp, Homo sapien
ttagaagatgatggtactggctcta

SEQ ID NO: 5589709 - DNA, 25 bp, Homo sapien
atgaaagtagctaagaaacaatgtc

SEQ ID NO: 5589710 - DNA, 25 bp, Homo sapien
aggcactaagtataagagagaagat

SEQ ID NO: 5589711 - DNA, 25 bp, Homo sapien
tttggaagcataaaggtcataaaga

SEQ ID NO: 5589712 - DNA, 25 bp, Homo sapien
agaagataagaatgaaagtagctaa

SEQ ID NO: 5589713 - DNA, 25 bp, Homo sapien
agttggttgtctgaactcagggatt

SEQ ID NO: 5589714 - DNA, 25 bp, Homo sapien
aatcggagccaactacctaggcact

SEQ ID NO: 5589715 - DNA, 25 bp, Homo sapien
gtgttgcccactagatgttgctatc

SEQ ID NO: 5589716 - DNA, 25 bp, Homo sapien
aatgcagacacgggtttctagatac

SEQ ID NO: 5589717 - DNA, 25 bp, Homo sapien
ggcaaatgccctcaggcagaagaac

SEQ ID NO: 5589718 - DNA, 25 bp, Homo sapien
tcagaagtagatccaagtagaaacc

SEQ ID NO: 5589719 - DNA, 25 bp, Homo sapien
ggtgccacatctagtgcatgagagt

SEQ ID NO: 5589720 - DNA, 25 bp, Homo sapien
taaaactaaacaccaccagagggca

SEQ ID NO: 5589721 - DNA, 25 bp, Homo sapien
ccacagtcagaataagaatccctcc

SEQ ID NO: 5589722 - DNA, 25 bp, Homo sapien
gtgaagacacacatgaggcctcact

SEQ ID NO: 5589723 - DNA, 25 bp, Homo sapien
tgcaggtgtgcaagaacaataaatt

SEQ ID NO: 5589724 - DNA, 25 bp, Homo sapien
accctgccctccaaggtgccacatc

SEQ ID NO: 5589725 - DNA, 25 bp, Homo sapien
tgtcaggctccctttgggcacccac

SEQ ID NO: 5589726 - DNA, 25 bp, Homo sapien
gggcacccacctggccttgtgagga

SEQ ID NO: 5589727 - DNA, 25 bp, Homo sapien
catgaggcctcacttggtccctgcc

SEQ ID NO: 5589728 - DNA, 25 bp, Homo sapien
acaagggtgtaagagactctaacca

SEQ ID NO: 5589729 - DNA, 25 bp, Homo sapien
tcatctcattcaggtggggtgaagg

SEQ ID NO: 5589730 - DNA, 25 bp, Homo sapien
gaggcttagaatcagggctgttgag

SEQ ID NO: 5589731 - DNA, 25 bp, Homo sapien
agggctgttgaggacttcagaaatc

SEQ ID NO: 5589732 - DNA, 25 bp, Homo sapien
gagatcttgcttaactgggagggaa

SEQ ID NO: 5589733 - DNA, 25 bp, Homo sapien
acagccaggaccagaacttactgaa

SEQ ID NO: 5589734 - DNA, 25 bp, Homo sapien
tactgaaaagcaataatccaaggtc

SEQ ID NO: 5589735 - DNA, 25 bp, Homo sapien
atggaggtgaagagcttgtttttaa

SEQ ID NO: 5589736 - DNA, 25 bp, Homo sapien
gggtagcttccctgagggtcccaca

SEQ ID NO: 5589737 - DNA, 25 bp, Homo sapien
gaggcaaggatgtacgttataagaa

SEQ ID NO: 5589738 - DNA, 25 bp, Homo sapien
gtttctggatacaggagccaccttg

SEQ ID NO: 5589739 - DNA, 25 bp, Homo sapien
gtcccacagcaagagttagagacac

SEQ ID NO: 5589740 - DNA, 25 bp, Homo sapien
aggctgctgtaaaggtataaaaccc

SEQ ID NO: 5589741 - DNA, 25 bp, Homo sapien
actggcatatcagaaaggctgctgt

SEQ ID NO: 5589742 - DNA, 25 bp, Homo sapien
ggacagacctatcccctggcacagc

SEQ ID NO: 5589743 - DNA, 25 bp, Homo sapien
aggaggaaactaaggttgtcattaa

SEQ ID NO: 5589744 - DNA, 25 bp, Homo sapien
cctcgtgtcatttgggtcctgttag

SEQ ID NO: 5589745 - DNA, 25 bp, Homo sapien
aagatcctagggaaagacaaaagaa

SEQ ID NO: 5589746 - DNA, 25 bp, Homo sapien
ggtcctgttagtcctgtgatgagag

SEQ ID NO: 5589747 - DNA, 25 bp, Homo sapien
gagcgagtgctcagctacctgactc

SEQ ID NO: 5589748 - DNA, 25 bp, Homo sapien
atcctgcacgctcctgagggaggag

SEQ ID NO: 5589749 - DNA, 25 bp, Homo sapien
gcagctgctccctaggacagaccta

SEQ ID NO: 5589750 - DNA, 25 bp, Homo sapien
tagccactgataagagcttctcgcc

SEQ ID NO: 5589751 - DNA, 25 bp, Homo sapien
atgctgccttgtgctggagaacata

SEQ ID NO: 5589752 - DNA, 25 bp, Homo sapien
gaggtgatctcagtctattccgtct

SEQ ID NO: 5589753 - DNA, 25 bp, Homo sapien
tacccagtgaatgtgctggagggta

SEQ ID NO: 5589754 - DNA, 25 bp, Homo sapien
tggagaacatattcatcagcggctg

SEQ ID NO: 5589755 - DNA, 25 bp, Homo sapien
attacgaataaaggactgtttggaa

SEQ ID NO: 5589756 - DNA, 25 bp, Homo sapien
ttccctgagagggcaaattaaatgg

SEQ ID NO: 5589757 - DNA, 25 bp, Homo sapien
ttccgtctcgtcacttggatgagtt

SEQ ID NO: 5589758 - DNA, 25 bp, Homo sapien
gagattacaaaataacactacatac

SEQ ID NO: 5589759 - DNA, 25 bp, Homo sapien
aatggtctttacccagtgaatgtgc

SEQ ID NO: 5589760 - DNA, 25 bp, Homo sapien
attcatcagcggctggaatagggat

SEQ ID NO: 5589761 - DNA, 25 bp, Homo sapien
gctggaatagggatgtagttcattc

SEQ ID NO: 5589762 - DNA, 25 bp, Homo sapien
tttcactcagtcacaggcgcagacc

SEQ ID NO: 5589763 - DNA, 25 bp, Homo sapien
gcaggaatcaaaggtcacagtctca

SEQ ID NO: 5589764 - DNA, 25 bp, Homo sapien
atatggtcaaagattgctctgcaca

SEQ ID NO: 5589765 - DNA, 25 bp, Homo sapien
gcttgcctcagtgtgcgcagaggat

SEQ ID NO: 5589766 - DNA, 25 bp, Homo sapien
ccaagggtcctgtgaaccgcatttg

SEQ ID NO: 5589767 - DNA, 25 bp, Homo sapien
agcaaagccccacagacgtctggct

SEQ ID NO: 5589768 - DNA, 25 bp, Homo sapien
ataacctccagagcagtcaggttga

SEQ ID NO: 5589769 - DNA, 25 bp, Homo sapien
cgtccagggtgtttggttctgactt

SEQ ID NO: 5589770 - DNA, 25 bp, Homo sapien
tcccagtcatgccagagttaacctc

SEQ ID NO: 5589771 - DNA, 25 bp, Homo sapien
cagcatgttgcctgggattccatcc

SEQ ID NO: 5589772 - DNA, 25 bp, Homo sapien
acctccgagtacagttatgacgatt

SEQ ID NO: 5589773 - DNA, 25 bp, Homo sapien
ccatcaacctcatggggaaggtatc

SEQ ID NO: 5589774 - DNA, 25 bp, Homo sapien
ctcccattcccaggatggtaaggac

SEQ ID NO: 5589775 - DNA, 25 bp, Homo sapien
ggaagagccatcacatggacagtcc

SEQ ID NO: 5589776 - DNA, 25 bp, Homo sapien
atggggaaggtatcatgactacccc

SEQ ID NO: 5589777 - DNA, 25 bp, Homo sapien
tcctgacctcaggcgttccctaatc

SEQ ID NO: 5589778 - DNA, 25 bp, Homo sapien
gggatcaacttaaacaggaccacta

SEQ ID NO: 5589779 - DNA, 25 bp, Homo sapien
ccagcatctgcactacccccactcc

SEQ ID NO: 5589780 - DNA, 25 bp, Homo sapien
cacagagaagtcaagtagtttgtcc

SEQ ID NO: 5589781 - DNA, 25 bp, Homo sapien
atctgtgcatctgaggagcttttcc

SEQ ID NO: 5589782 - DNA, 25 bp, Homo sapien
tcacatgtagaaatgacccagcatc

SEQ ID NO: 5589783 - DNA, 25 bp, Homo sapien
caaggttgcacagcttcaaaagcac

SEQ ID NO: 5589784 - DNA, 25 bp, Homo sapien
aatcccccaaaagatgacaataatc

SEQ ID NO: 5589785 - DNA, 25 bp, Homo sapien
aagtctgtgatgcttgcaaagtgcc

SEQ ID NO: 5589786 - DNA, 25 bp, Homo sapien
cagatactatgaattgaaggttttc

SEQ ID NO: 5589787 - DNA, 25 bp, Homo sapien
tcatgtcccaactgtgtcctgtgca

SEQ ID NO: 5589788 - DNA, 25 bp, Homo sapien
atttccttcaggaaactggaggttg

SEQ ID NO: 5589789 - DNA, 25 bp, Homo sapien
ttacagctagctgcttcactgatac

SEQ ID NO: 5589790 - DNA, 25 bp, Homo sapien
aaaagtgttatgctactcagcccac

SEQ ID NO: 5589791 - DNA, 25 bp, Homo sapien
acaatgacacttgaaagcacaaatt

SEQ ID NO: 5589792 - DNA, 25 bp, Homo sapien
tccgccttagcagacagatggagag

SEQ ID NO: 5589793 - DNA, 25 bp, Homo sapien
aatgactgagaatattaatgctttc

SEQ ID NO: 5589794 - DNA, 25 bp, Homo sapien
agagagcccaacatgccaaaacact

SEQ ID NO: 5589795 - DNA, 25 bp, Homo sapien
ggtcatgagatagctgcagcaacac

SEQ ID NO: 5589796 - DNA, 25 bp, Homo sapien
ctgactgcttgtttggccctcctgt

SEQ ID NO: 5589797 - DNA, 25 bp, Homo sapien
catcctagggtttgttcagctgctc

SEQ ID NO: 5589798 - DNA, 25 bp, Homo sapien
ggctgtattcctagaaagacgattc

SEQ ID NO: 5589799 - DNA, 25 bp, Homo sapien
gcagcaacactaagcatcatgtctt

SEQ ID NO: 5589800 - DNA, 25 bp, Homo sapien
ttcagctgctcaacaacacccacaa

SEQ ID NO: 5589801 - DNA, 25 bp, Homo sapien
gcaagtgaaaatagccatcgatacc

SEQ ID NO: 5589802 - DNA, 25 bp, Homo sapien
cacagccacgttcaaaggcagaaac

SEQ ID NO: 5589803 - DNA, 25 bp, Homo sapien
tttgcctgaggcagacttcagctat

SEQ ID NO: 5589804 - DNA, 25 bp, Homo sapien
acaacacccacaagactcaggcttc

SEQ ID NO: 5589805 - DNA, 25 bp, Homo sapien
gtgttgggatgttttgcccaaggtc

SEQ ID NO: 5589806 - DNA, 25 bp, Homo sapien
cacagacaggtatcatagaaaacac

SEQ ID NO: 5589807 - DNA, 25 bp, Homo sapien
gttggctagaaatctgagtgcagac

SEQ ID NO: 5589808 - DNA, 25 bp, Homo sapien
aaacagatgacactatcacaggcta

SEQ ID NO: 5589809 - DNA, 25 bp, Homo sapien
gagcagcaacacatgggttcagttt

SEQ ID NO: 5589810 - DNA, 25 bp, Homo sapien
tgagccgttatcgcgccactacatt

SEQ ID NO: 5589811 - DNA, 25 bp, Homo sapien
agagttattgcttgaggttggctag

SEQ ID NO: 5589812 - DNA, 25 bp, Homo sapien
gtgtgggtaatgtcttgggtccaga

SEQ ID NO: 5589813 - DNA, 25 bp, Homo sapien
tcacaggctattcccaaggtatgtt

SEQ ID NO: 5589814 - DNA, 25 bp, Homo sapien
ccccagctccgaaaatcacagacag

SEQ ID NO: 5589815 - DNA, 25 bp, Homo sapien
caggcaaagaagttgccccacatca

SEQ ID NO: 5589816 - DNA, 25 bp, Homo sapien
caaagcaagtaaagtcaaaacagat

SEQ ID NO: 5589817 - DNA, 25 bp, Homo sapien
gtggagtcatgcttagacagagaca

SEQ ID NO: 5589818 - DNA, 25 bp, Homo sapien
tgagcatggccacattctagtgaac

SEQ ID NO: 5589819 - DNA, 25 bp, Homo sapien
cacaagcacattcaatcaggtcagc

SEQ ID NO: 5589820 - DNA, 25 bp, Homo sapien
agggccaggtactaaatacaccttg

SEQ ID NO: 5589821 - DNA, 25 bp, Homo sapien
cataccaagagtcctggtgagcttc

SEQ ID NO: 5589822 - DNA, 25 bp, Homo sapien
tggtgagcttcctgtgatacacaca

SEQ ID NO: 5589823 - DNA, 25 bp, Homo sapien
ggggctcagatgcctttgggagcta

SEQ ID NO: 5589824 - DNA, 25 bp, Homo sapien
ttgggagctagaggctacataccaa

SEQ ID NO: 5589825 - DNA, 25 bp, Homo sapien
ttgaggaagaaagaggttgttctca

SEQ ID NO: 5589826 - DNA, 25 bp, Homo sapien
tgtagcccattcaagttccactgca

SEQ ID NO: 5589827 - DNA, 25 bp, Homo sapien
cagagacaggtaactgagtcctgcc

SEQ ID NO: 5589828 - DNA, 25 bp, Homo sapien
cctaaggtaggaaagatacatatac

SEQ ID NO: 5589829 - DNA, 25 bp, Homo sapien
cagtctgggacttacccttaaggcc

SEQ ID NO: 5589830 - DNA, 25 bp, Homo sapien
aaggtgaataaagcaactcagagga

SEQ ID NO: 5589831 - DNA, 25 bp, Homo sapien
gggattcagtaaaaagaacactata

SEQ ID NO: 5589832 - DNA, 25 bp, Homo sapien
aaaaacaggtaaatcagtctgggac

SEQ ID NO: 5589833 - DNA, 25 bp, Homo sapien
ttaaaagtggactggtacctgagtc

SEQ ID NO: 5589834 - DNA, 25 bp, Homo sapien
gataatctgtggcaagccccaggga

SEQ ID NO: 5589835 - DNA, 25 bp, Homo sapien
gacaggaatcaagataaaggaagta

SEQ ID NO: 5589836 - DNA, 25 bp, Homo sapien
cttagtaacagatttgacagccata

SEQ ID NO: 5589837 - DNA, 25 bp, Homo sapien
ggatgccaacagagtactggagcta

SEQ ID NO: 5589838 - DNA, 25 bp, Homo sapien
tcagaaatggagactaaagcttagt

SEQ ID NO: 5589839 - DNA, 25 bp, Homo sapien
ccactcagaagattacagagaagga

SEQ ID NO: 5589840 - DNA, 25 bp, Homo sapien
aactgaaaacagtagaaccttgcta

SEQ ID NO: 5589841 - DNA, 25 bp, Homo sapien
acaagggtggtcactgccaccactc

SEQ ID NO: 5589842 - DNA, 25 bp, Homo sapien
ataaacagaacctagggacaaagag

SEQ ID NO: 5589843 - DNA, 25 bp, Homo sapien
agctttgatgcatataggggtaata

SEQ ID NO: 5589844 - DNA, 25 bp, Homo sapien
tgggaaatcagacaagctagagcca

SEQ ID NO: 5589845 - DNA, 25 bp, Homo sapien
ttgctagggtaaatgaaataaacag

SEQ ID NO: 5589846 - DNA, 25 bp, Homo sapien
gggaaagcagctgactcagtcccaa

SEQ ID NO: 5589847 - DNA, 25 bp, Homo sapien
ggtggcactggtgatttgtgacaat

SEQ ID NO: 5589848 - DNA, 25 bp, Homo sapien
gcaagggaagttgcagctttgatgc

SEQ ID NO: 5589849 - DNA, 25 bp, Homo sapien
aaagtcagtaagagggcatgatttt

SEQ ID NO: 5589850 - DNA, 25 bp, Homo sapien
ctgtggtagttctcaaggaagcagg

SEQ ID NO: 5589851 - DNA, 25 bp, Homo sapien
cacatagcaggcaccaagtaaacgt

SEQ ID NO: 5589852 - DNA, 25 bp, Homo sapien
gccccatctggcaccaactcaagtc

SEQ ID NO: 5589853 - DNA, 25 bp, Homo sapien
atatcatccaggaagtgctaccacg

SEQ ID NO: 5589854 - DNA, 25 bp, Homo sapien
gcagcgagttgtgtgcctctcctat

SEQ ID NO: 5589855 - DNA, 25 bp, Homo sapien
actcaagtcatcaccctccaagcag

SEQ ID NO: 5589856 - DNA, 25 bp, Homo sapien
gcaacatagagagacttcatcctta

SEQ ID NO: 5589857 - DNA, 25 bp, Homo sapien
aagtaaacgttagctattcacctgc

SEQ ID NO: 5589858 - DNA, 25 bp, Homo sapien
atcctaaatacagcatggcggccca

SEQ ID NO: 5589859 - DNA, 25 bp, Homo sapien
atgttggctccctggtgtgtgcctg

SEQ ID NO: 5589860 - DNA, 25 bp, Homo sapien
ttatgctgagaactctggatgccta

SEQ ID NO: 5589861 - DNA, 25 bp, Homo sapien
agccaccgcattcagccagtccaca

SEQ ID NO: 5589862 - DNA, 25 bp, Homo sapien
ataaccaacagtagcagtttaacac

SEQ ID NO: 5589863 - DNA, 25 bp, Homo sapien
aagactagtttaagaatggaagttc

SEQ ID NO: 5589864 - DNA, 25 bp, Homo sapien
ttatcaggtagaagtctctggactt

SEQ ID NO: 5589865 - DNA, 25 bp, Homo sapien
aactacttggtctatggtctggccc

SEQ ID NO: 5589866 - DNA, 25 bp, Homo sapien
gaatggaagttctgttgtgagtaat

SEQ ID NO: 5589867 - DNA, 25 bp, Homo sapien
tataactgctaaggattgggtacca

SEQ ID NO: 5589868 - DNA, 25 bp, Homo sapien
ggcacgatcacagcttagtgcagcc

SEQ ID NO: 5589869 - DNA, 25 bp, Homo sapien
actagataaattagcaagtaggact

SEQ ID NO: 5589870 - DNA, 25 bp, Homo sapien
gtaccagtggattaaagcaaaagac

SEQ ID NO: 5589871 - DNA, 25 bp, Homo sapien
caagtaggacttagattcagatcac

SEQ ID NO: 5589872 - DNA, 25 bp, Homo sapien
agctatgtgacctcgtgtaagtctc

SEQ ID NO: 5589873 - DNA, 25 bp, Homo sapien
gtgagccctggccttgcctcaattt

SEQ ID NO: 5589874 - DNA, 25 bp, Homo sapien
cctatcagtggttttgaggatgggc

SEQ ID NO: 5589875 - DNA, 25 bp, Homo sapien
attagctatgtgacctcgtgtaagt

SEQ ID NO: 5589876 - DNA, 25 bp, Homo sapien
tattgcctgctctagtacaatcagc

SEQ ID NO: 5589877 - DNA, 25 bp, Homo sapien
aaacggggttagtgaaactcacatc

SEQ ID NO: 5589878 - DNA, 25 bp, Homo sapien
tgaaactcacatcctatcagtggtt

SEQ ID NO: 5589879 - DNA, 25 bp, Homo sapien
ctagtacaatcagcagctaaggcgg

SEQ ID NO: 5589880 - DNA, 25 bp, Homo sapien
aggatgggccgactcttgtattgcc

SEQ ID NO: 5589881 - DNA, 25 bp, Homo sapien
agcaaccctccaaccttggactccc

SEQ ID NO: 5589882 - DNA, 25 bp, Homo sapien
ttctggctcttagaaaggcagcatg

SEQ ID NO: 5589883 - DNA, 25 bp, Homo sapien
ctgagtgccactgtgagtctaaccc

SEQ ID NO: 5589884 - DNA, 25 bp, Homo sapien
acaaacattgagaacccaaggagga

SEQ ID NO: 5589885 - DNA, 25 bp, Homo sapien
tgcctccagatgtgctgcatgggga

SEQ ID NO: 5589886 - DNA, 25 bp, Homo sapien
agtctaaccccacctgagggaagga

SEQ ID NO: 5589887 - DNA, 25 bp, Homo sapien
tctcctgcaaaatgcgtggcctgag

SEQ ID NO: 5589888 - DNA, 25 bp, Homo sapien
cccagtgatcacagctgacgtgacc

SEQ ID NO: 5589889 - DNA, 25 bp, Homo sapien
gtgttaagagatgggacaactaaat

SEQ ID NO: 5589890 - DNA, 25 bp, Homo sapien
aactagccacagcatgacaaacatt

SEQ ID NO: 5589891 - DNA, 25 bp, Homo sapien
acccatgcaggacaccccaccttca

SEQ ID NO: 5589892 - DNA, 25 bp, Homo sapien
tgtattgtggttaagagattgtcct

SEQ ID NO: 5589893 - DNA, 25 bp, Homo sapien
aaataagaagcaacgatgctggatc

SEQ ID NO: 5589894 - DNA, 25 bp, Homo sapien
tgcagagatgacacagatgaagtga

SEQ ID NO: 5589895 - DNA, 25 bp, Homo sapien
tagcacaggaatatacacaagagag

SEQ ID NO: 5589896 - DNA, 25 bp, Homo sapien
ggcatcaagattgggcatctgcacc

SEQ ID NO: 5589897 - DNA, 25 bp, Homo sapien
aaatgcagctgcaatgctagcccac

SEQ ID NO: 5589898 - DNA, 25 bp, Homo sapien
tcaggatgatttacatgcactgccc

SEQ ID NO: 5589899 - DNA, 25 bp, Homo sapien
ccacctcgggggacaatataataaa

SEQ ID NO: 5589900 - DNA, 25 bp, Homo sapien
gcttccactcaatggctgaaggcag

SEQ ID NO: 5589901 - DNA, 25 bp, Homo sapien
cagccaggtgagtgtttatgaaggc

SEQ ID NO: 5589902 - DNA, 25 bp, Homo sapien
gagagtgacagatttgaatggtccc

SEQ ID NO: 5589903 - DNA, 25 bp, Homo sapien
ccagtgccaatggtcgcaagctggg

SEQ ID NO: 5589904 - DNA, 25 bp, Homo sapien
aaggcccaactgacccatcagccca

SEQ ID NO: 5589905 - DNA, 25 bp, Homo sapien
aaaacatctcaaaagaggcagggct

SEQ ID NO: 5589906 - DNA, 25 bp, Homo sapien
aaccaaaaataagcaccacacaaaa

SEQ ID NO: 5589907 - DNA, 25 bp, Homo sapien
aggtatggagtttgataacgctgac

SEQ ID NO: 5589908 - DNA, 25 bp, Homo sapien
cttgaaggctgctgacacactgaag

SEQ ID NO: 5589909 - DNA, 25 bp, Homo sapien
ggctagatagcggaacaattaattt

SEQ ID NO: 5589910 - DNA, 25 bp, Homo sapien
ttcctggctccaaatacgtggtttc

SEQ ID NO: 5589911 - DNA, 25 bp, Homo sapien
atcagccttatgacgagatgggtgt

SEQ ID NO: 5589912 - DNA, 25 bp, Homo sapien
cactgaagatggtaatgtactgctc

SEQ ID NO: 5589913 - DNA, 25 bp, Homo sapien
acgagatgggtgtccacaattcaca

SEQ ID NO: 5589914 - DNA, 25 bp, Homo sapien
tcttctgacaggtatggagtttgat

SEQ ID NO: 5589915 - DNA, 25 bp, Homo sapien
gttaacactgcagagtgagtcaatt

SEQ ID NO: 5589916 - DNA, 25 bp, Homo sapien
gcaggccttagctgatgctcatgga

SEQ ID NO: 5589917 - DNA, 25 bp, Homo sapien
aggactttgttggcacagtggacat

SEQ ID NO: 5589918 - DNA, 25 bp, Homo sapien
gcagtcactgccttggtttgagttc

SEQ ID NO: 5589919 - DNA, 25 bp, Homo sapien
ctagacccagtcctggaagatgagc

SEQ ID NO: 5589920 - DNA, 25 bp, Homo sapien
tgacagagtcaagaattaggtaacc

SEQ ID NO: 5589921 - DNA, 25 bp, Homo sapien
ggccagtgcttgagccctcctggtc

SEQ ID NO: 5589922 - DNA, 25 bp, Homo sapien
tgtgaatgggaaactagacccagtc

SEQ ID NO: 5589923 - DNA, 25 bp, Homo sapien
ctgctgtgctctgtgcgttgcctga

SEQ ID NO: 5589924 - DNA, 25 bp, Homo sapien
tacccacagaactctggccagtgct

SEQ ID NO: 5589925 - DNA, 25 bp, Homo sapien
ggagtgggagacattgataccccaa

SEQ ID NO: 5589926 - DNA, 25 bp, Homo sapien
ctgaagctttccagcaggccttagc

SEQ ID NO: 5589927 - DNA, 25 bp, Homo sapien
ggaaatgtagggctcatggtaataa

SEQ ID NO: 5589928 - DNA, 25 bp, Homo sapien
atatgataatgtagaagaaaataat

SEQ ID NO: 5589929 - DNA, 25 bp, Homo sapien
aagagaggtcctaaattccatgctg

SEQ ID NO: 5589930 - DNA, 25 bp, Homo sapien
tcacatccccaaaagtagctgtacc

SEQ ID NO: 5589931 - DNA, 25 bp, Homo sapien
tcataaagtattacagttctggcca

SEQ ID NO: 5589932 - DNA, 25 bp, Homo sapien
taaacagctaatacaataaacactt

SEQ ID NO: 5589933 - DNA, 25 bp, Homo sapien
taatctattttggcaggcactgttt

SEQ ID NO: 5589934 - DNA, 25 bp, Homo sapien
tgtttttggtactatgggggacaca

SEQ ID NO: 5589935 - DNA, 25 bp, Homo sapien
aagtaataatggttagccactaaat

SEQ ID NO: 5589936 - DNA, 25 bp, Homo sapien
ggaatgagtaagagaggtcctaaat

SEQ ID NO: 5589937 - DNA, 25 bp, Homo sapien
cgcacactcatgaatggggaaatgt

SEQ ID NO: 5589938 - DNA, 25 bp, Homo sapien
tgcccttcctgggcaggtaacgctg

SEQ ID NO: 5589939 - DNA, 25 bp, Homo sapien
ccctcagcacgctgtcctcccaggg

SEQ ID NO: 5589940 - DNA, 25 bp, Homo sapien
cgcaccgctcagtccgagagcgcag

SEQ ID NO: 5589941 - DNA, 25 bp, Homo sapien
atcctggtgcagattttcgggttgt

SEQ ID NO: 5589942 - DNA, 25 bp, Homo sapien
gcgcagccccttaggcgcccagttg

SEQ ID NO: 5589943 - DNA, 25 bp, Homo sapien
cattcccttggaaatcctggtgcag

SEQ ID NO: 5589944 - DNA, 25 bp, Homo sapien
cggcaccctcagcacgctgtcctcc

SEQ ID NO: 5589945 - DNA, 25 bp, Homo sapien
gcgcaccgctcagtccgagagcgca

SEQ ID NO: 5589946 - DNA, 25 bp, Homo sapien
cctggtgcagattttcgggttgttg

SEQ ID NO: 5589947 - DNA, 25 bp, Homo sapien
ctggggagaccgcattcccttggaa

SEQ ID NO: 5589948 - DNA, 25 bp, Homo sapien
gcccttcctgggcaggtaacgctgg

SEQ ID NO: 5589949 - DNA, 25 bp, Homo sapien
gctggtcttaaacttctggcctcaa

SEQ ID NO: 5589950 - DNA, 25 bp, Homo sapien
gggcgcatgcacacagacttatcca

SEQ ID NO: 5589951 - DNA, 25 bp, Homo sapien
aggaaaaatcctcaaaatgttacat

SEQ ID NO: 5589952 - DNA, 25 bp, Homo sapien
atctactgtgatagtttaagggcgc

SEQ ID NO: 5589953 - DNA, 25 bp, Homo sapien
aactttctgtaaatgctactgttat

SEQ ID NO: 5589954 - DNA, 25 bp, Homo sapien
acataaagatcacatcacaaaactt

SEQ ID NO: 5589955 - DNA, 25 bp, Homo sapien
taaggagaaggaaaatatatcactt

SEQ ID NO: 5589956 - DNA, 25 bp, Homo sapien
atccatatattgagtcttacctttc

SEQ ID NO: 5589957 - DNA, 25 bp, Homo sapien
attacaggataaactataaatctac

SEQ ID NO: 5589958 - DNA, 25 bp, Homo sapien
tgtgatagtttaagggcgcatgcac

SEQ ID NO: 5589959 - DNA, 25 bp, Homo sapien
accatgcctggccacaaagactatt

SEQ ID NO: 5589960 - DNA, 25 bp, Homo sapien
gagggtcctggagatcacctaagaa

SEQ ID NO: 5589961 - DNA, 25 bp, Homo sapien
gttttgtagcaaagcaccacagact

SEQ ID NO: 5589962 - DNA, 25 bp, Homo sapien
gagagccccagcctgtatggctgcc

SEQ ID NO: 5589963 - DNA, 25 bp, Homo sapien
ccagaaatgaggacacgtatgaaag

SEQ ID NO: 5589964 - DNA, 25 bp, Homo sapien
ctgtccttaaggagactcagtgagg

SEQ ID NO: 5589965 - DNA, 25 bp, Homo sapien
gtctcccctgtgcccctgtccttaa

SEQ ID NO: 5589966 - DNA, 25 bp, Homo sapien
agtgaggacctggccaccttcctag

SEQ ID NO: 5589967 - DNA, 25 bp, Homo sapien
aagctgagccagctctagtctcccc

SEQ ID NO: 5589968 - DNA, 25 bp, Homo sapien
cctagatagggtgacacaatccaga

SEQ ID NO: 5589969 - DNA, 25 bp, Homo sapien
tgtcactcaaaaccaagttcggatc

SEQ ID NO: 5589970 - DNA, 25 bp, Homo sapien
caagttcggatctaagactcccacc

SEQ ID NO: 5589971 - DNA, 25 bp, Homo sapien
actggatttacatatggtagccttc

SEQ ID NO: 5589972 - DNA, 25 bp, Homo sapien
tccagttaacatagccagagggaga

SEQ ID NO: 5589973 - DNA, 25 bp, Homo sapien
gaagaaggcaagttacaaataccgc

SEQ ID NO: 5589974 - DNA, 25 bp, Homo sapien
tgaagacagcagttactttgatctg

SEQ ID NO: 5589975 - DNA, 25 bp, Homo sapien
attagaagttttagacctcagcctc

SEQ ID NO: 5589976 - DNA, 25 bp, Homo sapien
tcctctaacgcagagagagctgcag

SEQ ID NO: 5589977 - DNA, 25 bp, Homo sapien
gtgcccgcctctcaatgggtgccct

SEQ ID NO: 5589978 - DNA, 25 bp, Homo sapien
tgaatggaactttctgaagacagca

SEQ ID NO: 5589979 - DNA, 25 bp, Homo sapien
agtggtccaggcacatactagccaa

SEQ ID NO: 5589980 - DNA, 25 bp, Homo sapien
ccgccgttggcattttcgtgggtgt

SEQ ID NO: 5589981 - DNA, 25 bp, Homo sapien
tgcagaaagcagttcccaaaaggaa

SEQ ID NO: 5589982 - DNA, 25 bp, Homo sapien
ttagaatggtgcaacttgggatgtt

SEQ ID NO: 5589983 - DNA, 25 bp, Homo sapien
gtacacgtgaggtccaggaaatata

SEQ ID NO: 5589984 - DNA, 25 bp, Homo sapien
tggggatgactacagcctcagcccc

SEQ ID NO: 5589985 - DNA, 25 bp, Homo sapien
aagacaactgcatgacgtggcaggg

SEQ ID NO: 5589986 - DNA, 25 bp, Homo sapien
tttgaatatgcatggccccagagga

SEQ ID NO: 5589987 - DNA, 25 bp, Homo sapien
tgtgtgacagagcgctatgaactca

SEQ ID NO: 5589988 - DNA, 25 bp, Homo sapien
atgaactcaagaagtgtcaagagca

SEQ ID NO: 5589989 - DNA, 25 bp, Homo sapien
aaagtcaccaaggccactgagttat

SEQ ID NO: 5589990 - DNA, 25 bp, Homo sapien
gtagttacaacagaggctgtgtgac

SEQ ID NO: 5589991 - DNA, 25 bp, Homo sapien
tcaacgtgctgctctaagggaaaag

SEQ ID NO: 5589992 - DNA, 25 bp, Homo sapien
tgacggctatgcataaaaacccctt

SEQ ID NO: 5589993 - DNA, 25 bp, Homo sapien
atgtctacaggatgcagtagagatc

SEQ ID NO: 5589994 - DNA, 25 bp, Homo sapien
ggatagttctgagtactggtgaaat

SEQ ID NO: 5589995 - DNA, 25 bp, Homo sapien
tactgtaatatggtgttatcagcac

SEQ ID NO: 5589996 - DNA, 25 bp, Homo sapien
gacaaagaaaggtgctgcaacttct

SEQ ID NO: 5589997 - DNA, 25 bp, Homo sapien
gcagtagagatcttgggcattccag

SEQ ID NO: 5589998 - DNA, 25 bp, Homo sapien
aggttagtagtgtctccatgatggg

SEQ ID NO: 5589999 - DNA, 25 bp, Homo sapien
aaaaataatcagacccagaataagg

SEQ ID NO: 5590000 - DNA, 25 bp, Homo sapien
aagaaaacagatatgtaagtatgct

SEQ ID NO: 5590001 - DNA, 25 bp, Homo sapien
actgtggatagttctgagtactggt

SEQ ID NO: 5590002 - DNA, 25 bp, Homo sapien
aggtgctgcaacttctggacataaa

SEQ ID NO: 5590003 - DNA, 25 bp, Homo sapien
aggggggaaaccctccatgtctaca

SEQ ID NO: 5590004 - DNA, 25 bp, Homo sapien
ggttctcacccgattagtggactgc

SEQ ID NO: 5590005 - DNA, 25 bp, Homo sapien
acgcaagcactggtaatgcggatgc

SEQ ID NO: 5590006 - DNA, 25 bp, Homo sapien
gagttgggaagaatggtcccctcta

SEQ ID NO: 5590007 - DNA, 25 bp, Homo sapien
atgcaaaaagcaatatggttctcac

SEQ ID NO: 5590008 - DNA, 25 bp, Homo sapien
tctacttagtgttgctagacagcat

SEQ ID NO: 5590009 - DNA, 25 bp, Homo sapien
tgtccaaagtcctgtgcatggtttc

SEQ ID NO: 5590010 - DNA, 25 bp, Homo sapien
gattagtggactgccacgcaagcac

SEQ ID NO: 5590011 - DNA, 25 bp, Homo sapien
gaactgatctgatccggcgccttgc

SEQ ID NO: 5590012 - DNA, 25 bp, Homo sapien
ctgctctctgccctcattatgtgac

SEQ ID NO: 5590013 - DNA, 25 bp, Homo sapien
ttctggaactgatctgatccggcgc

SEQ ID NO: 5590014 - DNA, 25 bp, Homo sapien
tgtgacttaatgggagatgccaagg

SEQ ID NO: 5590015 - DNA, 25 bp, Homo sapien
tgttttaagtctgaggaaaaggcaa

SEQ ID NO: 5590016 - DNA, 25 bp, Homo sapien
ccctccccagtgaggtcttgagccc

SEQ ID NO: 5590017 - DNA, 25 bp, Homo sapien
gtgtaaccatggtctagggtgagag

SEQ ID NO: 5590018 - DNA, 25 bp, Homo sapien
cccgcagtaacaatcacatccccgc

SEQ ID NO: 5590019 - DNA, 25 bp, Homo sapien
aatgggtgtgttcctcctgacttct

SEQ ID NO: 5590020 - DNA, 25 bp, Homo sapien
gaatgtatcaccagaaggggttgtt

SEQ ID NO: 5590021 - DNA, 25 bp, Homo sapien
gggaaactagagagttgtgaatgta

SEQ ID NO: 5590022 - DNA, 25 bp, Homo sapien
cttggtcaaaagaaaacagcattag

SEQ ID NO: 5590023 - DNA, 25 bp, Homo sapien
aaggcaagctcccgctccccatagt

SEQ ID NO: 5590024 - DNA, 25 bp, Homo sapien
caggatacttggaagtgatagcctc

SEQ ID NO: 5590025 - DNA, 25 bp, Homo sapien
catagtgccatttgggggaaactag

SEQ ID NO: 5590026 - DNA, 25 bp, Homo sapien
ggttaggcgtatacgtcgacgaaac

SEQ ID NO: 5590027 - DNA, 25 bp, Homo sapien
gtttcgtcgacgtatacgcctaacc

SEQ ID NO: 5590028 - DNA, 25 bp, Homo sapien
atccctgatctcaagtggacgatgc

SEQ ID NO: 5590029 - DNA, 25 bp, Homo sapien
ggggctctagaataggaggtaataa

SEQ ID NO: 5590030 - DNA, 25 bp, Homo sapien
cctcaatctcagatgggcagaaggg

SEQ ID NO: 5590031 - DNA, 25 bp, Homo sapien
gtctcatgatcccgaagagggcttt

SEQ ID NO: 5590032 - DNA, 25 bp, Homo sapien
catgacatgacccattctccacccc

SEQ ID NO: 5590033 - DNA, 25 bp, Homo sapien
gtgactttaagtgtaatgacagcat

SEQ ID NO: 5590034 - DNA, 25 bp, Homo sapien
tcaagtggacgatgctccctcaatc

SEQ ID NO: 5590035 - DNA, 25 bp, Homo sapien
agaaattggactagaaccaagtctc

SEQ ID NO: 5590036 - DNA, 25 bp, Homo sapien
aacaatcctgtttggggcctctctg

SEQ ID NO: 5590037 - DNA, 25 bp, Homo sapien
aaggagggtaaatagtttgcccaca

SEQ ID NO: 5590038 - DNA, 25 bp, Homo sapien
agaggacaaaagcctttagagatcc

SEQ ID NO: 5590039 - DNA, 25 bp, Homo sapien
atgaagtaactggtggtcatcagtc

SEQ ID NO: 5590040 - DNA, 25 bp, Homo sapien
gatgtgatacagatgacagatgttc

SEQ ID NO: 5590041 - DNA, 25 bp, Homo sapien
taaaaataccaacatcagacagctt

SEQ ID NO: 5590042 - DNA, 25 bp, Homo sapien
tgaactcaggccatgtatacacacc

SEQ ID NO: 5590043 - DNA, 25 bp, Homo sapien
aaaagcagtactcacagcaggaaca

SEQ ID NO: 5590044 - DNA, 25 bp, Homo sapien
aaacagaactgttactaagtggaat

SEQ ID NO: 5590045 - DNA, 25 bp, Homo sapien
tcaatacatgagtcaaggatgtttt

SEQ ID NO: 5590046 - DNA, 25 bp, Homo sapien
gaggagaataatttcccagccgtag

SEQ ID NO: 5590047 - DNA, 25 bp, Homo sapien
tcactcgatagaaattgcagatcat

SEQ ID NO: 5590048 - DNA, 25 bp, Homo sapien
agcaggaacaatttgaactcaggcc

SEQ ID NO: 5590049 - DNA, 25 bp, Homo sapien
aacagtactgtggccgataagaata

SEQ ID NO: 5590050 - DNA, 25 bp, Homo sapien
aaatgggggaatactgcagttttta

SEQ ID NO: 5590051 - DNA, 25 bp, Homo sapien
ataatacacaagacctgggtgaggc

SEQ ID NO: 5590052 - DNA, 25 bp, Homo sapien
ggctgctttgcaccttaagtgctcc

SEQ ID NO: 5590053 - DNA, 25 bp, Homo sapien
ctctcatcacaaaatgggggaatac

SEQ ID NO: 5590054 - DNA, 25 bp, Homo sapien
tctgtcccccaggctttgtctcaaa

SEQ ID NO: 5590055 - DNA, 25 bp, Homo sapien
aacccctgccagccccacactctca

SEQ ID NO: 5590056 - DNA, 25 bp, Homo sapien
tctcctccctccaaccaacccctgc

SEQ ID NO: 5590057 - DNA, 25 bp, Homo sapien
gtgaggccacatgagaacactttgg

SEQ ID NO: 5590058 - DNA, 25 bp, Homo sapien
ccaaataatacacaagacctgggtg

SEQ ID NO: 5590059 - DNA, 25 bp, Homo sapien
catgagaacactttggagaagtatc

SEQ ID NO: 5590060 - DNA, 25 bp, Homo sapien
gtgctcctctgtcttctctcctccc

SEQ ID NO: 5590061 - DNA, 25 bp, Homo sapien
aggggggaaactatgaaatagatat

SEQ ID NO: 5590062 - DNA, 25 bp, Homo sapien
aatagctggatgtttataaggtggc

SEQ ID NO: 5590063 - DNA, 25 bp, Homo sapien
ctgggaagggagtatgtattcccta

SEQ ID NO: 5590064 - DNA, 25 bp, Homo sapien
gggaatttcaaagacagacgacacc

SEQ ID NO: 5590065 - DNA, 25 bp, Homo sapien
agacgacacctgctgttatgaattt

SEQ ID NO: 5590066 - DNA, 25 bp, Homo sapien
agtgatcaacagaagtaaagcatat

SEQ ID NO: 5590067 - DNA, 25 bp, Homo sapien
ttccattctgcaagaccacaggggg

SEQ ID NO: 5590068 - DNA, 25 bp, Homo sapien
aagaaaaggtaagccatgattctca

SEQ ID NO: 5590069 - DNA, 25 bp, Homo sapien
tgaaactctacgatataccaggctc

SEQ ID NO: 5590070 - DNA, 25 bp, Homo sapien
tttaaaagagcaaatagtgatcaac

SEQ ID NO: 5590071 - DNA, 25 bp, Homo sapien
ttaattggttcagggtagagtcttg

SEQ ID NO: 5590072 - DNA, 25 bp, Homo sapien
taagtcatgtaccaaagcaatagct

SEQ ID NO: 5590073 - DNA, 25 bp, Homo sapien
aaataaagtatagagggtacatttc

SEQ ID NO: 5590074 - DNA, 25 bp, Homo sapien
tgtagcaaaaggtactttgatatac

SEQ ID NO: 5590075 - DNA, 25 bp, Homo sapien
tcaaagcagcattacccaactggtt

SEQ ID NO: 5590076 - DNA, 25 bp, Homo sapien
cactgcactactggacttgaaactt

SEQ ID NO: 5590077 - DNA, 25 bp, Homo sapien
gacgatctggtcctagtgtaaaact

SEQ ID NO: 5590078 - DNA, 25 bp, Homo sapien
aggcacaccaaacatgataggggca

SEQ ID NO: 5590079 - DNA, 25 bp, Homo sapien
cccaactggttagactaagtcatgt

SEQ ID NO: 5590080 - DNA, 25 bp, Homo sapien
gaagaccaatcatgtatggacgatc

SEQ ID NO: 5590081 - DNA, 25 bp, Homo sapien
ctcaaacacaaaggattcactgcac

SEQ ID NO: 5590082 - DNA, 25 bp, Homo sapien
taaaggtaagatttaaggcacacca

SEQ ID NO: 5590083 - DNA, 25 bp, Homo sapien
cagcgaggtatgcctgtatctggta

SEQ ID NO: 5590084 - DNA, 25 bp, Homo sapien
agatttctcagaagtatgaatactc

SEQ ID NO: 5590085 - DNA, 25 bp, Homo sapien
gcacacctgacgttgggaaaatgga

SEQ ID NO: 5590086 - DNA, 25 bp, Homo sapien
agtgtggctataaaacgccccacat

SEQ ID NO: 5590087 - DNA, 25 bp, Homo sapien
gggaaaatggacctgatcgtcttgc

SEQ ID NO: 5590088 - DNA, 25 bp, Homo sapien
atgaatactcagaagttgagcaaat

SEQ ID NO: 5590089 - DNA, 25 bp, Homo sapien
gacatgaaatgcacacctgacgttg

SEQ ID NO: 5590090 - DNA, 25 bp, Homo sapien
atagggagtacattgtgaacatgac

SEQ ID NO: 5590091 - DNA, 25 bp, Homo sapien
caatatgagctctctggtgttgagt

SEQ ID NO: 5590092 - DNA, 25 bp, Homo sapien
gtgaacatgacaactaccctatatt

SEQ ID NO: 5590093 - DNA, 25 bp, Homo sapien
tgcaatgcacaattcagcgaggtat

SEQ ID NO: 5590094 - DNA, 25 bp, Homo sapien
ggattaatagtgtgagccaaggtgc

SEQ ID NO: 5590095 - DNA, 25 bp, Homo sapien
aataggactttatgtggtgatggaa

SEQ ID NO: 5590096 - DNA, 25 bp, Homo sapien
aatagtggtgcagtccaataggact

SEQ ID NO: 5590097 - DNA, 25 bp, Homo sapien
tagaggcgtcataatagtgcaagtc

SEQ ID NO: 5590098 - DNA, 25 bp, Homo sapien
gtggctagtgcaaataaaaaaatct

SEQ ID NO: 5590099 - DNA, 25 bp, Homo sapien
gatggttgaacatgcagaatgtggc

SEQ ID NO: 5590100 - DNA, 25 bp, Homo sapien
tgtggtgatggaagtgttctacatc

SEQ ID NO: 5590101 - DNA, 25 bp, Homo sapien
tctggagtcagtacaatttcagctc

SEQ ID NO: 5590102 - DNA, 25 bp, Homo sapien
atagccatacataactagaggcgtc

SEQ ID NO: 5590103 - DNA, 25 bp, Homo sapien
acgtggtagccactagacaaatgtg

SEQ ID NO: 5590104 - DNA, 25 bp, Homo sapien
ccaaggtgcctggcctagatttcta

SEQ ID NO: 5590105 - DNA, 25 bp, Homo sapien
atgagacattggaggattaaataat

SEQ ID NO: 5590106 - DNA, 25 bp, Homo sapien
tgaacaggaaatactaagataccag

SEQ ID NO: 5590107 - DNA, 25 bp, Homo sapien
acacactgtaggagttactgcaaaa

SEQ ID NO: 5590108 - DNA, 25 bp, Homo sapien
tacatgaggctcacaaactaatgtg

SEQ ID NO: 5590109 - DNA, 25 bp, Homo sapien
ttcagtaaagtctatagtcacaaaa

SEQ ID NO: 5590110 - DNA, 25 bp, Homo sapien
aatatgcataagtatgaatggctac

SEQ ID NO: 5590111 - DNA, 25 bp, Homo sapien
ttggattgactattatgggatacta

SEQ ID NO: 5590112 - DNA, 25 bp, Homo sapien
gtcaagtaccctcaagtgaagtaat

SEQ ID NO: 5590113 - DNA, 25 bp, Homo sapien
acatagcaatagtgaaacaactctt

SEQ ID NO: 5590114 - DNA, 25 bp, Homo sapien
actactaagcatgaacaggaaatac

SEQ ID NO: 5590115 - DNA, 25 bp, Homo sapien
aggagttactgcaaaatgagacatt

SEQ ID NO: 5590116 - DNA, 25 bp, Homo sapien
ttagacagtttctttctcaatactt

SEQ ID NO: 5590117 - DNA, 25 bp, Homo sapien
aagtattgagaaagaaactgtctaa

SEQ ID NO: 5590118 - DNA, 25 bp, Homo sapien
catgggatggctcacctatagcttc

SEQ ID NO: 5590119 - DNA, 25 bp, Homo sapien
aaggaagcaatactagctgcccgac

SEQ ID NO: 5590120 - DNA, 25 bp, Homo sapien
ttcggatctgagctgtcttacccgc

SEQ ID NO: 5590121 - DNA, 25 bp, Homo sapien
agtgggtctcctctgacagtagaaa

SEQ ID NO: 5590122 - DNA, 25 bp, Homo sapien
ccatgcaaggaagcaatactagctg

SEQ ID NO: 5590123 - DNA, 25 bp, Homo sapien
agcttcagtgtgttaagtaaagaaa

SEQ ID NO: 5590124 - DNA, 25 bp, Homo sapien
agtataaagtctgacatgggatggc

SEQ ID NO: 5590125 - DNA, 25 bp, Homo sapien
gctgcttttctctatgacgtaccat

SEQ ID NO: 5590126 - DNA, 25 bp, Homo sapien
ttcagaccccattttcattcggatc

SEQ ID NO: 5590127 - DNA, 25 bp, Homo sapien
tgcagattctggtttttagtgggtc

SEQ ID NO: 5590128 - DNA, 25 bp, Homo sapien
gctgcccgactagagggcagctccc

SEQ ID NO: 5590129 - DNA, 25 bp, Homo sapien
ccttccgcccctcaccccgctttca

SEQ ID NO: 5590130 - DNA, 25 bp, Homo sapien
ctcctccttcgtcccttccctccgc

SEQ ID NO: 5590131 - DNA, 25 bp, Homo sapien
ttccctccgctccccgcgccaagac

SEQ ID NO: 5590132 - DNA, 25 bp, Homo sapien
ccctcaccccgctttcacctactcc

SEQ ID NO: 5590133 - DNA, 25 bp, Homo sapien
ctccttcgtcccttccctccgctcc

SEQ ID NO: 5590134 - DNA, 25 bp, Homo sapien
cccttccctccgctccccgcgccaa

SEQ ID NO: 5590135 - DNA, 25 bp, Homo sapien
cacctactcctccttcgtcccttcc

SEQ ID NO: 5590136 - DNA, 25 bp, Homo sapien
gccggcagtctgcctgcatagtgcg

SEQ ID NO: 5590137 - DNA, 25 bp, Homo sapien
tcaccccgctttcacctactcctcc

SEQ ID NO: 5590138 - DNA, 25 bp, Homo sapien
ggcagtctgcctgcatagtgcgggt

SEQ ID NO: 5590139 - DNA, 25 bp, Homo sapien
gcggccggcagtctgcctgcatagt

SEQ ID NO: 5590140 - DNA, 25 bp, Homo sapien
caaattaagacctgccaatactgcc

SEQ ID NO: 5590141 - DNA, 25 bp, Homo sapien
acccatcaggcatatactaagttgt

SEQ ID NO: 5590142 - DNA, 25 bp, Homo sapien
aaacagctatttgaactaaggtaag

SEQ ID NO: 5590143 - DNA, 25 bp, Homo sapien
ctgtggactaagatcacctaggttc

SEQ ID NO: 5590144 - DNA, 25 bp, Homo sapien
aacctaagggtagttctctaagcat

SEQ ID NO: 5590145 - DNA, 25 bp, Homo sapien
tccacatgcttatcagaaacaaacc

SEQ ID NO: 5590146 - DNA, 25 bp, Homo sapien
tcatgatcaagagaactgtggacta

SEQ ID NO: 5590147 - DNA, 25 bp, Homo sapien
tggcattgccacttaaacagctatt

SEQ ID NO: 5590148 - DNA, 25 bp, Homo sapien
ctaggttcaattcagatcgtggcat

SEQ ID NO: 5590149 - DNA, 25 bp, Homo sapien
ctgaaaacaccctggacagtaagtt

SEQ ID NO: 5590150 - DNA, 25 bp, Homo sapien
cccaggtacccagatttgagacatc

SEQ ID NO: 5590151 - DNA, 25 bp, Homo sapien
aggagactggactccacttggactc

SEQ ID NO: 5590152 - DNA, 25 bp, Homo sapien
cacttggactccctggaaagctacc

SEQ ID NO: 5590153 - DNA, 25 bp, Homo sapien
gtgtcaccttgcaaaagactgagat

SEQ ID NO: 5590154 - DNA, 25 bp, Homo sapien
ccttgcaaaagactgagatgtagga

SEQ ID NO: 5590155 - DNA, 25 bp, Homo sapien
attaggtaatcagataagtgtcacc

SEQ ID NO: 5590156 - DNA, 25 bp, Homo sapien
actcagctaaggagactggactcca

SEQ ID NO: 5590157 - DNA, 25 bp, Homo sapien
taagttttgatgccagagagtgaag

SEQ ID NO: 5590158 - DNA, 25 bp, Homo sapien
ttaaaccactggggaatgatatgtt

SEQ ID NO: 5590159 - DNA, 25 bp, Homo sapien
ctccctggaaagctaccagagtttt

SEQ ID NO: 5590160 - DNA, 25 bp, Homo sapien
ctggggaatgatatgttttgatacc

SEQ ID NO: 5590161 - DNA, 25 bp, Homo sapien
ccttcgtgtgaattaggtaatcaga

SEQ ID NO: 5590162 - DNA, 25 bp, Homo sapien
ttcatagaatagaaatgagactggg

SEQ ID NO: 5590163 - DNA, 25 bp, Homo sapien
tgtgctcacaaatgctcaccgactt

SEQ ID NO: 5590164 - DNA, 25 bp, Homo sapien
ggatacagaaagtaagactgggaca

SEQ ID NO: 5590165 - DNA, 25 bp, Homo sapien
gactgggacaaaattctctactaac

SEQ ID NO: 5590166 - DNA, 25 bp, Homo sapien
ttatttcaagaaggtggctaagaga

SEQ ID NO: 5590167 - DNA, 25 bp, Homo sapien
tcaccgacttgctgatgccagtgtt

SEQ ID NO: 5590168 - DNA, 25 bp, Homo sapien
gtgtttgaaattagagaggcttact

SEQ ID NO: 5590169 - DNA, 25 bp, Homo sapien
agtgatccacggagtaaacacgatt

SEQ ID NO: 5590170 - DNA, 25 bp, Homo sapien
taagaaaattaacaaagacatacca

SEQ ID NO: 5590171 - DNA, 25 bp, Homo sapien
ttcagggaagtactaacagttcaac

SEQ ID NO: 5590172 - DNA, 25 bp, Homo sapien
aataaggcagtttagttcatctccc

SEQ ID NO: 5590173 - DNA, 25 bp, Homo sapien
cagacgctgttgttgcagattaacc

SEQ ID NO: 5590174 - DNA, 25 bp, Homo sapien
acctcgccgtccctgtcaggtctga

SEQ ID NO: 5590175 - DNA, 25 bp, Homo sapien
aaaggacagtgtaacataaacttgt

SEQ ID NO: 5590176 - DNA, 25 bp, Homo sapien
catcaagacgttaaaggacagtgta

SEQ ID NO: 5590177 - DNA, 25 bp, Homo sapien
cctccggcacccttcctagtacctg

SEQ ID NO: 5590178 - DNA, 25 bp, Homo sapien
gggagggtgcactgaattcctcttt

SEQ ID NO: 5590179 - DNA, 25 bp, Homo sapien
ctgccacgctgcgacggtcaatttt

SEQ ID NO: 5590180 - DNA, 25 bp, Homo sapien
gtgatcacacctgaaccctcagttc

SEQ ID NO: 5590181 - DNA, 25 bp, Homo sapien
ctacgtaaataacgcgcccagaagg

SEQ ID NO: 5590182 - DNA, 25 bp, Homo sapien
gcactaagtcataaacagacgctgt

SEQ ID NO: 5590183 - DNA, 25 bp, Homo sapien
tagtaatttgatgggacctcgccgt

SEQ ID NO: 5590184 - DNA, 25 bp, Homo sapien
tccctgcatggaactgtcctgttta

SEQ ID NO: 5590185 - DNA, 25 bp, Homo sapien
gcatggtcatggaaactaggtcctg

SEQ ID NO: 5590186 - DNA, 25 bp, Homo sapien
gatcacatggacaatgagaaaaggg

SEQ ID NO: 5590187 - DNA, 25 bp, Homo sapien
aagggctgaaacttaacttggagaa

SEQ ID NO: 5590188 - DNA, 25 bp, Homo sapien
taacatttaagaagtgggcaaagga

SEQ ID NO: 5590189 - DNA, 25 bp, Homo sapien
tccttgggaatgattgccctatcct

SEQ ID NO: 5590190 - DNA, 25 bp, Homo sapien
ttgggaatggagcttccaacaaaat

SEQ ID NO: 5590191 - DNA, 25 bp, Homo sapien
gtggcagtggataagactacataaa

SEQ ID NO: 5590192 - DNA, 25 bp, Homo sapien
tggaaactaggtcctggataggtgt

SEQ ID NO: 5590193 - DNA, 25 bp, Homo sapien
aagtgttaagctttgggaatggagc

SEQ ID NO: 5590194 - DNA, 25 bp, Homo sapien
ggataggtgttagcagccatcgttc

SEQ ID NO: 5590195 - DNA, 25 bp, Homo sapien
taattacatgagggagcccacaaga

SEQ ID NO: 5590196 - DNA, 25 bp, Homo sapien
gaggaaggagtagctccagatctca

SEQ ID NO: 5590197 - DNA, 25 bp, Homo sapien
gtcgaatccaagattgggactagct

SEQ ID NO: 5590198 - DNA, 25 bp, Homo sapien
aaaatcaccgtgaccagggaaatgt

SEQ ID NO: 5590199 - DNA, 25 bp, Homo sapien
aggctcaaacagtgccctcgggatc

SEQ ID NO: 5590200 - DNA, 25 bp, Homo sapien
aaggcagtaaatggcccatgtccca

SEQ ID NO: 5590201 - DNA, 25 bp, Homo sapien
tgagggaatacctggctggaaatta

SEQ ID NO: 5590202 - DNA, 25 bp, Homo sapien
ccagagaaagtgggattcagttgta

SEQ ID NO: 5590203 - DNA, 25 bp, Homo sapien
ggcatagaagttggaatgttcagga

SEQ ID NO: 5590204 - DNA, 25 bp, Homo sapien
gctggaagatgtatgggatcctatt

SEQ ID NO: 5590205 - DNA, 25 bp, Homo sapien
tcctctcaaagcacagggcagagtg

SEQ ID NO: 5590206 - DNA, 25 bp, Homo sapien
tccaagtctaagaaggacatctctc

SEQ ID NO: 5590207 - DNA, 25 bp, Homo sapien
ttcccaggccaatgtgtcagttgac

SEQ ID NO: 5590208 - DNA, 25 bp, Homo sapien
tatgtttgtacaagaaagcattcca

SEQ ID NO: 5590209 - DNA, 25 bp, Homo sapien
tcagttgactggagagtccaggaga

SEQ ID NO: 5590210 - DNA, 25 bp, Homo sapien
ctcaagaaaggatggcatccacctc

SEQ ID NO: 5590211 - DNA, 25 bp, Homo sapien
caaaatgtactagaaacgaaaagaa

SEQ ID NO: 5590212 - DNA, 25 bp, Homo sapien
agaagtaacccaaccgtcagttgac

SEQ ID NO: 5590213 - DNA, 25 bp, Homo sapien
ttactagtaaccagctgttgattcc

SEQ ID NO: 5590214 - DNA, 25 bp, Homo sapien
attgcaactcccacagggtaggatt

SEQ ID NO: 5590215 - DNA, 25 bp, Homo sapien
tctggctttggggcactaccaggta

SEQ ID NO: 5590216 - DNA, 25 bp, Homo sapien
gcagtggaaatacgattgtcaggtt

SEQ ID NO: 5590217 - DNA, 25 bp, Homo sapien
ctcgttctctgagcacgtggagttg

SEQ ID NO: 5590218 - DNA, 25 bp, Homo sapien
gctacacagctccttgcagtcgggg

SEQ ID NO: 5590219 - DNA, 25 bp, Homo sapien
ggcagctacacagctccttgcagtc

SEQ ID NO: 5590220 - DNA, 25 bp, Homo sapien
cacctcgttctctgagcacgtggag

SEQ ID NO: 5590221 - DNA, 25 bp, Homo sapien
acaagtacactggcctgtcacgtcc

SEQ ID NO: 5590222 - DNA, 25 bp, Homo sapien
actggcctgtcacgtcctcgcactg

SEQ ID NO: 5590223 - DNA, 25 bp, Homo sapien
cacgtcctcgcactgcccgtgtggg

SEQ ID NO: 5590224 - DNA, 25 bp, Homo sapien
gcgtgacaagtacactggcctgtca

SEQ ID NO: 5590225 - DNA, 25 bp, Homo sapien
ccaggcctcacgcacacctcgttct

SEQ ID NO: 5590226 - DNA, 25 bp, Homo sapien
aagtacactggcctgtcacgtcctc

SEQ ID NO: 5590227 - DNA, 25 bp, Homo sapien
ggcctgtcacgtcctcgcactgccc

SEQ ID NO: 5590228 - DNA, 25 bp, Homo sapien
ccgcggcctcgcgtccctggcccag

SEQ ID NO: 5590229 - DNA, 25 bp, Homo sapien
ctgggccagggacgcgaggccgcgg

SEQ ID NO: 5590230 - DNA, 25 bp, Homo sapien
ggttgtgacatcaccctccccggcc

SEQ ID NO: 5590231 - DNA, 25 bp, Homo sapien
ctgaaggagctgcgttatatggttg

SEQ ID NO: 5590232 - DNA, 25 bp, Homo sapien
cgtcaggtctcagttcttgcgggtg

SEQ ID NO: 5590233 - DNA, 25 bp, Homo sapien
gctgacatatattaaggaagacctc

SEQ ID NO: 5590234 - DNA, 25 bp, Homo sapien
aggaagacctccggatgcttttgcc

SEQ ID NO: 5590235 - DNA, 25 bp, Homo sapien
ccaaacgcagcgctcactctgactc

SEQ ID NO: 5590236 - DNA, 25 bp, Homo sapien
agtctaaaattcaaggtgttccagg

SEQ ID NO: 5590237 - DNA, 25 bp, Homo sapien
tccgtcttggcaccagtcttgctgc

SEQ ID NO: 5590238 - DNA, 25 bp, Homo sapien
agggtcaggctccttccaaggtctc

SEQ ID NO: 5590239 - DNA, 25 bp, Homo sapien
tggtggtacaacttcagtctctgcc

SEQ ID NO: 5590240 - DNA, 25 bp, Homo sapien
aattttgagggtcagaagtctaaaa

SEQ ID NO: 5590241 - DNA, 25 bp, Homo sapien
agctaatctgaccgtacaatggaat

SEQ ID NO: 5590242 - DNA, 25 bp, Homo sapien
atgagatcgtctatgcacagtccac

SEQ ID NO: 5590243 - DNA, 25 bp, Homo sapien
aggaccgacctctgtggaaaggtat

SEQ ID NO: 5590244 - DNA, 25 bp, Homo sapien
tcaaatggtcttgaagaggaccgac

SEQ ID NO: 5590245 - DNA, 25 bp, Homo sapien
gagagaaggaaactctttgagcatt

SEQ ID NO: 5590246 - DNA, 25 bp, Homo sapien
gtacaatggaataaatgagatcgtc

SEQ ID NO: 5590247 - DNA, 25 bp, Homo sapien
ccacactgcggcactcccccaatct

SEQ ID NO: 5590248 - DNA, 25 bp, Homo sapien
ctgagttctgctgtcagggagacat

SEQ ID NO: 5590249 - DNA, 25 bp, Homo sapien
agacatgggttcgaatcctgcccct

SEQ ID NO: 5590250 - DNA, 25 bp, Homo sapien
cactgcacaatgcctgccagtattc

SEQ ID NO: 5590251 - DNA, 25 bp, Homo sapien
tatgtgtaacagagataacagttct

SEQ ID NO: 5590252 - DNA, 25 bp, Homo sapien
tctagggattcagatgctacgtcac

SEQ ID NO: 5590253 - DNA, 25 bp, Homo sapien
cagcagccactccatggatgatgat

SEQ ID NO: 5590254 - DNA, 25 bp, Homo sapien
gtggacgtggacgattcttccagac

SEQ ID NO: 5590255 - DNA, 25 bp, Homo sapien
atgatgatgactgcttctccgcggg

SEQ ID NO: 5590256 - DNA, 25 bp, Homo sapien
ctgatatgccagcgtgactcctttg

SEQ ID NO: 5590257 - DNA, 25 bp, Homo sapien
gctacgtcactgctgaaccctggtc

SEQ ID NO: 5590258 - DNA, 25 bp, Homo sapien
ggccccctgcatgctggttgacttg

SEQ ID NO: 5590259 - DNA, 25 bp, Homo sapien
tcttcatcagatgggtctagggatt

SEQ ID NO: 5590260 - DNA, 25 bp, Homo sapien
gaaaagcatgtggagtccttgtctt

SEQ ID NO: 5590261 - DNA, 25 bp, Homo sapien
gagggcaatgactgctcctctgggg

SEQ ID NO: 5590262 - DNA, 25 bp, Homo sapien
actcctttgggctcgaagatgcctc

SEQ ID NO: 5590263 - DNA, 25 bp, Homo sapien
tgtcactgaggacttttcaaccacc

SEQ ID NO: 5590264 - DNA, 25 bp, Homo sapien
tggccggacacttctctctgttctc

SEQ ID NO: 5590265 - DNA, 25 bp, Homo sapien
cagtgggatctatggcattaaaacc

SEQ ID NO: 5590266 - DNA, 25 bp, Homo sapien
tccaggaaggatatctgctcttact

SEQ ID NO: 5590267 - DNA, 25 bp, Homo sapien
attaagcacaataacatgacctcta

SEQ ID NO: 5590268 - DNA, 25 bp, Homo sapien
gaattctgaattttccagtgggatc

SEQ ID NO: 5590269 - DNA, 25 bp, Homo sapien
ctccccagtggtatagttaataatg

SEQ ID NO: 5590270 - DNA, 25 bp, Homo sapien
tgtccaaatttggtgactggtcaca

SEQ ID NO: 5590271 - DNA, 25 bp, Homo sapien
tcagtagagaatagaaccccctcac

SEQ ID NO: 5590272 - DNA, 25 bp, Homo sapien
cctctaaaatgtcaagttctgctgc

SEQ ID NO: 5590273 - DNA, 25 bp, Homo sapien
ctggtcacagatcacttggtgtcca

SEQ ID NO: 5590274 - DNA, 25 bp, Homo sapien
gacattacaggggagacactctata

SEQ ID NO: 5590275 - DNA, 25 bp, Homo sapien
tctgtgaataagcaatccagcctgg

SEQ ID NO: 5590276 - DNA, 25 bp, Homo sapien
agataatgagtatggttagggttgt

SEQ ID NO: 5590277 - DNA, 25 bp, Homo sapien
tcccaagtttgtggaaacagtgtac

SEQ ID NO: 5590278 - DNA, 25 bp, Homo sapien
gcttctcaggggattgaagcaagag

SEQ ID NO: 5590279 - DNA, 25 bp, Homo sapien
tgtttagtgatttccacgcccccca

SEQ ID NO: 5590280 - DNA, 25 bp, Homo sapien
actgtaactgcatctgtgaataagc

SEQ ID NO: 5590281 - DNA, 25 bp, Homo sapien
aactaaagaagatcaatcaggggtg

SEQ ID NO: 5590282 - DNA, 25 bp, Homo sapien
tcacgtttattaaggagtccatgac

SEQ ID NO: 5590283 - DNA, 25 bp, Homo sapien
gaggctatagggcactgtaactgca

SEQ ID NO: 5590284 - DNA, 25 bp, Homo sapien
ggggagacactctataaaaagtatg

SEQ ID NO: 5590285 - DNA, 25 bp, Homo sapien
caggccatcccaccaatcagcaggc

SEQ ID NO: 5590286 - DNA, 25 bp, Homo sapien
aaaaacaggccatcccaccaatcag

SEQ ID NO: 5590287 - DNA, 25 bp, Homo sapien
ctcgctccgcccctcagccgcattg

SEQ ID NO: 5590288 - DNA, 25 bp, Homo sapien
cgagcaagcagggacaaactgcttg

SEQ ID NO: 5590289 - DNA, 25 bp, Homo sapien
tgcttgtttataggtcggcttaaaa

SEQ ID NO: 5590290 - DNA, 25 bp, Homo sapien
gccaggcatcaaaatgagacagcat

SEQ ID NO: 5590291 - DNA, 25 bp, Homo sapien
gcatgcccagcgcctcgactgctga

SEQ ID NO: 5590292 - DNA, 25 bp, Homo sapien
gcccagcgcctcgactgctgagtgc

SEQ ID NO: 5590293 - DNA, 25 bp, Homo sapien
ccagccagcatcctgcagtgcctgg

SEQ ID NO: 5590294 - DNA, 25 bp, Homo sapien
gcccctcagccgcattgggccgagg

SEQ ID NO: 5590295 - DNA, 25 bp, Homo sapien
gagacagcattaaaccgagtgacat

SEQ ID NO: 5590296 - DNA, 25 bp, Homo sapien
caaacaaaacttagtgatggacttt

SEQ ID NO: 5590297 - DNA, 25 bp, Homo sapien
tcaaagactgggttccccgtgttca

SEQ ID NO: 5590298 - DNA, 25 bp, Homo sapien
gacagtgcacgctgctccacactgc

SEQ ID NO: 5590299 - DNA, 25 bp, Homo sapien
gcttgagaatctgggctcctgtgca

SEQ ID NO: 5590300 - DNA, 25 bp, Homo sapien
gaaggcatggacaccagataagatt

SEQ ID NO: 5590301 - DNA, 25 bp, Homo sapien
cactatggagactcagacagtgcac

SEQ ID NO: 5590302 - DNA, 25 bp, Homo sapien
tactacatcatgtggcaagggttgc

SEQ ID NO: 5590303 - DNA, 25 bp, Homo sapien
ttgataattgggcaagccagggaaa

SEQ ID NO: 5590304 - DNA, 25 bp, Homo sapien
agtgatggacttttaggaggactct

SEQ ID NO: 5590305 - DNA, 25 bp, Homo sapien
aggaggactcttttgtaaaaccatc

SEQ ID NO: 5590306 - DNA, 25 bp, Homo sapien
attctgcaactggggcttgagaatc

SEQ ID NO: 5590307 - DNA, 25 bp, Homo sapien
catcaaaatggcagaaaacatactt

SEQ ID NO: 5590308 - DNA, 25 bp, Homo sapien
ctaccaagaggttattagtgtgtcc

SEQ ID NO: 5590309 - DNA, 25 bp, Homo sapien
actacaggaagaacttacaagaaaa

SEQ ID NO: 5590310 - DNA, 25 bp, Homo sapien
tgatcataacgaccactggagttgc

SEQ ID NO: 5590311 - DNA, 25 bp, Homo sapien
acaatactaatgggaacagaaatga

SEQ ID NO: 5590312 - DNA, 25 bp, Homo sapien
ctttcggcaatgacacctcactttc

SEQ ID NO: 5590313 - DNA, 25 bp, Homo sapien
ccatcctgggttgtaattctgcttc

SEQ ID NO: 5590314 - DNA, 25 bp, Homo sapien
aagcagccctgcatcctatcgattc

SEQ ID NO: 5590315 - DNA, 25 bp, Homo sapien
caaaaggttgttccatcctgggttg

SEQ ID NO: 5590316 - DNA, 25 bp, Homo sapien
ttctggtacaatcaagcagccctgc

SEQ ID NO: 5590317 - DNA, 25 bp, Homo sapien
cccctgtgggcaatactaaatgatc

SEQ ID NO: 5590318 - DNA, 25 bp, Homo sapien
atccgattggtggcaattcaagacc

SEQ ID NO: 5590319 - DNA, 25 bp, Homo sapien
gtcaagtcatgcagtttctccccta

SEQ ID NO: 5590320 - DNA, 25 bp, Homo sapien
ggaatgtccagttgtcaagtcatgc

SEQ ID NO: 5590321 - DNA, 25 bp, Homo sapien
cttgagacttgatttgtgatccagc

SEQ ID NO: 5590322 - DNA, 25 bp, Homo sapien
catacaacatacaggaatgtccagt

SEQ ID NO: 5590323 - DNA, 25 bp, Homo sapien
gcgccccagaacacatggtaaatgt

SEQ ID NO: 5590324 - DNA, 25 bp, Homo sapien
tcaaaggttttatccgattggtggc

SEQ ID NO: 5590325 - DNA, 25 bp, Homo sapien
atccagcctaacatgcgccccagaa

SEQ ID NO: 5590326 - DNA, 25 bp, Homo sapien
ctgttaagacagggcctcatacaac

SEQ ID NO: 5590327 - DNA, 25 bp, Homo sapien
acacagcacatagtagaaacttaac

SEQ ID NO: 5590328 - DNA, 25 bp, Homo sapien
tgggtcatgaggtgtatgttcctta

SEQ ID NO: 5590329 - DNA, 25 bp, Homo sapien
aaacatgctgcaattagctaggagc

SEQ ID NO: 5590330 - DNA, 25 bp, Homo sapien
aaaatttgtgtaggagattgaaagc

SEQ ID NO: 5590331 - DNA, 25 bp, Homo sapien
tgatttgggcaaagaataaaatgta

SEQ ID NO: 5590332 - DNA, 25 bp, Homo sapien
agctaggagcaaatagcattcactt

SEQ ID NO: 5590333 - DNA, 25 bp, Homo sapien
agatctaatatggtgttatgaaatc

SEQ ID NO: 5590334 - DNA, 25 bp, Homo sapien
aaagaggtttacaaaagaatgaata

SEQ ID NO: 5590335 - DNA, 25 bp, Homo sapien
aataaaatggacccttagaagaata

SEQ ID NO: 5590336 - DNA, 25 bp, Homo sapien
cacttaaaacaggacataaaaaagc

SEQ ID NO: 5590337 - DNA, 25 bp, Homo sapien
ttaagatcagtcctagttagttgta

SEQ ID NO: 5590338 - DNA, 25 bp, Homo sapien
tgaagaaccttcagatcattccaga

SEQ ID NO: 5590339 - DNA, 25 bp, Homo sapien
aggagattgaaagcatagccttttc

SEQ ID NO: 5590340 - DNA, 25 bp, Homo sapien
ttaaatctgtcaagaactcctggca

SEQ ID NO: 5590341 - DNA, 25 bp, Homo sapien
gagttagattttcagctgccggctc

SEQ ID NO: 5590342 - DNA, 25 bp, Homo sapien
ttataatagtatgaaaaagagtgaa

SEQ ID NO: 5590343 - DNA, 25 bp, Homo sapien
tggagatattaccaaggatgtgctt

SEQ ID NO: 5590344 - DNA, 25 bp, Homo sapien
aaaaagtcattgcaattggagatat

SEQ ID NO: 5590345 - DNA, 25 bp, Homo sapien
agttgtcctatattgccttgtcatc

SEQ ID NO: 5590346 - DNA, 25 bp, Homo sapien
tgattacatatggcaaaacaaagaa

SEQ ID NO: 5590347 - DNA, 25 bp, Homo sapien
aaaaaatcatgtgaatagttgtcct

SEQ ID NO: 5590348 - DNA, 25 bp, Homo sapien
taccaaggatgtgcttactataaag

SEQ ID NO: 5590349 - DNA, 25 bp, Homo sapien
acatagaagaaatttgctgattttt

SEQ ID NO: 5590350 - DNA, 25 bp, Homo sapien
aataaaatacaaccagcattcattc

SEQ ID NO: 5590351 - DNA, 25 bp, Homo sapien
aggaataggagttggcatgcctaat

SEQ ID NO: 5590352 - DNA, 25 bp, Homo sapien
tagagaaaattaacattcctggcac

SEQ ID NO: 5590353 - DNA, 25 bp, Homo sapien
ttacagattaatgaggttcaaccca

SEQ ID NO: 5590354 - DNA, 25 bp, Homo sapien
ttggcttgggcaaatggttatcatt

SEQ ID NO: 5590355 - DNA, 25 bp, Homo sapien
gcgccaaagtctaagtgtgaatgcc

SEQ ID NO: 5590356 - DNA, 25 bp, Homo sapien
accactgttgcgactatggcattcc

SEQ ID NO: 5590357 - DNA, 25 bp, Homo sapien
aggtaaccaatcaagccagagtgtt

SEQ ID NO: 5590358 - DNA, 25 bp, Homo sapien
aataagatcaatttccaggtccacc

SEQ ID NO: 5590359 - DNA, 25 bp, Homo sapien
taatgaacaccaagctagtgggagg

SEQ ID NO: 5590360 - DNA, 25 bp, Homo sapien
ccagagtgttagaaaaggaatagga

SEQ ID NO: 5590361 - DNA, 25 bp, Homo sapien
tccaagatacacagagtagagaaaa

SEQ ID NO: 5590362 - DNA, 25 bp, Homo sapien
tgtgatttgggtatataaggcattt

SEQ ID NO: 5590363 - DNA, 25 bp, Homo sapien
cgggtcaggcctacagtattgtcca

SEQ ID NO: 5590364 - DNA, 25 bp, Homo sapien
caaaagtactgcttggagctgtgat

SEQ ID NO: 5590365 - DNA, 25 bp, Homo sapien
tgaccacaggaggtcagagtttgtc

SEQ ID NO: 5590366 - DNA, 25 bp, Homo sapien
gggggagccattctggtatcacctg

SEQ ID NO: 5590367 - DNA, 25 bp, Homo sapien
ttagggtgtcgattctaggttagac

SEQ ID NO: 5590368 - DNA, 25 bp, Homo sapien
tagcagtcagcttcctgggtgacca

SEQ ID NO: 5590369 - DNA, 25 bp, Homo sapien
atgtccttgggtaacgaatctgtgg

SEQ ID NO: 5590370 - DNA, 25 bp, Homo sapien
cctcatccaaggcctagcagtcagc

SEQ ID NO: 5590371 - DNA, 25 bp, Homo sapien
gccagcattcgaccagtgtacccat

SEQ ID NO: 5590372 - DNA, 25 bp, Homo sapien
gtcagagtttgtctaagcgggtcag

SEQ ID NO: 5590373 - DNA, 25 bp, Homo sapien
ctggctaacccttgaaagtctctta

SEQ ID NO: 5590374 - DNA, 25 bp, Homo sapien
tacaaggggaccacacatacagtca

SEQ ID NO: 5590375 - DNA, 25 bp, Homo sapien
tcacatggttcaagctcaattattc

SEQ ID NO: 5590376 - DNA, 25 bp, Homo sapien
ataaactgcagtaactgagagaggc

SEQ ID NO: 5590377 - DNA, 25 bp, Homo sapien
gtgaagcaagctcttttcctgaccg

SEQ ID NO: 5590378 - DNA, 25 bp, Homo sapien
aacacaggtagcaaagataatccac

SEQ ID NO: 5590379 - DNA, 25 bp, Homo sapien
tcagaggcctggatttcattatgta

SEQ ID NO: 5590380 - DNA, 25 bp, Homo sapien
tcctgaccgagagaatgtcagtcac

SEQ ID NO: 5590381 - DNA, 25 bp, Homo sapien
ttcctttcctagagacaccgtcatc

SEQ ID NO: 5590382 - DNA, 25 bp, Homo sapien
agaaataatctccgaatgctacacc

SEQ ID NO: 5590383 - DNA, 25 bp, Homo sapien
tctgtctccaaagtacaaggggacc

SEQ ID NO: 5590384 - DNA, 25 bp, Homo sapien
cacgacaagtgttcaaaagagaacc

SEQ ID NO: 5590385 - DNA, 25 bp, Homo sapien
gctgcagcacgacaagtgttcaaaa

SEQ ID NO: 5590386 - DNA, 25 bp, Homo sapien
gcttgcctgctacatcccatggaga

SEQ ID NO: 5590387 - DNA, 25 bp, Homo sapien
ccgcggctgtgactcccgcgggtga

SEQ ID NO: 5590388 - DNA, 25 bp, Homo sapien
aagatgctcttgctgcagcacgaca

SEQ ID NO: 5590389 - DNA, 25 bp, Homo sapien
tgtcctaagcatgcttgcctgctac

SEQ ID NO: 5590390 - DNA, 25 bp, Homo sapien
ttcaaggcaattgtctcaggcatcc

SEQ ID NO: 5590391 - DNA, 25 bp, Homo sapien
aatagaagcattgcgtattaactgc

SEQ ID NO: 5590392 - DNA, 25 bp, Homo sapien
agaaaataaacagtgaaacactttc

SEQ ID NO: 5590393 - DNA, 25 bp, Homo sapien
ttaggcccgcatttacctgagtaaa

SEQ ID NO: 5590394 - DNA, 25 bp, Homo sapien
attggttaaccaacattggaaccca

SEQ ID NO: 5590395 - DNA, 25 bp, Homo sapien
tgccttcagccgagttggaaccggc

SEQ ID NO: 5590396 - DNA, 25 bp, Homo sapien
gcaacgagtccccaccctgtggtgg

SEQ ID NO: 5590397 - DNA, 25 bp, Homo sapien
agcagtgaccacgtcgtacaggtat

SEQ ID NO: 5590398 - DNA, 25 bp, Homo sapien
ggcagccgtcagaatggcctgcctt

SEQ ID NO: 5590399 - DNA, 25 bp, Homo sapien
agtccccaccctgtggtgggaggac

SEQ ID NO: 5590400 - DNA, 25 bp, Homo sapien
ggcgccttcgctgctccatgcccgg

SEQ ID NO: 5590401 - DNA, 25 bp, Homo sapien
gtctacgtgctgcccatcggcgacg

SEQ ID NO: 5590402 - DNA, 25 bp, Homo sapien
gactcagtgctcgagcacccccgtg

SEQ ID NO: 5590403 - DNA, 25 bp, Homo sapien
gccgtcagaatggcctgccttcagc

SEQ ID NO: 5590404 - DNA, 25 bp, Homo sapien
agaatggcctgccttcagccgagtt

SEQ ID NO: 5590405 - DNA, 25 bp, Homo sapien
cgctgctccatgcccggactcagtg

SEQ ID NO: 5590406 - DNA, 25 bp, Homo sapien
taacagccataagacaggacagctt

SEQ ID NO: 5590407 - DNA, 25 bp, Homo sapien
tcaactggtattcaagcaaggcctt

SEQ ID NO: 5590408 - DNA, 25 bp, Homo sapien
actgtaggaccgatccgtgaaatac

SEQ ID NO: 5590409 - DNA, 25 bp, Homo sapien
tctggcccattggaggacctcaata

SEQ ID NO: 5590410 - DNA, 25 bp, Homo sapien
agtgaatgaatggactcaactggga

SEQ ID NO: 5590411 - DNA, 25 bp, Homo sapien
aaagacctgttgagtgaatgagtga

SEQ ID NO: 5590412 - DNA, 25 bp, Homo sapien
gcacctagaacagcatctggcccat

SEQ ID NO: 5590413 - DNA, 25 bp, Homo sapien
ggcaccagggatgtcaacatgataa

SEQ ID NO: 5590414 - DNA, 25 bp, Homo sapien
aggagtagagtgcattcaccccatt

SEQ ID NO: 5590415 - DNA, 25 bp, Homo sapien
gggaggacagcaagttcacatgtca

SEQ ID NO: 5590416 - DNA, 25 bp, Homo sapien
gctgatggacgaaataaaagctacc

SEQ ID NO: 5590417 - DNA, 25 bp, Homo sapien
gggaaaagcaggctcaccttgtctc

SEQ ID NO: 5590418 - DNA, 25 bp, Homo sapien
ttcacaatattatgatggcgggggg

SEQ ID NO: 5590419 - DNA, 25 bp, Homo sapien
aggagcctactgtacattctcattg

SEQ ID NO: 5590420 - DNA, 25 bp, Homo sapien
ggctctgtgatctatgtacacatgt

SEQ ID NO: 5590421 - DNA, 25 bp, Homo sapien
cctgtcacccttataggagcctact

SEQ ID NO: 5590422 - DNA, 25 bp, Homo sapien
aaacacagaaacccttgagactttc

SEQ ID NO: 5590423 - DNA, 25 bp, Homo sapien
cattctcattgtgaaccaatctctc

SEQ ID NO: 5590424 - DNA, 25 bp, Homo sapien
cattctgcatataatcctgtcaccc

SEQ ID NO: 5590425 - DNA, 25 bp, Homo sapien
gcaggctcaccttgtctcttcccac

SEQ ID NO: 5590426 - DNA, 25 bp, Homo sapien
cgggacaaatattccttcttagcac

SEQ ID NO: 5590427 - DNA, 25 bp, Homo sapien
ttcccagtattgggaaaagcaggct

SEQ ID NO: 5590428 - DNA, 25 bp, Homo sapien
tctctactatgagcaatgaaaaatt

SEQ ID NO: 5590429 - DNA, 25 bp, Homo sapien
ctgatatgcagactacaactcattt

SEQ ID NO: 5590430 - DNA, 25 bp, Homo sapien
aatttacctgtcctccctatactat

SEQ ID NO: 5590431 - DNA, 25 bp, Homo sapien
ttcttgtttgtgtttgcttggttta

SEQ ID NO: 5590432 - DNA, 25 bp, Homo sapien
taataatggaacataagtcactttc

SEQ ID NO: 5590433 - DNA, 25 bp, Homo sapien
tcataattagcagtctgaatttttc

SEQ ID NO: 5590434 - DNA, 25 bp, Homo sapien
tagtgtttgctgacatttttgcctt

SEQ ID NO: 5590435 - DNA, 25 bp, Homo sapien
cttataacatgaaattagtgtttgc

SEQ ID NO: 5590436 - DNA, 25 bp, Homo sapien
ttaatatgacaggtacatttgttcc

SEQ ID NO: 5590437 - DNA, 25 bp, Homo sapien
ttgtgatttgtttggttgtgcatac

SEQ ID NO: 5590438 - DNA, 25 bp, Homo sapien
atgagcaatgaaaaattagtaattt

SEQ ID NO: 5590439 - DNA, 25 bp, Homo sapien
gcaatatagtcttccaccccctccc

SEQ ID NO: 5590440 - DNA, 25 bp, Homo sapien
aagatatgttaccccaaaattatac

SEQ ID NO: 5590441 - DNA, 25 bp, Homo sapien
tcagactgaaactcaggccagtcac

SEQ ID NO: 5590442 - DNA, 25 bp, Homo sapien
taaatgtaattatcagctgctgaat

SEQ ID NO: 5590443 - DNA, 25 bp, Homo sapien
cattttgttggcaatatagtcttcc

SEQ ID NO: 5590444 - DNA, 25 bp, Homo sapien
ctcaggccagtcacatcaacatttc

SEQ ID NO: 5590445 - DNA, 25 bp, Homo sapien
ctgctgactccttagtggatgaaac

SEQ ID NO: 5590446 - DNA, 25 bp, Homo sapien
attgtttgacatgtttagggggtaa

SEQ ID NO: 5590447 - DNA, 25 bp, Homo sapien
ccttagtggatgaaacagaagtttc

SEQ ID NO: 5590448 - DNA, 25 bp, Homo sapien
tagcacccaaagttttcagactgaa

SEQ ID NO: 5590449 - DNA, 25 bp, Homo sapien
atatgtttaaacgtacaatgctttc

SEQ ID NO: 5590450 - DNA, 25 bp, Homo sapien
tagattttagaatagtgccttgtat

SEQ ID NO: 5590451 - DNA, 25 bp, Homo sapien
atcaaattacgacttcctggaggac

SEQ ID NO: 5590452 - DNA, 25 bp, Homo sapien
agtcaaagtttgctgaatgagtgat

SEQ ID NO: 5590453 - DNA, 25 bp, Homo sapien
tcctagagacctttctccaacaacc

SEQ ID NO: 5590454 - DNA, 25 bp, Homo sapien
ttctaagatgcttctaggaatttaa

SEQ ID NO: 5590455 - DNA, 25 bp, Homo sapien
tcaaggtgaccttaaaattgtatcc

SEQ ID NO: 5590456 - DNA, 25 bp, Homo sapien
gtatccttggctatgtttctttgtc

SEQ ID NO: 5590457 - DNA, 25 bp, Homo sapien
taggggtacattgctcatccaggaa

SEQ ID NO: 5590458 - DNA, 25 bp, Homo sapien
tacgacttcctggaggactgtaggg

SEQ ID NO: 5590459 - DNA, 25 bp, Homo sapien
gtgccttgtataatcgacatcagtc

SEQ ID NO: 5590460 - DNA, 25 bp, Homo sapien
gactgtaggggtacattgctcatcc

SEQ ID NO: 5590461 - DNA, 25 bp, Homo sapien
taaacacctacctcatgcaccactc

SEQ ID NO: 5590462 - DNA, 25 bp, Homo sapien
atagaaatgaagaaatagcatcaag

SEQ ID NO: 5590463 - DNA, 25 bp, Homo sapien
atgtgaatacaatagaaatgaagaa

SEQ ID NO: 5590464 - DNA, 25 bp, Homo sapien
gatgccgtgacaactgatcacatgc

SEQ ID NO: 5590465 - DNA, 25 bp, Homo sapien
agaaaaggtcataaataatgcccac

SEQ ID NO: 5590466 - DNA, 25 bp, Homo sapien
atagcatcaagtaacttgagagttg

SEQ ID NO: 5590467 - DNA, 25 bp, Homo sapien
gggcgctgtggcttaagcctgtaat

SEQ ID NO: 5590468 - DNA, 25 bp, Homo sapien
atctttgatgccgtgacaactgatc

SEQ ID NO: 5590469 - DNA, 25 bp, Homo sapien
gagttcaagactaccctgaccaaca

SEQ ID NO: 5590470 - DNA, 25 bp, Homo sapien
acttgagagttgaatcacagcaata

SEQ ID NO: 5590471 - DNA, 25 bp, Homo sapien
actcttccaaagaaaaggtcataaa

SEQ ID NO: 5590472 - DNA, 25 bp, Homo sapien
agtggggtagactgctagctactaa

SEQ ID NO: 5590473 - DNA, 25 bp, Homo sapien
gagaacatttgcagaaaagaattcc

SEQ ID NO: 5590474 - DNA, 25 bp, Homo sapien
gacagactgaagaaggtatactatt

SEQ ID NO: 5590475 - DNA, 25 bp, Homo sapien
gtgaagcatataatctagtggggta

SEQ ID NO: 5590476 - DNA, 25 bp, Homo sapien
agttctgctgtcacccaagccgctc

SEQ ID NO: 5590477 - DNA, 25 bp, Homo sapien
tctacgtaagcatgtaagactacaa

SEQ ID NO: 5590478 - DNA, 25 bp, Homo sapien
gtatgcccatcacaaaccaggcagc

SEQ ID NO: 5590479 - DNA, 25 bp, Homo sapien
tcaatccagtgaagtcttgagggtc

SEQ ID NO: 5590480 - DNA, 25 bp, Homo sapien
gaggaagtctggtattatggaaaaa

SEQ ID NO: 5590481 - DNA, 25 bp, Homo sapien
aacatagtctgacttgagagtgggg

SEQ ID NO: 5590482 - DNA, 25 bp, Homo sapien
caagcaaggtattgggtgctactca

SEQ ID NO: 5590483 - DNA, 25 bp, Homo sapien
ccgccgcggtcttagtccgacttcc

SEQ ID NO: 5590484 - DNA, 25 bp, Homo sapien
agggccacgctgagatttcggcctg

SEQ ID NO: 5590485 - DNA, 25 bp, Homo sapien
gggagtgtgcacttccattctgtcc

SEQ ID NO: 5590486 - DNA, 25 bp, Homo sapien
ggggtgagagtttccacctggagca

SEQ ID NO: 5590487 - DNA, 25 bp, Homo sapien
cacccggggcaccctttctggatgg

SEQ ID NO: 5590488 - DNA, 25 bp, Homo sapien
cctaggaaaactcaaagccctggcc

SEQ ID NO: 5590489 - DNA, 25 bp, Homo sapien
agtttccacctggagcagatgagca

SEQ ID NO: 5590490 - DNA, 25 bp, Homo sapien
ttgcagaccctcccgctcctaggaa

SEQ ID NO: 5590491 - DNA, 25 bp, Homo sapien
gctaactcccctgacccgggcttga

SEQ ID NO: 5590492 - DNA, 25 bp, Homo sapien
ttcaggtgtctccttgctaactccc

SEQ ID NO: 5590493 - DNA, 25 bp, Homo sapien
aggccaaggacgctcgttttccagg

SEQ ID NO: 5590494 - DNA, 25 bp, Homo sapien
ttgaccgaaacgactagtttatgta

SEQ ID NO: 5590495 - DNA, 25 bp, Homo sapien
tggtttggttagacatcgtgtaagt

SEQ ID NO: 5590496 - DNA, 25 bp, Homo sapien
taattaagattactgcccaacttta

SEQ ID NO: 5590497 - DNA, 25 bp, Homo sapien
atcgtgtaagtaaaatgacagactg

SEQ ID NO: 5590498 - DNA, 25 bp, Homo sapien
ggaatattaatggtactcaggggtc

SEQ ID NO: 5590499 - DNA, 25 bp, Homo sapien
ttgtgagatttcataatggctgctc

SEQ ID NO: 5590500 - DNA, 25 bp, Homo sapien
atgtaaagttatggtttggttagac

SEQ ID NO: 5590501 - DNA, 25 bp, Homo sapien
tattcaacatttagggcaggttcta

SEQ ID NO: 5590502 - DNA, 25 bp, Homo sapien
tcttgctaggaagatattcaacatt

SEQ ID NO: 5590503 - DNA, 25 bp, Homo sapien
tagggcaggttctagttgtaaaaca

SEQ ID NO: 5590504 - DNA, 25 bp, Homo sapien
tgacagactgtttcttgctaggaag

SEQ ID NO: 5590505 - DNA, 25 bp, Homo sapien
tctgagttaagactataggttgtat

SEQ ID NO: 5590506 - DNA, 25 bp, Homo sapien
taagtaccagaacaatgcaagtatt

SEQ ID NO: 5590507 - DNA, 25 bp, Homo sapien
ttttcagtgtgaagagacaaaacag

SEQ ID NO: 5590508 - DNA, 25 bp, Homo sapien
ctgaattgtctgtcataatgagaac

SEQ ID NO: 5590509 - DNA, 25 bp, Homo sapien
aattacccaaccacaaagaaatagc

SEQ ID NO: 5590510 - DNA, 25 bp, Homo sapien
atgtaaatgtgcttcagaatgctac

SEQ ID NO: 5590511 - DNA, 25 bp, Homo sapien
aaccataatagagttgtaaaaacaa

SEQ ID NO: 5590512 - DNA, 25 bp, Homo sapien
taaccaaagcttaatgtaaatgtgc

SEQ ID NO: 5590513 - DNA, 25 bp, Homo sapien
gacaaaacagtagtaagtatgtaaa

SEQ ID NO: 5590514 - DNA, 25 bp, Homo sapien
ttggaaagtttatagaaggcaataa

SEQ ID NO: 5590515 - DNA, 25 bp, Homo sapien
atgagaactataatagccagttaac

SEQ ID NO: 5590516 - DNA, 25 bp, Homo sapien
cttgcaatgttactaggtgctactc

SEQ ID NO: 5590517 - DNA, 25 bp, Homo sapien
tcaagaagccaatacctcagtccac

SEQ ID NO: 5590518 - DNA, 25 bp, Homo sapien
cattgacacagttgcaagagagatc

SEQ ID NO: 5590519 - DNA, 25 bp, Homo sapien
acacttgtatgaaataaggtctgtt

SEQ ID NO: 5590520 - DNA, 25 bp, Homo sapien
attcagagttaattgccttggggca

SEQ ID NO: 5590521 - DNA, 25 bp, Homo sapien
cacaaaggaaattaaacgcaaagga

SEQ ID NO: 5590522 - DNA, 25 bp, Homo sapien
gcaagagagatctggcaacaactta

SEQ ID NO: 5590523 - DNA, 25 bp, Homo sapien
taaaatgcagccactggttaccagt

SEQ ID NO: 5590524 - DNA, 25 bp, Homo sapien
tccacagcaaggaataaaatgcagc

SEQ ID NO: 5590525 - DNA, 25 bp, Homo sapien
aaaatcaggataatcaagatacacc

SEQ ID NO: 5590526 - DNA, 25 bp, Homo sapien
attcaattgaaatgatgatgccatc

SEQ ID NO: 5590527 - DNA, 25 bp, Homo sapien
caccagtcaagagctgtcaaaggga

SEQ ID NO: 5590528 - DNA, 25 bp, Homo sapien
gtcaaagggagtctcctcagaaatc

SEQ ID NO: 5590529 - DNA, 25 bp, Homo sapien
atactgcttgaagggcaccagtcaa

SEQ ID NO: 5590530 - DNA, 25 bp, Homo sapien
ctcatcagaacagcttggtgccagt

SEQ ID NO: 5590531 - DNA, 25 bp, Homo sapien
gacgacgctttacagggccttgctt

SEQ ID NO: 5590532 - DNA, 25 bp, Homo sapien
catacctattaagtgtagggaaggg

SEQ ID NO: 5590533 - DNA, 25 bp, Homo sapien
aaaaggtagtgcagcagtgctgttt

SEQ ID NO: 5590534 - DNA, 25 bp, Homo sapien
ctgtttccgagcagcagtgaatgtg

SEQ ID NO: 5590535 - DNA, 25 bp, Homo sapien
gtcacttactgagaagcaagaacaa

SEQ ID NO: 5590536 - DNA, 25 bp, Homo sapien
gtgagcccaaaggagtctactacca

SEQ ID NO: 5590537 - DNA, 25 bp, Homo sapien
gacctccacactgttagctggctcc

SEQ ID NO: 5590538 - DNA, 25 bp, Homo sapien
gtgttcagtttggccgcagaaagtg

SEQ ID NO: 5590539 - DNA, 25 bp, Homo sapien
ttcccaggaatagggatacagggaa

SEQ ID NO: 5590540 - DNA, 25 bp, Homo sapien
tctgagcccacaggctacctgggaa

SEQ ID NO: 5590541 - DNA, 25 bp, Homo sapien
aaaaccctcaggcctagaaacagga

SEQ ID NO: 5590542 - DNA, 25 bp, Homo sapien
gcacctccctgaagctgtaagttct

SEQ ID NO: 5590543 - DNA, 25 bp, Homo sapien
aggcttcccaagcagggtgttcagt

SEQ ID NO: 5590544 - DNA, 25 bp, Homo sapien
agcagggtccagacagctaatcttt

SEQ ID NO: 5590545 - DNA, 25 bp, Homo sapien
tcacactaatgaagggaaaggtgac

SEQ ID NO: 5590546 - DNA, 25 bp, Homo sapien
atgaacacggtgccagctatgatag

SEQ ID NO: 5590547 - DNA, 25 bp, Homo sapien
gaataccacaggcatgaacacggtg

SEQ ID NO: 5590548 - DNA, 25 bp, Homo sapien
ctaataatcagctgcccaaaggagg

SEQ ID NO: 5590549 - DNA, 25 bp, Homo sapien
cacagcatggtcaccttgtggtggc

SEQ ID NO: 5590550 - DNA, 25 bp, Homo sapien
actgagcaagttctgagccaatggc

SEQ ID NO: 5590551 - DNA, 25 bp, Homo sapien
ggcataagatgggtatttgaaacac

SEQ ID NO: 5590552 - DNA, 25 bp, Homo sapien
gccaatggcagctataaggaataat

SEQ ID NO: 5590553 - DNA, 25 bp, Homo sapien
cagtagctacagcaagatgcacagg

SEQ ID NO: 5590554 - DNA, 25 bp, Homo sapien
gcaggagatcatcaatatctaggcc

SEQ ID NO: 5590555 - DNA, 25 bp, Homo sapien
tcacctagtcaggaaagaaaagcag

SEQ ID NO: 5590556 - DNA, 25 bp, Homo sapien
cttcctggacaggtcacctagtcag

SEQ ID NO: 5590557 - DNA, 25 bp, Homo sapien
tggtggcttgtgaactaccacacac

SEQ ID NO: 5590558 - DNA, 25 bp, Homo sapien
cctcatacactagtggggtgaggtg

SEQ ID NO: 5590559 - DNA, 25 bp, Homo sapien
agaacagagatgtccagtagctaca

SEQ ID NO: 5590560 - DNA, 25 bp, Homo sapien
taggagtttaatctagatggtttgc

SEQ ID NO: 5590561 - DNA, 25 bp, Homo sapien
cacccatgaatggtgcagctgccaa

SEQ ID NO: 5590562 - DNA, 25 bp, Homo sapien
gcagctgccaagagaaccaaagcta

SEQ ID NO: 5590563 - DNA, 25 bp, Homo sapien
aaccaaagctaaatgttggcaggat

SEQ ID NO: 5590564 - DNA, 25 bp, Homo sapien
cagactctacgtatatgcacccatg

SEQ ID NO: 5590565 - DNA, 25 bp, Homo sapien
gaaggctgagcatggctttttcctc

SEQ ID NO: 5590566 - DNA, 25 bp, Homo sapien
agcagagcacctgttcagactctac

SEQ ID NO: 5590567 - DNA, 25 bp, Homo sapien
acccactcaactggaaggctgagca

SEQ ID NO: 5590568 - DNA, 25 bp, Homo sapien
tctgatggttacccatgccaggccc

SEQ ID NO: 5590569 - DNA, 25 bp, Homo sapien
ttacccatgccaggccccacctctc

SEQ ID NO: 5590570 - DNA, 25 bp, Homo sapien
ccctggagactcagtcgttacccac

SEQ ID NO: 5590571 - DNA, 25 bp, Homo sapien
acacggtggcaggtccccaggtcga

SEQ ID NO: 5590572 - DNA, 25 bp, Homo sapien
tcgacctggggacctgccaccgtgt

SEQ ID NO: 5590573 - DNA, 25 bp, Homo sapien
aatcattaagatagttgacccccac

SEQ ID NO: 5590574 - DNA, 25 bp, Homo sapien
aactaggcagttataaagtaatgat

SEQ ID NO: 5590575 - DNA, 25 bp, Homo sapien
taagatagttgacccccactcccca

SEQ ID NO: 5590576 - DNA, 25 bp, Homo sapien
agcactgattaaaattcaaaccccc

SEQ ID NO: 5590577 - DNA, 25 bp, Homo sapien
ccactccccacaaaagcactgatta

SEQ ID NO: 5590578 - DNA, 25 bp, Homo sapien
catctttaaagactccccaaaacag

SEQ ID NO: 5590579 - DNA, 25 bp, Homo sapien
aggatgaggtctctcaccttagttc

SEQ ID NO: 5590580 - DNA, 25 bp, Homo sapien
aatgggaaaagtattcaagattacc

SEQ ID NO: 5590581 - DNA, 25 bp, Homo sapien
aaaccattagaaaacactttaggca

SEQ ID NO: 5590582 - DNA, 25 bp, Homo sapien
tttaggcagctaacaattaacataa

SEQ ID NO: 5590583 - DNA, 25 bp, Homo sapien
tcaacctttctcaggatgaggtctc

SEQ ID NO: 5590584 - DNA, 25 bp, Homo sapien
taaagatggtatcaccccgaccctc

SEQ ID NO: 5590585 - DNA, 25 bp, Homo sapien
tctcatctagaaaacaaagaccacc

SEQ ID NO: 5590586 - DNA, 25 bp, Homo sapien
aagaccaccaaaaatagccagtcct

SEQ ID NO: 5590587 - DNA, 25 bp, Homo sapien
tggtggatttggcagttgtctatac

SEQ ID NO: 5590588 - DNA, 25 bp, Homo sapien
gataagaaatgcaggtagtccctac

SEQ ID NO: 5590589 - DNA, 25 bp, Homo sapien
tacacactgaattagccactgcaag

SEQ ID NO: 5590590 - DNA, 25 bp, Homo sapien
gtacagtagagtatgtgctttatgc

SEQ ID NO: 5590591 - DNA, 25 bp, Homo sapien
ttagccactgcaagagattaagact

SEQ ID NO: 5590592 - DNA, 25 bp, Homo sapien
tgaactcagagaaaaacatctcatc

SEQ ID NO: 5590593 - DNA, 25 bp, Homo sapien
ggccatgatacaaagccagtatatc

SEQ ID NO: 5590594 - DNA, 25 bp, Homo sapien
agctcatactgtttgttggtggatt

SEQ ID NO: 5590595 - DNA, 25 bp, Homo sapien
tctccccactgatctgcaatactcc

SEQ ID NO: 5590596 - DNA, 25 bp, Homo sapien
taatgtctctaaggcaagacagccc

SEQ ID NO: 5590597 - DNA, 25 bp, Homo sapien
ctaaggcaagacagcccatctctac

SEQ ID NO: 5590598 - DNA, 25 bp, Homo sapien
tccacatgtatgatcttgtaactgc

SEQ ID NO: 5590599 - DNA, 25 bp, Homo sapien
tctgtaactacactggcaccctaat

SEQ ID NO: 5590600 - DNA, 25 bp, Homo sapien
tagctttataacagaccttaatgtc

SEQ ID NO: 5590601 - DNA, 25 bp, Homo sapien
tttgtgtacttcaggatctggtttc

SEQ ID NO: 5590602 - DNA, 25 bp, Homo sapien
atattcaatatacctggaaccgatt

SEQ ID NO: 5590603 - DNA, 25 bp, Homo sapien
ggcaccctaataccaggctgtcttc

SEQ ID NO: 5590604 - DNA, 25 bp, Homo sapien
tccattgtaagtcaagtgtgcatat

SEQ ID NO: 5590605 - DNA, 25 bp, Homo sapien
attgattagttcagtctctccccac

SEQ ID NO: 5590606 - DNA, 25 bp, Homo sapien
tcagagtgggaaacgagatttccct

SEQ ID NO: 5590607 - DNA, 25 bp, Homo sapien
caggagtcattggcctgaagccaca

SEQ ID NO: 5590608 - DNA, 25 bp, Homo sapien
ggtgtgctgggaatcagttctctca

SEQ ID NO: 5590609 - DNA, 25 bp, Homo sapien
ttccattgcacagaatcagagtggg

SEQ ID NO: 5590610 - DNA, 25 bp, Homo sapien
cccatctgccaacttgggggacacg

SEQ ID NO: 5590611 - DNA, 25 bp, Homo sapien
cgccctttagaggagtgctgggcag

SEQ ID NO: 5590612 - DNA, 25 bp, Homo sapien
acacggcccttggcagagatgtaat

SEQ ID NO: 5590613 - DNA, 25 bp, Homo sapien
cagcaaccagtgtgaagttgtaccc

SEQ ID NO: 5590614 - DNA, 25 bp, Homo sapien
ccaagtaacagtgaacaatggcaga

SEQ ID NO: 5590615 - DNA, 25 bp, Homo sapien
actgacagtcaggcctgcaatcact

SEQ ID NO: 5590616 - DNA, 25 bp, Homo sapien
gaccacctactaaggagaacagacc

SEQ ID NO: 5590617 - DNA, 25 bp, Homo sapien
tacagaggatttggctgttaagaac

SEQ ID NO: 5590618 - DNA, 25 bp, Homo sapien
cccaaaagaggctccttaattgctc

SEQ ID NO: 5590619 - DNA, 25 bp, Homo sapien
agtgggggatttcggccactcatga

SEQ ID NO: 5590620 - DNA, 25 bp, Homo sapien
atgtggaacccaagtacagaaaatc

SEQ ID NO: 5590621 - DNA, 25 bp, Homo sapien
gagaaattgttgacatgtggaaccc

SEQ ID NO: 5590622 - DNA, 25 bp, Homo sapien
gaaagactgttgcaaagcccctgtc

SEQ ID NO: 5590623 - DNA, 25 bp, Homo sapien
atgtggcttaccccaaaagaggctc

SEQ ID NO: 5590624 - DNA, 25 bp, Homo sapien
atctttgagaagcacatttgcagtg

SEQ ID NO: 5590625 - DNA, 25 bp, Homo sapien
tgatgaccacttagggctggtggat

SEQ ID NO: 5590626 - DNA, 25 bp, Homo sapien
atgcctttggagtggaattacaaca

SEQ ID NO: 5590627 - DNA, 25 bp, Homo sapien
agctgacttctgatcatgtgatgac

SEQ ID NO: 5590628 - DNA, 25 bp, Homo sapien
agtagtacaccaagacaaaagtgca

SEQ ID NO: 5590629 - DNA, 25 bp, Homo sapien
aggcagccattacaagtcaagctac

SEQ ID NO: 5590630 - DNA, 25 bp, Homo sapien
gcaggaacccattaaagcaccccca

SEQ ID NO: 5590631 - DNA, 25 bp, Homo sapien
ccaacaaaaatagctctgagaatac

SEQ ID NO: 5590632 - DNA, 25 bp, Homo sapien
tgtatataaaagtgttggaagcgtt

SEQ ID NO: 5590633 - DNA, 25 bp, Homo sapien
taaaagcaggcaagtaatatcaaca

SEQ ID NO: 5590634 - DNA, 25 bp, Homo sapien
agatgatacactaggagatcccagc

SEQ ID NO: 5590635 - DNA, 25 bp, Homo sapien
acccccaaaccaaggacagctgtat

SEQ ID NO: 5590636 - DNA, 25 bp, Homo sapien
ccaacaaaagcaagaatttaacagc

SEQ ID NO: 5590637 - DNA, 25 bp, Homo sapien
gttggaagcgttttatctgcatcac

SEQ ID NO: 5590638 - DNA, 25 bp, Homo sapien
tactccagagtacagtgaagaagct

SEQ ID NO: 5590639 - DNA, 25 bp, Homo sapien
gttctcacctagtatcggtagcatt

SEQ ID NO: 5590640 - DNA, 25 bp, Homo sapien
caatacaaatggtagctagctgttc

SEQ ID NO: 5590641 - DNA, 25 bp, Homo sapien
atgatggcctcattatgtgtcccac

SEQ ID NO: 5590642 - DNA, 25 bp, Homo sapien
actgaatgtcaaagaaatagaatac

SEQ ID NO: 5590643 - DNA, 25 bp, Homo sapien
aatctgttgttgccgggccaggaag

SEQ ID NO: 5590644 - DNA, 25 bp, Homo sapien
gaagccaagtaacccaaggccagag

SEQ ID NO: 5590645 - DNA, 25 bp, Homo sapien
tctagactaagattcctggtttgac

SEQ ID NO: 5590646 - DNA, 25 bp, Homo sapien
atagttaggtgtctgtaacagaatc

SEQ ID NO: 5590647 - DNA, 25 bp, Homo sapien
cggtagcattacagatagttaggtg

SEQ ID NO: 5590648 - DNA, 25 bp, Homo sapien
ctacctcagtatcctaagaatggcc

SEQ ID NO: 5590649 - DNA, 25 bp, Homo sapien
aaggccagaggtagtggctatttag

SEQ ID NO: 5590650 - DNA, 25 bp, Homo sapien
tgacctcagtcagtgttagatgctt

SEQ ID NO: 5590651 - DNA, 25 bp, Homo sapien
gggataacaattagagatgagattt

SEQ ID NO: 5590652 - DNA, 25 bp, Homo sapien
aaaaccatcagctctcgggagaatt

SEQ ID NO: 5590653 - DNA, 25 bp, Homo sapien
atcagtccctgaaattcctgccagt

SEQ ID NO: 5590654 - DNA, 25 bp, Homo sapien
cagagccgaaccgtatcagacctca

SEQ ID NO: 5590655 - DNA, 25 bp, Homo sapien
agcataggggaaaaccgtccccatg

SEQ ID NO: 5590656 - DNA, 25 bp, Homo sapien
tcctgccagtgtggtcttcagtgac

SEQ ID NO: 5590657 - DNA, 25 bp, Homo sapien
caattagagatgagatttgcgtggg

SEQ ID NO: 5590658 - DNA, 25 bp, Homo sapien
tcgggagaattcagtatcaggagaa

SEQ ID NO: 5590659 - DNA, 25 bp, Homo sapien
accgtccccatgatgcaagcacttc

SEQ ID NO: 5590660 - DNA, 25 bp, Homo sapien
tgcttagaaggaaatcttttggatc

SEQ ID NO: 5590661 - DNA, 25 bp, Homo sapien
atccttggcaaagtgcacgcatggt

SEQ ID NO: 5590662 - DNA, 25 bp, Homo sapien
ctggtgacaatacaatgctagaaaa

SEQ ID NO: 5590663 - DNA, 25 bp, Homo sapien
atttattattgggaaatgcagaaac

SEQ ID NO: 5590664 - DNA, 25 bp, Homo sapien
gtcttagactagaaggaatacaatc

SEQ ID NO: 5590665 - DNA, 25 bp, Homo sapien
gaagaacaaaagtaagtcctcaaca

SEQ ID NO: 5590666 - DNA, 25 bp, Homo sapien
aatgagttgagcttcaaacaggatc

SEQ ID NO: 5590667 - DNA, 25 bp, Homo sapien
atgtgtatatatgtccaggtgtaac

SEQ ID NO: 5590668 - DNA, 25 bp, Homo sapien
atgggcctagatttacagattacac

SEQ ID NO: 5590669 - DNA, 25 bp, Homo sapien
tcaatgaaaacttaatgggcctaga

SEQ ID NO: 5590670 - DNA, 25 bp, Homo sapien
gtgcatgatgtatctgctgtgtgtg

SEQ ID NO: 5590671 - DNA, 25 bp, Homo sapien
catatgtgggaaataaagcaagcca

SEQ ID NO: 5590672 - DNA, 25 bp, Homo sapien
acaggaagcaccaaattagtgtatc

SEQ ID NO: 5590673 - DNA, 25 bp, Homo sapien
aaactatttcagagggaaaagcacc

SEQ ID NO: 5590674 - DNA, 25 bp, Homo sapien
ttctctgaaaagccatgacaaaaaa

SEQ ID NO: 5590675 - DNA, 25 bp, Homo sapien
aaaaagtcaacaattcctcaagtcc

SEQ ID NO: 5590676 - DNA, 25 bp, Homo sapien
tataatgcaggagagacccttttcc

SEQ ID NO: 5590677 - DNA, 25 bp, Homo sapien
tctagagaatccttcaggacctacc

SEQ ID NO: 5590678 - DNA, 25 bp, Homo sapien
tccatggaaggaactagttttcaga

SEQ ID NO: 5590679 - DNA, 25 bp, Homo sapien
gaactagtctctgaagcataaattc

SEQ ID NO: 5590680 - DNA, 25 bp, Homo sapien
gaaaagcacctctaccacaggaagc

SEQ ID NO: 5590681 - DNA, 25 bp, Homo sapien
tccaatgaaagttgacagcctccct

SEQ ID NO: 5590682 - DNA, 25 bp, Homo sapien
ctctaagtaggtatgtcatggacat

SEQ ID NO: 5590683 - DNA, 25 bp, Homo sapien
gaggaaggcgtggcacctctccgtt

SEQ ID NO: 5590684 - DNA, 25 bp, Homo sapien
aacggagaggtgccacgccttcctc

SEQ ID NO: 5590685 - DNA, 25 bp, Homo sapien
gagctaccaagatgtagtcgagcgg

SEQ ID NO: 5590686 - DNA, 25 bp, Homo sapien
ttaaagatgaggtcccaaatgagag

SEQ ID NO: 5590687 - DNA, 25 bp, Homo sapien
tcccaaatgagagctaccaagatgt

SEQ ID NO: 5590688 - DNA, 25 bp, Homo sapien
gttgctgagattaaagatgaggtcc

SEQ ID NO: 5590689 - DNA, 25 bp, Homo sapien
gagttgctgagattaaagatgaggt

SEQ ID NO: 5590690 - DNA, 25 bp, Homo sapien
ctccgtctcgtactgtgtcgggctc

SEQ ID NO: 5590691 - DNA, 25 bp, Homo sapien
tcagtgaggcctccgtctcgtactg

SEQ ID NO: 5590692 - DNA, 25 bp, Homo sapien
ctgagattaaagatgaggtcccaaa

SEQ ID NO: 5590693 - DNA, 25 bp, Homo sapien
atgagagctaccaagatgtagtcga

SEQ ID NO: 5590694 - DNA, 25 bp, Homo sapien
ccgtctcgtactgtgtcgggctcag

SEQ ID NO: 5590695 - DNA, 25 bp, Homo sapien
tgaggcctccgtctcgtactgtgtc

SEQ ID NO: 5590696 - DNA, 25 bp, Homo sapien
tagcccggatcccaagaggtcttaa

SEQ ID NO: 5590697 - DNA, 25 bp, Homo sapien
ccagacctaggtcttagaagacgcc

SEQ ID NO: 5590698 - DNA, 25 bp, Homo sapien
agaagacgcctaataaacatcagtt

SEQ ID NO: 5590699 - DNA, 25 bp, Homo sapien
gaagttcagccaatccctgcgctcc

SEQ ID NO: 5590700 - DNA, 25 bp, Homo sapien
atccttgcgaaatgggtgttattac

SEQ ID NO: 5590701 - DNA, 25 bp, Homo sapien
gtggcgacatcactgagaaacctcc

SEQ ID NO: 5590702 - DNA, 25 bp, Homo sapien
ggtcactagaaagctagcccggatc

SEQ ID NO: 5590703 - DNA, 25 bp, Homo sapien
actgagaaacctcccggccaacaga

SEQ ID NO: 5590704 - DNA, 25 bp, Homo sapien
ccacgcagaaaacacgtggcgacat

SEQ ID NO: 5590705 - DNA, 25 bp, Homo sapien
agggcgcgacgtccatttcagcgca

SEQ ID NO: 5590706 - DNA, 25 bp, Homo sapien
tgaggtcagggatcatgtcttttgt

SEQ ID NO: 5590707 - DNA, 25 bp, Homo sapien
aatactagtctaggaaaatagaaaa

SEQ ID NO: 5590708 - DNA, 25 bp, Homo sapien
cagtgggaaaattaaactcatgatc

SEQ ID NO: 5590709 - DNA, 25 bp, Homo sapien
tctaatgatgaactaaccaaactca

SEQ ID NO: 5590710 - DNA, 25 bp, Homo sapien
tcttatgagaaagagtaagtggcaa

SEQ ID NO: 5590711 - DNA, 25 bp, Homo sapien
gcccacaggaatataagcatcttat

SEQ ID NO: 5590712 - DNA, 25 bp, Homo sapien
aagaaacttatatctcagcaatgag

SEQ ID NO: 5590713 - DNA, 25 bp, Homo sapien
ttcacatagtagggtgagaaaaaca

SEQ ID NO: 5590714 - DNA, 25 bp, Homo sapien
tttctcataaagtaaaccaactgct

SEQ ID NO: 5590715 - DNA, 25 bp, Homo sapien
atggtattgagtccacattgcagat

SEQ ID NO: 5590716 - DNA, 25 bp, Homo sapien
tgatgtgtgtgtgctaataccagta

SEQ ID NO: 5590717 - DNA, 25 bp, Homo sapien
aggtaacaaatcattaagaaactta

SEQ ID NO: 5590718 - DNA, 25 bp, Homo sapien
ctaataccagtaagttgtgaacatt

SEQ ID NO: 5590719 - DNA, 25 bp, Homo sapien
gagttggagaaacacaagctcttgc

SEQ ID NO: 5590720 - DNA, 25 bp, Homo sapien
gttggagaaacacaagctcttgcac

SEQ ID NO: 5590721 - DNA, 25 bp, Homo sapien
accagtaagttgtgaacatttattc

SEQ ID NO: 5590722 - DNA, 25 bp, Homo sapien
cagagttggagaaacacaagctctt

SEQ ID NO: 5590723 - DNA, 25 bp, Homo sapien
ttattctctacaagtggaaccaaac

SEQ ID NO: 5590724 - DNA, 25 bp, Homo sapien
agcctaaccctaaaacctgcattcc

SEQ ID NO: 5590725 - DNA, 25 bp, Homo sapien
tcatcaaattatgtgctgtagtgtg

SEQ ID NO: 5590726 - DNA, 25 bp, Homo sapien
tctctacaagtggaaccaaacccat

SEQ ID NO: 5590727 - DNA, 25 bp, Homo sapien
acaagtggaaccaaacccatatgcc

SEQ ID NO: 5590728 - DNA, 25 bp, Homo sapien
agtggaaccaaacccatatgccatc

SEQ ID NO: 5590729 - DNA, 25 bp, Homo sapien
gaagcaatgggcaagtctatgaccc

SEQ ID NO: 5590730 - DNA, 25 bp, Homo sapien
gcctctgggctcttggaatgtccac

SEQ ID NO: 5590731 - DNA, 25 bp, Homo sapien
aatgagagagcctgagattttatgt

SEQ ID NO: 5590732 - DNA, 25 bp, Homo sapien
gccttggcctgagttgcctctgggc

SEQ ID NO: 5590733 - DNA, 25 bp, Homo sapien
agaatgggcttgtccggttactgtt

SEQ ID NO: 5590734 - DNA, 25 bp, Homo sapien
agagattcagaacagacagactcgc

SEQ ID NO: 5590735 - DNA, 25 bp, Homo sapien
aagcactaagaacagtgtccggcac

SEQ ID NO: 5590736 - DNA, 25 bp, Homo sapien
gaggcagggcaatgccaactccctg

SEQ ID NO: 5590737 - DNA, 25 bp, Homo sapien
gtccggcacagagtcagtgctatgt

SEQ ID NO: 5590738 - DNA, 25 bp, Homo sapien
atgtaatgtagatgtgagaatgaga

SEQ ID NO: 5590739 - DNA, 25 bp, Homo sapien
atggagctgaggagctcctgagaat

SEQ ID NO: 5590740 - DNA, 25 bp, Homo sapien
caggcccataaacaatggaagattc

SEQ ID NO: 5590741 - DNA, 25 bp, Homo sapien
gttggaagagttgacatgcatctca

SEQ ID NO: 5590742 - DNA, 25 bp, Homo sapien
ttagaccctaacgaagctgacacag

SEQ ID NO: 5590743 - DNA, 25 bp, Homo sapien
acaaaagctgtgttacaggctcagt

SEQ ID NO: 5590744 - DNA, 25 bp, Homo sapien
cgaagctgacacagtactggatttc

SEQ ID NO: 5590745 - DNA, 25 bp, Homo sapien
caggctcagtaaattctggaggttg

SEQ ID NO: 5590746 - DNA, 25 bp, Homo sapien
ttcacagaaaaggattacaaaagct

SEQ ID NO: 5590747 - DNA, 25 bp, Homo sapien
cttgggaagtttcaacaaaacacat

SEQ ID NO: 5590748 - DNA, 25 bp, Homo sapien
tatgaaaggtacactttagacccta

SEQ ID NO: 5590749 - DNA, 25 bp, Homo sapien
agtgccaaatgctttcatcaggccc

SEQ ID NO: 5590750 - DNA, 25 bp, Homo sapien
tgggaatcattaagtgccaaatgct

SEQ ID NO: 5590751 - DNA, 25 bp, Homo sapien
aaagaatgattccctagagtgtaga

SEQ ID NO: 5590752 - DNA, 25 bp, Homo sapien
tgcctaatcatgaaacacaattccc

SEQ ID NO: 5590753 - DNA, 25 bp, Homo sapien
aagatataaacagattattggcctc

SEQ ID NO: 5590754 - DNA, 25 bp, Homo sapien
gtaccggtaccagctaaaatagaca

SEQ ID NO: 5590755 - DNA, 25 bp, Homo sapien
tggaggatagactggaaagtcattt

SEQ ID NO: 5590756 - DNA, 25 bp, Homo sapien
catttttaaggagcagaaacagtgc

SEQ ID NO: 5590757 - DNA, 25 bp, Homo sapien
tggtatgtgataaaaagatgcttgc

SEQ ID NO: 5590758 - DNA, 25 bp, Homo sapien
attgttatggaccagtggctgtgat

SEQ ID NO: 5590759 - DNA, 25 bp, Homo sapien
aaggagcagaaacagtgcctaatca

SEQ ID NO: 5590760 - DNA, 25 bp, Homo sapien
agaaagcaggttgaagaacccattt

SEQ ID NO: 5590761 - DNA, 25 bp, Homo sapien
ccctccaatggaggaacctgacaac

SEQ ID NO: 5590762 - DNA, 25 bp, Homo sapien
gggggaatttcatacatggagtaac

SEQ ID NO: 5590763 - DNA, 25 bp, Homo sapien
tggagtaacctaaggattcaaattc

SEQ ID NO: 5590764 - DNA, 25 bp, Homo sapien
tatgatagtcaattgtgcttgtgct

SEQ ID NO: 5590765 - DNA, 25 bp, Homo sapien
ttgtgctattaaaagaaggagagag

SEQ ID NO: 5590766 - DNA, 25 bp, Homo sapien
gggtctctagatttgcttaagaagc

SEQ ID NO: 5590767 - DNA, 25 bp, Homo sapien
catacatggagtaacctaaggattc

SEQ ID NO: 5590768 - DNA, 25 bp, Homo sapien
acccttctcagcaaacagtgaaatt

SEQ ID NO: 5590769 - DNA, 25 bp, Homo sapien
gaagctcctgccaatccatacattt

SEQ ID NO: 5590770 - DNA, 25 bp, Homo sapien
ttttatatatagtagcccagatttt

SEQ ID NO: 5590771 - DNA, 25 bp, Homo sapien
tgcttaagaagctcctgccaatcca

SEQ ID NO: 5590772 - DNA, 25 bp, Homo sapien
tttactggacaaaagactctacatt

SEQ ID NO: 5590773 - DNA, 25 bp, Homo sapien
tctacaagtacagagaatatgcaga

SEQ ID NO: 5590774 - DNA, 25 bp, Homo sapien
ttgaaatacctcggagcagctgaaa

SEQ ID NO: 5590775 - DNA, 25 bp, Homo sapien
gcagctgaaataattgaaggcagcc

SEQ ID NO: 5590776 - DNA, 25 bp, Homo sapien
ggcacttctcgagggaagtcatcgc

SEQ ID NO: 5590777 - DNA, 25 bp, Homo sapien
acccgcacgaggacctcgagattgc

SEQ ID NO: 5590778 - DNA, 25 bp, Homo sapien
attgaaggcagccctgtaagaagca

SEQ ID NO: 5590779 - DNA, 25 bp, Homo sapien
ggggctcacgtttcagggattagct

SEQ ID NO: 5590780 - DNA, 25 bp, Homo sapien
cccctccctccctgtgccgtgctgg

SEQ ID NO: 5590781 - DNA, 25 bp, Homo sapien
cagaccttctcacgggcaaaccctc

SEQ ID NO: 5590782 - DNA, 25 bp, Homo sapien
gattgccctgcggactggcacttct

SEQ ID NO: 5590783 - DNA, 25 bp, Homo sapien
cagggattagcttgtgtaacttgac

SEQ ID NO: 5590784 - DNA, 25 bp, Homo sapien
atgaccgaccctggttaatccaaac

SEQ ID NO: 5590785 - DNA, 25 bp, Homo sapien
tgggtcacaaccttgcctgtcagta

SEQ ID NO: 5590786 - DNA, 25 bp, Homo sapien
attccagtcgccagatgattaactc

SEQ ID NO: 5590787 - DNA, 25 bp, Homo sapien
tttactgggaaatgctattgaagca

SEQ ID NO: 5590788 - DNA, 25 bp, Homo sapien
tcagaaaagattgcaataacccgtc

SEQ ID NO: 5590789 - DNA, 25 bp, Homo sapien
gtgccattatgaaagaccctgtatt

SEQ ID NO: 5590790 - DNA, 25 bp, Homo sapien
agtctctgtggtttgtgcacgcttc

SEQ ID NO: 5590791 - DNA, 25 bp, Homo sapien
ttaactctggtcattgggtcacaac

SEQ ID NO: 5590792 - DNA, 25 bp, Homo sapien
ttaaagtcaaactcagtgccattat

SEQ ID NO: 5590793 - DNA, 25 bp, Homo sapien
gcaaggtttcttggaggaatctgat

SEQ ID NO: 5590794 - DNA, 25 bp, Homo sapien
ttcacaaacgagataccagagtcac

SEQ ID NO: 5590795 - DNA, 25 bp, Homo sapien
gagagaaagtctgtgattcatctat

SEQ ID NO: 5590796 - DNA, 25 bp, Homo sapien
cctaactgcaagcatttgtcaaccc

SEQ ID NO: 5590797 - DNA, 25 bp, Homo sapien
agataaaaccagagatggctgggca

SEQ ID NO: 5590798 - DNA, 25 bp, Homo sapien
gatagatgttggaaaagcttgagca

SEQ ID NO: 5590799 - DNA, 25 bp, Homo sapien
aaggatacaatgatcactgagtttc

SEQ ID NO: 5590800 - DNA, 25 bp, Homo sapien
ttgtcaacccagaacaaggtcttct

SEQ ID NO: 5590801 - DNA, 25 bp, Homo sapien
gcatattccacaggtgcatttgata

SEQ ID NO: 5590802 - DNA, 25 bp, Homo sapien
atattagatcggcccagatgcagca

SEQ ID NO: 5590803 - DNA, 25 bp, Homo sapien
aacccgttttaaggatacaatgatc

SEQ ID NO: 5590804 - DNA, 25 bp, Homo sapien
accttggcaagttgcttgacttctg

SEQ ID NO: 5590805 - DNA, 25 bp, Homo sapien
attcatgacgtttgacatcagacac

SEQ ID NO: 5590806 - DNA, 25 bp, Homo sapien
agggagcccttgagtccagactccc

SEQ ID NO: 5590807 - DNA, 25 bp, Homo sapien
caggacattcaagcttcaaacagga

SEQ ID NO: 5590808 - DNA, 25 bp, Homo sapien
acaagaccccgcaatgctgcaggga

SEQ ID NO: 5590809 - DNA, 25 bp, Homo sapien
ggatccatctgagccccccttgccc

SEQ ID NO: 5590810 - DNA, 25 bp, Homo sapien
gcagggtgcagcagcttccatttca

SEQ ID NO: 5590811 - DNA, 25 bp, Homo sapien
ctgctcctgccccacggatgccagg

SEQ ID NO: 5590812 - DNA, 25 bp, Homo sapien
tgaacagctgtgtaaggtcattatc

SEQ ID NO: 5590813 - DNA, 25 bp, Homo sapien
ttctacgccagaacaggtaaatggc

SEQ ID NO: 5590814 - DNA, 25 bp, Homo sapien
gtccagactccccatccagtgctcc

SEQ ID NO: 5590815 - DNA, 25 bp, Homo sapien
ctggatcctccaagctacaagaccc

SEQ ID NO: 5590816 - DNA, 25 bp, Homo sapien
agaggaggctcatttacgatgattt

SEQ ID NO: 5590817 - DNA, 25 bp, Homo sapien
ggggtgggtcttgctactccctgtg

SEQ ID NO: 5590818 - DNA, 25 bp, Homo sapien
agggccactgacccctctggcctcc

SEQ ID NO: 5590819 - DNA, 25 bp, Homo sapien
aactctcaagttatcctcgcctgcc

SEQ ID NO: 5590820 - DNA, 25 bp, Homo sapien
gggcctccgcctcctacacacacct

SEQ ID NO: 5590821 - DNA, 25 bp, Homo sapien
cttgctactccctgtgggacacagg

SEQ ID NO: 5590822 - DNA, 25 bp, Homo sapien
tccctggtgccctaggaaactctca

SEQ ID NO: 5590823 - DNA, 25 bp, Homo sapien
aggtcccctggtgtccagaatggct

SEQ ID NO: 5590824 - DNA, 25 bp, Homo sapien
cccctggtgtccagaatggctttct

SEQ ID NO: 5590825 - DNA, 25 bp, Homo sapien
tctgtccctggtgccctaggaaact

SEQ ID NO: 5590826 - DNA, 25 bp, Homo sapien
ctggtgccctaggaaactctcaagt

SEQ ID NO: 5590827 - DNA, 25 bp, Homo sapien
tccaggtcccctggtgtccagaatg

SEQ ID NO: 5590828 - DNA, 25 bp, Homo sapien
attcctgtggaacaatgctcattgc

SEQ ID NO: 5590829 - DNA, 25 bp, Homo sapien
acaaattgacaaggcagcactgctg

SEQ ID NO: 5590830 - DNA, 25 bp, Homo sapien
ttaagggaaaccggatatgctagta

SEQ ID NO: 5590831 - DNA, 25 bp, Homo sapien
cagcaacagcgctggagtagttgaa

SEQ ID NO: 5590832 - DNA, 25 bp, Homo sapien
ctgatacacaaatggtgggtggaca

SEQ ID NO: 5590833 - DNA, 25 bp, Homo sapien
gtagttgaaaagggatgcattaatc

SEQ ID NO: 5590834 - DNA, 25 bp, Homo sapien
atgagccatggatggcttcagggtc

SEQ ID NO: 5590835 - DNA, 25 bp, Homo sapien
actgctgacaggctattaagggaaa

SEQ ID NO: 5590836 - DNA, 25 bp, Homo sapien
gacatcaaaggattttcaagtgctt

SEQ ID NO: 5590837 - DNA, 25 bp, Homo sapien
tgttttgaaagacagttgaagttcc

SEQ ID NO: 5590838 - DNA, 25 bp, Homo sapien
aaggactaagcatcagaagcactcc

SEQ ID NO: 5590839 - DNA, 25 bp, Homo sapien
tataagaagaacagcaacaaaaggc

SEQ ID NO: 5590840 - DNA, 25 bp, Homo sapien
ccccgctgggttccattgtcctttc

SEQ ID NO: 5590841 - DNA, 25 bp, Homo sapien
ctcagctgtgtgcacactgagccag

SEQ ID NO: 5590842 - DNA, 25 bp, Homo sapien
tgatttcccagggaaggaatcccaa

SEQ ID NO: 5590843 - DNA, 25 bp, Homo sapien
ttacgaatgtaaactcccttggaga

SEQ ID NO: 5590844 - DNA, 25 bp, Homo sapien
tctcatacccttaggtgatgtaatc

SEQ ID NO: 5590845 - DNA, 25 bp, Homo sapien
ttgcgctcaagcccccctcagctgt

SEQ ID NO: 5590846 - DNA, 25 bp, Homo sapien
gcttctgctcaggggtccccgctgg

SEQ ID NO: 5590847 - DNA, 25 bp, Homo sapien
cagcaacaaaaggccgtctagcaag

SEQ ID NO: 5590848 - DNA, 25 bp, Homo sapien
gtctagcaagacagaacctgcctct

SEQ ID NO: 5590849 - DNA, 25 bp, Homo sapien
ggtgatgtaatcagccatataattt

SEQ ID NO: 5590850 - DNA, 25 bp, Homo sapien
aaggacgactgaagtttctctctgc

SEQ ID NO: 5590851 - DNA, 25 bp, Homo sapien
gcagagagaaacttcagtcgtcctt

SEQ ID NO: 5590852 - DNA, 25 bp, Homo sapien
cggtgaacggctgcaatgcaggtta

SEQ ID NO: 5590853 - DNA, 25 bp, Homo sapien
cagccctgcaattcaaatagggttc

SEQ ID NO: 5590854 - DNA, 25 bp, Homo sapien
ggcatctcctcttaactgggctggg

SEQ ID NO: 5590855 - DNA, 25 bp, Homo sapien
cctgttaacctcatggtactgtggc

SEQ ID NO: 5590856 - DNA, 25 bp, Homo sapien
ttcacgttaaaggtaagaggaatca

SEQ ID NO: 5590857 - DNA, 25 bp, Homo sapien
tgggctgggttgtttactcctccca

SEQ ID NO: 5590858 - DNA, 25 bp, Homo sapien
aaatagggttcattaaattcggcat

SEQ ID NO: 5590859 - DNA, 25 bp, Homo sapien
aatgcaggttaggctgccaccatga

SEQ ID NO: 5590860 - DNA, 25 bp, Homo sapien
cgtacagtagatacagtggaagaca

SEQ ID NO: 5590861 - DNA, 25 bp, Homo sapien
gagggaggacctgttaacctcatgg

SEQ ID NO: 5590862 - DNA, 25 bp, Homo sapien
gagctggagaagttcgtacagtaga

SEQ ID NO: 5590863 - DNA, 25 bp, Homo sapien
cagtccacagtctccattcagccac

SEQ ID NO: 5590864 - DNA, 25 bp, Homo sapien
ataaaactggaaacattagctcttt

SEQ ID NO: 5590865 - DNA, 25 bp, Homo sapien
ccatgacaagtctagctcctccaca

SEQ ID NO: 5590866 - DNA, 25 bp, Homo sapien
attcagccaccaaagggattttcct

SEQ ID NO: 5590867 - DNA, 25 bp, Homo sapien
tgatttaaaggctccagtggctcca

SEQ ID NO: 5590868 - DNA, 25 bp, Homo sapien
tgctgtagaggaaacatcgtgtaaa

SEQ ID NO: 5590869 - DNA, 25 bp, Homo sapien
caaaaaggcctcatagctcccatgc

SEQ ID NO: 5590870 - DNA, 25 bp, Homo sapien
atcgtgtaaagcaggccatcaacta

SEQ ID NO: 5590871 - DNA, 25 bp, Homo sapien
tgctcagcggaacccatcatggcat

SEQ ID NO: 5590872 - DNA, 25 bp, Homo sapien
gccaccatcccacgcccatccagtc

SEQ ID NO: 5590873 - DNA, 25 bp, Homo sapien
ctggcaatgccacgttgctcagcgg

SEQ ID NO: 5590874 - DNA, 25 bp, Homo sapien
tccaggtctacaagcaagcaggtaa

SEQ ID NO: 5590875 - DNA, 25 bp, Homo sapien
tagatgtagaaaagagttggcctta

SEQ ID NO: 5590876 - DNA, 25 bp, Homo sapien
ctcatccagagagtagacaaggtga

SEQ ID NO: 5590877 - DNA, 25 bp, Homo sapien
ctatgtcaaggaggactagctaaag

SEQ ID NO: 5590878 - DNA, 25 bp, Homo sapien
tttttatgagggtgaagatagtaga

SEQ ID NO: 5590879 - DNA, 25 bp, Homo sapien
acatctggaccaaagttagacaggc

SEQ ID NO: 5590880 - DNA, 25 bp, Homo sapien
agttagacaggcacactgacacatt

SEQ ID NO: 5590881 - DNA, 25 bp, Homo sapien
tgggctctcctacggtccaggtcta

SEQ ID NO: 5590882 - DNA, 25 bp, Homo sapien
gagtcagtagcataagtagtaaaga

SEQ ID NO: 5590883 - DNA, 25 bp, Homo sapien
aagcaagcaggtaatggtttagttc

SEQ ID NO: 5590884 - DNA, 25 bp, Homo sapien
tatttggcttggtgaggccacatct

SEQ ID NO: 5590885 - DNA, 25 bp, Homo sapien
tgtcaagggctggtataaaaataat

SEQ ID NO: 5590886 - DNA, 25 bp, Homo sapien
cctccccgcaacacctccccagagc

SEQ ID NO: 5590887 - DNA, 25 bp, Homo sapien
gatcctccaatgagggcctaggagg

SEQ ID NO: 5590888 - DNA, 25 bp, Homo sapien
aatgccgactgagaaacaaaatacg

SEQ ID NO: 5590889 - DNA, 25 bp, Homo sapien
aagcaaaacaaccgcctctcccctg

SEQ ID NO: 5590890 - DNA, 25 bp, Homo sapien
cttctccctccggggtacaggtcag

SEQ ID NO: 5590891 - DNA, 25 bp, Homo sapien
tttcattgttagggaacatccgggc

SEQ ID NO: 5590892 - DNA, 25 bp, Homo sapien
cgaagagaggcgtttagatcctcca

SEQ ID NO: 5590893 - DNA, 25 bp, Homo sapien
acaaaatacggaaatgtcaagggct

SEQ ID NO: 5590894 - DNA, 25 bp, Homo sapien
ctctgataggtcggcgatgatttca

SEQ ID NO: 5590895 - DNA, 25 bp, Homo sapien
ctcgtctgagtcgtcccttcccgtc

SEQ ID NO: 5590896 - DNA, 25 bp, Homo sapien
tgaaagttaaagatcagattgtact

SEQ ID NO: 5590897 - DNA, 25 bp, Homo sapien
tgttcaaacacagaaatgatacatc

SEQ ID NO: 5590898 - DNA, 25 bp, Homo sapien
atagattagtaatttgggtagaaaa

SEQ ID NO: 5590899 - DNA, 25 bp, Homo sapien
gcaggactgtggagataataataca

SEQ ID NO: 5590900 - DNA, 25 bp, Homo sapien
aattattatttgtagcatgaaagtt

SEQ ID NO: 5590901 - DNA, 25 bp, Homo sapien
tacatatggaggttcttattccttt

SEQ ID NO: 5590902 - DNA, 25 bp, Homo sapien
gcattacgatgctttgttcaaacac

SEQ ID NO: 5590903 - DNA, 25 bp, Homo sapien
gataataatacatatggaggttctt

SEQ ID NO: 5590904 - DNA, 25 bp, Homo sapien
gattgtacttctgcaggactgtgga

SEQ ID NO: 5590905 - DNA, 25 bp, Homo sapien
atgatacatcatatggcaataattt

SEQ ID NO: 5590906 - DNA, 25 bp, Homo sapien
ttccttaatggcatagattagtaat

SEQ ID NO: 5590907 - DNA, 25 bp, Homo sapien
acaatcgtgtcgtaagtgctcctct

SEQ ID NO: 5590908 - DNA, 25 bp, Homo sapien
agaggagcacttacgacacgattgt

SEQ ID NO: 5590909 - DNA, 25 bp, Homo sapien
gggttcccctctcggacacgtagag

SEQ ID NO: 5590910 - DNA, 25 bp, Homo sapien
ctctacgtgtccgagaggggaaccc

SEQ ID NO: 5590911 - DNA, 25 bp, Homo sapien
gtgtggggatgccaaaatcttcaga

SEQ ID NO: 5590912 - DNA, 25 bp, Homo sapien
cttctctgagaggtccacactggag

SEQ ID NO: 5590913 - DNA, 25 bp, Homo sapien
catgttccatcaaggctggtgctgt

SEQ ID NO: 5590914 - DNA, 25 bp, Homo sapien
tctgagatgtaggcaacactccagc

SEQ ID NO: 5590915 - DNA, 25 bp, Homo sapien
ggctggtgctgtaaatcaggacaca

SEQ ID NO: 5590916 - DNA, 25 bp, Homo sapien
gcctgaaaccttcatggggaaagac

SEQ ID NO: 5590917 - DNA, 25 bp, Homo sapien
tgggtgttaaggccctgccatgttc

SEQ ID NO: 5590918 - DNA, 25 bp, Homo sapien
ctgtgaaatcctcaaggaaaggggc

SEQ ID NO: 5590919 - DNA, 25 bp, Homo sapien
catctaacgatgaggccaaataagc

SEQ ID NO: 5590920 - DNA, 25 bp, Homo sapien
attcagccacacgttcaaggttccc

SEQ ID NO: 5590921 - DNA, 25 bp, Homo sapien
aaaggggcttgtaaatgcaaacttc

SEQ ID NO: 5590922 - DNA, 25 bp, Homo sapien
ggatcgattcaggtaaagtgcacat

SEQ ID NO: 5590923 - DNA, 25 bp, Homo sapien
atgtgaggatcgattcaggtaaagt

SEQ ID NO: 5590924 - DNA, 25 bp, Homo sapien
cctcaaattttggcacttgttgctg

SEQ ID NO: 5590925 - DNA, 25 bp, Homo sapien
ctcataggatgtgaggatcgattca

SEQ ID NO: 5590926 - DNA, 25 bp, Homo sapien
gacagtactcccaaatggtagtggt

SEQ ID NO: 5590927 - DNA, 25 bp, Homo sapien
tgaggatcgattcaggtaaagtgca

SEQ ID NO: 5590928 - DNA, 25 bp, Homo sapien
ctcccaaatggtagtggtgaagaga

SEQ ID NO: 5590929 - DNA, 25 bp, Homo sapien
taatacctcataggatgtgaggatc

SEQ ID NO: 5590930 - DNA, 25 bp, Homo sapien
atcgattcaggtaaagtgcacatag

SEQ ID NO: 5590931 - DNA, 25 bp, Homo sapien
catagtaagacctcaaattttggca

SEQ ID NO: 5590932 - DNA, 25 bp, Homo sapien
gtactcccaaatggtagtggtgaag

SEQ ID NO: 5590933 - DNA, 25 bp, Homo sapien
actgctgtgtgctatgcaccacgcc

SEQ ID NO: 5590934 - DNA, 25 bp, Homo sapien
tgagaaaggtacaaataaagtgcta

SEQ ID NO: 5590935 - DNA, 25 bp, Homo sapien
taaagtgctacggtggttcagcaga

SEQ ID NO: 5590936 - DNA, 25 bp, Homo sapien
tgatggatacagatgaataaaacac

SEQ ID NO: 5590937 - DNA, 25 bp, Homo sapien
gtcaaaggacaagtgcacaaataac

SEQ ID NO: 5590938 - DNA, 25 bp, Homo sapien
ccacgcctagtgctgtgatggatac

SEQ ID NO: 5590939 - DNA, 25 bp, Homo sapien
atacaaggcagaatatggtaagtgc

SEQ ID NO: 5590940 - DNA, 25 bp, Homo sapien
acagtaaaacgcaggcaccctttcc

SEQ ID NO: 5590941 - DNA, 25 bp, Homo sapien
ctaagaacagtcaaaggacaagtgc

SEQ ID NO: 5590942 - DNA, 25 bp, Homo sapien
gagagatcccagtggttggtacatc

SEQ ID NO: 5590943 - DNA, 25 bp, Homo sapien
tatggtaagtgccatgagaaaggta

SEQ ID NO: 5590944 - DNA, 25 bp, Homo sapien
caaaaagaccacagaaatattcagt

SEQ ID NO: 5590945 - DNA, 25 bp, Homo sapien
tgtgtgcccctagctcattctggag

SEQ ID NO: 5590946 - DNA, 25 bp, Homo sapien
tgtccacaaacaccataggtacctc

SEQ ID NO: 5590947 - DNA, 25 bp, Homo sapien
ctggaggtatttagtggacagtctc

SEQ ID NO: 5590948 - DNA, 25 bp, Homo sapien
gcatattaggggtaaagagctttac

SEQ ID NO: 5590949 - DNA, 25 bp, Homo sapien
tgctgaaacataattgcgagtctga

SEQ ID NO: 5590950 - DNA, 25 bp, Homo sapien
tgataaagatgactagctaagaaat

SEQ ID NO: 5590951 - DNA, 25 bp, Homo sapien
cctatgacagtccagaacaatacta

SEQ ID NO: 5590952 - DNA, 25 bp, Homo sapien
tcttgaatcctaagcaggctggtca

SEQ ID NO: 5590953 - DNA, 25 bp, Homo sapien
aagcaacacccaaaatgtgtgcccc

SEQ ID NO: 5590954 - DNA, 25 bp, Homo sapien
acagtgattaggcatattaggggta

SEQ ID NO: 5590955 - DNA, 25 bp, Homo sapien
agcagctatgaaaatttgatgagta

SEQ ID NO: 5590956 - DNA, 25 bp, Homo sapien
acaatgacagactggagtaacattt

SEQ ID NO: 5590957 - DNA, 25 bp, Homo sapien
tacctacatgaggggttggtaggtg

SEQ ID NO: 5590958 - DNA, 25 bp, Homo sapien
cctaatacctacatgaggggttggt

SEQ ID NO: 5590959 - DNA, 25 bp, Homo sapien
tcagaactaacattagatgtcagcc

SEQ ID NO: 5590960 - DNA, 25 bp, Homo sapien
aaagctgcgtactctgaacatgtac

SEQ ID NO: 5590961 - DNA, 25 bp, Homo sapien
tagatgtcagccttggtaatgctta

SEQ ID NO: 5590962 - DNA, 25 bp, Homo sapien
accgtgggatatacaatgacagact

SEQ ID NO: 5590963 - DNA, 25 bp, Homo sapien
accttgaaagtgtattgccctaata

SEQ ID NO: 5590964 - DNA, 25 bp, Homo sapien
atttgatgagtaacaccgtgggata

SEQ ID NO: 5590965 - DNA, 25 bp, Homo sapien
ggtaatgcttatgaaagaatgtgtt

SEQ ID NO: 5590966 - DNA, 25 bp, Homo sapien
tcgctgatgatggagactccaccac

SEQ ID NO: 5590967 - DNA, 25 bp, Homo sapien
taagtaaatgaaccagcccagtgag

SEQ ID NO: 5590968 - DNA, 25 bp, Homo sapien
tgcgcagaatgaatttgggtgataa

SEQ ID NO: 5590969 - DNA, 25 bp, Homo sapien
ttcactgttgaaggccagaccttgc

SEQ ID NO: 5590970 - DNA, 25 bp, Homo sapien
gggtgataataggagctctgtgtat

SEQ ID NO: 5590971 - DNA, 25 bp, Homo sapien
gagctggactgataaaacaatcttc

SEQ ID NO: 5590972 - DNA, 25 bp, Homo sapien
caggacatcctcagtgcgcagaatg

SEQ ID NO: 5590973 - DNA, 25 bp, Homo sapien
tcctagcaaaaggcatgtgaggaca

SEQ ID NO: 5590974 - DNA, 25 bp, Homo sapien
gtgcaatcagtggacctgcagtctc

SEQ ID NO: 5590975 - DNA, 25 bp, Homo sapien
caaaagcactgaacggtgcaatcag

SEQ ID NO: 5590976 - DNA, 25 bp, Homo sapien
gacatgtgagaaagaatgcaccaaa

SEQ ID NO: 5590977 - DNA, 25 bp, Homo sapien
gtgtacaaagagatccaacttccga

SEQ ID NO: 5590978 - DNA, 25 bp, Homo sapien
ctgttccccggtgcttgggtgtttg

SEQ ID NO: 5590979 - DNA, 25 bp, Homo sapien
acctcgggatgtcgagtcaccactt

SEQ ID NO: 5590980 - DNA, 25 bp, Homo sapien
ttgcacaatagaaagtgctcaggct

SEQ ID NO: 5590981 - DNA, 25 bp, Homo sapien
ttgcagagcaaattcgggattcatt

SEQ ID NO: 5590982 - DNA, 25 bp, Homo sapien
cgcagtggttaacgaatccgactag

SEQ ID NO: 5590983 - DNA, 25 bp, Homo sapien
gcgataataggaccgcaacacctcg

SEQ ID NO: 5590984 - DNA, 25 bp, Homo sapien
tctccaggagttggctccaaaactc

SEQ ID NO: 5590985 - DNA, 25 bp, Homo sapien
ttagcccaagaaatagcccctacac

SEQ ID NO: 5590986 - DNA, 25 bp, Homo sapien
taaaactgtcagacacaggggagtt

SEQ ID NO: 5590987 - DNA, 25 bp, Homo sapien
acttccgaatcagttcagccgctcc

SEQ ID NO: 5590988 - DNA, 25 bp, Homo sapien
ctctgggcactggtgtactctcaca

SEQ ID NO: 5590989 - DNA, 25 bp, Homo sapien
gtgcctctgggcactggtgtactct

SEQ ID NO: 5590990 - DNA, 25 bp, Homo sapien
ccatagaagagatgtaagccatttc

SEQ ID NO: 5590991 - DNA, 25 bp, Homo sapien
agaaaatatgcagaatgtcacgaag

SEQ ID NO: 5590992 - DNA, 25 bp, Homo sapien
agaagagatgtaagccatttctccc

SEQ ID NO: 5590993 - DNA, 25 bp, Homo sapien
ccctgtatccatagaagagatgtaa

SEQ ID NO: 5590994 - DNA, 25 bp, Homo sapien
tctcccttcttttcgtgtatgtgcc

SEQ ID NO: 5590995 - DNA, 25 bp, Homo sapien
tcttttcgtgtatgtgcctctgggc

SEQ ID NO: 5590996 - DNA, 25 bp, Homo sapien
tgtatccatagaagagatgtaagcc

SEQ ID NO: 5590997 - DNA, 25 bp, Homo sapien
gggcactggtgtactctcacaggtt

SEQ ID NO: 5590998 - DNA, 25 bp, Homo sapien
aatcagtattctcacatcaacttcg

SEQ ID NO: 5590999 - DNA, 25 bp, Homo sapien
aggaggcacatatcaccttccagcc

SEQ ID NO: 5591000 - DNA, 25 bp, Homo sapien
gccctaacagcagggaaggattttg

SEQ ID NO: 5591001 - DNA, 25 bp, Homo sapien
cagggtcaaagggatacttttgcag

SEQ ID NO: 5591002 - DNA, 25 bp, Homo sapien
ggttggcaagggaattctgccagca

SEQ ID NO: 5591003 - DNA, 25 bp, Homo sapien
gccagcaactgacaaggaataggat

SEQ ID NO: 5591004 - DNA, 25 bp, Homo sapien
gcagaaatgtgaggccctaacagca

SEQ ID NO: 5591005 - DNA, 25 bp, Homo sapien
cagttataaggtctgctggaagcag

SEQ ID NO: 5591006 - DNA, 25 bp, Homo sapien
tccacttagtgcacgaaaatgacaa

SEQ ID NO: 5591007 - DNA, 25 bp, Homo sapien
atcatatatgatgtaaggccagggt

SEQ ID NO: 5591008 - DNA, 25 bp, Homo sapien
gctgtggctacctgatgagttagac

SEQ ID NO: 5591009 - DNA, 25 bp, Homo sapien
ggcatgcaaagagacacagttataa

SEQ ID NO: 5591010 - DNA, 25 bp, Homo sapien
taaatcttatatcctaggttatttt

SEQ ID NO: 5591011 - DNA, 25 bp, Homo sapien
aaaataacctaggatataagattta

SEQ ID NO: 5591012 - DNA, 25 bp, Homo sapien
catagtttaggcatctgtggaactc

SEQ ID NO: 5591013 - DNA, 25 bp, Homo sapien
agtctactgtttaaatgtgggggaa

SEQ ID NO: 5591014 - DNA, 25 bp, Homo sapien
ccaggccacttaagataaagtctac

SEQ ID NO: 5591015 - DNA, 25 bp, Homo sapien
attctgggaaagttgagtctgtcta

SEQ ID NO: 5591016 - DNA, 25 bp, Homo sapien
atagtttataggccatttaggattc

SEQ ID NO: 5591017 - DNA, 25 bp, Homo sapien
tagttaaaaaatgctgacagacatc

SEQ ID NO: 5591018 - DNA, 25 bp, Homo sapien
aaaacagaagataccaggccactta

SEQ ID NO: 5591019 - DNA, 25 bp, Homo sapien
gacagacatcaaggaccaaagaatt

SEQ ID NO: 5591020 - DNA, 25 bp, Homo sapien
aattagaagactttcaaaacagaag

SEQ ID NO: 5591021 - DNA, 25 bp, Homo sapien
agtctgtctagttgaagattcagtc

SEQ ID NO: 5591022 - DNA, 25 bp, Homo sapien
aaaaagcacaaaataactgccacta

SEQ ID NO: 5591023 - DNA, 25 bp, Homo sapien
ggttgttggttacatccaccagact

SEQ ID NO: 5591024 - DNA, 25 bp, Homo sapien
ttcaccaaacattcagcgcctactg

SEQ ID NO: 5591025 - DNA, 25 bp, Homo sapien
ttacccataacttcccatccaaatc

SEQ ID NO: 5591026 - DNA, 25 bp, Homo sapien
gttacatccaccagactgagggctc

SEQ ID NO: 5591027 - DNA, 25 bp, Homo sapien
tatcagttgaactgagttaatccac

SEQ ID NO: 5591028 - DNA, 25 bp, Homo sapien
tctgtagttctgtggttgttggtta

SEQ ID NO: 5591029 - DNA, 25 bp, Homo sapien
gagacagtctctgcctactgtttgg

SEQ ID NO: 5591030 - DNA, 25 bp, Homo sapien
ctggaggagtagttatcagttgaac

SEQ ID NO: 5591031 - DNA, 25 bp, Homo sapien
gtctggaggagtagttatcagttga

SEQ ID NO: 5591032 - DNA, 25 bp, Homo sapien
cccatccaaatcttaatggcacatt

SEQ ID NO: 5591033 - DNA, 25 bp, Homo sapien
agttctgtagttctgtggttgttgg

SEQ ID NO: 5591034 - DNA, 25 bp, Homo sapien
gtttcaggcccaggaagtcctgcac

SEQ ID NO: 5591035 - DNA, 25 bp, Homo sapien
cggctgccgccctgggccttcttga

SEQ ID NO: 5591036 - DNA, 25 bp, Homo sapien
cacgcggccgacctctccggccggg

SEQ ID NO: 5591037 - DNA, 25 bp, Homo sapien
gtcctggcccgtcatctggtagaac

SEQ ID NO: 5591038 - DNA, 25 bp, Homo sapien
cgtttcaggcccaggaagtcctgca

SEQ ID NO: 5591039 - DNA, 25 bp, Homo sapien
atctggtagaacctgcggttgaagg

SEQ ID NO: 5591040 - DNA, 25 bp, Homo sapien
ccgtcatctggtagaacctgcggtt

SEQ ID NO: 5591041 - DNA, 25 bp, Homo sapien
gccgaagtcctggcccgtcatctgg

SEQ ID NO: 5591042 - DNA, 25 bp, Homo sapien
gtcatctggtagaacctgcggttga

SEQ ID NO: 5591043 - DNA, 25 bp, Homo sapien
gaagtcctggcccgtcatctggtag

SEQ ID NO: 5591044 - DNA, 25 bp, Homo sapien
ggcccgtcatctggtagaacctgcg

SEQ ID NO: 5591045 - DNA, 25 bp, Homo sapien
aaattcatttggcttgagatctcat

SEQ ID NO: 5591046 - DNA, 25 bp, Homo sapien
aaggttctcagccaaataacgtgtt

SEQ ID NO: 5591047 - DNA, 25 bp, Homo sapien
aaaatagcttataaaaccaagcatg

SEQ ID NO: 5591048 - DNA, 25 bp, Homo sapien
ggagggctttggtgtatatagattt

SEQ ID NO: 5591049 - DNA, 25 bp, Homo sapien
ttacaaactaaaggttctcagccaa

SEQ ID NO: 5591050 - DNA, 25 bp, Homo sapien
ttgtatattatggtttggtatttac

SEQ ID NO: 5591051 - DNA, 25 bp, Homo sapien
tctcagaatagcaatgatacttata

SEQ ID NO: 5591052 - DNA, 25 bp, Homo sapien
cagttgactatcatagatgaacaga

SEQ ID NO: 5591053 - DNA, 25 bp, Homo sapien
aaaaccaagcatgaatcttttttat

SEQ ID NO: 5591054 - DNA, 25 bp, Homo sapien
ataacgtgttttgcttggaaaccaa

SEQ ID NO: 5591055 - DNA, 25 bp, Homo sapien
catagatgaacagatatgggaaaga

SEQ ID NO: 5591056 - DNA, 25 bp, Homo sapien
tctaacagaagcactgggacatctt

SEQ ID NO: 5591057 - DNA, 25 bp, Homo sapien
aagtgatgaaatctcaaggtgctgt

SEQ ID NO: 5591058 - DNA, 25 bp, Homo sapien
catcccgacctgcatcatctgtttc

SEQ ID NO: 5591059 - DNA, 25 bp, Homo sapien
cagttctcaacataaggcagtcctc

SEQ ID NO: 5591060 - DNA, 25 bp, Homo sapien
ccgatgactgcaatcgtggtgtggt

SEQ ID NO: 5591061 - DNA, 25 bp, Homo sapien
aagttctgtaagtctgcaggggtgg

SEQ ID NO: 5591062 - DNA, 25 bp, Homo sapien
ctgggctagaagctcccaggcacag

SEQ ID NO: 5591063 - DNA, 25 bp, Homo sapien
tgcaggtaagagtcaaaaatctaac

SEQ ID NO: 5591064 - DNA, 25 bp, Homo sapien
gacactatgcaacggcagctaaggc

SEQ ID NO: 5591065 - DNA, 25 bp, Homo sapien
tgttaggccaagaccctgtccccaa

SEQ ID NO: 5591066 - DNA, 25 bp, Homo sapien
acaccaaaagaagttccccgatgac

SEQ ID NO: 5591067 - DNA, 25 bp, Homo sapien
gccgcacccatttaggagaccagga

SEQ ID NO: 5591068 - DNA, 25 bp, Homo sapien
atccacaggagactaaatgagttag

SEQ ID NO: 5591069 - DNA, 25 bp, Homo sapien
gaaggaacaccaaatagtctgacta

SEQ ID NO: 5591070 - DNA, 25 bp, Homo sapien
ggttcgcagaaggaacaccaaatag

SEQ ID NO: 5591071 - DNA, 25 bp, Homo sapien
aataagaaagagctaaatctgcttg

SEQ ID NO: 5591072 - DNA, 25 bp, Homo sapien
tgttacttaaatgacagtagggcgg

SEQ ID NO: 5591073 - DNA, 25 bp, Homo sapien
taaatgagttagaggccactcctgt

SEQ ID NO: 5591074 - DNA, 25 bp, Homo sapien
aacctcttgactgtggtgtgtgggg

SEQ ID NO: 5591075 - DNA, 25 bp, Homo sapien
agtgtttgaacacatgtgcaacctc

SEQ ID NO: 5591076 - DNA, 25 bp, Homo sapien
gactatctaccaagaagagagtgtt

SEQ ID NO: 5591077 - DNA, 25 bp, Homo sapien
ctgaaaagcaagtgatctcccagcc

SEQ ID NO: 5591078 - DNA, 25 bp, Homo sapien
tatcagcagacagaatccatagaag

SEQ ID NO: 5591079 - DNA, 25 bp, Homo sapien
ttagtgacaagaatactgggaactt

SEQ ID NO: 5591080 - DNA, 25 bp, Homo sapien
aaggaaactgttggtcaaggacttg

SEQ ID NO: 5591081 - DNA, 25 bp, Homo sapien
gcacaagagaccaagagtccaaatt

SEQ ID NO: 5591082 - DNA, 25 bp, Homo sapien
tagcaaaggctaagaacctgttatc

SEQ ID NO: 5591083 - DNA, 25 bp, Homo sapien
cccaggatctgtctagctgaggctc

SEQ ID NO: 5591084 - DNA, 25 bp, Homo sapien
tacatgatctgcaccacacaagccc

SEQ ID NO: 5591085 - DNA, 25 bp, Homo sapien
tgaggctcactgtacttaaggaaac

SEQ ID NO: 5591086 - DNA, 25 bp, Homo sapien
ggagtctgaacttaggcacaagaga

SEQ ID NO: 5591087 - DNA, 25 bp, Homo sapien
cacagagaacagccaagcctataac

SEQ ID NO: 5591088 - DNA, 25 bp, Homo sapien
tggtaaagaaaggagaatttcctga

SEQ ID NO: 5591089 - DNA, 25 bp, Homo sapien
cccagatgcactcataaataactaa

SEQ ID NO: 5591090 - DNA, 25 bp, Homo sapien
aactaaatgctaagagagacaacca

SEQ ID NO: 5591091 - DNA, 25 bp, Homo sapien
agagacaaccaaagccaattcaata

SEQ ID NO: 5591092 - DNA, 25 bp, Homo sapien
taattaaactcacagccaaagaaca

SEQ ID NO: 5591093 - DNA, 25 bp, Homo sapien
aaacagattttaggcaactaaatgc

SEQ ID NO: 5591094 - DNA, 25 bp, Homo sapien
agaacaaaagccgctcaatgggcac

SEQ ID NO: 5591095 - DNA, 25 bp, Homo sapien
aaaatcagaaattgcaggggcattt

SEQ ID NO: 5591096 - DNA, 25 bp, Homo sapien
cagccaaagaacaaaagccgctcaa

SEQ ID NO: 5591097 - DNA, 25 bp, Homo sapien
ccgctcaatgggcacaatgaaatcc

SEQ ID NO: 5591098 - DNA, 25 bp, Homo sapien
atttgtcaccgaaataaaactgtgg

SEQ ID NO: 5591099 - DNA, 25 bp, Homo sapien
gggcacaatgaaatccaaattagta

SEQ ID NO: 5591100 - DNA, 25 bp, Homo sapien
aaatgtatgatcagcatggcacagc

SEQ ID NO: 5591101 - DNA, 25 bp, Homo sapien
gaggaggtaacatcctcagctagca

SEQ ID NO: 5591102 - DNA, 25 bp, Homo sapien
tcagctagcatgtaaccgatgagac

SEQ ID NO: 5591103 - DNA, 25 bp, Homo sapien
ggtctgcactgcaacagaggaagta

SEQ ID NO: 5591104 - DNA, 25 bp, Homo sapien
aaccgatgagacagataaatgggtg

SEQ ID NO: 5591105 - DNA, 25 bp, Homo sapien
agagatcttggacagagaaaatagt

SEQ ID NO: 5591106 - DNA, 25 bp, Homo sapien
gcacattgagctggaatggtctgca

SEQ ID NO: 5591107 - DNA, 25 bp, Homo sapien
ataaatgggtggtaaagatcactgg

SEQ ID NO: 5591108 - DNA, 25 bp, Homo sapien
aaatagtacatgtaaaggcacaaat

SEQ ID NO: 5591109 - DNA, 25 bp, Homo sapien
gtaaaggcacaaatgtatgatcagc

SEQ ID NO: 5591110 - DNA, 25 bp, Homo sapien
aggtaggcagtatggctgcaacata

SEQ ID NO: 5591111 - DNA, 25 bp, Homo sapien
tgtgggcatacactgagcctgaatc

SEQ ID NO: 5591112 - DNA, 25 bp, Homo sapien
gtgaaggtggagaaatctcaccacc

SEQ ID NO: 5591113 - DNA, 25 bp, Homo sapien
tgctgaagtccacctcccctgggta

SEQ ID NO: 5591114 - DNA, 25 bp, Homo sapien
aatctcaccaccacttttgcacagc

SEQ ID NO: 5591115 - DNA, 25 bp, Homo sapien
ctcccctgggtaccacctccgtgaa

SEQ ID NO: 5591116 - DNA, 25 bp, Homo sapien
agaactgtgggcatacactgagcct

SEQ ID NO: 5591117 - DNA, 25 bp, Homo sapien
ggggtttgccaaagaactgtgggca

SEQ ID NO: 5591118 - DNA, 25 bp, Homo sapien
ccacctccgtgaaggtggagaaatc

SEQ ID NO: 5591119 - DNA, 25 bp, Homo sapien
gcccattctcgctgctgaagtccac

SEQ ID NO: 5591120 - DNA, 25 bp, Homo sapien
tttgcacagcccatcatgggcaccc

SEQ ID NO: 5591121 - DNA, 25 bp, Homo sapien
atcatgggcacccatcaggacccga

SEQ ID NO: 5591122 - DNA, 25 bp, Homo sapien
tgagagttttagtcagaaagaaggg

SEQ ID NO: 5591123 - DNA, 25 bp, Homo sapien
gactgtccaagttctgtgcaagagt

SEQ ID NO: 5591124 - DNA, 25 bp, Homo sapien
agtgtgcatcgagtattctgaccat

SEQ ID NO: 5591125 - DNA, 25 bp, Homo sapien
ctaggtgctatggatgcatctagat

SEQ ID NO: 5591126 - DNA, 25 bp, Homo sapien
ggtgagccttcactaggtgctatgg

SEQ ID NO: 5591127 - DNA, 25 bp, Homo sapien
gtagagagttgtatcagtgtgcatc

SEQ ID NO: 5591128 - DNA, 25 bp, Homo sapien
ttctgaccatatggtgagccttcac

SEQ ID NO: 5591129 - DNA, 25 bp, Homo sapien
gtgcaagagtaaagtaacatttgtc

SEQ ID NO: 5591130 - DNA, 25 bp, Homo sapien
tctcctaggaacctggaaataaaga

SEQ ID NO: 5591131 - DNA, 25 bp, Homo sapien
agatggatgtagagagttgtatcag

SEQ ID NO: 5591132 - DNA, 25 bp, Homo sapien
agaattaaaaccctaatggagcaac

SEQ ID NO: 5591133 - DNA, 25 bp, Homo sapien
aaatacaacaatatagaaagcaatt

SEQ ID NO: 5591134 - DNA, 25 bp, Homo sapien
gccaccctgactggattacaggtct

SEQ ID NO: 5591135 - DNA, 25 bp, Homo sapien
catgagccaccctgactggattaca

SEQ ID NO: 5591136 - DNA, 25 bp, Homo sapien
caggtggataaacactggttaaatc

SEQ ID NO: 5591137 - DNA, 25 bp, Homo sapien
agaaagcaattaatggtaacatgat

SEQ ID NO: 5591138 - DNA, 25 bp, Homo sapien
atgattcactcctaagagatgtaaa

SEQ ID NO: 5591139 - DNA, 25 bp, Homo sapien
gatgtaaaaaggcaaattattaatg

SEQ ID NO: 5591140 - DNA, 25 bp, Homo sapien
tgtctttggtgaactgcacacacat

SEQ ID NO: 5591141 - DNA, 25 bp, Homo sapien
tttggtgaactgcacacacatgtat

SEQ ID NO: 5591142 - DNA, 25 bp, Homo sapien
tacaatatggaaacattaattttgc

SEQ ID NO: 5591143 - DNA, 25 bp, Homo sapien
tacaggtcttaacaggtggataaac

SEQ ID NO: 5591144 - DNA, 25 bp, Homo sapien
aatatcataattctgggggggttgg

SEQ ID NO: 5591145 - DNA, 25 bp, Homo sapien
agtagggagcatgcttaccaaaagc

SEQ ID NO: 5591146 - DNA, 25 bp, Homo sapien
ggtttacccacagtagggagcatgc

SEQ ID NO: 5591147 - DNA, 25 bp, Homo sapien
agaggctggttactgcagtagaata

SEQ ID NO: 5591148 - DNA, 25 bp, Homo sapien
gaaaatctggcaggaaggttattag

SEQ ID NO: 5591149 - DNA, 25 bp, Homo sapien
tcatggagagtttttgactgcttcc

SEQ ID NO: 5591150 - DNA, 25 bp, Homo sapien
cctggatcaaaaaaagtgctacctc

SEQ ID NO: 5591151 - DNA, 25 bp, Homo sapien
aagctaaaatagacgtgaggaatat

SEQ ID NO: 5591152 - DNA, 25 bp, Homo sapien
tatctgatgttaaaagaagaggctg

SEQ ID NO: 5591153 - DNA, 25 bp, Homo sapien
ttaccaaaagcatgtgaagcattgc

SEQ ID NO: 5591154 - DNA, 25 bp, Homo sapien
acactagcagagaatgttagaaaga

SEQ ID NO: 5591155 - DNA, 25 bp, Homo sapien
agcaagaaattcgtcctagcggggg

SEQ ID NO: 5591156 - DNA, 25 bp, Homo sapien
gcccccctactcacaggaccagatc

SEQ ID NO: 5591157 - DNA, 25 bp, Homo sapien
cagaaaatgaggccacttccctgtg

SEQ ID NO: 5591158 - DNA, 25 bp, Homo sapien
ccccactcaggattcagccaacatc

SEQ ID NO: 5591159 - DNA, 25 bp, Homo sapien
ttttagactcaggttgtagacagcc

SEQ ID NO: 5591160 - DNA, 25 bp, Homo sapien
tggccaaatagcaggaatacacatg

SEQ ID NO: 5591161 - DNA, 25 bp, Homo sapien
ttctgaggatatgagagaatattgg

SEQ ID NO: 5591162 - DNA, 25 bp, Homo sapien
atacacatggccctagagatgcagt

SEQ ID NO: 5591163 - DNA, 25 bp, Homo sapien
gttctgcactctggctaagggatgg

SEQ ID NO: 5591164 - DNA, 25 bp, Homo sapien
acttccctgtggactgccgtaagaa

SEQ ID NO: 5591165 - DNA, 25 bp, Homo sapien
ggttgtagacagcccagctgaagtc

SEQ ID NO: 5591166 - DNA, 25 bp, Homo sapien
tccgcgttgcctcgccgctcgactg

SEQ ID NO: 5591167 - DNA, 25 bp, Homo sapien
cagtcgagcggcgaggcaacgcgga

SEQ ID NO: 5591168 - DNA, 25 bp, Homo sapien
gaaacatagggacagacctctgaca

SEQ ID NO: 5591169 - DNA, 25 bp, Homo sapien
tagggacagacctctgacatctgcc

SEQ ID NO: 5591170 - DNA, 25 bp, Homo sapien
aacatccaaccattatgacagattc

SEQ ID NO: 5591171 - DNA, 25 bp, Homo sapien
tcactgtgaacaatcaaggatcaac

SEQ ID NO: 5591172 - DNA, 25 bp, Homo sapien
caaggatcaactgacactgaaatac

SEQ ID NO: 5591173 - DNA, 25 bp, Homo sapien
aatactgccaagactgcacatattc

SEQ ID NO: 5591174 - DNA, 25 bp, Homo sapien
atgacagattctgacacccatgggg

SEQ ID NO: 5591175 - DNA, 25 bp, Homo sapien
ctccctgcctaactccatagctccc

SEQ ID NO: 5591176 - DNA, 25 bp, Homo sapien
gcctagattctcaagcctggctcac

SEQ ID NO: 5591177 - DNA, 25 bp, Homo sapien
taaggcattatatatcactgtgaac

SEQ ID NO: 5591178 - DNA, 25 bp, Homo sapien
gtggcagtcatggtggaattcttgc

SEQ ID NO: 5591179 - DNA, 25 bp, Homo sapien
taggaaagaataacaacttcaaggc

SEQ ID NO: 5591180 - DNA, 25 bp, Homo sapien
catcagggttctaataggaaagaat

SEQ ID NO: 5591181 - DNA, 25 bp, Homo sapien
gggattccttgaaagagtacgtgcc

SEQ ID NO: 5591182 - DNA, 25 bp, Homo sapien
tatctctaagccaaagtgtaatttc

SEQ ID NO: 5591183 - DNA, 25 bp, Homo sapien
gagtacgtgcccatgaaaagatcat

SEQ ID NO: 5591184 - DNA, 25 bp, Homo sapien
atgttgtctcagatccaaagtgaat

SEQ ID NO: 5591185 - DNA, 25 bp, Homo sapien
acagaaaccacttgtgatgtaacat

SEQ ID NO: 5591186 - DNA, 25 bp, Homo sapien
ccatgaaaagatcatctggtgctgc

SEQ ID NO: 5591187 - DNA, 25 bp, Homo sapien
aatttcactgagctccatgggattc

SEQ ID NO: 5591188 - DNA, 25 bp, Homo sapien
gagcagctggctaggccttcttgga

SEQ ID NO: 5591189 - DNA, 25 bp, Homo sapien
gagaccttggattaataacaggatc

SEQ ID NO: 5591190 - DNA, 25 bp, Homo sapien
ctgagagcaccctgacatgaacata

SEQ ID NO: 5591191 - DNA, 25 bp, Homo sapien
tcacagttcataacagacaaaaaca

SEQ ID NO: 5591192 - DNA, 25 bp, Homo sapien
aagtcctagacttgcactctgcttg

SEQ ID NO: 5591193 - DNA, 25 bp, Homo sapien
taggaaagtgtccagtgccccaatt

SEQ ID NO: 5591194 - DNA, 25 bp, Homo sapien
ctaaagcaacctaaaagaattcatt

SEQ ID NO: 5591195 - DNA, 25 bp, Homo sapien
cattttcctgagagcaccctgacat

SEQ ID NO: 5591196 - DNA, 25 bp, Homo sapien
tatgtgtgaggccaatcacagttca

SEQ ID NO: 5591197 - DNA, 25 bp, Homo sapien
cattcttcaaaggaaatcatgattc

SEQ ID NO: 5591198 - DNA, 25 bp, Homo sapien
atagaagaatataggaaagtgtcca

SEQ ID NO: 5591199 - DNA, 25 bp, Homo sapien
aaagtaacacattcctaaagcaacc

SEQ ID NO: 5591200 - DNA, 25 bp, Homo sapien
ttggtgagactccaaataagtccta

SEQ ID NO: 5591201 - DNA, 25 bp, Homo sapien
tgagacaatcaccttccatccaggg

SEQ ID NO: 5591202 - DNA, 25 bp, Homo sapien
ccacacacagactgcccttgtgctc

SEQ ID NO: 5591203 - DNA, 25 bp, Homo sapien
ccttgtgctcatctagggccacagg

SEQ ID NO: 5591204 - DNA, 25 bp, Homo sapien
ggtcgatcaccgaagaaggtctaag

SEQ ID NO: 5591205 - DNA, 25 bp, Homo sapien
agagcagaccaccttgagacaatca

SEQ ID NO: 5591206 - DNA, 25 bp, Homo sapien
gggatggtacaggaatccaggttaa

SEQ ID NO: 5591207 - DNA, 25 bp, Homo sapien
ttgcccatatccagccagaatccac

SEQ ID NO: 5591208 - DNA, 25 bp, Homo sapien
tcctgctggaactcgccattgccca

SEQ ID NO: 5591209 - DNA, 25 bp, Homo sapien
cacgtagcatattgatgtaatccat

SEQ ID NO: 5591210 - DNA, 25 bp, Homo sapien
aggcaggagattaaattctctgacc

SEQ ID NO: 5591211 - DNA, 25 bp, Homo sapien
agttcaccatggtcaagagcagggt

SEQ ID NO: 5591212 - DNA, 25 bp, Homo sapien
acccttcagcaagaaggacccaggg

SEQ ID NO: 5591213 - DNA, 25 bp, Homo sapien
agtccagtccaagaatcccagtaac

SEQ ID NO: 5591214 - DNA, 25 bp, Homo sapien
agagtcaaagtaacatgggctttta

SEQ ID NO: 5591215 - DNA, 25 bp, Homo sapien
tcaggacagcttggacccttcagca

SEQ ID NO: 5591216 - DNA, 25 bp, Homo sapien
cttggtggcttaatatagaagagtc

SEQ ID NO: 5591217 - DNA, 25 bp, Homo sapien
gtctggggactcttcgtgtcacgta

SEQ ID NO: 5591218 - DNA, 25 bp, Homo sapien
atattgtaattcggtggttctgggc

SEQ ID NO: 5591219 - DNA, 25 bp, Homo sapien
atttcatgagagtttagggaagtgt

SEQ ID NO: 5591220 - DNA, 25 bp, Homo sapien
ggttgttacaggtgagatgccatta

SEQ ID NO: 5591221 - DNA, 25 bp, Homo sapien
ttcaagaggatgatttatgtctggg

SEQ ID NO: 5591222 - DNA, 25 bp, Homo sapien
ttcaacaatgaacaacgactaaggt

SEQ ID NO: 5591223 - DNA, 25 bp, Homo sapien
cacagaggctgactcataatgcact

SEQ ID NO: 5591224 - DNA, 25 bp, Homo sapien
ccttctttcgtgatagtccagcttc

SEQ ID NO: 5591225 - DNA, 25 bp, Homo sapien
gactaggccatcttgcaaccatgag

SEQ ID NO: 5591226 - DNA, 25 bp, Homo sapien
gaatcctcaccactgacaactagcc

SEQ ID NO: 5591227 - DNA, 25 bp, Homo sapien
tagtccagcttctaaaagagccaaa

SEQ ID NO: 5591228 - DNA, 25 bp, Homo sapien
aaattaccaacagggtcaaggtcta

SEQ ID NO: 5591229 - DNA, 25 bp, Homo sapien
tacactatataagggcaagagaagg

SEQ ID NO: 5591230 - DNA, 25 bp, Homo sapien
gggtcaaggtctaaaagccagttga

SEQ ID NO: 5591231 - DNA, 25 bp, Homo sapien
aagagccaaatagaaaaatatcacc

SEQ ID NO: 5591232 - DNA, 25 bp, Homo sapien
gtgggtgtaatgactaggccatctt

SEQ ID NO: 5591233 - DNA, 25 bp, Homo sapien
gacaactagccagcaaccacctact

SEQ ID NO: 5591234 - DNA, 25 bp, Homo sapien
aagtgaggctcgaagtcatacatct

SEQ ID NO: 5591235 - DNA, 25 bp, Homo sapien
tcaacactgtgctgtcctgcttccc

SEQ ID NO: 5591236 - DNA, 25 bp, Homo sapien
agttaccactggcgtgtgaactgag

SEQ ID NO: 5591237 - DNA, 25 bp, Homo sapien
gacgtgtcctgttagcgacagagtg

SEQ ID NO: 5591238 - DNA, 25 bp, Homo sapien
tgtgctttgcacacatgggtgtatt

SEQ ID NO: 5591239 - DNA, 25 bp, Homo sapien
agaagctgagatgaaccagtcattc

SEQ ID NO: 5591240 - DNA, 25 bp, Homo sapien
agaggtaagggactgttttccagct

SEQ ID NO: 5591241 - DNA, 25 bp, Homo sapien
catctgccaggagacgcttctcaga

SEQ ID NO: 5591242 - DNA, 25 bp, Homo sapien
gagtgattgagggtttcatctgcca

SEQ ID NO: 5591243 - DNA, 25 bp, Homo sapien
gtctggctccaaaacccatgtcctt

SEQ ID NO: 5591244 - DNA, 25 bp, Homo sapien
agacgcttctcagaggtaagggact

SEQ ID NO: 5591245 - DNA, 25 bp, Homo sapien
gacagaactgggactagaatctaag

SEQ ID NO: 5591246 - DNA, 25 bp, Homo sapien
ttgaggcataggattctgagattat

SEQ ID NO: 5591247 - DNA, 25 bp, Homo sapien
taaatggtactgttgtgatcctcta

SEQ ID NO: 5591248 - DNA, 25 bp, Homo sapien
caaaaaagtatgtcaaaattgccac

SEQ ID NO: 5591249 - DNA, 25 bp, Homo sapien
gagagctgtaatcaggaacaacttc

SEQ ID NO: 5591250 - DNA, 25 bp, Homo sapien
tcaaagttttgaggcataggattct

SEQ ID NO: 5591251 - DNA, 25 bp, Homo sapien
cactgaacggaaaactaaatggtac

SEQ ID NO: 5591252 - DNA, 25 bp, Homo sapien
catcagtcagcaaatcaaagggaga

SEQ ID NO: 5591253 - DNA, 25 bp, Homo sapien
agatccagagatccaagtactcttc

SEQ ID NO: 5591254 - DNA, 25 bp, Homo sapien
ggagaacagataagagagctgtaat

SEQ ID NO: 5591255 - DNA, 25 bp, Homo sapien
agctgttaagtgacagaactgggac

SEQ ID NO: 5591256 - DNA, 25 bp, Homo sapien
gaacatttacacaccaaacagcttc

SEQ ID NO: 5591257 - DNA, 25 bp, Homo sapien
taggaagaaaagtgccttccctgac

SEQ ID NO: 5591258 - DNA, 25 bp, Homo sapien
gtcagaaaccttaaagtgagtcaac

SEQ ID NO: 5591259 - DNA, 25 bp, Homo sapien
gtactttctggaaacagtttgttgc

SEQ ID NO: 5591260 - DNA, 25 bp, Homo sapien
aaacagcttcaaatatggtactttc

SEQ ID NO: 5591261 - DNA, 25 bp, Homo sapien
agttacaatgtaatccaggaaagac

SEQ ID NO: 5591262 - DNA, 25 bp, Homo sapien
ataatgttctgtaacgtaaagggga

SEQ ID NO: 5591263 - DNA, 25 bp, Homo sapien
attttggtggagattcatgaattag

SEQ ID NO: 5591264 - DNA, 25 bp, Homo sapien
tgatggtggcaggactctattcatc

SEQ ID NO: 5591265 - DNA, 25 bp, Homo sapien
tccaggaaagacactgttatggcac

SEQ ID NO: 5591266 - DNA, 25 bp, Homo sapien
taaagtgagtcaacccaagatttgc

SEQ ID NO: 5591267 - DNA, 25 bp, Homo sapien
ctcggattcttaagagtgaaaaggg

SEQ ID NO: 5591268 - DNA, 25 bp, Homo sapien
cagtgcacgcactttgaggtttgtg

SEQ ID NO: 5591269 - DNA, 25 bp, Homo sapien
gcggtgttcccaaagccaccagcgc

SEQ ID NO: 5591270 - DNA, 25 bp, Homo sapien
gtaaataaagtaaagaggatgatgt

SEQ ID NO: 5591271 - DNA, 25 bp, Homo sapien
gccggctcacccatcatgcaggaga

SEQ ID NO: 5591272 - DNA, 25 bp, Homo sapien
ctaggagtcaactacttgcggcagt

SEQ ID NO: 5591273 - DNA, 25 bp, Homo sapien
gggatcacaacgctctaggagtcaa

SEQ ID NO: 5591274 - DNA, 25 bp, Homo sapien
ctcctgtgagaatgttgccaaacgc

SEQ ID NO: 5591275 - DNA, 25 bp, Homo sapien
agggaaaccggtgatttactcctgc

SEQ ID NO: 5591276 - DNA, 25 bp, Homo sapien
tgcaggagagcctcctctgactcct

SEQ ID NO: 5591277 - DNA, 25 bp, Homo sapien
tgccaaacgcatctgaccctcggat

SEQ ID NO: 5591278 - DNA, 25 bp, Homo sapien
caagggcttgttgacagaactctga

SEQ ID NO: 5591279 - DNA, 25 bp, Homo sapien
aactggcgagtctccaagttgagtg

SEQ ID NO: 5591280 - DNA, 25 bp, Homo sapien
tgagtggcccagcattaataagccc

SEQ ID NO: 5591281 - DNA, 25 bp, Homo sapien
ttcctgagtcatggctctgagtggc

SEQ ID NO: 5591282 - DNA, 25 bp, Homo sapien
aatccagaaacctaacaaaggcatt

SEQ ID NO: 5591283 - DNA, 25 bp, Homo sapien
ataagcccagcgtgcaagggcttgt

SEQ ID NO: 5591284 - DNA, 25 bp, Homo sapien
aggcccacacaatgagatctgcaaa

SEQ ID NO: 5591285 - DNA, 25 bp, Homo sapien
ggtcagaacatgagaacagagacca

SEQ ID NO: 5591286 - DNA, 25 bp, Homo sapien
agctgattagaaaaaactggcgagt

SEQ ID NO: 5591287 - DNA, 25 bp, Homo sapien
tttcctcctaaagcaggcccacaca

SEQ ID NO: 5591288 - DNA, 25 bp, Homo sapien
cagtgttgaccccaagccatgttcc

SEQ ID NO: 5591289 - DNA, 25 bp, Homo sapien
atagcagaagtaaatgacagaaatg

SEQ ID NO: 5591290 - DNA, 25 bp, Homo sapien
ccaccccatgggctaaaaggatgga

SEQ ID NO: 5591291 - DNA, 25 bp, Homo sapien
tcatgacatgtaggagaagtacaag

SEQ ID NO: 5591292 - DNA, 25 bp, Homo sapien
gggctttgaagagcaggtattgaca

SEQ ID NO: 5591293 - DNA, 25 bp, Homo sapien
agtacagaactgaggctctggatga

SEQ ID NO: 5591294 - DNA, 25 bp, Homo sapien
gcaggtattgacatgtggcagagat

SEQ ID NO: 5591295 - DNA, 25 bp, Homo sapien
gcagagattgggttcatagaacatg

SEQ ID NO: 5591296 - DNA, 25 bp, Homo sapien
agcaccaggatgactgggaatgtct

SEQ ID NO: 5591297 - DNA, 25 bp, Homo sapien
gagttctcagtaaatccaaggtcct

SEQ ID NO: 5591298 - DNA, 25 bp, Homo sapien
ttagatccagaggacttggcacaaa

SEQ ID NO: 5591299 - DNA, 25 bp, Homo sapien
taagccgtggattataagtagaatt

SEQ ID NO: 5591300 - DNA, 25 bp, Homo sapien
tgttagagggaaatggcataactta

SEQ ID NO: 5591301 - DNA, 25 bp, Homo sapien
ctgcagtagaagaatcccctttgtg

SEQ ID NO: 5591302 - DNA, 25 bp, Homo sapien
tctcccggactacagtcagacgcac

SEQ ID NO: 5591303 - DNA, 25 bp, Homo sapien
agacgcactctttttccgcagcctc

SEQ ID NO: 5591304 - DNA, 25 bp, Homo sapien
tccgcagcctcagcatgcttacgtg

SEQ ID NO: 5591305 - DNA, 25 bp, Homo sapien
cctcactctgactctgccttagctt

SEQ ID NO: 5591306 - DNA, 25 bp, Homo sapien
tccctgcatgtaagtctagatttct

SEQ ID NO: 5591307 - DNA, 25 bp, Homo sapien
agcatgcttacgtgacagaagcggt

SEQ ID NO: 5591308 - DNA, 25 bp, Homo sapien
tgtgtaccggaagctctttcaaacc

SEQ ID NO: 5591309 - DNA, 25 bp, Homo sapien
gaagcggttggatgcttctgtgttc

SEQ ID NO: 5591310 - DNA, 25 bp, Homo sapien
gagggaaatggcataacttaccgtc

SEQ ID NO: 5591311 - DNA, 25 bp, Homo sapien
accattgacaacagtagaaaatata

SEQ ID NO: 5591312 - DNA, 25 bp, Homo sapien
ggaaagtgtggtatttgtgaatgga

SEQ ID NO: 5591313 - DNA, 25 bp, Homo sapien
tgtgaatggataacaatggaacaga

SEQ ID NO: 5591314 - DNA, 25 bp, Homo sapien
aaaactgaaccttgacccataagct

SEQ ID NO: 5591315 - DNA, 25 bp, Homo sapien
gatttttgagacggacgaagttgta

SEQ ID NO: 5591316 - DNA, 25 bp, Homo sapien
agaataggcagcccagaattagacc

SEQ ID NO: 5591317 - DNA, 25 bp, Homo sapien
aggatctgtatgctgaaagtggaaa

SEQ ID NO: 5591318 - DNA, 25 bp, Homo sapien
actcaacagatatactagcagaatt

SEQ ID NO: 5591319 - DNA, 25 bp, Homo sapien
gacggacgaagttgtacacactatc

SEQ ID NO: 5591320 - DNA, 25 bp, Homo sapien
cctatgattaggaaagtgtggtatt

SEQ ID NO: 5591321 - DNA, 25 bp, Homo sapien
gacaaaatattgtgaggatgtaaat

SEQ ID NO: 5591322 - DNA, 25 bp, Homo sapien
cttaatactcaatggttatagaacc

SEQ ID NO: 5591323 - DNA, 25 bp, Homo sapien
tgtcttcaaaaatccacccagtggg

SEQ ID NO: 5591324 - DNA, 25 bp, Homo sapien
acctagccaacaggacagcatatcc

SEQ ID NO: 5591325 - DNA, 25 bp, Homo sapien
atagaaccaaacgtacaaatgtgcc

SEQ ID NO: 5591326 - DNA, 25 bp, Homo sapien
ttatcctgaaacagatgagtaaaca

SEQ ID NO: 5591327 - DNA, 25 bp, Homo sapien
cagagatcagtaaatactgtccgca

SEQ ID NO: 5591328 - DNA, 25 bp, Homo sapien
caagaaagcagctaacccctagggt

SEQ ID NO: 5591329 - DNA, 25 bp, Homo sapien
cacccagtgggatctaaacagagat

SEQ ID NO: 5591330 - DNA, 25 bp, Homo sapien
agggtacaagaaacctagccaacag

SEQ ID NO: 5591331 - DNA, 25 bp, Homo sapien
agacatatcagcatgcaagagtttc

SEQ ID NO: 5591332 - DNA, 25 bp, Homo sapien
aataccactaagaggcaagaaagca

SEQ ID NO: 5591333 - DNA, 25 bp, Homo sapien
tgataaagcacattaaaacagtttt

SEQ ID NO: 5591334 - DNA, 25 bp, Homo sapien
tttgttcactatgtcaggttggtct

SEQ ID NO: 5591335 - DNA, 25 bp, Homo sapien
ggtcttgctgaagccaatgactggc

SEQ ID NO: 5591336 - DNA, 25 bp, Homo sapien
tcatagaagataaagaaaagtcaat

SEQ ID NO: 5591337 - DNA, 25 bp, Homo sapien
tctgacaaaatagttagcctgaaat

SEQ ID NO: 5591338 - DNA, 25 bp, Homo sapien
caatgactggcttctgacaaaatag

SEQ ID NO: 5591339 - DNA, 25 bp, Homo sapien
ttaaggcagatgcttgtctgtgcaa

SEQ ID NO: 5591340 - DNA, 25 bp, Homo sapien
atttcggtaatggttaattgggcca

SEQ ID NO: 5591341 - DNA, 25 bp, Homo sapien
tgcaaaatacaccagaagaaaatca

SEQ ID NO: 5591342 - DNA, 25 bp, Homo sapien
atctcaacctccatgaatgcgtcat

SEQ ID NO: 5591343 - DNA, 25 bp, Homo sapien
gcaggcagctgaagatatttcggta

SEQ ID NO: 5591344 - DNA, 25 bp, Homo sapien
aaggtaatgggatagctttggatga

SEQ ID NO: 5591345 - DNA, 25 bp, Homo sapien
gttatgtgggctagtcaaaacagat

SEQ ID NO: 5591346 - DNA, 25 bp, Homo sapien
atggacataaataaggtaatgggat

SEQ ID NO: 5591347 - DNA, 25 bp, Homo sapien
atgaaaaatgtgtaggttatgtggg

SEQ ID NO: 5591348 - DNA, 25 bp, Homo sapien
aaacttgacaggcagccacaacctt

SEQ ID NO: 5591349 - DNA, 25 bp, Homo sapien
tctgagattaagtcctggatatgac

SEQ ID NO: 5591350 - DNA, 25 bp, Homo sapien
gggaagtacagatggcaatcaaatg

SEQ ID NO: 5591351 - DNA, 25 bp, Homo sapien
atctggaaggctcatttgtgattta

SEQ ID NO: 5591352 - DNA, 25 bp, Homo sapien
agcaaagctgcttcaagggaagtac

SEQ ID NO: 5591353 - DNA, 25 bp, Homo sapien
ttatgatgatggaaaaaactgcact

SEQ ID NO: 5591354 - DNA, 25 bp, Homo sapien
caggtgtggctgtaataagcaaagc

SEQ ID NO: 5591355 - DNA, 25 bp, Homo sapien
tcagaagtaggatccaaagtataac

SEQ ID NO: 5591356 - DNA, 25 bp, Homo sapien
cagccaaccataggctgaaggctgc

SEQ ID NO: 5591357 - DNA, 25 bp, Homo sapien
acaaactggtgtcagaagtaggatc

SEQ ID NO: 5591358 - DNA, 25 bp, Homo sapien
tagtgctggttccaaaggtgacctt

SEQ ID NO: 5591359 - DNA, 25 bp, Homo sapien
aaaacatgtccaaagaaggcagacg

SEQ ID NO: 5591360 - DNA, 25 bp, Homo sapien
cctgcaacctgatgtaagagtctac

SEQ ID NO: 5591361 - DNA, 25 bp, Homo sapien
acaagtagtcagatctcagccaacc

SEQ ID NO: 5591362 - DNA, 25 bp, Homo sapien
ggctgaaggctgccaaaacatgtcc

SEQ ID NO: 5591363 - DNA, 25 bp, Homo sapien
caaagtataacttccggacgcgtgg

SEQ ID NO: 5591364 - DNA, 25 bp, Homo sapien
cagggaccccctcaacaattagtgc

SEQ ID NO: 5591365 - DNA, 25 bp, Homo sapien
gccagtcaggctatctctgtatgcc

SEQ ID NO: 5591366 - DNA, 25 bp, Homo sapien
tcccttgaagtcaaaaggagccgca

SEQ ID NO: 5591367 - DNA, 25 bp, Homo sapien
gagatatagtccaaagatgaagcac

SEQ ID NO: 5591368 - DNA, 25 bp, Homo sapien
agagggccacagactactaagtgag

SEQ ID NO: 5591369 - DNA, 25 bp, Homo sapien
ggtgacatattgggactggatcttc

SEQ ID NO: 5591370 - DNA, 25 bp, Homo sapien
cttggtcaaaggatcaagctgagag

SEQ ID NO: 5591371 - DNA, 25 bp, Homo sapien
ttgacacgtaaacacctgagatata

SEQ ID NO: 5591372 - DNA, 25 bp, Homo sapien
agtaagctcccattagttgacacgt

SEQ ID NO: 5591373 - DNA, 25 bp, Homo sapien
gactactaagtgaggattgaaactc

SEQ ID NO: 5591374 - DNA, 25 bp, Homo sapien
gaagtcaaaaggagccgcattctcc

SEQ ID NO: 5591375 - DNA, 25 bp, Homo sapien
ccaggactggaatctgggcatctgg

SEQ ID NO: 5591376 - DNA, 25 bp, Homo sapien
cattctcccatttgccagaggtgca

SEQ ID NO: 5591377 - DNA, 25 bp, Homo sapien
taccagggctaatcctgagagactt

SEQ ID NO: 5591378 - DNA, 25 bp, Homo sapien
gacagtcagctacaaggtcagtggg

SEQ ID NO: 5591379 - DNA, 25 bp, Homo sapien
gagagacttgattcccaacacgttc

SEQ ID NO: 5591380 - DNA, 25 bp, Homo sapien
ttgcaccacatggtagagatgccac

SEQ ID NO: 5591381 - DNA, 25 bp, Homo sapien
ataaaaggagggatcacatcaaata

SEQ ID NO: 5591382 - DNA, 25 bp, Homo sapien
ctccaagcagaagttaaaagggtat

SEQ ID NO: 5591383 - DNA, 25 bp, Homo sapien
tttgagttcagggctatgattgcac

SEQ ID NO: 5591384 - DNA, 25 bp, Homo sapien
atgagttatgcgagattccagtggg

SEQ ID NO: 5591385 - DNA, 25 bp, Homo sapien
gggaagagataatgcattttgggag

SEQ ID NO: 5591386 - DNA, 25 bp, Homo sapien
ctggcaaggaaaagttctgacagtc

SEQ ID NO: 5591387 - DNA, 25 bp, Homo sapien
gtctagcgtcatcaggtgtgctcac

SEQ ID NO: 5591388 - DNA, 25 bp, Homo sapien
ggttgtcacccacacaatgccaaat

SEQ ID NO: 5591389 - DNA, 25 bp, Homo sapien
caactggttgtcacccacacaatgc

SEQ ID NO: 5591390 - DNA, 25 bp, Homo sapien
aattagtttaatttgagcgacctca

SEQ ID NO: 5591391 - DNA, 25 bp, Homo sapien
atatggccacatagctgataaaaag

SEQ ID NO: 5591392 - DNA, 25 bp, Homo sapien
ctggaatagattacaggtagaaaag

SEQ ID NO: 5591393 - DNA, 25 bp, Homo sapien
ctcactacattacccaagctggact

SEQ ID NO: 5591394 - DNA, 25 bp, Homo sapien
ggaatagattacaggtagaaaagag

SEQ ID NO: 5591395 - DNA, 25 bp, Homo sapien
agaaaacatttcaactggttgtcac

SEQ ID NO: 5591396 - DNA, 25 bp, Homo sapien
ttagcacctggaatagattacaggt

SEQ ID NO: 5591397 - DNA, 25 bp, Homo sapien
gccacatagctgataaaaagaaaac

SEQ ID NO: 5591398 - DNA, 25 bp, Homo sapien
aagctggactttcacagttcttagc

SEQ ID NO: 5591399 - DNA, 25 bp, Homo sapien
gcttctgcccagaagtgaccctcgg

SEQ ID NO: 5591400 - DNA, 25 bp, Homo sapien
ggtttcaactggagagctgcttcta

SEQ ID NO: 5591401 - DNA, 25 bp, Homo sapien
tcacatgttacaggtgcccaggaga

SEQ ID NO: 5591402 - DNA, 25 bp, Homo sapien
cgacctaacctcccagcaggcagcg

SEQ ID NO: 5591403 - DNA, 25 bp, Homo sapien
cttctatgtggcaacctggacccag

SEQ ID NO: 5591404 - DNA, 25 bp, Homo sapien
gggagcttctgtgacctggcaagct

SEQ ID NO: 5591405 - DNA, 25 bp, Homo sapien
tgctcatcgcttaggaccccaggct

SEQ ID NO: 5591406 - DNA, 25 bp, Homo sapien
acatatccattgtgggttggtgggg

SEQ ID NO: 5591407 - DNA, 25 bp, Homo sapien
aggcagcgcatcacatgttacaggt

SEQ ID NO: 5591408 - DNA, 25 bp, Homo sapien
ctatctcccaggactgagctcgaca

SEQ ID NO: 5591409 - DNA, 25 bp, Homo sapien
tttgtcaacaaagacgaccacggag

SEQ ID NO: 5591410 - DNA, 25 bp, Homo sapien
cacacaaagcatataagaaaagcag

SEQ ID NO: 5591411 - DNA, 25 bp, Homo sapien
gaattcagcagacaaatgaacattt

SEQ ID NO: 5591412 - DNA, 25 bp, Homo sapien
caaatgctccctgaattcagcagac

SEQ ID NO: 5591413 - DNA, 25 bp, Homo sapien
atagactcttcagaaccagaggtac

SEQ ID NO: 5591414 - DNA, 25 bp, Homo sapien
tcaggtatagaaattaactcagctt

SEQ ID NO: 5591415 - DNA, 25 bp, Homo sapien
gaactcagccttgggaatactgaac

SEQ ID NO: 5591416 - DNA, 25 bp, Homo sapien
cagaggtacagtggatatttctcat

SEQ ID NO: 5591417 - DNA, 25 bp, Homo sapien
cagtgttggccgactatagactctt

SEQ ID NO: 5591418 - DNA, 25 bp, Homo sapien
ttcagaaccagaggtacagtggata

SEQ ID NO: 5591419 - DNA, 25 bp, Homo sapien
cagccttgggaatactgaactattt

SEQ ID NO: 5591420 - DNA, 25 bp, Homo sapien
cacattcacagtgttggccgactat

SEQ ID NO: 5591421 - DNA, 25 bp, Homo sapien
acaaatgtctatgcagctaatggga

SEQ ID NO: 5591422 - DNA, 25 bp, Homo sapien
agaggggtcccttggatatcttggt

SEQ ID NO: 5591423 - DNA, 25 bp, Homo sapien
ctaatgggataggaccttggtgtta

SEQ ID NO: 5591424 - DNA, 25 bp, Homo sapien
aagaaacatatctgtggtggccagc

SEQ ID NO: 5591425 - DNA, 25 bp, Homo sapien
tgctactctatgaggagaagtgccc

SEQ ID NO: 5591426 - DNA, 25 bp, Homo sapien
gagaagtgcccttgaaaacaaatgt

SEQ ID NO: 5591427 - DNA, 25 bp, Homo sapien
tttggacaagaaacatatctgtggt

SEQ ID NO: 5591428 - DNA, 25 bp, Homo sapien
gccagcatggatgaatatcagaggg

SEQ ID NO: 5591429 - DNA, 25 bp, Homo sapien
atatcagaggggtcccttggatatc

SEQ ID NO: 5591430 - DNA, 25 bp, Homo sapien
taggaccttggtgttagatttgata

SEQ ID NO: 5591431 - DNA, 25 bp, Homo sapien
tctgggacttttgtgctactctatg

SEQ ID NO: 5591432 - DNA, 25 bp, Homo sapien
ttatatctgtggtatgacaatcata

SEQ ID NO: 5591433 - DNA, 25 bp, Homo sapien
tacaatgagagcttttcaaatattc

SEQ ID NO: 5591434 - DNA, 25 bp, Homo sapien
cacaggggccgtcttggcccttcct

SEQ ID NO: 5591435 - DNA, 25 bp, Homo sapien
ggactcagttcagcacctagcaaga

SEQ ID NO: 5591436 - DNA, 25 bp, Homo sapien
aataaataaagtaacatgatctttc

SEQ ID NO: 5591437 - DNA, 25 bp, Homo sapien
atagccatttgaactaggactcagt

SEQ ID NO: 5591438 - DNA, 25 bp, Homo sapien
cttccctgggtataacacaggggcc

SEQ ID NO: 5591439 - DNA, 25 bp, Homo sapien
cttggaatgcaaggtctcctaatca

SEQ ID NO: 5591440 - DNA, 25 bp, Homo sapien
gttcagcacctagcaagaaagacag

SEQ ID NO: 5591441 - DNA, 25 bp, Homo sapien
gtctcctaatcatgaagatgcaaac

SEQ ID NO: 5591442 - DNA, 25 bp, Homo sapien
ccaaggaattttcagccaggaagcg

SEQ ID NO: 5591443 - DNA, 25 bp, Homo sapien
ggccactggctgtgctgtcacatcc

SEQ ID NO: 5591444 - DNA, 25 bp, Homo sapien
gggtgacatggagtcccagatcttt

SEQ ID NO: 5591445 - DNA, 25 bp, Homo sapien
gcagaactgacagagacatcatccc

SEQ ID NO: 5591446 - DNA, 25 bp, Homo sapien
ggccctgcttctgggctctgcttct

SEQ ID NO: 5591447 - DNA, 25 bp, Homo sapien
ggtaccaggccctgcttctgggctc

SEQ ID NO: 5591448 - DNA, 25 bp, Homo sapien
gtggcagcactcccagtgtctgggt

SEQ ID NO: 5591449 - DNA, 25 bp, Homo sapien
tgtgctgtcacatcctaagtggcag

SEQ ID NO: 5591450 - DNA, 25 bp, Homo sapien
gtgtctgggtgtcttctcaggggta

SEQ ID NO: 5591451 - DNA, 25 bp, Homo sapien
tctcccttgttaggcaggctgggta

SEQ ID NO: 5591452 - DNA, 25 bp, Homo sapien
gtccacaaagcctacaaattctccc

SEQ ID NO: 5591453 - DNA, 25 bp, Homo sapien
actgacagagacatcatcccccttc

SEQ ID NO: 5591454 - DNA, 25 bp, Homo sapien
ttcaacagttgtcagaggattgcga

SEQ ID NO: 5591455 - DNA, 25 bp, Homo sapien
gagatacggatcttcaacagttgtc

SEQ ID NO: 5591456 - DNA, 25 bp, Homo sapien
ccctgctggctatcttgaccattac

SEQ ID NO: 5591457 - DNA, 25 bp, Homo sapien
taaagagatacggatcttcaacagt

SEQ ID NO: 5591458 - DNA, 25 bp, Homo sapien
attagactccgtaaagcattattcc

SEQ ID NO: 5591459 - DNA, 25 bp, Homo sapien
ttcattttttggtatggaacttgtg

SEQ ID NO: 5591460 - DNA, 25 bp, Homo sapien
tcaatgtgtgaaactgcataagaag

SEQ ID NO: 5591461 - DNA, 25 bp, Homo sapien
aaatcaacattagactccgtaaagc

SEQ ID NO: 5591462 - DNA, 25 bp, Homo sapien
actgcataagaagtttacattcatt

SEQ ID NO: 5591463 - DNA, 25 bp, Homo sapien
aaaagagtataaatcatctcatgac

SEQ ID NO: 5591464 - DNA, 25 bp, Homo sapien
atgactcccaagagtactatagtac

SEQ ID NO: 5591465 - DNA, 25 bp, Homo sapien
aagcagtcccgaatctcagggtggg

SEQ ID NO: 5591466 - DNA, 25 bp, Homo sapien
cctcacaatgggctcagggtagtga

SEQ ID NO: 5591467 - DNA, 25 bp, Homo sapien
tgtccttcctggctggtgacagaag

SEQ ID NO: 5591468 - DNA, 25 bp, Homo sapien
gaaggctggactgtgcctgaaatca

SEQ ID NO: 5591469 - DNA, 25 bp, Homo sapien
cctctagaatggatggccctgaggg

SEQ ID NO: 5591470 - DNA, 25 bp, Homo sapien
acggctgtgaggatggcctcacaat

SEQ ID NO: 5591471 - DNA, 25 bp, Homo sapien
ggatttgggcaaatcaagcagtccc

SEQ ID NO: 5591472 - DNA, 25 bp, Homo sapien
ggctcagggtagtgaacttctgtcc

SEQ ID NO: 5591473 - DNA, 25 bp, Homo sapien
gttatctcagaaatgaggccaactc

SEQ ID NO: 5591474 - DNA, 25 bp, Homo sapien
gtcttgacaagccaaggtcccaacc

SEQ ID NO: 5591475 - DNA, 25 bp, Homo sapien
agtagaaatataaggagtcacggct

SEQ ID NO: 5591476 - DNA, 25 bp, Homo sapien
cctctgcaaggtttcacagtgatgt

SEQ ID NO: 5591477 - DNA, 25 bp, Homo sapien
ttgctcaggctcagactcttttatg

SEQ ID NO: 5591478 - DNA, 25 bp, Homo sapien
tgttgtcagggaactttacttagat

SEQ ID NO: 5591479 - DNA, 25 bp, Homo sapien
tcacagtgatgtgcaacgtccactc

SEQ ID NO: 5591480 - DNA, 25 bp, Homo sapien
ctagctcaattgatccgcctccctc

SEQ ID NO: 5591481 - DNA, 25 bp, Homo sapien
acaagatgaaccaggcaatctcttc

SEQ ID NO: 5591482 - DNA, 25 bp, Homo sapien
tctgaaagagccactgagcagtttt

SEQ ID NO: 5591483 - DNA, 25 bp, Homo sapien
cttctgatgaacctgccctctcctc

SEQ ID NO: 5591484 - DNA, 25 bp, Homo sapien
gttttggaagactacaagatgaacc

SEQ ID NO: 5591485 - DNA, 25 bp, Homo sapien
atttaacacttaggaacaagaaatc

SEQ ID NO: 5591486 - DNA, 25 bp, Homo sapien
tgtactgattcaacatctgagattc

SEQ ID NO: 5591487 - DNA, 25 bp, Homo sapien
gtctccagtctaccctgagcagttc

SEQ ID NO: 5591488 - DNA, 25 bp, Homo sapien
agtacaaatgggaagaagctttgat

SEQ ID NO: 5591489 - DNA, 25 bp, Homo sapien
tcttaaggtgtttgaagcagaagaa

SEQ ID NO: 5591490 - DNA, 25 bp, Homo sapien
ctaccgacccacctacccataaatc

SEQ ID NO: 5591491 - DNA, 25 bp, Homo sapien
attgcacgtgtgttgagtatagcct

SEQ ID NO: 5591492 - DNA, 25 bp, Homo sapien
tgtcctagaactgaagtacaaatgg

SEQ ID NO: 5591493 - DNA, 25 bp, Homo sapien
accctgagcagttcttaaggtgttt

SEQ ID NO: 5591494 - DNA, 25 bp, Homo sapien
agagaaaagaggcttaggttatact

SEQ ID NO: 5591495 - DNA, 25 bp, Homo sapien
ccttgaactgagggtgaaattgaga

SEQ ID NO: 5591496 - DNA, 25 bp, Homo sapien
tctgccctggttttgcctcgcctgc

SEQ ID NO: 5591497 - DNA, 25 bp, Homo sapien
ctcttcaactaacctaccgacccac

SEQ ID NO: 5591498 - DNA, 25 bp, Homo sapien
attatggagtagcagatgcaaaatc

SEQ ID NO: 5591499 - DNA, 25 bp, Homo sapien
aaacattcgacaaacataagatacc

SEQ ID NO: 5591500 - DNA, 25 bp, Homo sapien
tctagaagcctaatttgtgtgtgca

SEQ ID NO: 5591501 - DNA, 25 bp, Homo sapien
tgtgtgtgcaactcaaacattcgac

SEQ ID NO: 5591502 - DNA, 25 bp, Homo sapien
tatgggtacattatgggcagaagat

SEQ ID NO: 5591503 - DNA, 25 bp, Homo sapien
tcaatgtgattgtgcataccacctt

SEQ ID NO: 5591504 - DNA, 25 bp, Homo sapien
agtggggataagtgatgttaatttt

SEQ ID NO: 5591505 - DNA, 25 bp, Homo sapien
caaagggtcacattgaactatgcct

SEQ ID NO: 5591506 - DNA, 25 bp, Homo sapien
ggactcctggagtacaagcacattt

SEQ ID NO: 5591507 - DNA, 25 bp, Homo sapien
ccaaatcaaggtatacagcagtggg

SEQ ID NO: 5591508 - DNA, 25 bp, Homo sapien
gaagactgcaaagaatcatagattt

SEQ ID NO: 5591509 - DNA, 25 bp, Homo sapien
atcaccagggtagttgagctctttg

SEQ ID NO: 5591510 - DNA, 25 bp, Homo sapien
ggggcctcccttaggtgacactgaa

SEQ ID NO: 5591511 - DNA, 25 bp, Homo sapien
acagaacactgaccaactgcggctg

SEQ ID NO: 5591512 - DNA, 25 bp, Homo sapien
cctcagcctgtgccctcagtggttc

SEQ ID NO: 5591513 - DNA, 25 bp, Homo sapien
gtgaaaatcctaggatgaccagccc

SEQ ID NO: 5591514 - DNA, 25 bp, Homo sapien
ggctgctcatggccactggacctca

SEQ ID NO: 5591515 - DNA, 25 bp, Homo sapien
caagttgaatcctgaaagcccagtg

SEQ ID NO: 5591516 - DNA, 25 bp, Homo sapien
tgaccagcccaccagaggtcctgta

SEQ ID NO: 5591517 - DNA, 25 bp, Homo sapien
caggggaccaggtactaactcatgt

SEQ ID NO: 5591518 - DNA, 25 bp, Homo sapien
gtcctgtagaggaaatgaactggac

SEQ ID NO: 5591519 - DNA, 25 bp, Homo sapien
gcaccatagagggtatgcctcgtgg

SEQ ID NO: 5591520 - DNA, 25 bp, Homo sapien
cccctagtaaacagcaggtaggaat

SEQ ID NO: 5591521 - DNA, 25 bp, Homo sapien
tgccaaaaataaacaacagcctctc

SEQ ID NO: 5591522 - DNA, 25 bp, Homo sapien
ttctagtggatggcagtccagtaac

SEQ ID NO: 5591523 - DNA, 25 bp, Homo sapien
gtttagacagacacaagcacaattt

SEQ ID NO: 5591524 - DNA, 25 bp, Homo sapien
agtacactgacttggacatgatctc

SEQ ID NO: 5591525 - DNA, 25 bp, Homo sapien
cagagctctctttggtggtagcatt

SEQ ID NO: 5591526 - DNA, 25 bp, Homo sapien
acctcttagatgcaatccgcctgtc

SEQ ID NO: 5591527 - DNA, 25 bp, Homo sapien
tgaaagggtactatgaacctggcca

SEQ ID NO: 5591528 - DNA, 25 bp, Homo sapien
gcagtgtgggcaacaccacctctta

SEQ ID NO: 5591529 - DNA, 25 bp, Homo sapien
tccgcctgtcttcaagtgagtctcc

SEQ ID NO: 5591530 - DNA, 25 bp, Homo sapien
gcaggtaggaatgggtttaatcata

SEQ ID NO: 5591531 - DNA, 25 bp, Homo sapien
atgcccagtaacatgggaggaacat

SEQ ID NO: 5591532 - DNA, 25 bp, Homo sapien
tctgccgcttccttgcctgccctga

SEQ ID NO: 5591533 - DNA, 25 bp, Homo sapien
gccctgtccacaaatgtcaaggagc

SEQ ID NO: 5591534 - DNA, 25 bp, Homo sapien
ggtgaacccagagccctgtccacaa

SEQ ID NO: 5591535 - DNA, 25 bp, Homo sapien
aattaactgatcaactaggacatgt

SEQ ID NO: 5591536 - DNA, 25 bp, Homo sapien
taggacatgtttgagcaaagctgcc

SEQ ID NO: 5591537 - DNA, 25 bp, Homo sapien
aattccccaaggcagagctggtttt

SEQ ID NO: 5591538 - DNA, 25 bp, Homo sapien
ttgagaacttcgcaaaaccagtaat

SEQ ID NO: 5591539 - DNA, 25 bp, Homo sapien
tttggaaatgaaatgaacgtttgaa

SEQ ID NO: 5591540 - DNA, 25 bp, Homo sapien
gtgcccagacatctctgccgcttcc

SEQ ID NO: 5591541 - DNA, 25 bp, Homo sapien
ctcggaaatgcctgccagctcagtg

SEQ ID NO: 5591542 - DNA, 25 bp, Homo sapien
ccagtactttgtgaggctgaggtgg

SEQ ID NO: 5591543 - DNA, 25 bp, Homo sapien
ttctatgtcccgtgccagtggctta

SEQ ID NO: 5591544 - DNA, 25 bp, Homo sapien
tacaaaacactttgtggggccaggc

SEQ ID NO: 5591545 - DNA, 25 bp, Homo sapien
agtggcttatacctgtaatcccagc

SEQ ID NO: 5591546 - DNA, 25 bp, Homo sapien
gaccaacctaggagacaaaacaaga

SEQ ID NO: 5591547 - DNA, 25 bp, Homo sapien
agctacctctgggaatgaaagaaca

SEQ ID NO: 5591548 - DNA, 25 bp, Homo sapien
ccccttaaattctatgtcccgtgcc

SEQ ID NO: 5591549 - DNA, 25 bp, Homo sapien
ccagcactttgtgaggctgaggtgg

SEQ ID NO: 5591550 - DNA, 25 bp, Homo sapien
gttcaagaccaacctaggagacaaa

SEQ ID NO: 5591551 - DNA, 25 bp, Homo sapien
tcgcttaaggtgaagagttcaagac

SEQ ID NO: 5591552 - DNA, 25 bp, Homo sapien
agaacagggaaaacaaaataactga

SEQ ID NO: 5591553 - DNA, 25 bp, Homo sapien
tagtaatttctttcaggaagagtcc

SEQ ID NO: 5591554 - DNA, 25 bp, Homo sapien
tgcacccttgtacactgaacttagt

SEQ ID NO: 5591555 - DNA, 25 bp, Homo sapien
ttcatcctgagtcttactggtttac

SEQ ID NO: 5591556 - DNA, 25 bp, Homo sapien
cacctttacaggtaaccaatgttta

SEQ ID NO: 5591557 - DNA, 25 bp, Homo sapien
gacttttaagtccagatcattttct

SEQ ID NO: 5591558 - DNA, 25 bp, Homo sapien
taggtgatcgtaaaaatgttccatt

SEQ ID NO: 5591559 - DNA, 25 bp, Homo sapien
tttcaagaattttaggtgatcgtaa

SEQ ID NO: 5591560 - DNA, 25 bp, Homo sapien
tactggtttactgcttaccaccatt

SEQ ID NO: 5591561 - DNA, 25 bp, Homo sapien
ttaagatcttcagtagattaatctc

SEQ ID NO: 5591562 - DNA, 25 bp, Homo sapien
tcaggaagagtccatgcacccttgt

SEQ ID NO: 5591563 - DNA, 25 bp, Homo sapien
ttctttcaggaagagtccatgcacc

SEQ ID NO: 5591564 - DNA, 25 bp, Homo sapien
agtatttggagcacaaaggacaaac

SEQ ID NO: 5591565 - DNA, 25 bp, Homo sapien
tttaggagcaagaccaactcaactg

SEQ ID NO: 5591566 - DNA, 25 bp, Homo sapien
aaccgcaaaccctaactacagtgac

SEQ ID NO: 5591567 - DNA, 25 bp, Homo sapien
ttgtgttggttgaggctcgcaaaga

SEQ ID NO: 5591568 - DNA, 25 bp, Homo sapien
gggaaaactagctcaaaggcaaaga

SEQ ID NO: 5591569 - DNA, 25 bp, Homo sapien
ttgcaggctaagaaaagcctagggg

SEQ ID NO: 5591570 - DNA, 25 bp, Homo sapien
ttacatagggaattcaagttgaagc

SEQ ID NO: 5591571 - DNA, 25 bp, Homo sapien
gggtaggggcttgtcaatgatttag

SEQ ID NO: 5591572 - DNA, 25 bp, Homo sapien
tcgcaaagatataaagctccctacc

SEQ ID NO: 5591573 - DNA, 25 bp, Homo sapien
ggcagcagcaatagatgattaaacc

SEQ ID NO: 5591574 - DNA, 25 bp, Homo sapien
agataaccaggatttttgcaggcta

SEQ ID NO: 5591575 - DNA, 25 bp, Homo sapien
gtctaaaccaggtgcagacaaaagc

SEQ ID NO: 5591576 - DNA, 25 bp, Homo sapien
cacaactctagctaagcagaggtga

SEQ ID NO: 5591577 - DNA, 25 bp, Homo sapien
tggctacctgcctgaagacaggacc

SEQ ID NO: 5591578 - DNA, 25 bp, Homo sapien
ccctggatactgcctggatgtgaac

SEQ ID NO: 5591579 - DNA, 25 bp, Homo sapien
ttcgagcagacaagatcacatcaca

SEQ ID NO: 5591580 - DNA, 25 bp, Homo sapien
tggatgtgaacttggacctgctgag

SEQ ID NO: 5591581 - DNA, 25 bp, Homo sapien
aatgacaacagtgctggatgaaagc

SEQ ID NO: 5591582 - DNA, 25 bp, Homo sapien
cctgaagacaggacctacaggaatg

SEQ ID NO: 5591583 - DNA, 25 bp, Homo sapien
caagacaatggccgggcttagtcat

SEQ ID NO: 5591584 - DNA, 25 bp, Homo sapien
cagacaaaagctcactaaccggtac

SEQ ID NO: 5591585 - DNA, 25 bp, Homo sapien
cacggaggagtcttccagacacttt

SEQ ID NO: 5591586 - DNA, 25 bp, Homo sapien
gccgagggaacgtggtccttcttca

SEQ ID NO: 5591587 - DNA, 25 bp, Homo sapien
tgaagaaggaccacgttccctcggc

SEQ ID NO: 5591588 - DNA, 25 bp, Homo sapien
aggactttgtagaaacagaactgat

SEQ ID NO: 5591589 - DNA, 25 bp, Homo sapien
caagctgttaaaggagacatcagtc

SEQ ID NO: 5591590 - DNA, 25 bp, Homo sapien
ctcagggcaaagataagtcttcacc

SEQ ID NO: 5591591 - DNA, 25 bp, Homo sapien
atgctgaatgggaatacaggacttt

SEQ ID NO: 5591592 - DNA, 25 bp, Homo sapien
aagtgccctgcagatctccctagaa

SEQ ID NO: 5591593 - DNA, 25 bp, Homo sapien
acacgtagcacacacatattcagcc

SEQ ID NO: 5591594 - DNA, 25 bp, Homo sapien
tccctagaatagaaaagcaccttga

SEQ ID NO: 5591595 - DNA, 25 bp, Homo sapien
gcagcaaaaggcacaagcttcagat

SEQ ID NO: 5591596 - DNA, 25 bp, Homo sapien
ttgagcagtgttatagcactcagcc

SEQ ID NO: 5591597 - DNA, 25 bp, Homo sapien
taggtctaatgtaggttaagtgccc

SEQ ID NO: 5591598 - DNA, 25 bp, Homo sapien
tagacacaaatataatgaaagcact

SEQ ID NO: 5591599 - DNA, 25 bp, Homo sapien
gcgttataagatcatgctggttacc

SEQ ID NO: 5591600 - DNA, 25 bp, Homo sapien
tggattgcagggaaagatgaatcca

SEQ ID NO: 5591601 - DNA, 25 bp, Homo sapien
ctggctgttgaggacgcccaataaa

SEQ ID NO: 5591602 - DNA, 25 bp, Homo sapien
ccacaggtcactggtgatcgccctg

SEQ ID NO: 5591603 - DNA, 25 bp, Homo sapien
taggtaaaaggagactccacaccac

SEQ ID NO: 5591604 - DNA, 25 bp, Homo sapien
ctggcccagtgcaaaagcctggatg

SEQ ID NO: 5591605 - DNA, 25 bp, Homo sapien
tgctggttaccaagtggagtattcc

SEQ ID NO: 5591606 - DNA, 25 bp, Homo sapien
gctgacaagggtaaaactagcgtta

SEQ ID NO: 5591607 - DNA, 25 bp, Homo sapien
caagtggagtattccaggtgacaga

SEQ ID NO: 5591608 - DNA, 25 bp, Homo sapien
agcctggatgatgatcccagtctcc

SEQ ID NO: 5591609 - DNA, 25 bp, Homo sapien
agacggatccaggatgactcccaaa

SEQ ID NO: 5591610 - DNA, 25 bp, Homo sapien
tagcccttgcaccatttccagcctc

SEQ ID NO: 5591611 - DNA, 25 bp, Homo sapien
atgaagcccttccctatctagccct

SEQ ID NO: 5591612 - DNA, 25 bp, Homo sapien
tgccagggaatcacagcatagtctg

SEQ ID NO: 5591613 - DNA, 25 bp, Homo sapien
tccaagaaaactatacgaatatccc

SEQ ID NO: 5591614 - DNA, 25 bp, Homo sapien
ctcttggcatcgcatatgaagccct

SEQ ID NO: 5591615 - DNA, 25 bp, Homo sapien
ccaccagctatactgccagggaatc

SEQ ID NO: 5591616 - DNA, 25 bp, Homo sapien
atcattcccagatgtgccacactct

SEQ ID NO: 5591617 - DNA, 25 bp, Homo sapien
caagaggggaactttttgagtttga

SEQ ID NO: 5591618 - DNA, 25 bp, Homo sapien
gctgcataaggcccctcatcattcc

SEQ ID NO: 5591619 - DNA, 25 bp, Homo sapien
tgaccaatagactcccccagctgca

SEQ ID NO: 5591620 - DNA, 25 bp, Homo sapien
ttacttgcggcatttacacgtctac

SEQ ID NO: 5591621 - DNA, 25 bp, Homo sapien
gaagatgatgacaatgaaaactttc

SEQ ID NO: 5591622 - DNA, 25 bp, Homo sapien
gaaaactttcatggtgatccacttc

SEQ ID NO: 5591623 - DNA, 25 bp, Homo sapien
ttctgcttccgccacccccaagaca

SEQ ID NO: 5591624 - DNA, 25 bp, Homo sapien
aacagtgcaattatatgcagattct

SEQ ID NO: 5591625 - DNA, 25 bp, Homo sapien
ctaaaacattaggaatcaagtattt

SEQ ID NO: 5591626 - DNA, 25 bp, Homo sapien
agtaagtatttacactgaagttgtt

SEQ ID NO: 5591627 - DNA, 25 bp, Homo sapien
caagacacaagaccaatccctcctc

SEQ ID NO: 5591628 - DNA, 25 bp, Homo sapien
ttaagggagtcaaaagttatactca

SEQ ID NO: 5591629 - DNA, 25 bp, Homo sapien
ataacagtagttataagtagttaag

SEQ ID NO: 5591630 - DNA, 25 bp, Homo sapien
tcagtctaaacatgaagatgatgac

SEQ ID NO: 5591631 - DNA, 25 bp, Homo sapien
atgggtgctagtagggtttcactaa

SEQ ID NO: 5591632 - DNA, 25 bp, Homo sapien
actgggcttggttattattcacact

SEQ ID NO: 5591633 - DNA, 25 bp, Homo sapien
gtgtcctccagccggcatctctcct

SEQ ID NO: 5591634 - DNA, 25 bp, Homo sapien
ttcatgaaggcaggccctcaagaga

SEQ ID NO: 5591635 - DNA, 25 bp, Homo sapien
acaaatgatgagtcactcatgtgcc

SEQ ID NO: 5591636 - DNA, 25 bp, Homo sapien
ctcaccctcaaggagttgccaaact

SEQ ID NO: 5591637 - DNA, 25 bp, Homo sapien
ccagccggcatctctcctctgttcc

SEQ ID NO: 5591638 - DNA, 25 bp, Homo sapien
ttggttcaaatttgctgtgtcctcc

SEQ ID NO: 5591639 - DNA, 25 bp, Homo sapien
gaagataatttgttctcagatgccc

SEQ ID NO: 5591640 - DNA, 25 bp, Homo sapien
gccagtcccctccaggtcgctcggg

SEQ ID NO: 5591641 - DNA, 25 bp, Homo sapien
caccaagttccaaaaaggagaatgg

SEQ ID NO: 5591642 - DNA, 25 bp, Homo sapien
caaggagttgccaaactgggcttgg

SEQ ID NO: 5591643 - DNA, 25 bp, Homo sapien
tgttgtttgcaaagagaagcagctg

SEQ ID NO: 5591644 - DNA, 25 bp, Homo sapien
tcaaggccttggatttctaagaacc

SEQ ID NO: 5591645 - DNA, 25 bp, Homo sapien
taacgccatctgtgggcttggggtt

SEQ ID NO: 5591646 - DNA, 25 bp, Homo sapien
aatgtcaatgtatctgcaactcgtc

SEQ ID NO: 5591647 - DNA, 25 bp, Homo sapien
aactcgtcagtaatatacctgttgc

SEQ ID NO: 5591648 - DNA, 25 bp, Homo sapien
ccaaatcatgattgtagaacaccaa

SEQ ID NO: 5591649 - DNA, 25 bp, Homo sapien
gaggctggatcccgactcacagttt

SEQ ID NO: 5591650 - DNA, 25 bp, Homo sapien
actcagagacaagttttaaaagtca

SEQ ID NO: 5591651 - DNA, 25 bp, Homo sapien
attttcactccaggacaatgaggtt

SEQ ID NO: 5591652 - DNA, 25 bp, Homo sapien
aaatactcaaagaagtggaatgaaa

SEQ ID NO: 5591653 - DNA, 25 bp, Homo sapien
agaaatcatgactctaaggctctca

SEQ ID NO: 5591654 - DNA, 25 bp, Homo sapien
ctcatgatgggaactggagtcaata

SEQ ID NO: 5591655 - DNA, 25 bp, Homo sapien
ttggctgcgctaatagagcaggcat

SEQ ID NO: 5591656 - DNA, 25 bp, Homo sapien
gagcaggcatgcaatactaagcttc

SEQ ID NO: 5591657 - DNA, 25 bp, Homo sapien
ctgctatgtgctcagagctaactcc

SEQ ID NO: 5591658 - DNA, 25 bp, Homo sapien
ctttggcagcctagtcattgacagc

SEQ ID NO: 5591659 - DNA, 25 bp, Homo sapien
aagcttcacagctaggtgtcctcat

SEQ ID NO: 5591660 - DNA, 25 bp, Homo sapien
tgagggatacttatgaaggccactt

SEQ ID NO: 5591661 - DNA, 25 bp, Homo sapien
catcagtgagatgcttctacgttga

SEQ ID NO: 5591662 - DNA, 25 bp, Homo sapien
tgttaacccaaccatccagatctcc

SEQ ID NO: 5591663 - DNA, 25 bp, Homo sapien
tagggagattccttatgagggatac

SEQ ID NO: 5591664 - DNA, 25 bp, Homo sapien
tctacgttgatgtgcacttgtgtat

SEQ ID NO: 5591665 - DNA, 25 bp, Homo sapien
tctggttccatatgaacaacattgt

SEQ ID NO: 5591666 - DNA, 25 bp, Homo sapien
tggcctataaatatcagaaaacttc

SEQ ID NO: 5591667 - DNA, 25 bp, Homo sapien
gacaagtcctatcactcagagattc

SEQ ID NO: 5591668 - DNA, 25 bp, Homo sapien
cagagattctatactttgcagcact

SEQ ID NO: 5591669 - DNA, 25 bp, Homo sapien
aaaaatacagataaagaataaagac

SEQ ID NO: 5591670 - DNA, 25 bp, Homo sapien
tatacataacaagttctggttccat

SEQ ID NO: 5591671 - DNA, 25 bp, Homo sapien
ttatagagctaaaacgagtctttac

SEQ ID NO: 5591672 - DNA, 25 bp, Homo sapien
cagataaagaataaagacaagtcct

SEQ ID NO: 5591673 - DNA, 25 bp, Homo sapien
agtctctcagagtaataccatcatt

SEQ ID NO: 5591674 - DNA, 25 bp, Homo sapien
tctttggtcaagtgtgtactacttc

SEQ ID NO: 5591675 - DNA, 25 bp, Homo sapien
agatgcaaaatctcatagtaaaaaa

SEQ ID NO: 5591676 - DNA, 25 bp, Homo sapien
ctagtcccagtgataaagttgttcc

SEQ ID NO: 5591677 - DNA, 25 bp, Homo sapien
agtgctgctcctaatgatggaaaat

SEQ ID NO: 5591678 - DNA, 25 bp, Homo sapien
ttgaaaaattagagtatacatatat

SEQ ID NO: 5591679 - DNA, 25 bp, Homo sapien
acaactggctcaaaggttggaaggg

SEQ ID NO: 5591680 - DNA, 25 bp, Homo sapien
ctggtacataaatcttggtgtgctc

SEQ ID NO: 5591681 - DNA, 25 bp, Homo sapien
aattggaacaactggctcaaaggtt

SEQ ID NO: 5591682 - DNA, 25 bp, Homo sapien
cacatgtttcctaaggtgcagttcc

SEQ ID NO: 5591683 - DNA, 25 bp, Homo sapien
aaggaaagactaaatattaagaaga

SEQ ID NO: 5591684 - DNA, 25 bp, Homo sapien
tgcctgtatctatagacgtactgta

SEQ ID NO: 5591685 - DNA, 25 bp, Homo sapien
ttgaggattattaaaagatgcagtt

SEQ ID NO: 5591686 - DNA, 25 bp, Homo sapien
atgctgcagtaaatatcctgatccc

SEQ ID NO: 5591687 - DNA, 25 bp, Homo sapien
gaagctgcttcaaatcaaggagacg

SEQ ID NO: 5591688 - DNA, 25 bp, Homo sapien
gccataataaaagtagacttgataa

SEQ ID NO: 5591689 - DNA, 25 bp, Homo sapien
atgggaggccagcttcattccagta

SEQ ID NO: 5591690 - DNA, 25 bp, Homo sapien
ctctgagaagtcaagcaaaagagaa

SEQ ID NO: 5591691 - DNA, 25 bp, Homo sapien
gtataaattggcttagcaggaggca

SEQ ID NO: 5591692 - DNA, 25 bp, Homo sapien
gaatgtataaattggcttagcagga

SEQ ID NO: 5591693 - DNA, 25 bp, Homo sapien
gctgcttcaaatcaaggagacggga

SEQ ID NO: 5591694 - DNA, 25 bp, Homo sapien
cagtaggttctgtttcacctggatg

SEQ ID NO: 5591695 - DNA, 25 bp, Homo sapien
tcacctggatgaaatggaagatttt

SEQ ID NO: 5591696 - DNA, 25 bp, Homo sapien
aatggaagattttcttggaatgtat

SEQ ID NO: 5591697 - DNA, 25 bp, Homo sapien
gaaaaatggcataataaccaacgtg

SEQ ID NO: 5591698 - DNA, 25 bp, Homo sapien
gttgcaacaggaacctcagtggcta

SEQ ID NO: 5591699 - DNA, 25 bp, Homo sapien
catggatttgctaaaagacttgaaa

SEQ ID NO: 5591700 - DNA, 25 bp, Homo sapien
tcatatctccacaaaaacaccaatt

SEQ ID NO: 5591701 - DNA, 25 bp, Homo sapien
gtggctacagacatgggtctcacct

SEQ ID NO: 5591702 - DNA, 25 bp, Homo sapien
tttgggaagatcacatctcacctgt

SEQ ID NO: 5591703 - DNA, 25 bp, Homo sapien
catcatctggttaagcataaggtca

SEQ ID NO: 5591704 - DNA, 25 bp, Homo sapien
acctcagtggctacagacatgggtc

SEQ ID NO: 5591705 - DNA, 25 bp, Homo sapien
ataaggtcagtccagaaatggatct

SEQ ID NO: 5591706 - DNA, 25 bp, Homo sapien
tattatgattcggtgactcttttac

SEQ ID NO: 5591707 - DNA, 25 bp, Homo sapien
tctcacctgttgcaacaggaacctc

SEQ ID NO: 5591708 - DNA, 25 bp, Homo sapien
ggttaagcataaggtcagtccagaa

SEQ ID NO: 5591709 - DNA, 25 bp, Homo sapien
cacacactgctgtaacctccctcac

SEQ ID NO: 5591710 - DNA, 25 bp, Homo sapien
gcatcatcccattaggggaagcagc

SEQ ID NO: 5591711 - DNA, 25 bp, Homo sapien
gcatgagcccagattgcatcatccc

SEQ ID NO: 5591712 - DNA, 25 bp, Homo sapien
ggaagcagcccccaaacttgtctcc

SEQ ID NO: 5591713 - DNA, 25 bp, Homo sapien
tcagtggctttaccagaccctgggt

SEQ ID NO: 5591714 - DNA, 25 bp, Homo sapien
gggcaggcatttaccccaccacctg

SEQ ID NO: 5591715 - DNA, 25 bp, Homo sapien
aagaattagttggcagcatgagccc

SEQ ID NO: 5591716 - DNA, 25 bp, Homo sapien
ggctctcagtggctttaccagaccc

SEQ ID NO: 5591717 - DNA, 25 bp, Homo sapien
agaccctgggtgattactgcaaagg

SEQ ID NO: 5591718 - DNA, 25 bp, Homo sapien
caaaactgcctgcccatttgcctcc

SEQ ID NO: 5591719 - DNA, 25 bp, Homo sapien
ttcatgtggaagaattagttggcag

SEQ ID NO: 5591720 - DNA, 25 bp, Homo sapien
ctcaggccatctctccccaaaggtg

SEQ ID NO: 5591721 - DNA, 25 bp, Homo sapien
tgcccaacttagatcatgcccctta

SEQ ID NO: 5591722 - DNA, 25 bp, Homo sapien
catgccccttaccctgaaccctggc

SEQ ID NO: 5591723 - DNA, 25 bp, Homo sapien
gacacaaagacacagtttctctcca

SEQ ID NO: 5591724 - DNA, 25 bp, Homo sapien
agactggggctcaccctagactcct

SEQ ID NO: 5591725 - DNA, 25 bp, Homo sapien
gtaacaggatgactctcttttgccc

SEQ ID NO: 5591726 - DNA, 25 bp, Homo sapien
gctgggtccagggactcaaacaatg

SEQ ID NO: 5591727 - DNA, 25 bp, Homo sapien
ggtgaggcctacaccactctgaggc

SEQ ID NO: 5591728 - DNA, 25 bp, Homo sapien
gggtccagggactcaaacaatgaca

SEQ ID NO: 5591729 - DNA, 25 bp, Homo sapien
aagggtgaggcctacaccactctga

SEQ ID NO: 5591730 - DNA, 25 bp, Homo sapien
gtgtctgctcaggccatctctcccc

SEQ ID NO: 5591731 - DNA, 25 bp, Homo sapien
aaaaaacaaatgcacaaagaagtac

SEQ ID NO: 5591732 - DNA, 25 bp, Homo sapien
ttgtacccggctctaagtcctcact

SEQ ID NO: 5591733 - DNA, 25 bp, Homo sapien
tgaacatgaggataagattacacca

SEQ ID NO: 5591734 - DNA, 25 bp, Homo sapien
actaaagaacaattccgataccttg

SEQ ID NO: 5591735 - DNA, 25 bp, Homo sapien
actaagtactaggaacacaacaacc

SEQ ID NO: 5591736 - DNA, 25 bp, Homo sapien
aacaaatgcacaaagaagtacaagg

SEQ ID NO: 5591737 - DNA, 25 bp, Homo sapien
aaaagagctgttaacactgccaaaa

SEQ ID NO: 5591738 - DNA, 25 bp, Homo sapien
gaacacaacaaccataagtgactat

SEQ ID NO: 5591739 - DNA, 25 bp, Homo sapien
ttaaccatgaaattgtacccggctc

SEQ ID NO: 5591740 - DNA, 25 bp, Homo sapien
caagataaaagattaactaaagaac

SEQ ID NO: 5591741 - DNA, 25 bp, Homo sapien
tgaggataagattacaccaagattt

SEQ ID NO: 5591742 - DNA, 25 bp, Homo sapien
aactttgtaagcactgagaattttt

SEQ ID NO: 5591743 - DNA, 25 bp, Homo sapien
tatccaaagctcctcctacaaagta

SEQ ID NO: 5591744 - DNA, 25 bp, Homo sapien
tgtgaatatggttaataatagtgta

SEQ ID NO: 5591745 - DNA, 25 bp, Homo sapien
ttacagaacctcagttagacaagag

SEQ ID NO: 5591746 - DNA, 25 bp, Homo sapien
caagaggaataagttttgttctgct

SEQ ID NO: 5591747 - DNA, 25 bp, Homo sapien
cctacaaagtagcagagttttctaa

SEQ ID NO: 5591748 - DNA, 25 bp, Homo sapien
ttggtatatgaaactttgtaagcac

SEQ ID NO: 5591749 - DNA, 25 bp, Homo sapien
atacttccgtgtttgggtggagaaa

SEQ ID NO: 5591750 - DNA, 25 bp, Homo sapien
tgagttctggggaagtatcattaca

SEQ ID NO: 5591751 - DNA, 25 bp, Homo sapien
tctattgaacagcattgtgaatatg

SEQ ID NO: 5591752 - DNA, 25 bp, Homo sapien
ggagatgatggtgaaagtttacaga

SEQ ID NO: 5591753 - DNA, 25 bp, Homo sapien
tcatagctctcttaaggggtctccc

SEQ ID NO: 5591754 - DNA, 25 bp, Homo sapien
cacaagatgtgcaagttccaaggac

SEQ ID NO: 5591755 - DNA, 25 bp, Homo sapien
tccctggtcactttcatggtcctca

SEQ ID NO: 5591756 - DNA, 25 bp, Homo sapien
tctttgtgtcccagggtccagcaca

SEQ ID NO: 5591757 - DNA, 25 bp, Homo sapien
catggtcctcaagctagccttagcc

SEQ ID NO: 5591758 - DNA, 25 bp, Homo sapien
tcccttgaaagcagagacttgtcat

SEQ ID NO: 5591759 - DNA, 25 bp, Homo sapien
attacgagcatgtttgctggtctat

SEQ ID NO: 5591760 - DNA, 25 bp, Homo sapien
gtcttccaggtcagagcccctatac

SEQ ID NO: 5591761 - DNA, 25 bp, Homo sapien
tctaccctggcaactgtgacaacaa

SEQ ID NO: 5591762 - DNA, 25 bp, Homo sapien
gctagccttagccagccacactttc

SEQ ID NO: 5591763 - DNA, 25 bp, Homo sapien
agttccaaggacatgagtaatcaga

SEQ ID NO: 5591764 - DNA, 25 bp, Homo sapien
gctcataactgaacactgggcatca

SEQ ID NO: 5591765 - DNA, 25 bp, Homo sapien
aggaaggaaaaggagcatcttcctc

SEQ ID NO: 5591766 - DNA, 25 bp, Homo sapien
gagccctgaagtcacgcagaacaaa

SEQ ID NO: 5591767 - DNA, 25 bp, Homo sapien
cgcagaacaaatctactgtgagccc

SEQ ID NO: 5591768 - DNA, 25 bp, Homo sapien
taatatggcccaaggtcacaatact

SEQ ID NO: 5591769 - DNA, 25 bp, Homo sapien
aaaatgcctctaagccacatctctc

SEQ ID NO: 5591770 - DNA, 25 bp, Homo sapien
cagatgtggtctgatcagtgcaaag

SEQ ID NO: 5591771 - DNA, 25 bp, Homo sapien
ttagatcttggagccctgaagtcac

SEQ ID NO: 5591772 - DNA, 25 bp, Homo sapien
tcccttgaagtctggtgctcataac

SEQ ID NO: 5591773 - DNA, 25 bp, Homo sapien
tttacagcaaccaaaccacactttc

SEQ ID NO: 5591774 - DNA, 25 bp, Homo sapien
gatcagtgcaaagtagcacaagatg

SEQ ID NO: 5591775 - DNA, 25 bp, Homo sapien
tgttgcctttgctcaagtgcctgtc

SEQ ID NO: 5591776 - DNA, 25 bp, Homo sapien
agtctatgctacagcctggtgggag

SEQ ID NO: 5591777 - DNA, 25 bp, Homo sapien
gaaatcctcaggggttgcccagtct

SEQ ID NO: 5591778 - DNA, 25 bp, Homo sapien
actccaagcttgggaacctacgagg

SEQ ID NO: 5591779 - DNA, 25 bp, Homo sapien
ttgctggcaatagcttaggtagggc

SEQ ID NO: 5591780 - DNA, 25 bp, Homo sapien
ggtagtccatgaccctcctggatgc

SEQ ID NO: 5591781 - DNA, 25 bp, Homo sapien
ccccccaccataagtgagcacactg

SEQ ID NO: 5591782 - DNA, 25 bp, Homo sapien
gagcccgtcacaggcactatgggat

SEQ ID NO: 5591783 - DNA, 25 bp, Homo sapien
agggtagtgctgacccagaaatcct

SEQ ID NO: 5591784 - DNA, 25 bp, Homo sapien
agctatgcctcgccagatccctccc

SEQ ID NO: 5591785 - DNA, 25 bp, Homo sapien
ggacatgaggacctagctatgcctc

SEQ ID NO: 5591786 - DNA, 25 bp, Homo sapien
aatatccctcaccccaaatcgctgt

SEQ ID NO: 5591787 - DNA, 25 bp, Homo sapien
atgttttaagtgaagctgaaaccgc

SEQ ID NO: 5591788 - DNA, 25 bp, Homo sapien
ctaaggctatcgtcgaaggcccaga

SEQ ID NO: 5591789 - DNA, 25 bp, Homo sapien
tattcagatagaactcttcggaagt

SEQ ID NO: 5591790 - DNA, 25 bp, Homo sapien
tcctcaaagcgactcccaatggatt

SEQ ID NO: 5591791 - DNA, 25 bp, Homo sapien
caactgagcttgctgcctagcggtg

SEQ ID NO: 5591792 - DNA, 25 bp, Homo sapien
ctgctctgcgctaaggctatcgtcg

SEQ ID NO: 5591793 - DNA, 25 bp, Homo sapien
tggaaacccaatccagcacgtcctg

SEQ ID NO: 5591794 - DNA, 25 bp, Homo sapien
cctccccacaaatatccctcacccc

SEQ ID NO: 5591795 - DNA, 25 bp, Homo sapien
gcacgtcctgcctccccacaaatat

SEQ ID NO: 5591796 - DNA, 25 bp, Homo sapien
agacaccttgaccctggaaacccaa

SEQ ID NO: 5591797 - DNA, 25 bp, Homo sapien
agactgtggcagaatttaagtgatg

SEQ ID NO: 5591798 - DNA, 25 bp, Homo sapien
ggtatgactagaacggtagcctacc

SEQ ID NO: 5591799 - DNA, 25 bp, Homo sapien
gaggaccaaccgtctgtgcagactg

SEQ ID NO: 5591800 - DNA, 25 bp, Homo sapien
taataggacaatatgcctggaggac

SEQ ID NO: 5591801 - DNA, 25 bp, Homo sapien
tttaagtgatgggtatgactagaac

SEQ ID NO: 5591802 - DNA, 25 bp, Homo sapien
gaagcactacagacagatacatgat

SEQ ID NO: 5591803 - DNA, 25 bp, Homo sapien
attacctccattacaagagagtctc

SEQ ID NO: 5591804 - DNA, 25 bp, Homo sapien
acccctcagtgatagtcccattacc

SEQ ID NO: 5591805 - DNA, 25 bp, Homo sapien
gagagtctcaagcccaccatgcaca

SEQ ID NO: 5591806 - DNA, 25 bp, Homo sapien
cacatttgaagcactacagacagat

SEQ ID NO: 5591807 - DNA, 25 bp, Homo sapien
acctggataggctgaacccctcagt

SEQ ID NO: 5591808 - DNA, 25 bp, Homo sapien
gttcccacacgcacggggtcgggac

SEQ ID NO: 5591809 - DNA, 25 bp, Homo sapien
gtcccgaccccgtgcgtgtgggaac

SEQ ID NO: 5591810 - DNA, 25 bp, Homo sapien
ggtgtgacaatgccacccaaaccac

SEQ ID NO: 5591811 - DNA, 25 bp, Homo sapien
ttatattagaaaaacgagctgcagc

SEQ ID NO: 5591812 - DNA, 25 bp, Homo sapien
aggtccaatttgatccagaagttcc

SEQ ID NO: 5591813 - DNA, 25 bp, Homo sapien
gcactgctaaaaggtaactgggtta

SEQ ID NO: 5591814 - DNA, 25 bp, Homo sapien
tgggtcaggtgcctacccctgaacc

SEQ ID NO: 5591815 - DNA, 25 bp, Homo sapien
actgggttaatctagaaagccgagg

SEQ ID NO: 5591816 - DNA, 25 bp, Homo sapien
cctggtactgcctcaggctggttcc

SEQ ID NO: 5591817 - DNA, 25 bp, Homo sapien
tcctgaaaaagcctaggcaaacatc

SEQ ID NO: 5591818 - DNA, 25 bp, Homo sapien
ttcccaagggctccaatagactccc

SEQ ID NO: 5591819 - DNA, 25 bp, Homo sapien
tctcagtagtctggtctgggtcagg

SEQ ID NO: 5591820 - DNA, 25 bp, Homo sapien
agtgaaagctgagaaatagatctca

SEQ ID NO: 5591821 - DNA, 25 bp, Homo sapien
agtagaactattttgtgagcagcac

SEQ ID NO: 5591822 - DNA, 25 bp, Homo sapien
tggcaaccctgacttcaagggaggg

SEQ ID NO: 5591823 - DNA, 25 bp, Homo sapien
agggtaagtgagagagtttcaattt

SEQ ID NO: 5591824 - DNA, 25 bp, Homo sapien
ggagggaagggttatccaatcatat

SEQ ID NO: 5591825 - DNA, 25 bp, Homo sapien
tgtgagcagcactaattaacccttt

SEQ ID NO: 5591826 - DNA, 25 bp, Homo sapien
gctgcaggctgctcacagatcctct

SEQ ID NO: 5591827 - DNA, 25 bp, Homo sapien
ccctgaataccatgtaagtgacagc

SEQ ID NO: 5591828 - DNA, 25 bp, Homo sapien
aagtaagccacatggcaaccctgac

SEQ ID NO: 5591829 - DNA, 25 bp, Homo sapien
ctttttcagggtaagtgagagagtt

SEQ ID NO: 5591830 - DNA, 25 bp, Homo sapien
atgatctcaaagcttggctgcaggc

SEQ ID NO: 5591831 - DNA, 25 bp, Homo sapien
atgtcttgaatgaagtaacaatgtt

SEQ ID NO: 5591832 - DNA, 25 bp, Homo sapien
gtcttcgtgtgaactgtttggataa

SEQ ID NO: 5591833 - DNA, 25 bp, Homo sapien
gacattaacaagagatatccaagat

SEQ ID NO: 5591834 - DNA, 25 bp, Homo sapien
gaactgtttggataaggcctgacac

SEQ ID NO: 5591835 - DNA, 25 bp, Homo sapien
aagagatatccaagatgcacgtgtg

SEQ ID NO: 5591836 - DNA, 25 bp, Homo sapien
taaccagaaaacttgattacctaca

SEQ ID NO: 5591837 - DNA, 25 bp, Homo sapien
aactgttggctgggattatttctct

SEQ ID NO: 5591838 - DNA, 25 bp, Homo sapien
tcgtgtgaactgtttggataaggcc

SEQ ID NO: 5591839 - DNA, 25 bp, Homo sapien
atcctggcaggaacgcctctctttg

SEQ ID NO: 5591840 - DNA, 25 bp, Homo sapien
gagcttactaactgttggctgggat

SEQ ID NO: 5591841 - DNA, 25 bp, Homo sapien
gatgcaacctatcctggcaggaacg

SEQ ID NO: 5591842 - DNA, 25 bp, Homo sapien
aggcctgacacataagagcttacta

SEQ ID NO: 5591843 - DNA, 25 bp, Homo sapien
aattctcttcagcacgcacgcattg

SEQ ID NO: 5591844 - DNA, 25 bp, Homo sapien
ttggagtctttgacatgaaacacat

SEQ ID NO: 5591845 - DNA, 25 bp, Homo sapien
taatttgacacacagtaggcaatca

SEQ ID NO: 5591846 - DNA, 25 bp, Homo sapien
aatcatgaaaagacgcaattaaaat

SEQ ID NO: 5591847 - DNA, 25 bp, Homo sapien
ataatagattgctgatcccctgttc

SEQ ID NO: 5591848 - DNA, 25 bp, Homo sapien
tccagattctccccagtcaaattcc

SEQ ID NO: 5591849 - DNA, 25 bp, Homo sapien
gactcaatgagctccccaaggctgg

SEQ ID NO: 5591850 - DNA, 25 bp, Homo sapien
tctcaaaggcaattacttcaggttt

SEQ ID NO: 5591851 - DNA, 25 bp, Homo sapien
attccttagactattgagttggttt

SEQ ID NO: 5591852 - DNA, 25 bp, Homo sapien
ttctctgtgactcaatgagctcccc

SEQ ID NO: 5591853 - DNA, 25 bp, Homo sapien
aaggctgggcctatatcttatctac

SEQ ID NO: 5591854 - DNA, 25 bp, Homo sapien
gtctgggctccattcaagtgataag

SEQ ID NO: 5591855 - DNA, 25 bp, Homo sapien
tgaacatggataaaaataaacggga

SEQ ID NO: 5591856 - DNA, 25 bp, Homo sapien
gctgctgttatcacgaaaggctggc

SEQ ID NO: 5591857 - DNA, 25 bp, Homo sapien
acgaagaccctggggtctgaaggaa

SEQ ID NO: 5591858 - DNA, 25 bp, Homo sapien
cctcaagggtctgcgacatttgtgc

SEQ ID NO: 5591859 - DNA, 25 bp, Homo sapien
tggtcagctctgtgcactcttccct

SEQ ID NO: 5591860 - DNA, 25 bp, Homo sapien
tgaggatcacaagcccttgggtgga

SEQ ID NO: 5591861 - DNA, 25 bp, Homo sapien
tataagtcacgaaacgaagaccctg

SEQ ID NO: 5591862 - DNA, 25 bp, Homo sapien
cgtatttccactctcaggcgccctt

SEQ ID NO: 5591863 - DNA, 25 bp, Homo sapien
agaaaatttggtttgaacatgtccc

SEQ ID NO: 5591864 - DNA, 25 bp, Homo sapien
ctgcgacatttgtgctgtggtcagc

SEQ ID NO: 5591865 - DNA, 25 bp, Homo sapien
gtgacactaatatggcactgggacc

SEQ ID NO: 5591866 - DNA, 25 bp, Homo sapien
gacatcaccgagctctcccgactcc

SEQ ID NO: 5591867 - DNA, 25 bp, Homo sapien
gggcacaacgaagagattcaagtaa

SEQ ID NO: 5591868 - DNA, 25 bp, Homo sapien
gtgatggaatcgagcctctcacttc

SEQ ID NO: 5591869 - DNA, 25 bp, Homo sapien
ccggcccaagtcatgcccacggtta

SEQ ID NO: 5591870 - DNA, 25 bp, Homo sapien
tgcccacggttaccctgtgtcaccc

SEQ ID NO: 5591871 - DNA, 25 bp, Homo sapien
accgtgcctagacagggcacaacga

SEQ ID NO: 5591872 - DNA, 25 bp, Homo sapien
ctccgcccttcccatcacagccccg

SEQ ID NO: 5591873 - DNA, 25 bp, Homo sapien
gatgcccctcgtgacatcaccgagc

SEQ ID NO: 5591874 - DNA, 25 bp, Homo sapien
tcacagccccggaagtcccattgta

SEQ ID NO: 5591875 - DNA, 25 bp, Homo sapien
gggaagagtctgatgcccctcgtga

SEQ ID NO: 5591876 - DNA, 25 bp, Homo sapien
tattatgaaaatagccctccccatc

SEQ ID NO: 5591877 - DNA, 25 bp, Homo sapien
gtagctcagagtaacatacaataac

SEQ ID NO: 5591878 - DNA, 25 bp, Homo sapien
gtgctggtatattagtgtgtggtga

SEQ ID NO: 5591879 - DNA, 25 bp, Homo sapien
aggtcaaggtgctggtatattagtg

SEQ ID NO: 5591880 - DNA, 25 bp, Homo sapien
atttcacaggaatcaacagcacttt

SEQ ID NO: 5591881 - DNA, 25 bp, Homo sapien
tcagagatgttaaataatgtgtagc

SEQ ID NO: 5591882 - DNA, 25 bp, Homo sapien
gatgagttgggcatcttgtccctcc

SEQ ID NO: 5591883 - DNA, 25 bp, Homo sapien
actgctaagaaaacaataacctgct

SEQ ID NO: 5591884 - DNA, 25 bp, Homo sapien
taaatgccactgaatcaataagatt

SEQ ID NO: 5591885 - DNA, 25 bp, Homo sapien
catgcctccaagacaagttcgaatt

SEQ ID NO: 5591886 - DNA, 25 bp, Homo sapien
acagcacttttaagatgagttgggc

SEQ ID NO: 5591887 - DNA, 25 bp, Homo sapien
tcctcctccatggctgacaccggct

SEQ ID NO: 5591888 - DNA, 25 bp, Homo sapien
tgacaccggctacgggatgtgtcta

SEQ ID NO: 5591889 - DNA, 25 bp, Homo sapien
ctgtgcctacagaagtgacctatcc

SEQ ID NO: 5591890 - DNA, 25 bp, Homo sapien
ctcagatactgctggcaggctcttt

SEQ ID NO: 5591891 - DNA, 25 bp, Homo sapien
gggatagctgggtaaatgcctttga

SEQ ID NO: 5591892 - DNA, 25 bp, Homo sapien
ttgataaagttcccgtggcagggtc

SEQ ID NO: 5591893 - DNA, 25 bp, Homo sapien
atttaacaccctgagaaggggtcca

SEQ ID NO: 5591894 - DNA, 25 bp, Homo sapien
tctaacgagttctgacagagctggg

SEQ ID NO: 5591895 - DNA, 25 bp, Homo sapien
atgaaatgggaatctcatgagatac

SEQ ID NO: 5591896 - DNA, 25 bp, Homo sapien
attaagctgaatgagagatcttctc

SEQ ID NO: 5591897 - DNA, 25 bp, Homo sapien
ccttttgttgtacgacagaagcccc

SEQ ID NO: 5591898 - DNA, 25 bp, Homo sapien
aattcaagttaaggctctgacacct

SEQ ID NO: 5591899 - DNA, 25 bp, Homo sapien
tagactaaatactcaaattgtgatc

SEQ ID NO: 5591900 - DNA, 25 bp, Homo sapien
ggatctgtttcctaagaccatgtct

SEQ ID NO: 5591901 - DNA, 25 bp, Homo sapien
aactagaagagtctggatctgtttc

SEQ ID NO: 5591902 - DNA, 25 bp, Homo sapien
aagggtctgcgattgtctgaatgtt

SEQ ID NO: 5591903 - DNA, 25 bp, Homo sapien
ttagacaagctagttcttaagggtc

SEQ ID NO: 5591904 - DNA, 25 bp, Homo sapien
tctgacacctacaactagaagagtc

SEQ ID NO: 5591905 - DNA, 25 bp, Homo sapien
acctacaactagaagagtctggatc

SEQ ID NO: 5591906 - DNA, 25 bp, Homo sapien
ctgcacagctttaagtaatagtcat

SEQ ID NO: 5591907 - DNA, 25 bp, Homo sapien
tctttaaattagacaagctagttct

SEQ ID NO: 5591908 - DNA, 25 bp, Homo sapien
aagctagttcttaagggtctgcgat

SEQ ID NO: 5591909 - DNA, 25 bp, Homo sapien
acctgtgaccgcattgcaccagggg

SEQ ID NO: 5591910 - DNA, 25 bp, Homo sapien
ttctgatgcaccatgaacaggttca

SEQ ID NO: 5591911 - DNA, 25 bp, Homo sapien
gtcagcattatgttctgatgcacca

SEQ ID NO: 5591912 - DNA, 25 bp, Homo sapien
ccttgcccatctacggggcctggag

SEQ ID NO: 5591913 - DNA, 25 bp, Homo sapien
cccataaaacctgtgaccgcattgc

SEQ ID NO: 5591914 - DNA, 25 bp, Homo sapien
gctctgttggcatggagcctgaaga

SEQ ID NO: 5591915 - DNA, 25 bp, Homo sapien
gcgtcttgccagactgagaccgaag

SEQ ID NO: 5591916 - DNA, 25 bp, Homo sapien
cgcccagctcaccaaagtcccataa

SEQ ID NO: 5591917 - DNA, 25 bp, Homo sapien
aagtccttgcccatctacggggcct

SEQ ID NO: 5591918 - DNA, 25 bp, Homo sapien
ctgaagacccagcgtcttgccagac

SEQ ID NO: 5591919 - DNA, 25 bp, Homo sapien
aaagtcccataaaacctgtgaccgc

SEQ ID NO: 5591920 - DNA, 25 bp, Homo sapien
aggaggaccctctaactgaaaccag

SEQ ID NO: 5591921 - DNA, 25 bp, Homo sapien
tccattatggcattccctggcactc

SEQ ID NO: 5591922 - DNA, 25 bp, Homo sapien
ctctttagtgaaatggtccaaattc

SEQ ID NO: 5591923 - DNA, 25 bp, Homo sapien
ctggcctttatggagccagcgcgtg

SEQ ID NO: 5591924 - DNA, 25 bp, Homo sapien
tttatacattgaaggcagctccctc

SEQ ID NO: 5591925 - DNA, 25 bp, Homo sapien
tccctcttgtgaggaaagggctgag

SEQ ID NO: 5591926 - DNA, 25 bp, Homo sapien
gaaagggctgagcaaactcatgttc

SEQ ID NO: 5591927 - DNA, 25 bp, Homo sapien
ccaaattcagatccaaaagcctcca

SEQ ID NO: 5591928 - DNA, 25 bp, Homo sapien
ggcagcctggccaaagctggccttt

SEQ ID NO: 5591929 - DNA, 25 bp, Homo sapien
atggccagtataagcaggcaaagaa

SEQ ID NO: 5591930 - DNA, 25 bp, Homo sapien
caaagtgttggaagctgaactatac

SEQ ID NO: 5591931 - DNA, 25 bp, Homo sapien
atgtgctttgctagggttttggttt

SEQ ID NO: 5591932 - DNA, 25 bp, Homo sapien
actgagtagcttctatagaaaatgt

SEQ ID NO: 5591933 - DNA, 25 bp, Homo sapien
cgtctggctataggagctgtgtttt

SEQ ID NO: 5591934 - DNA, 25 bp, Homo sapien
ctttcgaatgacagcaaagaaatta

SEQ ID NO: 5591935 - DNA, 25 bp, Homo sapien
ttaattatgtccactgagtagcttc

SEQ ID NO: 5591936 - DNA, 25 bp, Homo sapien
gttgcccaagatggctgcaaactcc

SEQ ID NO: 5591937 - DNA, 25 bp, Homo sapien
taaatggtcgacatctgcttgacac

SEQ ID NO: 5591938 - DNA, 25 bp, Homo sapien
caccacgtctggctataggagctgt

SEQ ID NO: 5591939 - DNA, 25 bp, Homo sapien
tgagaacatgtttaaggtagtttgc

SEQ ID NO: 5591940 - DNA, 25 bp, Homo sapien
agaaaatgtgctttgctagggtttt

SEQ ID NO: 5591941 - DNA, 25 bp, Homo sapien
ttttttctagacatgtggttcacac

SEQ ID NO: 5591942 - DNA, 25 bp, Homo sapien
acaagctcctgtacataagtaatta

SEQ ID NO: 5591943 - DNA, 25 bp, Homo sapien
caatctaaagaaatgtctggaagga

SEQ ID NO: 5591944 - DNA, 25 bp, Homo sapien
aagtaattataaatagttcacatct

SEQ ID NO: 5591945 - DNA, 25 bp, Homo sapien
gtgctaaagtagccatatagatcct

SEQ ID NO: 5591946 - DNA, 25 bp, Homo sapien
acaaattgcacaaattaaccaaata

SEQ ID NO: 5591947 - DNA, 25 bp, Homo sapien
tttcatttttagagtgcccagattt

SEQ ID NO: 5591948 - DNA, 25 bp, Homo sapien
taaaagtgaacattgcaaatagaaa

SEQ ID NO: 5591949 - DNA, 25 bp, Homo sapien
tattgggcctagtttacaagctcct

SEQ ID NO: 5591950 - DNA, 25 bp, Homo sapien
aaaaagaattcttcgtagcaccatt

SEQ ID NO: 5591951 - DNA, 25 bp, Homo sapien
taaccaaataacactgatcatacaa

SEQ ID NO: 5591952 - DNA, 25 bp, Homo sapien
aagcactaagtaaaagacaatctaa

SEQ ID NO: 5591953 - DNA, 25 bp, Homo sapien
aaaagagacaaaggctcgaccattt

SEQ ID NO: 5591954 - DNA, 25 bp, Homo sapien
acaatctcacagaaagatgagcctt

SEQ ID NO: 5591955 - DNA, 25 bp, Homo sapien
aaagttatatgaaactgccaagaat

SEQ ID NO: 5591956 - DNA, 25 bp, Homo sapien
atctatcgctggttaatgacagagg

SEQ ID NO: 5591957 - DNA, 25 bp, Homo sapien
ctcttatcaaattggtaaagggaat

SEQ ID NO: 5591958 - DNA, 25 bp, Homo sapien
ctgaagcccctaagtaggcagaaag

SEQ ID NO: 5591959 - DNA, 25 bp, Homo sapien
aagatgagccttaccggtaacccaa

SEQ ID NO: 5591960 - DNA, 25 bp, Homo sapien
tgttattaggatacagggaacagag

SEQ ID NO: 5591961 - DNA, 25 bp, Homo sapien
gtaaagggaatttccacagatgtta

SEQ ID NO: 5591962 - DNA, 25 bp, Homo sapien
cacacagaatttagtggtctgatta

SEQ ID NO: 5591963 - DNA, 25 bp, Homo sapien
tctaagtgactatgtgctaaattaa

SEQ ID NO: 5591964 - DNA, 25 bp, Homo sapien
cccgaggcacgacattcgaggaggc

SEQ ID NO: 5591965 - DNA, 25 bp, Homo sapien
gcctcctcgaatgtcgtgcctcggg

SEQ ID NO: 5591966 - DNA, 25 bp, Homo sapien
gagagactcaagacaattagaaact

SEQ ID NO: 5591967 - DNA, 25 bp, Homo sapien
atcaatccttaagcctgtacccgag

SEQ ID NO: 5591968 - DNA, 25 bp, Homo sapien
acaaattaaggaacatgaacaaacc

SEQ ID NO: 5591969 - DNA, 25 bp, Homo sapien
tgtacccgagagactcaagacaatt

SEQ ID NO: 5591970 - DNA, 25 bp, Homo sapien
cccgagagactcaagacaattagaa

SEQ ID NO: 5591971 - DNA, 25 bp, Homo sapien
ttaagcctgtacccgagagactcaa

SEQ ID NO: 5591972 - DNA, 25 bp, Homo sapien
aacctctcatgaagctacaataatt

SEQ ID NO: 5591973 - DNA, 25 bp, Homo sapien
tagaaactctacaaattaaggaaca

SEQ ID NO: 5591974 - DNA, 25 bp, Homo sapien
tcaagcaatcatccctcctgaactt

SEQ ID NO: 5591975 - DNA, 25 bp, Homo sapien
atccttaagcctgtacccgagagac

SEQ ID NO: 5591976 - DNA, 25 bp, Homo sapien
taaggaacatgaacaaacctctcat

SEQ ID NO: 5591977 - DNA, 25 bp, Homo sapien
gattaaatctttagtactatcatac

SEQ ID NO: 5591978 - DNA, 25 bp, Homo sapien
gtatgatagtactaaagatttaatc

SEQ ID NO: 5591979 - DNA, 25 bp, Homo sapien
tttgtaagaagcatattagagaaaa

SEQ ID NO: 5591980 - DNA, 25 bp, Homo sapien
tttgagaatcttgggcattagttcc

SEQ ID NO: 5591981 - DNA, 25 bp, Homo sapien
cctgggcaattaccactttggattc

SEQ ID NO: 5591982 - DNA, 25 bp, Homo sapien
ttctgcggaatttcaaaagatacac

SEQ ID NO: 5591983 - DNA, 25 bp, Homo sapien
tattgatgtcaaaggaaaattagta

SEQ ID NO: 5591984 - DNA, 25 bp, Homo sapien
atcaaattatgaggtaacgttacta

SEQ ID NO: 5591985 - DNA, 25 bp, Homo sapien
caagaacactgtatattcctgggca

SEQ ID NO: 5591986 - DNA, 25 bp, Homo sapien
caagagaagcagagattctgcggaa

SEQ ID NO: 5591987 - DNA, 25 bp, Homo sapien
tggggcccttttagctaagacatga

SEQ ID NO: 5591988 - DNA, 25 bp, Homo sapien
acagtatgttataacttggggccct

SEQ ID NO: 5591989 - DNA, 25 bp, Homo sapien
taggtaaattatgacagaggggaaa

SEQ ID NO: 5591990 - DNA, 25 bp, Homo sapien
ctcccaggcattacccaagtagctt

SEQ ID NO: 5591991 - DNA, 25 bp, Homo sapien
gaaaagcaaaagcatggcaagtaaa

SEQ ID NO: 5591992 - DNA, 25 bp, Homo sapien
cccaaatatgcaggtgatcgagatc

SEQ ID NO: 5591993 - DNA, 25 bp, Homo sapien
agggaggtctaagaaactgcttttc

SEQ ID NO: 5591994 - DNA, 25 bp, Homo sapien
agggaggttcacaggccataattag

SEQ ID NO: 5591995 - DNA, 25 bp, Homo sapien
cacttgagtgtacatgagaatcacc

SEQ ID NO: 5591996 - DNA, 25 bp, Homo sapien
aaaaacttcacagggaggtctaaga

SEQ ID NO: 5591997 - DNA, 25 bp, Homo sapien
tgggaccctggaacctgcatattcc

SEQ ID NO: 5591998 - DNA, 25 bp, Homo sapien
gattctgtagtttcaggtgggaccc

SEQ ID NO: 5591999 - DNA, 25 bp, Homo sapien
tgcttccaaagtccaggtgctaata

SEQ ID NO: 5592000 - DNA, 25 bp, Homo sapien
ggaagtagccaacccaggatccaaa

SEQ ID NO: 5592001 - DNA, 25 bp, Homo sapien
tataatgggattgtatttatatctc

SEQ ID NO: 5592002 - DNA, 25 bp, Homo sapien
gagatataaatacaatcccattata

SEQ ID NO: 5592003 - DNA, 25 bp, Homo sapien
ctggtcatgcccagtcatgcggccg

SEQ ID NO: 5592004 - DNA, 25 bp, Homo sapien
gtggggatataagctggtacttcca

SEQ ID NO: 5592005 - DNA, 25 bp, Homo sapien
catgcaggtgcctcagccacacttg

SEQ ID NO: 5592006 - DNA, 25 bp, Homo sapien
caggccaaggtcttaggttcccctg

SEQ ID NO: 5592007 - DNA, 25 bp, Homo sapien
tggtgaccacagtgcatggcaattt

SEQ ID NO: 5592008 - DNA, 25 bp, Homo sapien
tgggtgaacttggagcaaataacca

SEQ ID NO: 5592009 - DNA, 25 bp, Homo sapien
tacttccaaagcagaaagctggggt

SEQ ID NO: 5592010 - DNA, 25 bp, Homo sapien
tgggtggaagttcatggttttactc

SEQ ID NO: 5592011 - DNA, 25 bp, Homo sapien
agagccgaccttgagcttgagctcc

SEQ ID NO: 5592012 - DNA, 25 bp, Homo sapien
tgagctccatggagtacccagccca

SEQ ID NO: 5592013 - DNA, 25 bp, Homo sapien
gcggccgccaaccatcaccttccca

SEQ ID NO: 5592014 - DNA, 25 bp, Homo sapien
cactaggttattatgaaggtaaaaa

SEQ ID NO: 5592015 - DNA, 25 bp, Homo sapien
aatgccactattaagaagacactgt

SEQ ID NO: 5592016 - DNA, 25 bp, Homo sapien
tttgtctgtgatatggggataatac

SEQ ID NO: 5592017 - DNA, 25 bp, Homo sapien
gtccccagtcctagacatctggtgt

SEQ ID NO: 5592018 - DNA, 25 bp, Homo sapien
gtgatatggggataatacaagtatc

SEQ ID NO: 5592019 - DNA, 25 bp, Homo sapien
cattaagggaacagaatgatatgag

SEQ ID NO: 5592020 - DNA, 25 bp, Homo sapien
tcttgcatagcttcctcagaaattc

SEQ ID NO: 5592021 - DNA, 25 bp, Homo sapien
caccatctcattaagggaacagaat

SEQ ID NO: 5592022 - DNA, 25 bp, Homo sapien
gacatccctgcaaagtctctgtact

SEQ ID NO: 5592023 - DNA, 25 bp, Homo sapien
tatgagacacaaattaatgccacta

SEQ ID NO: 5592024 - DNA, 25 bp, Homo sapien
agccaaaggattggacatccctgca

SEQ ID NO: 5592025 - DNA, 25 bp, Homo sapien
gcaggcagcctccattcactgtaca

SEQ ID NO: 5592026 - DNA, 25 bp, Homo sapien
acagtctttcagtgacagcaatttc

SEQ ID NO: 5592027 - DNA, 25 bp, Homo sapien
tattccaaaagattagcaaaatgtg

SEQ ID NO: 5592028 - DNA, 25 bp, Homo sapien
ggaaacccatgaggtatgaaaccac

SEQ ID NO: 5592029 - DNA, 25 bp, Homo sapien
tccccatctccaaagcttgaccttt

SEQ ID NO: 5592030 - DNA, 25 bp, Homo sapien
acttcagggaaaagattaaaatctc

SEQ ID NO: 5592031 - DNA, 25 bp, Homo sapien
cacccaacatcttcaggactcttcc

SEQ ID NO: 5592032 - DNA, 25 bp, Homo sapien
tgaggtatgaaaccactccagtcac

SEQ ID NO: 5592033 - DNA, 25 bp, Homo sapien
tctgccttcttgacttcagggaaaa

SEQ ID NO: 5592034 - DNA, 25 bp, Homo sapien
agtcactgttctggctgcatcttaa

SEQ ID NO: 5592035 - DNA, 25 bp, Homo sapien
caatgcctccaaggtgttgtgaagt

SEQ ID NO: 5592036 - DNA, 25 bp, Homo sapien
cctcccctccccgccggtgagtgag

SEQ ID NO: 5592037 - DNA, 25 bp, Homo sapien
ctgtcattttgacctggggttcccc

SEQ ID NO: 5592038 - DNA, 25 bp, Homo sapien
gactcgacccccagcatcccacggg

SEQ ID NO: 5592039 - DNA, 25 bp, Homo sapien
ccccagcatcccacggggcctcttt

SEQ ID NO: 5592040 - DNA, 25 bp, Homo sapien
tccagcccctcgcctcgttcccttc

SEQ ID NO: 5592041 - DNA, 25 bp, Homo sapien
catcccacggggcctctttcctttc

SEQ ID NO: 5592042 - DNA, 25 bp, Homo sapien
cgcctcgttcccttcccagcatccc

SEQ ID NO: 5592043 - DNA, 25 bp, Homo sapien
ccggctgctcctcccctccccgccg

SEQ ID NO: 5592044 - DNA, 25 bp, Homo sapien
ctggggttcccctccagcccctcgc

SEQ ID NO: 5592045 - DNA, 25 bp, Homo sapien
ctttcccggctcattccgctgtcat

SEQ ID NO: 5592046 - DNA, 25 bp, Homo sapien
cccttcccagcatcccagggccgag

SEQ ID NO: 5592047 - DNA, 25 bp, Homo sapien
ggatacctcgactaggtcacaaacg

SEQ ID NO: 5592048 - DNA, 25 bp, Homo sapien
cgtttgtgacctagtcgaggtatcc

SEQ ID NO: 5592049 - DNA, 25 bp, Homo sapien
ttgcccagctcaaagataaagtgat

SEQ ID NO: 5592050 - DNA, 25 bp, Homo sapien
atggggtacataatctaattggtgg

SEQ ID NO: 5592051 - DNA, 25 bp, Homo sapien
tccctgggcataatcagaatgctaa

SEQ ID NO: 5592052 - DNA, 25 bp, Homo sapien
agctcaggggctataccatagagta

SEQ ID NO: 5592053 - DNA, 25 bp, Homo sapien
tgttagaaaagaagtatgtttagat

SEQ ID NO: 5592054 - DNA, 25 bp, Homo sapien
agcttaagacaaaattgggccctcc

SEQ ID NO: 5592055 - DNA, 25 bp, Homo sapien
ttgagcaagacaaaatgttggacat

SEQ ID NO: 5592056 - DNA, 25 bp, Homo sapien
aagataaagtgatttgagcaagaca

SEQ ID NO: 5592057 - DNA, 25 bp, Homo sapien
agagtagagcctctcttaagctggc

SEQ ID NO: 5592058 - DNA, 25 bp, Homo sapien
taattggtggtatgttagagtaaat

SEQ ID NO: 5592059 - DNA, 25 bp, Homo sapien
ctgcttagtgctgtgtatagaggag

SEQ ID NO: 5592060 - DNA, 25 bp, Homo sapien
ctcttctcgtgcgacacagaaccgg

SEQ ID NO: 5592061 - DNA, 25 bp, Homo sapien
ttcatggagagtagtctttcaggat

SEQ ID NO: 5592062 - DNA, 25 bp, Homo sapien
ggaaacatgcactaacctggtaaat

SEQ ID NO: 5592063 - DNA, 25 bp, Homo sapien
tttttggacaataggcactagattt

SEQ ID NO: 5592064 - DNA, 25 bp, Homo sapien
taggggcaccttgcctttagtggac

SEQ ID NO: 5592065 - DNA, 25 bp, Homo sapien
attgtcagtctgccgtttggttcac

SEQ ID NO: 5592066 - DNA, 25 bp, Homo sapien
ttcaggattcataccctcaggacat

SEQ ID NO: 5592067 - DNA, 25 bp, Homo sapien
taggcactagattttttaggcagat

SEQ ID NO: 5592068 - DNA, 25 bp, Homo sapien
ggtaaatacctgcttcatggagagt

SEQ ID NO: 5592069 - DNA, 25 bp, Homo sapien
gtaaaaagacacacactcttctcgt

SEQ ID NO: 5592070 - DNA, 25 bp, Homo sapien
aagacaagagacaacagagtatatt

SEQ ID NO: 5592071 - DNA, 25 bp, Homo sapien
cgtagcgtctcgtccggtccttgct

SEQ ID NO: 5592072 - DNA, 25 bp, Homo sapien
ccgtccccatggggatgtcgtgtcc

SEQ ID NO: 5592073 - DNA, 25 bp, Homo sapien
cgcgacgagttccggttccggttgc

SEQ ID NO: 5592074 - DNA, 25 bp, Homo sapien
ttccactcgcgtggtgccgtggtaa

SEQ ID NO: 5592075 - DNA, 25 bp, Homo sapien
gcggagacgaccctttccactcgcg

SEQ ID NO: 5592076 - DNA, 25 bp, Homo sapien
gagttccggttccggttgctgccgc

SEQ ID NO: 5592077 - DNA, 25 bp, Homo sapien
tagcgtctcgtccggtccttgctcc

SEQ ID NO: 5592078 - DNA, 25 bp, Homo sapien
cctcgcccgccgcctgttttcaggc

SEQ ID NO: 5592079 - DNA, 25 bp, Homo sapien
cgcgccaccgtccccatggggatgt

SEQ ID NO: 5592080 - DNA, 25 bp, Homo sapien
cctgttttcaggcgtagcgtctcgt

SEQ ID NO: 5592081 - DNA, 25 bp, Homo sapien
gctccccctccccgcagcgctcagt

SEQ ID NO: 5592082 - DNA, 25 bp, Homo sapien
cccacacacccttcctgctaacatt

SEQ ID NO: 5592083 - DNA, 25 bp, Homo sapien
gaaatgatacattctgtgcctatgc

SEQ ID NO: 5592084 - DNA, 25 bp, Homo sapien
aaacaaattttgcaggccaggcaag

SEQ ID NO: 5592085 - DNA, 25 bp, Homo sapien
catagttgatagaactggttttctg

SEQ ID NO: 5592086 - DNA, 25 bp, Homo sapien
ttattgaatacctgtttgaaatggt

SEQ ID NO: 5592087 - DNA, 25 bp, Homo sapien
tgaaatggtctcatatcaatgtata

SEQ ID NO: 5592088 - DNA, 25 bp, Homo sapien
gctgcatactgggcccatagttgat

SEQ ID NO: 5592089 - DNA, 25 bp, Homo sapien
ttccatagcttcacagttcccctca

SEQ ID NO: 5592090 - DNA, 25 bp, Homo sapien
gaacagctcaaatctagagttactc

SEQ ID NO: 5592091 - DNA, 25 bp, Homo sapien
taatggctactgaacagctcaaatc

SEQ ID NO: 5592092 - DNA, 25 bp, Homo sapien
tctgtgcctatgcaaacatatgttt

SEQ ID NO: 5592093 - DNA, 25 bp, Homo sapien
cctgggtctatcgtgccgactcgag

SEQ ID NO: 5592094 - DNA, 25 bp, Homo sapien
ctcgagtcggcacgatagacccagg

SEQ ID NO: 5592095 - DNA, 25 bp, Homo sapien
gtgtatgaatgggcctggtacttta

SEQ ID NO: 5592096 - DNA, 25 bp, Homo sapien
ggaggacagaatgagcaacttatcc

SEQ ID NO: 5592097 - DNA, 25 bp, Homo sapien
gcaaggtgtggaaagtatacaatgt

SEQ ID NO: 5592098 - DNA, 25 bp, Homo sapien
aagggaagagaattctcagcaaggt

SEQ ID NO: 5592099 - DNA, 25 bp, Homo sapien
ccattccaggaaatcgagagaagag

SEQ ID NO: 5592100 - DNA, 25 bp, Homo sapien
aatacagctggaaatggtccctgac

SEQ ID NO: 5592101 - DNA, 25 bp, Homo sapien
gctggagacatgtgaattggtactt

SEQ ID NO: 5592102 - DNA, 25 bp, Homo sapien
aagctgacaaagtgccatgtgagca

SEQ ID NO: 5592103 - DNA, 25 bp, Homo sapien
tcagcatgccaaatatatagaggtc

SEQ ID NO: 5592104 - DNA, 25 bp, Homo sapien
tgggagagacttatgtgtaaatgga

SEQ ID NO: 5592105 - DNA, 25 bp, Homo sapien
cttatccggccaaaaggaagtgtaa

SEQ ID NO: 5592106 - DNA, 25 bp, Homo sapien
cacacacgtaatcacagacacactc

SEQ ID NO: 5592107 - DNA, 25 bp, Homo sapien
actcagaaacagggttgagactagg

SEQ ID NO: 5592108 - DNA, 25 bp, Homo sapien
tgccgtgactcctggtctatctccc

SEQ ID NO: 5592109 - DNA, 25 bp, Homo sapien
attgtagaatagaattggtgtgatt

SEQ ID NO: 5592110 - DNA, 25 bp, Homo sapien
tccgaaactgtacatgccgtgactc

SEQ ID NO: 5592111 - DNA, 25 bp, Homo sapien
gactaggttgctgccaagctgaaag

SEQ ID NO: 5592112 - DNA, 25 bp, Homo sapien
ccgaggctgccttaagtaaaaacta

SEQ ID NO: 5592113 - DNA, 25 bp, Homo sapien
tggaacttttgataaaggccgaggc

SEQ ID NO: 5592114 - DNA, 25 bp, Homo sapien
ctgtgaatctctgaaagttggaact

SEQ ID NO: 5592115 - DNA, 25 bp, Homo sapien
agacacactcgcagcctgacttttt

SEQ ID NO: 5592116 - DNA, 25 bp, Homo sapien
gtaaagatcataacaccgtagccgt

SEQ ID NO: 5592117 - DNA, 25 bp, Homo sapien
ccacaaacccctccagaaagctgaa

SEQ ID NO: 5592118 - DNA, 25 bp, Homo sapien
cgccccacattggctcaggtgcgtg

SEQ ID NO: 5592119 - DNA, 25 bp, Homo sapien
ttccacctgccagctgcggagctgt

SEQ ID NO: 5592120 - DNA, 25 bp, Homo sapien
gaccagggctacctgctctgagtgc

SEQ ID NO: 5592121 - DNA, 25 bp, Homo sapien
ggcctgtctgccaagaccagggcta

SEQ ID NO: 5592122 - DNA, 25 bp, Homo sapien
tctccaactcgcgctgacatcaaac

SEQ ID NO: 5592123 - DNA, 25 bp, Homo sapien
gtgggtgcgtcgctcacctcccaat

SEQ ID NO: 5592124 - DNA, 25 bp, Homo sapien
tgaaaacctaggacagcaggtcctc

SEQ ID NO: 5592125 - DNA, 25 bp, Homo sapien
tctgtaaagtggacaagcctagttc

SEQ ID NO: 5592126 - DNA, 25 bp, Homo sapien
gtgacatgcacacctgccctggtct

SEQ ID NO: 5592127 - DNA, 25 bp, Homo sapien
gctgctgtatctgagctgtggagtc

SEQ ID NO: 5592128 - DNA, 25 bp, Homo sapien
gcagtccgtgggaccacgtaccatg

SEQ ID NO: 5592129 - DNA, 25 bp, Homo sapien
catggtacgtggtcccacggactgc

SEQ ID NO: 5592130 - DNA, 25 bp, Homo sapien
attccttgtcacaggtaaagtttta

SEQ ID NO: 5592131 - DNA, 25 bp, Homo sapien
atcactgtgagactgaacatctgcc

SEQ ID NO: 5592132 - DNA, 25 bp, Homo sapien
atgggcattgggttgccccttgagt

SEQ ID NO: 5592133 - DNA, 25 bp, Homo sapien
attttatacaaactggggctaatgc

SEQ ID NO: 5592134 - DNA, 25 bp, Homo sapien
acagaaatagtgtttagactgcata

SEQ ID NO: 5592135 - DNA, 25 bp, Homo sapien
tttgttataatgggcattgggttgc

SEQ ID NO: 5592136 - DNA, 25 bp, Homo sapien
atcatgaattcagttgcagcagaca

SEQ ID NO: 5592137 - DNA, 25 bp, Homo sapien
ttatacaaactggggctaatgcttc

SEQ ID NO: 5592138 - DNA, 25 bp, Homo sapien
ttatttgcacaagaaaaacagtata

SEQ ID NO: 5592139 - DNA, 25 bp, Homo sapien
atgctttccaacatcactgtgagac

SEQ ID NO: 5592140 - DNA, 25 bp, Homo sapien
ttattgataaaaccagtagcagcag

SEQ ID NO: 5592141 - DNA, 25 bp, Homo sapien
ctgagaatatgaactatgcaacgat

SEQ ID NO: 5592142 - DNA, 25 bp, Homo sapien
atgccaggtaaaattcttccgtgat

SEQ ID NO: 5592143 - DNA, 25 bp, Homo sapien
atttgattgtcgagtcatcgttagt

SEQ ID NO: 5592144 - DNA, 25 bp, Homo sapien
tcagtgataacagggtagtaattta

SEQ ID NO: 5592145 - DNA, 25 bp, Homo sapien
gtctttgatagtccgaatgtgcttc

SEQ ID NO: 5592146 - DNA, 25 bp, Homo sapien
gttttcaagtggattgctcatgttc

SEQ ID NO: 5592147 - DNA, 25 bp, Homo sapien
tatttggaaattatagcaaggcatc

SEQ ID NO: 5592148 - DNA, 25 bp, Homo sapien
tagctgatgtgtatgcataggtatt

SEQ ID NO: 5592149 - DNA, 25 bp, Homo sapien
tgcaacgattgcaccacgtcttttg

SEQ ID NO: 5592150 - DNA, 25 bp, Homo sapien
tgccaaattgcaatcaagaaaccat

SEQ ID NO: 5592151 - DNA, 25 bp, Homo sapien
aacatttgtaaaacagttggtgctt

SEQ ID NO: 5592152 - DNA, 25 bp, Homo sapien
tgaggctacctaatacaggacactc

SEQ ID NO: 5592153 - DNA, 25 bp, Homo sapien
taactaaactggctccccaccaatc

SEQ ID NO: 5592154 - DNA, 25 bp, Homo sapien
acagccttacctgctaagggcaata

SEQ ID NO: 5592155 - DNA, 25 bp, Homo sapien
ctgtaagaggtaaatttaggaagag

SEQ ID NO: 5592156 - DNA, 25 bp, Homo sapien
aggaaactgaggctacctaatacag

SEQ ID NO: 5592157 - DNA, 25 bp, Homo sapien
tctgtaatcctggctaataaagaga

SEQ ID NO: 5592158 - DNA, 25 bp, Homo sapien
tttcgagaccaactggggcaaaata

SEQ ID NO: 5592159 - DNA, 25 bp, Homo sapien
ctcacataaattgcttaatacagcc

SEQ ID NO: 5592160 - DNA, 25 bp, Homo sapien
tgtatgcattacatgggaaggaaac

SEQ ID NO: 5592161 - DNA, 25 bp, Homo sapien
aaagtgcatcttctaatagccaggc

SEQ ID NO: 5592162 - DNA, 25 bp, Homo sapien
aggaagaggagttagaagttttcca

SEQ ID NO: 5592163 - DNA, 25 bp, Homo sapien
gaaaacttgcaggccttgtgaggag

SEQ ID NO: 5592164 - DNA, 25 bp, Homo sapien
ttgtgaggagtaactcaagatggag

SEQ ID NO: 5592165 - DNA, 25 bp, Homo sapien
actccgatgtctgagaattgagcct

SEQ ID NO: 5592166 - DNA, 25 bp, Homo sapien
aaggaaccaagagtcaaatccaaac

SEQ ID NO: 5592167 - DNA, 25 bp, Homo sapien
ctagaattgtgtgggttcaaccctg

SEQ ID NO: 5592168 - DNA, 25 bp, Homo sapien
gctgcaaatgatgagaaaatctaca

SEQ ID NO: 5592169 - DNA, 25 bp, Homo sapien
ccaggccacatctcacaataggtat

SEQ ID NO: 5592170 - DNA, 25 bp, Homo sapien
tacagaaatggtttagaaatcctcc

SEQ ID NO: 5592171 - DNA, 25 bp, Homo sapien
tcctcctaggaaaacttgcaggcct

SEQ ID NO: 5592172 - DNA, 25 bp, Homo sapien
gatggaggatgtggattactccgat

SEQ ID NO: 5592173 - DNA, 25 bp, Homo sapien
ctcaagggctgacttacagaaatgg

SEQ ID NO: 5592174 - DNA, 25 bp, Homo sapien
gcccaggattctacagaagcagctc

SEQ ID NO: 5592175 - DNA, 25 bp, Homo sapien
taaaaaccagtagtgcaagtggaac

SEQ ID NO: 5592176 - DNA, 25 bp, Homo sapien
gagcagagattaacgatgaagtaaa

SEQ ID NO: 5592177 - DNA, 25 bp, Homo sapien
cgtcagagcaacatagttgggacac

SEQ ID NO: 5592178 - DNA, 25 bp, Homo sapien
tggtggccccttaaaagctgctcta

SEQ ID NO: 5592179 - DNA, 25 bp, Homo sapien
ggaacaaaggcgaaattacaactga

SEQ ID NO: 5592180 - DNA, 25 bp, Homo sapien
gggtaggtttacttgcatggcacac

SEQ ID NO: 5592181 - DNA, 25 bp, Homo sapien
atgcaggctgttatcggccagagca

SEQ ID NO: 5592182 - DNA, 25 bp, Homo sapien
atacatcttgcaggagacaacaact

SEQ ID NO: 5592183 - DNA, 25 bp, Homo sapien
ctctatgaattcccaggcgccgcag

SEQ ID NO: 5592184 - DNA, 25 bp, Homo sapien
ctcttccagtcaccccaggcaaggg

SEQ ID NO: 5592185 - DNA, 25 bp, Homo sapien
tatttgcagcaaggcctcaaagggt

SEQ ID NO: 5592186 - DNA, 25 bp, Homo sapien
agagctggaaaagaagtcatcagaa

SEQ ID NO: 5592187 - DNA, 25 bp, Homo sapien
agggcttctaaacaggattaaggtc

SEQ ID NO: 5592188 - DNA, 25 bp, Homo sapien
agcaagagttaaaagagacagtatc

SEQ ID NO: 5592189 - DNA, 25 bp, Homo sapien
cgcagagaaatcaggcaatgttatc

SEQ ID NO: 5592190 - DNA, 25 bp, Homo sapien
gtaataatacgcagagaaatcaggc

SEQ ID NO: 5592191 - DNA, 25 bp, Homo sapien
cagaataagcatgcagatcagtatt

SEQ ID NO: 5592192 - DNA, 25 bp, Homo sapien
cagatcagtatttgcagaggaatat

SEQ ID NO: 5592193 - DNA, 25 bp, Homo sapien
aggtaggtagctacagaagtcttgc

SEQ ID NO: 5592194 - DNA, 25 bp, Homo sapien
caatgtcaaagaagagctactttac

SEQ ID NO: 5592195 - DNA, 25 bp, Homo sapien
cttcagagttaagttagggcttcta

SEQ ID NO: 5592196 - DNA, 25 bp, Homo sapien
tcttcaagtttaaatggaccataat

SEQ ID NO: 5592197 - DNA, 25 bp, Homo sapien
tgtttcaggagaatccagaaatcac

SEQ ID NO: 5592198 - DNA, 25 bp, Homo sapien
tccagaaatcactatgaagcaccat

SEQ ID NO: 5592199 - DNA, 25 bp, Homo sapien
attctgtacagatctgggttaaatt

SEQ ID NO: 5592200 - DNA, 25 bp, Homo sapien
accagggagatagtaaagtacccta

SEQ ID NO: 5592201 - DNA, 25 bp, Homo sapien
gtctaccaatagctgaaaaccatta

SEQ ID NO: 5592202 - DNA, 25 bp, Homo sapien
taatgctcatggagagatacatttc

SEQ ID NO: 5592203 - DNA, 25 bp, Homo sapien
acttaaggcatgtttcaggagaatc

SEQ ID NO: 5592204 - DNA, 25 bp, Homo sapien
agaataagtcagtctaccaatagct

SEQ ID NO: 5592205 - DNA, 25 bp, Homo sapien
tgcctacttcttgcaaaccagggag

SEQ ID NO: 5592206 - DNA, 25 bp, Homo sapien
tataatcaaagatgaatcaagaatt

SEQ ID NO: 5592207 - DNA, 25 bp, Homo sapien
caaagcttaaatgatggtactaatt

SEQ ID NO: 5592208 - DNA, 25 bp, Homo sapien
atgatggtactaatttgattgagag

SEQ ID NO: 5592209 - DNA, 25 bp, Homo sapien
agaacccatgagattaattggtata

SEQ ID NO: 5592210 - DNA, 25 bp, Homo sapien
ttgattgagagtagttttcagcatc

SEQ ID NO: 5592211 - DNA, 25 bp, Homo sapien
agaactaaccactctagaacccatg

SEQ ID NO: 5592212 - DNA, 25 bp, Homo sapien
ttactgccaagtattcaaagcttaa

SEQ ID NO: 5592213 - DNA, 25 bp, Homo sapien
aagggagcctaaagcctttacgatg

SEQ ID NO: 5592214 - DNA, 25 bp, Homo sapien
tttacgatgtttcctgaacagttta

SEQ ID NO: 5592215 - DNA, 25 bp, Homo sapien
tagagaactattgcttataaacacc

SEQ ID NO: 5592216 - DNA, 25 bp, Homo sapien
ttatatcaactagaaaatagagaac

SEQ ID NO: 5592217 - DNA, 25 bp, Homo sapien
acaattcccgtagaactaaccactc

SEQ ID NO: 5592218 - DNA, 25 bp, Homo sapien
tgtgtgtaactgtgtagtacttgat

SEQ ID NO: 5592219 - DNA, 25 bp, Homo sapien
tcctaattaggatacgttctcataa

SEQ ID NO: 5592220 - DNA, 25 bp, Homo sapien
ccccaaatcacaatgcttatacacc

SEQ ID NO: 5592221 - DNA, 25 bp, Homo sapien
tgcaaatgaatgaccagaaatacag

SEQ ID NO: 5592222 - DNA, 25 bp, Homo sapien
ttgatgtgttttatggggcagctta

SEQ ID NO: 5592223 - DNA, 25 bp, Homo sapien
accaaccagactgtgagttattcac

SEQ ID NO: 5592224 - DNA, 25 bp, Homo sapien
tctaaaatgggattagccccaaatc

SEQ ID NO: 5592225 - DNA, 25 bp, Homo sapien
cctaggacttgactatgtggcatac

SEQ ID NO: 5592226 - DNA, 25 bp, Homo sapien
ccagaaatacaggcaagtatattaa

SEQ ID NO: 5592227 - DNA, 25 bp, Homo sapien
cttgattaggtaaacaaagtattat

SEQ ID NO: 5592228 - DNA, 25 bp, Homo sapien
tggggcagcttaaaatacattcacc

SEQ ID NO: 5592229 - DNA, 25 bp, Homo sapien
tcatcgtctagcggttcaaggagat

SEQ ID NO: 5592230 - DNA, 25 bp, Homo sapien
cctgtgaaatcataagcccatattc

SEQ ID NO: 5592231 - DNA, 25 bp, Homo sapien
tcacagcccatctttccccaggatc

SEQ ID NO: 5592232 - DNA, 25 bp, Homo sapien
taaaattatttgtggtgtcagctgt

SEQ ID NO: 5592233 - DNA, 25 bp, Homo sapien
atagagatgaccccttaatgttgct

SEQ ID NO: 5592234 - DNA, 25 bp, Homo sapien
actcacagcattcacccaggatgac

SEQ ID NO: 5592235 - DNA, 25 bp, Homo sapien
acatttactaacatgagaagggtgg

SEQ ID NO: 5592236 - DNA, 25 bp, Homo sapien
gttcaaggagatggatgtttcgttt

SEQ ID NO: 5592237 - DNA, 25 bp, Homo sapien
ccaggatgacagctttcgtgttcat

SEQ ID NO: 5592238 - DNA, 25 bp, Homo sapien
aagacctaccttcgcctcacagccc

SEQ ID NO: 5592239 - DNA, 25 bp, Homo sapien
gattactagtgaaatagagatgacc

SEQ ID NO: 5592240 - DNA, 25 bp, Homo sapien
ttacaaagcctatggacttctagcc

SEQ ID NO: 5592241 - DNA, 25 bp, Homo sapien
gtctggtgaaaaagcagctagtctt

SEQ ID NO: 5592242 - DNA, 25 bp, Homo sapien
ctttgccccataggcctcagccacc

SEQ ID NO: 5592243 - DNA, 25 bp, Homo sapien
atctggattacctggtcaccaaaat

SEQ ID NO: 5592244 - DNA, 25 bp, Homo sapien
cattagcagtgatgagtgcaaggaa

SEQ ID NO: 5592245 - DNA, 25 bp, Homo sapien
cattgtgcaaacgcacaagggcctg

SEQ ID NO: 5592246 - DNA, 25 bp, Homo sapien
tcttagactaagagaagagaagcaa

SEQ ID NO: 5592247 - DNA, 25 bp, Homo sapien
tctgttggtctggtgaaaaagcagc

SEQ ID NO: 5592248 - DNA, 25 bp, Homo sapien
tgacctgtagaaacagtcacgttgc

SEQ ID NO: 5592249 - DNA, 25 bp, Homo sapien
acatccaggcacaaggctgaatttc

SEQ ID NO: 5592250 - DNA, 25 bp, Homo sapien
gcatgggtcctgattggcactgaca

SEQ ID NO: 5592251 - DNA, 25 bp, Homo sapien
attgaaagttgtcagaacttgtctc

SEQ ID NO: 5592252 - DNA, 25 bp, Homo sapien
agagccacaagcatcggcctctcca

SEQ ID NO: 5592253 - DNA, 25 bp, Homo sapien
aaacacagaatctaatcccaggaga

SEQ ID NO: 5592254 - DNA, 25 bp, Homo sapien
gcaaattgatgttggtaagagccac

SEQ ID NO: 5592255 - DNA, 25 bp, Homo sapien
tgcaggcatcaggtacattatagac

SEQ ID NO: 5592256 - DNA, 25 bp, Homo sapien
catagggtgaagttgcatcctggag

SEQ ID NO: 5592257 - DNA, 25 bp, Homo sapien
ctttggacacttccgtgcctcgcac

SEQ ID NO: 5592258 - DNA, 25 bp, Homo sapien
tcccaggagattaatttatgaacgc

SEQ ID NO: 5592259 - DNA, 25 bp, Homo sapien
atttatgaacgcagcatagggtgaa

SEQ ID NO: 5592260 - DNA, 25 bp, Homo sapien
ctccaaacccacggggatccagaag

SEQ ID NO: 5592261 - DNA, 25 bp, Homo sapien
tgcatcctggagactgcaaattgat

SEQ ID NO: 5592262 - DNA, 25 bp, Homo sapien
ctcttcgccacgcgtgcccctggaa

SEQ ID NO: 5592263 - DNA, 25 bp, Homo sapien
gtcgtaagggccgctccctctgtct

SEQ ID NO: 5592264 - DNA, 25 bp, Homo sapien
gcgggggaataatcctcatgacagt

SEQ ID NO: 5592265 - DNA, 25 bp, Homo sapien
gctctggacggactctcttcgccac

SEQ ID NO: 5592266 - DNA, 25 bp, Homo sapien
ggactgaaacgatcaattagcagcc

SEQ ID NO: 5592267 - DNA, 25 bp, Homo sapien
ttagcagcccgaaacgcactgtgaa

SEQ ID NO: 5592268 - DNA, 25 bp, Homo sapien
gttgagcgatcagtcataaacgcac

SEQ ID NO: 5592269 - DNA, 25 bp, Homo sapien
ggtccctgtgaactacggagagacc

SEQ ID NO: 5592270 - DNA, 25 bp, Homo sapien
ctgctctctccgggagacgaacgcg

SEQ ID NO: 5592271 - DNA, 25 bp, Homo sapien
agaaccaacaaggtgttgagcgatc

SEQ ID NO: 5592272 - DNA, 25 bp, Homo sapien
taaacacaaatcagtcgtaagggcc

SEQ ID NO: 5592273 - DNA, 25 bp, Homo sapien
atcctctcagtcaccctccacatcc

SEQ ID NO: 5592274 - DNA, 25 bp, Homo sapien
aggaggatgtaagcagattgtttca

SEQ ID NO: 5592275 - DNA, 25 bp, Homo sapien
gaattccagttgctgaggaggatgt

SEQ ID NO: 5592276 - DNA, 25 bp, Homo sapien
cagcacacagaatgtctaactaact

SEQ ID NO: 5592277 - DNA, 25 bp, Homo sapien
tactggcctttgccctagtgcaggc

SEQ ID NO: 5592278 - DNA, 25 bp, Homo sapien
caagatttattgaactggatgaatg

SEQ ID NO: 5592279 - DNA, 25 bp, Homo sapien
acagggtaggaatcatggctattca

SEQ ID NO: 5592280 - DNA, 25 bp, Homo sapien
tgtttcagagatggataaggaaaga

SEQ ID NO: 5592281 - DNA, 25 bp, Homo sapien
gaatgaatcaatggcttgtggaggg

SEQ ID NO: 5592282 - DNA, 25 bp, Homo sapien
aactaacttgaggaattccagttgc

SEQ ID NO: 5592283 - DNA, 25 bp, Homo sapien
atggctattcatgggtactcattct

SEQ ID NO: 5592284 - DNA, 25 bp, Homo sapien
ggccctatcgccctaggctcctacc

SEQ ID NO: 5592285 - DNA, 25 bp, Homo sapien
cccaccacccgccttgttctgtgcc

SEQ ID NO: 5592286 - DNA, 25 bp, Homo sapien
cctggccccaccacccgccttgttc

SEQ ID NO: 5592287 - DNA, 25 bp, Homo sapien
gctcctaccatgacactgccaggca

SEQ ID NO: 5592288 - DNA, 25 bp, Homo sapien
ggacagggccctatcgccctaggct

SEQ ID NO: 5592289 - DNA, 25 bp, Homo sapien
gttctgagcctctgggctcctggtc

SEQ ID NO: 5592290 - DNA, 25 bp, Homo sapien
ctccatctgtccagcttgctctgtc

SEQ ID NO: 5592291 - DNA, 25 bp, Homo sapien
accatgacactgccaggcatgggat

SEQ ID NO: 5592292 - DNA, 25 bp, Homo sapien
catgacactgccaggcatgggatga

SEQ ID NO: 5592293 - DNA, 25 bp, Homo sapien
ccctaggctcctaccatgacactgc

SEQ ID NO: 5592294 - DNA, 25 bp, Homo sapien
ctgtccagcttgctctgtcttgcac

SEQ ID NO: 5592295 - DNA, 25 bp, Homo sapien
catgtcaaccagcaatagtaccaac

SEQ ID NO: 5592296 - DNA, 25 bp, Homo sapien
gtaataagagtgataatagtgatcc

SEQ ID NO: 5592297 - DNA, 25 bp, Homo sapien
gatgggaattttgagcaccccaaac

SEQ ID NO: 5592298 - DNA, 25 bp, Homo sapien
ttaagttacagtctggtagtgacag

SEQ ID NO: 5592299 - DNA, 25 bp, Homo sapien
atgaaggtgtattggcatagtactt

SEQ ID NO: 5592300 - DNA, 25 bp, Homo sapien
cccatcactaatggctgtaggcaag

SEQ ID NO: 5592301 - DNA, 25 bp, Homo sapien
accccaaaccacctctgcaagcctg

SEQ ID NO: 5592302 - DNA, 25 bp, Homo sapien
ttaatactgtaataggccggtcacg

SEQ ID NO: 5592303 - DNA, 25 bp, Homo sapien
caccaaatcaactggggctgatggg

SEQ ID NO: 5592304 - DNA, 25 bp, Homo sapien
caagcctgagcttgtcaaagacacc

SEQ ID NO: 5592305 - DNA, 25 bp, Homo sapien
tcagtggtacaaatgcgcttggaag

SEQ ID NO: 5592306 - DNA, 25 bp, Homo sapien
attgagctacggaaagtaacatgac

SEQ ID NO: 5592307 - DNA, 25 bp, Homo sapien
gaaatgctacacagagttgaagaat

SEQ ID NO: 5592308 - DNA, 25 bp, Homo sapien
cggtcctttaggaaatcgatagtac

SEQ ID NO: 5592309 - DNA, 25 bp, Homo sapien
aggcaatggagaaaacacttacaga

SEQ ID NO: 5592310 - DNA, 25 bp, Homo sapien
gtggataacagccatattgagctac

SEQ ID NO: 5592311 - DNA, 25 bp, Homo sapien
tcttaaccagaaggaaatgctacac

SEQ ID NO: 5592312 - DNA, 25 bp, Homo sapien
tctttgtataatgtggataacagcc

SEQ ID NO: 5592313 - DNA, 25 bp, Homo sapien
taccctccctggcaagaggcaatgg

SEQ ID NO: 5592314 - DNA, 25 bp, Homo sapien
tacagaaccaagtgaacactgtcac

SEQ ID NO: 5592315 - DNA, 25 bp, Homo sapien
gtaacatgacaaaagaatctctgag

SEQ ID NO: 5592316 - DNA, 25 bp, Homo sapien
gctctaggaagccattaccctccct

SEQ ID NO: 5592317 - DNA, 25 bp, Homo sapien
aatgaatagtcagttggcacacagt

SEQ ID NO: 5592318 - DNA, 25 bp, Homo sapien
ttagaagaatctatgatgttctctt

SEQ ID NO: 5592319 - DNA, 25 bp, Homo sapien
ctggccatatctgaaatcaagtgag

SEQ ID NO: 5592320 - DNA, 25 bp, Homo sapien
aaaggacagaatgaaacattgaccc

SEQ ID NO: 5592321 - DNA, 25 bp, Homo sapien
tccacaactataggtgactatcttc

SEQ ID NO: 5592322 - DNA, 25 bp, Homo sapien
gagcagcagaaaaccccatgactgt

SEQ ID NO: 5592323 - DNA, 25 bp, Homo sapien
aacacaatgaatagtcagttggcac

SEQ ID NO: 5592324 - DNA, 25 bp, Homo sapien
ggagtttccactggccatatctgaa

SEQ ID NO: 5592325 - DNA, 25 bp, Homo sapien
aaaaccccatgactgtgactacaac

SEQ ID NO: 5592326 - DNA, 25 bp, Homo sapien
tggcacacagtgattcacaaaggaa

SEQ ID NO: 5592327 - DNA, 25 bp, Homo sapien
tttcaaatggataaaggacagaatg

SEQ ID NO: 5592328 - DNA, 25 bp, Homo sapien
tggtccatgtgaatgacactgcttg

SEQ ID NO: 5592329 - DNA, 25 bp, Homo sapien
cactgcttggacttgtgcaatgcac

SEQ ID NO: 5592330 - DNA, 25 bp, Homo sapien
gcacaacctgtagagcaatatgggc

SEQ ID NO: 5592331 - DNA, 25 bp, Homo sapien
attgcctgtgaatccatggtttgaa

SEQ ID NO: 5592332 - DNA, 25 bp, Homo sapien
agtgcagggttccaagcatgacttg

SEQ ID NO: 5592333 - DNA, 25 bp, Homo sapien
gaaagcaatgggtattgcgtgctac

SEQ ID NO: 5592334 - DNA, 25 bp, Homo sapien
tctatcaatatggtagtggttacac

SEQ ID NO: 5592335 - DNA, 25 bp, Homo sapien
aagtagacacattaagtacagacac

SEQ ID NO: 5592336 - DNA, 25 bp, Homo sapien
ggttacacaaattatagaagatcca

SEQ ID NO: 5592337 - DNA, 25 bp, Homo sapien
tagtgaaatcgaaaagtaaaatgtc

SEQ ID NO: 5592338 - DNA, 25 bp, Homo sapien
aatatgggccaggcatgcctagtga

SEQ ID NO: 5592339 - DNA, 25 bp, Homo sapien
gagtccgtcaggagcatatttgtgc

SEQ ID NO: 5592340 - DNA, 25 bp, Homo sapien
ctgttggcattttcctgagtccgtc

SEQ ID NO: 5592341 - DNA, 25 bp, Homo sapien
cagggtgctctgctgttggcatttt

SEQ ID NO: 5592342 - DNA, 25 bp, Homo sapien
aattgtaagtgccaacttgtgtttt

SEQ ID NO: 5592343 - DNA, 25 bp, Homo sapien
tttgtgtttcaaagttccagaagca

SEQ ID NO: 5592344 - DNA, 25 bp, Homo sapien
gggagtagcccactgccacccttcc

SEQ ID NO: 5592345 - DNA, 25 bp, Homo sapien
cacccccttcccaggggagcgctga

SEQ ID NO: 5592346 - DNA, 25 bp, Homo sapien
tctgtgtgttgtttagagctggctg

SEQ ID NO: 5592347 - DNA, 25 bp, Homo sapien
gagctggctgcatctttaaaattgt

SEQ ID NO: 5592348 - DNA, 25 bp, Homo sapien
gtgtgttgtttagagctggctgcat

SEQ ID NO: 5592349 - DNA, 25 bp, Homo sapien
ctgagtccgtcaggagcatatttgt

SEQ ID NO: 5592350 - DNA, 25 bp, Homo sapien
tatgtttgcagagcctaagacaagc

SEQ ID NO: 5592351 - DNA, 25 bp, Homo sapien
gaaccatgtcatggagaagcaataa

SEQ ID NO: 5592352 - DNA, 25 bp, Homo sapien
tattagctatgttttggagggtcaa

SEQ ID NO: 5592353 - DNA, 25 bp, Homo sapien
gcccaggccatctgtaggctacaga

SEQ ID NO: 5592354 - DNA, 25 bp, Homo sapien
atggattgtcaattgcacagggggt

SEQ ID NO: 5592355 - DNA, 25 bp, Homo sapien
tctgtcacctgtaagaaaaacacaa

SEQ ID NO: 5592356 - DNA, 25 bp, Homo sapien
taggctacagactcagctgctacct

SEQ ID NO: 5592357 - DNA, 25 bp, Homo sapien
cccatgaactaatgagaaaagaacc

SEQ ID NO: 5592358 - DNA, 25 bp, Homo sapien
aatttctggaatgtgtggaagtgac

SEQ ID NO: 5592359 - DNA, 25 bp, Homo sapien
cagtcaacagtgggctattattatt

SEQ ID NO: 5592360 - DNA, 25 bp, Homo sapien
gagggtcaaagttatgcatggattg

SEQ ID NO: 5592361 - DNA, 25 bp, Homo sapien
ggaacagcatgtgtcccggtagttc

SEQ ID NO: 5592362 - DNA, 25 bp, Homo sapien
ggaagactcgaaagtgacaatggag

SEQ ID NO: 5592363 - DNA, 25 bp, Homo sapien
ggagaccgtgcagacactgcaagtg

SEQ ID NO: 5592364 - DNA, 25 bp, Homo sapien
gctatcaagttcaagaaggagttag

SEQ ID NO: 5592365 - DNA, 25 bp, Homo sapien
tgcagacactgcaagtgccagaaac

SEQ ID NO: 5592366 - DNA, 25 bp, Homo sapien
aagtgacaatggagctatcaagttc

SEQ ID NO: 5592367 - DNA, 25 bp, Homo sapien
actcgaaagtgacaatggagctatc

SEQ ID NO: 5592368 - DNA, 25 bp, Homo sapien
catgtgtcccggtagttcagggtgg

SEQ ID NO: 5592369 - DNA, 25 bp, Homo sapien
ttcagcgcaaactcatctgggcccg

SEQ ID NO: 5592370 - DNA, 25 bp, Homo sapien
tcaagttcaagaaggagttagtagg

SEQ ID NO: 5592371 - DNA, 25 bp, Homo sapien
agtgccagaaacccgatccacactg

SEQ ID NO: 5592372 - DNA, 25 bp, Homo sapien
atgtagaatgagaacaaacaagaac

SEQ ID NO: 5592373 - DNA, 25 bp, Homo sapien
tttacaaaatgaattcgtttctctc

SEQ ID NO: 5592374 - DNA, 25 bp, Homo sapien
acaaacaagaaccaattcaaactcc

SEQ ID NO: 5592375 - DNA, 25 bp, Homo sapien
aacactgcaaaaaatttgaatgaat

SEQ ID NO: 5592376 - DNA, 25 bp, Homo sapien
ggtacccaggcatcttttaagcaaa

SEQ ID NO: 5592377 - DNA, 25 bp, Homo sapien
ataggtattcttaacgttgaacatt

SEQ ID NO: 5592378 - DNA, 25 bp, Homo sapien
tactcatctacaaaaggaatatagg

SEQ ID NO: 5592379 - DNA, 25 bp, Homo sapien
aaactcctaaaatcttgcctctgta

SEQ ID NO: 5592380 - DNA, 25 bp, Homo sapien
ataaaataaaaggtacccaggcatc

SEQ ID NO: 5592381 - DNA, 25 bp, Homo sapien
tttctgtacatcaagccatcattta

SEQ ID NO: 5592382 - DNA, 25 bp, Homo sapien
gtgactccttaagcgaccctgaact

SEQ ID NO: 5592383 - DNA, 25 bp, Homo sapien
tatcatgtaggtgtatttgtaatcc

SEQ ID NO: 5592384 - DNA, 25 bp, Homo sapien
tctgactcactggcaagtttgaccc

SEQ ID NO: 5592385 - DNA, 25 bp, Homo sapien
aatcgtaatcaaggcataagctggt

SEQ ID NO: 5592386 - DNA, 25 bp, Homo sapien
tgacccaagttaccacattaggacc

SEQ ID NO: 5592387 - DNA, 25 bp, Homo sapien
aatccattccaataagaggactcta

SEQ ID NO: 5592388 - DNA, 25 bp, Homo sapien
aggactctataatggcctcgtgccg

SEQ ID NO: 5592389 - DNA, 25 bp, Homo sapien
caaggcataagctggttcctgtggg

SEQ ID NO: 5592390 - DNA, 25 bp, Homo sapien
catgcatcttggacatcaacgtctt

SEQ ID NO: 5592391 - DNA, 25 bp, Homo sapien
ggcagattatgaaacctaactcttg

SEQ ID NO: 5592392 - DNA, 25 bp, Homo sapien
cacattaggaccatcctccccggcc

SEQ ID NO: 5592393 - DNA, 25 bp, Homo sapien
atctaagctgtctgagatgcagcac

SEQ ID NO: 5592394 - DNA, 25 bp, Homo sapien
cttttgctcgtgaatttgagaggca

SEQ ID NO: 5592395 - DNA, 25 bp, Homo sapien
ataggtagaagagcagattttgaat

SEQ ID NO: 5592396 - DNA, 25 bp, Homo sapien
agaggcagtgttcgaatcacagctt

SEQ ID NO: 5592397 - DNA, 25 bp, Homo sapien
tgaggaaatgaatccgctaatcacc

SEQ ID NO: 5592398 - DNA, 25 bp, Homo sapien
aatgtttgttatctggggctgctca

SEQ ID NO: 5592399 - DNA, 25 bp, Homo sapien
acaaagaaatgataactgaggaaat

SEQ ID NO: 5592400 - DNA, 25 bp, Homo sapien
aaaccatcccacaacttagtagcat

SEQ ID NO: 5592401 - DNA, 25 bp, Homo sapien
acagcttggttagcgtgtgacctca

SEQ ID NO: 5592402 - DNA, 25 bp, Homo sapien
ttagtagcattaaatggattgcccc

SEQ ID NO: 5592403 - DNA, 25 bp, Homo sapien
tggggctgctcaaacaaaccatccc

SEQ ID NO: 5592404 - DNA, 25 bp, Homo sapien
ttagcgtgtgacctcaaggaatgtt

SEQ ID NO: 5592405 - DNA, 25 bp, Homo sapien
atagaacagcgacaatggtaacaat

SEQ ID NO: 5592406 - DNA, 25 bp, Homo sapien
aagaaagtcctaacacagaaggtaa

SEQ ID NO: 5592407 - DNA, 25 bp, Homo sapien
agctcctacagagtgatgaccccac

SEQ ID NO: 5592408 - DNA, 25 bp, Homo sapien
ttggaaatcatggacagagtctcca

SEQ ID NO: 5592409 - DNA, 25 bp, Homo sapien
ttagagacctccatttgaagctgaa

SEQ ID NO: 5592410 - DNA, 25 bp, Homo sapien
gaaatgcccccttgatgtgccagcc

SEQ ID NO: 5592411 - DNA, 25 bp, Homo sapien
tgtgccagccaaggacccttagaga

SEQ ID NO: 5592412 - DNA, 25 bp, Homo sapien
aaagaaaagagtgcgtgtttgctct

SEQ ID NO: 5592413 - DNA, 25 bp, Homo sapien
aatcactgtgaattacggagcttcc

SEQ ID NO: 5592414 - DNA, 25 bp, Homo sapien
aagattcagcatatagaacagcgac

SEQ ID NO: 5592415 - DNA, 25 bp, Homo sapien
ggggtggatgaccttttggaaatca

SEQ ID NO: 5592416 - DNA, 25 bp, Homo sapien
tcaaataccttaacagagacaacgt

SEQ ID NO: 5592417 - DNA, 25 bp, Homo sapien
acgttgtctctgttaaggtatttga

SEQ ID NO: 5592418 - DNA, 25 bp, Homo sapien
gggctcgtgtcctcgtctgcagtgt

SEQ ID NO: 5592419 - DNA, 25 bp, Homo sapien
caagcatcttctctgacgtgggtcc

SEQ ID NO: 5592420 - DNA, 25 bp, Homo sapien
gtgacagggactgttgccatctccc

SEQ ID NO: 5592421 - DNA, 25 bp, Homo sapien
tcttccagaccgtattgtggtgtgg

SEQ ID NO: 5592422 - DNA, 25 bp, Homo sapien
gctgccttctccggactctgcgtcg

SEQ ID NO: 5592423 - DNA, 25 bp, Homo sapien
gccagcattccagtgacagggactg

SEQ ID NO: 5592424 - DNA, 25 bp, Homo sapien
cccccaccaacaccgtccagagagg

SEQ ID NO: 5592425 - DNA, 25 bp, Homo sapien
ctttgttgaagacattgggcgtcag

SEQ ID NO: 5592426 - DNA, 25 bp, Homo sapien
ttccactgccagggtcataagggat

SEQ ID NO: 5592427 - DNA, 25 bp, Homo sapien
gtctgcagtgtgttcatcttgatcc

SEQ ID NO: 5592428 - DNA, 25 bp, Homo sapien
gggagggattccatgctgccttctc

SEQ ID NO: 5592429 - DNA, 25 bp, Homo sapien
aagttatgttggacaatgcagggct

SEQ ID NO: 5592430 - DNA, 25 bp, Homo sapien
caccgctgacacagagtaagggtgt

SEQ ID NO: 5592431 - DNA, 25 bp, Homo sapien
actccgtctctgcaagaaatgaaac

SEQ ID NO: 5592432 - DNA, 25 bp, Homo sapien
atgcagggctagaattccagctctt

SEQ ID NO: 5592433 - DNA, 25 bp, Homo sapien
gactgcaccacggcactgcagcttg

SEQ ID NO: 5592434 - DNA, 25 bp, Homo sapien
ttcagaggaaggtattggactcctc

SEQ ID NO: 5592435 - DNA, 25 bp, Homo sapien
gctccttgagaggctaagaggattg

SEQ ID NO: 5592436 - DNA, 25 bp, Homo sapien
ttaaacggaaatagccacgtgtgtc

SEQ ID NO: 5592437 - DNA, 25 bp, Homo sapien
gcaagaaatgaaacaatcagctggg

SEQ ID NO: 5592438 - DNA, 25 bp, Homo sapien
ctgctggatatcatattggacagtg

SEQ ID NO: 5592439 - DNA, 25 bp, Homo sapien
cagcggtgacgatgatctatcttct

SEQ ID NO: 5592440 - DNA, 25 bp, Homo sapien
gaacctgaggaacacaaaccaagat

SEQ ID NO: 5592441 - DNA, 25 bp, Homo sapien
atcttggtttgtgttcctcaggttc

SEQ ID NO: 5592442 - DNA, 25 bp, Homo sapien
tctcttagtgacctggggacattgg

SEQ ID NO: 5592443 - DNA, 25 bp, Homo sapien
caggagtggcaactccagatgattt

SEQ ID NO: 5592444 - DNA, 25 bp, Homo sapien
ggaggaactgcctatccctgtccca

SEQ ID NO: 5592445 - DNA, 25 bp, Homo sapien
ggaatacagtggaaggtcattctct

SEQ ID NO: 5592446 - DNA, 25 bp, Homo sapien
gatacaccatggcagtgagcagtga

SEQ ID NO: 5592447 - DNA, 25 bp, Homo sapien
cactgtcttcagaaactccagggac

SEQ ID NO: 5592448 - DNA, 25 bp, Homo sapien
ccatggtcttgtccacaggtcagcc

SEQ ID NO: 5592449 - DNA, 25 bp, Homo sapien
gcagtgagggagacactgtcttcag

SEQ ID NO: 5592450 - DNA, 25 bp, Homo sapien
ccacaggtcagcctcacaaagggaa

SEQ ID NO: 5592451 - DNA, 25 bp, Homo sapien
ggcagatacaccatggcagtgagca

SEQ ID NO: 5592452 - DNA, 25 bp, Homo sapien
gacagggcttgccagtcagaatgaa

SEQ ID NO: 5592453 - DNA, 25 bp, Homo sapien
aattcaagcaagtagctacctccat

SEQ ID NO: 5592454 - DNA, 25 bp, Homo sapien
ttaaactgtgcatatgtcctctttc

SEQ ID NO: 5592455 - DNA, 25 bp, Homo sapien
agaaagcaaagacatgattagcaca

SEQ ID NO: 5592456 - DNA, 25 bp, Homo sapien
ttacgtgtatataggatcatatgtc

SEQ ID NO: 5592457 - DNA, 25 bp, Homo sapien
ttatggagacattcacagctggcta

SEQ ID NO: 5592458 - DNA, 25 bp, Homo sapien
caccaccgggagttaactattaaca

SEQ ID NO: 5592459 - DNA, 25 bp, Homo sapien
ttttcagccaagcagtgggtattca

SEQ ID NO: 5592460 - DNA, 25 bp, Homo sapien
caaaagaaaactgtgcactattttt

SEQ ID NO: 5592461 - DNA, 25 bp, Homo sapien
caatcaaaataaaactgtgtatgtt

SEQ ID NO: 5592462 - DNA, 25 bp, Homo sapien
tcacagctggctaaactatataaga

SEQ ID NO: 5592463 - DNA, 25 bp, Homo sapien
gtagctacctccatgacagaggcag

SEQ ID NO: 5592464 - DNA, 25 bp, Homo sapien
agaaaaatacaggaaggccactgta

SEQ ID NO: 5592465 - DNA, 25 bp, Homo sapien
agctgaaattggtaaaggcagacct

SEQ ID NO: 5592466 - DNA, 25 bp, Homo sapien
agaacacaaagctaactgcagtatt

SEQ ID NO: 5592467 - DNA, 25 bp, Homo sapien
taaaaattcaggagctggcaagcaa

SEQ ID NO: 5592468 - DNA, 25 bp, Homo sapien
agcaaagacacactcagagcacttc

SEQ ID NO: 5592469 - DNA, 25 bp, Homo sapien
ctggcaagcaaagacacactcagag

SEQ ID NO: 5592470 - DNA, 25 bp, Homo sapien
aactgttaaaaattcaggagctggc

SEQ ID NO: 5592471 - DNA, 25 bp, Homo sapien
aggaaggccactgtagaactgttaa

SEQ ID NO: 5592472 - DNA, 25 bp, Homo sapien
caataaatagcgaagaacacaaagc

SEQ ID NO: 5592473 - DNA, 25 bp, Homo sapien
tgagcatcagagcttagactagcct

SEQ ID NO: 5592474 - DNA, 25 bp, Homo sapien
aaaggcagacctctacaggtgcttc

SEQ ID NO: 5592475 - DNA, 25 bp, Homo sapien
tattccatgatagtagcatagccat

SEQ ID NO: 5592476 - DNA, 25 bp, Homo sapien
gttacaatactgagcactgaatttt

SEQ ID NO: 5592477 - DNA, 25 bp, Homo sapien
aaaaatctaagcagaaatgtctcat

SEQ ID NO: 5592478 - DNA, 25 bp, Homo sapien
caattgaaactgcaacaatgaggac

SEQ ID NO: 5592479 - DNA, 25 bp, Homo sapien
agatgcaatggattacaattgaaac

SEQ ID NO: 5592480 - DNA, 25 bp, Homo sapien
aatttccctgtggtagcaagtattt

SEQ ID NO: 5592481 - DNA, 25 bp, Homo sapien
aacaatgaggacaaaaagcattttc

SEQ ID NO: 5592482 - DNA, 25 bp, Homo sapien
ccaagttaattgtacagcagcttcc

SEQ ID NO: 5592483 - DNA, 25 bp, Homo sapien
atgaattcattttgcaagtgatgga

SEQ ID NO: 5592484 - DNA, 25 bp, Homo sapien
cataaaaatatctgccttgaaccac

SEQ ID NO: 5592485 - DNA, 25 bp, Homo sapien
tgatagtagcatagccatatacaac

SEQ ID NO: 5592486 - DNA, 25 bp, Homo sapien
agaattgtaagctcagtgatatcac

SEQ ID NO: 5592487 - DNA, 25 bp, Homo sapien
ccaaggcacattttacaaagctgct

SEQ ID NO: 5592488 - DNA, 25 bp, Homo sapien
aaaacaataaatagcacttccatgt

SEQ ID NO: 5592489 - DNA, 25 bp, Homo sapien
aaggtgttctgaaatgtgcagaaat

SEQ ID NO: 5592490 - DNA, 25 bp, Homo sapien
tagacatagaggttacatatagtaa

SEQ ID NO: 5592491 - DNA, 25 bp, Homo sapien
ttgaatttcatacaggtcatgttac

SEQ ID NO: 5592492 - DNA, 25 bp, Homo sapien
ggtcatgttacacaggtcatattaa

SEQ ID NO: 5592493 - DNA, 25 bp, Homo sapien
accaaggcctttccaaggcacattt

SEQ ID NO: 5592494 - DNA, 25 bp, Homo sapien
acaaacacttagacatagaggttac

SEQ ID NO: 5592495 - DNA, 25 bp, Homo sapien
aaatcagtaggatctgaaaacagat

SEQ ID NO: 5592496 - DNA, 25 bp, Homo sapien
acagattcaacacaagcatacacac

SEQ ID NO: 5592497 - DNA, 25 bp, Homo sapien
aggagcaagatggagacttgtttca

SEQ ID NO: 5592498 - DNA, 25 bp, Homo sapien
gggcagtcactcagtatacagaccc

SEQ ID NO: 5592499 - DNA, 25 bp, Homo sapien
ttgaaggttgctgatttagggtgaa

SEQ ID NO: 5592500 - DNA, 25 bp, Homo sapien
gtcagacaaatgataggctggtgag

SEQ ID NO: 5592501 - DNA, 25 bp, Homo sapien
ctttgaagttctctgaagaccacgt

SEQ ID NO: 5592502 - DNA, 25 bp, Homo sapien
gcccagacaaaagcctgagtcagac

SEQ ID NO: 5592503 - DNA, 25 bp, Homo sapien
cggctcactgggcagtcactcagta

SEQ ID NO: 5592504 - DNA, 25 bp, Homo sapien
gaaatgttacctggcaggcaagctc

SEQ ID NO: 5592505 - DNA, 25 bp, Homo sapien
tctgtcgtatttccggccaaagtat

SEQ ID NO: 5592506 - DNA, 25 bp, Homo sapien
aaatgtaatagccttcagcccagac

SEQ ID NO: 5592507 - DNA, 25 bp, Homo sapien
tcgctggctctcagagcagactgga

SEQ ID NO: 5592508 - DNA, 25 bp, Homo sapien
atatagtgaaaagcaagacaacctg

SEQ ID NO: 5592509 - DNA, 25 bp, Homo sapien
tggggtaagaaggactttctgagaa

SEQ ID NO: 5592510 - DNA, 25 bp, Homo sapien
ctgagaataacattaaaggcaaaat

SEQ ID NO: 5592511 - DNA, 25 bp, Homo sapien
tgattacatgaggatgaaatgcttt

SEQ ID NO: 5592512 - DNA, 25 bp, Homo sapien
tcagtccaaagacagaaaaggataa

SEQ ID NO: 5592513 - DNA, 25 bp, Homo sapien
aggtgtgtcaaagaacgtgcattag

SEQ ID NO: 5592514 - DNA, 25 bp, Homo sapien
gaaaaggataaatgaaggtgtgtca

SEQ ID NO: 5592515 - DNA, 25 bp, Homo sapien
aatcacaaagaaaagtacagataca

SEQ ID NO: 5592516 - DNA, 25 bp, Homo sapien
tatcagtatcaatagcgtcacaatc

SEQ ID NO: 5592517 - DNA, 25 bp, Homo sapien
gacaacctgggagaaattgcttata

SEQ ID NO: 5592518 - DNA, 25 bp, Homo sapien
caatgatggctagtgttaagtgtgg

SEQ ID NO: 5592519 - DNA, 25 bp, Homo sapien
caaaagtgcccagttccttcagacc

SEQ ID NO: 5592520 - DNA, 25 bp, Homo sapien
tcactgagtttaggataaaatccaa

SEQ ID NO: 5592521 - DNA, 25 bp, Homo sapien
caaagaggctttaacaatccactaa

SEQ ID NO: 5592522 - DNA, 25 bp, Homo sapien
tctcctggcctgtaaactctatgac

SEQ ID NO: 5592523 - DNA, 25 bp, Homo sapien
tcctctacagaactaggcccttctc

SEQ ID NO: 5592524 - DNA, 25 bp, Homo sapien
aaaggccctacctgatctagtttcc

SEQ ID NO: 5592525 - DNA, 25 bp, Homo sapien
ttatgcagcttacaaaggccctacc

SEQ ID NO: 5592526 - DNA, 25 bp, Homo sapien
taaaaagtaggcaaatctgataggt

SEQ ID NO: 5592527 - DNA, 25 bp, Homo sapien
tcagaccttgtgggatttgaaattc

SEQ ID NO: 5592528 - DNA, 25 bp, Homo sapien
gttcctcaagacaagtacaaagtac

SEQ ID NO: 5592529 - DNA, 25 bp, Homo sapien
tctgataggtcatgtacactgatcc

SEQ ID NO: 5592530 - DNA, 25 bp, Homo sapien
ttgggggacatctgcaaaacttgta

SEQ ID NO: 5592531 - DNA, 25 bp, Homo sapien
tctgccctggaccacacagtaggtt

SEQ ID NO: 5592532 - DNA, 25 bp, Homo sapien
ggagccctgagagacttagagctaa

SEQ ID NO: 5592533 - DNA, 25 bp, Homo sapien
aaagtgtgccctaaagaggcccttg

SEQ ID NO: 5592534 - DNA, 25 bp, Homo sapien
tcaaggagacataaagcagtgttcc

SEQ ID NO: 5592535 - DNA, 25 bp, Homo sapien
gaggcccttgtgattcagacatctg

SEQ ID NO: 5592536 - DNA, 25 bp, Homo sapien
agacgtagccagaggatgtataaaa

SEQ ID NO: 5592537 - DNA, 25 bp, Homo sapien
cacacagtgacttcccttgggggac

SEQ ID NO: 5592538 - DNA, 25 bp, Homo sapien
gtataaaaaggcctctgcagaaccc

SEQ ID NO: 5592539 - DNA, 25 bp, Homo sapien
ggctggcctgggatagcctaaattg

SEQ ID NO: 5592540 - DNA, 25 bp, Homo sapien
cgctgcctttcgaggcctggaaggg

SEQ ID NO: 5592541 - DNA, 25 bp, Homo sapien
gactgagcaagaatacaggtttccc

SEQ ID NO: 5592542 - DNA, 25 bp, Homo sapien
atcataatgctgggaatgatggatc

SEQ ID NO: 5592543 - DNA, 25 bp, Homo sapien
ctcagggattaatacagggaataca

SEQ ID NO: 5592544 - DNA, 25 bp, Homo sapien
gctgactaagcagtgactgagcaag

SEQ ID NO: 5592545 - DNA, 25 bp, Homo sapien
acacaagtgttaaggtctcagggat

SEQ ID NO: 5592546 - DNA, 25 bp, Homo sapien
taggtggcaaggaaaatttactatc

SEQ ID NO: 5592547 - DNA, 25 bp, Homo sapien
aggcaatttgccaaagaggaaccag

SEQ ID NO: 5592548 - DNA, 25 bp, Homo sapien
cctgactcaaccagcgtaggtggca

SEQ ID NO: 5592549 - DNA, 25 bp, Homo sapien
agcacattagaaaagccctgaggcc

SEQ ID NO: 5592550 - DNA, 25 bp, Homo sapien
agggatggctatttcagctaggtgc

SEQ ID NO: 5592551 - DNA, 25 bp, Homo sapien
aaaagcctgcatggctggccaggct

SEQ ID NO: 5592552 - DNA, 25 bp, Homo sapien
aaacttgcagagggccctaaaagat

SEQ ID NO: 5592553 - DNA, 25 bp, Homo sapien
aaagagtcctacactgcacacaact

SEQ ID NO: 5592554 - DNA, 25 bp, Homo sapien
caaaaacctataaagagtcctacac

SEQ ID NO: 5592555 - DNA, 25 bp, Homo sapien
gcaggcagaattcaaagaaacagtt

SEQ ID NO: 5592556 - DNA, 25 bp, Homo sapien
gggccctaaaagatgacagacagcc

SEQ ID NO: 5592557 - DNA, 25 bp, Homo sapien
agaaacagttttgagattaaaagta

SEQ ID NO: 5592558 - DNA, 25 bp, Homo sapien
aaagaagagtagtcaaaaacctata

SEQ ID NO: 5592559 - DNA, 25 bp, Homo sapien
cagacagcccctcaaggaaaacttc

SEQ ID NO: 5592560 - DNA, 25 bp, Homo sapien
aatttggagttaacagattttcctc

SEQ ID NO: 5592561 - DNA, 25 bp, Homo sapien
tcctcaagggtgtattagacactat

SEQ ID NO: 5592562 - DNA, 25 bp, Homo sapien
cagtaaaaccaatcggataggcagg

SEQ ID NO: 5592563 - DNA, 25 bp, Homo sapien
taaaaatgtagctgatgatacttta

SEQ ID NO: 5592564 - DNA, 25 bp, Homo sapien
caagtcattgctgtgatgacggggc

SEQ ID NO: 5592565 - DNA, 25 bp, Homo sapien
gactgcttccaaaaagaagactgtt

SEQ ID NO: 5592566 - DNA, 25 bp, Homo sapien
tcatggtagatgagagatgatttct

SEQ ID NO: 5592567 - DNA, 25 bp, Homo sapien
cagcagctcattgcctcccgcatga

SEQ ID NO: 5592568 - DNA, 25 bp, Homo sapien
attgaaattaattaggccacctgcc

SEQ ID NO: 5592569 - DNA, 25 bp, Homo sapien
aacttaggttacaagcgactgcttc

SEQ ID NO: 5592570 - DNA, 25 bp, Homo sapien
caataaaaccagtgatggagcgatc

SEQ ID NO: 5592571 - DNA, 25 bp, Homo sapien
ctgggtacctgtgttatgcctgtgc

SEQ ID NO: 5592572 - DNA, 25 bp, Homo sapien
gatggagcgatcagtattgaaatta

SEQ ID NO: 5592573 - DNA, 25 bp, Homo sapien
taaactgtgggaaatttaatcatgg

SEQ ID NO: 5592574 - DNA, 25 bp, Homo sapien
gtaagatcacgatcgtgcctcggac

SEQ ID NO: 5592575 - DNA, 25 bp, Homo sapien
gtccgaggcacgatcgtgatcttac

SEQ ID NO: 5592576 - DNA, 25 bp, Homo sapien
aatgaatgatcatggtcctcaatcc

SEQ ID NO: 5592577 - DNA, 25 bp, Homo sapien
gcactagagcttcagcagcgcacaa

SEQ ID NO: 5592578 - DNA, 25 bp, Homo sapien
tgagagctgaaggcaaacctaataa

SEQ ID NO: 5592579 - DNA, 25 bp, Homo sapien
ttaggctttaagaagcaacagattc

SEQ ID NO: 5592580 - DNA, 25 bp, Homo sapien
agcagcgcacaaaaggttttcatgc

SEQ ID NO: 5592581 - DNA, 25 bp, Homo sapien
caatttccaacgggcttaggcttta

SEQ ID NO: 5592582 - DNA, 25 bp, Homo sapien
ccatgtacccccacgggactgagag

SEQ ID NO: 5592583 - DNA, 25 bp, Homo sapien
gtaaatattgaccaagtgcccatcc

SEQ ID NO: 5592584 - DNA, 25 bp, Homo sapien
tctaaagcaagacatcaagacaaat

SEQ ID NO: 5592585 - DNA, 25 bp, Homo sapien
taagtggctactatgtacccgacat

SEQ ID NO: 5592586 - DNA, 25 bp, Homo sapien
gaaagaaagaaattgctcacattac

SEQ ID NO: 5592587 - DNA, 25 bp, Homo sapien
actaagcagtctaatcccagctgtg

SEQ ID NO: 5592588 - DNA, 25 bp, Homo sapien
ggaaggccaatatgaagccgtgttc

SEQ ID NO: 5592589 - DNA, 25 bp, Homo sapien
aaagtgctgcaagtacaaactaagc

SEQ ID NO: 5592590 - DNA, 25 bp, Homo sapien
agccgtgttcagagtcgtctgccca

SEQ ID NO: 5592591 - DNA, 25 bp, Homo sapien
gtgtgccgcccctacccttgcttac

SEQ ID NO: 5592592 - DNA, 25 bp, Homo sapien
ttcacccactcatggaaggccaata

SEQ ID NO: 5592593 - DNA, 25 bp, Homo sapien
gaggaaggtgaatatgtctaactgt

SEQ ID NO: 5592594 - DNA, 25 bp, Homo sapien
ttgtacccatagctgagtgttaaat

SEQ ID NO: 5592595 - DNA, 25 bp, Homo sapien
ggtctcaagaacatgagagggctac

SEQ ID NO: 5592596 - DNA, 25 bp, Homo sapien
tgagaagaggactgttttccaccta

SEQ ID NO: 5592597 - DNA, 25 bp, Homo sapien
aggactgtactgaatgcccatggca

SEQ ID NO: 5592598 - DNA, 25 bp, Homo sapien
gggctcccggacctgcccatcgagc

SEQ ID NO: 5592599 - DNA, 25 bp, Homo sapien
gctcgatgggcaggtccgggagccc

SEQ ID NO: 5592600 - DNA, 25 bp, Homo sapien
gggacgggggcgctgcgggctcccg

SEQ ID NO: 5592601 - DNA, 25 bp, Homo sapien
cgggagcccgcagcgcccccgtccc

SEQ ID NO: 5592602 - DNA, 25 bp, Homo sapien
agaacaccagattatcacagattaa

SEQ ID NO: 5592603 - DNA, 25 bp, Homo sapien
cacactctacagaatatagtaagta

SEQ ID NO: 5592604 - DNA, 25 bp, Homo sapien
caccataatgctcaaacacaggtaa

SEQ ID NO: 5592605 - DNA, 25 bp, Homo sapien
tatcacagattaaaaagaaagcacc

SEQ ID NO: 5592606 - DNA, 25 bp, Homo sapien
attaatacctgagcagagactgaag

SEQ ID NO: 5592607 - DNA, 25 bp, Homo sapien
aagaaagcaccaaaaattactacac

SEQ ID NO: 5592608 - DNA, 25 bp, Homo sapien
tacagaatatagtaagtagtacttt

SEQ ID NO: 5592609 - DNA, 25 bp, Homo sapien
aaaaacattcacaacacactctaca

SEQ ID NO: 5592610 - DNA, 25 bp, Homo sapien
gtacaaagtactggagatcatgcat

SEQ ID NO: 5592611 - DNA, 25 bp, Homo sapien
acacattaatacctgagcagagact

SEQ ID NO: 5592612 - DNA, 25 bp, Homo sapien
aagtactggagatcatgcatgttta

SEQ ID NO: 5592613 - DNA, 25 bp, Homo sapien
agcgctacctgctctgagatgtgcc

SEQ ID NO: 5592614 - DNA, 25 bp, Homo sapien
gtgagtccaactctgccctgtcatc

SEQ ID NO: 5592615 - DNA, 25 bp, Homo sapien
ccctcatgcaacggaggctgaggga

SEQ ID NO: 5592616 - DNA, 25 bp, Homo sapien
gaggcgaaggccttgttcaaggtca

SEQ ID NO: 5592617 - DNA, 25 bp, Homo sapien
ggtccaaatccagaggcctcttggg

SEQ ID NO: 5592618 - DNA, 25 bp, Homo sapien
ctgctctgagatgtgccagcacaac

SEQ ID NO: 5592619 - DNA, 25 bp, Homo sapien
gaagttggtccaaatccagaggcct

SEQ ID NO: 5592620 - DNA, 25 bp, Homo sapien
aggtcacactggaagttggtccaaa

SEQ ID NO: 5592621 - DNA, 25 bp, Homo sapien
atgtgccagcacaacccctcatgca

SEQ ID NO: 5592622 - DNA, 25 bp, Homo sapien
cctcaactcaccaggtagcgctacc

SEQ ID NO: 5592623 - DNA, 25 bp, Homo sapien
tggacagagccctcaactcaccagg

SEQ ID NO: 5592624 - DNA, 25 bp, Homo sapien
ggttgcagtaaagaagccagctaaa

SEQ ID NO: 5592625 - DNA, 25 bp, Homo sapien
gtcttggaatcggcctgtccctgtg

SEQ ID NO: 5592626 - DNA, 25 bp, Homo sapien
accaaaacaaagatggccacgagag

SEQ ID NO: 5592627 - DNA, 25 bp, Homo sapien
cctgtccctgtgcttgaggagtgga

SEQ ID NO: 5592628 - DNA, 25 bp, Homo sapien
tagttggtcagcacaagatacaggt

SEQ ID NO: 5592629 - DNA, 25 bp, Homo sapien
agaagccagctaaaacccaccaaaa

SEQ ID NO: 5592630 - DNA, 25 bp, Homo sapien
tagttttgtcaagaggcgtgtgaac

SEQ ID NO: 5592631 - DNA, 25 bp, Homo sapien
accaaagctaaacaagagcagaatc

SEQ ID NO: 5592632 - DNA, 25 bp, Homo sapien
gaccctcagggtgtcactgcccttc

SEQ ID NO: 5592633 - DNA, 25 bp, Homo sapien
ctcactggatgagatagttggtcag

SEQ ID NO: 5592634 - DNA, 25 bp, Homo sapien
gctcttgagtgtttaggttggtctt

SEQ ID NO: 5592635 - DNA, 25 bp, Homo sapien
caggatcacaccttcatctggcagt

SEQ ID NO: 5592636 - DNA, 25 bp, Homo sapien
aacactaccagagagagctacaggt

SEQ ID NO: 5592637 - DNA, 25 bp, Homo sapien
tgtcctttcaagcttcaaccctgtg

SEQ ID NO: 5592638 - DNA, 25 bp, Homo sapien
aagggaccctcaagattggtatcac

SEQ ID NO: 5592639 - DNA, 25 bp, Homo sapien
actctatagccaaaaagagagcctt

SEQ ID NO: 5592640 - DNA, 25 bp, Homo sapien
aaaaaaccatgattcaggccgggtg

SEQ ID NO: 5592641 - DNA, 25 bp, Homo sapien
tgtcaaaaatttcaagatgcaactc

SEQ ID NO: 5592642 - DNA, 25 bp, Homo sapien
aaaaccacacaacactaccagagag

SEQ ID NO: 5592643 - DNA, 25 bp, Homo sapien
aagattggtatcacaggatcacacc

SEQ ID NO: 5592644 - DNA, 25 bp, Homo sapien
tcagatgccaatggtttcaaaaaac

SEQ ID NO: 5592645 - DNA, 25 bp, Homo sapien
ggttgaggtcagtaactcagctcac

SEQ ID NO: 5592646 - DNA, 25 bp, Homo sapien
ggagataattccagcagaccaactc

SEQ ID NO: 5592647 - DNA, 25 bp, Homo sapien
tatgtgcctacatgcagtacagcaa

SEQ ID NO: 5592648 - DNA, 25 bp, Homo sapien
tgcagtacagcaatcacctaagtct

SEQ ID NO: 5592649 - DNA, 25 bp, Homo sapien
ctaattttgttccaaggagaaggtc

SEQ ID NO: 5592650 - DNA, 25 bp, Homo sapien
cagctgcctgttcccttaacttgtc

SEQ ID NO: 5592651 - DNA, 25 bp, Homo sapien
tggggttatgtgcctacatgcagta

SEQ ID NO: 5592652 - DNA, 25 bp, Homo sapien
tagctttgatgtctgggcactgatt

SEQ ID NO: 5592653 - DNA, 25 bp, Homo sapien
cttgctaagtccgattaaaaggggc

SEQ ID NO: 5592654 - DNA, 25 bp, Homo sapien
gagctgccttagactatccaattga

SEQ ID NO: 5592655 - DNA, 25 bp, Homo sapien
ataattccagcagaccaactcaaag

SEQ ID NO: 5592656 - DNA, 25 bp, Homo sapien
tcctttacagcttggtccagagagc

SEQ ID NO: 5592657 - DNA, 25 bp, Homo sapien
tatccaggactaagctttgggctcc

SEQ ID NO: 5592658 - DNA, 25 bp, Homo sapien
tgggcacaggaagtgccacttttta

SEQ ID NO: 5592659 - DNA, 25 bp, Homo sapien
gtgtgtgtgcataagcttgtacttt

SEQ ID NO: 5592660 - DNA, 25 bp, Homo sapien
ttaaaatggaaaccgagattgctac

SEQ ID NO: 5592661 - DNA, 25 bp, Homo sapien
gttcagccactgcatctagtagcat

SEQ ID NO: 5592662 - DNA, 25 bp, Homo sapien
ttgggctccacaaatgtactccatg

SEQ ID NO: 5592663 - DNA, 25 bp, Homo sapien
aaagtgctataaacatatccaggac

SEQ ID NO: 5592664 - DNA, 25 bp, Homo sapien
ccaccatgagacaagtgcatgctgt

SEQ ID NO: 5592665 - DNA, 25 bp, Homo sapien
agtgcgtataaatgtggctgctgcc

SEQ ID NO: 5592666 - DNA, 25 bp, Homo sapien
agtccattggaagtcacctgttgac

SEQ ID NO: 5592667 - DNA, 25 bp, Homo sapien
ctgagtgcctagagctccaccatga

SEQ ID NO: 5592668 - DNA, 25 bp, Homo sapien
ccaacttaggcttgaggtaccatgc

SEQ ID NO: 5592669 - DNA, 25 bp, Homo sapien
tggggtcaatcaaaggttcatcact

SEQ ID NO: 5592670 - DNA, 25 bp, Homo sapien
ccttaaaggcgattggtccataaag

SEQ ID NO: 5592671 - DNA, 25 bp, Homo sapien
tttcaagtacgagcttggggtcaat

SEQ ID NO: 5592672 - DNA, 25 bp, Homo sapien
taacagagtcataagtccatcccct

SEQ ID NO: 5592673 - DNA, 25 bp, Homo sapien
gcattgcacgttgaataggagtctt

SEQ ID NO: 5592674 - DNA, 25 bp, Homo sapien
gaggtaccatgctccataccccatc

SEQ ID NO: 5592675 - DNA, 25 bp, Homo sapien
ctgactgatgtttaaaatgagagca

SEQ ID NO: 5592676 - DNA, 25 bp, Homo sapien
acgttgtacattcctggggccagtc

SEQ ID NO: 5592677 - DNA, 25 bp, Homo sapien
aaaatgagagcaagaaatacccaat

SEQ ID NO: 5592678 - DNA, 25 bp, Homo sapien
ttccgatgcatctgtgacgtcttct

SEQ ID NO: 5592679 - DNA, 25 bp, Homo sapien
atggatatgaagcagagtcctggta

SEQ ID NO: 5592680 - DNA, 25 bp, Homo sapien
ttcacaaagtaagtctcaggcacac

SEQ ID NO: 5592681 - DNA, 25 bp, Homo sapien
accaagtagatcagaatgtccaaac

SEQ ID NO: 5592682 - DNA, 25 bp, Homo sapien
agatgcagaactaaacagttccatc

SEQ ID NO: 5592683 - DNA, 25 bp, Homo sapien
caggcacactaggggttctatcata

SEQ ID NO: 5592684 - DNA, 25 bp, Homo sapien
cctgtgaaccttggatggtgagtgt

SEQ ID NO: 5592685 - DNA, 25 bp, Homo sapien
taatagaattcaaccagaacactcc

SEQ ID NO: 5592686 - DNA, 25 bp, Homo sapien
ttcaaagcctctagccagacaaagt

SEQ ID NO: 5592687 - DNA, 25 bp, Homo sapien
agcagagtcctggtaggcacatttt

SEQ ID NO: 5592688 - DNA, 25 bp, Homo sapien
gatggtgagtgtaatacttcagcac

SEQ ID NO: 5592689 - DNA, 25 bp, Homo sapien
ttactagagaagaaaagtggaatta

SEQ ID NO: 5592690 - DNA, 25 bp, Homo sapien
gcgatcctgactcgctgcaacctcc

SEQ ID NO: 5592691 - DNA, 25 bp, Homo sapien
accaaaacccgtcactcaagccaat

SEQ ID NO: 5592692 - DNA, 25 bp, Homo sapien
cctcagtctcccaatagattacata

SEQ ID NO: 5592693 - DNA, 25 bp, Homo sapien
ggaaatagagaaagtacatataagc

SEQ ID NO: 5592694 - DNA, 25 bp, Homo sapien
gagtgtagtgctgcgatcctgactc

SEQ ID NO: 5592695 - DNA, 25 bp, Homo sapien
acaattaagatatgagtaacatttc

SEQ ID NO: 5592696 - DNA, 25 bp, Homo sapien
ttgaattaccaaaacccgtcactca

SEQ ID NO: 5592697 - DNA, 25 bp, Homo sapien
taatgaattgcttcctttaacaccc

SEQ ID NO: 5592698 - DNA, 25 bp, Homo sapien
aagtaatagtagttgaattaccaaa

SEQ ID NO: 5592699 - DNA, 25 bp, Homo sapien
atataagccatgattttgaagtcaa

SEQ ID NO: 5592700 - DNA, 25 bp, Homo sapien
tcaagccaatgactacaattaagat

SEQ ID NO: 5592701 - DNA, 25 bp, Homo sapien
aactcaaaaaaccctcttcagcagc

SEQ ID NO: 5592702 - DNA, 25 bp, Homo sapien
gacatgagactcccaaggagacctt

SEQ ID NO: 5592703 - DNA, 25 bp, Homo sapien
atgtgagcactggagttctctctcg

SEQ ID NO: 5592704 - DNA, 25 bp, Homo sapien
atacagtaaactttggaagacgacc

SEQ ID NO: 5592705 - DNA, 25 bp, Homo sapien
aaagataggattataagggaaagaa

SEQ ID NO: 5592706 - DNA, 25 bp, Homo sapien
ttgaggctttttcaggtaggtggta

SEQ ID NO: 5592707 - DNA, 25 bp, Homo sapien
atgttcccctgagactttgaggctt

SEQ ID NO: 5592708 - DNA, 25 bp, Homo sapien
gttcctagagcctcagaatgtagac

SEQ ID NO: 5592709 - DNA, 25 bp, Homo sapien
aggtaggtggtaattgaagaacata

SEQ ID NO: 5592710 - DNA, 25 bp, Homo sapien
gaatggcttgaggttaaagatagga

SEQ ID NO: 5592711 - DNA, 25 bp, Homo sapien
cagaatgtagacttgggctggtaga

SEQ ID NO: 5592712 - DNA, 25 bp, Homo sapien
cctgccccgaacaatcttgtatctg

SEQ ID NO: 5592713 - DNA, 25 bp, Homo sapien
acagtgcacaacacaggctctagca

SEQ ID NO: 5592714 - DNA, 25 bp, Homo sapien
gcagttaccacgaggtctctgggca

SEQ ID NO: 5592715 - DNA, 25 bp, Homo sapien
gtgtacagtgcacaacacaggctct

SEQ ID NO: 5592716 - DNA, 25 bp, Homo sapien
actttgccacctcttgaacgctccc

SEQ ID NO: 5592717 - DNA, 25 bp, Homo sapien
aggagtgagcctctgttccccctaa

SEQ ID NO: 5592718 - DNA, 25 bp, Homo sapien
aacaatcttgtatctgggctgatcc

SEQ ID NO: 5592719 - DNA, 25 bp, Homo sapien
aataaatggttgtcactttgccacc

SEQ ID NO: 5592720 - DNA, 25 bp, Homo sapien
aaagtgtgtacagtgcacaacacag

SEQ ID NO: 5592721 - DNA, 25 bp, Homo sapien
ctcttgaacgctcccaggagtgagc

SEQ ID NO: 5592722 - DNA, 25 bp, Homo sapien
aacacaggctctagcacacagtagg

SEQ ID NO: 5592723 - DNA, 25 bp, Homo sapien
agaaggtgtactttaacgttatgta

SEQ ID NO: 5592724 - DNA, 25 bp, Homo sapien
gtaacatagattaaatagctccttc

SEQ ID NO: 5592725 - DNA, 25 bp, Homo sapien
atgcaagaacaaagtttacatcatt

SEQ ID NO: 5592726 - DNA, 25 bp, Homo sapien
gagataaactggaatcacaagcatc

SEQ ID NO: 5592727 - DNA, 25 bp, Homo sapien
aaagccaagttgaaatgagcataga

SEQ ID NO: 5592728 - DNA, 25 bp, Homo sapien
tgcttttaaaatgtacacgcgtttc

SEQ ID NO: 5592729 - DNA, 25 bp, Homo sapien
aaactggtcagtctaatgcaagaac

SEQ ID NO: 5592730 - DNA, 25 bp, Homo sapien
tatgtatagtagaacagggaaacca

SEQ ID NO: 5592731 - DNA, 25 bp, Homo sapien
gcatagaaaagcatcaaatatggtc

SEQ ID NO: 5592732 - DNA, 25 bp, Homo sapien
tcatttatgtaaagccagcgaggac

SEQ ID NO: 5592733 - DNA, 25 bp, Homo sapien
gctccttcagtaaacaaagctttgc

SEQ ID NO: 5592734 - DNA, 25 bp, Homo sapien
tctactggatagaacaataagctac

SEQ ID NO: 5592735 - DNA, 25 bp, Homo sapien
taacgcctggcatatacatggccac

SEQ ID NO: 5592736 - DNA, 25 bp, Homo sapien
agcctctttgctccaggggtgcttc

SEQ ID NO: 5592737 - DNA, 25 bp, Homo sapien
tgacaaaatatgacaaagatgctta

SEQ ID NO: 5592738 - DNA, 25 bp, Homo sapien
cactgtaccataagttggaagatgc

SEQ ID NO: 5592739 - DNA, 25 bp, Homo sapien
cacatctacagaacaagaaaggtac

SEQ ID NO: 5592740 - DNA, 25 bp, Homo sapien
acaggcagctctgatgtattaacgc

SEQ ID NO: 5592741 - DNA, 25 bp, Homo sapien
catcatgataagaagcaggactttc

SEQ ID NO: 5592742 - DNA, 25 bp, Homo sapien
ggaagatgcagatgtgacttttata

SEQ ID NO: 5592743 - DNA, 25 bp, Homo sapien
aacaagaaaggtacaggtatttaga

SEQ ID NO: 5592744 - DNA, 25 bp, Homo sapien
taagttcagaattagaggagaggaa

SEQ ID NO: 5592745 - DNA, 25 bp, Homo sapien
aaacatggatacactacgctgttaa

SEQ ID NO: 5592746 - DNA, 25 bp, Homo sapien
tacactacgctgttaaatgggggag

SEQ ID NO: 5592747 - DNA, 25 bp, Homo sapien
cagtggtttatctctgggtgctggg

SEQ ID NO: 5592748 - DNA, 25 bp, Homo sapien
aaacgaatgcctgacaggacacatt

SEQ ID NO: 5592749 - DNA, 25 bp, Homo sapien
tcccatgcctcatgagtggaggccc

SEQ ID NO: 5592750 - DNA, 25 bp, Homo sapien
aaaaaagtcaactgcattcaaacaa

SEQ ID NO: 5592751 - DNA, 25 bp, Homo sapien
agcaggttagaaaaattgcaccagt

SEQ ID NO: 5592752 - DNA, 25 bp, Homo sapien
atgtgtgtataaacgaatgcctgac

SEQ ID NO: 5592753 - DNA, 25 bp, Homo sapien
agaaaaagcaggttagaaaaattgc

SEQ ID NO: 5592754 - DNA, 25 bp, Homo sapien
gggggttatagaaagtcagatacat

SEQ ID NO: 5592755 - DNA, 25 bp, Homo sapien
aatttgcaaataagatatatgtgtg

SEQ ID NO: 5592756 - DNA, 25 bp, Homo sapien
tgacacaagtagataaggttagcac

SEQ ID NO: 5592757 - DNA, 25 bp, Homo sapien
cgcaggtgtgtaaaaacatgctaaa

SEQ ID NO: 5592758 - DNA, 25 bp, Homo sapien
ggtcatgtggactgtggaacatatc

SEQ ID NO: 5592759 - DNA, 25 bp, Homo sapien
agtagggatttggtcatgtggactg

SEQ ID NO: 5592760 - DNA, 25 bp, Homo sapien
ggaatgcgtatgcacgcaggtgtgt

SEQ ID NO: 5592761 - DNA, 25 bp, Homo sapien
gcaaagaataagcatgcccttgatc

SEQ ID NO: 5592762 - DNA, 25 bp, Homo sapien
ataagctagagaacagcaatgaaac

SEQ ID NO: 5592763 - DNA, 25 bp, Homo sapien
attaaacatgaaaagagacacctat

SEQ ID NO: 5592764 - DNA, 25 bp, Homo sapien
tctaggaattaaagctaagaagaaa

SEQ ID NO: 5592765 - DNA, 25 bp, Homo sapien
tcagacaagttatctgtgggtggta

SEQ ID NO: 5592766 - DNA, 25 bp, Homo sapien
atgctaaagatggtcactaaaatat

SEQ ID NO: 5592767 - DNA, 25 bp, Homo sapien
tcaaactcctggactcatgcaatcc

SEQ ID NO: 5592768 - DNA, 25 bp, Homo sapien
catgcaatcctcccacttcggcctc

SEQ ID NO: 5592769 - DNA, 25 bp, Homo sapien
ctggagttcagtggtgtgaccacag

SEQ ID NO: 5592770 - DNA, 25 bp, Homo sapien
tctcactcagtcgcacaggctggag

SEQ ID NO: 5592771 - DNA, 25 bp, Homo sapien
ctgcctccagccatattatagattt

SEQ ID NO: 5592772 - DNA, 25 bp, Homo sapien
tagacacagggtctcactcagtcgc

SEQ ID NO: 5592773 - DNA, 25 bp, Homo sapien
ggtgtgaccacagctcactgcaacc

SEQ ID NO: 5592774 - DNA, 25 bp, Homo sapien
gattacaggcatgaaccactgccca

SEQ ID NO: 5592775 - DNA, 25 bp, Homo sapien
catgaaccactgcccactgcctcca

SEQ ID NO: 5592776 - DNA, 25 bp, Homo sapien
gctcactgcaacccagaaccactgg

SEQ ID NO: 5592777 - DNA, 25 bp, Homo sapien
gaaccactgggttcaactgatcctc

SEQ ID NO: 5592778 - DNA, 25 bp, Homo sapien
gcttaaacaccaagtgacaaggtcc

SEQ ID NO: 5592779 - DNA, 25 bp, Homo sapien
ctgcaatggaacagcaaatacctcc

SEQ ID NO: 5592780 - DNA, 25 bp, Homo sapien
agaaagcaagagagaattgtgttca

SEQ ID NO: 5592781 - DNA, 25 bp, Homo sapien
gcccaaatgcaaacctaacagtagc

SEQ ID NO: 5592782 - DNA, 25 bp, Homo sapien
gccattgggccagatactgaagttt

SEQ ID NO: 5592783 - DNA, 25 bp, Homo sapien
agtgacaaggtccaaatgtgtgagg

SEQ ID NO: 5592784 - DNA, 25 bp, Homo sapien
acactgatggactagcaacttggga

SEQ ID NO: 5592785 - DNA, 25 bp, Homo sapien
actgaagttttggtactggcctctc

SEQ ID NO: 5592786 - DNA, 25 bp, Homo sapien
ttctgagttgagtccccaagtttgc

SEQ ID NO: 5592787 - DNA, 25 bp, Homo sapien
ggagctggtatctgtgaggttctaa

SEQ ID NO: 5592788 - DNA, 25 bp, Homo sapien
cctcctaggtagaacctggagaccc

SEQ ID NO: 5592789 - DNA, 25 bp, Homo sapien
acaattaaggatatacattttggat

SEQ ID NO: 5592790 - DNA, 25 bp, Homo sapien
ttcatgtgaaatatatccttaaatt

SEQ ID NO: 5592791 - DNA, 25 bp, Homo sapien
tggattaaaacagcacaaaaaagaa

SEQ ID NO: 5592792 - DNA, 25 bp, Homo sapien
tcaaagtagcttaataccctcatat

SEQ ID NO: 5592793 - DNA, 25 bp, Homo sapien
gaataggaattcttattgctcgaaa

SEQ ID NO: 5592794 - DNA, 25 bp, Homo sapien
attgctcgaaaatacaaaagattcc

SEQ ID NO: 5592795 - DNA, 25 bp, Homo sapien
acaactgtaattcctaacaaacctc

SEQ ID NO: 5592796 - DNA, 25 bp, Homo sapien
aaagtttgctccccacaactgtaat

SEQ ID NO: 5592797 - DNA, 25 bp, Homo sapien
agcacaaaaaagaaagtttgctccc

SEQ ID NO: 5592798 - DNA, 25 bp, Homo sapien
ctcgaaaatacaaaagattccaatt

SEQ ID NO: 5592799 - DNA, 25 bp, Homo sapien
tatttgaaacaagaataggaattct

SEQ ID NO: 5592800 - DNA, 25 bp, Homo sapien
aggtaagtgtcgctctcagtgaaac

SEQ ID NO: 5592801 - DNA, 25 bp, Homo sapien
gctccagacactgtgtgccaaggct

SEQ ID NO: 5592802 - DNA, 25 bp, Homo sapien
cagaccacgacaaaatatacacaat

SEQ ID NO: 5592803 - DNA, 25 bp, Homo sapien
agacctccaaggatcaaaaagcttt

SEQ ID NO: 5592804 - DNA, 25 bp, Homo sapien
ataaatctacagacctccaaggatc

SEQ ID NO: 5592805 - DNA, 25 bp, Homo sapien
acgggggtcagcatttcaataactt

SEQ ID NO: 5592806 - DNA, 25 bp, Homo sapien
tcgctctcagtgaaacagggaatca

SEQ ID NO: 5592807 - DNA, 25 bp, Homo sapien
cccctttccagtactggccagaagg

SEQ ID NO: 5592808 - DNA, 25 bp, Homo sapien
ggaatcagcagaccacgacaaaata

SEQ ID NO: 5592809 - DNA, 25 bp, Homo sapien
atccaacacacaatattgaactaac

SEQ ID NO: 5592810 - DNA, 25 bp, Homo sapien
tgaactaactattgaggtaagtgtc

SEQ ID NO: 5592811 - DNA, 25 bp, Homo sapien
caccctcacgacactatggcacctt

SEQ ID NO: 5592812 - DNA, 25 bp, Homo sapien
ggtctgagctggcccagcaaacctg

SEQ ID NO: 5592813 - DNA, 25 bp, Homo sapien
tgagcccccgaatggaggggctcac

SEQ ID NO: 5592814 - DNA, 25 bp, Homo sapien
atggcaccttgcaagacgatcatta

SEQ ID NO: 5592815 - DNA, 25 bp, Homo sapien
tgttagcatccgtgaagagaacact

SEQ ID NO: 5592816 - DNA, 25 bp, Homo sapien
ctatagaaatcagcacacaaacacc

SEQ ID NO: 5592817 - DNA, 25 bp, Homo sapien
aggaatctgccttgaccctgagccc

SEQ ID NO: 5592818 - DNA, 25 bp, Homo sapien
tcatctcaaaaccctaggcccgaag

SEQ ID NO: 5592819 - DNA, 25 bp, Homo sapien
agacaccatgcatagccactgcctc

SEQ ID NO: 5592820 - DNA, 25 bp, Homo sapien
gcttaatgccaagctggtggaagcg

SEQ ID NO: 5592821 - DNA, 25 bp, Homo sapien
agcctcagaaacgctgctgcagaca

SEQ ID NO: 5592822 - DNA, 25 bp, Homo sapien
gcattaaggaactaaaccacgaaag

SEQ ID NO: 5592823 - DNA, 25 bp, Homo sapien
ctttcgtggtttagttccttaatgc

SEQ ID NO: 5592824 - DNA, 25 bp, Homo sapien
acacacacaagaagtctgagagttg

SEQ ID NO: 5592825 - DNA, 25 bp, Homo sapien
acccttctccacagcgcagaggtca

SEQ ID NO: 5592826 - DNA, 25 bp, Homo sapien
atggcagcacctcgaagattcttga

SEQ ID NO: 5592827 - DNA, 25 bp, Homo sapien
cctccttctgtggctggactgtgcg

SEQ ID NO: 5592828 - DNA, 25 bp, Homo sapien
aagcagcgggaagttcagtttatta

SEQ ID NO: 5592829 - DNA, 25 bp, Homo sapien
gtcaggccactagtaagggcacaag

SEQ ID NO: 5592830 - DNA, 25 bp, Homo sapien
atggcagcaccgcaaagattcttga

SEQ ID NO: 5592831 - DNA, 25 bp, Homo sapien
ccgccatgccccacgcctcagtaca

SEQ ID NO: 5592832 - DNA, 25 bp, Homo sapien
tcagcacagttgtgagagtgcagac

SEQ ID NO: 5592833 - DNA, 25 bp, Homo sapien
gagagttggcgacaatatccaccct

SEQ ID NO: 5592834 - DNA, 25 bp, Homo sapien
ggctggactgtgcgctcacagccgt

SEQ ID NO: 5592835 - DNA, 25 bp, Homo sapien
ataaaaactgcaactgcaggggttt

SEQ ID NO: 5592836 - DNA, 25 bp, Homo sapien
gatgaaggcaagagaccttgtcttg

SEQ ID NO: 5592837 - DNA, 25 bp, Homo sapien
ctcagatcatccaattagcaccttc

SEQ ID NO: 5592838 - DNA, 25 bp, Homo sapien
cacttggcagaatgtctagatggag

SEQ ID NO: 5592839 - DNA, 25 bp, Homo sapien
tgacagactgtaactggatgaaggc

SEQ ID NO: 5592840 - DNA, 25 bp, Homo sapien
tagctaaagctatgctcagaggaac

SEQ ID NO: 5592841 - DNA, 25 bp, Homo sapien
gacacttgtcgaaatctgaaaattc

SEQ ID NO: 5592842 - DNA, 25 bp, Homo sapien
ttaaacatgacatcctcagagagac

SEQ ID NO: 5592843 - DNA, 25 bp, Homo sapien
ggagcaggtgcttaaatacttgttg

SEQ ID NO: 5592844 - DNA, 25 bp, Homo sapien
tcagagagacagtctcagatcatcc

SEQ ID NO: 5592845 - DNA, 25 bp, Homo sapien
tcagaggaacattcaataggattac

SEQ ID NO: 5592846 - DNA, 25 bp, Homo sapien
aaagaaagctgtgtaagtgcactcc

SEQ ID NO: 5592847 - DNA, 25 bp, Homo sapien
gatgaagttcttggcagcagtgctt

SEQ ID NO: 5592848 - DNA, 25 bp, Homo sapien
aaatgtgaggtttgcatacttggtt

SEQ ID NO: 5592849 - DNA, 25 bp, Homo sapien
taagagggtactgtacagcagttac

SEQ ID NO: 5592850 - DNA, 25 bp, Homo sapien
tctgtgcctccctgcagtcagttgc

SEQ ID NO: 5592851 - DNA, 25 bp, Homo sapien
tgaaagtgagctgaatcaccatgga

SEQ ID NO: 5592852 - DNA, 25 bp, Homo sapien
tggagcctaactaccaaaaggcagc

SEQ ID NO: 5592853 - DNA, 25 bp, Homo sapien
tcaggcaatcaggattctgtgcctc

SEQ ID NO: 5592854 - DNA, 25 bp, Homo sapien
ctcccaagcaaaggtgtggtaggag

SEQ ID NO: 5592855 - DNA, 25 bp, Homo sapien
gccttgatcttgaggtaagagggta

SEQ ID NO: 5592856 - DNA, 25 bp, Homo sapien
ttggcctgagttaagttagtgctat

SEQ ID NO: 5592857 - DNA, 25 bp, Homo sapien
ttaggagattgctgtatgttgatac

SEQ ID NO: 5592858 - DNA, 25 bp, Homo sapien
cagaggttaaacgtagtatggatac

SEQ ID NO: 5592859 - DNA, 25 bp, Homo sapien
ttatgaaagaatatggcaacctgaa

SEQ ID NO: 5592860 - DNA, 25 bp, Homo sapien
gtatggatacagaaattagacaaac

SEQ ID NO: 5592861 - DNA, 25 bp, Homo sapien
caaacaggtagtggaaaagttcttg

SEQ ID NO: 5592862 - DNA, 25 bp, Homo sapien
ggttgtccatgaatcccaggttgac

SEQ ID NO: 5592863 - DNA, 25 bp, Homo sapien
gctctaccaggacaaacagtatgtt

SEQ ID NO: 5592864 - DNA, 25 bp, Homo sapien
gttgatacggcagtgtcacagatac

SEQ ID NO: 5592865 - DNA, 25 bp, Homo sapien
gaggtgaagctttggaactctttta

SEQ ID NO: 5592866 - DNA, 25 bp, Homo sapien
tgtgccagggactatgactggacta

SEQ ID NO: 5592867 - DNA, 25 bp, Homo sapien
ttctgaacaagaaacatgctccctt

SEQ ID NO: 5592868 - DNA, 25 bp, Homo sapien
aaagcaaatagggtacaatgttaac

SEQ ID NO: 5592869 - DNA, 25 bp, Homo sapien
tagagttaaaaggtgccctgtctta

SEQ ID NO: 5592870 - DNA, 25 bp, Homo sapien
tcatgcaaaaacacagcaatccacc

SEQ ID NO: 5592871 - DNA, 25 bp, Homo sapien
ctgcatgtaccaccctcatcatctc

SEQ ID NO: 5592872 - DNA, 25 bp, Homo sapien
atacaacttaaagcaaatagggtac

SEQ ID NO: 5592873 - DNA, 25 bp, Homo sapien
aggtgagggttacatggtgttcact

SEQ ID NO: 5592874 - DNA, 25 bp, Homo sapien
tcttgctccaacagactcccatgct

SEQ ID NO: 5592875 - DNA, 25 bp, Homo sapien
ttgacatgcattaaaggacaaaact

SEQ ID NO: 5592876 - DNA, 25 bp, Homo sapien
taaagagagaacacactgcatgtac

SEQ ID NO: 5592877 - DNA, 25 bp, Homo sapien
gtttagaagccaataaagagagaac

SEQ ID NO: 5592878 - DNA, 25 bp, Homo sapien
tacaatgttaacaccaggtgagggt

SEQ ID NO: 5592879 - DNA, 25 bp, Homo sapien
tctctgaagaccaacagcagaactg

SEQ ID NO: 5592880 - DNA, 25 bp, Homo sapien
atgggtaaaggcttctgtaaacctc

SEQ ID NO: 5592881 - DNA, 25 bp, Homo sapien
tccagatccacagccccaactactt

SEQ ID NO: 5592882 - DNA, 25 bp, Homo sapien
tttccgtaatgagactacttcagcc

SEQ ID NO: 5592883 - DNA, 25 bp, Homo sapien
ttactaaaaggctgctcacactctc

SEQ ID NO: 5592884 - DNA, 25 bp, Homo sapien
atacaacagccctcaatgacttctt

SEQ ID NO: 5592885 - DNA, 25 bp, Homo sapien
tctcagcaggtgcagacacttctct

SEQ ID NO: 5592886 - DNA, 25 bp, Homo sapien
tcccttcaccctggctgaataccac

SEQ ID NO: 5592887 - DNA, 25 bp, Homo sapien
tgtaaacctccagatccacagcccc

SEQ ID NO: 5592888 - DNA, 25 bp, Homo sapien
agcagaactgagtctcaggatgggt

SEQ ID NO: 5592889 - DNA, 25 bp, Homo sapien
ctgaataccacatcttgaggcaatc

SEQ ID NO: 5592890 - DNA, 25 bp, Homo sapien
gtcgtaatctggacttctggagtcc

SEQ ID NO: 5592891 - DNA, 25 bp, Homo sapien
ggactccagaagtccagattacgac

SEQ ID NO: 5592892 - DNA, 25 bp, Homo sapien
tctccctacgtgggacaaagcttgg

SEQ ID NO: 5592893 - DNA, 25 bp, Homo sapien
aggccgggcaattccaggcaataat

SEQ ID NO: 5592894 - DNA, 25 bp, Homo sapien
tacttcggaaggcaatctttgattc

SEQ ID NO: 5592895 - DNA, 25 bp, Homo sapien
cttaacaaaaatacttcggaaggca

SEQ ID NO: 5592896 - DNA, 25 bp, Homo sapien
cccaaagaaccacagaatggggaga

SEQ ID NO: 5592897 - DNA, 25 bp, Homo sapien
gcttggcttgggtttacaagcagcg

SEQ ID NO: 5592898 - DNA, 25 bp, Homo sapien
tctttgattccagcatcggaggccg

SEQ ID NO: 5592899 - DNA, 25 bp, Homo sapien
aattccaggcaataattaagccatc

SEQ ID NO: 5592900 - DNA, 25 bp, Homo sapien
caggaacagccttggaaggcactag

SEQ ID NO: 5592901 - DNA, 25 bp, Homo sapien
aggcactagatgctgcaatcctccc

SEQ ID NO: 5592902 - DNA, 25 bp, Homo sapien
tgggacaaagcttggcttgggttta

SEQ ID NO: 5592903 - DNA, 25 bp, Homo sapien
cagtgaaatttgtggtctccgaggg

SEQ ID NO: 5592904 - DNA, 25 bp, Homo sapien
tctcctttatatggcagatgcggca

SEQ ID NO: 5592905 - DNA, 25 bp, Homo sapien
ctgagttagaagcacatgaaataat

SEQ ID NO: 5592906 - DNA, 25 bp, Homo sapien
ggggcgaatgagaaacatctccttt

SEQ ID NO: 5592907 - DNA, 25 bp, Homo sapien
gcatgaataagacatagatgctgcc

SEQ ID NO: 5592908 - DNA, 25 bp, Homo sapien
atttaccagttacacaggcatacac

SEQ ID NO: 5592909 - DNA, 25 bp, Homo sapien
agagccgaagatcctttgaaaatgg

SEQ ID NO: 5592910 - DNA, 25 bp, Homo sapien
tgcttgaaaagtagagccgaagatc

SEQ ID NO: 5592911 - DNA, 25 bp, Homo sapien
aaaatgaaaattgtccaactggatc

SEQ ID NO: 5592912 - DNA, 25 bp, Homo sapien
atagatgctgccttcagtgaaattt

SEQ ID NO: 5592913 - DNA, 25 bp, Homo sapien
aactggatcttcagaaaaccgctgt

SEQ ID NO: 5592914 - DNA, 25 bp, Homo sapien
caacctgaatttctttccttcgagt

SEQ ID NO: 5592915 - DNA, 25 bp, Homo sapien
actcgaaggaaagaaattcaggttg

SEQ ID NO: 5592916 - DNA, 25 bp, Homo sapien
tgagctccatgtttagtcacagtac

SEQ ID NO: 5592917 - DNA, 25 bp, Homo sapien
acaaagtttaagcagttgtaagcag

SEQ ID NO: 5592918 - DNA, 25 bp, Homo sapien
cccaacagaactatatccaggaaag

SEQ ID NO: 5592919 - DNA, 25 bp, Homo sapien
atcctgtgttagcacccaagttttc

SEQ ID NO: 5592920 - DNA, 25 bp, Homo sapien
agaaaaagagcagaagttatcctgt

SEQ ID NO: 5592921 - DNA, 25 bp, Homo sapien
tacaagcaatattagtccaagcccc

SEQ ID NO: 5592922 - DNA, 25 bp, Homo sapien
aaaaacaaatacagagatcctagct

SEQ ID NO: 5592923 - DNA, 25 bp, Homo sapien
agaagctgagtaagggttactagca

SEQ ID NO: 5592924 - DNA, 25 bp, Homo sapien
caaaaaacaatctaagagaacaggt

SEQ ID NO: 5592925 - DNA, 25 bp, Homo sapien
ctaagagaacaggtaataaaagata

SEQ ID NO: 5592926 - DNA, 25 bp, Homo sapien
gtaagcagtagctgcattgagctcc

SEQ ID NO: 5592927 - DNA, 25 bp, Homo sapien
ctagactgtgtataaatctcagagt

SEQ ID NO: 5592928 - DNA, 25 bp, Homo sapien
ttggaactatcaggccgctttttgc

SEQ ID NO: 5592929 - DNA, 25 bp, Homo sapien
aatctcagagtggtattgctggtcc

SEQ ID NO: 5592930 - DNA, 25 bp, Homo sapien
actgtgttaaggtagcccataattt

SEQ ID NO: 5592931 - DNA, 25 bp, Homo sapien
tcaatttgcacttccctggaggctt

SEQ ID NO: 5592932 - DNA, 25 bp, Homo sapien
tccctggaggcttaacctatacttc

SEQ ID NO: 5592933 - DNA, 25 bp, Homo sapien
ggtattgctggtccatagggtatac

SEQ ID NO: 5592934 - DNA, 25 bp, Homo sapien
tcaagtttacgagataatgccaccc

SEQ ID NO: 5592935 - DNA, 25 bp, Homo sapien
ggcacacatgtgcaaaagtttatct

SEQ ID NO: 5592936 - DNA, 25 bp, Homo sapien
gtcccacttggaactatcaggccgc

SEQ ID NO: 5592937 - DNA, 25 bp, Homo sapien
tgatggatgattcagtgttcaattt

SEQ ID NO: 5592938 - DNA, 25 bp, Homo sapien
aaatactgaaaaagttgagtacacc

SEQ ID NO: 5592939 - DNA, 25 bp, Homo sapien
tttaattgtgatatagtagtctttt

SEQ ID NO: 5592940 - DNA, 25 bp, Homo sapien
ttagtgtcagtacataaaataaaac

SEQ ID NO: 5592941 - DNA, 25 bp, Homo sapien
aaaaccagtaagtacattcacgatc

SEQ ID NO: 5592942 - DNA, 25 bp, Homo sapien
gtatctgtacagaaagcatcttcaa

SEQ ID NO: 5592943 - DNA, 25 bp, Homo sapien
tgcatttgcaaattaactgacagta

SEQ ID NO: 5592944 - DNA, 25 bp, Homo sapien
agcagctttcaaggttgttatggtc

SEQ ID NO: 5592945 - DNA, 25 bp, Homo sapien
tgaaaaagttgagtacaccaaagcc

SEQ ID NO: 5592946 - DNA, 25 bp, Homo sapien
tggagaatacagcttgcatttgcaa

SEQ ID NO: 5592947 - DNA, 25 bp, Homo sapien
gagtacaccaaagccgaaaaatggc

SEQ ID NO: 5592948 - DNA, 25 bp, Homo sapien
gaaaaatggctctgctatacactgc

SEQ ID NO: 5592949 - DNA, 25 bp, Homo sapien
ctgtttgatagccacagtatgagtt

SEQ ID NO: 5592950 - DNA, 25 bp, Homo sapien
atgtctgtatactgcacacaggcat

SEQ ID NO: 5592951 - DNA, 25 bp, Homo sapien
tatctgctcaaaataaagtgtactg

SEQ ID NO: 5592952 - DNA, 25 bp, Homo sapien
aagaccatgactgcttataaataat

SEQ ID NO: 5592953 - DNA, 25 bp, Homo sapien
ctcttttcggaaatatctgctcaaa

SEQ ID NO: 5592954 - DNA, 25 bp, Homo sapien
tgcacacaggcattataaatacacc

SEQ ID NO: 5592955 - DNA, 25 bp, Homo sapien
aaataaagtgtactgaatagaagca

SEQ ID NO: 5592956 - DNA, 25 bp, Homo sapien
tacacctataggtacacattatgta

SEQ ID NO: 5592957 - DNA, 25 bp, Homo sapien
tgtcagttcaatttacaagaatgcc

SEQ ID NO: 5592958 - DNA, 25 bp, Homo sapien
aaacagttttaaaaagcatgtcaac

SEQ ID NO: 5592959 - DNA, 25 bp, Homo sapien
aaagcatgtcaacagtgattttttc

SEQ ID NO: 5592960 - DNA, 25 bp, Homo sapien
tactctctttatttgggctaaagaa

SEQ ID NO: 5592961 - DNA, 25 bp, Homo sapien
ttctttagcccaaataaagagagta

SEQ ID NO: 5592962 - DNA, 25 bp, Homo sapien
aaatgatgtttgtaagaggatggtg

SEQ ID NO: 5592963 - DNA, 25 bp, Homo sapien
attgagcgcatgtaaaaaagaagaa

SEQ ID NO: 5592964 - DNA, 25 bp, Homo sapien
tcaggcaggtatcaccagccccttt

SEQ ID NO: 5592965 - DNA, 25 bp, Homo sapien
cacaggctatttgactaggggagaa

SEQ ID NO: 5592966 - DNA, 25 bp, Homo sapien
agggtccagcaatgcagtgaatctt

SEQ ID NO: 5592967 - DNA, 25 bp, Homo sapien
gggaattccatgcatgctcagggct

SEQ ID NO: 5592968 - DNA, 25 bp, Homo sapien
cttccctccatgggagaactgtgct

SEQ ID NO: 5592969 - DNA, 25 bp, Homo sapien
tggccagtagtcagtattgagcgca

SEQ ID NO: 5592970 - DNA, 25 bp, Homo sapien
tctaacagattcagtgtggcagagc

SEQ ID NO: 5592971 - DNA, 25 bp, Homo sapien
agatacatgtttttggagactgact

SEQ ID NO: 5592972 - DNA, 25 bp, Homo sapien
gttgaaacagtaagagttctgaaca

SEQ ID NO: 5592973 - DNA, 25 bp, Homo sapien
aataggtttgagacatgacttgagt

SEQ ID NO: 5592974 - DNA, 25 bp, Homo sapien
aacctcagcagaaacgaatttcacc

SEQ ID NO: 5592975 - DNA, 25 bp, Homo sapien
aaaggctgggaactattaaaatgga

SEQ ID NO: 5592976 - DNA, 25 bp, Homo sapien
tagcatgtaaccttagcagatgcct

SEQ ID NO: 5592977 - DNA, 25 bp, Homo sapien
cttaacacggtcttggatggtgagg

SEQ ID NO: 5592978 - DNA, 25 bp, Homo sapien
cttgagtcagcagagcatagtattt

SEQ ID NO: 5592979 - DNA, 25 bp, Homo sapien
caacagtaaatgctacaggcggtag

SEQ ID NO: 5592980 - DNA, 25 bp, Homo sapien
acttaatagaggaaataggtttgag

SEQ ID NO: 5592981 - DNA, 25 bp, Homo sapien
gtgagggtgaaaaacaattcaagta

SEQ ID NO: 5592982 - DNA, 25 bp, Homo sapien
acttagtgttataaaggctgggaac

SEQ ID NO: 5592983 - DNA, 25 bp, Homo sapien
ttggactactctggaatagaacatc

SEQ ID NO: 5592984 - DNA, 25 bp, Homo sapien
tcatgtgcaccagaattgagaatca

SEQ ID NO: 5592985 - DNA, 25 bp, Homo sapien
actatcataacagagttgaccagtt

SEQ ID NO: 5592986 - DNA, 25 bp, Homo sapien
tccagagagctttagaaacataccc

SEQ ID NO: 5592987 - DNA, 25 bp, Homo sapien
gcacattagaatcatccagagagct

SEQ ID NO: 5592988 - DNA, 25 bp, Homo sapien
aagccctaaatggaagagtagatga

SEQ ID NO: 5592989 - DNA, 25 bp, Homo sapien
ttgtcctgcttggccaaaagcccta

SEQ ID NO: 5592990 - DNA, 25 bp, Homo sapien
agaactagaaaattactgaactgga

SEQ ID NO: 5592991 - DNA, 25 bp, Homo sapien
ggtcactaccacacatggaaaccta

SEQ ID NO: 5592992 - DNA, 25 bp, Homo sapien
tgaacctgtcagaatacggcacaca

SEQ ID NO: 5592993 - DNA, 25 bp, Homo sapien
tcatagaattaaacaagcacatcct

SEQ ID NO: 5592994 - DNA, 25 bp, Homo sapien
aagccccatccccagagagttttac

SEQ ID NO: 5592995 - DNA, 25 bp, Homo sapien
agcaagtcctgcactccaaccctcc

SEQ ID NO: 5592996 - DNA, 25 bp, Homo sapien
cagtcccagctgcacacactccttc

SEQ ID NO: 5592997 - DNA, 25 bp, Homo sapien
ggtagatacaaaggtgttcactata

SEQ ID NO: 5592998 - DNA, 25 bp, Homo sapien
agaagcaagtcctgcactccaaccc

SEQ ID NO: 5592999 - DNA, 25 bp, Homo sapien
cacactccttcaccacagtggctgt

SEQ ID NO: 5593000 - DNA, 25 bp, Homo sapien
cttcctcggtaactgccagctctgc

SEQ ID NO: 5593001 - DNA, 25 bp, Homo sapien
aaccctcctcccccacagtcccagc

SEQ ID NO: 5593002 - DNA, 25 bp, Homo sapien
agtggctgtttcagaactccacctc

SEQ ID NO: 5593003 - DNA, 25 bp, Homo sapien
ctcggtaactgccagctctgctcac

SEQ ID NO: 5593004 - DNA, 25 bp, Homo sapien
tcacaacaaaatgttaggggagaag

SEQ ID NO: 5593005 - DNA, 25 bp, Homo sapien
gggagaagcaagtcctgcactccaa

SEQ ID NO: 5593006 - DNA, 25 bp, Homo sapien
caaggacagtaggtcctgtctgttc

SEQ ID NO: 5593007 - DNA, 25 bp, Homo sapien
aatgtttcggttagtcatggagtgg

SEQ ID NO: 5593008 - DNA, 25 bp, Homo sapien
ctgggcactactgacagagcaaata

SEQ ID NO: 5593009 - DNA, 25 bp, Homo sapien
aaaggcaagatatacaaggacagta

SEQ ID NO: 5593010 - DNA, 25 bp, Homo sapien
agagcaaataatcctgaacacacat

SEQ ID NO: 5593011 - DNA, 25 bp, Homo sapien
catggcacatacagcaccttggaca

SEQ ID NO: 5593012 - DNA, 25 bp, Homo sapien
ttgtaaagaggctattccaatcccc

SEQ ID NO: 5593013 - DNA, 25 bp, Homo sapien
atttagaaaacaatggagcttaaaa

SEQ ID NO: 5593014 - DNA, 25 bp, Homo sapien
tagagtacactttgagtaaccagaa

SEQ ID NO: 5593015 - DNA, 25 bp, Homo sapien
tacaaaacctggtcactgtgatcac

SEQ ID NO: 5593016 - DNA, 25 bp, Homo sapien
aatgagattatggtgtcagtacttc

SEQ ID NO: 5593017 - DNA, 25 bp, Homo sapien
tggacatggggtaccctctggtcat

SEQ ID NO: 5593018 - DNA, 25 bp, Homo sapien
agctctgacaccgtacactgcctgc

SEQ ID NO: 5593019 - DNA, 25 bp, Homo sapien
ttacatggtccagcactagagccca

SEQ ID NO: 5593020 - DNA, 25 bp, Homo sapien
agtcccaggtgtagcagaagctggg

SEQ ID NO: 5593021 - DNA, 25 bp, Homo sapien
agagcccacagtcaaacagcctaca

SEQ ID NO: 5593022 - DNA, 25 bp, Homo sapien
tccagagaaacagcttccagcccca

SEQ ID NO: 5593023 - DNA, 25 bp, Homo sapien
ggagagcagccacaccctaaaaatg

SEQ ID NO: 5593024 - DNA, 25 bp, Homo sapien
agcctacaagaggaccagtttggga

SEQ ID NO: 5593025 - DNA, 25 bp, Homo sapien
cagggtgccatctatgcacagggac

SEQ ID NO: 5593026 - DNA, 25 bp, Homo sapien
agaagctgggccaagacttcatgct

SEQ ID NO: 5593027 - DNA, 25 bp, Homo sapien
ttatcatgagccacaagtcccaggt

SEQ ID NO: 5593028 - DNA, 25 bp, Homo sapien
tacaatttagagaagaccacaacca

SEQ ID NO: 5593029 - DNA, 25 bp, Homo sapien
atttagagaagaccacaaccaagaa

SEQ ID NO: 5593030 - DNA, 25 bp, Homo sapien
aacatcacctacgccagtcgcaagc

SEQ ID NO: 5593031 - DNA, 25 bp, Homo sapien
ttttggttatcccatgacaagtggt

SEQ ID NO: 5593032 - DNA, 25 bp, Homo sapien
gttatgaagtttagtggtggatact

SEQ ID NO: 5593033 - DNA, 25 bp, Homo sapien
ctgcgattccaggtttaattttggt

SEQ ID NO: 5593034 - DNA, 25 bp, Homo sapien
aagattacaatttagagaagaccac

SEQ ID NO: 5593035 - DNA, 25 bp, Homo sapien
ttagtggtggatactttggaagtga

SEQ ID NO: 5593036 - DNA, 25 bp, Homo sapien
agcagcgccaacatcacctacgcca

SEQ ID NO: 5593037 - DNA, 25 bp, Homo sapien
cacaaccaagaaacagttaacaaag

SEQ ID NO: 5593038 - DNA, 25 bp, Homo sapien
tcacctacgccagtcgcaagcggcg

SEQ ID NO: 5593039 - DNA, 25 bp, Homo sapien
tactagatgtagtcttggaaatttt

SEQ ID NO: 5593040 - DNA, 25 bp, Homo sapien
gctgtacaatcatgagataaaggtc

SEQ ID NO: 5593041 - DNA, 25 bp, Homo sapien
tctgagaatcagttatcaagtatgc

SEQ ID NO: 5593042 - DNA, 25 bp, Homo sapien
attgagaaaaatactagatgtagtc

SEQ ID NO: 5593043 - DNA, 25 bp, Homo sapien
tagtaattacaggattgttagttta

SEQ ID NO: 5593044 - DNA, 25 bp, Homo sapien
aataattcttatctggtgacccatt

SEQ ID NO: 5593045 - DNA, 25 bp, Homo sapien
gatgaatatcaatgttctgagaatc

SEQ ID NO: 5593046 - DNA, 25 bp, Homo sapien
atgagataaaggtcaattgagaaaa

SEQ ID NO: 5593047 - DNA, 25 bp, Homo sapien
tcaagtgtgattaaaagttggtcat

SEQ ID NO: 5593048 - DNA, 25 bp, Homo sapien
acaaacagcttgtatcaggaaaaca

SEQ ID NO: 5593049 - DNA, 25 bp, Homo sapien
ggaaatttttgactagtgaaatcac

SEQ ID NO: 5593050 - DNA, 25 bp, Homo sapien
tagacttgaatacaaacgtacccac

SEQ ID NO: 5593051 - DNA, 25 bp, Homo sapien
attgatggatttagtcagcatcttt

SEQ ID NO: 5593052 - DNA, 25 bp, Homo sapien
aatgaatgaaaaaaataactgtttc

SEQ ID NO: 5593053 - DNA, 25 bp, Homo sapien
taactgtttctggtataagtgtata

SEQ ID NO: 5593054 - DNA, 25 bp, Homo sapien
tacaaagaatgctgcctaatatatt

SEQ ID NO: 5593055 - DNA, 25 bp, Homo sapien
ttgttattacaaagaatgctgccta

SEQ ID NO: 5593056 - DNA, 25 bp, Homo sapien
agtcaagcctgatacaataaaattt

SEQ ID NO: 5593057 - DNA, 25 bp, Homo sapien
taaaaagagctatgttgttctatac

SEQ ID NO: 5593058 - DNA, 25 bp, Homo sapien
acgtacccactcctaaaaatgaatg

SEQ ID NO: 5593059 - DNA, 25 bp, Homo sapien
ttgatagtcccatcagtcaagcctg

SEQ ID NO: 5593060 - DNA, 25 bp, Homo sapien
aaaaaaatagtgcatgtcttatatc

SEQ ID NO: 5593061 - DNA, 25 bp, Homo sapien
cgggttctcgacaccgtccggagaa

SEQ ID NO: 5593062 - DNA, 25 bp, Homo sapien
cttgggtttcctcctcgcacgggtg

SEQ ID NO: 5593063 - DNA, 25 bp, Homo sapien
ccctttgcctcggtcctggtgcagc

SEQ ID NO: 5593064 - DNA, 25 bp, Homo sapien
ttcccatctcaacgccaccgcccac

SEQ ID NO: 5593065 - DNA, 25 bp, Homo sapien
aatgtcctgaccactcggtgcagcc

SEQ ID NO: 5593066 - DNA, 25 bp, Homo sapien
acgctccctgacccggcctcaatgt

SEQ ID NO: 5593067 - DNA, 25 bp, Homo sapien
gctcgtcccggtatctcacgctccc

SEQ ID NO: 5593068 - DNA, 25 bp, Homo sapien
gctgctgcttgggttttccatcctc

SEQ ID NO: 5593069 - DNA, 25 bp, Homo sapien
tgttaaactgcggtccctttgcctc

SEQ ID NO: 5593070 - DNA, 25 bp, Homo sapien
agaccaccggtgcaattcccaattc

SEQ ID NO: 5593071 - DNA, 25 bp, Homo sapien
ccatcctcctgagaccaccggtgca

SEQ ID NO: 5593072 - DNA, 25 bp, Homo sapien
aatagagcttaattacacctgtcct

SEQ ID NO: 5593073 - DNA, 25 bp, Homo sapien
tagttattctaagtgaggtcccagg

SEQ ID NO: 5593074 - DNA, 25 bp, Homo sapien
catatgcataagtaaacaaagaggg

SEQ ID NO: 5593075 - DNA, 25 bp, Homo sapien
gcccagccaagttttggtttcctca

SEQ ID NO: 5593076 - DNA, 25 bp, Homo sapien
taacgctctctgtaaattataaagc

SEQ ID NO: 5593077 - DNA, 25 bp, Homo sapien
agcgagcaccgtgcttagttattct

SEQ ID NO: 5593078 - DNA, 25 bp, Homo sapien
ttattctaagtgaggtcccaggatc

SEQ ID NO: 5593079 - DNA, 25 bp, Homo sapien
ttgatggatgttaacgctctctgta

SEQ ID NO: 5593080 - DNA, 25 bp, Homo sapien
aagcactatacaaatacaaggcatt

SEQ ID NO: 5593081 - DNA, 25 bp, Homo sapien
atgcataagtaaacaaagagggttg

SEQ ID NO: 5593082 - DNA, 25 bp, Homo sapien
ataaattgatggatgttaacgctct

SEQ ID NO: 5593083 - DNA, 25 bp, Homo sapien
aatcagggtctaatggaagaatttc

SEQ ID NO: 5593084 - DNA, 25 bp, Homo sapien
ggaagaatttcaggtaggaagatat

SEQ ID NO: 5593085 - DNA, 25 bp, Homo sapien
ccagagtacatgtgccaacagatga

SEQ ID NO: 5593086 - DNA, 25 bp, Homo sapien
taccactatgacaagggactgtaac

SEQ ID NO: 5593087 - DNA, 25 bp, Homo sapien
gggatggccatcttcagctcacctc

SEQ ID NO: 5593088 - DNA, 25 bp, Homo sapien
ttagaaatgaagcccagacaatcca

SEQ ID NO: 5593089 - DNA, 25 bp, Homo sapien
aggggctagacaatgctgcttcccc

SEQ ID NO: 5593090 - DNA, 25 bp, Homo sapien
gttggaaagtgaagccagtctaact

SEQ ID NO: 5593091 - DNA, 25 bp, Homo sapien
gtgacacaaaaagcccagctcccaa

SEQ ID NO: 5593092 - DNA, 25 bp, Homo sapien
cttgccggcagtttacccagagtac

SEQ ID NO: 5593093 - DNA, 25 bp, Homo sapien
ccagccgtgcactgctgcatgggag

SEQ ID NO: 5593094 - DNA, 25 bp, Homo sapien
ctcagtactgcccttgaggggacca

SEQ ID NO: 5593095 - DNA, 25 bp, Homo sapien
agagacataggctaaggatgcctgg

SEQ ID NO: 5593096 - DNA, 25 bp, Homo sapien
ggctgtgctcagggccaataagtag

SEQ ID NO: 5593097 - DNA, 25 bp, Homo sapien
tgggaaccaactgacacaactgctt

SEQ ID NO: 5593098 - DNA, 25 bp, Homo sapien
cacaactcaggtcagggtttcagga

SEQ ID NO: 5593099 - DNA, 25 bp, Homo sapien
catctaactggggcagcttccaagg

SEQ ID NO: 5593100 - DNA, 25 bp, Homo sapien
gccaagaagccaggtcagttctaac

SEQ ID NO: 5593101 - DNA, 25 bp, Homo sapien
aaaggcttgactgtgcattgggtgg

SEQ ID NO: 5593102 - DNA, 25 bp, Homo sapien
taccacacattggtgggaaagtgct

SEQ ID NO: 5593103 - DNA, 25 bp, Homo sapien
aggggaccactgtctagagacatag

SEQ ID NO: 5593104 - DNA, 25 bp, Homo sapien
caacccaagggcttaatgggaacca

SEQ ID NO: 5593105 - DNA, 25 bp, Homo sapien
ttcgaacccagtggctcggtgagtt

SEQ ID NO: 5593106 - DNA, 25 bp, Homo sapien
aactcaccgagccactgggttcgaa

SEQ ID NO: 5593107 - DNA, 25 bp, Homo sapien
taattaaatgctacctgcagtattt

SEQ ID NO: 5593108 - DNA, 25 bp, Homo sapien
atgctcccagactcgcccgtttatc

SEQ ID NO: 5593109 - DNA, 25 bp, Homo sapien
gtcaatggcttagtgaagacaggac

SEQ ID NO: 5593110 - DNA, 25 bp, Homo sapien
tattttcctagggctaaagtcagaa

SEQ ID NO: 5593111 - DNA, 25 bp, Homo sapien
gcttaaaatgctcccagactcgccc

SEQ ID NO: 5593112 - DNA, 25 bp, Homo sapien
aactgcaatgctagtatgacccttt

SEQ ID NO: 5593113 - DNA, 25 bp, Homo sapien
atctttcaactggcaggaatttccc

SEQ ID NO: 5593114 - DNA, 25 bp, Homo sapien
cacagttacctgagatgttagggtt

SEQ ID NO: 5593115 - DNA, 25 bp, Homo sapien
tagtgaagacaggaccttattatcc

SEQ ID NO: 5593116 - DNA, 25 bp, Homo sapien
cttccaattagaagcagccaaatat

SEQ ID NO: 5593117 - DNA, 25 bp, Homo sapien
gagatgttagggttagttgagctta

SEQ ID NO: 5593118 - DNA, 25 bp, Homo sapien
ccttcccacccatgagtaggcctgc

SEQ ID NO: 5593119 - DNA, 25 bp, Homo sapien
tatcacaaccctgggaaactctcca

SEQ ID NO: 5593120 - DNA, 25 bp, Homo sapien
gaggcatatgtccccaaaaggaccc

SEQ ID NO: 5593121 - DNA, 25 bp, Homo sapien
gtgctggcactggctgtaaacattc

SEQ ID NO: 5593122 - DNA, 25 bp, Homo sapien
actgaatgactgactgaggcatatg

SEQ ID NO: 5593123 - DNA, 25 bp, Homo sapien
gtaggcctgccacatatcacaaccc

SEQ ID NO: 5593124 - DNA, 25 bp, Homo sapien
ctagattactaccttgtgctggcac

SEQ ID NO: 5593125 - DNA, 25 bp, Homo sapien
ggaccccagataggaaccatctcca

SEQ ID NO: 5593126 - DNA, 25 bp, Homo sapien
ccagccaagtggccatcctcccttc

SEQ ID NO: 5593127 - DNA, 25 bp, Homo sapien
aggctgggatagatggcctctcata

SEQ ID NO: 5593128 - DNA, 25 bp, Homo sapien
acgtgtggtcctttggggatacaag

SEQ ID NO: 5593129 - DNA, 25 bp, Homo sapien
agacatggtacaataggaaacgaga

SEQ ID NO: 5593130 - DNA, 25 bp, Homo sapien
tgcagaatctcagacctcgatccag

SEQ ID NO: 5593131 - DNA, 25 bp, Homo sapien
tctccaagtgtggaccaagaagcag

SEQ ID NO: 5593132 - DNA, 25 bp, Homo sapien
gtaataacaatggcagtagcaacac

SEQ ID NO: 5593133 - DNA, 25 bp, Homo sapien
ggaaacgagaggactctctgctgac

SEQ ID NO: 5593134 - DNA, 25 bp, Homo sapien
agacaaaagacagacatggtacaat

SEQ ID NO: 5593135 - DNA, 25 bp, Homo sapien
gatccagaactgacacataagaatt

SEQ ID NO: 5593136 - DNA, 25 bp, Homo sapien
ttatagcagctgtgagttccttaca

SEQ ID NO: 5593137 - DNA, 25 bp, Homo sapien
ggaagtttgtttgaaatgcagaatc

SEQ ID NO: 5593138 - DNA, 25 bp, Homo sapien
atagctcgaactgtgtgcctgtaat

SEQ ID NO: 5593139 - DNA, 25 bp, Homo sapien
tccttacagaggccaataagcagga

SEQ ID NO: 5593140 - DNA, 25 bp, Homo sapien
gtacagagctagctgggcatgttat

SEQ ID NO: 5593141 - DNA, 25 bp, Homo sapien
gatgctgtggttttccgaagcttgc

SEQ ID NO: 5593142 - DNA, 25 bp, Homo sapien
gctggtcagcagtctaaagccacac

SEQ ID NO: 5593143 - DNA, 25 bp, Homo sapien
agctgggcatgttatttgggatgtc

SEQ ID NO: 5593144 - DNA, 25 bp, Homo sapien
ccgaagcttgctggctgcatgcttg

SEQ ID NO: 5593145 - DNA, 25 bp, Homo sapien
tctgatcagtaggaacaccccagag

SEQ ID NO: 5593146 - DNA, 25 bp, Homo sapien
agtaattgattagtagcagggctct

SEQ ID NO: 5593147 - DNA, 25 bp, Homo sapien
tagtagcagggctctgtagtacaga

SEQ ID NO: 5593148 - DNA, 25 bp, Homo sapien
aatgaagtgcatcgctgtgaacaat

SEQ ID NO: 5593149 - DNA, 25 bp, Homo sapien
cagaggaaggacatctttagcgata

SEQ ID NO: 5593150 - DNA, 25 bp, Homo sapien
gttcgtgacacaggtaattacttga

SEQ ID NO: 5593151 - DNA, 25 bp, Homo sapien
acagaggaccaactgtaatagagta

SEQ ID NO: 5593152 - DNA, 25 bp, Homo sapien
actgtcataaacaaccagaaagcta

SEQ ID NO: 5593153 - DNA, 25 bp, Homo sapien
ctgggcaatatagtgcgatcttgtc

SEQ ID NO: 5593154 - DNA, 25 bp, Homo sapien
tagttgtttgtcaacactgctactg

SEQ ID NO: 5593155 - DNA, 25 bp, Homo sapien
ctggatatcaaaaccaaacaggggg

SEQ ID NO: 5593156 - DNA, 25 bp, Homo sapien
tccatgttccggatacagaggacca

SEQ ID NO: 5593157 - DNA, 25 bp, Homo sapien
gtaatagagtaagcattcatcatgt

SEQ ID NO: 5593158 - DNA, 25 bp, Homo sapien
agaaagctacccttgtctggatatc

SEQ ID NO: 5593159 - DNA, 25 bp, Homo sapien
ttttccttagccaatagagctctct

SEQ ID NO: 5593160 - DNA, 25 bp, Homo sapien
aacactgctactgtcataaacaacc

SEQ ID NO: 5593161 - DNA, 25 bp, Homo sapien
gaggaccaactgtaatagagtaagc

SEQ ID NO: 5593162 - DNA, 25 bp, Homo sapien
tgtaggttttattatggtgtgaata

SEQ ID NO: 5593163 - DNA, 25 bp, Homo sapien
tattcacaccataataaaacctaca

SEQ ID NO: 5593164 - DNA, 25 bp, Homo sapien
tgctccctgtgttgtgcggcaggag

SEQ ID NO: 5593165 - DNA, 25 bp, Homo sapien
gctccccaaagcagagctggggttc

SEQ ID NO: 5593166 - DNA, 25 bp, Homo sapien
agctctgacttaccgagggcttggt

SEQ ID NO: 5593167 - DNA, 25 bp, Homo sapien
gagatggtgatgccccttcccctct

SEQ ID NO: 5593168 - DNA, 25 bp, Homo sapien
ggagggctgtcccctaccatgggaa

SEQ ID NO: 5593169 - DNA, 25 bp, Homo sapien
gtaaatagtcctgtgtctgcccgac

SEQ ID NO: 5593170 - DNA, 25 bp, Homo sapien
tcctgctccctgggattgagtccgg

SEQ ID NO: 5593171 - DNA, 25 bp, Homo sapien
tgtgtaagagccatgttttgtcgcc

SEQ ID NO: 5593172 - DNA, 25 bp, Homo sapien
ccctaccatgggaatgtgtaagagc

SEQ ID NO: 5593173 - DNA, 25 bp, Homo sapien
ctagcgtcactgagtaaatagtcct

SEQ ID NO: 5593174 - DNA, 25 bp, Homo sapien
tttataaatgggattcaggtctctt

SEQ ID NO: 5593175 - DNA, 25 bp, Homo sapien
gagcccaagtctatagtgagccatg

SEQ ID NO: 5593176 - DNA, 25 bp, Homo sapien
aggaagattggctgagcccaagtct

SEQ ID NO: 5593177 - DNA, 25 bp, Homo sapien
gcagatactggatgaacagcatggg

SEQ ID NO: 5593178 - DNA, 25 bp, Homo sapien
cagtgtactgcagcctggattacag

SEQ ID NO: 5593179 - DNA, 25 bp, Homo sapien
gggtaaataagctgacatatggccc

SEQ ID NO: 5593180 - DNA, 25 bp, Homo sapien
ggccactgcaaggaaataatcacca

SEQ ID NO: 5593181 - DNA, 25 bp, Homo sapien
agagatatacagcctggataacctc

SEQ ID NO: 5593182 - DNA, 25 bp, Homo sapien
gccatggtcatgccagtgtactgca

SEQ ID NO: 5593183 - DNA, 25 bp, Homo sapien
taggtaatcaccattcagcagatac

SEQ ID NO: 5593184 - DNA, 25 bp, Homo sapien
cttaacaatggcgccctctagtggg

SEQ ID NO: 5593185 - DNA, 25 bp, Homo sapien
tggcgccctctagtgggccactgca

SEQ ID NO: 5593186 - DNA, 25 bp, Homo sapien
ctggcaaaagtctgcctcatgagaa

SEQ ID NO: 5593187 - DNA, 25 bp, Homo sapien
atttaggaagtcagagttacacaga

SEQ ID NO: 5593188 - DNA, 25 bp, Homo sapien
tgaaaagcctgaggttttgaaaatc

SEQ ID NO: 5593189 - DNA, 25 bp, Homo sapien
gcggcagggacaatctgtcaacttt

SEQ ID NO: 5593190 - DNA, 25 bp, Homo sapien
tcatgagaaatacgtccaagccagg

SEQ ID NO: 5593191 - DNA, 25 bp, Homo sapien
aagtcggtcaccatttaggaagtca

SEQ ID NO: 5593192 - DNA, 25 bp, Homo sapien
cacagaacttaaagtgggatcactt

SEQ ID NO: 5593193 - DNA, 25 bp, Homo sapien
tccagaagaactcggtttcaccatc

SEQ ID NO: 5593194 - DNA, 25 bp, Homo sapien
accatcctgaggtgatcagacttct

SEQ ID NO: 5593195 - DNA, 25 bp, Homo sapien
ttcaaaagcctctaagacccatgac

SEQ ID NO: 5593196 - DNA, 25 bp, Homo sapien
ggaatcagtctctaaaaagtcggtc

SEQ ID NO: 5593197 - DNA, 25 bp, Homo sapien
ggccaggaatgtgtgcaactctctg

SEQ ID NO: 5593198 - DNA, 25 bp, Homo sapien
ccaacttgttgggttaagtgggaca

SEQ ID NO: 5593199 - DNA, 25 bp, Homo sapien
ggggtgaactatggtggtttcatcc

SEQ ID NO: 5593200 - DNA, 25 bp, Homo sapien
ggttctgggtaatggcttgatcaca

SEQ ID NO: 5593201 - DNA, 25 bp, Homo sapien
ccaccttggtggaacctggttagag

SEQ ID NO: 5593202 - DNA, 25 bp, Homo sapien
atgaggtcagatagatgtgcactct

SEQ ID NO: 5593203 - DNA, 25 bp, Homo sapien
cacaggatttagaaggtagaagttt

SEQ ID NO: 5593204 - DNA, 25 bp, Homo sapien
tgtcaagatcacaatggggtgaact

SEQ ID NO: 5593205 - DNA, 25 bp, Homo sapien
agagccatgtatagatgtcaagatc

SEQ ID NO: 5593206 - DNA, 25 bp, Homo sapien
tgactttaggcagagatccagcttt

SEQ ID NO: 5593207 - DNA, 25 bp, Homo sapien
ttatgctaaacaggctaacatgggg

SEQ ID NO: 5593208 - DNA, 25 bp, Homo sapien
ccaacgtttagcacccaactctcac

SEQ ID NO: 5593209 - DNA, 25 bp, Homo sapien
tccaaatgcaactggaacaggcgtg

SEQ ID NO: 5593210 - DNA, 25 bp, Homo sapien
tcacacctgcaaaagtatccaaatg

SEQ ID NO: 5593211 - DNA, 25 bp, Homo sapien
tgaaatatggcactaaagaggacag

SEQ ID NO: 5593212 - DNA, 25 bp, Homo sapien
gggcatcccctggcggatgcagcta

SEQ ID NO: 5593213 - DNA, 25 bp, Homo sapien
actgtgccccacctacctctatatt

SEQ ID NO: 5593214 - DNA, 25 bp, Homo sapien
ggcggatgcagctatgctgcctccc

SEQ ID NO: 5593215 - DNA, 25 bp, Homo sapien
gctgagggtgaaatatggcactaaa

SEQ ID NO: 5593216 - DNA, 25 bp, Homo sapien
aaagtgtttggagttttgatgccgt

SEQ ID NO: 5593217 - DNA, 25 bp, Homo sapien
tttggagttttgatgccgttcgctg

SEQ ID NO: 5593218 - DNA, 25 bp, Homo sapien
caactctcacacctgcaaaagtatc

SEQ ID NO: 5593219 - DNA, 25 bp, Homo sapien
cgggacaaaaaggacaactgtatgt

SEQ ID NO: 5593220 - DNA, 25 bp, Homo sapien
acatacagttgtcctttttgtcccg

SEQ ID NO: 5593221 - DNA, 25 bp, Homo sapien
ttacagatgagtctaccaaacattc

SEQ ID NO: 5593222 - DNA, 25 bp, Homo sapien
gaatattctggccaggcatggtggc

SEQ ID NO: 5593223 - DNA, 25 bp, Homo sapien
tggctcacgcgtgtaatcccactgc

SEQ ID NO: 5593224 - DNA, 25 bp, Homo sapien
gagtctaccaaacattcaaggagca

SEQ ID NO: 5593225 - DNA, 25 bp, Homo sapien
cactgcactccggcctgggcaatag

SEQ ID NO: 5593226 - DNA, 25 bp, Homo sapien
attcaaggagcaattaattccaatc

SEQ ID NO: 5593227 - DNA, 25 bp, Homo sapien
cagaatattctaggctcaaatggta

SEQ ID NO: 5593228 - DNA, 25 bp, Homo sapien
gcaatagggcaagactccgtctcaa

SEQ ID NO: 5593229 - DNA, 25 bp, Homo sapien
ggtaggcacatgagtggacatatta

SEQ ID NO: 5593230 - DNA, 25 bp, Homo sapien
ctaggctcaaatggtattacagatg

SEQ ID NO: 5593231 - DNA, 25 bp, Homo sapien
ttgactccaggagaaatggaaaatc

SEQ ID NO: 5593232 - DNA, 25 bp, Homo sapien
cagagagagttacgcaacagattaa

SEQ ID NO: 5593233 - DNA, 25 bp, Homo sapien
aacctgggtcaaacgcacacagtct

SEQ ID NO: 5593234 - DNA, 25 bp, Homo sapien
ttggaaccagagttaacttacaatc

SEQ ID NO: 5593235 - DNA, 25 bp, Homo sapien
aataactttatgagacaggtactac

SEQ ID NO: 5593236 - DNA, 25 bp, Homo sapien
aatcaaggtccaagctcgttcaaac

SEQ ID NO: 5593237 - DNA, 25 bp, Homo sapien
tcgttcaaacaatcccatggcactg

SEQ ID NO: 5593238 - DNA, 25 bp, Homo sapien
acagaaaaactagtagactcatgtt

SEQ ID NO: 5593239 - DNA, 25 bp, Homo sapien
catgtggaaaatgggataacaatac

SEQ ID NO: 5593240 - DNA, 25 bp, Homo sapien
tgacctcatgttacagaggaggaaa

SEQ ID NO: 5593241 - DNA, 25 bp, Homo sapien
agttcacacagtaggccatggaacc

SEQ ID NO: 5593242 - DNA, 25 bp, Homo sapien
aggtagacctggaaatcaaggtcca

SEQ ID NO: 5593243 - DNA, 25 bp, Homo sapien
tcatgttgctgagtgcagatgtttc

SEQ ID NO: 5593244 - DNA, 25 bp, Homo sapien
aaggccattcaaaaggttgtgggct

SEQ ID NO: 5593245 - DNA, 25 bp, Homo sapien
aacgtgacaaccatgaaaggtcctc

SEQ ID NO: 5593246 - DNA, 25 bp, Homo sapien
ttaccttccagaggatgcaggcaaa

SEQ ID NO: 5593247 - DNA, 25 bp, Homo sapien
catgacagcatatggacaactgcac

SEQ ID NO: 5593248 - DNA, 25 bp, Homo sapien
tagccttctgtggatgccaagagtt

SEQ ID NO: 5593249 - DNA, 25 bp, Homo sapien
attaagttctaagagagaggagatc

SEQ ID NO: 5593250 - DNA, 25 bp, Homo sapien
ttaacaccagcaccgatgccacttc

SEQ ID NO: 5593251 - DNA, 25 bp, Homo sapien
gacttgaggaagtaaggttcataac

SEQ ID NO: 5593252 - DNA, 25 bp, Homo sapien
cctagcagcaaaagagacttgagga

SEQ ID NO: 5593253 - DNA, 25 bp, Homo sapien
tcactaaagtatagaaaggccattc

SEQ ID NO: 5593254 - DNA, 25 bp, Homo sapien
tgattgattataaagcaggctagaa

SEQ ID NO: 5593255 - DNA, 25 bp, Homo sapien
ttagttgaacgcagccctgagcatt

SEQ ID NO: 5593256 - DNA, 25 bp, Homo sapien
agcatacacgctccactcagacttg

SEQ ID NO: 5593257 - DNA, 25 bp, Homo sapien
catgaggtagttgttcaagccattc

SEQ ID NO: 5593258 - DNA, 25 bp, Homo sapien
tctcccgtaacctcaggccgcactg

SEQ ID NO: 5593259 - DNA, 25 bp, Homo sapien
aagccattctacatttcctgccctc

SEQ ID NO: 5593260 - DNA, 25 bp, Homo sapien
gcagataacgcaaagcatacacgct

SEQ ID NO: 5593261 - DNA, 25 bp, Homo sapien
gagcattcaagcaatacacagtgcc

SEQ ID NO: 5593262 - DNA, 25 bp, Homo sapien
gcaggctagaagttcattctggtgt

SEQ ID NO: 5593263 - DNA, 25 bp, Homo sapien
gcatgttttcatgaggtagttgttc

SEQ ID NO: 5593264 - DNA, 25 bp, Homo sapien
gccgcactgcagataacgcaaagca

SEQ ID NO: 5593265 - DNA, 25 bp, Homo sapien
aaacaggagaattcagcttctctat

SEQ ID NO: 5593266 - DNA, 25 bp, Homo sapien
gacaatgcagtgttgggacattgga

SEQ ID NO: 5593267 - DNA, 25 bp, Homo sapien
ttctcagctaactcccatgcccttt

SEQ ID NO: 5593268 - DNA, 25 bp, Homo sapien
cattgctaggttccaggtaaacaag

SEQ ID NO: 5593269 - DNA, 25 bp, Homo sapien
tccttacctgacgattgagactctc

SEQ ID NO: 5593270 - DNA, 25 bp, Homo sapien
aggactatggagctgtctgtgcaca

SEQ ID NO: 5593271 - DNA, 25 bp, Homo sapien
tcaccctgcagggctgctaagtgca

SEQ ID NO: 5593272 - DNA, 25 bp, Homo sapien
gcacccccgaagacatggttgtcct

SEQ ID NO: 5593273 - DNA, 25 bp, Homo sapien
ggatcctccccaagtctcaccctgc

SEQ ID NO: 5593274 - DNA, 25 bp, Homo sapien
gtgcggcccgtccacttcccactga

SEQ ID NO: 5593275 - DNA, 25 bp, Homo sapien
aggtaaacaaggacagcatgtcttg

SEQ ID NO: 5593276 - DNA, 25 bp, Homo sapien
gtccgtcctttcttgtccagttatg

SEQ ID NO: 5593277 - DNA, 25 bp, Homo sapien
cataactggacaagaaaggacggac

SEQ ID NO: 5593278 - DNA, 25 bp, Homo sapien
acggaatcctagctgtaagagaact

SEQ ID NO: 5593279 - DNA, 25 bp, Homo sapien
ggctgggagatttcagatcaggaca

SEQ ID NO: 5593280 - DNA, 25 bp, Homo sapien
acatggttacaaactgggatagctt

SEQ ID NO: 5593281 - DNA, 25 bp, Homo sapien
agacaggaggtactcgaaaaatgtt

SEQ ID NO: 5593282 - DNA, 25 bp, Homo sapien
ctgagaggaagctagccctccatgt

SEQ ID NO: 5593283 - DNA, 25 bp, Homo sapien
aagaaagcacaacaaagcacactct

SEQ ID NO: 5593284 - DNA, 25 bp, Homo sapien
tccatgttagctagactggcgagtc

SEQ ID NO: 5593285 - DNA, 25 bp, Homo sapien
atgtggctggattagtgagtcataa

SEQ ID NO: 5593286 - DNA, 25 bp, Homo sapien
acaaacttcataggagaacagggag

SEQ ID NO: 5593287 - DNA, 25 bp, Homo sapien
atcaggacaatagaataacggaatc

SEQ ID NO: 5593288 - DNA, 25 bp, Homo sapien
taaaagtggcttaaggctaatgaaa

SEQ ID NO: 5593289 - DNA, 25 bp, Homo sapien
tatagtagattaaatggtgaccaaa

SEQ ID NO: 5593290 - DNA, 25 bp, Homo sapien
caaagtgactgtgaaggtagatatt

SEQ ID NO: 5593291 - DNA, 25 bp, Homo sapien
tgacaagcgcccttataagagagac

SEQ ID NO: 5593292 - DNA, 25 bp, Homo sapien
tcctaaatctcatgacaagcgccct

SEQ ID NO: 5593293 - DNA, 25 bp, Homo sapien
ctggtagccaccaggagcttgaaga

SEQ ID NO: 5593294 - DNA, 25 bp, Homo sapien
tgaagagtcaagatacagctttccc

SEQ ID NO: 5593295 - DNA, 25 bp, Homo sapien
tgaccaaaaggatttgtccacatgc

SEQ ID NO: 5593296 - DNA, 25 bp, Homo sapien
gacacatgacaacaataggacacag

SEQ ID NO: 5593297 - DNA, 25 bp, Homo sapien
tccagagggaacgtgaccctttcaa

SEQ ID NO: 5593298 - DNA, 25 bp, Homo sapien
aaggtagactgtaataagttaagat

SEQ ID NO: 5593299 - DNA, 25 bp, Homo sapien
tcgcggattatctaggtgggtccta

SEQ ID NO: 5593300 - DNA, 25 bp, Homo sapien
ctcaggttccttgttaagccagttc

SEQ ID NO: 5593301 - DNA, 25 bp, Homo sapien
aatgcagacataagtattaacacta

SEQ ID NO: 5593302 - DNA, 25 bp, Homo sapien
tcaacaatttggtaggcaagctcac

SEQ ID NO: 5593303 - DNA, 25 bp, Homo sapien
agccagttctacccctacctgcccc

SEQ ID NO: 5593304 - DNA, 25 bp, Homo sapien
tactgctgagatgttctgagattcc

SEQ ID NO: 5593305 - DNA, 25 bp, Homo sapien
gctatttgggtcaagattagacttc

SEQ ID NO: 5593306 - DNA, 25 bp, Homo sapien
tgccccaacccattgtgtgcgaggt

SEQ ID NO: 5593307 - DNA, 25 bp, Homo sapien
gatatttagaagaaacagctatttg

SEQ ID NO: 5593308 - DNA, 25 bp, Homo sapien
ttaacactagaaacggaatgtaggc

SEQ ID NO: 5593309 - DNA, 25 bp, Homo sapien
acggtcaacaaaaactcttaggaga

SEQ ID NO: 5593310 - DNA, 25 bp, Homo sapien
agatgaccatctgacaagagatatt

SEQ ID NO: 5593311 - DNA, 25 bp, Homo sapien
cacatccatgcaggcgcacacatat

SEQ ID NO: 5593312 - DNA, 25 bp, Homo sapien
gccactccaagcctgaatttcaata

SEQ ID NO: 5593313 - DNA, 25 bp, Homo sapien
ttgtattgtctgtgaacacacacgt

SEQ ID NO: 5593314 - DNA, 25 bp, Homo sapien
catccatgcaggcgcacacatatgc

SEQ ID NO: 5593315 - DNA, 25 bp, Homo sapien
ctgtccaacatacatacctaggatc

SEQ ID NO: 5593316 - DNA, 25 bp, Homo sapien
tacctaggatcatgtgcatgcacac

SEQ ID NO: 5593317 - DNA, 25 bp, Homo sapien
ccctcacatccatgcaggcgcacac

SEQ ID NO: 5593318 - DNA, 25 bp, Homo sapien
tacatacctaggatcatgtgcatgc

SEQ ID NO: 5593319 - DNA, 25 bp, Homo sapien
acacccctcacatccatgcaggcgc

SEQ ID NO: 5593320 - DNA, 25 bp, Homo sapien
agagggcatgttgtattgtctgtga

SEQ ID NO: 5593321 - DNA, 25 bp, Homo sapien
tgcaggcgcacacatatgcgcacac

SEQ ID NO: 5593322 - DNA, 25 bp, Homo sapien
agaaccaggcctgcagcttaaccag

SEQ ID NO: 5593323 - DNA, 25 bp, Homo sapien
tctgctgagagtttagtccttggaa

SEQ ID NO: 5593324 - DNA, 25 bp, Homo sapien
tccaagtaagccattctgctgagag

SEQ ID NO: 5593325 - DNA, 25 bp, Homo sapien
aagaggcaaaggataacacatttaa

SEQ ID NO: 5593326 - DNA, 25 bp, Homo sapien
ggcagccatgaaactcaggtaacct

SEQ ID NO: 5593327 - DNA, 25 bp, Homo sapien
ttcattctcacaatggcagccatga

SEQ ID NO: 5593328 - DNA, 25 bp, Homo sapien
taaaaatgccaaagctaaatgtatt

SEQ ID NO: 5593329 - DNA, 25 bp, Homo sapien
tcaatgagcaaacattaatggaatg

SEQ ID NO: 5593330 - DNA, 25 bp, Homo sapien
taatggaatgaaaaagtgtcttaac

SEQ ID NO: 5593331 - DNA, 25 bp, Homo sapien
atttttcaaagaggcaaaggataac

SEQ ID NO: 5593332 - DNA, 25 bp, Homo sapien
ggtaaccttccctgagtgctggcag

SEQ ID NO: 5593333 - DNA, 25 bp, Homo sapien
agaatgatacgaagacattgtgaaa

SEQ ID NO: 5593334 - DNA, 25 bp, Homo sapien
tttcacaatgtcttcgtatcattct

SEQ ID NO: 5593335 - DNA, 25 bp, Homo sapien
agtgtgcaacgaaataactgaggct

SEQ ID NO: 5593336 - DNA, 25 bp, Homo sapien
tggcatacaatatacagtcagctct

SEQ ID NO: 5593337 - DNA, 25 bp, Homo sapien
gatgcaaagaaatgatttggtgatt

SEQ ID NO: 5593338 - DNA, 25 bp, Homo sapien
aaggaactgattgggtaaaacagct

SEQ ID NO: 5593339 - DNA, 25 bp, Homo sapien
cagcctgtgtgtctgcacagactgc

SEQ ID NO: 5593340 - DNA, 25 bp, Homo sapien
gaataagtgagtgttagctatgttt

SEQ ID NO: 5593341 - DNA, 25 bp, Homo sapien
gggatctgctaggcagctcagcaca

SEQ ID NO: 5593342 - DNA, 25 bp, Homo sapien
tacgatacttaaaatgctggcatac

SEQ ID NO: 5593343 - DNA, 25 bp, Homo sapien
ttagcatgaatgattgagagattac

SEQ ID NO: 5593344 - DNA, 25 bp, Homo sapien
agaaacctaaaatagctgatgagcc

SEQ ID NO: 5593345 - DNA, 25 bp, Homo sapien
cggaacccaaagagatcacagctct

SEQ ID NO: 5593346 - DNA, 25 bp, Homo sapien
cccaagaataacaggttcaaagccc

SEQ ID NO: 5593347 - DNA, 25 bp, Homo sapien
ctgatatggattgttgtactgttac

SEQ ID NO: 5593348 - DNA, 25 bp, Homo sapien
tcagaatgcataaaatggcagccaa

SEQ ID NO: 5593349 - DNA, 25 bp, Homo sapien
cataatgaagtcaagccctaagctg

SEQ ID NO: 5593350 - DNA, 25 bp, Homo sapien
cggagagctttgaggaacttccact

SEQ ID NO: 5593351 - DNA, 25 bp, Homo sapien
caaagcccattgggccctcggtggc

SEQ ID NO: 5593352 - DNA, 25 bp, Homo sapien
tccaaagcacagctgcacacgtgta

SEQ ID NO: 5593353 - DNA, 25 bp, Homo sapien
aggatgctttcaaaacggagagctt

SEQ ID NO: 5593354 - DNA, 25 bp, Homo sapien
ggtggcagatgcaatttagtggctg

SEQ ID NO: 5593355 - DNA, 25 bp, Homo sapien
actgcggaatgttaaagacaaggtg

SEQ ID NO: 5593356 - DNA, 25 bp, Homo sapien
acttgagatacttggacttgatttc

SEQ ID NO: 5593357 - DNA, 25 bp, Homo sapien
cgatgtcgaacgctggtaaatcaaa

SEQ ID NO: 5593358 - DNA, 25 bp, Homo sapien
aaagataatgctggattctcgttcc

SEQ ID NO: 5593359 - DNA, 25 bp, Homo sapien
ctgcgacgtacccctcaaaggaaac

SEQ ID NO: 5593360 - DNA, 25 bp, Homo sapien
gcagctctccaggaaagggttcttg

SEQ ID NO: 5593361 - DNA, 25 bp, Homo sapien
atagtaccaaagatgccacacagag

SEQ ID NO: 5593362 - DNA, 25 bp, Homo sapien
ttcttgctcaaaagagcgaagcaat

SEQ ID NO: 5593363 - DNA, 25 bp, Homo sapien
attttgtgaaactgaaggaccaagg

SEQ ID NO: 5593364 - DNA, 25 bp, Homo sapien
ttcacttgaaagctagcactaattt

SEQ ID NO: 5593365 - DNA, 25 bp, Homo sapien
cgttccccatagtaccaaagatgcc

SEQ ID NO: 5593366 - DNA, 25 bp, Homo sapien
gcgaagcaattaatctagaggaaga

SEQ ID NO: 5593367 - DNA, 25 bp, Homo sapien
gatgccacacagagtattcttgctc

SEQ ID NO: 5593368 - DNA, 25 bp, Homo sapien
aaaaaggaaaccatggcctctcttc

SEQ ID NO: 5593369 - DNA, 25 bp, Homo sapien
gtttatccaggttccgtgaaggcaa

SEQ ID NO: 5593370 - DNA, 25 bp, Homo sapien
ctgtttgatcagcctagagagagac

SEQ ID NO: 5593371 - DNA, 25 bp, Homo sapien
ttgtgacgtcaaggctgccattcag

SEQ ID NO: 5593372 - DNA, 25 bp, Homo sapien
ccctgcccctgcgacagagcagggc

SEQ ID NO: 5593373 - DNA, 25 bp, Homo sapien
tcttcgcatcagtagcccggacaag

SEQ ID NO: 5593374 - DNA, 25 bp, Homo sapien
gtgaaggcaattagcactgggcaaa

SEQ ID NO: 5593375 - DNA, 25 bp, Homo sapien
gccacagaagacatcagaactggat

SEQ ID NO: 5593376 - DNA, 25 bp, Homo sapien
agagagagaccgcctttacgcctaa

SEQ ID NO: 5593377 - DNA, 25 bp, Homo sapien
agtggttcctagctgttgtgacgtc

SEQ ID NO: 5593378 - DNA, 25 bp, Homo sapien
gattaaacgaatggacggatgtgta

SEQ ID NO: 5593379 - DNA, 25 bp, Homo sapien
aacatgctgaggaacccagctaggg

SEQ ID NO: 5593380 - DNA, 25 bp, Homo sapien
cctatccacaccaccaaatgacctc

SEQ ID NO: 5593381 - DNA, 25 bp, Homo sapien
gggaagatggattgttaatggaatt

SEQ ID NO: 5593382 - DNA, 25 bp, Homo sapien
ttacaattgatttctgaggaaggtg

SEQ ID NO: 5593383 - DNA, 25 bp, Homo sapien
aaataaagcaggaagtcactgccct

SEQ ID NO: 5593384 - DNA, 25 bp, Homo sapien
gcctcaaccccctgcactcaagtga

SEQ ID NO: 5593385 - DNA, 25 bp, Homo sapien
caagagccatgacgcccggctattt

SEQ ID NO: 5593386 - DNA, 25 bp, Homo sapien
aaggcatacaaaggtgacctgtata

SEQ ID NO: 5593387 - DNA, 25 bp, Homo sapien
tggaatttgaattagcctagctgtc

SEQ ID NO: 5593388 - DNA, 25 bp, Homo sapien
tagatggggttactaatggtgacca

SEQ ID NO: 5593389 - DNA, 25 bp, Homo sapien
tagcctagctgtccctcctgttgat

SEQ ID NO: 5593390 - DNA, 25 bp, Homo sapien
atggtatattcttactcgtacgaac

SEQ ID NO: 5593391 - DNA, 25 bp, Homo sapien
gttcgtacgagtaagaatataccat

SEQ ID NO: 5593392 - DNA, 25 bp, Homo sapien
attgtccctggttacaggggaggaa

SEQ ID NO: 5593393 - DNA, 25 bp, Homo sapien
ggcactgatagtaaggtcagctgcc

SEQ ID NO: 5593394 - DNA, 25 bp, Homo sapien
cacgtcacttgaaactaccacctct

SEQ ID NO: 5593395 - DNA, 25 bp, Homo sapien
tgaatacccaggctctcagaaaccc

SEQ ID NO: 5593396 - DNA, 25 bp, Homo sapien
atttgatgagtcttttgagtggttt

SEQ ID NO: 5593397 - DNA, 25 bp, Homo sapien
gggcagaaggctcagctctttttct

SEQ ID NO: 5593398 - DNA, 25 bp, Homo sapien
gagagggctggcattattgtccctg

SEQ ID NO: 5593399 - DNA, 25 bp, Homo sapien
ctaaatctgtgcttccgaggcttga

SEQ ID NO: 5593400 - DNA, 25 bp, Homo sapien
cttgtccctgcaccacacacccatc

SEQ ID NO: 5593401 - DNA, 25 bp, Homo sapien
atgcaataattttgggagggagaga

SEQ ID NO: 5593402 - DNA, 25 bp, Homo sapien
gggtcctctgactgaagtcttgtcc

SEQ ID NO: 5593403 - DNA, 25 bp, Homo sapien
aatacaaggctcctagtggctctgg

SEQ ID NO: 5593404 - DNA, 25 bp, Homo sapien
ctggactcataccgctgggctcaag

SEQ ID NO: 5593405 - DNA, 25 bp, Homo sapien
acacacacaaaatgcgctgactttt

SEQ ID NO: 5593406 - DNA, 25 bp, Homo sapien
caggtgctgcaatcatgccaggtac

SEQ ID NO: 5593407 - DNA, 25 bp, Homo sapien
taagcaagggcaatcatttaggttg

SEQ ID NO: 5593408 - DNA, 25 bp, Homo sapien
gtggccttacaagatacaaagccca

SEQ ID NO: 5593409 - DNA, 25 bp, Homo sapien
cagaaggagaagaatgttgattttg

SEQ ID NO: 5593410 - DNA, 25 bp, Homo sapien
ctgattacatgcaaggtggtgctgc

SEQ ID NO: 5593411 - DNA, 25 bp, Homo sapien
taaacaaagacgtttgcaggctcag

SEQ ID NO: 5593412 - DNA, 25 bp, Homo sapien
ctgggcacaatgtggaaaaagtcag

SEQ ID NO: 5593413 - DNA, 25 bp, Homo sapien
tttgcagatggagctgattacatgc

SEQ ID NO: 5593414 - DNA, 25 bp, Homo sapien
tgcacttcccaaagcgatgagtctc

SEQ ID NO: 5593415 - DNA, 25 bp, Homo sapien
gcgctcgggatcctgagcgctcctg

SEQ ID NO: 5593416 - DNA, 25 bp, Homo sapien
gaactttttcgcggcgctcgggatc

SEQ ID NO: 5593417 - DNA, 25 bp, Homo sapien
acttcccaaagcgatgagtctccag

SEQ ID NO: 5593418 - DNA, 25 bp, Homo sapien
atgcacttcccaaagcgatgagtct

SEQ ID NO: 5593419 - DNA, 25 bp, Homo sapien
acgaagcaaatgcacttcccaaagc

SEQ ID NO: 5593420 - DNA, 25 bp, Homo sapien
aaagcgatgagtctccagcaaaagc

SEQ ID NO: 5593421 - DNA, 25 bp, Homo sapien
agcaaatgcacttcccaaagcgatg

SEQ ID NO: 5593422 - DNA, 25 bp, Homo sapien
tcccaaagcgatgagtctccagcaa

SEQ ID NO: 5593423 - DNA, 25 bp, Homo sapien
gcacttcccaaagcgatgagtctcc

SEQ ID NO: 5593424 - DNA, 25 bp, Homo sapien
ccaaagcgatgagtctccagcaaaa

SEQ ID NO: 5593425 - DNA, 25 bp, Homo sapien
ataaggggaaaatctcctggagtta

SEQ ID NO: 5593426 - DNA, 25 bp, Homo sapien
atgtagaggacatcagaccatatca

SEQ ID NO: 5593427 - DNA, 25 bp, Homo sapien
cttgacacatataaccagaagtttt

SEQ ID NO: 5593428 - DNA, 25 bp, Homo sapien
gttagtgtgtccatgaacttcctgc

SEQ ID NO: 5593429 - DNA, 25 bp, Homo sapien
aaaatggtgaaacacattgtaatgt

SEQ ID NO: 5593430 - DNA, 25 bp, Homo sapien
aagtcaattcagggcattattaact

SEQ ID NO: 5593431 - DNA, 25 bp, Homo sapien
tggttcaaactctaagataagggga

SEQ ID NO: 5593432 - DNA, 25 bp, Homo sapien
cagaaaacattcaaagtgtgggaaa

SEQ ID NO: 5593433 - DNA, 25 bp, Homo sapien
tggagttaactacaatcagatacat

SEQ ID NO: 5593434 - DNA, 25 bp, Homo sapien
ttaatttaggtatgtggcagaggga

SEQ ID NO: 5593435 - DNA, 25 bp, Homo sapien
tacatggtcactatatggttcaaac

SEQ ID NO: 5593436 - DNA, 25 bp, Homo sapien
caccaccaaagtgatgctccagagt

SEQ ID NO: 5593437 - DNA, 25 bp, Homo sapien
ttccggattagcttaccgccgctct

SEQ ID NO: 5593438 - DNA, 25 bp, Homo sapien
acgcaggaaagtgttcatagccatt

SEQ ID NO: 5593439 - DNA, 25 bp, Homo sapien
aactagcaggaaacacttcggtttg

SEQ ID NO: 5593440 - DNA, 25 bp, Homo sapien
ggaacagtgtggttcaagaatatct

SEQ ID NO: 5593441 - DNA, 25 bp, Homo sapien
tgatttaagacgggtcagatagcac

SEQ ID NO: 5593442 - DNA, 25 bp, Homo sapien
tcagatagcactagcgtggcttgaa

SEQ ID NO: 5593443 - DNA, 25 bp, Homo sapien
acttcggtttgtgtgtccagcccca

SEQ ID NO: 5593444 - DNA, 25 bp, Homo sapien
taatttcaggtagtgatgggtgtga

SEQ ID NO: 5593445 - DNA, 25 bp, Homo sapien
aaggccgtgattcagcagtgaactt

SEQ ID NO: 5593446 - DNA, 25 bp, Homo sapien
cttagttctcctcgagggacgcagg

SEQ ID NO: 5593447 - DNA, 25 bp, Homo sapien
cctttgcgattggaattgcgagggc

SEQ ID NO: 5593448 - DNA, 25 bp, Homo sapien
gcagtgcagatcaacccggcacaca

SEQ ID NO: 5593449 - DNA, 25 bp, Homo sapien
aacccggcacacaccgccttgtcct

SEQ ID NO: 5593450 - DNA, 25 bp, Homo sapien
gaggactctgtaaatggaactcatc

SEQ ID NO: 5593451 - DNA, 25 bp, Homo sapien
gtttgaactgtggccctagcctgcc

SEQ ID NO: 5593452 - DNA, 25 bp, Homo sapien
gtgtttgaatggagacatgaacagc

SEQ ID NO: 5593453 - DNA, 25 bp, Homo sapien
cagccgcagggatcctcttctgcac

SEQ ID NO: 5593454 - DNA, 25 bp, Homo sapien
agccacttgccagctgtggggtctg

SEQ ID NO: 5593455 - DNA, 25 bp, Homo sapien
gagtatgggacaaacctgccctagc

SEQ ID NO: 5593456 - DNA, 25 bp, Homo sapien
ccttgtccttgggcctggaaaagag

SEQ ID NO: 5593457 - DNA, 25 bp, Homo sapien
tgagacattgagatcgtgactggca

SEQ ID NO: 5593458 - DNA, 25 bp, Homo sapien
gtctttatattaaatacgagaggtg

SEQ ID NO: 5593459 - DNA, 25 bp, Homo sapien
cacctctcgtatttaatataaagac

SEQ ID NO: 5593460 - DNA, 25 bp, Homo sapien
acaaagctctctcccagcctggact

SEQ ID NO: 5593461 - DNA, 25 bp, Homo sapien
ttataaagtacatctgtcagtttct

SEQ ID NO: 5593462 - DNA, 25 bp, Homo sapien
gtgtatttcctgcattaatctgatc

SEQ ID NO: 5593463 - DNA, 25 bp, Homo sapien
aagtaagggcaaaattatcctaaga

SEQ ID NO: 5593464 - DNA, 25 bp, Homo sapien
aagaaatccgtagtgtagatctcac

SEQ ID NO: 5593465 - DNA, 25 bp, Homo sapien
tggctgccttccttctgtgcggctg

SEQ ID NO: 5593466 - DNA, 25 bp, Homo sapien
cacattatcggtagagtctctcctt

SEQ ID NO: 5593467 - DNA, 25 bp, Homo sapien
tatcctaagaaatccgtagtgtaga

SEQ ID NO: 5593468 - DNA, 25 bp, Homo sapien
cttaacacattatcggtagagtctc

SEQ ID NO: 5593469 - DNA, 25 bp, Homo sapien
agaaataaccattgcaatgacagcc

SEQ ID NO: 5593470 - DNA, 25 bp, Homo sapien
gcaatgacagccactgttattacac

SEQ ID NO: 5593471 - DNA, 25 bp, Homo sapien
agattattgtggagctgtcctggag

SEQ ID NO: 5593472 - DNA, 25 bp, Homo sapien
acatcaaactgattagactggattt

SEQ ID NO: 5593473 - DNA, 25 bp, Homo sapien
cagcacatgtcaacttggtctagcc

SEQ ID NO: 5593474 - DNA, 25 bp, Homo sapien
gcaaaatcaatggtatgagactcca

SEQ ID NO: 5593475 - DNA, 25 bp, Homo sapien
agtggctaccccattggactgcagt

SEQ ID NO: 5593476 - DNA, 25 bp, Homo sapien
actgtgagaggcctataaatgatac

SEQ ID NO: 5593477 - DNA, 25 bp, Homo sapien
agcacatgtgaatagtggctacccc

SEQ ID NO: 5593478 - DNA, 25 bp, Homo sapien
ttaggtactcaatagcacatgtgaa

SEQ ID NO: 5593479 - DNA, 25 bp, Homo sapien
cattccatcagctacaacattcggc

SEQ ID NO: 5593480 - DNA, 25 bp, Homo sapien
ttcggctctattcccagaaacatac

SEQ ID NO: 5593481 - DNA, 25 bp, Homo sapien
tggtctagccacattttaggtactc

SEQ ID NO: 5593482 - DNA, 25 bp, Homo sapien
ctttcgttgtctgatgatagaatat

SEQ ID NO: 5593483 - DNA, 25 bp, Homo sapien
tctttcaatgattcatgcagccatt

SEQ ID NO: 5593484 - DNA, 25 bp, Homo sapien
tcaagctaggggaatttagataagg

SEQ ID NO: 5593485 - DNA, 25 bp, Homo sapien
ctaggggaatttagataaggctatc

SEQ ID NO: 5593486 - DNA, 25 bp, Homo sapien
aaaagcagggaagtttctttcaatg

SEQ ID NO: 5593487 - DNA, 25 bp, Homo sapien
tagataaggctatcaaacagaaaag

SEQ ID NO: 5593488 - DNA, 25 bp, Homo sapien
aatggtatatacggtttaacaaatg

SEQ ID NO: 5593489 - DNA, 25 bp, Homo sapien
aacatcttcaatggtatatacggtt

SEQ ID NO: 5593490 - DNA, 25 bp, Homo sapien
caagaggtgaattagatacacattt

SEQ ID NO: 5593491 - DNA, 25 bp, Homo sapien
ttactacattcaagctaggggaatt

SEQ ID NO: 5593492 - DNA, 25 bp, Homo sapien
ctcccccaagaggtgaattagatac

SEQ ID NO: 5593493 - DNA, 25 bp, Homo sapien
cgcaaacccgtacacaagcgcgagg

SEQ ID NO: 5593494 - DNA, 25 bp, Homo sapien
ccaagggaaggttctgtccaatctg

SEQ ID NO: 5593495 - DNA, 25 bp, Homo sapien
gtgagaagagacgaattgctcagtc

SEQ ID NO: 5593496 - DNA, 25 bp, Homo sapien
taaagaggcatgaataataaaacca

SEQ ID NO: 5593497 - DNA, 25 bp, Homo sapien
gaacagatgaatacaaccgccaagg

SEQ ID NO: 5593498 - DNA, 25 bp, Homo sapien
atcagcagcataagaacagatgaat

SEQ ID NO: 5593499 - DNA, 25 bp, Homo sapien
cgtgtggtgctgacccagcacaccg

SEQ ID NO: 5593500 - DNA, 25 bp, Homo sapien
gcagcaacaagcacccacaggctgt

SEQ ID NO: 5593501 - DNA, 25 bp, Homo sapien
ataataaaaccaggtgcgtgtggtg

SEQ ID NO: 5593502 - DNA, 25 bp, Homo sapien
gtgagcttttcagtcgcaaacccgt

SEQ ID NO: 5593503 - DNA, 25 bp, Homo sapien
gcagccagcctcacctccatgctat

SEQ ID NO: 5593504 - DNA, 25 bp, Homo sapien
tgaggatcaggtaacaaatctgagc

SEQ ID NO: 5593505 - DNA, 25 bp, Homo sapien
aagtcaatttgccactaggggcttt

SEQ ID NO: 5593506 - DNA, 25 bp, Homo sapien
cacctgctggctacaaatggctaat

SEQ ID NO: 5593507 - DNA, 25 bp, Homo sapien
aatctgagcacgttttaagccactt

SEQ ID NO: 5593508 - DNA, 25 bp, Homo sapien
ggctggatagtggcagaattcccag

SEQ ID NO: 5593509 - DNA, 25 bp, Homo sapien
caaaaaggcacttgtccaatgtaac

SEQ ID NO: 5593510 - DNA, 25 bp, Homo sapien
tattgccaaagtgaaaagagtgatg

SEQ ID NO: 5593511 - DNA, 25 bp, Homo sapien
aaaataagaaactgctcatgcatct

SEQ ID NO: 5593512 - DNA, 25 bp, Homo sapien
ccctgaaatgcagtactggacagtt

SEQ ID NO: 5593513 - DNA, 25 bp, Homo sapien
aacgttgctatgttgagaagggaac

SEQ ID NO: 5593514 - DNA, 25 bp, Homo sapien
tgagaagggaactttcaaatgcctc

SEQ ID NO: 5593515 - DNA, 25 bp, Homo sapien
ccctgggagacgacatttcatatat

SEQ ID NO: 5593516 - DNA, 25 bp, Homo sapien
ggaagtttggattttgttatgtgcc

SEQ ID NO: 5593517 - DNA, 25 bp, Homo sapien
ttcccacaactgagaagagtagttt

SEQ ID NO: 5593518 - DNA, 25 bp, Homo sapien
gttatgtgccaagcagaagaaacct

SEQ ID NO: 5593519 - DNA, 25 bp, Homo sapien
gattttgaggggtcccatcattccc

SEQ ID NO: 5593520 - DNA, 25 bp, Homo sapien
agaagaaacctacgtgactgctctc

SEQ ID NO: 5593521 - DNA, 25 bp, Homo sapien
tgttgtcacagcccactgctgggga

SEQ ID NO: 5593522 - DNA, 25 bp, Homo sapien
actgagaagagtagtttactgtgcc

SEQ ID NO: 5593523 - DNA, 25 bp, Homo sapien
ctgtgcctagactggatatacaaac

SEQ ID NO: 5593524 - DNA, 25 bp, Homo sapien
caagtgcgcctaacaagcttccctg

SEQ ID NO: 5593525 - DNA, 25 bp, Homo sapien
caaaagtctacttacaaggttgacc

SEQ ID NO: 5593526 - DNA, 25 bp, Homo sapien
tccccatctacacgtttcatccagt

SEQ ID NO: 5593527 - DNA, 25 bp, Homo sapien
actggatgaaacgtgtagatgggga

SEQ ID NO: 5593528 - DNA, 25 bp, Homo sapien
tctgactggttttgggccagttcat

SEQ ID NO: 5593529 - DNA, 25 bp, Homo sapien
attggcactgctgttttcatagttc

SEQ ID NO: 5593530 - DNA, 25 bp, Homo sapien
aagtagcaagttaaaatcaagtgtt

SEQ ID NO: 5593531 - DNA, 25 bp, Homo sapien
tagaagctacaaagaggtagtgcat

SEQ ID NO: 5593532 - DNA, 25 bp, Homo sapien
cattacacaggactttcagagtagt

SEQ ID NO: 5593533 - DNA, 25 bp, Homo sapien
agttcagtaaagaaacctaccatcc

SEQ ID NO: 5593534 - DNA, 25 bp, Homo sapien
gaatggataaatgcaggaatgtcag

SEQ ID NO: 5593535 - DNA, 25 bp, Homo sapien
caaattagaagaagttaagcctgtt

SEQ ID NO: 5593536 - DNA, 25 bp, Homo sapien
tctgacttcatgaaaggtaagttca

SEQ ID NO: 5593537 - DNA, 25 bp, Homo sapien
tgcaggaatgtcagaggcatctctg

SEQ ID NO: 5593538 - DNA, 25 bp, Homo sapien
acaaagaggtagtgcatgcatttca

SEQ ID NO: 5593539 - DNA, 25 bp, Homo sapien
tcagctctcagtccctgccactgtc

SEQ ID NO: 5593540 - DNA, 25 bp, Homo sapien
ccgacctaagtgctgccaaggcttg

SEQ ID NO: 5593541 - DNA, 25 bp, Homo sapien
gacatccaaagccagggaacctata

SEQ ID NO: 5593542 - DNA, 25 bp, Homo sapien
gtgctggagcttggtaacgttttta

SEQ ID NO: 5593543 - DNA, 25 bp, Homo sapien
tcccccttccgacctaagtgctgcc

SEQ ID NO: 5593544 - DNA, 25 bp, Homo sapien
aacccatcacataagtgctggagct

SEQ ID NO: 5593545 - DNA, 25 bp, Homo sapien
ccaaaagctgagatctaaggcagga

SEQ ID NO: 5593546 - DNA, 25 bp, Homo sapien
tgccaaggcttgtcagctctcagtc

SEQ ID NO: 5593547 - DNA, 25 bp, Homo sapien
gggaacctataagccaaaagctgag

SEQ ID NO: 5593548 - DNA, 25 bp, Homo sapien
cctcccacagcgtcataccactttc

SEQ ID NO: 5593549 - DNA, 25 bp, Homo sapien
ggaccaggccccaatcaatggagta

SEQ ID NO: 5593550 - DNA, 25 bp, Homo sapien
cctgttcaacaaggaccatagcctc

SEQ ID NO: 5593551 - DNA, 25 bp, Homo sapien
atcagtatcagatgacaaaacctgt

SEQ ID NO: 5593552 - DNA, 25 bp, Homo sapien
gagaaactgcttaacagaagaggac

SEQ ID NO: 5593553 - DNA, 25 bp, Homo sapien
cacagaccaagataaccacattttt

SEQ ID NO: 5593554 - DNA, 25 bp, Homo sapien
gacagcctccgccgttagaatgttc

SEQ ID NO: 5593555 - DNA, 25 bp, Homo sapien
aagatgttttctgaagggtgcacag

SEQ ID NO: 5593556 - DNA, 25 bp, Homo sapien
ccatgatcctgacttgaggcaagtg

SEQ ID NO: 5593557 - DNA, 25 bp, Homo sapien
aatatgctagttgacagcctccgcc

SEQ ID NO: 5593558 - DNA, 25 bp, Homo sapien
gtttgctaactgctgggatggtttt

SEQ ID NO: 5593559 - DNA, 25 bp, Homo sapien
gatggttttaatcagagaagaagcc

SEQ ID NO: 5593560 - DNA, 25 bp, Homo sapien
ttgggtgttagaaaagctcctgaaa

SEQ ID NO: 5593561 - DNA, 25 bp, Homo sapien
gtaggcgctcagtaactacttcctg

SEQ ID NO: 5593562 - DNA, 25 bp, Homo sapien
aaaaggcagttaatcttaatagctc

SEQ ID NO: 5593563 - DNA, 25 bp, Homo sapien
tcaaaataggaccttagcagttatt

SEQ ID NO: 5593564 - DNA, 25 bp, Homo sapien
cttgaacttttcataaaggagagca

SEQ ID NO: 5593565 - DNA, 25 bp, Homo sapien
ggcaagaagtcttgttacaatcgct

SEQ ID NO: 5593566 - DNA, 25 bp, Homo sapien
gaaaaaggaatgtagccacaaacta

SEQ ID NO: 5593567 - DNA, 25 bp, Homo sapien
tttgccaatgagactacttgccagg

SEQ ID NO: 5593568 - DNA, 25 bp, Homo sapien
tgccaggtggaaaacgattaattta

SEQ ID NO: 5593569 - DNA, 25 bp, Homo sapien
aatgagactacttgccaggtggaaa

SEQ ID NO: 5593570 - DNA, 25 bp, Homo sapien
agaaataaagaacatccctccctct

SEQ ID NO: 5593571 - DNA, 25 bp, Homo sapien
ctccaaataaccatggcaagaagtc

SEQ ID NO: 5593572 - DNA, 25 bp, Homo sapien
gcatcaactttgtagaacagaaaac

SEQ ID NO: 5593573 - DNA, 25 bp, Homo sapien
aaatatataggaaagtgctacatac

SEQ ID NO: 5593574 - DNA, 25 bp, Homo sapien
ctgctttacatagggaatctgattc

SEQ ID NO: 5593575 - DNA, 25 bp, Homo sapien
ccacaggactacagtacttactaca

SEQ ID NO: 5593576 - DNA, 25 bp, Homo sapien
agtggaactggcattatgttagacc

SEQ ID NO: 5593577 - DNA, 25 bp, Homo sapien
aacaaagttaaagtggaactggcat

SEQ ID NO: 5593578 - DNA, 25 bp, Homo sapien
attctgtagtaccattgtgcctttt

SEQ ID NO: 5593579 - DNA, 25 bp, Homo sapien
acctgagcactgaacattgaattcc

SEQ ID NO: 5593580 - DNA, 25 bp, Homo sapien
taggaaagtgctacatacattcttc

SEQ ID NO: 5593581 - DNA, 25 bp, Homo sapien
tacacatttgcccccacaggactac

SEQ ID NO: 5593582 - DNA, 25 bp, Homo sapien
atagttatacccagtccagttttca

SEQ ID NO: 5593583 - DNA, 25 bp, Homo sapien
gtcttccgactgtgtggaaggggga

SEQ ID NO: 5593584 - DNA, 25 bp, Homo sapien
ggccgctagcgaacctttgcgtcct

SEQ ID NO: 5593585 - DNA, 25 bp, Homo sapien
tttgaacttctggagcattcagtgg

SEQ ID NO: 5593586 - DNA, 25 bp, Homo sapien
cgcctctgatcgcgtgttgcgtttt

SEQ ID NO: 5593587 - DNA, 25 bp, Homo sapien
ccctttggggtcttccgactgtgtg

SEQ ID NO: 5593588 - DNA, 25 bp, Homo sapien
ccagggaaaagttcgctgtttctcc

SEQ ID NO: 5593589 - DNA, 25 bp, Homo sapien
gggcctctggcaacctcggtctctt

SEQ ID NO: 5593590 - DNA, 25 bp, Homo sapien
ccaagatcaaggatagtatggagcg

SEQ ID NO: 5593591 - DNA, 25 bp, Homo sapien
gtcactggcagaaaacgcctctgat

SEQ ID NO: 5593592 - DNA, 25 bp, Homo sapien
gagcgtttaagtgcgcgttcccctc

SEQ ID NO: 5593593 - DNA, 25 bp, Homo sapien
cttttggccaagatcaaggatagta

SEQ ID NO: 5593594 - DNA, 25 bp, Homo sapien
tgtgcagaggtattcacacttgtgc

SEQ ID NO: 5593595 - DNA, 25 bp, Homo sapien
cccaccccatatacacgagcacaca

SEQ ID NO: 5593596 - DNA, 25 bp, Homo sapien
cccatatgtgcagaggtattcacac

SEQ ID NO: 5593597 - DNA, 25 bp, Homo sapien
cccgccctgcatcagcttgcatggc

SEQ ID NO: 5593598 - DNA, 25 bp, Homo sapien
ggcgtatgtacaggatgctgtgtgg

SEQ ID NO: 5593599 - DNA, 25 bp, Homo sapien
aatagtgcaacacccagcccttccc

SEQ ID NO: 5593600 - DNA, 25 bp, Homo sapien
gtctcatgttccccaccccatatac

SEQ ID NO: 5593601 - DNA, 25 bp, Homo sapien
actggtcacaggaagtctcatgttc

SEQ ID NO: 5593602 - DNA, 25 bp, Homo sapien
cagcaatagtgcaacacccagccct

SEQ ID NO: 5593603 - DNA, 25 bp, Homo sapien
ctttaatcgatgctcctggccctgc

SEQ ID NO: 5593604 - DNA, 25 bp, Homo sapien
ttccccaccccatatacacgagcac

SEQ ID NO: 5593605 - DNA, 25 bp, Homo sapien
gaagcaatgccaagggaacatcttt

SEQ ID NO: 5593606 - DNA, 25 bp, Homo sapien
gaaactaagcatgggataccccttc

SEQ ID NO: 5593607 - DNA, 25 bp, Homo sapien
gggagatatcttacaccagggaaca

SEQ ID NO: 5593608 - DNA, 25 bp, Homo sapien
ccactcaggacacattggacaggtg

SEQ ID NO: 5593609 - DNA, 25 bp, Homo sapien
tctaggttgttggtatggagcaaaa

SEQ ID NO: 5593610 - DNA, 25 bp, Homo sapien
gagaaatcgtacagaagcaatgcca

SEQ ID NO: 5593611 - DNA, 25 bp, Homo sapien
gggaatgtgtggccctctcctggga

SEQ ID NO: 5593612 - DNA, 25 bp, Homo sapien
gagcaaaagacgagacaccttctaa

SEQ ID NO: 5593613 - DNA, 25 bp, Homo sapien
tgtatgtaccaagaaggtccacctc

SEQ ID NO: 5593614 - DNA, 25 bp, Homo sapien
aaaattggatgacgatgcaaaccat

SEQ ID NO: 5593615 - DNA, 25 bp, Homo sapien
tttctatacaacaggagtccccact

SEQ ID NO: 5593616 - DNA, 25 bp, Homo sapien
tgcaaatgcttgttttcaccactac

SEQ ID NO: 5593617 - DNA, 25 bp, Homo sapien
taagcccatatgtactcaaatcccc

SEQ ID NO: 5593618 - DNA, 25 bp, Homo sapien
cttataaaaggaataccatatagcc

SEQ ID NO: 5593619 - DNA, 25 bp, Homo sapien
catgacagaacactcttaagcccat

SEQ ID NO: 5593620 - DNA, 25 bp, Homo sapien
ggaataccatatagccttaggagtc

SEQ ID NO: 5593621 - DNA, 25 bp, Homo sapien
atagccttaggagtctttgtaaaat

SEQ ID NO: 5593622 - DNA, 25 bp, Homo sapien
aagtcttgacaatgcccaatatagg

SEQ ID NO: 5593623 - DNA, 25 bp, Homo sapien
caaatcccctacttctaaccagcga

SEQ ID NO: 5593624 - DNA, 25 bp, Homo sapien
cagtgttctaaatttaagtcttgac

SEQ ID NO: 5593625 - DNA, 25 bp, Homo sapien
ctaaccagcgatttgttcgtttccc

SEQ ID NO: 5593626 - DNA, 25 bp, Homo sapien
atgagctacatgaatatacaagact

SEQ ID NO: 5593627 - DNA, 25 bp, Homo sapien
aaaggttatgtacagaacagaaggc

SEQ ID NO: 5593628 - DNA, 25 bp, Homo sapien
gctgaagagcaatgatttaccaaca

SEQ ID NO: 5593629 - DNA, 25 bp, Homo sapien
attcccagacacgggtcagagaaga

SEQ ID NO: 5593630 - DNA, 25 bp, Homo sapien
tgagaagtgctgtaacaaaggttat

SEQ ID NO: 5593631 - DNA, 25 bp, Homo sapien
gaacagaaggcaaccaattcccaga

SEQ ID NO: 5593632 - DNA, 25 bp, Homo sapien
gccccttgacctaactgaacacagc

SEQ ID NO: 5593633 - DNA, 25 bp, Homo sapien
tttcacaatgccaggtgagaagtgc

SEQ ID NO: 5593634 - DNA, 25 bp, Homo sapien
gttaagtgccggaagaatatgtact

SEQ ID NO: 5593635 - DNA, 25 bp, Homo sapien
agactgagagttcctcgaaacagcc

SEQ ID NO: 5593636 - DNA, 25 bp, Homo sapien
tcacgatgttagcagagatcatgtt

SEQ ID NO: 5593637 - DNA, 25 bp, Homo sapien
atctgttaagttagtggacgagagg

SEQ ID NO: 5593638 - DNA, 25 bp, Homo sapien
cagcctaaggaaagtggaaatttta

SEQ ID NO: 5593639 - DNA, 25 bp, Homo sapien
atactgttaaactgccttaggttat

SEQ ID NO: 5593640 - DNA, 25 bp, Homo sapien
tgattgaacttccatgcccatagct

SEQ ID NO: 5593641 - DNA, 25 bp, Homo sapien
taaccataggagagataaaggaaaa

SEQ ID NO: 5593642 - DNA, 25 bp, Homo sapien
tgaagcaacgttttagaaagaaatc

SEQ ID NO: 5593643 - DNA, 25 bp, Homo sapien
ggccctcaaagccagcagttgaatc

SEQ ID NO: 5593644 - DNA, 25 bp, Homo sapien
tactgttcttaaagaggccctcaaa

SEQ ID NO: 5593645 - DNA, 25 bp, Homo sapien
atctcgatatcatggggcctgctgg

SEQ ID NO: 5593646 - DNA, 25 bp, Homo sapien
gcgttatcccatgcccgaccctctt

SEQ ID NO: 5593647 - DNA, 25 bp, Homo sapien
ctgctgggcactgcaaacagcctaa

SEQ ID NO: 5593648 - DNA, 25 bp, Homo sapien
ggtctctacaccctgaagcaacgtt

SEQ ID NO: 5593649 - DNA, 25 bp, Homo sapien
acaaggtcagatatcaaaacagtcc

SEQ ID NO: 5593650 - DNA, 25 bp, Homo sapien
ggaaaatattaagatgagctgtgtg

SEQ ID NO: 5593651 - DNA, 25 bp, Homo sapien
taaactatgcacagggagcaaagtg

SEQ ID NO: 5593652 - DNA, 25 bp, Homo sapien
aaacagtcctgatcttagacaactc

SEQ ID NO: 5593653 - DNA, 25 bp, Homo sapien
ttctagtcaacacaaacattgcttc

SEQ ID NO: 5593654 - DNA, 25 bp, Homo sapien
gaaaaacacaactctgtcctacttc

SEQ ID NO: 5593655 - DNA, 25 bp, Homo sapien
taaaaagggaccactactcagagct

SEQ ID NO: 5593656 - DNA, 25 bp, Homo sapien
taaagaggtgctacacaagtcatct

SEQ ID NO: 5593657 - DNA, 25 bp, Homo sapien
gagctgtgtgcttataaagaggtgc

SEQ ID NO: 5593658 - DNA, 25 bp, Homo sapien
tttggatggctgagtaccataaaac

SEQ ID NO: 5593659 - DNA, 25 bp, Homo sapien
tactctccgcatataacaaggtcag

SEQ ID NO: 5593660 - DNA, 25 bp, Homo sapien
gcagtgcttcgtgcagatgttcccc

SEQ ID NO: 5593661 - DNA, 25 bp, Homo sapien
tctgccaagcccaactccaagtcca

SEQ ID NO: 5593662 - DNA, 25 bp, Homo sapien
ccgcccccacctgcaacatccctct

SEQ ID NO: 5593663 - DNA, 25 bp, Homo sapien
cctgtcctcagagcaacgctaaggg

SEQ ID NO: 5593664 - DNA, 25 bp, Homo sapien
ggggaggaactctaccagctcttcc

SEQ ID NO: 5593665 - DNA, 25 bp, Homo sapien
ggcctaatggccgccatgggcaaca

SEQ ID NO: 5593666 - DNA, 25 bp, Homo sapien
agccgggtcccccttgctcctgtcc

SEQ ID NO: 5593667 - DNA, 25 bp, Homo sapien
cctgcaacatccctctgccaagccc

SEQ ID NO: 5593668 - DNA, 25 bp, Homo sapien
tcagagcaacgctaagggacttgta

SEQ ID NO: 5593669 - DNA, 25 bp, Homo sapien
tgcagcaagcctggcttggcgctgc

SEQ ID NO: 5593670 - DNA, 25 bp, Homo sapien
tccaagtccagactgccctggcacc

SEQ ID NO: 5593671 - DNA, 25 bp, Homo sapien
ggcaatgtggccctaccctgaagta

SEQ ID NO: 5593672 - DNA, 25 bp, Homo sapien
agacgcttctattgagcagctggcc

SEQ ID NO: 5593673 - DNA, 25 bp, Homo sapien
tggcatgaatggatctcaagatacc

SEQ ID NO: 5593674 - DNA, 25 bp, Homo sapien
atgaaaatgaaagttggcatgaatg

SEQ ID NO: 5593675 - DNA, 25 bp, Homo sapien
tgactcggcattgtacagaatcgct

SEQ ID NO: 5593676 - DNA, 25 bp, Homo sapien
gttaaagatgttccagcacgagttc

SEQ ID NO: 5593677 - DNA, 25 bp, Homo sapien
tccatggcatctaagaccacaccct

SEQ ID NO: 5593678 - DNA, 25 bp, Homo sapien
ccacacccttctggatttgggaggt

SEQ ID NO: 5593679 - DNA, 25 bp, Homo sapien
tccagcacgagttcacgagtttcca

SEQ ID NO: 5593680 - DNA, 25 bp, Homo sapien
aggtggcaacatactgagcatgtgc

SEQ ID NO: 5593681 - DNA, 25 bp, Homo sapien
cacatcagcctgtgactgactcggc

SEQ ID NO: 5593682 - DNA, 25 bp, Homo sapien
agtgggtgtatgacttcaatttgca

SEQ ID NO: 5593683 - DNA, 25 bp, Homo sapien
tttgatggcttaatagagtgacctg

SEQ ID NO: 5593684 - DNA, 25 bp, Homo sapien
ctgggaacgagcattgtcgtgctct

SEQ ID NO: 5593685 - DNA, 25 bp, Homo sapien
taactgagtactctgggaacgagca

SEQ ID NO: 5593686 - DNA, 25 bp, Homo sapien
gtgggcatctctaaaagtgggtgta

SEQ ID NO: 5593687 - DNA, 25 bp, Homo sapien
agagtgaataatagctggtatgctt

SEQ ID NO: 5593688 - DNA, 25 bp, Homo sapien
acaagttccagatgatttgagtaac

SEQ ID NO: 5593689 - DNA, 25 bp, Homo sapien
ttgttgctaggtagttcagctacac

SEQ ID NO: 5593690 - DNA, 25 bp, Homo sapien
cagcagctgagcttgattaagatgc

SEQ ID NO: 5593691 - DNA, 25 bp, Homo sapien
agagtgacctgatgttaaaagttgg

SEQ ID NO: 5593692 - DNA, 25 bp, Homo sapien
tggaagacacatattgagtttggta

SEQ ID NO: 5593693 - DNA, 25 bp, Homo sapien
agtccctaggcatatggcaatgaac

SEQ ID NO: 5593694 - DNA, 25 bp, Homo sapien
agtgataaatatctgcagtttagtc

SEQ ID NO: 5593695 - DNA, 25 bp, Homo sapien
ttagtcagatagtaccataagtatt

SEQ ID NO: 5593696 - DNA, 25 bp, Homo sapien
gttatagtccctaggcatatggcaa

SEQ ID NO: 5593697 - DNA, 25 bp, Homo sapien
tgcagtttagtcagatagtaccata

SEQ ID NO: 5593698 - DNA, 25 bp, Homo sapien
acaatggatgtgggtgtagtttttt

SEQ ID NO: 5593699 - DNA, 25 bp, Homo sapien
tatagtccctaggcatatggcaatg

SEQ ID NO: 5593700 - DNA, 25 bp, Homo sapien
atggcaatgaactagattgttatac

SEQ ID NO: 5593701 - DNA, 25 bp, Homo sapien
caggtgatagacaaaaagtgacaat

SEQ ID NO: 5593702 - DNA, 25 bp, Homo sapien
taccaaagtgataaatatctgcagt

SEQ ID NO: 5593703 - DNA, 25 bp, Homo sapien
atggatgtgggtgtagttttttaaa

SEQ ID NO: 5593704 - DNA, 25 bp, Homo sapien
tctatgggtccaaagtaacttgaaa

SEQ ID NO: 5593705 - DNA, 25 bp, Homo sapien
gatacaaggcaatatatctgaaaac

SEQ ID NO: 5593706 - DNA, 25 bp, Homo sapien
agattttgtaagtcaggctgaaaga

SEQ ID NO: 5593707 - DNA, 25 bp, Homo sapien
tgtaagtcaggctgaaagagaaaca

SEQ ID NO: 5593708 - DNA, 25 bp, Homo sapien
atttctaaaaaggataggagacgaa

SEQ ID NO: 5593709 - DNA, 25 bp, Homo sapien
attctgttaaattcagggaaggtat

SEQ ID NO: 5593710 - DNA, 25 bp, Homo sapien
gttagcctactgcaatcttgattat

SEQ ID NO: 5593711 - DNA, 25 bp, Homo sapien
taaaatataatcacaggcagaaata

SEQ ID NO: 5593712 - DNA, 25 bp, Homo sapien
ataaaaggactagtaccaagctagg

SEQ ID NO: 5593713 - DNA, 25 bp, Homo sapien
tatatccaggaatgaggatggaaaa

SEQ ID NO: 5593714 - DNA, 25 bp, Homo sapien
cagggaaggtattaagtaccaatcc

SEQ ID NO: 5593715 - DNA, 25 bp, Homo sapien
aagctccttgagaactgcaaccatg

SEQ ID NO: 5593716 - DNA, 25 bp, Homo sapien
tctgggatagtacttgacaaggatt

SEQ ID NO: 5593717 - DNA, 25 bp, Homo sapien
aatttgtgctaataggataatgctc

SEQ ID NO: 5593718 - DNA, 25 bp, Homo sapien
tgcaaccatgacaagccctccttat

SEQ ID NO: 5593719 - DNA, 25 bp, Homo sapien
ttgttcaactgagccatactcctcc

SEQ ID NO: 5593720 - DNA, 25 bp, Homo sapien
cagcaacctaaataagaacaaactc

SEQ ID NO: 5593721 - DNA, 25 bp, Homo sapien
gcatagttcaactggtaaacatctg

SEQ ID NO: 5593722 - DNA, 25 bp, Homo sapien
ttctcaaagatcagcaacctaaata

SEQ ID NO: 5593723 - DNA, 25 bp, Homo sapien
agttttcaagtgaagtcaagagttt

SEQ ID NO: 5593724 - DNA, 25 bp, Homo sapien
aagtcaagagtttgtagcatagttc

SEQ ID NO: 5593725 - DNA, 25 bp, Homo sapien
acaaggattaaggtctgtcactttt

SEQ ID NO: 5593726 - DNA, 25 bp, Homo sapien
aatgacaattaaaatactagcctct

SEQ ID NO: 5593727 - DNA, 25 bp, Homo sapien
tttacaaagagccatatattgctat

SEQ ID NO: 5593728 - DNA, 25 bp, Homo sapien
ggaagccaagggattttctgtcggc

SEQ ID NO: 5593729 - DNA, 25 bp, Homo sapien
tgctgcccacatctttggaagactc

SEQ ID NO: 5593730 - DNA, 25 bp, Homo sapien
gacctgtcatcaccgtgcagcctcc

SEQ ID NO: 5593731 - DNA, 25 bp, Homo sapien
ccccacacacgagtctgcctggtga

SEQ ID NO: 5593732 - DNA, 25 bp, Homo sapien
gattttctgtcggccctaggaggag

SEQ ID NO: 5593733 - DNA, 25 bp, Homo sapien
taaagttgctgtgaattgaggagag

SEQ ID NO: 5593734 - DNA, 25 bp, Homo sapien
gggacaaggagttcataaagttgct

SEQ ID NO: 5593735 - DNA, 25 bp, Homo sapien
gtggacttgagaccctgctgcccac

SEQ ID NO: 5593736 - DNA, 25 bp, Homo sapien
acatctttggaagactcgaaggcga

SEQ ID NO: 5593737 - DNA, 25 bp, Homo sapien
gacacctctaggaagcaaaagacaa

SEQ ID NO: 5593738 - DNA, 25 bp, Homo sapien
gaagcaaaagacaactccgaaatgc

SEQ ID NO: 5593739 - DNA, 25 bp, Homo sapien
tgggatcatactatatggactgggt

SEQ ID NO: 5593740 - DNA, 25 bp, Homo sapien
tgagagagacaacaaattaactttc

SEQ ID NO: 5593741 - DNA, 25 bp, Homo sapien
aggagactgctctagattagacact

SEQ ID NO: 5593742 - DNA, 25 bp, Homo sapien
aactggttaaaagacacctctagga

SEQ ID NO: 5593743 - DNA, 25 bp, Homo sapien
aattcaattgcaaggataaaaaagg

SEQ ID NO: 5593744 - DNA, 25 bp, Homo sapien
gagacaagtgggatcatactatatg

SEQ ID NO: 5593745 - DNA, 25 bp, Homo sapien
tggttacatctttacagctgattcc

SEQ ID NO: 5593746 - DNA, 25 bp, Homo sapien
tttaagagcaattgactccaacaat

SEQ ID NO: 5593747 - DNA, 25 bp, Homo sapien
agacaactccgaaatgctgtacatt

SEQ ID NO: 5593748 - DNA, 25 bp, Homo sapien
ctgcgtcacctgtgagtggtcaggg

SEQ ID NO: 5593749 - DNA, 25 bp, Homo sapien
cagcttggaagcagatttggaatgg

SEQ ID NO: 5593750 - DNA, 25 bp, Homo sapien
cctctgccaagagacagagctgtcc

SEQ ID NO: 5593751 - DNA, 25 bp, Homo sapien
gagaccagtggcaactgcctgcaca

SEQ ID NO: 5593752 - DNA, 25 bp, Homo sapien
gacagagctgtcctgagaatgcttt

SEQ ID NO: 5593753 - DNA, 25 bp, Homo sapien
tgctcagtagcagcttggaagcaga

SEQ ID NO: 5593754 - DNA, 25 bp, Homo sapien
agatcctgttcagggtcctccaggc

SEQ ID NO: 5593755 - DNA, 25 bp, Homo sapien
tctttgtaacagtggacaggacaga

SEQ ID NO: 5593756 - DNA, 25 bp, Homo sapien
gagacaggccactgcgtcacctgtg

SEQ ID NO: 5593757 - DNA, 25 bp, Homo sapien
atgaagtgaatagcatatgtgtcat

SEQ ID NO: 5593758 - DNA, 25 bp, Homo sapien
tgcacagcagagataaccctcttcc

SEQ ID NO: 5593759 - DNA, 25 bp, Homo sapien
aagagaacggccttttagaagggca

SEQ ID NO: 5593760 - DNA, 25 bp, Homo sapien
ctcaactgggataagtgccatggtg

SEQ ID NO: 5593761 - DNA, 25 bp, Homo sapien
gagaaattaagctggagttgcctga

SEQ ID NO: 5593762 - DNA, 25 bp, Homo sapien
acgagttccagggctggtatgtgga

SEQ ID NO: 5593763 - DNA, 25 bp, Homo sapien
gcaaggccatcgagaaattaagctg

SEQ ID NO: 5593764 - DNA, 25 bp, Homo sapien
tgccatggtgctacaggagcttata

SEQ ID NO: 5593765 - DNA, 25 bp, Homo sapien
taaaatctcaactgggataagtgcc

SEQ ID NO: 5593766 - DNA, 25 bp, Homo sapien
gacaagggacctcatgcagttgtga

SEQ ID NO: 5593767 - DNA, 25 bp, Homo sapien
ctgatgtatcaagatgaggaagtgg

SEQ ID NO: 5593768 - DNA, 25 bp, Homo sapien
gaaaggatagtggctgatgtatcaa

SEQ ID NO: 5593769 - DNA, 25 bp, Homo sapien
ggagcttatattagagacaagggac

SEQ ID NO: 5593770 - DNA, 25 bp, Homo sapien
gttagtttcaggagagctggtagtt

SEQ ID NO: 5593771 - DNA, 25 bp, Homo sapien
aacagttccacacactaagagactt

SEQ ID NO: 5593772 - DNA, 25 bp, Homo sapien
aaagtcacctagctagagagctgcg

SEQ ID NO: 5593773 - DNA, 25 bp, Homo sapien
gcgcagctggaactagtatacaagt

SEQ ID NO: 5593774 - DNA, 25 bp, Homo sapien
acaagtctagctgttgaaagcaccc

SEQ ID NO: 5593775 - DNA, 25 bp, Homo sapien
gattcttgccactacgaggtgattt

SEQ ID NO: 5593776 - DNA, 25 bp, Homo sapien
agagacttaacgagggtacagttag

SEQ ID NO: 5593777 - DNA, 25 bp, Homo sapien
gttgaaagcaccctgagcacgttac

SEQ ID NO: 5593778 - DNA, 25 bp, Homo sapien
cgtttagaactggacctggtaactg

SEQ ID NO: 5593779 - DNA, 25 bp, Homo sapien
caggcaggtttcaaactccagacct

SEQ ID NO: 5593780 - DNA, 25 bp, Homo sapien
gctcagaaggttggactgcttgttc

SEQ ID NO: 5593781 - DNA, 25 bp, Homo sapien
caaaaaggtgaggataacactctct

SEQ ID NO: 5593782 - DNA, 25 bp, Homo sapien
aaaggaaagcttttagcagcctcaa

SEQ ID NO: 5593783 - DNA, 25 bp, Homo sapien
ggagggattcacctagggcattcta

SEQ ID NO: 5593784 - DNA, 25 bp, Homo sapien
gttgcctgaagtgtgcaaaagcata

SEQ ID NO: 5593785 - DNA, 25 bp, Homo sapien
atctcaaccaatgaggcagcgagaa

SEQ ID NO: 5593786 - DNA, 25 bp, Homo sapien
gcatgtgaggtgtcttttggtagga

SEQ ID NO: 5593787 - DNA, 25 bp, Homo sapien
gttcatgtgtcatcagagagaggag

SEQ ID NO: 5593788 - DNA, 25 bp, Homo sapien
tagcagcctcaacaacacacctgat

SEQ ID NO: 5593789 - DNA, 25 bp, Homo sapien
taaagaggacatcaaaaaagacatc

SEQ ID NO: 5593790 - DNA, 25 bp, Homo sapien
tttggtaggactatgcaaaaaggtg

SEQ ID NO: 5593791 - DNA, 25 bp, Homo sapien
gattaacccactgggaaaacagcaa

SEQ ID NO: 5593792 - DNA, 25 bp, Homo sapien
tgatttttaaaatgacagtggcaat

SEQ ID NO: 5593793 - DNA, 25 bp, Homo sapien
cggcacccagcctaaagcaatgtta

SEQ ID NO: 5593794 - DNA, 25 bp, Homo sapien
tgtataagctgttaaacacaacatt

SEQ ID NO: 5593795 - DNA, 25 bp, Homo sapien
taataaaatagtagcctaagcttac

SEQ ID NO: 5593796 - DNA, 25 bp, Homo sapien
ttcaagaaaaacctaagcatagccc

SEQ ID NO: 5593797 - DNA, 25 bp, Homo sapien
ttcagccaagtatctatgtccagtt

SEQ ID NO: 5593798 - DNA, 25 bp, Homo sapien
acattgttaaacacaacgaaaattc

SEQ ID NO: 5593799 - DNA, 25 bp, Homo sapien
acctgaaagctgtatcatagaaaat

SEQ ID NO: 5593800 - DNA, 25 bp, Homo sapien
ttaaaatgacagtggcaattaccat

SEQ ID NO: 5593801 - DNA, 25 bp, Homo sapien
taatgttcaaaccaggctgggcgcg

SEQ ID NO: 5593802 - DNA, 25 bp, Homo sapien
aacctaagcatagcccactagtttt

SEQ ID NO: 5593803 - DNA, 25 bp, Homo sapien
agcatgtgacctaactgagcagact

SEQ ID NO: 5593804 - DNA, 25 bp, Homo sapien
agtgcctctggagcatgtgacctaa

SEQ ID NO: 5593805 - DNA, 25 bp, Homo sapien
ataatccaggcccgtctgagcaaac

SEQ ID NO: 5593806 - DNA, 25 bp, Homo sapien
aacgtaagtataatccaggcccgtc

SEQ ID NO: 5593807 - DNA, 25 bp, Homo sapien
gagcaaaccaagatttatgtccttc

SEQ ID NO: 5593808 - DNA, 25 bp, Homo sapien
tagcatgaaaagggcactaaacata

SEQ ID NO: 5593809 - DNA, 25 bp, Homo sapien
aagtaggacacttcttagcatgaaa

SEQ ID NO: 5593810 - DNA, 25 bp, Homo sapien
tatcacctagagggcttgacttctc

SEQ ID NO: 5593811 - DNA, 25 bp, Homo sapien
gtgctgtgcagccctcctcagatcc

SEQ ID NO: 5593812 - DNA, 25 bp, Homo sapien
ctgagcagacttttgtgccgcctac

SEQ ID NO: 5593813 - DNA, 25 bp, Homo sapien
cattcatactcagcaaagccgatgg

SEQ ID NO: 5593814 - DNA, 25 bp, Homo sapien
gcaaacaactgatcaggcgaatagc

SEQ ID NO: 5593815 - DNA, 25 bp, Homo sapien
cactactttggggcattacagaaat

SEQ ID NO: 5593816 - DNA, 25 bp, Homo sapien
cgggcagggcctattccactacttt

SEQ ID NO: 5593817 - DNA, 25 bp, Homo sapien
aaaaactcagcttgcacaccaggcc

SEQ ID NO: 5593818 - DNA, 25 bp, Homo sapien
tgagaatgccaaactctgtgtacac

SEQ ID NO: 5593819 - DNA, 25 bp, Homo sapien
agtacacactgactggccccttttc

SEQ ID NO: 5593820 - DNA, 25 bp, Homo sapien
tagcaaggatgtaaagacaatggaa

SEQ ID NO: 5593821 - DNA, 25 bp, Homo sapien
ggaccattcccaagatgaaaacttc

SEQ ID NO: 5593822 - DNA, 25 bp, Homo sapien
ggccgtctgggcattaatacctctc

SEQ ID NO: 5593823 - DNA, 25 bp, Homo sapien
tctgtgtacacctggcacttccatc

SEQ ID NO: 5593824 - DNA, 25 bp, Homo sapien
tccccaatgactccagtacacactg

SEQ ID NO: 5593825 - DNA, 25 bp, Homo sapien
gtccctagactagaaagagtatggt

SEQ ID NO: 5593826 - DNA, 25 bp, Homo sapien
tccatggcctcttactgggacagga

SEQ ID NO: 5593827 - DNA, 25 bp, Homo sapien
ccatgtgacacgctctacctgaaat

SEQ ID NO: 5593828 - DNA, 25 bp, Homo sapien
atggttcatgaggtccctggccctc

SEQ ID NO: 5593829 - DNA, 25 bp, Homo sapien
tgtctggcttcttgaaatccatggc

SEQ ID NO: 5593830 - DNA, 25 bp, Homo sapien
ctcttcttagaagccccctagtctc

SEQ ID NO: 5593831 - DNA, 25 bp, Homo sapien
tccagcctgtcaaagttattcatcc

SEQ ID NO: 5593832 - DNA, 25 bp, Homo sapien
ctgaaagaatggattgtctggcttc

SEQ ID NO: 5593833 - DNA, 25 bp, Homo sapien
taatagtgatacggatagaatgcaa

SEQ ID NO: 5593834 - DNA, 25 bp, Homo sapien
ggaaaggcattggagttatgtccct

SEQ ID NO: 5593835 - DNA, 25 bp, Homo sapien
tagaaggtaattaatagtgatacgg

SEQ ID NO: 5593836 - DNA, 25 bp, Homo sapien
gggtgtttgtgataccctagattaa

SEQ ID NO: 5593837 - DNA, 25 bp, Homo sapien
ttaatctagggtatcacaaacaccc

SEQ ID NO: 5593838 - DNA, 25 bp, Homo sapien
gaaaataggaactacagagagcttt

SEQ ID NO: 5593839 - DNA, 25 bp, Homo sapien
ccaaggaggtactataagaaacatg

SEQ ID NO: 5593840 - DNA, 25 bp, Homo sapien
agtgcaggtaagaaaattagacaat

SEQ ID NO: 5593841 - DNA, 25 bp, Homo sapien
ctaaaagtatgattgggtatgattt

SEQ ID NO: 5593842 - DNA, 25 bp, Homo sapien
aaaatctattccaggatggcactgc

SEQ ID NO: 5593843 - DNA, 25 bp, Homo sapien
aagcatcaagatggaaatactgtct

SEQ ID NO: 5593844 - DNA, 25 bp, Homo sapien
aagaaacatgtaaccaaatcagagt

SEQ ID NO: 5593845 - DNA, 25 bp, Homo sapien
tgatcgtcttggaaaacaaatactc

SEQ ID NO: 5593846 - DNA, 25 bp, Homo sapien
ctgaatactggtaagtgcaggtaag

SEQ ID NO: 5593847 - DNA, 25 bp, Homo sapien
cgtcattaagttgaaaggctatatc

SEQ ID NO: 5593848 - DNA, 25 bp, Homo sapien
attacatttgaaccaaggaggtact

SEQ ID NO: 5593849 - DNA, 25 bp, Homo sapien
ctacttgtctcaacggccaacagct

SEQ ID NO: 5593850 - DNA, 25 bp, Homo sapien
taggaactggcaggctaacatttcc

SEQ ID NO: 5593851 - DNA, 25 bp, Homo sapien
gcgtggttcgttgatagcatctccc

SEQ ID NO: 5593852 - DNA, 25 bp, Homo sapien
tgccagtgacatttgctccaagtat

SEQ ID NO: 5593853 - DNA, 25 bp, Homo sapien
acatgaccaccatttgatgggggtg

SEQ ID NO: 5593854 - DNA, 25 bp, Homo sapien
gtgttcaaggtgttctggactaagc

SEQ ID NO: 5593855 - DNA, 25 bp, Homo sapien
actaagctgtagaatggtccctttc

SEQ ID NO: 5593856 - DNA, 25 bp, Homo sapien
tatgcgaaaggaccaacaatattta

SEQ ID NO: 5593857 - DNA, 25 bp, Homo sapien
gtgtagccagcgtggttcgttgata

SEQ ID NO: 5593858 - DNA, 25 bp, Homo sapien
tcccctgaatggtgggtgacaaaaa

SEQ ID NO: 5593859 - DNA, 25 bp, Homo sapien
ccgagattctatatgcgaaaggacc

SEQ ID NO: 5593860 - DNA, 25 bp, Homo sapien
caattaccaaaagaagcaggcaaga

SEQ ID NO: 5593861 - DNA, 25 bp, Homo sapien
tgtagagctgggctaatcccagtgc

SEQ ID NO: 5593862 - DNA, 25 bp, Homo sapien
ttccaattaccaaaagaagcaggca

SEQ ID NO: 5593863 - DNA, 25 bp, Homo sapien
gcctaagaccatcagctgtagagct

SEQ ID NO: 5593864 - DNA, 25 bp, Homo sapien
atgactcttccatgaattgtgtgtt

SEQ ID NO: 5593865 - DNA, 25 bp, Homo sapien
tttatgggttagaatgatttactcc

SEQ ID NO: 5593866 - DNA, 25 bp, Homo sapien
tgatttactccaagagagatgcact

SEQ ID NO: 5593867 - DNA, 25 bp, Homo sapien
aagagagatgcacttgcctaagacc

SEQ ID NO: 5593868 - DNA, 25 bp, Homo sapien
acaggaccttgtctcattcaatcct

SEQ ID NO: 5593869 - DNA, 25 bp, Homo sapien
gggctaatcccagtgcatgactctt

SEQ ID NO: 5593870 - DNA, 25 bp, Homo sapien
gcaggcaagacaaactgttacaccc

SEQ ID NO: 5593871 - DNA, 25 bp, Homo sapien
agcagcgatgaagaccattaacaca

SEQ ID NO: 5593872 - DNA, 25 bp, Homo sapien
tacttagaatagctagacctgcttc

SEQ ID NO: 5593873 - DNA, 25 bp, Homo sapien
atagatcaggttccgccttcaactc

SEQ ID NO: 5593874 - DNA, 25 bp, Homo sapien
aacacaaccacaagttagcccttac

SEQ ID NO: 5593875 - DNA, 25 bp, Homo sapien
gggatatgctcaagtatttaggggt

SEQ ID NO: 5593876 - DNA, 25 bp, Homo sapien
ataggtataaggcatgtaagaaact

SEQ ID NO: 5593877 - DNA, 25 bp, Homo sapien
aaaaaaaaataggcagcagcgatga

SEQ ID NO: 5593878 - DNA, 25 bp, Homo sapien
acccagatagagttaagaaacacct

SEQ ID NO: 5593879 - DNA, 25 bp, Homo sapien
aatcaagttaaatgagggatatgct

SEQ ID NO: 5593880 - DNA, 25 bp, Homo sapien
gatcaagacagaacctatgggaaac

SEQ ID NO: 5593881 - DNA, 25 bp, Homo sapien
tacaaaacaagaactaaaagcatag

SEQ ID NO: 5593882 - DNA, 25 bp, Homo sapien
aaacaaatgggtagcaggcttaata

SEQ ID NO: 5593883 - DNA, 25 bp, Homo sapien
tcttagatttaatgcttagcttact

SEQ ID NO: 5593884 - DNA, 25 bp, Homo sapien
ccttataagcagagaaccttgcaga

SEQ ID NO: 5593885 - DNA, 25 bp, Homo sapien
cagagaaccttgcagacgtaaaaaa

SEQ ID NO: 5593886 - DNA, 25 bp, Homo sapien
agatgactagttgcccaccaatccc

SEQ ID NO: 5593887 - DNA, 25 bp, Homo sapien
ataagcagagaaccttgcagacgta

SEQ ID NO: 5593888 - DNA, 25 bp, Homo sapien
tagtagatgactagttgcccaccaa

SEQ ID NO: 5593889 - DNA, 25 bp, Homo sapien
cttgcagacgtaaaaaagaacaaga

SEQ ID NO: 5593890 - DNA, 25 bp, Homo sapien
agcaggcttaatacctggatgatga

SEQ ID NO: 5593891 - DNA, 25 bp, Homo sapien
tgggtagcaggcttaatacctggat

SEQ ID NO: 5593892 - DNA, 25 bp, Homo sapien
tactaagctaactagtagatgacta

SEQ ID NO: 5593893 - DNA, 25 bp, Homo sapien
ttggggaagtttcacctttgttgca

SEQ ID NO: 5593894 - DNA, 25 bp, Homo sapien
agtaaaacagaacaaatcagcaggc

SEQ ID NO: 5593895 - DNA, 25 bp, Homo sapien
ccatctcaagcgtgatagtggggaa

SEQ ID NO: 5593896 - DNA, 25 bp, Homo sapien
tcttggggcggtatcagcattttaa

SEQ ID NO: 5593897 - DNA, 25 bp, Homo sapien
gagttgccagtgaaatgtgtgacac

SEQ ID NO: 5593898 - DNA, 25 bp, Homo sapien
gagaacaacaggcgaacgtttgcct

SEQ ID NO: 5593899 - DNA, 25 bp, Homo sapien
tgactcagctctcttggggcggtat

SEQ ID NO: 5593900 - DNA, 25 bp, Homo sapien
gcacttcattaatgtcggccaaggc

SEQ ID NO: 5593901 - DNA, 25 bp, Homo sapien
ctctctcatcttgcggggaatcgtg

SEQ ID NO: 5593902 - DNA, 25 bp, Homo sapien
cctgcccactgcagggagtctgtca

SEQ ID NO: 5593903 - DNA, 25 bp, Homo sapien
ggaaatggatgctgcacctgctctc

SEQ ID NO: 5593904 - DNA, 25 bp, Homo sapien
caaagaagatacagtcaaagatgac

SEQ ID NO: 5593905 - DNA, 25 bp, Homo sapien
atggatacctcagggtctatcaagt

SEQ ID NO: 5593906 - DNA, 25 bp, Homo sapien
caaagatgactatgcaagactgtct

SEQ ID NO: 5593907 - DNA, 25 bp, Homo sapien
ctgtctaataaaaaggctcccatta

SEQ ID NO: 5593908 - DNA, 25 bp, Homo sapien
tttacacacttggcatgcatgtttt

SEQ ID NO: 5593909 - DNA, 25 bp, Homo sapien
ttaataagtattgaaagcacatata

SEQ ID NO: 5593910 - DNA, 25 bp, Homo sapien
caggaagtccagctaaaaacaagac

SEQ ID NO: 5593911 - DNA, 25 bp, Homo sapien
ctatcaagttagtaaggccctaggc

SEQ ID NO: 5593912 - DNA, 25 bp, Homo sapien
tctacagttagaaggtgaattatct

SEQ ID NO: 5593913 - DNA, 25 bp, Homo sapien
tgctttggagtctacatggatacct

SEQ ID NO: 5593914 - DNA, 25 bp, Homo sapien
tatgataaataagtccaaagaagat

SEQ ID NO: 5593915 - DNA, 25 bp, Homo sapien
ttagcggttaccctaggaatcgcaa

SEQ ID NO: 5593916 - DNA, 25 bp, Homo sapien
ctaggctggcagtgcatctttcaac

SEQ ID NO: 5593917 - DNA, 25 bp, Homo sapien
gatcttccctctggggtcagtttcc

SEQ ID NO: 5593918 - DNA, 25 bp, Homo sapien
gtctgctggtgccaaagtaagcttt

SEQ ID NO: 5593919 - DNA, 25 bp, Homo sapien
aatttaggtgcacagtatccgttat

SEQ ID NO: 5593920 - DNA, 25 bp, Homo sapien
ctgggtgtataattctaggctggca

SEQ ID NO: 5593921 - DNA, 25 bp, Homo sapien
atacactcagaagcgaatgtgcatc

SEQ ID NO: 5593922 - DNA, 25 bp, Homo sapien
tcacggaagatatcatttgactgtc

SEQ ID NO: 5593923 - DNA, 25 bp, Homo sapien
cctaggaatcgcaataaacatactt

SEQ ID NO: 5593924 - DNA, 25 bp, Homo sapien
ttgtttgcctgaaaatgccttgatt

SEQ ID NO: 5593925 - DNA, 25 bp, Homo sapien
ttaaagatggtctccctgggtgtat

SEQ ID NO: 5593926 - DNA, 25 bp, Homo sapien
cgaattattggaaattacacaatgt

SEQ ID NO: 5593927 - DNA, 25 bp, Homo sapien
acattgtgtaatttccaataattcg

SEQ ID NO: 5593928 - DNA, 25 bp, Homo sapien
ccactgcattctttcgcctctttag

SEQ ID NO: 5593929 - DNA, 25 bp, Homo sapien
ctaaagaggcgaaagaatgcagtgg

SEQ ID NO: 5593930 - DNA, 25 bp, Homo sapien
tgtgccccgagcatccacatttccg

SEQ ID NO: 5593931 - DNA, 25 bp, Homo sapien
gccgtttgctgaccggatcgcggct

SEQ ID NO: 5593932 - DNA, 25 bp, Homo sapien
gctttgggatgttctgattgacgcc

SEQ ID NO: 5593933 - DNA, 25 bp, Homo sapien
tccacatttccgagcgcctggtggc

SEQ ID NO: 5593934 - DNA, 25 bp, Homo sapien
tcttggcccgctttgggatgttctg

SEQ ID NO: 5593935 - DNA, 25 bp, Homo sapien
ggccctcttggcccgctttgggatg

SEQ ID NO: 5593936 - DNA, 25 bp, Homo sapien
cccgctttgggatgttctgattgac

SEQ ID NO: 5593937 - DNA, 25 bp, Homo sapien
gcaccgccgctgtcgtccggcgggc

SEQ ID NO: 5593938 - DNA, 25 bp, Homo sapien
gccccgagcatccacatttccgagc

SEQ ID NO: 5593939 - DNA, 25 bp, Homo sapien
gagcatccacatttccgagcgcctg

SEQ ID NO: 5593940 - DNA, 25 bp, Homo sapien
cggcaccgccgctgtcgtccggcgg

SEQ ID NO: 5593941 - DNA, 25 bp, Homo sapien
tccaaagcttgagataggaaatgac

SEQ ID NO: 5593942 - DNA, 25 bp, Homo sapien
gatgaggaatttggaaacacatgtg

SEQ ID NO: 5593943 - DNA, 25 bp, Homo sapien
gtgggacatacaagcgttggatata

SEQ ID NO: 5593944 - DNA, 25 bp, Homo sapien
agggaagccagaaactctttgtgtc

SEQ ID NO: 5593945 - DNA, 25 bp, Homo sapien
agtccgttctgctaacggggctggg

SEQ ID NO: 5593946 - DNA, 25 bp, Homo sapien
tgtgtctctaaggccgatgaggaat

SEQ ID NO: 5593947 - DNA, 25 bp, Homo sapien
cgcggccctgactcgtgcattttcc

SEQ ID NO: 5593948 - DNA, 25 bp, Homo sapien
gggcgattcccggagacattctgtg

SEQ ID NO: 5593949 - DNA, 25 bp, Homo sapien
tgcagccaccttcgtcagggcagtc

SEQ ID NO: 5593950 - DNA, 25 bp, Homo sapien
cttacagaaacttggcgctgaggtg

SEQ ID NO: 5593951 - DNA, 25 bp, Homo sapien
ttacatggaagtggcttacagaaac

SEQ ID NO: 5593952 - DNA, 25 bp, Homo sapien
tgttgatgaccatagaggatgcaaa

SEQ ID NO: 5593953 - DNA, 25 bp, Homo sapien
agaagattctttgtactcggggtgg

SEQ ID NO: 5593954 - DNA, 25 bp, Homo sapien
atagtctatgacctaaagaagattc

SEQ ID NO: 5593955 - DNA, 25 bp, Homo sapien
ttgtgaagtacaatgttgatgacca

SEQ ID NO: 5593956 - DNA, 25 bp, Homo sapien
aatcaataagtcagtccacagatat

SEQ ID NO: 5593957 - DNA, 25 bp, Homo sapien
tggtaggaagacaatagacccataa

SEQ ID NO: 5593958 - DNA, 25 bp, Homo sapien
aatgtcttacctgatgatacccaac

SEQ ID NO: 5593959 - DNA, 25 bp, Homo sapien
tcgatcgtctcccctggacccaacc

SEQ ID NO: 5593960 - DNA, 25 bp, Homo sapien
gccttatagatgaggatggatggca

SEQ ID NO: 5593961 - DNA, 25 bp, Homo sapien
caaagctccgggctggttctgtatg

SEQ ID NO: 5593962 - DNA, 25 bp, Homo sapien
gcagcttggctggtcaatcaataag

SEQ ID NO: 5593963 - DNA, 25 bp, Homo sapien
atgaggttgtggcaatttactttgt

SEQ ID NO: 5593964 - DNA, 25 bp, Homo sapien
aggaacaagcaaaggagtaattatt

SEQ ID NO: 5593965 - DNA, 25 bp, Homo sapien
ggtgaccaacgcacccatgcgctgg

SEQ ID NO: 5593966 - DNA, 25 bp, Homo sapien
gaggatttaaaaggtcaatgaagtc

SEQ ID NO: 5593967 - DNA, 25 bp, Homo sapien
ttgtgaatactgtgagagtttgtcc

SEQ ID NO: 5593968 - DNA, 25 bp, Homo sapien
tcacagatgcagactgaagtccagg

SEQ ID NO: 5593969 - DNA, 25 bp, Homo sapien
ggccgccagcaagtcaagtgacttg

SEQ ID NO: 5593970 - DNA, 25 bp, Homo sapien
tctgtgcactgcatgtacttgggtt

SEQ ID NO: 5593971 - DNA, 25 bp, Homo sapien
taggtactagatggtgaggatttaa

SEQ ID NO: 5593972 - DNA, 25 bp, Homo sapien
tgtccaactcgctgtgcttaggtac

SEQ ID NO: 5593973 - DNA, 25 bp, Homo sapien
catgcgctgggtttcacagatgcag

SEQ ID NO: 5593974 - DNA, 25 bp, Homo sapien
taaaggtgcagatattgactgcccc

SEQ ID NO: 5593975 - DNA, 25 bp, Homo sapien
atacttcgaagtacagaaattaaat

SEQ ID NO: 5593976 - DNA, 25 bp, Homo sapien
gactgcaacagaggattcaattgtc

SEQ ID NO: 5593977 - DNA, 25 bp, Homo sapien
gagcaaaatctatcattcgcacttc

SEQ ID NO: 5593978 - DNA, 25 bp, Homo sapien
ctcatctattgtgttgctagggaac

SEQ ID NO: 5593979 - DNA, 25 bp, Homo sapien
caaataaaatgtcgactcataatac

SEQ ID NO: 5593980 - DNA, 25 bp, Homo sapien
ttcgcacttctacttcagcaatctc

SEQ ID NO: 5593981 - DNA, 25 bp, Homo sapien
aatgaacaaatagttagttttcctg

SEQ ID NO: 5593982 - DNA, 25 bp, Homo sapien
gttgctagggaacacatgagcaaaa

SEQ ID NO: 5593983 - DNA, 25 bp, Homo sapien
gttcctgtgacatgcttttccaccc

SEQ ID NO: 5593984 - DNA, 25 bp, Homo sapien
gctttagcccataaacatatccctc

SEQ ID NO: 5593985 - DNA, 25 bp, Homo sapien
tttcacgttggcgcaaatgagcaat

SEQ ID NO: 5593986 - DNA, 25 bp, Homo sapien
ggcgcaaatgagcaatgcgcacgaa

SEQ ID NO: 5593987 - DNA, 25 bp, Homo sapien
gtcctgggcatcctggcagttcttt

SEQ ID NO: 5593988 - DNA, 25 bp, Homo sapien
ctactgccaacaaacacgggcatcc

SEQ ID NO: 5593989 - DNA, 25 bp, Homo sapien
caaacacgggcatccactctgtctt

SEQ ID NO: 5593990 - DNA, 25 bp, Homo sapien
ggctgattcaggactgtgcaagcac

SEQ ID NO: 5593991 - DNA, 25 bp, Homo sapien
gggccaagaaaggcctagactgaag

SEQ ID NO: 5593992 - DNA, 25 bp, Homo sapien
ttactacagccggagtggtaaatac

SEQ ID NO: 5593993 - DNA, 25 bp, Homo sapien
gaagaaataagtcaacatgtgcgtt

SEQ ID NO: 5593994 - DNA, 25 bp, Homo sapien
acatgtgcgttctccggcacaggcc

SEQ ID NO: 5593995 - DNA, 25 bp, Homo sapien
agatccacagctctcgggctgattc

SEQ ID NO: 5593996 - DNA, 25 bp, Homo sapien
tcctcagggatgtagttttggaacg

SEQ ID NO: 5593997 - DNA, 25 bp, Homo sapien
acagcatattgcagtgggcctcttt

SEQ ID NO: 5593998 - DNA, 25 bp, Homo sapien
acacaatgtgggtcaagtgatactc

SEQ ID NO: 5593999 - DNA, 25 bp, Homo sapien
gagatcaaggggaattagctctttc

SEQ ID NO: 5594000 - DNA, 25 bp, Homo sapien
tgaactttccgtagaggtgcacaac

SEQ ID NO: 5594001 - DNA, 25 bp, Homo sapien
gtagaggtgcacaactcctcaggga

SEQ ID NO: 5594002 - DNA, 25 bp, Homo sapien
aaaagtagcttgttaccagtgtccc

SEQ ID NO: 5594003 - DNA, 25 bp, Homo sapien
ctctttctcttgccggctggtgcgc

SEQ ID NO: 5594004 - DNA, 25 bp, Homo sapien
gaaaagaggtcaacagtttgacttc

SEQ ID NO: 5594005 - DNA, 25 bp, Homo sapien
aagttatgctgaggattgatggaag

SEQ ID NO: 5594006 - DNA, 25 bp, Homo sapien
ccagtgtccctggcaaagttatgct

SEQ ID NO: 5594007 - DNA, 25 bp, Homo sapien
acccaggtggctctatctcaggctg

SEQ ID NO: 5594008 - DNA, 25 bp, Homo sapien
aaaaactgggcctagaataaagaca

SEQ ID NO: 5594009 - DNA, 25 bp, Homo sapien
tcagatggccattatgtaggtttgc

SEQ ID NO: 5594010 - DNA, 25 bp, Homo sapien
gccatcactatggcacccaggtggc

SEQ ID NO: 5594011 - DNA, 25 bp, Homo sapien
gttgctgtgcaactcagatggccat

SEQ ID NO: 5594012 - DNA, 25 bp, Homo sapien
caggacaaagacagttaatcaaatt

SEQ ID NO: 5594013 - DNA, 25 bp, Homo sapien
caacgtctaaaaactgggcctagaa

SEQ ID NO: 5594014 - DNA, 25 bp, Homo sapien
ggtttgccctagtgcttagcatggc

SEQ ID NO: 5594015 - DNA, 25 bp, Homo sapien
ttgaagtcactaggtgtagagagca

SEQ ID NO: 5594016 - DNA, 25 bp, Homo sapien
gtgtagagagcaggaatctataaac

SEQ ID NO: 5594017 - DNA, 25 bp, Homo sapien
tataacaggctcataactcaggatt

SEQ ID NO: 5594018 - DNA, 25 bp, Homo sapien
aaaagggtattcagacacatggaca

SEQ ID NO: 5594019 - DNA, 25 bp, Homo sapien
gtgtatggccatagatgtatttctg

SEQ ID NO: 5594020 - DNA, 25 bp, Homo sapien
tatctatagctatgtgtatggccat

SEQ ID NO: 5594021 - DNA, 25 bp, Homo sapien
actgggctaaaaagggtattcagac

SEQ ID NO: 5594022 - DNA, 25 bp, Homo sapien
tcctagaatgtcatcatatggtcct

SEQ ID NO: 5594023 - DNA, 25 bp, Homo sapien
aggggaacttgtatactgggcctgt

SEQ ID NO: 5594024 - DNA, 25 bp, Homo sapien
aaaatcaaggggaacttgtatactg

SEQ ID NO: 5594025 - DNA, 25 bp, Homo sapien
cacatggacacacattcctagaatg

SEQ ID NO: 5594026 - DNA, 25 bp, Homo sapien
aattccatgtcaccaacaacacaga

SEQ ID NO: 5594027 - DNA, 25 bp, Homo sapien
cagacaagaccctgtttacaacttt

SEQ ID NO: 5594028 - DNA, 25 bp, Homo sapien
catgtgaattttacagacactgggc

SEQ ID NO: 5594029 - DNA, 25 bp, Homo sapien
acatgatcaatgaagagggaaaaaa

SEQ ID NO: 5594030 - DNA, 25 bp, Homo sapien
tgctgtccagatgttcaaagtgata

SEQ ID NO: 5594031 - DNA, 25 bp, Homo sapien
caactccagccaagaatcacttcca

SEQ ID NO: 5594032 - DNA, 25 bp, Homo sapien
aactagcagactagggtagatggaa

SEQ ID NO: 5594033 - DNA, 25 bp, Homo sapien
cttgacaaacagatactgaacactc

SEQ ID NO: 5594034 - DNA, 25 bp, Homo sapien
gttcgagacaccagcctaataaata

SEQ ID NO: 5594035 - DNA, 25 bp, Homo sapien
gtttgatgcaagaaaggcctctctt

SEQ ID NO: 5594036 - DNA, 25 bp, Homo sapien
agcttagagaactatatggccaccc

SEQ ID NO: 5594037 - DNA, 25 bp, Homo sapien
tcagcacatgccttagaaatctact

SEQ ID NO: 5594038 - DNA, 25 bp, Homo sapien
tggcaaacacagatctgttcgagac

SEQ ID NO: 5594039 - DNA, 25 bp, Homo sapien
gtagcagggtgatctaacattatac

SEQ ID NO: 5594040 - DNA, 25 bp, Homo sapien
gctcagtgagagttatgtagaaagt

SEQ ID NO: 5594041 - DNA, 25 bp, Homo sapien
gggagaggaagattcctgagactaa

SEQ ID NO: 5594042 - DNA, 25 bp, Homo sapien
gtgaacttaacagagaccagcatgg

SEQ ID NO: 5594043 - DNA, 25 bp, Homo sapien
gagcaatggcacagatatcccctgc

SEQ ID NO: 5594044 - DNA, 25 bp, Homo sapien
aagctaagaaggtagccacgtcttg

SEQ ID NO: 5594045 - DNA, 25 bp, Homo sapien
gagaaccctactgaggagtgagatt

SEQ ID NO: 5594046 - DNA, 25 bp, Homo sapien
agaatatagtcctgggagcaatggc

SEQ ID NO: 5594047 - DNA, 25 bp, Homo sapien
gacagaggtctagaggactcttctc

SEQ ID NO: 5594048 - DNA, 25 bp, Homo sapien
gtgctgagcaaaagtatcaccccag

SEQ ID NO: 5594049 - DNA, 25 bp, Homo sapien
gcctaccgtcagaagaccatgtggg

SEQ ID NO: 5594050 - DNA, 25 bp, Homo sapien
atgtagaaagtaagtgcatgaaact

SEQ ID NO: 5594051 - DNA, 25 bp, Homo sapien
tcacccggccctcggtcggaagggc

SEQ ID NO: 5594052 - DNA, 25 bp, Homo sapien
gcccttccgaccgagggccgggtga

SEQ ID NO: 5594053 - DNA, 25 bp, Homo sapien
aagtgtgagtgaattcaagatggtt

SEQ ID NO: 5594054 - DNA, 25 bp, Homo sapien
ggaatagctgagcaggatttgacga

SEQ ID NO: 5594055 - DNA, 25 bp, Homo sapien
caagatggttgaaagagtagtacca

SEQ ID NO: 5594056 - DNA, 25 bp, Homo sapien
gatttgacgaataagtgtgagtgaa

SEQ ID NO: 5594057 - DNA, 25 bp, Homo sapien
aatgagacccaaaccaaagtgattc

SEQ ID NO: 5594058 - DNA, 25 bp, Homo sapien
attacactgggtagataaggaaaga

SEQ ID NO: 5594059 - DNA, 25 bp, Homo sapien
taagtcatacactgggatagctgtc

SEQ ID NO: 5594060 - DNA, 25 bp, Homo sapien
gggggaaaatgagctaatgtataaa

SEQ ID NO: 5594061 - DNA, 25 bp, Homo sapien
tttaggtcaaaggaacaagtcatgt

SEQ ID NO: 5594062 - DNA, 25 bp, Homo sapien
tgatgaaacactcagccttgggttc

SEQ ID NO: 5594063 - DNA, 25 bp, Homo sapien
aggtacactttgtgggtagtgggaa

SEQ ID NO: 5594064 - DNA, 25 bp, Homo sapien
aaacatgtcagaatcgtcagaatat

SEQ ID NO: 5594065 - DNA, 25 bp, Homo sapien
taggatttctcacctggaaaaactc

SEQ ID NO: 5594066 - DNA, 25 bp, Homo sapien
ggaaagcaatgcaattctgtagtcc

SEQ ID NO: 5594067 - DNA, 25 bp, Homo sapien
acaaggcaacatgtttctggaaagc

SEQ ID NO: 5594068 - DNA, 25 bp, Homo sapien
gatcaaggagagggtttacattaaa

SEQ ID NO: 5594069 - DNA, 25 bp, Homo sapien
caataagcagtatcaacgtgttccc

SEQ ID NO: 5594070 - DNA, 25 bp, Homo sapien
atagcaaaaatgaccacataggtaa

SEQ ID NO: 5594071 - DNA, 25 bp, Homo sapien
taggtaacatattaaaagctccaat

SEQ ID NO: 5594072 - DNA, 25 bp, Homo sapien
ttgggggaagaatctattaactgta

SEQ ID NO: 5594073 - DNA, 25 bp, Homo sapien
aaaaggatcaaatgaatatctctaa

SEQ ID NO: 5594074 - DNA, 25 bp, Homo sapien
taacccatgcagtcagaaattatgt

SEQ ID NO: 5594075 - DNA, 25 bp, Homo sapien
ccacggtaaaacagagttatccaga

SEQ ID NO: 5594076 - DNA, 25 bp, Homo sapien
tggaatacatccaggatccacggta

SEQ ID NO: 5594077 - DNA, 25 bp, Homo sapien
atccaggatccacggtaaaacagag

SEQ ID NO: 5594078 - DNA, 25 bp, Homo sapien
atacatccaggatccacggtaaaac

SEQ ID NO: 5594079 - DNA, 25 bp, Homo sapien
ctcgccttcttaaagtcatcctgga

SEQ ID NO: 5594080 - DNA, 25 bp, Homo sapien
acactgagctctcaggggtcttacc

SEQ ID NO: 5594081 - DNA, 25 bp, Homo sapien
ccctaggaaaccagccattcaagtt

SEQ ID NO: 5594082 - DNA, 25 bp, Homo sapien
agaaccctaggaaaccagccattca

SEQ ID NO: 5594083 - DNA, 25 bp, Homo sapien
ctcaggggtcttaccccttctcgcc

SEQ ID NO: 5594084 - DNA, 25 bp, Homo sapien
gatccacggtaaaacagagttatcc

SEQ ID NO: 5594085 - DNA, 25 bp, Homo sapien
cttaaagtcatcctggaatacatcc

SEQ ID NO: 5594086 - DNA, 25 bp, Homo sapien
tgcgcttcaaggatagaaagagaaa

SEQ ID NO: 5594087 - DNA, 25 bp, Homo sapien
agctgggttttaagagtagacaaac

SEQ ID NO: 5594088 - DNA, 25 bp, Homo sapien
ccccgtaaaaacactgtacccatca

SEQ ID NO: 5594089 - DNA, 25 bp, Homo sapien
acttttcatgagtgttcagtgtcac

SEQ ID NO: 5594090 - DNA, 25 bp, Homo sapien
actgatgagacgtgctgtgatctca

SEQ ID NO: 5594091 - DNA, 25 bp, Homo sapien
tgtcagacactgcgcttcaaggata

SEQ ID NO: 5594092 - DNA, 25 bp, Homo sapien
gtcaccataatgaaaaccagtaact

SEQ ID NO: 5594093 - DNA, 25 bp, Homo sapien
accagtaactgatgagacgtgctgt

SEQ ID NO: 5594094 - DNA, 25 bp, Homo sapien
tgagcacatcctatgtgtcagacac

SEQ ID NO: 5594095 - DNA, 25 bp, Homo sapien
tcatctggcatcaatgagcacatcc

SEQ ID NO: 5594096 - DNA, 25 bp, Homo sapien
taagagtagacaaacatgaatgcat

SEQ ID NO: 5594097 - DNA, 25 bp, Homo sapien
agaagggggaagttttatcattaca

SEQ ID NO: 5594098 - DNA, 25 bp, Homo sapien
gcagtttaataaaagatataccaaa

SEQ ID NO: 5594099 - DNA, 25 bp, Homo sapien
atcattacaaaggtacagagtgttt

SEQ ID NO: 5594100 - DNA, 25 bp, Homo sapien
tcagaataagcttcaccgtaaagaa

SEQ ID NO: 5594101 - DNA, 25 bp, Homo sapien
tagtgtagaaagaccacaatgcttt

SEQ ID NO: 5594102 - DNA, 25 bp, Homo sapien
taccacaacactcaagacacaccaa

SEQ ID NO: 5594103 - DNA, 25 bp, Homo sapien
cagtctaggcttaatcagaataagc

SEQ ID NO: 5594104 - DNA, 25 bp, Homo sapien
tttcataccacaacactcaagacac

SEQ ID NO: 5594105 - DNA, 25 bp, Homo sapien
ctcaagacacaccaagttattcaaa

SEQ ID NO: 5594106 - DNA, 25 bp, Homo sapien
gagttcacaaattcatcatcagacc

SEQ ID NO: 5594107 - DNA, 25 bp, Homo sapien
gaaagaccacaatgcttttcatacc

SEQ ID NO: 5594108 - DNA, 25 bp, Homo sapien
gaccacgtttgtaggatggaaatat

SEQ ID NO: 5594109 - DNA, 25 bp, Homo sapien
acacaatcctccagcattggcttcc

SEQ ID NO: 5594110 - DNA, 25 bp, Homo sapien
tttttagaagcatgaccacgtttgt

SEQ ID NO: 5594111 - DNA, 25 bp, Homo sapien
ggcgtgagagccactttgcctagcc

SEQ ID NO: 5594112 - DNA, 25 bp, Homo sapien
tcaattagggcttctgcgcattggc

SEQ ID NO: 5594113 - DNA, 25 bp, Homo sapien
cctagcccctagtgtcttttgattt

SEQ ID NO: 5594114 - DNA, 25 bp, Homo sapien
ctccagcattggcttcctaaagtgc

SEQ ID NO: 5594115 - DNA, 25 bp, Homo sapien
gcttctgcgcattggctggccaaac

SEQ ID NO: 5594116 - DNA, 25 bp, Homo sapien
tcccaacaaggtctttgagctccac

SEQ ID NO: 5594117 - DNA, 25 bp, Homo sapien
ggccaaacatcttgagctacttcat

SEQ ID NO: 5594118 - DNA, 25 bp, Homo sapien
acggagaagaaacgcaattagaaaa

SEQ ID NO: 5594119 - DNA, 25 bp, Homo sapien
agaactaagcacagatgagactttc

SEQ ID NO: 5594120 - DNA, 25 bp, Homo sapien
gagaattcatcggcagtcatagcta

SEQ ID NO: 5594121 - DNA, 25 bp, Homo sapien
gattggcagaccctttacggagaac

SEQ ID NO: 5594122 - DNA, 25 bp, Homo sapien
agtcatagctaagtcatggaaaacc

SEQ ID NO: 5594123 - DNA, 25 bp, Homo sapien
ttcttgacagcaggattctactttg

SEQ ID NO: 5594124 - DNA, 25 bp, Homo sapien
gtcatggaaaaccaggattggcaga

SEQ ID NO: 5594125 - DNA, 25 bp, Homo sapien
acggagaacggctaactgcttcttc

SEQ ID NO: 5594126 - DNA, 25 bp, Homo sapien
gaagtgacgagcattgagaattcat

SEQ ID NO: 5594127 - DNA, 25 bp, Homo sapien
ccaagaatcaggatcatcaagtatt

SEQ ID NO: 5594128 - DNA, 25 bp, Homo sapien
caaaaaataccaacaagaactaagc

SEQ ID NO: 5594129 - DNA, 25 bp, Homo sapien
aggatgaatgcgtctcaacacagtc

SEQ ID NO: 5594130 - DNA, 25 bp, Homo sapien
agctaccaatgatcttacacaacac

SEQ ID NO: 5594131 - DNA, 25 bp, Homo sapien
aaagtgaatgaaaagacaattcttt

SEQ ID NO: 5594132 - DNA, 25 bp, Homo sapien
ttacttaaagtgaatgaaaagacaa

SEQ ID NO: 5594133 - DNA, 25 bp, Homo sapien
accatattatgggtgataaggtccc

SEQ ID NO: 5594134 - DNA, 25 bp, Homo sapien
gttaaaactgacaggatggcacatg

SEQ ID NO: 5594135 - DNA, 25 bp, Homo sapien
aacgaggactaaactggacatccag

SEQ ID NO: 5594136 - DNA, 25 bp, Homo sapien
ggtgataaggtcccagattaacgta

SEQ ID NO: 5594137 - DNA, 25 bp, Homo sapien
cagattaacgtaagaaaacgaggac

SEQ ID NO: 5594138 - DNA, 25 bp, Homo sapien
tgtatgagtcaaaatgtgtcagttt

SEQ ID NO: 5594139 - DNA, 25 bp, Homo sapien
aggatggcacatggtaagaattata

SEQ ID NO: 5594140 - DNA, 25 bp, Homo sapien
gtgaaaatgctttgttaaaactgac

SEQ ID NO: 5594141 - DNA, 25 bp, Homo sapien
gccggcagtccagggagagccgagg

SEQ ID NO: 5594142 - DNA, 25 bp, Homo sapien
cctcggctctccctggactgccggc

SEQ ID NO: 5594143 - DNA, 25 bp, Homo sapien
cctgcatcacgtgagaggcttcttt

SEQ ID NO: 5594144 - DNA, 25 bp, Homo sapien
gttaatcctggcagtgcagactggg

SEQ ID NO: 5594145 - DNA, 25 bp, Homo sapien
atcctgccatgaatcggggcatgac

SEQ ID NO: 5594146 - DNA, 25 bp, Homo sapien
gtccctgtggaatcaactggtagtc

SEQ ID NO: 5594147 - DNA, 25 bp, Homo sapien
tctcgcttggggaatgtccctgtgg

SEQ ID NO: 5594148 - DNA, 25 bp, Homo sapien
atgacagaaggagtaacgctgttaa

SEQ ID NO: 5594149 - DNA, 25 bp, Homo sapien
acaagtattgcggaatgctgcagca

SEQ ID NO: 5594150 - DNA, 25 bp, Homo sapien
gggctgatagaactgcaggttgttc

SEQ ID NO: 5594151 - DNA, 25 bp, Homo sapien
gcatacggagaattggttcaggtag

SEQ ID NO: 5594152 - DNA, 25 bp, Homo sapien
ttacttgcagggttatcgagctttc

SEQ ID NO: 5594153 - DNA, 25 bp, Homo sapien
agtggaggtatatggccttctcgct

SEQ ID NO: 5594154 - DNA, 25 bp, Homo sapien
gcctccgccttccgggctcaagcga

SEQ ID NO: 5594155 - DNA, 25 bp, Homo sapien
tctagcacaaactctaaaattgtta

SEQ ID NO: 5594156 - DNA, 25 bp, Homo sapien
cactagctaataaaacagaaaaatc

SEQ ID NO: 5594157 - DNA, 25 bp, Homo sapien
atcacttggcataaaatgaaaaact

SEQ ID NO: 5594158 - DNA, 25 bp, Homo sapien
agtgcagtggtgccatctcagctca

SEQ ID NO: 5594159 - DNA, 25 bp, Homo sapien
accacatccggcctcagaatatctt

SEQ ID NO: 5594160 - DNA, 25 bp, Homo sapien
gtgagccaccacatccggcctcaga

SEQ ID NO: 5594161 - DNA, 25 bp, Homo sapien
caacattggtttcactagctaataa

SEQ ID NO: 5594162 - DNA, 25 bp, Homo sapien
cgcccggacgatttttgtatttata

SEQ ID NO: 5594163 - DNA, 25 bp, Homo sapien
tggcataaaatgaaaaactattccc

SEQ ID NO: 5594164 - DNA, 25 bp, Homo sapien
taaaacagaaaaatcacttggcata

SEQ ID NO: 5594165 - DNA, 25 bp, Homo sapien
gattggacactcctggaggtgcagc

SEQ ID NO: 5594166 - DNA, 25 bp, Homo sapien
ggcagagacaaactccaagaaagcc

SEQ ID NO: 5594167 - DNA, 25 bp, Homo sapien
cagaaaaagaacttcccacaggaaa

SEQ ID NO: 5594168 - DNA, 25 bp, Homo sapien
ccagcatcttgttaagcagactgcc

SEQ ID NO: 5594169 - DNA, 25 bp, Homo sapien
ggaggtgcagcacagtatctaacac

SEQ ID NO: 5594170 - DNA, 25 bp, Homo sapien
aaccgcaagtcagcatgggatgctg

SEQ ID NO: 5594171 - DNA, 25 bp, Homo sapien
ttccaccgaactacgtaagaccagc

SEQ ID NO: 5594172 - DNA, 25 bp, Homo sapien
aaggcaaaggcagacactgccactt

SEQ ID NO: 5594173 - DNA, 25 bp, Homo sapien
taactctctaaagcacaggagcctt

SEQ ID NO: 5594174 - DNA, 25 bp, Homo sapien
caggagcctttttaaagggcttgag

SEQ ID NO: 5594175 - DNA, 25 bp, Homo sapien
agaaaaaagaacggtcattaacatc

SEQ ID NO: 5594176 - DNA, 25 bp, Homo sapien
tctcagcagatcaacttgctcatcc

SEQ ID NO: 5594177 - DNA, 25 bp, Homo sapien
aaataccaagataaggaaagcgact

SEQ ID NO: 5594178 - DNA, 25 bp, Homo sapien
attttcagaagagcatttcaaggaa

SEQ ID NO: 5594179 - DNA, 25 bp, Homo sapien
taagcccagataaatgacagtaaat

SEQ ID NO: 5594180 - DNA, 25 bp, Homo sapien
gatgactgcctggctaactgagggt

SEQ ID NO: 5594181 - DNA, 25 bp, Homo sapien
cagtaaataccaagataaggaaagc

SEQ ID NO: 5594182 - DNA, 25 bp, Homo sapien
tataaatctgtttagctaagcccag

SEQ ID NO: 5594183 - DNA, 25 bp, Homo sapien
ctcaggacaccttttatgtgacaga

SEQ ID NO: 5594184 - DNA, 25 bp, Homo sapien
ctggctaactgagggttctactgtt

SEQ ID NO: 5594185 - DNA, 25 bp, Homo sapien
caatagcattgtaatcagttttagc

SEQ ID NO: 5594186 - DNA, 25 bp, Homo sapien
ttatgttcccattttgtgagagtta

SEQ ID NO: 5594187 - DNA, 25 bp, Homo sapien
ataataagtcacagttaccagttac

SEQ ID NO: 5594188 - DNA, 25 bp, Homo sapien
aagagcgcttccaattttgaacgac

SEQ ID NO: 5594189 - DNA, 25 bp, Homo sapien
ttaacccatgacaaagagctgctaa

SEQ ID NO: 5594190 - DNA, 25 bp, Homo sapien
agaaggggaatctagaaccctagga

SEQ ID NO: 5594191 - DNA, 25 bp, Homo sapien
taaaatctagagcaaactgaagcat

SEQ ID NO: 5594192 - DNA, 25 bp, Homo sapien
tgaagcattcactcaaagcaacaac

SEQ ID NO: 5594193 - DNA, 25 bp, Homo sapien
aaggtaggcaattagtaatgccatc

SEQ ID NO: 5594194 - DNA, 25 bp, Homo sapien
taacaaacaaagtaaaatctagagc

SEQ ID NO: 5594195 - DNA, 25 bp, Homo sapien
cagacatggtgatttcaaaggcctc

SEQ ID NO: 5594196 - DNA, 25 bp, Homo sapien
tcaaaggcctcaaggtaggcaatta

SEQ ID NO: 5594197 - DNA, 25 bp, Homo sapien
gagcttgacacttctaagagcgctt

SEQ ID NO: 5594198 - DNA, 25 bp, Homo sapien
attcatttagaaagttacaggtaac

SEQ ID NO: 5594199 - DNA, 25 bp, Homo sapien
atctagcttctaacccactggagta

SEQ ID NO: 5594200 - DNA, 25 bp, Homo sapien
atgttactaagaggactggaagaat

SEQ ID NO: 5594201 - DNA, 25 bp, Homo sapien
accgccttcattggaatctagcttc

SEQ ID NO: 5594202 - DNA, 25 bp, Homo sapien
gtttatgttactaagaggactggaa

SEQ ID NO: 5594203 - DNA, 25 bp, Homo sapien
gagaagaatgtgactaagaatggtt

SEQ ID NO: 5594204 - DNA, 25 bp, Homo sapien
aagaatggttgtaaatagaaaaaca

SEQ ID NO: 5594205 - DNA, 25 bp, Homo sapien
ctaacccactggagtatggaatttt

SEQ ID NO: 5594206 - DNA, 25 bp, Homo sapien
ataaaggatagtgttaatggtaaac

SEQ ID NO: 5594207 - DNA, 25 bp, Homo sapien
ggaagaatgtccctccagttcaatc

SEQ ID NO: 5594208 - DNA, 25 bp, Homo sapien
aacaaattgcacatcaaacagtttt

SEQ ID NO: 5594209 - DNA, 25 bp, Homo sapien
cagaatctgcaagaaaaaagataaa

SEQ ID NO: 5594210 - DNA, 25 bp, Homo sapien
tgccagggtttgcagatgttgtgca

SEQ ID NO: 5594211 - DNA, 25 bp, Homo sapien
gcactgaagagtcatgcaattccaa

SEQ ID NO: 5594212 - DNA, 25 bp, Homo sapien
gaaaatgtggaagatctgacaacac

SEQ ID NO: 5594213 - DNA, 25 bp, Homo sapien
gattatactttcacggaggaatcta

SEQ ID NO: 5594214 - DNA, 25 bp, Homo sapien
gatgttgtgcatgcccagaatctgc

SEQ ID NO: 5594215 - DNA, 25 bp, Homo sapien
aatacaaaacattcacacgtgatta

SEQ ID NO: 5594216 - DNA, 25 bp, Homo sapien
gtatcctgggaatctgtacctttac

SEQ ID NO: 5594217 - DNA, 25 bp, Homo sapien
ttcagagtcctcttgaaaatgtgga

SEQ ID NO: 5594218 - DNA, 25 bp, Homo sapien
ccaccatgcccgacctgttactctt

SEQ ID NO: 5594219 - DNA, 25 bp, Homo sapien
gatctgacaacacagtgcttgcaac

SEQ ID NO: 5594220 - DNA, 25 bp, Homo sapien
ttaatgaaagtctagagtttggcac

SEQ ID NO: 5594221 - DNA, 25 bp, Homo sapien
acacttcctgaacaatgctgccata

SEQ ID NO: 5594222 - DNA, 25 bp, Homo sapien
ctccattagatgctggcttcatttc

SEQ ID NO: 5594223 - DNA, 25 bp, Homo sapien
aagtctagagtttggcacagaggta

SEQ ID NO: 5594224 - DNA, 25 bp, Homo sapien
tgagtgtggtaaatgttacaatgac

SEQ ID NO: 5594225 - DNA, 25 bp, Homo sapien
agaggtagagatggacaatcttgat

SEQ ID NO: 5594226 - DNA, 25 bp, Homo sapien
agtgctacaactacagaagatacat

SEQ ID NO: 5594227 - DNA, 25 bp, Homo sapien
gttagtgtaggcgacattacttctc

SEQ ID NO: 5594228 - DNA, 25 bp, Homo sapien
tgatgaagtagtacagaaagttctc

SEQ ID NO: 5594229 - DNA, 25 bp, Homo sapien
agaaagttctcatacacccttcccc

SEQ ID NO: 5594230 - DNA, 25 bp, Homo sapien
taatggacattatatgaaactgttt

SEQ ID NO: 5594231 - DNA, 25 bp, Homo sapien
tcatcaaggtgacgtgaacccttct

SEQ ID NO: 5594232 - DNA, 25 bp, Homo sapien
gccagcagttatccgggtcaacttc

SEQ ID NO: 5594233 - DNA, 25 bp, Homo sapien
gtgtgctcaagaggttggagcaaac

SEQ ID NO: 5594234 - DNA, 25 bp, Homo sapien
tccacacaggaggtatcattgttcc

SEQ ID NO: 5594235 - DNA, 25 bp, Homo sapien
ctgcctggggttaaagtcagatgtt

SEQ ID NO: 5594236 - DNA, 25 bp, Homo sapien
tggagcaaactgatgcttggctgaa

SEQ ID NO: 5594237 - DNA, 25 bp, Homo sapien
atgcataatcagatgaacgtggttc

SEQ ID NO: 5594238 - DNA, 25 bp, Homo sapien
acctgaagagaaatctgcctggggt

SEQ ID NO: 5594239 - DNA, 25 bp, Homo sapien
agataaaacacaggcagcccgactg

SEQ ID NO: 5594240 - DNA, 25 bp, Homo sapien
cccgactggcaaagcacaacttatt

SEQ ID NO: 5594241 - DNA, 25 bp, Homo sapien
aacgtggttcagagaacagcacagt

SEQ ID NO: 5594242 - DNA, 25 bp, Homo sapien
ccttgtccgggtttgcgtgttctgt

SEQ ID NO: 5594243 - DNA, 25 bp, Homo sapien
acagaacacgcaaacccggacaagg

SEQ ID NO: 5594244 - DNA, 25 bp, Homo sapien
gctgctaagtgaggcgctattgcca

SEQ ID NO: 5594245 - DNA, 25 bp, Homo sapien
taggaaattgctctgggcccagtga

SEQ ID NO: 5594246 - DNA, 25 bp, Homo sapien
aatgaggaagaaacaagatctattc

SEQ ID NO: 5594247 - DNA, 25 bp, Homo sapien
catcaacgtgtcaacatggggatgg

SEQ ID NO: 5594248 - DNA, 25 bp, Homo sapien
cgtcaaatcctcgggagaccttggc

SEQ ID NO: 5594249 - DNA, 25 bp, Homo sapien
tatccaacgggattagcgtcaaatc

SEQ ID NO: 5594250 - DNA, 25 bp, Homo sapien
tttggactaggtcaagtctgcccac

SEQ ID NO: 5594251 - DNA, 25 bp, Homo sapien
caggcagaaacttgtaatgaggaag

SEQ ID NO: 5594252 - DNA, 25 bp, Homo sapien
tcggcctcaaatatggaatgtgtcc

SEQ ID NO: 5594253 - DNA, 25 bp, Homo sapien
gctattgccacagcgagtgtgggcg

SEQ ID NO: 5594254 - DNA, 25 bp, Homo sapien
aaaggaacaataccagatgaggcat

SEQ ID NO: 5594255 - DNA, 25 bp, Homo sapien
gccgcctcaccacagctgatgagtg

SEQ ID NO: 5594256 - DNA, 25 bp, Homo sapien
gaaggaggcaaaaattacttggcca

SEQ ID NO: 5594257 - DNA, 25 bp, Homo sapien
tacttggccaaagctgctcggctta

SEQ ID NO: 5594258 - DNA, 25 bp, Homo sapien
atgaggattttgccgaagagtccca

SEQ ID NO: 5594259 - DNA, 25 bp, Homo sapien
gccgaagagtcccagagttttcatt

SEQ ID NO: 5594260 - DNA, 25 bp, Homo sapien
gtccacagctcactaggtggggaca

SEQ ID NO: 5594261 - DNA, 25 bp, Homo sapien
tgcagccctgatgtcaatggtagcc

SEQ ID NO: 5594262 - DNA, 25 bp, Homo sapien
ctcctaaactcaggccacgcgaggg

SEQ ID NO: 5594263 - DNA, 25 bp, Homo sapien
ggctgcagtgtgtgagctgctttgc

SEQ ID NO: 5594264 - DNA, 25 bp, Homo sapien
tgactttgactttgctccagccgcc

SEQ ID NO: 5594265 - DNA, 25 bp, Homo sapien
aagggactctggccacccttgctcc

SEQ ID NO: 5594266 - DNA, 25 bp, Homo sapien
caaccctggaaaccagagcccactg

SEQ ID NO: 5594267 - DNA, 25 bp, Homo sapien
ataaagctattcaaccgaagtcatc

SEQ ID NO: 5594268 - DNA, 25 bp, Homo sapien
ttaattccaagtgtacaggatgaag

SEQ ID NO: 5594269 - DNA, 25 bp, Homo sapien
tcccccaagaccgcagtaccattgt

SEQ ID NO: 5594270 - DNA, 25 bp, Homo sapien
aggtaatgtgtgttgttataaagtc

SEQ ID NO: 5594271 - DNA, 25 bp, Homo sapien
gtaacggattacagtatatacgtat

SEQ ID NO: 5594272 - DNA, 25 bp, Homo sapien
acgtatgaagcttgtctgtacacac

SEQ ID NO: 5594273 - DNA, 25 bp, Homo sapien
tgaagatgctgggatacttttgttt

SEQ ID NO: 5594274 - DNA, 25 bp, Homo sapien
ggatatgcccaaatgaaattaattc

SEQ ID NO: 5594275 - DNA, 25 bp, Homo sapien
ctccccatcagtttgcgcttgactt

SEQ ID NO: 5594276 - DNA, 25 bp, Homo sapien
tgtacactgtagaagtaccacatac

SEQ ID NO: 5594277 - DNA, 25 bp, Homo sapien
gcccgctgggtatacatgatctttc

SEQ ID NO: 5594278 - DNA, 25 bp, Homo sapien
agagttaagtgctagacctggattc

SEQ ID NO: 5594279 - DNA, 25 bp, Homo sapien
caggcagtccagctacagaacactg

SEQ ID NO: 5594280 - DNA, 25 bp, Homo sapien
cctccaacttggcctcctgggtagc

SEQ ID NO: 5594281 - DNA, 25 bp, Homo sapien
agtcaccagtgtggtacaaacttgt

SEQ ID NO: 5594282 - DNA, 25 bp, Homo sapien
tggtgtcgtttgggttcactgcaac

SEQ ID NO: 5594283 - DNA, 25 bp, Homo sapien
tgctcaaggctgcagagttaagtgc

SEQ ID NO: 5594284 - DNA, 25 bp, Homo sapien
ctagggaaaaacactagtcaccagt

SEQ ID NO: 5594285 - DNA, 25 bp, Homo sapien
acagaacactgctgctgtgcgctcg

SEQ ID NO: 5594286 - DNA, 25 bp, Homo sapien
cgcccagccagagtaagccttttgt

SEQ ID NO: 5594287 - DNA, 25 bp, Homo sapien
ccatccacccgcctctggcccctca

SEQ ID NO: 5594288 - DNA, 25 bp, Homo sapien
tgtgattttggtggtgctgccaatc

SEQ ID NO: 5594289 - DNA, 25 bp, Homo sapien
ctatgtggccaatcaaggtacttct

SEQ ID NO: 5594290 - DNA, 25 bp, Homo sapien
tattctagggtgcttaatcttggat

SEQ ID NO: 5594291 - DNA, 25 bp, Homo sapien
aacattacacataatggagcagaaa

SEQ ID NO: 5594292 - DNA, 25 bp, Homo sapien
cagtcatgtgccccaaaaagacgtt

SEQ ID NO: 5594293 - DNA, 25 bp, Homo sapien
attcttgggtcctatgtggccaatc

SEQ ID NO: 5594294 - DNA, 25 bp, Homo sapien
aagacgttttgggtcaacgacagac

SEQ ID NO: 5594295 - DNA, 25 bp, Homo sapien
atatacaaccatggtcccctaacat

SEQ ID NO: 5594296 - DNA, 25 bp, Homo sapien
tcaagtaccctatctgcctagctag

SEQ ID NO: 5594297 - DNA, 25 bp, Homo sapien
cacaggagtcatctgcagtcacatc

SEQ ID NO: 5594298 - DNA, 25 bp, Homo sapien
atcttggatggcataacacaggagt

SEQ ID NO: 5594299 - DNA, 25 bp, Homo sapien
aggcatcacatccagactcagaccc

SEQ ID NO: 5594300 - DNA, 25 bp, Homo sapien
ccggtctcattcaccagcgccgccc

SEQ ID NO: 5594301 - DNA, 25 bp, Homo sapien
gcccatccctacctgggtgagcctt

SEQ ID NO: 5594302 - DNA, 25 bp, Homo sapien
gcacagcatgcaggcccagttctgc

SEQ ID NO: 5594303 - DNA, 25 bp, Homo sapien
tcaccctctggtgccaagatggctg

SEQ ID NO: 5594304 - DNA, 25 bp, Homo sapien
aaaaaaaaactggattgcctggctc

SEQ ID NO: 5594305 - DNA, 25 bp, Homo sapien
gcctggctctactccgggcacagca

SEQ ID NO: 5594306 - DNA, 25 bp, Homo sapien
accaaacaggacctgccctctgggg

SEQ ID NO: 5594307 - DNA, 25 bp, Homo sapien
gtgagcctttgtaggaacgagaaac

SEQ ID NO: 5594308 - DNA, 25 bp, Homo sapien
agcgccgcccaccgctcaaccaatc

SEQ ID NO: 5594309 - DNA, 25 bp, Homo sapien
acccagcagcgtcttttccggtctc

SEQ ID NO: 5594310 - DNA, 25 bp, Homo sapien
gggagccggttcaatccagcccggc

SEQ ID NO: 5594311 - DNA, 25 bp, Homo sapien
tctcccagctcagactagggcttcc

SEQ ID NO: 5594312 - DNA, 25 bp, Homo sapien
ggtgcctacctcgcggtcctctcct

SEQ ID NO: 5594313 - DNA, 25 bp, Homo sapien
gcccaccctcatcccccggagcgtg

SEQ ID NO: 5594314 - DNA, 25 bp, Homo sapien
ggcgtccagcttcggtgcctacctc

SEQ ID NO: 5594315 - DNA, 25 bp, Homo sapien
aatccagcccggcatggttctccag

SEQ ID NO: 5594316 - DNA, 25 bp, Homo sapien
tgctctttacaccccggaaacggca

SEQ ID NO: 5594317 - DNA, 25 bp, Homo sapien
ccctctcccccgaaatccgcggctc

SEQ ID NO: 5594318 - DNA, 25 bp, Homo sapien
tgccgaacggcacatacgaaactta

SEQ ID NO: 5594319 - DNA, 25 bp, Homo sapien
tgctccggagctctcccccaagttc

SEQ ID NO: 5594320 - DNA, 25 bp, Homo sapien
gccactcgtagcaacccctctcccc

SEQ ID NO: 5594321 - DNA, 25 bp, Homo sapien
gacaagcatgttacatatacaccac

SEQ ID NO: 5594322 - DNA, 25 bp, Homo sapien
acacgggaagctgcaatagaatttt

SEQ ID NO: 5594323 - DNA, 25 bp, Homo sapien
agagatatatagagttttacatgta

SEQ ID NO: 5594324 - DNA, 25 bp, Homo sapien
ttggcaacacatagagatatataga

SEQ ID NO: 5594325 - DNA, 25 bp, Homo sapien
gttcactggtgttcatcttatcatg

SEQ ID NO: 5594326 - DNA, 25 bp, Homo sapien
ttctctaggtgatgtgttcactggt

SEQ ID NO: 5594327 - DNA, 25 bp, Homo sapien
atatccctggcatggaatagagagc

SEQ ID NO: 5594328 - DNA, 25 bp, Homo sapien
aacagcacattgacatggtaaatac

SEQ ID NO: 5594329 - DNA, 25 bp, Homo sapien
aagttcaaaatgggatatccctggc

SEQ ID NO: 5594330 - DNA, 25 bp, Homo sapien
tgcttcattctctaggtgatgtgtt

SEQ ID NO: 5594331 - DNA, 25 bp, Homo sapien
tgacatggtaaatacgaagttcaaa

SEQ ID NO: 5594332 - DNA, 25 bp, Homo sapien
tatgcaattccaaatgtctggattt

SEQ ID NO: 5594333 - DNA, 25 bp, Homo sapien
ctgggcttccttaatatgcaattcc

SEQ ID NO: 5594334 - DNA, 25 bp, Homo sapien
ggattcaggactggttcccaggcag

SEQ ID NO: 5594335 - DNA, 25 bp, Homo sapien
tcgcccagcccctaatcttggattc

SEQ ID NO: 5594336 - DNA, 25 bp, Homo sapien
ccttaggattcaggactggttccca

SEQ ID NO: 5594337 - DNA, 25 bp, Homo sapien
attctccagtatgctttcctccaag

SEQ ID NO: 5594338 - DNA, 25 bp, Homo sapien
cccaggctccttaggattcaggact

SEQ ID NO: 5594339 - DNA, 25 bp, Homo sapien
ccacctcgcccagcccctaatcttg

SEQ ID NO: 5594340 - DNA, 25 bp, Homo sapien
tcctccaagcttccagttctgggct

SEQ ID NO: 5594341 - DNA, 25 bp, Homo sapien
agcccaggctctttgtagcttattc

SEQ ID NO: 5594342 - DNA, 25 bp, Homo sapien
cttggattcttaagcccaggctctt

SEQ ID NO: 5594343 - DNA, 25 bp, Homo sapien
aggtaagcaggaggctttaaacatc

SEQ ID NO: 5594344 - DNA, 25 bp, Homo sapien
ttctaccgcagctgcctccagccac

SEQ ID NO: 5594345 - DNA, 25 bp, Homo sapien
aggtagcatcctgctgcctgctcac

SEQ ID NO: 5594346 - DNA, 25 bp, Homo sapien
tccctttaaaagtccacagtggcac

SEQ ID NO: 5594347 - DNA, 25 bp, Homo sapien
ttaatgtagtaaaaagagagaacca

SEQ ID NO: 5594348 - DNA, 25 bp, Homo sapien
agtggcactgccaacttctaccgca

SEQ ID NO: 5594349 - DNA, 25 bp, Homo sapien
tccagccacacagtcctcccctgca

SEQ ID NO: 5594350 - DNA, 25 bp, Homo sapien
ttcaaggagacaagctcaattgtat

SEQ ID NO: 5594351 - DNA, 25 bp, Homo sapien
aatatggaaccaaagcaattatgct

SEQ ID NO: 5594352 - DNA, 25 bp, Homo sapien
cttcaggcttgtacccagagttgtc

SEQ ID NO: 5594353 - DNA, 25 bp, Homo sapien
tgattaggacacttcaggaaaaaag

SEQ ID NO: 5594354 - DNA, 25 bp, Homo sapien
gggcctacagctcatttcttaccac

SEQ ID NO: 5594355 - DNA, 25 bp, Homo sapien
cccagaaaccattcatcccaggcgc

SEQ ID NO: 5594356 - DNA, 25 bp, Homo sapien
aggtgtgatcttccctcaccgcaac

SEQ ID NO: 5594357 - DNA, 25 bp, Homo sapien
cattcatcccaggcgccacgcagag

SEQ ID NO: 5594358 - DNA, 25 bp, Homo sapien
aactcccgcaatcaccatatccttc

SEQ ID NO: 5594359 - DNA, 25 bp, Homo sapien
catcctgagtttatggtaagtccat

SEQ ID NO: 5594360 - DNA, 25 bp, Homo sapien
actcggccatcctgagtttatggta

SEQ ID NO: 5594361 - DNA, 25 bp, Homo sapien
tggtaagtccataaactaagaagaa

SEQ ID NO: 5594362 - DNA, 25 bp, Homo sapien
tcccctataagtaatgtcttgtaac

SEQ ID NO: 5594363 - DNA, 25 bp, Homo sapien
ggagtgctaaggtgtgatcttccct

SEQ ID NO: 5594364 - DNA, 25 bp, Homo sapien
gtaatgtcttgtaactcccgcaatc

SEQ ID NO: 5594365 - DNA, 25 bp, Homo sapien
gcctttggcggacggctccccacga

SEQ ID NO: 5594366 - DNA, 25 bp, Homo sapien
tcgtggggagccgtccgccaaaggc

SEQ ID NO: 5594367 - DNA, 25 bp, Homo sapien
gtgaatccaaaaatgtaggcaaaac

SEQ ID NO: 5594368 - DNA, 25 bp, Homo sapien
ctaaaaggaaggtgatattcaaacc

SEQ ID NO: 5594369 - DNA, 25 bp, Homo sapien
aacctaaaagtgtatcaacggtatc

SEQ ID NO: 5594370 - DNA, 25 bp, Homo sapien
tgcagtagcacaatcccctggtgga

SEQ ID NO: 5594371 - DNA, 25 bp, Homo sapien
tgggaaaactggtagccattggatt

SEQ ID NO: 5594372 - DNA, 25 bp, Homo sapien
attgctaaatccagagaggtccagt

SEQ ID NO: 5594373 - DNA, 25 bp, Homo sapien
atgcttaaaggtatggaacattcta

SEQ ID NO: 5594374 - DNA, 25 bp, Homo sapien
caacggtatccacatggagaagagg

SEQ ID NO: 5594375 - DNA, 25 bp, Homo sapien
cactgccataggaactgaggtctgt

SEQ ID NO: 5594376 - DNA, 25 bp, Homo sapien
tggggaaaccaccatagcttttatc

SEQ ID NO: 5594377 - DNA, 25 bp, Homo sapien
gttgtaaacacgtaacagctgaact

SEQ ID NO: 5594378 - DNA, 25 bp, Homo sapien
ccctgaaatccagtcaggaggaagg

SEQ ID NO: 5594379 - DNA, 25 bp, Homo sapien
tgatgctcagttgaaccagaatgtt

SEQ ID NO: 5594380 - DNA, 25 bp, Homo sapien
caccactgttagagaaaactgatgc

SEQ ID NO: 5594381 - DNA, 25 bp, Homo sapien
ggagaagaggcataagcatatttaa

SEQ ID NO: 5594382 - DNA, 25 bp, Homo sapien
gttaaatgtgaacaggatttgtctg

SEQ ID NO: 5594383 - DNA, 25 bp, Homo sapien
gtaaggatttagattaggagaagag

SEQ ID NO: 5594384 - DNA, 25 bp, Homo sapien
ttaagggccaaaatcatactgtacc

SEQ ID NO: 5594385 - DNA, 25 bp, Homo sapien
gggagaagagctctgaagtactttt

SEQ ID NO: 5594386 - DNA, 25 bp, Homo sapien
aaaaggcaagaaataatgggttaga

SEQ ID NO: 5594387 - DNA, 25 bp, Homo sapien
aaggacacaaaattctgccctgccc

SEQ ID NO: 5594388 - DNA, 25 bp, Homo sapien
gggcaggattgtaaggatttagatt

SEQ ID NO: 5594389 - DNA, 25 bp, Homo sapien
tccaggtccagaagtagaataaatt

SEQ ID NO: 5594390 - DNA, 25 bp, Homo sapien
caagacagatgggcaatgttttaca

SEQ ID NO: 5594391 - DNA, 25 bp, Homo sapien
tagaataaattgaagagtaagggga

SEQ ID NO: 5594392 - DNA, 25 bp, Homo sapien
gtgaagcagtgaaataaccagcata

SEQ ID NO: 5594393 - DNA, 25 bp, Homo sapien
tgttaagtcaagcctggaaggtgaa

SEQ ID NO: 5594394 - DNA, 25 bp, Homo sapien
aagcatcccagcaagagtgccctaa

SEQ ID NO: 5594395 - DNA, 25 bp, Homo sapien
tgaagagacagctcatgagtccaag

SEQ ID NO: 5594396 - DNA, 25 bp, Homo sapien
atcacagtttgggtaagtccaggtc

SEQ ID NO: 5594397 - DNA, 25 bp, Homo sapien
ctagtaagaagaaatatataagctc

SEQ ID NO: 5594398 - DNA, 25 bp, Homo sapien
taaccagcataagacagataaggga

SEQ ID NO: 5594399 - DNA, 25 bp, Homo sapien
tataagctctggagaaagcatccca

SEQ ID NO: 5594400 - DNA, 25 bp, Homo sapien
attcagatgatatagatttaagtag

SEQ ID NO: 5594401 - DNA, 25 bp, Homo sapien
ctacttaaatctatatcatctgaat

SEQ ID NO: 5594402 - DNA, 25 bp, Homo sapien
ggggaagaacaacgtgcttcagaac

SEQ ID NO: 5594403 - DNA, 25 bp, Homo sapien
aacaacgtgcttcagaaccagatcc

SEQ ID NO: 5594404 - DNA, 25 bp, Homo sapien
tctgaagctcgatttgccctttggt

SEQ ID NO: 5594405 - DNA, 25 bp, Homo sapien
cttattggaagtcatttagaaaatc

SEQ ID NO: 5594406 - DNA, 25 bp, Homo sapien
gtggtcagatcctgttgccttgaac

SEQ ID NO: 5594407 - DNA, 25 bp, Homo sapien
gaaccagatccaaacctcagcccac

SEQ ID NO: 5594408 - DNA, 25 bp, Homo sapien
tccaatacacttaggatctgacctt

SEQ ID NO: 5594409 - DNA, 25 bp, Homo sapien
ttagaaaatcaatgtggtcagatcc

SEQ ID NO: 5594410 - DNA, 25 bp, Homo sapien
tgggcagacttgtcaggtggtctaa

SEQ ID NO: 5594411 - DNA, 25 bp, Homo sapien
tcaggtggtctaatgtgaacaaagc

SEQ ID NO: 5594412 - DNA, 25 bp, Homo sapien
taatgtgaacaaagccacagccacg

SEQ ID NO: 5594413 - DNA, 25 bp, Homo sapien
tgcgcctacccaacaccacgtccta

SEQ ID NO: 5594414 - DNA, 25 bp, Homo sapien
aaacccagagagcaattaacacaat

SEQ ID NO: 5594415 - DNA, 25 bp, Homo sapien
cacgtcctaacacctctagagaccc

SEQ ID NO: 5594416 - DNA, 25 bp, Homo sapien
cgggagtcagcgtgaatatattcat

SEQ ID NO: 5594417 - DNA, 25 bp, Homo sapien
agcgatctggctcacacaggcgata

SEQ ID NO: 5594418 - DNA, 25 bp, Homo sapien
ctccggctgtcagaaatgcggtgag

SEQ ID NO: 5594419 - DNA, 25 bp, Homo sapien
tccaagtcaacgattccaggagaat

SEQ ID NO: 5594420 - DNA, 25 bp, Homo sapien
gcggtgagccgaaatttaaatgccc

SEQ ID NO: 5594421 - DNA, 25 bp, Homo sapien
aggcgatatgcggtccctactccaa

SEQ ID NO: 5594422 - DNA, 25 bp, Homo sapien
cctactccaaggagctcaggatgca

SEQ ID NO: 5594423 - DNA, 25 bp, Homo sapien
aggagaatcggacacatcctcgcct

SEQ ID NO: 5594424 - DNA, 25 bp, Homo sapien
atcacaaattctttgctgcaggctc

SEQ ID NO: 5594425 - DNA, 25 bp, Homo sapien
agtcacagggattctgtcttgaagc

SEQ ID NO: 5594426 - DNA, 25 bp, Homo sapien
cccagggttagtcacagggattctg

SEQ ID NO: 5594427 - DNA, 25 bp, Homo sapien
gtcctgggttctagctcacagggct

SEQ ID NO: 5594428 - DNA, 25 bp, Homo sapien
cagggttagtcacagggattctgtc

SEQ ID NO: 5594429 - DNA, 25 bp, Homo sapien
gttctagctcacagggctcagtcct

SEQ ID NO: 5594430 - DNA, 25 bp, Homo sapien
gagcacctcccaagtggatgtctat

SEQ ID NO: 5594431 - DNA, 25 bp, Homo sapien
gctgagcacctcccaagtggatgtc

SEQ ID NO: 5594432 - DNA, 25 bp, Homo sapien
ggctgagcacctcccaagtggatgt

SEQ ID NO: 5594433 - DNA, 25 bp, Homo sapien
ctgggttctagctcacagggctcag

SEQ ID NO: 5594434 - DNA, 25 bp, Homo sapien
gggttctagctcacagggctcagtc

SEQ ID NO: 5594435 - DNA, 25 bp, Homo sapien
cttagatccccgctgatccgcccgt

SEQ ID NO: 5594436 - DNA, 25 bp, Homo sapien
ttgcctcaggagacttagatccccg

SEQ ID NO: 5594437 - DNA, 25 bp, Homo sapien
ccttgcctcaggagacttagatccc

SEQ ID NO: 5594438 - DNA, 25 bp, Homo sapien
cccgctccgcttctgccgctcccgg

SEQ ID NO: 5594439 - DNA, 25 bp, Homo sapien
ggcgcccttgcctcaggagacttag

SEQ ID NO: 5594440 - DNA, 25 bp, Homo sapien
caggagacttagatccccgctgatc

SEQ ID NO: 5594441 - DNA, 25 bp, Homo sapien
cgttcctcccgtgtctccatgccgc

SEQ ID NO: 5594442 - DNA, 25 bp, Homo sapien
tcctcccgtgtctccatgccgcagc

SEQ ID NO: 5594443 - DNA, 25 bp, Homo sapien
ggctaccttgccctcgcccccgctc

SEQ ID NO: 5594444 - DNA, 25 bp, Homo sapien
gcctcaggagacttagatccccgct

SEQ ID NO: 5594445 - DNA, 25 bp, Homo sapien
gtcccgttcctcccgtgtctccatg

SEQ ID NO: 5594446 - DNA, 25 bp, Homo sapien
gggaagcacatttacagaattgccc

SEQ ID NO: 5594447 - DNA, 25 bp, Homo sapien
ttacagaattgccctgcagcgaaaa

SEQ ID NO: 5594448 - DNA, 25 bp, Homo sapien
aaaacttctatttccagcagtggac

SEQ ID NO: 5594449 - DNA, 25 bp, Homo sapien
gcctcagacctcctaaagctgggaa

SEQ ID NO: 5594450 - DNA, 25 bp, Homo sapien
gagaagagtagcctcagacctccta

SEQ ID NO: 5594451 - DNA, 25 bp, Homo sapien
tgacatatttgtccactgtggcttg

SEQ ID NO: 5594452 - DNA, 25 bp, Homo sapien
aattgccctgcagcgaaaaaacttc

SEQ ID NO: 5594453 - DNA, 25 bp, Homo sapien
ccctgagaactgaacttgaaattat

SEQ ID NO: 5594454 - DNA, 25 bp, Homo sapien
ttgtgcatcttcagcttgacatatt

SEQ ID NO: 5594455 - DNA, 25 bp, Homo sapien
catgtcctttgaatccctgagaact

SEQ ID NO: 5594456 - DNA, 25 bp, Homo sapien
agctgggaagcacatttacagaatt

SEQ ID NO: 5594457 - DNA, 25 bp, Homo sapien
ttttacaaccattacatttcattag

SEQ ID NO: 5594458 - DNA, 25 bp, Homo sapien
ctaatgaaatgtaatggttgtaaaa

SEQ ID NO: 5594459 - DNA, 25 bp, Homo sapien
gttgaattactgaatttgcacaaac

SEQ ID NO: 5594460 - DNA, 25 bp, Homo sapien
tgcattggaaaactggctggttaaa

SEQ ID NO: 5594461 - DNA, 25 bp, Homo sapien
tggctggttaaagatatgatttgtc

SEQ ID NO: 5594462 - DNA, 25 bp, Homo sapien
cataaccaacaggtttaagtgaaat

SEQ ID NO: 5594463 - DNA, 25 bp, Homo sapien
atattcttcttaggacaaaagtctt

SEQ ID NO: 5594464 - DNA, 25 bp, Homo sapien
taagtgaaatttacaatgcattgga

SEQ ID NO: 5594465 - DNA, 25 bp, Homo sapien
aacaagctttgtcattttccactac

SEQ ID NO: 5594466 - DNA, 25 bp, Homo sapien
ggaaagaggctttattgaacatagc

SEQ ID NO: 5594467 - DNA, 25 bp, Homo sapien
gatatgatttgtcgtcaggtagctc

SEQ ID NO: 5594468 - DNA, 25 bp, Homo sapien
tttgcacaaacatttctacagaatt

SEQ ID NO: 5594469 - DNA, 25 bp, Homo sapien
tgtcgtcaggtagctcaaaattatt

SEQ ID NO: 5594470 - DNA, 25 bp, Homo sapien
cccaagttcaactgatgatcccgcc

SEQ ID NO: 5594471 - DNA, 25 bp, Homo sapien
atttatatgggacttaagggatctg

SEQ ID NO: 5594472 - DNA, 25 bp, Homo sapien
taagagagttaagaacctgacttac

SEQ ID NO: 5594473 - DNA, 25 bp, Homo sapien
tgcccgccactacacactgctaatt

SEQ ID NO: 5594474 - DNA, 25 bp, Homo sapien
ttcatttatatgggacttaagggat

SEQ ID NO: 5594475 - DNA, 25 bp, Homo sapien
gcctcccaagttcaactgatgatcc

SEQ ID NO: 5594476 - DNA, 25 bp, Homo sapien
gctaatttttgtatggatgaggttt

SEQ ID NO: 5594477 - DNA, 25 bp, Homo sapien
attcaattaacatatgcaaacttat

SEQ ID NO: 5594478 - DNA, 25 bp, Homo sapien
acctggccattatcaacattctaaa

SEQ ID NO: 5594479 - DNA, 25 bp, Homo sapien
gttcaactgatgatcccgcctcagc

SEQ ID NO: 5594480 - DNA, 25 bp, Homo sapien
ggtgcccgccactacacactgctaa

SEQ ID NO: 5594481 - DNA, 25 bp, Homo sapien
ttttaaacagtgattcagggcagca

SEQ ID NO: 5594482 - DNA, 25 bp, Homo sapien
aaaaagtaaatatacattgtagctt

SEQ ID NO: 5594483 - DNA, 25 bp, Homo sapien
tttgctagtgaatttctgctgtttt

SEQ ID NO: 5594484 - DNA, 25 bp, Homo sapien
cctgttatttggaaattacgccatt

SEQ ID NO: 5594485 - DNA, 25 bp, Homo sapien
agcatattgtgccagctagcatttt

SEQ ID NO: 5594486 - DNA, 25 bp, Homo sapien
ttagagcatcaagttatttttaaga

SEQ ID NO: 5594487 - DNA, 25 bp, Homo sapien
gattagtcacatattttaaggtgtt

SEQ ID NO: 5594488 - DNA, 25 bp, Homo sapien
attcagtaaatacctcaaaactaaa

SEQ ID NO: 5594489 - DNA, 25 bp, Homo sapien
aaccatgatgacacttcttaaattc

SEQ ID NO: 5594490 - DNA, 25 bp, Homo sapien
atattttgaaccatgatgacacttc

SEQ ID NO: 5594491 - DNA, 25 bp, Homo sapien
ccaacaaagcctatgtctttttgcc

SEQ ID NO: 5594492 - DNA, 25 bp, Homo sapien
agccgcgaggccgtgtcgtctctcg

SEQ ID NO: 5594493 - DNA, 25 bp, Homo sapien
cgagagacgacacggcctcgcggct

SEQ ID NO: 5594494 - DNA, 25 bp, Homo sapien
aaagatggtttgctataggactccc

SEQ ID NO: 5594495 - DNA, 25 bp, Homo sapien
ggactcccttagactagcaggctgc

SEQ ID NO: 5594496 - DNA, 25 bp, Homo sapien
ggcaaggcacacctcaactaggcag

SEQ ID NO: 5594497 - DNA, 25 bp, Homo sapien
agcaactgtccctaagaaagcctcc

SEQ ID NO: 5594498 - DNA, 25 bp, Homo sapien
gtagaggcataaaaccttttcagac

SEQ ID NO: 5594499 - DNA, 25 bp, Homo sapien
tatcacagactgtgaagggtagtgg

SEQ ID NO: 5594500 - DNA, 25 bp, Homo sapien
taatctattgtgcgaggcaaggcac

SEQ ID NO: 5594501 - DNA, 25 bp, Homo sapien
gtttaactgcaccagcaactgtccc

SEQ ID NO: 5594502 - DNA, 25 bp, Homo sapien
actatttgaaagcacaacagggtga

SEQ ID NO: 5594503 - DNA, 25 bp, Homo sapien
gaatagaagaatggctatcacagac

SEQ ID NO: 5594504 - DNA, 25 bp, Homo sapien
ccaacttggggatgcattaatctat

SEQ ID NO: 5594505 - DNA, 25 bp, Homo sapien
taataagtataaagtgaagcaggca

SEQ ID NO: 5594506 - DNA, 25 bp, Homo sapien
ttacactttttggcagcaacgggga

SEQ ID NO: 5594507 - DNA, 25 bp, Homo sapien
gacccagacccctccgatgctttgc

SEQ ID NO: 5594508 - DNA, 25 bp, Homo sapien
tttggaaatgttcgctgaaaggcag

SEQ ID NO: 5594509 - DNA, 25 bp, Homo sapien
caactgctgtacactggggcaaagt

SEQ ID NO: 5594510 - DNA, 25 bp, Homo sapien
ggacagtgctgcccctaacacctgc

SEQ ID NO: 5594511 - DNA, 25 bp, Homo sapien
tgaggaccctctaccagggacccag

SEQ ID NO: 5594512 - DNA, 25 bp, Homo sapien
cgtgcacattctgaaagcccgtacc

SEQ ID NO: 5594513 - DNA, 25 bp, Homo sapien
tggggatttttcagagtgttgcgga

SEQ ID NO: 5594514 - DNA, 25 bp, Homo sapien
ggggcaaagtcagaattcttgggga

SEQ ID NO: 5594515 - DNA, 25 bp, Homo sapien
gggcagcatttggatgaatggatag

SEQ ID NO: 5594516 - DNA, 25 bp, Homo sapien
gtcaaagggtatgctacacacagtt

SEQ ID NO: 5594517 - DNA, 25 bp, Homo sapien
aaatatgattactgggtcaaagggt

SEQ ID NO: 5594518 - DNA, 25 bp, Homo sapien
acacgagttgcagccagcatcctag

SEQ ID NO: 5594519 - DNA, 25 bp, Homo sapien
cccactacttctcctccgcgcggcc

SEQ ID NO: 5594520 - DNA, 25 bp, Homo sapien
gagctggtgacctcaaatctcggcc

SEQ ID NO: 5594521 - DNA, 25 bp, Homo sapien
atcctagttagcgtggatgcaggtg

SEQ ID NO: 5594522 - DNA, 25 bp, Homo sapien
ttttcttctgcgtagtctgtgactc

SEQ ID NO: 5594523 - DNA, 25 bp, Homo sapien
ctcggcgtctgtttgttccggacac

SEQ ID NO: 5594524 - DNA, 25 bp, Homo sapien
cggcctttgttggctcccctaggac

SEQ ID NO: 5594525 - DNA, 25 bp, Homo sapien
aacaacattaggctcagcctgggcc

SEQ ID NO: 5594526 - DNA, 25 bp, Homo sapien
cgcgcggccccaccttttcagagga

SEQ ID NO: 5594527 - DNA, 25 bp, Homo sapien
tacatgttggctgggttataatgat

SEQ ID NO: 5594528 - DNA, 25 bp, Homo sapien
acacaaatggatagctgaatgtgct

SEQ ID NO: 5594529 - DNA, 25 bp, Homo sapien
caggatatagacttgtaatcgcaac

SEQ ID NO: 5594530 - DNA, 25 bp, Homo sapien
atatggttgaaagagacatgaagag

SEQ ID NO: 5594531 - DNA, 25 bp, Homo sapien
caaattatcagtcaccaaaggttac

SEQ ID NO: 5594532 - DNA, 25 bp, Homo sapien
gattgatcatatggttgaaagagac

SEQ ID NO: 5594533 - DNA, 25 bp, Homo sapien
ttgcacttctacatgttggctgggt

SEQ ID NO: 5594534 - DNA, 25 bp, Homo sapien
ggacttgggagtgtacacaaatgga

SEQ ID NO: 5594535 - DNA, 25 bp, Homo sapien
tagaagcacctataagattagatat

SEQ ID NO: 5594536 - DNA, 25 bp, Homo sapien
atcgcaactcccaacaagttaggga

SEQ ID NO: 5594537 - DNA, 25 bp, Homo sapien
tttagcagttgaacagttgaaaatt

SEQ ID NO: 5594538 - DNA, 25 bp, Homo sapien
ctgattatcaacaacactggtgaac

SEQ ID NO: 5594539 - DNA, 25 bp, Homo sapien
cagttctctgaggttgggatcatta

SEQ ID NO: 5594540 - DNA, 25 bp, Homo sapien
atctttccctactgtccccatgccc

SEQ ID NO: 5594541 - DNA, 25 bp, Homo sapien
gtgagactctttgatatgcaccttc

SEQ ID NO: 5594542 - DNA, 25 bp, Homo sapien
gcatcattgcagttgagtcccgttt

SEQ ID NO: 5594543 - DNA, 25 bp, Homo sapien
acactggtgaacctccttggtatac

SEQ ID NO: 5594544 - DNA, 25 bp, Homo sapien
tgctccagcagagcatgtgagactc

SEQ ID NO: 5594545 - DNA, 25 bp, Homo sapien
ccccatgccccagtctccctcttcc

SEQ ID NO: 5594546 - DNA, 25 bp, Homo sapien
ccacagccgatttcctggtctactt

SEQ ID NO: 5594547 - DNA, 25 bp, Homo sapien
gaaaggtagaagaaaatgtgtatat

SEQ ID NO: 5594548 - DNA, 25 bp, Homo sapien
tctgggcacacttcctacaccctgc

SEQ ID NO: 5594549 - DNA, 25 bp, Homo sapien
aggagcagcattgcaacagtgtcgt

SEQ ID NO: 5594550 - DNA, 25 bp, Homo sapien
tttgaagtagcacgtgggattatat

SEQ ID NO: 5594551 - DNA, 25 bp, Homo sapien
tgtatacagggcagttgcaaaaaaa

SEQ ID NO: 5594552 - DNA, 25 bp, Homo sapien
cagtgtcgtgtatgagcaaaagtca

SEQ ID NO: 5594553 - DNA, 25 bp, Homo sapien
gtctcaggtacaagcaaaccagtcc

SEQ ID NO: 5594554 - DNA, 25 bp, Homo sapien
tccttagaagcaccaatcagtaaac

SEQ ID NO: 5594555 - DNA, 25 bp, Homo sapien
ggcaggaccaaactgatagtaggca

SEQ ID NO: 5594556 - DNA, 25 bp, Homo sapien
gcagttggtcctatagtgccaggta

SEQ ID NO: 5594557 - DNA, 25 bp, Homo sapien
cttgaagattcaatagcagttggtc

SEQ ID NO: 5594558 - DNA, 25 bp, Homo sapien
caaactgatagtaggcaacgtgtct

SEQ ID NO: 5594559 - DNA, 25 bp, Homo sapien
tgccaggtaagaactttgaagtagc

SEQ ID NO: 5594560 - DNA, 25 bp, Homo sapien
tcctcagaaagaagatcacagttac

SEQ ID NO: 5594561 - DNA, 25 bp, Homo sapien
aatggacaagttatgcatggaaaac

SEQ ID NO: 5594562 - DNA, 25 bp, Homo sapien
cccctgcaacagttggctgactgcc

SEQ ID NO: 5594563 - DNA, 25 bp, Homo sapien
caggacccattagagtgcccacaga

SEQ ID NO: 5594564 - DNA, 25 bp, Homo sapien
gctgactgccaaactgttgagaaac

SEQ ID NO: 5594565 - DNA, 25 bp, Homo sapien
acagttactggtgaatggacaagtt

SEQ ID NO: 5594566 - DNA, 25 bp, Homo sapien
ctgaggaactcagagcctcacggaa

SEQ ID NO: 5594567 - DNA, 25 bp, Homo sapien
ataatgatttggggagttccagagg

SEQ ID NO: 5594568 - DNA, 25 bp, Homo sapien
actaagatgacaggtaccatactgc

SEQ ID NO: 5594569 - DNA, 25 bp, Homo sapien
gattgcacaggcatgtctgcactcc

SEQ ID NO: 5594570 - DNA, 25 bp, Homo sapien
tgcccacagaaagaagttgggttgc

SEQ ID NO: 5594571 - DNA, 25 bp, Homo sapien
gcgttcggcaggcaaataactttct

SEQ ID NO: 5594572 - DNA, 25 bp, Homo sapien
cctaactcagaaaaaggtagaggag

SEQ ID NO: 5594573 - DNA, 25 bp, Homo sapien
tctcatgtctgtgcgttcggcaggc

SEQ ID NO: 5594574 - DNA, 25 bp, Homo sapien
cctggtacacaattctatggagagc

SEQ ID NO: 5594575 - DNA, 25 bp, Homo sapien
tatggagagcaaaacgtttcaaact

SEQ ID NO: 5594576 - DNA, 25 bp, Homo sapien
cagtagctcaatgatgtcatgatgc

SEQ ID NO: 5594577 - DNA, 25 bp, Homo sapien
agcagcaatagatacgtgaacctcg

SEQ ID NO: 5594578 - DNA, 25 bp, Homo sapien
cttaaaaccgaggtgtaacaggatg

SEQ ID NO: 5594579 - DNA, 25 bp, Homo sapien
gtctatgataaaaagagccaagcat

SEQ ID NO: 5594580 - DNA, 25 bp, Homo sapien
gtgaacctcgtgggatttgacctcc

SEQ ID NO: 5594581 - DNA, 25 bp, Homo sapien
tccaacatggaaaacgctttacctg

SEQ ID NO: 5594582 - DNA, 25 bp, Homo sapien
acagaggcacagaacgctattctct

SEQ ID NO: 5594583 - DNA, 25 bp, Homo sapien
gcaacaactgcaggaaaatgcagcc

SEQ ID NO: 5594584 - DNA, 25 bp, Homo sapien
gggtacaacaaggaccctcaggagc

SEQ ID NO: 5594585 - DNA, 25 bp, Homo sapien
ccacaagtcaggaatggagctttca

SEQ ID NO: 5594586 - DNA, 25 bp, Homo sapien
tcaggagcctgaatcttgtgcacta

SEQ ID NO: 5594587 - DNA, 25 bp, Homo sapien
caaatatgagcaattagcaaggcaa

SEQ ID NO: 5594588 - DNA, 25 bp, Homo sapien
agcaaggcaaatgtgtaagatgaca

SEQ ID NO: 5594589 - DNA, 25 bp, Homo sapien
tttggtgcttagggtacaacaagga

SEQ ID NO: 5594590 - DNA, 25 bp, Homo sapien
tcttgaacaaactgacagagggtat

SEQ ID NO: 5594591 - DNA, 25 bp, Homo sapien
tgtgtacaaaaaagacaagggagta

SEQ ID NO: 5594592 - DNA, 25 bp, Homo sapien
tcactggcaagtgtatgcacctgct

SEQ ID NO: 5594593 - DNA, 25 bp, Homo sapien
gaaacaggtaagattatatcaaaaa

SEQ ID NO: 5594594 - DNA, 25 bp, Homo sapien
tttttgatataatcttacctgtttc

SEQ ID NO: 5594595 - DNA, 25 bp, Homo sapien
atcagggcattctgcagatactaac

SEQ ID NO: 5594596 - DNA, 25 bp, Homo sapien
ttatgtagcccgtaaattttcactc

SEQ ID NO: 5594597 - DNA, 25 bp, Homo sapien
acttcccattgtcttgtgcgcatac

SEQ ID NO: 5594598 - DNA, 25 bp, Homo sapien
gtgcgcatactaatgtcacaacatt

SEQ ID NO: 5594599 - DNA, 25 bp, Homo sapien
acaacagaaagactggaatcacttc

SEQ ID NO: 5594600 - DNA, 25 bp, Homo sapien
tataccaaattgacacatagggtta

SEQ ID NO: 5594601 - DNA, 25 bp, Homo sapien
tacaggaatcctagttcgtacttcc

SEQ ID NO: 5594602 - DNA, 25 bp, Homo sapien
gaataacaacagaaagactggaatc

SEQ ID NO: 5594603 - DNA, 25 bp, Homo sapien
aaatagctaaaacatcggaataaca

SEQ ID NO: 5594604 - DNA, 25 bp, Homo sapien
ctcaagtaacacatggaagaaacgg

SEQ ID NO: 5594605 - DNA, 25 bp, Homo sapien
atccaattatgtagaaaggcaatga

SEQ ID NO: 5594606 - DNA, 25 bp, Homo sapien
tgccaggcaccctgttaggcagtga

SEQ ID NO: 5594607 - DNA, 25 bp, Homo sapien
gtgagagtgactatgacaaatgtgg

SEQ ID NO: 5594608 - DNA, 25 bp, Homo sapien
tggaattagaagcaaaaaaagtgag

SEQ ID NO: 5594609 - DNA, 25 bp, Homo sapien
agagtcagaaaggcatctaaaccca

SEQ ID NO: 5594610 - DNA, 25 bp, Homo sapien
catagctgagctccataaacatgca

SEQ ID NO: 5594611 - DNA, 25 bp, Homo sapien
acctgtgaagaggttttgtcaactc

SEQ ID NO: 5594612 - DNA, 25 bp, Homo sapien
tatcagaggtatgatgacagaagtg

SEQ ID NO: 5594613 - DNA, 25 bp, Homo sapien
atcaaatgcaggatgacaatgtacc

SEQ ID NO: 5594614 - DNA, 25 bp, Homo sapien
tgaagcatgaaatgcggaggattaa

SEQ ID NO: 5594615 - DNA, 25 bp, Homo sapien
aatgtggttcctgttcctagtgggg

SEQ ID NO: 5594616 - DNA, 25 bp, Homo sapien
tgttgtcccaacttatgccaggcac

SEQ ID NO: 5594617 - DNA, 25 bp, Homo sapien
cctgaaactcactgccctgggatcc

SEQ ID NO: 5594618 - DNA, 25 bp, Homo sapien
aaggcaacgtggcaacgtctgctta

SEQ ID NO: 5594619 - DNA, 25 bp, Homo sapien
aggccagcaccgatgcttgtccagt

SEQ ID NO: 5594620 - DNA, 25 bp, Homo sapien
gtcaatacacacatcctgagggaac

SEQ ID NO: 5594621 - DNA, 25 bp, Homo sapien
atgaacagatgtttcacggaaatac

SEQ ID NO: 5594622 - DNA, 25 bp, Homo sapien
gaatggcaaagattaaactggctgt

SEQ ID NO: 5594623 - DNA, 25 bp, Homo sapien
atcctgccatccaaacacggggact

SEQ ID NO: 5594624 - DNA, 25 bp, Homo sapien
ctgagggaacagaattttcaagcaa

SEQ ID NO: 5594625 - DNA, 25 bp, Homo sapien
cttgtccagtaggattgaaggcaac

SEQ ID NO: 5594626 - DNA, 25 bp, Homo sapien
gcgtgtgagacctgtctgagcttgt

SEQ ID NO: 5594627 - DNA, 25 bp, Homo sapien
tatagaaaatcggcaagggatatga

SEQ ID NO: 5594628 - DNA, 25 bp, Homo sapien
gaagtgcaccaaaagagctgaaagt

SEQ ID NO: 5594629 - DNA, 25 bp, Homo sapien
ccaaaagagctgaaagttaaaagaa

SEQ ID NO: 5594630 - DNA, 25 bp, Homo sapien
actcaccctaatagtggtctgcttc

SEQ ID NO: 5594631 - DNA, 25 bp, Homo sapien
taatgtgttttgggtgcaaatccca

SEQ ID NO: 5594632 - DNA, 25 bp, Homo sapien
ttatgctccctctacccactcaccc

SEQ ID NO: 5594633 - DNA, 25 bp, Homo sapien
tttaggaatggcttacttcacctta

SEQ ID NO: 5594634 - DNA, 25 bp, Homo sapien
tcctacaaccatgaggtggaaaggg

SEQ ID NO: 5594635 - DNA, 25 bp, Homo sapien
attttatccagaacagaagtgcacc

SEQ ID NO: 5594636 - DNA, 25 bp, Homo sapien
gaaatgttcagtagatgagacctat

SEQ ID NO: 5594637 - DNA, 25 bp, Homo sapien
gcagggaagcctaagctcatttgta

SEQ ID NO: 5594638 - DNA, 25 bp, Homo sapien
ttcggcaacagatacaagacaaact

SEQ ID NO: 5594639 - DNA, 25 bp, Homo sapien
tggggaccataatgatacctatttc

SEQ ID NO: 5594640 - DNA, 25 bp, Homo sapien
tagaaagttataaagagcacagcac

SEQ ID NO: 5594641 - DNA, 25 bp, Homo sapien
ggcataatgccataggatgagtttc

SEQ ID NO: 5594642 - DNA, 25 bp, Homo sapien
gcacagcacatgaagtcacttggga

SEQ ID NO: 5594643 - DNA, 25 bp, Homo sapien
gagaaactatgtgaagtaaagattt

SEQ ID NO: 5594644 - DNA, 25 bp, Homo sapien
atgtaccaagcaaaaagaaagagac

SEQ ID NO: 5594645 - DNA, 25 bp, Homo sapien
ggaaacagggtagtctctgatgtac

SEQ ID NO: 5594646 - DNA, 25 bp, Homo sapien
gaaatgaaaatggtgatagaaagtt

SEQ ID NO: 5594647 - DNA, 25 bp, Homo sapien
tgccttaaatggaaacagggtagtc

SEQ ID NO: 5594648 - DNA, 25 bp, Homo sapien
tgctttgcacagtgactggcacatc

SEQ ID NO: 5594649 - DNA, 25 bp, Homo sapien
cacagaatcgtgatgagaatccaat

SEQ ID NO: 5594650 - DNA, 25 bp, Homo sapien
catctgtaagggctctttaaatagt

SEQ ID NO: 5594651 - DNA, 25 bp, Homo sapien
gacaaactgccattacaaaaaagga

SEQ ID NO: 5594652 - DNA, 25 bp, Homo sapien
tttagtcctgtgagaactgctggct

SEQ ID NO: 5594653 - DNA, 25 bp, Homo sapien
tagtaagaatgttgaccccttgtca

SEQ ID NO: 5594654 - DNA, 25 bp, Homo sapien
ctgcattctactgaggtgttggggt

SEQ ID NO: 5594655 - DNA, 25 bp, Homo sapien
ttctatttagtcaaacggatcactt

SEQ ID NO: 5594656 - DNA, 25 bp, Homo sapien
ctgacactgtaaaaatgccagccta

SEQ ID NO: 5594657 - DNA, 25 bp, Homo sapien
tttgctaacccaccctgacactgta

SEQ ID NO: 5594658 - DNA, 25 bp, Homo sapien
tctgatatcatgtctttgctaaccc

SEQ ID NO: 5594659 - DNA, 25 bp, Homo sapien
aacggatcactttattttctgcttc

SEQ ID NO: 5594660 - DNA, 25 bp, Homo sapien
tatatttagtcctgtgagaactgct

SEQ ID NO: 5594661 - DNA, 25 bp, Homo sapien
ccaggaaacctgactctaagtagac

SEQ ID NO: 5594662 - DNA, 25 bp, Homo sapien
gttctttacaccagccaggacctga

SEQ ID NO: 5594663 - DNA, 25 bp, Homo sapien
aagtagacagccttttagcattccc

SEQ ID NO: 5594664 - DNA, 25 bp, Homo sapien
cacctatgggaaggcagtttgaata

SEQ ID NO: 5594665 - DNA, 25 bp, Homo sapien
acactgaaccaaaaataagaagacc

SEQ ID NO: 5594666 - DNA, 25 bp, Homo sapien
tccccgtcctgcagtacaagggtgt

SEQ ID NO: 5594667 - DNA, 25 bp, Homo sapien
gcagtttgaataacaggcccagtct

SEQ ID NO: 5594668 - DNA, 25 bp, Homo sapien
ataagaagacctaggttccattccc

SEQ ID NO: 5594669 - DNA, 25 bp, Homo sapien
tacaagggtgtgtgaacttaagttc

SEQ ID NO: 5594670 - DNA, 25 bp, Homo sapien
ttccataactatcaggcacaaaacc

SEQ ID NO: 5594671 - DNA, 25 bp, Homo sapien
aagataagctgtttgtaagtccttc

SEQ ID NO: 5594672 - DNA, 25 bp, Homo sapien
atcacctgaggccaggagttcgaaa

SEQ ID NO: 5594673 - DNA, 25 bp, Homo sapien
gagttcgaaaccagcctaggcaaca

SEQ ID NO: 5594674 - DNA, 25 bp, Homo sapien
cttctacaggcttaggcaagaggat

SEQ ID NO: 5594675 - DNA, 25 bp, Homo sapien
aaaaaatttagctggatgtggtgac

SEQ ID NO: 5594676 - DNA, 25 bp, Homo sapien
gaggatctcctgagcccaggagttc

SEQ ID NO: 5594677 - DNA, 25 bp, Homo sapien
ggatgtggtgacacacacctgtccc

SEQ ID NO: 5594678 - DNA, 25 bp, Homo sapien
gccaggcctggtgactcatgcctat

SEQ ID NO: 5594679 - DNA, 25 bp, Homo sapien
atctagcacttctacaggcttaggc

SEQ ID NO: 5594680 - DNA, 25 bp, Homo sapien
agagaacattttcaaaagccttgca

SEQ ID NO: 5594681 - DNA, 25 bp, Homo sapien
ctagcttattaaaagggccaggcct

SEQ ID NO: 5594682 - DNA, 25 bp, Homo sapien
acattcaaaaaccaaagagaacatt

SEQ ID NO: 5594683 - DNA, 25 bp, Homo sapien
actcaggtatatgtacagaaattgc

SEQ ID NO: 5594684 - DNA, 25 bp, Homo sapien
ggatgaggatacacacacacacaca

SEQ ID NO: 5594685 - DNA, 25 bp, Homo sapien
cagaaattcaaatgctccaaagtcc

SEQ ID NO: 5594686 - DNA, 25 bp, Homo sapien
cagactgagtttccaaagttagggt

SEQ ID NO: 5594687 - DNA, 25 bp, Homo sapien
attaatagctgagagtagagacttg

SEQ ID NO: 5594688 - DNA, 25 bp, Homo sapien
tttgaaaggaaaattgacatcatca

SEQ ID NO: 5594689 - DNA, 25 bp, Homo sapien
acaatgaaagaaaaggtggcttatt

SEQ ID NO: 5594690 - DNA, 25 bp, Homo sapien
ttctgacccaccaacatgactgatg

SEQ ID NO: 5594691 - DNA, 25 bp, Homo sapien
caaagttagggtacaatgaaagaaa

SEQ ID NO: 5594692 - DNA, 25 bp, Homo sapien
caagcaatcctcgcaacatcattaa

SEQ ID NO: 5594693 - DNA, 25 bp, Homo sapien
ttccaagagttgaaaaggatgagga

SEQ ID NO: 5594694 - DNA, 25 bp, Homo sapien
ccctgaaatcacgccagactctgtc

SEQ ID NO: 5594695 - DNA, 25 bp, Homo sapien
cgtttctcctccacgcttgagcctc

SEQ ID NO: 5594696 - DNA, 25 bp, Homo sapien
aaagggctgttttccctggtccagc

SEQ ID NO: 5594697 - DNA, 25 bp, Homo sapien
tccacgcttgagcctcagggatgtg

SEQ ID NO: 5594698 - DNA, 25 bp, Homo sapien
aaagccgaattcggtgctcaggacc

SEQ ID NO: 5594699 - DNA, 25 bp, Homo sapien
gactctgtcctcaaaagccgaattc

SEQ ID NO: 5594700 - DNA, 25 bp, Homo sapien
cctgtgaggtctccattgcccccac

SEQ ID NO: 5594701 - DNA, 25 bp, Homo sapien
ggcgctgcctgctgcttacttctgc

SEQ ID NO: 5594702 - DNA, 25 bp, Homo sapien
tccagcagctggctttattaggcag

SEQ ID NO: 5594703 - DNA, 25 bp, Homo sapien
agtgcttgccctgtgaggtctccat

SEQ ID NO: 5594704 - DNA, 25 bp, Homo sapien
agcactcctgccgttttggggaggg

SEQ ID NO: 5594705 - DNA, 25 bp, Homo sapien
aggaaatatcatgtacagctttaac

SEQ ID NO: 5594706 - DNA, 25 bp, Homo sapien
tatagctcaggtcgactgtgttgtc

SEQ ID NO: 5594707 - DNA, 25 bp, Homo sapien
cagccagcatgtcttatgttatagc

SEQ ID NO: 5594708 - DNA, 25 bp, Homo sapien
catttgtccacccacccttgcagcc

SEQ ID NO: 5594709 - DNA, 25 bp, Homo sapien
tttagaggttgctttaggaaatatc

SEQ ID NO: 5594710 - DNA, 25 bp, Homo sapien
catgtaggtccatttgtccacccac

SEQ ID NO: 5594711 - DNA, 25 bp, Homo sapien
tagaaaacttgcaaccatgtaggtc

SEQ ID NO: 5594712 - DNA, 25 bp, Homo sapien
ctcatgtaaaatatagaaaacttgc

SEQ ID NO: 5594713 - DNA, 25 bp, Homo sapien
atccattgtgggtattgtaaagaaa

SEQ ID NO: 5594714 - DNA, 25 bp, Homo sapien
attagaaactccataagactgttac

SEQ ID NO: 5594715 - DNA, 25 bp, Homo sapien
atgttatagccgtcatgtgaatttc

SEQ ID NO: 5594716 - DNA, 25 bp, Homo sapien
caaggaggctaatctgtcccacagc

SEQ ID NO: 5594717 - DNA, 25 bp, Homo sapien
tgcacatgtcttacagaaggaaaac

SEQ ID NO: 5594718 - DNA, 25 bp, Homo sapien
gtgaaaaacacaagttgcacatgtc

SEQ ID NO: 5594719 - DNA, 25 bp, Homo sapien
ttaacactgaacacagattctcacc

SEQ ID NO: 5594720 - DNA, 25 bp, Homo sapien
catctgctctttgtcctgaggctcc

SEQ ID NO: 5594721 - DNA, 25 bp, Homo sapien
caatcatgaaaaacaaagtagctct

SEQ ID NO: 5594722 - DNA, 25 bp, Homo sapien
ttaggaaaatttcatcaggcaattc

SEQ ID NO: 5594723 - DNA, 25 bp, Homo sapien
ttgaaggcacaatcatgaaaaacaa

SEQ ID NO: 5594724 - DNA, 25 bp, Homo sapien
gtcctgaggctccaatagaaataca

SEQ ID NO: 5594725 - DNA, 25 bp, Homo sapien
aagtagctctatatgcattaagtcc

SEQ ID NO: 5594726 - DNA, 25 bp, Homo sapien
aatacagtgaagaataaacattgta

SEQ ID NO: 5594727 - DNA, 25 bp, Homo sapien
gatgagcccttagacagcccctggg

SEQ ID NO: 5594728 - DNA, 25 bp, Homo sapien
ttactttaggtactggcaggagtgg

SEQ ID NO: 5594729 - DNA, 25 bp, Homo sapien
aattatttcaaagtcaggggaagtc

SEQ ID NO: 5594730 - DNA, 25 bp, Homo sapien
actggtctagttactgagatgatac

SEQ ID NO: 5594731 - DNA, 25 bp, Homo sapien
acaatgtgccaagcccgtgtagatt

SEQ ID NO: 5594732 - DNA, 25 bp, Homo sapien
tgggttccaagctggggcttatttc

SEQ ID NO: 5594733 - DNA, 25 bp, Homo sapien
gaagtcggatatggtactggtctag

SEQ ID NO: 5594734 - DNA, 25 bp, Homo sapien
agggaagcgcacctgattgcaggtg

SEQ ID NO: 5594735 - DNA, 25 bp, Homo sapien
ctgatttttggcaggaccacggaga

SEQ ID NO: 5594736 - DNA, 25 bp, Homo sapien
cctcagttgagatagaagcaaatat

SEQ ID NO: 5594737 - DNA, 25 bp, Homo sapien
ggaccacaaccggaaattacagctc

SEQ ID NO: 5594738 - DNA, 25 bp, Homo sapien
ctcacagtagagcaagttccatggc

SEQ ID NO: 5594739 - DNA, 25 bp, Homo sapien
ccatggcttaagaactgagtcaacc

SEQ ID NO: 5594740 - DNA, 25 bp, Homo sapien
ctcaactctgggctctcgactatcc

SEQ ID NO: 5594741 - DNA, 25 bp, Homo sapien
tgaatatcaggaaactaaacttagt

SEQ ID NO: 5594742 - DNA, 25 bp, Homo sapien
gaattaaatgacctagtgaatggga

SEQ ID NO: 5594743 - DNA, 25 bp, Homo sapien
aattcgtgcagcagtcttgagaggt

SEQ ID NO: 5594744 - DNA, 25 bp, Homo sapien
ctgttgctgacctccttccctcctc

SEQ ID NO: 5594745 - DNA, 25 bp, Homo sapien
taattctggaggtcgactaaggaat

SEQ ID NO: 5594746 - DNA, 25 bp, Homo sapien
agtatgtcgtgatacaagtactcac

SEQ ID NO: 5594747 - DNA, 25 bp, Homo sapien
gagtcaaccaattcgtgcagcagtc

SEQ ID NO: 5594748 - DNA, 25 bp, Homo sapien
ccactatgagttccctgttgctgac

SEQ ID NO: 5594749 - DNA, 25 bp, Homo sapien
aattttaaatgttggaggtggttca

SEQ ID NO: 5594750 - DNA, 25 bp, Homo sapien
tcacgcctctctactaaactgcagc

SEQ ID NO: 5594751 - DNA, 25 bp, Homo sapien
gtaacattatgaccacacagtgctc

SEQ ID NO: 5594752 - DNA, 25 bp, Homo sapien
cacagaaagccaatccatgaatcca

SEQ ID NO: 5594753 - DNA, 25 bp, Homo sapien
ggtggattaagtgctgcttaaatac

SEQ ID NO: 5594754 - DNA, 25 bp, Homo sapien
tggaggtggttcaaaattctaaaga

SEQ ID NO: 5594755 - DNA, 25 bp, Homo sapien
actcaatggggcaactttcctgtgt

SEQ ID NO: 5594756 - DNA, 25 bp, Homo sapien
tttgatgttgctagacactgtccat

SEQ ID NO: 5594757 - DNA, 25 bp, Homo sapien
tgcacgtttaagaccccaaagatac

SEQ ID NO: 5594758 - DNA, 25 bp, Homo sapien
ttagaagcaagcagtgtgttagaat

SEQ ID NO: 5594759 - DNA, 25 bp, Homo sapien
aaaacccacaaagcataattgcatc

SEQ ID NO: 5594760 - DNA, 25 bp, Homo sapien
tgggtgtagtccaggatgatctcat

SEQ ID NO: 5594761 - DNA, 25 bp, Homo sapien
ttaaggacacttatcattgggtgta

SEQ ID NO: 5594762 - DNA, 25 bp, Homo sapien
tttattcttcacaatctggggccca

SEQ ID NO: 5594763 - DNA, 25 bp, Homo sapien
tgtgttggcaggaattcactccctc

SEQ ID NO: 5594764 - DNA, 25 bp, Homo sapien
attagcttcctagggcttctgtaac

SEQ ID NO: 5594765 - DNA, 25 bp, Homo sapien
tatcattgggtgtagtccaggatga

SEQ ID NO: 5594766 - DNA, 25 bp, Homo sapien
gaaatttatgtgttggcaggaattc

SEQ ID NO: 5594767 - DNA, 25 bp, Homo sapien
atttaaagctgaatataacaagtgc

SEQ ID NO: 5594768 - DNA, 25 bp, Homo sapien
caaatgtccacaaactgagtggctt

SEQ ID NO: 5594769 - DNA, 25 bp, Homo sapien
gcattccaggtgcctatatccctcc

SEQ ID NO: 5594770 - DNA, 25 bp, Homo sapien
ttaacacaacttgggaaagcaggtg

SEQ ID NO: 5594771 - DNA, 25 bp, Homo sapien
atggtattaatgttggaacctcccc

SEQ ID NO: 5594772 - DNA, 25 bp, Homo sapien
gagtcaagtgtatgcaacagccgta

SEQ ID NO: 5594773 - DNA, 25 bp, Homo sapien
gtggaggaacgatcattgcatacta

SEQ ID NO: 5594774 - DNA, 25 bp, Homo sapien
gtcataggggagaataatgaatgaa

SEQ ID NO: 5594775 - DNA, 25 bp, Homo sapien
cagcccaaatcataccacatccaac

SEQ ID NO: 5594776 - DNA, 25 bp, Homo sapien
cagaagtaatgagaagataaaattt

SEQ ID NO: 5594777 - DNA, 25 bp, Homo sapien
ggcgcccaccattgtgcctagcttt

SEQ ID NO: 5594778 - DNA, 25 bp, Homo sapien
ggatccacagcaccaggagttggtt

SEQ ID NO: 5594779 - DNA, 25 bp, Homo sapien
cctaagaagctgtgactataggcgc

SEQ ID NO: 5594780 - DNA, 25 bp, Homo sapien
catggggaattacaataacaggtac

SEQ ID NO: 5594781 - DNA, 25 bp, Homo sapien
ttacatacaaacagggcaaataagc

SEQ ID NO: 5594782 - DNA, 25 bp, Homo sapien
ccttcccggttagccagctgctgga

SEQ ID NO: 5594783 - DNA, 25 bp, Homo sapien
tcacagtgtgccgggtgtctttgta

SEQ ID NO: 5594784 - DNA, 25 bp, Homo sapien
aggaatgcacaaatcaacacagcgc

SEQ ID NO: 5594785 - DNA, 25 bp, Homo sapien
tgtctttgtaagttcgtccctcgtc

SEQ ID NO: 5594786 - DNA, 25 bp, Homo sapien
gtacctgtgcctacaggggaactga

SEQ ID NO: 5594787 - DNA, 25 bp, Homo sapien
cggctgggatgtgaagctaatttag

SEQ ID NO: 5594788 - DNA, 25 bp, Homo sapien
ttcaggaagagtaaagcatgtcttc

SEQ ID NO: 5594789 - DNA, 25 bp, Homo sapien
cccagttaaggattgtcacagtgtg

SEQ ID NO: 5594790 - DNA, 25 bp, Homo sapien
caacacagcgctcaaattaaatctc

SEQ ID NO: 5594791 - DNA, 25 bp, Homo sapien
cttcttgaggggcttaagtatcttc

SEQ ID NO: 5594792 - DNA, 25 bp, Homo sapien
acaagaggctgatatatgtgtacct

SEQ ID NO: 5594793 - DNA, 25 bp, Homo sapien
tactgaaatgaccagaatggatata

SEQ ID NO: 5594794 - DNA, 25 bp, Homo sapien
cctgaatggccaggagatttgctaa

SEQ ID NO: 5594795 - DNA, 25 bp, Homo sapien
ctgagcccagctccctaagcctagt

SEQ ID NO: 5594796 - DNA, 25 bp, Homo sapien
cacagatggaaatagtagtttatac

SEQ ID NO: 5594797 - DNA, 25 bp, Homo sapien
agaaattacacaagcgagatggaaa

SEQ ID NO: 5594798 - DNA, 25 bp, Homo sapien
agtttatacttgggatggtgctcgg

SEQ ID NO: 5594799 - DNA, 25 bp, Homo sapien
ttaggacttgaatgagtggtgataa

SEQ ID NO: 5594800 - DNA, 25 bp, Homo sapien
atggatataaaatgtggctgcataa

SEQ ID NO: 5594801 - DNA, 25 bp, Homo sapien
agggtaaaaatggttcagaccatcc

SEQ ID NO: 5594802 - DNA, 25 bp, Homo sapien
tctcagcgctggtaataattaggac

SEQ ID NO: 5594803 - DNA, 25 bp, Homo sapien
agatcaagatcaggcctctggcctc

SEQ ID NO: 5594804 - DNA, 25 bp, Homo sapien
tgatctacagtactatggaaaaatg

SEQ ID NO: 5594805 - DNA, 25 bp, Homo sapien
ttccttcctgcccttgtaatcaacc

SEQ ID NO: 5594806 - DNA, 25 bp, Homo sapien
agatgcagaactgtagaatcacact

SEQ ID NO: 5594807 - DNA, 25 bp, Homo sapien
ccaaggaactcactgacctgttttt

SEQ ID NO: 5594808 - DNA, 25 bp, Homo sapien
atatttaagaatatactgctgggta

SEQ ID NO: 5594809 - DNA, 25 bp, Homo sapien
gatgtgcggacattcaaagtccacc

SEQ ID NO: 5594810 - DNA, 25 bp, Homo sapien
acaaacgcacagtcataccataatc

SEQ ID NO: 5594811 - DNA, 25 bp, Homo sapien
attttactacagatgtgcggacatt

SEQ ID NO: 5594812 - DNA, 25 bp, Homo sapien
ttagcataccaacaaaaaatgaagg

SEQ ID NO: 5594813 - DNA, 25 bp, Homo sapien
gtcgtatatatggctcaacagtaat

SEQ ID NO: 5594814 - DNA, 25 bp, Homo sapien
gttaaggtttgacaaacgcacagtc

SEQ ID NO: 5594815 - DNA, 25 bp, Homo sapien
tcaaactgaagtctgctgggtgtaa

SEQ ID NO: 5594816 - DNA, 25 bp, Homo sapien
gctgtaaatggcccagtgcgccaca

SEQ ID NO: 5594817 - DNA, 25 bp, Homo sapien
gtaaacacagtcgtgaaaaagaata

SEQ ID NO: 5594818 - DNA, 25 bp, Homo sapien
ggtgtaactggatcccacgaaggag

SEQ ID NO: 5594819 - DNA, 25 bp, Homo sapien
gccacatcagtggctgcggtaacac

SEQ ID NO: 5594820 - DNA, 25 bp, Homo sapien
gtctccttaagcaggtggacttgtt

SEQ ID NO: 5594821 - DNA, 25 bp, Homo sapien
ttggagcttcctccaaggcaagggc

SEQ ID NO: 5594822 - DNA, 25 bp, Homo sapien
aaaaagaatatcatgaggcagctgt

SEQ ID NO: 5594823 - DNA, 25 bp, Homo sapien
ggtcacagtgcggcagtctccttaa

SEQ ID NO: 5594824 - DNA, 25 bp, Homo sapien
acacttgccacagatgtccggagga

SEQ ID NO: 5594825 - DNA, 25 bp, Homo sapien
cagcctggcgggttaatctcccggt

SEQ ID NO: 5594826 - DNA, 25 bp, Homo sapien
gaagtagacaaggctcagatgttga

SEQ ID NO: 5594827 - DNA, 25 bp, Homo sapien
tcccttacagggctactgcacagtc

SEQ ID NO: 5594828 - DNA, 25 bp, Homo sapien
ccatcaaaggggacaataatatgtc

SEQ ID NO: 5594829 - DNA, 25 bp, Homo sapien
ataaaggagaacaactgtagcatcc

SEQ ID NO: 5594830 - DNA, 25 bp, Homo sapien
gtaagctcagatgtacataaaggag

SEQ ID NO: 5594831 - DNA, 25 bp, Homo sapien
catggtttaggcttccagcacatat

SEQ ID NO: 5594832 - DNA, 25 bp, Homo sapien
tccacacctgagggtaagcccaaga

SEQ ID NO: 5594833 - DNA, 25 bp, Homo sapien
ccaagatcctcaatgtaagctcaga

SEQ ID NO: 5594834 - DNA, 25 bp, Homo sapien
agatgaaagccaatcagctagggga

SEQ ID NO: 5594835 - DNA, 25 bp, Homo sapien
aggctcagatgttgagaggtgttct

SEQ ID NO: 5594836 - DNA, 25 bp, Homo sapien
aggaactatgattatgcccccagct

SEQ ID NO: 5594837 - DNA, 25 bp, Homo sapien
tgtggtggggtatacttcaattaac

SEQ ID NO: 5594838 - DNA, 25 bp, Homo sapien
atgcaagaatgtatcaaacacttcc

SEQ ID NO: 5594839 - DNA, 25 bp, Homo sapien
aacatcagaggccaataaaaaattt

SEQ ID NO: 5594840 - DNA, 25 bp, Homo sapien
tttcagatatacttagggtactaac

SEQ ID NO: 5594841 - DNA, 25 bp, Homo sapien
aggaagagtccagtgtctttaagag

SEQ ID NO: 5594842 - DNA, 25 bp, Homo sapien
tataggatagtgatctaaacagaac

SEQ ID NO: 5594843 - DNA, 25 bp, Homo sapien
ctaaacagaacatcagaggccaata

SEQ ID NO: 5594844 - DNA, 25 bp, Homo sapien
ttcaattaacaggtaaatgcaaaaa

SEQ ID NO: 5594845 - DNA, 25 bp, Homo sapien
atagactataccatctggaatgcca

SEQ ID NO: 5594846 - DNA, 25 bp, Homo sapien
caaccagaggacattttgaatctat

SEQ ID NO: 5594847 - DNA, 25 bp, Homo sapien
agaggaacttttatatgtggtgggg

SEQ ID NO: 5594848 - DNA, 25 bp, Homo sapien
acatatacacgtggaaaaattaaaa

SEQ ID NO: 5594849 - DNA, 25 bp, Homo sapien
tatattaagtaatgaggaaactgag

SEQ ID NO: 5594850 - DNA, 25 bp, Homo sapien
tacccagcatcagagcccatattcc

SEQ ID NO: 5594851 - DNA, 25 bp, Homo sapien
aagggtgacagcatagtactttacc

SEQ ID NO: 5594852 - DNA, 25 bp, Homo sapien
actgaggcataaagtagctaaggat

SEQ ID NO: 5594853 - DNA, 25 bp, Homo sapien
ttgaacccaggtctacccagcatca

SEQ ID NO: 5594854 - DNA, 25 bp, Homo sapien
acattcgacttaagggtgacagcat

SEQ ID NO: 5594855 - DNA, 25 bp, Homo sapien
aggcacaaacattcgacttaagggt

SEQ ID NO: 5594856 - DNA, 25 bp, Homo sapien
gaaggattcccacaaaacaagacaa

SEQ ID NO: 5594857 - DNA, 25 bp, Homo sapien
aagtagctaaggattttgttcaaag

SEQ ID NO: 5594858 - DNA, 25 bp, Homo sapien
cgcccgaccacaagtaggtgtttta

SEQ ID NO: 5594859 - DNA, 25 bp, Homo sapien
tccatcctacccacacagccttgcc

SEQ ID NO: 5594860 - DNA, 25 bp, Homo sapien
acaaagtaaaactgtgtgcacatgt

SEQ ID NO: 5594861 - DNA, 25 bp, Homo sapien
cagcaacattcccaccattccatcc

SEQ ID NO: 5594862 - DNA, 25 bp, Homo sapien
tcttgatggtagaattactggcaat

SEQ ID NO: 5594863 - DNA, 25 bp, Homo sapien
accagaacctgattggaagaaacgg

SEQ ID NO: 5594864 - DNA, 25 bp, Homo sapien
atccatgctgattcccgtacggttc

SEQ ID NO: 5594865 - DNA, 25 bp, Homo sapien
caatacaagcttaggccatccatgc

SEQ ID NO: 5594866 - DNA, 25 bp, Homo sapien
cacacagccttgccaccattagcac

SEQ ID NO: 5594867 - DNA, 25 bp, Homo sapien
tctggaatgaacatgtagtaccttc

SEQ ID NO: 5594868 - DNA, 25 bp, Homo sapien
gaagaaacggcacccaaccatcata

SEQ ID NO: 5594869 - DNA, 25 bp, Homo sapien
tgtatatgtgggtatctatgtgtac

SEQ ID NO: 5594870 - DNA, 25 bp, Homo sapien
ccagctgtgatcaaggtcctgaatc

SEQ ID NO: 5594871 - DNA, 25 bp, Homo sapien
ggtcctgaatcccaggcattgaggc

SEQ ID NO: 5594872 - DNA, 25 bp, Homo sapien
gatggtggtgcccaaaacttgggga

SEQ ID NO: 5594873 - DNA, 25 bp, Homo sapien
gagaagagggtccacttggacttct

SEQ ID NO: 5594874 - DNA, 25 bp, Homo sapien
tcaaggtcctgaatcccaggcattg

SEQ ID NO: 5594875 - DNA, 25 bp, Homo sapien
gtccacttggacttctcaatgggga

SEQ ID NO: 5594876 - DNA, 25 bp, Homo sapien
aggggccagtctcaagagactagga

SEQ ID NO: 5594877 - DNA, 25 bp, Homo sapien
aaaacccagctgtgatcaaggtcct

SEQ ID NO: 5594878 - DNA, 25 bp, Homo sapien
ctgaatcccaggcattgaggcagaa

SEQ ID NO: 5594879 - DNA, 25 bp, Homo sapien
tgtgatcaaggtcctgaatcccagg

SEQ ID NO: 5594880 - DNA, 25 bp, Homo sapien
agtctcaagagactaggagatggtg

SEQ ID NO: 5594881 - DNA, 25 bp, Homo sapien
aaagctgggagagatcattatattg

SEQ ID NO: 5594882 - DNA, 25 bp, Homo sapien
aatatgatagcaacgtctccttcca

SEQ ID NO: 5594883 - DNA, 25 bp, Homo sapien
agacatggagtatttcaaagctggg

SEQ ID NO: 5594884 - DNA, 25 bp, Homo sapien
aatgaaacagacatggagtatttca

SEQ ID NO: 5594885 - DNA, 25 bp, Homo sapien
tgtttcagtaaaacacggaagcttg

SEQ ID NO: 5594886 - DNA, 25 bp, Homo sapien
ttcattgcctgctgcacaaccacac

SEQ ID NO: 5594887 - DNA, 25 bp, Homo sapien
gagggggctgtttctgccaccacaa

SEQ ID NO: 5594888 - DNA, 25 bp, Homo sapien
actgcatctgtgactgttgtttcag

SEQ ID NO: 5594889 - DNA, 25 bp, Homo sapien
tttcaagcagaggctgtatcgtgaa

SEQ ID NO: 5594890 - DNA, 25 bp, Homo sapien
gcacaaccacacaaaacagcatttt

SEQ ID NO: 5594891 - DNA, 25 bp, Homo sapien
cacggaagcttgaatgtaagctcat

SEQ ID NO: 5594892 - DNA, 25 bp, Homo sapien
tcatcactgtcaagccaggcaggat

SEQ ID NO: 5594893 - DNA, 25 bp, Homo sapien
aacagaatgacagacgttaagtgtg

SEQ ID NO: 5594894 - DNA, 25 bp, Homo sapien
aaacaggtgcccagtaacagaatga

SEQ ID NO: 5594895 - DNA, 25 bp, Homo sapien
aaactaaaccgcagatggtcacctt

SEQ ID NO: 5594896 - DNA, 25 bp, Homo sapien
atccaaaacagggaatacagagaga

SEQ ID NO: 5594897 - DNA, 25 bp, Homo sapien
gtaaagcttgggatgtgtgtattca

SEQ ID NO: 5594898 - DNA, 25 bp, Homo sapien
gctggactgttaagtggcctcatca

SEQ ID NO: 5594899 - DNA, 25 bp, Homo sapien
taacatccgcctgcgctggactgtt

SEQ ID NO: 5594900 - DNA, 25 bp, Homo sapien
agccaggcaggatttgtaaagcttg

SEQ ID NO: 5594901 - DNA, 25 bp, Homo sapien
gttaagtgtgaaatcagaaagttaa

SEQ ID NO: 5594902 - DNA, 25 bp, Homo sapien
tcatatttcattgggtggggatgga

SEQ ID NO: 5594903 - DNA, 25 bp, Homo sapien
aaggaagcagtattaagatgaagaa

SEQ ID NO: 5594904 - DNA, 25 bp, Homo sapien
tgatgcagtcccagtgaagctttca

SEQ ID NO: 5594905 - DNA, 25 bp, Homo sapien
atacaggttagtgaaaaggaaagta

SEQ ID NO: 5594906 - DNA, 25 bp, Homo sapien
ccagtagctaagggataaatcttcc

SEQ ID NO: 5594907 - DNA, 25 bp, Homo sapien
ttgaaagacaattctggaacaagca

SEQ ID NO: 5594908 - DNA, 25 bp, Homo sapien
cggttatgacttttggatggccact

SEQ ID NO: 5594909 - DNA, 25 bp, Homo sapien
gtgatgaacacatgtgcagagggta

SEQ ID NO: 5594910 - DNA, 25 bp, Homo sapien
agaaaatgttgagctgtgatgcagt

SEQ ID NO: 5594911 - DNA, 25 bp, Homo sapien
gctgccaatggtagcggttatgact

SEQ ID NO: 5594912 - DNA, 25 bp, Homo sapien
ttgagatggcccaacagaattgtcc

SEQ ID NO: 5594913 - DNA, 25 bp, Homo sapien
gatcagtagttttgggttatgggct

SEQ ID NO: 5594914 - DNA, 25 bp, Homo sapien
ataaatcaatcacttggggggtggg

SEQ ID NO: 5594915 - DNA, 25 bp, Homo sapien
gccaatagataattagaagctgact

SEQ ID NO: 5594916 - DNA, 25 bp, Homo sapien
ggtcatcagctggcttgagttctcc

SEQ ID NO: 5594917 - DNA, 25 bp, Homo sapien
ttatcctagaagaatgagtgggatt

SEQ ID NO: 5594918 - DNA, 25 bp, Homo sapien
ggtggggaatgacttccctataatc

SEQ ID NO: 5594919 - DNA, 25 bp, Homo sapien
aagcactcaagatggagtggcagta

SEQ ID NO: 5594920 - DNA, 25 bp, Homo sapien
tgcaataatgcagcacaacagcaat

SEQ ID NO: 5594921 - DNA, 25 bp, Homo sapien
ccaccatggggacgttatcctagaa

SEQ ID NO: 5594922 - DNA, 25 bp, Homo sapien
agtggcagtaggatcccaacactta

SEQ ID NO: 5594923 - DNA, 25 bp, Homo sapien
actgacaatgtgtgtgagttatggc

SEQ ID NO: 5594924 - DNA, 25 bp, Homo sapien
aaggaaaaggcttgattgaaccagc

SEQ ID NO: 5594925 - DNA, 25 bp, Homo sapien
ttgacaagttggcagggctgccttg

SEQ ID NO: 5594926 - DNA, 25 bp, Homo sapien
agagtaaatgccctgttgacaagtt

SEQ ID NO: 5594927 - DNA, 25 bp, Homo sapien
tctgcattggccatgatgacagagg

SEQ ID NO: 5594928 - DNA, 25 bp, Homo sapien
agtggggtggatctaagccaccaca

SEQ ID NO: 5594929 - DNA, 25 bp, Homo sapien
caaaggataattagtgtgtggtagc

SEQ ID NO: 5594930 - DNA, 25 bp, Homo sapien
aaaaagaaagatacaatcctgcttc

SEQ ID NO: 5594931 - DNA, 25 bp, Homo sapien
tgactgtgggcattctcaggcaaaa

SEQ ID NO: 5594932 - DNA, 25 bp, Homo sapien
tagcctaacagcatgcagcagggct

SEQ ID NO: 5594933 - DNA, 25 bp, Homo sapien
aaatcagaaaaacttgcagcactac

SEQ ID NO: 5594934 - DNA, 25 bp, Homo sapien
tagaacctgcctagagctccaaaat

SEQ ID NO: 5594935 - DNA, 25 bp, Homo sapien
cctgtctgtgagaaagtgactgtgg

SEQ ID NO: 5594936 - DNA, 25 bp, Homo sapien
cttattaagagtgagattgtgccgg

SEQ ID NO: 5594937 - DNA, 25 bp, Homo sapien
gatctttgccattctgaggaaaaaa

SEQ ID NO: 5594938 - DNA, 25 bp, Homo sapien
gtccgtactgacaaaggatgtatca

SEQ ID NO: 5594939 - DNA, 25 bp, Homo sapien
agttgggaaacctgtccgtactgac

SEQ ID NO: 5594940 - DNA, 25 bp, Homo sapien
gagtgagattgtgccggtttttgta

SEQ ID NO: 5594941 - DNA, 25 bp, Homo sapien
aatgaatatgagaatatcggtctgc

SEQ ID NO: 5594942 - DNA, 25 bp, Homo sapien
tacactgaaaaagtaggagttgcag

SEQ ID NO: 5594943 - DNA, 25 bp, Homo sapien
acccaatttgaagtggttgtcattc

SEQ ID NO: 5594944 - DNA, 25 bp, Homo sapien
actcttactataggaccaccaggtc

SEQ ID NO: 5594945 - DNA, 25 bp, Homo sapien
taattgtagggaaaccaaatgagga

SEQ ID NO: 5594946 - DNA, 25 bp, Homo sapien
cacccctagagttgggaaacctgtc

SEQ ID NO: 5594947 - DNA, 25 bp, Homo sapien
gttgaggatactaatgaaaactgta

SEQ ID NO: 5594948 - DNA, 25 bp, Homo sapien
aactgtatgaacaactacaagcatc

SEQ ID NO: 5594949 - DNA, 25 bp, Homo sapien
tcacagtatttgcctctgggagatg

SEQ ID NO: 5594950 - DNA, 25 bp, Homo sapien
ctacatacagccaccaaaacaattg

SEQ ID NO: 5594951 - DNA, 25 bp, Homo sapien
caaattgagtctagttgaggatact

SEQ ID NO: 5594952 - DNA, 25 bp, Homo sapien
aagtgaaaaatactagtgtgctaac

SEQ ID NO: 5594953 - DNA, 25 bp, Homo sapien
aaaatattacagtgggaggtacaat

SEQ ID NO: 5594954 - DNA, 25 bp, Homo sapien
taacatatataaccaacagtagaaa

SEQ ID NO: 5594955 - DNA, 25 bp, Homo sapien
tacaatagtaaaacaaataacatat

SEQ ID NO: 5594956 - DNA, 25 bp, Homo sapien
tttaaaataactacatacagccacc

SEQ ID NO: 5594957 - DNA, 25 bp, Homo sapien
gtgggaggtacaatttcaaagtgag

SEQ ID NO: 5594958 - DNA, 25 bp, Homo sapien
tgagaaaaccaatatccccagggca

SEQ ID NO: 5594959 - DNA, 25 bp, Homo sapien
gagaactcccaagagaatgggcaca

SEQ ID NO: 5594960 - DNA, 25 bp, Homo sapien
ctgctagtgcttcgggcgctcttta

SEQ ID NO: 5594961 - DNA, 25 bp, Homo sapien
accagatgctcagggcaaaaccttt

SEQ ID NO: 5594962 - DNA, 25 bp, Homo sapien
aaaggcctgtcacgaggagttttga

SEQ ID NO: 5594963 - DNA, 25 bp, Homo sapien
gggcacaggaagtagcatttatcta

SEQ ID NO: 5594964 - DNA, 25 bp, Homo sapien
taatactcgggttaagtgattcacc

SEQ ID NO: 5594965 - DNA, 25 bp, Homo sapien
tagaagccctgtcttatgggtcccc

SEQ ID NO: 5594966 - DNA, 25 bp, Homo sapien
gagttttgagagtagtcagactgtc

SEQ ID NO: 5594967 - DNA, 25 bp, Homo sapien
gcaatccaagccggagagtcatatg

SEQ ID NO: 5594968 - DNA, 25 bp, Homo sapien
tgataacaggcccaagtgtaaggaa

SEQ ID NO: 5594969 - DNA, 25 bp, Homo sapien
tttgcaaacacgctcctctcttgtc

SEQ ID NO: 5594970 - DNA, 25 bp, Homo sapien
tccttagcactgctctgctgagggc

SEQ ID NO: 5594971 - DNA, 25 bp, Homo sapien
ctgctgagggcacaattcttttgca

SEQ ID NO: 5594972 - DNA, 25 bp, Homo sapien
cagaacctctttggagaggcaaact

SEQ ID NO: 5594973 - DNA, 25 bp, Homo sapien
agcaacctaagtcaggaaaacaggc

SEQ ID NO: 5594974 - DNA, 25 bp, Homo sapien
gagaggagcctgtttgcttaccttc

SEQ ID NO: 5594975 - DNA, 25 bp, Homo sapien
gtctgccatgagctctccttggaga

SEQ ID NO: 5594976 - DNA, 25 bp, Homo sapien
caccccccagtccccatccctactc

SEQ ID NO: 5594977 - DNA, 25 bp, Homo sapien
aggccccaggagctagactctcctt

SEQ ID NO: 5594978 - DNA, 25 bp, Homo sapien
caggaaaacaggctgaacaatgtag

SEQ ID NO: 5594979 - DNA, 25 bp, Homo sapien
acttatccagccttcccagaacctc

SEQ ID NO: 5594980 - DNA, 25 bp, Homo sapien
ccccaaaactcaccccctcttctca

SEQ ID NO: 5594981 - DNA, 25 bp, Homo sapien
tattggactaagtgtctgagtctgt

SEQ ID NO: 5594982 - DNA, 25 bp, Homo sapien
atttgaaattgcctaggtctacttt

SEQ ID NO: 5594983 - DNA, 25 bp, Homo sapien
ttggagttctattggactaagtgtc

SEQ ID NO: 5594984 - DNA, 25 bp, Homo sapien
atttgtgctcttgtgacgttgtgac

SEQ ID NO: 5594985 - DNA, 25 bp, Homo sapien
gtgacgttgtgacaactcagttgtc

SEQ ID NO: 5594986 - DNA, 25 bp, Homo sapien
accttgaaaagtatagcagccaatt

SEQ ID NO: 5594987 - DNA, 25 bp, Homo sapien
caaatccatgaataggtgagtttac

SEQ ID NO: 5594988 - DNA, 25 bp, Homo sapien
gtctgtgcctatgtgggttgctgga

SEQ ID NO: 5594989 - DNA, 25 bp, Homo sapien
tacaatatatagactggaagtactt

SEQ ID NO: 5594990 - DNA, 25 bp, Homo sapien
tatttatttaccaggcagaaaacat

SEQ ID NO: 5594991 - DNA, 25 bp, Homo sapien
tgtcagtcttccgattggcaggtgc

SEQ ID NO: 5594992 - DNA, 25 bp, Homo sapien
actggccaacttaactctgcgcttc

SEQ ID NO: 5594993 - DNA, 25 bp, Homo sapien
aggtgccaggatgcactccaacttc

SEQ ID NO: 5594994 - DNA, 25 bp, Homo sapien
tggcgtggctcttgccctgtgcaga

SEQ ID NO: 5594995 - DNA, 25 bp, Homo sapien
tgactgcgaagtctcctctggttgc

SEQ ID NO: 5594996 - DNA, 25 bp, Homo sapien
ctggagccgaattgaaccaagtatc

SEQ ID NO: 5594997 - DNA, 25 bp, Homo sapien
gaggtagaatagatgatgtaaagca

SEQ ID NO: 5594998 - DNA, 25 bp, Homo sapien
gtaaagcagtatgacacaaaatgtt

SEQ ID NO: 5594999 - DNA, 25 bp, Homo sapien
gggtggacaggttccctacagcttc

SEQ ID NO: 5595000 - DNA, 25 bp, Homo sapien
cctgagccaacagacctcacgctgg

SEQ ID NO: 5595001 - DNA, 25 bp, Homo sapien
tctttgaccagtgaatggaggtaga

SEQ ID NO: 5595002 - DNA, 25 bp, Homo sapien
ttggaacacaacaatgtccatttgc

SEQ ID NO: 5595003 - DNA, 25 bp, Homo sapien
tactatgcattgtaggacgcttagc

SEQ ID NO: 5595004 - DNA, 25 bp, Homo sapien
taagcaaactatagctcacaggcca

SEQ ID NO: 5595005 - DNA, 25 bp, Homo sapien
aatatttggggtgaatgagacaatt

SEQ ID NO: 5595006 - DNA, 25 bp, Homo sapien
aaaatagagataagcaaactatagc

SEQ ID NO: 5595007 - DNA, 25 bp, Homo sapien
gggtgaatgagacaattcaggaaca

SEQ ID NO: 5595008 - DNA, 25 bp, Homo sapien
gcattgtaggacgcttagcaggatc

SEQ ID NO: 5595009 - DNA, 25 bp, Homo sapien
tgggggcagttgtactatgcattgt

SEQ ID NO: 5595010 - DNA, 25 bp, Homo sapien
tggtagttacacaggggctattgtt

SEQ ID NO: 5595011 - DNA, 25 bp, Homo sapien
tgcttaattattaggtggtagttac

SEQ ID NO: 5595012 - DNA, 25 bp, Homo sapien
attctggatgagactttttttgggg

SEQ ID NO: 5595013 - DNA, 25 bp, Homo sapien
gggcctccctcgccctcagccgccc

SEQ ID NO: 5595014 - DNA, 25 bp, Homo sapien
ccccgctctcttgaggcgatcagag

SEQ ID NO: 5595015 - DNA, 25 bp, Homo sapien
gggagggcctccctcgccctcagcc

SEQ ID NO: 5595016 - DNA, 25 bp, Homo sapien
ctccccgctctcttgaggcgatcag

SEQ ID NO: 5595017 - DNA, 25 bp, Homo sapien
ccaccctccctcccctcgccagaag

SEQ ID NO: 5595018 - DNA, 25 bp, Homo sapien
ccctcccctcgccagaagggagggc

SEQ ID NO: 5595019 - DNA, 25 bp, Homo sapien
ccctccccgctctcttgaggcgatc

SEQ ID NO: 5595020 - DNA, 25 bp, Homo sapien
tgacccaccctccctcccctcgcca

SEQ ID NO: 5595021 - DNA, 25 bp, Homo sapien
gccccctccccgctctcttgaggcg

SEQ ID NO: 5595022 - DNA, 25 bp, Homo sapien
cccgagccccctccccgctctcttg

SEQ ID NO: 5595023 - DNA, 25 bp, Homo sapien
ccgctctcttgaggcgatcagaggc

SEQ ID NO: 5595024 - DNA, 25 bp, Homo sapien
gaaaagggccacattttctgcactc

SEQ ID NO: 5595025 - DNA, 25 bp, Homo sapien
gcaaagttgtcttgaattaggaaag

SEQ ID NO: 5595026 - DNA, 25 bp, Homo sapien
cttttaggcactgcaaagttgtctt

SEQ ID NO: 5595027 - DNA, 25 bp, Homo sapien
aaatgatggtagacaaaaaagagtt

SEQ ID NO: 5595028 - DNA, 25 bp, Homo sapien
gttgacctacatctgaacaatttac

SEQ ID NO: 5595029 - DNA, 25 bp, Homo sapien
acaccctaactgagaaaagggccac

SEQ ID NO: 5595030 - DNA, 25 bp, Homo sapien
aattataggtttgaaatagcaagaa

SEQ ID NO: 5595031 - DNA, 25 bp, Homo sapien
aagttattatcagagaagtatttac

SEQ ID NO: 5595032 - DNA, 25 bp, Homo sapien
tattgttaagttactgacagcatat

SEQ ID NO: 5595033 - DNA, 25 bp, Homo sapien
gcaagaaaaatatgaaatgatggta

SEQ ID NO: 5595034 - DNA, 25 bp, Homo sapien
agcaaatgctgaactaaatgcctcc

SEQ ID NO: 5595035 - DNA, 25 bp, Homo sapien
gaaaagattcataatatattgcctg

SEQ ID NO: 5595036 - DNA, 25 bp, Homo sapien
tcccatgtttgtagcttggaggggt

SEQ ID NO: 5595037 - DNA, 25 bp, Homo sapien
taatatattgcctggtgagaaaagc

SEQ ID NO: 5595038 - DNA, 25 bp, Homo sapien
aatcaagaacacaattgtatttaca

SEQ ID NO: 5595039 - DNA, 25 bp, Homo sapien
agaaaagcatgatgtcttataagag

SEQ ID NO: 5595040 - DNA, 25 bp, Homo sapien
agcttggaggggttaatattgttaa

SEQ ID NO: 5595041 - DNA, 25 bp, Homo sapien
gtccataacaaccaaagggatctac

SEQ ID NO: 5595042 - DNA, 25 bp, Homo sapien
aaggtaaacaattcttacacagaaa

SEQ ID NO: 5595043 - DNA, 25 bp, Homo sapien
gtcttataagagtatgattccattt

SEQ ID NO: 5595044 - DNA, 25 bp, Homo sapien
aataaatgaaagatatcccatgttt

SEQ ID NO: 5595045 - DNA, 25 bp, Homo sapien
aatgcaatatagcaaagtatctgaa

SEQ ID NO: 5595046 - DNA, 25 bp, Homo sapien
ctgtacagcataagtgggaataagg

SEQ ID NO: 5595047 - DNA, 25 bp, Homo sapien
ggtggcaatgctttagagaagtccc

SEQ ID NO: 5595048 - DNA, 25 bp, Homo sapien
atgctttagagaagtcccctagccc

SEQ ID NO: 5595049 - DNA, 25 bp, Homo sapien
tagaggagctgtgtagcttcctccc

SEQ ID NO: 5595050 - DNA, 25 bp, Homo sapien
agctgtacagcataagtgggaataa

SEQ ID NO: 5595051 - DNA, 25 bp, Homo sapien
agccaggtatacagttaattccctc

SEQ ID NO: 5595052 - DNA, 25 bp, Homo sapien
cctctatatattgggaatggaaagt

SEQ ID NO: 5595053 - DNA, 25 bp, Homo sapien
gtagctgtacagcataagtgggaat

SEQ ID NO: 5595054 - DNA, 25 bp, Homo sapien
tatatattgggaatggaaagtgaca

SEQ ID NO: 5595055 - DNA, 25 bp, Homo sapien
tagagaagtcccctagccctgcttt

SEQ ID NO: 5595056 - DNA, 25 bp, Homo sapien
ttggagagtagctgtacagcataag

SEQ ID NO: 5595057 - DNA, 25 bp, Homo sapien
ggctgcccacacttgtaagcgcccc

SEQ ID NO: 5595058 - DNA, 25 bp, Homo sapien
ggcacgttacaccgacaggagtgaa

SEQ ID NO: 5595059 - DNA, 25 bp, Homo sapien
gtatgtcccgttaggacaggggtga

SEQ ID NO: 5595060 - DNA, 25 bp, Homo sapien
tcctaaatgtgcatgcgcggagtat

SEQ ID NO: 5595061 - DNA, 25 bp, Homo sapien
agagcaaagacaattacttgggtcc

SEQ ID NO: 5595062 - DNA, 25 bp, Homo sapien
cgacagatcagtccaacgagaagac

SEQ ID NO: 5595063 - DNA, 25 bp, Homo sapien
acgagaagacacggtgatcctaaat

SEQ ID NO: 5595064 - DNA, 25 bp, Homo sapien
gtccagggtcctaacgacagatcag

SEQ ID NO: 5595065 - DNA, 25 bp, Homo sapien
actcccttcagacagggcacaggcg

SEQ ID NO: 5595066 - DNA, 25 bp, Homo sapien
gcgtagctaacgttagagagagtct

SEQ ID NO: 5595067 - DNA, 25 bp, Homo sapien
tggcagagtggattacaaacaccca

SEQ ID NO: 5595068 - DNA, 25 bp, Homo sapien
cttgaactatgggactttgagctgt

SEQ ID NO: 5595069 - DNA, 25 bp, Homo sapien
agaacaggttatataatcaggaaaa

SEQ ID NO: 5595070 - DNA, 25 bp, Homo sapien
cataggtcctagagtttaggcaaaa

SEQ ID NO: 5595071 - DNA, 25 bp, Homo sapien
ctgtattctatgaaggcaggagggt

SEQ ID NO: 5595072 - DNA, 25 bp, Homo sapien
caggagggtgtctgtcacctgtcat

SEQ ID NO: 5595073 - DNA, 25 bp, Homo sapien
ttcattgtctagcccaggagaagct

SEQ ID NO: 5595074 - DNA, 25 bp, Homo sapien
ctggagcctacttgaactatgggac

SEQ ID NO: 5595075 - DNA, 25 bp, Homo sapien
ttgagctgttcaagtaacctctctt

SEQ ID NO: 5595076 - DNA, 25 bp, Homo sapien
aaagtaagaaaaatagtccactcat

SEQ ID NO: 5595077 - DNA, 25 bp, Homo sapien
aaaaaagcatcgcaaagaacaggtt

SEQ ID NO: 5595078 - DNA, 25 bp, Homo sapien
tttaagatgactctggtggtatttt

SEQ ID NO: 5595079 - DNA, 25 bp, Homo sapien
taagaaaccagccaaactgattaaa

SEQ ID NO: 5595080 - DNA, 25 bp, Homo sapien
gtcgatgctacatgtgttcaccttc

SEQ ID NO: 5595081 - DNA, 25 bp, Homo sapien
cctttaaagaggaaaaagtcgatgc

SEQ ID NO: 5595082 - DNA, 25 bp, Homo sapien
tatccacgatctattcaagccacaa

SEQ ID NO: 5595083 - DNA, 25 bp, Homo sapien
tgtttatgattggatgtgctacgaa

SEQ ID NO: 5595084 - DNA, 25 bp, Homo sapien
tctagtaagtcatacggaaagggac

SEQ ID NO: 5595085 - DNA, 25 bp, Homo sapien
tccaccacacaaaagagaaggaagg

SEQ ID NO: 5595086 - DNA, 25 bp, Homo sapien
tattcaagccacaaaagaagtcctt

SEQ ID NO: 5595087 - DNA, 25 bp, Homo sapien
actgggtctcgaatcctagctgttg

SEQ ID NO: 5595088 - DNA, 25 bp, Homo sapien
gaggaaaaagtcgatgctacatgtg

SEQ ID NO: 5595089 - DNA, 25 bp, Homo sapien
taaaaacaagattgtactgggtctc

SEQ ID NO: 5595090 - DNA, 25 bp, Homo sapien
ttcccagcgcttgccttcaggacac

SEQ ID NO: 5595091 - DNA, 25 bp, Homo sapien
gggacacaccgctgaagtcacatcc

SEQ ID NO: 5595092 - DNA, 25 bp, Homo sapien
ggccagtccacaggacctgcccaga

SEQ ID NO: 5595093 - DNA, 25 bp, Homo sapien
cggggagcatcctcaccaactgaca

SEQ ID NO: 5595094 - DNA, 25 bp, Homo sapien
gcagggctcagcaagatctctcctt

SEQ ID NO: 5595095 - DNA, 25 bp, Homo sapien
atcagcacgggtttgtaattaaggg

SEQ ID NO: 5595096 - DNA, 25 bp, Homo sapien
ctcagggctgactcagtgtacccaa

SEQ ID NO: 5595097 - DNA, 25 bp, Homo sapien
cccagccaatgaacggcctccagaa

SEQ ID NO: 5595098 - DNA, 25 bp, Homo sapien
agcggctttctctggaatcgggtga

SEQ ID NO: 5595099 - DNA, 25 bp, Homo sapien
aatcgggtgaagtccccacaacaca

SEQ ID NO: 5595100 - DNA, 25 bp, Homo sapien
tgcctctgtgccggcaaaggctttc

SEQ ID NO: 5595101 - DNA, 25 bp, Homo sapien
ggcgaatctcaggtccgaagacctc

SEQ ID NO: 5595102 - DNA, 25 bp, Homo sapien
gagaatgatttttggcacagggcga

SEQ ID NO: 5595103 - DNA, 25 bp, Homo sapien
caattaggtatctgcgttaggccgg

SEQ ID NO: 5595104 - DNA, 25 bp, Homo sapien
tcttcagtgcagtccggtgtgttga

SEQ ID NO: 5595105 - DNA, 25 bp, Homo sapien
gcacagaatggtaaagtcacgaaat

SEQ ID NO: 5595106 - DNA, 25 bp, Homo sapien
gtggggagtgcattattctagctgt

SEQ ID NO: 5595107 - DNA, 25 bp, Homo sapien
tgttgccttagagatgagcggctca

SEQ ID NO: 5595108 - DNA, 25 bp, Homo sapien
gtggggtgattgttatcaggacaaa

SEQ ID NO: 5595109 - DNA, 25 bp, Homo sapien
caggacaaatagccagtgagtcgtt

SEQ ID NO: 5595110 - DNA, 25 bp, Homo sapien
cacgaaatttcagctggatgttgcc

SEQ ID NO: 5595111 - DNA, 25 bp, Homo sapien
gtgagtcgtttcacagggagatgga

SEQ ID NO: 5595112 - DNA, 25 bp, Homo sapien
ataaagagaacaagagaagttcagt

SEQ ID NO: 5595113 - DNA, 25 bp, Homo sapien
tataatacagaaggactgatcttcc

SEQ ID NO: 5595114 - DNA, 25 bp, Homo sapien
ctggagtgtttgaaactggagagaa

SEQ ID NO: 5595115 - DNA, 25 bp, Homo sapien
catgaagacatgcaagtagtgttat

SEQ ID NO: 5595116 - DNA, 25 bp, Homo sapien
ttagaagatgttcacttggggagga

SEQ ID NO: 5595117 - DNA, 25 bp, Homo sapien
aacaagagaagttcagtgcagcttc

SEQ ID NO: 5595118 - DNA, 25 bp, Homo sapien
ataagagacgttatatgcctcaata

SEQ ID NO: 5595119 - DNA, 25 bp, Homo sapien
tttagataaacagcaagtatgtctt

SEQ ID NO: 5595120 - DNA, 25 bp, Homo sapien
gaaactggagagaaattaagattcc

SEQ ID NO: 5595121 - DNA, 25 bp, Homo sapien
tgatgcagcattagaagatgttcac

SEQ ID NO: 5595122 - DNA, 25 bp, Homo sapien
tcagggcagctttgatgcagcatta

SEQ ID NO: 5595123 - DNA, 25 bp, Homo sapien
gcagattacctggttaggtgaagaa

SEQ ID NO: 5595124 - DNA, 25 bp, Homo sapien
ctcatcaatagcacaaagcgattat

SEQ ID NO: 5595125 - DNA, 25 bp, Homo sapien
caatatcagaaaagggaattgccct

SEQ ID NO: 5595126 - DNA, 25 bp, Homo sapien
gcaatagtggcaacccaagaaacac

SEQ ID NO: 5595127 - DNA, 25 bp, Homo sapien
ttcattcagtggcaatagtggcaac

SEQ ID NO: 5595128 - DNA, 25 bp, Homo sapien
atagcattgaaaaacatatgactgc

SEQ ID NO: 5595129 - DNA, 25 bp, Homo sapien
aaagcgattatgagaactgcagatt

SEQ ID NO: 5595130 - DNA, 25 bp, Homo sapien
taaacagagtaagatgcatcgcaag

SEQ ID NO: 5595131 - DNA, 25 bp, Homo sapien
agatgccgtcaaaaaacagacatgc

SEQ ID NO: 5595132 - DNA, 25 bp, Homo sapien
caagaaacacagctagcaatatcag

SEQ ID NO: 5595133 - DNA, 25 bp, Homo sapien
ttagtataacaatcgaaagcatcat

SEQ ID NO: 5595134 - DNA, 25 bp, Homo sapien
agggctcatgggccaccttgactac

SEQ ID NO: 5595135 - DNA, 25 bp, Homo sapien
ggcttgggaaacttctgctttagtc

SEQ ID NO: 5595136 - DNA, 25 bp, Homo sapien
cttttgaacacctctaggggcttgg

SEQ ID NO: 5595137 - DNA, 25 bp, Homo sapien
cagatgatcccagcaacccactcct

SEQ ID NO: 5595138 - DNA, 25 bp, Homo sapien
tcttggtaataacaggcccttcaga

SEQ ID NO: 5595139 - DNA, 25 bp, Homo sapien
gaaatattgaaaagggctcatgggc

SEQ ID NO: 5595140 - DNA, 25 bp, Homo sapien
ctgtggggtacttaaacaggtgaca

SEQ ID NO: 5595141 - DNA, 25 bp, Homo sapien
aggacaggaccaggtctgaaactct

SEQ ID NO: 5595142 - DNA, 25 bp, Homo sapien
ggcaggcttattacaggtaaaggtg

SEQ ID NO: 5595143 - DNA, 25 bp, Homo sapien
cctaggcctcctgttgtgtagagcc

SEQ ID NO: 5595144 - DNA, 25 bp, Homo sapien
ccaccaaggccctagagtcaatatc

SEQ ID NO: 5595145 - DNA, 25 bp, Homo sapien
atcatggatttgagggtcaactgga

SEQ ID NO: 5595146 - DNA, 25 bp, Homo sapien
aatatggtggcagaaatcatggatt

SEQ ID NO: 5595147 - DNA, 25 bp, Homo sapien
attgacaccgaggaaaaaacaatct

SEQ ID NO: 5595148 - DNA, 25 bp, Homo sapien
ttcaagagtcaggctatattttcag

SEQ ID NO: 5595149 - DNA, 25 bp, Homo sapien
gtgggcattgtgatacattctaatc

SEQ ID NO: 5595150 - DNA, 25 bp, Homo sapien
attgcccctctacccatgccttgtc

SEQ ID NO: 5595151 - DNA, 25 bp, Homo sapien
atagtaattgacaccgaggaaaaaa

SEQ ID NO: 5595152 - DNA, 25 bp, Homo sapien
gtgtcaagcagtcccctaccgttta

SEQ ID NO: 5595153 - DNA, 25 bp, Homo sapien
cttgtttctgtgaatatggtggcag

SEQ ID NO: 5595154 - DNA, 25 bp, Homo sapien
ttctacacagtaaggattaaatttc

SEQ ID NO: 5595155 - DNA, 25 bp, Homo sapien
gtcaactggactggtgtcaagcagt

SEQ ID NO: 5595156 - DNA, 25 bp, Homo sapien
tgttgtaaactcaagtaaggaagtc

SEQ ID NO: 5595157 - DNA, 25 bp, Homo sapien
agtgtgacccactgtgtctggaagt

SEQ ID NO: 5595158 - DNA, 25 bp, Homo sapien
ggcctcatgcggtcctcctgctttg

SEQ ID NO: 5595159 - DNA, 25 bp, Homo sapien
ataaatattgatggctgaagattca

SEQ ID NO: 5595160 - DNA, 25 bp, Homo sapien
taactttttccagagatggcgtctc

SEQ ID NO: 5595161 - DNA, 25 bp, Homo sapien
ctgcgcccaaccaaaaatctcattt

SEQ ID NO: 5595162 - DNA, 25 bp, Homo sapien
actgtgtctggaagtgatctagctt

SEQ ID NO: 5595163 - DNA, 25 bp, Homo sapien
cagaacactctgtagaacactccat

SEQ ID NO: 5595164 - DNA, 25 bp, Homo sapien
tttggagcagattgtttaactaccc

SEQ ID NO: 5595165 - DNA, 25 bp, Homo sapien
gtaaggaagtctaatgtagagccca

SEQ ID NO: 5595166 - DNA, 25 bp, Homo sapien
gaagtgctagcacaaagtgtgaccc

SEQ ID NO: 5595167 - DNA, 25 bp, Homo sapien
tggcccaagtcagagccactcaaca

SEQ ID NO: 5595168 - DNA, 25 bp, Homo sapien
gaaacttgaattgccaaaacactat

SEQ ID NO: 5595169 - DNA, 25 bp, Homo sapien
tgtgattgtgtttccatgtgctgtt

SEQ ID NO: 5595170 - DNA, 25 bp, Homo sapien
aaggtggcccatagtccctaatgac

SEQ ID NO: 5595171 - DNA, 25 bp, Homo sapien
caagtcagagccactcaacagcatc

SEQ ID NO: 5595172 - DNA, 25 bp, Homo sapien
acagtaagggagacattttcagctg

SEQ ID NO: 5595173 - DNA, 25 bp, Homo sapien
ttcatccagagtcactgaggttccc

SEQ ID NO: 5595174 - DNA, 25 bp, Homo sapien
cttcctaaaaggtggcccatagtcc

SEQ ID NO: 5595175 - DNA, 25 bp, Homo sapien
cctatggaatgggacaataatgtga

SEQ ID NO: 5595176 - DNA, 25 bp, Homo sapien
gacattttcagctgtgaggccaact

SEQ ID NO: 5595177 - DNA, 25 bp, Homo sapien
gtgaacaaaggagtccaacagtaag

SEQ ID NO: 5595178 - DNA, 25 bp, Homo sapien
tgaactacctaaagggaagctagaa

SEQ ID NO: 5595179 - DNA, 25 bp, Homo sapien
tacactgcaaaaagtcatttacaaa

SEQ ID NO: 5595180 - DNA, 25 bp, Homo sapien
aattccccacaggtgccagagaagt

SEQ ID NO: 5595181 - DNA, 25 bp, Homo sapien
ttctgagaagcagctctagctcaac

SEQ ID NO: 5595182 - DNA, 25 bp, Homo sapien
caaaagattctttagggacaagtac

SEQ ID NO: 5595183 - DNA, 25 bp, Homo sapien
tcactgagatttaacagatgcccag

SEQ ID NO: 5595184 - DNA, 25 bp, Homo sapien
taacagatgcccagttgaactacct

SEQ ID NO: 5595185 - DNA, 25 bp, Homo sapien
aactcatgggtttatgcaagcctcc

SEQ ID NO: 5595186 - DNA, 25 bp, Homo sapien
ccgtgcccagtcgggagattttcta

SEQ ID NO: 5595187 - DNA, 25 bp, Homo sapien
agaaaacacttcacggtacacagat

SEQ ID NO: 5595188 - DNA, 25 bp, Homo sapien
agagaagtctctggccttaaaattc

SEQ ID NO: 5595189 - DNA, 25 bp, Homo sapien
tgaaataattaccacaaccaagcta

SEQ ID NO: 5595190 - DNA, 25 bp, Homo sapien
aacccatgttagcagcccaggattg

SEQ ID NO: 5595191 - DNA, 25 bp, Homo sapien
ctgtggtagcaagtttcaagtatat

SEQ ID NO: 5595192 - DNA, 25 bp, Homo sapien
cacctcacaccatgaccgtctatgt

SEQ ID NO: 5595193 - DNA, 25 bp, Homo sapien
tgaacccagacctttctggcgccac

SEQ ID NO: 5595194 - DNA, 25 bp, Homo sapien
aggattgggccaaatattttcgagt

SEQ ID NO: 5595195 - DNA, 25 bp, Homo sapien
tgtgtgtgcgtgttgagaatattta

SEQ ID NO: 5595196 - DNA, 25 bp, Homo sapien
acccttagatctactgagagacatt

SEQ ID NO: 5595197 - DNA, 25 bp, Homo sapien
actgagagacattgtgagaaatttc

SEQ ID NO: 5595198 - DNA, 25 bp, Homo sapien
agaaatattagcaaacagcaagata

SEQ ID NO: 5595199 - DNA, 25 bp, Homo sapien
ctggcgccacagtgcacttttccac

SEQ ID NO: 5595200 - DNA, 25 bp, Homo sapien
acaaccactgccaaaactactgaaa

SEQ ID NO: 5595201 - DNA, 25 bp, Homo sapien
acaatactaatacaaccactgccaa

SEQ ID NO: 5595202 - DNA, 25 bp, Homo sapien
agataactaaaggcatttacttttc

SEQ ID NO: 5595203 - DNA, 25 bp, Homo sapien
tagattacttaggaaaggctttgga

SEQ ID NO: 5595204 - DNA, 25 bp, Homo sapien
aagtctggtgatgatctaattttct

SEQ ID NO: 5595205 - DNA, 25 bp, Homo sapien
ttggatgtatactctctggtgctct

SEQ ID NO: 5595206 - DNA, 25 bp, Homo sapien
ttgttgggtgtaaaatccttggctc

SEQ ID NO: 5595207 - DNA, 25 bp, Homo sapien
ataaggcaatgctgttgaaaagtct

SEQ ID NO: 5595208 - DNA, 25 bp, Homo sapien
tactgaaatagtttagcatatacct

SEQ ID NO: 5595209 - DNA, 25 bp, Homo sapien
aggatatcaaatgtggtacaacact

SEQ ID NO: 5595210 - DNA, 25 bp, Homo sapien
tccatcaggatatcaaatgtggtac

SEQ ID NO: 5595211 - DNA, 25 bp, Homo sapien
tacgtttcaggctatatggattggt

SEQ ID NO: 5595212 - DNA, 25 bp, Homo sapien
gaagtccaaggttaacctcatcctc

SEQ ID NO: 5595213 - DNA, 25 bp, Homo sapien
taagaagctgccggctgaactaata

SEQ ID NO: 5595214 - DNA, 25 bp, Homo sapien
gaactctgctatgaagtccaaggtt

SEQ ID NO: 5595215 - DNA, 25 bp, Homo sapien
tgacattgaactctgctatgaagtc

SEQ ID NO: 5595216 - DNA, 25 bp, Homo sapien
tcttcccaagacagatgcaggggtg

SEQ ID NO: 5595217 - DNA, 25 bp, Homo sapien
gccggctgaactaatactgggttat

SEQ ID NO: 5595218 - DNA, 25 bp, Homo sapien
tgtttggatgctttaatcattcccc

SEQ ID NO: 5595219 - DNA, 25 bp, Homo sapien
aggctatatggattggttgaaaatt

SEQ ID NO: 5595220 - DNA, 25 bp, Homo sapien
attcaaccctgaagctcaataactt

SEQ ID NO: 5595221 - DNA, 25 bp, Homo sapien
ggtgtctgttgctgcctgggatact

SEQ ID NO: 5595222 - DNA, 25 bp, Homo sapien
taagtggtgaagttgtgatttgaat

SEQ ID NO: 5595223 - DNA, 25 bp, Homo sapien
gagaaggtgggtcattttcccagaa

SEQ ID NO: 5595224 - DNA, 25 bp, Homo sapien
gttagtgattacaacaggaggaagc

SEQ ID NO: 5595225 - DNA, 25 bp, Homo sapien
cagaacacacagctgctaagtggtg

SEQ ID NO: 5595226 - DNA, 25 bp, Homo sapien
cagtgtggatccagatcccgtgctc

SEQ ID NO: 5595227 - DNA, 25 bp, Homo sapien
ctggagtcccttctcagcagtcgcc

SEQ ID NO: 5595228 - DNA, 25 bp, Homo sapien
cagagttggggttagtgattacaac

SEQ ID NO: 5595229 - DNA, 25 bp, Homo sapien
ctctaaatgaggctagaggagtgaa

SEQ ID NO: 5595230 - DNA, 25 bp, Homo sapien
agcctgggagcccgttttacaggtg

SEQ ID NO: 5595231 - DNA, 25 bp, Homo sapien
cgccatgtataactaggaagcactc

SEQ ID NO: 5595232 - DNA, 25 bp, Homo sapien
ggaagcactcgcatttaactggatc

SEQ ID NO: 5595233 - DNA, 25 bp, Homo sapien
tttgtgattcctccctcaaggtatt

SEQ ID NO: 5595234 - DNA, 25 bp, Homo sapien
acacagacaaatctatgggaggatc

SEQ ID NO: 5595235 - DNA, 25 bp, Homo sapien
aaggaaataatactctgatagtctc

SEQ ID NO: 5595236 - DNA, 25 bp, Homo sapien
ctctgatagtctctacaaaagtttc

SEQ ID NO: 5595237 - DNA, 25 bp, Homo sapien
ggaattaaagaccagcctgcgcaac

SEQ ID NO: 5595238 - DNA, 25 bp, Homo sapien
caagaaggcaacacctcatttctga

SEQ ID NO: 5595239 - DNA, 25 bp, Homo sapien
tactgtgtccacaaggaaataatac

SEQ ID NO: 5595240 - DNA, 25 bp, Homo sapien
acctatttagagaaaacacagacaa

SEQ ID NO: 5595241 - DNA, 25 bp, Homo sapien
gtgagctatgattgtgccactgcat

SEQ ID NO: 5595242 - DNA, 25 bp, Homo sapien
agcctgcgcaacatactgagatcct

SEQ ID NO: 5595243 - DNA, 25 bp, Homo sapien
cccaagaattcaaggctgcagtgag

SEQ ID NO: 5595244 - DNA, 25 bp, Homo sapien
ctagaaatgtagcatagcaatttaa

SEQ ID NO: 5595245 - DNA, 25 bp, Homo sapien
aggaaaagtagccaagcttgcagta

SEQ ID NO: 5595246 - DNA, 25 bp, Homo sapien
acataaaagatcagaggaaaagtag

SEQ ID NO: 5595247 - DNA, 25 bp, Homo sapien
gtagcatagcaatttaaagcactta

SEQ ID NO: 5595248 - DNA, 25 bp, Homo sapien
aaaagaaatgaagctaagagataat

SEQ ID NO: 5595249 - DNA, 25 bp, Homo sapien
catacaattagaaacatgcagtgtt

SEQ ID NO: 5595250 - DNA, 25 bp, Homo sapien
gttgttgttaaagacataaagataa

SEQ ID NO: 5595251 - DNA, 25 bp, Homo sapien
aaagtagccaagcttgcagtatgct

SEQ ID NO: 5595252 - DNA, 25 bp, Homo sapien
ttgcagtatgctaaaactaaaaaac

SEQ ID NO: 5595253 - DNA, 25 bp, Homo sapien
aagctaagagataatgacatacaat

SEQ ID NO: 5595254 - DNA, 25 bp, Homo sapien
taacatacataaaagatcagaggaa

SEQ ID NO: 5595255 - DNA, 25 bp, Homo sapien
aattatagcctaatgaggggtttgc

SEQ ID NO: 5595256 - DNA, 25 bp, Homo sapien
aaacaggttgaacttgcaattaact

SEQ ID NO: 5595257 - DNA, 25 bp, Homo sapien
aaagctatggacccaagattcactc

SEQ ID NO: 5595258 - DNA, 25 bp, Homo sapien
attccaattcagacaactcagcact

SEQ ID NO: 5595259 - DNA, 25 bp, Homo sapien
acaactcagcactatggattgtgga

SEQ ID NO: 5595260 - DNA, 25 bp, Homo sapien
tctagaacctgaagaaaatataaat

SEQ ID NO: 5595261 - DNA, 25 bp, Homo sapien
aacaaaagaaaaagccgattgcttc

SEQ ID NO: 5595262 - DNA, 25 bp, Homo sapien
aagccgattgcttctagaacctgaa

SEQ ID NO: 5595263 - DNA, 25 bp, Homo sapien
gcaatgtgtaggtttcactttgaac

SEQ ID NO: 5595264 - DNA, 25 bp, Homo sapien
tatagtatgataccttgcgattttc

SEQ ID NO: 5595265 - DNA, 25 bp, Homo sapien
gattcactcaatcttggccctggtg

SEQ ID NO: 5595266 - DNA, 25 bp, Homo sapien
aactcatcaagctggtaggaatctg

SEQ ID NO: 5595267 - DNA, 25 bp, Homo sapien
gctaccctgcaaacagggaagggga

SEQ ID NO: 5595268 - DNA, 25 bp, Homo sapien
aagaggaaggtgttaatccgaagta

SEQ ID NO: 5595269 - DNA, 25 bp, Homo sapien
ggagacagaggaacctcatgcacag

SEQ ID NO: 5595270 - DNA, 25 bp, Homo sapien
gttaatccgaagtaagtgggagaca

SEQ ID NO: 5595271 - DNA, 25 bp, Homo sapien
gtgggtaatagaaatgtctgtgggt

SEQ ID NO: 5595272 - DNA, 25 bp, Homo sapien
ttaatgcactggcatccagagggtg

SEQ ID NO: 5595273 - DNA, 25 bp, Homo sapien
cccagatagaggggtttctactctt

SEQ ID NO: 5595274 - DNA, 25 bp, Homo sapien
acagtgtttgagccagggcctaact

SEQ ID NO: 5595275 - DNA, 25 bp, Homo sapien
atttctaggaacacgacgacactgg

SEQ ID NO: 5595276 - DNA, 25 bp, Homo sapien
agttggtatgcacaaatggcccatc

SEQ ID NO: 5595277 - DNA, 25 bp, Homo sapien
tgctcgaaacctctgctgaacagcc

SEQ ID NO: 5595278 - DNA, 25 bp, Homo sapien
acgaggactcccacactccgctctt

SEQ ID NO: 5595279 - DNA, 25 bp, Homo sapien
tcccacacctgggctcctgctcgaa

SEQ ID NO: 5595280 - DNA, 25 bp, Homo sapien
cttggctgtgcagattctctaaagc

SEQ ID NO: 5595281 - DNA, 25 bp, Homo sapien
agcctgcttgaaaatccaccggagt

SEQ ID NO: 5595282 - DNA, 25 bp, Homo sapien
ccaccggagtattctgttgataagg

SEQ ID NO: 5595283 - DNA, 25 bp, Homo sapien
tttcccgtgctgcttgtgtaaatct

SEQ ID NO: 5595284 - DNA, 25 bp, Homo sapien
tcaggacaggacacataagcacctg

SEQ ID NO: 5595285 - DNA, 25 bp, Homo sapien
aggaaatgtctgggcctcagatttc

SEQ ID NO: 5595286 - DNA, 25 bp, Homo sapien
tctggattcagtgcaacttggctgt

SEQ ID NO: 5595287 - DNA, 25 bp, Homo sapien
tgcagaccatacagtcagttccatc

SEQ ID NO: 5595288 - DNA, 25 bp, Homo sapien
cttagagcctgatagaaagcccaag

SEQ ID NO: 5595289 - DNA, 25 bp, Homo sapien
ggacctgcctgtacttagagcctga

SEQ ID NO: 5595290 - DNA, 25 bp, Homo sapien
gagcctggctaggtccaggcagacc

SEQ ID NO: 5595291 - DNA, 25 bp, Homo sapien
caagttgatctactgggcagctctc

SEQ ID NO: 5595292 - DNA, 25 bp, Homo sapien
tatgtgggagtatccacgtctagtc

SEQ ID NO: 5595293 - DNA, 25 bp, Homo sapien
cctcctcacagccttgagggggagg

SEQ ID NO: 5595294 - DNA, 25 bp, Homo sapien
gaaagcaacagtatagtccacatgg

SEQ ID NO: 5595295 - DNA, 25 bp, Homo sapien
ggtggaggcccacagtcatccatta

SEQ ID NO: 5595296 - DNA, 25 bp, Homo sapien
acaagacttcaacagtgagcctggc

SEQ ID NO: 5595297 - DNA, 25 bp, Homo sapien
gtccacatggaatcaggctgctgat

SEQ ID NO: 5595298 - DNA, 25 bp, Homo sapien
aggaagagcacacaacaagacttca

SEQ ID NO: 5595299 - DNA, 25 bp, Homo sapien
cctaggatggccatctgaggtttac

SEQ ID NO: 5595300 - DNA, 25 bp, Homo sapien
gatggaacccaacaagcagtctcta

SEQ ID NO: 5595301 - DNA, 25 bp, Homo sapien
caagatgcccatgatgaagagtggg

SEQ ID NO: 5595302 - DNA, 25 bp, Homo sapien
gatgggcaggtgttcctctaacaaa

SEQ ID NO: 5595303 - DNA, 25 bp, Homo sapien
aatgtggccaatagtagggcagatt

SEQ ID NO: 5595304 - DNA, 25 bp, Homo sapien
agaagcagtctgctcagaagccctt

SEQ ID NO: 5595305 - DNA, 25 bp, Homo sapien
gggctaaagagctgcactacctttc

SEQ ID NO: 5595306 - DNA, 25 bp, Homo sapien
gagtctcagagcaatgaggatggaa

SEQ ID NO: 5595307 - DNA, 25 bp, Homo sapien
atgcatcccacgctagacatggcag

SEQ ID NO: 5595308 - DNA, 25 bp, Homo sapien
tttatttatgtgtgcctggggcgat

SEQ ID NO: 5595309 - DNA, 25 bp, Homo sapien
ggagagggcagctatctcctcccca

SEQ ID NO: 5595310 - DNA, 25 bp, Homo sapien
ttgactctgacttaaaatgagaaat

SEQ ID NO: 5595311 - DNA, 25 bp, Homo sapien
tcaaaaccaagatgtgagaaagcag

SEQ ID NO: 5595312 - DNA, 25 bp, Homo sapien
cctagtgcacaatgggcttaggatc

SEQ ID NO: 5595313 - DNA, 25 bp, Homo sapien
gagaaccaaagtatttgactctgac

SEQ ID NO: 5595314 - DNA, 25 bp, Homo sapien
ttctgcattggctagctctctttgc

SEQ ID NO: 5595315 - DNA, 25 bp, Homo sapien
ctcaatggatctcagtgacaggtgg

SEQ ID NO: 5595316 - DNA, 25 bp, Homo sapien
tcacagactcaaagaatttaactca

SEQ ID NO: 5595317 - DNA, 25 bp, Homo sapien
tgatctgtctcactggacatccatc

SEQ ID NO: 5595318 - DNA, 25 bp, Homo sapien
aatgggcttaggatcctgctatatc

SEQ ID NO: 5595319 - DNA, 25 bp, Homo sapien
ttcacagcacaaaataggattagga

SEQ ID NO: 5595320 - DNA, 25 bp, Homo sapien
agaataccaggtagttcacagactc

SEQ ID NO: 5595321 - DNA, 25 bp, Homo sapien
ccgccaccgtgcgttctagtgaggc

SEQ ID NO: 5595322 - DNA, 25 bp, Homo sapien
ccaggactcgacccacctcccgtga

SEQ ID NO: 5595323 - DNA, 25 bp, Homo sapien
aggcattaagttgagtgaggcgttt

SEQ ID NO: 5595324 - DNA, 25 bp, Homo sapien
actctgaatgctgaactgaaaaggg

SEQ ID NO: 5595325 - DNA, 25 bp, Homo sapien
ccacctcccgtgactgcgtgccggg

SEQ ID NO: 5595326 - DNA, 25 bp, Homo sapien
ggcggaagctacggttccgttctca

SEQ ID NO: 5595327 - DNA, 25 bp, Homo sapien
tagtgaggcacattcgctttctgac

SEQ ID NO: 5595328 - DNA, 25 bp, Homo sapien
ggcaaaggacaccacacaaacatca

SEQ ID NO: 5595329 - DNA, 25 bp, Homo sapien
tatctgacctgactgtgtacctatt

SEQ ID NO: 5595330 - DNA, 25 bp, Homo sapien
ttctgacgtgctcacaagtccgccg

SEQ ID NO: 5595331 - DNA, 25 bp, Homo sapien
acaggactcacataaaccaggactc

SEQ ID NO: 5595332 - DNA, 25 bp, Homo sapien
cggctcagcattcctaaatgtctta

SEQ ID NO: 5595333 - DNA, 25 bp, Homo sapien
taagctctgatgctgccggagactt

SEQ ID NO: 5595334 - DNA, 25 bp, Homo sapien
tctgatgctgccggagacttaaaat

SEQ ID NO: 5595335 - DNA, 25 bp, Homo sapien
gaaaattgttaccaatgaggaaatg

SEQ ID NO: 5595336 - DNA, 25 bp, Homo sapien
ttcacctgggtcagaaggttttgga

SEQ ID NO: 5595337 - DNA, 25 bp, Homo sapien
tgatgctgccggagacttaaaatga

SEQ ID NO: 5595338 - DNA, 25 bp, Homo sapien
atgctccatggggtaagctctgatg

SEQ ID NO: 5595339 - DNA, 25 bp, Homo sapien
tcacctgggtcagaaggttttggaa

SEQ ID NO: 5595340 - DNA, 25 bp, Homo sapien
tcaggggcagaaaattgttaccaat

SEQ ID NO: 5595341 - DNA, 25 bp, Homo sapien
tcagaaggttttggaactcttccac

SEQ ID NO: 5595342 - DNA, 25 bp, Homo sapien
agctctgatgctgccggagacttaa

SEQ ID NO: 5595343 - DNA, 25 bp, Homo sapien
atggtggatctgaatgctcataaag

SEQ ID NO: 5595344 - DNA, 25 bp, Homo sapien
atttatgacagatggacagaaggaa

SEQ ID NO: 5595345 - DNA, 25 bp, Homo sapien
agtaaaaaagatggaccaccattta

SEQ ID NO: 5595346 - DNA, 25 bp, Homo sapien
atgcagacaaatgactgatcttggc

SEQ ID NO: 5595347 - DNA, 25 bp, Homo sapien
aatatgtaggaggttatagtctaac

SEQ ID NO: 5595348 - DNA, 25 bp, Homo sapien
aaagtatgtggggcaagatacattt

SEQ ID NO: 5595349 - DNA, 25 bp, Homo sapien
tacacgtaagcttgtgataaagtat

SEQ ID NO: 5595350 - DNA, 25 bp, Homo sapien
ttctggcttataccaatcaaaggcc

SEQ ID NO: 5595351 - DNA, 25 bp, Homo sapien
aagtatgggatcactgctaatacat

SEQ ID NO: 5595352 - DNA, 25 bp, Homo sapien
gactgatcttggcacacttagtggc

SEQ ID NO: 5595353 - DNA, 25 bp, Homo sapien
acttagtggcagaaaaagatagagt

SEQ ID NO: 5595354 - DNA, 25 bp, Homo sapien
tgtgcatgccaggactgttacctcc

SEQ ID NO: 5595355 - DNA, 25 bp, Homo sapien
tgcagtgtagccctcttggatattg

SEQ ID NO: 5595356 - DNA, 25 bp, Homo sapien
aaatgagacatttgattggcagttc

SEQ ID NO: 5595357 - DNA, 25 bp, Homo sapien
gaagctgtaggaatggaaatttccc

SEQ ID NO: 5595358 - DNA, 25 bp, Homo sapien
aaaatgtgatagtgactggcttggg

SEQ ID NO: 5595359 - DNA, 25 bp, Homo sapien
tagtcccagccatttgccgattttc

SEQ ID NO: 5595360 - DNA, 25 bp, Homo sapien
cttgtccctcgaatgcagtgtagcc

SEQ ID NO: 5595361 - DNA, 25 bp, Homo sapien
gattcaagagaccagggttgtagtc

SEQ ID NO: 5595362 - DNA, 25 bp, Homo sapien
tcctgaaatggagtagaccttttcc

SEQ ID NO: 5595363 - DNA, 25 bp, Homo sapien
gggggcttgaattgtgcatgccagg

SEQ ID NO: 5595364 - DNA, 25 bp, Homo sapien
gtctcaaccagcagaatcacttctc

SEQ ID NO: 5595365 - DNA, 25 bp, Homo sapien
tctggttgaccaaattgaatgatta

SEQ ID NO: 5595366 - DNA, 25 bp, Homo sapien
gtcaggactgtacttgccctcagat

SEQ ID NO: 5595367 - DNA, 25 bp, Homo sapien
tttgtggagctgctttaagccgagg

SEQ ID NO: 5595368 - DNA, 25 bp, Homo sapien
caatatcccagggtatacagagact

SEQ ID NO: 5595369 - DNA, 25 bp, Homo sapien
aatgactgatttagaacacactgtt

SEQ ID NO: 5595370 - DNA, 25 bp, Homo sapien
tgatcacttagtgtgtctgcagaga

SEQ ID NO: 5595371 - DNA, 25 bp, Homo sapien
aacagagttccacaggaagtcattc

SEQ ID NO: 5595372 - DNA, 25 bp, Homo sapien
gctccacgtggctgacactaaatca

SEQ ID NO: 5595373 - DNA, 25 bp, Homo sapien
cagagactcaatcaagttggaaaac

SEQ ID NO: 5595374 - DNA, 25 bp, Homo sapien
gaataatagcctagttgcgggcccc

SEQ ID NO: 5595375 - DNA, 25 bp, Homo sapien
gtgtataacacgttggtatgatcac

SEQ ID NO: 5595376 - DNA, 25 bp, Homo sapien
tttgtgctaaacagagtgtggtagg

SEQ ID NO: 5595377 - DNA, 25 bp, Homo sapien
tcagctgtgctctctgttgggtgat

SEQ ID NO: 5595378 - DNA, 25 bp, Homo sapien
agcataaatgaataactttcacctc

SEQ ID NO: 5595379 - DNA, 25 bp, Homo sapien
acatttgtgctaaacagagtgtggt

SEQ ID NO: 5595380 - DNA, 25 bp, Homo sapien
cctttttgccatcagctgtgctctc

SEQ ID NO: 5595381 - DNA, 25 bp, Homo sapien
gcattcccccagaatggaaatgggc

SEQ ID NO: 5595382 - DNA, 25 bp, Homo sapien
gctctctgttgggtgatgcaggagc

SEQ ID NO: 5595383 - DNA, 25 bp, Homo sapien
ggtacgtggtttcaagtagggcaca

SEQ ID NO: 5595384 - DNA, 25 bp, Homo sapien
ggtacaaggtttcaaatagggcaca

SEQ ID NO: 5595385 - DNA, 25 bp, Homo sapien
acaaggtttcaaatataaaagcata

SEQ ID NO: 5595386 - DNA, 25 bp, Homo sapien
aggagctggcattcccccagaatgg

SEQ ID NO: 5595387 - DNA, 25 bp, Homo sapien
tctactaatgtacaaataagctgaa

SEQ ID NO: 5595388 - DNA, 25 bp, Homo sapien
ctttagaggtgcacttgcatggcag

SEQ ID NO: 5595389 - DNA, 25 bp, Homo sapien
tttttgccatagcaggtacctgtat

SEQ ID NO: 5595390 - DNA, 25 bp, Homo sapien
ggtacctgtatttctcatgctggga

SEQ ID NO: 5595391 - DNA, 25 bp, Homo sapien
aaactaggcactttagaggtgcact

SEQ ID NO: 5595392 - DNA, 25 bp, Homo sapien
tggcaggctgggcccccttttctat

SEQ ID NO: 5595393 - DNA, 25 bp, Homo sapien
tttacatggacacagaaactaggca

SEQ ID NO: 5595394 - DNA, 25 bp, Homo sapien
catgctgggatttcaaaaaaaaaaa

SEQ ID NO: 5595395 - DNA, 25 bp, Homo sapien
aaattgctcctcatattactggttt

SEQ ID NO: 5595396 - DNA, 25 bp, Homo sapien
caaataagctgaaaagttgcatttt

SEQ ID NO: 5595397 - DNA, 25 bp, Homo sapien
atagtggtacttaaaatcactggtt

SEQ ID NO: 5595398 - DNA, 25 bp, Homo sapien
gggcgagtacagctatcaacttgtg

SEQ ID NO: 5595399 - DNA, 25 bp, Homo sapien
cttgggcgtgcgtcttccaaaaggg

SEQ ID NO: 5595400 - DNA, 25 bp, Homo sapien
tggtgagaaaggcttttcaaaacac

SEQ ID NO: 5595401 - DNA, 25 bp, Homo sapien
gatcctaacatgtggtgagaaaggc

SEQ ID NO: 5595402 - DNA, 25 bp, Homo sapien
gggccgtgttcccagttggcgttca

SEQ ID NO: 5595403 - DNA, 25 bp, Homo sapien
aaacacacacgtgtggacagaggtc

SEQ ID NO: 5595404 - DNA, 25 bp, Homo sapien
gccttctccgaagctgtcagtgtcc

SEQ ID NO: 5595405 - DNA, 25 bp, Homo sapien
tggcgttcacacgtggtgtacacac

SEQ ID NO: 5595406 - DNA, 25 bp, Homo sapien
ggatacgtgtgcacacacgggtgcc

SEQ ID NO: 5595407 - DNA, 25 bp, Homo sapien
gatgtggtttccgccgcctcatcca

SEQ ID NO: 5595408 - DNA, 25 bp, Homo sapien
agacactgggcagccttctccgaag

SEQ ID NO: 5595409 - DNA, 25 bp, Homo sapien
ttgtgaaccctgtggtttctgtcac

SEQ ID NO: 5595410 - DNA, 25 bp, Homo sapien
aagaattagcatggctgcgttacaa

SEQ ID NO: 5595411 - DNA, 25 bp, Homo sapien
agctgtttgaaaacaagccggtggg

SEQ ID NO: 5595412 - DNA, 25 bp, Homo sapien
tggtttgctgactctgtacaatgtc

SEQ ID NO: 5595413 - DNA, 25 bp, Homo sapien
tctgtcacaactacacaagtttgcc

SEQ ID NO: 5595414 - DNA, 25 bp, Homo sapien
tagcatgagagcagccatagataat

SEQ ID NO: 5595415 - DNA, 25 bp, Homo sapien
agcatggctgcgttacaatgaaact

SEQ ID NO: 5595416 - DNA, 25 bp, Homo sapien
ttccagttcctgaaagaatctcttg

SEQ ID NO: 5595417 - DNA, 25 bp, Homo sapien
tggatttggccagtgcatctcatgg

SEQ ID NO: 5595418 - DNA, 25 bp, Homo sapien
ttgggtttgtctgtggtgaattgtt

SEQ ID NO: 5595419 - DNA, 25 bp, Homo sapien
ttctgtaaaaggccacatagtattt

SEQ ID NO: 5595420 - DNA, 25 bp, Homo sapien
ttagctgactacagccgaagtgttc

SEQ ID NO: 5595421 - DNA, 25 bp, Homo sapien
cagccgaagtgttcttgtggttaac

SEQ ID NO: 5595422 - DNA, 25 bp, Homo sapien
tatgtgattctccttagctgactac

SEQ ID NO: 5595423 - DNA, 25 bp, Homo sapien
gctgttcttgctgtactctgtcctc

SEQ ID NO: 5595424 - DNA, 25 bp, Homo sapien
tgtggttaactgtgattggcagggg

SEQ ID NO: 5595425 - DNA, 25 bp, Homo sapien
gaggaatgtcctaaactaacaaata

SEQ ID NO: 5595426 - DNA, 25 bp, Homo sapien
caggcaggaacccttagtgtcccta

SEQ ID NO: 5595427 - DNA, 25 bp, Homo sapien
agtgtccctaagtagggtgaaggtg

SEQ ID NO: 5595428 - DNA, 25 bp, Homo sapien
cgattagatctaaggagttgttttc

SEQ ID NO: 5595429 - DNA, 25 bp, Homo sapien
ccttgatttatgtgtgtgggcgctg

SEQ ID NO: 5595430 - DNA, 25 bp, Homo sapien
cagagaagtcagctcccctttgtat

SEQ ID NO: 5595431 - DNA, 25 bp, Homo sapien
gagacgagaaaaatattgctcagag

SEQ ID NO: 5595432 - DNA, 25 bp, Homo sapien
ctcattcaaggctggtcacagaacc

SEQ ID NO: 5595433 - DNA, 25 bp, Homo sapien
aggaattcccctggagggccttctc

SEQ ID NO: 5595434 - DNA, 25 bp, Homo sapien
agagcactcacactaaagcaggcca

SEQ ID NO: 5595435 - DNA, 25 bp, Homo sapien
tgtgctaagcccacagcatgtatta

SEQ ID NO: 5595436 - DNA, 25 bp, Homo sapien
taggagctttccctctggcagagca

SEQ ID NO: 5595437 - DNA, 25 bp, Homo sapien
gcctctgagtattcgaggaattccc

SEQ ID NO: 5595438 - DNA, 25 bp, Homo sapien
aactactaccccacactactgcctc

SEQ ID NO: 5595439 - DNA, 25 bp, Homo sapien
atcttgcttataccagagctggggt

SEQ ID NO: 5595440 - DNA, 25 bp, Homo sapien
agctgtgtgcttcaactactacccc

SEQ ID NO: 5595441 - DNA, 25 bp, Homo sapien
agtttataaatgagacgagaaaaat

SEQ ID NO: 5595442 - DNA, 25 bp, Homo sapien
atcttagaacccagagtggaacaga

SEQ ID NO: 5595443 - DNA, 25 bp, Homo sapien
agtcatttaaagatgggcagaggtg

SEQ ID NO: 5595444 - DNA, 25 bp, Homo sapien
agaatcaaaaagttgcttcaccttc

SEQ ID NO: 5595445 - DNA, 25 bp, Homo sapien
ggtgtgtggccggtatctgacacac

SEQ ID NO: 5595446 - DNA, 25 bp, Homo sapien
tggccggtatctgacacacatctta

SEQ ID NO: 5595447 - DNA, 25 bp, Homo sapien
tggcagggccttagatgcccacctg

SEQ ID NO: 5595448 - DNA, 25 bp, Homo sapien
tggaacagaacagaatcaaaaagtt

SEQ ID NO: 5595449 - DNA, 25 bp, Homo sapien
cttcaccttcagcaacaatacatgc

SEQ ID NO: 5595450 - DNA, 25 bp, Homo sapien
agaggtgctgagaactaagtaaata

SEQ ID NO: 5595451 - DNA, 25 bp, Homo sapien
ttttcttgatgcttggtaaccagtt

SEQ ID NO: 5595452 - DNA, 25 bp, Homo sapien
tgcccacctgcagactagagtgctg

SEQ ID NO: 5595453 - DNA, 25 bp, Homo sapien
aactttgagtaagcataaaacatac

SEQ ID NO: 5595454 - DNA, 25 bp, Homo sapien
gactctgctttatccgggaaagctt

SEQ ID NO: 5595455 - DNA, 25 bp, Homo sapien
gctcactgagattgccaggttcgac

SEQ ID NO: 5595456 - DNA, 25 bp, Homo sapien
tatagggtagacttgactctgcttt

SEQ ID NO: 5595457 - DNA, 25 bp, Homo sapien
gggatatagggtagacttgactctg

SEQ ID NO: 5595458 - DNA, 25 bp, Homo sapien
ctgagccagttaactttgagtaagc

SEQ ID NO: 5595459 - DNA, 25 bp, Homo sapien
cttttaaaactctgagccagttaac

SEQ ID NO: 5595460 - DNA, 25 bp, Homo sapien
gcatgtattaggatactggaaaata

SEQ ID NO: 5595461 - DNA, 25 bp, Homo sapien
aaatggaattttaaatgtagattat

SEQ ID NO: 5595462 - DNA, 25 bp, Homo sapien
atagctcactgagattgccaggttc

SEQ ID NO: 5595463 - DNA, 25 bp, Homo sapien
ataaaagataagtatgcatgtatta

SEQ ID NO: 5595464 - DNA, 25 bp, Homo sapien
cacgtaacaccatttcccctccctc

SEQ ID NO: 5595465 - DNA, 25 bp, Homo sapien
atttatccccccaagccccgcctca

SEQ ID NO: 5595466 - DNA, 25 bp, Homo sapien
atgaatgtgcaactccagcttcaat

SEQ ID NO: 5595467 - DNA, 25 bp, Homo sapien
agccccgcctcatgcagttggttcc

SEQ ID NO: 5595468 - DNA, 25 bp, Homo sapien
acagtgttagttcctagaatatgcc

SEQ ID NO: 5595469 - DNA, 25 bp, Homo sapien
cttaagtgcttcaatgcctcccatt

SEQ ID NO: 5595470 - DNA, 25 bp, Homo sapien
tcctacaggcttaaatattgatatc

SEQ ID NO: 5595471 - DNA, 25 bp, Homo sapien
ccagcttcaataatatcaggccttt

SEQ ID NO: 5595472 - DNA, 25 bp, Homo sapien
gatgaccagagtaatctaaaacaaa

SEQ ID NO: 5595473 - DNA, 25 bp, Homo sapien
ccccttcctctctagccacagtgtt

SEQ ID NO: 5595474 - DNA, 25 bp, Homo sapien
gactacttatgattttgccccctgc

SEQ ID NO: 5595475 - DNA, 25 bp, Homo sapien
gacatatgaggccagaagccaaaac

SEQ ID NO: 5595476 - DNA, 25 bp, Homo sapien
caaaactatggcatcagtagggaga

SEQ ID NO: 5595477 - DNA, 25 bp, Homo sapien
aggggttttgcattccggaactatc

SEQ ID NO: 5595478 - DNA, 25 bp, Homo sapien
gtggaagactttgatcaatggggga

SEQ ID NO: 5595479 - DNA, 25 bp, Homo sapien
tgatcaatgggggaatcattaaggg

SEQ ID NO: 5595480 - DNA, 25 bp, Homo sapien
tcattaaggggttttgcattccgga

SEQ ID NO: 5595481 - DNA, 25 bp, Homo sapien
gcacaagacaagacatacagagttc

SEQ ID NO: 5595482 - DNA, 25 bp, Homo sapien
ctactagcacaagacaagacataca

SEQ ID NO: 5595483 - DNA, 25 bp, Homo sapien
aactatcatcagcttcagcgggggg

SEQ ID NO: 5595484 - DNA, 25 bp, Homo sapien
caccaaggaccttgaaagcatgtgg

SEQ ID NO: 5595485 - DNA, 25 bp, Homo sapien
ctccccaggtacacagggttgagat

SEQ ID NO: 5595486 - DNA, 25 bp, Homo sapien
acacaacgtactctttggggaggag

SEQ ID NO: 5595487 - DNA, 25 bp, Homo sapien
tagacttgagcaagatgacagcaaa

SEQ ID NO: 5595488 - DNA, 25 bp, Homo sapien
acgttgcaacaaatctggtggcttt

SEQ ID NO: 5595489 - DNA, 25 bp, Homo sapien
aagacggccaggtttacatcaacgt

SEQ ID NO: 5595490 - DNA, 25 bp, Homo sapien
gtaattggaacgtctgatgagcatc

SEQ ID NO: 5595491 - DNA, 25 bp, Homo sapien
catgtcgagttgatgatgatatttc

SEQ ID NO: 5595492 - DNA, 25 bp, Homo sapien
aaaccctgggtcactggttcaggaa

SEQ ID NO: 5595493 - DNA, 25 bp, Homo sapien
ctaaccgccccagcactaagaagag

SEQ ID NO: 5595494 - DNA, 25 bp, Homo sapien
cagcactaagaagaggttcagtttt

SEQ ID NO: 5595495 - DNA, 25 bp, Homo sapien
agtgaattcaatggtatgtgctaac

SEQ ID NO: 5595496 - DNA, 25 bp, Homo sapien
ctgatgagcatctgatgagtggatc

SEQ ID NO: 5595497 - DNA, 25 bp, Homo sapien
tccccttaatcgggtccaggcactc

SEQ ID NO: 5595498 - DNA, 25 bp, Homo sapien
tggaccttgtgttggaaagctttgc

SEQ ID NO: 5595499 - DNA, 25 bp, Homo sapien
gaaagccaaggtcctgcctcccaaa

SEQ ID NO: 5595500 - DNA, 25 bp, Homo sapien
ctgccgactcctttagacacaggac

SEQ ID NO: 5595501 - DNA, 25 bp, Homo sapien
tgccgcgcctttttcctgccgactc

SEQ ID NO: 5595502 - DNA, 25 bp, Homo sapien
aaacacttgctccccgcgcagtgga

SEQ ID NO: 5595503 - DNA, 25 bp, Homo sapien
agacacaggactagctccatgccct

SEQ ID NO: 5595504 - DNA, 25 bp, Homo sapien
aggcctgattctgaggaaagccaag

SEQ ID NO: 5595505 - DNA, 25 bp, Homo sapien
gaccacccactcgcattgccgcgcc

SEQ ID NO: 5595506 - DNA, 25 bp, Homo sapien
agctttgcagtcgaaatcgcggtgc

SEQ ID NO: 5595507 - DNA, 25 bp, Homo sapien
ggcagcggagcactcattctcacca

SEQ ID NO: 5595508 - DNA, 25 bp, Homo sapien
gagggcatgggtttgctttatctga

SEQ ID NO: 5595509 - DNA, 25 bp, Homo sapien
aagtaccttgtgtgcggtgactgtg

SEQ ID NO: 5595510 - DNA, 25 bp, Homo sapien
accaaaggcacagtcgcacttgctt

SEQ ID NO: 5595511 - DNA, 25 bp, Homo sapien
gcatccccagctagaccataagtac

SEQ ID NO: 5595512 - DNA, 25 bp, Homo sapien
gttcactccctggttggcgtgtggc

SEQ ID NO: 5595513 - DNA, 25 bp, Homo sapien
tgactgtgacccacgtgtgttccct

SEQ ID NO: 5595514 - DNA, 25 bp, Homo sapien
gaaaagacatagtaaccaaaggcac

SEQ ID NO: 5595515 - DNA, 25 bp, Homo sapien
cagccaaattcaggcctcctgcccc

SEQ ID NO: 5595516 - DNA, 25 bp, Homo sapien
gtgctgagtgcagtgtagacctcag

SEQ ID NO: 5595517 - DNA, 25 bp, Homo sapien
tccttcaggctaatgtcagactttt

SEQ ID NO: 5595518 - DNA, 25 bp, Homo sapien
taatggcattcctgcggggtcttga

SEQ ID NO: 5595519 - DNA, 25 bp, Homo sapien
ttgaggacaacccaacctatacagc

SEQ ID NO: 5595520 - DNA, 25 bp, Homo sapien
atcatgcagatcaatggtgtgccat

SEQ ID NO: 5595521 - DNA, 25 bp, Homo sapien
ttaaagtgactgtaacaatgacaaa

SEQ ID NO: 5595522 - DNA, 25 bp, Homo sapien
gagactaggagactcatatttctgc

SEQ ID NO: 5595523 - DNA, 25 bp, Homo sapien
tcgtgatcttgtacagtccactgct

SEQ ID NO: 5595524 - DNA, 25 bp, Homo sapien
caaaacgttgcataattaaagtgac

SEQ ID NO: 5595525 - DNA, 25 bp, Homo sapien
gggatgactgcctcgtgatcttgta

SEQ ID NO: 5595526 - DNA, 25 bp, Homo sapien
ccaaagggctgcactatttcataaa

SEQ ID NO: 5595527 - DNA, 25 bp, Homo sapien
ttgaagtcttgagactaggagactc

SEQ ID NO: 5595528 - DNA, 25 bp, Homo sapien
aatggtgtgccatgtaaaatttttc

SEQ ID NO: 5595529 - DNA, 25 bp, Homo sapien
tctccaaggattgtagaggagaggg

SEQ ID NO: 5595530 - DNA, 25 bp, Homo sapien
ttagagaggattattgtccagtatt

SEQ ID NO: 5595531 - DNA, 25 bp, Homo sapien
ggggtcttggtacatctcccaggcc

SEQ ID NO: 5595532 - DNA, 25 bp, Homo sapien
cccaacttagagaggattattgtcc

SEQ ID NO: 5595533 - DNA, 25 bp, Homo sapien
ccagaacactgtaactctaattatc

SEQ ID NO: 5595534 - DNA, 25 bp, Homo sapien
tcccaggccgatttcaaactccagg

SEQ ID NO: 5595535 - DNA, 25 bp, Homo sapien
acctcaatttcgtgggtagctgggc

SEQ ID NO: 5595536 - DNA, 25 bp, Homo sapien
gtgatcctcccgtgttggcctgcaa

SEQ ID NO: 5595537 - DNA, 25 bp, Homo sapien
ataccatcgcatctggctaaatttt

SEQ ID NO: 5595538 - DNA, 25 bp, Homo sapien
cctcccgtgttggcctgcaattcca

SEQ ID NO: 5595539 - DNA, 25 bp, Homo sapien
ttggtacatctcccaggccgatttc

SEQ ID NO: 5595540 - DNA, 25 bp, Homo sapien
agcaatattttaacccctctcccca

SEQ ID NO: 5595541 - DNA, 25 bp, Homo sapien
aatttggagaaataatggagtgttc

SEQ ID NO: 5595542 - DNA, 25 bp, Homo sapien
taagcaagatcaggcctcaactctc

SEQ ID NO: 5595543 - DNA, 25 bp, Homo sapien
gagaaggagacttaagaaagattca

SEQ ID NO: 5595544 - DNA, 25 bp, Homo sapien
ttgaaagactcaagacaaccttaaa

SEQ ID NO: 5595545 - DNA, 25 bp, Homo sapien
aagtgagttccttggtacagtgcta

SEQ ID NO: 5595546 - DNA, 25 bp, Homo sapien
tacagtggtgttactaatctgggac

SEQ ID NO: 5595547 - DNA, 25 bp, Homo sapien
tggtacagtgctattgagaaggaga

SEQ ID NO: 5595548 - DNA, 25 bp, Homo sapien
aatggctgcaataaaggcagaaaac

SEQ ID NO: 5595549 - DNA, 25 bp, Homo sapien
ataaggtggcttccaagtaaggaac

SEQ ID NO: 5595550 - DNA, 25 bp, Homo sapien
tagactctaagcaagatcaggcctc

SEQ ID NO: 5595551 - DNA, 25 bp, Homo sapien
acgtagaaacaacactaatggctgc

SEQ ID NO: 5595552 - DNA, 25 bp, Homo sapien
gacctttggcaaacaatggcagcaa

SEQ ID NO: 5595553 - DNA, 25 bp, Homo sapien
aatggtgcctgatacagaaaggttc

SEQ ID NO: 5595554 - DNA, 25 bp, Homo sapien
cacattgggtggccaactgccattc

SEQ ID NO: 5595555 - DNA, 25 bp, Homo sapien
aagcagctggttgagtaattgtatt

SEQ ID NO: 5595556 - DNA, 25 bp, Homo sapien
tcctctgaagataggtgctagacct

SEQ ID NO: 5595557 - DNA, 25 bp, Homo sapien
gcctgagccagtagctgacttctct

SEQ ID NO: 5595558 - DNA, 25 bp, Homo sapien
caaacaatggcagcaaatgacagga

SEQ ID NO: 5595559 - DNA, 25 bp, Homo sapien
tgatttgaccaaggagtatcatcaa

SEQ ID NO: 5595560 - DNA, 25 bp, Homo sapien
atgacaggaaaagtcaagttaagac

SEQ ID NO: 5595561 - DNA, 25 bp, Homo sapien
ttgatctgaagaaactactagagcc

SEQ ID NO: 5595562 - DNA, 25 bp, Homo sapien
tactagagccaacaataattcagga

SEQ ID NO: 5595563 - DNA, 25 bp, Homo sapien
tgggaaagattctgtgcttggccaa

SEQ ID NO: 5595564 - DNA, 25 bp, Homo sapien
tggacatattgtcagtggctgcttt

SEQ ID NO: 5595565 - DNA, 25 bp, Homo sapien
tgtactacaaggacagagttgagtt

SEQ ID NO: 5595566 - DNA, 25 bp, Homo sapien
ccaagctttaatcagtcaggcccct

SEQ ID NO: 5595567 - DNA, 25 bp, Homo sapien
gcaacagaggctatggtgttgcaac

SEQ ID NO: 5595568 - DNA, 25 bp, Homo sapien
aagctactggctgttaatgagagac

SEQ ID NO: 5595569 - DNA, 25 bp, Homo sapien
caggcccctgagtcctctcctaggc

SEQ ID NO: 5595570 - DNA, 25 bp, Homo sapien
ctaggatcaccaataagctactggc

SEQ ID NO: 5595571 - DNA, 25 bp, Homo sapien
tggtgttgcaacagttaaggcctac

SEQ ID NO: 5595572 - DNA, 25 bp, Homo sapien
tctgtgagttgtacaaaaggttgca

SEQ ID NO: 5595573 - DNA, 25 bp, Homo sapien
ggttgcaggctgcatctaggatcac

SEQ ID NO: 5595574 - DNA, 25 bp, Homo sapien
cctataaattaaaccttcataagta

SEQ ID NO: 5595575 - DNA, 25 bp, Homo sapien
tacttatgaaggtttaatttatagg

SEQ ID NO: 5595576 - DNA, 25 bp, Homo sapien
gagaagctctagctagaaaattacc

SEQ ID NO: 5595577 - DNA, 25 bp, Homo sapien
aggttcctacctttgagaagctcta

SEQ ID NO: 5595578 - DNA, 25 bp, Homo sapien
caaaaaagataacacaaggttccta

SEQ ID NO: 5595579 - DNA, 25 bp, Homo sapien
ttgtcgtgtcaaagcttcgcatccc

SEQ ID NO: 5595580 - DNA, 25 bp, Homo sapien
ctgactaaagatatggacttcctcc

SEQ ID NO: 5595581 - DNA, 25 bp, Homo sapien
cttcagattactcagatgcggggga

SEQ ID NO: 5595582 - DNA, 25 bp, Homo sapien
tcagatttatccagagcaacctact

SEQ ID NO: 5595583 - DNA, 25 bp, Homo sapien
tgcgggggataacctgaatccctaa

SEQ ID NO: 5595584 - DNA, 25 bp, Homo sapien
tgtgctcagacagtatgaacaaaaa

SEQ ID NO: 5595585 - DNA, 25 bp, Homo sapien
tagctaaatcgatagagattctgac

SEQ ID NO: 5595586 - DNA, 25 bp, Homo sapien
cgtttcactgcactggaagatgatt

SEQ ID NO: 5595587 - DNA, 25 bp, Homo sapien
attgtaaagaggacacatatgaggg

SEQ ID NO: 5595588 - DNA, 25 bp, Homo sapien
ggagagaacaagcagctgatcataa

SEQ ID NO: 5595589 - DNA, 25 bp, Homo sapien
atgtggtcacaatcatgccatatac

SEQ ID NO: 5595590 - DNA, 25 bp, Homo sapien
caaaaatgccatcaagttcgccaaa

SEQ ID NO: 5595591 - DNA, 25 bp, Homo sapien
gacagcgtcttttccacaaggccac

SEQ ID NO: 5595592 - DNA, 25 bp, Homo sapien
aggtctccggatccacaagacagcg

SEQ ID NO: 5595593 - DNA, 25 bp, Homo sapien
gagaagaaaaccatatccaccaaat

SEQ ID NO: 5595594 - DNA, 25 bp, Homo sapien
gggcgggaattaggattcaaatcca

SEQ ID NO: 5595595 - DNA, 25 bp, Homo sapien
aaggccactgcagccatccatcaat

SEQ ID NO: 5595596 - DNA, 25 bp, Homo sapien
ttagccaagtagcactttgttcctc

SEQ ID NO: 5595597 - DNA, 25 bp, Homo sapien
taaacacttcacaaatgctggttct

SEQ ID NO: 5595598 - DNA, 25 bp, Homo sapien
caatcaatcagtcaactggagactt

SEQ ID NO: 5595599 - DNA, 25 bp, Homo sapien
tttggacacctctatgtaatctctc

SEQ ID NO: 5595600 - DNA, 25 bp, Homo sapien
tcaaaactggtttttactgtgttca

SEQ ID NO: 5595601 - DNA, 25 bp, Homo sapien
ttttggctgcctacttaatattgca

SEQ ID NO: 5595602 - DNA, 25 bp, Homo sapien
cctccgccacccctctcacaaaaac

SEQ ID NO: 5595603 - DNA, 25 bp, Homo sapien
ccagtgtctggctagcgcatgttga

SEQ ID NO: 5595604 - DNA, 25 bp, Homo sapien
tcaactggagacttagatgagctaa

SEQ ID NO: 5595605 - DNA, 25 bp, Homo sapien
tggctagcgcatgttgaataagtca

SEQ ID NO: 5595606 - DNA, 25 bp, Homo sapien
gagctaagaattaagcagaccaaaa

SEQ ID NO: 5595607 - DNA, 25 bp, Homo sapien
ttctctctctaccctccgccacccc

SEQ ID NO: 5595608 - DNA, 25 bp, Homo sapien
attgcagaattaatcaaaactggtt

SEQ ID NO: 5595609 - DNA, 25 bp, Homo sapien
tctaggatatatacagggagctcag

SEQ ID NO: 5595610 - DNA, 25 bp, Homo sapien
gcagcacagaagtccagtaatcata

SEQ ID NO: 5595611 - DNA, 25 bp, Homo sapien
gtcagcacggtcactaaacggatgc

SEQ ID NO: 5595612 - DNA, 25 bp, Homo sapien
ccacctcagtgtctgaggacagggc

SEQ ID NO: 5595613 - DNA, 25 bp, Homo sapien
actgacaaagaattttcgaagtgtt

SEQ ID NO: 5595614 - DNA, 25 bp, Homo sapien
agtaatcataacccccaacccaggc

SEQ ID NO: 5595615 - DNA, 25 bp, Homo sapien
gctcaggaacctgaagaaaaggaaa

SEQ ID NO: 5595616 - DNA, 25 bp, Homo sapien
ttcccacaagcagtgtctgagtgtt

SEQ ID NO: 5595617 - DNA, 25 bp, Homo sapien
ggaggagttcagctctctccacctc

SEQ ID NO: 5595618 - DNA, 25 bp, Homo sapien
cagagtagaattactgtcattgggt

SEQ ID NO: 5595619 - DNA, 25 bp, Homo sapien
taaacggatgcaaatccccaaggga

SEQ ID NO: 5595620 - DNA, 25 bp, Homo sapien
agtgaaaaaactcaatgcatcctgg

SEQ ID NO: 5595621 - DNA, 25 bp, Homo sapien
ccagtggttctaagatgtggtaccc

SEQ ID NO: 5595622 - DNA, 25 bp, Homo sapien
gtggtacccagaacaacatcattac

SEQ ID NO: 5595623 - DNA, 25 bp, Homo sapien
tccaccagattttgttgatgggtat

SEQ ID NO: 5595624 - DNA, 25 bp, Homo sapien
gcatcctggaggatatcctagaaca

SEQ ID NO: 5595625 - DNA, 25 bp, Homo sapien
tcagatactctgaagtgaggcccag

SEQ ID NO: 5595626 - DNA, 25 bp, Homo sapien
cccaggaatctgcaccatacgtcct

SEQ ID NO: 5595627 - DNA, 25 bp, Homo sapien
atgactacatcttaaccagtggttc

SEQ ID NO: 5595628 - DNA, 25 bp, Homo sapien
aaatgaaaattattgggtggaagcc

SEQ ID NO: 5595629 - DNA, 25 bp, Homo sapien
atcctagaacagaacatggaactct

SEQ ID NO: 5595630 - DNA, 25 bp, Homo sapien
ggtgattctgacgcaagctcgagtc

SEQ ID NO: 5595631 - DNA, 25 bp, Homo sapien
aaatgggctaatgctgatttgggca

SEQ ID NO: 5595632 - DNA, 25 bp, Homo sapien
gatttgggcatagttgcttgaatat

SEQ ID NO: 5595633 - DNA, 25 bp, Homo sapien
tgatcagggatatttaaatgggcta

SEQ ID NO: 5595634 - DNA, 25 bp, Homo sapien
ttctggtgaggtctcaagaagcttc

SEQ ID NO: 5595635 - DNA, 25 bp, Homo sapien
gtttgtgttgctgttaaggaatacc

SEQ ID NO: 5595636 - DNA, 25 bp, Homo sapien
acaggtctttggaatccagctgatc

SEQ ID NO: 5595637 - DNA, 25 bp, Homo sapien
gtgctgtcttaggagagttctctgg

SEQ ID NO: 5595638 - DNA, 25 bp, Homo sapien
caaaggtaaacttgtgctgtcttag

SEQ ID NO: 5595639 - DNA, 25 bp, Homo sapien
ttattttggttcacggttctgcagg

SEQ ID NO: 5595640 - DNA, 25 bp, Homo sapien
aggagagttctctggtctcaagttc

SEQ ID NO: 5595641 - DNA, 25 bp, Homo sapien
ttccaatcatgcagaagggtaaagg

SEQ ID NO: 5595642 - DNA, 25 bp, Homo sapien
aataaccttaggggctcactatggt

SEQ ID NO: 5595643 - DNA, 25 bp, Homo sapien
taggggctcactatggtctaaagga

SEQ ID NO: 5595644 - DNA, 25 bp, Homo sapien
tttaaccagatcctgggctggcctc

SEQ ID NO: 5595645 - DNA, 25 bp, Homo sapien
ggggctcactatggtctaaaggaag

SEQ ID NO: 5595646 - DNA, 25 bp, Homo sapien
actaaataaccttaggggctcacta

SEQ ID NO: 5595647 - DNA, 25 bp, Homo sapien
ggaaggtttgcaatctgaagctgga

SEQ ID NO: 5595648 - DNA, 25 bp, Homo sapien
tcactatggtctaaaggaagcacaa

SEQ ID NO: 5595649 - DNA, 25 bp, Homo sapien
tagggagaccttctttaaccagatc

SEQ ID NO: 5595650 - DNA, 25 bp, Homo sapien
taaccttaggggctcactatggtct

SEQ ID NO: 5595651 - DNA, 25 bp, Homo sapien
ccgatgtttagggagaccttcttta

SEQ ID NO: 5595652 - DNA, 25 bp, Homo sapien
tgggctggcctcttaggaaagtaaa

SEQ ID NO: 5595653 - DNA, 25 bp, Homo sapien
ttgcaggcttgcatgaaaatatcct

SEQ ID NO: 5595654 - DNA, 25 bp, Homo sapien
gggagtttgtgcaaatgctggcttg

SEQ ID NO: 5595655 - DNA, 25 bp, Homo sapien
caaaaggcggtttccacaccattgc

SEQ ID NO: 5595656 - DNA, 25 bp, Homo sapien
aagaacgctgttcctcgaaggtcac

SEQ ID NO: 5595657 - DNA, 25 bp, Homo sapien
ttggcaggaattctgacgaatggaa

SEQ ID NO: 5595658 - DNA, 25 bp, Homo sapien
cgtcaggggctatttctggccacag

SEQ ID NO: 5595659 - DNA, 25 bp, Homo sapien
cagcagctcctgtttggggagtttg

SEQ ID NO: 5595660 - DNA, 25 bp, Homo sapien
ttccgaccagcttgtgtgttgatct

SEQ ID NO: 5595661 - DNA, 25 bp, Homo sapien
gttgcagccatgacctgaagaagga

SEQ ID NO: 5595662 - DNA, 25 bp, Homo sapien
tgttttggcccagccacaaaaggcg

SEQ ID NO: 5595663 - DNA, 25 bp, Homo sapien
gctttctctggaaatcagcagctcc

SEQ ID NO: 5595664 - DNA, 25 bp, Homo sapien
ttcaaggcgtcagatgtttaaattt

SEQ ID NO: 5595665 - DNA, 25 bp, Homo sapien
aagccaagaatacagacagtctcca

SEQ ID NO: 5595666 - DNA, 25 bp, Homo sapien
aagccacaaatccagtgacaaagcc

SEQ ID NO: 5595667 - DNA, 25 bp, Homo sapien
cagacagtctccacaagaaacacat

SEQ ID NO: 5595668 - DNA, 25 bp, Homo sapien
ctttgttctccggggaacatttgcc

SEQ ID NO: 5595669 - DNA, 25 bp, Homo sapien
ctttttaagacagggagttagacat

SEQ ID NO: 5595670 - DNA, 25 bp, Homo sapien
gccaaaaatggcaaaagtgccacaa

SEQ ID NO: 5595671 - DNA, 25 bp, Homo sapien
aagtgccacaattgagaaaggctgg

SEQ ID NO: 5595672 - DNA, 25 bp, Homo sapien
acagggagttagacatttgacatac

SEQ ID NO: 5595673 - DNA, 25 bp, Homo sapien
agataggaaacgtgacagcactaag

SEQ ID NO: 5595674 - DNA, 25 bp, Homo sapien
tgtctggagacatttggggtcattt

SEQ ID NO: 5595675 - DNA, 25 bp, Homo sapien
tggaggtaaaatcttggctaggctc

SEQ ID NO: 5595676 - DNA, 25 bp, Homo sapien
taaaggattcaatgaggatgctgtc

SEQ ID NO: 5595677 - DNA, 25 bp, Homo sapien
ggccaaataagtaatgggagcactt

SEQ ID NO: 5595678 - DNA, 25 bp, Homo sapien
agagagacacacatacattggaaca

SEQ ID NO: 5595679 - DNA, 25 bp, Homo sapien
ctcttgcatggaccaaacagtagtt

SEQ ID NO: 5595680 - DNA, 25 bp, Homo sapien
attggaacagtgacatatacatgca

SEQ ID NO: 5595681 - DNA, 25 bp, Homo sapien
atacatgcagtttaaggaggttcac

SEQ ID NO: 5595682 - DNA, 25 bp, Homo sapien
taatagcaaaaatggtacccacttc

SEQ ID NO: 5595683 - DNA, 25 bp, Homo sapien
tgctagtcccgaactctcaggagag

SEQ ID NO: 5595684 - DNA, 25 bp, Homo sapien
tagccacttggctgaggaaataagt

SEQ ID NO: 5595685 - DNA, 25 bp, Homo sapien
aaagaaacttgcgtccattggaggt

SEQ ID NO: 5595686 - DNA, 25 bp, Homo sapien
gcagccaccacagtcttaccctggg

SEQ ID NO: 5595687 - DNA, 25 bp, Homo sapien
tacaggcaactcacatcagagactt

SEQ ID NO: 5595688 - DNA, 25 bp, Homo sapien
aagacagatactatatactagggat

SEQ ID NO: 5595689 - DNA, 25 bp, Homo sapien
ctgtggagccctgcagccaccacag

SEQ ID NO: 5595690 - DNA, 25 bp, Homo sapien
tggaaagaccattttgagaacaagt

SEQ ID NO: 5595691 - DNA, 25 bp, Homo sapien
agagaagactacatgaagcccctct

SEQ ID NO: 5595692 - DNA, 25 bp, Homo sapien
agggcaaatgacacctgtggagccc

SEQ ID NO: 5595693 - DNA, 25 bp, Homo sapien
tgcagctcacatggagtggctgtgg

SEQ ID NO: 5595694 - DNA, 25 bp, Homo sapien
atatactagggattaattgacatta

SEQ ID NO: 5595695 - DNA, 25 bp, Homo sapien
cctctgaacctttcaacagaacccc

SEQ ID NO: 5595696 - DNA, 25 bp, Homo sapien
tttgagaacaagtgctgcagctcac

SEQ ID NO: 5595697 - DNA, 25 bp, Homo sapien
caattaagagatagtagacacacct

SEQ ID NO: 5595698 - DNA, 25 bp, Homo sapien
gattcccaagtcttcaggatgaact

SEQ ID NO: 5595699 - DNA, 25 bp, Homo sapien
tgtggatccaacctagctctttacc

SEQ ID NO: 5595700 - DNA, 25 bp, Homo sapien
cccacaccacctccgcttactccac

SEQ ID NO: 5595701 - DNA, 25 bp, Homo sapien
ctttaccatggtcctgctgctcccc

SEQ ID NO: 5595702 - DNA, 25 bp, Homo sapien
ttagcataatgatagatactttctt

SEQ ID NO: 5595703 - DNA, 25 bp, Homo sapien
ggttctcataacagatacaggtatc

SEQ ID NO: 5595704 - DNA, 25 bp, Homo sapien
tcagtgttaattcaaatagtggctc

SEQ ID NO: 5595705 - DNA, 25 bp, Homo sapien
agacacacctcaaaactagattccc

SEQ ID NO: 5595706 - DNA, 25 bp, Homo sapien
ctgcacacactataagaaacgtaaa

SEQ ID NO: 5595707 - DNA, 25 bp, Homo sapien
ctcagggtccatggtgtctcaatta

SEQ ID NO: 5595708 - DNA, 25 bp, Homo sapien
tagtcagcgaaaggcttcagctggg

SEQ ID NO: 5595709 - DNA, 25 bp, Homo sapien
cccaaaagcaaagcttctgaccttc

SEQ ID NO: 5595710 - DNA, 25 bp, Homo sapien
gggtgttgaggtttcgtttctgcca

SEQ ID NO: 5595711 - DNA, 25 bp, Homo sapien
gggtgcgacctctccctctgggcca

SEQ ID NO: 5595712 - DNA, 25 bp, Homo sapien
tctgaccttctgggggttcgaagag

SEQ ID NO: 5595713 - DNA, 25 bp, Homo sapien
cgagggtttgcgtttccttcgcgtc

SEQ ID NO: 5595714 - DNA, 25 bp, Homo sapien
gccattagacagacccaggctcggg

SEQ ID NO: 5595715 - DNA, 25 bp, Homo sapien
ctccctctgggccattagacagacc

SEQ ID NO: 5595716 - DNA, 25 bp, Homo sapien
cttcgcgtctcgtttgcacaccatt

SEQ ID NO: 5595717 - DNA, 25 bp, Homo sapien
ggtaatctagtcagcgaaaggcttc

SEQ ID NO: 5595718 - DNA, 25 bp, Homo sapien
gaggtttcgtttctgccagccgacc

SEQ ID NO: 5595719 - DNA, 25 bp, Homo sapien
aaaattaaagcaaaagagatgcaca

SEQ ID NO: 5595720 - DNA, 25 bp, Homo sapien
actatcaaaaaatgagtaaagaaac

SEQ ID NO: 5595721 - DNA, 25 bp, Homo sapien
accaggagtacccccttaagctgac

SEQ ID NO: 5595722 - DNA, 25 bp, Homo sapien
ttaagctgacttacagcatgatttc

SEQ ID NO: 5595723 - DNA, 25 bp, Homo sapien
aaacacagagaaaagcttcctcact

SEQ ID NO: 5595724 - DNA, 25 bp, Homo sapien
tggctattagcatcagtaactcagt

SEQ ID NO: 5595725 - DNA, 25 bp, Homo sapien
aatgagtaaagaaactacctacaat

SEQ ID NO: 5595726 - DNA, 25 bp, Homo sapien
tatacataggcaataaaaaaagtaa

SEQ ID NO: 5595727 - DNA, 25 bp, Homo sapien
tcagtactcttgaatgtgccttgca

SEQ ID NO: 5595728 - DNA, 25 bp, Homo sapien
gcaaaagagatgcacatatccattc

SEQ ID NO: 5595729 - DNA, 25 bp, Homo sapien
ttatggaaccttgtatccctctacc

SEQ ID NO: 5595730 - DNA, 25 bp, Homo sapien
gacagtcaggcctagcctcccagca

SEQ ID NO: 5595731 - DNA, 25 bp, Homo sapien
gggcctagagtcgtgacgactaggc

SEQ ID NO: 5595732 - DNA, 25 bp, Homo sapien
ttggaatgcagttggggtcatatta

SEQ ID NO: 5595733 - DNA, 25 bp, Homo sapien
tgaactgtgtcaccacccgcgagaa

SEQ ID NO: 5595734 - DNA, 25 bp, Homo sapien
cgtagagcaatgacagtcaggccta

SEQ ID NO: 5595735 - DNA, 25 bp, Homo sapien
cccagtcctcacaggcagatagggt

SEQ ID NO: 5595736 - DNA, 25 bp, Homo sapien
gcctcacaaaaatgcctgggtcccc

SEQ ID NO: 5595737 - DNA, 25 bp, Homo sapien
agatggaaggtagaaaaactcctct

SEQ ID NO: 5595738 - DNA, 25 bp, Homo sapien
agatgatatgcagaagcagatggaa

SEQ ID NO: 5595739 - DNA, 25 bp, Homo sapien
cccgcgagaagcatagtgaattctc

SEQ ID NO: 5595740 - DNA, 25 bp, Homo sapien
aggggcattaagtagacaagatgat

SEQ ID NO: 5595741 - DNA, 25 bp, Homo sapien
attgctccttgagggtaacactggc

SEQ ID NO: 5595742 - DNA, 25 bp, Homo sapien
atgctaacgcatagtatatacagta

SEQ ID NO: 5595743 - DNA, 25 bp, Homo sapien
atatacagtattgctccttgagggt

SEQ ID NO: 5595744 - DNA, 25 bp, Homo sapien
agggagaatctatttgcctacaata

SEQ ID NO: 5595745 - DNA, 25 bp, Homo sapien
ttgagggtaacactggcacataatt

SEQ ID NO: 5595746 - DNA, 25 bp, Homo sapien
tttagaagcaaaatataggcgccta

SEQ ID NO: 5595747 - DNA, 25 bp, Homo sapien
agatattagtatgtgttccttgttc

SEQ ID NO: 5595748 - DNA, 25 bp, Homo sapien
agtaggcactcaatagatattagta

SEQ ID NO: 5595749 - DNA, 25 bp, Homo sapien
agtaaaagaaaccatactgctaata

SEQ ID NO: 5595750 - DNA, 25 bp, Homo sapien
ataggcgcctaatattaatctcttc

SEQ ID NO: 5595751 - DNA, 25 bp, Homo sapien
tgttggagattagcacatagtaggc

SEQ ID NO: 5595752 - DNA, 25 bp, Homo sapien
agtaggacaaacagcaaacaaataa

SEQ ID NO: 5595753 - DNA, 25 bp, Homo sapien
caacaaatatgtagcaagggtctgt

SEQ ID NO: 5595754 - DNA, 25 bp, Homo sapien
aagggtctgttatgtgccagaatct

SEQ ID NO: 5595755 - DNA, 25 bp, Homo sapien
atatttgaagagacctggggtcagg

SEQ ID NO: 5595756 - DNA, 25 bp, Homo sapien
cagaagtaagatctctatcaaagtc

SEQ ID NO: 5595757 - DNA, 25 bp, Homo sapien
agctggtgctaaatgctatggagaa

SEQ ID NO: 5595758 - DNA, 25 bp, Homo sapien
ccttggcaaaagatgagaggtaaaa

SEQ ID NO: 5595759 - DNA, 25 bp, Homo sapien
ctagcattctagtaggacaaacagc

SEQ ID NO: 5595760 - DNA, 25 bp, Homo sapien
acatggtaatatatcagctggtgct

SEQ ID NO: 5595761 - DNA, 25 bp, Homo sapien
gagaggtaaaaagtgatcagtcacc

SEQ ID NO: 5595762 - DNA, 25 bp, Homo sapien
aggatattgtgtctaagagttcagc

SEQ ID NO: 5595763 - DNA, 25 bp, Homo sapien
acaacggccaggttacttcatagtc

SEQ ID NO: 5595764 - DNA, 25 bp, Homo sapien
taagattctgaaacaacaacggcca

SEQ ID NO: 5595765 - DNA, 25 bp, Homo sapien
acttcatagtccaacgtgcccacac

SEQ ID NO: 5595766 - DNA, 25 bp, Homo sapien
caaactctctgaaggactaacagtt

SEQ ID NO: 5595767 - DNA, 25 bp, Homo sapien
tcagtgaaacaatttagggttctac

SEQ ID NO: 5595768 - DNA, 25 bp, Homo sapien
atgttgacaattttagtgacaagtc

SEQ ID NO: 5595769 - DNA, 25 bp, Homo sapien
acgtgcccacacatctatccagatc

SEQ ID NO: 5595770 - DNA, 25 bp, Homo sapien
tagaattcaaaagcagaagcaaaac

SEQ ID NO: 5595771 - DNA, 25 bp, Homo sapien
tccatatgaacagcacacaacattc

SEQ ID NO: 5595772 - DNA, 25 bp, Homo sapien
tagggttctacatatagcaatcaat

SEQ ID NO: 5595773 - DNA, 25 bp, Homo sapien
tataaaacccacactggtgtaattc

SEQ ID NO: 5595774 - DNA, 25 bp, Homo sapien
atggaatatgtaacaaaccgaacac

SEQ ID NO: 5595775 - DNA, 25 bp, Homo sapien
aataccaatcataaaatacacactc

SEQ ID NO: 5595776 - DNA, 25 bp, Homo sapien
aacaaaccgaacacactggacatac

SEQ ID NO: 5595777 - DNA, 25 bp, Homo sapien
tcctgttaagatgcccttagaagct

SEQ ID NO: 5595778 - DNA, 25 bp, Homo sapien
ttgttcccccaataagccttccata

SEQ ID NO: 5595779 - DNA, 25 bp, Homo sapien
cttgtggaccatttggattaaatcc

SEQ ID NO: 5595780 - DNA, 25 bp, Homo sapien
tccatgaacgaaacaatatattgca

SEQ ID NO: 5595781 - DNA, 25 bp, Homo sapien
taaatcctttccgtgggcagagatc

SEQ ID NO: 5595782 - DNA, 25 bp, Homo sapien
tacacactcagatatttcatggaat

SEQ ID NO: 5595783 - DNA, 25 bp, Homo sapien
taaactcactgtaggaattaagcac

SEQ ID NO: 5595784 - DNA, 25 bp, Homo sapien
tttccgtgggcagagatcacttttt

SEQ ID NO: 5595785 - DNA, 25 bp, Homo sapien
cagacgtccgtatctgccatgcaac

SEQ ID NO: 5595786 - DNA, 25 bp, Homo sapien
gttgcatggcagatacggacgtctg

SEQ ID NO: 5595787 - DNA, 25 bp, Homo sapien
attttggacaaatcaatatcgacag

SEQ ID NO: 5595788 - DNA, 25 bp, Homo sapien
ctgtcgatattgatttgtccaaaat

SEQ ID NO: 5595789 - DNA, 25 bp, Homo sapien
ggcaaacacactcagatggaaccgt

SEQ ID NO: 5595790 - DNA, 25 bp, Homo sapien
caagatcatccctagcgcccagaca

SEQ ID NO: 5595791 - DNA, 25 bp, Homo sapien
gcactctgcatgacacacccagggc

SEQ ID NO: 5595792 - DNA, 25 bp, Homo sapien
aactcggactccagaggcctggagg

SEQ ID NO: 5595793 - DNA, 25 bp, Homo sapien
gaggagcccagcaagtttctaggca

SEQ ID NO: 5595794 - DNA, 25 bp, Homo sapien
tggacaccgggctcaccacattcag

SEQ ID NO: 5595795 - DNA, 25 bp, Homo sapien
accgtgagcccaactcggactccag

SEQ ID NO: 5595796 - DNA, 25 bp, Homo sapien
taatttgaggttgatgtgcgagtta

SEQ ID NO: 5595797 - DNA, 25 bp, Homo sapien
agagtgattgatagagggtaatttg

SEQ ID NO: 5595798 - DNA, 25 bp, Homo sapien
cttggctgtggttgtaagtcccatt

SEQ ID NO: 5595799 - DNA, 25 bp, Homo sapien
cagcaagtttctaggcaagagagtg

SEQ ID NO: 5595800 - DNA, 25 bp, Homo sapien
acattgagttgacatttgttttgct

SEQ ID NO: 5595801 - DNA, 25 bp, Homo sapien
tgtttatgaagctcattacattatc

SEQ ID NO: 5595802 - DNA, 25 bp, Homo sapien
agccagattctcaaaataaagtata

SEQ ID NO: 5595803 - DNA, 25 bp, Homo sapien
gttttgctgaagtatagctaccatc

SEQ ID NO: 5595804 - DNA, 25 bp, Homo sapien
ttttagaacatatgacgcttttcat

SEQ ID NO: 5595805 - DNA, 25 bp, Homo sapien
gtaaaaattttagaacatatgacgc

SEQ ID NO: 5595806 - DNA, 25 bp, Homo sapien
caaatgatagaaaagccagattctc

SEQ ID NO: 5595807 - DNA, 25 bp, Homo sapien
ttgctgaagtatagctaccatccac

SEQ ID NO: 5595808 - DNA, 25 bp, Homo sapien
agctaccatccactatcatgaattt

SEQ ID NO: 5595809 - DNA, 25 bp, Homo sapien
catttgaggtgacaccttcctctat

SEQ ID NO: 5595810 - DNA, 25 bp, Homo sapien
gagttgacatttgttttgctgaagt

SEQ ID NO: 5595811 - DNA, 25 bp, Homo sapien
catttggaagtatgcacagggaatg

SEQ ID NO: 5595812 - DNA, 25 bp, Homo sapien
gattgctggaatgatcaaataaaac

SEQ ID NO: 5595813 - DNA, 25 bp, Homo sapien
cagagcacaatctcttggaaggctc

SEQ ID NO: 5595814 - DNA, 25 bp, Homo sapien
cataacagtatctagagcagtggtt

SEQ ID NO: 5595815 - DNA, 25 bp, Homo sapien
tgcaacacgtgggccattcccacac

SEQ ID NO: 5595816 - DNA, 25 bp, Homo sapien
aaggatgacaagttttaatgaggct

SEQ ID NO: 5595817 - DNA, 25 bp, Homo sapien
tgtccaacacagaggaagcattcat

SEQ ID NO: 5595818 - DNA, 25 bp, Homo sapien
cacacaccaaagaactgtccaccca

SEQ ID NO: 5595819 - DNA, 25 bp, Homo sapien
gatgtcgcatgactgagactactac

SEQ ID NO: 5595820 - DNA, 25 bp, Homo sapien
acccaaaatgccaatagtgtcctgt

SEQ ID NO: 5595821 - DNA, 25 bp, Homo sapien
ttggaacatgtgatgtaagccatgt

SEQ ID NO: 5595822 - DNA, 25 bp, Homo sapien
gaaatgtaaggcagcatgtccatat

SEQ ID NO: 5595823 - DNA, 25 bp, Homo sapien
tgaccatagaatccaataaagcaac

SEQ ID NO: 5595824 - DNA, 25 bp, Homo sapien
acctggaaagaagggactacattaa

SEQ ID NO: 5595825 - DNA, 25 bp, Homo sapien
cataatattgagagacgggtctttc

SEQ ID NO: 5595826 - DNA, 25 bp, Homo sapien
ctcttcaggaagacacctggaaaga

SEQ ID NO: 5595827 - DNA, 25 bp, Homo sapien
tagtaaagaggtgatatgaaatgta

SEQ ID NO: 5595828 - DNA, 25 bp, Homo sapien
agggactacattaaaggagtgtgtt

SEQ ID NO: 5595829 - DNA, 25 bp, Homo sapien
tctgcaaatgaatagaaggtacttt

SEQ ID NO: 5595830 - DNA, 25 bp, Homo sapien
ctaactagattcactacggagctcc

SEQ ID NO: 5595831 - DNA, 25 bp, Homo sapien
tacggagctcccaattgcatctctc

SEQ ID NO: 5595832 - DNA, 25 bp, Homo sapien
ctggcctctgctaagatccccaaat

SEQ ID NO: 5595833 - DNA, 25 bp, Homo sapien
tgatctcacgagaaccaacccagtc

SEQ ID NO: 5595834 - DNA, 25 bp, Homo sapien
aaaataagtatgaggaagcccacta

SEQ ID NO: 5595835 - DNA, 25 bp, Homo sapien
tgcataagccattcgagagggcaga

SEQ ID NO: 5595836 - DNA, 25 bp, Homo sapien
aatgccagcagactgaaatggtcac

SEQ ID NO: 5595837 - DNA, 25 bp, Homo sapien
gatggtagcccatttggtgatggtc

SEQ ID NO: 5595838 - DNA, 25 bp, Homo sapien
gggcagagatgccacaaccaaacac

SEQ ID NO: 5595839 - DNA, 25 bp, Homo sapien
ggtggggacaaaccacatacaactc

SEQ ID NO: 5595840 - DNA, 25 bp, Homo sapien
tactcaaaggcactggaaaatatac

SEQ ID NO: 5595841 - DNA, 25 bp, Homo sapien
ttcaccatgagttgtggtggggaca

SEQ ID NO: 5595842 - DNA, 25 bp, Homo sapien
aagcccactaacgaaaatgccagca

SEQ ID NO: 5595843 - DNA, 25 bp, Homo sapien
gaggccaaacatcagaggaagcctt

SEQ ID NO: 5595844 - DNA, 25 bp, Homo sapien
gtagtggaaatatcgaaggtcagag

SEQ ID NO: 5595845 - DNA, 25 bp, Homo sapien
ctctgaccttcgatatttccactac

SEQ ID NO: 5595846 - DNA, 25 bp, Homo sapien
atggccacctataaccagcagctaa

SEQ ID NO: 5595847 - DNA, 25 bp, Homo sapien
aataaaatggctccaacagggcaga

SEQ ID NO: 5595848 - DNA, 25 bp, Homo sapien
tagccatgaaaggaatggacctaaa

SEQ ID NO: 5595849 - DNA, 25 bp, Homo sapien
tagaaaattagtctagcaaggggag

SEQ ID NO: 5595850 - DNA, 25 bp, Homo sapien
aggagcaagagactttggtgttatt

SEQ ID NO: 5595851 - DNA, 25 bp, Homo sapien
taaaatcaacattgtggactgtctc

SEQ ID NO: 5595852 - DNA, 25 bp, Homo sapien
atggacctaaagtctggttagtgtc

SEQ ID NO: 5595853 - DNA, 25 bp, Homo sapien
ggtgcccagaacaagtgtaagggcc

SEQ ID NO: 5595854 - DNA, 25 bp, Homo sapien
cagcagctaaagatattggacttct

SEQ ID NO: 5595855 - DNA, 25 bp, Homo sapien
tctgtgcagaaacatatggccacct

SEQ ID NO: 5595856 - DNA, 25 bp, Homo sapien
tttggtgttgttggtcctgacagtc

SEQ ID NO: 5595857 - DNA, 25 bp, Homo sapien
tggcaacagagtaattcagtccgga

SEQ ID NO: 5595858 - DNA, 25 bp, Homo sapien
caaactgagaataaagggatataac

SEQ ID NO: 5595859 - DNA, 25 bp, Homo sapien
ttcagtccggagtacagaacatgta

SEQ ID NO: 5595860 - DNA, 25 bp, Homo sapien
atcaaggcttgaacagtttgtgccc

SEQ ID NO: 5595861 - DNA, 25 bp, Homo sapien
ctggcttattgctggcaacagagta

SEQ ID NO: 5595862 - DNA, 25 bp, Homo sapien
cattaatcatcgagacccccctgcc

SEQ ID NO: 5595863 - DNA, 25 bp, Homo sapien
cccagtgcacacatattgataatca

SEQ ID NO: 5595864 - DNA, 25 bp, Homo sapien
cacggatactgctctcaatactagt

SEQ ID NO: 5595865 - DNA, 25 bp, Homo sapien
cagctaaagtcattctaggtcagaa

SEQ ID NO: 5595866 - DNA, 25 bp, Homo sapien
atacagcacattaatcatcgagacc

SEQ ID NO: 5595867 - DNA, 25 bp, Homo sapien
ctgtggtaatactaaaagtgaaact

SEQ ID NO: 5595868 - DNA, 25 bp, Homo sapien
ttccaaggcccaaatcaaagtctga

SEQ ID NO: 5595869 - DNA, 25 bp, Homo sapien
atttcagacaagatactttactcct

SEQ ID NO: 5595870 - DNA, 25 bp, Homo sapien
agtaccaagcttccaaaattagacc

SEQ ID NO: 5595871 - DNA, 25 bp, Homo sapien
aataagcatgctgtatagaaactct

SEQ ID NO: 5595872 - DNA, 25 bp, Homo sapien
caaaattagacccaaagtaatcttg

SEQ ID NO: 5595873 - DNA, 25 bp, Homo sapien
ttactcctaatcacccacacacccc

SEQ ID NO: 5595874 - DNA, 25 bp, Homo sapien
gtccaagctccctggagtaccaagc

SEQ ID NO: 5595875 - DNA, 25 bp, Homo sapien
agtaatcttgttaggcatgactcca

SEQ ID NO: 5595876 - DNA, 25 bp, Homo sapien
tcgctctttgcctccttttacctcc

SEQ ID NO: 5595877 - DNA, 25 bp, Homo sapien
gttaggcatgactccaaataagcat

SEQ ID NO: 5595878 - DNA, 25 bp, Homo sapien
ttcagaaacttaaatgtgagttccc

SEQ ID NO: 5595879 - DNA, 25 bp, Homo sapien
gccccaaggctgtctgcactgagcc

SEQ ID NO: 5595880 - DNA, 25 bp, Homo sapien
cactgagccctccacctggcggtgt

SEQ ID NO: 5595881 - DNA, 25 bp, Homo sapien
ttggcctcgctggatgatggcaata

SEQ ID NO: 5595882 - DNA, 25 bp, Homo sapien
tgaggctggtcaaacactgccctgt

SEQ ID NO: 5595883 - DNA, 25 bp, Homo sapien
aaaggagggttggccatattccaac

SEQ ID NO: 5595884 - DNA, 25 bp, Homo sapien
ggcctccgtagtggtctgaacatct

SEQ ID NO: 5595885 - DNA, 25 bp, Homo sapien
gcggtgtgggcttctgaaaccacat

SEQ ID NO: 5595886 - DNA, 25 bp, Homo sapien
aagtgcgtagggcctccctgtttct

SEQ ID NO: 5595887 - DNA, 25 bp, Homo sapien
aactggaaagaaatgtctcttggcc

SEQ ID NO: 5595888 - DNA, 25 bp, Homo sapien
agtctttctcacagaaggggacgtg

SEQ ID NO: 5595889 - DNA, 25 bp, Homo sapien
aacaatgatgaacatgtgcaccctc

SEQ ID NO: 5595890 - DNA, 25 bp, Homo sapien
cgaagcaagcgccaagacacttcaa

SEQ ID NO: 5595891 - DNA, 25 bp, Homo sapien
gtaggaaggacatgactgtcaactc

SEQ ID NO: 5595892 - DNA, 25 bp, Homo sapien
tccagaaaccaggtgataaagacaa

SEQ ID NO: 5595893 - DNA, 25 bp, Homo sapien
gtcacaaaggttatgagaccagctc

SEQ ID NO: 5595894 - DNA, 25 bp, Homo sapien
atgagaaaccctacagagaggacat

SEQ ID NO: 5595895 - DNA, 25 bp, Homo sapien
tactcaagaaagttccgaagcaagc

SEQ ID NO: 5595896 - DNA, 25 bp, Homo sapien
tctaggaacaaggtaatcgagatga

SEQ ID NO: 5595897 - DNA, 25 bp, Homo sapien
gaagagttttgccagtaggaaggac

SEQ ID NO: 5595898 - DNA, 25 bp, Homo sapien
tccagggacaaactcataaagcata

SEQ ID NO: 5595899 - DNA, 25 bp, Homo sapien
cacagaggaatacagacaagcctat

SEQ ID NO: 5595900 - DNA, 25 bp, Homo sapien
gtggtatcataactcagactgcagc

SEQ ID NO: 5595901 - DNA, 25 bp, Homo sapien
aacccacaggacaagacattgcatg

SEQ ID NO: 5595902 - DNA, 25 bp, Homo sapien
aacaaaagccattcaaaactctctc

SEQ ID NO: 5595903 - DNA, 25 bp, Homo sapien
gtaaagggatacacagagaatcatt

SEQ ID NO: 5595904 - DNA, 25 bp, Homo sapien
cagctaaggtaaatctgcttggtcc

SEQ ID NO: 5595905 - DNA, 25 bp, Homo sapien
gtttggcagtaaacataccttgccc

SEQ ID NO: 5595906 - DNA, 25 bp, Homo sapien
taccttgcccacagtcgccagcatc

SEQ ID NO: 5595907 - DNA, 25 bp, Homo sapien
acattgcatgcttggtcacagaact

SEQ ID NO: 5595908 - DNA, 25 bp, Homo sapien
gcgagccaggaattcgcacatccct

SEQ ID NO: 5595909 - DNA, 25 bp, Homo sapien
agtttgaatgcaaggctggtaaagg

SEQ ID NO: 5595910 - DNA, 25 bp, Homo sapien
tcacagaacttatcagcgagccagg

SEQ ID NO: 5595911 - DNA, 25 bp, Homo sapien
caccagactgcaacaataacaggaa

SEQ ID NO: 5595912 - DNA, 25 bp, Homo sapien
catttgcaatacatgaacagagaaa

SEQ ID NO: 5595913 - DNA, 25 bp, Homo sapien
accacataaagagtgagttgggtgc

SEQ ID NO: 5595914 - DNA, 25 bp, Homo sapien
agtggtcaccacataaagagtgagt

SEQ ID NO: 5595915 - DNA, 25 bp, Homo sapien
atggaacaagtcttcagtcatttgc

SEQ ID NO: 5595916 - DNA, 25 bp, Homo sapien
cagagaaatcaacaagatctttgaa

SEQ ID NO: 5595917 - DNA, 25 bp, Homo sapien
taaatcacaatcccgccagtggtca

SEQ ID NO: 5595918 - DNA, 25 bp, Homo sapien
gtgaatagcccacagcctacctagc

SEQ ID NO: 5595919 - DNA, 25 bp, Homo sapien
ttgaaaagaactacagtctcactga

SEQ ID NO: 5595920 - DNA, 25 bp, Homo sapien
agtgagttgggtgctcaaaaccaat

SEQ ID NO: 5595921 - DNA, 25 bp, Homo sapien
atcacttctagaggagagagaaaac

SEQ ID NO: 5595922 - DNA, 25 bp, Homo sapien
tgaattatccaaaggctctaccatt

SEQ ID NO: 5595923 - DNA, 25 bp, Homo sapien
ttgtcgaatgataaccatgctcacc

SEQ ID NO: 5595924 - DNA, 25 bp, Homo sapien
attctagtgaatatctggaaacaga

SEQ ID NO: 5595925 - DNA, 25 bp, Homo sapien
ttgaagacttttaggaaatgactgt

SEQ ID NO: 5595926 - DNA, 25 bp, Homo sapien
gcacagagttaagaaaggaattatc

SEQ ID NO: 5595927 - DNA, 25 bp, Homo sapien
ctggaaacagaaacctcgaacaggt

SEQ ID NO: 5595928 - DNA, 25 bp, Homo sapien
aacagagaaggctacattcagcaat

SEQ ID NO: 5595929 - DNA, 25 bp, Homo sapien
aaagatcacagcattagtgcatccc

SEQ ID NO: 5595930 - DNA, 25 bp, Homo sapien
gctcagagagaaggagcatatttct

SEQ ID NO: 5595931 - DNA, 25 bp, Homo sapien
tcaccagcgtatcttgcacagagtt

SEQ ID NO: 5595932 - DNA, 25 bp, Homo sapien
ctgtaccttaacagagaaggctaca

SEQ ID NO: 5595933 - DNA, 25 bp, Homo sapien
taatgggaatgttgtgacagtctcc

SEQ ID NO: 5595934 - DNA, 25 bp, Homo sapien
tgaggcttgtctacaggacatatgc

SEQ ID NO: 5595935 - DNA, 25 bp, Homo sapien
atacatgggtaaacacaacatatag

SEQ ID NO: 5595936 - DNA, 25 bp, Homo sapien
tgcggatgcagatataaacttactc

SEQ ID NO: 5595937 - DNA, 25 bp, Homo sapien
ttggtaaagccatcttagactctag

SEQ ID NO: 5595938 - DNA, 25 bp, Homo sapien
atggcctgggaagtatgtttttggt

SEQ ID NO: 5595939 - DNA, 25 bp, Homo sapien
tccccagcctacactgcggatgcag

SEQ ID NO: 5595940 - DNA, 25 bp, Homo sapien
atctaagctgatctaagtggtttat

SEQ ID NO: 5595941 - DNA, 25 bp, Homo sapien
ttcacatataggtgcatggcctggg

SEQ ID NO: 5595942 - DNA, 25 bp, Homo sapien
gaaaaaaaatgctagatctgtatct

SEQ ID NO: 5595943 - DNA, 25 bp, Homo sapien
gttccagcttagcatttcagggccc

SEQ ID NO: 5595944 - DNA, 25 bp, Homo sapien
atttgccatttgggtcgattgactt

SEQ ID NO: 5595945 - DNA, 25 bp, Homo sapien
acttggcatgtggcagaaatagaat

SEQ ID NO: 5595946 - DNA, 25 bp, Homo sapien
gttcaaataacagcggcaaggaatg

SEQ ID NO: 5595947 - DNA, 25 bp, Homo sapien
cagaaatagaatggaattgcaaggg

SEQ ID NO: 5595948 - DNA, 25 bp, Homo sapien
ggctgggtttgtattctgggttcca

SEQ ID NO: 5595949 - DNA, 25 bp, Homo sapien
ggcccctgtctgctgctctctgtct

SEQ ID NO: 5595950 - DNA, 25 bp, Homo sapien
caggcttgctgcatgttaggctggg

SEQ ID NO: 5595951 - DNA, 25 bp, Homo sapien
tgctgctctctgtctatgtggtgtc

SEQ ID NO: 5595952 - DNA, 25 bp, Homo sapien
caagaaacgcaggaatcatttcctc

SEQ ID NO: 5595953 - DNA, 25 bp, Homo sapien
tggtgtctttagaacagggaagtgg

SEQ ID NO: 5595954 - DNA, 25 bp, Homo sapien
cctgtcatagcacttggcatgtggc

SEQ ID NO: 5595955 - DNA, 25 bp, Homo sapien
atattagcttagaaccagggtccaa

SEQ ID NO: 5595956 - DNA, 25 bp, Homo sapien
tcagggcctctaccgtgtgtcggaa

SEQ ID NO: 5595957 - DNA, 25 bp, Homo sapien
ttccgacacacggtagaggccctga

SEQ ID NO: 5595958 - DNA, 25 bp, Homo sapien
gcttcctgccttggagttggatccc

SEQ ID NO: 5595959 - DNA, 25 bp, Homo sapien
aagatatagatcataaagaccttgc

SEQ ID NO: 5595960 - DNA, 25 bp, Homo sapien
agaggcatttgaactagagcaactg

SEQ ID NO: 5595961 - DNA, 25 bp, Homo sapien
ctaggtttggtgaagcacaactgtc

SEQ ID NO: 5595962 - DNA, 25 bp, Homo sapien
gctgcattcccagacagttaggcat

SEQ ID NO: 5595963 - DNA, 25 bp, Homo sapien
agataggaggtcgactcaagatata

SEQ ID NO: 5595964 - DNA, 25 bp, Homo sapien
agacagttaggcattctaggttaca

SEQ ID NO: 5595965 - DNA, 25 bp, Homo sapien
tctcagttgtgcttcccacccagcc

SEQ ID NO: 5595966 - DNA, 25 bp, Homo sapien
ggacaatgaggctgaaacctactgg

SEQ ID NO: 5595967 - DNA, 25 bp, Homo sapien
gagcgcagtggcaattctggactca

SEQ ID NO: 5595968 - DNA, 25 bp, Homo sapien
ctaggttacagaatgagataggagg

SEQ ID NO: 5595969 - DNA, 25 bp, Homo sapien
cccacacactccatgagacgacgtc

SEQ ID NO: 5595970 - DNA, 25 bp, Homo sapien
cccaaagtcaaagagccaaatgggc

SEQ ID NO: 5595971 - DNA, 25 bp, Homo sapien
tgtagggccctagattatttcagta

SEQ ID NO: 5595972 - DNA, 25 bp, Homo sapien
cagacagtactaagtccaaacatgc

SEQ ID NO: 5595973 - DNA, 25 bp, Homo sapien
aatgataaagatgtgcctggttagt

SEQ ID NO: 5595974 - DNA, 25 bp, Homo sapien
ataacaggtatggaacacacaccca

SEQ ID NO: 5595975 - DNA, 25 bp, Homo sapien
ggcctgccatgagagtgccttccga

SEQ ID NO: 5595976 - DNA, 25 bp, Homo sapien
gacgacgtcatcagcactgtagggc

SEQ ID NO: 5595977 - DNA, 25 bp, Homo sapien
gcctttgatatgtcgaggaaggcct

SEQ ID NO: 5595978 - DNA, 25 bp, Homo sapien
actaaaatcataccagacccaccct

SEQ ID NO: 5595979 - DNA, 25 bp, Homo sapien
acgcccagccagcctttgatatgtc

SEQ ID NO: 5595980 - DNA, 25 bp, Homo sapien
ggggtctgagcctcacacgttgtct

SEQ ID NO: 5595981 - DNA, 25 bp, Homo sapien
gcttcccgtgtcccagcctgaggag

SEQ ID NO: 5595982 - DNA, 25 bp, Homo sapien
cacagggggctatttacgccttgtc

SEQ ID NO: 5595983 - DNA, 25 bp, Homo sapien
atccaggagtcagaacatccagtcc

SEQ ID NO: 5595984 - DNA, 25 bp, Homo sapien
tcacagaccgtaaaaggcatccttc

SEQ ID NO: 5595985 - DNA, 25 bp, Homo sapien
cacgagttccacctccgagctctgc

SEQ ID NO: 5595986 - DNA, 25 bp, Homo sapien
gtgcccatacacagtcacgagttcc

SEQ ID NO: 5595987 - DNA, 25 bp, Homo sapien
cataggtgtagtcagcacttggggt

SEQ ID NO: 5595988 - DNA, 25 bp, Homo sapien
gttgtctacactaagcctggctgtc

SEQ ID NO: 5595989 - DNA, 25 bp, Homo sapien
ggctttgagcatcttggtccctgag

SEQ ID NO: 5595990 - DNA, 25 bp, Homo sapien
aaaggcatccttctggaggccatcc

SEQ ID NO: 5595991 - DNA, 25 bp, Homo sapien
cctaacctctgcgtcccgcgtggcg

SEQ ID NO: 5595992 - DNA, 25 bp, Homo sapien
accgagtgtttcccctgcgccgtct

SEQ ID NO: 5595993 - DNA, 25 bp, Homo sapien
cgttcgcgtaattaaaacgagtggc

SEQ ID NO: 5595994 - DNA, 25 bp, Homo sapien
ccaccacccaaacttaaaggctgga

SEQ ID NO: 5595995 - DNA, 25 bp, Homo sapien
ccgcgcgcccctaacctctgcgtcc

SEQ ID NO: 5595996 - DNA, 25 bp, Homo sapien
gtttcccctgcgccgtctcgcgccg

SEQ ID NO: 5595997 - DNA, 25 bp, Homo sapien
cgcaggcaccgagtgtttcccctgc

SEQ ID NO: 5595998 - DNA, 25 bp, Homo sapien
cgtaattaaaacgagtggctgacgg

SEQ ID NO: 5595999 - DNA, 25 bp, Homo sapien
cctttggtgcatctctttccccctc

SEQ ID NO: 5596000 - DNA, 25 bp, Homo sapien
acccaaacttaaaggctggatgagt

SEQ ID NO: 5596001 - DNA, 25 bp, Homo sapien
cgcgcccagcgcttaaggttttatt

SEQ ID NO: 5596002 - DNA, 25 bp, Homo sapien
tctactccgaggaataagccctgtg

SEQ ID NO: 5596003 - DNA, 25 bp, Homo sapien
gcattctccaaatggggggcaaatg

SEQ ID NO: 5596004 - DNA, 25 bp, Homo sapien
aaagcattctccaaatggggggcaa

SEQ ID NO: 5596005 - DNA, 25 bp, Homo sapien
cacccttctactccgaggaataagc

SEQ ID NO: 5596006 - DNA, 25 bp, Homo sapien
gccatgtcctgccaaccccctgccc

SEQ ID NO: 5596007 - DNA, 25 bp, Homo sapien
caagccacagtgcagtacagaagtg

SEQ ID NO: 5596008 - DNA, 25 bp, Homo sapien
gcccattgccatgtcctgccaaccc

SEQ ID NO: 5596009 - DNA, 25 bp, Homo sapien
gccacagtgcagtacagaagtgaaa

SEQ ID NO: 5596010 - DNA, 25 bp, Homo sapien
gtacagaagtgaaagcctgagattg

SEQ ID NO: 5596011 - DNA, 25 bp, Homo sapien
cccagttgcccattgccatgtcctg

SEQ ID NO: 5596012 - DNA, 25 bp, Homo sapien
agtctgggccccctgtacacccttc

SEQ ID NO: 5596013 - DNA, 25 bp, Homo sapien
tggtggaaatcttgctagaagcagc

SEQ ID NO: 5596014 - DNA, 25 bp, Homo sapien
gcagagctccagggctttctacgac

SEQ ID NO: 5596015 - DNA, 25 bp, Homo sapien
tggtaattggccagttcaagatctc

SEQ ID NO: 5596016 - DNA, 25 bp, Homo sapien
taagttctagcatatggtggaaatc

SEQ ID NO: 5596017 - DNA, 25 bp, Homo sapien
gacaactggtgtcaatgatcactgc

SEQ ID NO: 5596018 - DNA, 25 bp, Homo sapien
tgcagtctcacgtgaacaaagaata

SEQ ID NO: 5596019 - DNA, 25 bp, Homo sapien
aagaatacttagattagcagaggaa

SEQ ID NO: 5596020 - DNA, 25 bp, Homo sapien
caaaaaaccagcatgtcacatctcc

SEQ ID NO: 5596021 - DNA, 25 bp, Homo sapien
cagaaatgtacaaaaaacacgcttc

SEQ ID NO: 5596022 - DNA, 25 bp, Homo sapien
aatcttgaaggaacatctgggtaaa

SEQ ID NO: 5596023 - DNA, 25 bp, Homo sapien
tagcagaggaagtttatagcgtaaa

SEQ ID NO: 5596024 - DNA, 25 bp, Homo sapien
ctttggtgtcacccattgtgtgcag

SEQ ID NO: 5596025 - DNA, 25 bp, Homo sapien
caggcactccttgggtgaacagctg

SEQ ID NO: 5596026 - DNA, 25 bp, Homo sapien
tggtgtcacccattgtgtgcagcac

SEQ ID NO: 5596027 - DNA, 25 bp, Homo sapien
ctgtaacagaatactgatgactcag

SEQ ID NO: 5596028 - DNA, 25 bp, Homo sapien
gaggacaaccgggttgcaagtagta

SEQ ID NO: 5596029 - DNA, 25 bp, Homo sapien
atgctcaggcactccttgggtgaac

SEQ ID NO: 5596030 - DNA, 25 bp, Homo sapien
tcactattgtccatctggccgcacc

SEQ ID NO: 5596031 - DNA, 25 bp, Homo sapien
tgaactgtaacagaatactgatgac

SEQ ID NO: 5596032 - DNA, 25 bp, Homo sapien
ctttcaatgaactgtaacagaatac

SEQ ID NO: 5596033 - DNA, 25 bp, Homo sapien
accgggttgcaagtagtaagtttgc

SEQ ID NO: 5596034 - DNA, 25 bp, Homo sapien
agctctcactattgtccatctggcc

SEQ ID NO: 5596035 - DNA, 25 bp, Homo sapien
aaacccctacactatggcctgagag

SEQ ID NO: 5596036 - DNA, 25 bp, Homo sapien
catgaccacaaacccctacactatg

SEQ ID NO: 5596037 - DNA, 25 bp, Homo sapien
aaaaatgtttagtctgctgaaggtt

SEQ ID NO: 5596038 - DNA, 25 bp, Homo sapien
gccataacaaattttaatcccagcc

SEQ ID NO: 5596039 - DNA, 25 bp, Homo sapien
tttagtctgctgaaggtttgccaat

SEQ ID NO: 5596040 - DNA, 25 bp, Homo sapien
ttatagtagccacaaaccaatcttt

SEQ ID NO: 5596041 - DNA, 25 bp, Homo sapien
ttatccctttcaatgtcagtgggct

SEQ ID NO: 5596042 - DNA, 25 bp, Homo sapien
cctacactatggcctgagagaaaac

SEQ ID NO: 5596043 - DNA, 25 bp, Homo sapien
gcctgagagaaaactgctcactaat

SEQ ID NO: 5596044 - DNA, 25 bp, Homo sapien
gctctgttgctcttattactgccat

SEQ ID NO: 5596045 - DNA, 25 bp, Homo sapien
actgctcactaataaccaaaaaact

SEQ ID NO: 5596046 - DNA, 25 bp, Homo sapien
aagtaacatactcatttctcatttt

SEQ ID NO: 5596047 - DNA, 25 bp, Homo sapien
aaaatgagaaatgagtatgttactt

SEQ ID NO: 5596048 - DNA, 25 bp, Homo sapien
actgctttgctgagaatgctgggtt

SEQ ID NO: 5596049 - DNA, 25 bp, Homo sapien
tgtgccttggtatagacagcaatac

SEQ ID NO: 5596050 - DNA, 25 bp, Homo sapien
ctgagtcgcctcttaggaacaattc

SEQ ID NO: 5596051 - DNA, 25 bp, Homo sapien
atagacagcaataccccctcctttc

SEQ ID NO: 5596052 - DNA, 25 bp, Homo sapien
gaatgctgggttgttagacacaagc

SEQ ID NO: 5596053 - DNA, 25 bp, Homo sapien
actgaagtgtgagcagcagttctgt

SEQ ID NO: 5596054 - DNA, 25 bp, Homo sapien
aaagctgtaacaaagaaagattctg

SEQ ID NO: 5596055 - DNA, 25 bp, Homo sapien
gtgtggtgtataggatacgaacaac

SEQ ID NO: 5596056 - DNA, 25 bp, Homo sapien
ctgtgcttgcccgggactattacca

SEQ ID NO: 5596057 - DNA, 25 bp, Homo sapien
cagtaaaagtcatgtgtggtgtata

SEQ ID NO: 5596058 - DNA, 25 bp, Homo sapien
tagacacaagctgaaaagtgacttc

SEQ ID NO: 5596059 - DNA, 25 bp, Homo sapien
tgggcaatgtctcctcagccatcat

SEQ ID NO: 5596060 - DNA, 25 bp, Homo sapien
gctactctgagccttggaaggtggc

SEQ ID NO: 5596061 - DNA, 25 bp, Homo sapien
caaagactagaagaaagttagacac

SEQ ID NO: 5596062 - DNA, 25 bp, Homo sapien
ctgacttgcccacatgcaggatgag

SEQ ID NO: 5596063 - DNA, 25 bp, Homo sapien
acctaagatgagacttctgggcaat

SEQ ID NO: 5596064 - DNA, 25 bp, Homo sapien
gaagaaagttagacactgacatctc

SEQ ID NO: 5596065 - DNA, 25 bp, Homo sapien
tgccaggcgttgtcgaattctccat

SEQ ID NO: 5596066 - DNA, 25 bp, Homo sapien
tcatctgccgtgatgtgtcaccctc

SEQ ID NO: 5596067 - DNA, 25 bp, Homo sapien
ccatccatcagagagctgacttgcc

SEQ ID NO: 5596068 - DNA, 25 bp, Homo sapien
tcaatagctttaaaggccccagacc

SEQ ID NO: 5596069 - DNA, 25 bp, Homo sapien
cttggaaggtggccacattcttttc

SEQ ID NO: 5596070 - DNA, 25 bp, Homo sapien
actttcaccacagcgaccaagagct

SEQ ID NO: 5596071 - DNA, 25 bp, Homo sapien
gtgactctgagtgacctgttctacc

SEQ ID NO: 5596072 - DNA, 25 bp, Homo sapien
aggggatgaatacacacgaactttc

SEQ ID NO: 5596073 - DNA, 25 bp, Homo sapien
ataggaggaggtccagctcttataa

SEQ ID NO: 5596074 - DNA, 25 bp, Homo sapien
aacagtaccctgagtgcttagagct

SEQ ID NO: 5596075 - DNA, 25 bp, Homo sapien
ttttcagaggcaactaggtagaaag

SEQ ID NO: 5596076 - DNA, 25 bp, Homo sapien
tctcacccatggtgggctctgctta

SEQ ID NO: 5596077 - DNA, 25 bp, Homo sapien
tggtggagaccctggctttcctctc

SEQ ID NO: 5596078 - DNA, 25 bp, Homo sapien
taagattcactgggaaacagtaccc

SEQ ID NO: 5596079 - DNA, 25 bp, Homo sapien
acttagacctcaagtcagcagctca

SEQ ID NO: 5596080 - DNA, 25 bp, Homo sapien
cagcagctcatgcagcagtgattgc

SEQ ID NO: 5596081 - DNA, 25 bp, Homo sapien
cctggtaagaacacagcaaaaggac

SEQ ID NO: 5596082 - DNA, 25 bp, Homo sapien
tgttccagattccagcttcagtgtc

SEQ ID NO: 5596083 - DNA, 25 bp, Homo sapien
gactaataagcagaaggctaagtgt

SEQ ID NO: 5596084 - DNA, 25 bp, Homo sapien
gcttgtgatgtgccagtatgtgtcc

SEQ ID NO: 5596085 - DNA, 25 bp, Homo sapien
gaaagaagtgtccctcaacctggta

SEQ ID NO: 5596086 - DNA, 25 bp, Homo sapien
gctaagtgtcccagagtgaacaagc

SEQ ID NO: 5596087 - DNA, 25 bp, Homo sapien
gtgcagaggtgtgattatagttcat

SEQ ID NO: 5596088 - DNA, 25 bp, Homo sapien
tttgagaccataacaatcatgcttg

SEQ ID NO: 5596089 - DNA, 25 bp, Homo sapien
aaaactcttgggattgggagatcct

SEQ ID NO: 5596090 - DNA, 25 bp, Homo sapien
ctgcatttatggaaagaagtgtccc

SEQ ID NO: 5596091 - DNA, 25 bp, Homo sapien
gcaaaaggactaataagcagaaggc

SEQ ID NO: 5596092 - DNA, 25 bp, Homo sapien
gggagaaaaatgaatgcaatggata

SEQ ID NO: 5596093 - DNA, 25 bp, Homo sapien
taaaaccacagctaggggtgtgaaa

SEQ ID NO: 5596094 - DNA, 25 bp, Homo sapien
ggttgggtcttgtttggctttctgc

SEQ ID NO: 5596095 - DNA, 25 bp, Homo sapien
gcactcgaagaataaaaacaaacac

SEQ ID NO: 5596096 - DNA, 25 bp, Homo sapien
cacgggcccattagcactcgaagaa

SEQ ID NO: 5596097 - DNA, 25 bp, Homo sapien
acaggaccagataaggttcccctac

SEQ ID NO: 5596098 - DNA, 25 bp, Homo sapien
cacattagaaatgcaaagaggtttg

SEQ ID NO: 5596099 - DNA, 25 bp, Homo sapien
aaaacaaacacacaggaccagataa

SEQ ID NO: 5596100 - DNA, 25 bp, Homo sapien
aagaggtttgcaaaacaagaggctt

SEQ ID NO: 5596101 - DNA, 25 bp, Homo sapien
agcaactgttgcacgggcccattag

SEQ ID NO: 5596102 - DNA, 25 bp, Homo sapien
tctgaatcggatgaataaccaaatt

SEQ ID NO: 5596103 - DNA, 25 bp, Homo sapien
gtcccactgcctagctgaaatatcc

SEQ ID NO: 5596104 - DNA, 25 bp, Homo sapien
agcagatattagcatcccccgcctc

SEQ ID NO: 5596105 - DNA, 25 bp, Homo sapien
ttgtgacgacatcaagcagatatta

SEQ ID NO: 5596106 - DNA, 25 bp, Homo sapien
agcaatatgccccacgtggcggcag

SEQ ID NO: 5596107 - DNA, 25 bp, Homo sapien
gcggcagtcaggcaacttaaaactg

SEQ ID NO: 5596108 - DNA, 25 bp, Homo sapien
agcactgctgactttgggacaaata

SEQ ID NO: 5596109 - DNA, 25 bp, Homo sapien
tcagaatgcattatcccagggtttc

SEQ ID NO: 5596110 - DNA, 25 bp, Homo sapien
aaggggacggaatactgtcctgtat

SEQ ID NO: 5596111 - DNA, 25 bp, Homo sapien
tgtcccctgggttagatataatcac

SEQ ID NO: 5596112 - DNA, 25 bp, Homo sapien
ttgggacaaataattgggcccacca

SEQ ID NO: 5596113 - DNA, 25 bp, Homo sapien
accctcaagagaagttttaagcaat

SEQ ID NO: 5596114 - DNA, 25 bp, Homo sapien
tatccggaaaaggtcaacatataat

SEQ ID NO: 5596115 - DNA, 25 bp, Homo sapien
attatatgttgaccttttccggata

SEQ ID NO: 5596116 - DNA, 25 bp, Homo sapien
ctgtgaccaatatgagctatgtctg

SEQ ID NO: 5596117 - DNA, 25 bp, Homo sapien
agataggcccaacttggttaggtag

SEQ ID NO: 5596118 - DNA, 25 bp, Homo sapien
ttcagctgtagcatacacaacccac

SEQ ID NO: 5596119 - DNA, 25 bp, Homo sapien
acatcatgggtttgcagagattttt

SEQ ID NO: 5596120 - DNA, 25 bp, Homo sapien
accatgcctagccatgactggcttc

SEQ ID NO: 5596121 - DNA, 25 bp, Homo sapien
tttgaccaagtcccagaagttattg

SEQ ID NO: 5596122 - DNA, 25 bp, Homo sapien
tgccctatgggatatttcagctgta

SEQ ID NO: 5596123 - DNA, 25 bp, Homo sapien
cttagccagttagataggcccaact

SEQ ID NO: 5596124 - DNA, 25 bp, Homo sapien
tacacaacccactagcaacttcctc

SEQ ID NO: 5596125 - DNA, 25 bp, Homo sapien
attacagaaagatggaactaggatt

SEQ ID NO: 5596126 - DNA, 25 bp, Homo sapien
tgggcagagcagacctacattatta

SEQ ID NO: 5596127 - DNA, 25 bp, Homo sapien
tgtctggccctcataggcacttgtt

SEQ ID NO: 5596128 - DNA, 25 bp, Homo sapien
cagtctggtgcaaagttaagtgctc

SEQ ID NO: 5596129 - DNA, 25 bp, Homo sapien
ctgatctcacaagtggccccaacac

SEQ ID NO: 5596130 - DNA, 25 bp, Homo sapien
acaggacccatgccagagctctctg

SEQ ID NO: 5596131 - DNA, 25 bp, Homo sapien
gaccttgggcatatcacatgacctc

SEQ ID NO: 5596132 - DNA, 25 bp, Homo sapien
tgcaaatggtgcaaagagtactcac

SEQ ID NO: 5596133 - DNA, 25 bp, Homo sapien
agaagtgaaatggtctgagtctgag

SEQ ID NO: 5596134 - DNA, 25 bp, Homo sapien
gactgcttgacaggacccatgccag

SEQ ID NO: 5596135 - DNA, 25 bp, Homo sapien
acactctcagacccaatgcagcgca

SEQ ID NO: 5596136 - DNA, 25 bp, Homo sapien
gagtctgagggctgctctaccctta

SEQ ID NO: 5596137 - DNA, 25 bp, Homo sapien
tacctctctggactcaggctgaggg

SEQ ID NO: 5596138 - DNA, 25 bp, Homo sapien
cactagatggtgatgcctgaatttt

SEQ ID NO: 5596139 - DNA, 25 bp, Homo sapien
caggtcttaacagttcagtgggggg

SEQ ID NO: 5596140 - DNA, 25 bp, Homo sapien
ttgctatgaaaattggtcaagtaat

SEQ ID NO: 5596141 - DNA, 25 bp, Homo sapien
ctgaattctcaaaggaagctgggaa

SEQ ID NO: 5596142 - DNA, 25 bp, Homo sapien
gaccctgtggtcactagatggtgat

SEQ ID NO: 5596143 - DNA, 25 bp, Homo sapien
aaagacaaatgagaaagggcattat

SEQ ID NO: 5596144 - DNA, 25 bp, Homo sapien
gggaaaatgatgcgagatcaagtta

SEQ ID NO: 5596145 - DNA, 25 bp, Homo sapien
agcgtttggctcagatcacacattt

SEQ ID NO: 5596146 - DNA, 25 bp, Homo sapien
actataaaaaggatctcgccaggtc

SEQ ID NO: 5596147 - DNA, 25 bp, Homo sapien
tcaagttagctgaagagcgtttggc

SEQ ID NO: 5596148 - DNA, 25 bp, Homo sapien
tcctgaagataagcagaaagtcctg

SEQ ID NO: 5596149 - DNA, 25 bp, Homo sapien
cagtgtaactgcggtgacttaccct

SEQ ID NO: 5596150 - DNA, 25 bp, Homo sapien
gtctgtttatgggttggctgagcag

SEQ ID NO: 5596151 - DNA, 25 bp, Homo sapien
ggttgttgtatccatcagcaattgc

SEQ ID NO: 5596152 - DNA, 25 bp, Homo sapien
tgaggacaacctccaccagtgtaac

SEQ ID NO: 5596153 - DNA, 25 bp, Homo sapien
gattaaagcagcaagttggcatggt

SEQ ID NO: 5596154 - DNA, 25 bp, Homo sapien
gcagtccaatgcagaatgttgacca

SEQ ID NO: 5596155 - DNA, 25 bp, Homo sapien
actcagtgtctgaaaaatgatactt

SEQ ID NO: 5596156 - DNA, 25 bp, Homo sapien
cctgtgattaaagcagcaagttggc

SEQ ID NO: 5596157 - DNA, 25 bp, Homo sapien
gctgagcaggtctgctgatgttggc

SEQ ID NO: 5596158 - DNA, 25 bp, Homo sapien
ctcctcagtctgtttatgggttggc

SEQ ID NO: 5596159 - DNA, 25 bp, Homo sapien
atctcagaagaaattgagatcaaaa

SEQ ID NO: 5596160 - DNA, 25 bp, Homo sapien
tttccctctataggatatgtgcagc

SEQ ID NO: 5596161 - DNA, 25 bp, Homo sapien
tgaggttttggtgcctgaggtttta

SEQ ID NO: 5596162 - DNA, 25 bp, Homo sapien
atctgtatctgacaggagacccccg

SEQ ID NO: 5596163 - DNA, 25 bp, Homo sapien
gtgcagcaccaatggtgtggacagc

SEQ ID NO: 5596164 - DNA, 25 bp, Homo sapien
tatgtgcagctagaaaatgtaaatc

SEQ ID NO: 5596165 - DNA, 25 bp, Homo sapien
aaaatgtaaatcttcaggtggtctt

SEQ ID NO: 5596166 - DNA, 25 bp, Homo sapien
caagtaaccactaagtagctgtgaa

SEQ ID NO: 5596167 - DNA, 25 bp, Homo sapien
gaatgagcttagaattgcagattgc

SEQ ID NO: 5596168 - DNA, 25 bp, Homo sapien
tctggtgcagcaccaatggtgtgga

SEQ ID NO: 5596169 - DNA, 25 bp, Homo sapien
tttaatagaatgagcttagaattgc

SEQ ID NO: 5596170 - DNA, 25 bp, Homo sapien
ttcctggaaaaatcccagagagatg

SEQ ID NO: 5596171 - DNA, 25 bp, Homo sapien
tttcaccatttggctatgcagaggc

SEQ ID NO: 5596172 - DNA, 25 bp, Homo sapien
gtattgtagcaataatttcaccatt

SEQ ID NO: 5596173 - DNA, 25 bp, Homo sapien
tacctctgtcctgatttggaatatc

SEQ ID NO: 5596174 - DNA, 25 bp, Homo sapien
tgtcctgatttggaatatctgtgct

SEQ ID NO: 5596175 - DNA, 25 bp, Homo sapien
tatctgtgctattttgggctgtttt

SEQ ID NO: 5596176 - DNA, 25 bp, Homo sapien
tatgcagaggcccaattaatattac

SEQ ID NO: 5596177 - DNA, 25 bp, Homo sapien
atttggctatgcagaggcccaatta

SEQ ID NO: 5596178 - DNA, 25 bp, Homo sapien
attggtggttttttatgtatagaga

SEQ ID NO: 5596179 - DNA, 25 bp, Homo sapien
caccatttggctatgcagaggccca

SEQ ID NO: 5596180 - DNA, 25 bp, Homo sapien
atgtatagagaaattacctctgtcc

SEQ ID NO: 5596181 - DNA, 25 bp, Homo sapien
cttttgggcctgtttgtattgtagc

SEQ ID NO: 5596182 - DNA, 25 bp, Homo sapien
ctgagacgaggactacctcggacac

SEQ ID NO: 5596183 - DNA, 25 bp, Homo sapien
gtgtccgaggtagtcctcgtctcag

SEQ ID NO: 5596184 - DNA, 25 bp, Homo sapien
ggtgtacaggtatttgttgcattat

SEQ ID NO: 5596185 - DNA, 25 bp, Homo sapien
ctaacaactgtgggatccaggtgag

SEQ ID NO: 5596186 - DNA, 25 bp, Homo sapien
gggccatgaccagcagcctggtcca

SEQ ID NO: 5596187 - DNA, 25 bp, Homo sapien
gggagaatgcaaatgtgctgaagaa

SEQ ID NO: 5596188 - DNA, 25 bp, Homo sapien
aacaactaggaacctgctgtgggtc

SEQ ID NO: 5596189 - DNA, 25 bp, Homo sapien
gtgctgaagaactaacaactgtggg

SEQ ID NO: 5596190 - DNA, 25 bp, Homo sapien
aaaacagcattgacagtgccttccc

SEQ ID NO: 5596191 - DNA, 25 bp, Homo sapien
tgctgtgggtcacagcttgggaagc

SEQ ID NO: 5596192 - DNA, 25 bp, Homo sapien
tacttttgtgagctgaacagtgggg

SEQ ID NO: 5596193 - DNA, 25 bp, Homo sapien
ttttgagatctcagaaagttggaca

SEQ ID NO: 5596194 - DNA, 25 bp, Homo sapien
cagcctggtccaaaacaacaactag

SEQ ID NO: 5596195 - DNA, 25 bp, Homo sapien
ggagcgagggagctatttcttgttt

SEQ ID NO: 5596196 - DNA, 25 bp, Homo sapien
gtcttcaggctgcccaaaaggatct

SEQ ID NO: 5596197 - DNA, 25 bp, Homo sapien
ggcaaaaccagaactcagctgcagc

SEQ ID NO: 5596198 - DNA, 25 bp, Homo sapien
ctgagaaatttatgaagaggagcga

SEQ ID NO: 5596199 - DNA, 25 bp, Homo sapien
tgccagcctcctggccgcacgtgtg

SEQ ID NO: 5596200 - DNA, 25 bp, Homo sapien
tcagctgcagcagcaactccccaca

SEQ ID NO: 5596201 - DNA, 25 bp, Homo sapien
accctccccagtcttcaggctgccc

SEQ ID NO: 5596202 - DNA, 25 bp, Homo sapien
gaagaatggggacctactcccacta

SEQ ID NO: 5596203 - DNA, 25 bp, Homo sapien
caggtgggaatgttaccaactggga

SEQ ID NO: 5596204 - DNA, 25 bp, Homo sapien
aatccagagaaattgtaagaaactt

SEQ ID NO: 5596205 - DNA, 25 bp, Homo sapien
tcccactacataccaaaaaaacgca

SEQ ID NO: 5596206 - DNA, 25 bp, Homo sapien
ccacctgaagaccccccattctgcc

SEQ ID NO: 5596207 - DNA, 25 bp, Homo sapien
aagctcaaagagcaggctgtttttc

SEQ ID NO: 5596208 - DNA, 25 bp, Homo sapien
tgagaaatgccatgtttggaatagc

SEQ ID NO: 5596209 - DNA, 25 bp, Homo sapien
ttattgcgtattttgggtggaggta

SEQ ID NO: 5596210 - DNA, 25 bp, Homo sapien
agcagggccatctttacagcacggc

SEQ ID NO: 5596211 - DNA, 25 bp, Homo sapien
ccagagattgattgagaacaaaagc

SEQ ID NO: 5596212 - DNA, 25 bp, Homo sapien
gaacaaaagcattaaagcaagtgca

SEQ ID NO: 5596213 - DNA, 25 bp, Homo sapien
tgagctaaatagtaaataagtgtgc

SEQ ID NO: 5596214 - DNA, 25 bp, Homo sapien
cagcacggccaaatgaccacctgaa

SEQ ID NO: 5596215 - DNA, 25 bp, Homo sapien
gagatggaactaagaagaaatgaaa

SEQ ID NO: 5596216 - DNA, 25 bp, Homo sapien
gctaaatgagcattcttggcccctg

SEQ ID NO: 5596217 - DNA, 25 bp, Homo sapien
cctgtctacaaatgagctagctttc

SEQ ID NO: 5596218 - DNA, 25 bp, Homo sapien
aagtgagtgttgtattatgcatgac

SEQ ID NO: 5596219 - DNA, 25 bp, Homo sapien
gctttgactaggccagttagcagac

SEQ ID NO: 5596220 - DNA, 25 bp, Homo sapien
aagattcagtttggataaagttctc

SEQ ID NO: 5596221 - DNA, 25 bp, Homo sapien
ggaagctcttaactctggatacctg

SEQ ID NO: 5596222 - DNA, 25 bp, Homo sapien
ttgcttaggtcaaaaataccagcct

SEQ ID NO: 5596223 - DNA, 25 bp, Homo sapien
aagtaaatagataactacctctggc

SEQ ID NO: 5596224 - DNA, 25 bp, Homo sapien
ttccctcaaattcgaggaagctctt

SEQ ID NO: 5596225 - DNA, 25 bp, Homo sapien
atgcctgctacatagaaaagaacta

SEQ ID NO: 5596226 - DNA, 25 bp, Homo sapien
gttagcagacatatagaaactactt

SEQ ID NO: 5596227 - DNA, 25 bp, Homo sapien
gaagaatccacagccaaatgcatac

SEQ ID NO: 5596228 - DNA, 25 bp, Homo sapien
ggtctttccatcaaggccaaaccta

SEQ ID NO: 5596229 - DNA, 25 bp, Homo sapien
agcattcagggcaaaattcagactt

SEQ ID NO: 5596230 - DNA, 25 bp, Homo sapien
gggcctgatctggaagccaatttca

SEQ ID NO: 5596231 - DNA, 25 bp, Homo sapien
tgattaaggctataatggcagcttt

SEQ ID NO: 5596232 - DNA, 25 bp, Homo sapien
ctgtgagctaaaaagcattcagggc

SEQ ID NO: 5596233 - DNA, 25 bp, Homo sapien
gaagatggaagagatttcagaagtt

SEQ ID NO: 5596234 - DNA, 25 bp, Homo sapien
ataatggcagctttggatactttct

SEQ ID NO: 5596235 - DNA, 25 bp, Homo sapien
acctatctggcctgagggcctgatc

SEQ ID NO: 5596236 - DNA, 25 bp, Homo sapien
tgaggatggataggtcatatgatta

SEQ ID NO: 5596237 - DNA, 25 bp, Homo sapien
tcaccgtggttgccttcagtagttt

SEQ ID NO: 5596238 - DNA, 25 bp, Homo sapien
accaagttagaaactgaggatggat

SEQ ID NO: 5596239 - DNA, 25 bp, Homo sapien
agctaatgatggatatctgagttgt

SEQ ID NO: 5596240 - DNA, 25 bp, Homo sapien
gttcactgcaaaggtgaaagagtcc

SEQ ID NO: 5596241 - DNA, 25 bp, Homo sapien
attggtgggtaatgctccatccagt

SEQ ID NO: 5596242 - DNA, 25 bp, Homo sapien
atcgggtactgtgaataaaactgcc

SEQ ID NO: 5596243 - DNA, 25 bp, Homo sapien
aactgctaagtggcagggttgtttc

SEQ ID NO: 5596244 - DNA, 25 bp, Homo sapien
tctgtaatgtccctctagtgccctc

SEQ ID NO: 5596245 - DNA, 25 bp, Homo sapien
tccccacaggcttgcagggtacaat

SEQ ID NO: 5596246 - DNA, 25 bp, Homo sapien
tgagttgtttctaagtatcgggtac

SEQ ID NO: 5596247 - DNA, 25 bp, Homo sapien
tattggcatgttaagacaccatgat

SEQ ID NO: 5596248 - DNA, 25 bp, Homo sapien
agggtgaacttggagccaactaata

SEQ ID NO: 5596249 - DNA, 25 bp, Homo sapien
tgacaaagcccaacatgttgttcac

SEQ ID NO: 5596250 - DNA, 25 bp, Homo sapien
ctgcgaactccgccgattcgggcaa

SEQ ID NO: 5596251 - DNA, 25 bp, Homo sapien
tgcgaactccgccgattcgggcaag

SEQ ID NO: 5596252 - DNA, 25 bp, Homo sapien
ggtgccggcaggcatcttcctctgg

SEQ ID NO: 5596253 - DNA, 25 bp, Homo sapien
aggtgtacccagcctgcgctcttcg

SEQ ID NO: 5596254 - DNA, 25 bp, Homo sapien
ccgccctcgctagctgcgaactccg

SEQ ID NO: 5596255 - DNA, 25 bp, Homo sapien
tgtacccagcctgcgctcttcgtcc

SEQ ID NO: 5596256 - DNA, 25 bp, Homo sapien
ctcgctagctgcgaactccgccgat

SEQ ID NO: 5596257 - DNA, 25 bp, Homo sapien
gtgtacccagcctgcgctcttcgtc

SEQ ID NO: 5596258 - DNA, 25 bp, Homo sapien
cctcgctagctgcgaactccgccga

SEQ ID NO: 5596259 - DNA, 25 bp, Homo sapien
tacccagcctgcgctcttcgtccgc

SEQ ID NO: 5596260 - DNA, 25 bp, Homo sapien
tcgctagctgcgaactccgccgatt

SEQ ID NO: 5596261 - DNA, 25 bp, Homo sapien
aacaaaatagagaattcctgacaac

SEQ ID NO: 5596262 - DNA, 25 bp, Homo sapien
tggctaaacatcttgaaacctttgc

SEQ ID NO: 5596263 - DNA, 25 bp, Homo sapien
tttgggtgtgaaaattcatgggaaa

SEQ ID NO: 5596264 - DNA, 25 bp, Homo sapien
agaagaccatgtttttgtagaggaa

SEQ ID NO: 5596265 - DNA, 25 bp, Homo sapien
aacaataacaatttttgggtgtgaa

SEQ ID NO: 5596266 - DNA, 25 bp, Homo sapien
aatcatgtaatgaacaggtaaaaga

SEQ ID NO: 5596267 - DNA, 25 bp, Homo sapien
atatttggctaaacatcttgaaacc

SEQ ID NO: 5596268 - DNA, 25 bp, Homo sapien
ggaattaaaagacctgaacttgaca

SEQ ID NO: 5596269 - DNA, 25 bp, Homo sapien
actttagtatattctcaggattttc

SEQ ID NO: 5596270 - DNA, 25 bp, Homo sapien
atgtaatgaacaggtaaaagaaaat

SEQ ID NO: 5596271 - DNA, 25 bp, Homo sapien
taatgaacaggtaaaagaaaatgta

SEQ ID NO: 5596272 - DNA, 25 bp, Homo sapien
aaaagcatacctaccctccctgttc

SEQ ID NO: 5596273 - DNA, 25 bp, Homo sapien
tgctatggatgtaatttctcactgc

SEQ ID NO: 5596274 - DNA, 25 bp, Homo sapien
gaaacaagacaaaatcatgtaggtt

SEQ ID NO: 5596275 - DNA, 25 bp, Homo sapien
agtgccgtttggaatctttggtcat

SEQ ID NO: 5596276 - DNA, 25 bp, Homo sapien
ctgcaatacatgacagtcctatgac

SEQ ID NO: 5596277 - DNA, 25 bp, Homo sapien
tggtcattggaacttgaacaatggc

SEQ ID NO: 5596278 - DNA, 25 bp, Homo sapien
gaacaatggctggactctttaaaaa

SEQ ID NO: 5596279 - DNA, 25 bp, Homo sapien
acgctaaagcaagttaaaagtggga

SEQ ID NO: 5596280 - DNA, 25 bp, Homo sapien
cacattattagctggtaagtactct

SEQ ID NO: 5596281 - DNA, 25 bp, Homo sapien
tacagaggcttcaagtgggtattca

SEQ ID NO: 5596282 - DNA, 25 bp, Homo sapien
gagtgacacactatccctgcgaaat

SEQ ID NO: 5596283 - DNA, 25 bp, Homo sapien
tatctaggaaccaaggcatgtcttc

SEQ ID NO: 5596284 - DNA, 25 bp, Homo sapien
ctaaatggttttctgcatggctccc

SEQ ID NO: 5596285 - DNA, 25 bp, Homo sapien
tgtttcaacatgtgggtcttactcc

SEQ ID NO: 5596286 - DNA, 25 bp, Homo sapien
cttccctagaattgtgcttgtcatc

SEQ ID NO: 5596287 - DNA, 25 bp, Homo sapien
ctgtgaaatactgtcctcatcagac

SEQ ID NO: 5596288 - DNA, 25 bp, Homo sapien
taatcttggagtttggctaccttac

SEQ ID NO: 5596289 - DNA, 25 bp, Homo sapien
gctggatggagtgatctgtctcctc

SEQ ID NO: 5596290 - DNA, 25 bp, Homo sapien
gatccctctggaatttactctggtc

SEQ ID NO: 5596291 - DNA, 25 bp, Homo sapien
ctcagtgtccaccctcgttacatgg

SEQ ID NO: 5596292 - DNA, 25 bp, Homo sapien
ggcatgtcttcacgtactaagctcc

SEQ ID NO: 5596293 - DNA, 25 bp, Homo sapien
tacatggagttgtttgccttccccc

SEQ ID NO: 5596294 - DNA, 25 bp, Homo sapien
ggtctgccaatctcctgtgtcccac

SEQ ID NO: 5596295 - DNA, 25 bp, Homo sapien
gaggctagctgtgttggtctgccaa

SEQ ID NO: 5596296 - DNA, 25 bp, Homo sapien
ttgtgaacaaatgaacatgccacat

SEQ ID NO: 5596297 - DNA, 25 bp, Homo sapien
caaaaatacaaccactgggtaggta

SEQ ID NO: 5596298 - DNA, 25 bp, Homo sapien
ggaataaggattgagaagaaaactc

SEQ ID NO: 5596299 - DNA, 25 bp, Homo sapien
tgtcccccgtgattaagttgtgaac

SEQ ID NO: 5596300 - DNA, 25 bp, Homo sapien
actcagcaagggtgatgaatgagtt

SEQ ID NO: 5596301 - DNA, 25 bp, Homo sapien
gctggagttagctgaagaatgaata

SEQ ID NO: 5596302 - DNA, 25 bp, Homo sapien
caaggacaatctactgataagagaa

SEQ ID NO: 5596303 - DNA, 25 bp, Homo sapien
aagttgtaggagactaaacatggtt

SEQ ID NO: 5596304 - DNA, 25 bp, Homo sapien
atgcatgagctatgtcaacaaggac

SEQ ID NO: 5596305 - DNA, 25 bp, Homo sapien
atactggcttttgctagacaatgat

SEQ ID NO: 5596306 - DNA, 25 bp, Homo sapien
atgtagtctacccaatcataaagtc

SEQ ID NO: 5596307 - DNA, 25 bp, Homo sapien
tgcacgctaaggacattctaatatg

SEQ ID NO: 5596308 - DNA, 25 bp, Homo sapien
ctggatgagtagtttagcgtctgat

SEQ ID NO: 5596309 - DNA, 25 bp, Homo sapien
atagaatgatagtacaagttgagtc

SEQ ID NO: 5596310 - DNA, 25 bp, Homo sapien
cagggtaattaatcactatactggc

SEQ ID NO: 5596311 - DNA, 25 bp, Homo sapien
tgctagacaatgatttctgggttca

SEQ ID NO: 5596312 - DNA, 25 bp, Homo sapien
ctgagaaattacaaactggtatgtt

SEQ ID NO: 5596313 - DNA, 25 bp, Homo sapien
tgctctctgcacgctaaggacattc

SEQ ID NO: 5596314 - DNA, 25 bp, Homo sapien
tttgacaaaattctggatgagtagt

SEQ ID NO: 5596315 - DNA, 25 bp, Homo sapien
tctgggttcaatactcatgtagtct

SEQ ID NO: 5596316 - DNA, 25 bp, Homo sapien
attccccagcgtcacacatgcccat

SEQ ID NO: 5596317 - DNA, 25 bp, Homo sapien
gccttcccaggggctctccagtttc

SEQ ID NO: 5596318 - DNA, 25 bp, Homo sapien
tgagtgggggagcactttttataaa

SEQ ID NO: 5596319 - DNA, 25 bp, Homo sapien
cacatgcccatccccagctggagca

SEQ ID NO: 5596320 - DNA, 25 bp, Homo sapien
tcacaggtatccattccccagcgtc

SEQ ID NO: 5596321 - DNA, 25 bp, Homo sapien
ttcagcccctccttgccgagccaga

SEQ ID NO: 5596322 - DNA, 25 bp, Homo sapien
ccagatcctgcgagcggctatttag

SEQ ID NO: 5596323 - DNA, 25 bp, Homo sapien
gcgagcggctatttagacttgatgc

SEQ ID NO: 5596324 - DNA, 25 bp, Homo sapien
tctccagtttcagcccctccttgcc

SEQ ID NO: 5596325 - DNA, 25 bp, Homo sapien
acaaaaagcccccagatcctgcgag

SEQ ID NO: 5596326 - DNA, 25 bp, Homo sapien
tggagcacactcttcagtgtggagg

SEQ ID NO: 5596327 - DNA, 25 bp, Homo sapien
tttaaaaatgagctaggcatgatgg

SEQ ID NO: 5596328 - DNA, 25 bp, Homo sapien
agaggtcatgaactatatttgcttt

SEQ ID NO: 5596329 - DNA, 25 bp, Homo sapien
cagaagtatactataatgcaggaga

SEQ ID NO: 5596330 - DNA, 25 bp, Homo sapien
tctgtggctggtcaacccctggtta

SEQ ID NO: 5596331 - DNA, 25 bp, Homo sapien
gtcatccctaaagagcagttttcaa

SEQ ID NO: 5596332 - DNA, 25 bp, Homo sapien
cggggaccagccaactactactatt

SEQ ID NO: 5596333 - DNA, 25 bp, Homo sapien
gagctaggcatgatggtgtacatct

SEQ ID NO: 5596334 - DNA, 25 bp, Homo sapien
aaagtttggaaatcactatacacac

SEQ ID NO: 5596335 - DNA, 25 bp, Homo sapien
ctagcaaactaggtgaacagaagta

SEQ ID NO: 5596336 - DNA, 25 bp, Homo sapien
tcaacagttgctagaggtcatgaac

SEQ ID NO: 5596337 - DNA, 25 bp, Homo sapien
caacccctggttataaagagaagat

SEQ ID NO: 5596338 - DNA, 25 bp, Homo sapien
tttctactgagcaccaacgatttat

SEQ ID NO: 5596339 - DNA, 25 bp, Homo sapien
tcaattaggaatttagggatatata

SEQ ID NO: 5596340 - DNA, 25 bp, Homo sapien
ttggagacaattctgaacatgaagt

SEQ ID NO: 5596341 - DNA, 25 bp, Homo sapien
atacacgtgtaaaggcaggtgtctt

SEQ ID NO: 5596342 - DNA, 25 bp, Homo sapien
atatgtgccttgaagaaaagatcat

SEQ ID NO: 5596343 - DNA, 25 bp, Homo sapien
gacatgttggctgctcagaaactgc

SEQ ID NO: 5596344 - DNA, 25 bp, Homo sapien
aatgccccacaagttatgaaggtaa

SEQ ID NO: 5596345 - DNA, 25 bp, Homo sapien
agcacagcaaagacacccatattga

SEQ ID NO: 5596346 - DNA, 25 bp, Homo sapien
tgatgtgggacaattaagaagttac

SEQ ID NO: 5596347 - DNA, 25 bp, Homo sapien
ttcaagttcactaaaggctcaattt

SEQ ID NO: 5596348 - DNA, 25 bp, Homo sapien
acagaattaagactgcaagcacagc

SEQ ID NO: 5596349 - DNA, 25 bp, Homo sapien
acagtgggacattgtgacatcatca

SEQ ID NO: 5596350 - DNA, 25 bp, Homo sapien
tggtctcatctaggagtggccaagc

SEQ ID NO: 5596351 - DNA, 25 bp, Homo sapien
ctattcacggaatagacaggaaagc

SEQ ID NO: 5596352 - DNA, 25 bp, Homo sapien
gaggctcagggctatgttcatgctt

SEQ ID NO: 5596353 - DNA, 25 bp, Homo sapien
agcggtgggtgattcaataccagca

SEQ ID NO: 5596354 - DNA, 25 bp, Homo sapien
tttgtaattgagaatgctgaggctc

SEQ ID NO: 5596355 - DNA, 25 bp, Homo sapien
acgtccaggattctagaggaccctc

SEQ ID NO: 5596356 - DNA, 25 bp, Homo sapien
ccaaaagtatccagggacaaacgtc

SEQ ID NO: 5596357 - DNA, 25 bp, Homo sapien
atcattggtggtcttggacagtttc

SEQ ID NO: 5596358 - DNA, 25 bp, Homo sapien
gcaattgaccggagctgtcaaggac

SEQ ID NO: 5596359 - DNA, 25 bp, Homo sapien
catcggtggaaaatgtctcagtgag

SEQ ID NO: 5596360 - DNA, 25 bp, Homo sapien
tataaaaattttcgtctttaataga

SEQ ID NO: 5596361 - DNA, 25 bp, Homo sapien
tctattaaagacgaaaatttttata

SEQ ID NO: 5596362 - DNA, 25 bp, Homo sapien
tccctgcttggtttggtaggttgtc

SEQ ID NO: 5596363 - DNA, 25 bp, Homo sapien
ttgtgtttaaccagccttgcgtttc

SEQ ID NO: 5596364 - DNA, 25 bp, Homo sapien
ggtaggttgtctttggccatattgc

SEQ ID NO: 5596365 - DNA, 25 bp, Homo sapien
ttgcctaatgtttgactaatgctgc

SEQ ID NO: 5596366 - DNA, 25 bp, Homo sapien
acaatcacgtggtctgtggacagtt

SEQ ID NO: 5596367 - DNA, 25 bp, Homo sapien
tgcgcccggcccactgttttgtgga

SEQ ID NO: 5596368 - DNA, 25 bp, Homo sapien
agtagcagagtctctaggtggtatt

SEQ ID NO: 5596369 - DNA, 25 bp, Homo sapien
atgctgctatttgtggatgtctttg

SEQ ID NO: 5596370 - DNA, 25 bp, Homo sapien
tgtctttgaaaagtagcagagtctc

SEQ ID NO: 5596371 - DNA, 25 bp, Homo sapien
tctaatctggagccttgtatttctt

SEQ ID NO: 5596372 - DNA, 25 bp, Homo sapien
agccttgcgtttctggggtaatccc

SEQ ID NO: 5596373 - DNA, 25 bp, Homo sapien
ctctctactgaaagcctggaagtct

SEQ ID NO: 5596374 - DNA, 25 bp, Homo sapien
ctagtggacagagattatgtcttac

SEQ ID NO: 5596375 - DNA, 25 bp, Homo sapien
ttcctgtgcaggacacactattcaa

SEQ ID NO: 5596376 - DNA, 25 bp, Homo sapien
tcttgagcatgtcttatttccccta

SEQ ID NO: 5596377 - DNA, 25 bp, Homo sapien
aatataaccatttcctgtgcaggac

SEQ ID NO: 5596378 - DNA, 25 bp, Homo sapien
tactccaataagacctaggaaagaa

SEQ ID NO: 5596379 - DNA, 25 bp, Homo sapien
gaaagcctggaagtctgaatgattt

SEQ ID NO: 5596380 - DNA, 25 bp, Homo sapien
gacttgtcaactcagccttaactcc

SEQ ID NO: 5596381 - DNA, 25 bp, Homo sapien
tgctgaggacaagaagttttgactt

SEQ ID NO: 5596382 - DNA, 25 bp, Homo sapien
aggaaagaagctaacaaatataacc

SEQ ID NO: 5596383 - DNA, 25 bp, Homo sapien
aactcctgtccatatacccagaaac

SEQ ID NO: 5596384 - DNA, 25 bp, Homo sapien
gctataggcatcggagcaaatggta

SEQ ID NO: 5596385 - DNA, 25 bp, Homo sapien
gctcagtccaagctctgcagtttct

SEQ ID NO: 5596386 - DNA, 25 bp, Homo sapien
taatactgagctataggcatcggag

SEQ ID NO: 5596387 - DNA, 25 bp, Homo sapien
gctactctctggccaggagaaatac

SEQ ID NO: 5596388 - DNA, 25 bp, Homo sapien
attgagcaataagggttagaatact

SEQ ID NO: 5596389 - DNA, 25 bp, Homo sapien
attcaagctgggtacaagcagcaga

SEQ ID NO: 5596390 - DNA, 25 bp, Homo sapien
tagggcccatgttacatgtggggat

SEQ ID NO: 5596391 - DNA, 25 bp, Homo sapien
tctggaaaaacacattgagcaataa

SEQ ID NO: 5596392 - DNA, 25 bp, Homo sapien
ttctaggtggcaccagtcagtcatc

SEQ ID NO: 5596393 - DNA, 25 bp, Homo sapien
ggagaaataccaaatcataggcatc

SEQ ID NO: 5596394 - DNA, 25 bp, Homo sapien
accttttgggctgctctggaaaaac

SEQ ID NO: 5596395 - DNA, 25 bp, Homo sapien
ctaccacctgtcgaagtggccttgc

SEQ ID NO: 5596396 - DNA, 25 bp, Homo sapien
tcttgttgattagtccagcagcccc

SEQ ID NO: 5596397 - DNA, 25 bp, Homo sapien
agctgggaggcaattctgttcaccc

SEQ ID NO: 5596398 - DNA, 25 bp, Homo sapien
cagttggttgtcaccacttggggaa

SEQ ID NO: 5596399 - DNA, 25 bp, Homo sapien
tcccacctcaggacatctggcaatg

SEQ ID NO: 5596400 - DNA, 25 bp, Homo sapien
ggcaatgtctggaaacagttggttg

SEQ ID NO: 5596401 - DNA, 25 bp, Homo sapien
gccttgcagtgctaaatctaagtgc

SEQ ID NO: 5596402 - DNA, 25 bp, Homo sapien
gaaatgagacgcacaaatcactacc

SEQ ID NO: 5596403 - DNA, 25 bp, Homo sapien
agcactcgggctcatgtgtttcatt

SEQ ID NO: 5596404 - DNA, 25 bp, Homo sapien
atctaagtgctgaggcaatttgcct

SEQ ID NO: 5596405 - DNA, 25 bp, Homo sapien
cacaatcaagaataggaaatgagac

SEQ ID NO: 5596406 - DNA, 25 bp, Homo sapien
aaaattgccccaagttctgagccac

SEQ ID NO: 5596407 - DNA, 25 bp, Homo sapien
taaaaacatataaaggcaagaccag

SEQ ID NO: 5596408 - DNA, 25 bp, Homo sapien
atgcataaatgccggtactgtcccc

SEQ ID NO: 5596409 - DNA, 25 bp, Homo sapien
ggattacaataagacagctgccctg

SEQ ID NO: 5596410 - DNA, 25 bp, Homo sapien
ttgctcctgatgtgtgggttgtgta

SEQ ID NO: 5596411 - DNA, 25 bp, Homo sapien
gatgtttagctgcacccctgaccgc

SEQ ID NO: 5596412 - DNA, 25 bp, Homo sapien
gtgaggcttactccaggggttctca

SEQ ID NO: 5596413 - DNA, 25 bp, Homo sapien
ggtagtttagggacaatgttaatga

SEQ ID NO: 5596414 - DNA, 25 bp, Homo sapien
caggggttctcagtcttggcattac

SEQ ID NO: 5596415 - DNA, 25 bp, Homo sapien
ttctgagccactgggtagaactaag

SEQ ID NO: 5596416 - DNA, 25 bp, Homo sapien
agctgccctgtgaggtcataagagc

SEQ ID NO: 5596417 - DNA, 25 bp, Homo sapien
ttgcagtcattaggctcaagcttta

SEQ ID NO: 5596418 - DNA, 25 bp, Homo sapien
tccgtctgctggctcaaaattaacc

SEQ ID NO: 5596419 - DNA, 25 bp, Homo sapien
ctttccagaaggaactaactgggcc

SEQ ID NO: 5596420 - DNA, 25 bp, Homo sapien
cagggctctgtagcttctctcacta

SEQ ID NO: 5596421 - DNA, 25 bp, Homo sapien
ctgggcctttaataacctccgtctg

SEQ ID NO: 5596422 - DNA, 25 bp, Homo sapien
ggacatctgcaggaaaggctttcca

SEQ ID NO: 5596423 - DNA, 25 bp, Homo sapien
caatttagggctagggttcagttta

SEQ ID NO: 5596424 - DNA, 25 bp, Homo sapien
ctcgaatctgcctcaaaacagtaac

SEQ ID NO: 5596425 - DNA, 25 bp, Homo sapien
ggcttcttccatggctgcggtaagc

SEQ ID NO: 5596426 - DNA, 25 bp, Homo sapien
taaccttagcttgcagtcattaggc

SEQ ID NO: 5596427 - DNA, 25 bp, Homo sapien
accatgtcagagtcattcacttagt

SEQ ID NO: 5596428 - DNA, 25 bp, Homo sapien
tcagggtcaataggcagttagtcta

SEQ ID NO: 5596429 - DNA, 25 bp, Homo sapien
agaatgaaagaaggcttgaaacttt

SEQ ID NO: 5596430 - DNA, 25 bp, Homo sapien
gagatttaaagggattagtagtcat

SEQ ID NO: 5596431 - DNA, 25 bp, Homo sapien
tgggaataattcagtccccagtcct

SEQ ID NO: 5596432 - DNA, 25 bp, Homo sapien
ttttgtagggacaacaggagattta

SEQ ID NO: 5596433 - DNA, 25 bp, Homo sapien
acagttaagtccacagtaatggctt

SEQ ID NO: 5596434 - DNA, 25 bp, Homo sapien
tagtagtcatcaaaggccttgagtt

SEQ ID NO: 5596435 - DNA, 25 bp, Homo sapien
ttcatctggtaaagtggtcatcaca

SEQ ID NO: 5596436 - DNA, 25 bp, Homo sapien
agttggtttaggagctaaatttcac

SEQ ID NO: 5596437 - DNA, 25 bp, Homo sapien
aatttcaggcagtaattgggaataa

SEQ ID NO: 5596438 - DNA, 25 bp, Homo sapien
aaaaatagaagcagatagatgataa

SEQ ID NO: 5596439 - DNA, 25 bp, Homo sapien
ctcccgagtagccgccaatctaatg

SEQ ID NO: 5596440 - DNA, 25 bp, Homo sapien
tagaaaagaaagttataagcccaga

SEQ ID NO: 5596441 - DNA, 25 bp, Homo sapien
accgcaacctccacctctcaggctc

SEQ ID NO: 5596442 - DNA, 25 bp, Homo sapien
tgtacaataatccctaaagaaatct

SEQ ID NO: 5596443 - DNA, 25 bp, Homo sapien
aatcaggctgccaaataaattttta

SEQ ID NO: 5596444 - DNA, 25 bp, Homo sapien
tttgaaacattctatgcaactagtc

SEQ ID NO: 5596445 - DNA, 25 bp, Homo sapien
ttaccacatttctaatcaggctgcc

SEQ ID NO: 5596446 - DNA, 25 bp, Homo sapien
gagtagccgccaatctaatgcctgt

SEQ ID NO: 5596447 - DNA, 25 bp, Homo sapien
ctactgaaattacgttgagactatc

SEQ ID NO: 5596448 - DNA, 25 bp, Homo sapien
gttgagactatcaataaccattgcc

SEQ ID NO: 5596449 - DNA, 25 bp, Homo sapien
aatacaatacattccatggcgtttc

SEQ ID NO: 5596450 - DNA, 25 bp, Homo sapien
tcagttccactgactggctgcaaat

SEQ ID NO: 5596451 - DNA, 25 bp, Homo sapien
atttgaaagtagtaaaatgcgtaag

SEQ ID NO: 5596452 - DNA, 25 bp, Homo sapien
aatgcgtaagaatcaaattatagat

SEQ ID NO: 5596453 - DNA, 25 bp, Homo sapien
agaggatgtgatttgaaagtagtaa

SEQ ID NO: 5596454 - DNA, 25 bp, Homo sapien
aatgtccgcacaagaatactgcatg

SEQ ID NO: 5596455 - DNA, 25 bp, Homo sapien
ggaagccagcacatatctatgctac

SEQ ID NO: 5596456 - DNA, 25 bp, Homo sapien
ctgactggctgcaaatgtccgcaca

SEQ ID NO: 5596457 - DNA, 25 bp, Homo sapien
tcgtgggtcaaaatgcctccaaggt

SEQ ID NO: 5596458 - DNA, 25 bp, Homo sapien
gtacagtagagaatgcgaaatattt

SEQ ID NO: 5596459 - DNA, 25 bp, Homo sapien
atgctacttcgtgggtcaaaatgcc

SEQ ID NO: 5596460 - DNA, 25 bp, Homo sapien
atccagtacagtagagaatgcgaaa

SEQ ID NO: 5596461 - DNA, 25 bp, Homo sapien
gggaccaagcaagagcttctcccag

SEQ ID NO: 5596462 - DNA, 25 bp, Homo sapien
taatcccaatccccagagagacaac

SEQ ID NO: 5596463 - DNA, 25 bp, Homo sapien
ggaggcaagccctgactaatgcaat

SEQ ID NO: 5596464 - DNA, 25 bp, Homo sapien
agcccgctctctcccggagcagggg

SEQ ID NO: 5596465 - DNA, 25 bp, Homo sapien
ccccagagagacaacagtatttcct

SEQ ID NO: 5596466 - DNA, 25 bp, Homo sapien
tatgcctaggaaccttcagacatcc

SEQ ID NO: 5596467 - DNA, 25 bp, Homo sapien
agaactactgtaatgtaaggggagt

SEQ ID NO: 5596468 - DNA, 25 bp, Homo sapien
ttctcccagaatccaggctaagccc

SEQ ID NO: 5596469 - DNA, 25 bp, Homo sapien
ggggtgaagtccctcagaactactg

SEQ ID NO: 5596470 - DNA, 25 bp, Homo sapien
atgcaattaaggaaaacctgtaatc

SEQ ID NO: 5596471 - DNA, 25 bp, Homo sapien
tgctgttttacttgggtctgggacc

SEQ ID NO: 5596472 - DNA, 25 bp, Homo sapien
taaatattattataccaacagtctc

SEQ ID NO: 5596473 - DNA, 25 bp, Homo sapien
gattcccaagaaaatagggcagtgg

SEQ ID NO: 5596474 - DNA, 25 bp, Homo sapien
agggcagtgggtcccacatcccaga

SEQ ID NO: 5596475 - DNA, 25 bp, Homo sapien
gcagtgggtcccacatcccagatgc

SEQ ID NO: 5596476 - DNA, 25 bp, Homo sapien
cattggaacatgcagacacgtttgc

SEQ ID NO: 5596477 - DNA, 25 bp, Homo sapien
ttttgattcccaagaaaatagggca

SEQ ID NO: 5596478 - DNA, 25 bp, Homo sapien
tggaacatgcagacacgtttgctaa

SEQ ID NO: 5596479 - DNA, 25 bp, Homo sapien
tactctcattggaacatgcagacac

SEQ ID NO: 5596480 - DNA, 25 bp, Homo sapien
caccacacccagctacaaattttgc

SEQ ID NO: 5596481 - DNA, 25 bp, Homo sapien
tatccaggacggtctcgatctcctg

SEQ ID NO: 5596482 - DNA, 25 bp, Homo sapien
tcctgacctcgcaaatccacccacc

SEQ ID NO: 5596483 - DNA, 25 bp, Homo sapien
acaaaaacgtaccaactgatgtaag

SEQ ID NO: 5596484 - DNA, 25 bp, Homo sapien
tatctattagaatgcatcccttgct

SEQ ID NO: 5596485 - DNA, 25 bp, Homo sapien
gtaaaaccctagagcaaatactgca

SEQ ID NO: 5596486 - DNA, 25 bp, Homo sapien
tcacttctgactccaaacaatcttc

SEQ ID NO: 5596487 - DNA, 25 bp, Homo sapien
cattgggggcttagcatttcatctc

SEQ ID NO: 5596488 - DNA, 25 bp, Homo sapien
atctaaaatctgtgagtcttgacac

SEQ ID NO: 5596489 - DNA, 25 bp, Homo sapien
actgatgtaagatggttatttaact

SEQ ID NO: 5596490 - DNA, 25 bp, Homo sapien
aacttttcagaacacattgggggct

SEQ ID NO: 5596491 - DNA, 25 bp, Homo sapien
acatcctggactcttacaaaaacgt

SEQ ID NO: 5596492 - DNA, 25 bp, Homo sapien
ttgacacaatgaacagtaaaaccct

SEQ ID NO: 5596493 - DNA, 25 bp, Homo sapien
aaatactgcactttggcttgttctt

SEQ ID NO: 5596494 - DNA, 25 bp, Homo sapien
aaaaagctaaaatcactcaccgtgt

SEQ ID NO: 5596495 - DNA, 25 bp, Homo sapien
gagtagcagtaggtgacttcaccat

SEQ ID NO: 5596496 - DNA, 25 bp, Homo sapien
cccgggacctcagtttacatatctc

SEQ ID NO: 5596497 - DNA, 25 bp, Homo sapien
ttatgtgtcgagaaagtgtatgtgt

SEQ ID NO: 5596498 - DNA, 25 bp, Homo sapien
tctgcagtatgagtagcagtaggtg

SEQ ID NO: 5596499 - DNA, 25 bp, Homo sapien
ggaatcaggaccaccgtctttgctg

SEQ ID NO: 5596500 - DNA, 25 bp, Homo sapien
atgacgtaagtataatctggcagta

SEQ ID NO: 5596501 - DNA, 25 bp, Homo sapien
cataactcacatcatctggatctca

SEQ ID NO: 5596502 - DNA, 25 bp, Homo sapien
aaagagccactctgatgacgtaagt

SEQ ID NO: 5596503 - DNA, 25 bp, Homo sapien
ctgtagcaatacccgggacctcagt

SEQ ID NO: 5596504 - DNA, 25 bp, Homo sapien
aggaccaccgtctttgctgtagcaa

SEQ ID NO: 5596505 - DNA, 25 bp, Homo sapien
ccccatctgagtgtcacgcaggtac

SEQ ID NO: 5596506 - DNA, 25 bp, Homo sapien
tgagtgtcacgcaggtacatcaaac

SEQ ID NO: 5596507 - DNA, 25 bp, Homo sapien
gtacatacagggaaacctgggtata

SEQ ID NO: 5596508 - DNA, 25 bp, Homo sapien
tgtgatcatgtctgaggaaacactt

SEQ ID NO: 5596509 - DNA, 25 bp, Homo sapien
ctggaagggtatacattgtttcaat

SEQ ID NO: 5596510 - DNA, 25 bp, Homo sapien
ccattacagtacatacagggaaacc

SEQ ID NO: 5596511 - DNA, 25 bp, Homo sapien
catatataaagcaggataacatccc

SEQ ID NO: 5596512 - DNA, 25 bp, Homo sapien
aatagtaaaagtgtctggaagggta

SEQ ID NO: 5596513 - DNA, 25 bp, Homo sapien
tctgagcaccagatcaatcattcaa

SEQ ID NO: 5596514 - DNA, 25 bp, Homo sapien
ctagaaatatattgtggaggctggt

SEQ ID NO: 5596515 - DNA, 25 bp, Homo sapien
tccccagctgcccatagtcccttac

SEQ ID NO: 5596516 - DNA, 25 bp, Homo sapien
aaggctaagaaagatgaaatgactt

SEQ ID NO: 5596517 - DNA, 25 bp, Homo sapien
aggaacaacatgaggaatgaagtta

SEQ ID NO: 5596518 - DNA, 25 bp, Homo sapien
aaggcttctaaagcaaacatggaac

SEQ ID NO: 5596519 - DNA, 25 bp, Homo sapien
tctaaagcaaacatggaacttctag

SEQ ID NO: 5596520 - DNA, 25 bp, Homo sapien
tttaaggctaagaaagatgaaatga

SEQ ID NO: 5596521 - DNA, 25 bp, Homo sapien
catatcaaccctaggagatggacat

SEQ ID NO: 5596522 - DNA, 25 bp, Homo sapien
tatccaggaacaacatgaggaatga

SEQ ID NO: 5596523 - DNA, 25 bp, Homo sapien
aatgacttatccaggaacaacatga

SEQ ID NO: 5596524 - DNA, 25 bp, Homo sapien
aaccctaggagatggacattatttc

SEQ ID NO: 5596525 - DNA, 25 bp, Homo sapien
cacctccagatttaactgtccaagg

SEQ ID NO: 5596526 - DNA, 25 bp, Homo sapien
tgcacctggtctaaactaaggcttc

SEQ ID NO: 5596527 - DNA, 25 bp, Homo sapien
gccacatggtggcactgttgaatgc

SEQ ID NO: 5596528 - DNA, 25 bp, Homo sapien
ttttcctgccagaggaacccagtca

SEQ ID NO: 5596529 - DNA, 25 bp, Homo sapien
tgcaccatgtccctgcttgggtctc

SEQ ID NO: 5596530 - DNA, 25 bp, Homo sapien
gtgagtgatgattccaaattacggt

SEQ ID NO: 5596531 - DNA, 25 bp, Homo sapien
aggacaagagaggctcatcagtcca

SEQ ID NO: 5596532 - DNA, 25 bp, Homo sapien
tgggtctcaagagcactactgtgac

SEQ ID NO: 5596533 - DNA, 25 bp, Homo sapien
attacggttgacagatcactccctc

SEQ ID NO: 5596534 - DNA, 25 bp, Homo sapien
gacccatcagttcagcatcaagtac

SEQ ID NO: 5596535 - DNA, 25 bp, Homo sapien
ccaggatagctgagtcttgccaact

SEQ ID NO: 5596536 - DNA, 25 bp, Homo sapien
tgtaagaccttcccatgccacctgt

SEQ ID NO: 5596537 - DNA, 25 bp, Homo sapien
tgttgaatgccagtcctgtgcagcc

SEQ ID NO: 5596538 - DNA, 25 bp, Homo sapien
tttgctagagctcaaaacaggaaaa

SEQ ID NO: 5596539 - DNA, 25 bp, Homo sapien
ggggggatacatggatcttgatccg

SEQ ID NO: 5596540 - DNA, 25 bp, Homo sapien
tggcttgctgaaggtttgctagagc

SEQ ID NO: 5596541 - DNA, 25 bp, Homo sapien
ccataaggtagtaaacaactggtga

SEQ ID NO: 5596542 - DNA, 25 bp, Homo sapien
gcatcatcacaatatgggggggata

SEQ ID NO: 5596543 - DNA, 25 bp, Homo sapien
aaaaaatccaaggcagtctgttttc

SEQ ID NO: 5596544 - DNA, 25 bp, Homo sapien
aaagggctaccaccttggcttgctg

SEQ ID NO: 5596545 - DNA, 25 bp, Homo sapien
caggaaaagtactagcttaaaaggc

SEQ ID NO: 5596546 - DNA, 25 bp, Homo sapien
aagtactagcttaaaaggcatgctg

SEQ ID NO: 5596547 - DNA, 25 bp, Homo sapien
ttgattgtgttgaaaaagggctacc

SEQ ID NO: 5596548 - DNA, 25 bp, Homo sapien
gatccgggcattttaccataaggta

SEQ ID NO: 5596549 - DNA, 25 bp, Homo sapien
tcagtccagtgaagcaatattatgc

SEQ ID NO: 5596550 - DNA, 25 bp, Homo sapien
aagaaacaagaggtattttgagttc

SEQ ID NO: 5596551 - DNA, 25 bp, Homo sapien
cactggtgggacataaacagctata

SEQ ID NO: 5596552 - DNA, 25 bp, Homo sapien
cagccacagggcaccattttaggtt

SEQ ID NO: 5596553 - DNA, 25 bp, Homo sapien
agtatgcaagagttagagaatggca

SEQ ID NO: 5596554 - DNA, 25 bp, Homo sapien
taagacaaaccatctcggccctcct

SEQ ID NO: 5596555 - DNA, 25 bp, Homo sapien
ggtggttgaccaaaagtgatcttat

SEQ ID NO: 5596556 - DNA, 25 bp, Homo sapien
tgaagatgtgaagaatgagaacatt

SEQ ID NO: 5596557 - DNA, 25 bp, Homo sapien
gataaattcagacagggtggttgac

SEQ ID NO: 5596558 - DNA, 25 bp, Homo sapien
gctggaaacggcacctaatgaaaca

SEQ ID NO: 5596559 - DNA, 25 bp, Homo sapien
aacagctataggcataagacaaacc

SEQ ID NO: 5596560 - DNA, 25 bp, Homo sapien
tttgaagctgctttcggagcctgtt

SEQ ID NO: 5596561 - DNA, 25 bp, Homo sapien
tctgcccgaattctggaagacttgc

SEQ ID NO: 5596562 - DNA, 25 bp, Homo sapien
ttgactcctaattcagagactctcc

SEQ ID NO: 5596563 - DNA, 25 bp, Homo sapien
gacccaacctgaaaatccataacaa

SEQ ID NO: 5596564 - DNA, 25 bp, Homo sapien
gcactcaagcaaatgtcagcaatac

SEQ ID NO: 5596565 - DNA, 25 bp, Homo sapien
agactctccaactctgcccgaattc

SEQ ID NO: 5596566 - DNA, 25 bp, Homo sapien
gcaatacaaatgaatccaggacttt

SEQ ID NO: 5596567 - DNA, 25 bp, Homo sapien
gcgcttggcacccagtatgcactca

SEQ ID NO: 5596568 - DNA, 25 bp, Homo sapien
aatgctcccatgaagacaaccaagc

SEQ ID NO: 5596569 - DNA, 25 bp, Homo sapien
agaggatggtgaaatgctcccatga

SEQ ID NO: 5596570 - DNA, 25 bp, Homo sapien
tgatctctgtactcaaaggacttac

SEQ ID NO: 5596571 - DNA, 25 bp, Homo sapien
gttgagaaggcttgagcttcgctca

SEQ ID NO: 5596572 - DNA, 25 bp, Homo sapien
aaaatggagatgtactgatgccctc

SEQ ID NO: 5596573 - DNA, 25 bp, Homo sapien
cttcgctcaagttctctggtccacc

SEQ ID NO: 5596574 - DNA, 25 bp, Homo sapien
cagtccacagtgcccacgctcaggc

SEQ ID NO: 5596575 - DNA, 25 bp, Homo sapien
gccctgaaatggtcatagaaggggc

SEQ ID NO: 5596576 - DNA, 25 bp, Homo sapien
agtccccaaacagctgaagcctgac

SEQ ID NO: 5596577 - DNA, 25 bp, Homo sapien
gatgttgggtgtgccacaaaaccac

SEQ ID NO: 5596578 - DNA, 25 bp, Homo sapien
catctcatcacagtggtagagggga

SEQ ID NO: 5596579 - DNA, 25 bp, Homo sapien
tcctgcccaccccttgagttgagaa

SEQ ID NO: 5596580 - DNA, 25 bp, Homo sapien
gtccacctacctggagacaggagcc

SEQ ID NO: 5596581 - DNA, 25 bp, Homo sapien
ccctttagacagatggagacagatg

SEQ ID NO: 5596582 - DNA, 25 bp, Homo sapien
gcataaaacgttgtcctctcccgcc

SEQ ID NO: 5596583 - DNA, 25 bp, Homo sapien
actcttctgggaagtccagtagttc

SEQ ID NO: 5596584 - DNA, 25 bp, Homo sapien
atccactcttgcataaaacgttgtc

SEQ ID NO: 5596585 - DNA, 25 bp, Homo sapien
tgtttctcctggttgctggacgcgg

SEQ ID NO: 5596586 - DNA, 25 bp, Homo sapien
gttgtcctctcccgccccacgcttg

SEQ ID NO: 5596587 - DNA, 25 bp, Homo sapien
gctttaaattggactcttctgggaa

SEQ ID NO: 5596588 - DNA, 25 bp, Homo sapien
gccccacgcttgacttgccgtctgg

SEQ ID NO: 5596589 - DNA, 25 bp, Homo sapien
caatcaagtcctaggtgatggtttc

SEQ ID NO: 5596590 - DNA, 25 bp, Homo sapien
ccagtagttcaatcaagtcctaggt

SEQ ID NO: 5596591 - DNA, 25 bp, Homo sapien
gcagaggctccgagaatccactctt

SEQ ID NO: 5596592 - DNA, 25 bp, Homo sapien
taggtgatggtttctctgtgttttc

SEQ ID NO: 5596593 - DNA, 25 bp, Homo sapien
cagctgtccgtttccactgggtgcc

SEQ ID NO: 5596594 - DNA, 25 bp, Homo sapien
tgggctatatggtcagctgtccgtt

SEQ ID NO: 5596595 - DNA, 25 bp, Homo sapien
atggataactgtagatgaagtatat

SEQ ID NO: 5596596 - DNA, 25 bp, Homo sapien
gttgcctgtgtcaaagatccttcac

SEQ ID NO: 5596597 - DNA, 25 bp, Homo sapien
ataaatgtaaaagtaactcttgcag

SEQ ID NO: 5596598 - DNA, 25 bp, Homo sapien
tccgtttccactgggtgcctggatg

SEQ ID NO: 5596599 - DNA, 25 bp, Homo sapien
ctggtcacagtgacctctgggtcag

SEQ ID NO: 5596600 - DNA, 25 bp, Homo sapien
agtaactcttgcagatgaaaggtgc

SEQ ID NO: 5596601 - DNA, 25 bp, Homo sapien
ggcactgggctatatggtcagctgt

SEQ ID NO: 5596602 - DNA, 25 bp, Homo sapien
tcttgcagatgaaaggtgcaagggc

SEQ ID NO: 5596603 - DNA, 25 bp, Homo sapien
gatccttcaccgaggtagaaaacca

SEQ ID NO: 5596604 - DNA, 25 bp, Homo sapien
tagaggctgagtaagtcacccctct

SEQ ID NO: 5596605 - DNA, 25 bp, Homo sapien
attaatagcatggataggcagtgtc

SEQ ID NO: 5596606 - DNA, 25 bp, Homo sapien
cagaatgtcatcctgtgagtgaaac

SEQ ID NO: 5596607 - DNA, 25 bp, Homo sapien
gagaaagtgcatgcaaaactagccc

SEQ ID NO: 5596608 - DNA, 25 bp, Homo sapien
ttgctctgcacatgagagaaagtgc

SEQ ID NO: 5596609 - DNA, 25 bp, Homo sapien
cttgtgttacaagagtgagagccaa

SEQ ID NO: 5596610 - DNA, 25 bp, Homo sapien
gtctcacatgatgagcccggaacag

SEQ ID NO: 5596611 - DNA, 25 bp, Homo sapien
cccggaacagacagaatgtcatcct

SEQ ID NO: 5596612 - DNA, 25 bp, Homo sapien
ctcacctatgtgtagttgctctgca

SEQ ID NO: 5596613 - DNA, 25 bp, Homo sapien
tctgttggctgaacttttagaggct

SEQ ID NO: 5596614 - DNA, 25 bp, Homo sapien
aggagttaaataaaggctatccact

SEQ ID NO: 5596615 - DNA, 25 bp, Homo sapien
ttcataagagaaaagtgttggacat

SEQ ID NO: 5596616 - DNA, 25 bp, Homo sapien
ttaccttctaatgggtgaggccaag

SEQ ID NO: 5596617 - DNA, 25 bp, Homo sapien
taccaggattctatgtttaggctat

SEQ ID NO: 5596618 - DNA, 25 bp, Homo sapien
gaagtctcacctatggagtttggtt

SEQ ID NO: 5596619 - DNA, 25 bp, Homo sapien
tttaaaagtgccagagtgtgttaca

SEQ ID NO: 5596620 - DNA, 25 bp, Homo sapien
gcattttaaaggctcttagaagtct

SEQ ID NO: 5596621 - DNA, 25 bp, Homo sapien
gagaaaagtgttggacatttgtgat

SEQ ID NO: 5596622 - DNA, 25 bp, Homo sapien
atagtcaccttttatggagcttacc

SEQ ID NO: 5596623 - DNA, 25 bp, Homo sapien
aataccagacactatacaagattcc

SEQ ID NO: 5596624 - DNA, 25 bp, Homo sapien
caagattccttgatacagcatagtc

SEQ ID NO: 5596625 - DNA, 25 bp, Homo sapien
accatctaagatgctaccaggattc

SEQ ID NO: 5596626 - DNA, 25 bp, Homo sapien
acctcaatcaggtggctaggaagat

SEQ ID NO: 5596627 - DNA, 25 bp, Homo sapien
aatgcaaaagatgggagaatttatt

SEQ ID NO: 5596628 - DNA, 25 bp, Homo sapien
atgcacagaatagatagaggccaat

SEQ ID NO: 5596629 - DNA, 25 bp, Homo sapien
tatacgccagagtgttcatcagcat

SEQ ID NO: 5596630 - DNA, 25 bp, Homo sapien
tcagcataagggatattagtaattt

SEQ ID NO: 5596631 - DNA, 25 bp, Homo sapien
tagaggccaatagtccatttcaatc

SEQ ID NO: 5596632 - DNA, 25 bp, Homo sapien
aactgtgtaatggatgtgtgctgtg

SEQ ID NO: 5596633 - DNA, 25 bp, Homo sapien
tgggggtaagttagtatttgaagca

SEQ ID NO: 5596634 - DNA, 25 bp, Homo sapien
aaaaaaagtaatgcaaaagatggga

SEQ ID NO: 5596635 - DNA, 25 bp, Homo sapien
caatcttgttctgggggtaagttag

SEQ ID NO: 5596636 - DNA, 25 bp, Homo sapien
ggtggctaggaagatgctttaaaca

SEQ ID NO: 5596637 - DNA, 25 bp, Homo sapien
agagctgatggcacatgttccctgt

SEQ ID NO: 5596638 - DNA, 25 bp, Homo sapien
gttttttggcatgatgggggtctaa

SEQ ID NO: 5596639 - DNA, 25 bp, Homo sapien
acttaaatctgaagggatggaaaga

SEQ ID NO: 5596640 - DNA, 25 bp, Homo sapien
gtgctcaagaagtaaacaaaccaac

SEQ ID NO: 5596641 - DNA, 25 bp, Homo sapien
tgtgctaaaagtctgcagtggcctt

SEQ ID NO: 5596642 - DNA, 25 bp, Homo sapien
acacaaggccttgcactcagaagac

SEQ ID NO: 5596643 - DNA, 25 bp, Homo sapien
ctcaagagccattattagggaattc

SEQ ID NO: 5596644 - DNA, 25 bp, Homo sapien
cccttggaatgtaggtctgtctctc

SEQ ID NO: 5596645 - DNA, 25 bp, Homo sapien
tcagaagcccaagggatagtatctc

SEQ ID NO: 5596646 - DNA, 25 bp, Homo sapien
agggaattcagaacatagtgctaac

SEQ ID NO: 5596647 - DNA, 25 bp, Homo sapien
taggactgtgttcaggcttccccac

SEQ ID NO: 5596648 - DNA, 25 bp, Homo sapien
gaaaatacatgcagtaggaatttgc

SEQ ID NO: 5596649 - DNA, 25 bp, Homo sapien
agtagccacaatcactttggaaatc

SEQ ID NO: 5596650 - DNA, 25 bp, Homo sapien
cagcctcccacaccacagataactc

SEQ ID NO: 5596651 - DNA, 25 bp, Homo sapien
tgcctatgtgcacaggagacatgca

SEQ ID NO: 5596652 - DNA, 25 bp, Homo sapien
ataatgtgcatcatgggaaaataca

SEQ ID NO: 5596653 - DNA, 25 bp, Homo sapien
atgtatcatgcaaccaacccattcc

SEQ ID NO: 5596654 - DNA, 25 bp, Homo sapien
aactggaatcagccacatgtacatc

SEQ ID NO: 5596655 - DNA, 25 bp, Homo sapien
tcatccactctgggagctttggggc

SEQ ID NO: 5596656 - DNA, 25 bp, Homo sapien
gtggtaaaacgatatgtaagccttc

SEQ ID NO: 5596657 - DNA, 25 bp, Homo sapien
tgtacatcaataggaaactggtgaa

SEQ ID NO: 5596658 - DNA, 25 bp, Homo sapien
taggaaactggtgaaattgtggtaa

SEQ ID NO: 5596659 - DNA, 25 bp, Homo sapien
atccctggaagttgatgcctgcttt

SEQ ID NO: 5596660 - DNA, 25 bp, Homo sapien
agttaggaagttattagatccctgg

SEQ ID NO: 5596661 - DNA, 25 bp, Homo sapien
caaggctgtgttctagacaacctgc

SEQ ID NO: 5596662 - DNA, 25 bp, Homo sapien
tcactaccctagccagggctcctgg

SEQ ID NO: 5596663 - DNA, 25 bp, Homo sapien
atggactctgtgttacataaactgt

SEQ ID NO: 5596664 - DNA, 25 bp, Homo sapien
gggtgtttgggtgcatgtcatcact

SEQ ID NO: 5596665 - DNA, 25 bp, Homo sapien
ttgatacagacatgccccatataat

SEQ ID NO: 5596666 - DNA, 25 bp, Homo sapien
actgtagctgtgttgaggacagtgt

SEQ ID NO: 5596667 - DNA, 25 bp, Homo sapien
ctagacaacctgcctcccaccactg

SEQ ID NO: 5596668 - DNA, 25 bp, Homo sapien
tacataaactgtagctgtgttgagg

SEQ ID NO: 5596669 - DNA, 25 bp, Homo sapien
ccaaaagttaggtaagttctgttgc

SEQ ID NO: 5596670 - DNA, 25 bp, Homo sapien
aagatgcacctagtcaacttgtttc

SEQ ID NO: 5596671 - DNA, 25 bp, Homo sapien
tgcccttttaggaatcagtaatacc

SEQ ID NO: 5596672 - DNA, 25 bp, Homo sapien
ttaaagagacccactcgatattttc

SEQ ID NO: 5596673 - DNA, 25 bp, Homo sapien
tacaaaagctacccacatttgccct

SEQ ID NO: 5596674 - DNA, 25 bp, Homo sapien
aggaatcagtaataccctaatgttt

SEQ ID NO: 5596675 - DNA, 25 bp, Homo sapien
ggcatttgaactactttaaagagac

SEQ ID NO: 5596676 - DNA, 25 bp, Homo sapien
tcaatcactttcagaacctgggtct

SEQ ID NO: 5596677 - DNA, 25 bp, Homo sapien
gctctcagggccatctttgtcaact

SEQ ID NO: 5596678 - DNA, 25 bp, Homo sapien
cttgagatgaaagatgcacctagtc

SEQ ID NO: 5596679 - DNA, 25 bp, Homo sapien
gtcaacttgagatgaaagatgcacc

SEQ ID NO: 5596680 - DNA, 25 bp, Homo sapien
tttgtcaacttgagatgaaagatgc

SEQ ID NO: 5596681 - DNA, 25 bp, Homo sapien
gaccaaaagaacagccgcatccatg

SEQ ID NO: 5596682 - DNA, 25 bp, Homo sapien
cgcagagttgcagcgaacctacctg

SEQ ID NO: 5596683 - DNA, 25 bp, Homo sapien
cagctgcccgagtctttgggacatt

SEQ ID NO: 5596684 - DNA, 25 bp, Homo sapien
ccaaggcctctcggttgccagattc

SEQ ID NO: 5596685 - DNA, 25 bp, Homo sapien
agaaggacgaatgaatgcaaacgtc

SEQ ID NO: 5596686 - DNA, 25 bp, Homo sapien
ctatggcaaactgtgataagaagga

SEQ ID NO: 5596687 - DNA, 25 bp, Homo sapien
tccagagatgatagaactgaaacgc

SEQ ID NO: 5596688 - DNA, 25 bp, Homo sapien
ctggacaagagttaaaagtaatcgt

SEQ ID NO: 5596689 - DNA, 25 bp, Homo sapien
cctgtgttcctagcgcgcagagttg

SEQ ID NO: 5596690 - DNA, 25 bp, Homo sapien
acagctgcgcgttcccctgtgttcc

SEQ ID NO: 5596691 - DNA, 25 bp, Homo sapien
tgggacatttgtgcaggaccaaaag

SEQ ID NO: 5596692 - DNA, 25 bp, Homo sapien
gggagagtcacttcccacaggaacc

SEQ ID NO: 5596693 - DNA, 25 bp, Homo sapien
tgtagacactggataactgaacgaa

SEQ ID NO: 5596694 - DNA, 25 bp, Homo sapien
tcatcttagggttatttgctgctcc

SEQ ID NO: 5596695 - DNA, 25 bp, Homo sapien
ctgccattagcccatccctggagtt

SEQ ID NO: 5596696 - DNA, 25 bp, Homo sapien
actgaacgaaaattcatgctgcaat

SEQ ID NO: 5596697 - DNA, 25 bp, Homo sapien
cagggcctagcctggtgtctaggaa

SEQ ID NO: 5596698 - DNA, 25 bp, Homo sapien
ctctgaggaacaatatgcttgggtt

SEQ ID NO: 5596699 - DNA, 25 bp, Homo sapien
tgcaattatcaggaggtcaaaggtt

SEQ ID NO: 5596700 - DNA, 25 bp, Homo sapien
cctggtgtctaggaaagattagtgg

SEQ ID NO: 5596701 - DNA, 25 bp, Homo sapien
caatatgcttgggttcatgggagag

SEQ ID NO: 5596702 - DNA, 25 bp, Homo sapien
tatcaggaggtcaaaggttaataaa

SEQ ID NO: 5596703 - DNA, 25 bp, Homo sapien
cggggagcccaccctgattgtctag

SEQ ID NO: 5596704 - DNA, 25 bp, Homo sapien
ggacagactacagcgtcagatggta

SEQ ID NO: 5596705 - DNA, 25 bp, Homo sapien
gaatgtgagtcaccgctaacagcag

SEQ ID NO: 5596706 - DNA, 25 bp, Homo sapien
tccttctcccagtccgtgcgtttcc

SEQ ID NO: 5596707 - DNA, 25 bp, Homo sapien
ccctgattgtctaggggatccggca

SEQ ID NO: 5596708 - DNA, 25 bp, Homo sapien
taaatcactgggaatgtgagtcacc

SEQ ID NO: 5596709 - DNA, 25 bp, Homo sapien
gccgagagcaaaactctaggctccc

SEQ ID NO: 5596710 - DNA, 25 bp, Homo sapien
cttgtcttgccgtacggaaaccgcc

SEQ ID NO: 5596711 - DNA, 25 bp, Homo sapien
gccgagttcttgttttgccgagagc

SEQ ID NO: 5596712 - DNA, 25 bp, Homo sapien
agatggtaaaaatgttttccgcgcc

SEQ ID NO: 5596713 - DNA, 25 bp, Homo sapien
gcgtttccttgcagagccccagagc

SEQ ID NO: 5596714 - DNA, 25 bp, Homo sapien
atgcagcgtgaacctcgtgatcaaa

SEQ ID NO: 5596715 - DNA, 25 bp, Homo sapien
tttttttcaggtgatgggaagcact

SEQ ID NO: 5596716 - DNA, 25 bp, Homo sapien
taaccttcccgaaaagatgcagcgt

SEQ ID NO: 5596717 - DNA, 25 bp, Homo sapien
tcctggatgtgatctgcgtgaattc

SEQ ID NO: 5596718 - DNA, 25 bp, Homo sapien
ctcgtgatcaaagagcagctcctgg

SEQ ID NO: 5596719 - DNA, 25 bp, Homo sapien
aggcagcaatgtgttgatgagtcct

SEQ ID NO: 5596720 - DNA, 25 bp, Homo sapien
ttccatggacatcacgagctctttc

SEQ ID NO: 5596721 - DNA, 25 bp, Homo sapien
ccatataatgtggtgtaaggtggtc

SEQ ID NO: 5596722 - DNA, 25 bp, Homo sapien
gacacaagataaacaaatgagaaca

SEQ ID NO: 5596723 - DNA, 25 bp, Homo sapien
tatgaggccatggtgttgtgaattt

SEQ ID NO: 5596724 - DNA, 25 bp, Homo sapien
gccttggtgtctcccgctggcccat

SEQ ID NO: 5596725 - DNA, 25 bp, Homo sapien
tcagaagaacaaacatagaaggaat

SEQ ID NO: 5596726 - DNA, 25 bp, Homo sapien
catgcccacagtaatcctgggaatc

SEQ ID NO: 5596727 - DNA, 25 bp, Homo sapien
ctctcctttgagttaggtccacctc

SEQ ID NO: 5596728 - DNA, 25 bp, Homo sapien
aggcaagccggcatgcatatatgta

SEQ ID NO: 5596729 - DNA, 25 bp, Homo sapien
aaaatacagtatgtagctgaattcc

SEQ ID NO: 5596730 - DNA, 25 bp, Homo sapien
cctatgattgtggtttctcagcttc

SEQ ID NO: 5596731 - DNA, 25 bp, Homo sapien
atatatgtagggatgtgtgactttc

SEQ ID NO: 5596732 - DNA, 25 bp, Homo sapien
tggaattttaacaggcaagccggca

SEQ ID NO: 5596733 - DNA, 25 bp, Homo sapien
aggcttgattaaaatgctacacatt

SEQ ID NO: 5596734 - DNA, 25 bp, Homo sapien
ctttttaaagagtgtgtgaaaattc

SEQ ID NO: 5596735 - DNA, 25 bp, Homo sapien
aagatcatgataaactcagaagaac

SEQ ID NO: 5596736 - DNA, 25 bp, Homo sapien
ttaatagtgatatattttagcccag

SEQ ID NO: 5596737 - DNA, 25 bp, Homo sapien
ctgggctaaaatatatcactattaa

SEQ ID NO: 5596738 - DNA, 25 bp, Homo sapien
gaggtgcagcttatgtaaagaggtt

SEQ ID NO: 5596739 - DNA, 25 bp, Homo sapien
atcacgggaatttcgcgcctatttt

SEQ ID NO: 5596740 - DNA, 25 bp, Homo sapien
tgcggctgctccgtcgacctttgca

SEQ ID NO: 5596741 - DNA, 25 bp, Homo sapien
gcttatgtaaagaggttatgtaaag

SEQ ID NO: 5596742 - DNA, 25 bp, Homo sapien
ggatcacgggaatttcgcgcctatt

SEQ ID NO: 5596743 - DNA, 25 bp, Homo sapien
gcagcttatgtaaagaggttatgta

SEQ ID NO: 5596744 - DNA, 25 bp, Homo sapien
ggtgcagcttatgtaaagaggttat

SEQ ID NO: 5596745 - DNA, 25 bp, Homo sapien
tgtaaagaggttatgtaaagggctc

SEQ ID NO: 5596746 - DNA, 25 bp, Homo sapien
tatgtaaagaggttatgtaaagggc

SEQ ID NO: 5596747 - DNA, 25 bp, Homo sapien
ggtgttctcgccagtgattgggtcc

SEQ ID NO: 5596748 - DNA, 25 bp, Homo sapien
ctgggtgttctcgccagtgattggg

SEQ ID NO: 5596749 - DNA, 25 bp, Homo sapien
aaacatgtagtttctaatggaagtt

SEQ ID NO: 5596750 - DNA, 25 bp, Homo sapien
gagttttgcagtaccaagggatctt

SEQ ID NO: 5596751 - DNA, 25 bp, Homo sapien
ttccccaaccatgagtcctcaggtt

SEQ ID NO: 5596752 - DNA, 25 bp, Homo sapien
ctcttgactaaaagtagatgacatc

SEQ ID NO: 5596753 - DNA, 25 bp, Homo sapien
gtgtagccacaaagttgtcaacaat

SEQ ID NO: 5596754 - DNA, 25 bp, Homo sapien
gtcctcaggttgttacagaggctgc

SEQ ID NO: 5596755 - DNA, 25 bp, Homo sapien
atgcaatgcaatgttttgaccagac

SEQ ID NO: 5596756 - DNA, 25 bp, Homo sapien
agaaaagacaaaagtgtagccacaa

SEQ ID NO: 5596757 - DNA, 25 bp, Homo sapien
aggttgttacagaggctgccttcct

SEQ ID NO: 5596758 - DNA, 25 bp, Homo sapien
attgtgaaagcgattgagttttgca

SEQ ID NO: 5596759 - DNA, 25 bp, Homo sapien
tgtaccccccattgcctctccgagt

SEQ ID NO: 5596760 - DNA, 25 bp, Homo sapien
ggagcttgatgatagaccaggcaag

SEQ ID NO: 5596761 - DNA, 25 bp, Homo sapien
attgactcctccgggagcaagggtt

SEQ ID NO: 5596762 - DNA, 25 bp, Homo sapien
cagcatccgtggtctttgggaaaat

SEQ ID NO: 5596763 - DNA, 25 bp, Homo sapien
agtccgtaatataggtagaaacgct

SEQ ID NO: 5596764 - DNA, 25 bp, Homo sapien
ggcctcagctgaggagcttgatgat

SEQ ID NO: 5596765 - DNA, 25 bp, Homo sapien
tggcaccaccatgtgggcctcagct

SEQ ID NO: 5596766 - DNA, 25 bp, Homo sapien
accaggcaagtgagtctaaattgac

SEQ ID NO: 5596767 - DNA, 25 bp, Homo sapien
gagcccaccctcaattgcaggcctc

SEQ ID NO: 5596768 - DNA, 25 bp, Homo sapien
aggttggtccagcctcattggcacc

SEQ ID NO: 5596769 - DNA, 25 bp, Homo sapien
agccagagtgaaatccctcagagcc

SEQ ID NO: 5596770 - DNA, 25 bp, Homo sapien
acttgagtatcagggagtcatgaag

SEQ ID NO: 5596771 - DNA, 25 bp, Homo sapien
tccaaaagccaggacagcttctttc

SEQ ID NO: 5596772 - DNA, 25 bp, Homo sapien
cccctacagagaatctgatgagggt

SEQ ID NO: 5596773 - DNA, 25 bp, Homo sapien
taacaggtctcagccatgaagcttg

SEQ ID NO: 5596774 - DNA, 25 bp, Homo sapien
ggcaccgaggaagcattttgtttct

SEQ ID NO: 5596775 - DNA, 25 bp, Homo sapien
gtgcccctcccccgctgactccaaa

SEQ ID NO: 5596776 - DNA, 25 bp, Homo sapien
gggtgaggaaaagatatgacttctc

SEQ ID NO: 5596777 - DNA, 25 bp, Homo sapien
agcagggtggacccacccttggtcc

SEQ ID NO: 5596778 - DNA, 25 bp, Homo sapien
tttctttgtggcaccgaggaagcat

SEQ ID NO: 5596779 - DNA, 25 bp, Homo sapien
tggctgggctctcccttcaacacca

SEQ ID NO: 5596780 - DNA, 25 bp, Homo sapien
ccatggacacccccagggttgtgag

SEQ ID NO: 5596781 - DNA, 25 bp, Homo sapien
agcttctttccaagcagggtggacc

SEQ ID NO: 5596782 - DNA, 25 bp, Homo sapien
aaagcaaacatctttgaacaagagt

SEQ ID NO: 5596783 - DNA, 25 bp, Homo sapien
actcttgttcaaagatgtttgcttt

SEQ ID NO: 5596784 - DNA, 25 bp, Homo sapien
gagggagtaaacctgtggctataca

SEQ ID NO: 5596785 - DNA, 25 bp, Homo sapien
tgaagactgcatctcatggtggctt

SEQ ID NO: 5596786 - DNA, 25 bp, Homo sapien
gtctgagttgcagctgtgtccctcc

SEQ ID NO: 5596787 - DNA, 25 bp, Homo sapien
ccaccttgtggaatgtctctgcttg

SEQ ID NO: 5596788 - DNA, 25 bp, Homo sapien
ttcaatctcaaaccccgagggagta

SEQ ID NO: 5596789 - DNA, 25 bp, Homo sapien
tcttggacaatgcaaggagtgcaat

SEQ ID NO: 5596790 - DNA, 25 bp, Homo sapien
tatacattctcaagggagctgagcg

SEQ ID NO: 5596791 - DNA, 25 bp, Homo sapien
gttgcagctgtgtccctccagagcg

SEQ ID NO: 5596792 - DNA, 25 bp, Homo sapien
gtctgaagttcttgaggtctgactc

SEQ ID NO: 5596793 - DNA, 25 bp, Homo sapien
atccattgaggatgtagcccttcag

SEQ ID NO: 5596794 - DNA, 25 bp, Homo sapien
gatgtagcccttcagtggtcccagc

SEQ ID NO: 5596795 - DNA, 25 bp, Homo sapien
gcccaggcctccctcggtgcgggtg

SEQ ID NO: 5596796 - DNA, 25 bp, Homo sapien
cacccgcaccgagggaggcctgggc

SEQ ID NO: 5596797 - DNA, 25 bp, Homo sapien
ccttgagagcagattatctcctctt

SEQ ID NO: 5596798 - DNA, 25 bp, Homo sapien
gagatcccttgacttgtgcacattc

SEQ ID NO: 5596799 - DNA, 25 bp, Homo sapien
gctggctgcatgggtcccaatcagt

SEQ ID NO: 5596800 - DNA, 25 bp, Homo sapien
gctgcactccatcatggtgtgccca

SEQ ID NO: 5596801 - DNA, 25 bp, Homo sapien
tgacattggcagaagtgaatattgt

SEQ ID NO: 5596802 - DNA, 25 bp, Homo sapien
gatggaagtagagatcccttgactt

SEQ ID NO: 5596803 - DNA, 25 bp, Homo sapien
accagcttttgaggaaaataaggat

SEQ ID NO: 5596804 - DNA, 25 bp, Homo sapien
ttaagcccagtagcagaaaatactc

SEQ ID NO: 5596805 - DNA, 25 bp, Homo sapien
aagtctggttgattactgctggcac

SEQ ID NO: 5596806 - DNA, 25 bp, Homo sapien
attacaacactggagcccacagcag

SEQ ID NO: 5596807 - DNA, 25 bp, Homo sapien
agattcaagtagtagattacaacac

SEQ ID NO: 5596808 - DNA, 25 bp, Homo sapien
ttcctcactagggctgcaaattcca

SEQ ID NO: 5596809 - DNA, 25 bp, Homo sapien
acttggggaggatctttcctcacta

SEQ ID NO: 5596810 - DNA, 25 bp, Homo sapien
cactagggctgcaaattccatgagg

SEQ ID NO: 5596811 - DNA, 25 bp, Homo sapien
tagggctgcaaattccatgaggaca

SEQ ID NO: 5596812 - DNA, 25 bp, Homo sapien
aaaatgaaaaatctaaagtgagtat

SEQ ID NO: 5596813 - DNA, 25 bp, Homo sapien
accttgtggttatttgacttgggga

SEQ ID NO: 5596814 - DNA, 25 bp, Homo sapien
gggacacacagaggcaccttcctca

SEQ ID NO: 5596815 - DNA, 25 bp, Homo sapien
tgtggttatttgacttggggaggat

SEQ ID NO: 5596816 - DNA, 25 bp, Homo sapien
catgaacacataaaatgaaaaatct

SEQ ID NO: 5596817 - DNA, 25 bp, Homo sapien
atttcctcaggaaaacaccacctgg

SEQ ID NO: 5596818 - DNA, 25 bp, Homo sapien
aaagtgagtattattttccagcccc

SEQ ID NO: 5596819 - DNA, 25 bp, Homo sapien
cttctaggcactgtttcccctgatc

SEQ ID NO: 5596820 - DNA, 25 bp, Homo sapien
tattacgtgcatatacaagcattta

SEQ ID NO: 5596821 - DNA, 25 bp, Homo sapien
cttcccctggcgtttgctattgatc

SEQ ID NO: 5596822 - DNA, 25 bp, Homo sapien
tatagttttaggcttctaggcactg

SEQ ID NO: 5596823 - DNA, 25 bp, Homo sapien
ggcgtttgctattgatcaggttgaa

SEQ ID NO: 5596824 - DNA, 25 bp, Homo sapien
gcgcgttgcgcaccttcacgcctct

SEQ ID NO: 5596825 - DNA, 25 bp, Homo sapien
tttcaaaaccagagctcctggcggc

SEQ ID NO: 5596826 - DNA, 25 bp, Homo sapien
gaattttaggtcctgcagagacatc

SEQ ID NO: 5596827 - DNA, 25 bp, Homo sapien
ccagccttggtttctcagctctccc

SEQ ID NO: 5596828 - DNA, 25 bp, Homo sapien
tcacgcctctcacgctggctgctct

SEQ ID NO: 5596829 - DNA, 25 bp, Homo sapien
aatccagcagacacgtggatgtgtc

SEQ ID NO: 5596830 - DNA, 25 bp, Homo sapien
gtgccacggtatccgagcgggtcgt

SEQ ID NO: 5596831 - DNA, 25 bp, Homo sapien
acgacccgctcggataccgtggcac

SEQ ID NO: 5596832 - DNA, 25 bp, Homo sapien
tggtaacggacaggaataataacta

SEQ ID NO: 5596833 - DNA, 25 bp, Homo sapien
tgcctgaaaaccatgtgggagattt

SEQ ID NO: 5596834 - DNA, 25 bp, Homo sapien
ttgttaatagattgatttgaacttt

SEQ ID NO: 5596835 - DNA, 25 bp, Homo sapien
aaagacattttgatatcgtagaacc

SEQ ID NO: 5596836 - DNA, 25 bp, Homo sapien
attgttgcctgaaaaccatgtggga

SEQ ID NO: 5596837 - DNA, 25 bp, Homo sapien
tgatatcgtagaaccaattttttat

SEQ ID NO: 5596838 - DNA, 25 bp, Homo sapien
atcattgctaattagaagcagatca

SEQ ID NO: 5596839 - DNA, 25 bp, Homo sapien
gaaaaccatgtgggagatttaaatg

SEQ ID NO: 5596840 - DNA, 25 bp, Homo sapien
gaagcagatcatatgccaaaagttc

SEQ ID NO: 5596841 - DNA, 25 bp, Homo sapien
tgttgcctgaaaaccatgtgggaga

SEQ ID NO: 5596842 - DNA, 25 bp, Homo sapien
tttattgtggtaacggacaggaata

SEQ ID NO: 5596843 - DNA, 25 bp, Homo sapien
tgtataaagtagatgttaaagaaaa

SEQ ID NO: 5596844 - DNA, 25 bp, Homo sapien
gaagtgatttggaactaaccctgaa

SEQ ID NO: 5596845 - DNA, 25 bp, Homo sapien
taggatcacaggtgcacaccaccac

SEQ ID NO: 5596846 - DNA, 25 bp, Homo sapien
agcctcccacggagctaggatcaca

SEQ ID NO: 5596847 - DNA, 25 bp, Homo sapien
tcctggattcaagcgatcttctcgc

SEQ ID NO: 5596848 - DNA, 25 bp, Homo sapien
aggctggtcttaagctcctggattc

SEQ ID NO: 5596849 - DNA, 25 bp, Homo sapien
ggtgcacaccaccacatgcagctca

SEQ ID NO: 5596850 - DNA, 25 bp, Homo sapien
actgtagccttaacctcctgggatc

SEQ ID NO: 5596851 - DNA, 25 bp, Homo sapien
gctgtatagtgaattcaagaaagac

SEQ ID NO: 5596852 - DNA, 25 bp, Homo sapien
gtctccccctatcgcctgggctgga

SEQ ID NO: 5596853 - DNA, 25 bp, Homo sapien
agagagggtctccccctatcgcctg

SEQ ID NO: 5596854 - DNA, 25 bp, Homo sapien
tggtggtcttgcgtgtgttctacat

SEQ ID NO: 5596855 - DNA, 25 bp, Homo sapien
gatggtggcaatcttactcagtatg

SEQ ID NO: 5596856 - DNA, 25 bp, Homo sapien
cacaaaccactggtccagatagacc

SEQ ID NO: 5596857 - DNA, 25 bp, Homo sapien
tgggccagatgccaatgtagagaaa

SEQ ID NO: 5596858 - DNA, 25 bp, Homo sapien
aatggagatgatgctatctgtgtca

SEQ ID NO: 5596859 - DNA, 25 bp, Homo sapien
agttacaagcgcaaccagtttactc

SEQ ID NO: 5596860 - DNA, 25 bp, Homo sapien
tctacatgacatctcaagagggttc

SEQ ID NO: 5596861 - DNA, 25 bp, Homo sapien
ccacacattcaggcaaagctggcag

SEQ ID NO: 5596862 - DNA, 25 bp, Homo sapien
agcactggactattgggccagatgc

SEQ ID NO: 5596863 - DNA, 25 bp, Homo sapien
gcagaatccctgaagagcaaacatt

SEQ ID NO: 5596864 - DNA, 25 bp, Homo sapien
ttggtaatggttctttggagtgtta

SEQ ID NO: 5596865 - DNA, 25 bp, Homo sapien
aagtagccttgatgggtagctggct

SEQ ID NO: 5596866 - DNA, 25 bp, Homo sapien
tgcaattataaaaccaggtgttcct

SEQ ID NO: 5596867 - DNA, 25 bp, Homo sapien
ttcacctgatcactatagagctaat

SEQ ID NO: 5596868 - DNA, 25 bp, Homo sapien
ctggctgttgacaagggatctttga

SEQ ID NO: 5596869 - DNA, 25 bp, Homo sapien
taataaggacttagaattgccgttc

SEQ ID NO: 5596870 - DNA, 25 bp, Homo sapien
caggtgttcctgattgagatcaatt

SEQ ID NO: 5596871 - DNA, 25 bp, Homo sapien
ttccagccgcgctgaagccttctgg

SEQ ID NO: 5596872 - DNA, 25 bp, Homo sapien
aggctgatttgatcatcaagtagcc

SEQ ID NO: 5596873 - DNA, 25 bp, Homo sapien
attttttaactgtctgcgagaggtt

SEQ ID NO: 5596874 - DNA, 25 bp, Homo sapien
tcaagtatacttccagccgcgctga

SEQ ID NO: 5596875 - DNA, 25 bp, Homo sapien
ttgacaagggatctttgaggtattc

SEQ ID NO: 5596876 - DNA, 25 bp, Homo sapien
ccgccgtggcagccacctcctgtga

SEQ ID NO: 5596877 - DNA, 25 bp, Homo sapien
ctgtggttaaatcctccagaaagcc

SEQ ID NO: 5596878 - DNA, 25 bp, Homo sapien
caggggcggcatctatttgaagccg

SEQ ID NO: 5596879 - DNA, 25 bp, Homo sapien
cacccctctgtggttaaatcctcca

SEQ ID NO: 5596880 - DNA, 25 bp, Homo sapien
ttccctccaccgtgtgtctggccac

SEQ ID NO: 5596881 - DNA, 25 bp, Homo sapien
gcccagccccatcatcaaggtttgc

SEQ ID NO: 5596882 - DNA, 25 bp, Homo sapien
ggcctcgctgagattccaggcgtga

SEQ ID NO: 5596883 - DNA, 25 bp, Homo sapien
aaatcctccagaaagccccagcttc

SEQ ID NO: 5596884 - DNA, 25 bp, Homo sapien
ggcagccacctcctgtgaagcccac

SEQ ID NO: 5596885 - DNA, 25 bp, Homo sapien
gtctgtttcgcgtgcacttccctcc

SEQ ID NO: 5596886 - DNA, 25 bp, Homo sapien
tttgaagccgctgtgtctgtttcgc

SEQ ID NO: 5596887 - DNA, 25 bp, Homo sapien
aagggataaaatgtttaccacttgc

SEQ ID NO: 5596888 - DNA, 25 bp, Homo sapien
tctgctgtaaatccactgggcactc

SEQ ID NO: 5596889 - DNA, 25 bp, Homo sapien
gcttttgcaggctttcctcatgtcc

SEQ ID NO: 5596890 - DNA, 25 bp, Homo sapien
gtctatcagcagccttgtagcccag

SEQ ID NO: 5596891 - DNA, 25 bp, Homo sapien
agctgtttctgcaatagaagtgtct

SEQ ID NO: 5596892 - DNA, 25 bp, Homo sapien
taaatccactgggcactcctggctg

SEQ ID NO: 5596893 - DNA, 25 bp, Homo sapien
gagtagggacctcatgcgtactttt

SEQ ID NO: 5596894 - DNA, 25 bp, Homo sapien
ttatctgctgaaatactctggagtc

SEQ ID NO: 5596895 - DNA, 25 bp, Homo sapien
aataaagcaaccttgcatgcctgtt

SEQ ID NO: 5596896 - DNA, 25 bp, Homo sapien
ctggagtcaagaaatataatgagct

SEQ ID NO: 5596897 - DNA, 25 bp, Homo sapien
agccttgtagcccagtgattgtgac

SEQ ID NO: 5596898 - DNA, 25 bp, Homo sapien
atttgagcagcatagtcttgggcta

SEQ ID NO: 5596899 - DNA, 25 bp, Homo sapien
aattcccagaatacaaagccaacag

SEQ ID NO: 5596900 - DNA, 25 bp, Homo sapien
tccaagatggaacaattattgcttc

SEQ ID NO: 5596901 - DNA, 25 bp, Homo sapien
aggttattagaagacaactaggttg

SEQ ID NO: 5596902 - DNA, 25 bp, Homo sapien
caaaaccgataatccaagatggaac

SEQ ID NO: 5596903 - DNA, 25 bp, Homo sapien
ataccactcgtcatgctattgcaac

SEQ ID NO: 5596904 - DNA, 25 bp, Homo sapien
atgccaggcattattacagggatac

SEQ ID NO: 5596905 - DNA, 25 bp, Homo sapien
attcaacaaatattagggacctact

SEQ ID NO: 5596906 - DNA, 25 bp, Homo sapien
aacctgagagtatatttgcacccat

SEQ ID NO: 5596907 - DNA, 25 bp, Homo sapien
aatacaactggcacgagtagaaaaa

SEQ ID NO: 5596908 - DNA, 25 bp, Homo sapien
aatcaaagagcaaaaccgataatcc

SEQ ID NO: 5596909 - DNA, 25 bp, Homo sapien
caaccggctataaactgagattccc

SEQ ID NO: 5596910 - DNA, 25 bp, Homo sapien
cttagaccagatgtgtgtttttccc

SEQ ID NO: 5596911 - DNA, 25 bp, Homo sapien
atagcatcagatcccagtggttgtg

SEQ ID NO: 5596912 - DNA, 25 bp, Homo sapien
tcacttcagaggccaattgcaagtc

SEQ ID NO: 5596913 - DNA, 25 bp, Homo sapien
agagaataacagagtgtaaaaggaa

SEQ ID NO: 5596914 - DNA, 25 bp, Homo sapien
ttaatttgctgggatggctcatgga

SEQ ID NO: 5596915 - DNA, 25 bp, Homo sapien
tcataatgtactggagtgagttttc

SEQ ID NO: 5596916 - DNA, 25 bp, Homo sapien
ccaattgcaagtctgggccaccttt

SEQ ID NO: 5596917 - DNA, 25 bp, Homo sapien
tggctcatggaattcagggaaacat

SEQ ID NO: 5596918 - DNA, 25 bp, Homo sapien
gagtgagttttccagagagaataac

SEQ ID NO: 5596919 - DNA, 25 bp, Homo sapien
cagtggttgtgggctcagtcccaca

SEQ ID NO: 5596920 - DNA, 25 bp, Homo sapien
aagcaagcaggcacgatttgattta

SEQ ID NO: 5596921 - DNA, 25 bp, Homo sapien
taccccaagtggataagcatgaata

SEQ ID NO: 5596922 - DNA, 25 bp, Homo sapien
gtgaaaactccgttctgaagatacc

SEQ ID NO: 5596923 - DNA, 25 bp, Homo sapien
aatcgattttggcctagctattgct

SEQ ID NO: 5596924 - DNA, 25 bp, Homo sapien
ccaaaaaacactccacgaaggccac

SEQ ID NO: 5596925 - DNA, 25 bp, Homo sapien
gctattgctgactgtacaggtccat

SEQ ID NO: 5596926 - DNA, 25 bp, Homo sapien
acggtatgttcatggctgaaggcac

SEQ ID NO: 5596927 - DNA, 25 bp, Homo sapien
acaccactgattaaacggtatgttc

SEQ ID NO: 5596928 - DNA, 25 bp, Homo sapien
gttcatggctgaaggcactacagca

SEQ ID NO: 5596929 - DNA, 25 bp, Homo sapien
tgcctacacttagctacaggtggaa

SEQ ID NO: 5596930 - DNA, 25 bp, Homo sapien
ggataagcatgaataaagaagcaca

SEQ ID NO: 5596931 - DNA, 25 bp, Homo sapien
caccctcgactcacggtggaagggt

SEQ ID NO: 5596932 - DNA, 25 bp, Homo sapien
acccttccaccgtgagtcgagggtg

SEQ ID NO: 5596933 - DNA, 25 bp, Homo sapien
tccagctggtgaaatacatgagctt

SEQ ID NO: 5596934 - DNA, 25 bp, Homo sapien
atctttagtgagggaagtagctttt

SEQ ID NO: 5596935 - DNA, 25 bp, Homo sapien
agagccctcgtgaataccaacgtgc

SEQ ID NO: 5596936 - DNA, 25 bp, Homo sapien
cctggtcttccaatagcctgtcatt

SEQ ID NO: 5596937 - DNA, 25 bp, Homo sapien
taaggtcgtgtgtgcatcatgcttc

SEQ ID NO: 5596938 - DNA, 25 bp, Homo sapien
ctctttcccagagatgagaggacca

SEQ ID NO: 5596939 - DNA, 25 bp, Homo sapien
acttgaatctaggaaggcacatctc

SEQ ID NO: 5596940 - DNA, 25 bp, Homo sapien
cagagctattggtagggttttaagg

SEQ ID NO: 5596941 - DNA, 25 bp, Homo sapien
attgttagatattatggcacctgtt

SEQ ID NO: 5596942 - DNA, 25 bp, Homo sapien
atgcttccaatgtcaagagatttcc

SEQ ID NO: 5596943 - DNA, 25 bp, Homo sapien
caacgtgctagctcaggttcccttc

SEQ ID NO: 5596944 - DNA, 25 bp, Homo sapien
tgagagtatgcaaacagtacacgtc

SEQ ID NO: 5596945 - DNA, 25 bp, Homo sapien
aacttctatgtttgggggatataga

SEQ ID NO: 5596946 - DNA, 25 bp, Homo sapien
aaacagtctgagagtatgcaaacag

SEQ ID NO: 5596947 - DNA, 25 bp, Homo sapien
ggttgatgaaagatagacttttaat

SEQ ID NO: 5596948 - DNA, 25 bp, Homo sapien
caacacggattacattctgaaacca

SEQ ID NO: 5596949 - DNA, 25 bp, Homo sapien
tgaatatgttcccaagatggtaaaa

SEQ ID NO: 5596950 - DNA, 25 bp, Homo sapien
ctaacactagcatcagcaggtggtc

SEQ ID NO: 5596951 - DNA, 25 bp, Homo sapien
gggatatagaagttttaggttgatg

SEQ ID NO: 5596952 - DNA, 25 bp, Homo sapien
attcctggagtcatctaacactagc

SEQ ID NO: 5596953 - DNA, 25 bp, Homo sapien
cactagcatcagcaggtggtcttga

SEQ ID NO: 5596954 - DNA, 25 bp, Homo sapien
tgcaaacagtacacgtcaacacgga

SEQ ID NO: 5596955 - DNA, 25 bp, Homo sapien
tgtgcatctgtcatggtgctcctgg

SEQ ID NO: 5596956 - DNA, 25 bp, Homo sapien
tcatcaaatgctccatgtcacagta

SEQ ID NO: 5596957 - DNA, 25 bp, Homo sapien
tacatgtctgtaggttgattctaaa

SEQ ID NO: 5596958 - DNA, 25 bp, Homo sapien
atgtcctgtgcatctgtcatggtgc

SEQ ID NO: 5596959 - DNA, 25 bp, Homo sapien
taaaataagggtcacacgtgagcca

SEQ ID NO: 5596960 - DNA, 25 bp, Homo sapien
ctggggcgatgctactcacttcata

SEQ ID NO: 5596961 - DNA, 25 bp, Homo sapien
taagtcttacatgtctgtaggttga

SEQ ID NO: 5596962 - DNA, 25 bp, Homo sapien
tccctccatgtcctgtgcatctgtc

SEQ ID NO: 5596963 - DNA, 25 bp, Homo sapien
tcccacatccttcatcaaatgctcc

SEQ ID NO: 5596964 - DNA, 25 bp, Homo sapien
gtgcaggatgccatttccttccctc

SEQ ID NO: 5596965 - DNA, 25 bp, Homo sapien
ataagggtcacacgtgagccatttc

SEQ ID NO: 5596966 - DNA, 25 bp, Homo sapien
aattcctgctgccgccaaggagtca

SEQ ID NO: 5596967 - DNA, 25 bp, Homo sapien
ttaaattaccagagcttaggaggga

SEQ ID NO: 5596968 - DNA, 25 bp, Homo sapien
gtgactggagcccaattcctgctgc

SEQ ID NO: 5596969 - DNA, 25 bp, Homo sapien
gggaaaaggtcatagcatagaacaa

SEQ ID NO: 5596970 - DNA, 25 bp, Homo sapien
tctgggaaagtcaactacactgtgc

SEQ ID NO: 5596971 - DNA, 25 bp, Homo sapien
gtctgtgaaatgtgtcggcacttcc

SEQ ID NO: 5596972 - DNA, 25 bp, Homo sapien
tattacaaagctggcccttcaaagc

SEQ ID NO: 5596973 - DNA, 25 bp, Homo sapien
aaaagtgagtaactcccagactgtc

SEQ ID NO: 5596974 - DNA, 25 bp, Homo sapien
actgtgcaagaggtctgtgaaatgt

SEQ ID NO: 5596975 - DNA, 25 bp, Homo sapien
tcagtgttaagcaagtgactggagc

SEQ ID NO: 5596976 - DNA, 25 bp, Homo sapien
tctgcaatacagaagccctcgctat

SEQ ID NO: 5596977 - DNA, 25 bp, Homo sapien
tatgagagtttcatgtaagatttgt

SEQ ID NO: 5596978 - DNA, 25 bp, Homo sapien
atgcccttgttacttagagactgga

SEQ ID NO: 5596979 - DNA, 25 bp, Homo sapien
tagaagttaggggaatatgttcctc

SEQ ID NO: 5596980 - DNA, 25 bp, Homo sapien
ctaggagatttcttaaaggataact

SEQ ID NO: 5596981 - DNA, 25 bp, Homo sapien
accactatagtggaccttaagagac

SEQ ID NO: 5596982 - DNA, 25 bp, Homo sapien
ggaagcaggaataacatagagcaat

SEQ ID NO: 5596983 - DNA, 25 bp, Homo sapien
ctgcacccagctgagttattcctta

SEQ ID NO: 5596984 - DNA, 25 bp, Homo sapien
ttaaataaagaaccactatagtgga

SEQ ID NO: 5596985 - DNA, 25 bp, Homo sapien
tgttacttagagactggaagcagga

SEQ ID NO: 5596986 - DNA, 25 bp, Homo sapien
aactccagaattcctaggagatttc

SEQ ID NO: 5596987 - DNA, 25 bp, Homo sapien
cttaaaggataacttgctgggctgg

SEQ ID NO: 5596988 - DNA, 25 bp, Homo sapien
ttctagtactggtatggtttcattt

SEQ ID NO: 5596989 - DNA, 25 bp, Homo sapien
ttggttactacagctttgcaggata

SEQ ID NO: 5596990 - DNA, 25 bp, Homo sapien
ggctatttgaggtattttgtgattc

SEQ ID NO: 5596991 - DNA, 25 bp, Homo sapien
ttaaatccagattgggagccagaga

SEQ ID NO: 5596992 - DNA, 25 bp, Homo sapien
tgcctaggttaaagaggaattcacc

SEQ ID NO: 5596993 - DNA, 25 bp, Homo sapien
attttggcatctggtagtgtgatac

SEQ ID NO: 5596994 - DNA, 25 bp, Homo sapien
ctggtagtgtgatacctccagcttt

SEQ ID NO: 5596995 - DNA, 25 bp, Homo sapien
acatttgtcaaaatcagttggttac

SEQ ID NO: 5596996 - DNA, 25 bp, Homo sapien
ggggtacatgtgcgataaacagtta

SEQ ID NO: 5596997 - DNA, 25 bp, Homo sapien
tcctaaagagtgttgttggcacatt

SEQ ID NO: 5596998 - DNA, 25 bp, Homo sapien
atttctgtgttcgctattctgttcc

SEQ ID NO: 5596999 - DNA, 25 bp, Homo sapien
tttgtgtgccttcatccttacagct

SEQ ID NO: 5597000 - DNA, 25 bp, Homo sapien
cagccctcctgcgaccccgcacttg

SEQ ID NO: 5597001 - DNA, 25 bp, Homo sapien
ctgcgaccccgcacttgtcagccag

SEQ ID NO: 5597002 - DNA, 25 bp, Homo sapien
ttgttcactgtggcgtgaggcaaat

SEQ ID NO: 5597003 - DNA, 25 bp, Homo sapien
tattgtcttcatacgagggcagctg

SEQ ID NO: 5597004 - DNA, 25 bp, Homo sapien
acctgcagtttcgaggtcccctggg

SEQ ID NO: 5597005 - DNA, 25 bp, Homo sapien
ccccttgttcactgtggcgtgaggc

SEQ ID NO: 5597006 - DNA, 25 bp, Homo sapien
aggaatgtcctggcacacctgcagt

SEQ ID NO: 5597007 - DNA, 25 bp, Homo sapien
gctccctgagttctgatcctgcctc

SEQ ID NO: 5597008 - DNA, 25 bp, Homo sapien
ggactgtagccagagctctcacttg

SEQ ID NO: 5597009 - DNA, 25 bp, Homo sapien
cgcacttgtcagccaggaatgtcct

SEQ ID NO: 5597010 - DNA, 25 bp, Homo sapien
agatgacgcaatcaccaggttagac

SEQ ID NO: 5597011 - DNA, 25 bp, Homo sapien
ccaaggtcacagtgctgataagagg

SEQ ID NO: 5597012 - DNA, 25 bp, Homo sapien
tgataagaggaatttaagcccagat

SEQ ID NO: 5597013 - DNA, 25 bp, Homo sapien
gtgccaggcactgtcagatgtcctt

SEQ ID NO: 5597014 - DNA, 25 bp, Homo sapien
aggttagacttgatctcgagggaac

SEQ ID NO: 5597015 - DNA, 25 bp, Homo sapien
gaaccagaggaggttgtaattcact

SEQ ID NO: 5597016 - DNA, 25 bp, Homo sapien
gctgttgtagccgtgctctcccacc

SEQ ID NO: 5597017 - DNA, 25 bp, Homo sapien
ttcatcctaggcaaagtggccagga

SEQ ID NO: 5597018 - DNA, 25 bp, Homo sapien
ggagcacctatcccgtgccaggcac

SEQ ID NO: 5597019 - DNA, 25 bp, Homo sapien
gccagagttgaggtaactacaaagc

SEQ ID NO: 5597020 - DNA, 25 bp, Homo sapien
agctgtgatgaagggctcccattgt

SEQ ID NO: 5597021 - DNA, 25 bp, Homo sapien
ccttcgaataagtctgcacctggca

SEQ ID NO: 5597022 - DNA, 25 bp, Homo sapien
actcaggtgcatgtactcgtgtgct

SEQ ID NO: 5597023 - DNA, 25 bp, Homo sapien
tcagtcataagctaagaggattcca

SEQ ID NO: 5597024 - DNA, 25 bp, Homo sapien
attcaagaagaaattaaatctcact

SEQ ID NO: 5597025 - DNA, 25 bp, Homo sapien
ttcaacttacttaggattaggctta

SEQ ID NO: 5597026 - DNA, 25 bp, Homo sapien
agtggtacacagacttaaatcatct

SEQ ID NO: 5597027 - DNA, 25 bp, Homo sapien
aatacaagtgtataataaatgggaa

SEQ ID NO: 5597028 - DNA, 25 bp, Homo sapien
aaatacacaaacagcatacagtcct

SEQ ID NO: 5597029 - DNA, 25 bp, Homo sapien
agtaagtaaagattagaagtggtac

SEQ ID NO: 5597030 - DNA, 25 bp, Homo sapien
ggattccaaaaggccgaagccagaa

SEQ ID NO: 5597031 - DNA, 25 bp, Homo sapien
acttccacctattgcccccctcctc

SEQ ID NO: 5597032 - DNA, 25 bp, Homo sapien
tgagaatgagctgaaaacccttgaa

SEQ ID NO: 5597033 - DNA, 25 bp, Homo sapien
ccggccttgggatgcatataccaga

SEQ ID NO: 5597034 - DNA, 25 bp, Homo sapien
aagcagaagaaactagcctatttaa

SEQ ID NO: 5597035 - DNA, 25 bp, Homo sapien
gcatataccagagagtgagaatgag

SEQ ID NO: 5597036 - DNA, 25 bp, Homo sapien
agaatggtaatctaggcagcaatgg

SEQ ID NO: 5597037 - DNA, 25 bp, Homo sapien
tagcctaggctagaaagaatggtaa

SEQ ID NO: 5597038 - DNA, 25 bp, Homo sapien
taacaacaaaagcagctagtgtggc

SEQ ID NO: 5597039 - DNA, 25 bp, Homo sapien
ctaaagaaagcattgaataggggac

SEQ ID NO: 5597040 - DNA, 25 bp, Homo sapien
aagctgggaggttgatattaattga

SEQ ID NO: 5597041 - DNA, 25 bp, Homo sapien
ggctgctattctgaggaggcaacac

SEQ ID NO: 5597042 - DNA, 25 bp, Homo sapien
caggaaaggctgctattctgaggag

SEQ ID NO: 5597043 - DNA, 25 bp, Homo sapien
gcattaatataagaggagtagccag

SEQ ID NO: 5597044 - DNA, 25 bp, Homo sapien
gcaagggtttctcttaggcactctg

SEQ ID NO: 5597045 - DNA, 25 bp, Homo sapien
aactgcatcctgccagtagagtacc

SEQ ID NO: 5597046 - DNA, 25 bp, Homo sapien
tcccaggtgcaagggtttctcttag

SEQ ID NO: 5597047 - DNA, 25 bp, Homo sapien
gaataaataactgatggcataaaat

SEQ ID NO: 5597048 - DNA, 25 bp, Homo sapien
gtgtatgcattaatataagaggagt

SEQ ID NO: 5597049 - DNA, 25 bp, Homo sapien
aaacaagatcttaaatgtattagcc

SEQ ID NO: 5597050 - DNA, 25 bp, Homo sapien
cctgccagtagagtaccatgttgag

SEQ ID NO: 5597051 - DNA, 25 bp, Homo sapien
tcttaggcactctgtctcatgatac

SEQ ID NO: 5597052 - DNA, 25 bp, Homo sapien
gtagccagttgcagaagaaacattg

SEQ ID NO: 5597053 - DNA, 25 bp, Homo sapien
ttaatataagaggagtagccagttg

SEQ ID NO: 5597054 - DNA, 25 bp, Homo sapien
tgcccaaggtgaccgccaacacctt

SEQ ID NO: 5597055 - DNA, 25 bp, Homo sapien
gggagccctagcatgcacttctggg

SEQ ID NO: 5597056 - DNA, 25 bp, Homo sapien
aagggaccccctcccaatcagggca

SEQ ID NO: 5597057 - DNA, 25 bp, Homo sapien
tccccactccaaacaccactgggtc

SEQ ID NO: 5597058 - DNA, 25 bp, Homo sapien
gaccccctcccaatcagggcaacag

SEQ ID NO: 5597059 - DNA, 25 bp, Homo sapien
aggtgaccgccaacaccttcctggg

SEQ ID NO: 5597060 - DNA, 25 bp, Homo sapien
ggctttacccaaatagtgaggcacc

SEQ ID NO: 5597061 - DNA, 25 bp, Homo sapien
ttacccaaatagtgaggcaccccag

SEQ ID NO: 5597062 - DNA, 25 bp, Homo sapien
agtgcagcgggtttaggctttttaa

SEQ ID NO: 5597063 - DNA, 25 bp, Homo sapien
acttctgggctggctttacccaaat

SEQ ID NO: 5597064 - DNA, 25 bp, Homo sapien
actccaaacaccactgggtcagggg

SEQ ID NO: 5597065 - DNA, 25 bp, Homo sapien
ctggaaccatcggcagctgccttca

SEQ ID NO: 5597066 - DNA, 25 bp, Homo sapien
gtagctctacatcagattcatgctc

SEQ ID NO: 5597067 - DNA, 25 bp, Homo sapien
tgaaaccaccatgcttggcttgtcc

SEQ ID NO: 5597068 - DNA, 25 bp, Homo sapien
attcatgctctagtcctgtatatcc

SEQ ID NO: 5597069 - DNA, 25 bp, Homo sapien
aaaaccaccctgtcttgccagagcc

SEQ ID NO: 5597070 - DNA, 25 bp, Homo sapien
agaggctgccggctctgctctttca

SEQ ID NO: 5597071 - DNA, 25 bp, Homo sapien
atatccaaatgatgactagaggctg

SEQ ID NO: 5597072 - DNA, 25 bp, Homo sapien
ctctacatctggaaccatcggcagc

SEQ ID NO: 5597073 - DNA, 25 bp, Homo sapien
tctgctctttcaaaggcacaatgag

SEQ ID NO: 5597074 - DNA, 25 bp, Homo sapien
ccatcggcagctgccttcataaggc

SEQ ID NO: 5597075 - DNA, 25 bp, Homo sapien
ttccctcctgcatcacctatctctc

SEQ ID NO: 5597076 - DNA, 25 bp, Homo sapien
attgtacccgggcataataaagtta

SEQ ID NO: 5597077 - DNA, 25 bp, Homo sapien
atactagacatgcaaaatgagaaga

SEQ ID NO: 5597078 - DNA, 25 bp, Homo sapien
tacccacaaagagggagacactata

SEQ ID NO: 5597079 - DNA, 25 bp, Homo sapien
aagagggagacactatagactttct

SEQ ID NO: 5597080 - DNA, 25 bp, Homo sapien
agaacctgcagaataaaattatctt

SEQ ID NO: 5597081 - DNA, 25 bp, Homo sapien
tagaatggattcacaactatgatgt

SEQ ID NO: 5597082 - DNA, 25 bp, Homo sapien
gcaaaatgagaagattacatgtgaa

SEQ ID NO: 5597083 - DNA, 25 bp, Homo sapien
attctatgaaaaagggattgtggac

SEQ ID NO: 5597084 - DNA, 25 bp, Homo sapien
gacataatatgcattgtacccgggc

SEQ ID NO: 5597085 - DNA, 25 bp, Homo sapien
gattgtggacctgtagctttatagc

SEQ ID NO: 5597086 - DNA, 25 bp, Homo sapien
attaactataatgcaaggtaacttt

SEQ ID NO: 5597087 - DNA, 25 bp, Homo sapien
tagggcaatcagactgatagctgac

SEQ ID NO: 5597088 - DNA, 25 bp, Homo sapien
acacacggaaattcttaagagctgt

SEQ ID NO: 5597089 - DNA, 25 bp, Homo sapien
cactgaggaacatgaaaactttcac

SEQ ID NO: 5597090 - DNA, 25 bp, Homo sapien
gctgccatctagtgctcctgagtac

SEQ ID NO: 5597091 - DNA, 25 bp, Homo sapien
ggatgcaatttgtgggatagggcaa

SEQ ID NO: 5597092 - DNA, 25 bp, Homo sapien
aggtggacaatggttgttcatgcac

SEQ ID NO: 5597093 - DNA, 25 bp, Homo sapien
gggtacctaagacagcattggctgc

SEQ ID NO: 5597094 - DNA, 25 bp, Homo sapien
cttaagtgctatatgagaagaaaag

SEQ ID NO: 5597095 - DNA, 25 bp, Homo sapien
aatagcgccactggacttcagcctg

SEQ ID NO: 5597096 - DNA, 25 bp, Homo sapien
gtaagatgaatataacaggctgcca

SEQ ID NO: 5597097 - DNA, 25 bp, Homo sapien
gagctgtaggtccatcatccaagga

SEQ ID NO: 5597098 - DNA, 25 bp, Homo sapien
agtcccaaagtcgggacagtgagag

SEQ ID NO: 5597099 - DNA, 25 bp, Homo sapien
ttcaggataaagtccaggcagctaa

SEQ ID NO: 5597100 - DNA, 25 bp, Homo sapien
ttctgtgcttggccacaaggccgca

SEQ ID NO: 5597101 - DNA, 25 bp, Homo sapien
tgccagactgcagagtactgttttc

SEQ ID NO: 5597102 - DNA, 25 bp, Homo sapien
gtagaaattacttagatgaggctca

SEQ ID NO: 5597103 - DNA, 25 bp, Homo sapien
ttccagcttgtgagaagaggaaaga

SEQ ID NO: 5597104 - DNA, 25 bp, Homo sapien
gtcactcaaggacccaggccctttc

SEQ ID NO: 5597105 - DNA, 25 bp, Homo sapien
agagggctcatgacgtcactcaagg

SEQ ID NO: 5597106 - DNA, 25 bp, Homo sapien
gttttcgccccatggtcaaagctgg

SEQ ID NO: 5597107 - DNA, 25 bp, Homo sapien
cattttccatgctggggacgaccta

SEQ ID NO: 5597108 - DNA, 25 bp, Homo sapien
ggcagctaaaacagagagactctaa

SEQ ID NO: 5597109 - DNA, 25 bp, Homo sapien
aaacagaatatcaggaaacaggatt

SEQ ID NO: 5597110 - DNA, 25 bp, Homo sapien
caggttgccttgggtaaatgaccca

SEQ ID NO: 5597111 - DNA, 25 bp, Homo sapien
attggcctttaagttgaaagacctg

SEQ ID NO: 5597112 - DNA, 25 bp, Homo sapien
tctaggtcatctgttgtgactgcca

SEQ ID NO: 5597113 - DNA, 25 bp, Homo sapien
gacattttggacatcactgagagaa

SEQ ID NO: 5597114 - DNA, 25 bp, Homo sapien
aaagacctgggtctagtccaaggct

SEQ ID NO: 5597115 - DNA, 25 bp, Homo sapien
gcaagcaggtcatcctaggtatctt

SEQ ID NO: 5597116 - DNA, 25 bp, Homo sapien
taaagagtaaaaacagaatatcagg

SEQ ID NO: 5597117 - DNA, 25 bp, Homo sapien
gtgactgccaagtagattaaagcta

SEQ ID NO: 5597118 - DNA, 25 bp, Homo sapien
agtccaaggctcaccacttccatcc

SEQ ID NO: 5597119 - DNA, 25 bp, Homo sapien
ccggacttacagggcaacccatgac

SEQ ID NO: 5597120 - DNA, 25 bp, Homo sapien
ttcctagaataaaacatcacataat

SEQ ID NO: 5597121 - DNA, 25 bp, Homo sapien
aagtatagtcacaattgctgagtgc

SEQ ID NO: 5597122 - DNA, 25 bp, Homo sapien
tgagtgcaacagaaaaatagtaatt

SEQ ID NO: 5597123 - DNA, 25 bp, Homo sapien
gaaagcagtatgaaaggcaataact

SEQ ID NO: 5597124 - DNA, 25 bp, Homo sapien
tctggctttgcagtcaagaagggtg

SEQ ID NO: 5597125 - DNA, 25 bp, Homo sapien
tatgaaaggcaataactctgagttt

SEQ ID NO: 5597126 - DNA, 25 bp, Homo sapien
ttgctgagtgcaacagaaaaatagt

SEQ ID NO: 5597127 - DNA, 25 bp, Homo sapien
attataggttattagagattctgtt

SEQ ID NO: 5597128 - DNA, 25 bp, Homo sapien
ctgtgtacaattgtccaaaaccacc

SEQ ID NO: 5597129 - DNA, 25 bp, Homo sapien
acagactacaagaattttgttaagt

SEQ ID NO: 5597130 - DNA, 25 bp, Homo sapien
tttctgaaaagatgcaaaaattctg

SEQ ID NO: 5597131 - DNA, 25 bp, Homo sapien
gactaggaaatgatactgatcccat

SEQ ID NO: 5597132 - DNA, 25 bp, Homo sapien
ttaaaattatccagcaaccatcctt

SEQ ID NO: 5597133 - DNA, 25 bp, Homo sapien
tgaagcagagctattttgattaatg

SEQ ID NO: 5597134 - DNA, 25 bp, Homo sapien
ttgagaaggaaaattgatttccatc

SEQ ID NO: 5597135 - DNA, 25 bp, Homo sapien
tccatcacatgaagagagcagtaaa

SEQ ID NO: 5597136 - DNA, 25 bp, Homo sapien
tgcatgcctcaatgaagcagagcta

SEQ ID NO: 5597137 - DNA, 25 bp, Homo sapien
ggatggatgtatgactaggaaatga

SEQ ID NO: 5597138 - DNA, 25 bp, Homo sapien
actaatagtatgacagcctttccac

SEQ ID NO: 5597139 - DNA, 25 bp, Homo sapien
aaaatgatgaccaaatcctctcaat

SEQ ID NO: 5597140 - DNA, 25 bp, Homo sapien
ctttccaccgagagtctgaggactg

SEQ ID NO: 5597141 - DNA, 25 bp, Homo sapien
aagtaacaaaaactggatggatgta

SEQ ID NO: 5597142 - DNA, 25 bp, Homo sapien
ccagcacacaccctcgaaggctgcc

SEQ ID NO: 5597143 - DNA, 25 bp, Homo sapien
attcagtggctccagtcaccctctc

SEQ ID NO: 5597144 - DNA, 25 bp, Homo sapien
tatccagtgggaaatgtggttgaaa

SEQ ID NO: 5597145 - DNA, 25 bp, Homo sapien
tctgcgggcttgcctgtcgctttac

SEQ ID NO: 5597146 - DNA, 25 bp, Homo sapien
gcaccttcgtgtctccacggcagac

SEQ ID NO: 5597147 - DNA, 25 bp, Homo sapien
atgtctgtcccgaaggatacagggg

SEQ ID NO: 5597148 - DNA, 25 bp, Homo sapien
tccattacagacacagccctctctc

SEQ ID NO: 5597149 - DNA, 25 bp, Homo sapien
gccacgactgaaaacgcacgttcct

SEQ ID NO: 5597150 - DNA, 25 bp, Homo sapien
atctagcctgccacgactgaaaacg

SEQ ID NO: 5597151 - DNA, 25 bp, Homo sapien
tgtgggaactcatacaatgtctgtc

SEQ ID NO: 5597152 - DNA, 25 bp, Homo sapien
agggagttccccatctgcgggcttg

SEQ ID NO: 5597153 - DNA, 25 bp, Homo sapien
ctgagacacgcatgtatatatgaac

SEQ ID NO: 5597154 - DNA, 25 bp, Homo sapien
ttactgggtataaaatgcgacaaaa

SEQ ID NO: 5597155 - DNA, 25 bp, Homo sapien
tcatgtcaggcacaattctaagcac

SEQ ID NO: 5597156 - DNA, 25 bp, Homo sapien
cctttgggatatggtcaaagggtac

SEQ ID NO: 5597157 - DNA, 25 bp, Homo sapien
cgatgactaacattcagtgagtatg

SEQ ID NO: 5597158 - DNA, 25 bp, Homo sapien
ttctgcagaagttaaaaagcctttc

SEQ ID NO: 5597159 - DNA, 25 bp, Homo sapien
aatggtgactaagttctgcagaagt

SEQ ID NO: 5597160 - DNA, 25 bp, Homo sapien
aaatgcgacaaaaagagtattagtc

SEQ ID NO: 5597161 - DNA, 25 bp, Homo sapien
tgatgatgatgaatataataacgat

SEQ ID NO: 5597162 - DNA, 25 bp, Homo sapien
aaataatgaactgataaagactatc

SEQ ID NO: 5597163 - DNA, 25 bp, Homo sapien
agtattagtcggaataaagtccttc

SEQ ID NO: 5597164 - DNA, 25 bp, Homo sapien
tctgttaggaaagtcactctggtgg

SEQ ID NO: 5597165 - DNA, 25 bp, Homo sapien
gtcactctggtggctccattgggac

SEQ ID NO: 5597166 - DNA, 25 bp, Homo sapien
agggctccctgctgcatcagactag

SEQ ID NO: 5597167 - DNA, 25 bp, Homo sapien
ttgggacgttcaagacagcactgaa

SEQ ID NO: 5597168 - DNA, 25 bp, Homo sapien
ttaggaaagtcactctggtggctcc

SEQ ID NO: 5597169 - DNA, 25 bp, Homo sapien
tcagactagctccaactcaaacctt

SEQ ID NO: 5597170 - DNA, 25 bp, Homo sapien
ggctccattgggacgttcaagacag

SEQ ID NO: 5597171 - DNA, 25 bp, Homo sapien
atatcttctgttaggaaagtcactc

SEQ ID NO: 5597172 - DNA, 25 bp, Homo sapien
tggtggctccattgggacgttcaag

SEQ ID NO: 5597173 - DNA, 25 bp, Homo sapien
cctgctgcatcagactagctccaac

SEQ ID NO: 5597174 - DNA, 25 bp, Homo sapien
cctcaaggcagatcatatcttctgt

SEQ ID NO: 5597175 - DNA, 25 bp, Homo sapien
agggtcagccccttctcttggaaac

SEQ ID NO: 5597176 - DNA, 25 bp, Homo sapien
gcccctctcaaaactggagcccggc

SEQ ID NO: 5597177 - DNA, 25 bp, Homo sapien
aacaagggaggcagtttgtctccct

SEQ ID NO: 5597178 - DNA, 25 bp, Homo sapien
tgtctcccttaccagctccctcccc

SEQ ID NO: 5597179 - DNA, 25 bp, Homo sapien
atccacagccatccgtcatgacctt

SEQ ID NO: 5597180 - DNA, 25 bp, Homo sapien
catgctcccacttctgacagcttcc

SEQ ID NO: 5597181 - DNA, 25 bp, Homo sapien
agcttccagatacagtgagtcaaac

SEQ ID NO: 5597182 - DNA, 25 bp, Homo sapien
cactacacccaacctggtgcccctc

SEQ ID NO: 5597183 - DNA, 25 bp, Homo sapien
caaacttcactggaagcaaactatc

SEQ ID NO: 5597184 - DNA, 25 bp, Homo sapien
tatcacaccaactgtcaaaggcaga

SEQ ID NO: 5597185 - DNA, 25 bp, Homo sapien
gggaagggctcatgagctacactac

SEQ ID NO: 5597186 - DNA, 25 bp, Homo sapien
ggaagcccagagtcacggttctctg

SEQ ID NO: 5597187 - DNA, 25 bp, Homo sapien
ataaggatacagatgtcacagacat

SEQ ID NO: 5597188 - DNA, 25 bp, Homo sapien
ggtaagagctagatgccttgagatg

SEQ ID NO: 5597189 - DNA, 25 bp, Homo sapien
tacagggcaccgtctcaaatgattt

SEQ ID NO: 5597190 - DNA, 25 bp, Homo sapien
tgacaatcaggacccctactctgcc

SEQ ID NO: 5597191 - DNA, 25 bp, Homo sapien
tggactatgtgactgtgttcgtttc

SEQ ID NO: 5597192 - DNA, 25 bp, Homo sapien
gccttgagatgaacatacagggcac

SEQ ID NO: 5597193 - DNA, 25 bp, Homo sapien
attgataacaggttgctccgccctc

SEQ ID NO: 5597194 - DNA, 25 bp, Homo sapien
atctgcaggtgtgtatgtgaacatt

SEQ ID NO: 5597195 - DNA, 25 bp, Homo sapien
aagtttagggcactctcccacgctc

SEQ ID NO: 5597196 - DNA, 25 bp, Homo sapien
tcagactctgctcaagaaagtgtat

SEQ ID NO: 5597197 - DNA, 25 bp, Homo sapien
taagctggtttatgtggacagcctc

SEQ ID NO: 5597198 - DNA, 25 bp, Homo sapien
ttgaggtgttgccccatcactaaca

SEQ ID NO: 5597199 - DNA, 25 bp, Homo sapien
ataaatggttattgggcccctctta

SEQ ID NO: 5597200 - DNA, 25 bp, Homo sapien
attagcattagcaaaaaagaaggaa

SEQ ID NO: 5597201 - DNA, 25 bp, Homo sapien
atagaaccataaactaagctggttt

SEQ ID NO: 5597202 - DNA, 25 bp, Homo sapien
aggggtcaaactgccagcactatct

SEQ ID NO: 5597203 - DNA, 25 bp, Homo sapien
gatgtgtctgttgcatagtaggtgc

SEQ ID NO: 5597204 - DNA, 25 bp, Homo sapien
tagttctgtggttattagcattagc

SEQ ID NO: 5597205 - DNA, 25 bp, Homo sapien
ctccctacaaggggtcaaactgcca

SEQ ID NO: 5597206 - DNA, 25 bp, Homo sapien
ttcatgctacattagagtctgctct

SEQ ID NO: 5597207 - DNA, 25 bp, Homo sapien
gacctgagaatacttgtttactggc

SEQ ID NO: 5597208 - DNA, 25 bp, Homo sapien
gaagatggtaagatcagtctcatgt

SEQ ID NO: 5597209 - DNA, 25 bp, Homo sapien
tcaggaacatttcaggtacattgtc

SEQ ID NO: 5597210 - DNA, 25 bp, Homo sapien
cttgggaggacatgtgatctcaaca

SEQ ID NO: 5597211 - DNA, 25 bp, Homo sapien
agcaacttgctcaagtggcacagct

SEQ ID NO: 5597212 - DNA, 25 bp, Homo sapien
ggaacacccactcaatggccttcac

SEQ ID NO: 5597213 - DNA, 25 bp, Homo sapien
cagacaggatattgaagatggtaag

SEQ ID NO: 5597214 - DNA, 25 bp, Homo sapien
aggacatgtgatctcaacagcactc

SEQ ID NO: 5597215 - DNA, 25 bp, Homo sapien
acagcactcacaaatgaaggctttc

SEQ ID NO: 5597216 - DNA, 25 bp, Homo sapien
tctgtgctgccctttggaacaccca

SEQ ID NO: 5597217 - DNA, 25 bp, Homo sapien
tgtacccaatactggtttcaggcct

SEQ ID NO: 5597218 - DNA, 25 bp, Homo sapien
ggtacattgtcagaaataaagactc

SEQ ID NO: 5597219 - DNA, 25 bp, Homo sapien
atgttgcaagcacttactgaacttc

SEQ ID NO: 5597220 - DNA, 25 bp, Homo sapien
tgggcatctgctataacgtactttc

SEQ ID NO: 5597221 - DNA, 25 bp, Homo sapien
ttggcagtcctatatgggaaatttc

SEQ ID NO: 5597222 - DNA, 25 bp, Homo sapien
gtgcctgagatacttttgtgaacgt

SEQ ID NO: 5597223 - DNA, 25 bp, Homo sapien
aggcatactgatgagtgggcatctg

SEQ ID NO: 5597224 - DNA, 25 bp, Homo sapien
acttcatgctgtatgtgcctgagat

SEQ ID NO: 5597225 - DNA, 25 bp, Homo sapien
ttgtgaacgtaatggcaacatcaaa

SEQ ID NO: 5597226 - DNA, 25 bp, Homo sapien
attgtttgtatgaattggcagtcct

SEQ ID NO: 5597227 - DNA, 25 bp, Homo sapien
atatgtagatcaagggagtcactga

SEQ ID NO: 5597228 - DNA, 25 bp, Homo sapien
atcagagattttgaacagatgctat

SEQ ID NO: 5597229 - DNA, 25 bp, Homo sapien
ctgagaatcagttttagggatagtt

SEQ ID NO: 5597230 - DNA, 25 bp, Homo sapien
gcttgtgcgagacagatccacatct

SEQ ID NO: 5597231 - DNA, 25 bp, Homo sapien
accctacacggaccacacagacttt

SEQ ID NO: 5597232 - DNA, 25 bp, Homo sapien
tttccaaccagagagtctgaggtcc

SEQ ID NO: 5597233 - DNA, 25 bp, Homo sapien
agctctacatgtatggatccgaccc

SEQ ID NO: 5597234 - DNA, 25 bp, Homo sapien
actttgagtgctgaaatgtgggata

SEQ ID NO: 5597235 - DNA, 25 bp, Homo sapien
cacagactcacagcaaccacaatcc

SEQ ID NO: 5597236 - DNA, 25 bp, Homo sapien
cagacactactgggcaggttacaat

SEQ ID NO: 5597237 - DNA, 25 bp, Homo sapien
ggttcagtcaagtgcaccagagagt

SEQ ID NO: 5597238 - DNA, 25 bp, Homo sapien
tggccctagtgagaaatggcagata

SEQ ID NO: 5597239 - DNA, 25 bp, Homo sapien
ataattaaagtcatcaggccaggca

SEQ ID NO: 5597240 - DNA, 25 bp, Homo sapien
ggaacttggaatttgtggtctgaac

SEQ ID NO: 5597241 - DNA, 25 bp, Homo sapien
gtcaacactacacctagccaaagcc

SEQ ID NO: 5597242 - DNA, 25 bp, Homo sapien
cggcagaaagagtacacactgtatg

SEQ ID NO: 5597243 - DNA, 25 bp, Homo sapien
aggagcctcaactgaccggcagaaa

SEQ ID NO: 5597244 - DNA, 25 bp, Homo sapien
tgaagggtttttctgtaggcaccac

SEQ ID NO: 5597245 - DNA, 25 bp, Homo sapien
tgaaaacaggaacttggcctgtgtt

SEQ ID NO: 5597246 - DNA, 25 bp, Homo sapien
ctggaacctcgacttatagacacaa

SEQ ID NO: 5597247 - DNA, 25 bp, Homo sapien
gccaaaagagctctaacaggccggc

SEQ ID NO: 5597248 - DNA, 25 bp, Homo sapien
cctcttgctaagctaggtaaggagc

SEQ ID NO: 5597249 - DNA, 25 bp, Homo sapien
caaagccaagtgagtgtcttccgtt

SEQ ID NO: 5597250 - DNA, 25 bp, Homo sapien
gtaggcaccacattcagcacaaatt

SEQ ID NO: 5597251 - DNA, 25 bp, Homo sapien
ccccactgcctagaagagtatagac

SEQ ID NO: 5597252 - DNA, 25 bp, Homo sapien
tggagattggcctggtgattcctga

SEQ ID NO: 5597253 - DNA, 25 bp, Homo sapien
ggacaggtttgagacactaattaca

SEQ ID NO: 5597254 - DNA, 25 bp, Homo sapien
attccacaggttgtaagagacagag

SEQ ID NO: 5597255 - DNA, 25 bp, Homo sapien
ttcccaagaccaagcctcgatagac

SEQ ID NO: 5597256 - DNA, 25 bp, Homo sapien
tgttgaaggtcattaggagctagtt

SEQ ID NO: 5597257 - DNA, 25 bp, Homo sapien
gcattcagctcaggccccctagacc

SEQ ID NO: 5597258 - DNA, 25 bp, Homo sapien
ccagggttgcctgaccgccttcctg

SEQ ID NO: 5597259 - DNA, 25 bp, Homo sapien
catatttcttgggagagctgatgga

SEQ ID NO: 5597260 - DNA, 25 bp, Homo sapien
taggagctagttaatacaggtcata

SEQ ID NO: 5597261 - DNA, 25 bp, Homo sapien
cagtgtcacaaggcctccagcaatg

SEQ ID NO: 5597262 - DNA, 25 bp, Homo sapien
acagttctagacaccgagtccctcc

SEQ ID NO: 5597263 - DNA, 25 bp, Homo sapien
gtggtctagcttcagttcatagggc

SEQ ID NO: 5597264 - DNA, 25 bp, Homo sapien
tttcataatggaagcagcatgcttc

SEQ ID NO: 5597265 - DNA, 25 bp, Homo sapien
ttagacatcgaaataatagaccatc

SEQ ID NO: 5597266 - DNA, 25 bp, Homo sapien
acatgagtaggcagctataaaaatg

SEQ ID NO: 5597267 - DNA, 25 bp, Homo sapien
agctccccaaatgaagtccatacat

SEQ ID NO: 5597268 - DNA, 25 bp, Homo sapien
atagaccatcaaataacagtacgga

SEQ ID NO: 5597269 - DNA, 25 bp, Homo sapien
acagtacggattaccaacagagtgg

SEQ ID NO: 5597270 - DNA, 25 bp, Homo sapien
ttcaggaaagcatggcttcattttt

SEQ ID NO: 5597271 - DNA, 25 bp, Homo sapien
ttctgtgcttaggaagctggatgtg

SEQ ID NO: 5597272 - DNA, 25 bp, Homo sapien
tctaaagattaagtggtctagcttc

SEQ ID NO: 5597273 - DNA, 25 bp, Homo sapien
gaagtccatacatgagtaggcagct

SEQ ID NO: 5597274 - DNA, 25 bp, Homo sapien
ccatgtctactgtctgcctttacct

SEQ ID NO: 5597275 - DNA, 25 bp, Homo sapien
tcaagccaaagaataacaatgtttt

SEQ ID NO: 5597276 - DNA, 25 bp, Homo sapien
agttgacctgtgagtttgaagataa

SEQ ID NO: 5597277 - DNA, 25 bp, Homo sapien
gatctggcagtcttctcatttctac

SEQ ID NO: 5597278 - DNA, 25 bp, Homo sapien
gtttaggcgacagcaataataatac

SEQ ID NO: 5597279 - DNA, 25 bp, Homo sapien
gctttcaagagttcacaccatacac

SEQ ID NO: 5597280 - DNA, 25 bp, Homo sapien
gaagataatgtcatggacgtctggc

SEQ ID NO: 5597281 - DNA, 25 bp, Homo sapien
tggacgtctggcatgtacttatagc

SEQ ID NO: 5597282 - DNA, 25 bp, Homo sapien
tttcaggaatggtctgttgtccttt

SEQ ID NO: 5597283 - DNA, 25 bp, Homo sapien
ctaacattgtttaggcgacagcaat

SEQ ID NO: 5597284 - DNA, 25 bp, Homo sapien
tataaggataagctaatgatttttg

SEQ ID NO: 5597285 - DNA, 25 bp, Homo sapien
tttccaccctcactcgcgcagctgc

SEQ ID NO: 5597286 - DNA, 25 bp, Homo sapien
agtcggaatttgaacccgggcatta

SEQ ID NO: 5597287 - DNA, 25 bp, Homo sapien
cccgggatgtgattccgttggtatc

SEQ ID NO: 5597288 - DNA, 25 bp, Homo sapien
agaaacagaccagaagggattaaaa

SEQ ID NO: 5597289 - DNA, 25 bp, Homo sapien
aggggctcgtattttgagaggcaaa

SEQ ID NO: 5597290 - DNA, 25 bp, Homo sapien
tcacacagctgcttagggaatggag

SEQ ID NO: 5597291 - DNA, 25 bp, Homo sapien
agtatcctgtcaagaggtaggcaag

SEQ ID NO: 5597292 - DNA, 25 bp, Homo sapien
aagaagcttaattgccgggtttggc

SEQ ID NO: 5597293 - DNA, 25 bp, Homo sapien
aggtaggcaagacgatccccattta

SEQ ID NO: 5597294 - DNA, 25 bp, Homo sapien
tgtgtagcttgaagaggttgatcat

SEQ ID NO: 5597295 - DNA, 25 bp, Homo sapien
gggattaaaacacttgccgcaggtc

SEQ ID NO: 5597296 - DNA, 25 bp, Homo sapien
accaagagaccatagtttgtcagcc

SEQ ID NO: 5597297 - DNA, 25 bp, Homo sapien
ggctgaccagatttgaccaagagac

SEQ ID NO: 5597298 - DNA, 25 bp, Homo sapien
gctaaacgccaatgaataatgcaca

SEQ ID NO: 5597299 - DNA, 25 bp, Homo sapien
tggtactggcaaatgtgctaaacgc

SEQ ID NO: 5597300 - DNA, 25 bp, Homo sapien
tgggagaatgtgacatgactgtcta

SEQ ID NO: 5597301 - DNA, 25 bp, Homo sapien
aataaacaagtggctgaccagattt

SEQ ID NO: 5597302 - DNA, 25 bp, Homo sapien
acccaataggctatagaacgatgcc

SEQ ID NO: 5597303 - DNA, 25 bp, Homo sapien
tagaacgatgccaacacataatgcc

SEQ ID NO: 5597304 - DNA, 25 bp, Homo sapien
atttagaaacaaataggacatgtta

SEQ ID NO: 5597305 - DNA, 25 bp, Homo sapien
ggatctagatagtagtggtactggc

SEQ ID NO: 5597306 - DNA, 25 bp, Homo sapien
aacacataatgccaggttgcaaggc

SEQ ID NO: 5597307 - DNA, 25 bp, Homo sapien
atttgtaggtagcaaagtatataat

SEQ ID NO: 5597308 - DNA, 25 bp, Homo sapien
ttcatgttaaagattaggaaagctg

SEQ ID NO: 5597309 - DNA, 25 bp, Homo sapien
tagggatcctcaacttcaacctgtt

SEQ ID NO: 5597310 - DNA, 25 bp, Homo sapien
tccttacgtctaaacagcaagagaa

SEQ ID NO: 5597311 - DNA, 25 bp, Homo sapien
aacatgtagccatgttgaggtggga

SEQ ID NO: 5597312 - DNA, 25 bp, Homo sapien
agttgttacataaaagagtagtctt

SEQ ID NO: 5597313 - DNA, 25 bp, Homo sapien
taacagtgtgaaggttcacttatga

SEQ ID NO: 5597314 - DNA, 25 bp, Homo sapien
ctatcatttgtaggtagcaaagtat

SEQ ID NO: 5597315 - DNA, 25 bp, Homo sapien
aaggggtccttacgtctaaacagca

SEQ ID NO: 5597316 - DNA, 25 bp, Homo sapien
ttacataaaagagtagtcttgcagg

SEQ ID NO: 5597317 - DNA, 25 bp, Homo sapien
atgtgatggaggcctcacagaatga

SEQ ID NO: 5597318 - DNA, 25 bp, Homo sapien
tcattcgcaggaacccgtcaagttc

SEQ ID NO: 5597319 - DNA, 25 bp, Homo sapien
cgctgcagacggtgacattttcacg

SEQ ID NO: 5597320 - DNA, 25 bp, Homo sapien
ttgacagcaaggcagtagtattatc

SEQ ID NO: 5597321 - DNA, 25 bp, Homo sapien
gcccgcatcaccccctgaaagctct

SEQ ID NO: 5597322 - DNA, 25 bp, Homo sapien
tctatatcacaagaaaggcgctgca

SEQ ID NO: 5597323 - DNA, 25 bp, Homo sapien
cctccgatttgagcaagggaggtgc

SEQ ID NO: 5597324 - DNA, 25 bp, Homo sapien
taattggagatacaaaaaaaggtga

SEQ ID NO: 5597325 - DNA, 25 bp, Homo sapien
agcaggtggatgtctcagttcccat

SEQ ID NO: 5597326 - DNA, 25 bp, Homo sapien
agtgaggaccagacccctccgattt

SEQ ID NO: 5597327 - DNA, 25 bp, Homo sapien
aaaaaggtgactgttactgtttgac

SEQ ID NO: 5597328 - DNA, 25 bp, Homo sapien
gacattttcacgaaggagccacagc

SEQ ID NO: 5597329 - DNA, 25 bp, Homo sapien
aacacatgcaggactaaaagccaca

SEQ ID NO: 5597330 - DNA, 25 bp, Homo sapien
cccagctttaagcagtcggagactg

SEQ ID NO: 5597331 - DNA, 25 bp, Homo sapien
tcagtataagtcagcagaaagtcac

SEQ ID NO: 5597332 - DNA, 25 bp, Homo sapien
aatcactgtaagccccagctgcctg

SEQ ID NO: 5597333 - DNA, 25 bp, Homo sapien
tgaaccagtggtaacgaccttccca

SEQ ID NO: 5597334 - DNA, 25 bp, Homo sapien
tagatagaaatactcctggctcacc

SEQ ID NO: 5597335 - DNA, 25 bp, Homo sapien
gtagtatgctggataaatgaaaggc

SEQ ID NO: 5597336 - DNA, 25 bp, Homo sapien
actactgagctgtgccatcgtggga

SEQ ID NO: 5597337 - DNA, 25 bp, Homo sapien
gaaggcacaacttcagccgcagaac

SEQ ID NO: 5597338 - DNA, 25 bp, Homo sapien
agccacaaaacctcgacctagtccc

SEQ ID NO: 5597339 - DNA, 25 bp, Homo sapien
tgggaaggtcgcctcactaatcact

SEQ ID NO: 5597340 - DNA, 25 bp, Homo sapien
taaaatgcattgtaagctttgctac

SEQ ID NO: 5597341 - DNA, 25 bp, Homo sapien
tctcaaaagttaggtggctgagagg

SEQ ID NO: 5597342 - DNA, 25 bp, Homo sapien
tctctgactttaaagcctgtgtttt

SEQ ID NO: 5597343 - DNA, 25 bp, Homo sapien
atttgccaaacccttgctgggaata

SEQ ID NO: 5597344 - DNA, 25 bp, Homo sapien
tttaaggcaatcattgttcccattt

SEQ ID NO: 5597345 - DNA, 25 bp, Homo sapien
gaagataacaggtaagataggtaac

SEQ ID NO: 5597346 - DNA, 25 bp, Homo sapien
acagcagaagataacaggtaagata

SEQ ID NO: 5597347 - DNA, 25 bp, Homo sapien
cttgacaaccaccctttaaggcaat

SEQ ID NO: 5597348 - DNA, 25 bp, Homo sapien
agataacaggtaagataggtaactc

SEQ ID NO: 5597349 - DNA, 25 bp, Homo sapien
cccattttataaagtgagactctca

SEQ ID NO: 5597350 - DNA, 25 bp, Homo sapien
ccaaacccttgctgggaataaggac

SEQ ID NO: 5597351 - DNA, 25 bp, Homo sapien
gttcccaaccacaacgtaatggctc

SEQ ID NO: 5597352 - DNA, 25 bp, Homo sapien
tcaagtcaagctgggattccttcca

SEQ ID NO: 5597353 - DNA, 25 bp, Homo sapien
gcccagtagagaaacacagcttatc

SEQ ID NO: 5597354 - DNA, 25 bp, Homo sapien
cagttctcaggaactggtcatcttc

SEQ ID NO: 5597355 - DNA, 25 bp, Homo sapien
aatatttttgccagcccagtagaga

SEQ ID NO: 5597356 - DNA, 25 bp, Homo sapien
cagctatggaaacatctctactgcc

SEQ ID NO: 5597357 - DNA, 25 bp, Homo sapien
aatagggcaaagttatatctccttc

SEQ ID NO: 5597358 - DNA, 25 bp, Homo sapien
aagaagttctcaagtcaagctggga

SEQ ID NO: 5597359 - DNA, 25 bp, Homo sapien
ctctactgcctgtaaaagtcctcca

SEQ ID NO: 5597360 - DNA, 25 bp, Homo sapien
cagtatactacaaaagaaaggttcc

SEQ ID NO: 5597361 - DNA, 25 bp, Homo sapien
aatggctcagaaatccagctatgga

SEQ ID NO: 5597362 - DNA, 25 bp, Homo sapien
agcctagcctataattctgcagaac

SEQ ID NO: 5597363 - DNA, 25 bp, Homo sapien
atttaggtaatgtcagaagctggtt

SEQ ID NO: 5597364 - DNA, 25 bp, Homo sapien
actagttctgagggtcagcagttgt

SEQ ID NO: 5597365 - DNA, 25 bp, Homo sapien
aaggtttaggcttggatgacctggg

SEQ ID NO: 5597366 - DNA, 25 bp, Homo sapien
tttgggagaaatttaggtaatgtca

SEQ ID NO: 5597367 - DNA, 25 bp, Homo sapien
gtcagcatagtgaataagaggtgca

SEQ ID NO: 5597368 - DNA, 25 bp, Homo sapien
gtggatgatgccattagtcagcata

SEQ ID NO: 5597369 - DNA, 25 bp, Homo sapien
agaagctggttaacgactgactagt

SEQ ID NO: 5597370 - DNA, 25 bp, Homo sapien
cagaagttcagttttggatgtggac

SEQ ID NO: 5597371 - DNA, 25 bp, Homo sapien
gcccactagggtagttagacagaag

SEQ ID NO: 5597372 - DNA, 25 bp, Homo sapien
agaattgggtacaaaattgggatgg

SEQ ID NO: 5597373 - DNA, 25 bp, Homo sapien
gctgggttcactcctttgataagac

SEQ ID NO: 5597374 - DNA, 25 bp, Homo sapien
agtgggctgttctgagccctgcttc

SEQ ID NO: 5597375 - DNA, 25 bp, Homo sapien
ccaaaccaggtaaataaatctatgc

SEQ ID NO: 5597376 - DNA, 25 bp, Homo sapien
gagctgtggataccacgcagagtga

SEQ ID NO: 5597377 - DNA, 25 bp, Homo sapien
gaggtggatcctcaaaattccaaac

SEQ ID NO: 5597378 - DNA, 25 bp, Homo sapien
ctgtctcttatcaagtgggctgttc

SEQ ID NO: 5597379 - DNA, 25 bp, Homo sapien
aaagatcagcttttgaggtggatcc

SEQ ID NO: 5597380 - DNA, 25 bp, Homo sapien
cagaaccaccttatgatgtaggtac

SEQ ID NO: 5597381 - DNA, 25 bp, Homo sapien
ggttgagctgtggataccacgcaga

SEQ ID NO: 5597382 - DNA, 25 bp, Homo sapien
tttgataagactcacatactctgtc

SEQ ID NO: 5597383 - DNA, 25 bp, Homo sapien
taggagttgccttataggtgatggg

SEQ ID NO: 5597384 - DNA, 25 bp, Homo sapien
taacaatcaccttgaagtacctccc

SEQ ID NO: 5597385 - DNA, 25 bp, Homo sapien
agaagtccatttcagcaaagcatta

SEQ ID NO: 5597386 - DNA, 25 bp, Homo sapien
tccaatgttgcataaagaagtccat

SEQ ID NO: 5597387 - DNA, 25 bp, Homo sapien
gcctggggtcacaccagaatcaaca

SEQ ID NO: 5597388 - DNA, 25 bp, Homo sapien
agtacctcccaggtaccaaacagcc

SEQ ID NO: 5597389 - DNA, 25 bp, Homo sapien
ccaggaaggaaacttctgaattatt

SEQ ID NO: 5597390 - DNA, 25 bp, Homo sapien
caagatcaagaaagcagtggttgag

SEQ ID NO: 5597391 - DNA, 25 bp, Homo sapien
ccagaatcaacaacggtgcagaagg

SEQ ID NO: 5597392 - DNA, 25 bp, Homo sapien
gcataactttagaaatccatgactc

SEQ ID NO: 5597393 - DNA, 25 bp, Homo sapien
tcctcaagatcaagaaagcagtggt

SEQ ID NO: 5597394 - DNA, 25 bp, Homo sapien
gctgttaagcagatacacaaagtaa

SEQ ID NO: 5597395 - DNA, 25 bp, Homo sapien
cagcctgacaaataattgaattcgt

SEQ ID NO: 5597396 - DNA, 25 bp, Homo sapien
ctacatatctggccatctctagccc

SEQ ID NO: 5597397 - DNA, 25 bp, Homo sapien
gagaatctagagagcatagagtgca

SEQ ID NO: 5597398 - DNA, 25 bp, Homo sapien
ttatcctagtgggctcaccagggaa

SEQ ID NO: 5597399 - DNA, 25 bp, Homo sapien
gggaagtcaccacagctatatgtgt

SEQ ID NO: 5597400 - DNA, 25 bp, Homo sapien
atagagtgcatttaaatgttcagcc

SEQ ID NO: 5597401 - DNA, 25 bp, Homo sapien
gcctctccatgtgacccccagctgc

SEQ ID NO: 5597402 - DNA, 25 bp, Homo sapien
tggtgtggttgctatttagattgcc

SEQ ID NO: 5597403 - DNA, 25 bp, Homo sapien
attcgtaaatgaaaagagaggtagg

SEQ ID NO: 5597404 - DNA, 25 bp, Homo sapien
tgttacagctgttctggatgcattc

SEQ ID NO: 5597405 - DNA, 25 bp, Homo sapien
cattctctgcaatatgagtcacctc

SEQ ID NO: 5597406 - DNA, 25 bp, Homo sapien
aagagacaggacatgcccttactca

SEQ ID NO: 5597407 - DNA, 25 bp, Homo sapien
gagcactgtgattaaagcaacattt

SEQ ID NO: 5597408 - DNA, 25 bp, Homo sapien
ctccgttaacagatactgggtgtga

SEQ ID NO: 5597409 - DNA, 25 bp, Homo sapien
gtgacctgaattgcattagggaatg

SEQ ID NO: 5597410 - DNA, 25 bp, Homo sapien
gaagctgaaaacccaccacaatacc

SEQ ID NO: 5597411 - DNA, 25 bp, Homo sapien
ggcttgtgcttcctgaaaggcattt

SEQ ID NO: 5597412 - DNA, 25 bp, Homo sapien
tagggaatgagtcttcttcacccac

SEQ ID NO: 5597413 - DNA, 25 bp, Homo sapien
agcaacatttaaagcacggtatttc

SEQ ID NO: 5597414 - DNA, 25 bp, Homo sapien
aattagaaaactaggcttgtgcttc

SEQ ID NO: 5597415 - DNA, 25 bp, Homo sapien
ttttcatggataagagacaggacat

SEQ ID NO: 5597416 - DNA, 25 bp, Homo sapien
accaagccacacaggtaagttcacc

SEQ ID NO: 5597417 - DNA, 25 bp, Homo sapien
aagcagagttgccactaatctccct

SEQ ID NO: 5597418 - DNA, 25 bp, Homo sapien
cagtcgaccataaaatacacagttg

SEQ ID NO: 5597419 - DNA, 25 bp, Homo sapien
tcaccagtgtttaacaggagcattt

SEQ ID NO: 5597420 - DNA, 25 bp, Homo sapien
ataccatctgtaaagtaaacccaaa

SEQ ID NO: 5597421 - DNA, 25 bp, Homo sapien
aatgacaagaaatcatctgcataat

SEQ ID NO: 5597422 - DNA, 25 bp, Homo sapien
acccaaagcaggcaattttaaagac

SEQ ID NO: 5597423 - DNA, 25 bp, Homo sapien
attgaattggaaaggcaatacattt

SEQ ID NO: 5597424 - DNA, 25 bp, Homo sapien
ttttaacagacaagcagagttgcca

SEQ ID NO: 5597425 - DNA, 25 bp, Homo sapien
ttactttggcaagctggaaatgaca

SEQ ID NO: 5597426 - DNA, 25 bp, Homo sapien
aacagtattcccagtttgcgaaact

SEQ ID NO: 5597427 - DNA, 25 bp, Homo sapien
taaaaacagatgcttcaccagtgtt

SEQ ID NO: 5597428 - DNA, 25 bp, Homo sapien
gctgaggtggaaaacaatcagatgt

SEQ ID NO: 5597429 - DNA, 25 bp, Homo sapien
agctccaagatgagaccaaccacct

SEQ ID NO: 5597430 - DNA, 25 bp, Homo sapien
caagatgagaccaaccacctaagga

SEQ ID NO: 5597431 - DNA, 25 bp, Homo sapien
agcccccagcagggccctctaaggt

SEQ ID NO: 5597432 - DNA, 25 bp, Homo sapien
agaccaaccacctaaggaaggagct

SEQ ID NO: 5597433 - DNA, 25 bp, Homo sapien
agatgttgagtctcctgaacaggag

SEQ ID NO: 5597434 - DNA, 25 bp, Homo sapien
gtggaaaacaatcagatgttgagtc

SEQ ID NO: 5597435 - DNA, 25 bp, Homo sapien
tctcctgaacaggagacaggaggag

SEQ ID NO: 5597436 - DNA, 25 bp, Homo sapien
cctctaaggtggagcagctccaaga

SEQ ID NO: 5597437 - DNA, 25 bp, Homo sapien
aggtggagcagctccaagatgagac

SEQ ID NO: 5597438 - DNA, 25 bp, Homo sapien
ggaagccctctacaagcagcgggcc

SEQ ID NO: 5597439 - DNA, 25 bp, Homo sapien
cagtgaactttagccttgaactcct

SEQ ID NO: 5597440 - DNA, 25 bp, Homo sapien
aggctagagtacagcggctatattc

SEQ ID NO: 5597441 - DNA, 25 bp, Homo sapien
agcaaccaaaaagtttgaagaccac

SEQ ID NO: 5597442 - DNA, 25 bp, Homo sapien
ctgttgatgggaatttgaaatagac

SEQ ID NO: 5597443 - DNA, 25 bp, Homo sapien
tgggaccacagaaccatgtaccgca

SEQ ID NO: 5597444 - DNA, 25 bp, Homo sapien
gatgacaaatcactagcaagaatat

SEQ ID NO: 5597445 - DNA, 25 bp, Homo sapien
cccaacaagctaaagatgacaaatc

SEQ ID NO: 5597446 - DNA, 25 bp, Homo sapien
gagttaagctatggaagtaagtcct

SEQ ID NO: 5597447 - DNA, 25 bp, Homo sapien
gctccctccgaagagttaagctatg

SEQ ID NO: 5597448 - DNA, 25 bp, Homo sapien
atctaaagggcatcttgagtatatc

SEQ ID NO: 5597449 - DNA, 25 bp, Homo sapien
agtaagtcctgatgctgaaaaagaa

SEQ ID NO: 5597450 - DNA, 25 bp, Homo sapien
tgctgggtctttatggcggtcacca

SEQ ID NO: 5597451 - DNA, 25 bp, Homo sapien
tataaagtgcctggcctgtgagcag

SEQ ID NO: 5597452 - DNA, 25 bp, Homo sapien
cctgtgagcagggctccaactttta

SEQ ID NO: 5597453 - DNA, 25 bp, Homo sapien
ctgagccaagcactgtcctagaact

SEQ ID NO: 5597454 - DNA, 25 bp, Homo sapien
ctctcccctgcccagacagagacct

SEQ ID NO: 5597455 - DNA, 25 bp, Homo sapien
tgcttgggtgtatgtagcccccttt

SEQ ID NO: 5597456 - DNA, 25 bp, Homo sapien
gcatggcaagatgacactgagatgc

SEQ ID NO: 5597457 - DNA, 25 bp, Homo sapien
gatctacagggctctaggaagtagc

SEQ ID NO: 5597458 - DNA, 25 bp, Homo sapien
gaagtagcttatgagagcatgggca

SEQ ID NO: 5597459 - DNA, 25 bp, Homo sapien
ctaggcaggtccctacaaactgagc

SEQ ID NO: 5597460 - DNA, 25 bp, Homo sapien
ctcagtcacctcccagatgagcgga

SEQ ID NO: 5597461 - DNA, 25 bp, Homo sapien
tcttcaaatgccaagtcatccactt

SEQ ID NO: 5597462 - DNA, 25 bp, Homo sapien
actttgtggactgtgttttcaaaac

SEQ ID NO: 5597463 - DNA, 25 bp, Homo sapien
ttgccagtaatgtatacaaattgtc

SEQ ID NO: 5597464 - DNA, 25 bp, Homo sapien
aaaacaagactattgccagtaatgt

SEQ ID NO: 5597465 - DNA, 25 bp, Homo sapien
ctttgcaaattcatctgttacacag

SEQ ID NO: 5597466 - DNA, 25 bp, Homo sapien
ttttgtgtacttccagcataggttt

SEQ ID NO: 5597467 - DNA, 25 bp, Homo sapien
ctgtaatagctactgtatctgtgat

SEQ ID NO: 5597468 - DNA, 25 bp, Homo sapien
agcataggtttggatatatgaacat

SEQ ID NO: 5597469 - DNA, 25 bp, Homo sapien
gcagaaatggttgtgacagtgctgt

SEQ ID NO: 5597470 - DNA, 25 bp, Homo sapien
gctttgcacaaatacaattgctttc

SEQ ID NO: 5597471 - DNA, 25 bp, Homo sapien
cttaaaacatctgctgaattccaaa

SEQ ID NO: 5597472 - DNA, 25 bp, Homo sapien
ggacatttccccgacctggagctcc

SEQ ID NO: 5597473 - DNA, 25 bp, Homo sapien
tggccaacattagagtccgcgtagc

SEQ ID NO: 5597474 - DNA, 25 bp, Homo sapien
gtgtgaggtaacccactgagatagg

SEQ ID NO: 5597475 - DNA, 25 bp, Homo sapien
caggccacagtgcaggcattctcga

SEQ ID NO: 5597476 - DNA, 25 bp, Homo sapien
caactgttgagcaggcctctctgcc

SEQ ID NO: 5597477 - DNA, 25 bp, Homo sapien
acgcccaggtggccaacattagagt

SEQ ID NO: 5597478 - DNA, 25 bp, Homo sapien
gagctcctccgcctcaccgccaggc

SEQ ID NO: 5597479 - DNA, 25 bp, Homo sapien
aagttctgtgctaggcgatagagat

SEQ ID NO: 5597480 - DNA, 25 bp, Homo sapien
ctctgcctgtggccttccggccggt

SEQ ID NO: 5597481 - DNA, 25 bp, Homo sapien
taggcgatagagatccaactgttga

SEQ ID NO: 5597482 - DNA, 25 bp, Homo sapien
gcgctcgtctgcctggactgttgcg

SEQ ID NO: 5597483 - DNA, 25 bp, Homo sapien
gatattactgcaaacaaatcttgtc

SEQ ID NO: 5597484 - DNA, 25 bp, Homo sapien
ccattgcctatgtatgtgtctactc

SEQ ID NO: 5597485 - DNA, 25 bp, Homo sapien
ggggaagcacagtcagataaactga

SEQ ID NO: 5597486 - DNA, 25 bp, Homo sapien
taagacacacctaatcccacactcc

SEQ ID NO: 5597487 - DNA, 25 bp, Homo sapien
gtctagcacacttttctgggctatc

SEQ ID NO: 5597488 - DNA, 25 bp, Homo sapien
tgattctacaggggactacaccttt

SEQ ID NO: 5597489 - DNA, 25 bp, Homo sapien
agcggaacttcaggtgttgtctagc

SEQ ID NO: 5597490 - DNA, 25 bp, Homo sapien
tgggctatctgattctacaggggac

SEQ ID NO: 5597491 - DNA, 25 bp, Homo sapien
gggcaaaaagtgatcactgggtatc

SEQ ID NO: 5597492 - DNA, 25 bp, Homo sapien
ctgggtatcttttcagcggaacttc

SEQ ID NO: 5597493 - DNA, 25 bp, Homo sapien
cagctgtgcgtctgctaacaaattc

SEQ ID NO: 5597494 - DNA, 25 bp, Homo sapien
ggcctagactctaaaggcaggctcc

SEQ ID NO: 5597495 - DNA, 25 bp, Homo sapien
gtcacggagcaatccaagcctaact

SEQ ID NO: 5597496 - DNA, 25 bp, Homo sapien
gcttgtctgcagtcacccggcctag

SEQ ID NO: 5597497 - DNA, 25 bp, Homo sapien
tatgccatatggactctcggaactc

SEQ ID NO: 5597498 - DNA, 25 bp, Homo sapien
tcaatgccaccgtctccggtcgacc

SEQ ID NO: 5597499 - DNA, 25 bp, Homo sapien
actcaaagtttgaggaaggtgtttg

SEQ ID NO: 5597500 - DNA, 25 bp, Homo sapien
tgaaggaaatgaaccccttgcctga

SEQ ID NO: 5597501 - DNA, 25 bp, Homo sapien
ggaaatagaatgctcagaaggaaag

SEQ ID NO: 5597502 - DNA, 25 bp, Homo sapien
ctcgagcacgaaataccagtccctc

SEQ ID NO: 5597503 - DNA, 25 bp, Homo sapien
agtcacttgtcctgggtcacggagc

SEQ ID NO: 5597504 - DNA, 25 bp, Homo sapien
cggaactcagtgggactcaaagttt

SEQ ID NO: 5597505 - DNA, 25 bp, Homo sapien
tagaatcacaaacaggttcgttcac

SEQ ID NO: 5597506 - DNA, 25 bp, Homo sapien
ttttattgtaggatggtcccgtgcc

SEQ ID NO: 5597507 - DNA, 25 bp, Homo sapien
atccatcccttctccgtggggaact

SEQ ID NO: 5597508 - DNA, 25 bp, Homo sapien
tcccagtctttgcacagaggtcata

SEQ ID NO: 5597509 - DNA, 25 bp, Homo sapien
atggtcccgtgccctgtttagaatc

SEQ ID NO: 5597510 - DNA, 25 bp, Homo sapien
tccgtggggaactaatgtctctcaa

SEQ ID NO: 5597511 - DNA, 25 bp, Homo sapien
ttcgttcacagccattgggggtgac

SEQ ID NO: 5597512 - DNA, 25 bp, Homo sapien
caaacacagtgtacatatggttcac

SEQ ID NO: 5597513 - DNA, 25 bp, Homo sapien
ttccttagacccccgaagcacagac

SEQ ID NO: 5597514 - DNA, 25 bp, Homo sapien
cccgaagcacagactatccatccct

SEQ ID NO: 5597515 - DNA, 25 bp, Homo sapien
ttcactctacagaggagagttgcct

SEQ ID NO: 5597516 - DNA, 25 bp, Homo sapien
tccctgaaggttactgtcaccgggc

SEQ ID NO: 5597517 - DNA, 25 bp, Homo sapien
cagaggttgttggtcagtagtcctc

SEQ ID NO: 5597518 - DNA, 25 bp, Homo sapien
cctccatggtcttcagggctccctg

SEQ ID NO: 5597519 - DNA, 25 bp, Homo sapien
acatcttgctgcagctgtaaaggca

SEQ ID NO: 5597520 - DNA, 25 bp, Homo sapien
cgtcccccatccagaggggtgaagg

SEQ ID NO: 5597521 - DNA, 25 bp, Homo sapien
ctgcagctgtaaaggcagccatttt

SEQ ID NO: 5597522 - DNA, 25 bp, Homo sapien
gggcccacctgcccccagagagtgg

SEQ ID NO: 5597523 - DNA, 25 bp, Homo sapien
gtgcctagggaaccagtgtttccac

SEQ ID NO: 5597524 - DNA, 25 bp, Homo sapien
tggtcagtagtcctccatggtcttc

SEQ ID NO: 5597525 - DNA, 25 bp, Homo sapien
ttcatgctcccaaggcgggaagaca

SEQ ID NO: 5597526 - DNA, 25 bp, Homo sapien
ccctttgcctagtgattcgtccccc

SEQ ID NO: 5597527 - DNA, 25 bp, Homo sapien
cccagtcagccatatgtgtgtgcgg

SEQ ID NO: 5597528 - DNA, 25 bp, Homo sapien
tctcttttgagagcagtagtactgg

SEQ ID NO: 5597529 - DNA, 25 bp, Homo sapien
ggcataagggctcacttgtgacact

SEQ ID NO: 5597530 - DNA, 25 bp, Homo sapien
gcgccttgcccagtcagccatatgt

SEQ ID NO: 5597531 - DNA, 25 bp, Homo sapien
tgcctggagaagtcatttcccttct

SEQ ID NO: 5597532 - DNA, 25 bp, Homo sapien
tttacatgcgtcatctcacttaatc

SEQ ID NO: 5597533 - DNA, 25 bp, Homo sapien
agcagtagtactggcctagaaattt

SEQ ID NO: 5597534 - DNA, 25 bp, Homo sapien
acacagcatctttacatgcgtcatc

SEQ ID NO: 5597535 - DNA, 25 bp, Homo sapien
tgagtgtctcctttcattaagtgtc

SEQ ID NO: 5597536 - DNA, 25 bp, Homo sapien
taatctcttttgagagcagtagtac

SEQ ID NO: 5597537 - DNA, 25 bp, Homo sapien
tgcccagtcagccatatgtgtgtgc

SEQ ID NO: 5597538 - DNA, 25 bp, Homo sapien
ctgcagtaactatagggaaagcctg

SEQ ID NO: 5597539 - DNA, 25 bp, Homo sapien
gaccacagcattcatgaggaaatgt

SEQ ID NO: 5597540 - DNA, 25 bp, Homo sapien
ttgccatgaaagtttgagtgtatac

SEQ ID NO: 5597541 - DNA, 25 bp, Homo sapien
agggggttgtcctgcagtaactata

SEQ ID NO: 5597542 - DNA, 25 bp, Homo sapien
gaacatgaggcgctatagtttgtac

SEQ ID NO: 5597543 - DNA, 25 bp, Homo sapien
gggtctgttaagaacatgaggcgct

SEQ ID NO: 5597544 - DNA, 25 bp, Homo sapien
taaaatgctttatgagggggttgtc

SEQ ID NO: 5597545 - DNA, 25 bp, Homo sapien
tggcagaccagtaacagagcttgga

SEQ ID NO: 5597546 - DNA, 25 bp, Homo sapien
cttatggactagttggctttgcttt

SEQ ID NO: 5597547 - DNA, 25 bp, Homo sapien
cactgtaactggcatccgaagtggt

SEQ ID NO: 5597548 - DNA, 25 bp, Homo sapien
ttggaacttaactcctggcagacca

SEQ ID NO: 5597549 - DNA, 25 bp, Homo sapien
agcaccccttgcactgtggagggct

SEQ ID NO: 5597550 - DNA, 25 bp, Homo sapien
atgggttctagagccaaaatgcgat

SEQ ID NO: 5597551 - DNA, 25 bp, Homo sapien
gtggagggcttggtaataagccatg

SEQ ID NO: 5597552 - DNA, 25 bp, Homo sapien
aggagatctgttggtgacacaatgc

SEQ ID NO: 5597553 - DNA, 25 bp, Homo sapien
attgcagtgcttaagaccatgggtt

SEQ ID NO: 5597554 - DNA, 25 bp, Homo sapien
gctacatctagtgaatggcagaggc

SEQ ID NO: 5597555 - DNA, 25 bp, Homo sapien
aataagccatggtctaggagatctg

SEQ ID NO: 5597556 - DNA, 25 bp, Homo sapien
cagagggctaatggtaacatgctca

SEQ ID NO: 5597557 - DNA, 25 bp, Homo sapien
tgaggctcatgaagtccacacataa

SEQ ID NO: 5597558 - DNA, 25 bp, Homo sapien
ggtgacacaatgcaccagagccctc

SEQ ID NO: 5597559 - DNA, 25 bp, Homo sapien
aggcaggatttaaacccacccattc

SEQ ID NO: 5597560 - DNA, 25 bp, Homo sapien
gtggaggtgttattattgcctggcc

SEQ ID NO: 5597561 - DNA, 25 bp, Homo sapien
cccatggtttgaacctgaggggaca

SEQ ID NO: 5597562 - DNA, 25 bp, Homo sapien
ggcagagtgcatgtctcagacagag

SEQ ID NO: 5597563 - DNA, 25 bp, Homo sapien
agggtcagagtcagttaagtttgga

SEQ ID NO: 5597564 - DNA, 25 bp, Homo sapien
aagtttggaagaatcccagagcaat

SEQ ID NO: 5597565 - DNA, 25 bp, Homo sapien
cacaggagttgcaatgtcaaatgcc

SEQ ID NO: 5597566 - DNA, 25 bp, Homo sapien
gaccatgtgacacaaggtggtgaga

SEQ ID NO: 5597567 - DNA, 25 bp, Homo sapien
gaatgcatgtgttggcacaggagtt

SEQ ID NO: 5597568 - DNA, 25 bp, Homo sapien
tccatgactccaggaaagctgagct

SEQ ID NO: 5597569 - DNA, 25 bp, Homo sapien
ggccaggcacgtgttttggctcctc

SEQ ID NO: 5597570 - DNA, 25 bp, Homo sapien
gtggtagagatgaccatgtgacaca

SEQ ID NO: 5597571 - DNA, 25 bp, Homo sapien
gcctcaacagggtacagtaaggttc

SEQ ID NO: 5597572 - DNA, 25 bp, Homo sapien
cggaactggtggatagtgttgttca

SEQ ID NO: 5597573 - DNA, 25 bp, Homo sapien
ggcaggcttcaggattacaggccat

SEQ ID NO: 5597574 - DNA, 25 bp, Homo sapien
tccacctggtaggaagcattgtttc

SEQ ID NO: 5597575 - DNA, 25 bp, Homo sapien
gtggccactgacatgtttaagcctc

SEQ ID NO: 5597576 - DNA, 25 bp, Homo sapien
acgtctcggataagaatactgcatt

SEQ ID NO: 5597577 - DNA, 25 bp, Homo sapien
ccaagcctgcatgccaagtaccact

SEQ ID NO: 5597578 - DNA, 25 bp, Homo sapien
agccaccaacaggggacactttaaa

SEQ ID NO: 5597579 - DNA, 25 bp, Homo sapien
cagccctatggggctacggaactgg

SEQ ID NO: 5597580 - DNA, 25 bp, Homo sapien
tgatgcaatcttggcaggcttcagg

SEQ ID NO: 5597581 - DNA, 25 bp, Homo sapien
atcatgcacccagaaggttcctatc

SEQ ID NO: 5597582 - DNA, 25 bp, Homo sapien
tacaaaagtcatacacagcggtcac

SEQ ID NO: 5597583 - DNA, 25 bp, Homo sapien
acactgtactgagggccacaacagg

SEQ ID NO: 5597584 - DNA, 25 bp, Homo sapien
gtagaagctgtaatgagagaaaaca

SEQ ID NO: 5597585 - DNA, 25 bp, Homo sapien
aggaagagaccatccccacactgta

SEQ ID NO: 5597586 - DNA, 25 bp, Homo sapien
gaggaccagcccatctggcatcgac

SEQ ID NO: 5597587 - DNA, 25 bp, Homo sapien
gccctgtgaacaaaaggcaggatgg

SEQ ID NO: 5597588 - DNA, 25 bp, Homo sapien
gggaataatacaaaagaggaccagc

SEQ ID NO: 5597589 - DNA, 25 bp, Homo sapien
acggccagtgtgaaaataatgaggt

SEQ ID NO: 5597590 - DNA, 25 bp, Homo sapien
aggttaaacggataagtcgattcta

SEQ ID NO: 5597591 - DNA, 25 bp, Homo sapien
gagccaggaaaattctgggggaata

SEQ ID NO: 5597592 - DNA, 25 bp, Homo sapien
ataatttaagcagcacagccctcgc

SEQ ID NO: 5597593 - DNA, 25 bp, Homo sapien
cagttaggtttaaaataatgtcagt

SEQ ID NO: 5597594 - DNA, 25 bp, Homo sapien
agcccaagcttatttacacatatgc

SEQ ID NO: 5597595 - DNA, 25 bp, Homo sapien
tataggatataaataatgacaaaaa

SEQ ID NO: 5597596 - DNA, 25 bp, Homo sapien
ctcctggtaccatattttagtgtta

SEQ ID NO: 5597597 - DNA, 25 bp, Homo sapien
caccaactgatgaatgtaactgatc

SEQ ID NO: 5597598 - DNA, 25 bp, Homo sapien
acatacatatcaacagtgaataggc

SEQ ID NO: 5597599 - DNA, 25 bp, Homo sapien
aacagtgaataggcaaaatatatac

SEQ ID NO: 5597600 - DNA, 25 bp, Homo sapien
aatatatacaaggaactgttcagtt

SEQ ID NO: 5597601 - DNA, 25 bp, Homo sapien
tatgcttctgtttcagcaaagctcc

SEQ ID NO: 5597602 - DNA, 25 bp, Homo sapien
atttataactggaagcccaagctta

SEQ ID NO: 5597603 - DNA, 25 bp, Homo sapien
ttcaacactgaactaaaaccgtata

SEQ ID NO: 5597604 - DNA, 25 bp, Homo sapien
ggacaggaggagtcctctgaagata

SEQ ID NO: 5597605 - DNA, 25 bp, Homo sapien
tctgaagatagcagtgcatgagcag

SEQ ID NO: 5597606 - DNA, 25 bp, Homo sapien
caagaagcccatctgaccaccaggg

SEQ ID NO: 5597607 - DNA, 25 bp, Homo sapien
ctgagaggggccaatttcacccttc

SEQ ID NO: 5597608 - DNA, 25 bp, Homo sapien
ttccagggcccaattttcaagacaa

SEQ ID NO: 5597609 - DNA, 25 bp, Homo sapien
gccgcccagcagctgattccgagga

SEQ ID NO: 5597610 - DNA, 25 bp, Homo sapien
actcggaggaggttcttcctacaca

SEQ ID NO: 5597611 - DNA, 25 bp, Homo sapien
gaactccccagaccaggtattcttc

SEQ ID NO: 5597612 - DNA, 25 bp, Homo sapien
ttttcaagacaagccttcgcgggac

SEQ ID NO: 5597613 - DNA, 25 bp, Homo sapien
ccttccctagcaagactcggaggag

SEQ ID NO: 5597614 - DNA, 25 bp, Homo sapien
tcttccaggctcaggcataaagaac

SEQ ID NO: 5597615 - DNA, 25 bp, Homo sapien
tgtatgccagggatttgcctcgttg

SEQ ID NO: 5597616 - DNA, 25 bp, Homo sapien
tgcctcgttgaaaccaggtgtctgg

SEQ ID NO: 5597617 - DNA, 25 bp, Homo sapien
agggaatcaaaacttgaggggataa

SEQ ID NO: 5597618 - DNA, 25 bp, Homo sapien
gggcagtgatgctgaccttttgggc

SEQ ID NO: 5597619 - DNA, 25 bp, Homo sapien
gccagctcgagaaatacacacagtg

SEQ ID NO: 5597620 - DNA, 25 bp, Homo sapien
tgcatccaagatgagcataaactgc

SEQ ID NO: 5597621 - DNA, 25 bp, Homo sapien
aatactctttgcatggtgacaggcc

SEQ ID NO: 5597622 - DNA, 25 bp, Homo sapien
gaggggataatggaacatgctccca

SEQ ID NO: 5597623 - DNA, 25 bp, Homo sapien
tgaccatgatgaaaagcctagggaa

SEQ ID NO: 5597624 - DNA, 25 bp, Homo sapien
gagacaagctgggattgtatgccag

SEQ ID NO: 5597625 - DNA, 25 bp, Homo sapien
agtgcatggagtgtgacctcattta

SEQ ID NO: 5597626 - DNA, 25 bp, Homo sapien
ctttgagaaagccggcttaatcttc

SEQ ID NO: 5597627 - DNA, 25 bp, Homo sapien
ggaagagcctctacaaagcacaagt

SEQ ID NO: 5597628 - DNA, 25 bp, Homo sapien
actgtgaatgaaggctcattctggc

SEQ ID NO: 5597629 - DNA, 25 bp, Homo sapien
gtagtggcattcgtccagatactgt

SEQ ID NO: 5597630 - DNA, 25 bp, Homo sapien
ctcagacataagacagacagcctag

SEQ ID NO: 5597631 - DNA, 25 bp, Homo sapien
cattttacggatttctaaggccaaa

SEQ ID NO: 5597632 - DNA, 25 bp, Homo sapien
cattctggctggaacacaagcatca

SEQ ID NO: 5597633 - DNA, 25 bp, Homo sapien
acaacacaacataatgtagtggcat

SEQ ID NO: 5597634 - DNA, 25 bp, Homo sapien
tgaagctgatatctggaagagcctc

SEQ ID NO: 5597635 - DNA, 25 bp, Homo sapien
cacaagcatcacctgccagtcattc

SEQ ID NO: 5597636 - DNA, 25 bp, Homo sapien
tcaggtaatataagcttagaaatgc

SEQ ID NO: 5597637 - DNA, 25 bp, Homo sapien
tgtctacacaatgggacagattgag

SEQ ID NO: 5597638 - DNA, 25 bp, Homo sapien
tcagatggtcaaaatgaactggtgt

SEQ ID NO: 5597639 - DNA, 25 bp, Homo sapien
tactatcaaacagttcaggagaggg

SEQ ID NO: 5597640 - DNA, 25 bp, Homo sapien
ggcccgaggcatttcaaggtagcct

SEQ ID NO: 5597641 - DNA, 25 bp, Homo sapien
tatggttgtattgtggttatgcagg

SEQ ID NO: 5597642 - DNA, 25 bp, Homo sapien
atcgtgggtatatcagtttggcaac

SEQ ID NO: 5597643 - DNA, 25 bp, Homo sapien
gccttctgagtttgggcccgaggca

SEQ ID NO: 5597644 - DNA, 25 bp, Homo sapien
gggaggaaatacactgaagcatttg

SEQ ID NO: 5597645 - DNA, 25 bp, Homo sapien
tgcaggagaatgtccttgctgggag

SEQ ID NO: 5597646 - DNA, 25 bp, Homo sapien
ggaggctcagttgagtgcagagcct

SEQ ID NO: 5597647 - DNA, 25 bp, Homo sapien
tctgtaggtgtgagattgtttcaaa

SEQ ID NO: 5597648 - DNA, 25 bp, Homo sapien
gccttagcacgtagacatcacacac

SEQ ID NO: 5597649 - DNA, 25 bp, Homo sapien
gactcaggcccttggaactacttcc

SEQ ID NO: 5597650 - DNA, 25 bp, Homo sapien
caaaggtctagtagcctgaaaaaac

SEQ ID NO: 5597651 - DNA, 25 bp, Homo sapien
ccccatgcatggattcagctgtccc

SEQ ID NO: 5597652 - DNA, 25 bp, Homo sapien
cggcagatgggtacacccccttttc

SEQ ID NO: 5597653 - DNA, 25 bp, Homo sapien
cgcctctagactgaagagatgggag

SEQ ID NO: 5597654 - DNA, 25 bp, Homo sapien
gtgctcaaaagccagtgtggctggt

SEQ ID NO: 5597655 - DNA, 25 bp, Homo sapien
tcccacagacacattgactcaggcc

SEQ ID NO: 5597656 - DNA, 25 bp, Homo sapien
gaaggaatagctaaagcaaaggtct

SEQ ID NO: 5597657 - DNA, 25 bp, Homo sapien
tgaaaaaacttggagaaaagatggc

SEQ ID NO: 5597658 - DNA, 25 bp, Homo sapien
gatggcccctccatgaggccgagtg

SEQ ID NO: 5597659 - DNA, 25 bp, Homo sapien
aaatgcagcgagttcagcttgacct

SEQ ID NO: 5597660 - DNA, 25 bp, Homo sapien
gatggcatccaaggttacgcaagta

SEQ ID NO: 5597661 - DNA, 25 bp, Homo sapien
tcattggtttcagagttcgcaggtc

SEQ ID NO: 5597662 - DNA, 25 bp, Homo sapien
gttcaaccagcgacaaagacgataa

SEQ ID NO: 5597663 - DNA, 25 bp, Homo sapien
gaccttaaggaaactgtgacaacag

SEQ ID NO: 5597664 - DNA, 25 bp, Homo sapien
ttacggcctgtccaagatggcatcc

SEQ ID NO: 5597665 - DNA, 25 bp, Homo sapien
taactacacccacaggatggtcctc

SEQ ID NO: 5597666 - DNA, 25 bp, Homo sapien
aaatacaaacgtggagagataaatc

SEQ ID NO: 5597667 - DNA, 25 bp, Homo sapien
atggtcctcagaaagttacggcctg

SEQ ID NO: 5597668 - DNA, 25 bp, Homo sapien
ggtgagaaaatggctagcaacaatc

SEQ ID NO: 5597669 - DNA, 25 bp, Homo sapien
gcccagatgctgaaaaagaacctgc

SEQ ID NO: 5597670 - DNA, 25 bp, Homo sapien
gacagcagtgaatggcaatacccat

SEQ ID NO: 5597671 - DNA, 25 bp, Homo sapien
aagaaaagacacagaaagaaattca

SEQ ID NO: 5597672 - DNA, 25 bp, Homo sapien
tgtgtgccagtaaccctgaggcctt

SEQ ID NO: 5597673 - DNA, 25 bp, Homo sapien
caaggagatgggtgttcctcattcc

SEQ ID NO: 5597674 - DNA, 25 bp, Homo sapien
cttatgtaaactaaaggaacacgaa

SEQ ID NO: 5597675 - DNA, 25 bp, Homo sapien
cctgaggccttcagtgagtaatcct

SEQ ID NO: 5597676 - DNA, 25 bp, Homo sapien
cctgtgttccacagagcccagtctg

SEQ ID NO: 5597677 - DNA, 25 bp, Homo sapien
ggcagccagggatgtattattgcta

SEQ ID NO: 5597678 - DNA, 25 bp, Homo sapien
ccatctcccaggacacctgtgttcc

SEQ ID NO: 5597679 - DNA, 25 bp, Homo sapien
gagcccagtctggtaaacaacagtc

SEQ ID NO: 5597680 - DNA, 25 bp, Homo sapien
ctggattccacgacataggctttct

SEQ ID NO: 5597681 - DNA, 25 bp, Homo sapien
tcagaaggcttcacacaaaaatgca

SEQ ID NO: 5597682 - DNA, 25 bp, Homo sapien
cctgttcacacgtcttgcctggctc

SEQ ID NO: 5597683 - DNA, 25 bp, Homo sapien
atgctgcaaagacactgcccacctt

SEQ ID NO: 5597684 - DNA, 25 bp, Homo sapien
cctggaaactggataactgagcaac

SEQ ID NO: 5597685 - DNA, 25 bp, Homo sapien
gcaccccgcagatgaaacggggctg

SEQ ID NO: 5597686 - DNA, 25 bp, Homo sapien
cgcttagaacaggcctcgctcatgc

SEQ ID NO: 5597687 - DNA, 25 bp, Homo sapien
gtgttaagctctgaaaaactgagtg

SEQ ID NO: 5597688 - DNA, 25 bp, Homo sapien
agcaactccaggctgacatttctgc

SEQ ID NO: 5597689 - DNA, 25 bp, Homo sapien
agcctgcttcacctgttcacacgtc

SEQ ID NO: 5597690 - DNA, 25 bp, Homo sapien
aaaaatgcaaacatccagccagtcc

SEQ ID NO: 5597691 - DNA, 25 bp, Homo sapien
aaactgagtgcagataaagatgctg

SEQ ID NO: 5597692 - DNA, 25 bp, Homo sapien
tgcagctctgtccaggcctcctgtg

SEQ ID NO: 5597693 - DNA, 25 bp, Homo sapien
tcttggattctttgggtcggttctc

SEQ ID NO: 5597694 - DNA, 25 bp, Homo sapien
aagggataagcataggactgaccct

SEQ ID NO: 5597695 - DNA, 25 bp, Homo sapien
aagatgagctgtgccacttggcttc

SEQ ID NO: 5597696 - DNA, 25 bp, Homo sapien
cccacgatgaaggtattgccaatca

SEQ ID NO: 5597697 - DNA, 25 bp, Homo sapien
ccccacagtggttggcccacgatga

SEQ ID NO: 5597698 - DNA, 25 bp, Homo sapien
gcctcctgtgtgagcttccgttccc

SEQ ID NO: 5597699 - DNA, 25 bp, Homo sapien
ctgcttcatgagatttgggtgtggc

SEQ ID NO: 5597700 - DNA, 25 bp, Homo sapien
ttaaaataaaggggactgcttcatg

SEQ ID NO: 5597701 - DNA, 25 bp, Homo sapien
ttgccaatcagagtaccctgccctc

SEQ ID NO: 5597702 - DNA, 25 bp, Homo sapien
tgccctctgggcacagagattggtc

SEQ ID NO: 5597703 - DNA, 25 bp, Homo sapien
actggaaaagtcaacaacagttggc

SEQ ID NO: 5597704 - DNA, 25 bp, Homo sapien
aattaggctccaaaagctgtgaaag

SEQ ID NO: 5597705 - DNA, 25 bp, Homo sapien
agctgtgaaagcctgcctagtttgg

SEQ ID NO: 5597706 - DNA, 25 bp, Homo sapien
gaaatgtgaagactgaaccaagttt

SEQ ID NO: 5597707 - DNA, 25 bp, Homo sapien
ctgatgacaggtaaggtacctagaa

SEQ ID NO: 5597708 - DNA, 25 bp, Homo sapien
agtcctagcatcatacccctgccac

SEQ ID NO: 5597709 - DNA, 25 bp, Homo sapien
tagaaaaagacaaattgactccgta

SEQ ID NO: 5597710 - DNA, 25 bp, Homo sapien
tacctagaagaaattaaagcagtta

SEQ ID NO: 5597711 - DNA, 25 bp, Homo sapien
tttgtggtaaaaagatcctgatgac

SEQ ID NO: 5597712 - DNA, 25 bp, Homo sapien
cagttggctttgagataaagatatc

SEQ ID NO: 5597713 - DNA, 25 bp, Homo sapien
tacccctgccactggaaaagtcaac

SEQ ID NO: 5597714 - DNA, 25 bp, Homo sapien
gtaagcccaaatctctgagtagagc

SEQ ID NO: 5597715 - DNA, 25 bp, Homo sapien
gggcacagagaacttaagtacttta

SEQ ID NO: 5597716 - DNA, 25 bp, Homo sapien
atgacgatgcatttaatggagctat

SEQ ID NO: 5597717 - DNA, 25 bp, Homo sapien
ggccagttctcatgagttgctgccc

SEQ ID NO: 5597718 - DNA, 25 bp, Homo sapien
atggagctattagatctgtaagccc

SEQ ID NO: 5597719 - DNA, 25 bp, Homo sapien
tctgagtagagcagccagtatgaat

SEQ ID NO: 5597720 - DNA, 25 bp, Homo sapien
accgtagagtcttattggccagttc

SEQ ID NO: 5597721 - DNA, 25 bp, Homo sapien
cactgatgtcagattgtttgagtcc

SEQ ID NO: 5597722 - DNA, 25 bp, Homo sapien
tgcccaatagcaaacaaaataccaa

SEQ ID NO: 5597723 - DNA, 25 bp, Homo sapien
gacctgagtacagagagtgtccaaa

SEQ ID NO: 5597724 - DNA, 25 bp, Homo sapien
aataccaaagggtctcttggccagt

SEQ ID NO: 5597725 - DNA, 25 bp, Homo sapien
gaagaaaattaggccacccatccta

SEQ ID NO: 5597726 - DNA, 25 bp, Homo sapien
aaaatcacacgctctaggaccttgc

SEQ ID NO: 5597727 - DNA, 25 bp, Homo sapien
agcctcctcctgtttgccggtgggg

SEQ ID NO: 5597728 - DNA, 25 bp, Homo sapien
atacgagtccgcagataaatgatat

SEQ ID NO: 5597729 - DNA, 25 bp, Homo sapien
ttgtcaggttgtatgtgtatgggag

SEQ ID NO: 5597730 - DNA, 25 bp, Homo sapien
atcggagacaggcaagtttcttcat

SEQ ID NO: 5597731 - DNA, 25 bp, Homo sapien
ctcaggcactagctccaaaagttgt

SEQ ID NO: 5597732 - DNA, 25 bp, Homo sapien
cagcacctcctgggactcagaaatc

SEQ ID NO: 5597733 - DNA, 25 bp, Homo sapien
accttgcgcttcataatacgagtcc

SEQ ID NO: 5597734 - DNA, 25 bp, Homo sapien
ccatggagtgcggcccttttagttg

SEQ ID NO: 5597735 - DNA, 25 bp, Homo sapien
cagaaatccaaaatctcaggcacta

SEQ ID NO: 5597736 - DNA, 25 bp, Homo sapien
aaacttgagatcatagggaaactgg

SEQ ID NO: 5597737 - DNA, 25 bp, Homo sapien
ttgaggattagaggtttagaaaaca

SEQ ID NO: 5597738 - DNA, 25 bp, Homo sapien
ttcctttctaggccaggctccgcgg

SEQ ID NO: 5597739 - DNA, 25 bp, Homo sapien
tgtcagccagttacaatgtgctcca

SEQ ID NO: 5597740 - DNA, 25 bp, Homo sapien
tcctattctgaagctggtatcttac

SEQ ID NO: 5597741 - DNA, 25 bp, Homo sapien
cacttctaaatggcagttcactgaa

SEQ ID NO: 5597742 - DNA, 25 bp, Homo sapien
tcctgggccactgttgtcagccagt

SEQ ID NO: 5597743 - DNA, 25 bp, Homo sapien
catagggaaactggatattatactt

SEQ ID NO: 5597744 - DNA, 25 bp, Homo sapien
cactgccaaaagaaaggctactttc

SEQ ID NO: 5597745 - DNA, 25 bp, Homo sapien
aagttactgtggttttcctgggcca

SEQ ID NO: 5597746 - DNA, 25 bp, Homo sapien
ttgttttgaggattagaggtttaga

SEQ ID NO: 5597747 - DNA, 25 bp, Homo sapien
aataccactcatgagcacgtttcaa

SEQ ID NO: 5597748 - DNA, 25 bp, Homo sapien
ttgaaacgtgctcatgagtggtatt

SEQ ID NO: 5597749 - DNA, 25 bp, Homo sapien
ctgtgaacaagataaatcagactcc

SEQ ID NO: 5597750 - DNA, 25 bp, Homo sapien
cattcggttgcgcttttggattggg

SEQ ID NO: 5597751 - DNA, 25 bp, Homo sapien
agggaagaaaaatggtctccagtaa

SEQ ID NO: 5597752 - DNA, 25 bp, Homo sapien
tgccttgaccagatacgtttgcttt

SEQ ID NO: 5597753 - DNA, 25 bp, Homo sapien
tgaggcagtttagaccattcggttg

SEQ ID NO: 5597754 - DNA, 25 bp, Homo sapien
caggcaaccaatgaggcagtttaga

SEQ ID NO: 5597755 - DNA, 25 bp, Homo sapien
aggtgctgaggaatataactgtgaa

SEQ ID NO: 5597756 - DNA, 25 bp, Homo sapien
gaaagtcagagtcatatgaagcctc

SEQ ID NO: 5597757 - DNA, 25 bp, Homo sapien
gccatcactgcattgggccgaggtg

SEQ ID NO: 5597758 - DNA, 25 bp, Homo sapien
cactctcaagcaatatggcggcagg

SEQ ID NO: 5597759 - DNA, 25 bp, Homo sapien
agacaagcatgtcgacggttgagtt

SEQ ID NO: 5597760 - DNA, 25 bp, Homo sapien
tattccctagggactgcatcagtgc

SEQ ID NO: 5597761 - DNA, 25 bp, Homo sapien
ctggatgaactggaatcttgatgtc

SEQ ID NO: 5597762 - DNA, 25 bp, Homo sapien
atggtagtgtaacccaaggacagtt

SEQ ID NO: 5597763 - DNA, 25 bp, Homo sapien
gaacctgctgtcaacgaccctggtc

SEQ ID NO: 5597764 - DNA, 25 bp, Homo sapien
catgtcacaggtgatcagaagcacc

SEQ ID NO: 5597765 - DNA, 25 bp, Homo sapien
taatggctgaaactttatggagggg

SEQ ID NO: 5597766 - DNA, 25 bp, Homo sapien
aaatactgcctctggggcttgtccc

SEQ ID NO: 5597767 - DNA, 25 bp, Homo sapien
gccaggatgcttgctagtaaaaccc

SEQ ID NO: 5597768 - DNA, 25 bp, Homo sapien
gggcctgaggaaatcaaatactgcc

SEQ ID NO: 5597769 - DNA, 25 bp, Homo sapien
agaaggctgaaatagatggtgcctc

SEQ ID NO: 5597770 - DNA, 25 bp, Homo sapien
gtgcctcctgtcctagagtggggcc

SEQ ID NO: 5597771 - DNA, 25 bp, Homo sapien
aagtgttgagattccaggccaatgt

SEQ ID NO: 5597772 - DNA, 25 bp, Homo sapien
tccacaaagacactggtagggtaga

SEQ ID NO: 5597773 - DNA, 25 bp, Homo sapien
ttggagctagttactgtaaaagtag

SEQ ID NO: 5597774 - DNA, 25 bp, Homo sapien
tgaatcaactcaagtccacaaagac

SEQ ID NO: 5597775 - DNA, 25 bp, Homo sapien
caagcacagacggacttggacttgt

SEQ ID NO: 5597776 - DNA, 25 bp, Homo sapien
agggatgtataccaccgcacccagc

SEQ ID NO: 5597777 - DNA, 25 bp, Homo sapien
cagcttcccatgtaaataggactac

SEQ ID NO: 5597778 - DNA, 25 bp, Homo sapien
cagagttgcatatgaatagtgaatg

SEQ ID NO: 5597779 - DNA, 25 bp, Homo sapien
tggacttgtcctatacttggagcta

SEQ ID NO: 5597780 - DNA, 25 bp, Homo sapien
tacacggttagtttatcagagttgc

SEQ ID NO: 5597781 - DNA, 25 bp, Homo sapien
gtaaataggactacagggatgtata

SEQ ID NO: 5597782 - DNA, 25 bp, Homo sapien
actgccaaaaagatacactgtaaac

SEQ ID NO: 5597783 - DNA, 25 bp, Homo sapien
tccaatggagtcttgccaaaggtct

SEQ ID NO: 5597784 - DNA, 25 bp, Homo sapien
tgcacgtggccaaagcttactgatt

SEQ ID NO: 5597785 - DNA, 25 bp, Homo sapien
gggatctacagtcacttagcagggt

SEQ ID NO: 5597786 - DNA, 25 bp, Homo sapien
tttgactcaggtcagctcacagtgg

SEQ ID NO: 5597787 - DNA, 25 bp, Homo sapien
accagtgcaggactggtgaatagag

SEQ ID NO: 5597788 - DNA, 25 bp, Homo sapien
agcagggtaactatgcaacagagaa

SEQ ID NO: 5597789 - DNA, 25 bp, Homo sapien
tgtgatccaccaggctaggtgataa

SEQ ID NO: 5597790 - DNA, 25 bp, Homo sapien
catcaaatagagccatccacttccc

SEQ ID NO: 5597791 - DNA, 25 bp, Homo sapien
atgtacccaggcttctcaaggatac

SEQ ID NO: 5597792 - DNA, 25 bp, Homo sapien
gggaccccaaacgccactgtgatcc

SEQ ID NO: 5597793 - DNA, 25 bp, Homo sapien
gtagggcattgtaatagaagacgta

SEQ ID NO: 5597794 - DNA, 25 bp, Homo sapien
aatagaagacgtaatgatcgcaaaa

SEQ ID NO: 5597795 - DNA, 25 bp, Homo sapien
caagccaaagcatttaggcatggtt

SEQ ID NO: 5597796 - DNA, 25 bp, Homo sapien
aaatgtagttcaaagtacgttccta

SEQ ID NO: 5597797 - DNA, 25 bp, Homo sapien
gatcgcaaaatgggaaatgtagttc

SEQ ID NO: 5597798 - DNA, 25 bp, Homo sapien
ggcagatggaagaaataagtgccag

SEQ ID NO: 5597799 - DNA, 25 bp, Homo sapien
cctgaaaatacagagaaagacagtt

SEQ ID NO: 5597800 - DNA, 25 bp, Homo sapien
gcatggttaaggtacggaaaattca

SEQ ID NO: 5597801 - DNA, 25 bp, Homo sapien
ctgccaaaattgaacaagccaaagc

SEQ ID NO: 5597802 - DNA, 25 bp, Homo sapien
taagtgccagccctaccacctgcct

SEQ ID NO: 5597803 - DNA, 25 bp, Homo sapien
ccttgtggttgggaacttacttctc

SEQ ID NO: 5597804 - DNA, 25 bp, Homo sapien
tggtaaagacaggcacaacaaatat

SEQ ID NO: 5597805 - DNA, 25 bp, Homo sapien
ctaggtaagtagcaaccaaataaac

SEQ ID NO: 5597806 - DNA, 25 bp, Homo sapien
actcatggctattaagagggcttag

SEQ ID NO: 5597807 - DNA, 25 bp, Homo sapien
cattacaatgtgctaggtaagtagc

SEQ ID NO: 5597808 - DNA, 25 bp, Homo sapien
taccaatgtagtgaagtgcatgttt

SEQ ID NO: 5597809 - DNA, 25 bp, Homo sapien
ctagacatgtggtggtcacaagagg

SEQ ID NO: 5597810 - DNA, 25 bp, Homo sapien
taagttacatggtaaagacaggcac

SEQ ID NO: 5597811 - DNA, 25 bp, Homo sapien
agggcttagcctagtatagtcaacc

SEQ ID NO: 5597812 - DNA, 25 bp, Homo sapien
gtatagtcaaccagaaaggacaagg

SEQ ID NO: 5597813 - DNA, 25 bp, Homo sapien
cagaaaggacaaggtaattataaag

SEQ ID NO: 5597814 - DNA, 25 bp, Homo sapien
tctggccttgcaaacattaagttac

SEQ ID NO: 5597815 - DNA, 25 bp, Homo sapien
gtcaaaaggcagacgcatttgtcac

SEQ ID NO: 5597816 - DNA, 25 bp, Homo sapien
gggctgtctcccaggccatgctacc

SEQ ID NO: 5597817 - DNA, 25 bp, Homo sapien
agttctgcaaactggaagtccaaga

SEQ ID NO: 5597818 - DNA, 25 bp, Homo sapien
acttgcaagcatctgtaggacgcac

SEQ ID NO: 5597819 - DNA, 25 bp, Homo sapien
ggctcatcggagtggcttcatcaga

SEQ ID NO: 5597820 - DNA, 25 bp, Homo sapien
atgggggtttgccaacaaccctgcc

SEQ ID NO: 5597821 - DNA, 25 bp, Homo sapien
gggctgcagacctgccaccaatcct

SEQ ID NO: 5597822 - DNA, 25 bp, Homo sapien
acagtgtgaagacaatgtgcctcac

SEQ ID NO: 5597823 - DNA, 25 bp, Homo sapien
cgcactctcaggggtagaattctgg

SEQ ID NO: 5597824 - DNA, 25 bp, Homo sapien
gccatgctaccacaaacacccctgc

SEQ ID NO: 5597825 - DNA, 25 bp, Homo sapien
gggttggtgtctgataagccccagg

SEQ ID NO: 5597826 - DNA, 25 bp, Homo sapien
aactgggaaaggacattacattcac

SEQ ID NO: 5597827 - DNA, 25 bp, Homo sapien
gggagcagacagaaccctttgtgcc

SEQ ID NO: 5597828 - DNA, 25 bp, Homo sapien
gagtgaaggcctactatgctgacaa

SEQ ID NO: 5597829 - DNA, 25 bp, Homo sapien
gattttactcagagtgaaggcctac

SEQ ID NO: 5597830 - DNA, 25 bp, Homo sapien
gacacagaattgggtcttctttaac

SEQ ID NO: 5597831 - DNA, 25 bp, Homo sapien
cagcctcacccccccgttcatcctc

SEQ ID NO: 5597832 - DNA, 25 bp, Homo sapien
tcatcagacatcagaaggagacttg

SEQ ID NO: 5597833 - DNA, 25 bp, Homo sapien
ccaatggcagattctcagcctcacc

SEQ ID NO: 5597834 - DNA, 25 bp, Homo sapien
tctaggttttgaggagacacagaat

SEQ ID NO: 5597835 - DNA, 25 bp, Homo sapien
agtaaataaggtcatgacagatttt

SEQ ID NO: 5597836 - DNA, 25 bp, Homo sapien
tataagatttggttgtggaaaggag

SEQ ID NO: 5597837 - DNA, 25 bp, Homo sapien
cctggatgctgagaggtactctcta

SEQ ID NO: 5597838 - DNA, 25 bp, Homo sapien
caggaccaagcactgcccacttatc

SEQ ID NO: 5597839 - DNA, 25 bp, Homo sapien
cacactatgctaccaattcacctgc

SEQ ID NO: 5597840 - DNA, 25 bp, Homo sapien
tgcccacagtattaccccaagtctc

SEQ ID NO: 5597841 - DNA, 25 bp, Homo sapien
agctctagggtcatagaaccaactc

SEQ ID NO: 5597842 - DNA, 25 bp, Homo sapien
ggcagaaacaggaccaagcactgcc

SEQ ID NO: 5597843 - DNA, 25 bp, Homo sapien
gtttgaaggacacaaagagctctag

SEQ ID NO: 5597844 - DNA, 25 bp, Homo sapien
tgacacagatatcaggatccaaccc

SEQ ID NO: 5597845 - DNA, 25 bp, Homo sapien
tcaggatccaacccatgcccacagt

SEQ ID NO: 5597846 - DNA, 25 bp, Homo sapien
aggtactctctaggaggcagaaaca

SEQ ID NO: 5597847 - DNA, 25 bp, Homo sapien
aagagttactaaagcatccctggat

SEQ ID NO: 5597848 - DNA, 25 bp, Homo sapien
agaagattggaacccgtgttattta

SEQ ID NO: 5597849 - DNA, 25 bp, Homo sapien
ctatagttaaaacaggcagagttga

SEQ ID NO: 5597850 - DNA, 25 bp, Homo sapien
atgcctaagatgtcctccaccgcta

SEQ ID NO: 5597851 - DNA, 25 bp, Homo sapien
agtcacaggaagagcttattcattt

SEQ ID NO: 5597852 - DNA, 25 bp, Homo sapien
tgacctacacaggaagttagagaaa

SEQ ID NO: 5597853 - DNA, 25 bp, Homo sapien
catttaggacttacacagctctttc

SEQ ID NO: 5597854 - DNA, 25 bp, Homo sapien
atgaaaatttaaagaagattggaac

SEQ ID NO: 5597855 - DNA, 25 bp, Homo sapien
tcacacaccctcacctgagaccccc

SEQ ID NO: 5597856 - DNA, 25 bp, Homo sapien
cagggtgatacaactggtaagaacc

SEQ ID NO: 5597857 - DNA, 25 bp, Homo sapien
aggatgaacctacaatgaaatatga

SEQ ID NO: 5597858 - DNA, 25 bp, Homo sapien
atttaatataggacaaatgggggtg

SEQ ID NO: 5597859 - DNA, 25 bp, Homo sapien
gaagtctaaggggtctgtgctttct

SEQ ID NO: 5597860 - DNA, 25 bp, Homo sapien
caaggcccctgtgagcttctcaacc

SEQ ID NO: 5597861 - DNA, 25 bp, Homo sapien
tagtctcacgtattctccttgggga

SEQ ID NO: 5597862 - DNA, 25 bp, Homo sapien
taccttggctcaagagtatgggagt

SEQ ID NO: 5597863 - DNA, 25 bp, Homo sapien
agagctgtgctctgatagcctggga

SEQ ID NO: 5597864 - DNA, 25 bp, Homo sapien
gctgtgccagttgctatacgatgcc

SEQ ID NO: 5597865 - DNA, 25 bp, Homo sapien
tctcccagtctcacagagctgtgcc

SEQ ID NO: 5597866 - DNA, 25 bp, Homo sapien
gcctgggacacgaaatgcatatttc

SEQ ID NO: 5597867 - DNA, 25 bp, Homo sapien
gttcattcagtagggtcacatcttg

SEQ ID NO: 5597868 - DNA, 25 bp, Homo sapien
caaggttgtgcaatatctcccagtc

SEQ ID NO: 5597869 - DNA, 25 bp, Homo sapien
gggggccaccataaacctccacaca

SEQ ID NO: 5597870 - DNA, 25 bp, Homo sapien
gctaccacagccccacgttcctggc

SEQ ID NO: 5597871 - DNA, 25 bp, Homo sapien
gccgcccgcctcttccgagggcgcc

SEQ ID NO: 5597872 - DNA, 25 bp, Homo sapien
agccccacgttcctggcaagggcgc

SEQ ID NO: 5597873 - DNA, 25 bp, Homo sapien
caggtgttgctgctaccacagcccc

SEQ ID NO: 5597874 - DNA, 25 bp, Homo sapien
gcggctcctgctgccgcccgcctct

SEQ ID NO: 5597875 - DNA, 25 bp, Homo sapien
cgactacttccgagggaacgagaag

SEQ ID NO: 5597876 - DNA, 25 bp, Homo sapien
ctcgactacttccgagggaacgaga

SEQ ID NO: 5597877 - DNA, 25 bp, Homo sapien
ccggccctcgactacttccgaggga

SEQ ID NO: 5597878 - DNA, 25 bp, Homo sapien
tggagcaggtgttgctgctaccaca

SEQ ID NO: 5597879 - DNA, 25 bp, Homo sapien
agcaggtgttgctgctaccacagcc

SEQ ID NO: 5597880 - DNA, 25 bp, Homo sapien
ccacagccccacgttcctggcaagg

SEQ ID NO: 5597881 - DNA, 25 bp, Homo sapien
gtttgattccatggtggtgagagaa

SEQ ID NO: 5597882 - DNA, 25 bp, Homo sapien
atggtggtgagagaacatactctat

SEQ ID NO: 5597883 - DNA, 25 bp, Homo sapien
cttctccagtataagcatgtagtac

SEQ ID NO: 5597884 - DNA, 25 bp, Homo sapien
ttcaagtgtccagagattttcctat

SEQ ID NO: 5597885 - DNA, 25 bp, Homo sapien
aggggagattattcatatcataaac

SEQ ID NO: 5597886 - DNA, 25 bp, Homo sapien
tccttggaaagtcttcatgcatccc

SEQ ID NO: 5597887 - DNA, 25 bp, Homo sapien
tcttagtggttcagactatggtctg

SEQ ID NO: 5597888 - DNA, 25 bp, Homo sapien
taacaaatgtgactatggaaaacca

SEQ ID NO: 5597889 - DNA, 25 bp, Homo sapien
taagcatgtagtactgtaagtttcc

SEQ ID NO: 5597890 - DNA, 25 bp, Homo sapien
tgtggatagaatgttccttgtctgc

SEQ ID NO: 5597891 - DNA, 25 bp, Homo sapien
aactggactctttaacaaatgtgac

SEQ ID NO: 5597892 - DNA, 25 bp, Homo sapien
gcacaaagagttatgctggtccccc

SEQ ID NO: 5597893 - DNA, 25 bp, Homo sapien
ttcatgtgggaacatgctacagagg

SEQ ID NO: 5597894 - DNA, 25 bp, Homo sapien
ctatgggaagcttgaagcccagaga

SEQ ID NO: 5597895 - DNA, 25 bp, Homo sapien
agagccaggattgcaagtaaactcc

SEQ ID NO: 5597896 - DNA, 25 bp, Homo sapien
ggggtcagcacatggctctgctgcc

SEQ ID NO: 5597897 - DNA, 25 bp, Homo sapien
cctgctaagttagtgccagagccag

SEQ ID NO: 5597898 - DNA, 25 bp, Homo sapien
ggggcctgcctgcagtgtcctgcta

SEQ ID NO: 5597899 - DNA, 25 bp, Homo sapien
gcaagtaaactcccctcgcagagcc

SEQ ID NO: 5597900 - DNA, 25 bp, Homo sapien
taagcatgaaatatgtgccaggtac

SEQ ID NO: 5597901 - DNA, 25 bp, Homo sapien
gagagcagcccccacattctgtgag

SEQ ID NO: 5597902 - DNA, 25 bp, Homo sapien
ctaagaacattaggagctatcacct

SEQ ID NO: 5597903 - DNA, 25 bp, Homo sapien
caggagtgcacacatgtcacatgag

SEQ ID NO: 5597904 - DNA, 25 bp, Homo sapien
cgcgtctcagtgtcgagcctgcttt

SEQ ID NO: 5597905 - DNA, 25 bp, Homo sapien
tcaacaccttgcatgccacggcctt

SEQ ID NO: 5597906 - DNA, 25 bp, Homo sapien
cacggccttaggcttggtcaagatg

SEQ ID NO: 5597907 - DNA, 25 bp, Homo sapien
ggagcgagagagattccgatttatc

SEQ ID NO: 5597908 - DNA, 25 bp, Homo sapien
atttatcgactggaaggaatcatgc

SEQ ID NO: 5597909 - DNA, 25 bp, Homo sapien
aattcttgtccctgggggcgctttc

SEQ ID NO: 5597910 - DNA, 25 bp, Homo sapien
tggaaggaatcatgctgcaaaccac

SEQ ID NO: 5597911 - DNA, 25 bp, Homo sapien
gcaatccttctagggctggaaccgc

SEQ ID NO: 5597912 - DNA, 25 bp, Homo sapien
aattaaaacggtccaggagtgcaca

SEQ ID NO: 5597913 - DNA, 25 bp, Homo sapien
gtcacatgaggagactcgaagtttg

SEQ ID NO: 5597914 - DNA, 25 bp, Homo sapien
gggagaagagttgagtcctccaagt

SEQ ID NO: 5597915 - DNA, 25 bp, Homo sapien
gagtcctccaagtttgtggttctcc

SEQ ID NO: 5597916 - DNA, 25 bp, Homo sapien
tctaaatagcacatactttgaaacc

SEQ ID NO: 5597917 - DNA, 25 bp, Homo sapien
cacaattcctagtttaaaggcacct

SEQ ID NO: 5597918 - DNA, 25 bp, Homo sapien
gatttgaggtatatctgacctatac

SEQ ID NO: 5597919 - DNA, 25 bp, Homo sapien
tatcccctccctgaaaagcaatgca

SEQ ID NO: 5597920 - DNA, 25 bp, Homo sapien
ccctgaaaagcaatgcaattggagg

SEQ ID NO: 5597921 - DNA, 25 bp, Homo sapien
attttgtgatgtgaggatattttac

SEQ ID NO: 5597922 - DNA, 25 bp, Homo sapien
tttttggtcaatctggcaaattcca

SEQ ID NO: 5597923 - DNA, 25 bp, Homo sapien
attgccaaagaatcgctcttcgttc

SEQ ID NO: 5597924 - DNA, 25 bp, Homo sapien
gtgaaggtggtatttccctccattg

SEQ ID NO: 5597925 - DNA, 25 bp, Homo sapien
ttcaccatcatcatcttaggagcct

SEQ ID NO: 5597926 - DNA, 25 bp, Homo sapien
aggctcctaagatgatgatggtgaa

SEQ ID NO: 5597927 - DNA, 25 bp, Homo sapien
acgctgtgatcattgccatcgcttc

SEQ ID NO: 5597928 - DNA, 25 bp, Homo sapien
ttcagtcatgtgatatatggcatcc

SEQ ID NO: 5597929 - DNA, 25 bp, Homo sapien
aggcatttaggggcacattcagtca

SEQ ID NO: 5597930 - DNA, 25 bp, Homo sapien
aataactagtgggtagagttgagtg

SEQ ID NO: 5597931 - DNA, 25 bp, Homo sapien
agtgggtggtgtcagataattacta

SEQ ID NO: 5597932 - DNA, 25 bp, Homo sapien
ggaaatgaaggtacacaggcattta

SEQ ID NO: 5597933 - DNA, 25 bp, Homo sapien
tgaaagcacatcgtcttgcaagact

SEQ ID NO: 5597934 - DNA, 25 bp, Homo sapien
ccctaatcttgagatagagggagcc

SEQ ID NO: 5597935 - DNA, 25 bp, Homo sapien
aaggaagtgtgaggctatatctatc

SEQ ID NO: 5597936 - DNA, 25 bp, Homo sapien
agtcccggattctgtaaacgctgtg

SEQ ID NO: 5597937 - DNA, 25 bp, Homo sapien
tccacggctgctcaagatgaaaatg

SEQ ID NO: 5597938 - DNA, 25 bp, Homo sapien
gtcgcaataatgacgacgaggcgga

SEQ ID NO: 5597939 - DNA, 25 bp, Homo sapien
agttcacatgcatcgggcactgagc

SEQ ID NO: 5597940 - DNA, 25 bp, Homo sapien
gtttccccagatggctggtcgcaat

SEQ ID NO: 5597941 - DNA, 25 bp, Homo sapien
agtccggttgagtcctgctcagcca

SEQ ID NO: 5597942 - DNA, 25 bp, Homo sapien
tgggagaagcataacattttggggt

SEQ ID NO: 5597943 - DNA, 25 bp, Homo sapien
atttcagaagcctgcagtgaggatt

SEQ ID NO: 5597944 - DNA, 25 bp, Homo sapien
taagtgttgatatgaagagccattc

SEQ ID NO: 5597945 - DNA, 25 bp, Homo sapien
tccagatgtgcgaccttgattgaaa

SEQ ID NO: 5597946 - DNA, 25 bp, Homo sapien
agtagggccacatttcggtgagttg

SEQ ID NO: 5597947 - DNA, 25 bp, Homo sapien
atagtgagggtctcagtgacacttg

SEQ ID NO: 5597948 - DNA, 25 bp, Homo sapien
ccacgggcgagctacttcatttctc

SEQ ID NO: 5597949 - DNA, 25 bp, Homo sapien
acctgcaggcagaaagtcttcctac

SEQ ID NO: 5597950 - DNA, 25 bp, Homo sapien
ttttcccttagaggcaccagaatcc

SEQ ID NO: 5597951 - DNA, 25 bp, Homo sapien
ttcaggctccagaagctcttaaacc

SEQ ID NO: 5597952 - DNA, 25 bp, Homo sapien
caggagccgcctttccgattcccta

SEQ ID NO: 5597953 - DNA, 25 bp, Homo sapien
ttcacagccgtgaggaactcttcag

SEQ ID NO: 5597954 - DNA, 25 bp, Homo sapien
ggggcgattgcagcgattcccccac

SEQ ID NO: 5597955 - DNA, 25 bp, Homo sapien
atccaggtgttgagaagatatgtag

SEQ ID NO: 5597956 - DNA, 25 bp, Homo sapien
ggcagagtgccgactccttcacagc

SEQ ID NO: 5597957 - DNA, 25 bp, Homo sapien
agccaccttgccgggattgtacctg

SEQ ID NO: 5597958 - DNA, 25 bp, Homo sapien
tcagatctgtccaaagcgttgtgtc

SEQ ID NO: 5597959 - DNA, 25 bp, Homo sapien
cgattccctacgatgcgggtgctga

SEQ ID NO: 5597960 - DNA, 25 bp, Homo sapien
atgagaagaagtaatgtactctgtc

SEQ ID NO: 5597961 - DNA, 25 bp, Homo sapien
tatttacaaaaccagcagctgaccc

SEQ ID NO: 5597962 - DNA, 25 bp, Homo sapien
tttaggcttctgggccacatggtat

SEQ ID NO: 5597963 - DNA, 25 bp, Homo sapien
taaatggtaaattagttggatcaac

SEQ ID NO: 5597964 - DNA, 25 bp, Homo sapien
accagcagctgacccaacatagttt

SEQ ID NO: 5597965 - DNA, 25 bp, Homo sapien
gctcggcttaaaacattagtaaatc

SEQ ID NO: 5597966 - DNA, 25 bp, Homo sapien
aaatcatgtaaaagaataaatccct

SEQ ID NO: 5597967 - DNA, 25 bp, Homo sapien
ctgcagtgctaaaatggccatagac

SEQ ID NO: 5597968 - DNA, 25 bp, Homo sapien
gggccacatggtattgcaattcagc

SEQ ID NO: 5597969 - DNA, 25 bp, Homo sapien
gtttgccaacctctgttcgtctacc

SEQ ID NO: 5597970 - DNA, 25 bp, Homo sapien
atttgtaaatagatgagagtggctg

SEQ ID NO: 5597971 - DNA, 25 bp, Homo sapien
agattgtattgaacgcttaggggta

SEQ ID NO: 5597972 - DNA, 25 bp, Homo sapien
ttaacgagaaacgacaatcactgtt

SEQ ID NO: 5597973 - DNA, 25 bp, Homo sapien
tatattgattaaagtccagttacac

SEQ ID NO: 5597974 - DNA, 25 bp, Homo sapien
ctgacccttgacctgactcccagcc

SEQ ID NO: 5597975 - DNA, 25 bp, Homo sapien
acgtttaacgagaaacgacaatcac

SEQ ID NO: 5597976 - DNA, 25 bp, Homo sapien
cttgttggagactgtgtaagtaagt

SEQ ID NO: 5597977 - DNA, 25 bp, Homo sapien
cccggtagtctcctgtgccccttcc

SEQ ID NO: 5597978 - DNA, 25 bp, Homo sapien
cttttaatgcagacttgttggagac

SEQ ID NO: 5597979 - DNA, 25 bp, Homo sapien
atgcagacttgttggagactgtgta

SEQ ID NO: 5597980 - DNA, 25 bp, Homo sapien
tgtaagtaagtaaaagattgtattg

SEQ ID NO: 5597981 - DNA, 25 bp, Homo sapien
tattgaacgcttaggggtatgatct

SEQ ID NO: 5597982 - DNA, 25 bp, Homo sapien
tgggccactagaaacaataaaggtc

SEQ ID NO: 5597983 - DNA, 25 bp, Homo sapien
cctgcccaataagaacaatctcacc

SEQ ID NO: 5597984 - DNA, 25 bp, Homo sapien
tccaagtgtcctgggtgaagttatc

SEQ ID NO: 5597985 - DNA, 25 bp, Homo sapien
ttgttaacctctgcccctgacttac

SEQ ID NO: 5597986 - DNA, 25 bp, Homo sapien
tcatttagggctctcaggttgttat

SEQ ID NO: 5597987 - DNA, 25 bp, Homo sapien
tataatattactgaagagcaaattc

SEQ ID NO: 5597988 - DNA, 25 bp, Homo sapien
agggagaaatataaatccaagtgtc

SEQ ID NO: 5597989 - DNA, 25 bp, Homo sapien
aggtacttaggagaatcataagaat

SEQ ID NO: 5597990 - DNA, 25 bp, Homo sapien
cctgacttactttagtgggccacta

SEQ ID NO: 5597991 - DNA, 25 bp, Homo sapien
aatggaacactttatggaggtagtt

SEQ ID NO: 5597992 - DNA, 25 bp, Homo sapien
tcaaataaaaaggatgcataaatat

SEQ ID NO: 5597993 - DNA, 25 bp, Homo sapien
agtcggtatttctctcaaggacgtc

SEQ ID NO: 5597994 - DNA, 25 bp, Homo sapien
ggtcactttgagtcagcagtggccc

SEQ ID NO: 5597995 - DNA, 25 bp, Homo sapien
catttgtgaagagtttggtcagttc

SEQ ID NO: 5597996 - DNA, 25 bp, Homo sapien
caaggacgtcttagaatggattgac

SEQ ID NO: 5597997 - DNA, 25 bp, Homo sapien
aggaagattgtgttggaagaaattt

SEQ ID NO: 5597998 - DNA, 25 bp, Homo sapien
atttaagcgtggcccatccagtgct

SEQ ID NO: 5597999 - DNA, 25 bp, Homo sapien
gctccactgcgagcaggaagattgt

SEQ ID NO: 5598000 - DNA, 25 bp, Homo sapien
taatagcatggatgacaccaaacta

SEQ ID NO: 5598001 - DNA, 25 bp, Homo sapien
ctagacactagaagggcatttgtga

SEQ ID NO: 5598002 - DNA, 25 bp, Homo sapien
tagagtagagtatagtaagtcggta

SEQ ID NO: 5598003 - DNA, 25 bp, Homo sapien
cgaactaaaggttgtgggatatgga

SEQ ID NO: 5598004 - DNA, 25 bp, Homo sapien
gaaaagtatggattaactagaacta

SEQ ID NO: 5598005 - DNA, 25 bp, Homo sapien
ccttccagggttccaatgggtatta

SEQ ID NO: 5598006 - DNA, 25 bp, Homo sapien
ttgaggcggatattcagactttgac

SEQ ID NO: 5598007 - DNA, 25 bp, Homo sapien
gtcttggtaatttgctcagcctgtt

SEQ ID NO: 5598008 - DNA, 25 bp, Homo sapien
tgttccctggcaagaaagattcatt

SEQ ID NO: 5598009 - DNA, 25 bp, Homo sapien
tatgactcctccgatatcagcctac

SEQ ID NO: 5598010 - DNA, 25 bp, Homo sapien
tccaaaggattgaaagtatcatctg

SEQ ID NO: 5598011 - DNA, 25 bp, Homo sapien
aaaaccgacaaactcgacaggtgtc

SEQ ID NO: 5598012 - DNA, 25 bp, Homo sapien
tcccaagagcttagaatgtatactt

SEQ ID NO: 5598013 - DNA, 25 bp, Homo sapien
aactagaactatacaggactggatt

SEQ ID NO: 5598014 - DNA, 25 bp, Homo sapien
tcgacaggtgtcaagtagctgtgtg

SEQ ID NO: 5598015 - DNA, 25 bp, Homo sapien
gacacacaccgcagtgtgtgggaac

SEQ ID NO: 5598016 - DNA, 25 bp, Homo sapien
tgaaaagataatccaagaaggggga

SEQ ID NO: 5598017 - DNA, 25 bp, Homo sapien
gtgctaggtctccagtgggttttca

SEQ ID NO: 5598018 - DNA, 25 bp, Homo sapien
cgaactgaaagggacccttgaagac

SEQ ID NO: 5598019 - DNA, 25 bp, Homo sapien
ctggcaccttggactgcgaactgaa

SEQ ID NO: 5598020 - DNA, 25 bp, Homo sapien
ctgttctcaccacgggatgtacgga

SEQ ID NO: 5598021 - DNA, 25 bp, Homo sapien
tacggagagttgtgctaggtctcca

SEQ ID NO: 5598022 - DNA, 25 bp, Homo sapien
agacaggagttttcaggagatactt

SEQ ID NO: 5598023 - DNA, 25 bp, Homo sapien
tgtgtgggaacctcatcgagaatga

SEQ ID NO: 5598024 - DNA, 25 bp, Homo sapien
ctctaggcttacggagaaaaaatat

SEQ ID NO: 5598025 - DNA, 25 bp, Homo sapien
tgaagacaccaatccgaatacaacc

SEQ ID NO: 5598026 - DNA, 25 bp, Homo sapien
gcgctccgctgtacctggatcctgc

SEQ ID NO: 5598027 - DNA, 25 bp, Homo sapien
ttcccaaagcctcactagagagcga

SEQ ID NO: 5598028 - DNA, 25 bp, Homo sapien
cggcagggttcccaaagcctcacta

SEQ ID NO: 5598029 - DNA, 25 bp, Homo sapien
ctactccttccgactccggcagggt

SEQ ID NO: 5598030 - DNA, 25 bp, Homo sapien
ggatcctgctcctctgggttgaaac

SEQ ID NO: 5598031 - DNA, 25 bp, Homo sapien
ctccttccgactccggcagggttcc

SEQ ID NO: 5598032 - DNA, 25 bp, Homo sapien
tgctcctctgggttgaaacccgggc

SEQ ID NO: 5598033 - DNA, 25 bp, Homo sapien
ccggaagcgctccgctgtacctgga

SEQ ID NO: 5598034 - DNA, 25 bp, Homo sapien
aagcgctccgctgtacctggatcct

SEQ ID NO: 5598035 - DNA, 25 bp, Homo sapien
gtgtgaggaggcccttttctctctc

SEQ ID NO: 5598036 - DNA, 25 bp, Homo sapien
tccgtctactccttccgactccggc

SEQ ID NO: 5598037 - DNA, 25 bp, Homo sapien
gacgaaccaagtattagacttccac

SEQ ID NO: 5598038 - DNA, 25 bp, Homo sapien
gtggaagtctaatacttggttcgtc

SEQ ID NO: 5598039 - DNA, 25 bp, Homo sapien
gtcacattttgaggagcaagactcc

SEQ ID NO: 5598040 - DNA, 25 bp, Homo sapien
ggggatcttgctaaactggagagtt

SEQ ID NO: 5598041 - DNA, 25 bp, Homo sapien
gattgaataggtctgagttgaggtc

SEQ ID NO: 5598042 - DNA, 25 bp, Homo sapien
ttactagtccaggtgctttgagcag

SEQ ID NO: 5598043 - DNA, 25 bp, Homo sapien
ggagagttggattgaataggtctga

SEQ ID NO: 5598044 - DNA, 25 bp, Homo sapien
aaatcatcgtaggcctcagcttgtc

SEQ ID NO: 5598045 - DNA, 25 bp, Homo sapien
tccctgttggaccctggtctggcat

SEQ ID NO: 5598046 - DNA, 25 bp, Homo sapien
caagcccatttctgtgggcactgcc

SEQ ID NO: 5598047 - DNA, 25 bp, Homo sapien
attggtaccacgcttccagggatgc

SEQ ID NO: 5598048 - DNA, 25 bp, Homo sapien
ctctcaggcagatggtatcctcagc

SEQ ID NO: 5598049 - DNA, 25 bp, Homo sapien
tttgagcagttcttgtggtccatcc

SEQ ID NO: 5598050 - DNA, 25 bp, Homo sapien
cattgaatagtctgatgggaagggt

SEQ ID NO: 5598051 - DNA, 25 bp, Homo sapien
agccattagccagctgcaacgcatt

SEQ ID NO: 5598052 - DNA, 25 bp, Homo sapien
ttgtacatcaaagagagccccaaac

SEQ ID NO: 5598053 - DNA, 25 bp, Homo sapien
cagccagcaaaataagcctgagctt

SEQ ID NO: 5598054 - DNA, 25 bp, Homo sapien
cagctcgggcctgacattacctagc

SEQ ID NO: 5598055 - DNA, 25 bp, Homo sapien
agaaaaataccagcccctccacagc

SEQ ID NO: 5598056 - DNA, 25 bp, Homo sapien
ctccacagccgtttgcccaggagtc

SEQ ID NO: 5598057 - DNA, 25 bp, Homo sapien
aaacagtgtgatcaagtggaagtaa

SEQ ID NO: 5598058 - DNA, 25 bp, Homo sapien
aagggttcaatgcagggtttgcact

SEQ ID NO: 5598059 - DNA, 25 bp, Homo sapien
agcctgagcttggccttgatggatt

SEQ ID NO: 5598060 - DNA, 25 bp, Homo sapien
tctcatttgctgcaggcacagacca

SEQ ID NO: 5598061 - DNA, 25 bp, Homo sapien
ggcgtcgtgtcaacgtcatcaggac

SEQ ID NO: 5598062 - DNA, 25 bp, Homo sapien
gtcctgatgacgttgacacgacgcc

SEQ ID NO: 5598063 - DNA, 25 bp, Homo sapien
cataaagattaacaaggtggaagct

SEQ ID NO: 5598064 - DNA, 25 bp, Homo sapien
ttcacttttcagggctagatatttc

SEQ ID NO: 5598065 - DNA, 25 bp, Homo sapien
atggggattcgttacacaaacaggg

SEQ ID NO: 5598066 - DNA, 25 bp, Homo sapien
ggtggaagcttctactagcttcttc

SEQ ID NO: 5598067 - DNA, 25 bp, Homo sapien
tcagaaagcatgcttcatttcactt

SEQ ID NO: 5598068 - DNA, 25 bp, Homo sapien
acaatgtctgcctacagactactgt

SEQ ID NO: 5598069 - DNA, 25 bp, Homo sapien
cagactactgtaaatggggattcgt

SEQ ID NO: 5598070 - DNA, 25 bp, Homo sapien
tcagggctagatatttctgccggcc

SEQ ID NO: 5598071 - DNA, 25 bp, Homo sapien
ctcaacatctgcctgcaaactctcc

SEQ ID NO: 5598072 - DNA, 25 bp, Homo sapien
aagacaaatgacttgataactaaat

SEQ ID NO: 5598073 - DNA, 25 bp, Homo sapien
ttctgccggcctataggtgcatata

SEQ ID NO: 5598074 - DNA, 25 bp, Homo sapien
taagggactgttgatactttgcttt

SEQ ID NO: 5598075 - DNA, 25 bp, Homo sapien
ttggactagaaaagattcaaagcta

SEQ ID NO: 5598076 - DNA, 25 bp, Homo sapien
cttaaagaaaacctgcacaaagcaa

SEQ ID NO: 5598077 - DNA, 25 bp, Homo sapien
aggtcatagccagcccttagggcca

SEQ ID NO: 5598078 - DNA, 25 bp, Homo sapien
aagaattagcattatgagctgcacc

SEQ ID NO: 5598079 - DNA, 25 bp, Homo sapien
aaataaagatcaaagataaggattc

SEQ ID NO: 5598080 - DNA, 25 bp, Homo sapien
ttgatgttcaaagcttccctgccct

SEQ ID NO: 5598081 - DNA, 25 bp, Homo sapien
aaggattctcatttaagggactgtt

SEQ ID NO: 5598082 - DNA, 25 bp, Homo sapien
agctgcaccaggaccctaacaccta

SEQ ID NO: 5598083 - DNA, 25 bp, Homo sapien
tcaggatcaaacaatgaacaaagac

SEQ ID NO: 5598084 - DNA, 25 bp, Homo sapien
tgaacaaagacaatagtgactaggt

SEQ ID NO: 5598085 - DNA, 25 bp, Homo sapien
agacgcctgggtcctacctccaaag

SEQ ID NO: 5598086 - DNA, 25 bp, Homo sapien
ggctctgacacttcccaggtgtgcc

SEQ ID NO: 5598087 - DNA, 25 bp, Homo sapien
cctccagctcacgcctgtcaggctc

SEQ ID NO: 5598088 - DNA, 25 bp, Homo sapien
acagctttccaggatggtcaggtgg

SEQ ID NO: 5598089 - DNA, 25 bp, Homo sapien
aaagagtttgattggattgttgtgg

SEQ ID NO: 5598090 - DNA, 25 bp, Homo sapien
aggaggatttctctgcctgctttac

SEQ ID NO: 5598091 - DNA, 25 bp, Homo sapien
taaatcccactcatacacctggcct

SEQ ID NO: 5598092 - DNA, 25 bp, Homo sapien
cattcaagcagttgcaaggtagtcc

SEQ ID NO: 5598093 - DNA, 25 bp, Homo sapien
tgggactttgacagctttccaggat

SEQ ID NO: 5598094 - DNA, 25 bp, Homo sapien
ggtgagagcactctcctgccaggcc

SEQ ID NO: 5598095 - DNA, 25 bp, Homo sapien
aggtgtgcctctcacgccctcctcc

SEQ ID NO: 5598096 - DNA, 25 bp, Homo sapien
agaagctggtctcatggcaacactt

SEQ ID NO: 5598097 - DNA, 25 bp, Homo sapien
gcaagcaacttgcaggagtcatctc

SEQ ID NO: 5598098 - DNA, 25 bp, Homo sapien
cagtgccctgggaattagttccaaa

SEQ ID NO: 5598099 - DNA, 25 bp, Homo sapien
aattgagaccaatttcagtgccctg

SEQ ID NO: 5598100 - DNA, 25 bp, Homo sapien
tgcaggagtcatctcgtgtagcact

SEQ ID NO: 5598101 - DNA, 25 bp, Homo sapien
ctggctgaaagcaattcacatgaac

SEQ ID NO: 5598102 - DNA, 25 bp, Homo sapien
gaagtggttcttcaggacaaacaaa

SEQ ID NO: 5598103 - DNA, 25 bp, Homo sapien
accagaacattgagcttggataccc

SEQ ID NO: 5598104 - DNA, 25 bp, Homo sapien
caggactgcactgggtcaccttaca

SEQ ID NO: 5598105 - DNA, 25 bp, Homo sapien
tgtagcactgtaacaccctctgaca

SEQ ID NO: 5598106 - DNA, 25 bp, Homo sapien
cagctgcacctcagggctacttgcc

SEQ ID NO: 5598107 - DNA, 25 bp, Homo sapien
atgggaactctatgccctgacagtt

SEQ ID NO: 5598108 - DNA, 25 bp, Homo sapien
ttttcgtaaggatgtaactattgtc

SEQ ID NO: 5598109 - DNA, 25 bp, Homo sapien
ctgggccggtattgatcattctttc

SEQ ID NO: 5598110 - DNA, 25 bp, Homo sapien
tatcaagtttactctgggccggtat

SEQ ID NO: 5598111 - DNA, 25 bp, Homo sapien
cctcaccttgacttcgggcgttttg

SEQ ID NO: 5598112 - DNA, 25 bp, Homo sapien
ttcgtgaaacgaattagatacttaa

SEQ ID NO: 5598113 - DNA, 25 bp, Homo sapien
gaactcgccggaatcgtcaagagtc

SEQ ID NO: 5598114 - DNA, 25 bp, Homo sapien
tttcacatagcatggcggcatgtcc

SEQ ID NO: 5598115 - DNA, 25 bp, Homo sapien
gtggggacccaactgctttcttgcc

SEQ ID NO: 5598116 - DNA, 25 bp, Homo sapien
ctattgtccaaccagaagagagagg

SEQ ID NO: 5598117 - DNA, 25 bp, Homo sapien
tcaagagtcgttgtgtgaccctcac

SEQ ID NO: 5598118 - DNA, 25 bp, Homo sapien
aagcaggccaacccttacctagatt

SEQ ID NO: 5598119 - DNA, 25 bp, Homo sapien
tgtgcagcttctgggcatgaacagg

SEQ ID NO: 5598120 - DNA, 25 bp, Homo sapien
gtttcactaaacaacaaggggctgc

SEQ ID NO: 5598121 - DNA, 25 bp, Homo sapien
tggtgcagtgactcttttggaagtc

SEQ ID NO: 5598122 - DNA, 25 bp, Homo sapien
gtcaagcagacaaatggtgcagtga

SEQ ID NO: 5598123 - DNA, 25 bp, Homo sapien
cctgtcttgggagttcttggctgtg

SEQ ID NO: 5598124 - DNA, 25 bp, Homo sapien
ctttgtgaaagctgaaacccttgtc

SEQ ID NO: 5598125 - DNA, 25 bp, Homo sapien
cacaggcctcccatcaaaaaggttg

SEQ ID NO: 5598126 - DNA, 25 bp, Homo sapien
attgaaactggggtcctttctattc

SEQ ID NO: 5598127 - DNA, 25 bp, Homo sapien
gcatgctgcctaaccacacatcccc

SEQ ID NO: 5598128 - DNA, 25 bp, Homo sapien
caatttaaatggggacaccaagtta

SEQ ID NO: 5598129 - DNA, 25 bp, Homo sapien
agcgtgctttccgccaggggtctta

SEQ ID NO: 5598130 - DNA, 25 bp, Homo sapien
ttgggctgtctcagaggcttcttgc

SEQ ID NO: 5598131 - DNA, 25 bp, Homo sapien
gaaaatgtaagctgcagactgggaa

SEQ ID NO: 5598132 - DNA, 25 bp, Homo sapien
acgctcactctagctgaagatggca

SEQ ID NO: 5598133 - DNA, 25 bp, Homo sapien
tccagggcaacgctcactctagctg

SEQ ID NO: 5598134 - DNA, 25 bp, Homo sapien
gccaggggtcttagttccagctgtg

SEQ ID NO: 5598135 - DNA, 25 bp, Homo sapien
tgtgctttcggccccttgaggttct

SEQ ID NO: 5598136 - DNA, 25 bp, Homo sapien
ttaaaatgggtgctgctaaaatcat

SEQ ID NO: 5598137 - DNA, 25 bp, Homo sapien
ggacagaagacacttttgagagggt

SEQ ID NO: 5598138 - DNA, 25 bp, Homo sapien
cacttttgagagggtgaaaatgtaa

SEQ ID NO: 5598139 - DNA, 25 bp, Homo sapien
ctccctgcggcctgtgctttcggcc

SEQ ID NO: 5598140 - DNA, 25 bp, Homo sapien
tgtttccttgatgaggaagctgggg

SEQ ID NO: 5598141 - DNA, 25 bp, Homo sapien
ctgcctcgagacacaacaacaagtt

SEQ ID NO: 5598142 - DNA, 25 bp, Homo sapien
cttacaaaaccgtgcggtccctgat

SEQ ID NO: 5598143 - DNA, 25 bp, Homo sapien
aacaacaagttgtttgtcccacatc

SEQ ID NO: 5598144 - DNA, 25 bp, Homo sapien
gtgcggtccctgataagtggatatt

SEQ ID NO: 5598145 - DNA, 25 bp, Homo sapien
tcctggcctaaagcaatccttttgc

SEQ ID NO: 5598146 - DNA, 25 bp, Homo sapien
gtcccacatcatgctggggtggctg

SEQ ID NO: 5598147 - DNA, 25 bp, Homo sapien
tttgcctcgacctcacaaaatgctg

SEQ ID NO: 5598148 - DNA, 25 bp, Homo sapien
tgtgcccggcccaaaaggcattctt

SEQ ID NO: 5598149 - DNA, 25 bp, Homo sapien
gaagtgagaatctctgcctcgagac

SEQ ID NO: 5598150 - DNA, 25 bp, Homo sapien
ccaactgttagcagggttgggaagt

SEQ ID NO: 5598151 - DNA, 25 bp, Homo sapien
agatcttaagtgtggtagtaaattc

SEQ ID NO: 5598152 - DNA, 25 bp, Homo sapien
cactgttgcagtatcctcaaggtcc

SEQ ID NO: 5598153 - DNA, 25 bp, Homo sapien
agagaagttcagtatgagtctgctc

SEQ ID NO: 5598154 - DNA, 25 bp, Homo sapien
aaggtccatgccataggactgtgtt

SEQ ID NO: 5598155 - DNA, 25 bp, Homo sapien
tgtgtataagatataatggcaagtc

SEQ ID NO: 5598156 - DNA, 25 bp, Homo sapien
taccaatgacaaaccaccaccaaag

SEQ ID NO: 5598157 - DNA, 25 bp, Homo sapien
aatatgtcaggtcctcagtaggcac

SEQ ID NO: 5598158 - DNA, 25 bp, Homo sapien
ataaacctatagaaacagcctaatc

SEQ ID NO: 5598159 - DNA, 25 bp, Homo sapien
agaaagcaaaaaatcctcgagccac

SEQ ID NO: 5598160 - DNA, 25 bp, Homo sapien
cagtaggcactgatttaccaatgac

SEQ ID NO: 5598161 - DNA, 25 bp, Homo sapien
cctcgagccaccattgaccattgcc

SEQ ID NO: 5598162 - DNA, 25 bp, Homo sapien
ttccccatggtgccactggaaggag

SEQ ID NO: 5598163 - DNA, 25 bp, Homo sapien
aactagaatcaaaagtgatgaatat

SEQ ID NO: 5598164 - DNA, 25 bp, Homo sapien
agactgaaatctactctgaattacc

SEQ ID NO: 5598165 - DNA, 25 bp, Homo sapien
ccagtagacctgaaaacagactgaa

SEQ ID NO: 5598166 - DNA, 25 bp, Homo sapien
attattgatgggaattaagaaaatt

SEQ ID NO: 5598167 - DNA, 25 bp, Homo sapien
gggcagtgcctgctttgagttgctc

SEQ ID NO: 5598168 - DNA, 25 bp, Homo sapien
ccacgcagggcagtgcctgctttga

SEQ ID NO: 5598169 - DNA, 25 bp, Homo sapien
aatgattatttagtagttagctctt

SEQ ID NO: 5598170 - DNA, 25 bp, Homo sapien
tttgagttgctcatggccttcccca

SEQ ID NO: 5598171 - DNA, 25 bp, Homo sapien
cacatttctgaggaagccctacatt

SEQ ID NO: 5598172 - DNA, 25 bp, Homo sapien
ggccactgccgcctcatgctcctgc

SEQ ID NO: 5598173 - DNA, 25 bp, Homo sapien
tgatccctgaggtaacggaaaatcc

SEQ ID NO: 5598174 - DNA, 25 bp, Homo sapien
cctgtactccaggttggtgcaactc

SEQ ID NO: 5598175 - DNA, 25 bp, Homo sapien
gctaggtcagtgtgtcccctcccta

SEQ ID NO: 5598176 - DNA, 25 bp, Homo sapien
ctcgctgggatctgcctgtactcca

SEQ ID NO: 5598177 - DNA, 25 bp, Homo sapien
gttattcagcccagcgatgcaaggt

SEQ ID NO: 5598178 - DNA, 25 bp, Homo sapien
gcaagtgggacaatcctgaagaaaa

SEQ ID NO: 5598179 - DNA, 25 bp, Homo sapien
taaagtacttggaagtgctcgctgg

SEQ ID NO: 5598180 - DNA, 25 bp, Homo sapien
gaagtcccagaagcgatcaagttta

SEQ ID NO: 5598181 - DNA, 25 bp, Homo sapien
gcgatgcaaggtcttcgggtttctc

SEQ ID NO: 5598182 - DNA, 25 bp, Homo sapien
ctatcagctcagctggaaagggtgg

SEQ ID NO: 5598183 - DNA, 25 bp, Homo sapien
ctatgccttcggagtctgtggcttc

SEQ ID NO: 5598184 - DNA, 25 bp, Homo sapien
gcaggtgaaatgtgagcactttctc

SEQ ID NO: 5598185 - DNA, 25 bp, Homo sapien
aagtggtgaaattaggaatgatttt

SEQ ID NO: 5598186 - DNA, 25 bp, Homo sapien
taaactcaggagacctcacggcaaa

SEQ ID NO: 5598187 - DNA, 25 bp, Homo sapien
attgcaagggagctaccattctccc

SEQ ID NO: 5598188 - DNA, 25 bp, Homo sapien
aaggactggatagcagctcaagtca

SEQ ID NO: 5598189 - DNA, 25 bp, Homo sapien
ggaaaacctctctcagtggcagttc

SEQ ID NO: 5598190 - DNA, 25 bp, Homo sapien
ggctccggttcaggacatataagct

SEQ ID NO: 5598191 - DNA, 25 bp, Homo sapien
gtcatagacgcaataaaggctccaa

SEQ ID NO: 5598192 - DNA, 25 bp, Homo sapien
ccattcaaggctgtgctgtgaagga

SEQ ID NO: 5598193 - DNA, 25 bp, Homo sapien
ttgtagaaaggtacccattcaaggc

SEQ ID NO: 5598194 - DNA, 25 bp, Homo sapien
acggcaaaccacggatgacttcagt

SEQ ID NO: 5598195 - DNA, 25 bp, Homo sapien
catctgcaagctgtgctgatggtgc

SEQ ID NO: 5598196 - DNA, 25 bp, Homo sapien
gttggatcacgggcactcaattttc

SEQ ID NO: 5598197 - DNA, 25 bp, Homo sapien
agttagggttcagaagtactaccac

SEQ ID NO: 5598198 - DNA, 25 bp, Homo sapien
gtggaggagtcagaattcgaactca

SEQ ID NO: 5598199 - DNA, 25 bp, Homo sapien
agtgtcttagtgagcatcagtctcc

SEQ ID NO: 5598200 - DNA, 25 bp, Homo sapien
tgtgagtgggcatattagtgtctta

SEQ ID NO: 5598201 - DNA, 25 bp, Homo sapien
caggacgcaaacgacacacctttca

SEQ ID NO: 5598202 - DNA, 25 bp, Homo sapien
cacatggctaatctgtggaggagtc

SEQ ID NO: 5598203 - DNA, 25 bp, Homo sapien
gctgatggtgcaggctgatatattt

SEQ ID NO: 5598204 - DNA, 25 bp, Homo sapien
aaacagttgcagaacgttggatcac

SEQ ID NO: 5598205 - DNA, 25 bp, Homo sapien
caaatcattttggggagagacttgg

SEQ ID NO: 5598206 - DNA, 25 bp, Homo sapien
ctcatccaactcacacctcgcactc

SEQ ID NO: 5598207 - DNA, 25 bp, Homo sapien
tgggagctccacgtagcccacctta

SEQ ID NO: 5598208 - DNA, 25 bp, Homo sapien
ctgagcactcaggaccgtttgtatc

SEQ ID NO: 5598209 - DNA, 25 bp, Homo sapien
gtagcccaccttagcgctggggtcc

SEQ ID NO: 5598210 - DNA, 25 bp, Homo sapien
ttaaagttggtagtgcaagaacaca

SEQ ID NO: 5598211 - DNA, 25 bp, Homo sapien
tgcccatgagagaatagatggcatg

SEQ ID NO: 5598212 - DNA, 25 bp, Homo sapien
tggggtccaaagccctcatccaact

SEQ ID NO: 5598213 - DNA, 25 bp, Homo sapien
cacaggacatcctgcacggagcatg

SEQ ID NO: 5598214 - DNA, 25 bp, Homo sapien
ccttgtgcctgccctggcgtgaaca

SEQ ID NO: 5598215 - DNA, 25 bp, Homo sapien
agaatagatggcatgcaaagacatt

SEQ ID NO: 5598216 - DNA, 25 bp, Homo sapien
ccccaaaacccagcagcgctgagca

SEQ ID NO: 5598217 - DNA, 25 bp, Homo sapien
cttcctatgagagaaactgcttggg

SEQ ID NO: 5598218 - DNA, 25 bp, Homo sapien
gctctggtttctgtgaagaggctgc

SEQ ID NO: 5598219 - DNA, 25 bp, Homo sapien
gagctgttgttgcctgacagcagga

SEQ ID NO: 5598220 - DNA, 25 bp, Homo sapien
tacaaactggccgctccccccaata

SEQ ID NO: 5598221 - DNA, 25 bp, Homo sapien
cattagccacctgaggtggggctga

SEQ ID NO: 5598222 - DNA, 25 bp, Homo sapien
cacagaaaccccaagaatgtttttc

SEQ ID NO: 5598223 - DNA, 25 bp, Homo sapien
tattcagaggacatctattgtgtgt

SEQ ID NO: 5598224 - DNA, 25 bp, Homo sapien
ggccctgtgctgagctgttgttgcc

SEQ ID NO: 5598225 - DNA, 25 bp, Homo sapien
tcttcacacccaggacgcagggtgc

SEQ ID NO: 5598226 - DNA, 25 bp, Homo sapien
tggagggtgttctctgaggttttct

SEQ ID NO: 5598227 - DNA, 25 bp, Homo sapien
agaaggtctctggtagatagaggag

SEQ ID NO: 5598228 - DNA, 25 bp, Homo sapien
tgcccttagcctgtcgcctcctgga

SEQ ID NO: 5598229 - DNA, 25 bp, Homo sapien
acacacctcccgtcgggctggagag

SEQ ID NO: 5598230 - DNA, 25 bp, Homo sapien
ttccccatctgtaaagcaaacctag

SEQ ID NO: 5598231 - DNA, 25 bp, Homo sapien
gtagtactactaatgcctcaacctc

SEQ ID NO: 5598232 - DNA, 25 bp, Homo sapien
ggactctgcccttagcctgtcgcct

SEQ ID NO: 5598233 - DNA, 25 bp, Homo sapien
tagcctgtcgcctcctggacacacc

SEQ ID NO: 5598234 - DNA, 25 bp, Homo sapien
ctccagccagccatgtagtactact

SEQ ID NO: 5598235 - DNA, 25 bp, Homo sapien
cctgtcgcctcctggacacacctcc

SEQ ID NO: 5598236 - DNA, 25 bp, Homo sapien
tgtaaagcaaacctagtaccagcta

SEQ ID NO: 5598237 - DNA, 25 bp, Homo sapien
actgtccggctctccagccagccat

SEQ ID NO: 5598238 - DNA, 25 bp, Homo sapien
tggacacacctcccgtcgggctgga

SEQ ID NO: 5598239 - DNA, 25 bp, Homo sapien
gtcccccatgtacccagcatggtgg

SEQ ID NO: 5598240 - DNA, 25 bp, Homo sapien
tacactggcttacagaacccaggac

SEQ ID NO: 5598241 - DNA, 25 bp, Homo sapien
ctggcttacagaacccaggacaggc

SEQ ID NO: 5598242 - DNA, 25 bp, Homo sapien
gtcttctcagaccctcccggggctc

SEQ ID NO: 5598243 - DNA, 25 bp, Homo sapien
ctgagtcttctcagaccctcccggg

SEQ ID NO: 5598244 - DNA, 25 bp, Homo sapien
agtaccagctacaaagagtccacct

SEQ ID NO: 5598245 - DNA, 25 bp, Homo sapien
acagcacctacactggcttacagaa

SEQ ID NO: 5598246 - DNA, 25 bp, Homo sapien
cagccctgtcccccatgtacccagc

SEQ ID NO: 5598247 - DNA, 25 bp, Homo sapien
caggtcacgccatttctgatggccc

SEQ ID NO: 5598248 - DNA, 25 bp, Homo sapien
acctagtaccagctacaaagagtcc

SEQ ID NO: 5598249 - DNA, 25 bp, Homo sapien
ggctgcacaggtcacgccatttctg

SEQ ID NO: 5598250 - DNA, 25 bp, Homo sapien
gagacctgctagcgtctgcaagcaa

SEQ ID NO: 5598251 - DNA, 25 bp, Homo sapien
aaggggaggcatataatctgttcca

SEQ ID NO: 5598252 - DNA, 25 bp, Homo sapien
tgtagatgagacctgctagcgtctg

SEQ ID NO: 5598253 - DNA, 25 bp, Homo sapien
atgacgtgttgaatatcttagctct

SEQ ID NO: 5598254 - DNA, 25 bp, Homo sapien
ttagctatcttcagatgaaagctga

SEQ ID NO: 5598255 - DNA, 25 bp, Homo sapien
tgcttgccaggagtcattgttcacc

SEQ ID NO: 5598256 - DNA, 25 bp, Homo sapien
ccatattccaggggaacgataagag

SEQ ID NO: 5598257 - DNA, 25 bp, Homo sapien
tctcaaggccatattccaggggaac

SEQ ID NO: 5598258 - DNA, 25 bp, Homo sapien
ttggatgcttgccaggagtcattgt

SEQ ID NO: 5598259 - DNA, 25 bp, Homo sapien
aaaaagcattgctggggttgaagaa

SEQ ID NO: 5598260 - DNA, 25 bp, Homo sapien
agatgaaagctgaagttttaataaa

SEQ ID NO: 5598261 - DNA, 25 bp, Homo sapien
ttgggctggctccgattcccttgtt

SEQ ID NO: 5598262 - DNA, 25 bp, Homo sapien
tctggctctgttaggtctgattgga

SEQ ID NO: 5598263 - DNA, 25 bp, Homo sapien
ggtctgattggagacccaggtgagt

SEQ ID NO: 5598264 - DNA, 25 bp, Homo sapien
ctgaagtggttacgtcccagaagtc

SEQ ID NO: 5598265 - DNA, 25 bp, Homo sapien
cagtccccgtgtacaggcctctttc

SEQ ID NO: 5598266 - DNA, 25 bp, Homo sapien
ttttctctggtctcaagggaggagt

SEQ ID NO: 5598267 - DNA, 25 bp, Homo sapien
cagggaagtcagtgattggaaactg

SEQ ID NO: 5598268 - DNA, 25 bp, Homo sapien
ggaggagtcttaaacggcattagat

SEQ ID NO: 5598269 - DNA, 25 bp, Homo sapien
gttattgtcagttggcttgggctgg

SEQ ID NO: 5598270 - DNA, 25 bp, Homo sapien
gattggaaactgaagtggttacgtc

SEQ ID NO: 5598271 - DNA, 25 bp, Homo sapien
acccagatctgaagataccaggttc

SEQ ID NO: 5598272 - DNA, 25 bp, Homo sapien
tatgcttgtaggaattctggcttgt

SEQ ID NO: 5598273 - DNA, 25 bp, Homo sapien
ggctggcccttgtggtcattcgagt

SEQ ID NO: 5598274 - DNA, 25 bp, Homo sapien
taagctggctcaattggtgagtgca

SEQ ID NO: 5598275 - DNA, 25 bp, Homo sapien
agtgaccttgctggataggatagcc

SEQ ID NO: 5598276 - DNA, 25 bp, Homo sapien
aaaatgcaggagacccaactacctg

SEQ ID NO: 5598277 - DNA, 25 bp, Homo sapien
tggctgttcacaggattgagtgacc

SEQ ID NO: 5598278 - DNA, 25 bp, Homo sapien
aaggtcaggtgtgtcagcattttct

SEQ ID NO: 5598279 - DNA, 25 bp, Homo sapien
agcaggggtagtttataagctggct

SEQ ID NO: 5598280 - DNA, 25 bp, Homo sapien
gatagcctgtttagagcaggggtag

SEQ ID NO: 5598281 - DNA, 25 bp, Homo sapien
gtcttctgtagaactgctgagtggc

SEQ ID NO: 5598282 - DNA, 25 bp, Homo sapien
ccatgtgacttgaaggtcctgtgct

SEQ ID NO: 5598283 - DNA, 25 bp, Homo sapien
tgtcctcgagaaattcggggaaaca

SEQ ID NO: 5598284 - DNA, 25 bp, Homo sapien
cttgtcagtttaaccggaaggagac

SEQ ID NO: 5598285 - DNA, 25 bp, Homo sapien
gggagaaaggattgtgatacttgtc

SEQ ID NO: 5598286 - DNA, 25 bp, Homo sapien
gagccccccagtcgtggcaatctgt

SEQ ID NO: 5598287 - DNA, 25 bp, Homo sapien
ggatagttggccctggctgcacatc

SEQ ID NO: 5598288 - DNA, 25 bp, Homo sapien
tccccgctcttcagggagtggaaag

SEQ ID NO: 5598289 - DNA, 25 bp, Homo sapien
gaccctgagggtattgttcccagcc

SEQ ID NO: 5598290 - DNA, 25 bp, Homo sapien
gcaacgagagggatcctgatctttt

SEQ ID NO: 5598291 - DNA, 25 bp, Homo sapien
ttggaaggagcatctgttcccacct

SEQ ID NO: 5598292 - DNA, 25 bp, Homo sapien
aaaagcatttaggtgttggaaggag

SEQ ID NO: 5598293 - DNA, 25 bp, Homo sapien
ggctggcctgcactcagatcctgtc

SEQ ID NO: 5598294 - DNA, 25 bp, Homo sapien
aagtagaaagacgtttgctcttaac

SEQ ID NO: 5598295 - DNA, 25 bp, Homo sapien
cactgttccatgacttgtgcataac

SEQ ID NO: 5598296 - DNA, 25 bp, Homo sapien
gaaattctgaccctgaagagcgtac

SEQ ID NO: 5598297 - DNA, 25 bp, Homo sapien
cgtacttctgtaagtagaaagacgt

SEQ ID NO: 5598298 - DNA, 25 bp, Homo sapien
gtacagctccatcttaccaatgata

SEQ ID NO: 5598299 - DNA, 25 bp, Homo sapien
ctgaccctgaagagcgtacttctgt

SEQ ID NO: 5598300 - DNA, 25 bp, Homo sapien
gctcttaacatatagtctgcacaat

SEQ ID NO: 5598301 - DNA, 25 bp, Homo sapien
ctgacctcgtgattgaaattctgac

SEQ ID NO: 5598302 - DNA, 25 bp, Homo sapien
tctgtaagtagaaagacgtttgctc

SEQ ID NO: 5598303 - DNA, 25 bp, Homo sapien
atagtctgcacaattcaatatgaac

SEQ ID NO: 5598304 - DNA, 25 bp, Homo sapien
ttaccaatgatataaccaatgtcta

SEQ ID NO: 5598305 - DNA, 25 bp, Homo sapien
tcccctggtgcttatgaccgcagtt

SEQ ID NO: 5598306 - DNA, 25 bp, Homo sapien
ctcttcctaggacgaagcaaggttc

SEQ ID NO: 5598307 - DNA, 25 bp, Homo sapien
cagcaggtatcggaatgtttgtgtc

SEQ ID NO: 5598308 - DNA, 25 bp, Homo sapien
gctgtctctaggaagcgagttttca

SEQ ID NO: 5598309 - DNA, 25 bp, Homo sapien
aaatcgcttgaacccctgaacatct

SEQ ID NO: 5598310 - DNA, 25 bp, Homo sapien
ccttagggctgacaaagacaaattg

SEQ ID NO: 5598311 - DNA, 25 bp, Homo sapien
gccatgtgagttctggtactggggc

SEQ ID NO: 5598312 - DNA, 25 bp, Homo sapien
cacttgtctaacccggagctggctg

SEQ ID NO: 5598313 - DNA, 25 bp, Homo sapien
gcagttggggttattgagttatttc

SEQ ID NO: 5598314 - DNA, 25 bp, Homo sapien
atttcagtgtgagttcccggcacag

SEQ ID NO: 5598315 - DNA, 25 bp, Homo sapien
tcggtggaagtatcaccagttccgt

SEQ ID NO: 5598316 - DNA, 25 bp, Homo sapien
ttgatggtgatcacatgcctccttc

SEQ ID NO: 5598317 - DNA, 25 bp, Homo sapien
ccttcactgcaaggcagactgtcgg

SEQ ID NO: 5598318 - DNA, 25 bp, Homo sapien
cagtttcggtctgaggaaagaaaac

SEQ ID NO: 5598319 - DNA, 25 bp, Homo sapien
gtgatccttcccagagcagaagact

SEQ ID NO: 5598320 - DNA, 25 bp, Homo sapien
tgtacggggcatgctctatcttcct

SEQ ID NO: 5598321 - DNA, 25 bp, Homo sapien
ccctgaaagggcgtagccttttcca

SEQ ID NO: 5598322 - DNA, 25 bp, Homo sapien
gctgaaggacgactgtgtgatcctt

SEQ ID NO: 5598323 - DNA, 25 bp, Homo sapien
aaagaaaacactgcgccccaggcag

SEQ ID NO: 5598324 - DNA, 25 bp, Homo sapien
caaagaaaaacatgggttcttcggc

SEQ ID NO: 5598325 - DNA, 25 bp, Homo sapien
atgggttcttcggcttgtggattac

SEQ ID NO: 5598326 - DNA, 25 bp, Homo sapien
ggatcaactcatggagacaaatgcc

SEQ ID NO: 5598327 - DNA, 25 bp, Homo sapien
acagttgagatatggtatggaagaa

SEQ ID NO: 5598328 - DNA, 25 bp, Homo sapien
aacaaacgtaattagtcaccctaca

SEQ ID NO: 5598329 - DNA, 25 bp, Homo sapien
tgggaaagtgaagtaagctcttaca

SEQ ID NO: 5598330 - DNA, 25 bp, Homo sapien
tgtccctgtactaaagaatgctgaa

SEQ ID NO: 5598331 - DNA, 25 bp, Homo sapien
gagagatatacatgtgtacgtgtgt

SEQ ID NO: 5598332 - DNA, 25 bp, Homo sapien
tagtctcatagaacatcaaatccat

SEQ ID NO: 5598333 - DNA, 25 bp, Homo sapien
ttatgtcctgggaaagtgaagtaag

SEQ ID NO: 5598334 - DNA, 25 bp, Homo sapien
tgagtacctgatatatattgagaga

SEQ ID NO: 5598335 - DNA, 25 bp, Homo sapien
aatatgtttccagccatcaagaagt

SEQ ID NO: 5598336 - DNA, 25 bp, Homo sapien
agaagggagacagtatatattgagt

SEQ ID NO: 5598337 - DNA, 25 bp, Homo sapien
atattgctgtcaaaatagactcatt

SEQ ID NO: 5598338 - DNA, 25 bp, Homo sapien
ggacgtgctcctctccatggggttc

SEQ ID NO: 5598339 - DNA, 25 bp, Homo sapien
caggcagcatgtgactggttattct

SEQ ID NO: 5598340 - DNA, 25 bp, Homo sapien
ggcagcatgtgactggttattctcc

SEQ ID NO: 5598341 - DNA, 25 bp, Homo sapien
gccaccccagtccgctcggcatggc

SEQ ID NO: 5598342 - DNA, 25 bp, Homo sapien
attctcccatgtcggtgaccccttc

SEQ ID NO: 5598343 - DNA, 25 bp, Homo sapien
cacaaaaagccttggcatccacggg

SEQ ID NO: 5598344 - DNA, 25 bp, Homo sapien
tcctccttcccgaaccatccggctc

SEQ ID NO: 5598345 - DNA, 25 bp, Homo sapien
cgtgctcctctccatggggttcccc

SEQ ID NO: 5598346 - DNA, 25 bp, Homo sapien
ttcccgaaccatccggctcgggctc

SEQ ID NO: 5598347 - DNA, 25 bp, Homo sapien
gttattctcccatgtcggtgacccc

SEQ ID NO: 5598348 - DNA, 25 bp, Homo sapien
gcgctggacgtgctcctctccatgg

SEQ ID NO: 5598349 - DNA, 25 bp, Homo sapien
ttcccctggcataaagaatgtatat

SEQ ID NO: 5598350 - DNA, 25 bp, Homo sapien
tgaagcactcctggcagccacactg

SEQ ID NO: 5598351 - DNA, 25 bp, Homo sapien
ttgaaatatggctgagaacatgtca

SEQ ID NO: 5598352 - DNA, 25 bp, Homo sapien
gaacatgtcattggtttgtgaggcc

SEQ ID NO: 5598353 - DNA, 25 bp, Homo sapien
ccctcttgtatgctgggcctggttg

SEQ ID NO: 5598354 - DNA, 25 bp, Homo sapien
ttccagagcagagttccctattccc

SEQ ID NO: 5598355 - DNA, 25 bp, Homo sapien
aggtcctatgaagaaagatacggtt

SEQ ID NO: 5598356 - DNA, 25 bp, Homo sapien
cttttcacacaaggagagatgtggg

SEQ ID NO: 5598357 - DNA, 25 bp, Homo sapien
aaagctcaggggtactattagttag

SEQ ID NO: 5598358 - DNA, 25 bp, Homo sapien
gccctacctcgaacaagcaccagct

SEQ ID NO: 5598359 - DNA, 25 bp, Homo sapien
gtgtagtgtatttgagggatcagtc

SEQ ID NO: 5598360 - DNA, 25 bp, Homo sapien
aatttaaaggttgcagtaggatgct

SEQ ID NO: 5598361 - DNA, 25 bp, Homo sapien
agtaggatgctactccagctaattt

SEQ ID NO: 5598362 - DNA, 25 bp, Homo sapien
ttattgcatgcattctgtaagcagc

SEQ ID NO: 5598363 - DNA, 25 bp, Homo sapien
aattttaagctagccctcctgtatt

SEQ ID NO: 5598364 - DNA, 25 bp, Homo sapien
gattttggggaaatgaataggccaa

SEQ ID NO: 5598365 - DNA, 25 bp, Homo sapien
cagttatgtgtgaattcatctataa

SEQ ID NO: 5598366 - DNA, 25 bp, Homo sapien
atgctgacttcgaaaacttattatc

SEQ ID NO: 5598367 - DNA, 25 bp, Homo sapien
taggccaaaaaggaagatattctcc

SEQ ID NO: 5598368 - DNA, 25 bp, Homo sapien
tctgtaagcagctactcaacgcttt

SEQ ID NO: 5598369 - DNA, 25 bp, Homo sapien
tttaaaggttgcagtaggatgctac

SEQ ID NO: 5598370 - DNA, 25 bp, Homo sapien
catctataacagtggattttgggga

SEQ ID NO: 5598371 - DNA, 25 bp, Homo sapien
ttcttcccgggacttgattgcacat

SEQ ID NO: 5598372 - DNA, 25 bp, Homo sapien
aagtactgtatgatgggcagcaatc

SEQ ID NO: 5598373 - DNA, 25 bp, Homo sapien
attgaaatataggaccgaatttggt

SEQ ID NO: 5598374 - DNA, 25 bp, Homo sapien
gtttagggttgaagtactgtatgat

SEQ ID NO: 5598375 - DNA, 25 bp, Homo sapien
caccattgaaagagaaagtccatgt

SEQ ID NO: 5598376 - DNA, 25 bp, Homo sapien
tactgatgcccatcggtagttgagc

SEQ ID NO: 5598377 - DNA, 25 bp, Homo sapien
atcctgtcccaaagcgctgtggggg

SEQ ID NO: 5598378 - DNA, 25 bp, Homo sapien
agagtactgctgccaacctagacac

SEQ ID NO: 5598379 - DNA, 25 bp, Homo sapien
tgttatactgggatggattactgat

SEQ ID NO: 5598380 - DNA, 25 bp, Homo sapien
ggtggaggtctcaaggcatccttta

SEQ ID NO: 5598381 - DNA, 25 bp, Homo sapien
cataggctcttcaaagcatggaact

SEQ ID NO: 5598382 - DNA, 25 bp, Homo sapien
ttggcagttgactctctggccagca

SEQ ID NO: 5598383 - DNA, 25 bp, Homo sapien
tcgcctcagtgccctcagcgccttc

SEQ ID NO: 5598384 - DNA, 25 bp, Homo sapien
ttgccctcaggttgattacgaagcc

SEQ ID NO: 5598385 - DNA, 25 bp, Homo sapien
atgtgtagcacgcatcactagaggt

SEQ ID NO: 5598386 - DNA, 25 bp, Homo sapien
gccagcactatgtgtagcacgcatc

SEQ ID NO: 5598387 - DNA, 25 bp, Homo sapien
gcgcctcgcctcagtgccctcagcg

SEQ ID NO: 5598388 - DNA, 25 bp, Homo sapien
agtgccctcagcgccttctgtcttc

SEQ ID NO: 5598389 - DNA, 25 bp, Homo sapien
aggccccacagaggctctggtgtgt

SEQ ID NO: 5598390 - DNA, 25 bp, Homo sapien
aggttgattacgaagcctcagagcc

SEQ ID NO: 5598391 - DNA, 25 bp, Homo sapien
ctctggccagcactatgtgtagcac

SEQ ID NO: 5598392 - DNA, 25 bp, Homo sapien
ggcagttgactctctggccagcact

SEQ ID NO: 5598393 - DNA, 25 bp, Homo sapien
cacccttgcagatctggttgggggg

SEQ ID NO: 5598394 - DNA, 25 bp, Homo sapien
ttataggaacaacagaagttagagg

SEQ ID NO: 5598395 - DNA, 25 bp, Homo sapien
gtaaactttcataggggctgaggac

SEQ ID NO: 5598396 - DNA, 25 bp, Homo sapien
tctgagagtctcacgagccttcacc

SEQ ID NO: 5598397 - DNA, 25 bp, Homo sapien
gacgaggcccgcaacgtcattgtca

SEQ ID NO: 5598398 - DNA, 25 bp, Homo sapien
aaggtcacacaaccgcatcagccgt

SEQ ID NO: 5598399 - DNA, 25 bp, Homo sapien
tgagctctctgtgatgctgcgggga

SEQ ID NO: 5598400 - DNA, 25 bp, Homo sapien
agtgcttggggttacagatatgagc

SEQ ID NO: 5598401 - DNA, 25 bp, Homo sapien
tttatagatgacacagtggacaccc

SEQ ID NO: 5598402 - DNA, 25 bp, Homo sapien
acggtaacgctagctctgagagtct

SEQ ID NO: 5598403 - DNA, 25 bp, Homo sapien
cccctgactgtaagaagggggtgat

SEQ ID NO: 5598404 - DNA, 25 bp, Homo sapien
tcccttgaaagtgcacatgtgttgc

SEQ ID NO: 5598405 - DNA, 25 bp, Homo sapien
attgggcttgtgagcagtagcatat

SEQ ID NO: 5598406 - DNA, 25 bp, Homo sapien
ctttccaaagcaacaccaaacaccc

SEQ ID NO: 5598407 - DNA, 25 bp, Homo sapien
aagccctgtaatggttccagaggat

SEQ ID NO: 5598408 - DNA, 25 bp, Homo sapien
gcatactaagcactgtgtggtcctc

SEQ ID NO: 5598409 - DNA, 25 bp, Homo sapien
tccagaggatatctctccaggtctg

SEQ ID NO: 5598410 - DNA, 25 bp, Homo sapien
tgggaataaacaatgcactgcaaat

SEQ ID NO: 5598411 - DNA, 25 bp, Homo sapien
cagtgggactgtgtgttctttgaaa

SEQ ID NO: 5598412 - DNA, 25 bp, Homo sapien
agtgtgaacaccccccctggggtgc

SEQ ID NO: 5598413 - DNA, 25 bp, Homo sapien
gtagcatatgcctcaaaatggtccc

SEQ ID NO: 5598414 - DNA, 25 bp, Homo sapien
ttagcattaacaggagtctggcctg

SEQ ID NO: 5598415 - DNA, 25 bp, Homo sapien
gactccgcgatttttgtgaaactac

SEQ ID NO: 5598416 - DNA, 25 bp, Homo sapien
gtagtttcacaaaaatcgcggagtc

SEQ ID NO: 5598417 - DNA, 25 bp, Homo sapien
tgctatatgaatctgcacaggctga

SEQ ID NO: 5598418 - DNA, 25 bp, Homo sapien
tggaaaatgacttacttagaaaaca

SEQ ID NO: 5598419 - DNA, 25 bp, Homo sapien
gttgggtgaaaacttggatcactat

SEQ ID NO: 5598420 - DNA, 25 bp, Homo sapien
tctaaagacccagttctggctgcag

SEQ ID NO: 5598421 - DNA, 25 bp, Homo sapien
gtgtttcactaaaggtctgagggaa

SEQ ID NO: 5598422 - DNA, 25 bp, Homo sapien
ttatactgtcatagagtgaaaacta

SEQ ID NO: 5598423 - DNA, 25 bp, Homo sapien
caatacatcataacgctaaagcact

SEQ ID NO: 5598424 - DNA, 25 bp, Homo sapien
accccaactgaagctcaaacatgtc

SEQ ID NO: 5598425 - DNA, 25 bp, Homo sapien
attcacctcgttggggttgttttga

SEQ ID NO: 5598426 - DNA, 25 bp, Homo sapien
ctgcacaggctgaattcactgctct

SEQ ID NO: 5598427 - DNA, 25 bp, Homo sapien
acatccttgaaggcaatgatggaaa

SEQ ID NO: 5598428 - DNA, 25 bp, Homo sapien
agaaactcagagttgacaggacctt

SEQ ID NO: 5598429 - DNA, 25 bp, Homo sapien
tgccactctcttgattgtcctctgc

SEQ ID NO: 5598430 - DNA, 25 bp, Homo sapien
tgacaggaccttaaaagtcacccca

SEQ ID NO: 5598431 - DNA, 25 bp, Homo sapien
ggatactcactaccctgcacccagg

SEQ ID NO: 5598432 - DNA, 25 bp, Homo sapien
gacctgtctgctgtgtgagcacctc

SEQ ID NO: 5598433 - DNA, 25 bp, Homo sapien
cacttccaagtaatgacctgtctgc

SEQ ID NO: 5598434 - DNA, 25 bp, Homo sapien
tctcatcacaggatactcactaccc

SEQ ID NO: 5598435 - DNA, 25 bp, Homo sapien
gattgtcctctgcagcatcacttcc

SEQ ID NO: 5598436 - DNA, 25 bp, Homo sapien
actcagagttgacaggaccttaaaa

SEQ ID NO: 5598437 - DNA, 25 bp, Homo sapien
ttttgatgtagaaactcagagttga

SEQ ID NO: 5598438 - DNA, 25 bp, Homo sapien
gtctgctgtgtgagcacctctcatc

SEQ ID NO: 5598439 - DNA, 25 bp, Homo sapien
taagtagcagcactgcctgggaaga

SEQ ID NO: 5598440 - DNA, 25 bp, Homo sapien
tccaacagcaagtcaaggaaagtca

SEQ ID NO: 5598441 - DNA, 25 bp, Homo sapien
gaaggaatctgttggatggaaatct

SEQ ID NO: 5598442 - DNA, 25 bp, Homo sapien
cattttatttgggataagtagcagc

SEQ ID NO: 5598443 - DNA, 25 bp, Homo sapien
atctgttggatggaaatcttacctt

SEQ ID NO: 5598444 - DNA, 25 bp, Homo sapien
ttatttgggataagtagcagcactg

SEQ ID NO: 5598445 - DNA, 25 bp, Homo sapien
tgggataagtagcagcactgcctgg

SEQ ID NO: 5598446 - DNA, 25 bp, Homo sapien
ttaatgcctagtttcagcccttttc

SEQ ID NO: 5598447 - DNA, 25 bp, Homo sapien
ccaccgcgcccggctgtctttattc

SEQ ID NO: 5598448 - DNA, 25 bp, Homo sapien
cttacctttgagcatcagttatatt

SEQ ID NO: 5598449 - DNA, 25 bp, Homo sapien
ttcatattagactttccaacagcaa

SEQ ID NO: 5598450 - DNA, 25 bp, Homo sapien
agatcaaactcagcaggtgtgggag

SEQ ID NO: 5598451 - DNA, 25 bp, Homo sapien
caggtgcgggctccacttcatttcc

SEQ ID NO: 5598452 - DNA, 25 bp, Homo sapien
gctgtgctgggacaacttcagagaa

SEQ ID NO: 5598453 - DNA, 25 bp, Homo sapien
tccattgcccctcctgggtgcttcc

SEQ ID NO: 5598454 - DNA, 25 bp, Homo sapien
aatttcacattctgggcaggtgcgg

SEQ ID NO: 5598455 - DNA, 25 bp, Homo sapien
cccagaaaccctcttcccaggaagc

SEQ ID NO: 5598456 - DNA, 25 bp, Homo sapien
gccccataggggttcaacaccttgc

SEQ ID NO: 5598457 - DNA, 25 bp, Homo sapien
gcagctccttccagtcccagtgtac

SEQ ID NO: 5598458 - DNA, 25 bp, Homo sapien
cttcttgctgatttggccaggcccc

SEQ ID NO: 5598459 - DNA, 25 bp, Homo sapien
gtcccagtgtaccccaagacagctg

SEQ ID NO: 5598460 - DNA, 25 bp, Homo sapien
aattaagggcttaagcaacatacat

SEQ ID NO: 5598461 - DNA, 25 bp, Homo sapien
tcttctccgggtgaataggaagcag

SEQ ID NO: 5598462 - DNA, 25 bp, Homo sapien
ataggaagcaggaaacaatgtcttc

SEQ ID NO: 5598463 - DNA, 25 bp, Homo sapien
gggagcgcccagcatttctcactgt

SEQ ID NO: 5598464 - DNA, 25 bp, Homo sapien
taacccgtcataactcatcgtagat

SEQ ID NO: 5598465 - DNA, 25 bp, Homo sapien
tataagcataattccctgcagttat

SEQ ID NO: 5598466 - DNA, 25 bp, Homo sapien
cactgtgtatcctgtttttgaaaac

SEQ ID NO: 5598467 - DNA, 25 bp, Homo sapien
tcctcttctccgggtgaataggaag

SEQ ID NO: 5598468 - DNA, 25 bp, Homo sapien
atgttctgggccttcctaacagctt

SEQ ID NO: 5598469 - DNA, 25 bp, Homo sapien
tttcctcacagaaaatatcaatctc

SEQ ID NO: 5598470 - DNA, 25 bp, Homo sapien
acattactaacaggtagtgacaggg

SEQ ID NO: 5598471 - DNA, 25 bp, Homo sapien
tccctgcagttataattaacccgtc

SEQ ID NO: 5598472 - DNA, 25 bp, Homo sapien
acaatcgtaagccacgcctgtgtac

SEQ ID NO: 5598473 - DNA, 25 bp, Homo sapien
ggctcgccagcctttggtctcgaac

SEQ ID NO: 5598474 - DNA, 25 bp, Homo sapien
aaacaggttagacaacacgagctct

SEQ ID NO: 5598475 - DNA, 25 bp, Homo sapien
ggtcccgtgagcactgtgtgcactc

SEQ ID NO: 5598476 - DNA, 25 bp, Homo sapien
acgctctggcaaagcatccaggcct

SEQ ID NO: 5598477 - DNA, 25 bp, Homo sapien
cagccagctcttgggtcccgtgagc

SEQ ID NO: 5598478 - DNA, 25 bp, Homo sapien
acacgcctggaagcacgttctagat

SEQ ID NO: 5598479 - DNA, 25 bp, Homo sapien
acacagcagacatacagggtgctgg

SEQ ID NO: 5598480 - DNA, 25 bp, Homo sapien
gcctgtgtacacagcagggctccta

SEQ ID NO: 5598481 - DNA, 25 bp, Homo sapien
gtgtgcactcatttcatgggctgtt

SEQ ID NO: 5598482 - DNA, 25 bp, Homo sapien
gtgattgattcaagactcgaagtct

SEQ ID NO: 5598483 - DNA, 25 bp, Homo sapien
cattttgaggaaggatttatctgtt

SEQ ID NO: 5598484 - DNA, 25 bp, Homo sapien
tcagagcgaaggataactgcactta

SEQ ID NO: 5598485 - DNA, 25 bp, Homo sapien
tgcacttagaaacagaaatggtatc

SEQ ID NO: 5598486 - DNA, 25 bp, Homo sapien
ggggacagacttacagtggataaat

SEQ ID NO: 5598487 - DNA, 25 bp, Homo sapien
tctcagcaatcgactgttggctcag

SEQ ID NO: 5598488 - DNA, 25 bp, Homo sapien
gcctaccggcttgcaagtaacttgc

SEQ ID NO: 5598489 - DNA, 25 bp, Homo sapien
gagaactatagtcaaaaaggcccat

SEQ ID NO: 5598490 - DNA, 25 bp, Homo sapien
taaggtgaaaaacttagctattgcc

SEQ ID NO: 5598491 - DNA, 25 bp, Homo sapien
agaatataagtgcagaaatgagaac

SEQ ID NO: 5598492 - DNA, 25 bp, Homo sapien
cctttgaagaagcgatgagaatata

SEQ ID NO: 5598493 - DNA, 25 bp, Homo sapien
aatgtctggcatatagtaaactctc

SEQ ID NO: 5598494 - DNA, 25 bp, Homo sapien
cttcccaggaagcactctctccata

SEQ ID NO: 5598495 - DNA, 25 bp, Homo sapien
cttatatgaactccgattgtgctga

SEQ ID NO: 5598496 - DNA, 25 bp, Homo sapien
agacaggatcgccgttcttgtgttt

SEQ ID NO: 5598497 - DNA, 25 bp, Homo sapien
ctccataagtgttcagagaaccctg

SEQ ID NO: 5598498 - DNA, 25 bp, Homo sapien
gtggagccttactgaagacaggatc

SEQ ID NO: 5598499 - DNA, 25 bp, Homo sapien
gccctccagccccttcaaacgccac

SEQ ID NO: 5598500 - DNA, 25 bp, Homo sapien
gagaagggcagtctcgccatcttaa

SEQ ID NO: 5598501 - DNA, 25 bp, Homo sapien
accagagaagctcccgcacttctta

SEQ ID NO: 5598502 - DNA, 25 bp, Homo sapien
tcgccatcttaaagacctgccctcc

SEQ ID NO: 5598503 - DNA, 25 bp, Homo sapien
gggttgaggtgtagatatacttcct

SEQ ID NO: 5598504 - DNA, 25 bp, Homo sapien
cttgtgtttatcagctgagaagggc

SEQ ID NO: 5598505 - DNA, 25 bp, Homo sapien
aagagagttcaaagaatggtgacaa

SEQ ID NO: 5598506 - DNA, 25 bp, Homo sapien
gccctaggttctccaggtaggtgcc

SEQ ID NO: 5598507 - DNA, 25 bp, Homo sapien
tgacaggggaacagtacatttattt

SEQ ID NO: 5598508 - DNA, 25 bp, Homo sapien
ggcaaaccaaagatggagattcacc

SEQ ID NO: 5598509 - DNA, 25 bp, Homo sapien
gtgagctcctagtcaagggccaaga

SEQ ID NO: 5598510 - DNA, 25 bp, Homo sapien
caagaaagaggttattcaggcaaac

SEQ ID NO: 5598511 - DNA, 25 bp, Homo sapien
agaaagacactggaacaaacctgtc

SEQ ID NO: 5598512 - DNA, 25 bp, Homo sapien
ggcaaggttgagaaacactgaacct

SEQ ID NO: 5598513 - DNA, 25 bp, Homo sapien
ttctagagatatgaggacacactga

SEQ ID NO: 5598514 - DNA, 25 bp, Homo sapien
taagcatcttttggtggggctagag

SEQ ID NO: 5598515 - DNA, 25 bp, Homo sapien
tggggccttagaacacgtgttttca

SEQ ID NO: 5598516 - DNA, 25 bp, Homo sapien
gtcatctcctctatggccagcctag

SEQ ID NO: 5598517 - DNA, 25 bp, Homo sapien
catcagtctagaggaactggttggg

SEQ ID NO: 5598518 - DNA, 25 bp, Homo sapien
ttcccaggtgaatctgcaccaggcc

SEQ ID NO: 5598519 - DNA, 25 bp, Homo sapien
tctgcaccaggcctgtcatctcctc

SEQ ID NO: 5598520 - DNA, 25 bp, Homo sapien
cctggattccaggctaaaaccctac

SEQ ID NO: 5598521 - DNA, 25 bp, Homo sapien
agcccctgttcatcagctgccttcc

SEQ ID NO: 5598522 - DNA, 25 bp, Homo sapien
atgcttttggggccatagactggct

SEQ ID NO: 5598523 - DNA, 25 bp, Homo sapien
aggagaacatcagtctagaggaact

SEQ ID NO: 5598524 - DNA, 25 bp, Homo sapien
atggccagcctagtctgaactgctt

SEQ ID NO: 5598525 - DNA, 25 bp, Homo sapien
cctacacactatgcttttggggcca

SEQ ID NO: 5598526 - DNA, 25 bp, Homo sapien
gagagtatcccgcagcccctgttca

SEQ ID NO: 5598527 - DNA, 25 bp, Homo sapien
ctgggacctgcatagatctagggtt

SEQ ID NO: 5598528 - DNA, 25 bp, Homo sapien
tctagaagttcaaggtgtgtctcac

SEQ ID NO: 5598529 - DNA, 25 bp, Homo sapien
gggaacttcaaagagcctagccatc

SEQ ID NO: 5598530 - DNA, 25 bp, Homo sapien
gaatagtctggttatccaaggcctc

SEQ ID NO: 5598531 - DNA, 25 bp, Homo sapien
aaggcctctaaggaatgactgagac

SEQ ID NO: 5598532 - DNA, 25 bp, Homo sapien
tcagagagtggttttagaatttaga

SEQ ID NO: 5598533 - DNA, 25 bp, Homo sapien
ggtttttggaccacaggagatggga

SEQ ID NO: 5598534 - DNA, 25 bp, Homo sapien
tgtgtcatctgcagtgaacaaaccc

SEQ ID NO: 5598535 - DNA, 25 bp, Homo sapien
gtttgaatacaaatagagaggagtc

SEQ ID NO: 5598536 - DNA, 25 bp, Homo sapien
ccttcttagctgtggggaacttcaa

SEQ ID NO: 5598537 - DNA, 25 bp, Homo sapien
tcttgccctggtgaaagggtatttc

SEQ ID NO: 5598538 - DNA, 25 bp, Homo sapien
gttttagaagtcgacaggacagaat

SEQ ID NO: 5598539 - DNA, 25 bp, Homo sapien
tctaggaaactccaaggctcagacc

SEQ ID NO: 5598540 - DNA, 25 bp, Homo sapien
atttactagcgtcagagccgatggt

SEQ ID NO: 5598541 - DNA, 25 bp, Homo sapien
ttagaagtcgacaggacagaattac

SEQ ID NO: 5598542 - DNA, 25 bp, Homo sapien
cagatttactagcgtcagagccgat

SEQ ID NO: 5598543 - DNA, 25 bp, Homo sapien
gttccagaaaggtaaccatctagga

SEQ ID NO: 5598544 - DNA, 25 bp, Homo sapien
ggaaactccaaggctcagaccacca

SEQ ID NO: 5598545 - DNA, 25 bp, Homo sapien
tgcaggaaggtaaattcaagacaac

SEQ ID NO: 5598546 - DNA, 25 bp, Homo sapien
caggacagaattacggaaacaaatt

SEQ ID NO: 5598547 - DNA, 25 bp, Homo sapien
cgcaggcgcagatttactagcgtca

SEQ ID NO: 5598548 - DNA, 25 bp, Homo sapien
tcaagacaacttaggtactcagttt

SEQ ID NO: 5598549 - DNA, 25 bp, Homo sapien
cctggtccacagaagactgccttct

SEQ ID NO: 5598550 - DNA, 25 bp, Homo sapien
gagggctccactgtcttgaccttat

SEQ ID NO: 5598551 - DNA, 25 bp, Homo sapien
actaggatgccaacacggtatcaga

SEQ ID NO: 5598552 - DNA, 25 bp, Homo sapien
ttataaacagagatgactttggggg

SEQ ID NO: 5598553 - DNA, 25 bp, Homo sapien
agagtgctaatcctatcatgagggc

SEQ ID NO: 5598554 - DNA, 25 bp, Homo sapien
tggtaagggccctcttcctggtcca

SEQ ID NO: 5598555 - DNA, 25 bp, Homo sapien
gattacgggtttaacatgaattcca

SEQ ID NO: 5598556 - DNA, 25 bp, Homo sapien
gggacagagttaatagcatctgagt

SEQ ID NO: 5598557 - DNA, 25 bp, Homo sapien
ttctaataagagtgctaatcctatc

SEQ ID NO: 5598558 - DNA, 25 bp, Homo sapien
ggtatcagattcttggtaagggccc

SEQ ID NO: 5598559 - DNA, 25 bp, Homo sapien
tgctatcagcactgaagatcaggct

SEQ ID NO: 5598560 - DNA, 25 bp, Homo sapien
gtcatttacagtcagtcgtgtggac

SEQ ID NO: 5598561 - DNA, 25 bp, Homo sapien
tcctggcatcccatgggagcttcgg

SEQ ID NO: 5598562 - DNA, 25 bp, Homo sapien
ttgtggtctcctgtcacagctagac

SEQ ID NO: 5598563 - DNA, 25 bp, Homo sapien
tctgcagaggtagtgctcacattgc

SEQ ID NO: 5598564 - DNA, 25 bp, Homo sapien
acagctagaccttcagtcttgtgtg

SEQ ID NO: 5598565 - DNA, 25 bp, Homo sapien
gctggcatcctggcatcccatggga

SEQ ID NO: 5598566 - DNA, 25 bp, Homo sapien
aaagccggaatgtgtaccttggttc

SEQ ID NO: 5598567 - DNA, 25 bp, Homo sapien
ggtagtgctcacattgcctatgctc

SEQ ID NO: 5598568 - DNA, 25 bp, Homo sapien
ctgagcctcagtatcctctgcagag

SEQ ID NO: 5598569 - DNA, 25 bp, Homo sapien
gtggacttaagcccatgtctttgtc

SEQ ID NO: 5598570 - DNA, 25 bp, Homo sapien
aagactctggctttgggattagaaa

SEQ ID NO: 5598571 - DNA, 25 bp, Homo sapien
gtaacctgtgatgcctgaactgttc

SEQ ID NO: 5598572 - DNA, 25 bp, Homo sapien
acttgatcgatctttgagaacctac

SEQ ID NO: 5598573 - DNA, 25 bp, Homo sapien
gtggttggtactggtgttcagaaca

SEQ ID NO: 5598574 - DNA, 25 bp, Homo sapien
catttgtggtaaattacacgggaag

SEQ ID NO: 5598575 - DNA, 25 bp, Homo sapien
gtgtattctagtaacctgtgatgcc

SEQ ID NO: 5598576 - DNA, 25 bp, Homo sapien
ctgttggaaatgtaactgtcccagc

SEQ ID NO: 5598577 - DNA, 25 bp, Homo sapien
ctctcacttgagggcacagtgagcg

SEQ ID NO: 5598578 - DNA, 25 bp, Homo sapien
actaggtgtcagtctctgtggttgg

SEQ ID NO: 5598579 - DNA, 25 bp, Homo sapien
gcatctaggctctctgaattacgca

SEQ ID NO: 5598580 - DNA, 25 bp, Homo sapien
acacgggaagttagcttacccttgc

SEQ ID NO: 5598581 - DNA, 25 bp, Homo sapien
agtgagcgccgtgaccatatcattt

SEQ ID NO: 5598582 - DNA, 25 bp, Homo sapien
caggaaattctaagaggagaagctg

SEQ ID NO: 5598583 - DNA, 25 bp, Homo sapien
gtgaggggatgcccgctttccctca

SEQ ID NO: 5598584 - DNA, 25 bp, Homo sapien
ttgagactcttgatacaacccacac

SEQ ID NO: 5598585 - DNA, 25 bp, Homo sapien
ggaattgcacaattgctagatgaaa

SEQ ID NO: 5598586 - DNA, 25 bp, Homo sapien
ttcagtacagattgaactcccattc

SEQ ID NO: 5598587 - DNA, 25 bp, Homo sapien
cccaattctaggaccggagaatatg

SEQ ID NO: 5598588 - DNA, 25 bp, Homo sapien
acatagatcccatggatgtgagggg

SEQ ID NO: 5598589 - DNA, 25 bp, Homo sapien
gctagatgaaagataattcagtaca

SEQ ID NO: 5598590 - DNA, 25 bp, Homo sapien
aaaaaaacatggagttctgaattat

SEQ ID NO: 5598591 - DNA, 25 bp, Homo sapien
ccattcattctgggatggatcagca

SEQ ID NO: 5598592 - DNA, 25 bp, Homo sapien
ggaccggagaatatgagcatttttg

SEQ ID NO: 5598593 - DNA, 25 bp, Homo sapien
gccagactgtttaattgcatgcatt

SEQ ID NO: 5598594 - DNA, 25 bp, Homo sapien
gtggtttcatctgaagagtgaggtc

SEQ ID NO: 5598595 - DNA, 25 bp, Homo sapien
gttttagaaatcagaaccgacagga

SEQ ID NO: 5598596 - DNA, 25 bp, Homo sapien
ttaaacaaggccatagtccaggagt

SEQ ID NO: 5598597 - DNA, 25 bp, Homo sapien
gtcagttgacagaggatgttttaga

SEQ ID NO: 5598598 - DNA, 25 bp, Homo sapien
gaaccgacaggattggatctgaata

SEQ ID NO: 5598599 - DNA, 25 bp, Homo sapien
gagtgaggtctttttgtcagttgac

SEQ ID NO: 5598600 - DNA, 25 bp, Homo sapien
gatctgaatagattggatgaggaag

SEQ ID NO: 5598601 - DNA, 25 bp, Homo sapien
agtttgtcttggtggattctgttac

SEQ ID NO: 5598602 - DNA, 25 bp, Homo sapien
agattggatgaggaagtttgtcttg

SEQ ID NO: 5598603 - DNA, 25 bp, Homo sapien
caggagtttgttcatggtagtggtt

SEQ ID NO: 5598604 - DNA, 25 bp, Homo sapien
acgttccccctagagatcccagttc

SEQ ID NO: 5598605 - DNA, 25 bp, Homo sapien
acagacaaagttacaagttataatc

SEQ ID NO: 5598606 - DNA, 25 bp, Homo sapien
cttggatctaagagaccaaaatgta

SEQ ID NO: 5598607 - DNA, 25 bp, Homo sapien
ggcacgcacgtgttatccataattt

SEQ ID NO: 5598608 - DNA, 25 bp, Homo sapien
aggctgtcagaacttcatggcacgc

SEQ ID NO: 5598609 - DNA, 25 bp, Homo sapien
agtaaatctgaaataactggaactt

SEQ ID NO: 5598610 - DNA, 25 bp, Homo sapien
tacaaatcgtaacagacaagaactc

SEQ ID NO: 5598611 - DNA, 25 bp, Homo sapien
acagtgaaattccggactttgacac

SEQ ID NO: 5598612 - DNA, 25 bp, Homo sapien
gttggggaaatcagagaatcctgaa

SEQ ID NO: 5598613 - DNA, 25 bp, Homo sapien
tcaatagatgttccaacgttccccc

SEQ ID NO: 5598614 - DNA, 25 bp, Homo sapien
tgaagtttcctcagaaaaggctcct

SEQ ID NO: 5598615 - DNA, 25 bp, Homo sapien
cctatgccaactggtgagaacggta

SEQ ID NO: 5598616 - DNA, 25 bp, Homo sapien
gaaaaagagtatctgaaaatggggc

SEQ ID NO: 5598617 - DNA, 25 bp, Homo sapien
tacgtggccaagtctaaaagcactc

SEQ ID NO: 5598618 - DNA, 25 bp, Homo sapien
aagcacggaaccacagaatgtttct

SEQ ID NO: 5598619 - DNA, 25 bp, Homo sapien
aatcagccacgtacagtaacatgtt

SEQ ID NO: 5598620 - DNA, 25 bp, Homo sapien
gaccctattgatgagaagcacggaa

SEQ ID NO: 5598621 - DNA, 25 bp, Homo sapien
gggcaacacagaggatcaaaatttt

SEQ ID NO: 5598622 - DNA, 25 bp, Homo sapien
ttaatgcacaagtggactgagatgg

SEQ ID NO: 5598623 - DNA, 25 bp, Homo sapien
ttggaaactcccagactgttgaact

SEQ ID NO: 5598624 - DNA, 25 bp, Homo sapien
attggagttactacgtggccaagtc

SEQ ID NO: 5598625 - DNA, 25 bp, Homo sapien
ttgtctagtaaacgaaatcagccac

SEQ ID NO: 5598626 - DNA, 25 bp, Homo sapien
cagtcaagactgtgtggctaaatgg

SEQ ID NO: 5598627 - DNA, 25 bp, Homo sapien
tggtaaaaaggcagtcaagactgtg

SEQ ID NO: 5598628 - DNA, 25 bp, Homo sapien
atagcactgcagttggtaaaaaggc

SEQ ID NO: 5598629 - DNA, 25 bp, Homo sapien
ggcaatcaggaagctatagcactgc

SEQ ID NO: 5598630 - DNA, 25 bp, Homo sapien
gggagagaaacttgtactctacagc

SEQ ID NO: 5598631 - DNA, 25 bp, Homo sapien
aaatgggcctgtagaaaataaggga

SEQ ID NO: 5598632 - DNA, 25 bp, Homo sapien
ttttatagtggcaatcaggaagcta

SEQ ID NO: 5598633 - DNA, 25 bp, Homo sapien
tatacatggattgctgatctaatat

SEQ ID NO: 5598634 - DNA, 25 bp, Homo sapien
tccaaaatcctcaataatagtcctt

SEQ ID NO: 5598635 - DNA, 25 bp, Homo sapien
ggaacatgtacaatacaacactcac

SEQ ID NO: 5598636 - DNA, 25 bp, Homo sapien
tgtgtggctaaatgggcctgtagaa

SEQ ID NO: 5598637 - DNA, 25 bp, Homo sapien
ccttcctgaaacctagctgatacgg

SEQ ID NO: 5598638 - DNA, 25 bp, Homo sapien
aatttgcatcaggaaacccaactgc

SEQ ID NO: 5598639 - DNA, 25 bp, Homo sapien
ctttgttgagctattgtgaaaaaaa

SEQ ID NO: 5598640 - DNA, 25 bp, Homo sapien
acccaactgctgacattgaggacct

SEQ ID NO: 5598641 - DNA, 25 bp, Homo sapien
tagcagagacatgcctctcaacacc

SEQ ID NO: 5598642 - DNA, 25 bp, Homo sapien
agctgatacggaatagcagagacat

SEQ ID NO: 5598643 - DNA, 25 bp, Homo sapien
cgccaaggttatatggagcccctga

SEQ ID NO: 5598644 - DNA, 25 bp, Homo sapien
atgctgcagctattgaaccaccttc

SEQ ID NO: 5598645 - DNA, 25 bp, Homo sapien
tgaggacctgggtgtgttcaattat

SEQ ID NO: 5598646 - DNA, 25 bp, Homo sapien
aaagccctaaataacagacactact

SEQ ID NO: 5598647 - DNA, 25 bp, Homo sapien
ttcccatctgaaaccgtatcgtaat

SEQ ID NO: 5598648 - DNA, 25 bp, Homo sapien
tagcatagtagtagtaacaacagga

SEQ ID NO: 5598649 - DNA, 25 bp, Homo sapien
aggaaagtagtcagagtagaaaata

SEQ ID NO: 5598650 - DNA, 25 bp, Homo sapien
agaataaacaagataatgtatgcat

SEQ ID NO: 5598651 - DNA, 25 bp, Homo sapien
tctgtagcccagttttagccctgtc

SEQ ID NO: 5598652 - DNA, 25 bp, Homo sapien
gcttggggcttctcatttctgtcct

SEQ ID NO: 5598653 - DNA, 25 bp, Homo sapien
tagtagtaacaacaggaaagtagtc

SEQ ID NO: 5598654 - DNA, 25 bp, Homo sapien
ctgtaactagggcacatgctacctc

SEQ ID NO: 5598655 - DNA, 25 bp, Homo sapien
ttgagacagtcatccccttaataga

SEQ ID NO: 5598656 - DNA, 25 bp, Homo sapien
ctgagctctctaccattgaggcaac

SEQ ID NO: 5598657 - DNA, 25 bp, Homo sapien
atgctacctctgtgtgaccacctcc

SEQ ID NO: 5598658 - DNA, 25 bp, Homo sapien
gaccacctccagtgatgctgagctc

SEQ ID NO: 5598659 - DNA, 25 bp, Homo sapien
acaaaaataataaaaagacatgctc

SEQ ID NO: 5598660 - DNA, 25 bp, Homo sapien
tgaccatgcccagttgttcctattc

SEQ ID NO: 5598661 - DNA, 25 bp, Homo sapien
cgaagtaatgtgattgctcagggta

SEQ ID NO: 5598662 - DNA, 25 bp, Homo sapien
agtgcaggatctagcgaagtaatgt

SEQ ID NO: 5598663 - DNA, 25 bp, Homo sapien
tttgttcagagaaaaagtgcaggat

SEQ ID NO: 5598664 - DNA, 25 bp, Homo sapien
gttcgtcaagtgtctctgaggactc

SEQ ID NO: 5598665 - DNA, 25 bp, Homo sapien
cagcccaactggagacattaaattc

SEQ ID NO: 5598666 - DNA, 25 bp, Homo sapien
gctcagggtatcactgaccatgccc

SEQ ID NO: 5598667 - DNA, 25 bp, Homo sapien
cttcaggaataaagtagaactgtac

SEQ ID NO: 5598668 - DNA, 25 bp, Homo sapien
ccaactcaggagatatggaaagtac

SEQ ID NO: 5598669 - DNA, 25 bp, Homo sapien
ctgaggactcagtcaagtgtctctg

SEQ ID NO: 5598670 - DNA, 25 bp, Homo sapien
cgcacatgcagaaaaactgggtata

SEQ ID NO: 5598671 - DNA, 25 bp, Homo sapien
gttgttaagtaataagcagcaatcc

SEQ ID NO: 5598672 - DNA, 25 bp, Homo sapien
ctgagttcagtgtgcctgacagctg

SEQ ID NO: 5598673 - DNA, 25 bp, Homo sapien
aagggccggcaattgttcaaatgtt

SEQ ID NO: 5598674 - DNA, 25 bp, Homo sapien
ataagaagaagttgtagttctcaca

SEQ ID NO: 5598675 - DNA, 25 bp, Homo sapien
acaacagctattaatgaacatcacc

SEQ ID NO: 5598676 - DNA, 25 bp, Homo sapien
gtatcacaaggattagggaaagcaa

SEQ ID NO: 5598677 - DNA, 25 bp, Homo sapien
tgggtataagcagcacatgttcctc

SEQ ID NO: 5598678 - DNA, 25 bp, Homo sapien
aggtgtgtgtatttggaaagataat

SEQ ID NO: 5598679 - DNA, 25 bp, Homo sapien
ccacaggtaaattcggtgaaagggc

SEQ ID NO: 5598680 - DNA, 25 bp, Homo sapien
ctctcaaaaggcattccacaggtaa

SEQ ID NO: 5598681 - DNA, 25 bp, Homo sapien
tattaaccgattttatgccaatttc

SEQ ID NO: 5598682 - DNA, 25 bp, Homo sapien
atttgaaggacacattataggggag

SEQ ID NO: 5598683 - DNA, 25 bp, Homo sapien
aagtatgggggtttcatttgaagga

SEQ ID NO: 5598684 - DNA, 25 bp, Homo sapien
tcttgcaacactttaaaatcacaac

SEQ ID NO: 5598685 - DNA, 25 bp, Homo sapien
gatctaacaacatcaaatgaaacac

SEQ ID NO: 5598686 - DNA, 25 bp, Homo sapien
aaagtctacccacggccacaaaatc

SEQ ID NO: 5598687 - DNA, 25 bp, Homo sapien
aaatgaaacacattaagattttgga

SEQ ID NO: 5598688 - DNA, 25 bp, Homo sapien
tgctgcttggtgacttaaacaaact

SEQ ID NO: 5598689 - DNA, 25 bp, Homo sapien
tatgggggtttcatttgaaggacac

SEQ ID NO: 5598690 - DNA, 25 bp, Homo sapien
agtctacccacggccacaaaatccc

SEQ ID NO: 5598691 - DNA, 25 bp, Homo sapien
tgagtacacaatacacaattctttg

SEQ ID NO: 5598692 - DNA, 25 bp, Homo sapien
ccggcgtctcctgtcccagtatttt

SEQ ID NO: 5598693 - DNA, 25 bp, Homo sapien
ttaggctcgaagtaccatggtccat

SEQ ID NO: 5598694 - DNA, 25 bp, Homo sapien
atcagccttgaagcacactcgtttg

SEQ ID NO: 5598695 - DNA, 25 bp, Homo sapien
tatccgtaagaattcgacctcatcc

SEQ ID NO: 5598696 - DNA, 25 bp, Homo sapien
aaacagcttttcaatgacgccaggc

SEQ ID NO: 5598697 - DNA, 25 bp, Homo sapien
atgacgccaggcattctgtagccct

SEQ ID NO: 5598698 - DNA, 25 bp, Homo sapien
ctgattgatgtttagaatgagagca

SEQ ID NO: 5598699 - DNA, 25 bp, Homo sapien
ccaaagttgtacattcacggggcca

SEQ ID NO: 5598700 - DNA, 25 bp, Homo sapien
gtcgtctagctccatgccgtacatc

SEQ ID NO: 5598701 - DNA, 25 bp, Homo sapien
tgcactataagaatgcggtgccgcc

SEQ ID NO: 5598702 - DNA, 25 bp, Homo sapien
attaagcagtaaattgaaaaccatc

SEQ ID NO: 5598703 - DNA, 25 bp, Homo sapien
actacatcgaaactagtgtcaataa

SEQ ID NO: 5598704 - DNA, 25 bp, Homo sapien
ttattgacactagtttcgatgtagt

SEQ ID NO: 5598705 - DNA, 25 bp, Homo sapien
aagcttcatgacaggtggtgatgtt

SEQ ID NO: 5598706 - DNA, 25 bp, Homo sapien
aatggattcaaggctggccagaata

SEQ ID NO: 5598707 - DNA, 25 bp, Homo sapien
gggggtaagaatccatgaactctcc

SEQ ID NO: 5598708 - DNA, 25 bp, Homo sapien
tcagtccctagcgacagtggctgag

SEQ ID NO: 5598709 - DNA, 25 bp, Homo sapien
aaggtaagtctgaatcgtgagtggt

SEQ ID NO: 5598710 - DNA, 25 bp, Homo sapien
agtacaaattagtctcggagcctga

SEQ ID NO: 5598711 - DNA, 25 bp, Homo sapien
ctcgtgggcaaaattaaatggattc

SEQ ID NO: 5598712 - DNA, 25 bp, Homo sapien
tgtcatgaaaggttctcgtgggcaa

SEQ ID NO: 5598713 - DNA, 25 bp, Homo sapien
tagctttcatgactagggggtaaga

SEQ ID NO: 5598714 - DNA, 25 bp, Homo sapien
tggtcagcacacatggtggctgcta

SEQ ID NO: 5598715 - DNA, 25 bp, Homo sapien
aggcctgtgtctgttggtccagtcc

SEQ ID NO: 5598716 - DNA, 25 bp, Homo sapien
cttaaataaaaatgcgtcacataac

SEQ ID NO: 5598717 - DNA, 25 bp, Homo sapien
tattataaataccagagaaggcctg

SEQ ID NO: 5598718 - DNA, 25 bp, Homo sapien
agggctataagactgggtacttctg

SEQ ID NO: 5598719 - DNA, 25 bp, Homo sapien
tacagcaaaaaaacttgacaaagta

SEQ ID NO: 5598720 - DNA, 25 bp, Homo sapien
aagaattatgaaacagaccagtaac

SEQ ID NO: 5598721 - DNA, 25 bp, Homo sapien
aatcttaagacttttgtacagcaaa

SEQ ID NO: 5598722 - DNA, 25 bp, Homo sapien
atgtcaaaaaaaggcataaccgagg

SEQ ID NO: 5598723 - DNA, 25 bp, Homo sapien
gactgggtacttctgtgatatatta

SEQ ID NO: 5598724 - DNA, 25 bp, Homo sapien
ttgtaacattaacataccaccatca

SEQ ID NO: 5598725 - DNA, 25 bp, Homo sapien
tatgaaacagaccagtaacaaaaat

SEQ ID NO: 5598726 - DNA, 25 bp, Homo sapien
tataaataccagagaaggcctgaga

SEQ ID NO: 5598727 - DNA, 25 bp, Homo sapien
ccttattggcagaagcttaggttgg

SEQ ID NO: 5598728 - DNA, 25 bp, Homo sapien
atgacactaaatcttgtacagcctt

SEQ ID NO: 5598729 - DNA, 25 bp, Homo sapien
ctaacacaaatatgagacccaatga

SEQ ID NO: 5598730 - DNA, 25 bp, Homo sapien
tgaaatccttattggcagaagctta

SEQ ID NO: 5598731 - DNA, 25 bp, Homo sapien
aatactttatggtaagtgaacttcc

SEQ ID NO: 5598732 - DNA, 25 bp, Homo sapien
atggtaagtgaacttccaaagacac

SEQ ID NO: 5598733 - DNA, 25 bp, Homo sapien
acacaaatatgagacccaatgacac

SEQ ID NO: 5598734 - DNA, 25 bp, Homo sapien
tttaaaagcttatctgaaatcctta

SEQ ID NO: 5598735 - DNA, 25 bp, Homo sapien
agtgaacttccaaagacacaaagaa

SEQ ID NO: 5598736 - DNA, 25 bp, Homo sapien
ttccaaagacacaaagaaaatcctc

SEQ ID NO: 5598737 - DNA, 25 bp, Homo sapien
caaatatgagacccaatgacactaa

SEQ ID NO: 5598738 - DNA, 25 bp, Homo sapien
tcagctgactgtcagtgtgagccgc

SEQ ID NO: 5598739 - DNA, 25 bp, Homo sapien
caggcaggagttgatattccaggct

SEQ ID NO: 5598740 - DNA, 25 bp, Homo sapien
acggcgacacatacagctcagccat

SEQ ID NO: 5598741 - DNA, 25 bp, Homo sapien
caaactgcttaacacggtccagggc

SEQ ID NO: 5598742 - DNA, 25 bp, Homo sapien
tcccggtccatggctcgtggattca

SEQ ID NO: 5598743 - DNA, 25 bp, Homo sapien
gccctgcagggcctatcctgtcctc

SEQ ID NO: 5598744 - DNA, 25 bp, Homo sapien
ctttctgcttgcttgggagggcagg

SEQ ID NO: 5598745 - DNA, 25 bp, Homo sapien
agccatctcagaacgcaaggtggat

SEQ ID NO: 5598746 - DNA, 25 bp, Homo sapien
ggcccacacaattgtgcaggctggc

SEQ ID NO: 5598747 - DNA, 25 bp, Homo sapien
ggctcctgcattattgagggcgatc

SEQ ID NO: 5598748 - DNA, 25 bp, Homo sapien
caattctgcaatgtgaagggcaagc

SEQ ID NO: 5598749 - DNA, 25 bp, Homo sapien
ttcaagcccagggttgccagatctt

SEQ ID NO: 5598750 - DNA, 25 bp, Homo sapien
acagatgaaataaaacccaggccag

SEQ ID NO: 5598751 - DNA, 25 bp, Homo sapien
gtaaggcatcctgagtgcatgagtt

SEQ ID NO: 5598752 - DNA, 25 bp, Homo sapien
tatacaacagggacttctaagggtg

SEQ ID NO: 5598753 - DNA, 25 bp, Homo sapien
gggagataagcaacgtttaacagga

SEQ ID NO: 5598754 - DNA, 25 bp, Homo sapien
tagagttccatatgcagagacacac

SEQ ID NO: 5598755 - DNA, 25 bp, Homo sapien
ttaacaggagaaaattcaagcccag

SEQ ID NO: 5598756 - DNA, 25 bp, Homo sapien
catttggagggaatgtgccaataat

SEQ ID NO: 5598757 - DNA, 25 bp, Homo sapien
cccagagaagttggaaatcagggat

SEQ ID NO: 5598758 - DNA, 25 bp, Homo sapien
tgacacaggtctcaaactcagaggc

SEQ ID NO: 5598759 - DNA, 25 bp, Homo sapien
aggagaagagatgatgtctgtcatt

SEQ ID NO: 5598760 - DNA, 25 bp, Homo sapien
cttggcttctgatgcgtggagcctt

SEQ ID NO: 5598761 - DNA, 25 bp, Homo sapien
ttggagcaagctgactgctaacaac

SEQ ID NO: 5598762 - DNA, 25 bp, Homo sapien
ctgatgcgtggagcctttccgtttt

SEQ ID NO: 5598763 - DNA, 25 bp, Homo sapien
agtgcaagatagggattaaaaaata

SEQ ID NO: 5598764 - DNA, 25 bp, Homo sapien
tttagcaaaactgtggagtgcccaa

SEQ ID NO: 5598765 - DNA, 25 bp, Homo sapien
gcagacagggaagtctttagcaaaa

SEQ ID NO: 5598766 - DNA, 25 bp, Homo sapien
gttcatcctattggagcaagctgac

SEQ ID NO: 5598767 - DNA, 25 bp, Homo sapien
tggagtgcccaaagcttggcttctg

SEQ ID NO: 5598768 - DNA, 25 bp, Homo sapien
acatcccacccaagaaacctggtat

SEQ ID NO: 5598769 - DNA, 25 bp, Homo sapien
gagaataatgatactacccagcagg

SEQ ID NO: 5598770 - DNA, 25 bp, Homo sapien
acccagcaggttgttaccgctatgt

SEQ ID NO: 5598771 - DNA, 25 bp, Homo sapien
tatttaggtcataagagaactgctt

SEQ ID NO: 5598772 - DNA, 25 bp, Homo sapien
taatatgtagatgaatgggtatggc

SEQ ID NO: 5598773 - DNA, 25 bp, Homo sapien
gtgcagtggcagattccttaaagtt

SEQ ID NO: 5598774 - DNA, 25 bp, Homo sapien
tacaaaacaggcagctagcccttgc

SEQ ID NO: 5598775 - DNA, 25 bp, Homo sapien
ctcttcttcgggtccgtgcagtggc

SEQ ID NO: 5598776 - DNA, 25 bp, Homo sapien
ctgaaagcagccatcgataatatgt

SEQ ID NO: 5598777 - DNA, 25 bp, Homo sapien
agagaactgcttatgacatgtcagc

SEQ ID NO: 5598778 - DNA, 25 bp, Homo sapien
attttaggctttatggtttggtctc

SEQ ID NO: 5598779 - DNA, 25 bp, Homo sapien
tgccagtgtaccctgaaagcagcca

SEQ ID NO: 5598780 - DNA, 25 bp, Homo sapien
gcattggcaaatgttgtaaagggcc

SEQ ID NO: 5598781 - DNA, 25 bp, Homo sapien
gtttagacataacaccagagttccc

SEQ ID NO: 5598782 - DNA, 25 bp, Homo sapien
ttccgtctctatcgttgtgtgaacg

SEQ ID NO: 5598783 - DNA, 25 bp, Homo sapien
ctcaggtgttccaacagtccgtcca

SEQ ID NO: 5598784 - DNA, 25 bp, Homo sapien
ggcgactgcgatgagatttactgtc

SEQ ID NO: 5598785 - DNA, 25 bp, Homo sapien
gctgcagtggtaacttgctgagtgg

SEQ ID NO: 5598786 - DNA, 25 bp, Homo sapien
gtctgagatttgtcagcagggcctg

SEQ ID NO: 5598787 - DNA, 25 bp, Homo sapien
tggctcaagctgtcaggcatttttc

SEQ ID NO: 5598788 - DNA, 25 bp, Homo sapien
ctgttcctggcgtctgagatttgtc

SEQ ID NO: 5598789 - DNA, 25 bp, Homo sapien
gaatcgtcagcaccttaccatggtc

SEQ ID NO: 5598790 - DNA, 25 bp, Homo sapien
aacagtccgtccatctggctcaagc

SEQ ID NO: 5598791 - DNA, 25 bp, Homo sapien
tgtgtgaacggttttgtactgcttt

SEQ ID NO: 5598792 - DNA, 25 bp, Homo sapien
cttaccatggtcactgctgtccttt

SEQ ID NO: 5598793 - DNA, 25 bp, Homo sapien
cagaattgatgagaaaatagtaaaa

SEQ ID NO: 5598794 - DNA, 25 bp, Homo sapien
cactgacattgtccgtgggtccctg

SEQ ID NO: 5598795 - DNA, 25 bp, Homo sapien
acggaaaaagatccagaaaaagtca

SEQ ID NO: 5598796 - DNA, 25 bp, Homo sapien
actgatgcattgagaaacagctgat

SEQ ID NO: 5598797 - DNA, 25 bp, Homo sapien
agcaggaccacagatttttgggaaa

SEQ ID NO: 5598798 - DNA, 25 bp, Homo sapien
ctatcatgggatctggccttccagg

SEQ ID NO: 5598799 - DNA, 25 bp, Homo sapien
agtagtatggaccagatgcagtgtt

SEQ ID NO: 5598800 - DNA, 25 bp, Homo sapien
atctgcgaacaagtgactgatgcat

SEQ ID NO: 5598801 - DNA, 25 bp, Homo sapien
aaaggttaaagtagtatggaccaga

SEQ ID NO: 5598802 - DNA, 25 bp, Homo sapien
gtgggtccctgatgaacaaacaaga

SEQ ID NO: 5598803 - DNA, 25 bp, Homo sapien
gactgttttaagaagccacttccag

SEQ ID NO: 5598804 - DNA, 25 bp, Homo sapien
gccaccccaaatcccagtgccggag

SEQ ID NO: 5598805 - DNA, 25 bp, Homo sapien
ctgcctacgtcaccgccctcagtgc

SEQ ID NO: 5598806 - DNA, 25 bp, Homo sapien
cccagcagattcttctcggggaaga

SEQ ID NO: 5598807 - DNA, 25 bp, Homo sapien
cactgggtcccgccaccccaaatcc

SEQ ID NO: 5598808 - DNA, 25 bp, Homo sapien
cccaagcccccttatcccagcagat

SEQ ID NO: 5598809 - DNA, 25 bp, Homo sapien
cgcataaatgtttaggagtggagac

SEQ ID NO: 5598810 - DNA, 25 bp, Homo sapien
gtcaccgccctcagtgctgcccaca

SEQ ID NO: 5598811 - DNA, 25 bp, Homo sapien
aggatacagaacacataaatggaac

SEQ ID NO: 5598812 - DNA, 25 bp, Homo sapien
gccacccgctgccacccggtgtggc

SEQ ID NO: 5598813 - DNA, 25 bp, Homo sapien
ttttcacttggatcagctaattgcc

SEQ ID NO: 5598814 - DNA, 25 bp, Homo sapien
ggccacggctaatctgctctcagag

SEQ ID NO: 5598815 - DNA, 25 bp, Homo sapien
ttactctggccatctgatttgttgc

SEQ ID NO: 5598816 - DNA, 25 bp, Homo sapien
cagttaatcatgacaagtccttgcc

SEQ ID NO: 5598817 - DNA, 25 bp, Homo sapien
ttccccagcataggtttccaggaca

SEQ ID NO: 5598818 - DNA, 25 bp, Homo sapien
agcttcctcatctgagactgacttt

SEQ ID NO: 5598819 - DNA, 25 bp, Homo sapien
tagaatactcctatgaatgtgagaa

SEQ ID NO: 5598820 - DNA, 25 bp, Homo sapien
ttccaaagaatgaaatctcagccat

SEQ ID NO: 5598821 - DNA, 25 bp, Homo sapien
gaactttgtgaatacttacagcttc

SEQ ID NO: 5598822 - DNA, 25 bp, Homo sapien
aggtttccaggacaagagttcttaa

SEQ ID NO: 5598823 - DNA, 25 bp, Homo sapien
caaatcctattggtgctttccccag

SEQ ID NO: 5598824 - DNA, 25 bp, Homo sapien
cagtccttaacatcccatcaatatc

SEQ ID NO: 5598825 - DNA, 25 bp, Homo sapien
ttcatgtttgaaggagtatcttctc

SEQ ID NO: 5598826 - DNA, 25 bp, Homo sapien
tggtgctcagatggtgagagcactg

SEQ ID NO: 5598827 - DNA, 25 bp, Homo sapien
ggtgctcagatggtgagagcactgt

SEQ ID NO: 5598828 - DNA, 25 bp, Homo sapien
gcttccagagaggaagcacctcttc

SEQ ID NO: 5598829 - DNA, 25 bp, Homo sapien
agagaggaagcacctcttcctagac

SEQ ID NO: 5598830 - DNA, 25 bp, Homo sapien
ccatggccccctccgactcccagga

SEQ ID NO: 5598831 - DNA, 25 bp, Homo sapien
ttccagagaggaagcacctcttcct

SEQ ID NO: 5598832 - DNA, 25 bp, Homo sapien
aggggttaccattctgcttggggga

SEQ ID NO: 5598833 - DNA, 25 bp, Homo sapien
ttaccattctgcttgggggatcagc

SEQ ID NO: 5598834 - DNA, 25 bp, Homo sapien
gggttaccattctgcttgggggatc

SEQ ID NO: 5598835 - DNA, 25 bp, Homo sapien
ctgcttccagagaggaagcacctct

SEQ ID NO: 5598836 - DNA, 25 bp, Homo sapien
cttgggggatcagcatcacccattc

SEQ ID NO: 5598837 - DNA, 25 bp, Homo sapien
aatctgtacagcaggcagttaggag

SEQ ID NO: 5598838 - DNA, 25 bp, Homo sapien
agaagctcctggagacagaaaagtc

SEQ ID NO: 5598839 - DNA, 25 bp, Homo sapien
aaagtcctgacaagagagcagatgt

SEQ ID NO: 5598840 - DNA, 25 bp, Homo sapien
ggcaggaacatcttggcggtcatta

SEQ ID NO: 5598841 - DNA, 25 bp, Homo sapien
cccagattatctaggagagtctccc

SEQ ID NO: 5598842 - DNA, 25 bp, Homo sapien
acatattcataggttctggggatta

SEQ ID NO: 5598843 - DNA, 25 bp, Homo sapien
tccactgattgaaatagacccaccc

SEQ ID NO: 5598844 - DNA, 25 bp, Homo sapien
agtatctgcaaagttgagaagctcc

SEQ ID NO: 5598845 - DNA, 25 bp, Homo sapien
acgtggctggacaagtccaaaatct

SEQ ID NO: 5598846 - DNA, 25 bp, Homo sapien
gggcataagctgaagctgctgtcct

SEQ ID NO: 5598847 - DNA, 25 bp, Homo sapien
atctcacggaagactcaactctgct

SEQ ID NO: 5598848 - DNA, 25 bp, Homo sapien
gtgaagccaaatgaagacgtgctaa

SEQ ID NO: 5598849 - DNA, 25 bp, Homo sapien
cacaggagaggcaatattaaggtga

SEQ ID NO: 5598850 - DNA, 25 bp, Homo sapien
aaagcaaaggacttcaagagaatat

SEQ ID NO: 5598851 - DNA, 25 bp, Homo sapien
aagggaagagaatatttaacagtgt

SEQ ID NO: 5598852 - DNA, 25 bp, Homo sapien
ttcttctgcagtgaggaaagtacac

SEQ ID NO: 5598853 - DNA, 25 bp, Homo sapien
acagtgtatgaacttgaacaagggc

SEQ ID NO: 5598854 - DNA, 25 bp, Homo sapien
agccccagaaatggttgctgttggt

SEQ ID NO: 5598855 - DNA, 25 bp, Homo sapien
tgacataaaagcttacagaaggcca

SEQ ID NO: 5598856 - DNA, 25 bp, Homo sapien
tcatatgtgaacaaaggcgagacta

SEQ ID NO: 5598857 - DNA, 25 bp, Homo sapien
agaaggccagaaattacagccccag

SEQ ID NO: 5598858 - DNA, 25 bp, Homo sapien
acaagggcaatatgaaaagcaaagg

SEQ ID NO: 5598859 - DNA, 25 bp, Homo sapien
catacatgaatgtgctatccaacgt

SEQ ID NO: 5598860 - DNA, 25 bp, Homo sapien
aagagaaggctccaatgctaccctc

SEQ ID NO: 5598861 - DNA, 25 bp, Homo sapien
gtgctatccaacgtaagagaaggct

SEQ ID NO: 5598862 - DNA, 25 bp, Homo sapien
ctgtcctcctctagaggtggtcacc

SEQ ID NO: 5598863 - DNA, 25 bp, Homo sapien
tctagagattatgtttctgagattt

SEQ ID NO: 5598864 - DNA, 25 bp, Homo sapien
tgttagctctaaagaagagtagtaa

SEQ ID NO: 5598865 - DNA, 25 bp, Homo sapien
actgttggttttccctgcctttgac

SEQ ID NO: 5598866 - DNA, 25 bp, Homo sapien
gaggtggtcaccattatgctgaatt

SEQ ID NO: 5598867 - DNA, 25 bp, Homo sapien
aatggaatcacactgtaggtatttc

SEQ ID NO: 5598868 - DNA, 25 bp, Homo sapien
gttttatcagagatgtccatattcc

SEQ ID NO: 5598869 - DNA, 25 bp, Homo sapien
attcctacacaagatactgttggtt

SEQ ID NO: 5598870 - DNA, 25 bp, Homo sapien
caaaagagagttttcccagacttta

SEQ ID NO: 5598871 - DNA, 25 bp, Homo sapien
gaaatgaataataaagcagccactt

SEQ ID NO: 5598872 - DNA, 25 bp, Homo sapien
tagtggagcttttaaatacagtgta

SEQ ID NO: 5598873 - DNA, 25 bp, Homo sapien
tcccagactttaaatgagaaaagag

SEQ ID NO: 5598874 - DNA, 25 bp, Homo sapien
tccttaccataaaactcatacacat

SEQ ID NO: 5598875 - DNA, 25 bp, Homo sapien
atgagaaaagagaggtttccatgga

SEQ ID NO: 5598876 - DNA, 25 bp, Homo sapien
catgtgacacagcacgtctaacttc

SEQ ID NO: 5598877 - DNA, 25 bp, Homo sapien
tcatacacatgtgacacagcacgtc

SEQ ID NO: 5598878 - DNA, 25 bp, Homo sapien
taacacaacaacaactggaaagtcc

SEQ ID NO: 5598879 - DNA, 25 bp, Homo sapien
taataaagcagccacttcttcagga

SEQ ID NO: 5598880 - DNA, 25 bp, Homo sapien
aataaattctcttagtggagctttt

SEQ ID NO: 5598881 - DNA, 25 bp, Homo sapien
tcatagctgcagtctagccgtgaca

SEQ ID NO: 5598882 - DNA, 25 bp, Homo sapien
gtatcgtaagccccattgtacagat

SEQ ID NO: 5598883 - DNA, 25 bp, Homo sapien
ctcttggatttgaagccagatctgt

SEQ ID NO: 5598884 - DNA, 25 bp, Homo sapien
aaccctatgaggtagtagtatcgta

SEQ ID NO: 5598885 - DNA, 25 bp, Homo sapien
acacagcaagtgcatggcaactctt

SEQ ID NO: 5598886 - DNA, 25 bp, Homo sapien
gcaactcttggatttgaagccagat

SEQ ID NO: 5598887 - DNA, 25 bp, Homo sapien
gaagccagatctgtctcatagctgc

SEQ ID NO: 5598888 - DNA, 25 bp, Homo sapien
ccgtgacacctgagtgcctcctaaa

SEQ ID NO: 5598889 - DNA, 25 bp, Homo sapien
gaggtagtagtatcgtaagccccat

SEQ ID NO: 5598890 - DNA, 25 bp, Homo sapien
tctcatagctgcagtctagccgtga

SEQ ID NO: 5598891 - DNA, 25 bp, Homo sapien
ctatgaggtagtagtatcgtaagcc

SEQ ID NO: 5598892 - DNA, 25 bp, Homo sapien
aggcaaagatagtaagatgacagtt

SEQ ID NO: 5598893 - DNA, 25 bp, Homo sapien
gggtgaacaagaatattcaagccac

SEQ ID NO: 5598894 - DNA, 25 bp, Homo sapien
tatcatggtattaaggtaggtagct

SEQ ID NO: 5598895 - DNA, 25 bp, Homo sapien
ttgcagagttgcaaagccacatctc

SEQ ID NO: 5598896 - DNA, 25 bp, Homo sapien
tcaggggtcctgaaaatctcattta

SEQ ID NO: 5598897 - DNA, 25 bp, Homo sapien
atggatgctcatattggaaaagttt

SEQ ID NO: 5598898 - DNA, 25 bp, Homo sapien
catgtagattttcaggggtcgtttc

SEQ ID NO: 5598899 - DNA, 25 bp, Homo sapien
ttttgaggtataagacaatggttat

SEQ ID NO: 5598900 - DNA, 25 bp, Homo sapien
ggtaggtagctagacatatgcatat

SEQ ID NO: 5598901 - DNA, 25 bp, Homo sapien
gcatgtcttgcccctggaaatatcc

SEQ ID NO: 5598902 - DNA, 25 bp, Homo sapien
cacttagatcctaggcaaagatagt

SEQ ID NO: 5598903 - DNA, 25 bp, Homo sapien
ggccgtgggtcgcgtccacggccgt

SEQ ID NO: 5598904 - DNA, 25 bp, Homo sapien
acggccgtggacgcgacccacggcc

SEQ ID NO: 5598905 - DNA, 25 bp, Homo sapien
gccatcgcacccagcagattttttt

SEQ ID NO: 5598906 - DNA, 25 bp, Homo sapien
taattcacgtgtctgggttaagagc

SEQ ID NO: 5598907 - DNA, 25 bp, Homo sapien
gtgtgaatgtagacttctgcatggc

SEQ ID NO: 5598908 - DNA, 25 bp, Homo sapien
cgtacataattcacgtgtctgggtt

SEQ ID NO: 5598909 - DNA, 25 bp, Homo sapien
accaaaggtatagacagaagaaaag

SEQ ID NO: 5598910 - DNA, 25 bp, Homo sapien
agtggctggaacacaacgtacataa

SEQ ID NO: 5598911 - DNA, 25 bp, Homo sapien
tcttaaggaccaaaggtatagacag

SEQ ID NO: 5598912 - DNA, 25 bp, Homo sapien
ctgcatggcagttcttaacagaaaa

SEQ ID NO: 5598913 - DNA, 25 bp, Homo sapien
tctcagtgtgaatgtagacttctgc

SEQ ID NO: 5598914 - DNA, 25 bp, Homo sapien
taggaggtagcaagctttggttctt

SEQ ID NO: 5598915 - DNA, 25 bp, Homo sapien
tgtctgggttaagagctctgatgta

SEQ ID NO: 5598916 - DNA, 25 bp, Homo sapien
gtgagccactaagtcgctccgtcgg

SEQ ID NO: 5598917 - DNA, 25 bp, Homo sapien
ccgacggagcgacttagtggctcac

SEQ ID NO: 5598918 - DNA, 25 bp, Homo sapien
accagtacattgtgaaaagcgcaaa

SEQ ID NO: 5598919 - DNA, 25 bp, Homo sapien
ttgaagagagattagtatgatgaaa

SEQ ID NO: 5598920 - DNA, 25 bp, Homo sapien
aatggagactaagttctgacatggt

SEQ ID NO: 5598921 - DNA, 25 bp, Homo sapien
agcaaacgagttatgacgtacctgc

SEQ ID NO: 5598922 - DNA, 25 bp, Homo sapien
gaagaccgtatgaaacagatggttt

SEQ ID NO: 5598923 - DNA, 25 bp, Homo sapien
tatgatgaaaactgtgaccgtgtac

SEQ ID NO: 5598924 - DNA, 25 bp, Homo sapien
aagcgcaaaatgactgaagaccgta

SEQ ID NO: 5598925 - DNA, 25 bp, Homo sapien
gaaaatagaagcaaacgagttatga

SEQ ID NO: 5598926 - DNA, 25 bp, Homo sapien
ttacccatggtgcctaacggtgggc

SEQ ID NO: 5598927 - DNA, 25 bp, Homo sapien
ggtgggcttggcatttaatggagac

SEQ ID NO: 5598928 - DNA, 25 bp, Homo sapien
aatcaaacaatgtctagatgcttcc

SEQ ID NO: 5598929 - DNA, 25 bp, Homo sapien
ggtgcacatgtgatcatcctgcttc

SEQ ID NO: 5598930 - DNA, 25 bp, Homo sapien
tacatcagagacatacatcagaggc

SEQ ID NO: 5598931 - DNA, 25 bp, Homo sapien
agttgtaaggtgtagattctgattc

SEQ ID NO: 5598932 - DNA, 25 bp, Homo sapien
gagggatgggtctgtaccccatgtt

SEQ ID NO: 5598933 - DNA, 25 bp, Homo sapien
aatatcaggtataccagaggagctc

SEQ ID NO: 5598934 - DNA, 25 bp, Homo sapien
ccaacggtaatgtgcgtgtacatca

SEQ ID NO: 5598935 - DNA, 25 bp, Homo sapien
agcaacaggtcaatatgatgacttc

SEQ ID NO: 5598936 - DNA, 25 bp, Homo sapien
aacagggcattactgagcaacaggt

SEQ ID NO: 5598937 - DNA, 25 bp, Homo sapien
cgtgtacatcacctgggaaagttgt

SEQ ID NO: 5598938 - DNA, 25 bp, Homo sapien
gaatcaaacaggggattctgacagg

SEQ ID NO: 5598939 - DNA, 25 bp, Homo sapien
ctgaccacagaacagggcattactg

SEQ ID NO: 5598940 - DNA, 25 bp, Homo sapien
gcgtctggtggctctcactgtgact

SEQ ID NO: 5598941 - DNA, 25 bp, Homo sapien
cagcgtctggtggctctcactgtga

SEQ ID NO: 5598942 - DNA, 25 bp, Homo sapien
aaaggcaaccgatcacgctttgctc

SEQ ID NO: 5598943 - DNA, 25 bp, Homo sapien
atgagtgctgcttttagagttggaa

SEQ ID NO: 5598944 - DNA, 25 bp, Homo sapien
accgatcacgctttgctcccccctt

SEQ ID NO: 5598945 - DNA, 25 bp, Homo sapien
gtggttaggcggccttgacatgttg

SEQ ID NO: 5598946 - DNA, 25 bp, Homo sapien
tggttaggcggccttgacatgttgc

SEQ ID NO: 5598947 - DNA, 25 bp, Homo sapien
ccaaatgagtgctgcttttagagtt

SEQ ID NO: 5598948 - DNA, 25 bp, Homo sapien
ttataaaaggcaaccgatcacgctt

SEQ ID NO: 5598949 - DNA, 25 bp, Homo sapien
gaattataaaaggcaaccgatcacg

SEQ ID NO: 5598950 - DNA, 25 bp, Homo sapien
ttaaccaaatgagtgctgcttttag

SEQ ID NO: 5598951 - DNA, 25 bp, Homo sapien
taacatgcctagacagagaagaaca

SEQ ID NO: 5598952 - DNA, 25 bp, Homo sapien
aggagatgtttaaggaggtgtccta

SEQ ID NO: 5598953 - DNA, 25 bp, Homo sapien
agtgtaacctgcaggctctggatgt

SEQ ID NO: 5598954 - DNA, 25 bp, Homo sapien
gagtggaaataggattctgtgctcc

SEQ ID NO: 5598955 - DNA, 25 bp, Homo sapien
gtgagaggagaagatattattgtta

SEQ ID NO: 5598956 - DNA, 25 bp, Homo sapien
acatgtgtacatatcgcagcggcag

SEQ ID NO: 5598957 - DNA, 25 bp, Homo sapien
caagagtccctgagtgtaacctgca

SEQ ID NO: 5598958 - DNA, 25 bp, Homo sapien
gaaagtgctgggaaactagtcattt

SEQ ID NO: 5598959 - DNA, 25 bp, Homo sapien
tcaactatgatgatgagagtgggaa

SEQ ID NO: 5598960 - DNA, 25 bp, Homo sapien
gcagcgggcttcagcgatattattc

SEQ ID NO: 5598961 - DNA, 25 bp, Homo sapien
tggatgtggatgacaggtatccatg

SEQ ID NO: 5598962 - DNA, 25 bp, Homo sapien
tctgctatgccatgacccccgactg

SEQ ID NO: 5598963 - DNA, 25 bp, Homo sapien
catgacccccgactggcattgcttt

SEQ ID NO: 5598964 - DNA, 25 bp, Homo sapien
gaaatgtgaaatgctacaaactctg

SEQ ID NO: 5598965 - DNA, 25 bp, Homo sapien
gctgacactgaccaccctggagctg

SEQ ID NO: 5598966 - DNA, 25 bp, Homo sapien
aatccaaaaacgtctaaaatctgaa

SEQ ID NO: 5598967 - DNA, 25 bp, Homo sapien
aactctgaagtttttgggcacaaaa

SEQ ID NO: 5598968 - DNA, 25 bp, Homo sapien
ttctgacaatatggtctgctatgcc

SEQ ID NO: 5598969 - DNA, 25 bp, Homo sapien
agattagtgatgctgaaatgttaac

SEQ ID NO: 5598970 - DNA, 25 bp, Homo sapien
cttcccacgactgggcaaaggaagg

SEQ ID NO: 5598971 - DNA, 25 bp, Homo sapien
agggcttccatagaaaagagacata

SEQ ID NO: 5598972 - DNA, 25 bp, Homo sapien
gaaaagagacataagttgagtatcc

SEQ ID NO: 5598973 - DNA, 25 bp, Homo sapien
aaaccccaggttctagctttcactc

SEQ ID NO: 5598974 - DNA, 25 bp, Homo sapien
ttaagctactgtgtatgtctgtacc

SEQ ID NO: 5598975 - DNA, 25 bp, Homo sapien
tccacaaggtaacaaactaaggctg

SEQ ID NO: 5598976 - DNA, 25 bp, Homo sapien
ctaaggctgtcatggatgcacacta

SEQ ID NO: 5598977 - DNA, 25 bp, Homo sapien
gtgacacatgctgcacaacaaaccc

SEQ ID NO: 5598978 - DNA, 25 bp, Homo sapien
taaaagtgccaaacgctagcagatc

SEQ ID NO: 5598979 - DNA, 25 bp, Homo sapien
ggatgcacactagggtttgcaagtt

SEQ ID NO: 5598980 - DNA, 25 bp, Homo sapien
ctgcatccacaggagccctctgagg

SEQ ID NO: 5598981 - DNA, 25 bp, Homo sapien
ggccactctgcctcctagtcaccgt

SEQ ID NO: 5598982 - DNA, 25 bp, Homo sapien
ctagtcaccgtgaggcttgttatta

SEQ ID NO: 5598983 - DNA, 25 bp, Homo sapien
accttttgtaacatggacctgctgt

SEQ ID NO: 5598984 - DNA, 25 bp, Homo sapien
gcaacaggcctaggtcaatcatttc

SEQ ID NO: 5598985 - DNA, 25 bp, Homo sapien
aaaatgttatcaggtgtataaatac

SEQ ID NO: 5598986 - DNA, 25 bp, Homo sapien
cttacagaagactaaaacaacaaat

SEQ ID NO: 5598987 - DNA, 25 bp, Homo sapien
gatcagagtagactcaaaatgttat

SEQ ID NO: 5598988 - DNA, 25 bp, Homo sapien
aagcatgtacaaagtcgttcactta

SEQ ID NO: 5598989 - DNA, 25 bp, Homo sapien
atgttagaaatagaagtaagctttt

SEQ ID NO: 5598990 - DNA, 25 bp, Homo sapien
gcttttaatgcaacaggcctaggtc

SEQ ID NO: 5598991 - DNA, 25 bp, Homo sapien
aaagatacaaaagataaccgtcaat

SEQ ID NO: 5598992 - DNA, 25 bp, Homo sapien
catttctgctaaagtgtgcctcaaa

SEQ ID NO: 5598993 - DNA, 25 bp, Homo sapien
aacctaaataaacgattctgtgatc

SEQ ID NO: 5598994 - DNA, 25 bp, Homo sapien
aacgattctgtgatcagagtagact

SEQ ID NO: 5598995 - DNA, 25 bp, Homo sapien
tttgccatcacagtaggtgtcctac

SEQ ID NO: 5598996 - DNA, 25 bp, Homo sapien
gggtcgacaggcttgcactattcct

SEQ ID NO: 5598997 - DNA, 25 bp, Homo sapien
taatatgggagaatatcatagtctc

SEQ ID NO: 5598998 - DNA, 25 bp, Homo sapien
tctcaaattgacaccagctacctct

SEQ ID NO: 5598999 - DNA, 25 bp, Homo sapien
tttaaggcaaccagcgctctcaaaa

SEQ ID NO: 5599000 - DNA, 25 bp, Homo sapien
tagaaaatatcagggtcatagagtc

SEQ ID NO: 5599001 - DNA, 25 bp, Homo sapien
tccaagctcagcatgtgtattaact

SEQ ID NO: 5599002 - DNA, 25 bp, Homo sapien
gtcatagagtcaaagaaacagaagg

SEQ ID NO: 5599003 - DNA, 25 bp, Homo sapien
tgagatactgattttaaggcaacca

SEQ ID NO: 5599004 - DNA, 25 bp, Homo sapien
cctacattgaggaaaatcagtgttt

SEQ ID NO: 5599005 - DNA, 25 bp, Homo sapien
ctgggcccatgtgatgctcccactt

SEQ ID NO: 5599006 - DNA, 25 bp, Homo sapien
ttggcttccacaagggcattctaat

SEQ ID NO: 5599007 - DNA, 25 bp, Homo sapien
tcaaaagaaaagttcatctggaata

SEQ ID NO: 5599008 - DNA, 25 bp, Homo sapien
actgtagtagccaatggcacttctt

SEQ ID NO: 5599009 - DNA, 25 bp, Homo sapien
tcccttcaaaaagttcggcgacatc

SEQ ID NO: 5599010 - DNA, 25 bp, Homo sapien
ttactctcagcaaaatttccccatt

SEQ ID NO: 5599011 - DNA, 25 bp, Homo sapien
caagggaaatcggcaaagttgattt

SEQ ID NO: 5599012 - DNA, 25 bp, Homo sapien
tcatctggaataagtcctgtgactg

SEQ ID NO: 5599013 - DNA, 25 bp, Homo sapien
aaaaagtggctggtttcaaagcata

SEQ ID NO: 5599014 - DNA, 25 bp, Homo sapien
tgggattaccacttagagtggcctc

SEQ ID NO: 5599015 - DNA, 25 bp, Homo sapien
caaagcatatggcctgtagtttttc

SEQ ID NO: 5599016 - DNA, 25 bp, Homo sapien
gttcggcgacatctttactctcagc

SEQ ID NO: 5599017 - DNA, 25 bp, Homo sapien
ttacagaaagaattgcttaagcctg

SEQ ID NO: 5599018 - DNA, 25 bp, Homo sapien
ttgctctgttgaattggtgctaacc

SEQ ID NO: 5599019 - DNA, 25 bp, Homo sapien
atcgacttaaatggatcttagctat

SEQ ID NO: 5599020 - DNA, 25 bp, Homo sapien
aactttgtcatcttaggctagcctt

SEQ ID NO: 5599021 - DNA, 25 bp, Homo sapien
gtcagatgttaacttgcagaaaata

SEQ ID NO: 5599022 - DNA, 25 bp, Homo sapien
tagggccttgtctcaacaaagtcag

SEQ ID NO: 5599023 - DNA, 25 bp, Homo sapien
agcctggtctagaatattatcaaat

SEQ ID NO: 5599024 - DNA, 25 bp, Homo sapien
tgtattattgattagggccttgtct

SEQ ID NO: 5599025 - DNA, 25 bp, Homo sapien
atcccgcggtttagcattatcgact

SEQ ID NO: 5599026 - DNA, 25 bp, Homo sapien
cggcccacaaggctggaaatactta

SEQ ID NO: 5599027 - DNA, 25 bp, Homo sapien
ttaaccagcattactatcccgcggt

SEQ ID NO: 5599028 - DNA, 25 bp, Homo sapien
aattcactccaattctaaaactctt

SEQ ID NO: 5599029 - DNA, 25 bp, Homo sapien
aagagttttagaattggagtgaatt

SEQ ID NO: 5599030 - DNA, 25 bp, Homo sapien
ttttggcttggattcaggcagcaga

SEQ ID NO: 5599031 - DNA, 25 bp, Homo sapien
actacaaagcgacccgttatttctc

SEQ ID NO: 5599032 - DNA, 25 bp, Homo sapien
gttgactatgacagctggcaggaaa

SEQ ID NO: 5599033 - DNA, 25 bp, Homo sapien
cacactgcaataacataaagagggg

SEQ ID NO: 5599034 - DNA, 25 bp, Homo sapien
gacactcccccacgctacctcccac

SEQ ID NO: 5599035 - DNA, 25 bp, Homo sapien
aactgaggggagaatacatcctccc

SEQ ID NO: 5599036 - DNA, 25 bp, Homo sapien
ctggttatataaaagacactccccc

SEQ ID NO: 5599037 - DNA, 25 bp, Homo sapien
ccaggctgacagcatgcttagttct

SEQ ID NO: 5599038 - DNA, 25 bp, Homo sapien
cttgcaagagtgccaagtgtctgtc

SEQ ID NO: 5599039 - DNA, 25 bp, Homo sapien
ataaagaggggcttactattaatcc

SEQ ID NO: 5599040 - DNA, 25 bp, Homo sapien
tagtttcttagagttggtcacagtc

SEQ ID NO: 5599041 - DNA, 25 bp, Homo sapien
gctgattgcaatttgggggtttccc

SEQ ID NO: 5599042 - DNA, 25 bp, Homo sapien
gttcccaggtctataggctccctcc

SEQ ID NO: 5599043 - DNA, 25 bp, Homo sapien
tgttaggctctgccaatagagggac

SEQ ID NO: 5599044 - DNA, 25 bp, Homo sapien
ttgctgtttccttcggatgggtttc

SEQ ID NO: 5599045 - DNA, 25 bp, Homo sapien
cacttcacaggtagagaaggaagaa

SEQ ID NO: 5599046 - DNA, 25 bp, Homo sapien
aatgtgccttcttgagatgccagct

SEQ ID NO: 5599047 - DNA, 25 bp, Homo sapien
tcccagaaaatgtctacatgcaccc

SEQ ID NO: 5599048 - DNA, 25 bp, Homo sapien
cactccgaaagcaatagtgcctgct

SEQ ID NO: 5599049 - DNA, 25 bp, Homo sapien
agtgcctgctagtagtagcagctga

SEQ ID NO: 5599050 - DNA, 25 bp, Homo sapien
gggaccagcgtgacacttcacaggt

SEQ ID NO: 5599051 - DNA, 25 bp, Homo sapien
aggcaagcagtgacctgttctcaaa

SEQ ID NO: 5599052 - DNA, 25 bp, Homo sapien
atccaactaggagtggatggacaaa

SEQ ID NO: 5599053 - DNA, 25 bp, Homo sapien
acactctactggatcaggagaatac

SEQ ID NO: 5599054 - DNA, 25 bp, Homo sapien
caggagaatactctgatgaggtctc

SEQ ID NO: 5599055 - DNA, 25 bp, Homo sapien
tggatggacaaaaacctaggctttg

SEQ ID NO: 5599056 - DNA, 25 bp, Homo sapien
taggctttgactccacacaccacac

SEQ ID NO: 5599057 - DNA, 25 bp, Homo sapien
caaaacagccagtgtggttaattac

SEQ ID NO: 5599058 - DNA, 25 bp, Homo sapien
gggcagacaattagcatcgccattt

SEQ ID NO: 5599059 - DNA, 25 bp, Homo sapien
tctgtagcatagatgatgccctcac

SEQ ID NO: 5599060 - DNA, 25 bp, Homo sapien
ttgagtttgaagagcctgtcgtttg

SEQ ID NO: 5599061 - DNA, 25 bp, Homo sapien
taacacttggtgctagatgctttac

SEQ ID NO: 5599062 - DNA, 25 bp, Homo sapien
atcaccagcgaaaaaaccatactca

SEQ ID NO: 5599063 - DNA, 25 bp, Homo sapien
ttttggtggtacataatacaatatt

SEQ ID NO: 5599064 - DNA, 25 bp, Homo sapien
aatggaagctaaaagactacagaat

SEQ ID NO: 5599065 - DNA, 25 bp, Homo sapien
aagaactattgcatcactaaggttt

SEQ ID NO: 5599066 - DNA, 25 bp, Homo sapien
aagactacagaataatgctgtttcc

SEQ ID NO: 5599067 - DNA, 25 bp, Homo sapien
gacatcacagtttccctaatagacc

SEQ ID NO: 5599068 - DNA, 25 bp, Homo sapien
agttactgcctgcttacatgcaaac

SEQ ID NO: 5599069 - DNA, 25 bp, Homo sapien
aaaacttgccaaactgatgacgatg

SEQ ID NO: 5599070 - DNA, 25 bp, Homo sapien
aaaagcacctgtatcaaaacttgcc

SEQ ID NO: 5599071 - DNA, 25 bp, Homo sapien
caaactgatgacgatggattaacgg

SEQ ID NO: 5599072 - DNA, 25 bp, Homo sapien
tcagaaaatgaaagacatcacagtt

SEQ ID NO: 5599073 - DNA, 25 bp, Homo sapien
tgctgtgacataatagttactgcct

SEQ ID NO: 5599074 - DNA, 25 bp, Homo sapien
tgtggtactgtggtttctctggtgc

SEQ ID NO: 5599075 - DNA, 25 bp, Homo sapien
aattagagatgtatgtttggtcctt

SEQ ID NO: 5599076 - DNA, 25 bp, Homo sapien
actgctctgagtcaggtgagacaga

SEQ ID NO: 5599077 - DNA, 25 bp, Homo sapien
aagagaagactttcacctatcatcc

SEQ ID NO: 5599078 - DNA, 25 bp, Homo sapien
gccccatgaaaagccagaacattgg

SEQ ID NO: 5599079 - DNA, 25 bp, Homo sapien
acagaaaccaattcctcaggcagcc

SEQ ID NO: 5599080 - DNA, 25 bp, Homo sapien
gccagaacattggatgtgtgttccc

SEQ ID NO: 5599081 - DNA, 25 bp, Homo sapien
ggtgcttccacaaactccagagctc

SEQ ID NO: 5599082 - DNA, 25 bp, Homo sapien
tagtgacccctaggcatccaaagta

SEQ ID NO: 5599083 - DNA, 25 bp, Homo sapien
tttgggggcatgcattttctctgga

SEQ ID NO: 5599084 - DNA, 25 bp, Homo sapien
ggactggtttcatacaagagaagac

SEQ ID NO: 5599085 - DNA, 25 bp, Homo sapien
tcctctgccagggactaaacaagaa

SEQ ID NO: 5599086 - DNA, 25 bp, Homo sapien
tggctaattgagcttgaacggatta

SEQ ID NO: 5599087 - DNA, 25 bp, Homo sapien
tgattaccagaaatccaacaggtgg

SEQ ID NO: 5599088 - DNA, 25 bp, Homo sapien
cagatactgtcgtctatggatagat

SEQ ID NO: 5599089 - DNA, 25 bp, Homo sapien
gtctatggatagattcttatgccct

SEQ ID NO: 5599090 - DNA, 25 bp, Homo sapien
ttgaacggattaaaggcatcatatc

SEQ ID NO: 5599091 - DNA, 25 bp, Homo sapien
caagtcatttaattagcaaaggtaa

SEQ ID NO: 5599092 - DNA, 25 bp, Homo sapien
cagggactaaacaagaacttaggaa

SEQ ID NO: 5599093 - DNA, 25 bp, Homo sapien
ttaagattagtcagatactgtcgtc

SEQ ID NO: 5599094 - DNA, 25 bp, Homo sapien
tgagcttgaacggattaaaggcatc

SEQ ID NO: 5599095 - DNA, 25 bp, Homo sapien
gcaaaggtaaatggctaattgagct

SEQ ID NO: 5599096 - DNA, 25 bp, Homo sapien
ctgccatggcttaagctgacaaagc

SEQ ID NO: 5599097 - DNA, 25 bp, Homo sapien
agtatcgttaactgaagggacaagg

SEQ ID NO: 5599098 - DNA, 25 bp, Homo sapien
gtctgaccccatgagcggctcaata

SEQ ID NO: 5599099 - DNA, 25 bp, Homo sapien
tcccaggcaacctttcaggcaaatt

SEQ ID NO: 5599100 - DNA, 25 bp, Homo sapien
aggccctatggacaagaggttctca

SEQ ID NO: 5599101 - DNA, 25 bp, Homo sapien
taaaagccttgattcccaggcaacc

SEQ ID NO: 5599102 - DNA, 25 bp, Homo sapien
aaagcaaactccaagcagaatggct

SEQ ID NO: 5599103 - DNA, 25 bp, Homo sapien
tcaggcaaattgaatcagaacctct

SEQ ID NO: 5599104 - DNA, 25 bp, Homo sapien
gctcattaggattacctgggcagct

SEQ ID NO: 5599105 - DNA, 25 bp, Homo sapien
agaggattttagccttagatggtgt

SEQ ID NO: 5599106 - DNA, 25 bp, Homo sapien
tccaagcagaatggctgcaaagcag

SEQ ID NO: 5599107 - DNA, 25 bp, Homo sapien
catctgaaaaattaggaggttggat

SEQ ID NO: 5599108 - DNA, 25 bp, Homo sapien
gtgcattaggatagtaattgctccc

SEQ ID NO: 5599109 - DNA, 25 bp, Homo sapien
acctgagccactaactaataggacc

SEQ ID NO: 5599110 - DNA, 25 bp, Homo sapien
ggtacagtgaggaataggtattttg

SEQ ID NO: 5599111 - DNA, 25 bp, Homo sapien
gtgcataccttcaatagagctctct

SEQ ID NO: 5599112 - DNA, 25 bp, Homo sapien
aaaggcacctctgtgggccttggtc

SEQ ID NO: 5599113 - DNA, 25 bp, Homo sapien
ttaggaggttggattaaatgatttc

SEQ ID NO: 5599114 - DNA, 25 bp, Homo sapien
ttcctcctggccatcagagtggtac

SEQ ID NO: 5599115 - DNA, 25 bp, Homo sapien
agagatttgcattctggtccacctg

SEQ ID NO: 5599116 - DNA, 25 bp, Homo sapien
ctaataggacctgggcaaatcaaag

SEQ ID NO: 5599117 - DNA, 25 bp, Homo sapien
ttactactgttaggcttggctctcc

SEQ ID NO: 5599118 - DNA, 25 bp, Homo sapien
actaacatttaggatcaacattatc

SEQ ID NO: 5599119 - DNA, 25 bp, Homo sapien
tagctatcgatgaagaattgaagat

SEQ ID NO: 5599120 - DNA, 25 bp, Homo sapien
cattgacatacacatgattgattca

SEQ ID NO: 5599121 - DNA, 25 bp, Homo sapien
attatcccctatgattggcattgtc

SEQ ID NO: 5599122 - DNA, 25 bp, Homo sapien
ctccattgagtgttatgaaatcaac

SEQ ID NO: 5599123 - DNA, 25 bp, Homo sapien
atgcctctctgagactggcttctcc

SEQ ID NO: 5599124 - DNA, 25 bp, Homo sapien
aaaatagataaaagtgaattccatc

SEQ ID NO: 5599125 - DNA, 25 bp, Homo sapien
aggttaatgattaaaagtagctatc

SEQ ID NO: 5599126 - DNA, 25 bp, Homo sapien
gtcttccagtctagcaccatgcctc

SEQ ID NO: 5599127 - DNA, 25 bp, Homo sapien
tcaaagatccacaccagaaaaaaca

SEQ ID NO: 5599128 - DNA, 25 bp, Homo sapien
gatccacaccagaaaaaacatgaaa

SEQ ID NO: 5599129 - DNA, 25 bp, Homo sapien
aattgggtcgtctaagatggccttg

SEQ ID NO: 5599130 - DNA, 25 bp, Homo sapien
ggtttgtctgtgaggccttgatagg

SEQ ID NO: 5599131 - DNA, 25 bp, Homo sapien
ccttgtggtagtcttgatctttggc

SEQ ID NO: 5599132 - DNA, 25 bp, Homo sapien
gtggaactcagcgagagttcttcac

SEQ ID NO: 5599133 - DNA, 25 bp, Homo sapien
aggcctgattgtaattgggtcgtct

SEQ ID NO: 5599134 - DNA, 25 bp, Homo sapien
cagcgagagttcttcactgatttct

SEQ ID NO: 5599135 - DNA, 25 bp, Homo sapien
gatttctcttggtgtgtctcatgct

SEQ ID NO: 5599136 - DNA, 25 bp, Homo sapien
gcagtcacctgcaggcctgattgta

SEQ ID NO: 5599137 - DNA, 25 bp, Homo sapien
ttggtgtgtctcatgcttctgcagt

SEQ ID NO: 5599138 - DNA, 25 bp, Homo sapien
ggccttgctcctatgtctgacagtt

SEQ ID NO: 5599139 - DNA, 25 bp, Homo sapien
cttatcctctcatatgcctgtggca

SEQ ID NO: 5599140 - DNA, 25 bp, Homo sapien
agggaataatcaatcttaagctctg

SEQ ID NO: 5599141 - DNA, 25 bp, Homo sapien
ctaaactgagttaagtaatcttcac

SEQ ID NO: 5599142 - DNA, 25 bp, Homo sapien
tactgcattatcgtaggtactaccc

SEQ ID NO: 5599143 - DNA, 25 bp, Homo sapien
agggaaaatcttgtggggtaattca

SEQ ID NO: 5599144 - DNA, 25 bp, Homo sapien
acactgaagagggaataatcaatct

SEQ ID NO: 5599145 - DNA, 25 bp, Homo sapien
ttcaaagcaaatttaatagtatcct

SEQ ID NO: 5599146 - DNA, 25 bp, Homo sapien
gctctaggcaacactgaagagggaa

SEQ ID NO: 5599147 - DNA, 25 bp, Homo sapien
gttaatgctattacccactgctcta

SEQ ID NO: 5599148 - DNA, 25 bp, Homo sapien
taattcaggggcatactgcattatc

SEQ ID NO: 5599149 - DNA, 25 bp, Homo sapien
tacccactgctctaggcaacactga

SEQ ID NO: 5599150 - DNA, 25 bp, Homo sapien
ttgacctgctcatgaaaaactattg

SEQ ID NO: 5599151 - DNA, 25 bp, Homo sapien
acgctgtccagatacatactctccc

SEQ ID NO: 5599152 - DNA, 25 bp, Homo sapien
tcccgtgtgcatctgggatcctggg

SEQ ID NO: 5599153 - DNA, 25 bp, Homo sapien
acgcgagattcgagagcctatcttt

SEQ ID NO: 5599154 - DNA, 25 bp, Homo sapien
ctgaggcctttcaggagtcccacag

SEQ ID NO: 5599155 - DNA, 25 bp, Homo sapien
cacagaactaccttcccgagcgtcc

SEQ ID NO: 5599156 - DNA, 25 bp, Homo sapien
ccaaaataccagaggacgattctgc

SEQ ID NO: 5599157 - DNA, 25 bp, Homo sapien
atttaagaatgactggggttccaat

SEQ ID NO: 5599158 - DNA, 25 bp, Homo sapien
tgatatcacaggaatgaacgcgaga

SEQ ID NO: 5599159 - DNA, 25 bp, Homo sapien
gcgtcctaagccgccaccagccttg

SEQ ID NO: 5599160 - DNA, 25 bp, Homo sapien
gcagaggcattaagataacgctgtc

SEQ ID NO: 5599161 - DNA, 25 bp, Homo sapien
gaggacgattctgcagaggcattaa

SEQ ID NO: 5599162 - DNA, 25 bp, Homo sapien
taatctacaggagacattgtgtgtc

SEQ ID NO: 5599163 - DNA, 25 bp, Homo sapien
ggatagctctgcctaggaaaagtgc

SEQ ID NO: 5599164 - DNA, 25 bp, Homo sapien
atggaaaaatgacttggatagctct

SEQ ID NO: 5599165 - DNA, 25 bp, Homo sapien
tccttggaggcagatttaggaactt

SEQ ID NO: 5599166 - DNA, 25 bp, Homo sapien
gggtccacctctggatgaatgcgcc

SEQ ID NO: 5599167 - DNA, 25 bp, Homo sapien
gcaatttagtaatgacagaggggtc

SEQ ID NO: 5599168 - DNA, 25 bp, Homo sapien
ccccttgctgcccgccaggcactta

SEQ ID NO: 5599169 - DNA, 25 bp, Homo sapien
accgcaagcagtaaaaccctctggt

SEQ ID NO: 5599170 - DNA, 25 bp, Homo sapien
cgtgatgaggcgatctccatcgacg

SEQ ID NO: 5599171 - DNA, 25 bp, Homo sapien
tttagggccagttcaatgtcctccc

SEQ ID NO: 5599172 - DNA, 25 bp, Homo sapien
ctccacgagctgaagttctggcaga

SEQ ID NO: 5599173 - DNA, 25 bp, Homo sapien
atgggcaaaataagagtattaggcc

SEQ ID NO: 5599174 - DNA, 25 bp, Homo sapien
taggccagattgtctctaaggtccc

SEQ ID NO: 5599175 - DNA, 25 bp, Homo sapien
ttcgataaatatcagtgggaatccc

SEQ ID NO: 5599176 - DNA, 25 bp, Homo sapien
gaatggactaaaatcaaaggcctga

SEQ ID NO: 5599177 - DNA, 25 bp, Homo sapien
cttgacccctatgaagctcagtttc

SEQ ID NO: 5599178 - DNA, 25 bp, Homo sapien
tctagtgctagtccagtgctctgta

SEQ ID NO: 5599179 - DNA, 25 bp, Homo sapien
gtaaactatattgggatcttgcttc

SEQ ID NO: 5599180 - DNA, 25 bp, Homo sapien
aaggcctgaattttagttgcagatc

SEQ ID NO: 5599181 - DNA, 25 bp, Homo sapien
agtgctctgtatagaggacataacc

SEQ ID NO: 5599182 - DNA, 25 bp, Homo sapien
atctgccactacctagctgtgtgac

SEQ ID NO: 5599183 - DNA, 25 bp, Homo sapien
ttttattcggactgagtgggtacat

SEQ ID NO: 5599184 - DNA, 25 bp, Homo sapien
gctagaaagtgagctcagaaataac

SEQ ID NO: 5599185 - DNA, 25 bp, Homo sapien
ccctaatcgcacaaagagcatctac

SEQ ID NO: 5599186 - DNA, 25 bp, Homo sapien
acagcaggaatactaacaaaaaaac

SEQ ID NO: 5599187 - DNA, 25 bp, Homo sapien
ttgtttgacaggaagactgatgcag

SEQ ID NO: 5599188 - DNA, 25 bp, Homo sapien
ggcgtaagggctgaccctgtattca

SEQ ID NO: 5599189 - DNA, 25 bp, Homo sapien
catcggaaatacagataagcacaac

SEQ ID NO: 5599190 - DNA, 25 bp, Homo sapien
gagcatctacgggaccccagtgtgg

SEQ ID NO: 5599191 - DNA, 25 bp, Homo sapien
tgactgaacaccaaatgagcagtgc

SEQ ID NO: 5599192 - DNA, 25 bp, Homo sapien
gaaacctccccaaacagcatgtgac

SEQ ID NO: 5599193 - DNA, 25 bp, Homo sapien
gatgcagcataaatagcccagagat

SEQ ID NO: 5599194 - DNA, 25 bp, Homo sapien
ggtgtggtcaagaaaggtttcatgg

SEQ ID NO: 5599195 - DNA, 25 bp, Homo sapien
tcgtcagaggccaccggacgagaag

SEQ ID NO: 5599196 - DNA, 25 bp, Homo sapien
cttctcgtccggtggcctctgacga

SEQ ID NO: 5599197 - DNA, 25 bp, Homo sapien
agtaactctatgattcagaatattc

SEQ ID NO: 5599198 - DNA, 25 bp, Homo sapien
atagataaaagggcctatccatctt

SEQ ID NO: 5599199 - DNA, 25 bp, Homo sapien
tactgaaacaaagtagagtacaagg

SEQ ID NO: 5599200 - DNA, 25 bp, Homo sapien
attagaaagacaattgaaaaattta

SEQ ID NO: 5599201 - DNA, 25 bp, Homo sapien
attcaggtttctttagcagggtgct

SEQ ID NO: 5599202 - DNA, 25 bp, Homo sapien
tggttttaacagaatacaaactgga

SEQ ID NO: 5599203 - DNA, 25 bp, Homo sapien
gaattgtcgtaaaacagatgcagac

SEQ ID NO: 5599204 - DNA, 25 bp, Homo sapien
cctggatttatagataaaagggcct

SEQ ID NO: 5599205 - DNA, 25 bp, Homo sapien
tgaaacaaagtagagtacaagggta

SEQ ID NO: 5599206 - DNA, 25 bp, Homo sapien
aaacagatgcagacaattctttata

SEQ ID NO: 5599207 - DNA, 25 bp, Homo sapien
tacaaactggaatgctcaaagaatt

SEQ ID NO: 5599208 - DNA, 25 bp, Homo sapien
tccaccataggatagagttaaaggc

SEQ ID NO: 5599209 - DNA, 25 bp, Homo sapien
catgtgtaaatgtttgtaacctggc

SEQ ID NO: 5599210 - DNA, 25 bp, Homo sapien
aatgttaatttgatagtgtgtgttt

SEQ ID NO: 5599211 - DNA, 25 bp, Homo sapien
gttggtgcttagtagacttgataac

SEQ ID NO: 5599212 - DNA, 25 bp, Homo sapien
aggcattctttgcaggcatattttg

SEQ ID NO: 5599213 - DNA, 25 bp, Homo sapien
tgttgttgtaatctccatccaccat

SEQ ID NO: 5599214 - DNA, 25 bp, Homo sapien
aaacaaatcaagaagctgaaaaatt

SEQ ID NO: 5599215 - DNA, 25 bp, Homo sapien
tagactatgtatgatgtgttgttgt

SEQ ID NO: 5599216 - DNA, 25 bp, Homo sapien
ataggatagagttaaaggcattctt

SEQ ID NO: 5599217 - DNA, 25 bp, Homo sapien
ttaggattgttggtgcttagtagac

SEQ ID NO: 5599218 - DNA, 25 bp, Homo sapien
agaaaatttttaggggttgtgctca

SEQ ID NO: 5599219 - DNA, 25 bp, Homo sapien
tgctggagttgccagctagaggcat

SEQ ID NO: 5599220 - DNA, 25 bp, Homo sapien
tctgtcttgggtttcctaagccagt

SEQ ID NO: 5599221 - DNA, 25 bp, Homo sapien
tatgacctagaaatgaatagatata

SEQ ID NO: 5599222 - DNA, 25 bp, Homo sapien
tttgacttaagaactgctcccagat

SEQ ID NO: 5599223 - DNA, 25 bp, Homo sapien
tcaggtagctaggtgtagtgtattt

SEQ ID NO: 5599224 - DNA, 25 bp, Homo sapien
ttccattggagtgagtgatttattc

SEQ ID NO: 5599225 - DNA, 25 bp, Homo sapien
agtgtattttggtgcctctggtctc

SEQ ID NO: 5599226 - DNA, 25 bp, Homo sapien
aactggtatgtatggatactgtgat

SEQ ID NO: 5599227 - DNA, 25 bp, Homo sapien
agaggcattctcaggtagctaggtg

SEQ ID NO: 5599228 - DNA, 25 bp, Homo sapien
gagtactagaactggaaggaactaa

SEQ ID NO: 5599229 - DNA, 25 bp, Homo sapien
catagaaagaaacatagagtactag

SEQ ID NO: 5599230 - DNA, 25 bp, Homo sapien
gtgatcaaagggtgtcggttctttg

SEQ ID NO: 5599231 - DNA, 25 bp, Homo sapien
ggaaacgtctgtacaagcatccatc

SEQ ID NO: 5599232 - DNA, 25 bp, Homo sapien
tcattcttcagtgagaaggagggtg

SEQ ID NO: 5599233 - DNA, 25 bp, Homo sapien
cagaggggaactactgctctccctc

SEQ ID NO: 5599234 - DNA, 25 bp, Homo sapien
agcatccatctaagtgggggcatat

SEQ ID NO: 5599235 - DNA, 25 bp, Homo sapien
ttgtagtacaataccgtgatctgtt

SEQ ID NO: 5599236 - DNA, 25 bp, Homo sapien
agcagatgatatccttggaaacgtc

SEQ ID NO: 5599237 - DNA, 25 bp, Homo sapien
tctgtgacagctacaagcgtgtaaa

SEQ ID NO: 5599238 - DNA, 25 bp, Homo sapien
tcctggatgactcacactctacttc

SEQ ID NO: 5599239 - DNA, 25 bp, Homo sapien
aacaacaaaagagccagcagatgat

SEQ ID NO: 5599240 - DNA, 25 bp, Homo sapien
tttgtccagcattagcagaggggaa

SEQ ID NO: 5599241 - DNA, 25 bp, Homo sapien
ctctcagcctggttccccgtgccta

SEQ ID NO: 5599242 - DNA, 25 bp, Homo sapien
cacaattgatggtaaagaactgctc

SEQ ID NO: 5599243 - DNA, 25 bp, Homo sapien
gtgttggcaagagtcgttattagat

SEQ ID NO: 5599244 - DNA, 25 bp, Homo sapien
gatggtaaagaactgctctgcctcc

SEQ ID NO: 5599245 - DNA, 25 bp, Homo sapien
taggaggcacttcattctctcagcc

SEQ ID NO: 5599246 - DNA, 25 bp, Homo sapien
tctgcctcctgaacagaggtgactg

SEQ ID NO: 5599247 - DNA, 25 bp, Homo sapien
tatattgtaagaaagggatattaaa

SEQ ID NO: 5599248 - DNA, 25 bp, Homo sapien
cccgtgcctatcacaattgatggta

SEQ ID NO: 5599249 - DNA, 25 bp, Homo sapien
atataaacttttagagctctccttt

SEQ ID NO: 5599250 - DNA, 25 bp, Homo sapien
aacttaatgtgttggcaagagtcgt

SEQ ID NO: 5599251 - DNA, 25 bp, Homo sapien
tggaacatatattgtaagaaaggga

SEQ ID NO: 5599252 - DNA, 25 bp, Homo sapien
aaacgttaattcagggcggctaatg

SEQ ID NO: 5599253 - DNA, 25 bp, Homo sapien
tgctgaagagctaatgaagcagagt

SEQ ID NO: 5599254 - DNA, 25 bp, Homo sapien
tcagaccctgatcttgagaaccgca

SEQ ID NO: 5599255 - DNA, 25 bp, Homo sapien
gtgaagtgctgaagagctaatgaag

SEQ ID NO: 5599256 - DNA, 25 bp, Homo sapien
tcagtctgcatgagctagacggaca

SEQ ID NO: 5599257 - DNA, 25 bp, Homo sapien
cgtgaaaacgttaattcagggcggc

SEQ ID NO: 5599258 - DNA, 25 bp, Homo sapien
aatgaagcagagtggaccatctgca

SEQ ID NO: 5599259 - DNA, 25 bp, Homo sapien
agcagagtggaccatctgcacagat

SEQ ID NO: 5599260 - DNA, 25 bp, Homo sapien
aaccgcagtccacccctaacctctg

SEQ ID NO: 5599261 - DNA, 25 bp, Homo sapien
ggctgcccgtgaaaacgttaattca

SEQ ID NO: 5599262 - DNA, 25 bp, Homo sapien
aattggtcctttgtagccgctgggg

SEQ ID NO: 5599263 - DNA, 25 bp, Homo sapien
tagctggttcaatagtaaatgtaac

SEQ ID NO: 5599264 - DNA, 25 bp, Homo sapien
aggtaaatttgcaagtacaatgatc

SEQ ID NO: 5599265 - DNA, 25 bp, Homo sapien
aatgatcaccttggcagacagagac

SEQ ID NO: 5599266 - DNA, 25 bp, Homo sapien
gaagaaagagcctttatggcctccc

SEQ ID NO: 5599267 - DNA, 25 bp, Homo sapien
tccaacgtcatccagaagaaagagc

SEQ ID NO: 5599268 - DNA, 25 bp, Homo sapien
tttcagctggaagcaatcctcccta

SEQ ID NO: 5599269 - DNA, 25 bp, Homo sapien
tgtaacacaggcagtcaacaggtta

SEQ ID NO: 5599270 - DNA, 25 bp, Homo sapien
tacaaaccagtgagtcagcaggtta

SEQ ID NO: 5599271 - DNA, 25 bp, Homo sapien
aggcagtcaacaggttaggtaaatt

SEQ ID NO: 5599272 - DNA, 25 bp, Homo sapien
gcagacagagactgtccagggttgc

SEQ ID NO: 5599273 - DNA, 25 bp, Homo sapien
aatcctgcagcactgtgacgggatg

SEQ ID NO: 5599274 - DNA, 25 bp, Homo sapien
tgtaatgtcttctgtggtcgtgggc

SEQ ID NO: 5599275 - DNA, 25 bp, Homo sapien
taggaagatcagggtcttacctctt

SEQ ID NO: 5599276 - DNA, 25 bp, Homo sapien
ggcgggaactccatgtacccaggaa

SEQ ID NO: 5599277 - DNA, 25 bp, Homo sapien
ttgtaaagcaagatggttgtcaagg

SEQ ID NO: 5599278 - DNA, 25 bp, Homo sapien
ggtggtcgtagttcactgtctgcca

SEQ ID NO: 5599279 - DNA, 25 bp, Homo sapien
acctggcggaattcacttgtaaagc

SEQ ID NO: 5599280 - DNA, 25 bp, Homo sapien
cattcctggcacctgtgttgtgacc

SEQ ID NO: 5599281 - DNA, 25 bp, Homo sapien
gtctgccattaggaagatcagggtc

SEQ ID NO: 5599282 - DNA, 25 bp, Homo sapien
tgctgcgaagggtttcttgctgcac

SEQ ID NO: 5599283 - DNA, 25 bp, Homo sapien
taagtcaggttgttgtcagattgcc

SEQ ID NO: 5599284 - DNA, 25 bp, Homo sapien
tgaccatctttagaaacctggcgga

SEQ ID NO: 5599285 - DNA, 25 bp, Homo sapien
gctctagcttgctccggtggcctgg

SEQ ID NO: 5599286 - DNA, 25 bp, Homo sapien
atagcatctcacagtatgcatgttc

SEQ ID NO: 5599287 - DNA, 25 bp, Homo sapien
ggttggctctagcttgctccggtgg

SEQ ID NO: 5599288 - DNA, 25 bp, Homo sapien
cacagatgcgtcctgagtgactgtc

SEQ ID NO: 5599289 - DNA, 25 bp, Homo sapien
ccgttcttcaacccttcccctgctg

SEQ ID NO: 5599290 - DNA, 25 bp, Homo sapien
ccctctccttaacacagatgcgtcc

SEQ ID NO: 5599291 - DNA, 25 bp, Homo sapien
ctccccaggccactgggttggctct

SEQ ID NO: 5599292 - DNA, 25 bp, Homo sapien
agtatgcatgttctgtccgttcttc

SEQ ID NO: 5599293 - DNA, 25 bp, Homo sapien
aaccactgttttggccgcatgccct

SEQ ID NO: 5599294 - DNA, 25 bp, Homo sapien
ccggtggcctggcttcatagcatct

SEQ ID NO: 5599295 - DNA, 25 bp, Homo sapien
ttttggccgcatgccctcttccctc

SEQ ID NO: 5599296 - DNA, 25 bp, Homo sapien
acactcggcctggacatcaagtctt

SEQ ID NO: 5599297 - DNA, 25 bp, Homo sapien
tatataaatatgtcaggctaacccc

SEQ ID NO: 5599298 - DNA, 25 bp, Homo sapien
aaggaacaaatggaagcctaaatat

SEQ ID NO: 5599299 - DNA, 25 bp, Homo sapien
tctgtcctgttggtgcagggagaat

SEQ ID NO: 5599300 - DNA, 25 bp, Homo sapien
agtggaaactcgttgaggtcctcgt

SEQ ID NO: 5599301 - DNA, 25 bp, Homo sapien
gcccatggacacaacccactcctcc

SEQ ID NO: 5599302 - DNA, 25 bp, Homo sapien
gggagaatcagcccatggacacaac

SEQ ID NO: 5599303 - DNA, 25 bp, Homo sapien
ggtcctcgtgtccaagagaacagac

SEQ ID NO: 5599304 - DNA, 25 bp, Homo sapien
accaccaagaggctcctgtgcatac

SEQ ID NO: 5599305 - DNA, 25 bp, Homo sapien
gaaacattcagagaacagtggaaac

SEQ ID NO: 5599306 - DNA, 25 bp, Homo sapien
gctcctgtgcatacggacactcggc

SEQ ID NO: 5599307 - DNA, 25 bp, Homo sapien
ctggaacccagtgtggatgtacacg

SEQ ID NO: 5599308 - DNA, 25 bp, Homo sapien
agtaagcagaaagtaaaactgtgat

SEQ ID NO: 5599309 - DNA, 25 bp, Homo sapien
agattagatgagctcagcaacacac

SEQ ID NO: 5599310 - DNA, 25 bp, Homo sapien
cttttgaaagagggtcactaaatcc

SEQ ID NO: 5599311 - DNA, 25 bp, Homo sapien
tgtacacgcaggcaaagttacaagc

SEQ ID NO: 5599312 - DNA, 25 bp, Homo sapien
ctgccatgatatagaggattgcctt

SEQ ID NO: 5599313 - DNA, 25 bp, Homo sapien
tggaaacgccataaaagtgcatgtc

SEQ ID NO: 5599314 - DNA, 25 bp, Homo sapien
atacagaaccatcagacgtcacctc

SEQ ID NO: 5599315 - DNA, 25 bp, Homo sapien
aattcagcataagaaaggtggtgtg

SEQ ID NO: 5599316 - DNA, 25 bp, Homo sapien
ctggggaagaaataaagtcttgctg

SEQ ID NO: 5599317 - DNA, 25 bp, Homo sapien
gtggcccagttcatgtggctggaac

SEQ ID NO: 5599318 - DNA, 25 bp, Homo sapien
gggtctgcggcgatggcgccggccg

SEQ ID NO: 5599319 - DNA, 25 bp, Homo sapien
cggccggcgccatcgccgcagaccc

SEQ ID NO: 5599320 - DNA, 25 bp, Homo sapien
aatgtgatccaaatgcatggaacta

SEQ ID NO: 5599321 - DNA, 25 bp, Homo sapien
ttgtcaagtgagagagcattagaaa

SEQ ID NO: 5599322 - DNA, 25 bp, Homo sapien
tgtagctgtcacatgacaaaagcac

SEQ ID NO: 5599323 - DNA, 25 bp, Homo sapien
acaaagaactgacatctagaaaagc

SEQ ID NO: 5599324 - DNA, 25 bp, Homo sapien
tcactaactgaaacaaagaactgac

SEQ ID NO: 5599325 - DNA, 25 bp, Homo sapien
gactggtctgcaggctacgccatga

SEQ ID NO: 5599326 - DNA, 25 bp, Homo sapien
aggctacgccatgagaatcaggtat

SEQ ID NO: 5599327 - DNA, 25 bp, Homo sapien
gcattagaaagggaatacactgaag

SEQ ID NO: 5599328 - DNA, 25 bp, Homo sapien
agaaaagccacaatagccacctctc

SEQ ID NO: 5599329 - DNA, 25 bp, Homo sapien
aggaagagtcaacaagtcttgttca

SEQ ID NO: 5599330 - DNA, 25 bp, Homo sapien
agaatcaggtatggaatatggacat

SEQ ID NO: 5599331 - DNA, 25 bp, Homo sapien
gaggaggatacatgtattccagtaa

SEQ ID NO: 5599332 - DNA, 25 bp, Homo sapien
taatgaagcttgctaggggtagtga

SEQ ID NO: 5599333 - DNA, 25 bp, Homo sapien
gcagaccaagttagtccataagggc

SEQ ID NO: 5599334 - DNA, 25 bp, Homo sapien
cctgagccaaatttcaaagcagacc

SEQ ID NO: 5599335 - DNA, 25 bp, Homo sapien
ccatggtaaggcctacctgagccaa

SEQ ID NO: 5599336 - DNA, 25 bp, Homo sapien
ctctgaccactacaaggccaacttt

SEQ ID NO: 5599337 - DNA, 25 bp, Homo sapien
gtctttctggggctctaaaaatcca

SEQ ID NO: 5599338 - DNA, 25 bp, Homo sapien
aaaatcaaactatgaggaagaaatt

SEQ ID NO: 5599339 - DNA, 25 bp, Homo sapien
ccaggtaactccatggtaaggccta

SEQ ID NO: 5599340 - DNA, 25 bp, Homo sapien
ccataagggctataaagtgttttcc

SEQ ID NO: 5599341 - DNA, 25 bp, Homo sapien
tgtattgtacaaggacaaagacatc

SEQ ID NO: 5599342 - DNA, 25 bp, Homo sapien
tatgcctagcaaccagtaatgttta

SEQ ID NO: 5599343 - DNA, 25 bp, Homo sapien
taaacgtctctatgcacagtattgc

SEQ ID NO: 5599344 - DNA, 25 bp, Homo sapien
tttggattgctggtaagacaacatt

SEQ ID NO: 5599345 - DNA, 25 bp, Homo sapien
acaatttaaattctggggtggatta

SEQ ID NO: 5599346 - DNA, 25 bp, Homo sapien
ttctggggtggattatctttgtgat

SEQ ID NO: 5599347 - DNA, 25 bp, Homo sapien
ttgtgttcaagttgccttaattctc

SEQ ID NO: 5599348 - DNA, 25 bp, Homo sapien
aatgggcttgatatgcctagcaacc

SEQ ID NO: 5599349 - DNA, 25 bp, Homo sapien
agaaaaatgggcttgatatgcctag

SEQ ID NO: 5599350 - DNA, 25 bp, Homo sapien
tagaggtagaatttaaaagtacagc

SEQ ID NO: 5599351 - DNA, 25 bp, Homo sapien
atcttagaacatagagaagtgataa

SEQ ID NO: 5599352 - DNA, 25 bp, Homo sapien
tattaggcatacttgtcacatttcc

SEQ ID NO: 5599353 - DNA, 25 bp, Homo sapien
ctaacacaacacacccctccagggc

SEQ ID NO: 5599354 - DNA, 25 bp, Homo sapien
gggcttgggagtctctctagatgag

SEQ ID NO: 5599355 - DNA, 25 bp, Homo sapien
ggactacggaaggcaccaacttcca

SEQ ID NO: 5599356 - DNA, 25 bp, Homo sapien
ctccttgacgcctggacccctcaca

SEQ ID NO: 5599357 - DNA, 25 bp, Homo sapien
ctgaaatatgtttagctttggctgt

SEQ ID NO: 5599358 - DNA, 25 bp, Homo sapien
ggacccctcacaccaggcctgctgg

SEQ ID NO: 5599359 - DNA, 25 bp, Homo sapien
ggcctgctggtccctacacaagccc

SEQ ID NO: 5599360 - DNA, 25 bp, Homo sapien
cagccaggagctccttgacgcctgg

SEQ ID NO: 5599361 - DNA, 25 bp, Homo sapien
gtaggcagggagttaattcctaaca

SEQ ID NO: 5599362 - DNA, 25 bp, Homo sapien
catatgaaataggactacggaaggc

SEQ ID NO: 5599363 - DNA, 25 bp, Homo sapien
ggagtctctctagatgagaaggcag

SEQ ID NO: 5599364 - DNA, 25 bp, Homo sapien
gaaaggatgggtgttccctgacttc

SEQ ID NO: 5599365 - DNA, 25 bp, Homo sapien
cccccaacgcataccttctaggacc

SEQ ID NO: 5599366 - DNA, 25 bp, Homo sapien
gtgggacacgaatcctgcctatgct

SEQ ID NO: 5599367 - DNA, 25 bp, Homo sapien
cctgtggagcacataccactctccc

SEQ ID NO: 5599368 - DNA, 25 bp, Homo sapien
ggtctttagtctgcagggctgaatc

SEQ ID NO: 5599369 - DNA, 25 bp, Homo sapien
agtgtgtagaatctagaaaggatgg

SEQ ID NO: 5599370 - DNA, 25 bp, Homo sapien
gtttggcgtcagatcggtcacagaa

SEQ ID NO: 5599371 - DNA, 25 bp, Homo sapien
cagaccttccctgtggtgggacacg

SEQ ID NO: 5599372 - DNA, 25 bp, Homo sapien
cggtcacagaagaaactcgaggacc

SEQ ID NO: 5599373 - DNA, 25 bp, Homo sapien
atgctgtgcagcctactgacccgtt

SEQ ID NO: 5599374 - DNA, 25 bp, Homo sapien
gccaggagtcagaagtgcttttttc

SEQ ID NO: 5599375 - DNA, 25 bp, Homo sapien
tgctgccgctgctcagatctgaggg

SEQ ID NO: 5599376 - DNA, 25 bp, Homo sapien
aatttaaggatcgtgaaacagaaga

SEQ ID NO: 5599377 - DNA, 25 bp, Homo sapien
agggattgtttatgagggtcaagga

SEQ ID NO: 5599378 - DNA, 25 bp, Homo sapien
ggagccggtgctgctattctagctt

SEQ ID NO: 5599379 - DNA, 25 bp, Homo sapien
tgttcaagtttgagggtcctggagc

SEQ ID NO: 5599380 - DNA, 25 bp, Homo sapien
tgctcagatctgagggtgttggagc

SEQ ID NO: 5599381 - DNA, 25 bp, Homo sapien
ctagcttgagtttcgtggagctgga

SEQ ID NO: 5599382 - DNA, 25 bp, Homo sapien
tgccaaaccaggtaggagcaatttt

SEQ ID NO: 5599383 - DNA, 25 bp, Homo sapien
gcaacattgctgtagttcgagggtc

SEQ ID NO: 5599384 - DNA, 25 bp, Homo sapien
tcattgagctggaagtccaggaagc

SEQ ID NO: 5599385 - DNA, 25 bp, Homo sapien
acccaggcagaagcaacattgctgt

SEQ ID NO: 5599386 - DNA, 25 bp, Homo sapien
cactggctgtgtatgcaggacaata

SEQ ID NO: 5599387 - DNA, 25 bp, Homo sapien
atttgcccaggtcaccgtagaaacc

SEQ ID NO: 5599388 - DNA, 25 bp, Homo sapien
ctcacctgtcagtggggtgcatgat

SEQ ID NO: 5599389 - DNA, 25 bp, Homo sapien
ctgcaaagccacccccagccttgtc

SEQ ID NO: 5599390 - DNA, 25 bp, Homo sapien
cgtcgcctctcgtgccactggctgt

SEQ ID NO: 5599391 - DNA, 25 bp, Homo sapien
ttgtccctacctcctgaggcgggtg

SEQ ID NO: 5599392 - DNA, 25 bp, Homo sapien
ggtgcatgatagtgcagcctctcac

SEQ ID NO: 5599393 - DNA, 25 bp, Homo sapien
tggtggtcacagcgccttcctcacc

SEQ ID NO: 5599394 - DNA, 25 bp, Homo sapien
cttttcctgcccggaggtctgaagg

SEQ ID NO: 5599395 - DNA, 25 bp, Homo sapien
cgggggctcagtgaatatcccctct

SEQ ID NO: 5599396 - DNA, 25 bp, Homo sapien
tcattctcagggtctgcaaagccac

SEQ ID NO: 5599397 - DNA, 25 bp, Homo sapien
cattaataatcagtggtgataggtc

SEQ ID NO: 5599398 - DNA, 25 bp, Homo sapien
agcagtgaaatattctgtcccattt

SEQ ID NO: 5599399 - DNA, 25 bp, Homo sapien
gttcacacaatagcaaaagtcattt

SEQ ID NO: 5599400 - DNA, 25 bp, Homo sapien
ttgaagcctacacagtggatcaacc

SEQ ID NO: 5599401 - DNA, 25 bp, Homo sapien
gattacggagttttcttaaatggca

SEQ ID NO: 5599402 - DNA, 25 bp, Homo sapien
atcattcatgcagacattaataatc

SEQ ID NO: 5599403 - DNA, 25 bp, Homo sapien
ggtcaatcattaaataagccttctg

SEQ ID NO: 5599404 - DNA, 25 bp, Homo sapien
aatcagtggtgataggtcaatcatt

SEQ ID NO: 5599405 - DNA, 25 bp, Homo sapien
tgcattattgatgacttggtcttat

SEQ ID NO: 5599406 - DNA, 25 bp, Homo sapien
agttagaatacgttagcagtgaaat

SEQ ID NO: 5599407 - DNA, 25 bp, Homo sapien
aaaacaagtgagttagaatacgtta

SEQ ID NO: 5599408 - DNA, 25 bp, Homo sapien
ttccctgggaacaacctcccacatc

SEQ ID NO: 5599409 - DNA, 25 bp, Homo sapien
aatgaggcctattagccagcagcac

SEQ ID NO: 5599410 - DNA, 25 bp, Homo sapien
taaattgaaatgaggcctattagcc

SEQ ID NO: 5599411 - DNA, 25 bp, Homo sapien
caaaaacatgatgttccctgggaac

SEQ ID NO: 5599412 - DNA, 25 bp, Homo sapien
attagccagcagcacaatttaacac

SEQ ID NO: 5599413 - DNA, 25 bp, Homo sapien
caggaattcaaacttgaggctacat

SEQ ID NO: 5599414 - DNA, 25 bp, Homo sapien
caaacttgaggctacatgtgctagg

SEQ ID NO: 5599415 - DNA, 25 bp, Homo sapien
taaagccagtcctcaataaatattt

SEQ ID NO: 5599416 - DNA, 25 bp, Homo sapien
acatcacagatgtaaagacttttct

SEQ ID NO: 5599417 - DNA, 25 bp, Homo sapien
gttgagagcagggctcgtaattttt

SEQ ID NO: 5599418 - DNA, 25 bp, Homo sapien
tttaaattttgagtcccagggcata

SEQ ID NO: 5599419 - DNA, 25 bp, Homo sapien
tcatggagctgactcagtgatctgc

SEQ ID NO: 5599420 - DNA, 25 bp, Homo sapien
tatggtgtcgtagagaaattagaac

SEQ ID NO: 5599421 - DNA, 25 bp, Homo sapien
ggaacctcgggcaccagtatttcac

SEQ ID NO: 5599422 - DNA, 25 bp, Homo sapien
aagagaccagcaacagatcccatta

SEQ ID NO: 5599423 - DNA, 25 bp, Homo sapien
tccgcaggttgcatcggtgtcttct

SEQ ID NO: 5599424 - DNA, 25 bp, Homo sapien
agcaaacacaggtgaagcatcaaac

SEQ ID NO: 5599425 - DNA, 25 bp, Homo sapien
aaaaccagttaaaggtgggtctgca

SEQ ID NO: 5599426 - DNA, 25 bp, Homo sapien
ggactgaggtgaaatgaattctgtc

SEQ ID NO: 5599427 - DNA, 25 bp, Homo sapien
ttgggatgatctgtcagtgagccta

SEQ ID NO: 5599428 - DNA, 25 bp, Homo sapien
cacacaaaagtgctcatgggactga

SEQ ID NO: 5599429 - DNA, 25 bp, Homo sapien
gaaattcgtaaaagagaccagcaac

SEQ ID NO: 5599430 - DNA, 25 bp, Homo sapien
agcttttggtgcttgctatggaaaa

SEQ ID NO: 5599431 - DNA, 25 bp, Homo sapien
cttaaatgaacgatagataatgtac

SEQ ID NO: 5599432 - DNA, 25 bp, Homo sapien
tgaacgatagataatgtacatgctt

SEQ ID NO: 5599433 - DNA, 25 bp, Homo sapien
agctctgttttagttagatctgcac

SEQ ID NO: 5599434 - DNA, 25 bp, Homo sapien
acaggaactgtgaatataagctttt

SEQ ID NO: 5599435 - DNA, 25 bp, Homo sapien
tagatctgcacatctgttttgctcc

SEQ ID NO: 5599436 - DNA, 25 bp, Homo sapien
taagtctaatatgaaacacaggaac

SEQ ID NO: 5599437 - DNA, 25 bp, Homo sapien
gttaattttgccagttcagtttctc

SEQ ID NO: 5599438 - DNA, 25 bp, Homo sapien
tatggaaaaatcaaatcaatagctt

SEQ ID NO: 5599439 - DNA, 25 bp, Homo sapien
ttctaggaattttcagcaaaatacc

SEQ ID NO: 5599440 - DNA, 25 bp, Homo sapien
gcaaaataccaattcagctataagt

SEQ ID NO: 5599441 - DNA, 25 bp, Homo sapien
ctcagataatgagggacgactctat

SEQ ID NO: 5599442 - DNA, 25 bp, Homo sapien
cacaaactgaaagcatgtgtgaagg

SEQ ID NO: 5599443 - DNA, 25 bp, Homo sapien
acataaagaaaagatgtgtgatatt

SEQ ID NO: 5599444 - DNA, 25 bp, Homo sapien
tgtattgtatagttgaaagagctag

SEQ ID NO: 5599445 - DNA, 25 bp, Homo sapien
ctgtgcccccaaaatacatacaacc

SEQ ID NO: 5599446 - DNA, 25 bp, Homo sapien
agaagagaactgttgaatgtttcca

SEQ ID NO: 5599447 - DNA, 25 bp, Homo sapien
cagccttctgtatctgagggttcca

SEQ ID NO: 5599448 - DNA, 25 bp, Homo sapien
atgtgtgaaggtaagattgaaaaca

SEQ ID NO: 5599449 - DNA, 25 bp, Homo sapien
aaacatataaatacagtcagccttc

SEQ ID NO: 5599450 - DNA, 25 bp, Homo sapien
attgaaaacaacagtgcttagactc

SEQ ID NO: 5599451 - DNA, 25 bp, Homo sapien
taaaagtcctgtagtctgaaattca

SEQ ID NO: 5599452 - DNA, 25 bp, Homo sapien
gcagccctgcagacatggttaaaac

SEQ ID NO: 5599453 - DNA, 25 bp, Homo sapien
cagcctgggtttggctcccagctcc

SEQ ID NO: 5599454 - DNA, 25 bp, Homo sapien
cacccggtcagcagaatccttgcct

SEQ ID NO: 5599455 - DNA, 25 bp, Homo sapien
tctttgcattatggggcagaagtgg

SEQ ID NO: 5599456 - DNA, 25 bp, Homo sapien
tcttcctctcttagaccagcttccc

SEQ ID NO: 5599457 - DNA, 25 bp, Homo sapien
cccagctccagcactagtcaactta

SEQ ID NO: 5599458 - DNA, 25 bp, Homo sapien
agacatggttaaaactcgggcccag

SEQ ID NO: 5599459 - DNA, 25 bp, Homo sapien
cttagatcagctggttaagagtcca

SEQ ID NO: 5599460 - DNA, 25 bp, Homo sapien
agcctgactgtggttcccagctcca

SEQ ID NO: 5599461 - DNA, 25 bp, Homo sapien
ttctttgcattgttgggcagaagag

SEQ ID NO: 5599462 - DNA, 25 bp, Homo sapien
cagctccagccctagtcagcttaac

SEQ ID NO: 5599463 - DNA, 25 bp, Homo sapien
ttttaaaacagctaatgaggaatgt

SEQ ID NO: 5599464 - DNA, 25 bp, Homo sapien
aagcggggctgataccccagaatgt

SEQ ID NO: 5599465 - DNA, 25 bp, Homo sapien
gcagagagacaggtatttaacaaac

SEQ ID NO: 5599466 - DNA, 25 bp, Homo sapien
cacatatgtttgggaagtggagtgg

SEQ ID NO: 5599467 - DNA, 25 bp, Homo sapien
tgtttgcagagagacaggtatttaa

SEQ ID NO: 5599468 - DNA, 25 bp, Homo sapien
aaacatggcttttaggagttcccac

SEQ ID NO: 5599469 - DNA, 25 bp, Homo sapien
ccccagaatgtgcctaatatactag

SEQ ID NO: 5599470 - DNA, 25 bp, Homo sapien
agctaatgaggaatgtttcatgctt

SEQ ID NO: 5599471 - DNA, 25 bp, Homo sapien
actagaccataggtgccacagagag

SEQ ID NO: 5599472 - DNA, 25 bp, Homo sapien
tcatgcttaagtatattggtctatc

SEQ ID NO: 5599473 - DNA, 25 bp, Homo sapien
caacatgtatgtgtactttgccagg

SEQ ID NO: 5599474 - DNA, 25 bp, Homo sapien
catgttctagagagacaagaaaagg

SEQ ID NO: 5599475 - DNA, 25 bp, Homo sapien
aagatggctcatggaaaaagtattc

SEQ ID NO: 5599476 - DNA, 25 bp, Homo sapien
aagtaagagaggcacatgttctaga

SEQ ID NO: 5599477 - DNA, 25 bp, Homo sapien
atgggcttgcagatacatgtacaac

SEQ ID NO: 5599478 - DNA, 25 bp, Homo sapien
tacattgctggtgagaaagtaaaat

SEQ ID NO: 5599479 - DNA, 25 bp, Homo sapien
tcagaaggtcacaaactattaggaa

SEQ ID NO: 5599480 - DNA, 25 bp, Homo sapien
aagaataataattgaagatggctca

SEQ ID NO: 5599481 - DNA, 25 bp, Homo sapien
cagtgtggtagttccacaaggggtt

SEQ ID NO: 5599482 - DNA, 25 bp, Homo sapien
ttaagggcaggcaccatgtttttca

SEQ ID NO: 5599483 - DNA, 25 bp, Homo sapien
atgaccccgcaattccactcttagg

SEQ ID NO: 5599484 - DNA, 25 bp, Homo sapien
tattctgaaaagtaagagaggcaca

SEQ ID NO: 5599485 - DNA, 25 bp, Homo sapien
ttgaaggtgagtaaggtaccatctt

SEQ ID NO: 5599486 - DNA, 25 bp, Homo sapien
aatgaatgacttggacaagatcatc

SEQ ID NO: 5599487 - DNA, 25 bp, Homo sapien
aatagagatcacggcaccagctttg

SEQ ID NO: 5599488 - DNA, 25 bp, Homo sapien
atgactctggacaggatagagctca

SEQ ID NO: 5599489 - DNA, 25 bp, Homo sapien
cagaaacgaggcatcttgctcagga

SEQ ID NO: 5599490 - DNA, 25 bp, Homo sapien
gaatgagtggccaagtatgatttca

SEQ ID NO: 5599491 - DNA, 25 bp, Homo sapien
ggactcaaatcccccctgccacgcc

SEQ ID NO: 5599492 - DNA, 25 bp, Homo sapien
gacttgaagttgggctgtaatctca

SEQ ID NO: 5599493 - DNA, 25 bp, Homo sapien
ccggaaaagttggtactctagagac

SEQ ID NO: 5599494 - DNA, 25 bp, Homo sapien
gtcactaaggagataggtgacctgc

SEQ ID NO: 5599495 - DNA, 25 bp, Homo sapien
agtcagttaggctgccaagaaacac

SEQ ID NO: 5599496 - DNA, 25 bp, Homo sapien
accaggctgatctttagcaggtgct

SEQ ID NO: 5599497 - DNA, 25 bp, Homo sapien
atgtcctaagaaacatgacccccgg

SEQ ID NO: 5599498 - DNA, 25 bp, Homo sapien
caggtgcttcagtaaagggactgac

SEQ ID NO: 5599499 - DNA, 25 bp, Homo sapien
cttgcctacagagaggctcctcttc

SEQ ID NO: 5599500 - DNA, 25 bp, Homo sapien
cagagatcaacgggattcacatgct

SEQ ID NO: 5599501 - DNA, 25 bp, Homo sapien
aatttaagctggaacaaggaaagaa

SEQ ID NO: 5599502 - DNA, 25 bp, Homo sapien
tcatcctggggattcttaagagaga

SEQ ID NO: 5599503 - DNA, 25 bp, Homo sapien
aagaatcaagcatcaggtcaatgtc

SEQ ID NO: 5599504 - DNA, 25 bp, Homo sapien
aattaagacagccaaaaaaccactc

SEQ ID NO: 5599505 - DNA, 25 bp, Homo sapien
tcttaagagagaaccaacacctgga

SEQ ID NO: 5599506 - DNA, 25 bp, Homo sapien
aaggtgccagaacgttttactcgag

SEQ ID NO: 5599507 - DNA, 25 bp, Homo sapien
ttgactgtcacgattgccctagcat

SEQ ID NO: 5599508 - DNA, 25 bp, Homo sapien
attgccctagcatggccctcctggt

SEQ ID NO: 5599509 - DNA, 25 bp, Homo sapien
ctttgtactaaggctgatggttccc

SEQ ID NO: 5599510 - DNA, 25 bp, Homo sapien
agatgaggcctcaggtctctatacc

SEQ ID NO: 5599511 - DNA, 25 bp, Homo sapien
tgctgtattagacttggctgaggcc

SEQ ID NO: 5599512 - DNA, 25 bp, Homo sapien
gacttggctgaggcctatcagtgtt

SEQ ID NO: 5599513 - DNA, 25 bp, Homo sapien
tgtacaaaactctcagctaatctcc

SEQ ID NO: 5599514 - DNA, 25 bp, Homo sapien
ttttcctgggatggacaattgtttc

SEQ ID NO: 5599515 - DNA, 25 bp, Homo sapien
agcttcctacgacagcagatgaggc

SEQ ID NO: 5599516 - DNA, 25 bp, Homo sapien
gctgatgaaactatagtcagtgttc

SEQ ID NO: 5599517 - DNA, 25 bp, Homo sapien
tatgcaattagatggcaatttgctg

SEQ ID NO: 5599518 - DNA, 25 bp, Homo sapien
ttttgctcatgaaaagtgaatttcc

SEQ ID NO: 5599519 - DNA, 25 bp, Homo sapien
tacccaggactttcaaccatcttgc

SEQ ID NO: 5599520 - DNA, 25 bp, Homo sapien
aagagccctgcttccgagaacaata

SEQ ID NO: 5599521 - DNA, 25 bp, Homo sapien
tcttataagtttgacatggatctgg

SEQ ID NO: 5599522 - DNA, 25 bp, Homo sapien
catggatctggtttaaatacaatag

SEQ ID NO: 5599523 - DNA, 25 bp, Homo sapien
gaacaatagcaaagggtgtccttct

SEQ ID NO: 5599524 - DNA, 25 bp, Homo sapien
caagctgactcataaagagccctgc

SEQ ID NO: 5599525 - DNA, 25 bp, Homo sapien
caatgacagtcaaaagtaagtaaag

SEQ ID NO: 5599526 - DNA, 25 bp, Homo sapien
gtaagtaaagtagttcaaaagcaga

SEQ ID NO: 5599527 - DNA, 25 bp, Homo sapien
agttcaaaagcagagcaagctgact

SEQ ID NO: 5599528 - DNA, 25 bp, Homo sapien
agagaggaagttatgtttggtatcc

SEQ ID NO: 5599529 - DNA, 25 bp, Homo sapien
aaagatgaaacaacggacgtactga

SEQ ID NO: 5599530 - DNA, 25 bp, Homo sapien
aacaacggacgtactgagtgtcctc

SEQ ID NO: 5599531 - DNA, 25 bp, Homo sapien
gagaatgcacaaatatgccattttc

SEQ ID NO: 5599532 - DNA, 25 bp, Homo sapien
gccgaactgacggactgtacatcag

SEQ ID NO: 5599533 - DNA, 25 bp, Homo sapien
tgagtgtcctcattataacgcatcc

SEQ ID NO: 5599534 - DNA, 25 bp, Homo sapien
tgtacatcagttacgaggatgtggc

SEQ ID NO: 5599535 - DNA, 25 bp, Homo sapien
tataacgcatccagagaatgcacaa

SEQ ID NO: 5599536 - DNA, 25 bp, Homo sapien
tgaagccgaactgacggactgtaca

SEQ ID NO: 5599537 - DNA, 25 bp, Homo sapien
tgaaacaacggacgtactgagtgtc

SEQ ID NO: 5599538 - DNA, 25 bp, Homo sapien
atccgtcaaaagaactgaagccgaa

SEQ ID NO: 5599539 - DNA, 25 bp, Homo sapien
catccagagaatgcacaaatatgcc

SEQ ID NO: 5599540 - DNA, 25 bp, Homo sapien
caaaacgaccttactctacgattaa

SEQ ID NO: 5599541 - DNA, 25 bp, Homo sapien
ttaatcgtagagtaaggtcgttttg

SEQ ID NO: 5599542 - DNA, 25 bp, Homo sapien
tgtccactcagtgcggcaaaaactc

SEQ ID NO: 5599543 - DNA, 25 bp, Homo sapien
gtccgctctagtcctcgtgttgtac

SEQ ID NO: 5599544 - DNA, 25 bp, Homo sapien
cctgagcccagcacgctcttgtcca

SEQ ID NO: 5599545 - DNA, 25 bp, Homo sapien
agcccagcacgctcttgtccgctct

SEQ ID NO: 5599546 - DNA, 25 bp, Homo sapien
aacctactcgatgcggcaaaaccct

SEQ ID NO: 5599547 - DNA, 25 bp, Homo sapien
ctcccctggcacccatgcaggagca

SEQ ID NO: 5599548 - DNA, 25 bp, Homo sapien
atagtgaaattgttattagagtgca

SEQ ID NO: 5599549 - DNA, 25 bp, Homo sapien
gcaggagcagccataacctactcga

SEQ ID NO: 5599550 - DNA, 25 bp, Homo sapien
acgttgggtttttggacagttcatc

SEQ ID NO: 5599551 - DNA, 25 bp, Homo sapien
gtgcggcaaaaactctgagcccagc

SEQ ID NO: 5599552 - DNA, 25 bp, Homo sapien
ttagagtgcaacaaattaacacacc

SEQ ID NO: 5599553 - DNA, 25 bp, Homo sapien
agaatggttggcggtcctcttattc

SEQ ID NO: 5599554 - DNA, 25 bp, Homo sapien
gatggaagaaagttgggttcctgat

SEQ ID NO: 5599555 - DNA, 25 bp, Homo sapien
aggtgggtaatatctggctaacagg

SEQ ID NO: 5599556 - DNA, 25 bp, Homo sapien
tgactatctagaataaggaccccat

SEQ ID NO: 5599557 - DNA, 25 bp, Homo sapien
ggctaacaggagtgagaattcctgc

SEQ ID NO: 5599558 - DNA, 25 bp, Homo sapien
gggaatcatgtattaagaacggcac

SEQ ID NO: 5599559 - DNA, 25 bp, Homo sapien
aaatctacttgcaggaggtggataa

SEQ ID NO: 5599560 - DNA, 25 bp, Homo sapien
agcactgcaccactagctgggaatc

SEQ ID NO: 5599561 - DNA, 25 bp, Homo sapien
gggttcctgatgactatagagcctc

SEQ ID NO: 5599562 - DNA, 25 bp, Homo sapien
tcccccatgtggctaggtgggtaat

SEQ ID NO: 5599563 - DNA, 25 bp, Homo sapien
agaagcctggaattttggttgggtc

SEQ ID NO: 5599564 - DNA, 25 bp, Homo sapien
caaaggacagagtactagtaacgaa

SEQ ID NO: 5599565 - DNA, 25 bp, Homo sapien
agaaaactagaaagtggtcatcctc

SEQ ID NO: 5599566 - DNA, 25 bp, Homo sapien
aaaggtattcgagcagaagcttggg

SEQ ID NO: 5599567 - DNA, 25 bp, Homo sapien
tgaagaaaacaactgacaaggcaaa

SEQ ID NO: 5599568 - DNA, 25 bp, Homo sapien
tcttggtagaaaaaggtattcgagc

SEQ ID NO: 5599569 - DNA, 25 bp, Homo sapien
gcaacaaagcgaggccttgcctcta

SEQ ID NO: 5599570 - DNA, 25 bp, Homo sapien
tttcaagagcatagttggtgagagg

SEQ ID NO: 5599571 - DNA, 25 bp, Homo sapien
aaagcagtgggctgattcagtaatc

SEQ ID NO: 5599572 - DNA, 25 bp, Homo sapien
gtgaaggaagagttaaatatgaaga

SEQ ID NO: 5599573 - DNA, 25 bp, Homo sapien
ttcctaagttggagtgaaggaagag

SEQ ID NO: 5599574 - DNA, 25 bp, Homo sapien
gaggagagatctgagtacattccta

SEQ ID NO: 5599575 - DNA, 25 bp, Homo sapien
ctggacgctgtagattccgagctct

SEQ ID NO: 5599576 - DNA, 25 bp, Homo sapien
gattcctgaaaaccggcaggcaagc

SEQ ID NO: 5599577 - DNA, 25 bp, Homo sapien
tcgttgaaggaaattgcccacccaa

SEQ ID NO: 5599578 - DNA, 25 bp, Homo sapien
ttccgagctctggatggatgtgaaa

SEQ ID NO: 5599579 - DNA, 25 bp, Homo sapien
ccgccgcggcttctcgccttccggc

SEQ ID NO: 5599580 - DNA, 25 bp, Homo sapien
cttattcaccacgagcacaccacac

SEQ ID NO: 5599581 - DNA, 25 bp, Homo sapien
gataaattgcacaagatgagagttt

SEQ ID NO: 5599582 - DNA, 25 bp, Homo sapien
ggaagcgctcttgctggaaatggct

SEQ ID NO: 5599583 - DNA, 25 bp, Homo sapien
acaccacacgcacagtagaacagtt

SEQ ID NO: 5599584 - DNA, 25 bp, Homo sapien
tattcccccaaggtcaagttgccac

SEQ ID NO: 5599585 - DNA, 25 bp, Homo sapien
gcctttcccgctgcagggttgaaac

SEQ ID NO: 5599586 - DNA, 25 bp, Homo sapien
gcagcgagtggtgttcctttcatct

SEQ ID NO: 5599587 - DNA, 25 bp, Homo sapien
ttaaattatgagggatcgctccagc

SEQ ID NO: 5599588 - DNA, 25 bp, Homo sapien
ctaggagtcagatttatgctgcgtt

SEQ ID NO: 5599589 - DNA, 25 bp, Homo sapien
tctcgtgaacaaatcgatcagtgta

SEQ ID NO: 5599590 - DNA, 25 bp, Homo sapien
gtgtgtggagacttaatctctggac

SEQ ID NO: 5599591 - DNA, 25 bp, Homo sapien
gctccagcctgcatctgggagtggg

SEQ ID NO: 5599592 - DNA, 25 bp, Homo sapien
tgatatccaagtcaggcaggtctgc

SEQ ID NO: 5599593 - DNA, 25 bp, Homo sapien
tcatggagaagctgatatccaagtc

SEQ ID NO: 5599594 - DNA, 25 bp, Homo sapien
ttgtgtctaaacggcctccagggat

SEQ ID NO: 5599595 - DNA, 25 bp, Homo sapien
gcctccagggatgctgacatttgtt

SEQ ID NO: 5599596 - DNA, 25 bp, Homo sapien
ttcactctggtaggctgtgtgtgga

SEQ ID NO: 5599597 - DNA, 25 bp, Homo sapien
gccggtcaagcttcccagtcacact

SEQ ID NO: 5599598 - DNA, 25 bp, Homo sapien
gcagcctcctgcagttggaaccatc

SEQ ID NO: 5599599 - DNA, 25 bp, Homo sapien
cctggtccagagtctccctgccctg

SEQ ID NO: 5599600 - DNA, 25 bp, Homo sapien
ccaacccacgtgatgtgcaaggaga

SEQ ID NO: 5599601 - DNA, 25 bp, Homo sapien
acacatgcgtgccaccaaaccctgc

SEQ ID NO: 5599602 - DNA, 25 bp, Homo sapien
tggcacgatcatggcacaactgcag

SEQ ID NO: 5599603 - DNA, 25 bp, Homo sapien
tctcccaatgaagggaatgaagagt

SEQ ID NO: 5599604 - DNA, 25 bp, Homo sapien
gttggaaccatcaggccaacgcgga

SEQ ID NO: 5599605 - DNA, 25 bp, Homo sapien
acttagtctaactttgggggcacca

SEQ ID NO: 5599606 - DNA, 25 bp, Homo sapien
gggggcaccaccttccaattctgac

SEQ ID NO: 5599607 - DNA, 25 bp, Homo sapien
aatgaagagttccagtaaccatctc

SEQ ID NO: 5599608 - DNA, 25 bp, Homo sapien
caaactcagggaggaccacctgttt

SEQ ID NO: 5599609 - DNA, 25 bp, Homo sapien
tcgtatgcttgtggatgagacatta

SEQ ID NO: 5599610 - DNA, 25 bp, Homo sapien
accacgaggtgacaagctcaaataa

SEQ ID NO: 5599611 - DNA, 25 bp, Homo sapien
gccacaatagggaatgtagaaaaaa

SEQ ID NO: 5599612 - DNA, 25 bp, Homo sapien
tgatgacacaactgagctgttaaac

SEQ ID NO: 5599613 - DNA, 25 bp, Homo sapien
aaaacactagtaacattgctcttcc

SEQ ID NO: 5599614 - DNA, 25 bp, Homo sapien
tgagacattatgaggatgtgatgac

SEQ ID NO: 5599615 - DNA, 25 bp, Homo sapien
attcctgcctccgtttgcctgctgc

SEQ ID NO: 5599616 - DNA, 25 bp, Homo sapien
aagcctgagttcttgatgacacaac

SEQ ID NO: 5599617 - DNA, 25 bp, Homo sapien
gctgttaaacaaactcagggaggac

SEQ ID NO: 5599618 - DNA, 25 bp, Homo sapien
atgcacatatgccacaatagggaat

SEQ ID NO: 5599619 - DNA, 25 bp, Homo sapien
taatagtgaaaaggcaaatgatgtc

SEQ ID NO: 5599620 - DNA, 25 bp, Homo sapien
ggaccagctgaaagcatcttgagga

SEQ ID NO: 5599621 - DNA, 25 bp, Homo sapien
tgaaggcttcaaggtccacacgtca

SEQ ID NO: 5599622 - DNA, 25 bp, Homo sapien
aacacagccctagactgatggtggc

SEQ ID NO: 5599623 - DNA, 25 bp, Homo sapien
tactctcagtgaggtgctagtggat

SEQ ID NO: 5599624 - DNA, 25 bp, Homo sapien
ggggcaaaggattgccaagcatcta

SEQ ID NO: 5599625 - DNA, 25 bp, Homo sapien
actgcgtaagtagatagctgtaacc

SEQ ID NO: 5599626 - DNA, 25 bp, Homo sapien
gggtggcttgtctgcatgaccatct

SEQ ID NO: 5599627 - DNA, 25 bp, Homo sapien
cttagtcacctcaaggagggaaggg

SEQ ID NO: 5599628 - DNA, 25 bp, Homo sapien
ccacacgtcaaaaaaacacagccct

SEQ ID NO: 5599629 - DNA, 25 bp, Homo sapien
cattgtgatgaagaacatgatggtc

SEQ ID NO: 5599630 - DNA, 25 bp, Homo sapien
attcatgtaaatactggcagtgggc

SEQ ID NO: 5599631 - DNA, 25 bp, Homo sapien
agccaggttggaaaacccaagattg

SEQ ID NO: 5599632 - DNA, 25 bp, Homo sapien
agtgtagtataactttggaacggaa

SEQ ID NO: 5599633 - DNA, 25 bp, Homo sapien
atgtaaatactggcagtgggcagtg

SEQ ID NO: 5599634 - DNA, 25 bp, Homo sapien
caagattgagattctaacgcccaga

SEQ ID NO: 5599635 - DNA, 25 bp, Homo sapien
ctaacgcccagatttagtaggtctg

SEQ ID NO: 5599636 - DNA, 25 bp, Homo sapien
tacagtttatgagtaaatgggcttt

SEQ ID NO: 5599637 - DNA, 25 bp, Homo sapien
cctttgtctcaagataaagaactaa

SEQ ID NO: 5599638 - DNA, 25 bp, Homo sapien
aagaagataaggagaaaattaattc

SEQ ID NO: 5599639 - DNA, 25 bp, Homo sapien
aaagatatatactacaacaggcact

SEQ ID NO: 5599640 - DNA, 25 bp, Homo sapien
acagtgtttgtaggagattccttga

SEQ ID NO: 5599641 - DNA, 25 bp, Homo sapien
ctggacaaaccagaacaaacgtaca

SEQ ID NO: 5599642 - DNA, 25 bp, Homo sapien
ctgtgatatgatggttaatttgaaa

SEQ ID NO: 5599643 - DNA, 25 bp, Homo sapien
tctcactcaaccccctcatggaatt

SEQ ID NO: 5599644 - DNA, 25 bp, Homo sapien
tgaagagatctgtgatatgatggtt

SEQ ID NO: 5599645 - DNA, 25 bp, Homo sapien
ttttccctttaaatatgagctgcat

SEQ ID NO: 5599646 - DNA, 25 bp, Homo sapien
aatggagatttcaagctcgaatttc

SEQ ID NO: 5599647 - DNA, 25 bp, Homo sapien
tctctgcaactggacaaaccagaac

SEQ ID NO: 5599648 - DNA, 25 bp, Homo sapien
aatacctaacatataaagcatccct

SEQ ID NO: 5599649 - DNA, 25 bp, Homo sapien
atgttccccataactgcttagcatt

SEQ ID NO: 5599650 - DNA, 25 bp, Homo sapien
tagcatttaagcaatgttgacatat

SEQ ID NO: 5599651 - DNA, 25 bp, Homo sapien
atcaattctacatccaaatggagat

SEQ ID NO: 5599652 - DNA, 25 bp, Homo sapien
agcaggctagtttgtgccagtggct

SEQ ID NO: 5599653 - DNA, 25 bp, Homo sapien
cctggtgaactgaggaagttcctga

SEQ ID NO: 5599654 - DNA, 25 bp, Homo sapien
caggcacttaaaagccactggcatg

SEQ ID NO: 5599655 - DNA, 25 bp, Homo sapien
tccttggagaagactcagtgtgtct

SEQ ID NO: 5599656 - DNA, 25 bp, Homo sapien
tgaaagaagccaatattgggaaggg

SEQ ID NO: 5599657 - DNA, 25 bp, Homo sapien
gcccagttggtactttcactatggc

SEQ ID NO: 5599658 - DNA, 25 bp, Homo sapien
ctgaggaagttcctgattcccaggc

SEQ ID NO: 5599659 - DNA, 25 bp, Homo sapien
atgaacactggcaaacctgtgccct

SEQ ID NO: 5599660 - DNA, 25 bp, Homo sapien
aacagaactgtcaggaggcatcctg

SEQ ID NO: 5599661 - DNA, 25 bp, Homo sapien
ggactatagtcatagaggtgcgcca

SEQ ID NO: 5599662 - DNA, 25 bp, Homo sapien
ggcagaggcatccctagcccagttg

SEQ ID NO: 5599663 - DNA, 25 bp, Homo sapien
atttggcccaaaaattgttacatat

SEQ ID NO: 5599664 - DNA, 25 bp, Homo sapien
ctagctttaaatagagcactcaaac

SEQ ID NO: 5599665 - DNA, 25 bp, Homo sapien
tacttctaagacagattccaacttt

SEQ ID NO: 5599666 - DNA, 25 bp, Homo sapien
acaatcctgcgtaaggatagggaac

SEQ ID NO: 5599667 - DNA, 25 bp, Homo sapien
tcaagccctttagatacagccatgc

SEQ ID NO: 5599668 - DNA, 25 bp, Homo sapien
cttaacctggctaacagtaaaacaa

SEQ ID NO: 5599669 - DNA, 25 bp, Homo sapien
aagtgagccattgtctttcagtact

SEQ ID NO: 5599670 - DNA, 25 bp, Homo sapien
ttcagtactaaagtcctcaagaagc

SEQ ID NO: 5599671 - DNA, 25 bp, Homo sapien
agtcctcaagaagcttaaacttaac

SEQ ID NO: 5599672 - DNA, 25 bp, Homo sapien
aggggtggagtagattacttctaag

SEQ ID NO: 5599673 - DNA, 25 bp, Homo sapien
caactaggtcttacaagtgagccat

SEQ ID NO: 5599674 - DNA, 25 bp, Homo sapien
atcatctccactccctccaggcttt

SEQ ID NO: 5599675 - DNA, 25 bp, Homo sapien
caggcctcctgctcgcaagagtagt

SEQ ID NO: 5599676 - DNA, 25 bp, Homo sapien
caagagtagtatatatgcccaatgc

SEQ ID NO: 5599677 - DNA, 25 bp, Homo sapien
accaaagaaggaatgcgttaaacat

SEQ ID NO: 5599678 - DNA, 25 bp, Homo sapien
atgcccaatgcaaacaagtcagtat

SEQ ID NO: 5599679 - DNA, 25 bp, Homo sapien
ttctagaccaaaggacctaacagtc

SEQ ID NO: 5599680 - DNA, 25 bp, Homo sapien
aggacctaacagtctccctgggttg

SEQ ID NO: 5599681 - DNA, 25 bp, Homo sapien
cgggatttcccttgttgccaggctc

SEQ ID NO: 5599682 - DNA, 25 bp, Homo sapien
cctcttgcctacaatctcgggattt

SEQ ID NO: 5599683 - DNA, 25 bp, Homo sapien
aggagatttcaggcctcctgctcgc

SEQ ID NO: 5599684 - DNA, 25 bp, Homo sapien
aacaagtcagtatagtctggctatt

SEQ ID NO: 5599685 - DNA, 25 bp, Homo sapien
ttggtctgctattgagctggacttc

SEQ ID NO: 5599686 - DNA, 25 bp, Homo sapien
gatctcagagtaagtaccgcttgcc

SEQ ID NO: 5599687 - DNA, 25 bp, Homo sapien
gtgtcctgtgtgcatgggtcttttc

SEQ ID NO: 5599688 - DNA, 25 bp, Homo sapien
gaagtctctctggtccgctcccctc

SEQ ID NO: 5599689 - DNA, 25 bp, Homo sapien
tagaagacaccttgtgaagagccac

SEQ ID NO: 5599690 - DNA, 25 bp, Homo sapien
accatctgggaaataacgctcaagg

SEQ ID NO: 5599691 - DNA, 25 bp, Homo sapien
ccttagcaaacgggtgatctcagag

SEQ ID NO: 5599692 - DNA, 25 bp, Homo sapien
cgctcaaggcaatggctcccaaata

SEQ ID NO: 5599693 - DNA, 25 bp, Homo sapien
cagggaggaaagtgtcacctttctc

SEQ ID NO: 5599694 - DNA, 25 bp, Homo sapien
accgcttgccagaatcgctgagtcc

SEQ ID NO: 5599695 - DNA, 25 bp, Homo sapien
agccacagcctattccgaggaagtc

SEQ ID NO: 5599696 - DNA, 25 bp, Homo sapien
gttcctctgcacagctacccagctt

SEQ ID NO: 5599697 - DNA, 25 bp, Homo sapien
ttctcagtgagcaacaatctaatgt

SEQ ID NO: 5599698 - DNA, 25 bp, Homo sapien
ctgtatcttaggctctcatgtcttc

SEQ ID NO: 5599699 - DNA, 25 bp, Homo sapien
ccagcttaagttataaaacagggca

SEQ ID NO: 5599700 - DNA, 25 bp, Homo sapien
actagcccctataacttcctgtcac

SEQ ID NO: 5599701 - DNA, 25 bp, Homo sapien
ccttggtttggtaatgatgagacac

SEQ ID NO: 5599702 - DNA, 25 bp, Homo sapien
caagattcaccactgtgtgtgattc

SEQ ID NO: 5599703 - DNA, 25 bp, Homo sapien
cagggcaacagaggtctataatgtt

SEQ ID NO: 5599704 - DNA, 25 bp, Homo sapien
atttaataccttgggaggacagcct

SEQ ID NO: 5599705 - DNA, 25 bp, Homo sapien
tcaccggcaggcagaattccttaaa

SEQ ID NO: 5599706 - DNA, 25 bp, Homo sapien
ttcaactgccacttagcccccaatc

SEQ ID NO: 5599707 - DNA, 25 bp, Homo sapien
taaagtaatattctggcaccctaat

SEQ ID NO: 5599708 - DNA, 25 bp, Homo sapien
gagacagaagccttcagtttgaatt

SEQ ID NO: 5599709 - DNA, 25 bp, Homo sapien
catgattcctttgctagtttgccct

SEQ ID NO: 5599710 - DNA, 25 bp, Homo sapien
gaatttcagattcttgaagactaac

SEQ ID NO: 5599711 - DNA, 25 bp, Homo sapien
cagattttagaaccactttgtgagg

SEQ ID NO: 5599712 - DNA, 25 bp, Homo sapien
tacatgttctgaatttggtaggaca

SEQ ID NO: 5599713 - DNA, 25 bp, Homo sapien
ctgaatttggtaggacatgttttcc

SEQ ID NO: 5599714 - DNA, 25 bp, Homo sapien
tctggcaccctaattggagtcttgt

SEQ ID NO: 5599715 - DNA, 25 bp, Homo sapien
tctgtcaggagcttatatgcctacc

SEQ ID NO: 5599716 - DNA, 25 bp, Homo sapien
atgcctacctttaattgaatcttcc

SEQ ID NO: 5599717 - DNA, 25 bp, Homo sapien
atcttaagagataccatcatttcta

SEQ ID NO: 5599718 - DNA, 25 bp, Homo sapien
agtgaaagcccttcaaaattgcttg

SEQ ID NO: 5599719 - DNA, 25 bp, Homo sapien
agatttcaggagacaaaataaagtc

SEQ ID NO: 5599720 - DNA, 25 bp, Homo sapien
atcaataagccctaaagtttttcat

SEQ ID NO: 5599721 - DNA, 25 bp, Homo sapien
gataaaaaatgtgcagagagaaaaa

SEQ ID NO: 5599722 - DNA, 25 bp, Homo sapien
ttaaagagaatatcaataagcccta

SEQ ID NO: 5599723 - DNA, 25 bp, Homo sapien
aaagtcagctggataaaaaatgtgc

SEQ ID NO: 5599724 - DNA, 25 bp, Homo sapien
aaaatgttaagagtgagtgtctcgg

SEQ ID NO: 5599725 - DNA, 25 bp, Homo sapien
atgaagatttcaggagacaaaataa

SEQ ID NO: 5599726 - DNA, 25 bp, Homo sapien
tgcttgcgaagactttgttagacac

SEQ ID NO: 5599727 - DNA, 25 bp, Homo sapien
aaaataaagtcagctggataaaaaa

SEQ ID NO: 5599728 - DNA, 25 bp, Homo sapien
gggaaaaatgtatgcttgcgaagac

SEQ ID NO: 5599729 - DNA, 25 bp, Homo sapien
ggcgtcgggtcgctgaagggcggta

SEQ ID NO: 5599730 - DNA, 25 bp, Homo sapien
taccgcccttcagcgacccgacgcc

SEQ ID NO: 5599731 - DNA, 25 bp, Homo sapien
gtcggcgtcgggtcgctgaagggcg

SEQ ID NO: 5599732 - DNA, 25 bp, Homo sapien
cgcccttcagcgacccgacgccgac

SEQ ID NO: 5599733 - DNA, 25 bp, Homo sapien
gcccaggacaagttcagaaaactac

SEQ ID NO: 5599734 - DNA, 25 bp, Homo sapien
gccataagccaaacatagatcccct

SEQ ID NO: 5599735 - DNA, 25 bp, Homo sapien
aaggaatggcctcccatcccccagt

SEQ ID NO: 5599736 - DNA, 25 bp, Homo sapien
tcagtctcagaagtgttgccaagga

SEQ ID NO: 5599737 - DNA, 25 bp, Homo sapien
gtgggagtgaagccacttgccataa

SEQ ID NO: 5599738 - DNA, 25 bp, Homo sapien
gatcccctgatgactgtccgtgtcc

SEQ ID NO: 5599739 - DNA, 25 bp, Homo sapien
cttgagcatatagacacccagtgat

SEQ ID NO: 5599740 - DNA, 25 bp, Homo sapien
ttccaaatgatgcagtggtggtcag

SEQ ID NO: 5599741 - DNA, 25 bp, Homo sapien
aatatcccctaatggcacctgagcc

SEQ ID NO: 5599742 - DNA, 25 bp, Homo sapien
ccgtgtcctgccctagccatccctc

SEQ ID NO: 5599743 - DNA, 25 bp, Homo sapien
ctgacagctatcagagaatggcagg

SEQ ID NO: 5599744 - DNA, 25 bp, Homo sapien
ccagctgtcgcactgtctgcgcggg

SEQ ID NO: 5599745 - DNA, 25 bp, Homo sapien
agggcttcaccctgcgccacaacga

SEQ ID NO: 5599746 - DNA, 25 bp, Homo sapien
gagcacctgcagggcttcaccctgc

SEQ ID NO: 5599747 - DNA, 25 bp, Homo sapien
ttcaccctgcgccacaacgagcgaa

SEQ ID NO: 5599748 - DNA, 25 bp, Homo sapien
ctgtctgtatgcgaagcactgacgc

SEQ ID NO: 5599749 - DNA, 25 bp, Homo sapien
aaccgctgtacaggaactctaccag

SEQ ID NO: 5599750 - DNA, 25 bp, Homo sapien
ctgcgtgcattcgtcgataactgtc

SEQ ID NO: 5599751 - DNA, 25 bp, Homo sapien
gataactgtctgtatgcgaagcact

SEQ ID NO: 5599752 - DNA, 25 bp, Homo sapien
tcgtcgataactgtctgtatgcgaa

SEQ ID NO: 5599753 - DNA, 25 bp, Homo sapien
gcgggcgataatctgcgtgcattcg

SEQ ID NO: 5599754 - DNA, 25 bp, Homo sapien
aactctaccagctgtcgcactgtct

SEQ ID NO: 5599755 - DNA, 25 bp, Homo sapien
agtgtggcatgatatagtatagtaa

SEQ ID NO: 5599756 - DNA, 25 bp, Homo sapien
cagtatagtatagtgtggcatgata

SEQ ID NO: 5599757 - DNA, 25 bp, Homo sapien
aaaatgatggaatatttagaatttc

SEQ ID NO: 5599758 - DNA, 25 bp, Homo sapien
agagaacaagccactagctgggtat

SEQ ID NO: 5599759 - DNA, 25 bp, Homo sapien
gcagaatctagacaaatgctgtgat

SEQ ID NO: 5599760 - DNA, 25 bp, Homo sapien
gattataaaactgtcccctaggctg

SEQ ID NO: 5599761 - DNA, 25 bp, Homo sapien
tgaaggccaagaagactgattataa

SEQ ID NO: 5599762 - DNA, 25 bp, Homo sapien
tttcagggcaataaaagtggaaaga

SEQ ID NO: 5599763 - DNA, 25 bp, Homo sapien
gcagcggtgcacagctataatctcg

SEQ ID NO: 5599764 - DNA, 25 bp, Homo sapien
gctgggtatagccaccagcagagtc

SEQ ID NO: 5599765 - DNA, 25 bp, Homo sapien
accagcagagtcctctgaaggccaa

SEQ ID NO: 5599766 - DNA, 25 bp, Homo sapien
gccagctgcacttcctggctgtgtg

SEQ ID NO: 5599767 - DNA, 25 bp, Homo sapien
agagctagctcctggcacctgcttc

SEQ ID NO: 5599768 - DNA, 25 bp, Homo sapien
ccctgagttcgctgagtctcccggg

SEQ ID NO: 5599769 - DNA, 25 bp, Homo sapien
gcggagaaagcgcttctctgcccga

SEQ ID NO: 5599770 - DNA, 25 bp, Homo sapien
ctgaactcggcatggccagttctgc

SEQ ID NO: 5599771 - DNA, 25 bp, Homo sapien
cgtcctcccctgagttcgctgagtc

SEQ ID NO: 5599772 - DNA, 25 bp, Homo sapien
gccctgggtcctgaactcggcatgg

SEQ ID NO: 5599773 - DNA, 25 bp, Homo sapien
ggacttggccctgggtcctgaactc

SEQ ID NO: 5599774 - DNA, 25 bp, Homo sapien
agagttctcctagtacctggtagac

SEQ ID NO: 5599775 - DNA, 25 bp, Homo sapien
tacctggtagacgctcaggaaatgg

SEQ ID NO: 5599776 - DNA, 25 bp, Homo sapien
ctgcttcaagtgcagagaaccagcg

SEQ ID NO: 5599777 - DNA, 25 bp, Homo sapien
aaattctcccaagtgaggcacattt

SEQ ID NO: 5599778 - DNA, 25 bp, Homo sapien
tccacaataacccagcaacactaga

SEQ ID NO: 5599779 - DNA, 25 bp, Homo sapien
aaagatacacaattaggatactact

SEQ ID NO: 5599780 - DNA, 25 bp, Homo sapien
agacagaagaatctgtgctgctgcc

SEQ ID NO: 5599781 - DNA, 25 bp, Homo sapien
gtgttaaaacaatgacctggtcctc

SEQ ID NO: 5599782 - DNA, 25 bp, Homo sapien
tactatagaccgttcccccagtgac

SEQ ID NO: 5599783 - DNA, 25 bp, Homo sapien
ttgctgtggataaaagacagaagaa

SEQ ID NO: 5599784 - DNA, 25 bp, Homo sapien
ttcaaagtgatagtgcccaattaac

SEQ ID NO: 5599785 - DNA, 25 bp, Homo sapien
gatgttgtcactgctgggtattttt

SEQ ID NO: 5599786 - DNA, 25 bp, Homo sapien
tcctgcctgcccatcagcactggat

SEQ ID NO: 5599787 - DNA, 25 bp, Homo sapien
ctagatgcccagataaccacaccat

SEQ ID NO: 5599788 - DNA, 25 bp, Homo sapien
catctgggttacatgaagaacaaca

SEQ ID NO: 5599789 - DNA, 25 bp, Homo sapien
ggtctgaacaccaaagatggcaacc

SEQ ID NO: 5599790 - DNA, 25 bp, Homo sapien
aattgggatatttgaagggtcactc

SEQ ID NO: 5599791 - DNA, 25 bp, Homo sapien
gttctcccataagagggacagttcc

SEQ ID NO: 5599792 - DNA, 25 bp, Homo sapien
gagctaagatcaaagtaagagaagt

SEQ ID NO: 5599793 - DNA, 25 bp, Homo sapien
agtgagcgcagagacttaatattca

SEQ ID NO: 5599794 - DNA, 25 bp, Homo sapien
tgaatggagggtcattaaacaagtc

SEQ ID NO: 5599795 - DNA, 25 bp, Homo sapien
tcctgagatacccacagtgagcgca

SEQ ID NO: 5599796 - DNA, 25 bp, Homo sapien
taactttagcagccagagagaaatg

SEQ ID NO: 5599797 - DNA, 25 bp, Homo sapien
cttcacataggccagcaagaagaga

SEQ ID NO: 5599798 - DNA, 25 bp, Homo sapien
attccctggagttgatccctggggt

SEQ ID NO: 5599799 - DNA, 25 bp, Homo sapien
ttcaaaaagtaatagtcaccaccac

SEQ ID NO: 5599800 - DNA, 25 bp, Homo sapien
atgactgaacaaatagatccattgg

SEQ ID NO: 5599801 - DNA, 25 bp, Homo sapien
ctccccatgcctagagcagagctca

SEQ ID NO: 5599802 - DNA, 25 bp, Homo sapien
agaactagggccatatttgtcttcc

SEQ ID NO: 5599803 - DNA, 25 bp, Homo sapien
ataagatccacaagaactagggcca

SEQ ID NO: 5599804 - DNA, 25 bp, Homo sapien
cattggaattatcctgcggcctttt

SEQ ID NO: 5599805 - DNA, 25 bp, Homo sapien
ctcccctgtggcaaatacacaattc

SEQ ID NO: 5599806 - DNA, 25 bp, Homo sapien
tttctgggttcctataggcagttta

SEQ ID NO: 5599807 - DNA, 25 bp, Homo sapien
atttctgaagagtaatccaatctcc

SEQ ID NO: 5599808 - DNA, 25 bp, Homo sapien
gatgggttcccgatatagcttctga

SEQ ID NO: 5599809 - DNA, 25 bp, Homo sapien
gcccaaggcaataatgcaggtcatc

SEQ ID NO: 5599810 - DNA, 25 bp, Homo sapien
ccttccatgccggacatgtaggact

SEQ ID NO: 5599811 - DNA, 25 bp, Homo sapien
atatgtattacaggtattgtctttc

SEQ ID NO: 5599812 - DNA, 25 bp, Homo sapien
tcctggagatccttccatgccggac

SEQ ID NO: 5599813 - DNA, 25 bp, Homo sapien
catcaaacattacagttaaagctaa

SEQ ID NO: 5599814 - DNA, 25 bp, Homo sapien
acagttaaagctaatgcacgctacc

SEQ ID NO: 5599815 - DNA, 25 bp, Homo sapien
ctgttgacagtttggttagtatcct

SEQ ID NO: 5599816 - DNA, 25 bp, Homo sapien
tgcacgctaccaaactactgttgac

SEQ ID NO: 5599817 - DNA, 25 bp, Homo sapien
tgccggacatgtaggactctctctt

SEQ ID NO: 5599818 - DNA, 25 bp, Homo sapien
ttagtatccttccagaccttctctc

SEQ ID NO: 5599819 - DNA, 25 bp, Homo sapien
cttttaacattgtctcctggagatc

SEQ ID NO: 5599820 - DNA, 25 bp, Homo sapien
atcatgtgtaccatagtccatcctc

SEQ ID NO: 5599821 - DNA, 25 bp, Homo sapien
gtggtctcgaatgtctgggcttaaa

SEQ ID NO: 5599822 - DNA, 25 bp, Homo sapien
gagctaagtggcttcgtgcccgtag

SEQ ID NO: 5599823 - DNA, 25 bp, Homo sapien
aagcgggacccctgctcccaaattc

SEQ ID NO: 5599824 - DNA, 25 bp, Homo sapien
caaattccttggagatcgtacagcc

SEQ ID NO: 5599825 - DNA, 25 bp, Homo sapien
gtgcccgtagaagtggatttcaaac

SEQ ID NO: 5599826 - DNA, 25 bp, Homo sapien
catgggaaaccttggatctgcacca

SEQ ID NO: 5599827 - DNA, 25 bp, Homo sapien
ctgcaccagttgggacctcttctcc

SEQ ID NO: 5599828 - DNA, 25 bp, Homo sapien
aagcgctccttggctttggagctaa

SEQ ID NO: 5599829 - DNA, 25 bp, Homo sapien
ggatctgcaccagttgggacctctt

SEQ ID NO: 5599830 - DNA, 25 bp, Homo sapien
tggagatcgtacagccctcacctct

SEQ ID NO: 5599831 - DNA, 25 bp, Homo sapien
tctcgaatgtctgggcttaaatgat

SEQ ID NO: 5599832 - DNA, 25 bp, Homo sapien
agggagagtgacttgacctagttca

SEQ ID NO: 5599833 - DNA, 25 bp, Homo sapien
tgtagaaggaagaacgttcagttca

SEQ ID NO: 5599834 - DNA, 25 bp, Homo sapien
gactgatcatgagattgcccccacc

SEQ ID NO: 5599835 - DNA, 25 bp, Homo sapien
tgcccccaccaaaagttcgatgact

SEQ ID NO: 5599836 - DNA, 25 bp, Homo sapien
catagttaagaaagcgctcatacat

SEQ ID NO: 5599837 - DNA, 25 bp, Homo sapien
ggggacattgctccaaaaaggcacc

SEQ ID NO: 5599838 - DNA, 25 bp, Homo sapien
gttgggtaaactggtgatccgttga

SEQ ID NO: 5599839 - DNA, 25 bp, Homo sapien
ttcatatcaatggaccgaatgggga

SEQ ID NO: 5599840 - DNA, 25 bp, Homo sapien
ccttgcacagagaagctcatcagtc

SEQ ID NO: 5599841 - DNA, 25 bp, Homo sapien
aagagcttgatgactccggcgttct

SEQ ID NO: 5599842 - DNA, 25 bp, Homo sapien
tcacaaacctagcaaacgaagaatt

SEQ ID NO: 5599843 - DNA, 25 bp, Homo sapien
aaatcccaaacaaatgcacttcagt

SEQ ID NO: 5599844 - DNA, 25 bp, Homo sapien
ctttaggattagggcctgacagagt

SEQ ID NO: 5599845 - DNA, 25 bp, Homo sapien
aatgttggaattagccaaccccacc

SEQ ID NO: 5599846 - DNA, 25 bp, Homo sapien
caaccccaccaccacagtaaataaa

SEQ ID NO: 5599847 - DNA, 25 bp, Homo sapien
atatctaggcctttaggattagggc

SEQ ID NO: 5599848 - DNA, 25 bp, Homo sapien
aatcccagaacctatgcaagacagc

SEQ ID NO: 5599849 - DNA, 25 bp, Homo sapien
caggccctgaaaaagatgatgtttc

SEQ ID NO: 5599850 - DNA, 25 bp, Homo sapien
taaataagaggaccacactttatcg

SEQ ID NO: 5599851 - DNA, 25 bp, Homo sapien
aaggtcttgcaggacactaacacaa

SEQ ID NO: 5599852 - DNA, 25 bp, Homo sapien
ccctgccgcccctactggttaaatg

SEQ ID NO: 5599853 - DNA, 25 bp, Homo sapien
tgcaagacagcagcaaatcccaaac

SEQ ID NO: 5599854 - DNA, 25 bp, Homo sapien
tataaaacacaacagctgcaggaca

SEQ ID NO: 5599855 - DNA, 25 bp, Homo sapien
catgactggcatatttgaagcaaaa

SEQ ID NO: 5599856 - DNA, 25 bp, Homo sapien
aggtgcaaagagttgtgctacagtg

SEQ ID NO: 5599857 - DNA, 25 bp, Homo sapien
aaaaaacagacaaggacttgttgac

SEQ ID NO: 5599858 - DNA, 25 bp, Homo sapien
atagtgaagcttattaaagagctct

SEQ ID NO: 5599859 - DNA, 25 bp, Homo sapien
agcaaaaactaaggtgcaaagagtt

SEQ ID NO: 5599860 - DNA, 25 bp, Homo sapien
tgctacagtgagatttttagatgcc

SEQ ID NO: 5599861 - DNA, 25 bp, Homo sapien
ataccataattgactcatgactggc

SEQ ID NO: 5599862 - DNA, 25 bp, Homo sapien
aatggctcagttgcacttaatagtg

SEQ ID NO: 5599863 - DNA, 25 bp, Homo sapien
ttttggcagctttattgcttgaccc

SEQ ID NO: 5599864 - DNA, 25 bp, Homo sapien
tagcctgaatttgagttctagtgtt

SEQ ID NO: 5599865 - DNA, 25 bp, Homo sapien
tgtttctttagtcttggcaatcacc

SEQ ID NO: 5599866 - DNA, 25 bp, Homo sapien
aaagagaaaagatgaaataaaaaca

SEQ ID NO: 5599867 - DNA, 25 bp, Homo sapien
tgtcttttgcccttctagctgtttc

SEQ ID NO: 5599868 - DNA, 25 bp, Homo sapien
gagccgtgctctactttggataatc

SEQ ID NO: 5599869 - DNA, 25 bp, Homo sapien
tggcaatcaccttagagagagagaa

SEQ ID NO: 5599870 - DNA, 25 bp, Homo sapien
aataattggtggataaatcaggaat

SEQ ID NO: 5599871 - DNA, 25 bp, Homo sapien
actgcacctgagccgtgctctactt

SEQ ID NO: 5599872 - DNA, 25 bp, Homo sapien
agtcttggcaatcaccttagagaga

SEQ ID NO: 5599873 - DNA, 25 bp, Homo sapien
ctctgaattcaggtttaaatacatt

SEQ ID NO: 5599874 - DNA, 25 bp, Homo sapien
gaggagagagtaaagctaatatatt

SEQ ID NO: 5599875 - DNA, 25 bp, Homo sapien
cagtttttaaaggtttggcagtgga

SEQ ID NO: 5599876 - DNA, 25 bp, Homo sapien
cccccaggtgaaatatgcaaagatg

SEQ ID NO: 5599877 - DNA, 25 bp, Homo sapien
gtagaaaagctgtttggtcatatgc

SEQ ID NO: 5599878 - DNA, 25 bp, Homo sapien
ctggggcaggacatcccatctttct

SEQ ID NO: 5599879 - DNA, 25 bp, Homo sapien
tatgcatatatgactggttcccacc

SEQ ID NO: 5599880 - DNA, 25 bp, Homo sapien
ttcttgtaggtaaggaagcaaaatg

SEQ ID NO: 5599881 - DNA, 25 bp, Homo sapien
tgcaaagatgcatgagaagtactca

SEQ ID NO: 5599882 - DNA, 25 bp, Homo sapien
aatgggtggatttaaacatcaactt

SEQ ID NO: 5599883 - DNA, 25 bp, Homo sapien
agcctctgtgcttccccccaggtga

SEQ ID NO: 5599884 - DNA, 25 bp, Homo sapien
aagtactcatggaaatgccatttgc

SEQ ID NO: 5599885 - DNA, 25 bp, Homo sapien
ctttagacgctgtgcatgtgcctgg

SEQ ID NO: 5599886 - DNA, 25 bp, Homo sapien
ttagatttttgctggggcaggacat

SEQ ID NO: 5599887 - DNA, 25 bp, Homo sapien
aggaactggcctagacagaaattct

SEQ ID NO: 5599888 - DNA, 25 bp, Homo sapien
gaaggtatcagaagcagcctcagaa

SEQ ID NO: 5599889 - DNA, 25 bp, Homo sapien
aacaatactccaaaatatggcactt

SEQ ID NO: 5599890 - DNA, 25 bp, Homo sapien
accaaagcagataataaagactaga

SEQ ID NO: 5599891 - DNA, 25 bp, Homo sapien
cacaaagtactttgcactggaaggt

SEQ ID NO: 5599892 - DNA, 25 bp, Homo sapien
ctggcaaatagggctaatgctggag

SEQ ID NO: 5599893 - DNA, 25 bp, Homo sapien
cacctttctgtctaggaactggcct

SEQ ID NO: 5599894 - DNA, 25 bp, Homo sapien
attctactggcaaatagggctaatg

SEQ ID NO: 5599895 - DNA, 25 bp, Homo sapien
tatggcacttcagcacacaaagtac

SEQ ID NO: 5599896 - DNA, 25 bp, Homo sapien
agtacagacaccagaattcctcctc

SEQ ID NO: 5599897 - DNA, 25 bp, Homo sapien
gaagcagcctcagaacctggatctc

SEQ ID NO: 5599898 - DNA, 25 bp, Homo sapien
aactacccaggtatgggtggtgtgc

SEQ ID NO: 5599899 - DNA, 25 bp, Homo sapien
acacatgggaataagaggtatcctg

SEQ ID NO: 5599900 - DNA, 25 bp, Homo sapien
aagaacacctctcacatagcaattg

SEQ ID NO: 5599901 - DNA, 25 bp, Homo sapien
gggaataagaggtatcctggtctcc

SEQ ID NO: 5599902 - DNA, 25 bp, Homo sapien
ttagaatgtaaatgagacactcacc

SEQ ID NO: 5599903 - DNA, 25 bp, Homo sapien
ctgccaggtgcagtttttggattac

SEQ ID NO: 5599904 - DNA, 25 bp, Homo sapien
aaaggactagggttaaacatatcta

SEQ ID NO: 5599905 - DNA, 25 bp, Homo sapien
tggattacagtggctcagacacctg

SEQ ID NO: 5599906 - DNA, 25 bp, Homo sapien
atacaagtaatcactggaataactc

SEQ ID NO: 5599907 - DNA, 25 bp, Homo sapien
caaaaacaaaacctgccaggtgcag

SEQ ID NO: 5599908 - DNA, 25 bp, Homo sapien
caaaataccataaagaagaaaacaa

SEQ ID NO: 5599909 - DNA, 25 bp, Homo sapien
actctgcgctgcaatatcgcgattc

SEQ ID NO: 5599910 - DNA, 25 bp, Homo sapien
ttgccttcccacttcgagccctgcc

SEQ ID NO: 5599911 - DNA, 25 bp, Homo sapien
ccatccgcccagacaaatgggagga

SEQ ID NO: 5599912 - DNA, 25 bp, Homo sapien
ctgccaggaacttccctgaaggccc

SEQ ID NO: 5599913 - DNA, 25 bp, Homo sapien
ttgaaggggacttgctattcctctg

SEQ ID NO: 5599914 - DNA, 25 bp, Homo sapien
acgtagaacgtccctagcgtggaaa

SEQ ID NO: 5599915 - DNA, 25 bp, Homo sapien
gagccctgccagtgctttgccgggt

SEQ ID NO: 5599916 - DNA, 25 bp, Homo sapien
aggaagcagtagaagtttgccccta

SEQ ID NO: 5599917 - DNA, 25 bp, Homo sapien
gaactgaggccccttcctgtcggct

SEQ ID NO: 5599918 - DNA, 25 bp, Homo sapien
aagagcctgctttgaaagaccgcct

SEQ ID NO: 5599919 - DNA, 25 bp, Homo sapien
tttgcccctaggagtctttgaagtc

SEQ ID NO: 5599920 - DNA, 25 bp, Homo sapien
aaaggagataaaattcgatgcagaa

SEQ ID NO: 5599921 - DNA, 25 bp, Homo sapien
aaagagagtcactgcagttgattta

SEQ ID NO: 5599922 - DNA, 25 bp, Homo sapien
acacaaatacacaaaagagagtcac

SEQ ID NO: 5599923 - DNA, 25 bp, Homo sapien
aagagctggcttaggcaactgttat

SEQ ID NO: 5599924 - DNA, 25 bp, Homo sapien
ttagcatcttgcataaccatggtac

SEQ ID NO: 5599925 - DNA, 25 bp, Homo sapien
agagaaaaagaagaacatcaaaaag

SEQ ID NO: 5599926 - DNA, 25 bp, Homo sapien
atttaaaaatactcaggcccttcac

SEQ ID NO: 5599927 - DNA, 25 bp, Homo sapien
aagaaagtaataatggtacactact

SEQ ID NO: 5599928 - DNA, 25 bp, Homo sapien
ctagaatgtgtatgtagcaatagac

SEQ ID NO: 5599929 - DNA, 25 bp, Homo sapien
ttcaagtaagggcataaggataata

SEQ ID NO: 5599930 - DNA, 25 bp, Homo sapien
tgttatctctgtaaagggctaattc

SEQ ID NO: 5599931 - DNA, 25 bp, Homo sapien
gtacacagctgatgagaaatgttcc

SEQ ID NO: 5599932 - DNA, 25 bp, Homo sapien
aggcctcatagagaacagcactgac

SEQ ID NO: 5599933 - DNA, 25 bp, Homo sapien
tgcctgacatagtgtacacagctga

SEQ ID NO: 5599934 - DNA, 25 bp, Homo sapien
atagtgtacacagctgatgagaaat

SEQ ID NO: 5599935 - DNA, 25 bp, Homo sapien
cagcactgacaacttccagaaacat

SEQ ID NO: 5599936 - DNA, 25 bp, Homo sapien
ttgaaatgcctgacatagtgtacac

SEQ ID NO: 5599937 - DNA, 25 bp, Homo sapien
tccaaagctccctggccacacatcc

SEQ ID NO: 5599938 - DNA, 25 bp, Homo sapien
cttcaggcctcatagagaacagcac

SEQ ID NO: 5599939 - DNA, 25 bp, Homo sapien
acagggaaatcactaatccaaaatg

SEQ ID NO: 5599940 - DNA, 25 bp, Homo sapien
cactaatccaaaatggaaagctctc

SEQ ID NO: 5599941 - DNA, 25 bp, Homo sapien
acatatttgaaatgcctgacatagt

SEQ ID NO: 5599942 - DNA, 25 bp, Homo sapien
ctgggcttcttcgccctccagcccc

SEQ ID NO: 5599943 - DNA, 25 bp, Homo sapien
atgccagagttacaagcacgtaaat

SEQ ID NO: 5599944 - DNA, 25 bp, Homo sapien
aagcacgtaaatatggagaaagcct

SEQ ID NO: 5599945 - DNA, 25 bp, Homo sapien
agccaggaactctcctgggcttctt

SEQ ID NO: 5599946 - DNA, 25 bp, Homo sapien
aaacaaaaatactcagaggctctgg

SEQ ID NO: 5599947 - DNA, 25 bp, Homo sapien
ctgggctctgtattgggagcctcag

SEQ ID NO: 5599948 - DNA, 25 bp, Homo sapien
cagccccgctctccccccaggattt

SEQ ID NO: 5599949 - DNA, 25 bp, Homo sapien
gatttgctgatgagcctgagatgac

SEQ ID NO: 5599950 - DNA, 25 bp, Homo sapien
ctgaggagtcagtgcttgctccctg

SEQ ID NO: 5599951 - DNA, 25 bp, Homo sapien
tccccccaggatttgctgatgagcc

SEQ ID NO: 5599952 - DNA, 25 bp, Homo sapien
caaaggtcatgccagagttacaagc

SEQ ID NO: 5599953 - DNA, 25 bp, Homo sapien
cagaagtgccaaattcctgtgcagc

SEQ ID NO: 5599954 - DNA, 25 bp, Homo sapien
tgagctacagaattcatgaacaggc

SEQ ID NO: 5599955 - DNA, 25 bp, Homo sapien
attcgcatgactgagaatgtgggat

SEQ ID NO: 5599956 - DNA, 25 bp, Homo sapien
ttgagtggaaggtactataagtttc

SEQ ID NO: 5599957 - DNA, 25 bp, Homo sapien
aactgtcagtatagagagaccagca

SEQ ID NO: 5599958 - DNA, 25 bp, Homo sapien
caacaggcagaatcccaatctaatc

SEQ ID NO: 5599959 - DNA, 25 bp, Homo sapien
gaatgtgggatcatcagctgtcaac

SEQ ID NO: 5599960 - DNA, 25 bp, Homo sapien
gttacaaactggtgctcaggtgagg

SEQ ID NO: 5599961 - DNA, 25 bp, Homo sapien
cagctatcgtgctgagcaaggtctc

SEQ ID NO: 5599962 - DNA, 25 bp, Homo sapien
caagaatcttagttgagtggaaggt

SEQ ID NO: 5599963 - DNA, 25 bp, Homo sapien
tcaggtgaggtcattcgcatgactg

SEQ ID NO: 5599964 - DNA, 25 bp, Homo sapien
gctgcggctatctttgggcataggt

SEQ ID NO: 5599965 - DNA, 25 bp, Homo sapien
gagagatgctaacttgaggaatgac

SEQ ID NO: 5599966 - DNA, 25 bp, Homo sapien
aaagatgaccagatagtactaaaac

SEQ ID NO: 5599967 - DNA, 25 bp, Homo sapien
tgaggaatgactatgttgatgtttg

SEQ ID NO: 5599968 - DNA, 25 bp, Homo sapien
ataacctggtgaaataatgtcctcc

SEQ ID NO: 5599969 - DNA, 25 bp, Homo sapien
tagtgccctacaagccctgatggct

SEQ ID NO: 5599970 - DNA, 25 bp, Homo sapien
ggaggaacatcgctacttgtcccta

SEQ ID NO: 5599971 - DNA, 25 bp, Homo sapien
ctcttgacaaatgctgcggctatct

SEQ ID NO: 5599972 - DNA, 25 bp, Homo sapien
agtactaaaacccaggagagatgct

SEQ ID NO: 5599973 - DNA, 25 bp, Homo sapien
aactgggttgaacaaagtccttaga

SEQ ID NO: 5599974 - DNA, 25 bp, Homo sapien
attctgaacatcagggaggaacatc

SEQ ID NO: 5599975 - DNA, 25 bp, Homo sapien
gaagatagtgttggaaggaatttat

SEQ ID NO: 5599976 - DNA, 25 bp, Homo sapien
taagaggtagtctaagtagttgacc

SEQ ID NO: 5599977 - DNA, 25 bp, Homo sapien
ctaaatgtagaagctaagaggtagt

SEQ ID NO: 5599978 - DNA, 25 bp, Homo sapien
agtaggtatctatgttctagggggt

SEQ ID NO: 5599979 - DNA, 25 bp, Homo sapien
tgcaaaagtaaaatgaccaagtttc

SEQ ID NO: 5599980 - DNA, 25 bp, Homo sapien
aagagaagtgtcaaatttaaggatc

SEQ ID NO: 5599981 - DNA, 25 bp, Homo sapien
ggaggaagctgtttgttgactcaca

SEQ ID NO: 5599982 - DNA, 25 bp, Homo sapien
taaggatcagaacagactttgaaac

SEQ ID NO: 5599983 - DNA, 25 bp, Homo sapien
tcaaagtgggaatgtaccacctgga

SEQ ID NO: 5599984 - DNA, 25 bp, Homo sapien
aagtggtaagctaatcccaaagaat

SEQ ID NO: 5599985 - DNA, 25 bp, Homo sapien
tgttggggtacataattgattggaa

SEQ ID NO: 5599986 - DNA, 25 bp, Homo sapien
ctcccatctagagaggagtgggagg

SEQ ID NO: 5599987 - DNA, 25 bp, Homo sapien
cttcagctcaggggtttttcacatg

SEQ ID NO: 5599988 - DNA, 25 bp, Homo sapien
catgataaaacattcaaaaaaacat

SEQ ID NO: 5599989 - DNA, 25 bp, Homo sapien
gcgggcttgtggttccttcagctca

SEQ ID NO: 5599990 - DNA, 25 bp, Homo sapien
tcttctaagttaaatcatatgctct

SEQ ID NO: 5599991 - DNA, 25 bp, Homo sapien
cggctcccatctagagaggagtggg

SEQ ID NO: 5599992 - DNA, 25 bp, Homo sapien
gtcagcttccttttggctcctaaat

SEQ ID NO: 5599993 - DNA, 25 bp, Homo sapien
agctcaggggtttttcacatgttcc

SEQ ID NO: 5599994 - DNA, 25 bp, Homo sapien
tgtggttccttcagctcaggggttt

SEQ ID NO: 5599995 - DNA, 25 bp, Homo sapien
ttcggctcccatctagagaggagtg

SEQ ID NO: 5599996 - DNA, 25 bp, Homo sapien
tctattgtctaagtcagcttccttt

SEQ ID NO: 5599997 - DNA, 25 bp, Homo sapien
gtgtcaagattgcaaaagtaagctc

SEQ ID NO: 5599998 - DNA, 25 bp, Homo sapien
ctgatcagccagcttgaagcagaac

SEQ ID NO: 5599999 - DNA, 25 bp, Homo sapien
ccattgacactaaagctgtgcttcc

SEQ ID NO: 5600000 - DNA, 25 bp, Homo sapien
gtgcttcctgggtgcatgtacagat

SEQ ID NO: 5600001 - DNA, 25 bp, Homo sapien
ttgaaaagcaatgcacagtcctctc

SEQ ID NO: 5600002 - DNA, 25 bp, Homo sapien
ttgaagcagaactccctaagccctt

SEQ ID NO: 5600003 - DNA, 25 bp, Homo sapien
gagacacagaaggatactatatgac

SEQ ID NO: 5600004 - DNA, 25 bp, Homo sapien
ttagctatagtgaacaggtagtaat

SEQ ID NO: 5600005 - DNA, 25 bp, Homo sapien
tatgacggtagtgaaataaagtgtc

SEQ ID NO: 5600006 - DNA, 25 bp, Homo sapien
acattttgagagttggtacccattt

SEQ ID NO: 5600007 - DNA, 25 bp, Homo sapien
ccttgagtactgacatgtggaggtt

SEQ ID NO: 5600008 - DNA, 25 bp, Homo sapien
aactaccatctgagatcgctgcaat

SEQ ID NO: 5600009 - DNA, 25 bp, Homo sapien
aatgtaaaaagtacagtgtgacact

SEQ ID NO: 5600010 - DNA, 25 bp, Homo sapien
aaatgtatagtgtgaccaaaggaac

SEQ ID NO: 5600011 - DNA, 25 bp, Homo sapien
aaatgcatgggttcacataattgtt

SEQ ID NO: 5600012 - DNA, 25 bp, Homo sapien
ttgttttggcagatatgttgacata

SEQ ID NO: 5600013 - DNA, 25 bp, Homo sapien
atttcaccaaaatgcatgggttcac

SEQ ID NO: 5600014 - DNA, 25 bp, Homo sapien
tagtgtgaccaaaggaacacatatt

SEQ ID NO: 5600015 - DNA, 25 bp, Homo sapien
agacactgctacttaaactaccatc

SEQ ID NO: 5600016 - DNA, 25 bp, Homo sapien
atctgaatttataagacactgctac

SEQ ID NO: 5600017 - DNA, 25 bp, Homo sapien
gagatcgctgcaatgtaaaatgtaa

SEQ ID NO: 5600018 - DNA, 25 bp, Homo sapien
agggaaaatgtctctccagaaaata

SEQ ID NO: 5600019 - DNA, 25 bp, Homo sapien
aggcctcaaagtgtccccccaacca

SEQ ID NO: 5600020 - DNA, 25 bp, Homo sapien
aagctccagcctccacctccaagcc

SEQ ID NO: 5600021 - DNA, 25 bp, Homo sapien
agcctccacctccaagcccctcctc

SEQ ID NO: 5600022 - DNA, 25 bp, Homo sapien
aatggaaagaaataaaattacctca

SEQ ID NO: 5600023 - DNA, 25 bp, Homo sapien
taataacttctgtggatacgctacc

SEQ ID NO: 5600024 - DNA, 25 bp, Homo sapien
acctcataataacttctgtggatac

SEQ ID NO: 5600025 - DNA, 25 bp, Homo sapien
gcccagacctaaggtcaggaaggag

SEQ ID NO: 5600026 - DNA, 25 bp, Homo sapien
tcctccatgtgaaaggaaggggagg

SEQ ID NO: 5600027 - DNA, 25 bp, Homo sapien
acttctgtggatacgctaccagggc

SEQ ID NO: 5600028 - DNA, 25 bp, Homo sapien
tccaagcccctcctcctgtgcccag

SEQ ID NO: 5600029 - DNA, 25 bp, Homo sapien
ctcctgtgcccagacctaaggtcag

SEQ ID NO: 5600030 - DNA, 25 bp, Homo sapien
gcggtgctccagtctccgactccgt

SEQ ID NO: 5600031 - DNA, 25 bp, Homo sapien
gcttcacatacgaggactggctctc

SEQ ID NO: 5600032 - DNA, 25 bp, Homo sapien
ggcagtccagactgtccaggctgct

SEQ ID NO: 5600033 - DNA, 25 bp, Homo sapien
ggctccttctgggaactcggagaga

SEQ ID NO: 5600034 - DNA, 25 bp, Homo sapien
gtgtcggattcagggtccatctgca

SEQ ID NO: 5600035 - DNA, 25 bp, Homo sapien
gcataacccaggatgacctcgtctc

SEQ ID NO: 5600036 - DNA, 25 bp, Homo sapien
ggtttgcctctgcggaccccaaatc

SEQ ID NO: 5600037 - DNA, 25 bp, Homo sapien
gaagtgacaaaggcacctgtgtacg

SEQ ID NO: 5600038 - DNA, 25 bp, Homo sapien
gggcctagaaaccgcagatgtttgt

SEQ ID NO: 5600039 - DNA, 25 bp, Homo sapien
cgggcagagcccatctgcatgctgt

SEQ ID NO: 5600040 - DNA, 25 bp, Homo sapien
aagggatacaggtacgcttcacata

SEQ ID NO: 5600041 - DNA, 25 bp, Homo sapien
agttctaaagccatctcgagagaag

SEQ ID NO: 5600042 - DNA, 25 bp, Homo sapien
cttctctcgagatggctttagaact

SEQ ID NO: 5600043 - DNA, 25 bp, Homo sapien
caacacaagacagatacatgaattc

SEQ ID NO: 5600044 - DNA, 25 bp, Homo sapien
aatctgtcaaaatcaaggcagccac

SEQ ID NO: 5600045 - DNA, 25 bp, Homo sapien
tgtcattagctaccagaaatggttt

SEQ ID NO: 5600046 - DNA, 25 bp, Homo sapien
aattactgcgacattggaaatactg

SEQ ID NO: 5600047 - DNA, 25 bp, Homo sapien
tacatttacaacacaagacagatac

SEQ ID NO: 5600048 - DNA, 25 bp, Homo sapien
cctagaaacacgttaactgaacaat

SEQ ID NO: 5600049 - DNA, 25 bp, Homo sapien
taagtgcaaaagcattgaagtgctt

SEQ ID NO: 5600050 - DNA, 25 bp, Homo sapien
ataacaacacaaagtaggaacagaa

SEQ ID NO: 5600051 - DNA, 25 bp, Homo sapien
aagtaggaacagaattacagtacat

SEQ ID NO: 5600052 - DNA, 25 bp, Homo sapien
gagtaaatcaatcacacaccaacag

SEQ ID NO: 5600053 - DNA, 25 bp, Homo sapien
gtgttgtaaatttaagtgcaaaagc

SEQ ID NO: 5600054 - DNA, 25 bp, Homo sapien
atcccctgtgtctttgcctcaaatc

SEQ ID NO: 5600055 - DNA, 25 bp, Homo sapien
ctcaaatccattaccaacaaggcag

SEQ ID NO: 5600056 - DNA, 25 bp, Homo sapien
agtgaaaagagagtgattaattttt

SEQ ID NO: 5600057 - DNA, 25 bp, Homo sapien
tccattaccaacaaggcagtcatcc

SEQ ID NO: 5600058 - DNA, 25 bp, Homo sapien
tttatcatgtatcatccaaactggg

SEQ ID NO: 5600059 - DNA, 25 bp, Homo sapien
acacttgactagtttaaaatttgtc

SEQ ID NO: 5600060 - DNA, 25 bp, Homo sapien
atcctttcaaaatgcaaatctgatt

SEQ ID NO: 5600061 - DNA, 25 bp, Homo sapien
acaaccatttaacatcccctgtgtc

SEQ ID NO: 5600062 - DNA, 25 bp, Homo sapien
ttaccaacaaggcagtcatcctttc

SEQ ID NO: 5600063 - DNA, 25 bp, Homo sapien
ctgattatatcacacttgactagtt

SEQ ID NO: 5600064 - DNA, 25 bp, Homo sapien
aatccattaccaacaaggcagtcat

SEQ ID NO: 5600065 - DNA, 25 bp, Homo sapien
actgttctaacataattaagccaat

SEQ ID NO: 5600066 - DNA, 25 bp, Homo sapien
tctcctgaacattaaacacatacat

SEQ ID NO: 5600067 - DNA, 25 bp, Homo sapien
tacaggcaattagattgtgccagtt

SEQ ID NO: 5600068 - DNA, 25 bp, Homo sapien
ataatagcagttaaatattggctcc

SEQ ID NO: 5600069 - DNA, 25 bp, Homo sapien
gccagttttcaaataggagatcagt

SEQ ID NO: 5600070 - DNA, 25 bp, Homo sapien
attcaactcgtggaacaagggtcaa

SEQ ID NO: 5600071 - DNA, 25 bp, Homo sapien
agcttggaagaactttacaggcaat

SEQ ID NO: 5600072 - DNA, 25 bp, Homo sapien
aggagatcagttccgttagtagttc

SEQ ID NO: 5600073 - DNA, 25 bp, Homo sapien
gcgggccaaatccaccctgccacct

SEQ ID NO: 5600074 - DNA, 25 bp, Homo sapien
attggctcctttagcttggaagaac

SEQ ID NO: 5600075 - DNA, 25 bp, Homo sapien
gttttcagcggttggaaaaagatca

SEQ ID NO: 5600076 - DNA, 25 bp, Homo sapien
ctccacatctctgcagacccaccgc

SEQ ID NO: 5600077 - DNA, 25 bp, Homo sapien
cctgatcttacctcggatgcctttc

SEQ ID NO: 5600078 - DNA, 25 bp, Homo sapien
tgacctgaaacacacagcctcaccc

SEQ ID NO: 5600079 - DNA, 25 bp, Homo sapien
ctgcagacccaccgcatttgccacc

SEQ ID NO: 5600080 - DNA, 25 bp, Homo sapien
ctgttcttcaaacgtcaaaccgccc

SEQ ID NO: 5600081 - DNA, 25 bp, Homo sapien
tcaccagattaagtgcacatgccac

SEQ ID NO: 5600082 - DNA, 25 bp, Homo sapien
tctactctactgacctgaaacacac

SEQ ID NO: 5600083 - DNA, 25 bp, Homo sapien
ccacaaccagtcattaaaggctttt

SEQ ID NO: 5600084 - DNA, 25 bp, Homo sapien
ctcggatgcctttcactgctcccac

SEQ ID NO: 5600085 - DNA, 25 bp, Homo sapien
acgtcaaaccgcccttctactctac

SEQ ID NO: 5600086 - DNA, 25 bp, Homo sapien
atttgccacctgccctagggagctt

SEQ ID NO: 5600087 - DNA, 25 bp, Homo sapien
cacatgaagtcttggaatggaaggg

SEQ ID NO: 5600088 - DNA, 25 bp, Homo sapien
gtttgagagatgattaaggactata

SEQ ID NO: 5600089 - DNA, 25 bp, Homo sapien
gaggacactggcatcttttagtggc

SEQ ID NO: 5600090 - DNA, 25 bp, Homo sapien
taaggactataagattagtaatctc

SEQ ID NO: 5600091 - DNA, 25 bp, Homo sapien
ttaagctgaagtttgagagatgatt

SEQ ID NO: 5600092 - DNA, 25 bp, Homo sapien
tagtggcaagagtcacagttgtgta

SEQ ID NO: 5600093 - DNA, 25 bp, Homo sapien
aaaaatcagcaaagagtacaaagtc

SEQ ID NO: 5600094 - DNA, 25 bp, Homo sapien
gttcacagtggtatcatgcaccttc

SEQ ID NO: 5600095 - DNA, 25 bp, Homo sapien
agtaatctctgatgaggagacacct

SEQ ID NO: 5600096 - DNA, 25 bp, Homo sapien
ttggaaactgagatttaagctgaag

SEQ ID NO: 5600097 - DNA, 25 bp, Homo sapien
gaagtcatggttttgtgttcacagt

SEQ ID NO: 5600098 - DNA, 25 bp, Homo sapien
atcgattactttggaggcatgcagc

SEQ ID NO: 5600099 - DNA, 25 bp, Homo sapien
aatagtagtaaaagtgcactgtgat

SEQ ID NO: 5600100 - DNA, 25 bp, Homo sapien
tacatgaaaatgtcagtatgcccct

SEQ ID NO: 5600101 - DNA, 25 bp, Homo sapien
atgcaaattgaacaaagaagcactc

SEQ ID NO: 5600102 - DNA, 25 bp, Homo sapien
atacacactcacaaaatgcagattt

SEQ ID NO: 5600103 - DNA, 25 bp, Homo sapien
ggaggcatgcagctctcatagagac

SEQ ID NO: 5600104 - DNA, 25 bp, Homo sapien
gaacaaagaagcactcaattactca

SEQ ID NO: 5600105 - DNA, 25 bp, Homo sapien
agtgcactgtgatagaatctgacat

SEQ ID NO: 5600106 - DNA, 25 bp, Homo sapien
ttgtgtaaaccagaaatgtatattc

SEQ ID NO: 5600107 - DNA, 25 bp, Homo sapien
ttggtttggtctattccagaatggc

SEQ ID NO: 5600108 - DNA, 25 bp, Homo sapien
caccagtcttgagtatgacagtcac

SEQ ID NO: 5600109 - DNA, 25 bp, Homo sapien
ctggtcataccagggctatcgctga

SEQ ID NO: 5600110 - DNA, 25 bp, Homo sapien
gaactgctctaggtggccccagtca

SEQ ID NO: 5600111 - DNA, 25 bp, Homo sapien
cccctagcactctgggtgtggccag

SEQ ID NO: 5600112 - DNA, 25 bp, Homo sapien
acatactctcttaggtgggactcgc

SEQ ID NO: 5600113 - DNA, 25 bp, Homo sapien
acaggcatgtggtggcccatcttgt

SEQ ID NO: 5600114 - DNA, 25 bp, Homo sapien
tcagagagaatgactacgaacccta

SEQ ID NO: 5600115 - DNA, 25 bp, Homo sapien
ccagtcactgccacaaacccctagc

SEQ ID NO: 5600116 - DNA, 25 bp, Homo sapien
tgggactcgcctcctgggcagtttt

SEQ ID NO: 5600117 - DNA, 25 bp, Homo sapien
gttcctgtctgtggccctggctttc

SEQ ID NO: 5600118 - DNA, 25 bp, Homo sapien
gctgaccatccacaagaggctctag

SEQ ID NO: 5600119 - DNA, 25 bp, Homo sapien
atgtggtcatttgcaaggcagcagg

SEQ ID NO: 5600120 - DNA, 25 bp, Homo sapien
ccagtttgcagaaaaggcatgatgg

SEQ ID NO: 5600121 - DNA, 25 bp, Homo sapien
acatgtgccaccagtttgcagaaaa

SEQ ID NO: 5600122 - DNA, 25 bp, Homo sapien
aaagttgtcacaaatgtggttgaac

SEQ ID NO: 5600123 - DNA, 25 bp, Homo sapien
ctttctataaacatgtgccaccagt

SEQ ID NO: 5600124 - DNA, 25 bp, Homo sapien
taaatctgtgttaaatgtgtgtaat

SEQ ID NO: 5600125 - DNA, 25 bp, Homo sapien
gggggctccctaccacttgactgtg

SEQ ID NO: 5600126 - DNA, 25 bp, Homo sapien
tgtggttgaacacaaaaatagatgt

SEQ ID NO: 5600127 - DNA, 25 bp, Homo sapien
tatcttcttgtgaactcagtttcca

SEQ ID NO: 5600128 - DNA, 25 bp, Homo sapien
tggatgttaatcagatgttaatttc

SEQ ID NO: 5600129 - DNA, 25 bp, Homo sapien
acttaggatttcatcagcatctccc

SEQ ID NO: 5600130 - DNA, 25 bp, Homo sapien
aatagatgtaaggtataatatagtc

SEQ ID NO: 5600131 - DNA, 25 bp, Homo sapien
tttagggaaaagccatagatgttga

SEQ ID NO: 5600132 - DNA, 25 bp, Homo sapien
tcagctggagtaaaggatagcttga

SEQ ID NO: 5600133 - DNA, 25 bp, Homo sapien
gttattattggccagacttgggagc

SEQ ID NO: 5600134 - DNA, 25 bp, Homo sapien
acctgtgagcagacctgatgaagta

SEQ ID NO: 5600135 - DNA, 25 bp, Homo sapien
atgaaaatatgatcggtggaaaaac

SEQ ID NO: 5600136 - DNA, 25 bp, Homo sapien
tgaagtgaaaaccagctaaacaatg

SEQ ID NO: 5600137 - DNA, 25 bp, Homo sapien
ttcaaaatacaaatggatggcccta

SEQ ID NO: 5600138 - DNA, 25 bp, Homo sapien
atagatgttgattcagggtactctt

SEQ ID NO: 5600139 - DNA, 25 bp, Homo sapien
tggatggccctaagatcagggttta

SEQ ID NO: 5600140 - DNA, 25 bp, Homo sapien
tttgattggctggtaactggatgaa

SEQ ID NO: 5600141 - DNA, 25 bp, Homo sapien
agtatcaggtaagtaagttttcagc

SEQ ID NO: 5600142 - DNA, 25 bp, Homo sapien
gtgtgagacacagatcaaggtgttt

SEQ ID NO: 5600143 - DNA, 25 bp, Homo sapien
tagatgagaccagatacatgatact

SEQ ID NO: 5600144 - DNA, 25 bp, Homo sapien
taaagatacatagagcaatatagat

SEQ ID NO: 5600145 - DNA, 25 bp, Homo sapien
ttcatcatcagaacagatatataaa

SEQ ID NO: 5600146 - DNA, 25 bp, Homo sapien
gagtgactcgatttatatatggttg

SEQ ID NO: 5600147 - DNA, 25 bp, Homo sapien
gagcaatatagatgagaccagatac

SEQ ID NO: 5600148 - DNA, 25 bp, Homo sapien
caaattgctgaagaacatattgtac

SEQ ID NO: 5600149 - DNA, 25 bp, Homo sapien
gagaggcaaattgctgaagaacata

SEQ ID NO: 5600150 - DNA, 25 bp, Homo sapien
tgtacatacattgtgagtgactcga

SEQ ID NO: 5600151 - DNA, 25 bp, Homo sapien
atatgaaaaatatgttaacactatt

SEQ ID NO: 5600152 - DNA, 25 bp, Homo sapien
atagagcaatatagatgagaccaga

SEQ ID NO: 5600153 - DNA, 25 bp, Homo sapien
cctgatttctggagaggcagtgtag

SEQ ID NO: 5600154 - DNA, 25 bp, Homo sapien
aaggcagagctatgagaattcctca

SEQ ID NO: 5600155 - DNA, 25 bp, Homo sapien
atagactgaggttaataatatctgc

SEQ ID NO: 5600156 - DNA, 25 bp, Homo sapien
tgtccagtgttaatattgctactcc

SEQ ID NO: 5600157 - DNA, 25 bp, Homo sapien
tgtctccccagtacatctgtgccct

SEQ ID NO: 5600158 - DNA, 25 bp, Homo sapien
tgagtatatgaaaattgcttggcac

SEQ ID NO: 5600159 - DNA, 25 bp, Homo sapien
gcttggcacatggtatacacccaac

SEQ ID NO: 5600160 - DNA, 25 bp, Homo sapien
tgaacatgcctcagtcagacttaaa

SEQ ID NO: 5600161 - DNA, 25 bp, Homo sapien
ggtatacacccaacggatcagttat

SEQ ID NO: 5600162 - DNA, 25 bp, Homo sapien
gcagatagcatatcattagctttgc

SEQ ID NO: 5600163 - DNA, 25 bp, Homo sapien
tacatgatctataaggcagagctat

SEQ ID NO: 5600164 - DNA, 25 bp, Homo sapien
ttgtaatcaggaagcttaaggaaat

SEQ ID NO: 5600165 - DNA, 25 bp, Homo sapien
caccctgcccccacaccctacttta

SEQ ID NO: 5600166 - DNA, 25 bp, Homo sapien
acttggtaaatcagtgcaaaacact

SEQ ID NO: 5600167 - DNA, 25 bp, Homo sapien
gctaatgtaaaatggcattggatct

SEQ ID NO: 5600168 - DNA, 25 bp, Homo sapien
tgtgcagttcacagagaaaggtgtt

SEQ ID NO: 5600169 - DNA, 25 bp, Homo sapien
atgggtttcagataacattgatacc

SEQ ID NO: 5600170 - DNA, 25 bp, Homo sapien
ttggcatttctagctggcatgtctc

SEQ ID NO: 5600171 - DNA, 25 bp, Homo sapien
aggaagcttaaggaaatctagaatt

SEQ ID NO: 5600172 - DNA, 25 bp, Homo sapien
cagagaaaggtgttaatgggtttca

SEQ ID NO: 5600173 - DNA, 25 bp, Homo sapien
cttgatttcagagtaggctaatgta

SEQ ID NO: 5600174 - DNA, 25 bp, Homo sapien
aacagaaggctaaaagtaaactatg

SEQ ID NO: 5600175 - DNA, 25 bp, Homo sapien
ctccagggtcgcgaggttgttggcc

SEQ ID NO: 5600176 - DNA, 25 bp, Homo sapien
ggccaacaacctcgcgaccctggag

SEQ ID NO: 5600177 - DNA, 25 bp, Homo sapien
tttctctggatagagaatgtgctct

SEQ ID NO: 5600178 - DNA, 25 bp, Homo sapien
gaatctatcacctgcatatcactgc

SEQ ID NO: 5600179 - DNA, 25 bp, Homo sapien
actagctcttcccagcctatctgcc

SEQ ID NO: 5600180 - DNA, 25 bp, Homo sapien
tccacaggacaaccataaactgcat

SEQ ID NO: 5600181 - DNA, 25 bp, Homo sapien
gtaggctccagtacacatcagtgtt

SEQ ID NO: 5600182 - DNA, 25 bp, Homo sapien
ttaccttcacagtcagttaatgtcc

SEQ ID NO: 5600183 - DNA, 25 bp, Homo sapien
gaaaagtcacatatcatctcctggt

SEQ ID NO: 5600184 - DNA, 25 bp, Homo sapien
tgagagctagtaggctccagtacac

SEQ ID NO: 5600185 - DNA, 25 bp, Homo sapien
atggattgagagctagtaggctcca

SEQ ID NO: 5600186 - DNA, 25 bp, Homo sapien
cacagtcagttaatgtccacaggac

SEQ ID NO: 5600187 - DNA, 25 bp, Homo sapien
agcctatctgccacctaacactatg

SEQ ID NO: 5600188 - DNA, 25 bp, Homo sapien
cacagccaataaatagggaagcaac

SEQ ID NO: 5600189 - DNA, 25 bp, Homo sapien
tagggtccattttcaggggagctga

SEQ ID NO: 5600190 - DNA, 25 bp, Homo sapien
agcaacatgcttttggtcagggtcc

SEQ ID NO: 5600191 - DNA, 25 bp, Homo sapien
agagtgtaacaggatccagccctct

SEQ ID NO: 5600192 - DNA, 25 bp, Homo sapien
agatcttttgcggagagatgctggt

SEQ ID NO: 5600193 - DNA, 25 bp, Homo sapien
gtctactaagcacggttgtcagatc

SEQ ID NO: 5600194 - DNA, 25 bp, Homo sapien
gtgcgtgtgtctgtcagagtgtaac

SEQ ID NO: 5600195 - DNA, 25 bp, Homo sapien
tctgtctaggacaagtagggtccat

SEQ ID NO: 5600196 - DNA, 25 bp, Homo sapien
gccccactccctggctggtgggggc

SEQ ID NO: 5600197 - DNA, 25 bp, Homo sapien
gagctgaaatatttgcagggggtgc

SEQ ID NO: 5600198 - DNA, 25 bp, Homo sapien
gtccatgtggttagggttgattttg

SEQ ID NO: 5600199 - DNA, 25 bp, Homo sapien
gcctactcgtcgggctgctgtgaaa

SEQ ID NO: 5600200 - DNA, 25 bp, Homo sapien
gaccatgcaggaagacatagcaaaa

SEQ ID NO: 5600201 - DNA, 25 bp, Homo sapien
gcaatggaagctctcaaatgactag

SEQ ID NO: 5600202 - DNA, 25 bp, Homo sapien
gttcctgtggataatccagggcccc

SEQ ID NO: 5600203 - DNA, 25 bp, Homo sapien
tcaaatgactagaggtgaccatgca

SEQ ID NO: 5600204 - DNA, 25 bp, Homo sapien
gcagccaagcatgtgtagcaaactc

SEQ ID NO: 5600205 - DNA, 25 bp, Homo sapien
tgtgtgatctgcatgcaatggaagc

SEQ ID NO: 5600206 - DNA, 25 bp, Homo sapien
gcaattctcaggtagacagagggaa

SEQ ID NO: 5600207 - DNA, 25 bp, Homo sapien
ggagctacacagatgacatgacatt

SEQ ID NO: 5600208 - DNA, 25 bp, Homo sapien
gtgaaacaacagtgctttggtattt

SEQ ID NO: 5600209 - DNA, 25 bp, Homo sapien
aagcctcattccatgcagggcctac

SEQ ID NO: 5600210 - DNA, 25 bp, Homo sapien
tctccctgtggggtacaaatggtgg

SEQ ID NO: 5600211 - DNA, 25 bp, Homo sapien
aaagtgctgcttatacccttgcaac

SEQ ID NO: 5600212 - DNA, 25 bp, Homo sapien
ctggactttatgtagggagtaggaa

SEQ ID NO: 5600213 - DNA, 25 bp, Homo sapien
aaatttagctctgaggcagcctctc

SEQ ID NO: 5600214 - DNA, 25 bp, Homo sapien
tgtagggagtaggaatcattctcac

SEQ ID NO: 5600215 - DNA, 25 bp, Homo sapien
gctacaaatagctcctccctggact

SEQ ID NO: 5600216 - DNA, 25 bp, Homo sapien
taaggaaatgttgaatcaaagtttc

SEQ ID NO: 5600217 - DNA, 25 bp, Homo sapien
cagtaatctttcccagacaggaagc

SEQ ID NO: 5600218 - DNA, 25 bp, Homo sapien
tcaccaaaagagtaaggaaatgttg

SEQ ID NO: 5600219 - DNA, 25 bp, Homo sapien
gacaggaagctgttatctgtcttcc

SEQ ID NO: 5600220 - DNA, 25 bp, Homo sapien
tggtaaatggcagacagatgttaaa

SEQ ID NO: 5600221 - DNA, 25 bp, Homo sapien
accaagactaatgcctcaaagagct

SEQ ID NO: 5600222 - DNA, 25 bp, Homo sapien
cagggcacaaaaagcaagattacat

SEQ ID NO: 5600223 - DNA, 25 bp, Homo sapien
tgttgaagcaccatgtcaggtacag

SEQ ID NO: 5600224 - DNA, 25 bp, Homo sapien
tcaaggtgctaaaagtgaagcaacc

SEQ ID NO: 5600225 - DNA, 25 bp, Homo sapien
atgcctcaaagagctctacaatgcc

SEQ ID NO: 5600226 - DNA, 25 bp, Homo sapien
aagacagcctttaatagccaggcac

SEQ ID NO: 5600227 - DNA, 25 bp, Homo sapien
tccagacttcaaactgcaacaaccc

SEQ ID NO: 5600228 - DNA, 25 bp, Homo sapien
gctaatcagacaattcactagatgt

SEQ ID NO: 5600229 - DNA, 25 bp, Homo sapien
accatgtcaggtacagagtcaaggt

SEQ ID NO: 5600230 - DNA, 25 bp, Homo sapien
gcctcaattgtaaagctaatcagac

SEQ ID NO: 5600231 - DNA, 25 bp, Homo sapien
gtgaagcaaccctgcacttccaggc

SEQ ID NO: 5600232 - DNA, 25 bp, Homo sapien
ggctcgggtgcaatccgtaccctca

SEQ ID NO: 5600233 - DNA, 25 bp, Homo sapien
acatttgagtagtgactgcgccaag

SEQ ID NO: 5600234 - DNA, 25 bp, Homo sapien
ccattttagcagagcgaatgagcga

SEQ ID NO: 5600235 - DNA, 25 bp, Homo sapien
cgagggaaaaatcttatacaactac

SEQ ID NO: 5600236 - DNA, 25 bp, Homo sapien
gactgcgccaagcagtcaagcacag

SEQ ID NO: 5600237 - DNA, 25 bp, Homo sapien
caaaaatcgagggaaaaatcttata

SEQ ID NO: 5600238 - DNA, 25 bp, Homo sapien
cacagcccctcgggctcgatcccca

SEQ ID NO: 5600239 - DNA, 25 bp, Homo sapien
ccttgcccacctcgccacgtcaccg

SEQ ID NO: 5600240 - DNA, 25 bp, Homo sapien
tcgggctcgatccccataaccactc

SEQ ID NO: 5600241 - DNA, 25 bp, Homo sapien
caatccgtaccctcagtgggttccc

SEQ ID NO: 5600242 - DNA, 25 bp, Homo sapien
cactctagggttaggtattacccac

SEQ ID NO: 5600243 - DNA, 25 bp, Homo sapien
cgcacgcccctgtctctctcactcc

SEQ ID NO: 5600244 - DNA, 25 bp, Homo sapien
ctgctcccggccacaatctacaact

SEQ ID NO: 5600245 - DNA, 25 bp, Homo sapien
acttcggattctcgggactccaggg

SEQ ID NO: 5600246 - DNA, 25 bp, Homo sapien
ggaactcacgcacgcccctgtctct

SEQ ID NO: 5600247 - DNA, 25 bp, Homo sapien
ttacgctttcgaacatgcaggaatg

SEQ ID NO: 5600248 - DNA, 25 bp, Homo sapien
atgcaggaatgtagtttgggcattt

SEQ ID NO: 5600249 - DNA, 25 bp, Homo sapien
ggtgactcaatgacattgaccggcc

SEQ ID NO: 5600250 - DNA, 25 bp, Homo sapien
ttgggcatttgtctggaacttcgga

SEQ ID NO: 5600251 - DNA, 25 bp, Homo sapien
tcaatgacattgaccggcctggatg

SEQ ID NO: 5600252 - DNA, 25 bp, Homo sapien
tctggaacttcggattctcgggact

SEQ ID NO: 5600253 - DNA, 25 bp, Homo sapien
ggcctccagctcagctagcggccgg

SEQ ID NO: 5600254 - DNA, 25 bp, Homo sapien
ctttttggcagaattgaaatcttcc

SEQ ID NO: 5600255 - DNA, 25 bp, Homo sapien
tcctactgattgcgggtctggtgtt

SEQ ID NO: 5600256 - DNA, 25 bp, Homo sapien
aacttggaattgctcaccacagttc

SEQ ID NO: 5600257 - DNA, 25 bp, Homo sapien
caatgccctcagtgttgggtggggc

SEQ ID NO: 5600258 - DNA, 25 bp, Homo sapien
accacagttcagtgggcaagagttc

SEQ ID NO: 5600259 - DNA, 25 bp, Homo sapien
gaaaaggcaatgccctcagtgttgg

SEQ ID NO: 5600260 - DNA, 25 bp, Homo sapien
cccgcgggtactcctactgattgcg

SEQ ID NO: 5600261 - DNA, 25 bp, Homo sapien
ctatttggcccagagacaacttgga

SEQ ID NO: 5600262 - DNA, 25 bp, Homo sapien
tttctaaaagcatggtcggccctag

SEQ ID NO: 5600263 - DNA, 25 bp, Homo sapien
cgggtctggtgttcatggttctttt

SEQ ID NO: 5600264 - DNA, 25 bp, Homo sapien
tggcccagagacaacttggaattgc

SEQ ID NO: 5600265 - DNA, 25 bp, Homo sapien
gtacaacttgattacatctttcctt

SEQ ID NO: 5600266 - DNA, 25 bp, Homo sapien
aaggaaagatgtaatcaagttgtac

SEQ ID NO: 5600267 - DNA, 25 bp, Homo sapien
cttgtgtcataaaatgggaactaaa

SEQ ID NO: 5600268 - DNA, 25 bp, Homo sapien
ctcatagatgagttgaaacacgagg

SEQ ID NO: 5600269 - DNA, 25 bp, Homo sapien
accctcagatacttgtgtcataaaa

SEQ ID NO: 5600270 - DNA, 25 bp, Homo sapien
aatcctgggatatctgaccctcaga

SEQ ID NO: 5600271 - DNA, 25 bp, Homo sapien
tagtgacctcaggacctcatagatg

SEQ ID NO: 5600272 - DNA, 25 bp, Homo sapien
ttagcatgttatgaagcaaagattc

SEQ ID NO: 5600273 - DNA, 25 bp, Homo sapien
tagggctcataaatcctgggatatc

SEQ ID NO: 5600274 - DNA, 25 bp, Homo sapien
atttgctaatcctcatagggctcat

SEQ ID NO: 5600275 - DNA, 25 bp, Homo sapien
aatgaagaaattaagctttgaaaaa

SEQ ID NO: 5600276 - DNA, 25 bp, Homo sapien
tcactctatgggtatgtacatttgc

SEQ ID NO: 5600277 - DNA, 25 bp, Homo sapien
ttatccttagtgacctcaggacctc

SEQ ID NO: 5600278 - DNA, 25 bp, Homo sapien
agtatctgtccaggtggaaaaccgc

SEQ ID NO: 5600279 - DNA, 25 bp, Homo sapien
gggaagggatcgattcattcaacgt

SEQ ID NO: 5600280 - DNA, 25 bp, Homo sapien
agagtctaatatcacggggaaaacc

SEQ ID NO: 5600281 - DNA, 25 bp, Homo sapien
ctagcaaaatccagaaccagaaaat

SEQ ID NO: 5600282 - DNA, 25 bp, Homo sapien
acagtcaagtgacccgctcaacgtc

SEQ ID NO: 5600283 - DNA, 25 bp, Homo sapien
aggagggagacatcaatcccagatg

SEQ ID NO: 5600284 - DNA, 25 bp, Homo sapien
acaaagtgctttaggcgacaagcgg

SEQ ID NO: 5600285 - DNA, 25 bp, Homo sapien
gacgtggcaacgaagttgtgcttca

SEQ ID NO: 5600286 - DNA, 25 bp, Homo sapien
ggaaaacaatgcacacgacagtcaa

SEQ ID NO: 5600287 - DNA, 25 bp, Homo sapien
gtaacagagtagaaatgcaacatga

SEQ ID NO: 5600288 - DNA, 25 bp, Homo sapien
cacatggactatagagacacatttc

SEQ ID NO: 5600289 - DNA, 25 bp, Homo sapien
acaaaattggggttcatatctgctc

SEQ ID NO: 5600290 - DNA, 25 bp, Homo sapien
cagaatagctaatacaaatgcacac

SEQ ID NO: 5600291 - DNA, 25 bp, Homo sapien
atgcacacaagcaccccccaacaca

SEQ ID NO: 5600292 - DNA, 25 bp, Homo sapien
attgaaagggaccatagatagtatc

SEQ ID NO: 5600293 - DNA, 25 bp, Homo sapien
actgtgttaataggtaggtcaagat

SEQ ID NO: 5600294 - DNA, 25 bp, Homo sapien
gggacatggtagtgcttaagagcac

SEQ ID NO: 5600295 - DNA, 25 bp, Homo sapien
aggacccttgagaaagggtgcaaca

SEQ ID NO: 5600296 - DNA, 25 bp, Homo sapien
ggtaggtcaagattgaaagggacca

SEQ ID NO: 5600297 - DNA, 25 bp, Homo sapien
gtaccacagactaagaataggatac

SEQ ID NO: 5600298 - DNA, 25 bp, Homo sapien
aatgctggaacaacaggacccttga

SEQ ID NO: 5600299 - DNA, 25 bp, Homo sapien
aactagcattgtagagatgggacat

SEQ ID NO: 5600300 - DNA, 25 bp, Homo sapien
taaaattcactgacttaatgggtct

SEQ ID NO: 5600301 - DNA, 25 bp, Homo sapien
ttgttaaagtgcctgtctttccatc

SEQ ID NO: 5600302 - DNA, 25 bp, Homo sapien
ttgtcattataagctcaaaaggaat

SEQ ID NO: 5600303 - DNA, 25 bp, Homo sapien
tcctcaccggaatgatctgtgatca

SEQ ID NO: 5600304 - DNA, 25 bp, Homo sapien
tgtatcaacaaccaattattccagc

SEQ ID NO: 5600305 - DNA, 25 bp, Homo sapien
gctcaaaaggaatgtgtttatcaaa

SEQ ID NO: 5600306 - DNA, 25 bp, Homo sapien
tagaacacaacttgatcttgcctcc

SEQ ID NO: 5600307 - DNA, 25 bp, Homo sapien
atgagaatcatcatagccctcccta

SEQ ID NO: 5600308 - DNA, 25 bp, Homo sapien
aaaatagagcttatcaaagaatttc

SEQ ID NO: 5600309 - DNA, 25 bp, Homo sapien
cttgcctcccaagattaacccttcc

SEQ ID NO: 5600310 - DNA, 25 bp, Homo sapien
tttggtcacttctgtatcaacaacc

SEQ ID NO: 5600311 - DNA, 25 bp, Homo sapien
tgtatccctcagaaaatccgtgctc

SEQ ID NO: 5600312 - DNA, 25 bp, Homo sapien
atagagcagctattagatgcagggc

SEQ ID NO: 5600313 - DNA, 25 bp, Homo sapien
tgatatgcctgggattttctgggtt

SEQ ID NO: 5600314 - DNA, 25 bp, Homo sapien
taccatgtgaggagcacgtttttgt

SEQ ID NO: 5600315 - DNA, 25 bp, Homo sapien
gtgggacctggctgtatccctcaga

SEQ ID NO: 5600316 - DNA, 25 bp, Homo sapien
agctcaagaagctaattaggggtgg

SEQ ID NO: 5600317 - DNA, 25 bp, Homo sapien
agctattagatgcagggcacagtgt

SEQ ID NO: 5600318 - DNA, 25 bp, Homo sapien
caaggctcagagaagttttaagaac

SEQ ID NO: 5600319 - DNA, 25 bp, Homo sapien
accaggacgagtggtcaacctataa

SEQ ID NO: 5600320 - DNA, 25 bp, Homo sapien
tttagcactggaagttctgtgtccc

SEQ ID NO: 5600321 - DNA, 25 bp, Homo sapien
aagaacttagctgagctcaagaagc

SEQ ID NO: 5600322 - DNA, 25 bp, Homo sapien
ccggctcaggactcctcgctctctc

SEQ ID NO: 5600323 - DNA, 25 bp, Homo sapien
ttttcaccgacacctgagccgacaa

SEQ ID NO: 5600324 - DNA, 25 bp, Homo sapien
tcctgatcacattttcaccgacacc

SEQ ID NO: 5600325 - DNA, 25 bp, Homo sapien
tccgagcccggttttcttcaggagc

SEQ ID NO: 5600326 - DNA, 25 bp, Homo sapien
cgagcccggttttcttcaggagcga

SEQ ID NO: 5600327 - DNA, 25 bp, Homo sapien
cattttcaccgacacctgagccgac

SEQ ID NO: 5600328 - DNA, 25 bp, Homo sapien
cccacacgcgccgcttttccgagcc

SEQ ID NO: 5600329 - DNA, 25 bp, Homo sapien
ctctcccttctcggggccctgtcgc

SEQ ID NO: 5600330 - DNA, 25 bp, Homo sapien
tcgctctctcccttctcggggccct

SEQ ID NO: 5600331 - DNA, 25 bp, Homo sapien
tcacattttcaccgacacctgagcc

SEQ ID NO: 5600332 - DNA, 25 bp, Homo sapien
aggccccacacgcgccgcttttccg

SEQ ID NO: 5600333 - DNA, 25 bp, Homo sapien
caaagacaaaggctttaacattacc

SEQ ID NO: 5600334 - DNA, 25 bp, Homo sapien
gagaaatgcttatgagtttaggagc

SEQ ID NO: 5600335 - DNA, 25 bp, Homo sapien
atcccattacacatggcagatacac

SEQ ID NO: 5600336 - DNA, 25 bp, Homo sapien
aggtatacaccttacaggatcactc

SEQ ID NO: 5600337 - DNA, 25 bp, Homo sapien
tgctggagttccaaggacattccct

SEQ ID NO: 5600338 - DNA, 25 bp, Homo sapien
ttaggagcactcgtaagagagtcag

SEQ ID NO: 5600339 - DNA, 25 bp, Homo sapien
ttaccagaaccacagaagctgagag

SEQ ID NO: 5600340 - DNA, 25 bp, Homo sapien
ttatagccactttgaaaggtctatc

SEQ ID NO: 5600341 - DNA, 25 bp, Homo sapien
tgtatgccttagatatgataggtat

SEQ ID NO: 5600342 - DNA, 25 bp, Homo sapien
aagtaagagagatactgctggagtt

SEQ ID NO: 5600343 - DNA, 25 bp, Homo sapien
cagcaggtggtaaactgaagtaaga

SEQ ID NO: 5600344 - DNA, 25 bp, Homo sapien
ggatatacacgaggattaaaaattc

SEQ ID NO: 5600345 - DNA, 25 bp, Homo sapien
ttaaaaattcaagtgtgcagagttt

SEQ ID NO: 5600346 - DNA, 25 bp, Homo sapien
gtcacattgaacaaggatatgcccc

SEQ ID NO: 5600347 - DNA, 25 bp, Homo sapien
ctcatgatgttcttggcttgccacc

SEQ ID NO: 5600348 - DNA, 25 bp, Homo sapien
ttggacaggcaactaaagtagtcac

SEQ ID NO: 5600349 - DNA, 25 bp, Homo sapien
agaccagctgctacaatgtgaagcc

SEQ ID NO: 5600350 - DNA, 25 bp, Homo sapien
cctcaaactggaactaatagaaata

SEQ ID NO: 5600351 - DNA, 25 bp, Homo sapien
gcagagtttaagatacttggctata

SEQ ID NO: 5600352 - DNA, 25 bp, Homo sapien
cctgaagaaatccaatatgcacccc

SEQ ID NO: 5600353 - DNA, 25 bp, Homo sapien
acctcatcgcagcagaggattggct

SEQ ID NO: 5600354 - DNA, 25 bp, Homo sapien
tccagtgtcccgtggtccccacctg

SEQ ID NO: 5600355 - DNA, 25 bp, Homo sapien
ttgaaatcagattgtatacttaaat

SEQ ID NO: 5600356 - DNA, 25 bp, Homo sapien
gaaatactatctgcacaagtaggat

SEQ ID NO: 5600357 - DNA, 25 bp, Homo sapien
gatagatgacatcaatcagaaatac

SEQ ID NO: 5600358 - DNA, 25 bp, Homo sapien
atacttaaatgactacccacgattc

SEQ ID NO: 5600359 - DNA, 25 bp, Homo sapien
ctgcacaagtaggatataaacattt

SEQ ID NO: 5600360 - DNA, 25 bp, Homo sapien
cttgaaattcttgatagatgacatc

SEQ ID NO: 5600361 - DNA, 25 bp, Homo sapien
tcaagacaaaaaagagataatctct

SEQ ID NO: 5600362 - DNA, 25 bp, Homo sapien
taaattatacaacagctgaaattat

SEQ ID NO: 5600363 - DNA, 25 bp, Homo sapien
tctgtagccataacttttttgaaat

SEQ ID NO: 5600364 - DNA, 25 bp, Homo sapien
gactacccacgattcaagacaaaaa

SEQ ID NO: 5600365 - DNA, 25 bp, Homo sapien
gttgatgaatgtactattaaaaatc

SEQ ID NO: 5600366 - DNA, 25 bp, Homo sapien
ctcacttcaaagatgatgagactga

SEQ ID NO: 5600367 - DNA, 25 bp, Homo sapien
ctcctctttgactggggaggagcct

SEQ ID NO: 5600368 - DNA, 25 bp, Homo sapien
agaggggctggtaatgttcagtttt

SEQ ID NO: 5600369 - DNA, 25 bp, Homo sapien
gccttgggttacatatcagtttagt

SEQ ID NO: 5600370 - DNA, 25 bp, Homo sapien
tctgagagagactttcacactgggg

SEQ ID NO: 5600371 - DNA, 25 bp, Homo sapien
tatcttggaatgttgtgtattaccc

SEQ ID NO: 5600372 - DNA, 25 bp, Homo sapien
ggaggagccttgtgcttagctgtac

SEQ ID NO: 5600373 - DNA, 25 bp, Homo sapien
tatgttggctcaagataccagaatc

SEQ ID NO: 5600374 - DNA, 25 bp, Homo sapien
cagtttagtgatggaactctaggcc

SEQ ID NO: 5600375 - DNA, 25 bp, Homo sapien
gatggaactctaggccagcgctttt

SEQ ID NO: 5600376 - DNA, 25 bp, Homo sapien
ttttgcagttagctaaggtagaggg

SEQ ID NO: 5600377 - DNA, 25 bp, Homo sapien
ctgcctatattggaggggaaaagag

SEQ ID NO: 5600378 - DNA, 25 bp, Homo sapien
gaggaagttcagtagataattgact

SEQ ID NO: 5600379 - DNA, 25 bp, Homo sapien
gagctgaagtccagtggatgtagct

SEQ ID NO: 5600380 - DNA, 25 bp, Homo sapien
gagaaggtgtccaagtggcttctta

SEQ ID NO: 5600381 - DNA, 25 bp, Homo sapien
caaatcaaatcaccaagaggcaaag

SEQ ID NO: 5600382 - DNA, 25 bp, Homo sapien
gggccttttggatactaatagctac

SEQ ID NO: 5600383 - DNA, 25 bp, Homo sapien
gccatatgccagatgttgtggtaag

SEQ ID NO: 5600384 - DNA, 25 bp, Homo sapien
ctctccctgaaacaccaatgctccc

SEQ ID NO: 5600385 - DNA, 25 bp, Homo sapien
agatagcaaagacagaacaaaagtt

SEQ ID NO: 5600386 - DNA, 25 bp, Homo sapien
taggacactccacttatgggtcttc

SEQ ID NO: 5600387 - DNA, 25 bp, Homo sapien
cttaactgatactgaaaactctgcc

SEQ ID NO: 5600388 - DNA, 25 bp, Homo sapien
ggccctcctagggtgtctcagagct

SEQ ID NO: 5600389 - DNA, 25 bp, Homo sapien
agaatcaaatggagtgggactatta

SEQ ID NO: 5600390 - DNA, 25 bp, Homo sapien
cttggagggccaattgcttctcatc

SEQ ID NO: 5600391 - DNA, 25 bp, Homo sapien
gacaagctgtatgacgttgaggaag

SEQ ID NO: 5600392 - DNA, 25 bp, Homo sapien
ccttgttgtactagaagtgtgggcc

SEQ ID NO: 5600393 - DNA, 25 bp, Homo sapien
gtcaagcaactcctggcgtcccatc

SEQ ID NO: 5600394 - DNA, 25 bp, Homo sapien
gtgagaagacagccttgttgtacta

SEQ ID NO: 5600395 - DNA, 25 bp, Homo sapien
ttcaggagtttccacaggctgtgag

SEQ ID NO: 5600396 - DNA, 25 bp, Homo sapien
actattaaggtacttgtgggaggag

SEQ ID NO: 5600397 - DNA, 25 bp, Homo sapien
ctgccccttcaggactgtgagaatc

SEQ ID NO: 5600398 - DNA, 25 bp, Homo sapien
ctcccgcaccatggtcttggagggc

SEQ ID NO: 5600399 - DNA, 25 bp, Homo sapien
ggaccccttgcaagcaaaagaaggc

SEQ ID NO: 5600400 - DNA, 25 bp, Homo sapien
ttccttcaaaatggagctcactttc

SEQ ID NO: 5600401 - DNA, 25 bp, Homo sapien
aaatatatcaaggagaaatgacctc

SEQ ID NO: 5600402 - DNA, 25 bp, Homo sapien
aaactgtggagttgttaaacataat

SEQ ID NO: 5600403 - DNA, 25 bp, Homo sapien
tcctctaatcccacccataagccct

SEQ ID NO: 5600404 - DNA, 25 bp, Homo sapien
ctagtacagttggaaactgtggagt

SEQ ID NO: 5600405 - DNA, 25 bp, Homo sapien
ccaataagaaatgatgcattccttc

SEQ ID NO: 5600406 - DNA, 25 bp, Homo sapien
agttttacaagactaggagggacta

SEQ ID NO: 5600407 - DNA, 25 bp, Homo sapien
cataagccctagatttggggaaatc

SEQ ID NO: 5600408 - DNA, 25 bp, Homo sapien
ttccagagcaaaaaactcaagtcac

SEQ ID NO: 5600409 - DNA, 25 bp, Homo sapien
attttgcatgaaccagaagattttg

SEQ ID NO: 5600410 - DNA, 25 bp, Homo sapien
tctctcttcaaggctgattgccaga

SEQ ID NO: 5600411 - DNA, 25 bp, Homo sapien
tgcagatacctctgtacctggatgg

SEQ ID NO: 5600412 - DNA, 25 bp, Homo sapien
ctccatgacctctgggagaggagtt

SEQ ID NO: 5600413 - DNA, 25 bp, Homo sapien
gaacagatacgagtccttcctctcc

SEQ ID NO: 5600414 - DNA, 25 bp, Homo sapien
ctagacaaactttccgaggctgcag

SEQ ID NO: 5600415 - DNA, 25 bp, Homo sapien
gacaaactttccgaggctgcagtgg

SEQ ID NO: 5600416 - DNA, 25 bp, Homo sapien
gaagagaactgaacagatacgagtc

SEQ ID NO: 5600417 - DNA, 25 bp, Homo sapien
tctgggagaggagttcactctcttt

SEQ ID NO: 5600418 - DNA, 25 bp, Homo sapien
gtgcggaggtggtatttaccatgca

SEQ ID NO: 5600419 - DNA, 25 bp, Homo sapien
agagcgccttggcctagacaaactt

SEQ ID NO: 5600420 - DNA, 25 bp, Homo sapien
catctccctgggaggtcccacacta

SEQ ID NO: 5600421 - DNA, 25 bp, Homo sapien
cgtcagaacggtctatgatgggggt

SEQ ID NO: 5600422 - DNA, 25 bp, Homo sapien
acccccatcatagaccgttctgacg

SEQ ID NO: 5600423 - DNA, 25 bp, Homo sapien
tcccacaagggcttcactggggaac

SEQ ID NO: 5600424 - DNA, 25 bp, Homo sapien
gtgtctgggtttagaaacagccgac

SEQ ID NO: 5600425 - DNA, 25 bp, Homo sapien
cttcccacaagggcttcactgggga

SEQ ID NO: 5600426 - DNA, 25 bp, Homo sapien
gccccacctccgacgcaggggctga

SEQ ID NO: 5600427 - DNA, 25 bp, Homo sapien
ggtttagaaacagccgacagtgaag

SEQ ID NO: 5600428 - DNA, 25 bp, Homo sapien
tctgggtttagaaacagccgacagt

SEQ ID NO: 5600429 - DNA, 25 bp, Homo sapien
acagccccacctccgacgcaggggc

SEQ ID NO: 5600430 - DNA, 25 bp, Homo sapien
gggtttagaaacagccgacagtgaa

SEQ ID NO: 5600431 - DNA, 25 bp, Homo sapien
tacaaacagtgtctgggtttagaaa

SEQ ID NO: 5600432 - DNA, 25 bp, Homo sapien
gaaccttcccacaagggcttcactg

SEQ ID NO: 5600433 - DNA, 25 bp, Homo sapien
aacagtgtctgggtttagaaacagc

SEQ ID NO: 5600434 - DNA, 25 bp, Homo sapien
ccctcgcgcctttctccacccgtga

SEQ ID NO: 5600435 - DNA, 25 bp, Homo sapien
tcacgggtggagaaaggcgcgaggg

SEQ ID NO: 5600436 - DNA, 25 bp, Homo sapien
aaagttttcttattctgaggttgtc

SEQ ID NO: 5600437 - DNA, 25 bp, Homo sapien
tttgagtataaaacaatggccatac

SEQ ID NO: 5600438 - DNA, 25 bp, Homo sapien
tttcctgagcaaactgggaactgtt

SEQ ID NO: 5600439 - DNA, 25 bp, Homo sapien
aactgggaactgttatacataattc

SEQ ID NO: 5600440 - DNA, 25 bp, Homo sapien
ttctttgtaaacaggaatcaggatt

SEQ ID NO: 5600441 - DNA, 25 bp, Homo sapien
taatctgagaatttcctgagcaaac

SEQ ID NO: 5600442 - DNA, 25 bp, Homo sapien
attctgaggttgtctttctatattt

SEQ ID NO: 5600443 - DNA, 25 bp, Homo sapien
atggccatactatgttggaaccacc

SEQ ID NO: 5600444 - DNA, 25 bp, Homo sapien
ctttgtaaacaggaatcaggattgg

SEQ ID NO: 5600445 - DNA, 25 bp, Homo sapien
tgttggaaccaccaaggttcttctc

SEQ ID NO: 5600446 - DNA, 25 bp, Homo sapien
ctgagcaaactgggaactgttatac

SEQ ID NO: 5600447 - DNA, 25 bp, Homo sapien
ttgcacaacagcgcgagtgtactta

SEQ ID NO: 5600448 - DNA, 25 bp, Homo sapien
ctagaacagccagattcatagagac

SEQ ID NO: 5600449 - DNA, 25 bp, Homo sapien
acagcgcgagtgtacttaatgccac

SEQ ID NO: 5600450 - DNA, 25 bp, Homo sapien
acgtttacagatagttaaaatggta

SEQ ID NO: 5600451 - DNA, 25 bp, Homo sapien
tttcatgggcttcacgagtaggatg

SEQ ID NO: 5600452 - DNA, 25 bp, Homo sapien
catgattccacatctgtgaggtccc

SEQ ID NO: 5600453 - DNA, 25 bp, Homo sapien
gaggagttgttgtttgatggagaca

SEQ ID NO: 5600454 - DNA, 25 bp, Homo sapien
acgagtaggatggtgattccactac

SEQ ID NO: 5600455 - DNA, 25 bp, Homo sapien
cttaatgccaccaaacgatacgttt

SEQ ID NO: 5600456 - DNA, 25 bp, Homo sapien
ctgtgaggtccctagaacagccaga

SEQ ID NO: 5600457 - DNA, 25 bp, Homo sapien
aaagacaaattccacatgattccac

SEQ ID NO: 5600458 - DNA, 25 bp, Homo sapien
aaaaagtaggatgttagtctcaaaa

SEQ ID NO: 5600459 - DNA, 25 bp, Homo sapien
tacccaaacgacagaacaaatacca

SEQ ID NO: 5600460 - DNA, 25 bp, Homo sapien
ttgggctggaattgttagtagacaa

SEQ ID NO: 5600461 - DNA, 25 bp, Homo sapien
tggagatatgaaaaggcctacagta

SEQ ID NO: 5600462 - DNA, 25 bp, Homo sapien
acaatctatgtagtaaggcagtgtc

SEQ ID NO: 5600463 - DNA, 25 bp, Homo sapien
tctgactccaaaattgggctggaat

SEQ ID NO: 5600464 - DNA, 25 bp, Homo sapien
tgtagtaaggcagtgtcaaacacat

SEQ ID NO: 5600465 - DNA, 25 bp, Homo sapien
gtatttggtgactggagatatgaaa

SEQ ID NO: 5600466 - DNA, 25 bp, Homo sapien
caaataccaataagatgacagacat

SEQ ID NO: 5600467 - DNA, 25 bp, Homo sapien
ttagacagtattaaaaagtaggatg

SEQ ID NO: 5600468 - DNA, 25 bp, Homo sapien
gcagacagccctccacatagtaagc

SEQ ID NO: 5600469 - DNA, 25 bp, Homo sapien
tctacaaggcatgttacaattttgc

SEQ ID NO: 5600470 - DNA, 25 bp, Homo sapien
tattaatgaaagaatcagattcaac

SEQ ID NO: 5600471 - DNA, 25 bp, Homo sapien
ccagggatcccttaagataatcacc

SEQ ID NO: 5600472 - DNA, 25 bp, Homo sapien
aagatggctagctcaaaagtgatgt

SEQ ID NO: 5600473 - DNA, 25 bp, Homo sapien
aaagagttgataaattagaaccacc

SEQ ID NO: 5600474 - DNA, 25 bp, Homo sapien
gctccctggcattgaatgaactagc

SEQ ID NO: 5600475 - DNA, 25 bp, Homo sapien
aaatagcatgtttgtgatccactaa

SEQ ID NO: 5600476 - DNA, 25 bp, Homo sapien
tcagcagctaagaaagcagccttca

SEQ ID NO: 5600477 - DNA, 25 bp, Homo sapien
ctgtcagtatgaataaaagagttga

SEQ ID NO: 5600478 - DNA, 25 bp, Homo sapien
atgaactagccaacagtcagcagct

SEQ ID NO: 5600479 - DNA, 25 bp, Homo sapien
cacccatttacaagatggctagctc

SEQ ID NO: 5600480 - DNA, 25 bp, Homo sapien
aaaacaaaatgtagagtcagctcca

SEQ ID NO: 5600481 - DNA, 25 bp, Homo sapien
catggctgccctgtatggttgcaac

SEQ ID NO: 5600482 - DNA, 25 bp, Homo sapien
gagagggttctcttggccatctagg

SEQ ID NO: 5600483 - DNA, 25 bp, Homo sapien
gaaagtgggtgcttcagtctgcttt

SEQ ID NO: 5600484 - DNA, 25 bp, Homo sapien
aaaatccagtacagacaaaagagca

SEQ ID NO: 5600485 - DNA, 25 bp, Homo sapien
gccatctaggatggaatccagccct

SEQ ID NO: 5600486 - DNA, 25 bp, Homo sapien
atgggttaaagagctaccaagagga

SEQ ID NO: 5600487 - DNA, 25 bp, Homo sapien
ttcaaacagactcagattagttgtc

SEQ ID NO: 5600488 - DNA, 25 bp, Homo sapien
caaaagagcaaagaatcatttcccc

SEQ ID NO: 5600489 - DNA, 25 bp, Homo sapien
agagctaccaagaggaccctcctaa

SEQ ID NO: 5600490 - DNA, 25 bp, Homo sapien
ttttgtttgctggtggaacctcttc

SEQ ID NO: 5600491 - DNA, 25 bp, Homo sapien
aagtccaaggtcagtagggaccata

SEQ ID NO: 5600492 - DNA, 25 bp, Homo sapien
cctgagagtcacatagaagtaaaac

SEQ ID NO: 5600493 - DNA, 25 bp, Homo sapien
tacctactgactttgaaatcacgtc

SEQ ID NO: 5600494 - DNA, 25 bp, Homo sapien
ccagccaggtcagtcaaagccttga

SEQ ID NO: 5600495 - DNA, 25 bp, Homo sapien
ttcacatggtgtattagtcccttct

SEQ ID NO: 5600496 - DNA, 25 bp, Homo sapien
actacctccctactcctacctcggc

SEQ ID NO: 5600497 - DNA, 25 bp, Homo sapien
tgtctcttcctacagcacagcacca

SEQ ID NO: 5600498 - DNA, 25 bp, Homo sapien
actcctacctcggctctactcctgt

SEQ ID NO: 5600499 - DNA, 25 bp, Homo sapien
agggaccataagctctaggaaagaa

SEQ ID NO: 5600500 - DNA, 25 bp, Homo sapien
ctcctgtagctgagaatcttctgtc

SEQ ID NO: 5600501 - DNA, 25 bp, Homo sapien
tgatttattgtttttgaggagtggg

SEQ ID NO: 5600502 - DNA, 25 bp, Homo sapien
gccttcgagcgttacaaaatcatct

SEQ ID NO: 5600503 - DNA, 25 bp, Homo sapien
ggcagaaccagagctccttgcctcc

SEQ ID NO: 5600504 - DNA, 25 bp, Homo sapien
ttcctgatcctgtcctggaagcagc

SEQ ID NO: 5600505 - DNA, 25 bp, Homo sapien
gtcacaagctgatatgcaagaactc

SEQ ID NO: 5600506 - DNA, 25 bp, Homo sapien
atatgctggactggagatcccttta

SEQ ID NO: 5600507 - DNA, 25 bp, Homo sapien
gcaggtcacaacgctgtcacaagct

SEQ ID NO: 5600508 - DNA, 25 bp, Homo sapien
tttttggggattacagagccttcga

SEQ ID NO: 5600509 - DNA, 25 bp, Homo sapien
tgaggagacccaagttcccagaaga

SEQ ID NO: 5600510 - DNA, 25 bp, Homo sapien
cacccaagtaacacgttcctgatcc

SEQ ID NO: 5600511 - DNA, 25 bp, Homo sapien
gggtgtaagggcatctgctctgccc

SEQ ID NO: 5600512 - DNA, 25 bp, Homo sapien
gggattacagagccttcgagcgtta

SEQ ID NO: 5600513 - DNA, 25 bp, Homo sapien
acacctaataggtgctaggaacttt

SEQ ID NO: 5600514 - DNA, 25 bp, Homo sapien
aaaattgaacgaacaaacactgatt

SEQ ID NO: 5600515 - DNA, 25 bp, Homo sapien
tctgccccctaagaggctgatacct

SEQ ID NO: 5600516 - DNA, 25 bp, Homo sapien
gctcttaacagcaaggtgactggtt

SEQ ID NO: 5600517 - DNA, 25 bp, Homo sapien
taacctctaaagatcgagagccttc

SEQ ID NO: 5600518 - DNA, 25 bp, Homo sapien
aggtgctaggaacttttctaggtgc

SEQ ID NO: 5600519 - DNA, 25 bp, Homo sapien
agacggagctgtgtcacaaaaagta

SEQ ID NO: 5600520 - DNA, 25 bp, Homo sapien
gtcacaaaaagtagcttcttggtaa

SEQ ID NO: 5600521 - DNA, 25 bp, Homo sapien
tggtaaattacttgatcagggtatt

SEQ ID NO: 5600522 - DNA, 25 bp, Homo sapien
ttttctaggtgctagggatccaaca

SEQ ID NO: 5600523 - DNA, 25 bp, Homo sapien
gatcgagagccttccatctggttca

SEQ ID NO: 5600524 - DNA, 25 bp, Homo sapien
agttaccaggggaaagattgtataa

SEQ ID NO: 5600525 - DNA, 25 bp, Homo sapien
aaatcagcaacaggacacacatgtt

SEQ ID NO: 5600526 - DNA, 25 bp, Homo sapien
atgccaggaagacttgctgaccaag

SEQ ID NO: 5600527 - DNA, 25 bp, Homo sapien
aggggagagagacatactctaactg

SEQ ID NO: 5600528 - DNA, 25 bp, Homo sapien
atacagactacaaactagagatgtt

SEQ ID NO: 5600529 - DNA, 25 bp, Homo sapien
gggcataccagactgggaccctttc

SEQ ID NO: 5600530 - DNA, 25 bp, Homo sapien
tctaactgatgccaggaagacttgc

SEQ ID NO: 5600531 - DNA, 25 bp, Homo sapien
tgtgccacaaaatgtccatggagct

SEQ ID NO: 5600532 - DNA, 25 bp, Homo sapien
tggacagatgctccaggagttacca

SEQ ID NO: 5600533 - DNA, 25 bp, Homo sapien
aaatgtccatggagctgtgcaacag

SEQ ID NO: 5600534 - DNA, 25 bp, Homo sapien
agattgtataaaggccagtgcaagg

SEQ ID NO: 5600535 - DNA, 25 bp, Homo sapien
ctctggttatctggggctctgattc

SEQ ID NO: 5600536 - DNA, 25 bp, Homo sapien
tgatctagactggggctcctcaaca

SEQ ID NO: 5600537 - DNA, 25 bp, Homo sapien
tcagagtggattcctggctgttagc

SEQ ID NO: 5600538 - DNA, 25 bp, Homo sapien
tgggttagaggtgcccctcctctcc

SEQ ID NO: 5600539 - DNA, 25 bp, Homo sapien
tgggatggtattggcctctggttat

SEQ ID NO: 5600540 - DNA, 25 bp, Homo sapien
tgctgccctggtgacaaagggcaca

SEQ ID NO: 5600541 - DNA, 25 bp, Homo sapien
attcagcccagggactcttgtggac

SEQ ID NO: 5600542 - DNA, 25 bp, Homo sapien
ccccaggaacatgcctgccctgtgt

SEQ ID NO: 5600543 - DNA, 25 bp, Homo sapien
cctcaacagcaggaccttgtctgac

SEQ ID NO: 5600544 - DNA, 25 bp, Homo sapien
gcttggggagttgccctcctcagag

SEQ ID NO: 5600545 - DNA, 25 bp, Homo sapien
tcctttgaggagcatccccaggaac

SEQ ID NO: 5600546 - DNA, 25 bp, Homo sapien
ctgattaggatcatgtacaagcatc

SEQ ID NO: 5600547 - DNA, 25 bp, Homo sapien
ggttcttctgcctgatgtgcccctc

SEQ ID NO: 5600548 - DNA, 25 bp, Homo sapien
atctgagatacgctgcttataattc

SEQ ID NO: 5600549 - DNA, 25 bp, Homo sapien
aggctctgggtcacatctgagatac

SEQ ID NO: 5600550 - DNA, 25 bp, Homo sapien
gaaagcagtattggactctgtgttt

SEQ ID NO: 5600551 - DNA, 25 bp, Homo sapien
gtcctgggaccacttgaatcaagat

SEQ ID NO: 5600552 - DNA, 25 bp, Homo sapien
acacatgataagcaaggccttcatg

SEQ ID NO: 5600553 - DNA, 25 bp, Homo sapien
caagatcagatggaagcttattcaa

SEQ ID NO: 5600554 - DNA, 25 bp, Homo sapien
catgatcagacatctgcctgcatgt

SEQ ID NO: 5600555 - DNA, 25 bp, Homo sapien
gcctgcatgtctaagattgtcaccc

SEQ ID NO: 5600556 - DNA, 25 bp, Homo sapien
cctactctggtctcacagatggttc

SEQ ID NO: 5600557 - DNA, 25 bp, Homo sapien
tgctacaccttttttcagcaagctt

SEQ ID NO: 5600558 - DNA, 25 bp, Homo sapien
aagcttgctgaaaaaaggtgtagca

SEQ ID NO: 5600559 - DNA, 25 bp, Homo sapien
caaaaaagtcttcattgctacacct

SEQ ID NO: 5600560 - DNA, 25 bp, Homo sapien
aggtgtagcaatgaagacttttttg

SEQ ID NO: 5600561 - DNA, 25 bp, Homo sapien
aagatgttgccaaagctaaggaaac

SEQ ID NO: 5600562 - DNA, 25 bp, Homo sapien
aacctgagaagagtttcaaaaacaa

SEQ ID NO: 5600563 - DNA, 25 bp, Homo sapien
aggaaagtatccaagaagaggaact

SEQ ID NO: 5600564 - DNA, 25 bp, Homo sapien
caaataccacaaaagggaagctaag

SEQ ID NO: 5600565 - DNA, 25 bp, Homo sapien
aagaagaggaactataaaatgtgtc

SEQ ID NO: 5600566 - DNA, 25 bp, Homo sapien
ttctctgccatgactctgctactct

SEQ ID NO: 5600567 - DNA, 25 bp, Homo sapien
gccttctcagtaaatagcagggctt

SEQ ID NO: 5600568 - DNA, 25 bp, Homo sapien
attacggaataaagacagaaagatg

SEQ ID NO: 5600569 - DNA, 25 bp, Homo sapien
cacccctcctgcagagttagccttc

SEQ ID NO: 5600570 - DNA, 25 bp, Homo sapien
aaaatgtgtcaaagattacggaata

SEQ ID NO: 5600571 - DNA, 25 bp, Homo sapien
caacgtgcaaggaaagtatccaaga

SEQ ID NO: 5600572 - DNA, 25 bp, Homo sapien
tcttcggtctcgtacgacgtcagac

SEQ ID NO: 5600573 - DNA, 25 bp, Homo sapien
gtctgacgtcgtacgagaccgaaga

SEQ ID NO: 5600574 - DNA, 25 bp, Homo sapien
tacaatacatgtagactcagcatcc

SEQ ID NO: 5600575 - DNA, 25 bp, Homo sapien
ccttaagcaactagaaatgtcaatc

SEQ ID NO: 5600576 - DNA, 25 bp, Homo sapien
gtcaatctaaaaggcagaaaagctg

SEQ ID NO: 5600577 - DNA, 25 bp, Homo sapien
tgtagactcagcatccaaactttat

SEQ ID NO: 5600578 - DNA, 25 bp, Homo sapien
agaaatgtcaatctaaaaggcagaa

SEQ ID NO: 5600579 - DNA, 25 bp, Homo sapien
ggaaaaatctcatgaagactagaag

SEQ ID NO: 5600580 - DNA, 25 bp, Homo sapien
aaaaatacaagtgcatagggcagag

SEQ ID NO: 5600581 - DNA, 25 bp, Homo sapien
aatgatcaaatagattaagttgtat

SEQ ID NO: 5600582 - DNA, 25 bp, Homo sapien
agaggaggcgattcagttacttctg

SEQ ID NO: 5600583 - DNA, 25 bp, Homo sapien
caagttctacctgataaagtggtgg

SEQ ID NO: 5600584 - DNA, 25 bp, Homo sapien
ctttgaagaagaaaccttaagcaac

SEQ ID NO: 5600585 - DNA, 25 bp, Homo sapien
gctggaattggagccacccaaatgc

SEQ ID NO: 5600586 - DNA, 25 bp, Homo sapien
ttgggctcagtcccaagagaacttt

SEQ ID NO: 5600587 - DNA, 25 bp, Homo sapien
aagaggctctggtatcaagccagtc

SEQ ID NO: 5600588 - DNA, 25 bp, Homo sapien
ccacttggacgagtttgtccgcgtc

SEQ ID NO: 5600589 - DNA, 25 bp, Homo sapien
acagaaggaaaggagattcctcttg

SEQ ID NO: 5600590 - DNA, 25 bp, Homo sapien
aaggtctctggagttcccagggaag

SEQ ID NO: 5600591 - DNA, 25 bp, Homo sapien
tttgtccgcgtctgggcagaatatg

SEQ ID NO: 5600592 - DNA, 25 bp, Homo sapien
gcccatagaagaggctctggtatca

SEQ ID NO: 5600593 - DNA, 25 bp, Homo sapien
cttgattgtggcccatagaagaggc

SEQ ID NO: 5600594 - DNA, 25 bp, Homo sapien
cacctcagattatttgggctcagtc

SEQ ID NO: 5600595 - DNA, 25 bp, Homo sapien
caagccagtcaccaaggacttctgt

SEQ ID NO: 5600596 - DNA, 25 bp, Homo sapien
gccaattaagatctgtgtataagtc

SEQ ID NO: 5600597 - DNA, 25 bp, Homo sapien
tgttgatatggcccccaagggggta

SEQ ID NO: 5600598 - DNA, 25 bp, Homo sapien
ttggcatgacctcaaggtgacagag

SEQ ID NO: 5600599 - DNA, 25 bp, Homo sapien
gtccaagtttctttggcatgacctc

SEQ ID NO: 5600600 - DNA, 25 bp, Homo sapien
acagagcatggcccctgaatagcca

SEQ ID NO: 5600601 - DNA, 25 bp, Homo sapien
catgctgttgatatggcccccaagg

SEQ ID NO: 5600602 - DNA, 25 bp, Homo sapien
ttctttggcatgacctcaaggtgac

SEQ ID NO: 5600603 - DNA, 25 bp, Homo sapien
ttcattgttgacaggaaaggactct

SEQ ID NO: 5600604 - DNA, 25 bp, Homo sapien
aagatctgtgtataagtccaagttt

SEQ ID NO: 5600605 - DNA, 25 bp, Homo sapien
tgcttcattgttgacaggaaaggac

SEQ ID NO: 5600606 - DNA, 25 bp, Homo sapien
ggcccctgaatagccatgctgttga

SEQ ID NO: 5600607 - DNA, 25 bp, Homo sapien
ttgtaatacaaatgtggaataatta

SEQ ID NO: 5600608 - DNA, 25 bp, Homo sapien
taactagagggaaagatacacttaa

SEQ ID NO: 5600609 - DNA, 25 bp, Homo sapien
atatatcctgagagaggcactagat

SEQ ID NO: 5600610 - DNA, 25 bp, Homo sapien
gttgggttttttgtgcaggagcatc

SEQ ID NO: 5600611 - DNA, 25 bp, Homo sapien
catccttagggtctgtgggattcgg

SEQ ID NO: 5600612 - DNA, 25 bp, Homo sapien
tgagccatacaaataactagaggga

SEQ ID NO: 5600613 - DNA, 25 bp, Homo sapien
tagatatacaggattgagccataca

SEQ ID NO: 5600614 - DNA, 25 bp, Homo sapien
ataatgacacaaataatgacttaat

SEQ ID NO: 5600615 - DNA, 25 bp, Homo sapien
agagaggcactagatatacaggatt

SEQ ID NO: 5600616 - DNA, 25 bp, Homo sapien
gagtacaaaatgatgctatgatttt

SEQ ID NO: 5600617 - DNA, 25 bp, Homo sapien
gtgcaggagcatccttagggtctgt

SEQ ID NO: 5600618 - DNA, 25 bp, Homo sapien
gagctgcccttgggaccaagagctg

SEQ ID NO: 5600619 - DNA, 25 bp, Homo sapien
gctgtgtctggtccgctcttggaac

SEQ ID NO: 5600620 - DNA, 25 bp, Homo sapien
gtgaagcctcatgaacaagggtagc

SEQ ID NO: 5600621 - DNA, 25 bp, Homo sapien
acggctgtgcgtgaagcctcatgaa

SEQ ID NO: 5600622 - DNA, 25 bp, Homo sapien
tctggtccgctcttggaacggctgt

SEQ ID NO: 5600623 - DNA, 25 bp, Homo sapien
agaaaccagccacgcagatgattca

SEQ ID NO: 5600624 - DNA, 25 bp, Homo sapien
gcaaacgctcgtcccatagcaggtg

SEQ ID NO: 5600625 - DNA, 25 bp, Homo sapien
agccattgtgcaaacgctcgtccca

SEQ ID NO: 5600626 - DNA, 25 bp, Homo sapien
atgaacaagggtagccattgtgcaa

SEQ ID NO: 5600627 - DNA, 25 bp, Homo sapien
ctcgtcccatagcaggtgaagacag

SEQ ID NO: 5600628 - DNA, 25 bp, Homo sapien
accagccacgcagatgattcaggca

SEQ ID NO: 5600629 - DNA, 25 bp, Homo sapien
aggcatgactgcaaacacttggttt

SEQ ID NO: 5600630 - DNA, 25 bp, Homo sapien
gaaaagtgtcctgagcagtgcacta

SEQ ID NO: 5600631 - DNA, 25 bp, Homo sapien
acttggtttgcacttggtttgattc

SEQ ID NO: 5600632 - DNA, 25 bp, Homo sapien
aaaatgaaacctgacaatgacaaat

SEQ ID NO: 5600633 - DNA, 25 bp, Homo sapien
catacaacgatcgagaagtgtggat

SEQ ID NO: 5600634 - DNA, 25 bp, Homo sapien
aaaaaatacatgggccactggcaaa

SEQ ID NO: 5600635 - DNA, 25 bp, Homo sapien
tggcaaatgcaggatgcagactatt

SEQ ID NO: 5600636 - DNA, 25 bp, Homo sapien
gttttatggaaacaggcatgactgc

SEQ ID NO: 5600637 - DNA, 25 bp, Homo sapien
ctctgtagctactgtggtccatttt

SEQ ID NO: 5600638 - DNA, 25 bp, Homo sapien
caggatgcagactatttgggatgtt

SEQ ID NO: 5600639 - DNA, 25 bp, Homo sapien
cattagagtgctgtgacttaacctc

SEQ ID NO: 5600640 - DNA, 25 bp, Homo sapien
gggctttgacagaggagttactccc

SEQ ID NO: 5600641 - DNA, 25 bp, Homo sapien
tcagtatggcgacccaatgagtatt

SEQ ID NO: 5600642 - DNA, 25 bp, Homo sapien
ttctggcagatataattgtcaaaca

SEQ ID NO: 5600643 - DNA, 25 bp, Homo sapien
tgaactgcagccaatcaatagcttc

SEQ ID NO: 5600644 - DNA, 25 bp, Homo sapien
cagctaaggtatcatgcctacatct

SEQ ID NO: 5600645 - DNA, 25 bp, Homo sapien
cctcacgactaaagaatgaagcaca

SEQ ID NO: 5600646 - DNA, 25 bp, Homo sapien
agatgctgcatcctcacgactaaag

SEQ ID NO: 5600647 - DNA, 25 bp, Homo sapien
gaagcacaatagtgaaaatggtctc

SEQ ID NO: 5600648 - DNA, 25 bp, Homo sapien
aaaaggtaataaaagcttgaactgc

SEQ ID NO: 5600649 - DNA, 25 bp, Homo sapien
ggcagcacaagaggtactttctggc

SEQ ID NO: 5600650 - DNA, 25 bp, Homo sapien
gctctgggatctctctagtgggctt

SEQ ID NO: 5600651 - DNA, 25 bp, Homo sapien
ggaccgggcaggacaccgtcggttg

SEQ ID NO: 5600652 - DNA, 25 bp, Homo sapien
caaccgacggtgtcctgcccggtcc

SEQ ID NO: 5600653 - DNA, 25 bp, Homo sapien
tgtgtttacatgttcagtggggatc

SEQ ID NO: 5600654 - DNA, 25 bp, Homo sapien
gtaccttagaggttgtccacaattc

SEQ ID NO: 5600655 - DNA, 25 bp, Homo sapien
taataatcgaatatggagcagaact

SEQ ID NO: 5600656 - DNA, 25 bp, Homo sapien
tctcacaggctttatgtgttttgtg

SEQ ID NO: 5600657 - DNA, 25 bp, Homo sapien
atcgaatatggagcagaactacaag

SEQ ID NO: 5600658 - DNA, 25 bp, Homo sapien
aacacaaacttgttccaggaaatta

SEQ ID NO: 5600659 - DNA, 25 bp, Homo sapien
catttctgatctggtaagggggaag

SEQ ID NO: 5600660 - DNA, 25 bp, Homo sapien
ttacatgttcagtggggatcatttc

SEQ ID NO: 5600661 - DNA, 25 bp, Homo sapien
tcatttagaagtacaaagagtattt

SEQ ID NO: 5600662 - DNA, 25 bp, Homo sapien
acagggcatttaatttcccacagat

SEQ ID NO: 5600663 - DNA, 25 bp, Homo sapien
tgttccaggaaattaataatcgaat

SEQ ID NO: 5600664 - DNA, 25 bp, Homo sapien
ttctgatgggaactagataaaggga

SEQ ID NO: 5600665 - DNA, 25 bp, Homo sapien
tctagtagagtaatatgccaccaaa

SEQ ID NO: 5600666 - DNA, 25 bp, Homo sapien
aagagatcttgtaaaagctcagtac

SEQ ID NO: 5600667 - DNA, 25 bp, Homo sapien
tacgctatttgtgaatttgtgggac

SEQ ID NO: 5600668 - DNA, 25 bp, Homo sapien
ggaactagataaagggacagtcatt

SEQ ID NO: 5600669 - DNA, 25 bp, Homo sapien
agaagttattctaggagataggtaa

SEQ ID NO: 5600670 - DNA, 25 bp, Homo sapien
gccaccaaagagaactcagtaaata

SEQ ID NO: 5600671 - DNA, 25 bp, Homo sapien
tcccaggatagcataagaaactaaa

SEQ ID NO: 5600672 - DNA, 25 bp, Homo sapien
accgttaatgcctagagaggagaaa

SEQ ID NO: 5600673 - DNA, 25 bp, Homo sapien
tttcccagcttcaatgaggtcttat

SEQ ID NO: 5600674 - DNA, 25 bp, Homo sapien
agaaactaaagtatataagagatct

SEQ ID NO: 5600675 - DNA, 25 bp, Homo sapien
ccaaagtaaacatctgaatagctca

SEQ ID NO: 5600676 - DNA, 25 bp, Homo sapien
gtaatctagatttaacagtatttta

SEQ ID NO: 5600677 - DNA, 25 bp, Homo sapien
tactacaagtaaaatatcattctaa

SEQ ID NO: 5600678 - DNA, 25 bp, Homo sapien
aacatctgaatagctcagagaactc

SEQ ID NO: 5600679 - DNA, 25 bp, Homo sapien
taatttgagtgggcaatttacttta

SEQ ID NO: 5600680 - DNA, 25 bp, Homo sapien
ggtaactgctggtaatctagattta

SEQ ID NO: 5600681 - DNA, 25 bp, Homo sapien
aatttgagtgggcaatttactttat

SEQ ID NO: 5600682 - DNA, 25 bp, Homo sapien
aaacattttatgacaatctatgcaa

SEQ ID NO: 5600683 - DNA, 25 bp, Homo sapien
attccaaagtaaacatctgaatagc

SEQ ID NO: 5600684 - DNA, 25 bp, Homo sapien
aaaaaggtaactgctggtaatctag

SEQ ID NO: 5600685 - DNA, 25 bp, Homo sapien
ctcagagaactctttattatcttac

SEQ ID NO: 5600686 - DNA, 25 bp, Homo sapien
tgacatatctgaaggggcagaaaaa

SEQ ID NO: 5600687 - DNA, 25 bp, Homo sapien
tgaccttagcccgcaacagagacag

SEQ ID NO: 5600688 - DNA, 25 bp, Homo sapien
gtgcaatagaagtgtggttgagtga

SEQ ID NO: 5600689 - DNA, 25 bp, Homo sapien
atatcagcaggtattgtcaattccc

SEQ ID NO: 5600690 - DNA, 25 bp, Homo sapien
taaccaccatttgcccacggtctac

SEQ ID NO: 5600691 - DNA, 25 bp, Homo sapien
agtcaggctgtgaacccagatgtag

SEQ ID NO: 5600692 - DNA, 25 bp, Homo sapien
gctggccctgaccttagcccgcaac

SEQ ID NO: 5600693 - DNA, 25 bp, Homo sapien
agatgagcaagagtctgatgtgttg

SEQ ID NO: 5600694 - DNA, 25 bp, Homo sapien
cagatgtagcagatctaaaagtttc

SEQ ID NO: 5600695 - DNA, 25 bp, Homo sapien
ccttagagagatagtatcagggaaa

SEQ ID NO: 5600696 - DNA, 25 bp, Homo sapien
atatataacgtggctggtcattgat

SEQ ID NO: 5600697 - DNA, 25 bp, Homo sapien
tggagccaattgagaggtaatattc

SEQ ID NO: 5600698 - DNA, 25 bp, Homo sapien
ccttcatatctgagaagacacactt

SEQ ID NO: 5600699 - DNA, 25 bp, Homo sapien
tgcttatttgagggctgtggtccat

SEQ ID NO: 5600700 - DNA, 25 bp, Homo sapien
gtgactgaccagacaatcgactttc

SEQ ID NO: 5600701 - DNA, 25 bp, Homo sapien
ctccatggtcactaacagaaacgtc

SEQ ID NO: 5600702 - DNA, 25 bp, Homo sapien
gaaagtgaattgactgccaagagtt

SEQ ID NO: 5600703 - DNA, 25 bp, Homo sapien
ccaagagttttgagtaatccagcac

SEQ ID NO: 5600704 - DNA, 25 bp, Homo sapien
ttcctcataagaacttgggttggag

SEQ ID NO: 5600705 - DNA, 25 bp, Homo sapien
aaatgcattctgaaagtgaattgac

SEQ ID NO: 5600706 - DNA, 25 bp, Homo sapien
gtggtccatcagtgactgaccagac

SEQ ID NO: 5600707 - DNA, 25 bp, Homo sapien
aacagaaacgtcttgctaaatcctc

SEQ ID NO: 5600708 - DNA, 25 bp, Homo sapien
ggtggcctcagggcaactttagaat

SEQ ID NO: 5600709 - DNA, 25 bp, Homo sapien
aggaatcaaacatgaccaagtagtc

SEQ ID NO: 5600710 - DNA, 25 bp, Homo sapien
cttgcagtacataggcacgttagcc

SEQ ID NO: 5600711 - DNA, 25 bp, Homo sapien
gcttcacttgcaggagctctgctcc

SEQ ID NO: 5600712 - DNA, 25 bp, Homo sapien
gaatgcccaggcagaaggttttcta

SEQ ID NO: 5600713 - DNA, 25 bp, Homo sapien
tgagagaataccaacaagtgtggat

SEQ ID NO: 5600714 - DNA, 25 bp, Homo sapien
aaagatatggccagttgcttgggat

SEQ ID NO: 5600715 - DNA, 25 bp, Homo sapien
ttgcttgggattgtacatcacaggg

SEQ ID NO: 5600716 - DNA, 25 bp, Homo sapien
gcacgttagccatgatgtggatgtc

SEQ ID NO: 5600717 - DNA, 25 bp, Homo sapien
taagccaaaggcgtatttaggaatc

SEQ ID NO: 5600718 - DNA, 25 bp, Homo sapien
atttgaaaatgatctgctgacagtc

SEQ ID NO: 5600719 - DNA, 25 bp, Homo sapien
gggctgagagacgcccactccttca

SEQ ID NO: 5600720 - DNA, 25 bp, Homo sapien
cccaagctccccagaaccaggtctg

SEQ ID NO: 5600721 - DNA, 25 bp, Homo sapien
tcaaggcctgacttcacaggacccc

SEQ ID NO: 5600722 - DNA, 25 bp, Homo sapien
gagagacgcccactccttcaaggcc

SEQ ID NO: 5600723 - DNA, 25 bp, Homo sapien
cccagaaccaggtctggagactgca

SEQ ID NO: 5600724 - DNA, 25 bp, Homo sapien
ccaatcaaaggtgtctgggtcctga

SEQ ID NO: 5600725 - DNA, 25 bp, Homo sapien
ctcatgtcaaatgggtcccaatcaa

SEQ ID NO: 5600726 - DNA, 25 bp, Homo sapien
gctgctggtcctgaatgctctgcgg

SEQ ID NO: 5600727 - DNA, 25 bp, Homo sapien
aaatgggtcccaatcaaaggtgtct

SEQ ID NO: 5600728 - DNA, 25 bp, Homo sapien
cttcacaggacccctctctgtgtcc

SEQ ID NO: 5600729 - DNA, 25 bp, Homo sapien
ctgggtcctgacccacctccccagc

SEQ ID NO: 5600730 - DNA, 25 bp, Homo sapien
caagaaggcatctgctgaagctctg

SEQ ID NO: 5600731 - DNA, 25 bp, Homo sapien
ggtcccaagaaggcatctgctgaag

SEQ ID NO: 5600732 - DNA, 25 bp, Homo sapien
aaggcatctgctgaagctctgttgc

SEQ ID NO: 5600733 - DNA, 25 bp, Homo sapien
ctgctgtgtactaagaatcagcgtc

SEQ ID NO: 5600734 - DNA, 25 bp, Homo sapien
aacttcttggtctctatttagccct

SEQ ID NO: 5600735 - DNA, 25 bp, Homo sapien
aggtacatggttaacttcttggtct

SEQ ID NO: 5600736 - DNA, 25 bp, Homo sapien
gggagcatctcggcacacagagata

SEQ ID NO: 5600737 - DNA, 25 bp, Homo sapien
aagaatcagcgtcctatgcacaatg

SEQ ID NO: 5600738 - DNA, 25 bp, Homo sapien
gcatctcggcacacagagatatagt

SEQ ID NO: 5600739 - DNA, 25 bp, Homo sapien
tgtgtactaagaatcagcgtcctat

SEQ ID NO: 5600740 - DNA, 25 bp, Homo sapien
aaaccagtgaaacatagcgaaaggg

SEQ ID NO: 5600741 - DNA, 25 bp, Homo sapien
aggactctgtgggaaaggttccata

SEQ ID NO: 5600742 - DNA, 25 bp, Homo sapien
gggtgtttgagcaatgaactggatc

SEQ ID NO: 5600743 - DNA, 25 bp, Homo sapien
ctaaccaaggcctgggtactaaatg

SEQ ID NO: 5600744 - DNA, 25 bp, Homo sapien
actaaatgaaacaaagaggctctaa

SEQ ID NO: 5600745 - DNA, 25 bp, Homo sapien
cacatgtgcagaatagcagcgatga

SEQ ID NO: 5600746 - DNA, 25 bp, Homo sapien
gtcactgcagacggttgaaatgatg

SEQ ID NO: 5600747 - DNA, 25 bp, Homo sapien
acatgatgatcgtttggtgtgggtt

SEQ ID NO: 5600748 - DNA, 25 bp, Homo sapien
gcagagatgtagaagtgacttaaca

SEQ ID NO: 5600749 - DNA, 25 bp, Homo sapien
ccccagtggcaacacatgtgcagaa

SEQ ID NO: 5600750 - DNA, 25 bp, Homo sapien
gaactggatcctagcagaggcatta

SEQ ID NO: 5600751 - DNA, 25 bp, Homo sapien
aagcgagccagcgatccctaaataa

SEQ ID NO: 5600752 - DNA, 25 bp, Homo sapien
acgcagcctcctctgtaatgagatc

SEQ ID NO: 5600753 - DNA, 25 bp, Homo sapien
cacatggagctgattgactctgatt

SEQ ID NO: 5600754 - DNA, 25 bp, Homo sapien
agtacaggacccactgcagattggt

SEQ ID NO: 5600755 - DNA, 25 bp, Homo sapien
tccctgacactcacatggagctgat

SEQ ID NO: 5600756 - DNA, 25 bp, Homo sapien
aagaaagagacccaaaaaaatgatc

SEQ ID NO: 5600757 - DNA, 25 bp, Homo sapien
ttcagcttagtctacggcaacaaaa

SEQ ID NO: 5600758 - DNA, 25 bp, Homo sapien
ggcaacaaaataatagtacaggacc

SEQ ID NO: 5600759 - DNA, 25 bp, Homo sapien
atatctacagatgagtccctgacac

SEQ ID NO: 5600760 - DNA, 25 bp, Homo sapien
atatcacaagttgttggaccaacac

SEQ ID NO: 5600761 - DNA, 25 bp, Homo sapien
tcagtgtcagatcacacgcagcctc

SEQ ID NO: 5600762 - DNA, 25 bp, Homo sapien
gtgtagtaatacaagagatgtgacc

SEQ ID NO: 5600763 - DNA, 25 bp, Homo sapien
gatgatgggtacagtgtttttacgg

SEQ ID NO: 5600764 - DNA, 25 bp, Homo sapien
agttactggttttcattatggtgac

SEQ ID NO: 5600765 - DNA, 25 bp, Homo sapien
gtaatgagatcacagcacgtctcat

SEQ ID NO: 5600766 - DNA, 25 bp, Homo sapien
caatttagaaaggtagtgatgatgg

SEQ ID NO: 5600767 - DNA, 25 bp, Homo sapien
aaagttagcattgaaatatgttggt

SEQ ID NO: 5600768 - DNA, 25 bp, Homo sapien
ccaaggccctgtccatcatttctct

SEQ ID NO: 5600769 - DNA, 25 bp, Homo sapien
atcacagcacgtctcatcagttact

SEQ ID NO: 5600770 - DNA, 25 bp, Homo sapien
ttaaaacccagctgtccaagaacga

SEQ ID NO: 5600771 - DNA, 25 bp, Homo sapien
ctgtccaagaacgattccccaaggc

SEQ ID NO: 5600772 - DNA, 25 bp, Homo sapien
aacccagctgtccaagaacgattcc

SEQ ID NO: 5600773 - DNA, 25 bp, Homo sapien
aacactcatgaaaagttagcattga

SEQ ID NO: 5600774 - DNA, 25 bp, Homo sapien
tgaccaacattcaaagggcaaagaa

SEQ ID NO: 5600775 - DNA, 25 bp, Homo sapien
gaatgttgtctatagagatgaggct

SEQ ID NO: 5600776 - DNA, 25 bp, Homo sapien
gatgaggctatagaaaaacaaggat

SEQ ID NO: 5600777 - DNA, 25 bp, Homo sapien
tgaagaagacaggatatacaatgtt

SEQ ID NO: 5600778 - DNA, 25 bp, Homo sapien
ggccaatgaccactatatgaccaac

SEQ ID NO: 5600779 - DNA, 25 bp, Homo sapien
cttgttggtctcacagctggtaggg

SEQ ID NO: 5600780 - DNA, 25 bp, Homo sapien
gactgtgatcgggttcccccaagta

SEQ ID NO: 5600781 - DNA, 25 bp, Homo sapien
aaggataggcatcagcccgcttctt

SEQ ID NO: 5600782 - DNA, 25 bp, Homo sapien
ttctcacaagtatgaggggacagaa

SEQ ID NO: 5600783 - DNA, 25 bp, Homo sapien
aatgttaatggattggaggtttcaa

SEQ ID NO: 5600784 - DNA, 25 bp, Homo sapien
tcccccaagtagaccagggtctgcg

SEQ ID NO: 5600785 - DNA, 25 bp, Homo sapien
ttgttcccaccacaagcgcagaatg

SEQ ID NO: 5600786 - DNA, 25 bp, Homo sapien
taaataaagtaattgccattgaggt

SEQ ID NO: 5600787 - DNA, 25 bp, Homo sapien
catagatgtacatacaggtctgcca

SEQ ID NO: 5600788 - DNA, 25 bp, Homo sapien
gtatttagagcgtgcttgttggccc

SEQ ID NO: 5600789 - DNA, 25 bp, Homo sapien
gggtatgctcagttactggaagatg

SEQ ID NO: 5600790 - DNA, 25 bp, Homo sapien
aagcgcagaatgccttgtacttcac

SEQ ID NO: 5600791 - DNA, 25 bp, Homo sapien
gtaattgccattgaggtagggagaa

SEQ ID NO: 5600792 - DNA, 25 bp, Homo sapien
atcagcaaatttacttctagaagga

SEQ ID NO: 5600793 - DNA, 25 bp, Homo sapien
gcttgttggcccactgggtatgctc

SEQ ID NO: 5600794 - DNA, 25 bp, Homo sapien
ttactggaagatgttttggctgtgg

SEQ ID NO: 5600795 - DNA, 25 bp, Homo sapien
cccaccacaagcgcagaatgccttg

SEQ ID NO: 5600796 - DNA, 25 bp, Homo sapien
gtgctacattagacccccagaactt

SEQ ID NO: 5600797 - DNA, 25 bp, Homo sapien
tgtaagatatataatgtgatgagtt

SEQ ID NO: 5600798 - DNA, 25 bp, Homo sapien
tttagagatgttagaaaacttgttc

SEQ ID NO: 5600799 - DNA, 25 bp, Homo sapien
ttggaattgaaactgaaactcaggc

SEQ ID NO: 5600800 - DNA, 25 bp, Homo sapien
taactcctacaggttgtgatgggca

SEQ ID NO: 5600801 - DNA, 25 bp, Homo sapien
aagtgtgtaccctttgaacaacatc

SEQ ID NO: 5600802 - DNA, 25 bp, Homo sapien
gttaaccatagttgccatgtgctac

SEQ ID NO: 5600803 - DNA, 25 bp, Homo sapien
tagaaagtagtggtattggaattga

SEQ ID NO: 5600804 - DNA, 25 bp, Homo sapien
cacaatcaagtcagttaacacacac

SEQ ID NO: 5600805 - DNA, 25 bp, Homo sapien
aaactcaggctgaaatcttaactcc

SEQ ID NO: 5600806 - DNA, 25 bp, Homo sapien
gtgatgggcacaacctagaaatgat

SEQ ID NO: 5600807 - DNA, 25 bp, Homo sapien
cggtaaacgatcagacgacaagaca

SEQ ID NO: 5600808 - DNA, 25 bp, Homo sapien
gtttaatcaccccattagggcaata

SEQ ID NO: 5600809 - DNA, 25 bp, Homo sapien
aacacagtcagcatggcatgaacag

SEQ ID NO: 5600810 - DNA, 25 bp, Homo sapien
cagtcagcatggcatgaacagcatg

SEQ ID NO: 5600811 - DNA, 25 bp, Homo sapien
catttcccatctgccgccgtaaaca

SEQ ID NO: 5600812 - DNA, 25 bp, Homo sapien
acccagcctcaaatcagggatgact

SEQ ID NO: 5600813 - DNA, 25 bp, Homo sapien
ccaaagagtccagcctcgatcaggg

SEQ ID NO: 5600814 - DNA, 25 bp, Homo sapien
tcaaatcagggatgactacagtgag

SEQ ID NO: 5600815 - DNA, 25 bp, Homo sapien
aacagcatgccggtaaacgatcaga

SEQ ID NO: 5600816 - DNA, 25 bp, Homo sapien
agacgacaagacatctgattatttg

SEQ ID NO: 5600817 - DNA, 25 bp, Homo sapien
ccatctgccgccgtaaacaaagaca

SEQ ID NO: 5600818 - DNA, 25 bp, Homo sapien
caatgagagccttccaaacaagtct

SEQ ID NO: 5600819 - DNA, 25 bp, Homo sapien
cttttcctagagaaaggtggactga

SEQ ID NO: 5600820 - DNA, 25 bp, Homo sapien
ggaggcactcaggcctgacgtgcct

SEQ ID NO: 5600821 - DNA, 25 bp, Homo sapien
ccaggcctgtctgctgtcaagatcc

SEQ ID NO: 5600822 - DNA, 25 bp, Homo sapien
cgaggctttctctagtactgtacag

SEQ ID NO: 5600823 - DNA, 25 bp, Homo sapien
gccagtcatcaacaaggaggcactc

SEQ ID NO: 5600824 - DNA, 25 bp, Homo sapien
aaggtgctagaaaggtgctattact

SEQ ID NO: 5600825 - DNA, 25 bp, Homo sapien
gacgtgcctgacagatcgaggcttt

SEQ ID NO: 5600826 - DNA, 25 bp, Homo sapien
gatctgcccaggtatcaatgagagc

SEQ ID NO: 5600827 - DNA, 25 bp, Homo sapien
attccttcaagacaaggctgccggt

SEQ ID NO: 5600828 - DNA, 25 bp, Homo sapien
atgtataccccccaatgacagctcc

SEQ ID NO: 5600829 - DNA, 25 bp, Homo sapien
atttactcatgtatctgtagacctt

SEQ ID NO: 5600830 - DNA, 25 bp, Homo sapien
ctgtagaccttagtagcccccaaac

SEQ ID NO: 5600831 - DNA, 25 bp, Homo sapien
gcccggcccatgcatgatttttgtg

SEQ ID NO: 5600832 - DNA, 25 bp, Homo sapien
tgtatctgtagaccttagtagcccc

SEQ ID NO: 5600833 - DNA, 25 bp, Homo sapien
tttgtgatatccaccaccacagata

SEQ ID NO: 5600834 - DNA, 25 bp, Homo sapien
tcttagtgcttgctgcttaacatta

SEQ ID NO: 5600835 - DNA, 25 bp, Homo sapien
agagtccttgcattcaaagagttgg

SEQ ID NO: 5600836 - DNA, 25 bp, Homo sapien
agagttggacacctgtgcaccgtcc

SEQ ID NO: 5600837 - DNA, 25 bp, Homo sapien
taacattattgtagctcttactgct

SEQ ID NO: 5600838 - DNA, 25 bp, Homo sapien
acctgtgcaccgtccaagtattctc

SEQ ID NO: 5600839 - DNA, 25 bp, Homo sapien
cacagataagcaaaagagtccttgc

SEQ ID NO: 5600840 - DNA, 25 bp, Homo sapien
ctacatcagccgtgagctgaggagg

SEQ ID NO: 5600841 - DNA, 25 bp, Homo sapien
taggagggacattaactgccatcaa

SEQ ID NO: 5600842 - DNA, 25 bp, Homo sapien
ggaggaactgaggtttgactattgg

SEQ ID NO: 5600843 - DNA, 25 bp, Homo sapien
aaggcttcaggaactggccactgaa

SEQ ID NO: 5600844 - DNA, 25 bp, Homo sapien
cctgagtgatcaaccagacaagaaa

SEQ ID NO: 5600845 - DNA, 25 bp, Homo sapien
gccatcaactgagcggcaactgcca

SEQ ID NO: 5600846 - DNA, 25 bp, Homo sapien
aatcccagatgtgacctgagtgatc

SEQ ID NO: 5600847 - DNA, 25 bp, Homo sapien
ggggaacacaatccaggatcactct

SEQ ID NO: 5600848 - DNA, 25 bp, Homo sapien
attagactagacacctgagttgttt

SEQ ID NO: 5600849 - DNA, 25 bp, Homo sapien
tggtcctatgtggagacagaggaaa

SEQ ID NO: 5600850 - DNA, 25 bp, Homo sapien
atggaccctgaggcttgtgtcccta

SEQ ID NO: 5600851 - DNA, 25 bp, Homo sapien
agattaacagcctctggcggatgcc

SEQ ID NO: 5600852 - DNA, 25 bp, Homo sapien
gcaccatccttgaaaatagcatctg

SEQ ID NO: 5600853 - DNA, 25 bp, Homo sapien
tgctcgccaaggtcattgctgtgat

SEQ ID NO: 5600854 - DNA, 25 bp, Homo sapien
gtgaatcagcaaggaccactccatc

SEQ ID NO: 5600855 - DNA, 25 bp, Homo sapien
gcaggagcccagtcacgtttagggc

SEQ ID NO: 5600856 - DNA, 25 bp, Homo sapien
cagtcacgtttagggcaaatgctcg

SEQ ID NO: 5600857 - DNA, 25 bp, Homo sapien
tatatatcaaaggaaacagctaaca

SEQ ID NO: 5600858 - DNA, 25 bp, Homo sapien
ggttcctacgacatcgtggaccctc

SEQ ID NO: 5600859 - DNA, 25 bp, Homo sapien
ttagggcaaatgctcgccaaggtca

SEQ ID NO: 5600860 - DNA, 25 bp, Homo sapien
tgattgcactgacccatgaggaatg

SEQ ID NO: 5600861 - DNA, 25 bp, Homo sapien
ccatgaggaatgactgccaatatct

SEQ ID NO: 5600862 - DNA, 25 bp, Homo sapien
gcatatgccggcctagatgcagatc

SEQ ID NO: 5600863 - DNA, 25 bp, Homo sapien
catgagggagtgtcctatgatacag

SEQ ID NO: 5600864 - DNA, 25 bp, Homo sapien
cctagatgcagatcctggcacaggg

SEQ ID NO: 5600865 - DNA, 25 bp, Homo sapien
agaaagtggcatatgccggcctaga

SEQ ID NO: 5600866 - DNA, 25 bp, Homo sapien
gggctgctgatcctcgcagtgtggc

SEQ ID NO: 5600867 - DNA, 25 bp, Homo sapien
ccacgtcttggtccagcagtcacac

SEQ ID NO: 5600868 - DNA, 25 bp, Homo sapien
gccggcctagatgcagatcctggca

SEQ ID NO: 5600869 - DNA, 25 bp, Homo sapien
gattccatgagggagtgtcctatga

SEQ ID NO: 5600870 - DNA, 25 bp, Homo sapien
gcacagggccacttccacgtcttgg

SEQ ID NO: 5600871 - DNA, 25 bp, Homo sapien
tatgatacagaaagtggcatatgcc

SEQ ID NO: 5600872 - DNA, 25 bp, Homo sapien
gtcacacagccaatattagtccggg

SEQ ID NO: 5600873 - DNA, 25 bp, Homo sapien
cctggtagctggaacatctgtttct

SEQ ID NO: 5600874 - DNA, 25 bp, Homo sapien
tgtggatggctataattaaacttga

SEQ ID NO: 5600875 - DNA, 25 bp, Homo sapien
tttaagagtggatgatttaactgaa

SEQ ID NO: 5600876 - DNA, 25 bp, Homo sapien
aatatctatatgggggaagaagtga

SEQ ID NO: 5600877 - DNA, 25 bp, Homo sapien
tgggggaagaagtgaaatcactata

SEQ ID NO: 5600878 - DNA, 25 bp, Homo sapien
aatgttttagtaagactgggtagat

SEQ ID NO: 5600879 - DNA, 25 bp, Homo sapien
tgctatgagactggagtttaagagt

SEQ ID NO: 5600880 - DNA, 25 bp, Homo sapien
tgttcaggttaaatgcgtgcacatc

SEQ ID NO: 5600881 - DNA, 25 bp, Homo sapien
aagactgggtagataaaccaaacac

SEQ ID NO: 5600882 - DNA, 25 bp, Homo sapien
tagaaacgaatgctaccatcccacc

SEQ ID NO: 5600883 - DNA, 25 bp, Homo sapien
gcgtgcacatcctggtagctggaac

SEQ ID NO: 5600884 - DNA, 25 bp, Homo sapien
ttggccaaagccgtgaaaatcacat

SEQ ID NO: 5600885 - DNA, 25 bp, Homo sapien
cccaatgcacaggacttagggagca

SEQ ID NO: 5600886 - DNA, 25 bp, Homo sapien
gggaattctaccaggacggtgccca

SEQ ID NO: 5600887 - DNA, 25 bp, Homo sapien
gggcagcattctttccgagagggca

SEQ ID NO: 5600888 - DNA, 25 bp, Homo sapien
ttctagtgcacataggcagacagtc

SEQ ID NO: 5600889 - DNA, 25 bp, Homo sapien
ttagggagcagatttgccaataccc

SEQ ID NO: 5600890 - DNA, 25 bp, Homo sapien
tctttacagcgtgatggtctcaggg

SEQ ID NO: 5600891 - DNA, 25 bp, Homo sapien
cacatagccagacctagagtcaatc

SEQ ID NO: 5600892 - DNA, 25 bp, Homo sapien
tcaggacttggcaactcagaggtca

SEQ ID NO: 5600893 - DNA, 25 bp, Homo sapien
ggcagacagtcagatgcaaagtcca

SEQ ID NO: 5600894 - DNA, 25 bp, Homo sapien
tgcaaagtccaagatggtctcgttc

SEQ ID NO: 5600895 - DNA, 25 bp, Homo sapien
aaagcctgtcaaaaatcacgtgttc

SEQ ID NO: 5600896 - DNA, 25 bp, Homo sapien
ctggcactgccaatgctcatatccc

SEQ ID NO: 5600897 - DNA, 25 bp, Homo sapien
cttaataatgagcgtttggtacttt

SEQ ID NO: 5600898 - DNA, 25 bp, Homo sapien
tcctggctggttgccatccccactc

SEQ ID NO: 5600899 - DNA, 25 bp, Homo sapien
cctattgaacaaaaacggggtcaca

SEQ ID NO: 5600900 - DNA, 25 bp, Homo sapien
gatgcaggtccactcgagactgtct

SEQ ID NO: 5600901 - DNA, 25 bp, Homo sapien
tgtccccagtgtcctgggtgagaca

SEQ ID NO: 5600902 - DNA, 25 bp, Homo sapien
cacacacacagtcagatgtacctat

SEQ ID NO: 5600903 - DNA, 25 bp, Homo sapien
aagcccagctccaagtctgttcctg

SEQ ID NO: 5600904 - DNA, 25 bp, Homo sapien
actcgagactgtctgcttggcggct

SEQ ID NO: 5600905 - DNA, 25 bp, Homo sapien
gttctaggccaatgagaaccactgg

SEQ ID NO: 5600906 - DNA, 25 bp, Homo sapien
actcaagcagagctgatgaaaattc

SEQ ID NO: 5600907 - DNA, 25 bp, Homo sapien
gggaagttccagaagggattttgca

SEQ ID NO: 5600908 - DNA, 25 bp, Homo sapien
gttgaaatcttggatgataacgtcc

SEQ ID NO: 5600909 - DNA, 25 bp, Homo sapien
ggacttgattccgtagtgatggtgg

SEQ ID NO: 5600910 - DNA, 25 bp, Homo sapien
gggagtgtagccattaggcatgttt

SEQ ID NO: 5600911 - DNA, 25 bp, Homo sapien
ggcaactgacataaggtgagtatcc

SEQ ID NO: 5600912 - DNA, 25 bp, Homo sapien
tccaagtcactgggagtactcaagc

SEQ ID NO: 5600913 - DNA, 25 bp, Homo sapien
ggagccagcctgcctggttttgctc

SEQ ID NO: 5600914 - DNA, 25 bp, Homo sapien
tggactatcgtgagctctggagcca

SEQ ID NO: 5600915 - DNA, 25 bp, Homo sapien
gattttgcagtgagtagaaagttga

SEQ ID NO: 5600916 - DNA, 25 bp, Homo sapien
gtttcctcataaggcagtcctgttc

SEQ ID NO: 5600917 - DNA, 25 bp, Homo sapien
ccaggtgtacccccactgtcgctct

SEQ ID NO: 5600918 - DNA, 25 bp, Homo sapien
tacccccactgtcgctctcagcccc

SEQ ID NO: 5600919 - DNA, 25 bp, Homo sapien
ccttcttgcccgcctcctcggtcac

SEQ ID NO: 5600920 - DNA, 25 bp, Homo sapien
cagaggcgtccctgcgcctctcgtc

SEQ ID NO: 5600921 - DNA, 25 bp, Homo sapien
acttcgggtcctcgcccttgaaggc

SEQ ID NO: 5600922 - DNA, 25 bp, Homo sapien
cgtccctgcgcctctcgtcccttcg

SEQ ID NO: 5600923 - DNA, 25 bp, Homo sapien
tctctctgccttcttgcccgcctcc

SEQ ID NO: 5600924 - DNA, 25 bp, Homo sapien
ttgcccgcctcctcggtcacagagc

SEQ ID NO: 5600925 - DNA, 25 bp, Homo sapien
ctcgtcccttcgcctctcgtccctt

SEQ ID NO: 5600926 - DNA, 25 bp, Homo sapien
cccactgtcgctctcagccccgggg

SEQ ID NO: 5600927 - DNA, 25 bp, Homo sapien
gcccgcctcctcggtcacagagcga

SEQ ID NO: 5600928 - DNA, 25 bp, Homo sapien
ggaaaagtcaaggaagaatgtatga

SEQ ID NO: 5600929 - DNA, 25 bp, Homo sapien
cctgttatgtgcaaagcaaggagtc

SEQ ID NO: 5600930 - DNA, 25 bp, Homo sapien
gcaaggagtcaggtgcctttctgga

SEQ ID NO: 5600931 - DNA, 25 bp, Homo sapien
tgagctcaaccttaggaattgcaga

SEQ ID NO: 5600932 - DNA, 25 bp, Homo sapien
gatgcaaacgtggacccattttaat

SEQ ID NO: 5600933 - DNA, 25 bp, Homo sapien
ctctgtgctaaggtatgctgtggaa

SEQ ID NO: 5600934 - DNA, 25 bp, Homo sapien
aaaacgaaataaacacggcactgtc

SEQ ID NO: 5600935 - DNA, 25 bp, Homo sapien
aggaagaatgtatgagacacatccc

SEQ ID NO: 5600936 - DNA, 25 bp, Homo sapien
tctggttttaggatacactgcattc

SEQ ID NO: 5600937 - DNA, 25 bp, Homo sapien
cagccaaaatggaggcctgtacaga

SEQ ID NO: 5600938 - DNA, 25 bp, Homo sapien
ttataatttcggaggagatgcaaac

SEQ ID NO: 5600939 - DNA, 25 bp, Homo sapien
ccgacccctcccagcttcatgtctt

SEQ ID NO: 5600940 - DNA, 25 bp, Homo sapien
cgcttcctcaggtaagaggaacttc

SEQ ID NO: 5600941 - DNA, 25 bp, Homo sapien
aagaggaacttcatcctaggttctt

SEQ ID NO: 5600942 - DNA, 25 bp, Homo sapien
agcttctccgcttcctcaggtaaga

SEQ ID NO: 5600943 - DNA, 25 bp, Homo sapien
agcacagtcaaagcctctggaagct

SEQ ID NO: 5600944 - DNA, 25 bp, Homo sapien
ccctcccagcttcatgtcttgcatt

SEQ ID NO: 5600945 - DNA, 25 bp, Homo sapien
actcatttggcctcttagctgggac

SEQ ID NO: 5600946 - DNA, 25 bp, Homo sapien
tttggcctcttagctgggactctcc

SEQ ID NO: 5600947 - DNA, 25 bp, Homo sapien
cctcttagctgggactctccgggtg

SEQ ID NO: 5600948 - DNA, 25 bp, Homo sapien
atgcctcaaaagctggttccagcca

SEQ ID NO: 5600949 - DNA, 25 bp, Homo sapien
gagaacagactaatagagtgttcct

SEQ ID NO: 5600950 - DNA, 25 bp, Homo sapien
gccatctgcgaatctgcatgcgttc

SEQ ID NO: 5600951 - DNA, 25 bp, Homo sapien
tgctcttcctccctaccaggccatc

SEQ ID NO: 5600952 - DNA, 25 bp, Homo sapien
gctgctgctcccctcagcaaggggc

SEQ ID NO: 5600953 - DNA, 25 bp, Homo sapien
agcaggagacacaacctcttctctt

SEQ ID NO: 5600954 - DNA, 25 bp, Homo sapien
aagcctcctcataatccagggtgcc

SEQ ID NO: 5600955 - DNA, 25 bp, Homo sapien
ctgcatgcgttctcctatttgactc

SEQ ID NO: 5600956 - DNA, 25 bp, Homo sapien
taatccagggtgccacatccagact

SEQ ID NO: 5600957 - DNA, 25 bp, Homo sapien
gattctggaggaagtagacatcaga

SEQ ID NO: 5600958 - DNA, 25 bp, Homo sapien
ccatggactagctatgagcaggaga

SEQ ID NO: 5600959 - DNA, 25 bp, Homo sapien
ttgactcaggtcactcttccctctc

SEQ ID NO: 5600960 - DNA, 25 bp, Homo sapien
agttcaacagaagctgctgctcccc

SEQ ID NO: 5600961 - DNA, 25 bp, Homo sapien
tagctgagagtatggctcctgagca

SEQ ID NO: 5600962 - DNA, 25 bp, Homo sapien
gctgaaggcaatctagctgagagta

SEQ ID NO: 5600963 - DNA, 25 bp, Homo sapien
tctagaatgtctctgtctgcagggc

SEQ ID NO: 5600964 - DNA, 25 bp, Homo sapien
agaagccggtagaacttcctccttg

SEQ ID NO: 5600965 - DNA, 25 bp, Homo sapien
tccagctgggctctgaattctgcac

SEQ ID NO: 5600966 - DNA, 25 bp, Homo sapien
gcacaatcgggcagatcacatccct

SEQ ID NO: 5600967 - DNA, 25 bp, Homo sapien
ctggtgtatctgatccaactggtgc

SEQ ID NO: 5600968 - DNA, 25 bp, Homo sapien
cagggctcacttgctgctgtgtgtg

SEQ ID NO: 5600969 - DNA, 25 bp, Homo sapien
aacagaagaaaattccagatggaat

SEQ ID NO: 5600970 - DNA, 25 bp, Homo sapien
tcccaggcctgggttctagaatgtc

SEQ ID NO: 5600971 - DNA, 25 bp, Homo sapien
gggtcaggacattcaggttccagct

SEQ ID NO: 5600972 - DNA, 25 bp, Homo sapien
caaacttggggtgtaatcccagttc

SEQ ID NO: 5600973 - DNA, 25 bp, Homo sapien
aaaataaaagttggatctgatggat

SEQ ID NO: 5600974 - DNA, 25 bp, Homo sapien
tcataatatcaggttggtgcaaaag

SEQ ID NO: 5600975 - DNA, 25 bp, Homo sapien
tcaagggctttggctatagtcctgg

SEQ ID NO: 5600976 - DNA, 25 bp, Homo sapien
ctgatggattgcaaaaaacaagcgc

SEQ ID NO: 5600977 - DNA, 25 bp, Homo sapien
agtcctggcatcaaacttggggtgt

SEQ ID NO: 5600978 - DNA, 25 bp, Homo sapien
ccattaagagtatgtggtgtagggg

SEQ ID NO: 5600979 - DNA, 25 bp, Homo sapien
ccgggagccctttgaattcagggcc

SEQ ID NO: 5600980 - DNA, 25 bp, Homo sapien
tgccctctgcctactctcagtgctc

SEQ ID NO: 5600981 - DNA, 25 bp, Homo sapien
acagagcgagatcttttaagaggtg

SEQ ID NO: 5600982 - DNA, 25 bp, Homo sapien
aaacaagcgcaaagcactatatgct

SEQ ID NO: 5600983 - DNA, 25 bp, Homo sapien
gaaagcttgatgactgagtgaaaat

SEQ ID NO: 5600984 - DNA, 25 bp, Homo sapien
ggtggaggtacctttctgagtgtcc

SEQ ID NO: 5600985 - DNA, 25 bp, Homo sapien
acttgcaacacacaggatgcgcagg

SEQ ID NO: 5600986 - DNA, 25 bp, Homo sapien
ttgagggcatctacagaccacagat

SEQ ID NO: 5600987 - DNA, 25 bp, Homo sapien
gtgaaaatgaaggctagtgtcagat

SEQ ID NO: 5600988 - DNA, 25 bp, Homo sapien
atgaagtctcaaatctgggaggttg

SEQ ID NO: 5600989 - DNA, 25 bp, Homo sapien
tggcagccctactgagactctagcc

SEQ ID NO: 5600990 - DNA, 25 bp, Homo sapien
cctatacccagtggagatggagaaa

SEQ ID NO: 5600991 - DNA, 25 bp, Homo sapien
agcaaagaaagcacatgttgaccct

SEQ ID NO: 5600992 - DNA, 25 bp, Homo sapien
gttgccgtaccaagctggcaggaag

SEQ ID NO: 5600993 - DNA, 25 bp, Homo sapien
gagctgatgactccagggctccctc

SEQ ID NO: 5600994 - DNA, 25 bp, Homo sapien
gagctccgatctgacgcaaccagtc

SEQ ID NO: 5600995 - DNA, 25 bp, Homo sapien
gtggagttacataagggctgactta

SEQ ID NO: 5600996 - DNA, 25 bp, Homo sapien
gaagtagagacagatctttggcctc

SEQ ID NO: 5600997 - DNA, 25 bp, Homo sapien
gaagggcctagagcaaataggctta

SEQ ID NO: 5600998 - DNA, 25 bp, Homo sapien
cttctggaagtgctgttgaatacac

SEQ ID NO: 5600999 - DNA, 25 bp, Homo sapien
ttctccaagtgcaagtctgaagggc

SEQ ID NO: 5601000 - DNA, 25 bp, Homo sapien
tggcccacccttatctcagagctcc

SEQ ID NO: 5601001 - DNA, 25 bp, Homo sapien
cttttaaggcgttgcaaaagggcat

SEQ ID NO: 5601002 - DNA, 25 bp, Homo sapien
taaaggatagggtgcaccatttttg

SEQ ID NO: 5601003 - DNA, 25 bp, Homo sapien
tggcagtggtgatgatcatgccctg

SEQ ID NO: 5601004 - DNA, 25 bp, Homo sapien
tatttgtccaaagcaaggaggtttg

SEQ ID NO: 5601005 - DNA, 25 bp, Homo sapien
ttttgaggttatccaggctgtatat

SEQ ID NO: 5601006 - DNA, 25 bp, Homo sapien
tagacttgggctcagccaatcttcc

SEQ ID NO: 5601007 - DNA, 25 bp, Homo sapien
ggtgattacctattaagtggaacta

SEQ ID NO: 5601008 - DNA, 25 bp, Homo sapien
catggctcactatagacttgggctc

SEQ ID NO: 5601009 - DNA, 25 bp, Homo sapien
tccttgcagtggcccactagagggc

SEQ ID NO: 5601010 - DNA, 25 bp, Homo sapien
ccagcctgccagcccatgctgttca

SEQ ID NO: 5601011 - DNA, 25 bp, Homo sapien
ctgtaatccaggctgcagtacactg

SEQ ID NO: 5601012 - DNA, 25 bp, Homo sapien
tgcagtacactggcatgaccatggc

SEQ ID NO: 5601013 - DNA, 25 bp, Homo sapien
tatatctctggagagaagggaatgg

SEQ ID NO: 5601014 - DNA, 25 bp, Homo sapien
cagtatctgctgaatggtgattacc

SEQ ID NO: 5601015 - DNA, 25 bp, Homo sapien
ttccccagggccatatgtcagctta

SEQ ID NO: 5601016 - DNA, 25 bp, Homo sapien
tctggagactgaattgtctgggtct

SEQ ID NO: 5601017 - DNA, 25 bp, Homo sapien
gggccctcaaaagacagccactgcc

SEQ ID NO: 5601018 - DNA, 25 bp, Homo sapien
gctcctgtccaaggtgctgaaatcc

SEQ ID NO: 5601019 - DNA, 25 bp, Homo sapien
ataagctatgtgcaacaagggaagt

SEQ ID NO: 5601020 - DNA, 25 bp, Homo sapien
ttgtctgggtctccagaagagagtc

SEQ ID NO: 5601021 - DNA, 25 bp, Homo sapien
ctatatatagggagtggaagtaaaa

SEQ ID NO: 5601022 - DNA, 25 bp, Homo sapien
atcagaggcatgtggcctttgtggc

SEQ ID NO: 5601023 - DNA, 25 bp, Homo sapien
gtacagctgttgagtcacctgcacc

SEQ ID NO: 5601024 - DNA, 25 bp, Homo sapien
gctcacagccatacggaaggaattc

SEQ ID NO: 5601025 - DNA, 25 bp, Homo sapien
gcgtgcaagtcagacaaagcctgat

SEQ ID NO: 5601026 - DNA, 25 bp, Homo sapien
gatgtaggcagctcctatcagaggc

SEQ ID NO: 5601027 - DNA, 25 bp, Homo sapien
gcatctaagattggctggactggca

SEQ ID NO: 5601028 - DNA, 25 bp, Homo sapien
gcaacactggttttgtggatgtaac

SEQ ID NO: 5601029 - DNA, 25 bp, Homo sapien
tcctctagcagaacagtcaggacca

SEQ ID NO: 5601030 - DNA, 25 bp, Homo sapien
ggtgtgaaattcggctccacagccc

SEQ ID NO: 5601031 - DNA, 25 bp, Homo sapien
tggcccagagtaagtctctcacttt

SEQ ID NO: 5601032 - DNA, 25 bp, Homo sapien
tctgagtccatgtggttgaaggagg

SEQ ID NO: 5601033 - DNA, 25 bp, Homo sapien
gtgtcagagttggtaaacttggccc

SEQ ID NO: 5601034 - DNA, 25 bp, Homo sapien
ttaaaggcagcattctcatgatcac

SEQ ID NO: 5601035 - DNA, 25 bp, Homo sapien
ggactggcagtaccaggtgtgaaat

SEQ ID NO: 5601036 - DNA, 25 bp, Homo sapien
aatagttatacaaggcaacactggt

SEQ ID NO: 5601037 - DNA, 25 bp, Homo sapien
tcaggaccagggccacatctttaaa

SEQ ID NO: 5601038 - DNA, 25 bp, Homo sapien
cacaacagccctaagaggcattatc

SEQ ID NO: 5601039 - DNA, 25 bp, Homo sapien
caatactgtgtgggctctactcgga

SEQ ID NO: 5601040 - DNA, 25 bp, Homo sapien
ctgtgctaatgctcacaacagccct

SEQ ID NO: 5601041 - DNA, 25 bp, Homo sapien
ttgacacagcaacatggctaataag

SEQ ID NO: 5601042 - DNA, 25 bp, Homo sapien
ctgacactcactccaagggtgctgt

SEQ ID NO: 5601043 - DNA, 25 bp, Homo sapien
cctactcccaggagtgaaagcagtg

SEQ ID NO: 5601044 - DNA, 25 bp, Homo sapien
gcaaccagggcacccctactcccag

SEQ ID NO: 5601045 - DNA, 25 bp, Homo sapien
aggagtgaaagcagtggctatattt

SEQ ID NO: 5601046 - DNA, 25 bp, Homo sapien
gctcagagaagttgacacagcaaca

SEQ ID NO: 5601047 - DNA, 25 bp, Homo sapien
ttgaacccagatcgttgttgatgtt

SEQ ID NO: 5601048 - DNA, 25 bp, Homo sapien
atactcttgcaggctggtgaaagca

SEQ ID NO: 5601049 - DNA, 25 bp, Homo sapien
aagacgctaagcctcaaaagggttc

SEQ ID NO: 5601050 - DNA, 25 bp, Homo sapien
cactacaaagagaggccttaaaaac

SEQ ID NO: 5601051 - DNA, 25 bp, Homo sapien
aaggaaaagattgcatttaggttaa

SEQ ID NO: 5601052 - DNA, 25 bp, Homo sapien
aagagaggccttaaaaacggcactc

SEQ ID NO: 5601053 - DNA, 25 bp, Homo sapien
aaaaggccatcaccccttgacctac

SEQ ID NO: 5601054 - DNA, 25 bp, Homo sapien
aaggatggctaagacaggtttcttt

SEQ ID NO: 5601055 - DNA, 25 bp, Homo sapien
cataaatacaactttgcgaggttag

SEQ ID NO: 5601056 - DNA, 25 bp, Homo sapien
taaagccagaggatttttagtgaga

SEQ ID NO: 5601057 - DNA, 25 bp, Homo sapien
gtggatgaaagtcacaggctcataa

SEQ ID NO: 5601058 - DNA, 25 bp, Homo sapien
agcaactcataatagggaaggaaaa

SEQ ID NO: 5601059 - DNA, 25 bp, Homo sapien
tataaataagaaagagtctgcctct

SEQ ID NO: 5601060 - DNA, 25 bp, Homo sapien
tcctggtaattctgctctaagttcc

SEQ ID NO: 5601061 - DNA, 25 bp, Homo sapien
attgagtcaaaaatctaatctttac

SEQ ID NO: 5601062 - DNA, 25 bp, Homo sapien
attactagagccttcaccattttcc

SEQ ID NO: 5601063 - DNA, 25 bp, Homo sapien
tggaataaatattactagagccttc

SEQ ID NO: 5601064 - DNA, 25 bp, Homo sapien
tcccactatcctggtaattctgctc

SEQ ID NO: 5601065 - DNA, 25 bp, Homo sapien
gatctgcccgcttcaacctcatgtt

SEQ ID NO: 5601066 - DNA, 25 bp, Homo sapien
cgcttcaacctcatgttggtcaggc

SEQ ID NO: 5601067 - DNA, 25 bp, Homo sapien
tgccgggccccctaccttagcttga

SEQ ID NO: 5601068 - DNA, 25 bp, Homo sapien
ccaacatgccgggccccctacctta

SEQ ID NO: 5601069 - DNA, 25 bp, Homo sapien
ttaaattggtgtcaacagcatggaa

SEQ ID NO: 5601070 - DNA, 25 bp, Homo sapien
ttggtgtcaacagcatggaataaat

SEQ ID NO: 5601071 - DNA, 25 bp, Homo sapien
ggctatatcaggacgatccagtgtc

SEQ ID NO: 5601072 - DNA, 25 bp, Homo sapien
ccattgtacaccaagagagaggatg

SEQ ID NO: 5601073 - DNA, 25 bp, Homo sapien
ctacagcctggtatccagccggaga

SEQ ID NO: 5601074 - DNA, 25 bp, Homo sapien
ctgaagcatctggtggttctacagc

SEQ ID NO: 5601075 - DNA, 25 bp, Homo sapien
tgcaaatgaatgtctagaggcccag

SEQ ID NO: 5601076 - DNA, 25 bp, Homo sapien
ggtcgcctcttgaaacagtttagcc

SEQ ID NO: 5601077 - DNA, 25 bp, Homo sapien
cttggtaggttgcaaagtacagagt

SEQ ID NO: 5601078 - DNA, 25 bp, Homo sapien
atatcctgccaaaaggtgtaggagt

SEQ ID NO: 5601079 - DNA, 25 bp, Homo sapien
atgctccagatgacacagtagctgt

SEQ ID NO: 5601080 - DNA, 25 bp, Homo sapien
gcccagatggactgcaggctatatc

SEQ ID NO: 5601081 - DNA, 25 bp, Homo sapien
gggatgcgcatgaatgcaaatgcaa

SEQ ID NO: 5601082 - DNA, 25 bp, Homo sapien
taaggctatctgccattgtagaata

SEQ ID NO: 5601083 - DNA, 25 bp, Homo sapien
tggagaaagccggctaattgttttg

SEQ ID NO: 5601084 - DNA, 25 bp, Homo sapien
cactgctattccctgtggagaaagc

SEQ ID NO: 5601085 - DNA, 25 bp, Homo sapien
tagacctaaccagttggccaaatac

SEQ ID NO: 5601086 - DNA, 25 bp, Homo sapien
accagttggccaaatacctatgatg

SEQ ID NO: 5601087 - DNA, 25 bp, Homo sapien
tgctattccctgtggagaaagccgg

SEQ ID NO: 5601088 - DNA, 25 bp, Homo sapien
gttccatactaaacatgccagagat

SEQ ID NO: 5601089 - DNA, 25 bp, Homo sapien
tactaaacatgccagagataggact

SEQ ID NO: 5601090 - DNA, 25 bp, Homo sapien
ggctaattgttttgataaggctatc

SEQ ID NO: 5601091 - DNA, 25 bp, Homo sapien
aaattggtgattttgcttagagatc

SEQ ID NO: 5601092 - DNA, 25 bp, Homo sapien
tgacaatcaactatacgttccatac

SEQ ID NO: 5601093 - DNA, 25 bp, Homo sapien
tgtaagcagaatgtgcatgttaaag

SEQ ID NO: 5601094 - DNA, 25 bp, Homo sapien
aacaatgtaagcagaatgtgcatgt

SEQ ID NO: 5601095 - DNA, 25 bp, Homo sapien
tctgagaaaactgataagagctctc

SEQ ID NO: 5601096 - DNA, 25 bp, Homo sapien
catgttcatgctagacctaaccagt

SEQ ID NO: 5601097 - DNA, 25 bp, Homo sapien
ttacaacatgttagcagatctcagc

SEQ ID NO: 5601098 - DNA, 25 bp, Homo sapien
agagatcagcttctactagatgctc

SEQ ID NO: 5601099 - DNA, 25 bp, Homo sapien
actagatgctcctttacaacatgtt

SEQ ID NO: 5601100 - DNA, 25 bp, Homo sapien
aaaaagcaccctaaacaatgtaagc

SEQ ID NO: 5601101 - DNA, 25 bp, Homo sapien
catttctgagaaaactgataagagc

SEQ ID NO: 5601102 - DNA, 25 bp, Homo sapien
cctaaacaatgtaagcagaatgtgc

SEQ ID NO: 5601103 - DNA, 25 bp, Homo sapien
aagagctctcacttcagtcttactt

SEQ ID NO: 5601104 - DNA, 25 bp, Homo sapien
tgagtagaagcgttttcccagatgt

SEQ ID NO: 5601105 - DNA, 25 bp, Homo sapien
ataaaacgtttgcaaatatggtttc

SEQ ID NO: 5601106 - DNA, 25 bp, Homo sapien
ttgaaaacatgcttggagcaatctc

SEQ ID NO: 5601107 - DNA, 25 bp, Homo sapien
catgcagaatttttgtgttgcagtt

SEQ ID NO: 5601108 - DNA, 25 bp, Homo sapien
agatttttgaagctgtgagtcaatt

SEQ ID NO: 5601109 - DNA, 25 bp, Homo sapien
cttgatgagtagaagcgttttccca

SEQ ID NO: 5601110 - DNA, 25 bp, Homo sapien
gaaatctgtggctaatatgtgaaat

SEQ ID NO: 5601111 - DNA, 25 bp, Homo sapien
gcaacttccgtgaccaaagtatgac

SEQ ID NO: 5601112 - DNA, 25 bp, Homo sapien
agctgtgagtcaattataggaataa

SEQ ID NO: 5601113 - DNA, 25 bp, Homo sapien
tatggtttcttgcaacttccgtgac

SEQ ID NO: 5601114 - DNA, 25 bp, Homo sapien
aaaaggaattccactcttgatgagt

SEQ ID NO: 5601115 - DNA, 25 bp, Homo sapien
tgatagaagtataccagaataaatg

SEQ ID NO: 5601116 - DNA, 25 bp, Homo sapien
gagaaagaacatcctacacacagtc

SEQ ID NO: 5601117 - DNA, 25 bp, Homo sapien
acacacagtcctgaaggatcgcttc

SEQ ID NO: 5601118 - DNA, 25 bp, Homo sapien
tatgaaatggccataggagaaagta

SEQ ID NO: 5601119 - DNA, 25 bp, Homo sapien
tccatccatcttcagaggtgacaaa

SEQ ID NO: 5601120 - DNA, 25 bp, Homo sapien
agtgaaaatgaactgtagctacatc

SEQ ID NO: 5601121 - DNA, 25 bp, Homo sapien
ttgtaactaggtgtgtggacatcat

SEQ ID NO: 5601122 - DNA, 25 bp, Homo sapien
gttgtggtcccatggtggaatacta

SEQ ID NO: 5601123 - DNA, 25 bp, Homo sapien
aatgcacagatgatttctcagcaac

SEQ ID NO: 5601124 - DNA, 25 bp, Homo sapien
taggtatgtatctagagcaattctg

SEQ ID NO: 5601125 - DNA, 25 bp, Homo sapien
gccataggagaaagtataaagaaaa

SEQ ID NO: 5601126 - DNA, 25 bp, Homo sapien
acacactcagcctcacatcttaccc

SEQ ID NO: 5601127 - DNA, 25 bp, Homo sapien
ccccccttagcaacgtaaagagaca

SEQ ID NO: 5601128 - DNA, 25 bp, Homo sapien
tggcacacaaatataaggcacgagt

SEQ ID NO: 5601129 - DNA, 25 bp, Homo sapien
tagcaacgtaaagagacataatcgc

SEQ ID NO: 5601130 - DNA, 25 bp, Homo sapien
tctgaagaaccctaccataacactt

SEQ ID NO: 5601131 - DNA, 25 bp, Homo sapien
aggcacgagtacttaatcctcaccc

SEQ ID NO: 5601132 - DNA, 25 bp, Homo sapien
ctcacgtacttaaacacactcagcc

SEQ ID NO: 5601133 - DNA, 25 bp, Homo sapien
agagacataatcgcatagggacact

SEQ ID NO: 5601134 - DNA, 25 bp, Homo sapien
tagggacactcacttacaaacacac

SEQ ID NO: 5601135 - DNA, 25 bp, Homo sapien
ttggccagctcctatgctgggtttc

SEQ ID NO: 5601136 - DNA, 25 bp, Homo sapien
aaaattaaaagctcttggccagctc

SEQ ID NO: 5601137 - DNA, 25 bp, Homo sapien
tcacagggtttcctgatacaggttt

SEQ ID NO: 5601138 - DNA, 25 bp, Homo sapien
acttatcaagcattacatctgtgtc

SEQ ID NO: 5601139 - DNA, 25 bp, Homo sapien
aaggttgcaactagaaaaggtctga

SEQ ID NO: 5601140 - DNA, 25 bp, Homo sapien
agtcaaacaattaaaaggttgcaac

SEQ ID NO: 5601141 - DNA, 25 bp, Homo sapien
aaaggtctgagaattccatgtatcc

SEQ ID NO: 5601142 - DNA, 25 bp, Homo sapien
tttgagaggacagaatataaagtca

SEQ ID NO: 5601143 - DNA, 25 bp, Homo sapien
ttgattaaggtagatattatgttac

SEQ ID NO: 5601144 - DNA, 25 bp, Homo sapien
ggctcctggcctaaactataaatat

SEQ ID NO: 5601145 - DNA, 25 bp, Homo sapien
ttcacaggggattcacttcacaggt

SEQ ID NO: 5601146 - DNA, 25 bp, Homo sapien
ataaaagagagcattaacacgtcac

SEQ ID NO: 5601147 - DNA, 25 bp, Homo sapien
aacacgtcacagtctaaggagaatt

SEQ ID NO: 5601148 - DNA, 25 bp, Homo sapien
agggggttccatgtgaatcgttttc

SEQ ID NO: 5601149 - DNA, 25 bp, Homo sapien
tgaaagtgtttcttgagatttgtac

SEQ ID NO: 5601150 - DNA, 25 bp, Homo sapien
tacactgtggcaaaacctgccagtt

SEQ ID NO: 5601151 - DNA, 25 bp, Homo sapien
aagagggatttgtatggaatgattt

SEQ ID NO: 5601152 - DNA, 25 bp, Homo sapien
gctcctaccaatacatgatcataac

SEQ ID NO: 5601153 - DNA, 25 bp, Homo sapien
gtacagaaaagcattatatagtatt

SEQ ID NO: 5601154 - DNA, 25 bp, Homo sapien
aaggtttaaataagtacatcaggat

SEQ ID NO: 5601155 - DNA, 25 bp, Homo sapien
aacctgccagttgaccttcagtatc

SEQ ID NO: 5601156 - DNA, 25 bp, Homo sapien
actaatttaagggggttccatgtga

SEQ ID NO: 5601157 - DNA, 25 bp, Homo sapien
atttcataggttagttgagcatcaa

SEQ ID NO: 5601158 - DNA, 25 bp, Homo sapien
agaatatgaaactgcggcccaagaa

SEQ ID NO: 5601159 - DNA, 25 bp, Homo sapien
aaaccaggcacagtaaagtacatgc

SEQ ID NO: 5601160 - DNA, 25 bp, Homo sapien
aggaaaaaggaacctgtgctgttgg

SEQ ID NO: 5601161 - DNA, 25 bp, Homo sapien
gtgtagaagagatggctgattttca

SEQ ID NO: 5601162 - DNA, 25 bp, Homo sapien
taataaaagagtaaagaatgcagca

SEQ ID NO: 5601163 - DNA, 25 bp, Homo sapien
tgctgttggaagagagttacctttg

SEQ ID NO: 5601164 - DNA, 25 bp, Homo sapien
gccctggagttcactctctgggctc

SEQ ID NO: 5601165 - DNA, 25 bp, Homo sapien
gggctccctgatgtgcgtactatcc

SEQ ID NO: 5601166 - DNA, 25 bp, Homo sapien
gcattggttgcctaggtgtcttcag

SEQ ID NO: 5601167 - DNA, 25 bp, Homo sapien
tgagttgtagagttatatatgtgtg

SEQ ID NO: 5601168 - DNA, 25 bp, Homo sapien
acctttgtcagggaagtgatgaaaa

SEQ ID NO: 5601169 - DNA, 25 bp, Homo sapien
ctgggaaagattacccacagccctg

SEQ ID NO: 5601170 - DNA, 25 bp, Homo sapien
acgtggccattagggcccacagatc

SEQ ID NO: 5601171 - DNA, 25 bp, Homo sapien
atcatctgagcctaaaatgctaatt

SEQ ID NO: 5601172 - DNA, 25 bp, Homo sapien
ccctccctccaacctaccagcatca

SEQ ID NO: 5601173 - DNA, 25 bp, Homo sapien
cccacagatccttccctgcagttgc

SEQ ID NO: 5601174 - DNA, 25 bp, Homo sapien
cctttgtagtgtgacgtggccatta

SEQ ID NO: 5601175 - DNA, 25 bp, Homo sapien
aataaatggaaggcccattacagtc

SEQ ID NO: 5601176 - DNA, 25 bp, Homo sapien
atcaaatgcaccagctatgctcctc

SEQ ID NO: 5601177 - DNA, 25 bp, Homo sapien
cctggccgccttcataactctgacc

SEQ ID NO: 5601178 - DNA, 25 bp, Homo sapien
tcccttgccgtctgttgccctgcac

SEQ ID NO: 5601179 - DNA, 25 bp, Homo sapien
tggaaggcccattacagtcactcag

SEQ ID NO: 5601180 - DNA, 25 bp, Homo sapien
ttcttcaggttccgaggaagccttc

SEQ ID NO: 5601181 - DNA, 25 bp, Homo sapien
tgtaagtgagattgagcatattttc

SEQ ID NO: 5601182 - DNA, 25 bp, Homo sapien
tattgccagttctcctgaagaggct

SEQ ID NO: 5601183 - DNA, 25 bp, Homo sapien
gccaacactgttagccgactttttc

SEQ ID NO: 5601184 - DNA, 25 bp, Homo sapien
tctgctctaaccagtggggtgtgga

SEQ ID NO: 5601185 - DNA, 25 bp, Homo sapien
acctgtgtgtttgttgcgatcaatt

SEQ ID NO: 5601186 - DNA, 25 bp, Homo sapien
catctttgtctgtctagttggtgac

SEQ ID NO: 5601187 - DNA, 25 bp, Homo sapien
attttcttggaatgaacatccttct

SEQ ID NO: 5601188 - DNA, 25 bp, Homo sapien
tccccgtgccgttgccaacactgtt

SEQ ID NO: 5601189 - DNA, 25 bp, Homo sapien
ggtgacacatgataatgtggtttgc

SEQ ID NO: 5601190 - DNA, 25 bp, Homo sapien
tttaattgtaagtgagattgagcat

SEQ ID NO: 5601191 - DNA, 25 bp, Homo sapien
cttatttccccgtgccgttgccaac

SEQ ID NO: 5601192 - DNA, 25 bp, Homo sapien
aattggatttagaagccgaggactt

SEQ ID NO: 5601193 - DNA, 25 bp, Homo sapien
taagctaatggggaaattggattta

SEQ ID NO: 5601194 - DNA, 25 bp, Homo sapien
ttgccagtatggtagtccccgctta

SEQ ID NO: 5601195 - DNA, 25 bp, Homo sapien
aggggctaaatagcaccttagggat

SEQ ID NO: 5601196 - DNA, 25 bp, Homo sapien
aatatggccagcagacaaccactga

SEQ ID NO: 5601197 - DNA, 25 bp, Homo sapien
atccatgcagaattggttccaagac

SEQ ID NO: 5601198 - DNA, 25 bp, Homo sapien
tggatacctgaaatgtgggtagtac

SEQ ID NO: 5601199 - DNA, 25 bp, Homo sapien
ggggcagatgacgcctaatccagaa

SEQ ID NO: 5601200 - DNA, 25 bp, Homo sapien
ttttacagtcaggaaatgaggtcca

SEQ ID NO: 5601201 - DNA, 25 bp, Homo sapien
ttagccatagtcagagattaacaac

SEQ ID NO: 5601202 - DNA, 25 bp, Homo sapien
agacaaccactgaaggggctaaata

SEQ ID NO: 5601203 - DNA, 25 bp, Homo sapien
atagcatattatctaaaggggtttg

SEQ ID NO: 5601204 - DNA, 25 bp, Homo sapien
ttggttggttgattgttagtgctga

SEQ ID NO: 5601205 - DNA, 25 bp, Homo sapien
tgattgttagtgctgaaatgaactt

SEQ ID NO: 5601206 - DNA, 25 bp, Homo sapien
ttttagtggtctggtatgtaccttc

SEQ ID NO: 5601207 - DNA, 25 bp, Homo sapien
ctatgcttcgcattcctcagtggaa

SEQ ID NO: 5601208 - DNA, 25 bp, Homo sapien
gaagtcagtaaatacagatctaagc

SEQ ID NO: 5601209 - DNA, 25 bp, Homo sapien
acatgtcaatatattgtgggcattt

SEQ ID NO: 5601210 - DNA, 25 bp, Homo sapien
gctttactaacttcctgaggtagac

SEQ ID NO: 5601211 - DNA, 25 bp, Homo sapien
agtaaatacagatctaagcttgctt

SEQ ID NO: 5601212 - DNA, 25 bp, Homo sapien
ttgtgggcatttctagaagtcagta

SEQ ID NO: 5601213 - DNA, 25 bp, Homo sapien
acttcctgaggtagacaaaagcaaa

SEQ ID NO: 5601214 - DNA, 25 bp, Homo sapien
ctgcaaaaccaaaggtacactttta

SEQ ID NO: 5601215 - DNA, 25 bp, Homo sapien
acacctgggacgtgtgacccaatgt

SEQ ID NO: 5601216 - DNA, 25 bp, Homo sapien
accaagagagaagctcatagaatat

SEQ ID NO: 5601217 - DNA, 25 bp, Homo sapien
cttggaaatgctaatgtcataaacc

SEQ ID NO: 5601218 - DNA, 25 bp, Homo sapien
gataaaatacagcaggttcccaaga

SEQ ID NO: 5601219 - DNA, 25 bp, Homo sapien
tacagcaggttcccaagataagaaa

SEQ ID NO: 5601220 - DNA, 25 bp, Homo sapien
tataggtaattctgtggcctgtgat

SEQ ID NO: 5601221 - DNA, 25 bp, Homo sapien
gtcataaaccacactgaggggtcac

SEQ ID NO: 5601222 - DNA, 25 bp, Homo sapien
aacaatttagtggaagagtgtctac

SEQ ID NO: 5601223 - DNA, 25 bp, Homo sapien
ttaattctaccagatgaagcctaag

SEQ ID NO: 5601224 - DNA, 25 bp, Homo sapien
gtgggaggtaaaatctgcaaaacca

SEQ ID NO: 5601225 - DNA, 25 bp, Homo sapien
tcacaataactcacaacaaaagctc

SEQ ID NO: 5601226 - DNA, 25 bp, Homo sapien
ataaattattgaatgattacccaga

SEQ ID NO: 5601227 - DNA, 25 bp, Homo sapien
gggagagaagacagctcacatatat

SEQ ID NO: 5601228 - DNA, 25 bp, Homo sapien
cagaacaaaaagtcccagagttatt

SEQ ID NO: 5601229 - DNA, 25 bp, Homo sapien
acaaaagctcacagagaataagtaa

SEQ ID NO: 5601230 - DNA, 25 bp, Homo sapien
aaatggtggaaatggattttgagct

SEQ ID NO: 5601231 - DNA, 25 bp, Homo sapien
tttgagctccctggacctatttgtc

SEQ ID NO: 5601232 - DNA, 25 bp, Homo sapien
agagttattgataataaatggtgga

SEQ ID NO: 5601233 - DNA, 25 bp, Homo sapien
atggataaatatacttgtttgtgta

SEQ ID NO: 5601234 - DNA, 25 bp, Homo sapien
tgattacccagatatgtatggataa

SEQ ID NO: 5601235 - DNA, 25 bp, Homo sapien
agctcacagagaataagtaaccaga

SEQ ID NO: 5601236 - DNA, 25 bp, Homo sapien
gcccgtgagacacagaatacatgtc

SEQ ID NO: 5601237 - DNA, 25 bp, Homo sapien
tgccacactctgaagtagagaaaga

SEQ ID NO: 5601238 - DNA, 25 bp, Homo sapien
ctcaaggaacacaggtcctttattt

SEQ ID NO: 5601239 - DNA, 25 bp, Homo sapien
tcctctcattcagcaggtggcccgt

SEQ ID NO: 5601240 - DNA, 25 bp, Homo sapien
agttgaagacccactcaaaaagctc

SEQ ID NO: 5601241 - DNA, 25 bp, Homo sapien
ccccaaacacatcattgccacactc

SEQ ID NO: 5601242 - DNA, 25 bp, Homo sapien
tttaactaagttgaagacccactca

SEQ ID NO: 5601243 - DNA, 25 bp, Homo sapien
aatttaggggccagttctcaaggaa

SEQ ID NO: 5601244 - DNA, 25 bp, Homo sapien
aagaaaatttaggggccagttctca

SEQ ID NO: 5601245 - DNA, 25 bp, Homo sapien
tggccaaagtccccaaacacatcat

SEQ ID NO: 5601246 - DNA, 25 bp, Homo sapien
ttgacctttcaactggagtcctctc

SEQ ID NO: 5601247 - DNA, 25 bp, Homo sapien
gtagcccatttggaaaggtgcccac

SEQ ID NO: 5601248 - DNA, 25 bp, Homo sapien
ttgaactgagagagtctgaaatgta

SEQ ID NO: 5601249 - DNA, 25 bp, Homo sapien
tgtactatgcaccagataaaaatac

SEQ ID NO: 5601250 - DNA, 25 bp, Homo sapien
gataactgagggtcttgttgccata

SEQ ID NO: 5601251 - DNA, 25 bp, Homo sapien
ttaaaggttactgtagaaggctgat

SEQ ID NO: 5601252 - DNA, 25 bp, Homo sapien
ggtgctggtatatgcccattggcct

SEQ ID NO: 5601253 - DNA, 25 bp, Homo sapien
gccataggaactagagggatttcca

SEQ ID NO: 5601254 - DNA, 25 bp, Homo sapien
gaaggctgatgggctgtagcccatt

SEQ ID NO: 5601255 - DNA, 25 bp, Homo sapien
aagtattcttcaaggggagtcattt

SEQ ID NO: 5601256 - DNA, 25 bp, Homo sapien
ggaaggaataatgtggcacaagtac

SEQ ID NO: 5601257 - DNA, 25 bp, Homo sapien
gaaatgtaaatgataactgagggtc

SEQ ID NO: 5601258 - DNA, 25 bp, Homo sapien
tgctagcgttacgaccatgggcaag

SEQ ID NO: 5601259 - DNA, 25 bp, Homo sapien
gaggggaatccagcctaagatacct

SEQ ID NO: 5601260 - DNA, 25 bp, Homo sapien
tgaagaccagaatgagtagtctacc

SEQ ID NO: 5601261 - DNA, 25 bp, Homo sapien
cctggcaagttacagtctggccctc

SEQ ID NO: 5601262 - DNA, 25 bp, Homo sapien
ctacagggttaaggcccaagccttc

SEQ ID NO: 5601263 - DNA, 25 bp, Homo sapien
gggatacagaactagtcagagctgc

SEQ ID NO: 5601264 - DNA, 25 bp, Homo sapien
aaggcaactgagtgctacagggtta

SEQ ID NO: 5601265 - DNA, 25 bp, Homo sapien
tctaaagtggagtatgttggatttt

SEQ ID NO: 5601266 - DNA, 25 bp, Homo sapien
caggaaagcttaggaaacaagtata

SEQ ID NO: 5601267 - DNA, 25 bp, Homo sapien
ccaggagaactgaacttgactctgc

SEQ ID NO: 5601268 - DNA, 25 bp, Homo sapien
actcaacgcaaatgctgaggtgctc

SEQ ID NO: 5601269 - DNA, 25 bp, Homo sapien
gtggttggatgtatgtgcttaaata

SEQ ID NO: 5601270 - DNA, 25 bp, Homo sapien
attgtggcatcagaccaatgactac

SEQ ID NO: 5601271 - DNA, 25 bp, Homo sapien
tgtgtgaagtgaaatgtgaatgttt

SEQ ID NO: 5601272 - DNA, 25 bp, Homo sapien
ggagtgagcagctgtcttcagatga

SEQ ID NO: 5601273 - DNA, 25 bp, Homo sapien
agcagtcagggatttgattgagtgt

SEQ ID NO: 5601274 - DNA, 25 bp, Homo sapien
tggaagcagaactctcacatggagc

SEQ ID NO: 5601275 - DNA, 25 bp, Homo sapien
gcagaaatagagcatcagccttagg

SEQ ID NO: 5601276 - DNA, 25 bp, Homo sapien
ccgctgttgaagacagtggttgatg

SEQ ID NO: 5601277 - DNA, 25 bp, Homo sapien
tcagaccacgtcatgctggaagcag

SEQ ID NO: 5601278 - DNA, 25 bp, Homo sapien
tgcagcatctgggaccctccgctgt

SEQ ID NO: 5601279 - DNA, 25 bp, Homo sapien
atgtgcttaaataggaagagaaagt

SEQ ID NO: 5601280 - DNA, 25 bp, Homo sapien
actttgcagatgccattgaggatct

SEQ ID NO: 5601281 - DNA, 25 bp, Homo sapien
gcagatgccattgaggatctggaga

SEQ ID NO: 5601282 - DNA, 25 bp, Homo sapien
aacaccattgcaagggtcttcaggt

SEQ ID NO: 5601283 - DNA, 25 bp, Homo sapien
ataggggatgaccctggatttctgg

SEQ ID NO: 5601284 - DNA, 25 bp, Homo sapien
tctactagctggaagaagctaagca

SEQ ID NO: 5601285 - DNA, 25 bp, Homo sapien
acagggactttcagaacagactaac

SEQ ID NO: 5601286 - DNA, 25 bp, Homo sapien
ccctggatttctgggtgtgcccaac

SEQ ID NO: 5601287 - DNA, 25 bp, Homo sapien
actttcagaacagactaacacaggg

SEQ ID NO: 5601288 - DNA, 25 bp, Homo sapien
attgcaagggtcttcaggttaggaa

SEQ ID NO: 5601289 - DNA, 25 bp, Homo sapien
gactgcgggcagcttctactagctg

SEQ ID NO: 5601290 - DNA, 25 bp, Homo sapien
tgtgcccaacaccattgcaagggtc

SEQ ID NO: 5601291 - DNA, 25 bp, Homo sapien
tgccagtcagaatagatgcagatgg

SEQ ID NO: 5601292 - DNA, 25 bp, Homo sapien
atttggtagaagtcacctgtaaaac

SEQ ID NO: 5601293 - DNA, 25 bp, Homo sapien
gaagtcacctgtaaaactgacagac

SEQ ID NO: 5601294 - DNA, 25 bp, Homo sapien
agtactgtaggtagtttttaactca

SEQ ID NO: 5601295 - DNA, 25 bp, Homo sapien
gtaaaactgacagacctgctctttt

SEQ ID NO: 5601296 - DNA, 25 bp, Homo sapien
tggaatcgccatattgtgtaagggg

SEQ ID NO: 5601297 - DNA, 25 bp, Homo sapien
ccatttctttaatggctgtggcaga

SEQ ID NO: 5601298 - DNA, 25 bp, Homo sapien
cagtcagaatagatgcagatggctg

SEQ ID NO: 5601299 - DNA, 25 bp, Homo sapien
cctgtaaaactgacagacctgctct

SEQ ID NO: 5601300 - DNA, 25 bp, Homo sapien
gtcagaatagatgcagatggctgtg

SEQ ID NO: 5601301 - DNA, 25 bp, Homo sapien
ggtcctggaatcgccatattgtgta

SEQ ID NO: 5601302 - DNA, 25 bp, Homo sapien
ttgatgtccaaattgccacgatgtc

SEQ ID NO: 5601303 - DNA, 25 bp, Homo sapien
ttactaattgtgcactttggccaac

SEQ ID NO: 5601304 - DNA, 25 bp, Homo sapien
gaatttggcagtgtttttgatgtcc

SEQ ID NO: 5601305 - DNA, 25 bp, Homo sapien
cacagtgttacgaagacaaatagtc

SEQ ID NO: 5601306 - DNA, 25 bp, Homo sapien
cctaacagccatgagtttacagctt

SEQ ID NO: 5601307 - DNA, 25 bp, Homo sapien
tttggccaacagtgtttcatacatc

SEQ ID NO: 5601308 - DNA, 25 bp, Homo sapien
tacaaagtaccttggaaacagaatc

SEQ ID NO: 5601309 - DNA, 25 bp, Homo sapien
gttacgaagacaaatagtcatcact

SEQ ID NO: 5601310 - DNA, 25 bp, Homo sapien
actcttccattttgagggggccagg

SEQ ID NO: 5601311 - DNA, 25 bp, Homo sapien
gtgtccccacagtgttacgaagaca

SEQ ID NO: 5601312 - DNA, 25 bp, Homo sapien
ctagtacacagaagttaagcttcct

SEQ ID NO: 5601313 - DNA, 25 bp, Homo sapien
cagatttgcacaagtaacaacccct

SEQ ID NO: 5601314 - DNA, 25 bp, Homo sapien
tcacagaactggtttttagatgacc

SEQ ID NO: 5601315 - DNA, 25 bp, Homo sapien
tgcacaagtaacaacccctctcata

SEQ ID NO: 5601316 - DNA, 25 bp, Homo sapien
gtccctgaagctgttaggatttttc

SEQ ID NO: 5601317 - DNA, 25 bp, Homo sapien
aatgttcataatggtccctgaagct

SEQ ID NO: 5601318 - DNA, 25 bp, Homo sapien
aaagctgaatattagtggtactgtc

SEQ ID NO: 5601319 - DNA, 25 bp, Homo sapien
agtggtactgtccatactgcaaaac

SEQ ID NO: 5601320 - DNA, 25 bp, Homo sapien
cccctctcataagaaaccttgcttc

SEQ ID NO: 5601321 - DNA, 25 bp, Homo sapien
gaggaaaagctgaatattagtggta

SEQ ID NO: 5601322 - DNA, 25 bp, Homo sapien
agatgacccacttatcaagaattcc

SEQ ID NO: 5601323 - DNA, 25 bp, Homo sapien
gccgcccaggatcacagaactggtt

SEQ ID NO: 5601324 - DNA, 25 bp, Homo sapien
gccccaaaccaacctaagatgcgac

SEQ ID NO: 5601325 - DNA, 25 bp, Homo sapien
gcccaaaaccagacagaatagcagg

SEQ ID NO: 5601326 - DNA, 25 bp, Homo sapien
aactgcagtaaggcccaaaaccaga

SEQ ID NO: 5601327 - DNA, 25 bp, Homo sapien
tgtaactaaactgaacaaagacaga

SEQ ID NO: 5601328 - DNA, 25 bp, Homo sapien
ccaaaaccacaactgcagtaaggcc

SEQ ID NO: 5601329 - DNA, 25 bp, Homo sapien
attcagcatgaatccagctggaaac

SEQ ID NO: 5601330 - DNA, 25 bp, Homo sapien
agctggaaactaatactcaactgat

SEQ ID NO: 5601331 - DNA, 25 bp, Homo sapien
ctggactttcagatatagcaatggt

SEQ ID NO: 5601332 - DNA, 25 bp, Homo sapien
actaaaactggctctcgacccgcag

SEQ ID NO: 5601333 - DNA, 25 bp, Homo sapien
ctaagatgcgaccagttgggatttc

SEQ ID NO: 5601334 - DNA, 25 bp, Homo sapien
tctcgacccgcagttgtgtcatgtt

SEQ ID NO: 5601335 - DNA, 25 bp, Homo sapien
tgcttctcgccttggcccatgggcc

SEQ ID NO: 5601336 - DNA, 25 bp, Homo sapien
ctggcaggactggttccacctttgc

SEQ ID NO: 5601337 - DNA, 25 bp, Homo sapien
gcgagggaaagcttccatctcaccc

SEQ ID NO: 5601338 - DNA, 25 bp, Homo sapien
cccatgggccatgcatttccacccc

SEQ ID NO: 5601339 - DNA, 25 bp, Homo sapien
caaagctatgtaaaatcaaagaccc

SEQ ID NO: 5601340 - DNA, 25 bp, Homo sapien
atcagcatccttgcaggccctggat

SEQ ID NO: 5601341 - DNA, 25 bp, Homo sapien
gccctcccggccaagctctgccaat

SEQ ID NO: 5601342 - DNA, 25 bp, Homo sapien
tagggcaggcagctattaaattttg

SEQ ID NO: 5601343 - DNA, 25 bp, Homo sapien
gcttgctctgaatccagggtgcatc

SEQ ID NO: 5601344 - DNA, 25 bp, Homo sapien
ccaatgaatccactggcaggactgg

SEQ ID NO: 5601345 - DNA, 25 bp, Homo sapien
acatcagatccgagaagaactgagg

SEQ ID NO: 5601346 - DNA, 25 bp, Homo sapien
tataaaagaaaacaagtctccagat

SEQ ID NO: 5601347 - DNA, 25 bp, Homo sapien
aagtcaatataatgccctgaggcac

SEQ ID NO: 5601348 - DNA, 25 bp, Homo sapien
aaagataaattggaattggtgtaat

SEQ ID NO: 5601349 - DNA, 25 bp, Homo sapien
ctgaggcacttctgaatcacaaagc

SEQ ID NO: 5601350 - DNA, 25 bp, Homo sapien
tatagcagtttaaacatggtcaaaa

SEQ ID NO: 5601351 - DNA, 25 bp, Homo sapien
gtctccagattgtctaggtgattga

SEQ ID NO: 5601352 - DNA, 25 bp, Homo sapien
aaaaaccaccataaagaatattagc

SEQ ID NO: 5601353 - DNA, 25 bp, Homo sapien
aggtgattgacactgtaaaaaccac

SEQ ID NO: 5601354 - DNA, 25 bp, Homo sapien
cactggaacactattaatggtaact

SEQ ID NO: 5601355 - DNA, 25 bp, Homo sapien
aaaaagcaaatactaataactactg

SEQ ID NO: 5601356 - DNA, 25 bp, Homo sapien
gtttccaagcagtcactggaacact

SEQ ID NO: 5601357 - DNA, 25 bp, Homo sapien
gcctgcaggaaacaacagccaggcg

SEQ ID NO: 5601358 - DNA, 25 bp, Homo sapien
gtcacatttgttcacggccagggag

SEQ ID NO: 5601359 - DNA, 25 bp, Homo sapien
cacacagcaaatccgtgatgaagtt

SEQ ID NO: 5601360 - DNA, 25 bp, Homo sapien
agcatagcttctgcgagatagaaac

SEQ ID NO: 5601361 - DNA, 25 bp, Homo sapien
cagcaaatccgtgatgaagttggga

SEQ ID NO: 5601362 - DNA, 25 bp, Homo sapien
ctcagcccaggactctatccctctt

SEQ ID NO: 5601363 - DNA, 25 bp, Homo sapien
ctcttcccgagtcctcggagttccc

SEQ ID NO: 5601364 - DNA, 25 bp, Homo sapien
tatccctcttcccgagtcctcggag

SEQ ID NO: 5601365 - DNA, 25 bp, Homo sapien
ttctgcgagatagaaacaaggttga

SEQ ID NO: 5601366 - DNA, 25 bp, Homo sapien
tgaagcatagcttctgcgagataga

SEQ ID NO: 5601367 - DNA, 25 bp, Homo sapien
agcttctgcgagatagaaacaaggt

SEQ ID NO: 5601368 - DNA, 25 bp, Homo sapien
tgtaccacattgatcattcgcaggc

SEQ ID NO: 5601369 - DNA, 25 bp, Homo sapien
cttgtaatatcagattggtaggatc

SEQ ID NO: 5601370 - DNA, 25 bp, Homo sapien
catttaataaagaacctaggaaaga

SEQ ID NO: 5601371 - DNA, 25 bp, Homo sapien
gggacaggagccctgtaccacattg

SEQ ID NO: 5601372 - DNA, 25 bp, Homo sapien
ggctgcctggcctctacttccctct

SEQ ID NO: 5601373 - DNA, 25 bp, Homo sapien
tccttcccctatgtgagctcttgta

SEQ ID NO: 5601374 - DNA, 25 bp, Homo sapien
cctaggaaagaacaacttgagaggt

SEQ ID NO: 5601375 - DNA, 25 bp, Homo sapien
cataactgttttggataaatctatc

SEQ ID NO: 5601376 - DNA, 25 bp, Homo sapien
tggtaggatctgaattcataactgt

SEQ ID NO: 5601377 - DNA, 25 bp, Homo sapien
acattgatcattcgcaggctgcctg

SEQ ID NO: 5601378 - DNA, 25 bp, Homo sapien
ctacttccctctgtgactgcccctc

SEQ ID NO: 5601379 - DNA, 25 bp, Homo sapien
gtcacgaagctttcttagcacctcc

SEQ ID NO: 5601380 - DNA, 25 bp, Homo sapien
tccttgaaggaagacgttcacagca

SEQ ID NO: 5601381 - DNA, 25 bp, Homo sapien
gagggtgcggcttccccctctcacc

SEQ ID NO: 5601382 - DNA, 25 bp, Homo sapien
tcactttcccaactggcggggagcg

SEQ ID NO: 5601383 - DNA, 25 bp, Homo sapien
agacgttcacagcatcgcacccacg

SEQ ID NO: 5601384 - DNA, 25 bp, Homo sapien
gtcactttcccaactggcgcgggcg

SEQ ID NO: 5601385 - DNA, 25 bp, Homo sapien
atcgcacccacgaagagggtgcggc

SEQ ID NO: 5601386 - DNA, 25 bp, Homo sapien
ggctccctccaggtccgctgccttc

SEQ ID NO: 5601387 - DNA, 25 bp, Homo sapien
cacctcctggagttcaaggaaaatc

SEQ ID NO: 5601388 - DNA, 25 bp, Homo sapien
cttccgacctctcaggtgcgtgtga

SEQ ID NO: 5601389 - DNA, 25 bp, Homo sapien
gccgcatctgccacagtcacgaagc

SEQ ID NO: 5601390 - DNA, 25 bp, Homo sapien
tggagccaactgcacagagtcaaga

SEQ ID NO: 5601391 - DNA, 25 bp, Homo sapien
ttgcaacctacaattacacgggttc

SEQ ID NO: 5601392 - DNA, 25 bp, Homo sapien
tgcacagagtcaagatgacaggaaa

SEQ ID NO: 5601393 - DNA, 25 bp, Homo sapien
gccaactgcacagagtcaagatgac

SEQ ID NO: 5601394 - DNA, 25 bp, Homo sapien
ggtagattgaggtcatctattgccc

SEQ ID NO: 5601395 - DNA, 25 bp, Homo sapien
gctctcaggctggtagattgaggtc

SEQ ID NO: 5601396 - DNA, 25 bp, Homo sapien
aaatagcacaaaatgatatccctgc

SEQ ID NO: 5601397 - DNA, 25 bp, Homo sapien
aagtaaaatagcacaaaatgatatc

SEQ ID NO: 5601398 - DNA, 25 bp, Homo sapien
aattacacgggttcaatctaaatgc

SEQ ID NO: 5601399 - DNA, 25 bp, Homo sapien
tgatatccctgcatgagctactatt

SEQ ID NO: 5601400 - DNA, 25 bp, Homo sapien
tctaaatgccccaaaacattatttc

SEQ ID NO: 5601401 - DNA, 25 bp, Homo sapien
agtcaccggaaggagtgtgataccg

SEQ ID NO: 5601402 - DNA, 25 bp, Homo sapien
cggtatcacactccttccggtgact

SEQ ID NO: 5601403 - DNA, 25 bp, Homo sapien
tgcgagcccatttgtgatgatgagg

SEQ ID NO: 5601404 - DNA, 25 bp, Homo sapien
agctgtccacagttgagtacgccat

SEQ ID NO: 5601405 - DNA, 25 bp, Homo sapien
atacctggaacagtcagatgccatc

SEQ ID NO: 5601406 - DNA, 25 bp, Homo sapien
ttcaaatctgagtgccggttgacaa

SEQ ID NO: 5601407 - DNA, 25 bp, Homo sapien
agtgtagcttgtaatgcgagcccat

SEQ ID NO: 5601408 - DNA, 25 bp, Homo sapien
gagtgccggttgacaaatgctgata

SEQ ID NO: 5601409 - DNA, 25 bp, Homo sapien
ttgcagaaactcattgaaaccttac

SEQ ID NO: 5601410 - DNA, 25 bp, Homo sapien
tgaagatttgtgtcagctgctctgc

SEQ ID NO: 5601411 - DNA, 25 bp, Homo sapien
cagctgctctgcatgaagagaactt

SEQ ID NO: 5601412 - DNA, 25 bp, Homo sapien
gagggcacgctatgccagactttca

SEQ ID NO: 5601413 - DNA, 25 bp, Homo sapien
gatagttgtcaaataagtgtagctt

SEQ ID NO: 5601414 - DNA, 25 bp, Homo sapien
actggtataggcacacctcagatcc

SEQ ID NO: 5601415 - DNA, 25 bp, Homo sapien
acctcagatccagacgcagacagag

SEQ ID NO: 5601416 - DNA, 25 bp, Homo sapien
gaggcagtagtgtccttagacccca

SEQ ID NO: 5601417 - DNA, 25 bp, Homo sapien
gggtgaaaaatctccaggccagcac

SEQ ID NO: 5601418 - DNA, 25 bp, Homo sapien
aggaccctggaattccctgactggt

SEQ ID NO: 5601419 - DNA, 25 bp, Homo sapien
tagaaagtgtgaacagaacttggtt

SEQ ID NO: 5601420 - DNA, 25 bp, Homo sapien
cacttcttggccctgagctagcttc

SEQ ID NO: 5601421 - DNA, 25 bp, Homo sapien
cccaatgaaggacccaacaactggt

SEQ ID NO: 5601422 - DNA, 25 bp, Homo sapien
agcaagaaaaaccgtgttctaggcc

SEQ ID NO: 5601423 - DNA, 25 bp, Homo sapien
attttagaggacaccaacctgactc

SEQ ID NO: 5601424 - DNA, 25 bp, Homo sapien
ggctgcggtgttcacacacaggtac

SEQ ID NO: 5601425 - DNA, 25 bp, Homo sapien
ggagagcacaaagagtctgaatctc

SEQ ID NO: 5601426 - DNA, 25 bp, Homo sapien
agttatgtgaaagcaacagttgctt

SEQ ID NO: 5601427 - DNA, 25 bp, Homo sapien
tcatctgagaattcaggttgtcttt

SEQ ID NO: 5601428 - DNA, 25 bp, Homo sapien
tgagaaacactgccttagaaacctc

SEQ ID NO: 5601429 - DNA, 25 bp, Homo sapien
ttcaggttgtcttttgaaacgtgac

SEQ ID NO: 5601430 - DNA, 25 bp, Homo sapien
ttcaacctgtgccttgctgaaggag

SEQ ID NO: 5601431 - DNA, 25 bp, Homo sapien
ttcctgagttcaacctgtgccttgc

SEQ ID NO: 5601432 - DNA, 25 bp, Homo sapien
agaaacctccaagttatgtgaaagc

SEQ ID NO: 5601433 - DNA, 25 bp, Homo sapien
ttgaaacgtgacatcttgacattga

SEQ ID NO: 5601434 - DNA, 25 bp, Homo sapien
agcaacagttgcttgggttcctcat

SEQ ID NO: 5601435 - DNA, 25 bp, Homo sapien
agtgaaaattaatcttgcattgaaa

SEQ ID NO: 5601436 - DNA, 25 bp, Homo sapien
ctgtgtggcgattacagaagcatgt

SEQ ID NO: 5601437 - DNA, 25 bp, Homo sapien
gtctagacatcacataaagaaatat

SEQ ID NO: 5601438 - DNA, 25 bp, Homo sapien
ttcagtgaaccataatcatgccacc

SEQ ID NO: 5601439 - DNA, 25 bp, Homo sapien
acagaagcatgttcaccttgtagta

SEQ ID NO: 5601440 - DNA, 25 bp, Homo sapien
atttcctgacctgtgtggcgattac

SEQ ID NO: 5601441 - DNA, 25 bp, Homo sapien
aaatctatggtgttttaaatcagga

SEQ ID NO: 5601442 - DNA, 25 bp, Homo sapien
gttacctctggggaatatgaagata

SEQ ID NO: 5601443 - DNA, 25 bp, Homo sapien
aatatgaagatagtgtctagacatc

SEQ ID NO: 5601444 - DNA, 25 bp, Homo sapien
tatgaacagcttcaacaagcctgct

SEQ ID NO: 5601445 - DNA, 25 bp, Homo sapien
caccttgtagtaatccctgttccac

SEQ ID NO: 5601446 - DNA, 25 bp, Homo sapien
ggacagtagttacctctggggaata

SEQ ID NO: 5601447 - DNA, 25 bp, Homo sapien
tcataaatgataataagtcctactt

SEQ ID NO: 5601448 - DNA, 25 bp, Homo sapien
attcaaccctgacaacaaccctatg

SEQ ID NO: 5601449 - DNA, 25 bp, Homo sapien
tatgaccagtttaacatgtaaggtt

SEQ ID NO: 5601450 - DNA, 25 bp, Homo sapien
caaactccggcagtttgacttctga

SEQ ID NO: 5601451 - DNA, 25 bp, Homo sapien
agtctttgaccacaggatggatggg

SEQ ID NO: 5601452 - DNA, 25 bp, Homo sapien
gtttaagcaacattctgaaaaccag

SEQ ID NO: 5601453 - DNA, 25 bp, Homo sapien
aacaagtacaagctttggttttgac

SEQ ID NO: 5601454 - DNA, 25 bp, Homo sapien
caaggaaacaaaggtagaatgttta

SEQ ID NO: 5601455 - DNA, 25 bp, Homo sapien
tattagctcattcaaccctgacaac

SEQ ID NO: 5601456 - DNA, 25 bp, Homo sapien
acaaaggtagaatgtttaagcaaca

SEQ ID NO: 5601457 - DNA, 25 bp, Homo sapien
caaccctatgaaataagtactatta

SEQ ID NO: 5601458 - DNA, 25 bp, Homo sapien
tctccctcctgccggagccactgcg

SEQ ID NO: 5601459 - DNA, 25 bp, Homo sapien
ctcccggcgtttccaagcctccctc

SEQ ID NO: 5601460 - DNA, 25 bp, Homo sapien
atcgattcgcttccccggcgtcggc

SEQ ID NO: 5601461 - DNA, 25 bp, Homo sapien
cgtttcctagtccagtgtggccgct

SEQ ID NO: 5601462 - DNA, 25 bp, Homo sapien
cgggcgtccagtaacgcagtatcga

SEQ ID NO: 5601463 - DNA, 25 bp, Homo sapien
tcggcctcaccgctactcccggcgt

SEQ ID NO: 5601464 - DNA, 25 bp, Homo sapien
tcgccttcggccggattattgtgtc

SEQ ID NO: 5601465 - DNA, 25 bp, Homo sapien
gccgtcttggcgctcgcccgactct

SEQ ID NO: 5601466 - DNA, 25 bp, Homo sapien
cccgtcttaacgatttggcgtctcc

SEQ ID NO: 5601467 - DNA, 25 bp, Homo sapien
tggcgtctccctcgaccaccacctc

SEQ ID NO: 5601468 - DNA, 25 bp, Homo sapien
gcccggcgcctcgtttcctagtcca

SEQ ID NO: 5601469 - DNA, 25 bp, Homo sapien
agctctgtctcacaagaggttggga

SEQ ID NO: 5601470 - DNA, 25 bp, Homo sapien
agtgtggtggccattcacagctctg

SEQ ID NO: 5601471 - DNA, 25 bp, Homo sapien
cagactcttgtagctcggaaggttc

SEQ ID NO: 5601472 - DNA, 25 bp, Homo sapien
atgtaacaagctaagactgtgtcaa

SEQ ID NO: 5601473 - DNA, 25 bp, Homo sapien
cctgggtgtgtccttctagtgtgtt

SEQ ID NO: 5601474 - DNA, 25 bp, Homo sapien
agtgaagttgatatccctgggtgtg

SEQ ID NO: 5601475 - DNA, 25 bp, Homo sapien
tagcctcatggcctcaaagtgtggt

SEQ ID NO: 5601476 - DNA, 25 bp, Homo sapien
actgtgtacaaggactcaagtatac

SEQ ID NO: 5601477 - DNA, 25 bp, Homo sapien
attagggtccttaaatgtaacaagc

SEQ ID NO: 5601478 - DNA, 25 bp, Homo sapien
tagtcctgtgtattgattagggtcc

SEQ ID NO: 5601479 - DNA, 25 bp, Homo sapien
gaagctaagggctcaacagactctt

SEQ ID NO: 5601480 - DNA, 25 bp, Homo sapien
ggtcttccagctccgagctgctggc

SEQ ID NO: 5601481 - DNA, 25 bp, Homo sapien
cgataccctaataggacatgggctc

SEQ ID NO: 5601482 - DNA, 25 bp, Homo sapien
ttgccagataatcggaggcaaagcc

SEQ ID NO: 5601483 - DNA, 25 bp, Homo sapien
tggggctttctgctgacctgccgag

SEQ ID NO: 5601484 - DNA, 25 bp, Homo sapien
aatagacttaacatttggaggcatg

SEQ ID NO: 5601485 - DNA, 25 bp, Homo sapien
catctcactgaggatgctggctgta

SEQ ID NO: 5601486 - DNA, 25 bp, Homo sapien
gggcactggctcggtcttccagctc

SEQ ID NO: 5601487 - DNA, 25 bp, Homo sapien
cggaggcaaagccgataccctaata

SEQ ID NO: 5601488 - DNA, 25 bp, Homo sapien
gacctgccgagtaattgccattttc

SEQ ID NO: 5601489 - DNA, 25 bp, Homo sapien
tttggaggcatgaatacgtatttgt

SEQ ID NO: 5601490 - DNA, 25 bp, Homo sapien
gtttttgtaaaccaatgggatgtga

SEQ ID NO: 5601491 - DNA, 25 bp, Homo sapien
gcggctctgggaaattaatcaatcc

SEQ ID NO: 5601492 - DNA, 25 bp, Homo sapien
ttgtggtaccttattatggcggctc

SEQ ID NO: 5601493 - DNA, 25 bp, Homo sapien
aatatgtattgcgtggctgcaggca

SEQ ID NO: 5601494 - DNA, 25 bp, Homo sapien
agtcgagtagcttttcttggatcac

SEQ ID NO: 5601495 - DNA, 25 bp, Homo sapien
gccaatgctgattttgcaagcttgc

SEQ ID NO: 5601496 - DNA, 25 bp, Homo sapien
cttggatcacacagctggccagtag

SEQ ID NO: 5601497 - DNA, 25 bp, Homo sapien
cttgacagcatcataggcagatatt

SEQ ID NO: 5601498 - DNA, 25 bp, Homo sapien
cgcaacaactccatgaagtaggact

SEQ ID NO: 5601499 - DNA, 25 bp, Homo sapien
acgtttccaacggctccacaacatt

SEQ ID NO: 5601500 - DNA, 25 bp, Homo sapien
taggagaggtactaatggattcctc

SEQ ID NO: 5601501 - DNA, 25 bp, Homo sapien
atcacaccaatatccacacagtaac

SEQ ID NO: 5601502 - DNA, 25 bp, Homo sapien
taattaaatgtttgttgaaatacgt

SEQ ID NO: 5601503 - DNA, 25 bp, Homo sapien
acgtatttcaacaaacatttaatta

SEQ ID NO: 5601504 - DNA, 25 bp, Homo sapien
tgatgggcagtgataattcaacacc

SEQ ID NO: 5601505 - DNA, 25 bp, Homo sapien
ttgcaactgaccttgtggtgatgtg

SEQ ID NO: 5601506 - DNA, 25 bp, Homo sapien
ttgtggttcaggattataggaagat

SEQ ID NO: 5601507 - DNA, 25 bp, Homo sapien
gtgataccgggcctttgcaactgac

SEQ ID NO: 5601508 - DNA, 25 bp, Homo sapien
tgtgagcagtcagcctctcgagatg

SEQ ID NO: 5601509 - DNA, 25 bp, Homo sapien
atctttggtgtcccagagtaagggg

SEQ ID NO: 5601510 - DNA, 25 bp, Homo sapien
accgtgtcctgatgggcagtgataa

SEQ ID NO: 5601511 - DNA, 25 bp, Homo sapien
aggattataggaagattgtgtagaa

SEQ ID NO: 5601512 - DNA, 25 bp, Homo sapien
cagcctctcgagatggcctccctgg

SEQ ID NO: 5601513 - DNA, 25 bp, Homo sapien
aaggggaaataaccgtgtcctgatg

SEQ ID NO: 5601514 - DNA, 25 bp, Homo sapien
gtatttaagcctgtgataccgggcc

SEQ ID NO: 5601515 - DNA, 25 bp, Homo sapien
gcgaacaaagaggcaacctcccaga

SEQ ID NO: 5601516 - DNA, 25 bp, Homo sapien
ccagattgcatctttgaaacacagg

SEQ ID NO: 5601517 - DNA, 25 bp, Homo sapien
tggactgctgaattatgaagtattt

SEQ ID NO: 5601518 - DNA, 25 bp, Homo sapien
acccagtagtagaacatcactctgc

SEQ ID NO: 5601519 - DNA, 25 bp, Homo sapien
gccattccccagattgcatctttga

SEQ ID NO: 5601520 - DNA, 25 bp, Homo sapien
tttaatatcctaccagctgctcttc

SEQ ID NO: 5601521 - DNA, 25 bp, Homo sapien
tgaagtatttcagacccagtagtag

SEQ ID NO: 5601522 - DNA, 25 bp, Homo sapien
gaacaaagaggcaacctcccagata

SEQ ID NO: 5601523 - DNA, 25 bp, Homo sapien
tctgccactcactcctttatctcct

SEQ ID NO: 5601524 - DNA, 25 bp, Homo sapien
gtagtagaacatcactctgccactc

SEQ ID NO: 5601525 - DNA, 25 bp, Homo sapien
taaccttcagcgaacaaagaggcaa

SEQ ID NO: 5601526 - DNA, 25 bp, Homo sapien
gacaggaaacaattctaggcagtcc

SEQ ID NO: 5601527 - DNA, 25 bp, Homo sapien
gtgtcccagaaaataagactgggtg

SEQ ID NO: 5601528 - DNA, 25 bp, Homo sapien
aaataaactctaacatctgggatgc

SEQ ID NO: 5601529 - DNA, 25 bp, Homo sapien
ttactaccccgatgacaggaaacaa

SEQ ID NO: 5601530 - DNA, 25 bp, Homo sapien
ggagctgacagcttaaacacacttc

SEQ ID NO: 5601531 - DNA, 25 bp, Homo sapien
atgcagtggtagctgacaacctttt

SEQ ID NO: 5601532 - DNA, 25 bp, Homo sapien
tctaacatctgggatgcagtggtag

SEQ ID NO: 5601533 - DNA, 25 bp, Homo sapien
tcctgagaacacatttactaccccg

SEQ ID NO: 5601534 - DNA, 25 bp, Homo sapien
ttaagatacacgtgctcctgagaac

SEQ ID NO: 5601535 - DNA, 25 bp, Homo sapien
agaaaataagactgggtgtttacca

SEQ ID NO: 5601536 - DNA, 25 bp, Homo sapien
aagggtttttggagctgacagctta

SEQ ID NO: 5601537 - DNA, 25 bp, Homo sapien
aatgtcagttgaccaatctgctcat

SEQ ID NO: 5601538 - DNA, 25 bp, Homo sapien
aagacgcacttcaaagatctagtcc

SEQ ID NO: 5601539 - DNA, 25 bp, Homo sapien
taaaaccaacagctcacactaaagt

SEQ ID NO: 5601540 - DNA, 25 bp, Homo sapien
aagtgcatagaataatatatgactc

SEQ ID NO: 5601541 - DNA, 25 bp, Homo sapien
ctctgctctcttcaggaaaggagga

SEQ ID NO: 5601542 - DNA, 25 bp, Homo sapien
ctagtccagaaaggttagtaaaaga

SEQ ID NO: 5601543 - DNA, 25 bp, Homo sapien
ctatactttcccaggagaaaattca

SEQ ID NO: 5601544 - DNA, 25 bp, Homo sapien
taaaatgaacttacaaaagtgcata

SEQ ID NO: 5601545 - DNA, 25 bp, Homo sapien
tgtatgaccacagttaaagcagcac

SEQ ID NO: 5601546 - DNA, 25 bp, Homo sapien
gaaagctaagacgcacttcaaagat

SEQ ID NO: 5601547 - DNA, 25 bp, Homo sapien
ttattccaagcaacacatgtattac

SEQ ID NO: 5601548 - DNA, 25 bp, Homo sapien
ctcatcccgaggtctaagggtggta

SEQ ID NO: 5601549 - DNA, 25 bp, Homo sapien
ccacttctagcaagtaagcagggag

SEQ ID NO: 5601550 - DNA, 25 bp, Homo sapien
tctccgtagtcttcgggctggagcc

SEQ ID NO: 5601551 - DNA, 25 bp, Homo sapien
aatgcataggaactagagaagccta

SEQ ID NO: 5601552 - DNA, 25 bp, Homo sapien
cggctctgccttactcgcggagttt

SEQ ID NO: 5601553 - DNA, 25 bp, Homo sapien
tgtataatgggtgtgaactcatccc

SEQ ID NO: 5601554 - DNA, 25 bp, Homo sapien
gagaagcctagatggatccggctct

SEQ ID NO: 5601555 - DNA, 25 bp, Homo sapien
tgtttcctgctgcgtgaagtagggg

SEQ ID NO: 5601556 - DNA, 25 bp, Homo sapien
gcagggagcctggctatcttgctgc

SEQ ID NO: 5601557 - DNA, 25 bp, Homo sapien
ggggtgttaagctacaaggtgttga

SEQ ID NO: 5601558 - DNA, 25 bp, Homo sapien
cggagtttgggcaagcctgtttcct

SEQ ID NO: 5601559 - DNA, 25 bp, Homo sapien
taccaatcaatagcagtggcaatgc

SEQ ID NO: 5601560 - DNA, 25 bp, Homo sapien
ttttgaaactaagtcagcattatac

SEQ ID NO: 5601561 - DNA, 25 bp, Homo sapien
taagttcttagtagaatgatgtgtt

SEQ ID NO: 5601562 - DNA, 25 bp, Homo sapien
tgcagctaatggtccatgtgttaca

SEQ ID NO: 5601563 - DNA, 25 bp, Homo sapien
taactagtacaacttggtttctgtc

SEQ ID NO: 5601564 - DNA, 25 bp, Homo sapien
cctttgtgaaaattctcccaacctg

SEQ ID NO: 5601565 - DNA, 25 bp, Homo sapien
tcccaaagctgtatatcaaagatat

SEQ ID NO: 5601566 - DNA, 25 bp, Homo sapien
tctgtctgttggcattttggtaatt

SEQ ID NO: 5601567 - DNA, 25 bp, Homo sapien
tcccaacctgtcccaattctcaccc

SEQ ID NO: 5601568 - DNA, 25 bp, Homo sapien
taagtcagcattatacaccagtaac

SEQ ID NO: 5601569 - DNA, 25 bp, Homo sapien
gaatgatgtgtttaaggtctgaaat

SEQ ID NO: 5601570 - DNA, 25 bp, Homo sapien
tctccagaacagatgctccccattc

SEQ ID NO: 5601571 - DNA, 25 bp, Homo sapien
acaagtaagtcagagtgcatgcatt

SEQ ID NO: 5601572 - DNA, 25 bp, Homo sapien
gccataaatcagtgcccgaagggac

SEQ ID NO: 5601573 - DNA, 25 bp, Homo sapien
gtcagggctcaagctcaggcccttc

SEQ ID NO: 5601574 - DNA, 25 bp, Homo sapien
atgtgcataccaggtgtgaggctat

SEQ ID NO: 5601575 - DNA, 25 bp, Homo sapien
aatgattggtgccttcaagaggaag

SEQ ID NO: 5601576 - DNA, 25 bp, Homo sapien
acacttggcctggatgtgcatacca

SEQ ID NO: 5601577 - DNA, 25 bp, Homo sapien
gaatgggggccattcccactgcata

SEQ ID NO: 5601578 - DNA, 25 bp, Homo sapien
ttccaggagagatcaccacaagtaa

SEQ ID NO: 5601579 - DNA, 25 bp, Homo sapien
caagaggaagatccctgaatcatgc

SEQ ID NO: 5601580 - DNA, 25 bp, Homo sapien
tgcactggaatgaagatggtgatga

SEQ ID NO: 5601581 - DNA, 25 bp, Homo sapien
ctcattcactcatgtggctggcact

SEQ ID NO: 5601582 - DNA, 25 bp, Homo sapien
cagaggaagctgtttcactggttac

SEQ ID NO: 5601583 - DNA, 25 bp, Homo sapien
ggggagggctcatcttgctccactc

SEQ ID NO: 5601584 - DNA, 25 bp, Homo sapien
tggaaaatacaactggcagaatgac

SEQ ID NO: 5601585 - DNA, 25 bp, Homo sapien
ggccaggagttgtctgaacctcatt

SEQ ID NO: 5601586 - DNA, 25 bp, Homo sapien
aattggcaatttcggtgaggcttag

SEQ ID NO: 5601587 - DNA, 25 bp, Homo sapien
ggtggcaccaatgattggaaaatac

SEQ ID NO: 5601588 - DNA, 25 bp, Homo sapien
gatgggatatattggtggcaccaat

SEQ ID NO: 5601589 - DNA, 25 bp, Homo sapien
actccattttggtcagctggggcgg

SEQ ID NO: 5601590 - DNA, 25 bp, Homo sapien
aagagtatatgggatgggatatatt

SEQ ID NO: 5601591 - DNA, 25 bp, Homo sapien
acatggcctgtcctgtggctgcatg

SEQ ID NO: 5601592 - DNA, 25 bp, Homo sapien
tatttctgagccctgagcaaacaca

SEQ ID NO: 5601593 - DNA, 25 bp, Homo sapien
ggtcccagaagtggtcatcaacctg

SEQ ID NO: 5601594 - DNA, 25 bp, Homo sapien
gcagctgtaaacccaccaccaagac

SEQ ID NO: 5601595 - DNA, 25 bp, Homo sapien
ggcctctacagtgtaggaagggcac

SEQ ID NO: 5601596 - DNA, 25 bp, Homo sapien
gatgacataaaggctgatggcattc

SEQ ID NO: 5601597 - DNA, 25 bp, Homo sapien
ggaaagccaagagtatatcatagac

SEQ ID NO: 5601598 - DNA, 25 bp, Homo sapien
ctttcagtgagaggtgtaatgaagg

SEQ ID NO: 5601599 - DNA, 25 bp, Homo sapien
acgggagggaatgttcccatagact

SEQ ID NO: 5601600 - DNA, 25 bp, Homo sapien
agtggtcatcaacctgtaggcctct

SEQ ID NO: 5601601 - DNA, 25 bp, Homo sapien
ccacacctaacaagatgggcagctg

SEQ ID NO: 5601602 - DNA, 25 bp, Homo sapien
gctggctgctgtcacttacacaact

SEQ ID NO: 5601603 - DNA, 25 bp, Homo sapien
agtgtgtctttcagcaggtggaaca

SEQ ID NO: 5601604 - DNA, 25 bp, Homo sapien
tgttccacctgctgaaagacacact

SEQ ID NO: 5601605 - DNA, 25 bp, Homo sapien
caagagtgccttctaggaatgtttg

SEQ ID NO: 5601606 - DNA, 25 bp, Homo sapien
tgaagctactaaaaaatttgactgt

SEQ ID NO: 5601607 - DNA, 25 bp, Homo sapien
tacctcaagagtgccttctaggaat

SEQ ID NO: 5601608 - DNA, 25 bp, Homo sapien
gtttggacatttgttcaaaaacatg

SEQ ID NO: 5601609 - DNA, 25 bp, Homo sapien
atgtaaatcctttttgtggccctag

SEQ ID NO: 5601610 - DNA, 25 bp, Homo sapien
ctttatgactgctgacctaagtgcc

SEQ ID NO: 5601611 - DNA, 25 bp, Homo sapien
ttaactgatttacctcaagagtgcc

SEQ ID NO: 5601612 - DNA, 25 bp, Homo sapien
aacatgactaccataatccaaattt

SEQ ID NO: 5601613 - DNA, 25 bp, Homo sapien
gtgccttctaggaatgtttggacat

SEQ ID NO: 5601614 - DNA, 25 bp, Homo sapien
tttgactgttaagacatgtaaatcc

SEQ ID NO: 5601615 - DNA, 25 bp, Homo sapien
ttgtggccctagtgcaagtcacttt

SEQ ID NO: 5601616 - DNA, 25 bp, Homo sapien
tcaaatgcagatagtttggccccag

SEQ ID NO: 5601617 - DNA, 25 bp, Homo sapien
ttgaataacaggaactagcttgctt

SEQ ID NO: 5601618 - DNA, 25 bp, Homo sapien
gcaaccactggattaagcaatactc

SEQ ID NO: 5601619 - DNA, 25 bp, Homo sapien
ttgaagaatcaggtgaatttgtttc

SEQ ID NO: 5601620 - DNA, 25 bp, Homo sapien
gtttggccccagcttccatgctctc

SEQ ID NO: 5601621 - DNA, 25 bp, Homo sapien
tcttaaccaacgactgcaaccactg

SEQ ID NO: 5601622 - DNA, 25 bp, Homo sapien
cacagatgtgataattacttgccca

SEQ ID NO: 5601623 - DNA, 25 bp, Homo sapien
ccaagaaaacaagagctacagtaga

SEQ ID NO: 5601624 - DNA, 25 bp, Homo sapien
caatgaccctgcagagtgcccattt

SEQ ID NO: 5601625 - DNA, 25 bp, Homo sapien
tacttgcccaagtcacaaagctaat

SEQ ID NO: 5601626 - DNA, 25 bp, Homo sapien
atattgtgggtgacaggttattact

SEQ ID NO: 5601627 - DNA, 25 bp, Homo sapien
ttttaaactgttacgcaggtcaatc

SEQ ID NO: 5601628 - DNA, 25 bp, Homo sapien
ctcaaatatgagcacttagatcctt

SEQ ID NO: 5601629 - DNA, 25 bp, Homo sapien
cagtactaagtaaggtgtgattgtt

SEQ ID NO: 5601630 - DNA, 25 bp, Homo sapien
attcatgagggtcactagatcagac

SEQ ID NO: 5601631 - DNA, 25 bp, Homo sapien
acgcaggtcaatcatgtaagtaaac

SEQ ID NO: 5601632 - DNA, 25 bp, Homo sapien
ctgtaaagggaaaatcccagtacta

SEQ ID NO: 5601633 - DNA, 25 bp, Homo sapien
aagtaaacatcaactgtaaagggaa

SEQ ID NO: 5601634 - DNA, 25 bp, Homo sapien
caattgttcaatatccacagccatt

SEQ ID NO: 5601635 - DNA, 25 bp, Homo sapien
tgacctcgtggtcctacctgtttta

SEQ ID NO: 5601636 - DNA, 25 bp, Homo sapien
atgagggtcactagatcagactctc

SEQ ID NO: 5601637 - DNA, 25 bp, Homo sapien
ggtgtgattgttattcatgagggtc

SEQ ID NO: 5601638 - DNA, 25 bp, Homo sapien
tacaacatgaaccttgttttaaatg

SEQ ID NO: 5601639 - DNA, 25 bp, Homo sapien
catttaaaacaaggttcatgttgta

SEQ ID NO: 5601640 - DNA, 25 bp, Homo sapien
tgtgaatgccttttagagtggtaaa

SEQ ID NO: 5601641 - DNA, 25 bp, Homo sapien
atcggcctttgctcataaagccttc

SEQ ID NO: 5601642 - DNA, 25 bp, Homo sapien
cttcgaaataaaatgcaggtactga

SEQ ID NO: 5601643 - DNA, 25 bp, Homo sapien
gcacaagcaaaaaggccacctgtca

SEQ ID NO: 5601644 - DNA, 25 bp, Homo sapien
tgctcataaagccttctaagaactc

SEQ ID NO: 5601645 - DNA, 25 bp, Homo sapien
acggcagttttgaatcggcctttgc

SEQ ID NO: 5601646 - DNA, 25 bp, Homo sapien
ctaagaactctgaactcagaatgtc

SEQ ID NO: 5601647 - DNA, 25 bp, Homo sapien
caggtactgaaccatactttttctc

SEQ ID NO: 5601648 - DNA, 25 bp, Homo sapien
atcacatgatgggttggtgtaagga

SEQ ID NO: 5601649 - DNA, 25 bp, Homo sapien
aaaaggccacctgtcatcacatgat

SEQ ID NO: 5601650 - DNA, 25 bp, Homo sapien
tgtaaggaaacggcagttttgaatc

SEQ ID NO: 5601651 - DNA, 25 bp, Homo sapien
tgccatgtaagacacctgctcctgc

SEQ ID NO: 5601652 - DNA, 25 bp, Homo sapien
taggtagatttcttactctgcctgg

SEQ ID NO: 5601653 - DNA, 25 bp, Homo sapien
tgcctggttcaaaaggctcatgggc

SEQ ID NO: 5601654 - DNA, 25 bp, Homo sapien
gatctggttgatttaaaaagtgtgt

SEQ ID NO: 5601655 - DNA, 25 bp, Homo sapien
cctgcttctgccatgtaagacacct

SEQ ID NO: 5601656 - DNA, 25 bp, Homo sapien
aaggtgaggttactccaacaagaaa

SEQ ID NO: 5601657 - DNA, 25 bp, Homo sapien
aaaaagtgtgtaacatcttccccac

SEQ ID NO: 5601658 - DNA, 25 bp, Homo sapien
ggtactgtatagtgtgagttctcac

SEQ ID NO: 5601659 - DNA, 25 bp, Homo sapien
aaaggctcatgggcacatgggtttt

SEQ ID NO: 5601660 - DNA, 25 bp, Homo sapien
tggcaaaaaggtgaggttactccaa

SEQ ID NO: 5601661 - DNA, 25 bp, Homo sapien
gggcagagttgcaccatcccccctt

SEQ ID NO: 5601662 - DNA, 25 bp, Homo sapien
aagtgaagcagcgttggctaaaatg

SEQ ID NO: 5601663 - DNA, 25 bp, Homo sapien
agaaagcctaagcctctgaggatgt

SEQ ID NO: 5601664 - DNA, 25 bp, Homo sapien
agtaaaggaggatgctgttcattcc

SEQ ID NO: 5601665 - DNA, 25 bp, Homo sapien
taacttgtagaatgctgatgcccag

SEQ ID NO: 5601666 - DNA, 25 bp, Homo sapien
tgatgcccagccatgctgatactct

SEQ ID NO: 5601667 - DNA, 25 bp, Homo sapien
agggatgcacagtgacttggtttcc

SEQ ID NO: 5601668 - DNA, 25 bp, Homo sapien
tgctggcttatgagtggattttaat

SEQ ID NO: 5601669 - DNA, 25 bp, Homo sapien
ttggttcgatgtctgcaagctccct

SEQ ID NO: 5601670 - DNA, 25 bp, Homo sapien
agctgggtactgactcgactttcta

SEQ ID NO: 5601671 - DNA, 25 bp, Homo sapien
cacagattctctgcacagccgctcc

SEQ ID NO: 5601672 - DNA, 25 bp, Homo sapien
gtggtcacgattcagctgggtactg

SEQ ID NO: 5601673 - DNA, 25 bp, Homo sapien
tatatgaacaatagagcttcaagtc

SEQ ID NO: 5601674 - DNA, 25 bp, Homo sapien
agcaagacatgtaccaaaggagaaa

SEQ ID NO: 5601675 - DNA, 25 bp, Homo sapien
tacaggtatctgaagtgaataaatt

SEQ ID NO: 5601676 - DNA, 25 bp, Homo sapien
cttcagtcccagcacaagcaacttt

SEQ ID NO: 5601677 - DNA, 25 bp, Homo sapien
taaatgtaggatcaatacaggtatc

SEQ ID NO: 5601678 - DNA, 25 bp, Homo sapien
tattatgaaatattaagcagtggtt

SEQ ID NO: 5601679 - DNA, 25 bp, Homo sapien
atcaaatcatcttagcagcaggtag

SEQ ID NO: 5601680 - DNA, 25 bp, Homo sapien
tctgaagtgaataaattagtgaatc

SEQ ID NO: 5601681 - DNA, 25 bp, Homo sapien
aaaaaacaagttggaactacatata

SEQ ID NO: 5601682 - DNA, 25 bp, Homo sapien
agcagcaggtagaaagctaatcatc

SEQ ID NO: 5601683 - DNA, 25 bp, Homo sapien
gacatgtaccaaaggagaaatgtac

SEQ ID NO: 5601684 - DNA, 25 bp, Homo sapien
tcaaggtccttgcaaaaatctggtt

SEQ ID NO: 5601685 - DNA, 25 bp, Homo sapien
tgccaatgccactatcaaggtcctt

SEQ ID NO: 5601686 - DNA, 25 bp, Homo sapien
ctttacccagcagttcagagcagtg

SEQ ID NO: 5601687 - DNA, 25 bp, Homo sapien
ctcaggtcttggatttcttacttac

SEQ ID NO: 5601688 - DNA, 25 bp, Homo sapien
tcttacttacataagcaggggctta

SEQ ID NO: 5601689 - DNA, 25 bp, Homo sapien
agcagttcagagcagtgagaactac

SEQ ID NO: 5601690 - DNA, 25 bp, Homo sapien
gtaacggggctttaccgtgacagca

SEQ ID NO: 5601691 - DNA, 25 bp, Homo sapien
tgaaactgaaccccaactgttggcc

SEQ ID NO: 5601692 - DNA, 25 bp, Homo sapien
gctttaccgtgacagcagtgcgttc

SEQ ID NO: 5601693 - DNA, 25 bp, Homo sapien
cataagcaggggcttaggtaataga

SEQ ID NO: 5601694 - DNA, 25 bp, Homo sapien
actgactcagtcttgccaatgccac

SEQ ID NO: 5601695 - DNA, 25 bp, Homo sapien
aggtcggagactttgaggtatctcc

SEQ ID NO: 5601696 - DNA, 25 bp, Homo sapien
ccacgtcaaaccttcatgaggcgac

SEQ ID NO: 5601697 - DNA, 25 bp, Homo sapien
atgcttgaaatggctacatctggtt

SEQ ID NO: 5601698 - DNA, 25 bp, Homo sapien
ctgggactaaaggtacataccacaa

SEQ ID NO: 5601699 - DNA, 25 bp, Homo sapien
ttgaggtatctccacgtcaaacctt

SEQ ID NO: 5601700 - DNA, 25 bp, Homo sapien
acgttgaggacccagactatgtttc

SEQ ID NO: 5601701 - DNA, 25 bp, Homo sapien
gcaacgttgaggacccagactatgt

SEQ ID NO: 5601702 - DNA, 25 bp, Homo sapien
aaaggtacataccacaaagcctggc

SEQ ID NO: 5601703 - DNA, 25 bp, Homo sapien
ataaaaaacatgatgttcaaccatc

SEQ ID NO: 5601704 - DNA, 25 bp, Homo sapien
ccatcatcaccggcaacgttgagga

SEQ ID NO: 5601705 - DNA, 25 bp, Homo sapien
tatgtttcagtccaaggaaaacaaa

SEQ ID NO: 5601706 - DNA, 25 bp, Homo sapien
tactaagtgcccactgcaacagaaa

SEQ ID NO: 5601707 - DNA, 25 bp, Homo sapien
acgggccaggtgcttacaatatatt

SEQ ID NO: 5601708 - DNA, 25 bp, Homo sapien
gcctgacccagaaccaatgccttta

SEQ ID NO: 5601709 - DNA, 25 bp, Homo sapien
tctactgaaaactaaccacgggcca

SEQ ID NO: 5601710 - DNA, 25 bp, Homo sapien
catttgacagataagggtatagagg

SEQ ID NO: 5601711 - DNA, 25 bp, Homo sapien
ctgtggggtagatgttactatctcc

SEQ ID NO: 5601712 - DNA, 25 bp, Homo sapien
gactcaagttcagatggcctgaccc

SEQ ID NO: 5601713 - DNA, 25 bp, Homo sapien
cattcaaatagggtgtggtaacctc

SEQ ID NO: 5601714 - DNA, 25 bp, Homo sapien
tccttccggaaattacactggagaa

SEQ ID NO: 5601715 - DNA, 25 bp, Homo sapien
agtgctgcatacaatgggttatttt

SEQ ID NO: 5601716 - DNA, 25 bp, Homo sapien
atgatagaggcacaattataagcat

SEQ ID NO: 5601717 - DNA, 25 bp, Homo sapien
gtagcaggcagcccatgaccctgca

SEQ ID NO: 5601718 - DNA, 25 bp, Homo sapien
caggcagcccatgaccctgcatctc

SEQ ID NO: 5601719 - DNA, 25 bp, Homo sapien
tgctgagccgtcttgaacacgtcac

SEQ ID NO: 5601720 - DNA, 25 bp, Homo sapien
tctcccatcacacaacacgcgccag

SEQ ID NO: 5601721 - DNA, 25 bp, Homo sapien
cctgcatctccacgttgtgaaaagc

SEQ ID NO: 5601722 - DNA, 25 bp, Homo sapien
gccaggcatcactccagcacggcct

SEQ ID NO: 5601723 - DNA, 25 bp, Homo sapien
attaaactgtaaatacccaattctc

SEQ ID NO: 5601724 - DNA, 25 bp, Homo sapien
gatcgacggcatcgagatctcgtta

SEQ ID NO: 5601725 - DNA, 25 bp, Homo sapien
gtcttgaacacgtcacccacaggcc

SEQ ID NO: 5601726 - DNA, 25 bp, Homo sapien
ggccgatcgacggcatcgagatctc

SEQ ID NO: 5601727 - DNA, 25 bp, Homo sapien
ctccacgttgtgaaaagcgtgcccc

SEQ ID NO: 5601728 - DNA, 25 bp, Homo sapien
atctttccggtcataaagggtatag

SEQ ID NO: 5601729 - DNA, 25 bp, Homo sapien
ctataccctttatgaccggaaagat

SEQ ID NO: 5601730 - DNA, 25 bp, Homo sapien
atacaaagcaattttttaagtacca

SEQ ID NO: 5601731 - DNA, 25 bp, Homo sapien
aatgggtgaattttacagtgtgtaa

SEQ ID NO: 5601732 - DNA, 25 bp, Homo sapien
taaagctctggttcatagttcgttc

SEQ ID NO: 5601733 - DNA, 25 bp, Homo sapien
ttgtacatgtacaatgggtgaattt

SEQ ID NO: 5601734 - DNA, 25 bp, Homo sapien
tgtacatgtacaatgggtgaatttt

SEQ ID NO: 5601735 - DNA, 25 bp, Homo sapien
ttacagtgtgtaaattatacaaagc

SEQ ID NO: 5601736 - DNA, 25 bp, Homo sapien
taagtaccattgtaacaaagtctta

SEQ ID NO: 5601737 - DNA, 25 bp, Homo sapien
aatcactattttaaagctctggttc

SEQ ID NO: 5601738 - DNA, 25 bp, Homo sapien
attttaaagctctggttcatagttc

SEQ ID NO: 5601739 - DNA, 25 bp, Homo sapien
atttgatatattcaacacaacgaag

SEQ ID NO: 5601740 - DNA, 25 bp, Homo sapien
taacaaagtcttacaaatcactatt

SEQ ID NO: 5601741 - DNA, 25 bp, Homo sapien
gaggaataagacagctagcatagtt

SEQ ID NO: 5601742 - DNA, 25 bp, Homo sapien
gatggctagtggagttcttcctgac

SEQ ID NO: 5601743 - DNA, 25 bp, Homo sapien
tgcctgtctcaggctggtagctcag

SEQ ID NO: 5601744 - DNA, 25 bp, Homo sapien
atagttccctcggagtggtaaagag

SEQ ID NO: 5601745 - DNA, 25 bp, Homo sapien
aagaggacaacttatgatggctagt

SEQ ID NO: 5601746 - DNA, 25 bp, Homo sapien
ttaacagagacacttgaagaagagc

SEQ ID NO: 5601747 - DNA, 25 bp, Homo sapien
ctgacctcctgaatgtagacaaaac

SEQ ID NO: 5601748 - DNA, 25 bp, Homo sapien
gaagttgggcagatgacctaataga

SEQ ID NO: 5601749 - DNA, 25 bp, Homo sapien
aaaccccaattcagaggatggattt

SEQ ID NO: 5601750 - DNA, 25 bp, Homo sapien
atgacctaatagagtcaggccctgc

SEQ ID NO: 5601751 - DNA, 25 bp, Homo sapien
ataatgccaagctctgctgggctga

SEQ ID NO: 5601752 - DNA, 25 bp, Homo sapien
atcatcgagaatatagggcaatggg

SEQ ID NO: 5601753 - DNA, 25 bp, Homo sapien
ctgatgttgtggctaattttaagac

SEQ ID NO: 5601754 - DNA, 25 bp, Homo sapien
gcaggggtaactatcatcgagaata

SEQ ID NO: 5601755 - DNA, 25 bp, Homo sapien
tcatgaccatggatagcaaactgcc

SEQ ID NO: 5601756 - DNA, 25 bp, Homo sapien
gtctgcatgggcttactaagagggt

SEQ ID NO: 5601757 - DNA, 25 bp, Homo sapien
tttcagctaggattagcggagaatg

SEQ ID NO: 5601758 - DNA, 25 bp, Homo sapien
tgggaactgttatattttggtctac

SEQ ID NO: 5601759 - DNA, 25 bp, Homo sapien
tagcggagaatgacctacctacttg

SEQ ID NO: 5601760 - DNA, 25 bp, Homo sapien
gttacttcaagaatgggaactgtta

SEQ ID NO: 5601761 - DNA, 25 bp, Homo sapien
atagggcaatgggtatattctaact

SEQ ID NO: 5601762 - DNA, 25 bp, Homo sapien
tgattaatgatgtctgcatgggctt

SEQ ID NO: 5601763 - DNA, 25 bp, Homo sapien
tgatttcgacgtctgttaaattaac

SEQ ID NO: 5601764 - DNA, 25 bp, Homo sapien
gttaatttaacagacgtcgaaatca

SEQ ID NO: 5601765 - DNA, 25 bp, Homo sapien
cttggtcgctttttcgagggtagcc

SEQ ID NO: 5601766 - DNA, 25 bp, Homo sapien
ctaacccgtggtagcttggatttgc

SEQ ID NO: 5601767 - DNA, 25 bp, Homo sapien
catgatagcccagggacattggtga

SEQ ID NO: 5601768 - DNA, 25 bp, Homo sapien
agagacacggcaagttgccaatgtc

SEQ ID NO: 5601769 - DNA, 25 bp, Homo sapien
tgatgatctcgaaggatgtgtgtag

SEQ ID NO: 5601770 - DNA, 25 bp, Homo sapien
gcagttcctgtagacggagctcctt

SEQ ID NO: 5601771 - DNA, 25 bp, Homo sapien
cagacccccacagatccccatgata

SEQ ID NO: 5601772 - DNA, 25 bp, Homo sapien
gcatctgatatggaggaaaagagaa

SEQ ID NO: 5601773 - DNA, 25 bp, Homo sapien
ccttgaggccctgtggttaccattc

SEQ ID NO: 5601774 - DNA, 25 bp, Homo sapien
tcctgtgagattgtcagacccccac

SEQ ID NO: 5601775 - DNA, 25 bp, Homo sapien
gagggtagccttacagtactgagga

SEQ ID NO: 5601776 - DNA, 25 bp, Homo sapien
tgcattgttcaatggcagaccattt

SEQ ID NO: 5601777 - DNA, 25 bp, Homo sapien
gggcttacagtttttgtcaagattc

SEQ ID NO: 5601778 - DNA, 25 bp, Homo sapien
tgtactacagttcttggatgcaatt

SEQ ID NO: 5601779 - DNA, 25 bp, Homo sapien
cagattttcaattgcgtggggagtt

SEQ ID NO: 5601780 - DNA, 25 bp, Homo sapien
tataacacacaaaatacgtactgac

SEQ ID NO: 5601781 - DNA, 25 bp, Homo sapien
caacagtagttaatcagcagttaaa

SEQ ID NO: 5601782 - DNA, 25 bp, Homo sapien
atcagcagttaaattatatgcagat

SEQ ID NO: 5601783 - DNA, 25 bp, Homo sapien
aaatacgtactgactgttatgttat

SEQ ID NO: 5601784 - DNA, 25 bp, Homo sapien
ttggtgcccctaacctctgcattgt

SEQ ID NO: 5601785 - DNA, 25 bp, Homo sapien
tttgtcaagattcctatggtcattc

SEQ ID NO: 5601786 - DNA, 25 bp, Homo sapien
atttgtcaggtttccagtcaacagt

SEQ ID NO: 5601787 - DNA, 25 bp, Homo sapien
tggactctggtgacagttgacaagc

SEQ ID NO: 5601788 - DNA, 25 bp, Homo sapien
ttataggaaaatggacacttcacat

SEQ ID NO: 5601789 - DNA, 25 bp, Homo sapien
tatcggtcaacctggagactgagtt

SEQ ID NO: 5601790 - DNA, 25 bp, Homo sapien
tatccatactggaagggtaacatgt

SEQ ID NO: 5601791 - DNA, 25 bp, Homo sapien
ggacacttcacatttgggactcttc

SEQ ID NO: 5601792 - DNA, 25 bp, Homo sapien
acagtgggacacatgttgatatttc

SEQ ID NO: 5601793 - DNA, 25 bp, Homo sapien
tagggcatctgcgtcatacagtatc

SEQ ID NO: 5601794 - DNA, 25 bp, Homo sapien
taaaactctgaacagtgggacacat

SEQ ID NO: 5601795 - DNA, 25 bp, Homo sapien
tagtagcttagcgaccataactgag

SEQ ID NO: 5601796 - DNA, 25 bp, Homo sapien
accataactgagagtcaccgggtga

SEQ ID NO: 5601797 - DNA, 25 bp, Homo sapien
aaccagtttgaataagggcctaatc

SEQ ID NO: 5601798 - DNA, 25 bp, Homo sapien
gcctcttgggcttggtgtttctcta

SEQ ID NO: 5601799 - DNA, 25 bp, Homo sapien
aaaacgaacacatgaacccttctgc

SEQ ID NO: 5601800 - DNA, 25 bp, Homo sapien
tcttgggcttggtgtttctctattc

SEQ ID NO: 5601801 - DNA, 25 bp, Homo sapien
ggaaggaatcagtgtgtagactaaa

SEQ ID NO: 5601802 - DNA, 25 bp, Homo sapien
attagctatagacagatccttctgc

SEQ ID NO: 5601803 - DNA, 25 bp, Homo sapien
aaccatcccacagttagtttctcac

SEQ ID NO: 5601804 - DNA, 25 bp, Homo sapien
tcactcattagctatagacagatcc

SEQ ID NO: 5601805 - DNA, 25 bp, Homo sapien
actgtgcccagtcaagttggctttt

SEQ ID NO: 5601806 - DNA, 25 bp, Homo sapien
gccagagaccataaaccatcccaca

SEQ ID NO: 5601807 - DNA, 25 bp, Homo sapien
acccttctgcgaacaggaaggaatc

SEQ ID NO: 5601808 - DNA, 25 bp, Homo sapien
gaatcagtgtgtagactaaacttac

SEQ ID NO: 5601809 - DNA, 25 bp, Homo sapien
tgagcgctcgtcatagacaggaatt

SEQ ID NO: 5601810 - DNA, 25 bp, Homo sapien
tcggacaggacgcttaaacactcca

SEQ ID NO: 5601811 - DNA, 25 bp, Homo sapien
atctgaatagacatgggtgtgcttg

SEQ ID NO: 5601812 - DNA, 25 bp, Homo sapien
ggggttatgagtatgacctccaacc

SEQ ID NO: 5601813 - DNA, 25 bp, Homo sapien
tagacaggaattggtgtgtatctga

SEQ ID NO: 5601814 - DNA, 25 bp, Homo sapien
gtggaggattttctgagcgctcgtc

SEQ ID NO: 5601815 - DNA, 25 bp, Homo sapien
gtgtggtcatttctgcatccggggc

SEQ ID NO: 5601816 - DNA, 25 bp, Homo sapien
ggggcattctggacctggattactt

SEQ ID NO: 5601817 - DNA, 25 bp, Homo sapien
tcattggtagaatctgtgtggtcat

SEQ ID NO: 5601818 - DNA, 25 bp, Homo sapien
cctggcatggacaagcgcttgtctc

SEQ ID NO: 5601819 - DNA, 25 bp, Homo sapien
tagctatgccatctcggacaggacg

SEQ ID NO: 5601820 - DNA, 25 bp, Homo sapien
tagggccaagaagactatcctgtgt

SEQ ID NO: 5601821 - DNA, 25 bp, Homo sapien
ggttaggacattggggccatcttag

SEQ ID NO: 5601822 - DNA, 25 bp, Homo sapien
tcaaagagttggaccattatgggac

SEQ ID NO: 5601823 - DNA, 25 bp, Homo sapien
gagtctcgctccgtagcccaggttg

SEQ ID NO: 5601824 - DNA, 25 bp, Homo sapien
gctcatggtcttgtcaaagagttgg

SEQ ID NO: 5601825 - DNA, 25 bp, Homo sapien
ggggaactcaggacacttgtgccct

SEQ ID NO: 5601826 - DNA, 25 bp, Homo sapien
ttggaccattatgggactgtccctc

SEQ ID NO: 5601827 - DNA, 25 bp, Homo sapien
cattggcaccaacaggtagggccaa

SEQ ID NO: 5601828 - DNA, 25 bp, Homo sapien
gtgccctggccctaagaattatcct

SEQ ID NO: 5601829 - DNA, 25 bp, Homo sapien
accgtccagtgcatctgtggttttc

SEQ ID NO: 5601830 - DNA, 25 bp, Homo sapien
ttggggccatcttagaggtccctaa

SEQ ID NO: 5601831 - DNA, 25 bp, Homo sapien
tgattctgtcagccaggtcaggagt

SEQ ID NO: 5601832 - DNA, 25 bp, Homo sapien
gggatgttgtgggccattgattctg

SEQ ID NO: 5601833 - DNA, 25 bp, Homo sapien
acttccagttaagcagtgccccgcg

SEQ ID NO: 5601834 - DNA, 25 bp, Homo sapien
gttgtgggccattgattctgtcagc

SEQ ID NO: 5601835 - DNA, 25 bp, Homo sapien
tgaagtcccttgtggcaaagagggc

SEQ ID NO: 5601836 - DNA, 25 bp, Homo sapien
tgctgaagtcccttgtggcaaagag

SEQ ID NO: 5601837 - DNA, 25 bp, Homo sapien
ggttcatccaggatgacttgggggc

SEQ ID NO: 5601838 - DNA, 25 bp, Homo sapien
cccgtccctaacacttgctgaagtc

SEQ ID NO: 5601839 - DNA, 25 bp, Homo sapien
aaggcaccgcatctggctgaatgtg

SEQ ID NO: 5601840 - DNA, 25 bp, Homo sapien
aatgtgcagaaccccgtccctaaca

SEQ ID NO: 5601841 - DNA, 25 bp, Homo sapien
cgcgtgccctccacattggcccctg

SEQ ID NO: 5601842 - DNA, 25 bp, Homo sapien
gttccacctgagggagaacttgatg

SEQ ID NO: 5601843 - DNA, 25 bp, Homo sapien
attttgaggattgtattaaggaagt

SEQ ID NO: 5601844 - DNA, 25 bp, Homo sapien
agtgacaaggccagtccctggaaat

SEQ ID NO: 5601845 - DNA, 25 bp, Homo sapien
tacataaggctcatgaaagaggagg

SEQ ID NO: 5601846 - DNA, 25 bp, Homo sapien
ctatatgtaccagtaaaaggacgcc

SEQ ID NO: 5601847 - DNA, 25 bp, Homo sapien
caatctaagagacaggattggactg

SEQ ID NO: 5601848 - DNA, 25 bp, Homo sapien
aaggacgcccacctccaaagattac

SEQ ID NO: 5601849 - DNA, 25 bp, Homo sapien
taaagcatagtggaaaatggaaaga

SEQ ID NO: 5601850 - DNA, 25 bp, Homo sapien
atggaaagatcaacaattagtacag

SEQ ID NO: 5601851 - DNA, 25 bp, Homo sapien
tgcggacttaaggaagacactcata

SEQ ID NO: 5601852 - DNA, 25 bp, Homo sapien
tacgtgctggagttactatgagact

SEQ ID NO: 5601853 - DNA, 25 bp, Homo sapien
cacgtgtgcttgcacgagtgcgtgt

SEQ ID NO: 5601854 - DNA, 25 bp, Homo sapien
gtgcgaagagacgctacgttccttt

SEQ ID NO: 5601855 - DNA, 25 bp, Homo sapien
ttgaatgggatttcaagcggagaat

SEQ ID NO: 5601856 - DNA, 25 bp, Homo sapien
gttctccactcctaggggccaagcc

SEQ ID NO: 5601857 - DNA, 25 bp, Homo sapien
agccacccctagccttggtggggga

SEQ ID NO: 5601858 - DNA, 25 bp, Homo sapien
ctctacacaccagtaacgggatttc

SEQ ID NO: 5601859 - DNA, 25 bp, Homo sapien
ccgccttgccccattggcctgggcc

SEQ ID NO: 5601860 - DNA, 25 bp, Homo sapien
gagtctcacttccccgccgccttgc

SEQ ID NO: 5601861 - DNA, 25 bp, Homo sapien
atggactctgccgccctggcggccc

SEQ ID NO: 5601862 - DNA, 25 bp, Homo sapien
cctgtgacttttgcgccccgcgcct

SEQ ID NO: 5601863 - DNA, 25 bp, Homo sapien
aaggcagacctgccgtcacacgtgt

SEQ ID NO: 5601864 - DNA, 25 bp, Homo sapien
agattaaaattcacactgagtctcc

SEQ ID NO: 5601865 - DNA, 25 bp, Homo sapien
ggagactcagtgtgaattttaatct

SEQ ID NO: 5601866 - DNA, 25 bp, Homo sapien
tggtaaccaactcgtatgtaaaaca

SEQ ID NO: 5601867 - DNA, 25 bp, Homo sapien
cacgtggcctctgtacttctgctgc

SEQ ID NO: 5601868 - DNA, 25 bp, Homo sapien
ccacccccagcctcaaagaactttc

SEQ ID NO: 5601869 - DNA, 25 bp, Homo sapien
tcaacgctctttatctggctgtacc

SEQ ID NO: 5601870 - DNA, 25 bp, Homo sapien
ccctccatagggtcctcaacgctct

SEQ ID NO: 5601871 - DNA, 25 bp, Homo sapien
tactgtactgcatagaagttgcgtt

SEQ ID NO: 5601872 - DNA, 25 bp, Homo sapien
agcaagaaaagctggtaaccaactc

SEQ ID NO: 5601873 - DNA, 25 bp, Homo sapien
tagaagttgcgtttcacgtggcctc

SEQ ID NO: 5601874 - DNA, 25 bp, Homo sapien
ggtcctggtgacggtcctgtcgtca

SEQ ID NO: 5601875 - DNA, 25 bp, Homo sapien
tctgctgccattgtgtccctccata

SEQ ID NO: 5601876 - DNA, 25 bp, Homo sapien
tggctgtaccctaccctactgtgtt

SEQ ID NO: 5601877 - DNA, 25 bp, Homo sapien
gaaagggcatatttgagtctcatcc

SEQ ID NO: 5601878 - DNA, 25 bp, Homo sapien
tcaataagtggattgcttagggagg

SEQ ID NO: 5601879 - DNA, 25 bp, Homo sapien
acagtaaatgtgaacactgacttgt

SEQ ID NO: 5601880 - DNA, 25 bp, Homo sapien
tgagttggagcactgatcaataagt

SEQ ID NO: 5601881 - DNA, 25 bp, Homo sapien
tataagcacatctgaaagggcatat

SEQ ID NO: 5601882 - DNA, 25 bp, Homo sapien
ttgctatctgtgcaggcttgggcag

SEQ ID NO: 5601883 - DNA, 25 bp, Homo sapien
tgtaaactccccctgaaagacattc

SEQ ID NO: 5601884 - DNA, 25 bp, Homo sapien
tctccctgctggtctcaatatcctc

SEQ ID NO: 5601885 - DNA, 25 bp, Homo sapien
gaggttggaacgaatagattcagtc

SEQ ID NO: 5601886 - DNA, 25 bp, Homo sapien
aggcttgggcaggtcatctccctgc

SEQ ID NO: 5601887 - DNA, 25 bp, Homo sapien
aatgattgtaaatgatccccctacc

SEQ ID NO: 5601888 - DNA, 25 bp, Homo sapien
gaggctcacttgaaaaatgacagtt

SEQ ID NO: 5601889 - DNA, 25 bp, Homo sapien
gaaaattatccaagacaaagcctat

SEQ ID NO: 5601890 - DNA, 25 bp, Homo sapien
gtactgaaactgacaaacggcatgg

SEQ ID NO: 5601891 - DNA, 25 bp, Homo sapien
tcatcaggtattcaccagctcatgt

SEQ ID NO: 5601892 - DNA, 25 bp, Homo sapien
ctgacaaacggcatggttgtatggg

SEQ ID NO: 5601893 - DNA, 25 bp, Homo sapien
agtaacctggttaaataattgaggc

SEQ ID NO: 5601894 - DNA, 25 bp, Homo sapien
actaacctggcaaacatcatagctt

SEQ ID NO: 5601895 - DNA, 25 bp, Homo sapien
tagcttatagttggggaaaattatc

SEQ ID NO: 5601896 - DNA, 25 bp, Homo sapien
agtttgctgctgatacaggggtata

SEQ ID NO: 5601897 - DNA, 25 bp, Homo sapien
cctaaagttgcaccatcgtaagtca

SEQ ID NO: 5601898 - DNA, 25 bp, Homo sapien
gcaccatcgtaagtcaagagctatc

SEQ ID NO: 5601899 - DNA, 25 bp, Homo sapien
aaattcagagttaatactgtcgttt

SEQ ID NO: 5601900 - DNA, 25 bp, Homo sapien
cacgtgcattcaaaatatgtccctc

SEQ ID NO: 5601901 - DNA, 25 bp, Homo sapien
tctctaagccagtggtatagacact

SEQ ID NO: 5601902 - DNA, 25 bp, Homo sapien
tggtatagacactgtcccattggct

SEQ ID NO: 5601903 - DNA, 25 bp, Homo sapien
ttgataagcatataaatgtaaactt

SEQ ID NO: 5601904 - DNA, 25 bp, Homo sapien
ggtgttatgctgggatcagtcacat

SEQ ID NO: 5601905 - DNA, 25 bp, Homo sapien
cctcagggtgatttcatcccattcc

SEQ ID NO: 5601906 - DNA, 25 bp, Homo sapien
tttgagtgtacaggtagtgagaaaa

SEQ ID NO: 5601907 - DNA, 25 bp, Homo sapien
tgtcgtttgagtgtacaggtagtga

SEQ ID NO: 5601908 - DNA, 25 bp, Homo sapien
tatgtccctctctaagccagtggta

SEQ ID NO: 5601909 - DNA, 25 bp, Homo sapien
tgctgggatcagtcacatcatccac

SEQ ID NO: 5601910 - DNA, 25 bp, Homo sapien
tcaaactcccaggtccaagcaaccc

SEQ ID NO: 5601911 - DNA, 25 bp, Homo sapien
gtctcacaatgtcatgcaggccggg

SEQ ID NO: 5601912 - DNA, 25 bp, Homo sapien
gacatatatacaagctaacagacgt

SEQ ID NO: 5601913 - DNA, 25 bp, Homo sapien
tttagctcgctcatccatttggaaa

SEQ ID NO: 5601914 - DNA, 25 bp, Homo sapien
actgcagcctcaaactcccaggtcc

SEQ ID NO: 5601915 - DNA, 25 bp, Homo sapien
acaagctaacagacgtttcacatct

SEQ ID NO: 5601916 - DNA, 25 bp, Homo sapien
gaaacaaggtctcacaatgtcatgc

SEQ ID NO: 5601917 - DNA, 25 bp, Homo sapien
tgcagtgacatgatcacagctcact

SEQ ID NO: 5601918 - DNA, 25 bp, Homo sapien
tcaacattcagcatttagctcgctc

SEQ ID NO: 5601919 - DNA, 25 bp, Homo sapien
tttgaatcatacagaaaagctttct

SEQ ID NO: 5601920 - DNA, 25 bp, Homo sapien
tctactatggtcatgtaaaacactt

SEQ ID NO: 5601921 - DNA, 25 bp, Homo sapien
aatgttggagataagaaaatctttc

SEQ ID NO: 5601922 - DNA, 25 bp, Homo sapien
cagacacaccccttcccagaaatgt

SEQ ID NO: 5601923 - DNA, 25 bp, Homo sapien
ttcccagaaatgttggagataagaa

SEQ ID NO: 5601924 - DNA, 25 bp, Homo sapien
tccaggacctttcacaatgcagatg

SEQ ID NO: 5601925 - DNA, 25 bp, Homo sapien
ccaaatctctagcctgtaggagctt

SEQ ID NO: 5601926 - DNA, 25 bp, Homo sapien
acaaagtggactactggattgtctc

SEQ ID NO: 5601927 - DNA, 25 bp, Homo sapien
acaatgcagatgaaatagaccaaat

SEQ ID NO: 5601928 - DNA, 25 bp, Homo sapien
agatgttgtttgaaacactcctgac

SEQ ID NO: 5601929 - DNA, 25 bp, Homo sapien
ttctcagtctccaggacctttcaca

SEQ ID NO: 5601930 - DNA, 25 bp, Homo sapien
ccagtaacataaaatccacagacac

SEQ ID NO: 5601931 - DNA, 25 bp, Homo sapien
actcctgacaaagtggactactgga

SEQ ID NO: 5601932 - DNA, 25 bp, Homo sapien
agagtagcccggtaaacaaatgctc

SEQ ID NO: 5601933 - DNA, 25 bp, Homo sapien
gaagtctggcgtaaaagtaagaaga

SEQ ID NO: 5601934 - DNA, 25 bp, Homo sapien
gaaatgtctctgtctggcgatggct

SEQ ID NO: 5601935 - DNA, 25 bp, Homo sapien
aaaatgcagacggctgtatgaatat

SEQ ID NO: 5601936 - DNA, 25 bp, Homo sapien
gcgatggctcagagtcagtgtactt

SEQ ID NO: 5601937 - DNA, 25 bp, Homo sapien
tctccaattagagagagagtagccc

SEQ ID NO: 5601938 - DNA, 25 bp, Homo sapien
tgcaagaatttggggaacgatcaaa

SEQ ID NO: 5601939 - DNA, 25 bp, Homo sapien
aaagagcagagcctaacctcaccta

SEQ ID NO: 5601940 - DNA, 25 bp, Homo sapien
gatctactcaggaacaggaagtctg

SEQ ID NO: 5601941 - DNA, 25 bp, Homo sapien
ggctacatccacattgcggggcagt

SEQ ID NO: 5601942 - DNA, 25 bp, Homo sapien
ggcagtatgagagctgcaagaattt

SEQ ID NO: 5601943 - DNA, 25 bp, Homo sapien
tttgtggaggatttgaacacagcga

SEQ ID NO: 5601944 - DNA, 25 bp, Homo sapien
catatggatttgtggaggatttgaa

SEQ ID NO: 5601945 - DNA, 25 bp, Homo sapien
acacagcgagggtcccctccaacag

SEQ ID NO: 5601946 - DNA, 25 bp, Homo sapien
ggcacattcgtgtctcactgtagcc

SEQ ID NO: 5601947 - DNA, 25 bp, Homo sapien
aggagaaacctgtggaaattaacaa

SEQ ID NO: 5601948 - DNA, 25 bp, Homo sapien
attaacaaaggagaagagtttccaa

SEQ ID NO: 5601949 - DNA, 25 bp, Homo sapien
gagttgacaggagaaacctgtggaa

SEQ ID NO: 5601950 - DNA, 25 bp, Homo sapien
ggcaaggaatactcaggccagtgca

SEQ ID NO: 5601951 - DNA, 25 bp, Homo sapien
cagtgcatacaggaggctcaattct

SEQ ID NO: 5601952 - DNA, 25 bp, Homo sapien
aggtgggtctcaaatttctaggctt

SEQ ID NO: 5601953 - DNA, 25 bp, Homo sapien
caggaggctcaattctggatgtgtg

SEQ ID NO: 5601954 - DNA, 25 bp, Homo sapien
ttagttagggctaagctaggctatg

SEQ ID NO: 5601955 - DNA, 25 bp, Homo sapien
gggagaaaaagctatggtatgcaca

SEQ ID NO: 5601956 - DNA, 25 bp, Homo sapien
tgcggttgagcagctttcacccatc

SEQ ID NO: 5601957 - DNA, 25 bp, Homo sapien
tgcagtcgtttgacacaataaaatc

SEQ ID NO: 5601958 - DNA, 25 bp, Homo sapien
ataacaaaacacaactaatgcagtc

SEQ ID NO: 5601959 - DNA, 25 bp, Homo sapien
ctatgctatctggatcactggcttc

SEQ ID NO: 5601960 - DNA, 25 bp, Homo sapien
agggaagtaatatgaccccaaccta

SEQ ID NO: 5601961 - DNA, 25 bp, Homo sapien
catgctgtctgatgcggttgagcag

SEQ ID NO: 5601962 - DNA, 25 bp, Homo sapien
ggtatgcacatagctttgcctctgc

SEQ ID NO: 5601963 - DNA, 25 bp, Homo sapien
ttccacagttgtgggaagtgtggag

SEQ ID NO: 5601964 - DNA, 25 bp, Homo sapien
caacctaaatgcatgagaggccagg

SEQ ID NO: 5601965 - DNA, 25 bp, Homo sapien
gttcagctgaaaactctgagatgcc

SEQ ID NO: 5601966 - DNA, 25 bp, Homo sapien
ccagtctagtgacacagaaaccacc

SEQ ID NO: 5601967 - DNA, 25 bp, Homo sapien
ttgaaatagaaaggcgttacagaaa

SEQ ID NO: 5601968 - DNA, 25 bp, Homo sapien
agggaggctcttctgagcagagctg

SEQ ID NO: 5601969 - DNA, 25 bp, Homo sapien
cattcctgctaggtcaaggcaagcc

SEQ ID NO: 5601970 - DNA, 25 bp, Homo sapien
atcccatcataaccatgacgcgctc

SEQ ID NO: 5601971 - DNA, 25 bp, Homo sapien
gacaccaaacaacacaacagacatc

SEQ ID NO: 5601972 - DNA, 25 bp, Homo sapien
tttcccaaggcaaatttagacagca

SEQ ID NO: 5601973 - DNA, 25 bp, Homo sapien
gaaaggcgttacagaaactgacacc

SEQ ID NO: 5601974 - DNA, 25 bp, Homo sapien
gagctgaagcagggaccccctgctt

SEQ ID NO: 5601975 - DNA, 25 bp, Homo sapien
tctgagatgcccaatacactcccat

SEQ ID NO: 5601976 - DNA, 25 bp, Homo sapien
cgtgcctgcggatacctgcaccgca

SEQ ID NO: 5601977 - DNA, 25 bp, Homo sapien
ccagtcttacctacggtggcggagt

SEQ ID NO: 5601978 - DNA, 25 bp, Homo sapien
tctgaacaggaaaaagctgtacaaa

SEQ ID NO: 5601979 - DNA, 25 bp, Homo sapien
tcggcgtccgccccgatcacgccta

SEQ ID NO: 5601980 - DNA, 25 bp, Homo sapien
tccgccccgatcacgcctagccgtg

SEQ ID NO: 5601981 - DNA, 25 bp, Homo sapien
caggcctctacccgaacccagtctt

SEQ ID NO: 5601982 - DNA, 25 bp, Homo sapien
agctgtacaaatgtagcgggcagta

SEQ ID NO: 5601983 - DNA, 25 bp, Homo sapien
aaggctgacaacgtccaggcctcta

SEQ ID NO: 5601984 - DNA, 25 bp, Homo sapien
gtcgccgtctctgcgctcgtgcctg

SEQ ID NO: 5601985 - DNA, 25 bp, Homo sapien
ggcctcctgtcatggatggtggcgc

SEQ ID NO: 5601986 - DNA, 25 bp, Homo sapien
gtctctgcgctcgtgcctgcggata

SEQ ID NO: 5601987 - DNA, 25 bp, Homo sapien
gtagcttgtgaaccaccatcagtgg

SEQ ID NO: 5601988 - DNA, 25 bp, Homo sapien
ggctcagtattgaggacgactgtcc

SEQ ID NO: 5601989 - DNA, 25 bp, Homo sapien
catcagtgggtatgctccaaagagg

SEQ ID NO: 5601990 - DNA, 25 bp, Homo sapien
tccaaagaggctcagtattgaggac

SEQ ID NO: 5601991 - DNA, 25 bp, Homo sapien
gggagcttggtgaggctccaagtca

SEQ ID NO: 5601992 - DNA, 25 bp, Homo sapien
atctcaagtcagtatcacctccctc

SEQ ID NO: 5601993 - DNA, 25 bp, Homo sapien
cagccaaaacccgacaaagtgaggc

SEQ ID NO: 5601994 - DNA, 25 bp, Homo sapien
tccatccagagtgtgatctaaggcc

SEQ ID NO: 5601995 - DNA, 25 bp, Homo sapien
agtgaggcacaaactcgtttgggac

SEQ ID NO: 5601996 - DNA, 25 bp, Homo sapien
caaactcgtttgggacacagaggag

SEQ ID NO: 5601997 - DNA, 25 bp, Homo sapien
ggacgactgtcctatccatccagag

SEQ ID NO: 5601998 - DNA, 25 bp, Homo sapien
ctatttggagagtaaggctccgtgt

SEQ ID NO: 5601999 - DNA, 25 bp, Homo sapien
cgagctgcagagcagtgctactcaa

SEQ ID NO: 5602000 - DNA, 25 bp, Homo sapien
cgtgtgtggctcgtgatccttctgt

SEQ ID NO: 5602001 - DNA, 25 bp, Homo sapien
agttcttaggctaagggacgactgg

SEQ ID NO: 5602002 - DNA, 25 bp, Homo sapien
gcccatgtgactagaagttggaggg

SEQ ID NO: 5602003 - DNA, 25 bp, Homo sapien
aacttcacacggggaagatgaattg

SEQ ID NO: 5602004 - DNA, 25 bp, Homo sapien
cttgttaacatgtagctggccagct

SEQ ID NO: 5602005 - DNA, 25 bp, Homo sapien
aggggatgaaaaacgatttccagct

SEQ ID NO: 5602006 - DNA, 25 bp, Homo sapien
gagcagctcgatggctgctgtgctc

SEQ ID NO: 5602007 - DNA, 25 bp, Homo sapien
actggacacactgcagctcaacctc

SEQ ID NO: 5602008 - DNA, 25 bp, Homo sapien
tccttctgtgggagcacttgctgta

SEQ ID NO: 5602009 - DNA, 25 bp, Homo sapien
aagctcgcgaacctttaaaatatac

SEQ ID NO: 5602010 - DNA, 25 bp, Homo sapien
agtaacacaggagtaaattcaacat

SEQ ID NO: 5602011 - DNA, 25 bp, Homo sapien
aagaataacttgaaatggctgttaa

SEQ ID NO: 5602012 - DNA, 25 bp, Homo sapien
tggtaagccatgataataaaagatt

SEQ ID NO: 5602013 - DNA, 25 bp, Homo sapien
tattgatgatacgaaaaaatgtctc

SEQ ID NO: 5602014 - DNA, 25 bp, Homo sapien
ataagataccatttcaagctcgcga

SEQ ID NO: 5602015 - DNA, 25 bp, Homo sapien
ttcaagaacatagtggaaagcatat

SEQ ID NO: 5602016 - DNA, 25 bp, Homo sapien
ttaatgggtcataaattggtaagcc

SEQ ID NO: 5602017 - DNA, 25 bp, Homo sapien
agtggaaagcatatgcaatattgat

SEQ ID NO: 5602018 - DNA, 25 bp, Homo sapien
aagattatctagtaacacaggagta

SEQ ID NO: 5602019 - DNA, 25 bp, Homo sapien
taactgtgattaatgggtcataaat

SEQ ID NO: 5602020 - DNA, 25 bp, Homo sapien
taatgctcagcgcccacacacaagt

SEQ ID NO: 5602021 - DNA, 25 bp, Homo sapien
atgtgtgaatcattactgaggttat

SEQ ID NO: 5602022 - DNA, 25 bp, Homo sapien
tttaacaggaagaattgagcttctt

SEQ ID NO: 5602023 - DNA, 25 bp, Homo sapien
gacaccatgcccggcatcctttatt

SEQ ID NO: 5602024 - DNA, 25 bp, Homo sapien
gtccagtttcatctccaaaggcatg

SEQ ID NO: 5602025 - DNA, 25 bp, Homo sapien
gaaagagaggcttcaagcttgtttg

SEQ ID NO: 5602026 - DNA, 25 bp, Homo sapien
ttataatatccaactgcacacaccc

SEQ ID NO: 5602027 - DNA, 25 bp, Homo sapien
tccaactgcacacaccctcacctcc

SEQ ID NO: 5602028 - DNA, 25 bp, Homo sapien
agcgcccacacacaagtccagtttc

SEQ ID NO: 5602029 - DNA, 25 bp, Homo sapien
caaaggcatgcagtttcatccccct

SEQ ID NO: 5602030 - DNA, 25 bp, Homo sapien
gactttgtgatccatccccctcggc

SEQ ID NO: 5602031 - DNA, 25 bp, Homo sapien
gctatctaggatcacttgcaccatc

SEQ ID NO: 5602032 - DNA, 25 bp, Homo sapien
tattaatccatagaataggaccttt

SEQ ID NO: 5602033 - DNA, 25 bp, Homo sapien
atgatcaacatgtgaacaaatttaa

SEQ ID NO: 5602034 - DNA, 25 bp, Homo sapien
attttccaggcaggtttgatgttcc

SEQ ID NO: 5602035 - DNA, 25 bp, Homo sapien
ttctcatggcagctacagaaatggc

SEQ ID NO: 5602036 - DNA, 25 bp, Homo sapien
ggctgccacaaagtcagtattaatg

SEQ ID NO: 5602037 - DNA, 25 bp, Homo sapien
gatgttcctaagagcaatgtaaaat

SEQ ID NO: 5602038 - DNA, 25 bp, Homo sapien
gctacagaaatggctgccacaaagt

SEQ ID NO: 5602039 - DNA, 25 bp, Homo sapien
gacaaaaagtagtatacacctagga

SEQ ID NO: 5602040 - DNA, 25 bp, Homo sapien
aaaggctaagtaacatcgttttatc

SEQ ID NO: 5602041 - DNA, 25 bp, Homo sapien
atacacctaggaagaatgcgaaaat

SEQ ID NO: 5602042 - DNA, 25 bp, Homo sapien
agcagaatggctattttgttaggca

SEQ ID NO: 5602043 - DNA, 25 bp, Homo sapien
ttcagagctacatcactgtggcatc

SEQ ID NO: 5602044 - DNA, 25 bp, Homo sapien
gtgtccagtaacttgcaggtctcat

SEQ ID NO: 5602045 - DNA, 25 bp, Homo sapien
cttcttggaaggcattcaaaatgtg

SEQ ID NO: 5602046 - DNA, 25 bp, Homo sapien
atgacaaataggcctaacaaacgtt

SEQ ID NO: 5602047 - DNA, 25 bp, Homo sapien
cactgggagcagttctgatcccctc

SEQ ID NO: 5602048 - DNA, 25 bp, Homo sapien
tctccttgtcctggtgcactctctt

SEQ ID NO: 5602049 - DNA, 25 bp, Homo sapien
tgggagacttcccaagaagctgtta

SEQ ID NO: 5602050 - DNA, 25 bp, Homo sapien
cccattccaggcaacactagatact

SEQ ID NO: 5602051 - DNA, 25 bp, Homo sapien
gttctgatcccctcgggccagcctt

SEQ ID NO: 5602052 - DNA, 25 bp, Homo sapien
tactggaccgttcttcttggaaggc

SEQ ID NO: 5602053 - DNA, 25 bp, Homo sapien
taataccattactcactacactaat

SEQ ID NO: 5602054 - DNA, 25 bp, Homo sapien
attagtgtagtgagtaatggtatta

SEQ ID NO: 5602055 - DNA, 25 bp, Homo sapien
tcggagatctgtgctgtgaccggat

SEQ ID NO: 5602056 - DNA, 25 bp, Homo sapien
cagagaagatgatctgtgctggctt

SEQ ID NO: 5602057 - DNA, 25 bp, Homo sapien
ttacttgccaccgatacaggtgaga

SEQ ID NO: 5602058 - DNA, 25 bp, Homo sapien
ctaagttatgactctgacattgccc

SEQ ID NO: 5602059 - DNA, 25 bp, Homo sapien
gtgagaagggccaaacacataatag

SEQ ID NO: 5602060 - DNA, 25 bp, Homo sapien
ggaagcatcagtgcaggtaagcata

SEQ ID NO: 5602061 - DNA, 25 bp, Homo sapien
gaaggtggttcatagccccctgcaa

SEQ ID NO: 5602062 - DNA, 25 bp, Homo sapien
gtaaatgatatcaagcagcatccgc

SEQ ID NO: 5602063 - DNA, 25 bp, Homo sapien
tttggaccatcaacaaggaagttgc

SEQ ID NO: 5602064 - DNA, 25 bp, Homo sapien
ggtgaggccagtatgtctcccacac

SEQ ID NO: 5602065 - DNA, 25 bp, Homo sapien
cctctggagtacaactcggtggtga

SEQ ID NO: 5602066 - DNA, 25 bp, Homo sapien
ctccgcttttgattggctcccagac

SEQ ID NO: 5602067 - DNA, 25 bp, Homo sapien
ttgccgtatggattcagggtgattt

SEQ ID NO: 5602068 - DNA, 25 bp, Homo sapien
ttataacccatgagtgaattgtgcc

SEQ ID NO: 5602069 - DNA, 25 bp, Homo sapien
tgttggtctcaacccacaaaattgc

SEQ ID NO: 5602070 - DNA, 25 bp, Homo sapien
atagtctctctctcgcagtgttgcc

SEQ ID NO: 5602071 - DNA, 25 bp, Homo sapien
tcggactcctcgtgcgttagcctgg

SEQ ID NO: 5602072 - DNA, 25 bp, Homo sapien
gctcccagaccttggatctatctgt

SEQ ID NO: 5602073 - DNA, 25 bp, Homo sapien
gtgaattaacctttgagcctcggac

SEQ ID NO: 5602074 - DNA, 25 bp, Homo sapien
catgagtgaattgtgcctgcagttt

SEQ ID NO: 5602075 - DNA, 25 bp, Homo sapien
tcctcgtgcgttagcctggtataat

SEQ ID NO: 5602076 - DNA, 25 bp, Homo sapien
tctcgcagtgttgccgtatggattc

SEQ ID NO: 5602077 - DNA, 25 bp, Homo sapien
tgcacatcccagagaatgatatcca

SEQ ID NO: 5602078 - DNA, 25 bp, Homo sapien
agtatacatatctacatggaaggcc

SEQ ID NO: 5602079 - DNA, 25 bp, Homo sapien
aaaccagaagggaactaataaagca

SEQ ID NO: 5602080 - DNA, 25 bp, Homo sapien
accatgtttgtaatcagccactgtc

SEQ ID NO: 5602081 - DNA, 25 bp, Homo sapien
catttagtctaaaaccagaagggaa

SEQ ID NO: 5602082 - DNA, 25 bp, Homo sapien
gggagttagtaggacaatcttgata

SEQ ID NO: 5602083 - DNA, 25 bp, Homo sapien
ataaagcattaacaacacagagggg

SEQ ID NO: 5602084 - DNA, 25 bp, Homo sapien
ataaagtactcaagataggcatatc

SEQ ID NO: 5602085 - DNA, 25 bp, Homo sapien
tatgagctcatagtgttatactgct

SEQ ID NO: 5602086 - DNA, 25 bp, Homo sapien
ttatactgctaaagggttcacattt

SEQ ID NO: 5602087 - DNA, 25 bp, Homo sapien
tggaaggcccaaatcataagatcgc

SEQ ID NO: 5602088 - DNA, 25 bp, Homo sapien
tgaccccaggtaaccacttatctac

SEQ ID NO: 5602089 - DNA, 25 bp, Homo sapien
ttgcccatttcactgaagttgtaga

SEQ ID NO: 5602090 - DNA, 25 bp, Homo sapien
atgtctaacatgtgaaaacaccacc

SEQ ID NO: 5602091 - DNA, 25 bp, Homo sapien
accacaatcaggataatgagcacat

SEQ ID NO: 5602092 - DNA, 25 bp, Homo sapien
tggacatacagcatgtactttttgt

SEQ ID NO: 5602093 - DNA, 25 bp, Homo sapien
tattgaaatgatgtctgatcttacc

SEQ ID NO: 5602094 - DNA, 25 bp, Homo sapien
tccacactgaccccaggtaaccact

SEQ ID NO: 5602095 - DNA, 25 bp, Homo sapien
ttgatattggtaatttgagtgttcc

SEQ ID NO: 5602096 - DNA, 25 bp, Homo sapien
tgtaatctcacactccccattccac

SEQ ID NO: 5602097 - DNA, 25 bp, Homo sapien
atgagcacatatattattcccaaat

SEQ ID NO: 5602098 - DNA, 25 bp, Homo sapien
ttcattagtttgtgcttccagaaat

SEQ ID NO: 5602099 - DNA, 25 bp, Homo sapien
ggcctcggtttcctccgatcacagc

SEQ ID NO: 5602100 - DNA, 25 bp, Homo sapien
ctgctcgggtttttattcccagacc

SEQ ID NO: 5602101 - DNA, 25 bp, Homo sapien
tttctgtgctcggtttcccagtata

SEQ ID NO: 5602102 - DNA, 25 bp, Homo sapien
tcctccgatcacagcgcctcagggg

SEQ ID NO: 5602103 - DNA, 25 bp, Homo sapien
cggtttcctccgatcacagcgcctc

SEQ ID NO: 5602104 - DNA, 25 bp, Homo sapien
ctcggtttcccagtataggaggacg

SEQ ID NO: 5602105 - DNA, 25 bp, Homo sapien
tcccagacctaagcttacaggtgcg

SEQ ID NO: 5602106 - DNA, 25 bp, Homo sapien
gacggtcacggtacgtagtatagag

SEQ ID NO: 5602107 - DNA, 25 bp, Homo sapien
gccaggcgcttaagctttctgtgct

SEQ ID NO: 5602108 - DNA, 25 bp, Homo sapien
acctaagcttacaggtgcgtggtcc

SEQ ID NO: 5602109 - DNA, 25 bp, Homo sapien
ggtacgtagtatagagttgtcctga

SEQ ID NO: 5602110 - DNA, 25 bp, Homo sapien
gtacccatactgaaagccaaaatcc

SEQ ID NO: 5602111 - DNA, 25 bp, Homo sapien
accacttgtgccattaggaaagaga

SEQ ID NO: 5602112 - DNA, 25 bp, Homo sapien
ctagagaattaggggttaccacttg

SEQ ID NO: 5602113 - DNA, 25 bp, Homo sapien
taatttgccattgttgtacccatac

SEQ ID NO: 5602114 - DNA, 25 bp, Homo sapien
gagataaaaagacatgttcaacata

SEQ ID NO: 5602115 - DNA, 25 bp, Homo sapien
aaagaacccaaggcacttgcccaac

SEQ ID NO: 5602116 - DNA, 25 bp, Homo sapien
tacagcaaaatccacatacagattc

SEQ ID NO: 5602117 - DNA, 25 bp, Homo sapien
caatattaaaccaagtagagggtga

SEQ ID NO: 5602118 - DNA, 25 bp, Homo sapien
tgtgccattaggaaagagaacttca

SEQ ID NO: 5602119 - DNA, 25 bp, Homo sapien
gttcaacatagagctcttttggata

SEQ ID NO: 5602120 - DNA, 25 bp, Homo sapien
gatcataattatgcactgagtactc

SEQ ID NO: 5602121 - DNA, 25 bp, Homo sapien
tactaaactgctaatacacacattc

SEQ ID NO: 5602122 - DNA, 25 bp, Homo sapien
gaaacccttcccatgcttagccact

SEQ ID NO: 5602123 - DNA, 25 bp, Homo sapien
aatgttgcaaaattagaaagaggac

SEQ ID NO: 5602124 - DNA, 25 bp, Homo sapien
cacacattcagaggtggtccaatgc

SEQ ID NO: 5602125 - DNA, 25 bp, Homo sapien
aatctctccaaacccaaacgatggt

SEQ ID NO: 5602126 - DNA, 25 bp, Homo sapien
ctgggggaatttttaggatactctg

SEQ ID NO: 5602127 - DNA, 25 bp, Homo sapien
tgcatcccactaaccccaatcaaat

SEQ ID NO: 5602128 - DNA, 25 bp, Homo sapien
tgcagtcccaccatagaaacccttc

SEQ ID NO: 5602129 - DNA, 25 bp, Homo sapien
gagatgtgttgtaaaagactcattg

SEQ ID NO: 5602130 - DNA, 25 bp, Homo sapien
cttgtatcagagatgtgttgtaaaa

SEQ ID NO: 5602131 - DNA, 25 bp, Homo sapien
tagaaagaggacataattccacaaa

SEQ ID NO: 5602132 - DNA, 25 bp, Homo sapien
cattgttgagcaccaactatgggcc

SEQ ID NO: 5602133 - DNA, 25 bp, Homo sapien
cattgaagctggccttgaaggatgg

SEQ ID NO: 5602134 - DNA, 25 bp, Homo sapien
gttgagcaccaactatgggccagac

SEQ ID NO: 5602135 - DNA, 25 bp, Homo sapien
agtctcctgcctcaagttctggggg

SEQ ID NO: 5602136 - DNA, 25 bp, Homo sapien
cttcttggtcattgcggtagccagc

SEQ ID NO: 5602137 - DNA, 25 bp, Homo sapien
tcattcaaccaatagagcacatgcc

SEQ ID NO: 5602138 - DNA, 25 bp, Homo sapien
agacagagtctcctgcctcaagttc

SEQ ID NO: 5602139 - DNA, 25 bp, Homo sapien
caccaactatgggccagacactgag

SEQ ID NO: 5602140 - DNA, 25 bp, Homo sapien
tagttctgttaaatggacacacggc

SEQ ID NO: 5602141 - DNA, 25 bp, Homo sapien
cctgcctcaagttctgggggctaac

SEQ ID NO: 5602142 - DNA, 25 bp, Homo sapien
ccaatagagcacatgccatccattc

SEQ ID NO: 5602143 - DNA, 25 bp, Homo sapien
caaaagcatcaggattacagaagtg

SEQ ID NO: 5602144 - DNA, 25 bp, Homo sapien
caatagtgaccatctttatactgtt

SEQ ID NO: 5602145 - DNA, 25 bp, Homo sapien
tgctgaataatctgtcaatagtgac

SEQ ID NO: 5602146 - DNA, 25 bp, Homo sapien
tagccttactccattagatagaata

SEQ ID NO: 5602147 - DNA, 25 bp, Homo sapien
cttggcctccaaaagcatcaggatt

SEQ ID NO: 5602148 - DNA, 25 bp, Homo sapien
attgaatctcaaaattggtcttctc

SEQ ID NO: 5602149 - DNA, 25 bp, Homo sapien
acagaagtgagctatcatacctgac

SEQ ID NO: 5602150 - DNA, 25 bp, Homo sapien
atagaataatagaatgatgctgaat

SEQ ID NO: 5602151 - DNA, 25 bp, Homo sapien
ttagatagaataatagaatgatgct

SEQ ID NO: 5602152 - DNA, 25 bp, Homo sapien
gaacttaatggaaatcattccagtt

SEQ ID NO: 5602153 - DNA, 25 bp, Homo sapien
attggtcttctcctagccttactcc

SEQ ID NO: 5602154 - DNA, 25 bp, Homo sapien
tagcgagtgagccaattaagactat

SEQ ID NO: 5602155 - DNA, 25 bp, Homo sapien
gacggcactctaatgagagctgatc

SEQ ID NO: 5602156 - DNA, 25 bp, Homo sapien
agtttagtatagtgtagtctgggga

SEQ ID NO: 5602157 - DNA, 25 bp, Homo sapien
atagaaagcaaccacaatattcact

SEQ ID NO: 5602158 - DNA, 25 bp, Homo sapien
ctgcactggtagtacattttaggac

SEQ ID NO: 5602159 - DNA, 25 bp, Homo sapien
cacagtactcattttgacggcactc

SEQ ID NO: 5602160 - DNA, 25 bp, Homo sapien
gtgtgtacttgtagtggtgttttct

SEQ ID NO: 5602161 - DNA, 25 bp, Homo sapien
tacagcttaggtaagtagcgagtga

SEQ ID NO: 5602162 - DNA, 25 bp, Homo sapien
tgtctgcagaaattggcaaagtgta

SEQ ID NO: 5602163 - DNA, 25 bp, Homo sapien
tctgtagagatggtgagtttagtat

SEQ ID NO: 5602164 - DNA, 25 bp, Homo sapien
tgagagctgatcatatgtctgcaga

SEQ ID NO: 5602165 - DNA, 25 bp, Homo sapien
ggaatcatgccataaggacgtcatt

SEQ ID NO: 5602166 - DNA, 25 bp, Homo sapien
ggccctgccccactggagaatcatt

SEQ ID NO: 5602167 - DNA, 25 bp, Homo sapien
gggcagaaatcatgagtcgtccatc

SEQ ID NO: 5602168 - DNA, 25 bp, Homo sapien
tacagtagggaacctacagtgagag

SEQ ID NO: 5602169 - DNA, 25 bp, Homo sapien
ggatgggagttaagaattttgttgc

SEQ ID NO: 5602170 - DNA, 25 bp, Homo sapien
gtgaatggacatgagctgctcttct

SEQ ID NO: 5602171 - DNA, 25 bp, Homo sapien
gatcattcccaccagcaacgacctc

SEQ ID NO: 5602172 - DNA, 25 bp, Homo sapien
aactgcattgttaacccggggtgaa

SEQ ID NO: 5602173 - DNA, 25 bp, Homo sapien
tatctccaagttagggatcattccc

SEQ ID NO: 5602174 - DNA, 25 bp, Homo sapien
acttttagctgctagggcagaaatc

SEQ ID NO: 5602175 - DNA, 25 bp, Homo sapien
tttgttgcagggatgacttttagct

SEQ ID NO: 5602176 - DNA, 25 bp, Homo sapien
cttgaaagatatactggacccagga

SEQ ID NO: 5602177 - DNA, 25 bp, Homo sapien
tcctgggtccagtatatctttcaag

SEQ ID NO: 5602178 - DNA, 25 bp, Homo sapien
gaaacttgaaagatatactggaccc

SEQ ID NO: 5602179 - DNA, 25 bp, Homo sapien
gggtccagtatatctttcaagtttc

SEQ ID NO: 5602180 - DNA, 25 bp, Homo sapien
atgcacacggaaacagcaactacta

SEQ ID NO: 5602181 - DNA, 25 bp, Homo sapien
ggaatcttatgagaaaggaaatacc

SEQ ID NO: 5602182 - DNA, 25 bp, Homo sapien
atttctgtcccaggaaacttgcctc

SEQ ID NO: 5602183 - DNA, 25 bp, Homo sapien
aaacttcacatagctctaggtcctt

SEQ ID NO: 5602184 - DNA, 25 bp, Homo sapien
atccaaagcctcccatccatccagc

SEQ ID NO: 5602185 - DNA, 25 bp, Homo sapien
ttatagggcaccaacagagaaatga

SEQ ID NO: 5602186 - DNA, 25 bp, Homo sapien
gttttgaacaggatatgcacacgga

SEQ ID NO: 5602187 - DNA, 25 bp, Homo sapien
tctagaagaagcaaaggacatttct

SEQ ID NO: 5602188 - DNA, 25 bp, Homo sapien
ctggcatttgctattatagggcacc

SEQ ID NO: 5602189 - DNA, 25 bp, Homo sapien
ctaggtccttgataaagttcatagc

SEQ ID NO: 5602190 - DNA, 25 bp, Homo sapien
gtgcatcaaggccttaatccaaagc

SEQ ID NO: 5602191 - DNA, 25 bp, Homo sapien
agaacttctatctactagtggtgtc

SEQ ID NO: 5602192 - DNA, 25 bp, Homo sapien
gtgcagacataattttgtagtacaa

SEQ ID NO: 5602193 - DNA, 25 bp, Homo sapien
acagagctcaagttgttagaacttc

SEQ ID NO: 5602194 - DNA, 25 bp, Homo sapien
tttcttgagaatggattcactggtg

SEQ ID NO: 5602195 - DNA, 25 bp, Homo sapien
tcatcacaatcatggggttgaggag

SEQ ID NO: 5602196 - DNA, 25 bp, Homo sapien
tgtgccaaagccaaaaccaaccaaa

SEQ ID NO: 5602197 - DNA, 25 bp, Homo sapien
tgggcttcccaatctcatcacaatc

SEQ ID NO: 5602198 - DNA, 25 bp, Homo sapien
aattcaggtgtgccaaagccaaaac

SEQ ID NO: 5602199 - DNA, 25 bp, Homo sapien
cagtgttacagtgggcttcccaatc

SEQ ID NO: 5602200 - DNA, 25 bp, Homo sapien
ggttgaggagctgccatgactataa

SEQ ID NO: 5602201 - DNA, 25 bp, Homo sapien
gtggtgtctgatataacctgggctc

SEQ ID NO: 5602202 - DNA, 25 bp, Homo sapien
tgtcttgggataagtgctgtctgca

SEQ ID NO: 5602203 - DNA, 25 bp, Homo sapien
gtaattacaatatgagtgggggata

SEQ ID NO: 5602204 - DNA, 25 bp, Homo sapien
tcctaacttgcgatgagggcgtttg

SEQ ID NO: 5602205 - DNA, 25 bp, Homo sapien
ccatagatgtcacgccacctgatgc

SEQ ID NO: 5602206 - DNA, 25 bp, Homo sapien
gtcggccacagtttgaggctctcca

SEQ ID NO: 5602207 - DNA, 25 bp, Homo sapien
gtggcttgactttctgggagtgaac

SEQ ID NO: 5602208 - DNA, 25 bp, Homo sapien
ctcaggttgccctggcagctactgc

SEQ ID NO: 5602209 - DNA, 25 bp, Homo sapien
actgaagtcctgctggaggtttgtc

SEQ ID NO: 5602210 - DNA, 25 bp, Homo sapien
agcgaaccctgcaagcagctcagct

SEQ ID NO: 5602211 - DNA, 25 bp, Homo sapien
atggccaataagatggatggtcctc

SEQ ID NO: 5602212 - DNA, 25 bp, Homo sapien
acccttctagcaacaggctggcagc

SEQ ID NO: 5602213 - DNA, 25 bp, Homo sapien
ttcagaagaattgtgaacaagttgc

SEQ ID NO: 5602214 - DNA, 25 bp, Homo sapien
tacacattgggccaaggacagattt

SEQ ID NO: 5602215 - DNA, 25 bp, Homo sapien
cctggagaaggattttaccactgcc

SEQ ID NO: 5602216 - DNA, 25 bp, Homo sapien
aacacagagccatagattttcattt

SEQ ID NO: 5602217 - DNA, 25 bp, Homo sapien
gcatctgcacactgtagagtgcctt

SEQ ID NO: 5602218 - DNA, 25 bp, Homo sapien
catttcatgttggtacaggtactcc

SEQ ID NO: 5602219 - DNA, 25 bp, Homo sapien
cttcatcgttttggaacacagagcc

SEQ ID NO: 5602220 - DNA, 25 bp, Homo sapien
agtgtttacacattgggccaaggac

SEQ ID NO: 5602221 - DNA, 25 bp, Homo sapien
gaattgtgaacaagttgctggtttc

SEQ ID NO: 5602222 - DNA, 25 bp, Homo sapien
acaggtactccacttcaaatttccc

SEQ ID NO: 5602223 - DNA, 25 bp, Homo sapien
tcagcaagtgtttacacattgggcc

SEQ ID NO: 5602224 - DNA, 25 bp, Homo sapien
gggagtgcagtggtcctcactgtaa

SEQ ID NO: 5602225 - DNA, 25 bp, Homo sapien
actacaggtgcatctcaccaggtcc

SEQ ID NO: 5602226 - DNA, 25 bp, Homo sapien
tcagtccagggctgagtgtttcaag

SEQ ID NO: 5602227 - DNA, 25 bp, Homo sapien
ccttccttatgatagcaaagcagcc

SEQ ID NO: 5602228 - DNA, 25 bp, Homo sapien
cctggggtcaccttagggttctcag

SEQ ID NO: 5602229 - DNA, 25 bp, Homo sapien
gtagtttttagacatggtatccctc

SEQ ID NO: 5602230 - DNA, 25 bp, Homo sapien
gtccagaccagcacagctctggtgc

SEQ ID NO: 5602231 - DNA, 25 bp, Homo sapien
accttagggttctcagggaaagcaa

SEQ ID NO: 5602232 - DNA, 25 bp, Homo sapien
gtgcctggaggattcagtccagggc

SEQ ID NO: 5602233 - DNA, 25 bp, Homo sapien
tatgatagcaaagcagccaaagtga

SEQ ID NO: 5602234 - DNA, 25 bp, Homo sapien
ggcaaggaggtgactgtctccatca

SEQ ID NO: 5602235 - DNA, 25 bp, Homo sapien
ttacagcagaagcattaaacaattt

SEQ ID NO: 5602236 - DNA, 25 bp, Homo sapien
catttaaagaaaggtttgaagtagc

SEQ ID NO: 5602237 - DNA, 25 bp, Homo sapien
ggtgagaattttagggggtgtctca

SEQ ID NO: 5602238 - DNA, 25 bp, Homo sapien
atacgggctttctgtcaggcagtgc

SEQ ID NO: 5602239 - DNA, 25 bp, Homo sapien
tcaaacttgaggaaacgacttctgt

SEQ ID NO: 5602240 - DNA, 25 bp, Homo sapien
caggcagtgctcagccaatgtccca

SEQ ID NO: 5602241 - DNA, 25 bp, Homo sapien
cccacaaaatagctgagggtgagaa

SEQ ID NO: 5602242 - DNA, 25 bp, Homo sapien
aagttgccgctgaaaagaaaatact

SEQ ID NO: 5602243 - DNA, 25 bp, Homo sapien
tccagtaaagtagcatcctccccac

SEQ ID NO: 5602244 - DNA, 25 bp, Homo sapien
tagggggtgtctcaactccagtaaa

SEQ ID NO: 5602245 - DNA, 25 bp, Homo sapien
ctggctagtagggaattagtacaca

SEQ ID NO: 5602246 - DNA, 25 bp, Homo sapien
cttgtcagactgttaccctttagag

SEQ ID NO: 5602247 - DNA, 25 bp, Homo sapien
actccttacagtcggcgatggcttc

SEQ ID NO: 5602248 - DNA, 25 bp, Homo sapien
aatagtatacaacaggagaaaaggc

SEQ ID NO: 5602249 - DNA, 25 bp, Homo sapien
taaacacttctatccatcactcctt

SEQ ID NO: 5602250 - DNA, 25 bp, Homo sapien
tgggctaaatagtatacaacaggag

SEQ ID NO: 5602251 - DNA, 25 bp, Homo sapien
ccctgaaggacaatgagtctttcca

SEQ ID NO: 5602252 - DNA, 25 bp, Homo sapien
ttcatgctgggctaaatagtataca

SEQ ID NO: 5602253 - DNA, 25 bp, Homo sapien
gcctcacaaaccaagtaaacacttc

SEQ ID NO: 5602254 - DNA, 25 bp, Homo sapien
actgttaccctttagagacaaggcc

SEQ ID NO: 5602255 - DNA, 25 bp, Homo sapien
atcactccttacagtcggcgatggc

SEQ ID NO: 5602256 - DNA, 25 bp, Homo sapien
caatgagtctttccagaacccagga

SEQ ID NO: 5602257 - DNA, 25 bp, Homo sapien
ttcatgggtctggatttattcaaac

SEQ ID NO: 5602258 - DNA, 25 bp, Homo sapien
tagagctgcttaattatctgccttc

SEQ ID NO: 5602259 - DNA, 25 bp, Homo sapien
atgtgtgtgtatatcccaccatgct

SEQ ID NO: 5602260 - DNA, 25 bp, Homo sapien
ttcaatgcaagctgatggtgtgtgc

SEQ ID NO: 5602261 - DNA, 25 bp, Homo sapien
ctccagttgctggaagccagtactc

SEQ ID NO: 5602262 - DNA, 25 bp, Homo sapien
gatggtgtgtgcatttggtcacaat

SEQ ID NO: 5602263 - DNA, 25 bp, Homo sapien
tcttcccagtaccacagccataatg

SEQ ID NO: 5602264 - DNA, 25 bp, Homo sapien
atctgccttcaggctagactgtgag

SEQ ID NO: 5602265 - DNA, 25 bp, Homo sapien
caatgacatttcagacttaggcctc

SEQ ID NO: 5602266 - DNA, 25 bp, Homo sapien
gcaagggacttagcaatgtgtgtgt

SEQ ID NO: 5602267 - DNA, 25 bp, Homo sapien
atacacaagtatttgctccagttgc

SEQ ID NO: 5602268 - DNA, 25 bp, Homo sapien
accctctgggtctgcctaatcttac

SEQ ID NO: 5602269 - DNA, 25 bp, Homo sapien
aagaacaattcaacagccaggaacc

SEQ ID NO: 5602270 - DNA, 25 bp, Homo sapien
agcacccagtgcaaacttaagagcc

SEQ ID NO: 5602271 - DNA, 25 bp, Homo sapien
ccctgcacttgtccaaaagagggcc

SEQ ID NO: 5602272 - DNA, 25 bp, Homo sapien
aagagccattcctaccctggtgttc

SEQ ID NO: 5602273 - DNA, 25 bp, Homo sapien
atgataaggtcaaagtctccactac

SEQ ID NO: 5602274 - DNA, 25 bp, Homo sapien
agggccactcaccaagggattgtga

SEQ ID NO: 5602275 - DNA, 25 bp, Homo sapien
agatatgatgccttaagaacaattc

SEQ ID NO: 5602276 - DNA, 25 bp, Homo sapien
caacctccacactcagcccctgcac

SEQ ID NO: 5602277 - DNA, 25 bp, Homo sapien
gtctgtggacatgacactcaacctc

SEQ ID NO: 5602278 - DNA, 25 bp, Homo sapien
gtgcctagagaatagagtactgctc

SEQ ID NO: 5602279 - DNA, 25 bp, Homo sapien
cccgggaagatcaaaacaccctaca

SEQ ID NO: 5602280 - DNA, 25 bp, Homo sapien
tggtagcaataaagatgcccgggaa

SEQ ID NO: 5602281 - DNA, 25 bp, Homo sapien
gttgcctagcaggtggttgctttct

SEQ ID NO: 5602282 - DNA, 25 bp, Homo sapien
tggcacctacagatggagcttcata

SEQ ID NO: 5602283 - DNA, 25 bp, Homo sapien
gctgaaacactattaagttggtagc

SEQ ID NO: 5602284 - DNA, 25 bp, Homo sapien
ctcagtgcttatagatagtaggtaa

SEQ ID NO: 5602285 - DNA, 25 bp, Homo sapien
agcaggtggttgctttctgagcatt

SEQ ID NO: 5602286 - DNA, 25 bp, Homo sapien
tatagatagtaggtaagtaataaac

SEQ ID NO: 5602287 - DNA, 25 bp, Homo sapien
acttcaccaaagccctcgtcacctt

SEQ ID NO: 5602288 - DNA, 25 bp, Homo sapien
cccttagggaatattggtttgtatc

SEQ ID NO: 5602289 - DNA, 25 bp, Homo sapien
aaacaccctacaagagatgtcctgt

SEQ ID NO: 5602290 - DNA, 25 bp, Homo sapien
gtattaaatttactgcgggattaac

SEQ ID NO: 5602291 - DNA, 25 bp, Homo sapien
gttaatcccgcagtaaatttaatac

SEQ ID NO: 5602292 - DNA, 25 bp, Homo sapien
cgtacttaaaaatgcctatagcgat

SEQ ID NO: 5602293 - DNA, 25 bp, Homo sapien
tggaaaacaagagaatcgtacttaa

SEQ ID NO: 5602294 - DNA, 25 bp, Homo sapien
gctttgctacaaaggaatacctaag

SEQ ID NO: 5602295 - DNA, 25 bp, Homo sapien
ggctgcaagattgcctggtacaccc

SEQ ID NO: 5602296 - DNA, 25 bp, Homo sapien
tatagcgatagttactcaatagctt

SEQ ID NO: 5602297 - DNA, 25 bp, Homo sapien
gtgcaggtagagttttcatgagagg

SEQ ID NO: 5602298 - DNA, 25 bp, Homo sapien
accctagcaattatgatgtgcaggt

SEQ ID NO: 5602299 - DNA, 25 bp, Homo sapien
tgcatagaaaataggccaccacaca

SEQ ID NO: 5602300 - DNA, 25 bp, Homo sapien
aggccaccacacaaatgatatacca

SEQ ID NO: 5602301 - DNA, 25 bp, Homo sapien
aaggtggctgcatgcatagaaaata

SEQ ID NO: 5602302 - DNA, 25 bp, Homo sapien
cagaccactcttgtattaggctttt

SEQ ID NO: 5602303 - DNA, 25 bp, Homo sapien
gcctgggtcggaatagcatcaggct

SEQ ID NO: 5602304 - DNA, 25 bp, Homo sapien
aggcacatctggaaccctgtgggat

SEQ ID NO: 5602305 - DNA, 25 bp, Homo sapien
gaggggccaaactcctgttgctgtc

SEQ ID NO: 5602306 - DNA, 25 bp, Homo sapien
gtccttccttgcgctccaccctgcc

SEQ ID NO: 5602307 - DNA, 25 bp, Homo sapien
cgcccaagccatcattctcgaagac

SEQ ID NO: 5602308 - DNA, 25 bp, Homo sapien
tgtcccgagtccctcccccatgggc

SEQ ID NO: 5602309 - DNA, 25 bp, Homo sapien
cagccgtgtttgccttgccctgggc

SEQ ID NO: 5602310 - DNA, 25 bp, Homo sapien
ggggctgtcccatcgcagctccctc

SEQ ID NO: 5602311 - DNA, 25 bp, Homo sapien
tcgaagacgaagttgccattgtccc

SEQ ID NO: 5602312 - DNA, 25 bp, Homo sapien
cagctccctcagtgccagcaacctc

SEQ ID NO: 5602313 - DNA, 25 bp, Homo sapien
gctgtgtgacagccacatccctcac

SEQ ID NO: 5602314 - DNA, 25 bp, Homo sapien
tcactcaaaactagctgatgacatc

SEQ ID NO: 5602315 - DNA, 25 bp, Homo sapien
gaaatcaaagcttacataggcaaat

SEQ ID NO: 5602316 - DNA, 25 bp, Homo sapien
ctgatgacatctgaaagggagtttt

SEQ ID NO: 5602317 - DNA, 25 bp, Homo sapien
ggggaagttgctaatgtgtacagtt

SEQ ID NO: 5602318 - DNA, 25 bp, Homo sapien
tgtgttaacacaatgaatgcttcaa

SEQ ID NO: 5602319 - DNA, 25 bp, Homo sapien
tcatgaataatagttgctcaagcta

SEQ ID NO: 5602320 - DNA, 25 bp, Homo sapien
gtaaggcatataacctctctagacc

SEQ ID NO: 5602321 - DNA, 25 bp, Homo sapien
tagatatcatgaagaatgtgttgtt

SEQ ID NO: 5602322 - DNA, 25 bp, Homo sapien
atgaagtttgacctgtgtcgatcac

SEQ ID NO: 5602323 - DNA, 25 bp, Homo sapien
gcccagcttggcactatgaagtttg

SEQ ID NO: 5602324 - DNA, 25 bp, Homo sapien
atttgataaaggaacgatttgaatt

SEQ ID NO: 5602325 - DNA, 25 bp, Homo sapien
tttcagtgagaaatcccaggcacag

SEQ ID NO: 5602326 - DNA, 25 bp, Homo sapien
gggtgtgcacagcctttatggagac

SEQ ID NO: 5602327 - DNA, 25 bp, Homo sapien
gtttggcaactatctggaggtggcc

SEQ ID NO: 5602328 - DNA, 25 bp, Homo sapien
ggaaatgacaccaggagaccttgtt

SEQ ID NO: 5602329 - DNA, 25 bp, Homo sapien
gaaggtggcacgttcactccatctc

SEQ ID NO: 5602330 - DNA, 25 bp, Homo sapien
agggctgatccagaagctggtctgg

SEQ ID NO: 5602331 - DNA, 25 bp, Homo sapien
gcctccgttgttggcaaagtgagtc

SEQ ID NO: 5602332 - DNA, 25 bp, Homo sapien
ctagggcctatataaaaaagcagct

SEQ ID NO: 5602333 - DNA, 25 bp, Homo sapien
caggcacagcttgcaagcgcatctg

SEQ ID NO: 5602334 - DNA, 25 bp, Homo sapien
aaaagcagctcaaatggaaagtgtc

SEQ ID NO: 5602335 - DNA, 25 bp, Homo sapien
aaataaaacgcatcgcccaagcttc

SEQ ID NO: 5602336 - DNA, 25 bp, Homo sapien
acctccgcctcccgtcagcccttgt

SEQ ID NO: 5602337 - DNA, 25 bp, Homo sapien
aatgttgatctttatgtaggagctc

SEQ ID NO: 5602338 - DNA, 25 bp, Homo sapien
ccattattcccattgctgcagcaga

SEQ ID NO: 5602339 - DNA, 25 bp, Homo sapien
ctgcttgggtttgatagaagcaggc

SEQ ID NO: 5602340 - DNA, 25 bp, Homo sapien
agggaagttgcagaccctgctctgc

SEQ ID NO: 5602341 - DNA, 25 bp, Homo sapien
atctttatgtaggagctcactgttc

SEQ ID NO: 5602342 - DNA, 25 bp, Homo sapien
cgtcagcccttgtttcaaagggaag

SEQ ID NO: 5602343 - DNA, 25 bp, Homo sapien
attgctgcagcagaaattactgaaa

SEQ ID NO: 5602344 - DNA, 25 bp, Homo sapien
ataaaagacagagaagtgtgacttt

SEQ ID NO: 5602345 - DNA, 25 bp, Homo sapien
cctgctctgcttgggtttgatagaa

SEQ ID NO: 5602346 - DNA, 25 bp, Homo sapien
aaaggagaaacaaatgttgatcttt

SEQ ID NO: 5602347 - DNA, 25 bp, Homo sapien
gcggcggcctccagtcttcctttcc

SEQ ID NO: 5602348 - DNA, 25 bp, Homo sapien
ctgcctcactgtcagctccgggaag

SEQ ID NO: 5602349 - DNA, 25 bp, Homo sapien
gatgcaaatgatctttccggccctc

SEQ ID NO: 5602350 - DNA, 25 bp, Homo sapien
gcttccctgttgttcgaggcccctc

SEQ ID NO: 5602351 - DNA, 25 bp, Homo sapien
tccacccagtccagcctcgcgaggg

SEQ ID NO: 5602352 - DNA, 25 bp, Homo sapien
tccctgctgtcagggtgagaaacgg

SEQ ID NO: 5602353 - DNA, 25 bp, Homo sapien
atttccatttcgtggcgggaaggta

SEQ ID NO: 5602354 - DNA, 25 bp, Homo sapien
atccgggatgtctgcctcactgtca

SEQ ID NO: 5602355 - DNA, 25 bp, Homo sapien
agttgcgtggctgcacctgtgataa

SEQ ID NO: 5602356 - DNA, 25 bp, Homo sapien
gtgctccacggggcttccctgttgt

SEQ ID NO: 5602357 - DNA, 25 bp, Homo sapien
ggtaacccaaaagttgcgtggctgc

SEQ ID NO: 5602358 - DNA, 25 bp, Homo sapien
agaggtctacagagccagaccagaa

SEQ ID NO: 5602359 - DNA, 25 bp, Homo sapien
gtgtgtctgtgggagacacagaacc

SEQ ID NO: 5602360 - DNA, 25 bp, Homo sapien
gtgtctgtgggagacacagaaccaa

SEQ ID NO: 5602361 - DNA, 25 bp, Homo sapien
tctgtgggagacacagaaccaagaa

SEQ ID NO: 5602362 - DNA, 25 bp, Homo sapien
gaggtctacagagccagaccagaag

SEQ ID NO: 5602363 - DNA, 25 bp, Homo sapien
ttgtgtgtctgtgggagacacagaa

SEQ ID NO: 5602364 - DNA, 25 bp, Homo sapien
ggtctacagagccagaccagaagag

SEQ ID NO: 5602365 - DNA, 25 bp, Homo sapien
ggaaattgtgtgtctgtgggagaca

SEQ ID NO: 5602366 - DNA, 25 bp, Homo sapien
aggtctacagagccagaccagaaga

SEQ ID NO: 5602367 - DNA, 25 bp, Homo sapien
gtctgtgggagacacagaaccaaga

SEQ ID NO: 5602368 - DNA, 25 bp, Homo sapien
cagaggtctacagagccagaccaga

SEQ ID NO: 5602369 - DNA, 25 bp, Homo sapien
ctcccaaaagtgtgctggaagacaa

SEQ ID NO: 5602370 - DNA, 25 bp, Homo sapien
gtacagaacagcccggaggttctta

SEQ ID NO: 5602371 - DNA, 25 bp, Homo sapien
ctagggaatgtgaacattatagtcc

SEQ ID NO: 5602372 - DNA, 25 bp, Homo sapien
gcagtgaatttatccagagcaaggc

SEQ ID NO: 5602373 - DNA, 25 bp, Homo sapien
attatagtccaggtacagaacagcc

SEQ ID NO: 5602374 - DNA, 25 bp, Homo sapien
gaaaaaggaggtcatattcacagcc

SEQ ID NO: 5602375 - DNA, 25 bp, Homo sapien
catctcccatgaagcgcgaaggagc

SEQ ID NO: 5602376 - DNA, 25 bp, Homo sapien
ggaggttcttaagtaaagcagcacc

SEQ ID NO: 5602377 - DNA, 25 bp, Homo sapien
atgtgtgtgcatgtaagcaggtttt

SEQ ID NO: 5602378 - DNA, 25 bp, Homo sapien
gaccatcaaggctggtgttggaaga

SEQ ID NO: 5602379 - DNA, 25 bp, Homo sapien
gggtgagaagcagtgaatttatcca

SEQ ID NO: 5602380 - DNA, 25 bp, Homo sapien
acctactatacaccaggccccgtgc

SEQ ID NO: 5602381 - DNA, 25 bp, Homo sapien
attaactaaagtgagcaaaacatct

SEQ ID NO: 5602382 - DNA, 25 bp, Homo sapien
gttcggtctttggctctggtttctc

SEQ ID NO: 5602383 - DNA, 25 bp, Homo sapien
gaagcaagctgctccagaaactgca

SEQ ID NO: 5602384 - DNA, 25 bp, Homo sapien
tccaagggatgtattataaaaccat

SEQ ID NO: 5602385 - DNA, 25 bp, Homo sapien
gctgtgcattccagccactggccca

SEQ ID NO: 5602386 - DNA, 25 bp, Homo sapien
cactgagatttcaaactgatgagct

SEQ ID NO: 5602387 - DNA, 25 bp, Homo sapien
ttcgagcttgtgatatccatgaatc

SEQ ID NO: 5602388 - DNA, 25 bp, Homo sapien
caaactgatgagctccaaatgaaac

SEQ ID NO: 5602389 - DNA, 25 bp, Homo sapien
tcaatttggaagtctcactgagatt

SEQ ID NO: 5602390 - DNA, 25 bp, Homo sapien
gccccgtgctgctgtgcattccagc

SEQ ID NO: 5602391 - DNA, 25 bp, Homo sapien
gccaaaaaataggcagaagactgcc

SEQ ID NO: 5602392 - DNA, 25 bp, Homo sapien
ccactcatgctctggtgctgggcgt

SEQ ID NO: 5602393 - DNA, 25 bp, Homo sapien
agtctgtgactaagctagctgacct

SEQ ID NO: 5602394 - DNA, 25 bp, Homo sapien
gagacctaaactgtaatgcttcata

SEQ ID NO: 5602395 - DNA, 25 bp, Homo sapien
gctgggcgtcctacatctgactcct

SEQ ID NO: 5602396 - DNA, 25 bp, Homo sapien
gctagctgaccttgcataccgtatg

SEQ ID NO: 5602397 - DNA, 25 bp, Homo sapien
gtaaacacttgccttgcagccaaaa

SEQ ID NO: 5602398 - DNA, 25 bp, Homo sapien
tgatgtcaacaacccgagtcctttt

SEQ ID NO: 5602399 - DNA, 25 bp, Homo sapien
actgccagaaagtgaagtctgtgac

SEQ ID NO: 5602400 - DNA, 25 bp, Homo sapien
accgtatgctgacatccactcatgc

SEQ ID NO: 5602401 - DNA, 25 bp, Homo sapien
aaatcatctgttcatagaaggagaa

SEQ ID NO: 5602402 - DNA, 25 bp, Homo sapien
gttgcaagggttgtaacagtgtaaa

SEQ ID NO: 5602403 - DNA, 25 bp, Homo sapien
atacaggcatcaaaagtaatgtgtt

SEQ ID NO: 5602404 - DNA, 25 bp, Homo sapien
gtaccaatagcctgagaaagattcc

SEQ ID NO: 5602405 - DNA, 25 bp, Homo sapien
aaaaagcaaaactctatgacctagc

SEQ ID NO: 5602406 - DNA, 25 bp, Homo sapien
acagaaaaaacactagcacgcatac

SEQ ID NO: 5602407 - DNA, 25 bp, Homo sapien
ggatgtccccaggagcctttcagca

SEQ ID NO: 5602408 - DNA, 25 bp, Homo sapien
aaacaacctaacagcccaccaatcc

SEQ ID NO: 5602409 - DNA, 25 bp, Homo sapien
tcagcaggcttgtaagatcctcgct

SEQ ID NO: 5602410 - DNA, 25 bp, Homo sapien
gcacgcatacaccagaaaacatcac

SEQ ID NO: 5602411 - DNA, 25 bp, Homo sapien
gaaaagaatccatgtgttaaagctc

SEQ ID NO: 5602412 - DNA, 25 bp, Homo sapien
gtctcaggacccctggatgtcccca

SEQ ID NO: 5602413 - DNA, 25 bp, Homo sapien
cacttcccacatgtgccctgcagtc

SEQ ID NO: 5602414 - DNA, 25 bp, Homo sapien
agcagtggcaaatgcctggacatac

SEQ ID NO: 5602415 - DNA, 25 bp, Homo sapien
ctaagtaagaacaaaatagccagtt

SEQ ID NO: 5602416 - DNA, 25 bp, Homo sapien
gattgcgttgtcataggagagctaa

SEQ ID NO: 5602417 - DNA, 25 bp, Homo sapien
gagagctatttaggagcagtggcaa

SEQ ID NO: 5602418 - DNA, 25 bp, Homo sapien
aatcacgatacccaagctcaaggcg

SEQ ID NO: 5602419 - DNA, 25 bp, Homo sapien
tagagaagacagatccctaaataga

SEQ ID NO: 5602420 - DNA, 25 bp, Homo sapien
tgtaggattctgggattcagatacc

SEQ ID NO: 5602421 - DNA, 25 bp, Homo sapien
acctaactcatgaccagaagacttc

SEQ ID NO: 5602422 - DNA, 25 bp, Homo sapien
atgtaagaacatagattatcgatca

SEQ ID NO: 5602423 - DNA, 25 bp, Homo sapien
taggagagctaagctctggcactac

SEQ ID NO: 5602424 - DNA, 25 bp, Homo sapien
ctagaagttatttcaagagcaataa

SEQ ID NO: 5602425 - DNA, 25 bp, Homo sapien
ttattgctcttgaaataacttctag

SEQ ID NO: 5602426 - DNA, 25 bp, Homo sapien
agatgtctaggaatccagcttggag

SEQ ID NO: 5602427 - DNA, 25 bp, Homo sapien
acaagcatctgtcaggcgcctacca

SEQ ID NO: 5602428 - DNA, 25 bp, Homo sapien
ctgtcaggcgcctaccacctgccag

SEQ ID NO: 5602429 - DNA, 25 bp, Homo sapien
gaatccagcttggaggatgcagttg

SEQ ID NO: 5602430 - DNA, 25 bp, Homo sapien
tcctggagttgatgctcctctggga

SEQ ID NO: 5602431 - DNA, 25 bp, Homo sapien
ccctgctgctcgaccctcaaagttc

SEQ ID NO: 5602432 - DNA, 25 bp, Homo sapien
atctatcctgtgccgtgggcatggg

SEQ ID NO: 5602433 - DNA, 25 bp, Homo sapien
atgacattgatagaaatccctgttc

SEQ ID NO: 5602434 - DNA, 25 bp, Homo sapien
cctgccagagtctgacggcaggact

SEQ ID NO: 5602435 - DNA, 25 bp, Homo sapien
ggatgcagcagtgaatgacattgat

SEQ ID NO: 5602436 - DNA, 25 bp, Homo sapien
atctgtttcccaggaagggtgtggg

SEQ ID NO: 5602437 - DNA, 25 bp, Homo sapien
aaaatgtatgaagtcacaatatgag

SEQ ID NO: 5602438 - DNA, 25 bp, Homo sapien
aaatgactttaagaagaaaacagaa

SEQ ID NO: 5602439 - DNA, 25 bp, Homo sapien
agggtatattcactactagggttac

SEQ ID NO: 5602440 - DNA, 25 bp, Homo sapien
attattcaagggcataataagcatt

SEQ ID NO: 5602441 - DNA, 25 bp, Homo sapien
tgaggcaatgtaaggccaatgctta

SEQ ID NO: 5602442 - DNA, 25 bp, Homo sapien
attactaccttatgcacagactact

SEQ ID NO: 5602443 - DNA, 25 bp, Homo sapien
tcctcttgaggcaatgtaaggccaa

SEQ ID NO: 5602444 - DNA, 25 bp, Homo sapien
taataagcattatgtcaactgtata

SEQ ID NO: 5602445 - DNA, 25 bp, Homo sapien
cactactagggttacaaaatgtatg

SEQ ID NO: 5602446 - DNA, 25 bp, Homo sapien
gaagtcacaatatgagttatggatt

SEQ ID NO: 5602447 - DNA, 25 bp, Homo sapien
gcttatggataagaagtaaaaacaa

SEQ ID NO: 5602448 - DNA, 25 bp, Homo sapien
taggcttgccagaccaggtttggta

SEQ ID NO: 5602449 - DNA, 25 bp, Homo sapien
cacttccaggtcgttgagtttttcc

SEQ ID NO: 5602450 - DNA, 25 bp, Homo sapien
tcacaaaagtaagacaatgattcac

SEQ ID NO: 5602451 - DNA, 25 bp, Homo sapien
aggtttggtagcaactatcagttat

SEQ ID NO: 5602452 - DNA, 25 bp, Homo sapien
attttgttggggcccagtcatgggc

SEQ ID NO: 5602453 - DNA, 25 bp, Homo sapien
gaagagcaatgaacaggactattat

SEQ ID NO: 5602454 - DNA, 25 bp, Homo sapien
gctcattcatttaggcttgccagac

SEQ ID NO: 5602455 - DNA, 25 bp, Homo sapien
gaaatgactgtgcagaggctttagg

SEQ ID NO: 5602456 - DNA, 25 bp, Homo sapien
tccttaaatggttacatcgtagatt

SEQ ID NO: 5602457 - DNA, 25 bp, Homo sapien
atgaaacaattcacgaagagcaatg

SEQ ID NO: 5602458 - DNA, 25 bp, Homo sapien
attctaaaacgtgactctgctgatg

SEQ ID NO: 5602459 - DNA, 25 bp, Homo sapien
acaacaatgtctactgggatgagca

SEQ ID NO: 5602460 - DNA, 25 bp, Homo sapien
gatgtctgtgtatcctggtatgact

SEQ ID NO: 5602461 - DNA, 25 bp, Homo sapien
tgaactaactgaaagtaaaatggtc

SEQ ID NO: 5602462 - DNA, 25 bp, Homo sapien
acaaaggacctgcactacgtaaatg

SEQ ID NO: 5602463 - DNA, 25 bp, Homo sapien
atctccagctctacatgaactaact

SEQ ID NO: 5602464 - DNA, 25 bp, Homo sapien
aatgataaaccgtctaggcaaatat

SEQ ID NO: 5602465 - DNA, 25 bp, Homo sapien
aatgcatattagtgaatgtgagtaa

SEQ ID NO: 5602466 - DNA, 25 bp, Homo sapien
agtaactgtgaaacaaaggacctgc

SEQ ID NO: 5602467 - DNA, 25 bp, Homo sapien
tctactgggatgagcaaataatgat

SEQ ID NO: 5602468 - DNA, 25 bp, Homo sapien
aactgaaagtaaaatggtccagaat

SEQ ID NO: 5602469 - DNA, 25 bp, Homo sapien
agtaaaaggtacaacaatgtctact

SEQ ID NO: 5602470 - DNA, 25 bp, Homo sapien
aaaaatcttcaaattacagtttctc

SEQ ID NO: 5602471 - DNA, 25 bp, Homo sapien
atttgaaataccatgctgacagcac

SEQ ID NO: 5602472 - DNA, 25 bp, Homo sapien
ataagtatcacactcaaaaatcttc

SEQ ID NO: 5602473 - DNA, 25 bp, Homo sapien
gaagcatttgaaataccatgctgac

SEQ ID NO: 5602474 - DNA, 25 bp, Homo sapien
gctgacagcactttccataaattac

SEQ ID NO: 5602475 - DNA, 25 bp, Homo sapien
agaactttgttgcagggttcctggc

SEQ ID NO: 5602476 - DNA, 25 bp, Homo sapien
tatctcctcagggtaaatagaactt

SEQ ID NO: 5602477 - DNA, 25 bp, Homo sapien
taatgatcccattgactagtttaaa

SEQ ID NO: 5602478 - DNA, 25 bp, Homo sapien
aatagaactttgttgcagggttcct

SEQ ID NO: 5602479 - DNA, 25 bp, Homo sapien
tgcagggttcctggctttggtgtga

SEQ ID NO: 5602480 - DNA, 25 bp, Homo sapien
ggtggttggtaaatcaagcctgatt

SEQ ID NO: 5602481 - DNA, 25 bp, Homo sapien
acgtcctatcaattggtagtctgtc

SEQ ID NO: 5602482 - DNA, 25 bp, Homo sapien
ttggtagtctgtcctttgtacttcc

SEQ ID NO: 5602483 - DNA, 25 bp, Homo sapien
tttctccattccctgaagaggatga

SEQ ID NO: 5602484 - DNA, 25 bp, Homo sapien
atgtttagatcacagttataagcaa

SEQ ID NO: 5602485 - DNA, 25 bp, Homo sapien
ccattccctgaagaggatgagagga

SEQ ID NO: 5602486 - DNA, 25 bp, Homo sapien
ggacacggagccaattctctggaac

SEQ ID NO: 5602487 - DNA, 25 bp, Homo sapien
gaaatccaagaagacgtcctatcaa

SEQ ID NO: 5602488 - DNA, 25 bp, Homo sapien
aaagccacgcataggaagctaatga

SEQ ID NO: 5602489 - DNA, 25 bp, Homo sapien
ttctcaaatccaagaagagaaatga

SEQ ID NO: 5602490 - DNA, 25 bp, Homo sapien
attttcaagttgtcagaaattgtgc

SEQ ID NO: 5602491 - DNA, 25 bp, Homo sapien
tagggtacctattgcatgattatgt

SEQ ID NO: 5602492 - DNA, 25 bp, Homo sapien
tttagtcacttaagacactggaatt

SEQ ID NO: 5602493 - DNA, 25 bp, Homo sapien
tcaaactaagttaaacaaacactca

SEQ ID NO: 5602494 - DNA, 25 bp, Homo sapien
ctaccctaaggtgacagcttcaaac

SEQ ID NO: 5602495 - DNA, 25 bp, Homo sapien
tatatactaggaactgtgaaagata

SEQ ID NO: 5602496 - DNA, 25 bp, Homo sapien
acaaaaaatactactatctgccctc

SEQ ID NO: 5602497 - DNA, 25 bp, Homo sapien
gtcttgcagtctaccctaaggtgac

SEQ ID NO: 5602498 - DNA, 25 bp, Homo sapien
ctaatcagtacattgtcttgcagtc

SEQ ID NO: 5602499 - DNA, 25 bp, Homo sapien
atgaagacaacaagtaggccgttta

SEQ ID NO: 5602500 - DNA, 25 bp, Homo sapien
atcaagttaaatgaagacaacaagt

SEQ ID NO: 5602501 - DNA, 25 bp, Homo sapien
agacactggaatttcataagacaga

SEQ ID NO: 5602502 - DNA, 25 bp, Homo sapien
acaaattgtgccaaatctaatcagt

SEQ ID NO: 5602503 - DNA, 25 bp, Homo sapien
cattaactgacgagagatgaatagg

SEQ ID NO: 5602504 - DNA, 25 bp, Homo sapien
catgcataaaaagacactgggattt

SEQ ID NO: 5602505 - DNA, 25 bp, Homo sapien
agccccaacctcacacgacgggttc

SEQ ID NO: 5602506 - DNA, 25 bp, Homo sapien
attttacaagacaagacagcagctg

SEQ ID NO: 5602507 - DNA, 25 bp, Homo sapien
gcataaaaagacactgggatttgtg

SEQ ID NO: 5602508 - DNA, 25 bp, Homo sapien
gacatattttacaagacaagacagc

SEQ ID NO: 5602509 - DNA, 25 bp, Homo sapien
ggaaggactagagacattaactgac

SEQ ID NO: 5602510 - DNA, 25 bp, Homo sapien
cacctttacaggaaggactagagac

SEQ ID NO: 5602511 - DNA, 25 bp, Homo sapien
tgaggtgatcagaatggctttactg

SEQ ID NO: 5602512 - DNA, 25 bp, Homo sapien
cagacttcattaagggaccatttgc

SEQ ID NO: 5602513 - DNA, 25 bp, Homo sapien
attaagggaccatttgcttagaaat

SEQ ID NO: 5602514 - DNA, 25 bp, Homo sapien
catttttacacagagcaaaggactt

SEQ ID NO: 5602515 - DNA, 25 bp, Homo sapien
gagcaaaggacttgctcagtgacct

SEQ ID NO: 5602516 - DNA, 25 bp, Homo sapien
catggaggcttctacagaggctcta

SEQ ID NO: 5602517 - DNA, 25 bp, Homo sapien
gagatgccagcccgttctggccagc

SEQ ID NO: 5602518 - DNA, 25 bp, Homo sapien
ctaatgactttcaggatcagccttt

SEQ ID NO: 5602519 - DNA, 25 bp, Homo sapien
tggataaaagaggccaagttcttcc

SEQ ID NO: 5602520 - DNA, 25 bp, Homo sapien
tcatggaaaggacacctaatgactt

SEQ ID NO: 5602521 - DNA, 25 bp, Homo sapien
ggaaggcacaacttcatggaaagga

SEQ ID NO: 5602522 - DNA, 25 bp, Homo sapien
gggctgtattcgctccacactgctc

SEQ ID NO: 5602523 - DNA, 25 bp, Homo sapien
ctccacactgctcgggccgagtcca

SEQ ID NO: 5602524 - DNA, 25 bp, Homo sapien
tacagaggctctatgagatgccagc

SEQ ID NO: 5602525 - DNA, 25 bp, Homo sapien
agggtctgattcgacgggtagtgtc

SEQ ID NO: 5602526 - DNA, 25 bp, Homo sapien
gacactacccgtcgaatcagaccct

SEQ ID NO: 5602527 - DNA, 25 bp, Homo sapien
attgcccaaagatagaatgaattgt

SEQ ID NO: 5602528 - DNA, 25 bp, Homo sapien
tcagtgggagtgttcaatactaagc

SEQ ID NO: 5602529 - DNA, 25 bp, Homo sapien
tacagttagctgtcagtgggagtgt

SEQ ID NO: 5602530 - DNA, 25 bp, Homo sapien
cctcttcacagggctgcttgcacgt

SEQ ID NO: 5602531 - DNA, 25 bp, Homo sapien
attgagtgatgaccacatgcaggca

SEQ ID NO: 5602532 - DNA, 25 bp, Homo sapien
gggtcagcagcttggctgtgtgttt

SEQ ID NO: 5602533 - DNA, 25 bp, Homo sapien
aggtgaatcactttacatggctggc

SEQ ID NO: 5602534 - DNA, 25 bp, Homo sapien
ctcacaaagtctgtgggtcagcagc

SEQ ID NO: 5602535 - DNA, 25 bp, Homo sapien
tgttttgagagatggtacagttagc

SEQ ID NO: 5602536 - DNA, 25 bp, Homo sapien
tcatgaggttgcatctgaaggcttg

SEQ ID NO: 5602537 - DNA, 25 bp, Homo sapien
aaacagtgtcttagaacaacagtaa

SEQ ID NO: 5602538 - DNA, 25 bp, Homo sapien
agccagcatggaaactcaagtacaa

SEQ ID NO: 5602539 - DNA, 25 bp, Homo sapien
gcaaaccctgtggccaaatcaaatc

SEQ ID NO: 5602540 - DNA, 25 bp, Homo sapien
aatatcaccagcacagtggagtaac

SEQ ID NO: 5602541 - DNA, 25 bp, Homo sapien
ggaagagagaatttagttaagaaca

SEQ ID NO: 5602542 - DNA, 25 bp, Homo sapien
gatgaaatgaaaacagcaaaccctg

SEQ ID NO: 5602543 - DNA, 25 bp, Homo sapien
gttgtctggatgacgatcacaggag

SEQ ID NO: 5602544 - DNA, 25 bp, Homo sapien
acaggagctagaaggaaattttaaa

SEQ ID NO: 5602545 - DNA, 25 bp, Homo sapien
gttaagaacataatctgcccagcaa

SEQ ID NO: 5602546 - DNA, 25 bp, Homo sapien
acagtggagtaacaagatgaaatga

SEQ ID NO: 5602547 - DNA, 25 bp, Homo sapien
agctcaaactgatcatgtcttcccc

SEQ ID NO: 5602548 - DNA, 25 bp, Homo sapien
tctggaagtaaaagccagcatggaa

SEQ ID NO: 5602549 - DNA, 25 bp, Homo sapien
attcagaatgcaactagcatcctaa

SEQ ID NO: 5602550 - DNA, 25 bp, Homo sapien
attaacaactgtgcattgagaatat

SEQ ID NO: 5602551 - DNA, 25 bp, Homo sapien
tgaaatatattttaacggcaattac

SEQ ID NO: 5602552 - DNA, 25 bp, Homo sapien
aacatttgaaagacagaaagagaga

SEQ ID NO: 5602553 - DNA, 25 bp, Homo sapien
atcaaaataagatgaccagattaat

SEQ ID NO: 5602554 - DNA, 25 bp, Homo sapien
aaagccaaaagaacatttgaaagac

SEQ ID NO: 5602555 - DNA, 25 bp, Homo sapien
aaccagaaacagtaattcagaatgc

SEQ ID NO: 5602556 - DNA, 25 bp, Homo sapien
tggagagtttgagattgagacttct

SEQ ID NO: 5602557 - DNA, 25 bp, Homo sapien
attgagaatatttgaacatgttgtt

SEQ ID NO: 5602558 - DNA, 25 bp, Homo sapien
aacttagcattcacagtattcaatc

SEQ ID NO: 5602559 - DNA, 25 bp, Homo sapien
taatagaatgttaaagccaaaagaa

SEQ ID NO: 5602560 - DNA, 25 bp, Homo sapien
ttccttgttgattgatgattgcttc

SEQ ID NO: 5602561 - DNA, 25 bp, Homo sapien
taatatataaactgtaggatacaaa

SEQ ID NO: 5602562 - DNA, 25 bp, Homo sapien
aggatccaagcttacgtacgcgtgc

SEQ ID NO: 5602563 - DNA, 25 bp, Homo sapien
aataacaaacactgagagaataaaa

SEQ ID NO: 5602564 - DNA, 25 bp, Homo sapien
aaatctagtcttgcagatctgttcc

SEQ ID NO: 5602565 - DNA, 25 bp, Homo sapien
ggccgctctagaggatccaagctta

SEQ ID NO: 5602566 - DNA, 25 bp, Homo sapien
gagagaataaaaaatggaagaccta

SEQ ID NO: 5602567 - DNA, 25 bp, Homo sapien
aatggaagacctagtccccttccta

SEQ ID NO: 5602568 - DNA, 25 bp, Homo sapien
acgcgtgcatgcgacgtcatagctc

SEQ ID NO: 5602569 - DNA, 25 bp, Homo sapien
attattcacagggtggtatggacga

SEQ ID NO: 5602570 - DNA, 25 bp, Homo sapien
agtggagaagtagttgtcaagtaaa

SEQ ID NO: 5602571 - DNA, 25 bp, Homo sapien
atgccatgcactgatttttacgatc

SEQ ID NO: 5602572 - DNA, 25 bp, Homo sapien
atcacaagactctaatgccatgcac

SEQ ID NO: 5602573 - DNA, 25 bp, Homo sapien
agaaggccctttaacatcacaagac

SEQ ID NO: 5602574 - DNA, 25 bp, Homo sapien
aaaagaacataatctactccaccac

SEQ ID NO: 5602575 - DNA, 25 bp, Homo sapien
ttccctgccccaacatccaatattt

SEQ ID NO: 5602576 - DNA, 25 bp, Homo sapien
ttgtggttaagtttttactgctcaa

SEQ ID NO: 5602577 - DNA, 25 bp, Homo sapien
caatatttattgagaaggcccttta

SEQ ID NO: 5602578 - DNA, 25 bp, Homo sapien
tattgagaaggccctttaacatcac

SEQ ID NO: 5602579 - DNA, 25 bp, Homo sapien
gctcaagttcatcattccctgcccc

SEQ ID NO: 5602580 - DNA, 25 bp, Homo sapien
atctactccaccaccaataaccttt

SEQ ID NO: 5602581 - DNA, 25 bp, Homo sapien
tgtctgcatgcatatcatatatcat

SEQ ID NO: 5602582 - DNA, 25 bp, Homo sapien
gcatcagtgaagagtcctgagactt

SEQ ID NO: 5602583 - DNA, 25 bp, Homo sapien
aatggaatgaccagaatgtgggtaa

SEQ ID NO: 5602584 - DNA, 25 bp, Homo sapien
gagaggggtctctgaattatttctt

SEQ ID NO: 5602585 - DNA, 25 bp, Homo sapien
atgggtcatagtttgctgagtctgc

SEQ ID NO: 5602586 - DNA, 25 bp, Homo sapien
tgtttcaggaagtaaaagatcaggg

SEQ ID NO: 5602587 - DNA, 25 bp, Homo sapien
gggtccaatagtagaagcagcatca

SEQ ID NO: 5602588 - DNA, 25 bp, Homo sapien
acaggattttgctcatgggtcatag

SEQ ID NO: 5602589 - DNA, 25 bp, Homo sapien
ctgagagccttctagccacaatgga

SEQ ID NO: 5602590 - DNA, 25 bp, Homo sapien
tgttgagttccagggtccaatagta

SEQ ID NO: 5602591 - DNA, 25 bp, Homo sapien
ttgcattggccaagacaaaagtgag

SEQ ID NO: 5602592 - DNA, 25 bp, Homo sapien
cttaagctctgagtagaggaaggaa

SEQ ID NO: 5602593 - DNA, 25 bp, Homo sapien
ttaataagacaaatcccacacttgc

SEQ ID NO: 5602594 - DNA, 25 bp, Homo sapien
attccttgagcttagtaagaattat

SEQ ID NO: 5602595 - DNA, 25 bp, Homo sapien
gcggtgaccctgcttccttccttgc

SEQ ID NO: 5602596 - DNA, 25 bp, Homo sapien
tgccacacagtatcagattttaata

SEQ ID NO: 5602597 - DNA, 25 bp, Homo sapien
agacattttataccaagagtgaagc

SEQ ID NO: 5602598 - DNA, 25 bp, Homo sapien
tctcggaagaatgttagctcccctg

SEQ ID NO: 5602599 - DNA, 25 bp, Homo sapien
tccaagtcctccactgcagctgcat

SEQ ID NO: 5602600 - DNA, 25 bp, Homo sapien
aatcccacacttgcggtgaccctgc

SEQ ID NO: 5602601 - DNA, 25 bp, Homo sapien
ctgcagctgcatatctctctctcat

SEQ ID NO: 5602602 - DNA, 25 bp, Homo sapien
tttactttaacatggagctcagaca

SEQ ID NO: 5602603 - DNA, 25 bp, Homo sapien
ttataccaagagtgaagcaaactgc

SEQ ID NO: 5602604 - DNA, 25 bp, Homo sapien
ctatcacctgatggtagcatgcttc

SEQ ID NO: 5602605 - DNA, 25 bp, Homo sapien
tcttttccagattgaggcagactgt

SEQ ID NO: 5602606 - DNA, 25 bp, Homo sapien
ttgtaatcaggatcatgaagctatg

SEQ ID NO: 5602607 - DNA, 25 bp, Homo sapien
gaggcagactgttaacgttggcttt

SEQ ID NO: 5602608 - DNA, 25 bp, Homo sapien
acagctagtatgtgaaagagaaaga

SEQ ID NO: 5602609 - DNA, 25 bp, Homo sapien
atgaagctatgaaaggccctactat

SEQ ID NO: 5602610 - DNA, 25 bp, Homo sapien
gagaaagaatctgaacctaggcatc

SEQ ID NO: 5602611 - DNA, 25 bp, Homo sapien
ttgttggggtcagtgtctcaaatac

SEQ ID NO: 5602612 - DNA, 25 bp, Homo sapien
agaaatttgtgaaaggcagtacagc

SEQ ID NO: 5602613 - DNA, 25 bp, Homo sapien
cctatgcagtcagtgtgtaaatact

SEQ ID NO: 5602614 - DNA, 25 bp, Homo sapien
ttacccctatagcaaggacagaaac

SEQ ID NO: 5602615 - DNA, 25 bp, Homo sapien
gaaaatggagctgaccttcacactc

SEQ ID NO: 5602616 - DNA, 25 bp, Homo sapien
tagatatgtgaccactgagcaggcg

SEQ ID NO: 5602617 - DNA, 25 bp, Homo sapien
gttaaacagcaatcactaagtgcct

SEQ ID NO: 5602618 - DNA, 25 bp, Homo sapien
tttagtaagacatcccaactgggaa

SEQ ID NO: 5602619 - DNA, 25 bp, Homo sapien
ttacaacagaaaggttagagagaaa

SEQ ID NO: 5602620 - DNA, 25 bp, Homo sapien
agtaaaaatctggttggtgagacac

SEQ ID NO: 5602621 - DNA, 25 bp, Homo sapien
aatgatacttagcctcaagggcagc

SEQ ID NO: 5602622 - DNA, 25 bp, Homo sapien
cttgaaggaggtggtactttttatc

SEQ ID NO: 5602623 - DNA, 25 bp, Homo sapien
atttgtatgacaaaggcagacggag

SEQ ID NO: 5602624 - DNA, 25 bp, Homo sapien
agcacccagcacagtccatcccctg

SEQ ID NO: 5602625 - DNA, 25 bp, Homo sapien
ccagaaaacggctcacacgtgactt

SEQ ID NO: 5602626 - DNA, 25 bp, Homo sapien
tctcctgccctctcccgtgccgagc

SEQ ID NO: 5602627 - DNA, 25 bp, Homo sapien
gcccagctcccctcgtagcccactc

SEQ ID NO: 5602628 - DNA, 25 bp, Homo sapien
tcgcgggctgccttctaacccctac

SEQ ID NO: 5602629 - DNA, 25 bp, Homo sapien
gccccgcgcttaggtcctctcctgc

SEQ ID NO: 5602630 - DNA, 25 bp, Homo sapien
ccaacgttctctgtgccgagggtgg

SEQ ID NO: 5602631 - DNA, 25 bp, Homo sapien
accgtctccttagcccgcagagagc

SEQ ID NO: 5602632 - DNA, 25 bp, Homo sapien
atcctgttcccgctgtcctcttccc

SEQ ID NO: 5602633 - DNA, 25 bp, Homo sapien
gcgcttacgacgccaccaacgttct

SEQ ID NO: 5602634 - DNA, 25 bp, Homo sapien
gatataaggccagagattcacagta

SEQ ID NO: 5602635 - DNA, 25 bp, Homo sapien
ccgcagagagcttagctgactcttc

SEQ ID NO: 5602636 - DNA, 25 bp, Homo sapien
ggttcccggctctcaaatcctgttc

SEQ ID NO: 5602637 - DNA, 25 bp, Homo sapien
aatgaaggtcaaagatttaaggcaa

SEQ ID NO: 5602638 - DNA, 25 bp, Homo sapien
gaaagggaaatgctgctagcctaaa

SEQ ID NO: 5602639 - DNA, 25 bp, Homo sapien
agcggtttagataaggcctagcaca

SEQ ID NO: 5602640 - DNA, 25 bp, Homo sapien
ctgggcttttagtgtgactgtcacc

SEQ ID NO: 5602641 - DNA, 25 bp, Homo sapien
tacagtttcacatggggaaagtgtc

SEQ ID NO: 5602642 - DNA, 25 bp, Homo sapien
caattcagaacagccagtccctaaa

SEQ ID NO: 5602643 - DNA, 25 bp, Homo sapien
atatattgcacagtggtggagtctg

SEQ ID NO: 5602644 - DNA, 25 bp, Homo sapien
ggcctagcacagagaacaattcaga

SEQ ID NO: 5602645 - DNA, 25 bp, Homo sapien
gaaataattagaattgtgcagccac

SEQ ID NO: 5602646 - DNA, 25 bp, Homo sapien
cacctgagtagtatacgatgtaccc

SEQ ID NO: 5602647 - DNA, 25 bp, Homo sapien
caaagatttaaggcaagcggtttag

SEQ ID NO: 5602648 - DNA, 25 bp, Homo sapien
ctctggtgagggaaaaggccttacg

SEQ ID NO: 5602649 - DNA, 25 bp, Homo sapien
cgtaaggccttttccctcaccagag

SEQ ID NO: 5602650 - DNA, 25 bp, Homo sapien
agagtctgctggtgacagaatccct

SEQ ID NO: 5602651 - DNA, 25 bp, Homo sapien
ctgacttcgttggtctaaaaacatc

SEQ ID NO: 5602652 - DNA, 25 bp, Homo sapien
gagtatgcaattctaggatgacaac

SEQ ID NO: 5602653 - DNA, 25 bp, Homo sapien
gcaaccacaatcacttttagaacat

SEQ ID NO: 5602654 - DNA, 25 bp, Homo sapien
ttacactggttatagctgagatatc

SEQ ID NO: 5602655 - DNA, 25 bp, Homo sapien
acaaattcttacacagtcctccctt

SEQ ID NO: 5602656 - DNA, 25 bp, Homo sapien
aatgtgattaggtatgtggtagttt

SEQ ID NO: 5602657 - DNA, 25 bp, Homo sapien
tgctggtgacagaatccctgacttc

SEQ ID NO: 5602658 - DNA, 25 bp, Homo sapien
gctgagatatctgctgctatgttgc

SEQ ID NO: 5602659 - DNA, 25 bp, Homo sapien
ggctcttggcatattcagcatattc

SEQ ID NO: 5602660 - DNA, 25 bp, Homo sapien
gttgctcctcaaaaggtagtatgtc

SEQ ID NO: 5602661 - DNA, 25 bp, Homo sapien
tcgaaggctgtcatcattacccaat

SEQ ID NO: 5602662 - DNA, 25 bp, Homo sapien
caggtctcttggatgtggctaaact

SEQ ID NO: 5602663 - DNA, 25 bp, Homo sapien
tactctcaagacctcgaaggctgtc

SEQ ID NO: 5602664 - DNA, 25 bp, Homo sapien
acaaggatggttacacccccctcag

SEQ ID NO: 5602665 - DNA, 25 bp, Homo sapien
agtcttaagagggaaccatcttcaa

SEQ ID NO: 5602666 - DNA, 25 bp, Homo sapien
aaggtgcagctttctgtatggcatt

SEQ ID NO: 5602667 - DNA, 25 bp, Homo sapien
atcttcaataaaagtggacgcttcc

SEQ ID NO: 5602668 - DNA, 25 bp, Homo sapien
tggacgcttccacaaggatggttac

SEQ ID NO: 5602669 - DNA, 25 bp, Homo sapien
cctcagttacaggaagacagcagag

SEQ ID NO: 5602670 - DNA, 25 bp, Homo sapien
tcattcgcaaaagtcttaagaggga

SEQ ID NO: 5602671 - DNA, 25 bp, Homo sapien
tgtgtcttcccctcaaggtgcagct

SEQ ID NO: 5602672 - DNA, 25 bp, Homo sapien
ttttgatccagagacctggccctcc

SEQ ID NO: 5602673 - DNA, 25 bp, Homo sapien
catgaggcagtaaagcagaaatatt

SEQ ID NO: 5602674 - DNA, 25 bp, Homo sapien
ttagactaggcagatgttttaaacc

SEQ ID NO: 5602675 - DNA, 25 bp, Homo sapien
gtgaaggagcctgtaaaataggtct

SEQ ID NO: 5602676 - DNA, 25 bp, Homo sapien
tccagtagtagaacagagtcaagat

SEQ ID NO: 5602677 - DNA, 25 bp, Homo sapien
ctttatgtcaggggataatgtgaag

SEQ ID NO: 5602678 - DNA, 25 bp, Homo sapien
tgtcattagcagtcattggcctttc

SEQ ID NO: 5602679 - DNA, 25 bp, Homo sapien
tcctctgagggaagaaaactcaaaa

SEQ ID NO: 5602680 - DNA, 25 bp, Homo sapien
cctacccagaggattggaaatgttc

SEQ ID NO: 5602681 - DNA, 25 bp, Homo sapien
gggaaacatatggcagtcattggcc

SEQ ID NO: 5602682 - DNA, 25 bp, Homo sapien
gatccctggatgacgcatggtagtc

SEQ ID NO: 5602683 - DNA, 25 bp, Homo sapien
tgtatatctgcctagacactctccc

SEQ ID NO: 5602684 - DNA, 25 bp, Homo sapien
tgcttcagcacttgtcagaacagtc

SEQ ID NO: 5602685 - DNA, 25 bp, Homo sapien
ctgtctgtccctcagctagaatacc

SEQ ID NO: 5602686 - DNA, 25 bp, Homo sapien
ttatttgctgtgacctttgagaagg

SEQ ID NO: 5602687 - DNA, 25 bp, Homo sapien
cccagccagtccactgggccaggtg

SEQ ID NO: 5602688 - DNA, 25 bp, Homo sapien
ttgtcagaacagtcactcaatgctg

SEQ ID NO: 5602689 - DNA, 25 bp, Homo sapien
tgttcctggaagagccaaactcctt

SEQ ID NO: 5602690 - DNA, 25 bp, Homo sapien
tcctttctgccgctgggtctttgta

SEQ ID NO: 5602691 - DNA, 25 bp, Homo sapien
gccaggtgccttgctatccactctt

SEQ ID NO: 5602692 - DNA, 25 bp, Homo sapien
ctaagaagtcctggatcctggcatc

SEQ ID NO: 5602693 - DNA, 25 bp, Homo sapien
aggtccctgaacacggatcccaggc

SEQ ID NO: 5602694 - DNA, 25 bp, Homo sapien
gcccgacggtacccggaggagcgac

SEQ ID NO: 5602695 - DNA, 25 bp, Homo sapien
gtcgctcctccgggtaccgtcgggc

SEQ ID NO: 5602696 - DNA, 25 bp, Homo sapien
aagcaaggactgaaaagtttggtaa

SEQ ID NO: 5602697 - DNA, 25 bp, Homo sapien
aaattattgcaagtgggtcaaagcg

SEQ ID NO: 5602698 - DNA, 25 bp, Homo sapien
ccaccccactaagcttgaggcctct

SEQ ID NO: 5602699 - DNA, 25 bp, Homo sapien
acatgtcaatggacaaagctgtagg

SEQ ID NO: 5602700 - DNA, 25 bp, Homo sapien
ttggtcacaagcatatgagacatac

SEQ ID NO: 5602701 - DNA, 25 bp, Homo sapien
tgttctcaatatgcaaaggacctta

SEQ ID NO: 5602702 - DNA, 25 bp, Homo sapien
gtgctctgcagacatgtcaatggac

SEQ ID NO: 5602703 - DNA, 25 bp, Homo sapien
acccatagaaacaatggtgaccttt

SEQ ID NO: 5602704 - DNA, 25 bp, Homo sapien
tggggaacagtcactgtcattgtgc

SEQ ID NO: 5602705 - DNA, 25 bp, Homo sapien
aaaaagaatacacttggtcacaagc

SEQ ID NO: 5602706 - DNA, 25 bp, Homo sapien
gtgggtcaaagcgcataaatgttca

SEQ ID NO: 5602707 - DNA, 25 bp, Homo sapien
tacagaggtaaaacgcggaggcccc

SEQ ID NO: 5602708 - DNA, 25 bp, Homo sapien
ggggcctccgcgttttacctctgta

SEQ ID NO: 5602709 - DNA, 25 bp, Homo sapien
cgtgacaggtgtgctctgtgctgtc

SEQ ID NO: 5602710 - DNA, 25 bp, Homo sapien
gattttccagcgcgccgcccacttc

SEQ ID NO: 5602711 - DNA, 25 bp, Homo sapien
agggaacaaagctacgtggattttc

SEQ ID NO: 5602712 - DNA, 25 bp, Homo sapien
ctgggcttcatcctgctcgcgtgac

SEQ ID NO: 5602713 - DNA, 25 bp, Homo sapien
ctctgtgctgtcaggaaactgcagg

SEQ ID NO: 5602714 - DNA, 25 bp, Homo sapien
tgcagggctttgagtataaactgaa

SEQ ID NO: 5602715 - DNA, 25 bp, Homo sapien
aaacgtatgggaaccatgcaaagac

SEQ ID NO: 5602716 - DNA, 25 bp, Homo sapien
ccttgcacgctccccgtggagggaa

SEQ ID NO: 5602717 - DNA, 25 bp, Homo sapien
gacatccacgcccctcagttgctgc

SEQ ID NO: 5602718 - DNA, 25 bp, Homo sapien
gccgcccacttcaccaggcagcctc

SEQ ID NO: 5602719 - DNA, 25 bp, Homo sapien
ccagcacctggctccgaagtctgtg

SEQ ID NO: 5602720 - DNA, 25 bp, Homo sapien
tggttccagagacaacataagccct

SEQ ID NO: 5602721 - DNA, 25 bp, Homo sapien
ctgagcccatcttcagcagatcctt

SEQ ID NO: 5602722 - DNA, 25 bp, Homo sapien
ttgaccccacatccacatagaacat

SEQ ID NO: 5602723 - DNA, 25 bp, Homo sapien
aaaagagtagcagttcttctcagca

SEQ ID NO: 5602724 - DNA, 25 bp, Homo sapien
ctccttatggcaactggtgactctc

SEQ ID NO: 5602725 - DNA, 25 bp, Homo sapien
ctataggtttcaatggttctgtccc

SEQ ID NO: 5602726 - DNA, 25 bp, Homo sapien
tttcagcatgtgattcccataccac

SEQ ID NO: 5602727 - DNA, 25 bp, Homo sapien
cttgggggtactaattctccttatg

SEQ ID NO: 5602728 - DNA, 25 bp, Homo sapien
tggtgactctccttcatggcgtatc

SEQ ID NO: 5602729 - DNA, 25 bp, Homo sapien
ctgtggggttccattaccctggatc

SEQ ID NO: 5602730 - DNA, 25 bp, Homo sapien
acatagaacataggcctgggatttt

SEQ ID NO: 5602731 - DNA, 25 bp, Homo sapien
aagttgcatgaaatggcagactttc

SEQ ID NO: 5602732 - DNA, 25 bp, Homo sapien
cttccctgggcatgaagcaactgat

SEQ ID NO: 5602733 - DNA, 25 bp, Homo sapien
accatagggctttgaacaaggcaat

SEQ ID NO: 5602734 - DNA, 25 bp, Homo sapien
acgctggcctaacaggctgcacaca

SEQ ID NO: 5602735 - DNA, 25 bp, Homo sapien
ttcagctgttagccaggcactgctc

SEQ ID NO: 5602736 - DNA, 25 bp, Homo sapien
aacaaggcaatctctctgaagctcc

SEQ ID NO: 5602737 - DNA, 25 bp, Homo sapien
gcaactgattgacaagatgggttcc

SEQ ID NO: 5602738 - DNA, 25 bp, Homo sapien
caaagcccatggagttaagtcagaa

SEQ ID NO: 5602739 - DNA, 25 bp, Homo sapien
agaggcactgctatatgaaggtgtg

SEQ ID NO: 5602740 - DNA, 25 bp, Homo sapien
tcctctgccaaggtccaaagcccat

SEQ ID NO: 5602741 - DNA, 25 bp, Homo sapien
ttagagaagttgctaggatcctagt

SEQ ID NO: 5602742 - DNA, 25 bp, Homo sapien
ccaagttacaggtagtgaaagagag

SEQ ID NO: 5602743 - DNA, 25 bp, Homo sapien
acagccgaacaattgcagatggcac

SEQ ID NO: 5602744 - DNA, 25 bp, Homo sapien
tgggtggctcacagccagcttatcc

SEQ ID NO: 5602745 - DNA, 25 bp, Homo sapien
aggaaccatgaaaatgcaaacagcc

SEQ ID NO: 5602746 - DNA, 25 bp, Homo sapien
tatgacagccaggagcactgtacta

SEQ ID NO: 5602747 - DNA, 25 bp, Homo sapien
cagatggcacctaaatgctaggcac

SEQ ID NO: 5602748 - DNA, 25 bp, Homo sapien
cctcgtgcccaggatgtaacatcag

SEQ ID NO: 5602749 - DNA, 25 bp, Homo sapien
ttaggagctgtttggaactactgtc

SEQ ID NO: 5602750 - DNA, 25 bp, Homo sapien
gcaaggctgagtccacctctgctgg

SEQ ID NO: 5602751 - DNA, 25 bp, Homo sapien
ggaactactgtcaaaaggaaccatg

SEQ ID NO: 5602752 - DNA, 25 bp, Homo sapien
gctaggcacagtctaacacacagat

SEQ ID NO: 5602753 - DNA, 25 bp, Homo sapien
ctcgtacaccaaaacagaagtcagc

SEQ ID NO: 5602754 - DNA, 25 bp, Homo sapien
agaggagtctatcatcaccctgtaa

SEQ ID NO: 5602755 - DNA, 25 bp, Homo sapien
atggaatattcaagagtgtcagctg

SEQ ID NO: 5602756 - DNA, 25 bp, Homo sapien
ccacggtgaaacactaaaatgcttc

SEQ ID NO: 5602757 - DNA, 25 bp, Homo sapien
aatgtgcttaaaaatatagaccctc

SEQ ID NO: 5602758 - DNA, 25 bp, Homo sapien
tggaatagactcatcaaagaaatag

SEQ ID NO: 5602759 - DNA, 25 bp, Homo sapien
tgcttcttagaatggaacgggacac

SEQ ID NO: 5602760 - DNA, 25 bp, Homo sapien
agagaggccaaaatcctaatataag

SEQ ID NO: 5602761 - DNA, 25 bp, Homo sapien
agaagtcagcattgtccacggtgaa

SEQ ID NO: 5602762 - DNA, 25 bp, Homo sapien
tagtggaagaacagatgcaacttta

SEQ ID NO: 5602763 - DNA, 25 bp, Homo sapien
aacactacgaaaagtcagcaggaag

SEQ ID NO: 5602764 - DNA, 25 bp, Homo sapien
agcctggcctccccttgggcatctt

SEQ ID NO: 5602765 - DNA, 25 bp, Homo sapien
agcttatgcggtcatgaggacttcc

SEQ ID NO: 5602766 - DNA, 25 bp, Homo sapien
aggtttctggcttggacagcttatg

SEQ ID NO: 5602767 - DNA, 25 bp, Homo sapien
agctctagagcaatttccaggtttc

SEQ ID NO: 5602768 - DNA, 25 bp, Homo sapien
ccaggtggggctggttttatatgtg

SEQ ID NO: 5602769 - DNA, 25 bp, Homo sapien
gtggctagtggctatcacgttagtg

SEQ ID NO: 5602770 - DNA, 25 bp, Homo sapien
ttaaatcgaaatagccacaagtggc

SEQ ID NO: 5602771 - DNA, 25 bp, Homo sapien
ggtactttggaacagccacccagcc

SEQ ID NO: 5602772 - DNA, 25 bp, Homo sapien
tggcttggacagcttatgcggtcat

SEQ ID NO: 5602773 - DNA, 25 bp, Homo sapien
tatatgtgttgagttggggtacttt

SEQ ID NO: 5602774 - DNA, 25 bp, Homo sapien
tcacgttagtgcagctctagagcaa

SEQ ID NO: 5602775 - DNA, 25 bp, Homo sapien
attagcatattggttgtattctctc

SEQ ID NO: 5602776 - DNA, 25 bp, Homo sapien
tattacataatattagcacatactt

SEQ ID NO: 5602777 - DNA, 25 bp, Homo sapien
aaactctaactggcactgtagtcct

SEQ ID NO: 5602778 - DNA, 25 bp, Homo sapien
tgtagccttgatcacccaggctcaa

SEQ ID NO: 5602779 - DNA, 25 bp, Homo sapien
cttgatcacccaggctcaatcttcc

SEQ ID NO: 5602780 - DNA, 25 bp, Homo sapien
tggcctaaactctaactggcactgt

SEQ ID NO: 5602781 - DNA, 25 bp, Homo sapien
tacaggcatacatcagtgagcctgg

SEQ ID NO: 5602782 - DNA, 25 bp, Homo sapien
tagctttataggcctgtcacagaga

SEQ ID NO: 5602783 - DNA, 25 bp, Homo sapien
taactggcactgtagtcctagcttt

SEQ ID NO: 5602784 - DNA, 25 bp, Homo sapien
taggctcaagtgatattatattagc

SEQ ID NO: 5602785 - DNA, 25 bp, Homo sapien
cctgtcacagagatactcaacaaat

SEQ ID NO: 5602786 - DNA, 25 bp, Homo sapien
ctagtaattgtggcgagtatggaaa

SEQ ID NO: 5602787 - DNA, 25 bp, Homo sapien
gaaaggctagtaattgtggcgagta

SEQ ID NO: 5602788 - DNA, 25 bp, Homo sapien
tttaggaaaggctagtaattgtggc

SEQ ID NO: 5602789 - DNA, 25 bp, Homo sapien
tgtggcgagtatggaaatctaccca

SEQ ID NO: 5602790 - DNA, 25 bp, Homo sapien
attgagtccttttagcggtcgggct

SEQ ID NO: 5602791 - DNA, 25 bp, Homo sapien
tgctctggaggtgaactgtattcta

SEQ ID NO: 5602792 - DNA, 25 bp, Homo sapien
gggccaccttgtggacaacaagtgt

SEQ ID NO: 5602793 - DNA, 25 bp, Homo sapien
ttgcttctagggccaccttgtggac

SEQ ID NO: 5602794 - DNA, 25 bp, Homo sapien
agagagagagcctgtttctcaacta

SEQ ID NO: 5602795 - DNA, 25 bp, Homo sapien
gaagacgcgttatcagtttattagt

SEQ ID NO: 5602796 - DNA, 25 bp, Homo sapien
tctgttctcactccgttaattgctc

SEQ ID NO: 5602797 - DNA, 25 bp, Homo sapien
acctaaaagccaaagaccttgagcc

SEQ ID NO: 5602798 - DNA, 25 bp, Homo sapien
cacccatcaacagaacctaaaagcc

SEQ ID NO: 5602799 - DNA, 25 bp, Homo sapien
ccgggtatgagattaaagtttagat

SEQ ID NO: 5602800 - DNA, 25 bp, Homo sapien
gaaatatcctacaagagaaagctat

SEQ ID NO: 5602801 - DNA, 25 bp, Homo sapien
gtctggcctggattttgtaacacct

SEQ ID NO: 5602802 - DNA, 25 bp, Homo sapien
cacctaaacaagggttattctattc

SEQ ID NO: 5602803 - DNA, 25 bp, Homo sapien
ggactcatctaggaaccgggtatga

SEQ ID NO: 5602804 - DNA, 25 bp, Homo sapien
ggtctggcacatgaatggtgtgttc

SEQ ID NO: 5602805 - DNA, 25 bp, Homo sapien
aagctatatctggaactcacccatc

SEQ ID NO: 5602806 - DNA, 25 bp, Homo sapien
aagaccttgagcctgtctctgcctc

SEQ ID NO: 5602807 - DNA, 25 bp, Homo sapien
aagtttagattggtctggcctggat

SEQ ID NO: 5602808 - DNA, 25 bp, Homo sapien
gactccagagatcaccattagtgcc

SEQ ID NO: 5602809 - DNA, 25 bp, Homo sapien
tggacacccttcaagcctgggcacc

SEQ ID NO: 5602810 - DNA, 25 bp, Homo sapien
gggcacctgagcaatgtcggctcac

SEQ ID NO: 5602811 - DNA, 25 bp, Homo sapien
gctgtgtgttggtggacacccttca

SEQ ID NO: 5602812 - DNA, 25 bp, Homo sapien
gctttggagcatgtcacccgcagaa

SEQ ID NO: 5602813 - DNA, 25 bp, Homo sapien
ggccactgccagaggttcacttaat

SEQ ID NO: 5602814 - DNA, 25 bp, Homo sapien
tattgtagaagtgggttagttattg

SEQ ID NO: 5602815 - DNA, 25 bp, Homo sapien
ccgcagaatccagtaatctggccac

SEQ ID NO: 5602816 - DNA, 25 bp, Homo sapien
gttgaagttcagctcctgtgttctc

SEQ ID NO: 5602817 - DNA, 25 bp, Homo sapien
gagtctacacatccggtcacccaca

SEQ ID NO: 5602818 - DNA, 25 bp, Homo sapien
gagcagagacactgtgctttggagc

SEQ ID NO: 5602819 - DNA, 25 bp, Homo sapien
caggtaaagaagtcagctagtattt

SEQ ID NO: 5602820 - DNA, 25 bp, Homo sapien
atgtggccaaacatgggtgtactaa

SEQ ID NO: 5602821 - DNA, 25 bp, Homo sapien
tgcaaggaatcttagaaaccctgcc

SEQ ID NO: 5602822 - DNA, 25 bp, Homo sapien
tgtatgttactgagggttgcacaca

SEQ ID NO: 5602823 - DNA, 25 bp, Homo sapien
attcatctcactcaggggttaaggt

SEQ ID NO: 5602824 - DNA, 25 bp, Homo sapien
gcaaacctctctcggggagatcagc

SEQ ID NO: 5602825 - DNA, 25 bp, Homo sapien
accctgcctcggaatcctggaacct

SEQ ID NO: 5602826 - DNA, 25 bp, Homo sapien
tttggaagctgagaatgtattggca

SEQ ID NO: 5602827 - DNA, 25 bp, Homo sapien
ggagatcagcagggcctcccttcat

SEQ ID NO: 5602828 - DNA, 25 bp, Homo sapien
ctttggttggccaacaggtaaagaa

SEQ ID NO: 5602829 - DNA, 25 bp, Homo sapien
agtatttgcagccacgttgaatatc

SEQ ID NO: 5602830 - DNA, 25 bp, Homo sapien
taatggaaacaaccactgggctagg

SEQ ID NO: 5602831 - DNA, 25 bp, Homo sapien
ttctgctgcgtgctccaggaaatct

SEQ ID NO: 5602832 - DNA, 25 bp, Homo sapien
tgctacaggtatcttgtggatggag

SEQ ID NO: 5602833 - DNA, 25 bp, Homo sapien
ttgaaagcatactgccctccccatg

SEQ ID NO: 5602834 - DNA, 25 bp, Homo sapien
aatctataatgagaagtcctggggt

SEQ ID NO: 5602835 - DNA, 25 bp, Homo sapien
caggacactgctacaggtatcttgt

SEQ ID NO: 5602836 - DNA, 25 bp, Homo sapien
ctcccccggacaccctcaaatccca

SEQ ID NO: 5602837 - DNA, 25 bp, Homo sapien
gattgttaccgttggcaggacactg

SEQ ID NO: 5602838 - DNA, 25 bp, Homo sapien
cattgggcaatgtctgatgacatac

SEQ ID NO: 5602839 - DNA, 25 bp, Homo sapien
ccactttggcagcagataatggaaa

SEQ ID NO: 5602840 - DNA, 25 bp, Homo sapien
ctgggctaggcaaagtttctgctgc

SEQ ID NO: 5602841 - DNA, 25 bp, Homo sapien
agaaaatgtgataaacaacagtaac

SEQ ID NO: 5602842 - DNA, 25 bp, Homo sapien
attgcatggatgaataacattttcc

SEQ ID NO: 5602843 - DNA, 25 bp, Homo sapien
taacatgaacagaaattgaaactca

SEQ ID NO: 5602844 - DNA, 25 bp, Homo sapien
atctgattccagttgctccataacc

SEQ ID NO: 5602845 - DNA, 25 bp, Homo sapien
tgtttgggattcaagaaaatgtgat

SEQ ID NO: 5602846 - DNA, 25 bp, Homo sapien
atagtggctgacttaacaaggcttt

SEQ ID NO: 5602847 - DNA, 25 bp, Homo sapien
caacagtaactatatagtggctgac

SEQ ID NO: 5602848 - DNA, 25 bp, Homo sapien
atgctctttgaaggtacgaacaact

SEQ ID NO: 5602849 - DNA, 25 bp, Homo sapien
ctttgaaaattgccagacattgttt

SEQ ID NO: 5602850 - DNA, 25 bp, Homo sapien
attgttgggtaattgcatggatgaa

SEQ ID NO: 5602851 - DNA, 25 bp, Homo sapien
gacaatacatgtgtttgggattcaa

SEQ ID NO: 5602852 - DNA, 25 bp, Homo sapien
gaaaacttgttcacagtagcacctt

SEQ ID NO: 5602853 - DNA, 25 bp, Homo sapien
taataaaccctgtcatctcctcagc

SEQ ID NO: 5602854 - DNA, 25 bp, Homo sapien
cttgctccaaatcatgtattcatcc

SEQ ID NO: 5602855 - DNA, 25 bp, Homo sapien
gtcatctcctcagcccggcacagct

SEQ ID NO: 5602856 - DNA, 25 bp, Homo sapien
ttaaaattagaggagtatgtacttg

SEQ ID NO: 5602857 - DNA, 25 bp, Homo sapien
tgtatcaactttatagagtgtggcc

SEQ ID NO: 5602858 - DNA, 25 bp, Homo sapien
aacatttgaaggaaacttttgccac

SEQ ID NO: 5602859 - DNA, 25 bp, Homo sapien
tcttagtctcaccacatgatcaaat

SEQ ID NO: 5602860 - DNA, 25 bp, Homo sapien
agcaccttcatggaatgtttgtatc

SEQ ID NO: 5602861 - DNA, 25 bp, Homo sapien
gtgaatttggcttatattacgactc

SEQ ID NO: 5602862 - DNA, 25 bp, Homo sapien
actttatagagtgtggccttttcca

SEQ ID NO: 5602863 - DNA, 25 bp, Homo sapien
gtgaataagtaaaagatctaacatt

SEQ ID NO: 5602864 - DNA, 25 bp, Homo sapien
agttccccagtactttcagtgtctc

SEQ ID NO: 5602865 - DNA, 25 bp, Homo sapien
acacctgtgtggtttgtcttaggac

SEQ ID NO: 5602866 - DNA, 25 bp, Homo sapien
gaggtgttgggacaccacagaatct

SEQ ID NO: 5602867 - DNA, 25 bp, Homo sapien
taggtgaggatggcatcattccttc

SEQ ID NO: 5602868 - DNA, 25 bp, Homo sapien
aacctggcctcagtaggtgaggatg

SEQ ID NO: 5602869 - DNA, 25 bp, Homo sapien
ctaacattcgcgtcatagaggaggt

SEQ ID NO: 5602870 - DNA, 25 bp, Homo sapien
tgtctccaatcctcctgcacacctg

SEQ ID NO: 5602871 - DNA, 25 bp, Homo sapien
gactcagtggtctttgaggatgtgg

SEQ ID NO: 5602872 - DNA, 25 bp, Homo sapien
ggtttgtcttaggactcagtggtct

SEQ ID NO: 5602873 - DNA, 25 bp, Homo sapien
atttatgaattgagtccagttcccc

SEQ ID NO: 5602874 - DNA, 25 bp, Homo sapien
tatgtatgtctagagagacaaaatc

SEQ ID NO: 5602875 - DNA, 25 bp, Homo sapien
ttcttatacagaaatgcgttgattc

SEQ ID NO: 5602876 - DNA, 25 bp, Homo sapien
ggaactgcattaagcctaaagatca

SEQ ID NO: 5602877 - DNA, 25 bp, Homo sapien
accatattgagttttccgatccacg

SEQ ID NO: 5602878 - DNA, 25 bp, Homo sapien
tcaaagacaaaactccttgcttgga

SEQ ID NO: 5602879 - DNA, 25 bp, Homo sapien
tgaaacaattataaatggtatgtgt

SEQ ID NO: 5602880 - DNA, 25 bp, Homo sapien
tccgatccacgaacatggtatgtct

SEQ ID NO: 5602881 - DNA, 25 bp, Homo sapien
tttgttagatttatgcagaagaatc

SEQ ID NO: 5602882 - DNA, 25 bp, Homo sapien
taagcctaaagatcaactcggggag

SEQ ID NO: 5602883 - DNA, 25 bp, Homo sapien
tgtgtgtgtgctgatcacaaatcct

SEQ ID NO: 5602884 - DNA, 25 bp, Homo sapien
gcttggattctgataggaactgcat

SEQ ID NO: 5602885 - DNA, 25 bp, Homo sapien
tttaccacaaactagagaagcccca

SEQ ID NO: 5602886 - DNA, 25 bp, Homo sapien
ttctaaaaagctattgtcactacaa

SEQ ID NO: 5602887 - DNA, 25 bp, Homo sapien
tgccatgaattaaattgatgtcaac

SEQ ID NO: 5602888 - DNA, 25 bp, Homo sapien
tctgtgtgaagttttgccatgaatt

SEQ ID NO: 5602889 - DNA, 25 bp, Homo sapien
gtcactacaaagatgaaagtaactt

SEQ ID NO: 5602890 - DNA, 25 bp, Homo sapien
attgatgtcaacaaaagttttacct

SEQ ID NO: 5602891 - DNA, 25 bp, Homo sapien
aagactgaaagtagttcctgaatcc

SEQ ID NO: 5602892 - DNA, 25 bp, Homo sapien
agaagatatcaggaattagtgtaag

SEQ ID NO: 5602893 - DNA, 25 bp, Homo sapien
aaatattcagctttacccatgggta

SEQ ID NO: 5602894 - DNA, 25 bp, Homo sapien
acccatgggtatttcctgacatttc

SEQ ID NO: 5602895 - DNA, 25 bp, Homo sapien
aactgtagcctaatagaagatatca

SEQ ID NO: 5602896 - DNA, 25 bp, Homo sapien
aggatatgcagaaatgcccaagagt

SEQ ID NO: 5602897 - DNA, 25 bp, Homo sapien
gatggcatcactaagttctggtacc

SEQ ID NO: 5602898 - DNA, 25 bp, Homo sapien
tagcatggcaacccccgcccaatgt

SEQ ID NO: 5602899 - DNA, 25 bp, Homo sapien
tctccctgagcataaagtctgcctc

SEQ ID NO: 5602900 - DNA, 25 bp, Homo sapien
aagatagtagagacatggtgacttt

SEQ ID NO: 5602901 - DNA, 25 bp, Homo sapien
gcccaatgtaagcagagcctcacaa

SEQ ID NO: 5602902 - DNA, 25 bp, Homo sapien
ctcacaaaggcaagatagtagagac

SEQ ID NO: 5602903 - DNA, 25 bp, Homo sapien
gctggcagatggctaccaacctaat

SEQ ID NO: 5602904 - DNA, 25 bp, Homo sapien
ttggtcattaaagagatggcatcac

SEQ ID NO: 5602905 - DNA, 25 bp, Homo sapien
caaaaatagttgagctggcagatgg

SEQ ID NO: 5602906 - DNA, 25 bp, Homo sapien
caagagttttcaggttagcatggca

SEQ ID NO: 5602907 - DNA, 25 bp, Homo sapien
acttgtctttggtaaaattctttca

SEQ ID NO: 5602908 - DNA, 25 bp, Homo sapien
tgaaaaatcaagctacaggcacaaa

SEQ ID NO: 5602909 - DNA, 25 bp, Homo sapien
ttcaaaatgaaagacagcctgaaaa

SEQ ID NO: 5602910 - DNA, 25 bp, Homo sapien
gctacaggcacaaatagagcagcct

SEQ ID NO: 5602911 - DNA, 25 bp, Homo sapien
gttgggcagacagctaaaacttgtc

SEQ ID NO: 5602912 - DNA, 25 bp, Homo sapien
tgaaagacagcctgaaaaatcaagc

SEQ ID NO: 5602913 - DNA, 25 bp, Homo sapien
caggcacaaatagagcagcctgggg

SEQ ID NO: 5602914 - DNA, 25 bp, Homo sapien
tcaagctacaggcacaaatagagca

SEQ ID NO: 5602915 - DNA, 25 bp, Homo sapien
aatgaaagacagcctgaaaaatcaa

SEQ ID NO: 5602916 - DNA, 25 bp, Homo sapien
aaaatgaaagacagcctgaaaaatc

SEQ ID NO: 5602917 - DNA, 25 bp, Homo sapien
tcaaaatgaaagacagcctgaaaaa

SEQ ID NO: 5602918 - DNA, 25 bp, Homo sapien
gggaggcgtttgtaagcgctctctc

SEQ ID NO: 5602919 - DNA, 25 bp, Homo sapien
gagggtgtttagtggcatccctggc

SEQ ID NO: 5602920 - DNA, 25 bp, Homo sapien
ggatgaccagacagcgattcttctt

SEQ ID NO: 5602921 - DNA, 25 bp, Homo sapien
cattgtttttcgtgggagctgacct

SEQ ID NO: 5602922 - DNA, 25 bp, Homo sapien
gctgaaaattcagggaaagtgagtg

SEQ ID NO: 5602923 - DNA, 25 bp, Homo sapien
agggagaagcccagctgctattaaa

SEQ ID NO: 5602924 - DNA, 25 bp, Homo sapien
gaggcccacaaagcaatgcactgat

SEQ ID NO: 5602925 - DNA, 25 bp, Homo sapien
actgagcaggaaattgcatggatga

SEQ ID NO: 5602926 - DNA, 25 bp, Homo sapien
gctgacctgtgcatttgagggtgtt

SEQ ID NO: 5602927 - DNA, 25 bp, Homo sapien
tttcaaccttagacagggagaagcc

SEQ ID NO: 5602928 - DNA, 25 bp, Homo sapien
aggacggttttccgaaatgcagtgc

SEQ ID NO: 5602929 - DNA, 25 bp, Homo sapien
tgttggcaagttaagttagcaagat

SEQ ID NO: 5602930 - DNA, 25 bp, Homo sapien
tggaaatagacattgtaatgttctt

SEQ ID NO: 5602931 - DNA, 25 bp, Homo sapien
tagcagattgttggcaagttaagtt

SEQ ID NO: 5602932 - DNA, 25 bp, Homo sapien
tacggaaggtaatttagcagattgt

SEQ ID NO: 5602933 - DNA, 25 bp, Homo sapien
atggcgtatacatgtaccctgaggt

SEQ ID NO: 5602934 - DNA, 25 bp, Homo sapien
aggaaatacggaaggtaatttagca

SEQ ID NO: 5602935 - DNA, 25 bp, Homo sapien
gtaccctgaggttagccagcctctc

SEQ ID NO: 5602936 - DNA, 25 bp, Homo sapien
gataagtggtttctattgttgcaac

SEQ ID NO: 5602937 - DNA, 25 bp, Homo sapien
tcttcctgtgattctgaagctcttc

SEQ ID NO: 5602938 - DNA, 25 bp, Homo sapien
cctcccctcactatggcgtatacat

SEQ ID NO: 5602939 - DNA, 25 bp, Homo sapien
ttaagttagcaagataagtggtttc

SEQ ID NO: 5602940 - DNA, 25 bp, Homo sapien
ttgggctcacaggatatctgcaatt

SEQ ID NO: 5602941 - DNA, 25 bp, Homo sapien
atcagtcacttgttttttaggggag

SEQ ID NO: 5602942 - DNA, 25 bp, Homo sapien
tgtcagcatgacatcagtactcatt

SEQ ID NO: 5602943 - DNA, 25 bp, Homo sapien
tgtattggaaaatctcatcagtcac

SEQ ID NO: 5602944 - DNA, 25 bp, Homo sapien
atcacgttgtccatgcagaggtatt

SEQ ID NO: 5602945 - DNA, 25 bp, Homo sapien
aggggagtgtcttgcacagaaatct

SEQ ID NO: 5602946 - DNA, 25 bp, Homo sapien
attttagtggatcttgtcaacagct

SEQ ID NO: 5602947 - DNA, 25 bp, Homo sapien
ctatccaaaggtgataaacacgttt

SEQ ID NO: 5602948 - DNA, 25 bp, Homo sapien
aaaaatagaattgggctcacaggat

SEQ ID NO: 5602949 - DNA, 25 bp, Homo sapien
taaagtgaatcacctgtatgatact

SEQ ID NO: 5602950 - DNA, 25 bp, Homo sapien
cacatgtgaatgtttcttcgcatac

SEQ ID NO: 5602951 - DNA, 25 bp, Homo sapien
agacattgccccctcgtggttcctc

SEQ ID NO: 5602952 - DNA, 25 bp, Homo sapien
gccagttaaggcaatcaatacatcc

SEQ ID NO: 5602953 - DNA, 25 bp, Homo sapien
tattattgctcgggaagacattgcc

SEQ ID NO: 5602954 - DNA, 25 bp, Homo sapien
ctcatgtaattgagggaagctggca

SEQ ID NO: 5602955 - DNA, 25 bp, Homo sapien
atttttgttgggcccatgccgggat

SEQ ID NO: 5602956 - DNA, 25 bp, Homo sapien
atgctccatgacaggcaagaatggc

SEQ ID NO: 5602957 - DNA, 25 bp, Homo sapien
cctgctcctaagtgaggtctgagtg

SEQ ID NO: 5602958 - DNA, 25 bp, Homo sapien
gggatccaagaagaccatgcccttc

SEQ ID NO: 5602959 - DNA, 25 bp, Homo sapien
gagaggttctccgggcatcctgata

SEQ ID NO: 5602960 - DNA, 25 bp, Homo sapien
gaggtctgagtggaactattgacta

SEQ ID NO: 5602961 - DNA, 25 bp, Homo sapien
catgcccttctgtggagtatgctcc

SEQ ID NO: 5602962 - DNA, 25 bp, Homo sapien
tgacgacattcgggagtcctacacg

SEQ ID NO: 5602963 - DNA, 25 bp, Homo sapien
cgtgtaggactcccgaatgtcgtca

SEQ ID NO: 5602964 - DNA, 25 bp, Homo sapien
gatgtccatagttgcactgtggtgg

SEQ ID NO: 5602965 - DNA, 25 bp, Homo sapien
catatagactcaaagagcacatgac

SEQ ID NO: 5602966 - DNA, 25 bp, Homo sapien
tcattagcttgtcaccggtgcggcg

SEQ ID NO: 5602967 - DNA, 25 bp, Homo sapien
actggtgtgaccattttggagaata

SEQ ID NO: 5602968 - DNA, 25 bp, Homo sapien
gagcacatgactgaggatgtccata

SEQ ID NO: 5602969 - DNA, 25 bp, Homo sapien
agatccaacggttcttgcctgggtc

SEQ ID NO: 5602970 - DNA, 25 bp, Homo sapien
agaggaggtaatacagcaaccctca

SEQ ID NO: 5602971 - DNA, 25 bp, Homo sapien
acagcaaccctcacaccactggtgt

SEQ ID NO: 5602972 - DNA, 25 bp, Homo sapien
taatgtgtacgcaggcctaaagatc

SEQ ID NO: 5602973 - DNA, 25 bp, Homo sapien
gcctgggtctgtgtccgaaataaat

SEQ ID NO: 5602974 - DNA, 25 bp, Homo sapien
ccgcgcagagtagcgttcattagct

SEQ ID NO: 5602975 - DNA, 25 bp, Homo sapien
gaaaggactgaatgggttaatctct

SEQ ID NO: 5602976 - DNA, 25 bp, Homo sapien
aggggcagtatcagtgtcaactttg

SEQ ID NO: 5602977 - DNA, 25 bp, Homo sapien
aagtacccgctaaatgctggctgct

SEQ ID NO: 5602978 - DNA, 25 bp, Homo sapien
ggtaagtccccaggctgatgggaag

SEQ ID NO: 5602979 - DNA, 25 bp, Homo sapien
ccagcccactccctaagcaggcagg

SEQ ID NO: 5602980 - DNA, 25 bp, Homo sapien
gccctgcgctaggtaatgctgtgga

SEQ ID NO: 5602981 - DNA, 25 bp, Homo sapien
acttggaacgatgcctgccacgtaa

SEQ ID NO: 5602982 - DNA, 25 bp, Homo sapien
gggttaatctctgcaaaggacttgg

SEQ ID NO: 5602983 - DNA, 25 bp, Homo sapien
tgcctgccacgtaagtacccgctaa

SEQ ID NO: 5602984 - DNA, 25 bp, Homo sapien
gctcaagtctggctcctgtaccctc

SEQ ID NO: 5602985 - DNA, 25 bp, Homo sapien
tgctggctgctatcatcactgacac

SEQ ID NO: 5602986 - DNA, 25 bp, Homo sapien
ggctacacactaggagagtgacaca

SEQ ID NO: 5602987 - DNA, 25 bp, Homo sapien
gcaaagaggctcaaagagacctata

SEQ ID NO: 5602988 - DNA, 25 bp, Homo sapien
tgttgttaggggtcagcaccatata

SEQ ID NO: 5602989 - DNA, 25 bp, Homo sapien
catagtaaggaatgacccccaaatc

SEQ ID NO: 5602990 - DNA, 25 bp, Homo sapien
ggggattaaatcccatgggactgtc

SEQ ID NO: 5602991 - DNA, 25 bp, Homo sapien
tgacacagggactaagactgcctga

SEQ ID NO: 5602992 - DNA, 25 bp, Homo sapien
atgcatgatgccccagtgctgtacc

SEQ ID NO: 5602993 - DNA, 25 bp, Homo sapien
gactgcctgagagaagagcagtcac

SEQ ID NO: 5602994 - DNA, 25 bp, Homo sapien
agcgagtaaaaataaccacaaggcc

SEQ ID NO: 5602995 - DNA, 25 bp, Homo sapien
aaggctaggattacactcaggcagc

SEQ ID NO: 5602996 - DNA, 25 bp, Homo sapien
tgggactgtcaaaaggaatgattct

SEQ ID NO: 5602997 - DNA, 25 bp, Homo sapien
cccaaagaacaacagtgctacaagc

SEQ ID NO: 5602998 - DNA, 25 bp, Homo sapien
tcctagaacagggctgacccaaaga

SEQ ID NO: 5602999 - DNA, 25 bp, Homo sapien
gcagacagtacaacagagagttcaa

SEQ ID NO: 5603000 - DNA, 25 bp, Homo sapien
ttcaaggcacgtcctgctgaaagtc

SEQ ID NO: 5603001 - DNA, 25 bp, Homo sapien
tgctgaaagtcagcatgcagagatt

SEQ ID NO: 5603002 - DNA, 25 bp, Homo sapien
tcaatgcgtgacatttgggcatggg

SEQ ID NO: 5603003 - DNA, 25 bp, Homo sapien
gagattgtcattcctagaacagggc

SEQ ID NO: 5603004 - DNA, 25 bp, Homo sapien
agagttcaaatggattggctttatt

SEQ ID NO: 5603005 - DNA, 25 bp, Homo sapien
ggaccaagatccgtgatggacatgt

SEQ ID NO: 5603006 - DNA, 25 bp, Homo sapien
acaccaaccctatgacgtaggcatc

SEQ ID NO: 5603007 - DNA, 25 bp, Homo sapien
ctccactcttgccttgggggaccaa

SEQ ID NO: 5603008 - DNA, 25 bp, Homo sapien
tacaaattaaaaccacaatgaggta

SEQ ID NO: 5603009 - DNA, 25 bp, Homo sapien
taagcacatgaaaaaaatgttcacc

SEQ ID NO: 5603010 - DNA, 25 bp, Homo sapien
aaggctaacatattaagatggaaaa

SEQ ID NO: 5603011 - DNA, 25 bp, Homo sapien
taatggcactgaaaaggctaacata

SEQ ID NO: 5603012 - DNA, 25 bp, Homo sapien
caggttaggataaaatgcaccaaat

SEQ ID NO: 5603013 - DNA, 25 bp, Homo sapien
agcctctcctacaaataagcacatg

SEQ ID NO: 5603014 - DNA, 25 bp, Homo sapien
agatggaaaaaatttacaagtaata

SEQ ID NO: 5603015 - DNA, 25 bp, Homo sapien
taacataactttacaggttaggata

SEQ ID NO: 5603016 - DNA, 25 bp, Homo sapien
ccacaatgaggtattactacacaca

SEQ ID NO: 5603017 - DNA, 25 bp, Homo sapien
aacagccattagataaatacaaatt

SEQ ID NO: 5603018 - DNA, 25 bp, Homo sapien
gtgattacctgaaggtaacagaatc

SEQ ID NO: 5603019 - DNA, 25 bp, Homo sapien
cttcacatggatacacagagcaatt

SEQ ID NO: 5603020 - DNA, 25 bp, Homo sapien
agccagcctgacagtccctccagtt

SEQ ID NO: 5603021 - DNA, 25 bp, Homo sapien
cagacacagacgcatctgatgccct

SEQ ID NO: 5603022 - DNA, 25 bp, Homo sapien
gaacgtcaaaactggaggcctttca

SEQ ID NO: 5603023 - DNA, 25 bp, Homo sapien
aaatatgctgaccatgaagaaacag

SEQ ID NO: 5603024 - DNA, 25 bp, Homo sapien
cttcgagcaaaaattatgccctttc

SEQ ID NO: 5603025 - DNA, 25 bp, Homo sapien
tcctttagtgagcatgggtggatat

SEQ ID NO: 5603026 - DNA, 25 bp, Homo sapien
ggaggcctttcaaagtagctgctgt

SEQ ID NO: 5603027 - DNA, 25 bp, Homo sapien
tctcagagacttgcttcacatggat

SEQ ID NO: 5603028 - DNA, 25 bp, Homo sapien
agagcaattctccagacacagacgc

SEQ ID NO: 5603029 - DNA, 25 bp, Homo sapien
tccagggctccagtgtaccctccta

SEQ ID NO: 5603030 - DNA, 25 bp, Homo sapien
tcttcccgaagcaacatgcctatac

SEQ ID NO: 5603031 - DNA, 25 bp, Homo sapien
ccctctgcttcttggtccttgttcc

SEQ ID NO: 5603032 - DNA, 25 bp, Homo sapien
tctctaacagaacaataagatcttc

SEQ ID NO: 5603033 - DNA, 25 bp, Homo sapien
aacactgaggacagcctcaagtttc

SEQ ID NO: 5603034 - DNA, 25 bp, Homo sapien
acccttcctgaataagcccacttac

SEQ ID NO: 5603035 - DNA, 25 bp, Homo sapien
ttcatcctacagtgtgacatcctcc

SEQ ID NO: 5603036 - DNA, 25 bp, Homo sapien
cagtcctctgtgcaataatgaatcc

SEQ ID NO: 5603037 - DNA, 25 bp, Homo sapien
tccttaaacactgaggacagcctca

SEQ ID NO: 5603038 - DNA, 25 bp, Homo sapien
ctacagtgtgacatcctccatcctc

SEQ ID NO: 5603039 - DNA, 25 bp, Homo sapien
cctatagtttgatcagtcctctgtg

SEQ ID NO: 5603040 - DNA, 25 bp, Homo sapien
ataatgaatccaagagctatgatct

SEQ ID NO: 5603041 - DNA, 25 bp, Homo sapien
ttcgcaaagtgcagggcactattct

SEQ ID NO: 5603042 - DNA, 25 bp, Homo sapien
ttctgagcagttacacacaggccac

SEQ ID NO: 5603043 - DNA, 25 bp, Homo sapien
gtgcagggcactattctggtgcttt

SEQ ID NO: 5603044 - DNA, 25 bp, Homo sapien
ttagctgtaaactgtggcatgggtg

SEQ ID NO: 5603045 - DNA, 25 bp, Homo sapien
tctgtgatctactggaaacaaaacc

SEQ ID NO: 5603046 - DNA, 25 bp, Homo sapien
actgtggcacagtcgcttctcactt

SEQ ID NO: 5603047 - DNA, 25 bp, Homo sapien
cccagataggccagtgttaagtttg

SEQ ID NO: 5603048 - DNA, 25 bp, Homo sapien
gacttgtgctggatgtttttctgag

SEQ ID NO: 5603049 - DNA, 25 bp, Homo sapien
caggcctacgtcaggtaaaaaggag

SEQ ID NO: 5603050 - DNA, 25 bp, Homo sapien
gaaacaaaaccatcaggacttgtgc

SEQ ID NO: 5603051 - DNA, 25 bp, Homo sapien
ataaacagatgtatgatatgtgact

SEQ ID NO: 5603052 - DNA, 25 bp, Homo sapien
cactcaaatttctgtcctgggaacc

SEQ ID NO: 5603053 - DNA, 25 bp, Homo sapien
gggaggtgggtccatccttatctac

SEQ ID NO: 5603054 - DNA, 25 bp, Homo sapien
atggcccacttagtcatggactctc

SEQ ID NO: 5603055 - DNA, 25 bp, Homo sapien
acatgtaaattgggaagctctgtgg

SEQ ID NO: 5603056 - DNA, 25 bp, Homo sapien
atggactctcacagataggcaggat

SEQ ID NO: 5603057 - DNA, 25 bp, Homo sapien
tccagcccatggcccacttagtcat

SEQ ID NO: 5603058 - DNA, 25 bp, Homo sapien
gtcagagcacatttgtgggcaaacc

SEQ ID NO: 5603059 - DNA, 25 bp, Homo sapien
atgcacgccagtcagagcacatttg

SEQ ID NO: 5603060 - DNA, 25 bp, Homo sapien
ttgatgcccaaggtttacatgtaaa

SEQ ID NO: 5603061 - DNA, 25 bp, Homo sapien
tctcacagataggcaggatcttggg

SEQ ID NO: 5603062 - DNA, 25 bp, Homo sapien
cttgaggatggaactgctcccatac

SEQ ID NO: 5603063 - DNA, 25 bp, Homo sapien
agtatcatgcacactgtacagaggc

SEQ ID NO: 5603064 - DNA, 25 bp, Homo sapien
atattgacccaggagttaggaaacc

SEQ ID NO: 5603065 - DNA, 25 bp, Homo sapien
aaggagagtcagcgaatataaatga

SEQ ID NO: 5603066 - DNA, 25 bp, Homo sapien
ctgtacagaggcttttgggacacag

SEQ ID NO: 5603067 - DNA, 25 bp, Homo sapien
aggagttaggaaacctgagttctca

SEQ ID NO: 5603068 - DNA, 25 bp, Homo sapien
cagactctgcactaaattgtaaatc

SEQ ID NO: 5603069 - DNA, 25 bp, Homo sapien
gattataggtaggtacaagccactg

SEQ ID NO: 5603070 - DNA, 25 bp, Homo sapien
ctgcacccaactcgagaatggtttc

SEQ ID NO: 5603071 - DNA, 25 bp, Homo sapien
attgaataaaggaatataatggaaa

SEQ ID NO: 5603072 - DNA, 25 bp, Homo sapien
tcatgcacaaactcatcgttcaacc

SEQ ID NO: 5603073 - DNA, 25 bp, Homo sapien
taacctgggtttctgaagtatacac

SEQ ID NO: 5603074 - DNA, 25 bp, Homo sapien
tcgttggctattaaaaaagatctgc

SEQ ID NO: 5603075 - DNA, 25 bp, Homo sapien
gacagataaggttagattcgtatgc

SEQ ID NO: 5603076 - DNA, 25 bp, Homo sapien
taaaacagctcagaaggactgcaaa

SEQ ID NO: 5603077 - DNA, 25 bp, Homo sapien
agtaaaacagctcagaaggactgca

SEQ ID NO: 5603078 - DNA, 25 bp, Homo sapien
aaggttagattcgtatgcttgtctt

SEQ ID NO: 5603079 - DNA, 25 bp, Homo sapien
gtctatgactaagatgtggccaggg

SEQ ID NO: 5603080 - DNA, 25 bp, Homo sapien
ggccatgacagataaggttagattc

SEQ ID NO: 5603081 - DNA, 25 bp, Homo sapien
ctgcaggccatgacagataaggtta

SEQ ID NO: 5603082 - DNA, 25 bp, Homo sapien
tcccagtctatgactaagatgtggc

SEQ ID NO: 5603083 - DNA, 25 bp, Homo sapien
atgcagattttgattgactcctctc

SEQ ID NO: 5603084 - DNA, 25 bp, Homo sapien
ttcattgtaaaattcgttggctatt

SEQ ID NO: 5603085 - DNA, 25 bp, Homo sapien
attttaagccgagacaaacaagaca

SEQ ID NO: 5603086 - DNA, 25 bp, Homo sapien
aaactgagaggtagatattatcccc

SEQ ID NO: 5603087 - DNA, 25 bp, Homo sapien
tctctctaatacatgagaagaaaga

SEQ ID NO: 5603088 - DNA, 25 bp, Homo sapien
tccccattttaagccgagacaaaca

SEQ ID NO: 5603089 - DNA, 25 bp, Homo sapien
gagagaaagacaagacttactaagc

SEQ ID NO: 5603090 - DNA, 25 bp, Homo sapien
atactgacaggtcaaagcagagaga

SEQ ID NO: 5603091 - DNA, 25 bp, Homo sapien
ataccataagacaggatcagaacac

SEQ ID NO: 5603092 - DNA, 25 bp, Homo sapien
gaagttggaatactgacaggtcaaa

SEQ ID NO: 5603093 - DNA, 25 bp, Homo sapien
aacaagacagataccataagacagg

SEQ ID NO: 5603094 - DNA, 25 bp, Homo sapien
cagatctgtctgattcccaaagctt

SEQ ID NO: 5603095 - DNA, 25 bp, Homo sapien
agacaggatcagaacacagatctgt

SEQ ID NO: 5603096 - DNA, 25 bp, Homo sapien
ttaggctgaagtttcagatatttcc

SEQ ID NO: 5603097 - DNA, 25 bp, Homo sapien
tccctgaacatgaccttcatttctc

SEQ ID NO: 5603098 - DNA, 25 bp, Homo sapien
tacaatctatagcttccttgaaggc

SEQ ID NO: 5603099 - DNA, 25 bp, Homo sapien
gcatggatagccatcaccccactgc

SEQ ID NO: 5603100 - DNA, 25 bp, Homo sapien
aatgttcaagcatggatagccatca

SEQ ID NO: 5603101 - DNA, 25 bp, Homo sapien
tatagcttccttgaaggcacattac

SEQ ID NO: 5603102 - DNA, 25 bp, Homo sapien
tgagcttttgcttggagaacattcc

SEQ ID NO: 5603103 - DNA, 25 bp, Homo sapien
attctgacctcactgttccctgaac

SEQ ID NO: 5603104 - DNA, 25 bp, Homo sapien
gttcaagcatggatagccatcaccc

SEQ ID NO: 5603105 - DNA, 25 bp, Homo sapien
tttcctaatctgaccctcgcctttc

SEQ ID NO: 5603106 - DNA, 25 bp, Homo sapien
gaaggcacattacttaggctgaagt

SEQ ID NO: 5603107 - DNA, 25 bp, Homo sapien
tccattactgggggagttttgctat

SEQ ID NO: 5603108 - DNA, 25 bp, Homo sapien
tggactaacaatggggatcccagtg

SEQ ID NO: 5603109 - DNA, 25 bp, Homo sapien
ccgtttcccgcagatgtgatgtagg

SEQ ID NO: 5603110 - DNA, 25 bp, Homo sapien
gcctgcgcaacagtggactaacaat

SEQ ID NO: 5603111 - DNA, 25 bp, Homo sapien
cataaaaatacagggatgtggatcc

SEQ ID NO: 5603112 - DNA, 25 bp, Homo sapien
gatgtggatcccctgtactctatct

SEQ ID NO: 5603113 - DNA, 25 bp, Homo sapien
gtgcttaatccattactgggggagt

SEQ ID NO: 5603114 - DNA, 25 bp, Homo sapien
ttgtgagggaataatccttagtgct

SEQ ID NO: 5603115 - DNA, 25 bp, Homo sapien
tgtgatgtaggaagctacaactgcc

SEQ ID NO: 5603116 - DNA, 25 bp, Homo sapien
ctctatctagggtaagcctgcgcaa

SEQ ID NO: 5603117 - DNA, 25 bp, Homo sapien
gctgccctcgccaggcttgttttgt

SEQ ID NO: 5603118 - DNA, 25 bp, Homo sapien
tcctgtagaagattccgcagggacc

SEQ ID NO: 5603119 - DNA, 25 bp, Homo sapien
ctggtaacctagcatgacgtgaaga

SEQ ID NO: 5603120 - DNA, 25 bp, Homo sapien
tgctctgggaagcccatgctggtaa

SEQ ID NO: 5603121 - DNA, 25 bp, Homo sapien
gttggatgttatttaggcttcatac

SEQ ID NO: 5603122 - DNA, 25 bp, Homo sapien
aattcctgtagaagattccgcaggg

SEQ ID NO: 5603123 - DNA, 25 bp, Homo sapien
taacctagcatgacgtgaagagctg

SEQ ID NO: 5603124 - DNA, 25 bp, Homo sapien
tgctggtaacctagcatgacgtgaa

SEQ ID NO: 5603125 - DNA, 25 bp, Homo sapien
ggaagcccatgctggtaacctagca

SEQ ID NO: 5603126 - DNA, 25 bp, Homo sapien
ttccaagtccctcaagaaacaagtc

SEQ ID NO: 5603127 - DNA, 25 bp, Homo sapien
ccaagtccctcaagaaacaagtcag

SEQ ID NO: 5603128 - DNA, 25 bp, Homo sapien
gacgtgaagagctgcaattcctgta

SEQ ID NO: 5603129 - DNA, 25 bp, Homo sapien
atagccttctactgctggagtacat

SEQ ID NO: 5603130 - DNA, 25 bp, Homo sapien
ttctggtacatttgacatagccttc

SEQ ID NO: 5603131 - DNA, 25 bp, Homo sapien
gactatggaaaagacatatacagac

SEQ ID NO: 5603132 - DNA, 25 bp, Homo sapien
cccaagactgactctaggtagaaag

SEQ ID NO: 5603133 - DNA, 25 bp, Homo sapien
ctaacgggtgaaaactctaaagata

SEQ ID NO: 5603134 - DNA, 25 bp, Homo sapien
gataccaaattgctaatcgagtctc

SEQ ID NO: 5603135 - DNA, 25 bp, Homo sapien
tttgaggttagaagtacactctgat

SEQ ID NO: 5603136 - DNA, 25 bp, Homo sapien
aggtagaaaggcaagaatgtatttc

SEQ ID NO: 5603137 - DNA, 25 bp, Homo sapien
tagataggatattgagtaaccatac

SEQ ID NO: 5603138 - DNA, 25 bp, Homo sapien
ctaaactgctgatgctggaaacaag

SEQ ID NO: 5603139 - DNA, 25 bp, Homo sapien
aacttggataattctaggtgtatac

SEQ ID NO: 5603140 - DNA, 25 bp, Homo sapien
cagttccccgactccctgagaaaac

SEQ ID NO: 5603141 - DNA, 25 bp, Homo sapien
agagacccacttggtggggattttg

SEQ ID NO: 5603142 - DNA, 25 bp, Homo sapien
gatagttgggtgattgatctgattt

SEQ ID NO: 5603143 - DNA, 25 bp, Homo sapien
catctctgatgtagtgggatccttg

SEQ ID NO: 5603144 - DNA, 25 bp, Homo sapien
agtgcttagttgatagttgggtgat

SEQ ID NO: 5603145 - DNA, 25 bp, Homo sapien
gtgtagaatgaacaatggtgtggtt

SEQ ID NO: 5603146 - DNA, 25 bp, Homo sapien
ttttaacaagcttctgatggacagt

SEQ ID NO: 5603147 - DNA, 25 bp, Homo sapien
tgggatccttgttggtagagcattc

SEQ ID NO: 5603148 - DNA, 25 bp, Homo sapien
acttaacatagagacttgcacatag

SEQ ID NO: 5603149 - DNA, 25 bp, Homo sapien
tcaacctctgtgggcaatgctttac

SEQ ID NO: 5603150 - DNA, 25 bp, Homo sapien
tggtagagcattcaaagagacccac

SEQ ID NO: 5603151 - DNA, 25 bp, Homo sapien
cctctgagcaatggtgctgcgagga

SEQ ID NO: 5603152 - DNA, 25 bp, Homo sapien
ccttaaagtctgaaatacgggagcc

SEQ ID NO: 5603153 - DNA, 25 bp, Homo sapien
caggccctgttgtttgttggtgatc

SEQ ID NO: 5603154 - DNA, 25 bp, Homo sapien
ttcctgagggggtttatgctcctta

SEQ ID NO: 5603155 - DNA, 25 bp, Homo sapien
tcttgcccccagagcacagatggaa

SEQ ID NO: 5603156 - DNA, 25 bp, Homo sapien
gggatacattagtgaaaaggcagca

SEQ ID NO: 5603157 - DNA, 25 bp, Homo sapien
tgcgaggaccacatgtcgtggtgta

SEQ ID NO: 5603158 - DNA, 25 bp, Homo sapien
ggaagatcgtcggccttaaagtctg

SEQ ID NO: 5603159 - DNA, 25 bp, Homo sapien
accggggacatgtcctcccagtccc

SEQ ID NO: 5603160 - DNA, 25 bp, Homo sapien
gttgaacgtgggcaaattactcagt

SEQ ID NO: 5603161 - DNA, 25 bp, Homo sapien
gctctgtgcagctcagggatacatt

SEQ ID NO: 5603162 - DNA, 25 bp, Homo sapien
tgtgtatgtgtattagtgtgcatgt

SEQ ID NO: 5603163 - DNA, 25 bp, Homo sapien
ttgctctctggggtaagctgaatgt

SEQ ID NO: 5603164 - DNA, 25 bp, Homo sapien
gctgaatgtgcgttcaagaaaggat

SEQ ID NO: 5603165 - DNA, 25 bp, Homo sapien
tttccttgcagcatgtctagactgt

SEQ ID NO: 5603166 - DNA, 25 bp, Homo sapien
tatgggtgttcatcacatgccgagt

SEQ ID NO: 5603167 - DNA, 25 bp, Homo sapien
tgtgcatgtcttatgaggaaggaga

SEQ ID NO: 5603168 - DNA, 25 bp, Homo sapien
aaggagagagactttccacaagctt

SEQ ID NO: 5603169 - DNA, 25 bp, Homo sapien
gttcaagaaaggatatggaattgcc

SEQ ID NO: 5603170 - DNA, 25 bp, Homo sapien
tcagttaaatccaagcttagcagtt

SEQ ID NO: 5603171 - DNA, 25 bp, Homo sapien
gcctccataaacggactttagaatc

SEQ ID NO: 5603172 - DNA, 25 bp, Homo sapien
agctctttgactcttcggctccagc

SEQ ID NO: 5603173 - DNA, 25 bp, Homo sapien
gggcacctagtgagcatgacacatc

SEQ ID NO: 5603174 - DNA, 25 bp, Homo sapien
tcctaaagaatatggggacagtatg

SEQ ID NO: 5603175 - DNA, 25 bp, Homo sapien
caggggaatgctatagtcttgacga

SEQ ID NO: 5603176 - DNA, 25 bp, Homo sapien
gggacagtatgcacacaagcaagaa

SEQ ID NO: 5603177 - DNA, 25 bp, Homo sapien
cttattccgtatttggtgggggcag

SEQ ID NO: 5603178 - DNA, 25 bp, Homo sapien
atgtcacaaaaggacacaaatatcc

SEQ ID NO: 5603179 - DNA, 25 bp, Homo sapien
aactgtatcaagccaagggtccatc

SEQ ID NO: 5603180 - DNA, 25 bp, Homo sapien
tactgcagttggcaagcatggaaaa

SEQ ID NO: 5603181 - DNA, 25 bp, Homo sapien
cactccactacagccaaacagtttc

SEQ ID NO: 5603182 - DNA, 25 bp, Homo sapien
agggtccatcaaaccgtgcaccttt

SEQ ID NO: 5603183 - DNA, 25 bp, Homo sapien
ggcagaggttaaaaatgccctcaac

SEQ ID NO: 5603184 - DNA, 25 bp, Homo sapien
aaaaaaaaataacctcacatggctg

SEQ ID NO: 5603185 - DNA, 25 bp, Homo sapien
agtaggtaatctggcaaaggaccag

SEQ ID NO: 5603186 - DNA, 25 bp, Homo sapien
acatggctggtaaatctaagttcaa

SEQ ID NO: 5603187 - DNA, 25 bp, Homo sapien
accaaaaaattcacttcggattcaa

SEQ ID NO: 5603188 - DNA, 25 bp, Homo sapien
aaaatagcaaagattacaaagtgat

SEQ ID NO: 5603189 - DNA, 25 bp, Homo sapien
cagaagagacaatgcagtacaaaaa

SEQ ID NO: 5603190 - DNA, 25 bp, Homo sapien
gaccccagtaggtaatctggcaaag

SEQ ID NO: 5603191 - DNA, 25 bp, Homo sapien
gtttctgcctaccaaaatagcaaag

SEQ ID NO: 5603192 - DNA, 25 bp, Homo sapien
atctagtaaccaaagaaatgcaaat

SEQ ID NO: 5603193 - DNA, 25 bp, Homo sapien
ttacaaagtgatcatattcaatgct

SEQ ID NO: 5603194 - DNA, 25 bp, Homo sapien
ttcggattcaacactaagaccccag

SEQ ID NO: 5603195 - DNA, 25 bp, Homo sapien
cgagtgaatataattgaaatgagac

SEQ ID NO: 5603196 - DNA, 25 bp, Homo sapien
atggaactcactggcatgaaacaca

SEQ ID NO: 5603197 - DNA, 25 bp, Homo sapien
catccaaggtctcaacaaaagctgt

SEQ ID NO: 5603198 - DNA, 25 bp, Homo sapien
aagaaatccttgataaggcttagcc

SEQ ID NO: 5603199 - DNA, 25 bp, Homo sapien
gagacaagcactatattaggggtat

SEQ ID NO: 5603200 - DNA, 25 bp, Homo sapien
gaaatcctggcctcaccacctccac

SEQ ID NO: 5603201 - DNA, 25 bp, Homo sapien
tctcacatcacacatccaaggtctc

SEQ ID NO: 5603202 - DNA, 25 bp, Homo sapien
tctgaaagtattgagaaaggaatgc

SEQ ID NO: 5603203 - DNA, 25 bp, Homo sapien
agcaggagagatataaaattaagta

SEQ ID NO: 5603204 - DNA, 25 bp, Homo sapien
aggtattgtgctaagcaggagagat

SEQ ID NO: 5603205 - DNA, 25 bp, Homo sapien
ggggtatggacaaactgctctgaaa

SEQ ID NO: 5603206 - DNA, 25 bp, Homo sapien
ctcacctgttaaataaggagaatga

SEQ ID NO: 5603207 - DNA, 25 bp, Homo sapien
gaataggggtacagctctgtccttc

SEQ ID NO: 5603208 - DNA, 25 bp, Homo sapien
tgaaatacaaagatcactagattag

SEQ ID NO: 5603209 - DNA, 25 bp, Homo sapien
atcgaaggatttagaatcccagttc

SEQ ID NO: 5603210 - DNA, 25 bp, Homo sapien
cactagattagaaatcgaaggattt

SEQ ID NO: 5603211 - DNA, 25 bp, Homo sapien
aaactgctcaattctgggtggggtg

SEQ ID NO: 5603212 - DNA, 25 bp, Homo sapien
gtctggacagcacagtttgaaaaac

SEQ ID NO: 5603213 - DNA, 25 bp, Homo sapien
ataaggagaatgaactaggtctctt

SEQ ID NO: 5603214 - DNA, 25 bp, Homo sapien
gaatcccagttctgctatcagccag

SEQ ID NO: 5603215 - DNA, 25 bp, Homo sapien
ctgaacctctatggtacagatttcc

SEQ ID NO: 5603216 - DNA, 25 bp, Homo sapien
cagccagctgtgttactgaacctct

SEQ ID NO: 5603217 - DNA, 25 bp, Homo sapien
agccgcaccttaagaggagtcagga

SEQ ID NO: 5603218 - DNA, 25 bp, Homo sapien
aactgttcaggcaaagccgcacctt

SEQ ID NO: 5603219 - DNA, 25 bp, Homo sapien
actccaggcctgactacaaacagct

SEQ ID NO: 5603220 - DNA, 25 bp, Homo sapien
cagatgagacggttaatgcaagttt

SEQ ID NO: 5603221 - DNA, 25 bp, Homo sapien
atgccactacagaagaaagaccgtg

SEQ ID NO: 5603222 - DNA, 25 bp, Homo sapien
caagtttgaagcaacttccaggccc

SEQ ID NO: 5603223 - DNA, 25 bp, Homo sapien
gaaagaccgtggagcaatgtctatt

SEQ ID NO: 5603224 - DNA, 25 bp, Homo sapien
caaagtgggctatctcagaactgag

SEQ ID NO: 5603225 - DNA, 25 bp, Homo sapien
atgaagctgtgtttcaaagtgggct

SEQ ID NO: 5603226 - DNA, 25 bp, Homo sapien
actgaggatgagatatgccactaca

SEQ ID NO: 5603227 - DNA, 25 bp, Homo sapien
gtctattcccagagatccacccaac

SEQ ID NO: 5603228 - DNA, 25 bp, Homo sapien
taaatctgctgaggacattatggaa

SEQ ID NO: 5603229 - DNA, 25 bp, Homo sapien
aaatatggccatgtaaatctgctga

SEQ ID NO: 5603230 - DNA, 25 bp, Homo sapien
aacagcttaggacaaggtttagcac

SEQ ID NO: 5603231 - DNA, 25 bp, Homo sapien
gaaaagaaggctctgtagacagaaa

SEQ ID NO: 5603232 - DNA, 25 bp, Homo sapien
caggttcgcttttggaaaagaaggc

SEQ ID NO: 5603233 - DNA, 25 bp, Homo sapien
tagacagaaatgattagataacaga

SEQ ID NO: 5603234 - DNA, 25 bp, Homo sapien
atctgaacaaggatccatttgatgc

SEQ ID NO: 5603235 - DNA, 25 bp, Homo sapien
atggaagtttggatacaggttcgct

SEQ ID NO: 5603236 - DNA, 25 bp, Homo sapien
ctgtaattgacctataagaagcttc

SEQ ID NO: 5603237 - DNA, 25 bp, Homo sapien
tgctacgggagcagtttcaatctga

SEQ ID NO: 5603238 - DNA, 25 bp, Homo sapien
taagtgtgtcatatagagaattact

SEQ ID NO: 5603239 - DNA, 25 bp, Homo sapien
agaacgatagccaggcagttgtcca

SEQ ID NO: 5603240 - DNA, 25 bp, Homo sapien
agagtgcagccagctcacaccactt

SEQ ID NO: 5603241 - DNA, 25 bp, Homo sapien
acttgggtatctgagggtccactca

SEQ ID NO: 5603242 - DNA, 25 bp, Homo sapien
ggctcgatgatcagtaaagaggaaa

SEQ ID NO: 5603243 - DNA, 25 bp, Homo sapien
ggctatccagatggagacttggcca

SEQ ID NO: 5603244 - DNA, 25 bp, Homo sapien
gatgaagatgcccacagcctttgat

SEQ ID NO: 5603245 - DNA, 25 bp, Homo sapien
ggtccactcagccagaacgatagcc

SEQ ID NO: 5603246 - DNA, 25 bp, Homo sapien
tatttgtaagtgtgagcccaagtcc

SEQ ID NO: 5603247 - DNA, 25 bp, Homo sapien
gcatgctctaggaagagaacactcc

SEQ ID NO: 5603248 - DNA, 25 bp, Homo sapien
atcctagggccaagtctgttacaga

SEQ ID NO: 5603249 - DNA, 25 bp, Homo sapien
tttgatcacaggctgggctatccag

SEQ ID NO: 5603250 - DNA, 25 bp, Homo sapien
ggcaaggctgaattctgatgagatg

SEQ ID NO: 5603251 - DNA, 25 bp, Homo sapien
accgatgcccggacctctccttctc

SEQ ID NO: 5603252 - DNA, 25 bp, Homo sapien
gggctctatgtggccatgggctctg

SEQ ID NO: 5603253 - DNA, 25 bp, Homo sapien
ctctcctggaaggatactggaggga

SEQ ID NO: 5603254 - DNA, 25 bp, Homo sapien
cactttcccaaacacatagggtgtg

SEQ ID NO: 5603255 - DNA, 25 bp, Homo sapien
cctgatcaccccaggcaaggctgaa

SEQ ID NO: 5603256 - DNA, 25 bp, Homo sapien
acaccgatgcccggacctctccttc

SEQ ID NO: 5603257 - DNA, 25 bp, Homo sapien
ctatgtggccatgggctctgaaagg

SEQ ID NO: 5603258 - DNA, 25 bp, Homo sapien
atcaggacccctgatcaccccaggc

SEQ ID NO: 5603259 - DNA, 25 bp, Homo sapien
caaacacatagggtgtgtgagtgac

SEQ ID NO: 5603260 - DNA, 25 bp, Homo sapien
gggagagtcatcaggacccctgatc

SEQ ID NO: 5603261 - DNA, 25 bp, Homo sapien
agcccgaaggcctaacttttagaca

SEQ ID NO: 5603262 - DNA, 25 bp, Homo sapien
gtccactgccacaattcgcattacc

SEQ ID NO: 5603263 - DNA, 25 bp, Homo sapien
ccccattctgcaaaaagagggcccc

SEQ ID NO: 5603264 - DNA, 25 bp, Homo sapien
gatagagcctaaatgcttcagtcac

SEQ ID NO: 5603265 - DNA, 25 bp, Homo sapien
attcagcaagctgactcagtaaatt

SEQ ID NO: 5603266 - DNA, 25 bp, Homo sapien
aatacactgtatgaaaaaagctaac

SEQ ID NO: 5603267 - DNA, 25 bp, Homo sapien
tagacaactaaagctacacactgtt

SEQ ID NO: 5603268 - DNA, 25 bp, Homo sapien
atacactggcctaccaatagctctc

SEQ ID NO: 5603269 - DNA, 25 bp, Homo sapien
cactaacttttgaagcccgaaggcc

SEQ ID NO: 5603270 - DNA, 25 bp, Homo sapien
aatgcttttcgatgaccactaactt

SEQ ID NO: 5603271 - DNA, 25 bp, Homo sapien
accaaattttaggccttgatagagc

SEQ ID NO: 5603272 - DNA, 25 bp, Homo sapien
attttccgaatggttgaacactaac

SEQ ID NO: 5603273 - DNA, 25 bp, Homo sapien
tttgtaagttattgggaattctaca

SEQ ID NO: 5603274 - DNA, 25 bp, Homo sapien
taaaaatgcactagctgccaagagc

SEQ ID NO: 5603275 - DNA, 25 bp, Homo sapien
atgggaaaattttccgaatggttga

SEQ ID NO: 5603276 - DNA, 25 bp, Homo sapien
agaggcaggattcagtatacaaatt

SEQ ID NO: 5603277 - DNA, 25 bp, Homo sapien
gttattgggaattctacactagtct

SEQ ID NO: 5603278 - DNA, 25 bp, Homo sapien
gctgccaagagctatggtccatcta

SEQ ID NO: 5603279 - DNA, 25 bp, Homo sapien
atggtccatctaaagcaaaatgctt

SEQ ID NO: 5603280 - DNA, 25 bp, Homo sapien
ccgaatggttgaacactaaccctgg

SEQ ID NO: 5603281 - DNA, 25 bp, Homo sapien
aaaacaataagtaatcaaatttcaa

SEQ ID NO: 5603282 - DNA, 25 bp, Homo sapien
gcactagctgccaagagctatggtc

SEQ ID NO: 5603283 - DNA, 25 bp, Homo sapien
taagttaatatgagtaaaagaagta

SEQ ID NO: 5603284 - DNA, 25 bp, Homo sapien
gagacccccgcctcaagtaccactg

SEQ ID NO: 5603285 - DNA, 25 bp, Homo sapien
tgtgcaactaagtccttgagtcatg

SEQ ID NO: 5603286 - DNA, 25 bp, Homo sapien
ctgggagaaagttacccttctgttc

SEQ ID NO: 5603287 - DNA, 25 bp, Homo sapien
catatcgtgataaatgcatgcatac

SEQ ID NO: 5603288 - DNA, 25 bp, Homo sapien
actaccaatgtgtctgggagaaagt

SEQ ID NO: 5603289 - DNA, 25 bp, Homo sapien
tacacacacaactgtgaaggaagcc

SEQ ID NO: 5603290 - DNA, 25 bp, Homo sapien
tgaacagcagaaatcctgtcatttg

SEQ ID NO: 5603291 - DNA, 25 bp, Homo sapien
aggctctttggtgcatatcgtgata

SEQ ID NO: 5603292 - DNA, 25 bp, Homo sapien
aaagaagataatataattgagctat

SEQ ID NO: 5603293 - DNA, 25 bp, Homo sapien
aagtccttgagtcatgagacccccg

SEQ ID NO: 5603294 - DNA, 25 bp, Homo sapien
gacttcgagcccaacctgggtaaca

SEQ ID NO: 5603295 - DNA, 25 bp, Homo sapien
aaaaaaattactcaggcgtgtgcct

SEQ ID NO: 5603296 - DNA, 25 bp, Homo sapien
atgtacgaatatctgttgtagaatt

SEQ ID NO: 5603297 - DNA, 25 bp, Homo sapien
tatgcaaaatattctgggctgggtg

SEQ ID NO: 5603298 - DNA, 25 bp, Homo sapien
attttcactgaatacagaagaaatg

SEQ ID NO: 5603299 - DNA, 25 bp, Homo sapien
gcccaggacttcgagcccaacctgg

SEQ ID NO: 5603300 - DNA, 25 bp, Homo sapien
aatgacaggcaaaatgtatgcaaaa

SEQ ID NO: 5603301 - DNA, 25 bp, Homo sapien
tataaatagacaaatgacaggcaaa

SEQ ID NO: 5603302 - DNA, 25 bp, Homo sapien
aggcaaacatggtagactataattc

SEQ ID NO: 5603303 - DNA, 25 bp, Homo sapien
atgaaactaaaaaagttcgataatc

SEQ ID NO: 5603304 - DNA, 25 bp, Homo sapien
agaattttgtgaatcacaggcaaac

SEQ ID NO: 5603305 - DNA, 25 bp, Homo sapien
aaatgaaaagtagtatacggatttc

SEQ ID NO: 5603306 - DNA, 25 bp, Homo sapien
gattagatggttattgtagtagctc

SEQ ID NO: 5603307 - DNA, 25 bp, Homo sapien
ggagtgagtggtaagcattattctt

SEQ ID NO: 5603308 - DNA, 25 bp, Homo sapien
taatgggcttagcaaacaggttggg

SEQ ID NO: 5603309 - DNA, 25 bp, Homo sapien
tacatcccctgcatggtacctgtgc

SEQ ID NO: 5603310 - DNA, 25 bp, Homo sapien
gcatggtacctgtgctgcaagagat

SEQ ID NO: 5603311 - DNA, 25 bp, Homo sapien
tgcaaggagtccatttagattagat

SEQ ID NO: 5603312 - DNA, 25 bp, Homo sapien
aaaatggaccaggatagaaaatgaa

SEQ ID NO: 5603313 - DNA, 25 bp, Homo sapien
aagtgagaggaatttaatgaaataa

SEQ ID NO: 5603314 - DNA, 25 bp, Homo sapien
tgaaataaggcaggttataaatact

SEQ ID NO: 5603315 - DNA, 25 bp, Homo sapien
ttttatctgtatgaagaggagtgag

SEQ ID NO: 5603316 - DNA, 25 bp, Homo sapien
aatttgctgaaaatatgtgagcctt

SEQ ID NO: 5603317 - DNA, 25 bp, Homo sapien
ggtcacagctcacaggtgaggtgat

SEQ ID NO: 5603318 - DNA, 25 bp, Homo sapien
tgagtgtgtcatttttcgctgagaa

SEQ ID NO: 5603319 - DNA, 25 bp, Homo sapien
taaaaagcaaatgtgtcttccttga

SEQ ID NO: 5603320 - DNA, 25 bp, Homo sapien
ttttcgctgagaagtggctctcctg

SEQ ID NO: 5603321 - DNA, 25 bp, Homo sapien
gaagtgatgagtgaataaaaagcaa

SEQ ID NO: 5603322 - DNA, 25 bp, Homo sapien
actctggtcagcatagtgatgggaa

SEQ ID NO: 5603323 - DNA, 25 bp, Homo sapien
tatgtgagccttccatgaaagattt

SEQ ID NO: 5603324 - DNA, 25 bp, Homo sapien
atatacatggtcacagctcacaggt

SEQ ID NO: 5603325 - DNA, 25 bp, Homo sapien
ggctctcctgccagaaaactgctat

SEQ ID NO: 5603326 - DNA, 25 bp, Homo sapien
gtgaaattgtgacatatacatggtc

SEQ ID NO: 5603327 - DNA, 25 bp, Homo sapien
tattgtaaatctgactgtaggaatt

SEQ ID NO: 5603328 - DNA, 25 bp, Homo sapien
agagatcctgtgttcagccaaggcc

SEQ ID NO: 5603329 - DNA, 25 bp, Homo sapien
ttttaaagagatcctgtgttcagcc

SEQ ID NO: 5603330 - DNA, 25 bp, Homo sapien
cagccaaggcctaaaggatatcttt

SEQ ID NO: 5603331 - DNA, 25 bp, Homo sapien
ctgactgtaggaattttaacgcact

SEQ ID NO: 5603332 - DNA, 25 bp, Homo sapien
tgtgttcagccaaggcctaaaggat

SEQ ID NO: 5603333 - DNA, 25 bp, Homo sapien
agttatgattgtgccactgcactcc

SEQ ID NO: 5603334 - DNA, 25 bp, Homo sapien
tgtaggaattttaacgcacttagcc

SEQ ID NO: 5603335 - DNA, 25 bp, Homo sapien
gcacttagcctaaaatggtatcttt

SEQ ID NO: 5603336 - DNA, 25 bp, Homo sapien
gttcagccaaggcctaaaggatatc

SEQ ID NO: 5603337 - DNA, 25 bp, Homo sapien
gagaccctgtctctaaaaatactaa

SEQ ID NO: 5603338 - DNA, 25 bp, Homo sapien
ggctgaaatcctggtgtgatatggc

SEQ ID NO: 5603339 - DNA, 25 bp, Homo sapien
gatatggctgaataatgcatgatct

SEQ ID NO: 5603340 - DNA, 25 bp, Homo sapien
tgtgagtcaaataaatgctaaattt

SEQ ID NO: 5603341 - DNA, 25 bp, Homo sapien
caatgggcaattgtgagtcaaataa

SEQ ID NO: 5603342 - DNA, 25 bp, Homo sapien
tttttgcctctccaagaaggcagca

SEQ ID NO: 5603343 - DNA, 25 bp, Homo sapien
tggtgtgatatggctgaataatgca

SEQ ID NO: 5603344 - DNA, 25 bp, Homo sapien
gtggctgaaatcctggtgtgatatg

SEQ ID NO: 5603345 - DNA, 25 bp, Homo sapien
tcctggtgtgatatggctgaataat

SEQ ID NO: 5603346 - DNA, 25 bp, Homo sapien
gaaatcctggtgtgatatggctgaa

SEQ ID NO: 5603347 - DNA, 25 bp, Homo sapien
aatggacaatgggcaattgtgagtc

SEQ ID NO: 5603348 - DNA, 25 bp, Homo sapien
atgtatttagttattagtgagaaaa

SEQ ID NO: 5603349 - DNA, 25 bp, Homo sapien
gaacagaatttgggtctgctcagag

SEQ ID NO: 5603350 - DNA, 25 bp, Homo sapien
aggcatgatgtgaaacatgtctggg

SEQ ID NO: 5603351 - DNA, 25 bp, Homo sapien
catgtgacctatcactgagctcacc

SEQ ID NO: 5603352 - DNA, 25 bp, Homo sapien
catgtctgggataaaagctttgttc

SEQ ID NO: 5603353 - DNA, 25 bp, Homo sapien
cagccattaggcaaacaccactcct

SEQ ID NO: 5603354 - DNA, 25 bp, Homo sapien
taggcaaacaccactccttgcttcc

SEQ ID NO: 5603355 - DNA, 25 bp, Homo sapien
ttgttctattgacagcaaacctttt

SEQ ID NO: 5603356 - DNA, 25 bp, Homo sapien
ctgagctcaccagctgaggtcaatt

SEQ ID NO: 5603357 - DNA, 25 bp, Homo sapien
atcactgagctcaccagctgaggtc

SEQ ID NO: 5603358 - DNA, 25 bp, Homo sapien
aatatactgagcagtccaggagcag

SEQ ID NO: 5603359 - DNA, 25 bp, Homo sapien
ctgctcagaggcatgatgtgaaaca

SEQ ID NO: 5603360 - DNA, 25 bp, Homo sapien
ctcatcttccagggctgagtgtggg

SEQ ID NO: 5603361 - DNA, 25 bp, Homo sapien
cccccaggtttccaggaccctcatc

SEQ ID NO: 5603362 - DNA, 25 bp, Homo sapien
aacggtggaaggtttcactacaaca

SEQ ID NO: 5603363 - DNA, 25 bp, Homo sapien
aaggcaggacttgcagcttctcagg

SEQ ID NO: 5603364 - DNA, 25 bp, Homo sapien
ccttcatggtccgagaaggaaacgg

SEQ ID NO: 5603365 - DNA, 25 bp, Homo sapien
cgccgccacacctgccccccaggtt

SEQ ID NO: 5603366 - DNA, 25 bp, Homo sapien
ctaaagtcctggcgccgccacacct

SEQ ID NO: 5603367 - DNA, 25 bp, Homo sapien
gaaaggcaggacttgcagcttctca

SEQ ID NO: 5603368 - DNA, 25 bp, Homo sapien
tcactacaacagaaacagaaaggca

SEQ ID NO: 5603369 - DNA, 25 bp, Homo sapien
cacctgccccccaggtttccaggac

SEQ ID NO: 5603370 - DNA, 25 bp, Homo sapien
caggtttccaggaccctcatcttcc

SEQ ID NO: 5603371 - DNA, 25 bp, Homo sapien
aagtacgtaaatggatgcatccctt

SEQ ID NO: 5603372 - DNA, 25 bp, Homo sapien
ggagcagaacttgttccaggtgctt

SEQ ID NO: 5603373 - DNA, 25 bp, Homo sapien
catcccttggagatgcttggtggct

SEQ ID NO: 5603374 - DNA, 25 bp, Homo sapien
accccctgcagttaagcctagcttc

SEQ ID NO: 5603375 - DNA, 25 bp, Homo sapien
gatatgagcaagtacgtaaatggat

SEQ ID NO: 5603376 - DNA, 25 bp, Homo sapien
aaccttagtggtgtcttcagctctc

SEQ ID NO: 5603377 - DNA, 25 bp, Homo sapien
gttgtggatgactttattggtggga

SEQ ID NO: 5603378 - DNA, 25 bp, Homo sapien
ccccttgatggttctgccaggcttc

SEQ ID NO: 5603379 - DNA, 25 bp, Homo sapien
ctttattggtgggagttcatctgag

SEQ ID NO: 5603380 - DNA, 25 bp, Homo sapien
gggctggctgcagttttatggagca

SEQ ID NO: 5603381 - DNA, 25 bp, Homo sapien
gtgcctaccacgtcctctgctgccc

SEQ ID NO: 5603382 - DNA, 25 bp, Homo sapien
tagaaatccataccacatagaaggc

SEQ ID NO: 5603383 - DNA, 25 bp, Homo sapien
aataagaaagaatgtgtaattttta

SEQ ID NO: 5603384 - DNA, 25 bp, Homo sapien
cagagaactccaatgttagaaatcc

SEQ ID NO: 5603385 - DNA, 25 bp, Homo sapien
tccataccacatagaaggctgcatg

SEQ ID NO: 5603386 - DNA, 25 bp, Homo sapien
accacatagaaggctgcatggtgta

SEQ ID NO: 5603387 - DNA, 25 bp, Homo sapien
ttgggcagagaactccaatgttaga

SEQ ID NO: 5603388 - DNA, 25 bp, Homo sapien
tacagaagtttcaatcatgatgatt

SEQ ID NO: 5603389 - DNA, 25 bp, Homo sapien
atggtgtactgaagttacagaagtt

SEQ ID NO: 5603390 - DNA, 25 bp, Homo sapien
aaaagtcctgtgctcgcctaactac

SEQ ID NO: 5603391 - DNA, 25 bp, Homo sapien
atcatgatgatttaaacaatgctga

SEQ ID NO: 5603392 - DNA, 25 bp, Homo sapien
atttcctatggacctctttagaagc

SEQ ID NO: 5603393 - DNA, 25 bp, Homo sapien
gggggaggcaaaattccctgcaaga

SEQ ID NO: 5603394 - DNA, 25 bp, Homo sapien
tagacttctagcacagttaccagtt

SEQ ID NO: 5603395 - DNA, 25 bp, Homo sapien
ctgactgtccaccgaaaaacgagca

SEQ ID NO: 5603396 - DNA, 25 bp, Homo sapien
acgaaccataagtcttgttaccctc

SEQ ID NO: 5603397 - DNA, 25 bp, Homo sapien
aaaatggcaaaatacatgttacatc

SEQ ID NO: 5603398 - DNA, 25 bp, Homo sapien
aaaattccctgcaagagaggcacag

SEQ ID NO: 5603399 - DNA, 25 bp, Homo sapien
aaagtagttccataaatgtgccatt

SEQ ID NO: 5603400 - DNA, 25 bp, Homo sapien
gtttgagtatgaagtaataagcaat

SEQ ID NO: 5603401 - DNA, 25 bp, Homo sapien
tacaaaggcacaagacgaaccataa

SEQ ID NO: 5603402 - DNA, 25 bp, Homo sapien
cgaaaaacgagcactgaccccttcg

SEQ ID NO: 5603403 - DNA, 25 bp, Homo sapien
tgttaccctcctgcatcaaaatggc

SEQ ID NO: 5603404 - DNA, 25 bp, Homo sapien
ctaacaacaacaatatgccacatca

SEQ ID NO: 5603405 - DNA, 25 bp, Homo sapien
agggggaacaatttaacacacatca

SEQ ID NO: 5603406 - DNA, 25 bp, Homo sapien
acatgcccacaaagactgaacacta

SEQ ID NO: 5603407 - DNA, 25 bp, Homo sapien
ttaaaaacatgcccacaaagactga

SEQ ID NO: 5603408 - DNA, 25 bp, Homo sapien
acattatcaaaaactgggaacaagc

SEQ ID NO: 5603409 - DNA, 25 bp, Homo sapien
aaactgggaacaagctgaagtataa

SEQ ID NO: 5603410 - DNA, 25 bp, Homo sapien
tatcaaaaactgggaacaagctgaa

SEQ ID NO: 5603411 - DNA, 25 bp, Homo sapien
tgggttgagataggtctgtttttaa

SEQ ID NO: 5603412 - DNA, 25 bp, Homo sapien
gactgctaagctactgggttgagat

SEQ ID NO: 5603413 - DNA, 25 bp, Homo sapien
ataattatcctgactgctaagctac

SEQ ID NO: 5603414 - DNA, 25 bp, Homo sapien
tgggaacaagctgaagtataaaagg

SEQ ID NO: 5603415 - DNA, 25 bp, Homo sapien
gtgtgattaaaatgtgagagattgc

SEQ ID NO: 5603416 - DNA, 25 bp, Homo sapien
tgtgttccatccagagctagagaat

SEQ ID NO: 5603417 - DNA, 25 bp, Homo sapien
gtgagagattgcagtattttgacgt

SEQ ID NO: 5603418 - DNA, 25 bp, Homo sapien
taccttagggaaccatctctagttc

SEQ ID NO: 5603419 - DNA, 25 bp, Homo sapien
tttaaagtgctagatgtgttccatc

SEQ ID NO: 5603420 - DNA, 25 bp, Homo sapien
ccatccagagctagagaataattaa

SEQ ID NO: 5603421 - DNA, 25 bp, Homo sapien
ggattataaagaagagttcagtgcc

SEQ ID NO: 5603422 - DNA, 25 bp, Homo sapien
atctcagtgtgaggattataaagaa

SEQ ID NO: 5603423 - DNA, 25 bp, Homo sapien
ctctagttcagtctgggatgtgggt

SEQ ID NO: 5603424 - DNA, 25 bp, Homo sapien
gatagaaaagaaatctcagtgtgag

SEQ ID NO: 5603425 - DNA, 25 bp, Homo sapien
tttgggctgggaaatctgccctctt

SEQ ID NO: 5603426 - DNA, 25 bp, Homo sapien
cttggttcccctctgcagatgactg

SEQ ID NO: 5603427 - DNA, 25 bp, Homo sapien
ataaaacggggatgatagtattttg

SEQ ID NO: 5603428 - DNA, 25 bp, Homo sapien
gactaagaggaaacccacgctcttc

SEQ ID NO: 5603429 - DNA, 25 bp, Homo sapien
taggttctcagggcaccttggttcc

SEQ ID NO: 5603430 - DNA, 25 bp, Homo sapien
tattgtaagggctaagtgttcactg

SEQ ID NO: 5603431 - DNA, 25 bp, Homo sapien
ttcagtgatttcagtcggagcccag

SEQ ID NO: 5603432 - DNA, 25 bp, Homo sapien
gcccagtggttttcaggatggagaa

SEQ ID NO: 5603433 - DNA, 25 bp, Homo sapien
aggacccaggcctattcctgcctcc

SEQ ID NO: 5603434 - DNA, 25 bp, Homo sapien
ttctcgtaagcaagctagcaaagct

SEQ ID NO: 5603435 - DNA, 25 bp, Homo sapien
actctgtgtagacaaaccatagttc

SEQ ID NO: 5603436 - DNA, 25 bp, Homo sapien
ttggtagcagcccagtggttttcag

SEQ ID NO: 5603437 - DNA, 25 bp, Homo sapien
aataacatagctgaaccaggttgtt

SEQ ID NO: 5603438 - DNA, 25 bp, Homo sapien
cacatcactgtaggcacagtatgtc

SEQ ID NO: 5603439 - DNA, 25 bp, Homo sapien
tgtaggcacagtatgtcaattaaat

SEQ ID NO: 5603440 - DNA, 25 bp, Homo sapien
aaagcattattaaaacatgggtccc

SEQ ID NO: 5603441 - DNA, 25 bp, Homo sapien
cttggtaaaataatgaagatattct

SEQ ID NO: 5603442 - DNA, 25 bp, Homo sapien
taatcaagaggagcaatagtaataa

SEQ ID NO: 5603443 - DNA, 25 bp, Homo sapien
caagctgtgaaagcagtgaaacatt

SEQ ID NO: 5603444 - DNA, 25 bp, Homo sapien
tctcactcaagctgtgaaagcagtg

SEQ ID NO: 5603445 - DNA, 25 bp, Homo sapien
tctttgtagcctcacacatcactgt

SEQ ID NO: 5603446 - DNA, 25 bp, Homo sapien
aaccaggttgttgaatctttgtagc

SEQ ID NO: 5603447 - DNA, 25 bp, Homo sapien
aagaggagcaatagtaataacatag

SEQ ID NO: 5603448 - DNA, 25 bp, Homo sapien
tatctccttgaccggtgactgccca

SEQ ID NO: 5603449 - DNA, 25 bp, Homo sapien
ggtctctttgggccaagcaggcatg

SEQ ID NO: 5603450 - DNA, 25 bp, Homo sapien
ggccatcaccgcgcacaactcatct

SEQ ID NO: 5603451 - DNA, 25 bp, Homo sapien
gggaaggggcatatctccttgaccg

SEQ ID NO: 5603452 - DNA, 25 bp, Homo sapien
atggtgcctcccgccagtcatccca

SEQ ID NO: 5603453 - DNA, 25 bp, Homo sapien
tgactgcccaggatacagtgggtca

SEQ ID NO: 5603454 - DNA, 25 bp, Homo sapien
ggaaggcgctctctgcgtctcactt

SEQ ID NO: 5603455 - DNA, 25 bp, Homo sapien
acggagcgagatgccgtctctaaat

SEQ ID NO: 5603456 - DNA, 25 bp, Homo sapien
gcgtctcactttccaagagggtctc

SEQ ID NO: 5603457 - DNA, 25 bp, Homo sapien
gatcttctcctcgtctcagcctccc

SEQ ID NO: 5603458 - DNA, 25 bp, Homo sapien
cagtcaatgagatcactggaaggcg

SEQ ID NO: 5603459 - DNA, 25 bp, Homo sapien
catttgaaagggaaactgcataagt

SEQ ID NO: 5603460 - DNA, 25 bp, Homo sapien
cagagtaggtgctgttattgctttg

SEQ ID NO: 5603461 - DNA, 25 bp, Homo sapien
gctgcactaggtatgatggagatca

SEQ ID NO: 5603462 - DNA, 25 bp, Homo sapien
ttgtgcaatcaggcagagctgcact

SEQ ID NO: 5603463 - DNA, 25 bp, Homo sapien
ttgctttgaatggaactcagcttgc

SEQ ID NO: 5603464 - DNA, 25 bp, Homo sapien
gtgggtttggagttgatatcatcta

SEQ ID NO: 5603465 - DNA, 25 bp, Homo sapien
ctatgctcacagtccttggctcatc

SEQ ID NO: 5603466 - DNA, 25 bp, Homo sapien
aacagtctgtgaatgacttgggtcc

SEQ ID NO: 5603467 - DNA, 25 bp, Homo sapien
tgatggagatcagccctatgctcac

SEQ ID NO: 5603468 - DNA, 25 bp, Homo sapien
ttctgaagtgctgtatatgggaaat

SEQ ID NO: 5603469 - DNA, 25 bp, Homo sapien
actgtgaagctgctaagctgttttc

SEQ ID NO: 5603470 - DNA, 25 bp, Homo sapien
tatgtgtcatgttcttctgagttat

SEQ ID NO: 5603471 - DNA, 25 bp, Homo sapien
ggaagaagctgcctaaactgacagt

SEQ ID NO: 5603472 - DNA, 25 bp, Homo sapien
taaactgacagtattacaacctaat

SEQ ID NO: 5603473 - DNA, 25 bp, Homo sapien
gagacagtcaaaccaaatatgcttc

SEQ ID NO: 5603474 - DNA, 25 bp, Homo sapien
aacctaataggtaatcatctttcaa

SEQ ID NO: 5603475 - DNA, 25 bp, Homo sapien
ccaaatttcccagcgaaacctttgc

SEQ ID NO: 5603476 - DNA, 25 bp, Homo sapien
ttgtcaatctgtatacttatgtgtc

SEQ ID NO: 5603477 - DNA, 25 bp, Homo sapien
tatcaggttaagaggttaaggctta

SEQ ID NO: 5603478 - DNA, 25 bp, Homo sapien
aaaaaagagacagtcaaaccaaata

SEQ ID NO: 5603479 - DNA, 25 bp, Homo sapien
ttcccagcgaaacctttgcaaaatc

SEQ ID NO: 5603480 - DNA, 25 bp, Homo sapien
ctgaactatcaggttaagaggttaa

SEQ ID NO: 5603481 - DNA, 25 bp, Homo sapien
ggtggtatagaaagcctcgatcatc

SEQ ID NO: 5603482 - DNA, 25 bp, Homo sapien
gtggtggtatagaaagcctcgatca

SEQ ID NO: 5603483 - DNA, 25 bp, Homo sapien
gggacagcctgacacaaccaggatg

SEQ ID NO: 5603484 - DNA, 25 bp, Homo sapien
ggatgatgagaaaatacacaccttg

SEQ ID NO: 5603485 - DNA, 25 bp, Homo sapien
gatctctagggacagcctgacacaa

SEQ ID NO: 5603486 - DNA, 25 bp, Homo sapien
ggtgatctctagggacagcctgaca

SEQ ID NO: 5603487 - DNA, 25 bp, Homo sapien
acaccttggtggtggtatagaaagc

SEQ ID NO: 5603488 - DNA, 25 bp, Homo sapien
acagcctgacacaaccaggatgatg

SEQ ID NO: 5603489 - DNA, 25 bp, Homo sapien
tactagccaatgcttccagcccctc

SEQ ID NO: 5603490 - DNA, 25 bp, Homo sapien
atacacaccttggtggtggtataga

SEQ ID NO: 5603491 - DNA, 25 bp, Homo sapien
gcctcgatcatctactagccaatgc

SEQ ID NO: 5603492 - DNA, 25 bp, Homo sapien
tgaaccgtgaaccaaaggactttca

SEQ ID NO: 5603493 - DNA, 25 bp, Homo sapien
ctcaaagacttctaggaaggaaacg

SEQ ID NO: 5603494 - DNA, 25 bp, Homo sapien
tagtgatatctgactcaagacatta

SEQ ID NO: 5603495 - DNA, 25 bp, Homo sapien
ttttcaaattagtgatatctgactc

SEQ ID NO: 5603496 - DNA, 25 bp, Homo sapien
gtctatgaaaaggttgtgaaccgtg

SEQ ID NO: 5603497 - DNA, 25 bp, Homo sapien
cccaggtaccaacctggttgaactc

SEQ ID NO: 5603498 - DNA, 25 bp, Homo sapien
aggttgtgaaccgtgaaccaaagga

SEQ ID NO: 5603499 - DNA, 25 bp, Homo sapien
tttcatgattagtcatatgacacct

SEQ ID NO: 5603500 - DNA, 25 bp, Homo sapien
tgaaaaggttgtgaaccgtgaacca

SEQ ID NO: 5603501 - DNA, 25 bp, Homo sapien
accaacctggttgaactccaaatta

SEQ ID NO: 5603502 - DNA, 25 bp, Homo sapien
agacttctaggaaggaaacgactta

SEQ ID NO: 5603503 - DNA, 25 bp, Homo sapien
tgtctagatggaaacatactgatat

SEQ ID NO: 5603504 - DNA, 25 bp, Homo sapien
cagcaaagatgaagtagaacaactt

SEQ ID NO: 5603505 - DNA, 25 bp, Homo sapien
tttaagagccttagtcactgcctac

SEQ ID NO: 5603506 - DNA, 25 bp, Homo sapien
tccaacaacagtgtacagagctcca

SEQ ID NO: 5603507 - DNA, 25 bp, Homo sapien
tcatggtcctaacacaagaggaaag

SEQ ID NO: 5603508 - DNA, 25 bp, Homo sapien
aaacctaggtgtttgtgttgggcga

SEQ ID NO: 5603509 - DNA, 25 bp, Homo sapien
atgagcttaatgaggtcatggtcct

SEQ ID NO: 5603510 - DNA, 25 bp, Homo sapien
acattgatgttagaccgttcctcca

SEQ ID NO: 5603511 - DNA, 25 bp, Homo sapien
aaggaccagtgctgtgaacaacatg

SEQ ID NO: 5603512 - DNA, 25 bp, Homo sapien
accatgctgtggacataacatacct

SEQ ID NO: 5603513 - DNA, 25 bp, Homo sapien
aaatcatggaaaatctgagagctag

SEQ ID NO: 5603514 - DNA, 25 bp, Homo sapien
catcaaatttttgaggggaaatacc

SEQ ID NO: 5603515 - DNA, 25 bp, Homo sapien
agagtccttgtattcaggattatct

SEQ ID NO: 5603516 - DNA, 25 bp, Homo sapien
ttctggtgtgtgggataacatgtta

SEQ ID NO: 5603517 - DNA, 25 bp, Homo sapien
cataaaatagtaaaaggcatcaaat

SEQ ID NO: 5603518 - DNA, 25 bp, Homo sapien
aaccatgctttcaaatctgcctaac

SEQ ID NO: 5603519 - DNA, 25 bp, Homo sapien
aaatcataaaatagtaaaaggcatc

SEQ ID NO: 5603520 - DNA, 25 bp, Homo sapien
gtgtgggataacatgttaatagcct

SEQ ID NO: 5603521 - DNA, 25 bp, Homo sapien
aactcgacaacagttctggtgtgtg

SEQ ID NO: 5603522 - DNA, 25 bp, Homo sapien
aggggaaatacctattggtgaactg

SEQ ID NO: 5603523 - DNA, 25 bp, Homo sapien
aaatctgcctaacaattatagcttc

SEQ ID NO: 5603524 - DNA, 25 bp, Homo sapien
attggtgaactgaaaactcgacaac

SEQ ID NO: 5603525 - DNA, 25 bp, Homo sapien
tgtaccatgtggctcactgagtcac

SEQ ID NO: 5603526 - DNA, 25 bp, Homo sapien
gtggctaatagcaaaagagagtgct

SEQ ID NO: 5603527 - DNA, 25 bp, Homo sapien
attttacccatcgggaagctgaaat

SEQ ID NO: 5603528 - DNA, 25 bp, Homo sapien
catctcagttctgcgggtgtcccag

SEQ ID NO: 5603529 - DNA, 25 bp, Homo sapien
tgggaaaccgcatgtcgtgcttgtg

SEQ ID NO: 5603530 - DNA, 25 bp, Homo sapien
agtgcagccccccaatggcatccac

SEQ ID NO: 5603531 - DNA, 25 bp, Homo sapien
cacaaaccttcggagagaagtccgt

SEQ ID NO: 5603532 - DNA, 25 bp, Homo sapien
ccaggctgagtgctgtaccatgtgg

SEQ ID NO: 5603533 - DNA, 25 bp, Homo sapien
gtcacttgtccaagaacacccggac

SEQ ID NO: 5603534 - DNA, 25 bp, Homo sapien
tggatacatgagcccccccagtcca

SEQ ID NO: 5603535 - DNA, 25 bp, Homo sapien
tagaccccagagaagtgacaattaa

SEQ ID NO: 5603536 - DNA, 25 bp, Homo sapien
aaggatcatatctctgtcagcccac

SEQ ID NO: 5603537 - DNA, 25 bp, Homo sapien
aggggagaaaaggatcatatctctg

SEQ ID NO: 5603538 - DNA, 25 bp, Homo sapien
aaaggagatgcaacttaacacggca

SEQ ID NO: 5603539 - DNA, 25 bp, Homo sapien
attaatcgactgtaaaggaactgcc

SEQ ID NO: 5603540 - DNA, 25 bp, Homo sapien
tgcactgagctatgaatcaaacttt

SEQ ID NO: 5603541 - DNA, 25 bp, Homo sapien
gactgtaaaggaactgcctcccatt

SEQ ID NO: 5603542 - DNA, 25 bp, Homo sapien
aggtcaaaaggagatgcaacttaac

SEQ ID NO: 5603543 - DNA, 25 bp, Homo sapien
cacaagccaggatgcttcttggttt

SEQ ID NO: 5603544 - DNA, 25 bp, Homo sapien
taacacggcatcagattgtaatact

SEQ ID NO: 5603545 - DNA, 25 bp, Homo sapien
aaaaatgtgaattaatcgactgtaa

SEQ ID NO: 5603546 - DNA, 25 bp, Homo sapien
cccaagaatcacacaagccaggatg

SEQ ID NO: 5603547 - DNA, 25 bp, Homo sapien
tacaatgaggacaataaggtgcttt

SEQ ID NO: 5603548 - DNA, 25 bp, Homo sapien
aaaaatgtattaagacccgatgctc

SEQ ID NO: 5603549 - DNA, 25 bp, Homo sapien
tttgtctgtttgtcgtgggagatgg

SEQ ID NO: 5603550 - DNA, 25 bp, Homo sapien
catccattcaaggccgcagtgggaa

SEQ ID NO: 5603551 - DNA, 25 bp, Homo sapien
agcatcaaagcatgccctggttggg

SEQ ID NO: 5603552 - DNA, 25 bp, Homo sapien
gaaggttattagactgttgcactcc

SEQ ID NO: 5603553 - DNA, 25 bp, Homo sapien
ggccctagaggatgcagtttcttgt

SEQ ID NO: 5603554 - DNA, 25 bp, Homo sapien
ttctgatttggggaatgaaggttat

SEQ ID NO: 5603555 - DNA, 25 bp, Homo sapien
tggggcatgacagctgttgcattca

SEQ ID NO: 5603556 - DNA, 25 bp, Homo sapien
ttcatatgtcctgagagcccttccc

SEQ ID NO: 5603557 - DNA, 25 bp, Homo sapien
gaagtggccacagccgttcatggtg

SEQ ID NO: 5603558 - DNA, 25 bp, Homo sapien
ggctgggacttcagatcacagcggg

SEQ ID NO: 5603559 - DNA, 25 bp, Homo sapien
cggcgttgggttctgaatgttccag

SEQ ID NO: 5603560 - DNA, 25 bp, Homo sapien
gctgggacttcagatcacagcgggc

SEQ ID NO: 5603561 - DNA, 25 bp, Homo sapien
ccgcgtgcgcactgtcgcggtcatg

SEQ ID NO: 5603562 - DNA, 25 bp, Homo sapien
ctctgcggctcttgtctccagggcg

SEQ ID NO: 5603563 - DNA, 25 bp, Homo sapien
gctctgcggctcttgtctccagggc

SEQ ID NO: 5603564 - DNA, 25 bp, Homo sapien
gaggctgggacttcagatcacagcg

SEQ ID NO: 5603565 - DNA, 25 bp, Homo sapien
aaccaaattaaggtgccagtgcgga

SEQ ID NO: 5603566 - DNA, 25 bp, Homo sapien
ggatcccgcgtgcgcactgtcgcgg

SEQ ID NO: 5603567 - DNA, 25 bp, Homo sapien
tcccgcgtgcgcactgtcgcggtca

SEQ ID NO: 5603568 - DNA, 25 bp, Homo sapien
atcccgcgtgcgcactgtcgcggtc

SEQ ID NO: 5603569 - DNA, 25 bp, Homo sapien
gacagacacggtctcaggtgggggt

SEQ ID NO: 5603570 - DNA, 25 bp, Homo sapien
acccccacctgagaccgtgtctgtc

SEQ ID NO: 5603571 - DNA, 25 bp, Homo sapien
catcatcactggaccctaagccccc

SEQ ID NO: 5603572 - DNA, 25 bp, Homo sapien
acggggagatctaggcctataatta

SEQ ID NO: 5603573 - DNA, 25 bp, Homo sapien
ccacagacagaagtagtctgctccc

SEQ ID NO: 5603574 - DNA, 25 bp, Homo sapien
ggggctcagcccagtgtctggtaca

SEQ ID NO: 5603575 - DNA, 25 bp, Homo sapien
gaaactgcagatagagttacaaggc

SEQ ID NO: 5603576 - DNA, 25 bp, Homo sapien
gagcctagcaggcttctgcaagcac

SEQ ID NO: 5603577 - DNA, 25 bp, Homo sapien
gtctggtacagaggagtaaattgta

SEQ ID NO: 5603578 - DNA, 25 bp, Homo sapien
tttcccgttgtgaaaggcaaagagc

SEQ ID NO: 5603579 - DNA, 25 bp, Homo sapien
taaatgaagtctcagccagatgatg

SEQ ID NO: 5603580 - DNA, 25 bp, Homo sapien
ccagtccccctgatggccacctctt

SEQ ID NO: 5603581 - DNA, 25 bp, Homo sapien
tctgcaagcaccatgcagacgggca

SEQ ID NO: 5603582 - DNA, 25 bp, Homo sapien
tatccttactgcgcgaagacgacag

SEQ ID NO: 5603583 - DNA, 25 bp, Homo sapien
gaataaggtagtgtggttccctaga

SEQ ID NO: 5603584 - DNA, 25 bp, Homo sapien
cctaaggtcacgcacctggtaaggg

SEQ ID NO: 5603585 - DNA, 25 bp, Homo sapien
ctcgcttctaggttcggggagataa

SEQ ID NO: 5603586 - DNA, 25 bp, Homo sapien
aggcacagaaaggacaagtgcattt

SEQ ID NO: 5603587 - DNA, 25 bp, Homo sapien
gttccctagaagagacacatttgtc

SEQ ID NO: 5603588 - DNA, 25 bp, Homo sapien
taccccgagcgcttctgtttgacct

SEQ ID NO: 5603589 - DNA, 25 bp, Homo sapien
ggagataaaggtaaataagacttgc

SEQ ID NO: 5603590 - DNA, 25 bp, Homo sapien
taggcaagatagacttacagctgac

SEQ ID NO: 5603591 - DNA, 25 bp, Homo sapien
cagctgacttcgataggagtccctc

SEQ ID NO: 5603592 - DNA, 25 bp, Homo sapien
gtgtgcaagctggatggtctttgaa

SEQ ID NO: 5603593 - DNA, 25 bp, Homo sapien
gcaaatatgacaaatacaaccatta

SEQ ID NO: 5603594 - DNA, 25 bp, Homo sapien
gtctgcttcttgtgtcagagccact

SEQ ID NO: 5603595 - DNA, 25 bp, Homo sapien
taagttgtcacaatggctgggtgca

SEQ ID NO: 5603596 - DNA, 25 bp, Homo sapien
ttattgaatcgcagtagctgagttt

SEQ ID NO: 5603597 - DNA, 25 bp, Homo sapien
tcttgtgtcagagccactaagggaa

SEQ ID NO: 5603598 - DNA, 25 bp, Homo sapien
gtgtcagagccactaagggaaaaat

SEQ ID NO: 5603599 - DNA, 25 bp, Homo sapien
caaccattattgaatcgcagtagct

SEQ ID NO: 5603600 - DNA, 25 bp, Homo sapien
tgagcctccaccccatcctgtcctg

SEQ ID NO: 5603601 - DNA, 25 bp, Homo sapien
cactaagggaaaaatcactaagttg

SEQ ID NO: 5603602 - DNA, 25 bp, Homo sapien
atggttaaatatatgtatggacaca

SEQ ID NO: 5603603 - DNA, 25 bp, Homo sapien
atgtatggacacacaaagcaaatat

SEQ ID NO: 5603604 - DNA, 25 bp, Homo sapien
taccaaggcccttctcgaacacgtc

SEQ ID NO: 5603605 - DNA, 25 bp, Homo sapien
tgaccttgacctgcagatctgggga

SEQ ID NO: 5603606 - DNA, 25 bp, Homo sapien
agccagacccaggacctggacttcc

SEQ ID NO: 5603607 - DNA, 25 bp, Homo sapien
aaaaacactccctcagctccccgcc

SEQ ID NO: 5603608 - DNA, 25 bp, Homo sapien
gctgtgcgggtacttcctgcctttc

SEQ ID NO: 5603609 - DNA, 25 bp, Homo sapien
gcctgggagctagccagacccagga

SEQ ID NO: 5603610 - DNA, 25 bp, Homo sapien
gcgggcacacatgaccttgacctgc

SEQ ID NO: 5603611 - DNA, 25 bp, Homo sapien
ggctctgtgcaaatgcgggcacaca

SEQ ID NO: 5603612 - DNA, 25 bp, Homo sapien
cgaacacgtcgtcgtgtgtgtctgc

SEQ ID NO: 5603613 - DNA, 25 bp, Homo sapien
accgatgttcgagtcctccagcgag

SEQ ID NO: 5603614 - DNA, 25 bp, Homo sapien
gctggtctcggaagtaccgatgttc

SEQ ID NO: 5603615 - DNA, 25 bp, Homo sapien
ttaactagaaaaagctgatgaaaaa

SEQ ID NO: 5603616 - DNA, 25 bp, Homo sapien
gtgcctgggacatagatttaataag

SEQ ID NO: 5603617 - DNA, 25 bp, Homo sapien
tagggggtagtctgccaatcttatt

SEQ ID NO: 5603618 - DNA, 25 bp, Homo sapien
agggttgttacttctgccggcctcc

SEQ ID NO: 5603619 - DNA, 25 bp, Homo sapien
agtaaatagcagataggtctcttat

SEQ ID NO: 5603620 - DNA, 25 bp, Homo sapien
tccagtgaaattgatagaaaactac

SEQ ID NO: 5603621 - DNA, 25 bp, Homo sapien
acaatgcagtgtaggtcatattaat

SEQ ID NO: 5603622 - DNA, 25 bp, Homo sapien
gatgccccagaggcaatagtcagca

SEQ ID NO: 5603623 - DNA, 25 bp, Homo sapien
ctgcagccatatcaggatgccccag

SEQ ID NO: 5603624 - DNA, 25 bp, Homo sapien
caatttctccagggcactcagtaaa

SEQ ID NO: 5603625 - DNA, 25 bp, Homo sapien
tcttcaagttagccactagggggta

SEQ ID NO: 5603626 - DNA, 25 bp, Homo sapien
tctgaattattgatggcaccacttt

SEQ ID NO: 5603627 - DNA, 25 bp, Homo sapien
gtgccatcttttgaagtagctcccc

SEQ ID NO: 5603628 - DNA, 25 bp, Homo sapien
ttttaaaagtttgagctggagctaa

SEQ ID NO: 5603629 - DNA, 25 bp, Homo sapien
accatagtactgctcaagtgccatc

SEQ ID NO: 5603630 - DNA, 25 bp, Homo sapien
ctacatttggtactaagtggccctt

SEQ ID NO: 5603631 - DNA, 25 bp, Homo sapien
ttagccagattgattatgggtttct

SEQ ID NO: 5603632 - DNA, 25 bp, Homo sapien
ttctgggacctggttccatttagcc

SEQ ID NO: 5603633 - DNA, 25 bp, Homo sapien
gaccagtccctgctcaccatagtac

SEQ ID NO: 5603634 - DNA, 25 bp, Homo sapien
agctggagctaaggacataaaattg

SEQ ID NO: 5603635 - DNA, 25 bp, Homo sapien
gagttacaccaatgtgctctgcagc

SEQ ID NO: 5603636 - DNA, 25 bp, Homo sapien
tccaatagtaacctgtacatgcccc

SEQ ID NO: 5603637 - DNA, 25 bp, Homo sapien
attttcaagtgtctatttgaagttt

SEQ ID NO: 5603638 - DNA, 25 bp, Homo sapien
aaacttcaaatagacacttgaaaat

SEQ ID NO: 5603639 - DNA, 25 bp, Homo sapien
atgcccttggaatgacccgagtagg

SEQ ID NO: 5603640 - DNA, 25 bp, Homo sapien
agatggacacagttgacatatacac

SEQ ID NO: 5603641 - DNA, 25 bp, Homo sapien
gtacagatggacacagttgacatat

SEQ ID NO: 5603642 - DNA, 25 bp, Homo sapien
ctccctgctccacaggatgcccttg

SEQ ID NO: 5603643 - DNA, 25 bp, Homo sapien
atgtcatacagcccctgatgagggg

SEQ ID NO: 5603644 - DNA, 25 bp, Homo sapien
atccacatgggaagccaaattgtaa

SEQ ID NO: 5603645 - DNA, 25 bp, Homo sapien
taggtgtggccaccagcatctgtgt

SEQ ID NO: 5603646 - DNA, 25 bp, Homo sapien
ggttacagaaatgtcatacagcccc

SEQ ID NO: 5603647 - DNA, 25 bp, Homo sapien
ctgttggcacatccacatgggaagc

SEQ ID NO: 5603648 - DNA, 25 bp, Homo sapien
acactttgtccctgttggcacatcc

SEQ ID NO: 5603649 - DNA, 25 bp, Homo sapien
tccacaggatgcccttggaatgacc

SEQ ID NO: 5603650 - DNA, 25 bp, Homo sapien
caacaggaattgggtgacaaatatt

SEQ ID NO: 5603651 - DNA, 25 bp, Homo sapien
cagtttccgtgtcgttcacagccac

SEQ ID NO: 5603652 - DNA, 25 bp, Homo sapien
tctgtcaaggaaggaccacttagtg

SEQ ID NO: 5603653 - DNA, 25 bp, Homo sapien
atatctaggtcagaggctcaaaggg

SEQ ID NO: 5603654 - DNA, 25 bp, Homo sapien
ccctctgctaaaagaaatcggccct

SEQ ID NO: 5603655 - DNA, 25 bp, Homo sapien
ttagtggctgtcaattagcaacatc

SEQ ID NO: 5603656 - DNA, 25 bp, Homo sapien
attagactagacaggacaaaaagct

SEQ ID NO: 5603657 - DNA, 25 bp, Homo sapien
gcctgagcaattgtaaagtgtcaac

SEQ ID NO: 5603658 - DNA, 25 bp, Homo sapien
ctcactgttcaaaggactccatctg

SEQ ID NO: 5603659 - DNA, 25 bp, Homo sapien
catccaaggtttccaggagacccgt

SEQ ID NO: 5603660 - DNA, 25 bp, Homo sapien
ttctgtctgtcttggggtataggga

SEQ ID NO: 5603661 - DNA, 25 bp, Homo sapien
ttcattaagtgaaaagaagctctgg

SEQ ID NO: 5603662 - DNA, 25 bp, Homo sapien
ctcgctgatggactatttgggatgc

SEQ ID NO: 5603663 - DNA, 25 bp, Homo sapien
gggagtcattgctacaaaagaggcc

SEQ ID NO: 5603664 - DNA, 25 bp, Homo sapien
aagaggccaaacaagaaagactcta

SEQ ID NO: 5603665 - DNA, 25 bp, Homo sapien
ctcaagcatgttaatcagtgactcc

SEQ ID NO: 5603666 - DNA, 25 bp, Homo sapien
actgtagaaccatatccccaggccc

SEQ ID NO: 5603667 - DNA, 25 bp, Homo sapien
gatttcaccaggtcccaggtcagcc

SEQ ID NO: 5603668 - DNA, 25 bp, Homo sapien
tgcttcatcgaccaggcagcagaga

SEQ ID NO: 5603669 - DNA, 25 bp, Homo sapien
tccagccctgtaccactgagctctg

SEQ ID NO: 5603670 - DNA, 25 bp, Homo sapien
gaagctctggaagtactcccacctc

SEQ ID NO: 5603671 - DNA, 25 bp, Homo sapien
ctgagctctgagcttcccagccttc

SEQ ID NO: 5603672 - DNA, 25 bp, Homo sapien
tgccaagggattatgagccagttag

SEQ ID NO: 5603673 - DNA, 25 bp, Homo sapien
ataaatttacacaaggtcacggtac

SEQ ID NO: 5603674 - DNA, 25 bp, Homo sapien
tatgagccagttagagatgtcattc

SEQ ID NO: 5603675 - DNA, 25 bp, Homo sapien
atggcccaggaatctgcgctaataa

SEQ ID NO: 5603676 - DNA, 25 bp, Homo sapien
tctaacagactatcggaaaggtggg

SEQ ID NO: 5603677 - DNA, 25 bp, Homo sapien
gcttgtcctgtccaagagagaggct

SEQ ID NO: 5603678 - DNA, 25 bp, Homo sapien
tctctggcctgtaggagttaggatg

SEQ ID NO: 5603679 - DNA, 25 bp, Homo sapien
ctaaaaagtagccccaggctgccaa

SEQ ID NO: 5603680 - DNA, 25 bp, Homo sapien
cccattccagaggcctcgggatggg

SEQ ID NO: 5603681 - DNA, 25 bp, Homo sapien
tcccatttcagagttcagcttgtcc

SEQ ID NO: 5603682 - DNA, 25 bp, Homo sapien
gcttgctggttctaaaaagtagccc

SEQ ID NO: 5603683 - DNA, 25 bp, Homo sapien
cagtgtgcaatcaatagacagtccc

SEQ ID NO: 5603684 - DNA, 25 bp, Homo sapien
cggtgcagacatcagcaacacccct

SEQ ID NO: 5603685 - DNA, 25 bp, Homo sapien
ctctacacctggccagaagaccagc

SEQ ID NO: 5603686 - DNA, 25 bp, Homo sapien
tgctcctagaactgaccacctatcc

SEQ ID NO: 5603687 - DNA, 25 bp, Homo sapien
ctctgcccagcctcactctacacct

SEQ ID NO: 5603688 - DNA, 25 bp, Homo sapien
aatagacagtcccatccccaggctc

SEQ ID NO: 5603689 - DNA, 25 bp, Homo sapien
tcccaggtggaaactgtggctggga

SEQ ID NO: 5603690 - DNA, 25 bp, Homo sapien
tccactgctcctagaactgaccacc

SEQ ID NO: 5603691 - DNA, 25 bp, Homo sapien
tgaccacctatccacagtgtgcaat

SEQ ID NO: 5603692 - DNA, 25 bp, Homo sapien
tcccatccccaggctcccaggtgga

SEQ ID NO: 5603693 - DNA, 25 bp, Homo sapien
agacatcagcaacacccctctgccc

SEQ ID NO: 5603694 - DNA, 25 bp, Homo sapien
tcggtgggaggaggttatagtagtc

SEQ ID NO: 5603695 - DNA, 25 bp, Homo sapien
gactactataacctcctcccaccga

SEQ ID NO: 5603696 - DNA, 25 bp, Homo sapien
gaggcaaagctaactgggttctcag

SEQ ID NO: 5603697 - DNA, 25 bp, Homo sapien
ggtactatagtgtttgaggcaaagc

SEQ ID NO: 5603698 - DNA, 25 bp, Homo sapien
gtttagtggatgcccaataggggag

SEQ ID NO: 5603699 - DNA, 25 bp, Homo sapien
ttttgttgggatcctgtatggccac

SEQ ID NO: 5603700 - DNA, 25 bp, Homo sapien
actttgacttcgactaggagctggg

SEQ ID NO: 5603701 - DNA, 25 bp, Homo sapien
catgtttgctgaaagtgaaatgaag

SEQ ID NO: 5603702 - DNA, 25 bp, Homo sapien
agctcatttgaaatccccaggagtc

SEQ ID NO: 5603703 - DNA, 25 bp, Homo sapien
ttgatcattgctctgtgactggtac

SEQ ID NO: 5603704 - DNA, 25 bp, Homo sapien
ggaagaattgggaacatgtttgctg

SEQ ID NO: 5603705 - DNA, 25 bp, Homo sapien
cccaggagtcatgggtgtttagtgg

SEQ ID NO: 5603706 - DNA, 25 bp, Homo sapien
aatgggaagagtctttcttgccccc

SEQ ID NO: 5603707 - DNA, 25 bp, Homo sapien
acaccctggtcaatatcaaatggca

SEQ ID NO: 5603708 - DNA, 25 bp, Homo sapien
taaagttcaagcctgatgccataac

SEQ ID NO: 5603709 - DNA, 25 bp, Homo sapien
tatcaaatggcaaatcctcaatatc

SEQ ID NO: 5603710 - DNA, 25 bp, Homo sapien
tccagttaaaacttacagtgattta

SEQ ID NO: 5603711 - DNA, 25 bp, Homo sapien
cctgttaaaagatgtgtgaggcagc

SEQ ID NO: 5603712 - DNA, 25 bp, Homo sapien
tgaggcagcccgagatataattttt

SEQ ID NO: 5603713 - DNA, 25 bp, Homo sapien
aatgtgggagcaaatctattccagt

SEQ ID NO: 5603714 - DNA, 25 bp, Homo sapien
tatttgtgcacaatacaccctggtc

SEQ ID NO: 5603715 - DNA, 25 bp, Homo sapien
attcataaattaaagttcaagcctg

SEQ ID NO: 5603716 - DNA, 25 bp, Homo sapien
gcctgatgccataactcataggtct

SEQ ID NO: 5603717 - DNA, 25 bp, Homo sapien
gaacaaatgaaattaagatagataa

SEQ ID NO: 5603718 - DNA, 25 bp, Homo sapien
tttaagaataaggacaagtgcttac

SEQ ID NO: 5603719 - DNA, 25 bp, Homo sapien
tcagcgcttttgggttgtgtgtatg

SEQ ID NO: 5603720 - DNA, 25 bp, Homo sapien
gcatgcgctgttgaaccaagctgct

SEQ ID NO: 5603721 - DNA, 25 bp, Homo sapien
agcaaagagtgacctctctggccat

SEQ ID NO: 5603722 - DNA, 25 bp, Homo sapien
ccccaggagattatttgtcaggcac

SEQ ID NO: 5603723 - DNA, 25 bp, Homo sapien
ataatactgaggagcactactttgc

SEQ ID NO: 5603724 - DNA, 25 bp, Homo sapien
atcatgaatctggcgtattaatgct

SEQ ID NO: 5603725 - DNA, 25 bp, Homo sapien
caagctgctcactggacacatattt

SEQ ID NO: 5603726 - DNA, 25 bp, Homo sapien
aggaaaagcatgcgctgttgaacca

SEQ ID NO: 5603727 - DNA, 25 bp, Homo sapien
tattggaattcagcaaagagtgacc

SEQ ID NO: 5603728 - DNA, 25 bp, Homo sapien
gtgtcctaaatctggtggaggaaaa

SEQ ID NO: 5603729 - DNA, 25 bp, Homo sapien
agagaaagaaagcttaaggttattc

SEQ ID NO: 5603730 - DNA, 25 bp, Homo sapien
tagcaatcattagggacataacttc

SEQ ID NO: 5603731 - DNA, 25 bp, Homo sapien
aactcagaaggcaaaatagacatac

SEQ ID NO: 5603732 - DNA, 25 bp, Homo sapien
aaggtcagcataggaaaactttttg

SEQ ID NO: 5603733 - DNA, 25 bp, Homo sapien
tattgaaagaataatgcactgtgtt

SEQ ID NO: 5603734 - DNA, 25 bp, Homo sapien
gaaggctgtttagcgaactttgaac

SEQ ID NO: 5603735 - DNA, 25 bp, Homo sapien
ttagcaagtcatattcagtagtgta

SEQ ID NO: 5603736 - DNA, 25 bp, Homo sapien
gcactgtgttcaaaaaggatttatc

SEQ ID NO: 5603737 - DNA, 25 bp, Homo sapien
gggaaagtagacaactcgagaatca

SEQ ID NO: 5603738 - DNA, 25 bp, Homo sapien
tagcaagttaaaattgaaggctgtt

SEQ ID NO: 5603739 - DNA, 25 bp, Homo sapien
aggaaatatctgaggctagcataat

SEQ ID NO: 5603740 - DNA, 25 bp, Homo sapien
ttctgaagaggctcacctggtcctc

SEQ ID NO: 5603741 - DNA, 25 bp, Homo sapien
gtgaattgggatgtccaaagagatg

SEQ ID NO: 5603742 - DNA, 25 bp, Homo sapien
tgtagtcatttagtatgggtggaaa

SEQ ID NO: 5603743 - DNA, 25 bp, Homo sapien
gaggacattgaaatggtcaagaacc

SEQ ID NO: 5603744 - DNA, 25 bp, Homo sapien
ttgaggatatgagcttgcagactac

SEQ ID NO: 5603745 - DNA, 25 bp, Homo sapien
tatgggtggaaatgatgcattctga

SEQ ID NO: 5603746 - DNA, 25 bp, Homo sapien
gtccaaagagatgatgtagtcattt

SEQ ID NO: 5603747 - DNA, 25 bp, Homo sapien
atggcattttggtctctttgaggat

SEQ ID NO: 5603748 - DNA, 25 bp, Homo sapien
atggctgcagtgaatatgacagtaa

SEQ ID NO: 5603749 - DNA, 25 bp, Homo sapien
cccatcctgtggacagaggacattg

SEQ ID NO: 5603750 - DNA, 25 bp, Homo sapien
gcagttactgggaactacttcagac

SEQ ID NO: 5603751 - DNA, 25 bp, Homo sapien
aaaaaattagtagaagctctttatg

SEQ ID NO: 5603752 - DNA, 25 bp, Homo sapien
acatgttcacaaataagggactgcc

SEQ ID NO: 5603753 - DNA, 25 bp, Homo sapien
tctacaggtatactcacaaatgtgc

SEQ ID NO: 5603754 - DNA, 25 bp, Homo sapien
cagaatattatgtagtagaaaaaaa

SEQ ID NO: 5603755 - DNA, 25 bp, Homo sapien
ataagggactgcctaaaaaattata

SEQ ID NO: 5603756 - DNA, 25 bp, Homo sapien
cttaactcagcaattctagccctat

SEQ ID NO: 5603757 - DNA, 25 bp, Homo sapien
tctatgcattagtaaccttggctac

SEQ ID NO: 5603758 - DNA, 25 bp, Homo sapien
aagattaggaacaacctacatgttc

SEQ ID NO: 5603759 - DNA, 25 bp, Homo sapien
tctatggtagcacttgggcccagaa

SEQ ID NO: 5603760 - DNA, 25 bp, Homo sapien
ctcacaaatgtgcaaaataggtatc

SEQ ID NO: 5603761 - DNA, 25 bp, Homo sapien
gcagtggtatctatggtagcacttg

SEQ ID NO: 5603762 - DNA, 25 bp, Homo sapien
cagaagtgtgctgtaaagaccgtca

SEQ ID NO: 5603763 - DNA, 25 bp, Homo sapien
actgtaccagagcactgaagtcgta

SEQ ID NO: 5603764 - DNA, 25 bp, Homo sapien
gccaggagtagatcataacccagtg

SEQ ID NO: 5603765 - DNA, 25 bp, Homo sapien
cattatactttggagaagggatgga

SEQ ID NO: 5603766 - DNA, 25 bp, Homo sapien
aagaccgtcatcagctgagtagatc

SEQ ID NO: 5603767 - DNA, 25 bp, Homo sapien
cattaagcagagatcactagagaga

SEQ ID NO: 5603768 - DNA, 25 bp, Homo sapien
tacagcagtctaaccagaagtgtgc

SEQ ID NO: 5603769 - DNA, 25 bp, Homo sapien
tatcctgagccaaagagcccaaata

SEQ ID NO: 5603770 - DNA, 25 bp, Homo sapien
ggagaagggatggaatcacctttca

SEQ ID NO: 5603771 - DNA, 25 bp, Homo sapien
gaggactgcaaaatacagaacaaac

SEQ ID NO: 5603772 - DNA, 25 bp, Homo sapien
agctgagtagatccagccaggagta

SEQ ID NO: 5603773 - DNA, 25 bp, Homo sapien
gtgaagtcagactccctcagctcta

SEQ ID NO: 5603774 - DNA, 25 bp, Homo sapien
tacgtgtggccccagactattcttc

SEQ ID NO: 5603775 - DNA, 25 bp, Homo sapien
gaggttaggggaccatcttatgctt

SEQ ID NO: 5603776 - DNA, 25 bp, Homo sapien
aggtataaattatgacaggtggggt

SEQ ID NO: 5603777 - DNA, 25 bp, Homo sapien
accagagctgtcaagtggtaagaac

SEQ ID NO: 5603778 - DNA, 25 bp, Homo sapien
caggtggggtaacattcctaaagcc

SEQ ID NO: 5603779 - DNA, 25 bp, Homo sapien
ccataatccagatgaaaccagagct

SEQ ID NO: 5603780 - DNA, 25 bp, Homo sapien
ggctttgaatggggcccaatgcgaa

SEQ ID NO: 5603781 - DNA, 25 bp, Homo sapien
tctatttccatgaggttaggggacc

SEQ ID NO: 5603782 - DNA, 25 bp, Homo sapien
tgctaacccagagtcatgaatcaaa

SEQ ID NO: 5603783 - DNA, 25 bp, Homo sapien
tgaaggagcatcagatgtgaagtca

SEQ ID NO: 5603784 - DNA, 25 bp, Homo sapien
ttcaccggaacacccagtgccatca

SEQ ID NO: 5603785 - DNA, 25 bp, Homo sapien
tgctcccgtggaaaactacggcgca

SEQ ID NO: 5603786 - DNA, 25 bp, Homo sapien
gcgcacgcttgcgggttctcagttc

SEQ ID NO: 5603787 - DNA, 25 bp, Homo sapien
actatggaattcactggccagctgc

SEQ ID NO: 5603788 - DNA, 25 bp, Homo sapien
ccccctgagttggcatgacaaagaa

SEQ ID NO: 5603789 - DNA, 25 bp, Homo sapien
agctgacgctggaagacttgatata

SEQ ID NO: 5603790 - DNA, 25 bp, Homo sapien
gtctgctcagaaagttcaccggaac

SEQ ID NO: 5603791 - DNA, 25 bp, Homo sapien
atttccccaaagccccaaaagctga

SEQ ID NO: 5603792 - DNA, 25 bp, Homo sapien
acggtacagagaaatgatgctcccg

SEQ ID NO: 5603793 - DNA, 25 bp, Homo sapien
caaagaactaaaacctgccatttcc

SEQ ID NO: 5603794 - DNA, 25 bp, Homo sapien
ctggctacgacgctccaagctaaca

SEQ ID NO: 5603795 - DNA, 25 bp, Homo sapien
tataaaagcacagagcattgttttt

SEQ ID NO: 5603796 - DNA, 25 bp, Homo sapien
ttgtttttggagtggcctctgaggc

SEQ ID NO: 5603797 - DNA, 25 bp, Homo sapien
gggaagaggctcttacgtactatgt

SEQ ID NO: 5603798 - DNA, 25 bp, Homo sapien
tggtagaatagcatggactgtgttt

SEQ ID NO: 5603799 - DNA, 25 bp, Homo sapien
ctctgaggccttctaagacacagcc

SEQ ID NO: 5603800 - DNA, 25 bp, Homo sapien
tgatataaccagggacattaaaata

SEQ ID NO: 5603801 - DNA, 25 bp, Homo sapien
gtcctgggttgatagctgaaagcag

SEQ ID NO: 5603802 - DNA, 25 bp, Homo sapien
acgaccaatcatagaaggggataga

SEQ ID NO: 5603803 - DNA, 25 bp, Homo sapien
agacacagccagtggtagaatagca

SEQ ID NO: 5603804 - DNA, 25 bp, Homo sapien
tagaagacctgtaagatgcagcaca

SEQ ID NO: 5603805 - DNA, 25 bp, Homo sapien
ggatagaaggtactagaagacctgt

SEQ ID NO: 5603806 - DNA, 25 bp, Homo sapien
cacagaataaccagcttggagttcc

SEQ ID NO: 5603807 - DNA, 25 bp, Homo sapien
atcccagcaaagtctcatgaatatc

SEQ ID NO: 5603808 - DNA, 25 bp, Homo sapien
catgcagcataaagtctatcccagc

SEQ ID NO: 5603809 - DNA, 25 bp, Homo sapien
tggagttccttcactagagtctctc

SEQ ID NO: 5603810 - DNA, 25 bp, Homo sapien
tattattcaaagcgaggaagaaaac

SEQ ID NO: 5603811 - DNA, 25 bp, Homo sapien
cagaaagcagctgctatagaatact

SEQ ID NO: 5603812 - DNA, 25 bp, Homo sapien
cacactaatgttggagcactacggt

SEQ ID NO: 5603813 - DNA, 25 bp, Homo sapien
caaacagtatcaccccatgcagcat

SEQ ID NO: 5603814 - DNA, 25 bp, Homo sapien
acttacccacttagaaaagcacact

SEQ ID NO: 5603815 - DNA, 25 bp, Homo sapien
agaaaactgaattgtggcaagaatt

SEQ ID NO: 5603816 - DNA, 25 bp, Homo sapien
agttgtcacaggtttaaagaggtta

SEQ ID NO: 5603817 - DNA, 25 bp, Homo sapien
gcaaatatgtatagcggggctcatt

SEQ ID NO: 5603818 - DNA, 25 bp, Homo sapien
actctcatcccagtccacttctatt

SEQ ID NO: 5603819 - DNA, 25 bp, Homo sapien
aagtgtgccttatatggtttggctc

SEQ ID NO: 5603820 - DNA, 25 bp, Homo sapien
ttttgcaaatatgtatagcggggct

SEQ ID NO: 5603821 - DNA, 25 bp, Homo sapien
ttgtccattgctgagagaaagaaat

SEQ ID NO: 5603822 - DNA, 25 bp, Homo sapien
agcggggctcattaggcaattgcct

SEQ ID NO: 5603823 - DNA, 25 bp, Homo sapien
ttgctgagagaaagaaatgtatgaa

SEQ ID NO: 5603824 - DNA, 25 bp, Homo sapien
taggcaattgcctggactctcatcc

SEQ ID NO: 5603825 - DNA, 25 bp, Homo sapien
ggttagcattgcagcaatcatcctc

SEQ ID NO: 5603826 - DNA, 25 bp, Homo sapien
gagaaagaaatgtatgaactctacc

SEQ ID NO: 5603827 - DNA, 25 bp, Homo sapien
attagctggttagcattgcagcaat

SEQ ID NO: 5603828 - DNA, 25 bp, Homo sapien
gggctgtcaaaacgtctgatgggta

SEQ ID NO: 5603829 - DNA, 25 bp, Homo sapien
gcaacagtcacagaaaccattaaaa

SEQ ID NO: 5603830 - DNA, 25 bp, Homo sapien
catccctacagcagtacaaggtact

SEQ ID NO: 5603831 - DNA, 25 bp, Homo sapien
gccaggcgctgtagttaggctctgg

SEQ ID NO: 5603832 - DNA, 25 bp, Homo sapien
acgctactgaatgtctaccatgtgc

SEQ ID NO: 5603833 - DNA, 25 bp, Homo sapien
aacgtctgatgggtaagtagacgga

SEQ ID NO: 5603834 - DNA, 25 bp, Homo sapien
taggctctggagtagcatatgaaac

SEQ ID NO: 5603835 - DNA, 25 bp, Homo sapien
gaaactgatttcaatggtccccacc

SEQ ID NO: 5603836 - DNA, 25 bp, Homo sapien
gccctaagacccggctccatgaagg

SEQ ID NO: 5603837 - DNA, 25 bp, Homo sapien
gcaggaatcctgggtttatcacctt

SEQ ID NO: 5603838 - DNA, 25 bp, Homo sapien
acattcagacgttgcaaaacaaagc

SEQ ID NO: 5603839 - DNA, 25 bp, Homo sapien
tccagccctctaccaagcctcagct

SEQ ID NO: 5603840 - DNA, 25 bp, Homo sapien
tagtactgcagttccaggagtcatt

SEQ ID NO: 5603841 - DNA, 25 bp, Homo sapien
tgcagtaaaacgtctgcgggagatg

SEQ ID NO: 5603842 - DNA, 25 bp, Homo sapien
ttggccttccagatttgccttcctc

SEQ ID NO: 5603843 - DNA, 25 bp, Homo sapien
accacaggactgagtgagtttctag

SEQ ID NO: 5603844 - DNA, 25 bp, Homo sapien
agtgatggtaaatttatgggttgtc

SEQ ID NO: 5603845 - DNA, 25 bp, Homo sapien
ggtatctggcatgcagtaaaacgtc

SEQ ID NO: 5603846 - DNA, 25 bp, Homo sapien
ctttggacaagtaatttggccttcc

SEQ ID NO: 5603847 - DNA, 25 bp, Homo sapien
tggggttccaagaatatagtactgc

SEQ ID NO: 5603848 - DNA, 25 bp, Homo sapien
atgggttgtcacctggtttcttggg

SEQ ID NO: 5603849 - DNA, 25 bp, Homo sapien
agtttaacgcaattggctccagccc

SEQ ID NO: 5603850 - DNA, 25 bp, Homo sapien
tgcaagaaacaaatattaaggaagc

SEQ ID NO: 5603851 - DNA, 25 bp, Homo sapien
ttactgtcagcaaatgtacacgtga

SEQ ID NO: 5603852 - DNA, 25 bp, Homo sapien
gacaaaagtcaaattaagcacttaa

SEQ ID NO: 5603853 - DNA, 25 bp, Homo sapien
aaggtctaggtcggtttcatcccat

SEQ ID NO: 5603854 - DNA, 25 bp, Homo sapien
tgcaatctgaaacagcgtgacgtgg

SEQ ID NO: 5603855 - DNA, 25 bp, Homo sapien
cagcaaatgtacacgtgacaaaagt

SEQ ID NO: 5603856 - DNA, 25 bp, Homo sapien
tcacgcaatcaaaatgactaagctt

SEQ ID NO: 5603857 - DNA, 25 bp, Homo sapien
gttgaccattgaacttgccaaagta

SEQ ID NO: 5603858 - DNA, 25 bp, Homo sapien
aacaaatattaaggaagcagattcc

SEQ ID NO: 5603859 - DNA, 25 bp, Homo sapien
ttgcatgaactgactgttgaccatt

SEQ ID NO: 5603860 - DNA, 25 bp, Homo sapien
acatttgactgtaaaccacacacaa

SEQ ID NO: 5603861 - DNA, 25 bp, Homo sapien
ggttggtaagtgctgagctagtttt

SEQ ID NO: 5603862 - DNA, 25 bp, Homo sapien
agaacacttatatgctccccaaact

SEQ ID NO: 5603863 - DNA, 25 bp, Homo sapien
caacatgtagtcttgcacctccatc

SEQ ID NO: 5603864 - DNA, 25 bp, Homo sapien
ccccaaacttacagcttctgagtgc

SEQ ID NO: 5603865 - DNA, 25 bp, Homo sapien
aaggacatttcaagtagagggatcg

SEQ ID NO: 5603866 - DNA, 25 bp, Homo sapien
ggttatggagaatatgcaaaactcc

SEQ ID NO: 5603867 - DNA, 25 bp, Homo sapien
cacctccatctgaatagcttgcagt

SEQ ID NO: 5603868 - DNA, 25 bp, Homo sapien
aaactccaacagctgaagaacactt

SEQ ID NO: 5603869 - DNA, 25 bp, Homo sapien
gcatgggccccagaacctctagggg

SEQ ID NO: 5603870 - DNA, 25 bp, Homo sapien
ctaaaaatcactgtaaggacatttc

SEQ ID NO: 5603871 - DNA, 25 bp, Homo sapien
agagggatcgctaggaataattaga

SEQ ID NO: 5603872 - DNA, 25 bp, Homo sapien
tgactccagaatcgatgctgtctta

SEQ ID NO: 5603873 - DNA, 25 bp, Homo sapien
gtcagagttgagacccaatctagtc

SEQ ID NO: 5603874 - DNA, 25 bp, Homo sapien
tgcttaagcgcaaagaagaatgcca

SEQ ID NO: 5603875 - DNA, 25 bp, Homo sapien
tcaaggaacatgaaaacagccattc

SEQ ID NO: 5603876 - DNA, 25 bp, Homo sapien
aagaatgccaagtacataaatgtgc

SEQ ID NO: 5603877 - DNA, 25 bp, Homo sapien
attaaaagacgacggttctcaagga

SEQ ID NO: 5603878 - DNA, 25 bp, Homo sapien
tcactaatatcaaacaggcgtaatc

SEQ ID NO: 5603879 - DNA, 25 bp, Homo sapien
gaattagaactgagagttagagata

SEQ ID NO: 5603880 - DNA, 25 bp, Homo sapien
agccacaaacccggtgtcagagttg

SEQ ID NO: 5603881 - DNA, 25 bp, Homo sapien
gagttagagatattaaagaacttgc

SEQ ID NO: 5603882 - DNA, 25 bp, Homo sapien
aaacagctaaacatagacaacatta

SEQ ID NO: 5603883 - DNA, 25 bp, Homo sapien
ttggccaataagaatgtgaagagtt

SEQ ID NO: 5603884 - DNA, 25 bp, Homo sapien
agagttaaatacccttccagaatac

SEQ ID NO: 5603885 - DNA, 25 bp, Homo sapien
ggcagtcagtgattatttctagttg

SEQ ID NO: 5603886 - DNA, 25 bp, Homo sapien
tgtattagatactggttggccaata

SEQ ID NO: 5603887 - DNA, 25 bp, Homo sapien
cttaatgtatggaatgaactgggat

SEQ ID NO: 5603888 - DNA, 25 bp, Homo sapien
tgtatggaatgaactgggataaata

SEQ ID NO: 5603889 - DNA, 25 bp, Homo sapien
ggcagggcctgaaacctcattccat

SEQ ID NO: 5603890 - DNA, 25 bp, Homo sapien
actgtaatcacatttgcatagccac

SEQ ID NO: 5603891 - DNA, 25 bp, Homo sapien
tagttgggtacaagagaacctttca

SEQ ID NO: 5603892 - DNA, 25 bp, Homo sapien
acttcccagtgggaagcgcctcagt

SEQ ID NO: 5603893 - DNA, 25 bp, Homo sapien
cacaaagtgtgtttctagatatacc

SEQ ID NO: 5603894 - DNA, 25 bp, Homo sapien
tttgtgaactcattagcagttaccc

SEQ ID NO: 5603895 - DNA, 25 bp, Homo sapien
acccacaattatacgtagccaagtt

SEQ ID NO: 5603896 - DNA, 25 bp, Homo sapien
tggatgtggctgattttgataaagt

SEQ ID NO: 5603897 - DNA, 25 bp, Homo sapien
attgactgattagatagaagagcac

SEQ ID NO: 5603898 - DNA, 25 bp, Homo sapien
catttggtcaacaactgcaagctcc

SEQ ID NO: 5603899 - DNA, 25 bp, Homo sapien
tcaaaatcatgaagaaggttataca

SEQ ID NO: 5603900 - DNA, 25 bp, Homo sapien
acaactgcaagctcctggatgtggc

SEQ ID NO: 5603901 - DNA, 25 bp, Homo sapien
gataaagtcatagaattcacagtat

SEQ ID NO: 5603902 - DNA, 25 bp, Homo sapien
taaaaaatgaatgttggcttgaggg

SEQ ID NO: 5603903 - DNA, 25 bp, Homo sapien
agaagagcacatgatagatctgaac

SEQ ID NO: 5603904 - DNA, 25 bp, Homo sapien
cctaatttgtgactgaaacagaaac

SEQ ID NO: 5603905 - DNA, 25 bp, Homo sapien
accatagccttagaagtacggacga

SEQ ID NO: 5603906 - DNA, 25 bp, Homo sapien
tttggcatgattaagtataaccatc

SEQ ID NO: 5603907 - DNA, 25 bp, Homo sapien
ttagggtaactcacatcctgcccat

SEQ ID NO: 5603908 - DNA, 25 bp, Homo sapien
caaacaggtctgttaatcatgcaca

SEQ ID NO: 5603909 - DNA, 25 bp, Homo sapien
tgggctgtgctgtgccagaactatt

SEQ ID NO: 5603910 - DNA, 25 bp, Homo sapien
ggaatggtttcccctgccttgctct

SEQ ID NO: 5603911 - DNA, 25 bp, Homo sapien
tgttaatcatgcacagacctttggc

SEQ ID NO: 5603912 - DNA, 25 bp, Homo sapien
tgatacccaaacctgttcttaagac

SEQ ID NO: 5603913 - DNA, 25 bp, Homo sapien
ccttctacatagctggaatggtttc

SEQ ID NO: 5603914 - DNA, 25 bp, Homo sapien
tccttagctccaatggcagaagtaa

SEQ ID NO: 5603915 - DNA, 25 bp, Homo sapien
ttgtgaaccatagccttagaagtac

SEQ ID NO: 5603916 - DNA, 25 bp, Homo sapien
ataaaatttgttcacccatacgttc

SEQ ID NO: 5603917 - DNA, 25 bp, Homo sapien
ttcaaggaacagaccattccaatgc

SEQ ID NO: 5603918 - DNA, 25 bp, Homo sapien
ctggtccatctggcatcacagactc

SEQ ID NO: 5603919 - DNA, 25 bp, Homo sapien
catgagtaatcaagaaggaaaaaaa

SEQ ID NO: 5603920 - DNA, 25 bp, Homo sapien
gaagaggatctcagatacgtaagag

SEQ ID NO: 5603921 - DNA, 25 bp, Homo sapien
attaactcaggagttctggtccatc

SEQ ID NO: 5603922 - DNA, 25 bp, Homo sapien
acagactctgcaactttcaaggaac

SEQ ID NO: 5603923 - DNA, 25 bp, Homo sapien
aaaatggaagaaatacatgagtaat

SEQ ID NO: 5603924 - DNA, 25 bp, Homo sapien
agctgccggagaattaactcaggag

SEQ ID NO: 5603925 - DNA, 25 bp, Homo sapien
acgtaagagtagtgtaaaatatgct

SEQ ID NO: 5603926 - DNA, 25 bp, Homo sapien
cattccaatgcaatatcccacactt

SEQ ID NO: 5603927 - DNA, 25 bp, Homo sapien
aaaagagtgcttaaatggagaccta

SEQ ID NO: 5603928 - DNA, 25 bp, Homo sapien
acaaaagaatagactgaatttgcca

SEQ ID NO: 5603929 - DNA, 25 bp, Homo sapien
attcttaggtaagatgtaggggtag

SEQ ID NO: 5603930 - DNA, 25 bp, Homo sapien
gtcttcaaagctaaggtgatgagaa

SEQ ID NO: 5603931 - DNA, 25 bp, Homo sapien
tcagagcttcaagaggcaaagcttg

SEQ ID NO: 5603932 - DNA, 25 bp, Homo sapien
ttcttcagagcttcaagaggcaaag

SEQ ID NO: 5603933 - DNA, 25 bp, Homo sapien
gaatttgccaaaagagtgcttaaat

SEQ ID NO: 5603934 - DNA, 25 bp, Homo sapien
tggtggactgtaaagtcaatgacat

SEQ ID NO: 5603935 - DNA, 25 bp, Homo sapien
gccaaaagagtgcttaaatggagac

SEQ ID NO: 5603936 - DNA, 25 bp, Homo sapien
ggattatctggtggactgtaaagtc

SEQ ID NO: 5603937 - DNA, 25 bp, Homo sapien
aatggagacctaagtcttcaaagct

SEQ ID NO: 5603938 - DNA, 25 bp, Homo sapien
ctgtaatctaaaagggatctagttt

SEQ ID NO: 5603939 - DNA, 25 bp, Homo sapien
gtgaaagagtaacggctgctcttac

SEQ ID NO: 5603940 - DNA, 25 bp, Homo sapien
catttctggtgtgaaagagtaacgg

SEQ ID NO: 5603941 - DNA, 25 bp, Homo sapien
tttgcaacgtaaatactgaacttta

SEQ ID NO: 5603942 - DNA, 25 bp, Homo sapien
tgtaaagtatgaatcgaaggtaagt

SEQ ID NO: 5603943 - DNA, 25 bp, Homo sapien
atcgaaggtaagtgtattaaaggaa

SEQ ID NO: 5603944 - DNA, 25 bp, Homo sapien
aactcacaccgaaccagctgcgggg

SEQ ID NO: 5603945 - DNA, 25 bp, Homo sapien
aaaataggattcacccacacagtat

SEQ ID NO: 5603946 - DNA, 25 bp, Homo sapien
cattaatagcatagccaccagcttt

SEQ ID NO: 5603947 - DNA, 25 bp, Homo sapien
gagagatctccaatcttccaggttc

SEQ ID NO: 5603948 - DNA, 25 bp, Homo sapien
tagccaccagcttttgcaacgtaaa

SEQ ID NO: 5603949 - DNA, 25 bp, Homo sapien
tccagccaaacagtattaatccaac

SEQ ID NO: 5603950 - DNA, 25 bp, Homo sapien
cttcttgcccctggttgggtcacct

SEQ ID NO: 5603951 - DNA, 25 bp, Homo sapien
gacctacagcagccgattctcttcc

SEQ ID NO: 5603952 - DNA, 25 bp, Homo sapien
ttgtcttgatgtgggctagtgaaaa

SEQ ID NO: 5603953 - DNA, 25 bp, Homo sapien
cttgctgcccaagacctacagcagc

SEQ ID NO: 5603954 - DNA, 25 bp, Homo sapien
ccaggcttggcatcatctccagttc

SEQ ID NO: 5603955 - DNA, 25 bp, Homo sapien
gtgaaaagaccatttgctgaaacag

SEQ ID NO: 5603956 - DNA, 25 bp, Homo sapien
acccacacatatggagaacgtgacc

SEQ ID NO: 5603957 - DNA, 25 bp, Homo sapien
tgcaccaatataccaaccagatggc

SEQ ID NO: 5603958 - DNA, 25 bp, Homo sapien
gatcgatgtaaacttcttgctgccc

SEQ ID NO: 5603959 - DNA, 25 bp, Homo sapien
ttgctgaaacagaaccacccacaca

SEQ ID NO: 5603960 - DNA, 25 bp, Homo sapien
gtgcccaccagtagaataaagttcc

SEQ ID NO: 5603961 - DNA, 25 bp, Homo sapien
tcatgtttccagctaggacagtgct

SEQ ID NO: 5603962 - DNA, 25 bp, Homo sapien
taggacagtgctgcctgtgtggcag

SEQ ID NO: 5603963 - DNA, 25 bp, Homo sapien
accgaccgccgtgtctaaaatagtc

SEQ ID NO: 5603964 - DNA, 25 bp, Homo sapien
ttcagtaaagcagccaatgttacct

SEQ ID NO: 5603965 - DNA, 25 bp, Homo sapien
tagctgccattttgtgcccaccagt

SEQ ID NO: 5603966 - DNA, 25 bp, Homo sapien
gagcacttgaagcttgtttgccacc

SEQ ID NO: 5603967 - DNA, 25 bp, Homo sapien
cactcattgtacccacctaccctgc

SEQ ID NO: 5603968 - DNA, 25 bp, Homo sapien
aggtcttggttctaatgcctccacc

SEQ ID NO: 5603969 - DNA, 25 bp, Homo sapien
caccttgaggcggattttaccgacc

SEQ ID NO: 5603970 - DNA, 25 bp, Homo sapien
gcaggggttccatacgtgttgagaa

SEQ ID NO: 5603971 - DNA, 25 bp, Homo sapien
aagtagagttatagaaagagtagaa

SEQ ID NO: 5603972 - DNA, 25 bp, Homo sapien
catctggaccaaatggcagctagga

SEQ ID NO: 5603973 - DNA, 25 bp, Homo sapien
agaccaggaagagaacatttcagat

SEQ ID NO: 5603974 - DNA, 25 bp, Homo sapien
ggcagctgcaagtactctgaagacc

SEQ ID NO: 5603975 - DNA, 25 bp, Homo sapien
gcgacatgctggacaaataaactcc

SEQ ID NO: 5603976 - DNA, 25 bp, Homo sapien
actgagaataataggtgaagaatcc

SEQ ID NO: 5603977 - DNA, 25 bp, Homo sapien
tagagaggatgtatcaagaaaaatt

SEQ ID NO: 5603978 - DNA, 25 bp, Homo sapien
actgtgctggccaatagatgatatg

SEQ ID NO: 5603979 - DNA, 25 bp, Homo sapien
ggccaagggaaaggctttctgagta

SEQ ID NO: 5603980 - DNA, 25 bp, Homo sapien
acaaacaacacagcgtacagagaga

SEQ ID NO: 5603981 - DNA, 25 bp, Homo sapien
gcagctaggaagccttggcctagac

SEQ ID NO: 5603982 - DNA, 25 bp, Homo sapien
catgttcctcagtgtgcaaagcacc

SEQ ID NO: 5603983 - DNA, 25 bp, Homo sapien
gcacctaactgaaccaaattgtcct

SEQ ID NO: 5603984 - DNA, 25 bp, Homo sapien
ttcaaagcagtgtgattacataaat

SEQ ID NO: 5603985 - DNA, 25 bp, Homo sapien
acatctccacatggacacaggactg

SEQ ID NO: 5603986 - DNA, 25 bp, Homo sapien
tatccaagagcgtatcagatcactc

SEQ ID NO: 5603987 - DNA, 25 bp, Homo sapien
ctagtttatggcaggaacatcatca

SEQ ID NO: 5603988 - DNA, 25 bp, Homo sapien
atcatcagtgaggtcccagagaaag

SEQ ID NO: 5603989 - DNA, 25 bp, Homo sapien
ttccagccactatatccaagagcgt

SEQ ID NO: 5603990 - DNA, 25 bp, Homo sapien
cacaggactgcaagattaataaagc

SEQ ID NO: 5603991 - DNA, 25 bp, Homo sapien
gattacagagatagctattatttcc

SEQ ID NO: 5603992 - DNA, 25 bp, Homo sapien
aaagcaagtgatttctctgcatgtt

SEQ ID NO: 5603993 - DNA, 25 bp, Homo sapien
tgctgaagacccacaacactgaaga

SEQ ID NO: 5603994 - DNA, 25 bp, Homo sapien
gttcttgaggctacaactgtccaac

SEQ ID NO: 5603995 - DNA, 25 bp, Homo sapien
tttgtggactgagcctttttaggaa

SEQ ID NO: 5603996 - DNA, 25 bp, Homo sapien
tgaagttggtgatatttttgtggac

SEQ ID NO: 5603997 - DNA, 25 bp, Homo sapien
tggtccttgtcagagattcctagct

SEQ ID NO: 5603998 - DNA, 25 bp, Homo sapien
gtggcagcaaaagtttgaggtctca

SEQ ID NO: 5603999 - DNA, 25 bp, Homo sapien
caacactgaagatatctgaggatgc

SEQ ID NO: 5604000 - DNA, 25 bp, Homo sapien
ctgagcaataatgatgtgatgtgaa

SEQ ID NO: 5604001 - DNA, 25 bp, Homo sapien
tccaactgtaaaccgagagactgtt

SEQ ID NO: 5604002 - DNA, 25 bp, Homo sapien
tgttcccaagtggcagcaaaagttt

SEQ ID NO: 5604003 - DNA, 25 bp, Homo sapien
tatctgaggatgcaagttctggtcc

SEQ ID NO: 5604004 - DNA, 25 bp, Homo sapien
agtcatctgttatctgccttctccc

SEQ ID NO: 5604005 - DNA, 25 bp, Homo sapien
taactctctactgtacccccggaca

SEQ ID NO: 5604006 - DNA, 25 bp, Homo sapien
ttagtaagcttttcagtcatctgtt

SEQ ID NO: 5604007 - DNA, 25 bp, Homo sapien
ttgaaaatgtgtaactaccattcac

SEQ ID NO: 5604008 - DNA, 25 bp, Homo sapien
ggctcccctcaaaggacatagtctt

SEQ ID NO: 5604009 - DNA, 25 bp, Homo sapien
gtccaaacctttccactgtaatctc

SEQ ID NO: 5604010 - DNA, 25 bp, Homo sapien
atctcttcaaggaatggttattttc

SEQ ID NO: 5604011 - DNA, 25 bp, Homo sapien
cattaagaacaatccaagaacaaaa

SEQ ID NO: 5604012 - DNA, 25 bp, Homo sapien
caggcttaactgaaactaggctccc

SEQ ID NO: 5604013 - DNA, 25 bp, Homo sapien
ccccggacagttctgtcaggtgggg

SEQ ID NO: 5604014 - DNA, 25 bp, Homo sapien
ctttctagaatcagcttcctacagc

SEQ ID NO: 5604015 - DNA, 25 bp, Homo sapien
taagagacttactacatctaactgc

SEQ ID NO: 5604016 - DNA, 25 bp, Homo sapien
ttgctcagctaacagttttacagat

SEQ ID NO: 5604017 - DNA, 25 bp, Homo sapien
tatacccctatcggtagcttgcttt

SEQ ID NO: 5604018 - DNA, 25 bp, Homo sapien
gataacttggctgtttctagtgagt

SEQ ID NO: 5604019 - DNA, 25 bp, Homo sapien
ttacaagacatacctcatttaccac

SEQ ID NO: 5604020 - DNA, 25 bp, Homo sapien
aaattacatgcatcacagaattgat

SEQ ID NO: 5604021 - DNA, 25 bp, Homo sapien
ctgtcaatttaactatagcatcact

SEQ ID NO: 5604022 - DNA, 25 bp, Homo sapien
catgctttttctgtgagggaaactc

SEQ ID NO: 5604023 - DNA, 25 bp, Homo sapien
ttgcaatggcatttctgatgtccta

SEQ ID NO: 5604024 - DNA, 25 bp, Homo sapien
atgtgatttagataaccggacgcgt

SEQ ID NO: 5604025 - DNA, 25 bp, Homo sapien
taccactaggaaaaaaaatgctgtc

SEQ ID NO: 5604026 - DNA, 25 bp, Homo sapien
ctcctgtccccgggcttgctcccga

SEQ ID NO: 5604027 - DNA, 25 bp, Homo sapien
ggggctgcatttctcgcggctcata

SEQ ID NO: 5604028 - DNA, 25 bp, Homo sapien
agtcttgtgtttgggtcgtccgtgt

SEQ ID NO: 5604029 - DNA, 25 bp, Homo sapien
cctttggctctctaaggggcacaca

SEQ ID NO: 5604030 - DNA, 25 bp, Homo sapien
gccccaacgcctgcgcacctcctgt

SEQ ID NO: 5604031 - DNA, 25 bp, Homo sapien
cggcgattccccgcactggccttga

SEQ ID NO: 5604032 - DNA, 25 bp, Homo sapien
cccgggcttgctcccgagtcctcct

SEQ ID NO: 5604033 - DNA, 25 bp, Homo sapien
catggcacagggatccctttggctc

SEQ ID NO: 5604034 - DNA, 25 bp, Homo sapien
ctctaaggggcacacagtcttgtgt

SEQ ID NO: 5604035 - DNA, 25 bp, Homo sapien
tcccgagtcctcctgagcacggcga

SEQ ID NO: 5604036 - DNA, 25 bp, Homo sapien
tttctcgcggctcatatttgggacc

SEQ ID NO: 5604037 - DNA, 25 bp, Homo sapien
agataatctagaaatcctatttacc

SEQ ID NO: 5604038 - DNA, 25 bp, Homo sapien
ggtaaataggatttctagattatct

SEQ ID NO: 5604039 - DNA, 25 bp, Homo sapien
aaagataatctagaaatcctattta

SEQ ID NO: 5604040 - DNA, 25 bp, Homo sapien
taaataggatttctagattatcttt

SEQ ID NO: 5604041 - DNA, 25 bp, Homo sapien
gccggtcccgccagcgcgtccaccg

SEQ ID NO: 5604042 - DNA, 25 bp, Homo sapien
cggtggacgcgctggcgggaccggc

SEQ ID NO: 5604043 - DNA, 25 bp, Homo sapien
tcctcgcctgagctcgccggtcccg

SEQ ID NO: 5604044 - DNA, 25 bp, Homo sapien
cgggaccggcgagctcaggcgagga

SEQ ID NO: 5604045 - DNA, 25 bp, Homo sapien
tatttatgaggtacaaagtgatatt

SEQ ID NO: 5604046 - DNA, 25 bp, Homo sapien
ctgccaacggacaaaatgctggaag

SEQ ID NO: 5604047 - DNA, 25 bp, Homo sapien
catgtggaatgatcaaatcagagta

SEQ ID NO: 5604048 - DNA, 25 bp, Homo sapien
aaatggggagggctcccagtatttg

SEQ ID NO: 5604049 - DNA, 25 bp, Homo sapien
tggctgaagcgtcaatcaggcctat

SEQ ID NO: 5604050 - DNA, 25 bp, Homo sapien
gagggggccttcaacaactgattta

SEQ ID NO: 5604051 - DNA, 25 bp, Homo sapien
cagtatttggccagcgttctatgtg

SEQ ID NO: 5604052 - DNA, 25 bp, Homo sapien
ttctatgtgatggatgttgatgagc

SEQ ID NO: 5604053 - DNA, 25 bp, Homo sapien
atgactaagggtgaaatacatcagc

SEQ ID NO: 5604054 - DNA, 25 bp, Homo sapien
attggaagctcaagttactggtttc

SEQ ID NO: 5604055 - DNA, 25 bp, Homo sapien
tcgttggaacctagagcaaaatcac

SEQ ID NO: 5604056 - DNA, 25 bp, Homo sapien
ggtggggtatattggcactttggga

SEQ ID NO: 5604057 - DNA, 25 bp, Homo sapien
ctgagagtaaatttgggatagtaga

SEQ ID NO: 5604058 - DNA, 25 bp, Homo sapien
taagtaatagggtgttggcactgtg

SEQ ID NO: 5604059 - DNA, 25 bp, Homo sapien
agggcctccttgtgaacgcagagtt

SEQ ID NO: 5604060 - DNA, 25 bp, Homo sapien
tgcactcagtccgggctccttgcta

SEQ ID NO: 5604061 - DNA, 25 bp, Homo sapien
gagtagaaatcattgtgagggagca

SEQ ID NO: 5604062 - DNA, 25 bp, Homo sapien
gagacagaggtccccttgatatggc

SEQ ID NO: 5604063 - DNA, 25 bp, Homo sapien
aaacagtaacagatctgcagacccc

SEQ ID NO: 5604064 - DNA, 25 bp, Homo sapien
gtgtcctaaagccctgtgagtgtgc

SEQ ID NO: 5604065 - DNA, 25 bp, Homo sapien
gggagcagtgtattgtagaatgtta

SEQ ID NO: 5604066 - DNA, 25 bp, Homo sapien
agcctggttgttgagttagcatcct

SEQ ID NO: 5604067 - DNA, 25 bp, Homo sapien
tcccgagaaatttagaatcgagatt

SEQ ID NO: 5604068 - DNA, 25 bp, Homo sapien
aatctcgattctaaatttctcggga

SEQ ID NO: 5604069 - DNA, 25 bp, Homo sapien
ctcagtcctgtctatgtgggggaga

SEQ ID NO: 5604070 - DNA, 25 bp, Homo sapien
ggggcaggtttcatattaagggatg

SEQ ID NO: 5604071 - DNA, 25 bp, Homo sapien
ccttgaaaggacccctcactcagcc

SEQ ID NO: 5604072 - DNA, 25 bp, Homo sapien
tattaagggatgccttgaaaggacc

SEQ ID NO: 5604073 - DNA, 25 bp, Homo sapien
ctgaaccaagcttaaaggatgagca

SEQ ID NO: 5604074 - DNA, 25 bp, Homo sapien
tgagcagaaattgagtgaacatgga

SEQ ID NO: 5604075 - DNA, 25 bp, Homo sapien
ccaaagtttcgagactggagaatat

SEQ ID NO: 5604076 - DNA, 25 bp, Homo sapien
ggtcctagagaaggtgaccactgaa

SEQ ID NO: 5604077 - DNA, 25 bp, Homo sapien
gtttcgagactggagaatatgctga

SEQ ID NO: 5604078 - DNA, 25 bp, Homo sapien
gtgaccactgaaccaagcttaaagg

SEQ ID NO: 5604079 - DNA, 25 bp, Homo sapien
tgtgacggtgagtaaaactcagtcc

SEQ ID NO: 5604080 - DNA, 25 bp, Homo sapien
ctagagagtgtgttcaaagtaaagc

SEQ ID NO: 5604081 - DNA, 25 bp, Homo sapien
tatgccgaagtttgacggccatacc

SEQ ID NO: 5604082 - DNA, 25 bp, Homo sapien
cattttagacatgatggtgcagaga

SEQ ID NO: 5604083 - DNA, 25 bp, Homo sapien
gacactgctgaatgagaatttccag

SEQ ID NO: 5604084 - DNA, 25 bp, Homo sapien
gaatttccagggtcaggacatatgt

SEQ ID NO: 5604085 - DNA, 25 bp, Homo sapien
gtttgagcaacttcctaggcaaccc

SEQ ID NO: 5604086 - DNA, 25 bp, Homo sapien
atcagaattactagagagtgtgttc

SEQ ID NO: 5604087 - DNA, 25 bp, Homo sapien
tctataagaacagcataatatgtgc

SEQ ID NO: 5604088 - DNA, 25 bp, Homo sapien
ttcaaagtaaagctagatgcccaag

SEQ ID NO: 5604089 - DNA, 25 bp, Homo sapien
atggctccaaagggcctgagttctt

SEQ ID NO: 5604090 - DNA, 25 bp, Homo sapien
ttgccccaggcacatagcaaataaa

SEQ ID NO: 5604091 - DNA, 25 bp, Homo sapien
tgcaaggattcctgaggatagtatc

SEQ ID NO: 5604092 - DNA, 25 bp, Homo sapien
cagcagaaccacttagctgggaggg

SEQ ID NO: 5604093 - DNA, 25 bp, Homo sapien
gggctctgtgactttgagggtccca

SEQ ID NO: 5604094 - DNA, 25 bp, Homo sapien
tgggcagaccacactgctggaatgt

SEQ ID NO: 5604095 - DNA, 25 bp, Homo sapien
agggtcccactctggtctgcctcct

SEQ ID NO: 5604096 - DNA, 25 bp, Homo sapien
gcccacaccaggtgtctgggatcct

SEQ ID NO: 5604097 - DNA, 25 bp, Homo sapien
aaggactgtgcaggcctcttccctg

SEQ ID NO: 5604098 - DNA, 25 bp, Homo sapien
tgggatcctgggattcctcaccctc

SEQ ID NO: 5604099 - DNA, 25 bp, Homo sapien
gcctcctccagcagaaccacttagc

SEQ ID NO: 5604100 - DNA, 25 bp, Homo sapien
atgttcatcctggacctgaggtggg

SEQ ID NO: 5604101 - DNA, 25 bp, Homo sapien
ctgggtctcccctgtgggcagacca

SEQ ID NO: 5604102 - DNA, 25 bp, Homo sapien
atgtctgtgtggaatatctcacgac

SEQ ID NO: 5604103 - DNA, 25 bp, Homo sapien
ggtcagatgggtattacgtgagata

SEQ ID NO: 5604104 - DNA, 25 bp, Homo sapien
aaagaagatacagcacatgtctgtg

SEQ ID NO: 5604105 - DNA, 25 bp, Homo sapien
agggggcatagttttctggacctgg

SEQ ID NO: 5604106 - DNA, 25 bp, Homo sapien
tcgtttggatggagtaacatgcaag

SEQ ID NO: 5604107 - DNA, 25 bp, Homo sapien
gaaagagtctctgccagcttgtcct

SEQ ID NO: 5604108 - DNA, 25 bp, Homo sapien
tatctcacgacattggcctaaagcc

SEQ ID NO: 5604109 - DNA, 25 bp, Homo sapien
caccccgaaaccaactaaatagcca

SEQ ID NO: 5604110 - DNA, 25 bp, Homo sapien
aggccagtgtacttgcatgactctt

SEQ ID NO: 5604111 - DNA, 25 bp, Homo sapien
actaaatagccagacaagggtcaga

SEQ ID NO: 5604112 - DNA, 25 bp, Homo sapien
gagtgactcaggcaaggcttttcat

SEQ ID NO: 5604113 - DNA, 25 bp, Homo sapien
gagtgccgagttcagctcgtccggc

SEQ ID NO: 5604114 - DNA, 25 bp, Homo sapien
tctaaagagactcacagcagacatc

SEQ ID NO: 5604115 - DNA, 25 bp, Homo sapien
tttgtatgtcagctgcaaaaaaaca

SEQ ID NO: 5604116 - DNA, 25 bp, Homo sapien
aaaaacaagtattagtgggacttca

SEQ ID NO: 5604117 - DNA, 25 bp, Homo sapien
gtattagtgggacttcatggccccg

SEQ ID NO: 5604118 - DNA, 25 bp, Homo sapien
acagcaaatccggctcagctccctg

SEQ ID NO: 5604119 - DNA, 25 bp, Homo sapien
tgaagctattggtgttttgtatgtc

SEQ ID NO: 5604120 - DNA, 25 bp, Homo sapien
aatcctgcctaggccctcaaggacc

SEQ ID NO: 5604121 - DNA, 25 bp, Homo sapien
gccgagttcagctcgtccggcagag

SEQ ID NO: 5604122 - DNA, 25 bp, Homo sapien
aggtcactgctgtctaaagagactc

SEQ ID NO: 5604123 - DNA, 25 bp, Homo sapien
ggctggccaggaatcctgcctaggc

SEQ ID NO: 5604124 - DNA, 25 bp, Homo sapien
ttaacaggttctgaaaggcttggag

SEQ ID NO: 5604125 - DNA, 25 bp, Homo sapien
ttttgtcactaggatcaggaatatt

SEQ ID NO: 5604126 - DNA, 25 bp, Homo sapien
agctttgaactggcacccttgttaa

SEQ ID NO: 5604127 - DNA, 25 bp, Homo sapien
gtatttttttctgtgggagggtgca

SEQ ID NO: 5604128 - DNA, 25 bp, Homo sapien
ttagtttccagctttgaactggcac

SEQ ID NO: 5604129 - DNA, 25 bp, Homo sapien
ggcttggaggctataacattctcac

SEQ ID NO: 5604130 - DNA, 25 bp, Homo sapien
aaaggcttggaggctataacattct

SEQ ID NO: 5604131 - DNA, 25 bp, Homo sapien
tttcagtgacagtcgtatttttttc

SEQ ID NO: 5604132 - DNA, 25 bp, Homo sapien
tgggagggtgcacatttatattcat

SEQ ID NO: 5604133 - DNA, 25 bp, Homo sapien
ataacttttgtcactaggatcagga

SEQ ID NO: 5604134 - DNA, 25 bp, Homo sapien
tagataatatttttcagtgacagtc

SEQ ID NO: 5604135 - DNA, 25 bp, Homo sapien
gaggagatcgtcatcaaggctgatg

SEQ ID NO: 5604136 - DNA, 25 bp, Homo sapien
aacacgactcagagactgcgtggct

SEQ ID NO: 5604137 - DNA, 25 bp, Homo sapien
ggacttgccaagtggccccagctca

SEQ ID NO: 5604138 - DNA, 25 bp, Homo sapien
ctgactggcctaagaagaccatcgg

SEQ ID NO: 5604139 - DNA, 25 bp, Homo sapien
tgcattactcagcacacagcgaccc

SEQ ID NO: 5604140 - DNA, 25 bp, Homo sapien
ccctgactcagtcgatgtgggagga

SEQ ID NO: 5604141 - DNA, 25 bp, Homo sapien
cgcccagcaaaggactgcattactc

SEQ ID NO: 5604142 - DNA, 25 bp, Homo sapien
atgtcccttcagagtgctgcccact

SEQ ID NO: 5604143 - DNA, 25 bp, Homo sapien
gtgcagctcccccgcagtttcccac

SEQ ID NO: 5604144 - DNA, 25 bp, Homo sapien
gagttgtgcttgggaacacgactca

SEQ ID NO: 5604145 - DNA, 25 bp, Homo sapien
aaggctgatgtgagtctaagaaaca

SEQ ID NO: 5604146 - DNA, 25 bp, Homo sapien
ccagcccaaggtcccatgttctcac

SEQ ID NO: 5604147 - DNA, 25 bp, Homo sapien
gttcccgctgcaccacagcatcctc

SEQ ID NO: 5604148 - DNA, 25 bp, Homo sapien
ctctaacccaagctgttcccgctgc

SEQ ID NO: 5604149 - DNA, 25 bp, Homo sapien
ctctccctctaacccaagctgttcc

SEQ ID NO: 5604150 - DNA, 25 bp, Homo sapien
tgagtctcaccagcccaaggtccca

SEQ ID NO: 5604151 - DNA, 25 bp, Homo sapien
ggaacaagctcaagctacaaagcaa

SEQ ID NO: 5604152 - DNA, 25 bp, Homo sapien
ttctgtgatggacaactaggaacaa

SEQ ID NO: 5604153 - DNA, 25 bp, Homo sapien
acaactaggaacaagctcaagctac

SEQ ID NO: 5604154 - DNA, 25 bp, Homo sapien
tctgctaatgctttctgtgatggac

SEQ ID NO: 5604155 - DNA, 25 bp, Homo sapien
ctttcccaaggacttgaatccaggc

SEQ ID NO: 5604156 - DNA, 25 bp, Homo sapien
gaggaagttgagtctcaccagccca

SEQ ID NO: 5604157 - DNA, 25 bp, Homo sapien
cagttgaaccgaaagaaaatattat

SEQ ID NO: 5604158 - DNA, 25 bp, Homo sapien
aaaaaagcaatattgatgttcccgt

SEQ ID NO: 5604159 - DNA, 25 bp, Homo sapien
aaagcaatattgatgttcccgtatt

SEQ ID NO: 5604160 - DNA, 25 bp, Homo sapien
tgaaccgaaagaaaatattattgta

SEQ ID NO: 5604161 - DNA, 25 bp, Homo sapien
aatacagttgaaccgaaagaaaata

SEQ ID NO: 5604162 - DNA, 25 bp, Homo sapien
tcctttaaaaaagcaatattgatgt

SEQ ID NO: 5604163 - DNA, 25 bp, Homo sapien
gcacctgacgaagagtttccacttt

SEQ ID NO: 5604164 - DNA, 25 bp, Homo sapien
cacttttaatacagttgaaccgaaa

SEQ ID NO: 5604165 - DNA, 25 bp, Homo sapien
cctgacgaagagtttccacttttaa

SEQ ID NO: 5604166 - DNA, 25 bp, Homo sapien
cacctgacgaagagtttccactttt

SEQ ID NO: 5604167 - DNA, 25 bp, Homo sapien
ttaaaaaagcaatattgatgttccc

SEQ ID NO: 5604168 - DNA, 25 bp, Homo sapien
tcatcctcagtgttggaggagggtc

SEQ ID NO: 5604169 - DNA, 25 bp, Homo sapien
aaaataatgagactgcctagattaa

SEQ ID NO: 5604170 - DNA, 25 bp, Homo sapien
gtgaaacagcaaacaacaatgaaaa

SEQ ID NO: 5604171 - DNA, 25 bp, Homo sapien
gtaaactatcagtgttcctgggtct

SEQ ID NO: 5604172 - DNA, 25 bp, Homo sapien
gtcaaattgtcatcctcagtgttgg

SEQ ID NO: 5604173 - DNA, 25 bp, Homo sapien
ttctctagtgaaacagcaaacaaca

SEQ ID NO: 5604174 - DNA, 25 bp, Homo sapien
ttctcaaaagattcttggatctgta

SEQ ID NO: 5604175 - DNA, 25 bp, Homo sapien
tcctgggtcttatttggaaacataa

SEQ ID NO: 5604176 - DNA, 25 bp, Homo sapien
cttacctcttaatctgcaaaaccaa

SEQ ID NO: 5604177 - DNA, 25 bp, Homo sapien
tctagtgaaacagcaaacaacaatg

SEQ ID NO: 5604178 - DNA, 25 bp, Homo sapien
cttggatctgtaaactatcagtgtt

SEQ ID NO: 5604179 - DNA, 25 bp, Homo sapien
gaaccgtttagccaagaccagcatc

SEQ ID NO: 5604180 - DNA, 25 bp, Homo sapien
aggctgtgatcgaggtgattatgcc

SEQ ID NO: 5604181 - DNA, 25 bp, Homo sapien
caagggcttggtactcatcatctcc

SEQ ID NO: 5604182 - DNA, 25 bp, Homo sapien
atgcaaagctaaaacccactgggtc

SEQ ID NO: 5604183 - DNA, 25 bp, Homo sapien
atcccgaatccacccccgctactcc

SEQ ID NO: 5604184 - DNA, 25 bp, Homo sapien
tgggattcagacgctggtcccctac

SEQ ID NO: 5604185 - DNA, 25 bp, Homo sapien
gtcttcttgagacagtgcaggtgta

SEQ ID NO: 5604186 - DNA, 25 bp, Homo sapien
tctctgatgccaaaagggttggaga

SEQ ID NO: 5604187 - DNA, 25 bp, Homo sapien
gaccagcatccacagagagtggctc

SEQ ID NO: 5604188 - DNA, 25 bp, Homo sapien
agtcaataaggaaaacccggatgaa

SEQ ID NO: 5604189 - DNA, 25 bp, Homo sapien
tgtccactgctaccgaggaacactc

SEQ ID NO: 5604190 - DNA, 25 bp, Homo sapien
ccgtgtccagtttgaaaggctctcg

SEQ ID NO: 5604191 - DNA, 25 bp, Homo sapien
cgagagcctttcaaactggacacgg

SEQ ID NO: 5604192 - DNA, 25 bp, Homo sapien
gatgattgttgcaagggactctcca

SEQ ID NO: 5604193 - DNA, 25 bp, Homo sapien
caaaaatgtctgtaggcattgccac

SEQ ID NO: 5604194 - DNA, 25 bp, Homo sapien
gaggggctcttaagtcaacaatgga

SEQ ID NO: 5604195 - DNA, 25 bp, Homo sapien
cattcagaacgatggcattaaagga

SEQ ID NO: 5604196 - DNA, 25 bp, Homo sapien
cactatgacgttttgggccagatga

SEQ ID NO: 5604197 - DNA, 25 bp, Homo sapien
aagggactctccagtgcattgcaag

SEQ ID NO: 5604198 - DNA, 25 bp, Homo sapien
acccatatacctggagaatgagggg

SEQ ID NO: 5604199 - DNA, 25 bp, Homo sapien
atctgctgatgggcaaaatccactt

SEQ ID NO: 5604200 - DNA, 25 bp, Homo sapien
agatgccagttgcactgccccacct

SEQ ID NO: 5604201 - DNA, 25 bp, Homo sapien
tactagattagagaaaagaactgac

SEQ ID NO: 5604202 - DNA, 25 bp, Homo sapien
ccagggttccctaggccacacctta

SEQ ID NO: 5604203 - DNA, 25 bp, Homo sapien
atctgtaggcactatgttaagcatt

SEQ ID NO: 5604204 - DNA, 25 bp, Homo sapien
tgggattgtaggcatgagccatcat

SEQ ID NO: 5604205 - DNA, 25 bp, Homo sapien
aatacgtattcgtggtagaaatatt

SEQ ID NO: 5604206 - DNA, 25 bp, Homo sapien
cagggatctgcctgcctccgcttcc

SEQ ID NO: 5604207 - DNA, 25 bp, Homo sapien
ttgacacatataattctagagtttt

SEQ ID NO: 5604208 - DNA, 25 bp, Homo sapien
aataaaaatgtaaatgctcttctcc

SEQ ID NO: 5604209 - DNA, 25 bp, Homo sapien
tccttttaaagtgtgtgtgtgtgtg

SEQ ID NO: 5604210 - DNA, 25 bp, Homo sapien
catgcctggcctgctgtgagtttta

SEQ ID NO: 5604211 - DNA, 25 bp, Homo sapien
aactcctgagctccagggatctgcc

SEQ ID NO: 5604212 - DNA, 25 bp, Homo sapien
ccgcttcccaaagtggtgggattgt

SEQ ID NO: 5604213 - DNA, 25 bp, Homo sapien
tagaagcaaaaaagtcacaatcatc

SEQ ID NO: 5604214 - DNA, 25 bp, Homo sapien
acctggagtgcaggtgactctaggt

SEQ ID NO: 5604215 - DNA, 25 bp, Homo sapien
agttcttccaagagcatgtcatgca

SEQ ID NO: 5604216 - DNA, 25 bp, Homo sapien
tatcaacctgctgctctggtatctc

SEQ ID NO: 5604217 - DNA, 25 bp, Homo sapien
cactggtgccagttcttccaagagc

SEQ ID NO: 5604218 - DNA, 25 bp, Homo sapien
cctgggcaggtcccattacctggag

SEQ ID NO: 5604219 - DNA, 25 bp, Homo sapien
gagcatgtcatgcatatcaacctgc

SEQ ID NO: 5604220 - DNA, 25 bp, Homo sapien
tgctgctctggtatctcaagttctc

SEQ ID NO: 5604221 - DNA, 25 bp, Homo sapien
ttggtggtatgtgtgccgttcccac

SEQ ID NO: 5604222 - DNA, 25 bp, Homo sapien
ccattacctggagtgcaggtgactc

SEQ ID NO: 5604223 - DNA, 25 bp, Homo sapien
aagtcttctatcagtgacacaactc

SEQ ID NO: 5604224 - DNA, 25 bp, Homo sapien
atgtgtgccgttcccactggtgcca

SEQ ID NO: 5604225 - DNA, 25 bp, Homo sapien
ttaaaccatcaatgcaaaaacactt

SEQ ID NO: 5604226 - DNA, 25 bp, Homo sapien
tataaagaatacaccttaggcaata

SEQ ID NO: 5604227 - DNA, 25 bp, Homo sapien
ccgtatacaaaacacatgtggcccc

SEQ ID NO: 5604228 - DNA, 25 bp, Homo sapien
caggaaagtattagcattttttatt

SEQ ID NO: 5604229 - DNA, 25 bp, Homo sapien
ggtacaaaggtacattttcatgcat

SEQ ID NO: 5604230 - DNA, 25 bp, Homo sapien
cttaggcaataccagtttaaaagaa

SEQ ID NO: 5604231 - DNA, 25 bp, Homo sapien
tatacacatgtgcactcacgtgtac

SEQ ID NO: 5604232 - DNA, 25 bp, Homo sapien
tgtgcactcacgtgtacacacagat

SEQ ID NO: 5604233 - DNA, 25 bp, Homo sapien
cacatgtggccccacacatatacac

SEQ ID NO: 5604234 - DNA, 25 bp, Homo sapien
ttttctgggcacataggatcaggaa

SEQ ID NO: 5604235 - DNA, 25 bp, Homo sapien
ttgtgtataaggtacaaaggtacat

SEQ ID NO: 5604236 - DNA, 25 bp, Homo sapien
cttgcgggactcacgccccagaggt

SEQ ID NO: 5604237 - DNA, 25 bp, Homo sapien
acctctggggcgtgagtcccgcaag

SEQ ID NO: 5604238 - DNA, 25 bp, Homo sapien
gtcagaattgcttctggcacacctc

SEQ ID NO: 5604239 - DNA, 25 bp, Homo sapien
tctgcagctgtgcttctgactagag

SEQ ID NO: 5604240 - DNA, 25 bp, Homo sapien
ccccactgcccttctagacctattc

SEQ ID NO: 5604241 - DNA, 25 bp, Homo sapien
actggaagtcttggtattgagctag

SEQ ID NO: 5604242 - DNA, 25 bp, Homo sapien
cagtctcagactgcagtgctactgc

SEQ ID NO: 5604243 - DNA, 25 bp, Homo sapien
cctgcaagttgcagcaagtcagaat

SEQ ID NO: 5604244 - DNA, 25 bp, Homo sapien
ccagcctctcccattgagccacatc

SEQ ID NO: 5604245 - DNA, 25 bp, Homo sapien
tctagagtagttcccgcttgtcagt

SEQ ID NO: 5604246 - DNA, 25 bp, Homo sapien
actgcagtctgcacatctagctcct

SEQ ID NO: 5604247 - DNA, 25 bp, Homo sapien
tctgactagagaaacctctccctcc

SEQ ID NO: 5604248 - DNA, 25 bp, Homo sapien
gagtatggggcatagataccatgta

SEQ ID NO: 5604249 - DNA, 25 bp, Homo sapien
gaagcagcatgtgtttggtggttat

SEQ ID NO: 5604250 - DNA, 25 bp, Homo sapien
actgagctatcaggaagcagcatgt

SEQ ID NO: 5604251 - DNA, 25 bp, Homo sapien
gggagaaagacagtgcctgatattg

SEQ ID NO: 5604252 - DNA, 25 bp, Homo sapien
tttcctaacaccctgcatgcaacta

SEQ ID NO: 5604253 - DNA, 25 bp, Homo sapien
ggcctcaccacctgagcatggggcc

SEQ ID NO: 5604254 - DNA, 25 bp, Homo sapien
gagtgccagcctattttgtatcttc

SEQ ID NO: 5604255 - DNA, 25 bp, Homo sapien
tatgaggcaaagtactgagctatca

SEQ ID NO: 5604256 - DNA, 25 bp, Homo sapien
ctcccttaggtagaagtagtgatgg

SEQ ID NO: 5604257 - DNA, 25 bp, Homo sapien
agtgcctgatattggcctcaccacc

SEQ ID NO: 5604258 - DNA, 25 bp, Homo sapien
tgccatcttcactagagtgccagcc

SEQ ID NO: 5604259 - DNA, 25 bp, Homo sapien
ccttggtagccccctaattgccatc

SEQ ID NO: 5604260 - DNA, 25 bp, Homo sapien
atcaagaacagagtctggcacatag

SEQ ID NO: 5604261 - DNA, 25 bp, Homo sapien
aggttctagaatatgatagagtatt

SEQ ID NO: 5604262 - DNA, 25 bp, Homo sapien
gtttctgagagtgcttccttgaccc

SEQ ID NO: 5604263 - DNA, 25 bp, Homo sapien
agaacagagtatcaagaacagagtc

SEQ ID NO: 5604264 - DNA, 25 bp, Homo sapien
ttgaccctatgagctaaaggagccc

SEQ ID NO: 5604265 - DNA, 25 bp, Homo sapien
attacctaggtctgctgtgacaaat

SEQ ID NO: 5604266 - DNA, 25 bp, Homo sapien
ggagatggtatcaagaacagagtat

SEQ ID NO: 5604267 - DNA, 25 bp, Homo sapien
ttcattaagagaacagatggtagaa

SEQ ID NO: 5604268 - DNA, 25 bp, Homo sapien
tattgtgatgctcagctcaaatatc

SEQ ID NO: 5604269 - DNA, 25 bp, Homo sapien
atatcatggtttctgagagtgcttc

SEQ ID NO: 5604270 - DNA, 25 bp, Homo sapien
agagaacagatggtagaaactatga

SEQ ID NO: 5604271 - DNA, 25 bp, Homo sapien
tcacacagctggacagtattagccc

SEQ ID NO: 5604272 - DNA, 25 bp, Homo sapien
aagtatacagagaaaaccagtgttc

SEQ ID NO: 5604273 - DNA, 25 bp, Homo sapien
aaaaccagtgttcaagcatgtgtac

SEQ ID NO: 5604274 - DNA, 25 bp, Homo sapien
tctctgaccactagaggagactgct

SEQ ID NO: 5604275 - DNA, 25 bp, Homo sapien
ggagactgctcccctgagacaactc

SEQ ID NO: 5604276 - DNA, 25 bp, Homo sapien
attatccatgcctgtgtctctgacc

SEQ ID NO: 5604277 - DNA, 25 bp, Homo sapien
cctgagacaactccagggcagtgtg

SEQ ID NO: 5604278 - DNA, 25 bp, Homo sapien
agagtctgagatgttttgagtgttc

SEQ ID NO: 5604279 - DNA, 25 bp, Homo sapien
acacgcctagtgaggtttgcaggat

SEQ ID NO: 5604280 - DNA, 25 bp, Homo sapien
acccccgccaggacatctctgtttt

SEQ ID NO: 5604281 - DNA, 25 bp, Homo sapien
gcatgtgtactttcaagagtctgag

SEQ ID NO: 5604282 - DNA, 25 bp, Homo sapien
attagaacaatcaccaaaatgagga

SEQ ID NO: 5604283 - DNA, 25 bp, Homo sapien
aacaaggacacattcttacgtattc

SEQ ID NO: 5604284 - DNA, 25 bp, Homo sapien
gctcagctgccacttctctttagtc

SEQ ID NO: 5604285 - DNA, 25 bp, Homo sapien
tctttagtcagaggagtgcctttag

SEQ ID NO: 5604286 - DNA, 25 bp, Homo sapien
atcaggcaatacagtacagaccagt

SEQ ID NO: 5604287 - DNA, 25 bp, Homo sapien
tgatactatcaggcaatacagtaca

SEQ ID NO: 5604288 - DNA, 25 bp, Homo sapien
caagagtacagtaggacctaaggtt

SEQ ID NO: 5604289 - DNA, 25 bp, Homo sapien
acttctctttagtcagaggagtgcc

SEQ ID NO: 5604290 - DNA, 25 bp, Homo sapien
ggcaatacagtacagaccagttgtc

SEQ ID NO: 5604291 - DNA, 25 bp, Homo sapien
accagttgtcttaataatgtccttt

SEQ ID NO: 5604292 - DNA, 25 bp, Homo sapien
atcaccaaaatgaggaaattgacat

SEQ ID NO: 5604293 - DNA, 25 bp, Homo sapien
cgacatgtcttcagtggtctagtgt

SEQ ID NO: 5604294 - DNA, 25 bp, Homo sapien
acactagaccactgaagacatgtcg

SEQ ID NO: 5604295 - DNA, 25 bp, Homo sapien
acacagtgctgaaatcacaaggatc

SEQ ID NO: 5604296 - DNA, 25 bp, Homo sapien
gagcatgggttttcacagccttgtc

SEQ ID NO: 5604297 - DNA, 25 bp, Homo sapien
tggatgaacctgagcatgggttttc

SEQ ID NO: 5604298 - DNA, 25 bp, Homo sapien
aaactaattgaaggcagaacccaga

SEQ ID NO: 5604299 - DNA, 25 bp, Homo sapien
ggaactgaaggccatttcgtgctga

SEQ ID NO: 5604300 - DNA, 25 bp, Homo sapien
cagccttgtcaacagaagatggaaa

SEQ ID NO: 5604301 - DNA, 25 bp, Homo sapien
ttagtataagggtgaattagaaata

SEQ ID NO: 5604302 - DNA, 25 bp, Homo sapien
tacgagtagaacttcacacagtgct

SEQ ID NO: 5604303 - DNA, 25 bp, Homo sapien
gggcacggaatctgaggtcaattta

SEQ ID NO: 5604304 - DNA, 25 bp, Homo sapien
gacgtttgctgagctggatgaacct

SEQ ID NO: 5604305 - DNA, 25 bp, Homo sapien
tcgtgctgaatcaaggaaaaacacc

SEQ ID NO: 5604306 - DNA, 25 bp, Homo sapien
cctcggcctcgccaggctctaagga

SEQ ID NO: 5604307 - DNA, 25 bp, Homo sapien
cagattctgagaaaatgtggactgg

SEQ ID NO: 5604308 - DNA, 25 bp, Homo sapien
ctggcaacgactggaaatattccct

SEQ ID NO: 5604309 - DNA, 25 bp, Homo sapien
acctcggcctcgccaggctctaagg

SEQ ID NO: 5604310 - DNA, 25 bp, Homo sapien
gcaacgactggaaatattccctttc

SEQ ID NO: 5604311 - DNA, 25 bp, Homo sapien
aagggctaggacagattctgagaaa

SEQ ID NO: 5604312 - DNA, 25 bp, Homo sapien
aattgctttccacctcaagtcctcc

SEQ ID NO: 5604313 - DNA, 25 bp, Homo sapien
cacctcaagtcctccatggatggga

SEQ ID NO: 5604314 - DNA, 25 bp, Homo sapien
ccacctcaagtcctccatggatggg

SEQ ID NO: 5604315 - DNA, 25 bp, Homo sapien
ggacctcggcctcgccaggctctaa

SEQ ID NO: 5604316 - DNA, 25 bp, Homo sapien
ctgggggcttttccaggaccactgg

SEQ ID NO: 5604317 - DNA, 25 bp, Homo sapien
acatacacagaggtactatagatgt

SEQ ID NO: 5604318 - DNA, 25 bp, Homo sapien
acatctatagtacctctgtgtatgt

SEQ ID NO: 5604319 - DNA, 25 bp, Homo sapien
atgccgcttactgtatgggagaagt

SEQ ID NO: 5604320 - DNA, 25 bp, Homo sapien
aagtctgagtttctgtagcctgtta

SEQ ID NO: 5604321 - DNA, 25 bp, Homo sapien
aactgcactaaaacaggagtggagg

SEQ ID NO: 5604322 - DNA, 25 bp, Homo sapien
ggcccagtcctcccattgataacat

SEQ ID NO: 5604323 - DNA, 25 bp, Homo sapien
ctctttggtggaacatagcagaagt

SEQ ID NO: 5604324 - DNA, 25 bp, Homo sapien
gtggaacatagcagaagtctgagtt

SEQ ID NO: 5604325 - DNA, 25 bp, Homo sapien
aataactgagtagctactgtgggcc

SEQ ID NO: 5604326 - DNA, 25 bp, Homo sapien
tctatctggataataggaaaatgtg

SEQ ID NO: 5604327 - DNA, 25 bp, Homo sapien
tgactatagccaagttaactgcact

SEQ ID NO: 5604328 - DNA, 25 bp, Homo sapien
actgtatgggagaagtttgtagttt

SEQ ID NO: 5604329 - DNA, 25 bp, Homo sapien
tgtagcctgttattcgcagtgtcta

SEQ ID NO: 5604330 - DNA, 25 bp, Homo sapien
tcatgatatgtcaagagaaatttcc

SEQ ID NO: 5604331 - DNA, 25 bp, Homo sapien
aaccgaaaacccacctgcttgcaaa

SEQ ID NO: 5604332 - DNA, 25 bp, Homo sapien
ttttaatgagattgaaacatgtctc

SEQ ID NO: 5604333 - DNA, 25 bp, Homo sapien
taatgctcgatatttacttgcttcc

SEQ ID NO: 5604334 - DNA, 25 bp, Homo sapien
tcttttctgatgagagtggaggaag

SEQ ID NO: 5604335 - DNA, 25 bp, Homo sapien
aagacctaattggaggtctggagcc

SEQ ID NO: 5604336 - DNA, 25 bp, Homo sapien
ggaggtctggagcctgctttcttca

SEQ ID NO: 5604337 - DNA, 25 bp, Homo sapien
ccaggtgactgcaaagtgcctaatt

SEQ ID NO: 5604338 - DNA, 25 bp, Homo sapien
tttcaaatgcatggccatctgggag

SEQ ID NO: 5604339 - DNA, 25 bp, Homo sapien
actgcaaagtgcctaattggcgatt

SEQ ID NO: 5604340 - DNA, 25 bp, Homo sapien
agaaagaaagcttctggatgagttt

SEQ ID NO: 5604341 - DNA, 25 bp, Homo sapien
aagagataattgtttacagagactc

SEQ ID NO: 5604342 - DNA, 25 bp, Homo sapien
cagagagatatctgatgtatgtatc

SEQ ID NO: 5604343 - DNA, 25 bp, Homo sapien
taatatggatagctgcagtgccttt

SEQ ID NO: 5604344 - DNA, 25 bp, Homo sapien
ctgaatctctctgatagggacatcc

SEQ ID NO: 5604345 - DNA, 25 bp, Homo sapien
tatgagaccctttgaatcacccatc

SEQ ID NO: 5604346 - DNA, 25 bp, Homo sapien
gcacccagcaggtgcccaaaaatct

SEQ ID NO: 5604347 - DNA, 25 bp, Homo sapien
tcatttgtgcctaacaagatctggc

SEQ ID NO: 5604348 - DNA, 25 bp, Homo sapien
aacaagatctggcacccagcaggtg

SEQ ID NO: 5604349 - DNA, 25 bp, Homo sapien
cttggtggctctgttttagtcattt

SEQ ID NO: 5604350 - DNA, 25 bp, Homo sapien
cagtgatgattagtagtaagtctcc

SEQ ID NO: 5604351 - DNA, 25 bp, Homo sapien
agggacatcctatcagagagatatc

SEQ ID NO: 5604352 - DNA, 25 bp, Homo sapien
actatgcatgaaatagtgaaaagga

SEQ ID NO: 5604353 - DNA, 25 bp, Homo sapien
ttaaagtgaccataactaccattcc

SEQ ID NO: 5604354 - DNA, 25 bp, Homo sapien
taaactcatggtttagactagatca

SEQ ID NO: 5604355 - DNA, 25 bp, Homo sapien
ttatataaagactgccttctctgat

SEQ ID NO: 5604356 - DNA, 25 bp, Homo sapien
gtctccttcaaacctcatgcccacc

SEQ ID NO: 5604357 - DNA, 25 bp, Homo sapien
tctgtctactgattatgccatatat

SEQ ID NO: 5604358 - DNA, 25 bp, Homo sapien
cttggtaagtgatcctagttcaaac

SEQ ID NO: 5604359 - DNA, 25 bp, Homo sapien
aggagggtgctatgcaagttatatt

SEQ ID NO: 5604360 - DNA, 25 bp, Homo sapien
tcatgcccaccattatcccaggttc

SEQ ID NO: 5604361 - DNA, 25 bp, Homo sapien
caggttcagtgatctagatgctttc

SEQ ID NO: 5604362 - DNA, 25 bp, Homo sapien
atcccaggttcagtgatctagatgc

SEQ ID NO: 5604363 - DNA, 25 bp, Homo sapien
cggcaccagcttgcgcaggtgcttc

SEQ ID NO: 5604364 - DNA, 25 bp, Homo sapien
gggctcctcccatcccggggacatc

SEQ ID NO: 5604365 - DNA, 25 bp, Homo sapien
ccggggacatctgcgaccccggagg

SEQ ID NO: 5604366 - DNA, 25 bp, Homo sapien
gcaggccctgcattccgcgaggcct

SEQ ID NO: 5604367 - DNA, 25 bp, Homo sapien
cgcagccacccgcgctcgctcgcgg

SEQ ID NO: 5604368 - DNA, 25 bp, Homo sapien
cgaaaggaacttgcgcatctgctcc

SEQ ID NO: 5604369 - DNA, 25 bp, Homo sapien
ctccgcggccccgcacctttgagcg

SEQ ID NO: 5604370 - DNA, 25 bp, Homo sapien
cgcatctgctccagggcgctcttct

SEQ ID NO: 5604371 - DNA, 25 bp, Homo sapien
ccgcgcgcccttctgggacttgtag

SEQ ID NO: 5604372 - DNA, 25 bp, Homo sapien
gcgctccaccagcaccgtgtggacc

SEQ ID NO: 5604373 - DNA, 25 bp, Homo sapien
gccgccgtcctccagcagcagcggc

SEQ ID NO: 5604374 - DNA, 25 bp, Homo sapien
gcagagttcaacacagttgaagtga

SEQ ID NO: 5604375 - DNA, 25 bp, Homo sapien
gaaaatggtggtcttcccaagctag

SEQ ID NO: 5604376 - DNA, 25 bp, Homo sapien
aagtggctactgtaggaagtgagtt

SEQ ID NO: 5604377 - DNA, 25 bp, Homo sapien
atttattggccatttactctgtgca

SEQ ID NO: 5604378 - DNA, 25 bp, Homo sapien
aggtagagctccagtagaaaatggt

SEQ ID NO: 5604379 - DNA, 25 bp, Homo sapien
aatctttggtatagagctgggttgc

SEQ ID NO: 5604380 - DNA, 25 bp, Homo sapien
gaacaaatcgccacgagaactagga

SEQ ID NO: 5604381 - DNA, 25 bp, Homo sapien
tgtgtagaacaaatcgccacgagaa

SEQ ID NO: 5604382 - DNA, 25 bp, Homo sapien
agttgaagtgactggaatttgtggg

SEQ ID NO: 5604383 - DNA, 25 bp, Homo sapien
agagctccagtagaaaatggtggtc

SEQ ID NO: 5604384 - DNA, 25 bp, Homo sapien
cagactttgaccctgggaggtagag

SEQ ID NO: 5604385 - DNA, 25 bp, Homo sapien
gtgttcagtgatctatgtctcctac

SEQ ID NO: 5604386 - DNA, 25 bp, Homo sapien
cctctgcaggagcttgctgctgtta

SEQ ID NO: 5604387 - DNA, 25 bp, Homo sapien
aagtacatttcaagtaagccaaagc

SEQ ID NO: 5604388 - DNA, 25 bp, Homo sapien
tcaaaatatatgacggtatacccgt

SEQ ID NO: 5604389 - DNA, 25 bp, Homo sapien
ggtatacccgtatgttctgagtctt

SEQ ID NO: 5604390 - DNA, 25 bp, Homo sapien
aaaaaagtgttcagtgatctatgtc

SEQ ID NO: 5604391 - DNA, 25 bp, Homo sapien
taattgtaatgttgcccatggttaa

SEQ ID NO: 5604392 - DNA, 25 bp, Homo sapien
agcacttttaagttgaacctgtagt

SEQ ID NO: 5604393 - DNA, 25 bp, Homo sapien
caggagcttgctgctgttaacagtt

SEQ ID NO: 5604394 - DNA, 25 bp, Homo sapien
ttcaagagttttgtagctgatctat

SEQ ID NO: 5604395 - DNA, 25 bp, Homo sapien
acccgtatgttctgagtcttgctgt

SEQ ID NO: 5604396 - DNA, 25 bp, Homo sapien
tccatgatgacagctgccctgttat

SEQ ID NO: 5604397 - DNA, 25 bp, Homo sapien
tttcttgggcccctctgcacgtggg

SEQ ID NO: 5604398 - DNA, 25 bp, Homo sapien
ttttatgaattggaggactgcctgg

SEQ ID NO: 5604399 - DNA, 25 bp, Homo sapien
tgttatggtgggattactttggagg

SEQ ID NO: 5604400 - DNA, 25 bp, Homo sapien
tgcacgtgggcagtccttccatgat

SEQ ID NO: 5604401 - DNA, 25 bp, Homo sapien
cccagggaagccgctattcatctgc

SEQ ID NO: 5604402 - DNA, 25 bp, Homo sapien
tctcagtgggcaggccttctgtttt

SEQ ID NO: 5604403 - DNA, 25 bp, Homo sapien
ttgctttgaggacaagaccactttc

SEQ ID NO: 5604404 - DNA, 25 bp, Homo sapien
acaaggtgctcgtgactcaagacct

SEQ ID NO: 5604405 - DNA, 25 bp, Homo sapien
tagcccagcatctaacacaaggtgc

SEQ ID NO: 5604406 - DNA, 25 bp, Homo sapien
tgtagctgttggatgacacaggatc

SEQ ID NO: 5604407 - DNA, 25 bp, Homo sapien
aaaataggctattcccttctcccac

SEQ ID NO: 5604408 - DNA, 25 bp, Homo sapien
aatcagtgaagaagtttccatggtg

SEQ ID NO: 5604409 - DNA, 25 bp, Homo sapien
caattgtcgctcttgcaaataaaac

SEQ ID NO: 5604410 - DNA, 25 bp, Homo sapien
tcttaattagtgtatcagacttttc

SEQ ID NO: 5604411 - DNA, 25 bp, Homo sapien
cagtgaagaagtttccatggtgctt

SEQ ID NO: 5604412 - DNA, 25 bp, Homo sapien
gtgctttggctttgaaaacaatgac

SEQ ID NO: 5604413 - DNA, 25 bp, Homo sapien
gaagaagtttccatggtgctttggc

SEQ ID NO: 5604414 - DNA, 25 bp, Homo sapien
actcaagactgggtaactaataaag

SEQ ID NO: 5604415 - DNA, 25 bp, Homo sapien
tgtcaccaacaattgtcgctcttgc

SEQ ID NO: 5604416 - DNA, 25 bp, Homo sapien
ccaaacaagcaaacttgtcaccaac

SEQ ID NO: 5604417 - DNA, 25 bp, Homo sapien
ttaatgaaatgtatacccttgtgta

SEQ ID NO: 5604418 - DNA, 25 bp, Homo sapien
ttgaggatggacttgcaaaccaaag

SEQ ID NO: 5604419 - DNA, 25 bp, Homo sapien
atggaatacgaacaggaacaatcaa

SEQ ID NO: 5604420 - DNA, 25 bp, Homo sapien
aattagcagaagcctcttgaggatg

SEQ ID NO: 5604421 - DNA, 25 bp, Homo sapien
cctagacattagaaatagaggccag

SEQ ID NO: 5604422 - DNA, 25 bp, Homo sapien
ttctactggtcaaagcaaggactgg

SEQ ID NO: 5604423 - DNA, 25 bp, Homo sapien
agatagagggaaaacccaaaatgga

SEQ ID NO: 5604424 - DNA, 25 bp, Homo sapien
aggggtatgtgtatcagttggcctt

SEQ ID NO: 5604425 - DNA, 25 bp, Homo sapien
ggagagagattgcaccttcagagag

SEQ ID NO: 5604426 - DNA, 25 bp, Homo sapien
ggtaataagactatgtaacaggaac

SEQ ID NO: 5604427 - DNA, 25 bp, Homo sapien
tgggcctctgtcaaggagcctattc

SEQ ID NO: 5604428 - DNA, 25 bp, Homo sapien
caaggactggctcacataaaaagga

SEQ ID NO: 5604429 - DNA, 25 bp, Homo sapien
ccatcaacgacaagcagtccctgac

SEQ ID NO: 5604430 - DNA, 25 bp, Homo sapien
cctgaccttccagaacgtggtcttc

SEQ ID NO: 5604431 - DNA, 25 bp, Homo sapien
cggtcttcaagctctcagtaggtgg

SEQ ID NO: 5604432 - DNA, 25 bp, Homo sapien
cttcaatgtcatttatcagagcgcg

SEQ ID NO: 5604433 - DNA, 25 bp, Homo sapien
caggctgacaccattccccccgcag

SEQ ID NO: 5604434 - DNA, 25 bp, Homo sapien
caacgacaagcagtccctgaccttc

SEQ ID NO: 5604435 - DNA, 25 bp, Homo sapien
gctgacaccattccccccgcagagg

SEQ ID NO: 5604436 - DNA, 25 bp, Homo sapien
caatgtcatttatcagagcgcggcg

SEQ ID NO: 5604437 - DNA, 25 bp, Homo sapien
cttccagaacgtggtcttcaatgtc

SEQ ID NO: 5604438 - DNA, 25 bp, Homo sapien
gtggaccatcaacgacaagcagtcc

SEQ ID NO: 5604439 - DNA, 25 bp, Homo sapien
cgcggcggtcttcaagctctcagta

SEQ ID NO: 5604440 - DNA, 25 bp, Homo sapien
tgcattgtgtataacagaagtgttc

SEQ ID NO: 5604441 - DNA, 25 bp, Homo sapien
tatgaatgcatccacgtactagtcc

SEQ ID NO: 5604442 - DNA, 25 bp, Homo sapien
attaccattgagtcccccaaacact

SEQ ID NO: 5604443 - DNA, 25 bp, Homo sapien
acacacatacgcacaccactgcttc

SEQ ID NO: 5604444 - DNA, 25 bp, Homo sapien
agctacgctttaggggtgtatgttt

SEQ ID NO: 5604445 - DNA, 25 bp, Homo sapien
cagattacactgcaatggtcatatt

SEQ ID NO: 5604446 - DNA, 25 bp, Homo sapien
gcttcccaaagcctatgaatgcatc

SEQ ID NO: 5604447 - DNA, 25 bp, Homo sapien
ctctagagtgagcagtcagattaca

SEQ ID NO: 5604448 - DNA, 25 bp, Homo sapien
caattatctagtgggagcagttagc

SEQ ID NO: 5604449 - DNA, 25 bp, Homo sapien
gaagtgttctctagagtgagcagtc

SEQ ID NO: 5604450 - DNA, 25 bp, Homo sapien
gtgggagcagttagctacgctttag

SEQ ID NO: 5604451 - DNA, 25 bp, Homo sapien
aagcagcctgactctagggctcata

SEQ ID NO: 5604452 - DNA, 25 bp, Homo sapien
agaccttgtctaggagaggtaaggc

SEQ ID NO: 5604453 - DNA, 25 bp, Homo sapien
gaggtaaggcaatttgcctggggtc

SEQ ID NO: 5604454 - DNA, 25 bp, Homo sapien
gagctggcattgaagctaagcagcc

SEQ ID NO: 5604455 - DNA, 25 bp, Homo sapien
tcattgtcatctccgctgccgtcac

SEQ ID NO: 5604456 - DNA, 25 bp, Homo sapien
ttcattgatgaggaaagaccttgtc

SEQ ID NO: 5604457 - DNA, 25 bp, Homo sapien
gagacaaagagacaaaaacttgact

SEQ ID NO: 5604458 - DNA, 25 bp, Homo sapien
tccgctgccgtcaccaaccttgtct

SEQ ID NO: 5604459 - DNA, 25 bp, Homo sapien
cttgtctacagttaggctagagggg

SEQ ID NO: 5604460 - DNA, 25 bp, Homo sapien
agggctcatagtcagaaatgcgatc

SEQ ID NO: 5604461 - DNA, 25 bp, Homo sapien
gcggctaggtctatgaagcacacca

SEQ ID NO: 5604462 - DNA, 25 bp, Homo sapien
gcattctagggtggccttcgtgatc

SEQ ID NO: 5604463 - DNA, 25 bp, Homo sapien
gttctaggtttcatgggaaggctga

SEQ ID NO: 5604464 - DNA, 25 bp, Homo sapien
ggaaggctgacgtattttgatgtgt

SEQ ID NO: 5604465 - DNA, 25 bp, Homo sapien
tagagtatctgcaacgatgtagggg

SEQ ID NO: 5604466 - DNA, 25 bp, Homo sapien
atatactgtgcactcctaaggacca

SEQ ID NO: 5604467 - DNA, 25 bp, Homo sapien
tgcagagagctataagtagtgcctc

SEQ ID NO: 5604468 - DNA, 25 bp, Homo sapien
actctgcctgcattctagggtggcc

SEQ ID NO: 5604469 - DNA, 25 bp, Homo sapien
ataatgattgaggtagagtatctgc

SEQ ID NO: 5604470 - DNA, 25 bp, Homo sapien
gggtcacaaaggaatcgcttttaca

SEQ ID NO: 5604471 - DNA, 25 bp, Homo sapien
cttcctaggggaagagtaatctaaa

SEQ ID NO: 5604472 - DNA, 25 bp, Homo sapien
ctaaaaaacactgcaatggcctatg

SEQ ID NO: 5604473 - DNA, 25 bp, Homo sapien
ccagaatgtaaaacacccatgaacc

SEQ ID NO: 5604474 - DNA, 25 bp, Homo sapien
ggttgctgtagtaggaaagtatcaa

SEQ ID NO: 5604475 - DNA, 25 bp, Homo sapien
ataagtaaaaaatagggttgctgta

SEQ ID NO: 5604476 - DNA, 25 bp, Homo sapien
agatggccaagaaatgaaccaaaat

SEQ ID NO: 5604477 - DNA, 25 bp, Homo sapien
aactcaagggtaatcaccagtatac

SEQ ID NO: 5604478 - DNA, 25 bp, Homo sapien
aggaaagtatcaactaggaaataat

SEQ ID NO: 5604479 - DNA, 25 bp, Homo sapien
tgagccgctacacccggcctgtttc

SEQ ID NO: 5604480 - DNA, 25 bp, Homo sapien
acttaactataagacgtttcgagtc

SEQ ID NO: 5604481 - DNA, 25 bp, Homo sapien
gggatattatccacaagactgaaga

SEQ ID NO: 5604482 - DNA, 25 bp, Homo sapien
gtttcgagtctttgcaacttctgcc

SEQ ID NO: 5604483 - DNA, 25 bp, Homo sapien
taatgtaaaactcaagggtaatcac

SEQ ID NO: 5604484 - DNA, 25 bp, Homo sapien
tatggcataaataggtgtcatgggg

SEQ ID NO: 5604485 - DNA, 25 bp, Homo sapien
tgaatagtcacaggtcacaggttga

SEQ ID NO: 5604486 - DNA, 25 bp, Homo sapien
ctgagaaccttgagaggagttattt

SEQ ID NO: 5604487 - DNA, 25 bp, Homo sapien
cacttgaggttcaggaatttgggaa

SEQ ID NO: 5604488 - DNA, 25 bp, Homo sapien
aataaaaaatcgttagaggccagag

SEQ ID NO: 5604489 - DNA, 25 bp, Homo sapien
agagctgattttaacgatgaggatt

SEQ ID NO: 5604490 - DNA, 25 bp, Homo sapien
ccagagggtgaactttgatagtcat

SEQ ID NO: 5604491 - DNA, 25 bp, Homo sapien
gtcacaggttgagagacactgaaca

SEQ ID NO: 5604492 - DNA, 25 bp, Homo sapien
tataatggaatgagacgtctgagaa

SEQ ID NO: 5604493 - DNA, 25 bp, Homo sapien
aaggcttttctaggtggtgcttttc

SEQ ID NO: 5604494 - DNA, 25 bp, Homo sapien
acactgaacaaagagtgagagctga

SEQ ID NO: 5604495 - DNA, 25 bp, Homo sapien
ttacgcctcgtcctccctagtagct

SEQ ID NO: 5604496 - DNA, 25 bp, Homo sapien
tggtgtcaaggtatccttacgcctc

SEQ ID NO: 5604497 - DNA, 25 bp, Homo sapien
aagagagaccatatctagagttgtt

SEQ ID NO: 5604498 - DNA, 25 bp, Homo sapien
atcttgtaaagtcgttattggcttg

SEQ ID NO: 5604499 - DNA, 25 bp, Homo sapien
tgattgcagcaccaatgcaacatac

SEQ ID NO: 5604500 - DNA, 25 bp, Homo sapien
ggtggcctccaacttttggtgtcaa

SEQ ID NO: 5604501 - DNA, 25 bp, Homo sapien
tccaacttttggtgtcaaggtatcc

SEQ ID NO: 5604502 - DNA, 25 bp, Homo sapien
tttcttagagactgattgcagcacc

SEQ ID NO: 5604503 - DNA, 25 bp, Homo sapien
aaggaagagagaccatatctagagt

SEQ ID NO: 5604504 - DNA, 25 bp, Homo sapien
tagagactgattgcagcaccaatgc

SEQ ID NO: 5604505 - DNA, 25 bp, Homo sapien
aaggtatccttacgcctcgtcctcc

SEQ ID NO: 5604506 - DNA, 25 bp, Homo sapien
ttgtagtcatgcatacatggagtat

SEQ ID NO: 5604507 - DNA, 25 bp, Homo sapien
gtgcttaaggcatgctatgattata

SEQ ID NO: 5604508 - DNA, 25 bp, Homo sapien
tttcccagtatcttgcaaagagtaa

SEQ ID NO: 5604509 - DNA, 25 bp, Homo sapien
aattttggccaagtatggtggctta

SEQ ID NO: 5604510 - DNA, 25 bp, Homo sapien
gcactttatgtgcttaaggcatgct

SEQ ID NO: 5604511 - DNA, 25 bp, Homo sapien
atacaaactcacaaaaatgggtagt

SEQ ID NO: 5604512 - DNA, 25 bp, Homo sapien
gggtagtgtcctgattattgtagtc

SEQ ID NO: 5604513 - DNA, 25 bp, Homo sapien
catggagtatgtttgaaaggatttg

SEQ ID NO: 5604514 - DNA, 25 bp, Homo sapien
attatagagatattaaaaatgaatt

SEQ ID NO: 5604515 - DNA, 25 bp, Homo sapien
caaaaatgggtagtgtcctgattat

SEQ ID NO: 5604516 - DNA, 25 bp, Homo sapien
aggatttgttttaaggcgaaacaca

SEQ ID NO: 5604517 - DNA, 25 bp, Homo sapien
ctaacatgctggtaatagttttctt

SEQ ID NO: 5604518 - DNA, 25 bp, Homo sapien
gatcaagtgtcaatgatgacaaatg

SEQ ID NO: 5604519 - DNA, 25 bp, Homo sapien
ttttcttcaatgagatagctgggaa

SEQ ID NO: 5604520 - DNA, 25 bp, Homo sapien
tgacaaaaattgaataaggctatta

SEQ ID NO: 5604521 - DNA, 25 bp, Homo sapien
ataaggctattaattgatcaagtgt

SEQ ID NO: 5604522 - DNA, 25 bp, Homo sapien
gctataggctagtttcaaatctgaa

SEQ ID NO: 5604523 - DNA, 25 bp, Homo sapien
agtgcagactatgacagcttgaata

SEQ ID NO: 5604524 - DNA, 25 bp, Homo sapien
tataaaacagtgggtatatgacaaa

SEQ ID NO: 5604525 - DNA, 25 bp, Homo sapien
gatccagaatgtcaaaggagttttc

SEQ ID NO: 5604526 - DNA, 25 bp, Homo sapien
ctagacaagtacattaaactctggc

SEQ ID NO: 5604527 - DNA, 25 bp, Homo sapien
tgaaaatatgctataggctagtttc

SEQ ID NO: 5604528 - DNA, 25 bp, Homo sapien
gcaggcaccattaggtccagggttg

SEQ ID NO: 5604529 - DNA, 25 bp, Homo sapien
cttgcctaagtaacagtgaaatgcc

SEQ ID NO: 5604530 - DNA, 25 bp, Homo sapien
gccccaaacgagaaatgatccaact

SEQ ID NO: 5604531 - DNA, 25 bp, Homo sapien
gaaaaaattggcatcaggtggtaga

SEQ ID NO: 5604532 - DNA, 25 bp, Homo sapien
tctggtccctcaaggtcagagagca

SEQ ID NO: 5604533 - DNA, 25 bp, Homo sapien
gtaaaacgaacaaatgaagcttgcc

SEQ ID NO: 5604534 - DNA, 25 bp, Homo sapien
gaagggacgatggtcccatgaacct

SEQ ID NO: 5604535 - DNA, 25 bp, Homo sapien
agagttgaaagtccgcataccctac

SEQ ID NO: 5604536 - DNA, 25 bp, Homo sapien
agtacgagatgtttatggcagtgtt

SEQ ID NO: 5604537 - DNA, 25 bp, Homo sapien
aatgatggctcaagtacgagatgtt

SEQ ID NO: 5604538 - DNA, 25 bp, Homo sapien
cagcttcctaaaaggaggtggctgg

SEQ ID NO: 5604539 - DNA, 25 bp, Homo sapien
aaccgactgtccggagaggacatcc

SEQ ID NO: 5604540 - DNA, 25 bp, Homo sapien
ggatgtcctctccggacagtcggtt

SEQ ID NO: 5604541 - DNA, 25 bp, Homo sapien
gaggtctgaggcaatgtgttgacct

SEQ ID NO: 5604542 - DNA, 25 bp, Homo sapien
atcttgagtaagggatgaatgtcat

SEQ ID NO: 5604543 - DNA, 25 bp, Homo sapien
catcacacaccactgctcctgcccc

SEQ ID NO: 5604544 - DNA, 25 bp, Homo sapien
cctagtcccatgcggttagggtgat

SEQ ID NO: 5604545 - DNA, 25 bp, Homo sapien
tgctgtgagatttgaaacttgcgat

SEQ ID NO: 5604546 - DNA, 25 bp, Homo sapien
ggagtgaggtctagctatcaatgtc

SEQ ID NO: 5604547 - DNA, 25 bp, Homo sapien
caatgtcaaggtggaaaaaatatgc

SEQ ID NO: 5604548 - DNA, 25 bp, Homo sapien
aaaatatgccaagagtggtgagctt

SEQ ID NO: 5604549 - DNA, 25 bp, Homo sapien
aaggaagaatatctcaaagggcttt

SEQ ID NO: 5604550 - DNA, 25 bp, Homo sapien
gttcatgaagacaaggaagaatatc

SEQ ID NO: 5604551 - DNA, 25 bp, Homo sapien
ggttagggtgatatgttccagtctt

SEQ ID NO: 5604552 - DNA, 25 bp, Homo sapien
tggatagcatagagttgaataggag

SEQ ID NO: 5604553 - DNA, 25 bp, Homo sapien
ctgtgtccaaaattgtttgtagttc

SEQ ID NO: 5604554 - DNA, 25 bp, Homo sapien
ttttatagcctacaaaactgtgtcc

SEQ ID NO: 5604555 - DNA, 25 bp, Homo sapien
aggacattacattttggaaggtgat

SEQ ID NO: 5604556 - DNA, 25 bp, Homo sapien
aaggcgtcccccctaccccatatca

SEQ ID NO: 5604557 - DNA, 25 bp, Homo sapien
ttttgtgcttatacaggaagatatc

SEQ ID NO: 5604558 - DNA, 25 bp, Homo sapien
aactgaacaggtattgtttaagtat

SEQ ID NO: 5604559 - DNA, 25 bp, Homo sapien
tccatcactggatagcatagagttg

SEQ ID NO: 5604560 - DNA, 25 bp, Homo sapien
ttgatcagctttagaactacaaaac

SEQ ID NO: 5604561 - DNA, 25 bp, Homo sapien
tgcttatacaggaagatatcaagtc

SEQ ID NO: 5604562 - DNA, 25 bp, Homo sapien
tccatgtgaaatttactgaggaatt

SEQ ID NO: 5604563 - DNA, 25 bp, Homo sapien
gtatacaaacagaaacgaacaccgc

SEQ ID NO: 5604564 - DNA, 25 bp, Homo sapien
cagttgctttgtggtcaggcttctt

SEQ ID NO: 5604565 - DNA, 25 bp, Homo sapien
gcccagtaacctccagaatgcccag

SEQ ID NO: 5604566 - DNA, 25 bp, Homo sapien
tctcaggtctgcccagtaacctcca

SEQ ID NO: 5604567 - DNA, 25 bp, Homo sapien
aaacagaaacgaacaccgccatcat

SEQ ID NO: 5604568 - DNA, 25 bp, Homo sapien
acagaaacgaacaccgccatcatta

SEQ ID NO: 5604569 - DNA, 25 bp, Homo sapien
attaactgacaatctgccttctctt

SEQ ID NO: 5604570 - DNA, 25 bp, Homo sapien
acgaacaccgccatcattaactgac

SEQ ID NO: 5604571 - DNA, 25 bp, Homo sapien
agaatgcccagttgctttgtggtca

SEQ ID NO: 5604572 - DNA, 25 bp, Homo sapien
caggtctgcccagtaacctccagaa

SEQ ID NO: 5604573 - DNA, 25 bp, Homo sapien
atgcccagttgctttgtggtcaggc

SEQ ID NO: 5604574 - DNA, 25 bp, Homo sapien
catgaactctgtaaggcagagcaga

SEQ ID NO: 5604575 - DNA, 25 bp, Homo sapien
ctttggggtgatgttttacgttgct

SEQ ID NO: 5604576 - DNA, 25 bp, Homo sapien
atggcttatcatggacccaagtctc

SEQ ID NO: 5604577 - DNA, 25 bp, Homo sapien
cctggcctgtattcagtgactgcag

SEQ ID NO: 5604578 - DNA, 25 bp, Homo sapien
gagatgggcttggttttcaggatct

SEQ ID NO: 5604579 - DNA, 25 bp, Homo sapien
ccaccctgacagccaaacacatgat

SEQ ID NO: 5604580 - DNA, 25 bp, Homo sapien
attctacagccaatgcaagagatgg

SEQ ID NO: 5604581 - DNA, 25 bp, Homo sapien
aacacatgattcagaagacgatttt

SEQ ID NO: 5604582 - DNA, 25 bp, Homo sapien
aaggagaggctaaagaacatctttg

SEQ ID NO: 5604583 - DNA, 25 bp, Homo sapien
gaaatcttggcccaggtcacaggag

SEQ ID NO: 5604584 - DNA, 25 bp, Homo sapien
aagctgggttctagaaatcttggcc

SEQ ID NO: 5604585 - DNA, 25 bp, Homo sapien
acttggacactcaactggagacttt

SEQ ID NO: 5604586 - DNA, 25 bp, Homo sapien
tatataacagaatctagtaattttc

SEQ ID NO: 5604587 - DNA, 25 bp, Homo sapien
aacatagctcagatacttggtcaag

SEQ ID NO: 5604588 - DNA, 25 bp, Homo sapien
ttaagcaaaagccagtttcattcat

SEQ ID NO: 5604589 - DNA, 25 bp, Homo sapien
agagatgaatctatggctcctgctc

SEQ ID NO: 5604590 - DNA, 25 bp, Homo sapien
ttagtaaaggaatcaaccccatata

SEQ ID NO: 5604591 - DNA, 25 bp, Homo sapien
ccttgatatttagttagccagccac

SEQ ID NO: 5604592 - DNA, 25 bp, Homo sapien
agtattaggcatatagagatgaatc

SEQ ID NO: 5604593 - DNA, 25 bp, Homo sapien
caatggactaccgcctatttggttc

SEQ ID NO: 5604594 - DNA, 25 bp, Homo sapien
tttcctgacccaatggactaccgcc

SEQ ID NO: 5604595 - DNA, 25 bp, Homo sapien
tagttagccagccacttggacactc

SEQ ID NO: 5604596 - DNA, 25 bp, Homo sapien
attatctaagcagagaaaagagtgg

SEQ ID NO: 5604597 - DNA, 25 bp, Homo sapien
gggaaatgctataatgagaggacac

SEQ ID NO: 5604598 - DNA, 25 bp, Homo sapien
ccaaaagcattcataagccctgcat

SEQ ID NO: 5604599 - DNA, 25 bp, Homo sapien
taaatctgctactatggtctgaaat

SEQ ID NO: 5604600 - DNA, 25 bp, Homo sapien
aatgtgaaagggaagataatcttag

SEQ ID NO: 5604601 - DNA, 25 bp, Homo sapien
ctataatgagaggacaccatttccc

SEQ ID NO: 5604602 - DNA, 25 bp, Homo sapien
tgaactccccaaagacagatctgcc

SEQ ID NO: 5604603 - DNA, 25 bp, Homo sapien
cgtctgtttcgtgggatatagattt

SEQ ID NO: 5604604 - DNA, 25 bp, Homo sapien
tagttgcttagtgtccgtctgtttc

SEQ ID NO: 5604605 - DNA, 25 bp, Homo sapien
cagagaaaagagtggcaccttattc

SEQ ID NO: 5604606 - DNA, 25 bp, Homo sapien
cagatctgccttaccaaaagcattc

SEQ ID NO: 5604607 - DNA, 25 bp, Homo sapien
agtttaatggaacaatgtcgcagcc

SEQ ID NO: 5604608 - DNA, 25 bp, Homo sapien
gtctcccccagaatttggaggctgg

SEQ ID NO: 5604609 - DNA, 25 bp, Homo sapien
ataatcacaggcctgctgagcaagg

SEQ ID NO: 5604610 - DNA, 25 bp, Homo sapien
gggagaaagttctcaaacctgtctc

SEQ ID NO: 5604611 - DNA, 25 bp, Homo sapien
cccactgccctgaaaaaagactaat

SEQ ID NO: 5604612 - DNA, 25 bp, Homo sapien
aacaatgtcgcagcctgatgggttc

SEQ ID NO: 5604613 - DNA, 25 bp, Homo sapien
agaacagggagaaagttctcaaacc

SEQ ID NO: 5604614 - DNA, 25 bp, Homo sapien
agtactttcccagcagggttctggg

SEQ ID NO: 5604615 - DNA, 25 bp, Homo sapien
aagaatgtaataatcacaggcctgc

SEQ ID NO: 5604616 - DNA, 25 bp, Homo sapien
ttctgggaaactggaacagatgatt

SEQ ID NO: 5604617 - DNA, 25 bp, Homo sapien
tatgtcaaaaatctagtatcaagtt

SEQ ID NO: 5604618 - DNA, 25 bp, Homo sapien
tttgagggtatgtcagaaatatttc

SEQ ID NO: 5604619 - DNA, 25 bp, Homo sapien
atgcaattgagtgatctaaacagat

SEQ ID NO: 5604620 - DNA, 25 bp, Homo sapien
tcacacagtatgcatctgtcaagtc

SEQ ID NO: 5604621 - DNA, 25 bp, Homo sapien
ttaatcggtcatttgagggtatgtc

SEQ ID NO: 5604622 - DNA, 25 bp, Homo sapien
aatatttcaaggctcatgacgattg

SEQ ID NO: 5604623 - DNA, 25 bp, Homo sapien
aaaaacagtattaatcggtcatttg

SEQ ID NO: 5604624 - DNA, 25 bp, Homo sapien
ttgagatcaatttaggatagaatcc

SEQ ID NO: 5604625 - DNA, 25 bp, Homo sapien
ctgtcaagtctaggttttcaatttc

SEQ ID NO: 5604626 - DNA, 25 bp, Homo sapien
ttcagctgtgagccatccagataat

SEQ ID NO: 5604627 - DNA, 25 bp, Homo sapien
acatcatacaaagttctcccgcatt

SEQ ID NO: 5604628 - DNA, 25 bp, Homo sapien
tttaacatggagtctagggatactg

SEQ ID NO: 5604629 - DNA, 25 bp, Homo sapien
cccaggaagaatgacagtctgggga

SEQ ID NO: 5604630 - DNA, 25 bp, Homo sapien
gaatggaaatataacagtaagaagc

SEQ ID NO: 5604631 - DNA, 25 bp, Homo sapien
ctatttgggcaactctaagcattat

SEQ ID NO: 5604632 - DNA, 25 bp, Homo sapien
ggaaaagctaagaaaggtatcttgc

SEQ ID NO: 5604633 - DNA, 25 bp, Homo sapien
gtgtgtgtacacagtggcttgccat

SEQ ID NO: 5604634 - DNA, 25 bp, Homo sapien
ccttcctagaaaagtgtgtgtacac

SEQ ID NO: 5604635 - DNA, 25 bp, Homo sapien
gctactcatggaaaacttaggccaa

SEQ ID NO: 5604636 - DNA, 25 bp, Homo sapien
ttcctacaacagctgaggcaggtaa

SEQ ID NO: 5604637 - DNA, 25 bp, Homo sapien
gggaggactacggcatctactattt

SEQ ID NO: 5604638 - DNA, 25 bp, Homo sapien
tgcaggcattattattgaagcttcc

SEQ ID NO: 5604639 - DNA, 25 bp, Homo sapien
ggcaggtaacaaactgagacagcca

SEQ ID NO: 5604640 - DNA, 25 bp, Homo sapien
ctcacaaaggatactaaggaagctg

SEQ ID NO: 5604641 - DNA, 25 bp, Homo sapien
ggcacgttctagagagacaatgacc

SEQ ID NO: 5604642 - DNA, 25 bp, Homo sapien
gagttgcagacaagacaaagaactg

SEQ ID NO: 5604643 - DNA, 25 bp, Homo sapien
ggatactaaggaagctgcaaaacaa

SEQ ID NO: 5604644 - DNA, 25 bp, Homo sapien
aacaaaacacagcctggcacgttct

SEQ ID NO: 5604645 - DNA, 25 bp, Homo sapien
gacaatgacccattggtgaggtctc

SEQ ID NO: 5604646 - DNA, 25 bp, Homo sapien
gaggtctccagggtaatagtgtcct

SEQ ID NO: 5604647 - DNA, 25 bp, Homo sapien
ttcagaacataaaagagttgcagac

SEQ ID NO: 5604648 - DNA, 25 bp, Homo sapien
tatgaatgttgtacagcaattgcca

SEQ ID NO: 5604649 - DNA, 25 bp, Homo sapien
gaggcatgtctggccttatactgcc

SEQ ID NO: 5604650 - DNA, 25 bp, Homo sapien
gcaattgccaagacaaaagcttcag

SEQ ID NO: 5604651 - DNA, 25 bp, Homo sapien
tgacacaggactctttcggtgccac

SEQ ID NO: 5604652 - DNA, 25 bp, Homo sapien
gctggatcccacgctcgccatggga

SEQ ID NO: 5604653 - DNA, 25 bp, Homo sapien
tgcccactcaacctgggcgggctgt

SEQ ID NO: 5604654 - DNA, 25 bp, Homo sapien
atgggatctgcactcggactgcagc

SEQ ID NO: 5604655 - DNA, 25 bp, Homo sapien
agtgagtctggttatgacacaggac

SEQ ID NO: 5604656 - DNA, 25 bp, Homo sapien
ccactcaacctgggctggctgttgg

SEQ ID NO: 5604657 - DNA, 25 bp, Homo sapien
ggtacctgcccactcaacctgggct

SEQ ID NO: 5604658 - DNA, 25 bp, Homo sapien
tccaccttgggtgccgacgtttgga

SEQ ID NO: 5604659 - DNA, 25 bp, Homo sapien
gaacctggcttccaccttgggtgcc

SEQ ID NO: 5604660 - DNA, 25 bp, Homo sapien
cgggcatgccatgaacctggcttcc

SEQ ID NO: 5604661 - DNA, 25 bp, Homo sapien
ctacaagtgagtctggttatgacac

SEQ ID NO: 5604662 - DNA, 25 bp, Homo sapien
acaactgataggtcatagggctgat

SEQ ID NO: 5604663 - DNA, 25 bp, Homo sapien
accgacttccaagatgaacattaac

SEQ ID NO: 5604664 - DNA, 25 bp, Homo sapien
gagtacaactgataggtcatagggc

SEQ ID NO: 5604665 - DNA, 25 bp, Homo sapien
tttttactgggagtacaactgatag

SEQ ID NO: 5604666 - DNA, 25 bp, Homo sapien
gataggtcatagggctgatctactt

SEQ ID NO: 5604667 - DNA, 25 bp, Homo sapien
gattcattcatgctgctgtgttatc

SEQ ID NO: 5604668 - DNA, 25 bp, Homo sapien
ataccaatacccatttaccgacttc

SEQ ID NO: 5604669 - DNA, 25 bp, Homo sapien
catgctgctgtgttatcagtatttt

SEQ ID NO: 5604670 - DNA, 25 bp, Homo sapien
tttcagtcagttccctataccctaa

SEQ ID NO: 5604671 - DNA, 25 bp, Homo sapien
tatcagcacagattagttctgccta

SEQ ID NO: 5604672 - DNA, 25 bp, Homo sapien
cctataccctaaggcaactactttc

SEQ ID NO: 5604673 - DNA, 25 bp, Homo sapien
gcctgttgccactagtccattatcc

SEQ ID NO: 5604674 - DNA, 25 bp, Homo sapien
ataaaagctggacttgcctgttgcc

SEQ ID NO: 5604675 - DNA, 25 bp, Homo sapien
cctctctatgacagaaagggggatg

SEQ ID NO: 5604676 - DNA, 25 bp, Homo sapien
acagtagaggaagcctgctgcttct

SEQ ID NO: 5604677 - DNA, 25 bp, Homo sapien
gggtaggccgcttgtcatctgcctc

SEQ ID NO: 5604678 - DNA, 25 bp, Homo sapien
ttgaggaaacagtgtaggtacttat

SEQ ID NO: 5604679 - DNA, 25 bp, Homo sapien
atcaaatgaaggaaaccatataagc

SEQ ID NO: 5604680 - DNA, 25 bp, Homo sapien
tgcttctcagtaaggatcccaaaca

SEQ ID NO: 5604681 - DNA, 25 bp, Homo sapien
gggggatgtatgtgccacttcagct

SEQ ID NO: 5604682 - DNA, 25 bp, Homo sapien
ccatataagcaaagggttgaggaaa

SEQ ID NO: 5604683 - DNA, 25 bp, Homo sapien
cattatcccaaaccgtgggtaggcc

SEQ ID NO: 5604684 - DNA, 25 bp, Homo sapien
tacagaccctttggaatgggacgca

SEQ ID NO: 5604685 - DNA, 25 bp, Homo sapien
ggatgaatcatcaccttacagaccc

SEQ ID NO: 5604686 - DNA, 25 bp, Homo sapien
aatctctgagtgggtcaagaaacta

SEQ ID NO: 5604687 - DNA, 25 bp, Homo sapien
tgctcattaaatgtctgctgaagga

SEQ ID NO: 5604688 - DNA, 25 bp, Homo sapien
gaaagtgccctgctgtcgtctgaga

SEQ ID NO: 5604689 - DNA, 25 bp, Homo sapien
tgtcgtctgagaagcacacatcctt

SEQ ID NO: 5604690 - DNA, 25 bp, Homo sapien
ggaatgggacgcactttcacctcca

SEQ ID NO: 5604691 - DNA, 25 bp, Homo sapien
ttcagagcatatgggttctcaccct

SEQ ID NO: 5604692 - DNA, 25 bp, Homo sapien
tgtctggcatacagatgatgctcat

SEQ ID NO: 5604693 - DNA, 25 bp, Homo sapien
tagtcttatttgtagtcccagcacc

SEQ ID NO: 5604694 - DNA, 25 bp, Homo sapien
ccaaatcctaatctctgagtgggtc

SEQ ID NO: 5604695 - DNA, 25 bp, Homo sapien
gttctgagaaagcaagctagaatcc

SEQ ID NO: 5604696 - DNA, 25 bp, Homo sapien
ggcacgagaataggaaactaacttg

SEQ ID NO: 5604697 - DNA, 25 bp, Homo sapien
ttaacgggcagatcttgcagagttt

SEQ ID NO: 5604698 - DNA, 25 bp, Homo sapien
ttcatgctggacagcaaagagacac

SEQ ID NO: 5604699 - DNA, 25 bp, Homo sapien
agacaccagtgtataggaacgggtt

SEQ ID NO: 5604700 - DNA, 25 bp, Homo sapien
atatcttgagctggtacgaacatct

SEQ ID NO: 5604701 - DNA, 25 bp, Homo sapien
tggaatgcaattgcaggaaacagca

SEQ ID NO: 5604702 - DNA, 25 bp, Homo sapien
taagtaagaccctcaggagtcatcc

SEQ ID NO: 5604703 - DNA, 25 bp, Homo sapien
catgcaagtgctatcggctcgagaa

SEQ ID NO: 5604704 - DNA, 25 bp, Homo sapien
agatgtgcagccctgaagcaatgca

SEQ ID NO: 5604705 - DNA, 25 bp, Homo sapien
taaatgggcgaaactaccttgtagc

SEQ ID NO: 5604706 - DNA, 25 bp, Homo sapien
tcagacctttggtgtcagattattc

SEQ ID NO: 5604707 - DNA, 25 bp, Homo sapien
gcccatttggtgtgggtatagggga

SEQ ID NO: 5604708 - DNA, 25 bp, Homo sapien
ttgagatcattgcccatttggtgtg

SEQ ID NO: 5604709 - DNA, 25 bp, Homo sapien
taaatagtagttgagatcattgccc

SEQ ID NO: 5604710 - DNA, 25 bp, Homo sapien
agaattgatacctgggggtagagaa

SEQ ID NO: 5604711 - DNA, 25 bp, Homo sapien
aagttaacttcagacctttggtgtc

SEQ ID NO: 5604712 - DNA, 25 bp, Homo sapien
ttgtgctaatgagtcccaaaatata

SEQ ID NO: 5604713 - DNA, 25 bp, Homo sapien
gagaagaccagctagaagttaactt

SEQ ID NO: 5604714 - DNA, 25 bp, Homo sapien
taccaagtagcagatacatatcagg

SEQ ID NO: 5604715 - DNA, 25 bp, Homo sapien
aatgagtcccaaaatatagaattga

SEQ ID NO: 5604716 - DNA, 25 bp, Homo sapien
tatagaattgatacctgggggtaga

SEQ ID NO: 5604717 - DNA, 25 bp, Homo sapien
gatggcaccgaataaggacgtcaag

SEQ ID NO: 5604718 - DNA, 25 bp, Homo sapien
cttgacgtccttattcggtgccatc

SEQ ID NO: 5604719 - DNA, 25 bp, Homo sapien
accagctgccaacatggagaactca

SEQ ID NO: 5604720 - DNA, 25 bp, Homo sapien
gcagcatggtgcgcatactgatcca

SEQ ID NO: 5604721 - DNA, 25 bp, Homo sapien
caatttaacgtgtacagtctgtggc

SEQ ID NO: 5604722 - DNA, 25 bp, Homo sapien
cctgccaccctgcagattggccaac

SEQ ID NO: 5604723 - DNA, 25 bp, Homo sapien
atcattcacaattggacacctctac

SEQ ID NO: 5604724 - DNA, 25 bp, Homo sapien
ggagtcaatggagctcctgccaccc

SEQ ID NO: 5604725 - DNA, 25 bp, Homo sapien
ttctggcctctgacagctattctac

SEQ ID NO: 5604726 - DNA, 25 bp, Homo sapien
attggccaacagcatgagatctgct

SEQ ID NO: 5604727 - DNA, 25 bp, Homo sapien
ctttccccaaggagtcaatggagct

SEQ ID NO: 5604728 - DNA, 25 bp, Homo sapien
tactgatccattactcggaaggctg

SEQ ID NO: 5604729 - DNA, 25 bp, Homo sapien
gggggtcccagtgccatccccagca

SEQ ID NO: 5604730 - DNA, 25 bp, Homo sapien
gacatgacaccaacgtaggaccctt

SEQ ID NO: 5604731 - DNA, 25 bp, Homo sapien
aagggtcctacgttggtgtcatgtc

SEQ ID NO: 5604732 - DNA, 25 bp, Homo sapien
agtttacaaaagagaaaggttgatg

SEQ ID NO: 5604733 - DNA, 25 bp, Homo sapien
aaagtggagtacagtagactaccaa

SEQ ID NO: 5604734 - DNA, 25 bp, Homo sapien
acagtagactaccaaggccaagaag

SEQ ID NO: 5604735 - DNA, 25 bp, Homo sapien
gacccagcaacagaatcaggctgtg

SEQ ID NO: 5604736 - DNA, 25 bp, Homo sapien
caggctgtgataaaatggcagaaga

SEQ ID NO: 5604737 - DNA, 25 bp, Homo sapien
agaaaggttgatgtaggtgtaatta

SEQ ID NO: 5604738 - DNA, 25 bp, Homo sapien
gaaagaacattgagcaaagaatgcc

SEQ ID NO: 5604739 - DNA, 25 bp, Homo sapien
tgaaaactcccaagagacaaattcc

SEQ ID NO: 5604740 - DNA, 25 bp, Homo sapien
taaggaacagacaatagaagtttac

SEQ ID NO: 5604741 - DNA, 25 bp, Homo sapien
aaagaatgccttttgaagaaaacca

SEQ ID NO: 5604742 - DNA, 25 bp, Homo sapien
aagaagtaggaattcgtgtgatgtg

SEQ ID NO: 5604743 - DNA, 25 bp, Homo sapien
ccactgcagtccatccccagggacc

SEQ ID NO: 5604744 - DNA, 25 bp, Homo sapien
cccccttccccgcaggatatgagaa

SEQ ID NO: 5604745 - DNA, 25 bp, Homo sapien
ccttccccgcaggatatgagaatgc

SEQ ID NO: 5604746 - DNA, 25 bp, Homo sapien
ttctaatgtaaacagtgaccctgaa

SEQ ID NO: 5604747 - DNA, 25 bp, Homo sapien
ccgcaggatatgagaatgcctggtc

SEQ ID NO: 5604748 - DNA, 25 bp, Homo sapien
aggatatgagaatgcctggtccact

SEQ ID NO: 5604749 - DNA, 25 bp, Homo sapien
tcgaagcaaaatttggctggagggg

SEQ ID NO: 5604750 - DNA, 25 bp, Homo sapien
gcctggtccactgcagtccatcccc

SEQ ID NO: 5604751 - DNA, 25 bp, Homo sapien
ggggggattctaatgtaaacagtga

SEQ ID NO: 5604752 - DNA, 25 bp, Homo sapien
agccctggagccagttcccccttct

SEQ ID NO: 5604753 - DNA, 25 bp, Homo sapien
ccagggacctcgaagcaaaatttgg

SEQ ID NO: 5604754 - DNA, 25 bp, Homo sapien
aacctagaattaagttgagagaact

SEQ ID NO: 5604755 - DNA, 25 bp, Homo sapien
tggctctcgcatattgttacaatca

SEQ ID NO: 5604756 - DNA, 25 bp, Homo sapien
tgtggttcatagaccatgatgtaga

SEQ ID NO: 5604757 - DNA, 25 bp, Homo sapien
ttcagccaggagagctcccttggaa

SEQ ID NO: 5604758 - DNA, 25 bp, Homo sapien
gacaacaggatggctgccctactga

SEQ ID NO: 5604759 - DNA, 25 bp, Homo sapien
attcggtctattgccacaccagatt

SEQ ID NO: 5604760 - DNA, 25 bp, Homo sapien
tgagagaactgtatggacccatcat

SEQ ID NO: 5604761 - DNA, 25 bp, Homo sapien
agctcccttggaactgggtgctcct

SEQ ID NO: 5604762 - DNA, 25 bp, Homo sapien
ctgccctactgaactcctgtggttc

SEQ ID NO: 5604763 - DNA, 25 bp, Homo sapien
attctttgcttcagccaggagagct

SEQ ID NO: 5604764 - DNA, 25 bp, Homo sapien
atgtagagaaggtttcatacacctc

SEQ ID NO: 5604765 - DNA, 25 bp, Homo sapien
agtgagaatcatgtcgcttgtgcca

SEQ ID NO: 5604766 - DNA, 25 bp, Homo sapien
gggaacaccacggatactaagtcag

SEQ ID NO: 5604767 - DNA, 25 bp, Homo sapien
ttctggatccattcaagtgagaatc

SEQ ID NO: 5604768 - DNA, 25 bp, Homo sapien
gaagcgcccatccatagcagcctac

SEQ ID NO: 5604769 - DNA, 25 bp, Homo sapien
cagcccccactggagtggcacttta

SEQ ID NO: 5604770 - DNA, 25 bp, Homo sapien
catactagcaactggtaagaagcgc

SEQ ID NO: 5604771 - DNA, 25 bp, Homo sapien
atgttaatcagtactggctccagtg

SEQ ID NO: 5604772 - DNA, 25 bp, Homo sapien
atacaagactcctcccaaaaacctc

SEQ ID NO: 5604773 - DNA, 25 bp, Homo sapien
gcttgtgccaaagaatgacatcaat

SEQ ID NO: 5604774 - DNA, 25 bp, Homo sapien
aagcagactaaggatacaagactcc

SEQ ID NO: 5604775 - DNA, 25 bp, Homo sapien
atactgtcagcccatgggaacacca

SEQ ID NO: 5604776 - DNA, 25 bp, Homo sapien
taatcctttgttcccgctatgctac

SEQ ID NO: 5604777 - DNA, 25 bp, Homo sapien
ccttaggcccaaaagtctgcttccc

SEQ ID NO: 5604778 - DNA, 25 bp, Homo sapien
caacacctgggaatcttctgcatac

SEQ ID NO: 5604779 - DNA, 25 bp, Homo sapien
tagtttagagcatggatatattgat

SEQ ID NO: 5604780 - DNA, 25 bp, Homo sapien
tctgcatactaccagcgccacaggg

SEQ ID NO: 5604781 - DNA, 25 bp, Homo sapien
tgctttgggtgttaaccccagattg

SEQ ID NO: 5604782 - DNA, 25 bp, Homo sapien
atcggaatctggacttaagagccat

SEQ ID NO: 5604783 - DNA, 25 bp, Homo sapien
aactgagcctataggatgcctgatt

SEQ ID NO: 5604784 - DNA, 25 bp, Homo sapien
gttattgagaccagaagtaaaggag

SEQ ID NO: 5604785 - DNA, 25 bp, Homo sapien
actctggtcagtcatgtcatgtgtt

SEQ ID NO: 5604786 - DNA, 25 bp, Homo sapien
ccagcgccacagggctccctgaaat

SEQ ID NO: 5604787 - DNA, 25 bp, Homo sapien
aggtaacaacctgtgtcttcagtca

SEQ ID NO: 5604788 - DNA, 25 bp, Homo sapien
tttatacaaagcaagtatgattttt

SEQ ID NO: 5604789 - DNA, 25 bp, Homo sapien
gccaagatgccaggactttgttggg

SEQ ID NO: 5604790 - DNA, 25 bp, Homo sapien
gacatttgcaagataagtctaactt

SEQ ID NO: 5604791 - DNA, 25 bp, Homo sapien
attaagtatcctgcctatagcaagc

SEQ ID NO: 5604792 - DNA, 25 bp, Homo sapien
tcatcaacatcagggagccaagatg

SEQ ID NO: 5604793 - DNA, 25 bp, Homo sapien
tcaaggatacctacagttttactga

SEQ ID NO: 5604794 - DNA, 25 bp, Homo sapien
tataagcaccaccttgttttaactc

SEQ ID NO: 5604795 - DNA, 25 bp, Homo sapien
cctgcctatagcaagcttcttaatc

SEQ ID NO: 5604796 - DNA, 25 bp, Homo sapien
aagataagtctaacttgaccatgct

SEQ ID NO: 5604797 - DNA, 25 bp, Homo sapien
cttcagtcatcaacatcagggagcc

SEQ ID NO: 5604798 - DNA, 25 bp, Homo sapien
caaacccgaccagaaaacctggcta

SEQ ID NO: 5604799 - DNA, 25 bp, Homo sapien
cccgttaaacatggtaatgggaaca

SEQ ID NO: 5604800 - DNA, 25 bp, Homo sapien
ggctatgggtcaaacagtgaagctg

SEQ ID NO: 5604801 - DNA, 25 bp, Homo sapien
taagatcatagttttgccaccctgc

SEQ ID NO: 5604802 - DNA, 25 bp, Homo sapien
gaagggaagtggagtctcttcaaaa

SEQ ID NO: 5604803 - DNA, 25 bp, Homo sapien
ctaagtgaaattggtggtctgtcta

SEQ ID NO: 5604804 - DNA, 25 bp, Homo sapien
atcagaatatcagaaagaggcagtt

SEQ ID NO: 5604805 - DNA, 25 bp, Homo sapien
aatgtatataatggctttcgtcccc

SEQ ID NO: 5604806 - DNA, 25 bp, Homo sapien
caagtttgggggtacctgataatgt

SEQ ID NO: 5604807 - DNA, 25 bp, Homo sapien
cagtgaacataggcttcaaaggtaa

SEQ ID NO: 5604808 - DNA, 25 bp, Homo sapien
tacgtagaatcatgtcaagtttggg

SEQ ID NO: 5604809 - DNA, 25 bp, Homo sapien
gactgttatattaggaaagactaag

SEQ ID NO: 5604810 - DNA, 25 bp, Homo sapien
cttagtctttcctaatataacagtc

SEQ ID NO: 5604811 - DNA, 25 bp, Homo sapien
gagtcttaaccaggagtgctttggc

SEQ ID NO: 5604812 - DNA, 25 bp, Homo sapien
tgactatacctcaaccagggggaaa

SEQ ID NO: 5604813 - DNA, 25 bp, Homo sapien
ctcaaagctgcctactgtcagaacc

SEQ ID NO: 5604814 - DNA, 25 bp, Homo sapien
tttgttgtgtggctgactatacctc

SEQ ID NO: 5604815 - DNA, 25 bp, Homo sapien
tgtgtaaaaatgagtcttaaccagg

SEQ ID NO: 5604816 - DNA, 25 bp, Homo sapien
gggggtgaacagatgatttttctgg

SEQ ID NO: 5604817 - DNA, 25 bp, Homo sapien
gccctaggagagccatttgtgtaaa

SEQ ID NO: 5604818 - DNA, 25 bp, Homo sapien
tcaagttcgatctttgcatggtact

SEQ ID NO: 5604819 - DNA, 25 bp, Homo sapien
ctttgaatacatacggccctaggag

SEQ ID NO: 5604820 - DNA, 25 bp, Homo sapien
tggagaaggtaattagcatcagttg

SEQ ID NO: 5604821 - DNA, 25 bp, Homo sapien
aattactaaacaaagagaatccttc

SEQ ID NO: 5604822 - DNA, 25 bp, Homo sapien
ggcactggattgatgcaggtcaatt

SEQ ID NO: 5604823 - DNA, 25 bp, Homo sapien
agaccgtaatgtagaatgcagcctt

SEQ ID NO: 5604824 - DNA, 25 bp, Homo sapien
actaagattaaaattgccccgagac

SEQ ID NO: 5604825 - DNA, 25 bp, Homo sapien
aatgcagccttccctagtaggtggt

SEQ ID NO: 5604826 - DNA, 25 bp, Homo sapien
taaagaactcaggctgatgaagccc

SEQ ID NO: 5604827 - DNA, 25 bp, Homo sapien
aggatccctgaagaccgtaatgtag

SEQ ID NO: 5604828 - DNA, 25 bp, Homo sapien
atctgtaagtgtatagtgtagccta

SEQ ID NO: 5604829 - DNA, 25 bp, Homo sapien
tgatgaagccctattgaaacagcaa

SEQ ID NO: 5604830 - DNA, 25 bp, Homo sapien
taaaattgccccgagacacaggtaa

SEQ ID NO: 5604831 - DNA, 25 bp, Homo sapien
aagtgtatagtgtagcctaacctgc

SEQ ID NO: 5604832 - DNA, 25 bp, Homo sapien
cttccctagtaggtggtatgagggg

SEQ ID NO: 5604833 - DNA, 25 bp, Homo sapien
tctttccgaagttcagtggatggcc

SEQ ID NO: 5604834 - DNA, 25 bp, Homo sapien
ttggagccacagttaaaagcgcttt

SEQ ID NO: 5604835 - DNA, 25 bp, Homo sapien
ggtggctctggatgcagcaatccaa

SEQ ID NO: 5604836 - DNA, 25 bp, Homo sapien
gtggcgtcatcctgagctccgtttg

SEQ ID NO: 5604837 - DNA, 25 bp, Homo sapien
caagtccccttttcagggagggtga

SEQ ID NO: 5604838 - DNA, 25 bp, Homo sapien
aactcaagtggctgtacaggctgtt

SEQ ID NO: 5604839 - DNA, 25 bp, Homo sapien
gactcaaacacacatgtggcgtcat

SEQ ID NO: 5604840 - DNA, 25 bp, Homo sapien
accggactaggaaacctctccctgc

SEQ ID NO: 5604841 - DNA, 25 bp, Homo sapien
agtggatggcccccttccagggtta

SEQ ID NO: 5604842 - DNA, 25 bp, Homo sapien
tgagctccgtttgcgtcggccggaa

SEQ ID NO: 5604843 - DNA, 25 bp, Homo sapien
acaggctgttcttggagccacagtt

SEQ ID NO: 5604844 - DNA, 25 bp, Homo sapien
ttgagctgatgtgcagtcatgtgtt

SEQ ID NO: 5604845 - DNA, 25 bp, Homo sapien
tgtgttgcttaatgacagagttctg

SEQ ID NO: 5604846 - DNA, 25 bp, Homo sapien
catgtgagcatcatagaaaatacac

SEQ ID NO: 5604847 - DNA, 25 bp, Homo sapien
tttgggtgattgcatgtgagcatca

SEQ ID NO: 5604848 - DNA, 25 bp, Homo sapien
aaaatggctgttaaaattgtgttta

SEQ ID NO: 5604849 - DNA, 25 bp, Homo sapien
aaatgttacgtgttacatgactgtc

SEQ ID NO: 5604850 - DNA, 25 bp, Homo sapien
ctgagtacaatgttaacacaatggc

SEQ ID NO: 5604851 - DNA, 25 bp, Homo sapien
tatagtggtataatctttcaggctt

SEQ ID NO: 5604852 - DNA, 25 bp, Homo sapien
tacaaagaaggaaaattgagctgat

SEQ ID NO: 5604853 - DNA, 25 bp, Homo sapien
gagaaatgcagtttgggtgattgca

SEQ ID NO: 5604854 - DNA, 25 bp, Homo sapien
aaaaatagtacatatggtataaccc

SEQ ID NO: 5604855 - DNA, 25 bp, Homo sapien
aattcaaagaatcaagcaactccat

SEQ ID NO: 5604856 - DNA, 25 bp, Homo sapien
gccaatgctcatacccagtgtcact

SEQ ID NO: 5604857 - DNA, 25 bp, Homo sapien
acttcggtgcctggaaaatttttca

SEQ ID NO: 5604858 - DNA, 25 bp, Homo sapien
tttgagccatacagaaaaactctaa

SEQ ID NO: 5604859 - DNA, 25 bp, Homo sapien
ggtgatttgggtacctaatttctca

SEQ ID NO: 5604860 - DNA, 25 bp, Homo sapien
ttgaatatgtgttctgccaatgctc

SEQ ID NO: 5604861 - DNA, 25 bp, Homo sapien
tcttgagctgaaatctatatccctg

SEQ ID NO: 5604862 - DNA, 25 bp, Homo sapien
tttagcatgtggacaacttcggtgc

SEQ ID NO: 5604863 - DNA, 25 bp, Homo sapien
ccagtgtcactttcagggactagaa

SEQ ID NO: 5604864 - DNA, 25 bp, Homo sapien
aggatgaaatagaaagtccaagggg

SEQ ID NO: 5604865 - DNA, 25 bp, Homo sapien
taagaatgatcataaaggatgaaat

SEQ ID NO: 5604866 - DNA, 25 bp, Homo sapien
aggaaaacttgaatctggggtgaag

SEQ ID NO: 5604867 - DNA, 25 bp, Homo sapien
atgaaatgcctacaaggaggaaaac

SEQ ID NO: 5604868 - DNA, 25 bp, Homo sapien
tacgagataaagctacagctggctt

SEQ ID NO: 5604869 - DNA, 25 bp, Homo sapien
gagagaaaatccagaaaacacacac

SEQ ID NO: 5604870 - DNA, 25 bp, Homo sapien
aaaaatcccctccttgcgtgtccac

SEQ ID NO: 5604871 - DNA, 25 bp, Homo sapien
agaagatgggtaacttttacgagat

SEQ ID NO: 5604872 - DNA, 25 bp, Homo sapien
aatgctgagacaccaatcagggaag

SEQ ID NO: 5604873 - DNA, 25 bp, Homo sapien
cgtgtccacccacaacccagcaagc

SEQ ID NO: 5604874 - DNA, 25 bp, Homo sapien
ggtgagactgctggccaaataaaaa

SEQ ID NO: 5604875 - DNA, 25 bp, Homo sapien
cagtaataaggtgaaatggccataa

SEQ ID NO: 5604876 - DNA, 25 bp, Homo sapien
gagacaggaaaataaatgctgagac

SEQ ID NO: 5604877 - DNA, 25 bp, Homo sapien
ctgagagcctgagattcctacattc

SEQ ID NO: 5604878 - DNA, 25 bp, Homo sapien
aagaaggattccagaaactactcac

SEQ ID NO: 5604879 - DNA, 25 bp, Homo sapien
gggctctggagacattcaggcagag

SEQ ID NO: 5604880 - DNA, 25 bp, Homo sapien
gactccagggccccaacagactcaa

SEQ ID NO: 5604881 - DNA, 25 bp, Homo sapien
tgggacagataagtgcacataactc

SEQ ID NO: 5604882 - DNA, 25 bp, Homo sapien
aggcagagtttgaggaatgctcatg

SEQ ID NO: 5604883 - DNA, 25 bp, Homo sapien
tactcacagatatacacaccccctc

SEQ ID NO: 5604884 - DNA, 25 bp, Homo sapien
tcaaggatcattgcctgggagcctt

SEQ ID NO: 5604885 - DNA, 25 bp, Homo sapien
ggtgtttccaacacagagaagctgg

SEQ ID NO: 5604886 - DNA, 25 bp, Homo sapien
ataactcattcaggggaaagaagga

SEQ ID NO: 5604887 - DNA, 25 bp, Homo sapien
atacctaagcatttggtgggctggg

SEQ ID NO: 5604888 - DNA, 25 bp, Homo sapien
caagtatgggagttctgtaataatt

SEQ ID NO: 5604889 - DNA, 25 bp, Homo sapien
aataagattgaaatgtattaccttc

SEQ ID NO: 5604890 - DNA, 25 bp, Homo sapien
attcctagctgcaacaataatcaga

SEQ ID NO: 5604891 - DNA, 25 bp, Homo sapien
ctcataagtatacgaagtttaacac

SEQ ID NO: 5604892 - DNA, 25 bp, Homo sapien
cgaagtttaacacaagtatgggagt

SEQ ID NO: 5604893 - DNA, 25 bp, Homo sapien
agcctggcatgtttactcctgtgtc

SEQ ID NO: 5604894 - DNA, 25 bp, Homo sapien
gaaattgtaacactgaggatgaatg

SEQ ID NO: 5604895 - DNA, 25 bp, Homo sapien
tttagaaattgtaacactgaggatg

SEQ ID NO: 5604896 - DNA, 25 bp, Homo sapien
ctcccttctcatagcctggcatgtt

SEQ ID NO: 5604897 - DNA, 25 bp, Homo sapien
agaatggatactgggaagcattttc

SEQ ID NO: 5604898 - DNA, 25 bp, Homo sapien
caaaagaacagaggatcaaataaga

SEQ ID NO: 5604899 - DNA, 25 bp, Homo sapien
atagccagcgtttctgtaccaagcc

SEQ ID NO: 5604900 - DNA, 25 bp, Homo sapien
acctggctgttctgcgaaacatgtt

SEQ ID NO: 5604901 - DNA, 25 bp, Homo sapien
ggtgacagttagatagatcaggaac

SEQ ID NO: 5604902 - DNA, 25 bp, Homo sapien
aaacagaaacacgattgtgatggtt

SEQ ID NO: 5604903 - DNA, 25 bp, Homo sapien
tgcaaggtcctgacagaaaaatcac

SEQ ID NO: 5604904 - DNA, 25 bp, Homo sapien
aactggatgccaaggtgccctaatt

SEQ ID NO: 5604905 - DNA, 25 bp, Homo sapien
atcagcaggggcacacctgaatttc

SEQ ID NO: 5604906 - DNA, 25 bp, Homo sapien
tcactggtaaggccaaaacagaaac

SEQ ID NO: 5604907 - DNA, 25 bp, Homo sapien
aatgcttgtaattaggtgacagtta

SEQ ID NO: 5604908 - DNA, 25 bp, Homo sapien
tctagcagacagaatgtgccagagt

SEQ ID NO: 5604909 - DNA, 25 bp, Homo sapien
aacctgacctaataagatagacccc

SEQ ID NO: 5604910 - DNA, 25 bp, Homo sapien
tccacatcccgggacggcccagcgt

SEQ ID NO: 5604911 - DNA, 25 bp, Homo sapien
acgctgggccgtcccgggatgtgga

SEQ ID NO: 5604912 - DNA, 25 bp, Homo sapien
actgtgatggagaatgctccttccc

SEQ ID NO: 5604913 - DNA, 25 bp, Homo sapien
cacaaatagtgtgagaagtgcatgc

SEQ ID NO: 5604914 - DNA, 25 bp, Homo sapien
caaccacgcgattgtgcagaccttg

SEQ ID NO: 5604915 - DNA, 25 bp, Homo sapien
gcctgtgcaatgtgaaaaatacctt

SEQ ID NO: 5604916 - DNA, 25 bp, Homo sapien
caccttatgaaccccgagtatgtcc

SEQ ID NO: 5604917 - DNA, 25 bp, Homo sapien
acccaagggctatgctgccaattac

SEQ ID NO: 5604918 - DNA, 25 bp, Homo sapien
tttgcatgaaattaaggactggatc

SEQ ID NO: 5604919 - DNA, 25 bp, Homo sapien
ggactggatcattgcacccaagggc

SEQ ID NO: 5604920 - DNA, 25 bp, Homo sapien
tattgctggcaacctacgtgcttcc

SEQ ID NO: 5604921 - DNA, 25 bp, Homo sapien
ggtcagatggaccaggttcacttcc

SEQ ID NO: 5604922 - DNA, 25 bp, Homo sapien
acacatgaatgcaaccaaccacgcg

SEQ ID NO: 5604923 - DNA, 25 bp, Homo sapien
taccacagagtagacacttagtgtc

SEQ ID NO: 5604924 - DNA, 25 bp, Homo sapien
tgtccctattaaagaactactgatc

SEQ ID NO: 5604925 - DNA, 25 bp, Homo sapien
tgtgcttaccacagagtagacactt

SEQ ID NO: 5604926 - DNA, 25 bp, Homo sapien
tctggaacctaagactgtgcttacc

SEQ ID NO: 5604927 - DNA, 25 bp, Homo sapien
cttcattaggggttccatctccggg

SEQ ID NO: 5604928 - DNA, 25 bp, Homo sapien
taggggttccatctccgggctttca

SEQ ID NO: 5604929 - DNA, 25 bp, Homo sapien
tctagcgtgatctggaacctaagac

SEQ ID NO: 5604930 - DNA, 25 bp, Homo sapien
aaagacagggagtgtttctcctact

SEQ ID NO: 5604931 - DNA, 25 bp, Homo sapien
ctgatcacaatgtactgtagttttc

SEQ ID NO: 5604932 - DNA, 25 bp, Homo sapien
tgaaggaatgaatctttcaggcctc

SEQ ID NO: 5604933 - DNA, 25 bp, Homo sapien
agtgcctagaatactgtccttcatg

SEQ ID NO: 5604934 - DNA, 25 bp, Homo sapien
gatgactgcagagctagtaactggt

SEQ ID NO: 5604935 - DNA, 25 bp, Homo sapien
gtttaataggcttttgagggctagc

SEQ ID NO: 5604936 - DNA, 25 bp, Homo sapien
tgaaggcaaagagaacataatttct

SEQ ID NO: 5604937 - DNA, 25 bp, Homo sapien
tgcctcagagggcctaacctcgttt

SEQ ID NO: 5604938 - DNA, 25 bp, Homo sapien
gagcctcagagacattgcttgactc

SEQ ID NO: 5604939 - DNA, 25 bp, Homo sapien
cagagctctgaatttgaccattgcc

SEQ ID NO: 5604940 - DNA, 25 bp, Homo sapien
gggctagcctgagaatgtaggcact

SEQ ID NO: 5604941 - DNA, 25 bp, Homo sapien
gtttgagttcaaagccctagctctt

SEQ ID NO: 5604942 - DNA, 25 bp, Homo sapien
ctttgtatagcacgagagcctcaga

SEQ ID NO: 5604943 - DNA, 25 bp, Homo sapien
ttttacatcatcagaaccagagctc

SEQ ID NO: 5604944 - DNA, 25 bp, Homo sapien
gcaggtaactatgtgaaggcaaaga

SEQ ID NO: 5604945 - DNA, 25 bp, Homo sapien
caacttaaggtaaccaaggagagaa

SEQ ID NO: 5604946 - DNA, 25 bp, Homo sapien
ggtaaccaaggagagaaattgtata

SEQ ID NO: 5604947 - DNA, 25 bp, Homo sapien
gtatgatagattacagaaaactgct

SEQ ID NO: 5604948 - DNA, 25 bp, Homo sapien
ttcttacgcagctatgtcatatgat

SEQ ID NO: 5604949 - DNA, 25 bp, Homo sapien
gatttggctatagacaaagttcctg

SEQ ID NO: 5604950 - DNA, 25 bp, Homo sapien
catacactataaacgcaaaaccttc

SEQ ID NO: 5604951 - DNA, 25 bp, Homo sapien
attgcactgaattaaagacactatc

SEQ ID NO: 5604952 - DNA, 25 bp, Homo sapien
tacacagatttcatgatttggctat

SEQ ID NO: 5604953 - DNA, 25 bp, Homo sapien
tatgattggtcattattgcactgaa

SEQ ID NO: 5604954 - DNA, 25 bp, Homo sapien
tttgggtaaaaatgatacacagatt

SEQ ID NO: 5604955 - DNA, 25 bp, Homo sapien
aaactgctatggataactagatacc

SEQ ID NO: 5604956 - DNA, 25 bp, Homo sapien
gtggttcagtcacaagggcctgact

SEQ ID NO: 5604957 - DNA, 25 bp, Homo sapien
gtgtgctctgcctctgggatacccg

SEQ ID NO: 5604958 - DNA, 25 bp, Homo sapien
gacaatgttgccgtctgagtggccc

SEQ ID NO: 5604959 - DNA, 25 bp, Homo sapien
gcaacctccaaagcgaggaagtagc

SEQ ID NO: 5604960 - DNA, 25 bp, Homo sapien
gccctgttctagcaggtggtccacc

SEQ ID NO: 5604961 - DNA, 25 bp, Homo sapien
tctccaagctggccagtgaacagca

SEQ ID NO: 5604962 - DNA, 25 bp, Homo sapien
tgtgctccgggactgcctccctcta

SEQ ID NO: 5604963 - DNA, 25 bp, Homo sapien
ggtccaccttgagaagaaagcaacc

SEQ ID NO: 5604964 - DNA, 25 bp, Homo sapien
tccggtgtgacttacagttcaagcc

SEQ ID NO: 5604965 - DNA, 25 bp, Homo sapien
agtccagcctcatggtggttcagtc

SEQ ID NO: 5604966 - DNA, 25 bp, Homo sapien
acttagaatcacatgggcagtcttc

SEQ ID NO: 5604967 - DNA, 25 bp, Homo sapien
gggccctgagcttctccgactctcc

SEQ ID NO: 5604968 - DNA, 25 bp, Homo sapien
ctgaggaccatgatagctgtgtgga

SEQ ID NO: 5604969 - DNA, 25 bp, Homo sapien
cactgacccgttaccgggagcgtgg

SEQ ID NO: 5604970 - DNA, 25 bp, Homo sapien
gagacgatagtaccgagagctctca

SEQ ID NO: 5604971 - DNA, 25 bp, Homo sapien
tgcagaaaattgagacgatagtacc

SEQ ID NO: 5604972 - DNA, 25 bp, Homo sapien
agagtgcccctctactgggactgtc

SEQ ID NO: 5604973 - DNA, 25 bp, Homo sapien
atgaatcattaggacgatccccggg

SEQ ID NO: 5604974 - DNA, 25 bp, Homo sapien
tctccttggcgcccttgtgacggat

SEQ ID NO: 5604975 - DNA, 25 bp, Homo sapien
cccactggccgtttcgtcctgtcgc

SEQ ID NO: 5604976 - DNA, 25 bp, Homo sapien
tcactgccccagtgctccgcagctc

SEQ ID NO: 5604977 - DNA, 25 bp, Homo sapien
gagagctctcacacgcccacaccaa

SEQ ID NO: 5604978 - DNA, 25 bp, Homo sapien
ctcttcctccctctacggctggccg

SEQ ID NO: 5604979 - DNA, 25 bp, Homo sapien
aaggtcagagagccgtttacgctat

SEQ ID NO: 5604980 - DNA, 25 bp, Homo sapien
ggcagagattcgccatgcaggatga

SEQ ID NO: 5604981 - DNA, 25 bp, Homo sapien
ttctgcgttcagagagacggcagag

SEQ ID NO: 5604982 - DNA, 25 bp, Homo sapien
ttagcaacagcgtgtttgtcccaac

SEQ ID NO: 5604983 - DNA, 25 bp, Homo sapien
gcggcctccgctccacaccgataac

SEQ ID NO: 5604984 - DNA, 25 bp, Homo sapien
ccgtttacgctatgctcgggctccc

SEQ ID NO: 5604985 - DNA, 25 bp, Homo sapien
ttgtcccaacatactaatcaccccc

SEQ ID NO: 5604986 - DNA, 25 bp, Homo sapien
gaggatgcactgtgaggtcagtgtt

SEQ ID NO: 5604987 - DNA, 25 bp, Homo sapien
caccgataacacactgacagagaga

SEQ ID NO: 5604988 - DNA, 25 bp, Homo sapien
ggagacggccagtctcagacccttc

SEQ ID NO: 5604989 - DNA, 25 bp, Homo sapien
ataccaactgacagagtaaatggaa

SEQ ID NO: 5604990 - DNA, 25 bp, Homo sapien
caggtcaactgggtcaattgtaagt

SEQ ID NO: 5604991 - DNA, 25 bp, Homo sapien
ttttaggtcaattctcaggtcaact

SEQ ID NO: 5604992 - DNA, 25 bp, Homo sapien
ccaactgacagagtaaatggaaggt

SEQ ID NO: 5604993 - DNA, 25 bp, Homo sapien
caaaggctatgtgatttttaggtca

SEQ ID NO: 5604994 - DNA, 25 bp, Homo sapien
gcaatagcactgattattagttatc

SEQ ID NO: 5604995 - DNA, 25 bp, Homo sapien
attagttatcaaaggctatgtgatt

SEQ ID NO: 5604996 - DNA, 25 bp, Homo sapien
ataaataccaactgacagagtaaat

SEQ ID NO: 5604997 - DNA, 25 bp, Homo sapien
tctcaggtcaactgggtcaattgta

SEQ ID NO: 5604998 - DNA, 25 bp, Homo sapien
aatggaaggtagaatgaaaaaatta

SEQ ID NO: 5604999 - DNA, 25 bp, Homo sapien
actgggtcaattgtaagttcaatat

SEQ ID NO: 5605000 - DNA, 25 bp, Homo sapien
caggaaacaacacccagtacccagg

SEQ ID NO: 5605001 - DNA, 25 bp, Homo sapien
cacaggtgacttgaccttgggatat

SEQ ID NO: 5605002 - DNA, 25 bp, Homo sapien
ggccccacccttcagccagcagcca

SEQ ID NO: 5605003 - DNA, 25 bp, Homo sapien
ccagctgaggtgtaccctctccctc

SEQ ID NO: 5605004 - DNA, 25 bp, Homo sapien
ggagggcatgtctgaatacaaacaa

SEQ ID NO: 5605005 - DNA, 25 bp, Homo sapien
ggagagctgtggaacttagctgtga

SEQ ID NO: 5605006 - DNA, 25 bp, Homo sapien
actgaacgcttgccacagccaacgc

SEQ ID NO: 5605007 - DNA, 25 bp, Homo sapien
ggaacttagctgtgattgggccatt

SEQ ID NO: 5605008 - DNA, 25 bp, Homo sapien
gagggccaaaactgctaacaccaga

SEQ ID NO: 5605009 - DNA, 25 bp, Homo sapien
aaggcagtattgagaactacaagtt

SEQ ID NO: 5605010 - DNA, 25 bp, Homo sapien
attaaagaaataagcactcccggag

SEQ ID NO: 5605011 - DNA, 25 bp, Homo sapien
gctggtggcgccttctgcctaagta

SEQ ID NO: 5605012 - DNA, 25 bp, Homo sapien
ttgaggtgtcacttcaccagctgga

SEQ ID NO: 5605013 - DNA, 25 bp, Homo sapien
ttgttaccagcccagatcccacacc

SEQ ID NO: 5605014 - DNA, 25 bp, Homo sapien
tgtgtcacaggatccttgaggtgtc

SEQ ID NO: 5605015 - DNA, 25 bp, Homo sapien
agtattgctcatgcccactgggctt

SEQ ID NO: 5605016 - DNA, 25 bp, Homo sapien
ttctcgaaatctaactctggcagga

SEQ ID NO: 5605017 - DNA, 25 bp, Homo sapien
gttcccagtgagattcgactgctgt

SEQ ID NO: 5605018 - DNA, 25 bp, Homo sapien
ctctggcaggagtcactcactgaag

SEQ ID NO: 5605019 - DNA, 25 bp, Homo sapien
ctttgctaggaaattaacccctctc

SEQ ID NO: 5605020 - DNA, 25 bp, Homo sapien
tttaggtggctcccaatattggtcc

SEQ ID NO: 5605021 - DNA, 25 bp, Homo sapien
agcaggctgtgctcaggtcttgtta

SEQ ID NO: 5605022 - DNA, 25 bp, Homo sapien
tgacaacagggaaatactcatctca

SEQ ID NO: 5605023 - DNA, 25 bp, Homo sapien
tcctctcaaaccatactccataaat

SEQ ID NO: 5605024 - DNA, 25 bp, Homo sapien
ctgtcaccaaggatacactcctcac

SEQ ID NO: 5605025 - DNA, 25 bp, Homo sapien
gtcaccaaggatacactcctcaccc

SEQ ID NO: 5605026 - DNA, 25 bp, Homo sapien
agagatataaaaagtcccaatttgc

SEQ ID NO: 5605027 - DNA, 25 bp, Homo sapien
aaagtcccaatttgccccatgtttc

SEQ ID NO: 5605028 - DNA, 25 bp, Homo sapien
caccctaaggggttatgacaacagg

SEQ ID NO: 5605029 - DNA, 25 bp, Homo sapien
tgcccagccaacaagtctttattta

SEQ ID NO: 5605030 - DNA, 25 bp, Homo sapien
ttaaatgagagatataaaaagtccc

SEQ ID NO: 5605031 - DNA, 25 bp, Homo sapien
tcctcaccctaaggggttatgacaa

SEQ ID NO: 5605032 - DNA, 25 bp, Homo sapien
gggttatgacaacagggaaatactc

SEQ ID NO: 5605033 - DNA, 25 bp, Homo sapien
tcatttttggttgaaagaggggcca

SEQ ID NO: 5605034 - DNA, 25 bp, Homo sapien
gaagatccaagactcaaccaggcct

SEQ ID NO: 5605035 - DNA, 25 bp, Homo sapien
gctcaaatgtgtaaagccaccctcg

SEQ ID NO: 5605036 - DNA, 25 bp, Homo sapien
taagggaacatgccaataccgtgca

SEQ ID NO: 5605037 - DNA, 25 bp, Homo sapien
atctggaaaccaatcactgccctgc

SEQ ID NO: 5605038 - DNA, 25 bp, Homo sapien
actgccctgctgacagctcaggatt

SEQ ID NO: 5605039 - DNA, 25 bp, Homo sapien
catctcctcacggtggcacagtaat

SEQ ID NO: 5605040 - DNA, 25 bp, Homo sapien
aagaggggccacttaaactttgcca

SEQ ID NO: 5605041 - DNA, 25 bp, Homo sapien
gtaatagatttagagacctgacagc

SEQ ID NO: 5605042 - DNA, 25 bp, Homo sapien
gtgcagaactcacgtgacagccatc

SEQ ID NO: 5605043 - DNA, 25 bp, Homo sapien
atctcatggtcacagcatcagtcac

SEQ ID NO: 5605044 - DNA, 25 bp, Homo sapien
ctttggctcaacactgtaagaatca

SEQ ID NO: 5605045 - DNA, 25 bp, Homo sapien
attcaccactcaggcaaagagacag

SEQ ID NO: 5605046 - DNA, 25 bp, Homo sapien
gcaaagagacagaatagtagcaaga

SEQ ID NO: 5605047 - DNA, 25 bp, Homo sapien
tagaaatcccattagtgtccccttc

SEQ ID NO: 5605048 - DNA, 25 bp, Homo sapien
aagttttactgcataagcatccatc

SEQ ID NO: 5605049 - DNA, 25 bp, Homo sapien
ccaagaaaggtaactgccgtccata

SEQ ID NO: 5605050 - DNA, 25 bp, Homo sapien
atagtagcaagaccctagaaatccc

SEQ ID NO: 5605051 - DNA, 25 bp, Homo sapien
tgtgtagccataaatcagtcatccg

SEQ ID NO: 5605052 - DNA, 25 bp, Homo sapien
tgccgtccatatatggtaacacttc

SEQ ID NO: 5605053 - DNA, 25 bp, Homo sapien
tcagtcatccgtatgattgcatcat

SEQ ID NO: 5605054 - DNA, 25 bp, Homo sapien
gaaaacaaatgtacagataatgaat

SEQ ID NO: 5605055 - DNA, 25 bp, Homo sapien
atccttgatgacttaagaaccaatc

SEQ ID NO: 5605056 - DNA, 25 bp, Homo sapien
tgggtttcatagagtgagatgagct

SEQ ID NO: 5605057 - DNA, 25 bp, Homo sapien
aagtggatcatgtaagtctggagtg

SEQ ID NO: 5605058 - DNA, 25 bp, Homo sapien
tgggctaaaaccagtttgaccgatg

SEQ ID NO: 5605059 - DNA, 25 bp, Homo sapien
gagatgagctgacagtaaaagactg

SEQ ID NO: 5605060 - DNA, 25 bp, Homo sapien
gaaagagccctaaggctatcctttg

SEQ ID NO: 5605061 - DNA, 25 bp, Homo sapien
tttgagcccctggatccagccagac

SEQ ID NO: 5605062 - DNA, 25 bp, Homo sapien
cctgcctcacccatcaggaggaaga

SEQ ID NO: 5605063 - DNA, 25 bp, Homo sapien
ccccggcatacccaagtggatcatg

SEQ ID NO: 5605064 - DNA, 25 bp, Homo sapien
ctggagtgattggcatcctgccctc

SEQ ID NO: 5605065 - DNA, 25 bp, Homo sapien
ttacaattgaagaactgggtttcat

SEQ ID NO: 5605066 - DNA, 25 bp, Homo sapien
agtagcaaaacatcataagagaaac

SEQ ID NO: 5605067 - DNA, 25 bp, Homo sapien
agctgacttgaccgcgtaaaaatgt

SEQ ID NO: 5605068 - DNA, 25 bp, Homo sapien
aagggaaatcctggaagcccataac

SEQ ID NO: 5605069 - DNA, 25 bp, Homo sapien
cccatccctgagagtggaaatggag

SEQ ID NO: 5605070 - DNA, 25 bp, Homo sapien
ggagcccagtgagacctttggtata

SEQ ID NO: 5605071 - DNA, 25 bp, Homo sapien
tgtatagtgtacttgggatggagga

SEQ ID NO: 5605072 - DNA, 25 bp, Homo sapien
cccataacagtggggctccattgcc

SEQ ID NO: 5605073 - DNA, 25 bp, Homo sapien
ggtacagaagagtgtgcatagaata

SEQ ID NO: 5605074 - DNA, 25 bp, Homo sapien
gaaggcaagaagactagctgacttg

SEQ ID NO: 5605075 - DNA, 25 bp, Homo sapien
ttaacactggctacctctggggaac

SEQ ID NO: 5605076 - DNA, 25 bp, Homo sapien
tttacaaagttgagggcagcattaa

SEQ ID NO: 5605077 - DNA, 25 bp, Homo sapien
gcactgcacctggctgaaaatgttt

SEQ ID NO: 5605078 - DNA, 25 bp, Homo sapien
gcatgagcactgcacctggctgaaa

SEQ ID NO: 5605079 - DNA, 25 bp, Homo sapien
gttactagtgcttttgggtgtcaaa

SEQ ID NO: 5605080 - DNA, 25 bp, Homo sapien
cctggctgaaaatgttttttaatgc

SEQ ID NO: 5605081 - DNA, 25 bp, Homo sapien
gctcaagcaagccttatgctgtggc

SEQ ID NO: 5605082 - DNA, 25 bp, Homo sapien
agcaagccttatgctgtggcctccc

SEQ ID NO: 5605083 - DNA, 25 bp, Homo sapien
aacaatccattgtcaaatctgaggg

SEQ ID NO: 5605084 - DNA, 25 bp, Homo sapien
ttgggtgtcaaatctaacaatccat

SEQ ID NO: 5605085 - DNA, 25 bp, Homo sapien
tttgttactagtgcttttgggtgtc

SEQ ID NO: 5605086 - DNA, 25 bp, Homo sapien
atgctgtggcctcccaaagttctgg

SEQ ID NO: 5605087 - DNA, 25 bp, Homo sapien
caagcaagccttatgctgtggcctc

SEQ ID NO: 5605088 - DNA, 25 bp, Homo sapien
tgaacattgttctaggaggcacaga

SEQ ID NO: 5605089 - DNA, 25 bp, Homo sapien
ttactgaccatcctggagcaaacat

SEQ ID NO: 5605090 - DNA, 25 bp, Homo sapien
aaagacttgcaaatgtgaagaagaa

SEQ ID NO: 5605091 - DNA, 25 bp, Homo sapien
cctgatggcccagtattcctgaatc

SEQ ID NO: 5605092 - DNA, 25 bp, Homo sapien
aggcataatagagagtaaaaagact

SEQ ID NO: 5605093 - DNA, 25 bp, Homo sapien
ttctatgaggtcttgtactgattcc

SEQ ID NO: 5605094 - DNA, 25 bp, Homo sapien
atttgcttggcactagcacacattc

SEQ ID NO: 5605095 - DNA, 25 bp, Homo sapien
aggcacagaaccatgagtcatccta

SEQ ID NO: 5605096 - DNA, 25 bp, Homo sapien
atttggtggcaggttagtcatattg

SEQ ID NO: 5605097 - DNA, 25 bp, Homo sapien
tggatggctcttttagagaggaatt

SEQ ID NO: 5605098 - DNA, 25 bp, Homo sapien
atgagacatgtagaaaatcggtaaa

SEQ ID NO: 5605099 - DNA, 25 bp, Homo sapien
ttattactactactaaaaatggtag

SEQ ID NO: 5605100 - DNA, 25 bp, Homo sapien
ctaccatttttagtagtagtaataa

SEQ ID NO: 5605101 - DNA, 25 bp, Homo sapien
attattactactactaaaaatggta

SEQ ID NO: 5605102 - DNA, 25 bp, Homo sapien
taccatttttagtagtagtaataat

SEQ ID NO: 5605103 - DNA, 25 bp, Homo sapien
aggggtttacttgatggcgccactt

SEQ ID NO: 5605104 - DNA, 25 bp, Homo sapien
agggagccatttcctgcagtcaggc

SEQ ID NO: 5605105 - DNA, 25 bp, Homo sapien
ctgatcagggtgtacaaaatggcag

SEQ ID NO: 5605106 - DNA, 25 bp, Homo sapien
tggctagctgcctggcaggatgtaa

SEQ ID NO: 5605107 - DNA, 25 bp, Homo sapien
gtacagactggggcaattataggtc

SEQ ID NO: 5605108 - DNA, 25 bp, Homo sapien
ctggggcaattataggtctggacag

SEQ ID NO: 5605109 - DNA, 25 bp, Homo sapien
gggtttggctcatttgcaaggctgc

SEQ ID NO: 5605110 - DNA, 25 bp, Homo sapien
tgatggcgccacttgggctaacaga

SEQ ID NO: 5605111 - DNA, 25 bp, Homo sapien
aaggctgctgcacgtttcaaatccc

SEQ ID NO: 5605112 - DNA, 25 bp, Homo sapien
ggatgtaataagggagccatttcct

SEQ ID NO: 5605113 - DNA, 25 bp, Homo sapien
gcccccgtcctgcgtacagactggg

SEQ ID NO: 5605114 - DNA, 25 bp, Homo sapien
ggccttgttatctggaacttaaata

SEQ ID NO: 5605115 - DNA, 25 bp, Homo sapien
atatcctctctctcatagacacacc

SEQ ID NO: 5605116 - DNA, 25 bp, Homo sapien
tattctagtgagagtctggattgcg

SEQ ID NO: 5605117 - DNA, 25 bp, Homo sapien
aaggacttaagttcagaggacatca

SEQ ID NO: 5605118 - DNA, 25 bp, Homo sapien
aataaaggacttaagttcagaggac

SEQ ID NO: 5605119 - DNA, 25 bp, Homo sapien
tagatattctagtgagagtctggat

SEQ ID NO: 5605120 - DNA, 25 bp, Homo sapien
atggaagccaaatgtcatctatttc

SEQ ID NO: 5605121 - DNA, 25 bp, Homo sapien
agaggacatcatttagatattctag

SEQ ID NO: 5605122 - DNA, 25 bp, Homo sapien
gaatgagatggaagccaaatgtcat

SEQ ID NO: 5605123 - DNA, 25 bp, Homo sapien
tggggaggattctggcttccatcag

SEQ ID NO: 5605124 - DNA, 25 bp, Homo sapien
cttccatcagtaacaagcaatatcc

SEQ ID NO: 5605125 - DNA, 25 bp, Homo sapien
tgagagtgtgctcagtgcccacttc

SEQ ID NO: 5605126 - DNA, 25 bp, Homo sapien
aggggcagggaatttccttcagatt

SEQ ID NO: 5605127 - DNA, 25 bp, Homo sapien
tacccataccataggagagagatga

SEQ ID NO: 5605128 - DNA, 25 bp, Homo sapien
tacagcatggccacaatattagggt

SEQ ID NO: 5605129 - DNA, 25 bp, Homo sapien
ttcaacacagcaacgatgtctctcc

SEQ ID NO: 5605130 - DNA, 25 bp, Homo sapien
taggacccttatctcgggagcaatc

SEQ ID NO: 5605131 - DNA, 25 bp, Homo sapien
tgctcctcaagcaactgggactgac

SEQ ID NO: 5605132 - DNA, 25 bp, Homo sapien
tctgtagtgttagaaagtgagagtg

SEQ ID NO: 5605133 - DNA, 25 bp, Homo sapien
gggagcaatcagctagcatggttgt

SEQ ID NO: 5605134 - DNA, 25 bp, Homo sapien
taggagagagatgattgactttcac

SEQ ID NO: 5605135 - DNA, 25 bp, Homo sapien
atctacggccacagaagctactcaa

SEQ ID NO: 5605136 - DNA, 25 bp, Homo sapien
ctaacctaatgtgagaactggcagc

SEQ ID NO: 5605137 - DNA, 25 bp, Homo sapien
ggtcagagcccgatgcaatctttca

SEQ ID NO: 5605138 - DNA, 25 bp, Homo sapien
aaattctgaatgatgtcttctaacc

SEQ ID NO: 5605139 - DNA, 25 bp, Homo sapien
acacacaaattgtactgtagcagaa

SEQ ID NO: 5605140 - DNA, 25 bp, Homo sapien
actaatagaggttacacaataggac

SEQ ID NO: 5605141 - DNA, 25 bp, Homo sapien
tatcaaatgcttgtaaacatgtgca

SEQ ID NO: 5605142 - DNA, 25 bp, Homo sapien
cattcatttaaacactccaaggatt

SEQ ID NO: 5605143 - DNA, 25 bp, Homo sapien
tttcaactaaagctgtcacaacaac

SEQ ID NO: 5605144 - DNA, 25 bp, Homo sapien
gtagcagaaagtagtaattccacct

SEQ ID NO: 5605145 - DNA, 25 bp, Homo sapien
tagaggttacacaataggactattt

SEQ ID NO: 5605146 - DNA, 25 bp, Homo sapien
tatgggacacggacactttgatcca

SEQ ID NO: 5605147 - DNA, 25 bp, Homo sapien
taagaaaggacttccaacactgacc

SEQ ID NO: 5605148 - DNA, 25 bp, Homo sapien
agattaacacacttgcctaccactg

SEQ ID NO: 5605149 - DNA, 25 bp, Homo sapien
catcactcagttcttctacggcctt

SEQ ID NO: 5605150 - DNA, 25 bp, Homo sapien
ggtcagttctagatgatggcaattt

SEQ ID NO: 5605151 - DNA, 25 bp, Homo sapien
tgcccagcaccatcctcccgactca

SEQ ID NO: 5605152 - DNA, 25 bp, Homo sapien
tcccgactcattagagccatctgtg

SEQ ID NO: 5605153 - DNA, 25 bp, Homo sapien
actctttgccataagaaaggacttc

SEQ ID NO: 5605154 - DNA, 25 bp, Homo sapien
tgttattcaacaggagaatctcttt

SEQ ID NO: 5605155 - DNA, 25 bp, Homo sapien
cagtttcccaagcacatgaggtcag

SEQ ID NO: 5605156 - DNA, 25 bp, Homo sapien
ggacttccaacactgacctctgccc

SEQ ID NO: 5605157 - DNA, 25 bp, Homo sapien
gacctctgcccagcaccatcctccc

SEQ ID NO: 5605158 - DNA, 25 bp, Homo sapien
taagctcccagagagtgaaaatcac

SEQ ID NO: 5605159 - DNA, 25 bp, Homo sapien
ctctacaggaagtacccagagagct

SEQ ID NO: 5605160 - DNA, 25 bp, Homo sapien
atttccacaacagtctgatgaggca

SEQ ID NO: 5605161 - DNA, 25 bp, Homo sapien
gcctttgtgggcgaggcattcaaaa

SEQ ID NO: 5605162 - DNA, 25 bp, Homo sapien
caaattcagcacgcaaaggtcacac

SEQ ID NO: 5605163 - DNA, 25 bp, Homo sapien
actgtggtggccactcagtgctagt

SEQ ID NO: 5605164 - DNA, 25 bp, Homo sapien
caccaaccctgtgacagtggccctt

SEQ ID NO: 5605165 - DNA, 25 bp, Homo sapien
gtttggatgtgatgcccactgtggt

SEQ ID NO: 5605166 - DNA, 25 bp, Homo sapien
ctgctgggggtgttattaccctgtc

SEQ ID NO: 5605167 - DNA, 25 bp, Homo sapien
tggagacccagaaagctcgttatct

SEQ ID NO: 5605168 - DNA, 25 bp, Homo sapien
tctgccaggcttaaagtatcctccc

SEQ ID NO: 5605169 - DNA, 25 bp, Homo sapien
agataaggtaaggtaaagtagatat

SEQ ID NO: 5605170 - DNA, 25 bp, Homo sapien
gtatgtgtttaggtaagataaggta

SEQ ID NO: 5605171 - DNA, 25 bp, Homo sapien
ttgaagagagcacctcatgtctttc

SEQ ID NO: 5605172 - DNA, 25 bp, Homo sapien
taaccagaaccggagttgaatttga

SEQ ID NO: 5605173 - DNA, 25 bp, Homo sapien
ccaccacatggtgtagagttgcaga

SEQ ID NO: 5605174 - DNA, 25 bp, Homo sapien
cttctagtctagcgtgtagcatcta

SEQ ID NO: 5605175 - DNA, 25 bp, Homo sapien
gaggattctgggtaataatgtagac

SEQ ID NO: 5605176 - DNA, 25 bp, Homo sapien
tacaagctttcaagtgatgccaggg

SEQ ID NO: 5605177 - DNA, 25 bp, Homo sapien
ttgtaagcattagagtgatggtttc

SEQ ID NO: 5605178 - DNA, 25 bp, Homo sapien
gtgatgccagggaactgctctttga

SEQ ID NO: 5605179 - DNA, 25 bp, Homo sapien
ccactgagatgggattaaagcatct

SEQ ID NO: 5605180 - DNA, 25 bp, Homo sapien
aaggttattctgggttgctaagatc

SEQ ID NO: 5605181 - DNA, 25 bp, Homo sapien
ttcttggaagagccagcaatacatc

SEQ ID NO: 5605182 - DNA, 25 bp, Homo sapien
atgatcatatcgcctagcacagtgc

SEQ ID NO: 5605183 - DNA, 25 bp, Homo sapien
gtacaccctggaacagtttcttctc

SEQ ID NO: 5605184 - DNA, 25 bp, Homo sapien
attcttgcacactggcacaatggtc

SEQ ID NO: 5605185 - DNA, 25 bp, Homo sapien
taaatggcacaaaggttattctggg

SEQ ID NO: 5605186 - DNA, 25 bp, Homo sapien
atgaagcttttccagggcagagatc

SEQ ID NO: 5605187 - DNA, 25 bp, Homo sapien
ggcgtgggatttgtacaccctggaa

SEQ ID NO: 5605188 - DNA, 25 bp, Homo sapien
aatagctgcccaagaaatatgtgtt

SEQ ID NO: 5605189 - DNA, 25 bp, Homo sapien
tgctaagatcagaacagtatttgcc

SEQ ID NO: 5605190 - DNA, 25 bp, Homo sapien
agtgcctgacccataatagctgccc

SEQ ID NO: 5605191 - DNA, 25 bp, Homo sapien
tggtcgcgatcatgtatcggcatgt

SEQ ID NO: 5605192 - DNA, 25 bp, Homo sapien
tcagagctgctttttggtcgcgatc

SEQ ID NO: 5605193 - DNA, 25 bp, Homo sapien
gctctatgtacagtgccctgcacgc

SEQ ID NO: 5605194 - DNA, 25 bp, Homo sapien
gccctgcacgcgacaagtgcaacaa

SEQ ID NO: 5605195 - DNA, 25 bp, Homo sapien
tacagtggccaaccctcacagaaaa

SEQ ID NO: 5605196 - DNA, 25 bp, Homo sapien
tcggcatgtgtcacaatgtggcaaa

SEQ ID NO: 5605197 - DNA, 25 bp, Homo sapien
gtgcaacaagaaacctcagagctgc

SEQ ID NO: 5605198 - DNA, 25 bp, Homo sapien
cagactggaaaatggaacgtctctt

SEQ ID NO: 5605199 - DNA, 25 bp, Homo sapien
catcaatggaaattacagcatcctt

SEQ ID NO: 5605200 - DNA, 25 bp, Homo sapien
tttggctgtgcaacatcaatggaaa

SEQ ID NO: 5605201 - DNA, 25 bp, Homo sapien
cacaaacaggcagctcttatcagac

SEQ ID NO: 5605202 - DNA, 25 bp, Homo sapien
gaaacatgaggaacactcttcaaga

SEQ ID NO: 5605203 - DNA, 25 bp, Homo sapien
ttcaccgatgtaagcaccagggtag

SEQ ID NO: 5605204 - DNA, 25 bp, Homo sapien
atttacacagtatcgggtgggaatg

SEQ ID NO: 5605205 - DNA, 25 bp, Homo sapien
tggaaaggtgaataactcgcagaaa

SEQ ID NO: 5605206 - DNA, 25 bp, Homo sapien
cagtgctgaaatttggagtaaaaac

SEQ ID NO: 5605207 - DNA, 25 bp, Homo sapien
gaaagaaagaatttacacagtatcg

SEQ ID NO: 5605208 - DNA, 25 bp, Homo sapien
cattagatagaataaagacaacttg

SEQ ID NO: 5605209 - DNA, 25 bp, Homo sapien
agcttgtcatgctgatccacatctc

SEQ ID NO: 5605210 - DNA, 25 bp, Homo sapien
atccaaagcctgggtgttgaagatc

SEQ ID NO: 5605211 - DNA, 25 bp, Homo sapien
tgtgtactagctatgtgccaaccag

SEQ ID NO: 5605212 - DNA, 25 bp, Homo sapien
gaaatcatgtaacaaagggaaagaa

SEQ ID NO: 5605213 - DNA, 25 bp, Homo sapien
gattatccctggctgcaaagctccc

SEQ ID NO: 5605214 - DNA, 25 bp, Homo sapien
aagcgtgcacaggcattggtcttga

SEQ ID NO: 5605215 - DNA, 25 bp, Homo sapien
cggctggagagcatcatgtacatta

SEQ ID NO: 5605216 - DNA, 25 bp, Homo sapien
ttgtcactgaggttgctactggcta

SEQ ID NO: 5605217 - DNA, 25 bp, Homo sapien
agagcaacaaacagtgcggtgattg

SEQ ID NO: 5605218 - DNA, 25 bp, Homo sapien
cttttagagaaagttagagaaagcg

SEQ ID NO: 5605219 - DNA, 25 bp, Homo sapien
tgtgcccaggctttttgggggctgc

SEQ ID NO: 5605220 - DNA, 25 bp, Homo sapien
atatttttgtactcggctggagagc

SEQ ID NO: 5605221 - DNA, 25 bp, Homo sapien
caaagctcccagattgcagagcaac

SEQ ID NO: 5605222 - DNA, 25 bp, Homo sapien
ttgggggctgctctttatgatcaca

SEQ ID NO: 5605223 - DNA, 25 bp, Homo sapien
cagtgcggtgattgttcataattgt

SEQ ID NO: 5605224 - DNA, 25 bp, Homo sapien
gtgtaagatgctgagagcacatgga

SEQ ID NO: 5605225 - DNA, 25 bp, Homo sapien
agggtgtattcatgagtggtagctg

SEQ ID NO: 5605226 - DNA, 25 bp, Homo sapien
gtgtaacagggtttcactggaatgt

SEQ ID NO: 5605227 - DNA, 25 bp, Homo sapien
tgttgcttggttacagggtgtattc

SEQ ID NO: 5605228 - DNA, 25 bp, Homo sapien
gtgtgaagcaataggtgtaagatgc

SEQ ID NO: 5605229 - DNA, 25 bp, Homo sapien
ctagttactgaggctaggtcgagtg

SEQ ID NO: 5605230 - DNA, 25 bp, Homo sapien
gcagttgtcgtgagagacatgcttg

SEQ ID NO: 5605231 - DNA, 25 bp, Homo sapien
tgggagacatgtaatggtagattta

SEQ ID NO: 5605232 - DNA, 25 bp, Homo sapien
gacatgcttggcatacagagctgtc

SEQ ID NO: 5605233 - DNA, 25 bp, Homo sapien
gacagctaccagggagatctgttgc

SEQ ID NO: 5605234 - DNA, 25 bp, Homo sapien
gtctgcccaaaggaacatggtgtca

SEQ ID NO: 5605235 - DNA, 25 bp, Homo sapien
tctatcagaggcacatcatggattc

SEQ ID NO: 5605236 - DNA, 25 bp, Homo sapien
atcaatggactatcaaatcagaaag

SEQ ID NO: 5605237 - DNA, 25 bp, Homo sapien
agataccgataaactaaaaatcctg

SEQ ID NO: 5605238 - DNA, 25 bp, Homo sapien
tgttgtctatcagaggcacatcatg

SEQ ID NO: 5605239 - DNA, 25 bp, Homo sapien
agaggcacatcatggattcaaagac

SEQ ID NO: 5605240 - DNA, 25 bp, Homo sapien
tcaaaaaaagatctaaccatatgtt

SEQ ID NO: 5605241 - DNA, 25 bp, Homo sapien
ttcaaagacacaggcaggttgaaaa

SEQ ID NO: 5605242 - DNA, 25 bp, Homo sapien
accatatgttgtctatcagaggcac

SEQ ID NO: 5605243 - DNA, 25 bp, Homo sapien
ttatataaaatatcaatggactatc

SEQ ID NO: 5605244 - DNA, 25 bp, Homo sapien
ggattcaaagacacaggcaggttga

SEQ ID NO: 5605245 - DNA, 25 bp, Homo sapien
acagcaggcacaaatccaaccacaa

SEQ ID NO: 5605246 - DNA, 25 bp, Homo sapien
ttgtcagactgttgtgaacatacat

SEQ ID NO: 5605247 - DNA, 25 bp, Homo sapien
gtcaatagctttgtgggtgctggca

SEQ ID NO: 5605248 - DNA, 25 bp, Homo sapien
gctggcactgccgaattaaggccac

SEQ ID NO: 5605249 - DNA, 25 bp, Homo sapien
acaaagatcccaacagtcaatagct

SEQ ID NO: 5605250 - DNA, 25 bp, Homo sapien
catgtgcctttttagggggtagaaa

SEQ ID NO: 5605251 - DNA, 25 bp, Homo sapien
ttcacagaagataactgcatatttc

SEQ ID NO: 5605252 - DNA, 25 bp, Homo sapien
ttaaggccacatacccaagcagcaa

SEQ ID NO: 5605253 - DNA, 25 bp, Homo sapien
acccaagcagcaagtgccaattttg

SEQ ID NO: 5605254 - DNA, 25 bp, Homo sapien
gtaacttactggtggcagctaatgc

SEQ ID NO: 5605255 - DNA, 25 bp, Homo sapien
attagaatagaataagaaatgaaaa

SEQ ID NO: 5605256 - DNA, 25 bp, Homo sapien
taatgctaattacggacaaagatcc

SEQ ID NO: 5605257 - DNA, 25 bp, Homo sapien
atggccaatgttagacaatggatcc

SEQ ID NO: 5605258 - DNA, 25 bp, Homo sapien
cagcttattgaaaatgtacattcct

SEQ ID NO: 5605259 - DNA, 25 bp, Homo sapien
gtgtcagaatcttataagctggtaa

SEQ ID NO: 5605260 - DNA, 25 bp, Homo sapien
ttggatggccaatgttagacaatgg

SEQ ID NO: 5605261 - DNA, 25 bp, Homo sapien
ccacctccaaaaaatactagaacta

SEQ ID NO: 5605262 - DNA, 25 bp, Homo sapien
tctcattagcactgtcctttcaacc

SEQ ID NO: 5605263 - DNA, 25 bp, Homo sapien
aaatgtacattcctggccccacctc

SEQ ID NO: 5605264 - DNA, 25 bp, Homo sapien
ccaaacttcaatgtgtgtcagaatc

SEQ ID NO: 5605265 - DNA, 25 bp, Homo sapien
tttcaaccagtgattcccaaacttc

SEQ ID NO: 5605266 - DNA, 25 bp, Homo sapien
aatactagaactatggtgtggccct

SEQ ID NO: 5605267 - DNA, 25 bp, Homo sapien
tagacaatggatcctacctagccta

SEQ ID NO: 5605268 - DNA, 25 bp, Homo sapien
gcatgatgtgaggcctctctcggtg

SEQ ID NO: 5605269 - DNA, 25 bp, Homo sapien
gggtgactttgaagccaagttcatt

SEQ ID NO: 5605270 - DNA, 25 bp, Homo sapien
tttgagctttgaatgccaagtcccc

SEQ ID NO: 5605271 - DNA, 25 bp, Homo sapien
ctgtgcaagcttccagaatgacagc

SEQ ID NO: 5605272 - DNA, 25 bp, Homo sapien
tacagtttactcagaagggcagagg

SEQ ID NO: 5605273 - DNA, 25 bp, Homo sapien
gccaagtcccctaacctgtgcaagc

SEQ ID NO: 5605274 - DNA, 25 bp, Homo sapien
gactctgcagacccatccaggatgt

SEQ ID NO: 5605275 - DNA, 25 bp, Homo sapien
gatctgactttcaggggaagaatgc

SEQ ID NO: 5605276 - DNA, 25 bp, Homo sapien
gaattggcttgtggttgacggcctt

SEQ ID NO: 5605277 - DNA, 25 bp, Homo sapien
ctttgtgtaaagctgagtgaaccgt

SEQ ID NO: 5605278 - DNA, 25 bp, Homo sapien
ccaggatgtagagttcatgtttgtc

SEQ ID NO: 5605279 - DNA, 25 bp, Homo sapien
tccaggatctaacataataggtcta

SEQ ID NO: 5605280 - DNA, 25 bp, Homo sapien
ttgattggtccacacttgccctctg

SEQ ID NO: 5605281 - DNA, 25 bp, Homo sapien
ataagcagcttgtctctggttatac

SEQ ID NO: 5605282 - DNA, 25 bp, Homo sapien
gcatgtgaagctccctgtgatctct

SEQ ID NO: 5605283 - DNA, 25 bp, Homo sapien
ggctatggtcttgaatcctggggat

SEQ ID NO: 5605284 - DNA, 25 bp, Homo sapien
attggcttgtaaatgcttggctgtg

SEQ ID NO: 5605285 - DNA, 25 bp, Homo sapien
tacatgaagcaagtagaacagaaca

SEQ ID NO: 5605286 - DNA, 25 bp, Homo sapien
gttccctatgtgctggccattggcc

SEQ ID NO: 5605287 - DNA, 25 bp, Homo sapien
tcctggggatgagcactaattttca

SEQ ID NO: 5605288 - DNA, 25 bp, Homo sapien
ctgtgatagacagcatgtgaagctc

SEQ ID NO: 5605289 - DNA, 25 bp, Homo sapien
ccactggagtaagaaaagctacatg

SEQ ID NO: 5605290 - DNA, 25 bp, Homo sapien
tcggcgttccaatcgaacacgcgag

SEQ ID NO: 5605291 - DNA, 25 bp, Homo sapien
ctcgcgtgttcgattggaacgccga

SEQ ID NO: 5605292 - DNA, 25 bp, Homo sapien
cagcagtgagggtaatcattgcaag

SEQ ID NO: 5605293 - DNA, 25 bp, Homo sapien
tctctacacagcagtgagggtaatc

SEQ ID NO: 5605294 - DNA, 25 bp, Homo sapien
agattgtatgcagtctcttgcctcc

SEQ ID NO: 5605295 - DNA, 25 bp, Homo sapien
acctactggtatcctacttgtctcc

SEQ ID NO: 5605296 - DNA, 25 bp, Homo sapien
tgagggtaatcattgcaagtaaaat

SEQ ID NO: 5605297 - DNA, 25 bp, Homo sapien
cacttagagtaaaatccagaccctt

SEQ ID NO: 5605298 - DNA, 25 bp, Homo sapien
tcctgatttagctacaccagcatcc

SEQ ID NO: 5605299 - DNA, 25 bp, Homo sapien
ctgatctgtaagattgtatgcagtc

SEQ ID NO: 5605300 - DNA, 25 bp, Homo sapien
gctcttggcctgagattactagtct

SEQ ID NO: 5605301 - DNA, 25 bp, Homo sapien
tgtagtataagtctaagccagcctc

SEQ ID NO: 5605302 - DNA, 25 bp, Homo sapien
gctaaatgtagtataagtctaagcc

SEQ ID NO: 5605303 - DNA, 25 bp, Homo sapien
atgttggccaggttgatctcagact

SEQ ID NO: 5605304 - DNA, 25 bp, Homo sapien
agcctttcaagaaggacctgcagcc

SEQ ID NO: 5605305 - DNA, 25 bp, Homo sapien
actgcgcccagtctctttatctttc

SEQ ID NO: 5605306 - DNA, 25 bp, Homo sapien
tcagactctttccttcaagccatcc

SEQ ID NO: 5605307 - DNA, 25 bp, Homo sapien
actcctgctccttgtctcactactc

SEQ ID NO: 5605308 - DNA, 25 bp, Homo sapien
tcctgccacccctcactcctgctcc

SEQ ID NO: 5605309 - DNA, 25 bp, Homo sapien
tccttgtctaagccgttctctctcc

SEQ ID NO: 5605310 - DNA, 25 bp, Homo sapien
actggcagagtcagccctgctctct

SEQ ID NO: 5605311 - DNA, 25 bp, Homo sapien
cagccctgctctctgacccagcttg

SEQ ID NO: 5605312 - DNA, 25 bp, Homo sapien
gacctgcagcccagagtccagcagg

SEQ ID NO: 5605313 - DNA, 25 bp, Homo sapien
ctcactactcacagcctttcaagaa

SEQ ID NO: 5605314 - DNA, 25 bp, Homo sapien
ctcatcccaacgctaggctatttcc

SEQ ID NO: 5605315 - DNA, 25 bp, Homo sapien
aacactgatcaggctctccactaac

SEQ ID NO: 5605316 - DNA, 25 bp, Homo sapien
gagactgagctgatttgaggctgaa

SEQ ID NO: 5605317 - DNA, 25 bp, Homo sapien
aaatgctcccaaggtagaaggagtc

SEQ ID NO: 5605318 - DNA, 25 bp, Homo sapien
tttgaagctacaggcccactagttc

SEQ ID NO: 5605319 - DNA, 25 bp, Homo sapien
tttaatccaattccagagactgagc

SEQ ID NO: 5605320 - DNA, 25 bp, Homo sapien
aaggtagaaggagtccaaatgttga

SEQ ID NO: 5605321 - DNA, 25 bp, Homo sapien
tgtgagaactggtctgttgcagtcc

SEQ ID NO: 5605322 - DNA, 25 bp, Homo sapien
ttgaggctgaaatctctgtgagaac

SEQ ID NO: 5605323 - DNA, 25 bp, Homo sapien
aataacttgaggcctaggaagatgt

SEQ ID NO: 5605324 - DNA, 25 bp, Homo sapien
tcccttgatgagtcctagattctga

SEQ ID NO: 5605325 - DNA, 25 bp, Homo sapien
tctgttccaactacaaagatcagta

SEQ ID NO: 5605326 - DNA, 25 bp, Homo sapien
agggaacaacctatgatactttttc

SEQ ID NO: 5605327 - DNA, 25 bp, Homo sapien
tctgaagacagtataaaactccgat

SEQ ID NO: 5605328 - DNA, 25 bp, Homo sapien
aactacaaagatcagtaagtactct

SEQ ID NO: 5605329 - DNA, 25 bp, Homo sapien
atccctttgaaacacatgaaatagg

SEQ ID NO: 5605330 - DNA, 25 bp, Homo sapien
actgaagggtacctaattcactacc

SEQ ID NO: 5605331 - DNA, 25 bp, Homo sapien
tacaaacgcacacatacacatagct

SEQ ID NO: 5605332 - DNA, 25 bp, Homo sapien
ctgcaacactgaagggtacctaatt

SEQ ID NO: 5605333 - DNA, 25 bp, Homo sapien
tgaaacacatgaaatagggaacaac

SEQ ID NO: 5605334 - DNA, 25 bp, Homo sapien
catagctctctctctgaagacagta

SEQ ID NO: 5605335 - DNA, 25 bp, Homo sapien
cgtcactgttaaaattattgctacc

SEQ ID NO: 5605336 - DNA, 25 bp, Homo sapien
gagatgatggactagtgtctcggct

SEQ ID NO: 5605337 - DNA, 25 bp, Homo sapien
cctccccagggttggctcacttttg

SEQ ID NO: 5605338 - DNA, 25 bp, Homo sapien
aattgctggcccccaaaaacagttc

SEQ ID NO: 5605339 - DNA, 25 bp, Homo sapien
ctgagacaggcccaaagcttttctg

SEQ ID NO: 5605340 - DNA, 25 bp, Homo sapien
ggcaggggagttgaatctatatcaa

SEQ ID NO: 5605341 - DNA, 25 bp, Homo sapien
agaaaaaaactgtggatatgtgaat

SEQ ID NO: 5605342 - DNA, 25 bp, Homo sapien
aggaagaaaataaagtcactgtcac

SEQ ID NO: 5605343 - DNA, 25 bp, Homo sapien
gtgccagacacctcggccccaattc

SEQ ID NO: 5605344 - DNA, 25 bp, Homo sapien
cagctgaacgtagactcctccccag

SEQ ID NO: 5605345 - DNA, 25 bp, Homo sapien
gtgtctcggcttaggttcaggactt

SEQ ID NO: 5605346 - DNA, 25 bp, Homo sapien
caaggccaccgaataaaccagtact

SEQ ID NO: 5605347 - DNA, 25 bp, Homo sapien
gacagtctcttggaccacaaattcc

SEQ ID NO: 5605348 - DNA, 25 bp, Homo sapien
agaaaagatttaagtgtaagcaaaa

SEQ ID NO: 5605349 - DNA, 25 bp, Homo sapien
atggatcatggaggaatgttttttc

SEQ ID NO: 5605350 - DNA, 25 bp, Homo sapien
ttctgacctaaggatctgaggcaac

SEQ ID NO: 5605351 - DNA, 25 bp, Homo sapien
gatctgaggcaacacagactgtttc

SEQ ID NO: 5605352 - DNA, 25 bp, Homo sapien
ttaagtgccaattgaagaactgaag

SEQ ID NO: 5605353 - DNA, 25 bp, Homo sapien
agatgaatccaatgtgccaggtgaa

SEQ ID NO: 5605354 - DNA, 25 bp, Homo sapien
ctcaagaccctgcaatttaagtgcc

SEQ ID NO: 5605355 - DNA, 25 bp, Homo sapien
taagtgtaagcaaaaagatgaatcc

SEQ ID NO: 5605356 - DNA, 25 bp, Homo sapien
gctttgcaggataaataaatgtctg

SEQ ID NO: 5605357 - DNA, 25 bp, Homo sapien
tgccaggtgaatcatgacagtctct

SEQ ID NO: 5605358 - DNA, 25 bp, Homo sapien
catagtgtagactccttgcgggcta

SEQ ID NO: 5605359 - DNA, 25 bp, Homo sapien
ctcccttccaccagttgggggcaga

SEQ ID NO: 5605360 - DNA, 25 bp, Homo sapien
ggcacttcagaagtagatgcacctt

SEQ ID NO: 5605361 - DNA, 25 bp, Homo sapien
gaacacctgtccgccatccactgtc

SEQ ID NO: 5605362 - DNA, 25 bp, Homo sapien
ggcagagtactcgcagccaggttat

SEQ ID NO: 5605363 - DNA, 25 bp, Homo sapien
gaggacgtgaggtgtttcactccaa

SEQ ID NO: 5605364 - DNA, 25 bp, Homo sapien
ctggtgactgtcccaagctgattcc

SEQ ID NO: 5605365 - DNA, 25 bp, Homo sapien
tgcatctgagcagggctatttggtt

SEQ ID NO: 5605366 - DNA, 25 bp, Homo sapien
ttgcgggctaccttttccagctccc

SEQ ID NO: 5605367 - DNA, 25 bp, Homo sapien
ccactgtccaggcattcaagggtca

SEQ ID NO: 5605368 - DNA, 25 bp, Homo sapien
ttcttggctcggctgtccccttgga

SEQ ID NO: 5605369 - DNA, 25 bp, Homo sapien
aatctgggatcactatctagactcc

SEQ ID NO: 5605370 - DNA, 25 bp, Homo sapien
caaattgtcatgataatctgggatc

SEQ ID NO: 5605371 - DNA, 25 bp, Homo sapien
aatatcccccccaaatagacgctga

SEQ ID NO: 5605372 - DNA, 25 bp, Homo sapien
tcaatgatgaagtgactctactgtt

SEQ ID NO: 5605373 - DNA, 25 bp, Homo sapien
tccatatctaacaagtaaccaaatt

SEQ ID NO: 5605374 - DNA, 25 bp, Homo sapien
tgtacacttagattgcagccttaga

SEQ ID NO: 5605375 - DNA, 25 bp, Homo sapien
aatgtgtctcattgttgagagtgtc

SEQ ID NO: 5605376 - DNA, 25 bp, Homo sapien
tgggcttattactagcacataaaat

SEQ ID NO: 5605377 - DNA, 25 bp, Homo sapien
tatttcaatacaaactgaggtaaat

SEQ ID NO: 5605378 - DNA, 25 bp, Homo sapien
ttggatcaaagttccatcacattgc

SEQ ID NO: 5605379 - DNA, 25 bp, Homo sapien
caaatagacgctgatgttccatatc

SEQ ID NO: 5605380 - DNA, 25 bp, Homo sapien
tgcatagatttgagtcaccacaacc

SEQ ID NO: 5605381 - DNA, 25 bp, Homo sapien
gcttctgcgcagtcagaccctccac

SEQ ID NO: 5605382 - DNA, 25 bp, Homo sapien
caaccacgagcattctgactgttcc

SEQ ID NO: 5605383 - DNA, 25 bp, Homo sapien
cttacaggtaataacaggtagcatt

SEQ ID NO: 5605384 - DNA, 25 bp, Homo sapien
atcacagatctgtccaatggtcatg

SEQ ID NO: 5605385 - DNA, 25 bp, Homo sapien
cacgcagcattttgaatctggcttc

SEQ ID NO: 5605386 - DNA, 25 bp, Homo sapien
ttctataaatggcatcacgcagcat

SEQ ID NO: 5605387 - DNA, 25 bp, Homo sapien
aagaggaaactgaacctcagaaggt

SEQ ID NO: 5605388 - DNA, 25 bp, Homo sapien
tggagttgagtgtctgtcatttgca

SEQ ID NO: 5605389 - DNA, 25 bp, Homo sapien
gcccctaagagttccctcatgctgc

SEQ ID NO: 5605390 - DNA, 25 bp, Homo sapien
ctgaacaacggagaagtattatccc

SEQ ID NO: 5605391 - DNA, 25 bp, Homo sapien
tatgaatatactttccagaggagaa

SEQ ID NO: 5605392 - DNA, 25 bp, Homo sapien
ctgaaaatgcagataggaaatcaga

SEQ ID NO: 5605393 - DNA, 25 bp, Homo sapien
attgatgaaacgtaagggaacttaa

SEQ ID NO: 5605394 - DNA, 25 bp, Homo sapien
cagaggagaataatagcaatgctta

SEQ ID NO: 5605395 - DNA, 25 bp, Homo sapien
agagaactaagaaattgttgcatat

SEQ ID NO: 5605396 - DNA, 25 bp, Homo sapien
gacaagggggctgatacttaattta

SEQ ID NO: 5605397 - DNA, 25 bp, Homo sapien
ttgtagattgtggtgtacagaagag

SEQ ID NO: 5605398 - DNA, 25 bp, Homo sapien
aaatattgatgaaacgtaagggaac

SEQ ID NO: 5605399 - DNA, 25 bp, Homo sapien
ataggaaatcagataacaaaaatgc

SEQ ID NO: 5605400 - DNA, 25 bp, Homo sapien
gtaacttatgtgcatgttagcagtt

SEQ ID NO: 5605401 - DNA, 25 bp, Homo sapien
aaagcaacacaggtattgtagattg

SEQ ID NO: 5605402 - DNA, 25 bp, Homo sapien
accaaccataataacactgtaagta

SEQ ID NO: 5605403 - DNA, 25 bp, Homo sapien
aaactcaagtgattgggtaacaggg

SEQ ID NO: 5605404 - DNA, 25 bp, Homo sapien
ttggaaaataaactcaagtgattgg

SEQ ID NO: 5605405 - DNA, 25 bp, Homo sapien
taggctggtgatataaggctcacac

SEQ ID NO: 5605406 - DNA, 25 bp, Homo sapien
ggctacagccaaattatggtggagc

SEQ ID NO: 5605407 - DNA, 25 bp, Homo sapien
ccaatgcccattaggctggtgatat

SEQ ID NO: 5605408 - DNA, 25 bp, Homo sapien
gttcagtgatgtcatattagtagtt

SEQ ID NO: 5605409 - DNA, 25 bp, Homo sapien
tgggtaacagggtcacaattgtact

SEQ ID NO: 5605410 - DNA, 25 bp, Homo sapien
tccccccgagtcaatctagataatc

SEQ ID NO: 5605411 - DNA, 25 bp, Homo sapien
tagataatcaagattggctacagcc

SEQ ID NO: 5605412 - DNA, 25 bp, Homo sapien
atggtggagctggcccaaattttca

SEQ ID NO: 5605413 - DNA, 25 bp, Homo sapien
gttgatgggaagctgtttaagaact

SEQ ID NO: 5605414 - DNA, 25 bp, Homo sapien
acagacccaaccgctacagctccta

SEQ ID NO: 5605415 - DNA, 25 bp, Homo sapien
gaaaactggttgtagccctagcttc

SEQ ID NO: 5605416 - DNA, 25 bp, Homo sapien
aaaacagctggagaggctgtctcta

SEQ ID NO: 5605417 - DNA, 25 bp, Homo sapien
ctggtctgcagaatgggtatcttga

SEQ ID NO: 5605418 - DNA, 25 bp, Homo sapien
ctccacgatatgaaaccaaaggcct

SEQ ID NO: 5605419 - DNA, 25 bp, Homo sapien
tgaggctccttccaggtgaaaatcc

SEQ ID NO: 5605420 - DNA, 25 bp, Homo sapien
ttgcttactcgctctggtcctcagt

SEQ ID NO: 5605421 - DNA, 25 bp, Homo sapien
attggccatgtgactatagactatt

SEQ ID NO: 5605422 - DNA, 25 bp, Homo sapien
tgggtcccagaaaactggttgtagc

SEQ ID NO: 5605423 - DNA, 25 bp, Homo sapien
atgggtatcttgatgtgtgttgttc

SEQ ID NO: 5605424 - DNA, 25 bp, Homo sapien
caatgcggacttaatataaacatcc

SEQ ID NO: 5605425 - DNA, 25 bp, Homo sapien
tagattattaaagtccaatgcggac

SEQ ID NO: 5605426 - DNA, 25 bp, Homo sapien
ctgtaatactgggtttctcagcctc

SEQ ID NO: 5605427 - DNA, 25 bp, Homo sapien
aaacagcctgctacatattggatgc

SEQ ID NO: 5605428 - DNA, 25 bp, Homo sapien
tccactagacaccagtggcaatccc

SEQ ID NO: 5605429 - DNA, 25 bp, Homo sapien
aaggccgtgagctgtttagcaacat

SEQ ID NO: 5605430 - DNA, 25 bp, Homo sapien
tctttgtcataaggccgtgagctgt

SEQ ID NO: 5605431 - DNA, 25 bp, Homo sapien
tgacattttggatgggataattctt

SEQ ID NO: 5605432 - DNA, 25 bp, Homo sapien
cacccctgattgagaactgctattg

SEQ ID NO: 5605433 - DNA, 25 bp, Homo sapien
ttcgtgttcctggtaaacagcctgc

SEQ ID NO: 5605434 - DNA, 25 bp, Homo sapien
acttgctaaacagagagtaaactta

SEQ ID NO: 5605435 - DNA, 25 bp, Homo sapien
ttcatgtgcatgtccaacgcacacc

SEQ ID NO: 5605436 - DNA, 25 bp, Homo sapien
tggttgatgcagatcctgggtcaca

SEQ ID NO: 5605437 - DNA, 25 bp, Homo sapien
aatatgaagctttgagaattcctgt

SEQ ID NO: 5605438 - DNA, 25 bp, Homo sapien
gcttgatcagttcatgtgcatgtcc

SEQ ID NO: 5605439 - DNA, 25 bp, Homo sapien
taatcccaatatgaagctttgagaa

SEQ ID NO: 5605440 - DNA, 25 bp, Homo sapien
gaggaagaaatcaagcttgatcagt

SEQ ID NO: 5605441 - DNA, 25 bp, Homo sapien
ttacttccctatgaccaacactgac

SEQ ID NO: 5605442 - DNA, 25 bp, Homo sapien
ccattgtcccttggtgtattcaatc

SEQ ID NO: 5605443 - DNA, 25 bp, Homo sapien
tgaccaacactgacatgtaccatcc

SEQ ID NO: 5605444 - DNA, 25 bp, Homo sapien
ttagtttactgggctggttgatgca

SEQ ID NO: 5605445 - DNA, 25 bp, Homo sapien
gatgcagatcctgggtcacagttct

SEQ ID NO: 5605446 - DNA, 25 bp, Homo sapien
aaaatgctgattggtataagtgata

SEQ ID NO: 5605447 - DNA, 25 bp, Homo sapien
taagtgatactcagaaggagggata

SEQ ID NO: 5605448 - DNA, 25 bp, Homo sapien
cccatgtcccaagctgaattagtcc

SEQ ID NO: 5605449 - DNA, 25 bp, Homo sapien
acacaccatgtgggtaaatggcatt

SEQ ID NO: 5605450 - DNA, 25 bp, Homo sapien
tcccaaagaccagacatgcatgtga

SEQ ID NO: 5605451 - DNA, 25 bp, Homo sapien
ggagggataaatggcctaagaaata

SEQ ID NO: 5605452 - DNA, 25 bp, Homo sapien
atgcatgtgaagaaacccagtgcac

SEQ ID NO: 5605453 - DNA, 25 bp, Homo sapien
aagaaataaaagtggtttgcttcac

SEQ ID NO: 5605454 - DNA, 25 bp, Homo sapien
gaaggcagatcgaaaaccaaagaaa

SEQ ID NO: 5605455 - DNA, 25 bp, Homo sapien
tttgcttcacagggagaaaacctat

SEQ ID NO: 5605456 - DNA, 25 bp, Homo sapien
aatttgaggatgtagtttgaaggca

SEQ ID NO: 5605457 - DNA, 25 bp, Homo sapien
cactcaacctcctcaactaaaccta

SEQ ID NO: 5605458 - DNA, 25 bp, Homo sapien
cccccttctgtcgtctctcggcgtc

SEQ ID NO: 5605459 - DNA, 25 bp, Homo sapien
ggctgcaatcatattcttgggcctt

SEQ ID NO: 5605460 - DNA, 25 bp, Homo sapien
attcttgggccttactcttaaaata

SEQ ID NO: 5605461 - DNA, 25 bp, Homo sapien
tgctcactccaatataccaggctgc

SEQ ID NO: 5605462 - DNA, 25 bp, Homo sapien
aattcgaaggcacattcttttctcc

SEQ ID NO: 5605463 - DNA, 25 bp, Homo sapien
cactccaatataccaggctgcaatc

SEQ ID NO: 5605464 - DNA, 25 bp, Homo sapien
gtactgacctccttgccttttgcct

SEQ ID NO: 5605465 - DNA, 25 bp, Homo sapien
catttcttacttgtctgctcactcc

SEQ ID NO: 5605466 - DNA, 25 bp, Homo sapien
ctcaactaaacctagaaaacctcat

SEQ ID NO: 5605467 - DNA, 25 bp, Homo sapien
tccttaaaggaaaaatcaggagtgc

SEQ ID NO: 5605468 - DNA, 25 bp, Homo sapien
attttagtagactttcttgggatat

SEQ ID NO: 5605469 - DNA, 25 bp, Homo sapien
tcatatagatcttgtgaatcgaatt

SEQ ID NO: 5605470 - DNA, 25 bp, Homo sapien
taatagaaaatgaaaacattgattt

SEQ ID NO: 5605471 - DNA, 25 bp, Homo sapien
gcccatccaggatcatgcatgtctt

SEQ ID NO: 5605472 - DNA, 25 bp, Homo sapien
gtctgcccatccaggatcatgcatg

SEQ ID NO: 5605473 - DNA, 25 bp, Homo sapien
agtaagtctgcccatccaggatcat

SEQ ID NO: 5605474 - DNA, 25 bp, Homo sapien
catccaggatcatgcatgtcttttc

SEQ ID NO: 5605475 - DNA, 25 bp, Homo sapien
tagtagactttcttgggatatttga

SEQ ID NO: 5605476 - DNA, 25 bp, Homo sapien
atagatcttgtgaatcgaattattt

SEQ ID NO: 5605477 - DNA, 25 bp, Homo sapien
aatagtaagtctgcccatccaggat

SEQ ID NO: 5605478 - DNA, 25 bp, Homo sapien
ttgtgtccaagtatatattaaatat

SEQ ID NO: 5605479 - DNA, 25 bp, Homo sapien
ttttccttggaggaagtgaacagag

SEQ ID NO: 5605480 - DNA, 25 bp, Homo sapien
gaacagaggtggacataccctaaag

SEQ ID NO: 5605481 - DNA, 25 bp, Homo sapien
atgctccaccctccgaggggaagtt

SEQ ID NO: 5605482 - DNA, 25 bp, Homo sapien
ttcccttcgaaaagtccagcagcaa

SEQ ID NO: 5605483 - DNA, 25 bp, Homo sapien
tacaaacacaggatacagaataatc

SEQ ID NO: 5605484 - DNA, 25 bp, Homo sapien
gaccaactcgcccatcagcaagctc

SEQ ID NO: 5605485 - DNA, 25 bp, Homo sapien
atgaatctctggctgcctgagggtg

SEQ ID NO: 5605486 - DNA, 25 bp, Homo sapien
tcagtgggccagtcagttactgtta

SEQ ID NO: 5605487 - DNA, 25 bp, Homo sapien
ggacataccctaaaggcgatggacc

SEQ ID NO: 5605488 - DNA, 25 bp, Homo sapien
cctcgggtggttctctcccaggtgg

SEQ ID NO: 5605489 - DNA, 25 bp, Homo sapien
atgaccacccgtcagagccgggtac

SEQ ID NO: 5605490 - DNA, 25 bp, Homo sapien
atggggccttcccagtgctcccttc

SEQ ID NO: 5605491 - DNA, 25 bp, Homo sapien
ggagcggctgagttttagaatggct

SEQ ID NO: 5605492 - DNA, 25 bp, Homo sapien
tccagtcatataggaagtatggggc

SEQ ID NO: 5605493 - DNA, 25 bp, Homo sapien
gcaccctaacccccggagcggtgca

SEQ ID NO: 5605494 - DNA, 25 bp, Homo sapien
acccacgtaccctgattctagccct

SEQ ID NO: 5605495 - DNA, 25 bp, Homo sapien
aagacacagatccttggggaatagg

SEQ ID NO: 5605496 - DNA, 25 bp, Homo sapien
gggaggcagaattccgtgctccagt

SEQ ID NO: 5605497 - DNA, 25 bp, Homo sapien
aaaaaatgaaatgtcagtggagcag

SEQ ID NO: 5605498 - DNA, 25 bp, Homo sapien
aagcaggcttataatggtgaaattt

SEQ ID NO: 5605499 - DNA, 25 bp, Homo sapien
cagccgagggacataactacctatt

SEQ ID NO: 5605500 - DNA, 25 bp, Homo sapien
taagagtgcgtctatctagaagtcc

SEQ ID NO: 5605501 - DNA, 25 bp, Homo sapien
tttcagtgagactacagagccaaca

SEQ ID NO: 5605502 - DNA, 25 bp, Homo sapien
tacagagccaacaaagtgcactagt

SEQ ID NO: 5605503 - DNA, 25 bp, Homo sapien
aacacctgtgtgagcaccctgctta

SEQ ID NO: 5605504 - DNA, 25 bp, Homo sapien
tggcctattggaacccccttcttga

SEQ ID NO: 5605505 - DNA, 25 bp, Homo sapien
tgcttaccatctaccagtgaccaca

SEQ ID NO: 5605506 - DNA, 25 bp, Homo sapien
agtgaccacacccacatagggttct

SEQ ID NO: 5605507 - DNA, 25 bp, Homo sapien
tacttgtgtaagccaccgtacctgg

SEQ ID NO: 5605508 - DNA, 25 bp, Homo sapien
gctggaattacttgtgtaagccacc

SEQ ID NO: 5605509 - DNA, 25 bp, Homo sapien
gtgcactagttagctgtgatggaaa

SEQ ID NO: 5605510 - DNA, 25 bp, Homo sapien
tgaaaagaagtaggctaggttatac

SEQ ID NO: 5605511 - DNA, 25 bp, Homo sapien
tgatggatctctgctgaaaagaagt

SEQ ID NO: 5605512 - DNA, 25 bp, Homo sapien
gactagagatcagaagatttttatc

SEQ ID NO: 5605513 - DNA, 25 bp, Homo sapien
gattggcagtcaagcataaaggtta

SEQ ID NO: 5605514 - DNA, 25 bp, Homo sapien
cataaaggttaaaggtcagaattgg

SEQ ID NO: 5605515 - DNA, 25 bp, Homo sapien
taacttttgtttagctggggccaga

SEQ ID NO: 5605516 - DNA, 25 bp, Homo sapien
ctacaacagcagtagcatgagagac

SEQ ID NO: 5605517 - DNA, 25 bp, Homo sapien
agcagaagagaagctaccagctttt

SEQ ID NO: 5605518 - DNA, 25 bp, Homo sapien
tgaagaatagattgacttggctgac

SEQ ID NO: 5605519 - DNA, 25 bp, Homo sapien
tggctgacatgattctgactagaga

SEQ ID NO: 5605520 - DNA, 25 bp, Homo sapien
agctaccagcttttgggttggatgc

SEQ ID NO: 5605521 - DNA, 25 bp, Homo sapien
ctcagccactgattggcagtcaagc

SEQ ID NO: 5605522 - DNA, 25 bp, Homo sapien
ggctcagcacagcaatcatagatgc

SEQ ID NO: 5605523 - DNA, 25 bp, Homo sapien
gagtcctctggcctaagtacaaaac

SEQ ID NO: 5605524 - DNA, 25 bp, Homo sapien
cctttgatggtccagtaaagagccc

SEQ ID NO: 5605525 - DNA, 25 bp, Homo sapien
ccaaactagaaaacacagagtcctc

SEQ ID NO: 5605526 - DNA, 25 bp, Homo sapien
gacagaggaacagtacttaacaacc

SEQ ID NO: 5605527 - DNA, 25 bp, Homo sapien
gtatggccaacttgtgtgatacaac

SEQ ID NO: 5605528 - DNA, 25 bp, Homo sapien
aaacagagtctgtctagccttaaga

SEQ ID NO: 5605529 - DNA, 25 bp, Homo sapien
ttacaagtgtccacagaaaggagga

SEQ ID NO: 5605530 - DNA, 25 bp, Homo sapien
gctgaatgttcatggtatggccaac

SEQ ID NO: 5605531 - DNA, 25 bp, Homo sapien
cagtaaagagccctccattggtgct

SEQ ID NO: 5605532 - DNA, 25 bp, Homo sapien
catctcaagacaggttaaatgtgac

SEQ ID NO: 5605533 - DNA, 25 bp, Homo sapien
tttactatctggtagtggagatgac

SEQ ID NO: 5605534 - DNA, 25 bp, Homo sapien
tcagatgaatgatgcttatgtttct

SEQ ID NO: 5605535 - DNA, 25 bp, Homo sapien
gtctccatcaagtctgatgcccctc

SEQ ID NO: 5605536 - DNA, 25 bp, Homo sapien
ggactgtatgacaatatgagattta

SEQ ID NO: 5605537 - DNA, 25 bp, Homo sapien
ccttggcctgtatcccacagatgtt

SEQ ID NO: 5605538 - DNA, 25 bp, Homo sapien
caggagtttgggataaaagaatata

SEQ ID NO: 5605539 - DNA, 25 bp, Homo sapien
tcatcagataaatggactgtatgac

SEQ ID NO: 5605540 - DNA, 25 bp, Homo sapien
aggtagcaagcaacacatcagatga

SEQ ID NO: 5605541 - DNA, 25 bp, Homo sapien
ttgaaaggagaatataaggtagcaa

SEQ ID NO: 5605542 - DNA, 25 bp, Homo sapien
aaacacctgtgggatatttagttcc

SEQ ID NO: 5605543 - DNA, 25 bp, Homo sapien
tacatacattatagaaacaacctac

SEQ ID NO: 5605544 - DNA, 25 bp, Homo sapien
aagagtccttcaggagtttgggata

SEQ ID NO: 5605545 - DNA, 25 bp, Homo sapien
ccagaccttggaacatactttgagt

SEQ ID NO: 5605546 - DNA, 25 bp, Homo sapien
atggcactgatttgaggaatataat

SEQ ID NO: 5605547 - DNA, 25 bp, Homo sapien
tttgagtagcaaggtattagaagaa

SEQ ID NO: 5605548 - DNA, 25 bp, Homo sapien
gtgatacaaaggctgccagaccttg

SEQ ID NO: 5605549 - DNA, 25 bp, Homo sapien
ttcccaagagaatatactaagaaaa

SEQ ID NO: 5605550 - DNA, 25 bp, Homo sapien
gtcttatggcactgatttgaggaat

SEQ ID NO: 5605551 - DNA, 25 bp, Homo sapien
cattcctaataggcttccaggtgat

SEQ ID NO: 5605552 - DNA, 25 bp, Homo sapien
ggacatagtatctgtttgagtaacc

SEQ ID NO: 5605553 - DNA, 25 bp, Homo sapien
gattgtgattccgcaggtctgaggt

SEQ ID NO: 5605554 - DNA, 25 bp, Homo sapien
attagaagaatacggacatagtatc

SEQ ID NO: 5605555 - DNA, 25 bp, Homo sapien
gctctcaaacttctgacatcaagca

SEQ ID NO: 5605556 - DNA, 25 bp, Homo sapien
ttttggaggctatgagtttaatttc

SEQ ID NO: 5605557 - DNA, 25 bp, Homo sapien
atgtgagtggcaacacctgccaggt

SEQ ID NO: 5605558 - DNA, 25 bp, Homo sapien
caaggtagtgctgttctaaggatgt

SEQ ID NO: 5605559 - DNA, 25 bp, Homo sapien
aatcatagtgctatccgcaggccac

SEQ ID NO: 5605560 - DNA, 25 bp, Homo sapien
ctggactagcagactactggcacaa

SEQ ID NO: 5605561 - DNA, 25 bp, Homo sapien
cctcaaaacagggcaaatgcaaatt

SEQ ID NO: 5605562 - DNA, 25 bp, Homo sapien
tggcacaagatacgagtacagaaag

SEQ ID NO: 5605563 - DNA, 25 bp, Homo sapien
taaggatgtgtaaactacagagttc

SEQ ID NO: 5605564 - DNA, 25 bp, Homo sapien
tataaatgtggtcagatgtgagtgg

SEQ ID NO: 5605565 - DNA, 25 bp, Homo sapien
cgcaggccacacgactgtcatcatt

SEQ ID NO: 5605566 - DNA, 25 bp, Homo sapien
aaaaggaacatgaatctggactagc

SEQ ID NO: 5605567 - DNA, 25 bp, Homo sapien
aaagaacattggataaaatttgtta

SEQ ID NO: 5605568 - DNA, 25 bp, Homo sapien
gacttctcactgttgtgtctgcgtt

SEQ ID NO: 5605569 - DNA, 25 bp, Homo sapien
agtaactcaactagtctgacttctc

SEQ ID NO: 5605570 - DNA, 25 bp, Homo sapien
taaaaaccagtttgccgcatgctat

SEQ ID NO: 5605571 - DNA, 25 bp, Homo sapien
tgagatagtgtgtttatgtatttcc

SEQ ID NO: 5605572 - DNA, 25 bp, Homo sapien
gtttgccgcatgctattgcctttac

SEQ ID NO: 5605573 - DNA, 25 bp, Homo sapien
tcaaaatagaagtctatccactgct

SEQ ID NO: 5605574 - DNA, 25 bp, Homo sapien
tttgtagtaaaattgcacatgaatt

SEQ ID NO: 5605575 - DNA, 25 bp, Homo sapien
ggggtgccttattgagatagtgtgt

SEQ ID NO: 5605576 - DNA, 25 bp, Homo sapien
tttcttaatatggagaagaggggaa

SEQ ID NO: 5605577 - DNA, 25 bp, Homo sapien
tcatccagtaccaaatttctaagtg

SEQ ID NO: 5605578 - DNA, 25 bp, Homo sapien
atgaagtgcttgtaagattctcccc

SEQ ID NO: 5605579 - DNA, 25 bp, Homo sapien
ctggtataatagaaacaaacacaat

SEQ ID NO: 5605580 - DNA, 25 bp, Homo sapien
aggccatccgggtacaacaatagca

SEQ ID NO: 5605581 - DNA, 25 bp, Homo sapien
actcctaaagactgagaaagaggcc

SEQ ID NO: 5605582 - DNA, 25 bp, Homo sapien
ctcttctcaggcccagttccaaggt

SEQ ID NO: 5605583 - DNA, 25 bp, Homo sapien
gaaagcttaaggagatgaataactc

SEQ ID NO: 5605584 - DNA, 25 bp, Homo sapien
aacgttaactactaaggtctcatgc

SEQ ID NO: 5605585 - DNA, 25 bp, Homo sapien
gagtccgcctgaagacaagtactcc

SEQ ID NO: 5605586 - DNA, 25 bp, Homo sapien
gggcagcaacttgcgccagcaagac

SEQ ID NO: 5605587 - DNA, 25 bp, Homo sapien
aatgtcagcacatgaataaatcacc

SEQ ID NO: 5605588 - DNA, 25 bp, Homo sapien
taaagaagctatacaatgtcagcac

SEQ ID NO: 5605589 - DNA, 25 bp, Homo sapien
atatgagcctccccaaattgaaagc

SEQ ID NO: 5605590 - DNA, 25 bp, Homo sapien
ttcccacagccaaatctagagatta

SEQ ID NO: 5605591 - DNA, 25 bp, Homo sapien
ctcccttttcccacagccaaatcta

SEQ ID NO: 5605592 - DNA, 25 bp, Homo sapien
ggtaagaaaagacccgatatgagcc

SEQ ID NO: 5605593 - DNA, 25 bp, Homo sapien
tgagcctccccaaattgaaagccac

SEQ ID NO: 5605594 - DNA, 25 bp, Homo sapien
tccccaaattgaaagccacagggca

SEQ ID NO: 5605595 - DNA, 25 bp, Homo sapien
aagacccgatatgagcctccccaaa

SEQ ID NO: 5605596 - DNA, 25 bp, Homo sapien
ttttcccacagccaaatctagagat

SEQ ID NO: 5605597 - DNA, 25 bp, Homo sapien
agggcagagatgctgaatttcagtt

SEQ ID NO: 5605598 - DNA, 25 bp, Homo sapien
agagggtaagaaaagacccgatatg

SEQ ID NO: 5605599 - DNA, 25 bp, Homo sapien
aaatctagagattagaatccaggat

SEQ ID NO: 5605600 - DNA, 25 bp, Homo sapien
atctcaaatgggcaggatcttccac

SEQ ID NO: 5605601 - DNA, 25 bp, Homo sapien
tgtctacccagagctcaccaaggca

SEQ ID NO: 5605602 - DNA, 25 bp, Homo sapien
gcctgcctgcacgctatgacgctat

SEQ ID NO: 5605603 - DNA, 25 bp, Homo sapien
cgctattgtgtacacagggaggcag

SEQ ID NO: 5605604 - DNA, 25 bp, Homo sapien
caggtctggtcagcatcgtcagcat

SEQ ID NO: 5605605 - DNA, 25 bp, Homo sapien
ggacccaacgtaggcattgttcgca

SEQ ID NO: 5605606 - DNA, 25 bp, Homo sapien
agcatcgagtcagctgcctgtcagc

SEQ ID NO: 5605607 - DNA, 25 bp, Homo sapien
ctggccgaggcttctcatcagtgca

SEQ ID NO: 5605608 - DNA, 25 bp, Homo sapien
cagagaagacctaggttgccctcta

SEQ ID NO: 5605609 - DNA, 25 bp, Homo sapien
tcgtcgatgccgaggtatgaactga

SEQ ID NO: 5605610 - DNA, 25 bp, Homo sapien
aataagacctacccccagagcatgc

SEQ ID NO: 5605611 - DNA, 25 bp, Homo sapien
aaacttgcagcacagtatcaccaca

SEQ ID NO: 5605612 - DNA, 25 bp, Homo sapien
agccccagaggttaccattgggcat

SEQ ID NO: 5605613 - DNA, 25 bp, Homo sapien
agtgagtcactgatagggtgagtag

SEQ ID NO: 5605614 - DNA, 25 bp, Homo sapien
tgggcatactgatttgcacacagac

SEQ ID NO: 5605615 - DNA, 25 bp, Homo sapien
ctgtacatggttgtgtgcgctatac

SEQ ID NO: 5605616 - DNA, 25 bp, Homo sapien
aaagtttgagattggaagtgagtca

SEQ ID NO: 5605617 - DNA, 25 bp, Homo sapien
aaaacatcattatgcagtgcgtgac

SEQ ID NO: 5605618 - DNA, 25 bp, Homo sapien
gcacacagacccatctggaagaaag

SEQ ID NO: 5605619 - DNA, 25 bp, Homo sapien
actctagcttctgcaggtaggggaa

SEQ ID NO: 5605620 - DNA, 25 bp, Homo sapien
ataatcttacaggaccgccatcatt

SEQ ID NO: 5605621 - DNA, 25 bp, Homo sapien
acaaacatgagtactgtgttgcact

SEQ ID NO: 5605622 - DNA, 25 bp, Homo sapien
gttaccagaatatagcccttagctc

SEQ ID NO: 5605623 - DNA, 25 bp, Homo sapien
actagatagcaccttgttatgttac

SEQ ID NO: 5605624 - DNA, 25 bp, Homo sapien
gcagaaagttcaatgaagttacttc

SEQ ID NO: 5605625 - DNA, 25 bp, Homo sapien
gtgggagcattgaaggccattatta

SEQ ID NO: 5605626 - DNA, 25 bp, Homo sapien
atggcaatggctagtccaagtgtgg

SEQ ID NO: 5605627 - DNA, 25 bp, Homo sapien
ttctgtaattctatggcagggacat

SEQ ID NO: 5605628 - DNA, 25 bp, Homo sapien
aagatgagattgcctttctgcctat

SEQ ID NO: 5605629 - DNA, 25 bp, Homo sapien
ttgcacacacagtaaagatgagatt

SEQ ID NO: 5605630 - DNA, 25 bp, Homo sapien
aaagtggaacaaactggtcaacata

SEQ ID NO: 5605631 - DNA, 25 bp, Homo sapien
gaaaggatacgttagcagaaagttc

SEQ ID NO: 5605632 - DNA, 25 bp, Homo sapien
actttgacctagcagactgaaggag

SEQ ID NO: 5605633 - DNA, 25 bp, Homo sapien
caggttgaactgacaaaacttgggc

SEQ ID NO: 5605634 - DNA, 25 bp, Homo sapien
ctgacactcagcaggttgaactgac

SEQ ID NO: 5605635 - DNA, 25 bp, Homo sapien
actgacaaaacttgggcaactgggt

SEQ ID NO: 5605636 - DNA, 25 bp, Homo sapien
ttagatatcaaaacccagaaatgta

SEQ ID NO: 5605637 - DNA, 25 bp, Homo sapien
atcaaaacccagaaatgtattatcc

SEQ ID NO: 5605638 - DNA, 25 bp, Homo sapien
agaggataaagaagtgaagctctct

SEQ ID NO: 5605639 - DNA, 25 bp, Homo sapien
gtgaagctctctcctgacactcagc

SEQ ID NO: 5605640 - DNA, 25 bp, Homo sapien
actcagcaggttgaactgacaaaac

SEQ ID NO: 5605641 - DNA, 25 bp, Homo sapien
acagagtcttaacactgttgcccag

SEQ ID NO: 5605642 - DNA, 25 bp, Homo sapien
aatgtcacattagatatcaaaaccc

SEQ ID NO: 5605643 - DNA, 25 bp, Homo sapien
gagaggataaagaagtgaagctctc

SEQ ID NO: 5605644 - DNA, 25 bp, Homo sapien
cacatataattaggttgtctttaag

SEQ ID NO: 5605645 - DNA, 25 bp, Homo sapien
cttaaagacaacctaattatatgtg

SEQ ID NO: 5605646 - DNA, 25 bp, Homo sapien
tgttaccagtacaagcacatataat

SEQ ID NO: 5605647 - DNA, 25 bp, Homo sapien
attatatgtgcttgtactggtaaca

SEQ ID NO: 5605648 - DNA, 25 bp, Homo sapien
ctaggaacagaatattagcactgac

SEQ ID NO: 5605649 - DNA, 25 bp, Homo sapien
tacaaccctggaaatagatgcagaa

SEQ ID NO: 5605650 - DNA, 25 bp, Homo sapien
agtaggagttggaaattagcacaat

SEQ ID NO: 5605651 - DNA, 25 bp, Homo sapien
atgcagaaaaataatcaatccgccc

SEQ ID NO: 5605652 - DNA, 25 bp, Homo sapien
gggagaaagagaatatacattacaa

SEQ ID NO: 5605653 - DNA, 25 bp, Homo sapien
aagataacctgaaggtcactgtagt

SEQ ID NO: 5605654 - DNA, 25 bp, Homo sapien
gttggttgcttatgctgatggctgc

SEQ ID NO: 5605655 - DNA, 25 bp, Homo sapien
catgaagactacacactgtcaggaa

SEQ ID NO: 5605656 - DNA, 25 bp, Homo sapien
tttccatatgtgaaccactggttgc

SEQ ID NO: 5605657 - DNA, 25 bp, Homo sapien
acttggcatgtccccactaggaaca

SEQ ID NO: 5605658 - DNA, 25 bp, Homo sapien
ttaaatctagcctgtccacccccat

SEQ ID NO: 5605659 - DNA, 25 bp, Homo sapien
gggacacgagcagctttgatcatca

SEQ ID NO: 5605660 - DNA, 25 bp, Homo sapien
tgatcatcagggaaagcccccaatt

SEQ ID NO: 5605661 - DNA, 25 bp, Homo sapien
atcctaacccccaggggctgcttgc

SEQ ID NO: 5605662 - DNA, 25 bp, Homo sapien
ggggctgcttgcaagattaacgtac

SEQ ID NO: 5605663 - DNA, 25 bp, Homo sapien
cagaaatttgactggccaagggaca

SEQ ID NO: 5605664 - DNA, 25 bp, Homo sapien
caggatcgctcgcacgtagtcattt

SEQ ID NO: 5605665 - DNA, 25 bp, Homo sapien
gtgcaccgggtacatgaacctaact

SEQ ID NO: 5605666 - DNA, 25 bp, Homo sapien
tacatgcaaaggaaggtcatatttg

SEQ ID NO: 5605667 - DNA, 25 bp, Homo sapien
tgtttggcttactgtgcaccgggta

SEQ ID NO: 5605668 - DNA, 25 bp, Homo sapien
ttggtagagagcagtcactaacaag

SEQ ID NO: 5605669 - DNA, 25 bp, Homo sapien
caacctgactgagctaatcacgtac

SEQ ID NO: 5605670 - DNA, 25 bp, Homo sapien
tttggcttacaaacaccatagattg

SEQ ID NO: 5605671 - DNA, 25 bp, Homo sapien
catcctatggatgcactgaaattta

SEQ ID NO: 5605672 - DNA, 25 bp, Homo sapien
acagataagagaaaatatcacaata

SEQ ID NO: 5605673 - DNA, 25 bp, Homo sapien
tatcacaatacacctgccagaaaag

SEQ ID NO: 5605674 - DNA, 25 bp, Homo sapien
atgggtgaagggcacatacattttt

SEQ ID NO: 5605675 - DNA, 25 bp, Homo sapien
ttttaagcagtgctgagaaaaacaa

SEQ ID NO: 5605676 - DNA, 25 bp, Homo sapien
ataaggggttttccaaatacattgc

SEQ ID NO: 5605677 - DNA, 25 bp, Homo sapien
tgcaaaggtcccatattgtcccatc

SEQ ID NO: 5605678 - DNA, 25 bp, Homo sapien
agaaaaacaaattgcatgtatctct

SEQ ID NO: 5605679 - DNA, 25 bp, Homo sapien
agtataatggaattgatgggtgaag

SEQ ID NO: 5605680 - DNA, 25 bp, Homo sapien
atctactgacatctgcaaaggtccc

SEQ ID NO: 5605681 - DNA, 25 bp, Homo sapien
ccccagatgcactgtgacggtcaag

SEQ ID NO: 5605682 - DNA, 25 bp, Homo sapien
tgcatgccaagctctgctcaggagg

SEQ ID NO: 5605683 - DNA, 25 bp, Homo sapien
actgagcatctactgcatgccaagc

SEQ ID NO: 5605684 - DNA, 25 bp, Homo sapien
gaggcccctgctcaacctgcgacaa

SEQ ID NO: 5605685 - DNA, 25 bp, Homo sapien
cttgcttgtatcttcaggatgccaa

SEQ ID NO: 5605686 - DNA, 25 bp, Homo sapien
actcacaggctatgaggaaagaagt

SEQ ID NO: 5605687 - DNA, 25 bp, Homo sapien
agagtgactcacaggctatgaggaa

SEQ ID NO: 5605688 - DNA, 25 bp, Homo sapien
acaagactgaaaggctccccagatg

SEQ ID NO: 5605689 - DNA, 25 bp, Homo sapien
tgggatcctggtggcttcagatctc

SEQ ID NO: 5605690 - DNA, 25 bp, Homo sapien
gctcaacctgcgacaagactgaaag

SEQ ID NO: 5605691 - DNA, 25 bp, Homo sapien
aaaggctccccagatgcactgtgac

SEQ ID NO: 5605692 - DNA, 25 bp, Homo sapien
gggacataagctctgcccacacctc

SEQ ID NO: 5605693 - DNA, 25 bp, Homo sapien
tccattcacaacagacagacgatat

SEQ ID NO: 5605694 - DNA, 25 bp, Homo sapien
gatagatgctcaattgtgggcagtt

SEQ ID NO: 5605695 - DNA, 25 bp, Homo sapien
caggcattcccttgacagtgattcg

SEQ ID NO: 5605696 - DNA, 25 bp, Homo sapien
gtcatatgagctgcaaagtacattt

SEQ ID NO: 5605697 - DNA, 25 bp, Homo sapien
tggcataacctagagaggagcccta

SEQ ID NO: 5605698 - DNA, 25 bp, Homo sapien
gggatagggctgaagttcatccatt

SEQ ID NO: 5605699 - DNA, 25 bp, Homo sapien
gattcgtgttataaagggggtcata

SEQ ID NO: 5605700 - DNA, 25 bp, Homo sapien
tttgctattaagggatagggctgaa

SEQ ID NO: 5605701 - DNA, 25 bp, Homo sapien
cagcacactgaatggttatatgatg

SEQ ID NO: 5605702 - DNA, 25 bp, Homo sapien
atggagatgtctgtgccacgtctca

SEQ ID NO: 5605703 - DNA, 25 bp, Homo sapien
atatgccacaatgcctgactagttt

SEQ ID NO: 5605704 - DNA, 25 bp, Homo sapien
tatgatgactgctcactgcagcctc

SEQ ID NO: 5605705 - DNA, 25 bp, Homo sapien
atctaggcacaagtgttttaggtga

SEQ ID NO: 5605706 - DNA, 25 bp, Homo sapien
caaatttgtcactccatctaggcac

SEQ ID NO: 5605707 - DNA, 25 bp, Homo sapien
aagtgttttaggtgagcataaattt

SEQ ID NO: 5605708 - DNA, 25 bp, Homo sapien
accgcgcccagcctgaaatgttcat

SEQ ID NO: 5605709 - DNA, 25 bp, Homo sapien
ctgggaccacaggcatatgccacaa

SEQ ID NO: 5605710 - DNA, 25 bp, Homo sapien
cagagtctcaccatgttgctaaggc

SEQ ID NO: 5605711 - DNA, 25 bp, Homo sapien
ttttatagagacagagtctcaccat

SEQ ID NO: 5605712 - DNA, 25 bp, Homo sapien
gttgctaaggctggttttgaactcc

SEQ ID NO: 5605713 - DNA, 25 bp, Homo sapien
ggagtgcagtggtatgatgactgct

SEQ ID NO: 5605714 - DNA, 25 bp, Homo sapien
ttgacctaagaacttgatcgacagt

SEQ ID NO: 5605715 - DNA, 25 bp, Homo sapien
tacaagcactaatggtaaggagcaa

SEQ ID NO: 5605716 - DNA, 25 bp, Homo sapien
tagttagaagaatgctactgggata

SEQ ID NO: 5605717 - DNA, 25 bp, Homo sapien
agctaatgctaggtgtgtttgggta

SEQ ID NO: 5605718 - DNA, 25 bp, Homo sapien
taattggtataaggtgcagccaagg

SEQ ID NO: 5605719 - DNA, 25 bp, Homo sapien
gatcgacagtcaaagctaatgctag

SEQ ID NO: 5605720 - DNA, 25 bp, Homo sapien
aaggagcaaggcatttagaacactg

SEQ ID NO: 5605721 - DNA, 25 bp, Homo sapien
tactgggataatgaggagatttaaa

SEQ ID NO: 5605722 - DNA, 25 bp, Homo sapien
tagaacactggctctcaaccatggc

SEQ ID NO: 5605723 - DNA, 25 bp, Homo sapien
aaatcatgtcataagagaagcaatt

SEQ ID NO: 5605724 - DNA, 25 bp, Homo sapien
aagtgacagatttggaattgaccta

SEQ ID NO: 5605725 - DNA, 25 bp, Homo sapien
tataagtgacagctatttcctaatc

SEQ ID NO: 5605726 - DNA, 25 bp, Homo sapien
ttggccagtggcatttcctcttact

SEQ ID NO: 5605727 - DNA, 25 bp, Homo sapien
gatggagaaagagactgtgttccaa

SEQ ID NO: 5605728 - DNA, 25 bp, Homo sapien
ctattaaagtcaatggttcaagcct

SEQ ID NO: 5605729 - DNA, 25 bp, Homo sapien
tgcccattaggtgactgataggtta

SEQ ID NO: 5605730 - DNA, 25 bp, Homo sapien
atgtcattacatagggactctaacc

SEQ ID NO: 5605731 - DNA, 25 bp, Homo sapien
gaagcgaagactctgaaagaaaaat

SEQ ID NO: 5605732 - DNA, 25 bp, Homo sapien
tacaaatgatttggccagtggcatt

SEQ ID NO: 5605733 - DNA, 25 bp, Homo sapien
agagtgaagcgaagactctgaaaga

SEQ ID NO: 5605734 - DNA, 25 bp, Homo sapien
tgcctaagagaatcatacatttgtt

SEQ ID NO: 5605735 - DNA, 25 bp, Homo sapien
gataataacaggaatggcagaagtt

SEQ ID NO: 5605736 - DNA, 25 bp, Homo sapien
cttaaccatccattcccaggaagtc

SEQ ID NO: 5605737 - DNA, 25 bp, Homo sapien
ggtcctttgcccgtgctgtcccttc

SEQ ID NO: 5605738 - DNA, 25 bp, Homo sapien
ctcccttccttcctagtaacaccac

SEQ ID NO: 5605739 - DNA, 25 bp, Homo sapien
ggccttagcttaaccatccattccc

SEQ ID NO: 5605740 - DNA, 25 bp, Homo sapien
cccagctgccctcccaatgctttac

SEQ ID NO: 5605741 - DNA, 25 bp, Homo sapien
cccaatgctttacctggcctgtttc

SEQ ID NO: 5605742 - DNA, 25 bp, Homo sapien
cttccagaatattcccagctgccct

SEQ ID NO: 5605743 - DNA, 25 bp, Homo sapien
catcccccgggtcctttgcccgtgc

SEQ ID NO: 5605744 - DNA, 25 bp, Homo sapien
tttgcccgtgctgtcccttcttcca

SEQ ID NO: 5605745 - DNA, 25 bp, Homo sapien
tctctctgggttcctccagagtgcc

SEQ ID NO: 5605746 - DNA, 25 bp, Homo sapien
ctgggttcctccagagtgccaggtt

SEQ ID NO: 5605747 - DNA, 25 bp, Homo sapien
tctgtgcctgaacctggcccttagt

SEQ ID NO: 5605748 - DNA, 25 bp, Homo sapien
gaaatatgtaaatctcgacggcgac

SEQ ID NO: 5605749 - DNA, 25 bp, Homo sapien
tctggcagctcaaggtcctcttttc

SEQ ID NO: 5605750 - DNA, 25 bp, Homo sapien
gaagaaattcataccgtagtgagag

SEQ ID NO: 5605751 - DNA, 25 bp, Homo sapien
cgtagtgagagttgatcttggactt

SEQ ID NO: 5605752 - DNA, 25 bp, Homo sapien
aaggaagattgaactttgcaggcac

SEQ ID NO: 5605753 - DNA, 25 bp, Homo sapien
cctcagacatcaactgttaaggcct

SEQ ID NO: 5605754 - DNA, 25 bp, Homo sapien
ttgcaggcacctcggtaatattctc

SEQ ID NO: 5605755 - DNA, 25 bp, Homo sapien
cgacggcgacatacgcgtgcattaa

SEQ ID NO: 5605756 - DNA, 25 bp, Homo sapien
aaagctaaagcttgtaggtgctcct

SEQ ID NO: 5605757 - DNA, 25 bp, Homo sapien
gcgtgcattaagaccaaatcaaagc

SEQ ID NO: 5605758 - DNA, 25 bp, Homo sapien
gtgatgagggcttcaagaccctatt

SEQ ID NO: 5605759 - DNA, 25 bp, Homo sapien
tggacttctggacaaaaaagtttgc

SEQ ID NO: 5605760 - DNA, 25 bp, Homo sapien
cccatgatgggactagtggcttttt

SEQ ID NO: 5605761 - DNA, 25 bp, Homo sapien
cagcagagacaagtagctacaactg

SEQ ID NO: 5605762 - DNA, 25 bp, Homo sapien
ggttacctctagtgatgagggcttc

SEQ ID NO: 5605763 - DNA, 25 bp, Homo sapien
ttgctgatctcagacatgaaccaca

SEQ ID NO: 5605764 - DNA, 25 bp, Homo sapien
agagatctgaggtagtgcatttgct

SEQ ID NO: 5605765 - DNA, 25 bp, Homo sapien
tacaactgagaccacatgacccaca

SEQ ID NO: 5605766 - DNA, 25 bp, Homo sapien
tgcttttgaggtacagcagcagaga

SEQ ID NO: 5605767 - DNA, 25 bp, Homo sapien
gtcttcagagtagggcccccatgat

SEQ ID NO: 5605768 - DNA, 25 bp, Homo sapien
ggagggatttggtgctgcattataa

SEQ ID NO: 5605769 - DNA, 25 bp, Homo sapien
aatatgtagaacgtagcagtaaggg

SEQ ID NO: 5605770 - DNA, 25 bp, Homo sapien
tcactcactgttccaggcgctgcgg

SEQ ID NO: 5605771 - DNA, 25 bp, Homo sapien
cgctgcggatacagtagtgaagaaa

SEQ ID NO: 5605772 - DNA, 25 bp, Homo sapien
tgggcaattgaagcatgtggctatc

SEQ ID NO: 5605773 - DNA, 25 bp, Homo sapien
tcccatagtgggccattaggagcaa

SEQ ID NO: 5605774 - DNA, 25 bp, Homo sapien
ttcaagtcaaggagacaatgataaa

SEQ ID NO: 5605775 - DNA, 25 bp, Homo sapien
gtgaagaaaatgaactctctgcccc

SEQ ID NO: 5605776 - DNA, 25 bp, Homo sapien
ggagaggtgcacatttaggatcttg

SEQ ID NO: 5605777 - DNA, 25 bp, Homo sapien
aattctttaatcaggagtggggtgg

SEQ ID NO: 5605778 - DNA, 25 bp, Homo sapien
ggagatagtggtgggactattttac

SEQ ID NO: 5605779 - DNA, 25 bp, Homo sapien
ttgtagactatgataagggctttgg

SEQ ID NO: 5605780 - DNA, 25 bp, Homo sapien
gcaggaaaaaacaacaggcatccat

SEQ ID NO: 5605781 - DNA, 25 bp, Homo sapien
tctgtattatgaaaaaggatagaat

SEQ ID NO: 5605782 - DNA, 25 bp, Homo sapien
ttcccccaaatttcccatgccaaga

SEQ ID NO: 5605783 - DNA, 25 bp, Homo sapien
gagccacagaaactatgattgggac

SEQ ID NO: 5605784 - DNA, 25 bp, Homo sapien
cttaaaaagagaaaaatgtctagga

SEQ ID NO: 5605785 - DNA, 25 bp, Homo sapien
aactatgattgggacaggtgttttt

SEQ ID NO: 5605786 - DNA, 25 bp, Homo sapien
ggtgaatgaatgcttggcaggaaaa

SEQ ID NO: 5605787 - DNA, 25 bp, Homo sapien
cagcagtgcttcagaggttttccct

SEQ ID NO: 5605788 - DNA, 25 bp, Homo sapien
agatggtcccatctgagccacagaa

SEQ ID NO: 5605789 - DNA, 25 bp, Homo sapien
tcagctaggcctggacctcacagat

SEQ ID NO: 5605790 - DNA, 25 bp, Homo sapien
tcccaaggaaaatcagaagggtgaa

SEQ ID NO: 5605791 - DNA, 25 bp, Homo sapien
tctagggactaatgaaatctctgtg

SEQ ID NO: 5605792 - DNA, 25 bp, Homo sapien
ggcacaaggtaaattcatagcttag

SEQ ID NO: 5605793 - DNA, 25 bp, Homo sapien
ttggcaaaattgacacaatgaaatt

SEQ ID NO: 5605794 - DNA, 25 bp, Homo sapien
atacacaacattgctcccttgcttc

SEQ ID NO: 5605795 - DNA, 25 bp, Homo sapien
gggggcctatgctctgtgactcttc

SEQ ID NO: 5605796 - DNA, 25 bp, Homo sapien
tctgaatcaaagcctatactcctta

SEQ ID NO: 5605797 - DNA, 25 bp, Homo sapien
catagcttagccaaaaaactaactc

SEQ ID NO: 5605798 - DNA, 25 bp, Homo sapien
aaaatgcaagataatttggcaaaat

SEQ ID NO: 5605799 - DNA, 25 bp, Homo sapien
acagtcacaaaagactgagtgattt

SEQ ID NO: 5605800 - DNA, 25 bp, Homo sapien
atcaggaaacatctagggactaatg

SEQ ID NO: 5605801 - DNA, 25 bp, Homo sapien
gcatttatagcaacatcacatatgt

SEQ ID NO: 5605802 - DNA, 25 bp, Homo sapien
aatagtaaaatggaattgatctgcc

SEQ ID NO: 5605803 - DNA, 25 bp, Homo sapien
gtgtagccagtgtatcgtgtgtgca

SEQ ID NO: 5605804 - DNA, 25 bp, Homo sapien
ctacacaggtgtcatccttggctac

SEQ ID NO: 5605805 - DNA, 25 bp, Homo sapien
agagagagaaggtctatttacaacc

SEQ ID NO: 5605806 - DNA, 25 bp, Homo sapien
gggcaggccttgggtccaattatgt

SEQ ID NO: 5605807 - DNA, 25 bp, Homo sapien
catgcatgcatgcagccatgttatt

SEQ ID NO: 5605808 - DNA, 25 bp, Homo sapien
gagtaagaggagcaaaatcaaatat

SEQ ID NO: 5605809 - DNA, 25 bp, Homo sapien
ttatgttcccaggatccagggtgca

SEQ ID NO: 5605810 - DNA, 25 bp, Homo sapien
tactgcctcagagaagagagtaaga

SEQ ID NO: 5605811 - DNA, 25 bp, Homo sapien
ctgaatgcagaacctctactacaca

SEQ ID NO: 5605812 - DNA, 25 bp, Homo sapien
cattctttggtgtacaatggggcag

SEQ ID NO: 5605813 - DNA, 25 bp, Homo sapien
gattaaaggagatgcttgggtaaac

SEQ ID NO: 5605814 - DNA, 25 bp, Homo sapien
ctgacctcaacctaggggaataaag

SEQ ID NO: 5605815 - DNA, 25 bp, Homo sapien
tcaggtgacttgggcagctatcacc

SEQ ID NO: 5605816 - DNA, 25 bp, Homo sapien
gaagccctcagcttgggagctcatc

SEQ ID NO: 5605817 - DNA, 25 bp, Homo sapien
gcggctgcaccccgtttgccaggat

SEQ ID NO: 5605818 - DNA, 25 bp, Homo sapien
caggcctgcactcttgtggcggctg

SEQ ID NO: 5605819 - DNA, 25 bp, Homo sapien
gtgaattgttgaacaagggaccctg

SEQ ID NO: 5605820 - DNA, 25 bp, Homo sapien
ttccacaccgtcaggtgggaaccat

SEQ ID NO: 5605821 - DNA, 25 bp, Homo sapien
acagcactgagacccctggtgaatt

SEQ ID NO: 5605822 - DNA, 25 bp, Homo sapien
gccatgcatggaagccctcagcttg

SEQ ID NO: 5605823 - DNA, 25 bp, Homo sapien
tgccaggatttgtctgagccctgac

SEQ ID NO: 5605824 - DNA, 25 bp, Homo sapien
gcggagcatttcttaagtagacacc

SEQ ID NO: 5605825 - DNA, 25 bp, Homo sapien
gaaatttgaatgtggtgagtctgaa

SEQ ID NO: 5605826 - DNA, 25 bp, Homo sapien
gggcccacggcatgattaattacag

SEQ ID NO: 5605827 - DNA, 25 bp, Homo sapien
agctaaggatagttaggaatgctaa

SEQ ID NO: 5605828 - DNA, 25 bp, Homo sapien
tgaagagaaatacagctaaggatag

SEQ ID NO: 5605829 - DNA, 25 bp, Homo sapien
ggctgcttcggcaacaaagagcatt

SEQ ID NO: 5605830 - DNA, 25 bp, Homo sapien
aagagcatttcataagcggagcatt

SEQ ID NO: 5605831 - DNA, 25 bp, Homo sapien
acatatgtgcaagtactttgaagag

SEQ ID NO: 5605832 - DNA, 25 bp, Homo sapien
ccatcttaacctgcccgggggctgg

SEQ ID NO: 5605833 - DNA, 25 bp, Homo sapien
gggctttggagcacagatcatcctc

SEQ ID NO: 5605834 - DNA, 25 bp, Homo sapien
gtctgaattagggcccacggcatga

SEQ ID NO: 5605835 - DNA, 25 bp, Homo sapien
aaacataaacaggcttctgtggcat

SEQ ID NO: 5605836 - DNA, 25 bp, Homo sapien
ataacaaaatgcaatagtaatacta

SEQ ID NO: 5605837 - DNA, 25 bp, Homo sapien
ttaggtaacacaggaaactgctttg

SEQ ID NO: 5605838 - DNA, 25 bp, Homo sapien
aggatgatatcaacatttaggtaac

SEQ ID NO: 5605839 - DNA, 25 bp, Homo sapien
gtagagcagtcaagatgctagcttt

SEQ ID NO: 5605840 - DNA, 25 bp, Homo sapien
cagggctagtaatataacaaaatgc

SEQ ID NO: 5605841 - DNA, 25 bp, Homo sapien
tgcaagtctgtagagcagtcaagat

SEQ ID NO: 5605842 - DNA, 25 bp, Homo sapien
ttctgtggcatggtctaggatgata

SEQ ID NO: 5605843 - DNA, 25 bp, Homo sapien
actatcagtgtcaaactcatcagta

SEQ ID NO: 5605844 - DNA, 25 bp, Homo sapien
acagcaggggcttcttacactacat

SEQ ID NO: 5605845 - DNA, 25 bp, Homo sapien
atttatgactagaagggtcgcagat

SEQ ID NO: 5605846 - DNA, 25 bp, Homo sapien
aagaaaacaaaatcatccttcaagt

SEQ ID NO: 5605847 - DNA, 25 bp, Homo sapien
ggctgtcacacgactggcatgccca

SEQ ID NO: 5605848 - DNA, 25 bp, Homo sapien
aacagaagctggtaccccccacttc

SEQ ID NO: 5605849 - DNA, 25 bp, Homo sapien
ccttcaagtaggacacagtaggaac

SEQ ID NO: 5605850 - DNA, 25 bp, Homo sapien
tttggctgtcacacgactggcatgc

SEQ ID NO: 5605851 - DNA, 25 bp, Homo sapien
cttcctaagagctgtaaggagccag

SEQ ID NO: 5605852 - DNA, 25 bp, Homo sapien
acttcatttttggctgtcacacgac

SEQ ID NO: 5605853 - DNA, 25 bp, Homo sapien
atgtcgctactaactgcacagaaca

SEQ ID NO: 5605854 - DNA, 25 bp, Homo sapien
aactgcacagaacaatgtgcaggga

SEQ ID NO: 5605855 - DNA, 25 bp, Homo sapien
cacgactggcatgcccaactgatat

SEQ ID NO: 5605856 - DNA, 25 bp, Homo sapien
gtcagtgtatgtcgctactaactgc

SEQ ID NO: 5605857 - DNA, 25 bp, Homo sapien
gagcggctgagaacttaactcttgg

SEQ ID NO: 5605858 - DNA, 25 bp, Homo sapien
ctggcagctaagactctcagaattc

SEQ ID NO: 5605859 - DNA, 25 bp, Homo sapien
cagaattcaacttcgccaggacagc

SEQ ID NO: 5605860 - DNA, 25 bp, Homo sapien
tcctggttaagagtcaagataagag

SEQ ID NO: 5605861 - DNA, 25 bp, Homo sapien
atacagagtatgaattactaggtac

SEQ ID NO: 5605862 - DNA, 25 bp, Homo sapien
aatgttgttggtcagactatctgct

SEQ ID NO: 5605863 - DNA, 25 bp, Homo sapien
tctcatcataggtcctctgaacacc

SEQ ID NO: 5605864 - DNA, 25 bp, Homo sapien
aacagagttagtgtttagacccttc

SEQ ID NO: 5605865 - DNA, 25 bp, Homo sapien
gccaggacagcaaacaatgttgttg

SEQ ID NO: 5605866 - DNA, 25 bp, Homo sapien
ctggctttcctggcagctaagactc

SEQ ID NO: 5605867 - DNA, 25 bp, Homo sapien
tgaacaccttgctggatacagagta

SEQ ID NO: 5605868 - DNA, 25 bp, Homo sapien
aacaacctattaagtgtcacccagg

SEQ ID NO: 5605869 - DNA, 25 bp, Homo sapien
cctgggtgacacttaataggttgtt

SEQ ID NO: 5605870 - DNA, 25 bp, Homo sapien
aaggctggctgggttcttatagaaa

SEQ ID NO: 5605871 - DNA, 25 bp, Homo sapien
gggcagcgaatttaccgtccaccac

SEQ ID NO: 5605872 - DNA, 25 bp, Homo sapien
agtccatgagtgactgcctggagga

SEQ ID NO: 5605873 - DNA, 25 bp, Homo sapien
atggctcaccatggttctccccact

SEQ ID NO: 5605874 - DNA, 25 bp, Homo sapien
gggagccatctgccaacaaacgtca

SEQ ID NO: 5605875 - DNA, 25 bp, Homo sapien
acacatcagtgcaaaccctatttct

SEQ ID NO: 5605876 - DNA, 25 bp, Homo sapien
ttggggcttgaatgcagcctcggaa

SEQ ID NO: 5605877 - DNA, 25 bp, Homo sapien
gttctcattggggcttgaatgcagc

SEQ ID NO: 5605878 - DNA, 25 bp, Homo sapien
actggccagtccatgagtgactgcc

SEQ ID NO: 5605879 - DNA, 25 bp, Homo sapien
tggctgggttcttatagaaagggcc

SEQ ID NO: 5605880 - DNA, 25 bp, Homo sapien
tccctggatgaagcccaggcagtga

SEQ ID NO: 5605881 - DNA, 25 bp, Homo sapien
aaagcaggttcaacagtagaaagag

SEQ ID NO: 5605882 - DNA, 25 bp, Homo sapien
ctctttctactgttgaacctgcttt

SEQ ID NO: 5605883 - DNA, 25 bp, Homo sapien
cacatcacatgcagaaatggtgttt

SEQ ID NO: 5605884 - DNA, 25 bp, Homo sapien
gagaaaggatcatgagtttaatttt

SEQ ID NO: 5605885 - DNA, 25 bp, Homo sapien
ataagatgcttatattcctgtgggc

SEQ ID NO: 5605886 - DNA, 25 bp, Homo sapien
ctcattgctgagatataagtttctt

SEQ ID NO: 5605887 - DNA, 25 bp, Homo sapien
tacttactggtattagcacacacac

SEQ ID NO: 5605888 - DNA, 25 bp, Homo sapien
gggctgttatctgcaatgtggactc

SEQ ID NO: 5605889 - DNA, 25 bp, Homo sapien
catgggcttgagtttggttagttca

SEQ ID NO: 5605890 - DNA, 25 bp, Homo sapien
atgtggactcaataccatgggcttg

SEQ ID NO: 5605891 - DNA, 25 bp, Homo sapien
actggtattagcacacacacatcac

SEQ ID NO: 5605892 - DNA, 25 bp, Homo sapien
ctgttagagatgggctgttatctgc

SEQ ID NO: 5605893 - DNA, 25 bp, Homo sapien
actttatgagaaaggatcatgagtt

SEQ ID NO: 5605894 - DNA, 25 bp, Homo sapien
tgtgtgaatcacagggctgcgttta

SEQ ID NO: 5605895 - DNA, 25 bp, Homo sapien
tgtctttagcattgaaagacctggg

SEQ ID NO: 5605896 - DNA, 25 bp, Homo sapien
accttccactggggcacagaaaaaa

SEQ ID NO: 5605897 - DNA, 25 bp, Homo sapien
ttctcttctggacgtagggactgaa

SEQ ID NO: 5605898 - DNA, 25 bp, Homo sapien
ctttagcattgaaagacctgggagg

SEQ ID NO: 5605899 - DNA, 25 bp, Homo sapien
agggaacaccttccactggggcaca

SEQ ID NO: 5605900 - DNA, 25 bp, Homo sapien
ttttctcttctggacgtagggactg

SEQ ID NO: 5605901 - DNA, 25 bp, Homo sapien
ggaacaccttccactggggcacaga

SEQ ID NO: 5605902 - DNA, 25 bp, Homo sapien
aatcacagggctgcgtttaaagagg

SEQ ID NO: 5605903 - DNA, 25 bp, Homo sapien
aactcagagataatccattgtcttt

SEQ ID NO: 5605904 - DNA, 25 bp, Homo sapien
gtgaatcacagggctgcgtttaaag

SEQ ID NO: 5605905 - DNA, 25 bp, Homo sapien
cctccgacttgtggtaactcttcgt

SEQ ID NO: 5605906 - DNA, 25 bp, Homo sapien
acgaagagttaccacaagtcggagg

SEQ ID NO: 5605907 - DNA, 25 bp, Homo sapien
ccagttcttgtcaggcaggtggatg

SEQ ID NO: 5605908 - DNA, 25 bp, Homo sapien
acctgctgcaaatgtgagtgtaact

SEQ ID NO: 5605909 - DNA, 25 bp, Homo sapien
ctcatggcgctctactacctgctgc

SEQ ID NO: 5605910 - DNA, 25 bp, Homo sapien
agcaaagctggatatgcagcgtatc

SEQ ID NO: 5605911 - DNA, 25 bp, Homo sapien
ttcttgctgcagcaggtgccaagtg

SEQ ID NO: 5605912 - DNA, 25 bp, Homo sapien
tgagtgtaactgtgcggtctttctc

SEQ ID NO: 5605913 - DNA, 25 bp, Homo sapien
gggtctgacatgtaacagggacatg

SEQ ID NO: 5605914 - DNA, 25 bp, Homo sapien
attctgagattgaacgctacccctc

SEQ ID NO: 5605915 - DNA, 25 bp, Homo sapien
acagggacatgccttgatagcagtt

SEQ ID NO: 5605916 - DNA, 25 bp, Homo sapien
aggaaccttggtgacagagtaattc

SEQ ID NO: 5605917 - DNA, 25 bp, Homo sapien
aaggaagcagaactaagtctagcat

SEQ ID NO: 5605918 - DNA, 25 bp, Homo sapien
tgcaaggaagaagtgttcccaacca

SEQ ID NO: 5605919 - DNA, 25 bp, Homo sapien
ggagcaccatcagtgcaaggaagaa

SEQ ID NO: 5605920 - DNA, 25 bp, Homo sapien
atgaagtgcttggaccctgccaaac

SEQ ID NO: 5605921 - DNA, 25 bp, Homo sapien
tctgacagccaaaggtctccattcc

SEQ ID NO: 5605922 - DNA, 25 bp, Homo sapien
ctgcgcctggcccagatcaccttta

SEQ ID NO: 5605923 - DNA, 25 bp, Homo sapien
agagtgtagcaggccctgacaaatc

SEQ ID NO: 5605924 - DNA, 25 bp, Homo sapien
acaaaccttatctgagccctgctcc

SEQ ID NO: 5605925 - DNA, 25 bp, Homo sapien
agtgatccccctaactcagcgtccc

SEQ ID NO: 5605926 - DNA, 25 bp, Homo sapien
aaactgcaagccctcagagtgtagc

SEQ ID NO: 5605927 - DNA, 25 bp, Homo sapien
cacgtgtcatagaaataggagcacc

SEQ ID NO: 5605928 - DNA, 25 bp, Homo sapien
ctgctgccaagagaattgacctact

SEQ ID NO: 5605929 - DNA, 25 bp, Homo sapien
ttaaagcacacaaaaagcaaggact

SEQ ID NO: 5605930 - DNA, 25 bp, Homo sapien
aatgtcaattctagcctgtcagggc

SEQ ID NO: 5605931 - DNA, 25 bp, Homo sapien
catgccatgtgagacctaccttaaa

SEQ ID NO: 5605932 - DNA, 25 bp, Homo sapien
aataagcaggctaataaatgagaat

SEQ ID NO: 5605933 - DNA, 25 bp, Homo sapien
cagagcaagtgttaaggtgattttc

SEQ ID NO: 5605934 - DNA, 25 bp, Homo sapien
tccagtaggtgtgatggtaaatgat

SEQ ID NO: 5605935 - DNA, 25 bp, Homo sapien
gtgcagaggcctcaaatgccctgct

SEQ ID NO: 5605936 - DNA, 25 bp, Homo sapien
ggaaacagaaggatctaataggaac

SEQ ID NO: 5605937 - DNA, 25 bp, Homo sapien
taccttaaaggatgaacgaagctgg

SEQ ID NO: 5605938 - DNA, 25 bp, Homo sapien
gctgttgatgagccagtcattctag

SEQ ID NO: 5605939 - DNA, 25 bp, Homo sapien
ctaagaaatagctgatggccttggg

SEQ ID NO: 5605940 - DNA, 25 bp, Homo sapien
aggcgaatgcagaaggcctttgctg

SEQ ID NO: 5605941 - DNA, 25 bp, Homo sapien
caggctcagtgctgcggcttttctt

SEQ ID NO: 5605942 - DNA, 25 bp, Homo sapien
tcgcatcaccgaggtagaatagcac

SEQ ID NO: 5605943 - DNA, 25 bp, Homo sapien
tgggtagtctttgggtattcacttg

SEQ ID NO: 5605944 - DNA, 25 bp, Homo sapien
aaactcctgcttggacgcaattgtc

SEQ ID NO: 5605945 - DNA, 25 bp, Homo sapien
cacttggaaacaaggcgaattgatg

SEQ ID NO: 5605946 - DNA, 25 bp, Homo sapien
ctagaaatggggacttccccctagc

SEQ ID NO: 5605947 - DNA, 25 bp, Homo sapien
cccagaacttaatccaggcgaatgc

SEQ ID NO: 5605948 - DNA, 25 bp, Homo sapien
taatatagttcaatgacaggatcca

SEQ ID NO: 5605949 - DNA, 25 bp, Homo sapien
aacatggaactcgacttcggaattt

SEQ ID NO: 5605950 - DNA, 25 bp, Homo sapien
gcaaagcacatcaatcaggctcagt

SEQ ID NO: 5605951 - DNA, 25 bp, Homo sapien
tgccttacaagggcagcagtaagta

SEQ ID NO: 5605952 - DNA, 25 bp, Homo sapien
aatggtatgatactcagcctgatat

SEQ ID NO: 5605953 - DNA, 25 bp, Homo sapien
attgccatgtagaaatgaaggctca

SEQ ID NO: 5605954 - DNA, 25 bp, Homo sapien
tttcatgagacaccagaaatgtttt

SEQ ID NO: 5605955 - DNA, 25 bp, Homo sapien
taaaattagactgtcatggcttagc

SEQ ID NO: 5605956 - DNA, 25 bp, Homo sapien
gcagtaagtaaaatgatcaaaacta

SEQ ID NO: 5605957 - DNA, 25 bp, Homo sapien
aaacaaacatttacagtgaggacta

SEQ ID NO: 5605958 - DNA, 25 bp, Homo sapien
gagaaatgaagaacccatatttgtc

SEQ ID NO: 5605959 - DNA, 25 bp, Homo sapien
ggcttagctagcaagaacgtatctc

SEQ ID NO: 5605960 - DNA, 25 bp, Homo sapien
ttggccatactcgataaacaggaaa

SEQ ID NO: 5605961 - DNA, 25 bp, Homo sapien
aaaatccctatcaagacacagaagt

SEQ ID NO: 5605962 - DNA, 25 bp, Homo sapien
ccagaaacactgaatatcttatcca

SEQ ID NO: 5605963 - DNA, 25 bp, Homo sapien
ctgtaacctagcccttgtacccaac

SEQ ID NO: 5605964 - DNA, 25 bp, Homo sapien
gatatgcaaatggtggaagcaaact

SEQ ID NO: 5605965 - DNA, 25 bp, Homo sapien
agtacgagcatgcaactatgtcatc

SEQ ID NO: 5605966 - DNA, 25 bp, Homo sapien
caaactgtattatgaatgaaagcac

SEQ ID NO: 5605967 - DNA, 25 bp, Homo sapien
acccaacaacatagtacgagcatgc

SEQ ID NO: 5605968 - DNA, 25 bp, Homo sapien
aaatggtggaagcaaactgtattat

SEQ ID NO: 5605969 - DNA, 25 bp, Homo sapien
aacaatgaagtgggatatgcaaatg

SEQ ID NO: 5605970 - DNA, 25 bp, Homo sapien
cacagttctacaatgagtataagtc

SEQ ID NO: 5605971 - DNA, 25 bp, Homo sapien
tagctaacaatgaagtgggatatgc

SEQ ID NO: 5605972 - DNA, 25 bp, Homo sapien
attcgcgtaagtacacacacaccac

SEQ ID NO: 5605973 - DNA, 25 bp, Homo sapien
agaggaagagttcttgggtctcttt

SEQ ID NO: 5605974 - DNA, 25 bp, Homo sapien
catgaatgcactcttgtatacctac

SEQ ID NO: 5605975 - DNA, 25 bp, Homo sapien
tccagaagttactgggaaagccaag

SEQ ID NO: 5605976 - DNA, 25 bp, Homo sapien
ggaagctgtgtgctcaagtgacatc

SEQ ID NO: 5605977 - DNA, 25 bp, Homo sapien
gaaagccaagaggaagagttcttgg

SEQ ID NO: 5605978 - DNA, 25 bp, Homo sapien
tttttctctgctgagcagttaggac

SEQ ID NO: 5605979 - DNA, 25 bp, Homo sapien
atatttgtgtaggcacatgaatgca

SEQ ID NO: 5605980 - DNA, 25 bp, Homo sapien
ccagcctgagcctactttttctcgc

SEQ ID NO: 5605981 - DNA, 25 bp, Homo sapien
ggggtgaagtgactttccaaatgta

SEQ ID NO: 5605982 - DNA, 25 bp, Homo sapien
aatgatgagattcaggtcttggggg

SEQ ID NO: 5605983 - DNA, 25 bp, Homo sapien
tgctcagaacatagcttgaaaatcc

SEQ ID NO: 5605984 - DNA, 25 bp, Homo sapien
atggaactgctcctgtgggtggtaa

SEQ ID NO: 5605985 - DNA, 25 bp, Homo sapien
aactacataatggggagatttattc

SEQ ID NO: 5605986 - DNA, 25 bp, Homo sapien
ttttatcagcaggtttgaatcaaac

SEQ ID NO: 5605987 - DNA, 25 bp, Homo sapien
gcaaatgtattatcagaggaagcac

SEQ ID NO: 5605988 - DNA, 25 bp, Homo sapien
cctgtgggtggtaaacacccctctc

SEQ ID NO: 5605989 - DNA, 25 bp, Homo sapien
gaggaagcactaatctctgtgatga

SEQ ID NO: 5605990 - DNA, 25 bp, Homo sapien
tggcaatcctctgcagaagaaatac

SEQ ID NO: 5605991 - DNA, 25 bp, Homo sapien
tctgtgatgagacatcaaaaggtac

SEQ ID NO: 5605992 - DNA, 25 bp, Homo sapien
tattagcaggatcaagcaaatgtat

SEQ ID NO: 5605993 - DNA, 25 bp, Homo sapien
gaaaggtgagttcttattagcagga

SEQ ID NO: 5605994 - DNA, 25 bp, Homo sapien
aaaaggtacataggtggatcaccaa

SEQ ID NO: 5605995 - DNA, 25 bp, Homo sapien
gggcagggggcagacggtgttcgtc

SEQ ID NO: 5605996 - DNA, 25 bp, Homo sapien
gacgaacaccgtctgccccctgccc

SEQ ID NO: 5605997 - DNA, 25 bp, Homo sapien
ggtgaatagaaaggacagtattgca

SEQ ID NO: 5605998 - DNA, 25 bp, Homo sapien
ttatcaagggacaactagcaaattt

SEQ ID NO: 5605999 - DNA, 25 bp, Homo sapien
aatttcacaagttcatgcacagtct

SEQ ID NO: 5606000 - DNA, 25 bp, Homo sapien
agatattcaggtactactgggatat

SEQ ID NO: 5606001 - DNA, 25 bp, Homo sapien
taaggtatggtaaacatctgtcccc

SEQ ID NO: 5606002 - DNA, 25 bp, Homo sapien
tagaagctgcatatgcgtggtgaat

SEQ ID NO: 5606003 - DNA, 25 bp, Homo sapien
ctgtagatattaaggtatggtaaac

SEQ ID NO: 5606004 - DNA, 25 bp, Homo sapien
acagtatggcacgaaaaaaaagaaa

SEQ ID NO: 5606005 - DNA, 25 bp, Homo sapien
ctatggtctggatgtcaaataggct

SEQ ID NO: 5606006 - DNA, 25 bp, Homo sapien
tgtagaggaagacatctagaataac

SEQ ID NO: 5606007 - DNA, 25 bp, Homo sapien
gaaagaggtatatatcatgaacagt

SEQ ID NO: 5606008 - DNA, 25 bp, Homo sapien
gatgacagagactggaatcctagga

SEQ ID NO: 5606009 - DNA, 25 bp, Homo sapien
agatttaaaatataggtggggactc

SEQ ID NO: 5606010 - DNA, 25 bp, Homo sapien
caagcctgagaatctgcctgaaaca

SEQ ID NO: 5606011 - DNA, 25 bp, Homo sapien
ctgggagctgaaaagcccccagtca

SEQ ID NO: 5606012 - DNA, 25 bp, Homo sapien
gagaaagctaaacagcagaagtgtc

SEQ ID NO: 5606013 - DNA, 25 bp, Homo sapien
agccagatccagcctcttgtaaccc

SEQ ID NO: 5606014 - DNA, 25 bp, Homo sapien
agtaatgacttttgatgacagagac

SEQ ID NO: 5606015 - DNA, 25 bp, Homo sapien
gtgctcccaggaatcctgcaatgct

SEQ ID NO: 5606016 - DNA, 25 bp, Homo sapien
aggcactgacctccgagtctgtaga

SEQ ID NO: 5606017 - DNA, 25 bp, Homo sapien
ctccgagtctgtagagttcccaggg

SEQ ID NO: 5606018 - DNA, 25 bp, Homo sapien
ttctgaggagctcaagcctgagaat

SEQ ID NO: 5606019 - DNA, 25 bp, Homo sapien
ctgaaaccccatgagggccatgtta

SEQ ID NO: 5606020 - DNA, 25 bp, Homo sapien
tggagcagaaactgttgggcatttt

SEQ ID NO: 5606021 - DNA, 25 bp, Homo sapien
ccatgttagttcctggccagctttc

SEQ ID NO: 5606022 - DNA, 25 bp, Homo sapien
cttcaggaattgctttggccggaag

SEQ ID NO: 5606023 - DNA, 25 bp, Homo sapien
tttcagagcagctgtaagacattgc

SEQ ID NO: 5606024 - DNA, 25 bp, Homo sapien
cctgagaaaaagcagcctttgtgaa

SEQ ID NO: 5606025 - DNA, 25 bp, Homo sapien
ggagccatttgccccaaagtggagc

SEQ ID NO: 5606026 - DNA, 25 bp, Homo sapien
tcatgagctgtgtcacatagagggc

SEQ ID NO: 5606027 - DNA, 25 bp, Homo sapien
gcagcctttgtgaattgggagccat

SEQ ID NO: 5606028 - DNA, 25 bp, Homo sapien
tcttagcagtcgaaccagctttctc

SEQ ID NO: 5606029 - DNA, 25 bp, Homo sapien
agaagacgaagaaagctacatcgaa

SEQ ID NO: 5606030 - DNA, 25 bp, Homo sapien
gaatgaacaaacacatgaataaaac

SEQ ID NO: 5606031 - DNA, 25 bp, Homo sapien
ttaatagttgatgttgttaaatctt

SEQ ID NO: 5606032 - DNA, 25 bp, Homo sapien
acacatgaataaaacaagagagggc

SEQ ID NO: 5606033 - DNA, 25 bp, Homo sapien
cttgggtagataaggtacttaaaga

SEQ ID NO: 5606034 - DNA, 25 bp, Homo sapien
agataaggtacttaaagaaaatgta

SEQ ID NO: 5606035 - DNA, 25 bp, Homo sapien
tagtcatgcagtatttatgagaatg

SEQ ID NO: 5606036 - DNA, 25 bp, Homo sapien
actcttacttgggtagataaggtac

SEQ ID NO: 5606037 - DNA, 25 bp, Homo sapien
gatcatatctcattgtcgtaaattc

SEQ ID NO: 5606038 - DNA, 25 bp, Homo sapien
tgtttaagggtgttcataaatgagt

SEQ ID NO: 5606039 - DNA, 25 bp, Homo sapien
atgggacaaaggtgatcatatctca

SEQ ID NO: 5606040 - DNA, 25 bp, Homo sapien
gcagtatttatgagaatgttgactc

SEQ ID NO: 5606041 - DNA, 25 bp, Homo sapien
catttttgcccggggagctatcagc

SEQ ID NO: 5606042 - DNA, 25 bp, Homo sapien
gagcaaaagacagacgccaatactc

SEQ ID NO: 5606043 - DNA, 25 bp, Homo sapien
gtggacttctgaagagtcgtgatcc

SEQ ID NO: 5606044 - DNA, 25 bp, Homo sapien
acattttgccggtttcgtgggcgcg

SEQ ID NO: 5606045 - DNA, 25 bp, Homo sapien
agagatactgcagttgggacatttt

SEQ ID NO: 5606046 - DNA, 25 bp, Homo sapien
atggactattccacagagatgaaaa

SEQ ID NO: 5606047 - DNA, 25 bp, Homo sapien
atatgatagctaggtcagtccacgg

SEQ ID NO: 5606048 - DNA, 25 bp, Homo sapien
tgatacagatatgatagctaggtca

SEQ ID NO: 5606049 - DNA, 25 bp, Homo sapien
tacatacacagagatagattaatac

SEQ ID NO: 5606050 - DNA, 25 bp, Homo sapien
accatattgagcaaaagacagacgc

SEQ ID NO: 5606051 - DNA, 25 bp, Homo sapien
gaagagtcgtgatccgtgtgacttc

SEQ ID NO: 5606052 - DNA, 25 bp, Homo sapien
taagttgagcctatgggaatgaatc

SEQ ID NO: 5606053 - DNA, 25 bp, Homo sapien
ggaatgaatcccacagtgacacaaa

SEQ ID NO: 5606054 - DNA, 25 bp, Homo sapien
gcattgaaaaacgttgtacaaactc

SEQ ID NO: 5606055 - DNA, 25 bp, Homo sapien
tgccctccagatcagtcagctttca

SEQ ID NO: 5606056 - DNA, 25 bp, Homo sapien
accagaggccagccactacaacctt

SEQ ID NO: 5606057 - DNA, 25 bp, Homo sapien
ggggaactacaacctctggtcacca

SEQ ID NO: 5606058 - DNA, 25 bp, Homo sapien
caagaagtgaaactgctaggtcaaa

SEQ ID NO: 5606059 - DNA, 25 bp, Homo sapien
cacaaacatgattcactgggggaac

SEQ ID NO: 5606060 - DNA, 25 bp, Homo sapien
gagcagggtttaggaatctaagttg

SEQ ID NO: 5606061 - DNA, 25 bp, Homo sapien
ctgctaggtcaaaagaaaagacaat

SEQ ID NO: 5606062 - DNA, 25 bp, Homo sapien
atgcaggaaacagaagccattatag

SEQ ID NO: 5606063 - DNA, 25 bp, Homo sapien
aggaaaagaacttaattacatacat

SEQ ID NO: 5606064 - DNA, 25 bp, Homo sapien
catggatccacaacatacatcctcc

SEQ ID NO: 5606065 - DNA, 25 bp, Homo sapien
ttgcagagctctaagttatgccaac

SEQ ID NO: 5606066 - DNA, 25 bp, Homo sapien
attttgtagaaattgcagagctcta

SEQ ID NO: 5606067 - DNA, 25 bp, Homo sapien
ggacagcgagatcttgggtcctttc

SEQ ID NO: 5606068 - DNA, 25 bp, Homo sapien
gacttggggtacattggatgactta

SEQ ID NO: 5606069 - DNA, 25 bp, Homo sapien
ttgacttcaaagacttggggtacat

SEQ ID NO: 5606070 - DNA, 25 bp, Homo sapien
acatgttggccatacaaccatgtac

SEQ ID NO: 5606071 - DNA, 25 bp, Homo sapien
gcctatgaaacctggattcaccacc

SEQ ID NO: 5606072 - DNA, 25 bp, Homo sapien
tctcccaagctggattatcaccaat

SEQ ID NO: 5606073 - DNA, 25 bp, Homo sapien
cctccacatgagcctatgaaacctg

SEQ ID NO: 5606074 - DNA, 25 bp, Homo sapien
cgggtccactctggagactaaacac

SEQ ID NO: 5606075 - DNA, 25 bp, Homo sapien
gtgtttagtctccagagtggacccg

SEQ ID NO: 5606076 - DNA, 25 bp, Homo sapien
tgggcaacatggcaaaaccacatct

SEQ ID NO: 5606077 - DNA, 25 bp, Homo sapien
tgtattcagaactcaaatttgtcct

SEQ ID NO: 5606078 - DNA, 25 bp, Homo sapien
tggagctggccattatttgcaaaaa

SEQ ID NO: 5606079 - DNA, 25 bp, Homo sapien
atacaaaaacaaagtgaggagaatc

SEQ ID NO: 5606080 - DNA, 25 bp, Homo sapien
tgcaaaaacactatttgtatgaaaa

SEQ ID NO: 5606081 - DNA, 25 bp, Homo sapien
gaaatattttaggcatggctgggcg

SEQ ID NO: 5606082 - DNA, 25 bp, Homo sapien
acaaaatacaaaaacaaagtgagga

SEQ ID NO: 5606083 - DNA, 25 bp, Homo sapien
attgaaagtggtaattagaaatatt

SEQ ID NO: 5606084 - DNA, 25 bp, Homo sapien
ggagttcgagcccagcctgggcaac

SEQ ID NO: 5606085 - DNA, 25 bp, Homo sapien
agtggctcacacctataatcacagc

SEQ ID NO: 5606086 - DNA, 25 bp, Homo sapien
tgtatgaaaattgtattcagaactc

SEQ ID NO: 5606087 - DNA, 25 bp, Homo sapien
tattaggctgtttttgaccattatc

SEQ ID NO: 5606088 - DNA, 25 bp, Homo sapien
aataacccaggactctccactctgg

SEQ ID NO: 5606089 - DNA, 25 bp, Homo sapien
cttggcatcttgtaatgctttggtg

SEQ ID NO: 5606090 - DNA, 25 bp, Homo sapien
ccagccagtgctgcaaaaaatccag

SEQ ID NO: 5606091 - DNA, 25 bp, Homo sapien
aaattcctcaacggcagtatccacc

SEQ ID NO: 5606092 - DNA, 25 bp, Homo sapien
agaaaggcatcaaaaattcctcaac

SEQ ID NO: 5606093 - DNA, 25 bp, Homo sapien
gggcactgtgtgttattaggctgtt

SEQ ID NO: 5606094 - DNA, 25 bp, Homo sapien
aagaaagctagagcacaaggaattt

SEQ ID NO: 5606095 - DNA, 25 bp, Homo sapien
ctgattccagccagtgctgcaaaaa

SEQ ID NO: 5606096 - DNA, 25 bp, Homo sapien
tgcaaaaaatccagggtgacagtgg

SEQ ID NO: 5606097 - DNA, 25 bp, Homo sapien
gagcatgcacatgggcactgtgtgt

SEQ ID NO: 5606098 - DNA, 25 bp, Homo sapien
tccagcaggcatttctcccggccat

SEQ ID NO: 5606099 - DNA, 25 bp, Homo sapien
cccggccatgagatcttgctgcggt

SEQ ID NO: 5606100 - DNA, 25 bp, Homo sapien
catgcctttgtgtgggtacttcagc

SEQ ID NO: 5606101 - DNA, 25 bp, Homo sapien
cctatgaaaacccagcagagtctac

SEQ ID NO: 5606102 - DNA, 25 bp, Homo sapien
ccgtgttgatctttgcgcagaacgc

SEQ ID NO: 5606103 - DNA, 25 bp, Homo sapien
agttcagctgaaattccacctcctc

SEQ ID NO: 5606104 - DNA, 25 bp, Homo sapien
aagataaggaccaaaaaacagaata

SEQ ID NO: 5606105 - DNA, 25 bp, Homo sapien
gcaggttaccttcagttatggagtc

SEQ ID NO: 5606106 - DNA, 25 bp, Homo sapien
ctgccttatagtagacatgccgtgt

SEQ ID NO: 5606107 - DNA, 25 bp, Homo sapien
gcagagtctacggaaggtttagttc

SEQ ID NO: 5606108 - DNA, 25 bp, Homo sapien
cgcccaccagcccccaaccaattga

SEQ ID NO: 5606109 - DNA, 25 bp, Homo sapien
ttgattgaatttactgaaaggtgta

SEQ ID NO: 5606110 - DNA, 25 bp, Homo sapien
cacgagccaccttgtccggcccatt

SEQ ID NO: 5606111 - DNA, 25 bp, Homo sapien
gggattataggcacgagccaccttg

SEQ ID NO: 5606112 - DNA, 25 bp, Homo sapien
tgccctggtttcccagagtgctggg

SEQ ID NO: 5606113 - DNA, 25 bp, Homo sapien
tgaataataaaaatttgggcttgta

SEQ ID NO: 5606114 - DNA, 25 bp, Homo sapien
aatgtgaagtctgtcaagttgaata

SEQ ID NO: 5606115 - DNA, 25 bp, Homo sapien
gctcaagcgatccaactgccctggt

SEQ ID NO: 5606116 - DNA, 25 bp, Homo sapien
actgaaaggtgtaatgtgaagtctg

SEQ ID NO: 5606117 - DNA, 25 bp, Homo sapien
aacctcagcatcctgagtagctggg

SEQ ID NO: 5606118 - DNA, 25 bp, Homo sapien
gttacccaggctggacttcagtggc

SEQ ID NO: 5606119 - DNA, 25 bp, Homo sapien
gggctccagtgatccccccaacctc

SEQ ID NO: 5606120 - DNA, 25 bp, Homo sapien
ttcttctagaaacgatattgttatt

SEQ ID NO: 5606121 - DNA, 25 bp, Homo sapien
aataacaatatcgtttctagaagaa

SEQ ID NO: 5606122 - DNA, 25 bp, Homo sapien
gaagacaagtagaaaactgcagcaa

SEQ ID NO: 5606123 - DNA, 25 bp, Homo sapien
gaaatgacccacaaaaggtgaaggc

SEQ ID NO: 5606124 - DNA, 25 bp, Homo sapien
gctcactaagtagacaactgggaga

SEQ ID NO: 5606125 - DNA, 25 bp, Homo sapien
aagagaaaagaatctaaacacagac

SEQ ID NO: 5606126 - DNA, 25 bp, Homo sapien
tgcagcaaaacagaacaacagaaca

SEQ ID NO: 5606127 - DNA, 25 bp, Homo sapien
acagactgatgcaattaaagaagac

SEQ ID NO: 5606128 - DNA, 25 bp, Homo sapien
cacatgccagcattgcactaggtac

SEQ ID NO: 5606129 - DNA, 25 bp, Homo sapien
ctgtattaaacgctgcacatgccag

SEQ ID NO: 5606130 - DNA, 25 bp, Homo sapien
aacaacagaacacagtggattgggg

SEQ ID NO: 5606131 - DNA, 25 bp, Homo sapien
gacacacagacaagactgcaggaag

SEQ ID NO: 5606132 - DNA, 25 bp, Homo sapien
ggtactggaaacacaagataagctc

SEQ ID NO: 5606133 - DNA, 25 bp, Homo sapien
gacctcagacacatccaacgaaaca

SEQ ID NO: 5606134 - DNA, 25 bp, Homo sapien
gacacatccaacgaaacacagactc

SEQ ID NO: 5606135 - DNA, 25 bp, Homo sapien
caaccaagcctgttccgcacagctg

SEQ ID NO: 5606136 - DNA, 25 bp, Homo sapien
aggccaggcactcccaaccaagcct

SEQ ID NO: 5606137 - DNA, 25 bp, Homo sapien
gagacagcataacccagctggcagc

SEQ ID NO: 5606138 - DNA, 25 bp, Homo sapien
tgctgcccagagaatctggtttccc

SEQ ID NO: 5606139 - DNA, 25 bp, Homo sapien
gcccagccagatcctggcctcactg

SEQ ID NO: 5606140 - DNA, 25 bp, Homo sapien
agacaccatttaccactgctgccca

SEQ ID NO: 5606141 - DNA, 25 bp, Homo sapien
acgaaacacagactcagacaccatt

SEQ ID NO: 5606142 - DNA, 25 bp, Homo sapien
cactgcagatagctttggagacagc

SEQ ID NO: 5606143 - DNA, 25 bp, Homo sapien
agctttggagacagcataacccagc

SEQ ID NO: 5606144 - DNA, 25 bp, Homo sapien
atgctctagagtcattggtaggctc

SEQ ID NO: 5606145 - DNA, 25 bp, Homo sapien
taaacctcaggaatctgtgaacctc

SEQ ID NO: 5606146 - DNA, 25 bp, Homo sapien
acagattaaggaacagtactagacg

SEQ ID NO: 5606147 - DNA, 25 bp, Homo sapien
tgtgaacctcatgaaacctcctacc

SEQ ID NO: 5606148 - DNA, 25 bp, Homo sapien
cataggctttgaatttagggtgctt

SEQ ID NO: 5606149 - DNA, 25 bp, Homo sapien
ttagggtgcttggataaacctcagg

SEQ ID NO: 5606150 - DNA, 25 bp, Homo sapien
aagagggtgcatctacataggcttt

SEQ ID NO: 5606151 - DNA, 25 bp, Homo sapien
gctagaaggtaactggttgacaaga

SEQ ID NO: 5606152 - DNA, 25 bp, Homo sapien
tagacgaaagttggatagaattgat

SEQ ID NO: 5606153 - DNA, 25 bp, Homo sapien
catggtgatcagatgctctagagtc

SEQ ID NO: 5606154 - DNA, 25 bp, Homo sapien
atagaattgatcagtggcatggtga

SEQ ID NO: 5606155 - DNA, 25 bp, Homo sapien
tctccatagttgagtgagtccggtg

SEQ ID NO: 5606156 - DNA, 25 bp, Homo sapien
tctcgcttacaggccaaagagtttt

SEQ ID NO: 5606157 - DNA, 25 bp, Homo sapien
aaagagttttattgtgcatggcctg

SEQ ID NO: 5606158 - DNA, 25 bp, Homo sapien
aactctaactgccaaagcgaagacc

SEQ ID NO: 5606159 - DNA, 25 bp, Homo sapien
tgagtccggtgcaacctgtgtcata

SEQ ID NO: 5606160 - DNA, 25 bp, Homo sapien
gcatggcctgtcaagcatagagttg

SEQ ID NO: 5606161 - DNA, 25 bp, Homo sapien
cagtggcttagctggtgcccagtta

SEQ ID NO: 5606162 - DNA, 25 bp, Homo sapien
ggtgtttgaagaattccagaactga

SEQ ID NO: 5606163 - DNA, 25 bp, Homo sapien
atcattttggcaacccatgaggcag

SEQ ID NO: 5606164 - DNA, 25 bp, Homo sapien
ttgtccatttaggcagcacagtggc

SEQ ID NO: 5606165 - DNA, 25 bp, Homo sapien
agaactgagaagtggttgtccattt

SEQ ID NO: 5606166 - DNA, 25 bp, Homo sapien
ccaaagaagtcttgctccatagagc

SEQ ID NO: 5606167 - DNA, 25 bp, Homo sapien
taactgaacagttgtagtagggatc

SEQ ID NO: 5606168 - DNA, 25 bp, Homo sapien
cttaagcaccaaagaagtcttgctc

SEQ ID NO: 5606169 - DNA, 25 bp, Homo sapien
gctccagatgcattctgtgtggtgg

SEQ ID NO: 5606170 - DNA, 25 bp, Homo sapien
gctgggccatatgtgcattgcctat

SEQ ID NO: 5606171 - DNA, 25 bp, Homo sapien
tggattagaatttcagcaaggaatt

SEQ ID NO: 5606172 - DNA, 25 bp, Homo sapien
tgctccatagagctggattagaatt

SEQ ID NO: 5606173 - DNA, 25 bp, Homo sapien
ccagcccatcagactgttcttaagc

SEQ ID NO: 5606174 - DNA, 25 bp, Homo sapien
gttgtagtagggatcattttaagag

SEQ ID NO: 5606175 - DNA, 25 bp, Homo sapien
ttcagcaaggaattttagattattt

SEQ ID NO: 5606176 - DNA, 25 bp, Homo sapien
aaaatcaagggattaagttagttga

SEQ ID NO: 5606177 - DNA, 25 bp, Homo sapien
cttacatccaagaatgagcatttat

SEQ ID NO: 5606178 - DNA, 25 bp, Homo sapien
aaattgcaacagtgtggttttttaa

SEQ ID NO: 5606179 - DNA, 25 bp, Homo sapien
accggagatttaagtgggctaggta

SEQ ID NO: 5606180 - DNA, 25 bp, Homo sapien
aaatagcacagtttatccttgaaag

SEQ ID NO: 5606181 - DNA, 25 bp, Homo sapien
ttatcagattatttacacatgtttc

SEQ ID NO: 5606182 - DNA, 25 bp, Homo sapien
aggttacaattaagattatgaaggt

SEQ ID NO: 5606183 - DNA, 25 bp, Homo sapien
ataataaccggagatttaagtgggc

SEQ ID NO: 5606184 - DNA, 25 bp, Homo sapien
gagatttaagtgggctaggtattac

SEQ ID NO: 5606185 - DNA, 25 bp, Homo sapien
aaaatcagttgttaatatccaggaa

SEQ ID NO: 5606186 - DNA, 25 bp, Homo sapien
aagtgggctaggtattactgtcctt

SEQ ID NO: 5606187 - DNA, 25 bp, Homo sapien
ttatccttgaaagaaaatcagttgt

SEQ ID NO: 5606188 - DNA, 25 bp, Homo sapien
aattaaagacagctggaaaacctgt

SEQ ID NO: 5606189 - DNA, 25 bp, Homo sapien
aagacagctggaaaacctgtaaaac

SEQ ID NO: 5606190 - DNA, 25 bp, Homo sapien
aagaatatcctaacacgtacagtac

SEQ ID NO: 5606191 - DNA, 25 bp, Homo sapien
tcaaagaaactgctagtgttatgag

SEQ ID NO: 5606192 - DNA, 25 bp, Homo sapien
tctcatcccatttcccaaccaccaa

SEQ ID NO: 5606193 - DNA, 25 bp, Homo sapien
aactaagacaaatttattcagcacc

SEQ ID NO: 5606194 - DNA, 25 bp, Homo sapien
gtctaaatttcaggaggaacgcctc

SEQ ID NO: 5606195 - DNA, 25 bp, Homo sapien
tgctagtgttatgagaaagagaaga

SEQ ID NO: 5606196 - DNA, 25 bp, Homo sapien
tcaggaggaacgcctctgtttttcc

SEQ ID NO: 5606197 - DNA, 25 bp, Homo sapien
aagtagtctaaatttcaggaggaac

SEQ ID NO: 5606198 - DNA, 25 bp, Homo sapien
ctgttcttgttaagaggctgctctc

SEQ ID NO: 5606199 - DNA, 25 bp, Homo sapien
ctcaggaggataaaggtcctcaggg

SEQ ID NO: 5606200 - DNA, 25 bp, Homo sapien
ttgggacccactctttagaggccac

SEQ ID NO: 5606201 - DNA, 25 bp, Homo sapien
tctgccgccgcatcttccgccattc

SEQ ID NO: 5606202 - DNA, 25 bp, Homo sapien
cccaccgggtgctttagacactcct

SEQ ID NO: 5606203 - DNA, 25 bp, Homo sapien
gagctcctaaggcctataggggtcc

SEQ ID NO: 5606204 - DNA, 25 bp, Homo sapien
cttcatgaccttgggacccactctt

SEQ ID NO: 5606205 - DNA, 25 bp, Homo sapien
attcatggctcaggaggataaaggt

SEQ ID NO: 5606206 - DNA, 25 bp, Homo sapien
gacactcctgagggacattcatggc

SEQ ID NO: 5606207 - DNA, 25 bp, Homo sapien
tctttagaggccacgtgcgtttcca

SEQ ID NO: 5606208 - DNA, 25 bp, Homo sapien
cccctgccccaccgggtgctttaga

SEQ ID NO: 5606209 - DNA, 25 bp, Homo sapien
gcgttttactgaccactaattggcc

SEQ ID NO: 5606210 - DNA, 25 bp, Homo sapien
agccgcggaaggtctttccgcactc

SEQ ID NO: 5606211 - DNA, 25 bp, Homo sapien
gctcaggttcgagcgctggttgaaa

SEQ ID NO: 5606212 - DNA, 25 bp, Homo sapien
gaaggccttttcgcacagtgggcac

SEQ ID NO: 5606213 - DNA, 25 bp, Homo sapien
aggtctttccgcactcggagcagcc

SEQ ID NO: 5606214 - DNA, 25 bp, Homo sapien
attgtagggcttctcgcccgagtgc

SEQ ID NO: 5606215 - DNA, 25 bp, Homo sapien
ggaaggtctttccgcactcggagca

SEQ ID NO: 5606216 - DNA, 25 bp, Homo sapien
tttccgcactcggagcagccatagg

SEQ ID NO: 5606217 - DNA, 25 bp, Homo sapien
cagccgcggaaggtctttccgcact

SEQ ID NO: 5606218 - DNA, 25 bp, Homo sapien
ttgaaggccttttcgcacagtgggc

SEQ ID NO: 5606219 - DNA, 25 bp, Homo sapien
gtctttccgcactcggagcagccat

SEQ ID NO: 5606220 - DNA, 25 bp, Homo sapien
gtagggcttctcgcccgagtgcagg

SEQ ID NO: 5606221 - DNA, 25 bp, Homo sapien
agtggtgcgagatccagaattctta

SEQ ID NO: 5606222 - DNA, 25 bp, Homo sapien
tagtctggaatcattggagaacaag

SEQ ID NO: 5606223 - DNA, 25 bp, Homo sapien
ggtttgtgtgactgggaattattac

SEQ ID NO: 5606224 - DNA, 25 bp, Homo sapien
tttcagcacactgtctggcattccc

SEQ ID NO: 5606225 - DNA, 25 bp, Homo sapien
atatatgtggggtatgtgttaaata

SEQ ID NO: 5606226 - DNA, 25 bp, Homo sapien
caagtttggcctataggaaggatta

SEQ ID NO: 5606227 - DNA, 25 bp, Homo sapien
gaggaaaataagcacaagactagta

SEQ ID NO: 5606228 - DNA, 25 bp, Homo sapien
aatacttttgatggagagtggtgcg

SEQ ID NO: 5606229 - DNA, 25 bp, Homo sapien
aagcacaagactagtaagaagactt

SEQ ID NO: 5606230 - DNA, 25 bp, Homo sapien
agagaatgtatgggtttgtgtgact

SEQ ID NO: 5606231 - DNA, 25 bp, Homo sapien
ataagtgttctaatagtctggaatc

SEQ ID NO: 5606232 - DNA, 25 bp, Homo sapien
aaaaggctctcagtatcgggctcaa

SEQ ID NO: 5606233 - DNA, 25 bp, Homo sapien
ggctcaagggcttgtgcccacatct

SEQ ID NO: 5606234 - DNA, 25 bp, Homo sapien
gaaaaggaaaccatagaaagagaca

SEQ ID NO: 5606235 - DNA, 25 bp, Homo sapien
cacgcaatgccagatatgattcgac

SEQ ID NO: 5606236 - DNA, 25 bp, Homo sapien
tgaagagtcgtgacaccatttcctc

SEQ ID NO: 5606237 - DNA, 25 bp, Homo sapien
atctagcccgttggtttggcagatg

SEQ ID NO: 5606238 - DNA, 25 bp, Homo sapien
aactgacaaactagggtgtttccga

SEQ ID NO: 5606239 - DNA, 25 bp, Homo sapien
ttggcagatgaaatcaactaggctt

SEQ ID NO: 5606240 - DNA, 25 bp, Homo sapien
atgcagggaaatagatgtcccccac

SEQ ID NO: 5606241 - DNA, 25 bp, Homo sapien
tgcccacatctgagcatgcagggaa

SEQ ID NO: 5606242 - DNA, 25 bp, Homo sapien
cactggctgcacatgtgagtgactg

SEQ ID NO: 5606243 - DNA, 25 bp, Homo sapien
ctatgttggggttactagagttgtg

SEQ ID NO: 5606244 - DNA, 25 bp, Homo sapien
aaaaaggcagtagctaggttctgag

SEQ ID NO: 5606245 - DNA, 25 bp, Homo sapien
ttagatgccctaaaaaggcagtagc

SEQ ID NO: 5606246 - DNA, 25 bp, Homo sapien
tggacagctggagatccccaattag

SEQ ID NO: 5606247 - DNA, 25 bp, Homo sapien
ctgagaaggtaagttttaaatatga

SEQ ID NO: 5606248 - DNA, 25 bp, Homo sapien
tcctcctaaggaaaggataacagtg

SEQ ID NO: 5606249 - DNA, 25 bp, Homo sapien
tctgaggcagctagaataatctcta

SEQ ID NO: 5606250 - DNA, 25 bp, Homo sapien
cttctgtgagtactatgttggggtt

SEQ ID NO: 5606251 - DNA, 25 bp, Homo sapien
aaggataacagtgagcacagcttca

SEQ ID NO: 5606252 - DNA, 25 bp, Homo sapien
gtctctgggtccgagttaagtttga

SEQ ID NO: 5606253 - DNA, 25 bp, Homo sapien
aaatatgaaggccccaattctagtt

SEQ ID NO: 5606254 - DNA, 25 bp, Homo sapien
tagggattatgcaagtgcatgaaca

SEQ ID NO: 5606255 - DNA, 25 bp, Homo sapien
cagagccctggaggcttcaaacaga

SEQ ID NO: 5606256 - DNA, 25 bp, Homo sapien
acagaaaagctttagagtaatttca

SEQ ID NO: 5606257 - DNA, 25 bp, Homo sapien
gcaataccatggagagcatcaagtg

SEQ ID NO: 5606258 - DNA, 25 bp, Homo sapien
cattgagatcaccgtcttagaggct

SEQ ID NO: 5606259 - DNA, 25 bp, Homo sapien
actcaaggatagggattatgcaagt

SEQ ID NO: 5606260 - DNA, 25 bp, Homo sapien
aagcctctcctaactaccagcccac

SEQ ID NO: 5606261 - DNA, 25 bp, Homo sapien
gcatcaagtgccagcacccagggaa

SEQ ID NO: 5606262 - DNA, 25 bp, Homo sapien
ctttatattggctactgggaaggtt

SEQ ID NO: 5606263 - DNA, 25 bp, Homo sapien
aaattgagcaataccatggagagca

SEQ ID NO: 5606264 - DNA, 25 bp, Homo sapien
ggaggcatggctcattgagatcacc

SEQ ID NO: 5606265 - DNA, 25 bp, Homo sapien
tggagggccttgacacgccgggagt

SEQ ID NO: 5606266 - DNA, 25 bp, Homo sapien
actcccggcgtgtcaaggccctcca

SEQ ID NO: 5606267 - DNA, 25 bp, Homo sapien
gcagacacaaggctcaccgtgaaga

SEQ ID NO: 5606268 - DNA, 25 bp, Homo sapien
acaagcagtgtatagctgagtgagc

SEQ ID NO: 5606269 - DNA, 25 bp, Homo sapien
ggcacccttgaaagagctgtcacga

SEQ ID NO: 5606270 - DNA, 25 bp, Homo sapien
aaaaggaatcagtacagtgaaatgc

SEQ ID NO: 5606271 - DNA, 25 bp, Homo sapien
gggtgctgcaaagaagtttccacct

SEQ ID NO: 5606272 - DNA, 25 bp, Homo sapien
atcagtacagtgaaatgctgggtgc

SEQ ID NO: 5606273 - DNA, 25 bp, Homo sapien
tccatttcgtaccacccaaggctcc

SEQ ID NO: 5606274 - DNA, 25 bp, Homo sapien
aggtggtgatccaaaaaaaggaatc

SEQ ID NO: 5606275 - DNA, 25 bp, Homo sapien
gtcacgaaaactctagctttgagca

SEQ ID NO: 5606276 - DNA, 25 bp, Homo sapien
caaggctccaagtgggcacccttga

SEQ ID NO: 5606277 - DNA, 25 bp, Homo sapien
cagtagttatgaacaagcagtgtat

SEQ ID NO: 5606278 - DNA, 25 bp, Homo sapien
gttttgtttctggcgccccgcaggc

SEQ ID NO: 5606279 - DNA, 25 bp, Homo sapien
cctgcgggccttgtggcattatgag

SEQ ID NO: 5606280 - DNA, 25 bp, Homo sapien
aatacttccgagaatggaaaagccc

SEQ ID NO: 5606281 - DNA, 25 bp, Homo sapien
gtgctctgacaccccaacaggagac

SEQ ID NO: 5606282 - DNA, 25 bp, Homo sapien
ttggagaattaggactgcctggtat

SEQ ID NO: 5606283 - DNA, 25 bp, Homo sapien
gccctgtccgtgtccatcgatggtc

SEQ ID NO: 5606284 - DNA, 25 bp, Homo sapien
gccagcatctctaagcaggacacct

SEQ ID NO: 5606285 - DNA, 25 bp, Homo sapien
cctggtatttctgtcacgggcgtgg

SEQ ID NO: 5606286 - DNA, 25 bp, Homo sapien
caggacacctggcagtgaatacttc

SEQ ID NO: 5606287 - DNA, 25 bp, Homo sapien
agggtgacccttgccagcatctcta

SEQ ID NO: 5606288 - DNA, 25 bp, Homo sapien
gcaggccccgcagtttattcttagc

SEQ ID NO: 5606289 - DNA, 25 bp, Homo sapien
aagaaggaacaagttatactttaga

SEQ ID NO: 5606290 - DNA, 25 bp, Homo sapien
tctaaagtataacttgttccttctt

SEQ ID NO: 5606291 - DNA, 25 bp, Homo sapien
ggagggactatgtgctagtcagctt

SEQ ID NO: 5606292 - DNA, 25 bp, Homo sapien
cagctttagactgagaagcagcagc

SEQ ID NO: 5606293 - DNA, 25 bp, Homo sapien
gttattcgtcaggcagtggctctta

SEQ ID NO: 5606294 - DNA, 25 bp, Homo sapien
gaagcaaactttcctgagtggcctt

SEQ ID NO: 5606295 - DNA, 25 bp, Homo sapien
aaacaggggcttcaagcagtgattt

SEQ ID NO: 5606296 - DNA, 25 bp, Homo sapien
gacagcgggcatttggatgcctgat

SEQ ID NO: 5606297 - DNA, 25 bp, Homo sapien
gggcagctctccacacaaagaatca

SEQ ID NO: 5606298 - DNA, 25 bp, Homo sapien
gaaaaatactggtgtaaggagacaa

SEQ ID NO: 5606299 - DNA, 25 bp, Homo sapien
ttggatgcctgatacaaaaagagga

SEQ ID NO: 5606300 - DNA, 25 bp, Homo sapien
attgctgaggttgaaaaatactggt

SEQ ID NO: 5606301 - DNA, 25 bp, Homo sapien
gtatctagtgaatagagccagggat

SEQ ID NO: 5606302 - DNA, 25 bp, Homo sapien
gcaatctggccatatcaaaggcaaa

SEQ ID NO: 5606303 - DNA, 25 bp, Homo sapien
tgaaagtatccaacaacaaaaagct

SEQ ID NO: 5606304 - DNA, 25 bp, Homo sapien
tgatcctatttccaagaatgtatcc

SEQ ID NO: 5606305 - DNA, 25 bp, Homo sapien
aagaatgtatccagatgaaagtatc

SEQ ID NO: 5606306 - DNA, 25 bp, Homo sapien
tcctttaaaaagcaatctggccata

SEQ ID NO: 5606307 - DNA, 25 bp, Homo sapien
caaaaaaccccaatgatcctatttc

SEQ ID NO: 5606308 - DNA, 25 bp, Homo sapien
cacaaagatacatatgatattgttc

SEQ ID NO: 5606309 - DNA, 25 bp, Homo sapien
tcaaaggcaaaaaaagtgtatatac

SEQ ID NO: 5606310 - DNA, 25 bp, Homo sapien
atataccaccctggcacaaaaaacc

SEQ ID NO: 5606311 - DNA, 25 bp, Homo sapien
aaaagtgtatataccaccctggcac

SEQ ID NO: 5606312 - DNA, 25 bp, Homo sapien
caaaaagctatatacacaaagatac

SEQ ID NO: 5606313 - DNA, 25 bp, Homo sapien
aaataagcaggaattccagagcaga

SEQ ID NO: 5606314 - DNA, 25 bp, Homo sapien
tggatcagtagcatcagcgtctccc

SEQ ID NO: 5606315 - DNA, 25 bp, Homo sapien
cagagcagaaaacccctcattactt

SEQ ID NO: 5606316 - DNA, 25 bp, Homo sapien
ggaggccagagctaacactctgcca

SEQ ID NO: 5606317 - DNA, 25 bp, Homo sapien
actttctggctactcacagtgtgtc

SEQ ID NO: 5606318 - DNA, 25 bp, Homo sapien
tggttagagttgaggaatctaggca

SEQ ID NO: 5606319 - DNA, 25 bp, Homo sapien
tgtctagaaatgctgagtctcaggc

SEQ ID NO: 5606320 - DNA, 25 bp, Homo sapien
ggagcagtggcaactcaaataagca

SEQ ID NO: 5606321 - DNA, 25 bp, Homo sapien
tcacagtgtgtcttggatcagtagc

SEQ ID NO: 5606322 - DNA, 25 bp, Homo sapien
cctggagctgtctagaaatgctgag

SEQ ID NO: 5606323 - DNA, 25 bp, Homo sapien
aagctttggttagagttgaggaatc

SEQ ID NO: 5606324 - DNA, 25 bp, Homo sapien
ggtttatgctcaacagctgacctgc

SEQ ID NO: 5606325 - DNA, 25 bp, Homo sapien
ttggggagggttctcactatcctaa

SEQ ID NO: 5606326 - DNA, 25 bp, Homo sapien
ttagtgaggaaatgcatgaaaatac

SEQ ID NO: 5606327 - DNA, 25 bp, Homo sapien
aaacttggcagaaccatgctgagtc

SEQ ID NO: 5606328 - DNA, 25 bp, Homo sapien
agaaccatgctgagtccccatcact

SEQ ID NO: 5606329 - DNA, 25 bp, Homo sapien
attcctacgaatgtgagcaattgtc

SEQ ID NO: 5606330 - DNA, 25 bp, Homo sapien
cacgcacatgtactggtatgcagag

SEQ ID NO: 5606331 - DNA, 25 bp, Homo sapien
gtatgcagagttaacatagcaggcc

SEQ ID NO: 5606332 - DNA, 25 bp, Homo sapien
tgaaacgttcaaactcagaagcaat

SEQ ID NO: 5606333 - DNA, 25 bp, Homo sapien
acatagcaggcctgactgccatcct

SEQ ID NO: 5606334 - DNA, 25 bp, Homo sapien
tgaaaggcctgattacaaaactgtc

SEQ ID NO: 5606335 - DNA, 25 bp, Homo sapien
tttctgacactcagagtacctctgt

SEQ ID NO: 5606336 - DNA, 25 bp, Homo sapien
acagaggtactctgagtgtcagaaa

SEQ ID NO: 5606337 - DNA, 25 bp, Homo sapien
ttaacagtagggacacaattaccaa

SEQ ID NO: 5606338 - DNA, 25 bp, Homo sapien
aacattaaaaggtcagatgatatag

SEQ ID NO: 5606339 - DNA, 25 bp, Homo sapien
ttcagtaatattggagctagttaat

SEQ ID NO: 5606340 - DNA, 25 bp, Homo sapien
gaaagcagataggtggcattaatca

SEQ ID NO: 5606341 - DNA, 25 bp, Homo sapien
aaggtcagatgatatagtgaaaact

SEQ ID NO: 5606342 - DNA, 25 bp, Homo sapien
cctagacaactatttcagaatgcag

SEQ ID NO: 5606343 - DNA, 25 bp, Homo sapien
ttaccatgtgtataagaccagattt

SEQ ID NO: 5606344 - DNA, 25 bp, Homo sapien
aatataggatatttggagaaatcat

SEQ ID NO: 5606345 - DNA, 25 bp, Homo sapien
taataactgtatgaagactttaaat

SEQ ID NO: 5606346 - DNA, 25 bp, Homo sapien
aggtggcattaatcagtggatatgt

SEQ ID NO: 5606347 - DNA, 25 bp, Homo sapien
gtatgagacctcacacaagtttcta

SEQ ID NO: 5606348 - DNA, 25 bp, Homo sapien
ctctctcccccatgcggttgtctgc

SEQ ID NO: 5606349 - DNA, 25 bp, Homo sapien
gctaagaaagcaactcaggtccttc

SEQ ID NO: 5606350 - DNA, 25 bp, Homo sapien
cagaagaccctgctttactctcacc

SEQ ID NO: 5606351 - DNA, 25 bp, Homo sapien
tgcggttgtctgcaatacagtatac

SEQ ID NO: 5606352 - DNA, 25 bp, Homo sapien
aaatccaatggtcaacactagagtc

SEQ ID NO: 5606353 - DNA, 25 bp, Homo sapien
ctagagccatgtaaatgttcccctg

SEQ ID NO: 5606354 - DNA, 25 bp, Homo sapien
tagaaagaataaggagctaaaagca

SEQ ID NO: 5606355 - DNA, 25 bp, Homo sapien
tagagtcatgtaaaactagagccat

SEQ ID NO: 5606356 - DNA, 25 bp, Homo sapien
gacataagttgcttgaaacctagtt

SEQ ID NO: 5606357 - DNA, 25 bp, Homo sapien
actgactcaaaacccaacacacccc

SEQ ID NO: 5606358 - DNA, 25 bp, Homo sapien
tgaaacctagttgtatcccaccacc

SEQ ID NO: 5606359 - DNA, 25 bp, Homo sapien
ctccttcactcactcccactcccct

SEQ ID NO: 5606360 - DNA, 25 bp, Homo sapien
ctttgaaaaaacagtccagtggtag

SEQ ID NO: 5606361 - DNA, 25 bp, Homo sapien
agtctcagaggcacagataaattct

SEQ ID NO: 5606362 - DNA, 25 bp, Homo sapien
attcttcctttgttcagcttgtctt

SEQ ID NO: 5606363 - DNA, 25 bp, Homo sapien
ctagtctcagaggcacagataaatt

SEQ ID NO: 5606364 - DNA, 25 bp, Homo sapien
cactcactcccactcccctaaaacc

SEQ ID NO: 5606365 - DNA, 25 bp, Homo sapien
attctcttctacaacctcctccttc

SEQ ID NO: 5606366 - DNA, 25 bp, Homo sapien
ctttgcctttgaaaaaacagtccag

SEQ ID NO: 5606367 - DNA, 25 bp, Homo sapien
cagaggcacagataaattcttcctt

SEQ ID NO: 5606368 - DNA, 25 bp, Homo sapien
acctcctccttcactcactcccact

SEQ ID NO: 5606369 - DNA, 25 bp, Homo sapien
atttgttaaacacttatcaagcaac

SEQ ID NO: 5606370 - DNA, 25 bp, Homo sapien
aataccacacaggacaaaaaagaac

SEQ ID NO: 5606371 - DNA, 25 bp, Homo sapien
agcacactactgacatatggaaatg

SEQ ID NO: 5606372 - DNA, 25 bp, Homo sapien
ggcccagcctaaaagcagcacacta

SEQ ID NO: 5606373 - DNA, 25 bp, Homo sapien
gtcctatgctacacagatggaaggg

SEQ ID NO: 5606374 - DNA, 25 bp, Homo sapien
ggctagaactgaggaaaaacagaat

SEQ ID NO: 5606375 - DNA, 25 bp, Homo sapien
tacacacgcaaaaggttacacacac

SEQ ID NO: 5606376 - DNA, 25 bp, Homo sapien
tgggttgtgcttaacctacacacgc

SEQ ID NO: 5606377 - DNA, 25 bp, Homo sapien
ggacaaaaaagaacacatctgtgga

SEQ ID NO: 5606378 - DNA, 25 bp, Homo sapien
cctacacaggtaattgggtatggca

SEQ ID NO: 5606379 - DNA, 25 bp, Homo sapien
agaagctaaagaagtgcagtcctat

SEQ ID NO: 5606380 - DNA, 25 bp, Homo sapien
gaagaatttggccccgagccaccag

SEQ ID NO: 5606381 - DNA, 25 bp, Homo sapien
gagctgcaggtgagtgttaacctgt

SEQ ID NO: 5606382 - DNA, 25 bp, Homo sapien
aattgggactgcacttctgtacttc

SEQ ID NO: 5606383 - DNA, 25 bp, Homo sapien
gttaacctgtggtaattgggactgc

SEQ ID NO: 5606384 - DNA, 25 bp, Homo sapien
tcatcttagtttacaggtaggaaaa

SEQ ID NO: 5606385 - DNA, 25 bp, Homo sapien
agccagaggctatgagattcacctc

SEQ ID NO: 5606386 - DNA, 25 bp, Homo sapien
aaagaagcaatgtgactcaagctgt

SEQ ID NO: 5606387 - DNA, 25 bp, Homo sapien
atgtactaggcatattgcatgcttt

SEQ ID NO: 5606388 - DNA, 25 bp, Homo sapien
aacctgtggtaattgggactgcact

SEQ ID NO: 5606389 - DNA, 25 bp, Homo sapien
agtctctcccccataatagctaaac

SEQ ID NO: 5606390 - DNA, 25 bp, Homo sapien
tctgtacttcaaagatcacaagctt

SEQ ID NO: 5606391 - DNA, 25 bp, Homo sapien
gactcaagctgtaaccacctacttc

SEQ ID NO: 5606392 - DNA, 25 bp, Homo sapien
tcttagtgaaatttactgccaaacc

SEQ ID NO: 5606393 - DNA, 25 bp, Homo sapien
gtgaaagattgagtcatgaaaaagc

SEQ ID NO: 5606394 - DNA, 25 bp, Homo sapien
tgtggaaatgctgaaacacattcct

SEQ ID NO: 5606395 - DNA, 25 bp, Homo sapien
gttagaggctactgaatccaacctt

SEQ ID NO: 5606396 - DNA, 25 bp, Homo sapien
taagtaaatatatccagttggtaga

SEQ ID NO: 5606397 - DNA, 25 bp, Homo sapien
acaaaatagagatcacaagtacaat

SEQ ID NO: 5606398 - DNA, 25 bp, Homo sapien
atgttgcatacagtgaaacagctgt

SEQ ID NO: 5606399 - DNA, 25 bp, Homo sapien
acagaaaacagacttaagtaaatat

SEQ ID NO: 5606400 - DNA, 25 bp, Homo sapien
gaaaatggttagaggctactgaatc

SEQ ID NO: 5606401 - DNA, 25 bp, Homo sapien
acaagtacaattaacaaagtccatg

SEQ ID NO: 5606402 - DNA, 25 bp, Homo sapien
gttggtagaactgaaattataattc

SEQ ID NO: 5606403 - DNA, 25 bp, Homo sapien
tgctgttgcataggactggcctgca

SEQ ID NO: 5606404 - DNA, 25 bp, Homo sapien
aaagaatagtgtttgaggaaaagag

SEQ ID NO: 5606405 - DNA, 25 bp, Homo sapien
ctggcctgcattgtagagaaaagtt

SEQ ID NO: 5606406 - DNA, 25 bp, Homo sapien
aaaaccacaagataggaatgaaaac

SEQ ID NO: 5606407 - DNA, 25 bp, Homo sapien
gattggatcttgggctactggctta

SEQ ID NO: 5606408 - DNA, 25 bp, Homo sapien
aaactgaaatggagtgagatctcat

SEQ ID NO: 5606409 - DNA, 25 bp, Homo sapien
actgggtagataatggtgtcaataa

SEQ ID NO: 5606410 - DNA, 25 bp, Homo sapien
aagtatggatgtagttcaggatgct

SEQ ID NO: 5606411 - DNA, 25 bp, Homo sapien
ggagtgggagttgtcataaaaccac

SEQ ID NO: 5606412 - DNA, 25 bp, Homo sapien
tactggcttaagtgactgggtagat

SEQ ID NO: 5606413 - DNA, 25 bp, Homo sapien
cagatgacagaaagctagattggat

SEQ ID NO: 5606414 - DNA, 25 bp, Homo sapien
tgcctgagatgaattcctgtgtaaa

SEQ ID NO: 5606415 - DNA, 25 bp, Homo sapien
tatgtaggctaggttcgtcttgaac

SEQ ID NO: 5606416 - DNA, 25 bp, Homo sapien
cttaactatgtgtaacggcagagag

SEQ ID NO: 5606417 - DNA, 25 bp, Homo sapien
cgctatgtaggctaggttcgtcttg

SEQ ID NO: 5606418 - DNA, 25 bp, Homo sapien
atctcttaactatgtgtaacggcag

SEQ ID NO: 5606419 - DNA, 25 bp, Homo sapien
ccaaatgcctgagatgaattcctgt

SEQ ID NO: 5606420 - DNA, 25 bp, Homo sapien
ttgatttgattaatgtacccatctc

SEQ ID NO: 5606421 - DNA, 25 bp, Homo sapien
aagcagctcatctgggcccctcata

SEQ ID NO: 5606422 - DNA, 25 bp, Homo sapien
atgaattcctgtgtaaaagagctgg

SEQ ID NO: 5606423 - DNA, 25 bp, Homo sapien
catctgggcccctcataaccagcaa

SEQ ID NO: 5606424 - DNA, 25 bp, Homo sapien
gcgcccagccgtaataattattttc

SEQ ID NO: 5606425 - DNA, 25 bp, Homo sapien
gaagactgcagagaaacaccatgca

SEQ ID NO: 5606426 - DNA, 25 bp, Homo sapien
agtataaataggctactgaggggaa

SEQ ID NO: 5606427 - DNA, 25 bp, Homo sapien
gcagagaaacaccatgcaagcagtg

SEQ ID NO: 5606428 - DNA, 25 bp, Homo sapien
aaacaatacgataccaaagagccgc

SEQ ID NO: 5606429 - DNA, 25 bp, Homo sapien
cccacactgagtacgtgaccccttc

SEQ ID NO: 5606430 - DNA, 25 bp, Homo sapien
cttcctatatgcacaggaagaagac

SEQ ID NO: 5606431 - DNA, 25 bp, Homo sapien
atgcaagcagtggctgtctctgtgg

SEQ ID NO: 5606432 - DNA, 25 bp, Homo sapien
tccatgtggaaaatgctcagtataa

SEQ ID NO: 5606433 - DNA, 25 bp, Homo sapien
acttttttcaagggtatccatgtgg

SEQ ID NO: 5606434 - DNA, 25 bp, Homo sapien
ccgtaaaacccccacagaggattca

SEQ ID NO: 5606435 - DNA, 25 bp, Homo sapien
tctgtggtggtgtcacaagtgaaaa

SEQ ID NO: 5606436 - DNA, 25 bp, Homo sapien
tgccaaggaggattcccaaatgtgc

SEQ ID NO: 5606437 - DNA, 25 bp, Homo sapien
gtgcaaatgtaggcacaaaaaagtt

SEQ ID NO: 5606438 - DNA, 25 bp, Homo sapien
aagttcaaaaccatagtgggagatt

SEQ ID NO: 5606439 - DNA, 25 bp, Homo sapien
agcaactaagtgctagagctgggag

SEQ ID NO: 5606440 - DNA, 25 bp, Homo sapien
gctttccatacgacatacaccattc

SEQ ID NO: 5606441 - DNA, 25 bp, Homo sapien
attgactcccaatgagagaacttta

SEQ ID NO: 5606442 - DNA, 25 bp, Homo sapien
ccaatgccacagagcaactaagtgc

SEQ ID NO: 5606443 - DNA, 25 bp, Homo sapien
cctacagattagatgccaaggagga

SEQ ID NO: 5606444 - DNA, 25 bp, Homo sapien
gaactttaatggaaagatggaggga

SEQ ID NO: 5606445 - DNA, 25 bp, Homo sapien
agcctggctctgaacactatggcac

SEQ ID NO: 5606446 - DNA, 25 bp, Homo sapien
tgaacactatggcacattgactccc

SEQ ID NO: 5606447 - DNA, 25 bp, Homo sapien
actaggctgtttcagggaatgctgt

SEQ ID NO: 5606448 - DNA, 25 bp, Homo sapien
ataaatggacacatactaggctgtt

SEQ ID NO: 5606449 - DNA, 25 bp, Homo sapien
ataccctacctgaatacgaagaacc

SEQ ID NO: 5606450 - DNA, 25 bp, Homo sapien
cgggggtcacttgtcagatttcctg

SEQ ID NO: 5606451 - DNA, 25 bp, Homo sapien
tgtgaagctgagattagccatgatc

SEQ ID NO: 5606452 - DNA, 25 bp, Homo sapien
aataacagtttgaatggggctcatt

SEQ ID NO: 5606453 - DNA, 25 bp, Homo sapien
actgggaaagaaggttacattaata

SEQ ID NO: 5606454 - DNA, 25 bp, Homo sapien
taataagccgggcacataaatggac

SEQ ID NO: 5606455 - DNA, 25 bp, Homo sapien
gccatgatctgcccagcaaagaggg

SEQ ID NO: 5606456 - DNA, 25 bp, Homo sapien
tcaaggtgattacaagtcatcctgc

SEQ ID NO: 5606457 - DNA, 25 bp, Homo sapien
aattggacacataagtggacacata

SEQ ID NO: 5606458 - DNA, 25 bp, Homo sapien
gactacaggagcatgccagtttttt

SEQ ID NO: 5606459 - DNA, 25 bp, Homo sapien
atcaccattgttacccaggctggtc

SEQ ID NO: 5606460 - DNA, 25 bp, Homo sapien
agctatccgcccatttctgtctctc

SEQ ID NO: 5606461 - DNA, 25 bp, Homo sapien
cctgtctcatcctcccaagtagctg

SEQ ID NO: 5606462 - DNA, 25 bp, Homo sapien
gttgatctcaaaacaaatccttcta

SEQ ID NO: 5606463 - DNA, 25 bp, Homo sapien
ctcattctgtcaccaaggccggagc

SEQ ID NO: 5606464 - DNA, 25 bp, Homo sapien
aatagtgtgatctcagtgatcttcc

SEQ ID NO: 5606465 - DNA, 25 bp, Homo sapien
ttgtaaagacagggtatcaccattg

SEQ ID NO: 5606466 - DNA, 25 bp, Homo sapien
caggctggtcttaaactccaaactc

SEQ ID NO: 5606467 - DNA, 25 bp, Homo sapien
ggccggagcttaatagtgtgatctc

SEQ ID NO: 5606468 - DNA, 25 bp, Homo sapien
atgtcacaaaatataaaagtcttcc

SEQ ID NO: 5606469 - DNA, 25 bp, Homo sapien
tatatactcctgaagaactgtgaaa

SEQ ID NO: 5606470 - DNA, 25 bp, Homo sapien
tgaagaactgtgaaatatcatactc

SEQ ID NO: 5606471 - DNA, 25 bp, Homo sapien
atccttagtgaaagggagagaaatg

SEQ ID NO: 5606472 - DNA, 25 bp, Homo sapien
ccctccccagttatatcctagctcc

SEQ ID NO: 5606473 - DNA, 25 bp, Homo sapien
gtcagggaatacagttagatataaa

SEQ ID NO: 5606474 - DNA, 25 bp, Homo sapien
gatattaaactgaaagtacccatta

SEQ ID NO: 5606475 - DNA, 25 bp, Homo sapien
gggagagaaatgttgatgccaacaa

SEQ ID NO: 5606476 - DNA, 25 bp, Homo sapien
tcctagctcctggaaagttatatcc

SEQ ID NO: 5606477 - DNA, 25 bp, Homo sapien
tccatgaacccagctgtcagggaat

SEQ ID NO: 5606478 - DNA, 25 bp, Homo sapien
ctgaaagtacccattaccctcccca

SEQ ID NO: 5606479 - DNA, 25 bp, Homo sapien
atctagacttttgatgattgctcat

SEQ ID NO: 5606480 - DNA, 25 bp, Homo sapien
atgcacagtgcacatgtatcatctt

SEQ ID NO: 5606481 - DNA, 25 bp, Homo sapien
tcactgtcctaaaggggaatgctgc

SEQ ID NO: 5606482 - DNA, 25 bp, Homo sapien
agaaaaagtacagtccctagtaatc

SEQ ID NO: 5606483 - DNA, 25 bp, Homo sapien
atcacatcaggcacacaatattttc

SEQ ID NO: 5606484 - DNA, 25 bp, Homo sapien
catggtacttggtcagttcattcac

SEQ ID NO: 5606485 - DNA, 25 bp, Homo sapien
ggagaccctcaccacatcatcactg

SEQ ID NO: 5606486 - DNA, 25 bp, Homo sapien
acagattctaagtggagtaaaaaac

SEQ ID NO: 5606487 - DNA, 25 bp, Homo sapien
acctacaatgaactagaaaaagtac

SEQ ID NO: 5606488 - DNA, 25 bp, Homo sapien
tgaatgagcgaatttatgaagaact

SEQ ID NO: 5606489 - DNA, 25 bp, Homo sapien
tgtgtagcagagaaagtactatgaa

SEQ ID NO: 5606490 - DNA, 25 bp, Homo sapien
tttggtataaagagaggccaagaga

SEQ ID NO: 5606491 - DNA, 25 bp, Homo sapien
taatgtaatgaaatatatgaataaa

SEQ ID NO: 5606492 - DNA, 25 bp, Homo sapien
tgaaaaatgggttcacaaatggtga

SEQ ID NO: 5606493 - DNA, 25 bp, Homo sapien
gttacactataaagccatggaaatt

SEQ ID NO: 5606494 - DNA, 25 bp, Homo sapien
accgtgctctttgatagtatggctt

SEQ ID NO: 5606495 - DNA, 25 bp, Homo sapien
tgatagtatggcttaacattgtaaa

SEQ ID NO: 5606496 - DNA, 25 bp, Homo sapien
aaccctccacaaaccaaagaatgca

SEQ ID NO: 5606497 - DNA, 25 bp, Homo sapien
aagaagtgagactggtcccatcaaa

SEQ ID NO: 5606498 - DNA, 25 bp, Homo sapien
aataaaaaaaccgtgctctttgata

SEQ ID NO: 5606499 - DNA, 25 bp, Homo sapien
cacataaactgaccaaataatgatt

SEQ ID NO: 5606500 - DNA, 25 bp, Homo sapien
ccatgttctgagaccataatgtaat

SEQ ID NO: 5606501 - DNA, 25 bp, Homo sapien
tcccaatcaaaatcccaaccagaat

SEQ ID NO: 5606502 - DNA, 25 bp, Homo sapien
ggttgtcagcaggcatttcggctta

SEQ ID NO: 5606503 - DNA, 25 bp, Homo sapien
catctcctccgggctgctcccaacc

SEQ ID NO: 5606504 - DNA, 25 bp, Homo sapien
ctaaaacttgctataggttgtcagc

SEQ ID NO: 5606505 - DNA, 25 bp, Homo sapien
ttctgaccacttgccaaagtctggc

SEQ ID NO: 5606506 - DNA, 25 bp, Homo sapien
cctggagccagaatatgtggcaagg

SEQ ID NO: 5606507 - DNA, 25 bp, Homo sapien
agatgtggcctcgaacctcaccttc

SEQ ID NO: 5606508 - DNA, 25 bp, Homo sapien
ttcacccatagatgtggcctcgaac

SEQ ID NO: 5606509 - DNA, 25 bp, Homo sapien
tcccaaccaacaccgcggatggtga

SEQ ID NO: 5606510 - DNA, 25 bp, Homo sapien
actcttcaggacaacaagccaaggg

SEQ ID NO: 5606511 - DNA, 25 bp, Homo sapien
atttcttgatttgaagtaaagccct

SEQ ID NO: 5606512 - DNA, 25 bp, Homo sapien
gagtcagcattcttatcagccctaa

SEQ ID NO: 5606513 - DNA, 25 bp, Homo sapien
ggccagacctcctgaggcttgccac

SEQ ID NO: 5606514 - DNA, 25 bp, Homo sapien
cttgccacatcttctctagggagta

SEQ ID NO: 5606515 - DNA, 25 bp, Homo sapien
actgaccacttggccattaaccagc

SEQ ID NO: 5606516 - DNA, 25 bp, Homo sapien
cagaaatgaataggttatggtttat

SEQ ID NO: 5606517 - DNA, 25 bp, Homo sapien
tcccccaccctcagtgctgctctca

SEQ ID NO: 5606518 - DNA, 25 bp, Homo sapien
gtatacggtccaaaggaatgaagga

SEQ ID NO: 5606519 - DNA, 25 bp, Homo sapien
gaaggcttccagtgaactgaccact

SEQ ID NO: 5606520 - DNA, 25 bp, Homo sapien
ggaatgaaggagatctgaattgatc

SEQ ID NO: 5606521 - DNA, 25 bp, Homo sapien
attctggggttttgtatacggtcca

SEQ ID NO: 5606522 - DNA, 25 bp, Homo sapien
gagtgtgctcacaccgctgcatcac

SEQ ID NO: 5606523 - DNA, 25 bp, Homo sapien
ctctgggtcttccaagcccctaatc

SEQ ID NO: 5606524 - DNA, 25 bp, Homo sapien
caccaagttgaaagaacagtctgtc

SEQ ID NO: 5606525 - DNA, 25 bp, Homo sapien
tgatgtgaacaaacagcattctccc

SEQ ID NO: 5606526 - DNA, 25 bp, Homo sapien
gaggttattagggatcatgtttcat

SEQ ID NO: 5606527 - DNA, 25 bp, Homo sapien
tctccctaaaagagtagactgtaac

SEQ ID NO: 5606528 - DNA, 25 bp, Homo sapien
atcctgagcactaaaagagttgcag

SEQ ID NO: 5606529 - DNA, 25 bp, Homo sapien
ttacagcctcatgatgtgaacaaac

SEQ ID NO: 5606530 - DNA, 25 bp, Homo sapien
tacagttcagaataaggattacatg

SEQ ID NO: 5606531 - DNA, 25 bp, Homo sapien
gttggaaactaacacaatggtgaga

SEQ ID NO: 5606532 - DNA, 25 bp, Homo sapien
tgtctgaactagtcctgaaagtaaa

SEQ ID NO: 5606533 - DNA, 25 bp, Homo sapien
ggattacatgaagtcactagcagtt

SEQ ID NO: 5606534 - DNA, 25 bp, Homo sapien
ctcaggccatgtgtcagttggaaac

SEQ ID NO: 5606535 - DNA, 25 bp, Homo sapien
tcattcacccgctagtacataactc

SEQ ID NO: 5606536 - DNA, 25 bp, Homo sapien
agagagggtacagtcctgattccta

SEQ ID NO: 5606537 - DNA, 25 bp, Homo sapien
acttactgccttcgggtaccctgct

SEQ ID NO: 5606538 - DNA, 25 bp, Homo sapien
acttacacatgggaaacagtttcct

SEQ ID NO: 5606539 - DNA, 25 bp, Homo sapien
ttagatctggaggtaaatggttatc

SEQ ID NO: 5606540 - DNA, 25 bp, Homo sapien
tcaagtgttagaaggttagtagagt

SEQ ID NO: 5606541 - DNA, 25 bp, Homo sapien
gagtcccagaagacaacccttagat

SEQ ID NO: 5606542 - DNA, 25 bp, Homo sapien
tggttatcaggttaagaagcatttc

SEQ ID NO: 5606543 - DNA, 25 bp, Homo sapien
cagaacccctttgaaaatgtgatga

SEQ ID NO: 5606544 - DNA, 25 bp, Homo sapien
tgttagcataagatcatgtacaccc

SEQ ID NO: 5606545 - DNA, 25 bp, Homo sapien
gattcctaagtggacgcgttactcc

SEQ ID NO: 5606546 - DNA, 25 bp, Homo sapien
cttgttaagttggctctggttaggc

SEQ ID NO: 5606547 - DNA, 25 bp, Homo sapien
gaagagttggcatgcagatagattt

SEQ ID NO: 5606548 - DNA, 25 bp, Homo sapien
attttatgaaaaccagggagaagag

SEQ ID NO: 5606549 - DNA, 25 bp, Homo sapien
aatgcatctacgtggcaggacaaca

SEQ ID NO: 5606550 - DNA, 25 bp, Homo sapien
gtagtcagtgggtttttcagtgtat

SEQ ID NO: 5606551 - DNA, 25 bp, Homo sapien
aatggtcagccaaccaggtaaatgt

SEQ ID NO: 5606552 - DNA, 25 bp, Homo sapien
ctataataagatcaagagccgcttc

SEQ ID NO: 5606553 - DNA, 25 bp, Homo sapien
agtgagtgtgaaatgcatctacgtg

SEQ ID NO: 5606554 - DNA, 25 bp, Homo sapien
ctggttaggccaatgaatggtcagc

SEQ ID NO: 5606555 - DNA, 25 bp, Homo sapien
gacaacacaaacaggatctatctaa

SEQ ID NO: 5606556 - DNA, 25 bp, Homo sapien
atggcataagtgagccgtagtgagt

SEQ ID NO: 5606557 - DNA, 25 bp, Homo sapien
aggtggcagaacacgattgctttct

SEQ ID NO: 5606558 - DNA, 25 bp, Homo sapien
gggctttgtgtgatgttctggtgtt

SEQ ID NO: 5606559 - DNA, 25 bp, Homo sapien
ccttgacacatgggacttctcttgc

SEQ ID NO: 5606560 - DNA, 25 bp, Homo sapien
accccaagccactgagcaaggggct

SEQ ID NO: 5606561 - DNA, 25 bp, Homo sapien
aagattgaacactcagcattcgcac

SEQ ID NO: 5606562 - DNA, 25 bp, Homo sapien
agctccaagtccgtggcacctgatc

SEQ ID NO: 5606563 - DNA, 25 bp, Homo sapien
gctttctgttgagaagcgtgtgtgc

SEQ ID NO: 5606564 - DNA, 25 bp, Homo sapien
aaatgaagaatttcaagctggtggc

SEQ ID NO: 5606565 - DNA, 25 bp, Homo sapien
tctccagattggatgaatgcagggg

SEQ ID NO: 5606566 - DNA, 25 bp, Homo sapien
tcaagctggtggctacagagtatta

SEQ ID NO: 5606567 - DNA, 25 bp, Homo sapien
tacagagtattaaaccccaagccac

SEQ ID NO: 5606568 - DNA, 25 bp, Homo sapien
gttgaatcactgtttgcggaggcat

SEQ ID NO: 5606569 - DNA, 25 bp, Homo sapien
gccctgtcagttaaaagaggaagca

SEQ ID NO: 5606570 - DNA, 25 bp, Homo sapien
aatgcatgaagcttaaagagggatt

SEQ ID NO: 5606571 - DNA, 25 bp, Homo sapien
attgaggctatagctagacagtggc

SEQ ID NO: 5606572 - DNA, 25 bp, Homo sapien
tttaaggaggacatgatactttagt

SEQ ID NO: 5606573 - DNA, 25 bp, Homo sapien
aagagggatttacaataatagcatc

SEQ ID NO: 5606574 - DNA, 25 bp, Homo sapien
aggcataaactgcagggaaagaatt

SEQ ID NO: 5606575 - DNA, 25 bp, Homo sapien
aaaagctttccagaaaggaagagga

SEQ ID NO: 5606576 - DNA, 25 bp, Homo sapien
ttaatcattcgcagtcagtagcttt

SEQ ID NO: 5606577 - DNA, 25 bp, Homo sapien
catagaatttggagttaagtcataa

SEQ ID NO: 5606578 - DNA, 25 bp, Homo sapien
ggcaggggcattgtttcttgacttc

SEQ ID NO: 5606579 - DNA, 25 bp, Homo sapien
tagtctacatccagttcctagcaca

SEQ ID NO: 5606580 - DNA, 25 bp, Homo sapien
caatctaagctgactctccctctat

SEQ ID NO: 5606581 - DNA, 25 bp, Homo sapien
atgcatacaggctaccaagtatttc

SEQ ID NO: 5606582 - DNA, 25 bp, Homo sapien
tcagcctgagttatgcacctctctc

SEQ ID NO: 5606583 - DNA, 25 bp, Homo sapien
ataatgtggacataagtatcttgct

SEQ ID NO: 5606584 - DNA, 25 bp, Homo sapien
aaagccttgagaaaacctcctagcc

SEQ ID NO: 5606585 - DNA, 25 bp, Homo sapien
tggaacctgcgagtcaatctaagct

SEQ ID NO: 5606586 - DNA, 25 bp, Homo sapien
cctctgccccatttcagcctgagtt

SEQ ID NO: 5606587 - DNA, 25 bp, Homo sapien
tcagagttctacccttggttccctc

SEQ ID NO: 5606588 - DNA, 25 bp, Homo sapien
gtcactcatctggaacctgcgagtc

SEQ ID NO: 5606589 - DNA, 25 bp, Homo sapien
gttccccataaatgcctcacctgcc

SEQ ID NO: 5606590 - DNA, 25 bp, Homo sapien
acagtaaaaatgcttaagaggtatg

SEQ ID NO: 5606591 - DNA, 25 bp, Homo sapien
tagttgagatctgatgaagagttac

SEQ ID NO: 5606592 - DNA, 25 bp, Homo sapien
gcagccttttgttctggtgccctcc

SEQ ID NO: 5606593 - DNA, 25 bp, Homo sapien
atatgagatccaacaatactatcgc

SEQ ID NO: 5606594 - DNA, 25 bp, Homo sapien
atcctcaacagtacctgacacatgg

SEQ ID NO: 5606595 - DNA, 25 bp, Homo sapien
tggaagaagatgaatctacccccac

SEQ ID NO: 5606596 - DNA, 25 bp, Homo sapien
tacaagctgtatcaagtaaatgttc

SEQ ID NO: 5606597 - DNA, 25 bp, Homo sapien
ggtgccctcccaactccccacagtc

SEQ ID NO: 5606598 - DNA, 25 bp, Homo sapien
tgacacatggcaggctctctctaaa

SEQ ID NO: 5606599 - DNA, 25 bp, Homo sapien
aaaatgggatggtccctccccactg

SEQ ID NO: 5606600 - DNA, 25 bp, Homo sapien
taagaggtatgaatactaaccattt

SEQ ID NO: 5606601 - DNA, 25 bp, Homo sapien
tgggaaaagtatagagtctcagctc

SEQ ID NO: 5606602 - DNA, 25 bp, Homo sapien
cttcaaacttaatgctatggacctt

SEQ ID NO: 5606603 - DNA, 25 bp, Homo sapien
ttaatggatgtttcattggcaatgc

SEQ ID NO: 5606604 - DNA, 25 bp, Homo sapien
ggaccttaaacaccatttcacacac

SEQ ID NO: 5606605 - DNA, 25 bp, Homo sapien
ctctttcaaaaagagggccaaagga

SEQ ID NO: 5606606 - DNA, 25 bp, Homo sapien
aaatgcaagacctcagaatcatctg

SEQ ID NO: 5606607 - DNA, 25 bp, Homo sapien
ccatgtataaagtcaggaggtggga

SEQ ID NO: 5606608 - DNA, 25 bp, Homo sapien
tggaccatctggaagaagcttgtcc

SEQ ID NO: 5606609 - DNA, 25 bp, Homo sapien
tggcaatgcaaataaaccttgggaa

SEQ ID NO: 5606610 - DNA, 25 bp, Homo sapien
cttgtcctgggagtagccatgtata

SEQ ID NO: 5606611 - DNA, 25 bp, Homo sapien
ctatagttggctgagatggctttaa

SEQ ID NO: 5606612 - DNA, 25 bp, Homo sapien
ttgccttggagttgttctgaattgt

SEQ ID NO: 5606613 - DNA, 25 bp, Homo sapien
tgtagaggtacatttcggactttat

SEQ ID NO: 5606614 - DNA, 25 bp, Homo sapien
aacgtcaggaagttaactgtcccac

SEQ ID NO: 5606615 - DNA, 25 bp, Homo sapien
tggtggggagtatttgctttgattt

SEQ ID NO: 5606616 - DNA, 25 bp, Homo sapien
taacatgggttaattggatggtggg

SEQ ID NO: 5606617 - DNA, 25 bp, Homo sapien
caagaaacctgtgtgcattaacgtc

SEQ ID NO: 5606618 - DNA, 25 bp, Homo sapien
ttcgcggataggtttttcagattac

SEQ ID NO: 5606619 - DNA, 25 bp, Homo sapien
gttcctgttgagaatgtagaggtac

SEQ ID NO: 5606620 - DNA, 25 bp, Homo sapien
gtgtataactcaccgatgggtttcc

SEQ ID NO: 5606621 - DNA, 25 bp, Homo sapien
atctgacaggtttttggttaggaat

SEQ ID NO: 5606622 - DNA, 25 bp, Homo sapien
ggtggtggatgccaggtttctaaat

SEQ ID NO: 5606623 - DNA, 25 bp, Homo sapien
tatagctatgtgaaccaagagtgca

SEQ ID NO: 5606624 - DNA, 25 bp, Homo sapien
ttgtagatgtagacaaggttattct

SEQ ID NO: 5606625 - DNA, 25 bp, Homo sapien
tagaagatgttttgtagatgtagac

SEQ ID NO: 5606626 - DNA, 25 bp, Homo sapien
tacagtaaagatatcaattctcctc

SEQ ID NO: 5606627 - DNA, 25 bp, Homo sapien
catgttcatggattgctagacagaa

SEQ ID NO: 5606628 - DNA, 25 bp, Homo sapien
gatttaaatagacatgccatgttca

SEQ ID NO: 5606629 - DNA, 25 bp, Homo sapien
tcctatcaaaatcctagaagatgtt

SEQ ID NO: 5606630 - DNA, 25 bp, Homo sapien
gaggaggaatcagtccagctgattt

SEQ ID NO: 5606631 - DNA, 25 bp, Homo sapien
aatatgcaaggacttgtatgctgaa

SEQ ID NO: 5606632 - DNA, 25 bp, Homo sapien
atggattgctagacagaatacagta

SEQ ID NO: 5606633 - DNA, 25 bp, Homo sapien
ataaaacgtgatgaaatcaaagatt

SEQ ID NO: 5606634 - DNA, 25 bp, Homo sapien
ggctaggaaagtaaatgacgtagta

SEQ ID NO: 5606635 - DNA, 25 bp, Homo sapien
tgtcaatgtcaaatgtgaaaccttt

SEQ ID NO: 5606636 - DNA, 25 bp, Homo sapien
tagccacacataaacatcttccatt

SEQ ID NO: 5606637 - DNA, 25 bp, Homo sapien
aataactattctaagctggaagctc

SEQ ID NO: 5606638 - DNA, 25 bp, Homo sapien
agtaaatgacgtagtaatggaaaag

SEQ ID NO: 5606639 - DNA, 25 bp, Homo sapien
aacagacggggagttctattcattt

SEQ ID NO: 5606640 - DNA, 25 bp, Homo sapien
ttctggcatccgtcctagcaaggct

SEQ ID NO: 5606641 - DNA, 25 bp, Homo sapien
acacagttaatggactgtcaatgtc

SEQ ID NO: 5606642 - DNA, 25 bp, Homo sapien
gaaaacaaaccttattagccacaca

SEQ ID NO: 5606643 - DNA, 25 bp, Homo sapien
catttctacattggtgttggggggg

SEQ ID NO: 5606644 - DNA, 25 bp, Homo sapien
aagctggaagctcactttctggcat

SEQ ID NO: 5606645 - DNA, 25 bp, Homo sapien
cttacccggggttcacacaggtaga

SEQ ID NO: 5606646 - DNA, 25 bp, Homo sapien
aaagaggtagaaccaggattcacat

SEQ ID NO: 5606647 - DNA, 25 bp, Homo sapien
ttgccaaactcacagagtggcaggc

SEQ ID NO: 5606648 - DNA, 25 bp, Homo sapien
ctttcaaacactagactcggcattc

SEQ ID NO: 5606649 - DNA, 25 bp, Homo sapien
cttaccatgcctgtggggaagtatt

SEQ ID NO: 5606650 - DNA, 25 bp, Homo sapien
gaggcggcacagtagtttctaaata

SEQ ID NO: 5606651 - DNA, 25 bp, Homo sapien
cttgagtgacacaggtattgcattt

SEQ ID NO: 5606652 - DNA, 25 bp, Homo sapien
ctaaaaagtccaataaagcatgtac

SEQ ID NO: 5606653 - DNA, 25 bp, Homo sapien
ctttgactgtcaggtctctgcagca

SEQ ID NO: 5606654 - DNA, 25 bp, Homo sapien
gcaatgcttaggtaaacatggactc

SEQ ID NO: 5606655 - DNA, 25 bp, Homo sapien
ggaaattgagctcaccaccttaccc

SEQ ID NO: 5606656 - DNA, 25 bp, Homo sapien
gtataatcacagacagagtcggtac

SEQ ID NO: 5606657 - DNA, 25 bp, Homo sapien
gtaccgactctgtctgtgattatac

SEQ ID NO: 5606658 - DNA, 25 bp, Homo sapien
aatgtataatcacagacagagtcgg

SEQ ID NO: 5606659 - DNA, 25 bp, Homo sapien
ccgactctgtctgtgattatacatt

SEQ ID NO: 5606660 - DNA, 25 bp, Homo sapien
ggtaacatagaggtttagaagagct

SEQ ID NO: 5606661 - DNA, 25 bp, Homo sapien
tctaggattcagacatctcagaaaa

SEQ ID NO: 5606662 - DNA, 25 bp, Homo sapien
ttctagaactgtagtctgattacca

SEQ ID NO: 5606663 - DNA, 25 bp, Homo sapien
gtcatgtattaaagatccagaggca

SEQ ID NO: 5606664 - DNA, 25 bp, Homo sapien
ttagaagagctgccagtcatgtatt

SEQ ID NO: 5606665 - DNA, 25 bp, Homo sapien
aagatccagaggcatttctagaact

SEQ ID NO: 5606666 - DNA, 25 bp, Homo sapien
tgtatacagtgttctcctccattcc

SEQ ID NO: 5606667 - DNA, 25 bp, Homo sapien
ctaatagaggtaacatagaggttta

SEQ ID NO: 5606668 - DNA, 25 bp, Homo sapien
ctgattaccattaccttagcccttg

SEQ ID NO: 5606669 - DNA, 25 bp, Homo sapien
tctgtgaagatatgaaacctattta

SEQ ID NO: 5606670 - DNA, 25 bp, Homo sapien
cttccaacgtggcccatggaagccg

SEQ ID NO: 5606671 - DNA, 25 bp, Homo sapien
ttgcttccatatgaacaactgtatc

SEQ ID NO: 5606672 - DNA, 25 bp, Homo sapien
actgcacagctcaacgtgaatatcc

SEQ ID NO: 5606673 - DNA, 25 bp, Homo sapien
ccagccaagtggactaaaaaatatc

SEQ ID NO: 5606674 - DNA, 25 bp, Homo sapien
agctcaacgtgaatatcctgccagt

SEQ ID NO: 5606675 - DNA, 25 bp, Homo sapien
gccaagtggactaaaaaatatctat

SEQ ID NO: 5606676 - DNA, 25 bp, Homo sapien
atcctgccagttcttcacattccat

SEQ ID NO: 5606677 - DNA, 25 bp, Homo sapien
aagctacttactgcacagctcaacg

SEQ ID NO: 5606678 - DNA, 25 bp, Homo sapien
cacattccatactaaagttgttgtt

SEQ ID NO: 5606679 - DNA, 25 bp, Homo sapien
gcctcacatgtccagtaagctactt

SEQ ID NO: 5606680 - DNA, 25 bp, Homo sapien
gtatcttcagcctcacatgtccagt

SEQ ID NO: 5606681 - DNA, 25 bp, Homo sapien
ttattatccagccaagtggactaaa

SEQ ID NO: 5606682 - DNA, 25 bp, Homo sapien
tgtagtggggaaaatctgtcacccc

SEQ ID NO: 5606683 - DNA, 25 bp, Homo sapien
ttaggtagaaaagtaatgtaagagc

SEQ ID NO: 5606684 - DNA, 25 bp, Homo sapien
atagtttaggacaagagaaaattcc

SEQ ID NO: 5606685 - DNA, 25 bp, Homo sapien
tttgatgcttgtagatggacagtgg

SEQ ID NO: 5606686 - DNA, 25 bp, Homo sapien
attccttgtgggttaaactgcggtg

SEQ ID NO: 5606687 - DNA, 25 bp, Homo sapien
acgcagaaggcgtaatcgcaaaact

SEQ ID NO: 5606688 - DNA, 25 bp, Homo sapien
ccccaaggatacgaattaggtagaa

SEQ ID NO: 5606689 - DNA, 25 bp, Homo sapien
atggacagtggtgccaatgtctatt

SEQ ID NO: 5606690 - DNA, 25 bp, Homo sapien
gcggaagacgagacttcgttacctc

SEQ ID NO: 5606691 - DNA, 25 bp, Homo sapien
caatcggacaaagaaggccataata

SEQ ID NO: 5606692 - DNA, 25 bp, Homo sapien
ttcctgccaaaggacggtgcttaga

SEQ ID NO: 5606693 - DNA, 25 bp, Homo sapien
tgggtggtaaatcattaagctagga

SEQ ID NO: 5606694 - DNA, 25 bp, Homo sapien
actgctcattagacggaagaggatt

SEQ ID NO: 5606695 - DNA, 25 bp, Homo sapien
tgtgccgtatagttagagactgctc

SEQ ID NO: 5606696 - DNA, 25 bp, Homo sapien
agcctcaccagggtctttgagaact

SEQ ID NO: 5606697 - DNA, 25 bp, Homo sapien
atagagtctacttaaggaacatgga

SEQ ID NO: 5606698 - DNA, 25 bp, Homo sapien
acccaagcataaatactggccagac

SEQ ID NO: 5606699 - DNA, 25 bp, Homo sapien
ggccagacagtactattgtgggtgg

SEQ ID NO: 5606700 - DNA, 25 bp, Homo sapien
ttgagaactttgacccagagccatt

SEQ ID NO: 5606701 - DNA, 25 bp, Homo sapien
cacacagttcaaggttagacttctc

SEQ ID NO: 5606702 - DNA, 25 bp, Homo sapien
cttagatgacagcaaatgtgccgta

SEQ ID NO: 5606703 - DNA, 25 bp, Homo sapien
gaagaggattgttgtacccaagcat

SEQ ID NO: 5606704 - DNA, 25 bp, Homo sapien
aaatgacattaaacctatacaccag

SEQ ID NO: 5606705 - DNA, 25 bp, Homo sapien
ctggtgtataggtttaatgtcattt

SEQ ID NO: 5606706 - DNA, 25 bp, Homo sapien
aacaacaccgtttatcatctttctc

SEQ ID NO: 5606707 - DNA, 25 bp, Homo sapien
tcatctttctctcccgcaggctggc

SEQ ID NO: 5606708 - DNA, 25 bp, Homo sapien
acaacaaaaacaacaccgtttatca

SEQ ID NO: 5606709 - DNA, 25 bp, Homo sapien
ggaggccctggccacctttcccagc

SEQ ID NO: 5606710 - DNA, 25 bp, Homo sapien
tctttctctcccgcaggctggctga

SEQ ID NO: 5606711 - DNA, 25 bp, Homo sapien
cacctttcccagccctgtggaggcc

SEQ ID NO: 5606712 - DNA, 25 bp, Homo sapien
agactccgtctcaaacaacaacaac

SEQ ID NO: 5606713 - DNA, 25 bp, Homo sapien
cctgtgtgacacagactccgtctca

SEQ ID NO: 5606714 - DNA, 25 bp, Homo sapien
tttctctcccgcaggctggctgaag

SEQ ID NO: 5606715 - DNA, 25 bp, Homo sapien
ccgtctcaaacaacaacaacaaaaa

SEQ ID NO: 5606716 - DNA, 25 bp, Homo sapien
ttgcactccagcctgtgtgacacag

SEQ ID NO: 5606717 - DNA, 25 bp, Homo sapien
tcaaaccgcattccccgtagtccca

SEQ ID NO: 5606718 - DNA, 25 bp, Homo sapien
tgggactacggggaatgcggtttga

SEQ ID NO: 5606719 - DNA, 25 bp, Homo sapien
tcctgacaaggtaagtaagcaacaa

SEQ ID NO: 5606720 - DNA, 25 bp, Homo sapien
agccgctgcgtctttgcagacttcc

SEQ ID NO: 5606721 - DNA, 25 bp, Homo sapien
ggcctagcacatagtgtgtagtcct

SEQ ID NO: 5606722 - DNA, 25 bp, Homo sapien
cctccagcaggaccatgtaaaacgt

SEQ ID NO: 5606723 - DNA, 25 bp, Homo sapien
tagctttcaggatgatactagtgtt

SEQ ID NO: 5606724 - DNA, 25 bp, Homo sapien
attctgcaagcagtcccctccagca

SEQ ID NO: 5606725 - DNA, 25 bp, Homo sapien
cctgataagataagtaagtcctgac

SEQ ID NO: 5606726 - DNA, 25 bp, Homo sapien
ttctgagataaagtggcctagcaca

SEQ ID NO: 5606727 - DNA, 25 bp, Homo sapien
gagatgacctcctacaggtagcccc

SEQ ID NO: 5606728 - DNA, 25 bp, Homo sapien
gtaaaacgtccctcaagccgctgcg

SEQ ID NO: 5606729 - DNA, 25 bp, Homo sapien
gggggagaacaatgagtaattactc

SEQ ID NO: 5606730 - DNA, 25 bp, Homo sapien
ataaaccacgttaagtgatcctaac

SEQ ID NO: 5606731 - DNA, 25 bp, Homo sapien
tcctccaacgtcatgttctgccttc

SEQ ID NO: 5606732 - DNA, 25 bp, Homo sapien
gcttgacttgagcgaaatgctaata

SEQ ID NO: 5606733 - DNA, 25 bp, Homo sapien
cagcagtttagcgccactcagtttc

SEQ ID NO: 5606734 - DNA, 25 bp, Homo sapien
cactactttacaaaggccctgtgtt

SEQ ID NO: 5606735 - DNA, 25 bp, Homo sapien
agaacaagattctgacctcccaaat

SEQ ID NO: 5606736 - DNA, 25 bp, Homo sapien
cctcccaaatcagcagtttagcgcc

SEQ ID NO: 5606737 - DNA, 25 bp, Homo sapien
gcgaaatgctaataaagcccagaac

SEQ ID NO: 5606738 - DNA, 25 bp, Homo sapien
tctctgcatatgacttgacaaggtg

SEQ ID NO: 5606739 - DNA, 25 bp, Homo sapien
gactatggctctagctttgatccca

SEQ ID NO: 5606740 - DNA, 25 bp, Homo sapien
gacttgacaaggtgattcgcttgac

SEQ ID NO: 5606741 - DNA, 25 bp, Homo sapien
actcaggctcccagagctttaggat

SEQ ID NO: 5606742 - DNA, 25 bp, Homo sapien
tgaagagactggactaatcagacta

SEQ ID NO: 5606743 - DNA, 25 bp, Homo sapien
gtttatgtctttatgcaggactaaa

SEQ ID NO: 5606744 - DNA, 25 bp, Homo sapien
cagagctttaggatttcagtaggat

SEQ ID NO: 5606745 - DNA, 25 bp, Homo sapien
aaagtgggtctaaagcttccatctg

SEQ ID NO: 5606746 - DNA, 25 bp, Homo sapien
aggatttcagtaggattataggcat

SEQ ID NO: 5606747 - DNA, 25 bp, Homo sapien
atgaaattctgcatacacatgaaga

SEQ ID NO: 5606748 - DNA, 25 bp, Homo sapien
ttatcaaagaggcccatcagccaaa

SEQ ID NO: 5606749 - DNA, 25 bp, Homo sapien
tttatgcaggactaaagtgaagaga

SEQ ID NO: 5606750 - DNA, 25 bp, Homo sapien
aagcaatcttcccaactcaggctcc

SEQ ID NO: 5606751 - DNA, 25 bp, Homo sapien
catctgattatcaaagaggcccatc

SEQ ID NO: 5606752 - DNA, 25 bp, Homo sapien
attaccaactacttaacagggtgct

SEQ ID NO: 5606753 - DNA, 25 bp, Homo sapien
tacttaacagggtgcttagaatggg

SEQ ID NO: 5606754 - DNA, 25 bp, Homo sapien
aagaacatgtaaggctataaggtgc

SEQ ID NO: 5606755 - DNA, 25 bp, Homo sapien
ttttaccagataaatggcatgcttt

SEQ ID NO: 5606756 - DNA, 25 bp, Homo sapien
tctgccagctcctgcgttaagcact

SEQ ID NO: 5606757 - DNA, 25 bp, Homo sapien
aattctacagactggccaggagact

SEQ ID NO: 5606758 - DNA, 25 bp, Homo sapien
ttcctaaggccactcaggacaaggc

SEQ ID NO: 5606759 - DNA, 25 bp, Homo sapien
caggacaaggccagtccgcaatttg

SEQ ID NO: 5606760 - DNA, 25 bp, Homo sapien
ataaggtgcctcatctttgccaaat

SEQ ID NO: 5606761 - DNA, 25 bp, Homo sapien
aattgctgttatttactgagtatcc

SEQ ID NO: 5606762 - DNA, 25 bp, Homo sapien
gcttagaatgggggattttaccaga

SEQ ID NO: 5606763 - DNA, 25 bp, Homo sapien
cagttctaacgttctccgggagttc

SEQ ID NO: 5606764 - DNA, 25 bp, Homo sapien
aacattagaggaacttatgcccttt

SEQ ID NO: 5606765 - DNA, 25 bp, Homo sapien
tctccaggccaattccagctgagtt

SEQ ID NO: 5606766 - DNA, 25 bp, Homo sapien
acagcccctcaaactacagcccagc

SEQ ID NO: 5606767 - DNA, 25 bp, Homo sapien
atgcattctgcaagcttcagctcag

SEQ ID NO: 5606768 - DNA, 25 bp, Homo sapien
aaatccatgagaatgaggactattt

SEQ ID NO: 5606769 - DNA, 25 bp, Homo sapien
tctccgggagttctcaccatcgttt

SEQ ID NO: 5606770 - DNA, 25 bp, Homo sapien
acattgcaataaacattagaggaac

SEQ ID NO: 5606771 - DNA, 25 bp, Homo sapien
ctgcctgccagactcctatgcattc

SEQ ID NO: 5606772 - DNA, 25 bp, Homo sapien
ctttaggggttacatcgtgtccatc

SEQ ID NO: 5606773 - DNA, 25 bp, Homo sapien
ccagcctgcagcccactatcatgtg

SEQ ID NO: 5606774 - DNA, 25 bp, Homo sapien
caccaccctctcagctcgtctccct

SEQ ID NO: 5606775 - DNA, 25 bp, Homo sapien
tgatcacagctgcaacaggagagaa

SEQ ID NO: 5606776 - DNA, 25 bp, Homo sapien
aagaggacttgcccgatgtagtctt

SEQ ID NO: 5606777 - DNA, 25 bp, Homo sapien
gagagaaacgcacacagtcatatgc

SEQ ID NO: 5606778 - DNA, 25 bp, Homo sapien
aataaataagaggacttgcccgatg

SEQ ID NO: 5606779 - DNA, 25 bp, Homo sapien
tgtgccacacaggatagccctttgc

SEQ ID NO: 5606780 - DNA, 25 bp, Homo sapien
cctaatttaaagagactatgacgtc

SEQ ID NO: 5606781 - DNA, 25 bp, Homo sapien
tcccccagtttactctgtgccacac

SEQ ID NO: 5606782 - DNA, 25 bp, Homo sapien
cactcagacacagtgactcacacac

SEQ ID NO: 5606783 - DNA, 25 bp, Homo sapien
cagtcatatgcactcagaagaccac

SEQ ID NO: 5606784 - DNA, 25 bp, Homo sapien
tccatggctagccaagtgagcatcc

SEQ ID NO: 5606785 - DNA, 25 bp, Homo sapien
accaaagcacagaatattgaatctt

SEQ ID NO: 5606786 - DNA, 25 bp, Homo sapien
aatgattctagaagaaatgaacttc

SEQ ID NO: 5606787 - DNA, 25 bp, Homo sapien
cacagtgatatatgaccttcggtcc

SEQ ID NO: 5606788 - DNA, 25 bp, Homo sapien
tgtgcaaattgtaaagccagctatt

SEQ ID NO: 5606789 - DNA, 25 bp, Homo sapien
cctattttggagtaatcgtcccctc

SEQ ID NO: 5606790 - DNA, 25 bp, Homo sapien
tcccatacaggatggaacaaaatcc

SEQ ID NO: 5606791 - DNA, 25 bp, Homo sapien
gccagctatttgtaaagccagccag

SEQ ID NO: 5606792 - DNA, 25 bp, Homo sapien
tctggagatgtaacaagttgtaaga

SEQ ID NO: 5606793 - DNA, 25 bp, Homo sapien
agttgtaagagtgtgtatgaatatc

SEQ ID NO: 5606794 - DNA, 25 bp, Homo sapien
cagtctgagctctggagatgtaaca

SEQ ID NO: 5606795 - DNA, 25 bp, Homo sapien
ctgccaatgtgaagacatgctggat

SEQ ID NO: 5606796 - DNA, 25 bp, Homo sapien
gacaggtgcaagacagcttctagca

SEQ ID NO: 5606797 - DNA, 25 bp, Homo sapien
cacctccgacggctccagctctttc

SEQ ID NO: 5606798 - DNA, 25 bp, Homo sapien
agctgcggcgggatattttgcagaa

SEQ ID NO: 5606799 - DNA, 25 bp, Homo sapien
ctctccggaagacctgagagaagaa

SEQ ID NO: 5606800 - DNA, 25 bp, Homo sapien
atttggtagatgctcagagactttc

SEQ ID NO: 5606801 - DNA, 25 bp, Homo sapien
gaagcaaagttaagagactcatcag

SEQ ID NO: 5606802 - DNA, 25 bp, Homo sapien
gaaggtaagaatcccagagtccctg

SEQ ID NO: 5606803 - DNA, 25 bp, Homo sapien
ccacacagagcttagaagcaaagtt

SEQ ID NO: 5606804 - DNA, 25 bp, Homo sapien
aaccgcaggtgtgcttgtacccttt

SEQ ID NO: 5606805 - DNA, 25 bp, Homo sapien
aagaacaaaaccattgagtcagcac

SEQ ID NO: 5606806 - DNA, 25 bp, Homo sapien
atccacagcaaaaacagagatgaca

SEQ ID NO: 5606807 - DNA, 25 bp, Homo sapien
gaagtagctaatatgagaaacaaac

SEQ ID NO: 5606808 - DNA, 25 bp, Homo sapien
ggactaaagtagctcatgttgcatt

SEQ ID NO: 5606809 - DNA, 25 bp, Homo sapien
tgtggcaaagcaccatactagggta

SEQ ID NO: 5606810 - DNA, 25 bp, Homo sapien
tatttgtggcaagtaacatgaaaca

SEQ ID NO: 5606811 - DNA, 25 bp, Homo sapien
acatacatggcaacaaaatgcaccc

SEQ ID NO: 5606812 - DNA, 25 bp, Homo sapien
cataatacatggacaacacaaattt

SEQ ID NO: 5606813 - DNA, 25 bp, Homo sapien
taaacaaacaggactaaagtagctc

SEQ ID NO: 5606814 - DNA, 25 bp, Homo sapien
tgtgctcctaatagagaagtagcta

SEQ ID NO: 5606815 - DNA, 25 bp, Homo sapien
taataccaaggccctctgagattag

SEQ ID NO: 5606816 - DNA, 25 bp, Homo sapien
actagggtagactatgatcttaaac

SEQ ID NO: 5606817 - DNA, 25 bp, Homo sapien
accttcagttaaagacaaatggtct

SEQ ID NO: 5606818 - DNA, 25 bp, Homo sapien
agtacacatagaaagagcacaccat

SEQ ID NO: 5606819 - DNA, 25 bp, Homo sapien
ggaccaggacaaccaataccaacac

SEQ ID NO: 5606820 - DNA, 25 bp, Homo sapien
gactggttatgagacctgaacacac

SEQ ID NO: 5606821 - DNA, 25 bp, Homo sapien
ctgacaacgtagacacagtgctgtt

SEQ ID NO: 5606822 - DNA, 25 bp, Homo sapien
tagatgcataataaaggtgaagatc

SEQ ID NO: 5606823 - DNA, 25 bp, Homo sapien
atgctaaatgctaaagaggaataaa

SEQ ID NO: 5606824 - DNA, 25 bp, Homo sapien
aagatgacactgactatagactggt

SEQ ID NO: 5606825 - DNA, 25 bp, Homo sapien
tacgcttgcaaatatggaccaggac

SEQ ID NO: 5606826 - DNA, 25 bp, Homo sapien
cgaataaaacggccgacttgacaga

SEQ ID NO: 5606827 - DNA, 25 bp, Homo sapien
cacagaaatgagtcaatggtggtaa

SEQ ID NO: 5606828 - DNA, 25 bp, Homo sapien
ctttgggcatctaaggaaaaacagc

SEQ ID NO: 5606829 - DNA, 25 bp, Homo sapien
caggactttacgtttaggaactaca

SEQ ID NO: 5606830 - DNA, 25 bp, Homo sapien
ggcacagcaacaaaagactagtaac

SEQ ID NO: 5606831 - DNA, 25 bp, Homo sapien
ataaaatcagcagataactgcatta

SEQ ID NO: 5606832 - DNA, 25 bp, Homo sapien
tatggaaaaaccaggtatatggcac

SEQ ID NO: 5606833 - DNA, 25 bp, Homo sapien
tatgaaaacccactacttatgaaat

SEQ ID NO: 5606834 - DNA, 25 bp, Homo sapien
aactgcattaacaggactttacgtt

SEQ ID NO: 5606835 - DNA, 25 bp, Homo sapien
atgcttcaggtagaagtaaatgtgc

SEQ ID NO: 5606836 - DNA, 25 bp, Homo sapien
ggtatatggcacagcaacaaaagac

SEQ ID NO: 5606837 - DNA, 25 bp, Homo sapien
atatgaagtgttgacattcacatgc

SEQ ID NO: 5606838 - DNA, 25 bp, Homo sapien
cttacggttattccacagaagactt

SEQ ID NO: 5606839 - DNA, 25 bp, Homo sapien
cacttcctgaggaaaataaacataa

SEQ ID NO: 5606840 - DNA, 25 bp, Homo sapien
cattcaacaaggaagcacaaatttc

SEQ ID NO: 5606841 - DNA, 25 bp, Homo sapien
aggagtacggctgaaccttcagtgt

SEQ ID NO: 5606842 - DNA, 25 bp, Homo sapien
aacaactccaaaatgcatatgcagc

SEQ ID NO: 5606843 - DNA, 25 bp, Homo sapien
tctgaaaaggtgttttacagtacca

SEQ ID NO: 5606844 - DNA, 25 bp, Homo sapien
gacactggtactttgggctttagcc

SEQ ID NO: 5606845 - DNA, 25 bp, Homo sapien
tttgaaaccaccaatgatataaatt

SEQ ID NO: 5606846 - DNA, 25 bp, Homo sapien
tttaacattcaacaaggaagcacaa

SEQ ID NO: 5606847 - DNA, 25 bp, Homo sapien
cttgaaatgagacactattgttgat

SEQ ID NO: 5606848 - DNA, 25 bp, Homo sapien
tttattgcagttcaatggctcagtt

SEQ ID NO: 5606849 - DNA, 25 bp, Homo sapien
agtattaaaccaaacatgaaaggag

SEQ ID NO: 5606850 - DNA, 25 bp, Homo sapien
accaacaaggacgttttattgaaca

SEQ ID NO: 5606851 - DNA, 25 bp, Homo sapien
cgacgtactcaacctacaagacgac

SEQ ID NO: 5606852 - DNA, 25 bp, Homo sapien
gtcgtcttgtaggttgagtacgtcg

SEQ ID NO: 5606853 - DNA, 25 bp, Homo sapien
caaggccatcttggttaagagggca

SEQ ID NO: 5606854 - DNA, 25 bp, Homo sapien
tttggaaagtccttagacctgtgtc

SEQ ID NO: 5606855 - DNA, 25 bp, Homo sapien
caccaactctaagaagaaggaagga

SEQ ID NO: 5606856 - DNA, 25 bp, Homo sapien
tcaagtgtgtgacttcatgtgagtt

SEQ ID NO: 5606857 - DNA, 25 bp, Homo sapien
cagcagcaccctccctggtctagtc

SEQ ID NO: 5606858 - DNA, 25 bp, Homo sapien
tgacatggatcagacacaaggccat

SEQ ID NO: 5606859 - DNA, 25 bp, Homo sapien
aatgtcattgtcagcagcaccctcc

SEQ ID NO: 5606860 - DNA, 25 bp, Homo sapien
cagggcttgggatgagacatcccat

SEQ ID NO: 5606861 - DNA, 25 bp, Homo sapien
ggtctagtctggccaccaccaactc

SEQ ID NO: 5606862 - DNA, 25 bp, Homo sapien
tgaccccatcatttgagacagacac

SEQ ID NO: 5606863 - DNA, 25 bp, Homo sapien
ctatgaaatggagttatgacagtac

SEQ ID NO: 5606864 - DNA, 25 bp, Homo sapien
acatgttgttgaagggaaggtctcc

SEQ ID NO: 5606865 - DNA, 25 bp, Homo sapien
ggagaccttcccttcaacaacatgt

SEQ ID NO: 5606866 - DNA, 25 bp, Homo sapien
gagagtcgttgcgacgtccaaaagt

SEQ ID NO: 5606867 - DNA, 25 bp, Homo sapien
acttttggacgtcgcaacgactctc

SEQ ID NO: 5606868 - DNA, 25 bp, Homo sapien
ggtgaaccaccgaaccagtgtttgc

SEQ ID NO: 5606869 - DNA, 25 bp, Homo sapien
ttaggccaactaggacatatgctta

SEQ ID NO: 5606870 - DNA, 25 bp, Homo sapien
gctacatacccagaattcaggattt

SEQ ID NO: 5606871 - DNA, 25 bp, Homo sapien
tatatacccggtgacctcctatgtc

SEQ ID NO: 5606872 - DNA, 25 bp, Homo sapien
gactacaggcatgaaaccagaactg

SEQ ID NO: 5606873 - DNA, 25 bp, Homo sapien
gagagtgaaaggaagcactattaaa

SEQ ID NO: 5606874 - DNA, 25 bp, Homo sapien
tcatacgaccgcgtgtcagatcatc

SEQ ID NO: 5606875 - DNA, 25 bp, Homo sapien
atatatagggtgatcgtacaattta

SEQ ID NO: 5606876 - DNA, 25 bp, Homo sapien
gagttaccagtgttcggtgaaccac

SEQ ID NO: 5606877 - DNA, 25 bp, Homo sapien
tacatgaagcataatcagagttacc

SEQ ID NO: 5606878 - DNA, 25 bp, Homo sapien
aaaatgggacatacctgagagtgaa

SEQ ID NO: 5606879 - DNA, 25 bp, Homo sapien
ccggggcttttgtctgatctatgtc

SEQ ID NO: 5606880 - DNA, 25 bp, Homo sapien
tgggagcatcgagcaatgttccttt

SEQ ID NO: 5606881 - DNA, 25 bp, Homo sapien
ggacgccccacaaggaccttcttca

SEQ ID NO: 5606882 - DNA, 25 bp, Homo sapien
tcctgctaccaaacagatcccgggg

SEQ ID NO: 5606883 - DNA, 25 bp, Homo sapien
gatcacacaggaagcctggaaacac

SEQ ID NO: 5606884 - DNA, 25 bp, Homo sapien
aaaatcatcgacgagctgccccatc

SEQ ID NO: 5606885 - DNA, 25 bp, Homo sapien
ccaggtctcacaaagagcctccttc

SEQ ID NO: 5606886 - DNA, 25 bp, Homo sapien
tccagacagttgtgagtccagcgga

SEQ ID NO: 5606887 - DNA, 25 bp, Homo sapien
ccatcagacagaaactccagacagt

SEQ ID NO: 5606888 - DNA, 25 bp, Homo sapien
cttatatttgaggaagaaatgagga

SEQ ID NO: 5606889 - DNA, 25 bp, Homo sapien
ccaaacagatcccggggcttttgtc

SEQ ID NO: 5606890 - DNA, 25 bp, Homo sapien
tgtatcccatccagaaaagcccctt

SEQ ID NO: 5606891 - DNA, 25 bp, Homo sapien
tttcactggctcaccatggtagcaa

SEQ ID NO: 5606892 - DNA, 25 bp, Homo sapien
agaaatcattagcaagtagcttggt

SEQ ID NO: 5606893 - DNA, 25 bp, Homo sapien
ggtagcaattcgtgtgtggtcccaa

SEQ ID NO: 5606894 - DNA, 25 bp, Homo sapien
tcttccaagcgtccactacatcctg

SEQ ID NO: 5606895 - DNA, 25 bp, Homo sapien
accaaatggagcatctggcaatctc

SEQ ID NO: 5606896 - DNA, 25 bp, Homo sapien
ttgggcagccttcatagacactatc

SEQ ID NO: 5606897 - DNA, 25 bp, Homo sapien
ataatcaggatagtgtttcaaggcc

SEQ ID NO: 5606898 - DNA, 25 bp, Homo sapien
cctgtatgggcttgactagttaatc

SEQ ID NO: 5606899 - DNA, 25 bp, Homo sapien
tgtgctaagcagactcctaccaaat

SEQ ID NO: 5606900 - DNA, 25 bp, Homo sapien
tgtaatcacaatccagtcctgcctt

SEQ ID NO: 5606901 - DNA, 25 bp, Homo sapien
tccatcaaatgtacgttagccctca

SEQ ID NO: 5606902 - DNA, 25 bp, Homo sapien
tgcttgaaggacgctcctggaattc

SEQ ID NO: 5606903 - DNA, 25 bp, Homo sapien
cctagttcagtggagtttgctcagg

SEQ ID NO: 5606904 - DNA, 25 bp, Homo sapien
cagggctccctgtctgtaggtcagt

SEQ ID NO: 5606905 - DNA, 25 bp, Homo sapien
ctcatctgtagtttgcaggtggggg

SEQ ID NO: 5606906 - DNA, 25 bp, Homo sapien
gccaggtgaagtctcctagcaccgc

SEQ ID NO: 5606907 - DNA, 25 bp, Homo sapien
ttcccaccacaaggatcagtgacac

SEQ ID NO: 5606908 - DNA, 25 bp, Homo sapien
ctttgttctgccaggcggcttcagg

SEQ ID NO: 5606909 - DNA, 25 bp, Homo sapien
gttgctcctgagagccaggtgaagt

SEQ ID NO: 5606910 - DNA, 25 bp, Homo sapien
caccgcatctgtccaggaagccact

SEQ ID NO: 5606911 - DNA, 25 bp, Homo sapien
caccagttctgaaaaccccaaccta

SEQ ID NO: 5606912 - DNA, 25 bp, Homo sapien
gaagtagaaactggggctttactga

SEQ ID NO: 5606913 - DNA, 25 bp, Homo sapien
acaaccagttaccaagtaaaatgct

SEQ ID NO: 5606914 - DNA, 25 bp, Homo sapien
aagagtagagaatttttacaaacca

SEQ ID NO: 5606915 - DNA, 25 bp, Homo sapien
tgaaaaccaaggtctggctgagaca

SEQ ID NO: 5606916 - DNA, 25 bp, Homo sapien
aaaaggcatttgaagaaaccaacaa

SEQ ID NO: 5606917 - DNA, 25 bp, Homo sapien
gtaacattttcaaccccatccagcc

SEQ ID NO: 5606918 - DNA, 25 bp, Homo sapien
tctgctttgggaatgttaccaagac

SEQ ID NO: 5606919 - DNA, 25 bp, Homo sapien
tttactgaaaaccaaggtctggctg

SEQ ID NO: 5606920 - DNA, 25 bp, Homo sapien
atgttaccaagacttaaaaggcatt

SEQ ID NO: 5606921 - DNA, 25 bp, Homo sapien
atttctccccgaggctgagtacgca

SEQ ID NO: 5606922 - DNA, 25 bp, Homo sapien
ccacggggatttctccccgaggctg

SEQ ID NO: 5606923 - DNA, 25 bp, Homo sapien
gaagtctgaatcttggtggttcaac

SEQ ID NO: 5606924 - DNA, 25 bp, Homo sapien
gttgaaccaccaagattcagacttc

SEQ ID NO: 5606925 - DNA, 25 bp, Homo sapien
agatgctaacaattgggaatagggc

SEQ ID NO: 5606926 - DNA, 25 bp, Homo sapien
atcaaagaccttaatatcagccaga

SEQ ID NO: 5606927 - DNA, 25 bp, Homo sapien
caatcttgaatcatctgagaatgtt

SEQ ID NO: 5606928 - DNA, 25 bp, Homo sapien
gcataaagaagactagtattgatat

SEQ ID NO: 5606929 - DNA, 25 bp, Homo sapien
atcagccagatgctaacaattggga

SEQ ID NO: 5606930 - DNA, 25 bp, Homo sapien
ctatcagctgtattagagggaatac

SEQ ID NO: 5606931 - DNA, 25 bp, Homo sapien
agaaacattgaattcataagccctc

SEQ ID NO: 5606932 - DNA, 25 bp, Homo sapien
attaaaaggattgcctcagaagaaa

SEQ ID NO: 5606933 - DNA, 25 bp, Homo sapien
aaaatatgcataaagaagactagta

SEQ ID NO: 5606934 - DNA, 25 bp, Homo sapien
caggtatagtattcaggacatacac

SEQ ID NO: 5606935 - DNA, 25 bp, Homo sapien
agcctttgtcaaaagacatgcaagt

SEQ ID NO: 5606936 - DNA, 25 bp, Homo sapien
tttgagattgtcctggaatcctatc

SEQ ID NO: 5606937 - DNA, 25 bp, Homo sapien
tctcaaaactcaggtgatggtatac

SEQ ID NO: 5606938 - DNA, 25 bp, Homo sapien
tgatggtatacacgtgggtctactt

SEQ ID NO: 5606939 - DNA, 25 bp, Homo sapien
tacattaaagaacttgctaggattt

SEQ ID NO: 5606940 - DNA, 25 bp, Homo sapien
ctgtcctgataaatagaagttctcc

SEQ ID NO: 5606941 - DNA, 25 bp, Homo sapien
gtccattctacaggatagccttgac

SEQ ID NO: 5606942 - DNA, 25 bp, Homo sapien
ggttgcaatgaatttaggaaaaagc

SEQ ID NO: 5606943 - DNA, 25 bp, Homo sapien
gcttactccaagattacaactgtcc

SEQ ID NO: 5606944 - DNA, 25 bp, Homo sapien
taggaaaaagcaatagttttgagat

SEQ ID NO: 5606945 - DNA, 25 bp, Homo sapien
gctaggattttaaggttgcaatgaa

SEQ ID NO: 5606946 - DNA, 25 bp, Homo sapien
agtacatttactggaaagaacaccc

SEQ ID NO: 5606947 - DNA, 25 bp, Homo sapien
tgtagaccagagatcctagtgctgc

SEQ ID NO: 5606948 - DNA, 25 bp, Homo sapien
gcatcaacggccaacatttaaaacc

SEQ ID NO: 5606949 - DNA, 25 bp, Homo sapien
gtcgagaacacatccaggtcaccac

SEQ ID NO: 5606950 - DNA, 25 bp, Homo sapien
ttccctctgaggccacaacaggccc

SEQ ID NO: 5606951 - DNA, 25 bp, Homo sapien
ctggtgtgttctgcagagcatgtgt

SEQ ID NO: 5606952 - DNA, 25 bp, Homo sapien
gtcttgtggcacccctgagattgtc

SEQ ID NO: 5606953 - DNA, 25 bp, Homo sapien
aacaacatatagagcaacaggaatt

SEQ ID NO: 5606954 - DNA, 25 bp, Homo sapien
gattgtcctggcaaagtcgagaaca

SEQ ID NO: 5606955 - DNA, 25 bp, Homo sapien
agccattcaggccaacacatccaga

SEQ ID NO: 5606956 - DNA, 25 bp, Homo sapien
atgtgacaatcaactggtaagaact

SEQ ID NO: 5606957 - DNA, 25 bp, Homo sapien
gtcacaagcagcacaacagccattc

SEQ ID NO: 5606958 - DNA, 25 bp, Homo sapien
cccaaacagaaggcattgggcaaaa

SEQ ID NO: 5606959 - DNA, 25 bp, Homo sapien
aacgcgccaattcctgcactttgcc

SEQ ID NO: 5606960 - DNA, 25 bp, Homo sapien
tacccaactgcaacgcgccaattcc

SEQ ID NO: 5606961 - DNA, 25 bp, Homo sapien
acccagctacccaactgcaacgcgc

SEQ ID NO: 5606962 - DNA, 25 bp, Homo sapien
attctggaggcaaatcccaaacagc

SEQ ID NO: 5606963 - DNA, 25 bp, Homo sapien
ggcaaaatgtgtgtttccctaggaa

SEQ ID NO: 5606964 - DNA, 25 bp, Homo sapien
caaaaaggacctttattctggaggc

SEQ ID NO: 5606965 - DNA, 25 bp, Homo sapien
gctgtgataacaggtgtcaaccacc

SEQ ID NO: 5606966 - DNA, 25 bp, Homo sapien
agaggagggctcacttttcaaagtt

SEQ ID NO: 5606967 - DNA, 25 bp, Homo sapien
caccacacccagtcagggctcactt

SEQ ID NO: 5606968 - DNA, 25 bp, Homo sapien
gaggcaaatcccaaacagcaaagca

SEQ ID NO: 5606969 - DNA, 25 bp, Homo sapien
gggtttgaactgcataggaccgctt

SEQ ID NO: 5606970 - DNA, 25 bp, Homo sapien
taccaaatctgcctgaagcaaaatg

SEQ ID NO: 5606971 - DNA, 25 bp, Homo sapien
ttggtagttggtagacaaagaatac

SEQ ID NO: 5606972 - DNA, 25 bp, Homo sapien
aagttgattctcaaacacgggtttg

SEQ ID NO: 5606973 - DNA, 25 bp, Homo sapien
acactggaagtcataaagttgattc

SEQ ID NO: 5606974 - DNA, 25 bp, Homo sapien
actaagaaaaaggtgtgtcatgaat

SEQ ID NO: 5606975 - DNA, 25 bp, Homo sapien
caaaacaatggcctagagaactatc

SEQ ID NO: 5606976 - DNA, 25 bp, Homo sapien
agtcaaactgaggagtatttgtttc

SEQ ID NO: 5606977 - DNA, 25 bp, Homo sapien
tgtagcttagaaatactgaaaaact

SEQ ID NO: 5606978 - DNA, 25 bp, Homo sapien
cttgcagatgcaccatgtagcttag

SEQ ID NO: 5606979 - DNA, 25 bp, Homo sapien
gtggagaatgacactggaagtcata

SEQ ID NO: 5606980 - DNA, 25 bp, Homo sapien
tccttagatccttcgggaggccact

SEQ ID NO: 5606981 - DNA, 25 bp, Homo sapien
acatttgtttaggatgagagctgcc

SEQ ID NO: 5606982 - DNA, 25 bp, Homo sapien
ttagcttactggacggccaccatct

SEQ ID NO: 5606983 - DNA, 25 bp, Homo sapien
tgagaagttccacaacaggccatct

SEQ ID NO: 5606984 - DNA, 25 bp, Homo sapien
aaatgggacttattggaggaattaa

SEQ ID NO: 5606985 - DNA, 25 bp, Homo sapien
tgactgaaatgttgtggggtaaatg

SEQ ID NO: 5606986 - DNA, 25 bp, Homo sapien
tggtgtatgccctggagtccaaggg

SEQ ID NO: 5606987 - DNA, 25 bp, Homo sapien
atctgataatggaggttgagaagtt

SEQ ID NO: 5606988 - DNA, 25 bp, Homo sapien
ggaagcaggacttaatccagcccaa

SEQ ID NO: 5606989 - DNA, 25 bp, Homo sapien
tccaagggctagaaatcctagactc

SEQ ID NO: 5606990 - DNA, 25 bp, Homo sapien
agcagagaccctgaaatgctggaag

SEQ ID NO: 5606991 - DNA, 25 bp, Homo sapien
acttcttaggtaggcagagttctcg

SEQ ID NO: 5606992 - DNA, 25 bp, Homo sapien
cccattttagcacagaactgcagca

SEQ ID NO: 5606993 - DNA, 25 bp, Homo sapien
atttggacagtaaatcagaaaatac

SEQ ID NO: 5606994 - DNA, 25 bp, Homo sapien
ttccacttagaacacaatgaacttc

SEQ ID NO: 5606995 - DNA, 25 bp, Homo sapien
agagtaaattacaccttgggatata

SEQ ID NO: 5606996 - DNA, 25 bp, Homo sapien
aaaagaattgaagaagtgattagaa

SEQ ID NO: 5606997 - DNA, 25 bp, Homo sapien
ttatccagagccattttagacaaca

SEQ ID NO: 5606998 - DNA, 25 bp, Homo sapien
gaagtgattagaaaggatatgcatt

SEQ ID NO: 5606999 - DNA, 25 bp, Homo sapien
aagggcactgctttcattcaaggac

SEQ ID NO: 5607000 - DNA, 25 bp, Homo sapien
ctcgttcacttaaccacaaccccat

SEQ ID NO: 5607001 - DNA, 25 bp, Homo sapien
gctatgtgagtgttaggttcccacg

SEQ ID NO: 5607002 - DNA, 25 bp, Homo sapien
agatgcacacaaaaacagcaccctc

SEQ ID NO: 5607003 - DNA, 25 bp, Homo sapien
ctctggctcccaaggggtcaaagaa

SEQ ID NO: 5607004 - DNA, 25 bp, Homo sapien
caccctcatttccagggggagcctc

SEQ ID NO: 5607005 - DNA, 25 bp, Homo sapien
aatgtgctccatggacctggaagcg

SEQ ID NO: 5607006 - DNA, 25 bp, Homo sapien
agctgccactaccacagatgcacac

SEQ ID NO: 5607007 - DNA, 25 bp, Homo sapien
ccctgggactggcatacacagggca

SEQ ID NO: 5607008 - DNA, 25 bp, Homo sapien
ttgaatctctctcggccaggcacat

SEQ ID NO: 5607009 - DNA, 25 bp, Homo sapien
agcctcaggccccgagataaatgtg

SEQ ID NO: 5607010 - DNA, 25 bp, Homo sapien
ggctcttggggtttcagtctcacac

SEQ ID NO: 5607011 - DNA, 25 bp, Homo sapien
acctggaagcgggtagttccaggtc

SEQ ID NO: 5607012 - DNA, 25 bp, Homo sapien
tgatctttcaacagacaggtggggc

SEQ ID NO: 5607013 - DNA, 25 bp, Homo sapien
attgaggaaaacttctgtcatgctc

SEQ ID NO: 5607014 - DNA, 25 bp, Homo sapien
atcagtgagcaaatatagtgtccct

SEQ ID NO: 5607015 - DNA, 25 bp, Homo sapien
ataggatatccgggtaactagtaat

SEQ ID NO: 5607016 - DNA, 25 bp, Homo sapien
acagctggaatgtgtagaacacgtt

SEQ ID NO: 5607017 - DNA, 25 bp, Homo sapien
agaccacccagactagtcaagtatc

SEQ ID NO: 5607018 - DNA, 25 bp, Homo sapien
tttccagtatcccagttcacccaac

SEQ ID NO: 5607019 - DNA, 25 bp, Homo sapien
ggtaggaggaactttgcaattccat

SEQ ID NO: 5607020 - DNA, 25 bp, Homo sapien
acataaacatggaatcagagtaaac

SEQ ID NO: 5607021 - DNA, 25 bp, Homo sapien
cagagtaaacaggatattgaggaaa

SEQ ID NO: 5607022 - DNA, 25 bp, Homo sapien
ggtcttatgccccgtatgctgccat

SEQ ID NO: 5607023 - DNA, 25 bp, Homo sapien
ccatgaacgtggcccctacaaaaac

SEQ ID NO: 5607024 - DNA, 25 bp, Homo sapien
cttgtggccgagacaaggacgatga

SEQ ID NO: 5607025 - DNA, 25 bp, Homo sapien
tcatcgtccttgtctcggccacaag

SEQ ID NO: 5607026 - DNA, 25 bp, Homo sapien
ctccagggatatactgccctgcttc

SEQ ID NO: 5607027 - DNA, 25 bp, Homo sapien
tcgcatggaccccccaatgcctcta

SEQ ID NO: 5607028 - DNA, 25 bp, Homo sapien
ttgaacctttcgcatggacccccca

SEQ ID NO: 5607029 - DNA, 25 bp, Homo sapien
aagatggactgagaattaaagacct

SEQ ID NO: 5607030 - DNA, 25 bp, Homo sapien
ccaacaatttaaggtatggagataa

SEQ ID NO: 5607031 - DNA, 25 bp, Homo sapien
catccaaaggatctaccaacaattt

SEQ ID NO: 5607032 - DNA, 25 bp, Homo sapien
atgtaataggctgtttgaacctttc

SEQ ID NO: 5607033 - DNA, 25 bp, Homo sapien
attaaagacctggaacaaagtacaa

SEQ ID NO: 5607034 - DNA, 25 bp, Homo sapien
aaactgtgctgggcacacaataagc

SEQ ID NO: 5607035 - DNA, 25 bp, Homo sapien
aatgtatcatgtgaagtacacaatc

SEQ ID NO: 5607036 - DNA, 25 bp, Homo sapien
agctttaaagaggtgtatgtgaaaa

SEQ ID NO: 5607037 - DNA, 25 bp, Homo sapien
gagttgtgaagatgatttgtgtagc

SEQ ID NO: 5607038 - DNA, 25 bp, Homo sapien
acagatgtttaaggatttgggggat

SEQ ID NO: 5607039 - DNA, 25 bp, Homo sapien
cccgatgttcctgacgcgtaggggg

SEQ ID NO: 5607040 - DNA, 25 bp, Homo sapien
gggggatctacgtgaatccagcttg

SEQ ID NO: 5607041 - DNA, 25 bp, Homo sapien
ctggggtctctttgaggttgaaggg

SEQ ID NO: 5607042 - DNA, 25 bp, Homo sapien
gtgaaaaagaagcgagaatatttac

SEQ ID NO: 5607043 - DNA, 25 bp, Homo sapien
tgagggtatttgagcttcgagttgt

SEQ ID NO: 5607044 - DNA, 25 bp, Homo sapien
gtggacactgaaaatgacgttgctc

SEQ ID NO: 5607045 - DNA, 25 bp, Homo sapien
actgccgagggttaaatcctggtta

SEQ ID NO: 5607046 - DNA, 25 bp, Homo sapien
caccagctgaacactgagggtattt

SEQ ID NO: 5607047 - DNA, 25 bp, Homo sapien
caaatagtgaagacacaccagctga

SEQ ID NO: 5607048 - DNA, 25 bp, Homo sapien
ggcacctgggatgtccatctgcgtt

SEQ ID NO: 5607049 - DNA, 25 bp, Homo sapien
actccgtgggcctgatctccctggg

SEQ ID NO: 5607050 - DNA, 25 bp, Homo sapien
tccatgctggcctccccgcctcagg

SEQ ID NO: 5607051 - DNA, 25 bp, Homo sapien
gaataaaggcaatttgctaactttc

SEQ ID NO: 5607052 - DNA, 25 bp, Homo sapien
atggcctgtggcgtgccacacacag

SEQ ID NO: 5607053 - DNA, 25 bp, Homo sapien
tcggtgtcattaggcacagctggag

SEQ ID NO: 5607054 - DNA, 25 bp, Homo sapien
cccgcctcagggcttcatcccactc

SEQ ID NO: 5607055 - DNA, 25 bp, Homo sapien
gtccatctgcgttagctggagctac

SEQ ID NO: 5607056 - DNA, 25 bp, Homo sapien
cagcggcatttcggtgtcattaggc

SEQ ID NO: 5607057 - DNA, 25 bp, Homo sapien
agctggagctactccatggcctgtg

SEQ ID NO: 5607058 - DNA, 25 bp, Homo sapien
ccacacacagcggcatttcggtgtc

SEQ ID NO: 5607059 - DNA, 25 bp, Homo sapien
gttccaccctggcctgttgcctcac

SEQ ID NO: 5607060 - DNA, 25 bp, Homo sapien
gtccggttccaccctggcctgttgc

SEQ ID NO: 5607061 - DNA, 25 bp, Homo sapien
cagggtgcctgtaggtctccaccca

SEQ ID NO: 5607062 - DNA, 25 bp, Homo sapien
tgcctcacatgcaacaagtgtctga

SEQ ID NO: 5607063 - DNA, 25 bp, Homo sapien
ctttgtccggttccaccctggcctg

SEQ ID NO: 5607064 - DNA, 25 bp, Homo sapien
tttccctcagcaggtgtctccatgc

SEQ ID NO: 5607065 - DNA, 25 bp, Homo sapien
tgcaacaagtgtctgaatgtggcgc

SEQ ID NO: 5607066 - DNA, 25 bp, Homo sapien
catgcaacaagtgtctgaatgtggc

SEQ ID NO: 5607067 - DNA, 25 bp, Homo sapien
agcgctcgtgggctttccctcagca

SEQ ID NO: 5607068 - DNA, 25 bp, Homo sapien
gtgcctgtaggtctccacccagatg

SEQ ID NO: 5607069 - DNA, 25 bp, Homo sapien
cgtgggctttccctcagcaggtgtc

SEQ ID NO: 5607070 - DNA, 25 bp, Homo sapien
gagggaggcttttccttgacaccag

SEQ ID NO: 5607071 - DNA, 25 bp, Homo sapien
ttcccagcagtaaaaaaattcagag

SEQ ID NO: 5607072 - DNA, 25 bp, Homo sapien
cctgactccatagtggggcaaatgg

SEQ ID NO: 5607073 - DNA, 25 bp, Homo sapien
ggagtcacttggtttgtgtggcctc

SEQ ID NO: 5607074 - DNA, 25 bp, Homo sapien
agcatgcactattgtggtaagctgc

SEQ ID NO: 5607075 - DNA, 25 bp, Homo sapien
ggaactacaggagtcacttggtttg

SEQ ID NO: 5607076 - DNA, 25 bp, Homo sapien
gttagcaaagccccaagcatccttc

SEQ ID NO: 5607077 - DNA, 25 bp, Homo sapien
tggaactaatctactcagcatgcac

SEQ ID NO: 5607078 - DNA, 25 bp, Homo sapien
gtaagctgcttgatttaggtctgcc

SEQ ID NO: 5607079 - DNA, 25 bp, Homo sapien
cctatggccctggaacctcttatgc

SEQ ID NO: 5607080 - DNA, 25 bp, Homo sapien
taaaatcacatggagtggctattcc

SEQ ID NO: 5607081 - DNA, 25 bp, Homo sapien
ggcagggtcccatattgtggggtgg

SEQ ID NO: 5607082 - DNA, 25 bp, Homo sapien
tttagtgctaggaccagtttggagt

SEQ ID NO: 5607083 - DNA, 25 bp, Homo sapien
gctgtaggggaaagctcttcctttg

SEQ ID NO: 5607084 - DNA, 25 bp, Homo sapien
agctgagtccatagtctgagggaga

SEQ ID NO: 5607085 - DNA, 25 bp, Homo sapien
tggaaaggagtttgtgacattgaca

SEQ ID NO: 5607086 - DNA, 25 bp, Homo sapien
tgggtcttgccagtgcatgtgagac

SEQ ID NO: 5607087 - DNA, 25 bp, Homo sapien
ttgacagcatgaaaatgggtcttgc

SEQ ID NO: 5607088 - DNA, 25 bp, Homo sapien
ggttcggtgttagctgagtccatag

SEQ ID NO: 5607089 - DNA, 25 bp, Homo sapien
catgtgagactgcctcccaacactc

SEQ ID NO: 5607090 - DNA, 25 bp, Homo sapien
acccacacccgccctccaagagttg

SEQ ID NO: 5607091 - DNA, 25 bp, Homo sapien
tttattgatgcattggttggacaca

SEQ ID NO: 5607092 - DNA, 25 bp, Homo sapien
tatcatatctgtctccaaaatggac

SEQ ID NO: 5607093 - DNA, 25 bp, Homo sapien
ataaaaggattttatgtgccaaatc

SEQ ID NO: 5607094 - DNA, 25 bp, Homo sapien
aattaagaagatacttgaagttcat

SEQ ID NO: 5607095 - DNA, 25 bp, Homo sapien
agctttgtaaaaaggatgtaaacag

SEQ ID NO: 5607096 - DNA, 25 bp, Homo sapien
tatgacagcaaaaacaaaattctct

SEQ ID NO: 5607097 - DNA, 25 bp, Homo sapien
tgaagttcattcaaatggcacttgc

SEQ ID NO: 5607098 - DNA, 25 bp, Homo sapien
ataaagtgaaaacatgttggaaggt

SEQ ID NO: 5607099 - DNA, 25 bp, Homo sapien
tccaaaatggacatatatgacagca

SEQ ID NO: 5607100 - DNA, 25 bp, Homo sapien
aagaatgaaaagaataagatttatc

SEQ ID NO: 5607101 - DNA, 25 bp, Homo sapien
tggcacttgcagaaatgcaacttaa

SEQ ID NO: 5607102 - DNA, 25 bp, Homo sapien
actatgtaactaaaatagctagttc

SEQ ID NO: 5607103 - DNA, 25 bp, Homo sapien
gactactcgagaaagagttcagggc

SEQ ID NO: 5607104 - DNA, 25 bp, Homo sapien
actctgcagttcagtcgcctgcccc

SEQ ID NO: 5607105 - DNA, 25 bp, Homo sapien
tatgttggatgattgcagttattat

SEQ ID NO: 5607106 - DNA, 25 bp, Homo sapien
cgcctgccccatacgcccctcaaac

SEQ ID NO: 5607107 - DNA, 25 bp, Homo sapien
gcacacagatgtccagttattctag

SEQ ID NO: 5607108 - DNA, 25 bp, Homo sapien
tcggatgtggcaaaaccaaacagga

SEQ ID NO: 5607109 - DNA, 25 bp, Homo sapien
cctgaaatctctggggactactcga

SEQ ID NO: 5607110 - DNA, 25 bp, Homo sapien
taaggtgcaaggtataggtttaata

SEQ ID NO: 5607111 - DNA, 25 bp, Homo sapien
aaccaaacaggatcccgattgcttc

SEQ ID NO: 5607112 - DNA, 25 bp, Homo sapien
acactgtcagtattctcaaggctcc

SEQ ID NO: 5607113 - DNA, 25 bp, Homo sapien
cctcaaacctaacagctggggcctg

SEQ ID NO: 5607114 - DNA, 25 bp, Homo sapien
tgtcactcataaggttgtgttgtcc

SEQ ID NO: 5607115 - DNA, 25 bp, Homo sapien
ttgcattcaaacagagactcaggct

SEQ ID NO: 5607116 - DNA, 25 bp, Homo sapien
cagaatgccaacagatgtcactcat

SEQ ID NO: 5607117 - DNA, 25 bp, Homo sapien
tggatgaagtttgtattaatgccgg

SEQ ID NO: 5607118 - DNA, 25 bp, Homo sapien
ttagagaccacttccacatgttcac

SEQ ID NO: 5607119 - DNA, 25 bp, Homo sapien
cacatgttcactgctctgctgccaa

SEQ ID NO: 5607120 - DNA, 25 bp, Homo sapien
taatgccggataacaaaaacaccaa

SEQ ID NO: 5607121 - DNA, 25 bp, Homo sapien
tccacagaatgccaacagatgtcac

SEQ ID NO: 5607122 - DNA, 25 bp, Homo sapien
tctaatatgatacttggcaaacaaa

SEQ ID NO: 5607123 - DNA, 25 bp, Homo sapien
aaggttgtgttgtcctggagagttc

SEQ ID NO: 5607124 - DNA, 25 bp, Homo sapien
attttaagggtctttacttgcattc

SEQ ID NO: 5607125 - DNA, 25 bp, Homo sapien
taccctaagccattgaaattgttcc

SEQ ID NO: 5607126 - DNA, 25 bp, Homo sapien
agcctacccgagtatccgggattac

SEQ ID NO: 5607127 - DNA, 25 bp, Homo sapien
acttcagtcacatgaggacactctc

SEQ ID NO: 5607128 - DNA, 25 bp, Homo sapien
tccaaggacaaaatgaacggtcaaa

SEQ ID NO: 5607129 - DNA, 25 bp, Homo sapien
gttgtactgacaaaggatccaaatt

SEQ ID NO: 5607130 - DNA, 25 bp, Homo sapien
tcaattctggagattctggggttat

SEQ ID NO: 5607131 - DNA, 25 bp, Homo sapien
aacggtcaaaaaacagggctgtata

SEQ ID NO: 5607132 - DNA, 25 bp, Homo sapien
ttcaattaagaagagtagcacatac

SEQ ID NO: 5607133 - DNA, 25 bp, Homo sapien
gtggtagtgactccaaggacaaaat

SEQ ID NO: 5607134 - DNA, 25 bp, Homo sapien
cactttgaggccaagtggtagtgac

SEQ ID NO: 5607135 - DNA, 25 bp, Homo sapien
taaggaaagggttacatgttcacac

SEQ ID NO: 5607136 - DNA, 25 bp, Homo sapien
cccaaggagctcttctgcctgcctc

SEQ ID NO: 5607137 - DNA, 25 bp, Homo sapien
tgcccttcctctgccgtagccttcc

SEQ ID NO: 5607138 - DNA, 25 bp, Homo sapien
ctgggatacaaacagccccaggtcc

SEQ ID NO: 5607139 - DNA, 25 bp, Homo sapien
aaccatccaaagagccctccctgtt

SEQ ID NO: 5607140 - DNA, 25 bp, Homo sapien
actactcactagctgtcacttggtc

SEQ ID NO: 5607141 - DNA, 25 bp, Homo sapien
gggttcaggcccagcactactcact

SEQ ID NO: 5607142 - DNA, 25 bp, Homo sapien
ctgcctcagcggctatagcaagagt

SEQ ID NO: 5607143 - DNA, 25 bp, Homo sapien
acttggtctttctgagccgcatttc

SEQ ID NO: 5607144 - DNA, 25 bp, Homo sapien
ttcctcccactgcaacgccacctgt

SEQ ID NO: 5607145 - DNA, 25 bp, Homo sapien
ggaggccccttcccataggattgtc

SEQ ID NO: 5607146 - DNA, 25 bp, Homo sapien
gcatttctgttacgtaggtggaggc

SEQ ID NO: 5607147 - DNA, 25 bp, Homo sapien
atcatagggctgttgaaaaacttcc

SEQ ID NO: 5607148 - DNA, 25 bp, Homo sapien
gttaggcagacataattctagtata

SEQ ID NO: 5607149 - DNA, 25 bp, Homo sapien
aatgggagtgagtttacttatattc

SEQ ID NO: 5607150 - DNA, 25 bp, Homo sapien
cataagttagagtctgatatctgac

SEQ ID NO: 5607151 - DNA, 25 bp, Homo sapien
tgtaaaaatagtgattgacagttta

SEQ ID NO: 5607152 - DNA, 25 bp, Homo sapien
tgacagtttataaatcatagggctg

SEQ ID NO: 5607153 - DNA, 25 bp, Homo sapien
gtatgagaaatacactaatctactt

SEQ ID NO: 5607154 - DNA, 25 bp, Homo sapien
atttaagtaattgttaggcagacat

SEQ ID NO: 5607155 - DNA, 25 bp, Homo sapien
atatcgagaatattagcacatttac

SEQ ID NO: 5607156 - DNA, 25 bp, Homo sapien
actaaaaaagcaaatctatgccatc

SEQ ID NO: 5607157 - DNA, 25 bp, Homo sapien
catagtgacttagaaaattgtgata

SEQ ID NO: 5607158 - DNA, 25 bp, Homo sapien
tcctgcagacggagatcagatttat

SEQ ID NO: 5607159 - DNA, 25 bp, Homo sapien
gtcacaaaagtaagtaaacagctaa

SEQ ID NO: 5607160 - DNA, 25 bp, Homo sapien
ccaggatctgggtatcctgtggccc

SEQ ID NO: 5607161 - DNA, 25 bp, Homo sapien
aatgccaactaagattctgtggagg

SEQ ID NO: 5607162 - DNA, 25 bp, Homo sapien
gaaccatcacagtcctcaaccaaca

SEQ ID NO: 5607163 - DNA, 25 bp, Homo sapien
gtggaggagataatagtacaaagtt

SEQ ID NO: 5607164 - DNA, 25 bp, Homo sapien
taatagtacaaagttaggcccttgc

SEQ ID NO: 5607165 - DNA, 25 bp, Homo sapien
cttaaaacagagaaaccaaggttca

SEQ ID NO: 5607166 - DNA, 25 bp, Homo sapien
ggcccccaaaggatggacaatatct

SEQ ID NO: 5607167 - DNA, 25 bp, Homo sapien
caagagatcaaacacaaatgccaac

SEQ ID NO: 5607168 - DNA, 25 bp, Homo sapien
acagacacagtcagaaataatatct

SEQ ID NO: 5607169 - DNA, 25 bp, Homo sapien
aggaccaccagtgcatgtgtgactc

SEQ ID NO: 5607170 - DNA, 25 bp, Homo sapien
actcatacagccagaaagtcaggtt

SEQ ID NO: 5607171 - DNA, 25 bp, Homo sapien
gtggcatttgtctgcagggcatatg

SEQ ID NO: 5607172 - DNA, 25 bp, Homo sapien
agcttaagaggaccaaggtttcagt

SEQ ID NO: 5607173 - DNA, 25 bp, Homo sapien
aaagaaaaatggtctggatgtcact

SEQ ID NO: 5607174 - DNA, 25 bp, Homo sapien
cttttctgcacggacagcaggacca

SEQ ID NO: 5607175 - DNA, 25 bp, Homo sapien
atgtgtgactcagtgtggcatttgt

SEQ ID NO: 5607176 - DNA, 25 bp, Homo sapien
agtacttctgcagctggaatggtcc

SEQ ID NO: 5607177 - DNA, 25 bp, Homo sapien
cagctggaatggtccttcagagaac

SEQ ID NO: 5607178 - DNA, 25 bp, Homo sapien
agttcttctagaaaggagacactta

SEQ ID NO: 5607179 - DNA, 25 bp, Homo sapien
cagtatgtagtagcttaagaggacc

SEQ ID NO: 5607180 - DNA, 25 bp, Homo sapien
gcatatggttaagttataaggaagg

SEQ ID NO: 5607181 - DNA, 25 bp, Homo sapien
tcttacagatctctacacagacatc

SEQ ID NO: 5607182 - DNA, 25 bp, Homo sapien
aggaaggtatagttgtagactaaac

SEQ ID NO: 5607183 - DNA, 25 bp, Homo sapien
ctacacagacatctgtgacccttca

SEQ ID NO: 5607184 - DNA, 25 bp, Homo sapien
gtgacccttcagacgttcaggatgc

SEQ ID NO: 5607185 - DNA, 25 bp, Homo sapien
atggttaagttataaggaaggtata

SEQ ID NO: 5607186 - DNA, 25 bp, Homo sapien
atagttgtagactaaaccaaatatt

SEQ ID NO: 5607187 - DNA, 25 bp, Homo sapien
cccttcagacgttcaggatgcccca

SEQ ID NO: 5607188 - DNA, 25 bp, Homo sapien
taaatgcatatggttaagttataag

SEQ ID NO: 5607189 - DNA, 25 bp, Homo sapien
agaagggaacatagagcttcctgtc

SEQ ID NO: 5607190 - DNA, 25 bp, Homo sapien
agggaacatagagcttcctgtctgc

SEQ ID NO: 5607191 - DNA, 25 bp, Homo sapien
ctgcaaaggccaaggatgcttgtat

SEQ ID NO: 5607192 - DNA, 25 bp, Homo sapien
gagaatctggagttaagtgacttgc

SEQ ID NO: 5607193 - DNA, 25 bp, Homo sapien
tcttgatgtggttggattgtaggaa

SEQ ID NO: 5607194 - DNA, 25 bp, Homo sapien
atattgccaaatagggtgaagatca

SEQ ID NO: 5607195 - DNA, 25 bp, Homo sapien
ataagggttacccgtgattttctca

SEQ ID NO: 5607196 - DNA, 25 bp, Homo sapien
tagatgacagcactgagaatctgga

SEQ ID NO: 5607197 - DNA, 25 bp, Homo sapien
tacggtcacacagctacacagcctt

SEQ ID NO: 5607198 - DNA, 25 bp, Homo sapien
aagggagtacaaatggcatagaatt

SEQ ID NO: 5607199 - DNA, 25 bp, Homo sapien
agcctttcagtgatacagtcagaat

SEQ ID NO: 5607200 - DNA, 25 bp, Homo sapien
ttgcaccacgtgcaatgcagcctgg

SEQ ID NO: 5607201 - DNA, 25 bp, Homo sapien
acaactctgaggtgtatattcattc

SEQ ID NO: 5607202 - DNA, 25 bp, Homo sapien
catttataacaaaggaagatgactt

SEQ ID NO: 5607203 - DNA, 25 bp, Homo sapien
ggccacagtggactatggaaacaca

SEQ ID NO: 5607204 - DNA, 25 bp, Homo sapien
agtagtccctaaatacaagccaagt

SEQ ID NO: 5607205 - DNA, 25 bp, Homo sapien
tattaccaaagaggagatgatggag

SEQ ID NO: 5607206 - DNA, 25 bp, Homo sapien
aaactaaatgatctagccgtgtgtg

SEQ ID NO: 5607207 - DNA, 25 bp, Homo sapien
ggaccaaagtagatcttacaaagac

SEQ ID NO: 5607208 - DNA, 25 bp, Homo sapien
gcgccattgagtggcccaagctcaa

SEQ ID NO: 5607209 - DNA, 25 bp, Homo sapien
aatcagcctgacaaaggcgccattg

SEQ ID NO: 5607210 - DNA, 25 bp, Homo sapien
atgacttttaagccagaggagtgcc

SEQ ID NO: 5607211 - DNA, 25 bp, Homo sapien
cccaagctcaatacagagggccaca

SEQ ID NO: 5607212 - DNA, 25 bp, Homo sapien
tatggcaacctctgcgactattacc

SEQ ID NO: 5607213 - DNA, 25 bp, Homo sapien
ccggtctcgggtacgtccaggagga

SEQ ID NO: 5607214 - DNA, 25 bp, Homo sapien
tcctcctggacgtacccgagaccgg

SEQ ID NO: 5607215 - DNA, 25 bp, Homo sapien
acaaactaatagaccaaagctcccc

SEQ ID NO: 5607216 - DNA, 25 bp, Homo sapien
attccatgaacttatgagacagtgg

SEQ ID NO: 5607217 - DNA, 25 bp, Homo sapien
atgcagaaaccccagggcaactttt

SEQ ID NO: 5607218 - DNA, 25 bp, Homo sapien
gcatgattaaaatggaggcagaaag

SEQ ID NO: 5607219 - DNA, 25 bp, Homo sapien
gaggcagaaagccatttcattccat

SEQ ID NO: 5607220 - DNA, 25 bp, Homo sapien
gtcttgagccattgtgaaaatccac

SEQ ID NO: 5607221 - DNA, 25 bp, Homo sapien
agctccccaggatatatgggcctcc

SEQ ID NO: 5607222 - DNA, 25 bp, Homo sapien
atgagacagtggattttagttcaat

SEQ ID NO: 5607223 - DNA, 25 bp, Homo sapien
cccaggaaagtgtctgagtagtgtt

SEQ ID NO: 5607224 - DNA, 25 bp, Homo sapien
acaaacctaggacaaattcataatt

SEQ ID NO: 5607225 - DNA, 25 bp, Homo sapien
taaaaaatgagaagcatgatgtata

SEQ ID NO: 5607226 - DNA, 25 bp, Homo sapien
ttttacattgcatcagaggcagaac

SEQ ID NO: 5607227 - DNA, 25 bp, Homo sapien
actgaaattgcaaagcgttatagct

SEQ ID NO: 5607228 - DNA, 25 bp, Homo sapien
ttattgtggagcctgaatgtctaat

SEQ ID NO: 5607229 - DNA, 25 bp, Homo sapien
acatgccacttcagttgggtggtcc

SEQ ID NO: 5607230 - DNA, 25 bp, Homo sapien
gaaaagtgagttatgttgatgaatt

SEQ ID NO: 5607231 - DNA, 25 bp, Homo sapien
tttgtttcagggttcatgtacatta

SEQ ID NO: 5607232 - DNA, 25 bp, Homo sapien
atatgggaaaacttagtagaatttc

SEQ ID NO: 5607233 - DNA, 25 bp, Homo sapien
taaggtattcaagtttgtggcattc

SEQ ID NO: 5607234 - DNA, 25 bp, Homo sapien
atcagaggcagaactgttactgaaa

SEQ ID NO: 5607235 - DNA, 25 bp, Homo sapien
agttgggtggtccaaatcattatct

SEQ ID NO: 5607236 - DNA, 25 bp, Homo sapien
tagtagaatttcaactcagcctaac

SEQ ID NO: 5607237 - DNA, 25 bp, Homo sapien
gatcacagctagttggtggcaaagc

SEQ ID NO: 5607238 - DNA, 25 bp, Homo sapien
cctgactcaccatctctaagccttc

SEQ ID NO: 5607239 - DNA, 25 bp, Homo sapien
tggccaagaaggcacctccttttcc

SEQ ID NO: 5607240 - DNA, 25 bp, Homo sapien
ccatctaacaggttgggatcacagc

SEQ ID NO: 5607241 - DNA, 25 bp, Homo sapien
gattacgggtatgagcccccgtgtc

SEQ ID NO: 5607242 - DNA, 25 bp, Homo sapien
aatcaaactgatctggcaaccctat

SEQ ID NO: 5607243 - DNA, 25 bp, Homo sapien
aaggatatggtcatagtttccaccc

SEQ ID NO: 5607244 - DNA, 25 bp, Homo sapien
gagaactgaccgtgcttgtgggtcc

SEQ ID NO: 5607245 - DNA, 25 bp, Homo sapien
ggcttagagcagacagcaagccttt

SEQ ID NO: 5607246 - DNA, 25 bp, Homo sapien
tccccattggttccctgggcttaga

SEQ ID NO: 5607247 - DNA, 25 bp, Homo sapien
tctttcacttggccaagaaggcacc

SEQ ID NO: 5607248 - DNA, 25 bp, Homo sapien
ggtcatcgtggctacatgttagaac

SEQ ID NO: 5607249 - DNA, 25 bp, Homo sapien
gttctaacatgtagccacgatgacc

SEQ ID NO: 5607250 - DNA, 25 bp, Homo sapien
gtaaacgctgaccaccaaacacatc

SEQ ID NO: 5607251 - DNA, 25 bp, Homo sapien
tacagctaaataatggggactaatt

SEQ ID NO: 5607252 - DNA, 25 bp, Homo sapien
aactatgagcacaaatgaactgttc

SEQ ID NO: 5607253 - DNA, 25 bp, Homo sapien
gaatattctggatcatggtaaacgc

SEQ ID NO: 5607254 - DNA, 25 bp, Homo sapien
gcctggtggttaactggactcagta

SEQ ID NO: 5607255 - DNA, 25 bp, Homo sapien
atggggactaatttcctacagagat

SEQ ID NO: 5607256 - DNA, 25 bp, Homo sapien
tatctctggtctctgaaatcctgtc

SEQ ID NO: 5607257 - DNA, 25 bp, Homo sapien
cttattaatagtggggtacagatgg

SEQ ID NO: 5607258 - DNA, 25 bp, Homo sapien
acacatctggtacaaatatcaaagc

SEQ ID NO: 5607259 - DNA, 25 bp, Homo sapien
atcctgtcataaaccttcccccttc

SEQ ID NO: 5607260 - DNA, 25 bp, Homo sapien
accagtactatgacgttaagcctta

SEQ ID NO: 5607261 - DNA, 25 bp, Homo sapien
tgagaggaagttatattaagatgac

SEQ ID NO: 5607262 - DNA, 25 bp, Homo sapien
tgtaaaaggccatgtgtcaactcca

SEQ ID NO: 5607263 - DNA, 25 bp, Homo sapien
ccagattactatgggtgaggtagtc

SEQ ID NO: 5607264 - DNA, 25 bp, Homo sapien
tgcaaagcacatataacaagtcaca

SEQ ID NO: 5607265 - DNA, 25 bp, Homo sapien
catatgttaatgagctgcctagcat

SEQ ID NO: 5607266 - DNA, 25 bp, Homo sapien
ttgaccaggactccagactcactgc

SEQ ID NO: 5607267 - DNA, 25 bp, Homo sapien
atgatatgacagcaagtactcagtc

SEQ ID NO: 5607268 - DNA, 25 bp, Homo sapien
ttaagatgacagatcacaaattgct

SEQ ID NO: 5607269 - DNA, 25 bp, Homo sapien
ttggtcacctggattgaggccatat

SEQ ID NO: 5607270 - DNA, 25 bp, Homo sapien
cagtcacctgccagcacagactaag

SEQ ID NO: 5607271 - DNA, 25 bp, Homo sapien
aagaaagttaaatgagaggaagtta

SEQ ID NO: 5607272 - DNA, 25 bp, Homo sapien
acgacgaggttattggtaacatgag

SEQ ID NO: 5607273 - DNA, 25 bp, Homo sapien
ctcatgttaccaataacctcgtcgt

SEQ ID NO: 5607274 - DNA, 25 bp, Homo sapien
ccgccccgtagacaccctactcctc

SEQ ID NO: 5607275 - DNA, 25 bp, Homo sapien
accctactcctcggtgagctgcggt

SEQ ID NO: 5607276 - DNA, 25 bp, Homo sapien
gatggacttgtcattacagaaaacc

SEQ ID NO: 5607277 - DNA, 25 bp, Homo sapien
aaataccctttctcagtgcggttcc

SEQ ID NO: 5607278 - DNA, 25 bp, Homo sapien
aaaactatgttttaggaatctgtac

SEQ ID NO: 5607279 - DNA, 25 bp, Homo sapien
aaggagtcacttagtaaaactatgt

SEQ ID NO: 5607280 - DNA, 25 bp, Homo sapien
aacatgaaatcagtcacctgaccac

SEQ ID NO: 5607281 - DNA, 25 bp, Homo sapien
aatcagtcacctgaccactccccac

SEQ ID NO: 5607282 - DNA, 25 bp, Homo sapien
tctcagtgcggttccttctaaaaag

SEQ ID NO: 5607283 - DNA, 25 bp, Homo sapien
ctcctgtttgcaactaaaaaaccca

SEQ ID NO: 5607284 - DNA, 25 bp, Homo sapien
tactcctcggtgagctgcggtttaa

SEQ ID NO: 5607285 - DNA, 25 bp, Homo sapien
tacaagtagtcttatccatggggga

SEQ ID NO: 5607286 - DNA, 25 bp, Homo sapien
aagtgggacagcctaagatttcatc

SEQ ID NO: 5607287 - DNA, 25 bp, Homo sapien
gcatatgatatgaggctagagaatc

SEQ ID NO: 5607288 - DNA, 25 bp, Homo sapien
acggtgggtaacatatacagcgtgc

SEQ ID NO: 5607289 - DNA, 25 bp, Homo sapien
gtgactaaacggtgggtaacatata

SEQ ID NO: 5607290 - DNA, 25 bp, Homo sapien
gggtagctgaaaccatggaaagcaa

SEQ ID NO: 5607291 - DNA, 25 bp, Homo sapien
gaaacatttgatagaacagaaccct

SEQ ID NO: 5607292 - DNA, 25 bp, Homo sapien
agaatccagatggctgctaagtgac

SEQ ID NO: 5607293 - DNA, 25 bp, Homo sapien
atattgtgattgactatgggtagct

SEQ ID NO: 5607294 - DNA, 25 bp, Homo sapien
tatacagcgtgcataagcaggacaa

SEQ ID NO: 5607295 - DNA, 25 bp, Homo sapien
aattcacatcccaggcgagacgaag

SEQ ID NO: 5607296 - DNA, 25 bp, Homo sapien
aaactgggtttcctggctcacattt

SEQ ID NO: 5607297 - DNA, 25 bp, Homo sapien
gcgggcactccacattggcacaaag

SEQ ID NO: 5607298 - DNA, 25 bp, Homo sapien
gcgggcactccgcatcgacatgtgt

SEQ ID NO: 5607299 - DNA, 25 bp, Homo sapien
gcaggtggcactccacatcggcaca

SEQ ID NO: 5607300 - DNA, 25 bp, Homo sapien
acctggacagctatttgaaatttaa

SEQ ID NO: 5607301 - DNA, 25 bp, Homo sapien
gtagaacacaaaacttagaagccaa

SEQ ID NO: 5607302 - DNA, 25 bp, Homo sapien
ataatctttaagggggaagagcatt

SEQ ID NO: 5607303 - DNA, 25 bp, Homo sapien
aaactagaagtagatcaatgatttc

SEQ ID NO: 5607304 - DNA, 25 bp, Homo sapien
actccacattggcacaaagcgaggg

SEQ ID NO: 5607305 - DNA, 25 bp, Homo sapien
acataactcatgaaaggaagatctg

SEQ ID NO: 5607306 - DNA, 25 bp, Homo sapien
ccacatcggcacatgtgagcaggtg

SEQ ID NO: 5607307 - DNA, 25 bp, Homo sapien
tctcagcactttgaagtccagggcg

SEQ ID NO: 5607308 - DNA, 25 bp, Homo sapien
gccactcccctgaggtaggatggtg

SEQ ID NO: 5607309 - DNA, 25 bp, Homo sapien
gactaaccaacaagaggtcaggtgt

SEQ ID NO: 5607310 - DNA, 25 bp, Homo sapien
tcaggtgtggcagctcacactctgt

SEQ ID NO: 5607311 - DNA, 25 bp, Homo sapien
ccatcaaccttgcgggaatctcctc

SEQ ID NO: 5607312 - DNA, 25 bp, Homo sapien
gccagcagaagtgaagatcatcctg

SEQ ID NO: 5607313 - DNA, 25 bp, Homo sapien
ccctgaacatgggactttgagtgtt

SEQ ID NO: 5607314 - DNA, 25 bp, Homo sapien
tccctgaagtaggataaccagtctt

SEQ ID NO: 5607315 - DNA, 25 bp, Homo sapien
gtgaagatcatcctgggctgtaccc

SEQ ID NO: 5607316 - DNA, 25 bp, Homo sapien
tcttaagcatggaccttgcccctgt

SEQ ID NO: 5607317 - DNA, 25 bp, Homo sapien
tgagtgttaaaactgtgacagccat

SEQ ID NO: 5607318 - DNA, 25 bp, Homo sapien
aatattcagggtgcaaaaattccac

SEQ ID NO: 5607319 - DNA, 25 bp, Homo sapien
caactaaaagtacccaaacagtctc

SEQ ID NO: 5607320 - DNA, 25 bp, Homo sapien
accctggcaaagtcagaacaaaacc

SEQ ID NO: 5607321 - DNA, 25 bp, Homo sapien
gactaaaaatagcacaaagaaatct

SEQ ID NO: 5607322 - DNA, 25 bp, Homo sapien
caaatggtgttgtactggttcagtc

SEQ ID NO: 5607323 - DNA, 25 bp, Homo sapien
gttttagtcctgtcagagggaggga

SEQ ID NO: 5607324 - DNA, 25 bp, Homo sapien
gtcattcagtacagcggcctggttt

SEQ ID NO: 5607325 - DNA, 25 bp, Homo sapien
ttcagcagtgttagtacagtcagcc

SEQ ID NO: 5607326 - DNA, 25 bp, Homo sapien
agctaaacttgaattggccccccac

SEQ ID NO: 5607327 - DNA, 25 bp, Homo sapien
atctgagaaacaacaaccctggcaa

SEQ ID NO: 5607328 - DNA, 25 bp, Homo sapien
acaaatgaggtgatgtgtggtatta

SEQ ID NO: 5607329 - DNA, 25 bp, Homo sapien
gttggaagtgcaaacgtgcctaact

SEQ ID NO: 5607330 - DNA, 25 bp, Homo sapien
taccaagtagctgctgactggggaa

SEQ ID NO: 5607331 - DNA, 25 bp, Homo sapien
gggaacttgatagtgggctctttgc

SEQ ID NO: 5607332 - DNA, 25 bp, Homo sapien
ctttccccagcctagtccggtccac

SEQ ID NO: 5607333 - DNA, 25 bp, Homo sapien
gaagcagagcacaggcatctttcaa

SEQ ID NO: 5607334 - DNA, 25 bp, Homo sapien
ggtgaccgacatgccacagtgacta

SEQ ID NO: 5607335 - DNA, 25 bp, Homo sapien
gtacagaaggggtatgaccattaat

SEQ ID NO: 5607336 - DNA, 25 bp, Homo sapien
ccaaataacaacagggagcattact

SEQ ID NO: 5607337 - DNA, 25 bp, Homo sapien
gagcctcaaccttggccagccaccc

SEQ ID NO: 5607338 - DNA, 25 bp, Homo sapien
ttagtcaccacaccatgggccggtt

SEQ ID NO: 5607339 - DNA, 25 bp, Homo sapien
gtgcctaactgtggctgctgagcct

SEQ ID NO: 5607340 - DNA, 25 bp, Homo sapien
tgcaaagcaactataaaatacattt

SEQ ID NO: 5607341 - DNA, 25 bp, Homo sapien
ctttcgtatcgaagaagactacata

SEQ ID NO: 5607342 - DNA, 25 bp, Homo sapien
agttatttagtgtatgcaaagcaac

SEQ ID NO: 5607343 - DNA, 25 bp, Homo sapien
taccaaatttcgagagccaccattg

SEQ ID NO: 5607344 - DNA, 25 bp, Homo sapien
aatgagcttaaatgagacttttgaa

SEQ ID NO: 5607345 - DNA, 25 bp, Homo sapien
gtatgaccattaaatcaggagaaaa

SEQ ID NO: 5607346 - DNA, 25 bp, Homo sapien
ccaaactcagtccaggaaaaaagaa

SEQ ID NO: 5607347 - DNA, 25 bp, Homo sapien
gatcagttggatataattgtgtttc

SEQ ID NO: 5607348 - DNA, 25 bp, Homo sapien
aaggcatatacaacatggatcagtt

SEQ ID NO: 5607349 - DNA, 25 bp, Homo sapien
cgaagaagactacataagagaaagg

SEQ ID NO: 5607350 - DNA, 25 bp, Homo sapien
aatggcttgagagattttgttggtc

SEQ ID NO: 5607351 - DNA, 25 bp, Homo sapien
caagagagctggatcattaattaga

SEQ ID NO: 5607352 - DNA, 25 bp, Homo sapien
ggaggataagactgttaaactggca

SEQ ID NO: 5607353 - DNA, 25 bp, Homo sapien
attagatcaagagtttggcaaacag

SEQ ID NO: 5607354 - DNA, 25 bp, Homo sapien
actatattagaatggcagcaacagc

SEQ ID NO: 5607355 - DNA, 25 bp, Homo sapien
gcaaacaggttatgtgaagggtaaa

SEQ ID NO: 5607356 - DNA, 25 bp, Homo sapien
cagtgtaaccctgaactcccgggct

SEQ ID NO: 5607357 - DNA, 25 bp, Homo sapien
gccagagatttgggatacaatctta

SEQ ID NO: 5607358 - DNA, 25 bp, Homo sapien
tcagctctacaggccgtatgttctc

SEQ ID NO: 5607359 - DNA, 25 bp, Homo sapien
aacaaaaagttacacaagagagctg

SEQ ID NO: 5607360 - DNA, 25 bp, Homo sapien
gaatggcagcaacagccagagattt

SEQ ID NO: 5607361 - DNA, 25 bp, Homo sapien
tgccagttactggaggataagactg

SEQ ID NO: 5607362 - DNA, 25 bp, Homo sapien
ttcccaggggaaattcatatgaatt

SEQ ID NO: 5607363 - DNA, 25 bp, Homo sapien
agagcacgcacatcacgacctccaa

SEQ ID NO: 5607364 - DNA, 25 bp, Homo sapien
aaatatgatggcaaccttgacagtt

SEQ ID NO: 5607365 - DNA, 25 bp, Homo sapien
gacaaaactcaaatatgatggcaac

SEQ ID NO: 5607366 - DNA, 25 bp, Homo sapien
tacagagaatctaataaaactaagc

SEQ ID NO: 5607367 - DNA, 25 bp, Homo sapien
aatcctagactagaaaacaagtgtt

SEQ ID NO: 5607368 - DNA, 25 bp, Homo sapien
ggctggttggtaagctcatgttgtt

SEQ ID NO: 5607369 - DNA, 25 bp, Homo sapien
gcataacaacagtgggcacctcaga

SEQ ID NO: 5607370 - DNA, 25 bp, Homo sapien
ctcagacctactgaggcagagcacg

SEQ ID NO: 5607371 - DNA, 25 bp, Homo sapien
ctaagagaataaagtaggtagaatt

SEQ ID NO: 5607372 - DNA, 25 bp, Homo sapien
cacgacctccaacgctctcccttcc

SEQ ID NO: 5607373 - DNA, 25 bp, Homo sapien
atcacttgccagatgggagtgaagg

SEQ ID NO: 5607374 - DNA, 25 bp, Homo sapien
ctcactgcctctgagtaggggtgta

SEQ ID NO: 5607375 - DNA, 25 bp, Homo sapien
tgacattagtggaggtaagatgtgt

SEQ ID NO: 5607376 - DNA, 25 bp, Homo sapien
cagttctccactgggccccactgac

SEQ ID NO: 5607377 - DNA, 25 bp, Homo sapien
ttagtcccaatgaaagtagggcacc

SEQ ID NO: 5607378 - DNA, 25 bp, Homo sapien
gtagggcaccaacctgtatcacctc

SEQ ID NO: 5607379 - DNA, 25 bp, Homo sapien
ttccctctgggccgcaccaacatca

SEQ ID NO: 5607380 - DNA, 25 bp, Homo sapien
caaaggacccagctaacaacagggg

SEQ ID NO: 5607381 - DNA, 25 bp, Homo sapien
gggacggaagttcagctccactctt

SEQ ID NO: 5607382 - DNA, 25 bp, Homo sapien
agctccccaaaggacccagctaaca

SEQ ID NO: 5607383 - DNA, 25 bp, Homo sapien
taggggtgtaagctcacctccctgc

SEQ ID NO: 5607384 - DNA, 25 bp, Homo sapien
tatcattaaatggcagctggaagct

SEQ ID NO: 5607385 - DNA, 25 bp, Homo sapien
acgcccgctgctactccagacgtcg

SEQ ID NO: 5607386 - DNA, 25 bp, Homo sapien
gatcataacatggaaaagggctttg

SEQ ID NO: 5607387 - DNA, 25 bp, Homo sapien
aacccacacaaggtagggtgcacat

SEQ ID NO: 5607388 - DNA, 25 bp, Homo sapien
gtcaggcagactttggcgaaactgt

SEQ ID NO: 5607389 - DNA, 25 bp, Homo sapien
aacccaggccatatagtcaggcaga

SEQ ID NO: 5607390 - DNA, 25 bp, Homo sapien
taaaaggcaaagttatgtccgagta

SEQ ID NO: 5607391 - DNA, 25 bp, Homo sapien
gtgcacatggttattggaaggttcc

SEQ ID NO: 5607392 - DNA, 25 bp, Homo sapien
ggcagctcctcgattcggccccttt

SEQ ID NO: 5607393 - DNA, 25 bp, Homo sapien
atatctctggcttgactgcgggttc

SEQ ID NO: 5607394 - DNA, 25 bp, Homo sapien
tctccagtcctgaaaccctcgccca

SEQ ID NO: 5607395 - DNA, 25 bp, Homo sapien
ccctgcatggatgccatagtggagg

SEQ ID NO: 5607396 - DNA, 25 bp, Homo sapien
taatggggcacaaacataagagtta

SEQ ID NO: 5607397 - DNA, 25 bp, Homo sapien
tagaggaaaaacaaggtgttgctct

SEQ ID NO: 5607398 - DNA, 25 bp, Homo sapien
gtggccatgctaacagaggcaaatc

SEQ ID NO: 5607399 - DNA, 25 bp, Homo sapien
gagtatctccaggtgcataacagac

SEQ ID NO: 5607400 - DNA, 25 bp, Homo sapien
gccatgcctctggagcaagaactag

SEQ ID NO: 5607401 - DNA, 25 bp, Homo sapien
ataagagttacagagactaaagctt

SEQ ID NO: 5607402 - DNA, 25 bp, Homo sapien
agagtaatctctaagtggccatgct

SEQ ID NO: 5607403 - DNA, 25 bp, Homo sapien
gattctagcctcaaagccatgcctc

SEQ ID NO: 5607404 - DNA, 25 bp, Homo sapien
ggagggtctctgaagtagaacagag

SEQ ID NO: 5607405 - DNA, 25 bp, Homo sapien
aactgaacaagattgcttagtcccc

SEQ ID NO: 5607406 - DNA, 25 bp, Homo sapien
gagcctttcgagagtggatcacttt

SEQ ID NO: 5607407 - DNA, 25 bp, Homo sapien
agtaaggaagaaaactagcaaataa

SEQ ID NO: 5607408 - DNA, 25 bp, Homo sapien
taggaatgaagagaagtccacaaat

SEQ ID NO: 5607409 - DNA, 25 bp, Homo sapien
gtccacaaatggccacccgtgctgg

SEQ ID NO: 5607410 - DNA, 25 bp, Homo sapien
ccgtgctggtgctcaagaaaagttt

SEQ ID NO: 5607411 - DNA, 25 bp, Homo sapien
gtaccaggcactgggataaagatga

SEQ ID NO: 5607412 - DNA, 25 bp, Homo sapien
ggccctggcatgacttgaacccaac

SEQ ID NO: 5607413 - DNA, 25 bp, Homo sapien
gaatggtggctcaatagatgacttc

SEQ ID NO: 5607414 - DNA, 25 bp, Homo sapien
agccagagatatagaaaggtcctat

SEQ ID NO: 5607415 - DNA, 25 bp, Homo sapien
tttgcctagagctaaacgaggagat

SEQ ID NO: 5607416 - DNA, 25 bp, Homo sapien
gaacccaaccacagactggaaagga

SEQ ID NO: 5607417 - DNA, 25 bp, Homo sapien
caccagcacgttacggagtgggaga

SEQ ID NO: 5607418 - DNA, 25 bp, Homo sapien
tctcccactccgtaacgtgctggtg

SEQ ID NO: 5607419 - DNA, 25 bp, Homo sapien
tgggacaaagtgctccatgatggaa

SEQ ID NO: 5607420 - DNA, 25 bp, Homo sapien
taatctgactgaaaatgggacaaag

SEQ ID NO: 5607421 - DNA, 25 bp, Homo sapien
acttattatctgggcaggaggctgt

SEQ ID NO: 5607422 - DNA, 25 bp, Homo sapien
cccactgccctcagcagggactgtg

SEQ ID NO: 5607423 - DNA, 25 bp, Homo sapien
cctggcaagctgtctcctgaaaacc

SEQ ID NO: 5607424 - DNA, 25 bp, Homo sapien
tggtacatcagacatagaaagaact

SEQ ID NO: 5607425 - DNA, 25 bp, Homo sapien
aggccatgtgcctccaccagcccca

SEQ ID NO: 5607426 - DNA, 25 bp, Homo sapien
aggactggctgagactccaaattca

SEQ ID NO: 5607427 - DNA, 25 bp, Homo sapien
aggaggctgtcacctggtacatcag

SEQ ID NO: 5607428 - DNA, 25 bp, Homo sapien
gcagctgatgttgaggacttcctga

SEQ ID NO: 5607429 - DNA, 25 bp, Homo sapien
tgcccattctggctgggccgtgcgg

SEQ ID NO: 5607430 - DNA, 25 bp, Homo sapien
gctggtgccgcatcgtccagtgacg

SEQ ID NO: 5607431 - DNA, 25 bp, Homo sapien
cgtcactggacgatgcggcaccagc

SEQ ID NO: 5607432 - DNA, 25 bp, Homo sapien
gcaaatttaaatgacaaacacaagg

SEQ ID NO: 5607433 - DNA, 25 bp, Homo sapien
ggctcagtcctaggaatacacgtca

SEQ ID NO: 5607434 - DNA, 25 bp, Homo sapien
agtcctaggaatacacgtcatgccc

SEQ ID NO: 5607435 - DNA, 25 bp, Homo sapien
cagaccaaatcttgggtaccagctg

SEQ ID NO: 5607436 - DNA, 25 bp, Homo sapien
ccaattgtgacagtaaatggagaaa

SEQ ID NO: 5607437 - DNA, 25 bp, Homo sapien
tttccccacacagaccaaatcttgg

SEQ ID NO: 5607438 - DNA, 25 bp, Homo sapien
gggaagcgcttccactttctgggca

SEQ ID NO: 5607439 - DNA, 25 bp, Homo sapien
gctcttgccttaagggaagcgcttc

SEQ ID NO: 5607440 - DNA, 25 bp, Homo sapien
acacgtcatgccccttgttgcttgc

SEQ ID NO: 5607441 - DNA, 25 bp, Homo sapien
ttctgttaccagatacatgggtttt

SEQ ID NO: 5607442 - DNA, 25 bp, Homo sapien
tgacaaacacaaggatggtaaaaag

SEQ ID NO: 5607443 - DNA, 25 bp, Homo sapien
ttaaaattgtgaggtgaataaacag

SEQ ID NO: 5607444 - DNA, 25 bp, Homo sapien
tccaagaattagatgagaaaacatt

SEQ ID NO: 5607445 - DNA, 25 bp, Homo sapien
ctgtctccagatgaaccataccttg

SEQ ID NO: 5607446 - DNA, 25 bp, Homo sapien
aatgggggataatattaaatactcc

SEQ ID NO: 5607447 - DNA, 25 bp, Homo sapien
cataccttgagactgatgaatgtcc

SEQ ID NO: 5607448 - DNA, 25 bp, Homo sapien
aggatcttgctatgtcttgccaggc

SEQ ID NO: 5607449 - DNA, 25 bp, Homo sapien
aaagtaccaagtgcaggaatgattc

SEQ ID NO: 5607450 - DNA, 25 bp, Homo sapien
ctggcagtcattcaacagaggtctg

SEQ ID NO: 5607451 - DNA, 25 bp, Homo sapien
aacagactccaaaagtaccaagtgc

SEQ ID NO: 5607452 - DNA, 25 bp, Homo sapien
agcagaacccttacgtctggcagtc

SEQ ID NO: 5607453 - DNA, 25 bp, Homo sapien
atgaatgtccagatgaagtagcctt

SEQ ID NO: 5607454 - DNA, 25 bp, Homo sapien
ctcgaccttcggaccgtggacctca

SEQ ID NO: 5607455 - DNA, 25 bp, Homo sapien
tgaggtccacggtccgaaggtcgag

SEQ ID NO: 5607456 - DNA, 25 bp, Homo sapien
ccttgttggcttgggtatcagtggg

SEQ ID NO: 5607457 - DNA, 25 bp, Homo sapien
ttcacaccatcccacggcctgcaac

SEQ ID NO: 5607458 - DNA, 25 bp, Homo sapien
ggcacagtctgtactgagaggacga

SEQ ID NO: 5607459 - DNA, 25 bp, Homo sapien
gagagctcagctgtgatctggagcc

SEQ ID NO: 5607460 - DNA, 25 bp, Homo sapien
tggcttttcctggcctgcctggcac

SEQ ID NO: 5607461 - DNA, 25 bp, Homo sapien
aaggccccagccgcgtttctctttg

SEQ ID NO: 5607462 - DNA, 25 bp, Homo sapien
gatctctaaaggttggtgagagctc

SEQ ID NO: 5607463 - DNA, 25 bp, Homo sapien
gagaggacgaaggccttttccatga

SEQ ID NO: 5607464 - DNA, 25 bp, Homo sapien
agatgtgaataaacatggagtgttc

SEQ ID NO: 5607465 - DNA, 25 bp, Homo sapien
gggtcagggcatctccttgttggct

SEQ ID NO: 5607466 - DNA, 25 bp, Homo sapien
ctttggagtggcccatccatagcat

SEQ ID NO: 5607467 - DNA, 25 bp, Homo sapien
cctggagtcaccatccacactatgc

SEQ ID NO: 5607468 - DNA, 25 bp, Homo sapien
aatggatatttgttgactgggaacc

SEQ ID NO: 5607469 - DNA, 25 bp, Homo sapien
tcacttagtgtctctgagcctgatc

SEQ ID NO: 5607470 - DNA, 25 bp, Homo sapien
aacttgagctccactgctggcctgt

SEQ ID NO: 5607471 - DNA, 25 bp, Homo sapien
cacactatgcattggaagcttaatt

SEQ ID NO: 5607472 - DNA, 25 bp, Homo sapien
cccaaagaacaattcccctggagtc

SEQ ID NO: 5607473 - DNA, 25 bp, Homo sapien
tgagcctgatctccaagatgtgtgg

SEQ ID NO: 5607474 - DNA, 25 bp, Homo sapien
aggcccttttgaagctaacttgagc

SEQ ID NO: 5607475 - DNA, 25 bp, Homo sapien
tgttgtatggctttggacaagtcac

SEQ ID NO: 5607476 - DNA, 25 bp, Homo sapien
tctctgctttggtgctgtgccgatg

SEQ ID NO: 5607477 - DNA, 25 bp, Homo sapien
acacagagtcatgtaacactgcccc

SEQ ID NO: 5607478 - DNA, 25 bp, Homo sapien
caatagcctaagcagggttgtggaa

SEQ ID NO: 5607479 - DNA, 25 bp, Homo sapien
ctggctaaaatgtggcagaacagat

SEQ ID NO: 5607480 - DNA, 25 bp, Homo sapien
ttccacgaatgacaatagcctaagc

SEQ ID NO: 5607481 - DNA, 25 bp, Homo sapien
cataagaatgtaaggatcaagagag

SEQ ID NO: 5607482 - DNA, 25 bp, Homo sapien
tgaagaagttgattggagtagtttt

SEQ ID NO: 5607483 - DNA, 25 bp, Homo sapien
ctgtgtagtccgtggttcctcctcc

SEQ ID NO: 5607484 - DNA, 25 bp, Homo sapien
caagaaagacagctggttaaaaatc

SEQ ID NO: 5607485 - DNA, 25 bp, Homo sapien
agagagagcaatgggaattttgttt

SEQ ID NO: 5607486 - DNA, 25 bp, Homo sapien
agccttgcacatgggaatctgtcca

SEQ ID NO: 5607487 - DNA, 25 bp, Homo sapien
cagaacctgttgttgagcgagtaga

SEQ ID NO: 5607488 - DNA, 25 bp, Homo sapien
tggcagaacagattgaagaagttga

SEQ ID NO: 5607489 - DNA, 25 bp, Homo sapien
atggaacaccgtacctttagcctac

SEQ ID NO: 5607490 - DNA, 25 bp, Homo sapien
accttatgcattttctagagccgat

SEQ ID NO: 5607491 - DNA, 25 bp, Homo sapien
ccctcagccattgttggactctttc

SEQ ID NO: 5607492 - DNA, 25 bp, Homo sapien
gaaaggaagaatggtctgcttcagc

SEQ ID NO: 5607493 - DNA, 25 bp, Homo sapien
ttaatagacattgggaagaaaggaa

SEQ ID NO: 5607494 - DNA, 25 bp, Homo sapien
gttttaagaaagcatgtgttttctc

SEQ ID NO: 5607495 - DNA, 25 bp, Homo sapien
tgtatttaatatggaacaccgtacc

SEQ ID NO: 5607496 - DNA, 25 bp, Homo sapien
tgtaccaacggtacaaaagatggtc

SEQ ID NO: 5607497 - DNA, 25 bp, Homo sapien
tacaaaagatggtcttggccttgcc

SEQ ID NO: 5607498 - DNA, 25 bp, Homo sapien
tgtaacagtttacctatgtgtgatc

SEQ ID NO: 5607499 - DNA, 25 bp, Homo sapien
gttttctcaccttccacagccccca

SEQ ID NO: 5607500 - DNA, 25 bp, Homo sapien
ttctgacctggccactttgcgctcc

SEQ ID NO: 5607501 - DNA, 25 bp, Homo sapien
ctgcaggaaaagatagtgatgttta

SEQ ID NO: 5607502 - DNA, 25 bp, Homo sapien
gttaaccaggattccatgaggcttt

SEQ ID NO: 5607503 - DNA, 25 bp, Homo sapien
cacagttaataagtagcagggctca

SEQ ID NO: 5607504 - DNA, 25 bp, Homo sapien
aaaagaatacagggcttaagcagtg

SEQ ID NO: 5607505 - DNA, 25 bp, Homo sapien
gtagcagggctcagatttgtgccca

SEQ ID NO: 5607506 - DNA, 25 bp, Homo sapien
agcagtggcctcagtcaatagaaac

SEQ ID NO: 5607507 - DNA, 25 bp, Homo sapien
ttaagatcttgcaggataggaaagg

SEQ ID NO: 5607508 - DNA, 25 bp, Homo sapien
tcctcctagttcccagctgtgttcc

SEQ ID NO: 5607509 - DNA, 25 bp, Homo sapien
gcccctggctccactccatgacttc

SEQ ID NO: 5607510 - DNA, 25 bp, Homo sapien
ctctggttccctgagtgttgctctc

SEQ ID NO: 5607511 - DNA, 25 bp, Homo sapien
tatcacaacggtgacgggagtggat

SEQ ID NO: 5607512 - DNA, 25 bp, Homo sapien
atccactcccgtcaccgttgtgata

SEQ ID NO: 5607513 - DNA, 25 bp, Homo sapien
tgttgatctaaggccccagcctgta

SEQ ID NO: 5607514 - DNA, 25 bp, Homo sapien
aacaacacgtcactcagcacagcca

SEQ ID NO: 5607515 - DNA, 25 bp, Homo sapien
aacgaatacatatgtgtaagcactt

SEQ ID NO: 5607516 - DNA, 25 bp, Homo sapien
gggtagggacatcctcaaaacaaca

SEQ ID NO: 5607517 - DNA, 25 bp, Homo sapien
tatagcactgcagtcacacagggga

SEQ ID NO: 5607518 - DNA, 25 bp, Homo sapien
tacagcaactacagaaaacgaatac

SEQ ID NO: 5607519 - DNA, 25 bp, Homo sapien
agcacttagagcggtgtctctggca

SEQ ID NO: 5607520 - DNA, 25 bp, Homo sapien
gtgtaagcacttagagcggtgtctc

SEQ ID NO: 5607521 - DNA, 25 bp, Homo sapien
cagagcccacagcttgcttcgctgg

SEQ ID NO: 5607522 - DNA, 25 bp, Homo sapien
agcttgcttcgctgggtactggaga

SEQ ID NO: 5607523 - DNA, 25 bp, Homo sapien
ggcatcggacagatgatcagactcc

SEQ ID NO: 5607524 - DNA, 25 bp, Homo sapien
acttgtcccttaccaccaaacacat

SEQ ID NO: 5607525 - DNA, 25 bp, Homo sapien
agaaaagtcaagctggagccatctt

SEQ ID NO: 5607526 - DNA, 25 bp, Homo sapien
ttgatattctaatgagcaggcctat

SEQ ID NO: 5607527 - DNA, 25 bp, Homo sapien
aatgagcaggcctatctagttctac

SEQ ID NO: 5607528 - DNA, 25 bp, Homo sapien
ttaaaagtaaccgcatcatacaccc

SEQ ID NO: 5607529 - DNA, 25 bp, Homo sapien
tagtacatataaattaggaaagaaa

SEQ ID NO: 5607530 - DNA, 25 bp, Homo sapien
caaacacataatagctggtcaaaat

SEQ ID NO: 5607531 - DNA, 25 bp, Homo sapien
tatattgctccaactggccagtaga

SEQ ID NO: 5607532 - DNA, 25 bp, Homo sapien
aagctggagccatcttgatattcta

SEQ ID NO: 5607533 - DNA, 25 bp, Homo sapien
ccaactggccagtagaaataactta

SEQ ID NO: 5607534 - DNA, 25 bp, Homo sapien
atggtacagataacaacttgtccct

SEQ ID NO: 5607535 - DNA, 25 bp, Homo sapien
gcagttatgtaaagaaaagcaagca

SEQ ID NO: 5607536 - DNA, 25 bp, Homo sapien
tgtataagtgaaatgagtgcgttct

SEQ ID NO: 5607537 - DNA, 25 bp, Homo sapien
gccttggcaactagaaaggtctaag

SEQ ID NO: 5607538 - DNA, 25 bp, Homo sapien
cttagaagaatgttagaaagttttc

SEQ ID NO: 5607539 - DNA, 25 bp, Homo sapien
ggattctgtctaagtaggaaggcct

SEQ ID NO: 5607540 - DNA, 25 bp, Homo sapien
aagaatgtgccaagaatcaagacct

SEQ ID NO: 5607541 - DNA, 25 bp, Homo sapien
gacaagcctgacagagaacacatca

SEQ ID NO: 5607542 - DNA, 25 bp, Homo sapien
aatgagtgcgttcttcctgccccta

SEQ ID NO: 5607543 - DNA, 25 bp, Homo sapien
aagcacattgcaaagtatctgacac

SEQ ID NO: 5607544 - DNA, 25 bp, Homo sapien
ctgcccctataatgacaagcctgac

SEQ ID NO: 5607545 - DNA, 25 bp, Homo sapien
gaaaactctatggctttgggcaaat

SEQ ID NO: 5607546 - DNA, 25 bp, Homo sapien
cctaacaccctgttcttgggttggc

SEQ ID NO: 5607547 - DNA, 25 bp, Homo sapien
aacaggatttgctttgcggaacacc

SEQ ID NO: 5607548 - DNA, 25 bp, Homo sapien
ctgttagccatttcaggtggaaaga

SEQ ID NO: 5607549 - DNA, 25 bp, Homo sapien
accaaggatttaatacctgttagcc

SEQ ID NO: 5607550 - DNA, 25 bp, Homo sapien
tgcggaacaccatttgcagtcccct

SEQ ID NO: 5607551 - DNA, 25 bp, Homo sapien
aaaaacaggatttgctttgcggaac

SEQ ID NO: 5607552 - DNA, 25 bp, Homo sapien
cctatctaggtgcttaaaacagtac

SEQ ID NO: 5607553 - DNA, 25 bp, Homo sapien
aggtgcttaaaacagtacctaacac

SEQ ID NO: 5607554 - DNA, 25 bp, Homo sapien
ttagttcatggtcaaaaacaggatt

SEQ ID NO: 5607555 - DNA, 25 bp, Homo sapien
gctttgcggaacaccatttgcagtc

SEQ ID NO: 5607556 - DNA, 25 bp, Homo sapien
acaccaaccaaggatttaatacctg

SEQ ID NO: 5607557 - DNA, 25 bp, Homo sapien
ttggacttaagtcacattcttggta

SEQ ID NO: 5607558 - DNA, 25 bp, Homo sapien
taccaagaatgtgacttaagtccaa

SEQ ID NO: 5607559 - DNA, 25 bp, Homo sapien
aatgtgactgcactacaagaggtag

SEQ ID NO: 5607560 - DNA, 25 bp, Homo sapien
tcaagcaatggcactgacagatatc

SEQ ID NO: 5607561 - DNA, 25 bp, Homo sapien
actgacaaaagatagctagtgtttc

SEQ ID NO: 5607562 - DNA, 25 bp, Homo sapien
tgtagcaagttgtgtcatggtcatc

SEQ ID NO: 5607563 - DNA, 25 bp, Homo sapien
ttctaaagtgaatgcttctggggaa

SEQ ID NO: 5607564 - DNA, 25 bp, Homo sapien
cagatatcctgtacttcagaatgct

SEQ ID NO: 5607565 - DNA, 25 bp, Homo sapien
ttaaagctgtatgttctatggcaat

SEQ ID NO: 5607566 - DNA, 25 bp, Homo sapien
actacaagaggtagacttccaggag

SEQ ID NO: 5607567 - DNA, 25 bp, Homo sapien
ctcagcccacacttaatcaccacgc

SEQ ID NO: 5607568 - DNA, 25 bp, Homo sapien
gctggtgggtcacaaaaaactgaca

SEQ ID NO: 5607569 - DNA, 25 bp, Homo sapien
ttttgcacataaagcaagaaacttt

SEQ ID NO: 5607570 - DNA, 25 bp, Homo sapien
cttaggaaagaacttacacccaagc

SEQ ID NO: 5607571 - DNA, 25 bp, Homo sapien
atcaatctcaggaggaaataacttt

SEQ ID NO: 5607572 - DNA, 25 bp, Homo sapien
cgttgccgacctggcgacatcttgc

SEQ ID NO: 5607573 - DNA, 25 bp, Homo sapien
gtcaaagtcagttcgcgttgccgac

SEQ ID NO: 5607574 - DNA, 25 bp, Homo sapien
gagagaggcaacagcaatttgctga

SEQ ID NO: 5607575 - DNA, 25 bp, Homo sapien
cctgcggtcctcgcctcggcgcagg

SEQ ID NO: 5607576 - DNA, 25 bp, Homo sapien
gggcgggactctcgtgcgtcccgcg

SEQ ID NO: 5607577 - DNA, 25 bp, Homo sapien
gcgggaccgcgctaaacctgcggtc

SEQ ID NO: 5607578 - DNA, 25 bp, Homo sapien
caagcctggtgtttgttacgggtta

SEQ ID NO: 5607579 - DNA, 25 bp, Homo sapien
gtgcgggaccctatccgactgcccg

SEQ ID NO: 5607580 - DNA, 25 bp, Homo sapien
tgctgacaaggttgtgccatcaatc

SEQ ID NO: 5607581 - DNA, 25 bp, Homo sapien
gacagctgagacgcattcgctaatc

SEQ ID NO: 5607582 - DNA, 25 bp, Homo sapien
caaaagaacattaatccagggctgt

SEQ ID NO: 5607583 - DNA, 25 bp, Homo sapien
agaagatgaatcccaaaagaacatt

SEQ ID NO: 5607584 - DNA, 25 bp, Homo sapien
caaacctagctcctgagagtctttc

SEQ ID NO: 5607585 - DNA, 25 bp, Homo sapien
cctttcagggcttctgggaaactct

SEQ ID NO: 5607586 - DNA, 25 bp, Homo sapien
ccaaaatcacaaagccagaagatga

SEQ ID NO: 5607587 - DNA, 25 bp, Homo sapien
gatgctattgcgtcctttcagggct

SEQ ID NO: 5607588 - DNA, 25 bp, Homo sapien
cacttttctaggacagctgagacgc

SEQ ID NO: 5607589 - DNA, 25 bp, Homo sapien
ttagcgatgccttgagattgtgcca

SEQ ID NO: 5607590 - DNA, 25 bp, Homo sapien
gaacttcagacttagcgatgccttg

SEQ ID NO: 5607591 - DNA, 25 bp, Homo sapien
ggtttacagacctgctggaagaact

SEQ ID NO: 5607592 - DNA, 25 bp, Homo sapien
ctgtcagctatagaatgactgagtc

SEQ ID NO: 5607593 - DNA, 25 bp, Homo sapien
taccaacatggagtcattaccaacc

SEQ ID NO: 5607594 - DNA, 25 bp, Homo sapien
ggtgaggatctgactctgaagttta

SEQ ID NO: 5607595 - DNA, 25 bp, Homo sapien
aaattaaatgtcttggtgagcatct

SEQ ID NO: 5607596 - DNA, 25 bp, Homo sapien
ataccattaccaaccaaaggcagaa

SEQ ID NO: 5607597 - DNA, 25 bp, Homo sapien
atggcataagcagaaaattaccaac

SEQ ID NO: 5607598 - DNA, 25 bp, Homo sapien
cttggtgagcatctgtatgcatttc

SEQ ID NO: 5607599 - DNA, 25 bp, Homo sapien
atgactgagtcatggcataagcaga

SEQ ID NO: 5607600 - DNA, 25 bp, Homo sapien
tatgactgtcttctgtcggactgtc

SEQ ID NO: 5607601 - DNA, 25 bp, Homo sapien
tatgagttcaagacgtaagtgattc

SEQ ID NO: 5607602 - DNA, 25 bp, Homo sapien
aaaaaaaagagtactgtggacattc

SEQ ID NO: 5607603 - DNA, 25 bp, Homo sapien
gaccactggacggccgcaactcacc

SEQ ID NO: 5607604 - DNA, 25 bp, Homo sapien
ggtgagttgcggccgtccagtggtc

SEQ ID NO: 5607605 - DNA, 25 bp, Homo sapien
accatcttgacaggacgattttagt

SEQ ID NO: 5607606 - DNA, 25 bp, Homo sapien
actaaaatcgtcctgtcaagatggt

SEQ ID NO: 5607607 - DNA, 25 bp, Homo sapien
ccacagggcacaactgtgcagtgca

SEQ ID NO: 5607608 - DNA, 25 bp, Homo sapien
ctgcacgttctgcagagcggttggc

SEQ ID NO: 5607609 - DNA, 25 bp, Homo sapien
cacacatgagcaaactgacttacag

SEQ ID NO: 5607610 - DNA, 25 bp, Homo sapien
aagttgagtgatttacagaggttgt

SEQ ID NO: 5607611 - DNA, 25 bp, Homo sapien
tcagattggagatgttatcagaggc

SEQ ID NO: 5607612 - DNA, 25 bp, Homo sapien
ccgggaaactacaaatggactgtgt

SEQ ID NO: 5607613 - DNA, 25 bp, Homo sapien
ctcaggctctctaggggtttctttg

SEQ ID NO: 5607614 - DNA, 25 bp, Homo sapien
ttgaatgctgctaacaggtggctct

SEQ ID NO: 5607615 - DNA, 25 bp, Homo sapien
tgtgacaataggagacagaatgtta

SEQ ID NO: 5607616 - DNA, 25 bp, Homo sapien
gtgcagtgcacctgtcaccaacctc

SEQ ID NO: 5607617 - DNA, 25 bp, Homo sapien
ctggctcacctcatggccacagagc

SEQ ID NO: 5607618 - DNA, 25 bp, Homo sapien
tcccaggctctaagaatcctcccac

SEQ ID NO: 5607619 - DNA, 25 bp, Homo sapien
ttctattatatgcctcagctcttac

SEQ ID NO: 5607620 - DNA, 25 bp, Homo sapien
gacacctcaataaaaacgaaagatg

SEQ ID NO: 5607621 - DNA, 25 bp, Homo sapien
ctgtgcccaggaacttactcttgcc

SEQ ID NO: 5607622 - DNA, 25 bp, Homo sapien
caataaaaacgaaagatgtgagcaa

SEQ ID NO: 5607623 - DNA, 25 bp, Homo sapien
gaagaaatcccaggcgccacatcaa

SEQ ID NO: 5607624 - DNA, 25 bp, Homo sapien
caccttaagtgctttagcagaattc

SEQ ID NO: 5607625 - DNA, 25 bp, Homo sapien
ctctgaagtgaagaaatcccaggcg

SEQ ID NO: 5607626 - DNA, 25 bp, Homo sapien
tgtaaaaatacagctctgaagtgaa

SEQ ID NO: 5607627 - DNA, 25 bp, Homo sapien
gcgccacatcaaggaggcgaaacta

SEQ ID NO: 5607628 - DNA, 25 bp, Homo sapien
atacagctctgaagtgaagaaatcc

SEQ ID NO: 5607629 - DNA, 25 bp, Homo sapien
agcacaattaaaggggtcccaacga

SEQ ID NO: 5607630 - DNA, 25 bp, Homo sapien
caagctgccggtgccatgctcttaa

SEQ ID NO: 5607631 - DNA, 25 bp, Homo sapien
gtaaatttcaggggataatgtcttc

SEQ ID NO: 5607632 - DNA, 25 bp, Homo sapien
agtagggagtaagtgaattttagac

SEQ ID NO: 5607633 - DNA, 25 bp, Homo sapien
tttgtcttctggattgatgtttgga

SEQ ID NO: 5607634 - DNA, 25 bp, Homo sapien
atgtttaagtaaatttcaggggata

SEQ ID NO: 5607635 - DNA, 25 bp, Homo sapien
catctatgaaccaagctgccggtgc

SEQ ID NO: 5607636 - DNA, 25 bp, Homo sapien
acgaggttggtagtgccttccacta

SEQ ID NO: 5607637 - DNA, 25 bp, Homo sapien
ttccactatgtgaggacactaagaa

SEQ ID NO: 5607638 - DNA, 25 bp, Homo sapien
ttaacagtagctcaaatggactaag

SEQ ID NO: 5607639 - DNA, 25 bp, Homo sapien
tgaggacactaagaagatggtcatc

SEQ ID NO: 5607640 - DNA, 25 bp, Homo sapien
gacctcagactggcccccttgctaa

SEQ ID NO: 5607641 - DNA, 25 bp, Homo sapien
ccagctaccaaacaagacctcagac

SEQ ID NO: 5607642 - DNA, 25 bp, Homo sapien
tcatatacaagagcacagtagtccc

SEQ ID NO: 5607643 - DNA, 25 bp, Homo sapien
ctcatctcaccgggaccttatcttc

SEQ ID NO: 5607644 - DNA, 25 bp, Homo sapien
caaactcacacatctaggttgggtt

SEQ ID NO: 5607645 - DNA, 25 bp, Homo sapien
tctgagatagcaataataaaccatg

SEQ ID NO: 5607646 - DNA, 25 bp, Homo sapien
taggttgggttttgtctgagatagc

SEQ ID NO: 5607647 - DNA, 25 bp, Homo sapien
aaaaacctgtgccaaatctgatcat

SEQ ID NO: 5607648 - DNA, 25 bp, Homo sapien
gtgaggcgtattaaaatcggaatcc

SEQ ID NO: 5607649 - DNA, 25 bp, Homo sapien
aataaaccatgtgccgagtacagtg

SEQ ID NO: 5607650 - DNA, 25 bp, Homo sapien
aaatgttaagcatttggggtgatga

SEQ ID NO: 5607651 - DNA, 25 bp, Homo sapien
gacttcgaagacgtgtttcgaggcc

SEQ ID NO: 5607652 - DNA, 25 bp, Homo sapien
ggcctcgaaacacgtcttcgaagtc

SEQ ID NO: 5607653 - DNA, 25 bp, Homo sapien
cagaataccacccggcacacggggt

SEQ ID NO: 5607654 - DNA, 25 bp, Homo sapien
gcaccccctcaaaggctgcggtgag

SEQ ID NO: 5607655 - DNA, 25 bp, Homo sapien
gcgcagcgtaagaatcagaatacca

SEQ ID NO: 5607656 - DNA, 25 bp, Homo sapien
caccacagcagccctaaagcctggg

SEQ ID NO: 5607657 - DNA, 25 bp, Homo sapien
gggcagcacacactgtggctaagag

SEQ ID NO: 5607658 - DNA, 25 bp, Homo sapien
ttaaagagtggtctacattggcctc

SEQ ID NO: 5607659 - DNA, 25 bp, Homo sapien
ggtgcacttcactcgggtcagcttc

SEQ ID NO: 5607660 - DNA, 25 bp, Homo sapien
gaaaatgcccctgacaacggcaccc

SEQ ID NO: 5607661 - DNA, 25 bp, Homo sapien
ggcaggtccctgcgacactgaaaat

SEQ ID NO: 5607662 - DNA, 25 bp, Homo sapien
cctacatccgggatacaggctatgg

SEQ ID NO: 5607663 - DNA, 25 bp, Homo sapien
tcgggtcagcttccatcagtgttcc

SEQ ID NO: 5607664 - DNA, 25 bp, Homo sapien
gaggctagggcatacccccttccac

SEQ ID NO: 5607665 - DNA, 25 bp, Homo sapien
gatctgatactgatgacttgtacac

SEQ ID NO: 5607666 - DNA, 25 bp, Homo sapien
ttcaactcagcctttcaacacactc

SEQ ID NO: 5607667 - DNA, 25 bp, Homo sapien
ctagccaacgttcattccagccctc

SEQ ID NO: 5607668 - DNA, 25 bp, Homo sapien
cgtattctcagctagcacgttctgc

SEQ ID NO: 5607669 - DNA, 25 bp, Homo sapien
tatgttagagcaaaactacaaaaac

SEQ ID NO: 5607670 - DNA, 25 bp, Homo sapien
tggacacacctgctctagccaacgt

SEQ ID NO: 5607671 - DNA, 25 bp, Homo sapien
gccctcctgtgtcaatctgctcttc

SEQ ID NO: 5607672 - DNA, 25 bp, Homo sapien
tgcttacctgggcagtttgtggcag

SEQ ID NO: 5607673 - DNA, 25 bp, Homo sapien
ttatgtgtggctgaagacaattttc

SEQ ID NO: 5607674 - DNA, 25 bp, Homo sapien
atcagtgatgtagaatacaacgtat

SEQ ID NO: 5607675 - DNA, 25 bp, Homo sapien
aagagaagcacggaacccagaacga

SEQ ID NO: 5607676 - DNA, 25 bp, Homo sapien
tcgttctgggttccgtgcttctctt

SEQ ID NO: 5607677 - DNA, 25 bp, Homo sapien
cttcttgagttagaacaggtgggtg

SEQ ID NO: 5607678 - DNA, 25 bp, Homo sapien
tcagttatactgttttggtagatct

SEQ ID NO: 5607679 - DNA, 25 bp, Homo sapien
caatactctctcgaaccagtggtcc

SEQ ID NO: 5607680 - DNA, 25 bp, Homo sapien
caagtggacagtcactgcctctgcc

SEQ ID NO: 5607681 - DNA, 25 bp, Homo sapien
cagtggtcccttcttgagttagaac

SEQ ID NO: 5607682 - DNA, 25 bp, Homo sapien
aaagaaaccttggtcagttatactg

SEQ ID NO: 5607683 - DNA, 25 bp, Homo sapien
ctcaccaagtggacagtcactgcct

SEQ ID NO: 5607684 - DNA, 25 bp, Homo sapien
gtacaagctcaccaagtggacagtc

SEQ ID NO: 5607685 - DNA, 25 bp, Homo sapien
gtgggtggacttgtacaagctcacc

SEQ ID NO: 5607686 - DNA, 25 bp, Homo sapien
ggcctggctcaatactctctcgaac

SEQ ID NO: 5607687 - DNA, 25 bp, Homo sapien
atcttcattcagagagagggcagaa

SEQ ID NO: 5607688 - DNA, 25 bp, Homo sapien
tgaagctgcattccaggtcagtccc

SEQ ID NO: 5607689 - DNA, 25 bp, Homo sapien
tatggtcttagcaacagagagagtg

SEQ ID NO: 5607690 - DNA, 25 bp, Homo sapien
gaccaggtaaggtaagcctgggatg

SEQ ID NO: 5607691 - DNA, 25 bp, Homo sapien
gtcttgatgtggaactagtgtaggc

SEQ ID NO: 5607692 - DNA, 25 bp, Homo sapien
aatggtacgcatgtacagggttacc

SEQ ID NO: 5607693 - DNA, 25 bp, Homo sapien
tgaggtacagataagacacaagcta

SEQ ID NO: 5607694 - DNA, 25 bp, Homo sapien
gaagcaacacttacagagactgggc

SEQ ID NO: 5607695 - DNA, 25 bp, Homo sapien
gttaacagataaatgcagaagcaac

SEQ ID NO: 5607696 - DNA, 25 bp, Homo sapien
atgctgtgagtcaccgagcacctga

SEQ ID NO: 5607697 - DNA, 25 bp, Homo sapien
tagcagctatgttggtgaccaggta

SEQ ID NO: 5607698 - DNA, 25 bp, Homo sapien
tagtgtaggcaaaatgaagctgcat

SEQ ID NO: 5607699 - DNA, 25 bp, Homo sapien
aactactaagcgctaggcacgtgct

SEQ ID NO: 5607700 - DNA, 25 bp, Homo sapien
gacaggccatatacaaatgtgaggt

SEQ ID NO: 5607701 - DNA, 25 bp, Homo sapien
agcacagtggcttgtatccagtagt

SEQ ID NO: 5607702 - DNA, 25 bp, Homo sapien
cacgtgctggatgctttgcctaaat

SEQ ID NO: 5607703 - DNA, 25 bp, Homo sapien
tggaaaactgtgacaggccatatac

SEQ ID NO: 5607704 - DNA, 25 bp, Homo sapien
tattagcttgccatgaacaggagtc

SEQ ID NO: 5607705 - DNA, 25 bp, Homo sapien
tccaccagacagactattagcttgc

SEQ ID NO: 5607706 - DNA, 25 bp, Homo sapien
aaagagcaaggttccgtccaaaata

SEQ ID NO: 5607707 - DNA, 25 bp, Homo sapien
gctgagcaactactaagcgctaggc

SEQ ID NO: 5607708 - DNA, 25 bp, Homo sapien
tgccatgaacaggagtcatgtgggt

SEQ ID NO: 5607709 - DNA, 25 bp, Homo sapien
gcctaaatcagtatgtcaccaccac

SEQ ID NO: 5607710 - DNA, 25 bp, Homo sapien
agagaagtgaaatgcaacatctgtt

SEQ ID NO: 5607711 - DNA, 25 bp, Homo sapien
agagaggacacgtacaagtaaatta

SEQ ID NO: 5607712 - DNA, 25 bp, Homo sapien
tgtaacatctgaagactgacaactc

SEQ ID NO: 5607713 - DNA, 25 bp, Homo sapien
ttaatcccagagaagtgaaatgcaa

SEQ ID NO: 5607714 - DNA, 25 bp, Homo sapien
ttcttcaaagtgatacacacatgct

SEQ ID NO: 5607715 - DNA, 25 bp, Homo sapien
aaacacagcacaattccaaggagga

SEQ ID NO: 5607716 - DNA, 25 bp, Homo sapien
tgtcctccaggacaacgaaacacag

SEQ ID NO: 5607717 - DNA, 25 bp, Homo sapien
cacatgctcatgccttaacctgctc

SEQ ID NO: 5607718 - DNA, 25 bp, Homo sapien
gtcatagctgaaaagataaagagca

SEQ ID NO: 5607719 - DNA, 25 bp, Homo sapien
aaactgtagcagaatacctggtttc

SEQ ID NO: 5607720 - DNA, 25 bp, Homo sapien
aggacaacgaaacacagcacaattc

SEQ ID NO: 5607721 - DNA, 25 bp, Homo sapien
cggggatgtaagccagtctaattag

SEQ ID NO: 5607722 - DNA, 25 bp, Homo sapien
tggtttcactgtctacggggatgta

SEQ ID NO: 5607723 - DNA, 25 bp, Homo sapien
ttgaagaactattcaggagtattac

SEQ ID NO: 5607724 - DNA, 25 bp, Homo sapien
tgccctagagtaaaaacaagcaaac

SEQ ID NO: 5607725 - DNA, 25 bp, Homo sapien
attaaagacccaaccatttgcacat

SEQ ID NO: 5607726 - DNA, 25 bp, Homo sapien
caaacaaagttaaatggacatttgc

SEQ ID NO: 5607727 - DNA, 25 bp, Homo sapien
gacatttgcatgactgtaaacctta

SEQ ID NO: 5607728 - DNA, 25 bp, Homo sapien
ggagtattacaagaagttatgcacc

SEQ ID NO: 5607729 - DNA, 25 bp, Homo sapien
ggtagctattccatcagttgccaac

SEQ ID NO: 5607730 - DNA, 25 bp, Homo sapien
tgcacaaatgcattccctggcttct

SEQ ID NO: 5607731 - DNA, 25 bp, Homo sapien
atttgcacatcaaggtagctattcc

SEQ ID NO: 5607732 - DNA, 25 bp, Homo sapien
ataaagatgaaataagagaagaata

SEQ ID NO: 5607733 - DNA, 25 bp, Homo sapien
tatggatacagaataatcttactct

SEQ ID NO: 5607734 - DNA, 25 bp, Homo sapien
ataagaatagtcattaggaagagtt

SEQ ID NO: 5607735 - DNA, 25 bp, Homo sapien
attatcacagaaatccaggaaacat

SEQ ID NO: 5607736 - DNA, 25 bp, Homo sapien
cagatgcaaatggaaatacccagac

SEQ ID NO: 5607737 - DNA, 25 bp, Homo sapien
taggaagagttcaacttatcacatg

SEQ ID NO: 5607738 - DNA, 25 bp, Homo sapien
tggggcagatttggccaacccttga

SEQ ID NO: 5607739 - DNA, 25 bp, Homo sapien
catacaatattagcgagggagtgaa

SEQ ID NO: 5607740 - DNA, 25 bp, Homo sapien
aaacagcattctttaggggcaattc

SEQ ID NO: 5607741 - DNA, 25 bp, Homo sapien
ttgccttctaccaaacgagacattt

SEQ ID NO: 5607742 - DNA, 25 bp, Homo sapien
tatcacatgtaggtaattttgtccc

SEQ ID NO: 5607743 - DNA, 25 bp, Homo sapien
aatatagctggaaatatcaggaatt

SEQ ID NO: 5607744 - DNA, 25 bp, Homo sapien
taaaaacctctaaagtgatgggcaa

SEQ ID NO: 5607745 - DNA, 25 bp, Homo sapien
tacaaggcctgccaacagcaatggc

SEQ ID NO: 5607746 - DNA, 25 bp, Homo sapien
tcaggtgacaacagacaaatatagc

SEQ ID NO: 5607747 - DNA, 25 bp, Homo sapien
cccacaaggccctccaagaatggtt

SEQ ID NO: 5607748 - DNA, 25 bp, Homo sapien
gacccagaactgcgtccgcaaacac

SEQ ID NO: 5607749 - DNA, 25 bp, Homo sapien
aagaatggtttgttacaaggcctgc

SEQ ID NO: 5607750 - DNA, 25 bp, Homo sapien
tccgcaaacacagagtcaggtgaca

SEQ ID NO: 5607751 - DNA, 25 bp, Homo sapien
aaaagaccaactactcccctgagct

SEQ ID NO: 5607752 - DNA, 25 bp, Homo sapien
atgtgtcctgtaaagaaatgatgcc

SEQ ID NO: 5607753 - DNA, 25 bp, Homo sapien
agggagatacaaaggctagtccttt

SEQ ID NO: 5607754 - DNA, 25 bp, Homo sapien
atgtaaccatggtaacaagagaacc

SEQ ID NO: 5607755 - DNA, 25 bp, Homo sapien
agggaactttacaacggaggaatca

SEQ ID NO: 5607756 - DNA, 25 bp, Homo sapien
gtaacaagagaaccaccagaactgg

SEQ ID NO: 5607757 - DNA, 25 bp, Homo sapien
cctcctgatgtaatagggaccacac

SEQ ID NO: 5607758 - DNA, 25 bp, Homo sapien
actcctaggaaaagactaattgtta

SEQ ID NO: 5607759 - DNA, 25 bp, Homo sapien
aatgacaacttgcctggtgaacacc

SEQ ID NO: 5607760 - DNA, 25 bp, Homo sapien
gtgaacacctgcaaagatgagtaac

SEQ ID NO: 5607761 - DNA, 25 bp, Homo sapien
gcccatcacttaaagtgggggcaac

SEQ ID NO: 5607762 - DNA, 25 bp, Homo sapien
accaaaaacagaatagaggatcaag

SEQ ID NO: 5607763 - DNA, 25 bp, Homo sapien
tagttaaaagcatgccagggaactt

SEQ ID NO: 5607764 - DNA, 25 bp, Homo sapien
atagggaccacacggtattagctgt

SEQ ID NO: 5607765 - DNA, 25 bp, Homo sapien
ggcttctttggtaggcatggaagtg

SEQ ID NO: 5607766 - DNA, 25 bp, Homo sapien
agaggtcacctctagagttagttcc

SEQ ID NO: 5607767 - DNA, 25 bp, Homo sapien
tgggctttaaagttattgggctgga

SEQ ID NO: 5607768 - DNA, 25 bp, Homo sapien
tggtgagagaagataggcttctttg

SEQ ID NO: 5607769 - DNA, 25 bp, Homo sapien
gtcacgttgtcctgagataatgagg

SEQ ID NO: 5607770 - DNA, 25 bp, Homo sapien
gagataatgaggatatggatatatg

SEQ ID NO: 5607771 - DNA, 25 bp, Homo sapien
ctggagacacctatgggcaaatagg

SEQ ID NO: 5607772 - DNA, 25 bp, Homo sapien
atatatgtggagttgtgaaagaatg

SEQ ID NO: 5607773 - DNA, 25 bp, Homo sapien
gtggcaagaaatggtcacgttgtcc

SEQ ID NO: 5607774 - DNA, 25 bp, Homo sapien
agttgcaagactttttcagtggtcc

SEQ ID NO: 5607775 - DNA, 25 bp, Homo sapien
aagtgattatggtccttccacagga

SEQ ID NO: 5607776 - DNA, 25 bp, Homo sapien
aggtggtgcttggagaattccttta

SEQ ID NO: 5607777 - DNA, 25 bp, Homo sapien
gggccgcgcaaacaggcttttccaa

SEQ ID NO: 5607778 - DNA, 25 bp, Homo sapien
tctccaaagccgcaaggctctgcca

SEQ ID NO: 5607779 - DNA, 25 bp, Homo sapien
ttgggtctaacgagtataacacggc

SEQ ID NO: 5607780 - DNA, 25 bp, Homo sapien
aaggcatgaagctcacgctaccctt

SEQ ID NO: 5607781 - DNA, 25 bp, Homo sapien
tttagaaaacagagtagaaggatta

SEQ ID NO: 5607782 - DNA, 25 bp, Homo sapien
ttcatggtgaattgggtctaacgag

SEQ ID NO: 5607783 - DNA, 25 bp, Homo sapien
aaaatgattctaagggccgcgcaaa

SEQ ID NO: 5607784 - DNA, 25 bp, Homo sapien
agttaggcagtcctcccaacctcac

SEQ ID NO: 5607785 - DNA, 25 bp, Homo sapien
caagaattaatcatgaggtggtgct

SEQ ID NO: 5607786 - DNA, 25 bp, Homo sapien
agtagaaggattacagagaaaaact

SEQ ID NO: 5607787 - DNA, 25 bp, Homo sapien
cttctccaaagccaggaagtgaaaa

SEQ ID NO: 5607788 - DNA, 25 bp, Homo sapien
cctcggctcgtcttcacgacagaag

SEQ ID NO: 5607789 - DNA, 25 bp, Homo sapien
ctgagtttggagaaccaattagagg

SEQ ID NO: 5607790 - DNA, 25 bp, Homo sapien
ctccaaagccaggaagtgaaaatga

SEQ ID NO: 5607791 - DNA, 25 bp, Homo sapien
agggcttcctgcacggaagatggag

SEQ ID NO: 5607792 - DNA, 25 bp, Homo sapien
atggagggctctgaaatagaattct

SEQ ID NO: 5607793 - DNA, 25 bp, Homo sapien
agtttggagaaccaattagagggag

SEQ ID NO: 5607794 - DNA, 25 bp, Homo sapien
caggaagtgaaaatgacgtccctgg

SEQ ID NO: 5607795 - DNA, 25 bp, Homo sapien
cagggcttcctgcacggaagatgga

SEQ ID NO: 5607796 - DNA, 25 bp, Homo sapien
tggcagcaccctcggctcgtcttca

SEQ ID NO: 5607797 - DNA, 25 bp, Homo sapien
aattctgagtttggagaaccaatta

SEQ ID NO: 5607798 - DNA, 25 bp, Homo sapien
aacactatataaactctctcctcct

SEQ ID NO: 5607799 - DNA, 25 bp, Homo sapien
gagatgcagcatgaacctataggag

SEQ ID NO: 5607800 - DNA, 25 bp, Homo sapien
ttaaggcactaggattttgtcatgt

SEQ ID NO: 5607801 - DNA, 25 bp, Homo sapien
tgattatatgataaggaacttgaac

SEQ ID NO: 5607802 - DNA, 25 bp, Homo sapien
attttgtcatgtgccaggaggaagg

SEQ ID NO: 5607803 - DNA, 25 bp, Homo sapien
catgaacctataggagatgaggcca

SEQ ID NO: 5607804 - DNA, 25 bp, Homo sapien
tgcagaccttaaggcactaggattt

SEQ ID NO: 5607805 - DNA, 25 bp, Homo sapien
gtgaaaagagtcaatgtcttgagga

SEQ ID NO: 5607806 - DNA, 25 bp, Homo sapien
gagatgaggccaaagctccaacctc

SEQ ID NO: 5607807 - DNA, 25 bp, Homo sapien
gcacagtgtaacaaaggagatgcag

SEQ ID NO: 5607808 - DNA, 25 bp, Homo sapien
atgtgcacagtgtaacaaaggagat

SEQ ID NO: 5607809 - DNA, 25 bp, Homo sapien
gtggcggggctccccttactcactc

SEQ ID NO: 5607810 - DNA, 25 bp, Homo sapien
cctcacttccgaagcctgtgtgccc

SEQ ID NO: 5607811 - DNA, 25 bp, Homo sapien
tccagacttgcacctcaccgcagcc

SEQ ID NO: 5607812 - DNA, 25 bp, Homo sapien
gcccctcacgaaggccccctcatct

SEQ ID NO: 5607813 - DNA, 25 bp, Homo sapien
atattgaatgtggacaactgggtga

SEQ ID NO: 5607814 - DNA, 25 bp, Homo sapien
cctgcaaaaccgacacgggcatgtg

SEQ ID NO: 5607815 - DNA, 25 bp, Homo sapien
aaccctcaccacagctccagaatac

SEQ ID NO: 5607816 - DNA, 25 bp, Homo sapien
acgggcatgtgaactcacccctcac

SEQ ID NO: 5607817 - DNA, 25 bp, Homo sapien
ccagaatacatgacttggggtggcg

SEQ ID NO: 5607818 - DNA, 25 bp, Homo sapien
gaggtcagatctgaactcagggctc

SEQ ID NO: 5607819 - DNA, 25 bp, Homo sapien
atttttagcccaacggcagctgccc

SEQ ID NO: 5607820 - DNA, 25 bp, Homo sapien
gtaggttcaaatagccactggattc

SEQ ID NO: 5607821 - DNA, 25 bp, Homo sapien
gataacagtaggttcaaatagccac

SEQ ID NO: 5607822 - DNA, 25 bp, Homo sapien
aaagttagataacagtaggttcaaa

SEQ ID NO: 5607823 - DNA, 25 bp, Homo sapien
agtgcaatcagcccttaacttaagg

SEQ ID NO: 5607824 - DNA, 25 bp, Homo sapien
caagaagttacaataaagaaggaaa

SEQ ID NO: 5607825 - DNA, 25 bp, Homo sapien
taagcagattcattaagttagcatt

SEQ ID NO: 5607826 - DNA, 25 bp, Homo sapien
acttaagggcttattgaaacaaagc

SEQ ID NO: 5607827 - DNA, 25 bp, Homo sapien
cttatttctaagtgcaatcagccct

SEQ ID NO: 5607828 - DNA, 25 bp, Homo sapien
aaacaaagccactgtaaaagagctt

SEQ ID NO: 5607829 - DNA, 25 bp, Homo sapien
aatacatgggaataatattagtgat

SEQ ID NO: 5607830 - DNA, 25 bp, Homo sapien
taaaagagcttttcaagaagttaca

SEQ ID NO: 5607831 - DNA, 25 bp, Homo sapien
tattaaaccaatcaggcagtatgaa

SEQ ID NO: 5607832 - DNA, 25 bp, Homo sapien
aatagattatgtctacttggaaaat

SEQ ID NO: 5607833 - DNA, 25 bp, Homo sapien
aaccaatcaggcagtatgaaaagaa

SEQ ID NO: 5607834 - DNA, 25 bp, Homo sapien
atgtctacttggaaaataattataa

SEQ ID NO: 5607835 - DNA, 25 bp, Homo sapien
atatatcaggataaaatgtatttct

SEQ ID NO: 5607836 - DNA, 25 bp, Homo sapien
ggcagtatgaaaagaaatagcctag

SEQ ID NO: 5607837 - DNA, 25 bp, Homo sapien
agtatgaaaagaaatagcctagtat

SEQ ID NO: 5607838 - DNA, 25 bp, Homo sapien
taaaccaatcaggcagtatgaaaag

SEQ ID NO: 5607839 - DNA, 25 bp, Homo sapien
ctttgtcactagaaaaatatgtttt

SEQ ID NO: 5607840 - DNA, 25 bp, Homo sapien
tgtttattaaaccaatcaggcagta

SEQ ID NO: 5607841 - DNA, 25 bp, Homo sapien
ttaaaaactatatatcaggataaaa

SEQ ID NO: 5607842 - DNA, 25 bp, Homo sapien
cttgtgaggatttagtacagagctg

SEQ ID NO: 5607843 - DNA, 25 bp, Homo sapien
caacacgccctcagtcaagagctta

SEQ ID NO: 5607844 - DNA, 25 bp, Homo sapien
ggtatcaggcgttaagtacaagcca

SEQ ID NO: 5607845 - DNA, 25 bp, Homo sapien
agagcctttaatgcctaggcagccc

SEQ ID NO: 5607846 - DNA, 25 bp, Homo sapien
ttactagatagtgctttgggggtca

SEQ ID NO: 5607847 - DNA, 25 bp, Homo sapien
ccattatagaatggggaacacacag

SEQ ID NO: 5607848 - DNA, 25 bp, Homo sapien
tttgggggtcagtatttgagaaata

SEQ ID NO: 5607849 - DNA, 25 bp, Homo sapien
acaaggggtaatctccaacacgccc

SEQ ID NO: 5607850 - DNA, 25 bp, Homo sapien
atgaaaacgagaaacttgtgaggat

SEQ ID NO: 5607851 - DNA, 25 bp, Homo sapien
caagagcttaagtatgtcaagagcc

SEQ ID NO: 5607852 - DNA, 25 bp, Homo sapien
ttggggagtcattccatccagttcc

SEQ ID NO: 5607853 - DNA, 25 bp, Homo sapien
aatggccggaatcataatatgcaaa

SEQ ID NO: 5607854 - DNA, 25 bp, Homo sapien
actaagattatcacacatgggctaa

SEQ ID NO: 5607855 - DNA, 25 bp, Homo sapien
aataaagctactcctcatgccctcc

SEQ ID NO: 5607856 - DNA, 25 bp, Homo sapien
caaaataaaactgtcccactgtacc

SEQ ID NO: 5607857 - DNA, 25 bp, Homo sapien
tgaacacttagaaatccaaaaactc

SEQ ID NO: 5607858 - DNA, 25 bp, Homo sapien
aatagcagagatagttttctaaact

SEQ ID NO: 5607859 - DNA, 25 bp, Homo sapien
tatgcaaatcataaagcagcctaat

SEQ ID NO: 5607860 - DNA, 25 bp, Homo sapien
atggcttgatcaaaggaaacttctc

SEQ ID NO: 5607861 - DNA, 25 bp, Homo sapien
ccaaaaactccaatggccggaatca

SEQ ID NO: 5607862 - DNA, 25 bp, Homo sapien
caacacaaagcaagctgaatgataa

SEQ ID NO: 5607863 - DNA, 25 bp, Homo sapien
ttctatgattagcactgacagtgtt

SEQ ID NO: 5607864 - DNA, 25 bp, Homo sapien
tttggtattgaatgggatcagttcc

SEQ ID NO: 5607865 - DNA, 25 bp, Homo sapien
tcctgtgtacaagagcagagtgatg

SEQ ID NO: 5607866 - DNA, 25 bp, Homo sapien
tgtcctagaataccagagcaccaag

SEQ ID NO: 5607867 - DNA, 25 bp, Homo sapien
ttaagcatagcacacatagtattac

SEQ ID NO: 5607868 - DNA, 25 bp, Homo sapien
aatatgtaatagaaaatggataaaa

SEQ ID NO: 5607869 - DNA, 25 bp, Homo sapien
caaatatgaggaatacagcaataat

SEQ ID NO: 5607870 - DNA, 25 bp, Homo sapien
tgcacatatgtgtacaggatcctga

SEQ ID NO: 5607871 - DNA, 25 bp, Homo sapien
gagcaccaagaatacattgtgtatc

SEQ ID NO: 5607872 - DNA, 25 bp, Homo sapien
tggaagccactgtcctagaatacca

SEQ ID NO: 5607873 - DNA, 25 bp, Homo sapien
tgtgtatcagaaggagcatcaaatt

SEQ ID NO: 5607874 - DNA, 25 bp, Homo sapien
gggcttaagttgacatagcaaatat

SEQ ID NO: 5607875 - DNA, 25 bp, Homo sapien
caaagcttattcaggtaaaacagtt

SEQ ID NO: 5607876 - DNA, 25 bp, Homo sapien
atttaaacttagcaaaggaaagcag

SEQ ID NO: 5607877 - DNA, 25 bp, Homo sapien
ggagatgggacagcataatattcaa

SEQ ID NO: 5607878 - DNA, 25 bp, Homo sapien
gtagaggccctctttagcaacatgc

SEQ ID NO: 5607879 - DNA, 25 bp, Homo sapien
aagcagtatcggaacagtggtttca

SEQ ID NO: 5607880 - DNA, 25 bp, Homo sapien
gctagtggagaatacccccctttgc

SEQ ID NO: 5607881 - DNA, 25 bp, Homo sapien
attgtagaaggtcccacgaaaacat

SEQ ID NO: 5607882 - DNA, 25 bp, Homo sapien
aacattagaattaggaggctggaat

SEQ ID NO: 5607883 - DNA, 25 bp, Homo sapien
acagtttcattaaagggtagaggcc

SEQ ID NO: 5607884 - DNA, 25 bp, Homo sapien
tgcctgcccaagacatacagaaaag

SEQ ID NO: 5607885 - DNA, 25 bp, Homo sapien
tacagaaaagaaggattgtagaagg

SEQ ID NO: 5607886 - DNA, 25 bp, Homo sapien
cgccacctgctctctcgacggactt

SEQ ID NO: 5607887 - DNA, 25 bp, Homo sapien
tcctggagctctcagctgcatccgc

SEQ ID NO: 5607888 - DNA, 25 bp, Homo sapien
tcccattcctggagctctcagctgc

SEQ ID NO: 5607889 - DNA, 25 bp, Homo sapien
ctggagctctcagctgcatccgcca

SEQ ID NO: 5607890 - DNA, 25 bp, Homo sapien
gaagaatattgcagccactgggcct

SEQ ID NO: 5607891 - DNA, 25 bp, Homo sapien
ttcatctttcagtcaaggctgccag

SEQ ID NO: 5607892 - DNA, 25 bp, Homo sapien
gcaactcctcctcctagcaccatgg

SEQ ID NO: 5607893 - DNA, 25 bp, Homo sapien
tcagctgcatccgccacctgctctc

SEQ ID NO: 5607894 - DNA, 25 bp, Homo sapien
ctctcagctgcatccgccacctgct

SEQ ID NO: 5607895 - DNA, 25 bp, Homo sapien
atctttcagtcaaggctgccagtgg

SEQ ID NO: 5607896 - DNA, 25 bp, Homo sapien
aaagaagaatattgcagccactggg

SEQ ID NO: 5607897 - DNA, 25 bp, Homo sapien
tggagacagctcacgtcagtccagc

SEQ ID NO: 5607898 - DNA, 25 bp, Homo sapien
caacagaccattccacaaggagctg

SEQ ID NO: 5607899 - DNA, 25 bp, Homo sapien
gttgcccagctccatgtgtgagagg

SEQ ID NO: 5607900 - DNA, 25 bp, Homo sapien
aggtcaggtccgctccaacagacca

SEQ ID NO: 5607901 - DNA, 25 bp, Homo sapien
ccttcctggggtcctcctgatgtgg

SEQ ID NO: 5607902 - DNA, 25 bp, Homo sapien
gtgtagctcagagtttgtgagtttc

SEQ ID NO: 5607903 - DNA, 25 bp, Homo sapien
tttaaagcgcactgtgttgcagcag

SEQ ID NO: 5607904 - DNA, 25 bp, Homo sapien
tatccgactctctagctcactccac

SEQ ID NO: 5607905 - DNA, 25 bp, Homo sapien
accattccacaaggagctggtgtga

SEQ ID NO: 5607906 - DNA, 25 bp, Homo sapien
ttcctcctggacttggagacagctc

SEQ ID NO: 5607907 - DNA, 25 bp, Homo sapien
aggactcatacctgctgtgtagctc

SEQ ID NO: 5607908 - DNA, 25 bp, Homo sapien
tcaaattgtccccgtgctgagcagg

SEQ ID NO: 5607909 - DNA, 25 bp, Homo sapien
ccgggcaggtatgactgtcttcagt

SEQ ID NO: 5607910 - DNA, 25 bp, Homo sapien
agtgctgaccactgtccccgctgaa

SEQ ID NO: 5607911 - DNA, 25 bp, Homo sapien
gcgtggtgcttattctgcagcaggc

SEQ ID NO: 5607912 - DNA, 25 bp, Homo sapien
tgtcttcagtgctgaccactgtccc

SEQ ID NO: 5607913 - DNA, 25 bp, Homo sapien
gctgaccactgtccccgctgaaggc

SEQ ID NO: 5607914 - DNA, 25 bp, Homo sapien
agttaaagcttaagttcaaattgtc

SEQ ID NO: 5607915 - DNA, 25 bp, Homo sapien
gcttaagttcaaattgtccccgtgc

SEQ ID NO: 5607916 - DNA, 25 bp, Homo sapien
agttcaaattgtccccgtgctgagc

SEQ ID NO: 5607917 - DNA, 25 bp, Homo sapien
ggagcgtggtgcttattctgcagca

SEQ ID NO: 5607918 - DNA, 25 bp, Homo sapien
ttattctgcagcaggcaaactgagg

SEQ ID NO: 5607919 - DNA, 25 bp, Homo sapien
cctgcaaactctggaaaaaataatc

SEQ ID NO: 5607920 - DNA, 25 bp, Homo sapien
ttacagtatagtaggtatgcaaact

SEQ ID NO: 5607921 - DNA, 25 bp, Homo sapien
ctggcagtgcttattctgagaattc

SEQ ID NO: 5607922 - DNA, 25 bp, Homo sapien
actctaactgtccctgcaaactctg

SEQ ID NO: 5607923 - DNA, 25 bp, Homo sapien
gtcctatatggcaactcagagttat

SEQ ID NO: 5607924 - DNA, 25 bp, Homo sapien
gcaaactggcacacaagttgtcctc

SEQ ID NO: 5607925 - DNA, 25 bp, Homo sapien
attatattggattacagtgacttat

SEQ ID NO: 5607926 - DNA, 25 bp, Homo sapien
ccagaaaaattagtatgatagtatc

SEQ ID NO: 5607927 - DNA, 25 bp, Homo sapien
tctatggttttacaaagaggcattt

SEQ ID NO: 5607928 - DNA, 25 bp, Homo sapien
gcttccggactatctggcagtgctt

SEQ ID NO: 5607929 - DNA, 25 bp, Homo sapien
gtatagtaggtatgcaaactggcac

SEQ ID NO: 5607930 - DNA, 25 bp, Homo sapien
gcgtgccacctcgtagctcagctga

SEQ ID NO: 5607931 - DNA, 25 bp, Homo sapien
gcacagattgtggaaaagctcctcc

SEQ ID NO: 5607932 - DNA, 25 bp, Homo sapien
agaccatgacgagctggtagtcttc

SEQ ID NO: 5607933 - DNA, 25 bp, Homo sapien
ttctcggtgctgctgcgtgcacaga

SEQ ID NO: 5607934 - DNA, 25 bp, Homo sapien
acgaagaccttgtgctggctgaagg

SEQ ID NO: 5607935 - DNA, 25 bp, Homo sapien
ggtagtgacctgccaggtaggcttg

SEQ ID NO: 5607936 - DNA, 25 bp, Homo sapien
cccaacacacagccggtcattgaac

SEQ ID NO: 5607937 - DNA, 25 bp, Homo sapien
gaacagcaggctgtagaccttgtgc

SEQ ID NO: 5607938 - DNA, 25 bp, Homo sapien
gtcattgaacacggctgccgccgac

SEQ ID NO: 5607939 - DNA, 25 bp, Homo sapien
agcacctcatcgtaagtgggcaggg

SEQ ID NO: 5607940 - DNA, 25 bp, Homo sapien
gtctgcttcgggacccggtagtgac

SEQ ID NO: 5607941 - DNA, 25 bp, Homo sapien
aagaatcagcactactatttggtgt

SEQ ID NO: 5607942 - DNA, 25 bp, Homo sapien
acaccaaatagtagtgctgattctt

SEQ ID NO: 5607943 - DNA, 25 bp, Homo sapien
tggcccaacggagcactgtatttcc

SEQ ID NO: 5607944 - DNA, 25 bp, Homo sapien
ttctcgtgtcaccaaggaaaggtat

SEQ ID NO: 5607945 - DNA, 25 bp, Homo sapien
tggccaggcttttcttggaggagca

SEQ ID NO: 5607946 - DNA, 25 bp, Homo sapien
tggagatgcgccagctctccggttt

SEQ ID NO: 5607947 - DNA, 25 bp, Homo sapien
ggaacaatggcaaggtaggtgttca

SEQ ID NO: 5607948 - DNA, 25 bp, Homo sapien
cgacacagccagtccctgaccatgg

SEQ ID NO: 5607949 - DNA, 25 bp, Homo sapien
ccccccgcgccgatgtgaattatta

SEQ ID NO: 5607950 - DNA, 25 bp, Homo sapien
gccctcgtagagcacgcctttcgga

SEQ ID NO: 5607951 - DNA, 25 bp, Homo sapien
aatatgcatctaaggcgagtgagaa

SEQ ID NO: 5607952 - DNA, 25 bp, Homo sapien
ggagaactttgaggaacaatggcaa

SEQ ID NO: 5607953 - DNA, 25 bp, Homo sapien
gtgaagcaacttaatcgggatatcg

SEQ ID NO: 5607954 - DNA, 25 bp, Homo sapien
gcacgcaccaatgatacgtttaacg

SEQ ID NO: 5607955 - DNA, 25 bp, Homo sapien
cgttaaacgtatcattggtgcgtgc

SEQ ID NO: 5607956 - DNA, 25 bp, Homo sapien
catcgtgggtatcaataggaaaagt

SEQ ID NO: 5607957 - DNA, 25 bp, Homo sapien
tcttgctacatgactccagtgatac

SEQ ID NO: 5607958 - DNA, 25 bp, Homo sapien
ttatgactaggcaacaaaagctgga

SEQ ID NO: 5607959 - DNA, 25 bp, Homo sapien
tctttggaaagaaacaagagcatat

SEQ ID NO: 5607960 - DNA, 25 bp, Homo sapien
aggatgtttttttgagtaggaaaga

SEQ ID NO: 5607961 - DNA, 25 bp, Homo sapien
gatctcagtggatgcttataaaagc

SEQ ID NO: 5607962 - DNA, 25 bp, Homo sapien
agcctgcagggaattgtcttgctac

SEQ ID NO: 5607963 - DNA, 25 bp, Homo sapien
ctccagtgatactatgggagtgggt

SEQ ID NO: 5607964 - DNA, 25 bp, Homo sapien
ggagtgggttgcttatgaacatcgt

SEQ ID NO: 5607965 - DNA, 25 bp, Homo sapien
agtactagcctgcagggaattgtct

SEQ ID NO: 5607966 - DNA, 25 bp, Homo sapien
aggaaaagtctaaataactctgtgc

SEQ ID NO: 5607967 - DNA, 25 bp, Homo sapien
gaaatccaatccagtaatgggaaac

SEQ ID NO: 5607968 - DNA, 25 bp, Homo sapien
ttggctacattcgacaatggggttc

SEQ ID NO: 5607969 - DNA, 25 bp, Homo sapien
aatggggttcatttgattcctccgt

SEQ ID NO: 5607970 - DNA, 25 bp, Homo sapien
tacacacatacataattggctacat

SEQ ID NO: 5607971 - DNA, 25 bp, Homo sapien
attagaacaggagacttaactgatt

SEQ ID NO: 5607972 - DNA, 25 bp, Homo sapien
agaaataagtgttaaaatagaaatc

SEQ ID NO: 5607973 - DNA, 25 bp, Homo sapien
tcctccgtagtaattagaacaggag

SEQ ID NO: 5607974 - DNA, 25 bp, Homo sapien
tgcttagctagaacaaatattgctc

SEQ ID NO: 5607975 - DNA, 25 bp, Homo sapien
ttagtaatgaatacacatgcagtac

SEQ ID NO: 5607976 - DNA, 25 bp, Homo sapien
aaagccatctcaaaggagcttcctc

SEQ ID NO: 5607977 - DNA, 25 bp, Homo sapien
ggcatcaccccacaagtactcagaa

SEQ ID NO: 5607978 - DNA, 25 bp, Homo sapien
taaaagtgactttgagatgtttttc

SEQ ID NO: 5607979 - DNA, 25 bp, Homo sapien
aaggtagtactttcgaaatcacaac

SEQ ID NO: 5607980 - DNA, 25 bp, Homo sapien
tgcgtaactataagggcaaaggtag

SEQ ID NO: 5607981 - DNA, 25 bp, Homo sapien
aatacacatgcgtaactataagggc

SEQ ID NO: 5607982 - DNA, 25 bp, Homo sapien
tgttgaaggcgtttttaattctgcc

SEQ ID NO: 5607983 - DNA, 25 bp, Homo sapien
tgatgtaaaactgaacacgttactc

SEQ ID NO: 5607984 - DNA, 25 bp, Homo sapien
ataagggcaaaggtagtactttcga

SEQ ID NO: 5607985 - DNA, 25 bp, Homo sapien
aagtatttaagatgttcctggtcct

SEQ ID NO: 5607986 - DNA, 25 bp, Homo sapien
tgccttcaacagagatggacacact

SEQ ID NO: 5607987 - DNA, 25 bp, Homo sapien
tcctgttatgtggaatcgtcaattc

SEQ ID NO: 5607988 - DNA, 25 bp, Homo sapien
actagaaactatttaccagagtaaa

SEQ ID NO: 5607989 - DNA, 25 bp, Homo sapien
gtgtttatgaacgattagagactgt

SEQ ID NO: 5607990 - DNA, 25 bp, Homo sapien
gaaagttccatttgttagctgacat

SEQ ID NO: 5607991 - DNA, 25 bp, Homo sapien
atgttaatcagggacgatgctgctg

SEQ ID NO: 5607992 - DNA, 25 bp, Homo sapien
aggacacagtgaatggcttaatatc

SEQ ID NO: 5607993 - DNA, 25 bp, Homo sapien
ttagagactgttacaggacacagtg

SEQ ID NO: 5607994 - DNA, 25 bp, Homo sapien
aattggggcccactttctactatgt

SEQ ID NO: 5607995 - DNA, 25 bp, Homo sapien
gctgcaggacaaattaaccaaaccc

SEQ ID NO: 5607996 - DNA, 25 bp, Homo sapien
tatcacgatgttaatcagggacgat

SEQ ID NO: 5607997 - DNA, 25 bp, Homo sapien
tgatcaagaatgtcctgttaaaggc

SEQ ID NO: 5607998 - DNA, 25 bp, Homo sapien
attgtagagaataattttgggggta

SEQ ID NO: 5607999 - DNA, 25 bp, Homo sapien
tagctgacatgtattgtagagaata

SEQ ID NO: 5608000 - DNA, 25 bp, Homo sapien
cacccagtccactgttcggagggac

SEQ ID NO: 5608001 - DNA, 25 bp, Homo sapien
ggggctcggactccccctgcaccca

SEQ ID NO: 5608002 - DNA, 25 bp, Homo sapien
gtccactgttcggagggacttagag

SEQ ID NO: 5608003 - DNA, 25 bp, Homo sapien
gacttagagcagggtcccttccctg

SEQ ID NO: 5608004 - DNA, 25 bp, Homo sapien
cgacccattggcttcagcgggtggg

SEQ ID NO: 5608005 - DNA, 25 bp, Homo sapien
ggagccgtgcgacccattggcttca

SEQ ID NO: 5608006 - DNA, 25 bp, Homo sapien
cctgcacccagtccactgttcggag

SEQ ID NO: 5608007 - DNA, 25 bp, Homo sapien
tcggcgcgttttccctccagggtga

SEQ ID NO: 5608008 - DNA, 25 bp, Homo sapien
cgcgtctcccctcggcgcgttttcc

SEQ ID NO: 5608009 - DNA, 25 bp, Homo sapien
cctccgcgcgtctcccctcggcgcg

SEQ ID NO: 5608010 - DNA, 25 bp, Homo sapien
cgttttccctccagggtgactggga

SEQ ID NO: 5608011 - DNA, 25 bp, Homo sapien
tggcaatattgcacaagcatttgtc

SEQ ID NO: 5608012 - DNA, 25 bp, Homo sapien
tattcagatgcaagatactattatc

SEQ ID NO: 5608013 - DNA, 25 bp, Homo sapien
atataatagcttcagggcaaaggcc

SEQ ID NO: 5608014 - DNA, 25 bp, Homo sapien
ggcatatatctaggagttgaattac

SEQ ID NO: 5608015 - DNA, 25 bp, Homo sapien
ataactcctggtgcatatgtgtaag

SEQ ID NO: 5608016 - DNA, 25 bp, Homo sapien
atctaggagttgaattactgggttt

SEQ ID NO: 5608017 - DNA, 25 bp, Homo sapien
ggatattctctgaccatagcggggt

SEQ ID NO: 5608018 - DNA, 25 bp, Homo sapien
gggcaaaggccacattcatacatat

SEQ ID NO: 5608019 - DNA, 25 bp, Homo sapien
atgaactgtgctgctatgaagattc

SEQ ID NO: 5608020 - DNA, 25 bp, Homo sapien
gaccatagcggggtctggttacata

SEQ ID NO: 5608021 - DNA, 25 bp, Homo sapien
ttgctaatatgaactgtgctgctat

SEQ ID NO: 5608022 - DNA, 25 bp, Homo sapien
cctcagatgtcagtgtttgccagcc

SEQ ID NO: 5608023 - DNA, 25 bp, Homo sapien
gaggtgtggcattagtggcaccttc

SEQ ID NO: 5608024 - DNA, 25 bp, Homo sapien
gccccgcgagttcccctggcttgga

SEQ ID NO: 5608025 - DNA, 25 bp, Homo sapien
cctggcaccccacggtcctcagatg

SEQ ID NO: 5608026 - DNA, 25 bp, Homo sapien
gggagtggctttcttgagcagctgg

SEQ ID NO: 5608027 - DNA, 25 bp, Homo sapien
gcgagagggccttccattacccagc

SEQ ID NO: 5608028 - DNA, 25 bp, Homo sapien
ttgattcggaagattgtgaaagagg

SEQ ID NO: 5608029 - DNA, 25 bp, Homo sapien
tccagtgaattagggaagtctaggt

SEQ ID NO: 5608030 - DNA, 25 bp, Homo sapien
gagcagctgggatcattcattgact

SEQ ID NO: 5608031 - DNA, 25 bp, Homo sapien
aaatgaggtgttagtggaccttgat

SEQ ID NO: 5608032 - DNA, 25 bp, Homo sapien
tcacccatgcctacccggaaagcca

SEQ ID NO: 5608033 - DNA, 25 bp, Homo sapien
cgagacgcgactacggtgaggccct

SEQ ID NO: 5608034 - DNA, 25 bp, Homo sapien
agggcctcaccgtagtcgcgtctcg

SEQ ID NO: 5608035 - DNA, 25 bp, Homo sapien
caagaaggtctattagcaagaagga

SEQ ID NO: 5608036 - DNA, 25 bp, Homo sapien
cagacatactatgctggaaatgttc

SEQ ID NO: 5608037 - DNA, 25 bp, Homo sapien
aaaacaccacacattacaaagatat

SEQ ID NO: 5608038 - DNA, 25 bp, Homo sapien
tgccccacaagctgcataataaata

SEQ ID NO: 5608039 - DNA, 25 bp, Homo sapien
agcaagaaggaattgtttgtgggca

SEQ ID NO: 5608040 - DNA, 25 bp, Homo sapien
tcatgctacaagaaggtctattagc

SEQ ID NO: 5608041 - DNA, 25 bp, Homo sapien
tattcttatcagagtaaacccacaa

SEQ ID NO: 5608042 - DNA, 25 bp, Homo sapien
gatcttgatctgggcagtggtttac

SEQ ID NO: 5608043 - DNA, 25 bp, Homo sapien
aagcagtgaatttgccccacaagct

SEQ ID NO: 5608044 - DNA, 25 bp, Homo sapien
tttgtgggcacaatatgaaaactat

SEQ ID NO: 5608045 - DNA, 25 bp, Homo sapien
agcagaagagctagagctcctacct

SEQ ID NO: 5608046 - DNA, 25 bp, Homo sapien
gatggaaatgcaaatcttgggaccc

SEQ ID NO: 5608047 - DNA, 25 bp, Homo sapien
ccgccactctcccttaccctcccac

SEQ ID NO: 5608048 - DNA, 25 bp, Homo sapien
ggtacaaactagggcttgagaacca

SEQ ID NO: 5608049 - DNA, 25 bp, Homo sapien
cttcctaatcaggagagcatgggga

SEQ ID NO: 5608050 - DNA, 25 bp, Homo sapien
aatgtgcccccaatctaacagcagc

SEQ ID NO: 5608051 - DNA, 25 bp, Homo sapien
atcttgggaccccactacaggcctt

SEQ ID NO: 5608052 - DNA, 25 bp, Homo sapien
ttcacctgggaaatcgatggaaatg

SEQ ID NO: 5608053 - DNA, 25 bp, Homo sapien
agggtgtgcccaataatcggcctta

SEQ ID NO: 5608054 - DNA, 25 bp, Homo sapien
aggtaattgtggtacaaactagggc

SEQ ID NO: 5608055 - DNA, 25 bp, Homo sapien
atcggccttaccaaccctgaaggta

SEQ ID NO: 5608056 - DNA, 25 bp, Homo sapien
gaaactctgagggtgtgcccaataa

SEQ ID NO: 5608057 - DNA, 25 bp, Homo sapien
gaagacgaaagagcagtctcagctt

SEQ ID NO: 5608058 - DNA, 25 bp, Homo sapien
tgaggtagaagactgataggcttct

SEQ ID NO: 5608059 - DNA, 25 bp, Homo sapien
ggacgtgtgaatggctttttaagtg

SEQ ID NO: 5608060 - DNA, 25 bp, Homo sapien
caatgagccagtaaatatgtgagag

SEQ ID NO: 5608061 - DNA, 25 bp, Homo sapien
ttcactaaatggaagacgaaagagc

SEQ ID NO: 5608062 - DNA, 25 bp, Homo sapien
ccatataatcaggttgggggaagga

SEQ ID NO: 5608063 - DNA, 25 bp, Homo sapien
ggggagtaggatatcttcactaaat

SEQ ID NO: 5608064 - DNA, 25 bp, Homo sapien
aaaaaccctctgcccagtgacagca

SEQ ID NO: 5608065 - DNA, 25 bp, Homo sapien
tgggcacagcaaaccgcataaatac

SEQ ID NO: 5608066 - DNA, 25 bp, Homo sapien
gcagtctcagctttggaaacccctc

SEQ ID NO: 5608067 - DNA, 25 bp, Homo sapien
gtggcatcattaaacctgggcagaa

SEQ ID NO: 5608068 - DNA, 25 bp, Homo sapien
tgtaatgtatttgttgggtgcctgc

SEQ ID NO: 5608069 - DNA, 25 bp, Homo sapien
caggtccttgccttgactgagtctg

SEQ ID NO: 5608070 - DNA, 25 bp, Homo sapien
caacaataacccagtaaaagtgatt

SEQ ID NO: 5608071 - DNA, 25 bp, Homo sapien
ctaagacaatcaaataccttcccac

SEQ ID NO: 5608072 - DNA, 25 bp, Homo sapien
gctatgacaagatagatcaggtcct

SEQ ID NO: 5608073 - DNA, 25 bp, Homo sapien
gggggagcactcagatgtttaaaca

SEQ ID NO: 5608074 - DNA, 25 bp, Homo sapien
gagtgggacataaagctatgacaag

SEQ ID NO: 5608075 - DNA, 25 bp, Homo sapien
ttcccactcagatagggattcatcc

SEQ ID NO: 5608076 - DNA, 25 bp, Homo sapien
acccatttggccacaacaataaccc

SEQ ID NO: 5608077 - DNA, 25 bp, Homo sapien
gaggatcttgagggttatctgtaca

SEQ ID NO: 5608078 - DNA, 25 bp, Homo sapien
gactgagtctgaatacatcaccttc

SEQ ID NO: 5608079 - DNA, 25 bp, Homo sapien
tctgaagtgggcatcatcccgcttc

SEQ ID NO: 5608080 - DNA, 25 bp, Homo sapien
agccctgaacatgcagctgatgtct

SEQ ID NO: 5608081 - DNA, 25 bp, Homo sapien
cacctcataccggtaggaggtagcg

SEQ ID NO: 5608082 - DNA, 25 bp, Homo sapien
ctgtgcccttaacccggagtttggc

SEQ ID NO: 5608083 - DNA, 25 bp, Homo sapien
gtttggcccaactccaggtagctcc

SEQ ID NO: 5608084 - DNA, 25 bp, Homo sapien
tcctaaatgaaaacacagccactgc

SEQ ID NO: 5608085 - DNA, 25 bp, Homo sapien
tgggaacccctgaattgatgagggt

SEQ ID NO: 5608086 - DNA, 25 bp, Homo sapien
tgccacctgaacagctggaaacaag

SEQ ID NO: 5608087 - DNA, 25 bp, Homo sapien
ggaggtagcgctgtccatgactcca

SEQ ID NO: 5608088 - DNA, 25 bp, Homo sapien
tctagtgaactactgaacctggcgg

SEQ ID NO: 5608089 - DNA, 25 bp, Homo sapien
ttctggtcggctatactgtgagtat

SEQ ID NO: 5608090 - DNA, 25 bp, Homo sapien
tacagcctagtcagttacctgcaac

SEQ ID NO: 5608091 - DNA, 25 bp, Homo sapien
tctggtactctgagcacaatgttca

SEQ ID NO: 5608092 - DNA, 25 bp, Homo sapien
acactggttggctggccatgccatt

SEQ ID NO: 5608093 - DNA, 25 bp, Homo sapien
ggctctttgtaggaaaagtctgccc

SEQ ID NO: 5608094 - DNA, 25 bp, Homo sapien
aagcaagaactctggtactctgagc

SEQ ID NO: 5608095 - DNA, 25 bp, Homo sapien
attggctggcatattgttttggctg

SEQ ID NO: 5608096 - DNA, 25 bp, Homo sapien
ttacctgcaacttaagcaagaactc

SEQ ID NO: 5608097 - DNA, 25 bp, Homo sapien
gacgtttcccttttgagagagatgg

SEQ ID NO: 5608098 - DNA, 25 bp, Homo sapien
gagatgggagaataactgcacataa

SEQ ID NO: 5608099 - DNA, 25 bp, Homo sapien
agaccatggagggtctaacacagga

SEQ ID NO: 5608100 - DNA, 25 bp, Homo sapien
taacgcatataagaccatggagggt

SEQ ID NO: 5608101 - DNA, 25 bp, Homo sapien
ttaagacagtcatcctctctacccc

SEQ ID NO: 5608102 - DNA, 25 bp, Homo sapien
atacatgcaccgaaggttagaaaac

SEQ ID NO: 5608103 - DNA, 25 bp, Homo sapien
cgaaggttagaaaacaatctgcgat

SEQ ID NO: 5608104 - DNA, 25 bp, Homo sapien
tttgttgttggtcatgtctgaaatt

SEQ ID NO: 5608105 - DNA, 25 bp, Homo sapien
caagacactgattatacggtaagtt

SEQ ID NO: 5608106 - DNA, 25 bp, Homo sapien
tgtctgaaatttacccaagtccaac

SEQ ID NO: 5608107 - DNA, 25 bp, Homo sapien
agtttcagtcaggaaaggttaagga

SEQ ID NO: 5608108 - DNA, 25 bp, Homo sapien
ctctaccccaatgcacaccagatcc

SEQ ID NO: 5608109 - DNA, 25 bp, Homo sapien
ttgctctaggcagaatacacgatct

SEQ ID NO: 5608110 - DNA, 25 bp, Homo sapien
atacggtaagtttacaagtagaata

SEQ ID NO: 5608111 - DNA, 25 bp, Homo sapien
tgcacaccagatccagaaaaatgta

SEQ ID NO: 5608112 - DNA, 25 bp, Homo sapien
atgtgtctctgtagagaggaagaga

SEQ ID NO: 5608113 - DNA, 25 bp, Homo sapien
gacagcggctggcaactatctaatt

SEQ ID NO: 5608114 - DNA, 25 bp, Homo sapien
ctaaaccatccctgtgagcctccac

SEQ ID NO: 5608115 - DNA, 25 bp, Homo sapien
ttaatgcaaatggcactaggaaggg

SEQ ID NO: 5608116 - DNA, 25 bp, Homo sapien
cccgagaccctctgcacagaccctg

SEQ ID NO: 5608117 - DNA, 25 bp, Homo sapien
agacgtgaaaccatgggatgtgtct

SEQ ID NO: 5608118 - DNA, 25 bp, Homo sapien
tcctcccctgcaaattagacaattc

SEQ ID NO: 5608119 - DNA, 25 bp, Homo sapien
tcccttgctaaggggctgaaaggat

SEQ ID NO: 5608120 - DNA, 25 bp, Homo sapien
tttctccccagagggactcagagac

SEQ ID NO: 5608121 - DNA, 25 bp, Homo sapien
aaacgtttactgtctccggttcatc

SEQ ID NO: 5608122 - DNA, 25 bp, Homo sapien
gaagggtggcacctttaatttgcac

SEQ ID NO: 5608123 - DNA, 25 bp, Homo sapien
gatcgttgcaaagggaaatacaaag

SEQ ID NO: 5608124 - DNA, 25 bp, Homo sapien
agtgcaatatctaggacccgggcaa

SEQ ID NO: 5608125 - DNA, 25 bp, Homo sapien
tgtccctttacaatatggcatagtc

SEQ ID NO: 5608126 - DNA, 25 bp, Homo sapien
atctgtgatcgttgcaaagggaaat

SEQ ID NO: 5608127 - DNA, 25 bp, Homo sapien
gcatagcgtgcaacatctgtgatcg

SEQ ID NO: 5608128 - DNA, 25 bp, Homo sapien
aatgatctccgtgtccatgtccctt

SEQ ID NO: 5608129 - DNA, 25 bp, Homo sapien
caggagtgacagtgcaatatctagg

SEQ ID NO: 5608130 - DNA, 25 bp, Homo sapien
atacaaaggtaaataagatctaatt

SEQ ID NO: 5608131 - DNA, 25 bp, Homo sapien
acatcagaaaggtggcatcaatttc

SEQ ID NO: 5608132 - DNA, 25 bp, Homo sapien
agggatacaggtaccaaaaatgcct

SEQ ID NO: 5608133 - DNA, 25 bp, Homo sapien
acttatgatttaatagaagggatac

SEQ ID NO: 5608134 - DNA, 25 bp, Homo sapien
gcattagctcctgacgaatacggtc

SEQ ID NO: 5608135 - DNA, 25 bp, Homo sapien
atggaactgtgtaaaaggtgatgag

SEQ ID NO: 5608136 - DNA, 25 bp, Homo sapien
caactcctgggaagtatccctcctc

SEQ ID NO: 5608137 - DNA, 25 bp, Homo sapien
atactcctcttccgggggctgttcc

SEQ ID NO: 5608138 - DNA, 25 bp, Homo sapien
tccagggactccatgtgctcatact

SEQ ID NO: 5608139 - DNA, 25 bp, Homo sapien
tcattggagaggaccaaacatccat

SEQ ID NO: 5608140 - DNA, 25 bp, Homo sapien
gaggaggaaagtctgtcacaactcc

SEQ ID NO: 5608141 - DNA, 25 bp, Homo sapien
ctaaaatgagtgagcattagctcct

SEQ ID NO: 5608142 - DNA, 25 bp, Homo sapien
tcatgctagatgatggaactgtgta

SEQ ID NO: 5608143 - DNA, 25 bp, Homo sapien
gggctgttccatgggtcctgtcatt

SEQ ID NO: 5608144 - DNA, 25 bp, Homo sapien
ggtcagcctctaagtccagggactc

SEQ ID NO: 5608145 - DNA, 25 bp, Homo sapien
aaccagaagtgggttactgagtgtg

SEQ ID NO: 5608146 - DNA, 25 bp, Homo sapien
agtttccactggaaccacttggttc

SEQ ID NO: 5608147 - DNA, 25 bp, Homo sapien
acttggttctgtggttggtcatttt

SEQ ID NO: 5608148 - DNA, 25 bp, Homo sapien
gctgatcactgacacggaatgagga

SEQ ID NO: 5608149 - DNA, 25 bp, Homo sapien
actgagtgtgacagaaccttaaaac

SEQ ID NO: 5608150 - DNA, 25 bp, Homo sapien
gtaagctaattaatagtatggagca

SEQ ID NO: 5608151 - DNA, 25 bp, Homo sapien
agtatggagcaaatctaaggtagat

SEQ ID NO: 5608152 - DNA, 25 bp, Homo sapien
aggtggccacagcccttccgaactc

SEQ ID NO: 5608153 - DNA, 25 bp, Homo sapien
tatgtggcatcccagcttagctcct

SEQ ID NO: 5608154 - DNA, 25 bp, Homo sapien
ttccgaactcaagttggctccatat

SEQ ID NO: 5608155 - DNA, 25 bp, Homo sapien
actggcactgtttagtggaagtgac

SEQ ID NO: 5608156 - DNA, 25 bp, Homo sapien
atcaccatgaagatcagggatagga

SEQ ID NO: 5608157 - DNA, 25 bp, Homo sapien
tggagtgaataaacaatattgcatt

SEQ ID NO: 5608158 - DNA, 25 bp, Homo sapien
cagggcatgatgtaggtacctaaaa

SEQ ID NO: 5608159 - DNA, 25 bp, Homo sapien
ctctaaaactgtgggggtaaattga

SEQ ID NO: 5608160 - DNA, 25 bp, Homo sapien
aacgtaaacagtgaaattatgtaca

SEQ ID NO: 5608161 - DNA, 25 bp, Homo sapien
tctgaatacaatacatggagtgaat

SEQ ID NO: 5608162 - DNA, 25 bp, Homo sapien
tgggggtaaattgaagcatgtttat

SEQ ID NO: 5608163 - DNA, 25 bp, Homo sapien
ataggagtgctaaaaacgtaaacag

SEQ ID NO: 5608164 - DNA, 25 bp, Homo sapien
atgtaggtacctaaaagtctagagt

SEQ ID NO: 5608165 - DNA, 25 bp, Homo sapien
tggagtctaagacattctgtgcatc

SEQ ID NO: 5608166 - DNA, 25 bp, Homo sapien
ctcctaaatggcaggtttgcattac

SEQ ID NO: 5608167 - DNA, 25 bp, Homo sapien
aggtatggaattgttctgatatttt

SEQ ID NO: 5608168 - DNA, 25 bp, Homo sapien
catcacatcacttcctcagacaatc

SEQ ID NO: 5608169 - DNA, 25 bp, Homo sapien
cagctctatccagccaagaccttgc

SEQ ID NO: 5608170 - DNA, 25 bp, Homo sapien
agcaaaattatagttgatgaattgc

SEQ ID NO: 5608171 - DNA, 25 bp, Homo sapien
tatagttgatgaattgccttctctc

SEQ ID NO: 5608172 - DNA, 25 bp, Homo sapien
ccttctctcagcacacctcttcctc

SEQ ID NO: 5608173 - DNA, 25 bp, Homo sapien
tccagccaagaccttgctcagcatc

SEQ ID NO: 5608174 - DNA, 25 bp, Homo sapien
tctatgtattcaaaggtaatgtgtt

SEQ ID NO: 5608175 - DNA, 25 bp, Homo sapien
atcttaaatatccagtgatagccac

SEQ ID NO: 5608176 - DNA, 25 bp, Homo sapien
tcctgtcctgagcaaagccctcatc

SEQ ID NO: 5608177 - DNA, 25 bp, Homo sapien
aggtaatgtgttatcttaagcaaaa

SEQ ID NO: 5608178 - DNA, 25 bp, Homo sapien
tcagggaatcagcatgttgtacagg

SEQ ID NO: 5608179 - DNA, 25 bp, Homo sapien
attctgggctttaaagactatggtt

SEQ ID NO: 5608180 - DNA, 25 bp, Homo sapien
tggatcgcctgtgcatcagggaatc

SEQ ID NO: 5608181 - DNA, 25 bp, Homo sapien
tctggagtgatgcctgcacagtatt

SEQ ID NO: 5608182 - DNA, 25 bp, Homo sapien
ctctcatcaaagctgggaatgaagc

SEQ ID NO: 5608183 - DNA, 25 bp, Homo sapien
tccttgtgggcacagaacaaggctt

SEQ ID NO: 5608184 - DNA, 25 bp, Homo sapien
tgttgtacaggtccagtgattctgg

SEQ ID NO: 5608185 - DNA, 25 bp, Homo sapien
agaaaagaatgaaccagtgaatgac

SEQ ID NO: 5608186 - DNA, 25 bp, Homo sapien
ccaagaaacaagcctgattctgggc

SEQ ID NO: 5608187 - DNA, 25 bp, Homo sapien
ttacagctaccaaaaccaagaaaca

SEQ ID NO: 5608188 - DNA, 25 bp, Homo sapien
ggcttgaggctggtgctctcatcaa

SEQ ID NO: 5608189 - DNA, 25 bp, Homo sapien
gctccatcagaggcactgttgagtg

SEQ ID NO: 5608190 - DNA, 25 bp, Homo sapien
tccagccagggcttactggatggga

SEQ ID NO: 5608191 - DNA, 25 bp, Homo sapien
atgggagttgtgaacatccaaacac

SEQ ID NO: 5608192 - DNA, 25 bp, Homo sapien
gggggcccttctcatgggagttgtg

SEQ ID NO: 5608193 - DNA, 25 bp, Homo sapien
gagaggaaacacatgcactgtgcca

SEQ ID NO: 5608194 - DNA, 25 bp, Homo sapien
gccaggtttgtagaagtctggagag

SEQ ID NO: 5608195 - DNA, 25 bp, Homo sapien
gtgtagggtacacagatctgagcat

SEQ ID NO: 5608196 - DNA, 25 bp, Homo sapien
gggtccaggccttctaggctgcatt

SEQ ID NO: 5608197 - DNA, 25 bp, Homo sapien
gaaccaccagctcagtgcacaggga

SEQ ID NO: 5608198 - DNA, 25 bp, Homo sapien
ctggttttatgccagggttggtgcc

SEQ ID NO: 5608199 - DNA, 25 bp, Homo sapien
ctagcagaggtcacaaccaagctga

SEQ ID NO: 5608200 - DNA, 25 bp, Homo sapien
tagacatgtatgtgcatggattagc

SEQ ID NO: 5608201 - DNA, 25 bp, Homo sapien
gcttgacatagacacagatggttcc

SEQ ID NO: 5608202 - DNA, 25 bp, Homo sapien
ctatggttggagaccctggtatgaa

SEQ ID NO: 5608203 - DNA, 25 bp, Homo sapien
aagggcaaacgtcacatcaccatgt

SEQ ID NO: 5608204 - DNA, 25 bp, Homo sapien
gtccctatgagtaacatgaagggca

SEQ ID NO: 5608205 - DNA, 25 bp, Homo sapien
ggtatgaaccccagtttagcttgac

SEQ ID NO: 5608206 - DNA, 25 bp, Homo sapien
atggattagcattcacacacattcc

SEQ ID NO: 5608207 - DNA, 25 bp, Homo sapien
aattggtagctaacagaatagtccc

SEQ ID NO: 5608208 - DNA, 25 bp, Homo sapien
tatctgaagaagtccaacctccatt

SEQ ID NO: 5608209 - DNA, 25 bp, Homo sapien
ccatgttaacagactcgggaagtgt

SEQ ID NO: 5608210 - DNA, 25 bp, Homo sapien
cgggaagtgtatctgaagaagtcca

SEQ ID NO: 5608211 - DNA, 25 bp, Homo sapien
ctgtaaaatagctatgtgacatctt

SEQ ID NO: 5608212 - DNA, 25 bp, Homo sapien
ctgaccaattggccaagcatgcaac

SEQ ID NO: 5608213 - DNA, 25 bp, Homo sapien
tgctcagagataataaaagcccatc

SEQ ID NO: 5608214 - DNA, 25 bp, Homo sapien
ttggccaagcatgcaacacttagaa

SEQ ID NO: 5608215 - DNA, 25 bp, Homo sapien
tagttatggcaatagagtggaaaga

SEQ ID NO: 5608216 - DNA, 25 bp, Homo sapien
actgcctctagagccatgctgacca

SEQ ID NO: 5608217 - DNA, 25 bp, Homo sapien
atttctgaaaagctatgtgtgagtg

SEQ ID NO: 5608218 - DNA, 25 bp, Homo sapien
aggagatggttatgaaaatggctta

SEQ ID NO: 5608219 - DNA, 25 bp, Homo sapien
acacttagaatagatgctcagagat

SEQ ID NO: 5608220 - DNA, 25 bp, Homo sapien
gtgtgagtgaataaacatcttgctt

SEQ ID NO: 5608221 - DNA, 25 bp, Homo sapien
tgttatgaaaggagatggttatgaa

SEQ ID NO: 5608222 - DNA, 25 bp, Homo sapien
tcctcgagccccacttttgttacag

SEQ ID NO: 5608223 - DNA, 25 bp, Homo sapien
atgacatgtgtggaaataatgattt

SEQ ID NO: 5608224 - DNA, 25 bp, Homo sapien
tacttgagctttgacttctccctcc

SEQ ID NO: 5608225 - DNA, 25 bp, Homo sapien
ctcgaagagctttctttgctggttt

SEQ ID NO: 5608226 - DNA, 25 bp, Homo sapien
ttcaccaagaactcgctatcacctt

SEQ ID NO: 5608227 - DNA, 25 bp, Homo sapien
taaaatccttggaagcaatttcacc

SEQ ID NO: 5608228 - DNA, 25 bp, Homo sapien
gattcctaaagatcagtagccttac

SEQ ID NO: 5608229 - DNA, 25 bp, Homo sapien
agcctctctaggttaaaaatctctt

SEQ ID NO: 5608230 - DNA, 25 bp, Homo sapien
tatcaccttgatcagtccctattta

SEQ ID NO: 5608231 - DNA, 25 bp, Homo sapien
tgcgcttttccccttcctcgagccc

SEQ ID NO: 5608232 - DNA, 25 bp, Homo sapien
ggaacattctgcaacaagctggctt

SEQ ID NO: 5608233 - DNA, 25 bp, Homo sapien
ttgcctaggctagccacaaactcat

SEQ ID NO: 5608234 - DNA, 25 bp, Homo sapien
cttagcacagaccccagtgcatata

SEQ ID NO: 5608235 - DNA, 25 bp, Homo sapien
ctttcagggcaaaaacgctttcttc

SEQ ID NO: 5608236 - DNA, 25 bp, Homo sapien
aggctagccacaaactcatggcctc

SEQ ID NO: 5608237 - DNA, 25 bp, Homo sapien
tcagggcaaaaacgctttcttcgaa

SEQ ID NO: 5608238 - DNA, 25 bp, Homo sapien
aaaggctatgagaagtaactaaaat

SEQ ID NO: 5608239 - DNA, 25 bp, Homo sapien
agaactctgagcaaggaatgcaagt

SEQ ID NO: 5608240 - DNA, 25 bp, Homo sapien
agctgcagccgctttcagggcaaaa

SEQ ID NO: 5608241 - DNA, 25 bp, Homo sapien
tgagcaaggaatgcaagttcctaac

SEQ ID NO: 5608242 - DNA, 25 bp, Homo sapien
tctatattatgaaatgataaagttc

SEQ ID NO: 5608243 - DNA, 25 bp, Homo sapien
aaaattataccttagcacagacccc

SEQ ID NO: 5608244 - DNA, 25 bp, Homo sapien
tgactgtgcactgtggagttcttta

SEQ ID NO: 5608245 - DNA, 25 bp, Homo sapien
aatcaccattgtattgcatgggtct

SEQ ID NO: 5608246 - DNA, 25 bp, Homo sapien
gagccgtaggtgcatataaagcaca

SEQ ID NO: 5608247 - DNA, 25 bp, Homo sapien
attgtattgcatgggtctttagaaa

SEQ ID NO: 5608248 - DNA, 25 bp, Homo sapien
ggcttgaagctgtggctgatgtttt

SEQ ID NO: 5608249 - DNA, 25 bp, Homo sapien
gtaggtgcatataaagcacagtctc

SEQ ID NO: 5608250 - DNA, 25 bp, Homo sapien
gggtgagcttaggcttgaagctgtg

SEQ ID NO: 5608251 - DNA, 25 bp, Homo sapien
gcttaggcttgaagctgtggctgat

SEQ ID NO: 5608252 - DNA, 25 bp, Homo sapien
gtgagcttaggcttgaagctgtggc

SEQ ID NO: 5608253 - DNA, 25 bp, Homo sapien
taattagtcatcaatattggtgaat

SEQ ID NO: 5608254 - DNA, 25 bp, Homo sapien
ttagaaatataattgcaacaatcac

SEQ ID NO: 5608255 - DNA, 25 bp, Homo sapien
tgtgagaatagatttccgggaagat

SEQ ID NO: 5608256 - DNA, 25 bp, Homo sapien
tgccagctgggcttacagttacctg

SEQ ID NO: 5608257 - DNA, 25 bp, Homo sapien
tatctgaaagaaccctgaagtgaaa

SEQ ID NO: 5608258 - DNA, 25 bp, Homo sapien
ttttccggctacctggctgccagct

SEQ ID NO: 5608259 - DNA, 25 bp, Homo sapien
cctagaagcaagcactgtttcgggg

SEQ ID NO: 5608260 - DNA, 25 bp, Homo sapien
gatgtgctggctcagcctggctttt

SEQ ID NO: 5608261 - DNA, 25 bp, Homo sapien
ccgggaagatggagatttgttaatg

SEQ ID NO: 5608262 - DNA, 25 bp, Homo sapien
ttgtagggagcacgcttccaattgt

SEQ ID NO: 5608263 - DNA, 25 bp, Homo sapien
ctcaagccccttgatgcggctggtc

SEQ ID NO: 5608264 - DNA, 25 bp, Homo sapien
acggtttgctgagatcctgcgatgg

SEQ ID NO: 5608265 - DNA, 25 bp, Homo sapien
cttgaggccagtttgagcttgtcat

SEQ ID NO: 5608266 - DNA, 25 bp, Homo sapien
atccaagccccttccaagatgggtc

SEQ ID NO: 5608267 - DNA, 25 bp, Homo sapien
agagatagagagatcataaggatat

SEQ ID NO: 5608268 - DNA, 25 bp, Homo sapien
gcgtaattgaagctggtcatatgcc

SEQ ID NO: 5608269 - DNA, 25 bp, Homo sapien
gtggatgttcatgatcaggaagcca

SEQ ID NO: 5608270 - DNA, 25 bp, Homo sapien
agtcccagtgagttggtgagaaatt

SEQ ID NO: 5608271 - DNA, 25 bp, Homo sapien
tcctccaagcagtgactcagggatc

SEQ ID NO: 5608272 - DNA, 25 bp, Homo sapien
gagggaaaagacatgtaaattatgc

SEQ ID NO: 5608273 - DNA, 25 bp, Homo sapien
caggcaaagtccaacgtggatgttc

SEQ ID NO: 5608274 - DNA, 25 bp, Homo sapien
tgggtctctgtcatcatctgggctt

SEQ ID NO: 5608275 - DNA, 25 bp, Homo sapien
caaatataaacatctgggaggcata

SEQ ID NO: 5608276 - DNA, 25 bp, Homo sapien
ggaggcatatgagttacctgggaaa

SEQ ID NO: 5608277 - DNA, 25 bp, Homo sapien
ccttctgagggccatgaagtaagag

SEQ ID NO: 5608278 - DNA, 25 bp, Homo sapien
tacgtgcctgtgtccaggtttcctt

SEQ ID NO: 5608279 - DNA, 25 bp, Homo sapien
gactctcaggacccaagggctgagg

SEQ ID NO: 5608280 - DNA, 25 bp, Homo sapien
ttccatgaaccaaacataatgattc

SEQ ID NO: 5608281 - DNA, 25 bp, Homo sapien
gtcttccctcatacgtgcctgtgtc

SEQ ID NO: 5608282 - DNA, 25 bp, Homo sapien
tgaagtctgagctcaaggtgttgac

SEQ ID NO: 5608283 - DNA, 25 bp, Homo sapien
ttacatatttaagcgaaggggagaa

SEQ ID NO: 5608284 - DNA, 25 bp, Homo sapien
ctagggccaccataagaaattaccc

SEQ ID NO: 5608285 - DNA, 25 bp, Homo sapien
agtctcgaccctgcacacggatttt

SEQ ID NO: 5608286 - DNA, 25 bp, Homo sapien
gccacgacagtctcgaccctgcaca

SEQ ID NO: 5608287 - DNA, 25 bp, Homo sapien
agtaagagtgtgttccaggcctctc

SEQ ID NO: 5608288 - DNA, 25 bp, Homo sapien
gaatcattttggatgcagttctggc

SEQ ID NO: 5608289 - DNA, 25 bp, Homo sapien
acctggggaaacattcatagtgact

SEQ ID NO: 5608290 - DNA, 25 bp, Homo sapien
ggcttgtgcctctgcttgtatcctt

SEQ ID NO: 5608291 - DNA, 25 bp, Homo sapien
agaaactgtgcattgaaagcatttt

SEQ ID NO: 5608292 - DNA, 25 bp, Homo sapien
gcttggaaaatgcatgaggcttgtg

SEQ ID NO: 5608293 - DNA, 25 bp, Homo sapien
gaggttgaaaccttgggaaacagca

SEQ ID NO: 5608294 - DNA, 25 bp, Homo sapien
tccttcagaacaagcagaccaggaa

SEQ ID NO: 5608295 - DNA, 25 bp, Homo sapien
tgaaaccttgggaaacagcactgaa

SEQ ID NO: 5608296 - DNA, 25 bp, Homo sapien
tcaagtatcctggttaggctgggga

SEQ ID NO: 5608297 - DNA, 25 bp, Homo sapien
caaaatggttgaatcgtttccaggc

SEQ ID NO: 5608298 - DNA, 25 bp, Homo sapien
gtctctactttggagcatggggtgg

SEQ ID NO: 5608299 - DNA, 25 bp, Homo sapien
agggttggatgattccagagaaacc

SEQ ID NO: 5608300 - DNA, 25 bp, Homo sapien
acttgtctaaaggcgttcagtgggt

SEQ ID NO: 5608301 - DNA, 25 bp, Homo sapien
cagagaaaccacccagaacactgac

SEQ ID NO: 5608302 - DNA, 25 bp, Homo sapien
ctgaccctgaccacctgggcatggg

SEQ ID NO: 5608303 - DNA, 25 bp, Homo sapien
ggtctgagcagttgaaacgtccagc

SEQ ID NO: 5608304 - DNA, 25 bp, Homo sapien
agacactgggaaggtgtattcagaa

SEQ ID NO: 5608305 - DNA, 25 bp, Homo sapien
gtttggcaagttgggtgacttgtct

SEQ ID NO: 5608306 - DNA, 25 bp, Homo sapien
gatggagactgaagcttgttaagca

SEQ ID NO: 5608307 - DNA, 25 bp, Homo sapien
tttccctgaggcagctcagaggatg

SEQ ID NO: 5608308 - DNA, 25 bp, Homo sapien
aggaaggtgacccaatctgaagttt

SEQ ID NO: 5608309 - DNA, 25 bp, Homo sapien
ggctgaccctcggtctgagcagttg

SEQ ID NO: 5608310 - DNA, 25 bp, Homo sapien
tcccaaggtgatggaattacaggca

SEQ ID NO: 5608311 - DNA, 25 bp, Homo sapien
agtcaccagaccctcagcatagatt

SEQ ID NO: 5608312 - DNA, 25 bp, Homo sapien
cctctgctgccatgcccttggtcta

SEQ ID NO: 5608313 - DNA, 25 bp, Homo sapien
tgaagtctttcagctgccctctgct

SEQ ID NO: 5608314 - DNA, 25 bp, Homo sapien
gattttacaatagcttccaggtctt

SEQ ID NO: 5608315 - DNA, 25 bp, Homo sapien
gcccttggtctagtagtcaccagac

SEQ ID NO: 5608316 - DNA, 25 bp, Homo sapien
cttgacctcccaaggtgatggaatt

SEQ ID NO: 5608317 - DNA, 25 bp, Homo sapien
caggtctttcctctcatccggtttc

SEQ ID NO: 5608318 - DNA, 25 bp, Homo sapien
gaactcctggtctcaagccatcatc

SEQ ID NO: 5608319 - DNA, 25 bp, Homo sapien
gagccactgcaccaggcccctttct

SEQ ID NO: 5608320 - DNA, 25 bp, Homo sapien
aagccatcatcctgccttgacctcc

SEQ ID NO: 5608321 - DNA, 25 bp, Homo sapien
atggcaaagatatatatggtggcac

SEQ ID NO: 5608322 - DNA, 25 bp, Homo sapien
agtggtttgcttgagcaggtccttc

SEQ ID NO: 5608323 - DNA, 25 bp, Homo sapien
atccatcatgaggccatggcaaaga

SEQ ID NO: 5608324 - DNA, 25 bp, Homo sapien
ctcatggtgattgcagatgtatagc

SEQ ID NO: 5608325 - DNA, 25 bp, Homo sapien
actggaggtctgctgacaactaatc

SEQ ID NO: 5608326 - DNA, 25 bp, Homo sapien
ctggaggcttcttaagacctagcac

SEQ ID NO: 5608327 - DNA, 25 bp, Homo sapien
catggtcaagtatcaagtcaagggg

SEQ ID NO: 5608328 - DNA, 25 bp, Homo sapien
aactaatctaggtggactctgaggg

SEQ ID NO: 5608329 - DNA, 25 bp, Homo sapien
agatgtatagctggaaacactggag

SEQ ID NO: 5608330 - DNA, 25 bp, Homo sapien
ctgagcacaggtatactgacatttc

SEQ ID NO: 5608331 - DNA, 25 bp, Homo sapien
tctacaagtccactggaggtctgct

SEQ ID NO: 5608332 - DNA, 25 bp, Homo sapien
tgtcatcatttctggaggagccgtg

SEQ ID NO: 5608333 - DNA, 25 bp, Homo sapien
tcacacacccacgttggccccagag

SEQ ID NO: 5608334 - DNA, 25 bp, Homo sapien
cttacataatagaaataggggaccc

SEQ ID NO: 5608335 - DNA, 25 bp, Homo sapien
gaaagtgcgtccatgcgattggtga

SEQ ID NO: 5608336 - DNA, 25 bp, Homo sapien
tttcatgacaccaaagcaaacggct

SEQ ID NO: 5608337 - DNA, 25 bp, Homo sapien
ttggtcgccagggctgtcatcattt

SEQ ID NO: 5608338 - DNA, 25 bp, Homo sapien
catgcgattggtgaatcagaatggg

SEQ ID NO: 5608339 - DNA, 25 bp, Homo sapien
caaagcaaacggcttagcagtcagg

SEQ ID NO: 5608340 - DNA, 25 bp, Homo sapien
tgaatatacttctgagcgcaaaccc

SEQ ID NO: 5608341 - DNA, 25 bp, Homo sapien
cctcctagcctggtaggaaagtgcg

SEQ ID NO: 5608342 - DNA, 25 bp, Homo sapien
cttggaattttctggggaaatcatt

SEQ ID NO: 5608343 - DNA, 25 bp, Homo sapien
gaccttgtgatacccccgcctcatc

SEQ ID NO: 5608344 - DNA, 25 bp, Homo sapien
tgtccttgggacccagctcagaacc

SEQ ID NO: 5608345 - DNA, 25 bp, Homo sapien
ctgtcctcagcaatgtcgtgtgccc

SEQ ID NO: 5608346 - DNA, 25 bp, Homo sapien
aactggcaattgactatagcttctt

SEQ ID NO: 5608347 - DNA, 25 bp, Homo sapien
agttagtttcacaggcctcttcacc

SEQ ID NO: 5608348 - DNA, 25 bp, Homo sapien
cttcacctagtacttgcacagtttc

SEQ ID NO: 5608349 - DNA, 25 bp, Homo sapien
gtgtgcccttgatggtagaaagtac

SEQ ID NO: 5608350 - DNA, 25 bp, Homo sapien
tcaagccttgcagtaagttagtttc

SEQ ID NO: 5608351 - DNA, 25 bp, Homo sapien
gcacctggccgcgaatgtctctatt

SEQ ID NO: 5608352 - DNA, 25 bp, Homo sapien
gtagaaagtacctgccaagttgtcc

SEQ ID NO: 5608353 - DNA, 25 bp, Homo sapien
gtaacctgccacctccccaccttgc

SEQ ID NO: 5608354 - DNA, 25 bp, Homo sapien
aggactaatgcagacgctccacact

SEQ ID NO: 5608355 - DNA, 25 bp, Homo sapien
taataacgggtctttcagcagacag

SEQ ID NO: 5608356 - DNA, 25 bp, Homo sapien
ggtttagaagcttcctccaaggatc

SEQ ID NO: 5608357 - DNA, 25 bp, Homo sapien
cacacttctgagaaacccccagggt

SEQ ID NO: 5608358 - DNA, 25 bp, Homo sapien
gattggttaggtgattgaagcccac

SEQ ID NO: 5608359 - DNA, 25 bp, Homo sapien
tgaaattcagtaggaacccaccctg

SEQ ID NO: 5608360 - DNA, 25 bp, Homo sapien
gttgggctgacatcccgtggctcaa

SEQ ID NO: 5608361 - DNA, 25 bp, Homo sapien
tacagcgttacctccccaacactgc

SEQ ID NO: 5608362 - DNA, 25 bp, Homo sapien
atccaggacaaagacctgatacatc

SEQ ID NO: 5608363 - DNA, 25 bp, Homo sapien
gtaggaacccaccctgagtcacctc

SEQ ID NO: 5608364 - DNA, 25 bp, Homo sapien
tgcaaacagaaatatacagcgttac

SEQ ID NO: 5608365 - DNA, 25 bp, Homo sapien
ctaggtttgtagattggcaggaaaa

SEQ ID NO: 5608366 - DNA, 25 bp, Homo sapien
gtacatattgtagaggtgaagcttt

SEQ ID NO: 5608367 - DNA, 25 bp, Homo sapien
tttccccctcagtgaggtgtgctgg

SEQ ID NO: 5608368 - DNA, 25 bp, Homo sapien
ttgtaggctaggtttgtagattggc

SEQ ID NO: 5608369 - DNA, 25 bp, Homo sapien
gcacacaccattatggactcctggc

SEQ ID NO: 5608370 - DNA, 25 bp, Homo sapien
tggccaataataatctcaatcataa

SEQ ID NO: 5608371 - DNA, 25 bp, Homo sapien
atggactcctggccaacaaagagac

SEQ ID NO: 5608372 - DNA, 25 bp, Homo sapien
aggtgaagctttgtaggctaggttt

SEQ ID NO: 5608373 - DNA, 25 bp, Homo sapien
gactcctggccaacaaagagactga

SEQ ID NO: 5608374 - DNA, 25 bp, Homo sapien
gaaactacccatttactctcagctt

SEQ ID NO: 5608375 - DNA, 25 bp, Homo sapien
tggacagtttccccctcagtgaggt

SEQ ID NO: 5608376 - DNA, 25 bp, Homo sapien
tccctaaggcctttgggtctcagtc

SEQ ID NO: 5608377 - DNA, 25 bp, Homo sapien
cctgataaatatgagtggcccatcc

SEQ ID NO: 5608378 - DNA, 25 bp, Homo sapien
gccaactggcaataatgagaacgtc

SEQ ID NO: 5608379 - DNA, 25 bp, Homo sapien
ggtagttgaagttatgaccactctg

SEQ ID NO: 5608380 - DNA, 25 bp, Homo sapien
ttaagctcagctgcatgctagactc

SEQ ID NO: 5608381 - DNA, 25 bp, Homo sapien
ggtctcagtctcttcgtcagccaac

SEQ ID NO: 5608382 - DNA, 25 bp, Homo sapien
atagggggcaatcactgaatcattg

SEQ ID NO: 5608383 - DNA, 25 bp, Homo sapien
agtcgcagctctgccacgcatcagt

SEQ ID NO: 5608384 - DNA, 25 bp, Homo sapien
acgcatcagtggtgtgaatttagac

SEQ ID NO: 5608385 - DNA, 25 bp, Homo sapien
gctgcatgctagactctgtgctgtc

SEQ ID NO: 5608386 - DNA, 25 bp, Homo sapien
gaccactctggagccagactcccgg

SEQ ID NO: 5608387 - DNA, 25 bp, Homo sapien
ttttagacagtgacagtaggcttac

SEQ ID NO: 5608388 - DNA, 25 bp, Homo sapien
agacagctatcgatacagtgatggt

SEQ ID NO: 5608389 - DNA, 25 bp, Homo sapien
acagctagcaatagagttccagtat

SEQ ID NO: 5608390 - DNA, 25 bp, Homo sapien
agtgacggtatttttagacagtgat

SEQ ID NO: 5608391 - DNA, 25 bp, Homo sapien
cagtaggcttacaccgacagctatc

SEQ ID NO: 5608392 - DNA, 25 bp, Homo sapien
gatggtatttttagacagtgacggt

SEQ ID NO: 5608393 - DNA, 25 bp, Homo sapien
gagcgtgctccacagagttccagta

SEQ ID NO: 5608394 - DNA, 25 bp, Homo sapien
tgggcagcattcaaagccgtcccgg

SEQ ID NO: 5608395 - DNA, 25 bp, Homo sapien
agctattgatacagagtaggctgct

SEQ ID NO: 5608396 - DNA, 25 bp, Homo sapien
agctatggagcttcagtattcacac

SEQ ID NO: 5608397 - DNA, 25 bp, Homo sapien
tataggcagctgtcgacacatagtt

SEQ ID NO: 5608398 - DNA, 25 bp, Homo sapien
gttactaaatttcctcaagagagat

SEQ ID NO: 5608399 - DNA, 25 bp, Homo sapien
tatcattacaacaaccagcacaggc

SEQ ID NO: 5608400 - DNA, 25 bp, Homo sapien
tctcaaaacgttctggttgttacta

SEQ ID NO: 5608401 - DNA, 25 bp, Homo sapien
atattccatataaagaggtagaaga

SEQ ID NO: 5608402 - DNA, 25 bp, Homo sapien
aggctgtgaataatactgtcaaggc

SEQ ID NO: 5608403 - DNA, 25 bp, Homo sapien
cccagttacactgttcaagtcattc

SEQ ID NO: 5608404 - DNA, 25 bp, Homo sapien
aagagagatgatttagtgcaaatgc

SEQ ID NO: 5608405 - DNA, 25 bp, Homo sapien
taaatttcctcaagagagatgattt

SEQ ID NO: 5608406 - DNA, 25 bp, Homo sapien
gctggcatatagaaacctgggagtt

SEQ ID NO: 5608407 - DNA, 25 bp, Homo sapien
aaaatatgtctaagtgaataaactc

SEQ ID NO: 5608408 - DNA, 25 bp, Homo sapien
caagtcattctcaaaacgttctggt

SEQ ID NO: 5608409 - DNA, 25 bp, Homo sapien
tattctgcaaaatcttgaaataaga

SEQ ID NO: 5608410 - DNA, 25 bp, Homo sapien
agtattgcaactggtttacggctta

SEQ ID NO: 5608411 - DNA, 25 bp, Homo sapien
aacaaacctgcatctaatacttatt

SEQ ID NO: 5608412 - DNA, 25 bp, Homo sapien
ttttaaacaataacaaacctgcatc

SEQ ID NO: 5608413 - DNA, 25 bp, Homo sapien
attaccgaaacaattcatattctgc

SEQ ID NO: 5608414 - DNA, 25 bp, Homo sapien
ggagcagaacagaagttgccattat

SEQ ID NO: 5608415 - DNA, 25 bp, Homo sapien
agaacagaagttgccattatgagaa

SEQ ID NO: 5608416 - DNA, 25 bp, Homo sapien
cttattacattgggggaattaccga

SEQ ID NO: 5608417 - DNA, 25 bp, Homo sapien
agacaaaatacattaggagaagttc

SEQ ID NO: 5608418 - DNA, 25 bp, Homo sapien
aatacttattacattgggggaatta

SEQ ID NO: 5608419 - DNA, 25 bp, Homo sapien
ttcaacaaatagctagtattgcaac

SEQ ID NO: 5608420 - DNA, 25 bp, Homo sapien
agttgtttagctgcatggacttggc

SEQ ID NO: 5608421 - DNA, 25 bp, Homo sapien
agttggttggtggctttaccgcttg

SEQ ID NO: 5608422 - DNA, 25 bp, Homo sapien
cttggcatataacatgaagatactt

SEQ ID NO: 5608423 - DNA, 25 bp, Homo sapien
ccttacctcgatctgtgcctgctgt

SEQ ID NO: 5608424 - DNA, 25 bp, Homo sapien
ttctcatagttaagaataggacact

SEQ ID NO: 5608425 - DNA, 25 bp, Homo sapien
ccagagaataaacctgtagcctcca

SEQ ID NO: 5608426 - DNA, 25 bp, Homo sapien
agtggcaggaactgatgtgattcct

SEQ ID NO: 5608427 - DNA, 25 bp, Homo sapien
taccgcttgatattctgtctgggcc

SEQ ID NO: 5608428 - DNA, 25 bp, Homo sapien
ttgatgctttgtgacccttggttgt

SEQ ID NO: 5608429 - DNA, 25 bp, Homo sapien
gaataggacactaaaaatggagagg

SEQ ID NO: 5608430 - DNA, 25 bp, Homo sapien
tgcctgctgtctaccagcccagaga

SEQ ID NO: 5608431 - DNA, 25 bp, Homo sapien
acaacggatttgtcaagtgtggtgg

SEQ ID NO: 5608432 - DNA, 25 bp, Homo sapien
tgcatctagatgtgtgattttcagc

SEQ ID NO: 5608433 - DNA, 25 bp, Homo sapien
tacaaatgtgtgcaacaacggattt

SEQ ID NO: 5608434 - DNA, 25 bp, Homo sapien
aaacagtctttaaccagcatgctat

SEQ ID NO: 5608435 - DNA, 25 bp, Homo sapien
gccaggattcgaataaaaacagtct

SEQ ID NO: 5608436 - DNA, 25 bp, Homo sapien
attttcagcaaatcactcagtgtct

SEQ ID NO: 5608437 - DNA, 25 bp, Homo sapien
agctaaaattagtgaagagataatc

SEQ ID NO: 5608438 - DNA, 25 bp, Homo sapien
tgtggtggtcactgctcgcattctg

SEQ ID NO: 5608439 - DNA, 25 bp, Homo sapien
gaggtcgagagtttaatttatgcag

SEQ ID NO: 5608440 - DNA, 25 bp, Homo sapien
gggaaaatgcatgtacatctccccc

SEQ ID NO: 5608441 - DNA, 25 bp, Homo sapien
tgggagctctttcgattggcttctg

SEQ ID NO: 5608442 - DNA, 25 bp, Homo sapien
aagtcgcaccttattaaatcctcac

SEQ ID NO: 5608443 - DNA, 25 bp, Homo sapien
ggtctgacaagctctctgtacacct

SEQ ID NO: 5608444 - DNA, 25 bp, Homo sapien
tgagttatggtctgacaagctctct

SEQ ID NO: 5608445 - DNA, 25 bp, Homo sapien
gcccaaagtcataaagagtagagat

SEQ ID NO: 5608446 - DNA, 25 bp, Homo sapien
gcagggtgctctccaagtcgcacct

SEQ ID NO: 5608447 - DNA, 25 bp, Homo sapien
cctcacaacacctcggcaaggatgc

SEQ ID NO: 5608448 - DNA, 25 bp, Homo sapien
accgagactcaaagagagtaagcaa

SEQ ID NO: 5608449 - DNA, 25 bp, Homo sapien
caagaaaccgagactcaaagagagt

SEQ ID NO: 5608450 - DNA, 25 bp, Homo sapien
aagtcataaagagtagagatgaagt

SEQ ID NO: 5608451 - DNA, 25 bp, Homo sapien
cggcaaggatgcacctgctttccca

SEQ ID NO: 5608452 - DNA, 25 bp, Homo sapien
gttacagatcaagaaaccgagactc

SEQ ID NO: 5608453 - DNA, 25 bp, Homo sapien
gcatatgcatagatccacaaagctt

SEQ ID NO: 5608454 - DNA, 25 bp, Homo sapien
gaggctagacacatttgtaaaaggc

SEQ ID NO: 5608455 - DNA, 25 bp, Homo sapien
atatcgcagatagagtacattatgc

SEQ ID NO: 5608456 - DNA, 25 bp, Homo sapien
aaatgtgctgatcactgtgtgtgtt

SEQ ID NO: 5608457 - DNA, 25 bp, Homo sapien
ttttctatgaatatggagcttggga

SEQ ID NO: 5608458 - DNA, 25 bp, Homo sapien
tgaattcgtgaagcttttgttaggc

SEQ ID NO: 5608459 - DNA, 25 bp, Homo sapien
tgtgtgtgttaggcaacactgcaag

SEQ ID NO: 5608460 - DNA, 25 bp, Homo sapien
gctctaagggaaaccaaactggcta

SEQ ID NO: 5608461 - DNA, 25 bp, Homo sapien
atgacaacagaacaatgatgggtac

SEQ ID NO: 5608462 - DNA, 25 bp, Homo sapien
aaaaggctgcacaacttgtttgaag

SEQ ID NO: 5608463 - DNA, 25 bp, Homo sapien
actgcaagaccgagaagctaatatc

SEQ ID NO: 5608464 - DNA, 25 bp, Homo sapien
agagtccgaggttgattcgagtact

SEQ ID NO: 5608465 - DNA, 25 bp, Homo sapien
tgagtacagctaacccccagatgca

SEQ ID NO: 5608466 - DNA, 25 bp, Homo sapien
ttgaacacggaagtcacctagtcac

SEQ ID NO: 5608467 - DNA, 25 bp, Homo sapien
gggacgcgccacttgctgattggct

SEQ ID NO: 5608468 - DNA, 25 bp, Homo sapien
tcccaggcttagctcgcttgtgtct

SEQ ID NO: 5608469 - DNA, 25 bp, Homo sapien
agtcacccacaagatgtatgagtac

SEQ ID NO: 5608470 - DNA, 25 bp, Homo sapien
acagcaagattgagagacaaaactt

SEQ ID NO: 5608471 - DNA, 25 bp, Homo sapien
tgtgaccacctgccggtcccctcac

SEQ ID NO: 5608472 - DNA, 25 bp, Homo sapien
aactcccttttgatggggctgtgac

SEQ ID NO: 5608473 - DNA, 25 bp, Homo sapien
tcctttcccagttgaccgcgacatc

SEQ ID NO: 5608474 - DNA, 25 bp, Homo sapien
caaagcgctgtgcaaactgaaatcc

SEQ ID NO: 5608475 - DNA, 25 bp, Homo sapien
gggtagaggcgtcttagttagacat

SEQ ID NO: 5608476 - DNA, 25 bp, Homo sapien
acatgcatggcagaggcccttttct

SEQ ID NO: 5608477 - DNA, 25 bp, Homo sapien
ccccatgacatgcatggcagaggcc

SEQ ID NO: 5608478 - DNA, 25 bp, Homo sapien
ctgcaaagctgcttgctccagagtt

SEQ ID NO: 5608479 - DNA, 25 bp, Homo sapien
tctccctcttttgactgggtgtgtg

SEQ ID NO: 5608480 - DNA, 25 bp, Homo sapien
cagagatcatgcattctgatagaga

SEQ ID NO: 5608481 - DNA, 25 bp, Homo sapien
agaagatgcaggaatcccttttcta

SEQ ID NO: 5608482 - DNA, 25 bp, Homo sapien
ttctaaaatgtgtctgcaaagctgc

SEQ ID NO: 5608483 - DNA, 25 bp, Homo sapien
tgttctttccagagatcatgcattc

SEQ ID NO: 5608484 - DNA, 25 bp, Homo sapien
gctccagagttgagcatgtgctgct

SEQ ID NO: 5608485 - DNA, 25 bp, Homo sapien
ttccagggagtgataaccactattt

SEQ ID NO: 5608486 - DNA, 25 bp, Homo sapien
tcaagaaataaaacttcatctgaat

SEQ ID NO: 5608487 - DNA, 25 bp, Homo sapien
tacacatgctaataaacaaaaagga

SEQ ID NO: 5608488 - DNA, 25 bp, Homo sapien
aggaaataactgttttcaagaaata

SEQ ID NO: 5608489 - DNA, 25 bp, Homo sapien
aaacaccccatatccaaaaagagga

SEQ ID NO: 5608490 - DNA, 25 bp, Homo sapien
caccccatatccaaaaagaggaaaa

SEQ ID NO: 5608491 - DNA, 25 bp, Homo sapien
agtcaatctaatttatgctagcatt

SEQ ID NO: 5608492 - DNA, 25 bp, Homo sapien
gtgatttgtgtttatacacatgcta

SEQ ID NO: 5608493 - DNA, 25 bp, Homo sapien
atgctaataaacaaaaaggaaataa

SEQ ID NO: 5608494 - DNA, 25 bp, Homo sapien
gtgttacattaactactacagtcac

SEQ ID NO: 5608495 - DNA, 25 bp, Homo sapien
aaaatcagttttaaaccaatcacca

SEQ ID NO: 5608496 - DNA, 25 bp, Homo sapien
gtactttatacaaaatgtgttacat

SEQ ID NO: 5608497 - DNA, 25 bp, Homo sapien
gcataagtccactgccatctccagg

SEQ ID NO: 5608498 - DNA, 25 bp, Homo sapien
tcaattggtttataaggagtacttc

SEQ ID NO: 5608499 - DNA, 25 bp, Homo sapien
tccagggctctgtgtaacatccagc

SEQ ID NO: 5608500 - DNA, 25 bp, Homo sapien
ctatgctgaactttagcagtctctc

SEQ ID NO: 5608501 - DNA, 25 bp, Homo sapien
acatccagcaaaacatcactggctt

SEQ ID NO: 5608502 - DNA, 25 bp, Homo sapien
ttaagacctgtgacttcctctagca

SEQ ID NO: 5608503 - DNA, 25 bp, Homo sapien
ttgggtgcaataaactgaagacatc

SEQ ID NO: 5608504 - DNA, 25 bp, Homo sapien
aggagtacttcttgatgttgggatc

SEQ ID NO: 5608505 - DNA, 25 bp, Homo sapien
ggctgtttgaggggcaattcaatta

SEQ ID NO: 5608506 - DNA, 25 bp, Homo sapien
tgaaaagctcaggctgtttgagggg

SEQ ID NO: 5608507 - DNA, 25 bp, Homo sapien
cataactcttgaaaagctcaggctg

SEQ ID NO: 5608508 - DNA, 25 bp, Homo sapien
gtcatctaggagaattatattttgt

SEQ ID NO: 5608509 - DNA, 25 bp, Homo sapien
tcgggtgctgttccccaaacatagt

SEQ ID NO: 5608510 - DNA, 25 bp, Homo sapien
gttctagatatactaatgcagtggg

SEQ ID NO: 5608511 - DNA, 25 bp, Homo sapien
tggcatgataccagattggaggata

SEQ ID NO: 5608512 - DNA, 25 bp, Homo sapien
agcagcatttcgggtgctgttcccc

SEQ ID NO: 5608513 - DNA, 25 bp, Homo sapien
acatagtgttgtttggcatgatacc

SEQ ID NO: 5608514 - DNA, 25 bp, Homo sapien
tgaaggtgctgttctagatatacta

SEQ ID NO: 5608515 - DNA, 25 bp, Homo sapien
gggccactgtgccagatattttttg

SEQ ID NO: 5608516 - DNA, 25 bp, Homo sapien
ataccagattggaggatatcctagt

SEQ ID NO: 5608517 - DNA, 25 bp, Homo sapien
agattggaggatatcctagtcatct

SEQ ID NO: 5608518 - DNA, 25 bp, Homo sapien
gctttttagcagcatttcgggtgct

SEQ ID NO: 5608519 - DNA, 25 bp, Homo sapien
taacacacacaaggagtcctaattc

SEQ ID NO: 5608520 - DNA, 25 bp, Homo sapien
acacacaaggagtcctaattcaatt

SEQ ID NO: 5608521 - DNA, 25 bp, Homo sapien
gtggccgtgacactgactccagtct

SEQ ID NO: 5608522 - DNA, 25 bp, Homo sapien
gtgcgccgtatgcccgccctcggcg

SEQ ID NO: 5608523 - DNA, 25 bp, Homo sapien
gggtatggccaagtgttagtgttat

SEQ ID NO: 5608524 - DNA, 25 bp, Homo sapien
ccaggcatctttaggtcccttggag

SEQ ID NO: 5608525 - DNA, 25 bp, Homo sapien
tggccaagtgttagtgttatgtagg

SEQ ID NO: 5608526 - DNA, 25 bp, Homo sapien
caagtgttagtgttatgtaggggat

SEQ ID NO: 5608527 - DNA, 25 bp, Homo sapien
atgggtatggccaagtgttagtgtt

SEQ ID NO: 5608528 - DNA, 25 bp, Homo sapien
cccctgttccagtgaacccagcata

SEQ ID NO: 5608529 - DNA, 25 bp, Homo sapien
atctttaggtcccttggaggtggca

SEQ ID NO: 5608530 - DNA, 25 bp, Homo sapien
tcagagccagtccctgtttagtgac

SEQ ID NO: 5608531 - DNA, 25 bp, Homo sapien
tgatgccattgatgaagagatgatg

SEQ ID NO: 5608532 - DNA, 25 bp, Homo sapien
agagatgatggtcagtaccaatggc

SEQ ID NO: 5608533 - DNA, 25 bp, Homo sapien
ctacactgcttggcaggacccagga

SEQ ID NO: 5608534 - DNA, 25 bp, Homo sapien
gacccaggagtgtacattggacttg

SEQ ID NO: 5608535 - DNA, 25 bp, Homo sapien
tagtgacagcactttggccacctga

SEQ ID NO: 5608536 - DNA, 25 bp, Homo sapien
cacactgggtcaccactcagcatga

SEQ ID NO: 5608537 - DNA, 25 bp, Homo sapien
ttaagaagagcaaagttaagaaaca

SEQ ID NO: 5608538 - DNA, 25 bp, Homo sapien
attagtgagacccatccaaaatgtt

SEQ ID NO: 5608539 - DNA, 25 bp, Homo sapien
tatttaggatgtgccacactgggtc

SEQ ID NO: 5608540 - DNA, 25 bp, Homo sapien
taaaaccaggctctttggagaagta

SEQ ID NO: 5608541 - DNA, 25 bp, Homo sapien
tggtgagatgtggtcacaagactaa

SEQ ID NO: 5608542 - DNA, 25 bp, Homo sapien
ggcagcaccctagttggtggcagag

SEQ ID NO: 5608543 - DNA, 25 bp, Homo sapien
gactaagctcagtgcaaaggtgaat

SEQ ID NO: 5608544 - DNA, 25 bp, Homo sapien
ctgggttacctgtgcaagaaagaaa

SEQ ID NO: 5608545 - DNA, 25 bp, Homo sapien
gcccgaagagactacacctcccagt

SEQ ID NO: 5608546 - DNA, 25 bp, Homo sapien
tcaggcccaagagcacatctgaaga

SEQ ID NO: 5608547 - DNA, 25 bp, Homo sapien
gaaagaaacaagtctctgtagctta

SEQ ID NO: 5608548 - DNA, 25 bp, Homo sapien
ttcctcgtgaaacaaaaaacatgcc

SEQ ID NO: 5608549 - DNA, 25 bp, Homo sapien
ctgaagacagctctggatgcttgtg

SEQ ID NO: 5608550 - DNA, 25 bp, Homo sapien
ggaatgacactgcatcgagctggca

SEQ ID NO: 5608551 - DNA, 25 bp, Homo sapien
gtggcagggtttgctcccaccttcc

SEQ ID NO: 5608552 - DNA, 25 bp, Homo sapien
atcagaaccccacttggcatgagcc

SEQ ID NO: 5608553 - DNA, 25 bp, Homo sapien
gcaaaagctgttactcagaccttcc

SEQ ID NO: 5608554 - DNA, 25 bp, Homo sapien
atgaaaatgaaatcatggtccaatc

SEQ ID NO: 5608555 - DNA, 25 bp, Homo sapien
tacatgctcactagttcaatcagaa

SEQ ID NO: 5608556 - DNA, 25 bp, Homo sapien
atatgagatacccaactaaggagtt

SEQ ID NO: 5608557 - DNA, 25 bp, Homo sapien
gaggctggcctctactaatacatgc

SEQ ID NO: 5608558 - DNA, 25 bp, Homo sapien
aaaagataagtcagctcaacttctc

SEQ ID NO: 5608559 - DNA, 25 bp, Homo sapien
ggactgggaccaccattctggcaat

SEQ ID NO: 5608560 - DNA, 25 bp, Homo sapien
caacttctccaatggtggagccagg

SEQ ID NO: 5608561 - DNA, 25 bp, Homo sapien
gagccaggataagcaaaagctgtta

SEQ ID NO: 5608562 - DNA, 25 bp, Homo sapien
ttcctaccatcgatatgagataccc

SEQ ID NO: 5608563 - DNA, 25 bp, Homo sapien
gtatactatataattgggcaggaat

SEQ ID NO: 5608564 - DNA, 25 bp, Homo sapien
tcatgcaggggcaatacccaacttg

SEQ ID NO: 5608565 - DNA, 25 bp, Homo sapien
agactcagaatttgaagaatatttc

SEQ ID NO: 5608566 - DNA, 25 bp, Homo sapien
tgggcaggaataattgcttctgagt

SEQ ID NO: 5608567 - DNA, 25 bp, Homo sapien
ctaagggactctcatggtaatggac

SEQ ID NO: 5608568 - DNA, 25 bp, Homo sapien
gacctagccagcttttagagtcccc

SEQ ID NO: 5608569 - DNA, 25 bp, Homo sapien
ttcaggcaaacaaaaggcctgttaa

SEQ ID NO: 5608570 - DNA, 25 bp, Homo sapien
gttcacagacagatgctactagtac

SEQ ID NO: 5608571 - DNA, 25 bp, Homo sapien
gtgagagaaatcaggttaagtgttc

SEQ ID NO: 5608572 - DNA, 25 bp, Homo sapien
tcatggtaatggacctagccagctt

SEQ ID NO: 5608573 - DNA, 25 bp, Homo sapien
aaggcctgttaatcctaagggactc

SEQ ID NO: 5608574 - DNA, 25 bp, Homo sapien
taacagtatgagtttccccatggcc

SEQ ID NO: 5608575 - DNA, 25 bp, Homo sapien
ttccccatggcctacacgacagaat

SEQ ID NO: 5608576 - DNA, 25 bp, Homo sapien
acgacagaatctagtgagtatgagt

SEQ ID NO: 5608577 - DNA, 25 bp, Homo sapien
gcagaacatccaagggcaaagaata

SEQ ID NO: 5608578 - DNA, 25 bp, Homo sapien
ctcagagcaccaccccttgccttgc

SEQ ID NO: 5608579 - DNA, 25 bp, Homo sapien
gcaaagaataagtgggtgctctgtt

SEQ ID NO: 5608580 - DNA, 25 bp, Homo sapien
taattccaagaacacaacatgctat

SEQ ID NO: 5608581 - DNA, 25 bp, Homo sapien
tctcggctagtcctgccctgtactc

SEQ ID NO: 5608582 - DNA, 25 bp, Homo sapien
acagtcttagcaaggacaggttggt

SEQ ID NO: 5608583 - DNA, 25 bp, Homo sapien
aactgataaaaagttggtgagcctt

SEQ ID NO: 5608584 - DNA, 25 bp, Homo sapien
tgactcctgcccaccacacagcctc

SEQ ID NO: 5608585 - DNA, 25 bp, Homo sapien
tgtgtgtttgtaaaatttgtgttcc

SEQ ID NO: 5608586 - DNA, 25 bp, Homo sapien
aagaaaaacaaataattgaacttca

SEQ ID NO: 5608587 - DNA, 25 bp, Homo sapien
ttccattagaagacatgagggacac

SEQ ID NO: 5608588 - DNA, 25 bp, Homo sapien
tgtgttcccgaatctttctgtgggg

SEQ ID NO: 5608589 - DNA, 25 bp, Homo sapien
tcaagaggtgtaaaacatttgctat

SEQ ID NO: 5608590 - DNA, 25 bp, Homo sapien
aatgttgcaaatttcaagaggtgta

SEQ ID NO: 5608591 - DNA, 25 bp, Homo sapien
acacaatcagaaaatatacatatat

SEQ ID NO: 5608592 - DNA, 25 bp, Homo sapien
atatatgaaagaaaatgttgcaaat

SEQ ID NO: 5608593 - DNA, 25 bp, Homo sapien
tgagggacacacacacacacatata

SEQ ID NO: 5608594 - DNA, 25 bp, Homo sapien
atatactggataaagaaaaacaaat

SEQ ID NO: 5608595 - DNA, 25 bp, Homo sapien
ttttccattagaagacatgagggac

SEQ ID NO: 5608596 - DNA, 25 bp, Homo sapien
gtagagagtctctgctgtgtcgctc

SEQ ID NO: 5608597 - DNA, 25 bp, Homo sapien
actggcatgacgctcacaaaccttg

SEQ ID NO: 5608598 - DNA, 25 bp, Homo sapien
tatggaagtaaagacttggactagc

SEQ ID NO: 5608599 - DNA, 25 bp, Homo sapien
caaatcagaactgatgtggggcatg

SEQ ID NO: 5608600 - DNA, 25 bp, Homo sapien
tacccggtcttgtagagagtctctg

SEQ ID NO: 5608601 - DNA, 25 bp, Homo sapien
cttggaaacatgcgctgtctacatc

SEQ ID NO: 5608602 - DNA, 25 bp, Homo sapien
tgtgtcgctcacctcagctagccac

SEQ ID NO: 5608603 - DNA, 25 bp, Homo sapien
tagagactctgaagtgtaggaattc

SEQ ID NO: 5608604 - DNA, 25 bp, Homo sapien
caccagagctgccaagatgactggc

SEQ ID NO: 5608605 - DNA, 25 bp, Homo sapien
ggggcatgcttagaacgtgccacct

SEQ ID NO: 5608606 - DNA, 25 bp, Homo sapien
aacgtgccacctggagaaacatcat

SEQ ID NO: 5608607 - DNA, 25 bp, Homo sapien
ctcaggtacttggaaatgtaaatca

SEQ ID NO: 5608608 - DNA, 25 bp, Homo sapien
caagagtcaactacactttaagaat

SEQ ID NO: 5608609 - DNA, 25 bp, Homo sapien
ttatactacttgactgcatgcgggt

SEQ ID NO: 5608610 - DNA, 25 bp, Homo sapien
ttctatttctcgataaagctgttat

SEQ ID NO: 5608611 - DNA, 25 bp, Homo sapien
actccattgctcaggctgcatgagt

SEQ ID NO: 5608612 - DNA, 25 bp, Homo sapien
tcaatatttcaggtatcccagctcc

SEQ ID NO: 5608613 - DNA, 25 bp, Homo sapien
caggctgcatgagttatactactac

SEQ ID NO: 5608614 - DNA, 25 bp, Homo sapien
tgtgagcaccacaacccttgcattg

SEQ ID NO: 5608615 - DNA, 25 bp, Homo sapien
ccactcaaccttgaggtcgacgcgg

SEQ ID NO: 5608616 - DNA, 25 bp, Homo sapien
atcccagctcctacgaaattctaac

SEQ ID NO: 5608617 - DNA, 25 bp, Homo sapien
actacttgactgcatgcgggtaggg

SEQ ID NO: 5608618 - DNA, 25 bp, Homo sapien
tctggtgagattcactaagtagcac

SEQ ID NO: 5608619 - DNA, 25 bp, Homo sapien
ctaagtagcactagaactcacaagc

SEQ ID NO: 5608620 - DNA, 25 bp, Homo sapien
gtttttatggtagtatgagtcacca

SEQ ID NO: 5608621 - DNA, 25 bp, Homo sapien
ctccagttttagtaagggacttgtc

SEQ ID NO: 5608622 - DNA, 25 bp, Homo sapien
taaaatgggaaagttctacacaata

SEQ ID NO: 5608623 - DNA, 25 bp, Homo sapien
tatgcaggccaagctttaatatact

SEQ ID NO: 5608624 - DNA, 25 bp, Homo sapien
gtggatgtggaaaaacgcattcatt

SEQ ID NO: 5608625 - DNA, 25 bp, Homo sapien
tgtttataaatatgcaggccaagct

SEQ ID NO: 5608626 - DNA, 25 bp, Homo sapien
cacaataagagcaacttagcaatac

SEQ ID NO: 5608627 - DNA, 25 bp, Homo sapien
aagggacttgtcatgtattctattc

SEQ ID NO: 5608628 - DNA, 25 bp, Homo sapien
actcacaagcatacaggtggatgtg

SEQ ID NO: 5608629 - DNA, 25 bp, Homo sapien
caggcactctgatctaggggttatt

SEQ ID NO: 5608630 - DNA, 25 bp, Homo sapien
cccactgggaataaaatgtctggtt

SEQ ID NO: 5608631 - DNA, 25 bp, Homo sapien
gtctggttatagttggaatggtatc

SEQ ID NO: 5608632 - DNA, 25 bp, Homo sapien
aaattaagaggcaggccatgaatct

SEQ ID NO: 5608633 - DNA, 25 bp, Homo sapien
aacttagtaatggcttgcaagcatc

SEQ ID NO: 5608634 - DNA, 25 bp, Homo sapien
tgttgaaaaagaagattgaaaggaa

SEQ ID NO: 5608635 - DNA, 25 bp, Homo sapien
tcaggacatgttgaaagtgtagaaa

SEQ ID NO: 5608636 - DNA, 25 bp, Homo sapien
ctttaagttggtatggagaatattg

SEQ ID NO: 5608637 - DNA, 25 bp, Homo sapien
caggtcccgatttgctgtgtgaggc

SEQ ID NO: 5608638 - DNA, 25 bp, Homo sapien
atcctgtctaccaggcccaggtccc

SEQ ID NO: 5608639 - DNA, 25 bp, Homo sapien
gaggcaggccatgaatctgaactct

SEQ ID NO: 5608640 - DNA, 25 bp, Homo sapien
tttagaaattcatctgaccccagga

SEQ ID NO: 5608641 - DNA, 25 bp, Homo sapien
gcagaaaattagtatattagagtgt

SEQ ID NO: 5608642 - DNA, 25 bp, Homo sapien
catgcataatgcttgagtctcctcc

SEQ ID NO: 5608643 - DNA, 25 bp, Homo sapien
ttagagtgtcaccccagaccttacc

SEQ ID NO: 5608644 - DNA, 25 bp, Homo sapien
gtaatatatggtacatgcacatttt

SEQ ID NO: 5608645 - DNA, 25 bp, Homo sapien
ttacgttcactaaatgtcatgcata

SEQ ID NO: 5608646 - DNA, 25 bp, Homo sapien
aacacagcttcctggctccaccctc

SEQ ID NO: 5608647 - DNA, 25 bp, Homo sapien
cttttggagggcttgttcaaacaca

SEQ ID NO: 5608648 - DNA, 25 bp, Homo sapien
atgcatcagtgtcttttggagggct

SEQ ID NO: 5608649 - DNA, 25 bp, Homo sapien
gcagcagctaacttcagcatgcatc

SEQ ID NO: 5608650 - DNA, 25 bp, Homo sapien
tgaccccaggaattttaagagagga

SEQ ID NO: 5608651 - DNA, 25 bp, Homo sapien
caggatcttggaataaaacatggtg

SEQ ID NO: 5608652 - DNA, 25 bp, Homo sapien
ctctatgaaagctcttaggatctac

SEQ ID NO: 5608653 - DNA, 25 bp, Homo sapien
agtcatgacctccatgcccaggatc

SEQ ID NO: 5608654 - DNA, 25 bp, Homo sapien
gttaagtgtcaacatgctggatact

SEQ ID NO: 5608655 - DNA, 25 bp, Homo sapien
tccatgtagagactgcaaagttatc

SEQ ID NO: 5608656 - DNA, 25 bp, Homo sapien
acatgctggatacttggttaacctt

SEQ ID NO: 5608657 - DNA, 25 bp, Homo sapien
tttagaaggatccatgttaagtgtc

SEQ ID NO: 5608658 - DNA, 25 bp, Homo sapien
agtgcttaccttaaaagtcatgacc

SEQ ID NO: 5608659 - DNA, 25 bp, Homo sapien
ttagcccacctgaattttggcattt

SEQ ID NO: 5608660 - DNA, 25 bp, Homo sapien
tggaataaaacatggtggtgtcttt

SEQ ID NO: 5608661 - DNA, 25 bp, Homo sapien
ctctggaagtccaaatattcagttt

SEQ ID NO: 5608662 - DNA, 25 bp, Homo sapien
acagtagttgaattggttgggtgag

SEQ ID NO: 5608663 - DNA, 25 bp, Homo sapien
accaaagtaccttgatggatcattg

SEQ ID NO: 5608664 - DNA, 25 bp, Homo sapien
agactacatgatctgagttgaacca

SEQ ID NO: 5608665 - DNA, 25 bp, Homo sapien
tgataataagaaatgtttgaatgaa

SEQ ID NO: 5608666 - DNA, 25 bp, Homo sapien
atcattggatgattggaaagaaaag

SEQ ID NO: 5608667 - DNA, 25 bp, Homo sapien
tctctcccagagtgtgatgtagcat

SEQ ID NO: 5608668 - DNA, 25 bp, Homo sapien
tgagttgaaccatatgagaaagcac

SEQ ID NO: 5608669 - DNA, 25 bp, Homo sapien
tgtagcatcagataatccacgtacc

SEQ ID NO: 5608670 - DNA, 25 bp, Homo sapien
gggtctcaggaaacagtagttgaat

SEQ ID NO: 5608671 - DNA, 25 bp, Homo sapien
gagaaagcactgaacaccaaagtac

SEQ ID NO: 5608672 - DNA, 25 bp, Homo sapien
taagaaatgagaggctctctgaaag

SEQ ID NO: 5608673 - DNA, 25 bp, Homo sapien
tggtgagattattgtctggctttcc

SEQ ID NO: 5608674 - DNA, 25 bp, Homo sapien
tagcatgtggcactactaaagacaa

SEQ ID NO: 5608675 - DNA, 25 bp, Homo sapien
tggatgagccagaaatctgatatac

SEQ ID NO: 5608676 - DNA, 25 bp, Homo sapien
ctgagctaactgaatggataaaatc

SEQ ID NO: 5608677 - DNA, 25 bp, Homo sapien
aaataatgaggactagattggcatg

SEQ ID NO: 5608678 - DNA, 25 bp, Homo sapien
ctactaaagacaatggtgagattat

SEQ ID NO: 5608679 - DNA, 25 bp, Homo sapien
agttggacctataaaggtgtcttct

SEQ ID NO: 5608680 - DNA, 25 bp, Homo sapien
tttggacaaaactgagctaactgaa

SEQ ID NO: 5608681 - DNA, 25 bp, Homo sapien
actgtcagatagcttcacgtggata

SEQ ID NO: 5608682 - DNA, 25 bp, Homo sapien
gattggcatgatttagaactgaggt

SEQ ID NO: 5608683 - DNA, 25 bp, Homo sapien
tgtattgggaataatatcaagaaat

SEQ ID NO: 5608684 - DNA, 25 bp, Homo sapien
aggttgtcatggagatggaattttt

SEQ ID NO: 5608685 - DNA, 25 bp, Homo sapien
ttctccaaggtaataaatcctcttc

SEQ ID NO: 5608686 - DNA, 25 bp, Homo sapien
ggtaagcaattatccccaaggtcat

SEQ ID NO: 5608687 - DNA, 25 bp, Homo sapien
aaatgactatattgttagaggcctc

SEQ ID NO: 5608688 - DNA, 25 bp, Homo sapien
taacacttaaatagtcagacatgtc

SEQ ID NO: 5608689 - DNA, 25 bp, Homo sapien
tcatagaaacatgaatttgtggctg

SEQ ID NO: 5608690 - DNA, 25 bp, Homo sapien
taccctggccatagtgaagttttta

SEQ ID NO: 5608691 - DNA, 25 bp, Homo sapien
ccaaggtcatttatcgaatagtgca

SEQ ID NO: 5608692 - DNA, 25 bp, Homo sapien
tgatatcaaaccaaccatgcattcc

SEQ ID NO: 5608693 - DNA, 25 bp, Homo sapien
acatttaggttgtcatggagatgga

SEQ ID NO: 5608694 - DNA, 25 bp, Homo sapien
ggtggctcatgcctcaaatgactat

SEQ ID NO: 5608695 - DNA, 25 bp, Homo sapien
caacaagacaaccgcaacatgtggg

SEQ ID NO: 5608696 - DNA, 25 bp, Homo sapien
tattagccaggtaatgcactttagc

SEQ ID NO: 5608697 - DNA, 25 bp, Homo sapien
aagggaggaaggcctctctacatat

SEQ ID NO: 5608698 - DNA, 25 bp, Homo sapien
tcaggcaatgctgtgtgcgaagtaa

SEQ ID NO: 5608699 - DNA, 25 bp, Homo sapien
agcccatgcgtggagttcccctcct

SEQ ID NO: 5608700 - DNA, 25 bp, Homo sapien
cagtaacaacaagacaaccgcaaca

SEQ ID NO: 5608701 - DNA, 25 bp, Homo sapien
acatatggaaaagcccatgcgtgga

SEQ ID NO: 5608702 - DNA, 25 bp, Homo sapien
gtgcgaagtaaactacctcaaggta

SEQ ID NO: 5608703 - DNA, 25 bp, Homo sapien
gtaatgcactttagctaccctggac

SEQ ID NO: 5608704 - DNA, 25 bp, Homo sapien
gattgacaatgcatattagccaggt

SEQ ID NO: 5608705 - DNA, 25 bp, Homo sapien
cctcaaggtatgaagttacctcagc

SEQ ID NO: 5608706 - DNA, 25 bp, Homo sapien
gagaggtcatgatacatagatcccc

SEQ ID NO: 5608707 - DNA, 25 bp, Homo sapien
atgtggagaggtcatgatacataga

SEQ ID NO: 5608708 - DNA, 25 bp, Homo sapien
agtactagtgatgaatgagtgtatt

SEQ ID NO: 5608709 - DNA, 25 bp, Homo sapien
tcataacactgttgttgaacttttc

SEQ ID NO: 5608710 - DNA, 25 bp, Homo sapien
catatcatgttcaggagaacagtac

SEQ ID NO: 5608711 - DNA, 25 bp, Homo sapien
acgttattgttgaggtgtgtgtatc

SEQ ID NO: 5608712 - DNA, 25 bp, Homo sapien
agctaggcactgccaagcactgagg

SEQ ID NO: 5608713 - DNA, 25 bp, Homo sapien
ttcataacgttgttgttgatgtttt

SEQ ID NO: 5608714 - DNA, 25 bp, Homo sapien
gttcaggagaacagtactagtgatg

SEQ ID NO: 5608715 - DNA, 25 bp, Homo sapien
atcccctcccccccacatatcatgt

SEQ ID NO: 5608716 - DNA, 25 bp, Homo sapien
tcataacgttattgttgaggtgtgt

SEQ ID NO: 5608717 - DNA, 25 bp, Homo sapien
taggcgctcaaaatacaaaggttcc

SEQ ID NO: 5608718 - DNA, 25 bp, Homo sapien
aaatgcaaatgagagccccttgttc

SEQ ID NO: 5608719 - DNA, 25 bp, Homo sapien
tggagccaggacctgccacatcatt

SEQ ID NO: 5608720 - DNA, 25 bp, Homo sapien
agagcaagataaaagtgccatccta

SEQ ID NO: 5608721 - DNA, 25 bp, Homo sapien
gtaggatcccacgggtatctggagg

SEQ ID NO: 5608722 - DNA, 25 bp, Homo sapien
atactcatgcggtgagtgtaggatc

SEQ ID NO: 5608723 - DNA, 25 bp, Homo sapien
acctttgaactgggacacatgaggc

SEQ ID NO: 5608724 - DNA, 25 bp, Homo sapien
tgctgggcactggaatactcatgcg

SEQ ID NO: 5608725 - DNA, 25 bp, Homo sapien
agagaagacaatccccatggggact

SEQ ID NO: 5608726 - DNA, 25 bp, Homo sapien
caatttagcatgtgcaaggagctcc

SEQ ID NO: 5608727 - DNA, 25 bp, Homo sapien
tgtgtctcatgggcccaaccgacac

SEQ ID NO: 5608728 - DNA, 25 bp, Homo sapien
aaagatagctggtccttcaaaagcc

SEQ ID NO: 5608729 - DNA, 25 bp, Homo sapien
gatgctcagcctgcagatagactct

SEQ ID NO: 5608730 - DNA, 25 bp, Homo sapien
gccttgcaagcttcatgggacctag

SEQ ID NO: 5608731 - DNA, 25 bp, Homo sapien
gatagactctggaaccaggcaccaa

SEQ ID NO: 5608732 - DNA, 25 bp, Homo sapien
aagagcaaagctagaggactttcat

SEQ ID NO: 5608733 - DNA, 25 bp, Homo sapien
gatcagtggaatcaaattgagagtc

SEQ ID NO: 5608734 - DNA, 25 bp, Homo sapien
aattgagagtccataaataaaccct

SEQ ID NO: 5608735 - DNA, 25 bp, Homo sapien
ttcatgggacctagaatagccaaaa

SEQ ID NO: 5608736 - DNA, 25 bp, Homo sapien
gcacacgtgcaagccaccctcagat

SEQ ID NO: 5608737 - DNA, 25 bp, Homo sapien
tgtggtgctggcataacaacagata

SEQ ID NO: 5608738 - DNA, 25 bp, Homo sapien
gcaagccaccctcagatgctcagcc

SEQ ID NO: 5608739 - DNA, 25 bp, Homo sapien
gttgcattagggcaattggcctgtc

SEQ ID NO: 5608740 - DNA, 25 bp, Homo sapien
caaaaataatgatgtcccccaccac

SEQ ID NO: 5608741 - DNA, 25 bp, Homo sapien
ccaccacccgcaagactccactgta

SEQ ID NO: 5608742 - DNA, 25 bp, Homo sapien
ttggcctgtcatgtgcccgggatat

SEQ ID NO: 5608743 - DNA, 25 bp, Homo sapien
tggggatactgggatctttaaaagc

SEQ ID NO: 5608744 - DNA, 25 bp, Homo sapien
actccactgtaactggggaagaggt

SEQ ID NO: 5608745 - DNA, 25 bp, Homo sapien
gacagctggtcaccccactgcacac

SEQ ID NO: 5608746 - DNA, 25 bp, Homo sapien
ttatattcttgtgggtgcctggagg

SEQ ID NO: 5608747 - DNA, 25 bp, Homo sapien
tctgtaagatgtataatgaggtatc

SEQ ID NO: 5608748 - DNA, 25 bp, Homo sapien
catatgcagctatgcagccaaggct

SEQ ID NO: 5608749 - DNA, 25 bp, Homo sapien
ttggaaacaccaatgatgctctctg

SEQ ID NO: 5608750 - DNA, 25 bp, Homo sapien
aggttgtaggcaataggtatgctga

SEQ ID NO: 5608751 - DNA, 25 bp, Homo sapien
aatgcagaacaaggttgtaggcaat

SEQ ID NO: 5608752 - DNA, 25 bp, Homo sapien
aacttgggaagtacatttggtcttc

SEQ ID NO: 5608753 - DNA, 25 bp, Homo sapien
tccacctacttctctgggctccttc

SEQ ID NO: 5608754 - DNA, 25 bp, Homo sapien
tctcttgtctttaggggaactgggc

SEQ ID NO: 5608755 - DNA, 25 bp, Homo sapien
cttgaataaaaagcctcatggtctc

SEQ ID NO: 5608756 - DNA, 25 bp, Homo sapien
aaaatctgatctatctgccaccatt

SEQ ID NO: 5608757 - DNA, 25 bp, Homo sapien
cagttgtctctgccaaaagacatct

SEQ ID NO: 5608758 - DNA, 25 bp, Homo sapien
gaagtgtggcataaccagttgtctc

SEQ ID NO: 5608759 - DNA, 25 bp, Homo sapien
atggtctcatgggaaatgcagaaca

SEQ ID NO: 5608760 - DNA, 25 bp, Homo sapien
ggcaataggtatgctgaagtgtggc

SEQ ID NO: 5608761 - DNA, 25 bp, Homo sapien
gtggtgaacacctagcttcctcctg

SEQ ID NO: 5608762 - DNA, 25 bp, Homo sapien
atgataaggttaatgtggtgaacac

SEQ ID NO: 5608763 - DNA, 25 bp, Homo sapien
gcaggcacacatgcactcttgcgct

SEQ ID NO: 5608764 - DNA, 25 bp, Homo sapien
gctgtcctcgagaactccccacacc

SEQ ID NO: 5608765 - DNA, 25 bp, Homo sapien
aatgtatgagatctggaattatttc

SEQ ID NO: 5608766 - DNA, 25 bp, Homo sapien
caccaaattgctgttgcaggcacac

SEQ ID NO: 5608767 - DNA, 25 bp, Homo sapien
ggccaagagaggcagattgttttct

SEQ ID NO: 5608768 - DNA, 25 bp, Homo sapien
aagaacaatttgacactcgcagcct

SEQ ID NO: 5608769 - DNA, 25 bp, Homo sapien
tctcagcaagaaggcttttgacctc

SEQ ID NO: 5608770 - DNA, 25 bp, Homo sapien
tcctcctgatttgctgccatggctc

SEQ ID NO: 5608771 - DNA, 25 bp, Homo sapien
actcgcagcctagaagcactcagga

SEQ ID NO: 5608772 - DNA, 25 bp, Homo sapien
ttcctgtaagtcaaagtattcaaat

SEQ ID NO: 5608773 - DNA, 25 bp, Homo sapien
gataaaagataacataaaaattcag

SEQ ID NO: 5608774 - DNA, 25 bp, Homo sapien
taggtaatcccaaggaatattatga

SEQ ID NO: 5608775 - DNA, 25 bp, Homo sapien
taagtgttgtcaagtatactcattt

SEQ ID NO: 5608776 - DNA, 25 bp, Homo sapien
gtttatagtcggaacagtctatgtt

SEQ ID NO: 5608777 - DNA, 25 bp, Homo sapien
agtcggaacagtctatgttaactac

SEQ ID NO: 5608778 - DNA, 25 bp, Homo sapien
aaaggcaccttttaatatacaaata

SEQ ID NO: 5608779 - DNA, 25 bp, Homo sapien
tccataacatattaggggaaaaagc

SEQ ID NO: 5608780 - DNA, 25 bp, Homo sapien
aaattggctttgtttatagtcggaa

SEQ ID NO: 5608781 - DNA, 25 bp, Homo sapien
gggaaaaagcagactaagtgttgtc

SEQ ID NO: 5608782 - DNA, 25 bp, Homo sapien
taactacgtttatcccatcttccat

SEQ ID NO: 5608783 - DNA, 25 bp, Homo sapien
agtagcatatggagccacagtgatg

SEQ ID NO: 5608784 - DNA, 25 bp, Homo sapien
tgtaagatctccaaagcccctccct

SEQ ID NO: 5608785 - DNA, 25 bp, Homo sapien
ttacatattgtggaaaagaagtgag

SEQ ID NO: 5608786 - DNA, 25 bp, Homo sapien
tgacccagtagtagcatatggagcc

SEQ ID NO: 5608787 - DNA, 25 bp, Homo sapien
tccagggagtttgaaagtctaggac

SEQ ID NO: 5608788 - DNA, 25 bp, Homo sapien
atttagtaagaatggaaggttaaca

SEQ ID NO: 5608789 - DNA, 25 bp, Homo sapien
ctaacttggtaaaagttgggcaggc

SEQ ID NO: 5608790 - DNA, 25 bp, Homo sapien
agtgatggctgaaattgaatatccc

SEQ ID NO: 5608791 - DNA, 25 bp, Homo sapien
tccaaggaaataatgactaaagaaa

SEQ ID NO: 5608792 - DNA, 25 bp, Homo sapien
agcatctttggagttaaggagagtt

SEQ ID NO: 5608793 - DNA, 25 bp, Homo sapien
acatttcaaatgtggtgggagtatt

SEQ ID NO: 5608794 - DNA, 25 bp, Homo sapien
agcaaaaacgtgtccaagagactcc

SEQ ID NO: 5608795 - DNA, 25 bp, Homo sapien
gtcagtagtaacctccaagagctgc

SEQ ID NO: 5608796 - DNA, 25 bp, Homo sapien
cacacacggacactcacacattctc

SEQ ID NO: 5608797 - DNA, 25 bp, Homo sapien
agagactccgccaaaaagtaagcca

SEQ ID NO: 5608798 - DNA, 25 bp, Homo sapien
ttggttgtcacactaacacatacac

SEQ ID NO: 5608799 - DNA, 25 bp, Homo sapien
agtgtaatgaaaactgtcagtagta

SEQ ID NO: 5608800 - DNA, 25 bp, Homo sapien
agatggtacggctcgctgttacctt

SEQ ID NO: 5608801 - DNA, 25 bp, Homo sapien
ttctctttcatgcaaagcaggcacc

SEQ ID NO: 5608802 - DNA, 25 bp, Homo sapien
gcctagagaatattgtcacgttgtt

SEQ ID NO: 5608803 - DNA, 25 bp, Homo sapien
agtaagccaaaaactcatcaaaggc

SEQ ID NO: 5608804 - DNA, 25 bp, Homo sapien
tgtacgaaatacctgctttggttgt

SEQ ID NO: 5608805 - DNA, 25 bp, Homo sapien
atatgccctgtgctacgtgaattgc

SEQ ID NO: 5608806 - DNA, 25 bp, Homo sapien
ctcagttcctgagacagtagcagct

SEQ ID NO: 5608807 - DNA, 25 bp, Homo sapien
atgggaataggaataatacttattt

SEQ ID NO: 5608808 - DNA, 25 bp, Homo sapien
catcaataaatgggaataggaataa

SEQ ID NO: 5608809 - DNA, 25 bp, Homo sapien
atgaagtcacctatgtgaagcactt

SEQ ID NO: 5608810 - DNA, 25 bp, Homo sapien
agcagagactcaataagagctagct

SEQ ID NO: 5608811 - DNA, 25 bp, Homo sapien
aagcacttagcatgaagcagagact

SEQ ID NO: 5608812 - DNA, 25 bp, Homo sapien
gagacagtagcagcttccagaagga

SEQ ID NO: 5608813 - DNA, 25 bp, Homo sapien
tataacaaatgtaggagatatgtat

SEQ ID NO: 5608814 - DNA, 25 bp, Homo sapien
ttccagaaggactaacagccaaaat

SEQ ID NO: 5608815 - DNA, 25 bp, Homo sapien
ggagatatgtatgagtacctcattt

SEQ ID NO: 5608816 - DNA, 25 bp, Homo sapien
tatgattgaggatatgaatgtagaa

SEQ ID NO: 5608817 - DNA, 25 bp, Homo sapien
aaaccggttttccagtaagcattca

SEQ ID NO: 5608818 - DNA, 25 bp, Homo sapien
gtcagagcaagaccaataactagtc

SEQ ID NO: 5608819 - DNA, 25 bp, Homo sapien
atgttctctgaagcacaaatgtgtt

SEQ ID NO: 5608820 - DNA, 25 bp, Homo sapien
ttccagtaagcattcaaaaacatat

SEQ ID NO: 5608821 - DNA, 25 bp, Homo sapien
tttttgcttctgagagtagagcttg

SEQ ID NO: 5608822 - DNA, 25 bp, Homo sapien
tggtttccacggctgtcagagcaag

SEQ ID NO: 5608823 - DNA, 25 bp, Homo sapien
ttgaggatatgaatgtagaaaatgc

SEQ ID NO: 5608824 - DNA, 25 bp, Homo sapien
gtagaaaatgcattgctgtcatcat

SEQ ID NO: 5608825 - DNA, 25 bp, Homo sapien
gtgttctcccattggtgggttgcct

SEQ ID NO: 5608826 - DNA, 25 bp, Homo sapien
tcatcagcaaatggtttccacggct

SEQ ID NO: 5608827 - DNA, 25 bp, Homo sapien
ttgaacaagcagacaataagcttac

SEQ ID NO: 5608828 - DNA, 25 bp, Homo sapien
atacggcaaatttgggtaggcctca

SEQ ID NO: 5608829 - DNA, 25 bp, Homo sapien
gtgaacaagtatattacatagtgta

SEQ ID NO: 5608830 - DNA, 25 bp, Homo sapien
caacaaacactcactgcacatctac

SEQ ID NO: 5608831 - DNA, 25 bp, Homo sapien
aagaatacgtagaacaggttaaaga

SEQ ID NO: 5608832 - DNA, 25 bp, Homo sapien
atacgtagaacaggttaaagaggat

SEQ ID NO: 5608833 - DNA, 25 bp, Homo sapien
aatatcagatacggcaaatttgggt

SEQ ID NO: 5608834 - DNA, 25 bp, Homo sapien
tactacattctggtagggagaagag

SEQ ID NO: 5608835 - DNA, 25 bp, Homo sapien
caataaatcaatagaacagtgaaca

SEQ ID NO: 5608836 - DNA, 25 bp, Homo sapien
ttacatagtgtatcagagggtggta

SEQ ID NO: 5608837 - DNA, 25 bp, Homo sapien
ggtaggcctcatgaagacaaaatct

SEQ ID NO: 5608838 - DNA, 25 bp, Homo sapien
ccaccgttctctcatggagtttttc

SEQ ID NO: 5608839 - DNA, 25 bp, Homo sapien
ctggcatgcgtttcactctcaggtg

SEQ ID NO: 5608840 - DNA, 25 bp, Homo sapien
atattagcagggcaactcaaatgag

SEQ ID NO: 5608841 - DNA, 25 bp, Homo sapien
ctctcaggtgaactttccaccgttc

SEQ ID NO: 5608842 - DNA, 25 bp, Homo sapien
agcagggcaactcaaatgagatttc

SEQ ID NO: 5608843 - DNA, 25 bp, Homo sapien
cagcgagctgcaaatattagcaggg

SEQ ID NO: 5608844 - DNA, 25 bp, Homo sapien
tcagccactctaactggcatgcgtt

SEQ ID NO: 5608845 - DNA, 25 bp, Homo sapien
tgtccatgctatttttcagccactc

SEQ ID NO: 5608846 - DNA, 25 bp, Homo sapien
ggcacccaccagcgagctgcaaata

SEQ ID NO: 5608847 - DNA, 25 bp, Homo sapien
ttcactagctggtgttgtccatgct

SEQ ID NO: 5608848 - DNA, 25 bp, Homo sapien
agtctgtggttttcttcactagctg

SEQ ID NO: 5608849 - DNA, 25 bp, Homo sapien
tacaatgctgtaacactctcctacg

SEQ ID NO: 5608850 - DNA, 25 bp, Homo sapien
cagttaactgctgcataaacgtgcc

SEQ ID NO: 5608851 - DNA, 25 bp, Homo sapien
taaacgtgccacaattaatccagtc

SEQ ID NO: 5608852 - DNA, 25 bp, Homo sapien
agtgcttgtgtgagtatatgaaatc

SEQ ID NO: 5608853 - DNA, 25 bp, Homo sapien
tcctatgacagatgcaggtgttttc

SEQ ID NO: 5608854 - DNA, 25 bp, Homo sapien
gtatatgaaatctgcccgctggctc

SEQ ID NO: 5608855 - DNA, 25 bp, Homo sapien
agagagaggctatcagtgcttgtgt

SEQ ID NO: 5608856 - DNA, 25 bp, Homo sapien
atacatgtagctttaatccactgac

SEQ ID NO: 5608857 - DNA, 25 bp, Homo sapien
gtttgggagacttattcatgtaaat

SEQ ID NO: 5608858 - DNA, 25 bp, Homo sapien
catgcacatgtgcgagagtaacaag

SEQ ID NO: 5608859 - DNA, 25 bp, Homo sapien
ctacgtgtcgtccatgcacatgtgc

SEQ ID NO: 5608860 - DNA, 25 bp, Homo sapien
gttcctaagcactggtttgttgtcc

SEQ ID NO: 5608861 - DNA, 25 bp, Homo sapien
ctgggactgagtgctaatgctgtta

SEQ ID NO: 5608862 - DNA, 25 bp, Homo sapien
ttgttgtccaagtgacataaaagtc

SEQ ID NO: 5608863 - DNA, 25 bp, Homo sapien
gtcacagaatgagaagaacagtttc

SEQ ID NO: 5608864 - DNA, 25 bp, Homo sapien
tatccatgcagcgatgtcgacagga

SEQ ID NO: 5608865 - DNA, 25 bp, Homo sapien
taagaagtatccatgcagcgatgtc

SEQ ID NO: 5608866 - DNA, 25 bp, Homo sapien
cacagtgcatgttactttcccagcc

SEQ ID NO: 5608867 - DNA, 25 bp, Homo sapien
ttcccagccttgacgctcctccagc

SEQ ID NO: 5608868 - DNA, 25 bp, Homo sapien
cttgacgctcctccagcatccacag

SEQ ID NO: 5608869 - DNA, 25 bp, Homo sapien
tcttctaagaagtatccatgcagcg

SEQ ID NO: 5608870 - DNA, 25 bp, Homo sapien
gatgtcgacaggaaaataaccgttc

SEQ ID NO: 5608871 - DNA, 25 bp, Homo sapien
gaggaaccggcacaacccgagtctg

SEQ ID NO: 5608872 - DNA, 25 bp, Homo sapien
cagactcgggttgtgccggttcctc

SEQ ID NO: 5608873 - DNA, 25 bp, Homo sapien
tcaccggtcgtcccacaccgggtcg

SEQ ID NO: 5608874 - DNA, 25 bp, Homo sapien
cgacccggtgtgggacgaccggtga

SEQ ID NO: 5608875 - DNA, 25 bp, Homo sapien
cacatgcatgcatacctgcctgcct

SEQ ID NO: 5608876 - DNA, 25 bp, Homo sapien
aatgggttcgatgtccccagtctgc

SEQ ID NO: 5608877 - DNA, 25 bp, Homo sapien
ggtgtgccaactacacaggcccaca

SEQ ID NO: 5608878 - DNA, 25 bp, Homo sapien
ggaagacgttatggcaagaatcctc

SEQ ID NO: 5608879 - DNA, 25 bp, Homo sapien
ggaaggtgaagtgatacagatttca

SEQ ID NO: 5608880 - DNA, 25 bp, Homo sapien
tagtctaggaactgtgcactgatgc

SEQ ID NO: 5608881 - DNA, 25 bp, Homo sapien
ggacgagatcagaacaatgtatgga

SEQ ID NO: 5608882 - DNA, 25 bp, Homo sapien
gcctgagcagcctatagccagaagc

SEQ ID NO: 5608883 - DNA, 25 bp, Homo sapien
acaggcccacatgaagagcctccat

SEQ ID NO: 5608884 - DNA, 25 bp, Homo sapien
cctcacccagaacggctgttgcagg

SEQ ID NO: 5608885 - DNA, 25 bp, Homo sapien
gggccgaatgataaaggtccacaag

SEQ ID NO: 5608886 - DNA, 25 bp, Homo sapien
acagatagtgtagtatactgccatc

SEQ ID NO: 5608887 - DNA, 25 bp, Homo sapien
tgacacagacataggagtaagaatt

SEQ ID NO: 5608888 - DNA, 25 bp, Homo sapien
ggaattatttctaggggcatggtca

SEQ ID NO: 5608889 - DNA, 25 bp, Homo sapien
aggctagactaaagctcctgggctc

SEQ ID NO: 5608890 - DNA, 25 bp, Homo sapien
gccatctggaggcacacatctggga

SEQ ID NO: 5608891 - DNA, 25 bp, Homo sapien
ggcacacatctgggatgacacagac

SEQ ID NO: 5608892 - DNA, 25 bp, Homo sapien
gctagacagattagaaagggattgt

SEQ ID NO: 5608893 - DNA, 25 bp, Homo sapien
tcagcctcctgaggcagacgcgtaa

SEQ ID NO: 5608894 - DNA, 25 bp, Homo sapien
agacgcgtaacactgtgcctggctt

SEQ ID NO: 5608895 - DNA, 25 bp, Homo sapien
cacagctgccttgaagcagttgtgt

SEQ ID NO: 5608896 - DNA, 25 bp, Homo sapien
gaagaaactaggtcatgtgtcctgt

SEQ ID NO: 5608897 - DNA, 25 bp, Homo sapien
tgggcttctggctataggctgctca

SEQ ID NO: 5608898 - DNA, 25 bp, Homo sapien
tcttcatgtgggcctgtgtagttgg

SEQ ID NO: 5608899 - DNA, 25 bp, Homo sapien
cttcctgcaacagccgttctgggtg

SEQ ID NO: 5608900 - DNA, 25 bp, Homo sapien
tgtttgaaaggccttgccgaaggaa

SEQ ID NO: 5608901 - DNA, 25 bp, Homo sapien
tcttactggctgccacggtgcatac

SEQ ID NO: 5608902 - DNA, 25 bp, Homo sapien
atggacacttggggcttcaagctct

SEQ ID NO: 5608903 - DNA, 25 bp, Homo sapien
ttggggagtcttgtgcatcctggaa

SEQ ID NO: 5608904 - DNA, 25 bp, Homo sapien
tcaagctctttgaaggatgggtgtt

SEQ ID NO: 5608905 - DNA, 25 bp, Homo sapien
gggaaaccaagtgccgaacaatgta

SEQ ID NO: 5608906 - DNA, 25 bp, Homo sapien
cagactggggacatcgaacccatta

SEQ ID NO: 5608907 - DNA, 25 bp, Homo sapien
aaggaagtccttgaagtagctttct

SEQ ID NO: 5608908 - DNA, 25 bp, Homo sapien
ctagtgaatggcatagatgttgttc

SEQ ID NO: 5608909 - DNA, 25 bp, Homo sapien
gctgggcggttccccaaccaatgga

SEQ ID NO: 5608910 - DNA, 25 bp, Homo sapien
ggttcaaagtcgaagatgccatcaa

SEQ ID NO: 5608911 - DNA, 25 bp, Homo sapien
ttgtgaagcacagatgagctctttc

SEQ ID NO: 5608912 - DNA, 25 bp, Homo sapien
cccgtgcacgccgaatatctggaga

SEQ ID NO: 5608913 - DNA, 25 bp, Homo sapien
ttcccggcagagtatacgcccttga

SEQ ID NO: 5608914 - DNA, 25 bp, Homo sapien
acgcccttgaatgccaggaacttgt

SEQ ID NO: 5608915 - DNA, 25 bp, Homo sapien
aatatctggagaaactaaagctggg

SEQ ID NO: 5608916 - DNA, 25 bp, Homo sapien
aatcaagtatgtgaatggatggatg

SEQ ID NO: 5608917 - DNA, 25 bp, Homo sapien
cgccagatagcgatccctagtgaat

SEQ ID NO: 5608918 - DNA, 25 bp, Homo sapien
agaatatggtagacatcactgaaga

SEQ ID NO: 5608919 - DNA, 25 bp, Homo sapien
cagttgtatctcagaggtctcccct

SEQ ID NO: 5608920 - DNA, 25 bp, Homo sapien
ggagccacccgtcaggcaaaaccta

SEQ ID NO: 5608921 - DNA, 25 bp, Homo sapien
tacctagtgcctcaccgcccccatc

SEQ ID NO: 5608922 - DNA, 25 bp, Homo sapien
atgaaaaagtgtagaacgaaacatc

SEQ ID NO: 5608923 - DNA, 25 bp, Homo sapien
catcacaaagtaaaggcaagagtgg

SEQ ID NO: 5608924 - DNA, 25 bp, Homo sapien
ttcattcccttgtggtgggcacctg

SEQ ID NO: 5608925 - DNA, 25 bp, Homo sapien
taatcctccaagtagccagtgctcc

SEQ ID NO: 5608926 - DNA, 25 bp, Homo sapien
gccctccgatgccaaccacagggcc

SEQ ID NO: 5608927 - DNA, 25 bp, Homo sapien
ttacagtgtccctcgtgcccaagtc

SEQ ID NO: 5608928 - DNA, 25 bp, Homo sapien
atcccagtagccagctttatgagat

SEQ ID NO: 5608929 - DNA, 25 bp, Homo sapien
tgcccttgcttcgagtgtggacttc

SEQ ID NO: 5608930 - DNA, 25 bp, Homo sapien
tcataaagctggctactgggatggg

SEQ ID NO: 5608931 - DNA, 25 bp, Homo sapien
gcactggctacttggaggattattc

SEQ ID NO: 5608932 - DNA, 25 bp, Homo sapien
atctgtagggaagaaataccaaaat

SEQ ID NO: 5608933 - DNA, 25 bp, Homo sapien
ggtgaggcactaggtatttgtggca

SEQ ID NO: 5608934 - DNA, 25 bp, Homo sapien
caactggtagtttagcataatgatg

SEQ ID NO: 5608935 - DNA, 25 bp, Homo sapien
ataatgatgagttgtgtatgttttt

SEQ ID NO: 5608936 - DNA, 25 bp, Homo sapien
ggggagacctctgagatacaactgg

SEQ ID NO: 5608937 - DNA, 25 bp, Homo sapien
cacgagggacactgtaaacagtagg

SEQ ID NO: 5608938 - DNA, 25 bp, Homo sapien
taaacagtaggagcactggctactt

SEQ ID NO: 5608939 - DNA, 25 bp, Homo sapien
cctttagctcagaagggagctaggt

SEQ ID NO: 5608940 - DNA, 25 bp, Homo sapien
actaggtatttgtggcaggtatttc

SEQ ID NO: 5608941 - DNA, 25 bp, Homo sapien
tcattcagcacggcaagctcgttcg

SEQ ID NO: 5608942 - DNA, 25 bp, Homo sapien
aaacagggttatgaagactggcttc

SEQ ID NO: 5608943 - DNA, 25 bp, Homo sapien
tgaacaattcagaagagtagccaac

SEQ ID NO: 5608944 - DNA, 25 bp, Homo sapien
gaaacaaagtcgaaagctgcgagtt

SEQ ID NO: 5608945 - DNA, 25 bp, Homo sapien
gaggacgagacctttccctgcgact

SEQ ID NO: 5608946 - DNA, 25 bp, Homo sapien
agaggcctacatcccacagagatac

SEQ ID NO: 5608947 - DNA, 25 bp, Homo sapien
acccacaagtccagtgacaagcgga

SEQ ID NO: 5608948 - DNA, 25 bp, Homo sapien
gatacccagacaacaggatcgtctc

SEQ ID NO: 5608949 - DNA, 25 bp, Homo sapien
tgtgacggctatcaaacagggttat

SEQ ID NO: 5608950 - DNA, 25 bp, Homo sapien
cgagttggggacattgtcatggtta

SEQ ID NO: 5608951 - DNA, 25 bp, Homo sapien
cggacgctcgtgcacagatactgtg

SEQ ID NO: 5608952 - DNA, 25 bp, Homo sapien
aagccatggatcttcacaagcctca

SEQ ID NO: 5608953 - DNA, 25 bp, Homo sapien
ttgcatcatcagcgtgcacctccac

SEQ ID NO: 5608954 - DNA, 25 bp, Homo sapien
tctgaacctgaatgtaagagcacaa

SEQ ID NO: 5608955 - DNA, 25 bp, Homo sapien
gtttaaagtccaagggcacagcaag

SEQ ID NO: 5608956 - DNA, 25 bp, Homo sapien
aagagcacaatacaatcaatgaagc

SEQ ID NO: 5608957 - DNA, 25 bp, Homo sapien
aagtatggccgcttctgaggcggcg

SEQ ID NO: 5608958 - DNA, 25 bp, Homo sapien
acctccacgatgaaacaggtctggg

SEQ ID NO: 5608959 - DNA, 25 bp, Homo sapien
gtctgggctacaaaagtatggccgc

SEQ ID NO: 5608960 - DNA, 25 bp, Homo sapien
cacaagtccgtgcgacctctccgtt

SEQ ID NO: 5608961 - DNA, 25 bp, Homo sapien
ttctgcgcagcttcgcggtatgagg

SEQ ID NO: 5608962 - DNA, 25 bp, Homo sapien
tggtctatatgggaaggccaatgga

SEQ ID NO: 5608963 - DNA, 25 bp, Homo sapien
caagggtaaataagacatggtgcct

SEQ ID NO: 5608964 - DNA, 25 bp, Homo sapien
gaagtagaagtaaccagcatttgct

SEQ ID NO: 5608965 - DNA, 25 bp, Homo sapien
atccatcaatagacatttgggtatt

SEQ ID NO: 5608966 - DNA, 25 bp, Homo sapien
tcactatgggaagtactgtgggaaa

SEQ ID NO: 5608967 - DNA, 25 bp, Homo sapien
tttgagcatcgtgtcggcattgaaa

SEQ ID NO: 5608968 - DNA, 25 bp, Homo sapien
actaagggtaactcactatgggaag

SEQ ID NO: 5608969 - DNA, 25 bp, Homo sapien
tctcaaggaaattatgatagactgg

SEQ ID NO: 5608970 - DNA, 25 bp, Homo sapien
aagacatggtgcctgctctcaagga

SEQ ID NO: 5608971 - DNA, 25 bp, Homo sapien
tgggtatttccaggacaatatattc

SEQ ID NO: 5608972 - DNA, 25 bp, Homo sapien
atcgtgtcggcattgaaaaagtttc

SEQ ID NO: 5608973 - DNA, 25 bp, Homo sapien
tgtagcacatgtcagaatttcattc

SEQ ID NO: 5608974 - DNA, 25 bp, Homo sapien
gccgagttcacccaaaggcagaact

SEQ ID NO: 5608975 - DNA, 25 bp, Homo sapien
tcctactctttgacagccttatgcc

SEQ ID NO: 5608976 - DNA, 25 bp, Homo sapien
tgtccgaaaaatatgcttgaagtac

SEQ ID NO: 5608977 - DNA, 25 bp, Homo sapien
tttgatgaatctaagtgttatgttt

SEQ ID NO: 5608978 - DNA, 25 bp, Homo sapien
agttacgcctgtccgaaaaatatgc

SEQ ID NO: 5608979 - DNA, 25 bp, Homo sapien
aaagtggacacctaagttacgcctg

SEQ ID NO: 5608980 - DNA, 25 bp, Homo sapien
agattaaggggagaatcctactctt

SEQ ID NO: 5608981 - DNA, 25 bp, Homo sapien
atatgcttgaagtacgtgaacctcc

SEQ ID NO: 5608982 - DNA, 25 bp, Homo sapien
aagtgttatgtttgtgggaaaagtg

SEQ ID NO: 5608983 - DNA, 25 bp, Homo sapien
gttatgtttgtgggaaaagtggaca

SEQ ID NO: 5608984 - DNA, 25 bp, Homo sapien
cccaaaggcagaactactttgatga

SEQ ID NO: 5608985 - DNA, 25 bp, Homo sapien
ttagaacacactaaggcttggggca

SEQ ID NO: 5608986 - DNA, 25 bp, Homo sapien
tttagggagcagcttttcccttctg

SEQ ID NO: 5608987 - DNA, 25 bp, Homo sapien
ggcttggggcatcagtcatcattta

SEQ ID NO: 5608988 - DNA, 25 bp, Homo sapien
aaagtttagaacacactaaggcttg

SEQ ID NO: 5608989 - DNA, 25 bp, Homo sapien
gcttggggcatcagtcatcatttac

SEQ ID NO: 5608990 - DNA, 25 bp, Homo sapien
ttactgatccctcctcactaacctt

SEQ ID NO: 5608991 - DNA, 25 bp, Homo sapien
atcatttactgatccctcctcacta

SEQ ID NO: 5608992 - DNA, 25 bp, Homo sapien
ttttcctgcctcttgtttacaaaca

SEQ ID NO: 5608993 - DNA, 25 bp, Homo sapien
tttagaacacactaaggcttggggc

SEQ ID NO: 5608994 - DNA, 25 bp, Homo sapien
ctcctcactaaccttttcctgcctc

SEQ ID NO: 5608995 - DNA, 25 bp, Homo sapien
agtttagaacacactaaggcttggg

SEQ ID NO: 5608996 - DNA, 25 bp, Homo sapien
ccgttctccgggtagggatcagtcg

SEQ ID NO: 5608997 - DNA, 25 bp, Homo sapien
cgactgatccctacccggagaacgg

SEQ ID NO: 5608998 - DNA, 25 bp, Homo sapien
agatttgcagaacctaacggaaagg

SEQ ID NO: 5608999 - DNA, 25 bp, Homo sapien
ccataaaagtgagtacagtgtgagc

SEQ ID NO: 5609000 - DNA, 25 bp, Homo sapien
gagggaaccagcagtaaccctgata

SEQ ID NO: 5609001 - DNA, 25 bp, Homo sapien
cttactgtgtttaaagaggaggagg

SEQ ID NO: 5609002 - DNA, 25 bp, Homo sapien
ccatcagtaagcaggctttgaagca

SEQ ID NO: 5609003 - DNA, 25 bp, Homo sapien
tgactccaggggatagatttgcaga

SEQ ID NO: 5609004 - DNA, 25 bp, Homo sapien
tgaagtaggtgacgagcactcttag

SEQ ID NO: 5609005 - DNA, 25 bp, Homo sapien
ggtggtgtagtaaaatcgcttgtct

SEQ ID NO: 5609006 - DNA, 25 bp, Homo sapien
agcagcggacaacagaactttgatt

SEQ ID NO: 5609007 - DNA, 25 bp, Homo sapien
cctctcgactctacagcagcggaca

SEQ ID NO: 5609008 - DNA, 25 bp, Homo sapien
gcagtaaccctgatagcggtctgtc

SEQ ID NO: 5609009 - DNA, 25 bp, Homo sapien
agatcacttgagcctgggaaacaga

SEQ ID NO: 5609010 - DNA, 25 bp, Homo sapien
aaagtacctgggaagatcacttgag

SEQ ID NO: 5609011 - DNA, 25 bp, Homo sapien
tcttggtctgtcactaggatgagca

SEQ ID NO: 5609012 - DNA, 25 bp, Homo sapien
atcacggcaccttaattgtccaatt

SEQ ID NO: 5609013 - DNA, 25 bp, Homo sapien
tgagccgagattgcaccactgcaca

SEQ ID NO: 5609014 - DNA, 25 bp, Homo sapien
gggttgtattgtctcttggtctgtc

SEQ ID NO: 5609015 - DNA, 25 bp, Homo sapien
gagattgcaccactgcacaccagcc

SEQ ID NO: 5609016 - DNA, 25 bp, Homo sapien
cttttaaagtacctgggaagatcac

SEQ ID NO: 5609017 - DNA, 25 bp, Homo sapien
gtccaatttgggttgtattgtctct

SEQ ID NO: 5609018 - DNA, 25 bp, Homo sapien
ggtctgtcactaggatgagcatctt

SEQ ID NO: 5609019 - DNA, 25 bp, Homo sapien
gagtgagaccctgtcccccatccca

SEQ ID NO: 5609020 - DNA, 25 bp, Homo sapien
aagatgctcatcctagtgacagacc

SEQ ID NO: 5609021 - DNA, 25 bp, Homo sapien
tgccgtgattccctacaagtattgc

SEQ ID NO: 5609022 - DNA, 25 bp, Homo sapien
ccaggtactttaaaagatagaaaga

SEQ ID NO: 5609023 - DNA, 25 bp, Homo sapien
aattggacaattaaggtgccgtgat

SEQ ID NO: 5609024 - DNA, 25 bp, Homo sapien
tcatcctagtgacagaccaagagac

SEQ ID NO: 5609025 - DNA, 25 bp, Homo sapien
agaccaagagacaatacaacccaaa

SEQ ID NO: 5609026 - DNA, 25 bp, Homo sapien
acaattaaggtgccgtgattcccta

SEQ ID NO: 5609027 - DNA, 25 bp, Homo sapien
taaggtgccgtgattccctacaagt

SEQ ID NO: 5609028 - DNA, 25 bp, Homo sapien
aagtgatcttcccaggtactttaaa

SEQ ID NO: 5609029 - DNA, 25 bp, Homo sapien
caaattggacaattaaggtgccgtg

SEQ ID NO: 5609030 - DNA, 25 bp, Homo sapien
actttaaaagatagaaagatgctca

SEQ ID NO: 5609031 - DNA, 25 bp, Homo sapien
cccagaccttttcccagcaataaac

SEQ ID NO: 5609032 - DNA, 25 bp, Homo sapien
ctgatgccccaagccttagtgtgtt

SEQ ID NO: 5609033 - DNA, 25 bp, Homo sapien
atcagtaaatgatgactgatgcccc

SEQ ID NO: 5609034 - DNA, 25 bp, Homo sapien
tgtttgtaaacaagaggcaggaaaa

SEQ ID NO: 5609035 - DNA, 25 bp, Homo sapien
ggagggatcagtaaatgatgactga

SEQ ID NO: 5609036 - DNA, 25 bp, Homo sapien
gactgatgccccaagccttagtgtg

SEQ ID NO: 5609037 - DNA, 25 bp, Homo sapien
agtaaatgatgactgatgccccaag

SEQ ID NO: 5609038 - DNA, 25 bp, Homo sapien
gatgactgatgccccaagccttagt

SEQ ID NO: 5609039 - DNA, 25 bp, Homo sapien
gatgccccaagccttagtgtgttct

SEQ ID NO: 5609040 - DNA, 25 bp, Homo sapien
atgatgactgatgccccaagcctta

SEQ ID NO: 5609041 - DNA, 25 bp, Homo sapien
gtaaatgatgactgatgccccaagc

SEQ ID NO: 5609042 - DNA, 25 bp, Homo sapien
ctacaccaccctcgagtcaatcatc

SEQ ID NO: 5609043 - DNA, 25 bp, Homo sapien
aacaagaggaagttactccacgttc

SEQ ID NO: 5609044 - DNA, 25 bp, Homo sapien
gaacctaatcaaaagctctgctgcc

SEQ ID NO: 5609045 - DNA, 25 bp, Homo sapien
ggttactgctggttccctctggccc

SEQ ID NO: 5609046 - DNA, 25 bp, Homo sapien
gttgtccgctgctgtagagtcgaga

SEQ ID NO: 5609047 - DNA, 25 bp, Homo sapien
cactctaacgtgctgaaggctttgt

SEQ ID NO: 5609048 - DNA, 25 bp, Homo sapien
gtgaccagacaagcgattttactac

SEQ ID NO: 5609049 - DNA, 25 bp, Homo sapien
tgatggaaatcagcaatcaaagttc

SEQ ID NO: 5609050 - DNA, 25 bp, Homo sapien
gcaaactagagaactatggacaacc

SEQ ID NO: 5609051 - DNA, 25 bp, Homo sapien
tgctgccaaatgtttgtgaccagac

SEQ ID NO: 5609052 - DNA, 25 bp, Homo sapien
gatgacagaccgctatcagggttac

SEQ ID NO: 5609053 - DNA, 25 bp, Homo sapien
tctggctccaatgtttactagttag

SEQ ID NO: 5609054 - DNA, 25 bp, Homo sapien
tccagctttgcaattggcacagttc

SEQ ID NO: 5609055 - DNA, 25 bp, Homo sapien
ctcattgctgagatagaattctggc

SEQ ID NO: 5609056 - DNA, 25 bp, Homo sapien
tactagttagtgggccctagaggaa

SEQ ID NO: 5609057 - DNA, 25 bp, Homo sapien
ttaacaagaaagcatggtataggga

SEQ ID NO: 5609058 - DNA, 25 bp, Homo sapien
ttcatcatatagtgcctgaggttcc

SEQ ID NO: 5609059 - DNA, 25 bp, Homo sapien
ttgcaattggcacagttcttacttc

SEQ ID NO: 5609060 - DNA, 25 bp, Homo sapien
caaacattaacaagaaagcatggta

SEQ ID NO: 5609061 - DNA, 25 bp, Homo sapien
taacagctttctcagcaactgtcct

SEQ ID NO: 5609062 - DNA, 25 bp, Homo sapien
gggccctagaggaaatatgacttta

SEQ ID NO: 5609063 - DNA, 25 bp, Homo sapien
aactgagcatatgatgttaaattgt

SEQ ID NO: 5609064 - DNA, 25 bp, Homo sapien
aattgcaaagctggataggacagtt

SEQ ID NO: 5609065 - DNA, 25 bp, Homo sapien
ttgtggtgtaacgtaagaatagcta

SEQ ID NO: 5609066 - DNA, 25 bp, Homo sapien
aggaacctcaggcactatatgatga

SEQ ID NO: 5609067 - DNA, 25 bp, Homo sapien
gtaagtcacacttcaagatgcatga

SEQ ID NO: 5609068 - DNA, 25 bp, Homo sapien
ctctagggcccactaactagtaaac

SEQ ID NO: 5609069 - DNA, 25 bp, Homo sapien
aaatatgtagaagatgaaatggcaa

SEQ ID NO: 5609070 - DNA, 25 bp, Homo sapien
aactagtaaacattggagccagaat

SEQ ID NO: 5609071 - DNA, 25 bp, Homo sapien
gatatgttaggactacagaggttat

SEQ ID NO: 5609072 - DNA, 25 bp, Homo sapien
taggacagttgctgagaaagctgtt

SEQ ID NO: 5609073 - DNA, 25 bp, Homo sapien
tgagtaactacaaaactggagtggg

SEQ ID NO: 5609074 - DNA, 25 bp, Homo sapien
gaagtaagaactgtgccaattgcaa

SEQ ID NO: 5609075 - DNA, 25 bp, Homo sapien
taaagtggtgtgtcagagccactgt

SEQ ID NO: 5609076 - DNA, 25 bp, Homo sapien
cccacccggcccttgcgcctttcta

SEQ ID NO: 5609077 - DNA, 25 bp, Homo sapien
gtggatatctggtggcaaaacctat

SEQ ID NO: 5609078 - DNA, 25 bp, Homo sapien
ctaggtaagtcatctgtagagcatc

SEQ ID NO: 5609079 - DNA, 25 bp, Homo sapien
agtttagtagaatattagtgtggat

SEQ ID NO: 5609080 - DNA, 25 bp, Homo sapien
caggcatagagctgacttggtagtg

SEQ ID NO: 5609081 - DNA, 25 bp, Homo sapien
tccacagaaagcaccacgtttgttt

SEQ ID NO: 5609082 - DNA, 25 bp, Homo sapien
ttcgtggcctcaggcatagagctga

SEQ ID NO: 5609083 - DNA, 25 bp, Homo sapien
ttcagacacaggttgctcttgatac

SEQ ID NO: 5609084 - DNA, 25 bp, Homo sapien
tgacttggtagtggaccctctgtcc

SEQ ID NO: 5609085 - DNA, 25 bp, Homo sapien
tttctagcataaagtggtgtgtcag

SEQ ID NO: 5609086 - DNA, 25 bp, Homo sapien
tttcagtgtttagaggaacctccaa

SEQ ID NO: 5609087 - DNA, 25 bp, Homo sapien
atttaaaagcgcaatattccttcct

SEQ ID NO: 5609088 - DNA, 25 bp, Homo sapien
gattgctggatcatgtggcacctct

SEQ ID NO: 5609089 - DNA, 25 bp, Homo sapien
cttatttctggggtatatatccaac

SEQ ID NO: 5609090 - DNA, 25 bp, Homo sapien
tagctattgtcaacagtggtgcaac

SEQ ID NO: 5609091 - DNA, 25 bp, Homo sapien
atgggagtgcagataatttcttcga

SEQ ID NO: 5609092 - DNA, 25 bp, Homo sapien
ccaaactgttctccaccatggctgt

SEQ ID NO: 5609093 - DNA, 25 bp, Homo sapien
caacagtggtgcaaccaacatggga

SEQ ID NO: 5609094 - DNA, 25 bp, Homo sapien
ctttgcatggcatgcaggaatggtg

SEQ ID NO: 5609095 - DNA, 25 bp, Homo sapien
atattccttcctttgcatggcatgc

SEQ ID NO: 5609096 - DNA, 25 bp, Homo sapien
tgaaagcaaagaaacagtcatccct

SEQ ID NO: 5609097 - DNA, 25 bp, Homo sapien
tcctccacctgtctgacctggcatt

SEQ ID NO: 5609098 - DNA, 25 bp, Homo sapien
ttgctttcaccattcctgcatgcca

SEQ ID NO: 5609099 - DNA, 25 bp, Homo sapien
aaacactgaaaatagaggtgccaca

SEQ ID NO: 5609100 - DNA, 25 bp, Homo sapien
tgaaaatagaggtgccacatgatcc

SEQ ID NO: 5609101 - DNA, 25 bp, Homo sapien
tcatcataccttgacctgtgcccca

SEQ ID NO: 5609102 - DNA, 25 bp, Homo sapien
tattaagtaagtggttactctttca

SEQ ID NO: 5609103 - DNA, 25 bp, Homo sapien
gaggtgccacatgatccagcaatcc

SEQ ID NO: 5609104 - DNA, 25 bp, Homo sapien
gaagagaagggatgactgtttcttt

SEQ ID NO: 5609105 - DNA, 25 bp, Homo sapien
tggaggttcctctaaacactgaaaa

SEQ ID NO: 5609106 - DNA, 25 bp, Homo sapien
tgcatgccatgcaaaggaaggaata

SEQ ID NO: 5609107 - DNA, 25 bp, Homo sapien
gcaaaggaaggaatattgcgctttt

SEQ ID NO: 5609108 - DNA, 25 bp, Homo sapien
gagagggaagttttctggtacatcc

SEQ ID NO: 5609109 - DNA, 25 bp, Homo sapien
gggcaacatagactccaactctaca

SEQ ID NO: 5609110 - DNA, 25 bp, Homo sapien
aaaagtagccaggcacacatgcttg

SEQ ID NO: 5609111 - DNA, 25 bp, Homo sapien
ggttgacgctgtgaccatgccactg

SEQ ID NO: 5609112 - DNA, 25 bp, Homo sapien
ttccttaacaggaagtcctccagca

SEQ ID NO: 5609113 - DNA, 25 bp, Homo sapien
cacatgcttgtagtgccagcctctg

SEQ ID NO: 5609114 - DNA, 25 bp, Homo sapien
gaggcacattcagcagttaaggttt

SEQ ID NO: 5609115 - DNA, 25 bp, Homo sapien
tctgccaatctaggagtgtcacact

SEQ ID NO: 5609116 - DNA, 25 bp, Homo sapien
tgcttaagcccaagtggttgacgct

SEQ ID NO: 5609117 - DNA, 25 bp, Homo sapien
tcaaacacgcaaatatctgccaatc

SEQ ID NO: 5609118 - DNA, 25 bp, Homo sapien
ccagtggtcacgtatcacaattcaa

SEQ ID NO: 5609119 - DNA, 25 bp, Homo sapien
ctattacactaagatgaagacatta

SEQ ID NO: 5609120 - DNA, 25 bp, Homo sapien
caaggtaaagcccagcaaaaaaaca

SEQ ID NO: 5609121 - DNA, 25 bp, Homo sapien
gcaatgatggtgtgacttcctcctc

SEQ ID NO: 5609122 - DNA, 25 bp, Homo sapien
attaaaaccaaggtaaagcccagca

SEQ ID NO: 5609123 - DNA, 25 bp, Homo sapien
tcagatgagcagaatgaagttcaga

SEQ ID NO: 5609124 - DNA, 25 bp, Homo sapien
cctcagatatctggctcttctctcc

SEQ ID NO: 5609125 - DNA, 25 bp, Homo sapien
atgaagttcagaaaattaaaaccaa

SEQ ID NO: 5609126 - DNA, 25 bp, Homo sapien
acacacacaaaaaacaaaccctcac

SEQ ID NO: 5609127 - DNA, 25 bp, Homo sapien
ttgactatcacaacatggatggcaa

SEQ ID NO: 5609128 - DNA, 25 bp, Homo sapien
ctgtttggcatcccagctgcctaat

SEQ ID NO: 5609129 - DNA, 25 bp, Homo sapien
acaacatggatggcaatgatggtgt

SEQ ID NO: 5609130 - DNA, 25 bp, Homo sapien
gcaattagagaaagcactggaagta

SEQ ID NO: 5609131 - DNA, 25 bp, Homo sapien
cagaccatgcaaggctttgaaggct

SEQ ID NO: 5609132 - DNA, 25 bp, Homo sapien
aagtaaagccaagcagatatcagcc

SEQ ID NO: 5609133 - DNA, 25 bp, Homo sapien
tctgcaattagagaaagcactggaa

SEQ ID NO: 5609134 - DNA, 25 bp, Homo sapien
atggaggtgaatgaaacgtctcatt

SEQ ID NO: 5609135 - DNA, 25 bp, Homo sapien
actggaagtaaagccaagcagatat

SEQ ID NO: 5609136 - DNA, 25 bp, Homo sapien
gatatcagccaatgtgtctgagcag

SEQ ID NO: 5609137 - DNA, 25 bp, Homo sapien
gggccagaccatgcaaggctttgaa

SEQ ID NO: 5609138 - DNA, 25 bp, Homo sapien
agccaagcagatatcagccaatgtg

SEQ ID NO: 5609139 - DNA, 25 bp, Homo sapien
gattacggccttcacatgcctctgc

SEQ ID NO: 5609140 - DNA, 25 bp, Homo sapien
gaaggctcttctaaagattacggcc

SEQ ID NO: 5609141 - DNA, 25 bp, Homo sapien
ttgtcctctcctggcttggacccct

SEQ ID NO: 5609142 - DNA, 25 bp, Homo sapien
tccccctctgccccttcgtctcttc

SEQ ID NO: 5609143 - DNA, 25 bp, Homo sapien
ctgcctccaaaatctatccttagtc

SEQ ID NO: 5609144 - DNA, 25 bp, Homo sapien
ggcttggacccctgcaatgacttct

SEQ ID NO: 5609145 - DNA, 25 bp, Homo sapien
accgcccctggcctaaacatcatct

SEQ ID NO: 5609146 - DNA, 25 bp, Homo sapien
ttctttcatgctctcctgtttgctc

SEQ ID NO: 5609147 - DNA, 25 bp, Homo sapien
ctcctggcttggacccctgcaatga

SEQ ID NO: 5609148 - DNA, 25 bp, Homo sapien
aaacctccatcagatttgtcctctc

SEQ ID NO: 5609149 - DNA, 25 bp, Homo sapien
aatgacttcttacctgggtccagcc

SEQ ID NO: 5609150 - DNA, 25 bp, Homo sapien
cagacaactgagccttttaaacctc

SEQ ID NO: 5609151 - DNA, 25 bp, Homo sapien
cttacctgggtccagcctccgtcga

SEQ ID NO: 5609152 - DNA, 25 bp, Homo sapien
agcaaggtggtctgccctatcactc

SEQ ID NO: 5609153 - DNA, 25 bp, Homo sapien
agagtggtactctttccgctgcacc

SEQ ID NO: 5609154 - DNA, 25 bp, Homo sapien
agagtgaggttcaaagaagttacaa

SEQ ID NO: 5609155 - DNA, 25 bp, Homo sapien
cttctaccagtgagaaagagtgagg

SEQ ID NO: 5609156 - DNA, 25 bp, Homo sapien
aacttgggtcccaccgagagtggta

SEQ ID NO: 5609157 - DNA, 25 bp, Homo sapien
gcttaccaagacatggagcacctca

SEQ ID NO: 5609158 - DNA, 25 bp, Homo sapien
gttttgctaggtagacgagctcttt

SEQ ID NO: 5609159 - DNA, 25 bp, Homo sapien
cttgacatgtgcagagattcagcag

SEQ ID NO: 5609160 - DNA, 25 bp, Homo sapien
atacatctggattcaaacttgggtc

SEQ ID NO: 5609161 - DNA, 25 bp, Homo sapien
gccaggttctgtgctaggtatatta

SEQ ID NO: 5609162 - DNA, 25 bp, Homo sapien
gcacctcagggcacatccatggaaa

SEQ ID NO: 5609163 - DNA, 25 bp, Homo sapien
atgcagagtagaaattaggcagctg

SEQ ID NO: 5609164 - DNA, 25 bp, Homo sapien
tgcaacatattggagagaagagcca

SEQ ID NO: 5609165 - DNA, 25 bp, Homo sapien
caagatgcagagtagaaattaggca

SEQ ID NO: 5609166 - DNA, 25 bp, Homo sapien
tgtaatagggatgattaggtaaggt

SEQ ID NO: 5609167 - DNA, 25 bp, Homo sapien
atagtcaacagaaggagtaaaaaga

SEQ ID NO: 5609168 - DNA, 25 bp, Homo sapien
cattgccatccatgttgtgatagtc

SEQ ID NO: 5609169 - DNA, 25 bp, Homo sapien
gtgatagtcaacagaaggagtaaaa

SEQ ID NO: 5609170 - DNA, 25 bp, Homo sapien
gtgtaatagggatgattaggtaagg

SEQ ID NO: 5609171 - DNA, 25 bp, Homo sapien
gttgtgatagtcaacagaaggagta

SEQ ID NO: 5609172 - DNA, 25 bp, Homo sapien
gatgcaacatattggagagaagagc

SEQ ID NO: 5609173 - DNA, 25 bp, Homo sapien
ccaggatgcaacatattggagagaa

SEQ ID NO: 5609174 - DNA, 25 bp, Homo sapien
taaagataaagtatatgagcatgta

SEQ ID NO: 5609175 - DNA, 25 bp, Homo sapien
aattaagaattatcttgggccacac

SEQ ID NO: 5609176 - DNA, 25 bp, Homo sapien
taacactaacgataactgatgagct

SEQ ID NO: 5609177 - DNA, 25 bp, Homo sapien
gggccacattggaagaattaagaat

SEQ ID NO: 5609178 - DNA, 25 bp, Homo sapien
aagtatatgagcatgtacaggggtg

SEQ ID NO: 5609179 - DNA, 25 bp, Homo sapien
ttggcttccctgggccacattggaa

SEQ ID NO: 5609180 - DNA, 25 bp, Homo sapien
gtacaggggtgtccaatcttttggc

SEQ ID NO: 5609181 - DNA, 25 bp, Homo sapien
ttaaagcaaatgcaagaacacttac

SEQ ID NO: 5609182 - DNA, 25 bp, Homo sapien
tgggccacacataaaatacactaac

SEQ ID NO: 5609183 - DNA, 25 bp, Homo sapien
aagattaaagataaagtatatgagc

SEQ ID NO: 5609184 - DNA, 25 bp, Homo sapien
gcaagaacacttacagataagggct

SEQ ID NO: 5609185 - DNA, 25 bp, Homo sapien
cttttgtttacctggcgtgtgtggc

SEQ ID NO: 5609186 - DNA, 25 bp, Homo sapien
tgttggcttttgtttacctggcgtg

SEQ ID NO: 5609187 - DNA, 25 bp, Homo sapien
ctctctctgcttgctatccctgacc

SEQ ID NO: 5609188 - DNA, 25 bp, Homo sapien
tttgtttacctggcgtgtgtggcag

SEQ ID NO: 5609189 - DNA, 25 bp, Homo sapien
ggcttttgtttacctggcgtgtgtg

SEQ ID NO: 5609190 - DNA, 25 bp, Homo sapien
ctctgcttgctatccctgacctttc

SEQ ID NO: 5609191 - DNA, 25 bp, Homo sapien
ttggcttttgtttacctggcgtgtg

SEQ ID NO: 5609192 - DNA, 25 bp, Homo sapien
gcagccggctcgctccctctctctg

SEQ ID NO: 5609193 - DNA, 25 bp, Homo sapien
gccggctcgctccctctctctgctt

SEQ ID NO: 5609194 - DNA, 25 bp, Homo sapien
atattaatttcccccttctgtcgtc

SEQ ID NO: 5609195 - DNA, 25 bp, Homo sapien
tctgtcgtcttctcgcagccgtata

SEQ ID NO: 5609196 - DNA, 25 bp, Homo sapien
gtctcttataggaaaatgcacagtc

SEQ ID NO: 5609197 - DNA, 25 bp, Homo sapien
agcccctaggtgaccaggcaaaatg

SEQ ID NO: 5609198 - DNA, 25 bp, Homo sapien
tggcagttccttccagctggtcctc

SEQ ID NO: 5609199 - DNA, 25 bp, Homo sapien
tggtcctcagatgggcacatctatt

SEQ ID NO: 5609200 - DNA, 25 bp, Homo sapien
ttagatgtggaagctctttggaaac

SEQ ID NO: 5609201 - DNA, 25 bp, Homo sapien
tgtaagaagttagctgcagaaccca

SEQ ID NO: 5609202 - DNA, 25 bp, Homo sapien
gctggcccttggaccacacttcgag

SEQ ID NO: 5609203 - DNA, 25 bp, Homo sapien
acccacatgtgaatccttgtaggac

SEQ ID NO: 5609204 - DNA, 25 bp, Homo sapien
tgaccaggcaaaatggcagttcctt

SEQ ID NO: 5609205 - DNA, 25 bp, Homo sapien
gagaagatcaaatgggagcttagat

SEQ ID NO: 5609206 - DNA, 25 bp, Homo sapien
gacaggaccctcagcctcgagggag

SEQ ID NO: 5609207 - DNA, 25 bp, Homo sapien
ctcgacggccgtgcggaggatagtg

SEQ ID NO: 5609208 - DNA, 25 bp, Homo sapien
cactatcctccgcacggccgtcgag

SEQ ID NO: 5609209 - DNA, 25 bp, Homo sapien
tctctaattgcagaggcatgtgaag

SEQ ID NO: 5609210 - DNA, 25 bp, Homo sapien
agccttcaaagccttgcatggtctg

SEQ ID NO: 5609211 - DNA, 25 bp, Homo sapien
gaggcatgtgaaggccgtaatcttt

SEQ ID NO: 5609212 - DNA, 25 bp, Homo sapien
tgaaggccgtaatctttagaagagc

SEQ ID NO: 5609213 - DNA, 25 bp, Homo sapien
acctccatatctttactgctcagac

SEQ ID NO: 5609214 - DNA, 25 bp, Homo sapien
tggccctgcctgtctttccagcctc

SEQ ID NO: 5609215 - DNA, 25 bp, Homo sapien
ggccgtaatctttagaagagccttc

SEQ ID NO: 5609216 - DNA, 25 bp, Homo sapien
caaagccttgcatggtctggccctg

SEQ ID NO: 5609217 - DNA, 25 bp, Homo sapien
ctgctcagacacattggctgatatc

SEQ ID NO: 5609218 - DNA, 25 bp, Homo sapien
atgagacgtttcattcacctccata

SEQ ID NO: 5609219 - DNA, 25 bp, Homo sapien
ttggctgatatctgcttggctttac

SEQ ID NO: 5609220 - DNA, 25 bp, Homo sapien
caaattgtgagcacttgcaaatccc

SEQ ID NO: 5609221 - DNA, 25 bp, Homo sapien
atctgtaagtgttcttgcatttgct

SEQ ID NO: 5609222 - DNA, 25 bp, Homo sapien
ttgtccccaaattgtgagcacttgc

SEQ ID NO: 5609223 - DNA, 25 bp, Homo sapien
atgtgtggcccaagataattcttaa

SEQ ID NO: 5609224 - DNA, 25 bp, Homo sapien
agcccttatctgtaagtgttcttgc

SEQ ID NO: 5609225 - DNA, 25 bp, Homo sapien
attgtgagcacttgcaaatcccttc

SEQ ID NO: 5609226 - DNA, 25 bp, Homo sapien
ggacacccctgtacatgctcatata

SEQ ID NO: 5609227 - DNA, 25 bp, Homo sapien
aaacttgtccccaaattgtgagcac

SEQ ID NO: 5609228 - DNA, 25 bp, Homo sapien
agatctttataaaaacttgtcccca

SEQ ID NO: 5609229 - DNA, 25 bp, Homo sapien
attggacacccctgtacatgctcat

SEQ ID NO: 5609230 - DNA, 25 bp, Homo sapien
gtgagcacttgcaaatcccttctgt

SEQ ID NO: 5609231 - DNA, 25 bp, Homo sapien
ctgctaggcacccttatcgctcctc

SEQ ID NO: 5609232 - DNA, 25 bp, Homo sapien
tgctcctgctaggcacccttatcgc

SEQ ID NO: 5609233 - DNA, 25 bp, Homo sapien
cctggattcaaacagtccacctgcc

SEQ ID NO: 5609234 - DNA, 25 bp, Homo sapien
tacaagatggcttacctcttacttc

SEQ ID NO: 5609235 - DNA, 25 bp, Homo sapien
tcctgttagcttttacaagatggct

SEQ ID NO: 5609236 - DNA, 25 bp, Homo sapien
ggcaatctggagggaactccctttg

SEQ ID NO: 5609237 - DNA, 25 bp, Homo sapien
atcgctcctcaatatttagaaatgt

SEQ ID NO: 5609238 - DNA, 25 bp, Homo sapien
atctggagggaactccctttgctcc

SEQ ID NO: 5609239 - DNA, 25 bp, Homo sapien
tgggattgcatgggattacagatat

SEQ ID NO: 5609240 - DNA, 25 bp, Homo sapien
ccctttgctcctgctaggcaccctt

SEQ ID NO: 5609241 - DNA, 25 bp, Homo sapien
accacacccagcctccagtgcttct

SEQ ID NO: 5609242 - DNA, 25 bp, Homo sapien
actacagtgatgaagatacacagaa

SEQ ID NO: 5609243 - DNA, 25 bp, Homo sapien
tcaggcagatagatgtctgatagca

SEQ ID NO: 5609244 - DNA, 25 bp, Homo sapien
tctagttgatagtaatgacaaatct

SEQ ID NO: 5609245 - DNA, 25 bp, Homo sapien
tagatgtctgatagcagtcagtgct

SEQ ID NO: 5609246 - DNA, 25 bp, Homo sapien
aaaaagtagatgattaactacagtg

SEQ ID NO: 5609247 - DNA, 25 bp, Homo sapien
gcatatgacaaacatcaggcagata

SEQ ID NO: 5609248 - DNA, 25 bp, Homo sapien
tatgacaaacatcaggcagatagat

SEQ ID NO: 5609249 - DNA, 25 bp, Homo sapien
attattagaagcatagatttgtgtt

SEQ ID NO: 5609250 - DNA, 25 bp, Homo sapien
gcagtcagtgcttgtaggtattcta

SEQ ID NO: 5609251 - DNA, 25 bp, Homo sapien
tgattaactacagtgatgaagatac

SEQ ID NO: 5609252 - DNA, 25 bp, Homo sapien
tagaagcatagatttgtgtttcagc

SEQ ID NO: 5609253 - DNA, 25 bp, Homo sapien
ggagcaaagggagttccctccagat

SEQ ID NO: 5609254 - DNA, 25 bp, Homo sapien
aaaagaaggatagttatgggtaaca

SEQ ID NO: 5609255 - DNA, 25 bp, Homo sapien
atggcgaaacactatctctaaaaaa

SEQ ID NO: 5609256 - DNA, 25 bp, Homo sapien
ggagttccctccagattgcccctac

SEQ ID NO: 5609257 - DNA, 25 bp, Homo sapien
tctaaatattgaggagcgataaggg

SEQ ID NO: 5609258 - DNA, 25 bp, Homo sapien
tctgtaatcccatgcaatcccagca

SEQ ID NO: 5609259 - DNA, 25 bp, Homo sapien
gccatcttgtaaaagctaacaggaa

SEQ ID NO: 5609260 - DNA, 25 bp, Homo sapien
tgaagtaagaggtaagccatcttgt

SEQ ID NO: 5609261 - DNA, 25 bp, Homo sapien
tgtaaaagctaacaggaaaatagta

SEQ ID NO: 5609262 - DNA, 25 bp, Homo sapien
acatttctaaatattgaggagcgat

SEQ ID NO: 5609263 - DNA, 25 bp, Homo sapien
ggcaggtggactgtttgaatccagg

SEQ ID NO: 5609264 - DNA, 25 bp, Homo sapien
gctgggaagagacagtaaactttac

SEQ ID NO: 5609265 - DNA, 25 bp, Homo sapien
ccattcccgtccatgggctgggaag

SEQ ID NO: 5609266 - DNA, 25 bp, Homo sapien
ctgggaagagacagtaaactttacc

SEQ ID NO: 5609267 - DNA, 25 bp, Homo sapien
attcccgtccatgggctgggaagag

SEQ ID NO: 5609268 - DNA, 25 bp, Homo sapien
ggtgggtatggggatattctttcac

SEQ ID NO: 5609269 - DNA, 25 bp, Homo sapien
ttaccgtgatgtttggggactggta

SEQ ID NO: 5609270 - DNA, 25 bp, Homo sapien
ttaccattcccgtccatgggctggg

SEQ ID NO: 5609271 - DNA, 25 bp, Homo sapien
tgggtatggggatattctttcacta

SEQ ID NO: 5609272 - DNA, 25 bp, Homo sapien
actttaccgtgatgtttggggactg

SEQ ID NO: 5609273 - DNA, 25 bp, Homo sapien
ctttaccgtgatgtttggggactgg

SEQ ID NO: 5609274 - DNA, 25 bp, Homo sapien
ccgtaggcgttaccattcccgtcca

SEQ ID NO: 5609275 - DNA, 25 bp, Homo sapien
tggatagtgctgtttagattgggta

SEQ ID NO: 5609276 - DNA, 25 bp, Homo sapien
ctgaaactacaagcacgtgcctgta

SEQ ID NO: 5609277 - DNA, 25 bp, Homo sapien
gagagtggagatatagactgttttc

SEQ ID NO: 5609278 - DNA, 25 bp, Homo sapien
aagtgactagtggccgctgtattgg

SEQ ID NO: 5609279 - DNA, 25 bp, Homo sapien
tgcagtgtgtgtgatcatgacttac

SEQ ID NO: 5609280 - DNA, 25 bp, Homo sapien
ggttgtcttctagaggcatgctgtc

SEQ ID NO: 5609281 - DNA, 25 bp, Homo sapien
gcatgctgtctaatacaggagccac

SEQ ID NO: 5609282 - DNA, 25 bp, Homo sapien
agacgaagcattttctgggcaaaag

SEQ ID NO: 5609283 - DNA, 25 bp, Homo sapien
ataatcaaaagtgactagtggccgc

SEQ ID NO: 5609284 - DNA, 25 bp, Homo sapien
atactaaaatagcagacgaagcatt

SEQ ID NO: 5609285 - DNA, 25 bp, Homo sapien
ttctcagtcgtattagccacactcc

SEQ ID NO: 5609286 - DNA, 25 bp, Homo sapien
cttttgaatttggagtaaaatctag

SEQ ID NO: 5609287 - DNA, 25 bp, Homo sapien
ttggcaacagtcaaactgttcagaa

SEQ ID NO: 5609288 - DNA, 25 bp, Homo sapien
tataatggagataataaaataactt

SEQ ID NO: 5609289 - DNA, 25 bp, Homo sapien
aaaaaatctgtagctaggccaggcg

SEQ ID NO: 5609290 - DNA, 25 bp, Homo sapien
gtcgacaaactttttgagattcact

SEQ ID NO: 5609291 - DNA, 25 bp, Homo sapien
ttgctcagggtaagtaatgagtcat

SEQ ID NO: 5609292 - DNA, 25 bp, Homo sapien
atgatttgctcagggtaagtaatga

SEQ ID NO: 5609293 - DNA, 25 bp, Homo sapien
acttagcattgtaaaaaaatctgta

SEQ ID NO: 5609294 - DNA, 25 bp, Homo sapien
gatcacaaggttgagagatcaagag

SEQ ID NO: 5609295 - DNA, 25 bp, Homo sapien
tcagggtaagtaatgagtcatagag

SEQ ID NO: 5609296 - DNA, 25 bp, Homo sapien
tgtaaaaaaatctgtagctaggcca

SEQ ID NO: 5609297 - DNA, 25 bp, Homo sapien
aaggggcactcatgcagagtttctg

SEQ ID NO: 5609298 - DNA, 25 bp, Homo sapien
acttggacaggccttttgcatcatc

SEQ ID NO: 5609299 - DNA, 25 bp, Homo sapien
tttaaaataaggggcactcatgcag

SEQ ID NO: 5609300 - DNA, 25 bp, Homo sapien
ctgtgcccagccattgggctgtttt

SEQ ID NO: 5609301 - DNA, 25 bp, Homo sapien
tgtgctcagcaataatagcaactgc

SEQ ID NO: 5609302 - DNA, 25 bp, Homo sapien
tgcatcatcttattagaaggggtcc

SEQ ID NO: 5609303 - DNA, 25 bp, Homo sapien
gcaactgctaatacttggacaggcc

SEQ ID NO: 5609304 - DNA, 25 bp, Homo sapien
ctctaaagacaggcaaaaactaatt

SEQ ID NO: 5609305 - DNA, 25 bp, Homo sapien
ggcaaaaactaattaatgtcgacgc

SEQ ID NO: 5609306 - DNA, 25 bp, Homo sapien
tagaaggggtccaactataattgtc

SEQ ID NO: 5609307 - DNA, 25 bp, Homo sapien
ttgtcaggtgagctaataatctata

SEQ ID NO: 5609308 - DNA, 25 bp, Homo sapien
aaaagcaaaagaattctgtcaagat

SEQ ID NO: 5609309 - DNA, 25 bp, Homo sapien
tgttcctttgtatgtaatgtttgtt

SEQ ID NO: 5609310 - DNA, 25 bp, Homo sapien
gtagttcatatcttcaggctgtatt

SEQ ID NO: 5609311 - DNA, 25 bp, Homo sapien
aatttgtctttggttacagaaactg

SEQ ID NO: 5609312 - DNA, 25 bp, Homo sapien
aatgtagttcatatcttcaggctgt

SEQ ID NO: 5609313 - DNA, 25 bp, Homo sapien
aaagaattctgtcaagatatttgtt

SEQ ID NO: 5609314 - DNA, 25 bp, Homo sapien
ttcttatgaaatgtctgaattgttt

SEQ ID NO: 5609315 - DNA, 25 bp, Homo sapien
tagtaccttaaaaatgtagttcata

SEQ ID NO: 5609316 - DNA, 25 bp, Homo sapien
aagcaaaagaattctgtcaagatat

SEQ ID NO: 5609317 - DNA, 25 bp, Homo sapien
tgtgatatgcctatgactgatattc

SEQ ID NO: 5609318 - DNA, 25 bp, Homo sapien
atgtaatgtttgttttgacactaat

SEQ ID NO: 5609319 - DNA, 25 bp, Homo sapien
aaccaattgtaatgcaagccctccc

SEQ ID NO: 5609320 - DNA, 25 bp, Homo sapien
tattttagtataggtggaactggca

SEQ ID NO: 5609321 - DNA, 25 bp, Homo sapien
ccctgaaataaaacatggaaatagc

SEQ ID NO: 5609322 - DNA, 25 bp, Homo sapien
ctccactctccaatacagcggccac

SEQ ID NO: 5609323 - DNA, 25 bp, Homo sapien
gtggctcctgtattagacagcatgc

SEQ ID NO: 5609324 - DNA, 25 bp, Homo sapien
tagtctgcctgtagttgagagagat

SEQ ID NO: 5609325 - DNA, 25 bp, Homo sapien
gacagcatgcctctagaagacaacc

SEQ ID NO: 5609326 - DNA, 25 bp, Homo sapien
aatacagcggccactagtcactttt

SEQ ID NO: 5609327 - DNA, 25 bp, Homo sapien
tgtagttgagagagatacccaatct

SEQ ID NO: 5609328 - DNA, 25 bp, Homo sapien
tgtggctaatacgactgagaaactc

SEQ ID NO: 5609329 - DNA, 25 bp, Homo sapien
acaggcacgtgcttgtagtttcagc

SEQ ID NO: 5609330 - DNA, 25 bp, Homo sapien
ccccgaacatgttaataagtgagtt

SEQ ID NO: 5609331 - DNA, 25 bp, Homo sapien
atacaaaatcatctgtggaattctc

SEQ ID NO: 5609332 - DNA, 25 bp, Homo sapien
tcttacccataaacagtcaggtcac

SEQ ID NO: 5609333 - DNA, 25 bp, Homo sapien
gtgacatttcaagcaaacatgcatc

SEQ ID NO: 5609334 - DNA, 25 bp, Homo sapien
cagtatgatttaaacgtcgacgcgg

SEQ ID NO: 5609335 - DNA, 25 bp, Homo sapien
cagtcaggtcacaccccgaacatgt

SEQ ID NO: 5609336 - DNA, 25 bp, Homo sapien
aataagtgagttagatcaaccaatt

SEQ ID NO: 5609337 - DNA, 25 bp, Homo sapien
attctccctagtaaggtgacatttc

SEQ ID NO: 5609338 - DNA, 25 bp, Homo sapien
ttagcagtatgatttaaacgtcgac

SEQ ID NO: 5609339 - DNA, 25 bp, Homo sapien
cccataaacagtcaggtcacacccc

SEQ ID NO: 5609340 - DNA, 25 bp, Homo sapien
aacatgcatcatgatcttacccata

SEQ ID NO: 5609341 - DNA, 25 bp, Homo sapien
cctccctctgtgaggtcaggtcctc

SEQ ID NO: 5609342 - DNA, 25 bp, Homo sapien
cgccctggacgcctccctctgtgag

SEQ ID NO: 5609343 - DNA, 25 bp, Homo sapien
ctgtcccgctcccactgaggggcgg

SEQ ID NO: 5609344 - DNA, 25 bp, Homo sapien
ctgccacccctaacgcggggtctgc

SEQ ID NO: 5609345 - DNA, 25 bp, Homo sapien
gcggggtctgccccctctcccgcgc

SEQ ID NO: 5609346 - DNA, 25 bp, Homo sapien
cgtccaggtgccctgtgtccctgtc

SEQ ID NO: 5609347 - DNA, 25 bp, Homo sapien
agaatgacaccaccaggtgtggccg

SEQ ID NO: 5609348 - DNA, 25 bp, Homo sapien
gggcggatcagacctggaggtctga

SEQ ID NO: 5609349 - DNA, 25 bp, Homo sapien
cctgtgtccctgtcccgctcccact

SEQ ID NO: 5609350 - DNA, 25 bp, Homo sapien
gcagggtcgtgttgacccaaggtct

SEQ ID NO: 5609351 - DNA, 25 bp, Homo sapien
gacaactgctgccacccctaacgcg

SEQ ID NO: 5609352 - DNA, 25 bp, Homo sapien
tgcatgagtgccccttattttaaaa

SEQ ID NO: 5609353 - DNA, 25 bp, Homo sapien
tgctattattgctgagcacagaaac

SEQ ID NO: 5609354 - DNA, 25 bp, Homo sapien
cacagaaactctgcatgagtgcccc

SEQ ID NO: 5609355 - DNA, 25 bp, Homo sapien
gcgtcgacattaattagtttttgcc

SEQ ID NO: 5609356 - DNA, 25 bp, Homo sapien
tggaccccttctaataagatgatgc

SEQ ID NO: 5609357 - DNA, 25 bp, Homo sapien
gatgatgcaaaaggcctgtccaagt

SEQ ID NO: 5609358 - DNA, 25 bp, Homo sapien
ggcctgtccaagtattagcagttgc

SEQ ID NO: 5609359 - DNA, 25 bp, Homo sapien
tattgctgagcacagaaactctgca

SEQ ID NO: 5609360 - DNA, 25 bp, Homo sapien
tatagattattagctcacctgacaa

SEQ ID NO: 5609361 - DNA, 25 bp, Homo sapien
cagatcattgatcattgtgaatttg

SEQ ID NO: 5609362 - DNA, 25 bp, Homo sapien
cacctgacaattatagttggacccc

SEQ ID NO: 5609363 - DNA, 25 bp, Homo sapien
gtgctagagttcctacacttgcttc

SEQ ID NO: 5609364 - DNA, 25 bp, Homo sapien
tctaacaaactaaaagttgagctaa

SEQ ID NO: 5609365 - DNA, 25 bp, Homo sapien
taataataatagatacaagcaataa

SEQ ID NO: 5609366 - DNA, 25 bp, Homo sapien
atactctgttggaattaataataat

SEQ ID NO: 5609367 - DNA, 25 bp, Homo sapien
ttaaaaactacagtgctagagttcc

SEQ ID NO: 5609368 - DNA, 25 bp, Homo sapien
gatacaagcaataattaaaaactac

SEQ ID NO: 5609369 - DNA, 25 bp, Homo sapien
actaaaagttgagctaaaattggtc

SEQ ID NO: 5609370 - DNA, 25 bp, Homo sapien
aagttgagctaaaattggtccattc

SEQ ID NO: 5609371 - DNA, 25 bp, Homo sapien
aaagaacctaagttgtaacaaatgc

SEQ ID NO: 5609372 - DNA, 25 bp, Homo sapien
tgtaacaaatgcactctgataatat

SEQ ID NO: 5609373 - DNA, 25 bp, Homo sapien
gcagagtgggtttatgtatataaca

SEQ ID NO: 5609374 - DNA, 25 bp, Homo sapien
aataaaaacaattcagacatttcat

SEQ ID NO: 5609375 - DNA, 25 bp, Homo sapien
catacaaaggaacaataaaaacaat

SEQ ID NO: 5609376 - DNA, 25 bp, Homo sapien
caaacattacatacaaaggaacaat

SEQ ID NO: 5609377 - DNA, 25 bp, Homo sapien
agaatatcagtcataggcatatcac

SEQ ID NO: 5609378 - DNA, 25 bp, Homo sapien
aatacagcctgaagatatgaactac

SEQ ID NO: 5609379 - DNA, 25 bp, Homo sapien
aaattagtgtcaaaacaaacattac

SEQ ID NO: 5609380 - DNA, 25 bp, Homo sapien
cataagaaataatacagcctgaaga

SEQ ID NO: 5609381 - DNA, 25 bp, Homo sapien
cagtttctgtaaccaaagacaaatt

SEQ ID NO: 5609382 - DNA, 25 bp, Homo sapien
ggaaaacaaatatcttgacagaatt

SEQ ID NO: 5609383 - DNA, 25 bp, Homo sapien
gcctgaagatatgaactacattttt

SEQ ID NO: 5609384 - DNA, 25 bp, Homo sapien
tacaaagaatatcagtcataggcat

SEQ ID NO: 5609385 - DNA, 25 bp, Homo sapien
gggcagagatacttggacatgtctc

SEQ ID NO: 5609386 - DNA, 25 bp, Homo sapien
caagtcttgccaaggtgccctgagg

SEQ ID NO: 5609387 - DNA, 25 bp, Homo sapien
ccctgaggtttgcgtagtcaacact

SEQ ID NO: 5609388 - DNA, 25 bp, Homo sapien
cctgtggtctagagaagagttccaa

SEQ ID NO: 5609389 - DNA, 25 bp, Homo sapien
atggatcctgtgaagttcagggcag

SEQ ID NO: 5609390 - DNA, 25 bp, Homo sapien
ctgaaggaataaatcacaatgcagc

SEQ ID NO: 5609391 - DNA, 25 bp, Homo sapien
atcaccacaaagatgcttggatgct

SEQ ID NO: 5609392 - DNA, 25 bp, Homo sapien
catgggattctggtgtaaatggtaa

SEQ ID NO: 5609393 - DNA, 25 bp, Homo sapien
gtaatgtagatggaaacctgtggtc

SEQ ID NO: 5609394 - DNA, 25 bp, Homo sapien
acaatgcagcagaaccaattcagtc

SEQ ID NO: 5609395 - DNA, 25 bp, Homo sapien
cttggcacacagagatgataatatt

SEQ ID NO: 5609396 - DNA, 25 bp, Homo sapien
gtgtcctgtcccaagtctgtactca

SEQ ID NO: 5609397 - DNA, 25 bp, Homo sapien
ggattgatgtaaaaactggtatgcc

SEQ ID NO: 5609398 - DNA, 25 bp, Homo sapien
actggtatgccaattccgtagttat

SEQ ID NO: 5609399 - DNA, 25 bp, Homo sapien
gggctgagagataacagcaaataac

SEQ ID NO: 5609400 - DNA, 25 bp, Homo sapien
tagctcaatggtagtgtcctgtccc

SEQ ID NO: 5609401 - DNA, 25 bp, Homo sapien
gcactgtgacagagaaaacccacat

SEQ ID NO: 5609402 - DNA, 25 bp, Homo sapien
ccgtagttatagtggtaaatattac

SEQ ID NO: 5609403 - DNA, 25 bp, Homo sapien
ggctgccaacagaggtctagctcaa

SEQ ID NO: 5609404 - DNA, 25 bp, Homo sapien
tttttgggaagttgagtgaatttca

SEQ ID NO: 5609405 - DNA, 25 bp, Homo sapien
agccgtgatgaaacagcactgtgac

SEQ ID NO: 5609406 - DNA, 25 bp, Homo sapien
agattttcaggtctagaattggttc

SEQ ID NO: 5609407 - DNA, 25 bp, Homo sapien
aatgactgaattggttctgctgcat

SEQ ID NO: 5609408 - DNA, 25 bp, Homo sapien
gggcaccttggcaagacttgggatg

SEQ ID NO: 5609409 - DNA, 25 bp, Homo sapien
gacatgtccaagtatctctgccctg

SEQ ID NO: 5609410 - DNA, 25 bp, Homo sapien
gggatggacataaagagctttacca

SEQ ID NO: 5609411 - DNA, 25 bp, Homo sapien
tcacaggatccattataaagcttca

SEQ ID NO: 5609412 - DNA, 25 bp, Homo sapien
gactacgcaaacctcagggcacctt

SEQ ID NO: 5609413 - DNA, 25 bp, Homo sapien
tttgtggtgatatctatacagcatc

SEQ ID NO: 5609414 - DNA, 25 bp, Homo sapien
ttacaccagaatcccatgaaaatat

SEQ ID NO: 5609415 - DNA, 25 bp, Homo sapien
ctaaagtgttgactacgcaaacctc

SEQ ID NO: 5609416 - DNA, 25 bp, Homo sapien
tatgaaatagcatccaagcatcttt

SEQ ID NO: 5609417 - DNA, 25 bp, Homo sapien
ctctgtgtgccaagatgagacatgt

SEQ ID NO: 5609418 - DNA, 25 bp, Homo sapien
atatggggtataagtaatctgttca

SEQ ID NO: 5609419 - DNA, 25 bp, Homo sapien
atctgagtacagacttgggacagga

SEQ ID NO: 5609420 - DNA, 25 bp, Homo sapien
ttgagctagacctctgttggcagcc

SEQ ID NO: 5609421 - DNA, 25 bp, Homo sapien
tggatgtgcaaacagaaccaattct

SEQ ID NO: 5609422 - DNA, 25 bp, Homo sapien
gagcaggtatctttgtgaaattcac

SEQ ID NO: 5609423 - DNA, 25 bp, Homo sapien
aaagaagtccctgaatatggggtat

SEQ ID NO: 5609424 - DNA, 25 bp, Homo sapien
gggacaggacactaccattgagcta

SEQ ID NO: 5609425 - DNA, 25 bp, Homo sapien
tataactacggaattggcataccag

SEQ ID NO: 5609426 - DNA, 25 bp, Homo sapien
tcagcccagtcaaatttggatgtgc

SEQ ID NO: 5609427 - DNA, 25 bp, Homo sapien
cctgtttgaaatactatgtgggttt

SEQ ID NO: 5609428 - DNA, 25 bp, Homo sapien
ttcatcacggctgatagagcaggta

SEQ ID NO: 5609429 - DNA, 25 bp, Homo sapien
acaggatgacctcaaggaaactacc

SEQ ID NO: 5609430 - DNA, 25 bp, Homo sapien
gccttgggcaatccaccgagtctat

SEQ ID NO: 5609431 - DNA, 25 bp, Homo sapien
cccggcactgtgtgtgctgaccaat

SEQ ID NO: 5609432 - DNA, 25 bp, Homo sapien
gaatcaaggttgagagcttcagaca

SEQ ID NO: 5609433 - DNA, 25 bp, Homo sapien
ttagctggtgcttttggtgactgag

SEQ ID NO: 5609434 - DNA, 25 bp, Homo sapien
tgcagggctggcttgcttaactcat

SEQ ID NO: 5609435 - DNA, 25 bp, Homo sapien
tgttttgaagagatgagccaagata

SEQ ID NO: 5609436 - DNA, 25 bp, Homo sapien
tatactggtcaaacagcagagctgg

SEQ ID NO: 5609437 - DNA, 25 bp, Homo sapien
tctgaacagtgtatctgaggtcacc

SEQ ID NO: 5609438 - DNA, 25 bp, Homo sapien
ccaggacaatcttaggttggaagtc

SEQ ID NO: 5609439 - DNA, 25 bp, Homo sapien
tcaccaacgaaagaggcatctgttt

SEQ ID NO: 5609440 - DNA, 25 bp, Homo sapien
caaagaggaacaccgtcgaattctt

SEQ ID NO: 5609441 - DNA, 25 bp, Homo sapien
ctggagagaggttaaacaaatacaa

SEQ ID NO: 5609442 - DNA, 25 bp, Homo sapien
tattaaatcagttacagaggccacc

SEQ ID NO: 5609443 - DNA, 25 bp, Homo sapien
tgataaacagagtaatgcccttgca

SEQ ID NO: 5609444 - DNA, 25 bp, Homo sapien
tgtctaatagtgtggtcaatgaacc

SEQ ID NO: 5609445 - DNA, 25 bp, Homo sapien
taaataggtcacagactggaaaaga

SEQ ID NO: 5609446 - DNA, 25 bp, Homo sapien
gagagaattattccagagtggcatc

SEQ ID NO: 5609447 - DNA, 25 bp, Homo sapien
gcggcagcagctaatcctcaaactc

SEQ ID NO: 5609448 - DNA, 25 bp, Homo sapien
tgaaccaccaagatcatacccatcc

SEQ ID NO: 5609449 - DNA, 25 bp, Homo sapien
agtaatgcccttgcagcggcagcag

SEQ ID NO: 5609450 - DNA, 25 bp, Homo sapien
agtgcctcagagtttaccccaaagt

SEQ ID NO: 5609451 - DNA, 25 bp, Homo sapien
cctgttagtaagtggtggaatgaag

SEQ ID NO: 5609452 - DNA, 25 bp, Homo sapien
tatatagactgattaggggacttcc

SEQ ID NO: 5609453 - DNA, 25 bp, Homo sapien
aaaatgggtagtttccttgaggtca

SEQ ID NO: 5609454 - DNA, 25 bp, Homo sapien
ttctgcatagactcggtggattgcc

SEQ ID NO: 5609455 - DNA, 25 bp, Homo sapien
tattggtcagcacacacagtgccgg

SEQ ID NO: 5609456 - DNA, 25 bp, Homo sapien
tctcagtcaccaaaagcaccagcta

SEQ ID NO: 5609457 - DNA, 25 bp, Homo sapien
aaccagttaatatcagagccagctc

SEQ ID NO: 5609458 - DNA, 25 bp, Homo sapien
agcagtgaacaaaaggtctgttggt

SEQ ID NO: 5609459 - DNA, 25 bp, Homo sapien
gttggtgacctcagatacactgttc

SEQ ID NO: 5609460 - DNA, 25 bp, Homo sapien
tggtggaatgaagttacaaacctag

SEQ ID NO: 5609461 - DNA, 25 bp, Homo sapien
acagatgcctctttcgttggtgacc

SEQ ID NO: 5609462 - DNA, 25 bp, Homo sapien
actgcggagtgtatttgtagaagaa

SEQ ID NO: 5609463 - DNA, 25 bp, Homo sapien
ttactttggggtaaactctgaggca

SEQ ID NO: 5609464 - DNA, 25 bp, Homo sapien
tgtaatgcaggcatactgcggagtg

SEQ ID NO: 5609465 - DNA, 25 bp, Homo sapien
tcagagtttgaggattagctgctgc

SEQ ID NO: 5609466 - DNA, 25 bp, Homo sapien
ttggtgtttaatcaaaggtggaggc

SEQ ID NO: 5609467 - DNA, 25 bp, Homo sapien
gatgggtatgatcttggtggttcat

SEQ ID NO: 5609468 - DNA, 25 bp, Homo sapien
tgaaggttgttactgagtgagatgc

SEQ ID NO: 5609469 - DNA, 25 bp, Homo sapien
ataaagatctgatactgagcgttct

SEQ ID NO: 5609470 - DNA, 25 bp, Homo sapien
gccgctgcaagggcattactctgtt

SEQ ID NO: 5609471 - DNA, 25 bp, Homo sapien
tgggtgaaatactggtgctctatgt

SEQ ID NO: 5609472 - DNA, 25 bp, Homo sapien
aagatgatgatgccactctggaata

SEQ ID NO: 5609473 - DNA, 25 bp, Homo sapien
ctcaattaatggatgcctcgaagtt

SEQ ID NO: 5609474 - DNA, 25 bp, Homo sapien
cataattgactattgggagatcagg

SEQ ID NO: 5609475 - DNA, 25 bp, Homo sapien
gaagcagtcaatgccttgaggcctt

SEQ ID NO: 5609476 - DNA, 25 bp, Homo sapien
ccgatggccaggaaccttttagtac

SEQ ID NO: 5609477 - DNA, 25 bp, Homo sapien
caagagctttatcgggagctgaagc

SEQ ID NO: 5609478 - DNA, 25 bp, Homo sapien
tctttggacagcaccccgtagaaag

SEQ ID NO: 5609479 - DNA, 25 bp, Homo sapien
gaggaggttatgtctagagaagata

SEQ ID NO: 5609480 - DNA, 25 bp, Homo sapien
tggatgcctcgaagttgacgtacat

SEQ ID NO: 5609481 - DNA, 25 bp, Homo sapien
gccacctgagacctatgaggaggtt

SEQ ID NO: 5609482 - DNA, 25 bp, Homo sapien
acagaccagagttcctccgatggcc

SEQ ID NO: 5609483 - DNA, 25 bp, Homo sapien
ggagctgaagcagtcaatgccttga

SEQ ID NO: 5609484 - DNA, 25 bp, Homo sapien
cttcttccttttatcatacctaaag

SEQ ID NO: 5609485 - DNA, 25 bp, Homo sapien
ctttaggtatgataaaaggaagaag

SEQ ID NO: 5609486 - DNA, 25 bp, Homo sapien
ttctgtcgtcttctcgcagccgtat

SEQ ID NO: 5609487 - DNA, 25 bp, Homo sapien
ttttactttgttctgagcccttctc

SEQ ID NO: 5609488 - DNA, 25 bp, Homo sapien
ggtcaggcaggtacacgtgcctttg

SEQ ID NO: 5609489 - DNA, 25 bp, Homo sapien
ctcgcagccgtatagtagtagtagg

SEQ ID NO: 5609490 - DNA, 25 bp, Homo sapien
gtggtggaaaaatatggaataatga

SEQ ID NO: 5609491 - DNA, 25 bp, Homo sapien
ctgagcccttctcaggcagaggagg

SEQ ID NO: 5609492 - DNA, 25 bp, Homo sapien
caggtacacgtgcctttgggaagaa

SEQ ID NO: 5609493 - DNA, 25 bp, Homo sapien
ggcaggtacacgtgcctttgggaag

SEQ ID NO: 5609494 - DNA, 25 bp, Homo sapien
tggaataatgagcccttctgtcgtc

SEQ ID NO: 5609495 - DNA, 25 bp, Homo sapien
ggaaaaatatggaataatgagccct

SEQ ID NO: 5609496 - DNA, 25 bp, Homo sapien
cgtcttctcgcagccgtatagtagt

SEQ ID NO: 5609497 - DNA, 25 bp, Homo sapien
gacgacagaagggctcattattcca

SEQ ID NO: 5609498 - DNA, 25 bp, Homo sapien
acctcctctgcctgagaagggctca

SEQ ID NO: 5609499 - DNA, 25 bp, Homo sapien
ctgcctgacctcctctgcctgagaa

SEQ ID NO: 5609500 - DNA, 25 bp, Homo sapien
tattccatatttttccaccaccttc

SEQ ID NO: 5609501 - DNA, 25 bp, Homo sapien
ctgagaagggctcagaacaaagtaa

SEQ ID NO: 5609502 - DNA, 25 bp, Homo sapien
accaccttcttcccaaaggcacgtg

SEQ ID NO: 5609503 - DNA, 25 bp, Homo sapien
ggcacgtgtacctgcctgacctcct

SEQ ID NO: 5609504 - DNA, 25 bp, Homo sapien
tcttcccaaaggcacgtgtacctgc

SEQ ID NO: 5609505 - DNA, 25 bp, Homo sapien
ctgacctcctctgcctgagaagggc

SEQ ID NO: 5609506 - DNA, 25 bp, Homo sapien
gacctcctctgcctgagaagggctc

SEQ ID NO: 5609507 - DNA, 25 bp, Homo sapien
caaaggcacgtgtacctgcctgacc

SEQ ID NO: 5609508 - DNA, 25 bp, Homo sapien
tgatcagtcattctttcgggcttgc

SEQ ID NO: 5609509 - DNA, 25 bp, Homo sapien
ccctctgactttaagtgacaggcag

SEQ ID NO: 5609510 - DNA, 25 bp, Homo sapien
gccttgtaaggaccggctaatgagg

SEQ ID NO: 5609511 - DNA, 25 bp, Homo sapien
taaaatggggataatccggacctca

SEQ ID NO: 5609512 - DNA, 25 bp, Homo sapien
cccagagccttgtaaggaccggcta

SEQ ID NO: 5609513 - DNA, 25 bp, Homo sapien
ctttgaagacgaaaagtgctgtaga

SEQ ID NO: 5609514 - DNA, 25 bp, Homo sapien
gagtgggaaacgaatcgtctgaaca

SEQ ID NO: 5609515 - DNA, 25 bp, Homo sapien
cggacctcatgcccccagagccttg

SEQ ID NO: 5609516 - DNA, 25 bp, Homo sapien
gtgctgtagaggtgctaagcagcag

SEQ ID NO: 5609517 - DNA, 25 bp, Homo sapien
ggtccgtagaaggctttgaagacga

SEQ ID NO: 5609518 - DNA, 25 bp, Homo sapien
ttctttcgggcttgcaaagagggta

SEQ ID NO: 5609519 - DNA, 25 bp, Homo sapien
ctccccagtttccaactcctcctcc

SEQ ID NO: 5609520 - DNA, 25 bp, Homo sapien
tctccaagttctctaccctccagtc

SEQ ID NO: 5609521 - DNA, 25 bp, Homo sapien
ctctaccctccagtcacattccttc

SEQ ID NO: 5609522 - DNA, 25 bp, Homo sapien
caactcctcctccattactcctccc

SEQ ID NO: 5609523 - DNA, 25 bp, Homo sapien
accctccagtcacattccttccatc

SEQ ID NO: 5609524 - DNA, 25 bp, Homo sapien
ttctccaagttctctaccctccagt

SEQ ID NO: 5609525 - DNA, 25 bp, Homo sapien
tccagtcacattccttccatctctc

SEQ ID NO: 5609526 - DNA, 25 bp, Homo sapien
tccatctctccccagtttccaactc

SEQ ID NO: 5609527 - DNA, 25 bp, Homo sapien
ctcctccattactcctccctctccc

SEQ ID NO: 5609528 - DNA, 25 bp, Homo sapien
tccaagttctctaccctccagtcac

SEQ ID NO: 5609529 - DNA, 25 bp, Homo sapien
actcctcctccattactcctccctc

SEQ ID NO: 5609530 - DNA, 25 bp, Homo sapien
gcttcaccctgtcctccaagtcccc

SEQ ID NO: 5609531 - DNA, 25 bp, Homo sapien
tccaagtcccctcgcccagctgcga

SEQ ID NO: 5609532 - DNA, 25 bp, Homo sapien
ctgtcctccaagtcccctcgcccag

SEQ ID NO: 5609533 - DNA, 25 bp, Homo sapien
ccaccccaggtcttctgcagcttca

SEQ ID NO: 5609534 - DNA, 25 bp, Homo sapien
catcccaccccaggtcttctgcagc

SEQ ID NO: 5609535 - DNA, 25 bp, Homo sapien
tgcagcttcaccctgtcctccaagt

SEQ ID NO: 5609536 - DNA, 25 bp, Homo sapien
tccccagtccttggcgtcctctcta

SEQ ID NO: 5609537 - DNA, 25 bp, Homo sapien
ccttccccagtccttggcgtcctct

SEQ ID NO: 5609538 - DNA, 25 bp, Homo sapien
tgggcattggatgtaaggtattcct

SEQ ID NO: 5609539 - DNA, 25 bp, Homo sapien
tggatgtaaggtattcctaacttcc

SEQ ID NO: 5609540 - DNA, 25 bp, Homo sapien
aggaaagacggtctggcttcagaat

SEQ ID NO: 5609541 - DNA, 25 bp, Homo sapien
aagataccctgaggacagatcatac

SEQ ID NO: 5609542 - DNA, 25 bp, Homo sapien
aggacagatcatactcagattgttc

SEQ ID NO: 5609543 - DNA, 25 bp, Homo sapien
agcataggattagtcaaagagcaaa

SEQ ID NO: 5609544 - DNA, 25 bp, Homo sapien
ctttgaatgtggctcttaatttctc

SEQ ID NO: 5609545 - DNA, 25 bp, Homo sapien
gaaaggatataaagataccctgagg

SEQ ID NO: 5609546 - DNA, 25 bp, Homo sapien
aacaaaaacagcataggattagtca

SEQ ID NO: 5609547 - DNA, 25 bp, Homo sapien
ctactaaacattgagagcaagaacc

SEQ ID NO: 5609548 - DNA, 25 bp, Homo sapien
gttctgttgtgtggcaaatttgtcc

SEQ ID NO: 5609549 - DNA, 25 bp, Homo sapien
agtcaaagagcaaaagtgataatat

SEQ ID NO: 5609550 - DNA, 25 bp, Homo sapien
aagttgtacaatctgttaccttggc

SEQ ID NO: 5609551 - DNA, 25 bp, Homo sapien
acattgagagcaagaaccattgcgg

SEQ ID NO: 5609552 - DNA, 25 bp, Homo sapien
tataactatctcatgctctgcagga

SEQ ID NO: 5609553 - DNA, 25 bp, Homo sapien
tctcgcagccgtatagtagtagtag

SEQ ID NO: 5609554 - DNA, 25 bp, Homo sapien
ttctgtcgtcttctcgcagccgtat

SEQ ID NO: 5609555 - DNA, 25 bp, Homo sapien
gtgcaagagcaaaataaaatttgtt

SEQ ID NO: 5609556 - DNA, 25 bp, Homo sapien
ctcatgctctgcaggaacctctacc

SEQ ID NO: 5609557 - DNA, 25 bp, Homo sapien
tcagttggattgtccactgcaatta

SEQ ID NO: 5609558 - DNA, 25 bp, Homo sapien
attgtccactgcaattaagctgtgc

SEQ ID NO: 5609559 - DNA, 25 bp, Homo sapien
gcaattaagctgtgcaagagcaaaa

SEQ ID NO: 5609560 - DNA, 25 bp, Homo sapien
cactgcaattaagctgtgcaagagc

SEQ ID NO: 5609561 - DNA, 25 bp, Homo sapien
ctatctcatgctctgcaggaacctc

SEQ ID NO: 5609562 - DNA, 25 bp, Homo sapien
tgctctgcaggaacctctacccttc

SEQ ID NO: 5609563 - DNA, 25 bp, Homo sapien
atgtatgtgacaatagttggtaaaa

SEQ ID NO: 5609564 - DNA, 25 bp, Homo sapien
tgctagtatataactccaggtaaga

SEQ ID NO: 5609565 - DNA, 25 bp, Homo sapien
gaagtatcttctgtgtgtccatatg

SEQ ID NO: 5609566 - DNA, 25 bp, Homo sapien
tatatgtatgtgacaatagttggta

SEQ ID NO: 5609567 - DNA, 25 bp, Homo sapien
gtgtgtccatatgtctatatgcgtt

SEQ ID NO: 5609568 - DNA, 25 bp, Homo sapien
tatataactccaggtaagaagtatc

SEQ ID NO: 5609569 - DNA, 25 bp, Homo sapien
gaaaatattgctagtatataactcc

SEQ ID NO: 5609570 - DNA, 25 bp, Homo sapien
tgcgttatatgtatgtgacaatagt

SEQ ID NO: 5609571 - DNA, 25 bp, Homo sapien
tctatatgcgttatatgtatgtgac

SEQ ID NO: 5609572 - DNA, 25 bp, Homo sapien
atgtgacaatagttggtaaaaaaaa

SEQ ID NO: 5609573 - DNA, 25 bp, Homo sapien
ataactccaggtaagaagtatcttc

SEQ ID NO: 5609574 - DNA, 25 bp, Homo sapien
atatagacatatggacacacagaag

SEQ ID NO: 5609575 - DNA, 25 bp, Homo sapien
aacgcatatagacatatggacacac

SEQ ID NO: 5609576 - DNA, 25 bp, Homo sapien
gacatatggacacacagaagatact

SEQ ID NO: 5609577 - DNA, 25 bp, Homo sapien
ataacgcatatagacatatggacac

SEQ ID NO: 5609578 - DNA, 25 bp, Homo sapien
atacatataacgcatatagacatat

SEQ ID NO: 5609579 - DNA, 25 bp, Homo sapien
atagacatatggacacacagaagat

SEQ ID NO: 5609580 - DNA, 25 bp, Homo sapien
ttttaccaactattgtcacatacat

SEQ ID NO: 5609581 - DNA, 25 bp, Homo sapien
gaagatacttcttacctggagttat

SEQ ID NO: 5609582 - DNA, 25 bp, Homo sapien
agacatatggacacacagaagatac

SEQ ID NO: 5609583 - DNA, 25 bp, Homo sapien
attgtcacatacatataacgcatat

SEQ ID NO: 5609584 - DNA, 25 bp, Homo sapien
cctggagttatatactagcaatatt

SEQ ID NO: 5609585 - DNA, 25 bp, Homo sapien
tgcagagcatgagatagttatagag

SEQ ID NO: 5609586 - DNA, 25 bp, Homo sapien
agagcatgagatagttatagagaaa

SEQ ID NO: 5609587 - DNA, 25 bp, Homo sapien
acagcttaattgcagtggacaatcc

SEQ ID NO: 5609588 - DNA, 25 bp, Homo sapien
taattgcagtggacaatccaactga

SEQ ID NO: 5609589 - DNA, 25 bp, Homo sapien
gctcttgcacagcttaattgcagtg

SEQ ID NO: 5609590 - DNA, 25 bp, Homo sapien
ggttcctgcagagcatgagatagtt

SEQ ID NO: 5609591 - DNA, 25 bp, Homo sapien
gcttaattgcagtggacaatccaac

SEQ ID NO: 5609592 - DNA, 25 bp, Homo sapien
gatagttatagagaaacaaacaaac

SEQ ID NO: 5609593 - DNA, 25 bp, Homo sapien
agaggttcctgcagagcatgagata

SEQ ID NO: 5609594 - DNA, 25 bp, Homo sapien
tcctgcagagcatgagatagttata

SEQ ID NO: 5609595 - DNA, 25 bp, Homo sapien
ttgcacagcttaattgcagtggaca

SEQ ID NO: 5609596 - DNA, 25 bp, Homo sapien
ctaggcgaagcctttcctcctctgc

SEQ ID NO: 5609597 - DNA, 25 bp, Homo sapien
gccgtatagtagtagtaggcggccg

SEQ ID NO: 5609598 - DNA, 25 bp, Homo sapien
cgtcttctcgcagccgtatagtagt

SEQ ID NO: 5609599 - DNA, 25 bp, Homo sapien
ctcttctaggcgaagcctttcctcc

SEQ ID NO: 5609600 - DNA, 25 bp, Homo sapien
cttcttcctgctttcgggcttcctc

SEQ ID NO: 5609601 - DNA, 25 bp, Homo sapien
tgctttcgggcttcctcttctaggc

SEQ ID NO: 5609602 - DNA, 25 bp, Homo sapien
tctctccagcctatcttgttcttcc

SEQ ID NO: 5609603 - DNA, 25 bp, Homo sapien
ttctgtcgtcttctcgcagccgtat

SEQ ID NO: 5609604 - DNA, 25 bp, Homo sapien
ctcgcagccgtatagtagtagtagg

SEQ ID NO: 5609605 - DNA, 25 bp, Homo sapien
ttccttctccagtcgttcttgcccc

SEQ ID NO: 5609606 - DNA, 25 bp, Homo sapien
tccagtcgttcttgccccttctgtc

SEQ ID NO: 5609607 - DNA, 25 bp, Homo sapien
gcagtctttttaggctgggaggcga

SEQ ID NO: 5609608 - DNA, 25 bp, Homo sapien
gttgttccgagcttgatccagagag

SEQ ID NO: 5609609 - DNA, 25 bp, Homo sapien
attggcatcatacctgaggattgtc

SEQ ID NO: 5609610 - DNA, 25 bp, Homo sapien
agggaagacctcatgaaatattaaa

SEQ ID NO: 5609611 - DNA, 25 bp, Homo sapien
ttgtacgtgcctgtgaaaaaaggaa

SEQ ID NO: 5609612 - DNA, 25 bp, Homo sapien
tgtcaggattttgaaagtgtgggat

SEQ ID NO: 5609613 - DNA, 25 bp, Homo sapien
aaaggaaacattaataattggcatc

SEQ ID NO: 5609614 - DNA, 25 bp, Homo sapien
gaaagtcctctgaattgtacgtgcc

SEQ ID NO: 5609615 - DNA, 25 bp, Homo sapien
tttcaaggaacagtcatgcctattt

SEQ ID NO: 5609616 - DNA, 25 bp, Homo sapien
aggcgagttcaagagctgtttgttg

SEQ ID NO: 5609617 - DNA, 25 bp, Homo sapien
tttctcacagacaaggctggcagtg

SEQ ID NO: 5609618 - DNA, 25 bp, Homo sapien
ggactgctcgccaaggctaaggtaa

SEQ ID NO: 5609619 - DNA, 25 bp, Homo sapien
acagcactttttagttagggagagg

SEQ ID NO: 5609620 - DNA, 25 bp, Homo sapien
caaggctaaggtaattagttgtgtt

SEQ ID NO: 5609621 - DNA, 25 bp, Homo sapien
gtgtatgctcttatagaagtccacc

SEQ ID NO: 5609622 - DNA, 25 bp, Homo sapien
gagggttggttctgaactaccagta

SEQ ID NO: 5609623 - DNA, 25 bp, Homo sapien
tctgtgaatgctgggaacagcacag

SEQ ID NO: 5609624 - DNA, 25 bp, Homo sapien
tccagttttagaaagagcaagtgaa

SEQ ID NO: 5609625 - DNA, 25 bp, Homo sapien
tggcacttgtgcagtctctgtgaat

SEQ ID NO: 5609626 - DNA, 25 bp, Homo sapien
tcagaccctgctgtagagtttagac

SEQ ID NO: 5609627 - DNA, 25 bp, Homo sapien
atgacataatcaagccccctcccca

SEQ ID NO: 5609628 - DNA, 25 bp, Homo sapien
gagaggaagcccagttgcatttcta

SEQ ID NO: 5609629 - DNA, 25 bp, Homo sapien
tggtgcttactaggccaggtacctc

SEQ ID NO: 5609630 - DNA, 25 bp, Homo sapien
tagaaataatagcacttgtatggtg

SEQ ID NO: 5609631 - DNA, 25 bp, Homo sapien
gagcctccgcgcccacccatcttga

SEQ ID NO: 5609632 - DNA, 25 bp, Homo sapien
ttgtatggtgcttactaggccaggt

SEQ ID NO: 5609633 - DNA, 25 bp, Homo sapien
gtgagtcatcacgccctgctgcttc

SEQ ID NO: 5609634 - DNA, 25 bp, Homo sapien
gggattaaaggtgagtcatcacgcc

SEQ ID NO: 5609635 - DNA, 25 bp, Homo sapien
taaaggtgagtcatcacgccctgct

SEQ ID NO: 5609636 - DNA, 25 bp, Homo sapien
tcccggactcaagggattgtcctgc

SEQ ID NO: 5609637 - DNA, 25 bp, Homo sapien
ctccgcgcccacccatcttgacatc

SEQ ID NO: 5609638 - DNA, 25 bp, Homo sapien
cctcccggactcaagggattgtcct

SEQ ID NO: 5609639 - DNA, 25 bp, Homo sapien
actaggccaggtacctcaaacatat

SEQ ID NO: 5609640 - DNA, 25 bp, Homo sapien
tgagagctttccaacccaaggtcag

SEQ ID NO: 5609641 - DNA, 25 bp, Homo sapien
atgcagactgggacaatgtcactat

SEQ ID NO: 5609642 - DNA, 25 bp, Homo sapien
aactgagacatgagagctttccaac

SEQ ID NO: 5609643 - DNA, 25 bp, Homo sapien
aacaatttggtaatgcagactggga

SEQ ID NO: 5609644 - DNA, 25 bp, Homo sapien
cctgaaaataagtcatataaggtac

SEQ ID NO: 5609645 - DNA, 25 bp, Homo sapien
caaggtcagaaatcactgaaacagc

SEQ ID NO: 5609646 - DNA, 25 bp, Homo sapien
tggtggcttcacatggcccaggcaa

SEQ ID NO: 5609647 - DNA, 25 bp, Homo sapien
cttctcagaataatgggacaatatg

SEQ ID NO: 5609648 - DNA, 25 bp, Homo sapien
aacagcttatgaaaccctcactatt

SEQ ID NO: 5609649 - DNA, 25 bp, Homo sapien
acccactgaggtaactgagacatga

SEQ ID NO: 5609650 - DNA, 25 bp, Homo sapien
tgacgtaaatgataatggtggcttc

SEQ ID NO: 5609651 - DNA, 25 bp, Homo sapien
ctcagggaaatggacaacattctcc

SEQ ID NO: 5609652 - DNA, 25 bp, Homo sapien
atctgtaccgctcaggagatacacg

SEQ ID NO: 5609653 - DNA, 25 bp, Homo sapien
aatcctggcaaaatgcctgggagtc

SEQ ID NO: 5609654 - DNA, 25 bp, Homo sapien
tcactagacattgcactgtgtagga

SEQ ID NO: 5609655 - DNA, 25 bp, Homo sapien
aaaaagagcaaaattatgaaactgt

SEQ ID NO: 5609656 - DNA, 25 bp, Homo sapien
tcccatgtaatcctggcaaaatgcc

SEQ ID NO: 5609657 - DNA, 25 bp, Homo sapien
cctgggagtcaggtatcatccacat

SEQ ID NO: 5609658 - DNA, 25 bp, Homo sapien
caaatccagactaggtctgtctgac

SEQ ID NO: 5609659 - DNA, 25 bp, Homo sapien
gcaaaatgcctgggagtcaggtatc

SEQ ID NO: 5609660 - DNA, 25 bp, Homo sapien
attgcactgtgtaggaatcccatgt

SEQ ID NO: 5609661 - DNA, 25 bp, Homo sapien
tgccaggcattgggccaaatgcttt

SEQ ID NO: 5609662 - DNA, 25 bp, Homo sapien
tttgagtaaaggattatctagaatc

SEQ ID NO: 5609663 - DNA, 25 bp, Homo sapien
tgacaacataaaagttagataactc

SEQ ID NO: 5609664 - DNA, 25 bp, Homo sapien
ttagacaactacctggcacaatttc

SEQ ID NO: 5609665 - DNA, 25 bp, Homo sapien
atagaatgctgaatatcatccacat

SEQ ID NO: 5609666 - DNA, 25 bp, Homo sapien
aaggaaattcatagatagaatgctg

SEQ ID NO: 5609667 - DNA, 25 bp, Homo sapien
aaacataagatccagaatgactagc

SEQ ID NO: 5609668 - DNA, 25 bp, Homo sapien
tagataactcttaatgatgtgaatc

SEQ ID NO: 5609669 - DNA, 25 bp, Homo sapien
atctgaacaatggaagttaaacttc

SEQ ID NO: 5609670 - DNA, 25 bp, Homo sapien
tgctaagagcatgtcaaaaagtaaa

SEQ ID NO: 5609671 - DNA, 25 bp, Homo sapien
aagtaaaaacaaagccataagattc

SEQ ID NO: 5609672 - DNA, 25 bp, Homo sapien
acaccacctctccccccccaatctg

SEQ ID NO: 5609673 - DNA, 25 bp, Homo sapien
gcccatgccacaaggcctggataat

SEQ ID NO: 5609674 - DNA, 25 bp, Homo sapien
gctttgaataagagagtttggtaag

SEQ ID NO: 5609675 - DNA, 25 bp, Homo sapien
tgggctcaagtgatctgcctgcatt

SEQ ID NO: 5609676 - DNA, 25 bp, Homo sapien
atgggtacagatcaatataataata

SEQ ID NO: 5609677 - DNA, 25 bp, Homo sapien
tctctctgtagcccaggttggagcg

SEQ ID NO: 5609678 - DNA, 25 bp, Homo sapien
atgggaacacaggcccatgccacaa

SEQ ID NO: 5609679 - DNA, 25 bp, Homo sapien
tcagcctcctgagtcatgggaacac

SEQ ID NO: 5609680 - DNA, 25 bp, Homo sapien
ttggtaaggtttatgggtacagatc

SEQ ID NO: 5609681 - DNA, 25 bp, Homo sapien
caggctagtatcaaactcctgggct

SEQ ID NO: 5609682 - DNA, 25 bp, Homo sapien
gcccactgcagccttggtctcccgg

SEQ ID NO: 5609683 - DNA, 25 bp, Homo sapien
ccatgcctggccaatagttaaaaat

SEQ ID NO: 5609684 - DNA, 25 bp, Homo sapien
aggatcctaaagaatgtggaacaaa

SEQ ID NO: 5609685 - DNA, 25 bp, Homo sapien
atgaaaatgaggaccacataccagg

SEQ ID NO: 5609686 - DNA, 25 bp, Homo sapien
gtggaacaaaacctacatcagccct

SEQ ID NO: 5609687 - DNA, 25 bp, Homo sapien
tctgtgcatgaattttctggccacc

SEQ ID NO: 5609688 - DNA, 25 bp, Homo sapien
tactaaaaggttgtgaatgctctac

SEQ ID NO: 5609689 - DNA, 25 bp, Homo sapien
acagagaactaaactcctaactggt

SEQ ID NO: 5609690 - DNA, 25 bp, Homo sapien
gtttagatattgtttcgcagacttc

SEQ ID NO: 5609691 - DNA, 25 bp, Homo sapien
catcagccctggactgcctctggtt

SEQ ID NO: 5609692 - DNA, 25 bp, Homo sapien
agacttctgcaacaggaacatcatt

SEQ ID NO: 5609693 - DNA, 25 bp, Homo sapien
aaatggtaactggagctctagctct

SEQ ID NO: 5609694 - DNA, 25 bp, Homo sapien
agggagcctaggatcctaaagaatg

SEQ ID NO: 5609695 - DNA, 25 bp, Homo sapien
ttagatacagaaggtacatgtgcag

SEQ ID NO: 5609696 - DNA, 25 bp, Homo sapien
tgttggtaaaaaaatgctaatgatc

SEQ ID NO: 5609697 - DNA, 25 bp, Homo sapien
tgactttccagtgcatgtctgccat

SEQ ID NO: 5609698 - DNA, 25 bp, Homo sapien
aaatgctaatgatcatctgggcctt

SEQ ID NO: 5609699 - DNA, 25 bp, Homo sapien
ttgggtggctgtggcatttcttttt

SEQ ID NO: 5609700 - DNA, 25 bp, Homo sapien
gtcaggacatgcagacacatgactt

SEQ ID NO: 5609701 - DNA, 25 bp, Homo sapien
tcacccacctgactatatgccttta

SEQ ID NO: 5609702 - DNA, 25 bp, Homo sapien
gaccaaaaaatctttcaggatagtc

SEQ ID NO: 5609703 - DNA, 25 bp, Homo sapien
atatgggtatattgctgtctctgac

SEQ ID NO: 5609704 - DNA, 25 bp, Homo sapien
caggatagtctatcacccacctgac

SEQ ID NO: 5609705 - DNA, 25 bp, Homo sapien
tgcctttatccgtgtcaggacatgc

SEQ ID NO: 5609706 - DNA, 25 bp, Homo sapien
aaggcaggataatgatgtagccatt

SEQ ID NO: 5609707 - DNA, 25 bp, Homo sapien
ataaaaatctgtacaggtaaggatt

SEQ ID NO: 5609708 - DNA, 25 bp, Homo sapien
aaggtacccaccacaatacataaac

SEQ ID NO: 5609709 - DNA, 25 bp, Homo sapien
caggtaaggattatctaaaaggtgt

SEQ ID NO: 5609710 - DNA, 25 bp, Homo sapien
agaacaaaattgtgctttgaggttt

SEQ ID NO: 5609711 - DNA, 25 bp, Homo sapien
tatgctttcaaaggtgatagtttcc

SEQ ID NO: 5609712 - DNA, 25 bp, Homo sapien
gtgacaacacaagcctagacctcca

SEQ ID NO: 5609713 - DNA, 25 bp, Homo sapien
taaactggatatatcagaacaaaat

SEQ ID NO: 5609714 - DNA, 25 bp, Homo sapien
aaagtgacagctaattccacaagac

SEQ ID NO: 5609715 - DNA, 25 bp, Homo sapien
caatgacatcattatacggcaattt

SEQ ID NO: 5609716 - DNA, 25 bp, Homo sapien
gtgtgttccaaagtaagccaactac

SEQ ID NO: 5609717 - DNA, 25 bp, Homo sapien
ttagaggttcgaaggaatatgagta

SEQ ID NO: 5609718 - DNA, 25 bp, Homo sapien
ccagggagactagtgcctgccttaa

SEQ ID NO: 5609719 - DNA, 25 bp, Homo sapien
ttggtatggcaagctacactgagag

SEQ ID NO: 5609720 - DNA, 25 bp, Homo sapien
atggctccttaagaggtcaggcgtt

SEQ ID NO: 5609721 - DNA, 25 bp, Homo sapien
cacccagtgatggtgctgggattgg

SEQ ID NO: 5609722 - DNA, 25 bp, Homo sapien
tgtggctaggattaccaaagctgcc

SEQ ID NO: 5609723 - DNA, 25 bp, Homo sapien
gcctttggtggtggatcactcaccc

SEQ ID NO: 5609724 - DNA, 25 bp, Homo sapien
tgccttaacccaagtaactggagaa

SEQ ID NO: 5609725 - DNA, 25 bp, Homo sapien
gtggagcaagcacaaccttgagcta

SEQ ID NO: 5609726 - DNA, 25 bp, Homo sapien
tttaacctattgagtggagcaagca

SEQ ID NO: 5609727 - DNA, 25 bp, Homo sapien
atgatggccattattaagaggcttg

SEQ ID NO: 5609728 - DNA, 25 bp, Homo sapien
gcttctacggcttgggctgtcgccg

SEQ ID NO: 5609729 - DNA, 25 bp, Homo sapien
gcagcggacactgcgacttccagtc

SEQ ID NO: 5609730 - DNA, 25 bp, Homo sapien
gccaccggtttctatggcgagggct

SEQ ID NO: 5609731 - DNA, 25 bp, Homo sapien
gtaaccatgtcaccggcaagtgtac

SEQ ID NO: 5609732 - DNA, 25 bp, Homo sapien
ggctaccgcggcaagtactgtcgcg

SEQ ID NO: 5609733 - DNA, 25 bp, Homo sapien
accagccttgcgccaccggtttcta

SEQ ID NO: 5609734 - DNA, 25 bp, Homo sapien
gccccactgtaacgtgacgtgcccg

SEQ ID NO: 5609735 - DNA, 25 bp, Homo sapien
cgtccacgggccccactgtaacgtg

SEQ ID NO: 5609736 - DNA, 25 bp, Homo sapien
gactgcgccttcgtgtgcgccgact

SEQ ID NO: 5609737 - DNA, 25 bp, Homo sapien
gagaccaagtgtagcaatggcactt

SEQ ID NO: 5609738 - DNA, 25 bp, Homo sapien
gccgtgccccgccggcttctacggc

SEQ ID NO: 5609739 - DNA, 25 bp, Homo sapien
ctcaggccggtcaagagtggtcgtt

SEQ ID NO: 5609740 - DNA, 25 bp, Homo sapien
aacgaccactcttgaccggcctgag

SEQ ID NO: 5609741 - DNA, 25 bp, Homo sapien
ccagttacatgggccaataaatctt

SEQ ID NO: 5609742 - DNA, 25 bp, Homo sapien
tcctcaacctcagaggtggcctggt

SEQ ID NO: 5609743 - DNA, 25 bp, Homo sapien
tccagccattcctaaaaccagtgtc

SEQ ID NO: 5609744 - DNA, 25 bp, Homo sapien
gagaggatgctctttagctgctagc

SEQ ID NO: 5609745 - DNA, 25 bp, Homo sapien
ccaataaatcttctaccccgctccc

SEQ ID NO: 5609746 - DNA, 25 bp, Homo sapien
gaggggaagatcaaaaatgcttgat

SEQ ID NO: 5609747 - DNA, 25 bp, Homo sapien
tagctgctagctataagaatgtcag

SEQ ID NO: 5609748 - DNA, 25 bp, Homo sapien
ttaccactatacagagaaaaggaga

SEQ ID NO: 5609749 - DNA, 25 bp, Homo sapien
atcacacagtcatgcctcctcaacc

SEQ ID NO: 5609750 - DNA, 25 bp, Homo sapien
aagaatgtcagcctagctttaccac

SEQ ID NO: 5609751 - DNA, 25 bp, Homo sapien
aaccagtgtcacaatttggctttcc

SEQ ID NO: 5609752 - DNA, 25 bp, Homo sapien
accattttgtggtgctggatatcca

SEQ ID NO: 5609753 - DNA, 25 bp, Homo sapien
gacaagagtggtataaaatgtacta

SEQ ID NO: 5609754 - DNA, 25 bp, Homo sapien
cttagcacatacagaattgactcat

SEQ ID NO: 5609755 - DNA, 25 bp, Homo sapien
accccacaaagtcaagcatagaaat

SEQ ID NO: 5609756 - DNA, 25 bp, Homo sapien
atgaacaaatagacaagagtggtat

SEQ ID NO: 5609757 - DNA, 25 bp, Homo sapien
agctatgaaaggataagacaactgt

SEQ ID NO: 5609758 - DNA, 25 bp, Homo sapien
atcctgaaaaaatgagcataaagct

SEQ ID NO: 5609759 - DNA, 25 bp, Homo sapien
gagcataaagctggacacaaattgt

SEQ ID NO: 5609760 - DNA, 25 bp, Homo sapien
cattaatatggggtaaagcaacttt

SEQ ID NO: 5609761 - DNA, 25 bp, Homo sapien
tcaagcatagaaattaaccacaacc

SEQ ID NO: 5609762 - DNA, 25 bp, Homo sapien
agaattgactcatggtaacgtatta

SEQ ID NO: 5609763 - DNA, 25 bp, Homo sapien
gacatgaatgaacatagagctgctc

SEQ ID NO: 5609764 - DNA, 25 bp, Homo sapien
atttagataaagggtgtagattgtc

SEQ ID NO: 5609765 - DNA, 25 bp, Homo sapien
gagttggcctacagtggtgctcaaa

SEQ ID NO: 5609766 - DNA, 25 bp, Homo sapien
tgtagattgtcactgctgggaaata

SEQ ID NO: 5609767 - DNA, 25 bp, Homo sapien
ttgaactaacacaggaaaaaagcac

SEQ ID NO: 5609768 - DNA, 25 bp, Homo sapien
acacaggaaaaaagcacatctcaat

SEQ ID NO: 5609769 - DNA, 25 bp, Homo sapien
cattgtggaatggatcagttgaact

SEQ ID NO: 5609770 - DNA, 25 bp, Homo sapien
atctcttgagagaaatgagtccatc

SEQ ID NO: 5609771 - DNA, 25 bp, Homo sapien
tgggaaatatttgctgggttaccca

SEQ ID NO: 5609772 - DNA, 25 bp, Homo sapien
agtggtgctcaaattggctcatctc

SEQ ID NO: 5609773 - DNA, 25 bp, Homo sapien
gggaggcaagaagagattctttgaa

SEQ ID NO: 5609774 - DNA, 25 bp, Homo sapien
gctagagaaacacccctgacacaga

SEQ ID NO: 5609775 - DNA, 25 bp, Homo sapien
gtatgaggaaaagtcaaccaccaca

SEQ ID NO: 5609776 - DNA, 25 bp, Homo sapien
gaataaatggagacctctgaaaggt

SEQ ID NO: 5609777 - DNA, 25 bp, Homo sapien
cagggtgcacatggctttgacttag

SEQ ID NO: 5609778 - DNA, 25 bp, Homo sapien
catagtaagcgaaaaccaaactgac

SEQ ID NO: 5609779 - DNA, 25 bp, Homo sapien
acacagaatgtggtcagtaatgttc

SEQ ID NO: 5609780 - DNA, 25 bp, Homo sapien
tataaaaattcagggtgcacatggc

SEQ ID NO: 5609781 - DNA, 25 bp, Homo sapien
gatgctacctaaatgggatcaatgt

SEQ ID NO: 5609782 - DNA, 25 bp, Homo sapien
gccttggctgcacctataaaaattc

SEQ ID NO: 5609783 - DNA, 25 bp, Homo sapien
ctgggttccatgctagagaaacacc

SEQ ID NO: 5609784 - DNA, 25 bp, Homo sapien
agccaaactatatgaacaaaagatt

SEQ ID NO: 5609785 - DNA, 25 bp, Homo sapien
cagcctatgctaacttatatgcaac

SEQ ID NO: 5609786 - DNA, 25 bp, Homo sapien
cagaatcagcatgaacagtcacata

SEQ ID NO: 5609787 - DNA, 25 bp, Homo sapien
taggttctatcaggccttaacagcc

SEQ ID NO: 5609788 - DNA, 25 bp, Homo sapien
tatctgctaaccaacacatagaatc

SEQ ID NO: 5609789 - DNA, 25 bp, Homo sapien
gatagcgcttggatctaaacacatt

SEQ ID NO: 5609790 - DNA, 25 bp, Homo sapien
gtttgagagggctagtatcccttgc

SEQ ID NO: 5609791 - DNA, 25 bp, Homo sapien
tcccaacattgatagcgcttggatc

SEQ ID NO: 5609792 - DNA, 25 bp, Homo sapien
gcaactgtcaaattaatcgaagatc

SEQ ID NO: 5609793 - DNA, 25 bp, Homo sapien
caaaagaggattccaataactcaac

SEQ ID NO: 5609794 - DNA, 25 bp, Homo sapien
aagaaagacaggaacataatctttt

SEQ ID NO: 5609795 - DNA, 25 bp, Homo sapien
ccaacacatagaatcaaaagaggat

SEQ ID NO: 5609796 - DNA, 25 bp, Homo sapien
aaatgtgggttgtgtcttcttccca

SEQ ID NO: 5609797 - DNA, 25 bp, Homo sapien
ggtgcccgagagtccattcccaaat

SEQ ID NO: 5609798 - DNA, 25 bp, Homo sapien
tgcgtggccatattgtaatcagaca

SEQ ID NO: 5609799 - DNA, 25 bp, Homo sapien
gatcctgagcaggcgcttcaggtgc

SEQ ID NO: 5609800 - DNA, 25 bp, Homo sapien
ggcctgatcctgagcaggcgcttca

SEQ ID NO: 5609801 - DNA, 25 bp, Homo sapien
ggcgagggactctcctcacagagaa

SEQ ID NO: 5609802 - DNA, 25 bp, Homo sapien
attcatgtccaggtgccggcctgat

SEQ ID NO: 5609803 - DNA, 25 bp, Homo sapien
ccattcccaaatctgaagaaggggc

SEQ ID NO: 5609804 - DNA, 25 bp, Homo sapien
agaaaaagctgcgtggccatattgt

SEQ ID NO: 5609805 - DNA, 25 bp, Homo sapien
tgtttgggattcatgtccaggtgcc

SEQ ID NO: 5609806 - DNA, 25 bp, Homo sapien
ttcccaaatctgaagaaggggcgag

SEQ ID NO: 5609807 - DNA, 25 bp, Homo sapien
atttaattgacttagacctaaagac

SEQ ID NO: 5609808 - DNA, 25 bp, Homo sapien
gtctttaggtctaagtcaattaaat

SEQ ID NO: 5609809 - DNA, 25 bp, Homo sapien
acatatcgcgtgtgctatgagcatc

SEQ ID NO: 5609810 - DNA, 25 bp, Homo sapien
taagttgtaattcacttggaggttc

SEQ ID NO: 5609811 - DNA, 25 bp, Homo sapien
ctagacagatgtaaaagacttcagt

SEQ ID NO: 5609812 - DNA, 25 bp, Homo sapien
aagcagaattcaaatctagacagat

SEQ ID NO: 5609813 - DNA, 25 bp, Homo sapien
tcttcaggatttaacaagtcaaaat

SEQ ID NO: 5609814 - DNA, 25 bp, Homo sapien
aaagattgttaaaggctgggtcaag

SEQ ID NO: 5609815 - DNA, 25 bp, Homo sapien
cacctctattagaaggggaaagaaa

SEQ ID NO: 5609816 - DNA, 25 bp, Homo sapien
tactcctgccagattgaaaattcta

SEQ ID NO: 5609817 - DNA, 25 bp, Homo sapien
catcaatgatagaataagttgtaat

SEQ ID NO: 5609818 - DNA, 25 bp, Homo sapien
tggaggttccatctttcaaagtaag

SEQ ID NO: 5609819 - DNA, 25 bp, Homo sapien
taaaaatatataataggctgaattc

SEQ ID NO: 5609820 - DNA, 25 bp, Homo sapien
aaattagagaatcagctgaagaata

SEQ ID NO: 5609821 - DNA, 25 bp, Homo sapien
agggattagtataatgaagaccttc

SEQ ID NO: 5609822 - DNA, 25 bp, Homo sapien
agccagcaacaccaactagggatta

SEQ ID NO: 5609823 - DNA, 25 bp, Homo sapien
gaaagaactgagaatcctaagataa

SEQ ID NO: 5609824 - DNA, 25 bp, Homo sapien
tgactgagagtcacagctccagaaa

SEQ ID NO: 5609825 - DNA, 25 bp, Homo sapien
acacagatgtatggaatgaccagtt

SEQ ID NO: 5609826 - DNA, 25 bp, Homo sapien
agcataaacatgggatgacaatagt

SEQ ID NO: 5609827 - DNA, 25 bp, Homo sapien
ggcctaagcattgactgactgagag

SEQ ID NO: 5609828 - DNA, 25 bp, Homo sapien
gaagctgggaattctagaatgtttg

SEQ ID NO: 5609829 - DNA, 25 bp, Homo sapien
caaagggtgtttggtgccatctact

SEQ ID NO: 5609830 - DNA, 25 bp, Homo sapien
gctgaagaatagaccatgttcgttc

SEQ ID NO: 5609831 - DNA, 25 bp, Homo sapien
atggcagtgtatagggatatcactg

SEQ ID NO: 5609832 - DNA, 25 bp, Homo sapien
caacacaagtgcccagagtatgaat

SEQ ID NO: 5609833 - DNA, 25 bp, Homo sapien
ttaagttccacagcaacagaaaaac

SEQ ID NO: 5609834 - DNA, 25 bp, Homo sapien
cacaaaaagtgattcgtaaaatacc

SEQ ID NO: 5609835 - DNA, 25 bp, Homo sapien
tcaattcactgggtggtggaagttg

SEQ ID NO: 5609836 - DNA, 25 bp, Homo sapien
gtggaagttgaaattcatggcaagc

SEQ ID NO: 5609837 - DNA, 25 bp, Homo sapien
cactgaattcagtcctacgtgcgca

SEQ ID NO: 5609838 - DNA, 25 bp, Homo sapien
tatgcaccaattgttaaataggtct

SEQ ID NO: 5609839 - DNA, 25 bp, Homo sapien
ctttcccgagaagcaaatatacctt

SEQ ID NO: 5609840 - DNA, 25 bp, Homo sapien
aatgttaacacagtagcagcaaatg

SEQ ID NO: 5609841 - DNA, 25 bp, Homo sapien
aagtgcccagagtatgaatggaagt

SEQ ID NO: 5609842 - DNA, 25 bp, Homo sapien
catgttaaaaacgaccaagacttgt

SEQ ID NO: 5609843 - DNA, 25 bp, Homo sapien
ctaaggagccatgttaaaaacgacc

SEQ ID NO: 5609844 - DNA, 25 bp, Homo sapien
taaagcacatgtactgtctgtccag

SEQ ID NO: 5609845 - DNA, 25 bp, Homo sapien
tgtcactcctgcgtagtgcaaacac

SEQ ID NO: 5609846 - DNA, 25 bp, Homo sapien
tgctgccttgaatacaaagcatttc

SEQ ID NO: 5609847 - DNA, 25 bp, Homo sapien
gtctgtccagattacctctgctgcc

SEQ ID NO: 5609848 - DNA, 25 bp, Homo sapien
gttcaactagcaacaaagatggccc

SEQ ID NO: 5609849 - DNA, 25 bp, Homo sapien
cctcccaaattagaggcgcgagcca

SEQ ID NO: 5609850 - DNA, 25 bp, Homo sapien
aattaaaatgcaggacttcatctac

SEQ ID NO: 5609851 - DNA, 25 bp, Homo sapien
gcaacaaagatggcccctaacgctg

SEQ ID NO: 5609852 - DNA, 25 bp, Homo sapien
acttcagaaaataccctaaggagcc

SEQ ID NO: 5609853 - DNA, 25 bp, Homo sapien
ggaaaagtcatgatcctcagatgta

SEQ ID NO: 5609854 - DNA, 25 bp, Homo sapien
gtatagtacgcatcaaggcaacaga

SEQ ID NO: 5609855 - DNA, 25 bp, Homo sapien
ctcatgcaaacagtaacaaactacc

SEQ ID NO: 5609856 - DNA, 25 bp, Homo sapien
gtgtgaaacgaactctgtagaaacc

SEQ ID NO: 5609857 - DNA, 25 bp, Homo sapien
aaagattgagacatacatggtttcc

SEQ ID NO: 5609858 - DNA, 25 bp, Homo sapien
cacatggaaatattggcgtataatt

SEQ ID NO: 5609859 - DNA, 25 bp, Homo sapien
ggagggtgaacaataaacactacca

SEQ ID NO: 5609860 - DNA, 25 bp, Homo sapien
actacctttagtgtgaaacgaactc

SEQ ID NO: 5609861 - DNA, 25 bp, Homo sapien
caaggcaacagaatacacatggaaa

SEQ ID NO: 5609862 - DNA, 25 bp, Homo sapien
aacagcagatgaattttataccaag

SEQ ID NO: 5609863 - DNA, 25 bp, Homo sapien
ccaagatctccaagaaaggaggaaa

SEQ ID NO: 5609864 - DNA, 25 bp, Homo sapien
aaagtccaagggtctgtcatgaacc

SEQ ID NO: 5609865 - DNA, 25 bp, Homo sapien
tattactgaaccaagccaacaaagg

SEQ ID NO: 5609866 - DNA, 25 bp, Homo sapien
tctcaataaaacatgtccaactctc

SEQ ID NO: 5609867 - DNA, 25 bp, Homo sapien
gtccaactctccagatagtggtgac

SEQ ID NO: 5609868 - DNA, 25 bp, Homo sapien
gacagcatgaatatgtgtgccatct

SEQ ID NO: 5609869 - DNA, 25 bp, Homo sapien
agatagtggtgacattttcagcttg

SEQ ID NO: 5609870 - DNA, 25 bp, Homo sapien
aaccaagccaacaaaggtgttcata

SEQ ID NO: 5609871 - DNA, 25 bp, Homo sapien
aaaatacagaattaagtcatttgac

SEQ ID NO: 5609872 - DNA, 25 bp, Homo sapien
ggtgttcataacagatccagagaaa

SEQ ID NO: 5609873 - DNA, 25 bp, Homo sapien
aagggtctgtcatgaaccgggttag

SEQ ID NO: 5609874 - DNA, 25 bp, Homo sapien
cagatccagagaaaaaaaatacatt

SEQ ID NO: 5609875 - DNA, 25 bp, Homo sapien
attcagaaaacatgtccactgcaat

SEQ ID NO: 5609876 - DNA, 25 bp, Homo sapien
tgtaggtgtggttttcaaagactcc

SEQ ID NO: 5609877 - DNA, 25 bp, Homo sapien
atccagtctctctaagccgagcaac

SEQ ID NO: 5609878 - DNA, 25 bp, Homo sapien
aagccgagcaactttgtaggtgtgg

SEQ ID NO: 5609879 - DNA, 25 bp, Homo sapien
tagaactcaatcctatggacaagtt

SEQ ID NO: 5609880 - DNA, 25 bp, Homo sapien
agtgactaatattacaagcagcatc

SEQ ID NO: 5609881 - DNA, 25 bp, Homo sapien
aatgcagaaccaaaaagagtagtgt

SEQ ID NO: 5609882 - DNA, 25 bp, Homo sapien
aataagaaatatgaagaagtgccta

SEQ ID NO: 5609883 - DNA, 25 bp, Homo sapien
ggtcacccgcactgagtcaacagac

SEQ ID NO: 5609884 - DNA, 25 bp, Homo sapien
gaaaaagaaatgttaacatccagtc

SEQ ID NO: 5609885 - DNA, 25 bp, Homo sapien
tgaagaagtgcctaatatagaactc

SEQ ID NO: 5609886 - DNA, 25 bp, Homo sapien
tgagccggtacaggccatacatcat

SEQ ID NO: 5609887 - DNA, 25 bp, Homo sapien
ttgctgagggttattagacaatgcc

SEQ ID NO: 5609888 - DNA, 25 bp, Homo sapien
cactgtatcagaatttggactagcc

SEQ ID NO: 5609889 - DNA, 25 bp, Homo sapien
gtaatagccatatctgaacagcagc

SEQ ID NO: 5609890 - DNA, 25 bp, Homo sapien
aaatagtgtccaaatgccctgagcc

SEQ ID NO: 5609891 - DNA, 25 bp, Homo sapien
tcttcaataagctgtgcgattggtt

SEQ ID NO: 5609892 - DNA, 25 bp, Homo sapien
aggcaagaaaacgagtgtgtcattg

SEQ ID NO: 5609893 - DNA, 25 bp, Homo sapien
ttccatcttttggggggtcagtcca

SEQ ID NO: 5609894 - DNA, 25 bp, Homo sapien
tcaatgtggagtcaatatgaaatat

SEQ ID NO: 5609895 - DNA, 25 bp, Homo sapien
gcacaggtctattattctccaggcc

SEQ ID NO: 5609896 - DNA, 25 bp, Homo sapien
atgaattattgaatgaagtacgtat

SEQ ID NO: 5609897 - DNA, 25 bp, Homo sapien
ccaacctctgcctggacaaagaaga

SEQ ID NO: 5609898 - DNA, 25 bp, Homo sapien
tcccggtgattgcaatgcggagtac

SEQ ID NO: 5609899 - DNA, 25 bp, Homo sapien
aagacggcagacatatttggctttt

SEQ ID NO: 5609900 - DNA, 25 bp, Homo sapien
agaagtaagcaatgagcagagcttc

SEQ ID NO: 5609901 - DNA, 25 bp, Homo sapien
tttggcttttgatgatggcaacagc

SEQ ID NO: 5609902 - DNA, 25 bp, Homo sapien
aaactccaggagactttgctttgct

SEQ ID NO: 5609903 - DNA, 25 bp, Homo sapien
acctgtcaatggaacagcaccagag

SEQ ID NO: 5609904 - DNA, 25 bp, Homo sapien
ggcaacagccaatgctagccatttc

SEQ ID NO: 5609905 - DNA, 25 bp, Homo sapien
ctcagtcccaagacggcagacatat

SEQ ID NO: 5609906 - DNA, 25 bp, Homo sapien
gattgcaatgcggagtacctgtcaa

SEQ ID NO: 5609907 - DNA, 25 bp, Homo sapien
agaggcaacaacagtagcatctgca

SEQ ID NO: 5609908 - DNA, 25 bp, Homo sapien
gggtcgtggcgagttctaggggtcg

SEQ ID NO: 5609909 - DNA, 25 bp, Homo sapien
cgacccctagaactcgccacgaccc

SEQ ID NO: 5609910 - DNA, 25 bp, Homo sapien
gtgctgggagtggtatacttactca

SEQ ID NO: 5609911 - DNA, 25 bp, Homo sapien
agagatggtggatgttaacaagtta

SEQ ID NO: 5609912 - DNA, 25 bp, Homo sapien
agcaaacatcatacaccagagactt

SEQ ID NO: 5609913 - DNA, 25 bp, Homo sapien
gttcctggtacatgagggaacccac

SEQ ID NO: 5609914 - DNA, 25 bp, Homo sapien
cgaaaaaaggtatcagtaaacagtg

SEQ ID NO: 5609915 - DNA, 25 bp, Homo sapien
actccagccctggtcattcagcttc

SEQ ID NO: 5609916 - DNA, 25 bp, Homo sapien
tggagtactacagagcgtgcattcc

SEQ ID NO: 5609917 - DNA, 25 bp, Homo sapien
gataaatcacacgggttagagaact

SEQ ID NO: 5609918 - DNA, 25 bp, Homo sapien
ggtcagacccagtgaaggtgctggg

SEQ ID NO: 5609919 - DNA, 25 bp, Homo sapien
gtttttagaggtcaaggaatcattc

SEQ ID NO: 5609920 - DNA, 25 bp, Homo sapien
gcttctaaatgcagtaggaaatgtc

SEQ ID NO: 5609921 - DNA, 25 bp, Homo sapien
cctagcttgaggtatggaatcaact

SEQ ID NO: 5609922 - DNA, 25 bp, Homo sapien
agagcataaatcactgtagggacag

SEQ ID NO: 5609923 - DNA, 25 bp, Homo sapien
aagccacaggcactaggtctacaaa

SEQ ID NO: 5609924 - DNA, 25 bp, Homo sapien
cagaacagataaagtctccttataa

SEQ ID NO: 5609925 - DNA, 25 bp, Homo sapien
cttccaacaggcagtggtttctctt

SEQ ID NO: 5609926 - DNA, 25 bp, Homo sapien
tttgcatcctatggacttgtgactc

SEQ ID NO: 5609927 - DNA, 25 bp, Homo sapien
tccgatgccctaatgaaaccctgct

SEQ ID NO: 5609928 - DNA, 25 bp, Homo sapien
aaaaatatccaagagcataaatcac

SEQ ID NO: 5609929 - DNA, 25 bp, Homo sapien
cttgaccgtcagctcagccatcctg

SEQ ID NO: 5609930 - DNA, 25 bp, Homo sapien
atggacttgtgactctccgatgccc

SEQ ID NO: 5609931 - DNA, 25 bp, Homo sapien
cagctcagccatcctgaaaccggct

SEQ ID NO: 5609932 - DNA, 25 bp, Homo sapien
tctggctgtgtccccacccaaaatc

SEQ ID NO: 5609933 - DNA, 25 bp, Homo sapien
tgccaccatgtgaaggatgtgtttg

SEQ ID NO: 5609934 - DNA, 25 bp, Homo sapien
gggcctcccagccatgcagaactct

SEQ ID NO: 5609935 - DNA, 25 bp, Homo sapien
aaaattcagatagtaaaaataaatc

SEQ ID NO: 5609936 - DNA, 25 bp, Homo sapien
gggcagtcccccagtgctgttctcc

SEQ ID NO: 5609937 - DNA, 25 bp, Homo sapien
ataatgagtgagttcccacgagatc

SEQ ID NO: 5609938 - DNA, 25 bp, Homo sapien
tgtgattcccaggtgctggggtgga

SEQ ID NO: 5609939 - DNA, 25 bp, Homo sapien
atgattataagtttcctggggcctc

SEQ ID NO: 5609940 - DNA, 25 bp, Homo sapien
aattgtaaaccaagttgtgattccc

SEQ ID NO: 5609941 - DNA, 25 bp, Homo sapien
gagtgagttcccacgagatctgatg

SEQ ID NO: 5609942 - DNA, 25 bp, Homo sapien
gaaatgatgatatggtctggctgtg

SEQ ID NO: 5609943 - DNA, 25 bp, Homo sapien
gtccgaccccgtaactatgcgaaag

SEQ ID NO: 5609944 - DNA, 25 bp, Homo sapien
ctttcgcatagttacggggtcggac

SEQ ID NO: 5609945 - DNA, 25 bp, Homo sapien
ggaactcaggtgatggcaaaagtta

SEQ ID NO: 5609946 - DNA, 25 bp, Homo sapien
atggcaaaagttagaatgaggaatg

SEQ ID NO: 5609947 - DNA, 25 bp, Homo sapien
tctttaaagatgtgcaccctggtgc

SEQ ID NO: 5609948 - DNA, 25 bp, Homo sapien
ggaatgccaggaggaataatactaa

SEQ ID NO: 5609949 - DNA, 25 bp, Homo sapien
tcataaagtgctacagtcgataaaa

SEQ ID NO: 5609950 - DNA, 25 bp, Homo sapien
ttgaaggcaagcagcataaatgtct

SEQ ID NO: 5609951 - DNA, 25 bp, Homo sapien
taactttgaaccactgccatagctt

SEQ ID NO: 5609952 - DNA, 25 bp, Homo sapien
tcaacttgaacacaggattcccatc

SEQ ID NO: 5609953 - DNA, 25 bp, Homo sapien
gaaaagggagacagtctaatattcc

SEQ ID NO: 5609954 - DNA, 25 bp, Homo sapien
ttgtaggttactagttaggcttcat

SEQ ID NO: 5609955 - DNA, 25 bp, Homo sapien
catcaataaagtgtggccatcccat

SEQ ID NO: 5609956 - DNA, 25 bp, Homo sapien
aagagacctacctgaagaaaatttg

SEQ ID NO: 5609957 - DNA, 25 bp, Homo sapien
caaatgccaactctctggggggctg

SEQ ID NO: 5609958 - DNA, 25 bp, Homo sapien
acagatgacatgctttggaataaac

SEQ ID NO: 5609959 - DNA, 25 bp, Homo sapien
acatgagaatacagttggccctttg

SEQ ID NO: 5609960 - DNA, 25 bp, Homo sapien
ttggaataaacactaagagacctac

SEQ ID NO: 5609961 - DNA, 25 bp, Homo sapien
atcagaaaacataatggaggtaaac

SEQ ID NO: 5609962 - DNA, 25 bp, Homo sapien
cgcatatacatggataggaagattc

SEQ ID NO: 5609963 - DNA, 25 bp, Homo sapien
cactgaaatacaaaacactcgcata

SEQ ID NO: 5609964 - DNA, 25 bp, Homo sapien
aataattagataaggcactggttac

SEQ ID NO: 5609965 - DNA, 25 bp, Homo sapien
ggggggctgatatgaaattgtcata

SEQ ID NO: 5609966 - DNA, 25 bp, Homo sapien
aactgtgagaatatagtcagccctt

SEQ ID NO: 5609967 - DNA, 25 bp, Homo sapien
actagggatagactcaactgaccat

SEQ ID NO: 5609968 - DNA, 25 bp, Homo sapien
ttgagacagcgtctggctctgtcgc

SEQ ID NO: 5609969 - DNA, 25 bp, Homo sapien
agggggattaatagccagtgctttg

SEQ ID NO: 5609970 - DNA, 25 bp, Homo sapien
agtggcagcgttctagaaagttcca

SEQ ID NO: 5609971 - DNA, 25 bp, Homo sapien
actttgaaactaagagggagagaat

SEQ ID NO: 5609972 - DNA, 25 bp, Homo sapien
acaagtgaagcaaaaaactagggat

SEQ ID NO: 5609973 - DNA, 25 bp, Homo sapien
ttcacatagataacactgtaacaac

SEQ ID NO: 5609974 - DNA, 25 bp, Homo sapien
cgacccggagagctgtttcttaatc

SEQ ID NO: 5609975 - DNA, 25 bp, Homo sapien
catctgaactccagggggattaata

SEQ ID NO: 5609976 - DNA, 25 bp, Homo sapien
ttgagaagcctttgaagagtggcag

SEQ ID NO: 5609977 - DNA, 25 bp, Homo sapien
taagagggagagaattaagttttca

SEQ ID NO: 5609978 - DNA, 25 bp, Homo sapien
tgcaacttccgcctcgcgggttcaa

SEQ ID NO: 5609979 - DNA, 25 bp, Homo sapien
ggccgctctagaggatccgagctta

SEQ ID NO: 5609980 - DNA, 25 bp, Homo sapien
tataggtgcgtgccaccacacctgg

SEQ ID NO: 5609981 - DNA, 25 bp, Homo sapien
aagagtgataaagatatacttgctg

SEQ ID NO: 5609982 - DNA, 25 bp, Homo sapien
tgctctagtggagtaagcagacatc

SEQ ID NO: 5609983 - DNA, 25 bp, Homo sapien
cctgagtagatgggattataggtgc

SEQ ID NO: 5609984 - DNA, 25 bp, Homo sapien
cgcgaatttagtagtagtaggcggc

SEQ ID NO: 5609985 - DNA, 25 bp, Homo sapien
acttgctgactatagagaactttgc

SEQ ID NO: 5609986 - DNA, 25 bp, Homo sapien
caccgcgcccagcctaaacactaat

SEQ ID NO: 5609987 - DNA, 25 bp, Homo sapien
ggatccgagcttacgtacgcgtgca

SEQ ID NO: 5609988 - DNA, 25 bp, Homo sapien
agcagacatctattaaaaactccgt

SEQ ID NO: 5609989 - DNA, 25 bp, Homo sapien
ccaagtattaagaagccaagtgttt

SEQ ID NO: 5609990 - DNA, 25 bp, Homo sapien
gcagtccccactagtctaccttaac

SEQ ID NO: 5609991 - DNA, 25 bp, Homo sapien
tagtaaggaatatgtacgtatttcc

SEQ ID NO: 5609992 - DNA, 25 bp, Homo sapien
tattgacaaatgtattcagcgccat

SEQ ID NO: 5609993 - DNA, 25 bp, Homo sapien
agcattctagataacacaagggcca

SEQ ID NO: 5609994 - DNA, 25 bp, Homo sapien
cttttaatggaggtgagaaataaat

SEQ ID NO: 5609995 - DNA, 25 bp, Homo sapien
gatccattggccgtattaaacctcc

SEQ ID NO: 5609996 - DNA, 25 bp, Homo sapien
aagtttaggaacagcttgaataatt

SEQ ID NO: 5609997 - DNA, 25 bp, Homo sapien
gataacacaagggccatgattcact

SEQ ID NO: 5609998 - DNA, 25 bp, Homo sapien
aatgtaacaacagctagatggtttt

SEQ ID NO: 5609999 - DNA, 25 bp, Homo sapien
tcagcgccatacacaagagaaatat

SEQ ID NO: 5610000 - DNA, 25 bp, Homo sapien
cttcccaagaaagggtacatgtaac

SEQ ID NO: 5610001 - DNA, 25 bp, Homo sapien
aagagaagggatctcactatggtgg

SEQ ID NO: 5610002 - DNA, 25 bp, Homo sapien
gtggccaggctgctctgaactcttg

SEQ ID NO: 5610003 - DNA, 25 bp, Homo sapien
ccatagctggaatattgcctgtgtt

SEQ ID NO: 5610004 - DNA, 25 bp, Homo sapien
ctgaactcttgggctcaagccatcc

SEQ ID NO: 5610005 - DNA, 25 bp, Homo sapien
gactacaagcatgggccatcccacc

SEQ ID NO: 5610006 - DNA, 25 bp, Homo sapien
ccccaaatctggcaataacctatta

SEQ ID NO: 5610007 - DNA, 25 bp, Homo sapien
tctccgatagcttcccaagaaaggg

SEQ ID NO: 5610008 - DNA, 25 bp, Homo sapien
aagcatgggccatcccacccagcta

SEQ ID NO: 5610009 - DNA, 25 bp, Homo sapien
tgcctgtgttggatactatttgctg

SEQ ID NO: 5610010 - DNA, 25 bp, Homo sapien
actatttgctggatccacgtcattc

SEQ ID NO: 5610011 - DNA, 25 bp, Homo sapien
ttcatagaaaaagtcgatatccaat

SEQ ID NO: 5610012 - DNA, 25 bp, Homo sapien
gactggacaatggagacttattcgt

SEQ ID NO: 5610013 - DNA, 25 bp, Homo sapien
gacagcaggagtccaatgaaaatat

SEQ ID NO: 5610014 - DNA, 25 bp, Homo sapien
caaagtgaatgccatgactggacaa

SEQ ID NO: 5610015 - DNA, 25 bp, Homo sapien
taagcactctatggatgttagctca

SEQ ID NO: 5610016 - DNA, 25 bp, Homo sapien
tcagctatacaaattcagggcttcc

SEQ ID NO: 5610017 - DNA, 25 bp, Homo sapien
atttagggttctgtgtgaccttgaa

SEQ ID NO: 5610018 - DNA, 25 bp, Homo sapien
aatgtaaccccaggcaaagtgaatg

SEQ ID NO: 5610019 - DNA, 25 bp, Homo sapien
agggcttccatgacaaataaaggct

SEQ ID NO: 5610020 - DNA, 25 bp, Homo sapien
atattgtcagtaaatggacagcagg

SEQ ID NO: 5610021 - DNA, 25 bp, Homo sapien
ctaattaccatgtgccagatactgt

SEQ ID NO: 5610022 - DNA, 25 bp, Homo sapien
ttatgataaataatagcatagcatt

SEQ ID NO: 5610023 - DNA, 25 bp, Homo sapien
accagatacaactaaatatatgcat

SEQ ID NO: 5610024 - DNA, 25 bp, Homo sapien
gaaaatagtttctcagtaagatctt

SEQ ID NO: 5610025 - DNA, 25 bp, Homo sapien
aaaatggtagttatgagtgttagaa

SEQ ID NO: 5610026 - DNA, 25 bp, Homo sapien
ccaaaacactgcattgtaacaaata

SEQ ID NO: 5610027 - DNA, 25 bp, Homo sapien
agcatagcattaagagaagaatgcc

SEQ ID NO: 5610028 - DNA, 25 bp, Homo sapien
tgccaaagaagggatagtatcttca

SEQ ID NO: 5610029 - DNA, 25 bp, Homo sapien
ctacacatcattctagaagagcaga

SEQ ID NO: 5610030 - DNA, 25 bp, Homo sapien
tgagtgttagaatgataccagatac

SEQ ID NO: 5610031 - DNA, 25 bp, Homo sapien
cattctagaagagcagaaaatgatg

SEQ ID NO: 5610032 - DNA, 25 bp, Homo sapien
acaaatataaagttggacttaacta

SEQ ID NO: 5610033 - DNA, 25 bp, Homo sapien
tgaaaaactcaagggattcccatac

SEQ ID NO: 5610034 - DNA, 25 bp, Homo sapien
gacaggaaaagtgatagtataagga

SEQ ID NO: 5610035 - DNA, 25 bp, Homo sapien
aagtttgaaggaacatcaaaatttc

SEQ ID NO: 5610036 - DNA, 25 bp, Homo sapien
caaccgttgcaaataactcaagtga

SEQ ID NO: 5610037 - DNA, 25 bp, Homo sapien
tgacagccacccaaatagaatttta

SEQ ID NO: 5610038 - DNA, 25 bp, Homo sapien
aatatgcctctttaccaaccgttgc

SEQ ID NO: 5610039 - DNA, 25 bp, Homo sapien
caagacatgtcaagactatgcagac

SEQ ID NO: 5610040 - DNA, 25 bp, Homo sapien
actcaagtgaatacaagtaatactc

SEQ ID NO: 5610041 - DNA, 25 bp, Homo sapien
aagtaatactccaagatcatctctc

SEQ ID NO: 5610042 - DNA, 25 bp, Homo sapien
ctatgcagactggacttgacagcca

SEQ ID NO: 5610043 - DNA, 25 bp, Homo sapien
tcatctctctgcgagggcacaggaa

SEQ ID NO: 5610044 - DNA, 25 bp, Homo sapien
taaaggcatcaggtggtaacttcta

SEQ ID NO: 5610045 - DNA, 25 bp, Homo sapien
cagattttaggtgggtaaacatcag

SEQ ID NO: 5610046 - DNA, 25 bp, Homo sapien
ggtaaacatcaggtaggtctgggtg

SEQ ID NO: 5610047 - DNA, 25 bp, Homo sapien
acctattcggttagtgctcctattc

SEQ ID NO: 5610048 - DNA, 25 bp, Homo sapien
gtttgagtggcaattaccaatagat

SEQ ID NO: 5610049 - DNA, 25 bp, Homo sapien
acaagttctaaagaaggcaaggaga

SEQ ID NO: 5610050 - DNA, 25 bp, Homo sapien
ctggaaattatgactgaaaagcacc

SEQ ID NO: 5610051 - DNA, 25 bp, Homo sapien
atggagatgtttttaccactgacac

SEQ ID NO: 5610052 - DNA, 25 bp, Homo sapien
tgcataatcaaacaaggagttactt

SEQ ID NO: 5610053 - DNA, 25 bp, Homo sapien
tagaaaatagcctgcataatcaaac

SEQ ID NO: 5610054 - DNA, 25 bp, Homo sapien
aatactaaatgagataagcctgttc

SEQ ID NO: 5610055 - DNA, 25 bp, Homo sapien
ttctttgcttagccatcagtggaaa

SEQ ID NO: 5610056 - DNA, 25 bp, Homo sapien
taacaagggtgatctggtttaaata

SEQ ID NO: 5610057 - DNA, 25 bp, Homo sapien
cctcagtgagtcatcttacaacttc

SEQ ID NO: 5610058 - DNA, 25 bp, Homo sapien
tgtgatgtataaagcagtcccttcc

SEQ ID NO: 5610059 - DNA, 25 bp, Homo sapien
tttagtttgctaacaagaatgattt

SEQ ID NO: 5610060 - DNA, 25 bp, Homo sapien
atagcagtactgtgatgtataaagc

SEQ ID NO: 5610061 - DNA, 25 bp, Homo sapien
atttcatgataagcactaaagagaa

SEQ ID NO: 5610062 - DNA, 25 bp, Homo sapien
ataattaagaatcccaaaattgtcc

SEQ ID NO: 5610063 - DNA, 25 bp, Homo sapien
agggtgatctggtttaaatagctga

SEQ ID NO: 5610064 - DNA, 25 bp, Homo sapien
cagtgaagcacatttcatgataagc

SEQ ID NO: 5610065 - DNA, 25 bp, Homo sapien
gtttaaggaaacaacagagctgaac

SEQ ID NO: 5610066 - DNA, 25 bp, Homo sapien
accacgtcactctaatctatgcctc

SEQ ID NO: 5610067 - DNA, 25 bp, Homo sapien
cctccaatggttgcaggagagaaag

SEQ ID NO: 5610068 - DNA, 25 bp, Homo sapien
ttcaagctgttggtggcttcaggtg

SEQ ID NO: 5610069 - DNA, 25 bp, Homo sapien
ccagggtccctccaatggttgcagg

SEQ ID NO: 5610070 - DNA, 25 bp, Homo sapien
gctgaaatcaaagtgccagctgggc

SEQ ID NO: 5610071 - DNA, 25 bp, Homo sapien
gtcagaagctcaaaatcactttcac

SEQ ID NO: 5610072 - DNA, 25 bp, Homo sapien
cagtagtttcctggagatgcagtag

SEQ ID NO: 5610073 - DNA, 25 bp, Homo sapien
tatgcctccacagttcaacagcctc

SEQ ID NO: 5610074 - DNA, 25 bp, Homo sapien
ttcagtacaaagtgcagtagtttcc

SEQ ID NO: 5610075 - DNA, 25 bp, Homo sapien
gttggtggcttcaggtgttccttgg

SEQ ID NO: 5610076 - DNA, 25 bp, Homo sapien
gttccttggcttgtgaccacgtcac

SEQ ID NO: 5610077 - DNA, 25 bp, Homo sapien
gctgtgcagtcatccaggctgccgg

SEQ ID NO: 5610078 - DNA, 25 bp, Homo sapien
aatgatggtcttagaagagaaagtt

SEQ ID NO: 5610079 - DNA, 25 bp, Homo sapien
atacctggctgtacagacaaggaag

SEQ ID NO: 5610080 - DNA, 25 bp, Homo sapien
gaggcccggtctctaaccttccagc

SEQ ID NO: 5610081 - DNA, 25 bp, Homo sapien
tttctgctataccagggcaccgctg

SEQ ID NO: 5610082 - DNA, 25 bp, Homo sapien
tgaaggaccagaaagaatcttagaa

SEQ ID NO: 5610083 - DNA, 25 bp, Homo sapien
tccgacctgaaagaaaccatgaatc

SEQ ID NO: 5610084 - DNA, 25 bp, Homo sapien
gaggctgcagattaagttagaggca

SEQ ID NO: 5610085 - DNA, 25 bp, Homo sapien
agaaagttaacttgcctgaggctgc

SEQ ID NO: 5610086 - DNA, 25 bp, Homo sapien
taggttgggttcaggtatccttcta

SEQ ID NO: 5610087 - DNA, 25 bp, Homo sapien
gaatcagggatcagacaaaaataca

SEQ ID NO: 5610088 - DNA, 25 bp, Homo sapien
ccagagttatgtgggatcagtgtga

SEQ ID NO: 5610089 - DNA, 25 bp, Homo sapien
aagaagaggttgacaaactttataa

SEQ ID NO: 5610090 - DNA, 25 bp, Homo sapien
ttggcctgacagttaagagttctgg

SEQ ID NO: 5610091 - DNA, 25 bp, Homo sapien
ctatcatacccagagttatgtggga

SEQ ID NO: 5610092 - DNA, 25 bp, Homo sapien
ttgaaaagtgatcatccataaagct

SEQ ID NO: 5610093 - DNA, 25 bp, Homo sapien
ctttataaggaacaatcaggcagct

SEQ ID NO: 5610094 - DNA, 25 bp, Homo sapien
tacaggcacacatcagtcaccacgc

SEQ ID NO: 5610095 - DNA, 25 bp, Homo sapien
cagacccatgtctgacccctgacac

SEQ ID NO: 5610096 - DNA, 25 bp, Homo sapien
aaagacattggcctgacagttaaga

SEQ ID NO: 5610097 - DNA, 25 bp, Homo sapien
gacccctgacactcactatcatacc

SEQ ID NO: 5610098 - DNA, 25 bp, Homo sapien
aaccctttcacaacagctcagtcat

SEQ ID NO: 5610099 - DNA, 25 bp, Homo sapien
tgtccaggctagatagtatgatcac

SEQ ID NO: 5610100 - DNA, 25 bp, Homo sapien
taggagatctttatgccaaagttac

SEQ ID NO: 5610101 - DNA, 25 bp, Homo sapien
gaaattccaggcagactaaaatgtt

SEQ ID NO: 5610102 - DNA, 25 bp, Homo sapien
gtatgatcacagcacactagtcttg

SEQ ID NO: 5610103 - DNA, 25 bp, Homo sapien
aatagctgttagaagaaacaatttt

SEQ ID NO: 5610104 - DNA, 25 bp, Homo sapien
caagcttccatggttgtatattctc

SEQ ID NO: 5610105 - DNA, 25 bp, Homo sapien
ttatacacagaaattccaggcagac

SEQ ID NO: 5610106 - DNA, 25 bp, Homo sapien
ttatttggagtggtctgttcatgtc

SEQ ID NO: 5610107 - DNA, 25 bp, Homo sapien
gttcatgtcctatggtcactgattt

SEQ ID NO: 5610108 - DNA, 25 bp, Homo sapien
atggtcactgatttgtaggagatct

SEQ ID NO: 5610109 - DNA, 25 bp, Homo sapien
ttggaaagcgtcagattatacacag

SEQ ID NO: 5610110 - DNA, 25 bp, Homo sapien
agtgtcattttaaagctggaggaca

SEQ ID NO: 5610111 - DNA, 25 bp, Homo sapien
tagaataactacagccattaaaagt

SEQ ID NO: 5610112 - DNA, 25 bp, Homo sapien
tagacactgtcggatgctatttttt

SEQ ID NO: 5610113 - DNA, 25 bp, Homo sapien
gttagcgattatatctggatctatc

SEQ ID NO: 5610114 - DNA, 25 bp, Homo sapien
caagtgtgtatattgatagggaaag

SEQ ID NO: 5610115 - DNA, 25 bp, Homo sapien
atatgtaggaaaaatactggaagat

SEQ ID NO: 5610116 - DNA, 25 bp, Homo sapien
ggaaaaatactggaagatgatatgt

SEQ ID NO: 5610117 - DNA, 25 bp, Homo sapien
aagcaggccacaaatagacactgtc

SEQ ID NO: 5610118 - DNA, 25 bp, Homo sapien
ctggatctatctaattatgtgctct

SEQ ID NO: 5610119 - DNA, 25 bp, Homo sapien
tggaaggaggtaagttcataatcca

SEQ ID NO: 5610120 - DNA, 25 bp, Homo sapien
acagccattaaaagtgataccaagt

SEQ ID NO: 5610121 - DNA, 25 bp, Homo sapien
ctcctgctgatgaaatagtttaaca

SEQ ID NO: 5610122 - DNA, 25 bp, Homo sapien
aacatagggatgtaactcctgctga

SEQ ID NO: 5610123 - DNA, 25 bp, Homo sapien
aaggaaactacatgtagaaaatgtc

SEQ ID NO: 5610124 - DNA, 25 bp, Homo sapien
tctgactggaagacaatctaataac

SEQ ID NO: 5610125 - DNA, 25 bp, Homo sapien
ggaggtatcctaagtggttagagcc

SEQ ID NO: 5610126 - DNA, 25 bp, Homo sapien
tcctaagtggttagagccatggatg

SEQ ID NO: 5610127 - DNA, 25 bp, Homo sapien
cacagagcacaaacctacatgaaat

SEQ ID NO: 5610128 - DNA, 25 bp, Homo sapien
gagctgactggaagtacatagacta

SEQ ID NO: 5610129 - DNA, 25 bp, Homo sapien
aaaatgtcgaaaagtaacgcctcac

SEQ ID NO: 5610130 - DNA, 25 bp, Homo sapien
acatagactataataggaggtatcc

SEQ ID NO: 5610131 - DNA, 25 bp, Homo sapien
ataaaatgacagagatatggagcaa

SEQ ID NO: 5610132 - DNA, 25 bp, Homo sapien
atgatgttgtgggcttgtaaaaaaa

SEQ ID NO: 5610133 - DNA, 25 bp, Homo sapien
gcgattcaagccacaagagcattta

SEQ ID NO: 5610134 - DNA, 25 bp, Homo sapien
acatgtacagtactgggggtttgaa

SEQ ID NO: 5610135 - DNA, 25 bp, Homo sapien
agctcctggttaaaaactgcaaagc

SEQ ID NO: 5610136 - DNA, 25 bp, Homo sapien
caaataaggtcacatgtacagtact

SEQ ID NO: 5610137 - DNA, 25 bp, Homo sapien
actgcaaagctatgatgttgtgggc

SEQ ID NO: 5610138 - DNA, 25 bp, Homo sapien
ttcttgggagatgcgattcaagcca

SEQ ID NO: 5610139 - DNA, 25 bp, Homo sapien
tgatttcaaagatctccaccagctc

SEQ ID NO: 5610140 - DNA, 25 bp, Homo sapien
aacgtgaacgtatctttcttgggag

SEQ ID NO: 5610141 - DNA, 25 bp, Homo sapien
ttgactgcatctaaaaagaccctat

SEQ ID NO: 5610142 - DNA, 25 bp, Homo sapien
atgtaactaaaagaattggcctaaa

SEQ ID NO: 5610143 - DNA, 25 bp, Homo sapien
gttcagtccctcagcgtgggatccc

SEQ ID NO: 5610144 - DNA, 25 bp, Homo sapien
gcagcgatgtttgactcccggacga

SEQ ID NO: 5610145 - DNA, 25 bp, Homo sapien
agaaaccaactcattcagaaggctc

SEQ ID NO: 5610146 - DNA, 25 bp, Homo sapien
cctatcctggctccccctccgtggc

SEQ ID NO: 5610147 - DNA, 25 bp, Homo sapien
tctgctcggatatgagcagtgggga

SEQ ID NO: 5610148 - DNA, 25 bp, Homo sapien
ctcccggacgaacttcccggcagaa

SEQ ID NO: 5610149 - DNA, 25 bp, Homo sapien
ctccccctccgtggcgcaaccggag

SEQ ID NO: 5610150 - DNA, 25 bp, Homo sapien
cgggtggaagccttttctgttcgga

SEQ ID NO: 5610151 - DNA, 25 bp, Homo sapien
ccggggtctatctgctcggatatga

SEQ ID NO: 5610152 - DNA, 25 bp, Homo sapien
agccttttctgttcggatccggggc

SEQ ID NO: 5610153 - DNA, 25 bp, Homo sapien
cattcagaaggctcggattcctctt

SEQ ID NO: 5610154 - DNA, 25 bp, Homo sapien
ttttaaaaatatatagccaagcagt

SEQ ID NO: 5610155 - DNA, 25 bp, Homo sapien
cagtaaagcactagaaaacaaattc

SEQ ID NO: 5610156 - DNA, 25 bp, Homo sapien
tcatgaccaaaaaagagaatctaaa

SEQ ID NO: 5610157 - DNA, 25 bp, Homo sapien
tcaatttcatgaccaaaaaagagaa

SEQ ID NO: 5610158 - DNA, 25 bp, Homo sapien
tgtactgtatatcaaaactacatcg

SEQ ID NO: 5610159 - DNA, 25 bp, Homo sapien
tggttaaccttatcagtaaagcact

SEQ ID NO: 5610160 - DNA, 25 bp, Homo sapien
tcaccatctggttaaccttatcagt

SEQ ID NO: 5610161 - DNA, 25 bp, Homo sapien
aaaaagagaatctaaaaagctctgt

SEQ ID NO: 5610162 - DNA, 25 bp, Homo sapien
aagcactagaaaacaaattccactc

SEQ ID NO: 5610163 - DNA, 25 bp, Homo sapien
caggagaactatgatgagatatttc

SEQ ID NO: 5610164 - DNA, 25 bp, Homo sapien
ccaagctattacatttcaccatctg

SEQ ID NO: 5610165 - DNA, 25 bp, Homo sapien
catacaatgtaaagtgcatatacct

SEQ ID NO: 5610166 - DNA, 25 bp, Homo sapien
ttaaatgggtgctatgctaatgaac

SEQ ID NO: 5610167 - DNA, 25 bp, Homo sapien
tatgctaatgaaccaatgagacaaa

SEQ ID NO: 5610168 - DNA, 25 bp, Homo sapien
tcactagaactaaaaagatacatac

SEQ ID NO: 5610169 - DNA, 25 bp, Homo sapien
agtgcatatacctaacgtcatagcc

SEQ ID NO: 5610170 - DNA, 25 bp, Homo sapien
gagatagccgcaattgttagagtag

SEQ ID NO: 5610171 - DNA, 25 bp, Homo sapien
gaagtagttgttcttaaatgggtgc

SEQ ID NO: 5610172 - DNA, 25 bp, Homo sapien
taaatgtgtttggacctggagaatc

SEQ ID NO: 5610173 - DNA, 25 bp, Homo sapien
ttcttggctgcaaacaaaggatttt

SEQ ID NO: 5610174 - DNA, 25 bp, Homo sapien
tgattccagatgagttcactagaac

SEQ ID NO: 5610175 - DNA, 25 bp, Homo sapien
agacaaaatgagatagccgcaattg

SEQ ID NO: 5610176 - DNA, 25 bp, Homo sapien
accttgtagatcctggagccaggcc

SEQ ID NO: 5610177 - DNA, 25 bp, Homo sapien
ctctggcctgctcctgttcggcccc

SEQ ID NO: 5610178 - DNA, 25 bp, Homo sapien
acctgctaccttgtagatcctggag

SEQ ID NO: 5610179 - DNA, 25 bp, Homo sapien
tacccacacacctgctaccttgtag

SEQ ID NO: 5610180 - DNA, 25 bp, Homo sapien
ggtggctctggcctgctcctgttcg

SEQ ID NO: 5610181 - DNA, 25 bp, Homo sapien
gctaccttgtagatcctggagccag

SEQ ID NO: 5610182 - DNA, 25 bp, Homo sapien
ctggcctgctcctgttcggcccctg

SEQ ID NO: 5610183 - DNA, 25 bp, Homo sapien
cccacacacctgctaccttgtagat

SEQ ID NO: 5610184 - DNA, 25 bp, Homo sapien
cacagtggctttctgtgtgaggggc

SEQ ID NO: 5610185 - DNA, 25 bp, Homo sapien
gctcctgttcggcccctgccctgac

SEQ ID NO: 5610186 - DNA, 25 bp, Homo sapien
gctggcacccaccacagtggctttc

SEQ ID NO: 5610187 - DNA, 25 bp, Homo sapien
ccgatttatgtatgcctgtgtgtat

SEQ ID NO: 5610188 - DNA, 25 bp, Homo sapien
caacaccatgctacattaaacatcc

SEQ ID NO: 5610189 - DNA, 25 bp, Homo sapien
tgtgattaggcacccaagatctttc

SEQ ID NO: 5610190 - DNA, 25 bp, Homo sapien
cttctctattacaacaccatgctac

SEQ ID NO: 5610191 - DNA, 25 bp, Homo sapien
gaaaatatgtgattaggcacccaag

SEQ ID NO: 5610192 - DNA, 25 bp, Homo sapien
taaagccgatttatgtatgcctgtg

SEQ ID NO: 5610193 - DNA, 25 bp, Homo sapien
aaaaactgatctgaaagtgagaaaa

SEQ ID NO: 5610194 - DNA, 25 bp, Homo sapien
ggatagctgatcgttgtcccaactc

SEQ ID NO: 5610195 - DNA, 25 bp, Homo sapien
tgaaagtgttatccaatgttgtata

SEQ ID NO: 5610196 - DNA, 25 bp, Homo sapien
aagtgggatagctgatcgttgtccc

SEQ ID NO: 5610197 - DNA, 25 bp, Homo sapien
ctgagtcaaatattttaaagccgat

SEQ ID NO: 5610198 - DNA, 25 bp, Homo sapien
aatgggcaagtgtgataaatgttaa

SEQ ID NO: 5610199 - DNA, 25 bp, Homo sapien
atagccacagtttgagtataacaac

SEQ ID NO: 5610200 - DNA, 25 bp, Homo sapien
atctgagaaaaacaaaatgggcaag

SEQ ID NO: 5610201 - DNA, 25 bp, Homo sapien
tatgcaaatacagaaaaacaacaat

SEQ ID NO: 5610202 - DNA, 25 bp, Homo sapien
attttgtgccttgtgtacaaacttc

SEQ ID NO: 5610203 - DNA, 25 bp, Homo sapien
caaaatgggcaagtgtgataaatgt

SEQ ID NO: 5610204 - DNA, 25 bp, Homo sapien
tgtacaaacttctcttgtgaccatt

SEQ ID NO: 5610205 - DNA, 25 bp, Homo sapien
ctccttttaaatcatagccacagtt

SEQ ID NO: 5610206 - DNA, 25 bp, Homo sapien
atttatattatggatctgagagctc

SEQ ID NO: 5610207 - DNA, 25 bp, Homo sapien
attatggatctgagagctcctttta

SEQ ID NO: 5610208 - DNA, 25 bp, Homo sapien
aaaaacaaaatgggcaagtgtgata

SEQ ID NO: 5610209 - DNA, 25 bp, Homo sapien
acccggataatctaggtggactcca

SEQ ID NO: 5610210 - DNA, 25 bp, Homo sapien
tggagtccacctagattatccgggt

SEQ ID NO: 5610211 - DNA, 25 bp, Homo sapien
aatggaaaacgatgatgtgcttttt

SEQ ID NO: 5610212 - DNA, 25 bp, Homo sapien
tgaagaaggagcaaatgttcagtca

SEQ ID NO: 5610213 - DNA, 25 bp, Homo sapien
gtaacaggtatcacaacaacatttc

SEQ ID NO: 5610214 - DNA, 25 bp, Homo sapien
aaactgacagacaatcccaagcaac

SEQ ID NO: 5610215 - DNA, 25 bp, Homo sapien
gtgcagaaccgtgaacaataatcca

SEQ ID NO: 5610216 - DNA, 25 bp, Homo sapien
aataacagcacaaaagtaacaactc

SEQ ID NO: 5610217 - DNA, 25 bp, Homo sapien
cttagaaatgaatgtgcagaaccgt

SEQ ID NO: 5610218 - DNA, 25 bp, Homo sapien
catttccgaacggcacatgaagaag

SEQ ID NO: 5610219 - DNA, 25 bp, Homo sapien
ggcaacatgggactgagacacatgt

SEQ ID NO: 5610220 - DNA, 25 bp, Homo sapien
agtcatgactggaacaggattgtgc

SEQ ID NO: 5610221 - DNA, 25 bp, Homo sapien
gacaatcccaagcaacggcaacatg

SEQ ID NO: 5610222 - DNA, 25 bp, Homo sapien
ttggctatctcaggaagtcatggtg

SEQ ID NO: 5610223 - DNA, 25 bp, Homo sapien
aggtcacagatctctgatgggactt

SEQ ID NO: 5610224 - DNA, 25 bp, Homo sapien
tgaggataagtaatgttggaacaga

SEQ ID NO: 5610225 - DNA, 25 bp, Homo sapien
tgcacaaccctgacagaaaatggca

SEQ ID NO: 5610226 - DNA, 25 bp, Homo sapien
gatgggactttcttcaggtatcagc

SEQ ID NO: 5610227 - DNA, 25 bp, Homo sapien
cggaataaaatatgtggacaagtgc

SEQ ID NO: 5610228 - DNA, 25 bp, Homo sapien
ccttggcatttagaaagggcctgtg

SEQ ID NO: 5610229 - DNA, 25 bp, Homo sapien
gaattcagagatgctgaggataagt

SEQ ID NO: 5610230 - DNA, 25 bp, Homo sapien
gggcacaggcatattgggatgccat

SEQ ID NO: 5610231 - DNA, 25 bp, Homo sapien
tatgaagattcaggtcacagatctc

SEQ ID NO: 5610232 - DNA, 25 bp, Homo sapien
agggcctgtgaaagttatgaagatt

SEQ ID NO: 5610233 - DNA, 25 bp, Homo sapien
gtgtgtttcagaaagaatatacagt

SEQ ID NO: 5610234 - DNA, 25 bp, Homo sapien
actgtatattctttctgaaacacac

SEQ ID NO: 5610235 - DNA, 25 bp, Homo sapien
acacactctaacatggagtctttcg

SEQ ID NO: 5610236 - DNA, 25 bp, Homo sapien
caagaaagtaatacgaaacacaaaa

SEQ ID NO: 5610237 - DNA, 25 bp, Homo sapien
tcattgctagggaaatcagagatca

SEQ ID NO: 5610238 - DNA, 25 bp, Homo sapien
ctacaccaagaaagtaatacgaaac

SEQ ID NO: 5610239 - DNA, 25 bp, Homo sapien
cttaacttagttgggaatctacacc

SEQ ID NO: 5610240 - DNA, 25 bp, Homo sapien
cagaatcattgctagggaaatcaga

SEQ ID NO: 5610241 - DNA, 25 bp, Homo sapien
gctagggaaatcagagatcattttt

SEQ ID NO: 5610242 - DNA, 25 bp, Homo sapien
tctaacatggagtctttcgttatgt

SEQ ID NO: 5610243 - DNA, 25 bp, Homo sapien
agttgggaatctacaccaagaaagt

SEQ ID NO: 5610244 - DNA, 25 bp, Homo sapien
aagacagtgtcttgccacattaccc

SEQ ID NO: 5610245 - DNA, 25 bp, Homo sapien
atattttaagcccaaagatatcttt

SEQ ID NO: 5610246 - DNA, 25 bp, Homo sapien
agatacagagcaaggtaagatttct

SEQ ID NO: 5610247 - DNA, 25 bp, Homo sapien
tagaaatgggcttaaatgacaatac

SEQ ID NO: 5610248 - DNA, 25 bp, Homo sapien
aattagaacaaactgcttaggaaac

SEQ ID NO: 5610249 - DNA, 25 bp, Homo sapien
aagcaaacattttgacagggggatg

SEQ ID NO: 5610250 - DNA, 25 bp, Homo sapien
ttaattttaggtattggagatgtac

SEQ ID NO: 5610251 - DNA, 25 bp, Homo sapien
aaacattttgacagggggatgtgaa

SEQ ID NO: 5610252 - DNA, 25 bp, Homo sapien
tgcttaggaaactacagtgtgtgcc

SEQ ID NO: 5610253 - DNA, 25 bp, Homo sapien
acaatcaccaattagaaatgggctt

SEQ ID NO: 5610254 - DNA, 25 bp, Homo sapien
acagagcaaggtaagatttcttctt

SEQ ID NO: 5610255 - DNA, 25 bp, Homo sapien
ttaggtattggagatgtacctccat

SEQ ID NO: 5610256 - DNA, 25 bp, Homo sapien
atgtacctccataattaagaagttt

SEQ ID NO: 5610257 - DNA, 25 bp, Homo sapien
ctgtgcccggcaagattcattttct

SEQ ID NO: 5610258 - DNA, 25 bp, Homo sapien
aatttgcttgacatagaatttgttc

SEQ ID NO: 5610259 - DNA, 25 bp, Homo sapien
ccggaaatgggtcaattaattcatg

SEQ ID NO: 5610260 - DNA, 25 bp, Homo sapien
attatgaccagaggtaccggaaatg

SEQ ID NO: 5610261 - DNA, 25 bp, Homo sapien
acttccaattatgaccagaggtacc

SEQ ID NO: 5610262 - DNA, 25 bp, Homo sapien
cctgggctcaattgatcctccccct

SEQ ID NO: 5610263 - DNA, 25 bp, Homo sapien
tgtacaacaaactcagctagaagcg

SEQ ID NO: 5610264 - DNA, 25 bp, Homo sapien
gagtatagtggtgtgattacagctc

SEQ ID NO: 5610265 - DNA, 25 bp, Homo sapien
ttccttgagttgttgtaattcttta

SEQ ID NO: 5610266 - DNA, 25 bp, Homo sapien
aagagcttacctgaaaaacatcata

SEQ ID NO: 5610267 - DNA, 25 bp, Homo sapien
actgtaacctcaaattcctgggctc

SEQ ID NO: 5610268 - DNA, 25 bp, Homo sapien
caagcaccacacagagtgactcgag

SEQ ID NO: 5610269 - DNA, 25 bp, Homo sapien
taacacaagttactgatcaagtgag

SEQ ID NO: 5610270 - DNA, 25 bp, Homo sapien
ccactgagtttctaacacaagttac

SEQ ID NO: 5610271 - DNA, 25 bp, Homo sapien
tactgtacagaaaggaacatgcaga

SEQ ID NO: 5610272 - DNA, 25 bp, Homo sapien
cagaagttactgtacagaaaggaac

SEQ ID NO: 5610273 - DNA, 25 bp, Homo sapien
acacagagtgactcgagaaaagcaa

SEQ ID NO: 5610274 - DNA, 25 bp, Homo sapien
aaacagagtaaatgcagaagttact

SEQ ID NO: 5610275 - DNA, 25 bp, Homo sapien
gaaaggaacatgcagaacacatcca

SEQ ID NO: 5610276 - DNA, 25 bp, Homo sapien
gatagtggtgaaggaaccatcctaa

SEQ ID NO: 5610277 - DNA, 25 bp, Homo sapien
gaaccatcctaaacagagtaaatgc

SEQ ID NO: 5610278 - DNA, 25 bp, Homo sapien
tcccacaagcaccacacagagtgac

SEQ ID NO: 5610279 - DNA, 25 bp, Homo sapien
ctgtgaggactccaggtccagacct

SEQ ID NO: 5610280 - DNA, 25 bp, Homo sapien
aggtctggacctggagtcctcacag

SEQ ID NO: 5610281 - DNA, 25 bp, Homo sapien
aaattgtatttctacattttgtatg

SEQ ID NO: 5610282 - DNA, 25 bp, Homo sapien
catacaaaatgtagaaatacaattt

SEQ ID NO: 5610283 - DNA, 25 bp, Homo sapien
atggcaagacatggttttgaaaaaa

SEQ ID NO: 5610284 - DNA, 25 bp, Homo sapien
tctggatctcgaagagaacagttca

SEQ ID NO: 5610285 - DNA, 25 bp, Homo sapien
ctcatctgtaatggcaagacatggt

SEQ ID NO: 5610286 - DNA, 25 bp, Homo sapien
cttgtctcatctgtaatggcaagac

SEQ ID NO: 5610287 - DNA, 25 bp, Homo sapien
tttattctggatctcgaagagaaca

SEQ ID NO: 5610288 - DNA, 25 bp, Homo sapien
aagtgttagctgttgttatcattgt

SEQ ID NO: 5610289 - DNA, 25 bp, Homo sapien
ttcgtttcatagtagtaatgttatt

SEQ ID NO: 5610290 - DNA, 25 bp, Homo sapien
attctggatctcgaagagaacagtt

SEQ ID NO: 5610291 - DNA, 25 bp, Homo sapien
tgtaatggcaagacatggttttgaa

SEQ ID NO: 5610292 - DNA, 25 bp, Homo sapien
agagaacagttcattgtatttcctt

SEQ ID NO: 5610293 - DNA, 25 bp, Homo sapien
gttctagctgccagacttttattct

SEQ ID NO: 5610294 - DNA, 25 bp, Homo sapien
gaaattgtatttctacattttgtat

SEQ ID NO: 5610295 - DNA, 25 bp, Homo sapien
atacaaaatgtagaaatacaatttc

SEQ ID NO: 5610296 - DNA, 25 bp, Homo sapien
tagcagggttagttttatgaagaac

SEQ ID NO: 5610297 - DNA, 25 bp, Homo sapien
ttttgtagtgagtcaacagagaaag

SEQ ID NO: 5610298 - DNA, 25 bp, Homo sapien
aatgggcaatgagatttataaacac

SEQ ID NO: 5610299 - DNA, 25 bp, Homo sapien
tgttgccaggtatgattatgtcttc

SEQ ID NO: 5610300 - DNA, 25 bp, Homo sapien
tggtgaagaatgtaaggtatgaaaa

SEQ ID NO: 5610301 - DNA, 25 bp, Homo sapien
gtgagtcaacagagaaagagtttta

SEQ ID NO: 5610302 - DNA, 25 bp, Homo sapien
agagaactaaaatgtgccttaatac

SEQ ID NO: 5610303 - DNA, 25 bp, Homo sapien
ttataaacacagtaagagcttcccc

SEQ ID NO: 5610304 - DNA, 25 bp, Homo sapien
tgggaaacactgagctagagctcca

SEQ ID NO: 5610305 - DNA, 25 bp, Homo sapien
ttcccctgcctaaccctcaaatgct

SEQ ID NO: 5610306 - DNA, 25 bp, Homo sapien
gctagagctccaaaaatcaatatgc

SEQ ID NO: 5610307 - DNA, 25 bp, Homo sapien
aaaaccttcagatgtaatcagtact

SEQ ID NO: 5610308 - DNA, 25 bp, Homo sapien
ctcttttgtagacatctggaatgaa

SEQ ID NO: 5610309 - DNA, 25 bp, Homo sapien
atttgtcttcagcgtaaggaatctc

SEQ ID NO: 5610310 - DNA, 25 bp, Homo sapien
cttgaaataggtaacgaacttcgta

SEQ ID NO: 5610311 - DNA, 25 bp, Homo sapien
ctggtatcagagaaacaaaaacctt

SEQ ID NO: 5610312 - DNA, 25 bp, Homo sapien
cttcagcgtaaggaatctcagaggt

SEQ ID NO: 5610313 - DNA, 25 bp, Homo sapien
atcaaaaataaccatactctttcac

SEQ ID NO: 5610314 - DNA, 25 bp, Homo sapien
ttaaatcctggtatcagagaaacaa

SEQ ID NO: 5610315 - DNA, 25 bp, Homo sapien
tcactgacagcaaagatctacagac

SEQ ID NO: 5610316 - DNA, 25 bp, Homo sapien
agcgtaaggaatctcagaggtaact

SEQ ID NO: 5610317 - DNA, 25 bp, Homo sapien
cagaggtaacttgaaataggtaacg

SEQ ID NO: 5610318 - DNA, 25 bp, Homo sapien
tagatcccatagaactttcaattga

SEQ ID NO: 5610319 - DNA, 25 bp, Homo sapien
gaaatggcctaaatgctcctgtagc

SEQ ID NO: 5610320 - DNA, 25 bp, Homo sapien
ttccatgagtaatacaccacacttc

SEQ ID NO: 5610321 - DNA, 25 bp, Homo sapien
tttgtgcatgtagaataagcttggc

SEQ ID NO: 5610322 - DNA, 25 bp, Homo sapien
tctccatgccagtatgtctcatttc

SEQ ID NO: 5610323 - DNA, 25 bp, Homo sapien
tacaaatgatcaagatattcagatt

SEQ ID NO: 5610324 - DNA, 25 bp, Homo sapien
ttgaaagtaataaccaaggcaactc

SEQ ID NO: 5610325 - DNA, 25 bp, Homo sapien
ggcctaaatgctcctgtagctcttc

SEQ ID NO: 5610326 - DNA, 25 bp, Homo sapien
ttgtcgttctcactctccatgccag

SEQ ID NO: 5610327 - DNA, 25 bp, Homo sapien
catgtagaataagcttggcatagaa

SEQ ID NO: 5610328 - DNA, 25 bp, Homo sapien
aaccaaggcaactcactttccatga

SEQ ID NO: 5610329 - DNA, 25 bp, Homo sapien
cctcatggaatgagcagcacagagg

SEQ ID NO: 5610330 - DNA, 25 bp, Homo sapien
aatgaaacctatcttgttggggctc

SEQ ID NO: 5610331 - DNA, 25 bp, Homo sapien
gtccaccaaacatctactaccctga

SEQ ID NO: 5610332 - DNA, 25 bp, Homo sapien
accccaaaatatgactggaggagac

SEQ ID NO: 5610333 - DNA, 25 bp, Homo sapien
agttatgtgtgtattgtcaggagac

SEQ ID NO: 5610334 - DNA, 25 bp, Homo sapien
gaacacagtgagatagtttgctttt

SEQ ID NO: 5610335 - DNA, 25 bp, Homo sapien
ttgacatcaccaagccttccttttc

SEQ ID NO: 5610336 - DNA, 25 bp, Homo sapien
aggagactagaatatgccaccccaa

SEQ ID NO: 5610337 - DNA, 25 bp, Homo sapien
cccccagttatcagctttaagcctc

SEQ ID NO: 5610338 - DNA, 25 bp, Homo sapien
tccccaagcacagcagaaaagttat

SEQ ID NO: 5610339 - DNA, 25 bp, Homo sapien
agggtgactattgagagaacacagt

SEQ ID NO: 5610340 - DNA, 25 bp, Homo sapien
caagagtataatgctaaaccaatgt

SEQ ID NO: 5610341 - DNA, 25 bp, Homo sapien
aaagaaaatagcctcaagagtataa

SEQ ID NO: 5610342 - DNA, 25 bp, Homo sapien
tctgagtcaggtattatgctaaagc

SEQ ID NO: 5610343 - DNA, 25 bp, Homo sapien
ctcaagttagagcaagtcggctatt

SEQ ID NO: 5610344 - DNA, 25 bp, Homo sapien
ttcccagagtatccagctaaaaacc

SEQ ID NO: 5610345 - DNA, 25 bp, Homo sapien
cctgcagatggttaatacttctccc

SEQ ID NO: 5610346 - DNA, 25 bp, Homo sapien
attcaagttgcatctggggaactat

SEQ ID NO: 5610347 - DNA, 25 bp, Homo sapien
tctgacagtaagatcagctagggtt

SEQ ID NO: 5610348 - DNA, 25 bp, Homo sapien
aggggtttccagcatccagtgaatc

SEQ ID NO: 5610349 - DNA, 25 bp, Homo sapien
attaaactgagtgcttttgccaatt

SEQ ID NO: 5610350 - DNA, 25 bp, Homo sapien
gcatccagtgaatcagactaaggaa

SEQ ID NO: 5610351 - DNA, 25 bp, Homo sapien
attgaaggatgcaaagtatagttcc

SEQ ID NO: 5610352 - DNA, 25 bp, Homo sapien
gcatatatttgagatgtacagtgtg

SEQ ID NO: 5610353 - DNA, 25 bp, Homo sapien
acatttgagtcagtggactgggaga

SEQ ID NO: 5610354 - DNA, 25 bp, Homo sapien
atgtatgtatacaatgtgaaatgat

SEQ ID NO: 5610355 - DNA, 25 bp, Homo sapien
tatactgaagtatgattgacaaata

SEQ ID NO: 5610356 - DNA, 25 bp, Homo sapien
tttgagatgtacagtgtgatgatac

SEQ ID NO: 5610357 - DNA, 25 bp, Homo sapien
aatgagtagtcaagtatatatatgt

SEQ ID NO: 5610358 - DNA, 25 bp, Homo sapien
caaggctcctttgaaagcatggttt

SEQ ID NO: 5610359 - DNA, 25 bp, Homo sapien
aatgtgatggttaatattgagtgtc

SEQ ID NO: 5610360 - DNA, 25 bp, Homo sapien
cacagaaggcttaaatgagtagtca

SEQ ID NO: 5610361 - DNA, 25 bp, Homo sapien
ttgaattttggtagccaaggctcct

SEQ ID NO: 5610362 - DNA, 25 bp, Homo sapien
gtttgaaacccactgtagccacctc

SEQ ID NO: 5610363 - DNA, 25 bp, Homo sapien
gagctcagctcatcaggaatgcatg

SEQ ID NO: 5610364 - DNA, 25 bp, Homo sapien
ggtcattaaacgtctgaggagcagc

SEQ ID NO: 5610365 - DNA, 25 bp, Homo sapien
ggaatgcatgaggaacatccagtta

SEQ ID NO: 5610366 - DNA, 25 bp, Homo sapien
tttaacgtaggcagactccatttcc

SEQ ID NO: 5610367 - DNA, 25 bp, Homo sapien
gcggtgtgcctgccactgcacagct

SEQ ID NO: 5610368 - DNA, 25 bp, Homo sapien
aactcagtggcatcaatagcaaatc

SEQ ID NO: 5610369 - DNA, 25 bp, Homo sapien
cgtctgaggagcagcttaaaattcc

SEQ ID NO: 5610370 - DNA, 25 bp, Homo sapien
ccatttccattcaggagcggtgtgc

SEQ ID NO: 5610371 - DNA, 25 bp, Homo sapien
ctaaatattgaaggagagctcagct

SEQ ID NO: 5610372 - DNA, 25 bp, Homo sapien
tgatagagcaaggttctggtttagc

SEQ ID NO: 5610373 - DNA, 25 bp, Homo sapien
catgtattccagttgaaagatgctc

SEQ ID NO: 5610374 - DNA, 25 bp, Homo sapien
tccaaagtagaaagccaaaacaata

SEQ ID NO: 5610375 - DNA, 25 bp, Homo sapien
aataaactgtatacattgcccaatc

SEQ ID NO: 5610376 - DNA, 25 bp, Homo sapien
ttaaaagtgactgttatgaatcctc

SEQ ID NO: 5610377 - DNA, 25 bp, Homo sapien
aattacagctccaaagtagaaagcc

SEQ ID NO: 5610378 - DNA, 25 bp, Homo sapien
tgatttatgccagtccaaagtcctc

SEQ ID NO: 5610379 - DNA, 25 bp, Homo sapien
caaccaggtgttagtatctacatgt

SEQ ID NO: 5610380 - DNA, 25 bp, Homo sapien
cctcactgagctgtttacaaaaatg

SEQ ID NO: 5610381 - DNA, 25 bp, Homo sapien
tcaaatacaaccaggtgttagtatc

SEQ ID NO: 5610382 - DNA, 25 bp, Homo sapien
acactgtatgcactgaaattacatc

SEQ ID NO: 5610383 - DNA, 25 bp, Homo sapien
tcaatgctgttcttagtactaactc

SEQ ID NO: 5610384 - DNA, 25 bp, Homo sapien
ccggtccatcattactgctactgcc

SEQ ID NO: 5610385 - DNA, 25 bp, Homo sapien
cctataacaaggtaagaagagcagt

SEQ ID NO: 5610386 - DNA, 25 bp, Homo sapien
gtaacaggtatttggacagtaaaca

SEQ ID NO: 5610387 - DNA, 25 bp, Homo sapien
agatcaaagagtgtagacatttggt

SEQ ID NO: 5610388 - DNA, 25 bp, Homo sapien
agagtctcttattaaccggtccatc

SEQ ID NO: 5610389 - DNA, 25 bp, Homo sapien
tgtatggtagtgtatcaggttttac

SEQ ID NO: 5610390 - DNA, 25 bp, Homo sapien
ggtaagaagagcagtattacaaaac

SEQ ID NO: 5610391 - DNA, 25 bp, Homo sapien
agaaaaaaattccaatgggctctat

SEQ ID NO: 5610392 - DNA, 25 bp, Homo sapien
caaaagttatggataatcgtaattc

SEQ ID NO: 5610393 - DNA, 25 bp, Homo sapien
acataaacaaggtctagtcaatcac

SEQ ID NO: 5610394 - DNA, 25 bp, Homo sapien
atctaacaatacgtggaagaaaaaa

SEQ ID NO: 5610395 - DNA, 25 bp, Homo sapien
tatgtaatagccagtctatctagca

SEQ ID NO: 5610396 - DNA, 25 bp, Homo sapien
tgcctatgtcaaagtggtatgttat

SEQ ID NO: 5610397 - DNA, 25 bp, Homo sapien
ataggggatatataccatgtgactc

SEQ ID NO: 5610398 - DNA, 25 bp, Homo sapien
tctgaggtagtaagttcaaaaacaa

SEQ ID NO: 5610399 - DNA, 25 bp, Homo sapien
tttacaggtatcataggggatatat

SEQ ID NO: 5610400 - DNA, 25 bp, Homo sapien
agtgagaaactgcctatgtcaaagt

SEQ ID NO: 5610401 - DNA, 25 bp, Homo sapien
catgtgactctgaggtagtaagttc

SEQ ID NO: 5610402 - DNA, 25 bp, Homo sapien
ttttggccacagttgacgattaata

SEQ ID NO: 5610403 - DNA, 25 bp, Homo sapien
aacagagatgtaagatcataaagaa

SEQ ID NO: 5610404 - DNA, 25 bp, Homo sapien
tctcatgaaactcaattttggccac

SEQ ID NO: 5610405 - DNA, 25 bp, Homo sapien
ttacttttgtaagtgagaaactgcc

SEQ ID NO: 5610406 - DNA, 25 bp, Homo sapien
cctgcaacaggaatatcgacctatt

SEQ ID NO: 5610407 - DNA, 25 bp, Homo sapien
caggtgccactataggaatagctgg

SEQ ID NO: 5610408 - DNA, 25 bp, Homo sapien
ccgcccaatatgcacagccatgtcc

SEQ ID NO: 5610409 - DNA, 25 bp, Homo sapien
tgattatctcgtggctgtagtttga

SEQ ID NO: 5610410 - DNA, 25 bp, Homo sapien
tttacaaaccaggcctgtcaccatc

SEQ ID NO: 5610411 - DNA, 25 bp, Homo sapien
gaaacatgccactgaaagctagttc

SEQ ID NO: 5610412 - DNA, 25 bp, Homo sapien
ttggggtgccacttggttccaattc

SEQ ID NO: 5610413 - DNA, 25 bp, Homo sapien
tgaaagctagttctcttggggtgcc

SEQ ID NO: 5610414 - DNA, 25 bp, Homo sapien
cttatgctaggagaaaaatgctgtt

SEQ ID NO: 5610415 - DNA, 25 bp, Homo sapien
tagtttgaaattgtagaggtcttgc

SEQ ID NO: 5610416 - DNA, 25 bp, Homo sapien
attagggaaagtccaggaccatgtt

SEQ ID NO: 5610417 - DNA, 25 bp, Homo sapien
ggtgcctaccggtccgtgaggtcgg

SEQ ID NO: 5610418 - DNA, 25 bp, Homo sapien
ccgacctcacggaccggtaggcacc

SEQ ID NO: 5610419 - DNA, 25 bp, Homo sapien
gacacagcatatttccagttcacca

SEQ ID NO: 5610420 - DNA, 25 bp, Homo sapien
atcttcaaattcaagaacaagttat

SEQ ID NO: 5610421 - DNA, 25 bp, Homo sapien
gattacaggcacctgtcactacacc

SEQ ID NO: 5610422 - DNA, 25 bp, Homo sapien
gtcttgaactcctaagctcacgtga

SEQ ID NO: 5610423 - DNA, 25 bp, Homo sapien
tctaaaatgacacagcatatttcca

SEQ ID NO: 5610424 - DNA, 25 bp, Homo sapien
cgtgccggccatcagatacgttctt

SEQ ID NO: 5610425 - DNA, 25 bp, Homo sapien
tttgaatttgaaagacttaaatatc

SEQ ID NO: 5610426 - DNA, 25 bp, Homo sapien
gaaagacttaaatatcatttgtgtc

SEQ ID NO: 5610427 - DNA, 25 bp, Homo sapien
aagtgattctcatgtctcagcctcc

SEQ ID NO: 5610428 - DNA, 25 bp, Homo sapien
aggcacctgtcactacacctggcta

SEQ ID NO: 5610429 - DNA, 25 bp, Homo sapien
tcctaagctcacgtgattcacctgc

SEQ ID NO: 5610430 - DNA, 25 bp, Homo sapien
aactgaaacagtcaaacaaacccac

SEQ ID NO: 5610431 - DNA, 25 bp, Homo sapien
cccactaattgaaaagagtaagtgc

SEQ ID NO: 5610432 - DNA, 25 bp, Homo sapien
gaggattgtgataggatgataaagt

SEQ ID NO: 5610433 - DNA, 25 bp, Homo sapien
atggtatcgtctactcaggaggtaa

SEQ ID NO: 5610434 - DNA, 25 bp, Homo sapien
cctcacagtgagagctttggtaatc

SEQ ID NO: 5610435 - DNA, 25 bp, Homo sapien
ggcccctacagcatggtatcgtcta

SEQ ID NO: 5610436 - DNA, 25 bp, Homo sapien
gtctactcaggaggtaagtcacaga

SEQ ID NO: 5610437 - DNA, 25 bp, Homo sapien
ttggtacctacacagggcccctaca

SEQ ID NO: 5610438 - DNA, 25 bp, Homo sapien
ggcaagctgaaaattggtacctaca

SEQ ID NO: 5610439 - DNA, 25 bp, Homo sapien
ttcttcatacagaagactggcaagc

SEQ ID NO: 5610440 - DNA, 25 bp, Homo sapien
ctcagcagagtgccacatatactgg

SEQ ID NO: 5610441 - DNA, 25 bp, Homo sapien
agcatttttgacttcctagggaaaa

SEQ ID NO: 5610442 - DNA, 25 bp, Homo sapien
aactaccatgtcaagggacagagct

SEQ ID NO: 5610443 - DNA, 25 bp, Homo sapien
tttctggtaaggcaaaatagatctt

SEQ ID NO: 5610444 - DNA, 25 bp, Homo sapien
gggagaactaccatgtcaagggaca

SEQ ID NO: 5610445 - DNA, 25 bp, Homo sapien
agtaaaccccactaccatagaaaga

SEQ ID NO: 5610446 - DNA, 25 bp, Homo sapien
tcccaggtacccactgcttagcttc

SEQ ID NO: 5610447 - DNA, 25 bp, Homo sapien
attttatcctcagaagtaaacccca

SEQ ID NO: 5610448 - DNA, 25 bp, Homo sapien
taccatgtcaagggacagagctttt

SEQ ID NO: 5610449 - DNA, 25 bp, Homo sapien
atcctcagaagtaaaccccactacc

SEQ ID NO: 5610450 - DNA, 25 bp, Homo sapien
aagggttgaagtttttgacagttga

SEQ ID NO: 5610451 - DNA, 25 bp, Homo sapien
ttcttttctggtaaggcaaaataga

SEQ ID NO: 5610452 - DNA, 25 bp, Homo sapien
taggatgggatgttatgtagtcatt

SEQ ID NO: 5610453 - DNA, 25 bp, Homo sapien
gattcgtcaataggatgggatgtta

SEQ ID NO: 5610454 - DNA, 25 bp, Homo sapien
ttctctgagatagatgggattccca

SEQ ID NO: 5610455 - DNA, 25 bp, Homo sapien
ctggttgaaaataaatagctcagac

SEQ ID NO: 5610456 - DNA, 25 bp, Homo sapien
cactgtgcggtgatttctctgagat

SEQ ID NO: 5610457 - DNA, 25 bp, Homo sapien
aatagctcagacactgtgcggtgat

SEQ ID NO: 5610458 - DNA, 25 bp, Homo sapien
tataattctgctctgacactgcttt

SEQ ID NO: 5610459 - DNA, 25 bp, Homo sapien
tatacgtgcggacaaagaatataaa

SEQ ID NO: 5610460 - DNA, 25 bp, Homo sapien
taagttaacaaatcagatcaccctc

SEQ ID NO: 5610461 - DNA, 25 bp, Homo sapien
tccacatctatatacgtgcggacaa

SEQ ID NO: 5610462 - DNA, 25 bp, Homo sapien
gcaaccgtgttaaatgttatgtatc

SEQ ID NO: 5610463 - DNA, 25 bp, Homo sapien
ttgtgttctgtgataaatgagcctt

SEQ ID NO: 5610464 - DNA, 25 bp, Homo sapien
ttttcaattatgggaagcgtagtgg

SEQ ID NO: 5610465 - DNA, 25 bp, Homo sapien
tgttgcggtactttgatataaaatc

SEQ ID NO: 5610466 - DNA, 25 bp, Homo sapien
ttgaggacatatgaggaatttattc

SEQ ID NO: 5610467 - DNA, 25 bp, Homo sapien
taaaatcagaaagatactgagcttg

SEQ ID NO: 5610468 - DNA, 25 bp, Homo sapien
aataagactagcatccaaatcgcat

SEQ ID NO: 5610469 - DNA, 25 bp, Homo sapien
ttaggaaggattatgagccaaagag

SEQ ID NO: 5610470 - DNA, 25 bp, Homo sapien
caatgatgcattgttgcggtacttt

SEQ ID NO: 5610471 - DNA, 25 bp, Homo sapien
tagaattgtactattgaggacatat

SEQ ID NO: 5610472 - DNA, 25 bp, Homo sapien
tgagccaaagagaaagttttacaaa

SEQ ID NO: 5610473 - DNA, 25 bp, Homo sapien
ttacaattaggaaggattatgagcc

SEQ ID NO: 5610474 - DNA, 25 bp, Homo sapien
acatggcacaagatcccagtggact

SEQ ID NO: 5610475 - DNA, 25 bp, Homo sapien
tgcctcagtgttccattcagtctac

SEQ ID NO: 5610476 - DNA, 25 bp, Homo sapien
acagccctggcccaagccaaaagtc

SEQ ID NO: 5610477 - DNA, 25 bp, Homo sapien
cactgggtcatggcacacattagtt

SEQ ID NO: 5610478 - DNA, 25 bp, Homo sapien
agatcccagtggactggcatgggaa

SEQ ID NO: 5610479 - DNA, 25 bp, Homo sapien
catggcacacattagttcactgatc

SEQ ID NO: 5610480 - DNA, 25 bp, Homo sapien
tcttccacttgttgaaagcatctcc

SEQ ID NO: 5610481 - DNA, 25 bp, Homo sapien
aagcatctccaaacagccctggccc

SEQ ID NO: 5610482 - DNA, 25 bp, Homo sapien
cctcaattacatggcacaagatccc

SEQ ID NO: 5610483 - DNA, 25 bp, Homo sapien
gcccaagccaaaagtccttggcctc

SEQ ID NO: 5610484 - DNA, 25 bp, Homo sapien
atctggcgccccctcaattacatgg

SEQ ID NO: 5610485 - DNA, 25 bp, Homo sapien
taaacgaaccataaatgctgttgcc

SEQ ID NO: 5610486 - DNA, 25 bp, Homo sapien
ataaaaagcatataataggccgggt

SEQ ID NO: 5610487 - DNA, 25 bp, Homo sapien
tgggcaacatggcaaagcctcatct

SEQ ID NO: 5610488 - DNA, 25 bp, Homo sapien
ctaagttgaaaaacgttatattctc

SEQ ID NO: 5610489 - DNA, 25 bp, Homo sapien
tccaatcagggttacactgtgaaac

SEQ ID NO: 5610490 - DNA, 25 bp, Homo sapien
gtgaaaccagatcatagggggttgt

SEQ ID NO: 5610491 - DNA, 25 bp, Homo sapien
ctcacctgcctgaagtatatcatcc

SEQ ID NO: 5610492 - DNA, 25 bp, Homo sapien
aaaacaaaacaaaacagcatgtaat

SEQ ID NO: 5610493 - DNA, 25 bp, Homo sapien
agcatataataggccgggtacagtg

SEQ ID NO: 5610494 - DNA, 25 bp, Homo sapien
gccgggtacagtggcttacacttgt

SEQ ID NO: 5610495 - DNA, 25 bp, Homo sapien
atagagaaaaaaagtgaataatcac

SEQ ID NO: 5610496 - DNA, 25 bp, Homo sapien
tttccaaaactgagctgtgatccac

SEQ ID NO: 5610497 - DNA, 25 bp, Homo sapien
ttgaacatggcaaacatggtgtggg

SEQ ID NO: 5610498 - DNA, 25 bp, Homo sapien
gttcctctcaagtaccacgatgggt

SEQ ID NO: 5610499 - DNA, 25 bp, Homo sapien
gcgcgccactgtactgagccttcaa

SEQ ID NO: 5610500 - DNA, 25 bp, Homo sapien
gagcttatgtctgatgaggagtgca

SEQ ID NO: 5610501 - DNA, 25 bp, Homo sapien
aatattatctgaggagagatggctg

SEQ ID NO: 5610502 - DNA, 25 bp, Homo sapien
atggcccttcagatggagactggct

SEQ ID NO: 5610503 - DNA, 25 bp, Homo sapien
accacgatgggttttaggttctaga

SEQ ID NO: 5610504 - DNA, 25 bp, Homo sapien
tggaccaagtccaagagcttatgtc

SEQ ID NO: 5610505 - DNA, 25 bp, Homo sapien
gctggagattgaacatggcaaacat

SEQ ID NO: 5610506 - DNA, 25 bp, Homo sapien
gggtgagaataaaatggaccaagtc

SEQ ID NO: 5610507 - DNA, 25 bp, Homo sapien
cagtgaatactgacatggtaatgta

SEQ ID NO: 5610508 - DNA, 25 bp, Homo sapien
ggcaggatctggtttgctctgtagt

SEQ ID NO: 5610509 - DNA, 25 bp, Homo sapien
tctgtatcatttggggggaatgttt

SEQ ID NO: 5610510 - DNA, 25 bp, Homo sapien
tcacacgataaccagatattatgac

SEQ ID NO: 5610511 - DNA, 25 bp, Homo sapien
catggtaatgtataagtgtagtatc

SEQ ID NO: 5610512 - DNA, 25 bp, Homo sapien
taatctacataaagagaatgcatag

SEQ ID NO: 5610513 - DNA, 25 bp, Homo sapien
tatgcgtgtcactctcagtctgttc

SEQ ID NO: 5610514 - DNA, 25 bp, Homo sapien
gagaatgcataggtcataaatgtcc

SEQ ID NO: 5610515 - DNA, 25 bp, Homo sapien
gttcaaagacagacataaacaggct

SEQ ID NO: 5610516 - DNA, 25 bp, Homo sapien
aaagtaccaagtgaataaacatgtc

SEQ ID NO: 5610517 - DNA, 25 bp, Homo sapien
tctgtagagtcaaatacatgtagtc

SEQ ID NO: 5610518 - DNA, 25 bp, Homo sapien
cgatttcactttctggaggaggcgg

SEQ ID NO: 5610519 - DNA, 25 bp, Homo sapien
tacactccttgatgcctgggatacc

SEQ ID NO: 5610520 - DNA, 25 bp, Homo sapien
ttgattcattgaaagttacactcct

SEQ ID NO: 5610521 - DNA, 25 bp, Homo sapien
aacagaggctggaatttaaaatgat

SEQ ID NO: 5610522 - DNA, 25 bp, Homo sapien
agtaaaatgtaactcatagaccttc

SEQ ID NO: 5610523 - DNA, 25 bp, Homo sapien
cctaggctgccaacactgtaaaact

SEQ ID NO: 5610524 - DNA, 25 bp, Homo sapien
ctgggtcaggtggttaatttctccc

SEQ ID NO: 5610525 - DNA, 25 bp, Homo sapien
gcgggatccttccctgggtcaggtg

SEQ ID NO: 5610526 - DNA, 25 bp, Homo sapien
cacacccggcgatttcactttctgg

SEQ ID NO: 5610527 - DNA, 25 bp, Homo sapien
taagatccttctttaaacagaggct

SEQ ID NO: 5610528 - DNA, 25 bp, Homo sapien
ttgaagaaaagttaagtgatacctg

SEQ ID NO: 5610529 - DNA, 25 bp, Homo sapien
gtgtgaatgagactttctttgtatc

SEQ ID NO: 5610530 - DNA, 25 bp, Homo sapien
aaatgaaagaaagtatgttggtttc

SEQ ID NO: 5610531 - DNA, 25 bp, Homo sapien
ataaagcagcagttttgaatagaaa

SEQ ID NO: 5610532 - DNA, 25 bp, Homo sapien
gcacattcattagccacatggtagc

SEQ ID NO: 5610533 - DNA, 25 bp, Homo sapien
aaatgaattatgcccaggataatcc

SEQ ID NO: 5610534 - DNA, 25 bp, Homo sapien
acagaaaatatggttctcatacatg

SEQ ID NO: 5610535 - DNA, 25 bp, Homo sapien
gtacaaataaagcagcagttttgaa

SEQ ID NO: 5610536 - DNA, 25 bp, Homo sapien
cacatgaacacatcaaatgacaggt

SEQ ID NO: 5610537 - DNA, 25 bp, Homo sapien
aaactatccaaacacaaaacacaca

SEQ ID NO: 5610538 - DNA, 25 bp, Homo sapien
cacatggtagctacctcttagcctc

SEQ ID NO: 5610539 - DNA, 25 bp, Homo sapien
tcttagcctcattgttgattgtgtg

SEQ ID NO: 5610540 - DNA, 25 bp, Homo sapien
acaatgtcaatttctgagggatata

SEQ ID NO: 5610541 - DNA, 25 bp, Homo sapien
atgtttggatcaaaaagagaaactg

SEQ ID NO: 5610542 - DNA, 25 bp, Homo sapien
atcgaggcagatcatatgtttggat

SEQ ID NO: 5610543 - DNA, 25 bp, Homo sapien
aattctgagtaaacttaaggtatgt

SEQ ID NO: 5610544 - DNA, 25 bp, Homo sapien
tttcgtaacaacaaagtatgttcac

SEQ ID NO: 5610545 - DNA, 25 bp, Homo sapien
gaaactggcaagtagatcttaaaac

SEQ ID NO: 5610546 - DNA, 25 bp, Homo sapien
taaacctgagtaacagatgaaaaaa

SEQ ID NO: 5610547 - DNA, 25 bp, Homo sapien
gtggtgcaagaacttatccaagaac

SEQ ID NO: 5610548 - DNA, 25 bp, Homo sapien
ccccagacatgcctgatctattatt

SEQ ID NO: 5610549 - DNA, 25 bp, Homo sapien
actttacatagtgccataggtttac

SEQ ID NO: 5610550 - DNA, 25 bp, Homo sapien
gatgttgttatttatcgaggcagat

SEQ ID NO: 5610551 - DNA, 25 bp, Homo sapien
ctccctccatcaaaacggctaacat

SEQ ID NO: 5610552 - DNA, 25 bp, Homo sapien
gaaatggaaccatagtgatgtattc

SEQ ID NO: 5610553 - DNA, 25 bp, Homo sapien
atacagattaaaaaaggaaatgccc

SEQ ID NO: 5610554 - DNA, 25 bp, Homo sapien
gttcttctgaagacccctgtgccct

SEQ ID NO: 5610555 - DNA, 25 bp, Homo sapien
aaaaaaggaaatgcccacaggcttc

SEQ ID NO: 5610556 - DNA, 25 bp, Homo sapien
acaaaagcacataaacatacagatt

SEQ ID NO: 5610557 - DNA, 25 bp, Homo sapien
tatcatgtatttgacagcctgtttt

SEQ ID NO: 5610558 - DNA, 25 bp, Homo sapien
tgccctcatgatcacctctccctcc

SEQ ID NO: 5610559 - DNA, 25 bp, Homo sapien
cacactgttggtggacacttgggat

SEQ ID NO: 5610560 - DNA, 25 bp, Homo sapien
acaggcttcagaaacagaccctcac

SEQ ID NO: 5610561 - DNA, 25 bp, Homo sapien
gaagacccctgtgccctcatgatca

SEQ ID NO: 5610562 - DNA, 25 bp, Homo sapien
atgttcccaatgacttccctgactt

SEQ ID NO: 5610563 - DNA, 25 bp, Homo sapien
tacaaagaaaagtgttagcaactat

SEQ ID NO: 5610564 - DNA, 25 bp, Homo sapien
tctagaagctactgtggctaaactc

SEQ ID NO: 5610565 - DNA, 25 bp, Homo sapien
gcaactataagctctggaaagacca

SEQ ID NO: 5610566 - DNA, 25 bp, Homo sapien
atctggttccagtcaaaaggtaaac

SEQ ID NO: 5610567 - DNA, 25 bp, Homo sapien
ggtaaagtctgatatagcttgggat

SEQ ID NO: 5610568 - DNA, 25 bp, Homo sapien
atctaaaatataacaccagggctac

SEQ ID NO: 5610569 - DNA, 25 bp, Homo sapien
aattactggatgagaagaaagtctt

SEQ ID NO: 5610570 - DNA, 25 bp, Homo sapien
aacaggacactgtaccaatgcttac

SEQ ID NO: 5610571 - DNA, 25 bp, Homo sapien
aacaccagggctactctagggtcaa

SEQ ID NO: 5610572 - DNA, 25 bp, Homo sapien
ctagggtcaaaagtccccaagagaa

SEQ ID NO: 5610573 - DNA, 25 bp, Homo sapien
actgagagccccagctatttaaaaa

SEQ ID NO: 5610574 - DNA, 25 bp, Homo sapien
tataatgagtgtgtgtgttaatact

SEQ ID NO: 5610575 - DNA, 25 bp, Homo sapien
tcacacagttaggaaagtccagagc

SEQ ID NO: 5610576 - DNA, 25 bp, Homo sapien
taggaaagtccagagcccggattta

SEQ ID NO: 5610577 - DNA, 25 bp, Homo sapien
aaaatctgtataatgagtgtgtgtg

SEQ ID NO: 5610578 - DNA, 25 bp, Homo sapien
aaggaacctgaagcttaaagaaata

SEQ ID NO: 5610579 - DNA, 25 bp, Homo sapien
agtttaaaagaattactacaacagc

SEQ ID NO: 5610580 - DNA, 25 bp, Homo sapien
tactacaacagcagctcatttttac

SEQ ID NO: 5610581 - DNA, 25 bp, Homo sapien
aagcaccaagacaaaaatgttccct

SEQ ID NO: 5610582 - DNA, 25 bp, Homo sapien
taggaaacaaagacaagcaccaaga

SEQ ID NO: 5610583 - DNA, 25 bp, Homo sapien
tattcataactgtcaaaagatcttt

SEQ ID NO: 5610584 - DNA, 25 bp, Homo sapien
agaccctgtccttgaaatgcagtcc

SEQ ID NO: 5610585 - DNA, 25 bp, Homo sapien
aaaaactgcccctgttctcagaagc

SEQ ID NO: 5610586 - DNA, 25 bp, Homo sapien
ctcgaaagcctagcctcgcctcctt

SEQ ID NO: 5610587 - DNA, 25 bp, Homo sapien
tcctgaagcaacaattctcagcccc

SEQ ID NO: 5610588 - DNA, 25 bp, Homo sapien
tctcagccccacaaggggcctgatt

SEQ ID NO: 5610589 - DNA, 25 bp, Homo sapien
acaaggggcctgatttgttgaccct

SEQ ID NO: 5610590 - DNA, 25 bp, Homo sapien
cacgaaaccagaacacaccaactgc

SEQ ID NO: 5610591 - DNA, 25 bp, Homo sapien
tccttatgcaccaggacaacaggcc

SEQ ID NO: 5610592 - DNA, 25 bp, Homo sapien
agtcctgtggtcatgaaaaactgcc

SEQ ID NO: 5610593 - DNA, 25 bp, Homo sapien
ctaatcaccaagaatccccctcccc

SEQ ID NO: 5610594 - DNA, 25 bp, Homo sapien
agaagccccacaggaagtaccctgt

SEQ ID NO: 5610595 - DNA, 25 bp, Homo sapien
gaaagctacctagtttcgaactgag

SEQ ID NO: 5610596 - DNA, 25 bp, Homo sapien
ctcagttcgaaactaggtagctttc

SEQ ID NO: 5610597 - DNA, 25 bp, Homo sapien
gcatttcagagtaatcagtaatatc

SEQ ID NO: 5610598 - DNA, 25 bp, Homo sapien
attatcacctaggaactacttaacc

SEQ ID NO: 5610599 - DNA, 25 bp, Homo sapien
aaaatggttctaaagaaaatctgtc

SEQ ID NO: 5610600 - DNA, 25 bp, Homo sapien
gtaatcagtaatatccagcttgaat

SEQ ID NO: 5610601 - DNA, 25 bp, Homo sapien
aaagaaaatctgtctcatgctgatc

SEQ ID NO: 5610602 - DNA, 25 bp, Homo sapien
gtctcatgctgatcagttcaaaatc

SEQ ID NO: 5610603 - DNA, 25 bp, Homo sapien
tttaaatgatagctgtaaaacaaaa

SEQ ID NO: 5610604 - DNA, 25 bp, Homo sapien
tctgctacaaaatgataatgcttct

SEQ ID NO: 5610605 - DNA, 25 bp, Homo sapien
cttttgaaaagactgcaatctatac

SEQ ID NO: 5610606 - DNA, 25 bp, Homo sapien
tccagcttgaattttgtccagaaca

SEQ ID NO: 5610607 - DNA, 25 bp, Homo sapien
attttagatagacctggtttaatat

SEQ ID NO: 5610608 - DNA, 25 bp, Homo sapien
tcaaatacctggacttcgtggggat

SEQ ID NO: 5610609 - DNA, 25 bp, Homo sapien
aggcactggttcaccttcagggtgc

SEQ ID NO: 5610610 - DNA, 25 bp, Homo sapien
accaggaaatggataccctcctccc

SEQ ID NO: 5610611 - DNA, 25 bp, Homo sapien
tcacccgtccctggccacctgttct

SEQ ID NO: 5610612 - DNA, 25 bp, Homo sapien
gaatggaaggatatcaccaggaaat

SEQ ID NO: 5610613 - DNA, 25 bp, Homo sapien
cctaggaccaaggcttaggtgtcag

SEQ ID NO: 5610614 - DNA, 25 bp, Homo sapien
gaaactttggagatagtctagcagc

SEQ ID NO: 5610615 - DNA, 25 bp, Homo sapien
tctcacacaagcagagatctctctc

SEQ ID NO: 5610616 - DNA, 25 bp, Homo sapien
tgggatacccgctttgaatggaagg

SEQ ID NO: 5610617 - DNA, 25 bp, Homo sapien
gatagtctagcagcggttctaggcc

SEQ ID NO: 5610618 - DNA, 25 bp, Homo sapien
aagaaaagagccaccactcaaatac

SEQ ID NO: 5610619 - DNA, 25 bp, Homo sapien
acatcccaaccaaactggcgtgttt

SEQ ID NO: 5610620 - DNA, 25 bp, Homo sapien
gttcaagtggtcctccaggctcagc

SEQ ID NO: 5610621 - DNA, 25 bp, Homo sapien
ttgtacagacgggatctcattatgt

SEQ ID NO: 5610622 - DNA, 25 bp, Homo sapien
cttctgactcatgagctgggtaaac

SEQ ID NO: 5610623 - DNA, 25 bp, Homo sapien
tgtgcttggcatgttatctaaaatc

SEQ ID NO: 5610624 - DNA, 25 bp, Homo sapien
gacttagtgctgctatccaatgccc

SEQ ID NO: 5610625 - DNA, 25 bp, Homo sapien
ctcagattcactactgggattacag

SEQ ID NO: 5610626 - DNA, 25 bp, Homo sapien
taaattatttgtacagacgggatct

SEQ ID NO: 5610627 - DNA, 25 bp, Homo sapien
cgatctgggaagcctgcgcttctca

SEQ ID NO: 5610628 - DNA, 25 bp, Homo sapien
catgagtcactgtgcttggcatgtt

SEQ ID NO: 5610629 - DNA, 25 bp, Homo sapien
catgagctgggtaaacataaacgtt

SEQ ID NO: 5610630 - DNA, 25 bp, Homo sapien
gctctcctgtccccgagcgatgtcc

SEQ ID NO: 5610631 - DNA, 25 bp, Homo sapien
ggggctctcctgtccccgagcgatg

SEQ ID NO: 5610632 - DNA, 25 bp, Homo sapien
cgcccaccacgcccgctcttcgttc

SEQ ID NO: 5610633 - DNA, 25 bp, Homo sapien
ggcgcccaccacgcccgctcttcgt

SEQ ID NO: 5610634 - DNA, 25 bp, Homo sapien
cacgcatggactgtgttccccttcc

SEQ ID NO: 5610635 - DNA, 25 bp, Homo sapien
gcccggggctctcctgtccccgagc

SEQ ID NO: 5610636 - DNA, 25 bp, Homo sapien
gcacgcatggactgtgttccccttc

SEQ ID NO: 5610637 - DNA, 25 bp, Homo sapien
ctgtgttccccttcccggccacggc

SEQ ID NO: 5610638 - DNA, 25 bp, Homo sapien
cgctcttcgttcgccccacccgggc

SEQ ID NO: 5610639 - DNA, 25 bp, Homo sapien
caccacgcccgctcttcgttcgccc

SEQ ID NO: 5610640 - DNA, 25 bp, Homo sapien
ggctctcctgtccccgagcgatgtc

SEQ ID NO: 5610641 - DNA, 25 bp, Homo sapien
cgttccgacaaaatggaggacgtcg

SEQ ID NO: 5610642 - DNA, 25 bp, Homo sapien
gagtctccatcaaccattgaggacc

SEQ ID NO: 5610643 - DNA, 25 bp, Homo sapien
tctgggtctctccaccgtcgtgccc

SEQ ID NO: 5610644 - DNA, 25 bp, Homo sapien
ccatcaaccattgaggaccaggaga

SEQ ID NO: 5610645 - DNA, 25 bp, Homo sapien
agggagcctccatggagtctccatc

SEQ ID NO: 5610646 - DNA, 25 bp, Homo sapien
ggtctctccaccgtcgtgcccgtcc

SEQ ID NO: 5610647 - DNA, 25 bp, Homo sapien
ccaccgtcgtgcccgtcccctgtgg

SEQ ID NO: 5610648 - DNA, 25 bp, Homo sapien
aagttcccacagtcgttccgacaaa

SEQ ID NO: 5610649 - DNA, 25 bp, Homo sapien
tccatcttggttgatggaggcgggg

SEQ ID NO: 5610650 - DNA, 25 bp, Homo sapien
ctgcgtctgggtctctccaccgtcg

SEQ ID NO: 5610651 - DNA, 25 bp, Homo sapien
cagtcgttccgacaaaatggaggac

SEQ ID NO: 5610652 - DNA, 25 bp, Homo sapien
atatacagtataaatcgggagtttt

SEQ ID NO: 5610653 - DNA, 25 bp, Homo sapien
tggtctggtttctcatgggtatgtt

SEQ ID NO: 5610654 - DNA, 25 bp, Homo sapien
aaactgaacttaggccttgtacact

SEQ ID NO: 5610655 - DNA, 25 bp, Homo sapien
cccaaatgactataagttcaaggtc

SEQ ID NO: 5610656 - DNA, 25 bp, Homo sapien
tcaacacaaaagatgaactcatttc

SEQ ID NO: 5610657 - DNA, 25 bp, Homo sapien
aaggtcacagtgatgatatatattc

SEQ ID NO: 5610658 - DNA, 25 bp, Homo sapien
ggccaatttgagaggaccacccata

SEQ ID NO: 5610659 - DNA, 25 bp, Homo sapien
tcaaagaacaatgtaaactgaactt

SEQ ID NO: 5610660 - DNA, 25 bp, Homo sapien
atagccagtcataagcttcagaaac

SEQ ID NO: 5610661 - DNA, 25 bp, Homo sapien
tatatagaaagcatgattatgttaa

SEQ ID NO: 5610662 - DNA, 25 bp, Homo sapien
gattatgttaaatacaggcatctcc

SEQ ID NO: 5610663 - DNA, 25 bp, Homo sapien
ctcctctctgagccctgggcctggc

SEQ ID NO: 5610664 - DNA, 25 bp, Homo sapien
tacaggtaatacaaaataaaccaca

SEQ ID NO: 5610665 - DNA, 25 bp, Homo sapien
caaaataaaccacaggacaaactac

SEQ ID NO: 5610666 - DNA, 25 bp, Homo sapien
accaccctccccatcccagagtaac

SEQ ID NO: 5610667 - DNA, 25 bp, Homo sapien
ttgctcctctctgagccctgggcct

SEQ ID NO: 5610668 - DNA, 25 bp, Homo sapien
tccccatcccagagtaacttatata

SEQ ID NO: 5610669 - DNA, 25 bp, Homo sapien
cacaggacaaactactgtgcagggg

SEQ ID NO: 5610670 - DNA, 25 bp, Homo sapien
gggctggaagcacctttgctggtta

SEQ ID NO: 5610671 - DNA, 25 bp, Homo sapien
taatacaaaataaaccacaggacaa

SEQ ID NO: 5610672 - DNA, 25 bp, Homo sapien
ccccacaataaccaccctccccatc

SEQ ID NO: 5610673 - DNA, 25 bp, Homo sapien
gcacctttgctggttaggactgggg

SEQ ID NO: 5610674 - DNA, 25 bp, Homo sapien
tagaactagatgtaaacatgactcc

SEQ ID NO: 5610675 - DNA, 25 bp, Homo sapien
agatattcctgaagcaagcccagtc

SEQ ID NO: 5610676 - DNA, 25 bp, Homo sapien
ctccagatgtgaacggatcagtaga

SEQ ID NO: 5610677 - DNA, 25 bp, Homo sapien
aactctccagatgtgaacggatcag

SEQ ID NO: 5610678 - DNA, 25 bp, Homo sapien
aatacaaccacagcacatttaggta

SEQ ID NO: 5610679 - DNA, 25 bp, Homo sapien
aagcccagtcatataacagggtgca

SEQ ID NO: 5610680 - DNA, 25 bp, Homo sapien
atgtgaacggatcagtagaactaga

SEQ ID NO: 5610681 - DNA, 25 bp, Homo sapien
gaacggatcagtagaactagatgta

SEQ ID NO: 5610682 - DNA, 25 bp, Homo sapien
cagagagttatagagggagttataa

SEQ ID NO: 5610683 - DNA, 25 bp, Homo sapien
ttgtaagatattcctgaagcaagcc

SEQ ID NO: 5610684 - DNA, 25 bp, Homo sapien
cctgaagcaagcccagtcatataac

SEQ ID NO: 5610685 - DNA, 25 bp, Homo sapien
tttggtaatgaatttatgattttcc

SEQ ID NO: 5610686 - DNA, 25 bp, Homo sapien
attaaaaatgtccccagctggctag

SEQ ID NO: 5610687 - DNA, 25 bp, Homo sapien
ataaacgatggtacagttttacttg

SEQ ID NO: 5610688 - DNA, 25 bp, Homo sapien
tttgggattataaactcttcgattc

SEQ ID NO: 5610689 - DNA, 25 bp, Homo sapien
cagttttacttggacaaggcaaggg

SEQ ID NO: 5610690 - DNA, 25 bp, Homo sapien
agtgaagtaatttgcagagctataa

SEQ ID NO: 5610691 - DNA, 25 bp, Homo sapien
gaactgaaacagaaagaatgaaaat

SEQ ID NO: 5610692 - DNA, 25 bp, Homo sapien
aaagaaagagtatggtttgggatta

SEQ ID NO: 5610693 - DNA, 25 bp, Homo sapien
tataagaactgaaacagaaagaatg

SEQ ID NO: 5610694 - DNA, 25 bp, Homo sapien
agagctataataccaaatcagaaat

SEQ ID NO: 5610695 - DNA, 25 bp, Homo sapien
ataatccatctaaaaagcaagttac

SEQ ID NO: 5610696 - DNA, 25 bp, Homo sapien
gtctcaaaagtcttctaattagccc

SEQ ID NO: 5610697 - DNA, 25 bp, Homo sapien
tttcagaaattgtttgaggaacaga

SEQ ID NO: 5610698 - DNA, 25 bp, Homo sapien
ttaggtaaatcatgtctcaaaagtc

SEQ ID NO: 5610699 - DNA, 25 bp, Homo sapien
tgcatttcagttatcacagccttta

SEQ ID NO: 5610700 - DNA, 25 bp, Homo sapien
agggtccaggtatgtttcattgtcc

SEQ ID NO: 5610701 - DNA, 25 bp, Homo sapien
tcaaagggtccaggtatgtttcatt

SEQ ID NO: 5610702 - DNA, 25 bp, Homo sapien
tacaaacacttaatagatgcaaata

SEQ ID NO: 5610703 - DNA, 25 bp, Homo sapien
agaaattgtttgaggaacagaaatc

SEQ ID NO: 5610704 - DNA, 25 bp, Homo sapien
atcacagcctttactattcacacac

SEQ ID NO: 5610705 - DNA, 25 bp, Homo sapien
acacactcaaagggtccaggtatgt

SEQ ID NO: 5610706 - DNA, 25 bp, Homo sapien
tactattcacacactcaaagggtcc

SEQ ID NO: 5610707 - DNA, 25 bp, Homo sapien
aggaatgagaaagttcagagaacta

SEQ ID NO: 5610708 - DNA, 25 bp, Homo sapien
gatttattgatttagggacagagtc

SEQ ID NO: 5610709 - DNA, 25 bp, Homo sapien
aacaaggataagtgattctgtctcc

SEQ ID NO: 5610710 - DNA, 25 bp, Homo sapien
ttgtaaagaagaaggcaatttatag

SEQ ID NO: 5610711 - DNA, 25 bp, Homo sapien
tctatttggatattcagggtattga

SEQ ID NO: 5610712 - DNA, 25 bp, Homo sapien
tgaaagacaggtaataatgagaaga

SEQ ID NO: 5610713 - DNA, 25 bp, Homo sapien
taaattagatacagtgtttgcatcc

SEQ ID NO: 5610714 - DNA, 25 bp, Homo sapien
tgcatccataggaatgagaaagttc

SEQ ID NO: 5610715 - DNA, 25 bp, Homo sapien
gtgggtatttggatctcagtgttgc

SEQ ID NO: 5610716 - DNA, 25 bp, Homo sapien
aaggctatattgtaaagaagaaggc

SEQ ID NO: 5610717 - DNA, 25 bp, Homo sapien
cagagaactaaccttgacgtgaact

SEQ ID NO: 5610718 - DNA, 25 bp, Homo sapien
tcacagaaaggattcacagtggaga

SEQ ID NO: 5610719 - DNA, 25 bp, Homo sapien
aaaatcagcaagctatgttaaagcc

SEQ ID NO: 5610720 - DNA, 25 bp, Homo sapien
agctaaattttcccccaccacacac

SEQ ID NO: 5610721 - DNA, 25 bp, Homo sapien
caattaacttcatcataacagtaac

SEQ ID NO: 5610722 - DNA, 25 bp, Homo sapien
ttacacagcaaaaaaatcagcaagc

SEQ ID NO: 5610723 - DNA, 25 bp, Homo sapien
cccccaccacacacatgaaatttcc

SEQ ID NO: 5610724 - DNA, 25 bp, Homo sapien
cccctggctttcacagaaaggattc

SEQ ID NO: 5610725 - DNA, 25 bp, Homo sapien
gcaaaaaaatcagcaagctatgtta

SEQ ID NO: 5610726 - DNA, 25 bp, Homo sapien
gagaggtgaaagcattacacagcaa

SEQ ID NO: 5610727 - DNA, 25 bp, Homo sapien
attctaaatctttctcccctggctt

SEQ ID NO: 5610728 - DNA, 25 bp, Homo sapien
tcagcaagctatgttaaagccaaaa

SEQ ID NO: 5610729 - DNA, 25 bp, Homo sapien
atcaatgtgagaatatgcaagtaat

SEQ ID NO: 5610730 - DNA, 25 bp, Homo sapien
aaaaaaacagtgctcagtattagat

SEQ ID NO: 5610731 - DNA, 25 bp, Homo sapien
gacaaaaagaattatgtggtcttaa

SEQ ID NO: 5610732 - DNA, 25 bp, Homo sapien
tttaaaactgaactattgcacaaat

SEQ ID NO: 5610733 - DNA, 25 bp, Homo sapien
tgtaaaattcagtgagaaacaaatg

SEQ ID NO: 5610734 - DNA, 25 bp, Homo sapien
tgggctctggaactagatgatttct

SEQ ID NO: 5610735 - DNA, 25 bp, Homo sapien
aacaaatagtggacaagaaataata

SEQ ID NO: 5610736 - DNA, 25 bp, Homo sapien
gtttataatctctgggctctggaac

SEQ ID NO: 5610737 - DNA, 25 bp, Homo sapien
cagtgagaaacaaatgtgtgccaat

SEQ ID NO: 5610738 - DNA, 25 bp, Homo sapien
cctttccttgagcagacaaaaagaa

SEQ ID NO: 5610739 - DNA, 25 bp, Homo sapien
tagtggacaagaaataatagtcacc

SEQ ID NO: 5610740 - DNA, 25 bp, Homo sapien
aaaagtcagggaggatattaaatga

SEQ ID NO: 5610741 - DNA, 25 bp, Homo sapien
cttgatttggctttggaacagatat

SEQ ID NO: 5610742 - DNA, 25 bp, Homo sapien
attaaccacaaagtgcgccccagag

SEQ ID NO: 5610743 - DNA, 25 bp, Homo sapien
tgggatcgtctgaaaagcacaagat

SEQ ID NO: 5610744 - DNA, 25 bp, Homo sapien
gttcctggccacaaagaagcaggtg

SEQ ID NO: 5610745 - DNA, 25 bp, Homo sapien
cccttgtacctggccagggaagtgg

SEQ ID NO: 5610746 - DNA, 25 bp, Homo sapien
gaacagatatggacaattagtggga

SEQ ID NO: 5610747 - DNA, 25 bp, Homo sapien
ccatgaataatatgagaggacagat

SEQ ID NO: 5610748 - DNA, 25 bp, Homo sapien
tagccatgcccagcaggactctttt

SEQ ID NO: 5610749 - DNA, 25 bp, Homo sapien
tatgatccacgcaggaccatgaata

SEQ ID NO: 5610750 - DNA, 25 bp, Homo sapien
cacagatacctggccaatcagtggc

SEQ ID NO: 5610751 - DNA, 25 bp, Homo sapien
cactagaagctttgaggtgacattc

SEQ ID NO: 5610752 - DNA, 25 bp, Homo sapien
gcctgtggtgaaatatctgcgcctc

SEQ ID NO: 5610753 - DNA, 25 bp, Homo sapien
agcatttggtagatggtcactcaat

SEQ ID NO: 5610754 - DNA, 25 bp, Homo sapien
gtgatgattatggcaaggagttgtt

SEQ ID NO: 5610755 - DNA, 25 bp, Homo sapien
catgaaatcatgggagtaaagcatt

SEQ ID NO: 5610756 - DNA, 25 bp, Homo sapien
gctgtgcaacacttggcaaattgac

SEQ ID NO: 5610757 - DNA, 25 bp, Homo sapien
cctacatgacagccccactagaagc

SEQ ID NO: 5610758 - DNA, 25 bp, Homo sapien
caagggaaacttgcctgtgaaattg

SEQ ID NO: 5610759 - DNA, 25 bp, Homo sapien
ccaaagcgaccacaacctacatgac

SEQ ID NO: 5610760 - DNA, 25 bp, Homo sapien
tttgtagggtgaatgtcaatattac

SEQ ID NO: 5610761 - DNA, 25 bp, Homo sapien
cctgtgtggccagcctaaaagtggg

SEQ ID NO: 5610762 - DNA, 25 bp, Homo sapien
taaaaaattagtaaatgctcatatt

SEQ ID NO: 5610763 - DNA, 25 bp, Homo sapien
ttttagatatgtccaacacacaatc

SEQ ID NO: 5610764 - DNA, 25 bp, Homo sapien
gatatttaagcaaaaatatgggaca

SEQ ID NO: 5610765 - DNA, 25 bp, Homo sapien
cattttcttaagataaagtacacct

SEQ ID NO: 5610766 - DNA, 25 bp, Homo sapien
ttagagtgtaaataagaataatctt

SEQ ID NO: 5610767 - DNA, 25 bp, Homo sapien
gtccaacacacaatcaaaagtattc

SEQ ID NO: 5610768 - DNA, 25 bp, Homo sapien
atttaggtttaattctgccagataa

SEQ ID NO: 5610769 - DNA, 25 bp, Homo sapien
tgaatacaagggcactgtatgaatt

SEQ ID NO: 5610770 - DNA, 25 bp, Homo sapien
actgcataaatgaatacaagggcac

SEQ ID NO: 5610771 - DNA, 25 bp, Homo sapien
tgaaaagttgtatatagatcaaatc

SEQ ID NO: 5610772 - DNA, 25 bp, Homo sapien
tgtatgaattttagaaaggggactc

SEQ ID NO: 5610773 - DNA, 25 bp, Homo sapien
aaaatgatattgaaagagaggttac

SEQ ID NO: 5610774 - DNA, 25 bp, Homo sapien
tcaggggaagaatacgttcccactc

SEQ ID NO: 5610775 - DNA, 25 bp, Homo sapien
ggggcagagtaatgatgatcctcta

SEQ ID NO: 5610776 - DNA, 25 bp, Homo sapien
agagaggttacagaagtgtaagaca

SEQ ID NO: 5610777 - DNA, 25 bp, Homo sapien
tgcttgatggcagtacttcagggga

SEQ ID NO: 5610778 - DNA, 25 bp, Homo sapien
tgagacattctgtagagactgagag

SEQ ID NO: 5610779 - DNA, 25 bp, Homo sapien
cagcttgactttagcgggactgctt

SEQ ID NO: 5610780 - DNA, 25 bp, Homo sapien
cctggccaagacccactctcaagcc

SEQ ID NO: 5610781 - DNA, 25 bp, Homo sapien
aactatagcagaataaaacagaagc

SEQ ID NO: 5610782 - DNA, 25 bp, Homo sapien
aatcctaaaagaatagtggactgtt

SEQ ID NO: 5610783 - DNA, 25 bp, Homo sapien
atgaggtcaggcagataaaattatt

SEQ ID NO: 5610784 - DNA, 25 bp, Homo sapien
cgcgcgtggccgcaaatatcttaca

SEQ ID NO: 5610785 - DNA, 25 bp, Homo sapien
aagtgccttgtcaaaccaaataacc

SEQ ID NO: 5610786 - DNA, 25 bp, Homo sapien
ccagggcttagactcaggatatcct

SEQ ID NO: 5610787 - DNA, 25 bp, Homo sapien
gtggccgcaaatatcttacagggtt

SEQ ID NO: 5610788 - DNA, 25 bp, Homo sapien
gggttgatagaatagcaagtaatac

SEQ ID NO: 5610789 - DNA, 25 bp, Homo sapien
ttacagggttgatagaatagcaagt

SEQ ID NO: 5610790 - DNA, 25 bp, Homo sapien
ttccagctaaggcaaagctcaggga

SEQ ID NO: 5610791 - DNA, 25 bp, Homo sapien
ccaagatattttcacacacacagcc

SEQ ID NO: 5610792 - DNA, 25 bp, Homo sapien
ctatttgccattggcagaaaccagg

SEQ ID NO: 5610793 - DNA, 25 bp, Homo sapien
tcagggagcctaagtgccttgtcaa

SEQ ID NO: 5610794 - DNA, 25 bp, Homo sapien
cacacagccttttaacctcacagat

SEQ ID NO: 5610795 - DNA, 25 bp, Homo sapien
atggctgaatctacataatatagca

SEQ ID NO: 5610796 - DNA, 25 bp, Homo sapien
cataacactatatagatggacctac

SEQ ID NO: 5610797 - DNA, 25 bp, Homo sapien
atatacatgcccatctatagcagtt

SEQ ID NO: 5610798 - DNA, 25 bp, Homo sapien
actaaattgtaagaaaactggtcac

SEQ ID NO: 5610799 - DNA, 25 bp, Homo sapien
gtgtctatagataatggtgctcaac

SEQ ID NO: 5610800 - DNA, 25 bp, Homo sapien
tatgtaagagtatatgtgtctatag

SEQ ID NO: 5610801 - DNA, 25 bp, Homo sapien
taagattaagcactatttatggctg

SEQ ID NO: 5610802 - DNA, 25 bp, Homo sapien
aatatagcacaatatgtaagagtat

SEQ ID NO: 5610803 - DNA, 25 bp, Homo sapien
aattttacaggaatcgcatacattt

SEQ ID NO: 5610804 - DNA, 25 bp, Homo sapien
tcccttgaagaactcaagaaactaa

SEQ ID NO: 5610805 - DNA, 25 bp, Homo sapien
ggacctacataatatagcatggtat

SEQ ID NO: 5610806 - DNA, 25 bp, Homo sapien
catatggtatcacaaaagaccctga

SEQ ID NO: 5610807 - DNA, 25 bp, Homo sapien
tgaaatacactacatagctatggta

SEQ ID NO: 5610808 - DNA, 25 bp, Homo sapien
aaatggactattcatgaactgacat

SEQ ID NO: 5610809 - DNA, 25 bp, Homo sapien
caaaaagttgaaacgccttacattc

SEQ ID NO: 5610810 - DNA, 25 bp, Homo sapien
gctatggtaaccaactgtatggtac

SEQ ID NO: 5610811 - DNA, 25 bp, Homo sapien
tgcaacctctatcgaaatacgtgat

SEQ ID NO: 5610812 - DNA, 25 bp, Homo sapien
attacacaaaatgacctacaggtat

SEQ ID NO: 5610813 - DNA, 25 bp, Homo sapien
tacaggtataatgcaacctctatcg

SEQ ID NO: 5610814 - DNA, 25 bp, Homo sapien
tcaagacaaaataagtgactaactt

SEQ ID NO: 5610815 - DNA, 25 bp, Homo sapien
aagcaatcaagacaaaataagtgac

SEQ ID NO: 5610816 - DNA, 25 bp, Homo sapien
atggtacttgaataaaaacagagac

SEQ ID NO: 5610817 - DNA, 25 bp, Homo sapien
tttgcctgtgacaagttgcatatat

SEQ ID NO: 5610818 - DNA, 25 bp, Homo sapien
attgttgctgcaaagatcgcactac

SEQ ID NO: 5610819 - DNA, 25 bp, Homo sapien
cttgttagtttgtaggaatgctgta

SEQ ID NO: 5610820 - DNA, 25 bp, Homo sapien
actgcagcctacacctctgggactc

SEQ ID NO: 5610821 - DNA, 25 bp, Homo sapien
agcctacacctctgggactcaagca

SEQ ID NO: 5610822 - DNA, 25 bp, Homo sapien
cctaagtcaaagggcatgtgcattt

SEQ ID NO: 5610823 - DNA, 25 bp, Homo sapien
atattacggaaattagccttttgcc

SEQ ID NO: 5610824 - DNA, 25 bp, Homo sapien
gtaggaatgctgtatatattacgga

SEQ ID NO: 5610825 - DNA, 25 bp, Homo sapien
tatgactatataatggaccagagtt

SEQ ID NO: 5610826 - DNA, 25 bp, Homo sapien
aattcctaagtcaaagggcatgtgc

SEQ ID NO: 5610827 - DNA, 25 bp, Homo sapien
aggcttgccccactgcatcctgcta

SEQ ID NO: 5610828 - DNA, 25 bp, Homo sapien
cagtaggtcacatgataggagatgg

SEQ ID NO: 5610829 - DNA, 25 bp, Homo sapien
acagggaagatgagattgcatctct

SEQ ID NO: 5610830 - DNA, 25 bp, Homo sapien
tttcagaaaaaggagacacattgac

SEQ ID NO: 5610831 - DNA, 25 bp, Homo sapien
tctccctctagcctgcctgcacaag

SEQ ID NO: 5610832 - DNA, 25 bp, Homo sapien
attcaggcctaattacctcgaccac

SEQ ID NO: 5610833 - DNA, 25 bp, Homo sapien
aggagacacattgacctggagtttc

SEQ ID NO: 5610834 - DNA, 25 bp, Homo sapien
cagtctcctgccatctggcaaaggt

SEQ ID NO: 5610835 - DNA, 25 bp, Homo sapien
atgataggagatggcagtctcctgc

SEQ ID NO: 5610836 - DNA, 25 bp, Homo sapien
atatggttcaacttatccgcacttt

SEQ ID NO: 5610837 - DNA, 25 bp, Homo sapien
atccgcactttgtccagtaggtcac

SEQ ID NO: 5610838 - DNA, 25 bp, Homo sapien
ctggagtttccccgcttagacaatt

SEQ ID NO: 5610839 - DNA, 25 bp, Homo sapien
cagttatccctgggagaggaaagct

SEQ ID NO: 5610840 - DNA, 25 bp, Homo sapien
caaaaaaccgacgctttctctttca

SEQ ID NO: 5610841 - DNA, 25 bp, Homo sapien
aaagctccagaattttcacacattt

SEQ ID NO: 5610842 - DNA, 25 bp, Homo sapien
actaatgctgtctggagtgtcacct

SEQ ID NO: 5610843 - DNA, 25 bp, Homo sapien
taggaggaaacactaatgctgtctg

SEQ ID NO: 5610844 - DNA, 25 bp, Homo sapien
ggttaaggaactggatattgaagac

SEQ ID NO: 5610845 - DNA, 25 bp, Homo sapien
ctttcaatcctcaaggcctccagtt

SEQ ID NO: 5610846 - DNA, 25 bp, Homo sapien
ggctagaatgctaagaaaaaggtta

SEQ ID NO: 5610847 - DNA, 25 bp, Homo sapien
gaactggatattgaagacggcaatc

SEQ ID NO: 5610848 - DNA, 25 bp, Homo sapien
gagtgtcacctcctgtccttgcaaa

SEQ ID NO: 5610849 - DNA, 25 bp, Homo sapien
attgaagacggcaatcgtccctttt

SEQ ID NO: 5610850 - DNA, 25 bp, Homo sapien
ggccctctccccgcacgcgtctcct

SEQ ID NO: 5610851 - DNA, 25 bp, Homo sapien
acgcaggtcagcaactggttcaaga

SEQ ID NO: 5610852 - DNA, 25 bp, Homo sapien
tcgactgcgcaagaagttcccgctg

SEQ ID NO: 5610853 - DNA, 25 bp, Homo sapien
gctgcccaagaccatctgggacggc

SEQ ID NO: 5610854 - DNA, 25 bp, Homo sapien
ggcctgtcgctcacgcaggtcagca

SEQ ID NO: 5610855 - DNA, 25 bp, Homo sapien
ggggacatcccgtccaccagccctc

SEQ ID NO: 5610856 - DNA, 25 bp, Homo sapien
agcggctccattccgagctccttcc

SEQ ID NO: 5610857 - DNA, 25 bp, Homo sapien
ggagcgctcccgcgcagcgctcaag

SEQ ID NO: 5610858 - DNA, 25 bp, Homo sapien
gaggtcctcggacatctcccgggac

SEQ ID NO: 5610859 - DNA, 25 bp, Homo sapien
ggcgaggagacagtctactgcttca

SEQ ID NO: 5610860 - DNA, 25 bp, Homo sapien
ccgcctggccacactcaccggcctg

SEQ ID NO: 5610861 - DNA, 25 bp, Homo sapien
tctcagagtcagagagtagtcgtga

SEQ ID NO: 5610862 - DNA, 25 bp, Homo sapien
aaggagaggtcaattatctggattc

SEQ ID NO: 5610863 - DNA, 25 bp, Homo sapien
ttgcataccaatagaaggagaggtc

SEQ ID NO: 5610864 - DNA, 25 bp, Homo sapien
tccggaattttagagacgcctgcat

SEQ ID NO: 5610865 - DNA, 25 bp, Homo sapien
attggtgaccatatctccggaattt

SEQ ID NO: 5610866 - DNA, 25 bp, Homo sapien
cattgcaacgatgaataccaagttc

SEQ ID NO: 5610867 - DNA, 25 bp, Homo sapien
attaagatttgagcatgtcgcacat

SEQ ID NO: 5610868 - DNA, 25 bp, Homo sapien
gtctaaggctctaccggaggactat

SEQ ID NO: 5610869 - DNA, 25 bp, Homo sapien
gtaagttggagtatccggaatgcag

SEQ ID NO: 5610870 - DNA, 25 bp, Homo sapien
catatgtgtgttggaagtaagttgg

SEQ ID NO: 5610871 - DNA, 25 bp, Homo sapien
acgtatgtagcagaaatataaagac

SEQ ID NO: 5610872 - DNA, 25 bp, Homo sapien
aagaaaaagcatcctaagaattcca

SEQ ID NO: 5610873 - DNA, 25 bp, Homo sapien
gctagcttgggaatcacagtcattt

SEQ ID NO: 5610874 - DNA, 25 bp, Homo sapien
ggtatgattgaggctagcttgggaa

SEQ ID NO: 5610875 - DNA, 25 bp, Homo sapien
accacggttaaatatgtggcattta

SEQ ID NO: 5610876 - DNA, 25 bp, Homo sapien
aaatacattcccaagatagttttcc

SEQ ID NO: 5610877 - DNA, 25 bp, Homo sapien
gcatcctaagaattccaaactcacc

SEQ ID NO: 5610878 - DNA, 25 bp, Homo sapien
aatttcccgtagagggcactagaga

SEQ ID NO: 5610879 - DNA, 25 bp, Homo sapien
tttaacactctctgggactggaaaa

SEQ ID NO: 5610880 - DNA, 25 bp, Homo sapien
tctctgggactggaaaaatacattc

SEQ ID NO: 5610881 - DNA, 25 bp, Homo sapien
ctcaaagtcaagcagttcctagtta

SEQ ID NO: 5610882 - DNA, 25 bp, Homo sapien
agcagttcctagttaaccacggtta

SEQ ID NO: 5610883 - DNA, 25 bp, Homo sapien
tgaaacaagactaaggtaacaccag

SEQ ID NO: 5610884 - DNA, 25 bp, Homo sapien
ttgctctttacaaaggaagagaccc

SEQ ID NO: 5610885 - DNA, 25 bp, Homo sapien
gtaacaccagagatgtgtgggtgac

SEQ ID NO: 5610886 - DNA, 25 bp, Homo sapien
ataagaggagatatagacagacctc

SEQ ID NO: 5610887 - DNA, 25 bp, Homo sapien
ttaatggaacttagaaagagactac

SEQ ID NO: 5610888 - DNA, 25 bp, Homo sapien
gatgtgtgggtgactgccaatctat

SEQ ID NO: 5610889 - DNA, 25 bp, Homo sapien
cttagaaagagactacatcgtgggg

SEQ ID NO: 5610890 - DNA, 25 bp, Homo sapien
agagacccagcagcttttaagccag

SEQ ID NO: 5610891 - DNA, 25 bp, Homo sapien
ttaagccagttagtggtagagacag

SEQ ID NO: 5610892 - DNA, 25 bp, Homo sapien
aagacacccaaaaacttgtggcttg

SEQ ID NO: 5610893 - DNA, 25 bp, Homo sapien
aggcaagagtcaccaaaaaaggtca

SEQ ID NO: 5610894 - DNA, 25 bp, Homo sapien
ctcataatgcaaaagaacaatactc

SEQ ID NO: 5610895 - DNA, 25 bp, Homo sapien
tcactcaagagtataagttaaccac

SEQ ID NO: 5610896 - DNA, 25 bp, Homo sapien
cccacctaatggaaaagaatctctc

SEQ ID NO: 5610897 - DNA, 25 bp, Homo sapien
ctttgatgcaacaattatcacatgc

SEQ ID NO: 5610898 - DNA, 25 bp, Homo sapien
atagaaaagatcataaatgcccacc

SEQ ID NO: 5610899 - DNA, 25 bp, Homo sapien
atgaagaaacaccagaaaatgagtg

SEQ ID NO: 5610900 - DNA, 25 bp, Homo sapien
cacaagtgaataagaatgaagaaac

SEQ ID NO: 5610901 - DNA, 25 bp, Homo sapien
ctcagaactcttgacttagtatatc

SEQ ID NO: 5610902 - DNA, 25 bp, Homo sapien
tagtatatctgcagtgtcagttcct

SEQ ID NO: 5610903 - DNA, 25 bp, Homo sapien
agttaaccacaaagaacctctccac

SEQ ID NO: 5610904 - DNA, 25 bp, Homo sapien
cagaaaatgagtgttgaattacatc

SEQ ID NO: 5610905 - DNA, 25 bp, Homo sapien
atgatatgcagaacaacttggatgg

SEQ ID NO: 5610906 - DNA, 25 bp, Homo sapien
gcatgcatgttaaaactggtgattt

SEQ ID NO: 5610907 - DNA, 25 bp, Homo sapien
tgaaatagccaataccaaaagggta

SEQ ID NO: 5610908 - DNA, 25 bp, Homo sapien
tctgattgccaagggttagggctga

SEQ ID NO: 5610909 - DNA, 25 bp, Homo sapien
gtgactataaacaaggagcatgagg

SEQ ID NO: 5610910 - DNA, 25 bp, Homo sapien
tgaatctcgattacggtggtggtga

SEQ ID NO: 5610911 - DNA, 25 bp, Homo sapien
caaaagggtacatgctgtatgattc

SEQ ID NO: 5610912 - DNA, 25 bp, Homo sapien
tatctttggaagaagctgggttaag

SEQ ID NO: 5610913 - DNA, 25 bp, Homo sapien
gggttaagggcattcaagaactctg

SEQ ID NO: 5610914 - DNA, 25 bp, Homo sapien
gaggagaggttgtgactataaacaa

SEQ ID NO: 5610915 - DNA, 25 bp, Homo sapien
gtggtggtgacatgaatcaatatat

SEQ ID NO: 5610916 - DNA, 25 bp, Homo sapien
tctggtgcttaaagccaaaaccaac

SEQ ID NO: 5610917 - DNA, 25 bp, Homo sapien
caaacacagagacaatttttctcac

SEQ ID NO: 5610918 - DNA, 25 bp, Homo sapien
cttagttccttatctgcacagttca

SEQ ID NO: 5610919 - DNA, 25 bp, Homo sapien
ggatcaggagaaaaaagtgctctaa

SEQ ID NO: 5610920 - DNA, 25 bp, Homo sapien
tatattttgcataaagatgtggcat

SEQ ID NO: 5610921 - DNA, 25 bp, Homo sapien
gttatctgacatgtgccaaattctg

SEQ ID NO: 5610922 - DNA, 25 bp, Homo sapien
ttacttggtgcaactgtattatatt

SEQ ID NO: 5610923 - DNA, 25 bp, Homo sapien
ctgacatgtgccaaattctgacttc

SEQ ID NO: 5610924 - DNA, 25 bp, Homo sapien
tatgtggattatagttctggtgctt

SEQ ID NO: 5610925 - DNA, 25 bp, Homo sapien
taaagatgtggcattcttcaaacac

SEQ ID NO: 5610926 - DNA, 25 bp, Homo sapien
attatagagtaaatgctagcatatt

SEQ ID NO: 5610927 - DNA, 25 bp, Homo sapien
gaaaggcaagttccagttctgggtg

SEQ ID NO: 5610928 - DNA, 25 bp, Homo sapien
gacacgcagcaaataccagcggatc

SEQ ID NO: 5610929 - DNA, 25 bp, Homo sapien
acacgcagcaaataccagcggatcg

SEQ ID NO: 5610930 - DNA, 25 bp, Homo sapien
tacttatccagtcccctgttaatgg

SEQ ID NO: 5610931 - DNA, 25 bp, Homo sapien
acgggctcgctgtgtagtattcaat

SEQ ID NO: 5610932 - DNA, 25 bp, Homo sapien
cgggactggtgcttgcgcacctacg

SEQ ID NO: 5610933 - DNA, 25 bp, Homo sapien
gcgagaaaggcaagttccagttctg

SEQ ID NO: 5610934 - DNA, 25 bp, Homo sapien
tggtgcttgcgcacctacggcgact

SEQ ID NO: 5610935 - DNA, 25 bp, Homo sapien
ggcaagttccagttctgggtgcgct

SEQ ID NO: 5610936 - DNA, 25 bp, Homo sapien
gtgacacgcagcaaataccagcgga

SEQ ID NO: 5610937 - DNA, 25 bp, Homo sapien
agttccagttctgggtgcgctccaa

SEQ ID NO: 5610938 - DNA, 25 bp, Homo sapien
ataagtgagcttagaactgcatctt

SEQ ID NO: 5610939 - DNA, 25 bp, Homo sapien
ggaggtgcatgtgacaaaaaactaa

SEQ ID NO: 5610940 - DNA, 25 bp, Homo sapien
cagatcagattccaacccagctaac

SEQ ID NO: 5610941 - DNA, 25 bp, Homo sapien
gtagccaggtaagccatgcccttat

SEQ ID NO: 5610942 - DNA, 25 bp, Homo sapien
cccagctaacaccttgacgacaacc

SEQ ID NO: 5610943 - DNA, 25 bp, Homo sapien
gactgtgaatcaaagtagccaggta

SEQ ID NO: 5610944 - DNA, 25 bp, Homo sapien
ttaagaagaacttatgaggccagga

SEQ ID NO: 5610945 - DNA, 25 bp, Homo sapien
cgacaacccccatgagagactgtga

SEQ ID NO: 5610946 - DNA, 25 bp, Homo sapien
tttgacaaacagacaggtagaaact

SEQ ID NO: 5610947 - DNA, 25 bp, Homo sapien
cagtacttccagaggagagtttgag

SEQ ID NO: 5610948 - DNA, 25 bp, Homo sapien
ctgagccacagaaagtgtgagattt

SEQ ID NO: 5610949 - DNA, 25 bp, Homo sapien
cattaattaggagcctgtccagaag

SEQ ID NO: 5610950 - DNA, 25 bp, Homo sapien
aagcactttttggcatggttccctt

SEQ ID NO: 5610951 - DNA, 25 bp, Homo sapien
gtgtcagtatcatccccttgtgtgc

SEQ ID NO: 5610952 - DNA, 25 bp, Homo sapien
tataagaagtcaaagcttaactcac

SEQ ID NO: 5610953 - DNA, 25 bp, Homo sapien
gcatggttccctttgtgtcagtatc

SEQ ID NO: 5610954 - DNA, 25 bp, Homo sapien
aacaaccataaaaccttcaaagcac

SEQ ID NO: 5610955 - DNA, 25 bp, Homo sapien
cagaagaggtgtgaaacaacattta

SEQ ID NO: 5610956 - DNA, 25 bp, Homo sapien
atgggggctgcaatctgtttcaggt

SEQ ID NO: 5610957 - DNA, 25 bp, Homo sapien
ttgtgtgctgatttcagcctggtat

SEQ ID NO: 5610958 - DNA, 25 bp, Homo sapien
ttcaggtaattcagttgaaggtata

SEQ ID NO: 5610959 - DNA, 25 bp, Homo sapien
ctctggctaatcaaagagagccctc

SEQ ID NO: 5610960 - DNA, 25 bp, Homo sapien
agggaaatactaagatgaagcctta

SEQ ID NO: 5610961 - DNA, 25 bp, Homo sapien
cttgttacgcaaattagaagccaac

SEQ ID NO: 5610962 - DNA, 25 bp, Homo sapien
gaaggcatgcttccaataatagtac

SEQ ID NO: 5610963 - DNA, 25 bp, Homo sapien
gatacagtatcacataatatgccaa

SEQ ID NO: 5610964 - DNA, 25 bp, Homo sapien
atacccaacagagttgtgctatgat

SEQ ID NO: 5610965 - DNA, 25 bp, Homo sapien
ttagaagccaactgagtaaattaaa

SEQ ID NO: 5610966 - DNA, 25 bp, Homo sapien
acatcaatatgataagaggttattt

SEQ ID NO: 5610967 - DNA, 25 bp, Homo sapien
atttagtaacgcaatgtaaacattt

SEQ ID NO: 5610968 - DNA, 25 bp, Homo sapien
aaacatttatgagcatgaggaggaa

SEQ ID NO: 5610969 - DNA, 25 bp, Homo sapien
tatttcaaagagcaacgcagggaaa

SEQ ID NO: 5610970 - DNA, 25 bp, Homo sapien
gaagccttaatacccaacagagttg

SEQ ID NO: 5610971 - DNA, 25 bp, Homo sapien
gcatgagctgtgatttgctaagaga

SEQ ID NO: 5610972 - DNA, 25 bp, Homo sapien
tgtataacaaggctaatgtgtttga

SEQ ID NO: 5610973 - DNA, 25 bp, Homo sapien
gtgtttgaaaatctgcatgagctgt

SEQ ID NO: 5610974 - DNA, 25 bp, Homo sapien
ctagatgtcctaactccaaaccagc

SEQ ID NO: 5610975 - DNA, 25 bp, Homo sapien
aacaaagaacaagcaataaccatac

SEQ ID NO: 5610976 - DNA, 25 bp, Homo sapien
aaggcacagcagaaataactataac

SEQ ID NO: 5610977 - DNA, 25 bp, Homo sapien
cctgataaattataccaaggtcctg

SEQ ID NO: 5610978 - DNA, 25 bp, Homo sapien
ttaatagaatgatgaaagaacactt

SEQ ID NO: 5610979 - DNA, 25 bp, Homo sapien
ggagagtccagatgatgtcactgat

SEQ ID NO: 5610980 - DNA, 25 bp, Homo sapien
atttgctaagagaaaacaggttaaa

SEQ ID NO: 5610981 - DNA, 25 bp, Homo sapien
ttattcattaacaaaggcacagcag

SEQ ID NO: 5610982 - DNA, 25 bp, Homo sapien
atcacacacatcaggatatgctgtc

SEQ ID NO: 5610983 - DNA, 25 bp, Homo sapien
gtttctcagggggttctgctttggc

SEQ ID NO: 5610984 - DNA, 25 bp, Homo sapien
ctaactgatgggtttctcagggggt

SEQ ID NO: 5610985 - DNA, 25 bp, Homo sapien
ttcaggtcttctaactcaggctgtt

SEQ ID NO: 5610986 - DNA, 25 bp, Homo sapien
cctgatgccttgtgtctaatagctt

SEQ ID NO: 5610987 - DNA, 25 bp, Homo sapien
atccgtttgtcactcctgatgcctt

SEQ ID NO: 5610988 - DNA, 25 bp, Homo sapien
aactcaggctgtttatccgtttgtc

SEQ ID NO: 5610989 - DNA, 25 bp, Homo sapien
atagctgtggatcaatttcaggtct

SEQ ID NO: 5610990 - DNA, 25 bp, Homo sapien
cgagtaagtctcactaactgatggg

SEQ ID NO: 5610991 - DNA, 25 bp, Homo sapien
ttaaagtcagatagtacaagtcctt

SEQ ID NO: 5610992 - DNA, 25 bp, Homo sapien
tttattgaccgtatagctgtggatc

SEQ ID NO: 5610993 - DNA, 25 bp, Homo sapien
ccccagctacacaggaagctgaggc

SEQ ID NO: 5610994 - DNA, 25 bp, Homo sapien
cacacacacaatgaagtctcttctt

SEQ ID NO: 5610995 - DNA, 25 bp, Homo sapien
agggagatagtataatatctcaagc

SEQ ID NO: 5610996 - DNA, 25 bp, Homo sapien
ttcctttatgatggagaaatgatca

SEQ ID NO: 5610997 - DNA, 25 bp, Homo sapien
agtagataacaggaaaatacagtat

SEQ ID NO: 5610998 - DNA, 25 bp, Homo sapien
acacgctcaagatggcacccacatt

SEQ ID NO: 5610999 - DNA, 25 bp, Homo sapien
ctgaaattattgggaaaaagtagaa

SEQ ID NO: 5611000 - DNA, 25 bp, Homo sapien
cctgggtgacaacagtgaaactcta

SEQ ID NO: 5611001 - DNA, 25 bp, Homo sapien
aaaacatgcatattgtgaagccttt

SEQ ID NO: 5611002 - DNA, 25 bp, Homo sapien
gtagaactagacttaagtagataac

SEQ ID NO: 5611003 - DNA, 25 bp, Homo sapien
aggagaatcgcttgtaccccaggaa

SEQ ID NO: 5611004 - DNA, 25 bp, Homo sapien
gactttgtattatgtgtaaatcgga

SEQ ID NO: 5611005 - DNA, 25 bp, Homo sapien
tccgatttacacataatacaaagtc

SEQ ID NO: 5611006 - DNA, 25 bp, Homo sapien
agaattagctatcatgatcattgtt

SEQ ID NO: 5611007 - DNA, 25 bp, Homo sapien
tggtgttttccaaaccgtggcatgc

SEQ ID NO: 5611008 - DNA, 25 bp, Homo sapien
cagtaattgccaggactcaatgggt

SEQ ID NO: 5611009 - DNA, 25 bp, Homo sapien
aatgggttgatacaaatgaagtagc

SEQ ID NO: 5611010 - DNA, 25 bp, Homo sapien
cgtggcatgcagagatgattttaga

SEQ ID NO: 5611011 - DNA, 25 bp, Homo sapien
ttgccaggactcaatgggttgatac

SEQ ID NO: 5611012 - DNA, 25 bp, Homo sapien
tgattttagatggttcacaggtaga

SEQ ID NO: 5611013 - DNA, 25 bp, Homo sapien
atgcagagatgattttagatggttc

SEQ ID NO: 5611014 - DNA, 25 bp, Homo sapien
taattgccaggactcaatgggttga

SEQ ID NO: 5611015 - DNA, 25 bp, Homo sapien
tttccaaaccgtggcatgcagagat

SEQ ID NO: 5611016 - DNA, 25 bp, Homo sapien
gttgatacaaatgaagtagcatgtc

SEQ ID NO: 5611017 - DNA, 25 bp, Homo sapien
gctaggcaggaaacttcaaattttc

SEQ ID NO: 5611018 - DNA, 25 bp, Homo sapien
gagtcaactgtataaaaggtattaa

SEQ ID NO: 5611019 - DNA, 25 bp, Homo sapien
ttcacaaaattgttgccatcgccaa

SEQ ID NO: 5611020 - DNA, 25 bp, Homo sapien
gagatggagttccagagtctgcttt

SEQ ID NO: 5611021 - DNA, 25 bp, Homo sapien
aaacttcctgcagaccccatgagtg

SEQ ID NO: 5611022 - DNA, 25 bp, Homo sapien
tgtggaccacgtttattagaagaaa

SEQ ID NO: 5611023 - DNA, 25 bp, Homo sapien
ctcaacttataacctgtggaccacg

SEQ ID NO: 5611024 - DNA, 25 bp, Homo sapien
aggtattaatatgtctggaaagaga

SEQ ID NO: 5611025 - DNA, 25 bp, Homo sapien
tgccatcgccaaaaatattccattt

SEQ ID NO: 5611026 - DNA, 25 bp, Homo sapien
aagtgtactcacgcagttcaaacta

SEQ ID NO: 5611027 - DNA, 25 bp, Homo sapien
gattcctgaaacttcctgcagaccc

SEQ ID NO: 5611028 - DNA, 25 bp, Homo sapien
ttacaacgtaaagacaattgtaact

SEQ ID NO: 5611029 - DNA, 25 bp, Homo sapien
agttacaattgtctttacgttgtaa

SEQ ID NO: 5611030 - DNA, 25 bp, Homo sapien
attaaatatgttgttggggcagcag

SEQ ID NO: 5611031 - DNA, 25 bp, Homo sapien
tcttgtggtccagggtccatcacac

SEQ ID NO: 5611032 - DNA, 25 bp, Homo sapien
tccatcacacgggttggtaggatag

SEQ ID NO: 5611033 - DNA, 25 bp, Homo sapien
gcgctgcaaccccctggggctacat

SEQ ID NO: 5611034 - DNA, 25 bp, Homo sapien
acatcctgtggatgatgagtgcagt

SEQ ID NO: 5611035 - DNA, 25 bp, Homo sapien
cccagggtgactccactgcccctaa

SEQ ID NO: 5611036 - DNA, 25 bp, Homo sapien
gactgcagaagagtgtctgtgaagt

SEQ ID NO: 5611037 - DNA, 25 bp, Homo sapien
gtctgtgaagtaagtgtgcacatcc

SEQ ID NO: 5611038 - DNA, 25 bp, Homo sapien
cctggggctacatagtgttagctgc

SEQ ID NO: 5611039 - DNA, 25 bp, Homo sapien
tgggtgagattttgagactgcagaa

SEQ ID NO: 5611040 - DNA, 25 bp, Homo sapien
ggtcatagttgatgggtgagatttt

SEQ ID NO: 5611041 - DNA, 25 bp, Homo sapien
ctttcccagcagtggactgtgggtg

SEQ ID NO: 5611042 - DNA, 25 bp, Homo sapien
ctgtgtccacccatacccaagcaac

SEQ ID NO: 5611043 - DNA, 25 bp, Homo sapien
gttaagggcctatatagaactgcca

SEQ ID NO: 5611044 - DNA, 25 bp, Homo sapien
tcggttccataattgtgagccagtt

SEQ ID NO: 5611045 - DNA, 25 bp, Homo sapien
ttgactagcattaagccagtagttc

SEQ ID NO: 5611046 - DNA, 25 bp, Homo sapien
gagtactttggaaatcctggagggc

SEQ ID NO: 5611047 - DNA, 25 bp, Homo sapien
tgctctgctttgatgtgagtggaca

SEQ ID NO: 5611048 - DNA, 25 bp, Homo sapien
agaactgccagagctaagacatcca

SEQ ID NO: 5611049 - DNA, 25 bp, Homo sapien
tagtattgaattggagattgctctg

SEQ ID NO: 5611050 - DNA, 25 bp, Homo sapien
acctcggactaggacaccactgtgt

SEQ ID NO: 5611051 - DNA, 25 bp, Homo sapien
tggcttgggcatttggctcctctct

SEQ ID NO: 5611052 - DNA, 25 bp, Homo sapien
ttggctaagtttgtgcagggcatca

SEQ ID NO: 5611053 - DNA, 25 bp, Homo sapien
tcaggttaattgaagggatgaaacg

SEQ ID NO: 5611054 - DNA, 25 bp, Homo sapien
acatatggtaccaaaggcctgggat

SEQ ID NO: 5611055 - DNA, 25 bp, Homo sapien
ttataagtctttgagggcgaaatac

SEQ ID NO: 5611056 - DNA, 25 bp, Homo sapien
ttgcattatcaagagccagaggtgc

SEQ ID NO: 5611057 - DNA, 25 bp, Homo sapien
ggcctgggatcaatgtatacgctcc

SEQ ID NO: 5611058 - DNA, 25 bp, Homo sapien
agcaggagccattcaggttaattga

SEQ ID NO: 5611059 - DNA, 25 bp, Homo sapien
ggatgaaacggtaaccactgcttta

SEQ ID NO: 5611060 - DNA, 25 bp, Homo sapien
agaagtaaccacaggactcgggttg

SEQ ID NO: 5611061 - DNA, 25 bp, Homo sapien
gagccagaggtgcatttatcggttc

SEQ ID NO: 5611062 - DNA, 25 bp, Homo sapien
gtaaagataccacacctagcacagc

SEQ ID NO: 5611063 - DNA, 25 bp, Homo sapien
tcctatggatcccctcagaaaaacc

SEQ ID NO: 5611064 - DNA, 25 bp, Homo sapien
aggtggccctaaggatccctgtcat

SEQ ID NO: 5611065 - DNA, 25 bp, Homo sapien
tctgccacagagtgttgcttgcaat

SEQ ID NO: 5611066 - DNA, 25 bp, Homo sapien
ggagtgacacaaaatattaggggta

SEQ ID NO: 5611067 - DNA, 25 bp, Homo sapien
ctaagaggcttcacagatcaaattc

SEQ ID NO: 5611068 - DNA, 25 bp, Homo sapien
agagaacaccggaataggttagact

SEQ ID NO: 5611069 - DNA, 25 bp, Homo sapien
gtaactgctaagaaagagtaagatg

SEQ ID NO: 5611070 - DNA, 25 bp, Homo sapien
atgatgcctccactagggagaggtg

SEQ ID NO: 5611071 - DNA, 25 bp, Homo sapien
acacacaatgctacctaagaggctt

SEQ ID NO: 5611072 - DNA, 25 bp, Homo sapien
gagtaagatgaagtgatgatgcctc

SEQ ID NO: 5611073 - DNA, 25 bp, Homo sapien
tgttagtctaagaatggagtgacac

SEQ ID NO: 5611074 - DNA, 25 bp, Homo sapien
gcagggccatggaatactctctgac

SEQ ID NO: 5611075 - DNA, 25 bp, Homo sapien
gtagaatgagatattacttgttgcc

SEQ ID NO: 5611076 - DNA, 25 bp, Homo sapien
aaatcctaacccagggaattgatcc

SEQ ID NO: 5611077 - DNA, 25 bp, Homo sapien
aacatgaaggataaacccaagttcc

SEQ ID NO: 5611078 - DNA, 25 bp, Homo sapien
accacaaaataagcacgttccttta

SEQ ID NO: 5611079 - DNA, 25 bp, Homo sapien
tatccatgtgaaagactcctgaatc

SEQ ID NO: 5611080 - DNA, 25 bp, Homo sapien
aagtagaagagttgtttatagtggc

SEQ ID NO: 5611081 - DNA, 25 bp, Homo sapien
tgaaaaaaagctaatacaagagttg

SEQ ID NO: 5611082 - DNA, 25 bp, Homo sapien
atacaagagttggtgagaacatgaa

SEQ ID NO: 5611083 - DNA, 25 bp, Homo sapien
cctaaagagatgtttggtcaacttc

SEQ ID NO: 5611084 - DNA, 25 bp, Homo sapien
taaaggccattcataagaggaaaaa

SEQ ID NO: 5611085 - DNA, 25 bp, Homo sapien
agacagtagacgtgaccttggattt

SEQ ID NO: 5611086 - DNA, 25 bp, Homo sapien
cctgagataggacatggctttccca

SEQ ID NO: 5611087 - DNA, 25 bp, Homo sapien
tctgaggtagccaatgaccaacaca

SEQ ID NO: 5611088 - DNA, 25 bp, Homo sapien
cccacaatcaaggtagagctgctct

SEQ ID NO: 5611089 - DNA, 25 bp, Homo sapien
aaggatagagatatacaggaagtcc

SEQ ID NO: 5611090 - DNA, 25 bp, Homo sapien
tgctaatgcagataaagacgccacc

SEQ ID NO: 5611091 - DNA, 25 bp, Homo sapien
tcaagaaggagcaaattacctctgc

SEQ ID NO: 5611092 - DNA, 25 bp, Homo sapien
cagcagccacagaaagtgagtaatg

SEQ ID NO: 5611093 - DNA, 25 bp, Homo sapien
aaagattgaggtatccacatcagtc

SEQ ID NO: 5611094 - DNA, 25 bp, Homo sapien
tctattagccagaggcccagatgac

SEQ ID NO: 5611095 - DNA, 25 bp, Homo sapien
gagctgctctaaaatctgaggtagc

SEQ ID NO: 5611096 - DNA, 25 bp, Homo sapien
aaaaaatcagatatagttgtaatta

SEQ ID NO: 5611097 - DNA, 25 bp, Homo sapien
ttgtgagccactccgcctggcctta

SEQ ID NO: 5611098 - DNA, 25 bp, Homo sapien
tggttcactgtagcctcagcctccc

SEQ ID NO: 5611099 - DNA, 25 bp, Homo sapien
tatactgccaaagaatagaaagatt

SEQ ID NO: 5611100 - DNA, 25 bp, Homo sapien
ttaaaagcttttggtatatactgcc

SEQ ID NO: 5611101 - DNA, 25 bp, Homo sapien
tggactcaagcaatctggctcccaa

SEQ ID NO: 5611102 - DNA, 25 bp, Homo sapien
aagaatagaaagattgtactggttc

SEQ ID NO: 5611103 - DNA, 25 bp, Homo sapien
gctcccaaagtgttgtgagccactc

SEQ ID NO: 5611104 - DNA, 25 bp, Homo sapien
atgtaacccttttaagagatgcata

SEQ ID NO: 5611105 - DNA, 25 bp, Homo sapien
tttagtggagaatgggttttgccat

SEQ ID NO: 5611106 - DNA, 25 bp, Homo sapien
tccgcctggccttaagaatctcacc

SEQ ID NO: 5611107 - DNA, 25 bp, Homo sapien
aagagggttttcacccctctgccca

SEQ ID NO: 5611108 - DNA, 25 bp, Homo sapien
gacagcagaaaatgtagcccacctg

SEQ ID NO: 5611109 - DNA, 25 bp, Homo sapien
cttggacaatgtcaggctgaagcag

SEQ ID NO: 5611110 - DNA, 25 bp, Homo sapien
tgtgcttaccaagtaaggggaagag

SEQ ID NO: 5611111 - DNA, 25 bp, Homo sapien
cagtgaaatcagatttaaggagaaa

SEQ ID NO: 5611112 - DNA, 25 bp, Homo sapien
cctggccattttaggagtgggctgg

SEQ ID NO: 5611113 - DNA, 25 bp, Homo sapien
tcacccctctgcccaacctcccacc

SEQ ID NO: 5611114 - DNA, 25 bp, Homo sapien
accctcacagtgaaatcagatttaa

SEQ ID NO: 5611115 - DNA, 25 bp, Homo sapien
ggcttggacaatgtcaggctgaagc

SEQ ID NO: 5611116 - DNA, 25 bp, Homo sapien
gaggcttggacaatgtcaggctgaa

SEQ ID NO: 5611117 - DNA, 25 bp, Homo sapien
ctcccaccctcacagtgaaatcaga

SEQ ID NO: 5611118 - DNA, 25 bp, Homo sapien
catgcctaagagggagatcaatgta

SEQ ID NO: 5611119 - DNA, 25 bp, Homo sapien
ttggatgtgcacccccataacagcc

SEQ ID NO: 5611120 - DNA, 25 bp, Homo sapien
aaccaaaccaaaacgaacatgccta

SEQ ID NO: 5611121 - DNA, 25 bp, Homo sapien
gagtcttgacacttggatgtgcacc

SEQ ID NO: 5611122 - DNA, 25 bp, Homo sapien
tattgaggtctaatgtacctagaac

SEQ ID NO: 5611123 - DNA, 25 bp, Homo sapien
aagatacaaaaacatttacgtcacc

SEQ ID NO: 5611124 - DNA, 25 bp, Homo sapien
atcaatgtaaagtgtcccaagcctc

SEQ ID NO: 5611125 - DNA, 25 bp, Homo sapien
acccaggcaaagctgttacctggct

SEQ ID NO: 5611126 - DNA, 25 bp, Homo sapien
ccccataacagccaccataatcaag

SEQ ID NO: 5611127 - DNA, 25 bp, Homo sapien
tacagttcgatgagtcttgacactt

SEQ ID NO: 5611128 - DNA, 25 bp, Homo sapien
ctaacaggatgcaccagtgtctctt

SEQ ID NO: 5611129 - DNA, 25 bp, Homo sapien
tatttttttgtagaggcaggctggt

SEQ ID NO: 5611130 - DNA, 25 bp, Homo sapien
tgcccagcctgtgtaagtgatttaa

SEQ ID NO: 5611131 - DNA, 25 bp, Homo sapien
tgagtcaccgtgcccagcctgtgta

SEQ ID NO: 5611132 - DNA, 25 bp, Homo sapien
ccggtttctttgttgactagctttg

SEQ ID NO: 5611133 - DNA, 25 bp, Homo sapien
ttttacactaaatgaagagcaaatt

SEQ ID NO: 5611134 - DNA, 25 bp, Homo sapien
agcctgtgtaagtgatttaacctcc

SEQ ID NO: 5611135 - DNA, 25 bp, Homo sapien
tgactagctttggaactttgggcag

SEQ ID NO: 5611136 - DNA, 25 bp, Homo sapien
atcacagttaacaaaaaataagttc

SEQ ID NO: 5611137 - DNA, 25 bp, Homo sapien
gctttggaactttgggcagtgattt

SEQ ID NO: 5611138 - DNA, 25 bp, Homo sapien
atgaagagcaaatttgtaaccggtt

SEQ ID NO: 5611139 - DNA, 25 bp, Homo sapien
ctgccttggcttcccagagtgctgg

SEQ ID NO: 5611140 - DNA, 25 bp, Homo sapien
aggctgtgtgaccctaggaaataca

SEQ ID NO: 5611141 - DNA, 25 bp, Homo sapien
tggaggaagctccatcagatttacc

SEQ ID NO: 5611142 - DNA, 25 bp, Homo sapien
gctacagatactgacccagacctgc

SEQ ID NO: 5611143 - DNA, 25 bp, Homo sapien
ggagtaattcctggagggattccgc

SEQ ID NO: 5611144 - DNA, 25 bp, Homo sapien
catccagtctggagacctaggctgt

SEQ ID NO: 5611145 - DNA, 25 bp, Homo sapien
attgtgacatcatgaacgccctaac

SEQ ID NO: 5611146 - DNA, 25 bp, Homo sapien
gcagaaagaaggacatccagtctgg

SEQ ID NO: 5611147 - DNA, 25 bp, Homo sapien
cctaacaagttaggcatgtggaagg

SEQ ID NO: 5611148 - DNA, 25 bp, Homo sapien
gaaggctccaattcctgcctgccct

SEQ ID NO: 5611149 - DNA, 25 bp, Homo sapien
caccgcctctcccagctacagatac

SEQ ID NO: 5611150 - DNA, 25 bp, Homo sapien
agaggaccagggagtaattcctgga

SEQ ID NO: 5611151 - DNA, 25 bp, Homo sapien
tttggctggattagaagttatacac

SEQ ID NO: 5611152 - DNA, 25 bp, Homo sapien
tattgaggaatcaattattggtctg

SEQ ID NO: 5611153 - DNA, 25 bp, Homo sapien
ttgttgtctggtgttatttcatgta

SEQ ID NO: 5611154 - DNA, 25 bp, Homo sapien
tgctgagtgcccaattctaggttga

SEQ ID NO: 5611155 - DNA, 25 bp, Homo sapien
catgtaatgtttgctcagattcaac

SEQ ID NO: 5611156 - DNA, 25 bp, Homo sapien
atccttgaaactttaccttgcgtac

SEQ ID NO: 5611157 - DNA, 25 bp, Homo sapien
tctgccagcattctgaatgtacaat

SEQ ID NO: 5611158 - DNA, 25 bp, Homo sapien
ccttgcgtacttaaagacttgaatt

SEQ ID NO: 5611159 - DNA, 25 bp, Homo sapien
cttaactacaaagagagaccttaga

SEQ ID NO: 5611160 - DNA, 25 bp, Homo sapien
aaaagtgtaggtagatgttaaattc

SEQ ID NO: 5611161 - DNA, 25 bp, Homo sapien
tctaggttgatggttattttctgcc

SEQ ID NO: 5611162 - DNA, 25 bp, Homo sapien
aggcggacaccaggtcactttaact

SEQ ID NO: 5611163 - DNA, 25 bp, Homo sapien
cgagggagatgcatcttcctagcca

SEQ ID NO: 5611164 - DNA, 25 bp, Homo sapien
agttttgtgagatagctgcagaagt

SEQ ID NO: 5611165 - DNA, 25 bp, Homo sapien
tgcctgtgcctctgctggagcagct

SEQ ID NO: 5611166 - DNA, 25 bp, Homo sapien
gaagtgctcgtttctgtctgttgcc

SEQ ID NO: 5611167 - DNA, 25 bp, Homo sapien
atttggtgttctgtccacatagttc

SEQ ID NO: 5611168 - DNA, 25 bp, Homo sapien
ttatggctgtcagtgcacagcagcg

SEQ ID NO: 5611169 - DNA, 25 bp, Homo sapien
cttcctagccatggcactcctgggg

SEQ ID NO: 5611170 - DNA, 25 bp, Homo sapien
aaggctgacttggcttatggctgtc

SEQ ID NO: 5611171 - DNA, 25 bp, Homo sapien
tagttcagaattcaaaactgcttac

SEQ ID NO: 5611172 - DNA, 25 bp, Homo sapien
gagatagctgcagaagtgctcgttt

SEQ ID NO: 5611173 - DNA, 25 bp, Homo sapien
cttatggcattaagggcaatccatt

SEQ ID NO: 5611174 - DNA, 25 bp, Homo sapien
catctatagagatcaaatggttttc

SEQ ID NO: 5611175 - DNA, 25 bp, Homo sapien
gaggactggcttttatcaaatactt

SEQ ID NO: 5611176 - DNA, 25 bp, Homo sapien
atccattctaaggtggcgatgagtc

SEQ ID NO: 5611177 - DNA, 25 bp, Homo sapien
cctggcaattaggcaactgcttgtt

SEQ ID NO: 5611178 - DNA, 25 bp, Homo sapien
aatagaaaggtgtctagtattttcc

SEQ ID NO: 5611179 - DNA, 25 bp, Homo sapien
gtcatcagatacaaccttatggcat

SEQ ID NO: 5611180 - DNA, 25 bp, Homo sapien
agtagtagtaaagataggcaacttc

SEQ ID NO: 5611181 - DNA, 25 bp, Homo sapien
aggtggcgatgagtcccccactttt

SEQ ID NO: 5611182 - DNA, 25 bp, Homo sapien
agggcaatccattctaaggtggcga

SEQ ID NO: 5611183 - DNA, 25 bp, Homo sapien
ttcctcagtctaatagaaaggtgtc

SEQ ID NO: 5611184 - DNA, 25 bp, Homo sapien
tacaaaatgcatgactcaaggaaat

SEQ ID NO: 5611185 - DNA, 25 bp, Homo sapien
atagcagtaatgtaaggttttacaa

SEQ ID NO: 5611186 - DNA, 25 bp, Homo sapien
tactatcctgaggggagtggtttaa

SEQ ID NO: 5611187 - DNA, 25 bp, Homo sapien
aggctgtagctataactgtgtgggc

SEQ ID NO: 5611188 - DNA, 25 bp, Homo sapien
atgcatgactcaaggaaatttccag

SEQ ID NO: 5611189 - DNA, 25 bp, Homo sapien
gcttaagtatcatcacatagtcctg

SEQ ID NO: 5611190 - DNA, 25 bp, Homo sapien
gaataaaaacaccaggatgaggaat

SEQ ID NO: 5611191 - DNA, 25 bp, Homo sapien
gatgaggaatcatttaacctaggct

SEQ ID NO: 5611192 - DNA, 25 bp, Homo sapien
cagtcttactatcctgaggggagtg

SEQ ID NO: 5611193 - DNA, 25 bp, Homo sapien
tacatcagtggtaccctcccatatt

SEQ ID NO: 5611194 - DNA, 25 bp, Homo sapien
taaaatagtacagttaacatgaatt

SEQ ID NO: 5611195 - DNA, 25 bp, Homo sapien
tactcccaggtccccatgttggctg

SEQ ID NO: 5611196 - DNA, 25 bp, Homo sapien
aagcaagaaaatgcgatccacaatc

SEQ ID NO: 5611197 - DNA, 25 bp, Homo sapien
acaggctgtattactcccaggtccc

SEQ ID NO: 5611198 - DNA, 25 bp, Homo sapien
agcccccactgggttggacattttc

SEQ ID NO: 5611199 - DNA, 25 bp, Homo sapien
atcctaaaaaatacagacacttaac

SEQ ID NO: 5611200 - DNA, 25 bp, Homo sapien
tccaggcaaaaatttccggacaggc

SEQ ID NO: 5611201 - DNA, 25 bp, Homo sapien
gcctcaggacttacaggcgagtacc

SEQ ID NO: 5611202 - DNA, 25 bp, Homo sapien
atttaaagcacaactcccgagattt

SEQ ID NO: 5611203 - DNA, 25 bp, Homo sapien
ttccggacaggctaaaaagcaagaa

SEQ ID NO: 5611204 - DNA, 25 bp, Homo sapien
tacgtgatataaccgctagaggcct

SEQ ID NO: 5611205 - DNA, 25 bp, Homo sapien
tgagtgcatgtgacgactgctattt

SEQ ID NO: 5611206 - DNA, 25 bp, Homo sapien
taaaatgccagtgataatacccgcc

SEQ ID NO: 5611207 - DNA, 25 bp, Homo sapien
aatgttattagtgggtaattttgct

SEQ ID NO: 5611208 - DNA, 25 bp, Homo sapien
gtatctgtggttataaaggtaagag

SEQ ID NO: 5611209 - DNA, 25 bp, Homo sapien
tacattcctagcatcaccaaatcta

SEQ ID NO: 5611210 - DNA, 25 bp, Homo sapien
attacctcagtggctttgggctttc

SEQ ID NO: 5611211 - DNA, 25 bp, Homo sapien
cctcagatcctattggtgatgtaaa

SEQ ID NO: 5611212 - DNA, 25 bp, Homo sapien
aaacaccctgctacaaacagtttat

SEQ ID NO: 5611213 - DNA, 25 bp, Homo sapien
aacagtgtctaaagggatataaatc

SEQ ID NO: 5611214 - DNA, 25 bp, Homo sapien
gccagtgataatacccgccatctcc

SEQ ID NO: 5611215 - DNA, 25 bp, Homo sapien
ggctttgggctttctcacctgtaaa

SEQ ID NO: 5611216 - DNA, 25 bp, Homo sapien
cagacccaagttcaaaatcaattat

SEQ ID NO: 5611217 - DNA, 25 bp, Homo sapien
aaagtcctaaaaataacgatgctcc

SEQ ID NO: 5611218 - DNA, 25 bp, Homo sapien
tgtacgtattgttggataaagtgaa

SEQ ID NO: 5611219 - DNA, 25 bp, Homo sapien
taacactatccttagaaaagtccta

SEQ ID NO: 5611220 - DNA, 25 bp, Homo sapien
gaatatcaacagaaacaaatgtatc

SEQ ID NO: 5611221 - DNA, 25 bp, Homo sapien
tgttggtagcagtattagtattgtt

SEQ ID NO: 5611222 - DNA, 25 bp, Homo sapien
agatacccttaatggactatagtct

SEQ ID NO: 5611223 - DNA, 25 bp, Homo sapien
tactaagtagtttgctgttggtagc

SEQ ID NO: 5611224 - DNA, 25 bp, Homo sapien
tagtctaagtgcaaaaacaatgtcc

SEQ ID NO: 5611225 - DNA, 25 bp, Homo sapien
aagtattgctgagaacctgggtttt

SEQ ID NO: 5611226 - DNA, 25 bp, Homo sapien
gagctactatgcctggccacatttt

SEQ ID NO: 5611227 - DNA, 25 bp, Homo sapien
aaagtgaataagcaagtattgctga

SEQ ID NO: 5611228 - DNA, 25 bp, Homo sapien
aattaaacagttatatgagcagttc

SEQ ID NO: 5611229 - DNA, 25 bp, Homo sapien
ctagaattgttcagagccagagatt

SEQ ID NO: 5611230 - DNA, 25 bp, Homo sapien
agagccagagattgaaaacaattaa

SEQ ID NO: 5611231 - DNA, 25 bp, Homo sapien
ttacttgaggattcaaatggttttg

SEQ ID NO: 5611232 - DNA, 25 bp, Homo sapien
tcaaatggttttgttgggattattc

SEQ ID NO: 5611233 - DNA, 25 bp, Homo sapien
ataaaggtttgttgtatgtggtaac

SEQ ID NO: 5611234 - DNA, 25 bp, Homo sapien
tatatttatggaagtagaagataat

SEQ ID NO: 5611235 - DNA, 25 bp, Homo sapien
tgttgggattattcaagacaggaaa

SEQ ID NO: 5611236 - DNA, 25 bp, Homo sapien
atgtggtaacacaatacatcgttat

SEQ ID NO: 5611237 - DNA, 25 bp, Homo sapien
atgagcagttcataaaggtttgttg

SEQ ID NO: 5611238 - DNA, 25 bp, Homo sapien
tatggaagtagaagataattctttc

SEQ ID NO: 5611239 - DNA, 25 bp, Homo sapien
taaaaccattatacagtcatgcatt

SEQ ID NO: 5611240 - DNA, 25 bp, Homo sapien
ggcaactgtaacacagtggtacttg

SEQ ID NO: 5611241 - DNA, 25 bp, Homo sapien
gtactgagtactataggcaactgta

SEQ ID NO: 5611242 - DNA, 25 bp, Homo sapien
acagtggtacttgtgtatctaaaca

SEQ ID NO: 5611243 - DNA, 25 bp, Homo sapien
ctattgttcctaggctataagcttg

SEQ ID NO: 5611244 - DNA, 25 bp, Homo sapien
ataatggattaaaaaaatggtacac

SEQ ID NO: 5611245 - DNA, 25 bp, Homo sapien
aggctataagcttgtaaagtgtgtt

SEQ ID NO: 5611246 - DNA, 25 bp, Homo sapien
tcctaggctataagcttgtaaagtg

SEQ ID NO: 5611247 - DNA, 25 bp, Homo sapien
aaatatggtataatggattaaaaaa

SEQ ID NO: 5611248 - DNA, 25 bp, Homo sapien
aaagtgtgttactgtactgagtact

SEQ ID NO: 5611249 - DNA, 25 bp, Homo sapien
aaaggtacaataaaaatatggtata

SEQ ID NO: 5611250 - DNA, 25 bp, Homo sapien
ccagtttggaaactagagaatgcac

SEQ ID NO: 5611251 - DNA, 25 bp, Homo sapien
ttaggactataagcatgaaccactg

SEQ ID NO: 5611252 - DNA, 25 bp, Homo sapien
atctgcacgaggaccctcacctggt

SEQ ID NO: 5611253 - DNA, 25 bp, Homo sapien
ttgcccagactcgagtacagttgtg

SEQ ID NO: 5611254 - DNA, 25 bp, Homo sapien
caacggcttcccactgcatcaagga

SEQ ID NO: 5611255 - DNA, 25 bp, Homo sapien
ggaaaacatccaagctctctgccag

SEQ ID NO: 5611256 - DNA, 25 bp, Homo sapien
tcacctggtataaatcaagactgtc

SEQ ID NO: 5611257 - DNA, 25 bp, Homo sapien
tccacccctacctctgccctacagc

SEQ ID NO: 5611258 - DNA, 25 bp, Homo sapien
taaatcaagactgtcctgggcaaac

SEQ ID NO: 5611259 - DNA, 25 bp, Homo sapien
ggaaactagagaatgcaccatctgc

SEQ ID NO: 5611260 - DNA, 25 bp, Homo sapien
cctgtgtgctgagcttcacccgctg

SEQ ID NO: 5611261 - DNA, 25 bp, Homo sapien
tcaagaatcaagatcgggtgaaact

SEQ ID NO: 5611262 - DNA, 25 bp, Homo sapien
ctgctaaagggtaataaaaaatata

SEQ ID NO: 5611263 - DNA, 25 bp, Homo sapien
taactattacaaaagcctggtatcc

SEQ ID NO: 5611264 - DNA, 25 bp, Homo sapien
gagcaaatgttaaatgaaaaactga

SEQ ID NO: 5611265 - DNA, 25 bp, Homo sapien
aggtactacacaatttagaggttac

SEQ ID NO: 5611266 - DNA, 25 bp, Homo sapien
atttatgattggagaggtactacac

SEQ ID NO: 5611267 - DNA, 25 bp, Homo sapien
gcctggtatccaggtgcaatctcac

SEQ ID NO: 5611268 - DNA, 25 bp, Homo sapien
aaaaacagccataaagtcccacatt

SEQ ID NO: 5611269 - DNA, 25 bp, Homo sapien
atatgagccacatgcttaagcagtg

SEQ ID NO: 5611270 - DNA, 25 bp, Homo sapien
ttccccctggattctgatgttcata

SEQ ID NO: 5611271 - DNA, 25 bp, Homo sapien
aaatctgagttgaataaaaaagaac

SEQ ID NO: 5611272 - DNA, 25 bp, Homo sapien
aacaagcacaaaagcagactgaaaa

SEQ ID NO: 5611273 - DNA, 25 bp, Homo sapien
ctgaaaatgaactaagacataagcc

SEQ ID NO: 5611274 - DNA, 25 bp, Homo sapien
ttaggcctctgattctggcactttc

SEQ ID NO: 5611275 - DNA, 25 bp, Homo sapien
aggaagactgagagaactctaaatc

SEQ ID NO: 5611276 - DNA, 25 bp, Homo sapien
ggtgactataccttgtacagagact

SEQ ID NO: 5611277 - DNA, 25 bp, Homo sapien
tacagagactacatcaaacaagcac

SEQ ID NO: 5611278 - DNA, 25 bp, Homo sapien
agtgaacatgcaactacatggtgac

SEQ ID NO: 5611279 - DNA, 25 bp, Homo sapien
cagcctcctgatggcactacatttt

SEQ ID NO: 5611280 - DNA, 25 bp, Homo sapien
taagacataagccaggaagactgag

SEQ ID NO: 5611281 - DNA, 25 bp, Homo sapien
cctgattagaatctggacctcatct

SEQ ID NO: 5611282 - DNA, 25 bp, Homo sapien
attaagaatctagcacaatcccctt

SEQ ID NO: 5611283 - DNA, 25 bp, Homo sapien
acataccattaaaaactcagacctc

SEQ ID NO: 5611284 - DNA, 25 bp, Homo sapien
cattcttgagacataaaaatggaat

SEQ ID NO: 5611285 - DNA, 25 bp, Homo sapien
catgtaagttttgtgaagctctttc

SEQ ID NO: 5611286 - DNA, 25 bp, Homo sapien
tcaagatgaaaatgtaacaattcaa

SEQ ID NO: 5611287 - DNA, 25 bp, Homo sapien
ttttagtcaattaacggccatataa

SEQ ID NO: 5611288 - DNA, 25 bp, Homo sapien
tgtttgacatcgatgtacataacag

SEQ ID NO: 5611289 - DNA, 25 bp, Homo sapien
acagctcaggaaatgaatgtttgac

SEQ ID NO: 5611290 - DNA, 25 bp, Homo sapien
aattagaagatcatatatggctgtt

SEQ ID NO: 5611291 - DNA, 25 bp, Homo sapien
tacataacagaaatacgaacatacc

SEQ ID NO: 5611292 - DNA, 25 bp, Homo sapien
agacctcttatgacaatccagattc

SEQ ID NO: 5611293 - DNA, 25 bp, Homo sapien
actagctgaaatctaaagtactgtt

SEQ ID NO: 5611294 - DNA, 25 bp, Homo sapien
gcaaactttgctcaccacagacttc

SEQ ID NO: 5611295 - DNA, 25 bp, Homo sapien
ctgccatctggcccacattaaaaaa

SEQ ID NO: 5611296 - DNA, 25 bp, Homo sapien
cctgtagcttggggtgttatttaag

SEQ ID NO: 5611297 - DNA, 25 bp, Homo sapien
actttatcagtgtaataaggcaaac

SEQ ID NO: 5611298 - DNA, 25 bp, Homo sapien
cagtgtaataaggcaaactttgctc

SEQ ID NO: 5611299 - DNA, 25 bp, Homo sapien
agcctgtgtcactacctccccatca

SEQ ID NO: 5611300 - DNA, 25 bp, Homo sapien
gtgatccagctttattagtgtaatt

SEQ ID NO: 5611301 - DNA, 25 bp, Homo sapien
ctcacttcctgtagcttggggtgtt

SEQ ID NO: 5611302 - DNA, 25 bp, Homo sapien
cccacagcctgtgtcactacctccc

SEQ ID NO: 5611303 - DNA, 25 bp, Homo sapien
caccacagacttcctccccctaccc

SEQ ID NO: 5611304 - DNA, 25 bp, Homo sapien
tccccatcagaggcctcacttcctg

SEQ ID NO: 5611305 - DNA, 25 bp, Homo sapien
gcagagtgggattcctgaagtttct

SEQ ID NO: 5611306 - DNA, 25 bp, Homo sapien
cctcaagtagccgtaataatgttca

SEQ ID NO: 5611307 - DNA, 25 bp, Homo sapien
tcggattgccctgaaaaagaacttc

SEQ ID NO: 5611308 - DNA, 25 bp, Homo sapien
cagtgtgtcagaaaagcatacctca

SEQ ID NO: 5611309 - DNA, 25 bp, Homo sapien
aaatattagctagaccaacaccctt

SEQ ID NO: 5611310 - DNA, 25 bp, Homo sapien
tcatctatcagatcggattgccctg

SEQ ID NO: 5611311 - DNA, 25 bp, Homo sapien
gctttatttagcaacaccagaggct

SEQ ID NO: 5611312 - DNA, 25 bp, Homo sapien
tgaagtttcagacttaaagaagcag

SEQ ID NO: 5611313 - DNA, 25 bp, Homo sapien
acctggtgtctgattatgtagtttg

SEQ ID NO: 5611314 - DNA, 25 bp, Homo sapien
tgataaatatgagaactgaagtttc

SEQ ID NO: 5611315 - DNA, 25 bp, Homo sapien
cactcttaaggtaggtagtggaagc

SEQ ID NO: 5611316 - DNA, 25 bp, Homo sapien
aatacgagaaaaagacatactagct

SEQ ID NO: 5611317 - DNA, 25 bp, Homo sapien
ttgtgctaaatttattggcagccac

SEQ ID NO: 5611318 - DNA, 25 bp, Homo sapien
ctatgaagacattttggcactaacc

SEQ ID NO: 5611319 - DNA, 25 bp, Homo sapien
tggcactaacctgtgaaatagaatt

SEQ ID NO: 5611320 - DNA, 25 bp, Homo sapien
agaaataaattggagacagtgcaat

SEQ ID NO: 5611321 - DNA, 25 bp, Homo sapien
ataagtgatatgtgtagataaccat

SEQ ID NO: 5611322 - DNA, 25 bp, Homo sapien
tctatgaaagtcaaagagaaattaa

SEQ ID NO: 5611323 - DNA, 25 bp, Homo sapien
tggcagccacattctcaacactaca

SEQ ID NO: 5611324 - DNA, 25 bp, Homo sapien
agtgcaatttctataaggggaaagt

SEQ ID NO: 5611325 - DNA, 25 bp, Homo sapien
actacattgtaaaatgtgggtactt

SEQ ID NO: 5611326 - DNA, 25 bp, Homo sapien
aatatcaggtctaatgttccagctt

SEQ ID NO: 5611327 - DNA, 25 bp, Homo sapien
taattctatagaacagcacggccca

SEQ ID NO: 5611328 - DNA, 25 bp, Homo sapien
ctccactgtggtagacctgactcac

SEQ ID NO: 5611329 - DNA, 25 bp, Homo sapien
gtcagctcatggccaggtaatgatc

SEQ ID NO: 5611330 - DNA, 25 bp, Homo sapien
gactcacagtgacgctaatcatgtc

SEQ ID NO: 5611331 - DNA, 25 bp, Homo sapien
taggtactacagagtttgggctagg

SEQ ID NO: 5611332 - DNA, 25 bp, Homo sapien
tgtacaacacggctataggtactac

SEQ ID NO: 5611333 - DNA, 25 bp, Homo sapien
gggcgtgttaaaggtacatgacgta

SEQ ID NO: 5611334 - DNA, 25 bp, Homo sapien
aaatgtgtcaagtgcaactgaggaa

SEQ ID NO: 5611335 - DNA, 25 bp, Homo sapien
ggctatgaagtacttgaaatgtgtc

SEQ ID NO: 5611336 - DNA, 25 bp, Homo sapien
ataacatgatgggctaaatagataa

SEQ ID NO: 5611337 - DNA, 25 bp, Homo sapien
agtttccattgggaatgcctctggc

SEQ ID NO: 5611338 - DNA, 25 bp, Homo sapien
ctcatgaggaaaaaatgtgatgatc

SEQ ID NO: 5611339 - DNA, 25 bp, Homo sapien
tgatcaacaaaagtagtcaggatgt

SEQ ID NO: 5611340 - DNA, 25 bp, Homo sapien
ttaggtaacttgatcagtgaatgcc

SEQ ID NO: 5611341 - DNA, 25 bp, Homo sapien
agtgaatgcctccctaagcagtgtc

SEQ ID NO: 5611342 - DNA, 25 bp, Homo sapien
aagcagtgtcatttgaacccagatc

SEQ ID NO: 5611343 - DNA, 25 bp, Homo sapien
tctcaggagcctataaaacactatt

SEQ ID NO: 5611344 - DNA, 25 bp, Homo sapien
gtaaagctgatgtattgctggtgtt

SEQ ID NO: 5611345 - DNA, 25 bp, Homo sapien
caggttctgggtatagagcactgaa

SEQ ID NO: 5611346 - DNA, 25 bp, Homo sapien
ggaaacttgcctgctgtgtaaagct

SEQ ID NO: 5611347 - DNA, 25 bp, Homo sapien
atgcaaaatcaaagctggcaaatga

SEQ ID NO: 5611348 - DNA, 25 bp, Homo sapien
ctgtacttgtagagagcaggaaact

SEQ ID NO: 5611349 - DNA, 25 bp, Homo sapien
tcaacatgctataaggaaagaggaa

SEQ ID NO: 5611350 - DNA, 25 bp, Homo sapien
ggtgacttctcacggagtctgtggc

SEQ ID NO: 5611351 - DNA, 25 bp, Homo sapien
cttaaaataatggctactgggggaa

SEQ ID NO: 5611352 - DNA, 25 bp, Homo sapien
atgctaaaagagggccaatttcatc

SEQ ID NO: 5611353 - DNA, 25 bp, Homo sapien
gggcaaagaaacagactagtgtagt

SEQ ID NO: 5611354 - DNA, 25 bp, Homo sapien
agtgctctgacaccaagctcaccca

SEQ ID NO: 5611355 - DNA, 25 bp, Homo sapien
gtcttagagacttgagaccagggca

SEQ ID NO: 5611356 - DNA, 25 bp, Homo sapien
ggccttccctgactgctgaaaaccc

SEQ ID NO: 5611357 - DNA, 25 bp, Homo sapien
agcccacataatacacaccagcgtc

SEQ ID NO: 5611358 - DNA, 25 bp, Homo sapien
acagcatcacaagagtccaccctcc

SEQ ID NO: 5611359 - DNA, 25 bp, Homo sapien
agattaaagcagaactccggccttc

SEQ ID NO: 5611360 - DNA, 25 bp, Homo sapien
gattgcagacttctgggctccaaaa

SEQ ID NO: 5611361 - DNA, 25 bp, Homo sapien
aaagaggcaaagaacagtctctctc

SEQ ID NO: 5611362 - DNA, 25 bp, Homo sapien
tggagaaatttatcctggttcatcc

SEQ ID NO: 5611363 - DNA, 25 bp, Homo sapien
atgctgaccataatcagaagctaaa

SEQ ID NO: 5611364 - DNA, 25 bp, Homo sapien
agggagagttctgatgcaagtactc

SEQ ID NO: 5611365 - DNA, 25 bp, Homo sapien
ctcaggttgaattaaaagataggat

SEQ ID NO: 5611366 - DNA, 25 bp, Homo sapien
gagatatgccaaggaatgctgacca

SEQ ID NO: 5611367 - DNA, 25 bp, Homo sapien
attaaaagataggattggagaaatt

SEQ ID NO: 5611368 - DNA, 25 bp, Homo sapien
tccaagtggtttcttaattgcaatc

SEQ ID NO: 5611369 - DNA, 25 bp, Homo sapien
tttgagaagaataaattcctcttgt

SEQ ID NO: 5611370 - DNA, 25 bp, Homo sapien
cttataatacacaggtagagggaga

SEQ ID NO: 5611371 - DNA, 25 bp, Homo sapien
cctgagactgacagaaagcaatgca

SEQ ID NO: 5611372 - DNA, 25 bp, Homo sapien
caaggctacagcagtcacctgtggg

SEQ ID NO: 5611373 - DNA, 25 bp, Homo sapien
accaaaaaaggaccacttgcagatc

SEQ ID NO: 5611374 - DNA, 25 bp, Homo sapien
ttgttggaagcagatcctaagccac

SEQ ID NO: 5611375 - DNA, 25 bp, Homo sapien
gccgaggtcctcactcaaggctaca

SEQ ID NO: 5611376 - DNA, 25 bp, Homo sapien
gagtgcaaatgtatacatgggcgga

SEQ ID NO: 5611377 - DNA, 25 bp, Homo sapien
tccgtttctgagataggctgggaag

SEQ ID NO: 5611378 - DNA, 25 bp, Homo sapien
gaagagcccctggtcagtcaatagc

SEQ ID NO: 5611379 - DNA, 25 bp, Homo sapien
tcaaagacagcaggctctgcgaaga

SEQ ID NO: 5611380 - DNA, 25 bp, Homo sapien
catggacctggagcactcacctaag

SEQ ID NO: 5611381 - DNA, 25 bp, Homo sapien
accatcagcaaacagccacggtagg

SEQ ID NO: 5611382 - DNA, 25 bp, Homo sapien
caagagggaaacatgaattagttac

SEQ ID NO: 5611383 - DNA, 25 bp, Homo sapien
ttctgagtcacttaagcttgcccct

SEQ ID NO: 5611384 - DNA, 25 bp, Homo sapien
atggtaacctcgatcgcagctctcc

SEQ ID NO: 5611385 - DNA, 25 bp, Homo sapien
cagatgggtactgctccgaatttcc

SEQ ID NO: 5611386 - DNA, 25 bp, Homo sapien
gttcgctgtatggaccagatgggta

SEQ ID NO: 5611387 - DNA, 25 bp, Homo sapien
gtgctcactgggagttcgctgtatg

SEQ ID NO: 5611388 - DNA, 25 bp, Homo sapien
ttcccgcactgccaagagggaaaca

SEQ ID NO: 5611389 - DNA, 25 bp, Homo sapien
ttagttacattgccgtggtgctcac

SEQ ID NO: 5611390 - DNA, 25 bp, Homo sapien
agaatgcaaaatagcgtgtgcctct

SEQ ID NO: 5611391 - DNA, 25 bp, Homo sapien
ttatcaaaagtagggaagaatgcaa

SEQ ID NO: 5611392 - DNA, 25 bp, Homo sapien
aggttgagacgattggatactgtat

SEQ ID NO: 5611393 - DNA, 25 bp, Homo sapien
aacaacctctggctagggctcatgc

SEQ ID NO: 5611394 - DNA, 25 bp, Homo sapien
tttatggagctgcctacaaggtttc

SEQ ID NO: 5611395 - DNA, 25 bp, Homo sapien
gggctcatgcttttatggagctgcc

SEQ ID NO: 5611396 - DNA, 25 bp, Homo sapien
gtttgttaagaagagccattagggc

SEQ ID NO: 5611397 - DNA, 25 bp, Homo sapien
agaggctgccaaccttggtgcatgt

SEQ ID NO: 5611398 - DNA, 25 bp, Homo sapien
aacctcaagtatggtcctgggtgga

SEQ ID NO: 5611399 - DNA, 25 bp, Homo sapien
cttggtgcatgttctgcccagcttt

SEQ ID NO: 5611400 - DNA, 25 bp, Homo sapien
tacatttcctagagaggagggtcag

SEQ ID NO: 5611401 - DNA, 25 bp, Homo sapien
gctttagggataaaagctgcccctg

SEQ ID NO: 5611402 - DNA, 25 bp, Homo sapien
gaggagggtcagtaacaacctctgg

SEQ ID NO: 5611403 - DNA, 25 bp, Homo sapien
atcggtcaattctggcaggagctac

SEQ ID NO: 5611404 - DNA, 25 bp, Homo sapien
atagtggtgtagaacacaagatgac

SEQ ID NO: 5611405 - DNA, 25 bp, Homo sapien
ggtagagaactgattttagaagcta

SEQ ID NO: 5611406 - DNA, 25 bp, Homo sapien
acaagatgacatggtgatgcttctc

SEQ ID NO: 5611407 - DNA, 25 bp, Homo sapien
aaatgaataaggatttctctggccc

SEQ ID NO: 5611408 - DNA, 25 bp, Homo sapien
aatgcccaccagagttaaatgaata

SEQ ID NO: 5611409 - DNA, 25 bp, Homo sapien
tctggcccttaagtggatgggtatc

SEQ ID NO: 5611410 - DNA, 25 bp, Homo sapien
gactgaatgcgattgtggctgttta

SEQ ID NO: 5611411 - DNA, 25 bp, Homo sapien
tgggtatgttacataaatgcccacc

SEQ ID NO: 5611412 - DNA, 25 bp, Homo sapien
agtgccaagttgactgaatgcgatt

SEQ ID NO: 5611413 - DNA, 25 bp, Homo sapien
ttccattcgtagggtagagaactga

SEQ ID NO: 5611414 - DNA, 25 bp, Homo sapien
tgggaatagcattcgtgtttggggg

SEQ ID NO: 5611415 - DNA, 25 bp, Homo sapien
ttgttaaagtatcacttgaggtgac

SEQ ID NO: 5611416 - DNA, 25 bp, Homo sapien
ctcattttagaagaggaattccagg

SEQ ID NO: 5611417 - DNA, 25 bp, Homo sapien
ataaccaaaaactgttctggacttg

SEQ ID NO: 5611418 - DNA, 25 bp, Homo sapien
aacaaagatttatgcattgaggttt

SEQ ID NO: 5611419 - DNA, 25 bp, Homo sapien
atgcattgaggttttataggttaat

SEQ ID NO: 5611420 - DNA, 25 bp, Homo sapien
ggtgggtctcttgccaatgggtatg

SEQ ID NO: 5611421 - DNA, 25 bp, Homo sapien
taaagtatcacttgaggtgacattt

SEQ ID NO: 5611422 - DNA, 25 bp, Homo sapien
aagaaatgaatgaccctttgttaaa

SEQ ID NO: 5611423 - DNA, 25 bp, Homo sapien
ttgaggtgacatttatgatcatatt

SEQ ID NO: 5611424 - DNA, 25 bp, Homo sapien
gggtctcttgccaatgggtatgggg

SEQ ID NO: 5611425 - DNA, 25 bp, Homo sapien
ctgttctggacttggtatcctcatt

SEQ ID NO: 5611426 - DNA, 25 bp, Homo sapien
ggttttggggatgatttgtgttata

SEQ ID NO: 5611427 - DNA, 25 bp, Homo sapien
gcaagaccccgtctccatagaagac

SEQ ID NO: 5611428 - DNA, 25 bp, Homo sapien
taagtaggtggaaactcatctttac

SEQ ID NO: 5611429 - DNA, 25 bp, Homo sapien
cagccgttccagatgctgccagtgg

SEQ ID NO: 5611430 - DNA, 25 bp, Homo sapien
taatgttggccagtcacagtgactc

SEQ ID NO: 5611431 - DNA, 25 bp, Homo sapien
gagtcgtgggctaatatcagctgga

SEQ ID NO: 5611432 - DNA, 25 bp, Homo sapien
aatgtcagaactgaaacagcctcac

SEQ ID NO: 5611433 - DNA, 25 bp, Homo sapien
gcttaagcccaatagtcgaaggagc

SEQ ID NO: 5611434 - DNA, 25 bp, Homo sapien
ttgcagctgctttacagatcatgat

SEQ ID NO: 5611435 - DNA, 25 bp, Homo sapien
caaaagtccagaaaaaggcaagttg

SEQ ID NO: 5611436 - DNA, 25 bp, Homo sapien
cccaatagtcgaaggagctatggtg

SEQ ID NO: 5611437 - DNA, 25 bp, Homo sapien
ttgagtggtaactttctgagtagaa

SEQ ID NO: 5611438 - DNA, 25 bp, Homo sapien
acacagtgactgccaatgctttagg

SEQ ID NO: 5611439 - DNA, 25 bp, Homo sapien
gtggagagaaagagctaaatattca

SEQ ID NO: 5611440 - DNA, 25 bp, Homo sapien
ctgagtagaaactggtgctgccaaa

SEQ ID NO: 5611441 - DNA, 25 bp, Homo sapien
taaggtaaaattgggtggcaatatc

SEQ ID NO: 5611442 - DNA, 25 bp, Homo sapien
ccctagggagctttacctccatgag

SEQ ID NO: 5611443 - DNA, 25 bp, Homo sapien
atcagccaccatgcctaaaacgttc

SEQ ID NO: 5611444 - DNA, 25 bp, Homo sapien
tatcaaaataattgggtgggaggtg

SEQ ID NO: 5611445 - DNA, 25 bp, Homo sapien
cagcacaggtgtacttatcagccac

SEQ ID NO: 5611446 - DNA, 25 bp, Homo sapien
aaaaccagactcagcacaggtgtac

SEQ ID NO: 5611447 - DNA, 25 bp, Homo sapien
atgctttaggcccaccccagactcc

SEQ ID NO: 5611448 - DNA, 25 bp, Homo sapien
tgactgacggagcataatggctcat

SEQ ID NO: 5611449 - DNA, 25 bp, Homo sapien
acaggatgactatgcatggttacag

SEQ ID NO: 5611450 - DNA, 25 bp, Homo sapien
ctgttatgcaccatggaatacacca

SEQ ID NO: 5611451 - DNA, 25 bp, Homo sapien
aaacaggatgactatgcatggttac

SEQ ID NO: 5611452 - DNA, 25 bp, Homo sapien
ctgacggagcataatggctcattac

SEQ ID NO: 5611453 - DNA, 25 bp, Homo sapien
ggaaacaggatgactatgcatggtt

SEQ ID NO: 5611454 - DNA, 25 bp, Homo sapien
atgactgacggagcataatggctca

SEQ ID NO: 5611455 - DNA, 25 bp, Homo sapien
tgcaccatggaatacaccatgatca

SEQ ID NO: 5611456 - DNA, 25 bp, Homo sapien
tgtctgttatgcaccatggaataca

SEQ ID NO: 5611457 - DNA, 25 bp, Homo sapien
gactgacggagcataatggctcatt

SEQ ID NO: 5611458 - DNA, 25 bp, Homo sapien
tgacggagcataatggctcattacc

SEQ ID NO: 5611459 - DNA, 25 bp, Homo sapien
caaggccagctttgctggcacccag

SEQ ID NO: 5611460 - DNA, 25 bp, Homo sapien
ttgctggcacccaggtcatatggaa

SEQ ID NO: 5611461 - DNA, 25 bp, Homo sapien
aacaaatacaagcataagcaaaacc

SEQ ID NO: 5611462 - DNA, 25 bp, Homo sapien
ctttagcaatgtagcagatgctatc

SEQ ID NO: 5611463 - DNA, 25 bp, Homo sapien
actgtgatacttgctatataggttg

SEQ ID NO: 5611464 - DNA, 25 bp, Homo sapien
gtgagctctgtgtagtcaggccatt

SEQ ID NO: 5611465 - DNA, 25 bp, Homo sapien
atcttagagttacaacccagcgttt

SEQ ID NO: 5611466 - DNA, 25 bp, Homo sapien
tagcagctaagattcctaacagatc

SEQ ID NO: 5611467 - DNA, 25 bp, Homo sapien
aattggtgttgcaacagtagcagct

SEQ ID NO: 5611468 - DNA, 25 bp, Homo sapien
aggtcatatggaacctggcccagtg

SEQ ID NO: 5611469 - DNA, 25 bp, Homo sapien
cccagcgtttttcaacagtgagctc

SEQ ID NO: 5611470 - DNA, 25 bp, Homo sapien
ctggcaaattagaatcacaaggaca

SEQ ID NO: 5611471 - DNA, 25 bp, Homo sapien
ttacgtaagaaatctaaggtctctc

SEQ ID NO: 5611472 - DNA, 25 bp, Homo sapien
cactgcgccaggacatagactttta

SEQ ID NO: 5611473 - DNA, 25 bp, Homo sapien
tgaagtctctcactgcttagaaatc

SEQ ID NO: 5611474 - DNA, 25 bp, Homo sapien
cttgtgaacatggctttacgtaaga

SEQ ID NO: 5611475 - DNA, 25 bp, Homo sapien
cacccaggtaacttctgtgttttta

SEQ ID NO: 5611476 - DNA, 25 bp, Homo sapien
catgttggctaagttgatctccagc

SEQ ID NO: 5611477 - DNA, 25 bp, Homo sapien
ttctgataccagatgttctactact

SEQ ID NO: 5611478 - DNA, 25 bp, Homo sapien
aacatggcaataaaaacactcaagt

SEQ ID NO: 5611479 - DNA, 25 bp, Homo sapien
aagattcatatgctaacatggcaat

SEQ ID NO: 5611480 - DNA, 25 bp, Homo sapien
atctaatctaaaatactgaagtctc

SEQ ID NO: 5611481 - DNA, 25 bp, Homo sapien
ccttgaacctgaccaccaatttgcc

SEQ ID NO: 5611482 - DNA, 25 bp, Homo sapien
attttgacctgaacatgcatttagt

SEQ ID NO: 5611483 - DNA, 25 bp, Homo sapien
aactaacaagtctgatacatgtatt

SEQ ID NO: 5611484 - DNA, 25 bp, Homo sapien
taataaaatgcacactctgtagttc

SEQ ID NO: 5611485 - DNA, 25 bp, Homo sapien
tctgtggttaactatgaaaagatgc

SEQ ID NO: 5611486 - DNA, 25 bp, Homo sapien
ttcaaatcctcaagcatgagctttc

SEQ ID NO: 5611487 - DNA, 25 bp, Homo sapien
cagaaaatctgacaagtgatgtcat

SEQ ID NO: 5611488 - DNA, 25 bp, Homo sapien
ttgtaagtttcaggcttcaaaagag

SEQ ID NO: 5611489 - DNA, 25 bp, Homo sapien
gtaatctgcattcaactaacaagtc

SEQ ID NO: 5611490 - DNA, 25 bp, Homo sapien
tgtagttctgaataataaaaggaaa

SEQ ID NO: 5611491 - DNA, 25 bp, Homo sapien
cttatggtagatttcaggctttaaa

SEQ ID NO: 5611492 - DNA, 25 bp, Homo sapien
aaagacttttgagcatgaagagatg

SEQ ID NO: 5611493 - DNA, 25 bp, Homo sapien
ataaatgagcaaatgacacaaaaga

SEQ ID NO: 5611494 - DNA, 25 bp, Homo sapien
caaaaagtagtcgagtgtgtgtaga

SEQ ID NO: 5611495 - DNA, 25 bp, Homo sapien
atgataaacatagcaaaccaaatac

SEQ ID NO: 5611496 - DNA, 25 bp, Homo sapien
atggaaagaaactataaatgtacta

SEQ ID NO: 5611497 - DNA, 25 bp, Homo sapien
tcacagaagaagacatgtaaaagac

SEQ ID NO: 5611498 - DNA, 25 bp, Homo sapien
aaaccaaatacataaggaagagatg

SEQ ID NO: 5611499 - DNA, 25 bp, Homo sapien
tcatgtaatagggaaggtctatctc

SEQ ID NO: 5611500 - DNA, 25 bp, Homo sapien
agcagagattgtgctcctgcattct

SEQ ID NO: 5611501 - DNA, 25 bp, Homo sapien
tgaagagatgcttagtcaaggaaag

SEQ ID NO: 5611502 - DNA, 25 bp, Homo sapien
aaccatacaagtagataaatgagca

SEQ ID NO: 5611503 - DNA, 25 bp, Homo sapien
ctgtacccactctgtatctcacctc

SEQ ID NO: 5611504 - DNA, 25 bp, Homo sapien
aaaagggaatcgtaactgagctcca

SEQ ID NO: 5611505 - DNA, 25 bp, Homo sapien
aggggcccttcagcatcctgtaccc

SEQ ID NO: 5611506 - DNA, 25 bp, Homo sapien
ttttaggggcccttcagcatcctgt

SEQ ID NO: 5611507 - DNA, 25 bp, Homo sapien
agggaatcgtaactgagctccagac

SEQ ID NO: 5611508 - DNA, 25 bp, Homo sapien
ctctgtatctcacctccatgccctg

SEQ ID NO: 5611509 - DNA, 25 bp, Homo sapien
gtgcaactgcgaatttttaggggcc

SEQ ID NO: 5611510 - DNA, 25 bp, Homo sapien
gaatactgcaggagtgcaactgcga

SEQ ID NO: 5611511 - DNA, 25 bp, Homo sapien
gacatctcagaatactgcaggagtg

SEQ ID NO: 5611512 - DNA, 25 bp, Homo sapien
actgcaggagtgcaactgcgaattt

SEQ ID NO: 5611513 - DNA, 25 bp, Homo sapien
tctcagaatactgcaggagtgcaac

SEQ ID NO: 5611514 - DNA, 25 bp, Homo sapien
ggtataactgccaatatccaagggt

SEQ ID NO: 5611515 - DNA, 25 bp, Homo sapien
gaagagcctgggaatttagcggctc

SEQ ID NO: 5611516 - DNA, 25 bp, Homo sapien
actggagttcatttaggtgattcac

SEQ ID NO: 5611517 - DNA, 25 bp, Homo sapien
agatgggttctctggagagatatgg

SEQ ID NO: 5611518 - DNA, 25 bp, Homo sapien
ttagcggctcaaatcagctggcaac

SEQ ID NO: 5611519 - DNA, 25 bp, Homo sapien
ggttctctggagagatatggaagag

SEQ ID NO: 5611520 - DNA, 25 bp, Homo sapien
ggtgattcacatacaatttccggct

SEQ ID NO: 5611521 - DNA, 25 bp, Homo sapien
agctggcaactggagttcatttagg

SEQ ID NO: 5611522 - DNA, 25 bp, Homo sapien
gccaatatccaagggttgccaaggg

SEQ ID NO: 5611523 - DNA, 25 bp, Homo sapien
atttttagggtatgaaaacgatagc

SEQ ID NO: 5611524 - DNA, 25 bp, Homo sapien
ccggctttccttgcaggtatcagtg

SEQ ID NO: 5611525 - DNA, 25 bp, Homo sapien
tatgcaggcactgttacaagcatct

SEQ ID NO: 5611526 - DNA, 25 bp, Homo sapien
taaggtacttatgcaaggaaaacag

SEQ ID NO: 5611527 - DNA, 25 bp, Homo sapien
caaatccaggtgctctgaagtaaac

SEQ ID NO: 5611528 - DNA, 25 bp, Homo sapien
cccatcagagtgaacttcaaatgcc

SEQ ID NO: 5611529 - DNA, 25 bp, Homo sapien
tcaacaattagactcaccagaactt

SEQ ID NO: 5611530 - DNA, 25 bp, Homo sapien
caagcatctatgacaggtactacta

SEQ ID NO: 5611531 - DNA, 25 bp, Homo sapien
ttgttgtaaatagactgatcccatc

SEQ ID NO: 5611532 - DNA, 25 bp, Homo sapien
gaagtaaacaatctctctggtcaac

SEQ ID NO: 5611533 - DNA, 25 bp, Homo sapien
aactgcatgaacaaagatgctgtca

SEQ ID NO: 5611534 - DNA, 25 bp, Homo sapien
aggtgtgaagagaatgcattaactt

SEQ ID NO: 5611535 - DNA, 25 bp, Homo sapien
caggtggcacactgcaattcaaatc

SEQ ID NO: 5611536 - DNA, 25 bp, Homo sapien
aagaccagaaagaataagcaatata

SEQ ID NO: 5611537 - DNA, 25 bp, Homo sapien
tctctagagcatgagggtcttggaa

SEQ ID NO: 5611538 - DNA, 25 bp, Homo sapien
cagccccaaggttccaaagtgtcca

SEQ ID NO: 5611539 - DNA, 25 bp, Homo sapien
acgtagtgcagaacaaatggctttt

SEQ ID NO: 5611540 - DNA, 25 bp, Homo sapien
agaacaggtttttggacttggctac

SEQ ID NO: 5611541 - DNA, 25 bp, Homo sapien
agaatacaggctgcaaggccttcct

SEQ ID NO: 5611542 - DNA, 25 bp, Homo sapien
atcgtagttacaaccctggctggcc

SEQ ID NO: 5611543 - DNA, 25 bp, Homo sapien
ggtgataagcccaaggatgttaaga

SEQ ID NO: 5611544 - DNA, 25 bp, Homo sapien
aactgaaccagagtaaacccaaagc

SEQ ID NO: 5611545 - DNA, 25 bp, Homo sapien
tcccctggacatggaacagggctga

SEQ ID NO: 5611546 - DNA, 25 bp, Homo sapien
gagaggcaagtacttaagaccagaa

SEQ ID NO: 5611547 - DNA, 25 bp, Homo sapien
caaatacttagtttccatacaatat

SEQ ID NO: 5611548 - DNA, 25 bp, Homo sapien
atattgtatggaaactaagtatttg

SEQ ID NO: 5611549 - DNA, 25 bp, Homo sapien
tagacttccgttacagcactgggtt

SEQ ID NO: 5611550 - DNA, 25 bp, Homo sapien
tcacagtattctaatgctcacatcc

SEQ ID NO: 5611551 - DNA, 25 bp, Homo sapien
cacatgaatgccaatatcttaggat

SEQ ID NO: 5611552 - DNA, 25 bp, Homo sapien
gaacttcaaaacagtctgatggtac

SEQ ID NO: 5611553 - DNA, 25 bp, Homo sapien
tgtactgagcagctattagacttcc

SEQ ID NO: 5611554 - DNA, 25 bp, Homo sapien
aacttcatgtgaaaagatctgtgtt

SEQ ID NO: 5611555 - DNA, 25 bp, Homo sapien
tatctgcctcaagacatccatcaca

SEQ ID NO: 5611556 - DNA, 25 bp, Homo sapien
catatagagctacactgcctgcata

SEQ ID NO: 5611557 - DNA, 25 bp, Homo sapien
taatttccattagaggctgttcctt

SEQ ID NO: 5611558 - DNA, 25 bp, Homo sapien
ctgcctgcatagaccgtgaacatgt

SEQ ID NO: 5611559 - DNA, 25 bp, Homo sapien
aagattcaactgtgttatctgcctc

SEQ ID NO: 5611560 - DNA, 25 bp, Homo sapien
cacacagtcgcaaaagctctgaggc

SEQ ID NO: 5611561 - DNA, 25 bp, Homo sapien
ttcaagcaacagtctaaatttatag

SEQ ID NO: 5611562 - DNA, 25 bp, Homo sapien
cttttgctcctgatgggtgagactg

SEQ ID NO: 5611563 - DNA, 25 bp, Homo sapien
gtcgcaaaagctctgaggctttctc

SEQ ID NO: 5611564 - DNA, 25 bp, Homo sapien
agccagaccacacagtcgcaaaagc

SEQ ID NO: 5611565 - DNA, 25 bp, Homo sapien
cagaccacacagtcgcaaaagctct

SEQ ID NO: 5611566 - DNA, 25 bp, Homo sapien
atttatagccagaccacacagtcgc

SEQ ID NO: 5611567 - DNA, 25 bp, Homo sapien
tatagccagaccacacagtcgcaaa

SEQ ID NO: 5611568 - DNA, 25 bp, Homo sapien
tgggtgagactgctgctgcatttct

SEQ ID NO: 5611569 - DNA, 25 bp, Homo sapien
catttctaagaaggctgcaatgggg

SEQ ID NO: 5611570 - DNA, 25 bp, Homo sapien
taaatttatagccagaccacacagt

SEQ ID NO: 5611571 - DNA, 25 bp, Homo sapien
caaatgataacaggggcctatcttt

SEQ ID NO: 5611572 - DNA, 25 bp, Homo sapien
gtttacaacgtataaagagtgccaa

SEQ ID NO: 5611573 - DNA, 25 bp, Homo sapien
aggagcggtactcatgtgcatgagt

SEQ ID NO: 5611574 - DNA, 25 bp, Homo sapien
aatgtttacaacgtataaagagtgc

SEQ ID NO: 5611575 - DNA, 25 bp, Homo sapien
acaagcaaaaagactagggaaaata

SEQ ID NO: 5611576 - DNA, 25 bp, Homo sapien
tcatgtgcatgagtacctgtaccac

SEQ ID NO: 5611577 - DNA, 25 bp, Homo sapien
agcaaatgataacaggggcctatct

SEQ ID NO: 5611578 - DNA, 25 bp, Homo sapien
gagtacctgtaccactaaaacagat

SEQ ID NO: 5611579 - DNA, 25 bp, Homo sapien
caagcaaaaagactagggaaaatat

SEQ ID NO: 5611580 - DNA, 25 bp, Homo sapien
tgataacaggggcctatctttaaaa

SEQ ID NO: 5611581 - DNA, 25 bp, Homo sapien
ttacaacgtataaagagtgccaagg

SEQ ID NO: 5611582 - DNA, 25 bp, Homo sapien
tcattcacccatctacccatcctac

SEQ ID NO: 5611583 - DNA, 25 bp, Homo sapien
tgatcaaaacacagaccaataaaac

SEQ ID NO: 5611584 - DNA, 25 bp, Homo sapien
tcttgctattgttttgactccctgc

SEQ ID NO: 5611585 - DNA, 25 bp, Homo sapien
agacccacgagcctagagtttacaa

SEQ ID NO: 5611586 - DNA, 25 bp, Homo sapien
cagaccaataaaactaagaagaaac

SEQ ID NO: 5611587 - DNA, 25 bp, Homo sapien
cctacagtgagccaggtactgagag

SEQ ID NO: 5611588 - DNA, 25 bp, Homo sapien
aaagtgactgtgctgatcaaaacac

SEQ ID NO: 5611589 - DNA, 25 bp, Homo sapien
gaacaaaaaagtgactgtgctgatc

SEQ ID NO: 5611590 - DNA, 25 bp, Homo sapien
acccatcctacagtgagccaggtac

SEQ ID NO: 5611591 - DNA, 25 bp, Homo sapien
ctccctgcttaccaggaaagagaac

SEQ ID NO: 5611592 - DNA, 25 bp, Homo sapien
agagtttacaaagtagtagaaattc

SEQ ID NO: 5611593 - DNA, 25 bp, Homo sapien
acttaagtcaaactgaaactctggc

SEQ ID NO: 5611594 - DNA, 25 bp, Homo sapien
actgaaactctggctgaaactcatt

SEQ ID NO: 5611595 - DNA, 25 bp, Homo sapien
ttttacgcctggaccaagtggccat

SEQ ID NO: 5611596 - DNA, 25 bp, Homo sapien
gaccacatgatttctcagaggggcc

SEQ ID NO: 5611597 - DNA, 25 bp, Homo sapien
cacacttctggaaagactggatggg

SEQ ID NO: 5611598 - DNA, 25 bp, Homo sapien
tcccttgagatgttgcttaattgac

SEQ ID NO: 5611599 - DNA, 25 bp, Homo sapien
cagcagcatcccacagaccctaggg

SEQ ID NO: 5611600 - DNA, 25 bp, Homo sapien
gccacaagcttggcctaggcgtgag

SEQ ID NO: 5611601 - DNA, 25 bp, Homo sapien
aagtaggccccagaacgatggggcc

SEQ ID NO: 5611602 - DNA, 25 bp, Homo sapien
cgaatcaggccacaagcttggccta

SEQ ID NO: 5611603 - DNA, 25 bp, Homo sapien
cattttgtagatgcactggcaggga

SEQ ID NO: 5611604 - DNA, 25 bp, Homo sapien
tataaaaggctctgagaaagaggct

SEQ ID NO: 5611605 - DNA, 25 bp, Homo sapien
gggaagatttgaggaggaacttcca

SEQ ID NO: 5611606 - DNA, 25 bp, Homo sapien
aggctggccaacattgggaagattt

SEQ ID NO: 5611607 - DNA, 25 bp, Homo sapien
gagaagcaaaacagatgagatactg

SEQ ID NO: 5611608 - DNA, 25 bp, Homo sapien
atgtcataaacagatagagatggaa

SEQ ID NO: 5611609 - DNA, 25 bp, Homo sapien
agatactggggagacattctatgtc

SEQ ID NO: 5611610 - DNA, 25 bp, Homo sapien
ggaaaacaaatcaagattgtcacaa

SEQ ID NO: 5611611 - DNA, 25 bp, Homo sapien
taaatgatgtataaaaggctctgag

SEQ ID NO: 5611612 - DNA, 25 bp, Homo sapien
gggccacaggccagctatccataaa

SEQ ID NO: 5611613 - DNA, 25 bp, Homo sapien
gatagagatggaaaaatagccaaat

SEQ ID NO: 5611614 - DNA, 25 bp, Homo sapien
caaactaaacttataacgtggctta

SEQ ID NO: 5611615 - DNA, 25 bp, Homo sapien
cagtcttacaaggaacccccccaca

SEQ ID NO: 5611616 - DNA, 25 bp, Homo sapien
tggagaatagggaactgttgtgttc

SEQ ID NO: 5611617 - DNA, 25 bp, Homo sapien
ggattcagtaattttggataggaac

SEQ ID NO: 5611618 - DNA, 25 bp, Homo sapien
gcaatgtacaaggaagaaagtcaaa

SEQ ID NO: 5611619 - DNA, 25 bp, Homo sapien
tccttatcaccaacttgggtggtct

SEQ ID NO: 5611620 - DNA, 25 bp, Homo sapien
tagggaactgttgtgttctagaacc

SEQ ID NO: 5611621 - DNA, 25 bp, Homo sapien
cagtgaatagtaggaggtctccatt

SEQ ID NO: 5611622 - DNA, 25 bp, Homo sapien
agtaattttggataggaacaccatt

SEQ ID NO: 5611623 - DNA, 25 bp, Homo sapien
agcagtttactctgtaacaccagca

SEQ ID NO: 5611624 - DNA, 25 bp, Homo sapien
aggcggcatttgctgaggttattct

SEQ ID NO: 5611625 - DNA, 25 bp, Homo sapien
tctgagaggtcagtgaatagtagga

SEQ ID NO: 5611626 - DNA, 25 bp, Homo sapien
gtccatcagcaattgtaatttgaaa

SEQ ID NO: 5611627 - DNA, 25 bp, Homo sapien
tatatgtatagccgcacagagatac

SEQ ID NO: 5611628 - DNA, 25 bp, Homo sapien
ctcgctgcaatacaaattgtccatc

SEQ ID NO: 5611629 - DNA, 25 bp, Homo sapien
gtatgtatatgtatagccgcacaga

SEQ ID NO: 5611630 - DNA, 25 bp, Homo sapien
atagccgcacagagatacatttctt

SEQ ID NO: 5611631 - DNA, 25 bp, Homo sapien
aatccagattaattctaaaggggct

SEQ ID NO: 5611632 - DNA, 25 bp, Homo sapien
acaaaaagacagtgagctctaatgc

SEQ ID NO: 5611633 - DNA, 25 bp, Homo sapien
aggaacttgaggaaacaaatccaga

SEQ ID NO: 5611634 - DNA, 25 bp, Homo sapien
cattctgttgttctcgctgcaatac

SEQ ID NO: 5611635 - DNA, 25 bp, Homo sapien
agtgagctctaatgcaaacaggatt

SEQ ID NO: 5611636 - DNA, 25 bp, Homo sapien
aaagacagtgagctctaatgcaaac

SEQ ID NO: 5611637 - DNA, 25 bp, Homo sapien
gtctctactccctgttgggtcaaac

SEQ ID NO: 5611638 - DNA, 25 bp, Homo sapien
actgcaaatgtacgattaatctctg

SEQ ID NO: 5611639 - DNA, 25 bp, Homo sapien
ttattgaaactgtcctgatgatttt

SEQ ID NO: 5611640 - DNA, 25 bp, Homo sapien
tgggtcaaacctttctagctgtgct

SEQ ID NO: 5611641 - DNA, 25 bp, Homo sapien
tgtgctcaagcctgtcctaacctag

SEQ ID NO: 5611642 - DNA, 25 bp, Homo sapien
taactaaagaactacatgggatccc

SEQ ID NO: 5611643 - DNA, 25 bp, Homo sapien
tagctgtgctgtagatcccatatac

SEQ ID NO: 5611644 - DNA, 25 bp, Homo sapien
atgggaccggaaataatctccattc

SEQ ID NO: 5611645 - DNA, 25 bp, Homo sapien
ctcttgacttttatgggaccggaaa

SEQ ID NO: 5611646 - DNA, 25 bp, Homo sapien
atgggatcccaggtctactgcaaat

SEQ ID NO: 5611647 - DNA, 25 bp, Homo sapien
ccttctgtcacagagaaagaaatgt

SEQ ID NO: 5611648 - DNA, 25 bp, Homo sapien
caccctcggctggcggtcgggaggc

SEQ ID NO: 5611649 - DNA, 25 bp, Homo sapien
gcctcccgaccgccagccgagggtg

SEQ ID NO: 5611650 - DNA, 25 bp, Homo sapien
gcaccctcggctggcggtcgggagg

SEQ ID NO: 5611651 - DNA, 25 bp, Homo sapien
cctcccgaccgccagccgagggtgc

SEQ ID NO: 5611652 - DNA, 25 bp, Homo sapien
accctcggctggcggtcgggaggcg

SEQ ID NO: 5611653 - DNA, 25 bp, Homo sapien
cgcctcccgaccgccagccgagggt

SEQ ID NO: 5611654 - DNA, 25 bp, Homo sapien
ggtgtcacgtggtgttaaagaccag

SEQ ID NO: 5611655 - DNA, 25 bp, Homo sapien
ctggtctttaacaccacgtgacacc

SEQ ID NO: 5611656 - DNA, 25 bp, Homo sapien
aggtacacactctttgggttatctc

SEQ ID NO: 5611657 - DNA, 25 bp, Homo sapien
aattcagggtcagcaaactccaacc

SEQ ID NO: 5611658 - DNA, 25 bp, Homo sapien
tagacctagaggcctgatttgattc

SEQ ID NO: 5611659 - DNA, 25 bp, Homo sapien
atatggtctgcaaagcctaaactac

SEQ ID NO: 5611660 - DNA, 25 bp, Homo sapien
cacatgtaaacaaactggccttcac

SEQ ID NO: 5611661 - DNA, 25 bp, Homo sapien
ttgctggttatactcctctggtgtc

SEQ ID NO: 5611662 - DNA, 25 bp, Homo sapien
ccatagagaagaagttagacctaga

SEQ ID NO: 5611663 - DNA, 25 bp, Homo sapien
ttgttaatgtactgtctacgactgc

SEQ ID NO: 5611664 - DNA, 25 bp, Homo sapien
aacttttaccagacatagccatgct

SEQ ID NO: 5611665 - DNA, 25 bp, Homo sapien
ttgtgacagagtctatatggtctgc

SEQ ID NO: 5611666 - DNA, 25 bp, Homo sapien
gttgatgataccaggccttttgttc

SEQ ID NO: 5611667 - DNA, 25 bp, Homo sapien
aacaggaggattatattgcagcatg

SEQ ID NO: 5611668 - DNA, 25 bp, Homo sapien
tattgcagcatgaggtttagagaaa

SEQ ID NO: 5611669 - DNA, 25 bp, Homo sapien
accatatcatatcaccaactaggct

SEQ ID NO: 5611670 - DNA, 25 bp, Homo sapien
agcaagagaatacacacaatattct

SEQ ID NO: 5611671 - DNA, 25 bp, Homo sapien
tgctcctagtgtgttctgttacgac

SEQ ID NO: 5611672 - DNA, 25 bp, Homo sapien
aaccttaggccaaccatatcatatc

SEQ ID NO: 5611673 - DNA, 25 bp, Homo sapien
ggctgagtgcagaggctcatatcta

SEQ ID NO: 5611674 - DNA, 25 bp, Homo sapien
acccaccaggtcccacatcaaacag

SEQ ID NO: 5611675 - DNA, 25 bp, Homo sapien
aatggacatcctctaaccttaggcc

SEQ ID NO: 5611676 - DNA, 25 bp, Homo sapien
atgaggtttagagaaaatggacatc

SEQ ID NO: 5611677 - DNA, 25 bp, Homo sapien
ccacatcaaacaggaggattatatt

SEQ ID NO: 5611678 - DNA, 25 bp, Homo sapien
acaccccaccgccaagagtccggct

SEQ ID NO: 5611679 - DNA, 25 bp, Homo sapien
agccggactcttggcggtggggtgt

SEQ ID NO: 5611680 - DNA, 25 bp, Homo sapien
tgggagggtaccacttagtgtttca

SEQ ID NO: 5611681 - DNA, 25 bp, Homo sapien
tgagcatgtttggagagactacctc

SEQ ID NO: 5611682 - DNA, 25 bp, Homo sapien
aatgtctggattaggaaactctgtc

SEQ ID NO: 5611683 - DNA, 25 bp, Homo sapien
cttcctggcaccatccacgtgagca

SEQ ID NO: 5611684 - DNA, 25 bp, Homo sapien
gaggctaaagtgatttgaggcttcc

SEQ ID NO: 5611685 - DNA, 25 bp, Homo sapien
tacttgcctaggggcttcctggcac

SEQ ID NO: 5611686 - DNA, 25 bp, Homo sapien
taggcagaatagcacggtatcctta

SEQ ID NO: 5611687 - DNA, 25 bp, Homo sapien
tgctgccctgactgctgctataggc

SEQ ID NO: 5611688 - DNA, 25 bp, Homo sapien
acagcaacccggagatatatatggc

SEQ ID NO: 5611689 - DNA, 25 bp, Homo sapien
atatacaagggggttgcttgaagtt

SEQ ID NO: 5611690 - DNA, 25 bp, Homo sapien
ttggtgggttgcctgatacccctac

SEQ ID NO: 5611691 - DNA, 25 bp, Homo sapien
gtccacagtcggctccactcgagta

SEQ ID NO: 5611692 - DNA, 25 bp, Homo sapien
tactcgagtggagccgactgtggac

SEQ ID NO: 5611693 - DNA, 25 bp, Homo sapien
tcttttaatgcggcctcctacttcc

SEQ ID NO: 5611694 - DNA, 25 bp, Homo sapien
cttctccccttctgcgacccggcgg

SEQ ID NO: 5611695 - DNA, 25 bp, Homo sapien
agcctaatacagcatctatgtgcct

SEQ ID NO: 5611696 - DNA, 25 bp, Homo sapien
tacttcctggatgaaaatgtctgaa

SEQ ID NO: 5611697 - DNA, 25 bp, Homo sapien
aaatgtctgaagttttgcgaatctt

SEQ ID NO: 5611698 - DNA, 25 bp, Homo sapien
atctttacttcaggaaagaagaggg

SEQ ID NO: 5611699 - DNA, 25 bp, Homo sapien
tgcgacccggcggtcttcagttttc

SEQ ID NO: 5611700 - DNA, 25 bp, Homo sapien
actcagcacttgaggctgcgaaatc

SEQ ID NO: 5611701 - DNA, 25 bp, Homo sapien
aattccgatagcctaatacagcatc

SEQ ID NO: 5611702 - DNA, 25 bp, Homo sapien
acaaataatatcacactcagcactt

SEQ ID NO: 5611703 - DNA, 25 bp, Homo sapien
tgaggctgcgaaatcttccacaaat

SEQ ID NO: 5611704 - DNA, 25 bp, Homo sapien
cccttgcctcaagttggaagctttt

SEQ ID NO: 5611705 - DNA, 25 bp, Homo sapien
aacataaaaaaagagattttgtata

SEQ ID NO: 5611706 - DNA, 25 bp, Homo sapien
caagttggaagctttttgtgttatc

SEQ ID NO: 5611707 - DNA, 25 bp, Homo sapien
atattgactgatttgcttgtatctt

SEQ ID NO: 5611708 - DNA, 25 bp, Homo sapien
ttgctaaaagatttaaagccaaaga

SEQ ID NO: 5611709 - DNA, 25 bp, Homo sapien
gaacttaggtgctgttaaagccatg

SEQ ID NO: 5611710 - DNA, 25 bp, Homo sapien
aaatctgaaatagctcattggactc

SEQ ID NO: 5611711 - DNA, 25 bp, Homo sapien
tgtatttataaggcatagacattac

SEQ ID NO: 5611712 - DNA, 25 bp, Homo sapien
tgttaaagccatgaaataaaactta

SEQ ID NO: 5611713 - DNA, 25 bp, Homo sapien
aagtctctgccttcatgggtgttac

SEQ ID NO: 5611714 - DNA, 25 bp, Homo sapien
atcaattagctttgtagattcccaa

SEQ ID NO: 5611715 - DNA, 25 bp, Homo sapien
accaggcacggtgactcacacttgt

SEQ ID NO: 5611716 - DNA, 25 bp, Homo sapien
gtgccagctgcatgcaagaccctaa

SEQ ID NO: 5611717 - DNA, 25 bp, Homo sapien
tcaactagatgaggctgaatatttg

SEQ ID NO: 5611718 - DNA, 25 bp, Homo sapien
gggcagcatagtgagaccttgtctt

SEQ ID NO: 5611719 - DNA, 25 bp, Homo sapien
gtctccttcaaggctgatggaaggt

SEQ ID NO: 5611720 - DNA, 25 bp, Homo sapien
atgacttcaagtacatgggaccagg

SEQ ID NO: 5611721 - DNA, 25 bp, Homo sapien
ataaaatgcattaagtgccagctgc

SEQ ID NO: 5611722 - DNA, 25 bp, Homo sapien
cctaagttagatacaatcagccctc

SEQ ID NO: 5611723 - DNA, 25 bp, Homo sapien
tgaggctgaatatttgaagaaagaa

SEQ ID NO: 5611724 - DNA, 25 bp, Homo sapien
agagagagggcacttgtctccttca

SEQ ID NO: 5611725 - DNA, 25 bp, Homo sapien
tcttcatcagcaggtccacatcttc

SEQ ID NO: 5611726 - DNA, 25 bp, Homo sapien
agtattgagaaacggcttcaggcaa

SEQ ID NO: 5611727 - DNA, 25 bp, Homo sapien
ttgcctgaagccgtttctcaatact

SEQ ID NO: 5611728 - DNA, 25 bp, Homo sapien
tcaagatttatcacatgctacagct

SEQ ID NO: 5611729 - DNA, 25 bp, Homo sapien
catgggattatatgaaactcaagat

SEQ ID NO: 5611730 - DNA, 25 bp, Homo sapien
tgctacagcttaaatatgcatagct

SEQ ID NO: 5611731 - DNA, 25 bp, Homo sapien
gactatgttaatggtttcatgggat

SEQ ID NO: 5611732 - DNA, 25 bp, Homo sapien
cagcaaagtaaatcattggttgtct

SEQ ID NO: 5611733 - DNA, 25 bp, Homo sapien
tatgcatagcttactgaatgtcatt

SEQ ID NO: 5611734 - DNA, 25 bp, Homo sapien
tatacttcagactggcagcagtggc

SEQ ID NO: 5611735 - DNA, 25 bp, Homo sapien
aaataaaaatgatacgagagagcac

SEQ ID NO: 5611736 - DNA, 25 bp, Homo sapien
aatcattggttgtctggagaacaga

SEQ ID NO: 5611737 - DNA, 25 bp, Homo sapien
taaaggtgttaagttcattattgtg

SEQ ID NO: 5611738 - DNA, 25 bp, Homo sapien
tactctactgtacagcaaagtaaat

SEQ ID NO: 5611739 - DNA, 25 bp, Homo sapien
catgcaatctacccacctaggcctc

SEQ ID NO: 5611740 - DNA, 25 bp, Homo sapien
tttagtaatgcaatgccaaaacaga

SEQ ID NO: 5611741 - DNA, 25 bp, Homo sapien
ggaatagagatatacagtaaaacac

SEQ ID NO: 5611742 - DNA, 25 bp, Homo sapien
gtaaaacactagtatagctgccttc

SEQ ID NO: 5611743 - DNA, 25 bp, Homo sapien
tgataacaattaagtagagatgaaa

SEQ ID NO: 5611744 - DNA, 25 bp, Homo sapien
atcaagtgcagataaacaatcccac

SEQ ID NO: 5611745 - DNA, 25 bp, Homo sapien
tacgtggccatgaattaaaaatctt

SEQ ID NO: 5611746 - DNA, 25 bp, Homo sapien
catccaagcctaagtagaccgtatt

SEQ ID NO: 5611747 - DNA, 25 bp, Homo sapien
agagatgaaattactggaatagaga

SEQ ID NO: 5611748 - DNA, 25 bp, Homo sapien
ggattacatgcttgaaccatcatac

SEQ ID NO: 5611749 - DNA, 25 bp, Homo sapien
tgagcttgagccaaatggaccaacc

SEQ ID NO: 5611750 - DNA, 25 bp, Homo sapien
attcattataaggtagaatcagtgg

SEQ ID NO: 5611751 - DNA, 25 bp, Homo sapien
attcatagtttctggattgcagatc

SEQ ID NO: 5611752 - DNA, 25 bp, Homo sapien
tggaacacagtgaccgatcatcagg

SEQ ID NO: 5611753 - DNA, 25 bp, Homo sapien
agaaataaaggatgtgctgcaaaga

SEQ ID NO: 5611754 - DNA, 25 bp, Homo sapien
acccatgctatgcatcctggtaaac

SEQ ID NO: 5611755 - DNA, 25 bp, Homo sapien
tgatggaacacagtgaccgatcatc

SEQ ID NO: 5611756 - DNA, 25 bp, Homo sapien
caagtcccatgcaagccagaaataa

SEQ ID NO: 5611757 - DNA, 25 bp, Homo sapien
ttctggattgcagatctatacatct

SEQ ID NO: 5611758 - DNA, 25 bp, Homo sapien
gatagggaattcataaacccatgct

SEQ ID NO: 5611759 - DNA, 25 bp, Homo sapien
tttaggctttcaagtcccatgcaag

SEQ ID NO: 5611760 - DNA, 25 bp, Homo sapien
caaagatagggaattcataaaccca

SEQ ID NO: 5611761 - DNA, 25 bp, Homo sapien
tttaggcactgcaaatattattact

SEQ ID NO: 5611762 - DNA, 25 bp, Homo sapien
atcttctgatgtaaggtttctacct

SEQ ID NO: 5611763 - DNA, 25 bp, Homo sapien
gtaacataaccagagacactgctgg

SEQ ID NO: 5611764 - DNA, 25 bp, Homo sapien
ttgagcacttcaaatttaggcactg

SEQ ID NO: 5611765 - DNA, 25 bp, Homo sapien
ggtaatacaggcatcatgagctcaa

SEQ ID NO: 5611766 - DNA, 25 bp, Homo sapien
aaggtgaaccatatacccacacagt

SEQ ID NO: 5611767 - DNA, 25 bp, Homo sapien
aaataaggcatggattttaaggtga

SEQ ID NO: 5611768 - DNA, 25 bp, Homo sapien
gagttcagcaaatggtaatacaggc

SEQ ID NO: 5611769 - DNA, 25 bp, Homo sapien
gacactgctggtgttaagtctgaat

SEQ ID NO: 5611770 - DNA, 25 bp, Homo sapien
tggtcttggtggacaatcataacat

SEQ ID NO: 5611771 - DNA, 25 bp, Homo sapien
ttggcaggaaaccattggagtattt

SEQ ID NO: 5611772 - DNA, 25 bp, Homo sapien
tcactccaacttgggaacattcccc

SEQ ID NO: 5611773 - DNA, 25 bp, Homo sapien
caccgcctggcccgcctcttactca

SEQ ID NO: 5611774 - DNA, 25 bp, Homo sapien
cctggagccgcttctcccgcctctg

SEQ ID NO: 5611775 - DNA, 25 bp, Homo sapien
tgctctccctttggcgcagggctgg

SEQ ID NO: 5611776 - DNA, 25 bp, Homo sapien
tggcccgcctcttactcactccaac

SEQ ID NO: 5611777 - DNA, 25 bp, Homo sapien
gggagggggctctgctctccctttg

SEQ ID NO: 5611778 - DNA, 25 bp, Homo sapien
ctcactgtctccccagggacgtggc

SEQ ID NO: 5611779 - DNA, 25 bp, Homo sapien
ccccttgcatgagctcactgtctcc

SEQ ID NO: 5611780 - DNA, 25 bp, Homo sapien
cctctgtctagacagcacccgaggg

SEQ ID NO: 5611781 - DNA, 25 bp, Homo sapien
gggaacattccccttgcatgagctc

SEQ ID NO: 5611782 - DNA, 25 bp, Homo sapien
tcccgcctctgccctctgtctagac

SEQ ID NO: 5611783 - DNA, 25 bp, Homo sapien
cacagagcatccccattagagccgg

SEQ ID NO: 5611784 - DNA, 25 bp, Homo sapien
cctaagcaatgttgagattggggga

SEQ ID NO: 5611785 - DNA, 25 bp, Homo sapien
aattgcacttgcttgtagggactgg

SEQ ID NO: 5611786 - DNA, 25 bp, Homo sapien
aacaagagtgacaatttgcatgatt

SEQ ID NO: 5611787 - DNA, 25 bp, Homo sapien
gagttcagcagggctcagtaacatt

SEQ ID NO: 5611788 - DNA, 25 bp, Homo sapien
ggaggaactgcacacaatcgctgct

SEQ ID NO: 5611789 - DNA, 25 bp, Homo sapien
agagaaggcttcatcacttgcatgt

SEQ ID NO: 5611790 - DNA, 25 bp, Homo sapien
ccaatttagcacatcaaagagaagg

SEQ ID NO: 5611791 - DNA, 25 bp, Homo sapien
cacaaatgcaatggatgaaaggtgg

SEQ ID NO: 5611792 - DNA, 25 bp, Homo sapien
gggggccatcttgctctatgacgtg

SEQ ID NO: 5611793 - DNA, 25 bp, Homo sapien
gaaaggtggaataaactcatagatt

SEQ ID NO: 5611794 - DNA, 25 bp, Homo sapien
ggactgaaacaggtcatgattatga

SEQ ID NO: 5611795 - DNA, 25 bp, Homo sapien
atgattatgatgcttgatacttatt

SEQ ID NO: 5611796 - DNA, 25 bp, Homo sapien
taaaacctagctgggtatggtggtg

SEQ ID NO: 5611797 - DNA, 25 bp, Homo sapien
ggaggattgcttgagtttgagaccg

SEQ ID NO: 5611798 - DNA, 25 bp, Homo sapien
gtggtgcattactgtggccccagct

SEQ ID NO: 5611799 - DNA, 25 bp, Homo sapien
ttgcttgagtttgagaccgcagtgg

SEQ ID NO: 5611800 - DNA, 25 bp, Homo sapien
atgacagtatatataaaacctagct

SEQ ID NO: 5611801 - DNA, 25 bp, Homo sapien
taagaaattaaggatatgacagtat

SEQ ID NO: 5611802 - DNA, 25 bp, Homo sapien
ttactgtggccccagctactcggga

SEQ ID NO: 5611803 - DNA, 25 bp, Homo sapien
agtgatcctcctacttcagcctccc

SEQ ID NO: 5611804 - DNA, 25 bp, Homo sapien
ccactgcacctgtcctagaaaattt

SEQ ID NO: 5611805 - DNA, 25 bp, Homo sapien
atcagccggcaattacatgagttgg

SEQ ID NO: 5611806 - DNA, 25 bp, Homo sapien
accacttccagggcttagcactgcc

SEQ ID NO: 5611807 - DNA, 25 bp, Homo sapien
tgcccctggcttgaagcagatactc

SEQ ID NO: 5611808 - DNA, 25 bp, Homo sapien
ctggttcatcaagtggcttagacac

SEQ ID NO: 5611809 - DNA, 25 bp, Homo sapien
cggataaggagaagataccacttcc

SEQ ID NO: 5611810 - DNA, 25 bp, Homo sapien
actgtagccccactcccggataagg

SEQ ID NO: 5611811 - DNA, 25 bp, Homo sapien
tgctgatagggctgcccatcaagcc

SEQ ID NO: 5611812 - DNA, 25 bp, Homo sapien
tctggaatgaacactgtagccccac

SEQ ID NO: 5611813 - DNA, 25 bp, Homo sapien
atgtcacagtctaccctaaagctcc

SEQ ID NO: 5611814 - DNA, 25 bp, Homo sapien
tgggtgaatgaatgattgtctgctg

SEQ ID NO: 5611815 - DNA, 25 bp, Homo sapien
catgagttggaaaacaaactactct

SEQ ID NO: 5611816 - DNA, 25 bp, Homo sapien
tgcagtgaaaattagaaactacacc

SEQ ID NO: 5611817 - DNA, 25 bp, Homo sapien
tccacaaggagctcacagtctagta

SEQ ID NO: 5611818 - DNA, 25 bp, Homo sapien
aagaaagagatgaatttgaaaatat

SEQ ID NO: 5611819 - DNA, 25 bp, Homo sapien
tgtatccatatgaaaatgccagttc

SEQ ID NO: 5611820 - DNA, 25 bp, Homo sapien
cctgcatcgtagaatactgtagtac

SEQ ID NO: 5611821 - DNA, 25 bp, Homo sapien
accctcacagagaaattcaacattt

SEQ ID NO: 5611822 - DNA, 25 bp, Homo sapien
taaaggaatactctatgcctggcac

SEQ ID NO: 5611823 - DNA, 25 bp, Homo sapien
ttgaaactgtaggcaaataagtacc

SEQ ID NO: 5611824 - DNA, 25 bp, Homo sapien
aacgctgtagtatacctgaaaggca

SEQ ID NO: 5611825 - DNA, 25 bp, Homo sapien
actgtaggcaaataagtaccctcac

SEQ ID NO: 5611826 - DNA, 25 bp, Homo sapien
cagtctagtaagaaagagatgaatt

SEQ ID NO: 5611827 - DNA, 25 bp, Homo sapien
tccctcccaagagtctttggatctc

SEQ ID NO: 5611828 - DNA, 25 bp, Homo sapien
aacggtatgttaggtcaaaactgtg

SEQ ID NO: 5611829 - DNA, 25 bp, Homo sapien
tggatctcttccccggcttccttcc

SEQ ID NO: 5611830 - DNA, 25 bp, Homo sapien
atcccagtttgcattagtgggattc

SEQ ID NO: 5611831 - DNA, 25 bp, Homo sapien
ttttacaaggtcagtccacagatga

SEQ ID NO: 5611832 - DNA, 25 bp, Homo sapien
catattcgtgacatttttagcatcc

SEQ ID NO: 5611833 - DNA, 25 bp, Homo sapien
caggtagttttccttaaaatggcat

SEQ ID NO: 5611834 - DNA, 25 bp, Homo sapien
tttggcactttgtccttaagacttc

SEQ ID NO: 5611835 - DNA, 25 bp, Homo sapien
ttgaggcacttttgattcatgttct

SEQ ID NO: 5611836 - DNA, 25 bp, Homo sapien
aggtcagtccacagatgatatgtcc

SEQ ID NO: 5611837 - DNA, 25 bp, Homo sapien
tctccgatagagtttgtggcgatgg

SEQ ID NO: 5611838 - DNA, 25 bp, Homo sapien
gggcagctaccctgtgacctccaga

SEQ ID NO: 5611839 - DNA, 25 bp, Homo sapien
gcccgcccaccatggctgctcagag

SEQ ID NO: 5611840 - DNA, 25 bp, Homo sapien
agccagccacctgggccaggtgaca

SEQ ID NO: 5611841 - DNA, 25 bp, Homo sapien
agccacctgggccaggtgacacgac

SEQ ID NO: 5611842 - DNA, 25 bp, Homo sapien
ggccagggcagctaccctgtgacct

SEQ ID NO: 5611843 - DNA, 25 bp, Homo sapien
agggcagctaccctgtgacctccag

SEQ ID NO: 5611844 - DNA, 25 bp, Homo sapien
gtgcttgcaggccacttcccaggag

SEQ ID NO: 5611845 - DNA, 25 bp, Homo sapien
ccaccatggctgctcagagccgaga

SEQ ID NO: 5611846 - DNA, 25 bp, Homo sapien
gctaccctgtgacctccagaggcca

SEQ ID NO: 5611847 - DNA, 25 bp, Homo sapien
ccctgtgacctccagaggccagcag

SEQ ID NO: 5611848 - DNA, 25 bp, Homo sapien
cagctaccctgtgacctccagaggc

SEQ ID NO: 5611849 - DNA, 25 bp, Homo sapien
gtgatgaaagtgatgtctggttgtc

SEQ ID NO: 5611850 - DNA, 25 bp, Homo sapien
atgatcatgtatataaggagaggca

SEQ ID NO: 5611851 - DNA, 25 bp, Homo sapien
aggtcggcacaaaatataggtcaca

SEQ ID NO: 5611852 - DNA, 25 bp, Homo sapien
tgttgcaactaagtaggccatggag

SEQ ID NO: 5611853 - DNA, 25 bp, Homo sapien
ataaggagaggcataatgtacatgc

SEQ ID NO: 5611854 - DNA, 25 bp, Homo sapien
cccaggaggtttggcattgttactc

SEQ ID NO: 5611855 - DNA, 25 bp, Homo sapien
ccatagcaatgcccagaagttaccc

SEQ ID NO: 5611856 - DNA, 25 bp, Homo sapien
tttgttggttatgtcagaggtgttg

SEQ ID NO: 5611857 - DNA, 25 bp, Homo sapien
acctgatgataaaacaggatgcagt

SEQ ID NO: 5611858 - DNA, 25 bp, Homo sapien
gtcagaggtgttgaaaccacagcaa

SEQ ID NO: 5611859 - DNA, 25 bp, Homo sapien
atactccaaggaattgactcagttt

SEQ ID NO: 5611860 - DNA, 25 bp, Homo sapien
ttacgctgtagtagatagtgcaaac

SEQ ID NO: 5611861 - DNA, 25 bp, Homo sapien
acagcctaggcaaacagtagtgaat

SEQ ID NO: 5611862 - DNA, 25 bp, Homo sapien
atggaaaatgagcctaaagagaaca

SEQ ID NO: 5611863 - DNA, 25 bp, Homo sapien
tagctgtaaaataagggagttaaca

SEQ ID NO: 5611864 - DNA, 25 bp, Homo sapien
ccacagtaggaactcgattccgtgc

SEQ ID NO: 5611865 - DNA, 25 bp, Homo sapien
aagtattgggaagaatgcccaggtt

SEQ ID NO: 5611866 - DNA, 25 bp, Homo sapien
atgcccaggttaaagagctccaact

SEQ ID NO: 5611867 - DNA, 25 bp, Homo sapien
ggtgattttgaagcaggcggtattt

SEQ ID NO: 5611868 - DNA, 25 bp, Homo sapien
gaatgacagattaggaaaggacatt

SEQ ID NO: 5611869 - DNA, 25 bp, Homo sapien
gagaacaatgaccacaggaacattc

SEQ ID NO: 5611870 - DNA, 25 bp, Homo sapien
aggaaaggacattgaacatgatcac

SEQ ID NO: 5611871 - DNA, 25 bp, Homo sapien
tttcactcccaaaggtcctgaacac

SEQ ID NO: 5611872 - DNA, 25 bp, Homo sapien
ctacctccaaggaactggcagagtg

SEQ ID NO: 5611873 - DNA, 25 bp, Homo sapien
agaataaccaattatcctgaatgag

SEQ ID NO: 5611874 - DNA, 25 bp, Homo sapien
ccttctccacagctcttcacccatc

SEQ ID NO: 5611875 - DNA, 25 bp, Homo sapien
ttcgtttgcactttcccctggattc

SEQ ID NO: 5611876 - DNA, 25 bp, Homo sapien
gaaatgactgtattttagaataacc

SEQ ID NO: 5611877 - DNA, 25 bp, Homo sapien
tggcagagtgtgagaactgtttata

SEQ ID NO: 5611878 - DNA, 25 bp, Homo sapien
cacagctcttcacccatcattcctt

SEQ ID NO: 5611879 - DNA, 25 bp, Homo sapien
tcccaaaggtcctgaacacttcata

SEQ ID NO: 5611880 - DNA, 25 bp, Homo sapien
tcccctggattcccacatctgattt

SEQ ID NO: 5611881 - DNA, 25 bp, Homo sapien
tctcaatcttgcttcgtttgcactt

SEQ ID NO: 5611882 - DNA, 25 bp, Homo sapien
ttaagtagcttgaacgttagccttg

SEQ ID NO: 5611883 - DNA, 25 bp, Homo sapien
gtcacccaggtgaatttagtctcat

SEQ ID NO: 5611884 - DNA, 25 bp, Homo sapien
agctgtacagtcaaggttatccttc

SEQ ID NO: 5611885 - DNA, 25 bp, Homo sapien
tttggggccacttctacagtcattt

SEQ ID NO: 5611886 - DNA, 25 bp, Homo sapien
tggacatgtgcagttcagccctgtg

SEQ ID NO: 5611887 - DNA, 25 bp, Homo sapien
tcacatacaggtggacatgtgcagt

SEQ ID NO: 5611888 - DNA, 25 bp, Homo sapien
agcaggtggtcctcatgacccctca

SEQ ID NO: 5611889 - DNA, 25 bp, Homo sapien
tggagatgacgttttatcaaggctt

SEQ ID NO: 5611890 - DNA, 25 bp, Homo sapien
gcatgaaaacagaatgcccagcagg

SEQ ID NO: 5611891 - DNA, 25 bp, Homo sapien
ttcccattgagtagatggagggttg

SEQ ID NO: 5611892 - DNA, 25 bp, Homo sapien
acgaaggttcataattttggggcca

SEQ ID NO: 5611893 - DNA, 25 bp, Homo sapien
gggaactgagaactctcacacagtc

SEQ ID NO: 5611894 - DNA, 25 bp, Homo sapien
tctgcggtaactacagaatcacaga

SEQ ID NO: 5611895 - DNA, 25 bp, Homo sapien
tccactgcagccctgcatgagagag

SEQ ID NO: 5611896 - DNA, 25 bp, Homo sapien
cagtactatacagccatccagatga

SEQ ID NO: 5611897 - DNA, 25 bp, Homo sapien
atagaaggtatcacatgttgcgctc

SEQ ID NO: 5611898 - DNA, 25 bp, Homo sapien
gcaatgtggcaacaccaagtagagc

SEQ ID NO: 5611899 - DNA, 25 bp, Homo sapien
tgtgcacacatctgtctgcggtaac

SEQ ID NO: 5611900 - DNA, 25 bp, Homo sapien
agctgcagagtgggttattcataca

SEQ ID NO: 5611901 - DNA, 25 bp, Homo sapien
attccaggtgtgaggttttggtaag

SEQ ID NO: 5611902 - DNA, 25 bp, Homo sapien
ccagatgaactccatgtgcgtgtac

SEQ ID NO: 5611903 - DNA, 25 bp, Homo sapien
actctcacacagtcccgagggaagg

SEQ ID NO: 5611904 - DNA, 25 bp, Homo sapien
cagattcaaattattagtgcagctc

SEQ ID NO: 5611905 - DNA, 25 bp, Homo sapien
tatgagaacggtaaatgtttcactt

SEQ ID NO: 5611906 - DNA, 25 bp, Homo sapien
atttcatggtagttgggtatcagta

SEQ ID NO: 5611907 - DNA, 25 bp, Homo sapien
aatattattatttcggccaggtgtg

SEQ ID NO: 5611908 - DNA, 25 bp, Homo sapien
tgggtatcagtatatgagaacggta

SEQ ID NO: 5611909 - DNA, 25 bp, Homo sapien
gagatacaggaacaagagatttaat

SEQ ID NO: 5611910 - DNA, 25 bp, Homo sapien
tccatctaggatgttgtggtgtctg

SEQ ID NO: 5611911 - DNA, 25 bp, Homo sapien
agacctactagattaagagtaaaaa

SEQ ID NO: 5611912 - DNA, 25 bp, Homo sapien
attagtgcagctcatgtagagatac

SEQ ID NO: 5611913 - DNA, 25 bp, Homo sapien
gcagctcatgtagagatacaggaac

SEQ ID NO: 5611914 - DNA, 25 bp, Homo sapien
gccacttaaattcccagacagtgac

SEQ ID NO: 5611915 - DNA, 25 bp, Homo sapien
tgcccatccctgatcaatctcctcc

SEQ ID NO: 5611916 - DNA, 25 bp, Homo sapien
ctgcagaaaccattaaccataggag

SEQ ID NO: 5611917 - DNA, 25 bp, Homo sapien
agaaagaaatcaattggtccttttc

SEQ ID NO: 5611918 - DNA, 25 bp, Homo sapien
tgaagcaacgttttagaaagaaatc

SEQ ID NO: 5611919 - DNA, 25 bp, Homo sapien
taaccataggagagataaaggaaaa

SEQ ID NO: 5611920 - DNA, 25 bp, Homo sapien
aggagagataaaggaaaaacttcaa

SEQ ID NO: 5611921 - DNA, 25 bp, Homo sapien
aagttgaaacatgacctataaaggt

SEQ ID NO: 5611922 - DNA, 25 bp, Homo sapien
atctcgatatcatggggcctgctgg

SEQ ID NO: 5611923 - DNA, 25 bp, Homo sapien
ctgctgggcactgcaaacagcctaa

SEQ ID NO: 5611924 - DNA, 25 bp, Homo sapien
ttaacagaacttccatctcgatatc

SEQ ID NO: 5611925 - DNA, 25 bp, Homo sapien
ggtctctacaccctgaagcaacgtt

SEQ ID NO: 5611926 - DNA, 25 bp, Homo sapien
gctcatcgtcggccgacagatcgca

SEQ ID NO: 5611927 - DNA, 25 bp, Homo sapien
ctcgacttacgatggagctacatcc

SEQ ID NO: 5611928 - DNA, 25 bp, Homo sapien
acggatcgcacataagtggtccaca

SEQ ID NO: 5611929 - DNA, 25 bp, Homo sapien
agtggtccacagtcgacagaaacag

SEQ ID NO: 5611930 - DNA, 25 bp, Homo sapien
agactcagtagcggaaaaacatatc

SEQ ID NO: 5611931 - DNA, 25 bp, Homo sapien
tcaaaaatttactacacagactcag

SEQ ID NO: 5611932 - DNA, 25 bp, Homo sapien
gcagaggacaaatcacagatgctcc

SEQ ID NO: 5611933 - DNA, 25 bp, Homo sapien
caagtggtccacggatcgcacataa

SEQ ID NO: 5611934 - DNA, 25 bp, Homo sapien
acgatggagctacatccgaacaagc

SEQ ID NO: 5611935 - DNA, 25 bp, Homo sapien
ccgaacaagctcatcgtcggccgac

SEQ ID NO: 5611936 - DNA, 25 bp, Homo sapien
tacacagactcagtagcggaaaaac

SEQ ID NO: 5611937 - DNA, 25 bp, Homo sapien
acctcccatcaaagagtagggccac

SEQ ID NO: 5611938 - DNA, 25 bp, Homo sapien
atcatattcaccccagcaagtcatt

SEQ ID NO: 5611939 - DNA, 25 bp, Homo sapien
tagggccaccaaaactaggactcta

SEQ ID NO: 5611940 - DNA, 25 bp, Homo sapien
agcctcccaacaatatctgacctcc

SEQ ID NO: 5611941 - DNA, 25 bp, Homo sapien
agttcagttgttatgaaggatcatt

SEQ ID NO: 5611942 - DNA, 25 bp, Homo sapien
agtcctgagtttcccttcaaggcct

SEQ ID NO: 5611943 - DNA, 25 bp, Homo sapien
atgaaccctttgcagaagagtaagc

SEQ ID NO: 5611944 - DNA, 25 bp, Homo sapien
tttggggataacatcttagcatcat

SEQ ID NO: 5611945 - DNA, 25 bp, Homo sapien
actaggactctagaatgaacccttt

SEQ ID NO: 5611946 - DNA, 25 bp, Homo sapien
ataaccaagacgtattccacctgct

SEQ ID NO: 5611947 - DNA, 25 bp, Homo sapien
gcagaagagtaagcattgtcctata

SEQ ID NO: 5611948 - DNA, 25 bp, Homo sapien
tggtgtaagagggtccatctctcac

SEQ ID NO: 5611949 - DNA, 25 bp, Homo sapien
atgaatgtggtacgttgaactgctg

SEQ ID NO: 5611950 - DNA, 25 bp, Homo sapien
accagttaacgttgaacaaaggaca

SEQ ID NO: 5611951 - DNA, 25 bp, Homo sapien
tattggacagcactggtgtaagagg

SEQ ID NO: 5611952 - DNA, 25 bp, Homo sapien
ggcccacccacaagacatcaacaaa

SEQ ID NO: 5611953 - DNA, 25 bp, Homo sapien
ggtttggacagaccacatagtggcc

SEQ ID NO: 5611954 - DNA, 25 bp, Homo sapien
gaagtctggaatggatcctcccctc

SEQ ID NO: 5611955 - DNA, 25 bp, Homo sapien
acaaaggacaatggatatgatgagt

SEQ ID NO: 5611956 - DNA, 25 bp, Homo sapien
agatgaagaattatgaatgtggtac

SEQ ID NO: 5611957 - DNA, 25 bp, Homo sapien
catcaacaaatgaaggtgtggaagg

SEQ ID NO: 5611958 - DNA, 25 bp, Homo sapien
atatgatgagttacaagctgagttg

SEQ ID NO: 5611959 - DNA, 25 bp, Homo sapien
ttcccctgatggactgtcaaagctg

SEQ ID NO: 5611960 - DNA, 25 bp, Homo sapien
ccctactccaaaaggcggatgaatg

SEQ ID NO: 5611961 - DNA, 25 bp, Homo sapien
tatttgctacaacctattcccctga

SEQ ID NO: 5611962 - DNA, 25 bp, Homo sapien
ttcaaacttctcccattcccctgcc

SEQ ID NO: 5611963 - DNA, 25 bp, Homo sapien
cctactccaaaaggcggatgaatgg

SEQ ID NO: 5611964 - DNA, 25 bp, Homo sapien
tgatggactgtcaaagctgtcaggg

SEQ ID NO: 5611965 - DNA, 25 bp, Homo sapien
caacctattcccctgatggactgtc

SEQ ID NO: 5611966 - DNA, 25 bp, Homo sapien
ggatgaatggggaaccccacactgg

SEQ ID NO: 5611967 - DNA, 25 bp, Homo sapien
ccagggcttccttttactctctccc

SEQ ID NO: 5611968 - DNA, 25 bp, Homo sapien
cccctgatggactgtcaaagctgtc

SEQ ID NO: 5611969 - DNA, 25 bp, Homo sapien
tattcccctgatggactgtcaaagc

SEQ ID NO: 5611970 - DNA, 25 bp, Homo sapien
tataggtacacaaagttagtgactt

SEQ ID NO: 5611971 - DNA, 25 bp, Homo sapien
agcatggtttatgaacagtagactt

SEQ ID NO: 5611972 - DNA, 25 bp, Homo sapien
actagctactagtaaaaggtctctc

SEQ ID NO: 5611973 - DNA, 25 bp, Homo sapien
tagtaaaaggtctctcaatgcaaat

SEQ ID NO: 5611974 - DNA, 25 bp, Homo sapien
tacaaggctaatgataaacacagat

SEQ ID NO: 5611975 - DNA, 25 bp, Homo sapien
tctcttcagggaaagactgtgagta

SEQ ID NO: 5611976 - DNA, 25 bp, Homo sapien
aaaggaaaatgtttagcatggttta

SEQ ID NO: 5611977 - DNA, 25 bp, Homo sapien
agggaaagactgtgagtacataaat

SEQ ID NO: 5611978 - DNA, 25 bp, Homo sapien
tcaatgcaaattacagccagccaat

SEQ ID NO: 5611979 - DNA, 25 bp, Homo sapien
gcaaaagaacatcactattagtaat

SEQ ID NO: 5611980 - DNA, 25 bp, Homo sapien
atttagggattataggtacacaaag

SEQ ID NO: 5611981 - DNA, 25 bp, Homo sapien
gtggaacatgcagaggtagcttcca

SEQ ID NO: 5611982 - DNA, 25 bp, Homo sapien
atcatgacagcaaacggtaagaaat

SEQ ID NO: 5611983 - DNA, 25 bp, Homo sapien
gcatcaagaatgacagcacagctct

SEQ ID NO: 5611984 - DNA, 25 bp, Homo sapien
cagtatcggtgtaaataaaagcatc

SEQ ID NO: 5611985 - DNA, 25 bp, Homo sapien
tgaatacccaagagtctaacacccc

SEQ ID NO: 5611986 - DNA, 25 bp, Homo sapien
ttcagctgcaccaaacagacaggaa

SEQ ID NO: 5611987 - DNA, 25 bp, Homo sapien
atatagacccatgtgttcagctgca

SEQ ID NO: 5611988 - DNA, 25 bp, Homo sapien
aggaaaggccgttgcttgactaatt

SEQ ID NO: 5611989 - DNA, 25 bp, Homo sapien
cacgaaatgattgaagagcacatcc

SEQ ID NO: 5611990 - DNA, 25 bp, Homo sapien
tgttggctgaaaatctcacgaaatg

SEQ ID NO: 5611991 - DNA, 25 bp, Homo sapien
acacccctggtcaagagactggata

SEQ ID NO: 5611992 - DNA, 25 bp, Homo sapien
ggagcagcatgaagcacaagctgta

SEQ ID NO: 5611993 - DNA, 25 bp, Homo sapien
tttaataggctgccccaggtgattc

SEQ ID NO: 5611994 - DNA, 25 bp, Homo sapien
gctgagtggtgcaacagactttgag

SEQ ID NO: 5611995 - DNA, 25 bp, Homo sapien
aggtgattctgatatagctggtgca

SEQ ID NO: 5611996 - DNA, 25 bp, Homo sapien
acaagctgtagcacctaccagccct

SEQ ID NO: 5611997 - DNA, 25 bp, Homo sapien
ctttgagaaaagttgcacagggtaa

SEQ ID NO: 5611998 - DNA, 25 bp, Homo sapien
gacgacatgggatgatgctcatatg

SEQ ID NO: 5611999 - DNA, 25 bp, Homo sapien
ccgcgccagccagtttgcaattttc

SEQ ID NO: 5612000 - DNA, 25 bp, Homo sapien
gctcatatgaacaaactgtgaagtc

SEQ ID NO: 5612001 - DNA, 25 bp, Homo sapien
caggatggtctcaacagtctgcatt

SEQ ID NO: 5612002 - DNA, 25 bp, Homo sapien
gtctgcagtagaccctgcaaagctc

SEQ ID NO: 5612003 - DNA, 25 bp, Homo sapien
tgggaaatgcagagttatacaatgt

SEQ ID NO: 5612004 - DNA, 25 bp, Homo sapien
acaaaactatgagtaaaaatattgc

SEQ ID NO: 5612005 - DNA, 25 bp, Homo sapien
acatcagttgataaaattcgacatc

SEQ ID NO: 5612006 - DNA, 25 bp, Homo sapien
acagtatctgataccaacagccaac

SEQ ID NO: 5612007 - DNA, 25 bp, Homo sapien
ttctagaacagtattttgccaggac

SEQ ID NO: 5612008 - DNA, 25 bp, Homo sapien
ctatatctactgagtcactaggact

SEQ ID NO: 5612009 - DNA, 25 bp, Homo sapien
tactgagtcactaggactacttttc

SEQ ID NO: 5612010 - DNA, 25 bp, Homo sapien
tacaatgttaaataggtatctttac

SEQ ID NO: 5612011 - DNA, 25 bp, Homo sapien
ataccaacagccaacttcctatatc

SEQ ID NO: 5612012 - DNA, 25 bp, Homo sapien
tattttgccaggacaaggaaaacag

SEQ ID NO: 5612013 - DNA, 25 bp, Homo sapien
ggtttgggaaatgcagagttataca

SEQ ID NO: 5612014 - DNA, 25 bp, Homo sapien
accttgccgagcactttgaccgaag

SEQ ID NO: 5612015 - DNA, 25 bp, Homo sapien
ctgcatctctacctcggcctgggcc

SEQ ID NO: 5612016 - DNA, 25 bp, Homo sapien
tgggcttcgtcttctcggctttcgc

SEQ ID NO: 5612017 - DNA, 25 bp, Homo sapien
gctcctggcgcccgccttgcagctt

SEQ ID NO: 5612018 - DNA, 25 bp, Homo sapien
gctgctcctggcgcccgccttgcag

SEQ ID NO: 5612019 - DNA, 25 bp, Homo sapien
tgcatctctacctcggcctgggcct

SEQ ID NO: 5612020 - DNA, 25 bp, Homo sapien
tcttctcgatactttcggctggcgg

SEQ ID NO: 5612021 - DNA, 25 bp, Homo sapien
gccttccctgaccttgccgagcact

SEQ ID NO: 5612022 - DNA, 25 bp, Homo sapien
gcccgccttgcagcttcttctcgat

SEQ ID NO: 5612023 - DNA, 25 bp, Homo sapien
gcgttacttctcccgccgtcgagtc

SEQ ID NO: 5612024 - DNA, 25 bp, Homo sapien
ccctgaccttgccgagcactttgac

SEQ ID NO: 5612025 - DNA, 25 bp, Homo sapien
ggcacccaagtgaatatacacaacc

SEQ ID NO: 5612026 - DNA, 25 bp, Homo sapien
tatttggaatcaatcgctggcaccc

SEQ ID NO: 5612027 - DNA, 25 bp, Homo sapien
gttaattctgtggctcctatgactt

SEQ ID NO: 5612028 - DNA, 25 bp, Homo sapien
accatgcccaaccaacccttgtatt

SEQ ID NO: 5612029 - DNA, 25 bp, Homo sapien
tcatcacataagtcaggctggtttc

SEQ ID NO: 5612030 - DNA, 25 bp, Homo sapien
tcaatcgctggcacccaagtgaata

SEQ ID NO: 5612031 - DNA, 25 bp, Homo sapien
tgataacatcagcaccaaactacac

SEQ ID NO: 5612032 - DNA, 25 bp, Homo sapien
aacccttttagagaactccaagagc

SEQ ID NO: 5612033 - DNA, 25 bp, Homo sapien
tcagagcaactgtacaagcaatgta

SEQ ID NO: 5612034 - DNA, 25 bp, Homo sapien
cagggtttcatcacataagtcaggc

SEQ ID NO: 5612035 - DNA, 25 bp, Homo sapien
gtacaaataaaggatgataacatca

SEQ ID NO: 5612036 - DNA, 25 bp, Homo sapien
ttgcacaccaattataaagcttcat

SEQ ID NO: 5612037 - DNA, 25 bp, Homo sapien
atcaccacatatcaaagacccaacc

SEQ ID NO: 5612038 - DNA, 25 bp, Homo sapien
tgtagcatcataacattgtagactt

SEQ ID NO: 5612039 - DNA, 25 bp, Homo sapien
gaagggcaggttctatgtctggttt

SEQ ID NO: 5612040 - DNA, 25 bp, Homo sapien
aaggctgaggaatactgctttgcag

SEQ ID NO: 5612041 - DNA, 25 bp, Homo sapien
tgtatatgcctaagtcaagatctaa

SEQ ID NO: 5612042 - DNA, 25 bp, Homo sapien
tcccaaatcacagaacaactgtatc

SEQ ID NO: 5612043 - DNA, 25 bp, Homo sapien
gaagagttgaaacccaggatatcac

SEQ ID NO: 5612044 - DNA, 25 bp, Homo sapien
cttcacttgaccagagagtccagaa

SEQ ID NO: 5612045 - DNA, 25 bp, Homo sapien
acttgaatagtaagacgaaaatctt

SEQ ID NO: 5612046 - DNA, 25 bp, Homo sapien
atgagtctccataaaacctagcgtt

SEQ ID NO: 5612047 - DNA, 25 bp, Homo sapien
gctaccctagaggagacccggtaga

SEQ ID NO: 5612048 - DNA, 25 bp, Homo sapien
ctgtcctggctaccctagaggagac

SEQ ID NO: 5612049 - DNA, 25 bp, Homo sapien
aagtatagagtgggagtcttccacc

SEQ ID NO: 5612050 - DNA, 25 bp, Homo sapien
cccaaagatgaggttgtttcccatc

SEQ ID NO: 5612051 - DNA, 25 bp, Homo sapien
tcagatttccagagccccaaagatg

SEQ ID NO: 5612052 - DNA, 25 bp, Homo sapien
ttccaccatgcaggccttctgtcct

SEQ ID NO: 5612053 - DNA, 25 bp, Homo sapien
gggaggcacctgctatcacagaatc

SEQ ID NO: 5612054 - DNA, 25 bp, Homo sapien
aaaaaccacactctgttgggaggcc

SEQ ID NO: 5612055 - DNA, 25 bp, Homo sapien
accatgcaattgagaagccaccact

SEQ ID NO: 5612056 - DNA, 25 bp, Homo sapien
agccaccactcctttggaactgggg

SEQ ID NO: 5612057 - DNA, 25 bp, Homo sapien
gaagtggattatctgcccagtgtct

SEQ ID NO: 5612058 - DNA, 25 bp, Homo sapien
cgattttatgggatatatgactgcc

SEQ ID NO: 5612059 - DNA, 25 bp, Homo sapien
cttcctctgggtagaaaaaatagta

SEQ ID NO: 5612060 - DNA, 25 bp, Homo sapien
ttccataagtactgctagaactctt

SEQ ID NO: 5612061 - DNA, 25 bp, Homo sapien
ggatatatgactgcccagggaatgc

SEQ ID NO: 5612062 - DNA, 25 bp, Homo sapien
tgcccagggaatgctacaatgtcag

SEQ ID NO: 5612063 - DNA, 25 bp, Homo sapien
aggatacagacaaccctagggctgt

SEQ ID NO: 5612064 - DNA, 25 bp, Homo sapien
catcagacaacctaacactaagctt

SEQ ID NO: 5612065 - DNA, 25 bp, Homo sapien
agggctgtaagtattccgtgaaggt

SEQ ID NO: 5612066 - DNA, 25 bp, Homo sapien
gggaaaataaaatgattggcttcaa

SEQ ID NO: 5612067 - DNA, 25 bp, Homo sapien
acaatgtcagacacaaatttgaaaa

SEQ ID NO: 5612068 - DNA, 25 bp, Homo sapien
cgtgaaggtgaatatgagacaatta

SEQ ID NO: 5612069 - DNA, 25 bp, Homo sapien
ttgtcagccacctgtttcaagcttt

SEQ ID NO: 5612070 - DNA, 25 bp, Homo sapien
acaaaatctatgaaaatgaattgct

SEQ ID NO: 5612071 - DNA, 25 bp, Homo sapien
gaattgctaagtatttgtagccatc

SEQ ID NO: 5612072 - DNA, 25 bp, Homo sapien
acatacagttaaaatagatgctgac

SEQ ID NO: 5612073 - DNA, 25 bp, Homo sapien
tgctgaggtatttttttctagggct

SEQ ID NO: 5612074 - DNA, 25 bp, Homo sapien
gtagccatctaagcaaaaatttgac

SEQ ID NO: 5612075 - DNA, 25 bp, Homo sapien
attggataaatacctctgcattctc

SEQ ID NO: 5612076 - DNA, 25 bp, Homo sapien
ccttttcaggtcagtgattgatttc

SEQ ID NO: 5612077 - DNA, 25 bp, Homo sapien
gcattctctgcagtaaggagggctt

SEQ ID NO: 5612078 - DNA, 25 bp, Homo sapien
attgatttctgcattgtcagccacc

SEQ ID NO: 5612079 - DNA, 25 bp, Homo sapien
atagatgctgactcttggtgcaatt

SEQ ID NO: 5612080 - DNA, 25 bp, Homo sapien
gaagagatcccagggaagctacatt

SEQ ID NO: 5612081 - DNA, 25 bp, Homo sapien
cgatcagtggtgtatattggaattc

SEQ ID NO: 5612082 - DNA, 25 bp, Homo sapien
ttatacctgtgcactggctgaacac

SEQ ID NO: 5612083 - DNA, 25 bp, Homo sapien
taggaggtacagaactgtgtgaaaa

SEQ ID NO: 5612084 - DNA, 25 bp, Homo sapien
tggagctcagcactacttatggggt

SEQ ID NO: 5612085 - DNA, 25 bp, Homo sapien
ctgtggcttggtggtctactagtta

SEQ ID NO: 5612086 - DNA, 25 bp, Homo sapien
cagaaagcagccccaacttgggtag

SEQ ID NO: 5612087 - DNA, 25 bp, Homo sapien
gcttggctcagctaagctggagctc

SEQ ID NO: 5612088 - DNA, 25 bp, Homo sapien
tccacgccttggtccagggaatatg

SEQ ID NO: 5612089 - DNA, 25 bp, Homo sapien
gtggcctgtaaggagtataatccct

SEQ ID NO: 5612090 - DNA, 25 bp, Homo sapien
gaacaccagataaggactgagcttg

SEQ ID NO: 5612091 - DNA, 25 bp, Homo sapien
ggccatgatggactagatttactct

SEQ ID NO: 5612092 - DNA, 25 bp, Homo sapien
tgaacacgagtgtgatccctgagag

SEQ ID NO: 5612093 - DNA, 25 bp, Homo sapien
agcctgcagatggccttccccacat

SEQ ID NO: 5612094 - DNA, 25 bp, Homo sapien
ctgaaccccagcgtgaacacgagtg

SEQ ID NO: 5612095 - DNA, 25 bp, Homo sapien
gacaaaatacatgaagaacagtttc

SEQ ID NO: 5612096 - DNA, 25 bp, Homo sapien
tcctaaacacacaggatagcaggga

SEQ ID NO: 5612097 - DNA, 25 bp, Homo sapien
accggccacagtggaaaactctcct

SEQ ID NO: 5612098 - DNA, 25 bp, Homo sapien
atggtttgttttcccaccggccaca

SEQ ID NO: 5612099 - DNA, 25 bp, Homo sapien
ctcaccaagagaggaatggtttgtt

SEQ ID NO: 5612100 - DNA, 25 bp, Homo sapien
cttttgcttctggccatgatggact

SEQ ID NO: 5612101 - DNA, 25 bp, Homo sapien
gaagaacagtttcaggccctgaacc

SEQ ID NO: 5612102 - DNA, 25 bp, Homo sapien
gaaaatatgcactgaaggaatcaga

SEQ ID NO: 5612103 - DNA, 25 bp, Homo sapien
aatcctacccctaaatgtcaagcat

SEQ ID NO: 5612104 - DNA, 25 bp, Homo sapien
tgtctgctacttgtgcaggtgaatc

SEQ ID NO: 5612105 - DNA, 25 bp, Homo sapien
agccactttgtctaatcctacccct

SEQ ID NO: 5612106 - DNA, 25 bp, Homo sapien
gatctggtagttaaaaataagtcac

SEQ ID NO: 5612107 - DNA, 25 bp, Homo sapien
tgaaggaatcagatctggtagttaa

SEQ ID NO: 5612108 - DNA, 25 bp, Homo sapien
caggtgaatctgtaggtatttgcat

SEQ ID NO: 5612109 - DNA, 25 bp, Homo sapien
ctgtaccctgacgcaatatccaccc

SEQ ID NO: 5612110 - DNA, 25 bp, Homo sapien
catgactttccagtgtctgctactt

SEQ ID NO: 5612111 - DNA, 25 bp, Homo sapien
gacgcaatatccacccagggaaaat

SEQ ID NO: 5612112 - DNA, 25 bp, Homo sapien
cacagaacactgtaccctgacgcaa

SEQ ID NO: 5612113 - DNA, 25 bp, Homo sapien
ctgaccctcaggaagctaattgctt

SEQ ID NO: 5612114 - DNA, 25 bp, Homo sapien
agtgagacttcaaatgacaacaagc

SEQ ID NO: 5612115 - DNA, 25 bp, Homo sapien
aaccattcgctgacgatggtagtgg

SEQ ID NO: 5612116 - DNA, 25 bp, Homo sapien
tgacaacaagctacaggaagaaaaa

SEQ ID NO: 5612117 - DNA, 25 bp, Homo sapien
ctcaatagcgataagaagtgagact

SEQ ID NO: 5612118 - DNA, 25 bp, Homo sapien
ttgaaatggaatgtcagctactgac

SEQ ID NO: 5612119 - DNA, 25 bp, Homo sapien
tagtggtgcactacagtgagcttta

SEQ ID NO: 5612120 - DNA, 25 bp, Homo sapien
actcccagattcaaagcaaaccacc

SEQ ID NO: 5612121 - DNA, 25 bp, Homo sapien
aaaaatgacaaacaagcctatgaaa

SEQ ID NO: 5612122 - DNA, 25 bp, Homo sapien
aaaaaatgaaccagttgatagttgg

SEQ ID NO: 5612123 - DNA, 25 bp, Homo sapien
tattcagcacagttatgcgtccaac

SEQ ID NO: 5612124 - DNA, 25 bp, Homo sapien
aggggtctcaaacttagaggtcttc

SEQ ID NO: 5612125 - DNA, 25 bp, Homo sapien
aactggggaacacacacccaatcaa

SEQ ID NO: 5612126 - DNA, 25 bp, Homo sapien
tttatgagagaaagcaccacattac

SEQ ID NO: 5612127 - DNA, 25 bp, Homo sapien
gtgggtcaaactggcctatgtgaac

SEQ ID NO: 5612128 - DNA, 25 bp, Homo sapien
tgagcaggaactacaaagtagagaa

SEQ ID NO: 5612129 - DNA, 25 bp, Homo sapien
attagcaaatcatgaaattcagaac

SEQ ID NO: 5612130 - DNA, 25 bp, Homo sapien
caaacttagaggtcttcagggctga

SEQ ID NO: 5612131 - DNA, 25 bp, Homo sapien
gttgtctgatataagagggaagtcc

SEQ ID NO: 5612132 - DNA, 25 bp, Homo sapien
taaaataactgtgggtcaaactggc

SEQ ID NO: 5612133 - DNA, 25 bp, Homo sapien
gtccagtaggctgtggcaaactggg

SEQ ID NO: 5612134 - DNA, 25 bp, Homo sapien
taattacagatctaaatcaggggtc

SEQ ID NO: 5612135 - DNA, 25 bp, Homo sapien
agcctagtaggaagagctctcatca

SEQ ID NO: 5612136 - DNA, 25 bp, Homo sapien
tgacccttcttgaaaacagtgttcc

SEQ ID NO: 5612137 - DNA, 25 bp, Homo sapien
ccaagggcatttccagactagatat

SEQ ID NO: 5612138 - DNA, 25 bp, Homo sapien
atttgcccacaaagtcctgaccatt

SEQ ID NO: 5612139 - DNA, 25 bp, Homo sapien
tctgttcatgcaacctgtgactagc

SEQ ID NO: 5612140 - DNA, 25 bp, Homo sapien
aacctgtgactagcaagaatgaatg

SEQ ID NO: 5612141 - DNA, 25 bp, Homo sapien
tactggaaacatgaaccacagtgca

SEQ ID NO: 5612142 - DNA, 25 bp, Homo sapien
tctctttatcggagtgaaaagaatg

SEQ ID NO: 5612143 - DNA, 25 bp, Homo sapien
gtgttccttcaccaatccagtcatc

SEQ ID NO: 5612144 - DNA, 25 bp, Homo sapien
aaccacagtgcatgaaaaataaatc

SEQ ID NO: 5612145 - DNA, 25 bp, Homo sapien
tcagtggataatgcatagagatcac

SEQ ID NO: 5612146 - DNA, 25 bp, Homo sapien
ctgagtactttaagaatctagctac

SEQ ID NO: 5612147 - DNA, 25 bp, Homo sapien
ataaagctcatacacaggtcaggga

SEQ ID NO: 5612148 - DNA, 25 bp, Homo sapien
aacccattcctgaaatataaagctc

SEQ ID NO: 5612149 - DNA, 25 bp, Homo sapien
atagccaccataattgctgagtact

SEQ ID NO: 5612150 - DNA, 25 bp, Homo sapien
tgaaaatatatcaatgcccagatcc

SEQ ID NO: 5612151 - DNA, 25 bp, Homo sapien
gagatgctgtcaggattaaagcttt

SEQ ID NO: 5612152 - DNA, 25 bp, Homo sapien
tattttagatgactgtagagggcag

SEQ ID NO: 5612153 - DNA, 25 bp, Homo sapien
gctcatacacaggtcagggaaaaag

SEQ ID NO: 5612154 - DNA, 25 bp, Homo sapien
tggagaaaaatctagagtgactatt

SEQ ID NO: 5612155 - DNA, 25 bp, Homo sapien
caagcttgataaacaatgcacagtt

SEQ ID NO: 5612156 - DNA, 25 bp, Homo sapien
caaagcaacagtagtatcctcaaag

SEQ ID NO: 5612157 - DNA, 25 bp, Homo sapien
tcatgtcagggacagtttcttagac

SEQ ID NO: 5612158 - DNA, 25 bp, Homo sapien
tgctttgcatggaaggcactcaata

SEQ ID NO: 5612159 - DNA, 25 bp, Homo sapien
gccatggacttagtgactcagtctc

SEQ ID NO: 5612160 - DNA, 25 bp, Homo sapien
gaaggcatagaaaagctcaatggat

SEQ ID NO: 5612161 - DNA, 25 bp, Homo sapien
gctcaatggatcgctgaagaccaca

SEQ ID NO: 5612162 - DNA, 25 bp, Homo sapien
cagtctcctgcaacttggagctgca

SEQ ID NO: 5612163 - DNA, 25 bp, Homo sapien
gctgcaggtggttactcagctgggc

SEQ ID NO: 5612164 - DNA, 25 bp, Homo sapien
ctgggcaacttcagggaacatttga

SEQ ID NO: 5612165 - DNA, 25 bp, Homo sapien
gaagaccacagccctgataagcgtc

SEQ ID NO: 5612166 - DNA, 25 bp, Homo sapien
tgaggaggaacctattaaaatcttc

SEQ ID NO: 5612167 - DNA, 25 bp, Homo sapien
agcgtcagagatggaatctgttgcc

SEQ ID NO: 5612168 - DNA, 25 bp, Homo sapien
ttgcttatgcagaacccttgaaata

SEQ ID NO: 5612169 - DNA, 25 bp, Homo sapien
ctaacactttggaagtctgagggca

SEQ ID NO: 5612170 - DNA, 25 bp, Homo sapien
gaaaatatgcaatgaagagaaaatc

SEQ ID NO: 5612171 - DNA, 25 bp, Homo sapien
cacaataaaacaaggttgcttatgc

SEQ ID NO: 5612172 - DNA, 25 bp, Homo sapien
gatcacgcctctaaatagacactgc

SEQ ID NO: 5612173 - DNA, 25 bp, Homo sapien
tactactgtgctcaagaatagagat

SEQ ID NO: 5612174 - DNA, 25 bp, Homo sapien
aagaatagagattttgaggacaatt

SEQ ID NO: 5612175 - DNA, 25 bp, Homo sapien
ctatagtatgccatgatcacgcctc

SEQ ID NO: 5612176 - DNA, 25 bp, Homo sapien
agaaaattcacactggctgggcgtg

SEQ ID NO: 5612177 - DNA, 25 bp, Homo sapien
ttgagccgaggctatagtatgccat

SEQ ID NO: 5612178 - DNA, 25 bp, Homo sapien
ttgagaccagggtcctttgagccga

SEQ ID NO: 5612179 - DNA, 25 bp, Homo sapien
tgccgccagcatatctcgcctccag

SEQ ID NO: 5612180 - DNA, 25 bp, Homo sapien
cggccccggtctctgagttccctca

SEQ ID NO: 5612181 - DNA, 25 bp, Homo sapien
tgcacgtaggccagattcatgcttc

SEQ ID NO: 5612182 - DNA, 25 bp, Homo sapien
gaatagaactaatgtacgatcgggt

SEQ ID NO: 5612183 - DNA, 25 bp, Homo sapien
tgtcacaaatagcttgaagggaagg

SEQ ID NO: 5612184 - DNA, 25 bp, Homo sapien
gtcggagacagaagccttcctctta

SEQ ID NO: 5612185 - DNA, 25 bp, Homo sapien
cattccgttcccaggggcatgtcgg

SEQ ID NO: 5612186 - DNA, 25 bp, Homo sapien
ctcagtgtagcagagtaacagagca

SEQ ID NO: 5612187 - DNA, 25 bp, Homo sapien
acgatcgggttttacacggagacat

SEQ ID NO: 5612188 - DNA, 25 bp, Homo sapien
aaaatgtgagcaaaggcatctgtgt

SEQ ID NO: 5612189 - DNA, 25 bp, Homo sapien
ctatctttgcatgaggaatgcggca

SEQ ID NO: 5612190 - DNA, 25 bp, Homo sapien
ctggtgccgtgaatctctggaaaca

SEQ ID NO: 5612191 - DNA, 25 bp, Homo sapien
tctctggaaacaagaagtgaagcag

SEQ ID NO: 5612192 - DNA, 25 bp, Homo sapien
cagacctgcgatgatgttccttgct

SEQ ID NO: 5612193 - DNA, 25 bp, Homo sapien
gactgggaatctagcctcctcagac

SEQ ID NO: 5612194 - DNA, 25 bp, Homo sapien
accccgtcaaacagccagggctttc

SEQ ID NO: 5612195 - DNA, 25 bp, Homo sapien
taaacaacagtacagctttggtccc

SEQ ID NO: 5612196 - DNA, 25 bp, Homo sapien
acgcccagacactcagggttagacc

SEQ ID NO: 5612197 - DNA, 25 bp, Homo sapien
tcgctctgctgcacaacgcccagac

SEQ ID NO: 5612198 - DNA, 25 bp, Homo sapien
gcactggtggacacaccccgtcaaa

SEQ ID NO: 5612199 - DNA, 25 bp, Homo sapien
tattgatgcaggccatcggaatgat

SEQ ID NO: 5612200 - DNA, 25 bp, Homo sapien
tcggaatgattacaaaggcatgacc

SEQ ID NO: 5612201 - DNA, 25 bp, Homo sapien
ttatttaagggcactatattgcctt

SEQ ID NO: 5612202 - DNA, 25 bp, Homo sapien
caaagttaaatcttaatgatggtcc

SEQ ID NO: 5612203 - DNA, 25 bp, Homo sapien
ggttctcactctatcatcaaggcca

SEQ ID NO: 5612204 - DNA, 25 bp, Homo sapien
acttcctagggctcaacgatcctcc

SEQ ID NO: 5612205 - DNA, 25 bp, Homo sapien
taattgtcagtgtacatagtgggca

SEQ ID NO: 5612206 - DNA, 25 bp, Homo sapien
atagtgggcagtattgaatcaacaa

SEQ ID NO: 5612207 - DNA, 25 bp, Homo sapien
ccatgagctgaaattaaattatgtc

SEQ ID NO: 5612208 - DNA, 25 bp, Homo sapien
cttgacttcctagggctcaacgatc

SEQ ID NO: 5612209 - DNA, 25 bp, Homo sapien
gtctccattcataccatgagctgaa

SEQ ID NO: 5612210 - DNA, 25 bp, Homo sapien
ttaatgatggtcccttatgaacttc

SEQ ID NO: 5612211 - DNA, 25 bp, Homo sapien
tctatcatcaaggccagagtgcagt

SEQ ID NO: 5612212 - DNA, 25 bp, Homo sapien
tggcctggtggcatttaggttcaac

SEQ ID NO: 5612213 - DNA, 25 bp, Homo sapien
gcctggtggcccagacatcacatgg

SEQ ID NO: 5612214 - DNA, 25 bp, Homo sapien
gtggccaggttcaaaggaaatacta

SEQ ID NO: 5612215 - DNA, 25 bp, Homo sapien
tcacatggtgcacgtgcaagtcaga

SEQ ID NO: 5612216 - DNA, 25 bp, Homo sapien
gtaacatgctcaggatgagtagggc

SEQ ID NO: 5612217 - DNA, 25 bp, Homo sapien
agtcagagagcagttggaaactgac

SEQ ID NO: 5612218 - DNA, 25 bp, Homo sapien
gcactttccaaagaggcgtggtcca

SEQ ID NO: 5612219 - DNA, 25 bp, Homo sapien
tagaacttttggagcacctgcagcc

SEQ ID NO: 5612220 - DNA, 25 bp, Homo sapien
ggctcccatgcgtgaaaacaaaact

SEQ ID NO: 5612221 - DNA, 25 bp, Homo sapien
gagcttccttaggagggaaggatgg

SEQ ID NO: 5612222 - DNA, 25 bp, Homo sapien
gacaataggcacgtgaccacactct

SEQ ID NO: 5612223 - DNA, 25 bp, Homo sapien
atgaaaagagaatcaagcttcagat

SEQ ID NO: 5612224 - DNA, 25 bp, Homo sapien
ccgttatgcagatgactcctttaca

SEQ ID NO: 5612225 - DNA, 25 bp, Homo sapien
agatacaggactatcaccacagcct

SEQ ID NO: 5612226 - DNA, 25 bp, Homo sapien
gcattcgtcagcacagttgggatcg

SEQ ID NO: 5612227 - DNA, 25 bp, Homo sapien
gaagaatccttcaatgcagtacaag

SEQ ID NO: 5612228 - DNA, 25 bp, Homo sapien
acagcctattatcgtggagccatgg

SEQ ID NO: 5612229 - DNA, 25 bp, Homo sapien
gagagaaaggacatttgccaacaat

SEQ ID NO: 5612230 - DNA, 25 bp, Homo sapien
tatcgtggagccatgggctttattt

SEQ ID NO: 5612231 - DNA, 25 bp, Homo sapien
ggtacggccagaaagactcctctga

SEQ ID NO: 5612232 - DNA, 25 bp, Homo sapien
gtcagcacagttgggatcgatttca

SEQ ID NO: 5612233 - DNA, 25 bp, Homo sapien
tcatcatcggcaatagcagtgtggg

SEQ ID NO: 5612234 - DNA, 25 bp, Homo sapien
caaagctcttgttgtgggtgcctga

SEQ ID NO: 5612235 - DNA, 25 bp, Homo sapien
ttgtgtagacagactctgggaactc

SEQ ID NO: 5612236 - DNA, 25 bp, Homo sapien
agctggttagagaaacacaggaaaa

SEQ ID NO: 5612237 - DNA, 25 bp, Homo sapien
atagaaggatgggtcagttaatttt

SEQ ID NO: 5612238 - DNA, 25 bp, Homo sapien
ttcaagatccccacccgggtgccga

SEQ ID NO: 5612239 - DNA, 25 bp, Homo sapien
cagaactccctaatgagagagaaga

SEQ ID NO: 5612240 - DNA, 25 bp, Homo sapien
gggctaaaagctggacccagaactc

SEQ ID NO: 5612241 - DNA, 25 bp, Homo sapien
aatccagactggaaacacggcatca

SEQ ID NO: 5612242 - DNA, 25 bp, Homo sapien
aagtatagaccatggaaacaagttc

SEQ ID NO: 5612243 - DNA, 25 bp, Homo sapien
attcctaggccaaggacatacaggg

SEQ ID NO: 5612244 - DNA, 25 bp, Homo sapien
tctgacccctgctgttccatgcccc

SEQ ID NO: 5612245 - DNA, 25 bp, Homo sapien
ctttatgttgagaatgtgcaatatc

SEQ ID NO: 5612246 - DNA, 25 bp, Homo sapien
gtaattagcacatccaccatctcat

SEQ ID NO: 5612247 - DNA, 25 bp, Homo sapien
tacatattcttgagagcacataatt

SEQ ID NO: 5612248 - DNA, 25 bp, Homo sapien
ttgaaaaacagcataagaaataatt

SEQ ID NO: 5612249 - DNA, 25 bp, Homo sapien
tagtcattctacagtgctgtcgaac

SEQ ID NO: 5612250 - DNA, 25 bp, Homo sapien
tgagaatgtgcaatatccttccagc

SEQ ID NO: 5612251 - DNA, 25 bp, Homo sapien
tagcatcttaaggattcaatgatac

SEQ ID NO: 5612252 - DNA, 25 bp, Homo sapien
aatttatagttatcagatcagggta

SEQ ID NO: 5612253 - DNA, 25 bp, Homo sapien
tgtaaagtcataaaagctatgattt

SEQ ID NO: 5612254 - DNA, 25 bp, Homo sapien
tctacagtgctgtcgaacactagaa

SEQ ID NO: 5612255 - DNA, 25 bp, Homo sapien
ataagtaaatgaactttagcatctt

SEQ ID NO: 5612256 - DNA, 25 bp, Homo sapien
agttccctcacaagcactggggttt

SEQ ID NO: 5612257 - DNA, 25 bp, Homo sapien
ctgcagctaagtcacagacattctc

SEQ ID NO: 5612258 - DNA, 25 bp, Homo sapien
gcagggcagtctcctagtctgcagc

SEQ ID NO: 5612259 - DNA, 25 bp, Homo sapien
ctcagacatctccaaccggtcgctc

SEQ ID NO: 5612260 - DNA, 25 bp, Homo sapien
ggtcgctctgcgaaaccagcagcat

SEQ ID NO: 5612261 - DNA, 25 bp, Homo sapien
cacacgacacggaatatactgagag

SEQ ID NO: 5612262 - DNA, 25 bp, Homo sapien
cactacatctacgcccccttgggtc

SEQ ID NO: 5612263 - DNA, 25 bp, Homo sapien
gctaattagttagcagggcagtctc

SEQ ID NO: 5612264 - DNA, 25 bp, Homo sapien
cccttgggtctcagaaatggaaagt

SEQ ID NO: 5612265 - DNA, 25 bp, Homo sapien
agacattctccctgacctgaggcct

SEQ ID NO: 5612266 - DNA, 25 bp, Homo sapien
gggagagtaaacatcgccacacttg

SEQ ID NO: 5612267 - DNA, 25 bp, Homo sapien
aatgaaacggttggttttctgatat

SEQ ID NO: 5612268 - DNA, 25 bp, Homo sapien
aggtagagctgtagcctgctttcct

SEQ ID NO: 5612269 - DNA, 25 bp, Homo sapien
ggtaggtgtaccacatatcatggtg

SEQ ID NO: 5612270 - DNA, 25 bp, Homo sapien
gaaggttgaaagataagtgaataat

SEQ ID NO: 5612271 - DNA, 25 bp, Homo sapien
agaaacatcttgaagcaggagagac

SEQ ID NO: 5612272 - DNA, 25 bp, Homo sapien
caaaaagtaatggaaggttgaaaga

SEQ ID NO: 5612273 - DNA, 25 bp, Homo sapien
tcatggtgaaattcaagcctattgc

SEQ ID NO: 5612274 - DNA, 25 bp, Homo sapien
taagtgaataataaggtaggtgtac

SEQ ID NO: 5612275 - DNA, 25 bp, Homo sapien
gtgcagcaaaatgtgtatataggcc

SEQ ID NO: 5612276 - DNA, 25 bp, Homo sapien
tttctgtttgtagagtgcagcaaaa

SEQ ID NO: 5612277 - DNA, 25 bp, Homo sapien
taggccattggaaaaccagtccttc

SEQ ID NO: 5612278 - DNA, 25 bp, Homo sapien
ctcctcaagaaaacgggcctaagtg

SEQ ID NO: 5612279 - DNA, 25 bp, Homo sapien
gggcgcaggacactatttcacgaaa

SEQ ID NO: 5612280 - DNA, 25 bp, Homo sapien
agcggccgacagcttcactcctcaa

SEQ ID NO: 5612281 - DNA, 25 bp, Homo sapien
ctgaatgaatggaacggtcgttctc

SEQ ID NO: 5612282 - DNA, 25 bp, Homo sapien
gaagacgaatcaaataactactgcc

SEQ ID NO: 5612283 - DNA, 25 bp, Homo sapien
agagccacctaaaaggcgcactgtg

SEQ ID NO: 5612284 - DNA, 25 bp, Homo sapien
gttcggtccctgtttcgcatgcgcc

SEQ ID NO: 5612285 - DNA, 25 bp, Homo sapien
agtatactacaagagaagacgaatc

SEQ ID NO: 5612286 - DNA, 25 bp, Homo sapien
aagtgaaggcagggtagtttcacta

SEQ ID NO: 5612287 - DNA, 25 bp, Homo sapien
aactactgccaagactgaatgaatg

SEQ ID NO: 5612288 - DNA, 25 bp, Homo sapien
ctcgggtgctaggaacaccccattg

SEQ ID NO: 5612289 - DNA, 25 bp, Homo sapien
tgattttcactgtttgtacggacgt

SEQ ID NO: 5612290 - DNA, 25 bp, Homo sapien
acgtccgtacaaacagtgaaaatca

SEQ ID NO: 5612291 - DNA, 25 bp, Homo sapien
ttacttgcaaagtttgggaggtgac

SEQ ID NO: 5612292 - DNA, 25 bp, Homo sapien
ttgggaggtgacatcaaaaactcaa

SEQ ID NO: 5612293 - DNA, 25 bp, Homo sapien
tagcagtattacacagtggaggtcc

SEQ ID NO: 5612294 - DNA, 25 bp, Homo sapien
agtggaggtccaaattggattagac

SEQ ID NO: 5612295 - DNA, 25 bp, Homo sapien
caaagtattggtaagtctagcacat

SEQ ID NO: 5612296 - DNA, 25 bp, Homo sapien
tgtcggtatcacacagaggtcactt

SEQ ID NO: 5612297 - DNA, 25 bp, Homo sapien
aggccgcgtcacaccaccatcgttt

SEQ ID NO: 5612298 - DNA, 25 bp, Homo sapien
ttcaggacaaaaagcatctgctaac

SEQ ID NO: 5612299 - DNA, 25 bp, Homo sapien
gggggaagaatggaaataccattga

SEQ ID NO: 5612300 - DNA, 25 bp, Homo sapien
ttggaaatcagcaccccagccgttt

SEQ ID NO: 5612301 - DNA, 25 bp, Homo sapien
tagtagtagcttaagattgggtcac

SEQ ID NO: 5612302 - DNA, 25 bp, Homo sapien
tctgcctttcaggagagaggtctga

SEQ ID NO: 5612303 - DNA, 25 bp, Homo sapien
ctcactaaaggttccccgacaagtc

SEQ ID NO: 5612304 - DNA, 25 bp, Homo sapien
tttaattggaagaagtcctcggcca

SEQ ID NO: 5612305 - DNA, 25 bp, Homo sapien
tcttccggcagatccaacgaaggga

SEQ ID NO: 5612306 - DNA, 25 bp, Homo sapien
gggagactcaggaaaatcacactta

SEQ ID NO: 5612307 - DNA, 25 bp, Homo sapien
agaaaaataggaagaagtaccctca

SEQ ID NO: 5612308 - DNA, 25 bp, Homo sapien
gcaaaaagagtggttctggagttaa

SEQ ID NO: 5612309 - DNA, 25 bp, Homo sapien
acttagaaagctgcccgatgaggta

SEQ ID NO: 5612310 - DNA, 25 bp, Homo sapien
cctcggccagaaacagtcctgaatg

SEQ ID NO: 5612311 - DNA, 25 bp, Homo sapien
tttatcatctgtggggtgggatgaa

SEQ ID NO: 5612312 - DNA, 25 bp, Homo sapien
tctaaaagaggcctctgccccttta

SEQ ID NO: 5612313 - DNA, 25 bp, Homo sapien
gtcccaatacagctcacagtagatc

SEQ ID NO: 5612314 - DNA, 25 bp, Homo sapien
gtagatctctgtcaacccagtgttc

SEQ ID NO: 5612315 - DNA, 25 bp, Homo sapien
tccaactgaggaaccaagtgcttaa

SEQ ID NO: 5612316 - DNA, 25 bp, Homo sapien
tggaaggagaatgtgcttaaaaaac

SEQ ID NO: 5612317 - DNA, 25 bp, Homo sapien
agcaagccctagcttaactggccat

SEQ ID NO: 5612318 - DNA, 25 bp, Homo sapien
aaaacagaaatctccagaaggcctt

SEQ ID NO: 5612319 - DNA, 25 bp, Homo sapien
acaaggatgtaaatatgtggatgga

SEQ ID NO: 5612320 - DNA, 25 bp, Homo sapien
tattggaacgactggaaagtgataa

SEQ ID NO: 5612321 - DNA, 25 bp, Homo sapien
ttcagtgcattgaaagatggttctc

SEQ ID NO: 5612322 - DNA, 25 bp, Homo sapien
gaaagatggttctcaaagcagtccc

SEQ ID NO: 5612323 - DNA, 25 bp, Homo sapien
gaaagtgataacctgccaattgtgc

SEQ ID NO: 5612324 - DNA, 25 bp, Homo sapien
atcaattagtcaataaaggcttttc

SEQ ID NO: 5612325 - DNA, 25 bp, Homo sapien
aatcaaatggtaactagtagcagcc

SEQ ID NO: 5612326 - DNA, 25 bp, Homo sapien
gtcgccaaatagtgttggatgggac

SEQ ID NO: 5612327 - DNA, 25 bp, Homo sapien
tagcagcctatcagtaaatgagggc

SEQ ID NO: 5612328 - DNA, 25 bp, Homo sapien
gagactgttctttggactgaggtta

SEQ ID NO: 5612329 - DNA, 25 bp, Homo sapien
tagctgtcatgaatgtaaaagaaac

SEQ ID NO: 5612330 - DNA, 25 bp, Homo sapien
taatgaatctgaagttgatacaact

SEQ ID NO: 5612331 - DNA, 25 bp, Homo sapien
agggcaagtatagagactgttcttt

SEQ ID NO: 5612332 - DNA, 25 bp, Homo sapien
atgtctttgacgagcattggcaata

SEQ ID NO: 5612333 - DNA, 25 bp, Homo sapien
cattggcaatatgctggcttgtcaa

SEQ ID NO: 5612334 - DNA, 25 bp, Homo sapien
tggcttgtcaaaaacgtgggtttgc

SEQ ID NO: 5612335 - DNA, 25 bp, Homo sapien
tacagtccatgttaatgccaaaaaa

SEQ ID NO: 5612336 - DNA, 25 bp, Homo sapien
attatccaatggtcaaccagagaac

SEQ ID NO: 5612337 - DNA, 25 bp, Homo sapien
cttgagatttccatagagtgctgtg

SEQ ID NO: 5612338 - DNA, 25 bp, Homo sapien
tagagaaaaaatagaatgagtttta

SEQ ID NO: 5612339 - DNA, 25 bp, Homo sapien
tttccatagagtgctgtggtataat

SEQ ID NO: 5612340 - DNA, 25 bp, Homo sapien
actctatactgtcatgacgaagtgc

SEQ ID NO: 5612341 - DNA, 25 bp, Homo sapien
aatgggaagaggtcaaatttcctcc

SEQ ID NO: 5612342 - DNA, 25 bp, Homo sapien
ataataccttgatgaatacagtcca

SEQ ID NO: 5612343 - DNA, 25 bp, Homo sapien
tccaatggtcaaccagagaacaggg

SEQ ID NO: 5612344 - DNA, 25 bp, Homo sapien
catagagtgctgtggtataatacct

SEQ ID NO: 5612345 - DNA, 25 bp, Homo sapien
taatcttgagatttccatagagtgc

SEQ ID NO: 5612346 - DNA, 25 bp, Homo sapien
aattaatatacaacagaactgcaaa

SEQ ID NO: 5612347 - DNA, 25 bp, Homo sapien
tgccttagcctcccatattatgaac

SEQ ID NO: 5612348 - DNA, 25 bp, Homo sapien
attagcatcaaattcactaaaacat

SEQ ID NO: 5612349 - DNA, 25 bp, Homo sapien
aatcagtgaggaaaccatcctggga

SEQ ID NO: 5612350 - DNA, 25 bp, Homo sapien
ttaatcagtgaggaaaccatcctgg

SEQ ID NO: 5612351 - DNA, 25 bp, Homo sapien
gttctagaacagaattagcatcaaa

SEQ ID NO: 5612352 - DNA, 25 bp, Homo sapien
tgaggaaaccatcctgggaatgtca

SEQ ID NO: 5612353 - DNA, 25 bp, Homo sapien
gtgaggaaaccatcctgggaatgtc

SEQ ID NO: 5612354 - DNA, 25 bp, Homo sapien
tcttttaatcagtgaggaaaccatc

SEQ ID NO: 5612355 - DNA, 25 bp, Homo sapien
tatacaacagaactgcaaataatac

SEQ ID NO: 5612356 - DNA, 25 bp, Homo sapien
tcaccaaattaatatacaacagaac

SEQ ID NO: 5612357 - DNA, 25 bp, Homo sapien
atcagtcccaggctccaagacctct

SEQ ID NO: 5612358 - DNA, 25 bp, Homo sapien
ctccaaatcggggttgagccccttc

SEQ ID NO: 5612359 - DNA, 25 bp, Homo sapien
ggaagggtcctaattcagccaggct

SEQ ID NO: 5612360 - DNA, 25 bp, Homo sapien
cccagagacccagttcttcccaggg

SEQ ID NO: 5612361 - DNA, 25 bp, Homo sapien
gaggtgactgaccctgttaggacca

SEQ ID NO: 5612362 - DNA, 25 bp, Homo sapien
acaagaaactgggttcccaaactgc

SEQ ID NO: 5612363 - DNA, 25 bp, Homo sapien
agccctccataatgccaagcgttcc

SEQ ID NO: 5612364 - DNA, 25 bp, Homo sapien
gcccaggtgtcagcctgctcctcat

SEQ ID NO: 5612365 - DNA, 25 bp, Homo sapien
ctcaatctctcgcccactccatccc

SEQ ID NO: 5612366 - DNA, 25 bp, Homo sapien
ccaggccttatccaccatcagtccc

SEQ ID NO: 5612367 - DNA, 25 bp, Homo sapien
ctcatccaccccacttccctctctc

SEQ ID NO: 5612368 - DNA, 25 bp, Homo sapien
ctgttgttaatcaatgcatgactgc

SEQ ID NO: 5612369 - DNA, 25 bp, Homo sapien
aaatatagtcaagtgctgcataatg

SEQ ID NO: 5612370 - DNA, 25 bp, Homo sapien
gttgatggcaacgatggttactcat

SEQ ID NO: 5612371 - DNA, 25 bp, Homo sapien
taaaaccatatttgactgcaccttt

SEQ ID NO: 5612372 - DNA, 25 bp, Homo sapien
tgtaagtacacttgttatgaaatcc

SEQ ID NO: 5612373 - DNA, 25 bp, Homo sapien
ttttggtcaacatcccctaagatta

SEQ ID NO: 5612374 - DNA, 25 bp, Homo sapien
tatgaaccacactgaaacgaccttc

SEQ ID NO: 5612375 - DNA, 25 bp, Homo sapien
ataaaaccgcctaatgacgcatttc

SEQ ID NO: 5612376 - DNA, 25 bp, Homo sapien
ttgtacaataaaaccgcctaatgac

SEQ ID NO: 5612377 - DNA, 25 bp, Homo sapien
ttaggtaatacaggagttgatggca

SEQ ID NO: 5612378 - DNA, 25 bp, Homo sapien
catgaactaatggccaagtggtgaa

SEQ ID NO: 5612379 - DNA, 25 bp, Homo sapien
taaataaacggacagagccaatttc

SEQ ID NO: 5612380 - DNA, 25 bp, Homo sapien
ttgggactagagacatgtgtcacca

SEQ ID NO: 5612381 - DNA, 25 bp, Homo sapien
agccttgtattcctgggctcaagcg

SEQ ID NO: 5612382 - DNA, 25 bp, Homo sapien
gagacatgtgtcaccacacccagct

SEQ ID NO: 5612383 - DNA, 25 bp, Homo sapien
tataaataaacggacagagccaatt

SEQ ID NO: 5612384 - DNA, 25 bp, Homo sapien
tcaagtgatcctccagcctcctgaa

SEQ ID NO: 5612385 - DNA, 25 bp, Homo sapien
gggactagagacatgtgtcaccaca

SEQ ID NO: 5612386 - DNA, 25 bp, Homo sapien
aaaaaaatatattgcccaaaggcat

SEQ ID NO: 5612387 - DNA, 25 bp, Homo sapien
caattatggctcactgaagccttgt

SEQ ID NO: 5612388 - DNA, 25 bp, Homo sapien
tcactgaagccttgtattcctgggc

SEQ ID NO: 5612389 - DNA, 25 bp, Homo sapien
cctttaaaaatccagacagggcatg

SEQ ID NO: 5612390 - DNA, 25 bp, Homo sapien
accaagccttagatagctgcagatc

SEQ ID NO: 5612391 - DNA, 25 bp, Homo sapien
agcaccatgtagggattaaatcacc

SEQ ID NO: 5612392 - DNA, 25 bp, Homo sapien
ccaaccgcagaaacttgaggtgatc

SEQ ID NO: 5612393 - DNA, 25 bp, Homo sapien
tccctccatggccagaaccacagat

SEQ ID NO: 5612394 - DNA, 25 bp, Homo sapien
gcagagttcattagacccaggtatc

SEQ ID NO: 5612395 - DNA, 25 bp, Homo sapien
gcttttaaagcagaagacgtgagac

SEQ ID NO: 5612396 - DNA, 25 bp, Homo sapien
tctggcagaaggttggatttataca

SEQ ID NO: 5612397 - DNA, 25 bp, Homo sapien
ttggagcaataaaagggatgtttgt

SEQ ID NO: 5612398 - DNA, 25 bp, Homo sapien
aggggaattgacagtccaagatcac

SEQ ID NO: 5612399 - DNA, 25 bp, Homo sapien
agaagacgtgagacaaccctttact

SEQ ID NO: 5612400 - DNA, 25 bp, Homo sapien
tagtgacatcaagcaccagtccaac

SEQ ID NO: 5612401 - DNA, 25 bp, Homo sapien
aaggaagtggatacaagcattaaga

SEQ ID NO: 5612402 - DNA, 25 bp, Homo sapien
atttcgtgattgtgaactcgtattc

SEQ ID NO: 5612403 - DNA, 25 bp, Homo sapien
catggtgccagggaattacaattgt

SEQ ID NO: 5612404 - DNA, 25 bp, Homo sapien
aaaacagacttaacataccattccc

SEQ ID NO: 5612405 - DNA, 25 bp, Homo sapien
acaagcattaagatgaatcatagct

SEQ ID NO: 5612406 - DNA, 25 bp, Homo sapien
ggcagcttttatgacagcaacttgc

SEQ ID NO: 5612407 - DNA, 25 bp, Homo sapien
tgttaagagagtaatcctgggaaaa

SEQ ID NO: 5612408 - DNA, 25 bp, Homo sapien
ttgctcattaaaggaagtggataca

SEQ ID NO: 5612409 - DNA, 25 bp, Homo sapien
ttccctcacctagcagtactaccac

SEQ ID NO: 5612410 - DNA, 25 bp, Homo sapien
acaggtggtgtatgccctaatattt

SEQ ID NO: 5612411 - DNA, 25 bp, Homo sapien
aatgctatcatggtgccagggaatt

SEQ ID NO: 5612412 - DNA, 25 bp, Homo sapien
gaaagagaccaaatagaccttacct

SEQ ID NO: 5612413 - DNA, 25 bp, Homo sapien
aggtaaggtctatttggtctctttc

SEQ ID NO: 5612414 - DNA, 25 bp, Homo sapien
ccaaggtggatctaatcagtttgcc

SEQ ID NO: 5612415 - DNA, 25 bp, Homo sapien
cagctggcaggactctcactttctt

SEQ ID NO: 5612416 - DNA, 25 bp, Homo sapien
tatcttccctgagcagagcagagct

SEQ ID NO: 5612417 - DNA, 25 bp, Homo sapien
aaacacttgaaagttgcaggggatg

SEQ ID NO: 5612418 - DNA, 25 bp, Homo sapien
gtgtaatggacacacatggcagctg

SEQ ID NO: 5612419 - DNA, 25 bp, Homo sapien
tgacctgtagagtcagggacattat

SEQ ID NO: 5612420 - DNA, 25 bp, Homo sapien
ggagttttgaaggtcagatgctacc

SEQ ID NO: 5612421 - DNA, 25 bp, Homo sapien
cagggacattattagagcagaacca

SEQ ID NO: 5612422 - DNA, 25 bp, Homo sapien
tgcaggggatggtagtctttttata

SEQ ID NO: 5612423 - DNA, 25 bp, Homo sapien
cccaaggtggtctgcaactctgggc

SEQ ID NO: 5612424 - DNA, 25 bp, Homo sapien
ggggaagcctgtgaaattctcctcc

SEQ ID NO: 5612425 - DNA, 25 bp, Homo sapien
gctcccagaatgatttgattgctcc

SEQ ID NO: 5612426 - DNA, 25 bp, Homo sapien
aatgcagcaaagacttatggatgtc

SEQ ID NO: 5612427 - DNA, 25 bp, Homo sapien
gtgcctgtccttgaacagccctttc

SEQ ID NO: 5612428 - DNA, 25 bp, Homo sapien
tgaagaagatacaatgcagcaaaga

SEQ ID NO: 5612429 - DNA, 25 bp, Homo sapien
atcatcccattgtagctgctcccag

SEQ ID NO: 5612430 - DNA, 25 bp, Homo sapien
aaatgttctgtgtaaagtaggtgtt

SEQ ID NO: 5612431 - DNA, 25 bp, Homo sapien
ctacacttatagatgtggccggcac

SEQ ID NO: 5612432 - DNA, 25 bp, Homo sapien
tatggatgtctagtatatgccaggc

SEQ ID NO: 5612433 - DNA, 25 bp, Homo sapien
attattccactgagtagctgaggcc

SEQ ID NO: 5612434 - DNA, 25 bp, Homo sapien
acctcaggttgattcatggactgtt

SEQ ID NO: 5612435 - DNA, 25 bp, Homo sapien
ccggcacctgctggtacctaactct

SEQ ID NO: 5612436 - DNA, 25 bp, Homo sapien
aagtttataacaaaagctcagccta

SEQ ID NO: 5612437 - DNA, 25 bp, Homo sapien
ttcttcaccggattttgaggaggat

SEQ ID NO: 5612438 - DNA, 25 bp, Homo sapien
atacattcagaattaacaaatgcaa

SEQ ID NO: 5612439 - DNA, 25 bp, Homo sapien
gatgttttcccagatataatcacac

SEQ ID NO: 5612440 - DNA, 25 bp, Homo sapien
gtgcttactgatcccataaatgacc

SEQ ID NO: 5612441 - DNA, 25 bp, Homo sapien
aagctcagcctagaaaaatagcatt

SEQ ID NO: 5612442 - DNA, 25 bp, Homo sapien
cagctgtacaactgtagatgttttc

SEQ ID NO: 5612443 - DNA, 25 bp, Homo sapien
acatcaggatcataacccttgcctt

SEQ ID NO: 5612444 - DNA, 25 bp, Homo sapien
cactagtaagtcaaaaaaatcattc

SEQ ID NO: 5612445 - DNA, 25 bp, Homo sapien
ttcaccggattttgaggaggataca

SEQ ID NO: 5612446 - DNA, 25 bp, Homo sapien
cacactactgtgcttactgatccca

SEQ ID NO: 5612447 - DNA, 25 bp, Homo sapien
gtgtcggggcgcgtgtccggaggcc

SEQ ID NO: 5612448 - DNA, 25 bp, Homo sapien
ggcctccggacacgcgccccgacac

SEQ ID NO: 5612449 - DNA, 25 bp, Homo sapien
acgacatgcaacaacaataggaatt

SEQ ID NO: 5612450 - DNA, 25 bp, Homo sapien
tcattcgtacgacatgcaacaacaa

SEQ ID NO: 5612451 - DNA, 25 bp, Homo sapien
tgctaaaccaagacaagtactgtta

SEQ ID NO: 5612452 - DNA, 25 bp, Homo sapien
ttaaaaaagatcaacgtgaagtgaa

SEQ ID NO: 5612453 - DNA, 25 bp, Homo sapien
caaaagacattcgaaataaggtatt

SEQ ID NO: 5612454 - DNA, 25 bp, Homo sapien
ggtaaaaagtatatgggcaacttca

SEQ ID NO: 5612455 - DNA, 25 bp, Homo sapien
tgatgtacaatgtcagaaattctga

SEQ ID NO: 5612456 - DNA, 25 bp, Homo sapien
caacgtgaagtgaaaaacaactatt

SEQ ID NO: 5612457 - DNA, 25 bp, Homo sapien
tctgaaaaacttggaaaatcaagaa

SEQ ID NO: 5612458 - DNA, 25 bp, Homo sapien
aacagtcaaccgtattaagagaata

SEQ ID NO: 5612459 - DNA, 25 bp, Homo sapien
tttccatgctcaacagtcaaccgta

SEQ ID NO: 5612460 - DNA, 25 bp, Homo sapien
aaacaaacaaacaaacacgcacaca

SEQ ID NO: 5612461 - DNA, 25 bp, Homo sapien
agacctagggcaacacgaaatttgt

SEQ ID NO: 5612462 - DNA, 25 bp, Homo sapien
catatcccaggaagacctagggcaa

SEQ ID NO: 5612463 - DNA, 25 bp, Homo sapien
tttgtccccatatcccaggaagacc

SEQ ID NO: 5612464 - DNA, 25 bp, Homo sapien
cttactgtatttgtccccatatccc

SEQ ID NO: 5612465 - DNA, 25 bp, Homo sapien
aagacctagggcaacacgaaatttg

SEQ ID NO: 5612466 - DNA, 25 bp, Homo sapien
ccccatatcccaggaagacctaggg

SEQ ID NO: 5612467 - DNA, 25 bp, Homo sapien
attgggaaggattattcttactgta

SEQ ID NO: 5612468 - DNA, 25 bp, Homo sapien
agggcaacacgaaatttgtttccca

SEQ ID NO: 5612469 - DNA, 25 bp, Homo sapien
cctagggcaacacgaaatttgtttc

SEQ ID NO: 5612470 - DNA, 25 bp, Homo sapien
tgtccccatatcccaggaagaccta

SEQ ID NO: 5612471 - DNA, 25 bp, Homo sapien
gaccaatgcatttaaacagaaaact

SEQ ID NO: 5612472 - DNA, 25 bp, Homo sapien
ctcatcagtatatatgactggcgtc

SEQ ID NO: 5612473 - DNA, 25 bp, Homo sapien
ctgaagtgaattacaaacagccaaa

SEQ ID NO: 5612474 - DNA, 25 bp, Homo sapien
gaactcagaataacacagtaactcc

SEQ ID NO: 5612475 - DNA, 25 bp, Homo sapien
tcccaacacactatttccaccactc

SEQ ID NO: 5612476 - DNA, 25 bp, Homo sapien
tttaaagaccaatcatacccagcat

SEQ ID NO: 5612477 - DNA, 25 bp, Homo sapien
tgggctggtggtatattactgcttt

SEQ ID NO: 5612478 - DNA, 25 bp, Homo sapien
cttggtttgaggacaagttcaaatc

SEQ ID NO: 5612479 - DNA, 25 bp, Homo sapien
atgactggcgtcagaaatcatacta

SEQ ID NO: 5612480 - DNA, 25 bp, Homo sapien
atacccagcatgatccaaggtcatc

SEQ ID NO: 5612481 - DNA, 25 bp, Homo sapien
caaggcagaagtcctatgtctgaaa

SEQ ID NO: 5612482 - DNA, 25 bp, Homo sapien
agaagtcaatcactcagtcacagaa

SEQ ID NO: 5612483 - DNA, 25 bp, Homo sapien
tgggcatttcacaaacgttgagaac

SEQ ID NO: 5612484 - DNA, 25 bp, Homo sapien
ataaaatacacatcaaatacaccat

SEQ ID NO: 5612485 - DNA, 25 bp, Homo sapien
gtcaggagtacttctatgatgggat

SEQ ID NO: 5612486 - DNA, 25 bp, Homo sapien
agtttttggctttggtaatgattgc

SEQ ID NO: 5612487 - DNA, 25 bp, Homo sapien
aacgttgagaacactagtttttggc

SEQ ID NO: 5612488 - DNA, 25 bp, Homo sapien
gaactttaagctgaatagatttgtc

SEQ ID NO: 5612489 - DNA, 25 bp, Homo sapien
ctatgatgggattcacaaattttac

SEQ ID NO: 5612490 - DNA, 25 bp, Homo sapien
tttctgctgctgtcaggagtacttc

SEQ ID NO: 5612491 - DNA, 25 bp, Homo sapien
aaaataaacattgacacagaagtca

SEQ ID NO: 5612492 - DNA, 25 bp, Homo sapien
tctttaaaaagcgtgattgggatgt

SEQ ID NO: 5612493 - DNA, 25 bp, Homo sapien
actaaagaagcttgattgcatattc

SEQ ID NO: 5612494 - DNA, 25 bp, Homo sapien
actcctcagatagcaaaacccctcc

SEQ ID NO: 5612495 - DNA, 25 bp, Homo sapien
tgaaaaccacctccacttaatgaac

SEQ ID NO: 5612496 - DNA, 25 bp, Homo sapien
gtgcaggttcgttaatacacagatt

SEQ ID NO: 5612497 - DNA, 25 bp, Homo sapien
acagtgacccttgaaaaatgtaagt

SEQ ID NO: 5612498 - DNA, 25 bp, Homo sapien
ttcaatgtgtagacaacaaggatgt

SEQ ID NO: 5612499 - DNA, 25 bp, Homo sapien
gggagaactaatctatgaagtcatc

SEQ ID NO: 5612500 - DNA, 25 bp, Homo sapien
tgtccattccaatcacacagtgacc

SEQ ID NO: 5612501 - DNA, 25 bp, Homo sapien
tcttgaaagtttgggagaactaatc

SEQ ID NO: 5612502 - DNA, 25 bp, Homo sapien
gtgtagacaacaaggatgtaaacct

SEQ ID NO: 5612503 - DNA, 25 bp, Homo sapien
atgtaagtttgaactgtgcaggttc

SEQ ID NO: 5612504 - DNA, 25 bp, Homo sapien
acacgctggcatttagatcacttcc

SEQ ID NO: 5612505 - DNA, 25 bp, Homo sapien
ttgcaccaactaatatttaccactg

SEQ ID NO: 5612506 - DNA, 25 bp, Homo sapien
aaaagtagtatatttgaacaatgtc

SEQ ID NO: 5612507 - DNA, 25 bp, Homo sapien
cactgaacacgctggcatttagatc

SEQ ID NO: 5612508 - DNA, 25 bp, Homo sapien
cttctttcagcatgctagacagtaa

SEQ ID NO: 5612509 - DNA, 25 bp, Homo sapien
caattccattaataccagacttggc

SEQ ID NO: 5612510 - DNA, 25 bp, Homo sapien
atttgcaaagctattaggttagtgc

SEQ ID NO: 5612511 - DNA, 25 bp, Homo sapien
atttaccactgaacacgctggcatt

SEQ ID NO: 5612512 - DNA, 25 bp, Homo sapien
ataccagacttggcaaaacgctaat

SEQ ID NO: 5612513 - DNA, 25 bp, Homo sapien
acaatgtctaagtatgtggggtggg

SEQ ID NO: 5612514 - DNA, 25 bp, Homo sapien
ggtggggagaatccatatccgaata

SEQ ID NO: 5612515 - DNA, 25 bp, Homo sapien
gctcagttggtggcagtctctgcct

SEQ ID NO: 5612516 - DNA, 25 bp, Homo sapien
gagcatgactcctccgaagctgcga

SEQ ID NO: 5612517 - DNA, 25 bp, Homo sapien
aaaccgcggagcatgactcctccga

SEQ ID NO: 5612518 - DNA, 25 bp, Homo sapien
gacagtaagcagtttccccaggaaa

SEQ ID NO: 5612519 - DNA, 25 bp, Homo sapien
atgcatacatggttcgaaagtgatt

SEQ ID NO: 5612520 - DNA, 25 bp, Homo sapien
tttgcctggtccagccccgacaaac

SEQ ID NO: 5612521 - DNA, 25 bp, Homo sapien
tatcgtatttgcaaggggaagaaaa

SEQ ID NO: 5612522 - DNA, 25 bp, Homo sapien
agaagtggcactccctctgcaactt

SEQ ID NO: 5612523 - DNA, 25 bp, Homo sapien
agggggcaattatcacgcatcgttt

SEQ ID NO: 5612524 - DNA, 25 bp, Homo sapien
tctgcggaagagtagttcgcaggtg

SEQ ID NO: 5612525 - DNA, 25 bp, Homo sapien
ctggggaatgctctttgcctggtcc

SEQ ID NO: 5612526 - DNA, 25 bp, Homo sapien
gcaggcaccgaagctataaacagcc

SEQ ID NO: 5612527 - DNA, 25 bp, Homo sapien
agcctcatcagcattgccctcctgc

SEQ ID NO: 5612528 - DNA, 25 bp, Homo sapien
gcggaggaacaacaactaaataaca

SEQ ID NO: 5612529 - DNA, 25 bp, Homo sapien
cattaccttgtgggtgcgaagagtt

SEQ ID NO: 5612530 - DNA, 25 bp, Homo sapien
aagggaaggctcttaaaaagctgtc

SEQ ID NO: 5612531 - DNA, 25 bp, Homo sapien
ctgcggtttctcatccaaagggatc

SEQ ID NO: 5612532 - DNA, 25 bp, Homo sapien
tctcatccaaagggatccggaaagg

SEQ ID NO: 5612533 - DNA, 25 bp, Homo sapien
ccctcctgcccaagggtggaatgag

SEQ ID NO: 5612534 - DNA, 25 bp, Homo sapien
gtggaatgagccgtatcttgattga

SEQ ID NO: 5612535 - DNA, 25 bp, Homo sapien
tcccgcctggaattcatttgcagtc

SEQ ID NO: 5612536 - DNA, 25 bp, Homo sapien
tttctgaaaatgaatggtgtatatt

SEQ ID NO: 5612537 - DNA, 25 bp, Homo sapien
ttaaacattatttgtatcttcagta

SEQ ID NO: 5612538 - DNA, 25 bp, Homo sapien
tactgaagatacaaataatgtttaa

SEQ ID NO: 5612539 - DNA, 25 bp, Homo sapien
aattgtggacttaaacattatttgt

SEQ ID NO: 5612540 - DNA, 25 bp, Homo sapien
acaaataatgtttaagtccacaatt

SEQ ID NO: 5612541 - DNA, 25 bp, Homo sapien
gagcaacataggataaaactgggag

SEQ ID NO: 5612542 - DNA, 25 bp, Homo sapien
ctgcagcccaatcacttaagctctc

SEQ ID NO: 5612543 - DNA, 25 bp, Homo sapien
agttcaaatgcatagacagaagttt

SEQ ID NO: 5612544 - DNA, 25 bp, Homo sapien
tagcctatggtgaaactaaagtgtt

SEQ ID NO: 5612545 - DNA, 25 bp, Homo sapien
gcctagtataatccccgtgggcacc

SEQ ID NO: 5612546 - DNA, 25 bp, Homo sapien
ctaaggtacagaagaattatgtctc

SEQ ID NO: 5612547 - DNA, 25 bp, Homo sapien
cttaaaatacaacacctaggccaga

SEQ ID NO: 5612548 - DNA, 25 bp, Homo sapien
cgtgggcaccatatcttcaaatctc

SEQ ID NO: 5612549 - DNA, 25 bp, Homo sapien
acaaatgtagaaactaaggtacaga

SEQ ID NO: 5612550 - DNA, 25 bp, Homo sapien
taaaacagaatagcaacacagtaaa

SEQ ID NO: 5612551 - DNA, 25 bp, Homo sapien
aaatctcaagataatgcagtatact

SEQ ID NO: 5612552 - DNA, 25 bp, Homo sapien
tatatggatgtggtctgttctcttc

SEQ ID NO: 5612553 - DNA, 25 bp, Homo sapien
tcagtttggaatgttatgttacaat

SEQ ID NO: 5612554 - DNA, 25 bp, Homo sapien
gttttatatggatgtggtctgttct

SEQ ID NO: 5612555 - DNA, 25 bp, Homo sapien
ctgctttgtgactgattttctggga

SEQ ID NO: 5612556 - DNA, 25 bp, Homo sapien
attcctagtaatatcacaaatagct

SEQ ID NO: 5612557 - DNA, 25 bp, Homo sapien
ctcatcattcccatccactccttct

SEQ ID NO: 5612558 - DNA, 25 bp, Homo sapien
agtatttctgattaaacatggtttt

SEQ ID NO: 5612559 - DNA, 25 bp, Homo sapien
tttctttaatggatagagggagatg

SEQ ID NO: 5612560 - DNA, 25 bp, Homo sapien
tgtggggttttttggtccatctctg

SEQ ID NO: 5612561 - DNA, 25 bp, Homo sapien
ttaactgtttgaggatatctgattc

SEQ ID NO: 5612562 - DNA, 25 bp, Homo sapien
tacctgaaatgagctgatttgcatt

SEQ ID NO: 5612563 - DNA, 25 bp, Homo sapien
tgcttccaggaaatgtgtcagtgac

SEQ ID NO: 5612564 - DNA, 25 bp, Homo sapien
tccagcctaggggcttccccaacca

SEQ ID NO: 5612565 - DNA, 25 bp, Homo sapien
tgatctgtccagcctaggggcttcc

SEQ ID NO: 5612566 - DNA, 25 bp, Homo sapien
ttccaggaaatgtgtcagtgactcc

SEQ ID NO: 5612567 - DNA, 25 bp, Homo sapien
cacaccctgggctaggtgatctgtc

SEQ ID NO: 5612568 - DNA, 25 bp, Homo sapien
cagcacaccctgggctaggtgatct

SEQ ID NO: 5612569 - DNA, 25 bp, Homo sapien
accctgggctaggtgatctgtccag

SEQ ID NO: 5612570 - DNA, 25 bp, Homo sapien
cttagcctttgcttccaggaaatgt

SEQ ID NO: 5612571 - DNA, 25 bp, Homo sapien
tgtgtcagtgactccttgctagggc

SEQ ID NO: 5612572 - DNA, 25 bp, Homo sapien
tcagtgactccttgctagggctcgg

SEQ ID NO: 5612573 - DNA, 25 bp, Homo sapien
tgggctaggtgatctgtccagccta

SEQ ID NO: 5612574 - DNA, 25 bp, Homo sapien
tttgtatcttgaagaggtagaagac

SEQ ID NO: 5612575 - DNA, 25 bp, Homo sapien
aatgatagcctcacagccatgactt

SEQ ID NO: 5612576 - DNA, 25 bp, Homo sapien
agaaattatgtggtatagctcttta

SEQ ID NO: 5612577 - DNA, 25 bp, Homo sapien
caactttggtaaaagggtaatgata

SEQ ID NO: 5612578 - DNA, 25 bp, Homo sapien
aaagggtaatgatagcctcacagcc

SEQ ID NO: 5612579 - DNA, 25 bp, Homo sapien
ggtaaaagggtaatgatagcctcac

SEQ ID NO: 5612580 - DNA, 25 bp, Homo sapien
gggtaatgatagcctcacagccatg

SEQ ID NO: 5612581 - DNA, 25 bp, Homo sapien
actttggtaaaagggtaatgatagc

SEQ ID NO: 5612582 - DNA, 25 bp, Homo sapien
gaggtagaagactgtaagataatct

SEQ ID NO: 5612583 - DNA, 25 bp, Homo sapien
ggatgctgtccttttccaactttgg

SEQ ID NO: 5612584 - DNA, 25 bp, Homo sapien
gcctcacagccatgacttttgtatc

SEQ ID NO: 5612585 - DNA, 25 bp, Homo sapien
agctattttgagcctttggggtctc

SEQ ID NO: 5612586 - DNA, 25 bp, Homo sapien
gccaaggctggcatatgttttaaat

SEQ ID NO: 5612587 - DNA, 25 bp, Homo sapien
gtcttgacttatcctggtgctctgc

SEQ ID NO: 5612588 - DNA, 25 bp, Homo sapien
ctggacagcttaagaactaatgaat

SEQ ID NO: 5612589 - DNA, 25 bp, Homo sapien
aatgaattaagtttaacagctggcc

SEQ ID NO: 5612590 - DNA, 25 bp, Homo sapien
tgaaaactccatttaaaagtatgtc

SEQ ID NO: 5612591 - DNA, 25 bp, Homo sapien
ctttggggtctcttccaaacccaga

SEQ ID NO: 5612592 - DNA, 25 bp, Homo sapien
tttaaatgggaggttctgtcaattc

SEQ ID NO: 5612593 - DNA, 25 bp, Homo sapien
tatgttaacattcatgaagttctac

SEQ ID NO: 5612594 - DNA, 25 bp, Homo sapien
tctacaaagagtgtcttgtcttgac

SEQ ID NO: 5612595 - DNA, 25 bp, Homo sapien
aagtttaacagctggccaaaaagaa

SEQ ID NO: 5612596 - DNA, 25 bp, Homo sapien
ccagccaactgtctcctgtcagcct

SEQ ID NO: 5612597 - DNA, 25 bp, Homo sapien
gatatacttcaactctaccagactt

SEQ ID NO: 5612598 - DNA, 25 bp, Homo sapien
cctgtatactccagctacccagctc

SEQ ID NO: 5612599 - DNA, 25 bp, Homo sapien
cctgtcagcctttgtttgaaatttc

SEQ ID NO: 5612600 - DNA, 25 bp, Homo sapien
catagctcgttgcagtcttgacctc

SEQ ID NO: 5612601 - DNA, 25 bp, Homo sapien
aataccatgaaccccgcattatctc

SEQ ID NO: 5612602 - DNA, 25 bp, Homo sapien
tctggggattgctgccaaactctta

SEQ ID NO: 5612603 - DNA, 25 bp, Homo sapien
atttaaatccctgcctgtatactcc

SEQ ID NO: 5612604 - DNA, 25 bp, Homo sapien
acttctggggattgctgccaaactc

SEQ ID NO: 5612605 - DNA, 25 bp, Homo sapien
aaactcttaataccatgaaccccgc

SEQ ID NO: 5612606 - DNA, 25 bp, Homo sapien
cattgcaatggtgttgatcctaata

SEQ ID NO: 5612607 - DNA, 25 bp, Homo sapien
cttctgattctcttacggtgggggg

SEQ ID NO: 5612608 - DNA, 25 bp, Homo sapien
gaatacttacgaatggggcatttat

SEQ ID NO: 5612609 - DNA, 25 bp, Homo sapien
atattctgggtggcataatgaagtg

SEQ ID NO: 5612610 - DNA, 25 bp, Homo sapien
ctgggttccaacgcctaagctgctt

SEQ ID NO: 5612611 - DNA, 25 bp, Homo sapien
ccacggccatgcttcttaaagaccc

SEQ ID NO: 5612612 - DNA, 25 bp, Homo sapien
aaggggaaccactacagctctccct

SEQ ID NO: 5612613 - DNA, 25 bp, Homo sapien
cctcccccagatgttaccagtcacc

SEQ ID NO: 5612614 - DNA, 25 bp, Homo sapien
aaggcagatgggacccttctgattc

SEQ ID NO: 5612615 - DNA, 25 bp, Homo sapien
catatacatcaggcaagattaagct

SEQ ID NO: 5612616 - DNA, 25 bp, Homo sapien
aagctgctttgatattctgggtggc

SEQ ID NO: 5612617 - DNA, 25 bp, Homo sapien
cagtaacctgtcctgtcaccccacc

SEQ ID NO: 5612618 - DNA, 25 bp, Homo sapien
ttcccgtggcatgatgaaaacaaac

SEQ ID NO: 5612619 - DNA, 25 bp, Homo sapien
agcctatgcacatggaatatgcgcc

SEQ ID NO: 5612620 - DNA, 25 bp, Homo sapien
tgatatgccacagagatgcagaaca

SEQ ID NO: 5612621 - DNA, 25 bp, Homo sapien
tgcgccatttagaaccgtggaattc

SEQ ID NO: 5612622 - DNA, 25 bp, Homo sapien
gcataaggaatatttgagctgagat

SEQ ID NO: 5612623 - DNA, 25 bp, Homo sapien
agcagtacatgtgtgggcttccctt

SEQ ID NO: 5612624 - DNA, 25 bp, Homo sapien
ggtccgagtctagtttagggaatca

SEQ ID NO: 5612625 - DNA, 25 bp, Homo sapien
agccagcacagagcaaacactgtta

SEQ ID NO: 5612626 - DNA, 25 bp, Homo sapien
taagttttacaaaaggggcagatga

SEQ ID NO: 5612627 - DNA, 25 bp, Homo sapien
gaaagagacgctaaacaagtaacca

SEQ ID NO: 5612628 - DNA, 25 bp, Homo sapien
ttatgttgcttatggtctggggagg

SEQ ID NO: 5612629 - DNA, 25 bp, Homo sapien
acctggagtaatagctttgacaaag

SEQ ID NO: 5612630 - DNA, 25 bp, Homo sapien
cccctcaaggagccaatgattttgc

SEQ ID NO: 5612631 - DNA, 25 bp, Homo sapien
aacatctgctgtgctaggcaatgga

SEQ ID NO: 5612632 - DNA, 25 bp, Homo sapien
aggggcatataagacaagctctctc

SEQ ID NO: 5612633 - DNA, 25 bp, Homo sapien
ccggccgaggatatattaatggagt

SEQ ID NO: 5612634 - DNA, 25 bp, Homo sapien
agaaaaaaaagcactacaacctgga

SEQ ID NO: 5612635 - DNA, 25 bp, Homo sapien
caaacctattagtgacaacatctgc

SEQ ID NO: 5612636 - DNA, 25 bp, Homo sapien
attaccaccaagaatggaaatattg

SEQ ID NO: 5612637 - DNA, 25 bp, Homo sapien
caattaggtagtacttcaggaattc

SEQ ID NO: 5612638 - DNA, 25 bp, Homo sapien
ttcatgcaataagtagccaaaattt

SEQ ID NO: 5612639 - DNA, 25 bp, Homo sapien
aggaaagacaggacttagatcaaag

SEQ ID NO: 5612640 - DNA, 25 bp, Homo sapien
acaaaaattgctaaaggaagtctta

SEQ ID NO: 5612641 - DNA, 25 bp, Homo sapien
gtctggagtacaatgatgcaatcgt

SEQ ID NO: 5612642 - DNA, 25 bp, Homo sapien
aacatcatatgaacaaaccaatctt

SEQ ID NO: 5612643 - DNA, 25 bp, Homo sapien
cttctgatgagacaaaaattgctaa

SEQ ID NO: 5612644 - DNA, 25 bp, Homo sapien
tgtagctcattaacacggtcttctt

SEQ ID NO: 5612645 - DNA, 25 bp, Homo sapien
cctagccagcatatgtgaagacttc

SEQ ID NO: 5612646 - DNA, 25 bp, Homo sapien
tctcaaatatggggtaaggagtaca

SEQ ID NO: 5612647 - DNA, 25 bp, Homo sapien
tatgaaagaattgtacatggagctt

SEQ ID NO: 5612648 - DNA, 25 bp, Homo sapien
ggagacgtgagtttagtgtagctca

SEQ ID NO: 5612649 - DNA, 25 bp, Homo sapien
actacagccatatgccaccatggcc

SEQ ID NO: 5612650 - DNA, 25 bp, Homo sapien
actttagcctcacactcttgggttc

SEQ ID NO: 5612651 - DNA, 25 bp, Homo sapien
ggtaagacatcctaactttcaacta

SEQ ID NO: 5612652 - DNA, 25 bp, Homo sapien
tagttgaaagttaggatgtcttacc

SEQ ID NO: 5612653 - DNA, 25 bp, Homo sapien
tgcactgcctggacagaaacctgtt

SEQ ID NO: 5612654 - DNA, 25 bp, Homo sapien
agtctctcctcggggtaaagagaag

SEQ ID NO: 5612655 - DNA, 25 bp, Homo sapien
ggtcgcgtcccctttgttagtgctc

SEQ ID NO: 5612656 - DNA, 25 bp, Homo sapien
agggaaagacatcccgagaagattc

SEQ ID NO: 5612657 - DNA, 25 bp, Homo sapien
agagaggtcctgtttcccccaagtc

SEQ ID NO: 5612658 - DNA, 25 bp, Homo sapien
gaagattcaagggctgtgcaaagcc

SEQ ID NO: 5612659 - DNA, 25 bp, Homo sapien
cagaaacctgttagcgcaagggtga

SEQ ID NO: 5612660 - DNA, 25 bp, Homo sapien
cctctaggccatcacgggccctcac

SEQ ID NO: 5612661 - DNA, 25 bp, Homo sapien
tttgcagcgcagtctgaggaataaa

SEQ ID NO: 5612662 - DNA, 25 bp, Homo sapien
ggggtgctctccaattctcgccttc

SEQ ID NO: 5612663 - DNA, 25 bp, Homo sapien
ctctcctggggagccctcctctagg

SEQ ID NO: 5612664 - DNA, 25 bp, Homo sapien
ctccagcacacctggggaatcaaaa

SEQ ID NO: 5612665 - DNA, 25 bp, Homo sapien
cttcacttgatggtggggcataatg

SEQ ID NO: 5612666 - DNA, 25 bp, Homo sapien
tggcagtcctgcacatcttcacttg

SEQ ID NO: 5612667 - DNA, 25 bp, Homo sapien
gtagcacctctatggcagtcctgca

SEQ ID NO: 5612668 - DNA, 25 bp, Homo sapien
tctgggtctcctcacatagtcctca

SEQ ID NO: 5612669 - DNA, 25 bp, Homo sapien
tgtctggccctaagtgtgtttctaa

SEQ ID NO: 5612670 - DNA, 25 bp, Homo sapien
ggcaggatagtgataagctcaaatg

SEQ ID NO: 5612671 - DNA, 25 bp, Homo sapien
aaagaaggtgctaatcacagttatt

SEQ ID NO: 5612672 - DNA, 25 bp, Homo sapien
gggaatcaaaataaagaaggtgcta

SEQ ID NO: 5612673 - DNA, 25 bp, Homo sapien
aagctcaaatgtacagtttcatccc

SEQ ID NO: 5612674 - DNA, 25 bp, Homo sapien
gtgaggcacaatgtctggccctaag

SEQ ID NO: 5612675 - DNA, 25 bp, Homo sapien
ctgcttgatattaggaaggtgctta

SEQ ID NO: 5612676 - DNA, 25 bp, Homo sapien
gcagtgcatctttgagtagaacttt

SEQ ID NO: 5612677 - DNA, 25 bp, Homo sapien
tggataaattcaacctagagatgag

SEQ ID NO: 5612678 - DNA, 25 bp, Homo sapien
aatagacaagtgatagcatacaagt

SEQ ID NO: 5612679 - DNA, 25 bp, Homo sapien
ttcaactgtaataggaaacaccgac

SEQ ID NO: 5612680 - DNA, 25 bp, Homo sapien
taggaaacaccgacaatctgcttga

SEQ ID NO: 5612681 - DNA, 25 bp, Homo sapien
gtactgagagatgacattcaactgt

SEQ ID NO: 5612682 - DNA, 25 bp, Homo sapien
ttaagagtctaaatggttgcctggt

SEQ ID NO: 5612683 - DNA, 25 bp, Homo sapien
gttgcctggtggacacattagagtt

SEQ ID NO: 5612684 - DNA, 25 bp, Homo sapien
tagttgtcacggtggaatcagaaac

SEQ ID NO: 5612685 - DNA, 25 bp, Homo sapien
cttacactgtaggactgggtaagtg

SEQ ID NO: 5612686 - DNA, 25 bp, Homo sapien
tgagaataaggacactccaccgtag

SEQ ID NO: 5612687 - DNA, 25 bp, Homo sapien
ctgtgtgtagagttagctaggccag

SEQ ID NO: 5612688 - DNA, 25 bp, Homo sapien
ctaggccagaaatgcactgggtcca

SEQ ID NO: 5612689 - DNA, 25 bp, Homo sapien
ataccttccaagggcctctggtgac

SEQ ID NO: 5612690 - DNA, 25 bp, Homo sapien
cctctggtgacatgaacagcaaggg

SEQ ID NO: 5612691 - DNA, 25 bp, Homo sapien
tagagttagctaggccagaaatgca

SEQ ID NO: 5612692 - DNA, 25 bp, Homo sapien
ttctaacccacagggcactcgcaca

SEQ ID NO: 5612693 - DNA, 25 bp, Homo sapien
acagtggctttgagaataaggacac

SEQ ID NO: 5612694 - DNA, 25 bp, Homo sapien
acccacagggcactcgcacatgggt

SEQ ID NO: 5612695 - DNA, 25 bp, Homo sapien
atgaaaggcttctaggtcaagtgtt

SEQ ID NO: 5612696 - DNA, 25 bp, Homo sapien
gcactgggtccaccagttggcacac

SEQ ID NO: 5612697 - DNA, 25 bp, Homo sapien
tgtcaggttttgtgctaggttccaa

SEQ ID NO: 5612698 - DNA, 25 bp, Homo sapien
ggcctctgttttagggatggaggaa

SEQ ID NO: 5612699 - DNA, 25 bp, Homo sapien
tggcagcagctcaggattattccac

SEQ ID NO: 5612700 - DNA, 25 bp, Homo sapien
tccaactcacacagtggcagcagct

SEQ ID NO: 5612701 - DNA, 25 bp, Homo sapien
aaatgcacagacaagaactggcctt

SEQ ID NO: 5612702 - DNA, 25 bp, Homo sapien
cacagcagctatggtttcagattcc

SEQ ID NO: 5612703 - DNA, 25 bp, Homo sapien
tgacttatccggagaccacctgatc

SEQ ID NO: 5612704 - DNA, 25 bp, Homo sapien
gaatggattggaaataactgccctt

SEQ ID NO: 5612705 - DNA, 25 bp, Homo sapien
atgaagacaaataatgactggcggt

SEQ ID NO: 5612706 - DNA, 25 bp, Homo sapien
tcacatacgaagtcaaatgcacaga

SEQ ID NO: 5612707 - DNA, 25 bp, Homo sapien
aaaaatgaataggggttgacttatc

SEQ ID NO: 5612708 - DNA, 25 bp, Homo sapien
tattgtggctctttgcagatatttt

SEQ ID NO: 5612709 - DNA, 25 bp, Homo sapien
tttccttgtgttggccattttggtg

SEQ ID NO: 5612710 - DNA, 25 bp, Homo sapien
ctgactgtatgttgttcaaggctta

SEQ ID NO: 5612711 - DNA, 25 bp, Homo sapien
tatagactcccatgcatgtggccaa

SEQ ID NO: 5612712 - DNA, 25 bp, Homo sapien
atatggagcttccagccaaaaggaa

SEQ ID NO: 5612713 - DNA, 25 bp, Homo sapien
agaaaacatacactgggtgcctctc

SEQ ID NO: 5612714 - DNA, 25 bp, Homo sapien
agccaaaaggaagttaaagcaacaa

SEQ ID NO: 5612715 - DNA, 25 bp, Homo sapien
aaaggcctagaaaacatacactggg

SEQ ID NO: 5612716 - DNA, 25 bp, Homo sapien
tacactgggtgcctctcctgttttc

SEQ ID NO: 5612717 - DNA, 25 bp, Homo sapien
tgttgttcaaggcttattgtggctc

SEQ ID NO: 5612718 - DNA, 25 bp, Homo sapien
tggtgaattaccagaatatggagct

SEQ ID NO: 5612719 - DNA, 25 bp, Homo sapien
ctccagtcgactggacagcaggatt

SEQ ID NO: 5612720 - DNA, 25 bp, Homo sapien
aggatgctgtaagatgcgcaatgtc

SEQ ID NO: 5612721 - DNA, 25 bp, Homo sapien
taaaactagtagaggtgaacaaatc

SEQ ID NO: 5612722 - DNA, 25 bp, Homo sapien
attatttggtgaggaagtcaactgt

SEQ ID NO: 5612723 - DNA, 25 bp, Homo sapien
gtcaactgtgagaagtgactcgaac

SEQ ID NO: 5612724 - DNA, 25 bp, Homo sapien
agtgcaagttgcaggaactatgata

SEQ ID NO: 5612725 - DNA, 25 bp, Homo sapien
caggattactgagtagtaggtaggc

SEQ ID NO: 5612726 - DNA, 25 bp, Homo sapien
tgcgcaatgtcaggttatatggagc

SEQ ID NO: 5612727 - DNA, 25 bp, Homo sapien
agacatctgaccaagaggatgctgt

SEQ ID NO: 5612728 - DNA, 25 bp, Homo sapien
gaaatgagaaaagtgcttgggtcta

SEQ ID NO: 5612729 - DNA, 25 bp, Homo sapien
gtgactcgaactgtcagaagaaatg

SEQ ID NO: 5612730 - DNA, 25 bp, Homo sapien
ttcgaaaatttactgacaatcaaac

SEQ ID NO: 5612731 - DNA, 25 bp, Homo sapien
acacttcaagaagtaagagttgagc

SEQ ID NO: 5612732 - DNA, 25 bp, Homo sapien
agagttgagcatgttaaagcattca

SEQ ID NO: 5612733 - DNA, 25 bp, Homo sapien
tcagagaatgctcttctgtaaggca

SEQ ID NO: 5612734 - DNA, 25 bp, Homo sapien
aagcattcaaacctttaggaacact

SEQ ID NO: 5612735 - DNA, 25 bp, Homo sapien
ctgtgaagaatcaaagactccaact

SEQ ID NO: 5612736 - DNA, 25 bp, Homo sapien
ctgtaaggcattctttgagaaatcc

SEQ ID NO: 5612737 - DNA, 25 bp, Homo sapien
tcatttagccatacaaaagacattt

SEQ ID NO: 5612738 - DNA, 25 bp, Homo sapien
aaagactccaactgtaattgcattt

SEQ ID NO: 5612739 - DNA, 25 bp, Homo sapien
tcaagaagtaagagttgagcatgtt

SEQ ID NO: 5612740 - DNA, 25 bp, Homo sapien
ttgagaaatccatataaaaattaga

SEQ ID NO: 5612741 - DNA, 25 bp, Homo sapien
ggtcggcagcgacgcacccggaggg

SEQ ID NO: 5612742 - DNA, 25 bp, Homo sapien
ccctccgggtgcgtcgctgccgacc

SEQ ID NO: 5612743 - DNA, 25 bp, Homo sapien
ctgaacacagttgaccaagccattc

SEQ ID NO: 5612744 - DNA, 25 bp, Homo sapien
tgaactgaacacagttgaccaagcc

SEQ ID NO: 5612745 - DNA, 25 bp, Homo sapien
taaattattacgtatctgtgatctt

SEQ ID NO: 5612746 - DNA, 25 bp, Homo sapien
gggcttcccaatgagacagggcccc

SEQ ID NO: 5612747 - DNA, 25 bp, Homo sapien
tataaagaggggcttcccaatgaga

SEQ ID NO: 5612748 - DNA, 25 bp, Homo sapien
aatgctttataaagaggggcttccc

SEQ ID NO: 5612749 - DNA, 25 bp, Homo sapien
cagttgaccaagccattccaagtaa

SEQ ID NO: 5612750 - DNA, 25 bp, Homo sapien
tataacaggcagataaaaatgtaaa

SEQ ID NO: 5612751 - DNA, 25 bp, Homo sapien
agttaggaaattcaactacagactt

SEQ ID NO: 5612752 - DNA, 25 bp, Homo sapien
tatacacagaaattttggtctattc

SEQ ID NO: 5612753 - DNA, 25 bp, Homo sapien
acatatttatgaactgaacacagtt

SEQ ID NO: 5612754 - DNA, 25 bp, Homo sapien
gcttgctgtgagcagaaacacctgt

SEQ ID NO: 5612755 - DNA, 25 bp, Homo sapien
gatgaatcaaagtagcaaaagcgta

SEQ ID NO: 5612756 - DNA, 25 bp, Homo sapien
aattgtggtagctggcccaccccaa

SEQ ID NO: 5612757 - DNA, 25 bp, Homo sapien
gcatagcccatgacacccaagttaa

SEQ ID NO: 5612758 - DNA, 25 bp, Homo sapien
gaggagaaggtatcatcaacgtact

SEQ ID NO: 5612759 - DNA, 25 bp, Homo sapien
aaaagcgtaaaagtcattggatatt

SEQ ID NO: 5612760 - DNA, 25 bp, Homo sapien
atagatgtaggtgctaattaaatcc

SEQ ID NO: 5612761 - DNA, 25 bp, Homo sapien
tcgctccctgaaaaactccaagtgc

SEQ ID NO: 5612762 - DNA, 25 bp, Homo sapien
aaattatcatgaagcaggaatggga

SEQ ID NO: 5612763 - DNA, 25 bp, Homo sapien
cagggctcttgcatggatgtaaacc

SEQ ID NO: 5612764 - DNA, 25 bp, Homo sapien
agtatctgggttcacagggctcttg

SEQ ID NO: 5612765 - DNA, 25 bp, Homo sapien
catcttaaaaccatggtgggacgtc

SEQ ID NO: 5612766 - DNA, 25 bp, Homo sapien
gaaagccagcatgaacacatcctct

SEQ ID NO: 5612767 - DNA, 25 bp, Homo sapien
atgcaaagtggaatttgacaatcac

SEQ ID NO: 5612768 - DNA, 25 bp, Homo sapien
tggtgggacgtcttctggtattaca

SEQ ID NO: 5612769 - DNA, 25 bp, Homo sapien
tgccttgggacatcctgaaagccag

SEQ ID NO: 5612770 - DNA, 25 bp, Homo sapien
gggaaagtcatgattacactaactg

SEQ ID NO: 5612771 - DNA, 25 bp, Homo sapien
tgaagacaaacacagagatggtgtg

SEQ ID NO: 5612772 - DNA, 25 bp, Homo sapien
gattacactaactgagctaaaatgc

SEQ ID NO: 5612773 - DNA, 25 bp, Homo sapien
atggtgtgtctaagaaacttcaaaa

SEQ ID NO: 5612774 - DNA, 25 bp, Homo sapien
cggagctctccagctgacgcagagc

SEQ ID NO: 5612775 - DNA, 25 bp, Homo sapien
caatcactgtgccgtgccttgggac

SEQ ID NO: 5612776 - DNA, 25 bp, Homo sapien
tctcggaatcagagaggagctcgct

SEQ ID NO: 5612777 - DNA, 25 bp, Homo sapien
agcgagctcctctctgattccgaga

SEQ ID NO: 5612778 - DNA, 25 bp, Homo sapien
gaagaactcttggtggatgcgttgt

SEQ ID NO: 5612779 - DNA, 25 bp, Homo sapien
agcaccacgctccataaaagaccct

SEQ ID NO: 5612780 - DNA, 25 bp, Homo sapien
ggagttgcatccacacgccctggga

SEQ ID NO: 5612781 - DNA, 25 bp, Homo sapien
tttgggaaggctactcattagctcc

SEQ ID NO: 5612782 - DNA, 25 bp, Homo sapien
caagctatgagacctgagtatgtac

SEQ ID NO: 5612783 - DNA, 25 bp, Homo sapien
tgcgttgtctggagcctgctcactc

SEQ ID NO: 5612784 - DNA, 25 bp, Homo sapien
cagcaggggagccttacattttgct

SEQ ID NO: 5612785 - DNA, 25 bp, Homo sapien
ccctcccgagcacattccaatctgg

SEQ ID NO: 5612786 - DNA, 25 bp, Homo sapien
actccgccacgttactcagcaatgc

SEQ ID NO: 5612787 - DNA, 25 bp, Homo sapien
tacattttgctgggatgatggtgac

SEQ ID NO: 5612788 - DNA, 25 bp, Homo sapien
cttctgaacgatgaagcatgaagca

SEQ ID NO: 5612789 - DNA, 25 bp, Homo sapien
gaagaggcacaagtttccacactgt

SEQ ID NO: 5612790 - DNA, 25 bp, Homo sapien
agtgtggagaaaggtttaatattta

SEQ ID NO: 5612791 - DNA, 25 bp, Homo sapien
gaggtagggactgactacattccaa

SEQ ID NO: 5612792 - DNA, 25 bp, Homo sapien
tatactaagaagaggcacaagtttc

SEQ ID NO: 5612793 - DNA, 25 bp, Homo sapien
aagaagaggcacaagtttccacact

SEQ ID NO: 5612794 - DNA, 25 bp, Homo sapien
aatatactcaccaataaaagcacta

SEQ ID NO: 5612795 - DNA, 25 bp, Homo sapien
agggactgactacattccaatgctc

SEQ ID NO: 5612796 - DNA, 25 bp, Homo sapien
agaaaatactggaaagccttaacac

SEQ ID NO: 5612797 - DNA, 25 bp, Homo sapien
ttccacactgttctccctaaaagca

SEQ ID NO: 5612798 - DNA, 25 bp, Homo sapien
cattccaatgctcagaaaatactgg

SEQ ID NO: 5612799 - DNA, 25 bp, Homo sapien
actggaaagccttaacacacacaat

SEQ ID NO: 5612800 - DNA, 25 bp, Homo sapien
cctcagccaaccccatgccccctca

SEQ ID NO: 5612801 - DNA, 25 bp, Homo sapien
tgtgaccccttcaggactggccatt

SEQ ID NO: 5612802 - DNA, 25 bp, Homo sapien
caaggcttgttgagttccagttgat

SEQ ID NO: 5612803 - DNA, 25 bp, Homo sapien
ccagcttaccaccctgtggggctgc

SEQ ID NO: 5612804 - DNA, 25 bp, Homo sapien
ttcatagaagatgtataagaacctt

SEQ ID NO: 5612805 - DNA, 25 bp, Homo sapien
cctgtggggctgctataacctcagc

SEQ ID NO: 5612806 - DNA, 25 bp, Homo sapien
tttagatagtggctgataaactgcc

SEQ ID NO: 5612807 - DNA, 25 bp, Homo sapien
gaatgaggcaatcacaggcctgact

SEQ ID NO: 5612808 - DNA, 25 bp, Homo sapien
tagacaaagggtttatgtatgtgta

SEQ ID NO: 5612809 - DNA, 25 bp, Homo sapien
ctcagagaagtatcaactgtgaccc

SEQ ID NO: 5612810 - DNA, 25 bp, Homo sapien
tcccacaccccctttgagaactcaa

SEQ ID NO: 5612811 - DNA, 25 bp, Homo sapien
tggtaccagactgtttggttcacac

SEQ ID NO: 5612812 - DNA, 25 bp, Homo sapien
acttctcctcttagggccatcctgc

SEQ ID NO: 5612813 - DNA, 25 bp, Homo sapien
gaggaatgatccagaatagggtttt

SEQ ID NO: 5612814 - DNA, 25 bp, Homo sapien
ggccatcctgcactgttggtggcag

SEQ ID NO: 5612815 - DNA, 25 bp, Homo sapien
ccagaatagggttttggtaccagac

SEQ ID NO: 5612816 - DNA, 25 bp, Homo sapien
ccacttggtagcacattacttctcc

SEQ ID NO: 5612817 - DNA, 25 bp, Homo sapien
atcctgcactgttggtggcagtggg

SEQ ID NO: 5612818 - DNA, 25 bp, Homo sapien
caagcctgtgccccaaactgctggt

SEQ ID NO: 5612819 - DNA, 25 bp, Homo sapien
tgatccagaatagggttttggtacc

SEQ ID NO: 5612820 - DNA, 25 bp, Homo sapien
ggaggaatgatccagaatagggttt

SEQ ID NO: 5612821 - DNA, 25 bp, Homo sapien
tctcctcttagggccatcctgcact

SEQ ID NO: 5612822 - DNA, 25 bp, Homo sapien
tgctcttaaaatgcggcaacatgaa

SEQ ID NO: 5612823 - DNA, 25 bp, Homo sapien
catttcaggtacaagcatttccact

SEQ ID NO: 5612824 - DNA, 25 bp, Homo sapien
tcagcattgctctgcatctactaac

SEQ ID NO: 5612825 - DNA, 25 bp, Homo sapien
gaaaagcatcacaagacacagcaac

SEQ ID NO: 5612826 - DNA, 25 bp, Homo sapien
aatacatataagagagagccactga

SEQ ID NO: 5612827 - DNA, 25 bp, Homo sapien
tacatataagagagagccactgaag

SEQ ID NO: 5612828 - DNA, 25 bp, Homo sapien
aaatacacatttcaggtacaagcat

SEQ ID NO: 5612829 - DNA, 25 bp, Homo sapien
aagtcacattggcatgaatcaaaac

SEQ ID NO: 5612830 - DNA, 25 bp, Homo sapien
tctactaacatttcataggtgacat

SEQ ID NO: 5612831 - DNA, 25 bp, Homo sapien
agactacacaccttatcagcattgc

SEQ ID NO: 5612832 - DNA, 25 bp, Homo sapien
cataggtgacataatgtctttactc

SEQ ID NO: 5612833 - DNA, 25 bp, Homo sapien
ccttattaggcagtaaagcagtgga

SEQ ID NO: 5612834 - DNA, 25 bp, Homo sapien
tagtagggcatttctaaagactgta

SEQ ID NO: 5612835 - DNA, 25 bp, Homo sapien
catttttagggagttctgcaaacac

SEQ ID NO: 5612836 - DNA, 25 bp, Homo sapien
ggcagtaaagcagtggatatcaaca

SEQ ID NO: 5612837 - DNA, 25 bp, Homo sapien
ggacaggtgctggctttccttatta

SEQ ID NO: 5612838 - DNA, 25 bp, Homo sapien
tcacctgctgggatgcatgaacttt

SEQ ID NO: 5612839 - DNA, 25 bp, Homo sapien
ctgcaaacacaaagatgtggcttac

SEQ ID NO: 5612840 - DNA, 25 bp, Homo sapien
tcatctggaatcctggaattctacc

SEQ ID NO: 5612841 - DNA, 25 bp, Homo sapien
catctccctatgaggtcaaggactt

SEQ ID NO: 5612842 - DNA, 25 bp, Homo sapien
aggaataattctaatgatggacatt

SEQ ID NO: 5612843 - DNA, 25 bp, Homo sapien
gaggtcaaggacttactgagctgat

SEQ ID NO: 5612844 - DNA, 25 bp, Homo sapien
ggcaaggagggtaaccacatttcat

SEQ ID NO: 5612845 - DNA, 25 bp, Homo sapien
ggacaacatataaacttgggaggac

SEQ ID NO: 5612846 - DNA, 25 bp, Homo sapien
atcatgccaaccaagatgagggaga

SEQ ID NO: 5612847 - DNA, 25 bp, Homo sapien
agacagaggctgaaaagtactaata

SEQ ID NO: 5612848 - DNA, 25 bp, Homo sapien
tatacaggcaagaagtaggtttgaa

SEQ ID NO: 5612849 - DNA, 25 bp, Homo sapien
tatgaactggctgctataagtgggg

SEQ ID NO: 5612850 - DNA, 25 bp, Homo sapien
gcaaaaagtgaggtattggtgaaaa

SEQ ID NO: 5612851 - DNA, 25 bp, Homo sapien
ggagagttaagggttgtatatacag

SEQ ID NO: 5612852 - DNA, 25 bp, Homo sapien
caagcaaattctaggaagacagagg

SEQ ID NO: 5612853 - DNA, 25 bp, Homo sapien
gtccccatgaacagagcaaaaagtg

SEQ ID NO: 5612854 - DNA, 25 bp, Homo sapien
ggcctcaggttagagaactgtgtat

SEQ ID NO: 5612855 - DNA, 25 bp, Homo sapien
attgtgttcacaggattgcaccatc

SEQ ID NO: 5612856 - DNA, 25 bp, Homo sapien
acaactggactgatggctcgcatta

SEQ ID NO: 5612857 - DNA, 25 bp, Homo sapien
atcagttaaacaaaggatgatggcc

SEQ ID NO: 5612858 - DNA, 25 bp, Homo sapien
gttcccccaggcaatataccacagc

SEQ ID NO: 5612859 - DNA, 25 bp, Homo sapien
tcctgaccggctgcccatgagtgat

SEQ ID NO: 5612860 - DNA, 25 bp, Homo sapien
tttcactgacaactggactgatggc

SEQ ID NO: 5612861 - DNA, 25 bp, Homo sapien
tctgccaaagacccaactcttcgtc

SEQ ID NO: 5612862 - DNA, 25 bp, Homo sapien
atataccacagcgtcctgaccggct

SEQ ID NO: 5612863 - DNA, 25 bp, Homo sapien
ggctcgcattatgacaacacagggt

SEQ ID NO: 5612864 - DNA, 25 bp, Homo sapien
ggatgatggccctctttgctgcttg

SEQ ID NO: 5612865 - DNA, 25 bp, Homo sapien
ataagtcaggtgaggattattgatc

SEQ ID NO: 5612866 - DNA, 25 bp, Homo sapien
ttcaactcgagaagtcatcctgtgt

SEQ ID NO: 5612867 - DNA, 25 bp, Homo sapien
ggagagtgggtatcacatgaaactc

SEQ ID NO: 5612868 - DNA, 25 bp, Homo sapien
acagatgaaaagttagaacctcgcc

SEQ ID NO: 5612869 - DNA, 25 bp, Homo sapien
ttgagagcttgtagtacacagatga

SEQ ID NO: 5612870 - DNA, 25 bp, Homo sapien
tccaatgaagaagtagaaatacata

SEQ ID NO: 5612871 - DNA, 25 bp, Homo sapien
gcaggtggaggaaattaatgcattg

SEQ ID NO: 5612872 - DNA, 25 bp, Homo sapien
aatgttgagttgacaggaaacaaaa

SEQ ID NO: 5612873 - DNA, 25 bp, Homo sapien
aaaataatgacagcacaaaacaaga

SEQ ID NO: 5612874 - DNA, 25 bp, Homo sapien
aagtagacgaagataacaaactaaa

SEQ ID NO: 5612875 - DNA, 25 bp, Homo sapien
aaacaagaagaatgcgagcttctcc

SEQ ID NO: 5612876 - DNA, 25 bp, Homo sapien
gagaaaactaaagtagacgaagata

SEQ ID NO: 5612877 - DNA, 25 bp, Homo sapien
acagaatcttagtccttaatttttc

SEQ ID NO: 5612878 - DNA, 25 bp, Homo sapien
gaaaaattaaggactaagattctgt

SEQ ID NO: 5612879 - DNA, 25 bp, Homo sapien
cagaagcagtccctcagaagatctc

SEQ ID NO: 5612880 - DNA, 25 bp, Homo sapien
taagagtaacaatctaatctagtcc

SEQ ID NO: 5612881 - DNA, 25 bp, Homo sapien
tctagtcctgagaaccatcactgac

SEQ ID NO: 5612882 - DNA, 25 bp, Homo sapien
cttggctattgcatgtacagttcac

SEQ ID NO: 5612883 - DNA, 25 bp, Homo sapien
aatttagtggttctatggcatcttt

SEQ ID NO: 5612884 - DNA, 25 bp, Homo sapien
gtggtatggagagtatatcaatgac

SEQ ID NO: 5612885 - DNA, 25 bp, Homo sapien
actaattcaatcacacaagagggcc

SEQ ID NO: 5612886 - DNA, 25 bp, Homo sapien
gactattattggctgagaggtgaca

SEQ ID NO: 5612887 - DNA, 25 bp, Homo sapien
tttaaatttgtggtatggagagtat

SEQ ID NO: 5612888 - DNA, 25 bp, Homo sapien
ctgggatccagtaatgactaaagtt

SEQ ID NO: 5612889 - DNA, 25 bp, Homo sapien
aagaaaatctctgggatccagtaat

SEQ ID NO: 5612890 - DNA, 25 bp, Homo sapien
actcgaaaggtgagaaattcaagtc

SEQ ID NO: 5612891 - DNA, 25 bp, Homo sapien
aattacaccagcagtcaaggtagca

SEQ ID NO: 5612892 - DNA, 25 bp, Homo sapien
gagcatacaggtattacgctgggtc

SEQ ID NO: 5612893 - DNA, 25 bp, Homo sapien
gttggcaagaaaactctgtgactcc

SEQ ID NO: 5612894 - DNA, 25 bp, Homo sapien
ttcgcagatgataatacaggatgga

SEQ ID NO: 5612895 - DNA, 25 bp, Homo sapien
caaataagtgagtccaaatggcagg

SEQ ID NO: 5612896 - DNA, 25 bp, Homo sapien
gtgactccatgagatgggaaattac

SEQ ID NO: 5612897 - DNA, 25 bp, Homo sapien
aaaggaaaaacggtattcgcagatg

SEQ ID NO: 5612898 - DNA, 25 bp, Homo sapien
tccaaatggcaggtaactcgaaagg

SEQ ID NO: 5612899 - DNA, 25 bp, Homo sapien
acactgaggctactgatcattccca

SEQ ID NO: 5612900 - DNA, 25 bp, Homo sapien
tcaagtcagctttgaaagacacatt

SEQ ID NO: 5612901 - DNA, 25 bp, Homo sapien
caaactgggaaaatgaccgatcatt

SEQ ID NO: 5612902 - DNA, 25 bp, Homo sapien
aatactacaatctcactctccgctt

SEQ ID NO: 5612903 - DNA, 25 bp, Homo sapien
gagtgagagatacctctgaagctgc

SEQ ID NO: 5612904 - DNA, 25 bp, Homo sapien
agaaatactggaaatagcttttgca

SEQ ID NO: 5612905 - DNA, 25 bp, Homo sapien
aaacacgcagtttaagataacagta

SEQ ID NO: 5612906 - DNA, 25 bp, Homo sapien
ttacatatagataaacacgcagttt

SEQ ID NO: 5612907 - DNA, 25 bp, Homo sapien
ccgcttttgctagcgacagggtccc

SEQ ID NO: 5612908 - DNA, 25 bp, Homo sapien
aagataacagtaaaagcgccctaca

SEQ ID NO: 5612909 - DNA, 25 bp, Homo sapien
agcaatatcatatacaggcaatttc

SEQ ID NO: 5612910 - DNA, 25 bp, Homo sapien
taacagtaaaagcgccctacaggga

SEQ ID NO: 5612911 - DNA, 25 bp, Homo sapien
tacacatatattacaaactgggaaa

SEQ ID NO: 5612912 - DNA, 25 bp, Homo sapien
ccaggatagaaaggcactcataaga

SEQ ID NO: 5612913 - DNA, 25 bp, Homo sapien
tgctgaaactgcccttaggacatca

SEQ ID NO: 5612914 - DNA, 25 bp, Homo sapien
gaaagccaaatacataagtgaacac

SEQ ID NO: 5612915 - DNA, 25 bp, Homo sapien
tcataagaccccagctttgcagttc

SEQ ID NO: 5612916 - DNA, 25 bp, Homo sapien
accagtcagagtgcacacaaacggt

SEQ ID NO: 5612917 - DNA, 25 bp, Homo sapien
ttgcagttcaggtttcgctcgggtg

SEQ ID NO: 5612918 - DNA, 25 bp, Homo sapien
ggaaggccacatgcagatatgcttc

SEQ ID NO: 5612919 - DNA, 25 bp, Homo sapien
ttgtctgagtacagagctcagcgat

SEQ ID NO: 5612920 - DNA, 25 bp, Homo sapien
cacaaacggtctcgactcagttcac

SEQ ID NO: 5612921 - DNA, 25 bp, Homo sapien
ggtgcaccgtcagcagaagtttcca

SEQ ID NO: 5612922 - DNA, 25 bp, Homo sapien
tgttttggaaccagtcagagtgcac

SEQ ID NO: 5612923 - DNA, 25 bp, Homo sapien
tatgctaacaaaaagtggacaggat

SEQ ID NO: 5612924 - DNA, 25 bp, Homo sapien
acactatgagtgaaggcacagtaag

SEQ ID NO: 5612925 - DNA, 25 bp, Homo sapien
tatatacagtgaagaccttggcagg

SEQ ID NO: 5612926 - DNA, 25 bp, Homo sapien
gcaccagtgctgtgtacatcctctc

SEQ ID NO: 5612927 - DNA, 25 bp, Homo sapien
gtaaatccaatgaaagtatgctaac

SEQ ID NO: 5612928 - DNA, 25 bp, Homo sapien
ggcacagtaagagtcaaagctccca

SEQ ID NO: 5612929 - DNA, 25 bp, Homo sapien
gtatgcccttgaccaaagagtaatc

SEQ ID NO: 5612930 - DNA, 25 bp, Homo sapien
agaaggatgaaggtgtctagatttt

SEQ ID NO: 5612931 - DNA, 25 bp, Homo sapien
caggatgaaaggaggtttctaatct

SEQ ID NO: 5612932 - DNA, 25 bp, Homo sapien
aatcaagagtttcagaagaacacac

SEQ ID NO: 5612933 - DNA, 25 bp, Homo sapien
cagcagctaagaaggcacactatga

SEQ ID NO: 5612934 - DNA, 25 bp, Homo sapien
ctcttccgacagatgtaagaggcag

SEQ ID NO: 5612935 - DNA, 25 bp, Homo sapien
aatgcatctttgaaaggtaggttac

SEQ ID NO: 5612936 - DNA, 25 bp, Homo sapien
ggaaatgtgagcggtataaattttc

SEQ ID NO: 5612937 - DNA, 25 bp, Homo sapien
ctttgaatagcagcagattttagtc

SEQ ID NO: 5612938 - DNA, 25 bp, Homo sapien
aagaatagaagatataaaagttcac

SEQ ID NO: 5612939 - DNA, 25 bp, Homo sapien
aaatagggcaatagaaaaataagaa

SEQ ID NO: 5612940 - DNA, 25 bp, Homo sapien
ctcatcacaggaattcttggaaccc

SEQ ID NO: 5612941 - DNA, 25 bp, Homo sapien
ttagtctaaaacagaaaagatacaa

SEQ ID NO: 5612942 - DNA, 25 bp, Homo sapien
taagaggcagtataaacatctttgt

SEQ ID NO: 5612943 - DNA, 25 bp, Homo sapien
gtatgtgtcagtatgtatttgtgtg

SEQ ID NO: 5612944 - DNA, 25 bp, Homo sapien
ctgataccaaaaagactaccatatt

SEQ ID NO: 5612945 - DNA, 25 bp, Homo sapien
tattagggctcagaaaatgataccc

SEQ ID NO: 5612946 - DNA, 25 bp, Homo sapien
agaacaaggttgacagatggtactt

SEQ ID NO: 5612947 - DNA, 25 bp, Homo sapien
gagaattttgaaaggagttagaaga

SEQ ID NO: 5612948 - DNA, 25 bp, Homo sapien
tttccttggagtcacacaaaattac

SEQ ID NO: 5612949 - DNA, 25 bp, Homo sapien
tgagcaaatcaacttctggcaggca

SEQ ID NO: 5612950 - DNA, 25 bp, Homo sapien
ccacatctctagggtcctgcctctc

SEQ ID NO: 5612951 - DNA, 25 bp, Homo sapien
aagctgacctggttgccatcttgag

SEQ ID NO: 5612952 - DNA, 25 bp, Homo sapien
cgtttctgtcctgccccctagttcc

SEQ ID NO: 5612953 - DNA, 25 bp, Homo sapien
tgagaccagacttaaatccccaaaa

SEQ ID NO: 5612954 - DNA, 25 bp, Homo sapien
ctaaagtcccctacagaatccagaa

SEQ ID NO: 5612955 - DNA, 25 bp, Homo sapien
aagtatcagtgaacaggtaattttt

SEQ ID NO: 5612956 - DNA, 25 bp, Homo sapien
cgcgggccggacacagccccacgcg

SEQ ID NO: 5612957 - DNA, 25 bp, Homo sapien
cgcgtggggctgtgtccggcccgcg

SEQ ID NO: 5612958 - DNA, 25 bp, Homo sapien
ggccggacacagccccacgcgactg

SEQ ID NO: 5612959 - DNA, 25 bp, Homo sapien
cagtcgcgtggggctgtgtccggcc

SEQ ID NO: 5612960 - DNA, 25 bp, Homo sapien
atttgaggattaatagtgggagaat

SEQ ID NO: 5612961 - DNA, 25 bp, Homo sapien
gcagtaaaagaacagacaaaaatca

SEQ ID NO: 5612962 - DNA, 25 bp, Homo sapien
gatttgaggattaatagtgggagaa

SEQ ID NO: 5612963 - DNA, 25 bp, Homo sapien
cagacaaaaatcactatattccaac

SEQ ID NO: 5612964 - DNA, 25 bp, Homo sapien
tagatttgaggattaatagtgggag

SEQ ID NO: 5612965 - DNA, 25 bp, Homo sapien
aattagatttgaggattaatagtgg

SEQ ID NO: 5612966 - DNA, 25 bp, Homo sapien
atagtgggagaattaaaattttgac

SEQ ID NO: 5612967 - DNA, 25 bp, Homo sapien
gaaattaaattagatttgaggatta

SEQ ID NO: 5612968 - DNA, 25 bp, Homo sapien
ttgaggattaatagtgggagaatta

SEQ ID NO: 5612969 - DNA, 25 bp, Homo sapien
ttagatttgaggattaatagtggga

SEQ ID NO: 5612970 - DNA, 25 bp, Homo sapien
gtaaaagaacagacaaaaatcacta

SEQ ID NO: 5612971 - DNA, 25 bp, Homo sapien
attctgaactgcatggattacagcc

SEQ ID NO: 5612972 - DNA, 25 bp, Homo sapien
ccactgccaaggcaaccgatggaga

SEQ ID NO: 5612973 - DNA, 25 bp, Homo sapien
gaactgcatggattacagccactgc

SEQ ID NO: 5612974 - DNA, 25 bp, Homo sapien
tcccatttgcaagggttgtttgtct

SEQ ID NO: 5612975 - DNA, 25 bp, Homo sapien
gagacgcagtaagcgagctagttat

SEQ ID NO: 5612976 - DNA, 25 bp, Homo sapien
tggattacagccactgccaaggcaa

SEQ ID NO: 5612977 - DNA, 25 bp, Homo sapien
cttgttcaaaggacaatgggtgtag

SEQ ID NO: 5612978 - DNA, 25 bp, Homo sapien
acagccactgccaaggcaaccgatg

SEQ ID NO: 5612979 - DNA, 25 bp, Homo sapien
ttgcaagggttgtttgtcttgttca

SEQ ID NO: 5612980 - DNA, 25 bp, Homo sapien
accgcccagatgcagtttcgccttt

SEQ ID NO: 5612981 - DNA, 25 bp, Homo sapien
agcgagctagttatgtatcaaatcc

SEQ ID NO: 5612982 - DNA, 25 bp, Homo sapien
tcacggaagttgcaagaaaccatat

SEQ ID NO: 5612983 - DNA, 25 bp, Homo sapien
atctgggaaaacgcttctactcatc

SEQ ID NO: 5612984 - DNA, 25 bp, Homo sapien
gagattgctccaagcatgttttcaa

SEQ ID NO: 5612985 - DNA, 25 bp, Homo sapien
aattgactcacagcttcaaaaatct

SEQ ID NO: 5612986 - DNA, 25 bp, Homo sapien
ccttttgatgatagcaagtgaaaag

SEQ ID NO: 5612987 - DNA, 25 bp, Homo sapien
gtcatactttggtcacggaagttgc

SEQ ID NO: 5612988 - DNA, 25 bp, Homo sapien
caagaaaccatatttgcaaacgttt

SEQ ID NO: 5612989 - DNA, 25 bp, Homo sapien
ctactcatcaagagtggaattcctt

SEQ ID NO: 5612990 - DNA, 25 bp, Homo sapien
ctttggtcacggaagttgcaagaaa

SEQ ID NO: 5612991 - DNA, 25 bp, Homo sapien
ttacatctgggaaaacgcttctact

SEQ ID NO: 5612992 - DNA, 25 bp, Homo sapien
ttcacatattagccacagatttcta

SEQ ID NO: 5612993 - DNA, 25 bp, Homo sapien
gacagacacctgccataatgaatac

SEQ ID NO: 5612994 - DNA, 25 bp, Homo sapien
aatgcttttggttattctgatggaa

SEQ ID NO: 5612995 - DNA, 25 bp, Homo sapien
tacagacagacacctgccataatga

SEQ ID NO: 5612996 - DNA, 25 bp, Homo sapien
gtttctggagtctagatggatggag

SEQ ID NO: 5612997 - DNA, 25 bp, Homo sapien
aaaaataaacctgctaacacgctat

SEQ ID NO: 5612998 - DNA, 25 bp, Homo sapien
ctaacacgctatatgacatagagat

SEQ ID NO: 5612999 - DNA, 25 bp, Homo sapien
ggttattctgatggaaacaaagaga

SEQ ID NO: 5613000 - DNA, 25 bp, Homo sapien
tttgtttctggagtctagatggatg

SEQ ID NO: 5613001 - DNA, 25 bp, Homo sapien
cacctgtgctcaggtggtggtcagg

SEQ ID NO: 5613002 - DNA, 25 bp, Homo sapien
cctgccataatgaatactctcccca

SEQ ID NO: 5613003 - DNA, 25 bp, Homo sapien
aggacacgggacttcttgtggtata

SEQ ID NO: 5613004 - DNA, 25 bp, Homo sapien
taaaaggtctgaacaccctgacacc

SEQ ID NO: 5613005 - DNA, 25 bp, Homo sapien
gtgtgtgccactgtaccctgctaag

SEQ ID NO: 5613006 - DNA, 25 bp, Homo sapien
ctgttctgatagagctgtccctgac

SEQ ID NO: 5613007 - DNA, 25 bp, Homo sapien
ccctgacaccaagaaatgggagaga

SEQ ID NO: 5613008 - DNA, 25 bp, Homo sapien
cctatgtcgctgtagatggcagagg

SEQ ID NO: 5613009 - DNA, 25 bp, Homo sapien
ggggaacagacccaacctatgtcgc

SEQ ID NO: 5613010 - DNA, 25 bp, Homo sapien
tgtccctgacaggcatctgctcaca

SEQ ID NO: 5613011 - DNA, 25 bp, Homo sapien
tgctaaggcactgggttttaaaagc

SEQ ID NO: 5613012 - DNA, 25 bp, Homo sapien
tgagagaacatcacggctcactggg

SEQ ID NO: 5613013 - DNA, 25 bp, Homo sapien
gggctggactcggtctgttctgata

SEQ ID NO: 5613014 - DNA, 25 bp, Homo sapien
aggctagacaggaactcctgcaatc

SEQ ID NO: 5613015 - DNA, 25 bp, Homo sapien
tatgatgtggccctcacaggttttt

SEQ ID NO: 5613016 - DNA, 25 bp, Homo sapien
tgcatagttgccatcagtaaaggac

SEQ ID NO: 5613017 - DNA, 25 bp, Homo sapien
catacgtacggttatgatgtggccc

SEQ ID NO: 5613018 - DNA, 25 bp, Homo sapien
tattataatcatgtgtggatcttac

SEQ ID NO: 5613019 - DNA, 25 bp, Homo sapien
tttgagttgtgtgctctttgcatac

SEQ ID NO: 5613020 - DNA, 25 bp, Homo sapien
tgtttaaatggaagataaaattgat

SEQ ID NO: 5613021 - DNA, 25 bp, Homo sapien
tgccatcagtaaaggacagaaattt

SEQ ID NO: 5613022 - DNA, 25 bp, Homo sapien
gtgctctttgcatacgtacggttat

SEQ ID NO: 5613023 - DNA, 25 bp, Homo sapien
tagttgccatcagtaaaggacagaa

SEQ ID NO: 5613024 - DNA, 25 bp, Homo sapien
cagtaaaggacagaaatttgcaata

SEQ ID NO: 5613025 - DNA, 25 bp, Homo sapien
gtacggttatgatgtggccctcaca

SEQ ID NO: 5613026 - DNA, 25 bp, Homo sapien
agcatggaagctacatcagcttatt

SEQ ID NO: 5613027 - DNA, 25 bp, Homo sapien
atttaatctcggcaagaaaaaagta

SEQ ID NO: 5613028 - DNA, 25 bp, Homo sapien
tatgtgaagccaaagccaatgaagg

SEQ ID NO: 5613029 - DNA, 25 bp, Homo sapien
gggcatagtgttaagcatggaagct

SEQ ID NO: 5613030 - DNA, 25 bp, Homo sapien
actaggatcagaaccaaagcgtatg

SEQ ID NO: 5613031 - DNA, 25 bp, Homo sapien
gtaaactcacagtagaactaggatc

SEQ ID NO: 5613032 - DNA, 25 bp, Homo sapien
caaaatgaaactaaagctgagggaa

SEQ ID NO: 5613033 - DNA, 25 bp, Homo sapien
gaaccaaagcgtatgtgaagccaaa

SEQ ID NO: 5613034 - DNA, 25 bp, Homo sapien
attatacgtatgaggtacaaaaata

SEQ ID NO: 5613035 - DNA, 25 bp, Homo sapien
aaagctgagggaagtaatttgctca

SEQ ID NO: 5613036 - DNA, 25 bp, Homo sapien
gtaatttgctcataggtagtggata

SEQ ID NO: 5613037 - DNA, 25 bp, Homo sapien
cagactaaacataggcagcagttgt

SEQ ID NO: 5613038 - DNA, 25 bp, Homo sapien
ggcttcgagtggcttacagaaatcc

SEQ ID NO: 5613039 - DNA, 25 bp, Homo sapien
ggtagagctcctggacagactaaac

SEQ ID NO: 5613040 - DNA, 25 bp, Homo sapien
cagcagttgtcacagtgggtgttct

SEQ ID NO: 5613041 - DNA, 25 bp, Homo sapien
tgcatgaagtggacatatatggagc

SEQ ID NO: 5613042 - DNA, 25 bp, Homo sapien
gagaagagaaactcagaaagatcta

SEQ ID NO: 5613043 - DNA, 25 bp, Homo sapien
ggaatgggattgtagacatgcatga

SEQ ID NO: 5613044 - DNA, 25 bp, Homo sapien
gtaaattgaggctactgcaggatac

SEQ ID NO: 5613045 - DNA, 25 bp, Homo sapien
gcaaacatgctagttggtagagctc

SEQ ID NO: 5613046 - DNA, 25 bp, Homo sapien
gactctggacaagcgaactcttctc

SEQ ID NO: 5613047 - DNA, 25 bp, Homo sapien
gagcattactgatccggggagaatt

SEQ ID NO: 5613048 - DNA, 25 bp, Homo sapien
caggggctctagccctcctccggcc

SEQ ID NO: 5613049 - DNA, 25 bp, Homo sapien
gcccaggggctctagccctcctccg

SEQ ID NO: 5613050 - DNA, 25 bp, Homo sapien
ttcgggctgcccggatttctattgc

SEQ ID NO: 5613051 - DNA, 25 bp, Homo sapien
tcgggctgcccggatttctattgca

SEQ ID NO: 5613052 - DNA, 25 bp, Homo sapien
ccaggggctctagccctcctccggc

SEQ ID NO: 5613053 - DNA, 25 bp, Homo sapien
acatctccctccgccccggtgggtg

SEQ ID NO: 5613054 - DNA, 25 bp, Homo sapien
cggatttctattgcagtcccatctc

SEQ ID NO: 5613055 - DNA, 25 bp, Homo sapien
gcgacatctccctccgccccggtgg

SEQ ID NO: 5613056 - DNA, 25 bp, Homo sapien
ccccgggcgacatctccctccgccc

SEQ ID NO: 5613057 - DNA, 25 bp, Homo sapien
gcctcttcgggctgcccggatttct

SEQ ID NO: 5613058 - DNA, 25 bp, Homo sapien
ccgggcgacatctccctccgccccg

SEQ ID NO: 5613059 - DNA, 25 bp, Homo sapien
cagcacattgccacaggttagagaa

SEQ ID NO: 5613060 - DNA, 25 bp, Homo sapien
aatgcataagtgagaactaacatct

SEQ ID NO: 5613061 - DNA, 25 bp, Homo sapien
caaatgaagtgttccacagaaagaa

SEQ ID NO: 5613062 - DNA, 25 bp, Homo sapien
actaacacttccagcaaaaggtctt

SEQ ID NO: 5613063 - DNA, 25 bp, Homo sapien
aaagaaagagcatacaggtacactt

SEQ ID NO: 5613064 - DNA, 25 bp, Homo sapien
tagataagcaagaactaacacttcc

SEQ ID NO: 5613065 - DNA, 25 bp, Homo sapien
aataactgaaattcttggcaaagat

SEQ ID NO: 5613066 - DNA, 25 bp, Homo sapien
caaaactcagcagagcaggagttca

SEQ ID NO: 5613067 - DNA, 25 bp, Homo sapien
aaaaattggacactacaaatgaagt

SEQ ID NO: 5613068 - DNA, 25 bp, Homo sapien
cgggctgactacagcacattgccac

SEQ ID NO: 5613069 - DNA, 25 bp, Homo sapien
tgggtaaaccataagtgataataac

SEQ ID NO: 5613070 - DNA, 25 bp, Homo sapien
cttaagtatattcagaggaagagaa

SEQ ID NO: 5613071 - DNA, 25 bp, Homo sapien
aaaaagccccagaataaggagatat

SEQ ID NO: 5613072 - DNA, 25 bp, Homo sapien
cccaacatataaaggggcaaaagtc

SEQ ID NO: 5613073 - DNA, 25 bp, Homo sapien
tgattaatatatgagaagcttgtgc

SEQ ID NO: 5613074 - DNA, 25 bp, Homo sapien
caaaagtcatccacaggcccattac

SEQ ID NO: 5613075 - DNA, 25 bp, Homo sapien
tatagaacagacctgaagaaaaatg

SEQ ID NO: 5613076 - DNA, 25 bp, Homo sapien
aggaagagaaaggttcaatacatga

SEQ ID NO: 5613077 - DNA, 25 bp, Homo sapien
taaaggacccatgcagaaaatgaga

SEQ ID NO: 5613078 - DNA, 25 bp, Homo sapien
agaaaaatgacaatgtaaaggaccc

SEQ ID NO: 5613079 - DNA, 25 bp, Homo sapien
cctaagagttaacagctattcaatc

SEQ ID NO: 5613080 - DNA, 25 bp, Homo sapien
ttgtgcaagcatatgataatcagaa

SEQ ID NO: 5613081 - DNA, 25 bp, Homo sapien
cttagaagtgctcattccctcacac

SEQ ID NO: 5613082 - DNA, 25 bp, Homo sapien
gtcagagggtatatacaggttggta

SEQ ID NO: 5613083 - DNA, 25 bp, Homo sapien
agatgcaaccagtttacacgctatc

SEQ ID NO: 5613084 - DNA, 25 bp, Homo sapien
gcgtggccagttgcagtctcatgcc

SEQ ID NO: 5613085 - DNA, 25 bp, Homo sapien
taagaactccaaatagatgcaacca

SEQ ID NO: 5613086 - DNA, 25 bp, Homo sapien
aggttggtagctttcactgacttag

SEQ ID NO: 5613087 - DNA, 25 bp, Homo sapien
attcatcaaagagtttcatcgttct

SEQ ID NO: 5613088 - DNA, 25 bp, Homo sapien
ttcagctcagctaatcttccatctt

SEQ ID NO: 5613089 - DNA, 25 bp, Homo sapien
gaggaggatgccctgagtattattt

SEQ ID NO: 5613090 - DNA, 25 bp, Homo sapien
aggacaatgagaatttctttggtct

SEQ ID NO: 5613091 - DNA, 25 bp, Homo sapien
ctatcaatagtaagttcagctcagc

SEQ ID NO: 5613092 - DNA, 25 bp, Homo sapien
caagctgaaccaatgaaagaacttc

SEQ ID NO: 5613093 - DNA, 25 bp, Homo sapien
tccatagggtatggatggtgataag

SEQ ID NO: 5613094 - DNA, 25 bp, Homo sapien
tgataagggatggttaaccacccta

SEQ ID NO: 5613095 - DNA, 25 bp, Homo sapien
cagaccccactgattggaccaggaa

SEQ ID NO: 5613096 - DNA, 25 bp, Homo sapien
ggaggtgggtacaccattcacaccc

SEQ ID NO: 5613097 - DNA, 25 bp, Homo sapien
tgcatccccattagggaggtgggta

SEQ ID NO: 5613098 - DNA, 25 bp, Homo sapien
ggaccaggaataatccaagctgaac

SEQ ID NO: 5613099 - DNA, 25 bp, Homo sapien
aggtaaaacgacatagcagacattc

SEQ ID NO: 5613100 - DNA, 25 bp, Homo sapien
gttataatgaaaagctgaaaggaca

SEQ ID NO: 5613101 - DNA, 25 bp, Homo sapien
gacaaacacataaggcctggaagaa

SEQ ID NO: 5613102 - DNA, 25 bp, Homo sapien
attgttaaaagagtggctaaaatat

SEQ ID NO: 5613103 - DNA, 25 bp, Homo sapien
tgaagcaaagccaagttcctgtccc

SEQ ID NO: 5613104 - DNA, 25 bp, Homo sapien
gctcttctgagaatgggaaaatgag

SEQ ID NO: 5613105 - DNA, 25 bp, Homo sapien
caaagctacagaagagaacgttctt

SEQ ID NO: 5613106 - DNA, 25 bp, Homo sapien
gacttcagctgtgtagcaggcaaag

SEQ ID NO: 5613107 - DNA, 25 bp, Homo sapien
gggatgaggagttctccatggtgac

SEQ ID NO: 5613108 - DNA, 25 bp, Homo sapien
gaagtgcagtttatgtggtcaggtt

SEQ ID NO: 5613109 - DNA, 25 bp, Homo sapien
cgttcttgaaagactgctgggtgtt

SEQ ID NO: 5613110 - DNA, 25 bp, Homo sapien
aatgaggacttaactgaactgccca

SEQ ID NO: 5613111 - DNA, 25 bp, Homo sapien
ccatggtgaccctgagtcaagcttc

SEQ ID NO: 5613112 - DNA, 25 bp, Homo sapien
gtatcaagctcagtggttggtgaag

SEQ ID NO: 5613113 - DNA, 25 bp, Homo sapien
catgccaagcaaacaagttaacccc

SEQ ID NO: 5613114 - DNA, 25 bp, Homo sapien
ctccagagtagcaggcactatatca

SEQ ID NO: 5613115 - DNA, 25 bp, Homo sapien
cactgggctagtagacacttcacat

SEQ ID NO: 5613116 - DNA, 25 bp, Homo sapien
ttacagataggaactaaggaataat

SEQ ID NO: 5613117 - DNA, 25 bp, Homo sapien
tttagagacatggtcccgctttgtt

SEQ ID NO: 5613118 - DNA, 25 bp, Homo sapien
atgaacaaagctttagagagagaaa

SEQ ID NO: 5613119 - DNA, 25 bp, Homo sapien
tccaccagatacaatgaacaaagct

SEQ ID NO: 5613120 - DNA, 25 bp, Homo sapien
cacattagaagcatggctaggtgtc

SEQ ID NO: 5613121 - DNA, 25 bp, Homo sapien
aatgctgagatttcaagcgtgagtc

SEQ ID NO: 5613122 - DNA, 25 bp, Homo sapien
aaaatagagaccactgggctagtag

SEQ ID NO: 5613123 - DNA, 25 bp, Homo sapien
caagcgtgagtcatcatgtctggtc

SEQ ID NO: 5613124 - DNA, 25 bp, Homo sapien
atgattaaaaggtaaggcaccaggt

SEQ ID NO: 5613125 - DNA, 25 bp, Homo sapien
caaccattcttggccacacggggta

SEQ ID NO: 5613126 - DNA, 25 bp, Homo sapien
caagcctagcttggttacagttagc

SEQ ID NO: 5613127 - DNA, 25 bp, Homo sapien
aactggcgccaccctaagacatctt

SEQ ID NO: 5613128 - DNA, 25 bp, Homo sapien
cctgattaccacactccaccctccc

SEQ ID NO: 5613129 - DNA, 25 bp, Homo sapien
cgcctgcctgttcctgaaacgggga

SEQ ID NO: 5613130 - DNA, 25 bp, Homo sapien
cccgctgcaccacgcaaccattctt

SEQ ID NO: 5613131 - DNA, 25 bp, Homo sapien
accactagggatgccaccctcaacc

SEQ ID NO: 5613132 - DNA, 25 bp, Homo sapien
ggctcttctctccaggctcgcctgc

SEQ ID NO: 5613133 - DNA, 25 bp, Homo sapien
ctcaaccccccttctcgacttctcc

SEQ ID NO: 5613134 - DNA, 25 bp, Homo sapien
aagacatcttgaaatccaccactag

SEQ ID NO: 5613135 - DNA, 25 bp, Homo sapien
tacagttagctgtaaccccttccac

SEQ ID NO: 5613136 - DNA, 25 bp, Homo sapien
aacactgagcaccgactccgtacca

SEQ ID NO: 5613137 - DNA, 25 bp, Homo sapien
gcaaacactgagcaccgactccgta

SEQ ID NO: 5613138 - DNA, 25 bp, Homo sapien
cctgtcagcaatgaaaggacccaga

SEQ ID NO: 5613139 - DNA, 25 bp, Homo sapien
cacagcctgtcagcaatgaaaggac

SEQ ID NO: 5613140 - DNA, 25 bp, Homo sapien
gccatcacagcctgtcagcaatgaa

SEQ ID NO: 5613141 - DNA, 25 bp, Homo sapien
cacggaacaaagccacctcctggaa

SEQ ID NO: 5613142 - DNA, 25 bp, Homo sapien
cggaacaaagccacctcctggaagg

SEQ ID NO: 5613143 - DNA, 25 bp, Homo sapien
gcacctcacccaccctgcccaaggc

SEQ ID NO: 5613144 - DNA, 25 bp, Homo sapien
actgagcaccgactccgtaccagac

SEQ ID NO: 5613145 - DNA, 25 bp, Homo sapien
tttgcaaacactgagcaccgactcc

SEQ ID NO: 5613146 - DNA, 25 bp, Homo sapien
gcaccgactccgtaccagacctggt

SEQ ID NO: 5613147 - DNA, 25 bp, Homo sapien
tcagctggaataactggtatggctc

SEQ ID NO: 5613148 - DNA, 25 bp, Homo sapien
ggctcctcacccccgagtagggcaa

SEQ ID NO: 5613149 - DNA, 25 bp, Homo sapien
ccagtacgaatgacagggattatat

SEQ ID NO: 5613150 - DNA, 25 bp, Homo sapien
cgagtagggcaatttgagattcttc

SEQ ID NO: 5613151 - DNA, 25 bp, Homo sapien
actggtatggctcttctgggctagg

SEQ ID NO: 5613152 - DNA, 25 bp, Homo sapien
agggtaagcttcaaggcaggctttg

SEQ ID NO: 5613153 - DNA, 25 bp, Homo sapien
catgtggtggctcctcacccccgag

SEQ ID NO: 5613154 - DNA, 25 bp, Homo sapien
cttcaggtttgcaaagagcagcaag

SEQ ID NO: 5613155 - DNA, 25 bp, Homo sapien
tgacaattggcaggctacttggtct

SEQ ID NO: 5613156 - DNA, 25 bp, Homo sapien
atgacagggattatatttgggtgtt

SEQ ID NO: 5613157 - DNA, 25 bp, Homo sapien
actatgtcatggaaaccagtacgaa

SEQ ID NO: 5613158 - DNA, 25 bp, Homo sapien
aaaaagattttgacaagcctctctc

SEQ ID NO: 5613159 - DNA, 25 bp, Homo sapien
tatgtgaaaaccccaaatgcttgtc

SEQ ID NO: 5613160 - DNA, 25 bp, Homo sapien
ttccgaagcgatgatctttattgaa

SEQ ID NO: 5613161 - DNA, 25 bp, Homo sapien
ggaatatgctcaccagagtgggtat

SEQ ID NO: 5613162 - DNA, 25 bp, Homo sapien
tgcacagaatattacccagctcacc

SEQ ID NO: 5613163 - DNA, 25 bp, Homo sapien
tagttaagccatcttgagttgacat

SEQ ID NO: 5613164 - DNA, 25 bp, Homo sapien
ttcatttaggagccgtgcacagaat

SEQ ID NO: 5613165 - DNA, 25 bp, Homo sapien
ccagctcaccaaatccaagatgaac

SEQ ID NO: 5613166 - DNA, 25 bp, Homo sapien
taatggtttgacttgacaactctac

SEQ ID NO: 5613167 - DNA, 25 bp, Homo sapien
attgaaatggaatatgctcaccaga

SEQ ID NO: 5613168 - DNA, 25 bp, Homo sapien
ggaaggagattatgtgaaaacccca

SEQ ID NO: 5613169 - DNA, 25 bp, Homo sapien
tctcgaacccagtcttgcttttgca

SEQ ID NO: 5613170 - DNA, 25 bp, Homo sapien
ctaatttctgcctgatatgctgttg

SEQ ID NO: 5613171 - DNA, 25 bp, Homo sapien
cctgatatgctgttggctcttggat

SEQ ID NO: 5613172 - DNA, 25 bp, Homo sapien
ggctcttggatccctggccaggaca

SEQ ID NO: 5613173 - DNA, 25 bp, Homo sapien
gatatgctgttggctcttggatccc

SEQ ID NO: 5613174 - DNA, 25 bp, Homo sapien
gagaagaggtcaagccttaccaagg

SEQ ID NO: 5613175 - DNA, 25 bp, Homo sapien
gtcaagccttaccaagggcacagag

SEQ ID NO: 5613176 - DNA, 25 bp, Homo sapien
gaggtcaagccttaccaagggcaca

SEQ ID NO: 5613177 - DNA, 25 bp, Homo sapien
gctgctctcgaacccagtcttgctt

SEQ ID NO: 5613178 - DNA, 25 bp, Homo sapien
tttctgcctgatatgctgttggctc

SEQ ID NO: 5613179 - DNA, 25 bp, Homo sapien
tgctgttggctcttggatccctggc

SEQ ID NO: 5613180 - DNA, 25 bp, Homo sapien
tcacagccaatggcagatacaggtg

SEQ ID NO: 5613181 - DNA, 25 bp, Homo sapien
agatacaggtgcaataagtaatttc

SEQ ID NO: 5613182 - DNA, 25 bp, Homo sapien
tggtacttattcacttgggagattt

SEQ ID NO: 5613183 - DNA, 25 bp, Homo sapien
tttcctcctaggggatagaagataa

SEQ ID NO: 5613184 - DNA, 25 bp, Homo sapien
atctgggaatttgcccccaactttc

SEQ ID NO: 5613185 - DNA, 25 bp, Homo sapien
ggggatagaagataatcagacactt

SEQ ID NO: 5613186 - DNA, 25 bp, Homo sapien
gtagttacagcaacatggaccactc

SEQ ID NO: 5613187 - DNA, 25 bp, Homo sapien
aagagaataaacaactgcacctttc

SEQ ID NO: 5613188 - DNA, 25 bp, Homo sapien
cagcataagcactcatagtagtagt

SEQ ID NO: 5613189 - DNA, 25 bp, Homo sapien
cttgggagattttggtgatagtaaa

SEQ ID NO: 5613190 - DNA, 25 bp, Homo sapien
ataatcagacacttagcaaagatgc

SEQ ID NO: 5613191 - DNA, 25 bp, Homo sapien
acacgcccagctcacctgatattct

SEQ ID NO: 5613192 - DNA, 25 bp, Homo sapien
ggcctagtgtccccacacccgcttg

SEQ ID NO: 5613193 - DNA, 25 bp, Homo sapien
gctggagcaccgcagtgcttctgaa

SEQ ID NO: 5613194 - DNA, 25 bp, Homo sapien
acagaggccaatcagttgtcaagct

SEQ ID NO: 5613195 - DNA, 25 bp, Homo sapien
cccacacccgcttgggtgacagagg

SEQ ID NO: 5613196 - DNA, 25 bp, Homo sapien
gggagatatctgcatccaggagctg

SEQ ID NO: 5613197 - DNA, 25 bp, Homo sapien
caccgcagtgcttctgaacgcctct

SEQ ID NO: 5613198 - DNA, 25 bp, Homo sapien
gcctcttccagtggcacctgcgggc

SEQ ID NO: 5613199 - DNA, 25 bp, Homo sapien
gcttatgacttccaatcagagtggt

SEQ ID NO: 5613200 - DNA, 25 bp, Homo sapien
gtgactggttgcagaacacaagtcc

SEQ ID NO: 5613201 - DNA, 25 bp, Homo sapien
agcaatttgcagctagcggcactgg

SEQ ID NO: 5613202 - DNA, 25 bp, Homo sapien
aatggacatgatcttacaaatacac

SEQ ID NO: 5613203 - DNA, 25 bp, Homo sapien
actaagaggatagaaaattgttttc

SEQ ID NO: 5613204 - DNA, 25 bp, Homo sapien
ttcaactaagaggatagaaaattgt

SEQ ID NO: 5613205 - DNA, 25 bp, Homo sapien
tataatgtgaaagacaacagtgact

SEQ ID NO: 5613206 - DNA, 25 bp, Homo sapien
ctcagaatgtagattctagctaagc

SEQ ID NO: 5613207 - DNA, 25 bp, Homo sapien
acaatgtagcttaccaatgttaggc

SEQ ID NO: 5613208 - DNA, 25 bp, Homo sapien
atctataagagtataatgcagatgt

SEQ ID NO: 5613209 - DNA, 25 bp, Homo sapien
atcatttgtagaatcctcagcattt

SEQ ID NO: 5613210 - DNA, 25 bp, Homo sapien
aagtatccaaactgtacctacattc

SEQ ID NO: 5613211 - DNA, 25 bp, Homo sapien
tctagctaagcattaaagtttaaaa

SEQ ID NO: 5613212 - DNA, 25 bp, Homo sapien
agaaatctggtgacactttaattac

SEQ ID NO: 5613213 - DNA, 25 bp, Homo sapien
ggcataatccaagggccaactccca

SEQ ID NO: 5613214 - DNA, 25 bp, Homo sapien
tcaaggactccaggaagtcttccct

SEQ ID NO: 5613215 - DNA, 25 bp, Homo sapien
tgttaacgttggtgcagatactgct

SEQ ID NO: 5613216 - DNA, 25 bp, Homo sapien
tcagcttggagtcacttgtctggac

SEQ ID NO: 5613217 - DNA, 25 bp, Homo sapien
taaaagcacctgtctgtctgttaac

SEQ ID NO: 5613218 - DNA, 25 bp, Homo sapien
cattgctgatggttactgagggtat

SEQ ID NO: 5613219 - DNA, 25 bp, Homo sapien
caggcacgtaatattgtcaaattcc

SEQ ID NO: 5613220 - DNA, 25 bp, Homo sapien
gtttgctcaaggtcaagttatgcct

SEQ ID NO: 5613221 - DNA, 25 bp, Homo sapien
gggccgactagtccagctgttcaca

SEQ ID NO: 5613222 - DNA, 25 bp, Homo sapien
actcccatgtttggaacctgactcc

SEQ ID NO: 5613223 - DNA, 25 bp, Homo sapien
tcttgtaggttaggtcaaggactcc

SEQ ID NO: 5613224 - DNA, 25 bp, Homo sapien
ctctttggggccttttatagatttg

SEQ ID NO: 5613225 - DNA, 25 bp, Homo sapien
tagatttggtttgcctctgggtttc

SEQ ID NO: 5613226 - DNA, 25 bp, Homo sapien
attagaaaggcgtattctttgtttc

SEQ ID NO: 5613227 - DNA, 25 bp, Homo sapien
tctctggcttaataatgatagcatg

SEQ ID NO: 5613228 - DNA, 25 bp, Homo sapien
tagtcatatgtttactctctggctt

SEQ ID NO: 5613229 - DNA, 25 bp, Homo sapien
taaatagctggtgattatagttttc

SEQ ID NO: 5613230 - DNA, 25 bp, Homo sapien
acaactttgaaaatattggggaata

SEQ ID NO: 5613231 - DNA, 25 bp, Homo sapien
tgttgcattttggacaaaagttctc

SEQ ID NO: 5613232 - DNA, 25 bp, Homo sapien
cttaataatgatagcatgtgggggc

SEQ ID NO: 5613233 - DNA, 25 bp, Homo sapien
aatatacattagaaaggcgtattct

SEQ ID NO: 5613234 - DNA, 25 bp, Homo sapien
tgtttctagggaacaaaattcaata

SEQ ID NO: 5613235 - DNA, 25 bp, Homo sapien
tgcatttctgcctgtatagttctct

SEQ ID NO: 5613236 - DNA, 25 bp, Homo sapien
aaggatttgtacgggataaagtctg

SEQ ID NO: 5613237 - DNA, 25 bp, Homo sapien
atcagagaaaaattcagtgtgcaat

SEQ ID NO: 5613238 - DNA, 25 bp, Homo sapien
aatctctaagtgttcaattggactg

SEQ ID NO: 5613239 - DNA, 25 bp, Homo sapien
agcaaagaaaaatctctaagtgttc

SEQ ID NO: 5613240 - DNA, 25 bp, Homo sapien
gatttgtacgggataaagtctgaac

SEQ ID NO: 5613241 - DNA, 25 bp, Homo sapien
ttcaattggactgaaaaagggcatg

SEQ ID NO: 5613242 - DNA, 25 bp, Homo sapien
gaacccagaagacattagatttatc

SEQ ID NO: 5613243 - DNA, 25 bp, Homo sapien
aagggcatgtgcaaagaaaaatatt

SEQ ID NO: 5613244 - DNA, 25 bp, Homo sapien
aataaatcaacagttctccagtttc

SEQ ID NO: 5613245 - DNA, 25 bp, Homo sapien
ccatttaatgcaagtgaaagcaaag

SEQ ID NO: 5613246 - DNA, 25 bp, Homo sapien
caggaataagcccgaagatgattct

SEQ ID NO: 5613247 - DNA, 25 bp, Homo sapien
gcccgaagatgattctagctccgtt

SEQ ID NO: 5613248 - DNA, 25 bp, Homo sapien
atatggaacaactagcaggaataag

SEQ ID NO: 5613249 - DNA, 25 bp, Homo sapien
gctaagcgacactagactaataacc

SEQ ID NO: 5613250 - DNA, 25 bp, Homo sapien
tatgaactcgcatgaaaaaatgagc

SEQ ID NO: 5613251 - DNA, 25 bp, Homo sapien
tagaaatatggaacaactagcagga

SEQ ID NO: 5613252 - DNA, 25 bp, Homo sapien
ttttaagtaccttgctaagcgacac

SEQ ID NO: 5613253 - DNA, 25 bp, Homo sapien
actttcgaggattttatatgaactc

SEQ ID NO: 5613254 - DNA, 25 bp, Homo sapien
ctgtttttaagaagggcagcacaag

SEQ ID NO: 5613255 - DNA, 25 bp, Homo sapien
aattgaaactggattgcgtattccc

SEQ ID NO: 5613256 - DNA, 25 bp, Homo sapien
agggcagcacaaggatatgtgcaga

SEQ ID NO: 5613257 - DNA, 25 bp, Homo sapien
tacctatggtgcctgccgataatac

SEQ ID NO: 5613258 - DNA, 25 bp, Homo sapien
ctcagaaagggatactaataagctc

SEQ ID NO: 5613259 - DNA, 25 bp, Homo sapien
acgggacaggatttgtgcatcttct

SEQ ID NO: 5613260 - DNA, 25 bp, Homo sapien
taataagctccgctaaggcacggga

SEQ ID NO: 5613261 - DNA, 25 bp, Homo sapien
gttcaactgtaggagaacgagacta

SEQ ID NO: 5613262 - DNA, 25 bp, Homo sapien
aagagacagaactgactcgcccttc

SEQ ID NO: 5613263 - DNA, 25 bp, Homo sapien
cctacatgaggaaataaaaaggctg

SEQ ID NO: 5613264 - DNA, 25 bp, Homo sapien
tggctggaagtataccttaaagatc

SEQ ID NO: 5613265 - DNA, 25 bp, Homo sapien
gtatactattagccagagacacaca

SEQ ID NO: 5613266 - DNA, 25 bp, Homo sapien
gagactaaaaggaatgggctattct

SEQ ID NO: 5613267 - DNA, 25 bp, Homo sapien
catcccactgggtgccctcagaatt

SEQ ID NO: 5613268 - DNA, 25 bp, Homo sapien
cacacttaggcaattctgagatgtc

SEQ ID NO: 5613269 - DNA, 25 bp, Homo sapien
agaagccaccataggtaatgaagca

SEQ ID NO: 5613270 - DNA, 25 bp, Homo sapien
gacaaagaaaacgcagtggctttca

SEQ ID NO: 5613271 - DNA, 25 bp, Homo sapien
tacaaaccttgtccaggccctactc

SEQ ID NO: 5613272 - DNA, 25 bp, Homo sapien
tgagatgtctctgctggaaagtgtc

SEQ ID NO: 5613273 - DNA, 25 bp, Homo sapien
ttattggagaagagatttacatttt

SEQ ID NO: 5613274 - DNA, 25 bp, Homo sapien
ctcactatgggatacagagaagcca

SEQ ID NO: 5613275 - DNA, 25 bp, Homo sapien
acatgctatcgaaagttggcccaaa

SEQ ID NO: 5613276 - DNA, 25 bp, Homo sapien
gaacaataagcaagtagagacaaag

SEQ ID NO: 5613277 - DNA, 25 bp, Homo sapien
tggaagtgtgataggattacaaacc

SEQ ID NO: 5613278 - DNA, 25 bp, Homo sapien
ctggtaatgagtacagctgtagctc

SEQ ID NO: 5613279 - DNA, 25 bp, Homo sapien
tatgagttaacatgatttcactgaa

SEQ ID NO: 5613280 - DNA, 25 bp, Homo sapien
ttggaagatgaaataatgaatatgg

SEQ ID NO: 5613281 - DNA, 25 bp, Homo sapien
aagcagaagtctttagagaaacctc

SEQ ID NO: 5613282 - DNA, 25 bp, Homo sapien
ccatgtagatatgtgcacaaacaac

SEQ ID NO: 5613283 - DNA, 25 bp, Homo sapien
aggcaaaaactctgtagattgtctc

SEQ ID NO: 5613284 - DNA, 25 bp, Homo sapien
tgaaataatgaatatggtctccacc

SEQ ID NO: 5613285 - DNA, 25 bp, Homo sapien
agagataaactaaggccccctctat

SEQ ID NO: 5613286 - DNA, 25 bp, Homo sapien
tacagtttataaataggtgatgatt

SEQ ID NO: 5613287 - DNA, 25 bp, Homo sapien
ctaatttaaatgaagtcagcatatt

SEQ ID NO: 5613288 - DNA, 25 bp, Homo sapien
tggtctccaccatgtagatatgtgc

SEQ ID NO: 5613289 - DNA, 25 bp, Homo sapien
ttcactgaattcccaaagcacactg

SEQ ID NO: 5613290 - DNA, 25 bp, Homo sapien
tgggaacgtctgaaacatggactca

SEQ ID NO: 5613291 - DNA, 25 bp, Homo sapien
taggtagacctgagggtctgttacc

SEQ ID NO: 5613292 - DNA, 25 bp, Homo sapien
aaggcaatgttgttagaaggctcaa

SEQ ID NO: 5613293 - DNA, 25 bp, Homo sapien
ccttgctatcgctggaagcagggag

SEQ ID NO: 5613294 - DNA, 25 bp, Homo sapien
atgaaatgagagcagattccagatt

SEQ ID NO: 5613295 - DNA, 25 bp, Homo sapien
ggaatttcctgggggtcagacataa

SEQ ID NO: 5613296 - DNA, 25 bp, Homo sapien
tgtagtaatcaaagatcgcagcacc

SEQ ID NO: 5613297 - DNA, 25 bp, Homo sapien
gaggcccagaatagaaaacgccatt

SEQ ID NO: 5613298 - DNA, 25 bp, Homo sapien
gattttaccagcggatggaagactc

SEQ ID NO: 5613299 - DNA, 25 bp, Homo sapien
ggggggatataggaatttcagcata

SEQ ID NO: 5613300 - DNA, 25 bp, Homo sapien
gtggaacagttggaaggtacttata

SEQ ID NO: 5613301 - DNA, 25 bp, Homo sapien
agatgttggcacctaatgcacattc

SEQ ID NO: 5613302 - DNA, 25 bp, Homo sapien
catgaagatttgcccctatgttttc

SEQ ID NO: 5613303 - DNA, 25 bp, Homo sapien
gcagctgtgagatagtatctcttta

SEQ ID NO: 5613304 - DNA, 25 bp, Homo sapien
catatttgcccttttgtgaattgcc

SEQ ID NO: 5613305 - DNA, 25 bp, Homo sapien
ccttctgtagtcacttggtattgtc

SEQ ID NO: 5613306 - DNA, 25 bp, Homo sapien
gggaacagagctcgaacatgtatat

SEQ ID NO: 5613307 - DNA, 25 bp, Homo sapien
agtcatagatgttggcacctaatgc

SEQ ID NO: 5613308 - DNA, 25 bp, Homo sapien
ccttcaacagaatctcccaaagtgc

SEQ ID NO: 5613309 - DNA, 25 bp, Homo sapien
cattgtgatttggagtcatagatgt

SEQ ID NO: 5613310 - DNA, 25 bp, Homo sapien
ctgctgtatagtatgcattataaga

SEQ ID NO: 5613311 - DNA, 25 bp, Homo sapien
agtttattagtcagttgcacatttt

SEQ ID NO: 5613312 - DNA, 25 bp, Homo sapien
cagcttccagagccacaagcctgca

SEQ ID NO: 5613313 - DNA, 25 bp, Homo sapien
aggtatctgtaccccagggtcaacc

SEQ ID NO: 5613314 - DNA, 25 bp, Homo sapien
agagccacaagcctgcatttgggag

SEQ ID NO: 5613315 - DNA, 25 bp, Homo sapien
ctgccctcagagccgtcctgctttt

SEQ ID NO: 5613316 - DNA, 25 bp, Homo sapien
aaatggcagcagtgaataatcaatt

SEQ ID NO: 5613317 - DNA, 25 bp, Homo sapien
tttgaccccagtggcagcttccaga

SEQ ID NO: 5613318 - DNA, 25 bp, Homo sapien
agaaaagattgagctggattttgct

SEQ ID NO: 5613319 - DNA, 25 bp, Homo sapien
ctgccagaacctaagatgccatttt

SEQ ID NO: 5613320 - DNA, 25 bp, Homo sapien
ttaatacctgccctcagagccgtcc

SEQ ID NO: 5613321 - DNA, 25 bp, Homo sapien
ataatcaattcatgggttcgcttgc

SEQ ID NO: 5613322 - DNA, 25 bp, Homo sapien
gggtcaaccctgagattggcccaat

SEQ ID NO: 5613323 - DNA, 25 bp, Homo sapien
gcagccacagcccatatggcccagc

SEQ ID NO: 5613324 - DNA, 25 bp, Homo sapien
tatggcccagcactgtacctgtcag

SEQ ID NO: 5613325 - DNA, 25 bp, Homo sapien
gatatgtgcctagcctggaagaacc

SEQ ID NO: 5613326 - DNA, 25 bp, Homo sapien
tgactggcaccgtctgagattacag

SEQ ID NO: 5613327 - DNA, 25 bp, Homo sapien
aggatccagatgaagaaatggccaa

SEQ ID NO: 5613328 - DNA, 25 bp, Homo sapien
tcttgctggagacactctggtgaga

SEQ ID NO: 5613329 - DNA, 25 bp, Homo sapien
gcggagttctcggctcgctccagga

SEQ ID NO: 5613330 - DNA, 25 bp, Homo sapien
gaagcttggtgttcctgactggcac

SEQ ID NO: 5613331 - DNA, 25 bp, Homo sapien
gggtcacatggggtttcatgctgtc

SEQ ID NO: 5613332 - DNA, 25 bp, Homo sapien
ggcctctgtggaggtccttctcccc

SEQ ID NO: 5613333 - DNA, 25 bp, Homo sapien
tggaagaaccagaatggacatcaca

SEQ ID NO: 5613334 - DNA, 25 bp, Homo sapien
aacagaagccacagtgattagcact

SEQ ID NO: 5613335 - DNA, 25 bp, Homo sapien
gacctagaccttataaacgtgagag

SEQ ID NO: 5613336 - DNA, 25 bp, Homo sapien
tcttaacagaagccacagtgattag

SEQ ID NO: 5613337 - DNA, 25 bp, Homo sapien
ggtatgtagggctccatttgtattc

SEQ ID NO: 5613338 - DNA, 25 bp, Homo sapien
ggagatgacggttccatccttccag

SEQ ID NO: 5613339 - DNA, 25 bp, Homo sapien
gtgattagcactcctgcagagagag

SEQ ID NO: 5613340 - DNA, 25 bp, Homo sapien
gaggaatcagttaaagaaagtggaa

SEQ ID NO: 5613341 - DNA, 25 bp, Homo sapien
tgaggatgaggaatcagttaaagaa

SEQ ID NO: 5613342 - DNA, 25 bp, Homo sapien
tgggaattcttaacagaagccacag

SEQ ID NO: 5613343 - DNA, 25 bp, Homo sapien
gggacaaagatagttttcagcatcc

SEQ ID NO: 5613344 - DNA, 25 bp, Homo sapien
gtaagggacaaagatagttttcagc

SEQ ID NO: 5613345 - DNA, 25 bp, Homo sapien
cactataaagtagcaaatacgttac

SEQ ID NO: 5613346 - DNA, 25 bp, Homo sapien
attcactataaagtagcaaatacgt

SEQ ID NO: 5613347 - DNA, 25 bp, Homo sapien
agcaaatacgttactaagtatagct

SEQ ID NO: 5613348 - DNA, 25 bp, Homo sapien
atcctgtaaaactaaagcacagttc

SEQ ID NO: 5613349 - DNA, 25 bp, Homo sapien
tcaacaagttgaaaataatactgat

SEQ ID NO: 5613350 - DNA, 25 bp, Homo sapien
tagactgctatacttatttcaaaac

SEQ ID NO: 5613351 - DNA, 25 bp, Homo sapien
tccatatattataatagactgctat

SEQ ID NO: 5613352 - DNA, 25 bp, Homo sapien
taaagcacagttccatttaaaggat

SEQ ID NO: 5613353 - DNA, 25 bp, Homo sapien
acgttactaagtatagcttccttct

SEQ ID NO: 5613354 - DNA, 25 bp, Homo sapien
ttaaaggataaatttcacataattc

SEQ ID NO: 5613355 - DNA, 25 bp, Homo sapien
agttgaaaataatactgatagtgtt

SEQ ID NO: 5613356 - DNA, 25 bp, Homo sapien
tcaaagtcaaagctaacaacaataa

SEQ ID NO: 5613357 - DNA, 25 bp, Homo sapien
ggcctggcttgacacctccaccctc

SEQ ID NO: 5613358 - DNA, 25 bp, Homo sapien
ggttacagcccaaatcaaatcactt

SEQ ID NO: 5613359 - DNA, 25 bp, Homo sapien
gaggagactgcctgacctgttctga

SEQ ID NO: 5613360 - DNA, 25 bp, Homo sapien
tgtgaaccataacaaagaaggaaag

SEQ ID NO: 5613361 - DNA, 25 bp, Homo sapien
aagttgcataggatgaagataagaa

SEQ ID NO: 5613362 - DNA, 25 bp, Homo sapien
agaatcaccaggaaagaatgatgca

SEQ ID NO: 5613363 - DNA, 25 bp, Homo sapien
cccaaagccaaatgaaatctggtct

SEQ ID NO: 5613364 - DNA, 25 bp, Homo sapien
tgtagaatgagcactccatagactc

SEQ ID NO: 5613365 - DNA, 25 bp, Homo sapien
aaaaacagtagcggtctaaagttgc

SEQ ID NO: 5613366 - DNA, 25 bp, Homo sapien
agaatgatgcagggtttcctgggag

SEQ ID NO: 5613367 - DNA, 25 bp, Homo sapien
gaagaaaatgagtgttgtatctcag

SEQ ID NO: 5613368 - DNA, 25 bp, Homo sapien
gtgttgtatctcagctgcgcccatc

SEQ ID NO: 5613369 - DNA, 25 bp, Homo sapien
taaatggtaagatatccaaccttac

SEQ ID NO: 5613370 - DNA, 25 bp, Homo sapien
tgcgcccatcagctctattccccga

SEQ ID NO: 5613371 - DNA, 25 bp, Homo sapien
gctgcataataaatccatagggctc

SEQ ID NO: 5613372 - DNA, 25 bp, Homo sapien
tttcaacaaggattattcagtaaga

SEQ ID NO: 5613373 - DNA, 25 bp, Homo sapien
catagggctctatctgaatttcaac

SEQ ID NO: 5613374 - DNA, 25 bp, Homo sapien
aaggattattcagtaagaagaaaat

SEQ ID NO: 5613375 - DNA, 25 bp, Homo sapien
tatttttgacaggctgcataataaa

SEQ ID NO: 5613376 - DNA, 25 bp, Homo sapien
tcagctctattccccgaatgaccgt

SEQ ID NO: 5613377 - DNA, 25 bp, Homo sapien
ctgcgcccagccactaaatttcata

SEQ ID NO: 5613378 - DNA, 25 bp, Homo sapien
agaaatcagaagtcaatgctaaacc

SEQ ID NO: 5613379 - DNA, 25 bp, Homo sapien
taatgactgtcaagaggttaaatga

SEQ ID NO: 5613380 - DNA, 25 bp, Homo sapien
agaaggaatacaagttggtaattgc

SEQ ID NO: 5613381 - DNA, 25 bp, Homo sapien
cagatagagtgaggttctagaaatc

SEQ ID NO: 5613382 - DNA, 25 bp, Homo sapien
ggcatggtatgaagtcatgatttgc

SEQ ID NO: 5613383 - DNA, 25 bp, Homo sapien
agatgtgaacactgtcaacctaatg

SEQ ID NO: 5613384 - DNA, 25 bp, Homo sapien
agaaaaaacactgattagaaggaat

SEQ ID NO: 5613385 - DNA, 25 bp, Homo sapien
taactggaatgaacaatttacagat

SEQ ID NO: 5613386 - DNA, 25 bp, Homo sapien
gatatagacaaatgacaacagaaac

SEQ ID NO: 5613387 - DNA, 25 bp, Homo sapien
tcagggcctgaataagacaggaaaa

SEQ ID NO: 5613388 - DNA, 25 bp, Homo sapien
gtcaagaggttaaatgatacacact

SEQ ID NO: 5613389 - DNA, 25 bp, Homo sapien
agccattgtgcctagacctaaatta

SEQ ID NO: 5613390 - DNA, 25 bp, Homo sapien
ataagagatttgttaggggttcagt

SEQ ID NO: 5613391 - DNA, 25 bp, Homo sapien
taatattggaaaattggagccttca

SEQ ID NO: 5613392 - DNA, 25 bp, Homo sapien
gccttcaattgtagctgggaatata

SEQ ID NO: 5613393 - DNA, 25 bp, Homo sapien
taggtgcgtgacaccatgccagcta

SEQ ID NO: 5613394 - DNA, 25 bp, Homo sapien
attggagccttcagataagagattt

SEQ ID NO: 5613395 - DNA, 25 bp, Homo sapien
agaggcctggttcctaccgctaagc

SEQ ID NO: 5613396 - DNA, 25 bp, Homo sapien
tttctatagggatagggtctatgtt

SEQ ID NO: 5613397 - DNA, 25 bp, Homo sapien
tataaggcaggatacgctggtatta

SEQ ID NO: 5613398 - DNA, 25 bp, Homo sapien
tgggaatataggtgcgtgacaccat

SEQ ID NO: 5613399 - DNA, 25 bp, Homo sapien
aaatatgcatttgggatgaaattaa

SEQ ID NO: 5613400 - DNA, 25 bp, Homo sapien
agaagtatttgtgggtgctatggtg

SEQ ID NO: 5613401 - DNA, 25 bp, Homo sapien
gacacaagggaataaatctaccacc

SEQ ID NO: 5613402 - DNA, 25 bp, Homo sapien
gattgaaaaagcacagaatatgatt

SEQ ID NO: 5613403 - DNA, 25 bp, Homo sapien
tcaatattgcctaacagtctgtgtc

SEQ ID NO: 5613404 - DNA, 25 bp, Homo sapien
tctgcactagtgattgaaaaagcac

SEQ ID NO: 5613405 - DNA, 25 bp, Homo sapien
ttcattgcatgatgagccagtggtc

SEQ ID NO: 5613406 - DNA, 25 bp, Homo sapien
agtctgtgtcaaatgcagcctattc

SEQ ID NO: 5613407 - DNA, 25 bp, Homo sapien
tctttggcctgacacaagggaataa

SEQ ID NO: 5613408 - DNA, 25 bp, Homo sapien
cagaatatgattcaagtagaagtat

SEQ ID NO: 5613409 - DNA, 25 bp, Homo sapien
aggctgtgagtaaagtgtcgcttta

SEQ ID NO: 5613410 - DNA, 25 bp, Homo sapien
gtcgctttagacactacccactgta

SEQ ID NO: 5613411 - DNA, 25 bp, Homo sapien
accgcgccaggcctatatttacccg

SEQ ID NO: 5613412 - DNA, 25 bp, Homo sapien
atcagcaggtttacagagattccta

SEQ ID NO: 5613413 - DNA, 25 bp, Homo sapien
tgagactctgaaaacctgaaaagcc

SEQ ID NO: 5613414 - DNA, 25 bp, Homo sapien
ctgagaatctgaacagagctgactc

SEQ ID NO: 5613415 - DNA, 25 bp, Homo sapien
aagaccagcaaaatagggatcaagt

SEQ ID NO: 5613416 - DNA, 25 bp, Homo sapien
aacctgaaaagccaccatctcctgc

SEQ ID NO: 5613417 - DNA, 25 bp, Homo sapien
tgtgtgactctaaggacttggggaa

SEQ ID NO: 5613418 - DNA, 25 bp, Homo sapien
atagggatcaagtgagactctgaaa

SEQ ID NO: 5613419 - DNA, 25 bp, Homo sapien
taggcgcatgccgccacatccagct

SEQ ID NO: 5613420 - DNA, 25 bp, Homo sapien
tagataaaaacgattcaactgagaa

SEQ ID NO: 5613421 - DNA, 25 bp, Homo sapien
cttggatcagaatctacactggggt

SEQ ID NO: 5613422 - DNA, 25 bp, Homo sapien
aaataactcgagtcagacaggtggg

SEQ ID NO: 5613423 - DNA, 25 bp, Homo sapien
agaacgaatccagcctgcaaatggc

SEQ ID NO: 5613424 - DNA, 25 bp, Homo sapien
gccccaggcccaaacaatgctcctt

SEQ ID NO: 5613425 - DNA, 25 bp, Homo sapien
atgggaaaaaaataactcgagtcag

SEQ ID NO: 5613426 - DNA, 25 bp, Homo sapien
cccccagtgcctggtatgtggtgat

SEQ ID NO: 5613427 - DNA, 25 bp, Homo sapien
tggggatgcctttaaaggtgatgaa

SEQ ID NO: 5613428 - DNA, 25 bp, Homo sapien
cagcctgcaaatggcctgtgcaatc

SEQ ID NO: 5613429 - DNA, 25 bp, Homo sapien
gcctccttcgccactagacccccag

SEQ ID NO: 5613430 - DNA, 25 bp, Homo sapien
ggtgatcgctcagggcccattttct

SEQ ID NO: 5613431 - DNA, 25 bp, Homo sapien
agccactgagggcccttggactaaa

SEQ ID NO: 5613432 - DNA, 25 bp, Homo sapien
gagggcccttggactaaatccaggc

SEQ ID NO: 5613433 - DNA, 25 bp, Homo sapien
ctaaacataccaattctaacagtcc

SEQ ID NO: 5613434 - DNA, 25 bp, Homo sapien
tgagccatggctgacaatagcagtt

SEQ ID NO: 5613435 - DNA, 25 bp, Homo sapien
ttagagctataattacagaagagta

SEQ ID NO: 5613436 - DNA, 25 bp, Homo sapien
acagtccaaagaattttgagatgtt

SEQ ID NO: 5613437 - DNA, 25 bp, Homo sapien
taaagcatcagagcacttagttaac

SEQ ID NO: 5613438 - DNA, 25 bp, Homo sapien
cagaagagtaagaggttccttttta

SEQ ID NO: 5613439 - DNA, 25 bp, Homo sapien
tttacgtgaaagctgataatcatct

SEQ ID NO: 5613440 - DNA, 25 bp, Homo sapien
aaagtgacagaaaaagccacagtta

SEQ ID NO: 5613441 - DNA, 25 bp, Homo sapien
taatgtagagtaaagtgacagaaaa

SEQ ID NO: 5613442 - DNA, 25 bp, Homo sapien
ctgaaaacagagacaactttacttc

SEQ ID NO: 5613443 - DNA, 25 bp, Homo sapien
taaagtgctgcattacccaacaatc

SEQ ID NO: 5613444 - DNA, 25 bp, Homo sapien
atttttaaatggccaaaacagctac

SEQ ID NO: 5613445 - DNA, 25 bp, Homo sapien
ggtcaagtaatagttatagtggtca

SEQ ID NO: 5613446 - DNA, 25 bp, Homo sapien
taaatggccaaaacagctactttta

SEQ ID NO: 5613447 - DNA, 25 bp, Homo sapien
ttaatttgctcagaatataaaccac

SEQ ID NO: 5613448 - DNA, 25 bp, Homo sapien
aatttttaaaaatgaagagcttcca

SEQ ID NO: 5613449 - DNA, 25 bp, Homo sapien
tcaagtaatagttatagtggtcatt

SEQ ID NO: 5613450 - DNA, 25 bp, Homo sapien
tgctcagaatataaaccacaaattt

SEQ ID NO: 5613451 - DNA, 25 bp, Homo sapien
aggtgactaagagaaagagtaataa

SEQ ID NO: 5613452 - DNA, 25 bp, Homo sapien
acttcagttatcttaaaatgatggc

SEQ ID NO: 5613453 - DNA, 25 bp, Homo sapien
atagttatagtggtcattatatctc

SEQ ID NO: 5613454 - DNA, 25 bp, Homo sapien
aatgaagagcttccaaaataaaata

SEQ ID NO: 5613455 - DNA, 25 bp, Homo sapien
ggaatgattgccacttagcagccac

SEQ ID NO: 5613456 - DNA, 25 bp, Homo sapien
aagttccttgagtctccgtctcctc

SEQ ID NO: 5613457 - DNA, 25 bp, Homo sapien
aaggattaagtgaagtaacaaatgt

SEQ ID NO: 5613458 - DNA, 25 bp, Homo sapien
aaaataccttgtggaatgattgcca

SEQ ID NO: 5613459 - DNA, 25 bp, Homo sapien
ggattgttgaaaggattaagtgaag

SEQ ID NO: 5613460 - DNA, 25 bp, Homo sapien
atgaggttaattactgtgaatgtgt

SEQ ID NO: 5613461 - DNA, 25 bp, Homo sapien
gtaacaaaaagtaaagcaccacata

SEQ ID NO: 5613462 - DNA, 25 bp, Homo sapien
cctggccagaccatcacgaaggcct

SEQ ID NO: 5613463 - DNA, 25 bp, Homo sapien
aagcaaatgcttacctctcaggatt

SEQ ID NO: 5613464 - DNA, 25 bp, Homo sapien
agctgatgtggtgaaagtacctgtt

SEQ ID NO: 5613465 - DNA, 25 bp, Homo sapien
tcttacaagctgatgtggtgaaagt

SEQ ID NO: 5613466 - DNA, 25 bp, Homo sapien
aaacgaactctagattagaatgcta

SEQ ID NO: 5613467 - DNA, 25 bp, Homo sapien
caactaggtaatcacaagtgtttgc

SEQ ID NO: 5613468 - DNA, 25 bp, Homo sapien
atatgtaaacagtaaaagtgaattt

SEQ ID NO: 5613469 - DNA, 25 bp, Homo sapien
taatcatcttgacaactaggtaatc

SEQ ID NO: 5613470 - DNA, 25 bp, Homo sapien
tagattagaatgctaggttagaatt

SEQ ID NO: 5613471 - DNA, 25 bp, Homo sapien
cccaggaagtatactcataccacat

SEQ ID NO: 5613472 - DNA, 25 bp, Homo sapien
gaatgctaggttagaattagtaatc

SEQ ID NO: 5613473 - DNA, 25 bp, Homo sapien
aggtaatcacaagtgtttgccattc

SEQ ID NO: 5613474 - DNA, 25 bp, Homo sapien
agaaaaacaagtcaatatgtaaaca

SEQ ID NO: 5613475 - DNA, 25 bp, Homo sapien
cagttaacattaagaaaaacaagtc

SEQ ID NO: 5613476 - DNA, 25 bp, Homo sapien
tgccattctcattacccaggaagta

SEQ ID NO: 5613477 - DNA, 25 bp, Homo sapien
cccccaggcagagtagccttctggg

SEQ ID NO: 5613478 - DNA, 25 bp, Homo sapien
ggctggcacaccagaagaatcaaca

SEQ ID NO: 5613479 - DNA, 25 bp, Homo sapien
ttataagctcaaggagacagcacag

SEQ ID NO: 5613480 - DNA, 25 bp, Homo sapien
tgttctctgtctgcctggagggctc

SEQ ID NO: 5613481 - DNA, 25 bp, Homo sapien
tctgctcaggcaagatagcagctct

SEQ ID NO: 5613482 - DNA, 25 bp, Homo sapien
gactttgggtgatgtctccccccgc

SEQ ID NO: 5613483 - DNA, 25 bp, Homo sapien
aataaaaacaagcaggtgagtttcc

SEQ ID NO: 5613484 - DNA, 25 bp, Homo sapien
ccccacgctccatcactccaccaac

SEQ ID NO: 5613485 - DNA, 25 bp, Homo sapien
actgcgtccccctcctgatctgctc

SEQ ID NO: 5613486 - DNA, 25 bp, Homo sapien
gccttctgggttgccaagaacagca

SEQ ID NO: 5613487 - DNA, 25 bp, Homo sapien
agacagcacagatcttctcggaaaa

SEQ ID NO: 5613488 - DNA, 25 bp, Homo sapien
cccataactccgagactgaggggct

SEQ ID NO: 5613489 - DNA, 25 bp, Homo sapien
cctaggtgcactcatcttggctggc

SEQ ID NO: 5613490 - DNA, 25 bp, Homo sapien
ttatactagcatggatgttcgtctc

SEQ ID NO: 5613491 - DNA, 25 bp, Homo sapien
ttctttacagtgtagcactgccccc

SEQ ID NO: 5613492 - DNA, 25 bp, Homo sapien
aaccctgccccataactccgagact

SEQ ID NO: 5613493 - DNA, 25 bp, Homo sapien
gcatggatgttcgtctcagaggcaa

SEQ ID NO: 5613494 - DNA, 25 bp, Homo sapien
ctgtccaccatttaataagagcttc

SEQ ID NO: 5613495 - DNA, 25 bp, Homo sapien
cagcaagtaaacatgccagccaact

SEQ ID NO: 5613496 - DNA, 25 bp, Homo sapien
tcctttttgagggcctaggtgcact

SEQ ID NO: 5613497 - DNA, 25 bp, Homo sapien
tgccaagggcattcctaactatttt

SEQ ID NO: 5613498 - DNA, 25 bp, Homo sapien
cttggctggctacagcagcaagtaa

SEQ ID NO: 5613499 - DNA, 25 bp, Homo sapien
aggcattgggaacctttaagaattc

SEQ ID NO: 5613500 - DNA, 25 bp, Homo sapien
tgggatcagataaataaatagttgt

SEQ ID NO: 5613501 - DNA, 25 bp, Homo sapien
ggacatctggatgtgatcgtttctt

SEQ ID NO: 5613502 - DNA, 25 bp, Homo sapien
cccagagtaggtgtattagtgttag

SEQ ID NO: 5613503 - DNA, 25 bp, Homo sapien
ggtgcaggataaactatggtgccct

SEQ ID NO: 5613504 - DNA, 25 bp, Homo sapien
ttagtgttaggtgcaggataaacta

SEQ ID NO: 5613505 - DNA, 25 bp, Homo sapien
gttgtaggtagaagaattcccagag

SEQ ID NO: 5613506 - DNA, 25 bp, Homo sapien
tagaactttaataccagatgggatc

SEQ ID NO: 5613507 - DNA, 25 bp, Homo sapien
aataccagatgggatcagataaata

SEQ ID NO: 5613508 - DNA, 25 bp, Homo sapien
ggtgcccttccagtaacaggacatc

SEQ ID NO: 5613509 - DNA, 25 bp, Homo sapien
aaatagttgtaggtagaagaattcc

SEQ ID NO: 5613510 - DNA, 25 bp, Homo sapien
cagttcattctgatatcaaagcctt

SEQ ID NO: 5613511 - DNA, 25 bp, Homo sapien
ctaagaccctgagggtcccaggcag

SEQ ID NO: 5613512 - DNA, 25 bp, Homo sapien
catctgcaaactcctattcacactc

SEQ ID NO: 5613513 - DNA, 25 bp, Homo sapien
caggcagcacaggttaatccctctc

SEQ ID NO: 5613514 - DNA, 25 bp, Homo sapien
tatcaaagcctttgtcggccaggcg

SEQ ID NO: 5613515 - DNA, 25 bp, Homo sapien
attcacactccccaacctaagaccc

SEQ ID NO: 5613516 - DNA, 25 bp, Homo sapien
acctaagaccctgagggtcccaggc

SEQ ID NO: 5613517 - DNA, 25 bp, Homo sapien
aggccataatccagaccacccagcc

SEQ ID NO: 5613518 - DNA, 25 bp, Homo sapien
cacacctcttggtctctgcacaggt

SEQ ID NO: 5613519 - DNA, 25 bp, Homo sapien
cagcacctcccttgacagttcattc

SEQ ID NO: 5613520 - DNA, 25 bp, Homo sapien
ctggaatgcccttcctattctccat

SEQ ID NO: 5613521 - DNA, 25 bp, Homo sapien
ggggctgcctaatcaccagacactc

SEQ ID NO: 5613522 - DNA, 25 bp, Homo sapien
taggacccctggggctgcctaatca

SEQ ID NO: 5613523 - DNA, 25 bp, Homo sapien
gtgtagacaccagtaaacctgtacc

SEQ ID NO: 5613524 - DNA, 25 bp, Homo sapien
tgacacatataaaatagcccaggac

SEQ ID NO: 5613525 - DNA, 25 bp, Homo sapien
aaggcatttgctagagctgttgaac

SEQ ID NO: 5613526 - DNA, 25 bp, Homo sapien
acctgctagattgccacgaagggaa

SEQ ID NO: 5613527 - DNA, 25 bp, Homo sapien
ctgcctggagcaacctgctagattg

SEQ ID NO: 5613528 - DNA, 25 bp, Homo sapien
taaaatagcccaggactgtgtttcc

SEQ ID NO: 5613529 - DNA, 25 bp, Homo sapien
ttcttccagttggctaggacccctg

SEQ ID NO: 5613530 - DNA, 25 bp, Homo sapien
tgtcccaggacaacaaagctgtgac

SEQ ID NO: 5613531 - DNA, 25 bp, Homo sapien
gacaacaaagctgtgacctgcagcc

SEQ ID NO: 5613532 - DNA, 25 bp, Homo sapien
agccaagaatgtgctggtactggac

SEQ ID NO: 5613533 - DNA, 25 bp, Homo sapien
cctctagatgatgagtaatgagaag

SEQ ID NO: 5613534 - DNA, 25 bp, Homo sapien
tcagctattgtggacatgaggtgga

SEQ ID NO: 5613535 - DNA, 25 bp, Homo sapien
gagtaatgagaaggtccactccacc

SEQ ID NO: 5613536 - DNA, 25 bp, Homo sapien
agggtcaccatggcagccaccttgg

SEQ ID NO: 5613537 - DNA, 25 bp, Homo sapien
atgtgctgcacccatctcaccactc

SEQ ID NO: 5613538 - DNA, 25 bp, Homo sapien
gtgtggacatgctgttcagagatgc

SEQ ID NO: 5613539 - DNA, 25 bp, Homo sapien
agcataatgacttcgagccctgtgt

SEQ ID NO: 5613540 - DNA, 25 bp, Homo sapien
tgtcaagcaggttcaggttcaattc

SEQ ID NO: 5613541 - DNA, 25 bp, Homo sapien
ggttaggcttgggctcttgtctgtc

SEQ ID NO: 5613542 - DNA, 25 bp, Homo sapien
atgaggtggacatgcagcataatga

SEQ ID NO: 5613543 - DNA, 25 bp, Homo sapien
tgaacttacactttgggaaattgct

SEQ ID NO: 5613544 - DNA, 25 bp, Homo sapien
tcaattgtggttcctgctgtgcatt

SEQ ID NO: 5613545 - DNA, 25 bp, Homo sapien
actctgaagtggatacaaggaaaga

SEQ ID NO: 5613546 - DNA, 25 bp, Homo sapien
ctagatggagtctttgaaaaggctc

SEQ ID NO: 5613547 - DNA, 25 bp, Homo sapien
agaaaaaccaggaacaccatgattt

SEQ ID NO: 5613548 - DNA, 25 bp, Homo sapien
aagaatctggtatgtgttgtaaaac

SEQ ID NO: 5613549 - DNA, 25 bp, Homo sapien
actggtatgaagatggtatcctcaa

SEQ ID NO: 5613550 - DNA, 25 bp, Homo sapien
tcagagactctgaagtggatacaag

SEQ ID NO: 5613551 - DNA, 25 bp, Homo sapien
aaagttgcatcaaaaaagttgtcaa

SEQ ID NO: 5613552 - DNA, 25 bp, Homo sapien
ctaatgacccatgatgataagcttt

SEQ ID NO: 5613553 - DNA, 25 bp, Homo sapien
attgtgttgggcattcaggaaaaaa

SEQ ID NO: 5613554 - DNA, 25 bp, Homo sapien
cacatactcagtagtcacgcgtggc

SEQ ID NO: 5613555 - DNA, 25 bp, Homo sapien
ttcaatgagcaattctgatagtgat

SEQ ID NO: 5613556 - DNA, 25 bp, Homo sapien
tggaccagatgcatttcacatactc

SEQ ID NO: 5613557 - DNA, 25 bp, Homo sapien
cgcgtggccagtgccttccatacca

SEQ ID NO: 5613558 - DNA, 25 bp, Homo sapien
tctgatagtgattgagatcttttac

SEQ ID NO: 5613559 - DNA, 25 bp, Homo sapien
cctgaagaatctgctccttgaagta

SEQ ID NO: 5613560 - DNA, 25 bp, Homo sapien
ccttccataccacacagtgcagcat

SEQ ID NO: 5613561 - DNA, 25 bp, Homo sapien
gtgcagcatctgtagaggtttcctc

SEQ ID NO: 5613562 - DNA, 25 bp, Homo sapien
gctccttgaagtagggaccttaatg

SEQ ID NO: 5613563 - DNA, 25 bp, Homo sapien
acacttctcagtgtggaccagatgc

SEQ ID NO: 5613564 - DNA, 25 bp, Homo sapien
tttgtacttggaacacttctcagtg

SEQ ID NO: 5613565 - DNA, 25 bp, Homo sapien
taatcacagaagaacccctgcagag

SEQ ID NO: 5613566 - DNA, 25 bp, Homo sapien
aggttgcatacaataacaggagatc

SEQ ID NO: 5613567 - DNA, 25 bp, Homo sapien
cacagttttgaagtctagcacagat

SEQ ID NO: 5613568 - DNA, 25 bp, Homo sapien
aacaggagatcacagttttgaagtc

SEQ ID NO: 5613569 - DNA, 25 bp, Homo sapien
acattttgtcgtaaagtttcagtgc

SEQ ID NO: 5613570 - DNA, 25 bp, Homo sapien
tctgcaagcataaacgacaatgatc

SEQ ID NO: 5613571 - DNA, 25 bp, Homo sapien
gaccaatgtctctttactgctaggc

SEQ ID NO: 5613572 - DNA, 25 bp, Homo sapien
gtctagcacagattaaaaaccacag

SEQ ID NO: 5613573 - DNA, 25 bp, Homo sapien
atcagggtcagagcaattgaccaat

SEQ ID NO: 5613574 - DNA, 25 bp, Homo sapien
gtaaattacagatgaattagtgtcc

SEQ ID NO: 5613575 - DNA, 25 bp, Homo sapien
ctgctaggcttaccaacagtaaatt

SEQ ID NO: 5613576 - DNA, 25 bp, Homo sapien
gtttgtcaacagggacacggaacaa

SEQ ID NO: 5613577 - DNA, 25 bp, Homo sapien
acgtagctacccacgcaatggagta

SEQ ID NO: 5613578 - DNA, 25 bp, Homo sapien
gaaagcagttgactggatgtcaggg

SEQ ID NO: 5613579 - DNA, 25 bp, Homo sapien
ccagctcgtctgggacgtctgctgt

SEQ ID NO: 5613580 - DNA, 25 bp, Homo sapien
tggaggtcaccatgaacaatgattc

SEQ ID NO: 5613581 - DNA, 25 bp, Homo sapien
tggtgaccaggaaatggaggtcacc

SEQ ID NO: 5613582 - DNA, 25 bp, Homo sapien
ctccctcaggataagtgggttaagg

SEQ ID NO: 5613583 - DNA, 25 bp, Homo sapien
acaaatgttcagagcagcattgctc

SEQ ID NO: 5613584 - DNA, 25 bp, Homo sapien
ctaaaaccaacgcagatgaaatcac

SEQ ID NO: 5613585 - DNA, 25 bp, Homo sapien
acaatctctataaggcagccacagc

SEQ ID NO: 5613586 - DNA, 25 bp, Homo sapien
caggcaggacccatgtcctggaacc

SEQ ID NO: 5613587 - DNA, 25 bp, Homo sapien
tgctgctgagagattaaaccacttc

SEQ ID NO: 5613588 - DNA, 25 bp, Homo sapien
gattttggtaagattatatagattc

SEQ ID NO: 5613589 - DNA, 25 bp, Homo sapien
aattggtcaagcattgtggcacagg

SEQ ID NO: 5613590 - DNA, 25 bp, Homo sapien
aatgtggcaagacccgatctccaca

SEQ ID NO: 5613591 - DNA, 25 bp, Homo sapien
ggtgactgactgacaatttggcaac

SEQ ID NO: 5613592 - DNA, 25 bp, Homo sapien
tggcaacccgaaatcaacgaaaatc

SEQ ID NO: 5613593 - DNA, 25 bp, Homo sapien
aaataaagagcactgtccggatgta

SEQ ID NO: 5613594 - DNA, 25 bp, Homo sapien
aacgaaaatcgaaacaatcagcaat

SEQ ID NO: 5613595 - DNA, 25 bp, Homo sapien
tccggatgtagtggcttaagcctgt

SEQ ID NO: 5613596 - DNA, 25 bp, Homo sapien
tttggcaagacaaataggtgactga

SEQ ID NO: 5613597 - DNA, 25 bp, Homo sapien
tttaggaaagactgctgctgagaga

SEQ ID NO: 5613598 - DNA, 25 bp, Homo sapien
aagagatcagggttcgtccctaagt

SEQ ID NO: 5613599 - DNA, 25 bp, Homo sapien
ggggataggccataggtctatggtc

SEQ ID NO: 5613600 - DNA, 25 bp, Homo sapien
tatagatagttggatggttaggtga

SEQ ID NO: 5613601 - DNA, 25 bp, Homo sapien
atctacgatatcaagagatcagggt

SEQ ID NO: 5613602 - DNA, 25 bp, Homo sapien
gtccctaagtgttctatatggctat

SEQ ID NO: 5613603 - DNA, 25 bp, Homo sapien
ataaaactcgattaaggatatctac

SEQ ID NO: 5613604 - DNA, 25 bp, Homo sapien
agccttataatcactgcagcccagc

SEQ ID NO: 5613605 - DNA, 25 bp, Homo sapien
gcagcccagctcataaggggatagg

SEQ ID NO: 5613606 - DNA, 25 bp, Homo sapien
agagaggttagatctgatggcaata

SEQ ID NO: 5613607 - DNA, 25 bp, Homo sapien
gatagtcagtagaattagaattgtg

SEQ ID NO: 5613608 - DNA, 25 bp, Homo sapien
tatttgaggttagatttgattagtc

SEQ ID NO: 5613609 - DNA, 25 bp, Homo sapien
gatttaagaagctgagattctagaa

SEQ ID NO: 5613610 - DNA, 25 bp, Homo sapien
tggtattgggcacagaatccccttt

SEQ ID NO: 5613611 - DNA, 25 bp, Homo sapien
cgaagagagccctttcttgatatac

SEQ ID NO: 5613612 - DNA, 25 bp, Homo sapien
gtgcattgatttcatggtattgggc

SEQ ID NO: 5613613 - DNA, 25 bp, Homo sapien
cagcaaaaatgcttgtggaatgaat

SEQ ID NO: 5613614 - DNA, 25 bp, Homo sapien
ctgtgttcacttggggaattcagac

SEQ ID NO: 5613615 - DNA, 25 bp, Homo sapien
atttcatggtattgggcacagaatc

SEQ ID NO: 5613616 - DNA, 25 bp, Homo sapien
tcaagcacccactcactgtgttcac

SEQ ID NO: 5613617 - DNA, 25 bp, Homo sapien
aaagatttgtcaagcacccactcac

SEQ ID NO: 5613618 - DNA, 25 bp, Homo sapien
tgtgatttcgaagagagccctttct

SEQ ID NO: 5613619 - DNA, 25 bp, Homo sapien
gcttccaccccagcaaaaatgcttg

SEQ ID NO: 5613620 - DNA, 25 bp, Homo sapien
acttctcagcgtgaacactggggaa

SEQ ID NO: 5613621 - DNA, 25 bp, Homo sapien
tgttaaagtgaggatttggtgcctt

SEQ ID NO: 5613622 - DNA, 25 bp, Homo sapien
cacactggtccaatatgaagacttc

SEQ ID NO: 5613623 - DNA, 25 bp, Homo sapien
cccaggtgcctgaaactagtgtcct

SEQ ID NO: 5613624 - DNA, 25 bp, Homo sapien
aatgcatggaaagcctcagttgaat

SEQ ID NO: 5613625 - DNA, 25 bp, Homo sapien
taaaatggtggctcttgggtatcca

SEQ ID NO: 5613626 - DNA, 25 bp, Homo sapien
gttgggccatcaagaaaacttcaga

SEQ ID NO: 5613627 - DNA, 25 bp, Homo sapien
gaggaatccgtaaaatggtggctct

SEQ ID NO: 5613628 - DNA, 25 bp, Homo sapien
acctcagtataaaagaccccctcac

SEQ ID NO: 5613629 - DNA, 25 bp, Homo sapien
tcaggacaaaatgaagtcaggtttt

SEQ ID NO: 5613630 - DNA, 25 bp, Homo sapien
ccacagaggctaatagaaatagaat

SEQ ID NO: 5613631 - DNA, 25 bp, Homo sapien
gtccacctttacaatacacaaatac

SEQ ID NO: 5613632 - DNA, 25 bp, Homo sapien
cagtaacggtaactcgcactaaaac

SEQ ID NO: 5613633 - DNA, 25 bp, Homo sapien
aactcgcactaaaacaaagcatact

SEQ ID NO: 5613634 - DNA, 25 bp, Homo sapien
taatgtaattagaatgtccaccttt

SEQ ID NO: 5613635 - DNA, 25 bp, Homo sapien
aatacacaaatacagtaacggtaac

SEQ ID NO: 5613636 - DNA, 25 bp, Homo sapien
caaagcatacttctgatagccatta

SEQ ID NO: 5613637 - DNA, 25 bp, Homo sapien
ttcatgcatcacttctaatattctt

SEQ ID NO: 5613638 - DNA, 25 bp, Homo sapien
caaatacagtaacggtaactcgcac

SEQ ID NO: 5613639 - DNA, 25 bp, Homo sapien
tttgtcacaaaaacaggaatgtact

SEQ ID NO: 5613640 - DNA, 25 bp, Homo sapien
cacaaaaacaggaatgtacttatac

SEQ ID NO: 5613641 - DNA, 25 bp, Homo sapien
gtaactcgcactaaaacaaagcata

SEQ ID NO: 5613642 - DNA, 25 bp, Homo sapien
tttgaagcatgccagctacaataac

SEQ ID NO: 5613643 - DNA, 25 bp, Homo sapien
gtagagtgtacagaatcaatgagcc

SEQ ID NO: 5613644 - DNA, 25 bp, Homo sapien
tcccttttttgctatagagagtatc

SEQ ID NO: 5613645 - DNA, 25 bp, Homo sapien
atgttagagtataaagccaatgata

SEQ ID NO: 5613646 - DNA, 25 bp, Homo sapien
agggtagagtgtacagaatcaatga

SEQ ID NO: 5613647 - DNA, 25 bp, Homo sapien
tcaatgagcctgtttaaattctgtc

SEQ ID NO: 5613648 - DNA, 25 bp, Homo sapien
tgtcagtcccagtaagctcaaaatt

SEQ ID NO: 5613649 - DNA, 25 bp, Homo sapien
tgccacagtggatgtcatttgtaaa

SEQ ID NO: 5613650 - DNA, 25 bp, Homo sapien
ctttcctgaatgctatgtaatccgc

SEQ ID NO: 5613651 - DNA, 25 bp, Homo sapien
tatcacttgccacaggaagggtaga

SEQ ID NO: 5613652 - DNA, 25 bp, Homo sapien
gctatgtaatccgcaaaggacagcc

SEQ ID NO: 5613653 - DNA, 25 bp, Homo sapien
ggcgaagcaacagagttcctcccga

SEQ ID NO: 5613654 - DNA, 25 bp, Homo sapien
aagcccactggaattagagtgcttg

SEQ ID NO: 5613655 - DNA, 25 bp, Homo sapien
gcactggagattgtgcgttcagggt

SEQ ID NO: 5613656 - DNA, 25 bp, Homo sapien
ccaagatacaaagcaataagttaac

SEQ ID NO: 5613657 - DNA, 25 bp, Homo sapien
ttcacaaagcatggggttttacagc

SEQ ID NO: 5613658 - DNA, 25 bp, Homo sapien
aaaggctaagcttgtgcaacatgtt

SEQ ID NO: 5613659 - DNA, 25 bp, Homo sapien
attctgtggtcgagcctctagggat

SEQ ID NO: 5613660 - DNA, 25 bp, Homo sapien
ggtggtgactggcattattctgtgg

SEQ ID NO: 5613661 - DNA, 25 bp, Homo sapien
tgacatagagaacacaaaacacagt

SEQ ID NO: 5613662 - DNA, 25 bp, Homo sapien
tctagggattgttgtaaagctgatt

SEQ ID NO: 5613663 - DNA, 25 bp, Homo sapien
cacaacagaacgcaaaaaggctaag

SEQ ID NO: 5613664 - DNA, 25 bp, Homo sapien
gggtatgagggatactcacacacct

SEQ ID NO: 5613665 - DNA, 25 bp, Homo sapien
ctgcacatacaggtggcatcaacac

SEQ ID NO: 5613666 - DNA, 25 bp, Homo sapien
actgtcgcggttgcttctggaccga

SEQ ID NO: 5613667 - DNA, 25 bp, Homo sapien
tggcatcaacacatgcaggactgtc

SEQ ID NO: 5613668 - DNA, 25 bp, Homo sapien
acctgcacatacaggtggcatcaac

SEQ ID NO: 5613669 - DNA, 25 bp, Homo sapien
atcaacacatgcaggactgtcgcgg

SEQ ID NO: 5613670 - DNA, 25 bp, Homo sapien
aggtggcatcaacacatgcaggact

SEQ ID NO: 5613671 - DNA, 25 bp, Homo sapien
acatacaggtggcatcaacacatgc

SEQ ID NO: 5613672 - DNA, 25 bp, Homo sapien
acaggtggcatcaacacatgcagga

SEQ ID NO: 5613673 - DNA, 25 bp, Homo sapien
gagggatactcacacacctgaggtc

SEQ ID NO: 5613674 - DNA, 25 bp, Homo sapien
actcacacacctgaggtcacacctg

SEQ ID NO: 5613675 - DNA, 25 bp, Homo sapien
atgtctatgaactaatgagtaaaca

SEQ ID NO: 5613676 - DNA, 25 bp, Homo sapien
atgaactctgaaaacgttcagtggt

SEQ ID NO: 5613677 - DNA, 25 bp, Homo sapien
atataacgtggattagtggttgcca

SEQ ID NO: 5613678 - DNA, 25 bp, Homo sapien
ccataaagaggaatgaaaaactgat

SEQ ID NO: 5613679 - DNA, 25 bp, Homo sapien
tcagccataaagaggaatgaaaaac

SEQ ID NO: 5613680 - DNA, 25 bp, Homo sapien
gaggaatgaaaaactgatacatgct

SEQ ID NO: 5613681 - DNA, 25 bp, Homo sapien
tacaatgcagtattattcagccata

SEQ ID NO: 5613682 - DNA, 25 bp, Homo sapien
ggaaacaaccccaatgtctatgaac

SEQ ID NO: 5613683 - DNA, 25 bp, Homo sapien
ggcaaatctagacatataacgtgga

SEQ ID NO: 5613684 - DNA, 25 bp, Homo sapien
tagacatataacgtggattagtggt

SEQ ID NO: 5613685 - DNA, 25 bp, Homo sapien
ctctgaaaacgttcagtggtaaaaa

SEQ ID NO: 5613686 - DNA, 25 bp, Homo sapien
ttaaatacacccaaggagatccagt

SEQ ID NO: 5613687 - DNA, 25 bp, Homo sapien
caatggaacataatacatagcagtc

SEQ ID NO: 5613688 - DNA, 25 bp, Homo sapien
tactccaggatctcataggtgactc

SEQ ID NO: 5613689 - DNA, 25 bp, Homo sapien
aaaagcaaagggcctttgtctcctg

SEQ ID NO: 5613690 - DNA, 25 bp, Homo sapien
acatagcagtcaaaatgaactatac

SEQ ID NO: 5613691 - DNA, 25 bp, Homo sapien
acccggatactgagctcagtttccg

SEQ ID NO: 5613692 - DNA, 25 bp, Homo sapien
ataggtgactctaccacagcccctg

SEQ ID NO: 5613693 - DNA, 25 bp, Homo sapien
aaggagatccagtatagtattgaag

SEQ ID NO: 5613694 - DNA, 25 bp, Homo sapien
caacaggggtagatcagaatattaa

SEQ ID NO: 5613695 - DNA, 25 bp, Homo sapien
cctgttgcctgtgagctgcaggcac

SEQ ID NO: 5613696 - DNA, 25 bp, Homo sapien
acagcccctgttgcctgtgagctgc

SEQ ID NO: 5613697 - DNA, 25 bp, Homo sapien
tgatctgtggaaagggattaacttt

SEQ ID NO: 5613698 - DNA, 25 bp, Homo sapien
tcagttggccatcagtgaatgtaga

SEQ ID NO: 5613699 - DNA, 25 bp, Homo sapien
ctaggtattagaaaagtgaaaagtg

SEQ ID NO: 5613700 - DNA, 25 bp, Homo sapien
aggacaaaagcactcgctcatcacc

SEQ ID NO: 5613701 - DNA, 25 bp, Homo sapien
tcaagttccagaagcagagattcat

SEQ ID NO: 5613702 - DNA, 25 bp, Homo sapien
gtcagctgtgctactttgagctccc

SEQ ID NO: 5613703 - DNA, 25 bp, Homo sapien
aaatgaacatgttgaggagttttct

SEQ ID NO: 5613704 - DNA, 25 bp, Homo sapien
tgaatgtagaaagccactcagtcag

SEQ ID NO: 5613705 - DNA, 25 bp, Homo sapien
taggattaacccaggacaaaagcac

SEQ ID NO: 5613706 - DNA, 25 bp, Homo sapien
gaattgaaagagattcagttggcca

SEQ ID NO: 5613707 - DNA, 25 bp, Homo sapien
ctatggatgatgagaatcccagaaa

SEQ ID NO: 5613708 - DNA, 25 bp, Homo sapien
gaccactaagaggggtttgatttga

SEQ ID NO: 5613709 - DNA, 25 bp, Homo sapien
tagacacattgtctggagctcgagg

SEQ ID NO: 5613710 - DNA, 25 bp, Homo sapien
gcttgtaaagtgagaaatggtgaca

SEQ ID NO: 5613711 - DNA, 25 bp, Homo sapien
attaccctaagaaaactgaggcagt

SEQ ID NO: 5613712 - DNA, 25 bp, Homo sapien
aatgcctgtgggacattcaaatgca

SEQ ID NO: 5613713 - DNA, 25 bp, Homo sapien
gcagccaaatatgaggtcaagttca

SEQ ID NO: 5613714 - DNA, 25 bp, Homo sapien
agaaatggtgacaatcgtgtgccta

SEQ ID NO: 5613715 - DNA, 25 bp, Homo sapien
taagatgtagcattagatttgagaa

SEQ ID NO: 5613716 - DNA, 25 bp, Homo sapien
gctcgagggaataagctaagatgta

SEQ ID NO: 5613717 - DNA, 25 bp, Homo sapien
ctgaggcagttacataaaaagctgt

SEQ ID NO: 5613718 - DNA, 25 bp, Homo sapien
gtgtgcctatttcaatatgggcctc

SEQ ID NO: 5613719 - DNA, 25 bp, Homo sapien
cagtattataggtaggaaccaccat

SEQ ID NO: 5613720 - DNA, 25 bp, Homo sapien
tctgagcaagttatcccattaagtt

SEQ ID NO: 5613721 - DNA, 25 bp, Homo sapien
tccagataaacaaaactatgtgacc

SEQ ID NO: 5613722 - DNA, 25 bp, Homo sapien
gcagtagcacagtcatagcttactc

SEQ ID NO: 5613723 - DNA, 25 bp, Homo sapien
tttggctattgatacctgggaagag

SEQ ID NO: 5613724 - DNA, 25 bp, Homo sapien
gaaccaccatatccagccgaaaatt

SEQ ID NO: 5613725 - DNA, 25 bp, Homo sapien
agcctcccaaatcaccagtattata

SEQ ID NO: 5613726 - DNA, 25 bp, Homo sapien
aaaaaggctagtaaattacagtatc

SEQ ID NO: 5613727 - DNA, 25 bp, Homo sapien
acctgggaagagctatctatactac

SEQ ID NO: 5613728 - DNA, 25 bp, Homo sapien
agccaaattaaatacaggggaaata

SEQ ID NO: 5613729 - DNA, 25 bp, Homo sapien
aatttagaaaatacggcaataatga

SEQ ID NO: 5613730 - DNA, 25 bp, Homo sapien
atttaaacatcaaaagggctacaat

SEQ ID NO: 5613731 - DNA, 25 bp, Homo sapien
ggaaaatatttgcaacatacggctg

SEQ ID NO: 5613732 - DNA, 25 bp, Homo sapien
aagaaagaggatactgagatcattt

SEQ ID NO: 5613733 - DNA, 25 bp, Homo sapien
aaaaatacaagaaagaggatactga

SEQ ID NO: 5613734 - DNA, 25 bp, Homo sapien
agtcaaaagtcaagtaaaagtagga

SEQ ID NO: 5613735 - DNA, 25 bp, Homo sapien
tactggtactatattgaacactgca

SEQ ID NO: 5613736 - DNA, 25 bp, Homo sapien
gaagaagattgattcattggactgc

SEQ ID NO: 5613737 - DNA, 25 bp, Homo sapien
gtagccacctgtagttactggtact

SEQ ID NO: 5613738 - DNA, 25 bp, Homo sapien
caaaagggctacaataaagaagaag

SEQ ID NO: 5613739 - DNA, 25 bp, Homo sapien
agaacccaaaaggcccagatcctga

SEQ ID NO: 5613740 - DNA, 25 bp, Homo sapien
aacaagacatcctaagtcaaaagtc

SEQ ID NO: 5613741 - DNA, 25 bp, Homo sapien
agatgttccaggcctgcgtcaggca

SEQ ID NO: 5613742 - DNA, 25 bp, Homo sapien
agccaagagaccactccacacccat

SEQ ID NO: 5613743 - DNA, 25 bp, Homo sapien
gttatgtccccagcagagaagtatg

SEQ ID NO: 5613744 - DNA, 25 bp, Homo sapien
gtgcaggagcaaagctccacaggac

SEQ ID NO: 5613745 - DNA, 25 bp, Homo sapien
gaagaaaacagaaactaacagatgt

SEQ ID NO: 5613746 - DNA, 25 bp, Homo sapien
gccagcctcagagcttggcagagtg

SEQ ID NO: 5613747 - DNA, 25 bp, Homo sapien
ttcctaagctgtgagtacgagaagg

SEQ ID NO: 5613748 - DNA, 25 bp, Homo sapien
tatcagcagcctaaacagaggccag

SEQ ID NO: 5613749 - DNA, 25 bp, Homo sapien
cccataatgatggctaccaggaaga

SEQ ID NO: 5613750 - DNA, 25 bp, Homo sapien
agagaagtatgaacacctggcttgc

SEQ ID NO: 5613751 - DNA, 25 bp, Homo sapien
ggccttagcatgaagacaggtgtct

SEQ ID NO: 5613752 - DNA, 25 bp, Homo sapien
gtcaaccttgcccccaagccaggct

SEQ ID NO: 5613753 - DNA, 25 bp, Homo sapien
ggagagaagttctggtcaaccttgc

SEQ ID NO: 5613754 - DNA, 25 bp, Homo sapien
agctatgaacctctgggcatctccc

SEQ ID NO: 5613755 - DNA, 25 bp, Homo sapien
tggaaaaagtacaagtacatcgtgc

SEQ ID NO: 5613756 - DNA, 25 bp, Homo sapien
aaggacacccagacccacctactga

SEQ ID NO: 5613757 - DNA, 25 bp, Homo sapien
cccattcctggtccccagagcaggc

SEQ ID NO: 5613758 - DNA, 25 bp, Homo sapien
atcgtgctaaactctcaggcctccc

SEQ ID NO: 5613759 - DNA, 25 bp, Homo sapien
gcatctccctgcgccccctggaagc

SEQ ID NO: 5613760 - DNA, 25 bp, Homo sapien
ctgaatctcgaagctgcagtcaagg

SEQ ID NO: 5613761 - DNA, 25 bp, Homo sapien
ttcaaatgtggggctccagccagta

SEQ ID NO: 5613762 - DNA, 25 bp, Homo sapien
cccaaggcctgcaactggaaaaagt

SEQ ID NO: 5613763 - DNA, 25 bp, Homo sapien
accggagggcgtctctgcggacggg

SEQ ID NO: 5613764 - DNA, 25 bp, Homo sapien
cccgtccgcagagacgccctccggt

SEQ ID NO: 5613765 - DNA, 25 bp, Homo sapien
gcgggttgggctccgccgctagggc

SEQ ID NO: 5613766 - DNA, 25 bp, Homo sapien
gccctagcggcggagcccaacccgc

SEQ ID NO: 5613767 - DNA, 25 bp, Homo sapien
ggcgggttgggctccgccgctaggg

SEQ ID NO: 5613768 - DNA, 25 bp, Homo sapien
ccctagcggcggagcccaacccgcc

SEQ ID NO: 5613769 - DNA, 25 bp, Homo sapien
aggtgtactgtaaatgaaatgaggt

SEQ ID NO: 5613770 - DNA, 25 bp, Homo sapien
tagcaatatgctagcaacaacattt

SEQ ID NO: 5613771 - DNA, 25 bp, Homo sapien
aataggtgaattaatccccaagtgt

SEQ ID NO: 5613772 - DNA, 25 bp, Homo sapien
caggaatccctgaaacttaaggact

SEQ ID NO: 5613773 - DNA, 25 bp, Homo sapien
aatccccaagtgtgaggtgtactgt

SEQ ID NO: 5613774 - DNA, 25 bp, Homo sapien
cgcagttccacagaggttaataggt

SEQ ID NO: 5613775 - DNA, 25 bp, Homo sapien
tgcaggaaaagcaaattttagtttc

SEQ ID NO: 5613776 - DNA, 25 bp, Homo sapien
cttaaggactaggttagcaatatgc

SEQ ID NO: 5613777 - DNA, 25 bp, Homo sapien
gtaaatgaaatgaggtctattatac

SEQ ID NO: 5613778 - DNA, 25 bp, Homo sapien
caaaagatgtctatgcaggaaaagc

SEQ ID NO: 5613779 - DNA, 25 bp, Homo sapien
cacatagtctccagtggttaaaaag

SEQ ID NO: 5613780 - DNA, 25 bp, Homo sapien
ctcaaggatgacataatcaaatagt

SEQ ID NO: 5613781 - DNA, 25 bp, Homo sapien
cataaccctaggagataaaaaccaa

SEQ ID NO: 5613782 - DNA, 25 bp, Homo sapien
gaacactcctcccagaaatactctc

SEQ ID NO: 5613783 - DNA, 25 bp, Homo sapien
acaaaaacactgacactgagcctac

SEQ ID NO: 5613784 - DNA, 25 bp, Homo sapien
ttccaagctagtgaagctgagtcct

SEQ ID NO: 5613785 - DNA, 25 bp, Homo sapien
aatgagatgaaattagagacctgtt

SEQ ID NO: 5613786 - DNA, 25 bp, Homo sapien
acattccaagctgtgtgccaggcga

SEQ ID NO: 5613787 - DNA, 25 bp, Homo sapien
ctcaagtgtatggaacaaggaagaa

SEQ ID NO: 5613788 - DNA, 25 bp, Homo sapien
taagggtagaagatacaataccatc

SEQ ID NO: 5613789 - DNA, 25 bp, Homo sapien
ccccctaaaaagtctcccagcctga

SEQ ID NO: 5613790 - DNA, 25 bp, Homo sapien
tcaaatagtatcatgggaacactcc

SEQ ID NO: 5613791 - DNA, 25 bp, Homo sapien
gtgccccagtaaggcgctggggaat

SEQ ID NO: 5613792 - DNA, 25 bp, Homo sapien
acaggcatgagcagcaactcacatg

SEQ ID NO: 5613793 - DNA, 25 bp, Homo sapien
tctgaatcactggagaaggtgtgag

SEQ ID NO: 5613794 - DNA, 25 bp, Homo sapien
aggccagacagggaaactacttata

SEQ ID NO: 5613795 - DNA, 25 bp, Homo sapien
acaagaggcgacaattcagctaagg

SEQ ID NO: 5613796 - DNA, 25 bp, Homo sapien
gaccaccgaagacaagtcctgactt

SEQ ID NO: 5613797 - DNA, 25 bp, Homo sapien
ctgccactgtttggtgactgcccac

SEQ ID NO: 5613798 - DNA, 25 bp, Homo sapien
ctgccgggaacctacaccttggtca

SEQ ID NO: 5613799 - DNA, 25 bp, Homo sapien
cacatgcaatgtgactaggacccca

SEQ ID NO: 5613800 - DNA, 25 bp, Homo sapien
gttcctgcacccacagggctcagtc

SEQ ID NO: 5613801 - DNA, 25 bp, Homo sapien
gactgcccacacacatcaggtgccc

SEQ ID NO: 5613802 - DNA, 25 bp, Homo sapien
gagataaaatgagctcctggtctgc

SEQ ID NO: 5613803 - DNA, 25 bp, Homo sapien
aaatgagctcctggtctgcaacagc

SEQ ID NO: 5613804 - DNA, 25 bp, Homo sapien
actaaaagtcattaaattgttcact

SEQ ID NO: 5613805 - DNA, 25 bp, Homo sapien
tgcgaaggagataaaatgagctcct

SEQ ID NO: 5613806 - DNA, 25 bp, Homo sapien
agctccctgcgaaggagataaaatg

SEQ ID NO: 5613807 - DNA, 25 bp, Homo sapien
tctgacctgtgctccctaagctccc

SEQ ID NO: 5613808 - DNA, 25 bp, Homo sapien
tggcctcttccgctctgacctgtgc

SEQ ID NO: 5613809 - DNA, 25 bp, Homo sapien
tgatggttgtacagctctatgacta

SEQ ID NO: 5613810 - DNA, 25 bp, Homo sapien
tcctggtctgcaacagctattggtt

SEQ ID NO: 5613811 - DNA, 25 bp, Homo sapien
tgtgctccctaagctccctgcgaag

SEQ ID NO: 5613812 - DNA, 25 bp, Homo sapien
gctattggttattgtaatgtctgct

SEQ ID NO: 5613813 - DNA, 25 bp, Homo sapien
ttacaaattaacagcccatccatcc

SEQ ID NO: 5613814 - DNA, 25 bp, Homo sapien
atttcaagagaccatttaaagctaa

SEQ ID NO: 5613815 - DNA, 25 bp, Homo sapien
taagcacggtttggaaatttctcac

SEQ ID NO: 5613816 - DNA, 25 bp, Homo sapien
ttaaagctaataagcacggtttgga

SEQ ID NO: 5613817 - DNA, 25 bp, Homo sapien
tgttcaacacaaaaaggacactgag

SEQ ID NO: 5613818 - DNA, 25 bp, Homo sapien
atacaggtttcagatatatgtgttc

SEQ ID NO: 5613819 - DNA, 25 bp, Homo sapien
aaaaggacactgagaaaaatttatg

SEQ ID NO: 5613820 - DNA, 25 bp, Homo sapien
agaaatatctggttaaatacaggtt

SEQ ID NO: 5613821 - DNA, 25 bp, Homo sapien
ttaagaaaagacttgaagatctatt

SEQ ID NO: 5613822 - DNA, 25 bp, Homo sapien
attcagttgagtagaaatatctggt

SEQ ID NO: 5613823 - DNA, 25 bp, Homo sapien
gcatcaaaatgaccctccaaatagt

SEQ ID NO: 5613824 - DNA, 25 bp, Homo sapien
aggaagagagacaatttagtgtaga

SEQ ID NO: 5613825 - DNA, 25 bp, Homo sapien
tatttgaagaacaaaaggaagagag

SEQ ID NO: 5613826 - DNA, 25 bp, Homo sapien
gcagcaggggaaatatccataaatc

SEQ ID NO: 5613827 - DNA, 25 bp, Homo sapien
tagaactttttgcagcaggggaaat

SEQ ID NO: 5613828 - DNA, 25 bp, Homo sapien
ttagtgtagacaagtgctattcaat

SEQ ID NO: 5613829 - DNA, 25 bp, Homo sapien
tgagcaattgaaatgaagctggcac

SEQ ID NO: 5613830 - DNA, 25 bp, Homo sapien
atctgcagggaaaaaaataaaaatc

SEQ ID NO: 5613831 - DNA, 25 bp, Homo sapien
agctcctgtgctacctgaggctgat

SEQ ID NO: 5613832 - DNA, 25 bp, Homo sapien
acctgagaacagatccatacaacct

SEQ ID NO: 5613833 - DNA, 25 bp, Homo sapien
gctggcacaactaaggaactgaagt

SEQ ID NO: 5613834 - DNA, 25 bp, Homo sapien
actagccacagacagctgctgagca

SEQ ID NO: 5613835 - DNA, 25 bp, Homo sapien
taatttccactatgagagcaaactc

SEQ ID NO: 5613836 - DNA, 25 bp, Homo sapien
gagtcctctgcaatggagctgacac

SEQ ID NO: 5613837 - DNA, 25 bp, Homo sapien
ttaaagacatgagacagacctagaa

SEQ ID NO: 5613838 - DNA, 25 bp, Homo sapien
agcttaagaactaaatgagactcat

SEQ ID NO: 5613839 - DNA, 25 bp, Homo sapien
agacctagaaataaaaggctttcaa

SEQ ID NO: 5613840 - DNA, 25 bp, Homo sapien
gagagcaaactcacctgttgctgtc

SEQ ID NO: 5613841 - DNA, 25 bp, Homo sapien
tcatccctcaggcttgggtgtggag

SEQ ID NO: 5613842 - DNA, 25 bp, Homo sapien
gctgacacataaagatttaggtgac

SEQ ID NO: 5613843 - DNA, 25 bp, Homo sapien
acaagagtaacaatggaaagtaaat

SEQ ID NO: 5613844 - DNA, 25 bp, Homo sapien
atcagccaccatgggttaggctttc

SEQ ID NO: 5613845 - DNA, 25 bp, Homo sapien
catctcagagatgtttcagggtttt

SEQ ID NO: 5613846 - DNA, 25 bp, Homo sapien
aatgaatagtaggttgaagagctca

SEQ ID NO: 5613847 - DNA, 25 bp, Homo sapien
tggtaataacaacatccaagggata

SEQ ID NO: 5613848 - DNA, 25 bp, Homo sapien
cacaggctgaggcattaatgaaaat

SEQ ID NO: 5613849 - DNA, 25 bp, Homo sapien
tgaaaggaacttcagttgattcagc

SEQ ID NO: 5613850 - DNA, 25 bp, Homo sapien
tcaggtgtagctagcttaaagtacc

SEQ ID NO: 5613851 - DNA, 25 bp, Homo sapien
ttccactctaggaaaagactctgaa

SEQ ID NO: 5613852 - DNA, 25 bp, Homo sapien
tgacatccattcacaggctgaggca

SEQ ID NO: 5613853 - DNA, 25 bp, Homo sapien
aaatctagaggcagctggtaataac

SEQ ID NO: 5613854 - DNA, 25 bp, Homo sapien
cactgatcaataagtactgacaaac

SEQ ID NO: 5613855 - DNA, 25 bp, Homo sapien
ccaagggatatgttcagccagagag

SEQ ID NO: 5613856 - DNA, 25 bp, Homo sapien
agggctaggtatgctttcaggtgta

SEQ ID NO: 5613857 - DNA, 25 bp, Homo sapien
aacaagggttagaatttgagatctc

SEQ ID NO: 5613858 - DNA, 25 bp, Homo sapien
tctccaccactgaccccaggcagac

SEQ ID NO: 5613859 - DNA, 25 bp, Homo sapien
taccaatgagccacacaggaaaaag

SEQ ID NO: 5613860 - DNA, 25 bp, Homo sapien
gctggggttaacgcaatgtctccac

SEQ ID NO: 5613861 - DNA, 25 bp, Homo sapien
gctagatactggatctaaggagtgc

SEQ ID NO: 5613862 - DNA, 25 bp, Homo sapien
tccaggaggctcaccatgctagata

SEQ ID NO: 5613863 - DNA, 25 bp, Homo sapien
gtttgtttttgacccagcagtggcc

SEQ ID NO: 5613864 - DNA, 25 bp, Homo sapien
tccctgtgcaaagctctggtgatgg

SEQ ID NO: 5613865 - DNA, 25 bp, Homo sapien
ttctatgtggtgtctccctgtgcaa

SEQ ID NO: 5613866 - DNA, 25 bp, Homo sapien
tggtgtgtgtgttgcctcatctgcc

SEQ ID NO: 5613867 - DNA, 25 bp, Homo sapien
gcttcatgagtcagtaaaggctagc

SEQ ID NO: 5613868 - DNA, 25 bp, Homo sapien
tcgtatctgcacgaacaacaacagt

SEQ ID NO: 5613869 - DNA, 25 bp, Homo sapien
actgttgttgttcgtgcagatacga

SEQ ID NO: 5613870 - DNA, 25 bp, Homo sapien
cagaccttgggaagaacaacttttg

SEQ ID NO: 5613871 - DNA, 25 bp, Homo sapien
ctaggttgttatagaatgacagtag

SEQ ID NO: 5613872 - DNA, 25 bp, Homo sapien
tgagacagtggcatttaggactaca

SEQ ID NO: 5613873 - DNA, 25 bp, Homo sapien
gtctccacagggcttaggtcctgat

SEQ ID NO: 5613874 - DNA, 25 bp, Homo sapien
ttaggactacacatgtgggacacat

SEQ ID NO: 5613875 - DNA, 25 bp, Homo sapien
gcccaccccttgctgcccctggaat

SEQ ID NO: 5613876 - DNA, 25 bp, Homo sapien
caggggacaggaacaattttcttca

SEQ ID NO: 5613877 - DNA, 25 bp, Homo sapien
gcatagatggggaagaccttcctta

SEQ ID NO: 5613878 - DNA, 25 bp, Homo sapien
agaggatgacttgacagagatatct

SEQ ID NO: 5613879 - DNA, 25 bp, Homo sapien
taagctgagtgattccatcttgccc

SEQ ID NO: 5613880 - DNA, 25 bp, Homo sapien
aggtcctgataagaggccaactgtg

SEQ ID NO: 5613881 - DNA, 25 bp, Homo sapien
cacaagactgcagaatgtaggtctg

SEQ ID NO: 5613882 - DNA, 25 bp, Homo sapien
agttttggggatgtgacttaatagt

SEQ ID NO: 5613883 - DNA, 25 bp, Homo sapien
ttgtaagctcaaatacacaagactg

SEQ ID NO: 5613884 - DNA, 25 bp, Homo sapien
tggggatgtgacttaatagtgtttc

SEQ ID NO: 5613885 - DNA, 25 bp, Homo sapien
acagcaacccaagtgttttagccaa

SEQ ID NO: 5613886 - DNA, 25 bp, Homo sapien
aatgggtaccattgtaagctcaaat

SEQ ID NO: 5613887 - DNA, 25 bp, Homo sapien
ttcagtacactgactaatatgcgtc

SEQ ID NO: 5613888 - DNA, 25 bp, Homo sapien
tgtaggtctgtgagctgaaaaatca

SEQ ID NO: 5613889 - DNA, 25 bp, Homo sapien
ctaatatgcgtcatgaccactaagt

SEQ ID NO: 5613890 - DNA, 25 bp, Homo sapien
tagccaaatttaatgggtaccattg

SEQ ID NO: 5613891 - DNA, 25 bp, Homo sapien
ttattgccctgaatgaggtgggttt

SEQ ID NO: 5613892 - DNA, 25 bp, Homo sapien
gacgactgcagacatacaaaaaaac

SEQ ID NO: 5613893 - DNA, 25 bp, Homo sapien
caattaatgacgactgcagacatac

SEQ ID NO: 5613894 - DNA, 25 bp, Homo sapien
ttactatgctagggcactgggtatg

SEQ ID NO: 5613895 - DNA, 25 bp, Homo sapien
gacctgaggtctgcagaccacactt

SEQ ID NO: 5613896 - DNA, 25 bp, Homo sapien
atgacctcactgtattagaaacctc

SEQ ID NO: 5613897 - DNA, 25 bp, Homo sapien
gtgtcaagtgccattttaaggactt

SEQ ID NO: 5613898 - DNA, 25 bp, Homo sapien
gggcactgggtatgctactgttcct

SEQ ID NO: 5613899 - DNA, 25 bp, Homo sapien
attcaagcaaagacctacaactatt

SEQ ID NO: 5613900 - DNA, 25 bp, Homo sapien
ctgttcctatttaagggcagataaa

SEQ ID NO: 5613901 - DNA, 25 bp, Homo sapien
cagataaatcatgagaatagccatc

SEQ ID NO: 5613902 - DNA, 25 bp, Homo sapien
agggtcttaggaatgacctgaggtc

SEQ ID NO: 5613903 - DNA, 25 bp, Homo sapien
ggctgctgaggatgatttagcttcc

SEQ ID NO: 5613904 - DNA, 25 bp, Homo sapien
acgtgtaaaaagacactggggaatg

SEQ ID NO: 5613905 - DNA, 25 bp, Homo sapien
aactccagacaagtcaggtgttgcc

SEQ ID NO: 5613906 - DNA, 25 bp, Homo sapien
ctgggaagccaggtaactaaactaa

SEQ ID NO: 5613907 - DNA, 25 bp, Homo sapien
agaggccctcctataagaaatacca

SEQ ID NO: 5613908 - DNA, 25 bp, Homo sapien
aaatgcccagttaacgacaacaaat

SEQ ID NO: 5613909 - DNA, 25 bp, Homo sapien
actggctaagttcggacgtctatcc

SEQ ID NO: 5613910 - DNA, 25 bp, Homo sapien
ccgtcgattttggctgctgaggatg

SEQ ID NO: 5613911 - DNA, 25 bp, Homo sapien
caatgagctaaggccgctctacaac

SEQ ID NO: 5613912 - DNA, 25 bp, Homo sapien
gccattagttacagcctgggaagcc

SEQ ID NO: 5613913 - DNA, 25 bp, Homo sapien
ctagctggatctgactccgccactc

SEQ ID NO: 5613914 - DNA, 25 bp, Homo sapien
atcaacggccctttccagggaagcg

SEQ ID NO: 5613915 - DNA, 25 bp, Homo sapien
ccaaacccccagactcgggactcag

SEQ ID NO: 5613916 - DNA, 25 bp, Homo sapien
cggaatccaaagtcagagcctgttc

SEQ ID NO: 5613917 - DNA, 25 bp, Homo sapien
ttcaggtatgcagccaatgctcttt

SEQ ID NO: 5613918 - DNA, 25 bp, Homo sapien
gcagaacgctgaacaaatcaacggc

SEQ ID NO: 5613919 - DNA, 25 bp, Homo sapien
cacagtcaaactaagcctcccacgt

SEQ ID NO: 5613920 - DNA, 25 bp, Homo sapien
tccacttttgagaggcaccaggatg

SEQ ID NO: 5613921 - DNA, 25 bp, Homo sapien
gagtcccacgggatcaccagatata

SEQ ID NO: 5613922 - DNA, 25 bp, Homo sapien
caccaggatgtgcctctcgcttgcc

SEQ ID NO: 5613923 - DNA, 25 bp, Homo sapien
cctccaagcctgcctaccgtggacc

SEQ ID NO: 5613924 - DNA, 25 bp, Homo sapien
ctgcgcatgagctaatgccgcacgc

SEQ ID NO: 5613925 - DNA, 25 bp, Homo sapien
atgcacattgtcagcagggtgaatc

SEQ ID NO: 5613926 - DNA, 25 bp, Homo sapien
tggctgtctgtgctctgttacactg

SEQ ID NO: 5613927 - DNA, 25 bp, Homo sapien
tgtggggtgtgtatttctagtagaa

SEQ ID NO: 5613928 - DNA, 25 bp, Homo sapien
tttgtctctgcagtccaagctggag

SEQ ID NO: 5613929 - DNA, 25 bp, Homo sapien
tgcctgtacattaagatgcagatgt

SEQ ID NO: 5613930 - DNA, 25 bp, Homo sapien
tcaccctcactataaacgctgttac

SEQ ID NO: 5613931 - DNA, 25 bp, Homo sapien
agtccaagctggagacattaaaaac

SEQ ID NO: 5613932 - DNA, 25 bp, Homo sapien
tcatggaacaaatattaagatgtct

SEQ ID NO: 5613933 - DNA, 25 bp, Homo sapien
ttttaaggaaactctgtatatctac

SEQ ID NO: 5613934 - DNA, 25 bp, Homo sapien
tgttacactgtgactaccattaatc

SEQ ID NO: 5613935 - DNA, 25 bp, Homo sapien
tgccctcccaaccctggaacctggc

SEQ ID NO: 5613936 - DNA, 25 bp, Homo sapien
taatagctttcagtagttgtatctc

SEQ ID NO: 5613937 - DNA, 25 bp, Homo sapien
atttgctgtattctagatgtggctt

SEQ ID NO: 5613938 - DNA, 25 bp, Homo sapien
tgtatctcataagtctgtaacctac

SEQ ID NO: 5613939 - DNA, 25 bp, Homo sapien
atttcttgaagttgctgagtcattt

SEQ ID NO: 5613940 - DNA, 25 bp, Homo sapien
cggtcctcatgtgtactagtgcgtt

SEQ ID NO: 5613941 - DNA, 25 bp, Homo sapien
atgtgtttcttaaggaagatcattt

SEQ ID NO: 5613942 - DNA, 25 bp, Homo sapien
ttgtacactagatgttgatgaaatc

SEQ ID NO: 5613943 - DNA, 25 bp, Homo sapien
tgtggcttattgaatctctaacatt

SEQ ID NO: 5613944 - DNA, 25 bp, Homo sapien
tagatgttgatgaaatcggtgattg

SEQ ID NO: 5613945 - DNA, 25 bp, Homo sapien
gaaatcggtgattgagattttgtcc

SEQ ID NO: 5613946 - DNA, 25 bp, Homo sapien
tcagttgtctaaaacaatgtgtttc

SEQ ID NO: 5613947 - DNA, 25 bp, Homo sapien
gcaatctcacctcagcttcttgagc

SEQ ID NO: 5613948 - DNA, 25 bp, Homo sapien
gaatgcagtgggcaatcacacactg

SEQ ID NO: 5613949 - DNA, 25 bp, Homo sapien
gcttatgcaaggacaattactgctc

SEQ ID NO: 5613950 - DNA, 25 bp, Homo sapien
gtatgcttcattgaccagcaatgac

SEQ ID NO: 5613951 - DNA, 25 bp, Homo sapien
aggacaattactgctcagattggtc

SEQ ID NO: 5613952 - DNA, 25 bp, Homo sapien
cagattggtctgttagtatgcttca

SEQ ID NO: 5613953 - DNA, 25 bp, Homo sapien
agcttcttgagcagttgggactata

SEQ ID NO: 5613954 - DNA, 25 bp, Homo sapien
tgaccaggacggtcatgaactcctg

SEQ ID NO: 5613955 - DNA, 25 bp, Homo sapien
cttcttgagcagttgggactatagg

SEQ ID NO: 5613956 - DNA, 25 bp, Homo sapien
actctgttgaccaggacggtcatga

SEQ ID NO: 5613957 - DNA, 25 bp, Homo sapien
ccagcctaaacgtatttttgaaatc

SEQ ID NO: 5613958 - DNA, 25 bp, Homo sapien
aattctagtttgtaaatctgcccac

SEQ ID NO: 5613959 - DNA, 25 bp, Homo sapien
ggtcacagatatacagtaattgaac

SEQ ID NO: 5613960 - DNA, 25 bp, Homo sapien
accattaaacagacagggacaggtt

SEQ ID NO: 5613961 - DNA, 25 bp, Homo sapien
atgattaaaggatccatagtccagt

SEQ ID NO: 5613962 - DNA, 25 bp, Homo sapien
gaaaatgaagaggacatattagatt

SEQ ID NO: 5613963 - DNA, 25 bp, Homo sapien
aaatccagaaaatgaagaggacata

SEQ ID NO: 5613964 - DNA, 25 bp, Homo sapien
ctccagagtcatacgcatgagattc

SEQ ID NO: 5613965 - DNA, 25 bp, Homo sapien
agcctctccaaaagtgacaagtcac

SEQ ID NO: 5613966 - DNA, 25 bp, Homo sapien
tctgagcaggacataaaaaatacaa

SEQ ID NO: 5613967 - DNA, 25 bp, Homo sapien
cagatcaaatctgagcaggacataa

SEQ ID NO: 5613968 - DNA, 25 bp, Homo sapien
agacagggacaggttttcaaaacaa

SEQ ID NO: 5613969 - DNA, 25 bp, Homo sapien
gtgactgtgtctattctggctgtgc

SEQ ID NO: 5613970 - DNA, 25 bp, Homo sapien
tggcctggaaaatgagtctctttgg

SEQ ID NO: 5613971 - DNA, 25 bp, Homo sapien
attgtcttgactgcagaagtaactg

SEQ ID NO: 5613972 - DNA, 25 bp, Homo sapien
ctgttctcagagtcaccattacggt

SEQ ID NO: 5613973 - DNA, 25 bp, Homo sapien
gaagtaactgctgtcactgttctca

SEQ ID NO: 5613974 - DNA, 25 bp, Homo sapien
cactgctagggtacactttcattcc

SEQ ID NO: 5613975 - DNA, 25 bp, Homo sapien
ctccctaaaagagggccgtgattgg

SEQ ID NO: 5613976 - DNA, 25 bp, Homo sapien
tcattgttcaggagtcaagtatttc

SEQ ID NO: 5613977 - DNA, 25 bp, Homo sapien
agcagaatggtgaatcaacaagacc

SEQ ID NO: 5613978 - DNA, 25 bp, Homo sapien
ttctccagtaagctaagagcagaat

SEQ ID NO: 5613979 - DNA, 25 bp, Homo sapien
ccttaggccgccctctggcctggaa

SEQ ID NO: 5613980 - DNA, 25 bp, Homo sapien
cgtccgtatccaaacgtgtatgtgt

SEQ ID NO: 5613981 - DNA, 25 bp, Homo sapien
acacatacacgtttggatacggacg

SEQ ID NO: 5613982 - DNA, 25 bp, Homo sapien
gcctaaacaacgccaccaacttgag

SEQ ID NO: 5613983 - DNA, 25 bp, Homo sapien
gagagaatacagaccatacccagtc

SEQ ID NO: 5613984 - DNA, 25 bp, Homo sapien
gccaccaacttgagagaatacagac

SEQ ID NO: 5613985 - DNA, 25 bp, Homo sapien
atggtttattgtaccctcaacctcc

SEQ ID NO: 5613986 - DNA, 25 bp, Homo sapien
ggaaagctactgttaatagggcaac

SEQ ID NO: 5613987 - DNA, 25 bp, Homo sapien
tgataaaacagatgtaaagggtgga

SEQ ID NO: 5613988 - DNA, 25 bp, Homo sapien
aacttgagagaatacagaccatacc

SEQ ID NO: 5613989 - DNA, 25 bp, Homo sapien
ctctacacttgcgggtagaggagag

SEQ ID NO: 5613990 - DNA, 25 bp, Homo sapien
aacttgcatgataaaacagatgtaa

SEQ ID NO: 5613991 - DNA, 25 bp, Homo sapien
agagaatcatagggcatcagcattc

SEQ ID NO: 5613992 - DNA, 25 bp, Homo sapien
tgttaatagggcaacatacatgcca

SEQ ID NO: 5613993 - DNA, 25 bp, Homo sapien
tgttttgcctgccaatacaactttt

SEQ ID NO: 5613994 - DNA, 25 bp, Homo sapien
tcatcaactttaatagagtccaatc

SEQ ID NO: 5613995 - DNA, 25 bp, Homo sapien
tcttttgaggttgcattataatagt

SEQ ID NO: 5613996 - DNA, 25 bp, Homo sapien
attaataagaatttagtgctcagat

SEQ ID NO: 5613997 - DNA, 25 bp, Homo sapien
cataatggaagttcatgcaaaaaat

SEQ ID NO: 5613998 - DNA, 25 bp, Homo sapien
ttctttataattaaggcaaaggtga

SEQ ID NO: 5613999 - DNA, 25 bp, Homo sapien
atagagtccaatcttttgaggttgc

SEQ ID NO: 5614000 - DNA, 25 bp, Homo sapien
ttagttgtacatacatgtgaggaaa

SEQ ID NO: 5614001 - DNA, 25 bp, Homo sapien
ttcgttttctgaaggtagctgaatt

SEQ ID NO: 5614002 - DNA, 25 bp, Homo sapien
atcagttgtctttgggcttaaaaat

SEQ ID NO: 5614003 - DNA, 25 bp, Homo sapien
tgaaggtagctgaattttgtaaagt

SEQ ID NO: 5614004 - DNA, 25 bp, Homo sapien
atagtcagataccttttggagcaat

SEQ ID NO: 5614005 - DNA, 25 bp, Homo sapien
tgcctgattctaggactggggcaga

SEQ ID NO: 5614006 - DNA, 25 bp, Homo sapien
gtagatagccctcaaaagctgaagc

SEQ ID NO: 5614007 - DNA, 25 bp, Homo sapien
caaagcaacagaaaaacgtggtatt

SEQ ID NO: 5614008 - DNA, 25 bp, Homo sapien
ggggcagaaaatacacaagataagc

SEQ ID NO: 5614009 - DNA, 25 bp, Homo sapien
ataaaaaagcgcctgctccccctga

SEQ ID NO: 5614010 - DNA, 25 bp, Homo sapien
ataaatggttgaataaatgagagag

SEQ ID NO: 5614011 - DNA, 25 bp, Homo sapien
gagagagaagagataaatctcccgt

SEQ ID NO: 5614012 - DNA, 25 bp, Homo sapien
agaatatattatagtgccggaaaat

SEQ ID NO: 5614013 - DNA, 25 bp, Homo sapien
tgcccacgagtccatattgatagaa

SEQ ID NO: 5614014 - DNA, 25 bp, Homo sapien
agctgaagctagaacaaagcaacag

SEQ ID NO: 5614015 - DNA, 25 bp, Homo sapien
gcagcactcagtggtccaggcttat

SEQ ID NO: 5614016 - DNA, 25 bp, Homo sapien
gatgcagtaacccgttttctgaccc

SEQ ID NO: 5614017 - DNA, 25 bp, Homo sapien
catgaaatgtgaaagatgcagtaac

SEQ ID NO: 5614018 - DNA, 25 bp, Homo sapien
actatgatagtaaaccgataaagta

SEQ ID NO: 5614019 - DNA, 25 bp, Homo sapien
cccatatggaatgtatgtgggacga

SEQ ID NO: 5614020 - DNA, 25 bp, Homo sapien
gtgggtctgtgttttcctgcggctc

SEQ ID NO: 5614021 - DNA, 25 bp, Homo sapien
ctgcggctctaggtccccatatgga

SEQ ID NO: 5614022 - DNA, 25 bp, Homo sapien
tgggctccgactttccctctagggc

SEQ ID NO: 5614023 - DNA, 25 bp, Homo sapien
ttttttcacagtgaagccgggcctg

SEQ ID NO: 5614024 - DNA, 25 bp, Homo sapien
atccagctaggtgacggctgaaatg

SEQ ID NO: 5614025 - DNA, 25 bp, Homo sapien
gtccaggcttatccagctaggtgac

SEQ ID NO: 5614026 - DNA, 25 bp, Homo sapien
acaatgagccctgtaaccatgttca

SEQ ID NO: 5614027 - DNA, 25 bp, Homo sapien
aaggagatgaccacgtccttgggac

SEQ ID NO: 5614028 - DNA, 25 bp, Homo sapien
catgttcattggggacatagcaacc

SEQ ID NO: 5614029 - DNA, 25 bp, Homo sapien
tgtggtaatagtttcatgactgtga

SEQ ID NO: 5614030 - DNA, 25 bp, Homo sapien
tgctaaagggcatcgaattatatac

SEQ ID NO: 5614031 - DNA, 25 bp, Homo sapien
ggacatagcaaccgcaccaacaaca

SEQ ID NO: 5614032 - DNA, 25 bp, Homo sapien
taagtgaactatatggtactgaggc

SEQ ID NO: 5614033 - DNA, 25 bp, Homo sapien
aacaacacaacaaacctcagcactc

SEQ ID NO: 5614034 - DNA, 25 bp, Homo sapien
gcaaccgcaccaacaacacaacaaa

SEQ ID NO: 5614035 - DNA, 25 bp, Homo sapien
taaagttgattgtggtaatagtttc

SEQ ID NO: 5614036 - DNA, 25 bp, Homo sapien
atgactgtgaacatgctaaagggca

SEQ ID NO: 5614037 - DNA, 25 bp, Homo sapien
attccatgatttctaaggttatctc

SEQ ID NO: 5614038 - DNA, 25 bp, Homo sapien
gaattacaggcgcatgccaccacac

SEQ ID NO: 5614039 - DNA, 25 bp, Homo sapien
taaggttatctcagagaatgattcc

SEQ ID NO: 5614040 - DNA, 25 bp, Homo sapien
tccctaggatctcaaattccatgat

SEQ ID NO: 5614041 - DNA, 25 bp, Homo sapien
tataggtctctatgattgtgttctt

SEQ ID NO: 5614042 - DNA, 25 bp, Homo sapien
ctaccatccactaaatataggtctc

SEQ ID NO: 5614043 - DNA, 25 bp, Homo sapien
cgccaccggccaaatgtcccatctt

SEQ ID NO: 5614044 - DNA, 25 bp, Homo sapien
ttgtaatcttgtactcccacttctc

SEQ ID NO: 5614045 - DNA, 25 bp, Homo sapien
catcctccagtatcaaattatcaac

SEQ ID NO: 5614046 - DNA, 25 bp, Homo sapien
ctgtgacagtgcttttgtaatcttg

SEQ ID NO: 5614047 - DNA, 25 bp, Homo sapien
ctggaattacaggcgcatgccacca

SEQ ID NO: 5614048 - DNA, 25 bp, Homo sapien
cattcagtatagaactaagtgctct

SEQ ID NO: 5614049 - DNA, 25 bp, Homo sapien
tcccattccatcacgtggctgacat

SEQ ID NO: 5614050 - DNA, 25 bp, Homo sapien
cgtggctgacatgcctgattgcagg

SEQ ID NO: 5614051 - DNA, 25 bp, Homo sapien
gacactaatatgatggggtaaagat

SEQ ID NO: 5614052 - DNA, 25 bp, Homo sapien
tgattgcagggcttagacactaata

SEQ ID NO: 5614053 - DNA, 25 bp, Homo sapien
tgaaagagctttcatgaaaatgcct

SEQ ID NO: 5614054 - DNA, 25 bp, Homo sapien
tccccatggtagctatctcaacttt

SEQ ID NO: 5614055 - DNA, 25 bp, Homo sapien
gaaaatgcctggagccattcagtat

SEQ ID NO: 5614056 - DNA, 25 bp, Homo sapien
actaagtgctcttccccatggtagc

SEQ ID NO: 5614057 - DNA, 25 bp, Homo sapien
ctttcatgaaaatgcctggagccat

SEQ ID NO: 5614058 - DNA, 25 bp, Homo sapien
ggggtaaagatatggatgaatattc

SEQ ID NO: 5614059 - DNA, 25 bp, Homo sapien
atcttttgagagcaatcaatatatt

SEQ ID NO: 5614060 - DNA, 25 bp, Homo sapien
tgttaaagcattgaagatactgact

SEQ ID NO: 5614061 - DNA, 25 bp, Homo sapien
aatatgtaaaccagtttgacaactt

SEQ ID NO: 5614062 - DNA, 25 bp, Homo sapien
gtcctagtcactgtatcctgagttc

SEQ ID NO: 5614063 - DNA, 25 bp, Homo sapien
aattagcctaagaatgcactctgtc

SEQ ID NO: 5614064 - DNA, 25 bp, Homo sapien
aaagacctctacctactgttaaagc

SEQ ID NO: 5614065 - DNA, 25 bp, Homo sapien
attcagaagaaacagaggaattttt

SEQ ID NO: 5614066 - DNA, 25 bp, Homo sapien
ggactaggcactaattagcctaaga

SEQ ID NO: 5614067 - DNA, 25 bp, Homo sapien
taagaatgcactctgtcctagtcac

SEQ ID NO: 5614068 - DNA, 25 bp, Homo sapien
gtcactgtatcctgagttccaaccc

SEQ ID NO: 5614069 - DNA, 25 bp, Homo sapien
tactgttaaagcattgaagatactg

SEQ ID NO: 5614070 - DNA, 25 bp, Homo sapien
taagaccctaaaagtagttatgcac

SEQ ID NO: 5614071 - DNA, 25 bp, Homo sapien
agcaagggggcatttaagaccctaa

SEQ ID NO: 5614072 - DNA, 25 bp, Homo sapien
tgaacctagcatcctaaaccagtag

SEQ ID NO: 5614073 - DNA, 25 bp, Homo sapien
gcccagccatacccacaaagatttt

SEQ ID NO: 5614074 - DNA, 25 bp, Homo sapien
ctcagaccccatgctctaccattcc

SEQ ID NO: 5614075 - DNA, 25 bp, Homo sapien
taattgtctccagaaagcaaggggg

SEQ ID NO: 5614076 - DNA, 25 bp, Homo sapien
acaacaattggtgggaaacagtttc

SEQ ID NO: 5614077 - DNA, 25 bp, Homo sapien
catgctagagagaatctgtactatg

SEQ ID NO: 5614078 - DNA, 25 bp, Homo sapien
ggaaacagtttcaggtgatctacac

SEQ ID NO: 5614079 - DNA, 25 bp, Homo sapien
aaaccagtaggagcacattaaatat

SEQ ID NO: 5614080 - DNA, 25 bp, Homo sapien
attccgttgagccccacataacctc

SEQ ID NO: 5614081 - DNA, 25 bp, Homo sapien
tctgcaccaaatctctaatattacc

SEQ ID NO: 5614082 - DNA, 25 bp, Homo sapien
actgcaactcattgagacagtgcaa

SEQ ID NO: 5614083 - DNA, 25 bp, Homo sapien
attgagacagtgcaattacacggca

SEQ ID NO: 5614084 - DNA, 25 bp, Homo sapien
cccactcagcattccaagtagctag

SEQ ID NO: 5614085 - DNA, 25 bp, Homo sapien
tcaaactcttggcctgagagcatta

SEQ ID NO: 5614086 - DNA, 25 bp, Homo sapien
ttggcctgagagcattaaaacactt

SEQ ID NO: 5614087 - DNA, 25 bp, Homo sapien
gtgtctcaacaaattttcataggaa

SEQ ID NO: 5614088 - DNA, 25 bp, Homo sapien
cataggaattgtacagaatacatac

SEQ ID NO: 5614089 - DNA, 25 bp, Homo sapien
tacaagtaattatctgggcttctga

SEQ ID NO: 5614090 - DNA, 25 bp, Homo sapien
ttacacggcacttaagtgtctcaac

SEQ ID NO: 5614091 - DNA, 25 bp, Homo sapien
agagtgcagtagagccatcataatt

SEQ ID NO: 5614092 - DNA, 25 bp, Homo sapien
ctagtcttatataagcaaatgcaaa

SEQ ID NO: 5614093 - DNA, 25 bp, Homo sapien
tgagtaccaatgtcctgatttagcc

SEQ ID NO: 5614094 - DNA, 25 bp, Homo sapien
tatatccaatcccaccactaagaag

SEQ ID NO: 5614095 - DNA, 25 bp, Homo sapien
cagttatagctgtgagtaccaatgt

SEQ ID NO: 5614096 - DNA, 25 bp, Homo sapien
gcctgggcttatatccaatcccacc

SEQ ID NO: 5614097 - DNA, 25 bp, Homo sapien
gtgagagtgggcaagttactctatc

SEQ ID NO: 5614098 - DNA, 25 bp, Homo sapien
accactaagaagcagtgtgagagtg

SEQ ID NO: 5614099 - DNA, 25 bp, Homo sapien
aaatgctggtattgtaggtgtgagc

SEQ ID NO: 5614100 - DNA, 25 bp, Homo sapien
catctgcaaagtaagaataataata

SEQ ID NO: 5614101 - DNA, 25 bp, Homo sapien
tagctgtgagtaccaatgtcctgat

SEQ ID NO: 5614102 - DNA, 25 bp, Homo sapien
atctctctttaacctcagccctttc

SEQ ID NO: 5614103 - DNA, 25 bp, Homo sapien
actgcagagctcacttggccaatca

SEQ ID NO: 5614104 - DNA, 25 bp, Homo sapien
gaagatgacaagatcgaagactttc

SEQ ID NO: 5614105 - DNA, 25 bp, Homo sapien
ctgctgagaactagccctagacctc

SEQ ID NO: 5614106 - DNA, 25 bp, Homo sapien
gaagacatcaccagtgtgtggagcc

SEQ ID NO: 5614107 - DNA, 25 bp, Homo sapien
cagcagcaccaatggtgaagatgac

SEQ ID NO: 5614108 - DNA, 25 bp, Homo sapien
tgccaccggacctacagctgcattc

SEQ ID NO: 5614109 - DNA, 25 bp, Homo sapien
gcctcgtgggctgccccagagttca

SEQ ID NO: 5614110 - DNA, 25 bp, Homo sapien
ccgtgcgacccatcctgtgggagtg

SEQ ID NO: 5614111 - DNA, 25 bp, Homo sapien
cacccgctgccaaaccacggccttt

SEQ ID NO: 5614112 - DNA, 25 bp, Homo sapien
ctagacctctgcgtgagggttcttc

SEQ ID NO: 5614113 - DNA, 25 bp, Homo sapien
tccggtgtttcccgtgcgacccatc

SEQ ID NO: 5614114 - DNA, 25 bp, Homo sapien
ttgaataactacaaacgtacattta

SEQ ID NO: 5614115 - DNA, 25 bp, Homo sapien
agaagcattttattacatcagcact

SEQ ID NO: 5614116 - DNA, 25 bp, Homo sapien
gtgcgtttcaaaataggtggccatc

SEQ ID NO: 5614117 - DNA, 25 bp, Homo sapien
ataggtggccatcttgaaattcata

SEQ ID NO: 5614118 - DNA, 25 bp, Homo sapien
ttctaaagaaggctttgcaagctga

SEQ ID NO: 5614119 - DNA, 25 bp, Homo sapien
acaacagacttcatggcaaaggtgt

SEQ ID NO: 5614120 - DNA, 25 bp, Homo sapien
aaagaaggctttgcaagctgagtgt

SEQ ID NO: 5614121 - DNA, 25 bp, Homo sapien
ttctactcagagtgggttattttct

SEQ ID NO: 5614122 - DNA, 25 bp, Homo sapien
aaccacatagttaatagaagcattt

SEQ ID NO: 5614123 - DNA, 25 bp, Homo sapien
aaggtgtgcgtttcaaaataggtgg

SEQ ID NO: 5614124 - DNA, 25 bp, Homo sapien
acagacttcatggcaaaggtgtgcg

SEQ ID NO: 5614125 - DNA, 25 bp, Homo sapien
gcagctgccagctacctggcccaga

SEQ ID NO: 5614126 - DNA, 25 bp, Homo sapien
tgaacgcatctcaccaaacccttcc

SEQ ID NO: 5614127 - DNA, 25 bp, Homo sapien
gattagggagatgcacttagctttt

SEQ ID NO: 5614128 - DNA, 25 bp, Homo sapien
acgtgtgtctctgactctgcgttgc

SEQ ID NO: 5614129 - DNA, 25 bp, Homo sapien
aagaaatacacccatcgtctcctac

SEQ ID NO: 5614130 - DNA, 25 bp, Homo sapien
cctgtgctcctaccatcgagcccac

SEQ ID NO: 5614131 - DNA, 25 bp, Homo sapien
catcgagcccactacctggctgggg

SEQ ID NO: 5614132 - DNA, 25 bp, Homo sapien
caacagaccctcagcgagctctagc

SEQ ID NO: 5614133 - DNA, 25 bp, Homo sapien
tcttactagattagggagatgcact

SEQ ID NO: 5614134 - DNA, 25 bp, Homo sapien
ctacctggcccagaaaagaaataca

SEQ ID NO: 5614135 - DNA, 25 bp, Homo sapien
actctgcgttgcgagcagagtgagg

SEQ ID NO: 5614136 - DNA, 25 bp, Homo sapien
ctcctggaattacaggcgcctgcca

SEQ ID NO: 5614137 - DNA, 25 bp, Homo sapien
gactcaagaaacaatagcaagactg

SEQ ID NO: 5614138 - DNA, 25 bp, Homo sapien
gggtgtaagcgattcttgtgcctca

SEQ ID NO: 5614139 - DNA, 25 bp, Homo sapien
ctggaattacaggcgcctgccacca

SEQ ID NO: 5614140 - DNA, 25 bp, Homo sapien
tcattctgttgcccaggcaggagtg

SEQ ID NO: 5614141 - DNA, 25 bp, Homo sapien
ggactcaagaaacaatagcaagact

SEQ ID NO: 5614142 - DNA, 25 bp, Homo sapien
gtgtaagcgattcttgtgcctcagc

SEQ ID NO: 5614143 - DNA, 25 bp, Homo sapien
cattctgttgcccaggcaggagtgc

SEQ ID NO: 5614144 - DNA, 25 bp, Homo sapien
aaacaatagcaagactgtaaaacgt

SEQ ID NO: 5614145 - DNA, 25 bp, Homo sapien
agaaacaatagcaagactgtaaaac

SEQ ID NO: 5614146 - DNA, 25 bp, Homo sapien
tcaagaaacaatagcaagactgtaa

SEQ ID NO: 5614147 - DNA, 25 bp, Homo sapien
gaaatgctggtgtagatgctctcgt

SEQ ID NO: 5614148 - DNA, 25 bp, Homo sapien
caaaactcgtgggtgttaaacatgt

SEQ ID NO: 5614149 - DNA, 25 bp, Homo sapien
tacagaccgagcatttaaaatacgt

SEQ ID NO: 5614150 - DNA, 25 bp, Homo sapien
ataatagcagcatgattttagcctc

SEQ ID NO: 5614151 - DNA, 25 bp, Homo sapien
tgctagtctgatgtattttgggggg

SEQ ID NO: 5614152 - DNA, 25 bp, Homo sapien
tgtaaacataggactgccttgctag

SEQ ID NO: 5614153 - DNA, 25 bp, Homo sapien
ataaaaactggcatgaatcctaatc

SEQ ID NO: 5614154 - DNA, 25 bp, Homo sapien
ctccagagttataaagagctatacc

SEQ ID NO: 5614155 - DNA, 25 bp, Homo sapien
attaagagttatggaatgaaatgac

SEQ ID NO: 5614156 - DNA, 25 bp, Homo sapien
gttctaaaaagccagagcagcaacc

SEQ ID NO: 5614157 - DNA, 25 bp, Homo sapien
agttgggctagagagttcctactct

SEQ ID NO: 5614158 - DNA, 25 bp, Homo sapien
attgcccactggtacagctactggt

SEQ ID NO: 5614159 - DNA, 25 bp, Homo sapien
ttaaaggttattgcccactggtaca

SEQ ID NO: 5614160 - DNA, 25 bp, Homo sapien
aaagacatactgaaacaaatgttgt

SEQ ID NO: 5614161 - DNA, 25 bp, Homo sapien
actggtacactgtctggaaagctcg

SEQ ID NO: 5614162 - DNA, 25 bp, Homo sapien
gtacactgtctggaaagctcggaat

SEQ ID NO: 5614163 - DNA, 25 bp, Homo sapien
tgcagcaacaaattgcaaagtgctt

SEQ ID NO: 5614164 - DNA, 25 bp, Homo sapien
cttacaggctgcgtttggaaacctt

SEQ ID NO: 5614165 - DNA, 25 bp, Homo sapien
gcggatagctagactctgcagagtt

SEQ ID NO: 5614166 - DNA, 25 bp, Homo sapien
agctactggtacactgtctggaaag

SEQ ID NO: 5614167 - DNA, 25 bp, Homo sapien
ctggaaagctcggaatggtttattg

SEQ ID NO: 5614168 - DNA, 25 bp, Homo sapien
ttatattgacagttgtgattccatc

SEQ ID NO: 5614169 - DNA, 25 bp, Homo sapien
aaatggagcttgaaaagttgatacc

SEQ ID NO: 5614170 - DNA, 25 bp, Homo sapien
acatgccatcagagggtttctagat

SEQ ID NO: 5614171 - DNA, 25 bp, Homo sapien
tggggtataatttaagtatgcaaac

SEQ ID NO: 5614172 - DNA, 25 bp, Homo sapien
cttttagtgcatttgagcctgattc

SEQ ID NO: 5614173 - DNA, 25 bp, Homo sapien
aagttctacatgccatcagagggtt

SEQ ID NO: 5614174 - DNA, 25 bp, Homo sapien
gttttccactgagaacaagttctac

SEQ ID NO: 5614175 - DNA, 25 bp, Homo sapien
agttgataccaaagtccatatgaaa

SEQ ID NO: 5614176 - DNA, 25 bp, Homo sapien
aattaaacataagaacaactagaag

SEQ ID NO: 5614177 - DNA, 25 bp, Homo sapien
ttgagaattagttgactgagttttc

SEQ ID NO: 5614178 - DNA, 25 bp, Homo sapien
tcagagtagtctaaacacaattttc

SEQ ID NO: 5614179 - DNA, 25 bp, Homo sapien
agggataagaattttcagagtagtc

SEQ ID NO: 5614180 - DNA, 25 bp, Homo sapien
ggaagaaatcagatcatgagtgtaa

SEQ ID NO: 5614181 - DNA, 25 bp, Homo sapien
ctctttgtgttccgaccagtgcccg

SEQ ID NO: 5614182 - DNA, 25 bp, Homo sapien
accgtccacacaatgcaaggggttc

SEQ ID NO: 5614183 - DNA, 25 bp, Homo sapien
agtagctgcaatgagctgccttgaa

SEQ ID NO: 5614184 - DNA, 25 bp, Homo sapien
gagacctgtttcactggaggccagt

SEQ ID NO: 5614185 - DNA, 25 bp, Homo sapien
aatgcaaggggttcttatggaattc

SEQ ID NO: 5614186 - DNA, 25 bp, Homo sapien
caggaaagttgcgtgagttctctga

SEQ ID NO: 5614187 - DNA, 25 bp, Homo sapien
ttttccagtgccccgtgctcagaga

SEQ ID NO: 5614188 - DNA, 25 bp, Homo sapien
agccgctgtgctgtctcaggaaagt

SEQ ID NO: 5614189 - DNA, 25 bp, Homo sapien
gctgccttgaaggaccaacccagat

SEQ ID NO: 5614190 - DNA, 25 bp, Homo sapien
agagagtccaaccaggggatatttg

SEQ ID NO: 5614191 - DNA, 25 bp, Homo sapien
gatcctcatttctagaaaaagtatt

SEQ ID NO: 5614192 - DNA, 25 bp, Homo sapien
aatactttttctagaaatgaggatc

SEQ ID NO: 5614193 - DNA, 25 bp, Homo sapien
attaacagtgaaagaatattaagaa

SEQ ID NO: 5614194 - DNA, 25 bp, Homo sapien
cttaactctttttgaggactgcttg

SEQ ID NO: 5614195 - DNA, 25 bp, Homo sapien
cagtttacattgttgttgattccgc

SEQ ID NO: 5614196 - DNA, 25 bp, Homo sapien
atttccaagtgtgcttctctactat

SEQ ID NO: 5614197 - DNA, 25 bp, Homo sapien
agggtgagtttttgctggctgtttc

SEQ ID NO: 5614198 - DNA, 25 bp, Homo sapien
gttggctaaaatcagataataggtc

SEQ ID NO: 5614199 - DNA, 25 bp, Homo sapien
gactgcttggtctcctttacagctc

SEQ ID NO: 5614200 - DNA, 25 bp, Homo sapien
tccctgttaactctcactgaggttg

SEQ ID NO: 5614201 - DNA, 25 bp, Homo sapien
ctcactgaggttgttgattagaatt

SEQ ID NO: 5614202 - DNA, 25 bp, Homo sapien
tgattccgctgttctcaactgttga

SEQ ID NO: 5614203 - DNA, 25 bp, Homo sapien
tcagataataggtcagtcacggtgg

SEQ ID NO: 5614204 - DNA, 25 bp, Homo sapien
atacaacccacagccaatcaggaag

SEQ ID NO: 5614205 - DNA, 25 bp, Homo sapien
tccccatcaagtcacctaagccttt

SEQ ID NO: 5614206 - DNA, 25 bp, Homo sapien
cccacagccaatcaggaaggttcta

SEQ ID NO: 5614207 - DNA, 25 bp, Homo sapien
cccttcccaaggagtttgctgtgga

SEQ ID NO: 5614208 - DNA, 25 bp, Homo sapien
ctgactcactggaaccaccacaccc

SEQ ID NO: 5614209 - DNA, 25 bp, Homo sapien
ttttgatacaacccacagccaatca

SEQ ID NO: 5614210 - DNA, 25 bp, Homo sapien
cccaaggagtttgctgtggaaatgt

SEQ ID NO: 5614211 - DNA, 25 bp, Homo sapien
agtttgctgtggaaatgtgtttggg

SEQ ID NO: 5614212 - DNA, 25 bp, Homo sapien
aatcaggaaggttctacccatgggg

SEQ ID NO: 5614213 - DNA, 25 bp, Homo sapien
aagtcacctaagcctttcggtcctc

SEQ ID NO: 5614214 - DNA, 25 bp, Homo sapien
aacatttcttccagggcccctgaaa

SEQ ID NO: 5614215 - DNA, 25 bp, Homo sapien
ggcagcgtgcaacctatcatggtgc

SEQ ID NO: 5614216 - DNA, 25 bp, Homo sapien
catggtgctattttgtaggtatggt

SEQ ID NO: 5614217 - DNA, 25 bp, Homo sapien
cgctggtagagatagtgctgtccag

SEQ ID NO: 5614218 - DNA, 25 bp, Homo sapien
cctccgagctcaggctatggacttt

SEQ ID NO: 5614219 - DNA, 25 bp, Homo sapien
gagctcaggctatggactttgactc

SEQ ID NO: 5614220 - DNA, 25 bp, Homo sapien
tgtaggtatggtgaaaatcatgaaa

SEQ ID NO: 5614221 - DNA, 25 bp, Homo sapien
cccaggcctcccatcgtgaactctt

SEQ ID NO: 5614222 - DNA, 25 bp, Homo sapien
gagaggtcagggtctgcctgaattg

SEQ ID NO: 5614223 - DNA, 25 bp, Homo sapien
atgtttggaaaactctgcaagaata

SEQ ID NO: 5614224 - DNA, 25 bp, Homo sapien
actttgactcccaggaggagaaacc

SEQ ID NO: 5614225 - DNA, 25 bp, Homo sapien
tgaactctttccgttggtccccagc

SEQ ID NO: 5614226 - DNA, 25 bp, Homo sapien
atactggttgtaaatactggcacat

SEQ ID NO: 5614227 - DNA, 25 bp, Homo sapien
aagaaaccccctggatgtacacatc

SEQ ID NO: 5614228 - DNA, 25 bp, Homo sapien
tcttgcccttatttgggggctcgtc

SEQ ID NO: 5614229 - DNA, 25 bp, Homo sapien
tgggggctcgtcatgcacttcaatt

SEQ ID NO: 5614230 - DNA, 25 bp, Homo sapien
ctattaggaagaaaccccctggatg

SEQ ID NO: 5614231 - DNA, 25 bp, Homo sapien
tccaaactgtatgagctctattaag

SEQ ID NO: 5614232 - DNA, 25 bp, Homo sapien
tgaaaggtctcactgaaaaattgcc

SEQ ID NO: 5614233 - DNA, 25 bp, Homo sapien
tcagcacatcaagtgtgtgacactc

SEQ ID NO: 5614234 - DNA, 25 bp, Homo sapien
ccaccagcactatatgaaaggtctc

SEQ ID NO: 5614235 - DNA, 25 bp, Homo sapien
ctgaaaaattgccaacttgacatac

SEQ ID NO: 5614236 - DNA, 25 bp, Homo sapien
tcaattatgctgtgtcccttactat

SEQ ID NO: 5614237 - DNA, 25 bp, Homo sapien
gttgaagagtgtaaatgtcagagcc

SEQ ID NO: 5614238 - DNA, 25 bp, Homo sapien
tgctgaacaccccctgcgctctcct

SEQ ID NO: 5614239 - DNA, 25 bp, Homo sapien
agggcatgacagacaagtgatgtct

SEQ ID NO: 5614240 - DNA, 25 bp, Homo sapien
agaggagagagtgcctcacattctg

SEQ ID NO: 5614241 - DNA, 25 bp, Homo sapien
ttgccattgacaagcagggcatgac

SEQ ID NO: 5614242 - DNA, 25 bp, Homo sapien
atagcttggagcatgtgttgaagag

SEQ ID NO: 5614243 - DNA, 25 bp, Homo sapien
gtcagtatggacagacccacatagc

SEQ ID NO: 5614244 - DNA, 25 bp, Homo sapien
tctgctctgtagaggagacagttgt

SEQ ID NO: 5614245 - DNA, 25 bp, Homo sapien
tctggtggctgtatgatgttccgga

SEQ ID NO: 5614246 - DNA, 25 bp, Homo sapien
tctccttgcaggtgtcgagtgatac

SEQ ID NO: 5614247 - DNA, 25 bp, Homo sapien
gagggaatgtcgttctaagcgatgc

SEQ ID NO: 5614248 - DNA, 25 bp, Homo sapien
tcccaatctccgactaggaatcatc

SEQ ID NO: 5614249 - DNA, 25 bp, Homo sapien
gtgtttactgttactgagctgtgac

SEQ ID NO: 5614250 - DNA, 25 bp, Homo sapien
agctgtgactgcatttatgtcctct

SEQ ID NO: 5614251 - DNA, 25 bp, Homo sapien
atgtatatgggcacacccaacaatt

SEQ ID NO: 5614252 - DNA, 25 bp, Homo sapien
ctgcctcctgagtatctcggatgac

SEQ ID NO: 5614253 - DNA, 25 bp, Homo sapien
ctcgacctcctaacatgctagaatt

SEQ ID NO: 5614254 - DNA, 25 bp, Homo sapien
ttctgttaggtacatgaaatgattc

SEQ ID NO: 5614255 - DNA, 25 bp, Homo sapien
ttttgtggatagtatttaggaaata

SEQ ID NO: 5614256 - DNA, 25 bp, Homo sapien
cgactaggaatcatccctggtcccc

SEQ ID NO: 5614257 - DNA, 25 bp, Homo sapien
gtacatgaaatgattcaggctcatc

SEQ ID NO: 5614258 - DNA, 25 bp, Homo sapien
tgcatttatgtcctctcggtagaat

SEQ ID NO: 5614259 - DNA, 25 bp, Homo sapien
tgaaatgaacaagccaagtcaggtc

SEQ ID NO: 5614260 - DNA, 25 bp, Homo sapien
aaaggtcagaaagatggtagattct

SEQ ID NO: 5614261 - DNA, 25 bp, Homo sapien
gccaagtcaggtcacagccaatgtt

SEQ ID NO: 5614262 - DNA, 25 bp, Homo sapien
agtcaaaatgatgtggctaggtatg

SEQ ID NO: 5614263 - DNA, 25 bp, Homo sapien
tataagggatatctgaataaaacat

SEQ ID NO: 5614264 - DNA, 25 bp, Homo sapien
ggcaagtggtttacaaatggtagtc

SEQ ID NO: 5614265 - DNA, 25 bp, Homo sapien
gggcctcctgtgttaaccaaagaca

SEQ ID NO: 5614266 - DNA, 25 bp, Homo sapien
tctgaataaaacataggcaagtggt

SEQ ID NO: 5614267 - DNA, 25 bp, Homo sapien
ataaaattggccactaggaaatcat

SEQ ID NO: 5614268 - DNA, 25 bp, Homo sapien
tggctaggtatggatgaaactttgt

SEQ ID NO: 5614269 - DNA, 25 bp, Homo sapien
ctgacactggtgttaaggcctattc

SEQ ID NO: 5614270 - DNA, 25 bp, Homo sapien
tctttgatcgcaggcaagtctgagc

SEQ ID NO: 5614271 - DNA, 25 bp, Homo sapien
cacagggctttctttgatcgcaggc

SEQ ID NO: 5614272 - DNA, 25 bp, Homo sapien
agggaaaagtacctgccgacctcta

SEQ ID NO: 5614273 - DNA, 25 bp, Homo sapien
tgccgacctctagtaacagcaggaa

SEQ ID NO: 5614274 - DNA, 25 bp, Homo sapien
ctgataagtaccctttacgaggctc

SEQ ID NO: 5614275 - DNA, 25 bp, Homo sapien
gcatctgattatactgataagtacc

SEQ ID NO: 5614276 - DNA, 25 bp, Homo sapien
tgagacgtgcacacccagtttccta

SEQ ID NO: 5614277 - DNA, 25 bp, Homo sapien
gtcgtgttgagagagtttgcacggg

SEQ ID NO: 5614278 - DNA, 25 bp, Homo sapien
aagtcacgcagcggtgtcgtgttga

SEQ ID NO: 5614279 - DNA, 25 bp, Homo sapien
cagtttcctagggaaaagtacctgc

SEQ ID NO: 5614280 - DNA, 25 bp, Homo sapien
tacgaggctcttaccatgatggaca

SEQ ID NO: 5614281 - DNA, 25 bp, Homo sapien
aaacgtagcaagagaggttgcttta

SEQ ID NO: 5614282 - DNA, 25 bp, Homo sapien
attcccgacgccgactgcttactca

SEQ ID NO: 5614283 - DNA, 25 bp, Homo sapien
gtgaccgccggtctctacagtctgt

SEQ ID NO: 5614284 - DNA, 25 bp, Homo sapien
aacaatacacacctactcgcaaacg

SEQ ID NO: 5614285 - DNA, 25 bp, Homo sapien
ggaatcttcagcgtcacgtgaccgc

SEQ ID NO: 5614286 - DNA, 25 bp, Homo sapien
aggccttgctctggtccaaggactc

SEQ ID NO: 5614287 - DNA, 25 bp, Homo sapien
ctgttcacactggccaatcaagagc

SEQ ID NO: 5614288 - DNA, 25 bp, Homo sapien
ctactcgcaaacgtagcaagagagg

SEQ ID NO: 5614289 - DNA, 25 bp, Homo sapien
ctggccaatcaagagccaggaagcc

SEQ ID NO: 5614290 - DNA, 25 bp, Homo sapien
ccaaggactccccattcccgacgcc

SEQ ID NO: 5614291 - DNA, 25 bp, Homo sapien
gaggttgctttaagaagcgggaatc

SEQ ID NO: 5614292 - DNA, 25 bp, Homo sapien
cagtagcactactaaaaggaaatgg

SEQ ID NO: 5614293 - DNA, 25 bp, Homo sapien
aggtagtctaagaattgaaaatatc

SEQ ID NO: 5614294 - DNA, 25 bp, Homo sapien
aagacctttacaagtggttggcacc

SEQ ID NO: 5614295 - DNA, 25 bp, Homo sapien
aatggacagaaacacaaactggctt

SEQ ID NO: 5614296 - DNA, 25 bp, Homo sapien
ccagaggcaacattcacacagcgat

SEQ ID NO: 5614297 - DNA, 25 bp, Homo sapien
aaaaggaaatggtgtgaccatcaat

SEQ ID NO: 5614298 - DNA, 25 bp, Homo sapien
atgtctgttgtgttgaggtcaagaa

SEQ ID NO: 5614299 - DNA, 25 bp, Homo sapien
tgggtcacataatccccagaggcaa

SEQ ID NO: 5614300 - DNA, 25 bp, Homo sapien
ggcaggtatacagaaccactgggtc

SEQ ID NO: 5614301 - DNA, 25 bp, Homo sapien
tgttgaggtcaagaaatggacagaa

SEQ ID NO: 5614302 - DNA, 25 bp, Homo sapien
cttctgccaaagtataggtagtcta

SEQ ID NO: 5614303 - DNA, 25 bp, Homo sapien
ccagcatcacatctccaatagcagt

SEQ ID NO: 5614304 - DNA, 25 bp, Homo sapien
gccaccccactgacgggctgtctct

SEQ ID NO: 5614305 - DNA, 25 bp, Homo sapien
ggctgtggcaggcctcaccattaca

SEQ ID NO: 5614306 - DNA, 25 bp, Homo sapien
ccgcgttcatatggtaagagactta

SEQ ID NO: 5614307 - DNA, 25 bp, Homo sapien
gccattcatgactctgggaattagc

SEQ ID NO: 5614308 - DNA, 25 bp, Homo sapien
tccaatagcagtgacggttgctggt

SEQ ID NO: 5614309 - DNA, 25 bp, Homo sapien
gacttagagccactcctcaagcaag

SEQ ID NO: 5614310 - DNA, 25 bp, Homo sapien
tgctggtcgcaagtctctgtgcctc

SEQ ID NO: 5614311 - DNA, 25 bp, Homo sapien
tcctatggccaccccactgacgggc

SEQ ID NO: 5614312 - DNA, 25 bp, Homo sapien
aaggtgattgatttctctaagccat

SEQ ID NO: 5614313 - DNA, 25 bp, Homo sapien
ctgtatgcagtgttgacttagagcc

SEQ ID NO: 5614314 - DNA, 25 bp, Homo sapien
agctgtacagagaagattcctctat

SEQ ID NO: 5614315 - DNA, 25 bp, Homo sapien
atttgactggtgttcttgttagatc

SEQ ID NO: 5614316 - DNA, 25 bp, Homo sapien
atttagactggtaatcacttgggat

SEQ ID NO: 5614317 - DNA, 25 bp, Homo sapien
tgtaatatatgagtcagagagaaac

SEQ ID NO: 5614318 - DNA, 25 bp, Homo sapien
taggcaatgcacaaccaaatgagtt

SEQ ID NO: 5614319 - DNA, 25 bp, Homo sapien
ataaattatgctaccgagaaatgta

SEQ ID NO: 5614320 - DNA, 25 bp, Homo sapien
tttacaactttaggcaatgcacaac

SEQ ID NO: 5614321 - DNA, 25 bp, Homo sapien
cctatacatcctgatgggggtgggg

SEQ ID NO: 5614322 - DNA, 25 bp, Homo sapien
ttgttagatctgttagtaatgagaa

SEQ ID NO: 5614323 - DNA, 25 bp, Homo sapien
cagagaactgtgtctatgatttaga

SEQ ID NO: 5614324 - DNA, 25 bp, Homo sapien
aatcacttgggatatgtggcacttc

SEQ ID NO: 5614325 - DNA, 25 bp, Homo sapien
ggttgaggcttctgttcccaggttc

SEQ ID NO: 5614326 - DNA, 25 bp, Homo sapien
ggctggtgaggttatgacctttgcc

SEQ ID NO: 5614327 - DNA, 25 bp, Homo sapien
tacaaaaggtcttggggctatgtga

SEQ ID NO: 5614328 - DNA, 25 bp, Homo sapien
cgagatgagccacactcccatgcac

SEQ ID NO: 5614329 - DNA, 25 bp, Homo sapien
ccatgtgatgcttggtcttgtgggg

SEQ ID NO: 5614330 - DNA, 25 bp, Homo sapien
ctagaggctgtgacctctgctctcc

SEQ ID NO: 5614331 - DNA, 25 bp, Homo sapien
catggaaccccccttccttgagccc

SEQ ID NO: 5614332 - DNA, 25 bp, Homo sapien
gtgaccctacactccatgtgatgct

SEQ ID NO: 5614333 - DNA, 25 bp, Homo sapien
gcctagaggcccttacaggggcaaa

SEQ ID NO: 5614334 - DNA, 25 bp, Homo sapien
gaaaggggtgataaatatgtacatg

SEQ ID NO: 5614335 - DNA, 25 bp, Homo sapien
ctgctctcccagtgaccctacactc

SEQ ID NO: 5614336 - DNA, 25 bp, Homo sapien
tggggccatttcacaggacaatcat

SEQ ID NO: 5614337 - DNA, 25 bp, Homo sapien
ttttaagttggagtgtgtttggatg

SEQ ID NO: 5614338 - DNA, 25 bp, Homo sapien
tgctttcggagttatgcataatgat

SEQ ID NO: 5614339 - DNA, 25 bp, Homo sapien
catctacagtagcccccaagtgagg

SEQ ID NO: 5614340 - DNA, 25 bp, Homo sapien
agctaagaggttctgtgctgagcat

SEQ ID NO: 5614341 - DNA, 25 bp, Homo sapien
tgaaaaggaatgtgatgtttattgc

SEQ ID NO: 5614342 - DNA, 25 bp, Homo sapien
gtgcaggacgtcatgtcctggctgc

SEQ ID NO: 5614343 - DNA, 25 bp, Homo sapien
tgtgctgagcatctacagtagcccc

SEQ ID NO: 5614344 - DNA, 25 bp, Homo sapien
aggaagtcacaaccacagctaagag

SEQ ID NO: 5614345 - DNA, 25 bp, Homo sapien
gaacaaagaaatctggcaggacaca

SEQ ID NO: 5614346 - DNA, 25 bp, Homo sapien
ggtacagcatggacctgctttcgga

SEQ ID NO: 5614347 - DNA, 25 bp, Homo sapien
acagtcactggcactctcggtacac

SEQ ID NO: 5614348 - DNA, 25 bp, Homo sapien
tgagatgctcaagtaggacaaaaag

SEQ ID NO: 5614349 - DNA, 25 bp, Homo sapien
taggatccccatacacaagcaattc

SEQ ID NO: 5614350 - DNA, 25 bp, Homo sapien
ctcttcagatttatggaggggccag

SEQ ID NO: 5614351 - DNA, 25 bp, Homo sapien
gcacagcattatggcaacaagaaat

SEQ ID NO: 5614352 - DNA, 25 bp, Homo sapien
ggacaaaaagtggccttgattcaag

SEQ ID NO: 5614353 - DNA, 25 bp, Homo sapien
tccaggggaactaacataggatccc

SEQ ID NO: 5614354 - DNA, 25 bp, Homo sapien
ttgattcaagtgacaacgccatttc

SEQ ID NO: 5614355 - DNA, 25 bp, Homo sapien
aatcagggtaaaatagcacagcatt

SEQ ID NO: 5614356 - DNA, 25 bp, Homo sapien
aagatgccaggaattgtaagaagca

SEQ ID NO: 5614357 - DNA, 25 bp, Homo sapien
gaacttggtgaaatgacaatgtgcc

SEQ ID NO: 5614358 - DNA, 25 bp, Homo sapien
aaaaatgcaattttagtgctccttc

SEQ ID NO: 5614359 - DNA, 25 bp, Homo sapien
ctatgagactgatatttgggctttg

SEQ ID NO: 5614360 - DNA, 25 bp, Homo sapien
tgtgcacgtattcaaacaccaaatg

SEQ ID NO: 5614361 - DNA, 25 bp, Homo sapien
gatggaaattcctgtgcacgtattc

SEQ ID NO: 5614362 - DNA, 25 bp, Homo sapien
ttagcaagggtaatcatcccccacc

SEQ ID NO: 5614363 - DNA, 25 bp, Homo sapien
ctggataactgaaactatgagactg

SEQ ID NO: 5614364 - DNA, 25 bp, Homo sapien
catggtgcacaaactatgataaaaa

SEQ ID NO: 5614365 - DNA, 25 bp, Homo sapien
ccccaccttgggatggaaattcctg

SEQ ID NO: 5614366 - DNA, 25 bp, Homo sapien
tcagtatttagcaagggtaatcatc

SEQ ID NO: 5614367 - DNA, 25 bp, Homo sapien
acttactgaaggaactggataactg

SEQ ID NO: 5614368 - DNA, 25 bp, Homo sapien
tactgaataaacatggtgcacaaac

SEQ ID NO: 5614369 - DNA, 25 bp, Homo sapien
tcaaataagtatttcagtcaagaag

SEQ ID NO: 5614370 - DNA, 25 bp, Homo sapien
cttcttgactgaaatacttatttga

SEQ ID NO: 5614371 - DNA, 25 bp, Homo sapien
gattcaaataagtatttcagtcaag

SEQ ID NO: 5614372 - DNA, 25 bp, Homo sapien
cttgactgaaatacttatttgaatc

SEQ ID NO: 5614373 - DNA, 25 bp, Homo sapien
gttctaaaacgatggtgatggatac

SEQ ID NO: 5614374 - DNA, 25 bp, Homo sapien
tctgcgacgtgactgtgtgcattca

SEQ ID NO: 5614375 - DNA, 25 bp, Homo sapien
gcgccacatacatctgcagaacttc

SEQ ID NO: 5614376 - DNA, 25 bp, Homo sapien
ggcaaatccatagactgaaagtgat

SEQ ID NO: 5614377 - DNA, 25 bp, Homo sapien
agtgattacggatttcctagggcgg

SEQ ID NO: 5614378 - DNA, 25 bp, Homo sapien
acacttgaaatagatgggctggata

SEQ ID NO: 5614379 - DNA, 25 bp, Homo sapien
ttgagaccctcaatgggcagaagct

SEQ ID NO: 5614380 - DNA, 25 bp, Homo sapien
ttcatgaagcttcgctgcgtgcgca

SEQ ID NO: 5614381 - DNA, 25 bp, Homo sapien
acaaaccccttgcatggtacacttg

SEQ ID NO: 5614382 - DNA, 25 bp, Homo sapien
agaggctgtgcgccacatacatctg

SEQ ID NO: 5614383 - DNA, 25 bp, Homo sapien
ctggcaatcggctcgccctccttcc

SEQ ID NO: 5614384 - DNA, 25 bp, Homo sapien
tggcctgatattggaggccccaccc

SEQ ID NO: 5614385 - DNA, 25 bp, Homo sapien
ggctgaatctgaggaggtcctctgg

SEQ ID NO: 5614386 - DNA, 25 bp, Homo sapien
tctcatctcaatagtcagagctgat

SEQ ID NO: 5614387 - DNA, 25 bp, Homo sapien
actacaaagctgccaaattcttccc

SEQ ID NO: 5614388 - DNA, 25 bp, Homo sapien
aattaacattctctaggcccgggga

SEQ ID NO: 5614389 - DNA, 25 bp, Homo sapien
ctccacccaaataggaaagtgggac

SEQ ID NO: 5614390 - DNA, 25 bp, Homo sapien
agagctgatgttccgaccccattcc

SEQ ID NO: 5614391 - DNA, 25 bp, Homo sapien
gggggcataaaacaacactggcctc

SEQ ID NO: 5614392 - DNA, 25 bp, Homo sapien
attagccacccaaatgggggcataa

SEQ ID NO: 5614393 - DNA, 25 bp, Homo sapien
ataggaaagtgggacaattaacatt

SEQ ID NO: 5614394 - DNA, 25 bp, Homo sapien
ttctcctccatggacggcctgatgc

SEQ ID NO: 5614395 - DNA, 25 bp, Homo sapien
cattctaaagatgtacaagcagctc

SEQ ID NO: 5614396 - DNA, 25 bp, Homo sapien
aaaagcaatggcaacttgaagtttc

SEQ ID NO: 5614397 - DNA, 25 bp, Homo sapien
ctccaaagacatagcacagaaaagc

SEQ ID NO: 5614398 - DNA, 25 bp, Homo sapien
cagttggtgaaaatgagctcatgca

SEQ ID NO: 5614399 - DNA, 25 bp, Homo sapien
ttccccccagttggtgaaaatgagc

SEQ ID NO: 5614400 - DNA, 25 bp, Homo sapien
aaatggctgaacttattatagtgtc

SEQ ID NO: 5614401 - DNA, 25 bp, Homo sapien
gtaaagagactcaaagttgcatttt

SEQ ID NO: 5614402 - DNA, 25 bp, Homo sapien
cacagtgacacatatggtctgccat

SEQ ID NO: 5614403 - DNA, 25 bp, Homo sapien
ttacttacaattaccaacaccacac

SEQ ID NO: 5614404 - DNA, 25 bp, Homo sapien
taaatatgcaaaggtaaagagactc

SEQ ID NO: 5614405 - DNA, 25 bp, Homo sapien
atctctccaaattagacaagcaatc

SEQ ID NO: 5614406 - DNA, 25 bp, Homo sapien
ggtcgggggcacaacgaggccaggg

SEQ ID NO: 5614407 - DNA, 25 bp, Homo sapien
ccctggcctcgttgtgcccccgacc

SEQ ID NO: 5614408 - DNA, 25 bp, Homo sapien
taggacaattataaataaggctcaa

SEQ ID NO: 5614409 - DNA, 25 bp, Homo sapien
acaaagctcttctggtctctggtcc

SEQ ID NO: 5614410 - DNA, 25 bp, Homo sapien
ttggagtaaagagtcaacaagagta

SEQ ID NO: 5614411 - DNA, 25 bp, Homo sapien
aaagactactattaccacatggcat

SEQ ID NO: 5614412 - DNA, 25 bp, Homo sapien
ggaaatcaatcctaaggtagcacta

SEQ ID NO: 5614413 - DNA, 25 bp, Homo sapien
ggtctctggtccgccctcatccctc

SEQ ID NO: 5614414 - DNA, 25 bp, Homo sapien
aacaagagtagcgtgattcccttct

SEQ ID NO: 5614415 - DNA, 25 bp, Homo sapien
aagaatgaacttggagtaaagagtc

SEQ ID NO: 5614416 - DNA, 25 bp, Homo sapien
tggagacattagcaatgaagaatga

SEQ ID NO: 5614417 - DNA, 25 bp, Homo sapien
tgatactgcaacaaacacagaatga

SEQ ID NO: 5614418 - DNA, 25 bp, Homo sapien
taaggtagcactatttggagacatt

SEQ ID NO: 5614419 - DNA, 25 bp, Homo sapien
atattttggaaggaagtaggtaatg

SEQ ID NO: 5614420 - DNA, 25 bp, Homo sapien
aagtggaaaatcaacgtgtaaagtg

SEQ ID NO: 5614421 - DNA, 25 bp, Homo sapien
cccgttggaacaaactctggtgctc

SEQ ID NO: 5614422 - DNA, 25 bp, Homo sapien
agcatttgggataagggataataaa

SEQ ID NO: 5614423 - DNA, 25 bp, Homo sapien
aaaagaaaaacgacatacaagagac

SEQ ID NO: 5614424 - DNA, 25 bp, Homo sapien
tcccatggagatgttttcatatgac

SEQ ID NO: 5614425 - DNA, 25 bp, Homo sapien
ttgggataagggataataaacttgc

SEQ ID NO: 5614426 - DNA, 25 bp, Homo sapien
tagctctactaaaaggttctgcaat

SEQ ID NO: 5614427 - DNA, 25 bp, Homo sapien
actgtgggaggtatgacttaaattt

SEQ ID NO: 5614428 - DNA, 25 bp, Homo sapien
ttagcattagattcccatggagatg

SEQ ID NO: 5614429 - DNA, 25 bp, Homo sapien
aaaaaattaggccaacagacaacat

SEQ ID NO: 5614430 - DNA, 25 bp, Homo sapien
ctgggggctctcaattctgaagctc

SEQ ID NO: 5614431 - DNA, 25 bp, Homo sapien
atccaggaccaatgccagaatgatc

SEQ ID NO: 5614432 - DNA, 25 bp, Homo sapien
aagaaaacaaaatagacggcatcca

SEQ ID NO: 5614433 - DNA, 25 bp, Homo sapien
aagaaaacaataaacccaagtagca

SEQ ID NO: 5614434 - DNA, 25 bp, Homo sapien
tacaggccacgaagagccaaaatat

SEQ ID NO: 5614435 - DNA, 25 bp, Homo sapien
gagtctactgaatcatacaggccac

SEQ ID NO: 5614436 - DNA, 25 bp, Homo sapien
atttcaggagtaatagatgttgcta

SEQ ID NO: 5614437 - DNA, 25 bp, Homo sapien
gtacttggaaaacctcagagtctac

SEQ ID NO: 5614438 - DNA, 25 bp, Homo sapien
aatggagaataaaaacagaacttcc

SEQ ID NO: 5614439 - DNA, 25 bp, Homo sapien
gctggttgacatggcaagaacatag

SEQ ID NO: 5614440 - DNA, 25 bp, Homo sapien
tttgaaagcagaatagggctaaaac

SEQ ID NO: 5614441 - DNA, 25 bp, Homo sapien
tctcaagggtcccatgggaacagaa

SEQ ID NO: 5614442 - DNA, 25 bp, Homo sapien
ttaagatgtgaagaaattgctcaat

SEQ ID NO: 5614443 - DNA, 25 bp, Homo sapien
aatgagaatacataggatggacatg

SEQ ID NO: 5614444 - DNA, 25 bp, Homo sapien
gatgttgaccgaagaaagtagattt

SEQ ID NO: 5614445 - DNA, 25 bp, Homo sapien
tcttaatctgacgccaggacagtcc

SEQ ID NO: 5614446 - DNA, 25 bp, Homo sapien
cgggaaatgattacggaacaagtgt

SEQ ID NO: 5614447 - DNA, 25 bp, Homo sapien
tttgatcaatagggagttcactaac

SEQ ID NO: 5614448 - DNA, 25 bp, Homo sapien
ctgtttgtgcaagatgactggttgg

SEQ ID NO: 5614449 - DNA, 25 bp, Homo sapien
cagaaagttttgagggagtttactg

SEQ ID NO: 5614450 - DNA, 25 bp, Homo sapien
taagggcttcatgatgctatgggga

SEQ ID NO: 5614451 - DNA, 25 bp, Homo sapien
ggtgaattgaacatgaataagggct

SEQ ID NO: 5614452 - DNA, 25 bp, Homo sapien
gctcttgagaccatgaagagggatg

SEQ ID NO: 5614453 - DNA, 25 bp, Homo sapien
ggatggtctgaggttcctatggtct

SEQ ID NO: 5614454 - DNA, 25 bp, Homo sapien
aggatgattctgggagctcttgaga

SEQ ID NO: 5614455 - DNA, 25 bp, Homo sapien
acttagcttaccaagaggatgattc

SEQ ID NO: 5614456 - DNA, 25 bp, Homo sapien
aacaattagtgcaaagaattcaaat

SEQ ID NO: 5614457 - DNA, 25 bp, Homo sapien
tgtccctgggccttactaataacta

SEQ ID NO: 5614458 - DNA, 25 bp, Homo sapien
ctggatgtagacccaaatgatttgt

SEQ ID NO: 5614459 - DNA, 25 bp, Homo sapien
tacttctcagtcctgtccctgggcc

SEQ ID NO: 5614460 - DNA, 25 bp, Homo sapien
catattgagtaaatgctgggagaag

SEQ ID NO: 5614461 - DNA, 25 bp, Homo sapien
cccaaatgatttgtagagaacagag

SEQ ID NO: 5614462 - DNA, 25 bp, Homo sapien
caattgaaaaaaccctaagctgaag

SEQ ID NO: 5614463 - DNA, 25 bp, Homo sapien
ataagggcagctaatcactgaatac

SEQ ID NO: 5614464 - DNA, 25 bp, Homo sapien
tggctaaaatcttgcattgctatgc

SEQ ID NO: 5614465 - DNA, 25 bp, Homo sapien
tagtctgttagtgtctgcaaagtac

SEQ ID NO: 5614466 - DNA, 25 bp, Homo sapien
ctactccagggactattacaccacc

SEQ ID NO: 5614467 - DNA, 25 bp, Homo sapien
gcaaagtacagtataagtgagaaac

SEQ ID NO: 5614468 - DNA, 25 bp, Homo sapien
aacatttgctgataaggtaagaaaa

SEQ ID NO: 5614469 - DNA, 25 bp, Homo sapien
aaatgagtataagggcagctaatca

SEQ ID NO: 5614470 - DNA, 25 bp, Homo sapien
acagtataagtgagaaacaaaaaca

SEQ ID NO: 5614471 - DNA, 25 bp, Homo sapien
tgctatgcaatactgactgatcatc

SEQ ID NO: 5614472 - DNA, 25 bp, Homo sapien
tgatcacagataaagtaacatttgc

SEQ ID NO: 5614473 - DNA, 25 bp, Homo sapien
gggttctaaggaataactatgctgg

SEQ ID NO: 5614474 - DNA, 25 bp, Homo sapien
tattttattagtaaacactatcgat

SEQ ID NO: 5614475 - DNA, 25 bp, Homo sapien
atcgatagtgtttactaataaaata

SEQ ID NO: 5614476 - DNA, 25 bp, Homo sapien
gagctctgatggactcatggaccat

SEQ ID NO: 5614477 - DNA, 25 bp, Homo sapien
tctgatggactcatggaccatggaa

SEQ ID NO: 5614478 - DNA, 25 bp, Homo sapien
atctgagctctgatggactcatgga

SEQ ID NO: 5614479 - DNA, 25 bp, Homo sapien
actggcctctttgactgtaggcaga

SEQ ID NO: 5614480 - DNA, 25 bp, Homo sapien
atctccctagggaattagggccaat

SEQ ID NO: 5614481 - DNA, 25 bp, Homo sapien
cgcctggccgatcactggcctcttt

SEQ ID NO: 5614482 - DNA, 25 bp, Homo sapien
ccctagggaattagggccaatacga

SEQ ID NO: 5614483 - DNA, 25 bp, Homo sapien
tggactcatggaccatggaaaaccc

SEQ ID NO: 5614484 - DNA, 25 bp, Homo sapien
cccatctccctagggaattagggcc

SEQ ID NO: 5614485 - DNA, 25 bp, Homo sapien
atcaaggacttgtgcccatctccct

SEQ ID NO: 5614486 - DNA, 25 bp, Homo sapien
ctgagctctgatggactcatggacc

SEQ ID NO: 5614487 - DNA, 25 bp, Homo sapien
catgctacccaaaaacaggatcact

SEQ ID NO: 5614488 - DNA, 25 bp, Homo sapien
tctgagtagtaaacaggaaaaagct

SEQ ID NO: 5614489 - DNA, 25 bp, Homo sapien
agtgcagtggtgtaatcaaagctca

SEQ ID NO: 5614490 - DNA, 25 bp, Homo sapien
acctccctgggctcaggtgatcctc

SEQ ID NO: 5614491 - DNA, 25 bp, Homo sapien
caggatcactaataatctgagtagt

SEQ ID NO: 5614492 - DNA, 25 bp, Homo sapien
ttcatagagaccttagcatacagac

SEQ ID NO: 5614493 - DNA, 25 bp, Homo sapien
ttcccccagtgttttgatgttcatc

SEQ ID NO: 5614494 - DNA, 25 bp, Homo sapien
ctgcaaccttaacctccctgggctc

SEQ ID NO: 5614495 - DNA, 25 bp, Homo sapien
gcatacagactatcaagtgacatat

SEQ ID NO: 5614496 - DNA, 25 bp, Homo sapien
tctcactctgttggccagggtggag

SEQ ID NO: 5614497 - DNA, 25 bp, Homo sapien
agcctgtcaagtagctggaaccaca

SEQ ID NO: 5614498 - DNA, 25 bp, Homo sapien
tatatgatggtggtgcttctgaaag

SEQ ID NO: 5614499 - DNA, 25 bp, Homo sapien
tagaaaaaatatatgatggtggtgc

SEQ ID NO: 5614500 - DNA, 25 bp, Homo sapien
aaacctcaagtctggatagtgagtt

SEQ ID NO: 5614501 - DNA, 25 bp, Homo sapien
gcactgaagccttataatgttatcc

SEQ ID NO: 5614502 - DNA, 25 bp, Homo sapien
aaaaaatatatgatggtggtgcttc

SEQ ID NO: 5614503 - DNA, 25 bp, Homo sapien
cagtaacttaacaaaacctcaagtc

SEQ ID NO: 5614504 - DNA, 25 bp, Homo sapien
tttaaaatgcactgaagccttataa

SEQ ID NO: 5614505 - DNA, 25 bp, Homo sapien
tgaaaactcaagagcaaaattgaca

SEQ ID NO: 5614506 - DNA, 25 bp, Homo sapien
acaaagggaacttcaactttatctg

SEQ ID NO: 5614507 - DNA, 25 bp, Homo sapien
ctcaagtctggatagtgagttcaag

SEQ ID NO: 5614508 - DNA, 25 bp, Homo sapien
tatatcataaccattggacctcttt

SEQ ID NO: 5614509 - DNA, 25 bp, Homo sapien
ttcaatacctgaagtcctgacattc

SEQ ID NO: 5614510 - DNA, 25 bp, Homo sapien
gtgaagtcaaaaacctgggatcatc

SEQ ID NO: 5614511 - DNA, 25 bp, Homo sapien
caggcacacagtgaagtcaaaaacc

SEQ ID NO: 5614512 - DNA, 25 bp, Homo sapien
agaataatacctaacagcactacgt

SEQ ID NO: 5614513 - DNA, 25 bp, Homo sapien
ggggggcacttgactgcagtcatta

SEQ ID NO: 5614514 - DNA, 25 bp, Homo sapien
cccatctgacaaagcctgttgctcc

SEQ ID NO: 5614515 - DNA, 25 bp, Homo sapien
cattctgcacataacagagacagtg

SEQ ID NO: 5614516 - DNA, 25 bp, Homo sapien
ctacgtaaacgttagtaagtggcga

SEQ ID NO: 5614517 - DNA, 25 bp, Homo sapien
aaagtagcactaacaggcacacagt

SEQ ID NO: 5614518 - DNA, 25 bp, Homo sapien
actatctgtgcgaccttaggcaagc

SEQ ID NO: 5614519 - DNA, 25 bp, Homo sapien
gtgcgaccttaggcaagctaacctg

SEQ ID NO: 5614520 - DNA, 25 bp, Homo sapien
ttccatgacacaccaactctttacc

SEQ ID NO: 5614521 - DNA, 25 bp, Homo sapien
catcataagcagacaaggatataga

SEQ ID NO: 5614522 - DNA, 25 bp, Homo sapien
accattataccacacaacaacctgc

SEQ ID NO: 5614523 - DNA, 25 bp, Homo sapien
aagaacgaggatatctaaccaaact

SEQ ID NO: 5614524 - DNA, 25 bp, Homo sapien
acatagaacaggtactttccatgac

SEQ ID NO: 5614525 - DNA, 25 bp, Homo sapien
ttttttgcagcacaccatggtaatt

SEQ ID NO: 5614526 - DNA, 25 bp, Homo sapien
tatagattcaaagaacgaggatatc

SEQ ID NO: 5614527 - DNA, 25 bp, Homo sapien
atttacacataagtataggaaaggg

SEQ ID NO: 5614528 - DNA, 25 bp, Homo sapien
cacaccgaattatacacacagacac

SEQ ID NO: 5614529 - DNA, 25 bp, Homo sapien
tctttaccagaaagagtagaaaata

SEQ ID NO: 5614530 - DNA, 25 bp, Homo sapien
taagcagacaaggatatagattcaa

SEQ ID NO: 5614531 - DNA, 25 bp, Homo sapien
tcaggcattcttattccagagccca

SEQ ID NO: 5614532 - DNA, 25 bp, Homo sapien
aagcacagctaatatgcagtaaatc

SEQ ID NO: 5614533 - DNA, 25 bp, Homo sapien
cacgcccagcctattactgaaattt

SEQ ID NO: 5614534 - DNA, 25 bp, Homo sapien
ttactgatgagaaaagcacagctaa

SEQ ID NO: 5614535 - DNA, 25 bp, Homo sapien
ttccagagcccatgctattaattcc

SEQ ID NO: 5614536 - DNA, 25 bp, Homo sapien
ggcatgaaccaccacgcccagccta

SEQ ID NO: 5614537 - DNA, 25 bp, Homo sapien
ggattataggcatgaaccaccacgc

SEQ ID NO: 5614538 - DNA, 25 bp, Homo sapien
gatgatgacaacctcatgacaatcc

SEQ ID NO: 5614539 - DNA, 25 bp, Homo sapien
tgcagtaaatctagtttctgaattc

SEQ ID NO: 5614540 - DNA, 25 bp, Homo sapien
gacaatcccaaagtactagtatatc

SEQ ID NO: 5614541 - DNA, 25 bp, Homo sapien
tgaaattttaatgatgatgacaacc

SEQ ID NO: 5614542 - DNA, 25 bp, Homo sapien
gcctgtgccatccaaacggagtctc

SEQ ID NO: 5614543 - DNA, 25 bp, Homo sapien
ttctagctagaggatcatgtgcgga

SEQ ID NO: 5614544 - DNA, 25 bp, Homo sapien
cagtaggggcccacttttctagaca

SEQ ID NO: 5614545 - DNA, 25 bp, Homo sapien
ggtccagaaagagcttgggataaaa

SEQ ID NO: 5614546 - DNA, 25 bp, Homo sapien
tgggagctctgcaactgtggattca

SEQ ID NO: 5614547 - DNA, 25 bp, Homo sapien
gataaaatgaacatccaaggggagg

SEQ ID NO: 5614548 - DNA, 25 bp, Homo sapien
gtccccctgatcaacacctgctccc

SEQ ID NO: 5614549 - DNA, 25 bp, Homo sapien
atgccaaattccagggtccagaaag

SEQ ID NO: 5614550 - DNA, 25 bp, Homo sapien
gacctgggcttagtctgcctgtgcc

SEQ ID NO: 5614551 - DNA, 25 bp, Homo sapien
gtctcaagtcctgagacagggcgtc

SEQ ID NO: 5614552 - DNA, 25 bp, Homo sapien
taaaacctggctcagctgtcccacc

SEQ ID NO: 5614553 - DNA, 25 bp, Homo sapien
agtatataatgggagttgaattttt

SEQ ID NO: 5614554 - DNA, 25 bp, Homo sapien
tgggattcagattagtctgatctac

SEQ ID NO: 5614555 - DNA, 25 bp, Homo sapien
aacatctgggattcagattagtctg

SEQ ID NO: 5614556 - DNA, 25 bp, Homo sapien
agcataccagctatacaaacatctg

SEQ ID NO: 5614557 - DNA, 25 bp, Homo sapien
ttataaggtttactgtgcaacagag

SEQ ID NO: 5614558 - DNA, 25 bp, Homo sapien
tgtgcaacagagataaatccaatta

SEQ ID NO: 5614559 - DNA, 25 bp, Homo sapien
acaagaacccagagaaataaaaata

SEQ ID NO: 5614560 - DNA, 25 bp, Homo sapien
atataatgggagttgaatttttacc

SEQ ID NO: 5614561 - DNA, 25 bp, Homo sapien
ctgagaggtataccgtttataaggt

SEQ ID NO: 5614562 - DNA, 25 bp, Homo sapien
tactacaagaacccagagaaataaa

SEQ ID NO: 5614563 - DNA, 25 bp, Homo sapien
taaattactacaagaacccagagaa

SEQ ID NO: 5614564 - DNA, 25 bp, Homo sapien
gcaaaaatcaaaaccagtgtctcct

SEQ ID NO: 5614565 - DNA, 25 bp, Homo sapien
ttgagattcaatggtgactaatgtc

SEQ ID NO: 5614566 - DNA, 25 bp, Homo sapien
gtttacgctgcacttgagattcaat

SEQ ID NO: 5614567 - DNA, 25 bp, Homo sapien
tggtgcaaaagtgatatgaattcag

SEQ ID NO: 5614568 - DNA, 25 bp, Homo sapien
tagatgcattctcagtttacgctgc

SEQ ID NO: 5614569 - DNA, 25 bp, Homo sapien
gactaatgtcaagatggagagattt

SEQ ID NO: 5614570 - DNA, 25 bp, Homo sapien
caggacagtgggtatccccacctgg

SEQ ID NO: 5614571 - DNA, 25 bp, Homo sapien
atggtccctaatttatgatggttca

SEQ ID NO: 5614572 - DNA, 25 bp, Homo sapien
ttgacatgggtaatgtacagatggt

SEQ ID NO: 5614573 - DNA, 25 bp, Homo sapien
ctgtagctcatgcaaaattcaaccc

SEQ ID NO: 5614574 - DNA, 25 bp, Homo sapien
gtgtctcctgcccccaggacagtgg

SEQ ID NO: 5614575 - DNA, 25 bp, Homo sapien
tactcagaccaaatggctctcataa

SEQ ID NO: 5614576 - DNA, 25 bp, Homo sapien
tatataggtagtaaagatacagttg

SEQ ID NO: 5614577 - DNA, 25 bp, Homo sapien
taggtagatttgaatgttgaatcac

SEQ ID NO: 5614578 - DNA, 25 bp, Homo sapien
tccaaaaccaccagaatatacattc

SEQ ID NO: 5614579 - DNA, 25 bp, Homo sapien
attgatagttacagcacaatctgtc

SEQ ID NO: 5614580 - DNA, 25 bp, Homo sapien
ggaacatttaccacaaaagaccata

SEQ ID NO: 5614581 - DNA, 25 bp, Homo sapien
aggacctatgaatcagaagactgaa

SEQ ID NO: 5614582 - DNA, 25 bp, Homo sapien
tttcaagagctcaaatggaacattt

SEQ ID NO: 5614583 - DNA, 25 bp, Homo sapien
tgacatttcctgaaggtagagctac

SEQ ID NO: 5614584 - DNA, 25 bp, Homo sapien
aagatacagttgattaggtagattt

SEQ ID NO: 5614585 - DNA, 25 bp, Homo sapien
aatacaaaagcatttaggacctatg

SEQ ID NO: 5614586 - DNA, 25 bp, Homo sapien
acccccagacctcagtccagccaag

SEQ ID NO: 5614587 - DNA, 25 bp, Homo sapien
ctttgaaaggtgtaatgtatttatc

SEQ ID NO: 5614588 - DNA, 25 bp, Homo sapien
ggataataagtgcacccccagacct

SEQ ID NO: 5614589 - DNA, 25 bp, Homo sapien
agtccagccaaggcatagcctggag

SEQ ID NO: 5614590 - DNA, 25 bp, Homo sapien
gtccccagggataataagtgcaccc

SEQ ID NO: 5614591 - DNA, 25 bp, Homo sapien
ataatccctgttcagacaacctccc

SEQ ID NO: 5614592 - DNA, 25 bp, Homo sapien
cccagattctgaaagagaagaagag

SEQ ID NO: 5614593 - DNA, 25 bp, Homo sapien
ggccccagcaccacatcaggcccac

SEQ ID NO: 5614594 - DNA, 25 bp, Homo sapien
agcaggtgtccccagggataataag

SEQ ID NO: 5614595 - DNA, 25 bp, Homo sapien
ttaaggagtatgtatgtaaactaat

SEQ ID NO: 5614596 - DNA, 25 bp, Homo sapien
ggcatagcctggagccccagattct

SEQ ID NO: 5614597 - DNA, 25 bp, Homo sapien
gtatttagataaacacaacacagta

SEQ ID NO: 5614598 - DNA, 25 bp, Homo sapien
atttgagccacagaaagactgatgc

SEQ ID NO: 5614599 - DNA, 25 bp, Homo sapien
gtaaaaagcctacatttgagaaagc

SEQ ID NO: 5614600 - DNA, 25 bp, Homo sapien
agaaagactgatgcaaattggaata

SEQ ID NO: 5614601 - DNA, 25 bp, Homo sapien
aatggcccatatcatactgaaaaat

SEQ ID NO: 5614602 - DNA, 25 bp, Homo sapien
ttgagaaagctaattattcacaagt

SEQ ID NO: 5614603 - DNA, 25 bp, Homo sapien
gggagcttgagtttacgtatttaga

SEQ ID NO: 5614604 - DNA, 25 bp, Homo sapien
gtgaaacaattctctgtaaggattt

SEQ ID NO: 5614605 - DNA, 25 bp, Homo sapien
gcgatagatgaacaaaatggcccat

SEQ ID NO: 5614606 - DNA, 25 bp, Homo sapien
cttactaaaggcattgtgagctatt

SEQ ID NO: 5614607 - DNA, 25 bp, Homo sapien
gtagggacattaaaattcattccat

SEQ ID NO: 5614608 - DNA, 25 bp, Homo sapien
tcgggcgcccacagactcgctcccg

SEQ ID NO: 5614609 - DNA, 25 bp, Homo sapien
cgggagcgagtctgtgggcgcccga

SEQ ID NO: 5614610 - DNA, 25 bp, Homo sapien
tcgtggaacttttagatagagaaat

SEQ ID NO: 5614611 - DNA, 25 bp, Homo sapien
agcccacacatttcaagcagcttgg

SEQ ID NO: 5614612 - DNA, 25 bp, Homo sapien
tttaaccttcagagtgcaaataagc

SEQ ID NO: 5614613 - DNA, 25 bp, Homo sapien
ttaatttcaacatagatgactaaaa

SEQ ID NO: 5614614 - DNA, 25 bp, Homo sapien
atgtatttcaggatatccacagaag

SEQ ID NO: 5614615 - DNA, 25 bp, Homo sapien
accttcagagtgcaaataagcccac

SEQ ID NO: 5614616 - DNA, 25 bp, Homo sapien
agatagagaaataaaaatgtaggtt

SEQ ID NO: 5614617 - DNA, 25 bp, Homo sapien
tcagagtgcaaataagcccacacat

SEQ ID NO: 5614618 - DNA, 25 bp, Homo sapien
aatgtaggtttgaaactggctgcaa

SEQ ID NO: 5614619 - DNA, 25 bp, Homo sapien
actggctgcaatcttcatgtatttc

SEQ ID NO: 5614620 - DNA, 25 bp, Homo sapien
ccacagaagctgacttataaaaagc

SEQ ID NO: 5614621 - DNA, 25 bp, Homo sapien
taaagagctaataaattaccactac

SEQ ID NO: 5614622 - DNA, 25 bp, Homo sapien
agtataaatgtgtaaacggaggttc

SEQ ID NO: 5614623 - DNA, 25 bp, Homo sapien
ctctcatttaatcgtcacagtcttc

SEQ ID NO: 5614624 - DNA, 25 bp, Homo sapien
aaagtccatatacacctcaaccact

SEQ ID NO: 5614625 - DNA, 25 bp, Homo sapien
ccactgtgtgattcatcctggtttc

SEQ ID NO: 5614626 - DNA, 25 bp, Homo sapien
ccagcccatatccctatcaaagtcc

SEQ ID NO: 5614627 - DNA, 25 bp, Homo sapien
aaaaatggtctgaaagtataaatgt

SEQ ID NO: 5614628 - DNA, 25 bp, Homo sapien
aacggaggttcaaagatacttgatc

SEQ ID NO: 5614629 - DNA, 25 bp, Homo sapien
agtgcaggttccagcccatatccct

SEQ ID NO: 5614630 - DNA, 25 bp, Homo sapien
gatctcttaatgagtaaatggaagt

SEQ ID NO: 5614631 - DNA, 25 bp, Homo sapien
atgtgtaaacggaggttcaaagata

SEQ ID NO: 5614632 - DNA, 25 bp, Homo sapien
tgaagataaacttaacgaagtatcc

SEQ ID NO: 5614633 - DNA, 25 bp, Homo sapien
gaataactccttgacccacagatgg

SEQ ID NO: 5614634 - DNA, 25 bp, Homo sapien
aaacaggcaaatagaaaccacaaga

SEQ ID NO: 5614635 - DNA, 25 bp, Homo sapien
gtaccaagaaactagagtaagagct

SEQ ID NO: 5614636 - DNA, 25 bp, Homo sapien
aagagaaggcaagcagttttcattt

SEQ ID NO: 5614637 - DNA, 25 bp, Homo sapien
agatggttaaaataatggaatggca

SEQ ID NO: 5614638 - DNA, 25 bp, Homo sapien
aataaaaggagtgtactgctctcaa

SEQ ID NO: 5614639 - DNA, 25 bp, Homo sapien
actgctctcaaagggaaaacaggca

SEQ ID NO: 5614640 - DNA, 25 bp, Homo sapien
gtatccagaatgataggaaaagcat

SEQ ID NO: 5614641 - DNA, 25 bp, Homo sapien
gagaaagctgaaagatatggtacca

SEQ ID NO: 5614642 - DNA, 25 bp, Homo sapien
aaataatggaatggcaaaaagagaa

SEQ ID NO: 5614643 - DNA, 25 bp, Homo sapien
ttcgatcacacaccaacccaataat

SEQ ID NO: 5614644 - DNA, 25 bp, Homo sapien
ttggcttatgagagactaaagatat

SEQ ID NO: 5614645 - DNA, 25 bp, Homo sapien
ataatgggctatgtggagatataaa

SEQ ID NO: 5614646 - DNA, 25 bp, Homo sapien
tcaaatagaagaattgcatgccttt

SEQ ID NO: 5614647 - DNA, 25 bp, Homo sapien
gagactctgggattagaagtaaaac

SEQ ID NO: 5614648 - DNA, 25 bp, Homo sapien
atgaagctgaggtaaactgttatta

SEQ ID NO: 5614649 - DNA, 25 bp, Homo sapien
aaaaagggaacaagcttcaaataga

SEQ ID NO: 5614650 - DNA, 25 bp, Homo sapien
cacaccaacccaataataggatcat

SEQ ID NO: 5614651 - DNA, 25 bp, Homo sapien
ccttttcaatggtaataatgggcta

SEQ ID NO: 5614652 - DNA, 25 bp, Homo sapien
tattagtgacacctgacctgctctt

SEQ ID NO: 5614653 - DNA, 25 bp, Homo sapien
tcacctcaacccccgaccgagtagc

SEQ ID NO: 5614654 - DNA, 25 bp, Homo sapien
agacattctaaggtgatgaagtgct

SEQ ID NO: 5614655 - DNA, 25 bp, Homo sapien
ataaacgataccttaaagacgctaa

SEQ ID NO: 5614656 - DNA, 25 bp, Homo sapien
gtctgaatcttgaacacacaatgcc

SEQ ID NO: 5614657 - DNA, 25 bp, Homo sapien
aatgtgtgtttgcaagaagctttcc

SEQ ID NO: 5614658 - DNA, 25 bp, Homo sapien
tgtcataactagcatcaacgtcttt

SEQ ID NO: 5614659 - DNA, 25 bp, Homo sapien
aaggtgatgaagtgctttgagaaca

SEQ ID NO: 5614660 - DNA, 25 bp, Homo sapien
aagttcagaagaataagacattcta

SEQ ID NO: 5614661 - DNA, 25 bp, Homo sapien
tttgagaacataagacactaagctt

SEQ ID NO: 5614662 - DNA, 25 bp, Homo sapien
gctggggaattaattataaacgata

SEQ ID NO: 5614663 - DNA, 25 bp, Homo sapien
taagccaggttgaggtaaatactct

SEQ ID NO: 5614664 - DNA, 25 bp, Homo sapien
taagtaacataagccaggttgaggt

SEQ ID NO: 5614665 - DNA, 25 bp, Homo sapien
tgggaggacgatgatttctagatca

SEQ ID NO: 5614666 - DNA, 25 bp, Homo sapien
cagggttatagcggtgaaataaatg

SEQ ID NO: 5614667 - DNA, 25 bp, Homo sapien
catttgttacggaggttggtcgtat

SEQ ID NO: 5614668 - DNA, 25 bp, Homo sapien
cgcagcagtaaaagtacacgttttt

SEQ ID NO: 5614669 - DNA, 25 bp, Homo sapien
atacacgtgtatagaaaaggcagag

SEQ ID NO: 5614670 - DNA, 25 bp, Homo sapien
taaaccaaatgcacaaaacacagtc

SEQ ID NO: 5614671 - DNA, 25 bp, Homo sapien
ggcacgtttctggaggcatgttaca

SEQ ID NO: 5614672 - DNA, 25 bp, Homo sapien
ctaccgtgtggagaaattcatagtt

SEQ ID NO: 5614673 - DNA, 25 bp, Homo sapien
aaaacacagtcaggtgaagtttctc

SEQ ID NO: 5614674 - DNA, 25 bp, Homo sapien
ctagatcagatgacagtaacatagg

SEQ ID NO: 5614675 - DNA, 25 bp, Homo sapien
acacagctacacattcagggttata

SEQ ID NO: 5614676 - DNA, 25 bp, Homo sapien
ttataaggttattgaaaggagtgag

SEQ ID NO: 5614677 - DNA, 25 bp, Homo sapien
tcaagaatacaaacactagctcgct

SEQ ID NO: 5614678 - DNA, 25 bp, Homo sapien
agtaatcctggagccagtacccgac

SEQ ID NO: 5614679 - DNA, 25 bp, Homo sapien
taaatgcccacctctcaatagctct

SEQ ID NO: 5614680 - DNA, 25 bp, Homo sapien
tccatgagtttaggcataaatgccc

SEQ ID NO: 5614681 - DNA, 25 bp, Homo sapien
agttcctggatgcagagtaaaactc

SEQ ID NO: 5614682 - DNA, 25 bp, Homo sapien
gctgtaatacaatactggagtaatc

SEQ ID NO: 5614683 - DNA, 25 bp, Homo sapien
caataaaagtcagcaatcatcatcc

SEQ ID NO: 5614684 - DNA, 25 bp, Homo sapien
tctgtaaaatgagtattaggatact

SEQ ID NO: 5614685 - DNA, 25 bp, Homo sapien
aggagtgagtgagttagtacatatt

SEQ ID NO: 5614686 - DNA, 25 bp, Homo sapien
gaaataggaagtagatctctggtgg

SEQ ID NO: 5614687 - DNA, 25 bp, Homo sapien
gtagaggaaatagctgaattcgctt

SEQ ID NO: 5614688 - DNA, 25 bp, Homo sapien
tcctgtgaccaagaagtttgagaac

SEQ ID NO: 5614689 - DNA, 25 bp, Homo sapien
tcagctgcgcatacatttcacgatt

SEQ ID NO: 5614690 - DNA, 25 bp, Homo sapien
gagtgcaagcgtcctgtgaccaaga

SEQ ID NO: 5614691 - DNA, 25 bp, Homo sapien
aattccacacaaaaggtagaggaaa

SEQ ID NO: 5614692 - DNA, 25 bp, Homo sapien
gaattcgcttcagctgcgcatacat

SEQ ID NO: 5614693 - DNA, 25 bp, Homo sapien
tagtaaatagcagtagtaaacaaca

SEQ ID NO: 5614694 - DNA, 25 bp, Homo sapien
cagcacttcggtaagctgagccagg

SEQ ID NO: 5614695 - DNA, 25 bp, Homo sapien
ccaggttcatctcacaagttcagta

SEQ ID NO: 5614696 - DNA, 25 bp, Homo sapien
atgttagtaaatagcagtagtaaac

SEQ ID NO: 5614697 - DNA, 25 bp, Homo sapien
aaagcttttaggtgtcctcagtaca

SEQ ID NO: 5614698 - DNA, 25 bp, Homo sapien
aactaaaaattaagtgccttgatat

SEQ ID NO: 5614699 - DNA, 25 bp, Homo sapien
ggattataggcatgaaccaacgtgc

SEQ ID NO: 5614700 - DNA, 25 bp, Homo sapien
agagatgggatcttgttacattgcc

SEQ ID NO: 5614701 - DNA, 25 bp, Homo sapien
aatcatacagcactttgggaggttg

SEQ ID NO: 5614702 - DNA, 25 bp, Homo sapien
ttgaactcctgggatcaagcgatcc

SEQ ID NO: 5614703 - DNA, 25 bp, Homo sapien
aggactgcttgagcccaggcatctg

SEQ ID NO: 5614704 - DNA, 25 bp, Homo sapien
attaggttcctatgtttcagatgcc

SEQ ID NO: 5614705 - DNA, 25 bp, Homo sapien
gccttttggatggtatatcactaac

SEQ ID NO: 5614706 - DNA, 25 bp, Homo sapien
taaaacattggtctagatgatattt

SEQ ID NO: 5614707 - DNA, 25 bp, Homo sapien
aacgtgcccagcctcagatgccttt

SEQ ID NO: 5614708 - DNA, 25 bp, Homo sapien
gcttgagcccaggcatctgagacca

SEQ ID NO: 5614709 - DNA, 25 bp, Homo sapien
atagcctcaggtacgtgggttccgg

SEQ ID NO: 5614710 - DNA, 25 bp, Homo sapien
ccggaacccacgtacctgaggctat

SEQ ID NO: 5614711 - DNA, 25 bp, Homo sapien
ctgcagaatcgaaaattgtcacgta

SEQ ID NO: 5614712 - DNA, 25 bp, Homo sapien
aacaatgggataatttggagcagct

SEQ ID NO: 5614713 - DNA, 25 bp, Homo sapien
ctcctcagggtagaccttacacctc

SEQ ID NO: 5614714 - DNA, 25 bp, Homo sapien
gtaagtgtccagaacaacaatggga

SEQ ID NO: 5614715 - DNA, 25 bp, Homo sapien
ttgcagcagaaaccacagcactgat

SEQ ID NO: 5614716 - DNA, 25 bp, Homo sapien
gagcagctaaatgtcaaggccttcc

SEQ ID NO: 5614717 - DNA, 25 bp, Homo sapien
acaaagggccaagatatacctccca

SEQ ID NO: 5614718 - DNA, 25 bp, Homo sapien
tagtggccacgacctcaggcataca

SEQ ID NO: 5614719 - DNA, 25 bp, Homo sapien
ctcagcattctcaaggcaggttttg

SEQ ID NO: 5614720 - DNA, 25 bp, Homo sapien
tacagcatgcatcagggaaaataag

SEQ ID NO: 5614721 - DNA, 25 bp, Homo sapien
tgccctcttgggaagtgctcctata

SEQ ID NO: 5614722 - DNA, 25 bp, Homo sapien
atgagtattgtttaaccagggaaaa

SEQ ID NO: 5614723 - DNA, 25 bp, Homo sapien
taaaattgttccataggcattctat

SEQ ID NO: 5614724 - DNA, 25 bp, Homo sapien
aaatattacaatggctaaactggtt

SEQ ID NO: 5614725 - DNA, 25 bp, Homo sapien
atggctaaactggttttggggaaga

SEQ ID NO: 5614726 - DNA, 25 bp, Homo sapien
acaacgacacaagttttatgtttaa

SEQ ID NO: 5614727 - DNA, 25 bp, Homo sapien
gttccttaactactgacttagagaa

SEQ ID NO: 5614728 - DNA, 25 bp, Homo sapien
cttttggtagtgatttggctttttg

SEQ ID NO: 5614729 - DNA, 25 bp, Homo sapien
ccagggaaaaagttgtcaaccacca

SEQ ID NO: 5614730 - DNA, 25 bp, Homo sapien
atgtgtgcacatacactcagatttt

SEQ ID NO: 5614731 - DNA, 25 bp, Homo sapien
cttggcatgttcataaaattgttcc

SEQ ID NO: 5614732 - DNA, 25 bp, Homo sapien
atttaggcatatccttggcatgttc

SEQ ID NO: 5614733 - DNA, 25 bp, Homo sapien
tcttctcatcgagcctgaagttgtc

SEQ ID NO: 5614734 - DNA, 25 bp, Homo sapien
ccgggggctcgctttatttcaccac

SEQ ID NO: 5614735 - DNA, 25 bp, Homo sapien
gggacagtcgagccacacaaattct

SEQ ID NO: 5614736 - DNA, 25 bp, Homo sapien
atgacgtaatccacccttaactgtg

SEQ ID NO: 5614737 - DNA, 25 bp, Homo sapien
cgccactgggcatcgttctctctcc

SEQ ID NO: 5614738 - DNA, 25 bp, Homo sapien
ttgcctcccgccactgggcatcgtt

SEQ ID NO: 5614739 - DNA, 25 bp, Homo sapien
tacatggatcctaagggacagtcga

SEQ ID NO: 5614740 - DNA, 25 bp, Homo sapien
gaagttgtcaaaaatgacgtaatcc

SEQ ID NO: 5614741 - DNA, 25 bp, Homo sapien
gctgcacgaagcacttgtagacggc

SEQ ID NO: 5614742 - DNA, 25 bp, Homo sapien
ctcctgctgcacgaagcacttgtag

SEQ ID NO: 5614743 - DNA, 25 bp, Homo sapien
tgtacatggatcctaagggacagtc

SEQ ID NO: 5614744 - DNA, 25 bp, Homo sapien
ttgggtacattatgacagagaggtt

SEQ ID NO: 5614745 - DNA, 25 bp, Homo sapien
gcgcccggccaaatccattatcatc

SEQ ID NO: 5614746 - DNA, 25 bp, Homo sapien
gaacaaaaatggtactcttagcctc

SEQ ID NO: 5614747 - DNA, 25 bp, Homo sapien
atgtttaaaggctacgttcagtttc

SEQ ID NO: 5614748 - DNA, 25 bp, Homo sapien
gcgtccagctcagcgattctcgtgc

SEQ ID NO: 5614749 - DNA, 25 bp, Homo sapien
caactgtcagtagaactgaggcttc

SEQ ID NO: 5614750 - DNA, 25 bp, Homo sapien
agccaccctaatagtgtgggattac

SEQ ID NO: 5614751 - DNA, 25 bp, Homo sapien
gcttcttgagtaaaggggattgagg

SEQ ID NO: 5614752 - DNA, 25 bp, Homo sapien
tggagtattactgaaaagcatgata

SEQ ID NO: 5614753 - DNA, 25 bp, Homo sapien
tcactgcacctctgcgcgtccagct

SEQ ID NO: 5614754 - DNA, 25 bp, Homo sapien
gcaaatgatttggtaacctgacatc

SEQ ID NO: 5614755 - DNA, 25 bp, Homo sapien
actaatagactgatgaaactgtata

SEQ ID NO: 5614756 - DNA, 25 bp, Homo sapien
ttgtaaaatggtctcagattggtat

SEQ ID NO: 5614757 - DNA, 25 bp, Homo sapien
gaggcgactaagaatgaaactatcc

SEQ ID NO: 5614758 - DNA, 25 bp, Homo sapien
caagtaacccaaccagttatttgtc

SEQ ID NO: 5614759 - DNA, 25 bp, Homo sapien
acagcatctttaatcacaggcaaat

SEQ ID NO: 5614760 - DNA, 25 bp, Homo sapien
taacattttataagtgccagggatc

SEQ ID NO: 5614761 - DNA, 25 bp, Homo sapien
aatggtctcagattggtataggaag

SEQ ID NO: 5614762 - DNA, 25 bp, Homo sapien
gtgtttgctaaccactgatggcatc

SEQ ID NO: 5614763 - DNA, 25 bp, Homo sapien
gccagggatcacttaatccaaaccc

SEQ ID NO: 5614764 - DNA, 25 bp, Homo sapien
ctttggtagaatttgttaacatgtg

SEQ ID NO: 5614765 - DNA, 25 bp, Homo sapien
tagcagtgcataaaacagtggtgtt

SEQ ID NO: 5614766 - DNA, 25 bp, Homo sapien
agcaacgtatgagtggtccacttat

SEQ ID NO: 5614767 - DNA, 25 bp, Homo sapien
atattagctgtagtaacaatcccct

SEQ ID NO: 5614768 - DNA, 25 bp, Homo sapien
attataaatgaaggtgctatgtaac

SEQ ID NO: 5614769 - DNA, 25 bp, Homo sapien
ggtgtggacatactaaaccattcac

SEQ ID NO: 5614770 - DNA, 25 bp, Homo sapien
ttctgcaatggtattacgtgtcctt

SEQ ID NO: 5614771 - DNA, 25 bp, Homo sapien
gaaaggttagatttagtccagcctc

SEQ ID NO: 5614772 - DNA, 25 bp, Homo sapien
tgaaggacatccaggttgtttccgg

SEQ ID NO: 5614773 - DNA, 25 bp, Homo sapien
ctcagggataactgtcaagtagtac

SEQ ID NO: 5614774 - DNA, 25 bp, Homo sapien
atctcaccagcaacgtatgagtggt

SEQ ID NO: 5614775 - DNA, 25 bp, Homo sapien
gtcaagtagtacaaatgccagttat

SEQ ID NO: 5614776 - DNA, 25 bp, Homo sapien
attgaaatcaagggtagaaaggtta

SEQ ID NO: 5614777 - DNA, 25 bp, Homo sapien
tccaggtggcagtttcacatgacta

SEQ ID NO: 5614778 - DNA, 25 bp, Homo sapien
ttcacatgactagcaaaaggaaact

SEQ ID NO: 5614779 - DNA, 25 bp, Homo sapien
accaaggacctcattatacactcat

SEQ ID NO: 5614780 - DNA, 25 bp, Homo sapien
ggacccaacacggtgctggatttga

SEQ ID NO: 5614781 - DNA, 25 bp, Homo sapien
aatacagggtggtcactagagaata

SEQ ID NO: 5614782 - DNA, 25 bp, Homo sapien
aatcccacacccattgggcatggtg

SEQ ID NO: 5614783 - DNA, 25 bp, Homo sapien
cccagtgagacaggaataatacagg

SEQ ID NO: 5614784 - DNA, 25 bp, Homo sapien
ttcttagggtcccagtgagacagga

SEQ ID NO: 5614785 - DNA, 25 bp, Homo sapien
tagagaatagaaaattccaggtggc

SEQ ID NO: 5614786 - DNA, 25 bp, Homo sapien
ttttggatgtgtagttggaattccc

SEQ ID NO: 5614787 - DNA, 25 bp, Homo sapien
aacttttgctgcagaagtaaggggc

SEQ ID NO: 5614788 - DNA, 25 bp, Homo sapien
agacaagagaaaaactatttgctga

SEQ ID NO: 5614789 - DNA, 25 bp, Homo sapien
ttgctgagtactgccattatgagaa

SEQ ID NO: 5614790 - DNA, 25 bp, Homo sapien
ggtgcgcaccactccgctgcacagc

SEQ ID NO: 5614791 - DNA, 25 bp, Homo sapien
aaacactgttaaaaagccagctagc

SEQ ID NO: 5614792 - DNA, 25 bp, Homo sapien
tccgctgcacagctagtagggtttt

SEQ ID NO: 5614793 - DNA, 25 bp, Homo sapien
caccaaacccagccacagtgttcat

SEQ ID NO: 5614794 - DNA, 25 bp, Homo sapien
aatggtatgaacagtgcagccttga

SEQ ID NO: 5614795 - DNA, 25 bp, Homo sapien
ttctgagtagcttgtagttagggac

SEQ ID NO: 5614796 - DNA, 25 bp, Homo sapien
aaagtgttggaattatagacgtaaa

SEQ ID NO: 5614797 - DNA, 25 bp, Homo sapien
attatagacgtaaaccaccacaccc

SEQ ID NO: 5614798 - DNA, 25 bp, Homo sapien
gggccccagtgatgctcctaccttg

SEQ ID NO: 5614799 - DNA, 25 bp, Homo sapien
cagtcaatgagatcactggaaggcg

SEQ ID NO: 5614800 - DNA, 25 bp, Homo sapien
aggatccaagcttacgtacgcgtgc

SEQ ID NO: 5614801 - DNA, 25 bp, Homo sapien
ggccgctctagaggatccaagctta

SEQ ID NO: 5614802 - DNA, 25 bp, Homo sapien
acggagcgagatgccgtctctaaat

SEQ ID NO: 5614803 - DNA, 25 bp, Homo sapien
gtgagttacgacggcaccactgccg

SEQ ID NO: 5614804 - DNA, 25 bp, Homo sapien
ggtctctttgggccaagcaggcatg

SEQ ID NO: 5614805 - DNA, 25 bp, Homo sapien
acgcgtgcatgcgacgtcatagctc

SEQ ID NO: 5614806 - DNA, 25 bp, Homo sapien
taaattcgcgaccgcgtcgacggag

SEQ ID NO: 5614807 - DNA, 25 bp, Homo sapien
gtcgacgcggccgcgaatttagtag

SEQ ID NO: 5614808 - DNA, 25 bp, Homo sapien
gatcgctcgagtccaggagcgtcca

SEQ ID NO: 5614809 - DNA, 25 bp, Homo sapien
ggaaggcgctctctgcgtctcactt

SEQ ID NO: 5614810 - DNA, 25 bp, Homo sapien
tggatctcagggccatctcagctgg

SEQ ID NO: 5614811 - DNA, 25 bp, Homo sapien
gagcatctgtctatttggggcaagt

SEQ ID NO: 5614812 - DNA, 25 bp, Homo sapien
cctccatccaggggcttggaggagg

SEQ ID NO: 5614813 - DNA, 25 bp, Homo sapien
ttgtgattaattacgggaatgggtg

SEQ ID NO: 5614814 - DNA, 25 bp, Homo sapien
aggaatagctcagacggagtttgtg

SEQ ID NO: 5614815 - DNA, 25 bp, Homo sapien
tgtctatttggggcaagtcagagta

SEQ ID NO: 5614816 - DNA, 25 bp, Homo sapien
tctggtaatcacagaagctctgcgc

SEQ ID NO: 5614817 - DNA, 25 bp, Homo sapien
tcacagaagctctgcgcttggggaa

SEQ ID NO: 5614818 - DNA, 25 bp, Homo sapien
ggcatggcttagaaaggaatagctc

SEQ ID NO: 5614819 - DNA, 25 bp, Homo sapien
ccagacagacaagaagactccttca

SEQ ID NO: 5614820 - DNA, 25 bp, Homo sapien
tctcagctggctccagacagacaag

SEQ ID NO: 5614821 - DNA, 25 bp, Homo sapien
agttaaagcatgggaaaattcagtt

SEQ ID NO: 5614822 - DNA, 25 bp, Homo sapien
tcaccaaacacgaaagaaaccagat

SEQ ID NO: 5614823 - DNA, 25 bp, Homo sapien
gtgagtgtatgtatgaccatagaaa

SEQ ID NO: 5614824 - DNA, 25 bp, Homo sapien
tgttaaaaggaaggtatgctataag

SEQ ID NO: 5614825 - DNA, 25 bp, Homo sapien
aggtgaccccacttcagctgttaac

SEQ ID NO: 5614826 - DNA, 25 bp, Homo sapien
agtgggtggccaaacatttcctatt

SEQ ID NO: 5614827 - DNA, 25 bp, Homo sapien
ttctgcctataggtgaccccacttc

SEQ ID NO: 5614828 - DNA, 25 bp, Homo sapien
tataaagcacaaaaccagtgggtgg

SEQ ID NO: 5614829 - DNA, 25 bp, Homo sapien
aggaaggtatgctataaggattgta

SEQ ID NO: 5614830 - DNA, 25 bp, Homo sapien
actgttaaacagacacgaatctatt

SEQ ID NO: 5614831 - DNA, 25 bp, Homo sapien
catttcctattggagggagctaaat

SEQ ID NO: 5614832 - DNA, 25 bp, Homo sapien
tgagcctcaactccaggtcactggg

SEQ ID NO: 5614833 - DNA, 25 bp, Homo sapien
atctcaagagataaggttcccagtc

SEQ ID NO: 5614834 - DNA, 25 bp, Homo sapien
tgggaattatattatcacaggtcag

SEQ ID NO: 5614835 - DNA, 25 bp, Homo sapien
caaaaggagaatgaggcttaaatta

SEQ ID NO: 5614836 - DNA, 25 bp, Homo sapien
tccaaatattccagcagagatgttt

SEQ ID NO: 5614837 - DNA, 25 bp, Homo sapien
ccaatcttacctccacagcgggctc

SEQ ID NO: 5614838 - DNA, 25 bp, Homo sapien
cttcaaccaggtccagaagagtgtt

SEQ ID NO: 5614839 - DNA, 25 bp, Homo sapien
ggtcactgggtcaacaatctccttc

SEQ ID NO: 5614840 - DNA, 25 bp, Homo sapien
caaccctcagacatgtggcagatct

SEQ ID NO: 5614841 - DNA, 25 bp, Homo sapien
cacaggtcagtatcactaagaacat

SEQ ID NO: 5614842 - DNA, 25 bp, Homo sapien
atgtggcagatctctccctgagcct

SEQ ID NO: 5614843 - DNA, 25 bp, Homo sapien
tggataggcagattgacatgtgtaa

SEQ ID NO: 5614844 - DNA, 25 bp, Homo sapien
aaatggataaatgaatggatagagg

SEQ ID NO: 5614845 - DNA, 25 bp, Homo sapien
ccaggtccaccaattcaggagaggc

SEQ ID NO: 5614846 - DNA, 25 bp, Homo sapien
gctatgtggtgaagtaaagataaca

SEQ ID NO: 5614847 - DNA, 25 bp, Homo sapien
ctaggaatccaggtccaccaattca

SEQ ID NO: 5614848 - DNA, 25 bp, Homo sapien
tgtggtgaagtaaagataacacccc

SEQ ID NO: 5614849 - DNA, 25 bp, Homo sapien
tctaggtgatgctaaaggccacaca

SEQ ID NO: 5614850 - DNA, 25 bp, Homo sapien
gtagaatctaggtgatgctaaaggc

SEQ ID NO: 5614851 - DNA, 25 bp, Homo sapien
gccactgtacccagctgagagctta

SEQ ID NO: 5614852 - DNA, 25 bp, Homo sapien
gtgtttagaagtgaaatgtaatgat

SEQ ID NO: 5614853 - DNA, 25 bp, Homo sapien
ccaccaattcaggagaggctatgtg

SEQ ID NO: 5614854 - DNA, 25 bp, Homo sapien
ttacaggactattgcagtaccattc

SEQ ID NO: 5614855 - DNA, 25 bp, Homo sapien
aagtggaacttaatggaacgaatac

SEQ ID NO: 5614856 - DNA, 25 bp, Homo sapien
tacacaacacccaactaagactatt

SEQ ID NO: 5614857 - DNA, 25 bp, Homo sapien
acaatgtgagagtaagaaagtgttt

SEQ ID NO: 5614858 - DNA, 25 bp, Homo sapien
ggaacgaataccagacctaacatta

SEQ ID NO: 5614859 - DNA, 25 bp, Homo sapien
accacatgtactaacagttgctgta

SEQ ID NO: 5614860 - DNA, 25 bp, Homo sapien
accaaaaaactatgtagagcaaaac

SEQ ID NO: 5614861 - DNA, 25 bp, Homo sapien
atgtagagcaaaacaagcatgatac

SEQ ID NO: 5614862 - DNA, 25 bp, Homo sapien
taatgccaagacaattcatcgcttt

SEQ ID NO: 5614863 - DNA, 25 bp, Homo sapien
tgctgtacaatgatacacaacaccc

SEQ ID NO: 5614864 - DNA, 25 bp, Homo sapien
ttattacatggatcagaaataccac

SEQ ID NO: 5614865 - DNA, 25 bp, Homo sapien
tataaacattagatataaacagtgt

SEQ ID NO: 5614866 - DNA, 25 bp, Homo sapien
acaaatgtgtcaaaagcacttcaac

SEQ ID NO: 5614867 - DNA, 25 bp, Homo sapien
taaatatactctcttggcacaaatc

SEQ ID NO: 5614868 - DNA, 25 bp, Homo sapien
cacttcaaccctgtttgggggttca

SEQ ID NO: 5614869 - DNA, 25 bp, Homo sapien
tcagaacttttatcacaaatgtgtc

SEQ ID NO: 5614870 - DNA, 25 bp, Homo sapien
cttggcacaaatctttaaaatatat

SEQ ID NO: 5614871 - DNA, 25 bp, Homo sapien
aaatgtgtcaaaagcacttcaaccc

SEQ ID NO: 5614872 - DNA, 25 bp, Homo sapien
tttatcacaaatgtgtcaaaagcac

SEQ ID NO: 5614873 - DNA, 25 bp, Homo sapien
agcaggagaagaagtcatttaagtt

SEQ ID NO: 5614874 - DNA, 25 bp, Homo sapien
atcacaaatgtgtcaaaagcacttc

SEQ ID NO: 5614875 - DNA, 25 bp, Homo sapien
cttcaaccctgtttgggggttcatg

SEQ ID NO: 5614876 - DNA, 25 bp, Homo sapien
tgggtaaggaagacttccaacagcc

SEQ ID NO: 5614877 - DNA, 25 bp, Homo sapien
ggagcctgttgagtcagccaagtgt

SEQ ID NO: 5614878 - DNA, 25 bp, Homo sapien
ttctggtgaagacaagctatcagtc

SEQ ID NO: 5614879 - DNA, 25 bp, Homo sapien
agtcaggtcctcaccctccaagcag

SEQ ID NO: 5614880 - DNA, 25 bp, Homo sapien
caagtagtagccatctggattctgc

SEQ ID NO: 5614881 - DNA, 25 bp, Homo sapien
taggtcagaaccaagtagtagccat

SEQ ID NO: 5614882 - DNA, 25 bp, Homo sapien
ggagttcccctggcctaggtcagaa

SEQ ID NO: 5614883 - DNA, 25 bp, Homo sapien
ggtgagatgcaagatactttggctc

SEQ ID NO: 5614884 - DNA, 25 bp, Homo sapien
aggctacttgcctcctctcggggtg

SEQ ID NO: 5614885 - DNA, 25 bp, Homo sapien
ctgcaccgaaagcagtaaaaaggca

SEQ ID NO: 5614886 - DNA, 25 bp, Homo sapien
tgctgctgaccagaaagaaaagtga

SEQ ID NO: 5614887 - DNA, 25 bp, Homo sapien
ctaaaaactacacagatgaaatctc

SEQ ID NO: 5614888 - DNA, 25 bp, Homo sapien
tccaggctgttctttgggtcgtggg

SEQ ID NO: 5614889 - DNA, 25 bp, Homo sapien
ggactgaccatgggactgccccata

SEQ ID NO: 5614890 - DNA, 25 bp, Homo sapien
tcctggccaaatcagggactgacca

SEQ ID NO: 5614891 - DNA, 25 bp, Homo sapien
gggactgccccatatgtgaacctat

SEQ ID NO: 5614892 - DNA, 25 bp, Homo sapien
gagaagcactggcatatttggaaac

SEQ ID NO: 5614893 - DNA, 25 bp, Homo sapien
ttatgcagcagttgactggtctaaa

SEQ ID NO: 5614894 - DNA, 25 bp, Homo sapien
gagaactagctcccattatgccact

SEQ ID NO: 5614895 - DNA, 25 bp, Homo sapien
ggggctcagttgtgataaaaggtga

SEQ ID NO: 5614896 - DNA, 25 bp, Homo sapien
gatgttagtttaagaatagacctcc

SEQ ID NO: 5614897 - DNA, 25 bp, Homo sapien
aagttagaactagttaatggagaac

SEQ ID NO: 5614898 - DNA, 25 bp, Homo sapien
tgcatcatgatgaaaatgtggatta

SEQ ID NO: 5614899 - DNA, 25 bp, Homo sapien
tgaaaatgtggattaactgtgggtt

SEQ ID NO: 5614900 - DNA, 25 bp, Homo sapien
atttcacctggttatgctgcatccc

SEQ ID NO: 5614901 - DNA, 25 bp, Homo sapien
cacaaacacagactagcaatgcact

SEQ ID NO: 5614902 - DNA, 25 bp, Homo sapien
atgaggattgttgcatgggttaaac

SEQ ID NO: 5614903 - DNA, 25 bp, Homo sapien
agcaatgcacttgaacaaacctggt

SEQ ID NO: 5614904 - DNA, 25 bp, Homo sapien
attaactgtgggttgcatgcctgtt

SEQ ID NO: 5614905 - DNA, 25 bp, Homo sapien
tgaacaaacctggtggtctttggaa

SEQ ID NO: 5614906 - DNA, 25 bp, Homo sapien
ttgttactgtcatgaggattgttgc

SEQ ID NO: 5614907 - DNA, 25 bp, Homo sapien
gttcatacttcagtgatggtcacac

SEQ ID NO: 5614908 - DNA, 25 bp, Homo sapien
taataagatttgtgaatgctgcatc

SEQ ID NO: 5614909 - DNA, 25 bp, Homo sapien
catccaagatgttaccaagtggttc

SEQ ID NO: 5614910 - DNA, 25 bp, Homo sapien
tctctggtaatgggattatgggtga

SEQ ID NO: 5614911 - DNA, 25 bp, Homo sapien
ggcatccgctgggaatagcacttga

SEQ ID NO: 5614912 - DNA, 25 bp, Homo sapien
gggtcaccaccatctgctagggtta

SEQ ID NO: 5614913 - DNA, 25 bp, Homo sapien
gctgggaatagcacttgacccggag

SEQ ID NO: 5614914 - DNA, 25 bp, Homo sapien
accatctgctagggttaccagaggc

SEQ ID NO: 5614915 - DNA, 25 bp, Homo sapien
aatgatggcatcaggattagtaccc

SEQ ID NO: 5614916 - DNA, 25 bp, Homo sapien
aactattgctagaaaaaaaatgctg

SEQ ID NO: 5614917 - DNA, 25 bp, Homo sapien
gagcccataggctgctgctcagtct

SEQ ID NO: 5614918 - DNA, 25 bp, Homo sapien
cctgtattttcaacaacgagaacac

SEQ ID NO: 5614919 - DNA, 25 bp, Homo sapien
tcaaagactgacctaaaaactatgc

SEQ ID NO: 5614920 - DNA, 25 bp, Homo sapien
atcgcatgaatatgacaatgaacac

SEQ ID NO: 5614921 - DNA, 25 bp, Homo sapien
cagtccaagctgatagtctaagtat

SEQ ID NO: 5614922 - DNA, 25 bp, Homo sapien
gacaacacagtaacaatcaggactt

SEQ ID NO: 5614923 - DNA, 25 bp, Homo sapien
aaatagcttatagcagaaatcacac

SEQ ID NO: 5614924 - DNA, 25 bp, Homo sapien
tcaggatgttaggtaaccgtagtcc

SEQ ID NO: 5614925 - DNA, 25 bp, Homo sapien
gacaatgaacacaagcagtccaagc

SEQ ID NO: 5614926 - DNA, 25 bp, Homo sapien
gcagcaaaatcatttggagggcctg

SEQ ID NO: 5614927 - DNA, 25 bp, Homo sapien
ccgtagtcctagtcttcccagctga

SEQ ID NO: 5614928 - DNA, 25 bp, Homo sapien
tcagaaaccacagagtcaaaaactc

SEQ ID NO: 5614929 - DNA, 25 bp, Homo sapien
actctgaccagagggaaattcaagt

SEQ ID NO: 5614930 - DNA, 25 bp, Homo sapien
ttttaaacagccattctcagaaacc

SEQ ID NO: 5614931 - DNA, 25 bp, Homo sapien
gaatcacagtggtcagtttacttac

SEQ ID NO: 5614932 - DNA, 25 bp, Homo sapien
taggagtttcttgtcatagagattt

SEQ ID NO: 5614933 - DNA, 25 bp, Homo sapien
actatgttgcccaggttggtcccaa

SEQ ID NO: 5614934 - DNA, 25 bp, Homo sapien
tgggattacaggcacgtgcctgcaa

SEQ ID NO: 5614935 - DNA, 25 bp, Homo sapien
tcctgggctcatgcaatccttctgc

SEQ ID NO: 5614936 - DNA, 25 bp, Homo sapien
aggcacgtgcctgcaagttataaat

SEQ ID NO: 5614937 - DNA, 25 bp, Homo sapien
aaaaagcaaaaagaactgtatccat

SEQ ID NO: 5614938 - DNA, 25 bp, Homo sapien
aggttggtcccaaactcctgggctc

SEQ ID NO: 5614939 - DNA, 25 bp, Homo sapien
gtaattaaattgaagtgctaatatc

SEQ ID NO: 5614940 - DNA, 25 bp, Homo sapien
taagtaagaatcacagtggtcagtt

SEQ ID NO: 5614941 - DNA, 25 bp, Homo sapien
ctgtatccatttaagtaagaatcac

SEQ ID NO: 5614942 - DNA, 25 bp, Homo sapien
ttcaatggaaataagggtatacatc

SEQ ID NO: 5614943 - DNA, 25 bp, Homo sapien
cataaactaggaccacgccagcaag

SEQ ID NO: 5614944 - DNA, 25 bp, Homo sapien
gctgaaacaggcataaactaggacc

SEQ ID NO: 5614945 - DNA, 25 bp, Homo sapien
ggtggaagcacagattcaatggaaa

SEQ ID NO: 5614946 - DNA, 25 bp, Homo sapien
taaatcatattacgagccaactttc

SEQ ID NO: 5614947 - DNA, 25 bp, Homo sapien
gccagcaagctaataggtagatgac

SEQ ID NO: 5614948 - DNA, 25 bp, Homo sapien
aaaaaccacggatatctaggattac

SEQ ID NO: 5614949 - DNA, 25 bp, Homo sapien
gaaacagggtactcaacaatcatgc

SEQ ID NO: 5614950 - DNA, 25 bp, Homo sapien
tctaaaaactatcacaggccccagc

SEQ ID NO: 5614951 - DNA, 25 bp, Homo sapien
ttttgctaggtatatgcacagcatc

SEQ ID NO: 5614952 - DNA, 25 bp, Homo sapien
tatcacaggccccagctacctcgca

SEQ ID NO: 5614953 - DNA, 25 bp, Homo sapien
atctgggacctggcacagcttccca

SEQ ID NO: 5614954 - DNA, 25 bp, Homo sapien
agaaggaattttggtaaacagagac

SEQ ID NO: 5614955 - DNA, 25 bp, Homo sapien
acagagaccgtttctgatcagtgcc

SEQ ID NO: 5614956 - DNA, 25 bp, Homo sapien
tatcctttatccagagagcaatgtc

SEQ ID NO: 5614957 - DNA, 25 bp, Homo sapien
gtgtgcaaagaaggaattttggtaa

SEQ ID NO: 5614958 - DNA, 25 bp, Homo sapien
ggctctcaagggacctactcccgac

SEQ ID NO: 5614959 - DNA, 25 bp, Homo sapien
agctgcctgtgaagtccagtgactg

SEQ ID NO: 5614960 - DNA, 25 bp, Homo sapien
ctgatcagtgcctaagtctatcctt

SEQ ID NO: 5614961 - DNA, 25 bp, Homo sapien
cattatttgtgtaggacgggcattt

SEQ ID NO: 5614962 - DNA, 25 bp, Homo sapien
aggacgggcattttcactacacagc

SEQ ID NO: 5614963 - DNA, 25 bp, Homo sapien
tacacagctctgtgtgcaaagaagg

SEQ ID NO: 5614964 - DNA, 25 bp, Homo sapien
caggataagtgcatttgatcatctc

SEQ ID NO: 5614965 - DNA, 25 bp, Homo sapien
gaacacagtacaatgtatagggatt

SEQ ID NO: 5614966 - DNA, 25 bp, Homo sapien
gtggcaagctgacctcatctgatac

SEQ ID NO: 5614967 - DNA, 25 bp, Homo sapien
acatgtgtacacaagcagttgtatt

SEQ ID NO: 5614968 - DNA, 25 bp, Homo sapien
gcagttgtattcacaggataagtgc

SEQ ID NO: 5614969 - DNA, 25 bp, Homo sapien
gtaactgcatattgggagaactttt

SEQ ID NO: 5614970 - DNA, 25 bp, Homo sapien
tacgtgtgaattgtagaaatcaagc

SEQ ID NO: 5614971 - DNA, 25 bp, Homo sapien
gatctatatcaagtggcaagctgac

SEQ ID NO: 5614972 - DNA, 25 bp, Homo sapien
ttttcaagtatagaccccacagcac

SEQ ID NO: 5614973 - DNA, 25 bp, Homo sapien
tgatacaattagatatgaacacagt

SEQ ID NO: 5614974 - DNA, 25 bp, Homo sapien
gattgaatgggaaacagtaactgca

SEQ ID NO: 5614975 - DNA, 25 bp, Homo sapien
aaacagtccgcttgccacagccttc

SEQ ID NO: 5614976 - DNA, 25 bp, Homo sapien
aaaccctttgacagagcaattctac

SEQ ID NO: 5614977 - DNA, 25 bp, Homo sapien
gatcagaaacatcccagtgtcattg

SEQ ID NO: 5614978 - DNA, 25 bp, Homo sapien
acagggataagccaccattcctggc

SEQ ID NO: 5614979 - DNA, 25 bp, Homo sapien
caccattcctggcctaatcccattt

SEQ ID NO: 5614980 - DNA, 25 bp, Homo sapien
tcagatgagtaacaaaccctttgac

SEQ ID NO: 5614981 - DNA, 25 bp, Homo sapien
taaggttcagatgagtaacaaaccc

SEQ ID NO: 5614982 - DNA, 25 bp, Homo sapien
gccacagccttccaaaaagctggaa

SEQ ID NO: 5614983 - DNA, 25 bp, Homo sapien
tacttctaggaattcatcctgcaga

SEQ ID NO: 5614984 - DNA, 25 bp, Homo sapien
tgatctcaaacagtccgcttgccac

SEQ ID NO: 5614985 - DNA, 25 bp, Homo sapien
attttcgctttaagagactgagttt

SEQ ID NO: 5614986 - DNA, 25 bp, Homo sapien
ttacttcttacagatgtgcaatatc

SEQ ID NO: 5614987 - DNA, 25 bp, Homo sapien
tgcaatatcaagacaatcaccaact

SEQ ID NO: 5614988 - DNA, 25 bp, Homo sapien
tagttgccagttagaacaatgtatc

SEQ ID NO: 5614989 - DNA, 25 bp, Homo sapien
ctgtagcaactctggtctttcaagc

SEQ ID NO: 5614990 - DNA, 25 bp, Homo sapien
tatggaacatgtaataacaatctgt

SEQ ID NO: 5614991 - DNA, 25 bp, Homo sapien
tgtatgaaagaattctgaagctatc

SEQ ID NO: 5614992 - DNA, 25 bp, Homo sapien
tattgccttgcaagaaatatccctt

SEQ ID NO: 5614993 - DNA, 25 bp, Homo sapien
taacaatctgtagcaactctggtct

SEQ ID NO: 5614994 - DNA, 25 bp, Homo sapien
ttttccaagctgcgtaatttaccaa

SEQ ID NO: 5614995 - DNA, 25 bp, Homo sapien
ttgatgacataaatggattccagat

SEQ ID NO: 5614996 - DNA, 25 bp, Homo sapien
cagatctatgaatttgccgtatgta

SEQ ID NO: 5614997 - DNA, 25 bp, Homo sapien
ggtgctctgtgagtcgcatcacgtc

SEQ ID NO: 5614998 - DNA, 25 bp, Homo sapien
tgcaaggaaatagattcattctgct

SEQ ID NO: 5614999 - DNA, 25 bp, Homo sapien
agatgcgatctgactttagactttc

SEQ ID NO: 5615000 - DNA, 25 bp, Homo sapien
tcaatggtggtgcccccatcacttt

SEQ ID NO: 5615001 - DNA, 25 bp, Homo sapien
ttacttatagaaccaactgccttcc

SEQ ID NO: 5615002 - DNA, 25 bp, Homo sapien
tctctaagagcaggaatgtcccttc

SEQ ID NO: 5615003 - DNA, 25 bp, Homo sapien
ttcaaagactttaaagatcaacctc

SEQ ID NO: 5615004 - DNA, 25 bp, Homo sapien
gtcctcccctgccctcaatggtggt

SEQ ID NO: 5615005 - DNA, 25 bp, Homo sapien
gagtcgcatcacgtcctcccctgcc

SEQ ID NO: 5615006 - DNA, 25 bp, Homo sapien
ttctagtgaagaatgacaatgtcct

SEQ ID NO: 5615007 - DNA, 25 bp, Homo sapien
ctgacccagtccggtgctgggtgct

SEQ ID NO: 5615008 - DNA, 25 bp, Homo sapien
agcagagagcggttgtaattttgtg

SEQ ID NO: 5615009 - DNA, 25 bp, Homo sapien
gaccaacgtcattcatagacctagg

SEQ ID NO: 5615010 - DNA, 25 bp, Homo sapien
atagacctaggatgttcaacttaag

SEQ ID NO: 5615011 - DNA, 25 bp, Homo sapien
ggggaatgattgtactggtaaagtc

SEQ ID NO: 5615012 - DNA, 25 bp, Homo sapien
gtgcaacagacactgaccggctttt

SEQ ID NO: 5615013 - DNA, 25 bp, Homo sapien
tacaggcataaaatgatatactctc

SEQ ID NO: 5615014 - DNA, 25 bp, Homo sapien
tactggtaaagtctctcaaacctcc

SEQ ID NO: 5615015 - DNA, 25 bp, Homo sapien
tgctaaaaccgaaacagagaacaat

SEQ ID NO: 5615016 - DNA, 25 bp, Homo sapien
tccaaagaacagcttattccaatgc

SEQ ID NO: 5615017 - DNA, 25 bp, Homo sapien
ttatgaaacagcaaatctctcctgc

SEQ ID NO: 5615018 - DNA, 25 bp, Homo sapien
accgaaacagagaacaataaaacat

SEQ ID NO: 5615019 - DNA, 25 bp, Homo sapien
atctggatgcagaaacatagaaaga

SEQ ID NO: 5615020 - DNA, 25 bp, Homo sapien
taaggattacttgcacaaaaaaata

SEQ ID NO: 5615021 - DNA, 25 bp, Homo sapien
aaacatagaaagactaatggcacaa

SEQ ID NO: 5615022 - DNA, 25 bp, Homo sapien
ccctcatgaactgcactctatctgg

SEQ ID NO: 5615023 - DNA, 25 bp, Homo sapien
acaaagcttattataaaggcatttt

SEQ ID NO: 5615024 - DNA, 25 bp, Homo sapien
gcactctatctggatgcagaaacat

SEQ ID NO: 5615025 - DNA, 25 bp, Homo sapien
tagaaagactaatggcacaaattac

SEQ ID NO: 5615026 - DNA, 25 bp, Homo sapien
tttctgtttatgtacccaggtactc

SEQ ID NO: 5615027 - DNA, 25 bp, Homo sapien
ccaggtactctagaggataccagcc

SEQ ID NO: 5615028 - DNA, 25 bp, Homo sapien
atgtatcactttaacgccctttccc

SEQ ID NO: 5615029 - DNA, 25 bp, Homo sapien
actctagaggataccagcccacatt

SEQ ID NO: 5615030 - DNA, 25 bp, Homo sapien
acatgttgtggcacaaagatgagtc

SEQ ID NO: 5615031 - DNA, 25 bp, Homo sapien
ccaaaaaataaagatacagaattct

SEQ ID NO: 5615032 - DNA, 25 bp, Homo sapien
aacttcagaggagcttttgtctttc

SEQ ID NO: 5615033 - DNA, 25 bp, Homo sapien
cttcagcaaatatgtgagcacctgc

SEQ ID NO: 5615034 - DNA, 25 bp, Homo sapien
ttcactgggactagaacagaatttc

SEQ ID NO: 5615035 - DNA, 25 bp, Homo sapien
taccagcctcaagtttgcaaccctt

SEQ ID NO: 5615036 - DNA, 25 bp, Homo sapien
attgggcttacatgttgtggcacaa

SEQ ID NO: 5615037 - DNA, 25 bp, Homo sapien
gtctaaaacttcagaggagcttttg

SEQ ID NO: 5615038 - DNA, 25 bp, Homo sapien
ggggagtggctaaatgcattcacag

SEQ ID NO: 5615039 - DNA, 25 bp, Homo sapien
cctgcttcactgggactagaacaga

SEQ ID NO: 5615040 - DNA, 25 bp, Homo sapien
gtgagcacctgcctattgggcttac

SEQ ID NO: 5615041 - DNA, 25 bp, Homo sapien
cattcctaaaagtgtgtatagtttt

SEQ ID NO: 5615042 - DNA, 25 bp, Homo sapien
ttacagattttattaagggccttca

SEQ ID NO: 5615043 - DNA, 25 bp, Homo sapien
aaagtgtgtatagttttacagattt

SEQ ID NO: 5615044 - DNA, 25 bp, Homo sapien
gtgatgaaatacacataacataaaa

SEQ ID NO: 5615045 - DNA, 25 bp, Homo sapien
gttgattcattcctaaaagtgtgta

SEQ ID NO: 5615046 - DNA, 25 bp, Homo sapien
tagttatgtagcaaatattttcccc

SEQ ID NO: 5615047 - DNA, 25 bp, Homo sapien
atagaaattatttgttgattcattc

SEQ ID NO: 5615048 - DNA, 25 bp, Homo sapien
aagggccttcattcttagttatgta

SEQ ID NO: 5615049 - DNA, 25 bp, Homo sapien
aaccttttcctttatgacttctggc

SEQ ID NO: 5615050 - DNA, 25 bp, Homo sapien
atgtagcaaatattttccccgattc

SEQ ID NO: 5615051 - DNA, 25 bp, Homo sapien
tgtgaaacacattgcttatatccct

SEQ ID NO: 5615052 - DNA, 25 bp, Homo sapien
attcatctggcgaccttaactctcc

SEQ ID NO: 5615053 - DNA, 25 bp, Homo sapien
acaatcagcaagaagggtgaatttt

SEQ ID NO: 5615054 - DNA, 25 bp, Homo sapien
cagagatgagaaaccactcaggtgc

SEQ ID NO: 5615055 - DNA, 25 bp, Homo sapien
ccttgtggctaaacagttttgggat

SEQ ID NO: 5615056 - DNA, 25 bp, Homo sapien
cctagtacctgaaatgggcagggtg

SEQ ID NO: 5615057 - DNA, 25 bp, Homo sapien
cagggtgcattccccaaggccaatt

SEQ ID NO: 5615058 - DNA, 25 bp, Homo sapien
gttttgggattagctcccccagtgc

SEQ ID NO: 5615059 - DNA, 25 bp, Homo sapien
gctgagggacagatatctgacctcc

SEQ ID NO: 5615060 - DNA, 25 bp, Homo sapien
caacaatctaaagaaagtgatgtgt

SEQ ID NO: 5615061 - DNA, 25 bp, Homo sapien
agccagtaactgagcctagtacctg

SEQ ID NO: 5615062 - DNA, 25 bp, Homo sapien
ttacataaaggtgtcgagttccttc

SEQ ID NO: 5615063 - DNA, 25 bp, Homo sapien
tcacataaaaatagaaagcacagct

SEQ ID NO: 5615064 - DNA, 25 bp, Homo sapien
ttagcttgaggtttaatccccatct

SEQ ID NO: 5615065 - DNA, 25 bp, Homo sapien
caatgtccattcaaaccagttaaag

SEQ ID NO: 5615066 - DNA, 25 bp, Homo sapien
ggtagcagcatagtttttggatttc

SEQ ID NO: 5615067 - DNA, 25 bp, Homo sapien
gaatcctcacataaaaatagaaagc

SEQ ID NO: 5615068 - DNA, 25 bp, Homo sapien
tggtgctggtagcagcatagttttt

SEQ ID NO: 5615069 - DNA, 25 bp, Homo sapien
tttccctcaaaccaacaatgtccat

SEQ ID NO: 5615070 - DNA, 25 bp, Homo sapien
gctggtagcagcatagtttttggat

SEQ ID NO: 5615071 - DNA, 25 bp, Homo sapien
aaaatagaaagcacagctagagagg

SEQ ID NO: 5615072 - DNA, 25 bp, Homo sapien
tccattcaaaccagttaaagacatg

SEQ ID NO: 5615073 - DNA, 25 bp, Homo sapien
attttagcttgaggtttaatcccca

SEQ ID NO: 5615074 - DNA, 25 bp, Homo sapien
aacttgccatcaagagttgggaaag

SEQ ID NO: 5615075 - DNA, 25 bp, Homo sapien
ggaagttttccaattaaggctctga

SEQ ID NO: 5615076 - DNA, 25 bp, Homo sapien
atttgggatttagagaatggctttc

SEQ ID NO: 5615077 - DNA, 25 bp, Homo sapien
aaggctctgagtattgatatttggg

SEQ ID NO: 5615078 - DNA, 25 bp, Homo sapien
tcaaagactcaattgaggaagcagt

SEQ ID NO: 5615079 - DNA, 25 bp, Homo sapien
agcagagctatgtaaagtgagagtt

SEQ ID NO: 5615080 - DNA, 25 bp, Homo sapien
atgtagaattaggaatagtagttta

SEQ ID NO: 5615081 - DNA, 25 bp, Homo sapien
accagaatggttagtgatgagattt

SEQ ID NO: 5615082 - DNA, 25 bp, Homo sapien
agggggccttgtgtaacttgccatc

SEQ ID NO: 5615083 - DNA, 25 bp, Homo sapien
gatgagattttatgtaagtaggact

SEQ ID NO: 5615084 - DNA, 25 bp, Homo sapien
tatgtaagtaggactgggtttttca

SEQ ID NO: 5615085 - DNA, 25 bp, Homo sapien
aagttaagctgtgtcattaagaacc

SEQ ID NO: 5615086 - DNA, 25 bp, Homo sapien
ttggcatagaagcctaagaactgct

SEQ ID NO: 5615087 - DNA, 25 bp, Homo sapien
aagaactgcttatgttgccagtctt

SEQ ID NO: 5615088 - DNA, 25 bp, Homo sapien
gattgagaacttccttagtacaccc

SEQ ID NO: 5615089 - DNA, 25 bp, Homo sapien
tagcactgcacatgtattactgcct

SEQ ID NO: 5615090 - DNA, 25 bp, Homo sapien
attgaagttacattacagaagatag

SEQ ID NO: 5615091 - DNA, 25 bp, Homo sapien
cctagtgtccattggcatagaagcc

SEQ ID NO: 5615092 - DNA, 25 bp, Homo sapien
aacaaatacaggtaaaatctcattt

SEQ ID NO: 5615093 - DNA, 25 bp, Homo sapien
tacattacagaagatagtgaagggg

SEQ ID NO: 5615094 - DNA, 25 bp, Homo sapien
tcattaagaaccaacagcgtggccg

SEQ ID NO: 5615095 - DNA, 25 bp, Homo sapien
gccagtcttagacaaggataagcat

SEQ ID NO: 5615096 - DNA, 25 bp, Homo sapien
atctgtattacagcgtgaaataact

SEQ ID NO: 5615097 - DNA, 25 bp, Homo sapien
tccagcgtcagtactacatggtttt

SEQ ID NO: 5615098 - DNA, 25 bp, Homo sapien
agtttctcttggagaggatagcacc

SEQ ID NO: 5615099 - DNA, 25 bp, Homo sapien
ataccgaatctatcagtgctcttat

SEQ ID NO: 5615100 - DNA, 25 bp, Homo sapien
tcaatagatggaacagcagatgatg

SEQ ID NO: 5615101 - DNA, 25 bp, Homo sapien
caaccccaaacagcctacaaatcct

SEQ ID NO: 5615102 - DNA, 25 bp, Homo sapien
aagtgaacaaatcaatagatggaac

SEQ ID NO: 5615103 - DNA, 25 bp, Homo sapien
tgaaataactaagaagttgggcaac

SEQ ID NO: 5615104 - DNA, 25 bp, Homo sapien
cacctgtgcacatagataccgaatc

SEQ ID NO: 5615105 - DNA, 25 bp, Homo sapien
tacagcgtgaaataactaagaagtt

SEQ ID NO: 5615106 - DNA, 25 bp, Homo sapien
ggagaggatagcacctgtgcacata

SEQ ID NO: 5615107 - DNA, 25 bp, Homo sapien
ctcaaggtccaactcaagtagaacc

SEQ ID NO: 5615108 - DNA, 25 bp, Homo sapien
aataactaaatgtcggctgggctca

SEQ ID NO: 5615109 - DNA, 25 bp, Homo sapien
tcatggctcatggttacagtgctgg

SEQ ID NO: 5615110 - DNA, 25 bp, Homo sapien
tgatcctgacgcactacaataaaac

SEQ ID NO: 5615111 - DNA, 25 bp, Homo sapien
atcaagtgctcacagccacacatac

SEQ ID NO: 5615112 - DNA, 25 bp, Homo sapien
ctgaatgcaaactgtgggcaatgag

SEQ ID NO: 5615113 - DNA, 25 bp, Homo sapien
tcaagacagaaacactcaaggaatt

SEQ ID NO: 5615114 - DNA, 25 bp, Homo sapien
cagctcgaaagcatgacaggctttt

SEQ ID NO: 5615115 - DNA, 25 bp, Homo sapien
ctcttgagaaaggcctatcccagca

SEQ ID NO: 5615116 - DNA, 25 bp, Homo sapien
gctaaccacaagccttcagccacac

SEQ ID NO: 5615117 - DNA, 25 bp, Homo sapien
ccgcacacctcaactctggattagc

SEQ ID NO: 5615118 - DNA, 25 bp, Homo sapien
aaacaagtggtgatggcctctagta

SEQ ID NO: 5615119 - DNA, 25 bp, Homo sapien
aatgtatccacagaagaaaagcaca

SEQ ID NO: 5615120 - DNA, 25 bp, Homo sapien
taagaaaagcggcaaaaacatgcta

SEQ ID NO: 5615121 - DNA, 25 bp, Homo sapien
gaaactgatgatccccaagagaagg

SEQ ID NO: 5615122 - DNA, 25 bp, Homo sapien
atgctaatgggaatgacctggtaga

SEQ ID NO: 5615123 - DNA, 25 bp, Homo sapien
aaactacctggagctgtgcccttga

SEQ ID NO: 5615124 - DNA, 25 bp, Homo sapien
gaaggaaaactacctggagctgtgc

SEQ ID NO: 5615125 - DNA, 25 bp, Homo sapien
ggaggaattagggttgagatattat

SEQ ID NO: 5615126 - DNA, 25 bp, Homo sapien
tcatcagcttagaatgaggatagga

SEQ ID NO: 5615127 - DNA, 25 bp, Homo sapien
ataaatgatggtagtaagttagcgg

SEQ ID NO: 5615128 - DNA, 25 bp, Homo sapien
gaatagtggcctaaataatgtatcc

SEQ ID NO: 5615129 - DNA, 25 bp, Homo sapien
tttgtttaccaggatgacgttttta

SEQ ID NO: 5615130 - DNA, 25 bp, Homo sapien
taaaaacgtcatcctggtaaacaaa

SEQ ID NO: 5615131 - DNA, 25 bp, Homo sapien
cacttgatagacgttcaggagggaa

SEQ ID NO: 5615132 - DNA, 25 bp, Homo sapien
atgagggggttaagtgtatttaatg

SEQ ID NO: 5615133 - DNA, 25 bp, Homo sapien
aggttgaatgatatagaattgtcac

SEQ ID NO: 5615134 - DNA, 25 bp, Homo sapien
ccttgaaatccagtgtgaacaggtt

SEQ ID NO: 5615135 - DNA, 25 bp, Homo sapien
tgtagtagaacaacttaagatcctt

SEQ ID NO: 5615136 - DNA, 25 bp, Homo sapien
aatgtttctgaagtgtgatagtgat

SEQ ID NO: 5615137 - DNA, 25 bp, Homo sapien
taggatggttaaaagtaaggtcaca

SEQ ID NO: 5615138 - DNA, 25 bp, Homo sapien
gtgaacaggttaaagagctctagga

SEQ ID NO: 5615139 - DNA, 25 bp, Homo sapien
taggtcttcaggtgtggtaccgtca

SEQ ID NO: 5615140 - DNA, 25 bp, Homo sapien
ataatagaaacaaaggttatgttct

SEQ ID NO: 5615141 - DNA, 25 bp, Homo sapien
tgtgatagtgattatgtagtagaac

SEQ ID NO: 5615142 - DNA, 25 bp, Homo sapien
gagtgatcatagctctcatggctca

SEQ ID NO: 5615143 - DNA, 25 bp, Homo sapien
tctgttgcccacaatggaatgcagt

SEQ ID NO: 5615144 - DNA, 25 bp, Homo sapien
tacagaaaaggagtacaagttttga

SEQ ID NO: 5615145 - DNA, 25 bp, Homo sapien
aacaaggatatcaatcaacccaatc

SEQ ID NO: 5615146 - DNA, 25 bp, Homo sapien
gcccacaatggaatgcagttgagtg

SEQ ID NO: 5615147 - DNA, 25 bp, Homo sapien
ctggcctaaataaatcaatggtgaa

SEQ ID NO: 5615148 - DNA, 25 bp, Homo sapien
atctgccagaattccacttatccct

SEQ ID NO: 5615149 - DNA, 25 bp, Homo sapien
accaatcaccagaaacaaggatatc

SEQ ID NO: 5615150 - DNA, 25 bp, Homo sapien
atgcagttgagtgatcatagctctc

SEQ ID NO: 5615151 - DNA, 25 bp, Homo sapien
aacctacaagtaaatctgccagaat

SEQ ID NO: 5615152 - DNA, 25 bp, Homo sapien
cagtaaacactgaggcacttacatt

SEQ ID NO: 5615153 - DNA, 25 bp, Homo sapien
ctaggctgcagtgcagtagtgtgat

SEQ ID NO: 5615154 - DNA, 25 bp, Homo sapien
ttcttggagacgaagactcattcta

SEQ ID NO: 5615155 - DNA, 25 bp, Homo sapien
ctcttgcctcggcctcctgagtagc

SEQ ID NO: 5615156 - DNA, 25 bp, Homo sapien
gctcacggcaacctctgcctccagg

SEQ ID NO: 5615157 - DNA, 25 bp, Homo sapien
cctctcttcaaatgtggccacagca

SEQ ID NO: 5615158 - DNA, 25 bp, Homo sapien
atagattattaaagggagaattgac

SEQ ID NO: 5615159 - DNA, 25 bp, Homo sapien
ctgcctccaggttccagcaattctc

SEQ ID NO: 5615160 - DNA, 25 bp, Homo sapien
ccacttacaaagggcaaataaattc

SEQ ID NO: 5615161 - DNA, 25 bp, Homo sapien
taatattgattccgcagtacctgac

SEQ ID NO: 5615162 - DNA, 25 bp, Homo sapien
ctgttggaagttttattagaattat

SEQ ID NO: 5615163 - DNA, 25 bp, Homo sapien
tctattgtctaggctgcagtgcagt

SEQ ID NO: 5615164 - DNA, 25 bp, Homo sapien
agtaagtgtttaaaaggcatcagtt

SEQ ID NO: 5615165 - DNA, 25 bp, Homo sapien
tcagcgttcttgagaaataaaatta

SEQ ID NO: 5615166 - DNA, 25 bp, Homo sapien
gagagaaacaaaatcttcagcgttc

SEQ ID NO: 5615167 - DNA, 25 bp, Homo sapien
aaaactgcatataccacacacacac

SEQ ID NO: 5615168 - DNA, 25 bp, Homo sapien
tgttcagtaagtaattttccatccc

SEQ ID NO: 5615169 - DNA, 25 bp, Homo sapien
ttttcggcagattatcagattagta

SEQ ID NO: 5615170 - DNA, 25 bp, Homo sapien
gcagattatcagattagtaagtgtt

SEQ ID NO: 5615171 - DNA, 25 bp, Homo sapien
taaatcttttgaagagagaaacaaa

SEQ ID NO: 5615172 - DNA, 25 bp, Homo sapien
accacacacacacaaaacagtacac

SEQ ID NO: 5615173 - DNA, 25 bp, Homo sapien
acaaattaaacaaactcacatacta

SEQ ID NO: 5615174 - DNA, 25 bp, Homo sapien
cacaaaacagtacacaaataaaggt

SEQ ID NO: 5615175 - DNA, 25 bp, Homo sapien
tgtcccccgagttcccagtctgtca

SEQ ID NO: 5615176 - DNA, 25 bp, Homo sapien
aaacgaactcttgctgaggctcggc

SEQ ID NO: 5615177 - DNA, 25 bp, Homo sapien
cagaacccagcagtacaccaacttt

SEQ ID NO: 5615178 - DNA, 25 bp, Homo sapien
agatgcaggtgaagaacctgttgtc

SEQ ID NO: 5615179 - DNA, 25 bp, Homo sapien
ctttgcacacccttgggcgctgacc

SEQ ID NO: 5615180 - DNA, 25 bp, Homo sapien
tttagcttacactgtgctgccctcc

SEQ ID NO: 5615181 - DNA, 25 bp, Homo sapien
gaccttgttctcccagcgcacaggc

SEQ ID NO: 5615182 - DNA, 25 bp, Homo sapien
agtctgtcaaaatccaacctggtct

SEQ ID NO: 5615183 - DNA, 25 bp, Homo sapien
tggggtccctacacagggctttagc

SEQ ID NO: 5615184 - DNA, 25 bp, Homo sapien
aggcacgggtagtttgcccctgtag

SEQ ID NO: 5615185 - DNA, 25 bp, Homo sapien
taactcaggcacaaaacgaactctt

SEQ ID NO: 5615186 - DNA, 25 bp, Homo sapien
gtaaaggctacagataaacatattt

SEQ ID NO: 5615187 - DNA, 25 bp, Homo sapien
tatgtcctcacaaggtaggaatgat

SEQ ID NO: 5615188 - DNA, 25 bp, Homo sapien
cacaaggtaggaatgatacaacaaa

SEQ ID NO: 5615189 - DNA, 25 bp, Homo sapien
aagtcaaagagaagtataatcacat

SEQ ID NO: 5615190 - DNA, 25 bp, Homo sapien
atatgaactgagaattgtattatct

SEQ ID NO: 5615191 - DNA, 25 bp, Homo sapien
actgatacaataatagttgggcacc

SEQ ID NO: 5615192 - DNA, 25 bp, Homo sapien
cagctgaccaagagattaatgggaa

SEQ ID NO: 5615193 - DNA, 25 bp, Homo sapien
agctaagctgacaagtcaaagagaa

SEQ ID NO: 5615194 - DNA, 25 bp, Homo sapien
gagattaatgggaatgttttgagtt

SEQ ID NO: 5615195 - DNA, 25 bp, Homo sapien
actgtggaactaagaaatgtgagga

SEQ ID NO: 5615196 - DNA, 25 bp, Homo sapien
tgtgaggatgacaacagaatgtaaa

SEQ ID NO: 5615197 - DNA, 25 bp, Homo sapien
tctgtgcctggatgcgtttttgtat

SEQ ID NO: 5615198 - DNA, 25 bp, Homo sapien
acttccttgaacataatgaggccaa

SEQ ID NO: 5615199 - DNA, 25 bp, Homo sapien
gaggttcctcagtgctgaactaaca

SEQ ID NO: 5615200 - DNA, 25 bp, Homo sapien
tcagtgctgaactaacaagagggta

SEQ ID NO: 5615201 - DNA, 25 bp, Homo sapien
gaattggaaaagctgatggtttttg

SEQ ID NO: 5615202 - DNA, 25 bp, Homo sapien
aagaagagaaagagtatacacttgt

SEQ ID NO: 5615203 - DNA, 25 bp, Homo sapien
gggccgcacagagctttcattgttg

SEQ ID NO: 5615204 - DNA, 25 bp, Homo sapien
gctgaactaacaagagggtacttcc

SEQ ID NO: 5615205 - DNA, 25 bp, Homo sapien
cgaataccaagagaattggaaaagc

SEQ ID NO: 5615206 - DNA, 25 bp, Homo sapien
cacagagctttcattgttgaggttc

SEQ ID NO: 5615207 - DNA, 25 bp, Homo sapien
ggaaaagctgatggtttttggaatc

SEQ ID NO: 5615208 - DNA, 25 bp, Homo sapien
ctcagcaggttcatggaaaccttcc

SEQ ID NO: 5615209 - DNA, 25 bp, Homo sapien
gaatactccactagagtgaggaagc

SEQ ID NO: 5615210 - DNA, 25 bp, Homo sapien
actccactagagtgaggaagcttag

SEQ ID NO: 5615211 - DNA, 25 bp, Homo sapien
ttttctcagcaggttcatggaaacc

SEQ ID NO: 5615212 - DNA, 25 bp, Homo sapien
gaaatagcaggtgatcaaagtatct

SEQ ID NO: 5615213 - DNA, 25 bp, Homo sapien
tgatgttctggagggctcgaaatag

SEQ ID NO: 5615214 - DNA, 25 bp, Homo sapien
gggctcgaaatagcaggtgatcaaa

SEQ ID NO: 5615215 - DNA, 25 bp, Homo sapien
gataacctttatagaagatgctacc

SEQ ID NO: 5615216 - DNA, 25 bp, Homo sapien
gcaggtgatcaaagtatctgaatac

SEQ ID NO: 5615217 - DNA, 25 bp, Homo sapien
acaatttgatgttctggagggctcg

SEQ ID NO: 5615218 - DNA, 25 bp, Homo sapien
tttagtagaagacaatttgatgttc

SEQ ID NO: 5615219 - DNA, 25 bp, Homo sapien
tgacaggttataagctttgggggca

SEQ ID NO: 5615220 - DNA, 25 bp, Homo sapien
atatgaatggaaagtttaaacaaaa

SEQ ID NO: 5615221 - DNA, 25 bp, Homo sapien
tctagagatcaggcaacacacattt

SEQ ID NO: 5615222 - DNA, 25 bp, Homo sapien
catgcaaaatgtcttaggtaaccac

SEQ ID NO: 5615223 - DNA, 25 bp, Homo sapien
tcaatgctaagggataataggatgg

SEQ ID NO: 5615224 - DNA, 25 bp, Homo sapien
gaccagggcctgccaccattaaaat

SEQ ID NO: 5615225 - DNA, 25 bp, Homo sapien
aaaataatgcacactgacaggttat

SEQ ID NO: 5615226 - DNA, 25 bp, Homo sapien
atctgggcagtctgacagaatgaag

SEQ ID NO: 5615227 - DNA, 25 bp, Homo sapien
agtgggtccataagcccctgaaatc

SEQ ID NO: 5615228 - DNA, 25 bp, Homo sapien
ggatgggacttagtgggtccataag

SEQ ID NO: 5615229 - DNA, 25 bp, Homo sapien
tgggggcattcctcaaaataaagaa

SEQ ID NO: 5615230 - DNA, 25 bp, Homo sapien
ggccatttgccagatcttattcttt

SEQ ID NO: 5615231 - DNA, 25 bp, Homo sapien
taaggcaatgattctctgacgagga

SEQ ID NO: 5615232 - DNA, 25 bp, Homo sapien
aaaagaaaaagtgtactgttgagag

SEQ ID NO: 5615233 - DNA, 25 bp, Homo sapien
gcgagacacgatctcaaaaactaaa

SEQ ID NO: 5615234 - DNA, 25 bp, Homo sapien
ggattaactcttacatctgggttgc

SEQ ID NO: 5615235 - DNA, 25 bp, Homo sapien
ttgcactcatagggtaggtaaagaa

SEQ ID NO: 5615236 - DNA, 25 bp, Homo sapien
atatttctgagaggtttaaggcaat

SEQ ID NO: 5615237 - DNA, 25 bp, Homo sapien
tctgagaggtttaaggcaatgattc

SEQ ID NO: 5615238 - DNA, 25 bp, Homo sapien
aaagtgtactgttgagagttgatcc

SEQ ID NO: 5615239 - DNA, 25 bp, Homo sapien
ttgagagttgatccataaagcagat

SEQ ID NO: 5615240 - DNA, 25 bp, Homo sapien
tctgacgaggattaactcttacatc

SEQ ID NO: 5615241 - DNA, 25 bp, Homo sapien
gagcaaagacccatcgctgctggat

SEQ ID NO: 5615242 - DNA, 25 bp, Homo sapien
ggaagaaatagaatccacagagttc

SEQ ID NO: 5615243 - DNA, 25 bp, Homo sapien
atccacagagttctgtagggagcaa

SEQ ID NO: 5615244 - DNA, 25 bp, Homo sapien
ggcagaggtcaagatgtcttgggaa

SEQ ID NO: 5615245 - DNA, 25 bp, Homo sapien
tacttattcagcatatagcatttta

SEQ ID NO: 5615246 - DNA, 25 bp, Homo sapien
cattgtcattgtgtctacttcaccc

SEQ ID NO: 5615247 - DNA, 25 bp, Homo sapien
cctgtaaccaattaccagaatttac

SEQ ID NO: 5615248 - DNA, 25 bp, Homo sapien
cagaggtcaagatgtcttgggaagg

SEQ ID NO: 5615249 - DNA, 25 bp, Homo sapien
aagacccatcgctgctggatggctg

SEQ ID NO: 5615250 - DNA, 25 bp, Homo sapien
cccatcgctgctggatggctgacag

SEQ ID NO: 5615251 - DNA, 25 bp, Homo sapien
gctagtgtggatagcttctttccaa

SEQ ID NO: 5615252 - DNA, 25 bp, Homo sapien
aaagtaagaagtgctcaaaaatcaa

SEQ ID NO: 5615253 - DNA, 25 bp, Homo sapien
catagtagccaacctggcagaactc

SEQ ID NO: 5615254 - DNA, 25 bp, Homo sapien
tcaaaaatcaaaaggatgggcacat

SEQ ID NO: 5615255 - DNA, 25 bp, Homo sapien
acaagcacatctaatgcccagatct

SEQ ID NO: 5615256 - DNA, 25 bp, Homo sapien
ggcacatcaaagggacatagtagcc

SEQ ID NO: 5615257 - DNA, 25 bp, Homo sapien
ctgtcaatagggaaaatatcaactt

SEQ ID NO: 5615258 - DNA, 25 bp, Homo sapien
tgattctagggattctagggttggg

SEQ ID NO: 5615259 - DNA, 25 bp, Homo sapien
acaaacagtgacatcccagtagcaa

SEQ ID NO: 5615260 - DNA, 25 bp, Homo sapien
gagttgaagacggcagtacaaactc

SEQ ID NO: 5615261 - DNA, 25 bp, Homo sapien
cccagtagcaacaagcacatctaat

SEQ ID NO: 5615262 - DNA, 25 bp, Homo sapien
aactctgctacaaacagtgacatcc

SEQ ID NO: 5615263 - DNA, 25 bp, Homo sapien
agagggattttctttaagcaagctt

SEQ ID NO: 5615264 - DNA, 25 bp, Homo sapien
tgtgtgccaacacgcccagctaatt

SEQ ID NO: 5615265 - DNA, 25 bp, Homo sapien
ttaagcaagctttcacagtagtgga

SEQ ID NO: 5615266 - DNA, 25 bp, Homo sapien
tgcaggagagtgaaaatctcccgca

SEQ ID NO: 5615267 - DNA, 25 bp, Homo sapien
agttaaatgatgtgggctaaaaggt

SEQ ID NO: 5615268 - DNA, 25 bp, Homo sapien
tagcgcaatctaggctccccccgca

SEQ ID NO: 5615269 - DNA, 25 bp, Homo sapien
cagtagtggagttaaatgatgtggg

SEQ ID NO: 5615270 - DNA, 25 bp, Homo sapien
atctaggctccccccgcaggttaaa

SEQ ID NO: 5615271 - DNA, 25 bp, Homo sapien
tggcaggatgggaaattccaacatg

SEQ ID NO: 5615272 - DNA, 25 bp, Homo sapien
agctaatatgagtgtgagaacgatc

SEQ ID NO: 5615273 - DNA, 25 bp, Homo sapien
gagaacgatcatttgcaggagagtg

SEQ ID NO: 5615274 - DNA, 25 bp, Homo sapien
agggctccgaacactgcagtcttta

SEQ ID NO: 5615275 - DNA, 25 bp, Homo sapien
cagagaagatctatggacacaagta

SEQ ID NO: 5615276 - DNA, 25 bp, Homo sapien
agcctgcataatcccagcaccactc

SEQ ID NO: 5615277 - DNA, 25 bp, Homo sapien
cttggattgactcttctacgctggg

SEQ ID NO: 5615278 - DNA, 25 bp, Homo sapien
cacaagtagcttgctgcaggaaagc

SEQ ID NO: 5615279 - DNA, 25 bp, Homo sapien
aaggctaccttaaccctccagagaa

SEQ ID NO: 5615280 - DNA, 25 bp, Homo sapien
ctgagatggcagaattaaagcttgg

SEQ ID NO: 5615281 - DNA, 25 bp, Homo sapien
acaagcctactagaaagccagtctt

SEQ ID NO: 5615282 - DNA, 25 bp, Homo sapien
gttccagaacacaccttctagccat

SEQ ID NO: 5615283 - DNA, 25 bp, Homo sapien
cccatttcaagttgcctcaggtttc

SEQ ID NO: 5615284 - DNA, 25 bp, Homo sapien
ttacgtctcacttagagggtgagca

SEQ ID NO: 5615285 - DNA, 25 bp, Homo sapien
gtacacggcacacttcacacagaac

SEQ ID NO: 5615286 - DNA, 25 bp, Homo sapien
agaggggcttcttctgctgcctggc

SEQ ID NO: 5615287 - DNA, 25 bp, Homo sapien
aggcggacacctggtctgttctgtg

SEQ ID NO: 5615288 - DNA, 25 bp, Homo sapien
gctccacacagagctcagcaaggcc

SEQ ID NO: 5615289 - DNA, 25 bp, Homo sapien
tgcctatccgaccaacgccccacag

SEQ ID NO: 5615290 - DNA, 25 bp, Homo sapien
tgcttccagcctctggagggcgtca

SEQ ID NO: 5615291 - DNA, 25 bp, Homo sapien
tgtgcctgccctgcctatccgacca

SEQ ID NO: 5615292 - DNA, 25 bp, Homo sapien
ggcgtccaggcccacgttaagacgc

SEQ ID NO: 5615293 - DNA, 25 bp, Homo sapien
agaacactgcacacgtggctccctt

SEQ ID NO: 5615294 - DNA, 25 bp, Homo sapien
aaggaggtagctgtgaactccagtg

SEQ ID NO: 5615295 - DNA, 25 bp, Homo sapien
actccagtggaaaaccaaagagcag

SEQ ID NO: 5615296 - DNA, 25 bp, Homo sapien
ctgcagactgacaacgaaatataca

SEQ ID NO: 5615297 - DNA, 25 bp, Homo sapien
aaaatcaaacacattctgcagactg

SEQ ID NO: 5615298 - DNA, 25 bp, Homo sapien
gtccccggccttgagcaagcatcaa

SEQ ID NO: 5615299 - DNA, 25 bp, Homo sapien
atatacaagtagcccgctccagtcc

SEQ ID NO: 5615300 - DNA, 25 bp, Homo sapien
acttcgtgaaaagttcaagtgattc

SEQ ID NO: 5615301 - DNA, 25 bp, Homo sapien
gccttgagcaagcatcaagtggggg

SEQ ID NO: 5615302 - DNA, 25 bp, Homo sapien
tggacaaggtctagggctttatcta

SEQ ID NO: 5615303 - DNA, 25 bp, Homo sapien
tgacaacgaaatatacaagtagccc

SEQ ID NO: 5615304 - DNA, 25 bp, Homo sapien
attctgccgagaatctgccgcaggg

SEQ ID NO: 5615305 - DNA, 25 bp, Homo sapien
atctaccagacgccccttaaaaata

SEQ ID NO: 5615306 - DNA, 25 bp, Homo sapien
gagaaaacatctccttggttccttc

SEQ ID NO: 5615307 - DNA, 25 bp, Homo sapien
tcaccattaactgacaggaagcaca

SEQ ID NO: 5615308 - DNA, 25 bp, Homo sapien
ggtatgaataggtccaaacacagtc

SEQ ID NO: 5615309 - DNA, 25 bp, Homo sapien
atttgtagatacgagtagaggtaag

SEQ ID NO: 5615310 - DNA, 25 bp, Homo sapien
ggaagctgcttagtaggcacagaaa

SEQ ID NO: 5615311 - DNA, 25 bp, Homo sapien
ttatgaagaaactagcacccaagtg

SEQ ID NO: 5615312 - DNA, 25 bp, Homo sapien
cataaagaaggaagctgcttagtag

SEQ ID NO: 5615313 - DNA, 25 bp, Homo sapien
gcacagaaaaaaactggaggcaaag

SEQ ID NO: 5615314 - DNA, 25 bp, Homo sapien
accaggtctggcttctcaagacttt

SEQ ID NO: 5615315 - DNA, 25 bp, Homo sapien
tattcattactagggagttgcttac

SEQ ID NO: 5615316 - DNA, 25 bp, Homo sapien
tggaggcaaagtctggcctgttgat

SEQ ID NO: 5615317 - DNA, 25 bp, Homo sapien
gactaataggagatctggttaacat

SEQ ID NO: 5615318 - DNA, 25 bp, Homo sapien
atctgtcggctttcaatttggttct

SEQ ID NO: 5615319 - DNA, 25 bp, Homo sapien
aaaaagctttaaaactgtgtgttca

SEQ ID NO: 5615320 - DNA, 25 bp, Homo sapien
accacaacacttatattaaaacatg

SEQ ID NO: 5615321 - DNA, 25 bp, Homo sapien
ttaatctatgtaaaacatgccatat

SEQ ID NO: 5615322 - DNA, 25 bp, Homo sapien
tgctactaaatataaaaagctttaa

SEQ ID NO: 5615323 - DNA, 25 bp, Homo sapien
atgtaaaacatgccatatatattca

SEQ ID NO: 5615324 - DNA, 25 bp, Homo sapien
ataaaaaatggattctaatcttata

SEQ ID NO: 5615325 - DNA, 25 bp, Homo sapien
tgcagtatctgtcggctttcaattt

SEQ ID NO: 5615326 - DNA, 25 bp, Homo sapien
ggttattgtattaccacaacactta

SEQ ID NO: 5615327 - DNA, 25 bp, Homo sapien
agaaaaatagtaaaattaatctatg

SEQ ID NO: 5615328 - DNA, 25 bp, Homo sapien
tattcaataaatgttgcctaagggc

SEQ ID NO: 5615329 - DNA, 25 bp, Homo sapien
ttctgtggcaaccataacaaatgac

SEQ ID NO: 5615330 - DNA, 25 bp, Homo sapien
tggcatattcatggcagctggtact

SEQ ID NO: 5615331 - DNA, 25 bp, Homo sapien
aggtgatgaagggccagttccttct

SEQ ID NO: 5615332 - DNA, 25 bp, Homo sapien
ataacaaatgaccaccagctggatg

SEQ ID NO: 5615333 - DNA, 25 bp, Homo sapien
ccccggcttgtaaaggcatttctcc

SEQ ID NO: 5615334 - DNA, 25 bp, Homo sapien
tttgtgcctccctccgtgccctttc

SEQ ID NO: 5615335 - DNA, 25 bp, Homo sapien
tcccagggttgccagcatccttggc

SEQ ID NO: 5615336 - DNA, 25 bp, Homo sapien
gttatttatcactagccagcagctc

SEQ ID NO: 5615337 - DNA, 25 bp, Homo sapien
tcccactcccagggttgccagcatc

SEQ ID NO: 5615338 - DNA, 25 bp, Homo sapien
acttggccttctgtttgtgcctccc

SEQ ID NO: 5615339 - DNA, 25 bp, Homo sapien
gcatccttggcattccccggcttgt

SEQ ID NO: 5615340 - DNA, 25 bp, Homo sapien
aaccgggagatttaggagcttatat

SEQ ID NO: 5615341 - DNA, 25 bp, Homo sapien
tgaaacatactaacaacaggcaaat

SEQ ID NO: 5615342 - DNA, 25 bp, Homo sapien
tcaaattcctagactcaagcgtttc

SEQ ID NO: 5615343 - DNA, 25 bp, Homo sapien
tcaggcagagtaaatgattttggga

SEQ ID NO: 5615344 - DNA, 25 bp, Homo sapien
accctctacataggcgagaaggaag

SEQ ID NO: 5615345 - DNA, 25 bp, Homo sapien
agccagggatgtagccaatttcagg

SEQ ID NO: 5615346 - DNA, 25 bp, Homo sapien
aattgattacatgtgtggtggcatc

SEQ ID NO: 5615347 - DNA, 25 bp, Homo sapien
taagagaaaaggtatataaattgat

SEQ ID NO: 5615348 - DNA, 25 bp, Homo sapien
agatttgtgtataaaagaaaacagt

SEQ ID NO: 5615349 - DNA, 25 bp, Homo sapien
attggggatctcaggtcattatgat

SEQ ID NO: 5615350 - DNA, 25 bp, Homo sapien
ggcatcacaggaagaaaagtacctg

SEQ ID NO: 5615351 - DNA, 25 bp, Homo sapien
attttgtactgtgtaatgcaacttt

SEQ ID NO: 5615352 - DNA, 25 bp, Homo sapien
gccgtaatactaggtgtagacacgc

SEQ ID NO: 5615353 - DNA, 25 bp, Homo sapien
taaacacagctgccggccacattca

SEQ ID NO: 5615354 - DNA, 25 bp, Homo sapien
gatggaagaattcaaccctcttaaa

SEQ ID NO: 5615355 - DNA, 25 bp, Homo sapien
aaggtagctgcaagtgacatatcat

SEQ ID NO: 5615356 - DNA, 25 bp, Homo sapien
tttcgttcacctgatggaagaattc

SEQ ID NO: 5615357 - DNA, 25 bp, Homo sapien
cattcaagtgaaacttccatctgga

SEQ ID NO: 5615358 - DNA, 25 bp, Homo sapien
aggtggctgattgaatttaaaagaa

SEQ ID NO: 5615359 - DNA, 25 bp, Homo sapien
aaaaaaggtagctgcaagtgacata

SEQ ID NO: 5615360 - DNA, 25 bp, Homo sapien
ctggagagtcccagccgtaatacta

SEQ ID NO: 5615361 - DNA, 25 bp, Homo sapien
gcacatgaaggtggctgattgaatt

SEQ ID NO: 5615362 - DNA, 25 bp, Homo sapien
tctctaccaccagaataaaagctcc

SEQ ID NO: 5615363 - DNA, 25 bp, Homo sapien
atggtccttaccagcggaaattaca

SEQ ID NO: 5615364 - DNA, 25 bp, Homo sapien
acagccatccacctaaatcagaaac

SEQ ID NO: 5615365 - DNA, 25 bp, Homo sapien
atcttcagctctctagaccaagcct

SEQ ID NO: 5615366 - DNA, 25 bp, Homo sapien
ttccatttcgtatcagtctagccca

SEQ ID NO: 5615367 - DNA, 25 bp, Homo sapien
aacagccccacaggaagcaattaat

SEQ ID NO: 5615368 - DNA, 25 bp, Homo sapien
aaagctccatagcagcactgacttc

SEQ ID NO: 5615369 - DNA, 25 bp, Homo sapien
tgctgacaggccgccctcaacttct

SEQ ID NO: 5615370 - DNA, 25 bp, Homo sapien
tctaacacctagaacagccccacag

SEQ ID NO: 5615371 - DNA, 25 bp, Homo sapien
gtctagcccatatcctcagtcactc

SEQ ID NO: 5615372 - DNA, 25 bp, Homo sapien
ttacaaaggacaggatgttaaattc

SEQ ID NO: 5615373 - DNA, 25 bp, Homo sapien
aatacaggcatgataaagaggtgca

SEQ ID NO: 5615374 - DNA, 25 bp, Homo sapien
ctttacaagtaggaaagatgcatac

SEQ ID NO: 5615375 - DNA, 25 bp, Homo sapien
tagtgaagtgactgctagaccttag

SEQ ID NO: 5615376 - DNA, 25 bp, Homo sapien
aataaagacactaagcagaaataat

SEQ ID NO: 5615377 - DNA, 25 bp, Homo sapien
agaggtgcagccaaatttgcatcta

SEQ ID NO: 5615378 - DNA, 25 bp, Homo sapien
actaggctcttgacaatcacgtatc

SEQ ID NO: 5615379 - DNA, 25 bp, Homo sapien
tagaccttagatagcacactaggct

SEQ ID NO: 5615380 - DNA, 25 bp, Homo sapien
caattagaacttgtctctgcccact

SEQ ID NO: 5615381 - DNA, 25 bp, Homo sapien
acactaaagtgcagacctataggcc

SEQ ID NO: 5615382 - DNA, 25 bp, Homo sapien
tctgcccactagtgaagtgactgct

SEQ ID NO: 5615383 - DNA, 25 bp, Homo sapien
acctataggccaatacaggcatgat

SEQ ID NO: 5615384 - DNA, 25 bp, Homo sapien
gcccgagtgccttcgcaccgtgtcg

SEQ ID NO: 5615385 - DNA, 25 bp, Homo sapien
cctacccgtgcttcagaggcgatca

SEQ ID NO: 5615386 - DNA, 25 bp, Homo sapien
aggagctgcccgaaagtttcatttg

SEQ ID NO: 5615387 - DNA, 25 bp, Homo sapien
cggctggcactcttcgcgccctgtt

SEQ ID NO: 5615388 - DNA, 25 bp, Homo sapien
cacctctgtgggttttgtggtcctg

SEQ ID NO: 5615389 - DNA, 25 bp, Homo sapien
gggggatcctgctcatctcagcttg

SEQ ID NO: 5615390 - DNA, 25 bp, Homo sapien
cacccaccctgcctacccgtgcttc

SEQ ID NO: 5615391 - DNA, 25 bp, Homo sapien
tccttgaaggacaagaacaagaagc

SEQ ID NO: 5615392 - DNA, 25 bp, Homo sapien
ggcgatcacctcagctgttggactc

SEQ ID NO: 5615393 - DNA, 25 bp, Homo sapien
ggtagtagagaagtccctcaagtcc

SEQ ID NO: 5615394 - DNA, 25 bp, Homo sapien
gtgatgactcggtagtagagaagtc

SEQ ID NO: 5615395 - DNA, 25 bp, Homo sapien
gattagttttatcatcgagccaact

SEQ ID NO: 5615396 - DNA, 25 bp, Homo sapien
agttggctcgatgataaaactaatc

SEQ ID NO: 5615397 - DNA, 25 bp, Homo sapien
acaccggtttacagcaaatgaggac

SEQ ID NO: 5615398 - DNA, 25 bp, Homo sapien
actatcaggagaggtaaaccaattt

SEQ ID NO: 5615399 - DNA, 25 bp, Homo sapien
taatgaagattaatctggtccagtt

SEQ ID NO: 5615400 - DNA, 25 bp, Homo sapien
caaagattacattaagaacataccc

SEQ ID NO: 5615401 - DNA, 25 bp, Homo sapien
aggaggatggaggatactttactcc

SEQ ID NO: 5615402 - DNA, 25 bp, Homo sapien
taaaagattactagttcagtcagtt

SEQ ID NO: 5615403 - DNA, 25 bp, Homo sapien
aaactatcagctgaacaaagattac

SEQ ID NO: 5615404 - DNA, 25 bp, Homo sapien
actacatgtcataggaaaaacaagt

SEQ ID NO: 5615405 - DNA, 25 bp, Homo sapien
aggaaaaacaagtaatgatataaac

SEQ ID NO: 5615406 - DNA, 25 bp, Homo sapien
tgtagatgcacaagtaagaatttac

SEQ ID NO: 5615407 - DNA, 25 bp, Homo sapien
gatttacttggagtataaaggacaa

SEQ ID NO: 5615408 - DNA, 25 bp, Homo sapien
taatggctagttataaggtgccttc

SEQ ID NO: 5615409 - DNA, 25 bp, Homo sapien
ccttgcagagtgggttaaaaccatt

SEQ ID NO: 5615410 - DNA, 25 bp, Homo sapien
agtttgtaagtaagtgagaatactg

SEQ ID NO: 5615411 - DNA, 25 bp, Homo sapien
aaaatgcaagagctataggtgccaa

SEQ ID NO: 5615412 - DNA, 25 bp, Homo sapien
tctgagtacatattgggggattctg

SEQ ID NO: 5615413 - DNA, 25 bp, Homo sapien
tttggtttctaagggaacatcacac

SEQ ID NO: 5615414 - DNA, 25 bp, Homo sapien
gtgatgctttggtgctaatggctag

SEQ ID NO: 5615415 - DNA, 25 bp, Homo sapien
aatcctgataccaacgtgatgcttt

SEQ ID NO: 5615416 - DNA, 25 bp, Homo sapien
tgattaaggtccacaaagaagatac

SEQ ID NO: 5615417 - DNA, 25 bp, Homo sapien
aaagaagatacagggtagtacattc

SEQ ID NO: 5615418 - DNA, 25 bp, Homo sapien
aatgcatgctgttggtaatagtttg

SEQ ID NO: 5615419 - DNA, 25 bp, Homo sapien
aacaccatatggacctagtaacact

SEQ ID NO: 5615420 - DNA, 25 bp, Homo sapien
atggacctagtaacacttcagattt

SEQ ID NO: 5615421 - DNA, 25 bp, Homo sapien
taaaatggattggagtacttaccac

SEQ ID NO: 5615422 - DNA, 25 bp, Homo sapien
ctgcaccaagaacaccatatggacc

SEQ ID NO: 5615423 - DNA, 25 bp, Homo sapien
atacagactgcaccaagaacaccat

SEQ ID NO: 5615424 - DNA, 25 bp, Homo sapien
agattttctactgcttgagtcactt

SEQ ID NO: 5615425 - DNA, 25 bp, Homo sapien
acagaggatttgtaaaatggattgg

SEQ ID NO: 5615426 - DNA, 25 bp, Homo sapien
cactaaccaaactactgacaacagt

SEQ ID NO: 5615427 - DNA, 25 bp, Homo sapien
cttcagatttttagaccttacaacc

SEQ ID NO: 5615428 - DNA, 25 bp, Homo sapien
tttgtaaaatggattggagtactta

SEQ ID NO: 5615429 - DNA, 25 bp, Homo sapien
ccttaaaattatacagactgcacca

SEQ ID NO: 5615430 - DNA, 25 bp, Homo sapien
ttagaactgtgcagggacaatattc

SEQ ID NO: 5615431 - DNA, 25 bp, Homo sapien
aactataggcaactttgttgggatt

SEQ ID NO: 5615432 - DNA, 25 bp, Homo sapien
caaactgatggaactgtcaacttgc

SEQ ID NO: 5615433 - DNA, 25 bp, Homo sapien
aagaaaggctacaaggtaattagta

SEQ ID NO: 5615434 - DNA, 25 bp, Homo sapien
agggacaatattcgtaacagaacta

SEQ ID NO: 5615435 - DNA, 25 bp, Homo sapien
acaaggtaattagtaaggctgataa

SEQ ID NO: 5615436 - DNA, 25 bp, Homo sapien
ccatcggaaaatgtgcattatgtgc

SEQ ID NO: 5615437 - DNA, 25 bp, Homo sapien
ataaaaggacaatttagaactgtgc

SEQ ID NO: 5615438 - DNA, 25 bp, Homo sapien
ttgtgaagaaactagaatatcactt

SEQ ID NO: 5615439 - DNA, 25 bp, Homo sapien
gtttaaaatgacgatggttgaactc

SEQ ID NO: 5615440 - DNA, 25 bp, Homo sapien
ttatgtgcatattaagaaaggctac

SEQ ID NO: 5615441 - DNA, 25 bp, Homo sapien
ttgataaccaaaaggacttgcattt

SEQ ID NO: 5615442 - DNA, 25 bp, Homo sapien
gtaacattggttattgattggacat

SEQ ID NO: 5615443 - DNA, 25 bp, Homo sapien
ttactctgattaggtttgtgggccc

SEQ ID NO: 5615444 - DNA, 25 bp, Homo sapien
gatacaaaatgtagagctgcagatt

SEQ ID NO: 5615445 - DNA, 25 bp, Homo sapien
tgtgggccccatggtctctgaatca

SEQ ID NO: 5615446 - DNA, 25 bp, Homo sapien
gaatacatatttcaaaggaggagaa

SEQ ID NO: 5615447 - DNA, 25 bp, Homo sapien
tagggtatgagatacagtgtccaat

SEQ ID NO: 5615448 - DNA, 25 bp, Homo sapien
tgtgtactcaatgaaaacgttactc

SEQ ID NO: 5615449 - DNA, 25 bp, Homo sapien
aggggaaagtgaagattctcatgtc

SEQ ID NO: 5615450 - DNA, 25 bp, Homo sapien
tggagtagcagcaggtgttacctgc

SEQ ID NO: 5615451 - DNA, 25 bp, Homo sapien
atggtttagggtatgagatacagtg

SEQ ID NO: 5615452 - DNA, 25 bp, Homo sapien
aaagtagatgtaataagttttaaca

SEQ ID NO: 5615453 - DNA, 25 bp, Homo sapien
tctaagtacttctgacctaaagaca

SEQ ID NO: 5615454 - DNA, 25 bp, Homo sapien
acttctgacctaaagacaagactgt

SEQ ID NO: 5615455 - DNA, 25 bp, Homo sapien
tatagaccatactcaggctgggtgc

SEQ ID NO: 5615456 - DNA, 25 bp, Homo sapien
tgggtaacatagcaaaatcccgtct

SEQ ID NO: 5615457 - DNA, 25 bp, Homo sapien
accaacagaaatatagaccatactc

SEQ ID NO: 5615458 - DNA, 25 bp, Homo sapien
tgcctattatcaaagttaaagtaga

SEQ ID NO: 5615459 - DNA, 25 bp, Homo sapien
gtgcctgcagttttagctacgagaa

SEQ ID NO: 5615460 - DNA, 25 bp, Homo sapien
tagaccatactcaggctgggtgcag

SEQ ID NO: 5615461 - DNA, 25 bp, Homo sapien
caaagttaaagtagatgtaataagt

SEQ ID NO: 5615462 - DNA, 25 bp, Homo sapien
cagttttagctacgagaaaggctgg

SEQ ID NO: 5615463 - DNA, 25 bp, Homo sapien
caaaaattacgccaacaaatctttc

SEQ ID NO: 5615464 - DNA, 25 bp, Homo sapien
aattaacttggtgcagaaactatgt

SEQ ID NO: 5615465 - DNA, 25 bp, Homo sapien
ttcagcactgaaagactcctgtctc

SEQ ID NO: 5615466 - DNA, 25 bp, Homo sapien
aataactgttaggctataaagtatt

SEQ ID NO: 5615467 - DNA, 25 bp, Homo sapien
tgaaaggacagggataattaacttg

SEQ ID NO: 5615468 - DNA, 25 bp, Homo sapien
cgtttccgcatgacagcatttgaga

SEQ ID NO: 5615469 - DNA, 25 bp, Homo sapien
agggaaacagctaagttaagaagaa

SEQ ID NO: 5615470 - DNA, 25 bp, Homo sapien
cctgtctcggagttaaaatcttttc

SEQ ID NO: 5615471 - DNA, 25 bp, Homo sapien
ataagatggctaacacagaagtcac

SEQ ID NO: 5615472 - DNA, 25 bp, Homo sapien
aatctgggtcagtcattcttcatct

SEQ ID NO: 5615473 - DNA, 25 bp, Homo sapien
tatacatctaaaatctgggtcagtc

SEQ ID NO: 5615474 - DNA, 25 bp, Homo sapien
caccgagactctacgaaccccacgg

SEQ ID NO: 5615475 - DNA, 25 bp, Homo sapien
ccgtggggttcgtagagtctcggtg

SEQ ID NO: 5615476 - DNA, 25 bp, Homo sapien
cagtttgctcggaatggtaaatgtc

SEQ ID NO: 5615477 - DNA, 25 bp, Homo sapien
taaagatgaggatagtaaaataaat

SEQ ID NO: 5615478 - DNA, 25 bp, Homo sapien
ttggggcagtaacctcagtttgctc

SEQ ID NO: 5615479 - DNA, 25 bp, Homo sapien
acgggaatctaatctgtagggaagg

SEQ ID NO: 5615480 - DNA, 25 bp, Homo sapien
tgtgaaagggactcgatgtgttcac

SEQ ID NO: 5615481 - DNA, 25 bp, Homo sapien
acctgggtgaggttaccagaatttc

SEQ ID NO: 5615482 - DNA, 25 bp, Homo sapien
actggctggatctaatcaagagggg

SEQ ID NO: 5615483 - DNA, 25 bp, Homo sapien
attaaataaggcatcacgggaatct

SEQ ID NO: 5615484 - DNA, 25 bp, Homo sapien
agtttcacgaaacaagagccttact

SEQ ID NO: 5615485 - DNA, 25 bp, Homo sapien
gagacccttgtggaaacagcatcta

SEQ ID NO: 5615486 - DNA, 25 bp, Homo sapien
tgcaaaggtaagcccagtccgtttg

SEQ ID NO: 5615487 - DNA, 25 bp, Homo sapien
ctgaagaagtcatcccaggaactgt

SEQ ID NO: 5615488 - DNA, 25 bp, Homo sapien
ggcctgatctgttatggcgagctgc

SEQ ID NO: 5615489 - DNA, 25 bp, Homo sapien
gtggtggatcatcgtctggaaatgt

SEQ ID NO: 5615490 - DNA, 25 bp, Homo sapien
gaacaccttcttcgaggggctgtac

SEQ ID NO: 5615491 - DNA, 25 bp, Homo sapien
tcatcgtctggaaatgtgtctgggg

SEQ ID NO: 5615492 - DNA, 25 bp, Homo sapien
cattgcgctgaagtacaagaagaaa

SEQ ID NO: 5615493 - DNA, 25 bp, Homo sapien
ttgatcatgtgttctctcgaggcct

SEQ ID NO: 5615494 - DNA, 25 bp, Homo sapien
gcacaagatcaccaagtacatcgac

SEQ ID NO: 5615495 - DNA, 25 bp, Homo sapien
tgaagcgattcagaacaacattgcg

SEQ ID NO: 5615496 - DNA, 25 bp, Homo sapien
tgggaaagactttgaagcgattcag

SEQ ID NO: 5615497 - DNA, 25 bp, Homo sapien
ctactaccgcacctggcacaagatc

SEQ ID NO: 5615498 - DNA, 25 bp, Homo sapien
ctccgcccggctccggcggcgtctg

SEQ ID NO: 5615499 - DNA, 25 bp, Homo sapien
cagacgccgccggagccgggcggag

SEQ ID NO: 5615500 - DNA, 25 bp, Homo sapien
tctccgcccggctccggcggcgtct

SEQ ID NO: 5615501 - DNA, 25 bp, Homo sapien
agacgccgccggagccgggcggaga

SEQ ID NO: 5615502 - DNA, 25 bp, Homo sapien
ggtctccgcccggctccggcggcgt

SEQ ID NO: 5615503 - DNA, 25 bp, Homo sapien
acgccgccggagccgggcggagacc

SEQ ID NO: 5615504 - DNA, 25 bp, Homo sapien
actatgttgggggaattaactgctt

SEQ ID NO: 5615505 - DNA, 25 bp, Homo sapien
tgctttggctggaaagtttgctcca

SEQ ID NO: 5615506 - DNA, 25 bp, Homo sapien
cattattaagagggcaactactgcg

SEQ ID NO: 5615507 - DNA, 25 bp, Homo sapien
ttagctcaacactgcactcgccaat

SEQ ID NO: 5615508 - DNA, 25 bp, Homo sapien
cactcgccaatgatggccagagaga

SEQ ID NO: 5615509 - DNA, 25 bp, Homo sapien
gcacagcagagtaaagttcatttca

SEQ ID NO: 5615510 - DNA, 25 bp, Homo sapien
caagtaaattatagttcacctcctc

SEQ ID NO: 5615511 - DNA, 25 bp, Homo sapien
aggggcaagcacaagtcattattaa

SEQ ID NO: 5615512 - DNA, 25 bp, Homo sapien
taaaaaatatcacagagtaatcaga

SEQ ID NO: 5615513 - DNA, 25 bp, Homo sapien
tcctctgggtcacttttagctcaac

SEQ ID NO: 5615514 - DNA, 25 bp, Homo sapien
gagagagagattataattacttgtc

SEQ ID NO: 5615515 - DNA, 25 bp, Homo sapien
gcatttttcagaacagacaaggaat

SEQ ID NO: 5615516 - DNA, 25 bp, Homo sapien
agagatcctctcaccccggcctccc

SEQ ID NO: 5615517 - DNA, 25 bp, Homo sapien
aaagcgctggaactacatcacgcct

SEQ ID NO: 5615518 - DNA, 25 bp, Homo sapien
gactggtctcaaactcccgcgccca

SEQ ID NO: 5615519 - DNA, 25 bp, Homo sapien
aaattcatagtctcagggaaaggaa

SEQ ID NO: 5615520 - DNA, 25 bp, Homo sapien
tcagaacagacaaggaattgccttc

SEQ ID NO: 5615521 - DNA, 25 bp, Homo sapien
ggtctcaaactcccgcgcccaagag

SEQ ID NO: 5615522 - DNA, 25 bp, Homo sapien
cccaaagcgctggaactacatcacg

SEQ ID NO: 5615523 - DNA, 25 bp, Homo sapien
gcgcccaagagatcctctcaccccg

SEQ ID NO: 5615524 - DNA, 25 bp, Homo sapien
tacatcacgcctagttcttcatctc

SEQ ID NO: 5615525 - DNA, 25 bp, Homo sapien
taaacatggtcaaattcatagtctc

SEQ ID NO: 5615526 - DNA, 25 bp, Homo sapien
cagtaaaagtttagcaagcaaattc

SEQ ID NO: 5615527 - DNA, 25 bp, Homo sapien
gtgcaaccatagcctttgcagtaga

SEQ ID NO: 5615528 - DNA, 25 bp, Homo sapien
gtaacagtggctaaatggcaagata

SEQ ID NO: 5615529 - DNA, 25 bp, Homo sapien
agtaaacattagaatgaatacagtt

SEQ ID NO: 5615530 - DNA, 25 bp, Homo sapien
tcaaagaagtctgttgtgcaaccat

SEQ ID NO: 5615531 - DNA, 25 bp, Homo sapien
aggctaaaaaactctaagtgaccca

SEQ ID NO: 5615532 - DNA, 25 bp, Homo sapien
atcccagtattatccagtaaaagtt

SEQ ID NO: 5615533 - DNA, 25 bp, Homo sapien
tacagcctattatgagggatcaatt

SEQ ID NO: 5615534 - DNA, 25 bp, Homo sapien
gtagaatctgctatacagcctatta

SEQ ID NO: 5615535 - DNA, 25 bp, Homo sapien
aatggcaagataggctaaaaaactc

SEQ ID NO: 5615536 - DNA, 25 bp, Homo sapien
attaaagaagtaagtaaacattaga

SEQ ID NO: 5615537 - DNA, 25 bp, Homo sapien
tggggccacactctggtgttaccta

SEQ ID NO: 5615538 - DNA, 25 bp, Homo sapien
ggacactctggtgacagtgaaaggt

SEQ ID NO: 5615539 - DNA, 25 bp, Homo sapien
gagagagtaactaaggcagtaaact

SEQ ID NO: 5615540 - DNA, 25 bp, Homo sapien
aactatgataaagtaagggaggtta

SEQ ID NO: 5615541 - DNA, 25 bp, Homo sapien
cctctgctctacataggggaactcc

SEQ ID NO: 5615542 - DNA, 25 bp, Homo sapien
ggagctatctccatgtggggatccc

SEQ ID NO: 5615543 - DNA, 25 bp, Homo sapien
gacaaggagaaaaatccagccatgt

SEQ ID NO: 5615544 - DNA, 25 bp, Homo sapien
gaaaggtttccgtgtggaagcctga

SEQ ID NO: 5615545 - DNA, 25 bp, Homo sapien
agccatgtttcatgggaggaggact

SEQ ID NO: 5615546 - DNA, 25 bp, Homo sapien
gcatgcatgagctggagctatctcc

SEQ ID NO: 5615547 - DNA, 25 bp, Homo sapien
ctctccttggaggaatgagagagta

SEQ ID NO: 5615548 - DNA, 25 bp, Homo sapien
catcagaaactaagaatagaggata

SEQ ID NO: 5615549 - DNA, 25 bp, Homo sapien
aagaagtggataaaatattgcttag

SEQ ID NO: 5615550 - DNA, 25 bp, Homo sapien
acatagctcatgaccccaacaggca

SEQ ID NO: 5615551 - DNA, 25 bp, Homo sapien
aagcaggagaacaaagtaccatgtt

SEQ ID NO: 5615552 - DNA, 25 bp, Homo sapien
aaaacacaaggtaaggattccacta

SEQ ID NO: 5615553 - DNA, 25 bp, Homo sapien
ccatataagtggtaaaggcaaagtt

SEQ ID NO: 5615554 - DNA, 25 bp, Homo sapien
taccccaggaaaataaatagctata

SEQ ID NO: 5615555 - DNA, 25 bp, Homo sapien
aaacatggctcaacttcccaccagc

SEQ ID NO: 5615556 - DNA, 25 bp, Homo sapien
agatttcgtctaggaagcaggagaa

SEQ ID NO: 5615557 - DNA, 25 bp, Homo sapien
gaccccaacaggcaatatgtatttc

SEQ ID NO: 5615558 - DNA, 25 bp, Homo sapien
acaaagcatcagaaactaagaatag

SEQ ID NO: 5615559 - DNA, 25 bp, Homo sapien
taaacacaccttgaggctgaggaac

SEQ ID NO: 5615560 - DNA, 25 bp, Homo sapien
tacatataaagaatgcggcacagac

SEQ ID NO: 5615561 - DNA, 25 bp, Homo sapien
ctacatgagtagtgagtacatgaat

SEQ ID NO: 5615562 - DNA, 25 bp, Homo sapien
agaatcagagtttggggccaataat

SEQ ID NO: 5615563 - DNA, 25 bp, Homo sapien
tggggccaataattccaggtcaatt

SEQ ID NO: 5615564 - DNA, 25 bp, Homo sapien
gctgaggaacatgtgatttgccata

SEQ ID NO: 5615565 - DNA, 25 bp, Homo sapien
cagacactgctacaatgagataact

SEQ ID NO: 5615566 - DNA, 25 bp, Homo sapien
tatataatgggcaattatggggtat

SEQ ID NO: 5615567 - DNA, 25 bp, Homo sapien
atgcggcacagacttggctaaaatc

SEQ ID NO: 5615568 - DNA, 25 bp, Homo sapien
aattgagtagagctgaaagaaaatt

SEQ ID NO: 5615569 - DNA, 25 bp, Homo sapien
tgaaggtaaagatacagtaactaca

SEQ ID NO: 5615570 - DNA, 25 bp, Homo sapien
tctcccacgctggagtgcagtgatg

SEQ ID NO: 5615571 - DNA, 25 bp, Homo sapien
gagccaggtgcccagcctttgttgt

SEQ ID NO: 5615572 - DNA, 25 bp, Homo sapien
ttgtttgttaatacagggtctctgt

SEQ ID NO: 5615573 - DNA, 25 bp, Homo sapien
ggctcactgcaaccttgacctcaag

SEQ ID NO: 5615574 - DNA, 25 bp, Homo sapien
atgcgccaccccacccagctcattt

SEQ ID NO: 5615575 - DNA, 25 bp, Homo sapien
attttggcaacatcacggcagaacg

SEQ ID NO: 5615576 - DNA, 25 bp, Homo sapien
cagacctgccctttgtggtttgtgt

SEQ ID NO: 5615577 - DNA, 25 bp, Homo sapien
gagtgcagtgatgtaatctcggctc

SEQ ID NO: 5615578 - DNA, 25 bp, Homo sapien
gctgatctcgaactgctgggaatac

SEQ ID NO: 5615579 - DNA, 25 bp, Homo sapien
taagctccagcgatcttccgacctc

SEQ ID NO: 5615580 - DNA, 25 bp, Homo sapien
gcgtgccaagaaggctgttccaatg

SEQ ID NO: 5615581 - DNA, 25 bp, Homo sapien
ctggcaccaccacctgctaaccacc

SEQ ID NO: 5615582 - DNA, 25 bp, Homo sapien
aataggaatagtacattgagggctt

SEQ ID NO: 5615583 - DNA, 25 bp, Homo sapien
gagcaaaggcccactactgttccac

SEQ ID NO: 5615584 - DNA, 25 bp, Homo sapien
tgtgacacaacacttgggacagagg

SEQ ID NO: 5615585 - DNA, 25 bp, Homo sapien
cccactactacctgctgagagcctg

SEQ ID NO: 5615586 - DNA, 25 bp, Homo sapien
atagtacattgagggcttaggaaag

SEQ ID NO: 5615587 - DNA, 25 bp, Homo sapien
gacagacactcaggtgccacacttc

SEQ ID NO: 5615588 - DNA, 25 bp, Homo sapien
ctgcagctcccaagacagacactca

SEQ ID NO: 5615589 - DNA, 25 bp, Homo sapien
tgccacacattgactaataggaata

SEQ ID NO: 5615590 - DNA, 25 bp, Homo sapien
ctctctagccttgccgccacacctc

SEQ ID NO: 5615591 - DNA, 25 bp, Homo sapien
ccactttggcctgtaggaggtggtg

SEQ ID NO: 5615592 - DNA, 25 bp, Homo sapien
tgacagaaacaaaattccggtcctc

SEQ ID NO: 5615593 - DNA, 25 bp, Homo sapien
gtacatggtcaggtgagacgtataa

SEQ ID NO: 5615594 - DNA, 25 bp, Homo sapien
aaatgctaagtagaggtacatggtc

SEQ ID NO: 5615595 - DNA, 25 bp, Homo sapien
gtacatatgaggctaagtggcaaca

SEQ ID NO: 5615596 - DNA, 25 bp, Homo sapien
gtggcaacaagaataggtaacctct

SEQ ID NO: 5615597 - DNA, 25 bp, Homo sapien
tgaggaagtgatgaactagctaaga

SEQ ID NO: 5615598 - DNA, 25 bp, Homo sapien
tgagacgtataacaacgggtcttac

SEQ ID NO: 5615599 - DNA, 25 bp, Homo sapien
tctgtgacagaaattagggaatgtt

SEQ ID NO: 5615600 - DNA, 25 bp, Homo sapien
tttcaggccaaagaaacagcatgaa

SEQ ID NO: 5615601 - DNA, 25 bp, Homo sapien
taaaggacaatgaaggtattaagta

SEQ ID NO: 5615602 - DNA, 25 bp, Homo sapien
gccaggcactgtatgaggcataaaa

SEQ ID NO: 5615603 - DNA, 25 bp, Homo sapien
tgcctgtgtctggagcttggcagat

SEQ ID NO: 5615604 - DNA, 25 bp, Homo sapien
agcttggcagattctgtggctgtgc

SEQ ID NO: 5615605 - DNA, 25 bp, Homo sapien
ctagcgagcatctgtgctccaggga

SEQ ID NO: 5615606 - DNA, 25 bp, Homo sapien
gtctggagcttggcagattctgtgg

SEQ ID NO: 5615607 - DNA, 25 bp, Homo sapien
atcacactaactcctctgaggctgg

SEQ ID NO: 5615608 - DNA, 25 bp, Homo sapien
tttcacatctgtgaactgggatgac

SEQ ID NO: 5615609 - DNA, 25 bp, Homo sapien
gctggctctgcccacataaccctgc

SEQ ID NO: 5615610 - DNA, 25 bp, Homo sapien
tctgcagtcagaactaggttctctc

SEQ ID NO: 5615611 - DNA, 25 bp, Homo sapien
tctgaggctggctctgcccacataa

SEQ ID NO: 5615612 - DNA, 25 bp, Homo sapien
ccactgcacctggacagttttcaca

SEQ ID NO: 5615613 - DNA, 25 bp, Homo sapien
agcatctgtgctccagggattctgc

SEQ ID NO: 5615614 - DNA, 25 bp, Homo sapien
cctaggctccagcaatccccctacc

SEQ ID NO: 5615615 - DNA, 25 bp, Homo sapien
aggctgttctcaaactcctggctca

SEQ ID NO: 5615616 - DNA, 25 bp, Homo sapien
ctcaagcctcatcctcccaaagtgc

SEQ ID NO: 5615617 - DNA, 25 bp, Homo sapien
ctccagagtagctaggactataggc

SEQ ID NO: 5615618 - DNA, 25 bp, Homo sapien
tcactgcaagctcaaactcctaggc

SEQ ID NO: 5615619 - DNA, 25 bp, Homo sapien
tgcatattatgctaactgggcaatt

SEQ ID NO: 5615620 - DNA, 25 bp, Homo sapien
aagcaactaactctggttttggctc

SEQ ID NO: 5615621 - DNA, 25 bp, Homo sapien
ccacacccagtgtgagttcactttt

SEQ ID NO: 5615622 - DNA, 25 bp, Homo sapien
tttttaagtagagataaagtctcac

SEQ ID NO: 5615623 - DNA, 25 bp, Homo sapien
acaagcaagatcgtagctcactgca

SEQ ID NO: 5615624 - DNA, 25 bp, Homo sapien
tcaaaaggtcacaaggaatttctac

SEQ ID NO: 5615625 - DNA, 25 bp, Homo sapien
caggaaggtaggaacactacccaca

SEQ ID NO: 5615626 - DNA, 25 bp, Homo sapien
cctagtcattagaagagacagaaat

SEQ ID NO: 5615627 - DNA, 25 bp, Homo sapien
agagacagaaatacagagtaagtag

SEQ ID NO: 5615628 - DNA, 25 bp, Homo sapien
attgttactgataaaatgtgtcttt

SEQ ID NO: 5615629 - DNA, 25 bp, Homo sapien
ttcagtagaacacatacagcaggaa

SEQ ID NO: 5615630 - DNA, 25 bp, Homo sapien
ctacacccagatctaaaattaatac

SEQ ID NO: 5615631 - DNA, 25 bp, Homo sapien
atttgccaactaaatagaagatgat

SEQ ID NO: 5615632 - DNA, 25 bp, Homo sapien
gtaagaccatgatttaactacaccc

SEQ ID NO: 5615633 - DNA, 25 bp, Homo sapien
gaacacactatctctgaacagctgg

SEQ ID NO: 5615634 - DNA, 25 bp, Homo sapien
cttgattgtggagacattagaacac

SEQ ID NO: 5615635 - DNA, 25 bp, Homo sapien
gaaatacagagtaagtagtagaggg

SEQ ID NO: 5615636 - DNA, 25 bp, Homo sapien
ctacctaagtagtttgagaaatgaa

SEQ ID NO: 5615637 - DNA, 25 bp, Homo sapien
ctcaataaagggaataagcttgcgg

SEQ ID NO: 5615638 - DNA, 25 bp, Homo sapien
gattattttgacagaggggaaagtg

SEQ ID NO: 5615639 - DNA, 25 bp, Homo sapien
ggttgcaatgagctgagatcgctcc

SEQ ID NO: 5615640 - DNA, 25 bp, Homo sapien
tggctcaatatgggctcactacaac

SEQ ID NO: 5615641 - DNA, 25 bp, Homo sapien
gattacaagcacacaccaccacgcc

SEQ ID NO: 5615642 - DNA, 25 bp, Homo sapien
tcaacttgcctcacagccatttggc

SEQ ID NO: 5615643 - DNA, 25 bp, Homo sapien
tacttttagtagagcatggtggcac

SEQ ID NO: 5615644 - DNA, 25 bp, Homo sapien
agaggggaaagtgctcatttaactt

SEQ ID NO: 5615645 - DNA, 25 bp, Homo sapien
gctccactgcactgcaggctgggca

SEQ ID NO: 5615646 - DNA, 25 bp, Homo sapien
gcaacggagcaagactgtctcaaaa

SEQ ID NO: 5615647 - DNA, 25 bp, Homo sapien
caacaccaagtatatgtatgtgcag

SEQ ID NO: 5615648 - DNA, 25 bp, Homo sapien
gagaaatggtgaaccatccaagagt

SEQ ID NO: 5615649 - DNA, 25 bp, Homo sapien
gaatcctactcgagaaatggtgaac

SEQ ID NO: 5615650 - DNA, 25 bp, Homo sapien
agaatgaatcatgagacctgcagaa

SEQ ID NO: 5615651 - DNA, 25 bp, Homo sapien
tgccaagttgcttgagctggtcttg

SEQ ID NO: 5615652 - DNA, 25 bp, Homo sapien
aggacaaacctgaagctagaaatag

SEQ ID NO: 5615653 - DNA, 25 bp, Homo sapien
agacctgcagaaggaatcctactcg

SEQ ID NO: 5615654 - DNA, 25 bp, Homo sapien
gggaggcatataggatttaaatttg

SEQ ID NO: 5615655 - DNA, 25 bp, Homo sapien
gtagattacatctaaggtgagaaaa

SEQ ID NO: 5615656 - DNA, 25 bp, Homo sapien
gggctcaagcggtccctgaccttgg

SEQ ID NO: 5615657 - DNA, 25 bp, Homo sapien
taaactcaccaaaacagaatgaatc

SEQ ID NO: 5615658 - DNA, 25 bp, Homo sapien
tttaaatgaacttaggaagcctgga

SEQ ID NO: 5615659 - DNA, 25 bp, Homo sapien
ttagtttgagttagaggagtttgag

SEQ ID NO: 5615660 - DNA, 25 bp, Homo sapien
acacaaaaattggatacatggggtc

SEQ ID NO: 5615661 - DNA, 25 bp, Homo sapien
gccatcactcgtcagccgtcattac

SEQ ID NO: 5615662 - DNA, 25 bp, Homo sapien
tcatctctccattacacctgtccac

SEQ ID NO: 5615663 - DNA, 25 bp, Homo sapien
gattacaggcgaaggttcatttttc

SEQ ID NO: 5615664 - DNA, 25 bp, Homo sapien
cattactaatagataaattcgcctt

SEQ ID NO: 5615665 - DNA, 25 bp, Homo sapien
ttggatacatggggtctcaatttgt

SEQ ID NO: 5615666 - DNA, 25 bp, Homo sapien
acacctgtccactctgccatcactc

SEQ ID NO: 5615667 - DNA, 25 bp, Homo sapien
gcgcggcaggttatgcctgtgatct

SEQ ID NO: 5615668 - DNA, 25 bp, Homo sapien
tggctttttagtttgagttagagga

SEQ ID NO: 5615669 - DNA, 25 bp, Homo sapien
tagcgataatttccccaccatatgc

SEQ ID NO: 5615670 - DNA, 25 bp, Homo sapien
tagcctcaacctactgagctcaagc

SEQ ID NO: 5615671 - DNA, 25 bp, Homo sapien
ttcccctacatattggaagaatatt

SEQ ID NO: 5615672 - DNA, 25 bp, Homo sapien
aacagtatatttttacataggcttc

SEQ ID NO: 5615673 - DNA, 25 bp, Homo sapien
ctagtagctaggaatacaggcatgt

SEQ ID NO: 5615674 - DNA, 25 bp, Homo sapien
ggcctccctagtagctaggaataca

SEQ ID NO: 5615675 - DNA, 25 bp, Homo sapien
taaaatcttcgtagagatgggggtc

SEQ ID NO: 5615676 - DNA, 25 bp, Homo sapien
tattttagcgataatttccccacca

SEQ ID NO: 5615677 - DNA, 25 bp, Homo sapien
tattggaagaatattttatagactc

SEQ ID NO: 5615678 - DNA, 25 bp, Homo sapien
tttttgctttgggtacagggtctca

SEQ ID NO: 5615679 - DNA, 25 bp, Homo sapien
atggctcactgtagcctcaacctac

SEQ ID NO: 5615680 - DNA, 25 bp, Homo sapien
gctgcctctctgaaccaggagtggt

SEQ ID NO: 5615681 - DNA, 25 bp, Homo sapien
gttctgggagctgcctctctgaacc

SEQ ID NO: 5615682 - DNA, 25 bp, Homo sapien
tctctgtgagctggcacagctcccc

SEQ ID NO: 5615683 - DNA, 25 bp, Homo sapien
gtcacagccaatggtgagtgtccag

SEQ ID NO: 5615684 - DNA, 25 bp, Homo sapien
gctactctcctgggttcgtctcctc

SEQ ID NO: 5615685 - DNA, 25 bp, Homo sapien
gctggtccagatttctggctccttc

SEQ ID NO: 5615686 - DNA, 25 bp, Homo sapien
ggaggaagcctgcttccaaacactg

SEQ ID NO: 5615687 - DNA, 25 bp, Homo sapien
gctgaagctgcttcgtcacagccaa

SEQ ID NO: 5615688 - DNA, 25 bp, Homo sapien
tccaaacactgtggctaccagccca

SEQ ID NO: 5615689 - DNA, 25 bp, Homo sapien
agtcattcctctttcagcttgcctt

SEQ ID NO: 5615690 - DNA, 25 bp, Homo sapien
ttcgtcacagccaatggtgagtgtc

SEQ ID NO: 5615691 - DNA, 25 bp, Homo sapien
aatccaagaatgggctgcttgttgc

SEQ ID NO: 5615692 - DNA, 25 bp, Homo sapien
tgctttggtcagagtggatacattt

SEQ ID NO: 5615693 - DNA, 25 bp, Homo sapien
ataaaggagtgagaacttgatgtat

SEQ ID NO: 5615694 - DNA, 25 bp, Homo sapien
attacatacaaggagttagggaaca

SEQ ID NO: 5615695 - DNA, 25 bp, Homo sapien
cactgctgccgtaaagaaactgtat

SEQ ID NO: 5615696 - DNA, 25 bp, Homo sapien
taaaaggggaaatattcagcagttc

SEQ ID NO: 5615697 - DNA, 25 bp, Homo sapien
aaagacgggtcttctgagtcacttc

SEQ ID NO: 5615698 - DNA, 25 bp, Homo sapien
actcctcgctggaggtactagagcg

SEQ ID NO: 5615699 - DNA, 25 bp, Homo sapien
tgtataaaggtgattgagcagtgaa

SEQ ID NO: 5615700 - DNA, 25 bp, Homo sapien
ggatgctattggaagcaccccagct

SEQ ID NO: 5615701 - DNA, 25 bp, Homo sapien
agcggagtctgtctcaaggatgcta

SEQ ID NO: 5615702 - DNA, 25 bp, Homo sapien
aaggtggagtaagtcctaagtagaa

SEQ ID NO: 5615703 - DNA, 25 bp, Homo sapien
taagtacagtaaggaccagttggtg

SEQ ID NO: 5615704 - DNA, 25 bp, Homo sapien
gactgcagcataaggaacgcagaaa

SEQ ID NO: 5615705 - DNA, 25 bp, Homo sapien
tgtcatattaaaggtggagtaagtc

SEQ ID NO: 5615706 - DNA, 25 bp, Homo sapien
ggaagaagctaagtagactgcagca

SEQ ID NO: 5615707 - DNA, 25 bp, Homo sapien
aatttgctagagggacagtatacat

SEQ ID NO: 5615708 - DNA, 25 bp, Homo sapien
attaggtaaaagtcatatgtcatat

SEQ ID NO: 5615709 - DNA, 25 bp, Homo sapien
ttattggaagaactatgatagcaag

SEQ ID NO: 5615710 - DNA, 25 bp, Homo sapien
tagcaagagatgaccaaaaatggaa

SEQ ID NO: 5615711 - DNA, 25 bp, Homo sapien
taagtagaaatcagtggaaagacat

SEQ ID NO: 5615712 - DNA, 25 bp, Homo sapien
tcaatggaagaatatgtttgagttc

SEQ ID NO: 5615713 - DNA, 25 bp, Homo sapien
ttattatggaaaatgtcaaacacac

SEQ ID NO: 5615714 - DNA, 25 bp, Homo sapien
tggtataagaagtgtccatgcacct

SEQ ID NO: 5615715 - DNA, 25 bp, Homo sapien
agagaatggtataagaagtgtccat

SEQ ID NO: 5615716 - DNA, 25 bp, Homo sapien
tcaaacacacacaaagcagagagaa

SEQ ID NO: 5615717 - DNA, 25 bp, Homo sapien
ctagagtattttaaagcaatcaagg

SEQ ID NO: 5615718 - DNA, 25 bp, Homo sapien
tatactctatcctccccaccacttt

SEQ ID NO: 5615719 - DNA, 25 bp, Homo sapien
ctcaaagcttcacttggggagacag

SEQ ID NO: 5615720 - DNA, 25 bp, Homo sapien
gtccatgcacctatcactccatttc

SEQ ID NO: 5615721 - DNA, 25 bp, Homo sapien
tttaggaaaaatctctaacatagac

SEQ ID NO: 5615722 - DNA, 25 bp, Homo sapien
tagctcaaagcttcacttggggaga

SEQ ID NO: 5615723 - DNA, 25 bp, Homo sapien
gacaggaatgagggaattaatacct

SEQ ID NO: 5615724 - DNA, 25 bp, Homo sapien
tgttcagaactaacaggattcaaga

SEQ ID NO: 5615725 - DNA, 25 bp, Homo sapien
gacttacgaagaaggtacagaaaga

SEQ ID NO: 5615726 - DNA, 25 bp, Homo sapien
gaagaaggtacagaaagacttgtca

SEQ ID NO: 5615727 - DNA, 25 bp, Homo sapien
taatgccagacttacgaagaaggta

SEQ ID NO: 5615728 - DNA, 25 bp, Homo sapien
caaattccctctagcaaaatgttcc

SEQ ID NO: 5615729 - DNA, 25 bp, Homo sapien
acttctggatacctgctattagatc

SEQ ID NO: 5615730 - DNA, 25 bp, Homo sapien
tacaggattgcttacaaatgcttcc

SEQ ID NO: 5615731 - DNA, 25 bp, Homo sapien
gtacagaaagacttgtcagggctcc

SEQ ID NO: 5615732 - DNA, 25 bp, Homo sapien
tcagggctcccctgactttctccct

SEQ ID NO: 5615733 - DNA, 25 bp, Homo sapien
gtgtccagcctagttttgatttata

SEQ ID NO: 5615734 - DNA, 25 bp, Homo sapien
attagccctatatgcagaatcaaat

SEQ ID NO: 5615735 - DNA, 25 bp, Homo sapien
tgactggattctctttaaagggaag

SEQ ID NO: 5615736 - DNA, 25 bp, Homo sapien
tgacatgcagtcataggagatcttc

SEQ ID NO: 5615737 - DNA, 25 bp, Homo sapien
aggaaccaagttctgggattgtagg

SEQ ID NO: 5615738 - DNA, 25 bp, Homo sapien
cagtgattgtcatttatgaagcacg

SEQ ID NO: 5615739 - DNA, 25 bp, Homo sapien
tccagtgcacacttgatcatgattg

SEQ ID NO: 5615740 - DNA, 25 bp, Homo sapien
gattgttgtgaacatttgttagtcc

SEQ ID NO: 5615741 - DNA, 25 bp, Homo sapien
atttatgaagcacgaagtgagaagc

SEQ ID NO: 5615742 - DNA, 25 bp, Homo sapien
ttgttagtcctcatggggaaggaac

SEQ ID NO: 5615743 - DNA, 25 bp, Homo sapien
gtacaaaataccttgacatgcagtc

SEQ ID NO: 5615744 - DNA, 25 bp, Homo sapien
cttcgaagggcagctttttaaggct

SEQ ID NO: 5615745 - DNA, 25 bp, Homo sapien
gcagtcataggagatcttcgaaggg

SEQ ID NO: 5615746 - DNA, 25 bp, Homo sapien
gactttacgatggtggtcaaagaat

SEQ ID NO: 5615747 - DNA, 25 bp, Homo sapien
attctttgaccaccatcgtaaagtc

SEQ ID NO: 5615748 - DNA, 25 bp, Homo sapien
aagcgggaaaatcatgtgatttgca

SEQ ID NO: 5615749 - DNA, 25 bp, Homo sapien
tcttccttgcggacctcagacgcgg

SEQ ID NO: 5615750 - DNA, 25 bp, Homo sapien
gtgatttgcaggaacgctccctcct

SEQ ID NO: 5615751 - DNA, 25 bp, Homo sapien
ctccagctgctctgggagaaaggaa

SEQ ID NO: 5615752 - DNA, 25 bp, Homo sapien
cgggcgtgcattcccgcagctcttc

SEQ ID NO: 5615753 - DNA, 25 bp, Homo sapien
gcggcagtttggtccccacgctgcc

SEQ ID NO: 5615754 - DNA, 25 bp, Homo sapien
actcccccgactgggtcggctgcta

SEQ ID NO: 5615755 - DNA, 25 bp, Homo sapien
gcctccaagcccttcccagaggggc

SEQ ID NO: 5615756 - DNA, 25 bp, Homo sapien
gcagctcttccttgcggacctcaga

SEQ ID NO: 5615757 - DNA, 25 bp, Homo sapien
gctgctaccctcaggccagggtgtg

SEQ ID NO: 5615758 - DNA, 25 bp, Homo sapien
ggtggagaaactgaggctctcctcc

SEQ ID NO: 5615759 - DNA, 25 bp, Homo sapien
tgcttgttgagtgaaccaatatgtg

SEQ ID NO: 5615760 - DNA, 25 bp, Homo sapien
gaatgaggtgagatgtaaaattact

SEQ ID NO: 5615761 - DNA, 25 bp, Homo sapien
ttctggcagaatgactccttgctga

SEQ ID NO: 5615762 - DNA, 25 bp, Homo sapien
tgaaccaatatgtgaatgattttct

SEQ ID NO: 5615763 - DNA, 25 bp, Homo sapien
ggagaacagggactgcttcttccta

SEQ ID NO: 5615764 - DNA, 25 bp, Homo sapien
ctccttgctgaaaaaaaatggctta

SEQ ID NO: 5615765 - DNA, 25 bp, Homo sapien
agataaaataaggaaaattgaagtc

SEQ ID NO: 5615766 - DNA, 25 bp, Homo sapien
ccaataattaagcaaactgagcatc

SEQ ID NO: 5615767 - DNA, 25 bp, Homo sapien
aataatcgaacagtaaagctctaat

SEQ ID NO: 5615768 - DNA, 25 bp, Homo sapien
ctgagcatcataagaatgaggtgag

SEQ ID NO: 5615769 - DNA, 25 bp, Homo sapien
aaggaaaattgaagtccagcatctc

SEQ ID NO: 5615770 - DNA, 25 bp, Homo sapien
atccatcccctggtacgcatgtgta

SEQ ID NO: 5615771 - DNA, 25 bp, Homo sapien
agagtttctctagggtatgtatccg

SEQ ID NO: 5615772 - DNA, 25 bp, Homo sapien
tgacaaatgacctatttgggatggc

SEQ ID NO: 5615773 - DNA, 25 bp, Homo sapien
gtttctctagggtatgtatccggga

SEQ ID NO: 5615774 - DNA, 25 bp, Homo sapien
cctggtacgcatgtgtaagagtttc

SEQ ID NO: 5615775 - DNA, 25 bp, Homo sapien
tatgtatccgggaatgaatggctac

SEQ ID NO: 5615776 - DNA, 25 bp, Homo sapien
aaatgacctatttgggatggctgag

SEQ ID NO: 5615777 - DNA, 25 bp, Homo sapien
tctagggtatgtatccgggaatgaa

SEQ ID NO: 5615778 - DNA, 25 bp, Homo sapien
tcccctggtacgcatgtgtaagagt

SEQ ID NO: 5615779 - DNA, 25 bp, Homo sapien
agagaggttatggcacacccactta

SEQ ID NO: 5615780 - DNA, 25 bp, Homo sapien
cacccacttataccaaattgtttcc

SEQ ID NO: 5615781 - DNA, 25 bp, Homo sapien
actctaatcactgaagagcaggaat

SEQ ID NO: 5615782 - DNA, 25 bp, Homo sapien
taattttttgtgatccttgcgccat

SEQ ID NO: 5615783 - DNA, 25 bp, Homo sapien
tgaagagcaggaataatctagacag

SEQ ID NO: 5615784 - DNA, 25 bp, Homo sapien
taatcactgaagagcaggaataatc

SEQ ID NO: 5615785 - DNA, 25 bp, Homo sapien
aagaagcctagaaaccactctaatc

SEQ ID NO: 5615786 - DNA, 25 bp, Homo sapien
gcaggaataatctagacaggctgga

SEQ ID NO: 5615787 - DNA, 25 bp, Homo sapien
gtgatccttgcgccatcaagaagcc

SEQ ID NO: 5615788 - DNA, 25 bp, Homo sapien
tgcgccatcaagaagcctagaaacc

SEQ ID NO: 5615789 - DNA, 25 bp, Homo sapien
tacattacaaagtctggccaggcac

SEQ ID NO: 5615790 - DNA, 25 bp, Homo sapien
atggaggatctaggcaacactttct

SEQ ID NO: 5615791 - DNA, 25 bp, Homo sapien
agcctggcaacataccaataccctg

SEQ ID NO: 5615792 - DNA, 25 bp, Homo sapien
ctcttgagaaagagatgactatctc

SEQ ID NO: 5615793 - DNA, 25 bp, Homo sapien
tacaaagggactaatgcttcctacc

SEQ ID NO: 5615794 - DNA, 25 bp, Homo sapien
gtgaaggatcacattcagaccagtg

SEQ ID NO: 5615795 - DNA, 25 bp, Homo sapien
gtcctacaatctttggcagtgactc

SEQ ID NO: 5615796 - DNA, 25 bp, Homo sapien
gcagagccatgtgaagttagagcta

SEQ ID NO: 5615797 - DNA, 25 bp, Homo sapien
agaccagtgtgcatgtagctgactc

SEQ ID NO: 5615798 - DNA, 25 bp, Homo sapien
gcccaccccaatcagctctaccttc

SEQ ID NO: 5615799 - DNA, 25 bp, Homo sapien
tactagcaccactgactgcccaccc

SEQ ID NO: 5615800 - DNA, 25 bp, Homo sapien
tgactatctccagggttcacgcttc

SEQ ID NO: 5615801 - DNA, 25 bp, Homo sapien
ctacccttggacaaagtgaaggatc

SEQ ID NO: 5615802 - DNA, 25 bp, Homo sapien
atgaacaccaaaagtaattacccac

SEQ ID NO: 5615803 - DNA, 25 bp, Homo sapien
aaacaactttgcaagataggtaagg

SEQ ID NO: 5615804 - DNA, 25 bp, Homo sapien
cagataaatctgaggcacaaaaaaa

SEQ ID NO: 5615805 - DNA, 25 bp, Homo sapien
aaataataagcgtcaaatgcaaaac

SEQ ID NO: 5615806 - DNA, 25 bp, Homo sapien
tgcaccagatactgtttgaagcatt

SEQ ID NO: 5615807 - DNA, 25 bp, Homo sapien
aatgagggccacagtaaagttttaa

SEQ ID NO: 5615808 - DNA, 25 bp, Homo sapien
gaactttatgagtgcttgccatgca

SEQ ID NO: 5615809 - DNA, 25 bp, Homo sapien
ctgtttgactctgaagctcatgctc

SEQ ID NO: 5615810 - DNA, 25 bp, Homo sapien
catctgcaaattgaatgagggccac

SEQ ID NO: 5615811 - DNA, 25 bp, Homo sapien
gggaggtaggtacacttattactgc

SEQ ID NO: 5615812 - DNA, 25 bp, Homo sapien
ctggtaattggcagagccagaattc

SEQ ID NO: 5615813 - DNA, 25 bp, Homo sapien
cacaccttccctgggaggtaggtac

SEQ ID NO: 5615814 - DNA, 25 bp, Homo sapien
aacgtcagaaaagtcacaacgaccc

SEQ ID NO: 5615815 - DNA, 25 bp, Homo sapien
gggtcgttgtgacttttctgacgtt

SEQ ID NO: 5615816 - DNA, 25 bp, Homo sapien
gtcagagcacttgccccaatacttc

SEQ ID NO: 5615817 - DNA, 25 bp, Homo sapien
ccagttgctgtgagggatttccttt

SEQ ID NO: 5615818 - DNA, 25 bp, Homo sapien
caccttgtccagaactacagtccac

SEQ ID NO: 5615819 - DNA, 25 bp, Homo sapien
caaggtttgagtctgaactgttaac

SEQ ID NO: 5615820 - DNA, 25 bp, Homo sapien
attatcacatatcagcagggcagac

SEQ ID NO: 5615821 - DNA, 25 bp, Homo sapien
gcaccatcctagcctgtcagagcac

SEQ ID NO: 5615822 - DNA, 25 bp, Homo sapien
tgatcctctgcagatgggtctattc

SEQ ID NO: 5615823 - DNA, 25 bp, Homo sapien
gggctgaaagcaggtaactccattt

SEQ ID NO: 5615824 - DNA, 25 bp, Homo sapien
tactggagatgagtgaccccatttt

SEQ ID NO: 5615825 - DNA, 25 bp, Homo sapien
caggcagcagtagttgttatcacgt

SEQ ID NO: 5615826 - DNA, 25 bp, Homo sapien
cagggcagacaatagctacgacctg

SEQ ID NO: 5615827 - DNA, 25 bp, Homo sapien
gtataattcgtacatcttataacag

SEQ ID NO: 5615828 - DNA, 25 bp, Homo sapien
ctgttataagatgtacgaattatac

SEQ ID NO: 5615829 - DNA, 25 bp, Homo sapien
ctttagtgactggtgggtcacgaga

SEQ ID NO: 5615830 - DNA, 25 bp, Homo sapien
tgctcttggacccacgtcctgtatt

SEQ ID NO: 5615831 - DNA, 25 bp, Homo sapien
tatatgcaaatgaagtgtgcgctgc

SEQ ID NO: 5615832 - DNA, 25 bp, Homo sapien
agactcgcatgggccaatgactgat

SEQ ID NO: 5615833 - DNA, 25 bp, Homo sapien
tcctgtattgctaaggctcaaagat

SEQ ID NO: 5615834 - DNA, 25 bp, Homo sapien
gggcgacccagtttcgtgcagatca

SEQ ID NO: 5615835 - DNA, 25 bp, Homo sapien
caatgactgatagagaccggtcaga

SEQ ID NO: 5615836 - DNA, 25 bp, Homo sapien
ctcggggttttaaacgcgtgatgga

SEQ ID NO: 5615837 - DNA, 25 bp, Homo sapien
gccaatagggatgcgctttagtgac

SEQ ID NO: 5615838 - DNA, 25 bp, Homo sapien
cgtgcagatcaaaccgctgccagcc

SEQ ID NO: 5615839 - DNA, 25 bp, Homo sapien
tgccagccaacgaaatccgttgatt

SEQ ID NO: 5615840 - DNA, 25 bp, Homo sapien
tatatttctacaattattccaaaat

SEQ ID NO: 5615841 - DNA, 25 bp, Homo sapien
attttggaataattgtagaaatata

SEQ ID NO: 5615842 - DNA, 25 bp, Homo sapien
acaaggttgcaaaatgaagcgcaga

SEQ ID NO: 5615843 - DNA, 25 bp, Homo sapien
gaggcaaagcgaacagtaaattctg

SEQ ID NO: 5615844 - DNA, 25 bp, Homo sapien
tacttagtgcgagcctagcagctcc

SEQ ID NO: 5615845 - DNA, 25 bp, Homo sapien
gctagaaaaccgagtcatctgctgc

SEQ ID NO: 5615846 - DNA, 25 bp, Homo sapien
cttcttaagtcagcccggcgcggtt

SEQ ID NO: 5615847 - DNA, 25 bp, Homo sapien
ctgctgcttgcaaaaccacgcttta

SEQ ID NO: 5615848 - DNA, 25 bp, Homo sapien
cctcctagcttaaccgagcgctcgc

SEQ ID NO: 5615849 - DNA, 25 bp, Homo sapien
gcccgatggtgagtacccttctcgt

SEQ ID NO: 5615850 - DNA, 25 bp, Homo sapien
ctcgcctacccgaaccgtggccgag

SEQ ID NO: 5615851 - DNA, 25 bp, Homo sapien
tagtttgctctgtggaaggaaatga

SEQ ID NO: 5615852 - DNA, 25 bp, Homo sapien
cttgaatgttctggacagagcacag

SEQ ID NO: 5615853 - DNA, 25 bp, Homo sapien
caggtgaacgttgggcaccattttc

SEQ ID NO: 5615854 - DNA, 25 bp, Homo sapien
aacagttaggaagcaaatagcactt

SEQ ID NO: 5615855 - DNA, 25 bp, Homo sapien
accgcttggtttgaaggcagctttg

SEQ ID NO: 5615856 - DNA, 25 bp, Homo sapien
ggatcctgggtagcctaaacaactc

SEQ ID NO: 5615857 - DNA, 25 bp, Homo sapien
tcacaggcagttcaggtgaacgttg

SEQ ID NO: 5615858 - DNA, 25 bp, Homo sapien
aagatgatcaaaggctcaaaagatt

SEQ ID NO: 5615859 - DNA, 25 bp, Homo sapien
agcaggcgataacatgttaagggtc

SEQ ID NO: 5615860 - DNA, 25 bp, Homo sapien
gtcaccaccactaagtcaagggcac

SEQ ID NO: 5615861 - DNA, 25 bp, Homo sapien
tgtcactaggaaaggccctaagtat

SEQ ID NO: 5615862 - DNA, 25 bp, Homo sapien
gttgtgaaatcaagcaggcgataac

SEQ ID NO: 5615863 - DNA, 25 bp, Homo sapien
tgtgagcttgaacaacagttaggaa

SEQ ID NO: 5615864 - DNA, 25 bp, Homo sapien
cctgccttggcctcgggattatagg

SEQ ID NO: 5615865 - DNA, 25 bp, Homo sapien
caaaaacaaacaaagaaacaccaca

SEQ ID NO: 5615866 - DNA, 25 bp, Homo sapien
aaccaccactgtgcctggtcctgcc

SEQ ID NO: 5615867 - DNA, 25 bp, Homo sapien
ggattataggcatgaaccaccactg

SEQ ID NO: 5615868 - DNA, 25 bp, Homo sapien
ctcctggaattacttaacagctctc

SEQ ID NO: 5615869 - DNA, 25 bp, Homo sapien
acaggtgtacaccacaatgcccagc

SEQ ID NO: 5615870 - DNA, 25 bp, Homo sapien
gctgctccttctgccttgtatgccc

SEQ ID NO: 5615871 - DNA, 25 bp, Homo sapien
atagcaatgactatcaagaccaatc

SEQ ID NO: 5615872 - DNA, 25 bp, Homo sapien
tgccatcactgctcactcgcagcct

SEQ ID NO: 5615873 - DNA, 25 bp, Homo sapien
tcccaatagctgggagtacaggtgt

SEQ ID NO: 5615874 - DNA, 25 bp, Homo sapien
gagtgcagtggtgccatcactgctc

SEQ ID NO: 5615875 - DNA, 25 bp, Homo sapien
gacagtgcttctgaatgtggccacc

SEQ ID NO: 5615876 - DNA, 25 bp, Homo sapien
ccagtatctccagggtgtggaatcc

SEQ ID NO: 5615877 - DNA, 25 bp, Homo sapien
acctggatttaaggtggagtagtgc

SEQ ID NO: 5615878 - DNA, 25 bp, Homo sapien
gagtagtgcctcaactgagaggccc

SEQ ID NO: 5615879 - DNA, 25 bp, Homo sapien
tctagtatgagagcaacttagctta

SEQ ID NO: 5615880 - DNA, 25 bp, Homo sapien
tggcagagctgactcataaacagcc

SEQ ID NO: 5615881 - DNA, 25 bp, Homo sapien
gtgctaatgaattgtccgtggctgc

SEQ ID NO: 5615882 - DNA, 25 bp, Homo sapien
tccaatcccccagcagaccaacagg

SEQ ID NO: 5615883 - DNA, 25 bp, Homo sapien
ggaagcaatcctgttggcagagctg

SEQ ID NO: 5615884 - DNA, 25 bp, Homo sapien
tgttagcatgttgctgagaggccag

SEQ ID NO: 5615885 - DNA, 25 bp, Homo sapien
tgcatagagaataagagatccagta

SEQ ID NO: 5615886 - DNA, 25 bp, Homo sapien
aaacatccttctgttggtcagttac

SEQ ID NO: 5615887 - DNA, 25 bp, Homo sapien
ggtgcagtttgatgagcctcagaac

SEQ ID NO: 5615888 - DNA, 25 bp, Homo sapien
cctgtagaaacagtctggtcatgcc

SEQ ID NO: 5615889 - DNA, 25 bp, Homo sapien
atttcaagggtgcagtttgatgagc

SEQ ID NO: 5615890 - DNA, 25 bp, Homo sapien
tgtaaaaataagacagaaggtatta

SEQ ID NO: 5615891 - DNA, 25 bp, Homo sapien
ttcctcatccagcactccgtattac

SEQ ID NO: 5615892 - DNA, 25 bp, Homo sapien
ccattctgagacaggataaaggtca

SEQ ID NO: 5615893 - DNA, 25 bp, Homo sapien
attttaataaaatcaggtggttcaa

SEQ ID NO: 5615894 - DNA, 25 bp, Homo sapien
aatgcactcatttcaagggtgcagt

SEQ ID NO: 5615895 - DNA, 25 bp, Homo sapien
ataagacagaaggtattaaatatac

SEQ ID NO: 5615896 - DNA, 25 bp, Homo sapien
agaaacagtctggtcatgcctttta

SEQ ID NO: 5615897 - DNA, 25 bp, Homo sapien
gagggcggcgcacgtccctgagaca

SEQ ID NO: 5615898 - DNA, 25 bp, Homo sapien
tgtctcagggacgtgcgccgccctc

SEQ ID NO: 5615899 - DNA, 25 bp, Homo sapien
ggcacataatggactggtacttaac

SEQ ID NO: 5615900 - DNA, 25 bp, Homo sapien
gtaagcatctgaatatacctaatac

SEQ ID NO: 5615901 - DNA, 25 bp, Homo sapien
taatcttacacaggcctactttttc

SEQ ID NO: 5615902 - DNA, 25 bp, Homo sapien
tgaaataggaatcactacctggcac

SEQ ID NO: 5615903 - DNA, 25 bp, Homo sapien
acctatgtgataaatcctgatgctc

SEQ ID NO: 5615904 - DNA, 25 bp, Homo sapien
ttaacaagcagaccatgtgtagacc

SEQ ID NO: 5615905 - DNA, 25 bp, Homo sapien
acatgggccacataatatagccact

SEQ ID NO: 5615906 - DNA, 25 bp, Homo sapien
tcctgggcaaggctcttaattcatc

SEQ ID NO: 5615907 - DNA, 25 bp, Homo sapien
tgtgtagaccacccatcctgaacca

SEQ ID NO: 5615908 - DNA, 25 bp, Homo sapien
actgctccacacatgggccacataa

SEQ ID NO: 5615909 - DNA, 25 bp, Homo sapien
ctgaaccaagattcctgggcaaggc

SEQ ID NO: 5615910 - DNA, 25 bp, Homo sapien
gtctatgatagaagtattaaactta

SEQ ID NO: 5615911 - DNA, 25 bp, Homo sapien
taagtttaatacttctatcatagac

SEQ ID NO: 5615912 - DNA, 25 bp, Homo sapien
agtctatgatagaagtattaaactt

SEQ ID NO: 5615913 - DNA, 25 bp, Homo sapien
aagtttaatacttctatcatagact

SEQ ID NO: 5615914 - DNA, 25 bp, Homo sapien
tgaggcagtttgtaataagactcgg

SEQ ID NO: 5615915 - DNA, 25 bp, Homo sapien
ttattgagaatagctagtgcactgc

SEQ ID NO: 5615916 - DNA, 25 bp, Homo sapien
actttagcagcaagaacattgtttt

SEQ ID NO: 5615917 - DNA, 25 bp, Homo sapien
cctctggaactgccattggtaactc

SEQ ID NO: 5615918 - DNA, 25 bp, Homo sapien
acttggaagctgtgcagctatgggc

SEQ ID NO: 5615919 - DNA, 25 bp, Homo sapien
aacggtgactatgctcacttgcccc

SEQ ID NO: 5615920 - DNA, 25 bp, Homo sapien
agatttgcagtagctttggggtaaa

SEQ ID NO: 5615921 - DNA, 25 bp, Homo sapien
acaatgatgaaaagaactaaacaac

SEQ ID NO: 5615922 - DNA, 25 bp, Homo sapien
taataagactcggtgaaaatcctgt

SEQ ID NO: 5615923 - DNA, 25 bp, Homo sapien
cagctatgggcaagttattcaactc

SEQ ID NO: 5615924 - DNA, 25 bp, Homo sapien
gctttggggtaaatgataaatcctc

SEQ ID NO: 5615925 - DNA, 25 bp, Homo sapien
tcagcacacataggaccaggtcttg

SEQ ID NO: 5615926 - DNA, 25 bp, Homo sapien
tagaaaacagctaaaatgttgccac

SEQ ID NO: 5615927 - DNA, 25 bp, Homo sapien
ctgttctctggacctgattttgcac

SEQ ID NO: 5615928 - DNA, 25 bp, Homo sapien
tatcatcccggtccatcagctgagc

SEQ ID NO: 5615929 - DNA, 25 bp, Homo sapien
atgtttccaggtaagtcttcaggct

SEQ ID NO: 5615930 - DNA, 25 bp, Homo sapien
ttccagaactgctttcaggtgtttc

SEQ ID NO: 5615931 - DNA, 25 bp, Homo sapien
aagctctcagagtacttcagtgtta

SEQ ID NO: 5615932 - DNA, 25 bp, Homo sapien
ggtaagtcttcaggctggcagcctc

SEQ ID NO: 5615933 - DNA, 25 bp, Homo sapien
aaccagaccaacgagaaaatgtttc

SEQ ID NO: 5615934 - DNA, 25 bp, Homo sapien
agaacaaggtcagcacacataggac

SEQ ID NO: 5615935 - DNA, 25 bp, Homo sapien
ataggaccaggtcttggtacagcag

SEQ ID NO: 5615936 - DNA, 25 bp, Homo sapien
ctgtattgaagagtccctcagctgc

SEQ ID NO: 5615937 - DNA, 25 bp, Homo sapien
gtagagcagctgtatctggtaggaa

SEQ ID NO: 5615938 - DNA, 25 bp, Homo sapien
caaggaaattgaaaatacccgaata

SEQ ID NO: 5615939 - DNA, 25 bp, Homo sapien
ctcagctgctagggtgaccagcagc

SEQ ID NO: 5615940 - DNA, 25 bp, Homo sapien
tcaatgctaaaactaggacagtccc

SEQ ID NO: 5615941 - DNA, 25 bp, Homo sapien
cagccctcgaaagttgtagagcagc

SEQ ID NO: 5615942 - DNA, 25 bp, Homo sapien
tgcagacagaacaggcttcagtaga

SEQ ID NO: 5615943 - DNA, 25 bp, Homo sapien
tcatctccagtgcacaaagactaat

SEQ ID NO: 5615944 - DNA, 25 bp, Homo sapien
actcaatgaaaatgtcggtgcagac

SEQ ID NO: 5615945 - DNA, 25 bp, Homo sapien
agtattgctaaaaagtaacggtgaa

SEQ ID NO: 5615946 - DNA, 25 bp, Homo sapien
tctggtaggaagaatccgtactcaa

SEQ ID NO: 5615947 - DNA, 25 bp, Homo sapien
agtaggagtatctaccctgccctgc

SEQ ID NO: 5615948 - DNA, 25 bp, Homo sapien
ggacaggacaaatgccagtattctg

SEQ ID NO: 5615949 - DNA, 25 bp, Homo sapien
tgatactacagagtgagctttggat

SEQ ID NO: 5615950 - DNA, 25 bp, Homo sapien
cagagtgagctttggatacatgaca

SEQ ID NO: 5615951 - DNA, 25 bp, Homo sapien
atgagccagcttcccacccatctcc

SEQ ID NO: 5615952 - DNA, 25 bp, Homo sapien
gttaatagccccagatgagccagct

SEQ ID NO: 5615953 - DNA, 25 bp, Homo sapien
agacacataagggaagccaccttgg

SEQ ID NO: 5615954 - DNA, 25 bp, Homo sapien
gacctttcaggtcaacccatctacc

SEQ ID NO: 5615955 - DNA, 25 bp, Homo sapien
aagttttgatgggcaaatccacccc

SEQ ID NO: 5615956 - DNA, 25 bp, Homo sapien
tagttggaactatagtaggagtatc

SEQ ID NO: 5615957 - DNA, 25 bp, Homo sapien
ccagctgagtcccacctaaattcct

SEQ ID NO: 5615958 - DNA, 25 bp, Homo sapien
tccttgtgtttaagcacttggtact

SEQ ID NO: 5615959 - DNA, 25 bp, Homo sapien
aataatggaagaagtataaaaaata

SEQ ID NO: 5615960 - DNA, 25 bp, Homo sapien
ggaaagtcactcgaaaatctaacac

SEQ ID NO: 5615961 - DNA, 25 bp, Homo sapien
taatgtttctgtaagaggctccatc

SEQ ID NO: 5615962 - DNA, 25 bp, Homo sapien
tcaagttaaagtaaggacagctaat

SEQ ID NO: 5615963 - DNA, 25 bp, Homo sapien
ttttaaatgatgcaaggcacttttc

SEQ ID NO: 5615964 - DNA, 25 bp, Homo sapien
gttatatatcgaacagaaaaatgaa

SEQ ID NO: 5615965 - DNA, 25 bp, Homo sapien
agaggctccatcataaaattgaact

SEQ ID NO: 5615966 - DNA, 25 bp, Homo sapien
aaggacagctaattaggatcatgat

SEQ ID NO: 5615967 - DNA, 25 bp, Homo sapien
gaaatgtggcagattcctgcatttt

SEQ ID NO: 5615968 - DNA, 25 bp, Homo sapien
aaatgcaaaaaggaaagtcactcga

SEQ ID NO: 5615969 - DNA, 25 bp, Homo sapien
atcaacacaaaccagtggaaagtac

SEQ ID NO: 5615970 - DNA, 25 bp, Homo sapien
ccattcagtcttaaacgtgtcctcc

SEQ ID NO: 5615971 - DNA, 25 bp, Homo sapien
aactctccattgaaaggacgtcttt

SEQ ID NO: 5615972 - DNA, 25 bp, Homo sapien
acaactacacctgagaaaacaaatc

SEQ ID NO: 5615973 - DNA, 25 bp, Homo sapien
ttcccatgcattatcgctaccttcc

SEQ ID NO: 5615974 - DNA, 25 bp, Homo sapien
aataaagaaacgggcactacatttg

SEQ ID NO: 5615975 - DNA, 25 bp, Homo sapien
agagtcagtcaaatacaactacacc

SEQ ID NO: 5615976 - DNA, 25 bp, Homo sapien
gacttaacagttagagatacttctc

SEQ ID NO: 5615977 - DNA, 25 bp, Homo sapien
gtgtcctcctacaatagagtcagtc

SEQ ID NO: 5615978 - DNA, 25 bp, Homo sapien
acaaaccagtggaaagtaccagaaa

SEQ ID NO: 5615979 - DNA, 25 bp, Homo sapien
cagatttcctgtgacaaagtatttt

SEQ ID NO: 5615980 - DNA, 25 bp, Homo sapien
taacagacactttacatcatgagtt

SEQ ID NO: 5615981 - DNA, 25 bp, Homo sapien
attcatgtttcaattgacaagggaa

SEQ ID NO: 5615982 - DNA, 25 bp, Homo sapien
aagagatgcttgctgaaggcacaag

SEQ ID NO: 5615983 - DNA, 25 bp, Homo sapien
tgaaggcacaagtttgaatacagaa

SEQ ID NO: 5615984 - DNA, 25 bp, Homo sapien
ttctaaattgctttgtggagactaa

SEQ ID NO: 5615985 - DNA, 25 bp, Homo sapien
tttgtattggttaaagatgtcctga

SEQ ID NO: 5615986 - DNA, 25 bp, Homo sapien
ctttgtggagactaagtgctttaaa

SEQ ID NO: 5615987 - DNA, 25 bp, Homo sapien
aattgctttgtggagactaagtgct

SEQ ID NO: 5615988 - DNA, 25 bp, Homo sapien
ttcaattgacaagggaaagaaagtg

SEQ ID NO: 5615989 - DNA, 25 bp, Homo sapien
aagtttgaatacagaaagctggaat

SEQ ID NO: 5615990 - DNA, 25 bp, Homo sapien
tacatcatgagttagccaaacattc

SEQ ID NO: 5615991 - DNA, 25 bp, Homo sapien
ctcctgggcccactgtcgacccggg

SEQ ID NO: 5615992 - DNA, 25 bp, Homo sapien
cccgggtcgacagtgggcccaggag

SEQ ID NO: 5615993 - DNA, 25 bp, Homo sapien
gcaagagcacgttcctgcgcgtgtt

SEQ ID NO: 5615994 - DNA, 25 bp, Homo sapien
ttcaactccgtgcgtctgcccacca

SEQ ID NO: 5615995 - DNA, 25 bp, Homo sapien
tttgaggtggacctgctagaaattg

SEQ ID NO: 5615996 - DNA, 25 bp, Homo sapien
gaacctgcgcttctactggaaggag

SEQ ID NO: 5615997 - DNA, 25 bp, Homo sapien
gcgcttctactggaaggagtttgtg

SEQ ID NO: 5615998 - DNA, 25 bp, Homo sapien
gcgcaggcaagagcacgttcctgcg

SEQ ID NO: 5615999 - DNA, 25 bp, Homo sapien
cacgttcctgcgcgtgttgtcgggg

SEQ ID NO: 5616000 - DNA, 25 bp, Homo sapien
actccgtgcgtctgcccaccaagga

SEQ ID NO: 5616001 - DNA, 25 bp, Homo sapien
gactttgaggtggacctgctagaaa

SEQ ID NO: 5616002 - DNA, 25 bp, Homo sapien
acctacttcggccgcggccgagagc

SEQ ID NO: 5616003 - DNA, 25 bp, Homo sapien
gtgcgtctgcccaccaaggactttg

SEQ ID NO: 5616004 - DNA, 25 bp, Homo sapien
gtggtcccccgagcgaagcagacgg

SEQ ID NO: 5616005 - DNA, 25 bp, Homo sapien
ccgtctgcttcgctcgggggaccac

SEQ ID NO: 5616006 - DNA, 25 bp, Homo sapien
tagcaaaacactgcaaagtcatttg

SEQ ID NO: 5616007 - DNA, 25 bp, Homo sapien
tctttcagacatgcccaaaacactc

SEQ ID NO: 5616008 - DNA, 25 bp, Homo sapien
aaaagctaccacgtgtcaggctcac

SEQ ID NO: 5616009 - DNA, 25 bp, Homo sapien
atcccccgcagattggcattcagtg

SEQ ID NO: 5616010 - DNA, 25 bp, Homo sapien
agattggcattcagtgatggagaac

SEQ ID NO: 5616011 - DNA, 25 bp, Homo sapien
ggaatggttgatcctaaaagctacc

SEQ ID NO: 5616012 - DNA, 25 bp, Homo sapien
ctcattagcgattttgaacagtatt

SEQ ID NO: 5616013 - DNA, 25 bp, Homo sapien
acatcctagttggaatggttgatcc

SEQ ID NO: 5616014 - DNA, 25 bp, Homo sapien
attcagtgatggagaacagactcct

SEQ ID NO: 5616015 - DNA, 25 bp, Homo sapien
acagactctggtcaaaacaagctga

SEQ ID NO: 5616016 - DNA, 25 bp, Homo sapien
tcaggctcacttaagtacagactct

SEQ ID NO: 5616017 - DNA, 25 bp, Homo sapien
cattattaggagatggtggcaatat

SEQ ID NO: 5616018 - DNA, 25 bp, Homo sapien
ctaggctcaggtaatcacccacctt

SEQ ID NO: 5616019 - DNA, 25 bp, Homo sapien
atttttactggtgtgagagatggtt

SEQ ID NO: 5616020 - DNA, 25 bp, Homo sapien
tgaagaggtaatacattcaaggacc

SEQ ID NO: 5616021 - DNA, 25 bp, Homo sapien
attcaaggaccttagaaaagtatct

SEQ ID NO: 5616022 - DNA, 25 bp, Homo sapien
agcacactagtgtagaggctaacag

SEQ ID NO: 5616023 - DNA, 25 bp, Homo sapien
agtaacggttgtagtgccgaagttc

SEQ ID NO: 5616024 - DNA, 25 bp, Homo sapien
gagccagaccatggaccacctctac

SEQ ID NO: 5616025 - DNA, 25 bp, Homo sapien
ttcactggtatgagtaacggttgta

SEQ ID NO: 5616026 - DNA, 25 bp, Homo sapien
gcttactagcaggttccacttggac

SEQ ID NO: 5616027 - DNA, 25 bp, Homo sapien
agatggttgcagagccagaatttca

SEQ ID NO: 5616028 - DNA, 25 bp, Homo sapien
tagggtatcaccaaaggcagtgtct

SEQ ID NO: 5616029 - DNA, 25 bp, Homo sapien
gcagaaagttttgcaatgctttttc

SEQ ID NO: 5616030 - DNA, 25 bp, Homo sapien
ctgtgggactggcccctttggttta

SEQ ID NO: 5616031 - DNA, 25 bp, Homo sapien
tacacgcatcagctaacagagcaga

SEQ ID NO: 5616032 - DNA, 25 bp, Homo sapien
tcatgatatctcaagcaagcgggga

SEQ ID NO: 5616033 - DNA, 25 bp, Homo sapien
atcaccaaaggcagtgtctaggcca

SEQ ID NO: 5616034 - DNA, 25 bp, Homo sapien
ggggctacacgcatcagctaacaga

SEQ ID NO: 5616035 - DNA, 25 bp, Homo sapien
tcttactgtgggactggcccctttg

SEQ ID NO: 5616036 - DNA, 25 bp, Homo sapien
tggtttagggtatcaccaaaggcag

SEQ ID NO: 5616037 - DNA, 25 bp, Homo sapien
gtagtggtctccttcttactgtggg

SEQ ID NO: 5616038 - DNA, 25 bp, Homo sapien
tccttcttactgtgggactggcccc

SEQ ID NO: 5616039 - DNA, 25 bp, Homo sapien
tgaggccttgtctagacagggctga

SEQ ID NO: 5616040 - DNA, 25 bp, Homo sapien
gagcctgatgcctgcaggcacctcc

SEQ ID NO: 5616041 - DNA, 25 bp, Homo sapien
tggacccgatcctgtgcccccggga

SEQ ID NO: 5616042 - DNA, 25 bp, Homo sapien
ggctgagctgtttgtcgttggaaat

SEQ ID NO: 5616043 - DNA, 25 bp, Homo sapien
tgcaggcacctccccatatgggttt

SEQ ID NO: 5616044 - DNA, 25 bp, Homo sapien
ggagcccctacagtgccacgatcag

SEQ ID NO: 5616045 - DNA, 25 bp, Homo sapien
ctacagtgccacgatcaggctgagg

SEQ ID NO: 5616046 - DNA, 25 bp, Homo sapien
cggcggtccctattggatctggtgc

SEQ ID NO: 5616047 - DNA, 25 bp, Homo sapien
gcccactccagtgtgatctgcaccc

SEQ ID NO: 5616048 - DNA, 25 bp, Homo sapien
aaaccccagccgttgctccccattc

SEQ ID NO: 5616049 - DNA, 25 bp, Homo sapien
attcccgatcgcccttcactcctgg

SEQ ID NO: 5616050 - DNA, 25 bp, Homo sapien
ccaaacattccctgctgtggacagt

SEQ ID NO: 5616051 - DNA, 25 bp, Homo sapien
gaacagcccaccataatgcagagcc

SEQ ID NO: 5616052 - DNA, 25 bp, Homo sapien
cctaaccgtcttgagaagcggaacc

SEQ ID NO: 5616053 - DNA, 25 bp, Homo sapien
aatgctaacaatatggatggcagag

SEQ ID NO: 5616054 - DNA, 25 bp, Homo sapien
agagagaaacagtccctaaccgtct

SEQ ID NO: 5616055 - DNA, 25 bp, Homo sapien
cccaccataatgcagagccagaatt

SEQ ID NO: 5616056 - DNA, 25 bp, Homo sapien
tgctaacaatatggatggcagagcc

SEQ ID NO: 5616057 - DNA, 25 bp, Homo sapien
tggacagtgaacagcccaccataat

SEQ ID NO: 5616058 - DNA, 25 bp, Homo sapien
gcagagccagaattaggataatgct

SEQ ID NO: 5616059 - DNA, 25 bp, Homo sapien
taatgcagagccagaattaggataa

SEQ ID NO: 5616060 - DNA, 25 bp, Homo sapien
attccctgctgtggacagtgaacag

SEQ ID NO: 5616061 - DNA, 25 bp, Homo sapien
caacttaaataaagggccacaaaca

SEQ ID NO: 5616062 - DNA, 25 bp, Homo sapien
cacccaatggaggttttcgttgttg

SEQ ID NO: 5616063 - DNA, 25 bp, Homo sapien
ggcaaatgtcatgaagtcgatactg

SEQ ID NO: 5616064 - DNA, 25 bp, Homo sapien
ttcatttaaagtgtggctccaccca

SEQ ID NO: 5616065 - DNA, 25 bp, Homo sapien
cctggcttggtagcccccctcctca

SEQ ID NO: 5616066 - DNA, 25 bp, Homo sapien
caggcagcaaaggttcccatcatgg

SEQ ID NO: 5616067 - DNA, 25 bp, Homo sapien
cagcatatggagttagttaaaaata

SEQ ID NO: 5616068 - DNA, 25 bp, Homo sapien
gggctggaagtcaaatcaaagtcct

SEQ ID NO: 5616069 - DNA, 25 bp, Homo sapien
cccctcctcatgtggggctggaagt

SEQ ID NO: 5616070 - DNA, 25 bp, Homo sapien
cccatcatggcctggttagagggaa

SEQ ID NO: 5616071 - DNA, 25 bp, Homo sapien
catgaagtcgatactggcagcatat

SEQ ID NO: 5616072 - DNA, 25 bp, Homo sapien
caactacagggaacatcctagctgg

SEQ ID NO: 5616073 - DNA, 25 bp, Homo sapien
ttgcagcaagatggcattgagatca

SEQ ID NO: 5616074 - DNA, 25 bp, Homo sapien
taggcaatcaaagacgaggttctca

SEQ ID NO: 5616075 - DNA, 25 bp, Homo sapien
aggagattgggaatataggcaatca

SEQ ID NO: 5616076 - DNA, 25 bp, Homo sapien
agttgaatatggatgagcgcatgtt

SEQ ID NO: 5616077 - DNA, 25 bp, Homo sapien
gctcacctcgtgaaacgacagtccc

SEQ ID NO: 5616078 - DNA, 25 bp, Homo sapien
caagatttgcctgaagtggaaagag

SEQ ID NO: 5616079 - DNA, 25 bp, Homo sapien
attttgtgagtggcacagcagtcat

SEQ ID NO: 5616080 - DNA, 25 bp, Homo sapien
tgtagcatacaggcatccgcagaga

SEQ ID NO: 5616081 - DNA, 25 bp, Homo sapien
cagcagtcatcctgggaactgtgcc

SEQ ID NO: 5616082 - DNA, 25 bp, Homo sapien
ccgtcctgctgctggagtcagtcaa

SEQ ID NO: 5616083 - DNA, 25 bp, Homo sapien
cagcctgggtatgttggcagatttt

SEQ ID NO: 5616084 - DNA, 25 bp, Homo sapien
tctagtcttggtccaaaacactgga

SEQ ID NO: 5616085 - DNA, 25 bp, Homo sapien
ttgcgtatttaaagtctcaggaaat

SEQ ID NO: 5616086 - DNA, 25 bp, Homo sapien
acccccagccaaaacatccatattt

SEQ ID NO: 5616087 - DNA, 25 bp, Homo sapien
ggtttacattatgatgggggatggg

SEQ ID NO: 5616088 - DNA, 25 bp, Homo sapien
gaaaagcagcctgggtatgttggca

SEQ ID NO: 5616089 - DNA, 25 bp, Homo sapien
atggtttacattatgatgggggatg

SEQ ID NO: 5616090 - DNA, 25 bp, Homo sapien
agaatggtttacattatgatggggg

SEQ ID NO: 5616091 - DNA, 25 bp, Homo sapien
atttgtcttgcgtatttaaagtctc

SEQ ID NO: 5616092 - DNA, 25 bp, Homo sapien
catttgagtaacttgaagtagcagc

SEQ ID NO: 5616093 - DNA, 25 bp, Homo sapien
agtctcaggaaatctagtcttggtc

SEQ ID NO: 5616094 - DNA, 25 bp, Homo sapien
atagcagcttgggtccccctgaccc

SEQ ID NO: 5616095 - DNA, 25 bp, Homo sapien
gaaacaaggccacacataaaacaaa

SEQ ID NO: 5616096 - DNA, 25 bp, Homo sapien
ccttgtcagcaggtcgacaaagctg

SEQ ID NO: 5616097 - DNA, 25 bp, Homo sapien
gggacacaggaaaagatactccttc

SEQ ID NO: 5616098 - DNA, 25 bp, Homo sapien
caaaaagtactcaagtggctcccta

SEQ ID NO: 5616099 - DNA, 25 bp, Homo sapien
gaaaagcaccctgggtggatagcag

SEQ ID NO: 5616100 - DNA, 25 bp, Homo sapien
ccttcctggatgtcgccctcaagtc

SEQ ID NO: 5616101 - DNA, 25 bp, Homo sapien
cagtgaggacaaaggtctgattctg

SEQ ID NO: 5616102 - DNA, 25 bp, Homo sapien
actgcctgagaaacacgctggcatt

SEQ ID NO: 5616103 - DNA, 25 bp, Homo sapien
aaggcagaaagaataggtgcctctg

SEQ ID NO: 5616104 - DNA, 25 bp, Homo sapien
gcctggcattgaactgcaccctgtg

SEQ ID NO: 5616105 - DNA, 25 bp, Homo sapien
aggccttgatttgagacatgaaagc

SEQ ID NO: 5616106 - DNA, 25 bp, Homo sapien
gttcaagtagaaactgtggagagaa

SEQ ID NO: 5616107 - DNA, 25 bp, Homo sapien
atgaaagcatgaacaaggcagttta

SEQ ID NO: 5616108 - DNA, 25 bp, Homo sapien
ggagagaagacgaatccaatgtttt

SEQ ID NO: 5616109 - DNA, 25 bp, Homo sapien
ctgtaattggccaagtcacatgatt

SEQ ID NO: 5616110 - DNA, 25 bp, Homo sapien
accttacaaatctgggacactggcc

SEQ ID NO: 5616111 - DNA, 25 bp, Homo sapien
aaaacctaattgcaagccaacacat

SEQ ID NO: 5616112 - DNA, 25 bp, Homo sapien
atataggcaaccttccccaaaagtg

SEQ ID NO: 5616113 - DNA, 25 bp, Homo sapien
agacacactgtatgcacactgtacc

SEQ ID NO: 5616114 - DNA, 25 bp, Homo sapien
cccaaaagtgggcttctgaaaataa

SEQ ID NO: 5616115 - DNA, 25 bp, Homo sapien
tattaaaggaatagttgaacagatt

SEQ ID NO: 5616116 - DNA, 25 bp, Homo sapien
gcattggacttgacctgggtgttgg

SEQ ID NO: 5616117 - DNA, 25 bp, Homo sapien
ctacctgcattggacttgacctggg

SEQ ID NO: 5616118 - DNA, 25 bp, Homo sapien
gttgggtgagtagcaatctgttact

SEQ ID NO: 5616119 - DNA, 25 bp, Homo sapien
gaaattgaaggatttgctgttattc

SEQ ID NO: 5616120 - DNA, 25 bp, Homo sapien
gggtgagtagcaatctgttactgtt

SEQ ID NO: 5616121 - DNA, 25 bp, Homo sapien
tgcattggacttgacctgggtgttg

SEQ ID NO: 5616122 - DNA, 25 bp, Homo sapien
gctgttattcctacctgcattggac

SEQ ID NO: 5616123 - DNA, 25 bp, Homo sapien
tgttaagatttttaagagcagaatc

SEQ ID NO: 5616124 - DNA, 25 bp, Homo sapien
ggctggtcttggtgatccacccgcc

SEQ ID NO: 5616125 - DNA, 25 bp, Homo sapien
ttaagagcagaatcaagaaattgaa

SEQ ID NO: 5616126 - DNA, 25 bp, Homo sapien
atcaagaaattgaaggatttgctgt

SEQ ID NO: 5616127 - DNA, 25 bp, Homo sapien
ctcagaccaaagtttataagacaca

SEQ ID NO: 5616128 - DNA, 25 bp, Homo sapien
gtggacccagtatgtaaaaggcaac

SEQ ID NO: 5616129 - DNA, 25 bp, Homo sapien
tataagacacactgaagcacaattt

SEQ ID NO: 5616130 - DNA, 25 bp, Homo sapien
aaggactagcagaatagcctgccac

SEQ ID NO: 5616131 - DNA, 25 bp, Homo sapien
tatagcacagtccttatgtggaccc

SEQ ID NO: 5616132 - DNA, 25 bp, Homo sapien
tttgaactaaagcatgtgaagagca

SEQ ID NO: 5616133 - DNA, 25 bp, Homo sapien
ccaggacactatatgtgatgttgac

SEQ ID NO: 5616134 - DNA, 25 bp, Homo sapien
atgtgaagagcatgctttggagaga

SEQ ID NO: 5616135 - DNA, 25 bp, Homo sapien
gagttgcagcctgaccaggacacta

SEQ ID NO: 5616136 - DNA, 25 bp, Homo sapien
gcctgccacgcagcaatcagatata

SEQ ID NO: 5616137 - DNA, 25 bp, Homo sapien
agccactacagtcagccctttctct

SEQ ID NO: 5616138 - DNA, 25 bp, Homo sapien
ggtaccgattctagtgaggaatttc

SEQ ID NO: 5616139 - DNA, 25 bp, Homo sapien
gcacctagatgtgcaaatggggaga

SEQ ID NO: 5616140 - DNA, 25 bp, Homo sapien
cagaagcgagccgacttcagttctc

SEQ ID NO: 5616141 - DNA, 25 bp, Homo sapien
gtattatgtggaaaggtcacaaggc

SEQ ID NO: 5616142 - DNA, 25 bp, Homo sapien
acaggcagaaacgactgtaagctgt

SEQ ID NO: 5616143 - DNA, 25 bp, Homo sapien
agtttcagatggtgatttgagggca

SEQ ID NO: 5616144 - DNA, 25 bp, Homo sapien
tgaacactcagtaagggatttgcta

SEQ ID NO: 5616145 - DNA, 25 bp, Homo sapien
tggctagggccaaataatctggcac

SEQ ID NO: 5616146 - DNA, 25 bp, Homo sapien
tgaagtcactgagtggtaccgattc

SEQ ID NO: 5616147 - DNA, 25 bp, Homo sapien
tgtaagctgtcaggccatccttggc

SEQ ID NO: 5616148 - DNA, 25 bp, Homo sapien
agaaaccttaggaagtcagtgcaga

SEQ ID NO: 5616149 - DNA, 25 bp, Homo sapien
cctaactattgtgactcgtgcacac

SEQ ID NO: 5616150 - DNA, 25 bp, Homo sapien
gtgtgcacgagtcacaatagttagg

SEQ ID NO: 5616151 - DNA, 25 bp, Homo sapien
aatgctgtgatgccagtaaagccta

SEQ ID NO: 5616152 - DNA, 25 bp, Homo sapien
aattactgaaaaatgctgtgatgcc

SEQ ID NO: 5616153 - DNA, 25 bp, Homo sapien
atacattacttctgaacgagcattt

SEQ ID NO: 5616154 - DNA, 25 bp, Homo sapien
gaaatccaagatgctaagaaatcta

SEQ ID NO: 5616155 - DNA, 25 bp, Homo sapien
tctaactctaaactatacacgctat

SEQ ID NO: 5616156 - DNA, 25 bp, Homo sapien
caacctcccaagcaaccagcattac

SEQ ID NO: 5616157 - DNA, 25 bp, Homo sapien
tcctaatggataaaatctctaactc

SEQ ID NO: 5616158 - DNA, 25 bp, Homo sapien
tacacgctatgttacagcaagtctt

SEQ ID NO: 5616159 - DNA, 25 bp, Homo sapien
accagcattacagagatgagcagct

SEQ ID NO: 5616160 - DNA, 25 bp, Homo sapien
gaacgagcatttttcaatgaaatcc

SEQ ID NO: 5616161 - DNA, 25 bp, Homo sapien
acagggtctcaatccgtctcccaga

SEQ ID NO: 5616162 - DNA, 25 bp, Homo sapien
tcaaatactaagcaaaacgaacaaa

SEQ ID NO: 5616163 - DNA, 25 bp, Homo sapien
atttcaaatactaagcaaaacgaac

SEQ ID NO: 5616164 - DNA, 25 bp, Homo sapien
atgtatttatagtcctgtcagtcta

SEQ ID NO: 5616165 - DNA, 25 bp, Homo sapien
tacttgtacaggttatggccagaaa

SEQ ID NO: 5616166 - DNA, 25 bp, Homo sapien
ctctcacaacctaactaaaaagata

SEQ ID NO: 5616167 - DNA, 25 bp, Homo sapien
ttaagacaagcaatacaacagaaag

SEQ ID NO: 5616168 - DNA, 25 bp, Homo sapien
taaaaacagatggctataatctata

SEQ ID NO: 5616169 - DNA, 25 bp, Homo sapien
aagcaatacaacagaaagaaaaatg

SEQ ID NO: 5616170 - DNA, 25 bp, Homo sapien
acaaatacttgtacaggttatggcc

SEQ ID NO: 5616171 - DNA, 25 bp, Homo sapien
gacaagcaatacaacagaaagaaaa

SEQ ID NO: 5616172 - DNA, 25 bp, Homo sapien
cagggcactctaagtcagggttccc

SEQ ID NO: 5616173 - DNA, 25 bp, Homo sapien
ccattggcttattccttgaaagagg

SEQ ID NO: 5616174 - DNA, 25 bp, Homo sapien
tctggagactgtcccacccgaaatc

SEQ ID NO: 5616175 - DNA, 25 bp, Homo sapien
tctggagactggtcccactcgaaat

SEQ ID NO: 5616176 - DNA, 25 bp, Homo sapien
tgtctctggagactgtcccacccga

SEQ ID NO: 5616177 - DNA, 25 bp, Homo sapien
caccatgtctggccagcgactaatt

SEQ ID NO: 5616178 - DNA, 25 bp, Homo sapien
cactcgaaatcattcttgaggcaga

SEQ ID NO: 5616179 - DNA, 25 bp, Homo sapien
tctggccagcgactaattttttaaa

SEQ ID NO: 5616180 - DNA, 25 bp, Homo sapien
gtctctggagactggtcccactcga

SEQ ID NO: 5616181 - DNA, 25 bp, Homo sapien
gcttattccttgaaagaggatctcc

SEQ ID NO: 5616182 - DNA, 25 bp, Homo sapien
tggagactggtcccactcgaaatca

SEQ ID NO: 5616183 - DNA, 25 bp, Homo sapien
agactggtcccactcgaaatcattc

SEQ ID NO: 5616184 - DNA, 25 bp, Homo sapien
taggctaaaggatatacatacaact

SEQ ID NO: 5616185 - DNA, 25 bp, Homo sapien
cagaatagttcaagataggctaaag

SEQ ID NO: 5616186 - DNA, 25 bp, Homo sapien
gttcaagataggctaaaggatatac

SEQ ID NO: 5616187 - DNA, 25 bp, Homo sapien
gaaggtgtttagaagctacagaata

SEQ ID NO: 5616188 - DNA, 25 bp, Homo sapien
tactctttatcaaggaaggtgttta

SEQ ID NO: 5616189 - DNA, 25 bp, Homo sapien
ataaaaagctcttgtaagaaggaaa

SEQ ID NO: 5616190 - DNA, 25 bp, Homo sapien
ccacaggcgaagattgcattttagt

SEQ ID NO: 5616191 - DNA, 25 bp, Homo sapien
tatcatgtatgtgaccattaaaaac

SEQ ID NO: 5616192 - DNA, 25 bp, Homo sapien
aaaatacatgaatcacctcttgttc

SEQ ID NO: 5616193 - DNA, 25 bp, Homo sapien
actctgcaccagaattcagaagtcc

SEQ ID NO: 5616194 - DNA, 25 bp, Homo sapien
cagaattcagaagtccattgaccat

SEQ ID NO: 5616195 - DNA, 25 bp, Homo sapien
tcccactcccaacaggaattgagaa

SEQ ID NO: 5616196 - DNA, 25 bp, Homo sapien
tcccaacaggaattgagaaagggac

SEQ ID NO: 5616197 - DNA, 25 bp, Homo sapien
ttgggcacttttgtcctccttccta

SEQ ID NO: 5616198 - DNA, 25 bp, Homo sapien
atcactgtcacccaattctaatccc

SEQ ID NO: 5616199 - DNA, 25 bp, Homo sapien
ctgaaactactaatcactgtcaccc

SEQ ID NO: 5616200 - DNA, 25 bp, Homo sapien
caaattgtccagatttgaccaatgc

SEQ ID NO: 5616201 - DNA, 25 bp, Homo sapien
tacatttactagctggcattatttc

SEQ ID NO: 5616202 - DNA, 25 bp, Homo sapien
cttttgaattgggaagagatacttc

SEQ ID NO: 5616203 - DNA, 25 bp, Homo sapien
cctattggccttctggttcctaccc

SEQ ID NO: 5616204 - DNA, 25 bp, Homo sapien
cattatttcattgaagaagaactcc

SEQ ID NO: 5616205 - DNA, 25 bp, Homo sapien
gatttgaccaatgcagtctttgtta

SEQ ID NO: 5616206 - DNA, 25 bp, Homo sapien
cttaagacgtagtgaaaggaaatga

SEQ ID NO: 5616207 - DNA, 25 bp, Homo sapien
ctttggcataaagtccgtgtgtgga

SEQ ID NO: 5616208 - DNA, 25 bp, Homo sapien
aagcaagagtaatacaaaaccctta

SEQ ID NO: 5616209 - DNA, 25 bp, Homo sapien
tattcacaggtacaatgacacacca

SEQ ID NO: 5616210 - DNA, 25 bp, Homo sapien
cataactctaccacagaaatcttgc

SEQ ID NO: 5616211 - DNA, 25 bp, Homo sapien
ttatattgccccgtctggagagcag

SEQ ID NO: 5616212 - DNA, 25 bp, Homo sapien
agaaccttttcagtacagcttagtc

SEQ ID NO: 5616213 - DNA, 25 bp, Homo sapien
agtccgtgtgtggaagacatacata

SEQ ID NO: 5616214 - DNA, 25 bp, Homo sapien
actgttgtcagtgggcttctcttac

SEQ ID NO: 5616215 - DNA, 25 bp, Homo sapien
ttaagcagatcctcacatcccagcc

SEQ ID NO: 5616216 - DNA, 25 bp, Homo sapien
tttgttgcacttatggatttcactc

SEQ ID NO: 5616217 - DNA, 25 bp, Homo sapien
atacacacactgggaactacatttc

SEQ ID NO: 5616218 - DNA, 25 bp, Homo sapien
taaaaggatgaacagaaaaactgct

SEQ ID NO: 5616219 - DNA, 25 bp, Homo sapien
aagaacctagaggcccatcaacagg

SEQ ID NO: 5616220 - DNA, 25 bp, Homo sapien
aacatgggctgtggtacccagtttc

SEQ ID NO: 5616221 - DNA, 25 bp, Homo sapien
agggggactgtatgaattatggtac

SEQ ID NO: 5616222 - DNA, 25 bp, Homo sapien
atacaatggatatcacaaagcagtg

SEQ ID NO: 5616223 - DNA, 25 bp, Homo sapien
cagtgaaaaaaatgaggtagatctt

SEQ ID NO: 5616224 - DNA, 25 bp, Homo sapien
ctccaagacactgaaaaaagcaagg

SEQ ID NO: 5616225 - DNA, 25 bp, Homo sapien
atgagatcagaaacaacacaatagt

SEQ ID NO: 5616226 - DNA, 25 bp, Homo sapien
aaagcaaggtgtagactgtatccta

SEQ ID NO: 5616227 - DNA, 25 bp, Homo sapien
taaagaacgcaaataagccagtcac

SEQ ID NO: 5616228 - DNA, 25 bp, Homo sapien
cgcccgtcttcttcgccagcccgtc

SEQ ID NO: 5616229 - DNA, 25 bp, Homo sapien
tcctgtgcaaacctgaagctgcggt

SEQ ID NO: 5616230 - DNA, 25 bp, Homo sapien
gtctagggttcgtggctcactctct

SEQ ID NO: 5616231 - DNA, 25 bp, Homo sapien
ccgcagacgccttcggcttctccgc

SEQ ID NO: 5616232 - DNA, 25 bp, Homo sapien
ggttcaagtcgcccctggccacctg

SEQ ID NO: 5616233 - DNA, 25 bp, Homo sapien
catccctgaccgccagggttgccct

SEQ ID NO: 5616234 - DNA, 25 bp, Homo sapien
gccagcccgtccccaactttccgca

SEQ ID NO: 5616235 - DNA, 25 bp, Homo sapien
cctggcgcactccagggtctagggt

SEQ ID NO: 5616236 - DNA, 25 bp, Homo sapien
acatagcagcgatcaaaatcatccc

SEQ ID NO: 5616237 - DNA, 25 bp, Homo sapien
tagggcatgcagtagacgtttaata

SEQ ID NO: 5616238 - DNA, 25 bp, Homo sapien
gggttgccctggagacctctgatag

SEQ ID NO: 5616239 - DNA, 25 bp, Homo sapien
ccctaactcccaatgctgaacttaa

SEQ ID NO: 5616240 - DNA, 25 bp, Homo sapien
gcaaagttcacagcactctcaaaac

SEQ ID NO: 5616241 - DNA, 25 bp, Homo sapien
ttttaagttcactgtgggcagggac

SEQ ID NO: 5616242 - DNA, 25 bp, Homo sapien
gcacccggacacaggtctgtttcct

SEQ ID NO: 5616243 - DNA, 25 bp, Homo sapien
tttctgtgcaaagttcacagcactc

SEQ ID NO: 5616244 - DNA, 25 bp, Homo sapien
ttcatttccagctcaggccttccct

SEQ ID NO: 5616245 - DNA, 25 bp, Homo sapien
taaagctgctcttccgtaagcaaat

SEQ ID NO: 5616246 - DNA, 25 bp, Homo sapien
tccccacatgagtccatgccacccc

SEQ ID NO: 5616247 - DNA, 25 bp, Homo sapien
caaccctagttcaaggttatctgtg

SEQ ID NO: 5616248 - DNA, 25 bp, Homo sapien
ttgtattccccacatgagtccatgc

SEQ ID NO: 5616249 - DNA, 25 bp, Homo sapien
cccaatgctgaacttaaactctctc

SEQ ID NO: 5616250 - DNA, 25 bp, Homo sapien
tttatgcccctcctaagaacaggct

SEQ ID NO: 5616251 - DNA, 25 bp, Homo sapien
tatgacttagatgatgctccctgtt

SEQ ID NO: 5616252 - DNA, 25 bp, Homo sapien
agttaaccctgggaagcagctgtga

SEQ ID NO: 5616253 - DNA, 25 bp, Homo sapien
atggagtaggtagttaaccctggga

SEQ ID NO: 5616254 - DNA, 25 bp, Homo sapien
caagagcagcttactgcaaagaatc

SEQ ID NO: 5616255 - DNA, 25 bp, Homo sapien
ttaggtatcacaaagccacaaactc

SEQ ID NO: 5616256 - DNA, 25 bp, Homo sapien
gtgcctgaggtttgtcccacccaca

SEQ ID NO: 5616257 - DNA, 25 bp, Homo sapien
tcagcctaatggaagagatgtgtag

SEQ ID NO: 5616258 - DNA, 25 bp, Homo sapien
agctgtgatgaaagaaatccccctt

SEQ ID NO: 5616259 - DNA, 25 bp, Homo sapien
tctgatcagggatctgatttagtcc

SEQ ID NO: 5616260 - DNA, 25 bp, Homo sapien
acagcctgagtcaacattcaacccc

SEQ ID NO: 5616261 - DNA, 25 bp, Homo sapien
tgtgtgacagatcttaggaactgac

SEQ ID NO: 5616262 - DNA, 25 bp, Homo sapien
aagtgtctgagctttgtgggagtaa

SEQ ID NO: 5616263 - DNA, 25 bp, Homo sapien
ggtccgtgagccactgcgtttgaat

SEQ ID NO: 5616264 - DNA, 25 bp, Homo sapien
cagcagataattacccgaatatgtc

SEQ ID NO: 5616265 - DNA, 25 bp, Homo sapien
catataaactacagtgtcaagagac

SEQ ID NO: 5616266 - DNA, 25 bp, Homo sapien
ttctgaaggcaaacagcccagtctg

SEQ ID NO: 5616267 - DNA, 25 bp, Homo sapien
gtgggagtaatccaaaaggaagcta

SEQ ID NO: 5616268 - DNA, 25 bp, Homo sapien
caagagacacttatgctatccgcac

SEQ ID NO: 5616269 - DNA, 25 bp, Homo sapien
ccgcaccacaacctcgctgtgtgac

SEQ ID NO: 5616270 - DNA, 25 bp, Homo sapien
cgtttctcaaagtggggtccgtgag

SEQ ID NO: 5616271 - DNA, 25 bp, Homo sapien
aaggaagctatttcacctgcaagtc

SEQ ID NO: 5616272 - DNA, 25 bp, Homo sapien
acctgcaagtcctctgacgctctga

SEQ ID NO: 5616273 - DNA, 25 bp, Homo sapien
cacaaaattcacaacccccatcggt

SEQ ID NO: 5616274 - DNA, 25 bp, Homo sapien
agacggcttcaaacactcaagttac

SEQ ID NO: 5616275 - DNA, 25 bp, Homo sapien
gttgaacgagacggcttcaaacact

SEQ ID NO: 5616276 - DNA, 25 bp, Homo sapien
gaacgagacggcttcaaacactcaa

SEQ ID NO: 5616277 - DNA, 25 bp, Homo sapien
ctaaatcctcagtgaacaacgtctc

SEQ ID NO: 5616278 - DNA, 25 bp, Homo sapien
caacccccatcggttgaacgagacg

SEQ ID NO: 5616279 - DNA, 25 bp, Homo sapien
tcaaacactcaagttacgctctccc

SEQ ID NO: 5616280 - DNA, 25 bp, Homo sapien
ctctgacgctctgaacacaaaattc

SEQ ID NO: 5616281 - DNA, 25 bp, Homo sapien
aaatcctcagtgaacaacgtctccc

SEQ ID NO: 5616282 - DNA, 25 bp, Homo sapien
ttacgctctcccttgctaaatcctc

SEQ ID NO: 5616283 - DNA, 25 bp, Homo sapien
tagaatggtcccctcttggacttcc

SEQ ID NO: 5616284 - DNA, 25 bp, Homo sapien
cctgttacatgcctagctcaataag

SEQ ID NO: 5616285 - DNA, 25 bp, Homo sapien
ttttggtcagcttgcaatgcccttt

SEQ ID NO: 5616286 - DNA, 25 bp, Homo sapien
cagattctataaggggttcacaacc

SEQ ID NO: 5616287 - DNA, 25 bp, Homo sapien
ctgtaagcccaacaatgctttaggc

SEQ ID NO: 5616288 - DNA, 25 bp, Homo sapien
acctactctcatgctccagagagcc

SEQ ID NO: 5616289 - DNA, 25 bp, Homo sapien
aggctaaacagactaaactttatgc

SEQ ID NO: 5616290 - DNA, 25 bp, Homo sapien
acaaaatccacagctttcatcagat

SEQ ID NO: 5616291 - DNA, 25 bp, Homo sapien
atagaaataacttgggaaaagtata

SEQ ID NO: 5616292 - DNA, 25 bp, Homo sapien
tatgctaaaccgtgtgaaaatggac

SEQ ID NO: 5616293 - DNA, 25 bp, Homo sapien
taaaccgtgtgaaaatggacaagtg

SEQ ID NO: 5616294 - DNA, 25 bp, Homo sapien
acgatattgtttgtcaggtggaggg

SEQ ID NO: 5616295 - DNA, 25 bp, Homo sapien
caggtggagggccactatctatact

SEQ ID NO: 5616296 - DNA, 25 bp, Homo sapien
gttcacatgttggtggttgccaccc

SEQ ID NO: 5616297 - DNA, 25 bp, Homo sapien
ctccattgtgtgggcttccattagt

SEQ ID NO: 5616298 - DNA, 25 bp, Homo sapien
aagtgaaaccagaaaaaggatgcaa

SEQ ID NO: 5616299 - DNA, 25 bp, Homo sapien
tattcgcaagtgtgctggctgtaat

SEQ ID NO: 5616300 - DNA, 25 bp, Homo sapien
tgccacccatgcagacagtgacaat

SEQ ID NO: 5616301 - DNA, 25 bp, Homo sapien
cccagtaagtgtcaacgtgattttc

SEQ ID NO: 5616302 - DNA, 25 bp, Homo sapien
aaggtgatgtaaccgtcagagtgac

SEQ ID NO: 5616303 - DNA, 25 bp, Homo sapien
gaaaaaggatgcaacgagtaaatat

SEQ ID NO: 5616304 - DNA, 25 bp, Homo sapien
aaatattaaaagtagtgctcagttt

SEQ ID NO: 5616305 - DNA, 25 bp, Homo sapien
gattagaaggattatgactattttg

SEQ ID NO: 5616306 - DNA, 25 bp, Homo sapien
caaaatagtcataatccttctaatc

SEQ ID NO: 5616307 - DNA, 25 bp, Homo sapien
ttaaatacctcagaaactagttata

SEQ ID NO: 5616308 - DNA, 25 bp, Homo sapien
aaaccaaaacaatgttgagagaaaa

SEQ ID NO: 5616309 - DNA, 25 bp, Homo sapien
ccaaaacaatgttgagagaaaagta

SEQ ID NO: 5616310 - DNA, 25 bp, Homo sapien
aaaacaatgttgagagaaaagtata

SEQ ID NO: 5616311 - DNA, 25 bp, Homo sapien
aaatacctcagaaactagttatatc

SEQ ID NO: 5616312 - DNA, 25 bp, Homo sapien
cctcagaaactagttatatcaaaag

SEQ ID NO: 5616313 - DNA, 25 bp, Homo sapien
accaaaacaatgttgagagaaaagt

SEQ ID NO: 5616314 - DNA, 25 bp, Homo sapien
aatgagccaaaagcttaatattttt

SEQ ID NO: 5616315 - DNA, 25 bp, Homo sapien
aaacaatgttgagagaaaagtatac

SEQ ID NO: 5616316 - DNA, 25 bp, Homo sapien
cctaaataaaccaaaacaatgttga

SEQ ID NO: 5616317 - DNA, 25 bp, Homo sapien
ataaaccaaaacaatgttgagagaa

SEQ ID NO: 5616318 - DNA, 25 bp, Homo sapien
agccttgccttcaaaaagaggtccc

SEQ ID NO: 5616319 - DNA, 25 bp, Homo sapien
tactgtgtgttacagccctgaaggg

SEQ ID NO: 5616320 - DNA, 25 bp, Homo sapien
ggtccccagggcctgtagcatttcc

SEQ ID NO: 5616321 - DNA, 25 bp, Homo sapien
gggacatgctgctcgtactgtgtgt

SEQ ID NO: 5616322 - DNA, 25 bp, Homo sapien
agtgagttctctaaaaatatgggga

SEQ ID NO: 5616323 - DNA, 25 bp, Homo sapien
aattgtatgctaaaatatggctgtt

SEQ ID NO: 5616324 - DNA, 25 bp, Homo sapien
tgtgcaatccatgatatcaggttag

SEQ ID NO: 5616325 - DNA, 25 bp, Homo sapien
ataatagcaagtactagtaggtaat

SEQ ID NO: 5616326 - DNA, 25 bp, Homo sapien
atcaggttagtgaacaaatggaata

SEQ ID NO: 5616327 - DNA, 25 bp, Homo sapien
tagtgaacaaatggaatagagtttc

SEQ ID NO: 5616328 - DNA, 25 bp, Homo sapien
tactagtaggtaatgtttgatgaat

SEQ ID NO: 5616329 - DNA, 25 bp, Homo sapien
tgagaaacacagaatcctggaccca

SEQ ID NO: 5616330 - DNA, 25 bp, Homo sapien
acagaatcctggacccactcagacc

SEQ ID NO: 5616331 - DNA, 25 bp, Homo sapien
agtgtggttcatagactgaccccat

SEQ ID NO: 5616332 - DNA, 25 bp, Homo sapien
ggggaggattccagaatgttcagaa

SEQ ID NO: 5616333 - DNA, 25 bp, Homo sapien
aggtggaatgtgctaaagagtacat

SEQ ID NO: 5616334 - DNA, 25 bp, Homo sapien
catagactgaccccatcagcatcac

SEQ ID NO: 5616335 - DNA, 25 bp, Homo sapien
tgctaaagagtacatagcacgggga

SEQ ID NO: 5616336 - DNA, 25 bp, Homo sapien
cagaaagtactagaatattgagaaa

SEQ ID NO: 5616337 - DNA, 25 bp, Homo sapien
gaatattgagaaagtcctagaacct

SEQ ID NO: 5616338 - DNA, 25 bp, Homo sapien
ctggttgctccagtgtggttcatag

SEQ ID NO: 5616339 - DNA, 25 bp, Homo sapien
gagaaagtcctagaacctggttgct

SEQ ID NO: 5616340 - DNA, 25 bp, Homo sapien
acaaaggaaaaggcccatacagtta

SEQ ID NO: 5616341 - DNA, 25 bp, Homo sapien
ttcatgacaaggaatcatgtgacca

SEQ ID NO: 5616342 - DNA, 25 bp, Homo sapien
tgtttggggtatgacagtataaaaa

SEQ ID NO: 5616343 - DNA, 25 bp, Homo sapien
taaatgtgtggcagtctcaaattct

SEQ ID NO: 5616344 - DNA, 25 bp, Homo sapien
aacaaggcctgaataaatgtgtggc

SEQ ID NO: 5616345 - DNA, 25 bp, Homo sapien
aagagtgaagagcagccttcatgac

SEQ ID NO: 5616346 - DNA, 25 bp, Homo sapien
tacatactaaagatagtgggatcat

SEQ ID NO: 5616347 - DNA, 25 bp, Homo sapien
ttgtagatttctagcagactggtac

SEQ ID NO: 5616348 - DNA, 25 bp, Homo sapien
aaaaagtgacaatgtttggggtatg

SEQ ID NO: 5616349 - DNA, 25 bp, Homo sapien
tggaggaagggaacctattatgtca

SEQ ID NO: 5616350 - DNA, 25 bp, Homo sapien
gcagactggtacattaaaaagtgac

SEQ ID NO: 5616351 - DNA, 25 bp, Homo sapien
ggactttaggttgacatgtaacttc

SEQ ID NO: 5616352 - DNA, 25 bp, Homo sapien
acttgcccaatgtcccacagctagc

SEQ ID NO: 5616353 - DNA, 25 bp, Homo sapien
ctgatgatgccggcttcttactaag

SEQ ID NO: 5616354 - DNA, 25 bp, Homo sapien
gaagaaaccaagactacagaggttg

SEQ ID NO: 5616355 - DNA, 25 bp, Homo sapien
actgaaccctcccaactatcccaca

SEQ ID NO: 5616356 - DNA, 25 bp, Homo sapien
agatggactttaggttgacatgtaa

SEQ ID NO: 5616357 - DNA, 25 bp, Homo sapien
agtcctccctacagagagggcagct

SEQ ID NO: 5616358 - DNA, 25 bp, Homo sapien
tgccggcttcttactaagcacctac

SEQ ID NO: 5616359 - DNA, 25 bp, Homo sapien
cagcttctgctttcgcaatgtgttc

SEQ ID NO: 5616360 - DNA, 25 bp, Homo sapien
actatcccacagaatgggtactatt

SEQ ID NO: 5616361 - DNA, 25 bp, Homo sapien
ttacctgagcccatacttcagcttc

SEQ ID NO: 5616362 - DNA, 25 bp, Homo sapien
taaagccgctagtgataagtcgctt

SEQ ID NO: 5616363 - DNA, 25 bp, Homo sapien
aatagcagagtaagtgaatattgcc

SEQ ID NO: 5616364 - DNA, 25 bp, Homo sapien
caggctactaagagaacactgcttc

SEQ ID NO: 5616365 - DNA, 25 bp, Homo sapien
caaaattaatgttgagaagtgccct

SEQ ID NO: 5616366 - DNA, 25 bp, Homo sapien
acatatcaaggaaagttgagctgtc

SEQ ID NO: 5616367 - DNA, 25 bp, Homo sapien
gtggacacaacgatatagaagctca

SEQ ID NO: 5616368 - DNA, 25 bp, Homo sapien
tcgctttgagaagtgttcaggctac

SEQ ID NO: 5616369 - DNA, 25 bp, Homo sapien
atctacagtaatgaaaaagagcagt

SEQ ID NO: 5616370 - DNA, 25 bp, Homo sapien
gttgagctgtctgtaggaaaacaat

SEQ ID NO: 5616371 - DNA, 25 bp, Homo sapien
tgaatattgccaggtatgaacagcc

SEQ ID NO: 5616372 - DNA, 25 bp, Homo sapien
acagccttaaaaagtgaggtggaca

SEQ ID NO: 5616373 - DNA, 25 bp, Homo sapien
agatgttgaaacactgaacgactac

SEQ ID NO: 5616374 - DNA, 25 bp, Homo sapien
ggaaccctcctaaaggaatagctgc

SEQ ID NO: 5616375 - DNA, 25 bp, Homo sapien
ctggaactacaggctgtatcaattt

SEQ ID NO: 5616376 - DNA, 25 bp, Homo sapien
acactgaacgactacaatggcaatc

SEQ ID NO: 5616377 - DNA, 25 bp, Homo sapien
tggctcaatcttgggtcaccgcaac

SEQ ID NO: 5616378 - DNA, 25 bp, Homo sapien
aggaatagctgcggccgcagaattt

SEQ ID NO: 5616379 - DNA, 25 bp, Homo sapien
attattcagagtgtgcaaggtaagc

SEQ ID NO: 5616380 - DNA, 25 bp, Homo sapien
cactgtgacagctaaacaatgacac

SEQ ID NO: 5616381 - DNA, 25 bp, Homo sapien
tatacattggagttaatgcagctta

SEQ ID NO: 5616382 - DNA, 25 bp, Homo sapien
gcaaggtaagctgtcaaaaactgtt

SEQ ID NO: 5616383 - DNA, 25 bp, Homo sapien
caatggcaatctagaatattctgat

SEQ ID NO: 5616384 - DNA, 25 bp, Homo sapien
accgcacccggtcctgtgttgtgat

SEQ ID NO: 5616385 - DNA, 25 bp, Homo sapien
gtaacacctctaacaggctggacac

SEQ ID NO: 5616386 - DNA, 25 bp, Homo sapien
actcggtgatacagccttgatggtg

SEQ ID NO: 5616387 - DNA, 25 bp, Homo sapien
ctcacactctgagccggatcctggc

SEQ ID NO: 5616388 - DNA, 25 bp, Homo sapien
aaggatggacactttcagaatgagc

SEQ ID NO: 5616389 - DNA, 25 bp, Homo sapien
gtctggcacccaggggtgctcagca

SEQ ID NO: 5616390 - DNA, 25 bp, Homo sapien
tcagaatgagcagatactcggtgat

SEQ ID NO: 5616391 - DNA, 25 bp, Homo sapien
ggctggacacagacggtttctcctg

SEQ ID NO: 5616392 - DNA, 25 bp, Homo sapien
tgcctagtctgaacccccggcctca

SEQ ID NO: 5616393 - DNA, 25 bp, Homo sapien
gtgtggacactgttgctcccgagca

SEQ ID NO: 5616394 - DNA, 25 bp, Homo sapien
gcatgcatggccctagtgaactgac

SEQ ID NO: 5616395 - DNA, 25 bp, Homo sapien
taaggcaaaagacaagcttgagctt

SEQ ID NO: 5616396 - DNA, 25 bp, Homo sapien
gattagggcaatgacttctagtctt

SEQ ID NO: 5616397 - DNA, 25 bp, Homo sapien
ggagttcccctaagatgtctagacc

SEQ ID NO: 5616398 - DNA, 25 bp, Homo sapien
ctgcagatatctcccgaggtgttgt

SEQ ID NO: 5616399 - DNA, 25 bp, Homo sapien
actggtgccttgaagttggtgtcaa

SEQ ID NO: 5616400 - DNA, 25 bp, Homo sapien
gaaataaagtaagatgagatggtct

SEQ ID NO: 5616401 - DNA, 25 bp, Homo sapien
tgtctagaccagtgtaacagtcgtc

SEQ ID NO: 5616402 - DNA, 25 bp, Homo sapien
ggaatcaagagaacagtcgtaagta

SEQ ID NO: 5616403 - DNA, 25 bp, Homo sapien
taatggctgaattagcactgactgc

SEQ ID NO: 5616404 - DNA, 25 bp, Homo sapien
actgagagttgaagtataaacattt

SEQ ID NO: 5616405 - DNA, 25 bp, Homo sapien
cacacatgtttagacacaggggagg

SEQ ID NO: 5616406 - DNA, 25 bp, Homo sapien
gctgccacctgtgggaaaagatgga

SEQ ID NO: 5616407 - DNA, 25 bp, Homo sapien
ctggggcactttgtaacagctacct

SEQ ID NO: 5616408 - DNA, 25 bp, Homo sapien
tacccaccacaggtgggcaccccga

SEQ ID NO: 5616409 - DNA, 25 bp, Homo sapien
gggtctctgctggggcactttgtaa

SEQ ID NO: 5616410 - DNA, 25 bp, Homo sapien
aacagctacctaactacccaccaca

SEQ ID NO: 5616411 - DNA, 25 bp, Homo sapien
ttggcagctgccacctgtgggaaaa

SEQ ID NO: 5616412 - DNA, 25 bp, Homo sapien
aaagatggaagaataaaagttagtc

SEQ ID NO: 5616413 - DNA, 25 bp, Homo sapien
gaccaatatggtgaaaacctgtcta

SEQ ID NO: 5616414 - DNA, 25 bp, Homo sapien
ctcactgtgggtattcccccatttc

SEQ ID NO: 5616415 - DNA, 25 bp, Homo sapien
aatgcttcttgttggcagctgccac

SEQ ID NO: 5616416 - DNA, 25 bp, Homo sapien
agcctgaccaatatggtgaaaacct

SEQ ID NO: 5616417 - DNA, 25 bp, Homo sapien
tcaaagaagcctgacctgtgtgatg

SEQ ID NO: 5616418 - DNA, 25 bp, Homo sapien
ccccacacttggcccaccaggaaac

SEQ ID NO: 5616419 - DNA, 25 bp, Homo sapien
accaggaaacctcagccactctctc

SEQ ID NO: 5616420 - DNA, 25 bp, Homo sapien
aggactctgcgaaactgcacggtct

SEQ ID NO: 5616421 - DNA, 25 bp, Homo sapien
taaatcaaagaagcctgacctgtgt

SEQ ID NO: 5616422 - DNA, 25 bp, Homo sapien
gtgcccggccctccagtctaaggta

SEQ ID NO: 5616423 - DNA, 25 bp, Homo sapien
cttggctcttgacttgcaagcacac

SEQ ID NO: 5616424 - DNA, 25 bp, Homo sapien
gctcttgacttgcaagcacacatgc

SEQ ID NO: 5616425 - DNA, 25 bp, Homo sapien
ccaccaggaaacctcagccactctc

SEQ ID NO: 5616426 - DNA, 25 bp, Homo sapien
ggactctgcgaaactgcacggtctc

SEQ ID NO: 5616427 - DNA, 25 bp, Homo sapien
tctctcccttggctcttgacttgca

SEQ ID NO: 5616428 - DNA, 25 bp, Homo sapien
gtaactggtgactctcaaaggactc

SEQ ID NO: 5616429 - DNA, 25 bp, Homo sapien
cagagagtggaccagtaactggtga

SEQ ID NO: 5616430 - DNA, 25 bp, Homo sapien
ctagtagccacatcggaaaagaaaa

SEQ ID NO: 5616431 - DNA, 25 bp, Homo sapien
atgcaaactcagtctagagcagcac

SEQ ID NO: 5616432 - DNA, 25 bp, Homo sapien
ctctagacagttacacctcatgcaa

SEQ ID NO: 5616433 - DNA, 25 bp, Homo sapien
aggctaaacgcatactcctgggctc

SEQ ID NO: 5616434 - DNA, 25 bp, Homo sapien
taaaagaagtaaaatgtgagccatg

SEQ ID NO: 5616435 - DNA, 25 bp, Homo sapien
tcagcagtttatagggagattttgt

SEQ ID NO: 5616436 - DNA, 25 bp, Homo sapien
tatcctggtcgggtttatacttgcc

SEQ ID NO: 5616437 - DNA, 25 bp, Homo sapien
caaaggactctatcggttcaatctg

SEQ ID NO: 5616438 - DNA, 25 bp, Homo sapien
agagcagcactggctaaaagaagta

SEQ ID NO: 5616439 - DNA, 25 bp, Homo sapien
aaagatacatgggtggcaaatgtct

SEQ ID NO: 5616440 - DNA, 25 bp, Homo sapien
gttatatcatacggccagtggcttg

SEQ ID NO: 5616441 - DNA, 25 bp, Homo sapien
tctgtcgttaaatgctgtcacttac

SEQ ID NO: 5616442 - DNA, 25 bp, Homo sapien
gatattgctctgggacttctgtcgt

SEQ ID NO: 5616443 - DNA, 25 bp, Homo sapien
tttttcaggaaagatacatgggtgg

SEQ ID NO: 5616444 - DNA, 25 bp, Homo sapien
tataattgggcaactcaaatctttc

SEQ ID NO: 5616445 - DNA, 25 bp, Homo sapien
tcttaattggtgggactatttctac

SEQ ID NO: 5616446 - DNA, 25 bp, Homo sapien
tcacttactctgagggccaccaggc

SEQ ID NO: 5616447 - DNA, 25 bp, Homo sapien
atccttgcaaggctgagaatgtctt

SEQ ID NO: 5616448 - DNA, 25 bp, Homo sapien
tccctaggaatgtccaagaaggagc

SEQ ID NO: 5616449 - DNA, 25 bp, Homo sapien
atgtccaagaaggagctcttcccta

SEQ ID NO: 5616450 - DNA, 25 bp, Homo sapien
gtgtccgtgcccctaaaattgtccc

SEQ ID NO: 5616451 - DNA, 25 bp, Homo sapien
gggacaattttaggggcacggacac

SEQ ID NO: 5616452 - DNA, 25 bp, Homo sapien
cttggtaataagtatctggaaattc

SEQ ID NO: 5616453 - DNA, 25 bp, Homo sapien
agcttcactaaaggccagttcccat

SEQ ID NO: 5616454 - DNA, 25 bp, Homo sapien
aacctataagagtcagagaagctgt

SEQ ID NO: 5616455 - DNA, 25 bp, Homo sapien
ctgaactccagcttctgaccttacc

SEQ ID NO: 5616456 - DNA, 25 bp, Homo sapien
acatagtggtaaggttcagtggtaa

SEQ ID NO: 5616457 - DNA, 25 bp, Homo sapien
gaggcaggccacttaaaaatgatat

SEQ ID NO: 5616458 - DNA, 25 bp, Homo sapien
gtagacacattctctgaactccagc

SEQ ID NO: 5616459 - DNA, 25 bp, Homo sapien
ctacagaaaaacagtttccagaacc

SEQ ID NO: 5616460 - DNA, 25 bp, Homo sapien
ttcccatacctcaggaacgagcagc

SEQ ID NO: 5616461 - DNA, 25 bp, Homo sapien
aatatacattgaggcaggccactta

SEQ ID NO: 5616462 - DNA, 25 bp, Homo sapien
cccacaagcacaaccaaatgtacca

SEQ ID NO: 5616463 - DNA, 25 bp, Homo sapien
agctggtaaattccataacaggctg

SEQ ID NO: 5616464 - DNA, 25 bp, Homo sapien
tgcacccagcccattgagatacttt

SEQ ID NO: 5616465 - DNA, 25 bp, Homo sapien
gcaaattacatgattagaaggctaa

SEQ ID NO: 5616466 - DNA, 25 bp, Homo sapien
aacaggctgaaccaaatgaaatacc

SEQ ID NO: 5616467 - DNA, 25 bp, Homo sapien
ataggtttagtattaatgcatatgt

SEQ ID NO: 5616468 - DNA, 25 bp, Homo sapien
ggcagaagcaccaccttgtggcaaa

SEQ ID NO: 5616469 - DNA, 25 bp, Homo sapien
ataggcaaatttatcaagctggtaa

SEQ ID NO: 5616470 - DNA, 25 bp, Homo sapien
gtaattttagatttgcagttgcatc

SEQ ID NO: 5616471 - DNA, 25 bp, Homo sapien
aactgcgtctaatggcagaagcacc

SEQ ID NO: 5616472 - DNA, 25 bp, Homo sapien
agttgcatcctcctaactgcgtcta

SEQ ID NO: 5616473 - DNA, 25 bp, Homo sapien
agaaggctaattatggtattactgc

SEQ ID NO: 5616474 - DNA, 25 bp, Homo sapien
tctcacctccgcctcttgaagtgct

SEQ ID NO: 5616475 - DNA, 25 bp, Homo sapien
ccttaagaaggatggatacatattc

SEQ ID NO: 5616476 - DNA, 25 bp, Homo sapien
atgggcagaactctcagaatgaaga

SEQ ID NO: 5616477 - DNA, 25 bp, Homo sapien
ataaggcataccgtcagagaaaaac

SEQ ID NO: 5616478 - DNA, 25 bp, Homo sapien
aaaactgaaacagcactaacttctc

SEQ ID NO: 5616479 - DNA, 25 bp, Homo sapien
attgtgtgagatattgaaaagctat

SEQ ID NO: 5616480 - DNA, 25 bp, Homo sapien
ggatggatacatattcaaggaaaac

SEQ ID NO: 5616481 - DNA, 25 bp, Homo sapien
gagaggaaccggtcatgtgtctcat

SEQ ID NO: 5616482 - DNA, 25 bp, Homo sapien
ctgtaaagctgaacatagctggatt

SEQ ID NO: 5616483 - DNA, 25 bp, Homo sapien
aaggaaaactttcatgaagcactaa

SEQ ID NO: 5616484 - DNA, 25 bp, Homo sapien
ctcaaggaaaatattcacgtatcac

SEQ ID NO: 5616485 - DNA, 25 bp, Homo sapien
ctcataaaactgcttggtcaactac

SEQ ID NO: 5616486 - DNA, 25 bp, Homo sapien
acttggaaaaagatctaattattgt

SEQ ID NO: 5616487 - DNA, 25 bp, Homo sapien
ttttaaacaaatatgatcctgaatc

SEQ ID NO: 5616488 - DNA, 25 bp, Homo sapien
ctggcattatgcacatcaaacactg

SEQ ID NO: 5616489 - DNA, 25 bp, Homo sapien
atacggtttcatgtcagagaccgac

SEQ ID NO: 5616490 - DNA, 25 bp, Homo sapien
tcagagaccgacagtaaattttcag

SEQ ID NO: 5616491 - DNA, 25 bp, Homo sapien
tgcatcattgcatagaagagttctc

SEQ ID NO: 5616492 - DNA, 25 bp, Homo sapien
aaaccacctatgactgggagaaggg

SEQ ID NO: 5616493 - DNA, 25 bp, Homo sapien
tctcatattgaacaaaaagagagaa

SEQ ID NO: 5616494 - DNA, 25 bp, Homo sapien
tcaactactgacaaaatacggtttc

SEQ ID NO: 5616495 - DNA, 25 bp, Homo sapien
gtctgtcttgatgataaaaaccacc

SEQ ID NO: 5616496 - DNA, 25 bp, Homo sapien
ctgtacccatataagagaaaaaaga

SEQ ID NO: 5616497 - DNA, 25 bp, Homo sapien
tgaaaattcaacaagcagctctaat

SEQ ID NO: 5616498 - DNA, 25 bp, Homo sapien
gctggctttagcacaccactgtacc

SEQ ID NO: 5616499 - DNA, 25 bp, Homo sapien
aaattgctgaccatacccctctcca

SEQ ID NO: 5616500 - DNA, 25 bp, Homo sapien
tactctcagttgagggaacaggagt

SEQ ID NO: 5616501 - DNA, 25 bp, Homo sapien
gctccctgtgtcattagactggctt

SEQ ID NO: 5616502 - DNA, 25 bp, Homo sapien
ctctaatgaattggtaggagctggc

SEQ ID NO: 5616503 - DNA, 25 bp, Homo sapien
gaagaaggccatatcaacctcctac

SEQ ID NO: 5616504 - DNA, 25 bp, Homo sapien
gttgtgctagaagaaggccatatca

SEQ ID NO: 5616505 - DNA, 25 bp, Homo sapien
gggaacaggagtaatcaaattgctg

SEQ ID NO: 5616506 - DNA, 25 bp, Homo sapien
cattagactggcttgtatagggacg

SEQ ID NO: 5616507 - DNA, 25 bp, Homo sapien
gagctggacacaggcattgaatctc

SEQ ID NO: 5616508 - DNA, 25 bp, Homo sapien
gcacttgtggatttcacggttggac

SEQ ID NO: 5616509 - DNA, 25 bp, Homo sapien
caaaagtctgacaaaggtcctatca

SEQ ID NO: 5616510 - DNA, 25 bp, Homo sapien
caaccacattatcataagggaaaga

SEQ ID NO: 5616511 - DNA, 25 bp, Homo sapien
ctggacacaggcattgaatctcaaa

SEQ ID NO: 5616512 - DNA, 25 bp, Homo sapien
cttgtggatttcacggttggactcc

SEQ ID NO: 5616513 - DNA, 25 bp, Homo sapien
ctgcacttgtggatttcacggttgg

SEQ ID NO: 5616514 - DNA, 25 bp, Homo sapien
tgacaaaggactcaaccacattatc

SEQ ID NO: 5616515 - DNA, 25 bp, Homo sapien
ggagtgacaaaggactcaaccacat

SEQ ID NO: 5616516 - DNA, 25 bp, Homo sapien
ggatttcacggttggactcctggga

SEQ ID NO: 5616517 - DNA, 25 bp, Homo sapien
acaggcattgaatctcaaatggttc

SEQ ID NO: 5616518 - DNA, 25 bp, Homo sapien
ttgccgacaagaattcaaaacctcc

SEQ ID NO: 5616519 - DNA, 25 bp, Homo sapien
taatgagctcccagatgacactgat

SEQ ID NO: 5616520 - DNA, 25 bp, Homo sapien
gacatgagctataataagcacatac

SEQ ID NO: 5616521 - DNA, 25 bp, Homo sapien
attgaaatacagatactggtccagt

SEQ ID NO: 5616522 - DNA, 25 bp, Homo sapien
cagatgacactgatgttgcaggttc

SEQ ID NO: 5616523 - DNA, 25 bp, Homo sapien
tcaaaacctccaccacagattgtct

SEQ ID NO: 5616524 - DNA, 25 bp, Homo sapien
cttcagagatgtgtcctgatatttc

SEQ ID NO: 5616525 - DNA, 25 bp, Homo sapien
cctcaggtccagaagctaagctttg

SEQ ID NO: 5616526 - DNA, 25 bp, Homo sapien
actgatgttgcaggttcacagaccc

SEQ ID NO: 5616527 - DNA, 25 bp, Homo sapien
tcacagaccctcaggtccagaagct

SEQ ID NO: 5616528 - DNA, 25 bp, Homo sapien
acagatactggtccagtgccccggg

SEQ ID NO: 5616529 - DNA, 25 bp, Homo sapien
atggttgtagcgttactgaagactt

SEQ ID NO: 5616530 - DNA, 25 bp, Homo sapien
tgaagtgaaagttgtgattgttgat

SEQ ID NO: 5616531 - DNA, 25 bp, Homo sapien
aagtccagtatgttgtttcaggtgt

SEQ ID NO: 5616532 - DNA, 25 bp, Homo sapien
aggtgtgaatcactcccaaaagtct

SEQ ID NO: 5616533 - DNA, 25 bp, Homo sapien
agtgttgactgcttgctaaaggctt

SEQ ID NO: 5616534 - DNA, 25 bp, Homo sapien
tctctccagtgtgaagtccagtatg

SEQ ID NO: 5616535 - DNA, 25 bp, Homo sapien
tgcctgatggtgaataagtgttgac

SEQ ID NO: 5616536 - DNA, 25 bp, Homo sapien
tctatgatgaagtgaaagttgtgat

SEQ ID NO: 5616537 - DNA, 25 bp, Homo sapien
cccagcatgaattctatgatgaagt

SEQ ID NO: 5616538 - DNA, 25 bp, Homo sapien
aaggtgtgatttgcgactgaaaact

SEQ ID NO: 5616539 - DNA, 25 bp, Homo sapien
gattgttgattaaaagccttcccac

SEQ ID NO: 5616540 - DNA, 25 bp, Homo sapien
cttaggcgttaaggagttcatgaaa

SEQ ID NO: 5616541 - DNA, 25 bp, Homo sapien
aaaataatgaagaaaaatttgccat

SEQ ID NO: 5616542 - DNA, 25 bp, Homo sapien
attctagcaaatagcacagaaaaac

SEQ ID NO: 5616543 - DNA, 25 bp, Homo sapien
gcaaaataggatcaacaatggagtt

SEQ ID NO: 5616544 - DNA, 25 bp, Homo sapien
caatgatataagggcaaataagaac

SEQ ID NO: 5616545 - DNA, 25 bp, Homo sapien
gttcagggtcctgtcgagatccata

SEQ ID NO: 5616546 - DNA, 25 bp, Homo sapien
tcgagatccatagtgactagtcagc

SEQ ID NO: 5616547 - DNA, 25 bp, Homo sapien
tatgctcaaggcactgaggttatct

SEQ ID NO: 5616548 - DNA, 25 bp, Homo sapien
taggtgcaaaataggatcaacaatg

SEQ ID NO: 5616549 - DNA, 25 bp, Homo sapien
ccaaagaataattgtgtctaggtgc

SEQ ID NO: 5616550 - DNA, 25 bp, Homo sapien
aaataagaactgggcttaggcgtta

SEQ ID NO: 5616551 - DNA, 25 bp, Homo sapien
caccacagttggccagacatgggtt

SEQ ID NO: 5616552 - DNA, 25 bp, Homo sapien
gacatgggttgcattcccccaaagc

SEQ ID NO: 5616553 - DNA, 25 bp, Homo sapien
aaactatcagtgagactctgtggat

SEQ ID NO: 5616554 - DNA, 25 bp, Homo sapien
agtcatagctggacccaggtgctca

SEQ ID NO: 5616555 - DNA, 25 bp, Homo sapien
caacaactctagactgggaaatggg

SEQ ID NO: 5616556 - DNA, 25 bp, Homo sapien
agcttcaggcatacacagtaaaccc

SEQ ID NO: 5616557 - DNA, 25 bp, Homo sapien
gagaacaaagatgggtgtcttgcta

SEQ ID NO: 5616558 - DNA, 25 bp, Homo sapien
ggatgcaaggctgacaaactatcag

SEQ ID NO: 5616559 - DNA, 25 bp, Homo sapien
cagcagcttcacaggacccacatgg

SEQ ID NO: 5616560 - DNA, 25 bp, Homo sapien
ctctgtggatagaaagcatgagtag

SEQ ID NO: 5616561 - DNA, 25 bp, Homo sapien
gatgggtgtcttgctagcttcagtc

SEQ ID NO: 5616562 - DNA, 25 bp, Homo sapien
aagcaaaatatgtgaatgggtaagt

SEQ ID NO: 5616563 - DNA, 25 bp, Homo sapien
acaccgggatactctagagtcagcc

SEQ ID NO: 5616564 - DNA, 25 bp, Homo sapien
gatccaccatctactgtcttccccc

SEQ ID NO: 5616565 - DNA, 25 bp, Homo sapien
ataatatgcctaatgatccaccatc

SEQ ID NO: 5616566 - DNA, 25 bp, Homo sapien
ttaaatgatgctacgaaatgtaagc

SEQ ID NO: 5616567 - DNA, 25 bp, Homo sapien
atttaaggtattacaaagcatgttt

SEQ ID NO: 5616568 - DNA, 25 bp, Homo sapien
cagatgatacatgtggataatttaa

SEQ ID NO: 5616569 - DNA, 25 bp, Homo sapien
aactagtcacaatacttggtacttc

SEQ ID NO: 5616570 - DNA, 25 bp, Homo sapien
ctaaaaacctagctaacctgtatgt

SEQ ID NO: 5616571 - DNA, 25 bp, Homo sapien
aaatgaggcactataaaactagttt

SEQ ID NO: 5616572 - DNA, 25 bp, Homo sapien
tctaaaacattcacaaggtcacttt

SEQ ID NO: 5616573 - DNA, 25 bp, Homo sapien
cagaagtaaattatctacaggttcc

SEQ ID NO: 5616574 - DNA, 25 bp, Homo sapien
ataaccttgagtgaagcattattac

SEQ ID NO: 5616575 - DNA, 25 bp, Homo sapien
tgaaggaagaaatattgtcaacatt

SEQ ID NO: 5616576 - DNA, 25 bp, Homo sapien
cacacactcaacaccataccaataa

SEQ ID NO: 5616577 - DNA, 25 bp, Homo sapien
tctcgctaagatactgaacatcaaa

SEQ ID NO: 5616578 - DNA, 25 bp, Homo sapien
attattgtagaaaacttagcacctt

SEQ ID NO: 5616579 - DNA, 25 bp, Homo sapien
aaaaagcctgattagtaccagttgc

SEQ ID NO: 5616580 - DNA, 25 bp, Homo sapien
gattggctgtcatgtgctataaatg

SEQ ID NO: 5616581 - DNA, 25 bp, Homo sapien
aatgccatctgtgaaccagcaaggc

SEQ ID NO: 5616582 - DNA, 25 bp, Homo sapien
tcctttagtgaaagtctctcaggcc

SEQ ID NO: 5616583 - DNA, 25 bp, Homo sapien
ccagcaaggcatagacagaattgtt

SEQ ID NO: 5616584 - DNA, 25 bp, Homo sapien
agttttgaacacaatatccgatggt

SEQ ID NO: 5616585 - DNA, 25 bp, Homo sapien
accatcggatattgtgttcaaaact

SEQ ID NO: 5616586 - DNA, 25 bp, Homo sapien
cctttatggtgaaagtcatgaagga

SEQ ID NO: 5616587 - DNA, 25 bp, Homo sapien
aagtcagaagtgtcttgggacctgt

SEQ ID NO: 5616588 - DNA, 25 bp, Homo sapien
tcacatagacttgaaaacactgatc

SEQ ID NO: 5616589 - DNA, 25 bp, Homo sapien
cactaggatttgttgacatgaccac

SEQ ID NO: 5616590 - DNA, 25 bp, Homo sapien
aggtacacctggattcctgacaact

SEQ ID NO: 5616591 - DNA, 25 bp, Homo sapien
ggaaaatgcattgctaacaaagtgc

SEQ ID NO: 5616592 - DNA, 25 bp, Homo sapien
tgaaggattcttcacaaatgcagga

SEQ ID NO: 5616593 - DNA, 25 bp, Homo sapien
acaaagtgctaagtcagaagtgtct

SEQ ID NO: 5616594 - DNA, 25 bp, Homo sapien
ctatgggttctgttattggcatttt

SEQ ID NO: 5616595 - DNA, 25 bp, Homo sapien
cttgggacctgtttgaaaacaagat

SEQ ID NO: 5616596 - DNA, 25 bp, Homo sapien
ccaatcctagtaactcaggtacacc

SEQ ID NO: 5616597 - DNA, 25 bp, Homo sapien
taggtcatgattaagatggttctcc

SEQ ID NO: 5616598 - DNA, 25 bp, Homo sapien
aatttgctgatagggtgtattgcat

SEQ ID NO: 5616599 - DNA, 25 bp, Homo sapien
aaaaggcatgctatcgtgtttcagt

SEQ ID NO: 5616600 - DNA, 25 bp, Homo sapien
tctcatgctggtagaaaactgtctt

SEQ ID NO: 5616601 - DNA, 25 bp, Homo sapien
aaagttcctgtcgtccacacctaac

SEQ ID NO: 5616602 - DNA, 25 bp, Homo sapien
aacacatttcgccataaaaggcatg

SEQ ID NO: 5616603 - DNA, 25 bp, Homo sapien
actgttaaacagcaatggcatgtac

SEQ ID NO: 5616604 - DNA, 25 bp, Homo sapien
cacaggttgctgtgaaataagaatg

SEQ ID NO: 5616605 - DNA, 25 bp, Homo sapien
ctccaaactatcaacaagactgtct

SEQ ID NO: 5616606 - DNA, 25 bp, Homo sapien
ctatgagaaggacctccaatttctc

SEQ ID NO: 5616607 - DNA, 25 bp, Homo sapien
taacattagtcaagacacaggttgc

SEQ ID NO: 5616608 - DNA, 25 bp, Homo sapien
ctgcacccggcctaggcatctttat

SEQ ID NO: 5616609 - DNA, 25 bp, Homo sapien
gcaatggcatgatcttggttcactg

SEQ ID NO: 5616610 - DNA, 25 bp, Homo sapien
cccaaagagaaattattgtttagta

SEQ ID NO: 5616611 - DNA, 25 bp, Homo sapien
ttatacaaattgttccatggagatt

SEQ ID NO: 5616612 - DNA, 25 bp, Homo sapien
ccatggagattaaaaagaaaaagga

SEQ ID NO: 5616613 - DNA, 25 bp, Homo sapien
ccgcctcagccccccaaagtattgg

SEQ ID NO: 5616614 - DNA, 25 bp, Homo sapien
ttggttcactgcaaccttcgcctcc

SEQ ID NO: 5616615 - DNA, 25 bp, Homo sapien
aatgaagagctcagtttagcaattt

SEQ ID NO: 5616616 - DNA, 25 bp, Homo sapien
tctatgtatagaaagccttccttaa

SEQ ID NO: 5616617 - DNA, 25 bp, Homo sapien
gtttagtattttgaatgaagagctc

SEQ ID NO: 5616618 - DNA, 25 bp, Homo sapien
agattaaaaagaaaaaggagctcaa

SEQ ID NO: 5616619 - DNA, 25 bp, Homo sapien
tgcctagggtagaagcactaatctg

SEQ ID NO: 5616620 - DNA, 25 bp, Homo sapien
gagcccacaaagccagttactgtgc

SEQ ID NO: 5616621 - DNA, 25 bp, Homo sapien
actcttctctagagcccacaaagcc

SEQ ID NO: 5616622 - DNA, 25 bp, Homo sapien
aaagtgcttagcagtgtcggtgctt

SEQ ID NO: 5616623 - DNA, 25 bp, Homo sapien
tgcacgtaaagtgcttagcagtgtc

SEQ ID NO: 5616624 - DNA, 25 bp, Homo sapien
gaaagccctgcctagggtagaagca

SEQ ID NO: 5616625 - DNA, 25 bp, Homo sapien
gcagtgtcggtgcttattaccatta

SEQ ID NO: 5616626 - DNA, 25 bp, Homo sapien
attgccagcttagggactactggag

SEQ ID NO: 5616627 - DNA, 25 bp, Homo sapien
ttaccattagaccaagaaagccctg

SEQ ID NO: 5616628 - DNA, 25 bp, Homo sapien
aaaaagtatttcacttgacagttct

SEQ ID NO: 5616629 - DNA, 25 bp, Homo sapien
gccagttactgtgctaaaaagtatt

SEQ ID NO: 5616630 - DNA, 25 bp, Homo sapien
gtggtccttgacccaggctcacctt

SEQ ID NO: 5616631 - DNA, 25 bp, Homo sapien
tgtcttgacccagtaatgagttccc

SEQ ID NO: 5616632 - DNA, 25 bp, Homo sapien
aggtctccattaagggtgggccttg

SEQ ID NO: 5616633 - DNA, 25 bp, Homo sapien
ggttgtcttggcagctgtggtgaaa

SEQ ID NO: 5616634 - DNA, 25 bp, Homo sapien
taaagtaatgagtatatgatgggat

SEQ ID NO: 5616635 - DNA, 25 bp, Homo sapien
gtggtgaaaaccaatagcttcctcc

SEQ ID NO: 5616636 - DNA, 25 bp, Homo sapien
cactgcaggtaaaatcagagtgggt

SEQ ID NO: 5616637 - DNA, 25 bp, Homo sapien
agcccgaagcacataagttgagctc

SEQ ID NO: 5616638 - DNA, 25 bp, Homo sapien
gatctgtggcccagcaatgggtagt

SEQ ID NO: 5616639 - DNA, 25 bp, Homo sapien
cagagcttcagaaacacaccagtgc

SEQ ID NO: 5616640 - DNA, 25 bp, Homo sapien
atgagttcccagagcactgcaggta

SEQ ID NO: 5616641 - DNA, 25 bp, Homo sapien
tgcatggcacaatataaagtctgtt

SEQ ID NO: 5616642 - DNA, 25 bp, Homo sapien
gattgatacaataacatgaactgac

SEQ ID NO: 5616643 - DNA, 25 bp, Homo sapien
ttgaacttctggccacatgctatcc

SEQ ID NO: 5616644 - DNA, 25 bp, Homo sapien
atcggctcaagtacttagatgtatt

SEQ ID NO: 5616645 - DNA, 25 bp, Homo sapien
gatgtattaaccaggatcacagaga

SEQ ID NO: 5616646 - DNA, 25 bp, Homo sapien
tgtaagtttgagttagcatgtaata

SEQ ID NO: 5616647 - DNA, 25 bp, Homo sapien
gttagaaatcatatcacgacagcat

SEQ ID NO: 5616648 - DNA, 25 bp, Homo sapien
agttagaactaagacatgcaccacc

SEQ ID NO: 5616649 - DNA, 25 bp, Homo sapien
aacaaaagagcaataggactgcatg

SEQ ID NO: 5616650 - DNA, 25 bp, Homo sapien
caaagtacttggattatcggctcaa

SEQ ID NO: 5616651 - DNA, 25 bp, Homo sapien
ctttgagctcctgggctaaagtaat

SEQ ID NO: 5616652 - DNA, 25 bp, Homo sapien
tatgaaattcttttgggggaggcaa

SEQ ID NO: 5616653 - DNA, 25 bp, Homo sapien
aaagacttcttcgccccctaattca

SEQ ID NO: 5616654 - DNA, 25 bp, Homo sapien
ttaaatacaggcaacaaaatatctc

SEQ ID NO: 5616655 - DNA, 25 bp, Homo sapien
catgaagtacattatatcgatccgt

SEQ ID NO: 5616656 - DNA, 25 bp, Homo sapien
aaaaccactaactgaatactgcatc

SEQ ID NO: 5616657 - DNA, 25 bp, Homo sapien
ctaattagactattgcatctgcaag

SEQ ID NO: 5616658 - DNA, 25 bp, Homo sapien
tatatcgatccgtgttcatgttctc

SEQ ID NO: 5616659 - DNA, 25 bp, Homo sapien
ctagataatatagaatgccattcca

SEQ ID NO: 5616660 - DNA, 25 bp, Homo sapien
ttatagagaaaggtctcttcaaccc

SEQ ID NO: 5616661 - DNA, 25 bp, Homo sapien
ctgaagtttaactacccaacaaatc

SEQ ID NO: 5616662 - DNA, 25 bp, Homo sapien
ccaaaattggctcaacttgtaagct

SEQ ID NO: 5616663 - DNA, 25 bp, Homo sapien
gaactcaggaacagaaaccacactg

SEQ ID NO: 5616664 - DNA, 25 bp, Homo sapien
agatcagtctctaagcagaagtgaa

SEQ ID NO: 5616665 - DNA, 25 bp, Homo sapien
aggacatcacagagaactcaggaac

SEQ ID NO: 5616666 - DNA, 25 bp, Homo sapien
agacaaaccatgggaccaccttttc

SEQ ID NO: 5616667 - DNA, 25 bp, Homo sapien
aaccacactgaaatagagggatggg

SEQ ID NO: 5616668 - DNA, 25 bp, Homo sapien
gcagaagtgaaaatatgggaaaatg

SEQ ID NO: 5616669 - DNA, 25 bp, Homo sapien
tttgatatcagcacagatcagtctc

SEQ ID NO: 5616670 - DNA, 25 bp, Homo sapien
aagacaagaaaaactaatgtgcttg

SEQ ID NO: 5616671 - DNA, 25 bp, Homo sapien
ggcacatatgggataaaggacatca

SEQ ID NO: 5616672 - DNA, 25 bp, Homo sapien
tctcagtgagagatacattgtcggg

SEQ ID NO: 5616673 - DNA, 25 bp, Homo sapien
gctcagactgactcaatgtgggcac

SEQ ID NO: 5616674 - DNA, 25 bp, Homo sapien
tagtcataaagaccaataaagacaa

SEQ ID NO: 5616675 - DNA, 25 bp, Homo sapien
caaaaaatgatgtgctgtctgcggt

SEQ ID NO: 5616676 - DNA, 25 bp, Homo sapien
caagctcctcccagacactatgttt

SEQ ID NO: 5616677 - DNA, 25 bp, Homo sapien
acattacaaatctctcaagctcctc

SEQ ID NO: 5616678 - DNA, 25 bp, Homo sapien
ttatagaagtgctagactatacact

SEQ ID NO: 5616679 - DNA, 25 bp, Homo sapien
aatgatgtgctgtctgcggtcttcc

SEQ ID NO: 5616680 - DNA, 25 bp, Homo sapien
acaaaacaatttgctgattagtccc

SEQ ID NO: 5616681 - DNA, 25 bp, Homo sapien
atctctagcatgacacaaaacaatt

SEQ ID NO: 5616682 - DNA, 25 bp, Homo sapien
gttttacagcaaagcagaagtgatg

SEQ ID NO: 5616683 - DNA, 25 bp, Homo sapien
gcagagatgaagtgttagtcataaa

SEQ ID NO: 5616684 - DNA, 25 bp, Homo sapien
cccacacggtctgtttacaagtaac

SEQ ID NO: 5616685 - DNA, 25 bp, Homo sapien
gctatgtttgagggttctaaaggta

SEQ ID NO: 5616686 - DNA, 25 bp, Homo sapien
agaaacagaactcaagcacctttat

SEQ ID NO: 5616687 - DNA, 25 bp, Homo sapien
gggagctgttgagaaacagaactca

SEQ ID NO: 5616688 - DNA, 25 bp, Homo sapien
tcaatatatcacaggtaaaatactt

SEQ ID NO: 5616689 - DNA, 25 bp, Homo sapien
agtagtcagtgcaaaaaaatagagt

SEQ ID NO: 5616690 - DNA, 25 bp, Homo sapien
aaaaaagcattgaaaagtctaggga

SEQ ID NO: 5616691 - DNA, 25 bp, Homo sapien
attgaaaagtctagggaaatgaaag

SEQ ID NO: 5616692 - DNA, 25 bp, Homo sapien
aaaaacagcaataccaagctatgtt

SEQ ID NO: 5616693 - DNA, 25 bp, Homo sapien
ggtaaaggacaaagacatgtactcc

SEQ ID NO: 5616694 - DNA, 25 bp, Homo sapien
ggaaaaatagaagtagtcagtgcaa

SEQ ID NO: 5616695 - DNA, 25 bp, Homo sapien
ctaagtgaatcctaaatgctccaga

SEQ ID NO: 5616696 - DNA, 25 bp, Homo sapien
ttctggagacaaaaaatgctcggaa

SEQ ID NO: 5616697 - DNA, 25 bp, Homo sapien
aaggatgagttaggtagtcatgtct

SEQ ID NO: 5616698 - DNA, 25 bp, Homo sapien
ctgaaatattgggaatggataggaa

SEQ ID NO: 5616699 - DNA, 25 bp, Homo sapien
aagagtgttctgatcaaagctttgc

SEQ ID NO: 5616700 - DNA, 25 bp, Homo sapien
cagaggccactgcaataaatcaaag

SEQ ID NO: 5616701 - DNA, 25 bp, Homo sapien
agtcatgtctacgttggaagtcctg

SEQ ID NO: 5616702 - DNA, 25 bp, Homo sapien
aggattttgtaggtagaagagtgtt

SEQ ID NO: 5616703 - DNA, 25 bp, Homo sapien
tgaaggcctactgttgctgagcaag

SEQ ID NO: 5616704 - DNA, 25 bp, Homo sapien
atgaatagatcgacatggggttgat

SEQ ID NO: 5616705 - DNA, 25 bp, Homo sapien
aggaggaatatgaatagatcgacat

SEQ ID NO: 5616706 - DNA, 25 bp, Homo sapien
atggggttgatatgacagatattct

SEQ ID NO: 5616707 - DNA, 25 bp, Homo sapien
gtgaggattaagatgaaatagtgta

SEQ ID NO: 5616708 - DNA, 25 bp, Homo sapien
tggactcaggtggacctagcttgaa

SEQ ID NO: 5616709 - DNA, 25 bp, Homo sapien
ataaacatcaaggcagtcagtagag

SEQ ID NO: 5616710 - DNA, 25 bp, Homo sapien
caaaaggaagccatgtccccctcaa

SEQ ID NO: 5616711 - DNA, 25 bp, Homo sapien
gtccaaatcataagatggcaggcac

SEQ ID NO: 5616712 - DNA, 25 bp, Homo sapien
aatgtaagaaaacaagctgcaggaa

SEQ ID NO: 5616713 - DNA, 25 bp, Homo sapien
tacgtagtatgccccaggactgtga

SEQ ID NO: 5616714 - DNA, 25 bp, Homo sapien
tcagtagagcatgacagcttatagc

SEQ ID NO: 5616715 - DNA, 25 bp, Homo sapien
caactgctagtgatgctgccattcc

SEQ ID NO: 5616716 - DNA, 25 bp, Homo sapien
atggcaggcacacttaatgacttct

SEQ ID NO: 5616717 - DNA, 25 bp, Homo sapien
taactagaagagctaactgcagagg

SEQ ID NO: 5616718 - DNA, 25 bp, Homo sapien
atacaatataaaagacatagtccct

SEQ ID NO: 5616719 - DNA, 25 bp, Homo sapien
caagggactcagagaaagtcactta

SEQ ID NO: 5616720 - DNA, 25 bp, Homo sapien
taggaaggctaaagatataacaatt

SEQ ID NO: 5616721 - DNA, 25 bp, Homo sapien
ggtctccctttgttgagcaggttag

SEQ ID NO: 5616722 - DNA, 25 bp, Homo sapien
ctaaataattgaaggttgcggccgg

SEQ ID NO: 5616723 - DNA, 25 bp, Homo sapien
tgaaagtgagttagcttgaagattc

SEQ ID NO: 5616724 - DNA, 25 bp, Homo sapien
tgttaatgcttagaaagcttgaaga

SEQ ID NO: 5616725 - DNA, 25 bp, Homo sapien
ccttacacaagggactcagagaaag

SEQ ID NO: 5616726 - DNA, 25 bp, Homo sapien
gaaagtcacttaggatacacataac

SEQ ID NO: 5616727 - DNA, 25 bp, Homo sapien
gaagacataacagccttaggaaggc

SEQ ID NO: 5616728 - DNA, 25 bp, Homo sapien
agaaagcttgaagacataacagcct

SEQ ID NO: 5616729 - DNA, 25 bp, Homo sapien
taattcagaagaaagtgtgcattgc

SEQ ID NO: 5616730 - DNA, 25 bp, Homo sapien
ttaaaatgatttgggttgtagctgg

SEQ ID NO: 5616731 - DNA, 25 bp, Homo sapien
tccagtcgggaatggttttccatcc

SEQ ID NO: 5616732 - DNA, 25 bp, Homo sapien
aatgttagagtcacaggagtttgcc

SEQ ID NO: 5616733 - DNA, 25 bp, Homo sapien
caatgcaaatttcagaatggtgctg

SEQ ID NO: 5616734 - DNA, 25 bp, Homo sapien
tgggttgtagctggctcccaactgc

SEQ ID NO: 5616735 - DNA, 25 bp, Homo sapien
cgccagttttccagtcgggaatggt

SEQ ID NO: 5616736 - DNA, 25 bp, Homo sapien
agaaaggaaaaatgttagagtcaca

SEQ ID NO: 5616737 - DNA, 25 bp, Homo sapien
gcaggtgagtcactaatctccaatg

SEQ ID NO: 5616738 - DNA, 25 bp, Homo sapien
ctggctcccaactgcaggtgagtca

SEQ ID NO: 5616739 - DNA, 25 bp, Homo sapien
gtgcattgcatgagatcaaagaatt

SEQ ID NO: 5616740 - DNA, 25 bp, Homo sapien
tagatgcgagtatgatacatgccct

SEQ ID NO: 5616741 - DNA, 25 bp, Homo sapien
cctgccaagagaaatcagcatgctg

SEQ ID NO: 5616742 - DNA, 25 bp, Homo sapien
tgttaacttggggataatattcacc

SEQ ID NO: 5616743 - DNA, 25 bp, Homo sapien
tgctgattcaccatcgtggaagccc

SEQ ID NO: 5616744 - DNA, 25 bp, Homo sapien
gaaatgcctactgaggaagtgctgg

SEQ ID NO: 5616745 - DNA, 25 bp, Homo sapien
taaaaatgaacatggtttgtgacac

SEQ ID NO: 5616746 - DNA, 25 bp, Homo sapien
gtacagactacagacgattgacttt

SEQ ID NO: 5616747 - DNA, 25 bp, Homo sapien
tttgtgacacacctgaaatgcctac

SEQ ID NO: 5616748 - DNA, 25 bp, Homo sapien
tgctggccacgaggtaataaaaaaa

SEQ ID NO: 5616749 - DNA, 25 bp, Homo sapien
atctgtttttggactgcggtttctc

SEQ ID NO: 5616750 - DNA, 25 bp, Homo sapien
atgtggacactgttttagatgcgag

SEQ ID NO: 5616751 - DNA, 25 bp, Homo sapien
accccaaagggatgttgtgaaaatg

SEQ ID NO: 5616752 - DNA, 25 bp, Homo sapien
aagtaggctgataacatctgggctt

SEQ ID NO: 5616753 - DNA, 25 bp, Homo sapien
atttgggtcaaatgctgaagtaggg

SEQ ID NO: 5616754 - DNA, 25 bp, Homo sapien
gtttgtagtaagggcactgaagtag

SEQ ID NO: 5616755 - DNA, 25 bp, Homo sapien
tgtgtgacctcaggcccggtatttt

SEQ ID NO: 5616756 - DNA, 25 bp, Homo sapien
tgaagtagggctgctaccactacag

SEQ ID NO: 5616757 - DNA, 25 bp, Homo sapien
ctaagatcaaagagttcaggcactt

SEQ ID NO: 5616758 - DNA, 25 bp, Homo sapien
taatgtgtatgaagataagagctgg

SEQ ID NO: 5616759 - DNA, 25 bp, Homo sapien
aagtggttggaatgcttgaaaatgc

SEQ ID NO: 5616760 - DNA, 25 bp, Homo sapien
atttgcatgatgtgaaagaatgatc

SEQ ID NO: 5616761 - DNA, 25 bp, Homo sapien
accctgataggcaaaataatgtgta

SEQ ID NO: 5616762 - DNA, 25 bp, Homo sapien
cccagactaactctgatagagattc

SEQ ID NO: 5616763 - DNA, 25 bp, Homo sapien
gctaaagtggcatatattggggtgg

SEQ ID NO: 5616764 - DNA, 25 bp, Homo sapien
ctcatttctgatgggcacatctaat

SEQ ID NO: 5616765 - DNA, 25 bp, Homo sapien
ttggggtggcacatcctgatcccct

SEQ ID NO: 5616766 - DNA, 25 bp, Homo sapien
ccaaacaattggagttcactgcggc

SEQ ID NO: 5616767 - DNA, 25 bp, Homo sapien
ggcacattagaaacatctcagtcat

SEQ ID NO: 5616768 - DNA, 25 bp, Homo sapien
tagcctaggaaggttcaagttaagc

SEQ ID NO: 5616769 - DNA, 25 bp, Homo sapien
cctgggctcattagaaaagaagctc

SEQ ID NO: 5616770 - DNA, 25 bp, Homo sapien
aataatccataggctaaagtggcat

SEQ ID NO: 5616771 - DNA, 25 bp, Homo sapien
gagttcactgcggcctaccatctgc

SEQ ID NO: 5616772 - DNA, 25 bp, Homo sapien
aaaattctctagcctaggaaggttc

SEQ ID NO: 5616773 - DNA, 25 bp, Homo sapien
attgatctctgaagtaacatgaaaa

SEQ ID NO: 5616774 - DNA, 25 bp, Homo sapien
aaatagttgcgattgttgatatctt

SEQ ID NO: 5616775 - DNA, 25 bp, Homo sapien
taacatgaaaaagtgatactgattc

SEQ ID NO: 5616776 - DNA, 25 bp, Homo sapien
tacataagtttgtcgcaaagggctt

SEQ ID NO: 5616777 - DNA, 25 bp, Homo sapien
tcagatgatgcctttagatccagca

SEQ ID NO: 5616778 - DNA, 25 bp, Homo sapien
acaggtgaggcagatatcaattttg

SEQ ID NO: 5616779 - DNA, 25 bp, Homo sapien
tgtcgcaaagggctttgtgaaggag

SEQ ID NO: 5616780 - DNA, 25 bp, Homo sapien
catttgagataaagtggcgctcatc

SEQ ID NO: 5616781 - DNA, 25 bp, Homo sapien
ttaagaacaatcaaggagtttaatc

SEQ ID NO: 5616782 - DNA, 25 bp, Homo sapien
tatttatgaagggaagattatgaaa

SEQ ID NO: 5616783 - DNA, 25 bp, Homo sapien
aagatggtaaataaaaccaatgcac

SEQ ID NO: 5616784 - DNA, 25 bp, Homo sapien
taccatctgcatgcttgagcccttc

SEQ ID NO: 5616785 - DNA, 25 bp, Homo sapien
atttccaccaaccaggagaaggaac

SEQ ID NO: 5616786 - DNA, 25 bp, Homo sapien
gtgtctacacctgtcaagatggata

SEQ ID NO: 5616787 - DNA, 25 bp, Homo sapien
agcagggattaagacacacccagct

SEQ ID NO: 5616788 - DNA, 25 bp, Homo sapien
tgctgatataaggaaactgtaggct

SEQ ID NO: 5616789 - DNA, 25 bp, Homo sapien
tcaattccaaagagaaacgcatatc

SEQ ID NO: 5616790 - DNA, 25 bp, Homo sapien
ccctgtccatcaccgcaaaagctcc

SEQ ID NO: 5616791 - DNA, 25 bp, Homo sapien
aagatggataattaactgctccccc

SEQ ID NO: 5616792 - DNA, 25 bp, Homo sapien
ttgtatcaggaatagaataaagaaa

SEQ ID NO: 5616793 - DNA, 25 bp, Homo sapien
tacttccagttcaccaaggtaggga

SEQ ID NO: 5616794 - DNA, 25 bp, Homo sapien
tgatgcctgctgacaacatcccagc

SEQ ID NO: 5616795 - DNA, 25 bp, Homo sapien
atgagaaagtctaatgataactgat

SEQ ID NO: 5616796 - DNA, 25 bp, Homo sapien
caatagattaccctggaaaggctag

SEQ ID NO: 5616797 - DNA, 25 bp, Homo sapien
tcagggaccccatttatacatacgt

SEQ ID NO: 5616798 - DNA, 25 bp, Homo sapien
attaccctggaaaggctagtgagta

SEQ ID NO: 5616799 - DNA, 25 bp, Homo sapien
ttagtctttttgcttagaggctctc

SEQ ID NO: 5616800 - DNA, 25 bp, Homo sapien
aaggctagtgagtacggtattcttc

SEQ ID NO: 5616801 - DNA, 25 bp, Homo sapien
actgtttgccaatgtatcaaccatt

SEQ ID NO: 5616802 - DNA, 25 bp, Homo sapien
taaattcctaatcactagaccacca

SEQ ID NO: 5616803 - DNA, 25 bp, Homo sapien
atacatacgttaaataaatactgtt

SEQ ID NO: 5616804 - DNA, 25 bp, Homo sapien
tttgcttagaggctctctgaggatg

SEQ ID NO: 5616805 - DNA, 25 bp, Homo sapien
actgcaaacctcgcctcccgtgttc

SEQ ID NO: 5616806 - DNA, 25 bp, Homo sapien
catcaaaaggagacatacatgtatt

SEQ ID NO: 5616807 - DNA, 25 bp, Homo sapien
taagtactccttacagcacagtctc

SEQ ID NO: 5616808 - DNA, 25 bp, Homo sapien
tacacatatttgagcatccgcctta

SEQ ID NO: 5616809 - DNA, 25 bp, Homo sapien
ttcaggataatctaataggcgtatt

SEQ ID NO: 5616810 - DNA, 25 bp, Homo sapien
taggcgtattaaagagaacaccttg

SEQ ID NO: 5616811 - DNA, 25 bp, Homo sapien
aagtattacatgggttgagtgtttt

SEQ ID NO: 5616812 - DNA, 25 bp, Homo sapien
ctgtacacatcaaaaggagacatac

SEQ ID NO: 5616813 - DNA, 25 bp, Homo sapien
aaatagagaacttcaggataatcta

SEQ ID NO: 5616814 - DNA, 25 bp, Homo sapien
tcccaggctaacaaatttatcccag

SEQ ID NO: 5616815 - DNA, 25 bp, Homo sapien
tctttggaagatatcccaggctaac

SEQ ID NO: 5616816 - DNA, 25 bp, Homo sapien
aattactataggacataagtactcc

SEQ ID NO: 5616817 - DNA, 25 bp, Homo sapien
aatgtctgtcagtaacgaggctttt

SEQ ID NO: 5616818 - DNA, 25 bp, Homo sapien
ttctaggttatggccattttgtgtc

SEQ ID NO: 5616819 - DNA, 25 bp, Homo sapien
ttgcaatgtctgtcagtaacgaggc

SEQ ID NO: 5616820 - DNA, 25 bp, Homo sapien
gctgtgttttaagctgcttccttgg

SEQ ID NO: 5616821 - DNA, 25 bp, Homo sapien
gcttttgatgtgttgagctggaggt

SEQ ID NO: 5616822 - DNA, 25 bp, Homo sapien
gggcaacctctccgtgtactgcgtc

SEQ ID NO: 5616823 - DNA, 25 bp, Homo sapien
gtctgtccacactcgattgggcccc

SEQ ID NO: 5616824 - DNA, 25 bp, Homo sapien
tgtgcaggcccacctctttggctct

SEQ ID NO: 5616825 - DNA, 25 bp, Homo sapien
tgtactgcgtctgtccacactcgat

SEQ ID NO: 5616826 - DNA, 25 bp, Homo sapien
aacgaggcttttgatgtgttgagct

SEQ ID NO: 5616827 - DNA, 25 bp, Homo sapien
cttttgggcaacctctccgtgtact

SEQ ID NO: 5616828 - DNA, 25 bp, Homo sapien
ccatgccaatggtcactaaacacct

SEQ ID NO: 5616829 - DNA, 25 bp, Homo sapien
ctcttacccaagaaaagcctttctc

SEQ ID NO: 5616830 - DNA, 25 bp, Homo sapien
attgcaggatgtttatcagcatctc

SEQ ID NO: 5616831 - DNA, 25 bp, Homo sapien
tctttcaactatttggcagaccttt

SEQ ID NO: 5616832 - DNA, 25 bp, Homo sapien
ttaactttccctaccatgccaatgg

SEQ ID NO: 5616833 - DNA, 25 bp, Homo sapien
agatgccagtagcatgttccccaca

SEQ ID NO: 5616834 - DNA, 25 bp, Homo sapien
ggttgagcaccactgtcttagatcc

SEQ ID NO: 5616835 - DNA, 25 bp, Homo sapien
gtcttagatccaaatcggtattaat

SEQ ID NO: 5616836 - DNA, 25 bp, Homo sapien
atgttccccacaaatagtgacaatc

SEQ ID NO: 5616837 - DNA, 25 bp, Homo sapien
gcttgaattcccaactttccgagat

SEQ ID NO: 5616838 - DNA, 25 bp, Homo sapien
gcatctctcgcctctacacactaga

SEQ ID NO: 5616839 - DNA, 25 bp, Homo sapien
ggctaggctatcgtacccagtttcc

SEQ ID NO: 5616840 - DNA, 25 bp, Homo sapien
gctgtgaaagtattctgtagttggg

SEQ ID NO: 5616841 - DNA, 25 bp, Homo sapien
ataagtctaattaaaggaggtatct

SEQ ID NO: 5616842 - DNA, 25 bp, Homo sapien
tgtagttgggtaagcatctatagtc

SEQ ID NO: 5616843 - DNA, 25 bp, Homo sapien
ttgataatctgggtaggtgtcatcc

SEQ ID NO: 5616844 - DNA, 25 bp, Homo sapien
tctctctctggagcactgtgatgac

SEQ ID NO: 5616845 - DNA, 25 bp, Homo sapien
ggggttaacacagatggcataaaat

SEQ ID NO: 5616846 - DNA, 25 bp, Homo sapien
tggagcactgtgatgactggtttta

SEQ ID NO: 5616847 - DNA, 25 bp, Homo sapien
gatctcaagatgataagtaaatttc

SEQ ID NO: 5616848 - DNA, 25 bp, Homo sapien
gcctttggactgtagcttcagcttc

SEQ ID NO: 5616849 - DNA, 25 bp, Homo sapien
atgtgtaaatttggctaggctatcg

SEQ ID NO: 5616850 - DNA, 25 bp, Homo sapien
aatcatagtagcacttctggtggcc

SEQ ID NO: 5616851 - DNA, 25 bp, Homo sapien
ttgtaatcctgggacaggcagtatc

SEQ ID NO: 5616852 - DNA, 25 bp, Homo sapien
taatcctgggacaggcagtatcact

SEQ ID NO: 5616853 - DNA, 25 bp, Homo sapien
cttagaaaagacaagccagcaataa

SEQ ID NO: 5616854 - DNA, 25 bp, Homo sapien
agcttcaattgatttcccccacctc

SEQ ID NO: 5616855 - DNA, 25 bp, Homo sapien
aagacaagccagcaataaaacattt

SEQ ID NO: 5616856 - DNA, 25 bp, Homo sapien
tggtggccttcatgtcttatgctac

SEQ ID NO: 5616857 - DNA, 25 bp, Homo sapien
aattgatttcccccacctcggcctc

SEQ ID NO: 5616858 - DNA, 25 bp, Homo sapien
cactgcccggccaatcttaaatcat

SEQ ID NO: 5616859 - DNA, 25 bp, Homo sapien
ggccaatcttaaatcatagtagcac

SEQ ID NO: 5616860 - DNA, 25 bp, Homo sapien
catagtagcacttctggtggccttc

SEQ ID NO: 5616861 - DNA, 25 bp, Homo sapien
ccccctcctacctgcggctgctcta

SEQ ID NO: 5616862 - DNA, 25 bp, Homo sapien
gcaagtgcctttccgacaagacccc

SEQ ID NO: 5616863 - DNA, 25 bp, Homo sapien
ttcgacctctacaagatggacttcc

SEQ ID NO: 5616864 - DNA, 25 bp, Homo sapien
gtcgcctccgctacgacgtcgtggg

SEQ ID NO: 5616865 - DNA, 25 bp, Homo sapien
aggagcccttcaacgagcactggga

SEQ ID NO: 5616866 - DNA, 25 bp, Homo sapien
ttccgggacatcagccccttctacc

SEQ ID NO: 5616867 - DNA, 25 bp, Homo sapien
tgcttttcaactactccgccccctc

SEQ ID NO: 5616868 - DNA, 25 bp, Homo sapien
cgcacgcgctctgccacccgtgtcg

SEQ ID NO: 5616869 - DNA, 25 bp, Homo sapien
gcggggcaagtgcctttccgacaag

SEQ ID NO: 5616870 - DNA, 25 bp, Homo sapien
gcatccgacctgagcttccctgggc

SEQ ID NO: 5616871 - DNA, 25 bp, Homo sapien
acccgtgtcgcctccgctacgacgt

SEQ ID NO: 5616872 - DNA, 25 bp, Homo sapien
cttctatccagctgatggctctgtc

SEQ ID NO: 5616873 - DNA, 25 bp, Homo sapien
tcaactcttcccaaggtcgacgcgg

SEQ ID NO: 5616874 - DNA, 25 bp, Homo sapien
agaaaggatgttccccaaaggaatg

SEQ ID NO: 5616875 - DNA, 25 bp, Homo sapien
taacttccatataggggggttatgc

SEQ ID NO: 5616876 - DNA, 25 bp, Homo sapien
ataggggggttatgctcattaatcc

SEQ ID NO: 5616877 - DNA, 25 bp, Homo sapien
ggctctgtccactctaccaagtcaa

SEQ ID NO: 5616878 - DNA, 25 bp, Homo sapien
tttatctgacaaggatggcagaaga

SEQ ID NO: 5616879 - DNA, 25 bp, Homo sapien
agaagagaaatttaagatctaactt

SEQ ID NO: 5616880 - DNA, 25 bp, Homo sapien
gcacttatgtattcttgggcttgac

SEQ ID NO: 5616881 - DNA, 25 bp, Homo sapien
gtgaggtcaggtgcaatcttctatc

SEQ ID NO: 5616882 - DNA, 25 bp, Homo sapien
ggatggcagaagaccaattattggc

SEQ ID NO: 5616883 - DNA, 25 bp, Homo sapien
cagaactatctgaaaggtatggctc

SEQ ID NO: 5616884 - DNA, 25 bp, Homo sapien
ggataaagtatcaagcacataagct

SEQ ID NO: 5616885 - DNA, 25 bp, Homo sapien
gatgatggtgtatctgtgcctcaag

SEQ ID NO: 5616886 - DNA, 25 bp, Homo sapien
gaggcagctatcaaggcagtgccaa

SEQ ID NO: 5616887 - DNA, 25 bp, Homo sapien
aggcacagaaagtgcagatgatggt

SEQ ID NO: 5616888 - DNA, 25 bp, Homo sapien
gggtggcttgctaggattccccttg

SEQ ID NO: 5616889 - DNA, 25 bp, Homo sapien
gcttccatgaataaatctgcctccc

SEQ ID NO: 5616890 - DNA, 25 bp, Homo sapien
tttctctaacttgggtgagaggcag

SEQ ID NO: 5616891 - DNA, 25 bp, Homo sapien
cccttgaccaagactctggcaattc

SEQ ID NO: 5616892 - DNA, 25 bp, Homo sapien
gatagccctccagttagagagcttc

SEQ ID NO: 5616893 - DNA, 25 bp, Homo sapien
tcttccatcctcctgcgacctctgc

SEQ ID NO: 5616894 - DNA, 25 bp, Homo sapien
ttctctgaaagttgggacccggtcc

SEQ ID NO: 5616895 - DNA, 25 bp, Homo sapien
ggaccgggtcccaactttcagagaa

SEQ ID NO: 5616896 - DNA, 25 bp, Homo sapien
aactcgaagtaaggtccgctttgac

SEQ ID NO: 5616897 - DNA, 25 bp, Homo sapien
tatacaaatgacgcctcttggggtc

SEQ ID NO: 5616898 - DNA, 25 bp, Homo sapien
gctttctttggcatgaagggttctg

SEQ ID NO: 5616899 - DNA, 25 bp, Homo sapien
ctcttctctggaggtaaccgttacc

SEQ ID NO: 5616900 - DNA, 25 bp, Homo sapien
aatttatttaaggaaagcagactaa

SEQ ID NO: 5616901 - DNA, 25 bp, Homo sapien
aaggaaagcagactaaacaatcgtt

SEQ ID NO: 5616902 - DNA, 25 bp, Homo sapien
accgttaccagcgttttgagcacac

SEQ ID NO: 5616903 - DNA, 25 bp, Homo sapien
acgcctcttggggtctcattaagac

SEQ ID NO: 5616904 - DNA, 25 bp, Homo sapien
gtccgctttgaccatcgtcccgatc

SEQ ID NO: 5616905 - DNA, 25 bp, Homo sapien
attaagaccctaacgggagacgtga

SEQ ID NO: 5616906 - DNA, 25 bp, Homo sapien
gggagacgtgatggccaatttattt

SEQ ID NO: 5616907 - DNA, 25 bp, Homo sapien
ggcaggcacttagtcaggccatata

SEQ ID NO: 5616908 - DNA, 25 bp, Homo sapien
agtgctgtcataaggatgcatggta

SEQ ID NO: 5616909 - DNA, 25 bp, Homo sapien
gcagtgctgtcataaggatgcatgg

SEQ ID NO: 5616910 - DNA, 25 bp, Homo sapien
cctgcttgggccccctaagtaagct

SEQ ID NO: 5616911 - DNA, 25 bp, Homo sapien
gaatggcaggcacttagtcaggcca

SEQ ID NO: 5616912 - DNA, 25 bp, Homo sapien
atactgcagtgctgtcataaggatg

SEQ ID NO: 5616913 - DNA, 25 bp, Homo sapien
ataacctgtatactgcagtgctgtc

SEQ ID NO: 5616914 - DNA, 25 bp, Homo sapien
ttgccctagataataacctgtatac

SEQ ID NO: 5616915 - DNA, 25 bp, Homo sapien
actgtgcccagctctgactgtaact

SEQ ID NO: 5616916 - DNA, 25 bp, Homo sapien
gggctcacgcggtcttgctgccttg

SEQ ID NO: 5616917 - DNA, 25 bp, Homo sapien
gccccctaagtaagctgggattcta

SEQ ID NO: 5616918 - DNA, 25 bp, Homo sapien
gtgagaatctgagctgcgtttgact

SEQ ID NO: 5616919 - DNA, 25 bp, Homo sapien
gtggctgcaagtggattcaaaccca

SEQ ID NO: 5616920 - DNA, 25 bp, Homo sapien
aggtgaaacgatacgacacgatacg

SEQ ID NO: 5616921 - DNA, 25 bp, Homo sapien
agggagctctcaggagtctctctgg

SEQ ID NO: 5616922 - DNA, 25 bp, Homo sapien
aaagataaaggagacctcccctgtc

SEQ ID NO: 5616923 - DNA, 25 bp, Homo sapien
gtatcatcgctgcagttcccgcctc

SEQ ID NO: 5616924 - DNA, 25 bp, Homo sapien
tcctctaagagcactaagggagctc

SEQ ID NO: 5616925 - DNA, 25 bp, Homo sapien
cgttcaaggtcaagcagcctgcaag

SEQ ID NO: 5616926 - DNA, 25 bp, Homo sapien
cccatttttcagaggggactaaggc

SEQ ID NO: 5616927 - DNA, 25 bp, Homo sapien
ttcccgcctctggaagtctgagggg

SEQ ID NO: 5616928 - DNA, 25 bp, Homo sapien
aggtacagatcccaaggtgaaacga

SEQ ID NO: 5616929 - DNA, 25 bp, Homo sapien
gccaaatcttcaaagaacagatagc

SEQ ID NO: 5616930 - DNA, 25 bp, Homo sapien
aagaaaaacttatccaggaactaca

SEQ ID NO: 5616931 - DNA, 25 bp, Homo sapien
tcctgggccccagttatcctcctgc

SEQ ID NO: 5616932 - DNA, 25 bp, Homo sapien
ggtggtttcatagaaaaattctgcc

SEQ ID NO: 5616933 - DNA, 25 bp, Homo sapien
caggaactacaccacaaaaaagtac

SEQ ID NO: 5616934 - DNA, 25 bp, Homo sapien
tttccagacctctgtgcaaataaat

SEQ ID NO: 5616935 - DNA, 25 bp, Homo sapien
acttatccaggaactacaccacaaa

SEQ ID NO: 5616936 - DNA, 25 bp, Homo sapien
agctgcaatgctataaactggtcct

SEQ ID NO: 5616937 - DNA, 25 bp, Homo sapien
taaatactaagtgtatagtcaacag

SEQ ID NO: 5616938 - DNA, 25 bp, Homo sapien
caatgctataaactggtcctgactt

SEQ ID NO: 5616939 - DNA, 25 bp, Homo sapien
ttcaaagaacagatagctgcaatgc

SEQ ID NO: 5616940 - DNA, 25 bp, Homo sapien
ctgttatgaaggataataatgaaat

SEQ ID NO: 5616941 - DNA, 25 bp, Homo sapien
atatttaaatgaatgcaaaagaatt

SEQ ID NO: 5616942 - DNA, 25 bp, Homo sapien
cacatctaccaacaagaaaaataac

SEQ ID NO: 5616943 - DNA, 25 bp, Homo sapien
aaaatactgacagagcttaaatctc

SEQ ID NO: 5616944 - DNA, 25 bp, Homo sapien
aaatgctatcagtaaatgaaaatac

SEQ ID NO: 5616945 - DNA, 25 bp, Homo sapien
tatgaaggataataatgaaatatac

SEQ ID NO: 5616946 - DNA, 25 bp, Homo sapien
tgcaaaagaatttatttcaagacca

SEQ ID NO: 5616947 - DNA, 25 bp, Homo sapien
gtaaatgaaaatactgacagagctt

SEQ ID NO: 5616948 - DNA, 25 bp, Homo sapien
atatttttaaagtaaggctcaaata

SEQ ID NO: 5616949 - DNA, 25 bp, Homo sapien
ccaacaagaaaaataacaaattcat

SEQ ID NO: 5616950 - DNA, 25 bp, Homo sapien
tataattctgttatgaaggataata

SEQ ID NO: 5616951 - DNA, 25 bp, Homo sapien
agcgtggaggacctctacaccctca

SEQ ID NO: 5616952 - DNA, 25 bp, Homo sapien
actgaaagagacagactccagttcc

SEQ ID NO: 5616953 - DNA, 25 bp, Homo sapien
tactttcaggcaaacaagcgtggag

SEQ ID NO: 5616954 - DNA, 25 bp, Homo sapien
agcaagcagtaaaacctgttcagac

SEQ ID NO: 5616955 - DNA, 25 bp, Homo sapien
caagttaaaaaaggcactgaggccg

SEQ ID NO: 5616956 - DNA, 25 bp, Homo sapien
tacttggaaagcaagcagtaaaacc

SEQ ID NO: 5616957 - DNA, 25 bp, Homo sapien
ccagtcagcactaaaaacaggatta

SEQ ID NO: 5616958 - DNA, 25 bp, Homo sapien
agactccagttcccggaaggctgac

SEQ ID NO: 5616959 - DNA, 25 bp, Homo sapien
caaacaaaaaagcactgaaagagac

SEQ ID NO: 5616960 - DNA, 25 bp, Homo sapien
gttcagacagcatcattatattact

SEQ ID NO: 5616961 - DNA, 25 bp, Homo sapien
cggaaggctgacccagtcagcacta

SEQ ID NO: 5616962 - DNA, 25 bp, Homo sapien
atcaaaaacacaaagcataactata

SEQ ID NO: 5616963 - DNA, 25 bp, Homo sapien
tctttagtactgcacaaaatttgta

SEQ ID NO: 5616964 - DNA, 25 bp, Homo sapien
gaccacaatggtagactgctttttc

SEQ ID NO: 5616965 - DNA, 25 bp, Homo sapien
gatgcttctggtcatataattgttc

SEQ ID NO: 5616966 - DNA, 25 bp, Homo sapien
caagtacaaaaattaacacatgatt

SEQ ID NO: 5616967 - DNA, 25 bp, Homo sapien
acaatacaaagaatatcaaaaacac

SEQ ID NO: 5616968 - DNA, 25 bp, Homo sapien
gtgtctaacaaataacaaaaatatc

SEQ ID NO: 5616969 - DNA, 25 bp, Homo sapien
gttattttcaaggaccacaatggta

SEQ ID NO: 5616970 - DNA, 25 bp, Homo sapien
atctatagttattttcaaggaccac

SEQ ID NO: 5616971 - DNA, 25 bp, Homo sapien
actataaccattgtcttcaagtgct

SEQ ID NO: 5616972 - DNA, 25 bp, Homo sapien
tacataatggttagatgcttctggt

SEQ ID NO: 5616973 - DNA, 25 bp, Homo sapien
aagtactgctaggcttctgagaaac

SEQ ID NO: 5616974 - DNA, 25 bp, Homo sapien
cagcctctcaatgcactaggattac

SEQ ID NO: 5616975 - DNA, 25 bp, Homo sapien
aaaaatagaaggtagagttattgga

SEQ ID NO: 5616976 - DNA, 25 bp, Homo sapien
attctcagagaatgccaatttaact

SEQ ID NO: 5616977 - DNA, 25 bp, Homo sapien
aagttctcagtgggttgttttggaa

SEQ ID NO: 5616978 - DNA, 25 bp, Homo sapien
caagagcattaatccttaagagttc

SEQ ID NO: 5616979 - DNA, 25 bp, Homo sapien
tagaaggtagagttattggaatgta

SEQ ID NO: 5616980 - DNA, 25 bp, Homo sapien
gaggagtaagtactgctaggcttct

SEQ ID NO: 5616981 - DNA, 25 bp, Homo sapien
ttggaatgtagggatatctcataac

SEQ ID NO: 5616982 - DNA, 25 bp, Homo sapien
ctattagagggaaatctagtttgcc

SEQ ID NO: 5616983 - DNA, 25 bp, Homo sapien
agaaaggaacagaaactactcaaac

SEQ ID NO: 5616984 - DNA, 25 bp, Homo sapien
ggagtcgggcagtaatttgctattt

SEQ ID NO: 5616985 - DNA, 25 bp, Homo sapien
attaaagaactaggatcacgcggaa

SEQ ID NO: 5616986 - DNA, 25 bp, Homo sapien
tgagtctctgattagtaggtaccac

SEQ ID NO: 5616987 - DNA, 25 bp, Homo sapien
acgcggaatggatattatggtcaat

SEQ ID NO: 5616988 - DNA, 25 bp, Homo sapien
ttcaaaacatcaaaagcatatcact

SEQ ID NO: 5616989 - DNA, 25 bp, Homo sapien
ggtgaagttcaaaacatttcctggc

SEQ ID NO: 5616990 - DNA, 25 bp, Homo sapien
ggcagacattagcaaagctttggtg

SEQ ID NO: 5616991 - DNA, 25 bp, Homo sapien
gctgacagccttatggtaggcagac

SEQ ID NO: 5616992 - DNA, 25 bp, Homo sapien
atcacttagtgagtctttgggttct

SEQ ID NO: 5616993 - DNA, 25 bp, Homo sapien
acaaaacagtaaagacttccagtaa

SEQ ID NO: 5616994 - DNA, 25 bp, Homo sapien
tagccttaggttgagatttactgtt

SEQ ID NO: 5616995 - DNA, 25 bp, Homo sapien
cacctgaaataagctacaaaagata

SEQ ID NO: 5616996 - DNA, 25 bp, Homo sapien
gaaaatgatggacggaaattaacaa

SEQ ID NO: 5616997 - DNA, 25 bp, Homo sapien
cgagatgaagaacaatcaaaggaaa

SEQ ID NO: 5616998 - DNA, 25 bp, Homo sapien
aaccagtaagttagagaaataatct

SEQ ID NO: 5616999 - DNA, 25 bp, Homo sapien
atggaaggacattaaattataactc

SEQ ID NO: 5617000 - DNA, 25 bp, Homo sapien
aggaaaataccaagtatgaccttcc

SEQ ID NO: 5617001 - DNA, 25 bp, Homo sapien
actatgaaggcattccagctgaggt

SEQ ID NO: 5617002 - DNA, 25 bp, Homo sapien
attaacaatcattcttgggcggggg

SEQ ID NO: 5617003 - DNA, 25 bp, Homo sapien
aaaaagggttacacacattctcggc

SEQ ID NO: 5617004 - DNA, 25 bp, Homo sapien
catgtgaacactatgaaggcattcc

SEQ ID NO: 5617005 - DNA, 25 bp, Homo sapien
aaatacagtgattgaatggaaggac

SEQ ID NO: 5617006 - DNA, 25 bp, Homo sapien
tgaatctgagtgaaaatatgcaatt

SEQ ID NO: 5617007 - DNA, 25 bp, Homo sapien
ctttggcattaatacaacttgtaac

SEQ ID NO: 5617008 - DNA, 25 bp, Homo sapien
cattccttaggataaagattctttt

SEQ ID NO: 5617009 - DNA, 25 bp, Homo sapien
aaaggcaaagctctactaactattt

SEQ ID NO: 5617010 - DNA, 25 bp, Homo sapien
acaacttgtaactggatgagaagaa

SEQ ID NO: 5617011 - DNA, 25 bp, Homo sapien
tgaggtaactttgaagaagttttga

SEQ ID NO: 5617012 - DNA, 25 bp, Homo sapien
ttctcctctgtaaacataccaaaac

SEQ ID NO: 5617013 - DNA, 25 bp, Homo sapien
catgaccattcaccattaaagcatt

SEQ ID NO: 5617014 - DNA, 25 bp, Homo sapien
tttaacaggatgacttagaaatcta

SEQ ID NO: 5617015 - DNA, 25 bp, Homo sapien
tggatgagaagaattaaaaagtaat

SEQ ID NO: 5617016 - DNA, 25 bp, Homo sapien
taacttataatagtgaatggctgaa

SEQ ID NO: 5617017 - DNA, 25 bp, Homo sapien
gagtaacactgatcctaacactaaa

SEQ ID NO: 5617018 - DNA, 25 bp, Homo sapien
tacaacactttgagtaacactgatc

SEQ ID NO: 5617019 - DNA, 25 bp, Homo sapien
tgtggtaaagaccctgcttaagtat

SEQ ID NO: 5617020 - DNA, 25 bp, Homo sapien
tttgccaacaagactgccaactcct

SEQ ID NO: 5617021 - DNA, 25 bp, Homo sapien
tgtcaagaagagtcaatgtaccaaa

SEQ ID NO: 5617022 - DNA, 25 bp, Homo sapien
ttacagctagtcaagaattaaatct

SEQ ID NO: 5617023 - DNA, 25 bp, Homo sapien
aattaatagcaaagtgccatgtcaa

SEQ ID NO: 5617024 - DNA, 25 bp, Homo sapien
tttaactctgtggtaaagaccctgc

SEQ ID NO: 5617025 - DNA, 25 bp, Homo sapien
aaaagttaggaaccctccagtctga

SEQ ID NO: 5617026 - DNA, 25 bp, Homo sapien
gccaactccttaagcattacagcta

SEQ ID NO: 5617027 - DNA, 25 bp, Homo sapien
tagcaaagtgccatgtcaagaagag

SEQ ID NO: 5617028 - DNA, 25 bp, Homo sapien
aagtggtcatgtctacggaaaaaaa

SEQ ID NO: 5617029 - DNA, 25 bp, Homo sapien
tataagatttccctcggaggggagc

SEQ ID NO: 5617030 - DNA, 25 bp, Homo sapien
acttcaaatacaacagaagccttga

SEQ ID NO: 5617031 - DNA, 25 bp, Homo sapien
attagctaaacagataaatatatac

SEQ ID NO: 5617032 - DNA, 25 bp, Homo sapien
acagcatcccaccaccagttaataa

SEQ ID NO: 5617033 - DNA, 25 bp, Homo sapien
taattaaagttgagcaataaagtat

SEQ ID NO: 5617034 - DNA, 25 bp, Homo sapien
ctgaggctcagggattgagcactta

SEQ ID NO: 5617035 - DNA, 25 bp, Homo sapien
tgaaaaataggtataattagaaaca

SEQ ID NO: 5617036 - DNA, 25 bp, Homo sapien
tatacaaaagacaagatattgcact

SEQ ID NO: 5617037 - DNA, 25 bp, Homo sapien
cagttaataaagtggtcatgtctac

SEQ ID NO: 5617038 - DNA, 25 bp, Homo sapien
agcacttagattttgggtaagcaac

SEQ ID NO: 5617039 - DNA, 25 bp, Homo sapien
gagaaaactgagatacaaaaaagcc

SEQ ID NO: 5617040 - DNA, 25 bp, Homo sapien
ccacaaaaagtgctcccaagtccca

SEQ ID NO: 5617041 - DNA, 25 bp, Homo sapien
tgtgttagaggtgctgcagtttctt

SEQ ID NO: 5617042 - DNA, 25 bp, Homo sapien
gttgcacaactaatgtggcaggacc

SEQ ID NO: 5617043 - DNA, 25 bp, Homo sapien
ggagcagacatccagaaccatgaac

SEQ ID NO: 5617044 - DNA, 25 bp, Homo sapien
ggcccgcttgtgagtggtttagctt

SEQ ID NO: 5617045 - DNA, 25 bp, Homo sapien
tgtgccccttccaggttgcagatcc

SEQ ID NO: 5617046 - DNA, 25 bp, Homo sapien
aggccaaggatggttcaaccacagt

SEQ ID NO: 5617047 - DNA, 25 bp, Homo sapien
ttagcttgttgctggtggaatctcc

SEQ ID NO: 5617048 - DNA, 25 bp, Homo sapien
actgctctctctcccggcgaccagc

SEQ ID NO: 5617049 - DNA, 25 bp, Homo sapien
acttcctctgggcccgcttgtgagt

SEQ ID NO: 5617050 - DNA, 25 bp, Homo sapien
tgttttattggctcggggtcatctt

SEQ ID NO: 5617051 - DNA, 25 bp, Homo sapien
gatggataccataaaagccctgact

SEQ ID NO: 5617052 - DNA, 25 bp, Homo sapien
gggtagatggtgagaaattacttaa

SEQ ID NO: 5617053 - DNA, 25 bp, Homo sapien
taactaaattatacttgcacccaac

SEQ ID NO: 5617054 - DNA, 25 bp, Homo sapien
cctgacatgaaagagtaagaaggta

SEQ ID NO: 5617055 - DNA, 25 bp, Homo sapien
gggccagcacacctgacatgaaaga

SEQ ID NO: 5617056 - DNA, 25 bp, Homo sapien
tttgttgtgttggtcattgagggcc

SEQ ID NO: 5617057 - DNA, 25 bp, Homo sapien
acattattcgagtgatggataccat

SEQ ID NO: 5617058 - DNA, 25 bp, Homo sapien
aattctaagtctaagtctaagtctc

SEQ ID NO: 5617059 - DNA, 25 bp, Homo sapien
aacacaaccactagttaaaacttgc

SEQ ID NO: 5617060 - DNA, 25 bp, Homo sapien
gtgcagtgggaaagactctgtatga

SEQ ID NO: 5617061 - DNA, 25 bp, Homo sapien
gcatgtccaacaagccccaggtgat

SEQ ID NO: 5617062 - DNA, 25 bp, Homo sapien
gggcagcacaccaacacttggatgt

SEQ ID NO: 5617063 - DNA, 25 bp, Homo sapien
atcctgaccttctagggcagcacac

SEQ ID NO: 5617064 - DNA, 25 bp, Homo sapien
agaagatatgctacagcaggcctgg

SEQ ID NO: 5617065 - DNA, 25 bp, Homo sapien
actagaacccagttgatgttcagaa

SEQ ID NO: 5617066 - DNA, 25 bp, Homo sapien
aggctctcagacaaccccgagtcaa

SEQ ID NO: 5617067 - DNA, 25 bp, Homo sapien
tgatgccaatgttgcaggctctcag

SEQ ID NO: 5617068 - DNA, 25 bp, Homo sapien
attcatcacctggcgattccgttac

SEQ ID NO: 5617069 - DNA, 25 bp, Homo sapien
gaacagacacagctgaattttgttt

SEQ ID NO: 5617070 - DNA, 25 bp, Homo sapien
gattccgttacagtagaagatatgc

SEQ ID NO: 5617071 - DNA, 25 bp, Homo sapien
gaaaaaagcaatgtgaagccaagca

SEQ ID NO: 5617072 - DNA, 25 bp, Homo sapien
ctgacattcctgttatcaactcctc

SEQ ID NO: 5617073 - DNA, 25 bp, Homo sapien
gaattgacaaaaagctattttccta

SEQ ID NO: 5617074 - DNA, 25 bp, Homo sapien
tgatatttcaggtagagtccgagga

SEQ ID NO: 5617075 - DNA, 25 bp, Homo sapien
tagagatatacgactattagtaaaa

SEQ ID NO: 5617076 - DNA, 25 bp, Homo sapien
tgaaaatcttttagagatatacgac

SEQ ID NO: 5617077 - DNA, 25 bp, Homo sapien
tgaaatgtcaatatgaaaaccctgc

SEQ ID NO: 5617078 - DNA, 25 bp, Homo sapien
atgaaaaccctgccaaataccttat

SEQ ID NO: 5617079 - DNA, 25 bp, Homo sapien
aactgagactgaaatgtcaatatga

SEQ ID NO: 5617080 - DNA, 25 bp, Homo sapien
tatttcaggtagagtccgaggaata

SEQ ID NO: 5617081 - DNA, 25 bp, Homo sapien
ttcctacacttgacagtaatatact

SEQ ID NO: 5617082 - DNA, 25 bp, Homo sapien
attttgatatttcaggtagagtccg

SEQ ID NO: 5617083 - DNA, 25 bp, Homo sapien
gacttaggggcaatgctgacccata

SEQ ID NO: 5617084 - DNA, 25 bp, Homo sapien
gaggggagacactttgcaacttcaa

SEQ ID NO: 5617085 - DNA, 25 bp, Homo sapien
tccttcttggatgactacgtgggcg

SEQ ID NO: 5617086 - DNA, 25 bp, Homo sapien
tataacaatagcagcggagatgaag

SEQ ID NO: 5617087 - DNA, 25 bp, Homo sapien
tcaagttctatctaggtaggcctgg

SEQ ID NO: 5617088 - DNA, 25 bp, Homo sapien
gtgaatcacatgaggttgagcttgc

SEQ ID NO: 5617089 - DNA, 25 bp, Homo sapien
gcggagatgaagttaggccaatttg

SEQ ID NO: 5617090 - DNA, 25 bp, Homo sapien
gacacccatagataacagtggattc

SEQ ID NO: 5617091 - DNA, 25 bp, Homo sapien
ctttctgaaggaatgacacccatag

SEQ ID NO: 5617092 - DNA, 25 bp, Homo sapien
tgagtcaatacaaatgcagaaagaa

SEQ ID NO: 5617093 - DNA, 25 bp, Homo sapien
ttgcatagcatgaaatagccaattt

SEQ ID NO: 5617094 - DNA, 25 bp, Homo sapien
ggcaaatttacataaaggaggagct

SEQ ID NO: 5617095 - DNA, 25 bp, Homo sapien
ttgcagtgataaacaagtccagttc

SEQ ID NO: 5617096 - DNA, 25 bp, Homo sapien
tgaggttaaatcaggaaccagaact

SEQ ID NO: 5617097 - DNA, 25 bp, Homo sapien
agttccagtagtgagaagacacagt

SEQ ID NO: 5617098 - DNA, 25 bp, Homo sapien
ctccaaacatctgggattatgggca

SEQ ID NO: 5617099 - DNA, 25 bp, Homo sapien
ttctatagcgagtttggcaaattta

SEQ ID NO: 5617100 - DNA, 25 bp, Homo sapien
ggaaacttgtatatatgggtcagat

SEQ ID NO: 5617101 - DNA, 25 bp, Homo sapien
ttgctctctgaaagattaagaatcc

SEQ ID NO: 5617102 - DNA, 25 bp, Homo sapien
ctctcaccccaggcctccaaacatc

SEQ ID NO: 5617103 - DNA, 25 bp, Homo sapien
aaggaggagctcaaattttagagat

SEQ ID NO: 5617104 - DNA, 25 bp, Homo sapien
tgggagaaacttgcagtgataaaca

SEQ ID NO: 5617105 - DNA, 25 bp, Homo sapien
accctcttagaaagtggctccaagt

SEQ ID NO: 5617106 - DNA, 25 bp, Homo sapien
tccttagtccctggtatggagccac

SEQ ID NO: 5617107 - DNA, 25 bp, Homo sapien
tggagccacctctgctaaagtactc

SEQ ID NO: 5617108 - DNA, 25 bp, Homo sapien
catcagaaagttgctcaagagtctt

SEQ ID NO: 5617109 - DNA, 25 bp, Homo sapien
tcatagccccccagtaagccttctc

SEQ ID NO: 5617110 - DNA, 25 bp, Homo sapien
ctttgcacggcaacttacaccatgc

SEQ ID NO: 5617111 - DNA, 25 bp, Homo sapien
cacagcgtttgggaactcacttctt

SEQ ID NO: 5617112 - DNA, 25 bp, Homo sapien
atcccaagcaggaatccttagtccc

SEQ ID NO: 5617113 - DNA, 25 bp, Homo sapien
caattctaggagctgtctttgtctt

SEQ ID NO: 5617114 - DNA, 25 bp, Homo sapien
tccacagtaattacagcagcctatc

SEQ ID NO: 5617115 - DNA, 25 bp, Homo sapien
tgcttggtgtaagaggcttcaattc

SEQ ID NO: 5617116 - DNA, 25 bp, Homo sapien
aatatccgcttgacccagtggctta

SEQ ID NO: 5617117 - DNA, 25 bp, Homo sapien
tttctagaaggagataaatgcagga

SEQ ID NO: 5617118 - DNA, 25 bp, Homo sapien
ccctgggattctgaggaacagggag

SEQ ID NO: 5617119 - DNA, 25 bp, Homo sapien
tggagagcccctatggcaacttgga

SEQ ID NO: 5617120 - DNA, 25 bp, Homo sapien
actcacaagacagaagaacgtgcat

SEQ ID NO: 5617121 - DNA, 25 bp, Homo sapien
tgggcaccaggcttaaaatatccgc

SEQ ID NO: 5617122 - DNA, 25 bp, Homo sapien
tgatacagcagaaaaacactgattc

SEQ ID NO: 5617123 - DNA, 25 bp, Homo sapien
tcaagtgaaatatttggagagcccc

SEQ ID NO: 5617124 - DNA, 25 bp, Homo sapien
gaacgtgcatatgtcaaggagaaat

SEQ ID NO: 5617125 - DNA, 25 bp, Homo sapien
caggatgactgcctgcttgccctgg

SEQ ID NO: 5617126 - DNA, 25 bp, Homo sapien
gaaatgttcaatgctgggcaccagg

SEQ ID NO: 5617127 - DNA, 25 bp, Homo sapien
cgcagtacatccgcgagctcaagga

SEQ ID NO: 5617128 - DNA, 25 bp, Homo sapien
ggctgcagacgcagctcagcgaaag

SEQ ID NO: 5617129 - DNA, 25 bp, Homo sapien
aagctgcagtacctggctgcacaga

SEQ ID NO: 5617130 - DNA, 25 bp, Homo sapien
cactcggactcatcgcagtacatcc

SEQ ID NO: 5617131 - DNA, 25 bp, Homo sapien
gaaccactcggactcatcgcagtac

SEQ ID NO: 5617132 - DNA, 25 bp, Homo sapien
gcaggaccacatccaccgcaacctt

SEQ ID NO: 5617133 - DNA, 25 bp, Homo sapien
catccaccgcaaccttctgaaccgc

SEQ ID NO: 5617134 - DNA, 25 bp, Homo sapien
ccagctgaaccactcggactcatcg

SEQ ID NO: 5617135 - DNA, 25 bp, Homo sapien
ctcatcgcagtacatccgcgagctc

SEQ ID NO: 5617136 - DNA, 25 bp, Homo sapien
cagtacctggctgcacagaacaagg

SEQ ID NO: 5617137 - DNA, 25 bp, Homo sapien
gcaaccttctgaaccgcgtggaggc

SEQ ID NO: 5617138 - DNA, 25 bp, Homo sapien
taacactgttgggaagctgaattag

SEQ ID NO: 5617139 - DNA, 25 bp, Homo sapien
agagaacattccccgatggaagcac

SEQ ID NO: 5617140 - DNA, 25 bp, Homo sapien
tggaagcactgtctgcctgcaagta

SEQ ID NO: 5617141 - DNA, 25 bp, Homo sapien
gtgggattccagaggtaacactgtt

SEQ ID NO: 5617142 - DNA, 25 bp, Homo sapien
agaggttttgtagtggaatgtatgt

SEQ ID NO: 5617143 - DNA, 25 bp, Homo sapien
ctgcctgcaagtagaaatcccatta

SEQ ID NO: 5617144 - DNA, 25 bp, Homo sapien
gagagactagttaaaaggaaggctc

SEQ ID NO: 5617145 - DNA, 25 bp, Homo sapien
gccaagatctagaggatacaaaatc

SEQ ID NO: 5617146 - DNA, 25 bp, Homo sapien
gttaaaaggaaggctcttgctctgt

SEQ ID NO: 5617147 - DNA, 25 bp, Homo sapien
accatgttgccttgcctcagagaac

SEQ ID NO: 5617148 - DNA, 25 bp, Homo sapien
aaaatatgttaagaggagagactag

SEQ ID NO: 5617149 - DNA, 25 bp, Homo sapien
atcttagacagtcctagttatttac

SEQ ID NO: 5617150 - DNA, 25 bp, Homo sapien
gtaaataactaggactgtctaagat

SEQ ID NO: 5617151 - DNA, 25 bp, Homo sapien
tgtttaagaatatgcctagaggctg

SEQ ID NO: 5617152 - DNA, 25 bp, Homo sapien
taatacttgactgaggaaaacctga

SEQ ID NO: 5617153 - DNA, 25 bp, Homo sapien
tcatctgaatagaagctacaaacac

SEQ ID NO: 5617154 - DNA, 25 bp, Homo sapien
aagttcagcaaatggaagtcttatc

SEQ ID NO: 5617155 - DNA, 25 bp, Homo sapien
attcagaaaatataagataacaacc

SEQ ID NO: 5617156 - DNA, 25 bp, Homo sapien
aacaagatagcttagcaatagtttt

SEQ ID NO: 5617157 - DNA, 25 bp, Homo sapien
atgaggatcatctacccgaaaacac

SEQ ID NO: 5617158 - DNA, 25 bp, Homo sapien
caaaacgaaaccaacaagatagctt

SEQ ID NO: 5617159 - DNA, 25 bp, Homo sapien
tttgcaaatgatgaggatcatctac

SEQ ID NO: 5617160 - DNA, 25 bp, Homo sapien
tgcctagaggctgtgcaattaaagc

SEQ ID NO: 5617161 - DNA, 25 bp, Homo sapien
aaaggaatcccaatattagcccatt

SEQ ID NO: 5617162 - DNA, 25 bp, Homo sapien
gcccttcccctcccgacctctgctc

SEQ ID NO: 5617163 - DNA, 25 bp, Homo sapien
taaagtcaaggtgcaatacttccta

SEQ ID NO: 5617164 - DNA, 25 bp, Homo sapien
ttctgacagtggaccattgggattc

SEQ ID NO: 5617165 - DNA, 25 bp, Homo sapien
tggcacgcagcagtcatcaaatatg

SEQ ID NO: 5617166 - DNA, 25 bp, Homo sapien
cagaaacatttgaatcaccagcttc

SEQ ID NO: 5617167 - DNA, 25 bp, Homo sapien
gagtttgcaaatgacttgggaattc

SEQ ID NO: 5617168 - DNA, 25 bp, Homo sapien
tcggttcactgatcatgcctcactc

SEQ ID NO: 5617169 - DNA, 25 bp, Homo sapien
tttctttgaatgaaggaatacagga

SEQ ID NO: 5617170 - DNA, 25 bp, Homo sapien
attgggattcctagtaaatgagttt

SEQ ID NO: 5617171 - DNA, 25 bp, Homo sapien
tcctgacctgagattatcttgccta

SEQ ID NO: 5617172 - DNA, 25 bp, Homo sapien
aggcccccaccactacctcctgacc

SEQ ID NO: 5617173 - DNA, 25 bp, Homo sapien
gccgtgatggcagacgttctgaaaa

SEQ ID NO: 5617174 - DNA, 25 bp, Homo sapien
catgcaccatgaccgcagatgcgtt

SEQ ID NO: 5617175 - DNA, 25 bp, Homo sapien
gtaccataatcacagacgcgttcgc

SEQ ID NO: 5617176 - DNA, 25 bp, Homo sapien
acgcgttctgaaaaacacgtgcgcc

SEQ ID NO: 5617177 - DNA, 25 bp, Homo sapien
atgtgtgctgtgatcgcagacacgt

SEQ ID NO: 5617178 - DNA, 25 bp, Homo sapien
gtaagctgaaaaatgcacggaacaa

SEQ ID NO: 5617179 - DNA, 25 bp, Homo sapien
acatgcactgtgatcgcagcacgtg

SEQ ID NO: 5617180 - DNA, 25 bp, Homo sapien
gtgtgctgtgaccacagacgcgttc

SEQ ID NO: 5617181 - DNA, 25 bp, Homo sapien
agatcaatacctagggacaccattc

SEQ ID NO: 5617182 - DNA, 25 bp, Homo sapien
tgtgggattgcaggtcaaagattaa

SEQ ID NO: 5617183 - DNA, 25 bp, Homo sapien
tgaaaaatacgtgcgctgtgattgc

SEQ ID NO: 5617184 - DNA, 25 bp, Homo sapien
tcacggatcactaaaaacaaagaag

SEQ ID NO: 5617185 - DNA, 25 bp, Homo sapien
aatactgccaactagaattccttcc

SEQ ID NO: 5617186 - DNA, 25 bp, Homo sapien
aggctgccataatatttaggtttgc

SEQ ID NO: 5617187 - DNA, 25 bp, Homo sapien
ttcaaatacgaagcagcccctcagg

SEQ ID NO: 5617188 - DNA, 25 bp, Homo sapien
caaagaagacttccttggtactttc

SEQ ID NO: 5617189 - DNA, 25 bp, Homo sapien
caccgttatgagtagtgcacagtgc

SEQ ID NO: 5617190 - DNA, 25 bp, Homo sapien
catctggaaaggtgtgtctcacacc

SEQ ID NO: 5617191 - DNA, 25 bp, Homo sapien
aaaacgccagtaacaaaatgcatac

SEQ ID NO: 5617192 - DNA, 25 bp, Homo sapien
gatggtcttgaggttatcaccgtta

SEQ ID NO: 5617193 - DNA, 25 bp, Homo sapien
aaatgcatacatacgtcaacgcctg

SEQ ID NO: 5617194 - DNA, 25 bp, Homo sapien
acgtcaacgcctgagacaaagcatg

SEQ ID NO: 5617195 - DNA, 25 bp, Homo sapien
gtttggaaggacaatgtactcacac

SEQ ID NO: 5617196 - DNA, 25 bp, Homo sapien
taaccacgtgaatttgtgagcaaaa

SEQ ID NO: 5617197 - DNA, 25 bp, Homo sapien
aaatgtgaagatgtgtttccacgct

SEQ ID NO: 5617198 - DNA, 25 bp, Homo sapien
gtttgggatgaatcaggtttggaag

SEQ ID NO: 5617199 - DNA, 25 bp, Homo sapien
gctgatggttaataagtgtgaagac

SEQ ID NO: 5617200 - DNA, 25 bp, Homo sapien
aaatgaaaaagagctatatgacata

SEQ ID NO: 5617201 - DNA, 25 bp, Homo sapien
aagtgttgagcaagcagagctcttc

SEQ ID NO: 5617202 - DNA, 25 bp, Homo sapien
gtgagcaaaaacattccctgacctt

SEQ ID NO: 5617203 - DNA, 25 bp, Homo sapien
cctaaataagggaaatgtgaagatg

SEQ ID NO: 5617204 - DNA, 25 bp, Homo sapien
cagtagtaaatgaaatgcaattatg

SEQ ID NO: 5617205 - DNA, 25 bp, Homo sapien
ggcactggagaaaaacctcacagag

SEQ ID NO: 5617206 - DNA, 25 bp, Homo sapien
acagacaaaacatggactcacaatc

SEQ ID NO: 5617207 - DNA, 25 bp, Homo sapien
ccggaagtcaatagggtgtcttaat

SEQ ID NO: 5617208 - DNA, 25 bp, Homo sapien
gctgcatggtatggcttaggcttat

SEQ ID NO: 5617209 - DNA, 25 bp, Homo sapien
ctgtgctgctgggtaatcaattgac

SEQ ID NO: 5617210 - DNA, 25 bp, Homo sapien
atccggtctatcatttgtgggtatt

SEQ ID NO: 5617211 - DNA, 25 bp, Homo sapien
aggcttatgccctatgatcgccctc

SEQ ID NO: 5617212 - DNA, 25 bp, Homo sapien
taggaaacatgggatttggttgctg

SEQ ID NO: 5617213 - DNA, 25 bp, Homo sapien
gatcgccctcactgacatcgcctgt

SEQ ID NO: 5617214 - DNA, 25 bp, Homo sapien
ttataggcacaacagacaaaacatg

SEQ ID NO: 5617215 - DNA, 25 bp, Homo sapien
ttaacacagtaggaaacatgggatt

SEQ ID NO: 5617216 - DNA, 25 bp, Homo sapien
tatagtagaatgatacagatttcaa

SEQ ID NO: 5617217 - DNA, 25 bp, Homo sapien
aaagtagagccagtaaaagatataa

SEQ ID NO: 5617218 - DNA, 25 bp, Homo sapien
ttatatcttttactggctctacttt

SEQ ID NO: 5617219 - DNA, 25 bp, Homo sapien
aagacctactagggagaaaatgaac

SEQ ID NO: 5617220 - DNA, 25 bp, Homo sapien
cactgcaaacagactttctcctggc

SEQ ID NO: 5617221 - DNA, 25 bp, Homo sapien
atgaagtatggagactaagcccaat

SEQ ID NO: 5617222 - DNA, 25 bp, Homo sapien
aatagcatgtcactgagggatgttt

SEQ ID NO: 5617223 - DNA, 25 bp, Homo sapien
gggagaaaatgaacacactgcaaac

SEQ ID NO: 5617224 - DNA, 25 bp, Homo sapien
aaggtataccggaaagaatccagct

SEQ ID NO: 5617225 - DNA, 25 bp, Homo sapien
attggttggcaatgacaagacctac

SEQ ID NO: 5617226 - DNA, 25 bp, Homo sapien
aggaggagatagttcaccagattgg

SEQ ID NO: 5617227 - DNA, 25 bp, Homo sapien
ggctccttagagaatacgtccgctc

SEQ ID NO: 5617228 - DNA, 25 bp, Homo sapien
cgaacgctaccaactatgtgtgaac

SEQ ID NO: 5617229 - DNA, 25 bp, Homo sapien
aagcccaatagtgtcatccatagtg

SEQ ID NO: 5617230 - DNA, 25 bp, Homo sapien
aaaaagtagagccagtaaaagatat

SEQ ID NO: 5617231 - DNA, 25 bp, Homo sapien
atatcttttactggctctacttttt

SEQ ID NO: 5617232 - DNA, 25 bp, Homo sapien
cacttttcaaaaatgtcgaagttgg

SEQ ID NO: 5617233 - DNA, 25 bp, Homo sapien
agagaagcaaatgccttaacgaagg

SEQ ID NO: 5617234 - DNA, 25 bp, Homo sapien
ttaacgaaggcaattttgatgataa

SEQ ID NO: 5617235 - DNA, 25 bp, Homo sapien
aagatcacatctacctatatgtttc

SEQ ID NO: 5617236 - DNA, 25 bp, Homo sapien
ctagacatgagtcaagagaagcaaa

SEQ ID NO: 5617237 - DNA, 25 bp, Homo sapien
tgataatggtgacaacatcactagc

SEQ ID NO: 5617238 - DNA, 25 bp, Homo sapien
atggtgacaacatcactagccaagt

SEQ ID NO: 5617239 - DNA, 25 bp, Homo sapien
gacaacatcactagccaagttattc

SEQ ID NO: 5617240 - DNA, 25 bp, Homo sapien
atccatatgtagataagatcacatc

SEQ ID NO: 5617241 - DNA, 25 bp, Homo sapien
attttgatgataatggtgacaacat

SEQ ID NO: 5617242 - DNA, 25 bp, Homo sapien
gagtcaagagaagcaaatgccttaa

SEQ ID NO: 5617243 - DNA, 25 bp, Homo sapien
agtccaaccacttagattgtacaat

SEQ ID NO: 5617244 - DNA, 25 bp, Homo sapien
taacacctcagagtagaggttatga

SEQ ID NO: 5617245 - DNA, 25 bp, Homo sapien
ccttgagacaaacagtttccctaat

SEQ ID NO: 5617246 - DNA, 25 bp, Homo sapien
aactttaattgccagaagtaaaagc

SEQ ID NO: 5617247 - DNA, 25 bp, Homo sapien
atcaaggttgggttaaactttgtga

SEQ ID NO: 5617248 - DNA, 25 bp, Homo sapien
aaaatgttgtgggaagtgcatattt

SEQ ID NO: 5617249 - DNA, 25 bp, Homo sapien
agaggttatgaaaggaccctgaatt

SEQ ID NO: 5617250 - DNA, 25 bp, Homo sapien
cattggcagtctagtcacaagcacc

SEQ ID NO: 5617251 - DNA, 25 bp, Homo sapien
tccaggaattttcttcagtgagcat

SEQ ID NO: 5617252 - DNA, 25 bp, Homo sapien
tagtcacaagcacctcctcgatcct

SEQ ID NO: 5617253 - DNA, 25 bp, Homo sapien
tgagcatttgtgaagactcggggat

SEQ ID NO: 5617254 - DNA, 25 bp, Homo sapien
gtccaccccagagctaacaatatgc

SEQ ID NO: 5617255 - DNA, 25 bp, Homo sapien
tcaagatgaatcagacaacaaggga

SEQ ID NO: 5617256 - DNA, 25 bp, Homo sapien
atgcactaaagtacagagaccaata

SEQ ID NO: 5617257 - DNA, 25 bp, Homo sapien
cagaaccacttgatcaggcctcacc

SEQ ID NO: 5617258 - DNA, 25 bp, Homo sapien
gagggttatttgaatgggcaagata

SEQ ID NO: 5617259 - DNA, 25 bp, Homo sapien
aaacaactggagctgttcagagaac

SEQ ID NO: 5617260 - DNA, 25 bp, Homo sapien
tttgaatgggcaagatatagaaaag

SEQ ID NO: 5617261 - DNA, 25 bp, Homo sapien
aggcttgcaggtgccacagtcattt

SEQ ID NO: 5617262 - DNA, 25 bp, Homo sapien
gaaatggagtccttggcattatcat

SEQ ID NO: 5617263 - DNA, 25 bp, Homo sapien
ggactttcctagggactgatgggta

SEQ ID NO: 5617264 - DNA, 25 bp, Homo sapien
tttgcaattatgagggaaacaactg

SEQ ID NO: 5617265 - DNA, 25 bp, Homo sapien
gcaagttcctttacctcgcgcgcag

SEQ ID NO: 5617266 - DNA, 25 bp, Homo sapien
ccgggctctcctcccgggagagcgg

SEQ ID NO: 5617267 - DNA, 25 bp, Homo sapien
acgcaagttcctttacctcgcgcgc

SEQ ID NO: 5617268 - DNA, 25 bp, Homo sapien
gaacgcaagttcctttacctcgcgc

SEQ ID NO: 5617269 - DNA, 25 bp, Homo sapien
cagtcgcccgcctcccaacccggga

SEQ ID NO: 5617270 - DNA, 25 bp, Homo sapien
aagttcctttacctcgcgcgcagtc

SEQ ID NO: 5617271 - DNA, 25 bp, Homo sapien
tccacgccgggctctcctcccggga

SEQ ID NO: 5617272 - DNA, 25 bp, Homo sapien
gttcctttacctcgcgcgcagtcgc

SEQ ID NO: 5617273 - DNA, 25 bp, Homo sapien
cgccgccttcagaagccgctgtgca

SEQ ID NO: 5617274 - DNA, 25 bp, Homo sapien
ggctctcctcccgggagagcggacc

SEQ ID NO: 5617275 - DNA, 25 bp, Homo sapien
cacgccgggctctcctcccgggaga

SEQ ID NO: 5617276 - DNA, 25 bp, Homo sapien
tagttcaagtatcagtgcctccatc

SEQ ID NO: 5617277 - DNA, 25 bp, Homo sapien
attcgaatgcgaagatttctaactc

SEQ ID NO: 5617278 - DNA, 25 bp, Homo sapien
attggcatggactagttcaagtatc

SEQ ID NO: 5617279 - DNA, 25 bp, Homo sapien
aaggaaacgactcctctctgcagac

SEQ ID NO: 5617280 - DNA, 25 bp, Homo sapien
caagtcactaaatactgaaagtcct

SEQ ID NO: 5617281 - DNA, 25 bp, Homo sapien
aatgtctgcggttatggaactctgt

SEQ ID NO: 5617282 - DNA, 25 bp, Homo sapien
attacccgcgtttggtttcacaggc

SEQ ID NO: 5617283 - DNA, 25 bp, Homo sapien
gttcagacttcaaaggaaacgactc

SEQ ID NO: 5617284 - DNA, 25 bp, Homo sapien
gacacttgcagtaacatttgggaag

SEQ ID NO: 5617285 - DNA, 25 bp, Homo sapien
gacacaggctgtgatcaacatatcc

SEQ ID NO: 5617286 - DNA, 25 bp, Homo sapien
ggactcaaccactgaccccaaaaca

SEQ ID NO: 5617287 - DNA, 25 bp, Homo sapien
cctcatccgcctgtgtccccgagcg

SEQ ID NO: 5617288 - DNA, 25 bp, Homo sapien
acagctccaccgcctaggaaggctg

SEQ ID NO: 5617289 - DNA, 25 bp, Homo sapien
acaagtaggtaggctgtcctaatat

SEQ ID NO: 5617290 - DNA, 25 bp, Homo sapien
tcaggaggtcgcgtgacctctcaca

SEQ ID NO: 5617291 - DNA, 25 bp, Homo sapien
tctaaagaaaagacgtaactcactc

SEQ ID NO: 5617292 - DNA, 25 bp, Homo sapien
ttgaggggttttagttctatgagat

SEQ ID NO: 5617293 - DNA, 25 bp, Homo sapien
tgatgacaaaaatgccttgccatgc

SEQ ID NO: 5617294 - DNA, 25 bp, Homo sapien
tgccatgcattcaggtcgagtgatt

SEQ ID NO: 5617295 - DNA, 25 bp, Homo sapien
agtgtgatgtaaaaagtctgcaacc

SEQ ID NO: 5617296 - DNA, 25 bp, Homo sapien
ttttaagccaccacagacctcatcc

SEQ ID NO: 5617297 - DNA, 25 bp, Homo sapien
aagactctcattttcagtgggctcc

SEQ ID NO: 5617298 - DNA, 25 bp, Homo sapien
tgacttccagctagctgggaatctc

SEQ ID NO: 5617299 - DNA, 25 bp, Homo sapien
acatgaccagactccatccaccacc

SEQ ID NO: 5617300 - DNA, 25 bp, Homo sapien
ctcccaccgagcccatcagctcagc

SEQ ID NO: 5617301 - DNA, 25 bp, Homo sapien
tgggctcgagagtttgacttccagc

SEQ ID NO: 5617302 - DNA, 25 bp, Homo sapien
actctaggcgtatgccaccaggcct

SEQ ID NO: 5617303 - DNA, 25 bp, Homo sapien
tcagctcagcaaaagatccatcgtc

SEQ ID NO: 5617304 - DNA, 25 bp, Homo sapien
gtagctaggactctaggcgtatgcc

SEQ ID NO: 5617305 - DNA, 25 bp, Homo sapien
cagactccatccaccaccttgcccc

SEQ ID NO: 5617306 - DNA, 25 bp, Homo sapien
ctgggaatctccccttggaggaccc

SEQ ID NO: 5617307 - DNA, 25 bp, Homo sapien
tcctccagttacccaggccagcacc

SEQ ID NO: 5617308 - DNA, 25 bp, Homo sapien
aagatccatcgtcctccagttaccc

SEQ ID NO: 5617309 - DNA, 25 bp, Homo sapien
tagactggctaaattttcaggtcat

SEQ ID NO: 5617310 - DNA, 25 bp, Homo sapien
ctgacaccagtgacaaagtaatatt

SEQ ID NO: 5617311 - DNA, 25 bp, Homo sapien
aagaaataagaatagactggctaaa

SEQ ID NO: 5617312 - DNA, 25 bp, Homo sapien
gccaaaaaatacccatgaaaatcta

SEQ ID NO: 5617313 - DNA, 25 bp, Homo sapien
taggacatctgctgatgacagaggt

SEQ ID NO: 5617314 - DNA, 25 bp, Homo sapien
attttggaataccatggagttgagg

SEQ ID NO: 5617315 - DNA, 25 bp, Homo sapien
tcaagctgtttgatcacttccactg

SEQ ID NO: 5617316 - DNA, 25 bp, Homo sapien
aggcagggagtaacaactctcaaac

SEQ ID NO: 5617317 - DNA, 25 bp, Homo sapien
tacaagtattaaagtgcccacaaaa

SEQ ID NO: 5617318 - DNA, 25 bp, Homo sapien
gatatcagagcagaacaaattttgg

SEQ ID NO: 5617319 - DNA, 25 bp, Homo sapien
ctgatgacagaggtttctctgacac

SEQ ID NO: 5617320 - DNA, 25 bp, Homo sapien
agccaagatgccaggtgtttttact

SEQ ID NO: 5617321 - DNA, 25 bp, Homo sapien
gtgcaaataatctgtgcaggcggcc

SEQ ID NO: 5617322 - DNA, 25 bp, Homo sapien
gtaacagcaaactactcaggtgccc

SEQ ID NO: 5617323 - DNA, 25 bp, Homo sapien
atgtgaaaagagaagctgcacaaca

SEQ ID NO: 5617324 - DNA, 25 bp, Homo sapien
gtttgtgctctggaagggcttatga

SEQ ID NO: 5617325 - DNA, 25 bp, Homo sapien
gagaagctgcacaacagcaagcaga

SEQ ID NO: 5617326 - DNA, 25 bp, Homo sapien
tgcctacgtggtctgtaacagcaaa

SEQ ID NO: 5617327 - DNA, 25 bp, Homo sapien
aggcggccattgcctacgtggtctg

SEQ ID NO: 5617328 - DNA, 25 bp, Homo sapien
atctaatgatactcccacctgtgca

SEQ ID NO: 5617329 - DNA, 25 bp, Homo sapien
agaaaagaagacaaacatacgtgct

SEQ ID NO: 5617330 - DNA, 25 bp, Homo sapien
ctcaggtgcccatcttacgtactca

SEQ ID NO: 5617331 - DNA, 25 bp, Homo sapien
agcactggtgatggacattgtgact

SEQ ID NO: 5617332 - DNA, 25 bp, Homo sapien
catcgagcgcttgcaactttgaggt

SEQ ID NO: 5617333 - DNA, 25 bp, Homo sapien
cacaccacttagatgtggatacttc

SEQ ID NO: 5617334 - DNA, 25 bp, Homo sapien
actgactcctggttgcaacacatag

SEQ ID NO: 5617335 - DNA, 25 bp, Homo sapien
caacacataggaacacagtggctac

SEQ ID NO: 5617336 - DNA, 25 bp, Homo sapien
gtgaatgaagtctgtactgactcct

SEQ ID NO: 5617337 - DNA, 25 bp, Homo sapien
atggacattgtgactgcatcgagcg

SEQ ID NO: 5617338 - DNA, 25 bp, Homo sapien
gacactttatatatcaaggggccaa

SEQ ID NO: 5617339 - DNA, 25 bp, Homo sapien
agggtgttacttgcagttggccttt

SEQ ID NO: 5617340 - DNA, 25 bp, Homo sapien
gttcctaagaaatatacacaccact

SEQ ID NO: 5617341 - DNA, 25 bp, Homo sapien
agcctcgcagggtgttacttgcagt

SEQ ID NO: 5617342 - DNA, 25 bp, Homo sapien
tgaaggtccccttaaactggcaatc

SEQ ID NO: 5617343 - DNA, 25 bp, Homo sapien
gactggacagagtaaccactagcgt

SEQ ID NO: 5617344 - DNA, 25 bp, Homo sapien
tgtgtgccatcaggaaatgaaccca

SEQ ID NO: 5617345 - DNA, 25 bp, Homo sapien
taaggaccatagctaaagtcaaacc

SEQ ID NO: 5617346 - DNA, 25 bp, Homo sapien
accaagggtgttaatcagactaacc

SEQ ID NO: 5617347 - DNA, 25 bp, Homo sapien
ggcaatcagatcctcccaatggttc

SEQ ID NO: 5617348 - DNA, 25 bp, Homo sapien
agaggttctctatcagaggggctgg

SEQ ID NO: 5617349 - DNA, 25 bp, Homo sapien
aagaagattacagaaagagtaagct

SEQ ID NO: 5617350 - DNA, 25 bp, Homo sapien
agaaagagtaagctaggaagcttct

SEQ ID NO: 5617351 - DNA, 25 bp, Homo sapien
cactagcgtaagctccttgagaagc

SEQ ID NO: 5617352 - DNA, 25 bp, Homo sapien
caggtcgctgatgctgctccccata

SEQ ID NO: 5617353 - DNA, 25 bp, Homo sapien
agatctgatcggtgaatgaactgac

SEQ ID NO: 5617354 - DNA, 25 bp, Homo sapien
gagcagccaacgccttccaaaggtc

SEQ ID NO: 5617355 - DNA, 25 bp, Homo sapien
taacccagatctgatacacaaggtc

SEQ ID NO: 5617356 - DNA, 25 bp, Homo sapien
ccaggagctttcttcaggagcagcc

SEQ ID NO: 5617357 - DNA, 25 bp, Homo sapien
caaaagcattgcaataggatatatc

SEQ ID NO: 5617358 - DNA, 25 bp, Homo sapien
gagggccaattgagtttggagacct

SEQ ID NO: 5617359 - DNA, 25 bp, Homo sapien
gaactgacttgcttttgggcgtggc

SEQ ID NO: 5617360 - DNA, 25 bp, Homo sapien
ctacatgtttctgagagggccaatt

SEQ ID NO: 5617361 - DNA, 25 bp, Homo sapien
acacaaggtcagtaacctacatgtt

SEQ ID NO: 5617362 - DNA, 25 bp, Homo sapien
gaaaatgaagctggacttgatattt

SEQ ID NO: 5617363 - DNA, 25 bp, Homo sapien
ttcctttaaacagccaggagctttc

SEQ ID NO: 5617364 - DNA, 25 bp, Homo sapien
gagattttactctgcagtgtagcac

SEQ ID NO: 5617365 - DNA, 25 bp, Homo sapien
agaatcctgagccagggactgtgat

SEQ ID NO: 5617366 - DNA, 25 bp, Homo sapien
ttaagaacaaaatatggctgggagc

SEQ ID NO: 5617367 - DNA, 25 bp, Homo sapien
tggtacaagcctaagttctacaata

SEQ ID NO: 5617368 - DNA, 25 bp, Homo sapien
cagtgtagcacagctgggtttatcc

SEQ ID NO: 5617369 - DNA, 25 bp, Homo sapien
agtttcaaaactagctcccaaagtc

SEQ ID NO: 5617370 - DNA, 25 bp, Homo sapien
gtccagaatcatgactcagagattt

SEQ ID NO: 5617371 - DNA, 25 bp, Homo sapien
ccccactttaagaacaaaatatggc

SEQ ID NO: 5617372 - DNA, 25 bp, Homo sapien
gctacattagaatcctgagccaggg

SEQ ID NO: 5617373 - DNA, 25 bp, Homo sapien
tagctcccaaagtccagaatcatga

SEQ ID NO: 5617374 - DNA, 25 bp, Homo sapien
tggtgttagacaatccatgatgtcc

SEQ ID NO: 5617375 - DNA, 25 bp, Homo sapien
ttactgatcatgggtcagcttagct

SEQ ID NO: 5617376 - DNA, 25 bp, Homo sapien
tagactagctccttgagggaaaggg

SEQ ID NO: 5617377 - DNA, 25 bp, Homo sapien
gaaagggccaaagccctccagcatt

SEQ ID NO: 5617378 - DNA, 25 bp, Homo sapien
ctggggtgcaaaagtatagtatgta

SEQ ID NO: 5617379 - DNA, 25 bp, Homo sapien
tctaccgaatgtgtatagcttttgc

SEQ ID NO: 5617380 - DNA, 25 bp, Homo sapien
tatctaatagaggttcatagttcac

SEQ ID NO: 5617381 - DNA, 25 bp, Homo sapien
cctccagcatttagcaccggccttg

SEQ ID NO: 5617382 - DNA, 25 bp, Homo sapien
aggcccatctgtatttctgaccccc

SEQ ID NO: 5617383 - DNA, 25 bp, Homo sapien
gattgtatggatacttgaagtactg

SEQ ID NO: 5617384 - DNA, 25 bp, Homo sapien
catagttcactgaaatggggttggg

SEQ ID NO: 5617385 - DNA, 25 bp, Homo sapien
cttcccaaagccatgtcctgtttcc

SEQ ID NO: 5617386 - DNA, 25 bp, Homo sapien
actgtggagttttgtcatagatgac

SEQ ID NO: 5617387 - DNA, 25 bp, Homo sapien
tctatgtactacagcatgttctgaa

SEQ ID NO: 5617388 - DNA, 25 bp, Homo sapien
tccaaatgcaaacatcttccctgtc

SEQ ID NO: 5617389 - DNA, 25 bp, Homo sapien
cctgtctaagccaacatctatgtac

SEQ ID NO: 5617390 - DNA, 25 bp, Homo sapien
gactccaaatgttaatgctcactaa

SEQ ID NO: 5617391 - DNA, 25 bp, Homo sapien
gacaccatgggctactgtggagttt

SEQ ID NO: 5617392 - DNA, 25 bp, Homo sapien
ttgagttgacatgttcttggtaaat

SEQ ID NO: 5617393 - DNA, 25 bp, Homo sapien
taaccaggtgataacttttacagaa

SEQ ID NO: 5617394 - DNA, 25 bp, Homo sapien
gctcactaaaaattcacatcttgta

SEQ ID NO: 5617395 - DNA, 25 bp, Homo sapien
accacaatgcctttgctctccatac

SEQ ID NO: 5617396 - DNA, 25 bp, Homo sapien
atcttgaattccaaatgcaaacatc

SEQ ID NO: 5617397 - DNA, 25 bp, Homo sapien
ggatacactgctatcagagatgact

SEQ ID NO: 5617398 - DNA, 25 bp, Homo sapien
agatgacttaacacctctagaagcc

SEQ ID NO: 5617399 - DNA, 25 bp, Homo sapien
tgtttacatggtcatcagtacattc

SEQ ID NO: 5617400 - DNA, 25 bp, Homo sapien
aacaatccttgactaatagaagact

SEQ ID NO: 5617401 - DNA, 25 bp, Homo sapien
taaacaaatgtctaatgtgtaccat

SEQ ID NO: 5617402 - DNA, 25 bp, Homo sapien
ctctagaagcctagccttaacctct

SEQ ID NO: 5617403 - DNA, 25 bp, Homo sapien
ggcatttaggaaattgaagcattat

SEQ ID NO: 5617404 - DNA, 25 bp, Homo sapien
atctgaaagcatggattctcatccc

SEQ ID NO: 5617405 - DNA, 25 bp, Homo sapien
agtaacacccattcaaggaagttta

SEQ ID NO: 5617406 - DNA, 25 bp, Homo sapien
atagaagacttgataaattaaccat

SEQ ID NO: 5617407 - DNA, 25 bp, Homo sapien
aggaacagacaacagttttagcata

SEQ ID NO: 5617408 - DNA, 25 bp, Homo sapien
acgttccggtaacaggactgtgagt

SEQ ID NO: 5617409 - DNA, 25 bp, Homo sapien
actcacagtcctgttaccggaacgt

SEQ ID NO: 5617410 - DNA, 25 bp, Homo sapien
cgggaggaatttaatctagagttta

SEQ ID NO: 5617411 - DNA, 25 bp, Homo sapien
tagagtttaacttgtgtggctgact

SEQ ID NO: 5617412 - DNA, 25 bp, Homo sapien
ctagagtttaacttgtgtggctgac

SEQ ID NO: 5617413 - DNA, 25 bp, Homo sapien
gagtttaacttgtgtggctgtcccc

SEQ ID NO: 5617414 - DNA, 25 bp, Homo sapien
gcgggaggaatttaatctagagtct

SEQ ID NO: 5617415 - DNA, 25 bp, Homo sapien
ctgattccaccgagtcccgggcatg

SEQ ID NO: 5617416 - DNA, 25 bp, Homo sapien
taacttgcgtggctgactccactga

SEQ ID NO: 5617417 - DNA, 25 bp, Homo sapien
tggctgactccactgagtcccgggc

SEQ ID NO: 5617418 - DNA, 25 bp, Homo sapien
ggctgactccactgagtcccgggca

SEQ ID NO: 5617419 - DNA, 25 bp, Homo sapien
ggctgtccccactgagtcccgggca

SEQ ID NO: 5617420 - DNA, 25 bp, Homo sapien
cgggaggaatttaatctagagtcta

SEQ ID NO: 5617421 - DNA, 25 bp, Homo sapien
cttgtctcgtcgcgtcggagaaatc

SEQ ID NO: 5617422 - DNA, 25 bp, Homo sapien
ggacccagacaaagcccactttgtg

SEQ ID NO: 5617423 - DNA, 25 bp, Homo sapien
tccctttctggggactccgccgctg

SEQ ID NO: 5617424 - DNA, 25 bp, Homo sapien
gcgagtcttggctcccggacttgtc

SEQ ID NO: 5617425 - DNA, 25 bp, Homo sapien
gcgcccgctccctttctggggactc

SEQ ID NO: 5617426 - DNA, 25 bp, Homo sapien
gagtcgcctcggtcttccttggggc

SEQ ID NO: 5617427 - DNA, 25 bp, Homo sapien
ccggacttgtctcgtcgcgtcggag

SEQ ID NO: 5617428 - DNA, 25 bp, Homo sapien
tcgcctcggtcttccttggggcgcg

SEQ ID NO: 5617429 - DNA, 25 bp, Homo sapien
caaagcccactttgtgcagggagtt

SEQ ID NO: 5617430 - DNA, 25 bp, Homo sapien
gctcccggacttgtctcgtcgcgtc

SEQ ID NO: 5617431 - DNA, 25 bp, Homo sapien
cgccgcgcccgctccctttctgggg

SEQ ID NO: 5617432 - DNA, 25 bp, Homo sapien
gtatcaacccaggttaagagcccaa

SEQ ID NO: 5617433 - DNA, 25 bp, Homo sapien
acgtgccatgtgccatgccacctcc

SEQ ID NO: 5617434 - DNA, 25 bp, Homo sapien
atccccatgttctagaggcacagag

SEQ ID NO: 5617435 - DNA, 25 bp, Homo sapien
cgaggctccttgaagagggagcttc

SEQ ID NO: 5617436 - DNA, 25 bp, Homo sapien
ctctgagacaaggtgccctttgggt

SEQ ID NO: 5617437 - DNA, 25 bp, Homo sapien
agtgtcacacagctcaaccagtatc

SEQ ID NO: 5617438 - DNA, 25 bp, Homo sapien
atctgcacaaggccttaggaagtga

SEQ ID NO: 5617439 - DNA, 25 bp, Homo sapien
attacaagccacgtgccatgtgcca

SEQ ID NO: 5617440 - DNA, 25 bp, Homo sapien
aagatcacaaagctcacccagtgtc

SEQ ID NO: 5617441 - DNA, 25 bp, Homo sapien
acgacgagagctatccccatgttct

SEQ ID NO: 5617442 - DNA, 25 bp, Homo sapien
agcccaagccacactctgagacaag

SEQ ID NO: 5617443 - DNA, 25 bp, Homo sapien
gacaaaagacaaattagcaagagaa

SEQ ID NO: 5617444 - DNA, 25 bp, Homo sapien
aactgacaaaagacaaattagcaag

SEQ ID NO: 5617445 - DNA, 25 bp, Homo sapien
aggaactcttatggtcagaggatcc

SEQ ID NO: 5617446 - DNA, 25 bp, Homo sapien
gtcaggaactcttatggtcagagga

SEQ ID NO: 5617447 - DNA, 25 bp, Homo sapien
ctgacaaaagacaaattagcaagag

SEQ ID NO: 5617448 - DNA, 25 bp, Homo sapien
aagagaaacggagttgtatagcttt

SEQ ID NO: 5617449 - DNA, 25 bp, Homo sapien
gtttgagatggagtcagtattgcac

SEQ ID NO: 5617450 - DNA, 25 bp, Homo sapien
ttatggtcagaggatcctcccacct

SEQ ID NO: 5617451 - DNA, 25 bp, Homo sapien
aaacggagttgtatagctttctgtt

SEQ ID NO: 5617452 - DNA, 25 bp, Homo sapien
ctggtcaggaactcttatggtcaga

SEQ ID NO: 5617453 - DNA, 25 bp, Homo sapien
actcttatggtcagaggatcctccc

SEQ ID NO: 5617454 - DNA, 25 bp, Homo sapien
gaaataaagcattatagatcagtgc

SEQ ID NO: 5617455 - DNA, 25 bp, Homo sapien
aaaatgtattacgtagacaagtatc

SEQ ID NO: 5617456 - DNA, 25 bp, Homo sapien
gctaaaactgatgatgaaagaagaa

SEQ ID NO: 5617457 - DNA, 25 bp, Homo sapien
caaatccctaaaactgagtattccc

SEQ ID NO: 5617458 - DNA, 25 bp, Homo sapien
tcaaacagcatgacaatttaactac

SEQ ID NO: 5617459 - DNA, 25 bp, Homo sapien
actaactggctaaaactgatgatga

SEQ ID NO: 5617460 - DNA, 25 bp, Homo sapien
tatagcaattcaataagccctctcc

SEQ ID NO: 5617461 - DNA, 25 bp, Homo sapien
aagtaccttccgatagaaataaagc

SEQ ID NO: 5617462 - DNA, 25 bp, Homo sapien
cctctcctagaactcaggggctttt

SEQ ID NO: 5617463 - DNA, 25 bp, Homo sapien
tgaaagtgaaattataaccatcttc

SEQ ID NO: 5617464 - DNA, 25 bp, Homo sapien
agcaatactcctatctcaggctccc

SEQ ID NO: 5617465 - DNA, 25 bp, Homo sapien
aaggcttcttaaagggtgataataa

SEQ ID NO: 5617466 - DNA, 25 bp, Homo sapien
gtcacagtaacggcctccaggctga

SEQ ID NO: 5617467 - DNA, 25 bp, Homo sapien
aaaaactgaaaattgtgggagttca

SEQ ID NO: 5617468 - DNA, 25 bp, Homo sapien
aaggggaagatacatgatacaatct

SEQ ID NO: 5617469 - DNA, 25 bp, Homo sapien
tccgaacactcccctgcttgcctgg

SEQ ID NO: 5617470 - DNA, 25 bp, Homo sapien
gataaagatggcaaaaacatgaaca

SEQ ID NO: 5617471 - DNA, 25 bp, Homo sapien
aaaacatgaacaagggtctgttctc

SEQ ID NO: 5617472 - DNA, 25 bp, Homo sapien
gtgggagttcattcgtcacagtaac

SEQ ID NO: 5617473 - DNA, 25 bp, Homo sapien
aataatatactgaagaaaaaactga

SEQ ID NO: 5617474 - DNA, 25 bp, Homo sapien
gtcccacctgccttcagtctgacac

SEQ ID NO: 5617475 - DNA, 25 bp, Homo sapien
ggcctccaggctgataaagatggca

SEQ ID NO: 5617476 - DNA, 25 bp, Homo sapien
gaatggaatccattgaaagcaacag

SEQ ID NO: 5617477 - DNA, 25 bp, Homo sapien
ttccatgggctgggagatcatttaa

SEQ ID NO: 5617478 - DNA, 25 bp, Homo sapien
ataaggaatacaggaatggaatcca

SEQ ID NO: 5617479 - DNA, 25 bp, Homo sapien
tctgccaagaaactcagagtaactt

SEQ ID NO: 5617480 - DNA, 25 bp, Homo sapien
attgaacatttgtgacccaagtaac

SEQ ID NO: 5617481 - DNA, 25 bp, Homo sapien
aattgatcttctgaggtacaccttc

SEQ ID NO: 5617482 - DNA, 25 bp, Homo sapien
gagttcatttcaatcgcagtagtct

SEQ ID NO: 5617483 - DNA, 25 bp, Homo sapien
atttaagaaacagaccaatgtcttt

SEQ ID NO: 5617484 - DNA, 25 bp, Homo sapien
gctgtcaaaaactctgccaagaaac

SEQ ID NO: 5617485 - DNA, 25 bp, Homo sapien
ttattgcatcataaaaggtgaggtg

SEQ ID NO: 5617486 - DNA, 25 bp, Homo sapien
gttcaggaaaacaaatagctcaatc

SEQ ID NO: 5617487 - DNA, 25 bp, Homo sapien
ctggtgaacagctaatcctccttca

SEQ ID NO: 5617488 - DNA, 25 bp, Homo sapien
ctctgctaggattaagtaaccattc

SEQ ID NO: 5617489 - DNA, 25 bp, Homo sapien
aattagggcaaatcagacatgtatt

SEQ ID NO: 5617490 - DNA, 25 bp, Homo sapien
agcagagtgcattcagtaggtagct

SEQ ID NO: 5617491 - DNA, 25 bp, Homo sapien
aaacacaaagttggaaagcaagaga

SEQ ID NO: 5617492 - DNA, 25 bp, Homo sapien
ccaataaccagaataaccagaactt

SEQ ID NO: 5617493 - DNA, 25 bp, Homo sapien
agcaagagagcttcttcagtcaagt

SEQ ID NO: 5617494 - DNA, 25 bp, Homo sapien
gaatagctgtctagtagcagagtgc

SEQ ID NO: 5617495 - DNA, 25 bp, Homo sapien
aagaatattagaaatgagaactatt

SEQ ID NO: 5617496 - DNA, 25 bp, Homo sapien
aaaaacaatgggaaagaatattaga

SEQ ID NO: 5617497 - DNA, 25 bp, Homo sapien
gtaggtagctggaaatcaagtactt

SEQ ID NO: 5617498 - DNA, 25 bp, Homo sapien
caacttaccaaaacacattaccatg

SEQ ID NO: 5617499 - DNA, 25 bp, Homo sapien
catggtaatgtgttttggtaagttg

SEQ ID NO: 5617500 - DNA, 25 bp, Homo sapien
ggaagctacaggactgctggaattt

SEQ ID NO: 5617501 - DNA, 25 bp, Homo sapien
attacctttgcagattgaagaaaaa

SEQ ID NO: 5617502 - DNA, 25 bp, Homo sapien
ctttgcaagtcttaatgtccagctt

SEQ ID NO: 5617503 - DNA, 25 bp, Homo sapien
tgagctccgtgatccacgcggtagg

SEQ ID NO: 5617504 - DNA, 25 bp, Homo sapien
aatcttaggcaaaagccatttcttt

SEQ ID NO: 5617505 - DNA, 25 bp, Homo sapien
tatttctagtcctgtggaagctaca

SEQ ID NO: 5617506 - DNA, 25 bp, Homo sapien
gaagcataacaattaaataacatcc

SEQ ID NO: 5617507 - DNA, 25 bp, Homo sapien
aatgtccagcttaaaccaaaattac

SEQ ID NO: 5617508 - DNA, 25 bp, Homo sapien
agattacattaggtggggcacatgg

SEQ ID NO: 5617509 - DNA, 25 bp, Homo sapien
aagtgggatgtgaatctaagttatg

SEQ ID NO: 5617510 - DNA, 25 bp, Homo sapien
ataacatccatacacccatcacttc

SEQ ID NO: 5617511 - DNA, 25 bp, Homo sapien
taccatgccgtgtgaagtcttccca

SEQ ID NO: 5617512 - DNA, 25 bp, Homo sapien
aggcaaagaatcgagcaaatccgaa

SEQ ID NO: 5617513 - DNA, 25 bp, Homo sapien
agtctggacatccaggcaggctctg

SEQ ID NO: 5617514 - DNA, 25 bp, Homo sapien
acgcataccagcgccatagtgaagc

SEQ ID NO: 5617515 - DNA, 25 bp, Homo sapien
acaagaaagtagaacaggatctctg

SEQ ID NO: 5617516 - DNA, 25 bp, Homo sapien
ggagtgaagttcaggcaaacctttc

SEQ ID NO: 5617517 - DNA, 25 bp, Homo sapien
cctccgattctaagctgggtccagc

SEQ ID NO: 5617518 - DNA, 25 bp, Homo sapien
caggctctgcaggacctgtaccaga

SEQ ID NO: 5617519 - DNA, 25 bp, Homo sapien
aatccgaatcggagtgaagttcagg

SEQ ID NO: 5617520 - DNA, 25 bp, Homo sapien
tatcagcaataaacagacgcatacc

SEQ ID NO: 5617521 - DNA, 25 bp, Homo sapien
gctcgatacagaaaccagaccagcc

SEQ ID NO: 5617522 - DNA, 25 bp, Homo sapien
ataccaaacaaactttataggcttc

SEQ ID NO: 5617523 - DNA, 25 bp, Homo sapien
attttaatagctggtgggataagtc

SEQ ID NO: 5617524 - DNA, 25 bp, Homo sapien
ataggcttctcaaattcatacaaaa

SEQ ID NO: 5617525 - DNA, 25 bp, Homo sapien
actgtccttgttatagttacatacc

SEQ ID NO: 5617526 - DNA, 25 bp, Homo sapien
acacctagcctgtttctgggttctc

SEQ ID NO: 5617527 - DNA, 25 bp, Homo sapien
ataaatcaattagggggaaaagtga

SEQ ID NO: 5617528 - DNA, 25 bp, Homo sapien
tgtaagccaccacacctagcctgtt

SEQ ID NO: 5617529 - DNA, 25 bp, Homo sapien
ttatcgggctatcctacccataaac

SEQ ID NO: 5617530 - DNA, 25 bp, Homo sapien
aagtgacatctttatcgggctatcc

SEQ ID NO: 5617531 - DNA, 25 bp, Homo sapien
ggctatcctacccataaacacccta

SEQ ID NO: 5617532 - DNA, 25 bp, Homo sapien
tagggggaaaagtgacatctttatc

SEQ ID NO: 5617533 - DNA, 25 bp, Homo sapien
cctcagaagtaataattgaacattt

SEQ ID NO: 5617534 - DNA, 25 bp, Homo sapien
acaagcacatcatgacaaagaatgc

SEQ ID NO: 5617535 - DNA, 25 bp, Homo sapien
caaagaatgctagaagtagctttcc

SEQ ID NO: 5617536 - DNA, 25 bp, Homo sapien
aagtggctgaaaatgctctgcttac

SEQ ID NO: 5617537 - DNA, 25 bp, Homo sapien
agattacaagcaattagttacccac

SEQ ID NO: 5617538 - DNA, 25 bp, Homo sapien
tgaaaaacaggaacattgtagaggt

SEQ ID NO: 5617539 - DNA, 25 bp, Homo sapien
ctctcaacattgaccagaaccttcc

SEQ ID NO: 5617540 - DNA, 25 bp, Homo sapien
agtgaaagtgtctactctcaacatt

SEQ ID NO: 5617541 - DNA, 25 bp, Homo sapien
tactcaatgagaagttacaccttat

SEQ ID NO: 5617542 - DNA, 25 bp, Homo sapien
aacaggaacattgtagaggtaagtg

SEQ ID NO: 5617543 - DNA, 25 bp, Homo sapien
aatagttaagtatacagcaaattat

SEQ ID NO: 5617544 - DNA, 25 bp, Homo sapien
agtcccctgaaaattattggttatg

SEQ ID NO: 5617545 - DNA, 25 bp, Homo sapien
gactacaggcacccatggatcacca

SEQ ID NO: 5617546 - DNA, 25 bp, Homo sapien
tgtcaaggcagtcttgctatgttgc

SEQ ID NO: 5617547 - DNA, 25 bp, Homo sapien
ataccataagagtttcatagcattt

SEQ ID NO: 5617548 - DNA, 25 bp, Homo sapien
ttataactgaattggctctcaaaac

SEQ ID NO: 5617549 - DNA, 25 bp, Homo sapien
catggatcaccacgcctagctaatt

SEQ ID NO: 5617550 - DNA, 25 bp, Homo sapien
ctaggcccaagcagtcctcccattt

SEQ ID NO: 5617551 - DNA, 25 bp, Homo sapien
ccattttggtcttacaggtgtgagc

SEQ ID NO: 5617552 - DNA, 25 bp, Homo sapien
gtgcaatggcgtgaccatagctcac

SEQ ID NO: 5617553 - DNA, 25 bp, Homo sapien
tcagcatcctgagtagcttggacta

SEQ ID NO: 5617554 - DNA, 25 bp, Homo sapien
aactcagaacccaaagaatgctaat

SEQ ID NO: 5617555 - DNA, 25 bp, Homo sapien
atgcagctatgaagcactgggaagt

SEQ ID NO: 5617556 - DNA, 25 bp, Homo sapien
taaaacactgccccctggagtattc

SEQ ID NO: 5617557 - DNA, 25 bp, Homo sapien
agttaccagctgcaaaccgacttca

SEQ ID NO: 5617558 - DNA, 25 bp, Homo sapien
atccttcaatcacccagtggggaaa

SEQ ID NO: 5617559 - DNA, 25 bp, Homo sapien
ggagtattctgggaggaatgtctta

SEQ ID NO: 5617560 - DNA, 25 bp, Homo sapien
ccgacttcagaagtgaggaaaatgt

SEQ ID NO: 5617561 - DNA, 25 bp, Homo sapien
atgtacatgaataaagttgagcagg

SEQ ID NO: 5617562 - DNA, 25 bp, Homo sapien
tctggatgaacaagttaccagctgc

SEQ ID NO: 5617563 - DNA, 25 bp, Homo sapien
actgggaagtaaatgcaaaatatag

SEQ ID NO: 5617564 - DNA, 25 bp, Homo sapien
gtaagcacagctcacaaagtctcat

SEQ ID NO: 5617565 - DNA, 25 bp, Homo sapien
ttgagcaggatgtgtacaactttaa

SEQ ID NO: 5617566 - DNA, 25 bp, Homo sapien
cctccctctcggcccactcccgacc

SEQ ID NO: 5617567 - DNA, 25 bp, Homo sapien
ggtcgggagtgggccgagagggagg

SEQ ID NO: 5617568 - DNA, 25 bp, Homo sapien
agtgtgacacttggtggatccaggt

SEQ ID NO: 5617569 - DNA, 25 bp, Homo sapien
gtagacagcaaaaactaacactgcc

SEQ ID NO: 5617570 - DNA, 25 bp, Homo sapien
aggtgatacccaagtagacagcaaa

SEQ ID NO: 5617571 - DNA, 25 bp, Homo sapien
acattgtcagcaattgcaacaacac

SEQ ID NO: 5617572 - DNA, 25 bp, Homo sapien
aacactgcctttatgggcaaagcac

SEQ ID NO: 5617573 - DNA, 25 bp, Homo sapien
taatccaaaccccctagtgtgacac

SEQ ID NO: 5617574 - DNA, 25 bp, Homo sapien
gcaacaacacctacttaatccaaac

SEQ ID NO: 5617575 - DNA, 25 bp, Homo sapien
gccgatggtcaggcataaaagacct

SEQ ID NO: 5617576 - DNA, 25 bp, Homo sapien
cttgaatgaaccaaacattgtcagc

SEQ ID NO: 5617577 - DNA, 25 bp, Homo sapien
ttatgggcaaagcactgttctgagt

SEQ ID NO: 5617578 - DNA, 25 bp, Homo sapien
aagacctaaagttcacaggtgatac

SEQ ID NO: 5617579 - DNA, 25 bp, Homo sapien
cagattctggccaggagtgaaaatg

SEQ ID NO: 5617580 - DNA, 25 bp, Homo sapien
ctcttgaatgcagaaatgttagtgc

SEQ ID NO: 5617581 - DNA, 25 bp, Homo sapien
aggagtgaaaatgcagggcattaat

SEQ ID NO: 5617582 - DNA, 25 bp, Homo sapien
tcccctcatggatttctgtggttcc

SEQ ID NO: 5617583 - DNA, 25 bp, Homo sapien
ttgaaaatatcggaggtgggataaa

SEQ ID NO: 5617584 - DNA, 25 bp, Homo sapien
ggagagtttgtagcagcagtgtaat

SEQ ID NO: 5617585 - DNA, 25 bp, Homo sapien
tctgtgtcagattctggccaggagt

SEQ ID NO: 5617586 - DNA, 25 bp, Homo sapien
gaaatgttagtgcttactggttaaa

SEQ ID NO: 5617587 - DNA, 25 bp, Homo sapien
tctgtggttcctttctcggttgtcc

SEQ ID NO: 5617588 - DNA, 25 bp, Homo sapien
cggttgtccttaatgttaggtgccc

SEQ ID NO: 5617589 - DNA, 25 bp, Homo sapien
gtagcagcagtgtaatttctgtgtc

SEQ ID NO: 5617590 - DNA, 25 bp, Homo sapien
atacagctgttatctggcaagcaga

SEQ ID NO: 5617591 - DNA, 25 bp, Homo sapien
ggagcatcacagttcacggctggta

SEQ ID NO: 5617592 - DNA, 25 bp, Homo sapien
cttggatgacagatgaaatgagttt

SEQ ID NO: 5617593 - DNA, 25 bp, Homo sapien
actgagagattaggctgctagtgtt

SEQ ID NO: 5617594 - DNA, 25 bp, Homo sapien
caaaacgctctaggtgagcagatac

SEQ ID NO: 5617595 - DNA, 25 bp, Homo sapien
tcaccagtgacattacaaaacgctc

SEQ ID NO: 5617596 - DNA, 25 bp, Homo sapien
tggcaagcagatctactgagagatt

SEQ ID NO: 5617597 - DNA, 25 bp, Homo sapien
tgggataaagatgaacacacaagtc

SEQ ID NO: 5617598 - DNA, 25 bp, Homo sapien
cagaaatactcagcaaaaatgaagc

SEQ ID NO: 5617599 - DNA, 25 bp, Homo sapien
ggagggcaaggaactctcattatct

SEQ ID NO: 5617600 - DNA, 25 bp, Homo sapien
ttcttcgaaacggcttggagaactg

SEQ ID NO: 5617601 - DNA, 25 bp, Homo sapien
gatcttgacagagtgctaagcgtga

SEQ ID NO: 5617602 - DNA, 25 bp, Homo sapien
atatagatagcatagaagggatttt

SEQ ID NO: 5617603 - DNA, 25 bp, Homo sapien
atgttatgctagcagatgaggcaga

SEQ ID NO: 5617604 - DNA, 25 bp, Homo sapien
gcggggaaataagctccaacaagca

SEQ ID NO: 5617605 - DNA, 25 bp, Homo sapien
gcagaatatagatagcatagaaggg

SEQ ID NO: 5617606 - DNA, 25 bp, Homo sapien
aggcagagatcttgacagagtgcta

SEQ ID NO: 5617607 - DNA, 25 bp, Homo sapien
gaaatgagaatttaccatggggggc

SEQ ID NO: 5617608 - DNA, 25 bp, Homo sapien
ccaggtgcatgtacacaggaaatga

SEQ ID NO: 5617609 - DNA, 25 bp, Homo sapien
aatttgtttgcagaatatagatagc

SEQ ID NO: 5617610 - DNA, 25 bp, Homo sapien
aagtccaggtgcatgtacacaggaa

SEQ ID NO: 5617611 - DNA, 25 bp, Homo sapien
ccaacaagcaatccacatgttatgc

SEQ ID NO: 5617612 - DNA, 25 bp, Homo sapien
aaatggtgccaaatcccaaggagtt

SEQ ID NO: 5617613 - DNA, 25 bp, Homo sapien
gtttggaaacactgctattacatac

SEQ ID NO: 5617614 - DNA, 25 bp, Homo sapien
aagcataaattgccagtttggaaac

SEQ ID NO: 5617615 - DNA, 25 bp, Homo sapien
attactttggagacttgccctagcc

SEQ ID NO: 5617616 - DNA, 25 bp, Homo sapien
agttgaacacaactgggtctagcag

SEQ ID NO: 5617617 - DNA, 25 bp, Homo sapien
aatattaagggaatacaaagatgaa

SEQ ID NO: 5617618 - DNA, 25 bp, Homo sapien
cactgtacacagagagataaagtgt

SEQ ID NO: 5617619 - DNA, 25 bp, Homo sapien
ggtctagcagtgaagagttaaatct

SEQ ID NO: 5617620 - DNA, 25 bp, Homo sapien
gagagataaagtgtgttggcaataa

SEQ ID NO: 5617621 - DNA, 25 bp, Homo sapien
aacacgaactgtaggaagaaaatta

SEQ ID NO: 5617622 - DNA, 25 bp, Homo sapien
acatttgcccctgatggagaaaaat

SEQ ID NO: 5617623 - DNA, 25 bp, Homo sapien
atctctgtcgctcactagcagtgtt

SEQ ID NO: 5617624 - DNA, 25 bp, Homo sapien
ttaacttcatagaggagtatctggc

SEQ ID NO: 5617625 - DNA, 25 bp, Homo sapien
gacaggtgtgcgttcaaattccatc

SEQ ID NO: 5617626 - DNA, 25 bp, Homo sapien
ccatgttggctaggaatcctggctt

SEQ ID NO: 5617627 - DNA, 25 bp, Homo sapien
ggctaggaatcctggctttagatca

SEQ ID NO: 5617628 - DNA, 25 bp, Homo sapien
ggagtcaaatgcctggtacagcatc

SEQ ID NO: 5617629 - DNA, 25 bp, Homo sapien
atcaacacatgatgtaggtccaaag

SEQ ID NO: 5617630 - DNA, 25 bp, Homo sapien
catgatgtaggtccaaagtatgcct

SEQ ID NO: 5617631 - DNA, 25 bp, Homo sapien
aagagggagtagccacctcccagaa

SEQ ID NO: 5617632 - DNA, 25 bp, Homo sapien
ggggcagggtagaatcccttgtcaa

SEQ ID NO: 5617633 - DNA, 25 bp, Homo sapien
ctttagatcaaggagtcaaatgcct

SEQ ID NO: 5617634 - DNA, 25 bp, Homo sapien
gtaactacataatcaaagaagaaac

SEQ ID NO: 5617635 - DNA, 25 bp, Homo sapien
tccaggtaacaaagctattatatgt

SEQ ID NO: 5617636 - DNA, 25 bp, Homo sapien
aattgagtcatctgaagagaaaagt

SEQ ID NO: 5617637 - DNA, 25 bp, Homo sapien
tgaagagaaaagtgtactctggtaa

SEQ ID NO: 5617638 - DNA, 25 bp, Homo sapien
gaacatgcatactgtaagatacaca

SEQ ID NO: 5617639 - DNA, 25 bp, Homo sapien
aactaaactatactgaacgtgaggt

SEQ ID NO: 5617640 - DNA, 25 bp, Homo sapien
caatgaagacaatatacaccaaatg

SEQ ID NO: 5617641 - DNA, 25 bp, Homo sapien
aagtcaatgctaactctgatgtggc

SEQ ID NO: 5617642 - DNA, 25 bp, Homo sapien
ctgatgtggcatatccaacaatatc

SEQ ID NO: 5617643 - DNA, 25 bp, Homo sapien
actccagtgccaacattatgaaatg

SEQ ID NO: 5617644 - DNA, 25 bp, Homo sapien
tgaacgtgaggtaatcttgccatga

SEQ ID NO: 5617645 - DNA, 25 bp, Homo sapien
aaacacttagtgtggcaggtctgtt

SEQ ID NO: 5617646 - DNA, 25 bp, Homo sapien
aatacgtatggaaaaatactgtgat

SEQ ID NO: 5617647 - DNA, 25 bp, Homo sapien
tcaataatggttactgcctgggaca

SEQ ID NO: 5617648 - DNA, 25 bp, Homo sapien
tacgtgcactgagcctagaaggata

SEQ ID NO: 5617649 - DNA, 25 bp, Homo sapien
aaaaaacctccctacatgaggccat

SEQ ID NO: 5617650 - DNA, 25 bp, Homo sapien
catgaatatggaaaaatggctgggt

SEQ ID NO: 5617651 - DNA, 25 bp, Homo sapien
gtggcaggtctgttcacatgaatat

SEQ ID NO: 5617652 - DNA, 25 bp, Homo sapien
tgccaagttgcaatacaatatagta

SEQ ID NO: 5617653 - DNA, 25 bp, Homo sapien
gatattttgaaaatgccaagttgca

SEQ ID NO: 5617654 - DNA, 25 bp, Homo sapien
ataagagaagttacgcttaaaaata

SEQ ID NO: 5617655 - DNA, 25 bp, Homo sapien
atgaggccatatttatacgtgcact

SEQ ID NO: 5617656 - DNA, 25 bp, Homo sapien
tttgaacttgccaagctcagcttga

SEQ ID NO: 5617657 - DNA, 25 bp, Homo sapien
ctggaattacaggcatgaaccacca

SEQ ID NO: 5617658 - DNA, 25 bp, Homo sapien
ggaccttggcacttactcctccctc

SEQ ID NO: 5617659 - DNA, 25 bp, Homo sapien
tctgcattccagccacaccagcttt

SEQ ID NO: 5617660 - DNA, 25 bp, Homo sapien
catgccctccaggccctgtgggatc

SEQ ID NO: 5617661 - DNA, 25 bp, Homo sapien
gacattgccacctccctgcttccac

SEQ ID NO: 5617662 - DNA, 25 bp, Homo sapien
gctcagcttgactcaggaccttggc

SEQ ID NO: 5617663 - DNA, 25 bp, Homo sapien
gggatcagacctgccgcctccctct

SEQ ID NO: 5617664 - DNA, 25 bp, Homo sapien
tcccattgcagttgggatggcactg

SEQ ID NO: 5617665 - DNA, 25 bp, Homo sapien
gcatgaaccaccaagcccagctaag

SEQ ID NO: 5617666 - DNA, 25 bp, Homo sapien
caagcccagctaagaggaacttttt

SEQ ID NO: 5617667 - DNA, 25 bp, Homo sapien
gcaggggctacttacagaagaatgc

SEQ ID NO: 5617668 - DNA, 25 bp, Homo sapien
ctggtggtcaccatcttatccaaac

SEQ ID NO: 5617669 - DNA, 25 bp, Homo sapien
cccatacaggtacaatctctgcctc

SEQ ID NO: 5617670 - DNA, 25 bp, Homo sapien
ggaggaaccggctatttacatggtc

SEQ ID NO: 5617671 - DNA, 25 bp, Homo sapien
atcatctaaaatacgagcaggggct

SEQ ID NO: 5617672 - DNA, 25 bp, Homo sapien
atggtctcaaagtatcaccctacag

SEQ ID NO: 5617673 - DNA, 25 bp, Homo sapien
agaagaatgcagctaataaggaatg

SEQ ID NO: 5617674 - DNA, 25 bp, Homo sapien
gtgttccatgactccatagtgatca

SEQ ID NO: 5617675 - DNA, 25 bp, Homo sapien
cagtaaagcattctggtggtcacca

SEQ ID NO: 5617676 - DNA, 25 bp, Homo sapien
tacaattgttgactcagttgaaaga

SEQ ID NO: 5617677 - DNA, 25 bp, Homo sapien
gcctcctgaggtgtagtattcttga

SEQ ID NO: 5617678 - DNA, 25 bp, Homo sapien
gccgagtacgagtgcttccagattg

SEQ ID NO: 5617679 - DNA, 25 bp, Homo sapien
caacaacgtcctaaactctggtgac

SEQ ID NO: 5617680 - DNA, 25 bp, Homo sapien
cccaatctgtatactgcggacgagc

SEQ ID NO: 5617681 - DNA, 25 bp, Homo sapien
acccagatcaagaacgaatccttcc

SEQ ID NO: 5617682 - DNA, 25 bp, Homo sapien
cttcctggaagatatcaacaacgtc

SEQ ID NO: 5617683 - DNA, 25 bp, Homo sapien
aagaactacggcatgtccgagtggc

SEQ ID NO: 5617684 - DNA, 25 bp, Homo sapien
gcgggcctacagaacctacccatca

SEQ ID NO: 5617685 - DNA, 25 bp, Homo sapien
tgaactatccaagaactacggcatg

SEQ ID NO: 5617686 - DNA, 25 bp, Homo sapien
atcgtcagcaccatgcggccctata

SEQ ID NO: 5617687 - DNA, 25 bp, Homo sapien
tcgcctcgcacatggccgagtacga

SEQ ID NO: 5617688 - DNA, 25 bp, Homo sapien
ttcctcttctcagacacccagatca

SEQ ID NO: 5617689 - DNA, 25 bp, Homo sapien
caaaagatcgaaagcattaacaatt

SEQ ID NO: 5617690 - DNA, 25 bp, Homo sapien
gtctttgagcatgttgtgacaactt

SEQ ID NO: 5617691 - DNA, 25 bp, Homo sapien
taagtaagcgaggaaataacattct

SEQ ID NO: 5617692 - DNA, 25 bp, Homo sapien
ttggcatcttgaggtattcagcatc

SEQ ID NO: 5617693 - DNA, 25 bp, Homo sapien
aagtacattttaagtaagcgaggaa

SEQ ID NO: 5617694 - DNA, 25 bp, Homo sapien
gaagaaatagctagcagacaattgt

SEQ ID NO: 5617695 - DNA, 25 bp, Homo sapien
aaacagaaaaggatagtcgtattag

SEQ ID NO: 5617696 - DNA, 25 bp, Homo sapien
tttccatatagacactggtacaaag

SEQ ID NO: 5617697 - DNA, 25 bp, Homo sapien
agatttgggataggacatttaagac

SEQ ID NO: 5617698 - DNA, 25 bp, Homo sapien
ctggcctcccaaaagatcgaaagca

SEQ ID NO: 5617699 - DNA, 25 bp, Homo sapien
caatgttgcttgttcccttggcatc

SEQ ID NO: 5617700 - DNA, 25 bp, Homo sapien
ctgggttcaagagatactgaacact

SEQ ID NO: 5617701 - DNA, 25 bp, Homo sapien
tctgttctcgtgctaatggacattt

SEQ ID NO: 5617702 - DNA, 25 bp, Homo sapien
tgcttattggcgattcaaacattcc

SEQ ID NO: 5617703 - DNA, 25 bp, Homo sapien
ttcatgtccctaaccagtcaatttc

SEQ ID NO: 5617704 - DNA, 25 bp, Homo sapien
tttggcaactatgaataaaactgtc

SEQ ID NO: 5617705 - DNA, 25 bp, Homo sapien
atgccacaactatgttctgatctcc

SEQ ID NO: 5617706 - DNA, 25 bp, Homo sapien
actgaagattagtggtgcttgttct

SEQ ID NO: 5617707 - DNA, 25 bp, Homo sapien
tattgggcaccaaatggtatcttaa

SEQ ID NO: 5617708 - DNA, 25 bp, Homo sapien
tctatacaggctctatgaacagtcc

SEQ ID NO: 5617709 - DNA, 25 bp, Homo sapien
tccccactctgacatacccatacac

SEQ ID NO: 5617710 - DNA, 25 bp, Homo sapien
tacacatacatccacatgccacaac

SEQ ID NO: 5617711 - DNA, 25 bp, Homo sapien
atgtaccaggatattcaagagtttc

SEQ ID NO: 5617712 - DNA, 25 bp, Homo sapien
ctaaatagatgaacactcccaagtg

SEQ ID NO: 5617713 - DNA, 25 bp, Homo sapien
aagagtttccccagaagacatagtg

SEQ ID NO: 5617714 - DNA, 25 bp, Homo sapien
agacatagtggaactgtgtgcagtt

SEQ ID NO: 5617715 - DNA, 25 bp, Homo sapien
gattcatgggtttctgagaacacac

SEQ ID NO: 5617716 - DNA, 25 bp, Homo sapien
gattcatgggtttctgagaacagca

SEQ ID NO: 5617717 - DNA, 25 bp, Homo sapien
actatgagaaaaccctcgaccgggc

SEQ ID NO: 5617718 - DNA, 25 bp, Homo sapien
gtggctcatgcctactgggcgaatc

SEQ ID NO: 5617719 - DNA, 25 bp, Homo sapien
ctgagaacagcaaagtaaaaattcc

SEQ ID NO: 5617720 - DNA, 25 bp, Homo sapien
tgtgtgcagttcacctgaaagcttt

SEQ ID NO: 5617721 - DNA, 25 bp, Homo sapien
tttacatagtgggcccagtatgagt

SEQ ID NO: 5617722 - DNA, 25 bp, Homo sapien
ggagaggccattaagaggtatttta

SEQ ID NO: 5617723 - DNA, 25 bp, Homo sapien
tgcctgatgcctgtgaatggccgtc

SEQ ID NO: 5617724 - DNA, 25 bp, Homo sapien
gcaggaggtatctctggttggcttt

SEQ ID NO: 5617725 - DNA, 25 bp, Homo sapien
tttaactgagccaccatagaagagt

SEQ ID NO: 5617726 - DNA, 25 bp, Homo sapien
gaatggccgtctgagtctcttgggc

SEQ ID NO: 5617727 - DNA, 25 bp, Homo sapien
tgagtctcttgggccttggtcactt

SEQ ID NO: 5617728 - DNA, 25 bp, Homo sapien
ctgctgtcctgcccacaatcacacc

SEQ ID NO: 5617729 - DNA, 25 bp, Homo sapien
caccgaccagtaactgtgcctgatg

SEQ ID NO: 5617730 - DNA, 25 bp, Homo sapien
aggtattttagggattgaatgggct

SEQ ID NO: 5617731 - DNA, 25 bp, Homo sapien
aactgtgcctgatgactggaggtat

SEQ ID NO: 5617732 - DNA, 25 bp, Homo sapien
ctggcctgccctgcaccgaccagta

SEQ ID NO: 5617733 - DNA, 25 bp, Homo sapien
aataaaagcaatggaaggctcatgc

SEQ ID NO: 5617734 - DNA, 25 bp, Homo sapien
ccaggccccattgagggtgttatgt

SEQ ID NO: 5617735 - DNA, 25 bp, Homo sapien
aaactatgtaaggcaggtagcttac

SEQ ID NO: 5617736 - DNA, 25 bp, Homo sapien
caatggaaggctcatgctgtatact

SEQ ID NO: 5617737 - DNA, 25 bp, Homo sapien
acataacatagaagttggattactc

SEQ ID NO: 5617738 - DNA, 25 bp, Homo sapien
tctgctgatgtcgatatagaactac

SEQ ID NO: 5617739 - DNA, 25 bp, Homo sapien
ttcagatgaaggattatagtatact

SEQ ID NO: 5617740 - DNA, 25 bp, Homo sapien
tactaatgtttgattatggggtgtt

SEQ ID NO: 5617741 - DNA, 25 bp, Homo sapien
tacaaatatgtaatccaaatgggaa

SEQ ID NO: 5617742 - DNA, 25 bp, Homo sapien
tcatctcacagggttaagagcagca

SEQ ID NO: 5617743 - DNA, 25 bp, Homo sapien
ttgcaagaatttgtgtgctccatcc

SEQ ID NO: 5617744 - DNA, 25 bp, Homo sapien
gaagaaaattcaaacatagtcacac

SEQ ID NO: 5617745 - DNA, 25 bp, Homo sapien
gaaacttccaggagcaatcagaccc

SEQ ID NO: 5617746 - DNA, 25 bp, Homo sapien
tctctgagttaagcaaagagaggaa

SEQ ID NO: 5617747 - DNA, 25 bp, Homo sapien
gaagaatggcaaatagtttgagtct

SEQ ID NO: 5617748 - DNA, 25 bp, Homo sapien
ttgagaaaaggcttactgtgggaaa

SEQ ID NO: 5617749 - DNA, 25 bp, Homo sapien
aagagtgataagcaaatggcaccat

SEQ ID NO: 5617750 - DNA, 25 bp, Homo sapien
tgttctggtagtcatcaaaaggttt

SEQ ID NO: 5617751 - DNA, 25 bp, Homo sapien
atggcaccatttagctgacactgct

SEQ ID NO: 5617752 - DNA, 25 bp, Homo sapien
tactaaactgatcagtgagaacagc

SEQ ID NO: 5617753 - DNA, 25 bp, Homo sapien
actgcttgaaaaaaggttgaagaaa

SEQ ID NO: 5617754 - DNA, 25 bp, Homo sapien
aaaatgggcatttacggcttactaa

SEQ ID NO: 5617755 - DNA, 25 bp, Homo sapien
tggccaagactcaccactagaagtg

SEQ ID NO: 5617756 - DNA, 25 bp, Homo sapien
ttcctgcccagcagactcggtggat

SEQ ID NO: 5617757 - DNA, 25 bp, Homo sapien
ttcaagcatagagacacaaccctgt

SEQ ID NO: 5617758 - DNA, 25 bp, Homo sapien
gatccctcagataggcccaagagct

SEQ ID NO: 5617759 - DNA, 25 bp, Homo sapien
gaattcaggaatgttgcaagattgc

SEQ ID NO: 5617760 - DNA, 25 bp, Homo sapien
tgcagcaggacaactcaacaagcta

SEQ ID NO: 5617761 - DNA, 25 bp, Homo sapien
ttcagtgttggatgttcaccgcttc

SEQ ID NO: 5617762 - DNA, 25 bp, Homo sapien
tacataggagtatatttggccaaga

SEQ ID NO: 5617763 - DNA, 25 bp, Homo sapien
gcaagattgcatgagattaagccgc

SEQ ID NO: 5617764 - DNA, 25 bp, Homo sapien
gggtctcgggctgactctctacttc

SEQ ID NO: 5617765 - DNA, 25 bp, Homo sapien
tacagcaagtggtaaatgatccctc

SEQ ID NO: 5617766 - DNA, 25 bp, Homo sapien
gtctcagtgttgatgatagtgaaag

SEQ ID NO: 5617767 - DNA, 25 bp, Homo sapien
ttccacatttgtaggtgagacagga

SEQ ID NO: 5617768 - DNA, 25 bp, Homo sapien
attctgcatgtaaaggaataatgag

SEQ ID NO: 5617769 - DNA, 25 bp, Homo sapien
gagaacgactctccactgaggaata

SEQ ID NO: 5617770 - DNA, 25 bp, Homo sapien
ttgatgatagtgaaagtgtagagta

SEQ ID NO: 5617771 - DNA, 25 bp, Homo sapien
aaatcgaacaatgtaaagtttccac

SEQ ID NO: 5617772 - DNA, 25 bp, Homo sapien
aggtgagacaggatagtctcagtgt

SEQ ID NO: 5617773 - DNA, 25 bp, Homo sapien
agtctgctgaaaaatcgaacaatgt

SEQ ID NO: 5617774 - DNA, 25 bp, Homo sapien
tctccccgtcagcatgagaacgact

SEQ ID NO: 5617775 - DNA, 25 bp, Homo sapien
taattgaggtttgtagagatatttc

SEQ ID NO: 5617776 - DNA, 25 bp, Homo sapien
agtgtagagtagaactaattgaggt

SEQ ID NO: 5617777 - DNA, 25 bp, Homo sapien
ggccactgtgcacacataaaatact

SEQ ID NO: 5617778 - DNA, 25 bp, Homo sapien
atttatttctataaagagatgggag

SEQ ID NO: 5617779 - DNA, 25 bp, Homo sapien
actgtgcacacataaaatactaaga

SEQ ID NO: 5617780 - DNA, 25 bp, Homo sapien
gaagctaaacttaatatctacaggt

SEQ ID NO: 5617781 - DNA, 25 bp, Homo sapien
tgcacacataaaatactaagaagct

SEQ ID NO: 5617782 - DNA, 25 bp, Homo sapien
caggtagaagttttaaattcaagat

SEQ ID NO: 5617783 - DNA, 25 bp, Homo sapien
aacagagttaatgctaaaatctcac

SEQ ID NO: 5617784 - DNA, 25 bp, Homo sapien
gaagtttatgttgaatattagcatt

SEQ ID NO: 5617785 - DNA, 25 bp, Homo sapien
gtgcacacataaaatactaagaagc

SEQ ID NO: 5617786 - DNA, 25 bp, Homo sapien
acataaaatactaagaagctaaact

SEQ ID NO: 5617787 - DNA, 25 bp, Homo sapien
atctacaggtagaagttttaaattc

SEQ ID NO: 5617788 - DNA, 25 bp, Homo sapien
tacttggagttatagatccagtcat

SEQ ID NO: 5617789 - DNA, 25 bp, Homo sapien
ttatcagtgacaaaaaatttgagag

SEQ ID NO: 5617790 - DNA, 25 bp, Homo sapien
taaggaaagttattagaagtatcta

SEQ ID NO: 5617791 - DNA, 25 bp, Homo sapien
atactgtatatattagccattccct

SEQ ID NO: 5617792 - DNA, 25 bp, Homo sapien
tttcttgaaatgagggtactaattg

SEQ ID NO: 5617793 - DNA, 25 bp, Homo sapien
agagacacagataatacttggagtt

SEQ ID NO: 5617794 - DNA, 25 bp, Homo sapien
tgaaatgagggtactaattgatggg

SEQ ID NO: 5617795 - DNA, 25 bp, Homo sapien
atcaacagatcaaaaacactgccct

SEQ ID NO: 5617796 - DNA, 25 bp, Homo sapien
tcttgattaacctgaagttgatatt

SEQ ID NO: 5617797 - DNA, 25 bp, Homo sapien
gagaagagacacagataatacttgg

SEQ ID NO: 5617798 - DNA, 25 bp, Homo sapien
tagatccagtcatagatataaggaa

SEQ ID NO: 5617799 - DNA, 25 bp, Homo sapien
acccaggtacctcacacgattaata

SEQ ID NO: 5617800 - DNA, 25 bp, Homo sapien
tcactagaggacataaaacaaatta

SEQ ID NO: 5617801 - DNA, 25 bp, Homo sapien
tcatgcttagatcactagaggacat

SEQ ID NO: 5617802 - DNA, 25 bp, Homo sapien
ataagatgacaaaggacttttgtcc

SEQ ID NO: 5617803 - DNA, 25 bp, Homo sapien
gataatcctgaagacagtgttagtc

SEQ ID NO: 5617804 - DNA, 25 bp, Homo sapien
gaagctgctactatgacccaggtac

SEQ ID NO: 5617805 - DNA, 25 bp, Homo sapien
aaggataatccaccaaggataatcc

SEQ ID NO: 5617806 - DNA, 25 bp, Homo sapien
ttttaacactgcatgaagctgctac

SEQ ID NO: 5617807 - DNA, 25 bp, Homo sapien
tacaatgaatgaggtggtgcatttc

SEQ ID NO: 5617808 - DNA, 25 bp, Homo sapien
ttgccatccccaactgcattgcatt

SEQ ID NO: 5617809 - DNA, 25 bp, Homo sapien
ttaagtgtctgccaaggataatcca

SEQ ID NO: 5617810 - DNA, 25 bp, Homo sapien
ctgaagatacatggcaactaaatcc

SEQ ID NO: 5617811 - DNA, 25 bp, Homo sapien
ggaattctataaaaccaccagctgt

SEQ ID NO: 5617812 - DNA, 25 bp, Homo sapien
tcaccaataatgggacaaacagaca

SEQ ID NO: 5617813 - DNA, 25 bp, Homo sapien
aaaattgaaactgaagatacatggc

SEQ ID NO: 5617814 - DNA, 25 bp, Homo sapien
atgggacaaacagacatcatgtgta

SEQ ID NO: 5617815 - DNA, 25 bp, Homo sapien
tttcaatggagcaagttacggaagt

SEQ ID NO: 5617816 - DNA, 25 bp, Homo sapien
taagttgcactaagaagaacctatc

SEQ ID NO: 5617817 - DNA, 25 bp, Homo sapien
cataagccaataatctgacaaaccc

SEQ ID NO: 5617818 - DNA, 25 bp, Homo sapien
ttacggaagttaacatcaccaataa

SEQ ID NO: 5617819 - DNA, 25 bp, Homo sapien
aaaagtcaatgttatgaaaagacaa

SEQ ID NO: 5617820 - DNA, 25 bp, Homo sapien
tcatgtgtatcgtgataagttgcac

SEQ ID NO: 5617821 - DNA, 25 bp, Homo sapien
ttaaaataacaatcacttgaatctt

SEQ ID NO: 5617822 - DNA, 25 bp, Homo sapien
aagattcaagtgattgttattttaa

SEQ ID NO: 5617823 - DNA, 25 bp, Homo sapien
atcattatgatttgagatggggtct

SEQ ID NO: 5617824 - DNA, 25 bp, Homo sapien
aaggtgctttagttagagcaggcac

SEQ ID NO: 5617825 - DNA, 25 bp, Homo sapien
ctcctgaatagctaggactataggc

SEQ ID NO: 5617826 - DNA, 25 bp, Homo sapien
ctcctaggctcaaggcatcctccca

SEQ ID NO: 5617827 - DNA, 25 bp, Homo sapien
ccacagctactgagaaaatatccac

SEQ ID NO: 5617828 - DNA, 25 bp, Homo sapien
tttggtagaaatgaggtctgtgttg

SEQ ID NO: 5617829 - DNA, 25 bp, Homo sapien
agttagagcaggcactcttgctatc

SEQ ID NO: 5617830 - DNA, 25 bp, Homo sapien
ctgccttggcccctcaaagtgctgg

SEQ ID NO: 5617831 - DNA, 25 bp, Homo sapien
ctggagtgcagtagtgtaatcatag

SEQ ID NO: 5617832 - DNA, 25 bp, Homo sapien
gaacgcctggcttcaagcgatcctc

SEQ ID NO: 5617833 - DNA, 25 bp, Homo sapien
atgtaccaccagtccagctaacttt

SEQ ID NO: 5617834 - DNA, 25 bp, Homo sapien
actcaggtcattcttcgttaagaat

SEQ ID NO: 5617835 - DNA, 25 bp, Homo sapien
attcttaacgaagaatgacctgagt

SEQ ID NO: 5617836 - DNA, 25 bp, Homo sapien
taagagaacaaatataagctgcagt

SEQ ID NO: 5617837 - DNA, 25 bp, Homo sapien
ggagaaaaacagtggaaatcaccaa

SEQ ID NO: 5617838 - DNA, 25 bp, Homo sapien
ccctccttaataggggtgggcctca

SEQ ID NO: 5617839 - DNA, 25 bp, Homo sapien
tacgattaacattgggatgggcaga

SEQ ID NO: 5617840 - DNA, 25 bp, Homo sapien
agggcatgtgtgatagttacttgta

SEQ ID NO: 5617841 - DNA, 25 bp, Homo sapien
accaatatgacaaagggcatgtgtg

SEQ ID NO: 5617842 - DNA, 25 bp, Homo sapien
gtgttccagagagtctttcagatac

SEQ ID NO: 5617843 - DNA, 25 bp, Homo sapien
ggcagactaagtgaagcagattgcc

SEQ ID NO: 5617844 - DNA, 25 bp, Homo sapien
ctcatgcaatcaatcaagggccagg

SEQ ID NO: 5617845 - DNA, 25 bp, Homo sapien
atataagctgcagtttgggagaaaa

SEQ ID NO: 5617846 - DNA, 25 bp, Homo sapien
gggtgccaggacatttggccaaaca

SEQ ID NO: 5617847 - DNA, 25 bp, Homo sapien
caccatgctgggctttcatatcttt

SEQ ID NO: 5617848 - DNA, 25 bp, Homo sapien
aacttcaggcctcaagcgaggatcg

SEQ ID NO: 5617849 - DNA, 25 bp, Homo sapien
actaactaccagaaagtatctcctc

SEQ ID NO: 5617850 - DNA, 25 bp, Homo sapien
cagttatgggtctataccagtcatc

SEQ ID NO: 5617851 - DNA, 25 bp, Homo sapien
taccagtcatcagggagtcactaac

SEQ ID NO: 5617852 - DNA, 25 bp, Homo sapien
gtatgggatatattatcaggtgctc

SEQ ID NO: 5617853 - DNA, 25 bp, Homo sapien
aaaatcagtggtatgggatatatta

SEQ ID NO: 5617854 - DNA, 25 bp, Homo sapien
atcagggagtcactaactaccagaa

SEQ ID NO: 5617855 - DNA, 25 bp, Homo sapien
tatcaggtgctcagttatgggtcta

SEQ ID NO: 5617856 - DNA, 25 bp, Homo sapien
ggtctataccagtcatcagggagtc

SEQ ID NO: 5617857 - DNA, 25 bp, Homo sapien
tcttctcaaaagtagcgtaaggggc

SEQ ID NO: 5617858 - DNA, 25 bp, Homo sapien
cttaatgattaaaagttgaataaac

SEQ ID NO: 5617859 - DNA, 25 bp, Homo sapien
aatacagtaaaccaaacaatttcta

SEQ ID NO: 5617860 - DNA, 25 bp, Homo sapien
attagtcaccacaggtgtgtaagac

SEQ ID NO: 5617861 - DNA, 25 bp, Homo sapien
tcttaaacaccagctggcaaaatga

SEQ ID NO: 5617862 - DNA, 25 bp, Homo sapien
tccatctgattaaacatagaccttt

SEQ ID NO: 5617863 - DNA, 25 bp, Homo sapien
gctggcaaaatgatagggcttttcc

SEQ ID NO: 5617864 - DNA, 25 bp, Homo sapien
aacaccagctggcaaaatgataggg

SEQ ID NO: 5617865 - DNA, 25 bp, Homo sapien
aagcgtgcactcccaggccaaattg

SEQ ID NO: 5617866 - DNA, 25 bp, Homo sapien
tctaatgcagtacacctggtttcac

SEQ ID NO: 5617867 - DNA, 25 bp, Homo sapien
cccaccttaacttcctgggtagctg

SEQ ID NO: 5617868 - DNA, 25 bp, Homo sapien
tgaaacgatcatggctcatcacagc

SEQ ID NO: 5617869 - DNA, 25 bp, Homo sapien
gggggaatctagataccaaaactgc

SEQ ID NO: 5617870 - DNA, 25 bp, Homo sapien
ggctagggtgaaaagctctttgttc

SEQ ID NO: 5617871 - DNA, 25 bp, Homo sapien
aaaaggtacttaaagcacatattta

SEQ ID NO: 5617872 - DNA, 25 bp, Homo sapien
acatcctcttaagcactgagagtgc

SEQ ID NO: 5617873 - DNA, 25 bp, Homo sapien
taacaaaggctattacatctcttct

SEQ ID NO: 5617874 - DNA, 25 bp, Homo sapien
gatcaactgtaaacatcaccacaac

SEQ ID NO: 5617875 - DNA, 25 bp, Homo sapien
ctaagatcaagtataaaacaggata

SEQ ID NO: 5617876 - DNA, 25 bp, Homo sapien
tagctttggtgttagatcaactgta

SEQ ID NO: 5617877 - DNA, 25 bp, Homo sapien
actgcatgttagactggctagggtg

SEQ ID NO: 5617878 - DNA, 25 bp, Homo sapien
tcatcatctctaactgggggaatct

SEQ ID NO: 5617879 - DNA, 25 bp, Homo sapien
tgtaagacttacagttagatacttt

SEQ ID NO: 5617880 - DNA, 25 bp, Homo sapien
cagaaactagccccccaggcttggc

SEQ ID NO: 5617881 - DNA, 25 bp, Homo sapien
atggggacaagacaatgattcctga

SEQ ID NO: 5617882 - DNA, 25 bp, Homo sapien
cctgagtcttagggctgctgtgatg

SEQ ID NO: 5617883 - DNA, 25 bp, Homo sapien
caccagagtcagaacatcacccggt

SEQ ID NO: 5617884 - DNA, 25 bp, Homo sapien
cttcattaaggggtgacagatctga

SEQ ID NO: 5617885 - DNA, 25 bp, Homo sapien
acaaagaaccaacctgactggggag

SEQ ID NO: 5617886 - DNA, 25 bp, Homo sapien
cagggtgaacggacagattcgttca

SEQ ID NO: 5617887 - DNA, 25 bp, Homo sapien
gacacatccccggggtccttgctgt

SEQ ID NO: 5617888 - DNA, 25 bp, Homo sapien
cccggtatgaaagctgccaccttct

SEQ ID NO: 5617889 - DNA, 25 bp, Homo sapien
gcttggcgcatgtgccctgagtctt

SEQ ID NO: 5617890 - DNA, 25 bp, Homo sapien
gcctcctgcaaagggatgttgtcac

SEQ ID NO: 5617891 - DNA, 25 bp, Homo sapien
agaccaggcaacaaagacataagcc

SEQ ID NO: 5617892 - DNA, 25 bp, Homo sapien
ttgaccaacagagtatggtagtaat

SEQ ID NO: 5617893 - DNA, 25 bp, Homo sapien
ataaactggcagattgtattttcca

SEQ ID NO: 5617894 - DNA, 25 bp, Homo sapien
aattctgagaccaggcaacaaagac

SEQ ID NO: 5617895 - DNA, 25 bp, Homo sapien
catgactgctttgaccaacagagta

SEQ ID NO: 5617896 - DNA, 25 bp, Homo sapien
aacaaagacataagcctctgcctgg

SEQ ID NO: 5617897 - DNA, 25 bp, Homo sapien
gggcaaattgcaatgaacgctcttg

SEQ ID NO: 5617898 - DNA, 25 bp, Homo sapien
ttgccaaagttaccatgccactccc

SEQ ID NO: 5617899 - DNA, 25 bp, Homo sapien
cctactgatcccacagaattcagga

SEQ ID NO: 5617900 - DNA, 25 bp, Homo sapien
aatgaacgctcttggaattctatgt

SEQ ID NO: 5617901 - DNA, 25 bp, Homo sapien
ccttatcaaatggtagagtctattc

SEQ ID NO: 5617902 - DNA, 25 bp, Homo sapien
ctctccaacagagccgatatgcagg

SEQ ID NO: 5617903 - DNA, 25 bp, Homo sapien
tggacacttgtcaaaaggaacagaa

SEQ ID NO: 5617904 - DNA, 25 bp, Homo sapien
caggtctgctaaaaatcaggggctc

SEQ ID NO: 5617905 - DNA, 25 bp, Homo sapien
gcaggggacattctcagcattctct

SEQ ID NO: 5617906 - DNA, 25 bp, Homo sapien
aaatcccccaaccggctgaatggac

SEQ ID NO: 5617907 - DNA, 25 bp, Homo sapien
tctttgcctaggaattggtagttta

SEQ ID NO: 5617908 - DNA, 25 bp, Homo sapien
ggcgcctggcctccaagaaacattt

SEQ ID NO: 5617909 - DNA, 25 bp, Homo sapien
cccatgttgaatgaaacaggtctgc

SEQ ID NO: 5617910 - DNA, 25 bp, Homo sapien
tgaatggacccctgtcttggcccag

SEQ ID NO: 5617911 - DNA, 25 bp, Homo sapien
aaaggaacagaatgttagaatcatc

SEQ ID NO: 5617912 - DNA, 25 bp, Homo sapien
ttttacatttatgcggggagtgtgt

SEQ ID NO: 5617913 - DNA, 25 bp, Homo sapien
tcagtgctcataattcaaggaaaac

SEQ ID NO: 5617914 - DNA, 25 bp, Homo sapien
gtgaatagccaaaagtgctaagcac

SEQ ID NO: 5617915 - DNA, 25 bp, Homo sapien
atgccatcagatgttagtatacagt

SEQ ID NO: 5617916 - DNA, 25 bp, Homo sapien
taaatattggatgcaaatcatgctc

SEQ ID NO: 5617917 - DNA, 25 bp, Homo sapien
tgcataagagttagttcaaagaaac

SEQ ID NO: 5617918 - DNA, 25 bp, Homo sapien
tgtgtaattaaatagagcattctac

SEQ ID NO: 5617919 - DNA, 25 bp, Homo sapien
atgctcaaaagctgtgtgaatagcc

SEQ ID NO: 5617920 - DNA, 25 bp, Homo sapien
tagattactggttctgctggttgca

SEQ ID NO: 5617921 - DNA, 25 bp, Homo sapien
tgacaaaactcacagatggcttatt

SEQ ID NO: 5617922 - DNA, 25 bp, Homo sapien
atctggaacacctgatattgtacac

SEQ ID NO: 5617923 - DNA, 25 bp, Homo sapien
atgaatcttctggacctcagaggga

SEQ ID NO: 5617924 - DNA, 25 bp, Homo sapien
gaggttgtgatggttaatactgagt

SEQ ID NO: 5617925 - DNA, 25 bp, Homo sapien
ccgtgctggatacttcctgcccttg

SEQ ID NO: 5617926 - DNA, 25 bp, Homo sapien
gaaggaggcaaagtattgttcctgc

SEQ ID NO: 5617927 - DNA, 25 bp, Homo sapien
gctagactggcttagcctcccaggc

SEQ ID NO: 5617928 - DNA, 25 bp, Homo sapien
gtgagggtgttgccacatttgagtc

SEQ ID NO: 5617929 - DNA, 25 bp, Homo sapien
atgttaaggttgtataaggaaggag

SEQ ID NO: 5617930 - DNA, 25 bp, Homo sapien
aggaggagcaaaaagaatgctttaa

SEQ ID NO: 5617931 - DNA, 25 bp, Homo sapien
taatcagctgccagctcggccagtg

SEQ ID NO: 5617932 - DNA, 25 bp, Homo sapien
caacttgattgcactgaaggaggca

SEQ ID NO: 5617933 - DNA, 25 bp, Homo sapien
catttgagtcagtggactgggaaag

SEQ ID NO: 5617934 - DNA, 25 bp, Homo sapien
cccaggctacatctttctcccgtgc

SEQ ID NO: 5617935 - DNA, 25 bp, Homo sapien
tgagaaaacactgttggtcacacca

SEQ ID NO: 5617936 - DNA, 25 bp, Homo sapien
atgatgggctttaattggcaggtat

SEQ ID NO: 5617937 - DNA, 25 bp, Homo sapien
tccaggagtgggaataatttatacc

SEQ ID NO: 5617938 - DNA, 25 bp, Homo sapien
aattacttatggtgttgatgagaaa

SEQ ID NO: 5617939 - DNA, 25 bp, Homo sapien
tataccacttgtgttcaggtcctgg

SEQ ID NO: 5617940 - DNA, 25 bp, Homo sapien
gttggtcacaccatgctggatcatc

SEQ ID NO: 5617941 - DNA, 25 bp, Homo sapien
catctccaaactgggcaaaagtaat

SEQ ID NO: 5617942 - DNA, 25 bp, Homo sapien
aatctgggcaaagtgtacagcatgt

SEQ ID NO: 5617943 - DNA, 25 bp, Homo sapien
ttcatgatcaaagtaaggcatattg

SEQ ID NO: 5617944 - DNA, 25 bp, Homo sapien
gaaataatcacaaatctgggcaaag

SEQ ID NO: 5617945 - DNA, 25 bp, Homo sapien
cagtagcaatgatgggctttaattg

SEQ ID NO: 5617946 - DNA, 25 bp, Homo sapien
tacttgggaaatgggtccaatgaga

SEQ ID NO: 5617947 - DNA, 25 bp, Homo sapien
tgacatgtttgttaccagggcctca

SEQ ID NO: 5617948 - DNA, 25 bp, Homo sapien
gggctgtcgcatgcatccccaacgc

SEQ ID NO: 5617949 - DNA, 25 bp, Homo sapien
aatagttggtgtgttgacagttgtt

SEQ ID NO: 5617950 - DNA, 25 bp, Homo sapien
tccaatgagaatggggtgaaattaa

SEQ ID NO: 5617951 - DNA, 25 bp, Homo sapien
attcacacagttgcctgggagcaga

SEQ ID NO: 5617952 - DNA, 25 bp, Homo sapien
gttatagtgcaaggaataatggacg

SEQ ID NO: 5617953 - DNA, 25 bp, Homo sapien
ccctgagaatgcctcgggtcatggg

SEQ ID NO: 5617954 - DNA, 25 bp, Homo sapien
acagatgaggatagaatgttatagc

SEQ ID NO: 5617955 - DNA, 25 bp, Homo sapien
cctgacacagatgaggctccaaata

SEQ ID NO: 5617956 - DNA, 25 bp, Homo sapien
ggcacacagcacagataccctgaga

SEQ ID NO: 5617957 - DNA, 25 bp, Homo sapien
atcaacctgctgttcccatcagctt

SEQ ID NO: 5617958 - DNA, 25 bp, Homo sapien
tcttaaacagtccttctggcatccc

SEQ ID NO: 5617959 - DNA, 25 bp, Homo sapien
gttatcacaagctatatcaacctgc

SEQ ID NO: 5617960 - DNA, 25 bp, Homo sapien
gaacacaactcaatactacagaaaa

SEQ ID NO: 5617961 - DNA, 25 bp, Homo sapien
ttctggcatccctatgtaccagcta

SEQ ID NO: 5617962 - DNA, 25 bp, Homo sapien
gtgccctgcctaactatgagaagat

SEQ ID NO: 5617963 - DNA, 25 bp, Homo sapien
actatgagaagataaattcatttct

SEQ ID NO: 5617964 - DNA, 25 bp, Homo sapien
aagcatccttctactgtgccctgcc

SEQ ID NO: 5617965 - DNA, 25 bp, Homo sapien
tataaaaggagtctacatctgcata

SEQ ID NO: 5617966 - DNA, 25 bp, Homo sapien
cagaaaattgtaaatctaccgtggg

SEQ ID NO: 5617967 - DNA, 25 bp, Homo sapien
ttttcagcttcttaaacagtccttc

SEQ ID NO: 5617968 - DNA, 25 bp, Homo sapien
cttctcggaagtcttccatggtgag

SEQ ID NO: 5617969 - DNA, 25 bp, Homo sapien
tttctgatgagttctataatagcaa

SEQ ID NO: 5617970 - DNA, 25 bp, Homo sapien
cggaagtcttccatggtgagaaaac

SEQ ID NO: 5617971 - DNA, 25 bp, Homo sapien
ccatggtgagaaaacgtagctatta

SEQ ID NO: 5617972 - DNA, 25 bp, Homo sapien
gtcttccatggtgagaaaacgtagc

SEQ ID NO: 5617973 - DNA, 25 bp, Homo sapien
acttagtaaacaataacatatcagg

SEQ ID NO: 5617974 - DNA, 25 bp, Homo sapien
taaacttatatggacttgctaatgg

SEQ ID NO: 5617975 - DNA, 25 bp, Homo sapien
attacagttggtttctgatgagttc

SEQ ID NO: 5617976 - DNA, 25 bp, Homo sapien
gtcataatgcagttgttattgcttc

SEQ ID NO: 5617977 - DNA, 25 bp, Homo sapien
aagctcaggtcataatgcagttgtt

SEQ ID NO: 5617978 - DNA, 25 bp, Homo sapien
gagaaaacgtagctattacagttgg

SEQ ID NO: 5617979 - DNA, 25 bp, Homo sapien
taagtaggacggtttacagtttgca

SEQ ID NO: 5617980 - DNA, 25 bp, Homo sapien
cttgggactgcctcactgcaaagcc

SEQ ID NO: 5617981 - DNA, 25 bp, Homo sapien
atgaggatgagaaacagtttctgtt

SEQ ID NO: 5617982 - DNA, 25 bp, Homo sapien
tacagtttgcaggcatgaggatgag

SEQ ID NO: 5617983 - DNA, 25 bp, Homo sapien
ccaatgaaaactgcccccagcccag

SEQ ID NO: 5617984 - DNA, 25 bp, Homo sapien
gctcagatttgaacttgggactgcc

SEQ ID NO: 5617985 - DNA, 25 bp, Homo sapien
gcccatcacacgacgggtcagtggt

SEQ ID NO: 5617986 - DNA, 25 bp, Homo sapien
agcccaagccttgcccaatgaaaac

SEQ ID NO: 5617987 - DNA, 25 bp, Homo sapien
agtctcctaacacctggcgcccatc

SEQ ID NO: 5617988 - DNA, 25 bp, Homo sapien
tttcacctatgatttacagcggccg

SEQ ID NO: 5617989 - DNA, 25 bp, Homo sapien
cctgcttcgaagctaagcccaagcc

SEQ ID NO: 5617990 - DNA, 25 bp, Homo sapien
tgagccactgtgccatgaggattag

SEQ ID NO: 5617991 - DNA, 25 bp, Homo sapien
agaagacaacctatcctatcctgga

SEQ ID NO: 5617992 - DNA, 25 bp, Homo sapien
tgtgccatgaggattagtaaagtgc

SEQ ID NO: 5617993 - DNA, 25 bp, Homo sapien
agacacaatcaaaacccatggggaa

SEQ ID NO: 5617994 - DNA, 25 bp, Homo sapien
gcgctatcttggctctgtaacctct

SEQ ID NO: 5617995 - DNA, 25 bp, Homo sapien
catagcttagacacaatcaaaaccc

SEQ ID NO: 5617996 - DNA, 25 bp, Homo sapien
tatgtttatgctgattatatgaagg

SEQ ID NO: 5617997 - DNA, 25 bp, Homo sapien
gccatgaggattagtaaagtgcact

SEQ ID NO: 5617998 - DNA, 25 bp, Homo sapien
gtaaagtgcactcatgttaagtaaa

SEQ ID NO: 5617999 - DNA, 25 bp, Homo sapien
acctatcctatcctggatgagacac

SEQ ID NO: 5618000 - DNA, 25 bp, Homo sapien
acccatggggaacatctttagaatt

SEQ ID NO: 5618001 - DNA, 25 bp, Homo sapien
acggttcggtactactctcacaaat

SEQ ID NO: 5618002 - DNA, 25 bp, Homo sapien
atttgtgagagtagtaccgaaccgt

SEQ ID NO: 5618003 - DNA, 25 bp, Homo sapien
aggcaagtacctctgaaaacctgta

SEQ ID NO: 5618004 - DNA, 25 bp, Homo sapien
tatggtcacctagcaatggttcaat

SEQ ID NO: 5618005 - DNA, 25 bp, Homo sapien
aggggaagtaatttggataatacca

SEQ ID NO: 5618006 - DNA, 25 bp, Homo sapien
tcctccattccttgaaagtcgattc

SEQ ID NO: 5618007 - DNA, 25 bp, Homo sapien
aaaaataatttgaggtgggacatac

SEQ ID NO: 5618008 - DNA, 25 bp, Homo sapien
aagtcgattcaaaacatttatggtc

SEQ ID NO: 5618009 - DNA, 25 bp, Homo sapien
attccccaggaaagtaaatgaaata

SEQ ID NO: 5618010 - DNA, 25 bp, Homo sapien
aatttgaggtgggacatactcagca

SEQ ID NO: 5618011 - DNA, 25 bp, Homo sapien
tcaaaaaggtatgagtaaaaggatc

SEQ ID NO: 5618012 - DNA, 25 bp, Homo sapien
tacagataacccatattttcgcagt

SEQ ID NO: 5618013 - DNA, 25 bp, Homo sapien
ctgacagttgtaattacataggaaa

SEQ ID NO: 5618014 - DNA, 25 bp, Homo sapien
tagtgacatccttaatacagaaatc

SEQ ID NO: 5618015 - DNA, 25 bp, Homo sapien
tcaagcgtgttgagattatctagtt

SEQ ID NO: 5618016 - DNA, 25 bp, Homo sapien
ctgagggtcacataagcaccaagtg

SEQ ID NO: 5618017 - DNA, 25 bp, Homo sapien
gagcaggaataaaacaacaggtaat

SEQ ID NO: 5618018 - DNA, 25 bp, Homo sapien
ttatgagcctaaggttttaaccagc

SEQ ID NO: 5618019 - DNA, 25 bp, Homo sapien
tttaaccagcaaggcatgctgcctc

SEQ ID NO: 5618020 - DNA, 25 bp, Homo sapien
tcaatagaaaaatgcagtgtggaca

SEQ ID NO: 5618021 - DNA, 25 bp, Homo sapien
agaaaattgagacataaaaagattc

SEQ ID NO: 5618022 - DNA, 25 bp, Homo sapien
acataagcaccaagtgatgaggctg

SEQ ID NO: 5618023 - DNA, 25 bp, Homo sapien
atgtaagtggtctgacttatgagcc

SEQ ID NO: 5618024 - DNA, 25 bp, Homo sapien
tgtggacattcaacagagcaggaat

SEQ ID NO: 5618025 - DNA, 25 bp, Homo sapien
tttgcgtctttagaagtcaagaggt

SEQ ID NO: 5618026 - DNA, 25 bp, Homo sapien
agaggtgatccaggacctagtcctg

SEQ ID NO: 5618027 - DNA, 25 bp, Homo sapien
ataatgctatagactgaggagacaa

SEQ ID NO: 5618028 - DNA, 25 bp, Homo sapien
tgaggagacaatgagtcacgaatca

SEQ ID NO: 5618029 - DNA, 25 bp, Homo sapien
ctggaacagatcttctctaagctcc

SEQ ID NO: 5618030 - DNA, 25 bp, Homo sapien
ctgataatcgatgagtctgtgacca

SEQ ID NO: 5618031 - DNA, 25 bp, Homo sapien
tgctgctcctagaagttaataatgc

SEQ ID NO: 5618032 - DNA, 25 bp, Homo sapien
caggacctagtcctggctccatcac

SEQ ID NO: 5618033 - DNA, 25 bp, Homo sapien
gtacactctactccactgctgctcc

SEQ ID NO: 5618034 - DNA, 25 bp, Homo sapien
ttccagatctgataatcgatgagtc

SEQ ID NO: 5618035 - DNA, 25 bp, Homo sapien
agtctgtgaccattcagtacactct

SEQ ID NO: 5618036 - DNA, 25 bp, Homo sapien
aaaacacctggacttgcagccattt

SEQ ID NO: 5618037 - DNA, 25 bp, Homo sapien
tgtaggctaggcacattggttcatg

SEQ ID NO: 5618038 - DNA, 25 bp, Homo sapien
tgatttttctaccttctgggacagt

SEQ ID NO: 5618039 - DNA, 25 bp, Homo sapien
tataaaagactgtaggctaggcaca

SEQ ID NO: 5618040 - DNA, 25 bp, Homo sapien
ctagtgcagatttcttaagccaatt

SEQ ID NO: 5618041 - DNA, 25 bp, Homo sapien
ggctaggcacattggttcatgcttg

SEQ ID NO: 5618042 - DNA, 25 bp, Homo sapien
gcaacggtttgctagtgcagatttc

SEQ ID NO: 5618043 - DNA, 25 bp, Homo sapien
tagaacatgaccgtaaagaacttat

SEQ ID NO: 5618044 - DNA, 25 bp, Homo sapien
taaataaaagactgcaacggtttgc

SEQ ID NO: 5618045 - DNA, 25 bp, Homo sapien
ttattagaacatgaccgtaaagaac

SEQ ID NO: 5618046 - DNA, 25 bp, Homo sapien
ccacttgtaaaacacctggacttgc

SEQ ID NO: 5618047 - DNA, 25 bp, Homo sapien
aaaaaaaattgtggttgcagttaca

SEQ ID NO: 5618048 - DNA, 25 bp, Homo sapien
aattataattaaagcacagaacaca

SEQ ID NO: 5618049 - DNA, 25 bp, Homo sapien
attccccagaaccttgatcaacatt

SEQ ID NO: 5618050 - DNA, 25 bp, Homo sapien
actaagtcattaagagtaaaaataa

SEQ ID NO: 5618051 - DNA, 25 bp, Homo sapien
tagtatggcatcagctttaagcatc

SEQ ID NO: 5618052 - DNA, 25 bp, Homo sapien
taaaaacacatagatctaccaatcc

SEQ ID NO: 5618053 - DNA, 25 bp, Homo sapien
tttctcatcagtccttgtccatttc

SEQ ID NO: 5618054 - DNA, 25 bp, Homo sapien
aaattcattccccagaaccttgatc

SEQ ID NO: 5618055 - DNA, 25 bp, Homo sapien
tttttctgtggctactaagtcatta

SEQ ID NO: 5618056 - DNA, 25 bp, Homo sapien
tttttgatagtatggcatcagcttt

SEQ ID NO: 5618057 - DNA, 25 bp, Homo sapien
tattacacagaacacataagatagt

SEQ ID NO: 5618058 - DNA, 25 bp, Homo sapien
cctgaatcccccaaagcaactttcc

SEQ ID NO: 5618059 - DNA, 25 bp, Homo sapien
gagatgcccggaatcactcaaggca

SEQ ID NO: 5618060 - DNA, 25 bp, Homo sapien
gcctcacctggatgcgagtgagaac

SEQ ID NO: 5618061 - DNA, 25 bp, Homo sapien
ctctcgactctagatagggcaggtg

SEQ ID NO: 5618062 - DNA, 25 bp, Homo sapien
ggagtggcaatgctgactccagccc

SEQ ID NO: 5618063 - DNA, 25 bp, Homo sapien
agcctagagacctcctctcgactct

SEQ ID NO: 5618064 - DNA, 25 bp, Homo sapien
gctccctgaatcccccaaagcaact

SEQ ID NO: 5618065 - DNA, 25 bp, Homo sapien
cttctggatcacgtcaccgatgcgg

SEQ ID NO: 5618066 - DNA, 25 bp, Homo sapien
cagcctcacctggatgcgagtgaga

SEQ ID NO: 5618067 - DNA, 25 bp, Homo sapien
ggcacagggattgccctcagcctag

SEQ ID NO: 5618068 - DNA, 25 bp, Homo sapien
tgcccggaatcactcaaggcaacct

SEQ ID NO: 5618069 - DNA, 25 bp, Homo sapien
actctctttctctaaggccagggaa

SEQ ID NO: 5618070 - DNA, 25 bp, Homo sapien
cgggattacaggcaccggtcatcat

SEQ ID NO: 5618071 - DNA, 25 bp, Homo sapien
tcaccctggctccaaagagggcaaa

SEQ ID NO: 5618072 - DNA, 25 bp, Homo sapien
ttatttttgtagagagagggttcca

SEQ ID NO: 5618073 - DNA, 25 bp, Homo sapien
tgagccactgcatccagcctccctg

SEQ ID NO: 5618074 - DNA, 25 bp, Homo sapien
ctcctcagcctcgaggatagccggg

SEQ ID NO: 5618075 - DNA, 25 bp, Homo sapien
gagagggttccaccatgctgtccag

SEQ ID NO: 5618076 - DNA, 25 bp, Homo sapien
caaagagggcaaaagcaactctctt

SEQ ID NO: 5618077 - DNA, 25 bp, Homo sapien
agactaggcccaacaccctcaattc

SEQ ID NO: 5618078 - DNA, 25 bp, Homo sapien
gccagggaagtatctaccacaatct

SEQ ID NO: 5618079 - DNA, 25 bp, Homo sapien
caggtgatctacccgcctcagcctc

SEQ ID NO: 5618080 - DNA, 25 bp, Homo sapien
gaaacatgtagacaattgtagacgg

SEQ ID NO: 5618081 - DNA, 25 bp, Homo sapien
ccgtctacaattgtctacatgtttc

SEQ ID NO: 5618082 - DNA, 25 bp, Homo sapien
ccaaaaacagctaagcccagtgcac

SEQ ID NO: 5618083 - DNA, 25 bp, Homo sapien
gcctgcatgaattagtcagcttgtc

SEQ ID NO: 5618084 - DNA, 25 bp, Homo sapien
attagtgactacagcataaagcttg

SEQ ID NO: 5618085 - DNA, 25 bp, Homo sapien
tttggaagtcatacagaaaagttct

SEQ ID NO: 5618086 - DNA, 25 bp, Homo sapien
gagcagaaaaaggccagatttctta

SEQ ID NO: 5618087 - DNA, 25 bp, Homo sapien
cagtggccaacatcccagaactaag

SEQ ID NO: 5618088 - DNA, 25 bp, Homo sapien
ccatcaaccgcagttgaaagacgca

SEQ ID NO: 5618089 - DNA, 25 bp, Homo sapien
aaactgaccttagaaacaaagagaa

SEQ ID NO: 5618090 - DNA, 25 bp, Homo sapien
taagcccagtgcacacagcatttcc

SEQ ID NO: 5618091 - DNA, 25 bp, Homo sapien
ggttttaatgacagcagtaacaact

SEQ ID NO: 5618092 - DNA, 25 bp, Homo sapien
tggcagtaccacagtggccaacatc

SEQ ID NO: 5618093 - DNA, 25 bp, Homo sapien
gcgtccactggggttcttggaatgt

SEQ ID NO: 5618094 - DNA, 25 bp, Homo sapien
tgcaatggtgtgttagaaaatcatc

SEQ ID NO: 5618095 - DNA, 25 bp, Homo sapien
catggtttcaagcgtccactggggt

SEQ ID NO: 5618096 - DNA, 25 bp, Homo sapien
ttccctgcagataaaaggggactac

SEQ ID NO: 5618097 - DNA, 25 bp, Homo sapien
atcgaaaaggagaagatctatgaga

SEQ ID NO: 5618098 - DNA, 25 bp, Homo sapien
tgtagaaacttgcaatggtgtgtta

SEQ ID NO: 5618099 - DNA, 25 bp, Homo sapien
gcatcaaactgccaacagagtatag

SEQ ID NO: 5618100 - DNA, 25 bp, Homo sapien
aacagtatccatagggttcagtact

SEQ ID NO: 5618101 - DNA, 25 bp, Homo sapien
aaatatggttatcgaaaaggagaag

SEQ ID NO: 5618102 - DNA, 25 bp, Homo sapien
ttatcgtaggtatggataggaaaaa

SEQ ID NO: 5618103 - DNA, 25 bp, Homo sapien
aggggactactataactgtgaacac

SEQ ID NO: 5618104 - DNA, 25 bp, Homo sapien
gtggtggccattacctacaagtccc

SEQ ID NO: 5618105 - DNA, 25 bp, Homo sapien
atggaagtataggcatttgaggatc

SEQ ID NO: 5618106 - DNA, 25 bp, Homo sapien
actggtaaataaaagtacaggtgat

SEQ ID NO: 5618107 - DNA, 25 bp, Homo sapien
aaggctgtagggactttccgtcact

SEQ ID NO: 5618108 - DNA, 25 bp, Homo sapien
tgccgttgagacatagttgaggaca

SEQ ID NO: 5618109 - DNA, 25 bp, Homo sapien
agttgaggacatagaattgatacac

SEQ ID NO: 5618110 - DNA, 25 bp, Homo sapien
atgaagtccaaagtggtggccatta

SEQ ID NO: 5618111 - DNA, 25 bp, Homo sapien
ccgtcactccgaaaacatgaagtcc

SEQ ID NO: 5618112 - DNA, 25 bp, Homo sapien
aaggagaagtaatcaatagaggctt

SEQ ID NO: 5618113 - DNA, 25 bp, Homo sapien
agtacaggtgataagagcacaagaa

SEQ ID NO: 5618114 - DNA, 25 bp, Homo sapien
caagtccctttgagatctggatccc

SEQ ID NO: 5618115 - DNA, 25 bp, Homo sapien
tactaagtcaatgagatactgtctc

SEQ ID NO: 5618116 - DNA, 25 bp, Homo sapien
aaagaaaaatttgacagagacacaa

SEQ ID NO: 5618117 - DNA, 25 bp, Homo sapien
atgaataatattaaacgatgagaat

SEQ ID NO: 5618118 - DNA, 25 bp, Homo sapien
tgacagagacacaattatactaagt

SEQ ID NO: 5618119 - DNA, 25 bp, Homo sapien
tatatatgaaagattgaaaatacat

SEQ ID NO: 5618120 - DNA, 25 bp, Homo sapien
tcaatatagaccaaagcagaatctg

SEQ ID NO: 5618121 - DNA, 25 bp, Homo sapien
gaacacttagcaacataaattagac

SEQ ID NO: 5618122 - DNA, 25 bp, Homo sapien
tgttggaccacagaaatcaaaataa

SEQ ID NO: 5618123 - DNA, 25 bp, Homo sapien
ccaagaatccaaagggcatttcaaa

SEQ ID NO: 5618124 - DNA, 25 bp, Homo sapien
ataaacagactacaaagatacactt

SEQ ID NO: 5618125 - DNA, 25 bp, Homo sapien
ataattccagaacacttagcaacat

SEQ ID NO: 5618126 - DNA, 25 bp, Homo sapien
gcacacctggcagggcggcgacggg

SEQ ID NO: 5618127 - DNA, 25 bp, Homo sapien
cccgtcgccgccctgccaggtgtgc

SEQ ID NO: 5618128 - DNA, 25 bp, Homo sapien
aatgtcaaagttaggaatgatggac

SEQ ID NO: 5618129 - DNA, 25 bp, Homo sapien
taggcctgatagcttagtggattgg

SEQ ID NO: 5618130 - DNA, 25 bp, Homo sapien
ccacagatacagagccaactgtact

SEQ ID NO: 5618131 - DNA, 25 bp, Homo sapien
acaaaactgtcagaaaatgccagtc

SEQ ID NO: 5618132 - DNA, 25 bp, Homo sapien
atggatgtggaacacccacagatac

SEQ ID NO: 5618133 - DNA, 25 bp, Homo sapien
gaatgatggactaactaggcctgat

SEQ ID NO: 5618134 - DNA, 25 bp, Homo sapien
tcagtacagacacaaccatccttct

SEQ ID NO: 5618135 - DNA, 25 bp, Homo sapien
ttacagggtttctagctactaagtc

SEQ ID NO: 5618136 - DNA, 25 bp, Homo sapien
ttagtggattggtagaaattgcaaa

SEQ ID NO: 5618137 - DNA, 25 bp, Homo sapien
acggttgaattcatggatgtggaac

SEQ ID NO: 5618138 - DNA, 25 bp, Homo sapien
aaaatgccagtcgttcagaaatgtc

SEQ ID NO: 5618139 - DNA, 25 bp, Homo sapien
tgacgtctcgattccacgctgcacc

SEQ ID NO: 5618140 - DNA, 25 bp, Homo sapien
ggtgcagcgtggaatcgagacgtca

SEQ ID NO: 5618141 - DNA, 25 bp, Homo sapien
taggagaacctttggcttttccatc

SEQ ID NO: 5618142 - DNA, 25 bp, Homo sapien
tcctgtaatcaatttgtaagaactc

SEQ ID NO: 5618143 - DNA, 25 bp, Homo sapien
atggagagccaattgtcctagtatc

SEQ ID NO: 5618144 - DNA, 25 bp, Homo sapien
ccatagtaactagtcatttgaatct

SEQ ID NO: 5618145 - DNA, 25 bp, Homo sapien
ctctcagcgtgacattcatcttgta

SEQ ID NO: 5618146 - DNA, 25 bp, Homo sapien
aaaatcagctgtttagtctttgtac

SEQ ID NO: 5618147 - DNA, 25 bp, Homo sapien
attcacctagaaattatagttgtct

SEQ ID NO: 5618148 - DNA, 25 bp, Homo sapien
agatgttctatctctcagcgtgaca

SEQ ID NO: 5618149 - DNA, 25 bp, Homo sapien
tatagttgtctataagatacatatc

SEQ ID NO: 5618150 - DNA, 25 bp, Homo sapien
aaacactgtgtttcggtaggagaac

SEQ ID NO: 5618151 - DNA, 25 bp, Homo sapien
cctccaaatggagagccaattgtcc

SEQ ID NO: 5618152 - DNA, 25 bp, Homo sapien
tcataaggctccacagcagcaggaa

SEQ ID NO: 5618153 - DNA, 25 bp, Homo sapien
accaccaatatctggtctctcttcc

SEQ ID NO: 5618154 - DNA, 25 bp, Homo sapien
caatgagattatacagatgtcatgg

SEQ ID NO: 5618155 - DNA, 25 bp, Homo sapien
ctgccaacaaggtgaaaccctgtct

SEQ ID NO: 5618156 - DNA, 25 bp, Homo sapien
cctggcacatgatgctaactgacca

SEQ ID NO: 5618157 - DNA, 25 bp, Homo sapien
ccaagttctggccaatgagattata

SEQ ID NO: 5618158 - DNA, 25 bp, Homo sapien
caggaatggttgtgtgaccaagttc

SEQ ID NO: 5618159 - DNA, 25 bp, Homo sapien
aatggttgtgtgaccaagttctggc

SEQ ID NO: 5618160 - DNA, 25 bp, Homo sapien
aaccctgtctccactaaaatacaaa

SEQ ID NO: 5618161 - DNA, 25 bp, Homo sapien
catgatgctaactgaccaccaatat

SEQ ID NO: 5618162 - DNA, 25 bp, Homo sapien
ggcacatgatgctaactgaccacca

SEQ ID NO: 5618163 - DNA, 25 bp, Homo sapien
caggctggttttaactcatggcttc

SEQ ID NO: 5618164 - DNA, 25 bp, Homo sapien
cctccccttccccgtcttcactctc

SEQ ID NO: 5618165 - DNA, 25 bp, Homo sapien
cctccagtgggaagaacccacctga

SEQ ID NO: 5618166 - DNA, 25 bp, Homo sapien
gtcatgtacttaccaggtctggctc

SEQ ID NO: 5618167 - DNA, 25 bp, Homo sapien
aggtcatgtacttaccaggtctggc

SEQ ID NO: 5618168 - DNA, 25 bp, Homo sapien
ccacgcccggccacattctcctttt

SEQ ID NO: 5618169 - DNA, 25 bp, Homo sapien
aggtctggctcctggtctcaggagc

SEQ ID NO: 5618170 - DNA, 25 bp, Homo sapien
gcccagcccctaaggtcatgtactt

SEQ ID NO: 5618171 - DNA, 25 bp, Homo sapien
cctaaggtcatgtacttaccaggtc

SEQ ID NO: 5618172 - DNA, 25 bp, Homo sapien
cccttccccgtcttcactctcagcc

SEQ ID NO: 5618173 - DNA, 25 bp, Homo sapien
ttcactctcagcctgaggccacgcc

SEQ ID NO: 5618174 - DNA, 25 bp, Homo sapien
atggatctccaagataaacttgttg

SEQ ID NO: 5618175 - DNA, 25 bp, Homo sapien
tattggtcagttggaagaaaagcaa

SEQ ID NO: 5618176 - DNA, 25 bp, Homo sapien
catattggtcagttggaagaaaagc

SEQ ID NO: 5618177 - DNA, 25 bp, Homo sapien
gaagaaaagcaaatggtcatgaaaa

SEQ ID NO: 5618178 - DNA, 25 bp, Homo sapien
gacatttggggcgcacgcttttaat

SEQ ID NO: 5618179 - DNA, 25 bp, Homo sapien
cattaatcaactggaaatatggatc

SEQ ID NO: 5618180 - DNA, 25 bp, Homo sapien
taatcaactggaaatatggatctcc

SEQ ID NO: 5618181 - DNA, 25 bp, Homo sapien
ggggcgcacgcttttaatcccagct

SEQ ID NO: 5618182 - DNA, 25 bp, Homo sapien
gtttaacatattggtcagttggaag

SEQ ID NO: 5618183 - DNA, 25 bp, Homo sapien
aagcaaatggtcatgaaaactcttc

SEQ ID NO: 5618184 - DNA, 25 bp, Homo sapien
gaaaagcaaatggtcatgaaaactc

SEQ ID NO: 5618185 - DNA, 25 bp, Homo sapien
aaagtagttggaaccatagacatgc

SEQ ID NO: 5618186 - DNA, 25 bp, Homo sapien
tagacatgcaacaccatgattggct

SEQ ID NO: 5618187 - DNA, 25 bp, Homo sapien
tcacactagctgctaaggagtgagg

SEQ ID NO: 5618188 - DNA, 25 bp, Homo sapien
aagtgatctttccaaccacagcctc

SEQ ID NO: 5618189 - DNA, 25 bp, Homo sapien
gcagatccattcgccttggactccc

SEQ ID NO: 5618190 - DNA, 25 bp, Homo sapien
tgtagacacggtagtttttgtagac

SEQ ID NO: 5618191 - DNA, 25 bp, Homo sapien
aaaaggaggccaacagtgatttcct

SEQ ID NO: 5618192 - DNA, 25 bp, Homo sapien
agctaccacgcccagacgcattttc

SEQ ID NO: 5618193 - DNA, 25 bp, Homo sapien
actcctggacttaagcagatccatt

SEQ ID NO: 5618194 - DNA, 25 bp, Homo sapien
tttgctgaccagaatgaatacacac

SEQ ID NO: 5618195 - DNA, 25 bp, Homo sapien
gaatacacactgatgtgatcactat

SEQ ID NO: 5618196 - DNA, 25 bp, Homo sapien
agtgaaatctgtcaaaaacaatgtc

SEQ ID NO: 5618197 - DNA, 25 bp, Homo sapien
tggtaagtctcacaataaagtagcc

SEQ ID NO: 5618198 - DNA, 25 bp, Homo sapien
acgcaatatagtaaagcaatggctt

SEQ ID NO: 5618199 - DNA, 25 bp, Homo sapien
acataagaatatagtgaaatctgtc

SEQ ID NO: 5618200 - DNA, 25 bp, Homo sapien
cctgataaagagaactgtgcacata

SEQ ID NO: 5618201 - DNA, 25 bp, Homo sapien
taaagtggcaacgcaatatagtaaa

SEQ ID NO: 5618202 - DNA, 25 bp, Homo sapien
catatgaggttaaagtggtaagtct

SEQ ID NO: 5618203 - DNA, 25 bp, Homo sapien
gaaagaatcacaaagcacctagaaa

SEQ ID NO: 5618204 - DNA, 25 bp, Homo sapien
ggtaggtgctgttaacatatgaggt

SEQ ID NO: 5618205 - DNA, 25 bp, Homo sapien
ttagagggagtacaaagtttattca

SEQ ID NO: 5618206 - DNA, 25 bp, Homo sapien
ctgcatgattccttcagcctgattc

SEQ ID NO: 5618207 - DNA, 25 bp, Homo sapien
ttgttaaacaatacagagatgatag

SEQ ID NO: 5618208 - DNA, 25 bp, Homo sapien
taaataaagcatcttcgaggcaggc

SEQ ID NO: 5618209 - DNA, 25 bp, Homo sapien
gggtgacagagtgggactctgtctc

SEQ ID NO: 5618210 - DNA, 25 bp, Homo sapien
attaaagtgtgtccaaagcgcttat

SEQ ID NO: 5618211 - DNA, 25 bp, Homo sapien
agagttcaactgtatacaatagagc

SEQ ID NO: 5618212 - DNA, 25 bp, Homo sapien
ttattcaaaatgttatatagagttc

SEQ ID NO: 5618213 - DNA, 25 bp, Homo sapien
gatgatagtagtacttagggtaagc

SEQ ID NO: 5618214 - DNA, 25 bp, Homo sapien
caatacagagatgatagtagtactt

SEQ ID NO: 5618215 - DNA, 25 bp, Homo sapien
aatagagcatttattaaagtgtgtc

SEQ ID NO: 5618216 - DNA, 25 bp, Homo sapien
cggctcacttgaggttaggaggaaa

SEQ ID NO: 5618217 - DNA, 25 bp, Homo sapien
acttagggtaagcattaacaatatt

SEQ ID NO: 5618218 - DNA, 25 bp, Homo sapien
ccctagacacagtacacgttagtag

SEQ ID NO: 5618219 - DNA, 25 bp, Homo sapien
ctactaacgtgtactgtgtctaggg

SEQ ID NO: 5618220 - DNA, 25 bp, Homo sapien
acatttcatgacactaatcagacaa

SEQ ID NO: 5618221 - DNA, 25 bp, Homo sapien
ttgtctgattagtgtcatgaaatgt

SEQ ID NO: 5618222 - DNA, 25 bp, Homo sapien
gacccgagaagtaaagagatttatc

SEQ ID NO: 5618223 - DNA, 25 bp, Homo sapien
tcagtgagtgaatgcttaataactt

SEQ ID NO: 5618224 - DNA, 25 bp, Homo sapien
tttcatgcataataaaggccctgtc

SEQ ID NO: 5618225 - DNA, 25 bp, Homo sapien
aatggccataaaagttcagtgagtg

SEQ ID NO: 5618226 - DNA, 25 bp, Homo sapien
tttgcaggatgtgtaacaccttccc

SEQ ID NO: 5618227 - DNA, 25 bp, Homo sapien
ctcttcatagcagactgcatgctcc

SEQ ID NO: 5618228 - DNA, 25 bp, Homo sapien
ttctcagaggatgtgtctaactctc

SEQ ID NO: 5618229 - DNA, 25 bp, Homo sapien
aaaaaatcatagtaactcagaatgc

SEQ ID NO: 5618230 - DNA, 25 bp, Homo sapien
agtgccttgctcagtgaatggccat

SEQ ID NO: 5618231 - DNA, 25 bp, Homo sapien
tgcatgctccatgaaggtaggaata

SEQ ID NO: 5618232 - DNA, 25 bp, Homo sapien
aacttgaagtgaaaggagataaaaa

SEQ ID NO: 5618233 - DNA, 25 bp, Homo sapien
aggagactgaagactcatcccaatc

SEQ ID NO: 5618234 - DNA, 25 bp, Homo sapien
aatttgagaggaacactctgcggga

SEQ ID NO: 5618235 - DNA, 25 bp, Homo sapien
tactctatcaagaaagacactgttg

SEQ ID NO: 5618236 - DNA, 25 bp, Homo sapien
ccagaaacaaaccaggagactgaag

SEQ ID NO: 5618237 - DNA, 25 bp, Homo sapien
aagggcatctttctaagagtctgtc

SEQ ID NO: 5618238 - DNA, 25 bp, Homo sapien
cgggaccctgttccaagggcatctt

SEQ ID NO: 5618239 - DNA, 25 bp, Homo sapien
gagtctgtcccttaggctctgcccc

SEQ ID NO: 5618240 - DNA, 25 bp, Homo sapien
tctaaagtgattgtcttgagttccc

SEQ ID NO: 5618241 - DNA, 25 bp, Homo sapien
tttggccacgttgtcaaaggccttc

SEQ ID NO: 5618242 - DNA, 25 bp, Homo sapien
gggaggtgtggcccactctattcca

SEQ ID NO: 5618243 - DNA, 25 bp, Homo sapien
ctttatgaacgaagtgagacacatt

SEQ ID NO: 5618244 - DNA, 25 bp, Homo sapien
cgagaacattatttagtccggatct

SEQ ID NO: 5618245 - DNA, 25 bp, Homo sapien
agatccggactaaataatgttctcg

SEQ ID NO: 5618246 - DNA, 25 bp, Homo sapien
gtttgttgggcaaacggatgaatgg

SEQ ID NO: 5618247 - DNA, 25 bp, Homo sapien
caattcaaagataaacgagaacccc

SEQ ID NO: 5618248 - DNA, 25 bp, Homo sapien
aaacgagaacccctgcagaattaac

SEQ ID NO: 5618249 - DNA, 25 bp, Homo sapien
ctggtaaagtcaaaacactcccgta

SEQ ID NO: 5618250 - DNA, 25 bp, Homo sapien
gaattaacagtaaaatgaagataca

SEQ ID NO: 5618251 - DNA, 25 bp, Homo sapien
attgaaaaggtactctggtaaagtc

SEQ ID NO: 5618252 - DNA, 25 bp, Homo sapien
aaacggatgaatggatgattgtaat

SEQ ID NO: 5618253 - DNA, 25 bp, Homo sapien
aagatacaatgtaggtggtcaataa

SEQ ID NO: 5618254 - DNA, 25 bp, Homo sapien
ttggaaaagtggtcaaattatatac

SEQ ID NO: 5618255 - DNA, 25 bp, Homo sapien
agtacagataaaccacttgggggct

SEQ ID NO: 5618256 - DNA, 25 bp, Homo sapien
cactcccgtagacaaatgctcacat

SEQ ID NO: 5618257 - DNA, 25 bp, Homo sapien
taagttatagataggatctgaactc

SEQ ID NO: 5618258 - DNA, 25 bp, Homo sapien
ggaaagcaggaaggcactttcttgc

SEQ ID NO: 5618259 - DNA, 25 bp, Homo sapien
tgatcgatgagaaagtgctgtaaat

SEQ ID NO: 5618260 - DNA, 25 bp, Homo sapien
gggacagctgcatcggctgttgcaa

SEQ ID NO: 5618261 - DNA, 25 bp, Homo sapien
ctctagcgagtgtcatccatccata

SEQ ID NO: 5618262 - DNA, 25 bp, Homo sapien
ctgtactattcagtgctccgccacc

SEQ ID NO: 5618263 - DNA, 25 bp, Homo sapien
agaaagtgctgtaaatgccagattc

SEQ ID NO: 5618264 - DNA, 25 bp, Homo sapien
ataaactgccatggctatgttgtcc

SEQ ID NO: 5618265 - DNA, 25 bp, Homo sapien
cagattctatagaggaaaaaacagc

SEQ ID NO: 5618266 - DNA, 25 bp, Homo sapien
ctccgccaccttgaaaaggacttct

SEQ ID NO: 5618267 - DNA, 25 bp, Homo sapien
ggacttctttggaaagcaggaaggc

SEQ ID NO: 5618268 - DNA, 25 bp, Homo sapien
aagattgcacagagtatgctgctcc

SEQ ID NO: 5618269 - DNA, 25 bp, Homo sapien
ggaggatggctacactgccatacgt

SEQ ID NO: 5618270 - DNA, 25 bp, Homo sapien
caaaacattgtttaggcagtcatat

SEQ ID NO: 5618271 - DNA, 25 bp, Homo sapien
ggcagtcatatatatgtgatcaaac

SEQ ID NO: 5618272 - DNA, 25 bp, Homo sapien
aagtctcaaaagattgcacagagta

SEQ ID NO: 5618273 - DNA, 25 bp, Homo sapien
gtcaagaagtctctgctgagtggaa

SEQ ID NO: 5618274 - DNA, 25 bp, Homo sapien
acaaaacctggaagcatctcaagtg

SEQ ID NO: 5618275 - DNA, 25 bp, Homo sapien
ttcacaatggactatgcataacaat

SEQ ID NO: 5618276 - DNA, 25 bp, Homo sapien
gccacacatggcaacgtcaagaagt

SEQ ID NO: 5618277 - DNA, 25 bp, Homo sapien
tgcataacaatacttccccacagcc

SEQ ID NO: 5618278 - DNA, 25 bp, Homo sapien
tctcaagtgcctaccagcaggagga

SEQ ID NO: 5618279 - DNA, 25 bp, Homo sapien
gacccatggaaacaataacagctaa

SEQ ID NO: 5618280 - DNA, 25 bp, Homo sapien
ttaggtgaagtcagtgaaaaccttc

SEQ ID NO: 5618281 - DNA, 25 bp, Homo sapien
ccacaggaaacatcaaacctcccca

SEQ ID NO: 5618282 - DNA, 25 bp, Homo sapien
ccccaaatatcatcctctaggcaga

SEQ ID NO: 5618283 - DNA, 25 bp, Homo sapien
aataacagctaatgtggccccactc

SEQ ID NO: 5618284 - DNA, 25 bp, Homo sapien
agaaaatggtggcttttagtaatta

SEQ ID NO: 5618285 - DNA, 25 bp, Homo sapien
ttaaatttacaaggcaggtgcaaaa

SEQ ID NO: 5618286 - DNA, 25 bp, Homo sapien
aggaaacagaatagacaattgtgac

SEQ ID NO: 5618287 - DNA, 25 bp, Homo sapien
aattgtgactgtaatgaggtccatg

SEQ ID NO: 5618288 - DNA, 25 bp, Homo sapien
ctctaggcagaggtcacttaactat

SEQ ID NO: 5618289 - DNA, 25 bp, Homo sapien
atgaggtccatgaacgtttagaata

SEQ ID NO: 5618290 - DNA, 25 bp, Homo sapien
cttctccacaccctcaaatgatttc

SEQ ID NO: 5618291 - DNA, 25 bp, Homo sapien
aataatgaacagttgcatcaatctc

SEQ ID NO: 5618292 - DNA, 25 bp, Homo sapien
aggtacaaaatagcgtggcaaagtt

SEQ ID NO: 5618293 - DNA, 25 bp, Homo sapien
acacaagcagctaattctgtccatc

SEQ ID NO: 5618294 - DNA, 25 bp, Homo sapien
ttagcatattcatttgaaggccctt

SEQ ID NO: 5618295 - DNA, 25 bp, Homo sapien
ctaggtttaacatgagggccaattc

SEQ ID NO: 5618296 - DNA, 25 bp, Homo sapien
gactgctctctaagaaagctttatc

SEQ ID NO: 5618297 - DNA, 25 bp, Homo sapien
atcatatacatgaaacttcggtttt

SEQ ID NO: 5618298 - DNA, 25 bp, Homo sapien
ttgaaggcccttttaaagctcacaa

SEQ ID NO: 5618299 - DNA, 25 bp, Homo sapien
aatgtccacaagtagaactaagggt

SEQ ID NO: 5618300 - DNA, 25 bp, Homo sapien
taatacacattgcctgactgctctc

SEQ ID NO: 5618301 - DNA, 25 bp, Homo sapien
tgcattcaaagtgctgagagaggag

SEQ ID NO: 5618302 - DNA, 25 bp, Homo sapien
gaggatgaggtattcctacccagcc

SEQ ID NO: 5618303 - DNA, 25 bp, Homo sapien
aggaggaggctaccagccatcctta

SEQ ID NO: 5618304 - DNA, 25 bp, Homo sapien
gcgaacccaagggctcggcccttgc

SEQ ID NO: 5618305 - DNA, 25 bp, Homo sapien
agataccctctggctggtggaggat

SEQ ID NO: 5618306 - DNA, 25 bp, Homo sapien
cctggaggccagtttgcattatatc

SEQ ID NO: 5618307 - DNA, 25 bp, Homo sapien
tgcattatatccagaggacaaccac

SEQ ID NO: 5618308 - DNA, 25 bp, Homo sapien
attcaaagggaacgtgactctgttg

SEQ ID NO: 5618309 - DNA, 25 bp, Homo sapien
actacaggatggagtattcctaccc

SEQ ID NO: 5618310 - DNA, 25 bp, Homo sapien
cctacccaaccagaggatgaggtat

SEQ ID NO: 5618311 - DNA, 25 bp, Homo sapien
gactctgttgtaccccgcgaaccca

SEQ ID NO: 5618312 - DNA, 25 bp, Homo sapien
catgatgacgttcacctctgcttcc

SEQ ID NO: 5618313 - DNA, 25 bp, Homo sapien
gcccggccagctcaatgcttttctg

SEQ ID NO: 5618314 - DNA, 25 bp, Homo sapien
gggggatgcacgtcacgttcctaag

SEQ ID NO: 5618315 - DNA, 25 bp, Homo sapien
gtcacgttcctaagagctcatgcct

SEQ ID NO: 5618316 - DNA, 25 bp, Homo sapien
aaagatgcatgatgacgttcacctc

SEQ ID NO: 5618317 - DNA, 25 bp, Homo sapien
cctagcccctaaaatgacagaaaat

SEQ ID NO: 5618318 - DNA, 25 bp, Homo sapien
ctagcccctagcccctagcccctaa

SEQ ID NO: 5618319 - DNA, 25 bp, Homo sapien
gcttcctctagcccctagcccctag

SEQ ID NO: 5618320 - DNA, 25 bp, Homo sapien
agagctcatgcctctcttgatctct

SEQ ID NO: 5618321 - DNA, 25 bp, Homo sapien
cctagcccctagcccctaaaatgac

SEQ ID NO: 5618322 - DNA, 25 bp, Homo sapien
tgcacgtcacgttcctaagagctca

SEQ ID NO: 5618323 - DNA, 25 bp, Homo sapien
tgccatgcatactcagtgaccctgt

SEQ ID NO: 5618324 - DNA, 25 bp, Homo sapien
cagggacttggccacattaatggaa

SEQ ID NO: 5618325 - DNA, 25 bp, Homo sapien
ttaccccaaggaaagcagcttgcat

SEQ ID NO: 5618326 - DNA, 25 bp, Homo sapien
aaggttggacctgccatgcatactc

SEQ ID NO: 5618327 - DNA, 25 bp, Homo sapien
atgcccggccccttgcagtactttc

SEQ ID NO: 5618328 - DNA, 25 bp, Homo sapien
ttagcaaaagattaccaaactcgcc

SEQ ID NO: 5618329 - DNA, 25 bp, Homo sapien
ccacattaatggaagacctgaaatt

SEQ ID NO: 5618330 - DNA, 25 bp, Homo sapien
gaaagcagcttgcataaggttggac

SEQ ID NO: 5618331 - DNA, 25 bp, Homo sapien
gaacctcagaggttcagaactggct

SEQ ID NO: 5618332 - DNA, 25 bp, Homo sapien
cagtgaccctgtacttacccttgcc

SEQ ID NO: 5618333 - DNA, 25 bp, Homo sapien
ttgcctaggattatagggaggctgg

SEQ ID NO: 5618334 - DNA, 25 bp, Homo sapien
ccagggtaccgaccggtgcacattt

SEQ ID NO: 5618335 - DNA, 25 bp, Homo sapien
aaatgtgcaccggtcggtaccctgg

SEQ ID NO: 5618336 - DNA, 25 bp, Homo sapien
cagagttaaaacaagacatcatgag

SEQ ID NO: 5618337 - DNA, 25 bp, Homo sapien
gaacagacagaaaccactgctcgac

SEQ ID NO: 5618338 - DNA, 25 bp, Homo sapien
ggactggggtttaccttcaggctca

SEQ ID NO: 5618339 - DNA, 25 bp, Homo sapien
gcaacagaatgcctagaagaactcc

SEQ ID NO: 5618340 - DNA, 25 bp, Homo sapien
ggaactggatgggttcattcgattc

SEQ ID NO: 5618341 - DNA, 25 bp, Homo sapien
tctgttgtacacgctggaactggat

SEQ ID NO: 5618342 - DNA, 25 bp, Homo sapien
cgattccaagacatgtgaccacaga

SEQ ID NO: 5618343 - DNA, 25 bp, Homo sapien
gacttaaagtgtccagaaaaagtgc

SEQ ID NO: 5618344 - DNA, 25 bp, Homo sapien
tcacttaagtaagcggaacagacag

SEQ ID NO: 5618345 - DNA, 25 bp, Homo sapien
ccagagaggggtttaactgctattt

SEQ ID NO: 5618346 - DNA, 25 bp, Homo sapien
ctgtgcaaagattagaaagccagtg

SEQ ID NO: 5618347 - DNA, 25 bp, Homo sapien
gtttgacaaacagagacagctagag

SEQ ID NO: 5618348 - DNA, 25 bp, Homo sapien
cagagggatgtgatccttattctct

SEQ ID NO: 5618349 - DNA, 25 bp, Homo sapien
ggcctcccgagtccttcagactact

SEQ ID NO: 5618350 - DNA, 25 bp, Homo sapien
cagcctcgatctccccggtgtcatc

SEQ ID NO: 5618351 - DNA, 25 bp, Homo sapien
acactctagcatgggtttgacaaac

SEQ ID NO: 5618352 - DNA, 25 bp, Homo sapien
aagtagagagatagaagatcttaat

SEQ ID NO: 5618353 - DNA, 25 bp, Homo sapien
tcaacagcatcagtaccattcaggt

SEQ ID NO: 5618354 - DNA, 25 bp, Homo sapien
cggtgtcatctgggtggacttccca

SEQ ID NO: 5618355 - DNA, 25 bp, Homo sapien
aggtcgaacagatggctcttgcctt

SEQ ID NO: 5618356 - DNA, 25 bp, Homo sapien
accagatggctctcaacagcatcag

SEQ ID NO: 5618357 - DNA, 25 bp, Homo sapien
ttcccatgtctgaggaccagatggc

SEQ ID NO: 5618358 - DNA, 25 bp, Homo sapien
ataatttacagcacacgtttccctt

SEQ ID NO: 5618359 - DNA, 25 bp, Homo sapien
ttaggtactctaaatgctcacaaac

SEQ ID NO: 5618360 - DNA, 25 bp, Homo sapien
gctgcagaatgcttctagtctctcc

SEQ ID NO: 5618361 - DNA, 25 bp, Homo sapien
tcatttgcattgaagccaaatcctc

SEQ ID NO: 5618362 - DNA, 25 bp, Homo sapien
tcaccctgttagattcatcaaccat

SEQ ID NO: 5618363 - DNA, 25 bp, Homo sapien
atcaaccatttgcccctggccaagg

SEQ ID NO: 5618364 - DNA, 25 bp, Homo sapien
tccacttattgctgcagaatgcttc

SEQ ID NO: 5618365 - DNA, 25 bp, Homo sapien
aacttgctcctgcttcccagaattc

SEQ ID NO: 5618366 - DNA, 25 bp, Homo sapien
actctaattccaagccagtactctt

SEQ ID NO: 5618367 - DNA, 25 bp, Homo sapien
acaagatggatgatattgtagattc

SEQ ID NO: 5618368 - DNA, 25 bp, Homo sapien
tgctcacaaaccatctgaataatac

SEQ ID NO: 5618369 - DNA, 25 bp, Homo sapien
ggctgctaagcacaacctgcatatc

SEQ ID NO: 5618370 - DNA, 25 bp, Homo sapien
ttgctatggctgtacagtaaggaga

SEQ ID NO: 5618371 - DNA, 25 bp, Homo sapien
gtatgtgttgacagtgttcagccac

SEQ ID NO: 5618372 - DNA, 25 bp, Homo sapien
cacagatatttgggactggggtagt

SEQ ID NO: 5618373 - DNA, 25 bp, Homo sapien
taggtaggctgtgctaacgtacaca

SEQ ID NO: 5618374 - DNA, 25 bp, Homo sapien
tgggttaccatttgatctgtgacac

SEQ ID NO: 5618375 - DNA, 25 bp, Homo sapien
aggcagttccgttctagcacaaggt

SEQ ID NO: 5618376 - DNA, 25 bp, Homo sapien
tgcttctgttaaagagagatggcag

SEQ ID NO: 5618377 - DNA, 25 bp, Homo sapien
tacagtaaggagacagttagatgtc

SEQ ID NO: 5618378 - DNA, 25 bp, Homo sapien
gggtagtaaacagtggtgtcttcta

SEQ ID NO: 5618379 - DNA, 25 bp, Homo sapien
tctcaggttctcaggatgtgcttct

SEQ ID NO: 5618380 - DNA, 25 bp, Homo sapien
ttccacctatttgcagccactcccc

SEQ ID NO: 5618381 - DNA, 25 bp, Homo sapien
aactaagtggcattgaaaactcctc

SEQ ID NO: 5618382 - DNA, 25 bp, Homo sapien
attatagagcactttcatcacccaa

SEQ ID NO: 5618383 - DNA, 25 bp, Homo sapien
atcacccaaaaaaggtctcttccac

SEQ ID NO: 5618384 - DNA, 25 bp, Homo sapien
ctctgattacagtctaaaagttatc

SEQ ID NO: 5618385 - DNA, 25 bp, Homo sapien
gacaaccactcatctgctttgtgtc

SEQ ID NO: 5618386 - DNA, 25 bp, Homo sapien
cactataacttaccgttgagtctcc

SEQ ID NO: 5618387 - DNA, 25 bp, Homo sapien
cactaacaaattgatagcatctacc

SEQ ID NO: 5618388 - DNA, 25 bp, Homo sapien
taccataacccaattatagagcact

SEQ ID NO: 5618389 - DNA, 25 bp, Homo sapien
gttcttgatttgaagcccctttaca

SEQ ID NO: 5618390 - DNA, 25 bp, Homo sapien
tagacattgtaaactaagtggcatt

SEQ ID NO: 5618391 - DNA, 25 bp, Homo sapien
gtgtggttctagttgtctgggaaac

SEQ ID NO: 5618392 - DNA, 25 bp, Homo sapien
tctcaatgtggtacactcttgtgtc

SEQ ID NO: 5618393 - DNA, 25 bp, Homo sapien
ggccttaaacatacctgagaacaat

SEQ ID NO: 5618394 - DNA, 25 bp, Homo sapien
ttacatatacatagttgagaaaaac

SEQ ID NO: 5618395 - DNA, 25 bp, Homo sapien
ttgtctgggaaacactactctaggc

SEQ ID NO: 5618396 - DNA, 25 bp, Homo sapien
aactatataggcctctcagatttcc

SEQ ID NO: 5618397 - DNA, 25 bp, Homo sapien
acactcaaatgaactatataggcct

SEQ ID NO: 5618398 - DNA, 25 bp, Homo sapien
cagatttccaaagctagagtactac

SEQ ID NO: 5618399 - DNA, 25 bp, Homo sapien
tgcacaggctgtaatctcaataaga

SEQ ID NO: 5618400 - DNA, 25 bp, Homo sapien
ggtggtactaatttgtgtgtggttc

SEQ ID NO: 5618401 - DNA, 25 bp, Homo sapien
gtcacatccatgtagtagcaaccta

SEQ ID NO: 5618402 - DNA, 25 bp, Homo sapien
tggataatgccacagccaaatatta

SEQ ID NO: 5618403 - DNA, 25 bp, Homo sapien
tgaactctgagttctgggccccaag

SEQ ID NO: 5618404 - DNA, 25 bp, Homo sapien
aagaagggtcattttgaactctgag

SEQ ID NO: 5618405 - DNA, 25 bp, Homo sapien
actcatagaagggtttgagtgtgtg

SEQ ID NO: 5618406 - DNA, 25 bp, Homo sapien
aatttaggactcatagaagggtttg

SEQ ID NO: 5618407 - DNA, 25 bp, Homo sapien
ttgatccaatcaaagaagggtcatt

SEQ ID NO: 5618408 - DNA, 25 bp, Homo sapien
ctgggccccaagaggcctataactc

SEQ ID NO: 5618409 - DNA, 25 bp, Homo sapien
gcttgaagcaagaatgtaatttagg

SEQ ID NO: 5618410 - DNA, 25 bp, Homo sapien
atgatgcaggaaaacatccacaaat

SEQ ID NO: 5618411 - DNA, 25 bp, Homo sapien
agagcaataagaggcacaatccatc

SEQ ID NO: 5618412 - DNA, 25 bp, Homo sapien
ttgaaaaagccagcttgaagcaaga

SEQ ID NO: 5618413 - DNA, 25 bp, Homo sapien
tgcgtgcaaaatgtacaacagtgcc

SEQ ID NO: 5618414 - DNA, 25 bp, Homo sapien
gctggcaacgtctttctgttccttc

SEQ ID NO: 5618415 - DNA, 25 bp, Homo sapien
catcaaaattagtataagcccctgg

SEQ ID NO: 5618416 - DNA, 25 bp, Homo sapien
caaaaaaccagaatgtcacagtctc

SEQ ID NO: 5618417 - DNA, 25 bp, Homo sapien
gctgaagtgaagataatataagtac

SEQ ID NO: 5618418 - DNA, 25 bp, Homo sapien
tccgtgattgtagacagattttgcc

SEQ ID NO: 5618419 - DNA, 25 bp, Homo sapien
attgaacagttcagctggcaacgtc

SEQ ID NO: 5618420 - DNA, 25 bp, Homo sapien
agggtaagcacctaacaagtggcag

SEQ ID NO: 5618421 - DNA, 25 bp, Homo sapien
aactcagtaagcttaagacaaaatg

SEQ ID NO: 5618422 - DNA, 25 bp, Homo sapien
ttgtgtatttggaaatccgtgattg

SEQ ID NO: 5618423 - DNA, 25 bp, Homo sapien
ttaaattcagataatgcgtgcaaaa

SEQ ID NO: 5618424 - DNA, 25 bp, Homo sapien
tatgagacatttacagatggtgcct

SEQ ID NO: 5618425 - DNA, 25 bp, Homo sapien
gatggtgcctgacttacaatggttc

SEQ ID NO: 5618426 - DNA, 25 bp, Homo sapien
aattgagtgccagtttcagaaaatc

SEQ ID NO: 5618427 - DNA, 25 bp, Homo sapien
taacacgctcccctgatgatacttc

SEQ ID NO: 5618428 - DNA, 25 bp, Homo sapien
aggagaatatgcattttaacacgct

SEQ ID NO: 5618429 - DNA, 25 bp, Homo sapien
tctgcccactaaagctgtaagtcct

SEQ ID NO: 5618430 - DNA, 25 bp, Homo sapien
ggtcaaaggtgattcccattcagta

SEQ ID NO: 5618431 - DNA, 25 bp, Homo sapien
tattcccagtaggaaatatgagaca

SEQ ID NO: 5618432 - DNA, 25 bp, Homo sapien
gcaatctcgtctcaggagaatatgc

SEQ ID NO: 5618433 - DNA, 25 bp, Homo sapien
tgcaacttcaagatggtcaaaggtg

SEQ ID NO: 5618434 - DNA, 25 bp, Homo sapien
tgtaagtcctagcaatgcaagcctt

SEQ ID NO: 5618435 - DNA, 25 bp, Homo sapien
acatttgagggcataggcaaaaagt

SEQ ID NO: 5618436 - DNA, 25 bp, Homo sapien
acagtaacagtcaggagacaaatag

SEQ ID NO: 5618437 - DNA, 25 bp, Homo sapien
gatcaacaatgagcacatttgaggg

SEQ ID NO: 5618438 - DNA, 25 bp, Homo sapien
ttatttaggtaagaactgatacagt

SEQ ID NO: 5618439 - DNA, 25 bp, Homo sapien
aagtagggagatcagttgttatgtt

SEQ ID NO: 5618440 - DNA, 25 bp, Homo sapien
atgataacagtacataagttccagt

SEQ ID NO: 5618441 - DNA, 25 bp, Homo sapien
aaaagaacacctaacagggagatag

SEQ ID NO: 5618442 - DNA, 25 bp, Homo sapien
taacagggagatagatcaacaatga

SEQ ID NO: 5618443 - DNA, 25 bp, Homo sapien
tagaaaccacctggaatcattctta

SEQ ID NO: 5618444 - DNA, 25 bp, Homo sapien
ccactttgagagaaccctggtttcc

SEQ ID NO: 5618445 - DNA, 25 bp, Homo sapien
caaaaagtagggagatcagttgtta

SEQ ID NO: 5618446 - DNA, 25 bp, Homo sapien
taggtgggaaccctatatcgaggta

SEQ ID NO: 5618447 - DNA, 25 bp, Homo sapien
tacctcgatatagggttcccaccta

SEQ ID NO: 5618448 - DNA, 25 bp, Homo sapien
taaatgctttacagacaaggaaaac

SEQ ID NO: 5618449 - DNA, 25 bp, Homo sapien
tgcatgatggtgccatgactacttg

SEQ ID NO: 5618450 - DNA, 25 bp, Homo sapien
gctttacagacaaggaaaactgcta

SEQ ID NO: 5618451 - DNA, 25 bp, Homo sapien
tgagacttaaggtgtgcatcatcac

SEQ ID NO: 5618452 - DNA, 25 bp, Homo sapien
gcatcatcacacccagctaactttt

SEQ ID NO: 5618453 - DNA, 25 bp, Homo sapien
gtcaggcgatcctcccaccagcctc

SEQ ID NO: 5618454 - DNA, 25 bp, Homo sapien
gccatgactacttggggtcaggcga

SEQ ID NO: 5618455 - DNA, 25 bp, Homo sapien
tagctgagacttaaggtgtgcatca

SEQ ID NO: 5618456 - DNA, 25 bp, Homo sapien
tcctccgcttcaccttcatcctttc

SEQ ID NO: 5618457 - DNA, 25 bp, Homo sapien
cctgagtagctgagacttaaggtgt

SEQ ID NO: 5618458 - DNA, 25 bp, Homo sapien
gatggtgccatgactacttggggtc

SEQ ID NO: 5618459 - DNA, 25 bp, Homo sapien
tgctcagctttcaggagacgtctaa

SEQ ID NO: 5618460 - DNA, 25 bp, Homo sapien
attcctttggtagggttccagcatg

SEQ ID NO: 5618461 - DNA, 25 bp, Homo sapien
gggatacgtccttgattcagaagat

SEQ ID NO: 5618462 - DNA, 25 bp, Homo sapien
agtcagagcctcattccagatttat

SEQ ID NO: 5618463 - DNA, 25 bp, Homo sapien
agctttcaggagacgtctaaaatga

SEQ ID NO: 5618464 - DNA, 25 bp, Homo sapien
aggagctcattaattttggaagatc

SEQ ID NO: 5618465 - DNA, 25 bp, Homo sapien
agctccccagattcagggatacgtc

SEQ ID NO: 5618466 - DNA, 25 bp, Homo sapien
ggagatgtgcagaattccaggaagg

SEQ ID NO: 5618467 - DNA, 25 bp, Homo sapien
aaacagtgtcgatattaaggagctc

SEQ ID NO: 5618468 - DNA, 25 bp, Homo sapien
tttcctaattagacagtcagagcct

SEQ ID NO: 5618469 - DNA, 25 bp, Homo sapien
ggtagggttccagcatgtatatttt

SEQ ID NO: 5618470 - DNA, 25 bp, Homo sapien
atgactgactgcccgggtctcacta

SEQ ID NO: 5618471 - DNA, 25 bp, Homo sapien
gtgtcagagaatcagcttcgaaaac

SEQ ID NO: 5618472 - DNA, 25 bp, Homo sapien
cacctagtccaaaagcagctcagat

SEQ ID NO: 5618473 - DNA, 25 bp, Homo sapien
gcacagcacctcaaggaaccactac

SEQ ID NO: 5618474 - DNA, 25 bp, Homo sapien
tctcactattaggagcagaccggga

SEQ ID NO: 5618475 - DNA, 25 bp, Homo sapien
ttagctgagtcaggatgcagcctca

SEQ ID NO: 5618476 - DNA, 25 bp, Homo sapien
atgtgagagtcaaatgtgtagcttt

SEQ ID NO: 5618477 - DNA, 25 bp, Homo sapien
actgaaccacaaagatgagccatga

SEQ ID NO: 5618478 - DNA, 25 bp, Homo sapien
gacagtctgtgaatagcccttggag

SEQ ID NO: 5618479 - DNA, 25 bp, Homo sapien
gcctacgtgtatgaatgtgagagtc

SEQ ID NO: 5618480 - DNA, 25 bp, Homo sapien
agcatccagaaggtagaacaaaaag

SEQ ID NO: 5618481 - DNA, 25 bp, Homo sapien
aaaaatggaatactaaagatgcaac

SEQ ID NO: 5618482 - DNA, 25 bp, Homo sapien
agaggatatagaacatttgaaaaac

SEQ ID NO: 5618483 - DNA, 25 bp, Homo sapien
tgaccatggaacacaaaaatatttc

SEQ ID NO: 5618484 - DNA, 25 bp, Homo sapien
aataagctagaggatatagaacatt

SEQ ID NO: 5618485 - DNA, 25 bp, Homo sapien
tagatagcataataagctagaggat

SEQ ID NO: 5618486 - DNA, 25 bp, Homo sapien
cagaaatcctgtagtatgaagacat

SEQ ID NO: 5618487 - DNA, 25 bp, Homo sapien
agttgccccaggaaaaaacacactg

SEQ ID NO: 5618488 - DNA, 25 bp, Homo sapien
ctgtaaaggaccaaatattagatac

SEQ ID NO: 5618489 - DNA, 25 bp, Homo sapien
ttcaatatagtaccacaagccattt

SEQ ID NO: 5618490 - DNA, 25 bp, Homo sapien
agaatatattcaagtcagaaatcct

SEQ ID NO: 5618491 - DNA, 25 bp, Homo sapien
aaaacaagaatcattcagttgcccc

SEQ ID NO: 5618492 - DNA, 25 bp, Homo sapien
tcttcgtccgtctgccttggcgacg

SEQ ID NO: 5618493 - DNA, 25 bp, Homo sapien
cgtcgccaaggcagacggacgaaga

SEQ ID NO: 5618494 - DNA, 25 bp, Homo sapien
tatgccagtaccacccagtctcgtt

SEQ ID NO: 5618495 - DNA, 25 bp, Homo sapien
actttgtcctcagagagtgccgcga

SEQ ID NO: 5618496 - DNA, 25 bp, Homo sapien
acttcctcggaagtactttgtcctc

SEQ ID NO: 5618497 - DNA, 25 bp, Homo sapien
gtctcgttgaccttgcctttgtagt

SEQ ID NO: 5618498 - DNA, 25 bp, Homo sapien
gtagccttgagcaagcctctgagcc

SEQ ID NO: 5618499 - DNA, 25 bp, Homo sapien
gcagggttgcaagccttgtccccag

SEQ ID NO: 5618500 - DNA, 25 bp, Homo sapien
tttttcaaggtggtgttggatattc

SEQ ID NO: 5618501 - DNA, 25 bp, Homo sapien
gtggtgttggatattctgggtccct

SEQ ID NO: 5618502 - DNA, 25 bp, Homo sapien
tatgaatgttaggatcaccttgtca

SEQ ID NO: 5618503 - DNA, 25 bp, Homo sapien
aaattgggaagtgtgagtccaactt

SEQ ID NO: 5618504 - DNA, 25 bp, Homo sapien
tctgtcagctgtgtagccttgagca

SEQ ID NO: 5618505 - DNA, 25 bp, Homo sapien
atatactttagatggcccaaagaca

SEQ ID NO: 5618506 - DNA, 25 bp, Homo sapien
tcagaaagctaattagcagactggg

SEQ ID NO: 5618507 - DNA, 25 bp, Homo sapien
agtatgtcaaattagggggaacttg

SEQ ID NO: 5618508 - DNA, 25 bp, Homo sapien
tgaaagagttaaaggtgactggatt

SEQ ID NO: 5618509 - DNA, 25 bp, Homo sapien
aacaaataggattctggaccaaatt

SEQ ID NO: 5618510 - DNA, 25 bp, Homo sapien
taattagcagactgggatgacaaac

SEQ ID NO: 5618511 - DNA, 25 bp, Homo sapien
gaaatggtcatgaaagagttaaagg

SEQ ID NO: 5618512 - DNA, 25 bp, Homo sapien
aacttcgaggttagtgcttctcaac

SEQ ID NO: 5618513 - DNA, 25 bp, Homo sapien
acagatgtatgtatactacaggaat

SEQ ID NO: 5618514 - DNA, 25 bp, Homo sapien
aaatcgaatttgacccccagaaggc

SEQ ID NO: 5618515 - DNA, 25 bp, Homo sapien
aaaggtgactggattgaagtttgat

SEQ ID NO: 5618516 - DNA, 25 bp, Homo sapien
actttatactcatttcagaaacata

SEQ ID NO: 5618517 - DNA, 25 bp, Homo sapien
tatgtttctgaaatgagtataaagt

SEQ ID NO: 5618518 - DNA, 25 bp, Homo sapien
ttacagcaggtaacatgtgagaaga

SEQ ID NO: 5618519 - DNA, 25 bp, Homo sapien
aaccgaaagaacagaattcaagttc

SEQ ID NO: 5618520 - DNA, 25 bp, Homo sapien
tgaatggttttacagcaggtaacat

SEQ ID NO: 5618521 - DNA, 25 bp, Homo sapien
atatgttggatcttgggcaacttac

SEQ ID NO: 5618522 - DNA, 25 bp, Homo sapien
gataggtaagttgatggataaaagt

SEQ ID NO: 5618523 - DNA, 25 bp, Homo sapien
ttgttactgtaaacgtgaaagctat

SEQ ID NO: 5618524 - DNA, 25 bp, Homo sapien
aactaatttgtaaagggcaagagaa

SEQ ID NO: 5618525 - DNA, 25 bp, Homo sapien
gtaaacgtgaaagctattaagattc

SEQ ID NO: 5618526 - DNA, 25 bp, Homo sapien
agcatcgataggtaagttgatggat

SEQ ID NO: 5618527 - DNA, 25 bp, Homo sapien
gatggataaaagttactatgtaagc

SEQ ID NO: 5618528 - DNA, 25 bp, Homo sapien
aagaaatatagcaaaattcacaggt

SEQ ID NO: 5618529 - DNA, 25 bp, Homo sapien
gcacttccagacatcaccagacatc

SEQ ID NO: 5618530 - DNA, 25 bp, Homo sapien
gtaactcaaagggataggagaatga

SEQ ID NO: 5618531 - DNA, 25 bp, Homo sapien
caaagggacagatgatatgtgcttt

SEQ ID NO: 5618532 - DNA, 25 bp, Homo sapien
ctttatagaacagaggccaaaatgc

SEQ ID NO: 5618533 - DNA, 25 bp, Homo sapien
tatataacataaggtggaaaggccc

SEQ ID NO: 5618534 - DNA, 25 bp, Homo sapien
gaattctgacatggggcacttccag

SEQ ID NO: 5618535 - DNA, 25 bp, Homo sapien
gctgctgaacagctggaattctgac

SEQ ID NO: 5618536 - DNA, 25 bp, Homo sapien
ggaccattcgcacagttgcaggtgt

SEQ ID NO: 5618537 - DNA, 25 bp, Homo sapien
gagctgcaagaagagtaactcaaag

SEQ ID NO: 5618538 - DNA, 25 bp, Homo sapien
atatgtgctttcgtgatggaggcag

SEQ ID NO: 5618539 - DNA, 25 bp, Homo sapien
gcttgacgtgatctgagctgcaaga

SEQ ID NO: 5618540 - DNA, 25 bp, Homo sapien
ttgccagaagtatgatccagttgtc

SEQ ID NO: 5618541 - DNA, 25 bp, Homo sapien
gagacaggctaggcatcctctagga

SEQ ID NO: 5618542 - DNA, 25 bp, Homo sapien
cagccattcagtaaccgtgagaacc

SEQ ID NO: 5618543 - DNA, 25 bp, Homo sapien
cgtgagaaccacttgctgcttagaa

SEQ ID NO: 5618544 - DNA, 25 bp, Homo sapien
cctgactcaaatgcaatggacacaa

SEQ ID NO: 5618545 - DNA, 25 bp, Homo sapien
aaccactgtgcaaacgaaccatgtc

SEQ ID NO: 5618546 - DNA, 25 bp, Homo sapien
acaacaataggaacacaacagtatc

SEQ ID NO: 5618547 - DNA, 25 bp, Homo sapien
cctggcccttgctggaaccactgtg

SEQ ID NO: 5618548 - DNA, 25 bp, Homo sapien
acttgcaggtgaaaatgttcctatc

SEQ ID NO: 5618549 - DNA, 25 bp, Homo sapien
cgaaccatgtcgtgcaaggaaaaac

SEQ ID NO: 5618550 - DNA, 25 bp, Homo sapien
gcaatggacacaatgacttcaagcc

SEQ ID NO: 5618551 - DNA, 25 bp, Homo sapien
caggcttaaccagacagccaaaggc

SEQ ID NO: 5618552 - DNA, 25 bp, Homo sapien
tatgccagtcaccagctgaccctcc

SEQ ID NO: 5618553 - DNA, 25 bp, Homo sapien
agctgaccctcctacgtggccctct

SEQ ID NO: 5618554 - DNA, 25 bp, Homo sapien
agcaacaggcctcaggtaaagtcat

SEQ ID NO: 5618555 - DNA, 25 bp, Homo sapien
tggtccaaagagaccactggaggga

SEQ ID NO: 5618556 - DNA, 25 bp, Homo sapien
gtggcacaagcatttggatgatgca

SEQ ID NO: 5618557 - DNA, 25 bp, Homo sapien
tacagtgcagtatcggaccgtacta

SEQ ID NO: 5618558 - DNA, 25 bp, Homo sapien
tctgaggattgtccacaggcttaac

SEQ ID NO: 5618559 - DNA, 25 bp, Homo sapien
gttacaagccatggtccaaagagac

SEQ ID NO: 5618560 - DNA, 25 bp, Homo sapien
gatgatgcatgtaaaagcaacaggc

SEQ ID NO: 5618561 - DNA, 25 bp, Homo sapien
catggccccaaaatggttacaagcc

SEQ ID NO: 5618562 - DNA, 25 bp, Homo sapien
ttttggtgtaagaaagcactcaatc

SEQ ID NO: 5618563 - DNA, 25 bp, Homo sapien
tgagtatgccccaacatgacttgtt

SEQ ID NO: 5618564 - DNA, 25 bp, Homo sapien
ttgcaacactgagttacacaaagcc

SEQ ID NO: 5618565 - DNA, 25 bp, Homo sapien
tcaaagctttgcaacactgagttac

SEQ ID NO: 5618566 - DNA, 25 bp, Homo sapien
tgtaagaaagcactcaatcctaatg

SEQ ID NO: 5618567 - DNA, 25 bp, Homo sapien
tgaaacccttaagtaacaacatata

SEQ ID NO: 5618568 - DNA, 25 bp, Homo sapien
aagcctaattaggtagacaaggatg

SEQ ID NO: 5618569 - DNA, 25 bp, Homo sapien
tcctaatgagtatgccccaacatga

SEQ ID NO: 5618570 - DNA, 25 bp, Homo sapien
cctaattaggtagacaaggatggga

SEQ ID NO: 5618571 - DNA, 25 bp, Homo sapien
taactcaaacagatgtcaaagcttt

SEQ ID NO: 5618572 - DNA, 25 bp, Homo sapien
acactgagttacacaaagcctaatt

SEQ ID NO: 5618573 - DNA, 25 bp, Homo sapien
agctccaagtccaatgggcaagctc

SEQ ID NO: 5618574 - DNA, 25 bp, Homo sapien
ctttcacaacagaagtcaggcatgg

SEQ ID NO: 5618575 - DNA, 25 bp, Homo sapien
atccaggctataaagaccggctgtc

SEQ ID NO: 5618576 - DNA, 25 bp, Homo sapien
caccatatttgggtgtggggtaaac

SEQ ID NO: 5618577 - DNA, 25 bp, Homo sapien
gctgagaactaggcaagcaaaatgg

SEQ ID NO: 5618578 - DNA, 25 bp, Homo sapien
taaaccggtgtttgagatctgtgtt

SEQ ID NO: 5618579 - DNA, 25 bp, Homo sapien
agccttagcattgagcgtccccctg

SEQ ID NO: 5618580 - DNA, 25 bp, Homo sapien
ttcggaatccccatgacgatgccct

SEQ ID NO: 5618581 - DNA, 25 bp, Homo sapien
agcaaaatggtcaaagtctagaagt

SEQ ID NO: 5618582 - DNA, 25 bp, Homo sapien
gtgctcatacccagtggcaaggctg

SEQ ID NO: 5618583 - DNA, 25 bp, Homo sapien
gatctgtgttgcagtggacagtatc

SEQ ID NO: 5618584 - DNA, 25 bp, Homo sapien
atatattaatagaggaaggaactcc

SEQ ID NO: 5618585 - DNA, 25 bp, Homo sapien
tacatatgctaaaaaatcctggatt

SEQ ID NO: 5618586 - DNA, 25 bp, Homo sapien
ctccaaaacgttgaaatactatagg

SEQ ID NO: 5618587 - DNA, 25 bp, Homo sapien
taaacatggaaacaacaaagtctct

SEQ ID NO: 5618588 - DNA, 25 bp, Homo sapien
cagggttgtccagtcttttggtttc

SEQ ID NO: 5618589 - DNA, 25 bp, Homo sapien
atcaaactttaagacagggttgtcc

SEQ ID NO: 5618590 - DNA, 25 bp, Homo sapien
tgcaatagacaagtaaaaagggtta

SEQ ID NO: 5618591 - DNA, 25 bp, Homo sapien
acctttcagtgctaattgggcattt

SEQ ID NO: 5618592 - DNA, 25 bp, Homo sapien
actgatactcttggaaaaaagaaat

SEQ ID NO: 5618593 - DNA, 25 bp, Homo sapien
aagggttaagaagaactgatactct

SEQ ID NO: 5618594 - DNA, 25 bp, Homo sapien
tgggcatttacaaaagttagttata

SEQ ID NO: 5618595 - DNA, 25 bp, Homo sapien
attgcacctgctcggtgaaggagtc

SEQ ID NO: 5618596 - DNA, 25 bp, Homo sapien
tggaagagttagatgacacaatatt

SEQ ID NO: 5618597 - DNA, 25 bp, Homo sapien
aaatgtggaagagttagatgacaca

SEQ ID NO: 5618598 - DNA, 25 bp, Homo sapien
agaagcgagttgcggattttctcga

SEQ ID NO: 5618599 - DNA, 25 bp, Homo sapien
gggtaaaatgcatgatatcttgaag

SEQ ID NO: 5618600 - DNA, 25 bp, Homo sapien
acagaagtacttatgggtaaaatgc

SEQ ID NO: 5618601 - DNA, 25 bp, Homo sapien
gccagggattgcacctgctcggtga

SEQ ID NO: 5618602 - DNA, 25 bp, Homo sapien
tgaagttgtgttaaaatattctgtc

SEQ ID NO: 5618603 - DNA, 25 bp, Homo sapien
atgtcagagatgcatacagaagtac

SEQ ID NO: 5618604 - DNA, 25 bp, Homo sapien
agggagcacatggtcttgaggctcc

SEQ ID NO: 5618605 - DNA, 25 bp, Homo sapien
cgggacaccagttcatgtcagagat

SEQ ID NO: 5618606 - DNA, 25 bp, Homo sapien
caaaagtgtagtcggtcctgtgcat

SEQ ID NO: 5618607 - DNA, 25 bp, Homo sapien
ttgccacgtgctgagtactatgttc

SEQ ID NO: 5618608 - DNA, 25 bp, Homo sapien
tgcatacatgggttctgcgtccctg

SEQ ID NO: 5618609 - DNA, 25 bp, Homo sapien
gcgtccctgaacccaaccaaccaca

SEQ ID NO: 5618610 - DNA, 25 bp, Homo sapien
cataaggaatttgaacatctgtggt

SEQ ID NO: 5618611 - DNA, 25 bp, Homo sapien
atttatgtgaatgaagtgacgtgca

SEQ ID NO: 5618612 - DNA, 25 bp, Homo sapien
aaacttgaatttgccacgtgctgag

SEQ ID NO: 5618613 - DNA, 25 bp, Homo sapien
ccaaccaaccacagatcaaacatat

SEQ ID NO: 5618614 - DNA, 25 bp, Homo sapien
agaaataaagttgcacccttttgcc

SEQ ID NO: 5618615 - DNA, 25 bp, Homo sapien
ccacaaagtcctgaagagtaaaact

SEQ ID NO: 5618616 - DNA, 25 bp, Homo sapien
gaagtgacgtgcaggcattgtatta

SEQ ID NO: 5618617 - DNA, 25 bp, Homo sapien
ccagcatgtccgtgtccagaatgtc

SEQ ID NO: 5618618 - DNA, 25 bp, Homo sapien
tctccttggtaagtagccaggaatg

SEQ ID NO: 5618619 - DNA, 25 bp, Homo sapien
acacagtgtgcagccctgtatctgc

SEQ ID NO: 5618620 - DNA, 25 bp, Homo sapien
tacaatcaacccacatcccagcagc

SEQ ID NO: 5618621 - DNA, 25 bp, Homo sapien
tgcctcctttgagtgtggggactct

SEQ ID NO: 5618622 - DNA, 25 bp, Homo sapien
gagctgctgtagagatctgcctgct

SEQ ID NO: 5618623 - DNA, 25 bp, Homo sapien
acttgtttgtggacatgtgggcatt

SEQ ID NO: 5618624 - DNA, 25 bp, Homo sapien
gtgcttcatggcacaggcagaccac

SEQ ID NO: 5618625 - DNA, 25 bp, Homo sapien
tctcagcagtcctctcagcccgatg

SEQ ID NO: 5618626 - DNA, 25 bp, Homo sapien
ttttgcaatcaggtagagagctgct

SEQ ID NO: 5618627 - DNA, 25 bp, Homo sapien
tggggactcttgacgctcagccaca

SEQ ID NO: 5618628 - DNA, 25 bp, Homo sapien
aggaaactaatgttgcccaatcatc

SEQ ID NO: 5618629 - DNA, 25 bp, Homo sapien
caaatgagaaaagataacccatttt

SEQ ID NO: 5618630 - DNA, 25 bp, Homo sapien
ttgccatgtgggattaggaaactaa

SEQ ID NO: 5618631 - DNA, 25 bp, Homo sapien
gtgatgtgactccaaactcagccat

SEQ ID NO: 5618632 - DNA, 25 bp, Homo sapien
gtttaaggtcacacaggctagcaag

SEQ ID NO: 5618633 - DNA, 25 bp, Homo sapien
acagaggtgacaaactcaaatgctt

SEQ ID NO: 5618634 - DNA, 25 bp, Homo sapien
ggcggcacatagaaagtatactatc

SEQ ID NO: 5618635 - DNA, 25 bp, Homo sapien
ggccagatggtcaacatacatgtgc

SEQ ID NO: 5618636 - DNA, 25 bp, Homo sapien
atcctactttaaagagactgcagaa

SEQ ID NO: 5618637 - DNA, 25 bp, Homo sapien
attgagtgactttgttaagcacatt

SEQ ID NO: 5618638 - DNA, 25 bp, Homo sapien
tttataaacaacagaggtgacaaac

SEQ ID NO: 5618639 - DNA, 25 bp, Homo sapien
aatgggcatatggggctttcgccca

SEQ ID NO: 5618640 - DNA, 25 bp, Homo sapien
ctgcccagattagtgcttaggagcc

SEQ ID NO: 5618641 - DNA, 25 bp, Homo sapien
gctccaaaggccacctagcccattt

SEQ ID NO: 5618642 - DNA, 25 bp, Homo sapien
atttaccaagccagcagtgtgctcc

SEQ ID NO: 5618643 - DNA, 25 bp, Homo sapien
ggaagggataaatttgcacgtgaat

SEQ ID NO: 5618644 - DNA, 25 bp, Homo sapien
gaactgaaacgcaaatctggggtca

SEQ ID NO: 5618645 - DNA, 25 bp, Homo sapien
ctttcgcccaaagccctgagtagct

SEQ ID NO: 5618646 - DNA, 25 bp, Homo sapien
ttccaatgttgaagggaagggataa

SEQ ID NO: 5618647 - DNA, 25 bp, Homo sapien
atctggggtcacccactttaggccc

SEQ ID NO: 5618648 - DNA, 25 bp, Homo sapien
ctctaggaaagactaaatggaatgc

SEQ ID NO: 5618649 - DNA, 25 bp, Homo sapien
gtgagggcaataagccaatcctggt

SEQ ID NO: 5618650 - DNA, 25 bp, Homo sapien
taacaagaccatgagagaaaactga

SEQ ID NO: 5618651 - DNA, 25 bp, Homo sapien
taatcactgtgctatgcctcctcca

SEQ ID NO: 5618652 - DNA, 25 bp, Homo sapien
ccatagcataggacaaaacttgttc

SEQ ID NO: 5618653 - DNA, 25 bp, Homo sapien
cttcaaaggtaatcctaaagtatcc

SEQ ID NO: 5618654 - DNA, 25 bp, Homo sapien
cccacatagtccaactacagagccc

SEQ ID NO: 5618655 - DNA, 25 bp, Homo sapien
taatgtaataaggatagtaagcagc

SEQ ID NO: 5618656 - DNA, 25 bp, Homo sapien
actacagagcccaagctcttaatca

SEQ ID NO: 5618657 - DNA, 25 bp, Homo sapien
gtagtaacaagaccatgagagaaaa

SEQ ID NO: 5618658 - DNA, 25 bp, Homo sapien
caggtttgtagtttcaagataccca

SEQ ID NO: 5618659 - DNA, 25 bp, Homo sapien
tcaagagtatgatggtagtaacaag

SEQ ID NO: 5618660 - DNA, 25 bp, Homo sapien
tagtaagcagccttcgagtatttcc

SEQ ID NO: 5618661 - DNA, 25 bp, Homo sapien
tctatgaaaataatccaagtctgta

SEQ ID NO: 5618662 - DNA, 25 bp, Homo sapien
gctaagtctccaaaaaatgctaata

SEQ ID NO: 5618663 - DNA, 25 bp, Homo sapien
taaatagaatgcatgaaacaggaag

SEQ ID NO: 5618664 - DNA, 25 bp, Homo sapien
tcactacacccttttggcagtattc

SEQ ID NO: 5618665 - DNA, 25 bp, Homo sapien
aatgcatgaaacaggaagcttaaga

SEQ ID NO: 5618666 - DNA, 25 bp, Homo sapien
tgaccacaattaaatagaatgcatg

SEQ ID NO: 5618667 - DNA, 25 bp, Homo sapien
agaaaatgatacatagctaagtctc

SEQ ID NO: 5618668 - DNA, 25 bp, Homo sapien
gtatgtaagagctttcagaaaatga

SEQ ID NO: 5618669 - DNA, 25 bp, Homo sapien
aaagccaacatgattgctgttcact

SEQ ID NO: 5618670 - DNA, 25 bp, Homo sapien
atgctaataagcaatgaccacaatt

SEQ ID NO: 5618671 - DNA, 25 bp, Homo sapien
tccaagtctgtatgtaagagctttc

SEQ ID NO: 5618672 - DNA, 25 bp, Homo sapien
atgaactcaatacctggagtcatac

SEQ ID NO: 5618673 - DNA, 25 bp, Homo sapien
tgaagatgaactcaatacctggagt

SEQ ID NO: 5618674 - DNA, 25 bp, Homo sapien
agtcacacacggcagtcaacgcgtg

SEQ ID NO: 5618675 - DNA, 25 bp, Homo sapien
gactggagtcacacacggcagtcaa

SEQ ID NO: 5618676 - DNA, 25 bp, Homo sapien
tacctggagtcatacatggcagtca

SEQ ID NO: 5618677 - DNA, 25 bp, Homo sapien
cgactggagtcacacacggcagtca

SEQ ID NO: 5618678 - DNA, 25 bp, Homo sapien
tcacacacggcagtcaacgcgtgga

SEQ ID NO: 5618679 - DNA, 25 bp, Homo sapien
aagttgaagatgaactcaatacctg

SEQ ID NO: 5618680 - DNA, 25 bp, Homo sapien
atacatggcagtcaacgcatggaca

SEQ ID NO: 5618681 - DNA, 25 bp, Homo sapien
cggagactgttaagacgccgactgg

SEQ ID NO: 5618682 - DNA, 25 bp, Homo sapien
tcaatacctggagtcatacatggca

SEQ ID NO: 5618683 - DNA, 25 bp, Homo sapien
aaacattcaagtagcagataattct

SEQ ID NO: 5618684 - DNA, 25 bp, Homo sapien
aaaagaaagcatgaataaacaattt

SEQ ID NO: 5618685 - DNA, 25 bp, Homo sapien
aaacttaggtgacatagacaaaaac

SEQ ID NO: 5618686 - DNA, 25 bp, Homo sapien
acctgttgccagatatggaattaat

SEQ ID NO: 5618687 - DNA, 25 bp, Homo sapien
ttgaccaaaattgagcaaaaaagaa

SEQ ID NO: 5618688 - DNA, 25 bp, Homo sapien
gccagacatctagtccacctgttgc

SEQ ID NO: 5618689 - DNA, 25 bp, Homo sapien
agttttctaggagagttttgccaaa

SEQ ID NO: 5618690 - DNA, 25 bp, Homo sapien
aaatgtaaaagataataagggaata

SEQ ID NO: 5618691 - DNA, 25 bp, Homo sapien
aaaagaaacaaaatctgagtagtcc

SEQ ID NO: 5618692 - DNA, 25 bp, Homo sapien
tattaggtgttattcgccagacatc

SEQ ID NO: 5618693 - DNA, 25 bp, Homo sapien
tttggccccagaagatatattttac

SEQ ID NO: 5618694 - DNA, 25 bp, Homo sapien
gcctttgagaaaaacatggagtgag

SEQ ID NO: 5618695 - DNA, 25 bp, Homo sapien
agggagacaccatgtttgcataaat

SEQ ID NO: 5618696 - DNA, 25 bp, Homo sapien
ttgagaaaaacatggagtgagttaa

SEQ ID NO: 5618697 - DNA, 25 bp, Homo sapien
acctcacccaagactagggagacac

SEQ ID NO: 5618698 - DNA, 25 bp, Homo sapien
agaaaaacatggagtgagttaaagg

SEQ ID NO: 5618699 - DNA, 25 bp, Homo sapien
aagacctcacccaagactagggaga

SEQ ID NO: 5618700 - DNA, 25 bp, Homo sapien
accttggtctgcctttgagaaaaac

SEQ ID NO: 5618701 - DNA, 25 bp, Homo sapien
ggtctgcctttgagaaaaacatgga

SEQ ID NO: 5618702 - DNA, 25 bp, Homo sapien
ctgcctttgagaaaaacatggagtg

SEQ ID NO: 5618703 - DNA, 25 bp, Homo sapien
actagggagacaccatgtttgcata

SEQ ID NO: 5618704 - DNA, 25 bp, Homo sapien
ttgcataaataccttggtctgcctt

SEQ ID NO: 5618705 - DNA, 25 bp, Homo sapien
agagaaatatgatctagaaagctgt

SEQ ID NO: 5618706 - DNA, 25 bp, Homo sapien
aacaaagatttgaagagctgccatc

SEQ ID NO: 5618707 - DNA, 25 bp, Homo sapien
taaacatagaagtcctagagaaata

SEQ ID NO: 5618708 - DNA, 25 bp, Homo sapien
gattataccagtaagtccgaggccc

SEQ ID NO: 5618709 - DNA, 25 bp, Homo sapien
tccgaggccctcatcataaccaata

SEQ ID NO: 5618710 - DNA, 25 bp, Homo sapien
aacacagcaactaaacaaggaaaat

SEQ ID NO: 5618711 - DNA, 25 bp, Homo sapien
tggagggtaagtcatactgtgaaaa

SEQ ID NO: 5618712 - DNA, 25 bp, Homo sapien
caaggaaaataaacccatgagaagg

SEQ ID NO: 5618713 - DNA, 25 bp, Homo sapien
aaagtagtgtgatttgaaggttaaa

SEQ ID NO: 5618714 - DNA, 25 bp, Homo sapien
aaacccatgagaaggtctggattat

SEQ ID NO: 5618715 - DNA, 25 bp, Homo sapien
agtgggtgcttgagccttgtcccat

SEQ ID NO: 5618716 - DNA, 25 bp, Homo sapien
ctcgacgcccgcgagccccctattc

SEQ ID NO: 5618717 - DNA, 25 bp, Homo sapien
gaatagggggctcgcgggcgtcgag

SEQ ID NO: 5618718 - DNA, 25 bp, Homo sapien
acagctcagctaatatgtaacattc

SEQ ID NO: 5618719 - DNA, 25 bp, Homo sapien
tgcagcaataaaaaacacatctgtc

SEQ ID NO: 5618720 - DNA, 25 bp, Homo sapien
aactcaccgttttctgaaggcattc

SEQ ID NO: 5618721 - DNA, 25 bp, Homo sapien
gttaatgggtcacatgacaaattaa

SEQ ID NO: 5618722 - DNA, 25 bp, Homo sapien
tcaggctgaataattatcagaactt

SEQ ID NO: 5618723 - DNA, 25 bp, Homo sapien
acattcactgtgtgccaggcattgc

SEQ ID NO: 5618724 - DNA, 25 bp, Homo sapien
ccaggcattgctcctctaagtgctt

SEQ ID NO: 5618725 - DNA, 25 bp, Homo sapien
taaggaataacagtaacagctcagc

SEQ ID NO: 5618726 - DNA, 25 bp, Homo sapien
ctttctaaatacacagttcagggct

SEQ ID NO: 5618727 - DNA, 25 bp, Homo sapien
tcatgctgaactagaagtctcaatt

SEQ ID NO: 5618728 - DNA, 25 bp, Homo sapien
gagcaggttgaaggccatgtttttc

SEQ ID NO: 5618729 - DNA, 25 bp, Homo sapien
aagtagagatggacctctatattct

SEQ ID NO: 5618730 - DNA, 25 bp, Homo sapien
agaatatagaggtccatctctactt

SEQ ID NO: 5618731 - DNA, 25 bp, Homo sapien
atgtgtaggaaaggacacttgatct

SEQ ID NO: 5618732 - DNA, 25 bp, Homo sapien
cttaatgtggctaaggcactgtatg

SEQ ID NO: 5618733 - DNA, 25 bp, Homo sapien
aaggcactgtatgatctaaccactc

SEQ ID NO: 5618734 - DNA, 25 bp, Homo sapien
accatgtctggccccaacctgaact

SEQ ID NO: 5618735 - DNA, 25 bp, Homo sapien
tttcctgaccattaaaactgagttc

SEQ ID NO: 5618736 - DNA, 25 bp, Homo sapien
ctgagttcagtgtccctactacccc

SEQ ID NO: 5618737 - DNA, 25 bp, Homo sapien
tccaccacctgattcctagagactg

SEQ ID NO: 5618738 - DNA, 25 bp, Homo sapien
gcatgtctttcactcacgaaggaac

SEQ ID NO: 5618739 - DNA, 25 bp, Homo sapien
tagatgtcctaccccctgcatgtct

SEQ ID NO: 5618740 - DNA, 25 bp, Homo sapien
attcctagagactgagagagaacta

SEQ ID NO: 5618741 - DNA, 25 bp, Homo sapien
acatttcagacccctgaggtgactt

SEQ ID NO: 5618742 - DNA, 25 bp, Homo sapien
cagtttttgacagttgtacgtcaat

SEQ ID NO: 5618743 - DNA, 25 bp, Homo sapien
attgacgtacaactgtcaaaaactg

SEQ ID NO: 5618744 - DNA, 25 bp, Homo sapien
aactcgatttaagtaaggcagtgag

SEQ ID NO: 5618745 - DNA, 25 bp, Homo sapien
agtagtgcagtcaaaatcctaaagc

SEQ ID NO: 5618746 - DNA, 25 bp, Homo sapien
ctggcacagtcaccaaacacagtag

SEQ ID NO: 5618747 - DNA, 25 bp, Homo sapien
agtcaccaaacacagtagtgcagtc

SEQ ID NO: 5618748 - DNA, 25 bp, Homo sapien
cggattccttattagcctgagattc

SEQ ID NO: 5618749 - DNA, 25 bp, Homo sapien
gggtccaagttgcacagcgacctca

SEQ ID NO: 5618750 - DNA, 25 bp, Homo sapien
agttgcacagcgacctcatttacac

SEQ ID NO: 5618751 - DNA, 25 bp, Homo sapien
acagcatatgcaaaccggattcctt

SEQ ID NO: 5618752 - DNA, 25 bp, Homo sapien
tgacacccttttgacagcatatgca

SEQ ID NO: 5618753 - DNA, 25 bp, Homo sapien
ctacagtcggaaagttttcaataac

SEQ ID NO: 5618754 - DNA, 25 bp, Homo sapien
ctaaagcttactacagtcggaaagt

SEQ ID NO: 5618755 - DNA, 25 bp, Homo sapien
ggccatcgagcgcttcatcgagccg

SEQ ID NO: 5618756 - DNA, 25 bp, Homo sapien
ggcgctgaccttcatgttcatggtg

SEQ ID NO: 5618757 - DNA, 25 bp, Homo sapien
cacgttcggctggatccgagccgag

SEQ ID NO: 5618758 - DNA, 25 bp, Homo sapien
gtgcatgctggcgctgaccttcatg

SEQ ID NO: 5618759 - DNA, 25 bp, Homo sapien
ccagaagaacacgttcggctggatc

SEQ ID NO: 5618760 - DNA, 25 bp, Homo sapien
cgccacccagaagaacacgttcggc

SEQ ID NO: 5618761 - DNA, 25 bp, Homo sapien
agcgcttcatcgagccgcacgagat

SEQ ID NO: 5618762 - DNA, 25 bp, Homo sapien
gcttcatcgagccgcacgagatgca

SEQ ID NO: 5618763 - DNA, 25 bp, Homo sapien
ctgtttcgccatcctgctggaggcc

SEQ ID NO: 5618764 - DNA, 25 bp, Homo sapien
ttccacatgctgtcggacgtgctgg

SEQ ID NO: 5618765 - DNA, 25 bp, Homo sapien
tccttccacatgctgtcggacgtgc

SEQ ID NO: 5618766 - DNA, 25 bp, Homo sapien
attcatcagcaagggtaagatggca

SEQ ID NO: 5618767 - DNA, 25 bp, Homo sapien
gcacctgaaatggtacttgggatac

SEQ ID NO: 5618768 - DNA, 25 bp, Homo sapien
ggtacttgggatacaataggtgctt

SEQ ID NO: 5618769 - DNA, 25 bp, Homo sapien
atggcagtaagtaatagaaaatccc

SEQ ID NO: 5618770 - DNA, 25 bp, Homo sapien
taggatttctgggttttgggcagta

SEQ ID NO: 5618771 - DNA, 25 bp, Homo sapien
ggtaagatggcagtaagtaatagaa

SEQ ID NO: 5618772 - DNA, 25 bp, Homo sapien
gggttttgggcagtataatggcaat

SEQ ID NO: 5618773 - DNA, 25 bp, Homo sapien
gataggcattcatcagcaagggtaa

SEQ ID NO: 5618774 - DNA, 25 bp, Homo sapien
cgtaagaagagggactttgctttgt

SEQ ID NO: 5618775 - DNA, 25 bp, Homo sapien
atatttacagcacctgaaatggtac

SEQ ID NO: 5618776 - DNA, 25 bp, Homo sapien
gcttctttaaattatgataggcatt

SEQ ID NO: 5618777 - DNA, 25 bp, Homo sapien
gtattaaagagaagcataattcctt

SEQ ID NO: 5618778 - DNA, 25 bp, Homo sapien
gagaatcctgctgtattaaagagaa

SEQ ID NO: 5618779 - DNA, 25 bp, Homo sapien
aataacgaggtcaacgattttgtca

SEQ ID NO: 5618780 - DNA, 25 bp, Homo sapien
ctctgggaggccaaactctaccaaa

SEQ ID NO: 5618781 - DNA, 25 bp, Homo sapien
ttgggtatctaaatttctcttccga

SEQ ID NO: 5618782 - DNA, 25 bp, Homo sapien
gaggccaaactctaccaaacgcatc

SEQ ID NO: 5618783 - DNA, 25 bp, Homo sapien
tgattaataacgaggtcaacgattt

SEQ ID NO: 5618784 - DNA, 25 bp, Homo sapien
aacacttttataaccagagaatcct

SEQ ID NO: 5618785 - DNA, 25 bp, Homo sapien
aactctctgtacatgacttaaaccc

SEQ ID NO: 5618786 - DNA, 25 bp, Homo sapien
ttcatcttagtcctgctctgtgctc

SEQ ID NO: 5618787 - DNA, 25 bp, Homo sapien
tccatacagttatcttgcccaattt

SEQ ID NO: 5618788 - DNA, 25 bp, Homo sapien
tcatttccggtgtcatcagtgaagc

SEQ ID NO: 5618789 - DNA, 25 bp, Homo sapien
atgattccttggagcagagaacaca

SEQ ID NO: 5618790 - DNA, 25 bp, Homo sapien
ttacatgcaggctttaaccaacttt

SEQ ID NO: 5618791 - DNA, 25 bp, Homo sapien
ccggtgtcatcagtgaagcatcaga

SEQ ID NO: 5618792 - DNA, 25 bp, Homo sapien
ttgttttagtacaggaaaattcatg

SEQ ID NO: 5618793 - DNA, 25 bp, Homo sapien
ccctacttgacaactgagggaaatg

SEQ ID NO: 5618794 - DNA, 25 bp, Homo sapien
aacatggtaacacacaacccacctc

SEQ ID NO: 5618795 - DNA, 25 bp, Homo sapien
gtttgtagacatagaaacgtcaagc

SEQ ID NO: 5618796 - DNA, 25 bp, Homo sapien
agacatagaaacgtcaagcaggtgt

SEQ ID NO: 5618797 - DNA, 25 bp, Homo sapien
cacagtaggagcacatacacctcta

SEQ ID NO: 5618798 - DNA, 25 bp, Homo sapien
gagcactgcgccatgattccttgga

SEQ ID NO: 5618799 - DNA, 25 bp, Homo sapien
tcctcatcagtgaataggctgaatc

SEQ ID NO: 5618800 - DNA, 25 bp, Homo sapien
agaacgctgggtccaaactctgcta

SEQ ID NO: 5618801 - DNA, 25 bp, Homo sapien
ggaggctgagatctcaaccccacac

SEQ ID NO: 5618802 - DNA, 25 bp, Homo sapien
ggtccaaactctgctacctgggagg

SEQ ID NO: 5618803 - DNA, 25 bp, Homo sapien
ctggactatatcgtaggtgcaatga

SEQ ID NO: 5618804 - DNA, 25 bp, Homo sapien
acaggagacccggcttcactttcct

SEQ ID NO: 5618805 - DNA, 25 bp, Homo sapien
catcagtgaataggctgaatctccc

SEQ ID NO: 5618806 - DNA, 25 bp, Homo sapien
caatcctggactatatcgtaggtgc

SEQ ID NO: 5618807 - DNA, 25 bp, Homo sapien
gtgaataggctgaatctcccagggg

SEQ ID NO: 5618808 - DNA, 25 bp, Homo sapien
ctatatcgtaggtgcaatgaatttg

SEQ ID NO: 5618809 - DNA, 25 bp, Homo sapien
atcgtaggtgcaatgaatttgggga

SEQ ID NO: 5618810 - DNA, 25 bp, Homo sapien
tgaagcatgtttcctaaagtcccac

SEQ ID NO: 5618811 - DNA, 25 bp, Homo sapien
agaatttaatgtgttagtcatatcc

SEQ ID NO: 5618812 - DNA, 25 bp, Homo sapien
ctctcaaacaacacttacaaaaaac

SEQ ID NO: 5618813 - DNA, 25 bp, Homo sapien
cttcattgtaagatagcagaaacag

SEQ ID NO: 5618814 - DNA, 25 bp, Homo sapien
atcaaacccacaagaaacatgtctt

SEQ ID NO: 5618815 - DNA, 25 bp, Homo sapien
caggaccagatgaagcatgtttcct

SEQ ID NO: 5618816 - DNA, 25 bp, Homo sapien
aaacatgtcttgctccaggaaagga

SEQ ID NO: 5618817 - DNA, 25 bp, Homo sapien
ttgtaagatagcagaaacagaagca

SEQ ID NO: 5618818 - DNA, 25 bp, Homo sapien
atgtggtacttcagaatttaatgtg

SEQ ID NO: 5618819 - DNA, 25 bp, Homo sapien
actgatgaagtttttcagtgataat

SEQ ID NO: 5618820 - DNA, 25 bp, Homo sapien
taatgtgtaaaacttcactactatt

SEQ ID NO: 5618821 - DNA, 25 bp, Homo sapien
agaagtggctttgaatggagaaaga

SEQ ID NO: 5618822 - DNA, 25 bp, Homo sapien
taatatatatgttacaggggaaaac

SEQ ID NO: 5618823 - DNA, 25 bp, Homo sapien
aaggggatactagaaccaatctccg

SEQ ID NO: 5618824 - DNA, 25 bp, Homo sapien
cagagaaaacctcactagaagtggc

SEQ ID NO: 5618825 - DNA, 25 bp, Homo sapien
aagcagaggaaaaatagtatgtgtg

SEQ ID NO: 5618826 - DNA, 25 bp, Homo sapien
aagagaataaaagaagattcctacc

SEQ ID NO: 5618827 - DNA, 25 bp, Homo sapien
ttaatgagcataccataagccttct

SEQ ID NO: 5618828 - DNA, 25 bp, Homo sapien
aaccaatctccgggctgatacagag

SEQ ID NO: 5618829 - DNA, 25 bp, Homo sapien
gagggatgactgtacttggaaatga

SEQ ID NO: 5618830 - DNA, 25 bp, Homo sapien
ctcacagactacgttaaggaccctt

SEQ ID NO: 5618831 - DNA, 25 bp, Homo sapien
tgtttgaaaatgtcaacagggggca

SEQ ID NO: 5618832 - DNA, 25 bp, Homo sapien
tgttgaccaaatttatgtgagggga

SEQ ID NO: 5618833 - DNA, 25 bp, Homo sapien
ttggccctttaacaaataagacatc

SEQ ID NO: 5618834 - DNA, 25 bp, Homo sapien
taattcagtaagtatttatcgaggg

SEQ ID NO: 5618835 - DNA, 25 bp, Homo sapien
ctaagaagtatgttgaccaaattta

SEQ ID NO: 5618836 - DNA, 25 bp, Homo sapien
ctggtcaacatagtgaaaccccatc

SEQ ID NO: 5618837 - DNA, 25 bp, Homo sapien
tttattcctatgagtcaagaaaata

SEQ ID NO: 5618838 - DNA, 25 bp, Homo sapien
tgaccaaatttatgtgaggggaagg

SEQ ID NO: 5618839 - DNA, 25 bp, Homo sapien
ttaacaaataagacatcaagtttct

SEQ ID NO: 5618840 - DNA, 25 bp, Homo sapien
tcaagactagcctggtcaacatagt

SEQ ID NO: 5618841 - DNA, 25 bp, Homo sapien
tcctatgagtcaagaaaataaggct

SEQ ID NO: 5618842 - DNA, 25 bp, Homo sapien
ctatgagtcaagaaaataaggctgg

SEQ ID NO: 5618843 - DNA, 25 bp, Homo sapien
aagacaacaaaggtgttatagatac

SEQ ID NO: 5618844 - DNA, 25 bp, Homo sapien
tactgccatgatctgtgtactctcc

SEQ ID NO: 5618845 - DNA, 25 bp, Homo sapien
agctctgtaggtgttcacaagcatg

SEQ ID NO: 5618846 - DNA, 25 bp, Homo sapien
acttcccccagtgtggggtgtgtgc

SEQ ID NO: 5618847 - DNA, 25 bp, Homo sapien
tgttatagatactaacccacgcgtc

SEQ ID NO: 5618848 - DNA, 25 bp, Homo sapien
tacacaaagtgttaggtggtgtgca

SEQ ID NO: 5618849 - DNA, 25 bp, Homo sapien
gtggcacccatcataaatcgcagtc

SEQ ID NO: 5618850 - DNA, 25 bp, Homo sapien
atatccataggttcgcaactcttat

SEQ ID NO: 5618851 - DNA, 25 bp, Homo sapien
gggtgtgtgccaccagtgctacaca

SEQ ID NO: 5618852 - DNA, 25 bp, Homo sapien
ccacaccagcctagagacttctgct

SEQ ID NO: 5618853 - DNA, 25 bp, Homo sapien
tgaattcaacactgtgcgaaagaac

SEQ ID NO: 5618854 - DNA, 25 bp, Homo sapien
taggagaagcacagctgtatcctgt

SEQ ID NO: 5618855 - DNA, 25 bp, Homo sapien
tagggaaaaatcagtcatgaggttt

SEQ ID NO: 5618856 - DNA, 25 bp, Homo sapien
aaatggtatacagagccactcaaaa

SEQ ID NO: 5618857 - DNA, 25 bp, Homo sapien
acaaaacatgacttagaactagctt

SEQ ID NO: 5618858 - DNA, 25 bp, Homo sapien
aagaaagaaatcccctatgcatgta

SEQ ID NO: 5618859 - DNA, 25 bp, Homo sapien
actgctgattagttggtagatctcc

SEQ ID NO: 5618860 - DNA, 25 bp, Homo sapien
ctcccataaaagggacgcatgaggc

SEQ ID NO: 5618861 - DNA, 25 bp, Homo sapien
gggacgcatgaggccctatgcgatt

SEQ ID NO: 5618862 - DNA, 25 bp, Homo sapien
atcctgtaccggaaagcaaaataac

SEQ ID NO: 5618863 - DNA, 25 bp, Homo sapien
tccaaaaatatacgaaaacagagaa

SEQ ID NO: 5618864 - DNA, 25 bp, Homo sapien
gaaattaaggatcctcagaagaaag

SEQ ID NO: 5618865 - DNA, 25 bp, Homo sapien
ctaaccaatacatggaggtgaaggg

SEQ ID NO: 5618866 - DNA, 25 bp, Homo sapien
tctaaagaacaggtataatataaaa

SEQ ID NO: 5618867 - DNA, 25 bp, Homo sapien
aatgtaggtgggtcccttgcttttc

SEQ ID NO: 5618868 - DNA, 25 bp, Homo sapien
atcactgaaataattagctgctaac

SEQ ID NO: 5618869 - DNA, 25 bp, Homo sapien
aaggtagaacagtctcctgaaggta

SEQ ID NO: 5618870 - DNA, 25 bp, Homo sapien
ttttagacagtatcttacagttcac

SEQ ID NO: 5618871 - DNA, 25 bp, Homo sapien
tcaaattaaaaggtagaacagtctc

SEQ ID NO: 5618872 - DNA, 25 bp, Homo sapien
ctcttggagtaaagaataatcagtt

SEQ ID NO: 5618873 - DNA, 25 bp, Homo sapien
aggaaagattgagtgaaaacctaaa

SEQ ID NO: 5618874 - DNA, 25 bp, Homo sapien
gctgctaacatgacttctaaagaac

SEQ ID NO: 5618875 - DNA, 25 bp, Homo sapien
gttttcacgttactgtgacaggaaa

SEQ ID NO: 5618876 - DNA, 25 bp, Homo sapien
actgaaatgtgcacttagaaatgat

SEQ ID NO: 5618877 - DNA, 25 bp, Homo sapien
tagaaatgattcagatggtaaattt

SEQ ID NO: 5618878 - DNA, 25 bp, Homo sapien
ccaaggacgtccacttctgcctctc

SEQ ID NO: 5618879 - DNA, 25 bp, Homo sapien
tggccagattcttgagcttccctga

SEQ ID NO: 5618880 - DNA, 25 bp, Homo sapien
ctaaatgacagctctggccagattc

SEQ ID NO: 5618881 - DNA, 25 bp, Homo sapien
ccgcacccagccgaatgtacttaac

SEQ ID NO: 5618882 - DNA, 25 bp, Homo sapien
atgaagtgcttttcagggaaatggc

SEQ ID NO: 5618883 - DNA, 25 bp, Homo sapien
tcagcacccaaggacgtccacttct

SEQ ID NO: 5618884 - DNA, 25 bp, Homo sapien
ccaactagtgcctatgtggggaggc

SEQ ID NO: 5618885 - DNA, 25 bp, Homo sapien
gcttccctgatactctgacacactc

SEQ ID NO: 5618886 - DNA, 25 bp, Homo sapien
aggcatggcctcccaatagtctttg

SEQ ID NO: 5618887 - DNA, 25 bp, Homo sapien
caggctatccaaggccaactgcaac

SEQ ID NO: 5618888 - DNA, 25 bp, Homo sapien
gtgaaaatgaagaccttgtctgcct

SEQ ID NO: 5618889 - DNA, 25 bp, Homo sapien
tagcacatagctactttggggcaac

SEQ ID NO: 5618890 - DNA, 25 bp, Homo sapien
ctgcaacctggtgttttggagataa

SEQ ID NO: 5618891 - DNA, 25 bp, Homo sapien
gtgaacgttcagacaagggcattta

SEQ ID NO: 5618892 - DNA, 25 bp, Homo sapien
tggagataaagtactagaaacaggg

SEQ ID NO: 5618893 - DNA, 25 bp, Homo sapien
gttccaagtacaggctatccaaggc

SEQ ID NO: 5618894 - DNA, 25 bp, Homo sapien
ggcaacagggacttaaatatggcac

SEQ ID NO: 5618895 - DNA, 25 bp, Homo sapien
ttgtctgcctatgccgaacttgtca

SEQ ID NO: 5618896 - DNA, 25 bp, Homo sapien
gtgcatttaaagatggtctggaagt

SEQ ID NO: 5618897 - DNA, 25 bp, Homo sapien
tctaaggtgatttggcagtattaac

SEQ ID NO: 5618898 - DNA, 25 bp, Homo sapien
ccttctctcgctgtgcagtggcggc

SEQ ID NO: 5618899 - DNA, 25 bp, Homo sapien
gtcgacgctcagggctaatctctat

SEQ ID NO: 5618900 - DNA, 25 bp, Homo sapien
tttgtagctgacttacctcaatgac

SEQ ID NO: 5618901 - DNA, 25 bp, Homo sapien
gtctgagcctacaactgcgctatct

SEQ ID NO: 5618902 - DNA, 25 bp, Homo sapien
gtcaagggactcaagcgtctctctt

SEQ ID NO: 5618903 - DNA, 25 bp, Homo sapien
ttcatgatttggaaaccggaaggaa

SEQ ID NO: 5618904 - DNA, 25 bp, Homo sapien
gccccgggtaatattgggtggatca

SEQ ID NO: 5618905 - DNA, 25 bp, Homo sapien
tgggtggatcacaagaactaatctt

SEQ ID NO: 5618906 - DNA, 25 bp, Homo sapien
tacctcaatgacatgaccagtgtct

SEQ ID NO: 5618907 - DNA, 25 bp, Homo sapien
tctctatgagtcaccctcgaggccc

SEQ ID NO: 5618908 - DNA, 25 bp, Homo sapien
agaggagagttctcacctggagttc

SEQ ID NO: 5618909 - DNA, 25 bp, Homo sapien
cgtgacatgttgcttagaactctcc

SEQ ID NO: 5618910 - DNA, 25 bp, Homo sapien
gaggctacatagctcgtgacatgtt

SEQ ID NO: 5618911 - DNA, 25 bp, Homo sapien
ctggcttgacaattactcagctctc

SEQ ID NO: 5618912 - DNA, 25 bp, Homo sapien
tgtgaagaggctacatagctcgtga

SEQ ID NO: 5618913 - DNA, 25 bp, Homo sapien
ttatttcagaagcagtgtgaagagg

SEQ ID NO: 5618914 - DNA, 25 bp, Homo sapien
gtagggaaagccagaatccttttga

SEQ ID NO: 5618915 - DNA, 25 bp, Homo sapien
agctccccaaacctggcttgacaat

SEQ ID NO: 5618916 - DNA, 25 bp, Homo sapien
aatcatagccctttgggaggctgag

SEQ ID NO: 5618917 - DNA, 25 bp, Homo sapien
tcagctctcttggagcgggtagtgg

SEQ ID NO: 5618918 - DNA, 25 bp, Homo sapien
tctgcaccctgttatgtctttagct

SEQ ID NO: 5618919 - DNA, 25 bp, Homo sapien
gctcaaaaacagaaaagctctccct

SEQ ID NO: 5618920 - DNA, 25 bp, Homo sapien
tttaatgaggacacccaacagttac

SEQ ID NO: 5618921 - DNA, 25 bp, Homo sapien
cactggatcagaccacacatgtgga

SEQ ID NO: 5618922 - DNA, 25 bp, Homo sapien
ctctcagctaatagtggctaagaag

SEQ ID NO: 5618923 - DNA, 25 bp, Homo sapien
tcaagatgagatgtttaaatggcaa

SEQ ID NO: 5618924 - DNA, 25 bp, Homo sapien
acccttggaaacacacagggaaagc

SEQ ID NO: 5618925 - DNA, 25 bp, Homo sapien
acagggaaagctaagactcctatca

SEQ ID NO: 5618926 - DNA, 25 bp, Homo sapien
gtccaagcaggacaactcaatcgca

SEQ ID NO: 5618927 - DNA, 25 bp, Homo sapien
ggcgagatcaagagtcaaacagcct

SEQ ID NO: 5618928 - DNA, 25 bp, Homo sapien
actagggtgagcaaaatgttaaatc

SEQ ID NO: 5618929 - DNA, 25 bp, Homo sapien
aggcagaatggttcttcaagatgag

SEQ ID NO: 5618930 - DNA, 25 bp, Homo sapien
tattgagaaaaagtactaggcgaga

SEQ ID NO: 5618931 - DNA, 25 bp, Homo sapien
gagtggacgtattttaggtctcgag

SEQ ID NO: 5618932 - DNA, 25 bp, Homo sapien
ctcgagacctaaaatacgtccactc

SEQ ID NO: 5618933 - DNA, 25 bp, Homo sapien
actgtggtgtagcttcaggattggt

SEQ ID NO: 5618934 - DNA, 25 bp, Homo sapien
ctacttactgtaggcccacaacacc

SEQ ID NO: 5618935 - DNA, 25 bp, Homo sapien
caggattggttaaccacgcttccac

SEQ ID NO: 5618936 - DNA, 25 bp, Homo sapien
ctctccaacttgcaaactgactctc

SEQ ID NO: 5618937 - DNA, 25 bp, Homo sapien
gggctggtaataagggtcagctcat

SEQ ID NO: 5618938 - DNA, 25 bp, Homo sapien
tcagctcatagagttagactaagtg

SEQ ID NO: 5618939 - DNA, 25 bp, Homo sapien
ataaaaattgtgttctggggctggt

SEQ ID NO: 5618940 - DNA, 25 bp, Homo sapien
ttatgttttgaacaggcagggtgga

SEQ ID NO: 5618941 - DNA, 25 bp, Homo sapien
agactaagtgtgcacggtatgactc

SEQ ID NO: 5618942 - DNA, 25 bp, Homo sapien
acaatgattttagttgggggtggac

SEQ ID NO: 5618943 - DNA, 25 bp, Homo sapien
aggcccacaacaccaacatagaatt

SEQ ID NO: 5618944 - DNA, 25 bp, Homo sapien
gttatccaggttagcacctactccc

SEQ ID NO: 5618945 - DNA, 25 bp, Homo sapien
caggttagcacctactcccaaaccc

SEQ ID NO: 5618946 - DNA, 25 bp, Homo sapien
gggagagagagcccttttacagtta

SEQ ID NO: 5618947 - DNA, 25 bp, Homo sapien
ttttacagttatccaggttagcacc

SEQ ID NO: 5618948 - DNA, 25 bp, Homo sapien
gagagagagcccttttacagttatc

SEQ ID NO: 5618949 - DNA, 25 bp, Homo sapien
agagagagcccttttacagttatcc

SEQ ID NO: 5618950 - DNA, 25 bp, Homo sapien
ggagagagagcccttttacagttat

SEQ ID NO: 5618951 - DNA, 25 bp, Homo sapien
tacagttatccaggttagcacctac

SEQ ID NO: 5618952 - DNA, 25 bp, Homo sapien
ccaggttagcacctactcccaaacc

SEQ ID NO: 5618953 - DNA, 25 bp, Homo sapien
aggttagcacctactcccaaaccca

SEQ ID NO: 5618954 - DNA, 25 bp, Homo sapien
agttatccaggttagcacctactcc

SEQ ID NO: 5618955 - DNA, 25 bp, Homo sapien
gatgggcagacagaccacatctaaa

SEQ ID NO: 5618956 - DNA, 25 bp, Homo sapien
ttttcggttatcagatgggcagaca

SEQ ID NO: 5618957 - DNA, 25 bp, Homo sapien
tgacaagaaaattaaaggccaggta

SEQ ID NO: 5618958 - DNA, 25 bp, Homo sapien
caaaccacctgataaggacagaata

SEQ ID NO: 5618959 - DNA, 25 bp, Homo sapien
gccaggtacggtggctcatgtctat

SEQ ID NO: 5618960 - DNA, 25 bp, Homo sapien
gggcaaaacaggggcactctgtttc

SEQ ID NO: 5618961 - DNA, 25 bp, Homo sapien
gataaggacagaataaatttaaata

SEQ ID NO: 5618962 - DNA, 25 bp, Homo sapien
cagaatctgagtgacaagaaaatta

SEQ ID NO: 5618963 - DNA, 25 bp, Homo sapien
tcatgaaagtgataaattttcggtt

SEQ ID NO: 5618964 - DNA, 25 bp, Homo sapien
tacggtggctcatgtctataatccc

SEQ ID NO: 5618965 - DNA, 25 bp, Homo sapien
taaatcaaaccacctgataaggaca

SEQ ID NO: 5618966 - DNA, 25 bp, Homo sapien
ccagaaagtggaacttcctagcacc

SEQ ID NO: 5618967 - DNA, 25 bp, Homo sapien
accacagcctgccttagcaccatcc

SEQ ID NO: 5618968 - DNA, 25 bp, Homo sapien
ctacatggagagtaagaaaagataa

SEQ ID NO: 5618969 - DNA, 25 bp, Homo sapien
tataagagtcattaagaagataaga

SEQ ID NO: 5618970 - DNA, 25 bp, Homo sapien
ctgaacatgcagagtaagaactact

SEQ ID NO: 5618971 - DNA, 25 bp, Homo sapien
tggtacactggaaacatcacaatga

SEQ ID NO: 5618972 - DNA, 25 bp, Homo sapien
cctccactagagtctgaacatgcag

SEQ ID NO: 5618973 - DNA, 25 bp, Homo sapien
gctggcactataggcttaaaccacc

SEQ ID NO: 5618974 - DNA, 25 bp, Homo sapien
tagctccactacaccctggaactcc

SEQ ID NO: 5618975 - DNA, 25 bp, Homo sapien
aagacttgggctactcagtgccata

SEQ ID NO: 5618976 - DNA, 25 bp, Homo sapien
gaagaaggaattaataggcaaatgc

SEQ ID NO: 5618977 - DNA, 25 bp, Homo sapien
taaaacaatgattctgaaaacaaag

SEQ ID NO: 5618978 - DNA, 25 bp, Homo sapien
tagcaagccattggtatctgaatgc

SEQ ID NO: 5618979 - DNA, 25 bp, Homo sapien
ctcctctgtgctatcagcgtggggc

SEQ ID NO: 5618980 - DNA, 25 bp, Homo sapien
ttgacctgagaataaaaagacatta

SEQ ID NO: 5618981 - DNA, 25 bp, Homo sapien
ctttcccatacagtgcatgccgggc

SEQ ID NO: 5618982 - DNA, 25 bp, Homo sapien
ttcccatacagtgcatgccgggctc

SEQ ID NO: 5618983 - DNA, 25 bp, Homo sapien
ctgaatgctaagatagcaagaaatt

SEQ ID NO: 5618984 - DNA, 25 bp, Homo sapien
gcatgccgggctcctctgtgctatc

SEQ ID NO: 5618985 - DNA, 25 bp, Homo sapien
tgtaacaaggtggactgctttccca

SEQ ID NO: 5618986 - DNA, 25 bp, Homo sapien
ttaaaactgtaacaaggtggactgc

SEQ ID NO: 5618987 - DNA, 25 bp, Homo sapien
tgtgagcgattgacctgagaataaa

SEQ ID NO: 5618988 - DNA, 25 bp, Homo sapien
ggaaactgagaaacctgccaacaac

SEQ ID NO: 5618989 - DNA, 25 bp, Homo sapien
tcctataatcagacacgctgttgtt

SEQ ID NO: 5618990 - DNA, 25 bp, Homo sapien
gaatacaagcaggaaactgagaaac

SEQ ID NO: 5618991 - DNA, 25 bp, Homo sapien
atgggaaccaatccttctttgcttt

SEQ ID NO: 5618992 - DNA, 25 bp, Homo sapien
gcaaagttgccagtaagcagcattt

SEQ ID NO: 5618993 - DNA, 25 bp, Homo sapien
atataactgttagaagatataaatc

SEQ ID NO: 5618994 - DNA, 25 bp, Homo sapien
tgccaacaacagctaaagggacaca

SEQ ID NO: 5618995 - DNA, 25 bp, Homo sapien
gacacagcctaaggaatacaagcag

SEQ ID NO: 5618996 - DNA, 25 bp, Homo sapien
taaatctataacatatgcagcatat

SEQ ID NO: 5618997 - DNA, 25 bp, Homo sapien
aatgtacccagaagacacagcctaa

SEQ ID NO: 5618998 - DNA, 25 bp, Homo sapien
acaggtacatgcaaagttgccagta

SEQ ID NO: 5618999 - DNA, 25 bp, Homo sapien
ctagaggaatttgcagaaggatatg

SEQ ID NO: 5619000 - DNA, 25 bp, Homo sapien
aggaatttgcagaaggatatgaact

SEQ ID NO: 5619001 - DNA, 25 bp, Homo sapien
cagttctggctctacctccaattct

SEQ ID NO: 5619002 - DNA, 25 bp, Homo sapien
cctggactcaagtattccacctgcc

SEQ ID NO: 5619003 - DNA, 25 bp, Homo sapien
attctctgctctagaggaatttgca

SEQ ID NO: 5619004 - DNA, 25 bp, Homo sapien
aaaagaaagatgggttccagttctg

SEQ ID NO: 5619005 - DNA, 25 bp, Homo sapien
ctcctagcttgtgctgggattacag

SEQ ID NO: 5619006 - DNA, 25 bp, Homo sapien
tttaatctccacagaactcaatttc

SEQ ID NO: 5619007 - DNA, 25 bp, Homo sapien
ggctagtctcgaactcctggactca

SEQ ID NO: 5619008 - DNA, 25 bp, Homo sapien
gctctagaggaatttgcagaaggat

SEQ ID NO: 5619009 - DNA, 25 bp, Homo sapien
cccccggccaatgtctccatttttg

SEQ ID NO: 5619010 - DNA, 25 bp, Homo sapien
gcaggtgcgtgctaccgcatcctgc

SEQ ID NO: 5619011 - DNA, 25 bp, Homo sapien
gcttggaatgaggcccatgactttg

SEQ ID NO: 5619012 - DNA, 25 bp, Homo sapien
ttcacacccagggtggtcagtgcag

SEQ ID NO: 5619013 - DNA, 25 bp, Homo sapien
tctatatgcgagtggccttcacacc

SEQ ID NO: 5619014 - DNA, 25 bp, Homo sapien
agaggggtcgcctgtcacctctata

SEQ ID NO: 5619015 - DNA, 25 bp, Homo sapien
catgttttagctctcggcaggtggc

SEQ ID NO: 5619016 - DNA, 25 bp, Homo sapien
gcaccatgccaagtgcccccatggc

SEQ ID NO: 5619017 - DNA, 25 bp, Homo sapien
gtgctaccgcatcctgctggcagtc

SEQ ID NO: 5619018 - DNA, 25 bp, Homo sapien
cccatggccccacttacctgctctc

SEQ ID NO: 5619019 - DNA, 25 bp, Homo sapien
ctggcagtcgttcaaagcacatgtt

SEQ ID NO: 5619020 - DNA, 25 bp, Homo sapien
gcccctgtgctccatgcaccatgcc

SEQ ID NO: 5619021 - DNA, 25 bp, Homo sapien
ctgaaataatgaatgagggtcccat

SEQ ID NO: 5619022 - DNA, 25 bp, Homo sapien
agtgtctagcacagggctagccatg

SEQ ID NO: 5619023 - DNA, 25 bp, Homo sapien
ggttctggagatacagccatggaga

SEQ ID NO: 5619024 - DNA, 25 bp, Homo sapien
ccatgtaggaggaactcagcaaata

SEQ ID NO: 5619025 - DNA, 25 bp, Homo sapien
atgccaatggcagatgagaatcaat

SEQ ID NO: 5619026 - DNA, 25 bp, Homo sapien
catcgccgattccccagtgtctagc

SEQ ID NO: 5619027 - DNA, 25 bp, Homo sapien
aggagacacgtggctcaactgatat

SEQ ID NO: 5619028 - DNA, 25 bp, Homo sapien
atatccacagtgcaggatgagcaat

SEQ ID NO: 5619029 - DNA, 25 bp, Homo sapien
tgccccccctaaagcttgagcccat

SEQ ID NO: 5619030 - DNA, 25 bp, Homo sapien
atggagaccctgcctatggagctca

SEQ ID NO: 5619031 - DNA, 25 bp, Homo sapien
gtcagctccacaagagtggggattt

SEQ ID NO: 5619032 - DNA, 25 bp, Homo sapien
gccccgctacctccgccaccagcgc

SEQ ID NO: 5619033 - DNA, 25 bp, Homo sapien
ttggtattatcgtgccacacaaccg

SEQ ID NO: 5619034 - DNA, 25 bp, Homo sapien
cattatgtcaggccctgcccgattg

SEQ ID NO: 5619035 - DNA, 25 bp, Homo sapien
atgtcaggccctgcccgattgcagt

SEQ ID NO: 5619036 - DNA, 25 bp, Homo sapien
ctcacattcgttgctggtggaggtc

SEQ ID NO: 5619037 - DNA, 25 bp, Homo sapien
tcgtgccacacaaccgatgtctcac

SEQ ID NO: 5619038 - DNA, 25 bp, Homo sapien
attatcgtgccacacaaccgatgtc

SEQ ID NO: 5619039 - DNA, 25 bp, Homo sapien
gtctcacattcgttgctggtggagg

SEQ ID NO: 5619040 - DNA, 25 bp, Homo sapien
ccgattgcagtcataatctgggtta

SEQ ID NO: 5619041 - DNA, 25 bp, Homo sapien
tcaggccctgcccgattgcagtcat

SEQ ID NO: 5619042 - DNA, 25 bp, Homo sapien
gccacacaaccgatgtctcacattc

SEQ ID NO: 5619043 - DNA, 25 bp, Homo sapien
tggggtcacaaccttcctggacgtc

SEQ ID NO: 5619044 - DNA, 25 bp, Homo sapien
gtcttgcaaaatcgggtgtctgacg

SEQ ID NO: 5619045 - DNA, 25 bp, Homo sapien
gaacagacaaagggagctattttgc

SEQ ID NO: 5619046 - DNA, 25 bp, Homo sapien
aacagtcagtcttgcaaaatcgggt

SEQ ID NO: 5619047 - DNA, 25 bp, Homo sapien
tattgattgttaggcaggggcttta

SEQ ID NO: 5619048 - DNA, 25 bp, Homo sapien
caagcaatttgtccgctagtgtgca

SEQ ID NO: 5619049 - DNA, 25 bp, Homo sapien
gagtactatggggtcacaaccttcc

SEQ ID NO: 5619050 - DNA, 25 bp, Homo sapien
acagcgaaagtgagatttttaataa

SEQ ID NO: 5619051 - DNA, 25 bp, Homo sapien
cccacaggctgagtactatggggtc

SEQ ID NO: 5619052 - DNA, 25 bp, Homo sapien
ctcctcccccagtttcccacaggct

SEQ ID NO: 5619053 - DNA, 25 bp, Homo sapien
cttcctggacgtcacctattgattg

SEQ ID NO: 5619054 - DNA, 25 bp, Homo sapien
ttatggtattaaggccacaagggga

SEQ ID NO: 5619055 - DNA, 25 bp, Homo sapien
tctgttttatcggttgctgggagtc

SEQ ID NO: 5619056 - DNA, 25 bp, Homo sapien
ctcaggggaccaaaatgtcctgcct

SEQ ID NO: 5619057 - DNA, 25 bp, Homo sapien
ctgaatgaatgcctgcctacccctc

SEQ ID NO: 5619058 - DNA, 25 bp, Homo sapien
cttctgtagcttggcaaaggcactg

SEQ ID NO: 5619059 - DNA, 25 bp, Homo sapien
ctgcctacccctccaggtgggcagc

SEQ ID NO: 5619060 - DNA, 25 bp, Homo sapien
gtgctgtgatcaacacaagatgccc

SEQ ID NO: 5619061 - DNA, 25 bp, Homo sapien
tattaacccccaagtacagtagctc

SEQ ID NO: 5619062 - DNA, 25 bp, Homo sapien
gaagggggttcataactgcttctgc

SEQ ID NO: 5619063 - DNA, 25 bp, Homo sapien
catgagacataaccaggggattcta

SEQ ID NO: 5619064 - DNA, 25 bp, Homo sapien
tgagtaaatgaaagaaccatgagac

SEQ ID NO: 5619065 - DNA, 25 bp, Homo sapien
ctaataaaatgttctgagggagtga

SEQ ID NO: 5619066 - DNA, 25 bp, Homo sapien
tgagggagtgaatgaatgtttctct

SEQ ID NO: 5619067 - DNA, 25 bp, Homo sapien
ctaaagctcaggacatgccagaaga

SEQ ID NO: 5619068 - DNA, 25 bp, Homo sapien
atgggtacacactaggcagctttga

SEQ ID NO: 5619069 - DNA, 25 bp, Homo sapien
ttggtgttggcaggctacctctgca

SEQ ID NO: 5619070 - DNA, 25 bp, Homo sapien
agctttgagcaccccatggcacttt

SEQ ID NO: 5619071 - DNA, 25 bp, Homo sapien
attaagatggaatcctgggcagact

SEQ ID NO: 5619072 - DNA, 25 bp, Homo sapien
gacatcctcgagcagaaagcagatt

SEQ ID NO: 5619073 - DNA, 25 bp, Homo sapien
aaaacaacagtctgtgcagagccac

SEQ ID NO: 5619074 - DNA, 25 bp, Homo sapien
gcccctaacagatggactaaagctc

SEQ ID NO: 5619075 - DNA, 25 bp, Homo sapien
tgccagaagatcagcacgtgcatta

SEQ ID NO: 5619076 - DNA, 25 bp, Homo sapien
atttagcacctgtattaggctgttc

SEQ ID NO: 5619077 - DNA, 25 bp, Homo sapien
tttaagatggacactgtaactcgtt

SEQ ID NO: 5619078 - DNA, 25 bp, Homo sapien
aggttgtattgggatagctactgtc

SEQ ID NO: 5619079 - DNA, 25 bp, Homo sapien
gtcagttttggagctcagcacattt

SEQ ID NO: 5619080 - DNA, 25 bp, Homo sapien
tatggttctacagactacaggaagc

SEQ ID NO: 5619081 - DNA, 25 bp, Homo sapien
ctataaatatctgcgactgggtaat

SEQ ID NO: 5619082 - DNA, 25 bp, Homo sapien
ggaaatggccatatgatcgagtgat

SEQ ID NO: 5619083 - DNA, 25 bp, Homo sapien
cagtgtacactgggcaatagctata

SEQ ID NO: 5619084 - DNA, 25 bp, Homo sapien
gtatgttgttcgttagctgttgtct

SEQ ID NO: 5619085 - DNA, 25 bp, Homo sapien
attcttgacaaggcaaagtgaacct

SEQ ID NO: 5619086 - DNA, 25 bp, Homo sapien
ggcaaagtgaacctatgagattttt

SEQ ID NO: 5619087 - DNA, 25 bp, Homo sapien
ggatagagtttagcaagtaatggaa

SEQ ID NO: 5619088 - DNA, 25 bp, Homo sapien
tgtgtaggcttgaaagtaaaacagg

SEQ ID NO: 5619089 - DNA, 25 bp, Homo sapien
cccggccaggaacgatattaatgaa

SEQ ID NO: 5619090 - DNA, 25 bp, Homo sapien
ccattgtggatttctcaacggagat

SEQ ID NO: 5619091 - DNA, 25 bp, Homo sapien
atggaaaagaggatttaaaattgga

SEQ ID NO: 5619092 - DNA, 25 bp, Homo sapien
ggaataacgtctattgtgtgtaggc

SEQ ID NO: 5619093 - DNA, 25 bp, Homo sapien
ttagttggatagagtttagcaagta

SEQ ID NO: 5619094 - DNA, 25 bp, Homo sapien
caagtaatggaaaagaggatttaaa

SEQ ID NO: 5619095 - DNA, 25 bp, Homo sapien
agagtgaggaacttagttggataga

SEQ ID NO: 5619096 - DNA, 25 bp, Homo sapien
gtgggcaactctgtacataaactat

SEQ ID NO: 5619097 - DNA, 25 bp, Homo sapien
taaactattgataggagagtgagga

SEQ ID NO: 5619098 - DNA, 25 bp, Homo sapien
aaagtaaaagataggaatagtaatg

SEQ ID NO: 5619099 - DNA, 25 bp, Homo sapien
gaacctggcaatctcagtgagctat

SEQ ID NO: 5619100 - DNA, 25 bp, Homo sapien
agataggaatagtaatgtaaagcat

SEQ ID NO: 5619101 - DNA, 25 bp, Homo sapien
tttaatattgtggcatgaaaaatac

SEQ ID NO: 5619102 - DNA, 25 bp, Homo sapien
cctctttgtcgaacctggcaatctc

SEQ ID NO: 5619103 - DNA, 25 bp, Homo sapien
aagctttcccggataaagcagagtc

SEQ ID NO: 5619104 - DNA, 25 bp, Homo sapien
aactggctcagagttttaaaagctt

SEQ ID NO: 5619105 - DNA, 25 bp, Homo sapien
ggataaagcagagtcaagtctaccc

SEQ ID NO: 5619106 - DNA, 25 bp, Homo sapien
ttactcaaagttaactggctcagag

SEQ ID NO: 5619107 - DNA, 25 bp, Homo sapien
acaaaaacagacaaacttggctatc

SEQ ID NO: 5619108 - DNA, 25 bp, Homo sapien
ctacctcaatccatcaatcaccctc

SEQ ID NO: 5619109 - DNA, 25 bp, Homo sapien
atgtgcttgtgcatagactaatatt

SEQ ID NO: 5619110 - DNA, 25 bp, Homo sapien
tacctagagagttattgattccttc

SEQ ID NO: 5619111 - DNA, 25 bp, Homo sapien
gtgctgaagaccgctctcatccacc

SEQ ID NO: 5619112 - DNA, 25 bp, Homo sapien
gtgatttcgagttacctagagagtt

SEQ ID NO: 5619113 - DNA, 25 bp, Homo sapien
ggaggcttgggtaccttcaagattc

SEQ ID NO: 5619114 - DNA, 25 bp, Homo sapien
ttctgaagttgcaaatgtagttaaa

SEQ ID NO: 5619115 - DNA, 25 bp, Homo sapien
ttgaattggcttttgcaaggcgcac

SEQ ID NO: 5619116 - DNA, 25 bp, Homo sapien
ttcacttgtaacccaccgccacggc

SEQ ID NO: 5619117 - DNA, 25 bp, Homo sapien
tgcaaggcgcacgtcttgtatcatt

SEQ ID NO: 5619118 - DNA, 25 bp, Homo sapien
tgcttcacaagaggtgctgaagacc

SEQ ID NO: 5619119 - DNA, 25 bp, Homo sapien
ctttccctgccgctgccgagttgcg

SEQ ID NO: 5619120 - DNA, 25 bp, Homo sapien
ggatggcacgtgaacttgtcttgac

SEQ ID NO: 5619121 - DNA, 25 bp, Homo sapien
ttgacttgtgtgaagacttagatca

SEQ ID NO: 5619122 - DNA, 25 bp, Homo sapien
aaagcttgcttgaatgaaactgcct

SEQ ID NO: 5619123 - DNA, 25 bp, Homo sapien
caaaggcatgtaataatcgcttgtg

SEQ ID NO: 5619124 - DNA, 25 bp, Homo sapien
tgttaataatgaatggctccagttg

SEQ ID NO: 5619125 - DNA, 25 bp, Homo sapien
atgtttaaggatgttgactgctgcc

SEQ ID NO: 5619126 - DNA, 25 bp, Homo sapien
accttgttaaagagctagagaaatg

SEQ ID NO: 5619127 - DNA, 25 bp, Homo sapien
gctctttagtggtgaggtaaaatgc

SEQ ID NO: 5619128 - DNA, 25 bp, Homo sapien
agggatcaacagggttccttagcca

SEQ ID NO: 5619129 - DNA, 25 bp, Homo sapien
ctgcaattagcatggtggattttac

SEQ ID NO: 5619130 - DNA, 25 bp, Homo sapien
atagccactagtttcaaaggtgctc

SEQ ID NO: 5619131 - DNA, 25 bp, Homo sapien
acttaatctgacttacgaaacagtc

SEQ ID NO: 5619132 - DNA, 25 bp, Homo sapien
ttcagctgaatgaaccaacagaaga

SEQ ID NO: 5619133 - DNA, 25 bp, Homo sapien
aaagacttcagctgaatgaaccaac

SEQ ID NO: 5619134 - DNA, 25 bp, Homo sapien
aaacataagtaggctcagtatcctt

SEQ ID NO: 5619135 - DNA, 25 bp, Homo sapien
tttaaacataagtaggctcagtatc

SEQ ID NO: 5619136 - DNA, 25 bp, Homo sapien
tggcagaagaagactagtagtatca

SEQ ID NO: 5619137 - DNA, 25 bp, Homo sapien
gatttttaaacataagtaggctcag

SEQ ID NO: 5619138 - DNA, 25 bp, Homo sapien
gttcccataaaccatgactgacagg

SEQ ID NO: 5619139 - DNA, 25 bp, Homo sapien
aacctgcctttacttaatctgactt

SEQ ID NO: 5619140 - DNA, 25 bp, Homo sapien
aatgaaccaacagaagaatgacgaa

SEQ ID NO: 5619141 - DNA, 25 bp, Homo sapien
tagtagtatcaaagacttcagctga

SEQ ID NO: 5619142 - DNA, 25 bp, Homo sapien
aacgcggttgttaaggctgaaatat

SEQ ID NO: 5619143 - DNA, 25 bp, Homo sapien
tgaaaaagagtaagtcgatatgaca

SEQ ID NO: 5619144 - DNA, 25 bp, Homo sapien
acttagtaagacatggaaaaattaa

SEQ ID NO: 5619145 - DNA, 25 bp, Homo sapien
gcaagttgcactgatagcgtgtatc

SEQ ID NO: 5619146 - DNA, 25 bp, Homo sapien
tagacctggtctaggcatgcaaata

SEQ ID NO: 5619147 - DNA, 25 bp, Homo sapien
atagaggtctattaggagagctgac

SEQ ID NO: 5619148 - DNA, 25 bp, Homo sapien
atgaaaagaagcaagttgcactgat

SEQ ID NO: 5619149 - DNA, 25 bp, Homo sapien
tggatgtgcataaattactgaaccc

SEQ ID NO: 5619150 - DNA, 25 bp, Homo sapien
ctgatgtgaaatgatgtgcaatagt

SEQ ID NO: 5619151 - DNA, 25 bp, Homo sapien
tatttcagaatgagacatagaggtc

SEQ ID NO: 5619152 - DNA, 25 bp, Homo sapien
ttgcatgtacggtaatttcgatcac

SEQ ID NO: 5619153 - DNA, 25 bp, Homo sapien
ggcagggtgaccaccaaacctcttc

SEQ ID NO: 5619154 - DNA, 25 bp, Homo sapien
caggcaagccatcttgacaagcaga

SEQ ID NO: 5619155 - DNA, 25 bp, Homo sapien
acagaaatttagaaagggtgatgga

SEQ ID NO: 5619156 - DNA, 25 bp, Homo sapien
taaccaaggaagacagaaatttaga

SEQ ID NO: 5619157 - DNA, 25 bp, Homo sapien
accatggaccaggggcctatttata

SEQ ID NO: 5619158 - DNA, 25 bp, Homo sapien
gacaagcagaagtgttaaccaagga

SEQ ID NO: 5619159 - DNA, 25 bp, Homo sapien
tttatggtttagggaccagctatgg

SEQ ID NO: 5619160 - DNA, 25 bp, Homo sapien
atgagagagatgatgagtatcattt

SEQ ID NO: 5619161 - DNA, 25 bp, Homo sapien
gcaagtagatcccagtagtcccaag

SEQ ID NO: 5619162 - DNA, 25 bp, Homo sapien
caggggcctatttataacaggaatg

SEQ ID NO: 5619163 - DNA, 25 bp, Homo sapien
gaatcttggagaaatcatatataac

SEQ ID NO: 5619164 - DNA, 25 bp, Homo sapien
ttggaccagagtatcacatgcggaa

SEQ ID NO: 5619165 - DNA, 25 bp, Homo sapien
agggaagcacctctgagacgatatt

SEQ ID NO: 5619166 - DNA, 25 bp, Homo sapien
aacaggtgttggcaatcatggagtt

SEQ ID NO: 5619167 - DNA, 25 bp, Homo sapien
ccgagttttcaagggaagcacctct

SEQ ID NO: 5619168 - DNA, 25 bp, Homo sapien
aagagcaagaacagagttccaaggt

SEQ ID NO: 5619169 - DNA, 25 bp, Homo sapien
agtaactatggaaacagcaccgagt

SEQ ID NO: 5619170 - DNA, 25 bp, Homo sapien
gaagacaaccaaacttagagtgatc

SEQ ID NO: 5619171 - DNA, 25 bp, Homo sapien
ttagagtgatcaaatagagtaacta

SEQ ID NO: 5619172 - DNA, 25 bp, Homo sapien
tatcacatgcggaatgaagagcaag

SEQ ID NO: 5619173 - DNA, 25 bp, Homo sapien
aatcatggagtttacgttaggaggg

SEQ ID NO: 5619174 - DNA, 25 bp, Homo sapien
aagaaggcaagaaagtgtagtcttg

SEQ ID NO: 5619175 - DNA, 25 bp, Homo sapien
cagatgtctactataaaggtgtgag

SEQ ID NO: 5619176 - DNA, 25 bp, Homo sapien
atggtcacagaagatagactttatc

SEQ ID NO: 5619177 - DNA, 25 bp, Homo sapien
aaactctctaaggaaacatatggtc

SEQ ID NO: 5619178 - DNA, 25 bp, Homo sapien
attaacagactggtgagagtccttt

SEQ ID NO: 5619179 - DNA, 25 bp, Homo sapien
agatgagggtcaatgtctaaaactc

SEQ ID NO: 5619180 - DNA, 25 bp, Homo sapien
aaggaaacatatggtcacagaagat

SEQ ID NO: 5619181 - DNA, 25 bp, Homo sapien
tggatcacttgagattcaaccccaa

SEQ ID NO: 5619182 - DNA, 25 bp, Homo sapien
tgtttacttaggaagacagaaaagc

SEQ ID NO: 5619183 - DNA, 25 bp, Homo sapien
aaaaaaagtaacaccaatgcctgcc

SEQ ID NO: 5619184 - DNA, 25 bp, Homo sapien
ccaatgcctgccttagaagtttacc

SEQ ID NO: 5619185 - DNA, 25 bp, Homo sapien
taggaagacagaaaagcctattttc

SEQ ID NO: 5619186 - DNA, 25 bp, Homo sapien
gattgaactcttgaagagactctgt

SEQ ID NO: 5619187 - DNA, 25 bp, Homo sapien
acagagtctcttcaagagttcaatc

SEQ ID NO: 5619188 - DNA, 25 bp, Homo sapien
taaagagatgaacaagacctcagca

SEQ ID NO: 5619189 - DNA, 25 bp, Homo sapien
gacagacatcgattcactaattaca

SEQ ID NO: 5619190 - DNA, 25 bp, Homo sapien
ctagcccaaccaataaaggcttcct

SEQ ID NO: 5619191 - DNA, 25 bp, Homo sapien
ggcagggacatagaagtctatcttc

SEQ ID NO: 5619192 - DNA, 25 bp, Homo sapien
ttccacagctagcccagcctagccc

SEQ ID NO: 5619193 - DNA, 25 bp, Homo sapien
ctcagcatctacagacggtgacaga

SEQ ID NO: 5619194 - DNA, 25 bp, Homo sapien
gaacaagacctcagcatctacagac

SEQ ID NO: 5619195 - DNA, 25 bp, Homo sapien
aagagatgaacaagacctcagcatc

SEQ ID NO: 5619196 - DNA, 25 bp, Homo sapien
gacctcagcatctacagacggtgac

SEQ ID NO: 5619197 - DNA, 25 bp, Homo sapien
agacggtgacagacatcgattcact

SEQ ID NO: 5619198 - DNA, 25 bp, Homo sapien
cccagcctagcccaaccaataaagg

SEQ ID NO: 5619199 - DNA, 25 bp, Homo sapien
ggaagtggaattactgtagaaatta

SEQ ID NO: 5619200 - DNA, 25 bp, Homo sapien
ttgctagtgcatggtatagaattac

SEQ ID NO: 5619201 - DNA, 25 bp, Homo sapien
ctgccctggctcaaatcatggcccc

SEQ ID NO: 5619202 - DNA, 25 bp, Homo sapien
caaattcagagtcagactgccctgg

SEQ ID NO: 5619203 - DNA, 25 bp, Homo sapien
atggccccacgatgtgtgaaacttg

SEQ ID NO: 5619204 - DNA, 25 bp, Homo sapien
atcagatctcaacaaacagagcgaa

SEQ ID NO: 5619205 - DNA, 25 bp, Homo sapien
ttagaaagaacaatcctaggcattt

SEQ ID NO: 5619206 - DNA, 25 bp, Homo sapien
atttcttgagcagaagaaagggaag

SEQ ID NO: 5619207 - DNA, 25 bp, Homo sapien
aaacagagcgaaattggcaattgtg

SEQ ID NO: 5619208 - DNA, 25 bp, Homo sapien
tttgtattgggaaatgttgagaatt

SEQ ID NO: 5619209 - DNA, 25 bp, Homo sapien
aaatttgaaaccaagatcagatctc

SEQ ID NO: 5619210 - DNA, 25 bp, Homo sapien
attctaagtagcatgatgaaatctt

SEQ ID NO: 5619211 - DNA, 25 bp, Homo sapien
accttagtacccccgcatccacaat

SEQ ID NO: 5619212 - DNA, 25 bp, Homo sapien
catggagatctcaacagacacccaa

SEQ ID NO: 5619213 - DNA, 25 bp, Homo sapien
gaggataaggcagaactacaatatt

SEQ ID NO: 5619214 - DNA, 25 bp, Homo sapien
acacactgaccacttagtagccctc

SEQ ID NO: 5619215 - DNA, 25 bp, Homo sapien
gttctgccctggatgtgaatcaact

SEQ ID NO: 5619216 - DNA, 25 bp, Homo sapien
agtagccctctaggttatcggattg

SEQ ID NO: 5619217 - DNA, 25 bp, Homo sapien
aattcataaatttgcaggccattct

SEQ ID NO: 5619218 - DNA, 25 bp, Homo sapien
tatcggattgaaggaatatagtgta

SEQ ID NO: 5619219 - DNA, 25 bp, Homo sapien
taggaacaaccaagatgacagtttt

SEQ ID NO: 5619220 - DNA, 25 bp, Homo sapien
ttctaaaatgcaggaaaccttagga

SEQ ID NO: 5619221 - DNA, 25 bp, Homo sapien
aaaaccattggaggaaaatatattg

SEQ ID NO: 5619222 - DNA, 25 bp, Homo sapien
ataacaaaggcttaagtggaaattc

SEQ ID NO: 5619223 - DNA, 25 bp, Homo sapien
tctagaagtgagaacgttttcaaaa

SEQ ID NO: 5619224 - DNA, 25 bp, Homo sapien
agaaaaaggcaatcaatagagactg

SEQ ID NO: 5619225 - DNA, 25 bp, Homo sapien
caatagagactgacctcgagatgac

SEQ ID NO: 5619226 - DNA, 25 bp, Homo sapien
cagatgttggaattagtgtggattt

SEQ ID NO: 5619227 - DNA, 25 bp, Homo sapien
caaaattttcagaggaacagaacaa

SEQ ID NO: 5619228 - DNA, 25 bp, Homo sapien
aaatcaagcacaatacaacaaatac

SEQ ID NO: 5619229 - DNA, 25 bp, Homo sapien
gaggtggtaaagagtcaatgaacct

SEQ ID NO: 5619230 - DNA, 25 bp, Homo sapien
cctcgagatgacccagatgttggaa

SEQ ID NO: 5619231 - DNA, 25 bp, Homo sapien
aatcagttgcgttcaggagcagctt

SEQ ID NO: 5619232 - DNA, 25 bp, Homo sapien
aagatggtgaagagattgtcccttc

SEQ ID NO: 5619233 - DNA, 25 bp, Homo sapien
caagaccaaggcaaatgttactgtt

SEQ ID NO: 5619234 - DNA, 25 bp, Homo sapien
gtggagaaggatgagattactttga

SEQ ID NO: 5619235 - DNA, 25 bp, Homo sapien
tactttgaagtgtgaagtgagcaaa

SEQ ID NO: 5619236 - DNA, 25 bp, Homo sapien
tgagggtgagttgctcaacaatgta

SEQ ID NO: 5619237 - DNA, 25 bp, Homo sapien
ctctgtacggaataaaagtgttggt

SEQ ID NO: 5619238 - DNA, 25 bp, Homo sapien
ttacagaggccgatccctacttcac

SEQ ID NO: 5619239 - DNA, 25 bp, Homo sapien
aaagtggaaaagcctctgtacggaa

SEQ ID NO: 5619240 - DNA, 25 bp, Homo sapien
gtgactgtggcacagacaagaccaa

SEQ ID NO: 5619241 - DNA, 25 bp, Homo sapien
gagcaaagatgtaccagtgaaatgg

SEQ ID NO: 5619242 - DNA, 25 bp, Homo sapien
aaagataaaggcgaatatgtgtgtg

SEQ ID NO: 5619243 - DNA, 25 bp, Homo sapien
catgtgtgttagacttgaaagattc

SEQ ID NO: 5619244 - DNA, 25 bp, Homo sapien
caaattaaaggaaaaaactgatgca

SEQ ID NO: 5619245 - DNA, 25 bp, Homo sapien
ctgatacagtaaagtctagttttgc

SEQ ID NO: 5619246 - DNA, 25 bp, Homo sapien
actgtttgtgtacttcaatcgtagt

SEQ ID NO: 5619247 - DNA, 25 bp, Homo sapien
caagatttataatgaagggaatgtt

SEQ ID NO: 5619248 - DNA, 25 bp, Homo sapien
gcccaaagtagaacatttgatactg

SEQ ID NO: 5619249 - DNA, 25 bp, Homo sapien
tgaaagattcccaagaattaaattc

SEQ ID NO: 5619250 - DNA, 25 bp, Homo sapien
ctagttttgcccaaagtagaacatt

SEQ ID NO: 5619251 - DNA, 25 bp, Homo sapien
tgaagggaatgttgcatatagttac

SEQ ID NO: 5619252 - DNA, 25 bp, Homo sapien
aaaagagagaaaactaaaacatgat

SEQ ID NO: 5619253 - DNA, 25 bp, Homo sapien
aaaaactgatgcaaatattctgtat

SEQ ID NO: 5619254 - DNA, 25 bp, Homo sapien
acacgcattgctgaaaatctaagac

SEQ ID NO: 5619255 - DNA, 25 bp, Homo sapien
gattcaggctatctgcctcccccac

SEQ ID NO: 5619256 - DNA, 25 bp, Homo sapien
ttccaggcactgtgaatgccaaaat

SEQ ID NO: 5619257 - DNA, 25 bp, Homo sapien
gtgaatgccaaaatgagtggaatcc

SEQ ID NO: 5619258 - DNA, 25 bp, Homo sapien
attgacacacttgagagggaaagtc

SEQ ID NO: 5619259 - DNA, 25 bp, Homo sapien
ccaaaatgagtggaatcccaaacac

SEQ ID NO: 5619260 - DNA, 25 bp, Homo sapien
aggcaaaactcaagagggatatgat

SEQ ID NO: 5619261 - DNA, 25 bp, Homo sapien
agcccagaaaatcccctggattcag

SEQ ID NO: 5619262 - DNA, 25 bp, Homo sapien
tcacaatggacattttaagaagccc

SEQ ID NO: 5619263 - DNA, 25 bp, Homo sapien
ggaaagtccaggcaaaactcaagag

SEQ ID NO: 5619264 - DNA, 25 bp, Homo sapien
cccccactagcttgaggctggggcc

SEQ ID NO: 5619265 - DNA, 25 bp, Homo sapien
gtggggaacccctttctaagcatga

SEQ ID NO: 5619266 - DNA, 25 bp, Homo sapien
acagtataagggaaacaggttaata

SEQ ID NO: 5619267 - DNA, 25 bp, Homo sapien
tcctgaacatacgagaagcttttac

SEQ ID NO: 5619268 - DNA, 25 bp, Homo sapien
taacgaatgataagacctaaaggaa

SEQ ID NO: 5619269 - DNA, 25 bp, Homo sapien
tacaaaaagaaggtcaacatcacta

SEQ ID NO: 5619270 - DNA, 25 bp, Homo sapien
agaaatatcaacaaaggcccaaaca

SEQ ID NO: 5619271 - DNA, 25 bp, Homo sapien
attttagtaattatggagtggggaa

SEQ ID NO: 5619272 - DNA, 25 bp, Homo sapien
tgatgatgaacagtataagggaaac

SEQ ID NO: 5619273 - DNA, 25 bp, Homo sapien
ctgcccccggcatgaataaatattt

SEQ ID NO: 5619274 - DNA, 25 bp, Homo sapien
ctcaggttgccgagactgatgatga

SEQ ID NO: 5619275 - DNA, 25 bp, Homo sapien
tgtaattggacacagaagaaatatc

SEQ ID NO: 5619276 - DNA, 25 bp, Homo sapien
gaaaatgacattagccctatgaaaa

SEQ ID NO: 5619277 - DNA, 25 bp, Homo sapien
tatctgagtcaaagtactggaagga

SEQ ID NO: 5619278 - DNA, 25 bp, Homo sapien
tgacactatgccaatcgattattac

SEQ ID NO: 5619279 - DNA, 25 bp, Homo sapien
atcccatcacgccaccaggttagct

SEQ ID NO: 5619280 - DNA, 25 bp, Homo sapien
ggaaaaatgtacttcagcacttgtc

SEQ ID NO: 5619281 - DNA, 25 bp, Homo sapien
accacatccagcccacagtggcttt

SEQ ID NO: 5619282 - DNA, 25 bp, Homo sapien
cagaggtgcatcccatcacgccacc

SEQ ID NO: 5619283 - DNA, 25 bp, Homo sapien
ctccaacctcgaactccttgaactc

SEQ ID NO: 5619284 - DNA, 25 bp, Homo sapien
ccaaaagtctgctcactacaaactc

SEQ ID NO: 5619285 - DNA, 25 bp, Homo sapien
ctttggcatccaaaagcgctgggat

SEQ ID NO: 5619286 - DNA, 25 bp, Homo sapien
tatgaagtggtatctgagtcaaagt

SEQ ID NO: 5619287 - DNA, 25 bp, Homo sapien
atgtgcctgataattagagggttca

SEQ ID NO: 5619288 - DNA, 25 bp, Homo sapien
cttgagcttacggtagacataagtt

SEQ ID NO: 5619289 - DNA, 25 bp, Homo sapien
agtggtgaagtagattccctgctgg

SEQ ID NO: 5619290 - DNA, 25 bp, Homo sapien
tcagtgtgttcagttacagtggtga

SEQ ID NO: 5619291 - DNA, 25 bp, Homo sapien
gagggttcaggataagttttgcaca

SEQ ID NO: 5619292 - DNA, 25 bp, Homo sapien
gcctcaggacaagccagagttgtca

SEQ ID NO: 5619293 - DNA, 25 bp, Homo sapien
tccagaatgagagtcatgcaagaaa

SEQ ID NO: 5619294 - DNA, 25 bp, Homo sapien
gggaacaaaggattctgtgtgccat

SEQ ID NO: 5619295 - DNA, 25 bp, Homo sapien
ggggtgatttgaggtgagtttcact

SEQ ID NO: 5619296 - DNA, 25 bp, Homo sapien
tctgtggagtcctagaatgttcttc

SEQ ID NO: 5619297 - DNA, 25 bp, Homo sapien
ttgtcttcattggcaggggtgattt

SEQ ID NO: 5619298 - DNA, 25 bp, Homo sapien
agtagcaaaacgtcaatgtgtgtat

SEQ ID NO: 5619299 - DNA, 25 bp, Homo sapien
agaatgtgtgctaaagtaaggaact

SEQ ID NO: 5619300 - DNA, 25 bp, Homo sapien
cagaagctggcatactgcaggccag

SEQ ID NO: 5619301 - DNA, 25 bp, Homo sapien
aatgtgagcttcaaatgtgagcccc

SEQ ID NO: 5619302 - DNA, 25 bp, Homo sapien
gtgggacaacacatcctaggcagtt

SEQ ID NO: 5619303 - DNA, 25 bp, Homo sapien
ggcagttcagtatgactagggcaca

SEQ ID NO: 5619304 - DNA, 25 bp, Homo sapien
ggggtgataaacagatgcttctcca

SEQ ID NO: 5619305 - DNA, 25 bp, Homo sapien
caaatgtgagccccgtatgtaaagt

SEQ ID NO: 5619306 - DNA, 25 bp, Homo sapien
tccagtcacagtgaagagcttacac

SEQ ID NO: 5619307 - DNA, 25 bp, Homo sapien
ggtgactaatggctatgatgtggga

SEQ ID NO: 5619308 - DNA, 25 bp, Homo sapien
gcccaatgctgccccacgcaaatac

SEQ ID NO: 5619309 - DNA, 25 bp, Homo sapien
gccctgttgagtaaaataagcaagc

SEQ ID NO: 5619310 - DNA, 25 bp, Homo sapien
tccaataagggtactgttgtcaggc

SEQ ID NO: 5619311 - DNA, 25 bp, Homo sapien
ggggagagcttttccactgccttcc

SEQ ID NO: 5619312 - DNA, 25 bp, Homo sapien
tgattagttgtgtgtctgcctgaaa

SEQ ID NO: 5619313 - DNA, 25 bp, Homo sapien
ctgaaaccatttagtagagcacttt

SEQ ID NO: 5619314 - DNA, 25 bp, Homo sapien
ttatgtggaaaaacttggcttgtct

SEQ ID NO: 5619315 - DNA, 25 bp, Homo sapien
ctgcaagcctaaggaagaaaaagag

SEQ ID NO: 5619316 - DNA, 25 bp, Homo sapien
ttaaaagcagcgatccatcagcaac

SEQ ID NO: 5619317 - DNA, 25 bp, Homo sapien
agtcagcaagcagtctgcaagccta

SEQ ID NO: 5619318 - DNA, 25 bp, Homo sapien
aaacagaatcaagtcagcaagcagt

SEQ ID NO: 5619319 - DNA, 25 bp, Homo sapien
tgtctgccatctaacaagccctgtt

SEQ ID NO: 5619320 - DNA, 25 bp, Homo sapien
gtgtacaccaggtaagtagagcaag

SEQ ID NO: 5619321 - DNA, 25 bp, Homo sapien
cagaggagcagcttgaccctcaact

SEQ ID NO: 5619322 - DNA, 25 bp, Homo sapien
ccctcaactgtcaggggagtggttt

SEQ ID NO: 5619323 - DNA, 25 bp, Homo sapien
atcctggaatggttagtgaacaaat

SEQ ID NO: 5619324 - DNA, 25 bp, Homo sapien
gctatcatcagaaggaagtgctttt

SEQ ID NO: 5619325 - DNA, 25 bp, Homo sapien
gagttgacttgatatgaaggaaaga

SEQ ID NO: 5619326 - DNA, 25 bp, Homo sapien
tttggtcacaaattcagtcagagga

SEQ ID NO: 5619327 - DNA, 25 bp, Homo sapien
aagtagagcaagcttgagttgactt

SEQ ID NO: 5619328 - DNA, 25 bp, Homo sapien
atgccctaggtgacatccctggttc

SEQ ID NO: 5619329 - DNA, 25 bp, Homo sapien
tataggacacttgaaggcttccaga

SEQ ID NO: 5619330 - DNA, 25 bp, Homo sapien
ataaaatgagttcacgtcagggctg

SEQ ID NO: 5619331 - DNA, 25 bp, Homo sapien
cgccaattgactcagtacaagtgtc

SEQ ID NO: 5619332 - DNA, 25 bp, Homo sapien
gttcaccatcagccattagggaaat

SEQ ID NO: 5619333 - DNA, 25 bp, Homo sapien
agtgtctagtcagagaatataggga

SEQ ID NO: 5619334 - DNA, 25 bp, Homo sapien
tatgcagaccaattggaattacctt

SEQ ID NO: 5619335 - DNA, 25 bp, Homo sapien
tggcatgggtagaaacttccagact

SEQ ID NO: 5619336 - DNA, 25 bp, Homo sapien
gtgcttttagacagacacactcgcc

SEQ ID NO: 5619337 - DNA, 25 bp, Homo sapien
ccaagtgctgataaatatgcagacc

SEQ ID NO: 5619338 - DNA, 25 bp, Homo sapien
aaagacatacagatgacagaaatgc

SEQ ID NO: 5619339 - DNA, 25 bp, Homo sapien
cagtacacacctatcagaatggcta

SEQ ID NO: 5619340 - DNA, 25 bp, Homo sapien
ataagaaacagacaataccaagtgc

SEQ ID NO: 5619341 - DNA, 25 bp, Homo sapien
tgacagaaatgcacatgaaaagatg

SEQ ID NO: 5619342 - DNA, 25 bp, Homo sapien
aggggagtggctattaagatttcac

SEQ ID NO: 5619343 - DNA, 25 bp, Homo sapien
gttatctatgaggtagcaggatcta

SEQ ID NO: 5619344 - DNA, 25 bp, Homo sapien
tctgtgtgcaccttgggattccatg

SEQ ID NO: 5619345 - DNA, 25 bp, Homo sapien
tacaatttggattctgggcacagtt

SEQ ID NO: 5619346 - DNA, 25 bp, Homo sapien
tgggtggaattatcttagccaagcc

SEQ ID NO: 5619347 - DNA, 25 bp, Homo sapien
gcagcagctttgcccaggcattgac

SEQ ID NO: 5619348 - DNA, 25 bp, Homo sapien
tagcaggatctaccagcgtactttt

SEQ ID NO: 5619349 - DNA, 25 bp, Homo sapien
ctgggcacagttggccttagacttc

SEQ ID NO: 5619350 - DNA, 25 bp, Homo sapien
ttagccaagccagctctgtgtgcac

SEQ ID NO: 5619351 - DNA, 25 bp, Homo sapien
tgtttattcactagggagattccac

SEQ ID NO: 5619352 - DNA, 25 bp, Homo sapien
gagattccactctgggcagcagctt

SEQ ID NO: 5619353 - DNA, 25 bp, Homo sapien
cctagctggggatctaatgctccat

SEQ ID NO: 5619354 - DNA, 25 bp, Homo sapien
ttgctctgatgcttcaaccagctcc

SEQ ID NO: 5619355 - DNA, 25 bp, Homo sapien
tgaactgtagatagcatgtgacttg

SEQ ID NO: 5619356 - DNA, 25 bp, Homo sapien
ggataaacatcccgctggccaaatt

SEQ ID NO: 5619357 - DNA, 25 bp, Homo sapien
aataagaaggacaatctaaatagta

SEQ ID NO: 5619358 - DNA, 25 bp, Homo sapien
gtaaccacaaccatggaggtaatgc

SEQ ID NO: 5619359 - DNA, 25 bp, Homo sapien
catggaggtaatgcattcgtgcttt

SEQ ID NO: 5619360 - DNA, 25 bp, Homo sapien
gtctcccagcaatggttgacggtct

SEQ ID NO: 5619361 - DNA, 25 bp, Homo sapien
ttgcacagtcattatgacagggttc

SEQ ID NO: 5619362 - DNA, 25 bp, Homo sapien
tgagagtttacaaaggtgttcatca

SEQ ID NO: 5619363 - DNA, 25 bp, Homo sapien
cccatcctagtgtctgtctcccagc

SEQ ID NO: 5619364 - DNA, 25 bp, Homo sapien
ggtaaatatttcactaagccagtac

SEQ ID NO: 5619365 - DNA, 25 bp, Homo sapien
gtaacaatccaagatacagttttac

SEQ ID NO: 5619366 - DNA, 25 bp, Homo sapien
gcaaacagaccacttgtaacaatcc

SEQ ID NO: 5619367 - DNA, 25 bp, Homo sapien
ctactggtaacttttatgcactgtc

SEQ ID NO: 5619368 - DNA, 25 bp, Homo sapien
caattcaaccatcagtagcctctac

SEQ ID NO: 5619369 - DNA, 25 bp, Homo sapien
atcaagtatgacctctactggtaac

SEQ ID NO: 5619370 - DNA, 25 bp, Homo sapien
agaggatatgaaaatattaatcaag

SEQ ID NO: 5619371 - DNA, 25 bp, Homo sapien
gcgacccagcccagctcagtatggt

SEQ ID NO: 5619372 - DNA, 25 bp, Homo sapien
acacagtagttggtaattcacagaa

SEQ ID NO: 5619373 - DNA, 25 bp, Homo sapien
tattgagctcctaccataaagacac

SEQ ID NO: 5619374 - DNA, 25 bp, Homo sapien
agaaggtagcaaacagaccacttgt

SEQ ID NO: 5619375 - DNA, 25 bp, Homo sapien
tcctaaatggatggaaaacccctca

SEQ ID NO: 5619376 - DNA, 25 bp, Homo sapien
agctaccctttccattcacggcaac

SEQ ID NO: 5619377 - DNA, 25 bp, Homo sapien
gagaaggctgccaaattaaatgttt

SEQ ID NO: 5619378 - DNA, 25 bp, Homo sapien
aatgatcatcaacacgagtgtcttt

SEQ ID NO: 5619379 - DNA, 25 bp, Homo sapien
taaagtatctgcataaacccggtta

SEQ ID NO: 5619380 - DNA, 25 bp, Homo sapien
cttgcatgctttagaagccaaagga

SEQ ID NO: 5619381 - DNA, 25 bp, Homo sapien
aagtttattacagacctaaagtatc

SEQ ID NO: 5619382 - DNA, 25 bp, Homo sapien
tgctttagaagccaaaggaaacagc

SEQ ID NO: 5619383 - DNA, 25 bp, Homo sapien
attgtttcagttaagccaggcccat

SEQ ID NO: 5619384 - DNA, 25 bp, Homo sapien
aaaagcccctcaaatctgtgtttca

SEQ ID NO: 5619385 - DNA, 25 bp, Homo sapien
atctgtaagaactgttactgggaat

SEQ ID NO: 5619386 - DNA, 25 bp, Homo sapien
ccccaaaatgaactaggcagtctta

SEQ ID NO: 5619387 - DNA, 25 bp, Homo sapien
cctgaattacagagccctttgacct

SEQ ID NO: 5619388 - DNA, 25 bp, Homo sapien
acccggagccccagattctctgctt

SEQ ID NO: 5619389 - DNA, 25 bp, Homo sapien
gcttttagctcccagaccatccttc

SEQ ID NO: 5619390 - DNA, 25 bp, Homo sapien
tatctttgtagaagtggtgcaggtt

SEQ ID NO: 5619391 - DNA, 25 bp, Homo sapien
ttggggagaaatcattcctagtccc

SEQ ID NO: 5619392 - DNA, 25 bp, Homo sapien
ggcctcagccttagagagcctgctt

SEQ ID NO: 5619393 - DNA, 25 bp, Homo sapien
accattctttggatacccggagccc

SEQ ID NO: 5619394 - DNA, 25 bp, Homo sapien
cgccttagacatgcgcactgagggg

SEQ ID NO: 5619395 - DNA, 25 bp, Homo sapien
ctgtgttcccacctctagaccattc

SEQ ID NO: 5619396 - DNA, 25 bp, Homo sapien
ggtgcaggttctgggcttctccctt

SEQ ID NO: 5619397 - DNA, 25 bp, Homo sapien
agcaagttgccagaggtcatacagt

SEQ ID NO: 5619398 - DNA, 25 bp, Homo sapien
caaattagtaattagatgtcatctg

SEQ ID NO: 5619399 - DNA, 25 bp, Homo sapien
atcagcaccgtagtaaaaacaaaac

SEQ ID NO: 5619400 - DNA, 25 bp, Homo sapien
ataagcaatgctcaatgtacaaagt

SEQ ID NO: 5619401 - DNA, 25 bp, Homo sapien
gatgtcatctgaagtgcaataccac

SEQ ID NO: 5619402 - DNA, 25 bp, Homo sapien
ttacagatagtagacccagtgatat

SEQ ID NO: 5619403 - DNA, 25 bp, Homo sapien
gccagaggtcatacagtacaaatta

SEQ ID NO: 5619404 - DNA, 25 bp, Homo sapien
agtagacccagtgatatctgcagta

SEQ ID NO: 5619405 - DNA, 25 bp, Homo sapien
gtgatgatgagttaaggaatgaaat

SEQ ID NO: 5619406 - DNA, 25 bp, Homo sapien
ctgaataaaatggagcaagttgcca

SEQ ID NO: 5619407 - DNA, 25 bp, Homo sapien
ctcaatgtacaaagtaaaaacagaa

SEQ ID NO: 5619408 - DNA, 25 bp, Homo sapien
tttgctcctatgacaggcaagcata

SEQ ID NO: 5619409 - DNA, 25 bp, Homo sapien
aatcactcttaaataaggatctcct

SEQ ID NO: 5619410 - DNA, 25 bp, Homo sapien
ataaggatctcctaagtaaagggaa

SEQ ID NO: 5619411 - DNA, 25 bp, Homo sapien
tccctcacttgcagtaaaggttcac

SEQ ID NO: 5619412 - DNA, 25 bp, Homo sapien
ttgcagtaaaggttcacttaggctt

SEQ ID NO: 5619413 - DNA, 25 bp, Homo sapien
atgacaggcaagcataatcactctt

SEQ ID NO: 5619414 - DNA, 25 bp, Homo sapien
gatctcctaagtaaagggaaattca

SEQ ID NO: 5619415 - DNA, 25 bp, Homo sapien
caccatattggtctggctgttctcg

SEQ ID NO: 5619416 - DNA, 25 bp, Homo sapien
tctgcatgttccagtcagctttgtt

SEQ ID NO: 5619417 - DNA, 25 bp, Homo sapien
tttcctccgttgttctgcatgttcc

SEQ ID NO: 5619418 - DNA, 25 bp, Homo sapien
catgtgctcacattcagaagtaatt

SEQ ID NO: 5619419 - DNA, 25 bp, Homo sapien
tatctacatacattacgacacacac

SEQ ID NO: 5619420 - DNA, 25 bp, Homo sapien
attacgacacacacatacacaattg

SEQ ID NO: 5619421 - DNA, 25 bp, Homo sapien
aattctagtttctcaaggatatttc

SEQ ID NO: 5619422 - DNA, 25 bp, Homo sapien
aaaaagattaccaggattaacatac

SEQ ID NO: 5619423 - DNA, 25 bp, Homo sapien
ttctacctaaattgtaaaatgttca

SEQ ID NO: 5619424 - DNA, 25 bp, Homo sapien
tttgttacagatgtgtatgcacgct

SEQ ID NO: 5619425 - DNA, 25 bp, Homo sapien
gtctatatagacaaatacgtcttgc

SEQ ID NO: 5619426 - DNA, 25 bp, Homo sapien
ttgattcaaagtgcaaacaaggctt

SEQ ID NO: 5619427 - DNA, 25 bp, Homo sapien
caaggatatttctatgaaaaattcc

SEQ ID NO: 5619428 - DNA, 25 bp, Homo sapien
aacaaggcttttaatacagaaattc

SEQ ID NO: 5619429 - DNA, 25 bp, Homo sapien
tgtgtatgcacgctaatatataatc

SEQ ID NO: 5619430 - DNA, 25 bp, Homo sapien
ttcttgcctgacaagcataacaatc

SEQ ID NO: 5619431 - DNA, 25 bp, Homo sapien
ccgctcccggcctttgcctgatcat

SEQ ID NO: 5619432 - DNA, 25 bp, Homo sapien
atgttacctgtaaatagaaactttc

SEQ ID NO: 5619433 - DNA, 25 bp, Homo sapien
tagtaatgaggactccaaatgtttt

SEQ ID NO: 5619434 - DNA, 25 bp, Homo sapien
ccggcctttgcctgatcatagatcc

SEQ ID NO: 5619435 - DNA, 25 bp, Homo sapien
atccagaaaacttgctgtactctta

SEQ ID NO: 5619436 - DNA, 25 bp, Homo sapien
gcctgatcatagatccagaaaactt

SEQ ID NO: 5619437 - DNA, 25 bp, Homo sapien
caggctggtctcgaattcccaacct

SEQ ID NO: 5619438 - DNA, 25 bp, Homo sapien
ttctctattagtaatgaggactcca

SEQ ID NO: 5619439 - DNA, 25 bp, Homo sapien
gcctgacaagcataacaatcatgtt

SEQ ID NO: 5619440 - DNA, 25 bp, Homo sapien
cgaattcccaacctcaagtgatctg

SEQ ID NO: 5619441 - DNA, 25 bp, Homo sapien
aacataggatgcccagctaagcttg

SEQ ID NO: 5619442 - DNA, 25 bp, Homo sapien
acagtgttctgcagtaagatgtctg

SEQ ID NO: 5619443 - DNA, 25 bp, Homo sapien
tagccagttaaaacataggatgccc

SEQ ID NO: 5619444 - DNA, 25 bp, Homo sapien
ccctgcagtatcacacactggctgc

SEQ ID NO: 5619445 - DNA, 25 bp, Homo sapien
tgatccaagttgagagttccacgag

SEQ ID NO: 5619446 - DNA, 25 bp, Homo sapien
cgtccctgaaatgttgcagagagcc

SEQ ID NO: 5619447 - DNA, 25 bp, Homo sapien
gagagttccacgagttagccagtta

SEQ ID NO: 5619448 - DNA, 25 bp, Homo sapien
cataaggtactgaacgacgtccctg

SEQ ID NO: 5619449 - DNA, 25 bp, Homo sapien
aatcctgatagaagctgtaaaccac

SEQ ID NO: 5619450 - DNA, 25 bp, Homo sapien
ctgaagataaggtgttgtaacagtc

SEQ ID NO: 5619451 - DNA, 25 bp, Homo sapien
tgtaacagtcctgttgaggggagag

SEQ ID NO: 5619452 - DNA, 25 bp, Homo sapien
gggtacaagtagagaatgtctttac

SEQ ID NO: 5619453 - DNA, 25 bp, Homo sapien
actgtgctgatgttggtaactgctc

SEQ ID NO: 5619454 - DNA, 25 bp, Homo sapien
tgggtatcctcattgacacagtgcc

SEQ ID NO: 5619455 - DNA, 25 bp, Homo sapien
ctgaactccacagagggtacaagta

SEQ ID NO: 5619456 - DNA, 25 bp, Homo sapien
gctcagatgagatgccttgacaagc

SEQ ID NO: 5619457 - DNA, 25 bp, Homo sapien
tgcttttacaccaggggagtagaac

SEQ ID NO: 5619458 - DNA, 25 bp, Homo sapien
gtgtgatgcatcactgggcaagctg

SEQ ID NO: 5619459 - DNA, 25 bp, Homo sapien
cgtgggaaagacagtagattccatt

SEQ ID NO: 5619460 - DNA, 25 bp, Homo sapien
gggcagaccagccccactgtgctga

SEQ ID NO: 5619461 - DNA, 25 bp, Homo sapien
atgtcccactattgcggtgtgatgc

SEQ ID NO: 5619462 - DNA, 25 bp, Homo sapien
cctgatttatggaaagtctgaactc

SEQ ID NO: 5619463 - DNA, 25 bp, Homo sapien
agacattatgaagagcacttagatc

SEQ ID NO: 5619464 - DNA, 25 bp, Homo sapien
gtagcggtgcttgaattagatagag

SEQ ID NO: 5619465 - DNA, 25 bp, Homo sapien
gagatgccaagccagccagcttttc

SEQ ID NO: 5619466 - DNA, 25 bp, Homo sapien
gtggtggaatggtttgttcaagaca

SEQ ID NO: 5619467 - DNA, 25 bp, Homo sapien
agtaaaaacatgcagtggatgacgg

SEQ ID NO: 5619468 - DNA, 25 bp, Homo sapien
attcaatgactgtggtacccgtagc

SEQ ID NO: 5619469 - DNA, 25 bp, Homo sapien
cacttagatcaagatgggtaggagg

SEQ ID NO: 5619470 - DNA, 25 bp, Homo sapien
gatcgttggtgtaattgcaagggac

SEQ ID NO: 5619471 - DNA, 25 bp, Homo sapien
agctctctggagatttgatgcattc

SEQ ID NO: 5619472 - DNA, 25 bp, Homo sapien
gatgtttgggattcagagctctctg

SEQ ID NO: 5619473 - DNA, 25 bp, Homo sapien
ttgctacctccgggagacaatggac

SEQ ID NO: 5619474 - DNA, 25 bp, Homo sapien
ttcaagcaagcaacttcactaacat

SEQ ID NO: 5619475 - DNA, 25 bp, Homo sapien
aggatagaagccagactactgggtg

SEQ ID NO: 5619476 - DNA, 25 bp, Homo sapien
ctggcctggtaaatttcaagcaagc

SEQ ID NO: 5619477 - DNA, 25 bp, Homo sapien
cataagcctggcctggtaaatttca

SEQ ID NO: 5619478 - DNA, 25 bp, Homo sapien
aaacagtgtgctaggttcttcatac

SEQ ID NO: 5619479 - DNA, 25 bp, Homo sapien
tcactaacattgtcaggatagaagc

SEQ ID NO: 5619480 - DNA, 25 bp, Homo sapien
taacattgtcaggatagaagccaga

SEQ ID NO: 5619481 - DNA, 25 bp, Homo sapien
cattgtcaggatagaagccagacta

SEQ ID NO: 5619482 - DNA, 25 bp, Homo sapien
ttacagccataagcctggcctggta

SEQ ID NO: 5619483 - DNA, 25 bp, Homo sapien
agccagactactgggtgttgcaggg

SEQ ID NO: 5619484 - DNA, 25 bp, Homo sapien
aatgggtaacatttacagaaccctc

SEQ ID NO: 5619485 - DNA, 25 bp, Homo sapien
gttttccacaagctttcacaatatt

SEQ ID NO: 5619486 - DNA, 25 bp, Homo sapien
acactgtgatttgaaaacaacccag

SEQ ID NO: 5619487 - DNA, 25 bp, Homo sapien
atggttgaaattgaggttgtatgca

SEQ ID NO: 5619488 - DNA, 25 bp, Homo sapien
aagaaaagttttccacaagctttca

SEQ ID NO: 5619489 - DNA, 25 bp, Homo sapien
caccacactgtgatttgaaaacaac

SEQ ID NO: 5619490 - DNA, 25 bp, Homo sapien
tgaaattgaggttgtatgcaatgag

SEQ ID NO: 5619491 - DNA, 25 bp, Homo sapien
tgtattacataaacactcaactgct

SEQ ID NO: 5619492 - DNA, 25 bp, Homo sapien
tgtgatttgaaaacaacccagtgtt

SEQ ID NO: 5619493 - DNA, 25 bp, Homo sapien
attttcatttagttgtgcctcattg

SEQ ID NO: 5619494 - DNA, 25 bp, Homo sapien
ggcgtgaaccaatgcgcctggccaa

SEQ ID NO: 5619495 - DNA, 25 bp, Homo sapien
taatggttgaaattgaggttgtatg

SEQ ID NO: 5619496 - DNA, 25 bp, Homo sapien
cattcccatttaggggaagagaaag

SEQ ID NO: 5619497 - DNA, 25 bp, Homo sapien
taaagagcagcagctattaaacacc

SEQ ID NO: 5619498 - DNA, 25 bp, Homo sapien
taatggacatctgagacttatactc

SEQ ID NO: 5619499 - DNA, 25 bp, Homo sapien
ggaaatggccaagaagtccataaga

SEQ ID NO: 5619500 - DNA, 25 bp, Homo sapien
tctgatcaaactggataatgtaaat

SEQ ID NO: 5619501 - DNA, 25 bp, Homo sapien
tattagctgctggaaagtaataaat

SEQ ID NO: 5619502 - DNA, 25 bp, Homo sapien
tgaggtctacctacagtccattccc

SEQ ID NO: 5619503 - DNA, 25 bp, Homo sapien
tggttccagtggtaacataatggac

SEQ ID NO: 5619504 - DNA, 25 bp, Homo sapien
catttgacgtgaaaaagcagttttt

SEQ ID NO: 5619505 - DNA, 25 bp, Homo sapien
aagtccataagaagtggacagtgct

SEQ ID NO: 5619506 - DNA, 25 bp, Homo sapien
cttcagctagtccccttcagtttcc

SEQ ID NO: 5619507 - DNA, 25 bp, Homo sapien
aggggcaccgtgtgcctcccagtga

SEQ ID NO: 5619508 - DNA, 25 bp, Homo sapien
cagaaggactcagtcagcaacagag

SEQ ID NO: 5619509 - DNA, 25 bp, Homo sapien
cagagagagacctcagctcctcaca

SEQ ID NO: 5619510 - DNA, 25 bp, Homo sapien
ctgagcctgcacccgtcccttccag

SEQ ID NO: 5619511 - DNA, 25 bp, Homo sapien
gatcgagtttcatgcctgctgcttc

SEQ ID NO: 5619512 - DNA, 25 bp, Homo sapien
tgcccaatattccacacgagtctgc

SEQ ID NO: 5619513 - DNA, 25 bp, Homo sapien
cacaaaacacagaccatgtgcccaa

SEQ ID NO: 5619514 - DNA, 25 bp, Homo sapien
gttcctgagtaaaagtgtctgtgtc

SEQ ID NO: 5619515 - DNA, 25 bp, Homo sapien
atttcctcgtgacagccaatggctg

SEQ ID NO: 5619516 - DNA, 25 bp, Homo sapien
cttccagacgccatccacagccttt

SEQ ID NO: 5619517 - DNA, 25 bp, Homo sapien
atgaccagcgagtaactgcgttcct

SEQ ID NO: 5619518 - DNA, 25 bp, Homo sapien
ataagcaggaaccaccatacctggc

SEQ ID NO: 5619519 - DNA, 25 bp, Homo sapien
atttttaagaggatgttctactaac

SEQ ID NO: 5619520 - DNA, 25 bp, Homo sapien
tccaaatttctactgctggcctcac

SEQ ID NO: 5619521 - DNA, 25 bp, Homo sapien
ttagaatgtcaaagattaaatttaa

SEQ ID NO: 5619522 - DNA, 25 bp, Homo sapien
ctttttcagtaccagcttcagctcc

SEQ ID NO: 5619523 - DNA, 25 bp, Homo sapien
tttgcagagctggaatcttgctatg

SEQ ID NO: 5619524 - DNA, 25 bp, Homo sapien
gcttgtttgttcttgctggctgcca

SEQ ID NO: 5619525 - DNA, 25 bp, Homo sapien
tctatcgctcaaatctggcttgttt

SEQ ID NO: 5619526 - DNA, 25 bp, Homo sapien
cctggcctgtgcaactcttaaatgt

SEQ ID NO: 5619527 - DNA, 25 bp, Homo sapien
tgctggctgccaatattcgtttaag

SEQ ID NO: 5619528 - DNA, 25 bp, Homo sapien
ataagaactgctgactctatcgctc

SEQ ID NO: 5619529 - DNA, 25 bp, Homo sapien
attatactctggaaacaggagtcct

SEQ ID NO: 5619530 - DNA, 25 bp, Homo sapien
tcctgttgacattctgtggtgggac

SEQ ID NO: 5619531 - DNA, 25 bp, Homo sapien
tactctggaaacaggagtcctggag

SEQ ID NO: 5619532 - DNA, 25 bp, Homo sapien
ggacactgacggccaatgaaatgcc

SEQ ID NO: 5619533 - DNA, 25 bp, Homo sapien
ataggcaggctaggaatcctgttga

SEQ ID NO: 5619534 - DNA, 25 bp, Homo sapien
ctgttgacattctgtggtgggacac

SEQ ID NO: 5619535 - DNA, 25 bp, Homo sapien
gtccagggttgggtttgactatgga

SEQ ID NO: 5619536 - DNA, 25 bp, Homo sapien
tgacggccaatgaaatgcccaaggc

SEQ ID NO: 5619537 - DNA, 25 bp, Homo sapien
gggtttgactatggatgagctttgt

SEQ ID NO: 5619538 - DNA, 25 bp, Homo sapien
gtcaatacaattatactctggaaac

SEQ ID NO: 5619539 - DNA, 25 bp, Homo sapien
ggcaggctaggaatcctgttgacat

SEQ ID NO: 5619540 - DNA, 25 bp, Homo sapien
tggactggatttactgaacttacac

SEQ ID NO: 5619541 - DNA, 25 bp, Homo sapien
ttttgagactaaataggcactatat

SEQ ID NO: 5619542 - DNA, 25 bp, Homo sapien
cagagggccctcaccactacaacaa

SEQ ID NO: 5619543 - DNA, 25 bp, Homo sapien
gaatcatgtatactcctccagcccc

SEQ ID NO: 5619544 - DNA, 25 bp, Homo sapien
tcagtttgaaaatgaggatgacaaa

SEQ ID NO: 5619545 - DNA, 25 bp, Homo sapien
ccccatgcccctgcaacagagggcc

SEQ ID NO: 5619546 - DNA, 25 bp, Homo sapien
tccagtggagaggttttccaaatga

SEQ ID NO: 5619547 - DNA, 25 bp, Homo sapien
ttagagacctttaagaacgccagta

SEQ ID NO: 5619548 - DNA, 25 bp, Homo sapien
tcagagatgaaacctctccagtgga

SEQ ID NO: 5619549 - DNA, 25 bp, Homo sapien
ctttaagaacgccagtaagaagaaa

SEQ ID NO: 5619550 - DNA, 25 bp, Homo sapien
catgtgatgagaatttggactggat

SEQ ID NO: 5619551 - DNA, 25 bp, Homo sapien
gacccacagaacactacggcactta

SEQ ID NO: 5619552 - DNA, 25 bp, Homo sapien
cttcctggggtgccacacttatcac

SEQ ID NO: 5619553 - DNA, 25 bp, Homo sapien
aaaacaggtgaaatacaaataagct

SEQ ID NO: 5619554 - DNA, 25 bp, Homo sapien
acatagcaccttgatggggtccaca

SEQ ID NO: 5619555 - DNA, 25 bp, Homo sapien
tctactgggcccaccaccaccccaa

SEQ ID NO: 5619556 - DNA, 25 bp, Homo sapien
ttatcactggcagacaccagagacc

SEQ ID NO: 5619557 - DNA, 25 bp, Homo sapien
caaataagctagaaggagcaaaatc

SEQ ID NO: 5619558 - DNA, 25 bp, Homo sapien
atgataacgtagcaaagcaggagta

SEQ ID NO: 5619559 - DNA, 25 bp, Homo sapien
acataggtaaccagggacattgatc

SEQ ID NO: 5619560 - DNA, 25 bp, Homo sapien
atacagttgctgaaacagagtgtaa

SEQ ID NO: 5619561 - DNA, 25 bp, Homo sapien
ccccaagcatggccctcacatagca

SEQ ID NO: 5619562 - DNA, 25 bp, Homo sapien
aacagtccaacatctcattctagca

SEQ ID NO: 5619563 - DNA, 25 bp, Homo sapien
aaatatcagaagaatactagaacat

SEQ ID NO: 5619564 - DNA, 25 bp, Homo sapien
aaagagaggaaccacattactggga

SEQ ID NO: 5619565 - DNA, 25 bp, Homo sapien
tgctaaatctggccactatgttctt

SEQ ID NO: 5619566 - DNA, 25 bp, Homo sapien
acctacagaaataaagagaggaacc

SEQ ID NO: 5619567 - DNA, 25 bp, Homo sapien
tctctggaaagatgaaaaagaatca

SEQ ID NO: 5619568 - DNA, 25 bp, Homo sapien
attgcataatatatctctggaaaga

SEQ ID NO: 5619569 - DNA, 25 bp, Homo sapien
ctgggacaaatacagtcactgcaaa

SEQ ID NO: 5619570 - DNA, 25 bp, Homo sapien
gacagcaaaaatagcttcattatgc

SEQ ID NO: 5619571 - DNA, 25 bp, Homo sapien
gagaggaaccacattactgggacaa

SEQ ID NO: 5619572 - DNA, 25 bp, Homo sapien
tcctccaggaaagaaaatgtggtgg

SEQ ID NO: 5619573 - DNA, 25 bp, Homo sapien
aatgagatccaaaacaaccagccat

SEQ ID NO: 5619574 - DNA, 25 bp, Homo sapien
gatgaggtggtcgacccttacaatg

SEQ ID NO: 5619575 - DNA, 25 bp, Homo sapien
gacgggtcagcttaactaacagata

SEQ ID NO: 5619576 - DNA, 25 bp, Homo sapien
atgtcacaaagagtaagtttagttc

SEQ ID NO: 5619577 - DNA, 25 bp, Homo sapien
cagagaactcaccacctaccaaggc

SEQ ID NO: 5619578 - DNA, 25 bp, Homo sapien
caaccagccatggtcgcacagcttg

SEQ ID NO: 5619579 - DNA, 25 bp, Homo sapien
gggtcagtattgacgggtcagctta

SEQ ID NO: 5619580 - DNA, 25 bp, Homo sapien
taacagatattaggaatgagatcca

SEQ ID NO: 5619581 - DNA, 25 bp, Homo sapien
ttctcagagcaagtggctgaatctc

SEQ ID NO: 5619582 - DNA, 25 bp, Homo sapien
tggaaaaagttgacttgggatttca

SEQ ID NO: 5619583 - DNA, 25 bp, Homo sapien
ataactctgtgaagtgggtcagtat

SEQ ID NO: 5619584 - DNA, 25 bp, Homo sapien
gcctgcctgtgtctgatgtggtgag

SEQ ID NO: 5619585 - DNA, 25 bp, Homo sapien
acaggtaatgtcccaggctaggtca

SEQ ID NO: 5619586 - DNA, 25 bp, Homo sapien
cacaggcagtgaagtccacctagta

SEQ ID NO: 5619587 - DNA, 25 bp, Homo sapien
tctccaaccaaggaggacgaaaatc

SEQ ID NO: 5619588 - DNA, 25 bp, Homo sapien
ataggagcatgccaaccacctggct

SEQ ID NO: 5619589 - DNA, 25 bp, Homo sapien
ccctagacttagggaaagacagtgg

SEQ ID NO: 5619590 - DNA, 25 bp, Homo sapien
tgctgaagagtagcccagttctctc

SEQ ID NO: 5619591 - DNA, 25 bp, Homo sapien
ggaggcatccaacttagcagcagac

SEQ ID NO: 5619592 - DNA, 25 bp, Homo sapien
actggggtctgaagccctagactta

SEQ ID NO: 5619593 - DNA, 25 bp, Homo sapien
tcaaaactcatacggagaaggagaa

SEQ ID NO: 5619594 - DNA, 25 bp, Homo sapien
gctaggtcaagaagttcatcggcct

SEQ ID NO: 5619595 - DNA, 25 bp, Homo sapien
agtttccaaaactaggtggcagcaa

SEQ ID NO: 5619596 - DNA, 25 bp, Homo sapien
tatgcagcaaatatcttttactcct

SEQ ID NO: 5619597 - DNA, 25 bp, Homo sapien
agaaattatcaaaggcagttaagag

SEQ ID NO: 5619598 - DNA, 25 bp, Homo sapien
gtggcagcaatggtttatgagaaat

SEQ ID NO: 5619599 - DNA, 25 bp, Homo sapien
gcagttaagagcagtgataaaacac

SEQ ID NO: 5619600 - DNA, 25 bp, Homo sapien
aaaactaggtggcagcaatggttta

SEQ ID NO: 5619601 - DNA, 25 bp, Homo sapien
ttccaaaactaggtggcagcaatgg

SEQ ID NO: 5619602 - DNA, 25 bp, Homo sapien
cttcatcaaactagcaggattttaa

SEQ ID NO: 5619603 - DNA, 25 bp, Homo sapien
attatcaaaggcagttaagagcagt

SEQ ID NO: 5619604 - DNA, 25 bp, Homo sapien
atcaaaggcagttaagagcagtgat

SEQ ID NO: 5619605 - DNA, 25 bp, Homo sapien
attcattcagaaatactttaagttt

SEQ ID NO: 5619606 - DNA, 25 bp, Homo sapien
ccgggctttgagcttcatggccatc

SEQ ID NO: 5619607 - DNA, 25 bp, Homo sapien
gcccgggctttgagcttcatggcca

SEQ ID NO: 5619608 - DNA, 25 bp, Homo sapien
cctcctttcgcctctgctccagcag

SEQ ID NO: 5619609 - DNA, 25 bp, Homo sapien
ccccgctcttccgcggcgcgagcgg

SEQ ID NO: 5619610 - DNA, 25 bp, Homo sapien
cttctcggggtccccgctcttccgc

SEQ ID NO: 5619611 - DNA, 25 bp, Homo sapien
ttcttctcgagcttcttgcgctcct

SEQ ID NO: 5619612 - DNA, 25 bp, Homo sapien
cgccgcggccgtcttcttctcgctc

SEQ ID NO: 5619613 - DNA, 25 bp, Homo sapien
cttgcgctccttgtctgttaggaac

SEQ ID NO: 5619614 - DNA, 25 bp, Homo sapien
tcagcatggtggcccggccacctcg

SEQ ID NO: 5619615 - DNA, 25 bp, Homo sapien
ggctctctcggctcggccaacgccg

SEQ ID NO: 5619616 - DNA, 25 bp, Homo sapien
ggttcttcgcgagcttctcggggtc

SEQ ID NO: 5619617 - DNA, 25 bp, Homo sapien
tgtctacataagtcctaccaatatt

SEQ ID NO: 5619618 - DNA, 25 bp, Homo sapien
agtttaacaattgagacagtcatgc

SEQ ID NO: 5619619 - DNA, 25 bp, Homo sapien
gacacagatgcatttcaatagttta

SEQ ID NO: 5619620 - DNA, 25 bp, Homo sapien
taccctccccttgaattgctgattt

SEQ ID NO: 5619621 - DNA, 25 bp, Homo sapien
aaaacaggtcttccaatgtcttctg

SEQ ID NO: 5619622 - DNA, 25 bp, Homo sapien
tttaccattgacacagatgcatttc

SEQ ID NO: 5619623 - DNA, 25 bp, Homo sapien
tcatgctggtctctatcagtgaaat

SEQ ID NO: 5619624 - DNA, 25 bp, Homo sapien
atccgagaggccaacgttgttaatt

SEQ ID NO: 5619625 - DNA, 25 bp, Homo sapien
gcatctttacatatattagttggtc

SEQ ID NO: 5619626 - DNA, 25 bp, Homo sapien
aacaattgagacagtcatgctggtc

SEQ ID NO: 5619627 - DNA, 25 bp, Homo sapien
gcttataatcccaaccaatactgga

SEQ ID NO: 5619628 - DNA, 25 bp, Homo sapien
tgtgtggacattgtaagggtaatat

SEQ ID NO: 5619629 - DNA, 25 bp, Homo sapien
gaatcaaccttccctgggacttctc

SEQ ID NO: 5619630 - DNA, 25 bp, Homo sapien
tatcagcccaaaggattggtagttt

SEQ ID NO: 5619631 - DNA, 25 bp, Homo sapien
gacttcttgagggtatggtatatta

SEQ ID NO: 5619632 - DNA, 25 bp, Homo sapien
gatagagctatttggatatcagccc

SEQ ID NO: 5619633 - DNA, 25 bp, Homo sapien
taggaagctttaagcaatggaaacc

SEQ ID NO: 5619634 - DNA, 25 bp, Homo sapien
tggtagtttagcaatacagggggaa

SEQ ID NO: 5619635 - DNA, 25 bp, Homo sapien
atggtatattagtatgatagagcta

SEQ ID NO: 5619636 - DNA, 25 bp, Homo sapien
ttggaccatctggagttagttcttc

SEQ ID NO: 5619637 - DNA, 25 bp, Homo sapien
aatatgcctatgaattaggaagctt

SEQ ID NO: 5619638 - DNA, 25 bp, Homo sapien
ctctgggctttgggttatatttgga

SEQ ID NO: 5619639 - DNA, 25 bp, Homo sapien
tcgattaaaggcaccaagtttcagt

SEQ ID NO: 5619640 - DNA, 25 bp, Homo sapien
actgaaacttggtgcctttaatcga

SEQ ID NO: 5619641 - DNA, 25 bp, Homo sapien
gtttcagtcagaaacttatgtacgt

SEQ ID NO: 5619642 - DNA, 25 bp, Homo sapien
acgtacataagtttctgactgaaac

SEQ ID NO: 5619643 - DNA, 25 bp, Homo sapien
aaagtctgaatgaagccaaaatgtg

SEQ ID NO: 5619644 - DNA, 25 bp, Homo sapien
aagaaaatgagctaaacagaaagtg

SEQ ID NO: 5619645 - DNA, 25 bp, Homo sapien
tgaagctatagaaagtctgaatgaa

SEQ ID NO: 5619646 - DNA, 25 bp, Homo sapien
ttggttcactgaggtatagaaaatc

SEQ ID NO: 5619647 - DNA, 25 bp, Homo sapien
atgcatcagtgcaaatgggaacatg

SEQ ID NO: 5619648 - DNA, 25 bp, Homo sapien
tgattgagatgagtaagagaaataa

SEQ ID NO: 5619649 - DNA, 25 bp, Homo sapien
atgccagtgataagcttaatgaaat

SEQ ID NO: 5619650 - DNA, 25 bp, Homo sapien
atagaaaatctgaatgaagccaaac

SEQ ID NO: 5619651 - DNA, 25 bp, Homo sapien
ccacaaggaagaatccatgccagtg

SEQ ID NO: 5619652 - DNA, 25 bp, Homo sapien
tgagctaaacagaaagtggacttta

SEQ ID NO: 5619653 - DNA, 25 bp, Homo sapien
ttgccagttatgattgagatgagta

SEQ ID NO: 5619654 - DNA, 25 bp, Homo sapien
gaaacctgcgatatgtgctagaacc

SEQ ID NO: 5619655 - DNA, 25 bp, Homo sapien
tcataaattcacgccagggagagct

SEQ ID NO: 5619656 - DNA, 25 bp, Homo sapien
aagtcacagtctgcatggggcttca

SEQ ID NO: 5619657 - DNA, 25 bp, Homo sapien
aggggcagcctgtaatgaaacctgc

SEQ ID NO: 5619658 - DNA, 25 bp, Homo sapien
tagttgctgcttttggactccaccc

SEQ ID NO: 5619659 - DNA, 25 bp, Homo sapien
gttacaatgctcgttaaggggcagc

SEQ ID NO: 5619660 - DNA, 25 bp, Homo sapien
gagctgtctaatgggattgccacct

SEQ ID NO: 5619661 - DNA, 25 bp, Homo sapien
acaaggtaatgaatgtggagttagg

SEQ ID NO: 5619662 - DNA, 25 bp, Homo sapien
caaggaaggcctttgtgtgtgaaaa

SEQ ID NO: 5619663 - DNA, 25 bp, Homo sapien
cctgggcaacaaggtaatgaatgtg

SEQ ID NO: 5619664 - DNA, 25 bp, Homo sapien
acccccaacgcagacttcaaagctc

SEQ ID NO: 5619665 - DNA, 25 bp, Homo sapien
gcgtccgcacctgaccatggagtgc

SEQ ID NO: 5619666 - DNA, 25 bp, Homo sapien
ttgtcacgccagtagaagtagactc

SEQ ID NO: 5619667 - DNA, 25 bp, Homo sapien
gggatttatcagaaatgacagctcc

SEQ ID NO: 5619668 - DNA, 25 bp, Homo sapien
acccgaggtgcagcaatgcttctat

SEQ ID NO: 5619669 - DNA, 25 bp, Homo sapien
ggacaggaactgcacttagaactta

SEQ ID NO: 5619670 - DNA, 25 bp, Homo sapien
gaatgccagaagctccctgcactac

SEQ ID NO: 5619671 - DNA, 25 bp, Homo sapien
gaagtagactcagccgggtcatata

SEQ ID NO: 5619672 - DNA, 25 bp, Homo sapien
aagccctcggcgattttgagcagtc

SEQ ID NO: 5619673 - DNA, 25 bp, Homo sapien
cgccctcctgctcgcgtgtgccttc

SEQ ID NO: 5619674 - DNA, 25 bp, Homo sapien
cattttgcacaacggcaggaaaaag

SEQ ID NO: 5619675 - DNA, 25 bp, Homo sapien
gcgccagcggattaaatgatgatta

SEQ ID NO: 5619676 - DNA, 25 bp, Homo sapien
aagacaagatcacttcccaataact

SEQ ID NO: 5619677 - DNA, 25 bp, Homo sapien
cttttaaagaagaatgggaatacat

SEQ ID NO: 5619678 - DNA, 25 bp, Homo sapien
ccatgcggccggaacatcaattccg

SEQ ID NO: 5619679 - DNA, 25 bp, Homo sapien
gggaatacatctgtcggggtgtaat

SEQ ID NO: 5619680 - DNA, 25 bp, Homo sapien
acatcaattccggcccatcccctat

SEQ ID NO: 5619681 - DNA, 25 bp, Homo sapien
aaatatgcttagcctgatgcttatc

SEQ ID NO: 5619682 - DNA, 25 bp, Homo sapien
tgttatacctccgtgggagatggca

SEQ ID NO: 5619683 - DNA, 25 bp, Homo sapien
tgtatcagctactaactccccagac

SEQ ID NO: 5619684 - DNA, 25 bp, Homo sapien
catgaacaatgccaccacagcaggc

SEQ ID NO: 5619685 - DNA, 25 bp, Homo sapien
atagttcagctcatgacatagtctt

SEQ ID NO: 5619686 - DNA, 25 bp, Homo sapien
catccaatccccggccgccatgcgg

SEQ ID NO: 5619687 - DNA, 25 bp, Homo sapien
actcaccaggacaacacaagaattc

SEQ ID NO: 5619688 - DNA, 25 bp, Homo sapien
aggtcagacaaaagttagtaaagat

SEQ ID NO: 5619689 - DNA, 25 bp, Homo sapien
attacagtaggagaattcaaaatac

SEQ ID NO: 5619690 - DNA, 25 bp, Homo sapien
taacaagcagtgccacatatgtaga

SEQ ID NO: 5619691 - DNA, 25 bp, Homo sapien
aggaagtcactacataacaagaaga

SEQ ID NO: 5619692 - DNA, 25 bp, Homo sapien
gctcgggcaacatacccagctactc

SEQ ID NO: 5619693 - DNA, 25 bp, Homo sapien
aaagcattagcaataaggaagtcac

SEQ ID NO: 5619694 - DNA, 25 bp, Homo sapien
ccatcaacacgtaggaggtaaaagg

SEQ ID NO: 5619695 - DNA, 25 bp, Homo sapien
caagaagagttcaactcaccaggac

SEQ ID NO: 5619696 - DNA, 25 bp, Homo sapien
aagatatgaaagatttgaacaacac

SEQ ID NO: 5619697 - DNA, 25 bp, Homo sapien
aaagaggggaaattgtcaaatctac

SEQ ID NO: 5619698 - DNA, 25 bp, Homo sapien
aacttctgcacttcttggactgacg

SEQ ID NO: 5619699 - DNA, 25 bp, Homo sapien
cgtcagtccaagaagtgcagaagtt

SEQ ID NO: 5619700 - DNA, 25 bp, Homo sapien
tcaccatattgctcagggtagtctc

SEQ ID NO: 5619701 - DNA, 25 bp, Homo sapien
atgtaaaaattaaaatatggtgagc

SEQ ID NO: 5619702 - DNA, 25 bp, Homo sapien
tatgagccaggcattgaactaagta

SEQ ID NO: 5619703 - DNA, 25 bp, Homo sapien
catattgctcagggtagtctcgaac

SEQ ID NO: 5619704 - DNA, 25 bp, Homo sapien
tgaaaaagtaagacatgttctatgt

SEQ ID NO: 5619705 - DNA, 25 bp, Homo sapien
gagcacttaccacttactatgagcc

SEQ ID NO: 5619706 - DNA, 25 bp, Homo sapien
ccacttactatgagccaggcattga

SEQ ID NO: 5619707 - DNA, 25 bp, Homo sapien
tgagccaggcattgaactaagtatt

SEQ ID NO: 5619708 - DNA, 25 bp, Homo sapien
cttaccacttactatgagccaggca

SEQ ID NO: 5619709 - DNA, 25 bp, Homo sapien
aaattaaaatatggtgagcacttac

SEQ ID NO: 5619710 - DNA, 25 bp, Homo sapien
tactatgagccaggcattgaactaa

SEQ ID NO: 5619711 - DNA, 25 bp, Homo sapien
aaactcctgggctcatgcaatcttc

SEQ ID NO: 5619712 - DNA, 25 bp, Homo sapien
cgctctgtcaccaaggctgtagtac

SEQ ID NO: 5619713 - DNA, 25 bp, Homo sapien
ggatatcgcaaaaagccacccactt

SEQ ID NO: 5619714 - DNA, 25 bp, Homo sapien
atagctcaccacaacctcaaactcc

SEQ ID NO: 5619715 - DNA, 25 bp, Homo sapien
aggtacccacatccagctatgattt

SEQ ID NO: 5619716 - DNA, 25 bp, Homo sapien
acccaaacaaaacatgacaagcctc

SEQ ID NO: 5619717 - DNA, 25 bp, Homo sapien
gacaagcctcacacaaaccactgtg

SEQ ID NO: 5619718 - DNA, 25 bp, Homo sapien
ctgtagtacagctgcacaatcatag

SEQ ID NO: 5619719 - DNA, 25 bp, Homo sapien
tttaaagatccagtaaacatgtcca

SEQ ID NO: 5619720 - DNA, 25 bp, Homo sapien
tgggctcatgcaatcttcccgcctc

SEQ ID NO: 5619721 - DNA, 25 bp, Homo sapien
attattctggatatcgcaaaaagcc

SEQ ID NO: 5619722 - DNA, 25 bp, Homo sapien
tccacttgagcaagcatcacgtggt

SEQ ID NO: 5619723 - DNA, 25 bp, Homo sapien
gtcttcggctacccgcagagcctca

SEQ ID NO: 5619724 - DNA, 25 bp, Homo sapien
cgtcccaggaaagacgttctgctgc

SEQ ID NO: 5619725 - DNA, 25 bp, Homo sapien
gggaagcgcttccgcgaatccttcc

SEQ ID NO: 5619726 - DNA, 25 bp, Homo sapien
ccagcgtcccaggaaagacgttctg

SEQ ID NO: 5619727 - DNA, 25 bp, Homo sapien
cgcgaatccttccacttgagcaagc

SEQ ID NO: 5619728 - DNA, 25 bp, Homo sapien
gctgagctacgcctgctcggactgc

SEQ ID NO: 5619729 - DNA, 25 bp, Homo sapien
aggtcttcggctacccgcagagcct

SEQ ID NO: 5619730 - DNA, 25 bp, Homo sapien
gcaaggtcttcggctacccgcagag

SEQ ID NO: 5619731 - DNA, 25 bp, Homo sapien
gaaagacgttctgctgcggcatctg

SEQ ID NO: 5619732 - DNA, 25 bp, Homo sapien
cacttgagcaagcatcacgtggtgc

SEQ ID NO: 5619733 - DNA, 25 bp, Homo sapien
atcatatagatgaaataatggtcag

SEQ ID NO: 5619734 - DNA, 25 bp, Homo sapien
cctagcccaggtgaatagattattt

SEQ ID NO: 5619735 - DNA, 25 bp, Homo sapien
tgttaaacgtagctcatccccactc

SEQ ID NO: 5619736 - DNA, 25 bp, Homo sapien
ggtgccagattgagagctaatcaac

SEQ ID NO: 5619737 - DNA, 25 bp, Homo sapien
ttccactagagcagtggtgtccaat

SEQ ID NO: 5619738 - DNA, 25 bp, Homo sapien
acagactagaacctgtcaccagttc

SEQ ID NO: 5619739 - DNA, 25 bp, Homo sapien
tttgttggcttgtacctagcccagg

SEQ ID NO: 5619740 - DNA, 25 bp, Homo sapien
cagacagaaggccacatgataattg

SEQ ID NO: 5619741 - DNA, 25 bp, Homo sapien
ctggaaggtttcaaggtgccagatt

SEQ ID NO: 5619742 - DNA, 25 bp, Homo sapien
tcttaccaactttgaggactctgga

SEQ ID NO: 5619743 - DNA, 25 bp, Homo sapien
atgataattggtgacagactagaac

SEQ ID NO: 5619744 - DNA, 25 bp, Homo sapien
ggacagatggctctggtccgccaaa

SEQ ID NO: 5619745 - DNA, 25 bp, Homo sapien
acacatggacagatggctctggtcc

SEQ ID NO: 5619746 - DNA, 25 bp, Homo sapien
gtcctgagtcctgcgtctgcctgca

SEQ ID NO: 5619747 - DNA, 25 bp, Homo sapien
ctgcccatcgaggccgtattctgcc

SEQ ID NO: 5619748 - DNA, 25 bp, Homo sapien
gctggaaagcccagtcctgagtcct

SEQ ID NO: 5619749 - DNA, 25 bp, Homo sapien
ggtccgccaaactcctgtgggcact

SEQ ID NO: 5619750 - DNA, 25 bp, Homo sapien
cctagcttgcaatggagtgaagagt

SEQ ID NO: 5619751 - DNA, 25 bp, Homo sapien
caggggatctccctcaggcacctgg

SEQ ID NO: 5619752 - DNA, 25 bp, Homo sapien
caactgactcctaagtgcatacttc

SEQ ID NO: 5619753 - DNA, 25 bp, Homo sapien
cttccacctgcccttgaagcccaga

SEQ ID NO: 5619754 - DNA, 25 bp, Homo sapien
gtcctgcgtctgcctgcaggggatc

SEQ ID NO: 5619755 - DNA, 25 bp, Homo sapien
tacttttcaaagatgtaggaaggca

SEQ ID NO: 5619756 - DNA, 25 bp, Homo sapien
aagattcaaaaagagtccagggtca

SEQ ID NO: 5619757 - DNA, 25 bp, Homo sapien
gctaagtaatttggattaacattct

SEQ ID NO: 5619758 - DNA, 25 bp, Homo sapien
taatcaacaggaaataatgtgggct

SEQ ID NO: 5619759 - DNA, 25 bp, Homo sapien
ttttacacataatcaacaggaaata

SEQ ID NO: 5619760 - DNA, 25 bp, Homo sapien
ttagaaaagctggataaaatatact

SEQ ID NO: 5619761 - DNA, 25 bp, Homo sapien
atgaaccattcatttgggaccactg

SEQ ID NO: 5619762 - DNA, 25 bp, Homo sapien
aagggcctggtaactccaaaccatg

SEQ ID NO: 5619763 - DNA, 25 bp, Homo sapien
agggcctggtaactccaaaccatgc

SEQ ID NO: 5619764 - DNA, 25 bp, Homo sapien
atttggattaacattctcacttgaa

SEQ ID NO: 5619765 - DNA, 25 bp, Homo sapien
cattcatttgggaccactgtgttag

SEQ ID NO: 5619766 - DNA, 25 bp, Homo sapien
ataaaggacattatcagagtcagtt

SEQ ID NO: 5619767 - DNA, 25 bp, Homo sapien
aagaagatacagcataatagccatg

SEQ ID NO: 5619768 - DNA, 25 bp, Homo sapien
aagcaaaagcagagttataaaattc

SEQ ID NO: 5619769 - DNA, 25 bp, Homo sapien
acaccaatggttgaaataaacagga

SEQ ID NO: 5619770 - DNA, 25 bp, Homo sapien
tactgtatgcaaactagaattcaag

SEQ ID NO: 5619771 - DNA, 25 bp, Homo sapien
aaaatgtcaataatatggcaggaat

SEQ ID NO: 5619772 - DNA, 25 bp, Homo sapien
aatagccatgaacctctgtgatgct

SEQ ID NO: 5619773 - DNA, 25 bp, Homo sapien
cttaatgctgttatagaagacaatc

SEQ ID NO: 5619774 - DNA, 25 bp, Homo sapien
aacctctgtgatgctaagtggcttc

SEQ ID NO: 5619775 - DNA, 25 bp, Homo sapien
tatggcaggaataatttaaaagtgg

SEQ ID NO: 5619776 - DNA, 25 bp, Homo sapien
cttggctaacaaaagaaatgtagat

SEQ ID NO: 5619777 - DNA, 25 bp, Homo sapien
tcgcgcctcctggccaggcgcgcgg

SEQ ID NO: 5619778 - DNA, 25 bp, Homo sapien
ccgcgcgcctggccaggaggcgcga

SEQ ID NO: 5619779 - DNA, 25 bp, Homo sapien
accttcggcccagcccgcggcctcg

SEQ ID NO: 5619780 - DNA, 25 bp, Homo sapien
cgaggccgcgggctgggccgaaggt

SEQ ID NO: 5619781 - DNA, 25 bp, Homo sapien
gaccttcggcccagcccgcggcctc

SEQ ID NO: 5619782 - DNA, 25 bp, Homo sapien
gaggccgcgggctgggccgaaggtc

SEQ ID NO: 5619783 - DNA, 25 bp, Homo sapien
cgcgcctcctggccaggcgcgcggg

SEQ ID NO: 5619784 - DNA, 25 bp, Homo sapien
cccgcgcgcctggccaggaggcgcg

SEQ ID NO: 5619785 - DNA, 25 bp, Homo sapien
acatgtagtaacacggacagacttc

SEQ ID NO: 5619786 - DNA, 25 bp, Homo sapien
tacggagtagaaagaactcgtctgg

SEQ ID NO: 5619787 - DNA, 25 bp, Homo sapien
gtgaaaaaagtgtacagtaagaatc

SEQ ID NO: 5619788 - DNA, 25 bp, Homo sapien
tgcaccaaatgcacattacggagta

SEQ ID NO: 5619789 - DNA, 25 bp, Homo sapien
gcgctcggtcctcaccaccaacgcc

SEQ ID NO: 5619790 - DNA, 25 bp, Homo sapien
ttgcagaacatgtagtaacacggac

SEQ ID NO: 5619791 - DNA, 25 bp, Homo sapien
gcgtcctccacgctacagggtgggg

SEQ ID NO: 5619792 - DNA, 25 bp, Homo sapien
accaccaacgcccgcacactaggca

SEQ ID NO: 5619793 - DNA, 25 bp, Homo sapien
agggatcaaggagatacgtattttg

SEQ ID NO: 5619794 - DNA, 25 bp, Homo sapien
cggacagacttctacaactggtgaa

SEQ ID NO: 5619795 - DNA, 25 bp, Homo sapien
cagtaagaatctaaccacgtaaaaa

SEQ ID NO: 5619796 - DNA, 25 bp, Homo sapien
tctaggccactagcatgtatctcct

SEQ ID NO: 5619797 - DNA, 25 bp, Homo sapien
tttgatggttagattatacagccca

SEQ ID NO: 5619798 - DNA, 25 bp, Homo sapien
caatcattaacatagagagggcgga

SEQ ID NO: 5619799 - DNA, 25 bp, Homo sapien
ccccagtaattgccactgcaactcc

SEQ ID NO: 5619800 - DNA, 25 bp, Homo sapien
aagtagaagcaccttagaagtagct

SEQ ID NO: 5619801 - DNA, 25 bp, Homo sapien
gaacctggactggttatgttcacca

SEQ ID NO: 5619802 - DNA, 25 bp, Homo sapien
agtcctatgatggtggcttagagaa

SEQ ID NO: 5619803 - DNA, 25 bp, Homo sapien
gcaactccatatacttcaggcattc

SEQ ID NO: 5619804 - DNA, 25 bp, Homo sapien
tgttcaccactgaaaccccagtaat

SEQ ID NO: 5619805 - DNA, 25 bp, Homo sapien
tctgctacagaaacaacatcctgaa

SEQ ID NO: 5619806 - DNA, 25 bp, Homo sapien
acaggagcactgagtcctatgatgg

SEQ ID NO: 5619807 - DNA, 25 bp, Homo sapien
aaatagccgttataatgcagggtct

SEQ ID NO: 5619808 - DNA, 25 bp, Homo sapien
aagttataaaatactgctgagcctc

SEQ ID NO: 5619809 - DNA, 25 bp, Homo sapien
agaacctgtactaaaaacatatttc

SEQ ID NO: 5619810 - DNA, 25 bp, Homo sapien
tgaaaaaccaagctaaagtgaaatg

SEQ ID NO: 5619811 - DNA, 25 bp, Homo sapien
aaaaaccaagctaaagtgaaatgac

SEQ ID NO: 5619812 - DNA, 25 bp, Homo sapien
cacaaccctctgttagagaaaaaaa

SEQ ID NO: 5619813 - DNA, 25 bp, Homo sapien
aagtgaaatgacctatgagcaagtg

SEQ ID NO: 5619814 - DNA, 25 bp, Homo sapien
aagcagggctacacactccactctc

SEQ ID NO: 5619815 - DNA, 25 bp, Homo sapien
tgaaatgacctatgagcaagtggca

SEQ ID NO: 5619816 - DNA, 25 bp, Homo sapien
tagccgttataatgcagggtctggg

SEQ ID NO: 5619817 - DNA, 25 bp, Homo sapien
tcggagttaagttataaaatactgc

SEQ ID NO: 5619818 - DNA, 25 bp, Homo sapien
gtgcagtggtcattcacagacacac

SEQ ID NO: 5619819 - DNA, 25 bp, Homo sapien
aattcagggtgaactcaattcctat

SEQ ID NO: 5619820 - DNA, 25 bp, Homo sapien
agggccccattaggctcgactcctc

SEQ ID NO: 5619821 - DNA, 25 bp, Homo sapien
caattggttcaaaggtgtaggtgtg

SEQ ID NO: 5619822 - DNA, 25 bp, Homo sapien
cagactacagactacagccttgaac

SEQ ID NO: 5619823 - DNA, 25 bp, Homo sapien
tccattcaccatcagtttgagtctg

SEQ ID NO: 5619824 - DNA, 25 bp, Homo sapien
agatgccccgtctgctgctgctctt

SEQ ID NO: 5619825 - DNA, 25 bp, Homo sapien
ccacttctgtatcctgagtccctgg

SEQ ID NO: 5619826 - DNA, 25 bp, Homo sapien
gacacacacatagcagactacagac

SEQ ID NO: 5619827 - DNA, 25 bp, Homo sapien
gcacccggcttggatgtgatctttt

SEQ ID NO: 5619828 - DNA, 25 bp, Homo sapien
ggtgtaggtgtgccttttgcatacc

SEQ ID NO: 5619829 - DNA, 25 bp, Homo sapien
atgtccctctgtcagcctgcagcat

SEQ ID NO: 5619830 - DNA, 25 bp, Homo sapien
gaagtccatcctgaagtctaacccc

SEQ ID NO: 5619831 - DNA, 25 bp, Homo sapien
cgtccaggctggaacacttggaaat

SEQ ID NO: 5619832 - DNA, 25 bp, Homo sapien
ttctgagaagaaatcacttgctggg

SEQ ID NO: 5619833 - DNA, 25 bp, Homo sapien
acacagtgagttgactaggactcgg

SEQ ID NO: 5619834 - DNA, 25 bp, Homo sapien
gtgaacccacatgggtgtggtaggg

SEQ ID NO: 5619835 - DNA, 25 bp, Homo sapien
ccacttggggtcaccgtctctgtct

SEQ ID NO: 5619836 - DNA, 25 bp, Homo sapien
actaggactcgggttttggttctga

SEQ ID NO: 5619837 - DNA, 25 bp, Homo sapien
atcagaaacagagagtccatggtga

SEQ ID NO: 5619838 - DNA, 25 bp, Homo sapien
ggggacttctggagccaggatatgt

SEQ ID NO: 5619839 - DNA, 25 bp, Homo sapien
agcttggcttaggtcacacagtgag

SEQ ID NO: 5619840 - DNA, 25 bp, Homo sapien
atgcgaccatttagagggtaagaaa

SEQ ID NO: 5619841 - DNA, 25 bp, Homo sapien
agtgaaagggaaatgcgaccattta

SEQ ID NO: 5619842 - DNA, 25 bp, Homo sapien
attcaaacagattcagtggtgtaac

SEQ ID NO: 5619843 - DNA, 25 bp, Homo sapien
cagattcagtggtgtaactcaatac

SEQ ID NO: 5619844 - DNA, 25 bp, Homo sapien
tgttttaagtctatgaactagctaa

SEQ ID NO: 5619845 - DNA, 25 bp, Homo sapien
cagtggtgtaactcaatacatggtc

SEQ ID NO: 5619846 - DNA, 25 bp, Homo sapien
agctaattataaaggaggtagtata

SEQ ID NO: 5619847 - DNA, 25 bp, Homo sapien
ccccagtgtgttagctgctctaatt

SEQ ID NO: 5619848 - DNA, 25 bp, Homo sapien
tattgcccccagtgtgttagctgct

SEQ ID NO: 5619849 - DNA, 25 bp, Homo sapien
aatttattgcccccagtgtgttagc

SEQ ID NO: 5619850 - DNA, 25 bp, Homo sapien
tgaactagctaattataaaggaggt

SEQ ID NO: 5619851 - DNA, 25 bp, Homo sapien
ggaataagggtatagacacccatac

SEQ ID NO: 5619852 - DNA, 25 bp, Homo sapien
gacacccatacagaacagcactcct

SEQ ID NO: 5619853 - DNA, 25 bp, Homo sapien
gtcaggctggcctttcttctgtgga

SEQ ID NO: 5619854 - DNA, 25 bp, Homo sapien
cacttctaaaaaaatggcgtccacc

SEQ ID NO: 5619855 - DNA, 25 bp, Homo sapien
actaagtcaacgggttccatttcta

SEQ ID NO: 5619856 - DNA, 25 bp, Homo sapien
acgtcacagagttgtttgcaagaac

SEQ ID NO: 5619857 - DNA, 25 bp, Homo sapien
acattaaaaataggcaacttgggtc

SEQ ID NO: 5619858 - DNA, 25 bp, Homo sapien
gttctttcacgggagacacatactt

SEQ ID NO: 5619859 - DNA, 25 bp, Homo sapien
atatccacttgaatgaaaacgtcac

SEQ ID NO: 5619860 - DNA, 25 bp, Homo sapien
attccagggaaatagctcaatgttc

SEQ ID NO: 5619861 - DNA, 25 bp, Homo sapien
gcaagaacttcttataagggaacta

SEQ ID NO: 5619862 - DNA, 25 bp, Homo sapien
agcttagtgaggagtccccactacc

SEQ ID NO: 5619863 - DNA, 25 bp, Homo sapien
gttgagaactggtaaacaaacaatc

SEQ ID NO: 5619864 - DNA, 25 bp, Homo sapien
aaggggacttccatgaataatagtg

SEQ ID NO: 5619865 - DNA, 25 bp, Homo sapien
ttaatgacaagaacactcggcatgg

SEQ ID NO: 5619866 - DNA, 25 bp, Homo sapien
caatcaagcaagtaagaacagaaat

SEQ ID NO: 5619867 - DNA, 25 bp, Homo sapien
aacattttagtaaccaagtggacac

SEQ ID NO: 5619868 - DNA, 25 bp, Homo sapien
gtggtgagctacgtagcaccctgga

SEQ ID NO: 5619869 - DNA, 25 bp, Homo sapien
gcaccctggagttccacagtgcttc

SEQ ID NO: 5619870 - DNA, 25 bp, Homo sapien
tcctgattgaagcttactaacgcgc

SEQ ID NO: 5619871 - DNA, 25 bp, Homo sapien
cactaccccatcgaaaggggacttc

SEQ ID NO: 5619872 - DNA, 25 bp, Homo sapien
taacgcgctctggctacctctccca

SEQ ID NO: 5619873 - DNA, 25 bp, Homo sapien
ggtgggacgtcggcccaagtgtcta

SEQ ID NO: 5619874 - DNA, 25 bp, Homo sapien
tagacacttgggccgacgtcccacc

SEQ ID NO: 5619875 - DNA, 25 bp, Homo sapien
cgaaaagaaggtatgtcagaggagt

SEQ ID NO: 5619876 - DNA, 25 bp, Homo sapien
actcctctgacataccttcttttcg

SEQ ID NO: 5619877 - DNA, 25 bp, Homo sapien
ctctgtccccttagttaccatttcc

SEQ ID NO: 5619878 - DNA, 25 bp, Homo sapien
ctcctccaaatactgggagggtagg

SEQ ID NO: 5619879 - DNA, 25 bp, Homo sapien
gggtagggttttcatgaatggagat

SEQ ID NO: 5619880 - DNA, 25 bp, Homo sapien
atgtagggacctgcctgctccccat

SEQ ID NO: 5619881 - DNA, 25 bp, Homo sapien
cttctttcctgggaatgtagggacc

SEQ ID NO: 5619882 - DNA, 25 bp, Homo sapien
aaaaccaccaccacctcctcctcca

SEQ ID NO: 5619883 - DNA, 25 bp, Homo sapien
cactgagaactggctggttctggag

SEQ ID NO: 5619884 - DNA, 25 bp, Homo sapien
tcatgccacaggacatcttagctcc

SEQ ID NO: 5619885 - DNA, 25 bp, Homo sapien
gaatggagattcctgtgttcatgcc

SEQ ID NO: 5619886 - DNA, 25 bp, Homo sapien
taataagactcacctaaaaccacca

SEQ ID NO: 5619887 - DNA, 25 bp, Homo sapien
atgtgcagatggtcactgagaactg

SEQ ID NO: 5619888 - DNA, 25 bp, Homo sapien
tctcatgatcaccacagcactgttc

SEQ ID NO: 5619889 - DNA, 25 bp, Homo sapien
aaaaatagcatctggagaactgagg

SEQ ID NO: 5619890 - DNA, 25 bp, Homo sapien
caacaagcacttggtagaacctgca

SEQ ID NO: 5619891 - DNA, 25 bp, Homo sapien
agggtccggtttggtttacatgcta

SEQ ID NO: 5619892 - DNA, 25 bp, Homo sapien
atcaccttcgtcagcctgccttccc

SEQ ID NO: 5619893 - DNA, 25 bp, Homo sapien
gtctgaacaaaaatgctggattatt

SEQ ID NO: 5619894 - DNA, 25 bp, Homo sapien
atgtgagaacagactaggactctct

SEQ ID NO: 5619895 - DNA, 25 bp, Homo sapien
atctcagcgctgcttagtgatgtga

SEQ ID NO: 5619896 - DNA, 25 bp, Homo sapien
tgcaccaacaaatcatctcagcgct

SEQ ID NO: 5619897 - DNA, 25 bp, Homo sapien
ctggagcggttcaagtccggttatg

SEQ ID NO: 5619898 - DNA, 25 bp, Homo sapien
ggtttacatgctacagaaaagcctc

SEQ ID NO: 5619899 - DNA, 25 bp, Homo sapien
aatactgatagagatacaactccac

SEQ ID NO: 5619900 - DNA, 25 bp, Homo sapien
tgaatttgggggttcagttgaatat

SEQ ID NO: 5619901 - DNA, 25 bp, Homo sapien
caagacaccatcaactacaggagtt

SEQ ID NO: 5619902 - DNA, 25 bp, Homo sapien
ttaggtcttagaacattgtcagata

SEQ ID NO: 5619903 - DNA, 25 bp, Homo sapien
tacaactccacataaccacgccata

SEQ ID NO: 5619904 - DNA, 25 bp, Homo sapien
gttgaatataaatcatcccgagccc

SEQ ID NO: 5619905 - DNA, 25 bp, Homo sapien
atcccgagcccattaatactgatag

SEQ ID NO: 5619906 - DNA, 25 bp, Homo sapien
tcatgaagatcaaattaggtcttag

SEQ ID NO: 5619907 - DNA, 25 bp, Homo sapien
tttcaaacacggcaagccattttat

SEQ ID NO: 5619908 - DNA, 25 bp, Homo sapien
agtaagtatccaaaatgagtacagg

SEQ ID NO: 5619909 - DNA, 25 bp, Homo sapien
aaatgagtacaggataaagaataac

SEQ ID NO: 5619910 - DNA, 25 bp, Homo sapien
aagcaggcctctcactagcaaagtt

SEQ ID NO: 5619911 - DNA, 25 bp, Homo sapien
aaactgattgcaagacatgtaagat

SEQ ID NO: 5619912 - DNA, 25 bp, Homo sapien
ttcatcagtggttatcactcgcccc

SEQ ID NO: 5619913 - DNA, 25 bp, Homo sapien
caaagagccctactgttccctgact

SEQ ID NO: 5619914 - DNA, 25 bp, Homo sapien
caggaccagctcaagctactaagct

SEQ ID NO: 5619915 - DNA, 25 bp, Homo sapien
catgtaagatcctacagactctggc

SEQ ID NO: 5619916 - DNA, 25 bp, Homo sapien
actgggttccaaggtcaaagtcaaa

SEQ ID NO: 5619917 - DNA, 25 bp, Homo sapien
tgaagtcttacaacgcacaacatga

SEQ ID NO: 5619918 - DNA, 25 bp, Homo sapien
gtctggctaaagagctcctacttgc

SEQ ID NO: 5619919 - DNA, 25 bp, Homo sapien
cagactctggccccgcctagttgtc

SEQ ID NO: 5619920 - DNA, 25 bp, Homo sapien
atttccctgccatgaggaactgggg

SEQ ID NO: 5619921 - DNA, 25 bp, Homo sapien
gcacgctgttcctcggaagcatgat

SEQ ID NO: 5619922 - DNA, 25 bp, Homo sapien
caaccacgaactcaagaagtaattc

SEQ ID NO: 5619923 - DNA, 25 bp, Homo sapien
tactttgagaacttaaagcacgctg

SEQ ID NO: 5619924 - DNA, 25 bp, Homo sapien
atgctacgaaaaattaaacttaaca

SEQ ID NO: 5619925 - DNA, 25 bp, Homo sapien
agtgaaatctctcaaccacgaactc

SEQ ID NO: 5619926 - DNA, 25 bp, Homo sapien
tcggaagcatgattttaaacttatc

SEQ ID NO: 5619927 - DNA, 25 bp, Homo sapien
ttgagaacttaaagcacgctgttcc

SEQ ID NO: 5619928 - DNA, 25 bp, Homo sapien
ggggaaatgacagtgaaatctctca

SEQ ID NO: 5619929 - DNA, 25 bp, Homo sapien
attaaacttaacagaaaaatgctta

SEQ ID NO: 5619930 - DNA, 25 bp, Homo sapien
ttaaagcacgctgttcctcggaagc

SEQ ID NO: 5619931 - DNA, 25 bp, Homo sapien
atggatgtaaggttgcttcaaataa

SEQ ID NO: 5619932 - DNA, 25 bp, Homo sapien
gtggtgcaaacagagtatgtgacct

SEQ ID NO: 5619933 - DNA, 25 bp, Homo sapien
caaacaaaggtaaggactttgacta

SEQ ID NO: 5619934 - DNA, 25 bp, Homo sapien
cccagtaacactcttgatattccct

SEQ ID NO: 5619935 - DNA, 25 bp, Homo sapien
aatactttcaaggcccgtgattcac

SEQ ID NO: 5619936 - DNA, 25 bp, Homo sapien
aatcagaacaaggacatccattatt

SEQ ID NO: 5619937 - DNA, 25 bp, Homo sapien
atcactggaataacattggccatct

SEQ ID NO: 5619938 - DNA, 25 bp, Homo sapien
cccgtgattcacaaaacccagtaac

SEQ ID NO: 5619939 - DNA, 25 bp, Homo sapien
attactccccttggtcttcacgctc

SEQ ID NO: 5619940 - DNA, 25 bp, Homo sapien
ccttcctaagcgtggtgcaaacaga

SEQ ID NO: 5619941 - DNA, 25 bp, Homo sapien
ccctatcagtatacagaatcactca

SEQ ID NO: 5619942 - DNA, 25 bp, Homo sapien
acagaatcactcaaacattgggtgt

SEQ ID NO: 5619943 - DNA, 25 bp, Homo sapien
acactgaatttgaggtgatgcgggt

SEQ ID NO: 5619944 - DNA, 25 bp, Homo sapien
ggagaggaaccatcagctaccatat

SEQ ID NO: 5619945 - DNA, 25 bp, Homo sapien
ccgtcgtcaggcaacagtaatgaag

SEQ ID NO: 5619946 - DNA, 25 bp, Homo sapien
ccttaggaaggaacattccagcttc

SEQ ID NO: 5619947 - DNA, 25 bp, Homo sapien
cagcattagcttcaccagggagcgg

SEQ ID NO: 5619948 - DNA, 25 bp, Homo sapien
cagcagtgctagctcaaaaccaccc

SEQ ID NO: 5619949 - DNA, 25 bp, Homo sapien
aacctgctgtccagacgccagggtg

SEQ ID NO: 5619950 - DNA, 25 bp, Homo sapien
ggtaggggcatgatcccactcctta

SEQ ID NO: 5619951 - DNA, 25 bp, Homo sapien
gagcgagtgatgagatacctctgct

SEQ ID NO: 5619952 - DNA, 25 bp, Homo sapien
gcatggtcaagtgtgggtaacactg

SEQ ID NO: 5619953 - DNA, 25 bp, Homo sapien
gcctagtagaagatgcccaagaaca

SEQ ID NO: 5619954 - DNA, 25 bp, Homo sapien
agtgggtacttggagaaagctccta

SEQ ID NO: 5619955 - DNA, 25 bp, Homo sapien
ggctgcagagccccttcgattcctc

SEQ ID NO: 5619956 - DNA, 25 bp, Homo sapien
agggactgccctgattgtggttagt

SEQ ID NO: 5619957 - DNA, 25 bp, Homo sapien
catgctcctgatgacgagaacctac

SEQ ID NO: 5619958 - DNA, 25 bp, Homo sapien
tgtcttgagtcaggcaagaatgggg

SEQ ID NO: 5619959 - DNA, 25 bp, Homo sapien
gcaggttagcaggactgcactcaca

SEQ ID NO: 5619960 - DNA, 25 bp, Homo sapien
gcgggtactcggatcccgcagcagg

SEQ ID NO: 5619961 - DNA, 25 bp, Homo sapien
tgtggttagttctgtctctagccct

SEQ ID NO: 5619962 - DNA, 25 bp, Homo sapien
aaagctcctataaagcgggtactcg

SEQ ID NO: 5619963 - DNA, 25 bp, Homo sapien
cctcccccaccgtgggagctaagct

SEQ ID NO: 5619964 - DNA, 25 bp, Homo sapien
caccaaatctgtacgtcatgctcct

SEQ ID NO: 5619965 - DNA, 25 bp, Homo sapien
cttcaccaaagtaactattgagatg

SEQ ID NO: 5619966 - DNA, 25 bp, Homo sapien
gggttggatcaactaaatcggtgct

SEQ ID NO: 5619967 - DNA, 25 bp, Homo sapien
gcactggcacttacaaagggttctt

SEQ ID NO: 5619968 - DNA, 25 bp, Homo sapien
tgtgtgtgcgcgcatacactgagaa

SEQ ID NO: 5619969 - DNA, 25 bp, Homo sapien
gtgaaaaaaacataggcactggcac

SEQ ID NO: 5619970 - DNA, 25 bp, Homo sapien
gtgcattggcacaatttacgctcac

SEQ ID NO: 5619971 - DNA, 25 bp, Homo sapien
ctgtgtagagaacagattggatgag

SEQ ID NO: 5619972 - DNA, 25 bp, Homo sapien
ataggtcaagatgacagagtaggaa

SEQ ID NO: 5619973 - DNA, 25 bp, Homo sapien
ttaaggacataggtcaagatgacag

SEQ ID NO: 5619974 - DNA, 25 bp, Homo sapien
aatcggtgctgaaaattaaggacat

SEQ ID NO: 5619975 - DNA, 25 bp, Homo sapien
aggaacttcaggagttagtatcttc

SEQ ID NO: 5619976 - DNA, 25 bp, Homo sapien
aaaggaaaactgaaggctattaagc

SEQ ID NO: 5619977 - DNA, 25 bp, Homo sapien
agccagctctgggttaagtagaacc

SEQ ID NO: 5619978 - DNA, 25 bp, Homo sapien
gtgcctagcagagtaggtcttgcat

SEQ ID NO: 5619979 - DNA, 25 bp, Homo sapien
tgtggtttgacggtcttgatgcatc

SEQ ID NO: 5619980 - DNA, 25 bp, Homo sapien
gattttcaaggcccggctgaatgcc

SEQ ID NO: 5619981 - DNA, 25 bp, Homo sapien
ccaactccctccctcggcgagaact

SEQ ID NO: 5619982 - DNA, 25 bp, Homo sapien
cttggtttccaggtaagccagctct

SEQ ID NO: 5619983 - DNA, 25 bp, Homo sapien
aggctattaagcaagatggcgtgag

SEQ ID NO: 5619984 - DNA, 25 bp, Homo sapien
ggcgagaactgagctgtccatttcc

SEQ ID NO: 5619985 - DNA, 25 bp, Homo sapien
tccacagatgccctgcacgcccata

SEQ ID NO: 5619986 - DNA, 25 bp, Homo sapien
atatggggcagaacagtgccctatc

SEQ ID NO: 5619987 - DNA, 25 bp, Homo sapien
ctttcctagccaagggaagcagtga

SEQ ID NO: 5619988 - DNA, 25 bp, Homo sapien
ggaaaaatgggacacttctgcccta

SEQ ID NO: 5619989 - DNA, 25 bp, Homo sapien
atggccaaataggaacagctccgat

SEQ ID NO: 5619990 - DNA, 25 bp, Homo sapien
cagaagacaggtgatttccgcattt

SEQ ID NO: 5619991 - DNA, 25 bp, Homo sapien
tcatctcattgggactggttggaca

SEQ ID NO: 5619992 - DNA, 25 bp, Homo sapien
ccaactgaggtacctggttcatctc

SEQ ID NO: 5619993 - DNA, 25 bp, Homo sapien
tctcctgtgcctggctcagtgggtc

SEQ ID NO: 5619994 - DNA, 25 bp, Homo sapien
ggcatcacctcacctgggaagcgca

SEQ ID NO: 5619995 - DNA, 25 bp, Homo sapien
tttcccacggtcttagcaaccagca

SEQ ID NO: 5619996 - DNA, 25 bp, Homo sapien
gtggggtttctgttccaagatggcc

SEQ ID NO: 5619997 - DNA, 25 bp, Homo sapien
atcatagattaggaaatggagggat

SEQ ID NO: 5619998 - DNA, 25 bp, Homo sapien
tactctcagggtggtcacttaggca

SEQ ID NO: 5619999 - DNA, 25 bp, Homo sapien
ctaaatacggacgaacacccaagta

SEQ ID NO: 5620000 - DNA, 25 bp, Homo sapien
gaggagggtgtacttccactgatta

SEQ ID NO: 5620001 - DNA, 25 bp, Homo sapien
ttgttttccgtgaagagcctgtaac

SEQ ID NO: 5620002 - DNA, 25 bp, Homo sapien
tccctggcagatagtataggcttgt

SEQ ID NO: 5620003 - DNA, 25 bp, Homo sapien
tcatcaaaatggagttggcctttac

SEQ ID NO: 5620004 - DNA, 25 bp, Homo sapien
acttaggcaaactccagaggagggt

SEQ ID NO: 5620005 - DNA, 25 bp, Homo sapien
taggaaatagttgtgcaatggttgt

SEQ ID NO: 5620006 - DNA, 25 bp, Homo sapien
cttaaaatggaaggtgtatgtactt

SEQ ID NO: 5620007 - DNA, 25 bp, Homo sapien
gatgccttgcaggaatgtgggataa

SEQ ID NO: 5620008 - DNA, 25 bp, Homo sapien
gtaatctcagtcacagggccatgtc

SEQ ID NO: 5620009 - DNA, 25 bp, Homo sapien
tcatataaacccagaaaagaatatt

SEQ ID NO: 5620010 - DNA, 25 bp, Homo sapien
tcttggcaagatcccatccatgaca

SEQ ID NO: 5620011 - DNA, 25 bp, Homo sapien
acaggagtgaaaactgtctcatata

SEQ ID NO: 5620012 - DNA, 25 bp, Homo sapien
cgccaccgcactttcagcctcagcc

SEQ ID NO: 5620013 - DNA, 25 bp, Homo sapien
gcaactaaattaacacgtgatggtt

SEQ ID NO: 5620014 - DNA, 25 bp, Homo sapien
cacagcggctcatgcttctaatccc

SEQ ID NO: 5620015 - DNA, 25 bp, Homo sapien
ctcctcccactaaaaggccccgtca

SEQ ID NO: 5620016 - DNA, 25 bp, Homo sapien
atccatgacagcattcccgtccacc

SEQ ID NO: 5620017 - DNA, 25 bp, Homo sapien
aacacgtgatggttcttggcaagat

SEQ ID NO: 5620018 - DNA, 25 bp, Homo sapien
tccgaaagtctggagcttactggac

SEQ ID NO: 5620019 - DNA, 25 bp, Homo sapien
cttactggacgtagtgtaatggcaa

SEQ ID NO: 5620020 - DNA, 25 bp, Homo sapien
taacagcagctagcctttattgatc

SEQ ID NO: 5620021 - DNA, 25 bp, Homo sapien
gtatacttccagagcttgcaatcac

SEQ ID NO: 5620022 - DNA, 25 bp, Homo sapien
tatcttagaaagactgtacacagtg

SEQ ID NO: 5620023 - DNA, 25 bp, Homo sapien
gctacataaagatacagtctacctc

SEQ ID NO: 5620024 - DNA, 25 bp, Homo sapien
tctacacagtacagaggaatgatgc

SEQ ID NO: 5620025 - DNA, 25 bp, Homo sapien
cagggaataggacactttttaacta

SEQ ID NO: 5620026 - DNA, 25 bp, Homo sapien
atgatgcacaccttggcagtatact

SEQ ID NO: 5620027 - DNA, 25 bp, Homo sapien
actgcctcactgacagcaatgcttt

SEQ ID NO: 5620028 - DNA, 25 bp, Homo sapien
tgttagacataacgcaaagtatatc

SEQ ID NO: 5620029 - DNA, 25 bp, Homo sapien
aaaggaaattcattataacagcagc

SEQ ID NO: 5620030 - DNA, 25 bp, Homo sapien
caaaaagattactgagcacataact

SEQ ID NO: 5620031 - DNA, 25 bp, Homo sapien
tctagcccaggcccttggcccccaa

SEQ ID NO: 5620032 - DNA, 25 bp, Homo sapien
agggctccccactgctccaacccac

SEQ ID NO: 5620033 - DNA, 25 bp, Homo sapien
aacctagcccatagcctagcctggg

SEQ ID NO: 5620034 - DNA, 25 bp, Homo sapien
gacacacggacacaggctctgtaca

SEQ ID NO: 5620035 - DNA, 25 bp, Homo sapien
tgtccctcccttaagtaggaggtca

SEQ ID NO: 5620036 - DNA, 25 bp, Homo sapien
ccacaaaataaaaacgatgagatag

SEQ ID NO: 5620037 - DNA, 25 bp, Homo sapien
atagttttgtttcccggagtcgaga

SEQ ID NO: 5620038 - DNA, 25 bp, Homo sapien
gtagacccagtctctgtccctccct

SEQ ID NO: 5620039 - DNA, 25 bp, Homo sapien
gctcatacacagacacacggacaca

SEQ ID NO: 5620040 - DNA, 25 bp, Homo sapien
tcctctctttctagcccaggccctt

SEQ ID NO: 5620041 - DNA, 25 bp, Homo sapien
ccactgctccaacccactcatctct

SEQ ID NO: 5620042 - DNA, 25 bp, Homo sapien
aagaactaccagcaatggttagtac

SEQ ID NO: 5620043 - DNA, 25 bp, Homo sapien
aaagctagacctgttaagaactacc

SEQ ID NO: 5620044 - DNA, 25 bp, Homo sapien
atcttagggtgaatatcagagctgg

SEQ ID NO: 5620045 - DNA, 25 bp, Homo sapien
ttgacaatattggtaaaagctagac

SEQ ID NO: 5620046 - DNA, 25 bp, Homo sapien
aatcctggagcactgagaattatct

SEQ ID NO: 5620047 - DNA, 25 bp, Homo sapien
aggagtcggtgttgaatacaagttt

SEQ ID NO: 5620048 - DNA, 25 bp, Homo sapien
agtggaaaagcctaaatctcaagac

SEQ ID NO: 5620049 - DNA, 25 bp, Homo sapien
agggccccaggagctaatattgcta

SEQ ID NO: 5620050 - DNA, 25 bp, Homo sapien
ttcatcaggctaaaataaaaaggga

SEQ ID NO: 5620051 - DNA, 25 bp, Homo sapien
tggttagtactgaaagcaaaaggga

SEQ ID NO: 5620052 - DNA, 25 bp, Homo sapien
gtgaatatcagagctggtgtccatc

SEQ ID NO: 5620053 - DNA, 25 bp, Homo sapien
ctctgatcctggacatgtctgtatc

SEQ ID NO: 5620054 - DNA, 25 bp, Homo sapien
tcaccctagtccacatctgccgttt

SEQ ID NO: 5620055 - DNA, 25 bp, Homo sapien
aggtccccaggaatctcaccctagt

SEQ ID NO: 5620056 - DNA, 25 bp, Homo sapien
accatgtgtgtgctctcaccaactc

SEQ ID NO: 5620057 - DNA, 25 bp, Homo sapien
cttttccagttcagccagtgtcacc

SEQ ID NO: 5620058 - DNA, 25 bp, Homo sapien
gttagagcatgtaaaggtgatctga

SEQ ID NO: 5620059 - DNA, 25 bp, Homo sapien
tgtatacctgagaatctggaagatt

SEQ ID NO: 5620060 - DNA, 25 bp, Homo sapien
gatatcatggtcttacaggtgtccc

SEQ ID NO: 5620061 - DNA, 25 bp, Homo sapien
atgtaaaggttatgtatcagatgat

SEQ ID NO: 5620062 - DNA, 25 bp, Homo sapien
tacaggtgtccctagccctggactg

SEQ ID NO: 5620063 - DNA, 25 bp, Homo sapien
ttcagtatttggaatgggtaatttc

SEQ ID NO: 5620064 - DNA, 25 bp, Homo sapien
caattaggagttgacaggtatggaa

SEQ ID NO: 5620065 - DNA, 25 bp, Homo sapien
ggctaagcacattaaccaaggacat

SEQ ID NO: 5620066 - DNA, 25 bp, Homo sapien
agggaatagtaagacgaagataata

SEQ ID NO: 5620067 - DNA, 25 bp, Homo sapien
tagttctaacaaggagatgtgagca

SEQ ID NO: 5620068 - DNA, 25 bp, Homo sapien
tctgaagcacaagatggctaagcac

SEQ ID NO: 5620069 - DNA, 25 bp, Homo sapien
ttacaggtttgaacagataggagga

SEQ ID NO: 5620070 - DNA, 25 bp, Homo sapien
cataaaatgtcagggataggactac

SEQ ID NO: 5620071 - DNA, 25 bp, Homo sapien
tttaggagcaatgtgatttcagaac

SEQ ID NO: 5620072 - DNA, 25 bp, Homo sapien
agtgagctcacagtataaagacatc

SEQ ID NO: 5620073 - DNA, 25 bp, Homo sapien
aggggttggtgttccgaatacacag

SEQ ID NO: 5620074 - DNA, 25 bp, Homo sapien
gataggaggacatttctgaagcaca

SEQ ID NO: 5620075 - DNA, 25 bp, Homo sapien
gattataggtgtaaaccagtgtgcc

SEQ ID NO: 5620076 - DNA, 25 bp, Homo sapien
caatagaagacctgagtagaatgaa

SEQ ID NO: 5620077 - DNA, 25 bp, Homo sapien
tccaaaagtaaaagtggcattccaa

SEQ ID NO: 5620078 - DNA, 25 bp, Homo sapien
gtcctctgagtaaagaagattgccc

SEQ ID NO: 5620079 - DNA, 25 bp, Homo sapien
tgagtagaatgaaaagaccaccttc

SEQ ID NO: 5620080 - DNA, 25 bp, Homo sapien
ttctggatgggaataacattgacac

SEQ ID NO: 5620081 - DNA, 25 bp, Homo sapien
tgagatgaggaaaagtgtattgtta

SEQ ID NO: 5620082 - DNA, 25 bp, Homo sapien
cagacttctgtgagactggaactgc

SEQ ID NO: 5620083 - DNA, 25 bp, Homo sapien
aagaagattgccctccatgatgtat

SEQ ID NO: 5620084 - DNA, 25 bp, Homo sapien
caacttggaaggtgtttctggatgg

SEQ ID NO: 5620085 - DNA, 25 bp, Homo sapien
cctaaatttgggtgagatgaggaaa

SEQ ID NO: 5620086 - DNA, 25 bp, Homo sapien
gccggagccagggtcttctgtaccc

SEQ ID NO: 5620087 - DNA, 25 bp, Homo sapien
gggtacagaagaccctggctccggc

SEQ ID NO: 5620088 - DNA, 25 bp, Homo sapien
accaaaccttgcctgacctagccac

SEQ ID NO: 5620089 - DNA, 25 bp, Homo sapien
gatacaatggagacttcagaacttc

SEQ ID NO: 5620090 - DNA, 25 bp, Homo sapien
atttctgctgtactccaaagccact

SEQ ID NO: 5620091 - DNA, 25 bp, Homo sapien
gtattgtaaattagtcacctgattc

SEQ ID NO: 5620092 - DNA, 25 bp, Homo sapien
ataaagaatgcaaaacacaaaattt

SEQ ID NO: 5620093 - DNA, 25 bp, Homo sapien
ttagtaactttgggatggtggaaga

SEQ ID NO: 5620094 - DNA, 25 bp, Homo sapien
accaccacaccccagacatataaat

SEQ ID NO: 5620095 - DNA, 25 bp, Homo sapien
ctgggaccaaaccttgcctgaccta

SEQ ID NO: 5620096 - DNA, 25 bp, Homo sapien
acttgtcagttatgtgagtgatttc

SEQ ID NO: 5620097 - DNA, 25 bp, Homo sapien
tgaaagtgatacaatggagacttca

SEQ ID NO: 5620098 - DNA, 25 bp, Homo sapien
tgtttagtaactttgggatggtgga

SEQ ID NO: 5620099 - DNA, 25 bp, Homo sapien
tgtagtattgtgaagaacaaattcc

SEQ ID NO: 5620100 - DNA, 25 bp, Homo sapien
gtagaatttaaaactaagagcatac

SEQ ID NO: 5620101 - DNA, 25 bp, Homo sapien
caccaagagtttgagaaacatgctc

SEQ ID NO: 5620102 - DNA, 25 bp, Homo sapien
tatcatatggcaaatgaagcaaact

SEQ ID NO: 5620103 - DNA, 25 bp, Homo sapien
ttctactatgggtcttggaaataac

SEQ ID NO: 5620104 - DNA, 25 bp, Homo sapien
tggggttttcaatgcaatagaattc

SEQ ID NO: 5620105 - DNA, 25 bp, Homo sapien
acacgtggctagaagatactgttac

SEQ ID NO: 5620106 - DNA, 25 bp, Homo sapien
gatggaggctggcttaataagattt

SEQ ID NO: 5620107 - DNA, 25 bp, Homo sapien
acatgctctaatgatggaggctggc

SEQ ID NO: 5620108 - DNA, 25 bp, Homo sapien
atatggtctgaagaaaacctctatc

SEQ ID NO: 5620109 - DNA, 25 bp, Homo sapien
aataagggaattatgtcagtacatt

SEQ ID NO: 5620110 - DNA, 25 bp, Homo sapien
gtcaaggaggtggtgctttatttta

SEQ ID NO: 5620111 - DNA, 25 bp, Homo sapien
aacgccctgagtcaggtcaaggagg

SEQ ID NO: 5620112 - DNA, 25 bp, Homo sapien
gggttcagtgtgccgatgatttcct

SEQ ID NO: 5620113 - DNA, 25 bp, Homo sapien
gaacagaccaaaatactccattgtt

SEQ ID NO: 5620114 - DNA, 25 bp, Homo sapien
cttcaacccgggagatatttgctgc

SEQ ID NO: 5620115 - DNA, 25 bp, Homo sapien
tcgcaagcatggcaataccccttct

SEQ ID NO: 5620116 - DNA, 25 bp, Homo sapien
gccttcaagtccagcgtcgcaagca

SEQ ID NO: 5620117 - DNA, 25 bp, Homo sapien
atttgctgcagtgaacccagtgcac

SEQ ID NO: 5620118 - DNA, 25 bp, Homo sapien
tgtgcaagattgtttcataggtaaa

SEQ ID NO: 5620119 - DNA, 25 bp, Homo sapien
ttgaagcatacatgtgcaagattgt

SEQ ID NO: 5620120 - DNA, 25 bp, Homo sapien
cataggtaaacttctgagtaggggg

SEQ ID NO: 5620121 - DNA, 25 bp, Homo sapien
tctcttaaatatagtcatggtaggc

SEQ ID NO: 5620122 - DNA, 25 bp, Homo sapien
tattttaagttcatgagacacaaac

SEQ ID NO: 5620123 - DNA, 25 bp, Homo sapien
cttaaatatagtcatggtaggcccg

SEQ ID NO: 5620124 - DNA, 25 bp, Homo sapien
ttcatgagacacaaacaagacccta

SEQ ID NO: 5620125 - DNA, 25 bp, Homo sapien
aaagcccacaataaaaatatttcca

SEQ ID NO: 5620126 - DNA, 25 bp, Homo sapien
gagtgaaatgtgctaataaaaatat

SEQ ID NO: 5620127 - DNA, 25 bp, Homo sapien
catgagacacaaacaagaccctatt

SEQ ID NO: 5620128 - DNA, 25 bp, Homo sapien
taagttcatgagacacaaacaagac

SEQ ID NO: 5620129 - DNA, 25 bp, Homo sapien
agttcatgagacacaaacaagaccc

SEQ ID NO: 5620130 - DNA, 25 bp, Homo sapien
aaaggaatgagtgaaatgtgctaat

SEQ ID NO: 5620131 - DNA, 25 bp, Homo sapien
cagttagcttttccagtaaatttac

SEQ ID NO: 5620132 - DNA, 25 bp, Homo sapien
gttaatagagagaatgtttactacc

SEQ ID NO: 5620133 - DNA, 25 bp, Homo sapien
ttgcagtcctgcatctggatcaagc

SEQ ID NO: 5620134 - DNA, 25 bp, Homo sapien
tattgggaaaatactaaatgtaaca

SEQ ID NO: 5620135 - DNA, 25 bp, Homo sapien
ttttgatgagtgaagactatttttc

SEQ ID NO: 5620136 - DNA, 25 bp, Homo sapien
tcaggtggattgtggccattccttt

SEQ ID NO: 5620137 - DNA, 25 bp, Homo sapien
aatgttgaacaaagttgcttgaaat

SEQ ID NO: 5620138 - DNA, 25 bp, Homo sapien
tagtgacattttgcacagactctcc

SEQ ID NO: 5620139 - DNA, 25 bp, Homo sapien
gtaagcttaagaaaagtttgattgc

SEQ ID NO: 5620140 - DNA, 25 bp, Homo sapien
tcagatgaaataactttaggtaagc

SEQ ID NO: 5620141 - DNA, 25 bp, Homo sapien
tggatcaagcagtttggttagagaa

SEQ ID NO: 5620142 - DNA, 25 bp, Homo sapien
cattctgatttagtaggctgcacac

SEQ ID NO: 5620143 - DNA, 25 bp, Homo sapien
acactcaatagtggccgaaaggtgg

SEQ ID NO: 5620144 - DNA, 25 bp, Homo sapien
agcttttgccccagtcgggccgtcc

SEQ ID NO: 5620145 - DNA, 25 bp, Homo sapien
aaggtggtgtacaccctggccatct

SEQ ID NO: 5620146 - DNA, 25 bp, Homo sapien
atggacgcatgcaatgatggacata

SEQ ID NO: 5620147 - DNA, 25 bp, Homo sapien
tctggcctccgcaggccagagtccc

SEQ ID NO: 5620148 - DNA, 25 bp, Homo sapien
gcagtgagggctttaaggttctcct

SEQ ID NO: 5620149 - DNA, 25 bp, Homo sapien
gtccagaacgctggagcttttgccc

SEQ ID NO: 5620150 - DNA, 25 bp, Homo sapien
gtacgtctgggtcacacattgctca

SEQ ID NO: 5620151 - DNA, 25 bp, Homo sapien
cgggccgtcctcctgggattcccga

SEQ ID NO: 5620152 - DNA, 25 bp, Homo sapien
attgctcagcacttgtccagaacgc

SEQ ID NO: 5620153 - DNA, 25 bp, Homo sapien
ggccctacctgcagtccctacctcc

SEQ ID NO: 5620154 - DNA, 25 bp, Homo sapien
cctcttcccaaggcctaacgagcgc

SEQ ID NO: 5620155 - DNA, 25 bp, Homo sapien
cccccttatgtcaggtaaagagcgc

SEQ ID NO: 5620156 - DNA, 25 bp, Homo sapien
agagagagagacactctcgagtgtg

SEQ ID NO: 5620157 - DNA, 25 bp, Homo sapien
gaagaagcttcactctgggagaacc

SEQ ID NO: 5620158 - DNA, 25 bp, Homo sapien
aggcgatgtcagtcttgaaccccct

SEQ ID NO: 5620159 - DNA, 25 bp, Homo sapien
gcaactctagagtgcgatgaagaag

SEQ ID NO: 5620160 - DNA, 25 bp, Homo sapien
tttggtggagcttttaatgagagag

SEQ ID NO: 5620161 - DNA, 25 bp, Homo sapien
ggaaatcacaggaatcagcaactct

SEQ ID NO: 5620162 - DNA, 25 bp, Homo sapien
gcctaacgagcgccttcgctggcaa

SEQ ID NO: 5620163 - DNA, 25 bp, Homo sapien
aaaagagacaagccatgtaaacgtt

SEQ ID NO: 5620164 - DNA, 25 bp, Homo sapien
acccccttcgtgaccacggtctctc

SEQ ID NO: 5620165 - DNA, 25 bp, Homo sapien
gagtgatggatagatggcatctgtc

SEQ ID NO: 5620166 - DNA, 25 bp, Homo sapien
gtgcccatggctagcacgttggagg

SEQ ID NO: 5620167 - DNA, 25 bp, Homo sapien
caggactcccctgtgatggggtaat

SEQ ID NO: 5620168 - DNA, 25 bp, Homo sapien
ttacagagagaggtaccaccttgag

SEQ ID NO: 5620169 - DNA, 25 bp, Homo sapien
tcaggttaattaatgtgggtaggac

SEQ ID NO: 5620170 - DNA, 25 bp, Homo sapien
cttataggaattggtgcccatggct

SEQ ID NO: 5620171 - DNA, 25 bp, Homo sapien
gtaccaccttgagaggaaggctgaa

SEQ ID NO: 5620172 - DNA, 25 bp, Homo sapien
ggtggaggtgcttcctcaggttaat

SEQ ID NO: 5620173 - DNA, 25 bp, Homo sapien
atggggtaattcagtgggtcccact

SEQ ID NO: 5620174 - DNA, 25 bp, Homo sapien
tctctccaagccaggttgggatttc

SEQ ID NO: 5620175 - DNA, 25 bp, Homo sapien
actttgtctttggggttgagagtga

SEQ ID NO: 5620176 - DNA, 25 bp, Homo sapien
tctatcaggactggatcgctgtaac

SEQ ID NO: 5620177 - DNA, 25 bp, Homo sapien
aggtttcaaagctctatcaggactg

SEQ ID NO: 5620178 - DNA, 25 bp, Homo sapien
taggtgtgaaccacctcaccaagcc

SEQ ID NO: 5620179 - DNA, 25 bp, Homo sapien
aaccacctcaccaagccaatttttc

SEQ ID NO: 5620180 - DNA, 25 bp, Homo sapien
ttgagctgaactaccttagaaaggt

SEQ ID NO: 5620181 - DNA, 25 bp, Homo sapien
taccttagaaaggtagagtgaccac

SEQ ID NO: 5620182 - DNA, 25 bp, Homo sapien
tctaagcagagttgtcagactgagt

SEQ ID NO: 5620183 - DNA, 25 bp, Homo sapien
gttgtcagactgagtagaattttgc

SEQ ID NO: 5620184 - DNA, 25 bp, Homo sapien
tagaattttgctcataagtacctgg

SEQ ID NO: 5620185 - DNA, 25 bp, Homo sapien
tacaggcgcatgtcatcatgactag

SEQ ID NO: 5620186 - DNA, 25 bp, Homo sapien
tggatcgctgtaacttgagctgaac

SEQ ID NO: 5620187 - DNA, 25 bp, Homo sapien
atacagtattctacatgagatggaa

SEQ ID NO: 5620188 - DNA, 25 bp, Homo sapien
aaaaaaaatactggattagagatat

SEQ ID NO: 5620189 - DNA, 25 bp, Homo sapien
acatgagatggaatcttatgactcc

SEQ ID NO: 5620190 - DNA, 25 bp, Homo sapien
ctaaattaaactgctctgaatggac

SEQ ID NO: 5620191 - DNA, 25 bp, Homo sapien
aatctcagagtaatggtaggtaatc

SEQ ID NO: 5620192 - DNA, 25 bp, Homo sapien
attctgtgtcgttctaccctaaaat

SEQ ID NO: 5620193 - DNA, 25 bp, Homo sapien
gcattcacacaaaaccaggatctcc

SEQ ID NO: 5620194 - DNA, 25 bp, Homo sapien
cacatccaaaataatgcattcacac

SEQ ID NO: 5620195 - DNA, 25 bp, Homo sapien
tgaatggacttacagttgttcccta

SEQ ID NO: 5620196 - DNA, 25 bp, Homo sapien
gtaatggtaggtaatccactacacc

SEQ ID NO: 5620197 - DNA, 25 bp, Homo sapien
taggtcttctgcagtgttaaaagtg

SEQ ID NO: 5620198 - DNA, 25 bp, Homo sapien
actaagaagtaaatatccaccccac

SEQ ID NO: 5620199 - DNA, 25 bp, Homo sapien
gggcttaagtgatccttcctgcttc

SEQ ID NO: 5620200 - DNA, 25 bp, Homo sapien
aaagtatgactggtaagatttttac

SEQ ID NO: 5620201 - DNA, 25 bp, Homo sapien
gtggcactgcagcctggaactcttg

SEQ ID NO: 5620202 - DNA, 25 bp, Homo sapien
agttacgcttgcttgttaaaatatt

SEQ ID NO: 5620203 - DNA, 25 bp, Homo sapien
attatctaaagtatgactggtaaga

SEQ ID NO: 5620204 - DNA, 25 bp, Homo sapien
tggaactcttgggcttaagtgatcc

SEQ ID NO: 5620205 - DNA, 25 bp, Homo sapien
aatatccaccccacctttgacttct

SEQ ID NO: 5620206 - DNA, 25 bp, Homo sapien
taatcccacataagtctaaaatttg

SEQ ID NO: 5620207 - DNA, 25 bp, Homo sapien
tgctatgttgaccaggctgaagtgg

SEQ ID NO: 5620208 - DNA, 25 bp, Homo sapien
gtcttgctatgttgaccaggctgaa

SEQ ID NO: 5620209 - DNA, 25 bp, Homo sapien
aagtctgtgcaacatagcaggagtc

SEQ ID NO: 5620210 - DNA, 25 bp, Homo sapien
aaagacaaaaccctccaagaaatca

SEQ ID NO: 5620211 - DNA, 25 bp, Homo sapien
tccccatgaattaaaagacagattt

SEQ ID NO: 5620212 - DNA, 25 bp, Homo sapien
ggaattcacaagtctgtgcaacata

SEQ ID NO: 5620213 - DNA, 25 bp, Homo sapien
acagattttcagactgagctgattc

SEQ ID NO: 5620214 - DNA, 25 bp, Homo sapien
gcatggtgtcacatgagtgtagtcc

SEQ ID NO: 5620215 - DNA, 25 bp, Homo sapien
gggaccacacattcaaaagacaaaa

SEQ ID NO: 5620216 - DNA, 25 bp, Homo sapien
tgcaacatagcaggagtctctttaa

SEQ ID NO: 5620217 - DNA, 25 bp, Homo sapien
caagatattctgaaagctgagatgg

SEQ ID NO: 5620218 - DNA, 25 bp, Homo sapien
tagccaagatattctgaaagctgag

SEQ ID NO: 5620219 - DNA, 25 bp, Homo sapien
gtgtagtccacattacttgagtgac

SEQ ID NO: 5620220 - DNA, 25 bp, Homo sapien
acactcagcgttgctcaggtggaga

SEQ ID NO: 5620221 - DNA, 25 bp, Homo sapien
ttgtgaacttgtagaaagaggctca

SEQ ID NO: 5620222 - DNA, 25 bp, Homo sapien
ttagcttacgcccggcccgtgctca

SEQ ID NO: 5620223 - DNA, 25 bp, Homo sapien
gactaagcaagaagactgcctaggc

SEQ ID NO: 5620224 - DNA, 25 bp, Homo sapien
aattccagactggtcccctgcctcc

SEQ ID NO: 5620225 - DNA, 25 bp, Homo sapien
ttctggagagaaatttgagttccca

SEQ ID NO: 5620226 - DNA, 25 bp, Homo sapien
ggaggctacgcatcctgtccacgat

SEQ ID NO: 5620227 - DNA, 25 bp, Homo sapien
cagagatgtgtgagcactgaatata

SEQ ID NO: 5620228 - DNA, 25 bp, Homo sapien
caggaatccattgcagagaagtgct

SEQ ID NO: 5620229 - DNA, 25 bp, Homo sapien
cacagcatctagagcgatcctggtg

SEQ ID NO: 5620230 - DNA, 25 bp, Homo sapien
aatgcaaaggacgaggttatcttgc

SEQ ID NO: 5620231 - DNA, 25 bp, Homo sapien
aacttggtggattgaaaatagttaa

SEQ ID NO: 5620232 - DNA, 25 bp, Homo sapien
tattgcagctaacgttcttccagcc

SEQ ID NO: 5620233 - DNA, 25 bp, Homo sapien
tgcaagagataaatggcagacattt

SEQ ID NO: 5620234 - DNA, 25 bp, Homo sapien
tattcaaaattaatgcgccaaactt

SEQ ID NO: 5620235 - DNA, 25 bp, Homo sapien
tactggagacccacacgtttccacc

SEQ ID NO: 5620236 - DNA, 25 bp, Homo sapien
ttcttccagccaccaaaataccatc

SEQ ID NO: 5620237 - DNA, 25 bp, Homo sapien
tcgtcatcttttactggagacccac

SEQ ID NO: 5620238 - DNA, 25 bp, Homo sapien
atgaaatgcattgatatagtatcct

SEQ ID NO: 5620239 - DNA, 25 bp, Homo sapien
tatgtatctgatatagtatgaaatg

SEQ ID NO: 5620240 - DNA, 25 bp, Homo sapien
taatgcgccaaacttggtggattga

SEQ ID NO: 5620241 - DNA, 25 bp, Homo sapien
tgtctcactgcaagagataaatggc

SEQ ID NO: 5620242 - DNA, 25 bp, Homo sapien
cgtgctttaaaggtagatgtgagaa

SEQ ID NO: 5620243 - DNA, 25 bp, Homo sapien
ttctcacatctacctttaaagcacg

SEQ ID NO: 5620244 - DNA, 25 bp, Homo sapien
cctgcatcatataccactacacctc

SEQ ID NO: 5620245 - DNA, 25 bp, Homo sapien
ctctgagactgttttccccccatgt

SEQ ID NO: 5620246 - DNA, 25 bp, Homo sapien
acaaaccttattaatagagccactc

SEQ ID NO: 5620247 - DNA, 25 bp, Homo sapien
tatcaggcactgatctgttttcttt

SEQ ID NO: 5620248 - DNA, 25 bp, Homo sapien
tgcatggctatatggaaattaaatg

SEQ ID NO: 5620249 - DNA, 25 bp, Homo sapien
tagagccactctagactactttatt

SEQ ID NO: 5620250 - DNA, 25 bp, Homo sapien
ttccccaagccatacaatgtacttt

SEQ ID NO: 5620251 - DNA, 25 bp, Homo sapien
tttggcccagtgtataattcatatc

SEQ ID NO: 5620252 - DNA, 25 bp, Homo sapien
agctttggagttaagtaacaacctg

SEQ ID NO: 5620253 - DNA, 25 bp, Homo sapien
acaaattagtaaaactctctgagac

SEQ ID NO: 5620254 - DNA, 25 bp, Homo sapien
caacctggtttgaaatttcagctcc

SEQ ID NO: 5620255 - DNA, 25 bp, Homo sapien
ttttatataccaactcttagcccga

SEQ ID NO: 5620256 - DNA, 25 bp, Homo sapien
tatataccaactcttagcccgaggg

SEQ ID NO: 5620257 - DNA, 25 bp, Homo sapien
ggaagggacagatgtttttctggga

SEQ ID NO: 5620258 - DNA, 25 bp, Homo sapien
ggacagatgtttttctgggatgcac

SEQ ID NO: 5620259 - DNA, 25 bp, Homo sapien
agggacagatgtttttctgggatgc

SEQ ID NO: 5620260 - DNA, 25 bp, Homo sapien
tctgaggacaagaaacagtcatgga

SEQ ID NO: 5620261 - DNA, 25 bp, Homo sapien
gaggaagggacagatgtttttctgg

SEQ ID NO: 5620262 - DNA, 25 bp, Homo sapien
gatgtttttctgggatgcactgggg

SEQ ID NO: 5620263 - DNA, 25 bp, Homo sapien
agatgtttttctgggatgcactggg

SEQ ID NO: 5620264 - DNA, 25 bp, Homo sapien
ctctgaggacaagaaacagtcatgg

SEQ ID NO: 5620265 - DNA, 25 bp, Homo sapien
atgtttttctgggatgcactgggga

SEQ ID NO: 5620266 - DNA, 25 bp, Homo sapien
cttgatgtagtataactggttccat

SEQ ID NO: 5620267 - DNA, 25 bp, Homo sapien
tagtgttaagcagccttcaagagac

SEQ ID NO: 5620268 - DNA, 25 bp, Homo sapien
tgtttaacgcaagtatcaaagcact

SEQ ID NO: 5620269 - DNA, 25 bp, Homo sapien
taacgtaccctcagactgcagagtt

SEQ ID NO: 5620270 - DNA, 25 bp, Homo sapien
gatgaagtgaccatacccggtatcc

SEQ ID NO: 5620271 - DNA, 25 bp, Homo sapien
tatggtaggtgaggttattagcatt

SEQ ID NO: 5620272 - DNA, 25 bp, Homo sapien
ttcaagagacataagtgatgggtca

SEQ ID NO: 5620273 - DNA, 25 bp, Homo sapien
atattgtagaaggaaagagtatttc

SEQ ID NO: 5620274 - DNA, 25 bp, Homo sapien
tggcaaataagctgtatattgctct

SEQ ID NO: 5620275 - DNA, 25 bp, Homo sapien
acttaaccgttgtggcaagagaagc

SEQ ID NO: 5620276 - DNA, 25 bp, Homo sapien
agtgatgggtcagtgttttgtctac

SEQ ID NO: 5620277 - DNA, 25 bp, Homo sapien
attatggtgaacactcagtggggac

SEQ ID NO: 5620278 - DNA, 25 bp, Homo sapien
tagtagagacctggaaaagcttgta

SEQ ID NO: 5620279 - DNA, 25 bp, Homo sapien
attttgaggccaagaaaatatatac

SEQ ID NO: 5620280 - DNA, 25 bp, Homo sapien
cctggaaaagcttgtatgtagcctt

SEQ ID NO: 5620281 - DNA, 25 bp, Homo sapien
tgaaaagttaacatgccaagaatct

SEQ ID NO: 5620282 - DNA, 25 bp, Homo sapien
gtcacccaggctcttgcccctgtcc

SEQ ID NO: 5620283 - DNA, 25 bp, Homo sapien
gttagttaacagatagtagagacct

SEQ ID NO: 5620284 - DNA, 25 bp, Homo sapien
agtggggactgcatattgtgagtta

SEQ ID NO: 5620285 - DNA, 25 bp, Homo sapien
taataagagtaggaatatatatatc

SEQ ID NO: 5620286 - DNA, 25 bp, Homo sapien
aaggtatgtttctagggaggcaatt

SEQ ID NO: 5620287 - DNA, 25 bp, Homo sapien
aaataacatgtggtttagtgataaa

SEQ ID NO: 5620288 - DNA, 25 bp, Homo sapien
tgcaataaaacagacgagatatggc

SEQ ID NO: 5620289 - DNA, 25 bp, Homo sapien
acatggaagatttcaaacaggatcc

SEQ ID NO: 5620290 - DNA, 25 bp, Homo sapien
gtgaagttaggtaagtcaaatggac

SEQ ID NO: 5620291 - DNA, 25 bp, Homo sapien
acagttcgcctgcacaaaaatatag

SEQ ID NO: 5620292 - DNA, 25 bp, Homo sapien
ccaaaaatgcagaactaccttatgt

SEQ ID NO: 5620293 - DNA, 25 bp, Homo sapien
tctggaacaaaatctaaaagaaagc

SEQ ID NO: 5620294 - DNA, 25 bp, Homo sapien
tatagggctattaattgaaagcatc

SEQ ID NO: 5620295 - DNA, 25 bp, Homo sapien
tatattgtaccagaggaggatgata

SEQ ID NO: 5620296 - DNA, 25 bp, Homo sapien
ttcaagaataaatgacatcctcaac

SEQ ID NO: 5620297 - DNA, 25 bp, Homo sapien
cagacgagatatggcacaagttctc

SEQ ID NO: 5620298 - DNA, 25 bp, Homo sapien
acaggatcctggaatccaaaaatgc

SEQ ID NO: 5620299 - DNA, 25 bp, Homo sapien
tatgagactaacatgggtaaatcac

SEQ ID NO: 5620300 - DNA, 25 bp, Homo sapien
atgtcatatgaatgaagtatgccat

SEQ ID NO: 5620301 - DNA, 25 bp, Homo sapien
gtttccccatgtgtacggtactgat

SEQ ID NO: 5620302 - DNA, 25 bp, Homo sapien
gctgcctggttacgaatcccagctc

SEQ ID NO: 5620303 - DNA, 25 bp, Homo sapien
tacacgagttttcaaatgagatatc

SEQ ID NO: 5620304 - DNA, 25 bp, Homo sapien
tcatatgggaagatatattaggtta

SEQ ID NO: 5620305 - DNA, 25 bp, Homo sapien
actcattgtttgtgggaaaagattc

SEQ ID NO: 5620306 - DNA, 25 bp, Homo sapien
tacgaatcccagctcagacagttat

SEQ ID NO: 5620307 - DNA, 25 bp, Homo sapien
tacggtactgatctcatagagttgt

SEQ ID NO: 5620308 - DNA, 25 bp, Homo sapien
ggaaaagattctaactatgtcatat

SEQ ID NO: 5620309 - DNA, 25 bp, Homo sapien
tagcttcatacaatgcagaaaacat

SEQ ID NO: 5620310 - DNA, 25 bp, Homo sapien
atctcaggagacaaaaactaaaatg

SEQ ID NO: 5620311 - DNA, 25 bp, Homo sapien
gtgattgtgagtcacagaggcagag

SEQ ID NO: 5620312 - DNA, 25 bp, Homo sapien
agctacaacataatcagagagaaat

SEQ ID NO: 5620313 - DNA, 25 bp, Homo sapien
ccaggagtttgaaacaccacattcc

SEQ ID NO: 5620314 - DNA, 25 bp, Homo sapien
atgaatacatagaaatgtggtactt

SEQ ID NO: 5620315 - DNA, 25 bp, Homo sapien
gtggaggaagaagctcatactccca

SEQ ID NO: 5620316 - DNA, 25 bp, Homo sapien
ctggccgaatgtgattgtgagtcac

SEQ ID NO: 5620317 - DNA, 25 bp, Homo sapien
atctccaaggccaaggttctttccc

SEQ ID NO: 5620318 - DNA, 25 bp, Homo sapien
ggtaaagtatgctggccgaatgtga

SEQ ID NO: 5620319 - DNA, 25 bp, Homo sapien
acatgtccaatgctccctgctgccc

SEQ ID NO: 5620320 - DNA, 25 bp, Homo sapien
aatcagagagaaatctatcaggaaa

SEQ ID NO: 5620321 - DNA, 25 bp, Homo sapien
aatggcctgaagttattagttttga

SEQ ID NO: 5620322 - DNA, 25 bp, Homo sapien
caacattagtgctgttagaagtccc

SEQ ID NO: 5620323 - DNA, 25 bp, Homo sapien
accgtgtggccatactatcagtgca

SEQ ID NO: 5620324 - DNA, 25 bp, Homo sapien
attttgagcattaagaagggtttta

SEQ ID NO: 5620325 - DNA, 25 bp, Homo sapien
cgcttattacagggtgtgaaaaaag

SEQ ID NO: 5620326 - DNA, 25 bp, Homo sapien
aggtgtttgttctggctctttaggc

SEQ ID NO: 5620327 - DNA, 25 bp, Homo sapien
acatactgtgacaatgtccggcatc

SEQ ID NO: 5620328 - DNA, 25 bp, Homo sapien
atgtccggcatcctttagggcattt

SEQ ID NO: 5620329 - DNA, 25 bp, Homo sapien
actatggaagttactaatgaatgct

SEQ ID NO: 5620330 - DNA, 25 bp, Homo sapien
tcagtgcagtgtataattcaggcta

SEQ ID NO: 5620331 - DNA, 25 bp, Homo sapien
ggagccacggcaatgccaccgtgtg

SEQ ID NO: 5620332 - DNA, 25 bp, Homo sapien
ctcaaactgcatcgcctacgcacag

SEQ ID NO: 5620333 - DNA, 25 bp, Homo sapien
tcgcctacgcacagaagcttcccga

SEQ ID NO: 5620334 - DNA, 25 bp, Homo sapien
gacgttttcagcctctcaaactgca

SEQ ID NO: 5620335 - DNA, 25 bp, Homo sapien
gcctacgcacagaagcttcccgaat

SEQ ID NO: 5620336 - DNA, 25 bp, Homo sapien
gcctctcaaactgcatcgcctacgc

SEQ ID NO: 5620337 - DNA, 25 bp, Homo sapien
ctacgcacagaagcttcccgaatct

SEQ ID NO: 5620338 - DNA, 25 bp, Homo sapien
tgcatcgcctacgcacagaagcttc

SEQ ID NO: 5620339 - DNA, 25 bp, Homo sapien
tttcagcctctcaaactgcatcgcc

SEQ ID NO: 5620340 - DNA, 25 bp, Homo sapien
aactgcatcgcctacgcacagaagc

SEQ ID NO: 5620341 - DNA, 25 bp, Homo sapien
ggccactcactgagccccacgggcc

SEQ ID NO: 5620342 - DNA, 25 bp, Homo sapien
caaactgcatcgcctacgcacagaa

SEQ ID NO: 5620343 - DNA, 25 bp, Homo sapien
ttcacctttactagaagaaacagac

SEQ ID NO: 5620344 - DNA, 25 bp, Homo sapien
aacaggcagaaactagctaatctgc

SEQ ID NO: 5620345 - DNA, 25 bp, Homo sapien
tagctaatctgcatttatagagcat

SEQ ID NO: 5620346 - DNA, 25 bp, Homo sapien
gaagctgtatttcaagtacccaacc

SEQ ID NO: 5620347 - DNA, 25 bp, Homo sapien
taatactgccattactgaagtttac

SEQ ID NO: 5620348 - DNA, 25 bp, Homo sapien
ttatagagcatagttttttgggtgg

SEQ ID NO: 5620349 - DNA, 25 bp, Homo sapien
cagtagaagctgtatttcaagtacc

SEQ ID NO: 5620350 - DNA, 25 bp, Homo sapien
aattattcattcagtagaagctgta

SEQ ID NO: 5620351 - DNA, 25 bp, Homo sapien
agaagaaacagacttatgatggttc

SEQ ID NO: 5620352 - DNA, 25 bp, Homo sapien
cctacatgaactttctaatactgcc

SEQ ID NO: 5620353 - DNA, 25 bp, Homo sapien
taataccatttaaacaggcagaaac

SEQ ID NO: 5620354 - DNA, 25 bp, Homo sapien
tattataagaacaaaagtcatggaa

SEQ ID NO: 5620355 - DNA, 25 bp, Homo sapien
actgtcagtgataggattgtgttat

SEQ ID NO: 5620356 - DNA, 25 bp, Homo sapien
gtgagcactgattatttaaggtgac

SEQ ID NO: 5620357 - DNA, 25 bp, Homo sapien
aacaggaaaaataggcatattaacc

SEQ ID NO: 5620358 - DNA, 25 bp, Homo sapien
cagtagcatgctatagaattcatca

SEQ ID NO: 5620359 - DNA, 25 bp, Homo sapien
tatgtgccaactaaatgaactgtaa

SEQ ID NO: 5620360 - DNA, 25 bp, Homo sapien
gtgtgggtacaggtttatatgtgcc

SEQ ID NO: 5620361 - DNA, 25 bp, Homo sapien
gtgactgaggattactgtcagtgat

SEQ ID NO: 5620362 - DNA, 25 bp, Homo sapien
tttttggtcagtcttgtgtgggtac

SEQ ID NO: 5620363 - DNA, 25 bp, Homo sapien
catctgatatggaaaactgaaactt

SEQ ID NO: 5620364 - DNA, 25 bp, Homo sapien
aaattatgggcaatagctgtatcac

SEQ ID NO: 5620365 - DNA, 25 bp, Homo sapien
attgtgttcccagggttggggaata

SEQ ID NO: 5620366 - DNA, 25 bp, Homo sapien
gctttcacagaactagatacaaaat

SEQ ID NO: 5620367 - DNA, 25 bp, Homo sapien
ttaactgtttgaaaggtaagagcaa

SEQ ID NO: 5620368 - DNA, 25 bp, Homo sapien
ggtaagagcaataactaaactgagg

SEQ ID NO: 5620369 - DNA, 25 bp, Homo sapien
gagagtgactaatgaacaaacagga

SEQ ID NO: 5620370 - DNA, 25 bp, Homo sapien
aacaaagtgcatgacatgaaacaac

SEQ ID NO: 5620371 - DNA, 25 bp, Homo sapien
aaaaagatgagaagagtgttgtatc

SEQ ID NO: 5620372 - DNA, 25 bp, Homo sapien
gagaagagtgttgtatctgatgtac

SEQ ID NO: 5620373 - DNA, 25 bp, Homo sapien
tggggaatagggagtacctattcta

SEQ ID NO: 5620374 - DNA, 25 bp, Homo sapien
caggaaagaaatgttccgattaagt

SEQ ID NO: 5620375 - DNA, 25 bp, Homo sapien
aaagaatattaacaaagtgcatgac

SEQ ID NO: 5620376 - DNA, 25 bp, Homo sapien
ataactattcataggatacagtcat

SEQ ID NO: 5620377 - DNA, 25 bp, Homo sapien
ttacaacttagaaatgagtaatttc

SEQ ID NO: 5620378 - DNA, 25 bp, Homo sapien
gattcagtatccagacaaaagtatt

SEQ ID NO: 5620379 - DNA, 25 bp, Homo sapien
tattcataggatacagtcatgcaaa

SEQ ID NO: 5620380 - DNA, 25 bp, Homo sapien
ttctacttagttggattcagtatcc

SEQ ID NO: 5620381 - DNA, 25 bp, Homo sapien
aggatacagtcatgcaaataacagc

SEQ ID NO: 5620382 - DNA, 25 bp, Homo sapien
gtggacagagcattagcatgacaca

SEQ ID NO: 5620383 - DNA, 25 bp, Homo sapien
tcatatagggcttgaaaatattaca

SEQ ID NO: 5620384 - DNA, 25 bp, Homo sapien
cagtcatgcaaataacagctttttc

SEQ ID NO: 5620385 - DNA, 25 bp, Homo sapien
gcacaatattgcacaacaaatgtac

SEQ ID NO: 5620386 - DNA, 25 bp, Homo sapien
cataggatacagtcatgcaaataac

SEQ ID NO: 5620387 - DNA, 25 bp, Homo sapien
taggacttggcaaacaacagtgtac

SEQ ID NO: 5620388 - DNA, 25 bp, Homo sapien
tcaaaatgagattatgtgtacacaa

SEQ ID NO: 5620389 - DNA, 25 bp, Homo sapien
atactttttagcaacccaatgaact

SEQ ID NO: 5620390 - DNA, 25 bp, Homo sapien
atttgcacagtaccacagctactct

SEQ ID NO: 5620391 - DNA, 25 bp, Homo sapien
taaaacagtgtattataacttagcc

SEQ ID NO: 5620392 - DNA, 25 bp, Homo sapien
tgtgctacagtaggaaagttgagta

SEQ ID NO: 5620393 - DNA, 25 bp, Homo sapien
aaacaacagtgtacaggccaaatat

SEQ ID NO: 5620394 - DNA, 25 bp, Homo sapien
taagcaactatattaggacttggca

SEQ ID NO: 5620395 - DNA, 25 bp, Homo sapien
taatctgtgagaatattgtagtttc

SEQ ID NO: 5620396 - DNA, 25 bp, Homo sapien
ggccaaatatggcccatggcatgtt

SEQ ID NO: 5620397 - DNA, 25 bp, Homo sapien
gttgagtagttgcaaaagacactgc

SEQ ID NO: 5620398 - DNA, 25 bp, Homo sapien
atgtgaaaccatcaaattgtgctgc

SEQ ID NO: 5620399 - DNA, 25 bp, Homo sapien
catgtaaacatatagtacaaatttc

SEQ ID NO: 5620400 - DNA, 25 bp, Homo sapien
agtttaggtttgtttacacagtgaa

SEQ ID NO: 5620401 - DNA, 25 bp, Homo sapien
taagaacagattttcaacactttta

SEQ ID NO: 5620402 - DNA, 25 bp, Homo sapien
tgaaaccatcaaattgtgctgcttc

SEQ ID NO: 5620403 - DNA, 25 bp, Homo sapien
attcaagaaatttttaagaacagat

SEQ ID NO: 5620404 - DNA, 25 bp, Homo sapien
tcaaattgtgctgcttcaaacattt

SEQ ID NO: 5620405 - DNA, 25 bp, Homo sapien
ttacacagtgaattaatgtgaaacc

SEQ ID NO: 5620406 - DNA, 25 bp, Homo sapien
aatatgtaacactgcttttcaattt

SEQ ID NO: 5620407 - DNA, 25 bp, Homo sapien
taccttaataatatgtaacactgct

SEQ ID NO: 5620408 - DNA, 25 bp, Homo sapien
acagtgaattaatgtgaaaccatca

SEQ ID NO: 5620409 - DNA, 25 bp, Homo sapien
tcggagtaaacgtcgcacgaggcct

SEQ ID NO: 5620410 - DNA, 25 bp, Homo sapien
aggcctcgtgcgacgtttactccga

SEQ ID NO: 5620411 - DNA, 25 bp, Homo sapien
tctctgccatcttagaagctggaaa

SEQ ID NO: 5620412 - DNA, 25 bp, Homo sapien
agccatttcagatgccttgctcccc

SEQ ID NO: 5620413 - DNA, 25 bp, Homo sapien
atggaagcaggaaaacttgccttcc

SEQ ID NO: 5620414 - DNA, 25 bp, Homo sapien
ttccctgtcagaagcaagctgaaac

SEQ ID NO: 5620415 - DNA, 25 bp, Homo sapien
gaaaggagatgcctgctctccatcg

SEQ ID NO: 5620416 - DNA, 25 bp, Homo sapien
ctaatgctaaggagaaattaaaagc

SEQ ID NO: 5620417 - DNA, 25 bp, Homo sapien
ctctccatcgtcatggaagcaggaa

SEQ ID NO: 5620418 - DNA, 25 bp, Homo sapien
gcagccacaggagttttagccattt

SEQ ID NO: 5620419 - DNA, 25 bp, Homo sapien
ttcagaaaaggagttgtacagcata

SEQ ID NO: 5620420 - DNA, 25 bp, Homo sapien
tacctggaaataaggctcaggctgg

SEQ ID NO: 5620421 - DNA, 25 bp, Homo sapien
gctcaggctggtgatcgttctctgc

SEQ ID NO: 5620422 - DNA, 25 bp, Homo sapien
cgactgggtgaagaagtgatcccag

SEQ ID NO: 5620423 - DNA, 25 bp, Homo sapien
ctgggatcacttcttcacccagtcg

SEQ ID NO: 5620424 - DNA, 25 bp, Homo sapien
aagtcagacgtgccagttatgtaat

SEQ ID NO: 5620425 - DNA, 25 bp, Homo sapien
gaccaatagcattatagaaagcatc

SEQ ID NO: 5620426 - DNA, 25 bp, Homo sapien
aattcagtttagcagccgaagcaag

SEQ ID NO: 5620427 - DNA, 25 bp, Homo sapien
ttaagaaacccaatggtgctaccat

SEQ ID NO: 5620428 - DNA, 25 bp, Homo sapien
gagaactcttgaagtagtctggcaa

SEQ ID NO: 5620429 - DNA, 25 bp, Homo sapien
tactgagcctgtgttggctggagta

SEQ ID NO: 5620430 - DNA, 25 bp, Homo sapien
ttccataaagaactcctaaagctcc

SEQ ID NO: 5620431 - DNA, 25 bp, Homo sapien
ttagttggaatatacctgtggttat

SEQ ID NO: 5620432 - DNA, 25 bp, Homo sapien
aatgatagcaaaagtcagacgtgcc

SEQ ID NO: 5620433 - DNA, 25 bp, Homo sapien
tcaaagtattgaagatgggtctctg

SEQ ID NO: 5620434 - DNA, 25 bp, Homo sapien
agaaggaagtttaccagaatgagtt

SEQ ID NO: 5620435 - DNA, 25 bp, Homo sapien
taagccgtgtggatttgactgaaaa

SEQ ID NO: 5620436 - DNA, 25 bp, Homo sapien
caaaccaaaacaattcttgggagat

SEQ ID NO: 5620437 - DNA, 25 bp, Homo sapien
aatagtaatgtccctttggcatacc

SEQ ID NO: 5620438 - DNA, 25 bp, Homo sapien
acaattcttgggagataagtcttct

SEQ ID NO: 5620439 - DNA, 25 bp, Homo sapien
gataagtcttctccataagccgtgt

SEQ ID NO: 5620440 - DNA, 25 bp, Homo sapien
tctccataagccgtgtggatttgac

SEQ ID NO: 5620441 - DNA, 25 bp, Homo sapien
gagaatgaaagactaatagagcaat

SEQ ID NO: 5620442 - DNA, 25 bp, Homo sapien
atttgactgaaaatagtaatgtccc

SEQ ID NO: 5620443 - DNA, 25 bp, Homo sapien
tttggcataccaagagagcaaaaat

SEQ ID NO: 5620444 - DNA, 25 bp, Homo sapien
gaaagactaatagagcaattcattc

SEQ ID NO: 5620445 - DNA, 25 bp, Homo sapien
aaagatacatagaaaagagtaaaaa

SEQ ID NO: 5620446 - DNA, 25 bp, Homo sapien
agatgaccaactaacacacacttcc

SEQ ID NO: 5620447 - DNA, 25 bp, Homo sapien
aatccccaccagtcagggcctccga

SEQ ID NO: 5620448 - DNA, 25 bp, Homo sapien
cctgataggacacagcaagtaagga

SEQ ID NO: 5620449 - DNA, 25 bp, Homo sapien
cccaccaagtggaatgtcttttcag

SEQ ID NO: 5620450 - DNA, 25 bp, Homo sapien
tttcagaagaaacgcaagctaacca

SEQ ID NO: 5620451 - DNA, 25 bp, Homo sapien
gtggtgtcttcagatgcccccgctg

SEQ ID NO: 5620452 - DNA, 25 bp, Homo sapien
cagtagccccaccacagccactttg

SEQ ID NO: 5620453 - DNA, 25 bp, Homo sapien
caaagtaacttgcctgataggacac

SEQ ID NO: 5620454 - DNA, 25 bp, Homo sapien
caccatgactgacaagatgaccaac

SEQ ID NO: 5620455 - DNA, 25 bp, Homo sapien
gagtgcacgatcacagcacaccgta

SEQ ID NO: 5620456 - DNA, 25 bp, Homo sapien
gtctgcatcactgcaaagtggtgtc

SEQ ID NO: 5620457 - DNA, 25 bp, Homo sapien
aacgaacaaagcagttgaaagtttc

SEQ ID NO: 5620458 - DNA, 25 bp, Homo sapien
tttggggagtcagaaactcacagta

SEQ ID NO: 5620459 - DNA, 25 bp, Homo sapien
catatgatgcctttgtgtcctcctc

SEQ ID NO: 5620460 - DNA, 25 bp, Homo sapien
gtcacgagaatgtaacatatgatgc

SEQ ID NO: 5620461 - DNA, 25 bp, Homo sapien
gggcctcaatttcatttggggagtc

SEQ ID NO: 5620462 - DNA, 25 bp, Homo sapien
tacctcaagccaataaaggccatat

SEQ ID NO: 5620463 - DNA, 25 bp, Homo sapien
atatagaacatacatacctcaagcc

SEQ ID NO: 5620464 - DNA, 25 bp, Homo sapien
tggacatctgacatcatgctaaacc

SEQ ID NO: 5620465 - DNA, 25 bp, Homo sapien
aagcagttgaaagtttctgggcctc

SEQ ID NO: 5620466 - DNA, 25 bp, Homo sapien
aggccatatatgacaaatggacatc

SEQ ID NO: 5620467 - DNA, 25 bp, Homo sapien
acagtagacattataagcagtagac

SEQ ID NO: 5620468 - DNA, 25 bp, Homo sapien
ggtagttcaagtgtgccaggtatat

SEQ ID NO: 5620469 - DNA, 25 bp, Homo sapien
aatgtgcacatggagtaaataaaat

SEQ ID NO: 5620470 - DNA, 25 bp, Homo sapien
acagttaccacttagcaaggcactt

SEQ ID NO: 5620471 - DNA, 25 bp, Homo sapien
gcaaggcactttagtaaaatgcagc

SEQ ID NO: 5620472 - DNA, 25 bp, Homo sapien
aacaaacatgcaaaaaagacaatcc

SEQ ID NO: 5620473 - DNA, 25 bp, Homo sapien
ttttggaagcttagagagcctcaga

SEQ ID NO: 5620474 - DNA, 25 bp, Homo sapien
tagtaaaatgtagcagattcctgtt

SEQ ID NO: 5620475 - DNA, 25 bp, Homo sapien
ctgaatgaacaatagtaaggccctt

SEQ ID NO: 5620476 - DNA, 25 bp, Homo sapien
aatgggagataggccttcaaaaaca

SEQ ID NO: 5620477 - DNA, 25 bp, Homo sapien
tggaagcttagcctccgaaaagaac

SEQ ID NO: 5620478 - DNA, 25 bp, Homo sapien
actgactaaacgaggaaaatgtgca

SEQ ID NO: 5620479 - DNA, 25 bp, Homo sapien
tggtatgacaaatgggatcctagaa

SEQ ID NO: 5620480 - DNA, 25 bp, Homo sapien
ttacaggccaataatcacacccttg

SEQ ID NO: 5620481 - DNA, 25 bp, Homo sapien
ttgggtctgtttactggacagatcc

SEQ ID NO: 5620482 - DNA, 25 bp, Homo sapien
taagtgtaatgtggtatgacaaatg

SEQ ID NO: 5620483 - DNA, 25 bp, Homo sapien
aaatttcttgagcatattaaaggaa

SEQ ID NO: 5620484 - DNA, 25 bp, Homo sapien
aaattacaggccaataatcacaccc

SEQ ID NO: 5620485 - DNA, 25 bp, Homo sapien
ttatgacaactaagtgtaatgtggt

SEQ ID NO: 5620486 - DNA, 25 bp, Homo sapien
acaactaagtgtaatgtggtatgac

SEQ ID NO: 5620487 - DNA, 25 bp, Homo sapien
atgacaaatgggatcctagaatata

SEQ ID NO: 5620488 - DNA, 25 bp, Homo sapien
tactggacagatcccttacactatt

SEQ ID NO: 5620489 - DNA, 25 bp, Homo sapien
cacacccttggtatatatgatctcc

SEQ ID NO: 5620490 - DNA, 25 bp, Homo sapien
ctaagaagaaactcagatgtaacac

SEQ ID NO: 5620491 - DNA, 25 bp, Homo sapien
aggcacacagtattcgctttgcatc

SEQ ID NO: 5620492 - DNA, 25 bp, Homo sapien
cagatttaggagaagagttcactgg

SEQ ID NO: 5620493 - DNA, 25 bp, Homo sapien
gttggagaggtatgtttcatttgcc

SEQ ID NO: 5620494 - DNA, 25 bp, Homo sapien
ttggatcaacatgaaagatactata

SEQ ID NO: 5620495 - DNA, 25 bp, Homo sapien
tgtcatggaatatgttggagaggta

SEQ ID NO: 5620496 - DNA, 25 bp, Homo sapien
gccacgtagtaaatgatggacatgc

SEQ ID NO: 5620497 - DNA, 25 bp, Homo sapien
tatgattaaatgtagttggcagaac

SEQ ID NO: 5620498 - DNA, 25 bp, Homo sapien
tggcagaactctattttggatcaac

SEQ ID NO: 5620499 - DNA, 25 bp, Homo sapien
gctggggtgtaaagacccttgtgaa

SEQ ID NO: 5620500 - DNA, 25 bp, Homo sapien
tctttcgaactagcaatggacgtgg

SEQ ID NO: 5620501 - DNA, 25 bp, Homo sapien
gtccctccagagatagactaaggaa

SEQ ID NO: 5620502 - DNA, 25 bp, Homo sapien
tgaataggtaataatacaatggtat

SEQ ID NO: 5620503 - DNA, 25 bp, Homo sapien
ataagggaatatataggtcatttca

SEQ ID NO: 5620504 - DNA, 25 bp, Homo sapien
ccagctagtttccttgtccagagac

SEQ ID NO: 5620505 - DNA, 25 bp, Homo sapien
tccattgtagagataaccataattt

SEQ ID NO: 5620506 - DNA, 25 bp, Homo sapien
taaaagaaggtcagcatagtctgtt

SEQ ID NO: 5620507 - DNA, 25 bp, Homo sapien
taacagtatttataaggctgcctta

SEQ ID NO: 5620508 - DNA, 25 bp, Homo sapien
ttaatgagtctctataagggaatat

SEQ ID NO: 5620509 - DNA, 25 bp, Homo sapien
atatagagtcacatgcagttatctt

SEQ ID NO: 5620510 - DNA, 25 bp, Homo sapien
agatagactaaggaaataaaagaag

SEQ ID NO: 5620511 - DNA, 25 bp, Homo sapien
tgtccagagacaactgctttaccag

SEQ ID NO: 5620512 - DNA, 25 bp, Homo sapien
aaaaaactcagcatgatgagatgcc

SEQ ID NO: 5620513 - DNA, 25 bp, Homo sapien
agtgcccaggtattctgggaattcc

SEQ ID NO: 5620514 - DNA, 25 bp, Homo sapien
ccccttcactgagcaaaccctaaac

SEQ ID NO: 5620515 - DNA, 25 bp, Homo sapien
aaattattcacacagtagcaacctt

SEQ ID NO: 5620516 - DNA, 25 bp, Homo sapien
gcccagaaactgaaccagctgagtc

SEQ ID NO: 5620517 - DNA, 25 bp, Homo sapien
agctgagtcagcacactttccatct

SEQ ID NO: 5620518 - DNA, 25 bp, Homo sapien
tattgtgtactggagggctttttac

SEQ ID NO: 5620519 - DNA, 25 bp, Homo sapien
atagctagatagacatgccaaatta

SEQ ID NO: 5620520 - DNA, 25 bp, Homo sapien
tccctgctgcggaaaaaaaactcag

SEQ ID NO: 5620521 - DNA, 25 bp, Homo sapien
gaatgtaaagtagcatgttccctgc

SEQ ID NO: 5620522 - DNA, 25 bp, Homo sapien
cccagattcctggtactcccccttc

SEQ ID NO: 5620523 - DNA, 25 bp, Homo sapien
gaaatagttcagcattgtccccagc

SEQ ID NO: 5620524 - DNA, 25 bp, Homo sapien
cttgggttgtggaaagtataatgga

SEQ ID NO: 5620525 - DNA, 25 bp, Homo sapien
aaggagcagtgacggttttgtcttc

SEQ ID NO: 5620526 - DNA, 25 bp, Homo sapien
ttaagatctgtatcagaaagggaag

SEQ ID NO: 5620527 - DNA, 25 bp, Homo sapien
gcctgaaggatgacatacaaggtca

SEQ ID NO: 5620528 - DNA, 25 bp, Homo sapien
atccctaacagcactgggaagggaa

SEQ ID NO: 5620529 - DNA, 25 bp, Homo sapien
gctacaagagttgatgaaaggagca

SEQ ID NO: 5620530 - DNA, 25 bp, Homo sapien
gaaagggaagaaatccctaacagca

SEQ ID NO: 5620531 - DNA, 25 bp, Homo sapien
aagtataatggaggctacaagagtt

SEQ ID NO: 5620532 - DNA, 25 bp, Homo sapien
tgtttgcttaggtgtaagaaacagg

SEQ ID NO: 5620533 - DNA, 25 bp, Homo sapien
atgacatacaaggtcagagacttgg

SEQ ID NO: 5620534 - DNA, 25 bp, Homo sapien
ggtagttgaatagcaatatgggggg

SEQ ID NO: 5620535 - DNA, 25 bp, Homo sapien
attacaacacagatgagctgaaacg

SEQ ID NO: 5620536 - DNA, 25 bp, Homo sapien
ttggaggatgggaatcctaaaaaga

SEQ ID NO: 5620537 - DNA, 25 bp, Homo sapien
agaaatcaagcatatagaggtagtt

SEQ ID NO: 5620538 - DNA, 25 bp, Homo sapien
actgtttacgtggcttgcttgatat

SEQ ID NO: 5620539 - DNA, 25 bp, Homo sapien
acgtttttgtacagatttggaggat

SEQ ID NO: 5620540 - DNA, 25 bp, Homo sapien
tacaactgcataagatgatggaact

SEQ ID NO: 5620541 - DNA, 25 bp, Homo sapien
gcctatggtgccacattggcctatt

SEQ ID NO: 5620542 - DNA, 25 bp, Homo sapien
cagtgcaagagtaaaatggctgctt

SEQ ID NO: 5620543 - DNA, 25 bp, Homo sapien
acctaaaataagcctatggtgccac

SEQ ID NO: 5620544 - DNA, 25 bp, Homo sapien
tggctgcttaccaaacaaatggaaa

SEQ ID NO: 5620545 - DNA, 25 bp, Homo sapien
ggctctgaagagtgctttccacagt

SEQ ID NO: 5620546 - DNA, 25 bp, Homo sapien
acttggccgtagtgctcctctgtct

SEQ ID NO: 5620547 - DNA, 25 bp, Homo sapien
tacgacaggataaagttagtgcctt

SEQ ID NO: 5620548 - DNA, 25 bp, Homo sapien
gggaacaggtttagctgaagtcacc

SEQ ID NO: 5620549 - DNA, 25 bp, Homo sapien
tacacgaagttgttggactgtgtcc

SEQ ID NO: 5620550 - DNA, 25 bp, Homo sapien
acacagatcctacatgaaagtcagt

SEQ ID NO: 5620551 - DNA, 25 bp, Homo sapien
tcataaaaggacacttggccgtagt

SEQ ID NO: 5620552 - DNA, 25 bp, Homo sapien
ccacagtgacatacgacaggataaa

SEQ ID NO: 5620553 - DNA, 25 bp, Homo sapien
aaagtcagtaaatctgtggggagac

SEQ ID NO: 5620554 - DNA, 25 bp, Homo sapien
caactggcgatgaatgtgtaacttt

SEQ ID NO: 5620555 - DNA, 25 bp, Homo sapien
tactccacagtgagaaaacaagtgt

SEQ ID NO: 5620556 - DNA, 25 bp, Homo sapien
gcgggccagatgatcaatgtcttag

SEQ ID NO: 5620557 - DNA, 25 bp, Homo sapien
ggtggggctcctaccattcctcttg

SEQ ID NO: 5620558 - DNA, 25 bp, Homo sapien
gtccatgctccagaggaccaagtac

SEQ ID NO: 5620559 - DNA, 25 bp, Homo sapien
tgccaaccagctcaggtccagattc

SEQ ID NO: 5620560 - DNA, 25 bp, Homo sapien
attcctcttgattgggtgggacagg

SEQ ID NO: 5620561 - DNA, 25 bp, Homo sapien
aaatatgccacagagataagcgggc

SEQ ID NO: 5620562 - DNA, 25 bp, Homo sapien
agtgttaggagagaacatgttcatc

SEQ ID NO: 5620563 - DNA, 25 bp, Homo sapien
tcaccatgcagtgttaggagagaac

SEQ ID NO: 5620564 - DNA, 25 bp, Homo sapien
ggaccaagtaccagtggcacacatt

SEQ ID NO: 5620565 - DNA, 25 bp, Homo sapien
acagaggggaatgaattcccagtcc

SEQ ID NO: 5620566 - DNA, 25 bp, Homo sapien
ctccctaccttggaggaagagtgac

SEQ ID NO: 5620567 - DNA, 25 bp, Homo sapien
tcaaaagcgcttgtggatctggtga

SEQ ID NO: 5620568 - DNA, 25 bp, Homo sapien
gcagtagaagagagacttcgtagct

SEQ ID NO: 5620569 - DNA, 25 bp, Homo sapien
tcctggagattatcgactgcggagg

SEQ ID NO: 5620570 - DNA, 25 bp, Homo sapien
gtaggcaccaaagtggctctgtttt

SEQ ID NO: 5620571 - DNA, 25 bp, Homo sapien
tacttggttttggcgcgctacgtca

SEQ ID NO: 5620572 - DNA, 25 bp, Homo sapien
ctacctacttgtggaggggtaggca

SEQ ID NO: 5620573 - DNA, 25 bp, Homo sapien
ttctgacagagctacctggatgtgc

SEQ ID NO: 5620574 - DNA, 25 bp, Homo sapien
ttgtctacgccagcccagaagaata

SEQ ID NO: 5620575 - DNA, 25 bp, Homo sapien
gtggacaggcactttgcttggatcc

SEQ ID NO: 5620576 - DNA, 25 bp, Homo sapien
caactagagtggattcacagggaat

SEQ ID NO: 5620577 - DNA, 25 bp, Homo sapien
gtcactgagctgtagagaggctata

SEQ ID NO: 5620578 - DNA, 25 bp, Homo sapien
aataaaatgcacagaacgaattaca

SEQ ID NO: 5620579 - DNA, 25 bp, Homo sapien
tgagctactgtgcccaatctccaat

SEQ ID NO: 5620580 - DNA, 25 bp, Homo sapien
ggtgcttgtggccatgccccacgaa

SEQ ID NO: 5620581 - DNA, 25 bp, Homo sapien
ctagagtgcaatggaatgtgatcca

SEQ ID NO: 5620582 - DNA, 25 bp, Homo sapien
aatagggtgttcgcatcagaattcc

SEQ ID NO: 5620583 - DNA, 25 bp, Homo sapien
acagaacgaattacagacagggtct

SEQ ID NO: 5620584 - DNA, 25 bp, Homo sapien
atggaatttgggtaaatggatacgc

SEQ ID NO: 5620585 - DNA, 25 bp, Homo sapien
ggaatgtgatccatagctaactgta

SEQ ID NO: 5620586 - DNA, 25 bp, Homo sapien
atggatacgcctgtggtaaccacct

SEQ ID NO: 5620587 - DNA, 25 bp, Homo sapien
taagtgtaagtccggatggaatttg

SEQ ID NO: 5620588 - DNA, 25 bp, Homo sapien
tgccccacgaaaaatgcactgattt

SEQ ID NO: 5620589 - DNA, 25 bp, Homo sapien
gtgaattagtatcggactattttaa

SEQ ID NO: 5620590 - DNA, 25 bp, Homo sapien
ttaaaatagtccgatactaattcac

SEQ ID NO: 5620591 - DNA, 25 bp, Homo sapien
ggaagcaaggagaattccaaaagga

SEQ ID NO: 5620592 - DNA, 25 bp, Homo sapien
acatgaatttccacaacagtaaagc

SEQ ID NO: 5620593 - DNA, 25 bp, Homo sapien
tcttctcggtatccatcagcctcta

SEQ ID NO: 5620594 - DNA, 25 bp, Homo sapien
cttctggtccataagcagggactag

SEQ ID NO: 5620595 - DNA, 25 bp, Homo sapien
aacaaactgaaggcatttacctgcc

SEQ ID NO: 5620596 - DNA, 25 bp, Homo sapien
ccagaaccacgcttccttctgctcc

SEQ ID NO: 5620597 - DNA, 25 bp, Homo sapien
tgcaaagcttcaaaacttctggtcc

SEQ ID NO: 5620598 - DNA, 25 bp, Homo sapien
tccataagcagggactagataagga

SEQ ID NO: 5620599 - DNA, 25 bp, Homo sapien
ccaaaaggaaaggatagacttggaa

SEQ ID NO: 5620600 - DNA, 25 bp, Homo sapien
taaggaagcaaggagaattccaaaa

SEQ ID NO: 5620601 - DNA, 25 bp, Homo sapien
atttccacaacagtaaagcacgcag

SEQ ID NO: 5620602 - DNA, 25 bp, Homo sapien
ttagtgatgtgtgtataaatcccgt

SEQ ID NO: 5620603 - DNA, 25 bp, Homo sapien
agctgtttgtcgggagccatcgtaa

SEQ ID NO: 5620604 - DNA, 25 bp, Homo sapien
ctgaactatcagctgcgcgtaggag

SEQ ID NO: 5620605 - DNA, 25 bp, Homo sapien
gtccgcagtcctgtagtagggataa

SEQ ID NO: 5620606 - DNA, 25 bp, Homo sapien
tagtagggataatttttagtgatgt

SEQ ID NO: 5620607 - DNA, 25 bp, Homo sapien
tgtgtgtataaatcccgttcagggt

SEQ ID NO: 5620608 - DNA, 25 bp, Homo sapien
gggagccatcgtaatcgcctgaact

SEQ ID NO: 5620609 - DNA, 25 bp, Homo sapien
atcgcctgaactatcagctgcgcgt

SEQ ID NO: 5620610 - DNA, 25 bp, Homo sapien
atcccgttcagggtgagctgtttgt

SEQ ID NO: 5620611 - DNA, 25 bp, Homo sapien
tgccagcccttgtccgcagtcctgt

SEQ ID NO: 5620612 - DNA, 25 bp, Homo sapien
taaatcccgttcagggtgagctgtt

SEQ ID NO: 5620613 - DNA, 25 bp, Homo sapien
gaagactgtcacctgtgggatttct

SEQ ID NO: 5620614 - DNA, 25 bp, Homo sapien
agaaatcccacaggtgacagtcttc

SEQ ID NO: 5620615 - DNA, 25 bp, Homo sapien
gatataaacgtccctattagctttg

SEQ ID NO: 5620616 - DNA, 25 bp, Homo sapien
agtatatgtacaactaaaattcaac

SEQ ID NO: 5620617 - DNA, 25 bp, Homo sapien
tcaacaatatatacagaaatgtttc

SEQ ID NO: 5620618 - DNA, 25 bp, Homo sapien
cctagtaaaggtgtcaaagcaatag

SEQ ID NO: 5620619 - DNA, 25 bp, Homo sapien
attcacctagtaaaggtgtcaaagc

SEQ ID NO: 5620620 - DNA, 25 bp, Homo sapien
aagaagacaaaaacatacaaagtat

SEQ ID NO: 5620621 - DNA, 25 bp, Homo sapien
taaaggtgtcaaagcaatagaatgg

SEQ ID NO: 5620622 - DNA, 25 bp, Homo sapien
attttgattgtttcctccgtctttc

SEQ ID NO: 5620623 - DNA, 25 bp, Homo sapien
atgccaccaattcacctagtaaagg

SEQ ID NO: 5620624 - DNA, 25 bp, Homo sapien
acctagtaaaggtgtcaaagcaata

SEQ ID NO: 5620625 - DNA, 25 bp, Homo sapien
tcttgatataaacgtccctattagc

SEQ ID NO: 5620626 - DNA, 25 bp, Homo sapien
tggtttgctgtgtagaaacacaagt

SEQ ID NO: 5620627 - DNA, 25 bp, Homo sapien
cactggaaaataacatggaggttta

SEQ ID NO: 5620628 - DNA, 25 bp, Homo sapien
ccatctctgatgacatggaacatct

SEQ ID NO: 5620629 - DNA, 25 bp, Homo sapien
cactttagctggtaccttctacacc

SEQ ID NO: 5620630 - DNA, 25 bp, Homo sapien
ttatgtaatgcaaaaggtgtgaaaa

SEQ ID NO: 5620631 - DNA, 25 bp, Homo sapien
aagggcaaaatgcttccacaaaatt

SEQ ID NO: 5620632 - DNA, 25 bp, Homo sapien
ttattctaaagggcaaaatgcttcc

SEQ ID NO: 5620633 - DNA, 25 bp, Homo sapien
gaggtttagagccgtgcaaaataaa

SEQ ID NO: 5620634 - DNA, 25 bp, Homo sapien
aaacacaagtgtaatctttggtacc

SEQ ID NO: 5620635 - DNA, 25 bp, Homo sapien
tagagacaactttcacattaatagc

SEQ ID NO: 5620636 - DNA, 25 bp, Homo sapien
gtaatgcaaaaggtgtgaaaaacat

SEQ ID NO: 5620637 - DNA, 25 bp, Homo sapien
cgggagctgcgagacggtacccgag

SEQ ID NO: 5620638 - DNA, 25 bp, Homo sapien
ctcgggtaccgtctcgcagctcccg

SEQ ID NO: 5620639 - DNA, 25 bp, Homo sapien
ttgcttctgtagcgttggtgagtgc

SEQ ID NO: 5620640 - DNA, 25 bp, Homo sapien
tttgtccagtcgaggctatctttgc

SEQ ID NO: 5620641 - DNA, 25 bp, Homo sapien
gtgagtgcctcacctggtcagatct

SEQ ID NO: 5620642 - DNA, 25 bp, Homo sapien
ttttagagagacacaaagtccaggg

SEQ ID NO: 5620643 - DNA, 25 bp, Homo sapien
tctcgagctcctgagaccaagcgat

SEQ ID NO: 5620644 - DNA, 25 bp, Homo sapien
cacggggtcagaagtgttatttgtc

SEQ ID NO: 5620645 - DNA, 25 bp, Homo sapien
tcataaattgggtgggatactgttg

SEQ ID NO: 5620646 - DNA, 25 bp, Homo sapien
tatctgtgtttgagaggattggaaa

SEQ ID NO: 5620647 - DNA, 25 bp, Homo sapien
tgaatggtagtgattttagagagac

SEQ ID NO: 5620648 - DNA, 25 bp, Homo sapien
tggtcagatctcagtgaatggtagt

SEQ ID NO: 5620649 - DNA, 25 bp, Homo sapien
agaggattggaaacctgtgtgttgc

SEQ ID NO: 5620650 - DNA, 25 bp, Homo sapien
gaccagagattaacatagggcatgc

SEQ ID NO: 5620651 - DNA, 25 bp, Homo sapien
ttacccgctgagttaaactagcttc

SEQ ID NO: 5620652 - DNA, 25 bp, Homo sapien
ctagcttctaagaggcaggtcagca

SEQ ID NO: 5620653 - DNA, 25 bp, Homo sapien
taattggacaggttgtttcagtagt

SEQ ID NO: 5620654 - DNA, 25 bp, Homo sapien
acgttcagtaaatccatcatagccc

SEQ ID NO: 5620655 - DNA, 25 bp, Homo sapien
ccttcaggagcagataacatgagga

SEQ ID NO: 5620656 - DNA, 25 bp, Homo sapien
gagacaagacctcagggattcagtc

SEQ ID NO: 5620657 - DNA, 25 bp, Homo sapien
acagtggtaactaatgtagaagtcc

SEQ ID NO: 5620658 - DNA, 25 bp, Homo sapien
caggtcagcaaccgacgtcctactg

SEQ ID NO: 5620659 - DNA, 25 bp, Homo sapien
gtagaagtcctagatccttacccgc

SEQ ID NO: 5620660 - DNA, 25 bp, Homo sapien
ttcatttccctaaggggctggattc

SEQ ID NO: 5620661 - DNA, 25 bp, Homo sapien
tgtttgcctgaaattagtaagcgtt

SEQ ID NO: 5620662 - DNA, 25 bp, Homo sapien
ctctaatgatgagcgagagtcaagc

SEQ ID NO: 5620663 - DNA, 25 bp, Homo sapien
gggaaatgatgcccctgctgtccct

SEQ ID NO: 5620664 - DNA, 25 bp, Homo sapien
gcagaacttattgagcatagcctat

SEQ ID NO: 5620665 - DNA, 25 bp, Homo sapien
taagcgtttattggtgtgaagagtt

SEQ ID NO: 5620666 - DNA, 25 bp, Homo sapien
tagctggagagaagaaattttaact

SEQ ID NO: 5620667 - DNA, 25 bp, Homo sapien
ttcggcactgtcatcgttcaggctt

SEQ ID NO: 5620668 - DNA, 25 bp, Homo sapien
tgggaaaactgagccaagcttcacc

SEQ ID NO: 5620669 - DNA, 25 bp, Homo sapien
cgttcaggctttcaggtaaatgtcc

SEQ ID NO: 5620670 - DNA, 25 bp, Homo sapien
ctgtctgtgaattagaacactgagc

SEQ ID NO: 5620671 - DNA, 25 bp, Homo sapien
tgtcctgtggcttctcggtgcacca

SEQ ID NO: 5620672 - DNA, 25 bp, Homo sapien
acacatataatgggaaactccacaa

SEQ ID NO: 5620673 - DNA, 25 bp, Homo sapien
tacatttttgaatgtgaaaggatcc

SEQ ID NO: 5620674 - DNA, 25 bp, Homo sapien
tctagatagaatgactgtaaaaatt

SEQ ID NO: 5620675 - DNA, 25 bp, Homo sapien
gaagttgtacatacacacacccagg

SEQ ID NO: 5620676 - DNA, 25 bp, Homo sapien
ttttgtcagtctagatagaatgact

SEQ ID NO: 5620677 - DNA, 25 bp, Homo sapien
tgctcaccggcagccaaaccacatt

SEQ ID NO: 5620678 - DNA, 25 bp, Homo sapien
tcactacacatataatgggaaactc

SEQ ID NO: 5620679 - DNA, 25 bp, Homo sapien
taaaaaatgcattctaaaatcaggg

SEQ ID NO: 5620680 - DNA, 25 bp, Homo sapien
ttccataaagaattttgtcagtcta

SEQ ID NO: 5620681 - DNA, 25 bp, Homo sapien
caaattagaaaaaaagaaatctcat

SEQ ID NO: 5620682 - DNA, 25 bp, Homo sapien
tagaatgactgtaaaaattatcact

SEQ ID NO: 5620683 - DNA, 25 bp, Homo sapien
ctctagagcggccgcctactactac

SEQ ID NO: 5620684 - DNA, 25 bp, Homo sapien
gtaagcttggatcctctagagcggc

SEQ ID NO: 5620685 - DNA, 25 bp, Homo sapien
gtagtctataattttaccggctatc

SEQ ID NO: 5620686 - DNA, 25 bp, Homo sapien
ctgcagacagaaaagaaatagtaca

SEQ ID NO: 5620687 - DNA, 25 bp, Homo sapien
cctactactactaaattcgcggccg

SEQ ID NO: 5620688 - DNA, 25 bp, Homo sapien
cagtaagctgagattgccactgcac

SEQ ID NO: 5620689 - DNA, 25 bp, Homo sapien
gtggagattgcagtaagctgagatt

SEQ ID NO: 5620690 - DNA, 25 bp, Homo sapien
cgcatgcacgcgtacgtaagcttgg

SEQ ID NO: 5620691 - DNA, 25 bp, Homo sapien
tgacaacaacaaattgagtcttccc

SEQ ID NO: 5620692 - DNA, 25 bp, Homo sapien
tttaccggctatcaacaattctctc

SEQ ID NO: 5620693 - DNA, 25 bp, Homo sapien
cgcccagctaggtttggtagtctat

SEQ ID NO: 5620694 - DNA, 25 bp, Homo sapien
ctagataagatgtggtttgcaactc

SEQ ID NO: 5620695 - DNA, 25 bp, Homo sapien
cttggtgagcctagacctgccttca

SEQ ID NO: 5620696 - DNA, 25 bp, Homo sapien
aactggtctaggataaggaccggtg

SEQ ID NO: 5620697 - DNA, 25 bp, Homo sapien
tgatcaggactcaaccagactcacc

SEQ ID NO: 5620698 - DNA, 25 bp, Homo sapien
tggtcttgtgggccattggtcaact

SEQ ID NO: 5620699 - DNA, 25 bp, Homo sapien
tcatgtgtgcacacatagggggaag

SEQ ID NO: 5620700 - DNA, 25 bp, Homo sapien
atctgactgccaacaggtggtgcaa

SEQ ID NO: 5620701 - DNA, 25 bp, Homo sapien
gccacacagctagcagcatgaactc

SEQ ID NO: 5620702 - DNA, 25 bp, Homo sapien
ctctctggcacggttctggaaataa

SEQ ID NO: 5620703 - DNA, 25 bp, Homo sapien
ggtcaactatttggctggcaccgtt

SEQ ID NO: 5620704 - DNA, 25 bp, Homo sapien
atgaactctaaatgcaagctggcct

SEQ ID NO: 5620705 - DNA, 25 bp, Homo sapien
cagagtatggattatgtattgactt

SEQ ID NO: 5620706 - DNA, 25 bp, Homo sapien
ccatgaatccattagttgagcttac

SEQ ID NO: 5620707 - DNA, 25 bp, Homo sapien
ttccactaatacatgacaacacccc

SEQ ID NO: 5620708 - DNA, 25 bp, Homo sapien
attgacttatagttagattgccctc

SEQ ID NO: 5620709 - DNA, 25 bp, Homo sapien
atggaaacaagtaccatgaatccat

SEQ ID NO: 5620710 - DNA, 25 bp, Homo sapien
atagttagattgccctcagttttcc

SEQ ID NO: 5620711 - DNA, 25 bp, Homo sapien
gttgagcttactatgctatatgtac

SEQ ID NO: 5620712 - DNA, 25 bp, Homo sapien
ctccaaaatttgaacagtgtgctct

SEQ ID NO: 5620713 - DNA, 25 bp, Homo sapien
acatgacaacacccctttcctccaa

SEQ ID NO: 5620714 - DNA, 25 bp, Homo sapien
aatgacttgtatttcagagtatgga

SEQ ID NO: 5620715 - DNA, 25 bp, Homo sapien
ctgtataccaattaagtggaattac

SEQ ID NO: 5620716 - DNA, 25 bp, Homo sapien
gttaaggttgtatagattcggtagc

SEQ ID NO: 5620717 - DNA, 25 bp, Homo sapien
tcaataagaaccaaatttgagagaa

SEQ ID NO: 5620718 - DNA, 25 bp, Homo sapien
gtatagattcggtagcaaagttcct

SEQ ID NO: 5620719 - DNA, 25 bp, Homo sapien
caagcactagtcaatgttaaggttg

SEQ ID NO: 5620720 - DNA, 25 bp, Homo sapien
cacctacaagcactagtcaatgtta

SEQ ID NO: 5620721 - DNA, 25 bp, Homo sapien
cagttaacaaacaagtattgagcac

SEQ ID NO: 5620722 - DNA, 25 bp, Homo sapien
taatattgtaggctgcagtatccag

SEQ ID NO: 5620723 - DNA, 25 bp, Homo sapien
gtgtcaactgtaaaagagtaatatc

SEQ ID NO: 5620724 - DNA, 25 bp, Homo sapien
agcttacagtctaatggacatcaat

SEQ ID NO: 5620725 - DNA, 25 bp, Homo sapien
aacctttgggaaactagacaggctc

SEQ ID NO: 5620726 - DNA, 25 bp, Homo sapien
gagaggacaggtgtcaactgtaaaa

SEQ ID NO: 5620727 - DNA, 25 bp, Homo sapien
ttgagtaacctggtaaataagcatt

SEQ ID NO: 5620728 - DNA, 25 bp, Homo sapien
cagcttgctctcagtttaggtagaa

SEQ ID NO: 5620729 - DNA, 25 bp, Homo sapien
tagtactgccagatggaacatttac

SEQ ID NO: 5620730 - DNA, 25 bp, Homo sapien
gcattttagtactgccagatggaac

SEQ ID NO: 5620731 - DNA, 25 bp, Homo sapien
agaataacctttgagtaacctggta

SEQ ID NO: 5620732 - DNA, 25 bp, Homo sapien
taggtttctaggtaacattgttgta

SEQ ID NO: 5620733 - DNA, 25 bp, Homo sapien
ggtaaataagcattttagtactgcc

SEQ ID NO: 5620734 - DNA, 25 bp, Homo sapien
acaaattgacaaaccatgaatgatt

SEQ ID NO: 5620735 - DNA, 25 bp, Homo sapien
ttgcctcagcaaattaaatattacc

SEQ ID NO: 5620736 - DNA, 25 bp, Homo sapien
tgctctcagtttaggtagaataacc

SEQ ID NO: 5620737 - DNA, 25 bp, Homo sapien
atttatttatatggccagcttgctc

SEQ ID NO: 5620738 - DNA, 25 bp, Homo sapien
ctcactgtatagctctctgttgtct

SEQ ID NO: 5620739 - DNA, 25 bp, Homo sapien
agacaacagagagctatacagtgag

SEQ ID NO: 5620740 - DNA, 25 bp, Homo sapien
cagatcaggtaggctttaaaacttc

SEQ ID NO: 5620741 - DNA, 25 bp, Homo sapien
ccaaagcttggttatgacatgatca

SEQ ID NO: 5620742 - DNA, 25 bp, Homo sapien
tatccctccttgcctgagtgccctg

SEQ ID NO: 5620743 - DNA, 25 bp, Homo sapien
ctgctgcccaataaatgagctttgc

SEQ ID NO: 5620744 - DNA, 25 bp, Homo sapien
tccttagctgtcaggtaagacggtg

SEQ ID NO: 5620745 - DNA, 25 bp, Homo sapien
aaaacttcaaggagtgacactggag

SEQ ID NO: 5620746 - DNA, 25 bp, Homo sapien
gaaagggagtgattttcagatcagg

SEQ ID NO: 5620747 - DNA, 25 bp, Homo sapien
ccaagattttacaacaaaggactac

SEQ ID NO: 5620748 - DNA, 25 bp, Homo sapien
tccttgcctgagtgccctggttttt

SEQ ID NO: 5620749 - DNA, 25 bp, Homo sapien
atgtggtcttgagtaaatcatttct

SEQ ID NO: 5620750 - DNA, 25 bp, Homo sapien
gttatgacatgatcaagctcctcac

SEQ ID NO: 5620751 - DNA, 25 bp, Homo sapien
ttaatcaggaaacctcagagagacg

SEQ ID NO: 5620752 - DNA, 25 bp, Homo sapien
tgggaacaaggttacatccagcctt

SEQ ID NO: 5620753 - DNA, 25 bp, Homo sapien
agccggacgcaactcttcctccagg

SEQ ID NO: 5620754 - DNA, 25 bp, Homo sapien
ccaggcatccccaccaggttcatcc

SEQ ID NO: 5620755 - DNA, 25 bp, Homo sapien
ggcagaggtcctctctccagagtct

SEQ ID NO: 5620756 - DNA, 25 bp, Homo sapien
aggagaacttggcagtcccaaccct

SEQ ID NO: 5620757 - DNA, 25 bp, Homo sapien
gagctgccctgcacacaccctgggc

SEQ ID NO: 5620758 - DNA, 25 bp, Homo sapien
cttcctccaggagaacttggcagtc

SEQ ID NO: 5620759 - DNA, 25 bp, Homo sapien
ccaggttcatccttggagctgccct

SEQ ID NO: 5620760 - DNA, 25 bp, Homo sapien
atgctgacagtggaaacgacttcct

SEQ ID NO: 5620761 - DNA, 25 bp, Homo sapien
gacacctggcggtacagtcccagtg

SEQ ID NO: 5620762 - DNA, 25 bp, Homo sapien
gaggggatgtcattggcttacaaac

SEQ ID NO: 5620763 - DNA, 25 bp, Homo sapien
aggggatgtcattggcttacaaaca

SEQ ID NO: 5620764 - DNA, 25 bp, Homo sapien
cctttaaaatagatacctaaatgat

SEQ ID NO: 5620765 - DNA, 25 bp, Homo sapien
attttaacacagaaacaataaactc

SEQ ID NO: 5620766 - DNA, 25 bp, Homo sapien
tgcattattttaacacagaaacaat

SEQ ID NO: 5620767 - DNA, 25 bp, Homo sapien
ctgaaaatgagaatatattttttct

SEQ ID NO: 5620768 - DNA, 25 bp, Homo sapien
ctaaatgataaataacaatctgtag

SEQ ID NO: 5620769 - DNA, 25 bp, Homo sapien
aatagatacctaaatgataaataac

SEQ ID NO: 5620770 - DNA, 25 bp, Homo sapien
taacacagaaacaataaactcttcc

SEQ ID NO: 5620771 - DNA, 25 bp, Homo sapien
ggatgtcattggcttacaaacaacc

SEQ ID NO: 5620772 - DNA, 25 bp, Homo sapien
gggatgtcattggcttacaaacaac

SEQ ID NO: 5620773 - DNA, 25 bp, Homo sapien
gctcaataaagatgttgctgctgtt

SEQ ID NO: 5620774 - DNA, 25 bp, Homo sapien
ggctggattacggtaaagctgtgga

SEQ ID NO: 5620775 - DNA, 25 bp, Homo sapien
tttaaacatgtaacaggggagcaga

SEQ ID NO: 5620776 - DNA, 25 bp, Homo sapien
gaggtttcccaggacactcccatag

SEQ ID NO: 5620777 - DNA, 25 bp, Homo sapien
gggatggcactcaacagggttataa

SEQ ID NO: 5620778 - DNA, 25 bp, Homo sapien
attttagttagcttagggatggcac

SEQ ID NO: 5620779 - DNA, 25 bp, Homo sapien
tggggtgaataatcctagctctatc

SEQ ID NO: 5620780 - DNA, 25 bp, Homo sapien
tggagatcacagtaattgaggtttc

SEQ ID NO: 5620781 - DNA, 25 bp, Homo sapien
aaagggggagaacatctctctcatt

SEQ ID NO: 5620782 - DNA, 25 bp, Homo sapien
atctgcagggttttatcgtggtttc

SEQ ID NO: 5620783 - DNA, 25 bp, Homo sapien
ttccaaggctggattacggtaaagc

SEQ ID NO: 5620784 - DNA, 25 bp, Homo sapien
aaggaagggcgtgtactctctttat

SEQ ID NO: 5620785 - DNA, 25 bp, Homo sapien
tttaaaaagccagaatatacgtgtg

SEQ ID NO: 5620786 - DNA, 25 bp, Homo sapien
atgatcttgaattattgggaaagga

SEQ ID NO: 5620787 - DNA, 25 bp, Homo sapien
tgttgaaaagtgtagcatcatactc

SEQ ID NO: 5620788 - DNA, 25 bp, Homo sapien
ctctctttatgaaggtagagaaata

SEQ ID NO: 5620789 - DNA, 25 bp, Homo sapien
aaaatttgttgaaaagtgtagcatc

SEQ ID NO: 5620790 - DNA, 25 bp, Homo sapien
tagggaagtttctgtaatgttggtc

SEQ ID NO: 5620791 - DNA, 25 bp, Homo sapien
tgtaatgttggtcctccttgttctc

SEQ ID NO: 5620792 - DNA, 25 bp, Homo sapien
tacagcagtacatactagggaagtt

SEQ ID NO: 5620793 - DNA, 25 bp, Homo sapien
acttagagctacatcataaaaatga

SEQ ID NO: 5620794 - DNA, 25 bp, Homo sapien
gcatcatactcaaatacagcagtac

SEQ ID NO: 5620795 - DNA, 25 bp, Homo sapien
tcagatctcatgagaactaactcac

SEQ ID NO: 5620796 - DNA, 25 bp, Homo sapien
gcaggcaagtcttacatggcagcag

SEQ ID NO: 5620797 - DNA, 25 bp, Homo sapien
aaaggaggaattgtcaaacacttat

SEQ ID NO: 5620798 - DNA, 25 bp, Homo sapien
ggggacatatagccaaaccatatca

SEQ ID NO: 5620799 - DNA, 25 bp, Homo sapien
tgtgtaaaggaggaattgtcaaaca

SEQ ID NO: 5620800 - DNA, 25 bp, Homo sapien
gacacatggggattataattcaaga

SEQ ID NO: 5620801 - DNA, 25 bp, Homo sapien
aaaaatcacataagaaaagacactc

SEQ ID NO: 5620802 - DNA, 25 bp, Homo sapien
caggtccctcccttgacacatgggg

SEQ ID NO: 5620803 - DNA, 25 bp, Homo sapien
tatcccaagaacagcatggggacaa

SEQ ID NO: 5620804 - DNA, 25 bp, Homo sapien
gtcttacatggcagcagatgagaga

SEQ ID NO: 5620805 - DNA, 25 bp, Homo sapien
tggggacaactgcccccgtgatcca

SEQ ID NO: 5620806 - DNA, 25 bp, Homo sapien
gaagaaaaccagtcaaagggcaata

SEQ ID NO: 5620807 - DNA, 25 bp, Homo sapien
aagggcaatactttgttcatctttc

SEQ ID NO: 5620808 - DNA, 25 bp, Homo sapien
tttggcacctctttaacaagctcat

SEQ ID NO: 5620809 - DNA, 25 bp, Homo sapien
gggggcttgtcaccaatgaatgaag

SEQ ID NO: 5620810 - DNA, 25 bp, Homo sapien
tggtgtaagagctgatgcctttgtt

SEQ ID NO: 5620811 - DNA, 25 bp, Homo sapien
aaggaggaatatgttctttggcacc

SEQ ID NO: 5620812 - DNA, 25 bp, Homo sapien
tcttttggtgtaagagctgatgcct

SEQ ID NO: 5620813 - DNA, 25 bp, Homo sapien
agctcattagtaaagtcccggggtg

SEQ ID NO: 5620814 - DNA, 25 bp, Homo sapien
gatgaagaagaaaaccagtcaaagg

SEQ ID NO: 5620815 - DNA, 25 bp, Homo sapien
cttctgaccttgggctgaaaaatat

SEQ ID NO: 5620816 - DNA, 25 bp, Homo sapien
ctcaggtcgatttctcattgtcttc

SEQ ID NO: 5620817 - DNA, 25 bp, Homo sapien
caaatctaaaatggaggtgtttttc

SEQ ID NO: 5620818 - DNA, 25 bp, Homo sapien
ataacaataaagagatggctattta

SEQ ID NO: 5620819 - DNA, 25 bp, Homo sapien
ggtagaaaggcacaacctgaaaatg

SEQ ID NO: 5620820 - DNA, 25 bp, Homo sapien
ataaggacgattagagagatcaaca

SEQ ID NO: 5620821 - DNA, 25 bp, Homo sapien
gaaagttgataccaataaggacgat

SEQ ID NO: 5620822 - DNA, 25 bp, Homo sapien
tctcaaagtgatattctcgagcccc

SEQ ID NO: 5620823 - DNA, 25 bp, Homo sapien
gatggtctgtgagttaaataatgtg

SEQ ID NO: 5620824 - DNA, 25 bp, Homo sapien
gaaaatgtaatggatttgtcgttct

SEQ ID NO: 5620825 - DNA, 25 bp, Homo sapien
tctcgagccccttcagatggtctgt

SEQ ID NO: 5620826 - DNA, 25 bp, Homo sapien
aatgtgtatatgattaggctacttt

SEQ ID NO: 5620827 - DNA, 25 bp, Homo sapien
gtcagtatcctttaggaagagtgtt

SEQ ID NO: 5620828 - DNA, 25 bp, Homo sapien
atgagatttcataaggtttagtttt

SEQ ID NO: 5620829 - DNA, 25 bp, Homo sapien
aggagattcctgagtgcagggtaat

SEQ ID NO: 5620830 - DNA, 25 bp, Homo sapien
atttttaagtcatgctgaaacattc

SEQ ID NO: 5620831 - DNA, 25 bp, Homo sapien
agcaatatcatgtaggagattcctg

SEQ ID NO: 5620832 - DNA, 25 bp, Homo sapien
tttggagaatgggattatgataatt

SEQ ID NO: 5620833 - DNA, 25 bp, Homo sapien
gatttgaggactaatgtgttaatgt

SEQ ID NO: 5620834 - DNA, 25 bp, Homo sapien
gcagaatgaaatctcaaagccaaaa

SEQ ID NO: 5620835 - DNA, 25 bp, Homo sapien
aacctggattcagcctaaggatgtt

SEQ ID NO: 5620836 - DNA, 25 bp, Homo sapien
taaaatgaggcttccactactttcc

SEQ ID NO: 5620837 - DNA, 25 bp, Homo sapien
caaaatttgaaagtaacctggattc

SEQ ID NO: 5620838 - DNA, 25 bp, Homo sapien
aaaactgtagttcatatggacactt

SEQ ID NO: 5620839 - DNA, 25 bp, Homo sapien
tgctggggctacattacaaagtacc

SEQ ID NO: 5620840 - DNA, 25 bp, Homo sapien
tgggtgtcactgtgttcaaatttcc

SEQ ID NO: 5620841 - DNA, 25 bp, Homo sapien
ttatagggacaggttagtaagatta

SEQ ID NO: 5620842 - DNA, 25 bp, Homo sapien
tcacagatctggaggctaaaagtgt

SEQ ID NO: 5620843 - DNA, 25 bp, Homo sapien
caacttgttctaatgccaccagcca

SEQ ID NO: 5620844 - DNA, 25 bp, Homo sapien
taaccttttcatgggcaacttgttc

SEQ ID NO: 5620845 - DNA, 25 bp, Homo sapien
catgttttagtttgctggggctaca

SEQ ID NO: 5620846 - DNA, 25 bp, Homo sapien
gctggctggcttggttccttctgag

SEQ ID NO: 5620847 - DNA, 25 bp, Homo sapien
atgccaccagccaacccatgtttta

SEQ ID NO: 5620848 - DNA, 25 bp, Homo sapien
taggctgcctgtaaccttttcatgg

SEQ ID NO: 5620849 - DNA, 25 bp, Homo sapien
ctggagggcttaaacaacataaact

SEQ ID NO: 5620850 - DNA, 25 bp, Homo sapien
tgttgcccagtgaagttggtagaaa

SEQ ID NO: 5620851 - DNA, 25 bp, Homo sapien
tggtctccgaatcagtttcaggtct

SEQ ID NO: 5620852 - DNA, 25 bp, Homo sapien
tgagggaaataaaacgattgattgt

SEQ ID NO: 5620853 - DNA, 25 bp, Homo sapien
tttaaggcctgaatggctggagtag

SEQ ID NO: 5620854 - DNA, 25 bp, Homo sapien
gggagaacgacataactgcacgttc

SEQ ID NO: 5620855 - DNA, 25 bp, Homo sapien
agagctgcagatttaaggcctgaat

SEQ ID NO: 5620856 - DNA, 25 bp, Homo sapien
gataacaagagtcattgagggaaat

SEQ ID NO: 5620857 - DNA, 25 bp, Homo sapien
ttcaggtctgaagataacaagagtc

SEQ ID NO: 5620858 - DNA, 25 bp, Homo sapien
tgaagttggtagaaattaggatgaa

SEQ ID NO: 5620859 - DNA, 25 bp, Homo sapien
gtagcaggtgttacctgaacatttg

SEQ ID NO: 5620860 - DNA, 25 bp, Homo sapien
gaaagtggagattctcatgtctaca

SEQ ID NO: 5620861 - DNA, 25 bp, Homo sapien
gtataacaactgagaggatgttgcc

SEQ ID NO: 5620862 - DNA, 25 bp, Homo sapien
aaatactacaagctgagagggtgct

SEQ ID NO: 5620863 - DNA, 25 bp, Homo sapien
aaaccaagaatatatcctaagcttc

SEQ ID NO: 5620864 - DNA, 25 bp, Homo sapien
gaggatgttgccatttaggtaggtt

SEQ ID NO: 5620865 - DNA, 25 bp, Homo sapien
cagcactgatagctcatgcacacaa

SEQ ID NO: 5620866 - DNA, 25 bp, Homo sapien
aaaagccagatttacaaagtaccac

SEQ ID NO: 5620867 - DNA, 25 bp, Homo sapien
gtagttcaactggtttgagtccacc

SEQ ID NO: 5620868 - DNA, 25 bp, Homo sapien
aacatgtcaatcaagtaggagatat

SEQ ID NO: 5620869 - DNA, 25 bp, Homo sapien
aggtaggttaaatgtagttcaactg

SEQ ID NO: 5620870 - DNA, 25 bp, Homo sapien
gctgagagggtgcttttagtgtaaa

SEQ ID NO: 5620871 - DNA, 25 bp, Homo sapien
aaataaattccagaaaaagcatgct

SEQ ID NO: 5620872 - DNA, 25 bp, Homo sapien
aagcctgatactgtggccttgctct

SEQ ID NO: 5620873 - DNA, 25 bp, Homo sapien
catgtgacaatctagttgtagcgtt

SEQ ID NO: 5620874 - DNA, 25 bp, Homo sapien
ttaagattaaatttggttgtgagta

SEQ ID NO: 5620875 - DNA, 25 bp, Homo sapien
tccagaagtggaactacatatagtc

SEQ ID NO: 5620876 - DNA, 25 bp, Homo sapien
aactgccccaaattaaagtggataa

SEQ ID NO: 5620877 - DNA, 25 bp, Homo sapien
ggagaatcatagatgtggcagaaat

SEQ ID NO: 5620878 - DNA, 25 bp, Homo sapien
tataatatggatgtaagcctgatac

SEQ ID NO: 5620879 - DNA, 25 bp, Homo sapien
ccgtgctttggaattacagaacata

SEQ ID NO: 5620880 - DNA, 25 bp, Homo sapien
gatttcaatagggtgtgggataagt

SEQ ID NO: 5620881 - DNA, 25 bp, Homo sapien
tcccttatgggtactgtgatttcaa

SEQ ID NO: 5620882 - DNA, 25 bp, Homo sapien
aacatgcatgggatagacactctgt

SEQ ID NO: 5620883 - DNA, 25 bp, Homo sapien
tgtggtgaacacagatcagtaaata

SEQ ID NO: 5620884 - DNA, 25 bp, Homo sapien
gcactctggtcactgatgcacctcc

SEQ ID NO: 5620885 - DNA, 25 bp, Homo sapien
tgcaaagatgaaccgtggcctcttt

SEQ ID NO: 5620886 - DNA, 25 bp, Homo sapien
ggtgaggatgtggcccttttcatct

SEQ ID NO: 5620887 - DNA, 25 bp, Homo sapien
gtggagtgcagagatgaccactaaa

SEQ ID NO: 5620888 - DNA, 25 bp, Homo sapien
atagggagcacagctagagctcctt

SEQ ID NO: 5620889 - DNA, 25 bp, Homo sapien
tcccaaaagtctgtggtggagtgca

SEQ ID NO: 5620890 - DNA, 25 bp, Homo sapien
ggtgtagtgatcacgtctatgtccc

SEQ ID NO: 5620891 - DNA, 25 bp, Homo sapien
cctctggctcaaatgcactctggtc

SEQ ID NO: 5620892 - DNA, 25 bp, Homo sapien
ctttacctacgctgcggggacactg

SEQ ID NO: 5620893 - DNA, 25 bp, Homo sapien
gatacagcctagagcgcatgttgtt

SEQ ID NO: 5620894 - DNA, 25 bp, Homo sapien
tttacaacagtaagactgtgaagtc

SEQ ID NO: 5620895 - DNA, 25 bp, Homo sapien
ccccttctagattccctggcctttc

SEQ ID NO: 5620896 - DNA, 25 bp, Homo sapien
gacaatgggattatttgaggattac

SEQ ID NO: 5620897 - DNA, 25 bp, Homo sapien
atagtgtctcacacagagatgaccc

SEQ ID NO: 5620898 - DNA, 25 bp, Homo sapien
ttacaggaatatacaatagtgtctc

SEQ ID NO: 5620899 - DNA, 25 bp, Homo sapien
gacaaccggagcactgcccatcttt

SEQ ID NO: 5620900 - DNA, 25 bp, Homo sapien
gataaaaatgcaatcttacaggaat

SEQ ID NO: 5620901 - DNA, 25 bp, Homo sapien
acacagagatgaccctgaagctctc

SEQ ID NO: 5620902 - DNA, 25 bp, Homo sapien
tggcctttctcgagggtgagaaggc

SEQ ID NO: 5620903 - DNA, 25 bp, Homo sapien
acagtaagactgtgaagtcgtggag

SEQ ID NO: 5620904 - DNA, 25 bp, Homo sapien
gaagctctccttgaagggttgcccc

SEQ ID NO: 5620905 - DNA, 25 bp, Homo sapien
aatatcaaaggtaagaagacatttt

SEQ ID NO: 5620906 - DNA, 25 bp, Homo sapien
acaaaactgaggaatcataatatgt

SEQ ID NO: 5620907 - DNA, 25 bp, Homo sapien
agcaaactatttacatgaccgagga

SEQ ID NO: 5620908 - DNA, 25 bp, Homo sapien
catgaccgaggagtgattataaata

SEQ ID NO: 5620909 - DNA, 25 bp, Homo sapien
gctgcactttgctacagaagagggc

SEQ ID NO: 5620910 - DNA, 25 bp, Homo sapien
cataatatgttaaggtaaaaccaaa

SEQ ID NO: 5620911 - DNA, 25 bp, Homo sapien
gcttgtagcactcaatatctcaaac

SEQ ID NO: 5620912 - DNA, 25 bp, Homo sapien
ggtaagaagacattttttgataaga

SEQ ID NO: 5620913 - DNA, 25 bp, Homo sapien
ggcaggtaaggtcacagactttaaa

SEQ ID NO: 5620914 - DNA, 25 bp, Homo sapien
gcactttgctacagaagagggcagg

SEQ ID NO: 5620915 - DNA, 25 bp, Homo sapien
tatttacatgaccgaggagtgatta

SEQ ID NO: 5620916 - DNA, 25 bp, Homo sapien
aggtcttaacctagcaaattcacaa

SEQ ID NO: 5620917 - DNA, 25 bp, Homo sapien
cagatagccaaattatcaaggaagt

SEQ ID NO: 5620918 - DNA, 25 bp, Homo sapien
atgtgaccacgaactaggtcttaac

SEQ ID NO: 5620919 - DNA, 25 bp, Homo sapien
caaattatcaaggaagtggaaaact

SEQ ID NO: 5620920 - DNA, 25 bp, Homo sapien
ggaggaaaggccatctccttatagt

SEQ ID NO: 5620921 - DNA, 25 bp, Homo sapien
aatcagaggaaaaatcgcaatcaaa

SEQ ID NO: 5620922 - DNA, 25 bp, Homo sapien
aaccaaacaactaaatgtcacttga

SEQ ID NO: 5620923 - DNA, 25 bp, Homo sapien
tctcttcccacctggaggaaaagtc

SEQ ID NO: 5620924 - DNA, 25 bp, Homo sapien
aggaaaaatcgcaatcaaaaaaaga

SEQ ID NO: 5620925 - DNA, 25 bp, Homo sapien
taatgctgtgtaattcttttggtca

SEQ ID NO: 5620926 - DNA, 25 bp, Homo sapien
aaatgtcacttgataaacaactaat

SEQ ID NO: 5620927 - DNA, 25 bp, Homo sapien
ttaacagatatgatgacagtaaaaa

SEQ ID NO: 5620928 - DNA, 25 bp, Homo sapien
gacagtaaaaattgattgcatatct

SEQ ID NO: 5620929 - DNA, 25 bp, Homo sapien
tggaagtaaacttggatcttagtct

SEQ ID NO: 5620930 - DNA, 25 bp, Homo sapien
gtctagacttagacaatgggaaaga

SEQ ID NO: 5620931 - DNA, 25 bp, Homo sapien
gtattgaacattgctgagagaaatc

SEQ ID NO: 5620932 - DNA, 25 bp, Homo sapien
aagagtgaaccttaagaacctagta

SEQ ID NO: 5620933 - DNA, 25 bp, Homo sapien
taaagaaatgctggaagtaaacttg

SEQ ID NO: 5620934 - DNA, 25 bp, Homo sapien
acaagaagaagctgcaaatgaagaa

SEQ ID NO: 5620935 - DNA, 25 bp, Homo sapien
ttatttacaagcgggaactccattc

SEQ ID NO: 5620936 - DNA, 25 bp, Homo sapien
aaagcataaacaagaagaagctgca

SEQ ID NO: 5620937 - DNA, 25 bp, Homo sapien
tctgccacagagaccctgtaaattc

SEQ ID NO: 5620938 - DNA, 25 bp, Homo sapien
gataagaaactgaggttaagagaag

SEQ ID NO: 5620939 - DNA, 25 bp, Homo sapien
ctcaagtccttcagaggaacatgcc

SEQ ID NO: 5620940 - DNA, 25 bp, Homo sapien
aaccaggattcaaaaccaaataagc

SEQ ID NO: 5620941 - DNA, 25 bp, Homo sapien
ggactcagagtcatgtttttcgcaa

SEQ ID NO: 5620942 - DNA, 25 bp, Homo sapien
ttttcaaggggtctatacaatactc

SEQ ID NO: 5620943 - DNA, 25 bp, Homo sapien
aggaacatgcctacaagatgtcttt

SEQ ID NO: 5620944 - DNA, 25 bp, Homo sapien
ggctctggtttcacatcaggctctg

SEQ ID NO: 5620945 - DNA, 25 bp, Homo sapien
tgtgtgccatgtatcttggatcagt

SEQ ID NO: 5620946 - DNA, 25 bp, Homo sapien
gatgaaaactcaaggctctggtttc

SEQ ID NO: 5620947 - DNA, 25 bp, Homo sapien
taagtaacaaatgcaggatgaaaac

SEQ ID NO: 5620948 - DNA, 25 bp, Homo sapien
atagagaaatagggttatactagtt

SEQ ID NO: 5620949 - DNA, 25 bp, Homo sapien
caaagtacattctcaagggtgggga

SEQ ID NO: 5620950 - DNA, 25 bp, Homo sapien
acaaagtacattcacaagggcaggg

SEQ ID NO: 5620951 - DNA, 25 bp, Homo sapien
gtacattcacaaggacaggagtatc

SEQ ID NO: 5620952 - DNA, 25 bp, Homo sapien
accgtggcttgaccatagtgcagcc

SEQ ID NO: 5620953 - DNA, 25 bp, Homo sapien
gcggtgtagtcaggagcaatttttt

SEQ ID NO: 5620954 - DNA, 25 bp, Homo sapien
caggggatggatattacaaagtaca

SEQ ID NO: 5620955 - DNA, 25 bp, Homo sapien
gtacattatcacaagggtgggggaa

SEQ ID NO: 5620956 - DNA, 25 bp, Homo sapien
ggtggtgggattatcattggttctt

SEQ ID NO: 5620957 - DNA, 25 bp, Homo sapien
gcaattttttacaggcaggggatgg

SEQ ID NO: 5620958 - DNA, 25 bp, Homo sapien
tcagaggaccttacaaaaagtttca

SEQ ID NO: 5620959 - DNA, 25 bp, Homo sapien
tggggaggatgttacaaagtacatt

SEQ ID NO: 5620960 - DNA, 25 bp, Homo sapien
catgcattggtctttgtgtacacag

SEQ ID NO: 5620961 - DNA, 25 bp, Homo sapien
ttggtagcaatacagaccatgcatt

SEQ ID NO: 5620962 - DNA, 25 bp, Homo sapien
gatgatgaagacactacaattctaa

SEQ ID NO: 5620963 - DNA, 25 bp, Homo sapien
ggggcagcaccaccatcttaagatg

SEQ ID NO: 5620964 - DNA, 25 bp, Homo sapien
gaggtgtaaggaaagtactttgcaa

SEQ ID NO: 5620965 - DNA, 25 bp, Homo sapien
ttaagccaatggtgaagttctaaaa

SEQ ID NO: 5620966 - DNA, 25 bp, Homo sapien
tcttaagatgataaaccaaactgca

SEQ ID NO: 5620967 - DNA, 25 bp, Homo sapien
caaagacattaaggaccactaatat

SEQ ID NO: 5620968 - DNA, 25 bp, Homo sapien
ccaccctgtagccaagaggtgtaag

SEQ ID NO: 5620969 - DNA, 25 bp, Homo sapien
aaaattgaaaataagcataacacta

SEQ ID NO: 5620970 - DNA, 25 bp, Homo sapien
gcctggcacccattacatatataca

SEQ ID NO: 5620971 - DNA, 25 bp, Homo sapien
atacttggataaatggtgtgtgcgt

SEQ ID NO: 5620972 - DNA, 25 bp, Homo sapien
ttggataggtgatttgtgagtattt

SEQ ID NO: 5620973 - DNA, 25 bp, Homo sapien
gtatgtacatacctggataggggtg

SEQ ID NO: 5620974 - DNA, 25 bp, Homo sapien
tatgtgtgtatgttcgtgcataaat

SEQ ID NO: 5620975 - DNA, 25 bp, Homo sapien
gtgtgtacatacttggataggtgat

SEQ ID NO: 5620976 - DNA, 25 bp, Homo sapien
tcgtgttggagttaagtctgtgcat

SEQ ID NO: 5620977 - DNA, 25 bp, Homo sapien
ttaagcaagcccgtgtatacatact

SEQ ID NO: 5620978 - DNA, 25 bp, Homo sapien
gggcaggtttaagcaagcccgtgta

SEQ ID NO: 5620979 - DNA, 25 bp, Homo sapien
gggtttaagtgagcctgtgtgtaca

SEQ ID NO: 5620980 - DNA, 25 bp, Homo sapien
gggcaggtttaagcaagtctatgta

SEQ ID NO: 5620981 - DNA, 25 bp, Homo sapien
tgtacatacctggataggggtgtgt

SEQ ID NO: 5620982 - DNA, 25 bp, Homo sapien
tgaacaaggtgtgattgtgaagcaa

SEQ ID NO: 5620983 - DNA, 25 bp, Homo sapien
aactagtggggtacttgacattgtt

SEQ ID NO: 5620984 - DNA, 25 bp, Homo sapien
gtaagtgctgccaaaaagcaatgac

SEQ ID NO: 5620985 - DNA, 25 bp, Homo sapien
aaagcaatgacatgaacaaggtgtg

SEQ ID NO: 5620986 - DNA, 25 bp, Homo sapien
agtagttgcaattctcagtgagttc

SEQ ID NO: 5620987 - DNA, 25 bp, Homo sapien
tcagtgagttctcaaggtgctcatc

SEQ ID NO: 5620988 - DNA, 25 bp, Homo sapien
tctggcttgatggaagtagttgcaa

SEQ ID NO: 5620989 - DNA, 25 bp, Homo sapien
tgtcattgggaagacaggtcttaca

SEQ ID NO: 5620990 - DNA, 25 bp, Homo sapien
ggaagacaggtcttacaaaagtcca

SEQ ID NO: 5620991 - DNA, 25 bp, Homo sapien
aaaagtccagtaaagaggcaaaatc

SEQ ID NO: 5620992 - DNA, 25 bp, Homo sapien
agagaacaacataaaactagtgggg

SEQ ID NO: 5620993 - DNA, 25 bp, Homo sapien
gcccatttagctctgtgtgaagtgc

SEQ ID NO: 5620994 - DNA, 25 bp, Homo sapien
ctggccagtggttacattttgtgca

SEQ ID NO: 5620995 - DNA, 25 bp, Homo sapien
ggaggcagatcagaaatagtataca

SEQ ID NO: 5620996 - DNA, 25 bp, Homo sapien
tccactagatggagctgtcaaagtc

SEQ ID NO: 5620997 - DNA, 25 bp, Homo sapien
agaatttagattgaaccagcatgta

SEQ ID NO: 5620998 - DNA, 25 bp, Homo sapien
tggatgaaccaatatgacaacctaa

SEQ ID NO: 5620999 - DNA, 25 bp, Homo sapien
aagtccaaagcagtgtctaggcatg

SEQ ID NO: 5621000 - DNA, 25 bp, Homo sapien
tctaggcatgacaaatagctcaaga

SEQ ID NO: 5621001 - DNA, 25 bp, Homo sapien
cgtagctcgaactataggtgtacac

SEQ ID NO: 5621002 - DNA, 25 bp, Homo sapien
acaacctaaatggatggaggcagat

SEQ ID NO: 5621003 - DNA, 25 bp, Homo sapien
tgggactaaaggcagatgattttat

SEQ ID NO: 5621004 - DNA, 25 bp, Homo sapien
gtataccactggacaaccacaaacc

SEQ ID NO: 5621005 - DNA, 25 bp, Homo sapien
tcctgctggtcacttttagaatggc

SEQ ID NO: 5621006 - DNA, 25 bp, Homo sapien
acaaagtctggtctatgtgcttaat

SEQ ID NO: 5621007 - DNA, 25 bp, Homo sapien
tccacaagcagatatagagagacaa

SEQ ID NO: 5621008 - DNA, 25 bp, Homo sapien
cagagctcttctggacgaaagagtc

SEQ ID NO: 5621009 - DNA, 25 bp, Homo sapien
agcagatatagagagacaatgtgta

SEQ ID NO: 5621010 - DNA, 25 bp, Homo sapien
cactactagatccctcctgctggtc

SEQ ID NO: 5621011 - DNA, 25 bp, Homo sapien
gcttaatgaaatgcctgtcagttgt

SEQ ID NO: 5621012 - DNA, 25 bp, Homo sapien
tcaaatgaaaatactacagagatag

SEQ ID NO: 5621013 - DNA, 25 bp, Homo sapien
ctacagagatagcacaagataaacg

SEQ ID NO: 5621014 - DNA, 25 bp, Homo sapien
agcaaagctctggaaactcagcctc

SEQ ID NO: 5621015 - DNA, 25 bp, Homo sapien
tatcatcctcaaagtgcaggtaatc

SEQ ID NO: 5621016 - DNA, 25 bp, Homo sapien
atccatcctgtgtgcaccgtgtggg

SEQ ID NO: 5621017 - DNA, 25 bp, Homo sapien
gaatccaatgacccagttcactgaa

SEQ ID NO: 5621018 - DNA, 25 bp, Homo sapien
caattgtagtaaggtatgaaattcc

SEQ ID NO: 5621019 - DNA, 25 bp, Homo sapien
atccatgtcaaaccaccatccacgg

SEQ ID NO: 5621020 - DNA, 25 bp, Homo sapien
aacaatgaatccaatgacccagttc

SEQ ID NO: 5621021 - DNA, 25 bp, Homo sapien
tgcagagttggatttctgaaagctt

SEQ ID NO: 5621022 - DNA, 25 bp, Homo sapien
tgattggtcaattgtagtaaggtat

SEQ ID NO: 5621023 - DNA, 25 bp, Homo sapien
aaagcagaaaacaatgaatccaatg

SEQ ID NO: 5621024 - DNA, 25 bp, Homo sapien
cctcaaagtgcaggtaatccatcct

SEQ ID NO: 5621025 - DNA, 25 bp, Homo sapien
atgatcaccatatccatgtcaaacc

SEQ ID NO: 5621026 - DNA, 25 bp, Homo sapien
aaaagaatcaacacttaatcactca

SEQ ID NO: 5621027 - DNA, 25 bp, Homo sapien
agtgtctagacctgcctgaagaatt

SEQ ID NO: 5621028 - DNA, 25 bp, Homo sapien
ctgagagtgtctagacctgcctgaa

SEQ ID NO: 5621029 - DNA, 25 bp, Homo sapien
tacgaagtcagtttaggattatgca

SEQ ID NO: 5621030 - DNA, 25 bp, Homo sapien
ctgcattatacaaaggtctgggggt

SEQ ID NO: 5621031 - DNA, 25 bp, Homo sapien
tcagaaaggtcatacgaagtcagtt

SEQ ID NO: 5621032 - DNA, 25 bp, Homo sapien
tcactcatttcacacagctggtacc

SEQ ID NO: 5621033 - DNA, 25 bp, Homo sapien
cagctggtacctgtctgcattatac

SEQ ID NO: 5621034 - DNA, 25 bp, Homo sapien
agaatttcagaaaggtcatacgaag

SEQ ID NO: 5621035 - DNA, 25 bp, Homo sapien
ggataggaactgggtctcttacctc

SEQ ID NO: 5621036 - DNA, 25 bp, Homo sapien
gtgtcttactgaacaggggacagag

SEQ ID NO: 5621037 - DNA, 25 bp, Homo sapien
ggccgcacctaccagccctggcagt

SEQ ID NO: 5621038 - DNA, 25 bp, Homo sapien
tctttgcctgtgagtctctgccgcc

SEQ ID NO: 5621039 - DNA, 25 bp, Homo sapien
tcctgtgaccatctgtgcagccacc

SEQ ID NO: 5621040 - DNA, 25 bp, Homo sapien
tccagcgcgggcttcccttcctgtg

SEQ ID NO: 5621041 - DNA, 25 bp, Homo sapien
gcgggcttcccttcctgtgaccatc

SEQ ID NO: 5621042 - DNA, 25 bp, Homo sapien
ccttcctgtgaccatctgtgcagcc

SEQ ID NO: 5621043 - DNA, 25 bp, Homo sapien
agttctttgcctgtgagtctctgcc

SEQ ID NO: 5621044 - DNA, 25 bp, Homo sapien
ctttgcctgtgagtctctgccgccg

SEQ ID NO: 5621045 - DNA, 25 bp, Homo sapien
ggcagttctttgcctgtgagtctct

SEQ ID NO: 5621046 - DNA, 25 bp, Homo sapien
accagccctggcagttctttgcctg

SEQ ID NO: 5621047 - DNA, 25 bp, Homo sapien
ctgtgaccatctgtgcagccaccag

SEQ ID NO: 5621048 - DNA, 25 bp, Homo sapien
acatactcctcaatgcagcaatcct

SEQ ID NO: 5621049 - DNA, 25 bp, Homo sapien
gatgcagagaacgtacatgatccca

SEQ ID NO: 5621050 - DNA, 25 bp, Homo sapien
aaaggaaataagagctatgatagac

SEQ ID NO: 5621051 - DNA, 25 bp, Homo sapien
agcaaactgcccaccaaaatatctt

SEQ ID NO: 5621052 - DNA, 25 bp, Homo sapien
ccgcagacgtaaaaccatcatggtg

SEQ ID NO: 5621053 - DNA, 25 bp, Homo sapien
tccagggaatctattccgcagacgt

SEQ ID NO: 5621054 - DNA, 25 bp, Homo sapien
catcatggtgacaaacatatacaca

SEQ ID NO: 5621055 - DNA, 25 bp, Homo sapien
gccatgagtattaagggaaaagtgt

SEQ ID NO: 5621056 - DNA, 25 bp, Homo sapien
ctatgatagacttagagaaattctc

SEQ ID NO: 5621057 - DNA, 25 bp, Homo sapien
taaaaatttgtaaggtgctcatgat

SEQ ID NO: 5621058 - DNA, 25 bp, Homo sapien
agtataatatgtagaataaaacccc

SEQ ID NO: 5621059 - DNA, 25 bp, Homo sapien
atgctagcctggtcatccaaatatt

SEQ ID NO: 5621060 - DNA, 25 bp, Homo sapien
ttgcacagatgtcatgcctaatgtc

SEQ ID NO: 5621061 - DNA, 25 bp, Homo sapien
ggctgctgtactttgcacagatgtc

SEQ ID NO: 5621062 - DNA, 25 bp, Homo sapien
acaaacaaatggtgtaatgctagcc

SEQ ID NO: 5621063 - DNA, 25 bp, Homo sapien
tccccttctggctgctgtactttgc

SEQ ID NO: 5621064 - DNA, 25 bp, Homo sapien
gtcacacaaacaaatggtgtaatgc

SEQ ID NO: 5621065 - DNA, 25 bp, Homo sapien
gcccagctggttttgacctcctggg

SEQ ID NO: 5621066 - DNA, 25 bp, Homo sapien
tggtgtaatgctagcctggtcatcc

SEQ ID NO: 5621067 - DNA, 25 bp, Homo sapien
acaaatggtgtaatgctagcctggt

SEQ ID NO: 5621068 - DNA, 25 bp, Homo sapien
acagatgtcatgcctaatgtcacac

SEQ ID NO: 5621069 - DNA, 25 bp, Homo sapien
cacgcccggccccagatattaaaat

SEQ ID NO: 5621070 - DNA, 25 bp, Homo sapien
gcagcagcaagcatatacaggcatt

SEQ ID NO: 5621071 - DNA, 25 bp, Homo sapien
tgcagtgatcgtgagaaagccttta

SEQ ID NO: 5621072 - DNA, 25 bp, Homo sapien
cattcaccaccagagacgtcacact

SEQ ID NO: 5621073 - DNA, 25 bp, Homo sapien
aggagggctttatgagtgtagcaaa

SEQ ID NO: 5621074 - DNA, 25 bp, Homo sapien
agtgaatgtgaggaatcctttagca

SEQ ID NO: 5621075 - DNA, 25 bp, Homo sapien
attatttcacctgtggggaggcctt

SEQ ID NO: 5621076 - DNA, 25 bp, Homo sapien
attcacactggacaaaagatgtttg

SEQ ID NO: 5621077 - DNA, 25 bp, Homo sapien
gaagccactcccagtggtgaggagc

SEQ ID NO: 5621078 - DNA, 25 bp, Homo sapien
aagcttcaagccacaaacacacact

SEQ ID NO: 5621079 - DNA, 25 bp, Homo sapien
cggacctactccaacacgaagccac

SEQ ID NO: 5621080 - DNA, 25 bp, Homo sapien
aaaagatgtttgagtgtagtgaatg

SEQ ID NO: 5621081 - DNA, 25 bp, Homo sapien
ctccaagagctcaggttgtttagcc

SEQ ID NO: 5621082 - DNA, 25 bp, Homo sapien
tacttcagacaattgactttccgtc

SEQ ID NO: 5621083 - DNA, 25 bp, Homo sapien
gatatgggcataaggttataataat

SEQ ID NO: 5621084 - DNA, 25 bp, Homo sapien
ggccagctgagctatgtgagaaaag

SEQ ID NO: 5621085 - DNA, 25 bp, Homo sapien
agcaaaaactgagaatgtcagctta

SEQ ID NO: 5621086 - DNA, 25 bp, Homo sapien
ctttccgtcagcaaaccggggaaga

SEQ ID NO: 5621087 - DNA, 25 bp, Homo sapien
agaatgtcagcttagtacttcagac

SEQ ID NO: 5621088 - DNA, 25 bp, Homo sapien
cagggcatctccaagagctcaggtt

SEQ ID NO: 5621089 - DNA, 25 bp, Homo sapien
ggggttagatatgggcataaggtta

SEQ ID NO: 5621090 - DNA, 25 bp, Homo sapien
ggaagacaggttctcctaagttatc

SEQ ID NO: 5621091 - DNA, 25 bp, Homo sapien
ttgtttagccatgaaggtgcggcca

SEQ ID NO: 5621092 - DNA, 25 bp, Homo sapien
cacagtgagtgtgagatgctctgta

SEQ ID NO: 5621093 - DNA, 25 bp, Homo sapien
tattctgtttagaagggaacctgac

SEQ ID NO: 5621094 - DNA, 25 bp, Homo sapien
cctctgtacagagatgtacggcttt

SEQ ID NO: 5621095 - DNA, 25 bp, Homo sapien
ttggcaggccagcattatcatattc

SEQ ID NO: 5621096 - DNA, 25 bp, Homo sapien
cctgacccctctgatgctgggcagc

SEQ ID NO: 5621097 - DNA, 25 bp, Homo sapien
ctatgattgacaagtaccaggcttt

SEQ ID NO: 5621098 - DNA, 25 bp, Homo sapien
accaggctttgatggacggcctttc

SEQ ID NO: 5621099 - DNA, 25 bp, Homo sapien
aggccaggtctgaatgcagttgtga

SEQ ID NO: 5621100 - DNA, 25 bp, Homo sapien
cttggaatatgcccgttggtctatg

SEQ ID NO: 5621101 - DNA, 25 bp, Homo sapien
caaatcccagctctttgtggagggc

SEQ ID NO: 5621102 - DNA, 25 bp, Homo sapien
agggaatgtcacaagcacagtgagt

SEQ ID NO: 5621103 - DNA, 25 bp, Homo sapien
tcactcaaattgacacctaaagatt

SEQ ID NO: 5621104 - DNA, 25 bp, Homo sapien
ggctggtgttgaactactgcctcaa

SEQ ID NO: 5621105 - DNA, 25 bp, Homo sapien
gctcagcatagtaatcacaaaagta

SEQ ID NO: 5621106 - DNA, 25 bp, Homo sapien
gggttgccatgttttgctgtgttgc

SEQ ID NO: 5621107 - DNA, 25 bp, Homo sapien
aagtattctatgagagtgaaactgg

SEQ ID NO: 5621108 - DNA, 25 bp, Homo sapien
ttttcttctagggatgggttgccat

SEQ ID NO: 5621109 - DNA, 25 bp, Homo sapien
tgagctaccacgtccacccctaaac

SEQ ID NO: 5621110 - DNA, 25 bp, Homo sapien
gtggggtcataggtgattgtaacct

SEQ ID NO: 5621111 - DNA, 25 bp, Homo sapien
gattatactgaatcaatatcccacc

SEQ ID NO: 5621112 - DNA, 25 bp, Homo sapien
ctaggactacaagcgtgtaccatca

SEQ ID NO: 5621113 - DNA, 25 bp, Homo sapien
actacaagcgtgtaccatcatgccc

SEQ ID NO: 5621114 - DNA, 25 bp, Homo sapien
atctaagttcctcaggggaattttc

SEQ ID NO: 5621115 - DNA, 25 bp, Homo sapien
gtcttctcctagctaacaactctgc

SEQ ID NO: 5621116 - DNA, 25 bp, Homo sapien
aaaaaaatgggacaatatggttcta

SEQ ID NO: 5621117 - DNA, 25 bp, Homo sapien
atgattttgaggcaagatacgtatc

SEQ ID NO: 5621118 - DNA, 25 bp, Homo sapien
gaggcaagatacgtatctaagttcc

SEQ ID NO: 5621119 - DNA, 25 bp, Homo sapien
atgccacagtgtttagtagatatac

SEQ ID NO: 5621120 - DNA, 25 bp, Homo sapien
tggttctaatcaagatcagaggtaa

SEQ ID NO: 5621121 - DNA, 25 bp, Homo sapien
tctgctataatagtaagccactgtg

SEQ ID NO: 5621122 - DNA, 25 bp, Homo sapien
tcagtatctcctacaggcaaattcc

SEQ ID NO: 5621123 - DNA, 25 bp, Homo sapien
tagtagatatacaccaaaagtttca

SEQ ID NO: 5621124 - DNA, 25 bp, Homo sapien
agtaagccactgtgattgatgagcc

SEQ ID NO: 5621125 - DNA, 25 bp, Homo sapien
caaaggttaaatgagctgctatatg

SEQ ID NO: 5621126 - DNA, 25 bp, Homo sapien
gggtcagctctaggtcatccccctc

SEQ ID NO: 5621127 - DNA, 25 bp, Homo sapien
caaagttaaatggcatcagaccttc

SEQ ID NO: 5621128 - DNA, 25 bp, Homo sapien
ggtcatgattcagcacgaaggcttc

SEQ ID NO: 5621129 - DNA, 25 bp, Homo sapien
ggggagcatctcacactgtgccaca

SEQ ID NO: 5621130 - DNA, 25 bp, Homo sapien
gtgccacagtcttctggagggccaa

SEQ ID NO: 5621131 - DNA, 25 bp, Homo sapien
gtccaatgctcgggacacaggtgta

SEQ ID NO: 5621132 - DNA, 25 bp, Homo sapien
gcataggggttaacagtacaaaatc

SEQ ID NO: 5621133 - DNA, 25 bp, Homo sapien
agtagctattggagaagaagatgct

SEQ ID NO: 5621134 - DNA, 25 bp, Homo sapien
tttccagcatggtgagtggtcatga

SEQ ID NO: 5621135 - DNA, 25 bp, Homo sapien
tccaccagtagccattctgggcccc

SEQ ID NO: 5621136 - DNA, 25 bp, Homo sapien
tccgacggacaacctttttcagctt

SEQ ID NO: 5621137 - DNA, 25 bp, Homo sapien
aagctgaaaaaggttgtccgtcgga

SEQ ID NO: 5621138 - DNA, 25 bp, Homo sapien
gtggcaagcgttatttcaaagggaa

SEQ ID NO: 5621139 - DNA, 25 bp, Homo sapien
ggcctggtgatggcttaaacctacc

SEQ ID NO: 5621140 - DNA, 25 bp, Homo sapien
tacagaattgtatgaacagaagatt

SEQ ID NO: 5621141 - DNA, 25 bp, Homo sapien
actgccacaggagaactgtcttttc

SEQ ID NO: 5621142 - DNA, 25 bp, Homo sapien
taaagagcacaattatagagatttt

SEQ ID NO: 5621143 - DNA, 25 bp, Homo sapien
gagtttttcaaatggtagtcaccta

SEQ ID NO: 5621144 - DNA, 25 bp, Homo sapien
tgaagtcccacaaaagtagaaacaa

SEQ ID NO: 5621145 - DNA, 25 bp, Homo sapien
ccatttgcaaaggcctggtgatggc

SEQ ID NO: 5621146 - DNA, 25 bp, Homo sapien
gccctctggatgccacatcgccact

SEQ ID NO: 5621147 - DNA, 25 bp, Homo sapien
tgccacatcgccactgccacaggag

SEQ ID NO: 5621148 - DNA, 25 bp, Homo sapien
ctattatcagcatgactgaagtccc

SEQ ID NO: 5621149 - DNA, 25 bp, Homo sapien
cctggggctaaatgaaaagtctgcc

SEQ ID NO: 5621150 - DNA, 25 bp, Homo sapien
caagatggatagtacattctggaga

SEQ ID NO: 5621151 - DNA, 25 bp, Homo sapien
atttaagataggaacatctcatgcc

SEQ ID NO: 5621152 - DNA, 25 bp, Homo sapien
gaaatggccccaagctttcttccaa

SEQ ID NO: 5621153 - DNA, 25 bp, Homo sapien
gaggctccaacccactgggttctta

SEQ ID NO: 5621154 - DNA, 25 bp, Homo sapien
tctggagagtcaaactatacatttc

SEQ ID NO: 5621155 - DNA, 25 bp, Homo sapien
ttactgactttaataggcaccactt

SEQ ID NO: 5621156 - DNA, 25 bp, Homo sapien
ctttgcaccttgagttcccatccac

SEQ ID NO: 5621157 - DNA, 25 bp, Homo sapien
ataggcaccacttgtaaaagaagca

SEQ ID NO: 5621158 - DNA, 25 bp, Homo sapien
atccacttcaaaggagggacaaagt

SEQ ID NO: 5621159 - DNA, 25 bp, Homo sapien
agtgtgtgcttcctgagagaaaatc

SEQ ID NO: 5621160 - DNA, 25 bp, Homo sapien
cctgttccctacctcgacccaccca

SEQ ID NO: 5621161 - DNA, 25 bp, Homo sapien
gacacatacgccccgtgaagggaaa

SEQ ID NO: 5621162 - DNA, 25 bp, Homo sapien
actgtgagttatgtttacctgttcc

SEQ ID NO: 5621163 - DNA, 25 bp, Homo sapien
tgacaccctcttggcattggaatgc

SEQ ID NO: 5621164 - DNA, 25 bp, Homo sapien
tgccctcccagtatgcacgagacac

SEQ ID NO: 5621165 - DNA, 25 bp, Homo sapien
tgtaacacggcatcacactgtgagt

SEQ ID NO: 5621166 - DNA, 25 bp, Homo sapien
catcccagagccatacacacagtag

SEQ ID NO: 5621167 - DNA, 25 bp, Homo sapien
ctcgacccacccagatctgacaccc

SEQ ID NO: 5621168 - DNA, 25 bp, Homo sapien
ttattacagcatcccagagccatac

SEQ ID NO: 5621169 - DNA, 25 bp, Homo sapien
tgcaaatgtgtgaatcactcgggct

SEQ ID NO: 5621170 - DNA, 25 bp, Homo sapien
acccagcctggctgtaacacggcat

SEQ ID NO: 5621171 - DNA, 25 bp, Homo sapien
tcgtttttacggtagttgtaaatga

SEQ ID NO: 5621172 - DNA, 25 bp, Homo sapien
tcatttacaactaccgtaaaaacga

SEQ ID NO: 5621173 - DNA, 25 bp, Homo sapien
taagcagaagagtgccatgattaga

SEQ ID NO: 5621174 - DNA, 25 bp, Homo sapien
tctcacaggctacaaaggactttta

SEQ ID NO: 5621175 - DNA, 25 bp, Homo sapien
ccagaattatggagtgagaaaagca

SEQ ID NO: 5621176 - DNA, 25 bp, Homo sapien
acgccctgaaagacaacagagtgga

SEQ ID NO: 5621177 - DNA, 25 bp, Homo sapien
ttctggccagaattatggagtgaga

SEQ ID NO: 5621178 - DNA, 25 bp, Homo sapien
cagggagatgacttaagtagctatt

SEQ ID NO: 5621179 - DNA, 25 bp, Homo sapien
atgaagctagggagtcaactcatgt

SEQ ID NO: 5621180 - DNA, 25 bp, Homo sapien
actcatgtagagtctcacaggctac

SEQ ID NO: 5621181 - DNA, 25 bp, Homo sapien
gcttaaatcggacagaattcacttc

SEQ ID NO: 5621182 - DNA, 25 bp, Homo sapien
cagcggctcgaggaatttcaatact

SEQ ID NO: 5621183 - DNA, 25 bp, Homo sapien
cactttggctacagtgtggacgacg

SEQ ID NO: 5621184 - DNA, 25 bp, Homo sapien
acacatatgtaaactgaataatgat

SEQ ID NO: 5621185 - DNA, 25 bp, Homo sapien
ataaattggctgataagtacttttc

SEQ ID NO: 5621186 - DNA, 25 bp, Homo sapien
gttagggagtatttggcattttgct

SEQ ID NO: 5621187 - DNA, 25 bp, Homo sapien
acagaacgcttttgaagaaaaatcc

SEQ ID NO: 5621188 - DNA, 25 bp, Homo sapien
tcataatctcagaaccatgtctttc

SEQ ID NO: 5621189 - DNA, 25 bp, Homo sapien
attctgtatgaggttagggagtatt

SEQ ID NO: 5621190 - DNA, 25 bp, Homo sapien
catccctagcacctaaccacagtac

SEQ ID NO: 5621191 - DNA, 25 bp, Homo sapien
ccacagtacctggaaaatgggaaat

SEQ ID NO: 5621192 - DNA, 25 bp, Homo sapien
gtcaggaatcctgtctgttcacccc

SEQ ID NO: 5621193 - DNA, 25 bp, Homo sapien
tctaaactccaggaggtcaggaatc

SEQ ID NO: 5621194 - DNA, 25 bp, Homo sapien
caactaaatgtgtcacagaacgctt

SEQ ID NO: 5621195 - DNA, 25 bp, Homo sapien
taaaggggtgtgtcactcaccttcc

SEQ ID NO: 5621196 - DNA, 25 bp, Homo sapien
catgccctctgtgaagtgccaagta

SEQ ID NO: 5621197 - DNA, 25 bp, Homo sapien
tcttcgtctataaaggggtgtgtca

SEQ ID NO: 5621198 - DNA, 25 bp, Homo sapien
tagataaaagacatcatgaacatac

SEQ ID NO: 5621199 - DNA, 25 bp, Homo sapien
gcctcaactgcaaattcttcgtcta

SEQ ID NO: 5621200 - DNA, 25 bp, Homo sapien
atgaggccagagacaagtctcctac

SEQ ID NO: 5621201 - DNA, 25 bp, Homo sapien
caccagtgttaatcttgagttagtc

SEQ ID NO: 5621202 - DNA, 25 bp, Homo sapien
tttttatggaaagagtcatgccctc

SEQ ID NO: 5621203 - DNA, 25 bp, Homo sapien
tgtacacattgaaatcgcctcactc

SEQ ID NO: 5621204 - DNA, 25 bp, Homo sapien
tgccaagtagatattatacacgatt

SEQ ID NO: 5621205 - DNA, 25 bp, Homo sapien
acacgattgttgccctcatgtacac

SEQ ID NO: 5621206 - DNA, 25 bp, Homo sapien
atcatctggttggtaaaaattaaaa

SEQ ID NO: 5621207 - DNA, 25 bp, Homo sapien
aaaacagagatttcatagaaaaaga

SEQ ID NO: 5621208 - DNA, 25 bp, Homo sapien
tttaggagagctaagaacctcttaa

SEQ ID NO: 5621209 - DNA, 25 bp, Homo sapien
aagaacttctgttcagcaaaagacc

SEQ ID NO: 5621210 - DNA, 25 bp, Homo sapien
aagaaaaagacagactgggctttaa

SEQ ID NO: 5621211 - DNA, 25 bp, Homo sapien
agcagtagagggaaaatgtccttat

SEQ ID NO: 5621212 - DNA, 25 bp, Homo sapien
aaaaggtgctgggctatttactcat

SEQ ID NO: 5621213 - DNA, 25 bp, Homo sapien
cagcaaaagacccaatagaataaac

SEQ ID NO: 5621214 - DNA, 25 bp, Homo sapien
tctttaataaaaggtgctgggctat

SEQ ID NO: 5621215 - DNA, 25 bp, Homo sapien
tcagtagggaaaggattgattcttt

SEQ ID NO: 5621216 - DNA, 25 bp, Homo sapien
cagtgtgcaaagacttcgataggca

SEQ ID NO: 5621217 - DNA, 25 bp, Homo sapien
ttagaaagcagacttcataaactga

SEQ ID NO: 5621218 - DNA, 25 bp, Homo sapien
cttgagtacgtgattgattgctgac

SEQ ID NO: 5621219 - DNA, 25 bp, Homo sapien
aaccacacgtaatactaccagactg

SEQ ID NO: 5621220 - DNA, 25 bp, Homo sapien
agaagtatgcttgagtacgtgattg

SEQ ID NO: 5621221 - DNA, 25 bp, Homo sapien
tattggcaataaacacttaagtact

SEQ ID NO: 5621222 - DNA, 25 bp, Homo sapien
tgtacaggctgatgagttttgctga

SEQ ID NO: 5621223 - DNA, 25 bp, Homo sapien
tttaaaagtaaatgcagatgctcac

SEQ ID NO: 5621224 - DNA, 25 bp, Homo sapien
aagctggctaataggtacttaagtt

SEQ ID NO: 5621225 - DNA, 25 bp, Homo sapien
gtaacaggtgaaacaagactgacca

SEQ ID NO: 5621226 - DNA, 25 bp, Homo sapien
tctctgaaggtaagagaagtatgct

SEQ ID NO: 5621227 - DNA, 25 bp, Homo sapien
gattgctgaccaaaataagatattg

SEQ ID NO: 5621228 - DNA, 25 bp, Homo sapien
actgtgaggccaagtaattcaagat

SEQ ID NO: 5621229 - DNA, 25 bp, Homo sapien
aaaacaagtgggaaatttcatgcag

SEQ ID NO: 5621230 - DNA, 25 bp, Homo sapien
acaaaggtcaaaacttagtaagtca

SEQ ID NO: 5621231 - DNA, 25 bp, Homo sapien
tgtctgtcggcaaaatagtagcaaa

SEQ ID NO: 5621232 - DNA, 25 bp, Homo sapien
gaaatggaatgttctcaagtactgt

SEQ ID NO: 5621233 - DNA, 25 bp, Homo sapien
acattgacctagcatgttgcctgga

SEQ ID NO: 5621234 - DNA, 25 bp, Homo sapien
atttgccatctacccccggccccat

SEQ ID NO: 5621235 - DNA, 25 bp, Homo sapien
tgtgctaggaaatatatgatgaaga

SEQ ID NO: 5621236 - DNA, 25 bp, Homo sapien
ccagagtaggtttccatttgccatc

SEQ ID NO: 5621237 - DNA, 25 bp, Homo sapien
caagtaattcaagatagagaggaag

SEQ ID NO: 5621238 - DNA, 25 bp, Homo sapien
acattagtaggctataccgctatgg

SEQ ID NO: 5621239 - DNA, 25 bp, Homo sapien
gagatgaaatagagtcatgcagctt

SEQ ID NO: 5621240 - DNA, 25 bp, Homo sapien
gttaagatgtaatcatagcatgcac

SEQ ID NO: 5621241 - DNA, 25 bp, Homo sapien
ggacagcactaggaaatgtatgtgt

SEQ ID NO: 5621242 - DNA, 25 bp, Homo sapien
gtccagcagtatgtatgttttgaat

SEQ ID NO: 5621243 - DNA, 25 bp, Homo sapien
attgttcctggggtatcactgcttc

SEQ ID NO: 5621244 - DNA, 25 bp, Homo sapien
aaaggatataggaatctgaaggagt

SEQ ID NO: 5621245 - DNA, 25 bp, Homo sapien
tagggactgggtattctcattgttc

SEQ ID NO: 5621246 - DNA, 25 bp, Homo sapien
tagtcctcagtggacagcactagga

SEQ ID NO: 5621247 - DNA, 25 bp, Homo sapien
acctctatgatctagggactgggta

SEQ ID NO: 5621248 - DNA, 25 bp, Homo sapien
catggtttctgagtacaaagattct

SEQ ID NO: 5621249 - DNA, 25 bp, Homo sapien
gaatctgaaggagtgcagcttcttc

SEQ ID NO: 5621250 - DNA, 25 bp, Homo sapien
tcttagaatcacccatttggttcct

SEQ ID NO: 5621251 - DNA, 25 bp, Homo sapien
cactgatagaagattaaaaacataa

SEQ ID NO: 5621252 - DNA, 25 bp, Homo sapien
ttaatgactcacaaatacaagaata

SEQ ID NO: 5621253 - DNA, 25 bp, Homo sapien
atatagatcatatgctaggccatcc

SEQ ID NO: 5621254 - DNA, 25 bp, Homo sapien
aatacaagaatatagaaagaattac

SEQ ID NO: 5621255 - DNA, 25 bp, Homo sapien
attactagtactaccagggagtgtt

SEQ ID NO: 5621256 - DNA, 25 bp, Homo sapien
tactaccagggagtgttcatagaga

SEQ ID NO: 5621257 - DNA, 25 bp, Homo sapien
aaagaaaaattgaatgcacctacat

SEQ ID NO: 5621258 - DNA, 25 bp, Homo sapien
ttttagagttgtattgaccaaatat

SEQ ID NO: 5621259 - DNA, 25 bp, Homo sapien
ttactcttaggatgacaatgataaa

SEQ ID NO: 5621260 - DNA, 25 bp, Homo sapien
ctgctgctttacaattaaggcaatg

SEQ ID NO: 5621261 - DNA, 25 bp, Homo sapien
ccacagaataatgtagccagcctgc

SEQ ID NO: 5621262 - DNA, 25 bp, Homo sapien
gagtaggaagatatgtttgtgtaac

SEQ ID NO: 5621263 - DNA, 25 bp, Homo sapien
cttgcacatcaagaccccaagagcc

SEQ ID NO: 5621264 - DNA, 25 bp, Homo sapien
tgaagatgaattaaagagcaagcac

SEQ ID NO: 5621265 - DNA, 25 bp, Homo sapien
gcaacagtaaattataaaccaaggc

SEQ ID NO: 5621266 - DNA, 25 bp, Homo sapien
ggacaggagcaccccatttgtaaga

SEQ ID NO: 5621267 - DNA, 25 bp, Homo sapien
cttgccattcacaccatagggctgg

SEQ ID NO: 5621268 - DNA, 25 bp, Homo sapien
tgaaattcttagggcaacagtaaat

SEQ ID NO: 5621269 - DNA, 25 bp, Homo sapien
tctgccagccaaggctgcatcctgg

SEQ ID NO: 5621270 - DNA, 25 bp, Homo sapien
ggctgcatcctggagttcggccagc

SEQ ID NO: 5621271 - DNA, 25 bp, Homo sapien
tttgtaagaggttgaccacagaata

SEQ ID NO: 5621272 - DNA, 25 bp, Homo sapien
gattggacacctctgctttaattct

SEQ ID NO: 5621273 - DNA, 25 bp, Homo sapien
atgttaagagttactgtacagctac

SEQ ID NO: 5621274 - DNA, 25 bp, Homo sapien
caatgattttgaaagaccctctgaa

SEQ ID NO: 5621275 - DNA, 25 bp, Homo sapien
gagttactgtacagctactagagtc

SEQ ID NO: 5621276 - DNA, 25 bp, Homo sapien
attgcaaacttggaacctgttcaat

SEQ ID NO: 5621277 - DNA, 25 bp, Homo sapien
attgccctatatgatgttaagagtt

SEQ ID NO: 5621278 - DNA, 25 bp, Homo sapien
ataatgaaaactatacacagaccat

SEQ ID NO: 5621279 - DNA, 25 bp, Homo sapien
tctgtggtggtagatatataatgaa

SEQ ID NO: 5621280 - DNA, 25 bp, Homo sapien
aaaattatggcaggtttgtttgtag

SEQ ID NO: 5621281 - DNA, 25 bp, Homo sapien
tgaatttttatggaaaggcaaggga

SEQ ID NO: 5621282 - DNA, 25 bp, Homo sapien
gaaagaccctctgaatggggcagtg

SEQ ID NO: 5621283 - DNA, 25 bp, Homo sapien
ggattaaaatccagagaccagaaat

SEQ ID NO: 5621284 - DNA, 25 bp, Homo sapien
agtctgacactaataggtagaaatt

SEQ ID NO: 5621285 - DNA, 25 bp, Homo sapien
agtgataatatcttgggtaacatcc

SEQ ID NO: 5621286 - DNA, 25 bp, Homo sapien
ttagcacgtgtagactcttgtaacc

SEQ ID NO: 5621287 - DNA, 25 bp, Homo sapien
caaaggagattatgaagctctgcac

SEQ ID NO: 5621288 - DNA, 25 bp, Homo sapien
agttccatctcagaaggaaggaaag

SEQ ID NO: 5621289 - DNA, 25 bp, Homo sapien
agaaatttaaccaaaggagattatg

SEQ ID NO: 5621290 - DNA, 25 bp, Homo sapien
agttacagaactacactaccaaggt

SEQ ID NO: 5621291 - DNA, 25 bp, Homo sapien
actgaaccagaatatagtctgacac

SEQ ID NO: 5621292 - DNA, 25 bp, Homo sapien
taatgcacagaaagtttccctggac

SEQ ID NO: 5621293 - DNA, 25 bp, Homo sapien
ggtgcattcctcagagttgtcagat

SEQ ID NO: 5621294 - DNA, 25 bp, Homo sapien
acccaggtgcatctactgcgaagga

SEQ ID NO: 5621295 - DNA, 25 bp, Homo sapien
cagatccacataaggacaaagcatc

SEQ ID NO: 5621296 - DNA, 25 bp, Homo sapien
agagttggatttatcacccaggtgc

SEQ ID NO: 5621297 - DNA, 25 bp, Homo sapien
caacccaaaaatgtgtgaaggagca

SEQ ID NO: 5621298 - DNA, 25 bp, Homo sapien
atgtgtgaaggagcacacgtttttc

SEQ ID NO: 5621299 - DNA, 25 bp, Homo sapien
ggaaatgaatgtaaggaagtacaac

SEQ ID NO: 5621300 - DNA, 25 bp, Homo sapien
tgccaccttgtggtcagagttggat

SEQ ID NO: 5621301 - DNA, 25 bp, Homo sapien
agctgtctctcctaaggatagcccc

SEQ ID NO: 5621302 - DNA, 25 bp, Homo sapien
tgcaaaatatcagacatcaacccaa

SEQ ID NO: 5621303 - DNA, 25 bp, Homo sapien
ggtgacaccctccacacgtgattca

SEQ ID NO: 5621304 - DNA, 25 bp, Homo sapien
aggatagccccaactgcctgcattc

SEQ ID NO: 5621305 - DNA, 25 bp, Homo sapien
ctgtcagcggccctctttggtattc

SEQ ID NO: 5621306 - DNA, 25 bp, Homo sapien
gaagtgtactcctagacctgtcagc

SEQ ID NO: 5621307 - DNA, 25 bp, Homo sapien
gaagcatgatgtagtgaagcctctc

SEQ ID NO: 5621308 - DNA, 25 bp, Homo sapien
gtcagaggaaaagcatccaagtatc

SEQ ID NO: 5621309 - DNA, 25 bp, Homo sapien
atttctgcagatgtcaagttgtgtt

SEQ ID NO: 5621310 - DNA, 25 bp, Homo sapien
gagcaaagcaggagtctgactgctc

SEQ ID NO: 5621311 - DNA, 25 bp, Homo sapien
tggtgagttgcaggtaaaatttgaa

SEQ ID NO: 5621312 - DNA, 25 bp, Homo sapien
atgaaactggcagcccggattcttt

SEQ ID NO: 5621313 - DNA, 25 bp, Homo sapien
caaggccacagaattggtgagttgc

SEQ ID NO: 5621314 - DNA, 25 bp, Homo sapien
aattgctgaaccaaggccacagaat

SEQ ID NO: 5621315 - DNA, 25 bp, Homo sapien
gagatgttgtaaaagagttccccca

SEQ ID NO: 5621316 - DNA, 25 bp, Homo sapien
tgaaaaaggcccaaattgcagtgtg

SEQ ID NO: 5621317 - DNA, 25 bp, Homo sapien
caacagccctgagtttgagaccttc

SEQ ID NO: 5621318 - DNA, 25 bp, Homo sapien
tgcagtgtgaataaccaactaggtc

SEQ ID NO: 5621319 - DNA, 25 bp, Homo sapien
caaaaccagaaagtaacggcaagta

SEQ ID NO: 5621320 - DNA, 25 bp, Homo sapien
ttgcatcttagtaaggccagggaag

SEQ ID NO: 5621321 - DNA, 25 bp, Homo sapien
tattaaaaagagacagtgacaaatg

SEQ ID NO: 5621322 - DNA, 25 bp, Homo sapien
ctagcacgctgatgtcaacagccct

SEQ ID NO: 5621323 - DNA, 25 bp, Homo sapien
aaaacaaagcgctatcagtacattc

SEQ ID NO: 5621324 - DNA, 25 bp, Homo sapien
aggtctggctattctgggttagttc

SEQ ID NO: 5621325 - DNA, 25 bp, Homo sapien
acatggaaaaccagtagcacttgcc

SEQ ID NO: 5621326 - DNA, 25 bp, Homo sapien
caagttagttattgctgggtcccac

SEQ ID NO: 5621327 - DNA, 25 bp, Homo sapien
tgtacccatgatctgatagaaccct

SEQ ID NO: 5621328 - DNA, 25 bp, Homo sapien
tacacatgatgaaaccagcacagga

SEQ ID NO: 5621329 - DNA, 25 bp, Homo sapien
gctcaggaattggagcatctggcac

SEQ ID NO: 5621330 - DNA, 25 bp, Homo sapien
taggtcaagccctgtgctaagtact

SEQ ID NO: 5621331 - DNA, 25 bp, Homo sapien
ggcaaacattcaaccataggcttcc

SEQ ID NO: 5621332 - DNA, 25 bp, Homo sapien
aggatagcatggggcttgatttgtt

SEQ ID NO: 5621333 - DNA, 25 bp, Homo sapien
atttgagagcttataggtcaagccc

SEQ ID NO: 5621334 - DNA, 25 bp, Homo sapien
accagcacaggaaatcagataactt

SEQ ID NO: 5621335 - DNA, 25 bp, Homo sapien
attcagcagctggattacataatac

SEQ ID NO: 5621336 - DNA, 25 bp, Homo sapien
gcctgctcttggccaccacgcggtg

SEQ ID NO: 5621337 - DNA, 25 bp, Homo sapien
gggaaattgcacatggcaaacattc

SEQ ID NO: 5621338 - DNA, 25 bp, Homo sapien
gaaacacaacagtctattaaaaatg

SEQ ID NO: 5621339 - DNA, 25 bp, Homo sapien
ctggaaggccttttaagggatctag

SEQ ID NO: 5621340 - DNA, 25 bp, Homo sapien
taaaaatgtacgctcatagtaattc

SEQ ID NO: 5621341 - DNA, 25 bp, Homo sapien
agtctcggggttttccagcctccat

SEQ ID NO: 5621342 - DNA, 25 bp, Homo sapien
gccagggtcaaggctcattccgtgg

SEQ ID NO: 5621343 - DNA, 25 bp, Homo sapien
ttcatccagaagttggttgttgctg

SEQ ID NO: 5621344 - DNA, 25 bp, Homo sapien
tccagcctccatccgagtccggctt

SEQ ID NO: 5621345 - DNA, 25 bp, Homo sapien
cagcctgtgaccagcaaggtctggg

SEQ ID NO: 5621346 - DNA, 25 bp, Homo sapien
aagggatctagtacatcatattgcc

SEQ ID NO: 5621347 - DNA, 25 bp, Homo sapien
catccgagtccggctttgatgcctt

SEQ ID NO: 5621348 - DNA, 25 bp, Homo sapien
atcatattgccagcagggctcagcc

SEQ ID NO: 5621349 - DNA, 25 bp, Homo sapien
cccgacagcgacacctcgtctctct

SEQ ID NO: 5621350 - DNA, 25 bp, Homo sapien
cgcgcctcttgggatcctgacttgc

SEQ ID NO: 5621351 - DNA, 25 bp, Homo sapien
ctcatttactgcgaggcattgggga

SEQ ID NO: 5621352 - DNA, 25 bp, Homo sapien
ctcactgcagaagcaaccgatagct

SEQ ID NO: 5621353 - DNA, 25 bp, Homo sapien
gctgtccccaggatgcccttaattc

SEQ ID NO: 5621354 - DNA, 25 bp, Homo sapien
cgcaggcgccaggcgtcctcattta

SEQ ID NO: 5621355 - DNA, 25 bp, Homo sapien
aggcattggggagtctacttttctc

SEQ ID NO: 5621356 - DNA, 25 bp, Homo sapien
aggagagataagctcgtctgacctc

SEQ ID NO: 5621357 - DNA, 25 bp, Homo sapien
tgacctcagttgacctcgccgcagg

SEQ ID NO: 5621358 - DNA, 25 bp, Homo sapien
gctgagcttgcctcactgcagaagc

SEQ ID NO: 5621359 - DNA, 25 bp, Homo sapien
cccttaattcccgggacaggagaga

SEQ ID NO: 5621360 - DNA, 25 bp, Homo sapien
gacatgctgataggtcttaatacat

SEQ ID NO: 5621361 - DNA, 25 bp, Homo sapien
gaaggaaggattcagtgcaaattaa

SEQ ID NO: 5621362 - DNA, 25 bp, Homo sapien
aatttcatatgaagactctagaagt

SEQ ID NO: 5621363 - DNA, 25 bp, Homo sapien
aatggtacagagaacatcatgttta

SEQ ID NO: 5621364 - DNA, 25 bp, Homo sapien
gtcatctttcagaaggaaggattca

SEQ ID NO: 5621365 - DNA, 25 bp, Homo sapien
tctagaactggaaacacttggttcc

SEQ ID NO: 5621366 - DNA, 25 bp, Homo sapien
accctatgaaagcccaactgtaaat

SEQ ID NO: 5621367 - DNA, 25 bp, Homo sapien
tggggagaatatgtcttgaaaatgt

SEQ ID NO: 5621368 - DNA, 25 bp, Homo sapien
aacagaatttgcttggggagaatat

SEQ ID NO: 5621369 - DNA, 25 bp, Homo sapien
aatgttaaatggtacagagaacatc

SEQ ID NO: 5621370 - DNA, 25 bp, Homo sapien
agtaaacttctagaactggaaacac

SEQ ID NO: 5621371 - DNA, 25 bp, Homo sapien
gtggtaatgcaggaatcagctgaga

SEQ ID NO: 5621372 - DNA, 25 bp, Homo sapien
atgatgaggatggcaaacccttcaa

SEQ ID NO: 5621373 - DNA, 25 bp, Homo sapien
gaatttgtggacagttgcaggctta

SEQ ID NO: 5621374 - DNA, 25 bp, Homo sapien
taaacagtgtcactcggcggaactg

SEQ ID NO: 5621375 - DNA, 25 bp, Homo sapien
tttgcttttggggcatgagcgaatt

SEQ ID NO: 5621376 - DNA, 25 bp, Homo sapien
tccctactagtggtgatgaatacag

SEQ ID NO: 5621377 - DNA, 25 bp, Homo sapien
gacagcggtcagctcttacggtcca

SEQ ID NO: 5621378 - DNA, 25 bp, Homo sapien
aagatatcagtggtaatgcaggaat

SEQ ID NO: 5621379 - DNA, 25 bp, Homo sapien
agcgaattctcacaagagcaaagtc

SEQ ID NO: 5621380 - DNA, 25 bp, Homo sapien
ttcaagatcagaatgcgcaaacaag

SEQ ID NO: 5621381 - DNA, 25 bp, Homo sapien
ccttttgagtgtaaggtctgtgggc

SEQ ID NO: 5621382 - DNA, 25 bp, Homo sapien
ggtgaggataagagtacaacttcca

SEQ ID NO: 5621383 - DNA, 25 bp, Homo sapien
ctaagaagagctgttgattttcagt

SEQ ID NO: 5621384 - DNA, 25 bp, Homo sapien
ggaaaccacaagatctcaaaactat

SEQ ID NO: 5621385 - DNA, 25 bp, Homo sapien
ttcagatctaggcctgcagaggtta

SEQ ID NO: 5621386 - DNA, 25 bp, Homo sapien
ttgctggctctagctgcggcttcta

SEQ ID NO: 5621387 - DNA, 25 bp, Homo sapien
aaacgtaaaatatagcactttggga

SEQ ID NO: 5621388 - DNA, 25 bp, Homo sapien
gcctgcagaggttaaaagatttttc

SEQ ID NO: 5621389 - DNA, 25 bp, Homo sapien
atttgtctgttctggttttgggggc

SEQ ID NO: 5621390 - DNA, 25 bp, Homo sapien
ctttacatgttggatgggaaaccac

SEQ ID NO: 5621391 - DNA, 25 bp, Homo sapien
tagctgcggcttctactcagtaatc

SEQ ID NO: 5621392 - DNA, 25 bp, Homo sapien
gggcagtggtctgtcccgtgtcttc

SEQ ID NO: 5621393 - DNA, 25 bp, Homo sapien
aaatgtagcaggaaaggcaatataa

SEQ ID NO: 5621394 - DNA, 25 bp, Homo sapien
aagacaatgcttttgatcagcagac

SEQ ID NO: 5621395 - DNA, 25 bp, Homo sapien
caggaaataaaacaatgattcgggt

SEQ ID NO: 5621396 - DNA, 25 bp, Homo sapien
aaaaaccaaatgtagcaggaaaggc

SEQ ID NO: 5621397 - DNA, 25 bp, Homo sapien
tacacagggccaaatcacattatat

SEQ ID NO: 5621398 - DNA, 25 bp, Homo sapien
tactgatatactagcccctgtcccc

SEQ ID NO: 5621399 - DNA, 25 bp, Homo sapien
gtaaatgctaaaaccagttctcaaa

SEQ ID NO: 5621400 - DNA, 25 bp, Homo sapien
tacactcactacacccactctaccc

SEQ ID NO: 5621401 - DNA, 25 bp, Homo sapien
agtgaactttatacagaaaaggaat

SEQ ID NO: 5621402 - DNA, 25 bp, Homo sapien
ggaaaggcaatataaagctattaat

SEQ ID NO: 5621403 - DNA, 25 bp, Homo sapien
atatcataatacacagggccaaatc

SEQ ID NO: 5621404 - DNA, 25 bp, Homo sapien
ataagatatttaggaacgtgcacat

SEQ ID NO: 5621405 - DNA, 25 bp, Homo sapien
tggattaacaagtaggagtgttgaa

SEQ ID NO: 5621406 - DNA, 25 bp, Homo sapien
ataggtctgataaaggggcagataa

SEQ ID NO: 5621407 - DNA, 25 bp, Homo sapien
agttttttcacggtgtgcggagtag

SEQ ID NO: 5621408 - DNA, 25 bp, Homo sapien
gaggagatgcaaataggtctgataa

SEQ ID NO: 5621409 - DNA, 25 bp, Homo sapien
tgacagtcaattgcagatttctggt

SEQ ID NO: 5621410 - DNA, 25 bp, Homo sapien
acttttgaaaggcatggtagaatac

SEQ ID NO: 5621411 - DNA, 25 bp, Homo sapien
tcctctgcaaagcataggccacatc

SEQ ID NO: 5621412 - DNA, 25 bp, Homo sapien
aaaggggcagataaaaatgaatgcc

SEQ ID NO: 5621413 - DNA, 25 bp, Homo sapien
aaggcatggtagaatacagactttt

SEQ ID NO: 5621414 - DNA, 25 bp, Homo sapien
ttaggaacgtgcacatccatgttag

SEQ ID NO: 5621415 - DNA, 25 bp, Homo sapien
cattcagagaatcaagaaaaagcat

SEQ ID NO: 5621416 - DNA, 25 bp, Homo sapien
tctagtggaagacaaacagttaaaa

SEQ ID NO: 5621417 - DNA, 25 bp, Homo sapien
gactaggatcagatgaaactgggca

SEQ ID NO: 5621418 - DNA, 25 bp, Homo sapien
tggaaattcagtcttcaaggagctt

SEQ ID NO: 5621419 - DNA, 25 bp, Homo sapien
cttagctaaagaagcactactatac

SEQ ID NO: 5621420 - DNA, 25 bp, Homo sapien
caaacagttaaaatcccatatggta

SEQ ID NO: 5621421 - DNA, 25 bp, Homo sapien
agcactactatacattcagagaatc

SEQ ID NO: 5621422 - DNA, 25 bp, Homo sapien
caaggagcttattgtctagtggaag

SEQ ID NO: 5621423 - DNA, 25 bp, Homo sapien
taggttttgactaggatcagatgaa

SEQ ID NO: 5621424 - DNA, 25 bp, Homo sapien
cagtaattcacttcacaaacatgca

SEQ ID NO: 5621425 - DNA, 25 bp, Homo sapien
gggatttaggttttgactaggatca

SEQ ID NO: 5621426 - DNA, 25 bp, Homo sapien
agtgatggcacttactctcccaacc

SEQ ID NO: 5621427 - DNA, 25 bp, Homo sapien
tggggacaagagtgctctccttccc

SEQ ID NO: 5621428 - DNA, 25 bp, Homo sapien
ggacttttaaattagtgatggcact

SEQ ID NO: 5621429 - DNA, 25 bp, Homo sapien
ttctggcaccaatctctgcagccca

SEQ ID NO: 5621430 - DNA, 25 bp, Homo sapien
cccaaacccaccctcttctggcacc

SEQ ID NO: 5621431 - DNA, 25 bp, Homo sapien
ctaaccccacttggtccccacagga

SEQ ID NO: 5621432 - DNA, 25 bp, Homo sapien
tggaggagctccaattcccaaaccc

SEQ ID NO: 5621433 - DNA, 25 bp, Homo sapien
ccttccccactgagccattcctaac

SEQ ID NO: 5621434 - DNA, 25 bp, Homo sapien
tcccaaccagcagccactacagctg

SEQ ID NO: 5621435 - DNA, 25 bp, Homo sapien
agcactcaatcttaggaggagctcc

SEQ ID NO: 5621436 - DNA, 25 bp, Homo sapien
cccactgagccattcctaaccccac

SEQ ID NO: 5621437 - DNA, 25 bp, Homo sapien
catttggcacctagtcacaagttgc

SEQ ID NO: 5621438 - DNA, 25 bp, Homo sapien
tgctcttctgcccatcccacacatt

SEQ ID NO: 5621439 - DNA, 25 bp, Homo sapien
accaaaggccaaactccacagcttt

SEQ ID NO: 5621440 - DNA, 25 bp, Homo sapien
ttcacatgaggaaaatttacccatc

SEQ ID NO: 5621441 - DNA, 25 bp, Homo sapien
ctgaagtctaccagcatgacattcc

SEQ ID NO: 5621442 - DNA, 25 bp, Homo sapien
tgtacaactgaagctcagcagacct

SEQ ID NO: 5621443 - DNA, 25 bp, Homo sapien
tcatctccagcctgcagcaccccag

SEQ ID NO: 5621444 - DNA, 25 bp, Homo sapien
caccaaacttgcctgacccttcctc

SEQ ID NO: 5621445 - DNA, 25 bp, Homo sapien
ttctacgctgagttaaaattcttcc

SEQ ID NO: 5621446 - DNA, 25 bp, Homo sapien
gcaccccaggcagtacaccttcaca

SEQ ID NO: 5621447 - DNA, 25 bp, Homo sapien
tagccagttgctgtgttcaccaaac

SEQ ID NO: 5621448 - DNA, 25 bp, Homo sapien
gttactttcaaattagcagtcactc

SEQ ID NO: 5621449 - DNA, 25 bp, Homo sapien
tagcagtcactcaatgcaagaactt

SEQ ID NO: 5621450 - DNA, 25 bp, Homo sapien
cttttgattaaagacaagtggaaac

SEQ ID NO: 5621451 - DNA, 25 bp, Homo sapien
ctctttttaaaaggattgctaatcc

SEQ ID NO: 5621452 - DNA, 25 bp, Homo sapien
tcaatactaagaaacaacaagtgtt

SEQ ID NO: 5621453 - DNA, 25 bp, Homo sapien
ggactgtgtatggatgaaaattttc

SEQ ID NO: 5621454 - DNA, 25 bp, Homo sapien
actcaatgcaagaacttatcaagtt

SEQ ID NO: 5621455 - DNA, 25 bp, Homo sapien
aaagacaagtggaaactttatactc

SEQ ID NO: 5621456 - DNA, 25 bp, Homo sapien
acaacaagtgttccagaaaggaaat

SEQ ID NO: 5621457 - DNA, 25 bp, Homo sapien
cttaagatctcatcagcccctttct

SEQ ID NO: 5621458 - DNA, 25 bp, Homo sapien
atgctagcttcctcatgaataacat

SEQ ID NO: 5621459 - DNA, 25 bp, Homo sapien
aatcactagagagatcaccaggtag

SEQ ID NO: 5621460 - DNA, 25 bp, Homo sapien
catcacataaaactggggattccag

SEQ ID NO: 5621461 - DNA, 25 bp, Homo sapien
actgtacccggcccatgttgataac

SEQ ID NO: 5621462 - DNA, 25 bp, Homo sapien
gtcacttagtgaatgaggctcaaga

SEQ ID NO: 5621463 - DNA, 25 bp, Homo sapien
ggcacattacaaggtcagagaaagc

SEQ ID NO: 5621464 - DNA, 25 bp, Homo sapien
ctggtctcaaagtctgccaggatta

SEQ ID NO: 5621465 - DNA, 25 bp, Homo sapien
aaagctgtcagtaaaaatatgtgtg

SEQ ID NO: 5621466 - DNA, 25 bp, Homo sapien
gctcaagagagcaatagagactgag

SEQ ID NO: 5621467 - DNA, 25 bp, Homo sapien
tcctatgctaattaagagtgctctc

SEQ ID NO: 5621468 - DNA, 25 bp, Homo sapien
tggaagggcctcaaaatgccttaca

SEQ ID NO: 5621469 - DNA, 25 bp, Homo sapien
ccaggtagaatgtcagcacagctat

SEQ ID NO: 5621470 - DNA, 25 bp, Homo sapien
gtaagtagctggctcaaagccctcc

SEQ ID NO: 5621471 - DNA, 25 bp, Homo sapien
aggattgagccctgatggttggata

SEQ ID NO: 5621472 - DNA, 25 bp, Homo sapien
cctacaactgcagcgtgggctattt

SEQ ID NO: 5621473 - DNA, 25 bp, Homo sapien
aggaatagctaccaattatgagcac

SEQ ID NO: 5621474 - DNA, 25 bp, Homo sapien
gtactatgtttggaaggaaagttga

SEQ ID NO: 5621475 - DNA, 25 bp, Homo sapien
gccggatggttagctttgcagatac

SEQ ID NO: 5621476 - DNA, 25 bp, Homo sapien
tgcactgggtggcttatgaacttta

SEQ ID NO: 5621477 - DNA, 25 bp, Homo sapien
tggttggatactagccatctggggg

SEQ ID NO: 5621478 - DNA, 25 bp, Homo sapien
tttgcagataccaggccagtgagaa

SEQ ID NO: 5621479 - DNA, 25 bp, Homo sapien
ggacatgatgtgtaagtagctggct

SEQ ID NO: 5621480 - DNA, 25 bp, Homo sapien
gagagactgaggagtactatgtttg

SEQ ID NO: 5621481 - DNA, 25 bp, Homo sapien
agagattttctagggtcaggaggaa

SEQ ID NO: 5621482 - DNA, 25 bp, Homo sapien
ggaggaaggacttgcattttcctgg

SEQ ID NO: 5621483 - DNA, 25 bp, Homo sapien
gaatcctagaggtagagctcctgga

SEQ ID NO: 5621484 - DNA, 25 bp, Homo sapien
caggaaaaacctcccatttgttggc

SEQ ID NO: 5621485 - DNA, 25 bp, Homo sapien
tggtgagatgtttggaagaatccta

SEQ ID NO: 5621486 - DNA, 25 bp, Homo sapien
ggcagatgactacagaggtatcaga

SEQ ID NO: 5621487 - DNA, 25 bp, Homo sapien
agatgactacagaggtatcagagga

SEQ ID NO: 5621488 - DNA, 25 bp, Homo sapien
ccatttgttggctggtttgttaccc

SEQ ID NO: 5621489 - DNA, 25 bp, Homo sapien
atcatgcactcaggaaaaacctccc

SEQ ID NO: 5621490 - DNA, 25 bp, Homo sapien
gtttggaagaatcctagaggtagag

SEQ ID NO: 5621491 - DNA, 25 bp, Homo sapien
gttttcccaggcctgaagttggcag

SEQ ID NO: 5621492 - DNA, 25 bp, Homo sapien
taggaagtggtatttctactcccaa

SEQ ID NO: 5621493 - DNA, 25 bp, Homo sapien
atttatagataagaaaacagaggct

SEQ ID NO: 5621494 - DNA, 25 bp, Homo sapien
tcagccttccgaagtgctagcgtca

SEQ ID NO: 5621495 - DNA, 25 bp, Homo sapien
aacagactttaggaagtggtatttc

SEQ ID NO: 5621496 - DNA, 25 bp, Homo sapien
ggcgtctggccattatctgtatatt

SEQ ID NO: 5621497 - DNA, 25 bp, Homo sapien
cgaagtgctagcgtcacaggtttta

SEQ ID NO: 5621498 - DNA, 25 bp, Homo sapien
gcagtggagcaattctcaaggagtt

SEQ ID NO: 5621499 - DNA, 25 bp, Homo sapien
cataccaaaaaaccagtctcacagt

SEQ ID NO: 5621500 - DNA, 25 bp, Homo sapien
cgtcacaggttttagccatggcgtc

SEQ ID NO: 5621501 - DNA, 25 bp, Homo sapien
ctatgcctggatagagaatttgaga

SEQ ID NO: 5621502 - DNA, 25 bp, Homo sapien
atattaatcaagaaatctaggtatt

SEQ ID NO: 5621503 - DNA, 25 bp, Homo sapien
agtcaaccagtaaatcctgaggagg

SEQ ID NO: 5621504 - DNA, 25 bp, Homo sapien
cctcctcaggatttactggttgact

SEQ ID NO: 5621505 - DNA, 25 bp, Homo sapien
tctagagagataaatggatatatgc

SEQ ID NO: 5621506 - DNA, 25 bp, Homo sapien
tctcaaaagggtagctgcagcttta

SEQ ID NO: 5621507 - DNA, 25 bp, Homo sapien
gtactggtaggaacaagatcaaatt

SEQ ID NO: 5621508 - DNA, 25 bp, Homo sapien
gggacaacaaaacatgctaggacta

SEQ ID NO: 5621509 - DNA, 25 bp, Homo sapien
tgaaccaaatcagaaggcagaatgc

SEQ ID NO: 5621510 - DNA, 25 bp, Homo sapien
tagcaagggcaaggatccttaaaca

SEQ ID NO: 5621511 - DNA, 25 bp, Homo sapien
ttgggtaaatgcctaagagtgaaac

SEQ ID NO: 5621512 - DNA, 25 bp, Homo sapien
cccttccaagaacacagtgcagggt

SEQ ID NO: 5621513 - DNA, 25 bp, Homo sapien
aaattgtgtaattgaggaaagttta

SEQ ID NO: 5621514 - DNA, 25 bp, Homo sapien
aggcacaaacagggagctattactt

SEQ ID NO: 5621515 - DNA, 25 bp, Homo sapien
gagagggctaagatctagatctaga

SEQ ID NO: 5621516 - DNA, 25 bp, Homo sapien
agaaggagttttcaccagggcttta

SEQ ID NO: 5621517 - DNA, 25 bp, Homo sapien
cagtgttaaacgcatgtaaggattg

SEQ ID NO: 5621518 - DNA, 25 bp, Homo sapien
agtttgtaaatgtgcacagtgttaa

SEQ ID NO: 5621519 - DNA, 25 bp, Homo sapien
ttgctactcgtaagttaggattctt

SEQ ID NO: 5621520 - DNA, 25 bp, Homo sapien
tgatggactcttgtaaatggaatta

SEQ ID NO: 5621521 - DNA, 25 bp, Homo sapien
acagaaatcaactcaaggtggcttc

SEQ ID NO: 5621522 - DNA, 25 bp, Homo sapien
ggtggcttcagcaaaacaatgggcc

SEQ ID NO: 5621523 - DNA, 25 bp, Homo sapien
gtagtgcttgcttgtagcagacatt

SEQ ID NO: 5621524 - DNA, 25 bp, Homo sapien
taggattcttgtggttgcaaggaac

SEQ ID NO: 5621525 - DNA, 25 bp, Homo sapien
acaatgggccaaatacattggttgg

SEQ ID NO: 5621526 - DNA, 25 bp, Homo sapien
attagttgttggatgactgcttcaa

SEQ ID NO: 5621527 - DNA, 25 bp, Homo sapien
aacgagaccctcgttagcttcacat

SEQ ID NO: 5621528 - DNA, 25 bp, Homo sapien
atgtgaagctaacgagggtctcgtt

SEQ ID NO: 5621529 - DNA, 25 bp, Homo sapien
gccggctttcactggcacagaagtt

SEQ ID NO: 5621530 - DNA, 25 bp, Homo sapien
aatgctgggacttttcatgaacttt

SEQ ID NO: 5621531 - DNA, 25 bp, Homo sapien
ctatgagtttttagggtgaagaaaa

SEQ ID NO: 5621532 - DNA, 25 bp, Homo sapien
tgaagaaaatttgttgataaaccat

SEQ ID NO: 5621533 - DNA, 25 bp, Homo sapien
tcgaggcaagctgtcaacgtcttgt

SEQ ID NO: 5621534 - DNA, 25 bp, Homo sapien
ttgataaaccatggcaactgcaaga

SEQ ID NO: 5621535 - DNA, 25 bp, Homo sapien
aattttaaggacgtcaaaggctctc

SEQ ID NO: 5621536 - DNA, 25 bp, Homo sapien
gcaagaattggaaaaatgctgggac

SEQ ID NO: 5621537 - DNA, 25 bp, Homo sapien
gaaaacctgatgtcaagaggtgggc

SEQ ID NO: 5621538 - DNA, 25 bp, Homo sapien
ggcacagaagtttaagactatgagt

SEQ ID NO: 5621539 - DNA, 25 bp, Homo sapien
tagaaatatgtaggtaaggtttatc

SEQ ID NO: 5621540 - DNA, 25 bp, Homo sapien
atgtagtagcagcattatcaaatag

SEQ ID NO: 5621541 - DNA, 25 bp, Homo sapien
catctatgtaagaaaaggcaaggag

SEQ ID NO: 5621542 - DNA, 25 bp, Homo sapien
aacagcatgatcctgaattccatat

SEQ ID NO: 5621543 - DNA, 25 bp, Homo sapien
cagagttatctcatgtagtagcagc

SEQ ID NO: 5621544 - DNA, 25 bp, Homo sapien
ggtaatgaaatgcacgtgcacgcac

SEQ ID NO: 5621545 - DNA, 25 bp, Homo sapien
tcccgtcaataataagaactataaa

SEQ ID NO: 5621546 - DNA, 25 bp, Homo sapien
aaagtaaacagtacataatggaatt

SEQ ID NO: 5621547 - DNA, 25 bp, Homo sapien
aagcaacacgcttctagaaagccat

SEQ ID NO: 5621548 - DNA, 25 bp, Homo sapien
agaaaaggcaaggagctatatacta

SEQ ID NO: 5621549 - DNA, 25 bp, Homo sapien
tgtctacatggtaatgaaatgcacg

SEQ ID NO: 5621550 - DNA, 25 bp, Homo sapien
agataccgcaacaaggtaaaaacat

SEQ ID NO: 5621551 - DNA, 25 bp, Homo sapien
gatgaagatttacaagatgatggac

SEQ ID NO: 5621552 - DNA, 25 bp, Homo sapien
aatttcgtatcagaaagagcctgga

SEQ ID NO: 5621553 - DNA, 25 bp, Homo sapien
ctgagaattgcaaaagtaacaggcg

SEQ ID NO: 5621554 - DNA, 25 bp, Homo sapien
ctgggtctatgcactgaagatgaag

SEQ ID NO: 5621555 - DNA, 25 bp, Homo sapien
tattggaacgactgagaattgcaaa

SEQ ID NO: 5621556 - DNA, 25 bp, Homo sapien
ttgaggtaatagtttgtggtcattc

SEQ ID NO: 5621557 - DNA, 25 bp, Homo sapien
tatgaaaaactaaggcctgtgtccc

SEQ ID NO: 5621558 - DNA, 25 bp, Homo sapien
gcctgtgtccccagcgcctagtaca

SEQ ID NO: 5621559 - DNA, 25 bp, Homo sapien
aggcagaggcaccatatcatttgtg

SEQ ID NO: 5621560 - DNA, 25 bp, Homo sapien
ttgtgcagtataaagaaggtcagta

SEQ ID NO: 5621561 - DNA, 25 bp, Homo sapien
acagccctaaaaacctgggtctatg

SEQ ID NO: 5621562 - DNA, 25 bp, Homo sapien
acctactcactgaaggaacagatgt

SEQ ID NO: 5621563 - DNA, 25 bp, Homo sapien
ctggacgtgggactcctctcattca

SEQ ID NO: 5621564 - DNA, 25 bp, Homo sapien
gtcgtcagagaccctgagagtctga

SEQ ID NO: 5621565 - DNA, 25 bp, Homo sapien
catgcttctgttaggacaggctggg

SEQ ID NO: 5621566 - DNA, 25 bp, Homo sapien
tgagtgcccttcttgggtgtgccat

SEQ ID NO: 5621567 - DNA, 25 bp, Homo sapien
gaagtgactgatctggacgtcgtca

SEQ ID NO: 5621568 - DNA, 25 bp, Homo sapien
ggaacagatgttgccagcaccgaat

SEQ ID NO: 5621569 - DNA, 25 bp, Homo sapien
agccccaccaaactgcctgagtgcc

SEQ ID NO: 5621570 - DNA, 25 bp, Homo sapien
tgagagtctgagtcactcacccctc

SEQ ID NO: 5621571 - DNA, 25 bp, Homo sapien
ttcacagtccatggcatgtgtagca

SEQ ID NO: 5621572 - DNA, 25 bp, Homo sapien
aggctgggccactgtacccctttca

SEQ ID NO: 5621573 - DNA, 25 bp, Homo sapien
gttattcattccagggcatatattc

SEQ ID NO: 5621574 - DNA, 25 bp, Homo sapien
ttgcaaaatatatctctggtcagtt

SEQ ID NO: 5621575 - DNA, 25 bp, Homo sapien
ctgctgacccataaaaatttgagtt

SEQ ID NO: 5621576 - DNA, 25 bp, Homo sapien
atcaagatagttatcaagtaagatc

SEQ ID NO: 5621577 - DNA, 25 bp, Homo sapien
tacacccagctaaaaatgctggtat

SEQ ID NO: 5621578 - DNA, 25 bp, Homo sapien
tgaaagccataaaccaggatctcat

SEQ ID NO: 5621579 - DNA, 25 bp, Homo sapien
tcagcctagattatggcaatagctt

SEQ ID NO: 5621580 - DNA, 25 bp, Homo sapien
acttggatatctcatgtcatgcgtc

SEQ ID NO: 5621581 - DNA, 25 bp, Homo sapien
catgcgtccaaaactgaaacttgtc

SEQ ID NO: 5621582 - DNA, 25 bp, Homo sapien
aatagcaagccataactgaaagcca

SEQ ID NO: 5621583 - DNA, 25 bp, Homo sapien
atgctggtattcttataggttgatt

SEQ ID NO: 5621584 - DNA, 25 bp, Homo sapien
cctcctttggaagcactgacttggc

SEQ ID NO: 5621585 - DNA, 25 bp, Homo sapien
acagtgatagttacaacaacacagc

SEQ ID NO: 5621586 - DNA, 25 bp, Homo sapien
tgaagtgaataaaagttacagtgat

SEQ ID NO: 5621587 - DNA, 25 bp, Homo sapien
cagcaatagggtatactgagaagga

SEQ ID NO: 5621588 - DNA, 25 bp, Homo sapien
acaacaatggaggaaaaactcagtg

SEQ ID NO: 5621589 - DNA, 25 bp, Homo sapien
tcccagttgctgccttggcgctgtc

SEQ ID NO: 5621590 - DNA, 25 bp, Homo sapien
agtcccagcaacccctcaattcagt

SEQ ID NO: 5621591 - DNA, 25 bp, Homo sapien
ttcctcacattgccaggagagggca

SEQ ID NO: 5621592 - DNA, 25 bp, Homo sapien
gagggagttgtctgtgcttaggaca

SEQ ID NO: 5621593 - DNA, 25 bp, Homo sapien
tagacagcatccacctccccaatcc

SEQ ID NO: 5621594 - DNA, 25 bp, Homo sapien
atcctgcacttgtgcaaggcaggga

SEQ ID NO: 5621595 - DNA, 25 bp, Homo sapien
gggacagagctctgcactgaagaca

SEQ ID NO: 5621596 - DNA, 25 bp, Homo sapien
tccaagtaaacaaataccatgggca

SEQ ID NO: 5621597 - DNA, 25 bp, Homo sapien
cagctgcagcctcagtcacccttgg

SEQ ID NO: 5621598 - DNA, 25 bp, Homo sapien
gcagcctcagtcacccttggaatcg

SEQ ID NO: 5621599 - DNA, 25 bp, Homo sapien
tttgccataccaatagctggtttta

SEQ ID NO: 5621600 - DNA, 25 bp, Homo sapien
gaggaccgatcaactgagccttgat

SEQ ID NO: 5621601 - DNA, 25 bp, Homo sapien
acaaataccatgggcagattcctat

SEQ ID NO: 5621602 - DNA, 25 bp, Homo sapien
cgggtggttgaattggctttgataa

SEQ ID NO: 5621603 - DNA, 25 bp, Homo sapien
cttaactgctctagattcagacagt

SEQ ID NO: 5621604 - DNA, 25 bp, Homo sapien
cagagctctgcactgaagacagcaa

SEQ ID NO: 5621605 - DNA, 25 bp, Homo sapien
tcctccaagtccgtcttaactgctc

SEQ ID NO: 5621606 - DNA, 25 bp, Homo sapien
gagctgtaatctagagcaaggagac

SEQ ID NO: 5621607 - DNA, 25 bp, Homo sapien
acttccggagactacacagagattc

SEQ ID NO: 5621608 - DNA, 25 bp, Homo sapien
gaggaagagataatttggcaaacca

SEQ ID NO: 5621609 - DNA, 25 bp, Homo sapien
gcaaggagacagacaactcccaaac

SEQ ID NO: 5621610 - DNA, 25 bp, Homo sapien
tgtgcagagataatgcagccctcac

SEQ ID NO: 5621611 - DNA, 25 bp, Homo sapien
tcctgaaagctgatgtgtgccatcc

SEQ ID NO: 5621612 - DNA, 25 bp, Homo sapien
acatcccatgagtgtggagctactt

SEQ ID NO: 5621613 - DNA, 25 bp, Homo sapien
tccataaagatcacagctgggccca

SEQ ID NO: 5621614 - DNA, 25 bp, Homo sapien
aaacctacagtcagctccaagagcc

SEQ ID NO: 5621615 - DNA, 25 bp, Homo sapien
acgctccagtgcattggagaggcat

SEQ ID NO: 5621616 - DNA, 25 bp, Homo sapien
cgggcatgcacgcttgtagatttca

SEQ ID NO: 5621617 - DNA, 25 bp, Homo sapien
catttcaggtaccccaacaaaagtc

SEQ ID NO: 5621618 - DNA, 25 bp, Homo sapien
ctaaagtaaatgactcgaaaaaaca

SEQ ID NO: 5621619 - DNA, 25 bp, Homo sapien
aacaaaagtccaggtagataacaat

SEQ ID NO: 5621620 - DNA, 25 bp, Homo sapien
ctcagtacactggcactagactcat

SEQ ID NO: 5621621 - DNA, 25 bp, Homo sapien
accaaaacaccgccatttcaggtac

SEQ ID NO: 5621622 - DNA, 25 bp, Homo sapien
cactggcactagactcatatcctcc

SEQ ID NO: 5621623 - DNA, 25 bp, Homo sapien
ccttaacgatatgcccttccccgaa

SEQ ID NO: 5621624 - DNA, 25 bp, Homo sapien
tattatgcttggtttactgactttc

SEQ ID NO: 5621625 - DNA, 25 bp, Homo sapien
ctccatgaaggaacttggaggattt

SEQ ID NO: 5621626 - DNA, 25 bp, Homo sapien
aatatgtttcaggaagcaagacttc

SEQ ID NO: 5621627 - DNA, 25 bp, Homo sapien
caattaccctacagggaagtctacc

SEQ ID NO: 5621628 - DNA, 25 bp, Homo sapien
ccttgaagcccgccatttcccaggg

SEQ ID NO: 5621629 - DNA, 25 bp, Homo sapien
caggagccctgatggccgtttcctg

SEQ ID NO: 5621630 - DNA, 25 bp, Homo sapien
tctgcagactcggaagacatggcag

SEQ ID NO: 5621631 - DNA, 25 bp, Homo sapien
atgagtctttacatatgcttgatac

SEQ ID NO: 5621632 - DNA, 25 bp, Homo sapien
agcccttgaagcccgccatttccca

SEQ ID NO: 5621633 - DNA, 25 bp, Homo sapien
aggggggagatttctccaaacagcc

SEQ ID NO: 5621634 - DNA, 25 bp, Homo sapien
tttggaaatcttggcttaataatta

SEQ ID NO: 5621635 - DNA, 25 bp, Homo sapien
cgccatttcccagggctccagggtc

SEQ ID NO: 5621636 - DNA, 25 bp, Homo sapien
gccctgatggccgtttcctggagcc

SEQ ID NO: 5621637 - DNA, 25 bp, Homo sapien
ggccgtttcctggagccaagagtgt

SEQ ID NO: 5621638 - DNA, 25 bp, Homo sapien
ctccagggtccccaccactccctac

SEQ ID NO: 5621639 - DNA, 25 bp, Homo sapien
tatattaattgaggaagggctccat

SEQ ID NO: 5621640 - DNA, 25 bp, Homo sapien
cttcccccatgcctagccctcaatt

SEQ ID NO: 5621641 - DNA, 25 bp, Homo sapien
ggatgatctcaatctgtgggtgcta

SEQ ID NO: 5621642 - DNA, 25 bp, Homo sapien
cccgttgcagcatcactgctgagtg

SEQ ID NO: 5621643 - DNA, 25 bp, Homo sapien
tccctttccaagacagcaagaatac

SEQ ID NO: 5621644 - DNA, 25 bp, Homo sapien
gtgggtgctacaactcgattatttc

SEQ ID NO: 5621645 - DNA, 25 bp, Homo sapien
tttatgttagatgacggcacaccca

SEQ ID NO: 5621646 - DNA, 25 bp, Homo sapien
caagattcctcaagacaatgacttc

SEQ ID NO: 5621647 - DNA, 25 bp, Homo sapien
caagaggcagataaatcaagaatct

SEQ ID NO: 5621648 - DNA, 25 bp, Homo sapien
agcaagaatactttagtgttggtgt

SEQ ID NO: 5621649 - DNA, 25 bp, Homo sapien
tcaatagaaaattaaggacctgctc

SEQ ID NO: 5621650 - DNA, 25 bp, Homo sapien
cctctgtgtacaggtgacattatgt

SEQ ID NO: 5621651 - DNA, 25 bp, Homo sapien
tgtcattcaggaacagaacaatacc

SEQ ID NO: 5621652 - DNA, 25 bp, Homo sapien
tgttttggaagacatgacctgcttc

SEQ ID NO: 5621653 - DNA, 25 bp, Homo sapien
agtggccagcatcacgaatagctca

SEQ ID NO: 5621654 - DNA, 25 bp, Homo sapien
caaggagttcacagcctaatggggg

SEQ ID NO: 5621655 - DNA, 25 bp, Homo sapien
cacccactccaaggcagaggtggga

SEQ ID NO: 5621656 - DNA, 25 bp, Homo sapien
agcatcacgaatagctcagagctgt

SEQ ID NO: 5621657 - DNA, 25 bp, Homo sapien
agctgcatagcctagaacaagtccc

SEQ ID NO: 5621658 - DNA, 25 bp, Homo sapien
ggtgactgaacgatgagtaacacac

SEQ ID NO: 5621659 - DNA, 25 bp, Homo sapien
gcagcacccaggcttatccatctca

SEQ ID NO: 5621660 - DNA, 25 bp, Homo sapien
tacaaactgaaataccacccactcc

SEQ ID NO: 5621661 - DNA, 25 bp, Homo sapien
taccctgataggatcttttggcttc

SEQ ID NO: 5621662 - DNA, 25 bp, Homo sapien
ggcttcctataacgaaagttggcac

SEQ ID NO: 5621663 - DNA, 25 bp, Homo sapien
ttaaagatggtggcctataacactt

SEQ ID NO: 5621664 - DNA, 25 bp, Homo sapien
atacaggttgtatgtgacacaaaat

SEQ ID NO: 5621665 - DNA, 25 bp, Homo sapien
attatcctagcgaatgagacacatt

SEQ ID NO: 5621666 - DNA, 25 bp, Homo sapien
tgcaatgattgccccagatctctgt

SEQ ID NO: 5621667 - DNA, 25 bp, Homo sapien
cgaaagttggcacaattatcctagc

SEQ ID NO: 5621668 - DNA, 25 bp, Homo sapien
ctgaaatatttgaagccgaggatac

SEQ ID NO: 5621669 - DNA, 25 bp, Homo sapien
gccgaggatacaggaagttcttaaa

SEQ ID NO: 5621670 - DNA, 25 bp, Homo sapien
ggaatccgggactccaacatgcaat

SEQ ID NO: 5621671 - DNA, 25 bp, Homo sapien
ctctgtactacacctgaccactttc

SEQ ID NO: 5621672 - DNA, 25 bp, Homo sapien
cagagaagcagtgcatacaaataat

SEQ ID NO: 5621673 - DNA, 25 bp, Homo sapien
ggactgggctttgtattctgagggc

SEQ ID NO: 5621674 - DNA, 25 bp, Homo sapien
acatctcatggaaggatttgaactc

SEQ ID NO: 5621675 - DNA, 25 bp, Homo sapien
tctgagggccatatatggaagctca

SEQ ID NO: 5621676 - DNA, 25 bp, Homo sapien
ggcccccagactgtgctcttaacca

SEQ ID NO: 5621677 - DNA, 25 bp, Homo sapien
tggcagttactgaaccgagtgagaa

SEQ ID NO: 5621678 - DNA, 25 bp, Homo sapien
ggttgagtaacttatccagagacac

SEQ ID NO: 5621679 - DNA, 25 bp, Homo sapien
ggatttgaactcaagccagtgggcc

SEQ ID NO: 5621680 - DNA, 25 bp, Homo sapien
taaccaaccctgtatgctgcctctg

SEQ ID NO: 5621681 - DNA, 25 bp, Homo sapien
caaagataaattagacatggatact

SEQ ID NO: 5621682 - DNA, 25 bp, Homo sapien
atgtgcaaggtactgttcaactgct

SEQ ID NO: 5621683 - DNA, 25 bp, Homo sapien
acgatacggtcaaggtggacaacag

SEQ ID NO: 5621684 - DNA, 25 bp, Homo sapien
ctgttgtccaccttgaccgtatcgt

SEQ ID NO: 5621685 - DNA, 25 bp, Homo sapien
gctctcaatcaagtgtacagtgttc

SEQ ID NO: 5621686 - DNA, 25 bp, Homo sapien
cctactgtctcgataagaaagctcc

SEQ ID NO: 5621687 - DNA, 25 bp, Homo sapien
tgcaatgccctgatggagagttctg

SEQ ID NO: 5621688 - DNA, 25 bp, Homo sapien
tctggttgccccaaggccttttgcc

SEQ ID NO: 5621689 - DNA, 25 bp, Homo sapien
aagacaaatgtccgccttcaggaag

SEQ ID NO: 5621690 - DNA, 25 bp, Homo sapien
taagaaagctcctaagactgttgtt

SEQ ID NO: 5621691 - DNA, 25 bp, Homo sapien
cccaaggccttttgccagccgctgg

SEQ ID NO: 5621692 - DNA, 25 bp, Homo sapien
gactgttgttctgtgacagtgggtt

SEQ ID NO: 5621693 - DNA, 25 bp, Homo sapien
aagaattccaatacagatcaagaca

SEQ ID NO: 5621694 - DNA, 25 bp, Homo sapien
cttaaaggctgcaatgccctgatgg

SEQ ID NO: 5621695 - DNA, 25 bp, Homo sapien
aagtgtacagtgttcaatgagtaga

SEQ ID NO: 5621696 - DNA, 25 bp, Homo sapien
ctgaaggcacacaacctcacgatgc

SEQ ID NO: 5621697 - DNA, 25 bp, Homo sapien
gagccgcagataacatgtggttttc

SEQ ID NO: 5621698 - DNA, 25 bp, Homo sapien
acaacctcacgatgcagtgctggga

SEQ ID NO: 5621699 - DNA, 25 bp, Homo sapien
atgattggcactttttaggaactat

SEQ ID NO: 5621700 - DNA, 25 bp, Homo sapien
acgtcattatcctccctggttggtc

SEQ ID NO: 5621701 - DNA, 25 bp, Homo sapien
taagtgacatagtttgacgtcatta

SEQ ID NO: 5621702 - DNA, 25 bp, Homo sapien
atccaattcctgacttctgtgaggc

SEQ ID NO: 5621703 - DNA, 25 bp, Homo sapien
gcctgtccccgtgcgccatccattg

SEQ ID NO: 5621704 - DNA, 25 bp, Homo sapien
gtcatctgatgcctgtccccgtgcg

SEQ ID NO: 5621705 - DNA, 25 bp, Homo sapien
cccgtgcgccatccattgaactttc

SEQ ID NO: 5621706 - DNA, 25 bp, Homo sapien
attacaaaactgagccgcagataac

SEQ ID NO: 5621707 - DNA, 25 bp, Homo sapien
agtgctcatcctgtgggcaccccac

SEQ ID NO: 5621708 - DNA, 25 bp, Homo sapien
tcccaaatcccaatcaactagctac

SEQ ID NO: 5621709 - DNA, 25 bp, Homo sapien
actagtaaagggaattcgcattttc

SEQ ID NO: 5621710 - DNA, 25 bp, Homo sapien
ttgcagtaaagcagtctagatggct

SEQ ID NO: 5621711 - DNA, 25 bp, Homo sapien
ctggatgaatgcaaatgcttgattc

SEQ ID NO: 5621712 - DNA, 25 bp, Homo sapien
gcaattgcagtatccaaggaaattc

SEQ ID NO: 5621713 - DNA, 25 bp, Homo sapien
tgtcctgtctgcattcctcctagcc

SEQ ID NO: 5621714 - DNA, 25 bp, Homo sapien
ttcccaacattgcagtaaagcagtc

SEQ ID NO: 5621715 - DNA, 25 bp, Homo sapien
cacccatgccaccagtgctcatcct

SEQ ID NO: 5621716 - DNA, 25 bp, Homo sapien
agatgagaaaacctcgtagtatttt

SEQ ID NO: 5621717 - DNA, 25 bp, Homo sapien
ctgctcaggttttggaaaatagatc

SEQ ID NO: 5621718 - DNA, 25 bp, Homo sapien
aatcacgaaagtggaaaaacaaaca

SEQ ID NO: 5621719 - DNA, 25 bp, Homo sapien
gggggactactacacacatcaagct

SEQ ID NO: 5621720 - DNA, 25 bp, Homo sapien
gtagttcatagcactggcagcacac

SEQ ID NO: 5621721 - DNA, 25 bp, Homo sapien
atatccccctgagataaggggggac

SEQ ID NO: 5621722 - DNA, 25 bp, Homo sapien
ttgtgaaaccattgcttagaaaaat

SEQ ID NO: 5621723 - DNA, 25 bp, Homo sapien
taccataggtatgcatgtacaggaa

SEQ ID NO: 5621724 - DNA, 25 bp, Homo sapien
cactggtcatcttggaacatatccc

SEQ ID NO: 5621725 - DNA, 25 bp, Homo sapien
aacaataataggtagttcatagcac

SEQ ID NO: 5621726 - DNA, 25 bp, Homo sapien
acatagtatatatagggtttcgtat

SEQ ID NO: 5621727 - DNA, 25 bp, Homo sapien
acgtccttgaaggagtaagagagtg

SEQ ID NO: 5621728 - DNA, 25 bp, Homo sapien
acaaacagaaacgtccttgaaggag

SEQ ID NO: 5621729 - DNA, 25 bp, Homo sapien
tcctacaagagtcacgctgagggag

SEQ ID NO: 5621730 - DNA, 25 bp, Homo sapien
gcaccatcctggttcccaagggcat

SEQ ID NO: 5621731 - DNA, 25 bp, Homo sapien
tgtctgaatgtccaatgcaccatcc

SEQ ID NO: 5621732 - DNA, 25 bp, Homo sapien
gaggtactgtgggtccatagttctt

SEQ ID NO: 5621733 - DNA, 25 bp, Homo sapien
ccaagggcatctaatgaggtactgt

SEQ ID NO: 5621734 - DNA, 25 bp, Homo sapien
gagggaggcaaatgaattgtctaca

SEQ ID NO: 5621735 - DNA, 25 bp, Homo sapien
ctaaaaactggggtgctaatatttc

SEQ ID NO: 5621736 - DNA, 25 bp, Homo sapien
gaaagtgaaagcagacttgttattt

SEQ ID NO: 5621737 - DNA, 25 bp, Homo sapien
cagataagttctaaaaagcaatgtc

SEQ ID NO: 5621738 - DNA, 25 bp, Homo sapien
taaaggtagtagagatgatgtcata

SEQ ID NO: 5621739 - DNA, 25 bp, Homo sapien
taggaaatagtgaaacattatagtt

SEQ ID NO: 5621740 - DNA, 25 bp, Homo sapien
taacttccaggtagatatggtattc

SEQ ID NO: 5621741 - DNA, 25 bp, Homo sapien
gtggacaataagacctatgagtata

SEQ ID NO: 5621742 - DNA, 25 bp, Homo sapien
gacaaaaccaatcccgtggacaata

SEQ ID NO: 5621743 - DNA, 25 bp, Homo sapien
ccctactagactatgatgcccagag

SEQ ID NO: 5621744 - DNA, 25 bp, Homo sapien
ttgtttacatgcctcttccccctac

SEQ ID NO: 5621745 - DNA, 25 bp, Homo sapien
actatgtgccaggacattttgcttc

SEQ ID NO: 5621746 - DNA, 25 bp, Homo sapien
gtataataattttggtctgcctgca

SEQ ID NO: 5621747 - DNA, 25 bp, Homo sapien
gtctgcctgcaaagacctttcctac

SEQ ID NO: 5621748 - DNA, 25 bp, Homo sapien
caatcccgtggacaataagacctat

SEQ ID NO: 5621749 - DNA, 25 bp, Homo sapien
ttaggatcacaatatacatctcttt

SEQ ID NO: 5621750 - DNA, 25 bp, Homo sapien
tcttcaacatcaagcaaatgttacc

SEQ ID NO: 5621751 - DNA, 25 bp, Homo sapien
tgtatgatataagatagggcacatc

SEQ ID NO: 5621752 - DNA, 25 bp, Homo sapien
tcaataagtagctctgggataacgg

SEQ ID NO: 5621753 - DNA, 25 bp, Homo sapien
gacagtgttgtgttagcccaaggat

SEQ ID NO: 5621754 - DNA, 25 bp, Homo sapien
gaatagagtgttcagaaatagatcc

SEQ ID NO: 5621755 - DNA, 25 bp, Homo sapien
tgggataacggcatccagatggaaa

SEQ ID NO: 5621756 - DNA, 25 bp, Homo sapien
gctgctgctattaagacagtgttgt

SEQ ID NO: 5621757 - DNA, 25 bp, Homo sapien
aggataaacaggccaatggaacaga

SEQ ID NO: 5621758 - DNA, 25 bp, Homo sapien
aacaatgattataaagctgctgcta

SEQ ID NO: 5621759 - DNA, 25 bp, Homo sapien
tgagaggagatgctttgtcagataa

SEQ ID NO: 5621760 - DNA, 25 bp, Homo sapien
cctattgaacaagatgagaggagat

SEQ ID NO: 5621761 - DNA, 25 bp, Homo sapien
aactgttagaagatactgtaaaaga

SEQ ID NO: 5621762 - DNA, 25 bp, Homo sapien
agtacttgtagctgtggcacctgtt

SEQ ID NO: 5621763 - DNA, 25 bp, Homo sapien
tgagcaccagtgctaaggagcacat

SEQ ID NO: 5621764 - DNA, 25 bp, Homo sapien
agatagaaaacactgggttccccac

SEQ ID NO: 5621765 - DNA, 25 bp, Homo sapien
agggagaagatgcattattagtact

SEQ ID NO: 5621766 - DNA, 25 bp, Homo sapien
gccactcattgaactgggaaggggg

SEQ ID NO: 5621767 - DNA, 25 bp, Homo sapien
cacatgtgaacactgtagcgaggtc

SEQ ID NO: 5621768 - DNA, 25 bp, Homo sapien
tagtaaagggcactggtattctgag

SEQ ID NO: 5621769 - DNA, 25 bp, Homo sapien
agacaccctcagttaggggagggaa

SEQ ID NO: 5621770 - DNA, 25 bp, Homo sapien
agttggtgctaggtcagaatcttga

SEQ ID NO: 5621771 - DNA, 25 bp, Homo sapien
gcaacagaatggaaagcactgatct

SEQ ID NO: 5621772 - DNA, 25 bp, Homo sapien
actgtggtgtttagcagttggtgct

SEQ ID NO: 5621773 - DNA, 25 bp, Homo sapien
cacttaacaagtaaatgatgcattc

SEQ ID NO: 5621774 - DNA, 25 bp, Homo sapien
tgagatcagaacaggggttcactta

SEQ ID NO: 5621775 - DNA, 25 bp, Homo sapien
acataggcatgacaaactcaacagt

SEQ ID NO: 5621776 - DNA, 25 bp, Homo sapien
aaggttttatggtgactctacagac

SEQ ID NO: 5621777 - DNA, 25 bp, Homo sapien
actgtactggtgccaagcagtcagt

SEQ ID NO: 5621778 - DNA, 25 bp, Homo sapien
tacagacaacctggtcatcaaacac

SEQ ID NO: 5621779 - DNA, 25 bp, Homo sapien
acctatgagaaaactgagtaacaat

SEQ ID NO: 5621780 - DNA, 25 bp, Homo sapien
taattgttaggaggctaatgagatc

SEQ ID NO: 5621781 - DNA, 25 bp, Homo sapien
tctggaggagattgtctagatgatt

SEQ ID NO: 5621782 - DNA, 25 bp, Homo sapien
tgctgtaagcagtgagctggctttg

SEQ ID NO: 5621783 - DNA, 25 bp, Homo sapien
gtgcagccttggggttttagtactc

SEQ ID NO: 5621784 - DNA, 25 bp, Homo sapien
agttttgggtgagagtctatggagt

SEQ ID NO: 5621785 - DNA, 25 bp, Homo sapien
actccatagactctcacccaaaact

SEQ ID NO: 5621786 - DNA, 25 bp, Homo sapien
ggccagttccacaaacgaggagaat

SEQ ID NO: 5621787 - DNA, 25 bp, Homo sapien
gcagtcccacagtgactgggccagt

SEQ ID NO: 5621788 - DNA, 25 bp, Homo sapien
gctagaacagttctttctgggccta

SEQ ID NO: 5621789 - DNA, 25 bp, Homo sapien
accctgctcgataatctgcccaagt

SEQ ID NO: 5621790 - DNA, 25 bp, Homo sapien
tacacattcaggttgctgggtgcct

SEQ ID NO: 5621791 - DNA, 25 bp, Homo sapien
ctgggcctatgccatcagatggaat

SEQ ID NO: 5621792 - DNA, 25 bp, Homo sapien
tacctgttacttgtcgcagtcccac

SEQ ID NO: 5621793 - DNA, 25 bp, Homo sapien
gggagtaagaactgtgctagaacag

SEQ ID NO: 5621794 - DNA, 25 bp, Homo sapien
atggtggccaaaatagagactcact

SEQ ID NO: 5621795 - DNA, 25 bp, Homo sapien
aaacgaggagaattaaaccctgctc

SEQ ID NO: 5621796 - DNA, 25 bp, Homo sapien
attcaccacgtcaaatgcttccata

SEQ ID NO: 5621797 - DNA, 25 bp, Homo sapien
ctagcctctgtctgaagtatggaag

SEQ ID NO: 5621798 - DNA, 25 bp, Homo sapien
aattggtgtgtgttactgcagaatc

SEQ ID NO: 5621799 - DNA, 25 bp, Homo sapien
atgcctatgcagtaccagagggaat

SEQ ID NO: 5621800 - DNA, 25 bp, Homo sapien
tagaattgcagccccaagatggtta

SEQ ID NO: 5621801 - DNA, 25 bp, Homo sapien
tttggccaccagtcagccctgtctc

SEQ ID NO: 5621802 - DNA, 25 bp, Homo sapien
tgaagcaatagaaaggtcaaagttc

SEQ ID NO: 5621803 - DNA, 25 bp, Homo sapien
ttgatggctaaaaacggacaagtca

SEQ ID NO: 5621804 - DNA, 25 bp, Homo sapien
atgactgggatttggcctcaacgtt

SEQ ID NO: 5621805 - DNA, 25 bp, Homo sapien
agaataaacagcactgaggagagat

SEQ ID NO: 5621806 - DNA, 25 bp, Homo sapien
agaaggttttcgaggaattggtgtg

SEQ ID NO: 5621807 - DNA, 25 bp, Homo sapien
catgcaccagcagccctattctcac

SEQ ID NO: 5621808 - DNA, 25 bp, Homo sapien
ccatccctgggattggatggggtct

SEQ ID NO: 5621809 - DNA, 25 bp, Homo sapien
gcccccgtggaaataacctgcacca

SEQ ID NO: 5621810 - DNA, 25 bp, Homo sapien
tggaaataacctgcaccaggagcaa

SEQ ID NO: 5621811 - DNA, 25 bp, Homo sapien
ccgggctttccctcatctgcagaag

SEQ ID NO: 5621812 - DNA, 25 bp, Homo sapien
ggccttatccgggctttccctcatc

SEQ ID NO: 5621813 - DNA, 25 bp, Homo sapien
taggtagggacacccatccctggga

SEQ ID NO: 5621814 - DNA, 25 bp, Homo sapien
ccgtggaaataacctgcaccaggag

SEQ ID NO: 5621815 - DNA, 25 bp, Homo sapien
gtcttctgctgccggcaggtaggta

SEQ ID NO: 5621816 - DNA, 25 bp, Homo sapien
ttggtttggttcaacaagtgtgggc

SEQ ID NO: 5621817 - DNA, 25 bp, Homo sapien
gagacctcggtgcttggtttggttc

SEQ ID NO: 5621818 - DNA, 25 bp, Homo sapien
ccccagctctgcttgtgtggggaga

SEQ ID NO: 5621819 - DNA, 25 bp, Homo sapien
cgcatgccacgtgtccggaataaat

SEQ ID NO: 5621820 - DNA, 25 bp, Homo sapien
agctcccagctcatccagcaccagc

SEQ ID NO: 5621821 - DNA, 25 bp, Homo sapien
gctcatccagcaccagcgggtgcac

SEQ ID NO: 5621822 - DNA, 25 bp, Homo sapien
tcatccagcaccagcgggtgcacta

SEQ ID NO: 5621823 - DNA, 25 bp, Homo sapien
tgccacgtgtccggaataaattctt

SEQ ID NO: 5621824 - DNA, 25 bp, Homo sapien
accgcatgccacgtgtccggaataa

SEQ ID NO: 5621825 - DNA, 25 bp, Homo sapien
tcccagctcatccagcaccagcggg

SEQ ID NO: 5621826 - DNA, 25 bp, Homo sapien
gcaccgcatgccacgtgtccggaat

SEQ ID NO: 5621827 - DNA, 25 bp, Homo sapien
ttcggccagagctcccagctcatcc

SEQ ID NO: 5621828 - DNA, 25 bp, Homo sapien
catgccacgtgtccggaataaattc

SEQ ID NO: 5621829 - DNA, 25 bp, Homo sapien
ggccagagctcccagctcatccagc

SEQ ID NO: 5621830 - DNA, 25 bp, Homo sapien
atgactgcatcaggaaagtgagaaa

SEQ ID NO: 5621831 - DNA, 25 bp, Homo sapien
tggtcatccctgggctgctcatgac

SEQ ID NO: 5621832 - DNA, 25 bp, Homo sapien
agggcctcatgatttctgtgatctc

SEQ ID NO: 5621833 - DNA, 25 bp, Homo sapien
cagttttatttggtggtaatgggga

SEQ ID NO: 5621834 - DNA, 25 bp, Homo sapien
ttcagaacactgagagttggaaagg

SEQ ID NO: 5621835 - DNA, 25 bp, Homo sapien
gaagtaaagacaaatttcacatgac

SEQ ID NO: 5621836 - DNA, 25 bp, Homo sapien
ctgggctgctcatgaccatgcacgg

SEQ ID NO: 5621837 - DNA, 25 bp, Homo sapien
agaatgcaaagaggcttatagaaaa

SEQ ID NO: 5621838 - DNA, 25 bp, Homo sapien
aggcttatagaaaagtttgctcaac

SEQ ID NO: 5621839 - DNA, 25 bp, Homo sapien
ctagtggctttatttcccctgggag

SEQ ID NO: 5621840 - DNA, 25 bp, Homo sapien
atgggaaatcccactaggaattaat

SEQ ID NO: 5621841 - DNA, 25 bp, Homo sapien
atgatgtctgatacagcagcctcca

SEQ ID NO: 5621842 - DNA, 25 bp, Homo sapien
cctttcaggcttggtgttattcccc

SEQ ID NO: 5621843 - DNA, 25 bp, Homo sapien
caccactgcactggctttgggatgc

SEQ ID NO: 5621844 - DNA, 25 bp, Homo sapien
tatgataattaaaagttgagtgccc

SEQ ID NO: 5621845 - DNA, 25 bp, Homo sapien
tttgagaacttaggaagaactccag

SEQ ID NO: 5621846 - DNA, 25 bp, Homo sapien
aggaaacagaaggtcatccagctaa

SEQ ID NO: 5621847 - DNA, 25 bp, Homo sapien
actacagatacacaccactgcactg

SEQ ID NO: 5621848 - DNA, 25 bp, Homo sapien
cagccacttgaacatatgatgtctg

SEQ ID NO: 5621849 - DNA, 25 bp, Homo sapien
agttgagtgcccatcatggaccagg

SEQ ID NO: 5621850 - DNA, 25 bp, Homo sapien
cctccaaagagggttttctgcccat

SEQ ID NO: 5621851 - DNA, 25 bp, Homo sapien
cacatgctcaggatccatgagctgc

SEQ ID NO: 5621852 - DNA, 25 bp, Homo sapien
ttaagggtccagagtcaaccctcaa

SEQ ID NO: 5621853 - DNA, 25 bp, Homo sapien
gcttaagggtccagagtcaaccctc

SEQ ID NO: 5621854 - DNA, 25 bp, Homo sapien
ggcagaattggggcttcctgccggg

SEQ ID NO: 5621855 - DNA, 25 bp, Homo sapien
ggtccagagtcaaccctcaaaggaa

SEQ ID NO: 5621856 - DNA, 25 bp, Homo sapien
caaggagctggaatgttcaacctcg

SEQ ID NO: 5621857 - DNA, 25 bp, Homo sapien
ggcaggctctccttcggaaacaagg

SEQ ID NO: 5621858 - DNA, 25 bp, Homo sapien
gcaaccactgcagggcagaattggg

SEQ ID NO: 5621859 - DNA, 25 bp, Homo sapien
ccagagtcaaccctcaaaggaagtc

SEQ ID NO: 5621860 - DNA, 25 bp, Homo sapien
accctcaaaggaagtcaagggtgca

SEQ ID NO: 5621861 - DNA, 25 bp, Homo sapien
aagggtccagagtcaaccctcaaag

SEQ ID NO: 5621862 - DNA, 25 bp, Homo sapien
cgagaggcaggctctccttcggaaa

SEQ ID NO: 5621863 - DNA, 25 bp, Homo sapien
atgacagtaagagctcaaagaccat

SEQ ID NO: 5621864 - DNA, 25 bp, Homo sapien
taagtcagctaagacatgtgagcgg

SEQ ID NO: 5621865 - DNA, 25 bp, Homo sapien
ctcccacttcagagcagtagaccca

SEQ ID NO: 5621866 - DNA, 25 bp, Homo sapien
ctttggtgactatctcgtggagtat

SEQ ID NO: 5621867 - DNA, 25 bp, Homo sapien
agaagtgagtcttttcctgaccgtc

SEQ ID NO: 5621868 - DNA, 25 bp, Homo sapien
caaagaccatcagttaagagaagcc

SEQ ID NO: 5621869 - DNA, 25 bp, Homo sapien
gctaagattgtgactcagaagtgag

SEQ ID NO: 5621870 - DNA, 25 bp, Homo sapien
tgtggaccacaactcccgcaccacc

SEQ ID NO: 5621871 - DNA, 25 bp, Homo sapien
aaattatgagaaaatagagctaaga

SEQ ID NO: 5621872 - DNA, 25 bp, Homo sapien
cagttaagagaagcctaaatgtcca

SEQ ID NO: 5621873 - DNA, 25 bp, Homo sapien
ctaaaaccaggcataatgttccttc

SEQ ID NO: 5621874 - DNA, 25 bp, Homo sapien
attccactcagcagccacagacagc

SEQ ID NO: 5621875 - DNA, 25 bp, Homo sapien
cacagacagcctctttttgatgaac

SEQ ID NO: 5621876 - DNA, 25 bp, Homo sapien
atctgtaagactccctcatcctgcc

SEQ ID NO: 5621877 - DNA, 25 bp, Homo sapien
tttaagctggttttgatgatttgga

SEQ ID NO: 5621878 - DNA, 25 bp, Homo sapien
agtcttggtattccactcagcagcc

SEQ ID NO: 5621879 - DNA, 25 bp, Homo sapien
gtaaataagtgaagacaagtccagg

SEQ ID NO: 5621880 - DNA, 25 bp, Homo sapien
ctgccttcgggttttggagtaattc

SEQ ID NO: 5621881 - DNA, 25 bp, Homo sapien
aaaacaagcttggtaaggttggatc

SEQ ID NO: 5621882 - DNA, 25 bp, Homo sapien
aagaaaaatagagctgtaaataagt

SEQ ID NO: 5621883 - DNA, 25 bp, Homo sapien
ttgtgtctgtacagtggtaccactt

SEQ ID NO: 5621884 - DNA, 25 bp, Homo sapien
tggagtaattcacccaaaacaagct

SEQ ID NO: 5621885 - DNA, 25 bp, Homo sapien
ctccctgcacagctggtaccgaggg

SEQ ID NO: 5621886 - DNA, 25 bp, Homo sapien
gaacacaccggcctatggctgcaga

SEQ ID NO: 5621887 - DNA, 25 bp, Homo sapien
tcagttgtaatatgacctcctccac

SEQ ID NO: 5621888 - DNA, 25 bp, Homo sapien
ggcctcatggcacccacgctaaagc

SEQ ID NO: 5621889 - DNA, 25 bp, Homo sapien
gtataactgcaatcagggctggtgt

SEQ ID NO: 5621890 - DNA, 25 bp, Homo sapien
ccagtagtcaaggacaaatgtcagt

SEQ ID NO: 5621891 - DNA, 25 bp, Homo sapien
aaacgctcctctggatgggatcgag

SEQ ID NO: 5621892 - DNA, 25 bp, Homo sapien
ttaagggtagatctggcttcaagta

SEQ ID NO: 5621893 - DNA, 25 bp, Homo sapien
cagcaatactttaaacgtcggggcc

SEQ ID NO: 5621894 - DNA, 25 bp, Homo sapien
ccagcaagcccatggacccgctggt

SEQ ID NO: 5621895 - DNA, 25 bp, Homo sapien
cagggctggtgtgatatgtccagta

SEQ ID NO: 5621896 - DNA, 25 bp, Homo sapien
ttcctgtccaaggatttttgcatcc

SEQ ID NO: 5621897 - DNA, 25 bp, Homo sapien
caactaacctcagatggaaaatatt

SEQ ID NO: 5621898 - DNA, 25 bp, Homo sapien
taagaataagacattttggatcatt

SEQ ID NO: 5621899 - DNA, 25 bp, Homo sapien
gttttgaggcagccgacagctatac

SEQ ID NO: 5621900 - DNA, 25 bp, Homo sapien
aatacaagttgggagcattttgctc

SEQ ID NO: 5621901 - DNA, 25 bp, Homo sapien
tgttctaccataacgtaatgaatac

SEQ ID NO: 5621902 - DNA, 25 bp, Homo sapien
aacgtaatgaatacaagttgggagc

SEQ ID NO: 5621903 - DNA, 25 bp, Homo sapien
gaggcagccgacagctataccttta

SEQ ID NO: 5621904 - DNA, 25 bp, Homo sapien
gggttcctggccgaatcaggtgatt

SEQ ID NO: 5621905 - DNA, 25 bp, Homo sapien
aaggtttaagtgttttgaggcagcc

SEQ ID NO: 5621906 - DNA, 25 bp, Homo sapien
ctgttaagcacagttggccttcctg

SEQ ID NO: 5621907 - DNA, 25 bp, Homo sapien
ttatggaactaccatggaagggaca

SEQ ID NO: 5621908 - DNA, 25 bp, Homo sapien
agcagatacggtcaagactagttgc

SEQ ID NO: 5621909 - DNA, 25 bp, Homo sapien
ctcaatgctcaatgtcactcctccc

SEQ ID NO: 5621910 - DNA, 25 bp, Homo sapien
ctatgcatagcagatacggtcaaga

SEQ ID NO: 5621911 - DNA, 25 bp, Homo sapien
ttaaagtactgaaaatggcaagaca

SEQ ID NO: 5621912 - DNA, 25 bp, Homo sapien
gaaaatggcaagacagttattaatt

SEQ ID NO: 5621913 - DNA, 25 bp, Homo sapien
ccaggtactgtgctatgcatagcag

SEQ ID NO: 5621914 - DNA, 25 bp, Homo sapien
tgaatttagccttatgatgcggttt

SEQ ID NO: 5621915 - DNA, 25 bp, Homo sapien
atcaaaaatagcatccctagttccc

SEQ ID NO: 5621916 - DNA, 25 bp, Homo sapien
cttatgatgcggtttgaccagtaga

SEQ ID NO: 5621917 - DNA, 25 bp, Homo sapien
agactagttgctccaggcagaaaac

SEQ ID NO: 5621918 - DNA, 25 bp, Homo sapien
ccagcctaggaggagaattttcttg

SEQ ID NO: 5621919 - DNA, 25 bp, Homo sapien
ggtgtgattctcaacatgcttgccc

SEQ ID NO: 5621920 - DNA, 25 bp, Homo sapien
ttctctgctaccaagtaccataccc

SEQ ID NO: 5621921 - DNA, 25 bp, Homo sapien
cttctggccaggttaagcaactttc

SEQ ID NO: 5621922 - DNA, 25 bp, Homo sapien
gcctgcccaggactttatcttgctc

SEQ ID NO: 5621923 - DNA, 25 bp, Homo sapien
agtaccatacccttgacgcctgccc

SEQ ID NO: 5621924 - DNA, 25 bp, Homo sapien
atatcctccctgctaggtgtgattc

SEQ ID NO: 5621925 - DNA, 25 bp, Homo sapien
tactccaagacgcctttcctgtttc

SEQ ID NO: 5621926 - DNA, 25 bp, Homo sapien
atgcttgccccttatgatttggaca

SEQ ID NO: 5621927 - DNA, 25 bp, Homo sapien
atacccttgacgcctgcccaggact

SEQ ID NO: 5621928 - DNA, 25 bp, Homo sapien
aagggcaaggagttcgtttcactta

SEQ ID NO: 5621929 - DNA, 25 bp, Homo sapien
aaggttagcacttaagacactggtt

SEQ ID NO: 5621930 - DNA, 25 bp, Homo sapien
tcgaatttggctagagaacatcacc

SEQ ID NO: 5621931 - DNA, 25 bp, Homo sapien
ttaatccaggtgtacagacaaggca

SEQ ID NO: 5621932 - DNA, 25 bp, Homo sapien
agacactggtttacaacggacctgt

SEQ ID NO: 5621933 - DNA, 25 bp, Homo sapien
aacggacctgtgtacttgatgcctc

SEQ ID NO: 5621934 - DNA, 25 bp, Homo sapien
gaataatcaaataagcgaaactgct

SEQ ID NO: 5621935 - DNA, 25 bp, Homo sapien
acagtttctggtacacgtaatgcgt

SEQ ID NO: 5621936 - DNA, 25 bp, Homo sapien
aatagcaaatgtgataaggttagca

SEQ ID NO: 5621937 - DNA, 25 bp, Homo sapien
tctgaactcacttaaggcggcatgt

SEQ ID NO: 5621938 - DNA, 25 bp, Homo sapien
ccccagctccacagttaagtgtacc

SEQ ID NO: 5621939 - DNA, 25 bp, Homo sapien
accggaagataagccatctgaactc

SEQ ID NO: 5621940 - DNA, 25 bp, Homo sapien
ggccaggtacagaatcgaccagtca

SEQ ID NO: 5621941 - DNA, 25 bp, Homo sapien
tctgaacaaggctaatgagagtaac

SEQ ID NO: 5621942 - DNA, 25 bp, Homo sapien
cccccaaagactctgaacaaggcta

SEQ ID NO: 5621943 - DNA, 25 bp, Homo sapien
actgtgataaattggtatatgcttc

SEQ ID NO: 5621944 - DNA, 25 bp, Homo sapien
ggaagaagcaatgtaagcaattaaa

SEQ ID NO: 5621945 - DNA, 25 bp, Homo sapien
ttttccagcactactacaaagatgc

SEQ ID NO: 5621946 - DNA, 25 bp, Homo sapien
tcttggtgaacatttaaggatgaat

SEQ ID NO: 5621947 - DNA, 25 bp, Homo sapien
aatggcaggcaaactagtaaaatat

SEQ ID NO: 5621948 - DNA, 25 bp, Homo sapien
taaggatgaatgttgcagtatttac

SEQ ID NO: 5621949 - DNA, 25 bp, Homo sapien
tgagagtaactccgaaaattcactg

SEQ ID NO: 5621950 - DNA, 25 bp, Homo sapien
agaaataaaatggcaggcaaactag

SEQ ID NO: 5621951 - DNA, 25 bp, Homo sapien
acagaagcctcagattcagggttcc

SEQ ID NO: 5621952 - DNA, 25 bp, Homo sapien
cagtgcctaagtacttcagggcttt

SEQ ID NO: 5621953 - DNA, 25 bp, Homo sapien
ggggatgtctgttgtagagtttgca

SEQ ID NO: 5621954 - DNA, 25 bp, Homo sapien
ttcaagagtctgcttcccaggacag

SEQ ID NO: 5621955 - DNA, 25 bp, Homo sapien
gagaacagggaccttatcgcagtca

SEQ ID NO: 5621956 - DNA, 25 bp, Homo sapien
ttgactcaccagagcctcacactgc

SEQ ID NO: 5621957 - DNA, 25 bp, Homo sapien
ccaagtctgccagcctgtaagcacc

SEQ ID NO: 5621958 - DNA, 25 bp, Homo sapien
ctcacactgctgcctttcaagagtc

SEQ ID NO: 5621959 - DNA, 25 bp, Homo sapien
gtctgcttcccaggacagaagcctc

SEQ ID NO: 5621960 - DNA, 25 bp, Homo sapien
tgtatttgatccagtgcctaagtac

SEQ ID NO: 5621961 - DNA, 25 bp, Homo sapien
ctctaaaattctcacaggggatgtc

SEQ ID NO: 5621962 - DNA, 25 bp, Homo sapien
tcgtgtctgcttggtccctgcctga

SEQ ID NO: 5621963 - DNA, 25 bp, Homo sapien
gctgagatctgcatcgggtgatgga

SEQ ID NO: 5621964 - DNA, 25 bp, Homo sapien
ctgctaataagcgtttagccagagg

SEQ ID NO: 5621965 - DNA, 25 bp, Homo sapien
gggatgccagagccccacttgttct

SEQ ID NO: 5621966 - DNA, 25 bp, Homo sapien
gttcttggaacagcaaccaaacacc

SEQ ID NO: 5621967 - DNA, 25 bp, Homo sapien
gatctgcatcgggtgatggaaaaga

SEQ ID NO: 5621968 - DNA, 25 bp, Homo sapien
cttgggaaactgctaataagcgttt

SEQ ID NO: 5621969 - DNA, 25 bp, Homo sapien
cctcaggtgggttttcagaagcacc

SEQ ID NO: 5621970 - DNA, 25 bp, Homo sapien
tgggttttcagaagcaccaggaagg

SEQ ID NO: 5621971 - DNA, 25 bp, Homo sapien
cagcaaccaaacacctccagcagga

SEQ ID NO: 5621972 - DNA, 25 bp, Homo sapien
gcttggtccctgcctgagttcctag

SEQ ID NO: 5621973 - DNA, 25 bp, Homo sapien
tggccaaagagcactgcctaccctg

SEQ ID NO: 5621974 - DNA, 25 bp, Homo sapien
aggtggacaaatgacatcccctggc

SEQ ID NO: 5621975 - DNA, 25 bp, Homo sapien
tcccctggcattgcaaggaatggag

SEQ ID NO: 5621976 - DNA, 25 bp, Homo sapien
gaagccccctcaggtggacaaatga

SEQ ID NO: 5621977 - DNA, 25 bp, Homo sapien
agcgcagaaccagcacatgttccca

SEQ ID NO: 5621978 - DNA, 25 bp, Homo sapien
acgccaacaccaagttcagagagtc

SEQ ID NO: 5621979 - DNA, 25 bp, Homo sapien
gtgacgccactcagcctggctggac

SEQ ID NO: 5621980 - DNA, 25 bp, Homo sapien
gagccaacggcccacctctcctgca

SEQ ID NO: 5621981 - DNA, 25 bp, Homo sapien
ggcatctttagaatggagcatggac

SEQ ID NO: 5621982 - DNA, 25 bp, Homo sapien
cagtcaaggctgaggccatcattct

SEQ ID NO: 5621983 - DNA, 25 bp, Homo sapien
tgagttcaggtttgtgacactgggt

SEQ ID NO: 5621984 - DNA, 25 bp, Homo sapien
cccaaagccggagacttcaaatatg

SEQ ID NO: 5621985 - DNA, 25 bp, Homo sapien
gtgaaaataaccaggtcactgtgcc

SEQ ID NO: 5621986 - DNA, 25 bp, Homo sapien
acaatgctgatgggtaacaattcat

SEQ ID NO: 5621987 - DNA, 25 bp, Homo sapien
ctgtggatcagaggcatttaaccca

SEQ ID NO: 5621988 - DNA, 25 bp, Homo sapien
cagtcacagaatacaaagctccagt

SEQ ID NO: 5621989 - DNA, 25 bp, Homo sapien
ctcatgcaggtagagtgaaattctc

SEQ ID NO: 5621990 - DNA, 25 bp, Homo sapien
gtaccctggaggaacaaccagatga

SEQ ID NO: 5621991 - DNA, 25 bp, Homo sapien
ggttacaaagctagccatagcagtc

SEQ ID NO: 5621992 - DNA, 25 bp, Homo sapien
aatcatgagagaatgacaatgaagg

SEQ ID NO: 5621993 - DNA, 25 bp, Homo sapien
ccagttttcaagagtgtgcttaacc

SEQ ID NO: 5621994 - DNA, 25 bp, Homo sapien
tacaaatatggatgtgccagcctgc

SEQ ID NO: 5621995 - DNA, 25 bp, Homo sapien
ggggatattctggtgggaccctcaa

SEQ ID NO: 5621996 - DNA, 25 bp, Homo sapien
gaacgggttctggtctcacctgcca

SEQ ID NO: 5621997 - DNA, 25 bp, Homo sapien
ggcacagatgtagtaaataccagga

SEQ ID NO: 5621998 - DNA, 25 bp, Homo sapien
gggatggcacagatgtagtaaatac

SEQ ID NO: 5621999 - DNA, 25 bp, Homo sapien
cctcaaaagaacgggttctggtctc

SEQ ID NO: 5622000 - DNA, 25 bp, Homo sapien
aacgggttctggtctcacctgccac

SEQ ID NO: 5622001 - DNA, 25 bp, Homo sapien
cagatgtagtaaataccaggaggtg

SEQ ID NO: 5622002 - DNA, 25 bp, Homo sapien
tattctggtgggaccctcaaaagaa

SEQ ID NO: 5622003 - DNA, 25 bp, Homo sapien
cagcaaaattaaaaatatacaaaaa

SEQ ID NO: 5622004 - DNA, 25 bp, Homo sapien
tcaaaagaacgggttctggtctcac

SEQ ID NO: 5622005 - DNA, 25 bp, Homo sapien
cacctgccaccaacttgctgtgtga

SEQ ID NO: 5622006 - DNA, 25 bp, Homo sapien
gtccatctgggacaaatcttggttt

SEQ ID NO: 5622007 - DNA, 25 bp, Homo sapien
ccttgcgataagaatctctgggttt

SEQ ID NO: 5622008 - DNA, 25 bp, Homo sapien
tcagtgcctggctgtgtctgtgaag

SEQ ID NO: 5622009 - DNA, 25 bp, Homo sapien
ttaattccagtggttcaggccgaca

SEQ ID NO: 5622010 - DNA, 25 bp, Homo sapien
cttagtgacatctgggactagcagc

SEQ ID NO: 5622011 - DNA, 25 bp, Homo sapien
tagtcacctgtgaaaccagtccatc

SEQ ID NO: 5622012 - DNA, 25 bp, Homo sapien
gcagccagaatgctgaatgggctca

SEQ ID NO: 5622013 - DNA, 25 bp, Homo sapien
gtcaggggtttgacagaaaatgtct

SEQ ID NO: 5622014 - DNA, 25 bp, Homo sapien
aatgggctcatccgaccgtgtaccc

SEQ ID NO: 5622015 - DNA, 25 bp, Homo sapien
aataaatggtaatgacttagtgaca

SEQ ID NO: 5622016 - DNA, 25 bp, Homo sapien
aagacgctgtgggacttaattccag

SEQ ID NO: 5622017 - DNA, 25 bp, Homo sapien
aagaagtgatggtaaacatcgaggt

SEQ ID NO: 5622018 - DNA, 25 bp, Homo sapien
acctcgatgtttaccatcacttctt

SEQ ID NO: 5622019 - DNA, 25 bp, Homo sapien
agtcaagacatctctcagctgtgcc

SEQ ID NO: 5622020 - DNA, 25 bp, Homo sapien
tggtaattcaggagtcaagacatct

SEQ ID NO: 5622021 - DNA, 25 bp, Homo sapien
ggtggacgcaatccctgctcactgc

SEQ ID NO: 5622022 - DNA, 25 bp, Homo sapien
ttgaactgagaaatgatcatggggt

SEQ ID NO: 5622023 - DNA, 25 bp, Homo sapien
cctggcccccagatctttctgtagt

SEQ ID NO: 5622024 - DNA, 25 bp, Homo sapien
agaacatcatctgccttcctgtctg

SEQ ID NO: 5622025 - DNA, 25 bp, Homo sapien
acaaactcttggtaattcaggagtc

SEQ ID NO: 5622026 - DNA, 25 bp, Homo sapien
ggggtgtgtcctaagcagaacatca

SEQ ID NO: 5622027 - DNA, 25 bp, Homo sapien
tgtgaggtcaggttttgtttgtgaa

SEQ ID NO: 5622028 - DNA, 25 bp, Homo sapien
cacaacccttgaactgagaaatgat

SEQ ID NO: 5622029 - DNA, 25 bp, Homo sapien
tactgatctcttaaccacaaccctt

SEQ ID NO: 5622030 - DNA, 25 bp, Homo sapien
aatgaacagggccctattttccatt

SEQ ID NO: 5622031 - DNA, 25 bp, Homo sapien
actaccaggaacttactagctacac

SEQ ID NO: 5622032 - DNA, 25 bp, Homo sapien
aatgcatactgatactaccaggaac

SEQ ID NO: 5622033 - DNA, 25 bp, Homo sapien
atgaggtcctgaacaggtataatac

SEQ ID NO: 5622034 - DNA, 25 bp, Homo sapien
tgtcgacatatggtgtcagagaacc

SEQ ID NO: 5622035 - DNA, 25 bp, Homo sapien
gaaagttcaaacatatcctagagat

SEQ ID NO: 5622036 - DNA, 25 bp, Homo sapien
tggaagacttcaggtgtattaatgc

SEQ ID NO: 5622037 - DNA, 25 bp, Homo sapien
ggacaggatcactggaagacttcag

SEQ ID NO: 5622038 - DNA, 25 bp, Homo sapien
tatacaagcctttacagacagataa

SEQ ID NO: 5622039 - DNA, 25 bp, Homo sapien
ataatactgaagaaatgaacagggc

SEQ ID NO: 5622040 - DNA, 25 bp, Homo sapien
aatactgtttactggacaggatcac

SEQ ID NO: 5622041 - DNA, 25 bp, Homo sapien
caccacagcgagtttaggcactcag

SEQ ID NO: 5622042 - DNA, 25 bp, Homo sapien
ctgcatactcatcacattgggccat

SEQ ID NO: 5622043 - DNA, 25 bp, Homo sapien
ctgaaatttgggaagcagaaaatat

SEQ ID NO: 5622044 - DNA, 25 bp, Homo sapien
ttgttgtgtagtataatgaggaatg

SEQ ID NO: 5622045 - DNA, 25 bp, Homo sapien
taggcactcagatccctgcatactc

SEQ ID NO: 5622046 - DNA, 25 bp, Homo sapien
gagtcaactgtgttgaggtgccacc

SEQ ID NO: 5622047 - DNA, 25 bp, Homo sapien
tttgaaaaattgccatagagtttac

SEQ ID NO: 5622048 - DNA, 25 bp, Homo sapien
aaagaaaccagagtctcaacctgct

SEQ ID NO: 5622049 - DNA, 25 bp, Homo sapien
ttagaagagcacttcaggtgaaaga

SEQ ID NO: 5622050 - DNA, 25 bp, Homo sapien
taatgaggaatgtggttataaatat

SEQ ID NO: 5622051 - DNA, 25 bp, Homo sapien
gctggacactattggaagtccatca

SEQ ID NO: 5622052 - DNA, 25 bp, Homo sapien
aaggcccagatgtgctcagtctggt

SEQ ID NO: 5622053 - DNA, 25 bp, Homo sapien
tcagtctggttttgtggctgagcct

SEQ ID NO: 5622054 - DNA, 25 bp, Homo sapien
tccaagctcaatagcgccaggaaat

SEQ ID NO: 5622055 - DNA, 25 bp, Homo sapien
cgtatcctgaccctcaggtcccagc

SEQ ID NO: 5622056 - DNA, 25 bp, Homo sapien
tagcttacctacaagtcagggcggc

SEQ ID NO: 5622057 - DNA, 25 bp, Homo sapien
ggcggcagtagccctcttcccgtat

SEQ ID NO: 5622058 - DNA, 25 bp, Homo sapien
cactggagagtcagtaactgcgatg

SEQ ID NO: 5622059 - DNA, 25 bp, Homo sapien
aactgcgatgccacaagtgaaggca

SEQ ID NO: 5622060 - DNA, 25 bp, Homo sapien
ggacagttgacagagtaatttgcct

SEQ ID NO: 5622061 - DNA, 25 bp, Homo sapien
aatgcgtgggaacctgtttaaggca

SEQ ID NO: 5622062 - DNA, 25 bp, Homo sapien
ggcccagcaggaacttatttcttcc

SEQ ID NO: 5622063 - DNA, 25 bp, Homo sapien
accagggatagtactatgcaaagtc

SEQ ID NO: 5622064 - DNA, 25 bp, Homo sapien
cctgagcctaagcagttcagcaaga

SEQ ID NO: 5622065 - DNA, 25 bp, Homo sapien
actgcctgtagctgaaaggtaactc

SEQ ID NO: 5622066 - DNA, 25 bp, Homo sapien
agtactgctgcattagtgacagcgc

SEQ ID NO: 5622067 - DNA, 25 bp, Homo sapien
gtcaagtcctacagcacatacatct

SEQ ID NO: 5622068 - DNA, 25 bp, Homo sapien
atgcaaagtcacacacgtttacgtt

SEQ ID NO: 5622069 - DNA, 25 bp, Homo sapien
cactgcagacccatttcggtgtcac

SEQ ID NO: 5622070 - DNA, 25 bp, Homo sapien
ccaacctaaaatagcctagaggctc

SEQ ID NO: 5622071 - DNA, 25 bp, Homo sapien
gctgtgaatcagtacaagtaaaaac

SEQ ID NO: 5622072 - DNA, 25 bp, Homo sapien
agtgacagcgctaaacctgagccta

SEQ ID NO: 5622073 - DNA, 25 bp, Homo sapien
cctagaggctcaacaccagtaagtc

SEQ ID NO: 5622074 - DNA, 25 bp, Homo sapien
aaataaattaatggaaaatgactat

SEQ ID NO: 5622075 - DNA, 25 bp, Homo sapien
acttcctacaatgctaccaactacc

SEQ ID NO: 5622076 - DNA, 25 bp, Homo sapien
gaggaaattatagcttagagaggtt

SEQ ID NO: 5622077 - DNA, 25 bp, Homo sapien
agaccactggtggatctaggattca

SEQ ID NO: 5622078 - DNA, 25 bp, Homo sapien
ggccttttgacacataggaacgcat

SEQ ID NO: 5622079 - DNA, 25 bp, Homo sapien
catcttttaggtacacagggctatt

SEQ ID NO: 5622080 - DNA, 25 bp, Homo sapien
tgacacataggaacgcatttgatat

SEQ ID NO: 5622081 - DNA, 25 bp, Homo sapien
tctacccaattccaagcaccatatt

SEQ ID NO: 5622082 - DNA, 25 bp, Homo sapien
ttctttgagttaaccagaccactgg

SEQ ID NO: 5622083 - DNA, 25 bp, Homo sapien
acaattacacaagataaagcatgta

SEQ ID NO: 5622084 - DNA, 25 bp, Homo sapien
ggcagtctgagaacagagctcctaa

SEQ ID NO: 5622085 - DNA, 25 bp, Homo sapien
tctccaggctcatatcccactccac

SEQ ID NO: 5622086 - DNA, 25 bp, Homo sapien
gatcagctccatcactgggacctcc

SEQ ID NO: 5622087 - DNA, 25 bp, Homo sapien
ctacactacagccaggtagaatgac

SEQ ID NO: 5622088 - DNA, 25 bp, Homo sapien
tattgctccagtaaagagctgtaat

SEQ ID NO: 5622089 - DNA, 25 bp, Homo sapien
caatgatccatggccgccagctctc

SEQ ID NO: 5622090 - DNA, 25 bp, Homo sapien
acatgattaatgccacccctgcctc

SEQ ID NO: 5622091 - DNA, 25 bp, Homo sapien
acccaacaccactcaggttgtcttc

SEQ ID NO: 5622092 - DNA, 25 bp, Homo sapien
ctgctcaactaaaaccactggtggc

SEQ ID NO: 5622093 - DNA, 25 bp, Homo sapien
agccaggtagaatgactgttcaccc

SEQ ID NO: 5622094 - DNA, 25 bp, Homo sapien
gcctcaatgaaccaagatcagctcc

SEQ ID NO: 5622095 - DNA, 25 bp, Homo sapien
ctttgcaaagcacaggcttaatttc

SEQ ID NO: 5622096 - DNA, 25 bp, Homo sapien
tatcagtgagctaaagccagcctac

SEQ ID NO: 5622097 - DNA, 25 bp, Homo sapien
ttaatcccaaccacgcttagaggcc

SEQ ID NO: 5622098 - DNA, 25 bp, Homo sapien
gctgaacaaggcgtatcagtgagct

SEQ ID NO: 5622099 - DNA, 25 bp, Homo sapien
agcatattcacaggccagctcaggt

SEQ ID NO: 5622100 - DNA, 25 bp, Homo sapien
catttgggcctgagcgccctttctg

SEQ ID NO: 5622101 - DNA, 25 bp, Homo sapien
ccagcctacatgcctggcagtgcca

SEQ ID NO: 5622102 - DNA, 25 bp, Homo sapien
gcagtgccaatctacctcaaggtcc

SEQ ID NO: 5622103 - DNA, 25 bp, Homo sapien
ccctaagaccaggtgacttgtggct

SEQ ID NO: 5622104 - DNA, 25 bp, Homo sapien
gccacattggagattaagtttgaac

SEQ ID NO: 5622105 - DNA, 25 bp, Homo sapien
atgaagtcaccagtcccactccggt

SEQ ID NO: 5622106 - DNA, 25 bp, Homo sapien
aaacctctctgggctgaacaaggcg

SEQ ID NO: 5622107 - DNA, 25 bp, Homo sapien
aggaaggatttctgacaaagagcct

SEQ ID NO: 5622108 - DNA, 25 bp, Homo sapien
tcaagggcctttagacactgtatca

SEQ ID NO: 5622109 - DNA, 25 bp, Homo sapien
attttgtagcggtatcctggacagg

SEQ ID NO: 5622110 - DNA, 25 bp, Homo sapien
acaatggacaaaagtcgcagtctcc

SEQ ID NO: 5622111 - DNA, 25 bp, Homo sapien
aatcactctacttggatggggttcc

SEQ ID NO: 5622112 - DNA, 25 bp, Homo sapien
acaggggttgacatggaaacctgtg

SEQ ID NO: 5622113 - DNA, 25 bp, Homo sapien
ttatagggcattttgtagcggtatc

SEQ ID NO: 5622114 - DNA, 25 bp, Homo sapien
agacctgagattaaaaaggtgaatc

SEQ ID NO: 5622115 - DNA, 25 bp, Homo sapien
attagtcagaaaacattgtggtttc

SEQ ID NO: 5622116 - DNA, 25 bp, Homo sapien
cagactacttcttggaagggcccca

SEQ ID NO: 5622117 - DNA, 25 bp, Homo sapien
gaagggccccaaatgccttgcctaa

SEQ ID NO: 5622118 - DNA, 25 bp, Homo sapien
actatggaagaacactgtggtgaag

SEQ ID NO: 5622119 - DNA, 25 bp, Homo sapien
gctagagccgcaactatgtaggtag

SEQ ID NO: 5622120 - DNA, 25 bp, Homo sapien
ctgaacggggttgtgctttttcttc

SEQ ID NO: 5622121 - DNA, 25 bp, Homo sapien
aactatgtaggtaggagtactgttg

SEQ ID NO: 5622122 - DNA, 25 bp, Homo sapien
acactggtgaccctataggacagtc

SEQ ID NO: 5622123 - DNA, 25 bp, Homo sapien
gtggtgaaggaaacaatccagattc

SEQ ID NO: 5622124 - DNA, 25 bp, Homo sapien
agcacaattaatactgaacggggtt

SEQ ID NO: 5622125 - DNA, 25 bp, Homo sapien
ataggtgaaggacttgcaaatctgt

SEQ ID NO: 5622126 - DNA, 25 bp, Homo sapien
agattcctttggcagtcatagtcac

SEQ ID NO: 5622127 - DNA, 25 bp, Homo sapien
cagggtctcactatggaagaacact

SEQ ID NO: 5622128 - DNA, 25 bp, Homo sapien
ggacccagacttatggtggaagttc

SEQ ID NO: 5622129 - DNA, 25 bp, Homo sapien
gagctgaaaaagagtacaaaaagga

SEQ ID NO: 5622130 - DNA, 25 bp, Homo sapien
tcccaggctttgagtgtagaactgc

SEQ ID NO: 5622131 - DNA, 25 bp, Homo sapien
gggaaaggagcatatgacctttttc

SEQ ID NO: 5622132 - DNA, 25 bp, Homo sapien
atgacttagaggataaaaccaagag

SEQ ID NO: 5622133 - DNA, 25 bp, Homo sapien
tgttcgcagaacttcagattgaaaa

SEQ ID NO: 5622134 - DNA, 25 bp, Homo sapien
ggaacaggagtgtctatagcagtta

SEQ ID NO: 5622135 - DNA, 25 bp, Homo sapien
acgcatttctacaaacaggaagcag

SEQ ID NO: 5622136 - DNA, 25 bp, Homo sapien
cagaattgctatgaaccagtgactt

SEQ ID NO: 5622137 - DNA, 25 bp, Homo sapien
tgagtgtagaactgcaaacctgtac

SEQ ID NO: 5622138 - DNA, 25 bp, Homo sapien
acacaaaaaaggatgacttagagga

SEQ ID NO: 5622139 - DNA, 25 bp, Homo sapien
aaccaaaagccatagggagttattc

SEQ ID NO: 5622140 - DNA, 25 bp, Homo sapien
aaacctgctcactatacagtgtccc

SEQ ID NO: 5622141 - DNA, 25 bp, Homo sapien
tgctgttatataattctgaggattt

SEQ ID NO: 5622142 - DNA, 25 bp, Homo sapien
agtgctgccgtcaccatctttgccc

SEQ ID NO: 5622143 - DNA, 25 bp, Homo sapien
ccctcctgcttatcccggaagcatc

SEQ ID NO: 5622144 - DNA, 25 bp, Homo sapien
gtcacgtgacttccctaggacagtg

SEQ ID NO: 5622145 - DNA, 25 bp, Homo sapien
agtgtttgccgctgtcagtaccccc

SEQ ID NO: 5622146 - DNA, 25 bp, Homo sapien
actatacagtgtcccttccttcgtc

SEQ ID NO: 5622147 - DNA, 25 bp, Homo sapien
tgccgctgtcagtacccccagaatc

SEQ ID NO: 5622148 - DNA, 25 bp, Homo sapien
tacccccagaatctcacagtgaacc

SEQ ID NO: 5622149 - DNA, 25 bp, Homo sapien
ttccctaggacagtgtttgccgctg

SEQ ID NO: 5622150 - DNA, 25 bp, Homo sapien
ctttgccctcatgtcacgtgacttc

SEQ ID NO: 5622151 - DNA, 25 bp, Homo sapien
ttttgggcaaattcacaagaaataa

SEQ ID NO: 5622152 - DNA, 25 bp, Homo sapien
tatggcagtggccagaattcccaaa

SEQ ID NO: 5622153 - DNA, 25 bp, Homo sapien
aatggcacagagaacactcactcca

SEQ ID NO: 5622154 - DNA, 25 bp, Homo sapien
agggttacttgaatagcatacattc

SEQ ID NO: 5622155 - DNA, 25 bp, Homo sapien
ataaatagtaataatggccatcaaa

SEQ ID NO: 5622156 - DNA, 25 bp, Homo sapien
tatataattaagaagggttacttga

SEQ ID NO: 5622157 - DNA, 25 bp, Homo sapien
cctgtcccccacaacaaatggcaca

SEQ ID NO: 5622158 - DNA, 25 bp, Homo sapien
tcccaaatagcatctcctgtccccc

SEQ ID NO: 5622159 - DNA, 25 bp, Homo sapien
agagtagccaaagttaagtttactg

SEQ ID NO: 5622160 - DNA, 25 bp, Homo sapien
cacaagctaagcatatggcagtggc

SEQ ID NO: 5622161 - DNA, 25 bp, Homo sapien
aaatgactttacagacttaacaggt

SEQ ID NO: 5622162 - DNA, 25 bp, Homo sapien
ccctcccgacccagcacttaccttc

SEQ ID NO: 5622163 - DNA, 25 bp, Homo sapien
tgttccattcccctcccgacccagc

SEQ ID NO: 5622164 - DNA, 25 bp, Homo sapien
gggccttttccttctagcagctcat

SEQ ID NO: 5622165 - DNA, 25 bp, Homo sapien
accttctgagcttgggtagtgtctt

SEQ ID NO: 5622166 - DNA, 25 bp, Homo sapien
ccccggtcacgagtttctctgccac

SEQ ID NO: 5622167 - DNA, 25 bp, Homo sapien
gtttctctgccacaggaacctcgtc

SEQ ID NO: 5622168 - DNA, 25 bp, Homo sapien
cgcctctgaggctttcacttgggcc

SEQ ID NO: 5622169 - DNA, 25 bp, Homo sapien
acctcgtctcctgccaggttcgctc

SEQ ID NO: 5622170 - DNA, 25 bp, Homo sapien
cccagctccccggtcacgagtttct

SEQ ID NO: 5622171 - DNA, 25 bp, Homo sapien
tctcctgccaggttcgctcacgact

SEQ ID NO: 5622172 - DNA, 25 bp, Homo sapien
gctcacgactccgcctctgaggctt

SEQ ID NO: 5622173 - DNA, 25 bp, Homo sapien
atatctggggcacctgactctatag

SEQ ID NO: 5622174 - DNA, 25 bp, Homo sapien
tgccatcagaaccaccatgaggtgg

SEQ ID NO: 5622175 - DNA, 25 bp, Homo sapien
atctccattagccgtttggggccat

SEQ ID NO: 5622176 - DNA, 25 bp, Homo sapien
gcatgctgggcaacaatgaaattgg

SEQ ID NO: 5622177 - DNA, 25 bp, Homo sapien
ttaacagggatttaatatctggggc

SEQ ID NO: 5622178 - DNA, 25 bp, Homo sapien
gcacttgccctgagatcaccactac

SEQ ID NO: 5622179 - DNA, 25 bp, Homo sapien
tgaatgaacttataacttgaccctc

SEQ ID NO: 5622180 - DNA, 25 bp, Homo sapien
tggggccatattaatggggacctgt

SEQ ID NO: 5622181 - DNA, 25 bp, Homo sapien
agagaaatgtagccagctcataggc

SEQ ID NO: 5622182 - DNA, 25 bp, Homo sapien
acccccccacagatggggtctctct

SEQ ID NO: 5622183 - DNA, 25 bp, Homo sapien
actctataggctgatggcatgctgg

SEQ ID NO: 5622184 - DNA, 25 bp, Homo sapien
ctgtctcaggttttctactgctctc

SEQ ID NO: 5622185 - DNA, 25 bp, Homo sapien
aatccgcctcgcggtaaggacttta

SEQ ID NO: 5622186 - DNA, 25 bp, Homo sapien
atccgcctcgcggtaaggactttaa

SEQ ID NO: 5622187 - DNA, 25 bp, Homo sapien
ttggccaacacaatcacaggagggc

SEQ ID NO: 5622188 - DNA, 25 bp, Homo sapien
gagcgcattttccaggggctggtgc

SEQ ID NO: 5622189 - DNA, 25 bp, Homo sapien
tggccaacacaatcacaggagggct

SEQ ID NO: 5622190 - DNA, 25 bp, Homo sapien
gcgccttaagacaagactgggaggc

SEQ ID NO: 5622191 - DNA, 25 bp, Homo sapien
ccctttggccaacacaatcacagga

SEQ ID NO: 5622192 - DNA, 25 bp, Homo sapien
gatccctttggccaacacaatcaca

SEQ ID NO: 5622193 - DNA, 25 bp, Homo sapien
cgcattttccaggggctggtgcagg

SEQ ID NO: 5622194 - DNA, 25 bp, Homo sapien
gcgatgggaagtgtatacgttaccc

SEQ ID NO: 5622195 - DNA, 25 bp, Homo sapien
tacaaaccaaatagcagaggttgat

SEQ ID NO: 5622196 - DNA, 25 bp, Homo sapien
agcagaggttgattattagtacagt

SEQ ID NO: 5622197 - DNA, 25 bp, Homo sapien
aaagtccagcataccgtaaaacctg

SEQ ID NO: 5622198 - DNA, 25 bp, Homo sapien
ttgctgattcgggagatagcagtga

SEQ ID NO: 5622199 - DNA, 25 bp, Homo sapien
cgtaaaacctgagtcccacccagcc

SEQ ID NO: 5622200 - DNA, 25 bp, Homo sapien
caccacgcccccagaatactattca

SEQ ID NO: 5622201 - DNA, 25 bp, Homo sapien
gtcaagttgctgattcgggagatag

SEQ ID NO: 5622202 - DNA, 25 bp, Homo sapien
ttccgatcctaataggcgttacctc

SEQ ID NO: 5622203 - DNA, 25 bp, Homo sapien
ataaatgtgttttaactcacgggga

SEQ ID NO: 5622204 - DNA, 25 bp, Homo sapien
agctcggaatggaaggcttccaagg

SEQ ID NO: 5622205 - DNA, 25 bp, Homo sapien
tcccacccagccagctcggaatgga

SEQ ID NO: 5622206 - DNA, 25 bp, Homo sapien
gcgcatctccagcaaactgagccac

SEQ ID NO: 5622207 - DNA, 25 bp, Homo sapien
aaggaaagaagcacgtgtacatctt

SEQ ID NO: 5622208 - DNA, 25 bp, Homo sapien
agaaaaacatatctaaagactagcc

SEQ ID NO: 5622209 - DNA, 25 bp, Homo sapien
cctggcaggatgccatgtgttcggt

SEQ ID NO: 5622210 - DNA, 25 bp, Homo sapien
ttctaagatctggtgggttagttcc

SEQ ID NO: 5622211 - DNA, 25 bp, Homo sapien
tctaaagactagccaggtagagtag

SEQ ID NO: 5622212 - DNA, 25 bp, Homo sapien
aaacaccacatacgaagaaaaacat

SEQ ID NO: 5622213 - DNA, 25 bp, Homo sapien
atctggtgggttagttccaaagaaa

SEQ ID NO: 5622214 - DNA, 25 bp, Homo sapien
cggtttcggtctaactaaagtcagc

SEQ ID NO: 5622215 - DNA, 25 bp, Homo sapien
aaagtcagctttagttagaaactgc

SEQ ID NO: 5622216 - DNA, 25 bp, Homo sapien
ggatgccatgtgttcggtttcggtc

SEQ ID NO: 5622217 - DNA, 25 bp, Homo sapien
gcctcaagataatttggaagcttac

SEQ ID NO: 5622218 - DNA, 25 bp, Homo sapien
gctgtgctagcctcaagataatttg

SEQ ID NO: 5622219 - DNA, 25 bp, Homo sapien
gtttgaaaactggaaatgatcattt

SEQ ID NO: 5622220 - DNA, 25 bp, Homo sapien
atcggggctgtgctagcctcaagat

SEQ ID NO: 5622221 - DNA, 25 bp, Homo sapien
gctagcctcaagataatttggaagc

SEQ ID NO: 5622222 - DNA, 25 bp, Homo sapien
ggcacaactttgaaattatctgggc

SEQ ID NO: 5622223 - DNA, 25 bp, Homo sapien
tcatttctttaaagtttggcacaac

SEQ ID NO: 5622224 - DNA, 25 bp, Homo sapien
aactgtttgaaaactggaaatgatc

SEQ ID NO: 5622225 - DNA, 25 bp, Homo sapien
aagctattgacctgtatctttttgg

SEQ ID NO: 5622226 - DNA, 25 bp, Homo sapien
ttgaaattatctgggcctggtgttt

SEQ ID NO: 5622227 - DNA, 25 bp, Homo sapien
ctgggcctggtgttttgttcagaat

SEQ ID NO: 5622228 - DNA, 25 bp, Homo sapien
ggccatataagcacataatagcatc

SEQ ID NO: 5622229 - DNA, 25 bp, Homo sapien
tagcatcgctattaacagcattaag

SEQ ID NO: 5622230 - DNA, 25 bp, Homo sapien
agtcataatatgaaaggtgatttat

SEQ ID NO: 5622231 - DNA, 25 bp, Homo sapien
catgacaaaagcccattggccatat

SEQ ID NO: 5622232 - DNA, 25 bp, Homo sapien
gcattaagaatgaagagtcataata

SEQ ID NO: 5622233 - DNA, 25 bp, Homo sapien
ttctgcattcacatgacaaaagccc

SEQ ID NO: 5622234 - DNA, 25 bp, Homo sapien
ttaacagcattaagaatgaagagtc

SEQ ID NO: 5622235 - DNA, 25 bp, Homo sapien
gtatacctaggttttctgcattcac

SEQ ID NO: 5622236 - DNA, 25 bp, Homo sapien
agcccattggccatataagcacata

SEQ ID NO: 5622237 - DNA, 25 bp, Homo sapien
tataagcacataatagcatcgctat

SEQ ID NO: 5622238 - DNA, 25 bp, Homo sapien
agtcaactcaaaacctgtataccta

SEQ ID NO: 5622239 - DNA, 25 bp, Homo sapien
ttctctgtagggttctggtaccatt

SEQ ID NO: 5622240 - DNA, 25 bp, Homo sapien
cctcaaacaatccacctgccccagc

SEQ ID NO: 5622241 - DNA, 25 bp, Homo sapien
ttgatgtgtcttatggggtatttta

SEQ ID NO: 5622242 - DNA, 25 bp, Homo sapien
caaaaatagaaaacagcaaaaagga

SEQ ID NO: 5622243 - DNA, 25 bp, Homo sapien
actgcaacttctacctcctggcctc

SEQ ID NO: 5622244 - DNA, 25 bp, Homo sapien
tgtgggctaccacccccagccagtt

SEQ ID NO: 5622245 - DNA, 25 bp, Homo sapien
taacatcctttggtaccttacattc

SEQ ID NO: 5622246 - DNA, 25 bp, Homo sapien
aaacagcaaaaaggaaatcaaaatc

SEQ ID NO: 5622247 - DNA, 25 bp, Homo sapien
aaaaatgaagttacataaacatgtt

SEQ ID NO: 5622248 - DNA, 25 bp, Homo sapien
ctaacttgtatatgaactaacttgt

SEQ ID NO: 5622249 - DNA, 25 bp, Homo sapien
caaaatccatagacttaccaccccc

SEQ ID NO: 5622250 - DNA, 25 bp, Homo sapien
ggttataaacccatcacagaacaat

SEQ ID NO: 5622251 - DNA, 25 bp, Homo sapien
tctatctgtgggcaatctggaaaca

SEQ ID NO: 5622252 - DNA, 25 bp, Homo sapien
ttaaagacttgtaaataaagcatca

SEQ ID NO: 5622253 - DNA, 25 bp, Homo sapien
acatggtccttaaaagcctcttctc

SEQ ID NO: 5622254 - DNA, 25 bp, Homo sapien
tgactataccaagaattctgatttc

SEQ ID NO: 5622255 - DNA, 25 bp, Homo sapien
catcacagaacaatggtacactgtt

SEQ ID NO: 5622256 - DNA, 25 bp, Homo sapien
aagcatcaagagatacacagaataa

SEQ ID NO: 5622257 - DNA, 25 bp, Homo sapien
aaataaagcatcaagagatacacag

SEQ ID NO: 5622258 - DNA, 25 bp, Homo sapien
cacagaataatttaggatttcagga

SEQ ID NO: 5622259 - DNA, 25 bp, Homo sapien
taaaagcctcttcacatggtcctta

SEQ ID NO: 5622260 - DNA, 25 bp, Homo sapien
agaacatctctgtaaatttggttat

SEQ ID NO: 5622261 - DNA, 25 bp, Homo sapien
ggacatcggcgggaccgtgccggtg

SEQ ID NO: 5622262 - DNA, 25 bp, Homo sapien
caccggcacggtcccgccgatgtcc

SEQ ID NO: 5622263 - DNA, 25 bp, Homo sapien
aactgcaccatggctcaacccctcc

SEQ ID NO: 5622264 - DNA, 25 bp, Homo sapien
tctgctcagatcattggaacactca

SEQ ID NO: 5622265 - DNA, 25 bp, Homo sapien
tccacccaagagatgggtgtgcaca

SEQ ID NO: 5622266 - DNA, 25 bp, Homo sapien
acccctccatggcctagcttggctc

SEQ ID NO: 5622267 - DNA, 25 bp, Homo sapien
ccactaaacccacctccaacgctga

SEQ ID NO: 5622268 - DNA, 25 bp, Homo sapien
ttgagtaaggttgtaagtctgagag

SEQ ID NO: 5622269 - DNA, 25 bp, Homo sapien
tgacacagactagcagagcacttag

SEQ ID NO: 5622270 - DNA, 25 bp, Homo sapien
agagtctgaccatgtgggcctattc

SEQ ID NO: 5622271 - DNA, 25 bp, Homo sapien
cctccaacgctgaaggtcacatttc

SEQ ID NO: 5622272 - DNA, 25 bp, Homo sapien
ttggagaaatgggctcattcctaat

SEQ ID NO: 5622273 - DNA, 25 bp, Homo sapien
agcttggctcattggagaaatgggc

SEQ ID NO: 5622274 - DNA, 25 bp, Homo sapien
aaagtatgtcacttcaggcaaggtg

SEQ ID NO: 5622275 - DNA, 25 bp, Homo sapien
tgagactcgcagaggtaatccaaca

SEQ ID NO: 5622276 - DNA, 25 bp, Homo sapien
agtcaagaggtttgccaagtatttt

SEQ ID NO: 5622277 - DNA, 25 bp, Homo sapien
cagaggtaatccaacagagttcagc

SEQ ID NO: 5622278 - DNA, 25 bp, Homo sapien
tgccctcccgtttacaaagtatgtc

SEQ ID NO: 5622279 - DNA, 25 bp, Homo sapien
tgaggctttctcaagtgtgctatgt

SEQ ID NO: 5622280 - DNA, 25 bp, Homo sapien
ggtgtttcgcatccctgaggctttc

SEQ ID NO: 5622281 - DNA, 25 bp, Homo sapien
ctcaagtgtgctatgtggtaataat

SEQ ID NO: 5622282 - DNA, 25 bp, Homo sapien
tcaggcaaggtgtttcgcatccctg

SEQ ID NO: 5622283 - DNA, 25 bp, Homo sapien
accatacgtgtgagactcgcagagg

SEQ ID NO: 5622284 - DNA, 25 bp, Homo sapien
gggctgtgaaaccatacgtgtgaga

SEQ ID NO: 5622285 - DNA, 25 bp, Homo sapien
gaccggtcgtcactcgtaccgatag

SEQ ID NO: 5622286 - DNA, 25 bp, Homo sapien
ctatcggtacgagtgacgaccggtc

SEQ ID NO: 5622287 - DNA, 25 bp, Homo sapien
aataaaatctgagagcaccattaac

SEQ ID NO: 5622288 - DNA, 25 bp, Homo sapien
ggcttcatttcaaaaggcagaggaa

SEQ ID NO: 5622289 - DNA, 25 bp, Homo sapien
actgaagcattcaatctggaaggag

SEQ ID NO: 5622290 - DNA, 25 bp, Homo sapien
tttataacctaaggatcagaatatc

SEQ ID NO: 5622291 - DNA, 25 bp, Homo sapien
gtagcacacgcttaagatataattg

SEQ ID NO: 5622292 - DNA, 25 bp, Homo sapien
tctgtcaagcaacatacaaggtatg

SEQ ID NO: 5622293 - DNA, 25 bp, Homo sapien
aaaacagatctgtcaagcaacatac

SEQ ID NO: 5622294 - DNA, 25 bp, Homo sapien
aaaatcaaagtgcactgaagcattc

SEQ ID NO: 5622295 - DNA, 25 bp, Homo sapien
actatgattactatgtagcacacgc

SEQ ID NO: 5622296 - DNA, 25 bp, Homo sapien
aagatataattgtttgggaaataat

SEQ ID NO: 5622297 - DNA, 25 bp, Homo sapien
aaaggcagaggaatgttttctaaaa

SEQ ID NO: 5622298 - DNA, 25 bp, Homo sapien
tccttcgccctgtggcctgctagcc

SEQ ID NO: 5622299 - DNA, 25 bp, Homo sapien
atggtttcctcctgacacccagagc

SEQ ID NO: 5622300 - DNA, 25 bp, Homo sapien
acactgtccttcgccctgtggcctg

SEQ ID NO: 5622301 - DNA, 25 bp, Homo sapien
tggaatggtttcctcctgacaccca

SEQ ID NO: 5622302 - DNA, 25 bp, Homo sapien
gtttcctcctgacacccagagcttg

SEQ ID NO: 5622303 - DNA, 25 bp, Homo sapien
ttcctcctgacacccagagcttgtt

SEQ ID NO: 5622304 - DNA, 25 bp, Homo sapien
ctgtccttcgccctgtggcctgcta

SEQ ID NO: 5622305 - DNA, 25 bp, Homo sapien
ctcctgacacccagagcttgttcgg

SEQ ID NO: 5622306 - DNA, 25 bp, Homo sapien
ttctctggaatggtttcctcctgac

SEQ ID NO: 5622307 - DNA, 25 bp, Homo sapien
gtccttcgccctgtggcctgctagc

SEQ ID NO: 5622308 - DNA, 25 bp, Homo sapien
cactgtccttcgccctgtggcctgc

SEQ ID NO: 5622309 - DNA, 25 bp, Homo sapien
caagtcctatgagctgaaccaagtc

SEQ ID NO: 5622310 - DNA, 25 bp, Homo sapien
ataaccaccaaaacctgcctggcgg

SEQ ID NO: 5622311 - DNA, 25 bp, Homo sapien
ccactggctcaggctctaagaggag

SEQ ID NO: 5622312 - DNA, 25 bp, Homo sapien
gagggcattaggaccccttgccctc

SEQ ID NO: 5622313 - DNA, 25 bp, Homo sapien
ctgagatgaaagaacaagtcctatg

SEQ ID NO: 5622314 - DNA, 25 bp, Homo sapien
gacccttcagtgtccaaataaccac

SEQ ID NO: 5622315 - DNA, 25 bp, Homo sapien
cagcaccttaaattatggagacctc

SEQ ID NO: 5622316 - DNA, 25 bp, Homo sapien
agctgaaccaagtctgaacagcacc

SEQ ID NO: 5622317 - DNA, 25 bp, Homo sapien
aaagatccccagatgaaagcaggag

SEQ ID NO: 5622318 - DNA, 25 bp, Homo sapien
tcttttggtcccagtcttccaggtc

SEQ ID NO: 5622319 - DNA, 25 bp, Homo sapien
aagaaaagctcaataactatacatc

SEQ ID NO: 5622320 - DNA, 25 bp, Homo sapien
ctgctcgccccaaaggcggatgatg

SEQ ID NO: 5622321 - DNA, 25 bp, Homo sapien
ttacagaccaagctccacgaatatc

SEQ ID NO: 5622322 - DNA, 25 bp, Homo sapien
agggtttcctggcacacagcccagc

SEQ ID NO: 5622323 - DNA, 25 bp, Homo sapien
atgtcagaattagagaaggaagaaa

SEQ ID NO: 5622324 - DNA, 25 bp, Homo sapien
agggcacaagagaccttgctcatca

SEQ ID NO: 5622325 - DNA, 25 bp, Homo sapien
ctaccaagactggcgtggttgtgaa

SEQ ID NO: 5622326 - DNA, 25 bp, Homo sapien
agaaagtctgctgattgataggtta

SEQ ID NO: 5622327 - DNA, 25 bp, Homo sapien
tgatggtgattccacaaagtgagcc

SEQ ID NO: 5622328 - DNA, 25 bp, Homo sapien
gatgtggagtctgcctccctaccaa

SEQ ID NO: 5622329 - DNA, 25 bp, Homo sapien
gattgataggttaagatagttttcc

SEQ ID NO: 5622330 - DNA, 25 bp, Homo sapien
gattccacaaagtgagcctgctcgc

SEQ ID NO: 5622331 - DNA, 25 bp, Homo sapien
agctcagggagccactctcagatat

SEQ ID NO: 5622332 - DNA, 25 bp, Homo sapien
cagccttctccagggttcagcctca

SEQ ID NO: 5622333 - DNA, 25 bp, Homo sapien
actgggttactgattgggaaagttc

SEQ ID NO: 5622334 - DNA, 25 bp, Homo sapien
gtggtcacctctgtctgcactgatg

SEQ ID NO: 5622335 - DNA, 25 bp, Homo sapien
cttcgggaaaccccacactctggaa

SEQ ID NO: 5622336 - DNA, 25 bp, Homo sapien
ggccccaggctccactgggttactg

SEQ ID NO: 5622337 - DNA, 25 bp, Homo sapien
ccccacgctctggtccccagcatgg

SEQ ID NO: 5622338 - DNA, 25 bp, Homo sapien
cactctcagatatgaggggtcagga

SEQ ID NO: 5622339 - DNA, 25 bp, Homo sapien
acactctggaacctcggcctacatc

SEQ ID NO: 5622340 - DNA, 25 bp, Homo sapien
gcgcttctgcaaaggcacaacgtgg

SEQ ID NO: 5622341 - DNA, 25 bp, Homo sapien
gacaggaatggcacactgacctgga

SEQ ID NO: 5622342 - DNA, 25 bp, Homo sapien
agatgaaaactccaaaacctgaaac

SEQ ID NO: 5622343 - DNA, 25 bp, Homo sapien
gaaacagaatttacacatggcagca

SEQ ID NO: 5622344 - DNA, 25 bp, Homo sapien
aggaccagctgtacttaagatgaaa

SEQ ID NO: 5622345 - DNA, 25 bp, Homo sapien
ttatgctgtacacgagccatcccac

SEQ ID NO: 5622346 - DNA, 25 bp, Homo sapien
agatgagttcacaacaggaccagct

SEQ ID NO: 5622347 - DNA, 25 bp, Homo sapien
caagtttgatagatttatgctgtac

SEQ ID NO: 5622348 - DNA, 25 bp, Homo sapien
ttacatgaatgttagttatctggca

SEQ ID NO: 5622349 - DNA, 25 bp, Homo sapien
ggagcatgccctttcacaaggatac

SEQ ID NO: 5622350 - DNA, 25 bp, Homo sapien
atacagtacaataggggtaactgga

SEQ ID NO: 5622351 - DNA, 25 bp, Homo sapien
catggcagcacacgtatatacagta

SEQ ID NO: 5622352 - DNA, 25 bp, Homo sapien
gagccatcccacatggagcatgccc

SEQ ID NO: 5622353 - DNA, 25 bp, Homo sapien
gaaaaggccttgcagttatttacat

SEQ ID NO: 5622354 - DNA, 25 bp, Homo sapien
tcttgcgacgtgcagtgattcccag

SEQ ID NO: 5622355 - DNA, 25 bp, Homo sapien
aatgctgagcccagtacttgaccat

SEQ ID NO: 5622356 - DNA, 25 bp, Homo sapien
ggttggtgcaagcaccaggagctct

SEQ ID NO: 5622357 - DNA, 25 bp, Homo sapien
tgaatgtaaaatgctgagcccagta

SEQ ID NO: 5622358 - DNA, 25 bp, Homo sapien
catggatcaatcccaggctttgcca

SEQ ID NO: 5622359 - DNA, 25 bp, Homo sapien
tagaacttaaagagacaatgaatgt

SEQ ID NO: 5622360 - DNA, 25 bp, Homo sapien
gtgattcccaggcccacagatgttc

SEQ ID NO: 5622361 - DNA, 25 bp, Homo sapien
aggctttgccagttctagctgtgtg

SEQ ID NO: 5622362 - DNA, 25 bp, Homo sapien
ttcaatgctggaagatcatggatca

SEQ ID NO: 5622363 - DNA, 25 bp, Homo sapien
aagtatagaattgacactagacgtt

SEQ ID NO: 5622364 - DNA, 25 bp, Homo sapien
gacatcgcatttcaggttcaaagag

SEQ ID NO: 5622365 - DNA, 25 bp, Homo sapien
ctctttgaacctgaaatgcgatgtc

SEQ ID NO: 5622366 - DNA, 25 bp, Homo sapien
caatagatgaaaagtgagttatcca

SEQ ID NO: 5622367 - DNA, 25 bp, Homo sapien
tttacaatcgggcaacaggaactta

SEQ ID NO: 5622368 - DNA, 25 bp, Homo sapien
ccagacacagatgaataaggctgta

SEQ ID NO: 5622369 - DNA, 25 bp, Homo sapien
aggaaaacaccagtgttaggagagc

SEQ ID NO: 5622370 - DNA, 25 bp, Homo sapien
gttcttgcacaagtgttgctagtta

SEQ ID NO: 5622371 - DNA, 25 bp, Homo sapien
aactcatcaggtaaactaagtatat

SEQ ID NO: 5622372 - DNA, 25 bp, Homo sapien
aagcctgccaaggatgtttggggtt

SEQ ID NO: 5622373 - DNA, 25 bp, Homo sapien
ataaggctgtaaggtgtatcagttt

SEQ ID NO: 5622374 - DNA, 25 bp, Homo sapien
tgaattagaggctcaaggaaaacac

SEQ ID NO: 5622375 - DNA, 25 bp, Homo sapien
tagaaaattctgtgtgcttcaaagc

SEQ ID NO: 5622376 - DNA, 25 bp, Homo sapien
aggagagcaaaatccaggcttctgt

SEQ ID NO: 5622377 - DNA, 25 bp, Homo sapien
aaggcttccatgttagaatcgttgc

SEQ ID NO: 5622378 - DNA, 25 bp, Homo sapien
tctggggccttttgaatgctgtttg

SEQ ID NO: 5622379 - DNA, 25 bp, Homo sapien
ttcagtgtgatccttaacagcaacc

SEQ ID NO: 5622380 - DNA, 25 bp, Homo sapien
ctgtttggtacagcaccagagtccc

SEQ ID NO: 5622381 - DNA, 25 bp, Homo sapien
gattactgagtgcctttctggggcc

SEQ ID NO: 5622382 - DNA, 25 bp, Homo sapien
tgccatggagtcatttgaacctcat

SEQ ID NO: 5622383 - DNA, 25 bp, Homo sapien
taacagcaaccatgaggattactga

SEQ ID NO: 5622384 - DNA, 25 bp, Homo sapien
tgtggcgattttttgccatggagtc

SEQ ID NO: 5622385 - DNA, 25 bp, Homo sapien
aaaaaaattgaacagcaaggttatc

SEQ ID NO: 5622386 - DNA, 25 bp, Homo sapien
gtcatagcaggtacactaaaatttc

SEQ ID NO: 5622387 - DNA, 25 bp, Homo sapien
tagaatcgttgcagtttttagtgta

SEQ ID NO: 5622388 - DNA, 25 bp, Homo sapien
cctctgtctctttacagcagcccct

SEQ ID NO: 5622389 - DNA, 25 bp, Homo sapien
ttttgtctcttggaaatgaggtagg

SEQ ID NO: 5622390 - DNA, 25 bp, Homo sapien
tctgggtgtctgacaacatgttcat

SEQ ID NO: 5622391 - DNA, 25 bp, Homo sapien
gtcttctggtcacagtcctgctgac

SEQ ID NO: 5622392 - DNA, 25 bp, Homo sapien
gagcatggcgaccacctctgtctct

SEQ ID NO: 5622393 - DNA, 25 bp, Homo sapien
atggcgacaaaagcaatccctagcc

SEQ ID NO: 5622394 - DNA, 25 bp, Homo sapien
cagcagccccttactcgtgggtggt

SEQ ID NO: 5622395 - DNA, 25 bp, Homo sapien
ctgtgaaggtcctctttccagccac

SEQ ID NO: 5622396 - DNA, 25 bp, Homo sapien
gtcactgcccattctctcactcctc

SEQ ID NO: 5622397 - DNA, 25 bp, Homo sapien
caaaagatggtccacacaggatgaa

SEQ ID NO: 5622398 - DNA, 25 bp, Homo sapien
ctgctgaccaaaagatggtccacac

SEQ ID NO: 5622399 - DNA, 25 bp, Homo sapien
ggtgcctgctataggcaaaactctg

SEQ ID NO: 5622400 - DNA, 25 bp, Homo sapien
tggcattactgacccatgtggctac

SEQ ID NO: 5622401 - DNA, 25 bp, Homo sapien
cttcttggactccagaggcagatcc

SEQ ID NO: 5622402 - DNA, 25 bp, Homo sapien
ggctacaataggaagagccagagta

SEQ ID NO: 5622403 - DNA, 25 bp, Homo sapien
ctccagaggcagatccaatggttta

SEQ ID NO: 5622404 - DNA, 25 bp, Homo sapien
cccagggtgccatcatcctttgagt

SEQ ID NO: 5622405 - DNA, 25 bp, Homo sapien
caagcccacagtctggtgcctgcta

SEQ ID NO: 5622406 - DNA, 25 bp, Homo sapien
ccaatagtcatgtactaccaagccc

SEQ ID NO: 5622407 - DNA, 25 bp, Homo sapien
ttcaatacccatcaagaccttaaac

SEQ ID NO: 5622408 - DNA, 25 bp, Homo sapien
gtggatcactcccagggtgccatca

SEQ ID NO: 5622409 - DNA, 25 bp, Homo sapien
cccatgtggctacaataggaagagc

SEQ ID NO: 5622410 - DNA, 25 bp, Homo sapien
gtaagtgaacagcctctatctttgc

SEQ ID NO: 5622411 - DNA, 25 bp, Homo sapien
cataaggctcattccaacatgccac

SEQ ID NO: 5622412 - DNA, 25 bp, Homo sapien
gtaagccatgttgaaatggctgtgc

SEQ ID NO: 5622413 - DNA, 25 bp, Homo sapien
tgcaaactcctgcgttagacagttc

SEQ ID NO: 5622414 - DNA, 25 bp, Homo sapien
gttcgggaataatgtacttggatca

SEQ ID NO: 5622415 - DNA, 25 bp, Homo sapien
gaatagatgaagttgagttgactac

SEQ ID NO: 5622416 - DNA, 25 bp, Homo sapien
ttagacagttctttggtgatccatc

SEQ ID NO: 5622417 - DNA, 25 bp, Homo sapien
tcttgcagaaaagtaggaatagatg

SEQ ID NO: 5622418 - DNA, 25 bp, Homo sapien
ttaccagaacaaatggccttctatc

SEQ ID NO: 5622419 - DNA, 25 bp, Homo sapien
ataagaagtaatgggagacaatctt

SEQ ID NO: 5622420 - DNA, 25 bp, Homo sapien
tgcaatagtgaagcagataagaagt

SEQ ID NO: 5622421 - DNA, 25 bp, Homo sapien
caccgcagcctctgcctcctggctc

SEQ ID NO: 5622422 - DNA, 25 bp, Homo sapien
taaatgactttagttggtgctcttc

SEQ ID NO: 5622423 - DNA, 25 bp, Homo sapien
ctttaaatgactttagttggtgctc

SEQ ID NO: 5622424 - DNA, 25 bp, Homo sapien
gttggtgctcttcttttcagtctca

SEQ ID NO: 5622425 - DNA, 25 bp, Homo sapien
ttcagtctcaccttatctctctctc

SEQ ID NO: 5622426 - DNA, 25 bp, Homo sapien
acaggctggacttgaactcttggcc

SEQ ID NO: 5622427 - DNA, 25 bp, Homo sapien
ggctggacttgaactcttggcctcc

SEQ ID NO: 5622428 - DNA, 25 bp, Homo sapien
gcagcctctgcctcctggctcaagc

SEQ ID NO: 5622429 - DNA, 25 bp, Homo sapien
tccatgttggacaggctggacttga

SEQ ID NO: 5622430 - DNA, 25 bp, Homo sapien
gctcaccgcagcctctgcctcctgg

SEQ ID NO: 5622431 - DNA, 25 bp, Homo sapien
atacccacttctttaaatgacttta

SEQ ID NO: 5622432 - DNA, 25 bp, Homo sapien
tggaatacagcctcccacctctatt

SEQ ID NO: 5622433 - DNA, 25 bp, Homo sapien
cccatgatagaaactgccttgcgct

SEQ ID NO: 5622434 - DNA, 25 bp, Homo sapien
acaaacttgggagtgagtgctcccg

SEQ ID NO: 5622435 - DNA, 25 bp, Homo sapien
tcttaggctaggctgcttttctggc

SEQ ID NO: 5622436 - DNA, 25 bp, Homo sapien
taatgatggttgtggtttccctgaa

SEQ ID NO: 5622437 - DNA, 25 bp, Homo sapien
ttctagtactagcctacctgtcacc

SEQ ID NO: 5622438 - DNA, 25 bp, Homo sapien
ctggcctgagtaatgatggttgtgg

SEQ ID NO: 5622439 - DNA, 25 bp, Homo sapien
ttccctgaagttcccagcggagagt

SEQ ID NO: 5622440 - DNA, 25 bp, Homo sapien
cagcggagagtcatcccatgataga

SEQ ID NO: 5622441 - DNA, 25 bp, Homo sapien
aatcagggatttctaccacagggtt

SEQ ID NO: 5622442 - DNA, 25 bp, Homo sapien
ttctggcagctgtctggcctgagta

SEQ ID NO: 5622443 - DNA, 25 bp, Homo sapien
tctggctccactgagatagggaaag

SEQ ID NO: 5622444 - DNA, 25 bp, Homo sapien
atatggcagcaaagtatctcatgtc

SEQ ID NO: 5622445 - DNA, 25 bp, Homo sapien
cactgagatagggaaagtatttctt

SEQ ID NO: 5622446 - DNA, 25 bp, Homo sapien
gacactaaggttcaacatcagattg

SEQ ID NO: 5622447 - DNA, 25 bp, Homo sapien
aaaacacagggaatgaatttcttat

SEQ ID NO: 5622448 - DNA, 25 bp, Homo sapien
atcacatccgaaatctgaaaggctg

SEQ ID NO: 5622449 - DNA, 25 bp, Homo sapien
acacagaggctatccggcaatcttt

SEQ ID NO: 5622450 - DNA, 25 bp, Homo sapien
atctctgtagctgacactaaggttc

SEQ ID NO: 5622451 - DNA, 25 bp, Homo sapien
ctaaaaatatggcagcaaagtatct

SEQ ID NO: 5622452 - DNA, 25 bp, Homo sapien
ccggcaatctttcaacgtggtaatc

SEQ ID NO: 5622453 - DNA, 25 bp, Homo sapien
ctgaaaggctgaaagtttgactatt

SEQ ID NO: 5622454 - DNA, 25 bp, Homo sapien
gtagtagatgaactttacgtggtac

SEQ ID NO: 5622455 - DNA, 25 bp, Homo sapien
agacatttgcagaggagtcagtgtg

SEQ ID NO: 5622456 - DNA, 25 bp, Homo sapien
tactctgcgatcaaacccccaactt

SEQ ID NO: 5622457 - DNA, 25 bp, Homo sapien
cccaacttgccccaagtggaggaac

SEQ ID NO: 5622458 - DNA, 25 bp, Homo sapien
actggaaataacaatgagttgtcat

SEQ ID NO: 5622459 - DNA, 25 bp, Homo sapien
atcgtgtggatgaaatgctacctta

SEQ ID NO: 5622460 - DNA, 25 bp, Homo sapien
ctccttggaacagatgctctgtgaa

SEQ ID NO: 5622461 - DNA, 25 bp, Homo sapien
aatctatgaacatcaaggtctcctt

SEQ ID NO: 5622462 - DNA, 25 bp, Homo sapien
caagttctggttaaagtagtagatg

SEQ ID NO: 5622463 - DNA, 25 bp, Homo sapien
agagtatctatacagtttgtgggct

SEQ ID NO: 5622464 - DNA, 25 bp, Homo sapien
ttgtgggctgcatcttgctagaata

SEQ ID NO: 5622465 - DNA, 25 bp, Homo sapien
cagtgacattcgggacccgcgaact

SEQ ID NO: 5622466 - DNA, 25 bp, Homo sapien
cccgcgaactagtgacttcggggat

SEQ ID NO: 5622467 - DNA, 25 bp, Homo sapien
ggataaacggtctacacggccattc

SEQ ID NO: 5622468 - DNA, 25 bp, Homo sapien
tcgctgcaggaagcctaagtgcaga

SEQ ID NO: 5622469 - DNA, 25 bp, Homo sapien
tggaggccaccaaactaccgactcc

SEQ ID NO: 5622470 - DNA, 25 bp, Homo sapien
gcaccttctgcagcagcgacgtgaa

SEQ ID NO: 5622471 - DNA, 25 bp, Homo sapien
tccgcctcagtggtccttgggaggg

SEQ ID NO: 5622472 - DNA, 25 bp, Homo sapien
tagccaccacgtgtggaggataaac

SEQ ID NO: 5622473 - DNA, 25 bp, Homo sapien
gatcgcagtcgccgcttcagtggct

SEQ ID NO: 5622474 - DNA, 25 bp, Homo sapien
tctcccgcagtgacttgagaagggt

SEQ ID NO: 5622475 - DNA, 25 bp, Homo sapien
gccactgccgcagcgtctctaggga

SEQ ID NO: 5622476 - DNA, 25 bp, Homo sapien
gtaaagaggctggcattcctcatcc

SEQ ID NO: 5622477 - DNA, 25 bp, Homo sapien
accctatgggtgtcaggatgataat

SEQ ID NO: 5622478 - DNA, 25 bp, Homo sapien
cccaacgctccagagagtccagtgg

SEQ ID NO: 5622479 - DNA, 25 bp, Homo sapien
agggaattaacctgcacacaaatgc

SEQ ID NO: 5622480 - DNA, 25 bp, Homo sapien
ctctgctgcctacttgctgtgccac

SEQ ID NO: 5622481 - DNA, 25 bp, Homo sapien
aatacttgcttgtaaagaggctggc

SEQ ID NO: 5622482 - DNA, 25 bp, Homo sapien
tcatctctagagcaaagaggacagg

SEQ ID NO: 5622483 - DNA, 25 bp, Homo sapien
aacagccctggactcgaagctggaa

SEQ ID NO: 5622484 - DNA, 25 bp, Homo sapien
ctcgtaccccccacagcctctccag

SEQ ID NO: 5622485 - DNA, 25 bp, Homo sapien
tcccactggatacacacatttaccc

SEQ ID NO: 5622486 - DNA, 25 bp, Homo sapien
gaagctggaaatggtttctagctcc

SEQ ID NO: 5622487 - DNA, 25 bp, Homo sapien
aagaaacccaagcagcagtcctggg

SEQ ID NO: 5622488 - DNA, 25 bp, Homo sapien
atgtaaaagaaacccaagcagcagt

SEQ ID NO: 5622489 - DNA, 25 bp, Homo sapien
taacagtcatttaacacaagacaca

SEQ ID NO: 5622490 - DNA, 25 bp, Homo sapien
cagcagaggattaacccatgcccat

SEQ ID NO: 5622491 - DNA, 25 bp, Homo sapien
tctaagcggtaaaaacccagcagag

SEQ ID NO: 5622492 - DNA, 25 bp, Homo sapien
gctgcaagtaacagagaactgaaat

SEQ ID NO: 5622493 - DNA, 25 bp, Homo sapien
gaggaagcgccatttgtctctcccc

SEQ ID NO: 5622494 - DNA, 25 bp, Homo sapien
cttgtctaagcggtaaaaacccagc

SEQ ID NO: 5622495 - DNA, 25 bp, Homo sapien
tttgttaggaattgctcttggctgc

SEQ ID NO: 5622496 - DNA, 25 bp, Homo sapien
ggaattgctcttggctgcaagtaac

SEQ ID NO: 5622497 - DNA, 25 bp, Homo sapien
catgcccatggtatttgaaactata

SEQ ID NO: 5622498 - DNA, 25 bp, Homo sapien
agtggataatagttgctcgagctcg

SEQ ID NO: 5622499 - DNA, 25 bp, Homo sapien
tttacccatatccgggctagagagg

SEQ ID NO: 5622500 - DNA, 25 bp, Homo sapien
tcagctagtcgtttatttacccata

SEQ ID NO: 5622501 - DNA, 25 bp, Homo sapien
gtccagtccgcgttttgcgagtgcg

SEQ ID NO: 5622502 - DNA, 25 bp, Homo sapien
cgagcgaagtggataatagttgctc

SEQ ID NO: 5622503 - DNA, 25 bp, Homo sapien
gcccgctgcctctcaagccatgctg

SEQ ID NO: 5622504 - DNA, 25 bp, Homo sapien
tccgcgttttgcgagtgcgcgggag

SEQ ID NO: 5622505 - DNA, 25 bp, Homo sapien
ggacgagtccagtccgcgttttgcg

SEQ ID NO: 5622506 - DNA, 25 bp, Homo sapien
ctcgcccgctgcctctcaagccatg

SEQ ID NO: 5622507 - DNA, 25 bp, Homo sapien
gcccgataggctcagctagtcgttt

SEQ ID NO: 5622508 - DNA, 25 bp, Homo sapien
acccatatccgggctagagaggaaa

SEQ ID NO: 5622509 - DNA, 25 bp, Homo sapien
tgtgtggaggcttaagcaatcttgg

SEQ ID NO: 5622510 - DNA, 25 bp, Homo sapien
ggtgccccacttctgtgtggaggct

SEQ ID NO: 5622511 - DNA, 25 bp, Homo sapien
tcagaaataagaaactagggcctgg

SEQ ID NO: 5622512 - DNA, 25 bp, Homo sapien
ttatggtaactgtagaagctttgcc

SEQ ID NO: 5622513 - DNA, 25 bp, Homo sapien
gggcctggctctggttgttgttcag

SEQ ID NO: 5622514 - DNA, 25 bp, Homo sapien
tcaggctaaaaccagtaaagtgaat

SEQ ID NO: 5622515 - DNA, 25 bp, Homo sapien
agtggctacatagatgggcaaactt

SEQ ID NO: 5622516 - DNA, 25 bp, Homo sapien
acagcaggcaaataaggtgtgtttt

SEQ ID NO: 5622517 - DNA, 25 bp, Homo sapien
gctttgccagtgctgtccaaggtgc

SEQ ID NO: 5622518 - DNA, 25 bp, Homo sapien
gatgggcaaactttaccagtgcaga

SEQ ID NO: 5622519 - DNA, 25 bp, Homo sapien
cagtaaatacactgaggggatgaaa

SEQ ID NO: 5622520 - DNA, 25 bp, Homo sapien
aaggtcaagaacttaaaagagattc

SEQ ID NO: 5622521 - DNA, 25 bp, Homo sapien
caaagatgatgatgtccatgctaag

SEQ ID NO: 5622522 - DNA, 25 bp, Homo sapien
tacagatactagatggaatcatgaa

SEQ ID NO: 5622523 - DNA, 25 bp, Homo sapien
aaaccacttagtgtgcagagaagga

SEQ ID NO: 5622524 - DNA, 25 bp, Homo sapien
ccatgctaaggtgtctctgagaggt

SEQ ID NO: 5622525 - DNA, 25 bp, Homo sapien
gtggttggtacgatgaacagaaata

SEQ ID NO: 5622526 - DNA, 25 bp, Homo sapien
ggcaaactgagcagatttggctggg

SEQ ID NO: 5622527 - DNA, 25 bp, Homo sapien
ggggaacattaaagagtcaaagatg

SEQ ID NO: 5622528 - DNA, 25 bp, Homo sapien
tattcaagagagattaccaaggtaa

SEQ ID NO: 5622529 - DNA, 25 bp, Homo sapien
taaaataagacccggcaaactgagc

SEQ ID NO: 5622530 - DNA, 25 bp, Homo sapien
taagaagtgatgtgagagtagttct

SEQ ID NO: 5622531 - DNA, 25 bp, Homo sapien
ttataagtagaatgtattaactaga

SEQ ID NO: 5622532 - DNA, 25 bp, Homo sapien
caaatttcaaatgccaagacctatt

SEQ ID NO: 5622533 - DNA, 25 bp, Homo sapien
attgatacacctgctagactaacac

SEQ ID NO: 5622534 - DNA, 25 bp, Homo sapien
atagcaaaaatgtcatgtttgtgat

SEQ ID NO: 5622535 - DNA, 25 bp, Homo sapien
tttcaatgtagcagtaaaagctagc

SEQ ID NO: 5622536 - DNA, 25 bp, Homo sapien
gttaggtatgctcattatgtcaatt

SEQ ID NO: 5622537 - DNA, 25 bp, Homo sapien
attgcaaattagatatttaaggatc

SEQ ID NO: 5622538 - DNA, 25 bp, Homo sapien
tttcattgatacacctgctagacta

SEQ ID NO: 5622539 - DNA, 25 bp, Homo sapien
tagaataaatttgttaggtatgctc

SEQ ID NO: 5622540 - DNA, 25 bp, Homo sapien
tagactaacactaaaaagtaattgc

SEQ ID NO: 5622541 - DNA, 25 bp, Homo sapien
caatgtagcagtaaaagctagcaat

SEQ ID NO: 5622542 - DNA, 25 bp, Homo sapien
ggtcagagataagaagtccaaccca

SEQ ID NO: 5622543 - DNA, 25 bp, Homo sapien
aagcagaaacagctctcaaagtaac

SEQ ID NO: 5622544 - DNA, 25 bp, Homo sapien
ctagaggtaagtcagtagctccact

SEQ ID NO: 5622545 - DNA, 25 bp, Homo sapien
attcagccatacctaaaaacccctc

SEQ ID NO: 5622546 - DNA, 25 bp, Homo sapien
aacccaaagtgaactcttctgcctc

SEQ ID NO: 5622547 - DNA, 25 bp, Homo sapien
taaaaacccctcacagctgctgcca

SEQ ID NO: 5622548 - DNA, 25 bp, Homo sapien
ttttgaaaagtaggctacaggcctc

SEQ ID NO: 5622549 - DNA, 25 bp, Homo sapien
ctaggattatccaggaggatgacct

SEQ ID NO: 5622550 - DNA, 25 bp, Homo sapien
gtctggtcttagggcttcatagaga

SEQ ID NO: 5622551 - DNA, 25 bp, Homo sapien
gtgtacagtgctaggttaacccaaa

SEQ ID NO: 5622552 - DNA, 25 bp, Homo sapien
tggctttcttagttcagggggtctc

SEQ ID NO: 5622553 - DNA, 25 bp, Homo sapien
agggctatgacatgaaccatgaagt

SEQ ID NO: 5622554 - DNA, 25 bp, Homo sapien
gatgggctcttgctgttatccagtc

SEQ ID NO: 5622555 - DNA, 25 bp, Homo sapien
atacagttgactttaaggaatattt

SEQ ID NO: 5622556 - DNA, 25 bp, Homo sapien
aaaagaaaacaaaaatcacaatgaa

SEQ ID NO: 5622557 - DNA, 25 bp, Homo sapien
ctaaaatggattcaaatggactaac

SEQ ID NO: 5622558 - DNA, 25 bp, Homo sapien
ctcaagctatcctcctgcttcagcc

SEQ ID NO: 5622559 - DNA, 25 bp, Homo sapien
gttatccagtctggagtacagtggt

SEQ ID NO: 5622560 - DNA, 25 bp, Homo sapien
ttgatacaatgataaaaagaaaaca

SEQ ID NO: 5622561 - DNA, 25 bp, Homo sapien
ttcattctctagggctatgacatga

SEQ ID NO: 5622562 - DNA, 25 bp, Homo sapien
aatcacaatgaaatacagttgactt

SEQ ID NO: 5622563 - DNA, 25 bp, Homo sapien
ttttaaaagatgggctcttgctgtt

SEQ ID NO: 5622564 - DNA, 25 bp, Homo sapien
caaccgacgcatccgtcccacttga

SEQ ID NO: 5622565 - DNA, 25 bp, Homo sapien
tcaagtgggacggatgcgtcggttg

SEQ ID NO: 5622566 - DNA, 25 bp, Homo sapien
caccctcggtgggagccaaccgacg

SEQ ID NO: 5622567 - DNA, 25 bp, Homo sapien
cgtcggttggctcccaccgagggtg

SEQ ID NO: 5622568 - DNA, 25 bp, Homo sapien
tgtaccagcctgcattgttttaagc

SEQ ID NO: 5622569 - DNA, 25 bp, Homo sapien
actaagtatgtggtactgtgtcagc

SEQ ID NO: 5622570 - DNA, 25 bp, Homo sapien
cttccagactaagggtagtgttttg

SEQ ID NO: 5622571 - DNA, 25 bp, Homo sapien
gaagaagtgtgttcaaatctctatc

SEQ ID NO: 5622572 - DNA, 25 bp, Homo sapien
tcttatcaaaagtcagtgtagctac

SEQ ID NO: 5622573 - DNA, 25 bp, Homo sapien
tcgcctggttattattcgcctggtg

SEQ ID NO: 5622574 - DNA, 25 bp, Homo sapien
ctaagggtagtgttttgaatttctc

SEQ ID NO: 5622575 - DNA, 25 bp, Homo sapien
tattcgcctggtgtatcttttagcc

SEQ ID NO: 5622576 - DNA, 25 bp, Homo sapien
ggtactgtgtcagcagcaataggaa

SEQ ID NO: 5622577 - DNA, 25 bp, Homo sapien
ttttagccatcccctgtgccgaatt

SEQ ID NO: 5622578 - DNA, 25 bp, Homo sapien
aaaagtcagtgtagctactctggtt

SEQ ID NO: 5622579 - DNA, 25 bp, Homo sapien
gatgtaagcaaaatcagcccaataa

SEQ ID NO: 5622580 - DNA, 25 bp, Homo sapien
atgatggctggaacatccatcccag

SEQ ID NO: 5622581 - DNA, 25 bp, Homo sapien
tatgatatagtaatggcgtagtttt

SEQ ID NO: 5622582 - DNA, 25 bp, Homo sapien
aagtaggctaaaggaacaatattta

SEQ ID NO: 5622583 - DNA, 25 bp, Homo sapien
gactacatgtcactaacaggaaaat

SEQ ID NO: 5622584 - DNA, 25 bp, Homo sapien
cttggataaattggaagctgcagga

SEQ ID NO: 5622585 - DNA, 25 bp, Homo sapien
ttttggaccttatgatggctggaac

SEQ ID NO: 5622586 - DNA, 25 bp, Homo sapien
tcagcccaataacgtggacttctcc

SEQ ID NO: 5622587 - DNA, 25 bp, Homo sapien
attgactagaacagacttttgaaca

SEQ ID NO: 5622588 - DNA, 25 bp, Homo sapien
ggcctgagtatcacgtgacatttct

SEQ ID NO: 5622589 - DNA, 25 bp, Homo sapien
tactagaacaaagggactacatgtc

SEQ ID NO: 5622590 - DNA, 25 bp, Homo sapien
ggcttcttgtgttcacaggatggcc

SEQ ID NO: 5622591 - DNA, 25 bp, Homo sapien
attcagacttgtgtgagaaacttgc

SEQ ID NO: 5622592 - DNA, 25 bp, Homo sapien
cattagttccttgatggctgaaatc

SEQ ID NO: 5622593 - DNA, 25 bp, Homo sapien
tgaatgagctgtgcacattacaaac

SEQ ID NO: 5622594 - DNA, 25 bp, Homo sapien
atatgaaatcttttgggaagtaaat

SEQ ID NO: 5622595 - DNA, 25 bp, Homo sapien
ttggaagaacttgggctccagagtt

SEQ ID NO: 5622596 - DNA, 25 bp, Homo sapien
tagttgagccaaaaagatgaatgag

SEQ ID NO: 5622597 - DNA, 25 bp, Homo sapien
tgctccacagctcaacattagttcc

SEQ ID NO: 5622598 - DNA, 25 bp, Homo sapien
atcttgagctttcagggcttcttgt

SEQ ID NO: 5622599 - DNA, 25 bp, Homo sapien
tttggcatatgtaagattcagactt

SEQ ID NO: 5622600 - DNA, 25 bp, Homo sapien
gtgtgagaaacttgcatatgaaatc

SEQ ID NO: 5622601 - DNA, 25 bp, Homo sapien
ggcctgagttgtctaaagtcagtgc

SEQ ID NO: 5622602 - DNA, 25 bp, Homo sapien
atgagggaattaaagtgactgattt

SEQ ID NO: 5622603 - DNA, 25 bp, Homo sapien
aatataacccaagtaggtatctttc

SEQ ID NO: 5622604 - DNA, 25 bp, Homo sapien
taagagcagtgactattagatttga

SEQ ID NO: 5622605 - DNA, 25 bp, Homo sapien
tcgttgtgcacatcatacccttgac

SEQ ID NO: 5622606 - DNA, 25 bp, Homo sapien
ttgacttgttttggcctgagttgtc

SEQ ID NO: 5622607 - DNA, 25 bp, Homo sapien
cattttggagtttaagagcagtgac

SEQ ID NO: 5622608 - DNA, 25 bp, Homo sapien
atttcagttagatcgttgtgcacat

SEQ ID NO: 5622609 - DNA, 25 bp, Homo sapien
ttgaagatacgggtacattttggag

SEQ ID NO: 5622610 - DNA, 25 bp, Homo sapien
tgtaaaaatgagggaattaaagtga

SEQ ID NO: 5622611 - DNA, 25 bp, Homo sapien
agggtagttgcatatttcaagggta

SEQ ID NO: 5622612 - DNA, 25 bp, Homo sapien
ttagatatgactatagaaagtagtt

SEQ ID NO: 5622613 - DNA, 25 bp, Homo sapien
catggtgctcaaatgtttatgaaca

SEQ ID NO: 5622614 - DNA, 25 bp, Homo sapien
atgttattgtctatggtaaagtctt

SEQ ID NO: 5622615 - DNA, 25 bp, Homo sapien
atgtattgaagattttggccaaaaa

SEQ ID NO: 5622616 - DNA, 25 bp, Homo sapien
tgttataaatagaaagacaggtatt

SEQ ID NO: 5622617 - DNA, 25 bp, Homo sapien
agaaagtagttatagggtattttga

SEQ ID NO: 5622618 - DNA, 25 bp, Homo sapien
tgtggtatatataagaaaatagtac

SEQ ID NO: 5622619 - DNA, 25 bp, Homo sapien
cattctttggtgctgataaaactgc

SEQ ID NO: 5622620 - DNA, 25 bp, Homo sapien
aaaattggtaagacaaaaatatgat

SEQ ID NO: 5622621 - DNA, 25 bp, Homo sapien
ataatacatgtttgccattgtggta
